United States Patent Application Publication US 2014/0004565 A1 - sequence listing, part 120

SEQ ID NO: 3010347 - RNA, 19 nt, Artificial Sequence
  Description of Artificial Sequence: Synthetic oligonucleotide
ucccucuucucuuugagca

SEQ ID NO: 3010348 - RNA, 19 nt, Artificial Sequence
  Description of Artificial Sequence: Synthetic oligonucleotide
uagcuaaaaucuucuuugg

SEQ ID NO: 3010349 - RNA, 19 nt, Artificial Sequence
  Description of Artificial Sequence: Synthetic oligonucleotide
acuccuugcuggcuuaagc

SEQ ID NO: 3010350 - RNA, 19 nt, Artificial Sequence
  Description of Artificial Sequence: Synthetic oligonucleotide
ucaggagagcucuucauga

SEQ ID NO: 3010351 - RNA, 19 nt, Artificial Sequence
  Description of Artificial Sequence: Synthetic oligonucleotide
ugagaccacuccuugcugg

SEQ ID NO: 3010352 - RNA, 19 nt, Artificial Sequence
  Description of Artificial Sequence: Synthetic oligonucleotide
gguaauauaucugagagaa

SEQ ID NO: 3010353 - RNA, 19 nt, Artificial Sequence
  Description of Artificial Sequence: Synthetic oligonucleotide
agugcuuucuugguuuugc

SEQ ID NO: 3010354 - RNA, 19 nt, Artificial Sequence
  Description of Artificial Sequence: Synthetic oligonucleotide
uuugagcauuuucagguac

SEQ ID NO: 3010355 - RNA, 19 nt, Artificial Sequence
  Description of Artificial Sequence: Synthetic oligonucleotide
gaacaaagaguuccguggc

SEQ ID NO: 3010356 - RNA, 19 nt, Artificial Sequence
  Description of Artificial Sequence: Synthetic oligonucleotide
aauauaucugagagaaacu

SEQ ID NO: 3010357 - RNA, 19 nt, Artificial Sequence
  Description of Artificial Sequence: Synthetic oligonucleotide
uuucagguacuuacuagcu

SEQ ID NO: 3010358 - RNA, 19 nt, Artificial Sequence
  Description of Artificial Sequence: Synthetic oligonucleotide
uaucugagagaaacugaag

SEQ ID NO: 3010359 - RNA, 19 nt, Artificial Sequence
  Description of Artificial Sequence: Synthetic oligonucleotide
ucuugguuuugccacugcc

SEQ ID NO: 3010360 - RNA, 19 nt, Artificial Sequence
  Description of Artificial Sequence: Synthetic oligonucleotide
uugguuuugccacugccgu

SEQ ID NO: 3010361 - RNA, 19 nt, Artificial Sequence
  Description of Artificial Sequence: Synthetic oligonucleotide
uauucuugcaccugcucac

SEQ ID NO: 3010362 - RNA, 19 nt, Artificial Sequence
  Description of Artificial Sequence: Synthetic oligonucleotide
aacuucaccaaugucacuu

SEQ ID NO: 3010363 - RNA, 19 nt, Artificial Sequence
  Description of Artificial Sequence: Synthetic oligonucleotide
ugcagugcuggcuaaguca

SEQ ID NO: 3010364 - RNA, 19 nt, Artificial Sequence
  Description of Artificial Sequence: Synthetic oligonucleotide
ugagagaaacugaagggua

SEQ ID NO: 3010365 - RNA, 19 nt, Artificial Sequence
  Description of Artificial Sequence: Synthetic oligonucleotide
cucuuugagcauuuucagg

SEQ ID NO: 3010366 - RNA, 19 nt, Artificial Sequence
  Description of Artificial Sequence: Synthetic oligonucleotide
ggaacagguggcuagauac

SEQ ID NO: 3010367 - RNA, 19 nt, Artificial Sequence
  Description of Artificial Sequence: Synthetic oligonucleotide
cuuugguaauauaucugag

SEQ ID NO: 3010368 - RNA, 19 nt, Artificial Sequence
  Description of Artificial Sequence: Synthetic oligonucleotide
cugaaggguacucugaguc

SEQ ID NO: 3010369 - RNA, 19 nt, Artificial Sequence
  Description of Artificial Sequence: Synthetic oligonucleotide
agauacugaacaaagaguu

SEQ ID NO: 3010370 - RNA, 19 nt, Artificial Sequence
  Description of Artificial Sequence: Synthetic oligonucleotide
ugaugcuggacaccucagg

SEQ ID NO: 3010371 - RNA, 19 nt, Artificial Sequence
  Description of Artificial Sequence: Synthetic oligonucleotide
cuaagucacuguaugucag

SEQ ID NO: 3010372 - RNA, 19 nt, Artificial Sequence
  Description of Artificial Sequence: Synthetic oligonucleotide
acuagcuaaaaucuucuuu

SEQ ID NO: 3010373 - RNA, 19 nt, Artificial Sequence
  Description of Artificial Sequence: Synthetic oligonucleotide
aaaucuucuuugguaauau

SEQ ID NO: 3010374 - RNA, 19 nt, Artificial Sequence
  Description of Artificial Sequence: Synthetic oligonucleotide
ugguaauauaucugagaga

SEQ ID NO: 3010375 - RNA, 19 nt, Artificial Sequence
  Description of Artificial Sequence: Synthetic oligonucleotide
cuccuugcuggcuuaagcc

SEQ ID NO: 3010376 - RNA, 19 nt, Artificial Sequence
  Description of Artificial Sequence: Synthetic oligonucleotide
ugaaggguacucugagucc

SEQ ID NO: 3010377 - RNA, 19 nt, Artificial Sequence
  Description of Artificial Sequence: Synthetic oligonucleotide
cugaacaaagaguuccgug

SEQ ID NO: 3010378 - RNA, 19 nt, Artificial Sequence
  Description of Artificial Sequence: Synthetic oligonucleotide
uaagccagaacuucaccaa

SEQ ID NO: 3010379 - RNA, 19 nt, Artificial Sequence
  Description of Artificial Sequence: Synthetic oligonucleotide
ugcagugcccaccacugcc

SEQ ID NO: 3010380 - RNA, 19 nt, Artificial Sequence
  Description of Artificial Sequence: Synthetic oligonucleotide
gaugcuggacaccucagga

SEQ ID NO: 3010381 - RNA, 19 nt, Artificial Sequence
  Description of Artificial Sequence: Synthetic oligonucleotide
uuugccacugccgugucug

SEQ ID NO: 3010382 - RNA, 19 nt, Artificial Sequence
  Description of Artificial Sequence: Synthetic oligonucleotide
cuuaagccagaacuucacc

SEQ ID NO: 3010383 - RNA, 19 nt, Artificial Sequence
  Description of Artificial Sequence: Synthetic oligonucleotide
aaaaucuucuuugguaaua

SEQ ID NO: 3010384 - RNA, 19 nt, Artificial Sequence
  Description of Artificial Sequence: Synthetic oligonucleotide
gguggcuagauacugaaca

SEQ ID NO: 3010385 - RNA, 19 nt, Artificial Sequence
  Description of Artificial Sequence: Synthetic oligonucleotide
gugagucuauucuugcacc

SEQ ID NO: 3010386 - RNA, 19 nt, Artificial Sequence
  Description of Artificial Sequence: Synthetic oligonucleotide
cuggcuaagucacuguaug

SEQ ID NO: 3010387 - RNA, 19 nt, Artificial Sequence
  Description of Artificial Sequence: Synthetic oligonucleotide
aagucacuguaugucagug

SEQ ID NO: 3010388 - RNA, 19 nt, Artificial Sequence
  Description of Artificial Sequence: Synthetic oligonucleotide
uugagcauuuucagguacu

SEQ ID NO: 3010389 - RNA, 19 nt, Artificial Sequence
  Description of Artificial Sequence: Synthetic oligonucleotide
ugagucuauucuugcaccu

SEQ ID NO: 3010390 - RNA, 19 nt, Artificial Sequence
  Description of Artificial Sequence: Synthetic oligonucleotide
agcuaaaaucuucuuuggu

SEQ ID NO: 3010391 - RNA, 19 nt, Artificial Sequence
  Description of Artificial Sequence: Synthetic oligonucleotide
aagaguuccguggccuugg

SEQ ID NO: 3010392 - RNA, 19 nt, Artificial Sequence
  Description of Artificial Sequence: Synthetic oligonucleotide
gagcucuucaugaugacuc

SEQ ID NO: 3010393 - RNA, 19 nt, Artificial Sequence
  Description of Artificial Sequence: Synthetic oligonucleotide
cugcucaccaggcugagac

SEQ ID NO: 3010394 - RNA, 19 nt, Artificial Sequence
  Description of Artificial Sequence: Synthetic oligonucleotide
uacucugaguccucugcag

SEQ ID NO: 3010395 - RNA, 19 nt, Artificial Sequence
  Description of Artificial Sequence: Synthetic oligonucleotide
agcucuucaugaugacucg

SEQ ID NO: 3010396 - RNA, 19 nt, Artificial Sequence
  Description of Artificial Sequence: Synthetic oligonucleotide
ugcuuucuugguuuugcca

SEQ ID NO: 3010397 - RNA, 19 nt, Artificial Sequence
  Description of Artificial Sequence: Synthetic oligonucleotide
guugaugcuggacaccuca

SEQ ID NO: 3010398 - RNA, 19 nt, Artificial Sequence
  Description of Artificial Sequence: Synthetic oligonucleotide
auaucugagagaaacugaa

SEQ ID NO: 3010399 - RNA, 19 nt, Artificial Sequence
  Description of Artificial Sequence: Synthetic oligonucleotide
uaaaaucuucuuugguaau

SEQ ID NO: 3010400 - RNA, 19 nt, Artificial Sequence
  Description of Artificial Sequence: Synthetic oligonucleotide
ucuucaugaugacucggau

SEQ ID NO: 3010401 - RNA, 19 nt, Artificial Sequence
  Description of Artificial Sequence: Synthetic oligonucleotide
ugccgugucuguaggaaca

SEQ ID NO: 3010402 - RNA, 19 nt, Artificial Sequence
  Description of Artificial Sequence: Synthetic oligonucleotide
ucuauucuugcaccugcuc

SEQ ID NO: 3010403 - RNA, 19 nt, Artificial Sequence
  Description of Artificial Sequence: Synthetic oligonucleotide
cuauucuugcaccugcuca

SEQ ID NO: 3010404 - RNA, 19 nt, Artificial Sequence
  Description of Artificial Sequence: Synthetic oligonucleotide
cuucuuugguaauauaucu

SEQ ID NO: 3010405 - RNA, 19 nt, Artificial Sequence
  Description of Artificial Sequence: Synthetic oligonucleotide
ucuugcaccugcucaccag

SEQ ID NO: 3010406 - RNA, 19 nt, Artificial Sequence
  Description of Artificial Sequence: Synthetic oligonucleotide
uaagucacuguaugucagu

SEQ ID NO: 3010407 - RNA, 19 nt, Artificial Sequence
  Description of Artificial Sequence: Synthetic oligonucleotide
uguaugucagugcuuucuu

SEQ ID NO: 3010408 - RNA, 19 nt, Artificial Sequence
  Description of Artificial Sequence: Synthetic oligonucleotide
aggagagcucuucaugaug

SEQ ID NO: 3010409 - RNA, 19 nt, Artificial Sequence
  Description of Artificial Sequence: Synthetic oligonucleotide
accacugcccagcugugag

SEQ ID NO: 3010410 - RNA, 19 nt, Artificial Sequence
  Description of Artificial Sequence: Synthetic oligonucleotide
gagagaaacugaaggguac

SEQ ID NO: 3010411 - RNA, 19 nt, Artificial Sequence
  Description of Artificial Sequence: Synthetic oligonucleotide
gauacugaacaaagaguuc

SEQ ID NO: 3010412 - RNA, 19 nt, Artificial Sequence
  Description of Artificial Sequence: Synthetic oligonucleotide
cucaggagagcucuucaug

SEQ ID NO: 3010413 - RNA, 19 nt, Artificial Sequence
  Description of Artificial Sequence: Synthetic oligonucleotide
aaagaguuccguggccuug

SEQ ID NO: 3010414 - RNA, 19 nt, Artificial Sequence
  Description of Artificial Sequence: Synthetic oligonucleotide
aaacugaaggguacucuga

SEQ ID NO: 3010415 - RNA, 19 nt, Artificial Sequence
  Description of Artificial Sequence: Synthetic oligonucleotide
gcuaaaaucuucuuuggua

SEQ ID NO: 3010416 - RNA, 19 nt, Artificial Sequence
  Description of Artificial Sequence: Synthetic oligonucleotide
agaaacugaaggguacucu

SEQ ID NO: 3010417 - RNA, 19 nt, Artificial Sequence
  Description of Artificial Sequence: Synthetic oligonucleotide
uucagguacuuacuagcua

SEQ ID NO: 3010418 - RNA, 19 nt, Artificial Sequence
  Description of Artificial Sequence: Synthetic oligonucleotide
acaaagaguuccguggccu

SEQ ID NO: 3010419 - RNA, 19 nt, Artificial Sequence
  Description of Artificial Sequence: Synthetic oligonucleotide
ggcuagauacugaacaaag

SEQ ID NO: 3010420 - RNA, 19 nt, Artificial Sequence
  Description of Artificial Sequence: Synthetic oligonucleotide
aagccagaacuucaccaau

SEQ ID NO: 3010421 - RNA, 19 nt, Artificial Sequence
  Description of Artificial Sequence: Synthetic oligonucleotide
agugcuggcuaagucacug

SEQ ID NO: 3010422 - RNA, 19 nt, Artificial Sequence
  Description of Artificial Sequence: Synthetic oligonucleotide
gguacucugaguccucugc

SEQ ID NO: 3010423 - RNA, 19 nt, Artificial Sequence
  Description of Artificial Sequence: Synthetic oligonucleotide
ucugaguccucugcagugc

SEQ ID NO: 3010424 - RNA, 19 nt, Artificial Sequence
  Description of Artificial Sequence: Synthetic oligonucleotide
gucacuguaugucagugcu

SEQ ID NO: 3010425 - RNA, 19 nt, Artificial Sequence
  Description of Artificial Sequence: Synthetic oligonucleotide
gagaccacuccuugcuggc

SEQ ID NO: 3010426 - RNA, 19 nt, Artificial Sequence
  Description of Artificial Sequence: Synthetic oligonucleotide
gcuggcuuaagccagaacu

SEQ ID NO: 3010427 - RNA, 19 nt, Artificial Sequence
  Description of Artificial Sequence: Synthetic oligonucleotide
acuguaugucagugcuuuc

SEQ ID NO: 3010428 - RNA, 19 nt, Artificial Sequence
  Description of Artificial Sequence: Synthetic oligonucleotide
ucacuuucaccaucgucau

SEQ ID NO: 3010429 - RNA, 19 nt, Artificial Sequence
  Description of Artificial Sequence: Synthetic oligonucleotide
acugaaggguacucugagu

SEQ ID NO: 3010430 - RNA, 19 nt, Artificial Sequence
  Description of Artificial Sequence: Synthetic oligonucleotide
uccucugcagugcuggcua

SEQ ID NO: 3010431 - RNA, 19 nt, Artificial Sequence
  Description of Artificial Sequence: Synthetic oligonucleotide
uucuugcaccugcucacca

SEQ ID NO: 3010432 - RNA, 19 nt, Artificial Sequence
  Description of Artificial Sequence: Synthetic oligonucleotide
ucuguaggaacagguggcu

SEQ ID NO: 3010433 - RNA, 19 nt, Artificial Sequence
  Description of Artificial Sequence: Synthetic oligonucleotide
uggcuaagucacuguaugu

SEQ ID NO: 3010434 - RNA, 19 nt, Artificial Sequence
  Description of Artificial Sequence: Synthetic oligonucleotide
agagaaacugaaggguacu

SEQ ID NO: 3010435 - RNA, 19 nt, Artificial Sequence
  Description of Artificial Sequence: Synthetic oligonucleotide
augucagugcuuucuuggu

SEQ ID NO: 3010436 - RNA, 19 nt, Artificial Sequence
  Description of Artificial Sequence: Synthetic oligonucleotide
ugcuggcuaagucacugua

SEQ ID NO: 3010437 - RNA, 19 nt, Artificial Sequence
  Description of Artificial Sequence: Synthetic oligonucleotide
gcuaagucacuguauguca

SEQ ID NO: 3010438 - RNA, 19 nt, Artificial Sequence
  Description of Artificial Sequence: Synthetic oligonucleotide
agaguuccguggccuuggc

SEQ ID NO: 3010439 - RNA, 19 nt, Artificial Sequence
  Description of Artificial Sequence: Synthetic oligonucleotide
guggccuuggccgugagca

SEQ ID NO: 3010440 - RNA, 19 nt, Artificial Sequence
  Description of Artificial Sequence: Synthetic oligonucleotide
caaugucacuuucaccauc

SEQ ID NO: 3010441 - RNA, 19 nt, Artificial Sequence
  Description of Artificial Sequence: Synthetic oligonucleotide
uugcaccugcucaccaggc

SEQ ID NO: 3010442 - RNA, 19 nt, Artificial Sequence
  Description of Artificial Sequence: Synthetic oligonucleotide
cucuucaugaugacucgga

SEQ ID NO: 3010443 - RNA, 19 nt, Artificial Sequence
  Description of Artificial Sequence: Synthetic oligonucleotide
gagucuauucuugcaccug

SEQ ID NO: 3010444 - RNA, 19 nt, Artificial Sequence
  Description of Artificial Sequence: Synthetic oligonucleotide
acugaacaaagaguuccgu

SEQ ID NO: 3010445 - RNA, 19 nt, Artificial Sequence
  Description of Artificial Sequence: Synthetic oligonucleotide
uggcuuaagccagaacuuc

SEQ ID NO: 3010446 - RNA, 19 nt, Artificial Sequence
  Description of Artificial Sequence: Synthetic oligonucleotide
uggcuagauacugaacaaa

SEQ ID NO: 3010447 - RNA, 19 nt, Artificial Sequence
  Description of Artificial Sequence: Synthetic oligonucleotide
cauuuucagguacuuacua

SEQ ID NO: 3010448 - RNA, 19 nt, Artificial Sequence
  Description of Artificial Sequence: Synthetic oligonucleotide
agcugugagucuauucuug

SEQ ID NO: 3010449 - RNA, 19 nt, Artificial Sequence
  Description of Artificial Sequence: Synthetic oligonucleotide
ugguuuugccacugccgug

SEQ ID NO: 3010450 - RNA, 19 nt, Artificial Sequence
  Description of Artificial Sequence: Synthetic oligonucleotide
gagaaacugaaggguacuc

SEQ ID NO: 3010451 - RNA, 19 nt, Artificial Sequence
  Description of Artificial Sequence: Synthetic oligonucleotide
agagcucuucaugaugacu

SEQ ID NO: 3010452 - RNA, 19 nt, Artificial Sequence
  Description of Artificial Sequence: Synthetic oligonucleotide
ucugcagugcuggcuaagu

SEQ ID NO: 3010453 - RNA, 19 nt, Artificial Sequence
  Description of Artificial Sequence: Synthetic oligonucleotide
uacuagcuaaaaucuucuu

SEQ ID NO: 3010454 - RNA, 19 nt, Artificial Sequence
  Description of Artificial Sequence: Synthetic oligonucleotide
gugcuuucuugguuuugcc

SEQ ID NO: 3010455 - RNA, 19 nt, Artificial Sequence
  Description of Artificial Sequence: Synthetic oligonucleotide
gcugugagucuauucuugc

SEQ ID NO: 3010456 - RNA, 19 nt, Artificial Sequence
  Description of Artificial Sequence: Synthetic oligonucleotide
accucaggagagcucuuca

SEQ ID NO: 3010457 - RNA, 19 nt, Artificial Sequence
  Description of Artificial Sequence: Synthetic oligonucleotide
uuuugccacugccgugucu

SEQ ID NO: 3010458 - RNA, 19 nt, Artificial Sequence
  Description of Artificial Sequence: Synthetic oligonucleotide
aggcugagaccacuccuug

SEQ ID NO: 3010459 - RNA, 19 nt, Artificial Sequence
  Description of Artificial Sequence: Synthetic oligonucleotide
guacucugaguccucugca

SEQ ID NO: 3010460 - RNA, 19 nt, Artificial Sequence
  Description of Artificial Sequence: Synthetic oligonucleotide
gagagcucuucaugaugac

SEQ ID NO: 3010461 - RNA, 19 nt, Artificial Sequence
  Description of Artificial Sequence: Synthetic oligonucleotide
aaggguacucugaguccuc

SEQ ID NO: 3010462 - RNA, 19 nt, Artificial Sequence
  Description of Artificial Sequence: Synthetic oligonucleotide
ggagagcucuucaugauga

SEQ ID NO: 3010463 - RNA, 19 nt, Artificial Sequence
  Description of Artificial Sequence: Synthetic oligonucleotide
gaaggguacucugaguccu

SEQ ID NO: 3010464 - RNA, 19 nt, Artificial Sequence
  Description of Artificial Sequence: Synthetic oligonucleotide
gacaccucaggagagcucu

SEQ ID NO: 3010465 - RNA, 19 nt, Artificial Sequence
  Description of Artificial Sequence: Synthetic oligonucleotide
ggcuaagucacuguauguc

SEQ ID NO: 3010466 - RNA, 19 nt, Artificial Sequence
  Description of Artificial Sequence: Synthetic oligonucleotide
agccagaacuucaccaaug

SEQ ID NO: 3010467 - RNA, 19 nt, Artificial Sequence
  Description of Artificial Sequence: Synthetic oligonucleotide
gguacuuacuagcuaaaau

SEQ ID NO: 3010468 - RNA, 19 nt, Artificial Sequence
  Description of Artificial Sequence: Synthetic oligonucleotide
gaguuccguggccuuggcc

SEQ ID NO: 3010469 - RNA, 19 nt, Artificial Sequence
  Description of Artificial Sequence: Synthetic oligonucleotide
acuuacuagcuaaaaucuu

SEQ ID NO: 3010470 - RNA, 19 nt, Artificial Sequence
  Description of Artificial Sequence: Synthetic oligonucleotide
ccuugcuggcuuaagccag

SEQ ID NO: 3010471 - RNA, 19 nt, Artificial Sequence
  Description of Artificial Sequence: Synthetic oligonucleotide
cugugagucuauucuugca

SEQ ID NO: 3010472 - RNA, 19 nt, Artificial Sequence
  Description of Artificial Sequence: Synthetic oligonucleotide
ugagcaccagcgccuccug

SEQ ID NO: 3010473 - RNA, 19 nt, Artificial Sequence
  Description of Artificial Sequence: Synthetic oligonucleotide
accagcgccuccugguuga

SEQ ID NO: 3010474 - RNA, 19 nt, Artificial Sequence
  Description of Artificial Sequence: Synthetic oligonucleotide
uuccucccucuucucuuug

SEQ ID NO: 3010475 - RNA, 19 nt, Artificial Sequence
  Description of Artificial Sequence: Synthetic oligonucleotide
cugagagaaacugaagggu

SEQ ID NO: 3010476 - RNA, 19 nt, Artificial Sequence
  Description of Artificial Sequence: Synthetic oligonucleotide
cugagaccacuccuugcug

SEQ ID NO: 3010477 - RNA, 19 nt, Artificial Sequence
  Description of Artificial Sequence: Synthetic oligonucleotide
cugccgugucuguaggaac

SEQ ID NO: 3010478 - RNA, 19 nt, Artificial Sequence
  Description of Artificial Sequence: Synthetic oligonucleotide
uccucccucuucucuuuga

SEQ ID NO: 3010479 - RNA, 19 nt, Artificial Sequence
  Description of Artificial Sequence: Synthetic oligonucleotide
acugccgugucuguaggaa

SEQ ID NO: 3010480 - RNA, 19 nt, Artificial Sequence
  Description of Artificial Sequence: Synthetic oligonucleotide
ucacuguaugucagugcuu

SEQ ID NO: 3010481 - RNA, 19 nt, Artificial Sequence
  Description of Artificial Sequence: Synthetic oligonucleotide
aggaacagguggcuagaua

SEQ ID NO: 3010482 - RNA, 19 nt, Artificial Sequence
  Description of Artificial Sequence: Synthetic oligonucleotide
uggccgugagcaccagcgc

SEQ ID NO: 3010483 - RNA, 19 nt, Artificial Sequence
  Description of Artificial Sequence: Synthetic oligonucleotide
cuuugagcauuuucaggua

SEQ ID NO: 3010484 - RNA, 19 nt, Artificial Sequence
  Description of Artificial Sequence: Synthetic oligonucleotide
agguggcuagauacugaac

SEQ ID NO: 3010485 - RNA, 19 nt, Artificial Sequence
  Description of Artificial Sequence: Synthetic oligonucleotide
ucaccaucgucaucuucuu

SEQ ID NO: 3010486 - RNA, 19 nt, Artificial Sequence
  Description of Artificial Sequence: Synthetic oligonucleotide
ugcuggcuuaagccagaac

SEQ ID NO: 3010487 - RNA, 19 nt, Artificial Sequence
  Description of Artificial Sequence: Synthetic oligonucleotide
cagguggcuagauacugaa

SEQ ID NO: 3010488 - RNA, 19 nt, Artificial Sequence
  Description of Artificial Sequence: Synthetic oligonucleotide
gccacugccgugucuguag

SEQ ID NO: 3010489 - RNA, 19 nt, Artificial Sequence
  Description of Artificial Sequence: Synthetic oligonucleotide
agguacuuacuagcuaaaa

SEQ ID NO: 3010490 - RNA, 19 nt, Artificial Sequence
  Description of Artificial Sequence: Synthetic oligonucleotide
cugguugaugcuggacacc

SEQ ID NO: 3010491 - RNA, 19 nt, Artificial Sequence
  Description of Artificial Sequence: Synthetic oligonucleotide
ucaccaggcugagaccacu

SEQ ID NO: 3010492 - RNA, 19 nt, Artificial Sequence
  Description of Artificial Sequence: Synthetic oligonucleotide
gcaccugcucaccaggcug

SEQ ID NO: 3010493 - RNA, 19 nt, Artificial Sequence
  Description of Artificial Sequence: Synthetic oligonucleotide
gcuagauacugaacaaaga

SEQ ID NO: 3010494 - RNA, 19 nt, Artificial Sequence
  Description of Artificial Sequence: Synthetic oligonucleotide
cuuggccgugagcaccagc

SEQ ID NO: 3010495 - RNA, 19 nt, Artificial Sequence
  Description of Artificial Sequence: Synthetic oligonucleotide
cacugcccagcugugaguc

SEQ ID NO: 3010496 - RNA, 19 nt, Artificial Sequence
  Description of Artificial Sequence: Synthetic oligonucleotide
agugcccaccacugcccag

SEQ ID NO: 3010497 - RNA, 19 nt, Artificial Sequence
  Description of Artificial Sequence: Synthetic oligonucleotide
cugcagugcuggcuaaguc

SEQ ID NO: 3010498 - RNA, 19 nt, Artificial Sequence
  Description of Artificial Sequence: Synthetic oligonucleotide
acagguggcuagauacuga

SEQ ID NO: 3010499 - RNA, 19 nt, Artificial Sequence
  Description of Artificial Sequence: Synthetic oligonucleotide
ggccgugagcaccagcgcc

SEQ ID NO: 3010500 - RNA, 19 nt, Artificial Sequence
  Description of Artificial Sequence: Synthetic oligonucleotide
cuugcuggcuuaagccaga

SEQ ID NO: 3010501 - RNA, 19 nt, Artificial Sequence
  Description of Artificial Sequence: Synthetic oligonucleotide
gcuuaagccagaacuucac

SEQ ID NO: 3010502 - RNA, 19 nt, Artificial Sequence
  Description of Artificial Sequence: Synthetic oligonucleotide
augucacuuucaccaucgu

SEQ ID NO: 3010503 - RNA, 19 nt, Artificial Sequence
  Description of Artificial Sequence: Synthetic oligonucleotide
guaggaacagguggcuaga

SEQ ID NO: 3010504 - RNA, 19 nt, Artificial Sequence
  Description of Artificial Sequence: Synthetic oligonucleotide
gcagugcuggcuaagucac

SEQ ID NO: 3010505 - RNA, 19 nt, Artificial Sequence
  Description of Artificial Sequence: Synthetic oligonucleotide
gcucuucaugaugacucgg

SEQ ID NO: 3010506 - RNA, 19 nt, Artificial Sequence
  Description of Artificial Sequence: Synthetic oligonucleotide
cucaccaggcugagaccac

SEQ ID NO: 3010507 - RNA, 19 nt, Artificial Sequence
  Description of Artificial Sequence: Synthetic oligonucleotide
guaauauaucugagagaaa

SEQ ID NO: 3010508 - RNA, 19 nt, Artificial Sequence
  Description of Artificial Sequence: Synthetic oligonucleotide
gugcccaccacugcccagc

SEQ ID NO: 3010509 - RNA, 19 nt, Artificial Sequence
  Description of Artificial Sequence: Synthetic oligonucleotide
ggcugagaccacuccuugc

SEQ ID NO: 3010510 - RNA, 19 nt, Artificial Sequence
  Description of Artificial Sequence: Synthetic oligonucleotide
gcugagaccacuccuugcu

SEQ ID NO: 3010511 - RNA, 19 nt, Artificial Sequence
  Description of Artificial Sequence: Synthetic oligonucleotide
uaggaacagguggcuagau

SEQ ID NO: 3010512 - RNA, 19 nt, Artificial Sequence
  Description of Artificial Sequence: Synthetic oligonucleotide
ggcuuaagccagaacuuca

SEQ ID NO: 3010513 - RNA, 19 nt, Artificial Sequence
  Description of Artificial Sequence: Synthetic oligonucleotide
gaacagguggcuagauacu

SEQ ID NO: 3010514 - RNA, 19 nt, Artificial Sequence
  Description of Artificial Sequence: Synthetic oligonucleotide
caccugcucaccaggcuga

SEQ ID NO: 3010515 - RNA, 19 nt, Artificial Sequence
  Description of Artificial Sequence: Synthetic oligonucleotide
aggguacucugaguccucu

SEQ ID NO: 3010516 - RNA, 19 nt, Artificial Sequence
  Description of Artificial Sequence: Synthetic oligonucleotide
acugcccagcugugagucu

SEQ ID NO: 3010517 - RNA, 19 nt, Artificial Sequence
  Description of Artificial Sequence: Synthetic oligonucleotide
cagguacuuacuagcuaaa

SEQ ID NO: 3010518 - RNA, 19 nt, Artificial Sequence
  Description of Artificial Sequence: Synthetic oligonucleotide
caccaggcugagaccacuc

SEQ ID NO: 3010519 - RNA, 19 nt, Artificial Sequence
  Description of Artificial Sequence: Synthetic oligonucleotide
caccagcgccuccugguug

SEQ ID NO: 3010520 - RNA, 19 nt, Artificial Sequence
  Description of Artificial Sequence: Synthetic oligonucleotide
ccagcugugagucuauucu

SEQ ID NO: 3010521 - RNA, 19 nt, Artificial Sequence
  Description of Artificial Sequence: Synthetic oligonucleotide
cucugcagugcuggcuaag

SEQ ID NO: 3010522 - RNA, 19 nt, Artificial Sequence
  Description of Artificial Sequence: Synthetic oligonucleotide
gcucaccaggcugagacca

SEQ ID NO: 3010523 - RNA, 19 nt, Artificial Sequence
  Description of Artificial Sequence: Synthetic oligonucleotide
cuggcuuaagccagaacuu

SEQ ID NO: 3010524 - RNA, 19 nt, Artificial Sequence
  Description of Artificial Sequence: Synthetic oligonucleotide
gcuggacaccucaggagag

SEQ ID NO: 3010525 - RNA, 19 nt, Artificial Sequence
  Description of Artificial Sequence: Synthetic oligonucleotide
ugcccaccacugcccagcu

SEQ ID NO: 3010526 - RNA, 19 nt, Artificial Sequence
  Description of Artificial Sequence: Synthetic oligonucleotide
gccuccugguugaugcugg

SEQ ID NO: 3010527 - RNA, 19 nt, Artificial Sequence
  Description of Artificial Sequence: Synthetic oligonucleotide
caccaucgucaucuucuuc

SEQ ID NO: 3010528 - RNA, 19 nt, Artificial Sequence
  Description of Artificial Sequence: Synthetic oligonucleotide
gguuuugccacugccgugu

SEQ ID NO: 3010529 - RNA, 19 nt, Artificial Sequence
  Description of Artificial Sequence: Synthetic oligonucleotide
gaacuucaccaaugucacu

SEQ ID NO: 3010530 - RNA, 19 nt, Artificial Sequence
  Description of Artificial Sequence: Synthetic oligonucleotide
accacuccuugcuggcuua

SEQ ID NO: 3010531 - RNA, 19 nt, Artificial Sequence
  Description of Artificial Sequence: Synthetic oligonucleotide
uugccacugccgugucugu

SEQ ID NO: 3010532 - RNA, 19 nt, Artificial Sequence
  Description of Artificial Sequence: Synthetic oligonucleotide
ugcccagcugugagucuau

SEQ ID NO: 3010533 - RNA, 19 nt, Artificial Sequence
  Description of Artificial Sequence: Synthetic oligonucleotide
uugcuggcuuaagccagaa

SEQ ID NO: 3010534 - RNA, 19 nt, Artificial Sequence
  Description of Artificial Sequence: Synthetic oligonucleotide
cacuccuugcuggcuuaag

SEQ ID NO: 3010535 - RNA, 19 nt, Artificial Sequence
  Description of Artificial Sequence: Synthetic oligonucleotide
agaccacuccuugcuggcu

SEQ ID NO: 3010536 - RNA, 19 nt, Artificial Sequence
  Description of Artificial Sequence: Synthetic oligonucleotide
caccucaggagagcucuuc

SEQ ID NO: 3010537 - RNA, 19 nt, Artificial Sequence
  Description of Artificial Sequence: Synthetic oligonucleotide
cagugcuuucuugguuuug

SEQ ID NO: 3010538 - RNA, 19 nt, Artificial Sequence
  Description of Artificial Sequence: Synthetic oligonucleotide
cacuguaugucagugcuuu

SEQ ID NO: 3010539 - RNA, 19 nt, Artificial Sequence
  Description of Artificial Sequence: Synthetic oligonucleotide
gccagaacuucaccaaugu

SEQ ID NO: 3010540 - RNA, 19 nt, Artificial Sequence
  Description of Artificial Sequence: Synthetic oligonucleotide
ggguacucugaguccucug

SEQ ID NO: 3010541 - RNA, 19 nt, Artificial Sequence
  Description of Artificial Sequence: Synthetic oligonucleotide
ggccuuggccgugagcacc

SEQ ID NO: 3010542 - RNA, 19 nt, Artificial Sequence
  Description of Artificial Sequence: Synthetic oligonucleotide
cccagcugugagucuauuc

SEQ ID NO: 3010543 - RNA, 19 nt, Artificial Sequence
  Description of Artificial Sequence: Synthetic oligonucleotide
ccacugccgugucuguagg

SEQ ID NO: 3010544 - RNA, 19 nt, Artificial Sequence
  Description of Artificial Sequence: Synthetic oligonucleotide
uccguggccuuggccguga

SEQ ID NO: 3010545 - RNA, 19 nt, Artificial Sequence
  Description of Artificial Sequence: Synthetic oligonucleotide
gaccacuccuugcuggcuu

SEQ ID NO: 3010546 - RNA, 19 nt, Artificial Sequence
  Description of Artificial Sequence: Synthetic oligonucleotide
gccgugucuguaggaacag

SEQ ID NO: 3010547 - RNA, 19 nt, Artificial Sequence
  Description of Artificial Sequence: Synthetic oligonucleotide
ugccacugccgugucugua

SEQ ID NO: 3010548 - RNA, 19 nt, Artificial Sequence
  Description of Artificial Sequence: Synthetic oligonucleotide
cacugccgugucuguagga

SEQ ID NO: 3010549 - RNA, 19 nt, Artificial Sequence
  Description of Artificial Sequence: Synthetic oligonucleotide
gucuauucuugcaccugcu

SEQ ID NO: 3010550 - RNA, 19 nt, Artificial Sequence
  Description of Artificial Sequence: Synthetic oligonucleotide
gcauuuucagguacuuacu

SEQ ID NO: 3010551 - RNA, 19 nt, Artificial Sequence
  Description of Artificial Sequence: Synthetic oligonucleotide
guuccguggccuuggccgu

SEQ ID NO: 3010552 - RNA, 19 nt, Artificial Sequence
  Description of Artificial Sequence: Synthetic oligonucleotide
cagugcccaccacugccca

SEQ ID NO: 3010553 - RNA, 19 nt, Artificial Sequence
  Description of Artificial Sequence: Synthetic oligonucleotide
cugaguccucugcagugcu

SEQ ID NO: 3010554 - RNA, 19 nt, Artificial Sequence
  Description of Artificial Sequence: Synthetic oligonucleotide
caggagagcucuucaugau

SEQ ID NO: 3010555 - RNA, 19 nt, Artificial Sequence
  Description of Artificial Sequence: Synthetic oligonucleotide
cccaccacugcccagcugu

SEQ ID NO: 3010556 - RNA, 19 nt, Artificial Sequence
  Description of Artificial Sequence: Synthetic oligonucleotide
caaagaguuccguggccuu

SEQ ID NO: 3010557 - RNA, 19 nt, Artificial Sequence
  Description of Artificial Sequence: Synthetic oligonucleotide
cuguaggaacagguggcua

SEQ ID NO: 3010558 - RNA, 19 nt, Artificial Sequence
  Description of Artificial Sequence: Synthetic oligonucleotide
cagcugugagucuauucuu

SEQ ID NO: 3010559 - RNA, 19 nt, Artificial Sequence
  Description of Artificial Sequence: Synthetic oligonucleotide
ccgugucuguaggaacagg

SEQ ID NO: 3010560 - RNA, 19 nt, Artificial Sequence
  Description of Artificial Sequence: Synthetic oligonucleotide
cucuucucuuugagcauuu

SEQ ID NO: 3010561 - RNA, 19 nt, Artificial Sequence
  Description of Artificial Sequence: Synthetic oligonucleotide
gguugaugcuggacaccuc

SEQ ID NO: 3010562 - RNA, 19 nt, Artificial Sequence
  Description of Artificial Sequence: Synthetic oligonucleotide
guccucugcagugcuggcu

SEQ ID NO: 3010563 - RNA, 19 nt, Artificial Sequence
  Description of Artificial Sequence: Synthetic oligonucleotide
caccacugcccagcuguga

SEQ ID NO: 3010564 - RNA, 19 nt, Artificial Sequence
  Description of Artificial Sequence: Synthetic oligonucleotide
ggacaccucaggagagcuc

SEQ ID NO: 3010565 - RNA, 19 nt, Artificial Sequence
  Description of Artificial Sequence: Synthetic oligonucleotide
ccaccacugcccagcugug

SEQ ID NO: 3010566 - RNA, 19 nt, Artificial Sequence
  Description of Artificial Sequence: Synthetic oligonucleotide
ccaggcugagaccacuccu

SEQ ID NO: 3010567 - RNA, 19 nt, Artificial Sequence
  Description of Artificial Sequence: Synthetic oligonucleotide
ccaaugucacuuucaccau

SEQ ID NO: 3010568 - RNA, 19 nt, Artificial Sequence
  Description of Artificial Sequence: Synthetic oligonucleotide
cagugcuggcuaagucacu

SEQ ID NO: 3010569 - RNA, 19 nt, Artificial Sequence
  Description of Artificial Sequence: Synthetic oligonucleotide
acaccucaggagagcucuu

SEQ ID NO: 3010570 - RNA, 19 nt, Artificial Sequence
  Description of Artificial Sequence: Synthetic oligonucleotide
gccgugagcaccagcgccu

SEQ ID NO: 3010571 - RNA, 19 nt, Artificial Sequence
  Description of Artificial Sequence: Synthetic oligonucleotide
cguggccuuggccgugagc

SEQ ID NO: 3010572 - RNA, 19 nt, Artificial Sequence
  Description of Artificial Sequence: Synthetic oligonucleotide
ccucaggagagcucuucau

SEQ ID NO: 3010573 - RNA, 19 nt, Artificial Sequence
  Description of Artificial Sequence: Synthetic oligonucleotide
cgugagcaccagcgccucc

SEQ ID NO: 3010574 - RNA, 19 nt, Artificial Sequence
  Description of Artificial Sequence: Synthetic oligonucleotide
ccgugagcaccagcgccuc

SEQ ID NO: 3010575 - RNA, 19 nt, Artificial Sequence
  Description of Artificial Sequence: Synthetic oligonucleotide
ccucugcagugcuggcuaa

SEQ ID NO: 3010576 - RNA, 19 nt, Artificial Sequence
  Description of Artificial Sequence: Synthetic oligonucleotide
gcaccagcgccuccugguu

SEQ ID NO: 3010577 - RNA, 19 nt, Artificial Sequence
  Description of Artificial Sequence: Synthetic oligonucleotide
ccacugcccagcugugagu

SEQ ID NO: 3010578 - RNA, 19 nt, Artificial Sequence
  Description of Artificial Sequence: Synthetic oligonucleotide
ccugcucaccaggcugaga

SEQ ID NO: 3010579 - RNA, 19 nt, Artificial Sequence
  Description of Artificial Sequence: Synthetic oligonucleotide
ccguggccuuggccgugag

SEQ ID NO: 3010580 - RNA, 19 nt, Artificial Sequence
  Description of Artificial Sequence: Synthetic oligonucleotide
gcgccuccugguugaugcu

SEQ ID NO: 3010581 - RNA, 19 nt, Artificial Sequence
  Description of Artificial Sequence: Synthetic oligonucleotide
ccacuccuugcuggcuuaa

SEQ ID NO: 3010582 - RNA, 19 nt, Artificial Sequence
  Description of Artificial Sequence: Synthetic oligonucleotide
gcccagcugugagucuauu

SEQ ID NO: 3010583 - RNA, 19 nt, Artificial Sequence
  Description of Artificial Sequence: Synthetic oligonucleotide
ccagcgccuccugguugau

SEQ ID NO: 3010584 - RNA, 19 nt, Artificial Sequence
  Description of Artificial Sequence: Synthetic oligonucleotide
aaaaugauaguccauaugg

SEQ ID NO: 3010585 - RNA, 19 nt, Artificial Sequence
  Description of Artificial Sequence: Synthetic oligonucleotide
aaaauugagaacuuuuccc

SEQ ID NO: 3010586 - RNA, 19 nt, Artificial Sequence
  Description of Artificial Sequence: Synthetic oligonucleotide
aagauaaagaagcauccac

SEQ ID NO: 3010587 - RNA, 19 nt, Artificial Sequence
  Description of Artificial Sequence: Synthetic oligonucleotide
aaaagauaaagaagcaucc

SEQ ID NO: 3010588 - RNA, 19 nt, Artificial Sequence
  Description of Artificial Sequence: Synthetic oligonucleotide
acuauuuccagauauaucu

SEQ ID NO: 3010589 - RNA, 19 nt, Artificial Sequence
  Description of Artificial Sequence: Synthetic oligonucleotide
uaugucuucacaauucugg

SEQ ID NO: 3010590 - RNA, 19 nt, Artificial Sequence
  Description of Artificial Sequence: Synthetic oligonucleotide
auucugggcaccuugaagc

SEQ ID NO: 3010591 - RNA, 19 nt, Artificial Sequence
  Description of Artificial Sequence: Synthetic oligonucleotide
uaugguucaaaauugagaa

SEQ ID NO: 3010592 - RNA, 19 nt, Artificial Sequence
  Description of Artificial Sequence: Synthetic oligonucleotide
aaauugagaacuuuucccu

SEQ ID NO: 3010593 - RNA, 19 nt, Artificial Sequence
  Description of Artificial Sequence: Synthetic oligonucleotide
aaagcuguuccucuuggcg

SEQ ID NO: 3010594 - RNA, 19 nt, Artificial Sequence
  Description of Artificial Sequence: Synthetic oligonucleotide
uauaucugagcccagagaa

SEQ ID NO: 3010595 - RNA, 19 nt, Artificial Sequence
  Description of Artificial Sequence: Synthetic oligonucleotide
uuccagauauaucugagcc

SEQ ID NO: 3010596 - RNA, 19 nt, Artificial Sequence
  Description of Artificial Sequence: Synthetic oligonucleotide
uaaagaagcauccaccacu

SEQ ID NO: 3010597 - RNA, 19 nt, Artificial Sequence
  Description of Artificial Sequence: Synthetic oligonucleotide
ugaagaaaaugauagucca

SEQ ID NO: 3010598 - RNA, 19 nt, Artificial Sequence
  Description of Artificial Sequence: Synthetic oligonucleotide
augaagaaaaugauagucc

SEQ ID NO: 3010599 - RNA, 19 nt, Artificial Sequence
  Description of Artificial Sequence: Synthetic oligonucleotide
gaacuuuucccugagaaag

SEQ ID NO: 3010600 - RNA, 19 nt, Artificial Sequence
  Description of Artificial Sequence: Synthetic oligonucleotide
gaaaagauaaagaagcauc

SEQ ID NO: 3010601 - RNA, 19 nt, Artificial Sequence
  Description of Artificial Sequence: Synthetic oligonucleotide
uccauaugguucaaaauug

SEQ ID NO: 3010602 - RNA, 19 nt, Artificial Sequence
  Description of Artificial Sequence: Synthetic oligonucleotide
agauaaagaagcauccacc

SEQ ID NO: 3010603 - RNA, 19 nt, Artificial Sequence
  Description of Artificial Sequence: Synthetic oligonucleotide
gaugaagaaaaugauaguc

SEQ ID NO: 3010604 - RNA, 19 nt, Artificial Sequence
  Description of Artificial Sequence: Synthetic oligonucleotide
agaaaugccagcaggagac

SEQ ID NO: 3010605 - RNA, 19 nt, Artificial Sequence
  Description of Artificial Sequence: Synthetic oligonucleotide
ugguucaaaauugagaacu

SEQ ID NO: 3010606 - RNA, 19 nt, Artificial Sequence
  Description of Artificial Sequence: Synthetic oligonucleotide
aaugauaguccauaugguu

SEQ ID NO: 3010607 - RNA, 19 nt, Artificial Sequence
  Description of Artificial Sequence: Synthetic oligonucleotide
auuaagggcgugcaccacc

SEQ ID NO: 3010608 - RNA, 19 nt, Artificial Sequence
  Description of Artificial Sequence: Synthetic oligonucleotide
uaggguuucucucagagau

SEQ ID NO: 3010609 - RNA, 19 nt, Artificial Sequence
  Description of Artificial Sequence: Synthetic oligonucleotide
gauaaagaagcauccacca

SEQ ID NO: 3010610 - RNA, 19 nt, Artificial Sequence
  Description of Artificial Sequence: Synthetic oligonucleotide
aauucugggcaccuugaag

SEQ ID NO: 3010611 - RNA, 19 nt, Artificial Sequence
  Description of Artificial Sequence: Synthetic oligonucleotide
aauugagaacuuuucccug

SEQ ID NO: 3010612 - RNA, 19 nt, Artificial Sequence
  Description of Artificial Sequence: Synthetic oligonucleotide
cacaaaaccauccagaaaa

SEQ ID NO: 3010613 - RNA, 19 nt, Artificial Sequence
  Description of Artificial Sequence: Synthetic oligonucleotide
gauauaucugagcccagag

SEQ ID NO: 3010614 - RNA, 19 nt, Artificial Sequence
  Description of Artificial Sequence: Synthetic oligonucleotide
gaaaaugauaguccauaug

SEQ ID NO: 3010615 - RNA, 19 nt, Artificial Sequence
  Description of Artificial Sequence: Synthetic oligonucleotide
auaaagaagcauccaccac

SEQ ID NO: 3010616 - RNA, 19 nt, Artificial Sequence
  Description of Artificial Sequence: Synthetic oligonucleotide
auccagaaaagauaaagaa

SEQ ID NO: 3010617 - RNA, 19 nt, Artificial Sequence
  Description of Artificial Sequence: Synthetic oligonucleotide
aagggcgugcaccaccacc

SEQ ID NO: 3010618 - RNA, 19 nt, Artificial Sequence
  Description of Artificial Sequence: Synthetic oligonucleotide
uauuuccagauauaucuga

SEQ ID NO: 3010619 - RNA, 19 nt, Artificial Sequence
  Description of Artificial Sequence: Synthetic oligonucleotide
ugauaguccauaugguuca

SEQ ID NO: 3010620 - RNA, 19 nt, Artificial Sequence
  Description of Artificial Sequence: Synthetic oligonucleotide
gaagcaagcucuucguaag

SEQ ID NO: 3010621 - RNA, 19 nt, Artificial Sequence
  Description of Artificial Sequence: Synthetic oligonucleotide
ugaagccagaugaagaaaa

SEQ ID NO: 3010622 - RNA, 19 nt, Artificial Sequence
  Description of Artificial Sequence: Synthetic oligonucleotide
ugcaccaccaccaccacca

SEQ ID NO: 3010623 - RNA, 19 nt, Artificial Sequence
  Description of Artificial Sequence: Synthetic oligonucleotide
uuucagucccguuucagca

SEQ ID NO: 3010624 - RNA, 19 nt, Artificial Sequence
  Description of Artificial Sequence: Synthetic oligonucleotide
augauaguccauaugguuc

SEQ ID NO: 3010625 - RNA, 19 nt, Artificial Sequence
  Description of Artificial Sequence: Synthetic oligonucleotide
agaagcauccaccacuaug

SEQ ID NO: 3010626 - RNA, 19 nt, Artificial Sequence
  Description of Artificial Sequence: Synthetic oligonucleotide
aagaaaaugauaguccaua

SEQ ID NO: 3010627 - RNA, 19 nt, Artificial Sequence
  Description of Artificial Sequence: Synthetic oligonucleotide
cauaugguucaaaauugag

SEQ ID NO: 3010628 - RNA, 19 nt, Artificial Sequence
  Description of Artificial Sequence: Synthetic oligonucleotide
augucuucacaauucuggg

SEQ ID NO: 3010629 - RNA, 19 nt, Artificial Sequence
  Description of Artificial Sequence: Synthetic oligonucleotide
uucagccacaaaaccaucc

SEQ ID NO: 3010630 - RNA, 19 nt, Artificial Sequence
  Description of Artificial Sequence: Synthetic oligonucleotide
aacuuuucccugagaaagc

SEQ ID NO: 3010631 - RNA, 19 nt, Artificial Sequence
  Description of Artificial Sequence: Synthetic oligonucleotide
acugucguccagugaagcc

SEQ ID NO: 3010632 - RNA, 19 nt, Artificial Sequence
  Description of Artificial Sequence: Synthetic oligonucleotide
uuuccagauauaucugagc

SEQ ID NO: 3010633 - RNA, 19 nt, Artificial Sequence
  Description of Artificial Sequence: Synthetic oligonucleotide
uucagcacuauuuccagau

SEQ ID NO: 3010634 - RNA, 19 nt, Artificial Sequence
  Description of Artificial Sequence: Synthetic oligonucleotide
augguucaaaauugagaac

SEQ ID NO: 3010635 - RNA, 19 nt, Artificial Sequence
  Description of Artificial Sequence: Synthetic oligonucleotide
gagaacuuuucccugagaa

SEQ ID NO: 3010636 - RNA, 19 nt, Artificial Sequence
  Description of Artificial Sequence: Synthetic oligonucleotide
ugaagcaagcucuucguaa

SEQ ID NO: 3010637 - RNA, 19 nt, Artificial Sequence
  Description of Artificial Sequence: Synthetic oligonucleotide
ucugagcccagagaaaugc

SEQ ID NO: 3010638 - RNA, 19 nt, Artificial Sequence
  Description of Artificial Sequence: Synthetic oligonucleotide
ucccugagaaagcuguucc

SEQ ID NO: 3010639 - RNA, 19 nt, Artificial Sequence
  Description of Artificial Sequence: Synthetic oligonucleotide
uccagauauaucugagccc

SEQ ID NO: 3010640 - RNA, 19 nt, Artificial Sequence
  Description of Artificial Sequence: Synthetic oligonucleotide
acuaugucuucacaauucu

SEQ ID NO: 3010641 - RNA, 19 nt, Artificial Sequence
  Description of Artificial Sequence: Synthetic oligonucleotide
gagacugucguccagugaa

SEQ ID NO: 3010642 - RNA, 19 nt, Artificial Sequence
  Description of Artificial Sequence: Synthetic oligonucleotide
cuuucagucccguuucagc

SEQ ID NO: 3010643 - RNA, 19 nt, Artificial Sequence
  Description of Artificial Sequence: Synthetic oligonucleotide
uuucucucagagauccgcc

SEQ ID NO: 3010644 - RNA, 19 nt, Artificial Sequence
  Description of Artificial Sequence: Synthetic oligonucleotide
auugagaacuuuucccuga

SEQ ID NO: 3010645 - RNA, 19 nt, Artificial Sequence
  Description of Artificial Sequence: Synthetic oligonucleotide
agugaagccagaugaagaa

SEQ ID NO: 3010646 - RNA, 19 nt, Artificial Sequence
  Description of Artificial Sequence: Synthetic oligonucleotide
accaccucucuuucagucc

SEQ ID NO: 3010647 - RNA, 19 nt, Artificial Sequence
  Description of Artificial Sequence: Synthetic oligonucleotide
aaaugauaguccauauggu

SEQ ID NO: 3010648 - RNA, 19 nt, Artificial Sequence
  Description of Artificial Sequence: Synthetic oligonucleotide
uugagaacuuuucccugag

SEQ ID NO: 3010649 - RNA, 19 nt, Artificial Sequence
  Description of Artificial Sequence: Synthetic oligonucleotide
auaugguucaaaauugaga

SEQ ID NO: 3010650 - RNA, 19 nt, Artificial Sequence
  Description of Artificial Sequence: Synthetic oligonucleotide
ugagcccagagaaaugcca

SEQ ID NO: 3010651 - RNA, 19 nt, Artificial Sequence
  Description of Artificial Sequence: Synthetic oligonucleotide
agaugaagaaaaugauagu

SEQ ID NO: 3010652 - RNA, 19 nt, Artificial Sequence
  Description of Artificial Sequence: Synthetic oligonucleotide
uggugauggggcuuguaag

SEQ ID NO: 3010653 - RNA, 19 nt, Artificial Sequence
  Description of Artificial Sequence: Synthetic oligonucleotide
agaaaaugauaguccauau

SEQ ID NO: 3010654 - RNA, 19 nt, Artificial Sequence
  Description of Artificial Sequence: Synthetic oligonucleotide
guuucagcacuauuuccag

SEQ ID NO: 3010655 - RNA, 19 nt, Artificial Sequence
  Description of Artificial Sequence: Synthetic oligonucleotide
uaguccauaugguucaaaa

SEQ ID NO: 3010656 - RNA, 19 nt, Artificial Sequence
  Description of Artificial Sequence: Synthetic oligonucleotide
aaccauccagaaaagauaa

SEQ ID NO: 3010657 - RNA, 19 nt, Artificial Sequence
  Description of Artificial Sequence: Synthetic oligonucleotide
auauaucugagcccagaga

SEQ ID NO: 3010658 - RNA, 19 nt, Artificial Sequence
  Description of Artificial Sequence: Synthetic oligonucleotide
ggugauggggcuuguaagg

SEQ ID NO: 3010659 - RNA, 19 nt, Artificial Sequence
  Description of Artificial Sequence: Synthetic oligonucleotide
agaaaagauaaagaagcau

SEQ ID NO: 3010660 - RNA, 19 nt, Artificial Sequence
  Description of Artificial Sequence: Synthetic oligonucleotide
ugagacguaggguuucucu

SEQ ID NO: 3010661 - RNA, 19 nt, Artificial Sequence
  Description of Artificial Sequence: Synthetic oligonucleotide
aagccagaugaagaaaaug

SEQ ID NO: 3010662 - RNA, 19 nt, Artificial Sequence
  Description of Artificial Sequence: Synthetic oligonucleotide
cacuaugucuucacaauuc

SEQ ID NO: 3010663 - RNA, 19 nt, Artificial Sequence
  Description of Artificial Sequence: Synthetic oligonucleotide
uguaaggugcugcucccug

SEQ ID NO: 3010664 - RNA, 19 nt, Artificial Sequence
  Description of Artificial Sequence: Synthetic oligonucleotide
aaaccauccagaaaagaua

SEQ ID NO: 3010665 - RNA, 19 nt, Artificial Sequence
  Description of Artificial Sequence: Synthetic oligonucleotide
cuauuuccagauauaucug

SEQ ID NO: 3010666 - RNA, 19 nt, Artificial Sequence
  Description of Artificial Sequence: Synthetic oligonucleotide
uuaagggcgugcaccacca

SEQ ID NO: 3010667 - RNA, 19 nt, Artificial Sequence
  Description of Artificial Sequence: Synthetic oligonucleotide
cauccagaaaagauaaaga

SEQ ID NO: 3010668 - RNA, 19 nt, Artificial Sequence
  Description of Artificial Sequence: Synthetic oligonucleotide
ucucuuucagucccguuuc

SEQ ID NO: 3010669 - RNA, 19 nt, Artificial Sequence
  Description of Artificial Sequence: Synthetic oligonucleotide
accaccaccucucuuucag

SEQ ID NO: 3010670 - RNA, 19 nt, Artificial Sequence
  Description of Artificial Sequence: Synthetic oligonucleotide
gauggggcuuguaaggugc

SEQ ID NO: 3010671 - RNA, 19 nt, Artificial Sequence
  Description of Artificial Sequence: Synthetic oligonucleotide
ugucguccagugaagccag

SEQ ID NO: 3010672 - RNA, 19 nt, Artificial Sequence
  Description of Artificial Sequence: Synthetic oligonucleotide
gagaaaugccagcaggaga

SEQ ID NO: 3010673 - RNA, 19 nt, Artificial Sequence
  Description of Artificial Sequence: Synthetic oligonucleotide
ucccguuucagcacuauuu

SEQ ID NO: 3010674 - RNA, 19 nt, Artificial Sequence
  Description of Artificial Sequence: Synthetic oligonucleotide
agcccagagaaaugccagc

SEQ ID NO: 3010675 - RNA, 19 nt, Artificial Sequence
  Description of Artificial Sequence: Synthetic oligonucleotide
ucucucagagauccgccug

SEQ ID NO: 3010676 - RNA, 19 nt, Artificial Sequence
  Description of Artificial Sequence: Synthetic oligonucleotide
gagcccuucagccacaaaa

SEQ ID NO: 3010677 - RNA, 19 nt, Artificial Sequence
  Description of Artificial Sequence: Synthetic oligonucleotide
agagaaaugccagcaggag

SEQ ID NO: 3010678 - RNA, 19 nt, Artificial Sequence
  Description of Artificial Sequence: Synthetic oligonucleotide
agaacuuuucccugagaaa

SEQ ID NO: 3010679 - RNA, 19 nt, Artificial Sequence
  Description of Artificial Sequence: Synthetic oligonucleotide
cuuguaaggugcugcuccc

SEQ ID NO: 3010680 - RNA, 19 nt, Artificial Sequence
  Description of Artificial Sequence: Synthetic oligonucleotide
gcuuguaaggugcugcucc

SEQ ID NO: 3010681 - RNA, 19 nt, Artificial Sequence
  Description of Artificial Sequence: Synthetic oligonucleotide
aaaugccagcaggagacug

SEQ ID NO: 3010682 - RNA, 19 nt, Artificial Sequence
  Description of Artificial Sequence: Synthetic oligonucleotide
cuaugucuucacaauucug

SEQ ID NO: 3010683 - RNA, 19 nt, Artificial Sequence
  Description of Artificial Sequence: Synthetic oligonucleotide
accacuaugucuucacaau

SEQ ID NO: 3010684 - RNA, 19 nt, Artificial Sequence
  Description of Artificial Sequence: Synthetic oligonucleotide
gagacguaggguuucucuc

SEQ ID NO: 3010685 - RNA, 19 nt, Artificial Sequence
  Description of Artificial Sequence: Synthetic oligonucleotide
aguccauaugguucaaaau

SEQ ID NO: 3010686 - RNA, 19 nt, Artificial Sequence
  Description of Artificial Sequence: Synthetic oligonucleotide
cacuauuuccagauauauc

SEQ ID NO: 3010687 - RNA, 19 nt, Artificial Sequence
  Description of Artificial Sequence: Synthetic oligonucleotide
aggugcugcucccugacug

SEQ ID NO: 3010688 - RNA, 19 nt, Artificial Sequence
  Description of Artificial Sequence: Synthetic oligonucleotide
agacguaggguuucucuca

SEQ ID NO: 3010689 - RNA, 19 nt, Artificial Sequence
  Description of Artificial Sequence: Synthetic oligonucleotide
gacugagcccuucagccac

SEQ ID NO: 3010690 - RNA, 19 nt, Artificial Sequence
  Description of Artificial Sequence: Synthetic oligonucleotide
gacguaggguuucucucag

SEQ ID NO: 3010691 - RNA, 19 nt, Artificial Sequence
  Description of Artificial Sequence: Synthetic oligonucleotide
ucagucccguuucagcacu

SEQ ID NO: 3010692 - RNA, 19 nt, Artificial Sequence
  Description of Artificial Sequence: Synthetic oligonucleotide
uaaggugcugcucccugac

SEQ ID NO: 3010693 - RNA, 19 nt, Artificial Sequence
  Description of Artificial Sequence: Synthetic oligonucleotide
cugggcaccuugaagcaag

SEQ ID NO: 3010694 - RNA, 19 nt, Artificial Sequence
  Description of Artificial Sequence: Synthetic oligonucleotide
ugauggggcuuguaaggug

SEQ ID NO: 3010695 - RNA, 19 nt, Artificial Sequence
  Description of Artificial Sequence: Synthetic oligonucleotide
ccuugaagcaagcucuucg

SEQ ID NO: 3010696 - RNA, 19 nt, Artificial Sequence
  Description of Artificial Sequence: Synthetic oligonucleotide
ucuuucagucccguuucag

SEQ ID NO: 3010697 - RNA, 19 nt, Artificial Sequence
  Description of Artificial Sequence: Synthetic oligonucleotide
aaagaagcauccaccacua

SEQ ID NO: 3010698 - RNA, 19 nt, Artificial Sequence
  Description of Artificial Sequence: Synthetic oligonucleotide
agcccuucagccacaaaac

SEQ ID NO: 3010699 - RNA, 19 nt, Artificial Sequence
  Description of Artificial Sequence: Synthetic oligonucleotide
agcauccaccacuaugucu

SEQ ID NO: 3010700 - RNA, 19 nt, Artificial Sequence
  Description of Artificial Sequence: Synthetic oligonucleotide
uuucagcacuauuuccaga

SEQ ID NO: 3010701 - RNA, 19 nt, Artificial Sequence
  Description of Artificial Sequence: Synthetic oligonucleotide
aagcaagcucuucguaagu

SEQ ID NO: 3010702 - RNA, 19 nt, Artificial Sequence
  Description of Artificial Sequence: Synthetic oligonucleotide
uccaccacuaugucuucac

SEQ ID NO: 3010703 - RNA, 19 nt, Artificial Sequence
  Description of Artificial Sequence: Synthetic oligonucleotide
ugagaacuuuucccugaga

SEQ ID NO: 3010704 - RNA, 19 nt, Artificial Sequence
  Description of Artificial Sequence: Synthetic oligonucleotide
guccauaugguucaaaauu

SEQ ID NO: 3010705 - RNA, 19 nt, Artificial Sequence
  Description of Artificial Sequence: Synthetic oligonucleotide
uucugggcaccuugaagca

SEQ ID NO: 3010706 - RNA, 19 nt, Artificial Sequence
  Description of Artificial Sequence: Synthetic oligonucleotide
uucucucagagauccgccu

SEQ ID NO: 3010707 - RNA, 19 nt, Artificial Sequence
  Description of Artificial Sequence: Synthetic oligonucleotide
accaccaccaccaccacca

SEQ ID NO: 3010708 - RNA, 19 nt, Artificial Sequence
  Description of Artificial Sequence: Synthetic oligonucleotide
accaccaccaccaccaccu

SEQ ID NO: 3010709 - RNA, 19 nt, Artificial Sequence
  Description of Artificial Sequence: Synthetic oligonucleotide
ucuucacaauucugggcac

SEQ ID NO: 3010710 - RNA, 19 nt, Artificial Sequence
  Description of Artificial Sequence: Synthetic oligonucleotide
aaugccagcaggagacugu

SEQ ID NO: 3010711 - RNA, 19 nt, Artificial Sequence
  Description of Artificial Sequence: Synthetic oligonucleotide
gagcccagagaaaugccag

SEQ ID NO: 3010712 - RNA, 19 nt, Artificial Sequence
  Description of Artificial Sequence: Synthetic oligonucleotide
acuuuucccugagaaagcu

SEQ ID NO: 3010713 - RNA, 19 nt, Artificial Sequence
  Description of Artificial Sequence: Synthetic oligonucleotide
uucagucccguuucagcac

SEQ ID NO: 3010714 - RNA, 19 nt, Artificial Sequence
  Description of Artificial Sequence: Synthetic oligonucleotide
uugaagcaagcucuucgua

SEQ ID NO: 3010715 - RNA, 19 nt, Artificial Sequence
  Description of Artificial Sequence: Synthetic oligonucleotide
accaccaccaccucucuuu

SEQ ID NO: 3010716 - RNA, 19 nt, Artificial Sequence
  Description of Artificial Sequence: Synthetic oligonucleotide
uccagugaagccagaugaa

SEQ ID NO: 3010717 - RNA, 19 nt, Artificial Sequence
  Description of Artificial Sequence: Synthetic oligonucleotide
cuuggcgcuggugaugggg

SEQ ID NO: 3010718 - RNA, 19 nt, Artificial Sequence
  Description of Artificial Sequence: Synthetic oligonucleotide
cucuuggcgcuggugaugg

SEQ ID NO: 3010719 - RNA, 19 nt, Artificial Sequence
  Description of Artificial Sequence: Synthetic oligonucleotide
cagugaagccagaugaaga

SEQ ID NO: 3010720 - RNA, 19 nt, Artificial Sequence
  Description of Artificial Sequence: Synthetic oligonucleotide
uucacaauucugggcaccu

SEQ ID NO: 3010721 - RNA, 19 nt, Artificial Sequence
  Description of Artificial Sequence: Synthetic oligonucleotide
uuuugagacguaggguuuc

SEQ ID NO: 3010722 - RNA, 19 nt, Artificial Sequence
  Description of Artificial Sequence: Synthetic oligonucleotide
cuuuucccugagaaagcug

SEQ ID NO: 3010723 - RNA, 19 nt, Artificial Sequence
  Description of Artificial Sequence: Synthetic oligonucleotide
agauauaucugagcccaga

SEQ ID NO: 3010724 - RNA, 19 nt, Artificial Sequence
  Description of Artificial Sequence: Synthetic oligonucleotide
gggauuaagggcgugcacc

SEQ ID NO: 3010725 - RNA, 19 nt, Artificial Sequence
  Description of Artificial Sequence: Synthetic oligonucleotide
ugcucccugacugagcccu

SEQ ID NO: 3010726 - RNA, 19 nt, Artificial Sequence
  Description of Artificial Sequence: Synthetic oligonucleotide
ugagaaagcuguuccucuu

SEQ ID NO: 3010727 - RNA, 19 nt, Artificial Sequence
  Description of Artificial Sequence: Synthetic oligonucleotide
agccacaaaaccauccaga

SEQ ID NO: 3010728 - RNA, 19 nt, Artificial Sequence
  Description of Artificial Sequence: Synthetic oligonucleotide
cugagcccagagaaaugcc

SEQ ID NO: 3010729 - RNA, 19 nt, Artificial Sequence
  Description of Artificial Sequence: Synthetic oligonucleotide
ggcaccuugaagcaagcuc

SEQ ID NO: 3010730 - RNA, 19 nt, Artificial Sequence
  Description of Artificial Sequence: Synthetic oligonucleotide
cuucacaauucugggcacc

SEQ ID NO: 3010731 - RNA, 19 nt, Artificial Sequence
  Description of Artificial Sequence: Synthetic oligonucleotide
aggagacugucguccagug

SEQ ID NO: 3010732 - RNA, 19 nt, Artificial Sequence
  Description of Artificial Sequence: Synthetic oligonucleotide
caccaccucucuuucaguc

SEQ ID NO: 3010733 - RNA, 19 nt, Artificial Sequence
  Description of Artificial Sequence: Synthetic oligonucleotide
gcugcucccugacugagcc

SEQ ID NO: 3010734 - RNA, 19 nt, Artificial Sequence
  Description of Artificial Sequence: Synthetic oligonucleotide
gacugucguccagugaagc

SEQ ID NO: 3010735 - RNA, 19 nt, Artificial Sequence
  Description of Artificial Sequence: Synthetic oligonucleotide
ucagcacuauuuccagaua

SEQ ID NO: 3010736 - RNA, 19 nt, Artificial Sequence
  Description of Artificial Sequence: Synthetic oligonucleotide
uuugagacguaggguuucu

SEQ ID NO: 3010737 - RNA, 19 nt, Artificial Sequence
  Description of Artificial Sequence: Synthetic oligonucleotide
ugccagcaggagacugucg

SEQ ID NO: 3010738 - RNA, 19 nt, Artificial Sequence
  Description of Artificial Sequence: Synthetic oligonucleotide
ggauuaagggcgugcacca

SEQ ID NO: 3010739 - RNA, 19 nt, Artificial Sequence
  Description of Artificial Sequence: Synthetic oligonucleotide
aaggugcugcucccugacu

SEQ ID NO: 3010740 - RNA, 19 nt, Artificial Sequence
  Description of Artificial Sequence: Synthetic oligonucleotide
caccacuaugucuucacaa

SEQ ID NO: 3010741 - RNA, 19 nt, Artificial Sequence
  Description of Artificial Sequence: Synthetic oligonucleotide
ccagauauaucugagccca

SEQ ID NO: 3010742 - RNA, 19 nt, Artificial Sequence
  Description of Artificial Sequence: Synthetic oligonucleotide
cuugaagcaagcucuucgu

SEQ ID NO: 3010743 - RNA, 19 nt, Artificial Sequence
  Description of Artificial Sequence: Synthetic oligonucleotide
acaauucugggcaccuuga

SEQ ID NO: 3010744 - RNA, 19 nt, Artificial Sequence
  Description of Artificial Sequence: Synthetic oligonucleotide
cagauauaucugagcccag

SEQ ID NO: 3010745 - RNA, 19 nt, Artificial Sequence
  Description of Artificial Sequence: Synthetic oligonucleotide
caagcucuucguaaguucu

SEQ ID NO: 3010746 - RNA, 19 nt, Artificial Sequence
  Description of Artificial Sequence: Synthetic oligonucleotide
aagaagcauccaccacuau

SEQ ID NO: 3010747 - RNA, 19 nt, Artificial Sequence
  Description of Artificial Sequence: Synthetic oligonucleotide
caaaaccauccagaaaaga

SEQ ID NO: 3010748 - RNA, 19 nt, Artificial Sequence
  Description of Artificial Sequence: Synthetic oligonucleotide
cuucagccacaaaaccauc

SEQ ID NO: 3010749 - RNA, 19 nt, Artificial Sequence
  Description of Artificial Sequence: Synthetic oligonucleotide
agcaggagacugucgucca

SEQ ID NO: 3010750 - RNA, 19 nt, Artificial Sequence
  Description of Artificial Sequence: Synthetic oligonucleotide
cugucguccagugaagcca

SEQ ID NO: 3010751 - RNA, 19 nt, Artificial Sequence
  Description of Artificial Sequence: Synthetic oligonucleotide
accuugaagcaagcucuuc

SEQ ID NO: 3010752 - RNA, 19 nt, Artificial Sequence
  Description of Artificial Sequence: Synthetic oligonucleotide
guaaggugcugcucccuga

SEQ ID NO: 3010753 - RNA, 19 nt, Artificial Sequence
  Description of Artificial Sequence: Synthetic oligonucleotide
uuucccugagaaagcuguu

SEQ ID NO: 3010754 - RNA, 19 nt, Artificial Sequence
  Description of Artificial Sequence: Synthetic oligonucleotide
ucccugacugagcccuuca

SEQ ID NO: 3010755 - RNA, 19 nt, Artificial Sequence
  Description of Artificial Sequence: Synthetic oligonucleotide
cuggugauggggcuuguaa

SEQ ID NO: 3010756 - RNA, 19 nt, Artificial Sequence
  Description of Artificial Sequence: Synthetic oligonucleotide
gcaagcucuucguaaguuc

SEQ ID NO: 3010757 - RNA, 19 nt, Artificial Sequence
  Description of Artificial Sequence: Synthetic oligonucleotide
ccaccucucuuucaguccc

SEQ ID NO: 3010758 - RNA, 19 nt, Artificial Sequence
  Description of Artificial Sequence: Synthetic oligonucleotide
gauuaagggcgugcaccac

SEQ ID NO: 3010759 - RNA, 19 nt, Artificial Sequence
  Description of Artificial Sequence: Synthetic oligonucleotide
agggcgugcaccaccacca

SEQ ID NO: 3010760 - RNA, 19 nt, Artificial Sequence
  Description of Artificial Sequence: Synthetic oligonucleotide
cugagaaagcuguuccucu

SEQ ID NO: 3010761 - RNA, 19 nt, Artificial Sequence
  Description of Artificial Sequence: Synthetic oligonucleotide
ccguuucagcacuauuucc

SEQ ID NO: 3010762 - RNA, 19 nt, Artificial Sequence
  Description of Artificial Sequence: Synthetic oligonucleotide
uuguaaggugcugcucccu

SEQ ID NO: 3010763 - RNA, 19 nt, Artificial Sequence
  Description of Artificial Sequence: Synthetic oligonucleotide
cguuucagcacuauuucca

SEQ ID NO: 3010764 - RNA, 19 nt, Artificial Sequence
  Description of Artificial Sequence: Synthetic oligonucleotide
agcaagcucuucguaaguu

SEQ ID NO: 3010765 - RNA, 19 nt, Artificial Sequence
  Description of Artificial Sequence: Synthetic oligonucleotide
auaucugagcccagagaaa

SEQ ID NO: 3010766 - RNA, 19 nt, Artificial Sequence
  Description of Artificial Sequence: Synthetic oligonucleotide
caccucucuuucagucccg

SEQ ID NO: 3010767 - RNA, 19 nt, Artificial Sequence
  Description of Artificial Sequence: Synthetic oligonucleotide
ccagaugaagaaaaugaua

SEQ ID NO: 3010768 - RNA, 19 nt, Artificial Sequence
  Description of Artificial Sequence: Synthetic oligonucleotide
uguuccucuuggcgcuggu

SEQ ID NO: 3010769 - RNA, 19 nt, Artificial Sequence
  Description of Artificial Sequence: Synthetic oligonucleotide
ccagugaagccagaugaag

SEQ ID NO: 3010770 - RNA, 19 nt, Artificial Sequence
  Description of Artificial Sequence: Synthetic oligonucleotide
gcccuucagccacaaaacc

SEQ ID NO: 3010771 - RNA, 19 nt, Artificial Sequence
  Description of Artificial Sequence: Synthetic oligonucleotide
ccauaugguucaaaauuga

SEQ ID NO: 3010772 - RNA, 19 nt, Artificial Sequence
  Description of Artificial Sequence: Synthetic oligonucleotide
agacugucguccagugaag

SEQ ID NO: 3010773 - RNA, 19 nt, Artificial Sequence
  Description of Artificial Sequence: Synthetic oligonucleotide
agcacuauuuccagauaua

SEQ ID NO: 3010774 - RNA, 19 nt, Artificial Sequence
  Description of Artificial Sequence: Synthetic oligonucleotide
ucuuggcgcuggugauggg

SEQ ID NO: 3010775 - RNA, 19 nt, Artificial Sequence
  Description of Artificial Sequence: Synthetic oligonucleotide
cccguuucagcacuauuuc

SEQ ID NO: 3010776 - RNA, 19 nt, Artificial Sequence
  Description of Artificial Sequence: Synthetic oligonucleotide
caccaccaccaccaccacc

SEQ ID NO: 3010777 - RNA, 19 nt, Artificial Sequence
  Description of Artificial Sequence: Synthetic oligonucleotide
ucguccagugaagccagau

SEQ ID NO: 3010778 - RNA, 19 nt, Artificial Sequence
  Description of Artificial Sequence: Synthetic oligonucleotide
cagcacuauuuccagauau

SEQ ID NO: 3010779 - RNA, 19 nt, Artificial Sequence
  Description of Artificial Sequence: Synthetic oligonucleotide
cccuucagccacaaaacca

SEQ ID NO: 3010780 - RNA, 19 nt, Artificial Sequence
  Description of Artificial Sequence: Synthetic oligonucleotide
aucugagcccagagaaaug

SEQ ID NO: 3010781 - RNA, 19 nt, Artificial Sequence
  Description of Artificial Sequence: Synthetic oligonucleotide
uaagggcgugcaccaccac

SEQ ID NO: 3010782 - RNA, 19 nt, Artificial Sequence
  Description of Artificial Sequence: Synthetic oligonucleotide
ccugagaaagcuguuccuc

SEQ ID NO: 3010783 - RNA, 19 nt, Artificial Sequence
  Description of Artificial Sequence: Synthetic oligonucleotide
auaguccauaugguucaaa

SEQ ID NO: 3010784 - RNA, 19 nt, Artificial Sequence
  Description of Artificial Sequence: Synthetic oligonucleotide
gcaccuugaagcaagcucu

SEQ ID NO: 3010785 - RNA, 19 nt, Artificial Sequence
  Description of Artificial Sequence: Synthetic oligonucleotide
uggggcuuguaaggugcug

SEQ ID NO: 3010786 - RNA, 19 nt, Artificial Sequence
  Description of Artificial Sequence: Synthetic oligonucleotide
gugaagccagaugaagaaa

SEQ ID NO: 3010787 - RNA, 19 nt, Artificial Sequence
  Description of Artificial Sequence: Synthetic oligonucleotide
cauccaccacuaugucuuc

SEQ ID NO: 3010788 - RNA, 19 nt, Artificial Sequence
  Description of Artificial Sequence: Synthetic oligonucleotide
caauucugggcaccuugaa

SEQ ID NO: 3010789 - RNA, 19 nt, Artificial Sequence
  Description of Artificial Sequence: Synthetic oligonucleotide
uugagacguaggguuucuc

SEQ ID NO: 3010790 - RNA, 19 nt, Artificial Sequence
  Description of Artificial Sequence: Synthetic oligonucleotide
gauaguccauaugguucaa

SEQ ID NO: 3010791 - RNA, 19 nt, Artificial Sequence
  Description of Artificial Sequence: Synthetic oligonucleotide
cuguuccucuuggcgcugg

SEQ ID NO: 3010792 - RNA, 19 nt, Artificial Sequence
  Description of Artificial Sequence: Synthetic oligonucleotide
uggcgcuggugauggggcu

SEQ ID NO: 3010793 - RNA, 19 nt, Artificial Sequence
  Description of Artificial Sequence: Synthetic oligonucleotide
gguuucucucagagauccg

SEQ ID NO: 3010794 - RNA, 19 nt, Artificial Sequence
  Description of Artificial Sequence: Synthetic oligonucleotide
auccaccacuaugucuuca

SEQ ID NO: 3010795 - RNA, 19 nt, Artificial Sequence
  Description of Artificial Sequence: Synthetic oligonucleotide
ggugcugcucccugacuga

SEQ ID NO: 3010796 - RNA, 19 nt, Artificial Sequence
  Description of Artificial Sequence: Synthetic oligonucleotide
ugagcccuucagccacaaa

SEQ ID NO: 3010797 - RNA, 19 nt, Artificial Sequence
  Description of Artificial Sequence: Synthetic oligonucleotide
cugcucccugacugagccc

SEQ ID NO: 3010798 - RNA, 19 nt, Artificial Sequence
  Description of Artificial Sequence: Synthetic oligonucleotide
cucuuucagucccguuuca

SEQ ID NO: 3010799 - RNA, 19 nt, Artificial Sequence
  Description of Artificial Sequence: Synthetic oligonucleotide
accucucuuucagucccgu

SEQ ID NO: 3010800 - RNA, 19 nt, Artificial Sequence
  Description of Artificial Sequence: Synthetic oligonucleotide
gcaggagacugucguccag

SEQ ID NO: 3010801 - RNA, 19 nt, Artificial Sequence
  Description of Artificial Sequence: Synthetic oligonucleotide
ucacaauucugggcaccuu

SEQ ID NO: 3010802 - RNA, 19 nt, Artificial Sequence
  Description of Artificial Sequence: Synthetic oligonucleotide
gugauggggcuuguaaggu

SEQ ID NO: 3010803 - RNA, 19 nt, Artificial Sequence
  Description of Artificial Sequence: Synthetic oligonucleotide
ggagacugucguccaguga

SEQ ID NO: 3010804 - RNA, 19 nt, Artificial Sequence
  Description of Artificial Sequence: Synthetic oligonucleotide
ccuucagccacaaaaccau

SEQ ID NO: 3010805 - RNA, 19 nt, Artificial Sequence
  Description of Artificial Sequence: Synthetic oligonucleotide
gccagcaggagacugucgu

SEQ ID NO: 3010806 - RNA, 19 nt, Artificial Sequence
  Description of Artificial Sequence: Synthetic oligonucleotide
gcacuauuuccagauauau

SEQ ID NO: 3010807 - RNA, 19 nt, Artificial Sequence
  Description of Artificial Sequence: Synthetic oligonucleotide
gcccagagaaaugccagca

SEQ ID NO: 3010808 - RNA, 19 nt, Artificial Sequence
  Description of Artificial Sequence: Synthetic oligonucleotide
agucccguuucagcacuau

SEQ ID NO: 3010809 - RNA, 19 nt, Artificial Sequence
  Description of Artificial Sequence: Synthetic oligonucleotide
cguccagugaagccagaug

SEQ ID NO: 3010810 - RNA, 19 nt, Artificial Sequence
  Description of Artificial Sequence: Synthetic oligonucleotide
auggggcuuguaaggugcu

SEQ ID NO: 3010811 - RNA, 19 nt, Artificial Sequence
  Description of Artificial Sequence: Synthetic oligonucleotide
acugagcccuucagccaca

SEQ ID NO: 3010812 - RNA, 19 nt, Artificial Sequence
  Description of Artificial Sequence: Synthetic oligonucleotide
cccugacugagcccuucag

SEQ ID NO: 3010813 - RNA, 19 nt, Artificial Sequence
  Description of Artificial Sequence: Synthetic oligonucleotide
cucccugacugagcccuuc

SEQ ID NO: 3010814 - RNA, 19 nt, Artificial Sequence
  Description of Artificial Sequence: Synthetic oligonucleotide
caccaccaccucucuuuca

SEQ ID NO: 3010815 - RNA, 19 nt, Artificial Sequence
  Description of Artificial Sequence: Synthetic oligonucleotide
ggcuuguaaggugcugcuc

SEQ ID NO: 3010816 - RNA, 19 nt, Artificial Sequence
  Description of Artificial Sequence: Synthetic oligonucleotide
caggagacugucguccagu

SEQ ID NO: 3010817 - RNA, 19 nt, Artificial Sequence
  Description of Artificial Sequence: Synthetic oligonucleotide
ccaccaccaccucucuuuc

SEQ ID NO: 3010818 - RNA, 19 nt, Artificial Sequence
  Description of Artificial Sequence: Synthetic oligonucleotide
gggcuuguaaggugcugcu

SEQ ID NO: 3010819 - RNA, 19 nt, Artificial Sequence
  Description of Artificial Sequence: Synthetic oligonucleotide
ccaccacuaugucuucaca

SEQ ID NO: 3010820 - RNA, 19 nt, Artificial Sequence
  Description of Artificial Sequence: Synthetic oligonucleotide
ccucuuggcgcuggugaug

SEQ ID NO: 3010821 - RNA, 19 nt, Artificial Sequence
  Description of Artificial Sequence: Synthetic oligonucleotide
gucccguuucagcacuauu

SEQ ID NO: 3010822 - RNA, 19 nt, Artificial Sequence
  Description of Artificial Sequence: Synthetic oligonucleotide
caccuugaagcaagcucuu

SEQ ID NO: 3010823 - RNA, 19 nt, Artificial Sequence
  Description of Artificial Sequence: Synthetic oligonucleotide
gcaccaccaccaccaccac

SEQ ID NO: 3010824 - RNA, 19 nt, Artificial Sequence
  Description of Artificial Sequence: Synthetic oligonucleotide
cagucccguuucagcacua

SEQ ID NO: 3010825 - RNA, 19 nt, Artificial Sequence
  Description of Artificial Sequence: Synthetic oligonucleotide
cugagcccuucagccacaa

SEQ ID NO: 3010826 - RNA, 19 nt, Artificial Sequence
  Description of Artificial Sequence: Synthetic oligonucleotide
cccugagaaagcuguuccu

SEQ ID NO: 3010827 - RNA, 19 nt, Artificial Sequence
  Description of Artificial Sequence: Synthetic oligonucleotide
gucguccagugaagccaga

SEQ ID NO: 3010828 - RNA, 19 nt, Artificial Sequence
  Description of Artificial Sequence: Synthetic oligonucleotide
ccaccaccaccaccaccac

SEQ ID NO: 3010829 - RNA, 19 nt, Artificial Sequence
  Description of Artificial Sequence: Synthetic oligonucleotide
ccaccaccaccaccaccuc

SEQ ID NO: 3010830 - RNA, 19 nt, Artificial Sequence
  Description of Artificial Sequence: Synthetic oligonucleotide
gcuggugauggggcuugua

SEQ ID NO: 3010831 - RNA, 19 nt, Artificial Sequence
  Description of Artificial Sequence: Synthetic oligonucleotide
gggcaccuugaagcaagcu

SEQ ID NO: 3010832 - RNA, 19 nt, Artificial Sequence
  Description of Artificial Sequence: Synthetic oligonucleotide
ggcgcuggugauggggcuu

SEQ ID NO: 3010833 - RNA, 19 nt, Artificial Sequence
  Description of Artificial Sequence: Synthetic oligonucleotide
ccucucuuucagucccguu

SEQ ID NO: 3010834 - RNA, 19 nt, Artificial Sequence
  Description of Artificial Sequence: Synthetic oligonucleotide
gcucccugacugagcccuu

SEQ ID NO: 3010835 - RNA, 19 nt, Artificial Sequence
  Description of Artificial Sequence: Synthetic oligonucleotide
cgcuggugauggggcuugu

SEQ ID NO: 3010836 - RNA, 19 nt, Artificial Sequence
  Description of Artificial Sequence: Synthetic oligonucleotide
aagaucacagcuuucgugc

SEQ ID NO: 3010837 - RNA, 19 nt, Artificial Sequence
  Description of Artificial Sequence: Synthetic oligonucleotide
uuuaagguuguuaaaguag

SEQ ID NO: 3010838 - RNA, 19 nt, Artificial Sequence
  Description of Artificial Sequence: Synthetic oligonucleotide
aaaaguagggguugagggc

SEQ ID NO: 3010839 - RNA, 19 nt, Artificial Sequence
  Description of Artificial Sequence: Synthetic oligonucleotide
aaacaauacaagaaagccc

SEQ ID NO: 3010840 - RNA, 19 nt, Artificial Sequence
  Description of Artificial Sequence: Synthetic oligonucleotide
uacaagaaagcccacuugg

SEQ ID NO: 3010841 - RNA, 19 nt, Artificial Sequence
  Description of Artificial Sequence: Synthetic oligonucleotide
aaugauggcugcuugaacu

SEQ ID NO: 3010842 - RNA, 19 nt, Artificial Sequence
  Description of Artificial Sequence: Synthetic oligonucleotide
aaaguagggguugagggcc

SEQ ID NO: 3010843 - RNA, 19 nt, Artificial Sequence
  Description of Artificial Sequence: Synthetic oligonucleotide
aacaauacaagaaagccca

SEQ ID NO: 3010844 - RNA, 19 nt, Artificial Sequence
  Description of Artificial Sequence: Synthetic oligonucleotide
uuaagguuguuaaaguagc

SEQ ID NO: 3010845 - RNA, 19 nt, Artificial Sequence
  Description of Artificial Sequence: Synthetic oligonucleotide
aacuucaucgaggaaaccg

SEQ ID NO: 3010846 - RNA, 19 nt, Artificial Sequence
  Description of Artificial Sequence: Synthetic oligonucleotide
uugggcacagcccugaagg

SEQ ID NO: 3010847 - RNA, 19 nt, Artificial Sequence
  Description of Artificial Sequence: Synthetic oligonucleotide
aauucugcuauccggaagu

SEQ ID NO: 3010848 - RNA, 19 nt, Artificial Sequence
  Description of Artificial Sequence: Synthetic oligonucleotide
aagaagaucacagcuuucg

SEQ ID NO: 3010849 - RNA, 19 nt, Artificial Sequence
  Description of Artificial Sequence: Synthetic oligonucleotide
caaacaauacaagaaagcc

SEQ ID NO: 3010850 - RNA, 19 nt, Artificial Sequence
  Description of Artificial Sequence: Synthetic oligonucleotide
acaaacaauacaagaaagc

SEQ ID NO: 3010851 - RNA, 19 nt, Artificial Sequence
  Description of Artificial Sequence: Synthetic oligonucleotide
cuuucgugcccaaugaugg

SEQ ID NO: 3010852 - RNA, 19 nt, Artificial Sequence
  Description of Artificial Sequence: Synthetic oligonucleotide
gaaaaggucaugccguagg

SEQ ID NO: 3010853 - RNA, 19 nt, Artificial Sequence
  Description of Artificial Sequence: Synthetic oligonucleotide
aaaacaggccaaauucugc

SEQ ID NO: 3010854 - RNA, 19 nt, Artificial Sequence
  Description of Artificial Sequence: Synthetic oligonucleotide
aauggcaugacaaacaaua

SEQ ID NO: 3010855 - RNA, 19 nt, Artificial Sequence
  Description of Artificial Sequence: Synthetic oligonucleotide
ucaucgaggaaaccgauga

SEQ ID NO: 3010856 - RNA, 19 nt, Artificial Sequence
  Description of Artificial Sequence: Synthetic oligonucleotide
ucugcuauccggaagugug

SEQ ID NO: 3010857 - RNA, 19 nt, Artificial Sequence
  Description of Artificial Sequence: Synthetic oligonucleotide
aagaaagcccacuugggca

SEQ ID NO: 3010858 - RNA, 19 nt, Artificial Sequence
  Description of Artificial Sequence: Synthetic oligonucleotide
guucagcucaucaagaacg

SEQ ID NO: 3010859 - RNA, 19 nt, Artificial Sequence
  Description of Artificial Sequence: Synthetic oligonucleotide
aauacaagaaagcccacuu

SEQ ID NO: 3010860 - RNA, 19 nt, Artificial Sequence
  Description of Artificial Sequence: Synthetic oligonucleotide
aaaccgaugaaguucuggu

SEQ ID NO: 3010861 - RNA, 19 nt, Artificial Sequence
  Description of Artificial Sequence: Synthetic oligonucleotide
aagaacggcaagaagauca

SEQ ID NO: 3010862 - RNA, 19 nt, Artificial Sequence
  Description of Artificial Sequence: Synthetic oligonucleotide
aaggucaugccguagguga

SEQ ID NO: 3010863 - RNA, 19 nt, Artificial Sequence
  Description of Artificial Sequence: Synthetic oligonucleotide
gacaaacaauacaagaaag

SEQ ID NO: 3010864 - RNA, 19 nt, Artificial Sequence
  Description of Artificial Sequence: Synthetic oligonucleotide
guacgaaaaggucaugccg

SEQ ID NO: 3010865 - RNA, 19 nt, Artificial Sequence
  Description of Artificial Sequence: Synthetic oligonucleotide
aaacaggccaaauucugcu

SEQ ID NO: 3010866 - RNA, 19 nt, Artificial Sequence
  Description of Artificial Sequence: Synthetic oligonucleotide
aaauucugcuauccggaag

SEQ ID NO: 3010867 - RNA, 19 nt, Artificial Sequence
  Description of Artificial Sequence: Synthetic oligonucleotide
uacgaaaaggucaugccgu

SEQ ID NO: 3010868 - RNA, 19 nt, Artificial Sequence
  Description of Artificial Sequence: Synthetic oligonucleotide
ugcuugaacuucaucgagg

SEQ ID NO: 3010869 - RNA, 19 nt, Artificial Sequence
  Description of Artificial Sequence: Synthetic oligonucleotide
aagggaauuguacuggaaa

SEQ ID NO: 3010870 - RNA, 19 nt, Artificial Sequence
  Description of Artificial Sequence: Synthetic oligonucleotide
uugaacuucaucgaggaaa

SEQ ID NO: 3010871 - RNA, 19 nt, Artificial Sequence
  Description of Artificial Sequence: Synthetic oligonucleotide
aagugugucaggguucagc

SEQ ID NO: 3010872 - RNA, 19 nt, Artificial Sequence
  Description of Artificial Sequence: Synthetic oligonucleotide
aaggccaauccuuucggag

SEQ ID NO: 3010873 - RNA, 19 nt, Artificial Sequence
  Description of Artificial Sequence: Synthetic oligonucleotide
ugaacuucaucgaggaaac

SEQ ID NO: 3010874 - RNA, 19 nt, Artificial Sequence
  Description of Artificial Sequence: Synthetic oligonucleotide
aucaagaacggcaagaaga

SEQ ID NO: 3010875 - RNA, 19 nt, Artificial Sequence
  Description of Artificial Sequence: Synthetic oligonucleotide
agaaagcccacuugggcac

SEQ ID NO: 3010876 - RNA, 19 nt, Artificial Sequence
  Description of Artificial Sequence: Synthetic oligonucleotide
uuugguacgaaaaggucau

SEQ ID NO: 3010877 - RNA, 19 nt, Artificial Sequence
  Description of Artificial Sequence: Synthetic oligonucleotide
ugaaggccaauccuuucgg

SEQ ID NO: 3010878 - RNA, 19 nt, Artificial Sequence
  Description of Artificial Sequence: Synthetic oligonucleotide
uucagcucaucaagaacgg

SEQ ID NO: 3010879 - RNA, 19 nt, Artificial Sequence
  Description of Artificial Sequence: Synthetic oligonucleotide
ugcgcuuuaagguuguuaa

SEQ ID NO: 3010880 - RNA, 19 nt, Artificial Sequence
  Description of Artificial Sequence: Synthetic oligonucleotide
caugacaaacaauacaaga

SEQ ID NO: 3010881 - RNA, 19 nt, Artificial Sequence
  Description of Artificial Sequence: Synthetic oligonucleotide
agugucguggucuccguac

SEQ ID NO: 3010882 - RNA, 19 nt, Artificial Sequence
  Description of Artificial Sequence: Synthetic oligonucleotide
ucaagaacggcaagaagau

SEQ ID NO: 3010883 - RNA, 19 nt, Artificial Sequence
  Description of Artificial Sequence: Synthetic oligonucleotide
uggcaugacaaacaauaca

SEQ ID NO: 3010884 - RNA, 19 nt, Artificial Sequence
  Description of Artificial Sequence: Synthetic oligonucleotide
ucuccguacugccaggaag

SEQ ID NO: 3010885 - RNA, 19 nt, Artificial Sequence
  Description of Artificial Sequence: Synthetic oligonucleotide
acggcaagaagaucacagc

SEQ ID NO: 3010886 - RNA, 19 nt, Artificial Sequence
  Description of Artificial Sequence: Synthetic oligonucleotide
uaagguuguuaaaguagcc

SEQ ID NO: 3010887 - RNA, 19 nt, Artificial Sequence
  Description of Artificial Sequence: Synthetic oligonucleotide
ucgaggaaaccgaugaagu

SEQ ID NO: 3010888 - RNA, 19 nt, Artificial Sequence
  Description of Artificial Sequence: Synthetic oligonucleotide
aaaaggucaugccguaggu

SEQ ID NO: 3010889 - RNA, 19 nt, Artificial Sequence
  Description of Artificial Sequence: Synthetic oligonucleotide
ugggguuugguacgaaaag

SEQ ID NO: 3010890 - RNA, 19 nt, Artificial Sequence
  Description of Artificial Sequence: Synthetic oligonucleotide
ucggaggugccucucaugc

SEQ ID NO: 3010891 - RNA, 19 nt, Artificial Sequence
  Description of Artificial Sequence: Synthetic oligonucleotide
caugcgaagggaauuguac

SEQ ID NO: 3010892 - RNA, 19 nt, Artificial Sequence
  Description of Artificial Sequence: Synthetic oligonucleotide
caaaacaggccaaauucug

SEQ ID NO: 3010893 - RNA, 19 nt, Artificial Sequence
  Description of Artificial Sequence: Synthetic oligonucleotide
ugaaguucugguugcguug

SEQ ID NO: 3010894 - RNA, 19 nt, Artificial Sequence
  Description of Artificial Sequence: Synthetic oligonucleotide
agaucacagcuuucgugcc

SEQ ID NO: 3010895 - RNA, 19 nt, Artificial Sequence
  Description of Artificial Sequence: Synthetic oligonucleotide
aagcuccgcagucaccggc

SEQ ID NO: 3010896 - RNA, 19 nt, Artificial Sequence
  Description of Artificial Sequence: Synthetic oligonucleotide
caagaaagcccacuugggc

SEQ ID NO: 3010897 - RNA, 19 nt, Artificial Sequence
  Description of Artificial Sequence: Synthetic oligonucleotide
ugcgaagggaauuguacug

SEQ ID NO: 3010898 - RNA, 19 nt, Artificial Sequence
  Description of Artificial Sequence: Synthetic oligonucleotide
gaaaccgaugaaguucugg

SEQ ID NO: 3010899 - RNA, 19 nt, Artificial Sequence
  Description of Artificial Sequence: Synthetic oligonucleotide
ugagggccaaaacaggcca

SEQ ID NO: 3010900 - RNA, 19 nt, Artificial Sequence
  Description of Artificial Sequence: Synthetic oligonucleotide
aggccaauccuuucggagg

SEQ ID NO: 3010901 - RNA, 19 nt, Artificial Sequence
  Description of Artificial Sequence: Synthetic oligonucleotide
agugugucaggguucagcu

SEQ ID NO: 3010902 - RNA, 19 nt, Artificial Sequence
  Description of Artificial Sequence: Synthetic oligonucleotide
cugaaggccaauccuuucg

SEQ ID NO: 3010903 - RNA, 19 nt, Artificial Sequence
  Description of Artificial Sequence: Synthetic oligonucleotide
acagcuuucgugcccaaug

SEQ ID NO: 3010904 - RNA, 19 nt, Artificial Sequence
  Description of Artificial Sequence: Synthetic oligonucleotide
gaaauggcaugacaaacaa

SEQ ID NO: 3010905 - RNA, 19 nt, Artificial Sequence
  Description of Artificial Sequence: Synthetic oligonucleotide
agguuguuaaaguagccaa

SEQ ID NO: 3010906 - RNA, 19 nt, Artificial Sequence
  Description of Artificial Sequence: Synthetic oligonucleotide
gugauauuccuggagugcg

SEQ ID NO: 3010907 - RNA, 19 nt, Artificial Sequence
  Description of Artificial Sequence: Synthetic oligonucleotide
gaaguucugguugcguugg

SEQ ID NO: 3010908 - RNA, 19 nt, Artificial Sequence
  Description of Artificial Sequence: Synthetic oligonucleotide
augacaaacaauacaagaa

SEQ ID NO: 3010909 - RNA, 19 nt, Artificial Sequence
  Description of Artificial Sequence: Synthetic oligonucleotide
auacaagaaagcccacuug

SEQ ID NO: 3010910 - RNA, 19 nt, Artificial Sequence
  Description of Artificial Sequence: Synthetic oligonucleotide
ugguacgaaaaggucaugc

SEQ ID NO: 3010911 - RNA, 19 nt, Artificial Sequence
  Description of Artificial Sequence: Synthetic oligonucleotide
ugcguugggguuugguacg

SEQ ID NO: 3010912 - RNA, 19 nt, Artificial Sequence
  Description of Artificial Sequence: Synthetic oligonucleotide
gaggaaaccgaugaaguuc

SEQ ID NO: 3010913 - RNA, 19 nt, Artificial Sequence
  Description of Artificial Sequence: Synthetic oligonucleotide
aucgaggaaaccgaugaag

SEQ ID NO: 3010914 - RNA, 19 nt, Artificial Sequence
  Description of Artificial Sequence: Synthetic oligonucleotide
gccaaauucugcuauccgg

SEQ ID NO: 3010915 - RNA, 19 nt, Artificial Sequence
  Description of Artificial Sequence: Synthetic oligonucleotide
uugcguugggguuugguac

SEQ ID NO: 3010916 - RNA, 19 nt, Artificial Sequence
  Description of Artificial Sequence: Synthetic oligonucleotide
guuugguacgaaaagguca

SEQ ID NO: 3010917 - RNA, 19 nt, Artificial Sequence
  Description of Artificial Sequence: Synthetic oligonucleotide
agaugggcaagugucgugg

SEQ ID NO: 3010918 - RNA, 19 nt, Artificial Sequence
  Description of Artificial Sequence: Synthetic oligonucleotide
uugggguuugguacgaaaa

SEQ ID NO: 3010919 - RNA, 19 nt, Artificial Sequence
  Description of Artificial Sequence: Synthetic oligonucleotide
cuccguacugccaggaagc

SEQ ID NO: 3010920 - RNA, 19 nt, Artificial Sequence
  Description of Artificial Sequence: Synthetic oligonucleotide
uucaucgaggaaaccgaug

SEQ ID NO: 3010921 - RNA, 19 nt, Artificial Sequence
  Description of Artificial Sequence: Synthetic oligonucleotide
caugccguaggugauauuc

SEQ ID NO: 3010922 - RNA, 19 nt, Artificial Sequence
  Description of Artificial Sequence: Synthetic oligonucleotide
agaaauggcaugacaaaca

SEQ ID NO: 3010923 - RNA, 19 nt, Artificial Sequence
  Description of Artificial Sequence: Synthetic oligonucleotide
gccaaaacaggccaaauuc

SEQ ID NO: 3010924 - RNA, 19 nt, Artificial Sequence
  Description of Artificial Sequence: Synthetic oligonucleotide
agggaauuguacuggaaaa

SEQ ID NO: 3010925 - RNA, 19 nt, Artificial Sequence
  Description of Artificial Sequence: Synthetic oligonucleotide
aggccaaauucugcuaucc

SEQ ID NO: 3010926 - RNA, 19 nt, Artificial Sequence
  Description of Artificial Sequence: Synthetic oligonucleotide
agcccacuugggcacagcc

SEQ ID NO: 3010927 - RNA, 19 nt, Artificial Sequence
  Description of Artificial Sequence: Synthetic oligonucleotide
ugauauuccuggagugcgc

SEQ ID NO: 3010928 - RNA, 19 nt, Artificial Sequence
  Description of Artificial Sequence: Synthetic oligonucleotide
caggguucagcucaucaag

SEQ ID NO: 3010929 - RNA, 19 nt, Artificial Sequence
  Description of Artificial Sequence: Synthetic oligonucleotide
aagaugggcaagugucgug

SEQ ID NO: 3010930 - RNA, 19 nt, Artificial Sequence
  Description of Artificial Sequence: Synthetic oligonucleotide
guugagggccaaaacaggc

SEQ ID NO: 3010931 - RNA, 19 nt, Artificial Sequence
  Description of Artificial Sequence: Synthetic oligonucleotide
cagaaauggcaugacaaac

SEQ ID NO: 3010932 - RNA, 19 nt, Artificial Sequence
  Description of Artificial Sequence: Synthetic oligonucleotide
augcgaagggaauuguacu

SEQ ID NO: 3010933 - RNA, 19 nt, Artificial Sequence
  Description of Artificial Sequence: Synthetic oligonucleotide
ucucaugcgaagggaauug

SEQ ID NO: 3010934 - RNA, 19 nt, Artificial Sequence
  Description of Artificial Sequence: Synthetic oligonucleotide
gguacgaaaaggucaugcc

SEQ ID NO: 3010935 - RNA, 19 nt, Artificial Sequence
  Description of Artificial Sequence: Synthetic oligonucleotide
aaaggucaugccguaggug

SEQ ID NO: 3010936 - RNA, 19 nt, Artificial Sequence
  Description of Artificial Sequence: Synthetic oligonucleotide
cuuuaagguuguuaaagua

SEQ ID NO: 3010937 - RNA, 19 nt, Artificial Sequence
  Description of Artificial Sequence: Synthetic oligonucleotide
ucaggguucagcucaucaa

SEQ ID NO: 3010938 - RNA, 19 nt, Artificial Sequence
  Description of Artificial Sequence: Synthetic oligonucleotide
auggcaugacaaacaauac

SEQ ID NO: 3010939 - RNA, 19 nt, Artificial Sequence
  Description of Artificial Sequence: Synthetic oligonucleotide
accagaaauggcaugacaa

SEQ ID NO: 3010940 - RNA, 19 nt, Artificial Sequence
  Description of Artificial Sequence: Synthetic oligonucleotide
cuauccggaagugugucag

SEQ ID NO: 3010941 - RNA, 19 nt, Artificial Sequence
  Description of Artificial Sequence: Synthetic oligonucleotide
agggguugagggccaaaac

SEQ ID NO: 3010942 - RNA, 19 nt, Artificial Sequence
  Description of Artificial Sequence: Synthetic oligonucleotide
agaagaucacagcuuucgu

SEQ ID NO: 3010943 - RNA, 19 nt, Artificial Sequence
  Description of Artificial Sequence: Synthetic oligonucleotide
cguacugccaggaagcucc

SEQ ID NO: 3010944 - RNA, 19 nt, Artificial Sequence
  Description of Artificial Sequence: Synthetic oligonucleotide
ggaagcuccgcagucaccg

SEQ ID NO: 3010945 - RNA, 19 nt, Artificial Sequence
  Description of Artificial Sequence: Synthetic oligonucleotide
aauccuuucggaggugccu

SEQ ID NO: 3010946 - RNA, 19 nt, Artificial Sequence
  Description of Artificial Sequence: Synthetic oligonucleotide
caucaagaacggcaagaag

SEQ ID NO: 3010947 - RNA, 19 nt, Artificial Sequence
  Description of Artificial Sequence: Synthetic oligonucleotide
ccuggagugcgcuuuaagg

SEQ ID NO: 3010948 - RNA, 19 nt, Artificial Sequence
  Description of Artificial Sequence: Synthetic oligonucleotide
guggucuccguacugccag

SEQ ID NO: 3010949 - RNA, 19 nt, Artificial Sequence
  Description of Artificial Sequence: Synthetic oligonucleotide
agaacggcaagaagaucac

SEQ ID NO: 3010950 - RNA, 19 nt, Artificial Sequence
  Description of Artificial Sequence: Synthetic oligonucleotide
aaccgaugaaguucugguu

SEQ ID NO: 3010951 - RNA, 19 nt, Artificial Sequence
  Description of Artificial Sequence: Synthetic oligonucleotide
uauccggaagugugucagg

SEQ ID NO: 3010952 - RNA, 19 nt, Artificial Sequence
  Description of Artificial Sequence: Synthetic oligonucleotide
ggcaugacaaacaauacaa

SEQ ID NO: 3010953 - RNA, 19 nt, Artificial Sequence
  Description of Artificial Sequence: Synthetic oligonucleotide
auccggaagugugucaggg

SEQ ID NO: 3010954 - RNA, 19 nt, Artificial Sequence
  Description of Artificial Sequence: Synthetic oligonucleotide
aaguucugguugcguuggg

SEQ ID NO: 3010955 - RNA, 19 nt, Artificial Sequence
  Description of Artificial Sequence: Synthetic oligonucleotide
ugggcaagugucguggucu

SEQ ID NO: 3010956 - RNA, 19 nt, Artificial Sequence
  Description of Artificial Sequence: Synthetic oligonucleotide
uccuggagugcgcuuuaag

SEQ ID NO: 3010957 - RNA, 19 nt, Artificial Sequence
  Description of Artificial Sequence: Synthetic oligonucleotide
augaaguucugguugcguu

SEQ ID NO: 3010958 - RNA, 19 nt, Artificial Sequence
  Description of Artificial Sequence: Synthetic oligonucleotide
uggagugcgcuuuaagguu

SEQ ID NO: 3010959 - RNA, 19 nt, Artificial Sequence
  Description of Artificial Sequence: Synthetic oligonucleotide
acuucaucgaggaaaccga

SEQ ID NO: 3010960 - RNA, 19 nt, Artificial Sequence
  Description of Artificial Sequence: Synthetic oligonucleotide
aggaaaccgaugaaguucu

SEQ ID NO: 3010961 - RNA, 19 nt, Artificial Sequence
  Description of Artificial Sequence: Synthetic oligonucleotide
aguucugguugcguugggg

SEQ ID NO: 3010962 - RNA, 19 nt, Artificial Sequence
  Description of Artificial Sequence: Synthetic oligonucleotide
ccguaggugauauuccugg

SEQ ID NO: 3010963 - RNA, 19 nt, Artificial Sequence
  Description of Artificial Sequence: Synthetic oligonucleotide
uuucgugcccaaugauggc

SEQ ID NO: 3010964 - RNA, 19 nt, Artificial Sequence
  Description of Artificial Sequence: Synthetic oligonucleotide
ucgugcccaaugauggcug

SEQ ID NO: 3010965 - RNA, 19 nt, Artificial Sequence
  Description of Artificial Sequence: Synthetic oligonucleotide
ugccguaggugauauuccu

SEQ ID NO: 3010966 - RNA, 19 nt, Artificial Sequence
  Description of Artificial Sequence: Synthetic oligonucleotide
augccguaggugauauucc

SEQ ID NO: 3010967 - RNA, 19 nt, Artificial Sequence
  Description of Artificial Sequence: Synthetic oligonucleotide
ggguugagggccaaaacag

SEQ ID NO: 3010968 - RNA, 19 nt, Artificial Sequence
  Description of Artificial Sequence: Synthetic oligonucleotide
gggguuugguacgaaaagg

SEQ ID NO: 3010969 - RNA, 19 nt, Artificial Sequence
  Description of Artificial Sequence: Synthetic oligonucleotide
ucaugcgaagggaauugua

SEQ ID NO: 3010970 - RNA, 19 nt, Artificial Sequence
  Description of Artificial Sequence: Synthetic oligonucleotide
gugccucucaugcgaaggg

SEQ ID NO: 3010971 - RNA, 19 nt, Artificial Sequence
  Description of Artificial Sequence: Synthetic oligonucleotide
uucgugcccaaugauggcu

SEQ ID NO: 3010972 - RNA, 19 nt, Artificial Sequence
  Description of Artificial Sequence: Synthetic oligonucleotide
gaccagaaauggcaugaca

SEQ ID NO: 3010973 - RNA, 19 nt, Artificial Sequence
  Description of Artificial Sequence: Synthetic oligonucleotide
caauccuuucggaggugcc

SEQ ID NO: 3010974 - RNA, 19 nt, Artificial Sequence
  Description of Artificial Sequence: Synthetic oligonucleotide
augggcaagugucgugguc

SEQ ID NO: 3010975 - RNA, 19 nt, Artificial Sequence
  Description of Artificial Sequence: Synthetic oligonucleotide
ggcaagaugggcaaguguc

SEQ ID NO: 3010976 - RNA, 19 nt, Artificial Sequence
  Description of Artificial Sequence: Synthetic oligonucleotide
agcccugaaggccaauccu

SEQ ID NO: 3010977 - RNA, 19 nt, Artificial Sequence
  Description of Artificial Sequence: Synthetic oligonucleotide
acaauacaagaaagcccac

SEQ ID NO: 3010978 - RNA, 19 nt, Artificial Sequence
  Description of Artificial Sequence: Synthetic oligonucleotide
ugucguggucuccguacug

SEQ ID NO: 3010979 - RNA, 19 nt, Artificial Sequence
  Description of Artificial Sequence: Synthetic oligonucleotide
cucaucaagaacggcaaga

SEQ ID NO: 3010980 - RNA, 19 nt, Artificial Sequence
  Description of Artificial Sequence: Synthetic oligonucleotide
gcuugaacuucaucgagga

SEQ ID NO: 3010981 - RNA, 19 nt, Artificial Sequence
  Description of Artificial Sequence: Synthetic oligonucleotide
auccuuucggaggugccuc

SEQ ID NO: 3010982 - RNA, 19 nt, Artificial Sequence
  Description of Artificial Sequence: Synthetic oligonucleotide
caaugauggcugcuugaac

SEQ ID NO: 3010983 - RNA, 19 nt, Artificial Sequence
  Description of Artificial Sequence: Synthetic oligonucleotide
gguucagcucaucaagaac

SEQ ID NO: 3010984 - RNA, 19 nt, Artificial Sequence
  Description of Artificial Sequence: Synthetic oligonucleotide
gggguugagggccaaaaca

SEQ ID NO: 3010985 - RNA, 19 nt, Artificial Sequence
  Description of Artificial Sequence: Synthetic oligonucleotide
ucguggucuccguacugcc

SEQ ID NO: 3010986 - RNA, 19 nt, Artificial Sequence
  Description of Artificial Sequence: Synthetic oligonucleotide
gucaggguucagcucauca

SEQ ID NO: 3010987 - RNA, 19 nt, Artificial Sequence
  Description of Artificial Sequence: Synthetic oligonucleotide
augauggcugcuugaacuu

SEQ ID NO: 3010988 - RNA, 19 nt, Artificial Sequence
  Description of Artificial Sequence: Synthetic oligonucleotide
caagaagaucacagcuuuc

SEQ ID NO: 3010989 - RNA, 19 nt, Artificial Sequence
  Description of Artificial Sequence: Synthetic oligonucleotide
uauuccuggagugcgcuuu

SEQ ID NO: 3010990 - RNA, 19 nt, Artificial Sequence
  Description of Artificial Sequence: Synthetic oligonucleotide
ucagcucaucaagaacggc

SEQ ID NO: 3010991 - RNA, 19 nt, Artificial Sequence
  Description of Artificial Sequence: Synthetic oligonucleotide
ggccaaauucugcuauccg

SEQ ID NO: 3010992 - RNA, 19 nt, Artificial Sequence
  Description of Artificial Sequence: Synthetic oligonucleotide
uuucggaggugccucucau

SEQ ID NO: 3010993 - RNA, 19 nt, Artificial Sequence
  Description of Artificial Sequence: Synthetic oligonucleotide
aaauggcaugacaaacaau

SEQ ID NO: 3010994 - RNA, 19 nt, Artificial Sequence
  Description of Artificial Sequence: Synthetic oligonucleotide
uucggaggugccucucaug

SEQ ID NO: 3010995 - RNA, 19 nt, Artificial Sequence
  Description of Artificial Sequence: Synthetic oligonucleotide
gauggcugcuugaacuuca

SEQ ID NO: 3010996 - RNA, 19 nt, Artificial Sequence
  Description of Artificial Sequence: Synthetic oligonucleotide
gaaggccaauccuuucgga

SEQ ID NO: 3010997 - RNA, 19 nt, Artificial Sequence
  Description of Artificial Sequence: Synthetic oligonucleotide
cuugggcacagcccugaag

SEQ ID NO: 3010998 - RNA, 19 nt, Artificial Sequence
  Description of Artificial Sequence: Synthetic oligonucleotide
acagcccugaaggccaauc

SEQ ID NO: 3010999 - RNA, 19 nt, Artificial Sequence
  Description of Artificial Sequence: Synthetic oligonucleotide
cagcccugaaggccaaucc

SEQ ID NO: 3011000 - RNA, 19 nt, Artificial Sequence
  Description of Artificial Sequence: Synthetic oligonucleotide
ugccaggaagcuccgcagu

SEQ ID NO: 3011001 - RNA, 19 nt, Artificial Sequence
  Description of Artificial Sequence: Synthetic oligonucleotide
guugcguugggguuuggua

SEQ ID NO: 3011002 - RNA, 19 nt, Artificial Sequence
  Description of Artificial Sequence: Synthetic oligonucleotide
gguugagggccaaaacagg

SEQ ID NO: 3011003 - RNA, 19 nt, Artificial Sequence
  Description of Artificial Sequence: Synthetic oligonucleotide
ugggcacagcccugaaggc

SEQ ID NO: 3011004 - RNA, 19 nt, Artificial Sequence
  Description of Artificial Sequence: Synthetic oligonucleotide
gcaagaugggcaagugucg

SEQ ID NO: 3011005 - RNA, 19 nt, Artificial Sequence
  Description of Artificial Sequence: Synthetic oligonucleotide
gcaagugucguggucuccg

SEQ ID NO: 3011006 - RNA, 19 nt, Artificial Sequence
  Description of Artificial Sequence: Synthetic oligonucleotide
cuggagugcgcuuuaaggu

SEQ ID NO: 3011007 - RNA, 19 nt, Artificial Sequence
  Description of Artificial Sequence: Synthetic oligonucleotide
gcgaagggaauuguacugg

SEQ ID NO: 3011008 - RNA, 19 nt, Artificial Sequence
  Description of Artificial Sequence: Synthetic oligonucleotide
aucacagcuuucgugccca

SEQ ID NO: 3011009 - RNA, 19 nt, Artificial Sequence
  Description of Artificial Sequence: Synthetic oligonucleotide
ccaaauucugcuauccgga

SEQ ID NO: 3011010 - RNA, 19 nt, Artificial Sequence
  Description of Artificial Sequence: Synthetic oligonucleotide
ggugccucucaugcgaagg

SEQ ID NO: 3011011 - RNA, 19 nt, Artificial Sequence
  Description of Artificial Sequence: Synthetic oligonucleotide
gcugcuugaacuucaucga

SEQ ID NO: 3011012 - RNA, 19 nt, Artificial Sequence
  Description of Artificial Sequence: Synthetic oligonucleotide
uggucuccguacugccagg

SEQ ID NO: 3011013 - RNA, 19 nt, Artificial Sequence
  Description of Artificial Sequence: Synthetic oligonucleotide
caggaagcuccgcagucac

SEQ ID NO: 3011014 - RNA, 19 nt, Artificial Sequence
  Description of Artificial Sequence: Synthetic oligonucleotide
uccgcagucaccggcggga

SEQ ID NO: 3011015 - RNA, 19 nt, Artificial Sequence
  Description of Artificial Sequence: Synthetic oligonucleotide
ucugguugcguugggguuu

SEQ ID NO: 3011016 - RNA, 19 nt, Artificial Sequence
  Description of Artificial Sequence: Synthetic oligonucleotide
aaagcccacuugggcacag

SEQ ID NO: 3011017 - RNA, 19 nt, Artificial Sequence
  Description of Artificial Sequence: Synthetic oligonucleotide
uucugguugcguugggguu

SEQ ID NO: 3011018 - RNA, 19 nt, Artificial Sequence
  Description of Artificial Sequence: Synthetic oligonucleotide
uccggaagugugucagggu

SEQ ID NO: 3011019 - RNA, 19 nt, Artificial Sequence
  Description of Artificial Sequence: Synthetic oligonucleotide
uucugcuauccggaagugu

SEQ ID NO: 3011020 - RNA, 19 nt, Artificial Sequence
  Description of Artificial Sequence: Synthetic oligonucleotide
cgcuuuaagguuguuaaag

SEQ ID NO: 3011021 - RNA, 19 nt, Artificial Sequence
  Description of Artificial Sequence: Synthetic oligonucleotide
ugcuauccggaaguguguc

SEQ ID NO: 3011022 - RNA, 19 nt, Artificial Sequence
  Description of Artificial Sequence: Synthetic oligonucleotide
uagggguugagggccaaaa

SEQ ID NO: 3011023 - RNA, 19 nt, Artificial Sequence
  Description of Artificial Sequence: Synthetic oligonucleotide
ggaggugccucucaugcga

SEQ ID NO: 3011024 - RNA, 19 nt, Artificial Sequence
  Description of Artificial Sequence: Synthetic oligonucleotide
gcuuucgugcccaaugaug

SEQ ID NO: 3011025 - RNA, 19 nt, Artificial Sequence
  Description of Artificial Sequence: Synthetic oligonucleotide
gucguggucuccguacugc

SEQ ID NO: 3011026 - RNA, 19 nt, Artificial Sequence
  Description of Artificial Sequence: Synthetic oligonucleotide
caaauucugcuauccggaa

SEQ ID NO: 3011027 - RNA, 19 nt, Artificial Sequence
  Description of Artificial Sequence: Synthetic oligonucleotide
aagcccacuugggcacagc

SEQ ID NO: 3011028 - RNA, 19 nt, Artificial Sequence
  Description of Artificial Sequence: Synthetic oligonucleotide
guugggguuugguacgaaa

SEQ ID NO: 3011029 - RNA, 19 nt, Artificial Sequence
  Description of Artificial Sequence: Synthetic oligonucleotide
acgaaaaggucaugccgua

SEQ ID NO: 3011030 - RNA, 19 nt, Artificial Sequence
  Description of Artificial Sequence: Synthetic oligonucleotide
agcuuucgugcccaaugau

SEQ ID NO: 3011031 - RNA, 19 nt, Artificial Sequence
  Description of Artificial Sequence: Synthetic oligonucleotide
gauauuccuggagugcgcu

SEQ ID NO: 3011032 - RNA, 19 nt, Artificial Sequence
  Description of Artificial Sequence: Synthetic oligonucleotide
guucugguugcguuggggu

SEQ ID NO: 3011033 - RNA, 19 nt, Artificial Sequence
  Description of Artificial Sequence: Synthetic oligonucleotide
ugauggcugcuugaacuuc

SEQ ID NO: 3011034 - RNA, 19 nt, Artificial Sequence
  Description of Artificial Sequence: Synthetic oligonucleotide
gaacuucaucgaggaaacc

SEQ ID NO: 3011035 - RNA, 19 nt, Artificial Sequence
  Description of Artificial Sequence: Synthetic oligonucleotide
gcuuuaagguuguuaaagu

SEQ ID NO: 3011036 - RNA, 19 nt, Artificial Sequence
  Description of Artificial Sequence: Synthetic oligonucleotide
aagugucguggucuccgua

SEQ ID NO: 3011037 - RNA, 19 nt, Artificial Sequence
  Description of Artificial Sequence: Synthetic oligonucleotide
gguuugguacgaaaagguc

SEQ ID NO: 3011038 - RNA, 19 nt, Artificial Sequence
  Description of Artificial Sequence: Synthetic oligonucleotide
ugccucucaugcgaaggga

SEQ ID NO: 3011039 - RNA, 19 nt, Artificial Sequence
  Description of Artificial Sequence: Synthetic oligonucleotide
aggguucagcucaucaaga

SEQ ID NO: 3011040 - RNA, 19 nt, Artificial Sequence
  Description of Artificial Sequence: Synthetic oligonucleotide
agcuccgcagucaccggcg

SEQ ID NO: 3011041 - RNA, 19 nt, Artificial Sequence
  Description of Artificial Sequence: Synthetic oligonucleotide
auucugcuauccggaagug

SEQ ID NO: 3011042 - RNA, 19 nt, Artificial Sequence
  Description of Artificial Sequence: Synthetic oligonucleotide
gaagggaauuguacuggaa

SEQ ID NO: 3011043 - RNA, 19 nt, Artificial Sequence
  Description of Artificial Sequence: Synthetic oligonucleotide
ggagugcgcuuuaagguug

SEQ ID NO: 3011044 - RNA, 19 nt, Artificial Sequence
  Description of Artificial Sequence: Synthetic oligonucleotide
uccuuucggaggugccucu

SEQ ID NO: 3011045 - RNA, 19 nt, Artificial Sequence
  Description of Artificial Sequence: Synthetic oligonucleotide
uugguacgaaaaggucaug

SEQ ID NO: 3011046 - RNA, 19 nt, Artificial Sequence
  Description of Artificial Sequence: Synthetic oligonucleotide
ggcgggaccagaaauggca

SEQ ID NO: 3011047 - RNA, 19 nt, Artificial Sequence
  Description of Artificial Sequence: Synthetic oligonucleotide
aggugccucucaugcgaag

SEQ ID NO: 3011048 - RNA, 19 nt, Artificial Sequence
  Description of Artificial Sequence: Synthetic oligonucleotide
gggaccagaaauggcauga

SEQ ID NO: 3011049 - RNA, 19 nt, Artificial Sequence
  Description of Artificial Sequence: Synthetic oligonucleotide
gaugaaguucugguugcgu

SEQ ID NO: 3011050 - RNA, 19 nt, Artificial Sequence
  Description of Artificial Sequence: Synthetic oligonucleotide
caagaacggcaagaagauc

SEQ ID NO: 3011051 - RNA, 19 nt, Artificial Sequence
  Description of Artificial Sequence: Synthetic oligonucleotide
ucaccggcgggaccagaaa

SEQ ID NO: 3011052 - RNA, 19 nt, Artificial Sequence
  Description of Artificial Sequence: Synthetic oligonucleotide
cagcuuucgugcccaauga

SEQ ID NO: 3011053 - RNA, 19 nt, Artificial Sequence
  Description of Artificial Sequence: Synthetic oligonucleotide
uccguacugccaggaagcu

SEQ ID NO: 3011054 - RNA, 19 nt, Artificial Sequence
  Description of Artificial Sequence: Synthetic oligonucleotide
aaguagggguugagggcca

SEQ ID NO: 3011055 - RNA, 19 nt, Artificial Sequence
  Description of Artificial Sequence: Synthetic oligonucleotide
accggcgggaccagaaaug

SEQ ID NO: 3011056 - RNA, 19 nt, Artificial Sequence
  Description of Artificial Sequence: Synthetic oligonucleotide
auauuccuggagugcgcuu

SEQ ID NO: 3011057 - RNA, 19 nt, Artificial Sequence
  Description of Artificial Sequence: Synthetic oligonucleotide
ugcccaaugauggcugcuu

SEQ ID NO: 3011058 - RNA, 19 nt, Artificial Sequence
  Description of Artificial Sequence: Synthetic oligonucleotide
cuuucggaggugccucuca

SEQ ID NO: 3011059 - RNA, 19 nt, Artificial Sequence
  Description of Artificial Sequence: Synthetic oligonucleotide
gcaagaagaucacagcuuu

SEQ ID NO: 3011060 - RNA, 19 nt, Artificial Sequence
  Description of Artificial Sequence: Synthetic oligonucleotide
caauacaagaaagcccacu

SEQ ID NO: 3011061 - RNA, 19 nt, Artificial Sequence
  Description of Artificial Sequence: Synthetic oligonucleotide
auuccuggagugcgcuuua

SEQ ID NO: 3011062 - RNA, 19 nt, Artificial Sequence
  Description of Artificial Sequence: Synthetic oligonucleotide
ccaauccuuucggaggugc

SEQ ID NO: 3011063 - RNA, 19 nt, Artificial Sequence
  Description of Artificial Sequence: Synthetic oligonucleotide
gaagugugucaggguucag

SEQ ID NO: 3011064 - RNA, 19 nt, Artificial Sequence
  Description of Artificial Sequence: Synthetic oligonucleotide
ggguucagcucaucaagaa

SEQ ID NO: 3011065 - RNA, 19 nt, Artificial Sequence
  Description of Artificial Sequence: Synthetic oligonucleotide
cuugaacuucaucgaggaa

SEQ ID NO: 3011066 - RNA, 19 nt, Artificial Sequence
  Description of Artificial Sequence: Synthetic oligonucleotide
cuccgcagucaccggcggg

SEQ ID NO: 3011067 - RNA, 19 nt, Artificial Sequence
  Description of Artificial Sequence: Synthetic oligonucleotide
agggccaaaacaggccaaa

SEQ ID NO: 3011068 - RNA, 19 nt, Artificial Sequence
  Description of Artificial Sequence: Synthetic oligonucleotide
ggguuugguacgaaaaggu

SEQ ID NO: 3011069 - RNA, 19 nt, Artificial Sequence
  Description of Artificial Sequence: Synthetic oligonucleotide
ccaaaacaggccaaauucu

SEQ ID NO: 3011070 - RNA, 19 nt, Artificial Sequence
  Description of Artificial Sequence: Synthetic oligonucleotide
ggcacagcccugaaggcca

SEQ ID NO: 3011071 - RNA, 19 nt, Artificial Sequence
  Description of Artificial Sequence: Synthetic oligonucleotide
gaugggcaagugucguggu

SEQ ID NO: 3011072 - RNA, 19 nt, Artificial Sequence
  Description of Artificial Sequence: Synthetic oligonucleotide
guacugccaggaagcuccg

SEQ ID NO: 3011073 - RNA, 19 nt, Artificial Sequence
  Description of Artificial Sequence: Synthetic oligonucleotide
caucgaggaaaccgaugaa

SEQ ID NO: 3011074 - RNA, 19 nt, Artificial Sequence
  Description of Artificial Sequence: Synthetic oligonucleotide
gaaagcccacuugggcaca

SEQ ID NO: 3011075 - RNA, 19 nt, Artificial Sequence
  Description of Artificial Sequence: Synthetic oligonucleotide
gggcacagcccugaaggcc

SEQ ID NO: 3011076 - RNA, 19 nt, Artificial Sequence
  Description of Artificial Sequence: Synthetic oligonucleotide
gcccaaugauggcugcuug

SEQ ID NO: 3011077 - RNA, 19 nt, Artificial Sequence
  Description of Artificial Sequence: Synthetic oligonucleotide
cugguugcguugggguuug

SEQ ID NO: 3011078 - RNA, 19 nt, Artificial Sequence
  Description of Artificial Sequence: Synthetic oligonucleotide
gcuauccggaaguguguca

SEQ ID NO: 3011079 - RNA, 19 nt, Artificial Sequence
  Description of Artificial Sequence: Synthetic oligonucleotide
cuucaucgaggaaaccgau

SEQ ID NO: 3011080 - RNA, 19 nt, Artificial Sequence
  Description of Artificial Sequence: Synthetic oligonucleotide
gcagucaccggcgggacca

SEQ ID NO: 3011081 - RNA, 19 nt, Artificial Sequence
  Description of Artificial Sequence: Synthetic oligonucleotide
ccggcgggaccagaaaugg

SEQ ID NO: 3011082 - RNA, 19 nt, Artificial Sequence
  Description of Artificial Sequence: Synthetic oligonucleotide
acuugggcacagcccugaa

SEQ ID NO: 3011083 - RNA, 19 nt, Artificial Sequence
  Description of Artificial Sequence: Synthetic oligonucleotide
caagaugggcaagugucgu

SEQ ID NO: 3011084 - RNA, 19 nt, Artificial Sequence
  Description of Artificial Sequence: Synthetic oligonucleotide
gccaggaagcuccgcaguc

SEQ ID NO: 3011085 - RNA, 19 nt, Artificial Sequence
  Description of Artificial Sequence: Synthetic oligonucleotide
gccguaggugauauuccug

SEQ ID NO: 3011086 - RNA, 19 nt, Artificial Sequence
  Description of Artificial Sequence: Synthetic oligonucleotide
gugcgcuuuaagguuguua

SEQ ID NO: 3011087 - RNA, 19 nt, Artificial Sequence
  Description of Artificial Sequence: Synthetic oligonucleotide
ucacagcuuucgugcccaa

SEQ ID NO: 3011088 - RNA, 19 nt, Artificial Sequence
  Description of Artificial Sequence: Synthetic oligonucleotide
gagggccaaaacaggccaa

SEQ ID NO: 3011089 - RNA, 19 nt, Artificial Sequence
  Description of Artificial Sequence: Synthetic oligonucleotide
ggcgccggcaagaugggca

SEQ ID NO: 3011090 - RNA, 19 nt, Artificial Sequence
  Description of Artificial Sequence: Synthetic oligonucleotide
ggccaauccuuucggaggu

SEQ ID NO: 3011091 - RNA, 19 nt, Artificial Sequence
  Description of Artificial Sequence: Synthetic oligonucleotide
ggaccagaaauggcaugac

SEQ ID NO: 3011092 - RNA, 19 nt, Artificial Sequence
  Description of Artificial Sequence: Synthetic oligonucleotide
uuccuggagugcgcuuuaa

SEQ ID NO: 3011093 - RNA, 19 nt, Artificial Sequence
  Description of Artificial Sequence: Synthetic oligonucleotide
cugcuauccggaagugugu

SEQ ID NO: 3011094 - RNA, 19 nt, Artificial Sequence
  Description of Artificial Sequence: Synthetic oligonucleotide
aggucaugccguaggugau

SEQ ID NO: 3011095 - RNA, 19 nt, Artificial Sequence
  Description of Artificial Sequence: Synthetic oligonucleotide
gcuccgcagucaccggcgg

SEQ ID NO: 3011096 - RNA, 19 nt, Artificial Sequence
  Description of Artificial Sequence: Synthetic oligonucleotide
ucaugccguaggugauauu

SEQ ID NO: 3011097 - RNA, 19 nt, Artificial Sequence
  Description of Artificial Sequence: Synthetic oligonucleotide
gucuccguacugccaggaa

SEQ ID NO: 3011098 - RNA, 19 nt, Artificial Sequence
  Description of Artificial Sequence: Synthetic oligonucleotide
gugucguggucuccguacu

SEQ ID NO: 3011099 - RNA, 19 nt, Artificial Sequence
  Description of Artificial Sequence: Synthetic oligonucleotide
cccaaugauggcugcuuga

SEQ ID NO: 3011100 - RNA, 19 nt, Artificial Sequence
  Description of Artificial Sequence: Synthetic oligonucleotide
cacuugggcacagcccuga

SEQ ID NO: 3011101 - RNA, 19 nt, Artificial Sequence
  Description of Artificial Sequence: Synthetic oligonucleotide
gaggugccucucaugcgaa

SEQ ID NO: 3011102 - RNA, 19 nt, Artificial Sequence
  Description of Artificial Sequence: Synthetic oligonucleotide
ggccaaaacaggccaaauu

SEQ ID NO: 3011103 - RNA, 19 nt, Artificial Sequence
  Description of Artificial Sequence: Synthetic oligonucleotide
gucaccggcgggaccagaa

SEQ ID NO: 3011104 - RNA, 19 nt, Artificial Sequence
  Description of Artificial Sequence: Synthetic oligonucleotide
ccaaugauggcugcuugaa

SEQ ID NO: 3011105 - RNA, 19 nt, Artificial Sequence
  Description of Artificial Sequence: Synthetic oligonucleotide
gggcaagugucguggucuc

SEQ ID NO: 3011106 - RNA, 19 nt, Artificial Sequence
  Description of Artificial Sequence: Synthetic oligonucleotide
auggcugcuugaacuucau

SEQ ID NO: 3011107 - RNA, 19 nt, Artificial Sequence
  Description of Artificial Sequence: Synthetic oligonucleotide
ggcaagaagaucacagcuu

SEQ ID NO: 3011108 - RNA, 19 nt, Artificial Sequence
  Description of Artificial Sequence: Synthetic oligonucleotide
gucaugccguaggugauau

SEQ ID NO: 3011109 - RNA, 19 nt, Artificial Sequence
  Description of Artificial Sequence: Synthetic oligonucleotide
aguagggguugagggccaa

SEQ ID NO: 3011110 - RNA, 19 nt, Artificial Sequence
  Description of Artificial Sequence: Synthetic oligonucleotide
cgaaaaggucaugccguag

SEQ ID NO: 3011111 - RNA, 19 nt, Artificial Sequence
  Description of Artificial Sequence: Synthetic oligonucleotide
gcgcuuuaagguuguuaaa

SEQ ID NO: 3011112 - RNA, 19 nt, Artificial Sequence
  Description of Artificial Sequence: Synthetic oligonucleotide
ggcaagugucguggucucc

SEQ ID NO: 3011113 - RNA, 19 nt, Artificial Sequence
  Description of Artificial Sequence: Synthetic oligonucleotide
ggaaaccgaugaaguucug

SEQ ID NO: 3011114 - RNA, 19 nt, Artificial Sequence
  Description of Artificial Sequence: Synthetic oligonucleotide
ugguugcguugggguuugg

SEQ ID NO: 3011115 - RNA, 19 nt, Artificial Sequence
  Description of Artificial Sequence: Synthetic oligonucleotide
cggaggugccucucaugcg

SEQ ID NO: 3011116 - RNA, 19 nt, Artificial Sequence
  Description of Artificial Sequence: Synthetic oligonucleotide
cucaugcgaagggaauugu

SEQ ID NO: 3011117 - RNA, 19 nt, Artificial Sequence
  Description of Artificial Sequence: Synthetic oligonucleotide
cucucaugcgaagggaauu

SEQ ID NO: 3011118 - RNA, 19 nt, Artificial Sequence
  Description of Artificial Sequence: Synthetic oligonucleotide
gagugcgcuuuaagguugu

SEQ ID NO: 3011119 - RNA, 19 nt, Artificial Sequence
  Description of Artificial Sequence: Synthetic oligonucleotide
caagugucguggucuccgu

SEQ ID NO: 3011120 - RNA, 19 nt, Artificial Sequence
  Description of Artificial Sequence: Synthetic oligonucleotide
cgugcccaaugauggcugc

SEQ ID NO: 3011121 - RNA, 19 nt, Artificial Sequence
  Description of Artificial Sequence: Synthetic oligonucleotide
ggucuccguacugccagga

SEQ ID NO: 3011122 - RNA, 19 nt, Artificial Sequence
  Description of Artificial Sequence: Synthetic oligonucleotide
gccucucaugcgaagggaa

SEQ ID NO: 3011123 - RNA, 19 nt, Artificial Sequence
  Description of Artificial Sequence: Synthetic oligonucleotide
cggcaagaagaucacagcu

SEQ ID NO: 3011124 - RNA, 19 nt, Artificial Sequence
  Description of Artificial Sequence: Synthetic oligonucleotide
cgggaccagaaauggcaug

SEQ ID NO: 3011125 - RNA, 19 nt, Artificial Sequence
  Description of Artificial Sequence: Synthetic oligonucleotide
agucaccggcgggaccaga

SEQ ID NO: 3011126 - RNA, 19 nt, Artificial Sequence
  Description of Artificial Sequence: Synthetic oligonucleotide
ccacuugggcacagcccug

SEQ ID NO: 3011127 - RNA, 19 nt, Artificial Sequence
  Description of Artificial Sequence: Synthetic oligonucleotide
caccggcgggaccagaaau

SEQ ID NO: 3011128 - RNA, 19 nt, Artificial Sequence
  Description of Artificial Sequence: Synthetic oligonucleotide
agugcgcuuuaagguuguu

SEQ ID NO: 3011129 - RNA, 19 nt, Artificial Sequence
  Description of Artificial Sequence: Synthetic oligonucleotide
cagucaccggcgggaccag

SEQ ID NO: 3011130 - RNA, 19 nt, Artificial Sequence
  Description of Artificial Sequence: Synthetic oligonucleotide
ggucaugccguaggugaua

SEQ ID NO: 3011131 - RNA, 19 nt, Artificial Sequence
  Description of Artificial Sequence: Synthetic oligonucleotide
guagggguugagggccaaa

SEQ ID NO: 3011132 - RNA, 19 nt, Artificial Sequence
  Description of Artificial Sequence: Synthetic oligonucleotide
ccggcaagaugggcaagug

SEQ ID NO: 3011133 - RNA, 19 nt, Artificial Sequence
  Description of Artificial Sequence: Synthetic oligonucleotide
gccaauccuuucggaggug

SEQ ID NO: 3011134 - RNA, 19 nt, Artificial Sequence
  Description of Artificial Sequence: Synthetic oligonucleotide
gcgccggcaagaugggcaa

SEQ ID NO: 3011135 - RNA, 19 nt, Artificial Sequence
  Description of Artificial Sequence: Synthetic oligonucleotide
ccggaagugugucaggguu

SEQ ID NO: 3011136 - RNA, 19 nt, Artificial Sequence
  Description of Artificial Sequence: Synthetic oligonucleotide
gguugcguugggguuuggu

SEQ ID NO: 3011137 - RNA, 19 nt, Artificial Sequence
  Description of Artificial Sequence: Synthetic oligonucleotide
cggcgggaccagaaauggc

SEQ ID NO: 3011138 - RNA, 19 nt, Artificial Sequence
  Description of Artificial Sequence: Synthetic oligonucleotide
gugcccaaugauggcugcu

SEQ ID NO: 3011139 - RNA, 19 nt, Artificial Sequence
  Description of Artificial Sequence: Synthetic oligonucleotide
cguggucuccguacugcca

SEQ ID NO: 3011140 - RNA, 19 nt, Artificial Sequence
  Description of Artificial Sequence: Synthetic oligonucleotide
ccguacugccaggaagcuc

SEQ ID NO: 3011141 - RNA, 19 nt, Artificial Sequence
  Description of Artificial Sequence: Synthetic oligonucleotide
ccuuucggaggugccucuc

SEQ ID NO: 3011142 - RNA, 19 nt, Artificial Sequence
  Description of Artificial Sequence: Synthetic oligonucleotide
ccucucaugcgaagggaau

SEQ ID NO: 3011143 - RNA, 19 nt, Artificial Sequence
  Description of Artificial Sequence: Synthetic oligonucleotide
gccggcaagaugggcaagu

SEQ ID NO: 3011144 - RNA, 19 nt, Artificial Sequence
  Description of Artificial Sequence: Synthetic oligonucleotide
gcguugggguuugguacga

SEQ ID NO: 3011145 - RNA, 19 nt, Artificial Sequence
  Description of Artificial Sequence: Synthetic oligonucleotide
cgcagucaccggcgggacc

SEQ ID NO: 3011146 - RNA, 19 nt, Artificial Sequence
  Description of Artificial Sequence: Synthetic oligonucleotide
cgaggaaaccgaugaaguu

SEQ ID NO: 3011147 - RNA, 19 nt, Artificial Sequence
  Description of Artificial Sequence: Synthetic oligonucleotide
gcccugaaggccaauccuu

SEQ ID NO: 3011148 - RNA, 19 nt, Artificial Sequence
  Description of Artificial Sequence: Synthetic oligonucleotide
cccugaaggccaauccuuu

SEQ ID NO: 3011149 - RNA, 19 nt, Artificial Sequence
  Description of Artificial Sequence: Synthetic oligonucleotide
cacagcuuucgugcccaau

SEQ ID NO: 3011150 - RNA, 19 nt, Artificial Sequence
  Description of Artificial Sequence: Synthetic oligonucleotide
gcgggaccagaaauggcau

SEQ ID NO: 3011151 - RNA, 19 nt, Artificial Sequence
  Description of Artificial Sequence: Synthetic oligonucleotide
gggccaaaacaggccaaau

SEQ ID NO: 3011152 - RNA, 19 nt, Artificial Sequence
  Description of Artificial Sequence: Synthetic oligonucleotide
ccgcagucaccggcgggac

SEQ ID NO: 3011153 - RNA, 19 nt, Artificial Sequence
  Description of Artificial Sequence: Synthetic oligonucleotide
cggcaagaugggcaagugu

SEQ ID NO: 3011154 - RNA, 19 nt, Artificial Sequence
  Description of Artificial Sequence: Synthetic oligonucleotide
cgccggcaagaugggcaag

SEQ ID NO: 3011155 - RNA, 19 nt, Artificial Sequence
  Description of Artificial Sequence: Synthetic oligonucleotide
cacagcccugaaggccaau

SEQ ID NO: 3011156 - RNA, 19 nt, Artificial Sequence
  Description of Artificial Sequence: Synthetic oligonucleotide
cguugggguuugguacgaa

SEQ ID NO: 3011157 - RNA, 19 nt, Artificial Sequence
  Description of Artificial Sequence: Synthetic oligonucleotide
auaauguuguaacaaaucc

SEQ ID NO: 3011158 - RNA, 19 nt, Artificial Sequence
  Description of Artificial Sequence: Synthetic oligonucleotide
aauguuguaacaaauccgg

SEQ ID NO: 3011159 - RNA, 19 nt, Artificial Sequence
  Description of Artificial Sequence: Synthetic oligonucleotide
uauugaaccauucagggcu

SEQ ID NO: 3011160 - RNA, 19 nt, Artificial Sequence
  Description of Artificial Sequence: Synthetic oligonucleotide
uuagcuaaugauaauguug

SEQ ID NO: 3011161 - RNA, 19 nt, Artificial Sequence
  Description of Artificial Sequence: Synthetic oligonucleotide
uaauguuguaacaaauccg

SEQ ID NO: 3011162 - RNA, 19 nt, Artificial Sequence
  Description of Artificial Sequence: Synthetic oligonucleotide
aagcugaucacgccgaccc

SEQ ID NO: 3011163 - RNA, 19 nt, Artificial Sequence
  Description of Artificial Sequence: Synthetic oligonucleotide
cuuauugaaccauucaggg

SEQ ID NO: 3011164 - RNA, 19 nt, Artificial Sequence
  Description of Artificial Sequence: Synthetic oligonucleotide
aaucaggaagagucgaucg

SEQ ID NO: 3011165 - RNA, 19 nt, Artificial Sequence
  Description of Artificial Sequence: Synthetic oligonucleotide
aggaagauuccccaggacc

SEQ ID NO: 3011166 - RNA, 19 nt, Artificial Sequence
  Description of Artificial Sequence: Synthetic oligonucleotide
cuaaugauaauguuguaac

SEQ ID NO: 3011167 - RNA, 19 nt, Artificial Sequence
  Description of Artificial Sequence: Synthetic oligonucleotide
aguucuugggaauuguugg

SEQ ID NO: 3011168 - RNA, 19 nt, Artificial Sequence
  Description of Artificial Sequence: Synthetic oligonucleotide
auuguuggaauauggauug

SEQ ID NO: 3011169 - RNA, 19 nt, Artificial Sequence
  Description of Artificial Sequence: Synthetic oligonucleotide
uggauugcaucuuacuucg

SEQ ID NO: 3011170 - RNA, 19 nt, Artificial Sequence
  Description of Artificial Sequence: Synthetic oligonucleotide
uggaauauggauugcaucu

SEQ ID NO: 3011171 - RNA, 19 nt, Artificial Sequence
  Description of Artificial Sequence: Synthetic oligonucleotide
auagugcccuuauugaacc

SEQ ID NO: 3011172 - RNA, 19 nt, Artificial Sequence
  Description of Artificial Sequence: Synthetic oligonucleotide
uuuuagcuaaugauaaugu

SEQ ID NO: 3011173 - RNA, 19 nt, Artificial Sequence
  Description of Artificial Sequence: Synthetic oligonucleotide
uagcuaaugauaauguugu

SEQ ID NO: 3011174 - RNA, 19 nt, Artificial Sequence
  Description of Artificial Sequence: Synthetic oligonucleotide
aaugauaauguuguaacaa

SEQ ID NO: 3011175 - RNA, 19 nt, Artificial Sequence
  Description of Artificial Sequence: Synthetic oligonucleotide
cauaaagagauccccagcc

SEQ ID NO: 3011176 - RNA, 19 nt, Artificial Sequence
  Description of Artificial Sequence: Synthetic oligonucleotide
auggauugcaucuuacuuc

SEQ ID NO: 3011177 - RNA, 19 nt, Artificial Sequence
  Description of Artificial Sequence: Synthetic oligonucleotide
ugcaaagcugaucacgccg

SEQ ID NO: 3011178 - RNA, 19 nt, Artificial Sequence
  Description of Artificial Sequence: Synthetic oligonucleotide
auaaagagauccccagccc

SEQ ID NO: 3011179 - RNA, 19 nt, Artificial Sequence
  Description of Artificial Sequence: Synthetic oligonucleotide
aaauccggcuagcauuccc

SEQ ID NO: 3011180 - RNA, 19 nt, Artificial Sequence
  Description of Artificial Sequence: Synthetic oligonucleotide
aacaaauccggcuagcauu

SEQ ID NO: 3011181 - RNA, 19 nt, Artificial Sequence
  Description of Artificial Sequence: Synthetic oligonucleotide
uguuguaacaaauccggcu

SEQ ID NO: 3011182 - RNA, 19 nt, Artificial Sequence
  Description of Artificial Sequence: Synthetic oligonucleotide
ucucuggaaaggcagaugu

SEQ ID NO: 3011183 - RNA, 19 nt, Artificial Sequence
  Description of Artificial Sequence: Synthetic oligonucleotide
uugcaucuuacuucgaaag

SEQ ID NO: 3011184 - RNA, 19 nt, Artificial Sequence
  Description of Artificial Sequence: Synthetic oligonucleotide
aaggcagaugugcucauag

SEQ ID NO: 3011185 - RNA, 19 nt, Artificial Sequence
  Description of Artificial Sequence: Synthetic oligonucleotide
cuuuaaucaggaagagucg

SEQ ID NO: 3011186 - RNA, 19 nt, Artificial Sequence
  Description of Artificial Sequence: Synthetic oligonucleotide
acugugaacucccaaagcu

SEQ ID NO: 3011187 - RNA, 19 nt, Artificial Sequence
  Description of Artificial Sequence: Synthetic oligonucleotide
aauauggauugcaucuuac

SEQ ID NO: 3011188 - RNA, 19 nt, Artificial Sequence
  Description of Artificial Sequence: Synthetic oligonucleotide
ucgaaaguccugcauacug

SEQ ID NO: 3011189 - RNA, 19 nt, Artificial Sequence
  Description of Artificial Sequence: Synthetic oligonucleotide
cuuacuucgaaaguccugc

SEQ ID NO: 3011190 - RNA, 19 nt, Artificial Sequence
  Description of Artificial Sequence: Synthetic oligonucleotide
uaaagagauccccagccca

SEQ ID NO: 3011191 - RNA, 19 nt, Artificial Sequence
  Description of Artificial Sequence: Synthetic oligonucleotide
ugauaauguuguaacaaau

SEQ ID NO: 3011192 - RNA, 19 nt, Artificial Sequence
  Description of Artificial Sequence: Synthetic oligonucleotide
ucuggaaaggcagaugugc

SEQ ID NO: 3011193 - RNA, 19 nt, Artificial Sequence
  Description of Artificial Sequence: Synthetic oligonucleotide
accaggcauaaagagaucc

SEQ ID NO: 3011194 - RNA, 19 nt, Artificial Sequence
  Description of Artificial Sequence: Synthetic oligonucleotide
ccuuuaaucaggaagaguc

SEQ ID NO: 3011195 - RNA, 19 nt, Artificial Sequence
  Description of Artificial Sequence: Synthetic oligonucleotide
aauuguuggaauauggauu

SEQ ID NO: 3011196 - RNA, 19 nt, Artificial Sequence
  Description of Artificial Sequence: Synthetic oligonucleotide
gaagagucgaucguccugg

SEQ ID NO: 3011197 - RNA, 19 nt, Artificial Sequence
  Description of Artificial Sequence: Synthetic oligonucleotide
caucuuacuucgaaagucc

SEQ ID NO: 3011198 - RNA, 19 nt, Artificial Sequence
  Description of Artificial Sequence: Synthetic oligonucleotide
uuauugaaccauucagggc

SEQ ID NO: 3011199 - RNA, 19 nt, Artificial Sequence
  Description of Artificial Sequence: Synthetic oligonucleotide
uaaugauaauguuguaaca

SEQ ID NO: 3011200 - RNA, 19 nt, Artificial Sequence
  Description of Artificial Sequence: Synthetic oligonucleotide
uauggauugcaucuuacuu

SEQ ID NO: 3011201 - RNA, 19 nt, Artificial Sequence
  Description of Artificial Sequence: Synthetic oligonucleotide
gauaauguuguaacaaauc

SEQ ID NO: 3011202 - RNA, 19 nt, Artificial Sequence
  Description of Artificial Sequence: Synthetic oligonucleotide
acugcaaagcugaucacgc

SEQ ID NO: 3011203 - RNA, 19 nt, Artificial Sequence
  Description of Artificial Sequence: Synthetic oligonucleotide
auacugugaacucccaaag

SEQ ID NO: 3011204 - RNA, 19 nt, Artificial Sequence
  Description of Artificial Sequence: Synthetic oligonucleotide
uuccagacugcaaagcuga

SEQ ID NO: 3011205 - RNA, 19 nt, Artificial Sequence
  Description of Artificial Sequence: Synthetic oligonucleotide
uuuaaucaggaagagucga

SEQ ID NO: 3011206 - RNA, 19 nt, Artificial Sequence
  Description of Artificial Sequence: Synthetic oligonucleotide
uuuccagacugcaaagcug

SEQ ID NO: 3011207 - RNA, 19 nt, Artificial Sequence
  Description of Artificial Sequence: Synthetic oligonucleotide
cuagugaggaagauucccc

SEQ ID NO: 3011208 - RNA, 19 nt, Artificial Sequence
  Description of Artificial Sequence: Synthetic oligonucleotide
aacucccaaagcuuuccag

SEQ ID NO: 3011209 - RNA, 19 nt, Artificial Sequence
  Description of Artificial Sequence: Synthetic oligonucleotide
uuccccaggaccagaaucc

SEQ ID NO: 3011210 - RNA, 19 nt, Artificial Sequence
  Description of Artificial Sequence: Synthetic oligonucleotide
ucuagugaggaagauuccc

SEQ ID NO: 3011211 - RNA, 19 nt, Artificial Sequence
  Description of Artificial Sequence: Synthetic oligonucleotide
gagucgaucguccugggac

SEQ ID NO: 3011212 - RNA, 19 nt, Artificial Sequence
  Description of Artificial Sequence: Synthetic oligonucleotide
uuguaacaaauccggcuag

SEQ ID NO: 3011213 - RNA, 19 nt, Artificial Sequence
  Description of Artificial Sequence: Synthetic oligonucleotide
agucgaucguccugggacc

SEQ ID NO: 3011214 - RNA, 19 nt, Artificial Sequence
  Description of Artificial Sequence: Synthetic oligonucleotide
gacugcaaagcugaucacg

SEQ ID NO: 3011215 - RNA, 19 nt, Artificial Sequence
  Description of Artificial Sequence: Synthetic oligonucleotide
aaagcugaucacgccgacc

SEQ ID NO: 3011216 - RNA, 19 nt, Artificial Sequence
  Description of Artificial Sequence: Synthetic oligonucleotide
cauagugcccuuauugaac

SEQ ID NO: 3011217 - RNA, 19 nt, Artificial Sequence
  Description of Artificial Sequence: Synthetic oligonucleotide
aaguccugcauacugugaa

SEQ ID NO: 3011218 - RNA, 19 nt, Artificial Sequence
  Description of Artificial Sequence: Synthetic oligonucleotide
cagaugugcucauagugcc

SEQ ID NO: 3011219 - RNA, 19 nt, Artificial Sequence
  Description of Artificial Sequence: Synthetic oligonucleotide
cuagcauucccgcugcugc

SEQ ID NO: 3011220 - RNA, 19 nt, Artificial Sequence
  Description of Artificial Sequence: Synthetic oligonucleotide
ucuuacuucgaaaguccug

SEQ ID NO: 3011221 - RNA, 19 nt, Artificial Sequence
  Description of Artificial Sequence: Synthetic oligonucleotide
ccuuauugaaccauucagg

SEQ ID NO: 3011222 - RNA, 19 nt, Artificial Sequence
  Description of Artificial Sequence: Synthetic oligonucleotide
cagacugcaaagcugauca

SEQ ID NO: 3011223 - RNA, 19 nt, Artificial Sequence
  Description of Artificial Sequence: Synthetic oligonucleotide
aaccauucagggcuuuucu

SEQ ID NO: 3011224 - RNA, 19 nt, Artificial Sequence
  Description of Artificial Sequence: Synthetic oligonucleotide
ugaggaagauuccccagga

SEQ ID NO: 3011225 - RNA, 19 nt, Artificial Sequence
  Description of Artificial Sequence: Synthetic oligonucleotide
uuggaauauggauugcauc

SEQ ID NO: 3011226 - RNA, 19 nt, Artificial Sequence
  Description of Artificial Sequence: Synthetic oligonucleotide
cuucgaaaguccugcauac

SEQ ID NO: 3011227 - RNA, 19 nt, Artificial Sequence
  Description of Artificial Sequence: Synthetic oligonucleotide
aauccggcuagcauucccg

SEQ ID NO: 3011228 - RNA, 19 nt, Artificial Sequence
  Description of Artificial Sequence: Synthetic oligonucleotide
agcaagggaagacccacuc

SEQ ID NO: 3011229 - RNA, 19 nt, Artificial Sequence
  Description of Artificial Sequence: Synthetic oligonucleotide
uuuagcuaaugauaauguu

SEQ ID NO: 3011230 - RNA, 19 nt, Artificial Sequence
  Description of Artificial Sequence: Synthetic oligonucleotide
ugugaacucccaaagcuuu

SEQ ID NO: 3011231 - RNA, 19 nt, Artificial Sequence
  Description of Artificial Sequence: Synthetic oligonucleotide
uacugugaacucccaaagc

SEQ ID NO: 3011232 - RNA, 19 nt, Artificial Sequence
  Description of Artificial Sequence: Synthetic oligonucleotide
agagcaagggaagacccac

SEQ ID NO: 3011233 - RNA, 19 nt, Artificial Sequence
  Description of Artificial Sequence: Synthetic oligonucleotide
ugcaucuuacuucgaaagu

SEQ ID NO: 3011234 - RNA, 19 nt, Artificial Sequence
  Description of Artificial Sequence: Synthetic oligonucleotide
auauggauugcaucuuacu

SEQ ID NO: 3011235 - RNA, 19 nt, Artificial Sequence
  Description of Artificial Sequence: Synthetic oligonucleotide
ucauagugcccuuauugaa

SEQ ID NO: 3011236 - RNA, 19 nt, Artificial Sequence
  Description of Artificial Sequence: Synthetic oligonucleotide
uguuggaauauggauugca

SEQ ID NO: 3011237 - RNA, 19 nt, Artificial Sequence
  Description of Artificial Sequence: Synthetic oligonucleotide
caagggaagacccacucuc

SEQ ID NO: 3011238 - RNA, 19 nt, Artificial Sequence
  Description of Artificial Sequence: Synthetic oligonucleotide
aaagagauccccagcccag

SEQ ID NO: 3011239 - RNA, 19 nt, Artificial Sequence
  Description of Artificial Sequence: Synthetic oligonucleotide
uuaaucaggaagagucgau

SEQ ID NO: 3011240 - RNA, 19 nt, Artificial Sequence
  Description of Artificial Sequence: Synthetic oligonucleotide
guuguaacaaauccggcua

SEQ ID NO: 3011241 - RNA, 19 nt, Artificial Sequence
  Description of Artificial Sequence: Synthetic oligonucleotide
uaacaaauccggcuagcau

SEQ ID NO: 3011242 - RNA, 19 nt, Artificial Sequence
  Description of Artificial Sequence: Synthetic oligonucleotide
agugaggaagauuccccag

SEQ ID NO: 3011243 - RNA, 19 nt, Artificial Sequence
  Description of Artificial Sequence: Synthetic oligonucleotide
cugcauacugugaacuccc

SEQ ID NO: 3011244 - RNA, 19 nt, Artificial Sequence
  Description of Artificial Sequence: Synthetic oligonucleotide
auugcaucuuacuucgaaa

SEQ ID NO: 3011245 - RNA, 19 nt, Artificial Sequence
  Description of Artificial Sequence: Synthetic oligonucleotide
gaguucuugggaauuguug

SEQ ID NO: 3011246 - RNA, 19 nt, Artificial Sequence
  Description of Artificial Sequence: Synthetic oligonucleotide
gaauuguuggaauauggau

SEQ ID NO: 3011247 - RNA, 19 nt, Artificial Sequence
  Description of Artificial Sequence: Synthetic oligonucleotide
acaaauccggcuagcauuc

SEQ ID NO: 3011248 - RNA, 19 nt, Artificial Sequence
  Description of Artificial Sequence: Synthetic oligonucleotide
agacccacucucuggaaag

SEQ ID NO: 3011249 - RNA, 19 nt, Artificial Sequence
  Description of Artificial Sequence: Synthetic oligonucleotide
uagugaggaagauucccca

SEQ ID NO: 3011250 - RNA, 19 nt, Artificial Sequence
  Description of Artificial Sequence: Synthetic oligonucleotide
ugcugcugcagaaccgagg

SEQ ID NO: 3011251 - RNA, 19 nt, Artificial Sequence
  Description of Artificial Sequence: Synthetic oligonucleotide
acuucgaaaguccugcaua

SEQ ID NO: 3011252 - RNA, 19 nt, Artificial Sequence
  Description of Artificial Sequence: Synthetic oligonucleotide
gcucauagugcccuuauug

SEQ ID NO: 3011253 - RNA, 19 nt, Artificial Sequence
  Description of Artificial Sequence: Synthetic oligonucleotide
gauugcaucuuacuucgaa

SEQ ID NO: 3011254 - RNA, 19 nt, Artificial Sequence
  Description of Artificial Sequence: Synthetic oligonucleotide
aucacgccgaccccacacc

SEQ ID NO: 3011255 - RNA, 19 nt, Artificial Sequence
  Description of Artificial Sequence: Synthetic oligonucleotide
auguuguaacaaauccggc

SEQ ID NO: 3011256 - RNA, 19 nt, Artificial Sequence
  Description of Artificial Sequence: Synthetic oligonucleotide
ugaacucccaaagcuuucc

SEQ ID NO: 3011257 - RNA, 19 nt, Artificial Sequence
  Description of Artificial Sequence: Synthetic oligonucleotide
accagaauccgcggugucc

SEQ ID NO: 3011258 - RNA, 19 nt, Artificial Sequence
  Description of Artificial Sequence: Synthetic oligonucleotide
uguaacaaauccggcuagc

SEQ ID NO: 3011259 - RNA, 19 nt, Artificial Sequence
  Description of Artificial Sequence: Synthetic oligonucleotide
aagacccacucucuggaaa

SEQ ID NO: 3011260 - RNA, 19 nt, Artificial Sequence
  Description of Artificial Sequence: Synthetic oligonucleotide
cauacugugaacucccaaa

SEQ ID NO: 3011261 - RNA, 19 nt, Artificial Sequence
  Description of Artificial Sequence: Synthetic oligonucleotide
acaccaggcauaaagagau

SEQ ID NO: 3011262 - RNA, 19 nt, Artificial Sequence
  Description of Artificial Sequence: Synthetic oligonucleotide
ggcauaaagagauccccag

SEQ ID NO: 3011263 - RNA, 19 nt, Artificial Sequence
  Description of Artificial Sequence: Synthetic oligonucleotide
ggcagaugugcucauagug

SEQ ID NO: 3011264 - RNA, 19 nt, Artificial Sequence
  Description of Artificial Sequence: Synthetic oligonucleotide
caggaagagucgaucgucc

SEQ ID NO: 3011265 - RNA, 19 nt, Artificial Sequence
  Description of Artificial Sequence: Synthetic oligonucleotide
gggaauuguuggaauaugg

SEQ ID NO: 3011266 - RNA, 19 nt, Artificial Sequence
  Description of Artificial Sequence: Synthetic oligonucleotide
caggcauaaagagaucccc

SEQ ID NO: 3011267 - RNA, 19 nt, Artificial Sequence
  Description of Artificial Sequence: Synthetic oligonucleotide
ugcugcagaaccgaggaaa

SEQ ID NO: 3011268 - RNA, 19 nt, Artificial Sequence
  Description of Artificial Sequence: Synthetic oligonucleotide
cucauagugcccuuauuga

SEQ ID NO: 3011269 - RNA, 19 nt, Artificial Sequence
  Description of Artificial Sequence: Synthetic oligonucleotide
ugacucggaguucuuggga

SEQ ID NO: 3011270 - RNA, 19 nt, Artificial Sequence
  Description of Artificial Sequence: Synthetic oligonucleotide
agcuuuccagacugcaaag

SEQ ID NO: 3011271 - RNA, 19 nt, Artificial Sequence
  Description of Artificial Sequence: Synthetic oligonucleotide
uaaucaggaagagucgauc

SEQ ID NO: 3011272 - RNA, 19 nt, Artificial Sequence
  Description of Artificial Sequence: Synthetic oligonucleotide
cucccaaagcuuuccagac

SEQ ID NO: 3011273 - RNA, 19 nt, Artificial Sequence
  Description of Artificial Sequence: Synthetic oligonucleotide
aagagucgaucguccuggg

SEQ ID NO: 3011274 - RNA, 19 nt, Artificial Sequence
  Description of Artificial Sequence: Synthetic oligonucleotide
cugacucggaguucuuggg

SEQ ID NO: 3011275 - RNA, 19 nt, Artificial Sequence
  Description of Artificial Sequence: Synthetic oligonucleotide
auccggcuagcauucccgc

SEQ ID NO: 3011276 - RNA, 19 nt, Artificial Sequence
  Description of Artificial Sequence: Synthetic oligonucleotide
aucaggaagagucgaucgu

SEQ ID NO: 3011277 - RNA, 19 nt, Artificial Sequence
  Description of Artificial Sequence: Synthetic oligonucleotide
agagauccccagcccaggg

SEQ ID NO: 3011278 - RNA, 19 nt, Artificial Sequence
  Description of Artificial Sequence: Synthetic oligonucleotide
aagagauccccagcccagg

SEQ ID NO: 3011279 - RNA, 19 nt, Artificial Sequence
  Description of Artificial Sequence: Synthetic oligonucleotide
ucuugggaauuguuggaau

SEQ ID NO: 3011280 - RNA, 19 nt, Artificial Sequence
  Description of Artificial Sequence: Synthetic oligonucleotide
aggaccagaauccgcggug

SEQ ID NO: 3011281 - RNA, 19 nt, Artificial Sequence
  Description of Artificial Sequence: Synthetic oligonucleotide
gaucacgccgaccccacac

SEQ ID NO: 3011282 - RNA, 19 nt, Artificial Sequence
  Description of Artificial Sequence: Synthetic oligonucleotide
ucaggaagagucgaucguc

SEQ ID NO: 3011283 - RNA, 19 nt, Artificial Sequence
  Description of Artificial Sequence: Synthetic oligonucleotide
cagggcucgaagagcaagg

SEQ ID NO: 3011284 - RNA, 19 nt, Artificial Sequence
  Description of Artificial Sequence: Synthetic oligonucleotide
cccuuauugaaccauucag

SEQ ID NO: 3011285 - RNA, 19 nt, Artificial Sequence
  Description of Artificial Sequence: Synthetic oligonucleotide
uugggaauuguuggaauau

SEQ ID NO: 3011286 - RNA, 19 nt, Artificial Sequence
  Description of Artificial Sequence: Synthetic oligonucleotide
ugggaauuguuggaauaug

SEQ ID NO: 3011287 - RNA, 19 nt, Artificial Sequence
  Description of Artificial Sequence: Synthetic oligonucleotide
gcugacucggaguucuugg

SEQ ID NO: 3011288 - RNA, 19 nt, Artificial Sequence
  Description of Artificial Sequence: Synthetic oligonucleotide
uacuucgaaaguccugcau

SEQ ID NO: 3011289 - RNA, 19 nt, Artificial Sequence
  Description of Artificial Sequence: Synthetic oligonucleotide
gcgguguccauguuuaaag

SEQ ID NO: 3011290 - RNA, 19 nt, Artificial Sequence
  Description of Artificial Sequence: Synthetic oligonucleotide
gaauauggauugcaucuua

SEQ ID NO: 3011291 - RNA, 19 nt, Artificial Sequence
  Description of Artificial Sequence: Synthetic oligonucleotide
agacugcaaagcugaucac

SEQ ID NO: 3011292 - RNA, 19 nt, Artificial Sequence
  Description of Artificial Sequence: Synthetic oligonucleotide
ggagcgucuagugaggaag

SEQ ID NO: 3011293 - RNA, 19 nt, Artificial Sequence
  Description of Artificial Sequence: Synthetic oligonucleotide
agaugugcucauagugccc

SEQ ID NO: 3011294 - RNA, 19 nt, Artificial Sequence
  Description of Artificial Sequence: Synthetic oligonucleotide
ucgaagagcaagggaagac

SEQ ID NO: 3011295 - RNA, 19 nt, Artificial Sequence
  Description of Artificial Sequence: Synthetic oligonucleotide
uccgcgguguccauguuua

SEQ ID NO: 3011296 - RNA, 19 nt, Artificial Sequence
  Description of Artificial Sequence: Synthetic oligonucleotide
cgucuagugaggaagauuc

SEQ ID NO: 3011297 - RNA, 19 nt, Artificial Sequence
  Description of Artificial Sequence: Synthetic oligonucleotide
uuacuucgaaaguccugca

SEQ ID NO: 3011298 - RNA, 19 nt, Artificial Sequence
  Description of Artificial Sequence: Synthetic oligonucleotide
uucuugggaauuguuggaa

SEQ ID NO: 3011299 - RNA, 19 nt, Artificial Sequence
  Description of Artificial Sequence: Synthetic oligonucleotide
aaagcuuuccagacugcaa

SEQ ID NO: 3011300 - RNA, 19 nt, Artificial Sequence
  Description of Artificial Sequence: Synthetic oligonucleotide
cacaccaggcauaaagaga

SEQ ID NO: 3011301 - RNA, 19 nt, Artificial Sequence
  Description of Artificial Sequence: Synthetic oligonucleotide
agcugaucacgccgacccc

SEQ ID NO: 3011302 - RNA, 19 nt, Artificial Sequence
  Description of Artificial Sequence: Synthetic oligonucleotide
gaagauuccccaggaccag

SEQ ID NO: 3011303 - RNA, 19 nt, Artificial Sequence
  Description of Artificial Sequence: Synthetic oligonucleotide
ugcccuuauugaaccauuc

SEQ ID NO: 3011304 - RNA, 19 nt, Artificial Sequence
  Description of Artificial Sequence: Synthetic oligonucleotide
gacccuggagcgucuagug

SEQ ID NO: 3011305 - RNA, 19 nt, Artificial Sequence
  Description of Artificial Sequence: Synthetic oligonucleotide
ucccaaagcuuuccagacu

SEQ ID NO: 3011306 - RNA, 19 nt, Artificial Sequence
  Description of Artificial Sequence: Synthetic oligonucleotide
agggaagacccacucucug

SEQ ID NO: 3011307 - RNA, 19 nt, Artificial Sequence
  Description of Artificial Sequence: Synthetic oligonucleotide
acccacucucuggaaaggc

SEQ ID NO: 3011308 - RNA, 19 nt, Artificial Sequence
  Description of Artificial Sequence: Synthetic oligonucleotide
guucuugggaauuguugga

SEQ ID NO: 3011309 - RNA, 19 nt, Artificial Sequence
  Description of Artificial Sequence: Synthetic oligonucleotide
acgccgaccccacaccagg

SEQ ID NO: 3011310 - RNA, 19 nt, Artificial Sequence
  Description of Artificial Sequence: Synthetic oligonucleotide
gacucggaguucuugggaa

SEQ ID NO: 3011311 - RNA, 19 nt, Artificial Sequence
  Description of Artificial Sequence: Synthetic oligonucleotide
gguguccauguuuaaaguc

SEQ ID NO: 3011312 - RNA, 19 nt, Artificial Sequence
  Description of Artificial Sequence: Synthetic oligonucleotide
cccaggaccagaauccgcg

SEQ ID NO: 3011313 - RNA, 19 nt, Artificial Sequence
  Description of Artificial Sequence: Synthetic oligonucleotide
guccugggacccuggagcg

SEQ ID NO: 3011314 - RNA, 19 nt, Artificial Sequence
  Description of Artificial Sequence: Synthetic oligonucleotide
gcagaugugcucauagugc

SEQ ID NO: 3011315 - RNA, 19 nt, Artificial Sequence
  Description of Artificial Sequence: Synthetic oligonucleotide
ugcauacugugaacuccca

SEQ ID NO: 3011316 - RNA, 19 nt, Artificial Sequence
  Description of Artificial Sequence: Synthetic oligonucleotide
cugcaaagcugaucacgcc

SEQ ID NO: 3011317 - RNA, 19 nt, Artificial Sequence
  Description of Artificial Sequence: Synthetic oligonucleotide
uccugcauacugugaacuc

SEQ ID NO: 3011318 - RNA, 19 nt, Artificial Sequence
  Description of Artificial Sequence: Synthetic oligonucleotide
guaacaaauccggcuagca

SEQ ID NO: 3011319 - RNA, 19 nt, Artificial Sequence
  Description of Artificial Sequence: Synthetic oligonucleotide
cccaaagcuuuccagacug

SEQ ID NO: 3011320 - RNA, 19 nt, Artificial Sequence
  Description of Artificial Sequence: Synthetic oligonucleotide
gcauaaagagauccccagc

SEQ ID NO: 3011321 - RNA, 19 nt, Artificial Sequence
  Description of Artificial Sequence: Synthetic oligonucleotide
ccaccuuuaaucaggaaga

SEQ ID NO: 3011322 - RNA, 19 nt, Artificial Sequence
  Description of Artificial Sequence: Synthetic oligonucleotide
gcuaaugauaauguuguaa

SEQ ID NO: 3011323 - RNA, 19 nt, Artificial Sequence
  Description of Artificial Sequence: Synthetic oligonucleotide
aggaagagucgaucguccu

SEQ ID NO: 3011324 - RNA, 19 nt, Artificial Sequence
  Description of Artificial Sequence: Synthetic oligonucleotide
gaggaagauuccccaggac

SEQ ID NO: 3011325 - RNA, 19 nt, Artificial Sequence
  Description of Artificial Sequence: Synthetic oligonucleotide
ucacgccgaccccacacca

SEQ ID NO: 3011326 - RNA, 19 nt, Artificial Sequence
  Description of Artificial Sequence: Synthetic oligonucleotide
aagggaagacccacucucu

SEQ ID NO: 3011327 - RNA, 19 nt, Artificial Sequence
  Description of Artificial Sequence: Synthetic oligonucleotide
ggaagauuccccaggacca

SEQ ID NO: 3011328 - RNA, 19 nt, Artificial Sequence
  Description of Artificial Sequence: Synthetic oligonucleotide
cuugggaauuguuggaaua

SEQ ID NO: 3011329 - RNA, 19 nt, Artificial Sequence
  Description of Artificial Sequence: Synthetic oligonucleotide
cucuggaaaggcagaugug

SEQ ID NO: 3011330 - RNA, 19 nt, Artificial Sequence
  Description of Artificial Sequence: Synthetic oligonucleotide
ggaauuguuggaauaugga

SEQ ID NO: 3011331 - RNA, 19 nt, Artificial Sequence
  Description of Artificial Sequence: Synthetic oligonucleotide
gcaucuuacuucgaaaguc

SEQ ID NO: 3011332 - RNA, 19 nt, Artificial Sequence
  Description of Artificial Sequence: Synthetic oligonucleotide
accuuuaaucaggaagagu

SEQ ID NO: 3011333 - RNA, 19 nt, Artificial Sequence
  Description of Artificial Sequence: Synthetic oligonucleotide
ucggaguucuugggaauug

SEQ ID NO: 3011334 - RNA, 19 nt, Artificial Sequence
  Description of Artificial Sequence: Synthetic oligonucleotide
uccccaggaccagaauccg

SEQ ID NO: 3011335 - RNA, 19 nt, Artificial Sequence
  Description of Artificial Sequence: Synthetic oligonucleotide
agggcucgaagagcaaggg

SEQ ID NO: 3011336 - RNA, 19 nt, Artificial Sequence
  Description of Artificial Sequence: Synthetic oligonucleotide
gacccacucucuggaaagg

SEQ ID NO: 3011337 - RNA, 19 nt, Artificial Sequence
  Description of Artificial Sequence: Synthetic oligonucleotide
aagauuccccaggaccaga

SEQ ID NO: 3011338 - RNA, 19 nt, Artificial Sequence
  Description of Artificial Sequence: Synthetic oligonucleotide
ggaaaggcagaugugcuca

SEQ ID NO: 3011339 - RNA, 19 nt, Artificial Sequence
  Description of Artificial Sequence: Synthetic oligonucleotide
gaacucccaaagcuuucca

SEQ ID NO: 3011340 - RNA, 19 nt, Artificial Sequence
  Description of Artificial Sequence: Synthetic oligonucleotide
caccuuuaaucaggaagag

SEQ ID NO: 3011341 - RNA, 19 nt, Artificial Sequence
  Description of Artificial Sequence: Synthetic oligonucleotide
ccacaccaggcauaaagag

SEQ ID NO: 3011342 - RNA, 19 nt, Artificial Sequence
  Description of Artificial Sequence: Synthetic oligonucleotide
gaauccgcgguguccaugu

SEQ ID NO: 3011343 - RNA, 19 nt, Artificial Sequence
  Description of Artificial Sequence: Synthetic oligonucleotide
ggaagacccacucucugga

SEQ ID NO: 3011344 - RNA, 19 nt, Artificial Sequence
  Description of Artificial Sequence: Synthetic oligonucleotide
gaugugcucauagugcccu

SEQ ID NO: 3011345 - RNA, 19 nt, Artificial Sequence
  Description of Artificial Sequence: Synthetic oligonucleotide
uucgaaaguccugcauacu

SEQ ID NO: 3011346 - RNA, 19 nt, Artificial Sequence
  Description of Artificial Sequence: Synthetic oligonucleotide
gcugcugcagaaccgagga

SEQ ID NO: 3011347 - RNA, 19 nt, Artificial Sequence
  Description of Artificial Sequence: Synthetic oligonucleotide
accauucagggcuuuucuu

SEQ ID NO: 3011348 - RNA, 19 nt, Artificial Sequence
  Description of Artificial Sequence: Synthetic oligonucleotide
uuguuggaauauggauugc

SEQ ID NO: 3011349 - RNA, 19 nt, Artificial Sequence
  Description of Artificial Sequence: Synthetic oligonucleotide
aggcagaugugcucauagu

SEQ ID NO: 3011350 - RNA, 19 nt, Artificial Sequence
  Description of Artificial Sequence: Synthetic oligonucleotide
aggcauaaagagaucccca

SEQ ID NO: 3011351 - RNA, 19 nt, Artificial Sequence
  Description of Artificial Sequence: Synthetic oligonucleotide
ccaggcauaaagagauccc

SEQ ID NO: 3011352 - RNA, 19 nt, Artificial Sequence
  Description of Artificial Sequence: Synthetic oligonucleotide
cccuggagcgucuagugag

SEQ ID NO: 3011353 - RNA, 19 nt, Artificial Sequence
  Description of Artificial Sequence: Synthetic oligonucleotide
cagcccagggcucgaagag

SEQ ID NO: 3011354 - RNA, 19 nt, Artificial Sequence
  Description of Artificial Sequence: Synthetic oligonucleotide
aucuuacuucgaaaguccu

SEQ ID NO: 3011355 - RNA, 19 nt, Artificial Sequence
  Description of Artificial Sequence: Synthetic oligonucleotide
caaagcuuuccagacugca

SEQ ID NO: 3011356 - RNA, 19 nt, Artificial Sequence
  Description of Artificial Sequence: Synthetic oligonucleotide
ccacucucuggaaaggcag

SEQ ID NO: 3011357 - RNA, 19 nt, Artificial Sequence
  Description of Artificial Sequence: Synthetic oligonucleotide
uagcauucccgcugcugcu

SEQ ID NO: 3011358 - RNA, 19 nt, Artificial Sequence
  Description of Artificial Sequence: Synthetic oligonucleotide
agugcccuuauugaaccau

SEQ ID NO: 3011359 - RNA, 19 nt, Artificial Sequence
  Description of Artificial Sequence: Synthetic oligonucleotide
auuccaccuuuaaucagga

SEQ ID NO: 3011360 - RNA, 19 nt, Artificial Sequence
  Description of Artificial Sequence: Synthetic oligonucleotide
ccugcauacugugaacucc

SEQ ID NO: 3011361 - RNA, 19 nt, Artificial Sequence
  Description of Artificial Sequence: Synthetic oligonucleotide
ggcucgaagagcaagggaa

SEQ ID NO: 3011362 - RNA, 19 nt, Artificial Sequence
  Description of Artificial Sequence: Synthetic oligonucleotide
uagugcccuuauugaacca

SEQ ID NO: 3011363 - RNA, 19 nt, Artificial Sequence
  Description of Artificial Sequence: Synthetic oligonucleotide
agagucgaucguccuggga

SEQ ID NO: 3011364 - RNA, 19 nt, Artificial Sequence
  Description of Artificial Sequence: Synthetic oligonucleotide
caaagcugaucacgccgac

SEQ ID NO: 3011365 - RNA, 19 nt, Artificial Sequence
  Description of Artificial Sequence: Synthetic oligonucleotide
cugaucacgccgaccccac

SEQ ID NO: 3011366 - RNA, 19 nt, Artificial Sequence
  Description of Artificial Sequence: Synthetic oligonucleotide
acucggaguucuugggaau

SEQ ID NO: 3011367 - RNA, 19 nt, Artificial Sequence
  Description of Artificial Sequence: Synthetic oligonucleotide
gucuagugaggaagauucc

SEQ ID NO: 3011368 - RNA, 19 nt, Artificial Sequence
  Description of Artificial Sequence: Synthetic oligonucleotide
agcuaaugauaauguugua

SEQ ID NO: 3011369 - RNA, 19 nt, Artificial Sequence
  Description of Artificial Sequence: Synthetic oligonucleotide
uccggcuagcauucccgcu

SEQ ID NO: 3011370 - RNA, 19 nt, Artificial Sequence
  Description of Artificial Sequence: Synthetic oligonucleotide
ugcucauagugcccuuauu

SEQ ID NO: 3011371 - RNA, 19 nt, Artificial Sequence
  Description of Artificial Sequence: Synthetic oligonucleotide
acccuggagcgucuaguga

SEQ ID NO: 3011372 - RNA, 19 nt, Artificial Sequence
  Description of Artificial Sequence: Synthetic oligonucleotide
agaauccgcgguguccaug

SEQ ID NO: 3011373 - RNA, 19 nt, Artificial Sequence
  Description of Artificial Sequence: Synthetic oligonucleotide
uggagcgucuagugaggaa

SEQ ID NO: 3011374 - RNA, 19 nt, Artificial Sequence
  Description of Artificial Sequence: Synthetic oligonucleotide
aaaggcagaugugcucaua

SEQ ID NO: 3011375 - RNA, 19 nt, Artificial Sequence
  Description of Artificial Sequence: Synthetic oligonucleotide
cucucuggaaaggcagaug

SEQ ID NO: 3011376 - RNA, 19 nt, Artificial Sequence
  Description of Artificial Sequence: Synthetic oligonucleotide
acucucuggaaaggcagau

SEQ ID NO: 3011377 - RNA, 19 nt, Artificial Sequence
  Description of Artificial Sequence: Synthetic oligonucleotide
ugaucacgccgaccccaca

SEQ ID NO: 3011378 - RNA, 19 nt, Artificial Sequence
  Description of Artificial Sequence: Synthetic oligonucleotide
ugugcucauagugcccuua

SEQ ID NO: 3011379 - RNA, 19 nt, Artificial Sequence
  Description of Artificial Sequence: Synthetic oligonucleotide
gaagacccacucucuggaa

SEQ ID NO: 3011380 - RNA, 19 nt, Artificial Sequence
  Description of Artificial Sequence: Synthetic oligonucleotide
agcauucccgcugcugcug

SEQ ID NO: 3011381 - RNA, 19 nt, Artificial Sequence
  Description of Artificial Sequence: Synthetic oligonucleotide
cuggaaaggcagaugugcu

SEQ ID NO: 3011382 - RNA, 19 nt, Artificial Sequence
  Description of Artificial Sequence: Synthetic oligonucleotide
gaucguccugggacccugg

SEQ ID NO: 3011383 - RNA, 19 nt, Artificial Sequence
  Description of Artificial Sequence: Synthetic oligonucleotide
gcucgaagagcaagggaag

SEQ ID NO: 3011384 - RNA, 19 nt, Artificial Sequence
  Description of Artificial Sequence: Synthetic oligonucleotide
guuggaauauggauugcau

SEQ ID NO: 3011385 - RNA, 19 nt, Artificial Sequence
  Description of Artificial Sequence: Synthetic oligonucleotide
ccuggagcgucuagugagg

SEQ ID NO: 3011386 - RNA, 19 nt, Artificial Sequence
  Description of Artificial Sequence: Synthetic oligonucleotide
cacucucuggaaaggcaga

SEQ ID NO: 3011387 - RNA, 19 nt, Artificial Sequence
  Description of Artificial Sequence: Synthetic oligonucleotide
uuccaccuuuaaucaggaa

SEQ ID NO: 3011388 - RNA, 19 nt, Artificial Sequence
  Description of Artificial Sequence: Synthetic oligonucleotide
cugcugcugcagaaccgag

SEQ ID NO: 3011389 - RNA, 19 nt, Artificial Sequence
  Description of Artificial Sequence: Synthetic oligonucleotide
cacgccgaccccacaccag

SEQ ID NO: 3011390 - RNA, 19 nt, Artificial Sequence
  Description of Artificial Sequence: Synthetic oligonucleotide
gagcgucuagugaggaaga

SEQ ID NO: 3011391 - RNA, 19 nt, Artificial Sequence
  Description of Artificial Sequence: Synthetic oligonucleotide
auccgcgguguccauguuu

SEQ ID NO: 3011392 - RNA, 19 nt, Artificial Sequence
  Description of Artificial Sequence: Synthetic oligonucleotide
gaccagaauccgcgguguc

SEQ ID NO: 3011393 - RNA, 19 nt, Artificial Sequence
  Description of Artificial Sequence: Synthetic oligonucleotide
gucgaucguccugggaccc

SEQ ID NO: 3011394 - RNA, 19 nt, Artificial Sequence
  Description of Artificial Sequence: Synthetic oligonucleotide
caaauccggcuagcauucc

SEQ ID NO: 3011395 - RNA, 19 nt, Artificial Sequence
  Description of Artificial Sequence: Synthetic oligonucleotide
gcccuuauugaaccauuca

SEQ ID NO: 3011396 - RNA, 19 nt, Artificial Sequence
  Description of Artificial Sequence: Synthetic oligonucleotide
gugaacucccaaagcuuuc

SEQ ID NO: 3011397 - RNA, 19 nt, Artificial Sequence
  Description of Artificial Sequence: Synthetic oligonucleotide
agauuccccaggaccagaa

SEQ ID NO: 3011398 - RNA, 19 nt, Artificial Sequence
  Description of Artificial Sequence: Synthetic oligonucleotide
ccaaagcuuuccagacugc

SEQ ID NO: 3011399 - RNA, 19 nt, Artificial Sequence
  Description of Artificial Sequence: Synthetic oligonucleotide
auugaaccauucagggcuu

SEQ ID NO: 3011400 - RNA, 19 nt, Artificial Sequence
  Description of Artificial Sequence: Synthetic oligonucleotide
ccggcuagcauucccgcug

SEQ ID NO: 3011401 - RNA, 19 nt, Artificial Sequence
  Description of Artificial Sequence: Synthetic oligonucleotide
gcaaagcugaucacgccga

SEQ ID NO: 3011402 - RNA, 19 nt, Artificial Sequence
  Description of Artificial Sequence: Synthetic oligonucleotide
caccaggcauaaagagauc

SEQ ID NO: 3011403 - RNA, 19 nt, Artificial Sequence
  Description of Artificial Sequence: Synthetic oligonucleotide
cauucagggcuuuucuuuu

SEQ ID NO: 3011404 - RNA, 19 nt, Artificial Sequence
  Description of Artificial Sequence: Synthetic oligonucleotide
ccaggaccagaauccgcgg

SEQ ID NO: 3011405 - RNA, 19 nt, Artificial Sequence
  Description of Artificial Sequence: Synthetic oligonucleotide
gcuagcauucccgcugcug

SEQ ID NO: 3011406 - RNA, 19 nt, Artificial Sequence
  Description of Artificial Sequence: Synthetic oligonucleotide
cugugaacucccaaagcuu

SEQ ID NO: 3011407 - RNA, 19 nt, Artificial Sequence
  Description of Artificial Sequence: Synthetic oligonucleotide
aauccgcgguguccauguu

SEQ ID NO: 3011408 - RNA, 19 nt, Artificial Sequence
  Description of Artificial Sequence: Synthetic oligonucleotide
gaccccacaccaggcauaa

SEQ ID NO: 3011409 - RNA, 19 nt, Artificial Sequence
  Description of Artificial Sequence: Synthetic oligonucleotide
gaaaggcagaugugcucau

SEQ ID NO: 3011410 - RNA, 19 nt, Artificial Sequence
  Description of Artificial Sequence: Synthetic oligonucleotide
gcauacugugaacucccaa

SEQ ID NO: 3011411 - RNA, 19 nt, Artificial Sequence
  Description of Artificial Sequence: Synthetic oligonucleotide
gcugaucacgccgacccca

SEQ ID NO: 3011412 - RNA, 19 nt, Artificial Sequence
  Description of Artificial Sequence: Synthetic oligonucleotide
ccagggcucgaagagcaag

SEQ ID NO: 3011413 - RNA, 19 nt, Artificial Sequence
  Description of Artificial Sequence: Synthetic oligonucleotide
gcugcugcugcagaaccga

SEQ ID NO: 3011414 - RNA, 19 nt, Artificial Sequence
  Description of Artificial Sequence: Synthetic oligonucleotide
ucgaucguccugggacccu

SEQ ID NO: 3011415 - RNA, 19 nt, Artificial Sequence
  Description of Artificial Sequence: Synthetic oligonucleotide
uugaaccauucagggcuuu

SEQ ID NO: 3011416 - RNA, 19 nt, Artificial Sequence
  Description of Artificial Sequence: Synthetic oligonucleotide
ccgcugcugcugcagaacc

SEQ ID NO: 3011417 - RNA, 19 nt, Artificial Sequence
  Description of Artificial Sequence: Synthetic oligonucleotide
gauuccccaggaccagaau

SEQ ID NO: 3011418 - RNA, 19 nt, Artificial Sequence
  Description of Artificial Sequence: Synthetic oligonucleotide
gggcucgaagagcaaggga

SEQ ID NO: 3011419 - RNA, 19 nt, Artificial Sequence
  Description of Artificial Sequence: Synthetic oligonucleotide
cuggagcgucuagugagga

SEQ ID NO: 3011420 - RNA, 19 nt, Artificial Sequence
  Description of Artificial Sequence: Synthetic oligonucleotide
ccagaauccgcggugucca

SEQ ID NO: 3011421 - RNA, 19 nt, Artificial Sequence
  Description of Artificial Sequence: Synthetic oligonucleotide
ccagacugcaaagcugauc

SEQ ID NO: 3011422 - RNA, 19 nt, Artificial Sequence
  Description of Artificial Sequence: Synthetic oligonucleotide
cccacucucuggaaaggca

SEQ ID NO: 3011423 - RNA, 19 nt, Artificial Sequence
  Description of Artificial Sequence: Synthetic oligonucleotide
gggacccuggagcgucuag

SEQ ID NO: 3011424 - RNA, 19 nt, Artificial Sequence
  Description of Artificial Sequence: Synthetic oligonucleotide
gcugcagaaccgaggaaaa

SEQ ID NO: 3011425 - RNA, 19 nt, Artificial Sequence
  Description of Artificial Sequence: Synthetic oligonucleotide
ccccaggaccagaauccgc

SEQ ID NO: 3011426 - RNA, 19 nt, Artificial Sequence
  Description of Artificial Sequence: Synthetic oligonucleotide
gugcucauagugcccuuau

SEQ ID NO: 3011427 - RNA, 19 nt, Artificial Sequence
  Description of Artificial Sequence: Synthetic oligonucleotide
gcaagggaagacccacucu

SEQ ID NO: 3011428 - RNA, 19 nt, Artificial Sequence
  Description of Artificial Sequence: Synthetic oligonucleotide
ccagcccagggcucgaaga

SEQ ID NO: 3011429 - RNA, 19 nt, Artificial Sequence
  Description of Artificial Sequence: Synthetic oligonucleotide
caggaccagaauccgcggu

SEQ ID NO: 3011430 - RNA, 19 nt, Artificial Sequence
  Description of Artificial Sequence: Synthetic oligonucleotide
ggaauauggauugcaucuu

SEQ ID NO: 3011431 - RNA, 19 nt, Artificial Sequence
  Description of Artificial Sequence: Synthetic oligonucleotide
ccauucagggcuuuucuuu

SEQ ID NO: 3011432 - RNA, 19 nt, Artificial Sequence
  Description of Artificial Sequence: Synthetic oligonucleotide
cgaaaguccugcauacugu

SEQ ID NO: 3011433 - RNA, 19 nt, Artificial Sequence
  Description of Artificial Sequence: Synthetic oligonucleotide
gccgaccccacaccaggca

SEQ ID NO: 3011434 - RNA, 19 nt, Artificial Sequence
  Description of Artificial Sequence: Synthetic oligonucleotide
cugcugcagaaccgaggaa

SEQ ID NO: 3011435 - RNA, 19 nt, Artificial Sequence
  Description of Artificial Sequence: Synthetic oligonucleotide
ugggacccuggagcgucua

SEQ ID NO: 3011436 - RNA, 19 nt, Artificial Sequence
  Description of Artificial Sequence: Synthetic oligonucleotide
ggaccagaauccgcggugu

SEQ ID NO: 3011437 - RNA, 19 nt, Artificial Sequence
  Description of Artificial Sequence: Synthetic oligonucleotide
cccagcccagggcucgaag

SEQ ID NO: 3011438 - RNA, 19 nt, Artificial Sequence
  Description of Artificial Sequence: Synthetic oligonucleotide
cucggaguucuugggaauu

SEQ ID NO: 3011439 - RNA, 19 nt, Artificial Sequence
  Description of Artificial Sequence: Synthetic oligonucleotide
uccccagcccagggcucga

SEQ ID NO: 3011440 - RNA, 19 nt, Artificial Sequence
  Description of Artificial Sequence: Synthetic oligonucleotide
ggauugcaucuuacuucga

SEQ ID NO: 3011441 - RNA, 19 nt, Artificial Sequence
  Description of Artificial Sequence: Synthetic oligonucleotide
cccgcugcugcugcagaac

SEQ ID NO: 3011442 - RNA, 19 nt, Artificial Sequence
  Description of Artificial Sequence: Synthetic oligonucleotide
ggacccuggagcgucuagu

SEQ ID NO: 3011443 - RNA, 19 nt, Artificial Sequence
  Description of Artificial Sequence: Synthetic oligonucleotide
ggaguucuugggaauuguu

SEQ ID NO: 3011444 - RNA, 19 nt, Artificial Sequence
  Description of Artificial Sequence: Synthetic oligonucleotide
gugcccuuauugaaccauu

SEQ ID NO: 3011445 - RNA, 19 nt, Artificial Sequence
  Description of Artificial Sequence: Synthetic oligonucleotide
cgaucguccugggacccug

SEQ ID NO: 3011446 - RNA, 19 nt, Artificial Sequence
  Description of Artificial Sequence: Synthetic oligonucleotide
cgccgaccccacaccaggc

SEQ ID NO: 3011447 - RNA, 19 nt, Artificial Sequence
  Description of Artificial Sequence: Synthetic oligonucleotide
cgguguccauguuuaaagu

SEQ ID NO: 3011448 - RNA, 19 nt, Artificial Sequence
  Description of Artificial Sequence: Synthetic oligonucleotide
gcgucuagugaggaagauu

SEQ ID NO: 3011449 - RNA, 19 nt, Artificial Sequence
  Description of Artificial Sequence: Synthetic oligonucleotide
cagaauccgcgguguccau

SEQ ID NO: 3011450 - RNA, 19 nt, Artificial Sequence
  Description of Artificial Sequence: Synthetic oligonucleotide
accccacaccaggcauaaa

SEQ ID NO: 3011451 - RNA, 19 nt, Artificial Sequence
  Description of Artificial Sequence: Synthetic oligonucleotide
cgcgguguccauguuuaaa

SEQ ID NO: 3011452 - RNA, 19 nt, Artificial Sequence
  Description of Artificial Sequence: Synthetic oligonucleotide
ggcuagcauucccgcugcu

SEQ ID NO: 3011453 - RNA, 19 nt, Artificial Sequence
  Description of Artificial Sequence: Synthetic oligonucleotide
ccgaccccacaccaggcau

SEQ ID NO: 3011454 - RNA, 19 nt, Artificial Sequence
  Description of Artificial Sequence: Synthetic oligonucleotide
cgaccccacaccaggcaua

SEQ ID NO: 3011455 - RNA, 19 nt, Artificial Sequence
  Description of Artificial Sequence: Synthetic oligonucleotide
cccagggcucgaagagcaa

SEQ ID NO: 3011456 - RNA, 19 nt, Artificial Sequence
  Description of Artificial Sequence: Synthetic oligonucleotide
cggaguucuugggaauugu

SEQ ID NO: 3011457 - RNA, 19 nt, Artificial Sequence
  Description of Artificial Sequence: Synthetic oligonucleotide
ccgcgguguccauguuuaa

SEQ ID NO: 3011458 - RNA, 19 nt, Artificial Sequence
  Description of Artificial Sequence: Synthetic oligonucleotide
ccccagcccagggcucgaa

SEQ ID NO: 3011459 - RNA, 19 nt, Artificial Sequence
  Description of Artificial Sequence: Synthetic oligonucleotide
aaauugaggaucaaguucc

SEQ ID NO: 3011460 - RNA, 19 nt, Artificial Sequence
  Description of Artificial Sequence: Synthetic oligonucleotide
aucaaugucacuuaaguuc

SEQ ID NO: 3011461 - RNA, 19 nt, Artificial Sequence
  Description of Artificial Sequence: Synthetic oligonucleotide
ugugaagacauuauuuugg

SEQ ID NO: 3011462 - RNA, 19 nt, Artificial Sequence
  Description of Artificial Sequence: Synthetic oligonucleotide
aaaucaaugucacuuaagu

SEQ ID NO: 3011463 - RNA, 19 nt, Artificial Sequence
  Description of Artificial Sequence: Synthetic oligonucleotide
aagacauuauuuuggcuac

SEQ ID NO: 3011464 - RNA, 19 nt, Artificial Sequence
  Description of Artificial Sequence: Synthetic oligonucleotide
aacagucccaaauugagga

SEQ ID NO: 3011465 - RNA, 19 nt, Artificial Sequence
  Description of Artificial Sequence: Synthetic oligonucleotide
ucaaugucacuuaaguucc

SEQ ID NO: 3011466 - RNA, 19 nt, Artificial Sequence
  Description of Artificial Sequence: Synthetic oligonucleotide
auuauuuuggcuacacccc

SEQ ID NO: 3011467 - RNA, 19 nt, Artificial Sequence
  Description of Artificial Sequence: Synthetic oligonucleotide
agagagucggcgcagaccg

SEQ ID NO: 3011468 - RNA, 19 nt, Artificial Sequence
  Description of Artificial Sequence: Synthetic oligonucleotide
gguagugagaggcagaagg

SEQ ID NO: 3011469 - RNA, 19 nt, Artificial Sequence
  Description of Artificial Sequence: Synthetic oligonucleotide
uuaugugaagacauuauuu

SEQ ID NO: 3011470 - RNA, 19 nt, Artificial Sequence
  Description of Artificial Sequence: Synthetic oligonucleotide
uccgacuccgcacuuaccg

SEQ ID NO: 3011471 - RNA, 19 nt, Artificial Sequence
  Description of Artificial Sequence: Synthetic oligonucleotide
guugucuggaacuucgggg

SEQ ID NO: 3011472 - RNA, 19 nt, Artificial Sequence
  Description of Artificial Sequence: Synthetic oligonucleotide
uaugugaagacauuauuuu

SEQ ID NO: 3011473 - RNA, 19 nt, Artificial Sequence
  Description of Artificial Sequence: Synthetic oligonucleotide
ucacuuaaguuccuggcca

SEQ ID NO: 3011474 - RNA, 19 nt, Artificial Sequence
  Description of Artificial Sequence: Synthetic oligonucleotide
caaauugaggaucaaguuc

SEQ ID NO: 3011475 - RNA, 19 nt, Artificial Sequence
  Description of Artificial Sequence: Synthetic oligonucleotide
acauuauuuuggcuacacc

SEQ ID NO: 3011476 - RNA, 19 nt, Artificial Sequence
  Description of Artificial Sequence: Synthetic oligonucleotide
aagucguuccuauccgugg

SEQ ID NO: 3011477 - RNA, 19 nt, Artificial Sequence
  Description of Artificial Sequence: Synthetic oligonucleotide
uuuuaugugaagacauuau

SEQ ID NO: 3011478 - RNA, 19 nt, Artificial Sequence
  Description of Artificial Sequence: Synthetic oligonucleotide
uuuaugugaagacauuauu

SEQ ID NO: 3011479 - RNA, 19 nt, Artificial Sequence
  Description of Artificial Sequence: Synthetic oligonucleotide
agcagcaccgagcaccucc

SEQ ID NO: 3011480 - RNA, 19 nt, Artificial Sequence
  Description of Artificial Sequence: Synthetic oligonucleotide
uuggcuacaccccuggcug

SEQ ID NO: 3011481 - RNA, 19 nt, Artificial Sequence
  Description of Artificial Sequence: Synthetic oligonucleotide
cauagcagcaccgagcacc

SEQ ID NO: 3011482 - RNA, 19 nt, Artificial Sequence
  Description of Artificial Sequence: Synthetic oligonucleotide
ugaggugccaucaaaucaa

SEQ ID NO: 3011483 - RNA, 19 nt, Artificial Sequence
  Description of Artificial Sequence: Synthetic oligonucleotide
aaucaaugucacuuaaguu

SEQ ID NO: 3011484 - RNA, 19 nt, Artificial Sequence
  Description of Artificial Sequence: Synthetic oligonucleotide
ugccaucaaaucaauguca

SEQ ID NO: 3011485 - RNA, 19 nt, Artificial Sequence
  Description of Artificial Sequence: Synthetic oligonucleotide
ugucacuuaaguuccuggc

SEQ ID NO: 3011486 - RNA, 19 nt, Artificial Sequence
  Description of Artificial Sequence: Synthetic oligonucleotide
uuauuuuggcuacaccccu

SEQ ID NO: 3011487 - RNA, 19 nt, Artificial Sequence
  Description of Artificial Sequence: Synthetic oligonucleotide
agcaaacagucccaaauug

SEQ ID NO: 3011488 - RNA, 19 nt, Artificial Sequence
  Description of Artificial Sequence: Synthetic oligonucleotide
agaccgauggcgcaauuuc

SEQ ID NO: 3011489 - RNA, 19 nt, Artificial Sequence
  Description of Artificial Sequence: Synthetic oligonucleotide
augugaagacauuauuuug

SEQ ID NO: 3011490 - RNA, 19 nt, Artificial Sequence
  Description of Artificial Sequence: Synthetic oligonucleotide
auuuuggcuacaccccugg

SEQ ID NO: 3011491 - RNA, 19 nt, Artificial Sequence
  Description of Artificial Sequence: Synthetic oligonucleotide
agucguuccuauccguggc

SEQ ID NO: 3011492 - RNA, 19 nt, Artificial Sequence
  Description of Artificial Sequence: Synthetic oligonucleotide
aaacagucccaaauugagg

SEQ ID NO: 3011493 - RNA, 19 nt, Artificial Sequence
  Description of Artificial Sequence: Synthetic oligonucleotide
ucaaaucaaugucacuuaa

SEQ ID NO: 3011494 - RNA, 19 nt, Artificial Sequence
  Description of Artificial Sequence: Synthetic oligonucleotide
agugagaggcagaaggccc

SEQ ID NO: 3011495 - RNA, 19 nt, Artificial Sequence
  Description of Artificial Sequence: Synthetic oligonucleotide
uuuggcuacaccccuggcu

SEQ ID NO: 3011496 - RNA, 19 nt, Artificial Sequence
  Description of Artificial Sequence: Synthetic oligonucleotide
augucacuuaaguuccugg

SEQ ID NO: 3011497 - RNA, 19 nt, Artificial Sequence
  Description of Artificial Sequence: Synthetic oligonucleotide
gugaagacauuauuuuggc

SEQ ID NO: 3011498 - RNA, 19 nt, Artificial Sequence
  Description of Artificial Sequence: Synthetic oligonucleotide
ucccgcagcaaacaguccc

SEQ ID NO: 3011499 - RNA, 19 nt, Artificial Sequence
  Description of Artificial Sequence: Synthetic oligonucleotide
ucaaguuccuccugaaguc

SEQ ID NO: 3011500 - RNA, 19 nt, Artificial Sequence
  Description of Artificial Sequence: Synthetic oligonucleotide
cacguugucuggaacuucg

SEQ ID NO: 3011501 - RNA, 19 nt, Artificial Sequence
  Description of Artificial Sequence: Synthetic oligonucleotide
gucacuuaaguuccuggcc

SEQ ID NO: 3011502 - RNA, 19 nt, Artificial Sequence
  Description of Artificial Sequence: Synthetic oligonucleotide
aaacucccgcagcaaacag

SEQ ID NO: 3011503 - RNA, 19 nt, Artificial Sequence
  Description of Artificial Sequence: Synthetic oligonucleotide
agaggcagaaggcccgccc

SEQ ID NO: 3011504 - RNA, 19 nt, Artificial Sequence
  Description of Artificial Sequence: Synthetic oligonucleotide
aaugucacuuaaguuccug

SEQ ID NO: 3011505 - RNA, 19 nt, Artificial Sequence
  Description of Artificial Sequence: Synthetic oligonucleotide
gaucaaguuccuccugaag

SEQ ID NO: 3011506 - RNA, 19 nt, Artificial Sequence
  Description of Artificial Sequence: Synthetic oligonucleotide
uuccuggccagccaaacuc

SEQ ID NO: 3011507 - RNA, 19 nt, Artificial Sequence
  Description of Artificial Sequence: Synthetic oligonucleotide
cucaccgucaccccgcuag

SEQ ID NO: 3011508 - RNA, 19 nt, Artificial Sequence
  Description of Artificial Sequence: Synthetic oligonucleotide
ugaagacauuauuuuggcu

SEQ ID NO: 3011509 - RNA, 19 nt, Artificial Sequence
  Description of Artificial Sequence: Synthetic oligonucleotide
uauuuuggcuacaccccug

SEQ ID NO: 3011510 - RNA, 19 nt, Artificial Sequence
  Description of Artificial Sequence: Synthetic oligonucleotide
aagccauagcagcaccgag

SEQ ID NO: 3011511 - RNA, 19 nt, Artificial Sequence
  Description of Artificial Sequence: Synthetic oligonucleotide
cugaagucguuccuauccg

SEQ ID NO: 3011512 - RNA, 19 nt, Artificial Sequence
  Description of Artificial Sequence: Synthetic oligonucleotide
uuaaguuccuggccagcca

SEQ ID NO: 3011513 - RNA, 19 nt, Artificial Sequence
  Description of Artificial Sequence: Synthetic oligonucleotide
acaccccuggcugaggugc

SEQ ID NO: 3011514 - RNA, 19 nt, Artificial Sequence
  Description of Artificial Sequence: Synthetic oligonucleotide
gagccagucucccacguug

SEQ ID NO: 3011515 - RNA, 19 nt, Artificial Sequence
  Description of Artificial Sequence: Synthetic oligonucleotide
uaaguuccuggccagccaa

SEQ ID NO: 3011516 - RNA, 19 nt, Artificial Sequence
  Description of Artificial Sequence: Synthetic oligonucleotide
cuuaaguuccuggccagcc

SEQ ID NO: 3011517 - RNA, 19 nt, Artificial Sequence
  Description of Artificial Sequence: Synthetic oligonucleotide
gaagcgguagacaccgcgg

SEQ ID NO: 3011518 - RNA, 19 nt, Artificial Sequence
  Description of Artificial Sequence: Synthetic oligonucleotide
uagaagccauagcagcacc

SEQ ID NO: 3011519 - RNA, 19 nt, Artificial Sequence
  Description of Artificial Sequence: Synthetic oligonucleotide
agccauagcagcaccgagc

SEQ ID NO: 3011520 - RNA, 19 nt, Artificial Sequence
  Description of Artificial Sequence: Synthetic oligonucleotide
aucaaaucaaugucacuua

SEQ ID NO: 3011521 - RNA, 19 nt, Artificial Sequence
  Description of Artificial Sequence: Synthetic oligonucleotide
gacauuauuuuggcuacac

SEQ ID NO: 3011522 - RNA, 19 nt, Artificial Sequence
  Description of Artificial Sequence: Synthetic oligonucleotide
aggaucaaguuccuccuga

SEQ ID NO: 3011523 - RNA, 19 nt, Artificial Sequence
  Description of Artificial Sequence: Synthetic oligonucleotide
acucccgcagcaaacaguc

SEQ ID NO: 3011524 - RNA, 19 nt, Artificial Sequence
  Description of Artificial Sequence: Synthetic oligonucleotide
uuuccgacuccgcacuuac

SEQ ID NO: 3011525 - RNA, 19 nt, Artificial Sequence
  Description of Artificial Sequence: Synthetic oligonucleotide
guagacaccgcggagccag

SEQ ID NO: 3011526 - RNA, 19 nt, Artificial Sequence
  Description of Artificial Sequence: Synthetic oligonucleotide
uagugagaggcagaaggcc

SEQ ID NO: 3011527 - RNA, 19 nt, Artificial Sequence
  Description of Artificial Sequence: Synthetic oligonucleotide
ucccaaauugaggaucaag

SEQ ID NO: 3011528 - RNA, 19 nt, Artificial Sequence
  Description of Artificial Sequence: Synthetic oligonucleotide
guggcgaagcgguagacac

SEQ ID NO: 3011529 - RNA, 19 nt, Artificial Sequence
  Description of Artificial Sequence: Synthetic oligonucleotide
ccugaagucguuccuaucc

SEQ ID NO: 3011530 - RNA, 19 nt, Artificial Sequence
  Description of Artificial Sequence: Synthetic oligonucleotide
agucggcgcagaccgaugg

SEQ ID NO: 3011531 - RNA, 19 nt, Artificial Sequence
  Description of Artificial Sequence: Synthetic oligonucleotide
aacgcgcagagagucggcg

SEQ ID NO: 3011532 - RNA, 19 nt, Artificial Sequence
  Description of Artificial Sequence: Synthetic oligonucleotide
ggggcgaacgcgcagagag

SEQ ID NO: 3011533 - RNA, 19 nt, Artificial Sequence
  Description of Artificial Sequence: Synthetic oligonucleotide
aagcgguagacaccgcgga

SEQ ID NO: 3011534 - RNA, 19 nt, Artificial Sequence
  Description of Artificial Sequence: Synthetic oligonucleotide
acuuaaguuccuggccagc

SEQ ID NO: 3011535 - RNA, 19 nt, Artificial Sequence
  Description of Artificial Sequence: Synthetic oligonucleotide
uggccagccaaacucccgc

SEQ ID NO: 3011536 - RNA, 19 nt, Artificial Sequence
  Description of Artificial Sequence: Synthetic oligonucleotide
gugccaucaaaucaauguc

SEQ ID NO: 3011537 - RNA, 19 nt, Artificial Sequence
  Description of Artificial Sequence: Synthetic oligonucleotide
caaguuccuccugaagucg

SEQ ID NO: 3011538 - RNA, 19 nt, Artificial Sequence
  Description of Artificial Sequence: Synthetic oligonucleotide
gaagucguuccuauccgug

SEQ ID NO: 3011539 - RNA, 19 nt, Artificial Sequence
  Description of Artificial Sequence: Synthetic oligonucleotide
ugaagucguuccuauccgu

SEQ ID NO: 3011540 - RNA, 19 nt, Artificial Sequence
  Description of Artificial Sequence: Synthetic oligonucleotide
ucccacguugucuggaacu

SEQ ID NO: 3011541 - RNA, 19 nt, Artificial Sequence
  Description of Artificial Sequence: Synthetic oligonucleotide
uccuggccagccaaacucc

SEQ ID NO: 3011542 - RNA, 19 nt, Artificial Sequence
  Description of Artificial Sequence: Synthetic oligonucleotide
guagugagaggcagaaggc

SEQ ID NO: 3011543 - RNA, 19 nt, Artificial Sequence
  Description of Artificial Sequence: Synthetic oligonucleotide
gaggcgcucaccgucaccc

SEQ ID NO: 3011544 - RNA, 19 nt, Artificial Sequence
  Description of Artificial Sequence: Synthetic oligonucleotide
uuccuccugaagucguucc

SEQ ID NO: 3011545 - RNA, 19 nt, Artificial Sequence
  Description of Artificial Sequence: Synthetic oligonucleotide
cugaggugccaucaaauca

SEQ ID NO: 3011546 - RNA, 19 nt, Artificial Sequence
  Description of Artificial Sequence: Synthetic oligonucleotide
auggcgcaauuuccgacuc

SEQ ID NO: 3011547 - RNA, 19 nt, Artificial Sequence
  Description of Artificial Sequence: Synthetic oligonucleotide
uccuauccguggcgaagcg

SEQ ID NO: 3011548 - RNA, 19 nt, Artificial Sequence
  Description of Artificial Sequence: Synthetic oligonucleotide
accgauggcgcaauuuccg

SEQ ID NO: 3011549 - RNA, 19 nt, Artificial Sequence
  Description of Artificial Sequence: Synthetic oligonucleotide
ucggcgcagaccgauggcg

SEQ ID NO: 3011550 - RNA, 19 nt, Artificial Sequence
  Description of Artificial Sequence: Synthetic oligonucleotide
cagucucccacguugucug

SEQ ID NO: 3011551 - RNA, 19 nt, Artificial Sequence
  Description of Artificial Sequence: Synthetic oligonucleotide
cacuuaaguuccuggccag

SEQ ID NO: 3011552 - RNA, 19 nt, Artificial Sequence
  Description of Artificial Sequence: Synthetic oligonucleotide
cuagaagccauagcagcac

SEQ ID NO: 3011553 - RNA, 19 nt, Artificial Sequence
  Description of Artificial Sequence: Synthetic oligonucleotide
uuccuauccguggcgaagc

SEQ ID NO: 3011554 - RNA, 19 nt, Artificial Sequence
  Description of Artificial Sequence: Synthetic oligonucleotide
acaccgcggagccagucuc

SEQ ID NO: 3011555 - RNA, 19 nt, Artificial Sequence
  Description of Artificial Sequence: Synthetic oligonucleotide
agaagccauagcagcaccg

SEQ ID NO: 3011556 - RNA, 19 nt, Artificial Sequence
  Description of Artificial Sequence: Synthetic oligonucleotide
aguuccuggccagccaaac

SEQ ID NO: 3011557 - RNA, 19 nt, Artificial Sequence
  Description of Artificial Sequence: Synthetic oligonucleotide
ggcgaagcgguagacaccg

SEQ ID NO: 3011558 - RNA, 19 nt, Artificial Sequence
  Description of Artificial Sequence: Synthetic oligonucleotide
auugaggaucaaguuccuc

SEQ ID NO: 3011559 - RNA, 19 nt, Artificial Sequence
  Description of Artificial Sequence: Synthetic oligonucleotide
uuuuggcuacaccccuggc

SEQ ID NO: 3011560 - RNA, 19 nt, Artificial Sequence
  Description of Artificial Sequence: Synthetic oligonucleotide
accgucaccccgcuagaag

SEQ ID NO: 3011561 - RNA, 19 nt, Artificial Sequence
  Description of Artificial Sequence: Synthetic oligonucleotide
acgcgcagagagucggcgc

SEQ ID NO: 3011562 - RNA, 19 nt, Artificial Sequence
  Description of Artificial Sequence: Synthetic oligonucleotide
gaggcagaaggcccgcccc

SEQ ID NO: 3011563 - RNA, 19 nt, Artificial Sequence
  Description of Artificial Sequence: Synthetic oligonucleotide
gucguuccuauccguggcg

SEQ ID NO: 3011564 - RNA, 19 nt, Artificial Sequence
  Description of Artificial Sequence: Synthetic oligonucleotide
gugagaggcagaaggcccg

SEQ ID NO: 3011565 - RNA, 19 nt, Artificial Sequence
  Description of Artificial Sequence: Synthetic oligonucleotide
gcaauuuccgacuccgcac

SEQ ID NO: 3011566 - RNA, 19 nt, Artificial Sequence
  Description of Artificial Sequence: Synthetic oligonucleotide
gauggcgcaauuuccgacu

SEQ ID NO: 3011567 - RNA, 19 nt, Artificial Sequence
  Description of Artificial Sequence: Synthetic oligonucleotide
caucaaaucaaugucacuu

SEQ ID NO: 3011568 - RNA, 19 nt, Artificial Sequence
  Description of Artificial Sequence: Synthetic oligonucleotide
aauugaggaucaaguuccu

SEQ ID NO: 3011569 - RNA, 19 nt, Artificial Sequence
  Description of Artificial Sequence: Synthetic oligonucleotide
ggcgcaauuuccgacuccg

SEQ ID NO: 3011570 - RNA, 19 nt, Artificial Sequence
  Description of Artificial Sequence: Synthetic oligonucleotide
agucccaaauugaggauca

SEQ ID NO: 3011571 - RNA, 19 nt, Artificial Sequence
  Description of Artificial Sequence: Synthetic oligonucleotide
gaccgauggcgcaauuucc

SEQ ID NO: 3011572 - RNA, 19 nt, Artificial Sequence
  Description of Artificial Sequence: Synthetic oligonucleotide
gaagccauagcagcaccga

SEQ ID NO: 3011573 - RNA, 19 nt, Artificial Sequence
  Description of Artificial Sequence: Synthetic oligonucleotide
uggcgaagcgguagacacc

SEQ ID NO: 3011574 - RNA, 19 nt, Artificial Sequence
  Description of Artificial Sequence: Synthetic oligonucleotide
aacucccgcagcaaacagu

SEQ ID NO: 3011575 - RNA, 19 nt, Artificial Sequence
  Description of Artificial Sequence: Synthetic oligonucleotide
cuggccagccaaacucccg

SEQ ID NO: 3011576 - RNA, 19 nt, Artificial Sequence
  Description of Artificial Sequence: Synthetic oligonucleotide
uccguggcgaagcgguaga

SEQ ID NO: 3011577 - RNA, 19 nt, Artificial Sequence
  Description of Artificial Sequence: Synthetic oligonucleotide
aaguuccuccugaagucgu

SEQ ID NO: 3011578 - RNA, 19 nt, Artificial Sequence
  Description of Artificial Sequence: Synthetic oligonucleotide
gacuccgcacuuaccgccg

SEQ ID NO: 3011579 - RNA, 19 nt, Artificial Sequence
  Description of Artificial Sequence: Synthetic oligonucleotide
aauuuccgacuccgcacuu

SEQ ID NO: 3011580 - RNA, 19 nt, Artificial Sequence
  Description of Artificial Sequence: Synthetic oligonucleotide
acagucccaaauugaggau

SEQ ID NO: 3011581 - RNA, 19 nt, Artificial Sequence
  Description of Artificial Sequence: Synthetic oligonucleotide
cagucccaaauugaggauc

SEQ ID NO: 3011582 - RNA, 19 nt, Artificial Sequence
  Description of Artificial Sequence: Synthetic oligonucleotide
agcaccgagcaccuccgca

SEQ ID NO: 3011583 - RNA, 19 nt, Artificial Sequence
  Description of Artificial Sequence: Synthetic oligonucleotide
cuauccguggcgaagcggu

SEQ ID NO: 3011584 - RNA, 19 nt, Artificial Sequence
  Description of Artificial Sequence: Synthetic oligonucleotide
uggcugaggugccaucaaa

SEQ ID NO: 3011585 - RNA, 19 nt, Artificial Sequence
  Description of Artificial Sequence: Synthetic oligonucleotide
accgccggccgguagugag

SEQ ID NO: 3011586 - RNA, 19 nt, Artificial Sequence
  Description of Artificial Sequence: Synthetic oligonucleotide
agucucccacguugucugg

SEQ ID NO: 3011587 - RNA, 19 nt, Artificial Sequence
  Description of Artificial Sequence: Synthetic oligonucleotide
cgcuagaagccauagcagc

SEQ ID NO: 3011588 - RNA, 19 nt, Artificial Sequence
  Description of Artificial Sequence: Synthetic oligonucleotide
gccauagcagcaccgagca

SEQ ID NO: 3011589 - RNA, 19 nt, Artificial Sequence
  Description of Artificial Sequence: Synthetic oligonucleotide
ucucccacguugucuggaa

SEQ ID NO: 3011590 - RNA, 19 nt, Artificial Sequence
  Description of Artificial Sequence: Synthetic oligonucleotide
uggcgcaauuuccgacucc

SEQ ID NO: 3011591 - RNA, 19 nt, Artificial Sequence
  Description of Artificial Sequence: Synthetic oligonucleotide
ucguuccuauccguggcga

SEQ ID NO: 3011592 - RNA, 19 nt, Artificial Sequence
  Description of Artificial Sequence: Synthetic oligonucleotide
accgcggagccagucuccc

SEQ ID NO: 3011593 - RNA, 19 nt, Artificial Sequence
  Description of Artificial Sequence: Synthetic oligonucleotide
gccaucaaaucaaugucac

SEQ ID NO: 3011594 - RNA, 19 nt, Artificial Sequence
  Description of Artificial Sequence: Synthetic oligonucleotide
uccgcacuuaccgccggcc

SEQ ID NO: 3011595 - RNA, 19 nt, Artificial Sequence
  Description of Artificial Sequence: Synthetic oligonucleotide
acuccgcacuuaccgccgg

SEQ ID NO: 3011596 - RNA, 19 nt, Artificial Sequence
  Description of Artificial Sequence: Synthetic oligonucleotide
gcugaggugccaucaaauc

SEQ ID NO: 3011597 - RNA, 19 nt, Artificial Sequence
  Description of Artificial Sequence: Synthetic oligonucleotide
caaacucccgcagcaaaca

SEQ ID NO: 3011598 - RNA, 19 nt, Artificial Sequence
  Description of Artificial Sequence: Synthetic oligonucleotide
uccugaagucguuccuauc

SEQ ID NO: 3011599 - RNA, 19 nt, Artificial Sequence
  Description of Artificial Sequence: Synthetic oligonucleotide
aggcgcucaccgucacccc

SEQ ID NO: 3011600 - RNA, 19 nt, Artificial Sequence
  Description of Artificial Sequence: Synthetic oligonucleotide
ugagaggcagaaggcccgc

SEQ ID NO: 3011601 - RNA, 19 nt, Artificial Sequence
  Description of Artificial Sequence: Synthetic oligonucleotide
ucaccgucaccccgcuaga

SEQ ID NO: 3011602 - RNA, 19 nt, Artificial Sequence
  Description of Artificial Sequence: Synthetic oligonucleotide
uacaccccuggcugaggug

SEQ ID NO: 3011603 - RNA, 19 nt, Artificial Sequence
  Description of Artificial Sequence: Synthetic oligonucleotide
acuuaccgccggccgguag

SEQ ID NO: 3011604 - RNA, 19 nt, Artificial Sequence
  Description of Artificial Sequence: Synthetic oligonucleotide
auccguggcgaagcgguag

SEQ ID NO: 3011605 - RNA, 19 nt, Artificial Sequence
  Description of Artificial Sequence: Synthetic oligonucleotide
gcaaacagucccaaauuga

SEQ ID NO: 3011606 - RNA, 19 nt, Artificial Sequence
  Description of Artificial Sequence: Synthetic oligonucleotide
ccgucaccccgcuagaagc

SEQ ID NO: 3011607 - RNA, 19 nt, Artificial Sequence
  Description of Artificial Sequence: Synthetic oligonucleotide
auagcagcaccgagcaccu

SEQ ID NO: 3011608 - RNA, 19 nt, Artificial Sequence
  Description of Artificial Sequence: Synthetic oligonucleotide
ucgcuggccgcgcccgagg

SEQ ID NO: 3011609 - RNA, 19 nt, Artificial Sequence
  Description of Artificial Sequence: Synthetic oligonucleotide
ccaaacucccgcagcaaac

SEQ ID NO: 3011610 - RNA, 19 nt, Artificial Sequence
  Description of Artificial Sequence: Synthetic oligonucleotide
cccaaauugaggaucaagu

SEQ ID NO: 3011611 - RNA, 19 nt, Artificial Sequence
  Description of Artificial Sequence: Synthetic oligonucleotide
agacauuauuuuggcuaca

SEQ ID NO: 3011612 - RNA, 19 nt, Artificial Sequence
  Description of Artificial Sequence: Synthetic oligonucleotide
gcagcaaacagucccaaau

SEQ ID NO: 3011613 - RNA, 19 nt, Artificial Sequence
  Description of Artificial Sequence: Synthetic oligonucleotide
gcuagaagccauagcagca

SEQ ID NO: 3011614 - RNA, 19 nt, Artificial Sequence
  Description of Artificial Sequence: Synthetic oligonucleotide
cuggccgcgcccgaggcgc

SEQ ID NO: 3011615 - RNA, 19 nt, Artificial Sequence
  Description of Artificial Sequence: Synthetic oligonucleotide
caauuuccgacuccgcacu

SEQ ID NO: 3011616 - RNA, 19 nt, Artificial Sequence
  Description of Artificial Sequence: Synthetic oligonucleotide
acguugucuggaacuucgg

SEQ ID NO: 3011617 - RNA, 19 nt, Artificial Sequence
  Description of Artificial Sequence: Synthetic oligonucleotide
uggcuacaccccuggcuga

SEQ ID NO: 3011618 - RNA, 19 nt, Artificial Sequence
  Description of Artificial Sequence: Synthetic oligonucleotide
cgaagcgguagacaccgcg

SEQ ID NO: 3011619 - RNA, 19 nt, Artificial Sequence
  Description of Artificial Sequence: Synthetic oligonucleotide
uuaccgccggccgguagug

SEQ ID NO: 3011620 - RNA, 19 nt, Artificial Sequence
  Description of Artificial Sequence: Synthetic oligonucleotide
agagucggcgcagaccgau

SEQ ID NO: 3011621 - RNA, 19 nt, Artificial Sequence
  Description of Artificial Sequence: Synthetic oligonucleotide
ccgcuagaagccauagcag

SEQ ID NO: 3011622 - RNA, 19 nt, Artificial Sequence
  Description of Artificial Sequence: Synthetic oligonucleotide
cguugucuggaacuucggg

SEQ ID NO: 3011623 - RNA, 19 nt, Artificial Sequence
  Description of Artificial Sequence: Synthetic oligonucleotide
ucaccccgcuagaagccau

SEQ ID NO: 3011624 - RNA, 19 nt, Artificial Sequence
  Description of Artificial Sequence: Synthetic oligonucleotide
gcaccgagcaccuccgcac

SEQ ID NO: 3011625 - RNA, 19 nt, Artificial Sequence
  Description of Artificial Sequence: Synthetic oligonucleotide
uauccguggcgaagcggua

SEQ ID NO: 3011626 - RNA, 19 nt, Artificial Sequence
  Description of Artificial Sequence: Synthetic oligonucleotide
accgagcaccuccgcacug

SEQ ID NO: 3011627 - RNA, 19 nt, Artificial Sequence
  Description of Artificial Sequence: Synthetic oligonucleotide
gagcaccuccgcacugggg

SEQ ID NO: 3011628 - RNA, 19 nt, Artificial Sequence
  Description of Artificial Sequence: Synthetic oligonucleotide
accccgcuagaagccauag

SEQ ID NO: 3011629 - RNA, 19 nt, Artificial Sequence
  Description of Artificial Sequence: Synthetic oligonucleotide
ccggccgguagugagaggc

SEQ ID NO: 3011630 - RNA, 19 nt, Artificial Sequence
  Description of Artificial Sequence: Synthetic oligonucleotide
guuccuccugaagucguuc

SEQ ID NO: 3011631 - RNA, 19 nt, Artificial Sequence
  Description of Artificial Sequence: Synthetic oligonucleotide
cucccacguugucuggaac

SEQ ID NO: 3011632 - RNA, 19 nt, Artificial Sequence
  Description of Artificial Sequence: Synthetic oligonucleotide
agacaccgcggagccaguc

SEQ ID NO: 3011633 - RNA, 19 nt, Artificial Sequence
  Description of Artificial Sequence: Synthetic oligonucleotide
cucccgcagcaaacagucc

SEQ ID NO: 3011634 - RNA, 19 nt, Artificial Sequence
  Description of Artificial Sequence: Synthetic oligonucleotide
gucggcgcagaccgauggc

SEQ ID NO: 3011635 - RNA, 19 nt, Artificial Sequence
  Description of Artificial Sequence: Synthetic oligonucleotide
aggugccaucaaaucaaug

SEQ ID NO: 3011636 - RNA, 19 nt, Artificial Sequence
  Description of Artificial Sequence: Synthetic oligonucleotide
caccgcggagccagucucc

SEQ ID NO: 3011637 - RNA, 19 nt, Artificial Sequence
  Description of Artificial Sequence: Synthetic oligonucleotide
ggcgaacgcgcagagaguc

SEQ ID NO: 3011638 - RNA, 19 nt, Artificial Sequence
  Description of Artificial Sequence: Synthetic oligonucleotide
gcgguagacaccgcggagc

SEQ ID NO: 3011639 - RNA, 19 nt, Artificial Sequence
  Description of Artificial Sequence: Synthetic oligonucleotide
ggaucaaguuccuccugaa

SEQ ID NO: 3011640 - RNA, 19 nt, Artificial Sequence
  Description of Artificial Sequence: Synthetic oligonucleotide
gaacgcgcagagagucggc

SEQ ID NO: 3011641 - RNA, 19 nt, Artificial Sequence
  Description of Artificial Sequence: Synthetic oligonucleotide
gccagccaaacucccgcag

SEQ ID NO: 3011642 - RNA, 19 nt, Artificial Sequence
  Description of Artificial Sequence: Synthetic oligonucleotide
auuuccgacuccgcacuua

SEQ ID NO: 3011643 - RNA, 19 nt, Artificial Sequence
  Description of Artificial Sequence: Synthetic oligonucleotide
aaguuccuggccagccaaa

SEQ ID NO: 3011644 - RNA, 19 nt, Artificial Sequence
  Description of Artificial Sequence: Synthetic oligonucleotide
gagaggcagaaggcccgcc

SEQ ID NO: 3011645 - RNA, 19 nt, Artificial Sequence
  Description of Artificial Sequence: Synthetic oligonucleotide
gacaccgcggagccagucu

SEQ ID NO: 3011646 - RNA, 19 nt, Artificial Sequence
  Description of Artificial Sequence: Synthetic oligonucleotide
cgacuccgcacuuaccgcc

SEQ ID NO: 3011647 - RNA, 19 nt, Artificial Sequence
  Description of Artificial Sequence: Synthetic oligonucleotide
gcagcaccgagcaccuccg

SEQ ID NO: 3011648 - RNA, 19 nt, Artificial Sequence
  Description of Artificial Sequence: Synthetic oligonucleotide
uagacaccgcggagccagu

SEQ ID NO: 3011649 - RNA, 19 nt, Artificial Sequence
  Description of Artificial Sequence: Synthetic oligonucleotide
cuccgcacuuaccgccggc

SEQ ID NO: 3011650 - RNA, 19 nt, Artificial Sequence
  Description of Artificial Sequence: Synthetic oligonucleotide
ccuggccagccaaacuccc

SEQ ID NO: 3011651 - RNA, 19 nt, Artificial Sequence
  Description of Artificial Sequence: Synthetic oligonucleotide
caccccuggcugaggugcc

SEQ ID NO: 3011652 - RNA, 19 nt, Artificial Sequence
  Description of Artificial Sequence: Synthetic oligonucleotide
ccgacuccgcacuuaccgc

SEQ ID NO: 3011653 - RNA, 19 nt, Artificial Sequence
  Description of Artificial Sequence: Synthetic oligonucleotide
guuccuggccagccaaacu

SEQ ID NO: 3011654 - RNA, 19 nt, Artificial Sequence
  Description of Artificial Sequence: Synthetic oligonucleotide
cuuaccgccggccgguagu

SEQ ID NO: 3011655 - RNA, 19 nt, Artificial Sequence
  Description of Artificial Sequence: Synthetic oligonucleotide
cgaacgcgcagagagucgg

SEQ ID NO: 3011656 - RNA, 19 nt, Artificial Sequence
  Description of Artificial Sequence: Synthetic oligonucleotide
gagucggcgcagaccgaug

SEQ ID NO: 3011657 - RNA, 19 nt, Artificial Sequence
  Description of Artificial Sequence: Synthetic oligonucleotide
ggccgguagugagaggcag

SEQ ID NO: 3011658 - RNA, 19 nt, Artificial Sequence
  Description of Artificial Sequence: Synthetic oligonucleotide
agccagucucccacguugu

SEQ ID NO: 3011659 - RNA, 19 nt, Artificial Sequence
  Description of Artificial Sequence: Synthetic oligonucleotide
cagcaaacagucccaaauu

SEQ ID NO: 3011660 - RNA, 19 nt, Artificial Sequence
  Description of Artificial Sequence: Synthetic oligonucleotide
ccuauccguggcgaagcgg

SEQ ID NO: 3011661 - RNA, 19 nt, Artificial Sequence
  Description of Artificial Sequence: Synthetic oligonucleotide
cgguagacaccgcggagcc

SEQ ID NO: 3011662 - RNA, 19 nt, Artificial Sequence
  Description of Artificial Sequence: Synthetic oligonucleotide
gcggagccagucucccacg

SEQ ID NO: 3011663 - RNA, 19 nt, Artificial Sequence
  Description of Artificial Sequence: Synthetic oligonucleotide
ggcuacaccccuggcugag

SEQ ID NO: 3011664 - RNA, 19 nt, Artificial Sequence
  Description of Artificial Sequence: Synthetic oligonucleotide
cgauggcgcaauuuccgac

SEQ ID NO: 3011665 - RNA, 19 nt, Artificial Sequence
  Description of Artificial Sequence: Synthetic oligonucleotide
cgucaccccgcuagaagcc

SEQ ID NO: 3011666 - RNA, 19 nt, Artificial Sequence
  Description of Artificial Sequence: Synthetic oligonucleotide
gcagagagucggcgcagac

SEQ ID NO: 3011667 - RNA, 19 nt, Artificial Sequence
  Description of Artificial Sequence: Synthetic oligonucleotide
gucucccacguugucugga

SEQ ID NO: 3011668 - RNA, 19 nt, Artificial Sequence
  Description of Artificial Sequence: Synthetic oligonucleotide
cgcaauuuccgacuccgca

SEQ ID NO: 3011669 - RNA, 19 nt, Artificial Sequence
  Description of Artificial Sequence: Synthetic oligonucleotide
cuacaccccuggcugaggu

SEQ ID NO: 3011670 - RNA, 19 nt, Artificial Sequence
  Description of Artificial Sequence: Synthetic oligonucleotide
cgcacuuaccgccggccgg

SEQ ID NO: 3011671 - RNA, 19 nt, Artificial Sequence
  Description of Artificial Sequence: Synthetic oligonucleotide
gcgaacgcgcagagagucg

SEQ ID NO: 3011672 - RNA, 19 nt, Artificial Sequence
  Description of Artificial Sequence: Synthetic oligonucleotide
aguuccuccugaagucguu

SEQ ID NO: 3011673 - RNA, 19 nt, Artificial Sequence
  Description of Artificial Sequence: Synthetic oligonucleotide
cuccugaagucguuccuau

SEQ ID NO: 3011674 - RNA, 19 nt, Artificial Sequence
  Description of Artificial Sequence: Synthetic oligonucleotide
ccgcacuuaccgccggccg

SEQ ID NO: 3011675 - RNA, 19 nt, Artificial Sequence
  Description of Artificial Sequence: Synthetic oligonucleotide
caaugucacuuaaguuccu

SEQ ID NO: 3011676 - RNA, 19 nt, Artificial Sequence
  Description of Artificial Sequence: Synthetic oligonucleotide
cuggcugaggugccaucaa

SEQ ID NO: 3011677 - RNA, 19 nt, Artificial Sequence
  Description of Artificial Sequence: Synthetic oligonucleotide
ggcgcagaccgauggcgca

SEQ ID NO: 3011678 - RNA, 19 nt, Artificial Sequence
  Description of Artificial Sequence: Synthetic oligonucleotide
cagcaccgagcaccuccgc

SEQ ID NO: 3011679 - RNA, 19 nt, Artificial Sequence
  Description of Artificial Sequence: Synthetic oligonucleotide
gcuacaccccuggcugagg

SEQ ID NO: 3011680 - RNA, 19 nt, Artificial Sequence
  Description of Artificial Sequence: Synthetic oligonucleotide
cucgcuggccgcgcccgag

SEQ ID NO: 3011681 - RNA, 19 nt, Artificial Sequence
  Description of Artificial Sequence: Synthetic oligonucleotide
ccgagcaccuccgcacugg

SEQ ID NO: 3011682 - RNA, 19 nt, Artificial Sequence
  Description of Artificial Sequence: Synthetic oligonucleotide
gcuggccgcgcccgaggcg

SEQ ID NO: 3011683 - RNA, 19 nt, Artificial Sequence
  Description of Artificial Sequence: Synthetic oligonucleotide
cgcggagccagucucccac

SEQ ID NO: 3011684 - RNA, 19 nt, Artificial Sequence
  Description of Artificial Sequence: Synthetic oligonucleotide
gaggugccaucaaaucaau

SEQ ID NO: 3011685 - RNA, 19 nt, Artificial Sequence
  Description of Artificial Sequence: Synthetic oligonucleotide
gcccgaggcgcucaccguc

SEQ ID NO: 3011686 - RNA, 19 nt, Artificial Sequence
  Description of Artificial Sequence: Synthetic oligonucleotide
cccgcagcaaacaguccca

SEQ ID NO: 3011687 - RNA, 19 nt, Artificial Sequence
  Description of Artificial Sequence: Synthetic oligonucleotide
ggccagccaaacucccgca

SEQ ID NO: 3011688 - RNA, 19 nt, Artificial Sequence
  Description of Artificial Sequence: Synthetic oligonucleotide
ccgauggcgcaauuuccga

SEQ ID NO: 3011689 - RNA, 19 nt, Artificial Sequence
  Description of Artificial Sequence: Synthetic oligonucleotide
ccccgcuagaagccauagc

SEQ ID NO: 3011690 - RNA, 19 nt, Artificial Sequence
  Description of Artificial Sequence: Synthetic oligonucleotide
gagagucggcgcagaccga

SEQ ID NO: 3011691 - RNA, 19 nt, Artificial Sequence
  Description of Artificial Sequence: Synthetic oligonucleotide
cgagcaccuccgcacuggg

SEQ ID NO: 3011692 - RNA, 19 nt, Artificial Sequence
  Description of Artificial Sequence: Synthetic oligonucleotide
uaccgccggccgguaguga

SEQ ID NO: 3011693 - RNA, 19 nt, Artificial Sequence
  Description of Artificial Sequence: Synthetic oligonucleotide
ccuggcugaggugccauca

SEQ ID NO: 3011694 - RNA, 19 nt, Artificial Sequence
  Description of Artificial Sequence: Synthetic oligonucleotide
ggcugaggugccaucaaau

SEQ ID NO: 3011695 - RNA, 19 nt, Artificial Sequence
  Description of Artificial Sequence: Synthetic oligonucleotide
ccaucaaaucaaugucacu

SEQ ID NO: 3011696 - RNA, 19 nt, Artificial Sequence
  Description of Artificial Sequence: Synthetic oligonucleotide
gccucgcuggccgcgcccg

SEQ ID NO: 3011697 - RNA, 19 nt, Artificial Sequence
  Description of Artificial Sequence: Synthetic oligonucleotide
gccagucucccacguuguc

SEQ ID NO: 3011698 - RNA, 19 nt, Artificial Sequence
  Description of Artificial Sequence: Synthetic oligonucleotide
cggcgcagaccgauggcgc

SEQ ID NO: 3011699 - RNA, 19 nt, Artificial Sequence
  Description of Artificial Sequence: Synthetic oligonucleotide
gucccaaauugaggaucaa

SEQ ID NO: 3011700 - RNA, 19 nt, Artificial Sequence
  Description of Artificial Sequence: Synthetic oligonucleotide
gcgcucaccgucaccccgc

SEQ ID NO: 3011701 - RNA, 19 nt, Artificial Sequence
  Description of Artificial Sequence: Synthetic oligonucleotide
gcgcaauuuccgacuccgc

SEQ ID NO: 3011702 - RNA, 19 nt, Artificial Sequence
  Description of Artificial Sequence: Synthetic oligonucleotide
ccauagcagcaccgagcac

SEQ ID NO: 3011703 - RNA, 19 nt, Artificial Sequence
  Description of Artificial Sequence: Synthetic oligonucleotide
gcgcagagagucggcgcag

SEQ ID NO: 3011704 - RNA, 19 nt, Artificial Sequence
  Description of Artificial Sequence: Synthetic oligonucleotide
ccgguagugagaggcagaa

SEQ ID NO: 3011705 - RNA, 19 nt, Artificial Sequence
  Description of Artificial Sequence: Synthetic oligonucleotide
uggccgcgcccgaggcgcu

SEQ ID NO: 3011706 - RNA, 19 nt, Artificial Sequence
  Description of Artificial Sequence: Synthetic oligonucleotide
caccccgcuagaagccaua

SEQ ID NO: 3011707 - RNA, 19 nt, Artificial Sequence
  Description of Artificial Sequence: Synthetic oligonucleotide
gguagacaccgcggagcca

SEQ ID NO: 3011708 - RNA, 19 nt, Artificial Sequence
  Description of Artificial Sequence: Synthetic oligonucleotide
caccgagcaccuccgcacu

SEQ ID NO: 3011709 - RNA, 19 nt, Artificial Sequence
  Description of Artificial Sequence: Synthetic oligonucleotide
ggccucgcuggccgcgccc

SEQ ID NO: 3011710 - RNA, 19 nt, Artificial Sequence
  Description of Artificial Sequence: Synthetic oligonucleotide
ccacguugucuggaacuuc

SEQ ID NO: 3011711 - RNA, 19 nt, Artificial Sequence
  Description of Artificial Sequence: Synthetic oligonucleotide
gccgguagugagaggcaga

SEQ ID NO: 3011712 - RNA, 19 nt, Artificial Sequence
  Description of Artificial Sequence: Synthetic oligonucleotide
cagaccgauggcgcaauuu

SEQ ID NO: 3011713 - RNA, 19 nt, Artificial Sequence
  Description of Artificial Sequence: Synthetic oligonucleotide
cgcgcagagagucggcgca

SEQ ID NO: 3011714 - RNA, 19 nt, Artificial Sequence
  Description of Artificial Sequence: Synthetic oligonucleotide
uagcagcaccgagcaccuc

SEQ ID NO: 3011715 - RNA, 19 nt, Artificial Sequence
  Description of Artificial Sequence: Synthetic oligonucleotide
caccgucaccccgcuagaa

SEQ ID NO: 3011716 - RNA, 19 nt, Artificial Sequence
  Description of Artificial Sequence: Synthetic oligonucleotide
cccgaggcgcucaccguca

SEQ ID NO: 3011717 - RNA, 19 nt, Artificial Sequence
  Description of Artificial Sequence: Synthetic oligonucleotide
gccggccgguagugagagg

SEQ ID NO: 3011718 - RNA, 19 nt, Artificial Sequence
  Description of Artificial Sequence: Synthetic oligonucleotide
ccuccugaagucguuccua

SEQ ID NO: 3011719 - RNA, 19 nt, Artificial Sequence
  Description of Artificial Sequence: Synthetic oligonucleotide
ccagucucccacguugucu

SEQ ID NO: 3011720 - RNA, 19 nt, Artificial Sequence
  Description of Artificial Sequence: Synthetic oligonucleotide
gcacuuaccgccggccggu

SEQ ID NO: 3011721 - RNA, 19 nt, Artificial Sequence
  Description of Artificial Sequence: Synthetic oligonucleotide
cgaggcgcucaccgucacc

SEQ ID NO: 3011722 - RNA, 19 nt, Artificial Sequence
  Description of Artificial Sequence: Synthetic oligonucleotide
cgccggccgguagugagag

SEQ ID NO: 3011723 - RNA, 19 nt, Artificial Sequence
  Description of Artificial Sequence: Synthetic oligonucleotide
gggccucgcuggccgcgcc

SEQ ID NO: 3011724 - RNA, 19 nt, Artificial Sequence
  Description of Artificial Sequence: Synthetic oligonucleotide
cgguagugagaggcagaag

SEQ ID NO: 3011725 - RNA, 19 nt, Artificial Sequence
  Description of Artificial Sequence: Synthetic oligonucleotide
cguggcgaagcgguagaca

SEQ ID NO: 3011726 - RNA, 19 nt, Artificial Sequence
  Description of Artificial Sequence: Synthetic oligonucleotide
ccguggcgaagcgguagac

SEQ ID NO: 3011727 - RNA, 19 nt, Artificial Sequence
  Description of Artificial Sequence: Synthetic oligonucleotide
ccgaggcgcucaccgucac

SEQ ID NO: 3011728 - RNA, 19 nt, Artificial Sequence
  Description of Artificial Sequence: Synthetic oligonucleotide
ccccgaccgcauccgcgag

SEQ ID NO: 3011729 - RNA, 19 nt, Artificial Sequence
  Description of Artificial Sequence: Synthetic oligonucleotide
ggggccucgcuggccgcgc

SEQ ID NO: 3011730 - RNA, 19 nt, Artificial Sequence
  Description of Artificial Sequence: Synthetic oligonucleotide
cguuccuauccguggcgaa

SEQ ID NO: 3011731 - RNA, 19 nt, Artificial Sequence
  Description of Artificial Sequence: Synthetic oligonucleotide
cgcuggccgcgcccgaggc

SEQ ID NO: 3011732 - RNA, 19 nt, Artificial Sequence
  Description of Artificial Sequence: Synthetic oligonucleotide
gcgaagcgguagacaccgc

SEQ ID NO: 3011733 - RNA, 19 nt, Artificial Sequence
  Description of Artificial Sequence: Synthetic oligonucleotide
gcgcagaccgauggcgcaa

SEQ ID NO: 3011734 - RNA, 19 nt, Artificial Sequence
  Description of Artificial Sequence: Synthetic oligonucleotide
cgcagcaaacagucccaaa

SEQ ID NO: 3011735 - RNA, 19 nt, Artificial Sequence
  Description of Artificial Sequence: Synthetic oligonucleotide
ccgccggccgguagugaga

SEQ ID NO: 3011736 - RNA, 19 nt, Artificial Sequence
  Description of Artificial Sequence: Synthetic oligonucleotide
gggcgaacgcgcagagagu

SEQ ID NO: 3011737 - RNA, 19 nt, Artificial Sequence
  Description of Artificial Sequence: Synthetic oligonucleotide
cacuuaccgccggccggua

SEQ ID NO: 3011738 - RNA, 19 nt, Artificial Sequence
  Description of Artificial Sequence: Synthetic oligonucleotide
cccacguugucuggaacuu

SEQ ID NO: 3011739 - RNA, 19 nt, Artificial Sequence
  Description of Artificial Sequence: Synthetic oligonucleotide
ccgcagcaaacagucccaa

SEQ ID NO: 3011740 - RNA, 19 nt, Artificial Sequence
  Description of Artificial Sequence: Synthetic oligonucleotide
cggccgguagugagaggca

SEQ ID NO: 3011741 - RNA, 19 nt, Artificial Sequence
  Description of Artificial Sequence: Synthetic oligonucleotide
ccgcggagccagucuccca

SEQ ID NO: 3011742 - RNA, 19 nt, Artificial Sequence
  Description of Artificial Sequence: Synthetic oligonucleotide
cgcagagagucggcgcaga

SEQ ID NO: 3011743 - RNA, 19 nt, Artificial Sequence
  Description of Artificial Sequence: Synthetic oligonucleotide
gcucaccgucaccccgcua

SEQ ID NO: 3011744 - RNA, 19 nt, Artificial Sequence
  Description of Artificial Sequence: Synthetic oligonucleotide
gccgcgcccgaggcgcuca

SEQ ID NO: 3011745 - RNA, 19 nt, Artificial Sequence
  Description of Artificial Sequence: Synthetic oligonucleotide
gcagaccgauggcgcaauu

SEQ ID NO: 3011746 - RNA, 19 nt, Artificial Sequence
  Description of Artificial Sequence: Synthetic oligonucleotide
ccgaccgcauccgcgaguu

SEQ ID NO: 3011747 - RNA, 19 nt, Artificial Sequence
  Description of Artificial Sequence: Synthetic oligonucleotide
cccgaccgcauccgcgagu

SEQ ID NO: 3011748 - RNA, 19 nt, Artificial Sequence
  Description of Artificial Sequence: Synthetic oligonucleotide
cgaccgcauccgcgaguuc

SEQ ID NO: 3011749 - RNA, 19 nt, Artificial Sequence
  Description of Artificial Sequence: Synthetic oligonucleotide
cggagccagucucccacgu

SEQ ID NO: 3011750 - RNA, 19 nt, Artificial Sequence
  Description of Artificial Sequence: Synthetic oligonucleotide
ccgcgcccgaggcgcucac

SEQ ID NO: 3011751 - RNA, 19 nt, Artificial Sequence
  Description of Artificial Sequence: Synthetic oligonucleotide
ccucgcuggccgcgcccga

SEQ ID NO: 3011752 - RNA, 19 nt, Artificial Sequence
  Description of Artificial Sequence: Synthetic oligonucleotide
cgcgcccgaggcgcucacc

SEQ ID NO: 3011753 - RNA, 19 nt, Artificial Sequence
  Description of Artificial Sequence: Synthetic oligonucleotide
ggccgcgcccgaggcgcuc

SEQ ID NO: 3011754 - RNA, 19 nt, Artificial Sequence
  Description of Artificial Sequence: Synthetic oligonucleotide
cgcucaccgucaccccgcu

SEQ ID NO: 3011755 - RNA, 19 nt, Artificial Sequence
  Description of Artificial Sequence: Synthetic oligonucleotide
ccccuggcugaggugccau

SEQ ID NO: 3011756 - RNA, 19 nt, Artificial Sequence
  Description of Artificial Sequence: Synthetic oligonucleotide
cgcccgaggcgcucaccgu

SEQ ID NO: 3011757 - RNA, 19 nt, Artificial Sequence
  Description of Artificial Sequence: Synthetic oligonucleotide
cgcagaccgauggcgcaau

SEQ ID NO: 3011758 - RNA, 19 nt, Artificial Sequence
  Description of Artificial Sequence: Synthetic oligonucleotide
uauaauaaaaccuuuccca

SEQ ID NO: 3011759 - RNA, 19 nt, Artificial Sequence
  Description of Artificial Sequence: Synthetic oligonucleotide
uaucauugcaaacagcugg

SEQ ID NO: 3011760 - RNA, 19 nt, Artificial Sequence
  Description of Artificial Sequence: Synthetic oligonucleotide
ucuaucauugcaaacagcu

SEQ ID NO: 3011761 - RNA, 19 nt, Artificial Sequence
  Description of Artificial Sequence: Synthetic oligonucleotide
uuauaauaaaaccuuuccc

SEQ ID NO: 3011762 - RNA, 19 nt, Artificial Sequence
  Description of Artificial Sequence: Synthetic oligonucleotide
auaauaaaaccuuucccac

SEQ ID NO: 3011763 - RNA, 19 nt, Artificial Sequence
  Description of Artificial Sequence: Synthetic oligonucleotide
uuuuaucacauucagggca

SEQ ID NO: 3011764 - RNA, 19 nt, Artificial Sequence
  Description of Artificial Sequence: Synthetic oligonucleotide
uggacuuauaauaaaaccu

SEQ ID NO: 3011765 - RNA, 19 nt, Artificial Sequence
  Description of Artificial Sequence: Synthetic oligonucleotide
cuuauaauaaaaccuuucc

SEQ ID NO: 3011766 - RNA, 19 nt, Artificial Sequence
  Description of Artificial Sequence: Synthetic oligonucleotide
aaugugcucagcuaguuug

SEQ ID NO: 3011767 - RNA, 19 nt, Artificial Sequence
  Description of Artificial Sequence: Synthetic oligonucleotide
aaaccuuucccacagucuc

SEQ ID NO: 3011768 - RNA, 19 nt, Artificial Sequence
  Description of Artificial Sequence: Synthetic oligonucleotide
aaucggaaacucuugucac

SEQ ID NO: 3011769 - RNA, 19 nt, Artificial Sequence
  Description of Artificial Sequence: Synthetic oligonucleotide
aaacucuugucacacuugg

SEQ ID NO: 3011770 - RNA, 19 nt, Artificial Sequence
  Description of Artificial Sequence: Synthetic oligonucleotide
uuggacuuauaauaaaacc

SEQ ID NO: 3011771 - RNA, 19 nt, Artificial Sequence
  Description of Artificial Sequence: Synthetic oligonucleotide
uagacuguuugacaaagcc

SEQ ID NO: 3011772 - RNA, 19 nt, Artificial Sequence
  Description of Artificial Sequence: Synthetic oligonucleotide
uuuggacuuauaauaaaac

SEQ ID NO: 3011773 - RNA, 19 nt, Artificial Sequence
  Description of Artificial Sequence: Synthetic oligonucleotide
uuuaucacauucagggcag

SEQ ID NO: 3011774 - RNA, 19 nt, Artificial Sequence
  Description of Artificial Sequence: Synthetic oligonucleotide
acaagccuuuucuuaaugc

SEQ ID NO: 3011775 - RNA, 19 nt, Artificial Sequence
  Description of Artificial Sequence: Synthetic oligonucleotide
guuccagaaguuuagacug

SEQ ID NO: 3011776 - RNA, 19 nt, Artificial Sequence
  Description of Artificial Sequence: Synthetic oligonucleotide
ugagccuucaaucggaaac

SEQ ID NO: 3011777 - RNA, 19 nt, Artificial Sequence
  Description of Artificial Sequence: Synthetic oligonucleotide
uuuucuuaaugccaggcuc

SEQ ID NO: 3011778 - RNA, 19 nt, Artificial Sequence
  Description of Artificial Sequence: Synthetic oligonucleotide
aguggaaaggucucucgcc

SEQ ID NO: 3011779 - RNA, 19 nt, Artificial Sequence
  Description of Artificial Sequence: Synthetic oligonucleotide
auugcaaacagcuggacaa

SEQ ID NO: 3011780 - RNA, 19 nt, Artificial Sequence
  Description of Artificial Sequence: Synthetic oligonucleotide
uuuuguguguacucuaaug

SEQ ID NO: 3011781 - RNA, 19 nt, Artificial Sequence
  Description of Artificial Sequence: Synthetic oligonucleotide
uguuccagaaguuuagacu

SEQ ID NO: 3011782 - RNA, 19 nt, Artificial Sequence
  Description of Artificial Sequence: Synthetic oligonucleotide
uuuagacuguuugacaaag

SEQ ID NO: 3011783 - RNA, 19 nt, Artificial Sequence
  Description of Artificial Sequence: Synthetic oligonucleotide
uuucuuaaugccaggcuca

SEQ ID NO: 3011784 - RNA, 19 nt, Artificial Sequence
  Description of Artificial Sequence: Synthetic oligonucleotide
uacucuaaugugcucagcu

SEQ ID NO: 3011785 - RNA, 19 nt, Artificial Sequence
  Description of Artificial Sequence: Synthetic oligonucleotide
aguuuagacuguuugacaa

SEQ ID NO: 3011786 - RNA, 19 nt, Artificial Sequence
  Description of Artificial Sequence: Synthetic oligonucleotide
acuuauaauaaaaccuuuc

SEQ ID NO: 3011787 - RNA, 19 nt, Artificial Sequence
  Description of Artificial Sequence: Synthetic oligonucleotide
agcagcugagccuucaauc

SEQ ID NO: 3011788 - RNA, 19 nt, Artificial Sequence
  Description of Artificial Sequence: Synthetic oligonucleotide
aaguuuagacuguuugaca

SEQ ID NO: 3011789 - RNA, 19 nt, Artificial Sequence
  Description of Artificial Sequence: Synthetic oligonucleotide
gaaguuuagacuguuugac

SEQ ID NO: 3011790 - RNA, 19 nt, Artificial Sequence
  Description of Artificial Sequence: Synthetic oligonucleotide
caagccuuuucuuaaugcc

SEQ ID NO: 3011791 - RNA, 19 nt, Artificial Sequence
  Description of Artificial Sequence: Synthetic oligonucleotide
acucuugucacacuuggga

SEQ ID NO: 3011792 - RNA, 19 nt, Artificial Sequence
  Description of Artificial Sequence: Synthetic oligonucleotide
agaaguuuagacuguuuga

SEQ ID NO: 3011793 - RNA, 19 nt, Artificial Sequence
  Description of Artificial Sequence: Synthetic oligonucleotide
cagaaguuuagacuguuug

SEQ ID NO: 3011794 - RNA, 19 nt, Artificial Sequence
  Description of Artificial Sequence: Synthetic oligonucleotide
ucauguggaaccuggcaag

SEQ ID NO: 3011795 - RNA, 19 nt, Artificial Sequence
  Description of Artificial Sequence: Synthetic oligonucleotide
cucuaaugugcucagcuag

SEQ ID NO: 3011796 - RNA, 19 nt, Artificial Sequence
  Description of Artificial Sequence: Synthetic oligonucleotide
aagauuuuguguguacucu

SEQ ID NO: 3011797 - RNA, 19 nt, Artificial Sequence
  Description of Artificial Sequence: Synthetic oligonucleotide
acuccagucagccucuauc

SEQ ID NO: 3011798 - RNA, 19 nt, Artificial Sequence
  Description of Artificial Sequence: Synthetic oligonucleotide
agacuguuugacaaagccc

SEQ ID NO: 3011799 - RNA, 19 nt, Artificial Sequence
  Description of Artificial Sequence: Synthetic oligonucleotide
uaguuuggacuuauaauaa

SEQ ID NO: 3011800 - RNA, 19 nt, Artificial Sequence
  Description of Artificial Sequence: Synthetic oligonucleotide
ucacauucagggcagugga

SEQ ID NO: 3011801 - RNA, 19 nt, Artificial Sequence
  Description of Artificial Sequence: Synthetic oligonucleotide
ucuccacaggcaaagggcc

SEQ ID NO: 3011802 - RNA, 19 nt, Artificial Sequence
  Description of Artificial Sequence: Synthetic oligonucleotide
caugugaccccuuucccgg

SEQ ID NO: 3011803 - RNA, 19 nt, Artificial Sequence
  Description of Artificial Sequence: Synthetic oligonucleotide
ugcucagcuaguuuggacu

SEQ ID NO: 3011804 - RNA, 19 nt, Artificial Sequence
  Description of Artificial Sequence: Synthetic oligonucleotide
uucaaucggaaacucuugu

SEQ ID NO: 3011805 - RNA, 19 nt, Artificial Sequence
  Description of Artificial Sequence: Synthetic oligonucleotide
acacuugggacacugaaaa

SEQ ID NO: 3011806 - RNA, 19 nt, Artificial Sequence
  Description of Artificial Sequence: Synthetic oligonucleotide
aaccuggcaagauuuugug

SEQ ID NO: 3011807 - RNA, 19 nt, Artificial Sequence
  Description of Artificial Sequence: Synthetic oligonucleotide
agucuccacaggcaaaggg

SEQ ID NO: 3011808 - RNA, 19 nt, Artificial Sequence
  Description of Artificial Sequence: Synthetic oligonucleotide
ucucucgccuguaugcagg

SEQ ID NO: 3011809 - RNA, 19 nt, Artificial Sequence
  Description of Artificial Sequence: Synthetic oligonucleotide
uguacucuaaugugcucag

SEQ ID NO: 3011810 - RNA, 19 nt, Artificial Sequence
  Description of Artificial Sequence: Synthetic oligonucleotide
agcaugugaccccuuuccc

SEQ ID NO: 3011811 - RNA, 19 nt, Artificial Sequence
  Description of Artificial Sequence: Synthetic oligonucleotide
cucaacuccagucagccuc

SEQ ID NO: 3011812 - RNA, 19 nt, Artificial Sequence
  Description of Artificial Sequence: Synthetic oligonucleotide
cacugaaaaggcuucuccc

SEQ ID NO: 3011813 - RNA, 19 nt, Artificial Sequence
  Description of Artificial Sequence: Synthetic oligonucleotide
ucagccucuaucauugcaa

SEQ ID NO: 3011814 - RNA, 19 nt, Artificial Sequence
  Description of Artificial Sequence: Synthetic oligonucleotide
ucuaaugugcucagcuagu

SEQ ID NO: 3011815 - RNA, 19 nt, Artificial Sequence
  Description of Artificial Sequence: Synthetic oligonucleotide
uuagacuguuugacaaagc

SEQ ID NO: 3011816 - RNA, 19 nt, Artificial Sequence
  Description of Artificial Sequence: Synthetic oligonucleotide
aucacauucagggcagugg

SEQ ID NO: 3011817 - RNA, 19 nt, Artificial Sequence
  Description of Artificial Sequence: Synthetic oligonucleotide
caagauuuuguguguacuc

SEQ ID NO: 3011818 - RNA, 19 nt, Artificial Sequence
  Description of Artificial Sequence: Synthetic oligonucleotide
cagucagccucuaucauug

SEQ ID NO: 3011819 - RNA, 19 nt, Artificial Sequence
  Description of Artificial Sequence: Synthetic oligonucleotide
agcuaguuuggacuuauaa

SEQ ID NO: 3011820 - RNA, 19 nt, Artificial Sequence
  Description of Artificial Sequence: Synthetic oligonucleotide
aaaaccuuucccacagucu

SEQ ID NO: 3011821 - RNA, 19 nt, Artificial Sequence
  Description of Artificial Sequence: Synthetic oligonucleotide
uggacaagccuuuucuuaa

SEQ ID NO: 3011822 - RNA, 19 nt, Artificial Sequence
  Description of Artificial Sequence: Synthetic oligonucleotide
ucccacagucuccacaggc

SEQ ID NO: 3011823 - RNA, 19 nt, Artificial Sequence
  Description of Artificial Sequence: Synthetic oligonucleotide
agcuggacaagccuuuucu

SEQ ID NO: 3011824 - RNA, 19 nt, Artificial Sequence
  Description of Artificial Sequence: Synthetic oligonucleotide
ucacacuugggacacugaa

SEQ ID NO: 3011825 - RNA, 19 nt, Artificial Sequence
  Description of Artificial Sequence: Synthetic oligonucleotide
cuaucauugcaaacagcug

SEQ ID NO: 3011826 - RNA, 19 nt, Artificial Sequence
  Description of Artificial Sequence: Synthetic oligonucleotide
aaccuuucccacagucucc

SEQ ID NO: 3011827 - RNA, 19 nt, Artificial Sequence
  Description of Artificial Sequence: Synthetic oligonucleotide
caaucggaaacucuuguca

SEQ ID NO: 3011828 - RNA, 19 nt, Artificial Sequence
  Description of Artificial Sequence: Synthetic oligonucleotide
cuuaaugccaggcucaugu

SEQ ID NO: 3011829 - RNA, 19 nt, Artificial Sequence
  Description of Artificial Sequence: Synthetic oligonucleotide
ugggacacugaaaaggcuu

SEQ ID NO: 3011830 - RNA, 19 nt, Artificial Sequence
  Description of Artificial Sequence: Synthetic oligonucleotide
gacaagccuuuucuuaaug

SEQ ID NO: 3011831 - RNA, 19 nt, Artificial Sequence
  Description of Artificial Sequence: Synthetic oligonucleotide
gacuguuugacaaagcccu

SEQ ID NO: 3011832 - RNA, 19 nt, Artificial Sequence
  Description of Artificial Sequence: Synthetic oligonucleotide
ucaaucggaaacucuuguc

SEQ ID NO: 3011833 - RNA, 19 nt, Artificial Sequence
  Description of Artificial Sequence: Synthetic oligonucleotide
gcagcugagccuucaaucg

SEQ ID NO: 3011834 - RNA, 19 nt, Artificial Sequence
  Description of Artificial Sequence: Synthetic oligonucleotide
aagccuuuucuuaaugcca

SEQ ID NO: 3011835 - RNA, 19 nt, Artificial Sequence
  Description of Artificial Sequence: Synthetic oligonucleotide
cuucaaucggaaacucuug

SEQ ID NO: 3011836 - RNA, 19 nt, Artificial Sequence
  Description of Artificial Sequence: Synthetic oligonucleotide
aguuuggacuuauaauaaa

SEQ ID NO: 3011837 - RNA, 19 nt, Artificial Sequence
  Description of Artificial Sequence: Synthetic oligonucleotide
cagcaugugaccccuuucc

SEQ ID NO: 3011838 - RNA, 19 nt, Artificial Sequence
  Description of Artificial Sequence: Synthetic oligonucleotide
uccucauguguuccagaag

SEQ ID NO: 3011839 - RNA, 19 nt, Artificial Sequence
  Description of Artificial Sequence: Synthetic oligonucleotide
ccuggcaagauuuugugug

SEQ ID NO: 3011840 - RNA, 19 nt, Artificial Sequence
  Description of Artificial Sequence: Synthetic oligonucleotide
cauucagggcaguggaaag

SEQ ID NO: 3011841 - RNA, 19 nt, Artificial Sequence
  Description of Artificial Sequence: Synthetic oligonucleotide
cucgccuguaugcaggccc

SEQ ID NO: 3011842 - RNA, 19 nt, Artificial Sequence
  Description of Artificial Sequence: Synthetic oligonucleotide
auucagggcaguggaaagg

SEQ ID NO: 3011843 - RNA, 19 nt, Artificial Sequence
  Description of Artificial Sequence: Synthetic oligonucleotide
gaaacucuugucacacuug

SEQ ID NO: 3011844 - RNA, 19 nt, Artificial Sequence
  Description of Artificial Sequence: Synthetic oligonucleotide
ucggaaacucuugucacac

SEQ ID NO: 3011845 - RNA, 19 nt, Artificial Sequence
  Description of Artificial Sequence: Synthetic oligonucleotide
uggugccucagcaugugac

SEQ ID NO: 3011846 - RNA, 19 nt, Artificial Sequence
  Description of Artificial Sequence: Synthetic oligonucleotide
uguggaaccuggcaagauu

SEQ ID NO: 3011847 - RNA, 19 nt, Artificial Sequence
  Description of Artificial Sequence: Synthetic oligonucleotide
agccucuaucauugcaaac

SEQ ID NO: 3011848 - RNA, 19 nt, Artificial Sequence
  Description of Artificial Sequence: Synthetic oligonucleotide
aggcaaagggccucucggg

SEQ ID NO: 3011849 - RNA, 19 nt, Artificial Sequence
  Description of Artificial Sequence: Synthetic oligonucleotide
uuaaugccaggcucaugug

SEQ ID NO: 3011850 - RNA, 19 nt, Artificial Sequence
  Description of Artificial Sequence: Synthetic oligonucleotide
cucuaucauugcaaacagc

SEQ ID NO: 3011851 - RNA, 19 nt, Artificial Sequence
  Description of Artificial Sequence: Synthetic oligonucleotide
ucaacuccagucagccucu

SEQ ID NO: 3011852 - RNA, 19 nt, Artificial Sequence
  Description of Artificial Sequence: Synthetic oligonucleotide
guuuggacuuauaauaaaa

SEQ ID NO: 3011853 - RNA, 19 nt, Artificial Sequence
  Description of Artificial Sequence: Synthetic oligonucleotide
ugauggcugagcagcugag

SEQ ID NO: 3011854 - RNA, 19 nt, Artificial Sequence
  Description of Artificial Sequence: Synthetic oligonucleotide
aacucuugucacacuuggg

SEQ ID NO: 3011855 - RNA, 19 nt, Artificial Sequence
  Description of Artificial Sequence: Synthetic oligonucleotide
gucuccacaggcaaagggc

SEQ ID NO: 3011856 - RNA, 19 nt, Artificial Sequence
  Description of Artificial Sequence: Synthetic oligonucleotide
agauuuuguguguacucua

SEQ ID NO: 3011857 - RNA, 19 nt, Artificial Sequence
  Description of Artificial Sequence: Synthetic oligonucleotide
caguggaaaggucucucgc

SEQ ID NO: 3011858 - RNA, 19 nt, Artificial Sequence
  Description of Artificial Sequence: Synthetic oligonucleotide
auuuuguguguacucuaau

SEQ ID NO: 3011859 - RNA, 19 nt, Artificial Sequence
  Description of Artificial Sequence: Synthetic oligonucleotide
aucggaaacucuugucaca

SEQ ID NO: 3011860 - RNA, 19 nt, Artificial Sequence
  Description of Artificial Sequence: Synthetic oligonucleotide
ugcaaacagcuggacaagc

SEQ ID NO: 3011861 - RNA, 19 nt, Artificial Sequence
  Description of Artificial Sequence: Synthetic oligonucleotide
uuccagaaguuuagacugu

SEQ ID NO: 3011862 - RNA, 19 nt, Artificial Sequence
  Description of Artificial Sequence: Synthetic oligonucleotide
gcaugugaccccuuucccg

SEQ ID NO: 3011863 - RNA, 19 nt, Artificial Sequence
  Description of Artificial Sequence: Synthetic oligonucleotide
caaagggccucucggggcc

SEQ ID NO: 3011864 - RNA, 19 nt, Artificial Sequence
  Description of Artificial Sequence: Synthetic oligonucleotide
auguguuccagaaguuuag

SEQ ID NO: 3011865 - RNA, 19 nt, Artificial Sequence
  Description of Artificial Sequence: Synthetic oligonucleotide
uugcaaacagcuggacaag

SEQ ID NO: 3011866 - RNA, 19 nt, Artificial Sequence
  Description of Artificial Sequence: Synthetic oligonucleotide
uaaugugcucagcuaguuu

SEQ ID NO: 3011867 - RNA, 19 nt, Artificial Sequence
  Description of Artificial Sequence: Synthetic oligonucleotide
uguguuccagaaguuuaga

SEQ ID NO: 3011868 - RNA, 19 nt, Artificial Sequence
  Description of Artificial Sequence: Synthetic oligonucleotide
agucagccucuaucauugc

SEQ ID NO: 3011869 - RNA, 19 nt, Artificial Sequence
  Description of Artificial Sequence: Synthetic oligonucleotide
uguguccucauguguucca

SEQ ID NO: 3011870 - RNA, 19 nt, Artificial Sequence
  Description of Artificial Sequence: Synthetic oligonucleotide
ucagcaugugaccccuuuc

SEQ ID NO: 3011871 - RNA, 19 nt, Artificial Sequence
  Description of Artificial Sequence: Synthetic oligonucleotide
cauguguuccagaaguuua

SEQ ID NO: 3011872 - RNA, 19 nt, Artificial Sequence
  Description of Artificial Sequence: Synthetic oligonucleotide
cucauguggaaccuggcaa

SEQ ID NO: 3011873 - RNA, 19 nt, Artificial Sequence
  Description of Artificial Sequence: Synthetic oligonucleotide
guguacucuaaugugcuca

SEQ ID NO: 3011874 - RNA, 19 nt, Artificial Sequence
  Description of Artificial Sequence: Synthetic oligonucleotide
uaucacauucagggcagug

SEQ ID NO: 3011875 - RNA, 19 nt, Artificial Sequence
  Description of Artificial Sequence: Synthetic oligonucleotide
cauugcaaacagcuggaca

SEQ ID NO: 3011876 - RNA, 19 nt, Artificial Sequence
  Description of Artificial Sequence: Synthetic oligonucleotide
ucauguguuccagaaguuu

SEQ ID NO: 3011877 - RNA, 19 nt, Artificial Sequence
  Description of Artificial Sequence: Synthetic oligonucleotide
cagcugagccuucaaucgg

SEQ ID NO: 3011878 - RNA, 19 nt, Artificial Sequence
  Description of Artificial Sequence: Synthetic oligonucleotide
gauuuuguguguacucuaa

SEQ ID NO: 3011879 - RNA, 19 nt, Artificial Sequence
  Description of Artificial Sequence: Synthetic oligonucleotide
ggcaaagggccucucgggg

SEQ ID NO: 3011880 - RNA, 19 nt, Artificial Sequence
  Description of Artificial Sequence: Synthetic oligonucleotide
aucauugcaaacagcugga

SEQ ID NO: 3011881 - RNA, 19 nt, Artificial Sequence
  Description of Artificial Sequence: Synthetic oligonucleotide
acauucagggcaguggaaa

SEQ ID NO: 3011882 - RNA, 19 nt, Artificial Sequence
  Description of Artificial Sequence: Synthetic oligonucleotide
aaacagcuggacaagccuu

SEQ ID NO: 3011883 - RNA, 19 nt, Artificial Sequence
  Description of Artificial Sequence: Synthetic oligonucleotide
acucuaaugugcucagcua

SEQ ID NO: 3011884 - RNA, 19 nt, Artificial Sequence
  Description of Artificial Sequence: Synthetic oligonucleotide
uguguacucuaaugugcuc

SEQ ID NO: 3011885 - RNA, 19 nt, Artificial Sequence
  Description of Artificial Sequence: Synthetic oligonucleotide
guuuagacuguuugacaaa

SEQ ID NO: 3011886 - RNA, 19 nt, Artificial Sequence
  Description of Artificial Sequence: Synthetic oligonucleotide
accuggcaagauuuugugu

SEQ ID NO: 3011887 - RNA, 19 nt, Artificial Sequence
  Description of Artificial Sequence: Synthetic oligonucleotide
auaaaaccuuucccacagu

SEQ ID NO: 3011888 - RNA, 19 nt, Artificial Sequence
  Description of Artificial Sequence: Synthetic oligonucleotide
cacuugggacacugaaaag

SEQ ID NO: 3011889 - RNA, 19 nt, Artificial Sequence
  Description of Artificial Sequence: Synthetic oligonucleotide
gcaguggaaaggucucucg

SEQ ID NO: 3011890 - RNA, 19 nt, Artificial Sequence
  Description of Artificial Sequence: Synthetic oligonucleotide
ucagcuaguuuggacuuau

SEQ ID NO: 3011891 - RNA, 19 nt, Artificial Sequence
  Description of Artificial Sequence: Synthetic oligonucleotide
ucucggggccuguggaugc

SEQ ID NO: 3011892 - RNA, 19 nt, Artificial Sequence
  Description of Artificial Sequence: Synthetic oligonucleotide
augugcucagcuaguuugg

SEQ ID NO: 3011893 - RNA, 19 nt, Artificial Sequence
  Description of Artificial Sequence: Synthetic oligonucleotide
uguccucauguguuccaga

SEQ ID NO: 3011894 - RNA, 19 nt, Artificial Sequence
  Description of Artificial Sequence: Synthetic oligonucleotide
guaugcaggcccugauggc

SEQ ID NO: 3011895 - RNA, 19 nt, Artificial Sequence
  Description of Artificial Sequence: Synthetic oligonucleotide
gccucuaucauugcaaaca

SEQ ID NO: 3011896 - RNA, 19 nt, Artificial Sequence
  Description of Artificial Sequence: Synthetic oligonucleotide
ugccucagcaugugacccc

SEQ ID NO: 3011897 - RNA, 19 nt, Artificial Sequence
  Description of Artificial Sequence: Synthetic oligonucleotide
ugaccccuuucccggaagu

SEQ ID NO: 3011898 - RNA, 19 nt, Artificial Sequence
  Description of Artificial Sequence: Synthetic oligonucleotide
ucauugcaaacagcuggac

SEQ ID NO: 3011899 - RNA, 19 nt, Artificial Sequence
  Description of Artificial Sequence: Synthetic oligonucleotide
ggugccucagcaugugacc

SEQ ID NO: 3011900 - RNA, 19 nt, Artificial Sequence
  Description of Artificial Sequence: Synthetic oligonucleotide
uccagucagccucuaucau

SEQ ID NO: 3011901 - RNA, 19 nt, Artificial Sequence
  Description of Artificial Sequence: Synthetic oligonucleotide
gucucucgccuguaugcag

SEQ ID NO: 3011902 - RNA, 19 nt, Artificial Sequence
  Description of Artificial Sequence: Synthetic oligonucleotide
agccuucaaucggaaacuc

SEQ ID NO: 3011903 - RNA, 19 nt, Artificial Sequence
  Description of Artificial Sequence: Synthetic oligonucleotide
cacccucaacuccagucag

SEQ ID NO: 3011904 - RNA, 19 nt, Artificial Sequence
  Description of Artificial Sequence: Synthetic oligonucleotide
ugugcucagcuaguuugga

SEQ ID NO: 3011905 - RNA, 19 nt, Artificial Sequence
  Description of Artificial Sequence: Synthetic oligonucleotide
cuggacaagccuuuucuua

SEQ ID NO: 3011906 - RNA, 19 nt, Artificial Sequence
  Description of Artificial Sequence: Synthetic oligonucleotide
cuuuucuuaaugccaggcu

SEQ ID NO: 3011907 - RNA, 19 nt, Artificial Sequence
  Description of Artificial Sequence: Synthetic oligonucleotide
gucagccucuaucauugca

SEQ ID NO: 3011908 - RNA, 19 nt, Artificial Sequence
  Description of Artificial Sequence: Synthetic oligonucleotide
guccucauguguuccagaa

SEQ ID NO: 3011909 - RNA, 19 nt, Artificial Sequence
  Description of Artificial Sequence: Synthetic oligonucleotide
ucgccuguaugcaggcccu

SEQ ID NO: 3011910 - RNA, 19 nt, Artificial Sequence
  Description of Artificial Sequence: Synthetic oligonucleotide
ucuuaaugccaggcucaug

SEQ ID NO: 3011911 - RNA, 19 nt, Artificial Sequence
  Description of Artificial Sequence: Synthetic oligonucleotide
cugauggcugagcagcuga

SEQ ID NO: 3011912 - RNA, 19 nt, Artificial Sequence
  Description of Artificial Sequence: Synthetic oligonucleotide
ccuuuucuuaaugccaggc

SEQ ID NO: 3011913 - RNA, 19 nt, Artificial Sequence
  Description of Artificial Sequence: Synthetic oligonucleotide
aggcccugauggcugagca

SEQ ID NO: 3011914 - RNA, 19 nt, Artificial Sequence
  Description of Artificial Sequence: Synthetic oligonucleotide
uccccuguguguguccuca

SEQ ID NO: 3011915 - RNA, 19 nt, Artificial Sequence
  Description of Artificial Sequence: Synthetic oligonucleotide
ugagcagcugagccuucaa

SEQ ID NO: 3011916 - RNA, 19 nt, Artificial Sequence
  Description of Artificial Sequence: Synthetic oligonucleotide
cucucgccuguaugcaggc

SEQ ID NO: 3011917 - RNA, 19 nt, Artificial Sequence
  Description of Artificial Sequence: Synthetic oligonucleotide
caaacagcuggacaagccu

SEQ ID NO: 3011918 - RNA, 19 nt, Artificial Sequence
  Description of Artificial Sequence: Synthetic oligonucleotide
aacagcuggacaagccuuu

SEQ ID NO: 3011919 - RNA, 19 nt, Artificial Sequence
  Description of Artificial Sequence: Synthetic oligonucleotide
aacuccagucagccucuau

SEQ ID NO: 3011920 - RNA, 19 nt, Artificial Sequence
  Description of Artificial Sequence: Synthetic oligonucleotide
ggcaagauuuuguguguac

SEQ ID NO: 3011921 - RNA, 19 nt, Artificial Sequence
  Description of Artificial Sequence: Synthetic oligonucleotide
uucuuaaugccaggcucau

SEQ ID NO: 3011922 - RNA, 19 nt, Artificial Sequence
  Description of Artificial Sequence: Synthetic oligonucleotide
gugccucagcaugugaccc

SEQ ID NO: 3011923 - RNA, 19 nt, Artificial Sequence
  Description of Artificial Sequence: Synthetic oligonucleotide
gaaccuggcaagauuuugu

SEQ ID NO: 3011924 - RNA, 19 nt, Artificial Sequence
  Description of Artificial Sequence: Synthetic oligonucleotide
gcuaguuuggacuuauaau

SEQ ID NO: 3011925 - RNA, 19 nt, Artificial Sequence
  Description of Artificial Sequence: Synthetic oligonucleotide
ugugaccccuuucccggaa

SEQ ID NO: 3011926 - RNA, 19 nt, Artificial Sequence
  Description of Artificial Sequence: Synthetic oligonucleotide
gugcucagcuaguuuggac

SEQ ID NO: 3011927 - RNA, 19 nt, Artificial Sequence
  Description of Artificial Sequence: Synthetic oligonucleotide
gccaggcucauguggaacc

SEQ ID NO: 3011928 - RNA, 19 nt, Artificial Sequence
  Description of Artificial Sequence: Synthetic oligonucleotide
cacacuugggacacugaaa

SEQ ID NO: 3011929 - RNA, 19 nt, Artificial Sequence
  Description of Artificial Sequence: Synthetic oligonucleotide
uccagaaguuuagacuguu

SEQ ID NO: 3011930 - RNA, 19 nt, Artificial Sequence
  Description of Artificial Sequence: Synthetic oligonucleotide
uggaaccuggcaagauuuu

SEQ ID NO: 3011931 - RNA, 19 nt, Artificial Sequence
  Description of Artificial Sequence: Synthetic oligonucleotide
ggaaccuggcaagauuuug

SEQ ID NO: 3011932 - RNA, 19 nt, Artificial Sequence
  Description of Artificial Sequence: Synthetic oligonucleotide
uccacaggcaaagggccuc

SEQ ID NO: 3011933 - RNA, 19 nt, Artificial Sequence
  Description of Artificial Sequence: Synthetic oligonucleotide
accuuucccacagucucca

SEQ ID NO: 3011934 - RNA, 19 nt, Artificial Sequence
  Description of Artificial Sequence: Synthetic oligonucleotide
gcaaagggccucucggggc

SEQ ID NO: 3011935 - RNA, 19 nt, Artificial Sequence
  Description of Artificial Sequence: Synthetic oligonucleotide
gcaaacagcuggacaagcc

SEQ ID NO: 3011936 - RNA, 19 nt, Artificial Sequence
  Description of Artificial Sequence: Synthetic oligonucleotide
guguccucauguguuccag

SEQ ID NO: 3011937 - RNA, 19 nt, Artificial Sequence
  Description of Artificial Sequence: Synthetic oligonucleotide
agcugagccuucaaucgga

SEQ ID NO: 3011938 - RNA, 19 nt, Artificial Sequence
  Description of Artificial Sequence: Synthetic oligonucleotide
ugcgcuggugccucagcau

SEQ ID NO: 3011939 - RNA, 19 nt, Artificial Sequence
  Description of Artificial Sequence: Synthetic oligonucleotide
ggacuuauaauaaaaccuu

SEQ ID NO: 3011940 - RNA, 19 nt, Artificial Sequence
  Description of Artificial Sequence: Synthetic oligonucleotide
gccuuuucuuaaugccagg

SEQ ID NO: 3011941 - RNA, 19 nt, Artificial Sequence
  Description of Artificial Sequence: Synthetic oligonucleotide
guguguccucauguguucc

SEQ ID NO: 3011942 - RNA, 19 nt, Artificial Sequence
  Description of Artificial Sequence: Synthetic oligonucleotide
uuaucacauucagggcagu

SEQ ID NO: 3011943 - RNA, 19 nt, Artificial Sequence
  Description of Artificial Sequence: Synthetic oligonucleotide
gcccugauggcugagcagc

SEQ ID NO: 3011944 - RNA, 19 nt, Artificial Sequence
  Description of Artificial Sequence: Synthetic oligonucleotide
ucuccccuguguguguccu

SEQ ID NO: 3011945 - RNA, 19 nt, Artificial Sequence
  Description of Artificial Sequence: Synthetic oligonucleotide
gugaccccuuucccggaag

SEQ ID NO: 3011946 - RNA, 19 nt, Artificial Sequence
  Description of Artificial Sequence: Synthetic oligonucleotide
ugccaggcucauguggaac

SEQ ID NO: 3011947 - RNA, 19 nt, Artificial Sequence
  Description of Artificial Sequence: Synthetic oligonucleotide
uggcaagauuuugugugua

SEQ ID NO: 3011948 - RNA, 19 nt, Artificial Sequence
  Description of Artificial Sequence: Synthetic oligonucleotide
guacucuaaugugcucagc

SEQ ID NO: 3011949 - RNA, 19 nt, Artificial Sequence
  Description of Artificial Sequence: Synthetic oligonucleotide
ugcaggcccugauggcuga

SEQ ID NO: 3011950 - RNA, 19 nt, Artificial Sequence
  Description of Artificial Sequence: Synthetic oligonucleotide
cccucaacuccagucagcc

SEQ ID NO: 3011951 - RNA, 19 nt, Artificial Sequence
  Description of Artificial Sequence: Synthetic oligonucleotide
guguguacucuaaugugcu

SEQ ID NO: 3011952 - RNA, 19 nt, Artificial Sequence
  Description of Artificial Sequence: Synthetic oligonucleotide
gggccuguggaugcgcugg

SEQ ID NO: 3011953 - RNA, 19 nt, Artificial Sequence
  Description of Artificial Sequence: Synthetic oligonucleotide
cagccucuaucauugcaaa

SEQ ID NO: 3011954 - RNA, 19 nt, Artificial Sequence
  Description of Artificial Sequence: Synthetic oligonucleotide
cccacccucaacuccaguc

SEQ ID NO: 3011955 - RNA, 19 nt, Artificial Sequence
  Description of Artificial Sequence: Synthetic oligonucleotide
cauguggaaccuggcaaga

SEQ ID NO: 3011956 - RNA, 19 nt, Artificial Sequence
  Description of Artificial Sequence: Synthetic oligonucleotide
ucucgccuguaugcaggcc

SEQ ID NO: 3011957 - RNA, 19 nt, Artificial Sequence
  Description of Artificial Sequence: Synthetic oligonucleotide
cuggcaagauuuugugugu

SEQ ID NO: 3011958 - RNA, 19 nt, Artificial Sequence
  Description of Artificial Sequence: Synthetic oligonucleotide
cagcuggacaagccuuuuc

SEQ ID NO: 3011959 - RNA, 19 nt, Artificial Sequence
  Description of Artificial Sequence: Synthetic oligonucleotide
accccuuucccggaaguuu

SEQ ID NO: 3011960 - RNA, 19 nt, Artificial Sequence
  Description of Artificial Sequence: Synthetic oligonucleotide
gcgcuggugccucagcaug

SEQ ID NO: 3011961 - RNA, 19 nt, Artificial Sequence
  Description of Artificial Sequence: Synthetic oligonucleotide
auguggaaccuggcaagau

SEQ ID NO: 3011962 - RNA, 19 nt, Artificial Sequence
  Description of Artificial Sequence: Synthetic oligonucleotide
aaagggccucucggggccu

SEQ ID NO: 3011963 - RNA, 19 nt, Artificial Sequence
  Description of Artificial Sequence: Synthetic oligonucleotide
augccaggcucauguggaa

SEQ ID NO: 3011964 - RNA, 19 nt, Artificial Sequence
  Description of Artificial Sequence: Synthetic oligonucleotide
cacauucagggcaguggaa

SEQ ID NO: 3011965 - RNA, 19 nt, Artificial Sequence
  Description of Artificial Sequence: Synthetic oligonucleotide
guggaaccuggcaagauuu

SEQ ID NO: 3011966 - RNA, 19 nt, Artificial Sequence
  Description of Artificial Sequence: Synthetic oligonucleotide
cacagucuccacaggcaaa

SEQ ID NO: 3011967 - RNA, 19 nt, Artificial Sequence
  Description of Artificial Sequence: Synthetic oligonucleotide
ggcccugauggcugagcag

SEQ ID NO: 3011968 - RNA, 19 nt, Artificial Sequence
  Description of Artificial Sequence: Synthetic oligonucleotide
gcaagauuuuguguguacu

SEQ ID NO: 3011969 - RNA, 19 nt, Artificial Sequence
  Description of Artificial Sequence: Synthetic oligonucleotide
ggaaaggucucucgccugu

SEQ ID NO: 3011970 - RNA, 19 nt, Artificial Sequence
  Description of Artificial Sequence: Synthetic oligonucleotide
gagcagcugagccuucaau

SEQ ID NO: 3011971 - RNA, 19 nt, Artificial Sequence
  Description of Artificial Sequence: Synthetic oligonucleotide
cugagccuucaaucggaaa

SEQ ID NO: 3011972 - RNA, 19 nt, Artificial Sequence
  Description of Artificial Sequence: Synthetic oligonucleotide
caggcccugauggcugagc

SEQ ID NO: 3011973 - RNA, 19 nt, Artificial Sequence
  Description of Artificial Sequence: Synthetic oligonucleotide
ggccucucggggccugugg

SEQ ID NO: 3011974 - RNA, 19 nt, Artificial Sequence
  Description of Artificial Sequence: Synthetic oligonucleotide
ccacccucaacuccaguca

SEQ ID NO: 3011975 - RNA, 19 nt, Artificial Sequence
  Description of Artificial Sequence: Synthetic oligonucleotide
gaaaggucucucgccugua

SEQ ID NO: 3011976 - RNA, 19 nt, Artificial Sequence
  Description of Artificial Sequence: Synthetic oligonucleotide
cucggggccuguggaugcg

SEQ ID NO: 3011977 - RNA, 19 nt, Artificial Sequence
  Description of Artificial Sequence: Synthetic oligonucleotide
ucggggccuguggaugcgc

SEQ ID NO: 3011978 - RNA, 19 nt, Artificial Sequence
  Description of Artificial Sequence: Synthetic oligonucleotide
acagcuggacaagccuuuu

SEQ ID NO: 3011979 - RNA, 19 nt, Artificial Sequence
  Description of Artificial Sequence: Synthetic oligonucleotide
ggucucucgccuguaugca

SEQ ID NO: 3011980 - RNA, 19 nt, Artificial Sequence
  Description of Artificial Sequence: Synthetic oligonucleotide
ggcucauguggaaccuggc

SEQ ID NO: 3011981 - RNA, 19 nt, Artificial Sequence
  Description of Artificial Sequence: Synthetic oligonucleotide
cuggugccucagcauguga

SEQ ID NO: 3011982 - RNA, 19 nt, Artificial Sequence
  Description of Artificial Sequence: Synthetic oligonucleotide
cugagcagcugagccuuca

SEQ ID NO: 3011983 - RNA, 19 nt, Artificial Sequence
  Description of Artificial Sequence: Synthetic oligonucleotide
cuaaugugcucagcuaguu

SEQ ID NO: 3011984 - RNA, 19 nt, Artificial Sequence
  Description of Artificial Sequence: Synthetic oligonucleotide
cuccacaggcaaagggccu

SEQ ID NO: 3011985 - RNA, 19 nt, Artificial Sequence
  Description of Artificial Sequence: Synthetic oligonucleotide
ggggccuguggaugcgcug

SEQ ID NO: 3011986 - RNA, 19 nt, Artificial Sequence
  Description of Artificial Sequence: Synthetic oligonucleotide
cucagcaugugaccccuuu

SEQ ID NO: 3011987 - RNA, 19 nt, Artificial Sequence
  Description of Artificial Sequence: Synthetic oligonucleotide
gccucucggggccugugga

SEQ ID NO: 3011988 - RNA, 19 nt, Artificial Sequence
  Description of Artificial Sequence: Synthetic oligonucleotide
ggacaagccuuuucuuaau

SEQ ID NO: 3011989 - RNA, 19 nt, Artificial Sequence
  Description of Artificial Sequence: Synthetic oligonucleotide
cucagcuaguuuggacuua

SEQ ID NO: 3011990 - RNA, 19 nt, Artificial Sequence
  Description of Artificial Sequence: Synthetic oligonucleotide
gcucagcuaguuuggacuu

SEQ ID NO: 3011991 - RNA, 19 nt, Artificial Sequence
  Description of Artificial Sequence: Synthetic oligonucleotide
gcuggacaagccuuuucuu

SEQ ID NO: 3011992 - RNA, 19 nt, Artificial Sequence
  Description of Artificial Sequence: Synthetic oligonucleotide
cagcuaguuuggacuuaua

SEQ ID NO: 3011993 - RNA, 19 nt, Artificial Sequence
  Description of Artificial Sequence: Synthetic oligonucleotide
gcugagccuucaaucggaa

SEQ ID NO: 3011994 - RNA, 19 nt, Artificial Sequence
  Description of Artificial Sequence: Synthetic oligonucleotide
ccagucagccucuaucauu

SEQ ID NO: 3011995 - RNA, 19 nt, Artificial Sequence
  Description of Artificial Sequence: Synthetic oligonucleotide
gaccccuuucccggaaguu

SEQ ID NO: 3011996 - RNA, 19 nt, Artificial Sequence
  Description of Artificial Sequence: Synthetic oligonucleotide
agggccucucggggccugu

SEQ ID NO: 3011997 - RNA, 19 nt, Artificial Sequence
  Description of Artificial Sequence: Synthetic oligonucleotide
gcaggcccugauggcugag

SEQ ID NO: 3011998 - RNA, 19 nt, Artificial Sequence
  Description of Artificial Sequence: Synthetic oligonucleotide
gccucagcaugugaccccu

SEQ ID NO: 3011999 - RNA, 19 nt, Artificial Sequence
  Description of Artificial Sequence: Synthetic oligonucleotide
ccagaaguuuagacuguuu

SEQ ID NO: 3012000 - RNA, 19 nt, Artificial Sequence
  Description of Artificial Sequence: Synthetic oligonucleotide
ccccuuucccggaaguuuu

SEQ ID NO: 3012001 - RNA, 19 nt, Artificial Sequence
  Description of Artificial Sequence: Synthetic oligonucleotide
gggccucucggggccugug

SEQ ID NO: 3012002 - RNA, 19 nt, Artificial Sequence
  Description of Artificial Sequence: Synthetic oligonucleotide
ggccuguggaugcgcuggu

SEQ ID NO: 3012003 - RNA, 19 nt, Artificial Sequence
  Description of Artificial Sequence: Synthetic oligonucleotide
ccucaacuccagucagccu

SEQ ID NO: 3012004 - RNA, 19 nt, Artificial Sequence
  Description of Artificial Sequence: Synthetic oligonucleotide
caacuccagucagccucua

SEQ ID NO: 3012005 - RNA, 19 nt, Artificial Sequence
  Description of Artificial Sequence: Synthetic oligonucleotide
cccugauggcugagcagcu

SEQ ID NO: 3012006 - RNA, 19 nt, Artificial Sequence
  Description of Artificial Sequence: Synthetic oligonucleotide
cggaaacucuugucacacu

SEQ ID NO: 3012007 - RNA, 19 nt, Artificial Sequence
  Description of Artificial Sequence: Synthetic oligonucleotide
cgcuggugccucagcaugu

SEQ ID NO: 3012008 - RNA, 19 nt, Artificial Sequence
  Description of Artificial Sequence: Synthetic oligonucleotide
ccucucggggccuguggau

SEQ ID NO: 3012009 - RNA, 19 nt, Artificial Sequence
  Description of Artificial Sequence: Synthetic oligonucleotide
cgccuguaugcaggcccug

SEQ ID NO: 3012010 - RNA, 19 nt, Artificial Sequence
  Description of Artificial Sequence: Synthetic oligonucleotide
cggggccuguggaugcgcu

SEQ ID NO: 3012011 - RNA, 19 nt, Artificial Sequence
  Description of Artificial Sequence: Synthetic oligonucleotide
ccccacccucaacuccagu

SEQ ID NO: 3012012 - RNA, 19 nt, Artificial Sequence
  Description of Artificial Sequence: Synthetic oligonucleotide
ccccuguguguguccucau

SEQ ID NO: 3012013 - RNA, 19 nt, Artificial Sequence
  Description of Artificial Sequence: Synthetic oligonucleotide
aaguaaagcaggcauagac

SEQ ID NO: 3012014 - RNA, 19 nt, Artificial Sequence
  Description of Artificial Sequence: Synthetic oligonucleotide
aaagacacggacuuguguc

SEQ ID NO: 3012015 - RNA, 19 nt, Artificial Sequence
  Description of Artificial Sequence: Synthetic oligonucleotide
guaaagcaggcauagacgg

SEQ ID NO: 3012016 - RNA, 19 nt, Artificial Sequence
  Description of Artificial Sequence: Synthetic oligonucleotide
acuguuggcauacacuagc

SEQ ID NO: 3012017 - RNA, 19 nt, Artificial Sequence
  Description of Artificial Sequence: Synthetic oligonucleotide
ugggagaaaguaaagcagg

SEQ ID NO: 3012018 - RNA, 19 nt, Artificial Sequence
  Description of Artificial Sequence: Synthetic oligonucleotide
gaaguuguagaugaugggg

SEQ ID NO: 3012019 - RNA, 19 nt, Artificial Sequence
  Description of Artificial Sequence: Synthetic oligonucleotide
uagaugaugggguuggcgg

SEQ ID NO: 3012020 - RNA, 19 nt, Artificial Sequence
  Description of Artificial Sequence: Synthetic oligonucleotide
aaaccaggcaagcagcaag

SEQ ID NO: 3012021 - RNA, 19 nt, Artificial Sequence
  Description of Artificial Sequence: Synthetic oligonucleotide
agagaaggcggccuuaaac

SEQ ID NO: 3012022 - RNA, 19 nt, Artificial Sequence
  Description of Artificial Sequence: Synthetic oligonucleotide
gaaaguaaagcaggcauag

SEQ ID NO: 3012023 - RNA, 19 nt, Artificial Sequence
  Description of Artificial Sequence: Synthetic oligonucleotide
agugggagaaaguaaagca

SEQ ID NO: 3012024 - RNA, 19 nt, Artificial Sequence
  Description of Artificial Sequence: Synthetic oligonucleotide
uuuggagacagaacaccgg

SEQ ID NO: 3012025 - RNA, 19 nt, Artificial Sequence
  Description of Artificial Sequence: Synthetic oligonucleotide
guuggcauacacuagccag

SEQ ID NO: 3012026 - RNA, 19 nt, Artificial Sequence
  Description of Artificial Sequence: Synthetic oligonucleotide
cuuuggagacagaacaccg

SEQ ID NO: 3012027 - RNA, 19 nt, Artificial Sequence
  Description of Artificial Sequence: Synthetic oligonucleotide
ucugcaaagacacggacuu

SEQ ID NO: 3012028 - RNA, 19 nt, Artificial Sequence
  Description of Artificial Sequence: Synthetic oligonucleotide
aguaaagcaggcauagacg

SEQ ID NO: 3012029 - RNA, 19 nt, Artificial Sequence
  Description of Artificial Sequence: Synthetic oligonucleotide
aggaaguuguagaugaugg

SEQ ID NO: 3012030 - RNA, 19 nt, Artificial Sequence
  Description of Artificial Sequence: Synthetic oligonucleotide
ucagagacuuuggagacag

SEQ ID NO: 3012031 - RNA, 19 nt, Artificial Sequence
  Description of Artificial Sequence: Synthetic oligonucleotide
aaagcaggcauagacggcu

SEQ ID NO: 3012032 - RNA, 19 nt, Artificial Sequence
  Description of Artificial Sequence: Synthetic oligonucleotide
acuguggugacgcugguca

SEQ ID NO: 3012033 - RNA, 19 nt, Artificial Sequence
  Description of Artificial Sequence: Synthetic oligonucleotide
cuuuucaugagugcugggg

SEQ ID NO: 3012034 - RNA, 19 nt, Artificial Sequence
  Description of Artificial Sequence: Synthetic oligonucleotide
aacugcucccgaaauuugc

SEQ ID NO: 3012035 - RNA, 19 nt, Artificial Sequence
  Description of Artificial Sequence: Synthetic oligonucleotide
uuguagaugaugggguugg

SEQ ID NO: 3012036 - RNA, 19 nt, Artificial Sequence
  Description of Artificial Sequence: Synthetic oligonucleotide
gcauacacuagccaguggg

SEQ ID NO: 3012037 - RNA, 19 nt, Artificial Sequence
  Description of Artificial Sequence: Synthetic oligonucleotide
ugugucuggcagaggagcg

SEQ ID NO: 3012038 - RNA, 19 nt, Artificial Sequence
  Description of Artificial Sequence: Synthetic oligonucleotide
uaggacagcacugugguga

SEQ ID NO: 3012039 - RNA, 19 nt, Artificial Sequence
  Description of Artificial Sequence: Synthetic oligonucleotide
caagcagcaagagaaggcg

SEQ ID NO: 3012040 - RNA, 19 nt, Artificial Sequence
  Description of Artificial Sequence: Synthetic oligonucleotide
aagacacggacuugugucu

SEQ ID NO: 3012041 - RNA, 19 nt, Artificial Sequence
  Description of Artificial Sequence: Synthetic oligonucleotide
acccaaaccaggcaagcag

SEQ ID NO: 3012042 - RNA, 19 nt, Artificial Sequence
  Description of Artificial Sequence: Synthetic oligonucleotide
aaguuguagaugauggggu

SEQ ID NO: 3012043 - RNA, 19 nt, Artificial Sequence
  Description of Artificial Sequence: Synthetic oligonucleotide
uggagucacaaccucucgc

SEQ ID NO: 3012044 - RNA, 19 nt, Artificial Sequence
  Description of Artificial Sequence: Synthetic oligonucleotide
uuugccacugaggaaguug

SEQ ID NO: 3012045 - RNA, 19 nt, Artificial Sequence
  Description of Artificial Sequence: Synthetic oligonucleotide
agcagcagucuuuucauga

SEQ ID NO: 3012046 - RNA, 19 nt, Artificial Sequence
  Description of Artificial Sequence: Synthetic oligonucleotide
ugggcugugccucccagag

SEQ ID NO: 3012047 - RNA, 19 nt, Artificial Sequence
  Description of Artificial Sequence: Synthetic oligonucleotide
aaagccaggacuggaguca

SEQ ID NO: 3012048 - RNA, 19 nt, Artificial Sequence
  Description of Artificial Sequence: Synthetic oligonucleotide
augcucagagacuuuggag

SEQ ID NO: 3012049 - RNA, 19 nt, Artificial Sequence
  Description of Artificial Sequence: Synthetic oligonucleotide
aaggacugggcugugccuc

SEQ ID NO: 3012050 - RNA, 19 nt, Artificial Sequence
  Description of Artificial Sequence: Synthetic oligonucleotide
gagaaaguaaagcaggcau

SEQ ID NO: 3012051 - RNA, 19 nt, Artificial Sequence
  Description of Artificial Sequence: Synthetic oligonucleotide
acggacuugugucuggcag

SEQ ID NO: 3012052 - RNA, 19 nt, Artificial Sequence
  Description of Artificial Sequence: Synthetic oligonucleotide
ugcaaagacacggacuugu

SEQ ID NO: 3012053 - RNA, 19 nt, Artificial Sequence
  Description of Artificial Sequence: Synthetic oligonucleotide
aggagcggggacccaaacc

SEQ ID NO: 3012054 - RNA, 19 nt, Artificial Sequence
  Description of Artificial Sequence: Synthetic oligonucleotide
uuggcauacacuagccagu

SEQ ID NO: 3012055 - RNA, 19 nt, Artificial Sequence
  Description of Artificial Sequence: Synthetic oligonucleotide
caaaggacugggcugugcc

SEQ ID NO: 3012056 - RNA, 19 nt, Artificial Sequence
  Description of Artificial Sequence: Synthetic oligonucleotide
uaaagcaggcauagacggc

SEQ ID NO: 3012057 - RNA, 19 nt, Artificial Sequence
  Description of Artificial Sequence: Synthetic oligonucleotide
accggcucugcaaagacac

SEQ ID NO: 3012058 - RNA, 19 nt, Artificial Sequence
  Description of Artificial Sequence: Synthetic oligonucleotide
agaaggcggccuuaaacug

SEQ ID NO: 3012059 - RNA, 19 nt, Artificial Sequence
  Description of Artificial Sequence: Synthetic oligonucleotide
uguuggcauacacuagcca

SEQ ID NO: 3012060 - RNA, 19 nt, Artificial Sequence
  Description of Artificial Sequence: Synthetic oligonucleotide
gugggagaaaguaaagcag

SEQ ID NO: 3012061 - RNA, 19 nt, Artificial Sequence
  Description of Artificial Sequence: Synthetic oligonucleotide
uugccacugaggaaguugu

SEQ ID NO: 3012062 - RNA, 19 nt, Artificial Sequence
  Description of Artificial Sequence: Synthetic oligonucleotide
gacagcacuguggugacgc

SEQ ID NO: 3012063 - RNA, 19 nt, Artificial Sequence
  Description of Artificial Sequence: Synthetic oligonucleotide
uuaaacugcucccgaaauu

SEQ ID NO: 3012064 - RNA, 19 nt, Artificial Sequence
  Description of Artificial Sequence: Synthetic oligonucleotide
uugugucuggcagaggagc

SEQ ID NO: 3012065 - RNA, 19 nt, Artificial Sequence
  Description of Artificial Sequence: Synthetic oligonucleotide
aaaggacugggcugugccu

SEQ ID NO: 3012066 - RNA, 19 nt, Artificial Sequence
  Description of Artificial Sequence: Synthetic oligonucleotide
uacacuagccagugggaga

SEQ ID NO: 3012067 - RNA, 19 nt, Artificial Sequence
  Description of Artificial Sequence: Synthetic oligonucleotide
agaaagccaggacuggagu

SEQ ID NO: 3012068 - RNA, 19 nt, Artificial Sequence
  Description of Artificial Sequence: Synthetic oligonucleotide
ggaaguuguagaugauggg

SEQ ID NO: 3012069 - RNA, 19 nt, Artificial Sequence
  Description of Artificial Sequence: Synthetic oligonucleotide
ugagugcuggggcggaucc

SEQ ID NO: 3012070 - RNA, 19 nt, Artificial Sequence
  Description of Artificial Sequence: Synthetic oligonucleotide
gaaagccaggacuggaguc

SEQ ID NO: 3012071 - RNA, 19 nt, Artificial Sequence
  Description of Artificial Sequence: Synthetic oligonucleotide
gagaaggcggccuuaaacu

SEQ ID NO: 3012072 - RNA, 19 nt, Artificial Sequence
  Description of Artificial Sequence: Synthetic oligonucleotide
agucacaaccucucgcuga

SEQ ID NO: 3012073 - RNA, 19 nt, Artificial Sequence
  Description of Artificial Sequence: Synthetic oligonucleotide
acaccggcucugcaaagac

SEQ ID NO: 3012074 - RNA, 19 nt, Artificial Sequence
  Description of Artificial Sequence: Synthetic oligonucleotide
guagaugaugggguuggcg

SEQ ID NO: 3012075 - RNA, 19 nt, Artificial Sequence
  Description of Artificial Sequence: Synthetic oligonucleotide
cagaaagccaggacuggag

SEQ ID NO: 3012076 - RNA, 19 nt, Artificial Sequence
  Description of Artificial Sequence: Synthetic oligonucleotide
agagacuuuggagacagaa

SEQ ID NO: 3012077 - RNA, 19 nt, Artificial Sequence
  Description of Artificial Sequence: Synthetic oligonucleotide
cuguuggcauacacuagcc

SEQ ID NO: 3012078 - RNA, 19 nt, Artificial Sequence
  Description of Artificial Sequence: Synthetic oligonucleotide
acuggagucacaaccucuc

SEQ ID NO: 3012079 - RNA, 19 nt, Artificial Sequence
  Description of Artificial Sequence: Synthetic oligonucleotide
auacacuagccagugggag

SEQ ID NO: 3012080 - RNA, 19 nt, Artificial Sequence
  Description of Artificial Sequence: Synthetic oligonucleotide
ugucuggcagaggagcggg

SEQ ID NO: 3012081 - RNA, 19 nt, Artificial Sequence
  Description of Artificial Sequence: Synthetic oligonucleotide
ggcugugccucccagagcc

SEQ ID NO: 3012082 - RNA, 19 nt, Artificial Sequence
  Description of Artificial Sequence: Synthetic oligonucleotide
aagcagcaagagaaggcgg

SEQ ID NO: 3012083 - RNA, 19 nt, Artificial Sequence
  Description of Artificial Sequence: Synthetic oligonucleotide
cagugggagaaaguaaagc

SEQ ID NO: 3012084 - RNA, 19 nt, Artificial Sequence
  Description of Artificial Sequence: Synthetic oligonucleotide
agaacaccggcucugcaaa

SEQ ID NO: 3012085 - RNA, 19 nt, Artificial Sequence
  Description of Artificial Sequence: Synthetic oligonucleotide
gucagcaggacaugcucag

SEQ ID NO: 3012086 - RNA, 19 nt, Artificial Sequence
  Description of Artificial Sequence: Synthetic oligonucleotide
caggcaaaggacugggcug

SEQ ID NO: 3012087 - RNA, 19 nt, Artificial Sequence
  Description of Artificial Sequence: Synthetic oligonucleotide
agcagucuuuucaugagug

SEQ ID NO: 3012088 - RNA, 19 nt, Artificial Sequence
  Description of Artificial Sequence: Synthetic oligonucleotide
ggcauagacggcuucccgg

SEQ ID NO: 3012089 - RNA, 19 nt, Artificial Sequence
  Description of Artificial Sequence: Synthetic oligonucleotide
cagcaggacaugcucagag

SEQ ID NO: 3012090 - RNA, 19 nt, Artificial Sequence
  Description of Artificial Sequence: Synthetic oligonucleotide
gucacaaccucucgcugag

SEQ ID NO: 3012091 - RNA, 19 nt, Artificial Sequence
  Description of Artificial Sequence: Synthetic oligonucleotide
uggucagcaggacaugcuc

SEQ ID NO: 3012092 - RNA, 19 nt, Artificial Sequence
  Description of Artificial Sequence: Synthetic oligonucleotide
ugugccucccagagccugg

SEQ ID NO: 3012093 - RNA, 19 nt, Artificial Sequence
  Description of Artificial Sequence: Synthetic oligonucleotide
gacacggacuugugucugg

SEQ ID NO: 3012094 - RNA, 19 nt, Artificial Sequence
  Description of Artificial Sequence: Synthetic oligonucleotide
auagacggcuucccgguca

SEQ ID NO: 3012095 - RNA, 19 nt, Artificial Sequence
  Description of Artificial Sequence: Synthetic oligonucleotide
gagacuuuggagacagaac

SEQ ID NO: 3012096 - RNA, 19 nt, Artificial Sequence
  Description of Artificial Sequence: Synthetic oligonucleotide
aaaguaaagcaggcauaga

SEQ ID NO: 3012097 - RNA, 19 nt, Artificial Sequence
  Description of Artificial Sequence: Synthetic oligonucleotide
ugcucccgaaauuugccac

SEQ ID NO: 3012098 - RNA, 19 nt, Artificial Sequence
  Description of Artificial Sequence: Synthetic oligonucleotide
gaaggcggccuuaaacugc

SEQ ID NO: 3012099 - RNA, 19 nt, Artificial Sequence
  Description of Artificial Sequence: Synthetic oligonucleotide
caaccucucgcugagcagc

SEQ ID NO: 3012100 - RNA, 19 nt, Artificial Sequence
  Description of Artificial Sequence: Synthetic oligonucleotide
uggagacagaacaccggcu

SEQ ID NO: 3012101 - RNA, 19 nt, Artificial Sequence
  Description of Artificial Sequence: Synthetic oligonucleotide
aagccaggacuggagucac

SEQ ID NO: 3012102 - RNA, 19 nt, Artificial Sequence
  Description of Artificial Sequence: Synthetic oligonucleotide
aggcauagacggcuucccg

SEQ ID NO: 3012103 - RNA, 19 nt, Artificial Sequence
  Description of Artificial Sequence: Synthetic oligonucleotide
guuguagaugaugggguug

SEQ ID NO: 3012104 - RNA, 19 nt, Artificial Sequence
  Description of Artificial Sequence: Synthetic oligonucleotide
uucccggucacuggcuugg

SEQ ID NO: 3012105 - RNA, 19 nt, Artificial Sequence
  Description of Artificial Sequence: Synthetic oligonucleotide
gacuuuggagacagaacac

SEQ ID NO: 3012106 - RNA, 19 nt, Artificial Sequence
  Description of Artificial Sequence: Synthetic oligonucleotide
ucccaggcaaaggacuggg

SEQ ID NO: 3012107 - RNA, 19 nt, Artificial Sequence
  Description of Artificial Sequence: Synthetic oligonucleotide
acuagccagugggagaaag

SEQ ID NO: 3012108 - RNA, 19 nt, Artificial Sequence
  Description of Artificial Sequence: Synthetic oligonucleotide
acaaccucucgcugagcag

SEQ ID NO: 3012109 - RNA, 19 nt, Artificial Sequence
  Description of Artificial Sequence: Synthetic oligonucleotide
aaacugcucccgaaauuug

SEQ ID NO: 3012110 - RNA, 19 nt, Artificial Sequence
  Description of Artificial Sequence: Synthetic oligonucleotide
ccgaaauuugccacugagg

SEQ ID NO: 3012111 - RNA, 19 nt, Artificial Sequence
  Description of Artificial Sequence: Synthetic oligonucleotide
cuuaggacagcacuguggu

SEQ ID NO: 3012112 - RNA, 19 nt, Artificial Sequence
  Description of Artificial Sequence: Synthetic oligonucleotide
gagucacaaccucucgcug

SEQ ID NO: 3012113 - RNA, 19 nt, Artificial Sequence
  Description of Artificial Sequence: Synthetic oligonucleotide
uggcauacacuagccagug

SEQ ID NO: 3012114 - RNA, 19 nt, Artificial Sequence
  Description of Artificial Sequence: Synthetic oligonucleotide
aacaccggcucugcaaaga

SEQ ID NO: 3012115 - RNA, 19 nt, Artificial Sequence
  Description of Artificial Sequence: Synthetic oligonucleotide
ggagcggggacccaaacca

SEQ ID NO: 3012116 - RNA, 19 nt, Artificial Sequence
  Description of Artificial Sequence: Synthetic oligonucleotide
aaccaggcaagcagcaaga

SEQ ID NO: 3012117 - RNA, 19 nt, Artificial Sequence
  Description of Artificial Sequence: Synthetic oligonucleotide
aggacaugcucagagacuu

SEQ ID NO: 3012118 - RNA, 19 nt, Artificial Sequence
  Description of Artificial Sequence: Synthetic oligonucleotide
ucgcugagcagcagcaguc

SEQ ID NO: 3012119 - RNA, 19 nt, Artificial Sequence
  Description of Artificial Sequence: Synthetic oligonucleotide
ggguuggcggcacuguugg

SEQ ID NO: 3012120 - RNA, 19 nt, Artificial Sequence
  Description of Artificial Sequence: Synthetic oligonucleotide
cuggagucacaaccucucg

SEQ ID NO: 3012121 - RNA, 19 nt, Artificial Sequence
  Description of Artificial Sequence: Synthetic oligonucleotide
cgaaauuugccacugagga

SEQ ID NO: 3012122 - RNA, 19 nt, Artificial Sequence
  Description of Artificial Sequence: Synthetic oligonucleotide
uuaggacagcacuguggug

SEQ ID NO: 3012123 - RNA, 19 nt, Artificial Sequence
  Description of Artificial Sequence: Synthetic oligonucleotide
cacuguuggcauacacuag

SEQ ID NO: 3012124 - RNA, 19 nt, Artificial Sequence
  Description of Artificial Sequence: Synthetic oligonucleotide
acacggacuugugucuggc

SEQ ID NO: 3012125 - RNA, 19 nt, Artificial Sequence
  Description of Artificial Sequence: Synthetic oligonucleotide
gcaggacaugcucagagac

SEQ ID NO: 3012126 - RNA, 19 nt, Artificial Sequence
  Description of Artificial Sequence: Synthetic oligonucleotide
uagccagugggagaaagua

SEQ ID NO: 3012127 - RNA, 19 nt, Artificial Sequence
  Description of Artificial Sequence: Synthetic oligonucleotide
uguggugacgcuggucagc

SEQ ID NO: 3012128 - RNA, 19 nt, Artificial Sequence
  Description of Artificial Sequence: Synthetic oligonucleotide
agcaggacaugcucagaga

SEQ ID NO: 3012129 - RNA, 19 nt, Artificial Sequence
  Description of Artificial Sequence: Synthetic oligonucleotide
ggagacagaacaccggcuc

SEQ ID NO: 3012130 - RNA, 19 nt, Artificial Sequence
  Description of Artificial Sequence: Synthetic oligonucleotide
agaaaguaaagcaggcaua

SEQ ID NO: 3012131 - RNA, 19 nt, Artificial Sequence
  Description of Artificial Sequence: Synthetic oligonucleotide
cauacacuagccaguggga

SEQ ID NO: 3012132 - RNA, 19 nt, Artificial Sequence
  Description of Artificial Sequence: Synthetic oligonucleotide
agcaggcauagacggcuuc

SEQ ID NO: 3012133 - RNA, 19 nt, Artificial Sequence
  Description of Artificial Sequence: Synthetic oligonucleotide
caugcucagagacuuugga

SEQ ID NO: 3012134 - RNA, 19 nt, Artificial Sequence
  Description of Artificial Sequence: Synthetic oligonucleotide
aauuugccacugaggaagu

SEQ ID NO: 3012135 - RNA, 19 nt, Artificial Sequence
  Description of Artificial Sequence: Synthetic oligonucleotide
aaggcggccuuaaacugcu

SEQ ID NO: 3012136 - RNA, 19 nt, Artificial Sequence
  Description of Artificial Sequence: Synthetic oligonucleotide
acggcuucccggucacugg

SEQ ID NO: 3012137 - RNA, 19 nt, Artificial Sequence
  Description of Artificial Sequence: Synthetic oligonucleotide
gacgcuggucagcaggaca

SEQ ID NO: 3012138 - RNA, 19 nt, Artificial Sequence
  Description of Artificial Sequence: Synthetic oligonucleotide
gaacaccggcucugcaaag

SEQ ID NO: 3012139 - RNA, 19 nt, Artificial Sequence
  Description of Artificial Sequence: Synthetic oligonucleotide
ugaggaaguuguagaugau

SEQ ID NO: 3012140 - RNA, 19 nt, Artificial Sequence
  Description of Artificial Sequence: Synthetic oligonucleotide
cacaaccucucgcugagca

SEQ ID NO: 3012141 - RNA, 19 nt, Artificial Sequence
  Description of Artificial Sequence: Synthetic oligonucleotide
acaugcucagagacuuugg

SEQ ID NO: 3012142 - RNA, 19 nt, Artificial Sequence
  Description of Artificial Sequence: Synthetic oligonucleotide
aagagaaggcggccuuaaa

SEQ ID NO: 3012143 - RNA, 19 nt, Artificial Sequence
  Description of Artificial Sequence: Synthetic oligonucleotide
agacagaacaccggcucug

SEQ ID NO: 3012144 - RNA, 19 nt, Artificial Sequence
  Description of Artificial Sequence: Synthetic oligonucleotide
gacggcuucccggucacug

SEQ ID NO: 3012145 - RNA, 19 nt, Artificial Sequence
  Description of Artificial Sequence: Synthetic oligonucleotide
gcagcagucuuuucaugag

SEQ ID NO: 3012146 - RNA, 19 nt, Artificial Sequence
  Description of Artificial Sequence: Synthetic oligonucleotide
acacuagccagugggagaa

SEQ ID NO: 3012147 - RNA, 19 nt, Artificial Sequence
  Description of Artificial Sequence: Synthetic oligonucleotide
gacagaacaccggcucugc

SEQ ID NO: 3012148 - RNA, 19 nt, Artificial Sequence
  Description of Artificial Sequence: Synthetic oligonucleotide
gaugggguuggcggcacug

SEQ ID NO: 3012149 - RNA, 19 nt, Artificial Sequence
  Description of Artificial Sequence: Synthetic oligonucleotide
ucacuggcuuggcggaaca

SEQ ID NO: 3012150 - RNA, 19 nt, Artificial Sequence
  Description of Artificial Sequence: Synthetic oligonucleotide
cccaaaccaggcaagcagc

SEQ ID NO: 3012151 - RNA, 19 nt, Artificial Sequence
  Description of Artificial Sequence: Synthetic oligonucleotide
ugcuggggcggaucccagg

SEQ ID NO: 3012152 - RNA, 19 nt, Artificial Sequence
  Description of Artificial Sequence: Synthetic oligonucleotide
gggagaaaguaaagcaggc

SEQ ID NO: 3012153 - RNA, 19 nt, Artificial Sequence
  Description of Artificial Sequence: Synthetic oligonucleotide
gcaagcagcaagagaaggc

SEQ ID NO: 3012154 - RNA, 19 nt, Artificial Sequence
  Description of Artificial Sequence: Synthetic oligonucleotide
uagacggcuucccggucac

SEQ ID NO: 3012155 - RNA, 19 nt, Artificial Sequence
  Description of Artificial Sequence: Synthetic oligonucleotide
aggcaaaggacugggcugu

SEQ ID NO: 3012156 - RNA, 19 nt, Artificial Sequence
  Description of Artificial Sequence: Synthetic oligonucleotide
acugggcugugccucccag

SEQ ID NO: 3012157 - RNA, 19 nt, Artificial Sequence
  Description of Artificial Sequence: Synthetic oligonucleotide
cccgaaauuugccacugag

SEQ ID NO: 3012158 - RNA, 19 nt, Artificial Sequence
  Description of Artificial Sequence: Synthetic oligonucleotide
gcagucuuuucaugagugc

SEQ ID NO: 3012159 - RNA, 19 nt, Artificial Sequence
  Description of Artificial Sequence: Synthetic oligonucleotide
gcacuguuggcauacacua

SEQ ID NO: 3012160 - RNA, 19 nt, Artificial Sequence
  Description of Artificial Sequence: Synthetic oligonucleotide
gccacugaggaaguuguag

SEQ ID NO: 3012161 - RNA, 19 nt, Artificial Sequence
  Description of Artificial Sequence: Synthetic oligonucleotide
cacuuaggacagcacugug

SEQ ID NO: 3012162 - RNA, 19 nt, Artificial Sequence
  Description of Artificial Sequence: Synthetic oligonucleotide
aucccaggcaaaggacugg

SEQ ID NO: 3012163 - RNA, 19 nt, Artificial Sequence
  Description of Artificial Sequence: Synthetic oligonucleotide
cccacuuaggacagcacug

SEQ ID NO: 3012164 - RNA, 19 nt, Artificial Sequence
  Description of Artificial Sequence: Synthetic oligonucleotide
ggcggccuuaaacugcucc

SEQ ID NO: 3012165 - RNA, 19 nt, Artificial Sequence
  Description of Artificial Sequence: Synthetic oligonucleotide
uguagaugaugggguuggc

SEQ ID NO: 3012166 - RNA, 19 nt, Artificial Sequence
  Description of Artificial Sequence: Synthetic oligonucleotide
agcaagagaaggcggccuu

SEQ ID NO: 3012167 - RNA, 19 nt, Artificial Sequence
  Description of Artificial Sequence: Synthetic oligonucleotide
augagugcuggggcggauc

SEQ ID NO: 3012168 - RNA, 19 nt, Artificial Sequence
  Description of Artificial Sequence: Synthetic oligonucleotide
agugcuggggcggauccca

SEQ ID NO: 3012169 - RNA, 19 nt, Artificial Sequence
  Description of Artificial Sequence: Synthetic oligonucleotide
agcggggacccaaaccagg

SEQ ID NO: 3012170 - RNA, 19 nt, Artificial Sequence
  Description of Artificial Sequence: Synthetic oligonucleotide
cuuaaacugcucccgaaau

SEQ ID NO: 3012171 - RNA, 19 nt, Artificial Sequence
  Description of Artificial Sequence: Synthetic oligonucleotide
ucccgaaauuugccacuga

SEQ ID NO: 3012172 - RNA, 19 nt, Artificial Sequence
  Description of Artificial Sequence: Synthetic oligonucleotide
acagaacaccggcucugca

SEQ ID NO: 3012173 - RNA, 19 nt, Artificial Sequence
  Description of Artificial Sequence: Synthetic oligonucleotide
gccucccagagccugggcg

SEQ ID NO: 3012174 - RNA, 19 nt, Artificial Sequence
  Description of Artificial Sequence: Synthetic oligonucleotide
cagaacaccggcucugcaa

SEQ ID NO: 3012175 - RNA, 19 nt, Artificial Sequence
  Description of Artificial Sequence: Synthetic oligonucleotide
ggacuugugucuggcagag

SEQ ID NO: 3012176 - RNA, 19 nt, Artificial Sequence
  Description of Artificial Sequence: Synthetic oligonucleotide
agacacggacuugugucug

SEQ ID NO: 3012177 - RNA, 19 nt, Artificial Sequence
  Description of Artificial Sequence: Synthetic oligonucleotide
ucucgcugagcagcagcag

SEQ ID NO: 3012178 - RNA, 19 nt, Artificial Sequence
  Description of Artificial Sequence: Synthetic oligonucleotide
gagacagaacaccggcucu

SEQ ID NO: 3012179 - RNA, 19 nt, Artificial Sequence
  Description of Artificial Sequence: Synthetic oligonucleotide
ggagaaaguaaagcaggca

SEQ ID NO: 3012180 - RNA, 19 nt, Artificial Sequence
  Description of Artificial Sequence: Synthetic oligonucleotide
augaugggguuggcggcac

SEQ ID NO: 3012181 - RNA, 19 nt, Artificial Sequence
  Description of Artificial Sequence: Synthetic oligonucleotide
gcggccuuaaacugcuccc

SEQ ID NO: 3012182 - RNA, 19 nt, Artificial Sequence
  Description of Artificial Sequence: Synthetic oligonucleotide
cucccgaaauuugccacug

SEQ ID NO: 3012183 - RNA, 19 nt, Artificial Sequence
  Description of Artificial Sequence: Synthetic oligonucleotide
cuguggugacgcuggucag

SEQ ID NO: 3012184 - RNA, 19 nt, Artificial Sequence
  Description of Artificial Sequence: Synthetic oligonucleotide
cucugcaaagacacggacu

SEQ ID NO: 3012185 - RNA, 19 nt, Artificial Sequence
  Description of Artificial Sequence: Synthetic oligonucleotide
ccagugggagaaaguaaag

SEQ ID NO: 3012186 - RNA, 19 nt, Artificial Sequence
  Description of Artificial Sequence: Synthetic oligonucleotide
ggagucacaaccucucgcu

SEQ ID NO: 3012187 - RNA, 19 nt, Artificial Sequence
  Description of Artificial Sequence: Synthetic oligonucleotide
ucagcaggacaugcucaga

SEQ ID NO: 3012188 - RNA, 19 nt, Artificial Sequence
  Description of Artificial Sequence: Synthetic oligonucleotide
cuucccggucacuggcuug

SEQ ID NO: 3012189 - RNA, 19 nt, Artificial Sequence
  Description of Artificial Sequence: Synthetic oligonucleotide
ggcauacacuagccagugg

SEQ ID NO: 3012190 - RNA, 19 nt, Artificial Sequence
  Description of Artificial Sequence: Synthetic oligonucleotide
gacccaaaccaggcaagca

SEQ ID NO: 3012191 - RNA, 19 nt, Artificial Sequence
  Description of Artificial Sequence: Synthetic oligonucleotide
ccucccagagccugggcgg

SEQ ID NO: 3012192 - RNA, 19 nt, Artificial Sequence
  Description of Artificial Sequence: Synthetic oligonucleotide
ggcagaaagccaggacugg

SEQ ID NO: 3012193 - RNA, 19 nt, Artificial Sequence
  Description of Artificial Sequence: Synthetic oligonucleotide
gaggagcggggacccaaac

SEQ ID NO: 3012194 - RNA, 19 nt, Artificial Sequence
  Description of Artificial Sequence: Synthetic oligonucleotide
aggcaagcagcaagagaag

SEQ ID NO: 3012195 - RNA, 19 nt, Artificial Sequence
  Description of Artificial Sequence: Synthetic oligonucleotide
cugcucccgaaauuugcca

SEQ ID NO: 3012196 - RNA, 19 nt, Artificial Sequence
  Description of Artificial Sequence: Synthetic oligonucleotide
aaccucucgcugagcagca

SEQ ID NO: 3012197 - RNA, 19 nt, Artificial Sequence
  Description of Artificial Sequence: Synthetic oligonucleotide
caaagacacggacuugugu

SEQ ID NO: 3012198 - RNA, 19 nt, Artificial Sequence
  Description of Artificial Sequence: Synthetic oligonucleotide
gcuggggcggaucccaggc

SEQ ID NO: 3012199 - RNA, 19 nt, Artificial Sequence
  Description of Artificial Sequence: Synthetic oligonucleotide
gagcggggacccaaaccag

SEQ ID NO: 3012200 - RNA, 19 nt, Artificial Sequence
  Description of Artificial Sequence: Synthetic oligonucleotide
gcggaucccaggcaaagga

SEQ ID NO: 3012201 - RNA, 19 nt, Artificial Sequence
  Description of Artificial Sequence: Synthetic oligonucleotide
guggugacgcuggucagca

SEQ ID NO: 3012202 - RNA, 19 nt, Artificial Sequence
  Description of Artificial Sequence: Synthetic oligonucleotide
acgcuggucagcaggacau

SEQ ID NO: 3012203 - RNA, 19 nt, Artificial Sequence
  Description of Artificial Sequence: Synthetic oligonucleotide
cauagacggcuucccgguc

SEQ ID NO: 3012204 - RNA, 19 nt, Artificial Sequence
  Description of Artificial Sequence: Synthetic oligonucleotide
ugggguuggcggcacuguu

SEQ ID NO: 3012205 - RNA, 19 nt, Artificial Sequence
  Description of Artificial Sequence: Synthetic oligonucleotide
acagcacuguggugacgcu

SEQ ID NO: 3012206 - RNA, 19 nt, Artificial Sequence
  Description of Artificial Sequence: Synthetic oligonucleotide
ccacugaggaaguuguaga

SEQ ID NO: 3012207 - RNA, 19 nt, Artificial Sequence
  Description of Artificial Sequence: Synthetic oligonucleotide
gacuggagucacaaccucu

SEQ ID NO: 3012208 - RNA, 19 nt, Artificial Sequence
  Description of Artificial Sequence: Synthetic oligonucleotide
gcuggucagcaggacaugc

SEQ ID NO: 3012209 - RNA, 19 nt, Artificial Sequence
  Description of Artificial Sequence: Synthetic oligonucleotide
ugaugggguuggcggcacu

SEQ ID NO: 3012210 - RNA, 19 nt, Artificial Sequence
  Description of Artificial Sequence: Synthetic oligonucleotide
gcaggcauagacggcuucc

SEQ ID NO: 3012211 - RNA, 19 nt, Artificial Sequence
  Description of Artificial Sequence: Synthetic oligonucleotide
ggggacccaaaccaggcaa

SEQ ID NO: 3012212 - RNA, 19 nt, Artificial Sequence
  Description of Artificial Sequence: Synthetic oligonucleotide
gccagugggagaaaguaaa

SEQ ID NO: 3012213 - RNA, 19 nt, Artificial Sequence
  Description of Artificial Sequence: Synthetic oligonucleotide
ugccacugaggaaguugua

SEQ ID NO: 3012214 - RNA, 19 nt, Artificial Sequence
  Description of Artificial Sequence: Synthetic oligonucleotide
cagcacuguggugacgcug

SEQ ID NO: 3012215 - RNA, 19 nt, Artificial Sequence
  Description of Artificial Sequence: Synthetic oligonucleotide
agccagugggagaaaguaa

SEQ ID NO: 3012216 - RNA, 19 nt, Artificial Sequence
  Description of Artificial Sequence: Synthetic oligonucleotide
uggugacgcuggucagcag

SEQ ID NO: 3012217 - RNA, 19 nt, Artificial Sequence
  Description of Artificial Sequence: Synthetic oligonucleotide
ggacccaaaccaggcaagc

SEQ ID NO: 3012218 - RNA, 19 nt, Artificial Sequence
  Description of Artificial Sequence: Synthetic oligonucleotide
ucacaaccucucgcugagc

SEQ ID NO: 3012219 - RNA, 19 nt, Artificial Sequence
  Description of Artificial Sequence: Synthetic oligonucleotide
ggacuggagucacaaccuc

SEQ ID NO: 3012220 - RNA, 19 nt, Artificial Sequence
  Description of Artificial Sequence: Synthetic oligonucleotide
cugugccucccagagccug

SEQ ID NO: 3012221 - RNA, 19 nt, Artificial Sequence
  Description of Artificial Sequence: Synthetic oligonucleotide
gucacuggcuuggcggaac

SEQ ID NO: 3012222 - RNA, 19 nt, Artificial Sequence
  Description of Artificial Sequence: Synthetic oligonucleotide
gggacccaaaccaggcaag

SEQ ID NO: 3012223 - RNA, 19 nt, Artificial Sequence
  Description of Artificial Sequence: Synthetic oligonucleotide
cugcaaagacacggacuug

SEQ ID NO: 3012224 - RNA, 19 nt, Artificial Sequence
  Description of Artificial Sequence: Synthetic oligonucleotide
gcagcaagagaaggcggcc

SEQ ID NO: 3012225 - RNA, 19 nt, Artificial Sequence
  Description of Artificial Sequence: Synthetic oligonucleotide
ccucucgcugagcagcagc

SEQ ID NO: 3012226 - RNA, 19 nt, Artificial Sequence
  Description of Artificial Sequence: Synthetic oligonucleotide
cuagccagugggagaaagu

SEQ ID NO: 3012227 - RNA, 19 nt, Artificial Sequence
  Description of Artificial Sequence: Synthetic oligonucleotide
gcaaagacacggacuugug

SEQ ID NO: 3012228 - RNA, 19 nt, Artificial Sequence
  Description of Artificial Sequence: Synthetic oligonucleotide
ggcggaucccaggcaaagg

SEQ ID NO: 3012229 - RNA, 19 nt, Artificial Sequence
  Description of Artificial Sequence: Synthetic oligonucleotide
ggucagcaggacaugcuca

SEQ ID NO: 3012230 - RNA, 19 nt, Artificial Sequence
  Description of Artificial Sequence: Synthetic oligonucleotide
cggcucugcaaagacacgg

SEQ ID NO: 3012231 - RNA, 19 nt, Artificial Sequence
  Description of Artificial Sequence: Synthetic oligonucleotide
cucagagacuuuggagaca

SEQ ID NO: 3012232 - RNA, 19 nt, Artificial Sequence
  Description of Artificial Sequence: Synthetic oligonucleotide
ccuuaaacugcucccgaaa

SEQ ID NO: 3012233 - RNA, 19 nt, Artificial Sequence
  Description of Artificial Sequence: Synthetic oligonucleotide
caagagaaggcggccuuaa

SEQ ID NO: 3012234 - RNA, 19 nt, Artificial Sequence
  Description of Artificial Sequence: Synthetic oligonucleotide
gugccucccagagccuggg

SEQ ID NO: 3012235 - RNA, 19 nt, Artificial Sequence
  Description of Artificial Sequence: Synthetic oligonucleotide
ugacgcuggucagcaggac

SEQ ID NO: 3012236 - RNA, 19 nt, Artificial Sequence
  Description of Artificial Sequence: Synthetic oligonucleotide
augggguuggcggcacugu

SEQ ID NO: 3012237 - RNA, 19 nt, Artificial Sequence
  Description of Artificial Sequence: Synthetic oligonucleotide
caccggcucugcaaagaca

SEQ ID NO: 3012238 - RNA, 19 nt, Artificial Sequence
  Description of Artificial Sequence: Synthetic oligonucleotide
gucuggcagaggagcgggg

SEQ ID NO: 3012239 - RNA, 19 nt, Artificial Sequence
  Description of Artificial Sequence: Synthetic oligonucleotide
ggccuuaaacugcucccga

SEQ ID NO: 3012240 - RNA, 19 nt, Artificial Sequence
  Description of Artificial Sequence: Synthetic oligonucleotide
gagugcuggggcggauccc

SEQ ID NO: 3012241 - RNA, 19 nt, Artificial Sequence
  Description of Artificial Sequence: Synthetic oligonucleotide
ccaaaccaggcaagcagca

SEQ ID NO: 3012242 - RNA, 19 nt, Artificial Sequence
  Description of Artificial Sequence: Synthetic oligonucleotide
gcagaaagccaggacugga

SEQ ID NO: 3012243 - RNA, 19 nt, Artificial Sequence
  Description of Artificial Sequence: Synthetic oligonucleotide
gcauagacggcuucccggu

SEQ ID NO: 3012244 - RNA, 19 nt, Artificial Sequence
  Description of Artificial Sequence: Synthetic oligonucleotide
aagcaggcauagacggcuu

SEQ ID NO: 3012245 - RNA, 19 nt, Artificial Sequence
  Description of Artificial Sequence: Synthetic oligonucleotide
gggguuggcggcacuguug

SEQ ID NO: 3012246 - RNA, 19 nt, Artificial Sequence
  Description of Artificial Sequence: Synthetic oligonucleotide
caaaccaggcaagcagcaa

SEQ ID NO: 3012247 - RNA, 19 nt, Artificial Sequence
  Description of Artificial Sequence: Synthetic oligonucleotide
ggcggcacuguuggcauac

SEQ ID NO: 3012248 - RNA, 19 nt, Artificial Sequence
  Description of Artificial Sequence: Synthetic oligonucleotide
cacggacuugugucuggca

SEQ ID NO: 3012249 - RNA, 19 nt, Artificial Sequence
  Description of Artificial Sequence: Synthetic oligonucleotide
gacugggcugugccuccca

SEQ ID NO: 3012250 - RNA, 19 nt, Artificial Sequence
  Description of Artificial Sequence: Synthetic oligonucleotide
ggcacuguuggcauacacu

SEQ ID NO: 3012251 - RNA, 19 nt, Artificial Sequence
  Description of Artificial Sequence: Synthetic oligonucleotide
gcaaaggacugggcugugc

SEQ ID NO: 3012252 - RNA, 19 nt, Artificial Sequence
  Description of Artificial Sequence: Synthetic oligonucleotide
ggaucccaggcaaaggacu

SEQ ID NO: 3012253 - RNA, 19 nt, Artificial Sequence
  Description of Artificial Sequence: Synthetic oligonucleotide
gccuuaaacugcucccgaa

SEQ ID NO: 3012254 - RNA, 19 nt, Artificial Sequence
  Description of Artificial Sequence: Synthetic oligonucleotide
cacuguggugacgcugguc

SEQ ID NO: 3012255 - RNA, 19 nt, Artificial Sequence
  Description of Artificial Sequence: Synthetic oligonucleotide
cugggcugugccucccaga

SEQ ID NO: 3012256 - RNA, 19 nt, Artificial Sequence
  Description of Artificial Sequence: Synthetic oligonucleotide
gggcggaucccaggcaaag

SEQ ID NO: 3012257 - RNA, 19 nt, Artificial Sequence
  Description of Artificial Sequence: Synthetic oligonucleotide
cagagccugggcgggcccc

SEQ ID NO: 3012258 - RNA, 19 nt, Artificial Sequence
  Description of Artificial Sequence: Synthetic oligonucleotide
gcggggacccaaaccaggc

SEQ ID NO: 3012259 - RNA, 19 nt, Artificial Sequence
  Description of Artificial Sequence: Synthetic oligonucleotide
ccaggcaaaggacugggcu

SEQ ID NO: 3012260 - RNA, 19 nt, Artificial Sequence
  Description of Artificial Sequence: Synthetic oligonucleotide
cggaucccaggcaaaggac

SEQ ID NO: 3012261 - RNA, 19 nt, Artificial Sequence
  Description of Artificial Sequence: Synthetic oligonucleotide
accucucgcugagcagcag

SEQ ID NO: 3012262 - RNA, 19 nt, Artificial Sequence
  Description of Artificial Sequence: Synthetic oligonucleotide
gccaggacuggagucacaa

SEQ ID NO: 3012263 - RNA, 19 nt, Artificial Sequence
  Description of Artificial Sequence: Synthetic oligonucleotide
cccaggcaaaggacugggc

SEQ ID NO: 3012264 - RNA, 19 nt, Artificial Sequence
  Description of Artificial Sequence: Synthetic oligonucleotide
ccggcucugcaaagacacg

SEQ ID NO: 3012265 - RNA, 19 nt, Artificial Sequence
  Description of Artificial Sequence: Synthetic oligonucleotide
ccaggacuggagucacaac

SEQ ID NO: 3012266 - RNA, 19 nt, Artificial Sequence
  Description of Artificial Sequence: Synthetic oligonucleotide
cggccuuaaacugcucccg

SEQ ID NO: 3012267 - RNA, 19 nt, Artificial Sequence
  Description of Artificial Sequence: Synthetic oligonucleotide
agaggagcggggacccaaa

SEQ ID NO: 3012268 - RNA, 19 nt, Artificial Sequence
  Description of Artificial Sequence: Synthetic oligonucleotide
cagaggagcggggacccaa

SEQ ID NO: 3012269 - RNA, 19 nt, Artificial Sequence
  Description of Artificial Sequence: Synthetic oligonucleotide
gcucccgaaauuugccacu

SEQ ID NO: 3012270 - RNA, 19 nt, Artificial Sequence
  Description of Artificial Sequence: Synthetic oligonucleotide
cagagacuuuggagacaga

SEQ ID NO: 3012271 - RNA, 19 nt, Artificial Sequence
  Description of Artificial Sequence: Synthetic oligonucleotide
cuggggcggaucccaggca

SEQ ID NO: 3012272 - RNA, 19 nt, Artificial Sequence
  Description of Artificial Sequence: Synthetic oligonucleotide
ucccggucacuggcuuggc

SEQ ID NO: 3012273 - RNA, 19 nt, Artificial Sequence
  Description of Artificial Sequence: Synthetic oligonucleotide
gggcugugccucccagagc

SEQ ID NO: 3012274 - RNA, 19 nt, Artificial Sequence
  Description of Artificial Sequence: Synthetic oligonucleotide
gugcuggggcggaucccag

SEQ ID NO: 3012275 - RNA, 19 nt, Artificial Sequence
  Description of Artificial Sequence: Synthetic oligonucleotide
ccccacuuaggacagcacu

SEQ ID NO: 3012276 - RNA, 19 nt, Artificial Sequence
  Description of Artificial Sequence: Synthetic oligonucleotide
cggacuugugucuggcaga

SEQ ID NO: 3012277 - RNA, 19 nt, Artificial Sequence
  Description of Artificial Sequence: Synthetic oligonucleotide
cggcuucccggucacuggc

SEQ ID NO: 3012278 - RNA, 19 nt, Artificial Sequence
  Description of Artificial Sequence: Synthetic oligonucleotide
aggcggccuuaaacugcuc

SEQ ID NO: 3012279 - RNA, 19 nt, Artificial Sequence
  Description of Artificial Sequence: Synthetic oligonucleotide
agccaggacuggagucaca

SEQ ID NO: 3012280 - RNA, 19 nt, Artificial Sequence
  Description of Artificial Sequence: Synthetic oligonucleotide
ggacugggcugugccuccc

SEQ ID NO: 3012281 - RNA, 19 nt, Artificial Sequence
  Description of Artificial Sequence: Synthetic oligonucleotide
ccagagccugggcgggccc

SEQ ID NO: 3012282 - RNA, 19 nt, Artificial Sequence
  Description of Artificial Sequence: Synthetic oligonucleotide
gcaagagaaggcggccuua

SEQ ID NO: 3012283 - RNA, 19 nt, Artificial Sequence
  Description of Artificial Sequence: Synthetic oligonucleotide
agacggcuucccggucacu

SEQ ID NO: 3012284 - RNA, 19 nt, Artificial Sequence
  Description of Artificial Sequence: Synthetic oligonucleotide
ccacuuaggacagcacugu

SEQ ID NO: 3012285 - RNA, 19 nt, Artificial Sequence
  Description of Artificial Sequence: Synthetic oligonucleotide
gcuucccggucacuggcuu

SEQ ID NO: 3012286 - RNA, 19 nt, Artificial Sequence
  Description of Artificial Sequence: Synthetic oligonucleotide
cacuagccagugggagaaa

SEQ ID NO: 3012287 - RNA, 19 nt, Artificial Sequence
  Description of Artificial Sequence: Synthetic oligonucleotide
ggggcggaucccaggcaaa

SEQ ID NO: 3012288 - RNA, 19 nt, Artificial Sequence
  Description of Artificial Sequence: Synthetic oligonucleotide
caugagugcuggggcggau

SEQ ID NO: 3012289 - RNA, 19 nt, Artificial Sequence
  Description of Artificial Sequence: Synthetic oligonucleotide
cggggacccaaaccaggca

SEQ ID NO: 3012290 - RNA, 19 nt, Artificial Sequence
  Description of Artificial Sequence: Synthetic oligonucleotide
ggcuucccggucacuggcu

SEQ ID NO: 3012291 - RNA, 19 nt, Artificial Sequence
  Description of Artificial Sequence: Synthetic oligonucleotide
cgcuggucagcaggacaug

SEQ ID NO: 3012292 - RNA, 19 nt, Artificial Sequence
  Description of Artificial Sequence: Synthetic oligonucleotide
gcagaggagcggggaccca

SEQ ID NO: 3012293 - RNA, 19 nt, Artificial Sequence
  Description of Artificial Sequence: Synthetic oligonucleotide
gcacuguggugacgcuggu

SEQ ID NO: 3012294 - RNA, 19 nt, Artificial Sequence
  Description of Artificial Sequence: Synthetic oligonucleotide
ggacaugcucagagacuuu

SEQ ID NO: 3012295 - RNA, 19 nt, Artificial Sequence
  Description of Artificial Sequence: Synthetic oligonucleotide
gcugugccucccagagccu

SEQ ID NO: 3012296 - RNA, 19 nt, Artificial Sequence
  Description of Artificial Sequence: Synthetic oligonucleotide
aaugugauucauuugggac

SEQ ID NO: 3012297 - RNA, 19 nt, Artificial Sequence
  Description of Artificial Sequence: Synthetic oligonucleotide
ugugcaaccacaaaacugg

SEQ ID NO: 3012298 - RNA, 19 nt, Artificial Sequence
  Description of Artificial Sequence: Synthetic oligonucleotide
uuuucuguugaauagcugg

SEQ ID NO: 3012299 - RNA, 19 nt, Artificial Sequence
  Description of Artificial Sequence: Synthetic oligonucleotide
aaauauugagaguuguuuc

SEQ ID NO: 3012300 - RNA, 19 nt, Artificial Sequence
  Description of Artificial Sequence: Synthetic oligonucleotide
  modified_base (13)..(13): a, c, u, g, unknown or other
uugaauacgaagngaaagg

SEQ ID NO: 3012301 - RNA, 19 nt, Artificial Sequence
  Description of Artificial Sequence: Synthetic oligonucleotide
  modified_base (10)..(10): a, c, u, g, unknown or other
aauacgaagngaaaggucu

SEQ ID NO: 3012302 - RNA, 19 nt, Artificial Sequence
  Description of Artificial Sequence: Synthetic oligonucleotide
aguuguuucaauuuguuga

SEQ ID NO: 3012303 - RNA, 19 nt, Artificial Sequence
  Description of Artificial Sequence: Synthetic oligonucleotide
uuagaaaaggccacggucc

SEQ ID NO: 3012304 - RNA, 19 nt, Artificial Sequence
  Description of Artificial Sequence: Synthetic oligonucleotide
agcagugacacuuagagga

SEQ ID NO: 3012305 - RNA, 19 nt, Artificial Sequence
  Description of Artificial Sequence: Synthetic oligonucleotide
aauauugagaguuguuuca

SEQ ID NO: 3012306 - RNA, 19 nt, Artificial Sequence
  Description of Artificial Sequence: Synthetic oligonucleotide
uucaauuuguugaauacga

SEQ ID NO: 3012307 - RNA, 19 nt, Artificial Sequence
  Description of Artificial Sequence: Synthetic oligonucleotide
cagaaugugauucauuugg

SEQ ID NO: 3012308 - RNA, 19 nt, Artificial Sequence
  Description of Artificial Sequence: Synthetic oligonucleotide
  modified_base (19)..(19): a, c, u, g, unknown or other
aauuuguugaauacgaagn

SEQ ID NO: 3012309 - RNA, 19 nt, Artificial Sequence
  Description of Artificial Sequence: Synthetic oligonucleotide
uuugcauccaaaauauuga

SEQ ID NO: 3012310 - RNA, 19 nt, Artificial Sequence
  Description of Artificial Sequence: Synthetic oligonucleotide
acagcagugacacuuagag

SEQ ID NO: 3012311 - RNA, 19 nt, Artificial Sequence
  Description of Artificial Sequence: Synthetic oligonucleotide
aacugguuuagaaaaggcc

SEQ ID NO: 3012312 - RNA, 19 nt, Artificial Sequence
  Description of Artificial Sequence: Synthetic oligonucleotide
  modified_base (16)..(16): a, c, u, g, unknown or other
uuguugaauacgaagngaa

SEQ ID NO: 3012313 - RNA, 19 nt, Artificial Sequence
  Description of Artificial Sequence: Synthetic oligonucleotide
cuuugcauccaaaauauug

SEQ ID NO: 3012314 - RNA, 19 nt, Artificial Sequence
  Description of Artificial Sequence: Synthetic oligonucleotide
  modified_base (14)..(14): a, c, u, g, unknown or other
guugaauacgaagngaaag

SEQ ID NO: 3012315 - RNA, 19 nt, Artificial Sequence
  Description of Artificial Sequence: Synthetic oligonucleotide
uuuagaaaaggccacgguc

SEQ ID NO: 3012316 - RNA, 19 nt, Artificial Sequence
  Description of Artificial Sequence: Synthetic oligonucleotide
  modified_base (5)..(5): a, c, u, g, unknown or other
gaagngaaaggucugccag

SEQ ID NO: 3012317 - RNA, 19 nt, Artificial Sequence
  Description of Artificial Sequence: Synthetic oligonucleotide
acugugacauccucuaggc

SEQ ID NO: 3012318 - RNA, 19 nt, Artificial Sequence
  Description of Artificial Sequence: Synthetic oligonucleotide
aggaagcccauccucaucc

SEQ ID NO: 3012319 - RNA, 19 nt, Artificial Sequence
  Description of Artificial Sequence: Synthetic oligonucleotide
ugugacauccucuaggccu

SEQ ID NO: 3012320 - RNA, 19 nt, Artificial Sequence
  Description of Artificial Sequence: Synthetic oligonucleotide
uuucaauuuguugaauacg

SEQ ID NO: 3012321 - RNA, 19 nt, Artificial Sequence
  Description of Artificial Sequence: Synthetic oligonucleotide
  modified_base (18)..(18): a, c, u, g, unknown or other
auuuguugaauacgaagng

SEQ ID NO: 3012322 - RNA, 19 nt, Artificial Sequence
  Description of Artificial Sequence: Synthetic oligonucleotide
auagcuggcaccuugguca

SEQ ID NO: 3012323 - RNA, 19 nt, Artificial Sequence
  Description of Artificial Sequence: Synthetic oligonucleotide
aacugcaccgugugcaacc

SEQ ID NO: 3012324 - RNA, 19 nt, Artificial Sequence
  Description of Artificial Sequence: Synthetic oligonucleotide
aaacugguuuagaaaaggc

SEQ ID NO: 3012325 - RNA, 19 nt, Artificial Sequence
  Description of Artificial Sequence: Synthetic oligonucleotide
aauagcuggcaccuugguc

SEQ ID NO: 3012326 - RNA, 19 nt, Artificial Sequence
  Description of Artificial Sequence: Synthetic oligonucleotide
ugagaguuguuucaauuug

SEQ ID NO: 3012327 - RNA, 19 nt, Artificial Sequence
  Description of Artificial Sequence: Synthetic oligonucleotide
aaaauauugagaguuguuu

SEQ ID NO: 3012328 - RNA, 19 nt, Artificial Sequence
  Description of Artificial Sequence: Synthetic oligonucleotide
uguauuguccugcuguggc

SEQ ID NO: 3012329 - RNA, 19 nt, Artificial Sequence
  Description of Artificial Sequence: Synthetic oligonucleotide
cauaagaggaagcccaucc

SEQ ID NO: 3012330 - RNA, 19 nt, Artificial Sequence
  Description of Artificial Sequence: Synthetic oligonucleotide
uuguguauuguccugcugu

SEQ ID NO: 3012331 - RNA, 19 nt, Artificial Sequence
  Description of Artificial Sequence: Synthetic oligonucleotide
auucauuugggacagcagu

SEQ ID NO: 3012332 - RNA, 19 nt, Artificial Sequence
  Description of Artificial Sequence: Synthetic oligonucleotide
aacuguggaaaaccgguug

SEQ ID NO: 3012333 - RNA, 19 nt, Artificial Sequence
  Description of Artificial Sequence: Synthetic oligonucleotide
aguuucuccucacaaacug

SEQ ID NO: 3012334 - RNA, 19 nt, Artificial Sequence
  Description of Artificial Sequence: Synthetic oligonucleotide
uaugccugaccccauaaga

SEQ ID NO: 3012335 - RNA, 19 nt, Artificial Sequence
  Description of Artificial Sequence: Synthetic oligonucleotide
ucaggucuaugccugaccc

SEQ ID NO: 3012336 - RNA, 19 nt, Artificial Sequence
  Description of Artificial Sequence: Synthetic oligonucleotide
auagaugacagcuuugcau

SEQ ID NO: 3012337 - RNA, 19 nt, Artificial Sequence
  Description of Artificial Sequence: Synthetic oligonucleotide
uuagaggagacacuucaac

SEQ ID NO: 3012338 - RNA, 19 nt, Artificial Sequence
  Description of Artificial Sequence: Synthetic oligonucleotide
uucauuugggacagcagug

SEQ ID NO: 3012339 - RNA, 19 nt, Artificial Sequence
  Description of Artificial Sequence: Synthetic oligonucleotide
acuuagaggagacacuuca

SEQ ID NO: 3012340 - RNA, 19 nt, Artificial Sequence
  Description of Artificial Sequence: Synthetic oligonucleotide
ugaauagcuggcaccuugg

SEQ ID NO: 3012341 - RNA, 19 nt, Artificial Sequence
  Description of Artificial Sequence: Synthetic oligonucleotide
agagucuuguguauugucc

SEQ ID NO: 3012342 - RNA, 19 nt, Artificial Sequence
  Description of Artificial Sequence: Synthetic oligonucleotide
uuucuccucacaaacugug

SEQ ID NO: 3012343 - RNA, 19 nt, Artificial Sequence
  Description of Artificial Sequence: Synthetic oligonucleotide
uugaauagcuggcaccuug

SEQ ID NO: 3012344 - RNA, 19 nt, Artificial Sequence
  Description of Artificial Sequence: Synthetic oligonucleotide
uuucuguugaauagcuggc

SEQ ID NO: 3012345 - RNA, 19 nt, Artificial Sequence
  Description of Artificial Sequence: Synthetic oligonucleotide
guuucaauuuguugaauac

SEQ ID NO: 3012346 - RNA, 19 nt, Artificial Sequence
  Description of Artificial Sequence: Synthetic oligonucleotide
uagaugacagcuuugcauc

SEQ ID NO: 3012347 - RNA, 19 nt, Artificial Sequence
  Description of Artificial Sequence: Synthetic oligonucleotide
aaaccgguugagaaacugc

SEQ ID NO: 3012348 - RNA, 19 nt, Artificial Sequence
  Description of Artificial Sequence: Synthetic oligonucleotide
ugagaaacugcaccgugug

SEQ ID NO: 3012349 - RNA, 19 nt, Artificial Sequence
  Description of Artificial Sequence: Synthetic oligonucleotide
uuugggacagcagugacac

SEQ ID NO: 3012350 - RNA, 19 nt, Artificial Sequence
  Description of Artificial Sequence: Synthetic oligonucleotide
ugugauucauuugggacag

SEQ ID NO: 3012351 - RNA, 19 nt, Artificial Sequence
  Description of Artificial Sequence: Synthetic oligonucleotide
augugauucauuugggaca

SEQ ID NO: 3012352 - RNA, 19 nt, Artificial Sequence
  Description of Artificial Sequence: Synthetic oligonucleotide
uugcauccaaaauauugag

SEQ ID NO: 3012353 - RNA, 19 nt, Artificial Sequence
  Description of Artificial Sequence: Synthetic oligonucleotide
agaugacagcuuugcaucc

SEQ ID NO: 3012354 - RNA, 19 nt, Artificial Sequence
  Description of Artificial Sequence: Synthetic oligonucleotide
cacaaacuguggaaaaccg

SEQ ID NO: 3012355 - RNA, 19 nt, Artificial Sequence
  Description of Artificial Sequence: Synthetic oligonucleotide
uccaaaauauugagaguug

SEQ ID NO: 3012356 - RNA, 19 nt, Artificial Sequence
  Description of Artificial Sequence: Synthetic oligonucleotide
uguuucaauuuguugaaua

SEQ ID NO: 3012357 - RNA, 19 nt, Artificial Sequence
  Description of Artificial Sequence: Synthetic oligonucleotide
ucacaaacuguggaaaacc

SEQ ID NO: 3012358 - RNA, 19 nt, Artificial Sequence
  Description of Artificial Sequence: Synthetic oligonucleotide
  modified_base (17)..(17): a, c, u, g, unknown or other
uuuguugaauacgaagnga

SEQ ID NO: 3012359 - RNA, 19 nt, Artificial Sequence
  Description of Artificial Sequence: Synthetic oligonucleotide
  modified_base (4)..(4): a, c, u, g, unknown or other
aagngaaaggucugccagu

SEQ ID NO: 3012360 - RNA, 19 nt, Artificial Sequence
  Description of Artificial Sequence: Synthetic oligonucleotide
  modified_base (12)..(12): a, c, u, g, unknown or other
ugaauacgaagngaaaggu

SEQ ID NO: 3012361 - RNA, 19 nt, Artificial Sequence
  Description of Artificial Sequence: Synthetic oligonucleotide
acugguuuagaaaaggcca

SEQ ID NO: 3012362 - RNA, 19 nt, Artificial Sequence
  Description of Artificial Sequence: Synthetic oligonucleotide
ucuguugaauagcuggcac

SEQ ID NO: 3012363 - RNA, 19 nt, Artificial Sequence
  Description of Artificial Sequence: Synthetic oligonucleotide
uagaggagacacuucaacu

SEQ ID NO: 3012364 - RNA, 19 nt, Artificial Sequence
  Description of Artificial Sequence: Synthetic oligonucleotide
ugcauccaaaauauugaga

SEQ ID NO: 3012365 - RNA, 19 nt, Artificial Sequence
  Description of Artificial Sequence: Synthetic oligonucleotide
ucuccucacaaacugugga

SEQ ID NO: 3012366 - RNA, 19 nt, Artificial Sequence
  Description of Artificial Sequence: Synthetic oligonucleotide
  modified_base (7)..(7): a, c, u, g, unknown or other
acgaagngaaaggucugcc

SEQ ID NO: 3012367 - RNA, 19 nt, Artificial Sequence
  Description of Artificial Sequence: Synthetic oligonucleotide
ugccugaccccauaagagg

SEQ ID NO: 3012368 - RNA, 19 nt, Artificial Sequence
  Description of Artificial Sequence: Synthetic oligonucleotide
gaguuguuucaauuuguug

SEQ ID NO: 3012369 - RNA, 19 nt, Artificial Sequence
  Description of Artificial Sequence: Synthetic oligonucleotide
ugacacuuagaggagacac

SEQ ID NO: 3012370 - RNA, 19 nt, Artificial Sequence
  Description of Artificial Sequence: Synthetic oligonucleotide
uguugaauagcuggcaccu

SEQ ID NO: 3012371 - RNA, 19 nt, Artificial Sequence
  Description of Artificial Sequence: Synthetic oligonucleotide
uucaacugugacauccucu

SEQ ID NO: 3012372 - RNA, 19 nt, Artificial Sequence
  Description of Artificial Sequence: Synthetic oligonucleotide
ucagaaugugauucauuug

SEQ ID NO: 3012373 - RNA, 19 nt, Artificial Sequence
  Description of Artificial Sequence: Synthetic oligonucleotide
aaaaccgguugagaaacug

SEQ ID NO: 3012374 - RNA, 19 nt, Artificial Sequence
  Description of Artificial Sequence: Synthetic oligonucleotide
uuggucaggucuaugccug

SEQ ID NO: 3012375 - RNA, 19 nt, Artificial Sequence
  Description of Artificial Sequence: Synthetic oligonucleotide
auccaaaauauugagaguu

SEQ ID NO: 3012376 - RNA, 19 nt, Artificial Sequence
  Description of Artificial Sequence: Synthetic oligonucleotide
uaagaggaagcccauccuc

SEQ ID NO: 3012377 - RNA, 19 nt, Artificial Sequence
  Description of Artificial Sequence: Synthetic oligonucleotide
uucuccucacaaacugugg

SEQ ID NO: 3012378 - RNA, 19 nt, Artificial Sequence
  Description of Artificial Sequence: Synthetic oligonucleotide
cacuucaacugugacaucc

SEQ ID NO: 3012379 - RNA, 19 nt, Artificial Sequence
  Description of Artificial Sequence: Synthetic oligonucleotide
ugauucauuugggacagca

SEQ ID NO: 3012380 - RNA, 19 nt, Artificial Sequence
  Description of Artificial Sequence: Synthetic oligonucleotide
ugcuuucagaaugugauuc

SEQ ID NO: 3012381 - RNA, 19 nt, Artificial Sequence
  Description of Artificial Sequence: Synthetic oligonucleotide
aaccacaaaacugguuuag

SEQ ID NO: 3012382 - RNA, 19 nt, Artificial Sequence
  Description of Artificial Sequence: Synthetic oligonucleotide
uguguauuguccugcugug

SEQ ID NO: 3012383 - RNA, 19 nt, Artificial Sequence
  Description of Artificial Sequence: Synthetic oligonucleotide
ucaauuuguugaauacgaa

SEQ ID NO: 3012384 - RNA, 19 nt, Artificial Sequence
  Description of Artificial Sequence: Synthetic oligonucleotide
agaaacugcaccgugugca

SEQ ID NO: 3012385 - RNA, 19 nt, Artificial Sequence
  Description of Artificial Sequence: Synthetic oligonucleotide
auugagaguuguuucaauu

SEQ ID NO: 3012386 - RNA, 19 nt, Artificial Sequence
  Description of Artificial Sequence: Synthetic oligonucleotide
agcagauggggacaccggg

SEQ ID NO: 3012387 - RNA, 19 nt, Artificial Sequence
  Description of Artificial Sequence: Synthetic oligonucleotide
uugagaaacugcaccgugu

SEQ ID NO: 3012388 - RNA, 19 nt, Artificial Sequence
  Description of Artificial Sequence: Synthetic oligonucleotide
gaaugugauucauuuggga

SEQ ID NO: 3012389 - RNA, 19 nt, Artificial Sequence
  Description of Artificial Sequence: Synthetic oligonucleotide
agacacuucaacugugaca

SEQ ID NO: 3012390 - RNA, 19 nt, Artificial Sequence
  Description of Artificial Sequence: Synthetic oligonucleotide
uugagaguuguuucaauuu

SEQ ID NO: 3012391 - RNA, 19 nt, Artificial Sequence
  Description of Artificial Sequence: Synthetic oligonucleotide
cuguugaauagcuggcacc

SEQ ID NO: 3012392 - RNA, 19 nt, Artificial Sequence
  Description of Artificial Sequence: Synthetic oligonucleotide
  modified_base (15)..(15): a, c, u, g, unknown or other
uguugaauacgaagngaaa

SEQ ID NO: 3012393 - RNA, 19 nt, Artificial Sequence
  Description of Artificial Sequence: Synthetic oligonucleotide
cugguuuagaaaaggccac

SEQ ID NO: 3012394 - RNA, 19 nt, Artificial Sequence
  Description of Artificial Sequence: Synthetic oligonucleotide
ugguuuagaaaaggccacg

SEQ ID NO: 3012395 - RNA, 19 nt, Artificial Sequence
  Description of Artificial Sequence: Synthetic oligonucleotide
uccagagucuuguguauug

SEQ ID NO: 3012396 - RNA, 19 nt, Artificial Sequence
  Description of Artificial Sequence: Synthetic oligonucleotide
agaaugugauucauuuggg

SEQ ID NO: 3012397 - RNA, 19 nt, Artificial Sequence
  Description of Artificial Sequence: Synthetic oligonucleotide
ugggauagaugacagcuuu

SEQ ID NO: 3012398 - RNA, 19 nt, Artificial Sequence
  Description of Artificial Sequence: Synthetic oligonucleotide
gacacuucaacugugacau

SEQ ID NO: 3012399 - RNA, 19 nt, Artificial Sequence
  Description of Artificial Sequence: Synthetic oligonucleotide
acaaacuguggaaaaccgg

SEQ ID NO: 3012400 - RNA, 19 nt, Artificial Sequence
  Description of Artificial Sequence: Synthetic oligonucleotide
cuaggccugggauagauga

SEQ ID NO: 3012401 - RNA, 19 nt, Artificial Sequence
  Description of Artificial Sequence: Synthetic oligonucleotide
accgugugcaaccacaaaa

SEQ ID NO: 3012402 - RNA, 19 nt, Artificial Sequence
  Description of Artificial Sequence: Synthetic oligonucleotide
acagcuuugcauccaaaau

SEQ ID NO: 3012403 - RNA, 19 nt, Artificial Sequence
  Description of Artificial Sequence: Synthetic oligonucleotide
agugacacuuagaggagac

SEQ ID NO: 3012404 - RNA, 19 nt, Artificial Sequence
  Description of Artificial Sequence: Synthetic oligonucleotide
auuguccugcuguggcugc

SEQ ID NO: 3012405 - RNA, 19 nt, Artificial Sequence
  Description of Artificial Sequence: Synthetic oligonucleotide
guugagaaacugcaccgug

SEQ ID NO: 3012406 - RNA, 19 nt, Artificial Sequence
  Description of Artificial Sequence: Synthetic oligonucleotide
uccucuaggccugggauag

SEQ ID NO: 3012407 - RNA, 19 nt, Artificial Sequence
  Description of Artificial Sequence: Synthetic oligonucleotide
gacaccggggcucaggcac

SEQ ID NO: 3012408 - RNA, 19 nt, Artificial Sequence
  Description of Artificial Sequence: Synthetic oligonucleotide
ugcaccgugugcaaccaca

SEQ ID NO: 3012409 - RNA, 19 nt, Artificial Sequence
  Description of Artificial Sequence: Synthetic oligonucleotide
acuguggaaaaccgguuga

SEQ ID NO: 3012410 - RNA, 19 nt, Artificial Sequence
  Description of Artificial Sequence: Synthetic oligonucleotide
uagaaaaggccacgguccu

SEQ ID NO: 3012411 - RNA, 19 nt, Artificial Sequence
  Description of Artificial Sequence: Synthetic oligonucleotide
auaagaggaagcccauccu

SEQ ID NO: 3012412 - RNA, 19 nt, Artificial Sequence
  Description of Artificial Sequence: Synthetic oligonucleotide
acagcagauggggacaccg

SEQ ID NO: 3012413 - RNA, 19 nt, Artificial Sequence
  Description of Artificial Sequence: Synthetic oligonucleotide
  modified_base (11)..(11): a, c, u, g, unknown or other
gaauacgaagngaaagguc

SEQ ID NO: 3012414 - RNA, 19 nt, Artificial Sequence
  Description of Artificial Sequence: Synthetic oligonucleotide
guuguuucaauuuguugaa

SEQ ID NO: 3012415 - RNA, 19 nt, Artificial Sequence
  Description of Artificial Sequence: Synthetic oligonucleotide
gauucauuugggacagcag

SEQ ID NO: 3012416 - RNA, 19 nt, Artificial Sequence
  Description of Artificial Sequence: Synthetic oligonucleotide
aagaggaagcccauccuca

SEQ ID NO: 3012417 - RNA, 19 nt, Artificial Sequence
  Description of Artificial Sequence: Synthetic oligonucleotide
aaccgguugagaaacugca

SEQ ID NO: 3012418 - RNA, 19 nt, Artificial Sequence
  Description of Artificial Sequence: Synthetic oligonucleotide
gauagaugacagcuuugca

SEQ ID NO: 3012419 - RNA, 19 nt, Artificial Sequence
  Description of Artificial Sequence: Synthetic oligonucleotide
ucauuugggacagcaguga

SEQ ID NO: 3012420 - RNA, 19 nt, Artificial Sequence
  Description of Artificial Sequence: Synthetic oligonucleotide
aagcccauccucauccauc

SEQ ID NO: 3012421 - RNA, 19 nt, Artificial Sequence
  Description of Artificial Sequence: Synthetic oligonucleotide
uauuguccugcuguggcug

SEQ ID NO: 3012422 - RNA, 19 nt, Artificial Sequence
  Description of Artificial Sequence: Synthetic oligonucleotide
gaccccauaagaggaagcc

SEQ ID NO: 3012423 - RNA, 19 nt, Artificial Sequence
  Description of Artificial Sequence: Synthetic oligonucleotide
gugugcaaccacaaaacug

SEQ ID NO: 3012424 - RNA, 19 nt, Artificial Sequence
  Description of Artificial Sequence: Synthetic oligonucleotide
aaacugcaccgugugcaac

SEQ ID NO: 3012425 - RNA, 19 nt, Artificial Sequence
  Description of Artificial Sequence: Synthetic oligonucleotide
  modified_base (8)..(8): a, c, u, g, unknown or other
uacgaagngaaaggucugc

SEQ ID NO: 3012426 - RNA, 19 nt, Artificial Sequence
  Description of Artificial Sequence: Synthetic oligonucleotide
ucuaugccugaccccauaa

SEQ ID NO: 3012427 - RNA, 19 nt, Artificial Sequence
  Description of Artificial Sequence: Synthetic oligonucleotide
accccauaagaggaagccc

SEQ ID NO: 3012428 - RNA, 19 nt, Artificial Sequence
  Description of Artificial Sequence: Synthetic oligonucleotide
ggaaaaccgguugagaaac

SEQ ID NO: 3012429 - RNA, 19 nt, Artificial Sequence
  Description of Artificial Sequence: Synthetic oligonucleotide
uguggaaaaccgguugaga

SEQ ID NO: 3012430 - RNA, 19 nt, Artificial Sequence
  Description of Artificial Sequence: Synthetic oligonucleotide
agucuuguguauuguccug

SEQ ID NO: 3012431 - RNA, 19 nt, Artificial Sequence
  Description of Artificial Sequence: Synthetic oligonucleotide
ucuuguguauuguccugcu

SEQ ID NO: 3012432 - RNA, 19 nt, Artificial Sequence
  Description of Artificial Sequence: Synthetic oligonucleotide
ugaccccauaagaggaagc

SEQ ID NO: 3012433 - RNA, 19 nt, Artificial Sequence
  Description of Artificial Sequence: Synthetic oligonucleotide
uauugagaguuguuucaau

SEQ ID NO: 3012434 - RNA, 19 nt, Artificial Sequence
  Description of Artificial Sequence: Synthetic oligonucleotide
gguuuagaaaaggccacgg

SEQ ID NO: 3012435 - RNA, 19 nt, Artificial Sequence
  Description of Artificial Sequence: Synthetic oligonucleotide
gagacacuucaacugugac

SEQ ID NO: 3012436 - RNA, 19 nt, Artificial Sequence
  Description of Artificial Sequence: Synthetic oligonucleotide
caaacuguggaaaaccggu

SEQ ID NO: 3012437 - RNA, 19 nt, Artificial Sequence
  Description of Artificial Sequence: Synthetic oligonucleotide
ugguccagagucuugugua

SEQ ID NO: 3012438 - RNA, 19 nt, Artificial Sequence
  Description of Artificial Sequence: Synthetic oligonucleotide
uucuguugaauagcuggca

SEQ ID NO: 3012439 - RNA, 19 nt, Artificial Sequence
  Description of Artificial Sequence: Synthetic oligonucleotide
ugccaguuucuccucacaa

SEQ ID NO: 3012440 - RNA, 19 nt, Artificial Sequence
  Description of Artificial Sequence: Synthetic oligonucleotide
auccucauccaucuccaca

SEQ ID NO: 3012441 - RNA, 19 nt, Artificial Sequence
  Description of Artificial Sequence: Synthetic oligonucleotide
gagaaacugcaccgugugc

SEQ ID NO: 3012442 - RNA, 19 nt, Artificial Sequence
  Description of Artificial Sequence: Synthetic oligonucleotide
uggcaccuuggucaggucu

SEQ ID NO: 3012443 - RNA, 19 nt, Artificial Sequence
  Description of Artificial Sequence: Synthetic oligonucleotide
ggauagaugacagcuuugc

SEQ ID NO: 3012444 - RNA, 19 nt, Artificial Sequence
  Description of Artificial Sequence: Synthetic oligonucleotide
uccaucuccacagcagaug

SEQ ID NO: 3012445 - RNA, 19 nt, Artificial Sequence
  Description of Artificial Sequence: Synthetic oligonucleotide
cucacaaacuguggaaaac

SEQ ID NO: 3012446 - RNA, 19 nt, Artificial Sequence
  Description of Artificial Sequence: Synthetic oligonucleotide
cagcagugacacuuagagg

SEQ ID NO: 3012447 - RNA, 19 nt, Artificial Sequence
  Description of Artificial Sequence: Synthetic oligonucleotide
cuccacagcagauggggac

SEQ ID NO: 3012448 - RNA, 19 nt, Artificial Sequence
  Description of Artificial Sequence: Synthetic oligonucleotide
agcccauccucauccaucu

SEQ ID NO: 3012449 - RNA, 19 nt, Artificial Sequence
  Description of Artificial Sequence: Synthetic oligonucleotide
uccucacaaacuguggaaa

SEQ ID NO: 3012450 - RNA, 19 nt, Artificial Sequence
  Description of Artificial Sequence: Synthetic oligonucleotide
ucuaggccugggauagaug

SEQ ID NO: 3012451 - RNA, 19 nt, Artificial Sequence
  Description of Artificial Sequence: Synthetic oligonucleotide
aggucuaugccugacccca

SEQ ID NO: 3012452 - RNA, 19 nt, Artificial Sequence
  Description of Artificial Sequence: Synthetic oligonucleotide
cauuugggacagcagugac

SEQ ID NO: 3012453 - RNA, 19 nt, Artificial Sequence
  Description of Artificial Sequence: Synthetic oligonucleotide
ccaguuucuccucacaaac

SEQ ID NO: 3012454 - RNA, 19 nt, Artificial Sequence
  Description of Artificial Sequence: Synthetic oligonucleotide
cuaugccugaccccauaag

SEQ ID NO: 3012455 - RNA, 19 nt, Artificial Sequence
  Description of Artificial Sequence: Synthetic oligonucleotide
auauugagaguuguuucaa

SEQ ID NO: 3012456 - RNA, 19 nt, Artificial Sequence
  Description of Artificial Sequence: Synthetic oligonucleotide
gagucuuguguauuguccu

SEQ ID NO: 3012457 - RNA, 19 nt, Artificial Sequence
  Description of Artificial Sequence: Synthetic oligonucleotide
acacuuagaggagacacuu

SEQ ID NO: 3012458 - RNA, 19 nt, Artificial Sequence
  Description of Artificial Sequence: Synthetic oligonucleotide
ccaucuccacagcagaugg

SEQ ID NO: 3012459 - RNA, 19 nt, Artificial Sequence
  Description of Artificial Sequence: Synthetic oligonucleotide
gucuuguguauuguccugc

SEQ ID NO: 3012460 - RNA, 19 nt, Artificial Sequence
  Description of Artificial Sequence: Synthetic oligonucleotide
cagcuuugcauccaaaaua

SEQ ID NO: 3012461 - RNA, 19 nt, Artificial Sequence
  Description of Artificial Sequence: Synthetic oligonucleotide
cagagucuuguguauuguc

SEQ ID NO: 3012462 - RNA, 19 nt, Artificial Sequence
  Description of Artificial Sequence: Synthetic oligonucleotide
caucuccacagcagauggg

SEQ ID NO: 3012463 - RNA, 19 nt, Artificial Sequence
  Description of Artificial Sequence: Synthetic oligonucleotide
  modified_base (9)..(9): a, c, u, g, unknown or other
auacgaagngaaaggucug

SEQ ID NO: 3012464 - RNA, 19 nt, Artificial Sequence
  Description of Artificial Sequence: Synthetic oligonucleotide
cuuguguauuguccugcug

SEQ ID NO: 3012465 - RNA, 19 nt, Artificial Sequence
  Description of Artificial Sequence: Synthetic oligonucleotide
ccgguugagaaacugcacc

SEQ ID NO: 3012466 - RNA, 19 nt, Artificial Sequence
  Description of Artificial Sequence: Synthetic oligonucleotide
ugcaaccacaaaacugguu

SEQ ID NO: 3012467 - RNA, 19 nt, Artificial Sequence
  Description of Artificial Sequence: Synthetic oligonucleotide
guguauuguccugcugugg

SEQ ID NO: 3012468 - RNA, 19 nt, Artificial Sequence
  Description of Artificial Sequence: Synthetic oligonucleotide
ugugguccagagucuugug

SEQ ID NO: 3012469 - RNA, 19 nt, Artificial Sequence
  Description of Artificial Sequence: Synthetic oligonucleotide
cuucaacugugacauccuc

SEQ ID NO: 3012470 - RNA, 19 nt, Artificial Sequence
  Description of Artificial Sequence: Synthetic oligonucleotide
gaaacugcaccgugugcaa

SEQ ID NO: 3012471 - RNA, 19 nt, Artificial Sequence
  Description of Artificial Sequence: Synthetic oligonucleotide
  modified_base (3)..(3): a, c, u, g, unknown or other
agngaaaggucugccaguu

SEQ ID NO: 3012472 - RNA, 19 nt, Artificial Sequence
  Description of Artificial Sequence: Synthetic oligonucleotide
accgguugagaaacugcac

SEQ ID NO: 3012473 - RNA, 19 nt, Artificial Sequence
  Description of Artificial Sequence: Synthetic oligonucleotide
acauccucuaggccuggga

SEQ ID NO: 3012474 - RNA, 19 nt, Artificial Sequence
  Description of Artificial Sequence: Synthetic oligonucleotide
uagcuggcaccuuggucag

SEQ ID NO: 3012475 - RNA, 19 nt, Artificial Sequence
  Description of Artificial Sequence: Synthetic oligonucleotide
cagcagauggggacaccgg

SEQ ID NO: 3012476 - RNA, 19 nt, Artificial Sequence
  Description of Artificial Sequence: Synthetic oligonucleotide
auuugggacagcagugaca

SEQ ID NO: 3012477 - RNA, 19 nt, Artificial Sequence
  Description of Artificial Sequence: Synthetic oligonucleotide
cuguggaaaaccgguugag

SEQ ID NO: 3012478 - RNA, 19 nt, Artificial Sequence
  Description of Artificial Sequence: Synthetic oligonucleotide
uaggccugggauagaugac

SEQ ID NO: 3012479 - RNA, 19 nt, Artificial Sequence
  Description of Artificial Sequence: Synthetic oligonucleotide
aaacuguggaaaaccgguu

SEQ ID NO: 3012480 - RNA, 19 nt, Artificial Sequence
  Description of Artificial Sequence: Synthetic oligonucleotide
caggucuaugccugacccc

SEQ ID NO: 3012481 - RNA, 19 nt, Artificial Sequence
  Description of Artificial Sequence: Synthetic oligonucleotide
cugugacauccucuaggcc

SEQ ID NO: 3012482 - RNA, 19 nt, Artificial Sequence
  Description of Artificial Sequence: Synthetic oligonucleotide
agaggaagcccauccucau

SEQ ID NO: 3012483 - RNA, 19 nt, Artificial Sequence
  Description of Artificial Sequence: Synthetic oligonucleotide
augacagcuuugcauccaa

SEQ ID NO: 3012484 - RNA, 19 nt, Artificial Sequence
  Description of Artificial Sequence: Synthetic oligonucleotide
gugacauccucuaggccug

SEQ ID NO: 3012485 - RNA, 19 nt, Artificial Sequence
  Description of Artificial Sequence: Synthetic oligonucleotide
accacaaaacugguuuaga

SEQ ID NO: 3012486 - RNA, 19 nt, Artificial Sequence
  Description of Artificial Sequence: Synthetic oligonucleotide
gauggggacaccggggcuc

SEQ ID NO: 3012487 - RNA, 19 nt, Artificial Sequence
  Description of Artificial Sequence: Synthetic oligonucleotide
cugaccccauaagaggaag

SEQ ID NO: 3012488 - RNA, 19 nt, Artificial Sequence
  Description of Artificial Sequence: Synthetic oligonucleotide
gaugacagcuuugcaucca

SEQ ID NO: 3012489 - RNA, 19 nt, Artificial Sequence
  Description of Artificial Sequence: Synthetic oligonucleotide
guuuagaaaaggccacggu

SEQ ID NO: 3012490 - RNA, 19 nt, Artificial Sequence
  Description of Artificial Sequence: Synthetic oligonucleotide
agaguuguuucaauuuguu

SEQ ID NO: 3012491 - RNA, 19 nt, Artificial Sequence
  Description of Artificial Sequence: Synthetic oligonucleotide
caacugugacauccucuag

SEQ ID NO: 3012492 - RNA, 19 nt, Artificial Sequence
  Description of Artificial Sequence: Synthetic oligonucleotide
cuuagaggagacacuucaa

SEQ ID NO: 3012493 - RNA, 19 nt, Artificial Sequence
  Description of Artificial Sequence: Synthetic oligonucleotide
aggccugggauagaugaca

SEQ ID NO: 3012494 - RNA, 19 nt, Artificial Sequence
  Description of Artificial Sequence: Synthetic oligonucleotide
gcaaccacaaaacugguuu

SEQ ID NO: 3012495 - RNA, 19 nt, Artificial Sequence
  Description of Artificial Sequence: Synthetic oligonucleotide
cucauccaucuccacagca

SEQ ID NO: 3012496 - RNA, 19 nt, Artificial Sequence
  Description of Artificial Sequence: Synthetic oligonucleotide
uuguuucaauuuguugaau

SEQ ID NO: 3012497 - RNA, 19 nt, Artificial Sequence
  Description of Artificial Sequence: Synthetic oligonucleotide
cacuuagaggagacacuuc

SEQ ID NO: 3012498 - RNA, 19 nt, Artificial Sequence
  Description of Artificial Sequence: Synthetic oligonucleotide
cuuggucaggucuaugccu

SEQ ID NO: 3012499 - RNA, 19 nt, Artificial Sequence
  Description of Artificial Sequence: Synthetic oligonucleotide
cgguugagaaacugcaccg

SEQ ID NO: 3012500 - RNA, 19 nt, Artificial Sequence
  Description of Artificial Sequence: Synthetic oligonucleotide
gagaguuguuucaauuugu

SEQ ID NO: 3012501 - RNA, 19 nt, Artificial Sequence
  Description of Artificial Sequence: Synthetic oligonucleotide
ccgugugcaaccacaaaac

SEQ ID NO: 3012502 - RNA, 19 nt, Artificial Sequence
  Description of Artificial Sequence: Synthetic oligonucleotide
ugacagcuuugcauccaaa

SEQ ID NO: 3012503 - RNA, 19 nt, Artificial Sequence
  Description of Artificial Sequence: Synthetic oligonucleotide
acuucaacugugacauccu

SEQ ID NO: 3012504 - RNA, 19 nt, Artificial Sequence
  Description of Artificial Sequence: Synthetic oligonucleotide
gaggaagcccauccucauc

SEQ ID NO: 3012505 - RNA, 19 nt, Artificial Sequence
  Description of Artificial Sequence: Synthetic oligonucleotide
auccucuaggccugggaua

SEQ ID NO: 3012506 - RNA, 19 nt, Artificial Sequence
  Description of Artificial Sequence: Synthetic oligonucleotide
aggagacacuucaacugug

SEQ ID NO: 3012507 - RNA, 19 nt, Artificial Sequence
  Description of Artificial Sequence: Synthetic oligonucleotide
cuccucacaaacuguggaa

SEQ ID NO: 3012508 - RNA, 19 nt, Artificial Sequence
  Description of Artificial Sequence: Synthetic oligonucleotide
aaaaggccacgguccuuuu

SEQ ID NO: 3012509 - RNA, 19 nt, Artificial Sequence
  Description of Artificial Sequence: Synthetic oligonucleotide
caaaauauugagaguuguu

SEQ ID NO: 3012510 - RNA, 19 nt, Artificial Sequence
  Description of Artificial Sequence: Synthetic oligonucleotide
gacagcagugacacuuaga

SEQ ID NO: 3012511 - RNA, 19 nt, Artificial Sequence
  Description of Artificial Sequence: Synthetic oligonucleotide
ccccauaagaggaagccca

SEQ ID NO: 3012512 - RNA, 19 nt, Artificial Sequence
  Description of Artificial Sequence: Synthetic oligonucleotide
gcagauggggacaccgggg

SEQ ID NO: 3012513 - RNA, 19 nt, Artificial Sequence
  Description of Artificial Sequence: Synthetic oligonucleotide
uggucaggucuaugccuga

SEQ ID NO: 3012514 - RNA, 19 nt, Artificial Sequence
  Description of Artificial Sequence: Synthetic oligonucleotide
gacauccucuaggccuggg

SEQ ID NO: 3012515 - RNA, 19 nt, Artificial Sequence
  Description of Artificial Sequence: Synthetic oligonucleotide
caaccacaaaacugguuua

SEQ ID NO: 3012516 - RNA, 19 nt, Artificial Sequence
  Description of Artificial Sequence: Synthetic oligonucleotide
ugacauccucuaggccugg

SEQ ID NO: 3012517 - RNA, 19 nt, Artificial Sequence
  Description of Artificial Sequence: Synthetic oligonucleotide
gaaaaggccacgguccuuu

SEQ ID NO: 3012518 - RNA, 19 nt, Artificial Sequence
  Description of Artificial Sequence: Synthetic oligonucleotide
cuguggcugcucugcagug

SEQ ID NO: 3012519 - RNA, 19 nt, Artificial Sequence
  Description of Artificial Sequence: Synthetic oligonucleotide
ggacagcagugacacuuag

SEQ ID NO: 3012520 - RNA, 19 nt, Artificial Sequence
  Description of Artificial Sequence: Synthetic oligonucleotide
gaauagcuggcaccuuggu

SEQ ID NO: 3012521 - RNA, 19 nt, Artificial Sequence
  Description of Artificial Sequence: Synthetic oligonucleotide
cauccucauccaucuccac

SEQ ID NO: 3012522 - RNA, 19 nt, Artificial Sequence
  Description of Artificial Sequence: Synthetic oligonucleotide
ccacaaaacugguuuagaa

SEQ ID NO: 3012523 - RNA, 19 nt, Artificial Sequence
  Description of Artificial Sequence: Synthetic oligonucleotide
gggacaccggggcucaggc

SEQ ID NO: 3012524 - RNA, 19 nt, Artificial Sequence
  Description of Artificial Sequence: Synthetic oligonucleotide
gcagugacacuuagaggag

SEQ ID NO: 3012525 - RNA, 19 nt, Artificial Sequence
  Description of Artificial Sequence: Synthetic oligonucleotide
acugcaccgugugcaacca

SEQ ID NO: 3012526 - RNA, 19 nt, Artificial Sequence
  Description of Artificial Sequence: Synthetic oligonucleotide
ggagacacuucaacuguga

SEQ ID NO: 3012527 - RNA, 19 nt, Artificial Sequence
  Description of Artificial Sequence: Synthetic oligonucleotide
gggauagaugacagcuuug

SEQ ID NO: 3012528 - RNA, 19 nt, Artificial Sequence
  Description of Artificial Sequence: Synthetic oligonucleotide
uccugugguccagagucuu

SEQ ID NO: 3012529 - RNA, 19 nt, Artificial Sequence
  Description of Artificial Sequence: Synthetic oligonucleotide
caguuucuccucacaaacu

SEQ ID NO: 3012530 - RNA, 19 nt, Artificial Sequence
  Description of Artificial Sequence: Synthetic oligonucleotide
guuucuccucacaaacugu

SEQ ID NO: 3012531 - RNA, 19 nt, Artificial Sequence
  Description of Artificial Sequence: Synthetic oligonucleotide
ggccugggauagaugacag

SEQ ID NO: 3012532 - RNA, 19 nt, Artificial Sequence
  Description of Artificial Sequence: Synthetic oligonucleotide
gugacacuuagaggagaca

SEQ ID NO: 3012533 - RNA, 19 nt, Artificial Sequence
  Description of Artificial Sequence: Synthetic oligonucleotide
cauccucuaggccugggau

SEQ ID NO: 3012534 - RNA, 19 nt, Artificial Sequence
  Description of Artificial Sequence: Synthetic oligonucleotide
cagugacacuuagaggaga

SEQ ID NO: 3012535 - RNA, 19 nt, Artificial Sequence
  Description of Artificial Sequence: Synthetic oligonucleotide
cuuucagaaugugauucau

SEQ ID NO: 3012536 - RNA, 19 nt, Artificial Sequence
  Description of Artificial Sequence: Synthetic oligonucleotide
auccaucuccacagcagau

SEQ ID NO: 3012537 - RNA, 19 nt, Artificial Sequence
  Description of Artificial Sequence: Synthetic oligonucleotide
uugggacagcagugacacu

SEQ ID NO: 3012538 - RNA, 19 nt, Artificial Sequence
  Description of Artificial Sequence: Synthetic oligonucleotide
guggcugcucugcagugcu

SEQ ID NO: 3012539 - RNA, 19 nt, Artificial Sequence
  Description of Artificial Sequence: Synthetic oligonucleotide
gaagcccauccucauccau

SEQ ID NO: 3012540 - RNA, 19 nt, Artificial Sequence
  Description of Artificial Sequence: Synthetic oligonucleotide
gccugaccccauaagagga

SEQ ID NO: 3012541 - RNA, 19 nt, Artificial Sequence
  Description of Artificial Sequence: Synthetic oligonucleotide
uuguccugcuguggcugcu

SEQ ID NO: 3012542 - RNA, 19 nt, Artificial Sequence
  Description of Artificial Sequence: Synthetic oligonucleotide
gaaaaccgguugagaaacu

SEQ ID NO: 3012543 - RNA, 19 nt, Artificial Sequence
  Description of Artificial Sequence: Synthetic oligonucleotide
cugccaguuucuccucaca

SEQ ID NO: 3012544 - RNA, 19 nt, Artificial Sequence
  Description of Artificial Sequence: Synthetic oligonucleotide
cacagcagauggggacacc

SEQ ID NO: 3012545 - RNA, 19 nt, Artificial Sequence
  Description of Artificial Sequence: Synthetic oligonucleotide
  modified_base (6)..(6): a, c, u, g, unknown or other
cgaagngaaaggucugcca

SEQ ID NO: 3012546 - RNA, 19 nt, Artificial Sequence
  Description of Artificial Sequence: Synthetic oligonucleotide
gccugggauagaugacagc

SEQ ID NO: 3012547 - RNA, 19 nt, Artificial Sequence
  Description of Artificial Sequence: Synthetic oligonucleotide
gucuaugccugaccccaua

SEQ ID NO: 3012548 - RNA, 19 nt, Artificial Sequence
  Description of Artificial Sequence: Synthetic oligonucleotide
auggggacaccggggcuca

SEQ ID NO: 3012549 - RNA, 19 nt, Artificial Sequence
  Description of Artificial Sequence: Synthetic oligonucleotide
ccaaaauauugagaguugu

SEQ ID NO: 3012550 - RNA, 19 nt, Artificial Sequence
  Description of Artificial Sequence: Synthetic oligonucleotide
ccucacaaacuguggaaaa

SEQ ID NO: 3012551 - RNA, 19 nt, Artificial Sequence
  Description of Artificial Sequence: Synthetic oligonucleotide
cugcucugcagugcuuuca

SEQ ID NO: 3012552 - RNA, 19 nt, Artificial Sequence
  Description of Artificial Sequence: Synthetic oligonucleotide
ggaagcccauccucaucca

SEQ ID NO: 3012553 - RNA, 19 nt, Artificial Sequence
  Description of Artificial Sequence: Synthetic oligonucleotide
ccugugguccagagucuug

SEQ ID NO: 3012554 - RNA, 19 nt, Artificial Sequence
  Description of Artificial Sequence: Synthetic oligonucleotide
cugcaccgugugcaaccac

SEQ ID NO: 3012555 - RNA, 19 nt, Artificial Sequence
  Description of Artificial Sequence: Synthetic oligonucleotide
cugugguccagagucuugu

SEQ ID NO: 3012556 - RNA, 19 nt, Artificial Sequence
  Description of Artificial Sequence: Synthetic oligonucleotide
ccucauccaucuccacagc

SEQ ID NO: 3012557 - RNA, 19 nt, Artificial Sequence
  Description of Artificial Sequence: Synthetic oligonucleotide
gugauucauuugggacagc

SEQ ID NO: 3012558 - RNA, 19 nt, Artificial Sequence
  Description of Artificial Sequence: Synthetic oligonucleotide
  modified_base (2)..(2): a, c, u, g, unknown or other
gngaaaggucugccaguuu

SEQ ID NO: 3012559 - RNA, 19 nt, Artificial Sequence
  Description of Artificial Sequence: Synthetic oligonucleotide
ggucaggucuaugccugac

SEQ ID NO: 3012560 - RNA, 19 nt, Artificial Sequence
  Description of Artificial Sequence: Synthetic oligonucleotide
gguugagaaacugcaccgu

SEQ ID NO: 3012561 - RNA, 19 nt, Artificial Sequence
  Description of Artificial Sequence: Synthetic oligonucleotide
ggggacaccggggcucagg

SEQ ID NO: 3012562 - RNA, 19 nt, Artificial Sequence
  Description of Artificial Sequence: Synthetic oligonucleotide
agcuggcaccuuggucagg

SEQ ID NO: 3012563 - RNA, 19 nt, Artificial Sequence
  Description of Artificial Sequence: Synthetic oligonucleotide
cuggcaccuuggucagguc

SEQ ID NO: 3012564 - RNA, 19 nt, Artificial Sequence
  Description of Artificial Sequence: Synthetic oligonucleotide
caccuuggucaggucuaug

SEQ ID NO: 3012565 - RNA, 19 nt, Artificial Sequence
  Description of Artificial Sequence: Synthetic oligonucleotide
ccauaagaggaagcccauc

SEQ ID NO: 3012566 - RNA, 19 nt, Artificial Sequence
  Description of Artificial Sequence: Synthetic oligonucleotide
uggcugcucugcagugcuu

SEQ ID NO: 3012567 - RNA, 19 nt, Artificial Sequence
  Description of Artificial Sequence: Synthetic oligonucleotide
gguccagagucuuguguau

SEQ ID NO: 3012568 - RNA, 19 nt, Artificial Sequence
  Description of Artificial Sequence: Synthetic oligonucleotide
caccgugugcaaccacaaa

SEQ ID NO: 3012569 - RNA, 19 nt, Artificial Sequence
  Description of Artificial Sequence: Synthetic oligonucleotide
gcucugcagugcuuucaga

SEQ ID NO: 3012570 - RNA, 19 nt, Artificial Sequence
  Description of Artificial Sequence: Synthetic oligonucleotide
acaccggggcucaggcaca

SEQ ID NO: 3012571 - RNA, 19 nt, Artificial Sequence
  Description of Artificial Sequence: Synthetic oligonucleotide
cucuaggccugggauagau

SEQ ID NO: 3012572 - RNA, 19 nt, Artificial Sequence
  Description of Artificial Sequence: Synthetic oligonucleotide
gugcaaccacaaaacuggu

SEQ ID NO: 3012573 - RNA, 19 nt, Artificial Sequence
  Description of Artificial Sequence: Synthetic oligonucleotide
gcuggcaccuuggucaggu

SEQ ID NO: 3012574 - RNA, 19 nt, Artificial Sequence
  Description of Artificial Sequence: Synthetic oligonucleotide
ccacagcagauggggacac

SEQ ID NO: 3012575 - RNA, 19 nt, Artificial Sequence
  Description of Artificial Sequence: Synthetic oligonucleotide
ccugaccccauaagaggaa

SEQ ID NO: 3012576 - RNA, 19 nt, Artificial Sequence
  Description of Artificial Sequence: Synthetic oligonucleotide
ggacaccggggcucaggca

SEQ ID NO: 3012577 - RNA, 19 nt, Artificial Sequence
  Description of Artificial Sequence: Synthetic oligonucleotide
uggggacaccggggcucag

SEQ ID NO: 3012578 - RNA, 19 nt, Artificial Sequence
  Description of Artificial Sequence: Synthetic oligonucleotide
guugaauagcuggcaccuu

SEQ ID NO: 3012579 - RNA, 19 nt, Artificial Sequence
  Description of Artificial Sequence: Synthetic oligonucleotide
gggacagcagugacacuua

SEQ ID NO: 3012580 - RNA, 19 nt, Artificial Sequence
  Description of Artificial Sequence: Synthetic oligonucleotide
accggggcucaggcacaag

SEQ ID NO: 3012581 - RNA, 19 nt, Artificial Sequence
  Description of Artificial Sequence: Synthetic oligonucleotide
guccagagucuuguguauu

SEQ ID NO: 3012582 - RNA, 19 nt, Artificial Sequence
  Description of Artificial Sequence: Synthetic oligonucleotide
gcaccgugugcaaccacaa

SEQ ID NO: 3012583 - RNA, 19 nt, Artificial Sequence
  Description of Artificial Sequence: Synthetic oligonucleotide
cgugugcaaccacaaaacu

SEQ ID NO: 3012584 - RNA, 19 nt, Artificial Sequence
  Description of Artificial Sequence: Synthetic oligonucleotide
cccauaagaggaagcccau

SEQ ID NO: 3012585 - RNA, 19 nt, Artificial Sequence
  Description of Artificial Sequence: Synthetic oligonucleotide
ccagagucuuguguauugu

SEQ ID NO: 3012586 - RNA, 19 nt, Artificial Sequence
  Description of Artificial Sequence: Synthetic oligonucleotide
ggcugcucugcagugcuuu

SEQ ID NO: 3012587 - RNA, 19 nt, Artificial Sequence
  Description of Artificial Sequence: Synthetic oligonucleotide
gcuuugcauccaaaauauu

SEQ ID NO: 3012588 - RNA, 19 nt, Artificial Sequence
  Description of Artificial Sequence: Synthetic oligonucleotide
caccggggcucaggcacaa

SEQ ID NO: 3012589 - RNA, 19 nt, Artificial Sequence
  Description of Artificial Sequence: Synthetic oligonucleotide
ggucuaugccugaccccau

SEQ ID NO: 3012590 - RNA, 19 nt, Artificial Sequence
  Description of Artificial Sequence: Synthetic oligonucleotide
gcaccuuggucaggucuau

SEQ ID NO: 3012591 - RNA, 19 nt, Artificial Sequence
  Description of Artificial Sequence: Synthetic oligonucleotide
ccucuaggccugggauaga

SEQ ID NO: 3012592 - RNA, 19 nt, Artificial Sequence
  Description of Artificial Sequence: Synthetic oligonucleotide
  modified_base (1)..(1): a, c, u, g, unknown or other
ngaaaggucugccaguuuc

SEQ ID NO: 3012593 - RNA, 19 nt, Artificial Sequence
  Description of Artificial Sequence: Synthetic oligonucleotide
uuuacuuuaacuacaaccg

SEQ ID NO: 3012594 - RNA, 19 nt, Artificial Sequence
  Description of Artificial Sequence: Synthetic oligonucleotide
ugauaaaguagacagcagg

SEQ ID NO: 3012595 - RNA, 19 nt, Artificial Sequence
  Description of Artificial Sequence: Synthetic oligonucleotide
aagcagauaaacguaaccc

SEQ ID NO: 3012596 - RNA, 19 nt, Artificial Sequence
  Description of Artificial Sequence: Synthetic oligonucleotide
uuaacuacaaccgucaucu

SEQ ID NO: 3012597 - RNA, 19 nt, Artificial Sequence
  Description of Artificial Sequence: Synthetic oligonucleotide
caucugauaaaguagacag

SEQ ID NO: 3012598 - RNA, 19 nt, Artificial Sequence
  Description of Artificial Sequence: Synthetic oligonucleotide
aacggaagcagauaaacgu

SEQ ID NO: 3012599 - RNA, 19 nt, Artificial Sequence
  Description of Artificial Sequence: Synthetic oligonucleotide
ugugauucggcucacaggu

SEQ ID NO: 3012600 - RNA, 19 nt, Artificial Sequence
  Description of Artificial Sequence: Synthetic oligonucleotide
aacagaagggccucugcgc

SEQ ID NO: 3012601 - RNA, 19 nt, Artificial Sequence
  Description of Artificial Sequence: Synthetic oligonucleotide
ucugauaaaguagacagca

SEQ ID NO: 3012602 - RNA, 19 nt, Artificial Sequence
  Description of Artificial Sequence: Synthetic oligonucleotide
uaaucuagcacauuuuacu

SEQ ID NO: 3012603 - RNA, 19 nt, Artificial Sequence
  Description of Artificial Sequence: Synthetic oligonucleotide
cauguuaccagaaugaaga

SEQ ID NO: 3012604 - RNA, 19 nt, Artificial Sequence
  Description of Artificial Sequence: Synthetic oligonucleotide
uauugucucuccaaccucg

SEQ ID NO: 3012605 - RNA, 19 nt, Artificial Sequence
  Description of Artificial Sequence: Synthetic oligonucleotide
aucuauguaguguacuugg

SEQ ID NO: 3012606 - RNA, 19 nt, Artificial Sequence
  Description of Artificial Sequence: Synthetic oligonucleotide
aaugaaggguccuguaauc

SEQ ID NO: 3012607 - RNA, 19 nt, Artificial Sequence
  Description of Artificial Sequence: Synthetic oligonucleotide
uuuacauccauacuguauu

SEQ ID NO: 3012608 - RNA, 19 nt, Artificial Sequence
  Description of Artificial Sequence: Synthetic oligonucleotide
uauguaguguacuuggcca

SEQ ID NO: 3012609 - RNA, 19 nt, Artificial Sequence
  Description of Artificial Sequence: Synthetic oligonucleotide
uguauugucucuccaaccu

SEQ ID NO: 3012610 - RNA, 19 nt, Artificial Sequence
  Description of Artificial Sequence: Synthetic oligonucleotide
guagcgaccauggagaacg

SEQ ID NO: 3012611 - RNA, 19 nt, Artificial Sequence
  Description of Artificial Sequence: Synthetic oligonucleotide
acuguauugucucuccaac

SEQ ID NO: 3012612 - RNA, 19 nt, Artificial Sequence
  Description of Artificial Sequence: Synthetic oligonucleotide
ucuccaaccucguaguagg

SEQ ID NO: 3012613 - RNA, 19 nt, Artificial Sequence
  Description of Artificial Sequence: Synthetic oligonucleotide
aacaccaccagaaagcgug

SEQ ID NO: 3012614 - RNA, 19 nt, Artificial Sequence
  Description of Artificial Sequence: Synthetic oligonucleotide
cacauuuuacuuuaacuac

SEQ ID NO: 3012615 - RNA, 19 nt, Artificial Sequence
  Description of Artificial Sequence: Synthetic oligonucleotide
aaaugaaggguccuguaau

SEQ ID NO: 3012616 - RNA, 19 nt, Artificial Sequence
  Description of Artificial Sequence: Synthetic oligonucleotide
agaacggaagcagauaaac

SEQ ID NO: 3012617 - RNA, 19 nt, Artificial Sequence
  Description of Artificial Sequence: Synthetic oligonucleotide
ucguccuugaguuccauag

SEQ ID NO: 3012618 - RNA, 19 nt, Artificial Sequence
  Description of Artificial Sequence: Synthetic oligonucleotide
aaaguagacagcaggaaca

SEQ ID NO: 3012619 - RNA, 19 nt, Artificial Sequence
  Description of Artificial Sequence: Synthetic oligonucleotide
agggccucugcgcagaugc

SEQ ID NO: 3012620 - RNA, 19 nt, Artificial Sequence
  Description of Artificial Sequence: Synthetic oligonucleotide
auccauacuguauugucuc

SEQ ID NO: 3012621 - RNA, 19 nt, Artificial Sequence
  Description of Artificial Sequence: Synthetic oligonucleotide
ugauucggcucacagguag

SEQ ID NO: 3012622 - RNA, 19 nt, Artificial Sequence
  Description of Artificial Sequence: Synthetic oligonucleotide
uacuuggccaaaugaaggg

SEQ ID NO: 3012623 - RNA, 19 nt, Artificial Sequence
  Description of Artificial Sequence: Synthetic oligonucleotide
ugaaauagggacccaugug

SEQ ID NO: 3012624 - RNA, 19 nt, Artificial Sequence
  Description of Artificial Sequence: Synthetic oligonucleotide
agcacauuuuacuuuaacu

SEQ ID NO: 3012625 - RNA, 19 nt, Artificial Sequence
  Description of Artificial Sequence: Synthetic oligonucleotide
gaagcagauaaacguaacc

SEQ ID NO: 3012626 - RNA, 19 nt, Artificial Sequence
  Description of Artificial Sequence: Synthetic oligonucleotide
aacuacaaccgucaucuga

SEQ ID NO: 3012627 - RNA, 19 nt, Artificial Sequence
  Description of Artificial Sequence: Synthetic oligonucleotide
uguaaucuagcacauuuua

SEQ ID NO: 3012628 - RNA, 19 nt, Artificial Sequence
  Description of Artificial Sequence: Synthetic oligonucleotide
aguuccauagcugcaaacg

SEQ ID NO: 3012629 - RNA, 19 nt, Artificial Sequence
  Description of Artificial Sequence: Synthetic oligonucleotide
ugugugauucggcucacag

SEQ ID NO: 3012630 - RNA, 19 nt, Artificial Sequence
  Description of Artificial Sequence: Synthetic oligonucleotide
guuaccagaaugaagagga

SEQ ID NO: 3012631 - RNA, 19 nt, Artificial Sequence
  Description of Artificial Sequence: Synthetic oligonucleotide
acagguagcgaccauggag

SEQ ID NO: 3012632 - RNA, 19 nt, Artificial Sequence
  Description of Artificial Sequence: Synthetic oligonucleotide
accagaaugaagaggaaac

SEQ ID NO: 3012633 - RNA, 19 nt, Artificial Sequence
  Description of Artificial Sequence: Synthetic oligonucleotide
acauccauacuguauuguc

SEQ ID NO: 3012634 - RNA, 19 nt, Artificial Sequence
  Description of Artificial Sequence: Synthetic oligonucleotide
aggaaacaccaccagaaag

SEQ ID NO: 3012635 - RNA, 19 nt, Artificial Sequence
  Description of Artificial Sequence: Synthetic oligonucleotide
gaaacaccaccagaaagcg

SEQ ID NO: 3012636 - RNA, 19 nt, Artificial Sequence
  Description of Artificial Sequence: Synthetic oligonucleotide
gaacagaagggccucugcg

SEQ ID NO: 3012637 - RNA, 19 nt, Artificial Sequence
  Description of Artificial Sequence: Synthetic oligonucleotide
uguuaccagaaugaagagg

SEQ ID NO: 3012638 - RNA, 19 nt, Artificial Sequence
  Description of Artificial Sequence: Synthetic oligonucleotide
ucacagguagcgaccaugg

SEQ ID NO: 3012639 - RNA, 19 nt, Artificial Sequence
  Description of Artificial Sequence: Synthetic oligonucleotide
uuuuacauccauacuguau

SEQ ID NO: 3012640 - RNA, 19 nt, Artificial Sequence
  Description of Artificial Sequence: Synthetic oligonucleotide
ucaucugaaauagggaccc

SEQ ID NO: 3012641 - RNA, 19 nt, Artificial Sequence
  Description of Artificial Sequence: Synthetic oligonucleotide
augcccaggaaacaccacc

SEQ ID NO: 3012642 - RNA, 19 nt, Artificial Sequence
  Description of Artificial Sequence: Synthetic oligonucleotide
aaucuagcacauuuuacuu

SEQ ID NO: 3012643 - RNA, 19 nt, Artificial Sequence
  Description of Artificial Sequence: Synthetic oligonucleotide
acagcaggaacagaagggc

SEQ ID NO: 3012644 - RNA, 19 nt, Artificial Sequence
  Description of Artificial Sequence: Synthetic oligonucleotide
uacuuuaacuacaaccguc

SEQ ID NO: 3012645 - RNA, 19 nt, Artificial Sequence
  Description of Artificial Sequence: Synthetic oligonucleotide
uuuaacuacaaccgucauc

SEQ ID NO: 3012646 - RNA, 19 nt, Artificial Sequence
  Description of Artificial Sequence: Synthetic oligonucleotide
cucguaguaggguuuaggc

SEQ ID NO: 3012647 - RNA, 19 nt, Artificial Sequence
  Description of Artificial Sequence: Synthetic oligonucleotide
cuauguaguguacuuggcc

SEQ ID NO: 3012648 - RNA, 19 nt, Artificial Sequence
  Description of Artificial Sequence: Synthetic oligonucleotide
aguguacuuggccaaauga

SEQ ID NO: 3012649 - RNA, 19 nt, Artificial Sequence
  Description of Artificial Sequence: Synthetic oligonucleotide
ucugaaauagggacccaug

SEQ ID NO: 3012650 - RNA, 19 nt, Artificial Sequence
  Description of Artificial Sequence: Synthetic oligonucleotide
agcagauaaacguaacccu

SEQ ID NO: 3012651 - RNA, 19 nt, Artificial Sequence
  Description of Artificial Sequence: Synthetic oligonucleotide
uccauagcugcaaacgcug

SEQ ID NO: 3012652 - RNA, 19 nt, Artificial Sequence
  Description of Artificial Sequence: Synthetic oligonucleotide
ucuagcacauuuuacuuua

SEQ ID NO: 3012653 - RNA, 19 nt, Artificial Sequence
  Description of Artificial Sequence: Synthetic oligonucleotide
gauaaaguagacagcagga

SEQ ID NO: 3012654 - RNA, 19 nt, Artificial Sequence
  Description of Artificial Sequence: Synthetic oligonucleotide
uuugcguucggcgcgagag

SEQ ID NO: 3012655 - RNA, 19 nt, Artificial Sequence
  Description of Artificial Sequence: Synthetic oligonucleotide
uuacuuuaacuacaaccgu

SEQ ID NO: 3012656 - RNA, 19 nt, Artificial Sequence
  Description of Artificial Sequence: Synthetic oligonucleotide
gagacuuugcguucggcgc

SEQ ID NO: 3012657 - RNA, 19 nt, Artificial Sequence
  Description of Artificial Sequence: Synthetic oligonucleotide
gaaauagggacccaugugu

SEQ ID NO: 3012658 - RNA, 19 nt, Artificial Sequence
  Description of Artificial Sequence: Synthetic oligonucleotide
accgucaucugaaauaggg

SEQ ID NO: 3012659 - RNA, 19 nt, Artificial Sequence
  Description of Artificial Sequence: Synthetic oligonucleotide
cauacuguauugucucucc

SEQ ID NO: 3012660 - RNA, 19 nt, Artificial Sequence
  Description of Artificial Sequence: Synthetic oligonucleotide
caggcaucugauaaaguag

SEQ ID NO: 3012661 - RNA, 19 nt, Artificial Sequence
  Description of Artificial Sequence: Synthetic oligonucleotide
guacuuggccaaaugaagg

SEQ ID NO: 3012662 - RNA, 19 nt, Artificial Sequence
  Description of Artificial Sequence: Synthetic oligonucleotide
aauagggacccauguguga

SEQ ID NO: 3012663 - RNA, 19 nt, Artificial Sequence
  Description of Artificial Sequence: Synthetic oligonucleotide
ucuauguaguguacuuggc

SEQ ID NO: 3012664 - RNA, 19 nt, Artificial Sequence
  Description of Artificial Sequence: Synthetic oligonucleotide
gaacggaagcagauaaacg

SEQ ID NO: 3012665 - RNA, 19 nt, Artificial Sequence
  Description of Artificial Sequence: Synthetic oligonucleotide
uuuaggcucguccuugagu

SEQ ID NO: 3012666 - RNA, 19 nt, Artificial Sequence
  Description of Artificial Sequence: Synthetic oligonucleotide
aaguagacagcaggaacag

SEQ ID NO: 3012667 - RNA, 19 nt, Artificial Sequence
  Description of Artificial Sequence: Synthetic oligonucleotide
uuaggcucguccuugaguu

SEQ ID NO: 3012668 - RNA, 19 nt, Artificial Sequence
  Description of Artificial Sequence: Synthetic oligonucleotide
acaggcaucugauaaagua

SEQ ID NO: 3012669 - RNA, 19 nt, Artificial Sequence
  Description of Artificial Sequence: Synthetic oligonucleotide
uuccauagcugcaaacgcu

SEQ ID NO: 3012670 - RNA, 19 nt, Artificial Sequence
  Description of Artificial Sequence: Synthetic oligonucleotide
ucacaggcaucugauaaag

SEQ ID NO: 3012671 - RNA, 19 nt, Artificial Sequence
  Description of Artificial Sequence: Synthetic oligonucleotide
uuggccaaaugaagggucc

SEQ ID NO: 3012672 - RNA, 19 nt, Artificial Sequence
  Description of Artificial Sequence: Synthetic oligonucleotide
auagcugcaaacgcugggg

SEQ ID NO: 3012673 - RNA, 19 nt, Artificial Sequence
  Description of Artificial Sequence: Synthetic oligonucleotide
guuccauagcugcaaacgc

SEQ ID NO: 3012674 - RNA, 19 nt, Artificial Sequence
  Description of Artificial Sequence: Synthetic oligonucleotide
uuacauccauacuguauug

SEQ ID NO: 3012675 - RNA, 19 nt, Artificial Sequence
  Description of Artificial Sequence: Synthetic oligonucleotide
aaauagggacccaugugug

SEQ ID NO: 3012676 - RNA, 19 nt, Artificial Sequence
  Description of Artificial Sequence: Synthetic oligonucleotide
acaaccgucaucugaaaua

SEQ ID NO: 3012677 - RNA, 19 nt, Artificial Sequence
  Description of Artificial Sequence: Synthetic oligonucleotide
agacuuugcguucggcgcg

SEQ ID NO: 3012678 - RNA, 19 nt, Artificial Sequence
  Description of Artificial Sequence: Synthetic oligonucleotide
gguccuguaaucuagcaca

SEQ ID NO: 3012679 - RNA, 19 nt, Artificial Sequence
  Description of Artificial Sequence: Synthetic oligonucleotide
aucugauaaaguagacagc

SEQ ID NO: 3012680 - RNA, 19 nt, Artificial Sequence
  Description of Artificial Sequence: Synthetic oligonucleotide
ggaaacaccaccagaaagc

SEQ ID NO: 3012681 - RNA, 19 nt, Artificial Sequence
  Description of Artificial Sequence: Synthetic oligonucleotide
gaaggguccuguaaucuag

SEQ ID NO: 3012682 - RNA, 19 nt, Artificial Sequence
  Description of Artificial Sequence: Synthetic oligonucleotide
ucguaguaggguuuaggcu

SEQ ID NO: 3012683 - RNA, 19 nt, Artificial Sequence
  Description of Artificial Sequence: Synthetic oligonucleotide
cuguauugucucuccaacc

SEQ ID NO: 3012684 - RNA, 19 nt, Artificial Sequence
  Description of Artificial Sequence: Synthetic oligonucleotide
ggagacuuugcguucggcg

SEQ ID NO: 3012685 - RNA, 19 nt, Artificial Sequence
  Description of Artificial Sequence: Synthetic oligonucleotide
acuuuaacuacaaccguca

SEQ ID NO: 3012686 - RNA, 19 nt, Artificial Sequence
  Description of Artificial Sequence: Synthetic oligonucleotide
ugcgcagaugcccaggaaa

SEQ ID NO: 3012687 - RNA, 19 nt, Artificial Sequence
  Description of Artificial Sequence: Synthetic oligonucleotide
uaggguuuaggcucguccu

SEQ ID NO: 3012688 - RNA, 19 nt, Artificial Sequence
  Description of Artificial Sequence: Synthetic oligonucleotide
gaccauggagaacggaagc

SEQ ID NO: 3012689 - RNA, 19 nt, Artificial Sequence
  Description of Artificial Sequence: Synthetic oligonucleotide
acauuuuacuuuaacuaca

SEQ ID NO: 3012690 - RNA, 19 nt, Artificial Sequence
  Description of Artificial Sequence: Synthetic oligonucleotide
cauagcugcaaacgcuggg

SEQ ID NO: 3012691 - RNA, 19 nt, Artificial Sequence
  Description of Artificial Sequence: Synthetic oligonucleotide
caaccgucaucugaaauag

SEQ ID NO: 3012692 - RNA, 19 nt, Artificial Sequence
  Description of Artificial Sequence: Synthetic oligonucleotide
guucacaggcaucugauaa

SEQ ID NO: 3012693 - RNA, 19 nt, Artificial Sequence
  Description of Artificial Sequence: Synthetic oligonucleotide
cugauaaaguagacagcag

SEQ ID NO: 3012694 - RNA, 19 nt, Artificial Sequence
  Description of Artificial Sequence: Synthetic oligonucleotide
uccuugaguuccauagcug

SEQ ID NO: 3012695 - RNA, 19 nt, Artificial Sequence
  Description of Artificial Sequence: Synthetic oligonucleotide
auguuaccagaaugaagag

SEQ ID NO: 3012696 - RNA, 19 nt, Artificial Sequence
  Description of Artificial Sequence: Synthetic oligonucleotide
cuuggccaaaugaaggguc

SEQ ID NO: 3012697 - RNA, 19 nt, Artificial Sequence
  Description of Artificial Sequence: Synthetic oligonucleotide
gugugauucggcucacagg

SEQ ID NO: 3012698 - RNA, 19 nt, Artificial Sequence
  Description of Artificial Sequence: Synthetic oligonucleotide
aaggguccuguaaucuagc

SEQ ID NO: 3012699 - RNA, 19 nt, Artificial Sequence
  Description of Artificial Sequence: Synthetic oligonucleotide
aggcucguccuugaguucc

SEQ ID NO: 3012700 - RNA, 19 nt, Artificial Sequence
  Description of Artificial Sequence: Synthetic oligonucleotide
uaguguacuuggccaaaug

SEQ ID NO: 3012701 - RNA, 19 nt, Artificial Sequence
  Description of Artificial Sequence: Synthetic oligonucleotide
gucaucugaaauagggacc

SEQ ID NO: 3012702 - RNA, 19 nt, Artificial Sequence
  Description of Artificial Sequence: Synthetic oligonucleotide
guaaucuagcacauuuuac

SEQ ID NO: 3012703 - RNA, 19 nt, Artificial Sequence
  Description of Artificial Sequence: Synthetic oligonucleotide
guagacagcaggaacagaa

SEQ ID NO: 3012704 - RNA, 19 nt, Artificial Sequence
  Description of Artificial Sequence: Synthetic oligonucleotide
acagaagggccucugcgca

SEQ ID NO: 3012705 - RNA, 19 nt, Artificial Sequence
  Description of Artificial Sequence: Synthetic oligonucleotide
gcacauuuuacuuuaacua

SEQ ID NO: 3012706 - RNA, 19 nt, Artificial Sequence
  Description of Artificial Sequence: Synthetic oligonucleotide
uucacaggcaucugauaaa

SEQ ID NO: 3012707 - RNA, 19 nt, Artificial Sequence
  Description of Artificial Sequence: Synthetic oligonucleotide
cauuuuacuuuaacuacaa

SEQ ID NO: 3012708 - RNA, 19 nt, Artificial Sequence
  Description of Artificial Sequence: Synthetic oligonucleotide
cagguagcgaccauggaga

SEQ ID NO: 3012709 - RNA, 19 nt, Artificial Sequence
  Description of Artificial Sequence: Synthetic oligonucleotide
acuacaaccgucaucugaa

SEQ ID NO: 3012710 - RNA, 19 nt, Artificial Sequence
  Description of Artificial Sequence: Synthetic oligonucleotide
uacaaccgucaucugaaau

SEQ ID NO: 3012711 - RNA, 19 nt, Artificial Sequence
  Description of Artificial Sequence: Synthetic oligonucleotide
auaaaguagacagcaggaa

SEQ ID NO: 3012712 - RNA, 19 nt, Artificial Sequence
  Description of Artificial Sequence: Synthetic oligonucleotide
ucggcucacagguagcgac

SEQ ID NO: 3012713 - RNA, 19 nt, Artificial Sequence
  Description of Artificial Sequence: Synthetic oligonucleotide
ccuugaguuccauagcugc

SEQ ID NO: 3012714 - RNA, 19 nt, Artificial Sequence
  Description of Artificial Sequence: Synthetic oligonucleotide
guaguaggguuuaggcucg

SEQ ID NO: 3012715 - RNA, 19 nt, Artificial Sequence
  Description of Artificial Sequence: Synthetic oligonucleotide
guaguucacaggcaucuga

SEQ ID NO: 3012716 - RNA, 19 nt, Artificial Sequence
  Description of Artificial Sequence: Synthetic oligonucleotide
uaccagaaugaagaggaaa

SEQ ID NO: 3012717 - RNA, 19 nt, Artificial Sequence
  Description of Artificial Sequence: Synthetic oligonucleotide
cagaugcccaggaaacacc

SEQ ID NO: 3012718 - RNA, 19 nt, Artificial Sequence
  Description of Artificial Sequence: Synthetic oligonucleotide
ugaaggguccuguaaucua

SEQ ID NO: 3012719 - RNA, 19 nt, Artificial Sequence
  Description of Artificial Sequence: Synthetic oligonucleotide
auucggcucacagguagcg

SEQ ID NO: 3012720 - RNA, 19 nt, Artificial Sequence
  Description of Artificial Sequence: Synthetic oligonucleotide
ucugcgcagaugcccagga

SEQ ID NO: 3012721 - RNA, 19 nt, Artificial Sequence
  Description of Artificial Sequence: Synthetic oligonucleotide
aucuagcacauuuuacuuu

SEQ ID NO: 3012722 - RNA, 19 nt, Artificial Sequence
  Description of Artificial Sequence: Synthetic oligonucleotide
cguaguaggguuuaggcuc

SEQ ID NO: 3012723 - RNA, 19 nt, Artificial Sequence
  Description of Artificial Sequence: Synthetic oligonucleotide
acccaugugugauucggcu

SEQ ID NO: 3012724 - RNA, 19 nt, Artificial Sequence
  Description of Artificial Sequence: Synthetic oligonucleotide
uugaguuccauagcugcaa

SEQ ID NO: 3012725 - RNA, 19 nt, Artificial Sequence
  Description of Artificial Sequence: Synthetic oligonucleotide
agauaaacguaacccuuuu

SEQ ID NO: 3012726 - RNA, 19 nt, Artificial Sequence
  Description of Artificial Sequence: Synthetic oligonucleotide
caucuauguaguguacuug

SEQ ID NO: 3012727 - RNA, 19 nt, Artificial Sequence
  Description of Artificial Sequence: Synthetic oligonucleotide
uacauccauacuguauugu

SEQ ID NO: 3012728 - RNA, 19 nt, Artificial Sequence
  Description of Artificial Sequence: Synthetic oligonucleotide
cagcaggaacagaagggcc

SEQ ID NO: 3012729 - RNA, 19 nt, Artificial Sequence
  Description of Artificial Sequence: Synthetic oligonucleotide
ugaguuccauagcugcaaa

SEQ ID NO: 3012730 - RNA, 19 nt, Artificial Sequence
  Description of Artificial Sequence: Synthetic oligonucleotide
uugcguucggcgcgagagg

SEQ ID NO: 3012731 - RNA, 19 nt, Artificial Sequence
  Description of Artificial Sequence: Synthetic oligonucleotide
uccauacuguauugucucu

SEQ ID NO: 3012732 - RNA, 19 nt, Artificial Sequence
  Description of Artificial Sequence: Synthetic oligonucleotide
cucuccaaccucguaguag

SEQ ID NO: 3012733 - RNA, 19 nt, Artificial Sequence
  Description of Artificial Sequence: Synthetic oligonucleotide
aggcaucugauaaaguaga

SEQ ID NO: 3012734 - RNA, 19 nt, Artificial Sequence
  Description of Artificial Sequence: Synthetic oligonucleotide
auguaguguacuuggccaa

SEQ ID NO: 3012735 - RNA, 19 nt, Artificial Sequence
  Description of Artificial Sequence: Synthetic oligonucleotide
augaaggguccuguaaucu

SEQ ID NO: 3012736 - RNA, 19 nt, Artificial Sequence
  Description of Artificial Sequence: Synthetic oligonucleotide
gaguuccauagcugcaaac

SEQ ID NO: 3012737 - RNA, 19 nt, Artificial Sequence
  Description of Artificial Sequence: Synthetic oligonucleotide
ggagaacggaagcagauaa

SEQ ID NO: 3012738 - RNA, 19 nt, Artificial Sequence
  Description of Artificial Sequence: Synthetic oligonucleotide
agggacccaugugugauuc

SEQ ID NO: 3012739 - RNA, 19 nt, Artificial Sequence
  Description of Artificial Sequence: Synthetic oligonucleotide
caaaugaaggguccuguaa

SEQ ID NO: 3012740 - RNA, 19 nt, Artificial Sequence
  Description of Artificial Sequence: Synthetic oligonucleotide
cgucaucugaaauagggac

SEQ ID NO: 3012741 - RNA, 19 nt, Artificial Sequence
  Description of Artificial Sequence: Synthetic oligonucleotide
uuaccagaaugaagaggaa

SEQ ID NO: 3012742 - RNA, 19 nt, Artificial Sequence
  Description of Artificial Sequence: Synthetic oligonucleotide
guauugucucuccaaccuc

SEQ ID NO: 3012743 - RNA, 19 nt, Artificial Sequence
  Description of Artificial Sequence: Synthetic oligonucleotide
cuugaguuccauagcugca

SEQ ID NO: 3012744 - RNA, 19 nt, Artificial Sequence
  Description of Artificial Sequence: Synthetic oligonucleotide
ugcguucggcgcgagaggc

SEQ ID NO: 3012745 - RNA, 19 nt, Artificial Sequence
  Description of Artificial Sequence: Synthetic oligonucleotide
agcaggaacagaagggccu

SEQ ID NO: 3012746 - RNA, 19 nt, Artificial Sequence
  Description of Artificial Sequence: Synthetic oligonucleotide
cucacagguagcgaccaug

SEQ ID NO: 3012747 - RNA, 19 nt, Artificial Sequence
  Description of Artificial Sequence: Synthetic oligonucleotide
accaccagaaagcgugggu

SEQ ID NO: 3012748 - RNA, 19 nt, Artificial Sequence
  Description of Artificial Sequence: Synthetic oligonucleotide
accauggagaacggaagca

SEQ ID NO: 3012749 - RNA, 19 nt, Artificial Sequence
  Description of Artificial Sequence: Synthetic oligonucleotide
guuuaggcucguccuugag

SEQ ID NO: 3012750 - RNA, 19 nt, Artificial Sequence
  Description of Artificial Sequence: Synthetic oligonucleotide
auagggacccaugugugau

SEQ ID NO: 3012751 - RNA, 19 nt, Artificial Sequence
  Description of Artificial Sequence: Synthetic oligonucleotide
aagcgugggucuuccuccu

SEQ ID NO: 3012752 - RNA, 19 nt, Artificial Sequence
  Description of Artificial Sequence: Synthetic oligonucleotide
uguaguguacuuggccaaa

SEQ ID NO: 3012753 - RNA, 19 nt, Artificial Sequence
  Description of Artificial Sequence: Synthetic oligonucleotide
uccaaccucguaguagggu

SEQ ID NO: 3012754 - RNA, 19 nt, Artificial Sequence
  Description of Artificial Sequence: Synthetic oligonucleotide
ucuuccuccugcggcgggg

SEQ ID NO: 3012755 - RNA, 19 nt, Artificial Sequence
  Description of Artificial Sequence: Synthetic oligonucleotide
ggacccaugugugauucgg

SEQ ID NO: 3012756 - RNA, 19 nt, Artificial Sequence
  Description of Artificial Sequence: Synthetic oligonucleotide
aaccgucaucugaaauagg

SEQ ID NO: 3012757 - RNA, 19 nt, Artificial Sequence
  Description of Artificial Sequence: Synthetic oligonucleotide
gcauguuaccagaaugaag

SEQ ID NO: 3012758 - RNA, 19 nt, Artificial Sequence
  Description of Artificial Sequence: Synthetic oligonucleotide
gauucggcucacagguagc

SEQ ID NO: 3012759 - RNA, 19 nt, Artificial Sequence
  Description of Artificial Sequence: Synthetic oligonucleotide
aucugaaauagggacccau

SEQ ID NO: 3012760 - RNA, 19 nt, Artificial Sequence
  Description of Artificial Sequence: Synthetic oligonucleotide
cauccauacuguauugucu

SEQ ID NO: 3012761 - RNA, 19 nt, Artificial Sequence
  Description of Artificial Sequence: Synthetic oligonucleotide
guccuugaguuccauagcu

SEQ ID NO: 3012762 - RNA, 19 nt, Artificial Sequence
  Description of Artificial Sequence: Synthetic oligonucleotide
cugaaauagggacccaugu

SEQ ID NO: 3012763 - RNA, 19 nt, Artificial Sequence
  Description of Artificial Sequence: Synthetic oligonucleotide
aaacaccaccagaaagcgu

SEQ ID NO: 3012764 - RNA, 19 nt, Artificial Sequence
  Description of Artificial Sequence: Synthetic oligonucleotide
cagaaagcgugggucuucc

SEQ ID NO: 3012765 - RNA, 19 nt, Artificial Sequence
  Description of Artificial Sequence: Synthetic oligonucleotide
cuccaaccucguaguaggg

SEQ ID NO: 3012766 - RNA, 19 nt, Artificial Sequence
  Description of Artificial Sequence: Synthetic oligonucleotide
aguucacaggcaucugaua

SEQ ID NO: 3012767 - RNA, 19 nt, Artificial Sequence
  Description of Artificial Sequence: Synthetic oligonucleotide
uaacuacaaccgucaucug

SEQ ID NO: 3012768 - RNA, 19 nt, Artificial Sequence
  Description of Artificial Sequence: Synthetic oligonucleotide
ggaacagaagggccucugc

SEQ ID NO: 3012769 - RNA, 19 nt, Artificial Sequence
  Description of Artificial Sequence: Synthetic oligonucleotide
uagcgaccauggagaacgg

SEQ ID NO: 3012770 - RNA, 19 nt, Artificial Sequence
  Description of Artificial Sequence: Synthetic oligonucleotide
uucggcgcgagaggcgccg

SEQ ID NO: 3012771 - RNA, 19 nt, Artificial Sequence
  Description of Artificial Sequence: Synthetic oligonucleotide
ccaggaaacaccaccagaa

SEQ ID NO: 3012772 - RNA, 19 nt, Artificial Sequence
  Description of Artificial Sequence: Synthetic oligonucleotide
gacccaugugugauucggc

SEQ ID NO: 3012773 - RNA, 19 nt, Artificial Sequence
  Description of Artificial Sequence: Synthetic oligonucleotide
gugggucuuccuccugcgg

SEQ ID NO: 3012774 - RNA, 19 nt, Artificial Sequence
  Description of Artificial Sequence: Synthetic oligonucleotide
uggagaacggaagcagaua

SEQ ID NO: 3012775 - RNA, 19 nt, Artificial Sequence
  Description of Artificial Sequence: Synthetic oligonucleotide
ggguccuguaaucuagcac

SEQ ID NO: 3012776 - RNA, 19 nt, Artificial Sequence
  Description of Artificial Sequence: Synthetic oligonucleotide
cagaagggccucugcgcag

SEQ ID NO: 3012777 - RNA, 19 nt, Artificial Sequence
  Description of Artificial Sequence: Synthetic oligonucleotide
aguaggguuuaggcucguc

SEQ ID NO: 3012778 - RNA, 19 nt, Artificial Sequence
  Description of Artificial Sequence: Synthetic oligonucleotide
ccggcauguuaccagaaug

SEQ ID NO: 3012779 - RNA, 19 nt, Artificial Sequence
  Description of Artificial Sequence: Synthetic oligonucleotide
gcaucugauaaaguagaca

SEQ ID NO: 3012780 - RNA, 19 nt, Artificial Sequence
  Description of Artificial Sequence: Synthetic oligonucleotide
aggaacagaagggccucug

SEQ ID NO: 3012781 - RNA, 19 nt, Artificial Sequence
  Description of Artificial Sequence: Synthetic oligonucleotide
ucucuccaaccucguagua

SEQ ID NO: 3012782 - RNA, 19 nt, Artificial Sequence
  Description of Artificial Sequence: Synthetic oligonucleotide
acggaagcagauaaacgua

SEQ ID NO: 3012783 - RNA, 19 nt, Artificial Sequence
  Description of Artificial Sequence: Synthetic oligonucleotide
aggguuuaggcucguccuu

SEQ ID NO: 3012784 - RNA, 19 nt, Artificial Sequence
  Description of Artificial Sequence: Synthetic oligonucleotide
ugcggcggggagacuuugc

SEQ ID NO: 3012785 - RNA, 19 nt, Artificial Sequence
  Description of Artificial Sequence: Synthetic oligonucleotide
uugucucuccaaccucgua

SEQ ID NO: 3012786 - RNA, 19 nt, Artificial Sequence
  Description of Artificial Sequence: Synthetic oligonucleotide
acaccaccagaaagcgugg

SEQ ID NO: 3012787 - RNA, 19 nt, Artificial Sequence
  Description of Artificial Sequence: Synthetic oligonucleotide
aguagacagcaggaacaga

SEQ ID NO: 3012788 - RNA, 19 nt, Artificial Sequence
  Description of Artificial Sequence: Synthetic oligonucleotide
ggaagcagauaaacguaac

SEQ ID NO: 3012789 - RNA, 19 nt, Artificial Sequence
  Description of Artificial Sequence: Synthetic oligonucleotide
ccauagcugcaaacgcugg

SEQ ID NO: 3012790 - RNA, 19 nt, Artificial Sequence
  Description of Artificial Sequence: Synthetic oligonucleotide
uggccaaaugaaggguccu

SEQ ID NO: 3012791 - RNA, 19 nt, Artificial Sequence
  Description of Artificial Sequence: Synthetic oligonucleotide
gcagaugcccaggaaacac

SEQ ID NO: 3012792 - RNA, 19 nt, Artificial Sequence
  Description of Artificial Sequence: Synthetic oligonucleotide
ccauggagaacggaagcag

SEQ ID NO: 3012793 - RNA, 19 nt, Artificial Sequence
  Description of Artificial Sequence: Synthetic oligonucleotide
ccaugugugauucggcuca

SEQ ID NO: 3012794 - RNA, 19 nt, Artificial Sequence
  Description of Artificial Sequence: Synthetic oligonucleotide
agaagggccucugcgcaga

SEQ ID NO: 3012795 - RNA, 19 nt, Artificial Sequence
  Description of Artificial Sequence: Synthetic oligonucleotide
uucggcucacagguagcga

SEQ ID NO: 3012796 - RNA, 19 nt, Artificial Sequence
  Description of Artificial Sequence: Synthetic oligonucleotide
gagaacggaagcagauaaa

SEQ ID NO: 3012797 - RNA, 19 nt, Artificial Sequence
  Description of Artificial Sequence: Synthetic oligonucleotide
agaggcgccgccggcaugu

SEQ ID NO: 3012798 - RNA, 19 nt, Artificial Sequence
  Description of Artificial Sequence: Synthetic oligonucleotide
agaaagcgugggucuuccu

SEQ ID NO: 3012799 - RNA, 19 nt, Artificial Sequence
  Description of Artificial Sequence: Synthetic oligonucleotide
agguagcgaccauggagaa

SEQ ID NO: 3012800 - RNA, 19 nt, Artificial Sequence
  Description of Artificial Sequence: Synthetic oligonucleotide
gcggcggggagacuuugcg

SEQ ID NO: 3012801 - RNA, 19 nt, Artificial Sequence
  Description of Artificial Sequence: Synthetic oligonucleotide
caccaccagaaagcguggg

SEQ ID NO: 3012802 - RNA, 19 nt, Artificial Sequence
  Description of Artificial Sequence: Synthetic oligonucleotide
auugucucuccaaccucgu

SEQ ID NO: 3012803 - RNA, 19 nt, Artificial Sequence
  Description of Artificial Sequence: Synthetic oligonucleotide
caggaaacaccaccagaaa

SEQ ID NO: 3012804 - RNA, 19 nt, Artificial Sequence
  Description of Artificial Sequence: Synthetic oligonucleotide
cucugcgcagaugcccagg

SEQ ID NO: 3012805 - RNA, 19 nt, Artificial Sequence
  Description of Artificial Sequence: Synthetic oligonucleotide
gucuuccuccugcggcggg

SEQ ID NO: 3012806 - RNA, 19 nt, Artificial Sequence
  Description of Artificial Sequence: Synthetic oligonucleotide
uuccuccugcggcggggag

SEQ ID NO: 3012807 - RNA, 19 nt, Artificial Sequence
  Description of Artificial Sequence: Synthetic oligonucleotide
ggguuuaggcucguccuug

SEQ ID NO: 3012808 - RNA, 19 nt, Artificial Sequence
  Description of Artificial Sequence: Synthetic oligonucleotide
cagauaaacguaacccuuu

SEQ ID NO: 3012809 - RNA, 19 nt, Artificial Sequence
  Description of Artificial Sequence: Synthetic oligonucleotide
cgaccauggagaacggaag

SEQ ID NO: 3012810 - RNA, 19 nt, Artificial Sequence
  Description of Artificial Sequence: Synthetic oligonucleotide
uaggcucguccuugaguuc

SEQ ID NO: 3012811 - RNA, 19 nt, Artificial Sequence
  Description of Artificial Sequence: Synthetic oligonucleotide
ccucguaguaggguuuagg

SEQ ID NO: 3012812 - RNA, 19 nt, Artificial Sequence
  Description of Artificial Sequence: Synthetic oligonucleotide
ggcaucugauaaaguagac

SEQ ID NO: 3012813 - RNA, 19 nt, Artificial Sequence
  Description of Artificial Sequence: Synthetic oligonucleotide
uccugcggcggggagacuu

SEQ ID NO: 3012814 - RNA, 19 nt, Artificial Sequence
  Description of Artificial Sequence: Synthetic oligonucleotide
uccuccugcggcggggaga

SEQ ID NO: 3012815 - RNA, 19 nt, Artificial Sequence
  Description of Artificial Sequence: Synthetic oligonucleotide
gccgccggcauguuaccag

SEQ ID NO: 3012816 - RNA, 19 nt, Artificial Sequence
  Description of Artificial Sequence: Synthetic oligonucleotide
uagggacccaugugugauu

SEQ ID NO: 3012817 - RNA, 19 nt, Artificial Sequence
  Description of Artificial Sequence: Synthetic oligonucleotide
aagggccucugcgcagaug

SEQ ID NO: 3012818 - RNA, 19 nt, Artificial Sequence
  Description of Artificial Sequence: Synthetic oligonucleotide
gguuuaggcucguccuuga

SEQ ID NO: 3012819 - RNA, 19 nt, Artificial Sequence
  Description of Artificial Sequence: Synthetic oligonucleotide
caugugugauucggcucac

SEQ ID NO: 3012820 - RNA, 19 nt, Artificial Sequence
  Description of Artificial Sequence: Synthetic oligonucleotide
cuguaaucuagcacauuuu

SEQ ID NO: 3012821 - RNA, 19 nt, Artificial Sequence
  Description of Artificial Sequence: Synthetic oligonucleotide
ccuguaaucuagcacauuu

SEQ ID NO: 3012822 - RNA, 19 nt, Artificial Sequence
  Description of Artificial Sequence: Synthetic oligonucleotide
ccaccagaaagcguggguc

SEQ ID NO: 3012823 - RNA, 19 nt, Artificial Sequence
  Description of Artificial Sequence: Synthetic oligonucleotide
gcgugggucuuccuccugc

SEQ ID NO: 3012824 - RNA, 19 nt, Artificial Sequence
  Description of Artificial Sequence: Synthetic oligonucleotide
caccagaaagcgugggucu

SEQ ID NO: 3012825 - RNA, 19 nt, Artificial Sequence
  Description of Artificial Sequence: Synthetic oligonucleotide
gguaguucacaggcaucug

SEQ ID NO: 3012826 - RNA, 19 nt, Artificial Sequence
  Description of Artificial Sequence: Synthetic oligonucleotide
gacuuugcguucggcgcga

SEQ ID NO: 3012827 - RNA, 19 nt, Artificial Sequence
  Description of Artificial Sequence: Synthetic oligonucleotide
gggacccaugugugauucg

SEQ ID NO: 3012828 - RNA, 19 nt, Artificial Sequence
  Description of Artificial Sequence: Synthetic oligonucleotide
cuacaaccgucaucugaaa

SEQ ID NO: 3012829 - RNA, 19 nt, Artificial Sequence
  Description of Artificial Sequence: Synthetic oligonucleotide
agcgugggucuuccuccug

SEQ ID NO: 3012830 - RNA, 19 nt, Artificial Sequence
  Description of Artificial Sequence: Synthetic oligonucleotide
cccaugugugauucggcuc

SEQ ID NO: 3012831 - RNA, 19 nt, Artificial Sequence
  Description of Artificial Sequence: Synthetic oligonucleotide
uccuguaaucuagcacauu

SEQ ID NO: 3012832 - RNA, 19 nt, Artificial Sequence
  Description of Artificial Sequence: Synthetic oligonucleotide
ggguaguucacaggcaucu

SEQ ID NO: 3012833 - RNA, 19 nt, Artificial Sequence
  Description of Artificial Sequence: Synthetic oligonucleotide
ggccaaaugaaggguccug

SEQ ID NO: 3012834 - RNA, 19 nt, Artificial Sequence
  Description of Artificial Sequence: Synthetic oligonucleotide
gcgaccauggagaacggaa

SEQ ID NO: 3012835 - RNA, 19 nt, Artificial Sequence
  Description of Artificial Sequence: Synthetic oligonucleotide
ggggagacuuugcguucgg

SEQ ID NO: 3012836 - RNA, 19 nt, Artificial Sequence
  Description of Artificial Sequence: Synthetic oligonucleotide
accucguaguaggguuuag

SEQ ID NO: 3012837 - RNA, 19 nt, Artificial Sequence
  Description of Artificial Sequence: Synthetic oligonucleotide
accagaaagcgugggucuu

SEQ ID NO: 3012838 - RNA, 19 nt, Artificial Sequence
  Description of Artificial Sequence: Synthetic oligonucleotide
cuuuaacuacaaccgucau

SEQ ID NO: 3012839 - RNA, 19 nt, Artificial Sequence
  Description of Artificial Sequence: Synthetic oligonucleotide
gcgcagaugcccaggaaac

SEQ ID NO: 3012840 - RNA, 19 nt, Artificial Sequence
  Description of Artificial Sequence: Synthetic oligonucleotide
ccgucaucugaaauaggga

SEQ ID NO: 3012841 - RNA, 19 nt, Artificial Sequence
  Description of Artificial Sequence: Synthetic oligonucleotide
ggcgccgccggcauguuac

SEQ ID NO: 3012842 - RNA, 19 nt, Artificial Sequence
  Description of Artificial Sequence: Synthetic oligonucleotide
agcgaccauggagaacgga

SEQ ID NO: 3012843 - RNA, 19 nt, Artificial Sequence
  Description of Artificial Sequence: Synthetic oligonucleotide
ggccucugcgcagaugccc

SEQ ID NO: 3012844 - RNA, 19 nt, Artificial Sequence
  Description of Artificial Sequence: Synthetic oligonucleotide
cggcauguuaccagaauga

SEQ ID NO: 3012845 - RNA, 19 nt, Artificial Sequence
  Description of Artificial Sequence: Synthetic oligonucleotide
ggucuuccuccugcggcgg

SEQ ID NO: 3012846 - RNA, 19 nt, Artificial Sequence
  Description of Artificial Sequence: Synthetic oligonucleotide
cguccuugaguuccauagc

SEQ ID NO: 3012847 - RNA, 19 nt, Artificial Sequence
  Description of Artificial Sequence: Synthetic oligonucleotide
gagaggcgccgccggcaug

SEQ ID NO: 3012848 - RNA, 19 nt, Artificial Sequence
  Description of Artificial Sequence: Synthetic oligonucleotide
cacagguagcgaccaugga

SEQ ID NO: 3012849 - RNA, 19 nt, Artificial Sequence
  Description of Artificial Sequence: Synthetic oligonucleotide
augugugauucggcucaca

SEQ ID NO: 3012850 - RNA, 19 nt, Artificial Sequence
  Description of Artificial Sequence: Synthetic oligonucleotide
cgugggucuuccuccugcg

SEQ ID NO: 3012851 - RNA, 19 nt, Artificial Sequence
  Description of Artificial Sequence: Synthetic oligonucleotide
gguagcgaccauggagaac

SEQ ID NO: 3012852 - RNA, 19 nt, Artificial Sequence
  Description of Artificial Sequence: Synthetic oligonucleotide
cccaggaaacaccaccaga

SEQ ID NO: 3012853 - RNA, 19 nt, Artificial Sequence
  Description of Artificial Sequence: Synthetic oligonucleotide
gcagauaaacguaacccuu

SEQ ID NO: 3012854 - RNA, 19 nt, Artificial Sequence
  Description of Artificial Sequence: Synthetic oligonucleotide
uaguaggguuuaggcucgu

SEQ ID NO: 3012855 - RNA, 19 nt, Artificial Sequence
  Description of Artificial Sequence: Synthetic oligonucleotide
acuuugcguucggcgcgag

SEQ ID NO: 3012856 - RNA, 19 nt, Artificial Sequence
  Description of Artificial Sequence: Synthetic oligonucleotide
cuuugcguucggcgcgaga

SEQ ID NO: 3012857 - RNA, 19 nt, Artificial Sequence
  Description of Artificial Sequence: Synthetic oligonucleotide
ggcgcgagaggcgccgccg

SEQ ID NO: 3012858 - RNA, 19 nt, Artificial Sequence
  Description of Artificial Sequence: Synthetic oligonucleotide
ggcggggagacuuugcguu

SEQ ID NO: 3012859 - RNA, 19 nt, Artificial Sequence
  Description of Artificial Sequence: Synthetic oligonucleotide
cggaagcagauaaacguaa

SEQ ID NO: 3012860 - RNA, 19 nt, Artificial Sequence
  Description of Artificial Sequence: Synthetic oligonucleotide
cucguccuugaguuccaua

SEQ ID NO: 3012861 - RNA, 19 nt, Artificial Sequence
  Description of Artificial Sequence: Synthetic oligonucleotide
gggagacuuugcguucggc

SEQ ID NO: 3012862 - RNA, 19 nt, Artificial Sequence
  Description of Artificial Sequence: Synthetic oligonucleotide
cacaggcaucugauaaagu

SEQ ID NO: 3012863 - RNA, 19 nt, Artificial Sequence
  Description of Artificial Sequence: Synthetic oligonucleotide
ggcucacagguagcgacca

SEQ ID NO: 3012864 - RNA, 19 nt, Artificial Sequence
  Description of Artificial Sequence: Synthetic oligonucleotide
caucugaaauagggaccca

SEQ ID NO: 3012865 - RNA, 19 nt, Artificial Sequence
  Description of Artificial Sequence: Synthetic oligonucleotide
guaguguacuuggccaaau

SEQ ID NO: 3012866 - RNA, 19 nt, Artificial Sequence
  Description of Artificial Sequence: Synthetic oligonucleotide
ccaaaugaaggguccugua

SEQ ID NO: 3012867 - RNA, 19 nt, Artificial Sequence
  Description of Artificial Sequence: Synthetic oligonucleotide
gccaaaugaaggguccugu

SEQ ID NO: 3012868 - RNA, 19 nt, Artificial Sequence
  Description of Artificial Sequence: Synthetic oligonucleotide
cguucggcgcgagaggcgc

SEQ ID NO: 3012869 - RNA, 19 nt, Artificial Sequence
  Description of Artificial Sequence: Synthetic oligonucleotide
caaccucguaguaggguuu

SEQ ID NO: 3012870 - RNA, 19 nt, Artificial Sequence
  Description of Artificial Sequence: Synthetic oligonucleotide
gggguaguucacaggcauc

SEQ ID NO: 3012871 - RNA, 19 nt, Artificial Sequence
  Description of Artificial Sequence: Synthetic oligonucleotide
gcgcgagaggcgccgccgg

SEQ ID NO: 3012872 - RNA, 19 nt, Artificial Sequence
  Description of Artificial Sequence: Synthetic oligonucleotide
ccaucuauguaguguacuu

SEQ ID NO: 3012873 - RNA, 19 nt, Artificial Sequence
  Description of Artificial Sequence: Synthetic oligonucleotide
gcggggagacuuugcguuc

SEQ ID NO: 3012874 - RNA, 19 nt, Artificial Sequence
  Description of Artificial Sequence: Synthetic oligonucleotide
ccuccugcggcggggagac

SEQ ID NO: 3012875 - RNA, 19 nt, Artificial Sequence
  Description of Artificial Sequence: Synthetic oligonucleotide
cggcucacagguagcgacc

SEQ ID NO: 3012876 - RNA, 19 nt, Artificial Sequence
  Description of Artificial Sequence: Synthetic oligonucleotide
guucggcgcgagaggcgcc

SEQ ID NO: 3012877 - RNA, 19 nt, Artificial Sequence
  Description of Artificial Sequence: Synthetic oligonucleotide
guccuguaaucuagcacau

SEQ ID NO: 3012878 - RNA, 19 nt, Artificial Sequence
  Description of Artificial Sequence: Synthetic oligonucleotide
ccagaaugaagaggaaacu

SEQ ID NO: 3012879 - RNA, 19 nt, Artificial Sequence
  Description of Artificial Sequence: Synthetic oligonucleotide
ccaaccucguaguaggguu

SEQ ID NO: 3012880 - RNA, 19 nt, Artificial Sequence
  Description of Artificial Sequence: Synthetic oligonucleotide
cuuccuccugcggcgggga

SEQ ID NO: 3012881 - RNA, 19 nt, Artificial Sequence
  Description of Artificial Sequence: Synthetic oligonucleotide
gccucugcgcagaugccca

SEQ ID NO: 3012882 - RNA, 19 nt, Artificial Sequence
  Description of Artificial Sequence: Synthetic oligonucleotide
cugcggcggggagacuuug

SEQ ID NO: 3012883 - RNA, 19 nt, Artificial Sequence
  Description of Artificial Sequence: Synthetic oligonucleotide
cggggagacuuugcguucg

SEQ ID NO: 3012884 - RNA, 19 nt, Artificial Sequence
  Description of Artificial Sequence: Synthetic oligonucleotide
gcguucggcgcgagaggcg

SEQ ID NO: 3012885 - RNA, 19 nt, Artificial Sequence
  Description of Artificial Sequence: Synthetic oligonucleotide
gugauucggcucacaggua

SEQ ID NO: 3012886 - RNA, 19 nt, Artificial Sequence
  Description of Artificial Sequence: Synthetic oligonucleotide
ucggcgcgagaggcgccgc

SEQ ID NO: 3012887 - RNA, 19 nt, Artificial Sequence
  Description of Artificial Sequence: Synthetic oligonucleotide
ccucugcgcagaugcccag

SEQ ID NO: 3012888 - RNA, 19 nt, Artificial Sequence
  Description of Artificial Sequence: Synthetic oligonucleotide
cugcgcagaugcccaggaa

SEQ ID NO: 3012889 - RNA, 19 nt, Artificial Sequence
  Description of Artificial Sequence: Synthetic oligonucleotide
gaagggccucugcgcagau

SEQ ID NO: 3012890 - RNA, 19 nt, Artificial Sequence
  Description of Artificial Sequence: Synthetic oligonucleotide
aggcgccgccggcauguua

SEQ ID NO: 3012891 - RNA, 19 nt, Artificial Sequence
  Description of Artificial Sequence: Synthetic oligonucleotide
ccgccggcauguuaccaga

SEQ ID NO: 3012892 - RNA, 19 nt, Artificial Sequence
  Description of Artificial Sequence: Synthetic oligonucleotide
gccggcauguuaccagaau

SEQ ID NO: 3012893 - RNA, 19 nt, Artificial Sequence
  Description of Artificial Sequence: Synthetic oligonucleotide
gcgagaggcgccgccggca

SEQ ID NO: 3012894 - RNA, 19 nt, Artificial Sequence
  Description of Artificial Sequence: Synthetic oligonucleotide
caggaacagaagggccucu

SEQ ID NO: 3012895 - RNA, 19 nt, Artificial Sequence
  Description of Artificial Sequence: Synthetic oligonucleotide
ggcucguccuugaguucca

SEQ ID NO: 3012896 - RNA, 19 nt, Artificial Sequence
  Description of Artificial Sequence: Synthetic oligonucleotide
gcucacagguagcgaccau

SEQ ID NO: 3012897 - RNA, 19 nt, Artificial Sequence
  Description of Artificial Sequence: Synthetic oligonucleotide
cggcgcgagaggcgccgcc

SEQ ID NO: 3012898 - RNA, 19 nt, Artificial Sequence
  Description of Artificial Sequence: Synthetic oligonucleotide
cgccggcauguuaccagaa

SEQ ID NO: 3012899 - RNA, 19 nt, Artificial Sequence
  Description of Artificial Sequence: Synthetic oligonucleotide
cggcggggagacuuugcgu

SEQ ID NO: 3012900 - RNA, 19 nt, Artificial Sequence
  Description of Artificial Sequence: Synthetic oligonucleotide
gcucguccuugaguuccau

SEQ ID NO: 3012901 - RNA, 19 nt, Artificial Sequence
  Description of Artificial Sequence: Synthetic oligonucleotide
ccugcggcggggagacuuu

SEQ ID NO: 3012902 - RNA, 19 nt, Artificial Sequence
  Description of Artificial Sequence: Synthetic oligonucleotide
gaggcgccgccggcauguu

SEQ ID NO: 3012903 - RNA, 19 nt, Artificial Sequence
  Description of Artificial Sequence: Synthetic oligonucleotide
cgagaggcgccgccggcau

SEQ ID NO: 3012904 - RNA, 19 nt, Artificial Sequence
  Description of Artificial Sequence: Synthetic oligonucleotide
cgccgccggcauguuacca

SEQ ID NO: 3012905 - RNA, 19 nt, Artificial Sequence
  Description of Artificial Sequence: Synthetic oligonucleotide
cuccugcggcggggagacu

SEQ ID NO: 3012906 - RNA, 19 nt, Artificial Sequence
  Description of Artificial Sequence: Synthetic oligonucleotide
uaauuaaauacaaacaagg

SEQ ID NO: 3012907 - RNA, 19 nt, Artificial Sequence
  Description of Artificial Sequence: Synthetic oligonucleotide
uuaaauacaaacaaggaga

SEQ ID NO: 3012908 - RNA, 19 nt, Artificial Sequence
  Description of Artificial Sequence: Synthetic oligonucleotide
agaaaauucacauuugccc

SEQ ID NO: 3012909 - RNA, 19 nt, Artificial Sequence
  Description of Artificial Sequence: Synthetic oligonucleotide
aaagaaaauucacauuugc

SEQ ID NO: 3012910 - RNA, 19 nt, Artificial Sequence
  Description of Artificial Sequence: Synthetic oligonucleotide
aaaacaaggcaccauggcc

SEQ ID NO: 3012911 - RNA, 19 nt, Artificial Sequence
  Description of Artificial Sequence: Synthetic oligonucleotide
aaguauuuugcauagaugu

SEQ ID NO: 3012912 - RNA, 19 nt, Artificial Sequence
  Description of Artificial Sequence: Synthetic oligonucleotide
auuaaauacaaacaaggag

SEQ ID NO: 3012913 - RNA, 19 nt, Artificial Sequence
  Description of Artificial Sequence: Synthetic oligonucleotide
uuaauuaaauacaaacaag

SEQ ID NO: 3012914 - RNA, 19 nt, Artificial Sequence
  Description of Artificial Sequence: Synthetic oligonucleotide
guaaacaaucaauagaagg

SEQ ID NO: 3012915 - RNA, 19 nt, Artificial Sequence
  Description of Artificial Sequence: Synthetic oligonucleotide
ugaacaaucucccaaauaa

SEQ ID NO: 3012916 - RNA, 19 nt, Artificial Sequence
  Description of Artificial Sequence: Synthetic oligonucleotide
caauagaaggacaagagag

SEQ ID NO: 3012917 - RNA, 19 nt, Artificial Sequence
  Description of Artificial Sequence: Synthetic oligonucleotide
acaaauauuguaaacaauc

SEQ ID NO: 3012918 - RNA, 19 nt, Artificial Sequence
  Description of Artificial Sequence: Synthetic oligonucleotide
auuacuuugggguauuggg

SEQ ID NO: 3012919 - RNA, 19 nt, Artificial Sequence
  Description of Artificial Sequence: Synthetic oligonucleotide
aaacaaucaauagaaggac

SEQ ID NO: 3012920 - RNA, 19 nt, Artificial Sequence
  Description of Artificial Sequence: Synthetic oligonucleotide
aagaaaauucacauuugcc

SEQ ID NO: 3012921 - RNA, 19 nt, Artificial Sequence
  Description of Artificial Sequence: Synthetic oligonucleotide
cauagauguacaaauauug

SEQ ID NO: 3012922 - RNA, 19 nt, Artificial Sequence
  Description of Artificial Sequence: Synthetic oligonucleotide
aaacaaggcaccauggccc

SEQ ID NO: 3012923 - RNA, 19 nt, Artificial Sequence
  Description of Artificial Sequence: Synthetic oligonucleotide
uuuucuaaugacaauuugu

SEQ ID NO: 3012924 - RNA, 19 nt, Artificial Sequence
  Description of Artificial Sequence: Synthetic oligonucleotide
uguacaaauauuguaaaca

SEQ ID NO: 3012925 - RNA, 19 nt, Artificial Sequence
  Description of Artificial Sequence: Synthetic oligonucleotide
agaggagaggacuauuucc

SEQ ID NO: 3012926 - RNA, 19 nt, Artificial Sequence
  Description of Artificial Sequence: Synthetic oligonucleotide
aaauauuguaaacaaucaa

SEQ ID NO: 3012927 - RNA, 19 nt, Artificial Sequence
  Description of Artificial Sequence: Synthetic oligonucleotide
uuugcauagauguacaaau

SEQ ID NO: 3012928 - RNA, 19 nt, Artificial Sequence
  Description of Artificial Sequence: Synthetic oligonucleotide
aauuaaauacaaacaagga

SEQ ID NO: 3012929 - RNA, 19 nt, Artificial Sequence
  Description of Artificial Sequence: Synthetic oligonucleotide
aaucaauagaaggacaaga

SEQ ID NO: 3012930 - RNA, 19 nt, Artificial Sequence
  Description of Artificial Sequence: Synthetic oligonucleotide
aauuuguuuuaauuaaaua

SEQ ID NO: 3012931 - RNA, 19 nt, Artificial Sequence
  Description of Artificial Sequence: Synthetic oligonucleotide
ucaaguauuuugcauagau

SEQ ID NO: 3012932 - RNA, 19 nt, Artificial Sequence
  Description of Artificial Sequence: Synthetic oligonucleotide
uggagcauuacuuuggggu

SEQ ID NO: 3012933 - RNA, 19 nt, Artificial Sequence
  Description of Artificial Sequence: Synthetic oligonucleotide
ucacauuugcccuggaucc

SEQ ID NO: 3012934 - RNA, 19 nt, Artificial Sequence
  Description of Artificial Sequence: Synthetic oligonucleotide
ucaauagaaggacaagaga

SEQ ID NO: 3012935 - RNA, 19 nt, Artificial Sequence
  Description of Artificial Sequence: Synthetic oligonucleotide
cacacagucacacacgagg

SEQ ID NO: 3012936 - RNA, 19 nt, Artificial Sequence
  Description of Artificial Sequence: Synthetic oligonucleotide
aaaauucacauuugcccug

SEQ ID NO: 3012937 - RNA, 19 nt, Artificial Sequence
  Description of Artificial Sequence: Synthetic oligonucleotide
uuucuaaugacaauuuguu

SEQ ID NO: 3012938 - RNA, 19 nt, Artificial Sequence
  Description of Artificial Sequence: Synthetic oligonucleotide
uguaaacaaucaauagaag

SEQ ID NO: 3012939 - RNA, 19 nt, Artificial Sequence
  Description of Artificial Sequence: Synthetic oligonucleotide
ucuacagagccucuaguug

SEQ ID NO: 3012940 - RNA, 19 nt, Artificial Sequence
  Description of Artificial Sequence: Synthetic oligonucleotide
ugacaauuuguuuuaauua

SEQ ID NO: 3012941 - RNA, 19 nt, Artificial Sequence
  Description of Artificial Sequence: Synthetic oligonucleotide
caugcauuugacaaaauga

SEQ ID NO: 3012942 - RNA, 19 nt, Artificial Sequence
  Description of Artificial Sequence: Synthetic oligonucleotide
gacacaggcauacacacac

SEQ ID NO: 3012943 - RNA, 19 nt, Artificial Sequence
  Description of Artificial Sequence: Synthetic oligonucleotide
uucacauuugcccuggauc

SEQ ID NO: 3012944 - RNA, 19 nt, Artificial Sequence
  Description of Artificial Sequence: Synthetic oligonucleotide
gacaauuuguuuuaauuaa

SEQ ID NO: 3012945 - RNA, 19 nt, Artificial Sequence
  Description of Artificial Sequence: Synthetic oligonucleotide
auuugacaaaaugacuagc

SEQ ID NO: 3012946 - RNA, 19 nt, Artificial Sequence
  Description of Artificial Sequence: Synthetic oligonucleotide
uauuuugcauagauguaca

SEQ ID NO: 3012947 - RNA, 19 nt, Artificial Sequence
  Description of Artificial Sequence: Synthetic oligonucleotide
uuacuuugggguauugggc

SEQ ID NO: 3012948 - RNA, 19 nt, Artificial Sequence
  Description of Artificial Sequence: Synthetic oligonucleotide
ugcauagauguacaaauau

SEQ ID NO: 3012949 - RNA, 19 nt, Artificial Sequence
  Description of Artificial Sequence: Synthetic oligonucleotide
uguguguggaguccuuugg

SEQ ID NO: 3012950 - RNA, 19 nt, Artificial Sequence
  Description of Artificial Sequence: Synthetic oligonucleotide
uguguggaguccuuugggg

SEQ ID NO: 3012951 - RNA, 19 nt, Artificial Sequence
  Description of Artificial Sequence: Synthetic oligonucleotide
ugucacuacaugcauuuga

SEQ ID NO: 3012952 - RNA, 19 nt, Artificial Sequence
  Description of Artificial Sequence: Synthetic oligonucleotide
aggacuauuuccugugaac

SEQ ID NO: 3012953 - RNA, 19 nt, Artificial Sequence
  Description of Artificial Sequence: Synthetic oligonucleotide
cauuugacaaaaugacuag

SEQ ID NO: 3012954 - RNA, 19 nt, Artificial Sequence
  Description of Artificial Sequence: Synthetic oligonucleotide
aaaagaaaauucacauuug

SEQ ID NO: 3012955 - RNA, 19 nt, Artificial Sequence
  Description of Artificial Sequence: Synthetic oligonucleotide
uagauguacaaauauugua

SEQ ID NO: 3012956 - RNA, 19 nt, Artificial Sequence
  Description of Artificial Sequence: Synthetic oligonucleotide
caaauauuguaaacaauca

SEQ ID NO: 3012957 - RNA, 19 nt, Artificial Sequence
  Description of Artificial Sequence: Synthetic oligonucleotide
aaauucacauuugcccugg

SEQ ID NO: 3012958 - RNA, 19 nt, Artificial Sequence
  Description of Artificial Sequence: Synthetic oligonucleotide
augacaauuuguuuuaauu

SEQ ID NO: 3012959 - RNA, 19 nt, Artificial Sequence
  Description of Artificial Sequence: Synthetic oligonucleotide
agagaagggguaccuuucc

SEQ ID NO: 3012960 - RNA, 19 nt, Artificial Sequence
  Description of Artificial Sequence: Synthetic oligonucleotide
cacacgaggacacuggagc

SEQ ID NO: 3012961 - RNA, 19 nt, Artificial Sequence
  Description of Artificial Sequence: Synthetic oligonucleotide
aaugacaauuuguuuuaau

SEQ ID NO: 3012962 - RNA, 19 nt, Artificial Sequence
  Description of Artificial Sequence: Synthetic oligonucleotide
auuuccugugaacaaucuc

SEQ ID NO: 3012963 - RNA, 19 nt, Artificial Sequence
  Description of Artificial Sequence: Synthetic oligonucleotide
aucaauagaaggacaagag

SEQ ID NO: 3012964 - RNA, 19 nt, Artificial Sequence
  Description of Artificial Sequence: Synthetic oligonucleotide
guauuuugcauagauguac

SEQ ID NO: 3012965 - RNA, 19 nt, Artificial Sequence
  Description of Artificial Sequence: Synthetic oligonucleotide
caggcauacacacacaguc

SEQ ID NO: 3012966 - RNA, 19 nt, Artificial Sequence
  Description of Artificial Sequence: Synthetic oligonucleotide
ucacacacgaggacacugg

SEQ ID NO: 3012967 - RNA, 19 nt, Artificial Sequence
  Description of Artificial Sequence: Synthetic oligonucleotide
guacaaauauuguaaacaa

SEQ ID NO: 3012968 - RNA, 19 nt, Artificial Sequence
  Description of Artificial Sequence: Synthetic oligonucleotide
agaaggacaagagaggaga

SEQ ID NO: 3012969 - RNA, 19 nt, Artificial Sequence
  Description of Artificial Sequence: Synthetic oligonucleotide
agauguacaaauauuguaa

SEQ ID NO: 3012970 - RNA, 19 nt, Artificial Sequence
  Description of Artificial Sequence: Synthetic oligonucleotide
aacaaucucccaaauaaaa

SEQ ID NO: 3012971 - RNA, 19 nt, Artificial Sequence
  Description of Artificial Sequence: Synthetic oligonucleotide
uacuuugggguauugggcu

SEQ ID NO: 3012972 - RNA, 19 nt, Artificial Sequence
  Description of Artificial Sequence: Synthetic oligonucleotide
uacaaauauuguaaacaau

SEQ ID NO: 3012973 - RNA, 19 nt, Artificial Sequence
  Description of Artificial Sequence: Synthetic oligonucleotide
agaagggguaccuuuccag

SEQ ID NO: 3012974 - RNA, 19 nt, Artificial Sequence
  Description of Artificial Sequence: Synthetic oligonucleotide
caaguauuuugcauagaug

SEQ ID NO: 3012975 - RNA, 19 nt, Artificial Sequence
  Description of Artificial Sequence: Synthetic oligonucleotide
cuggaucccagacacaggc

SEQ ID NO: 3012976 - RNA, 19 nt, Artificial Sequence
  Description of Artificial Sequence: Synthetic oligonucleotide
aaggacaagagaggagagg

SEQ ID NO: 3012977 - RNA, 19 nt, Artificial Sequence
  Description of Artificial Sequence: Synthetic oligonucleotide
ugggguauugggcuuggag

SEQ ID NO: 3012978 - RNA, 19 nt, Artificial Sequence
  Description of Artificial Sequence: Synthetic oligonucleotide
uagaaggacaagagaggag

SEQ ID NO: 3012979 - RNA, 19 nt, Artificial Sequence
  Description of Artificial Sequence: Synthetic oligonucleotide
uuccugugaacaaucuccc

SEQ ID NO: 3012980 - RNA, 19 nt, Artificial Sequence
  Description of Artificial Sequence: Synthetic oligonucleotide
acuggagcauuacuuuggg

SEQ ID NO: 3012981 - RNA, 19 nt, Artificial Sequence
  Description of Artificial Sequence: Synthetic oligonucleotide
aacaaucaauagaaggaca

SEQ ID NO: 3012982 - RNA, 19 nt, Artificial Sequence
  Description of Artificial Sequence: Synthetic oligonucleotide
uccaguucguguucccugg

SEQ ID NO: 3012983 - RNA, 19 nt, Artificial Sequence
  Description of Artificial Sequence: Synthetic oligonucleotide
gagaggacuauuuccugug

SEQ ID NO: 3012984 - RNA, 19 nt, Artificial Sequence
  Description of Artificial Sequence: Synthetic oligonucleotide
auauuguaaacaaucaaua

SEQ ID NO: 3012985 - RNA, 19 nt, Artificial Sequence
  Description of Artificial Sequence: Synthetic oligonucleotide
uuuugcauagauguacaaa

SEQ ID NO: 3012986 - RNA, 19 nt, Artificial Sequence
  Description of Artificial Sequence: Synthetic oligonucleotide
aguuggugucccuagagaa

SEQ ID NO: 3012987 - RNA, 19 nt, Artificial Sequence
  Description of Artificial Sequence: Synthetic oligonucleotide
cagacacaggcauacacac

SEQ ID NO: 3012988 - RNA, 19 nt, Artificial Sequence
  Description of Artificial Sequence: Synthetic oligonucleotide
uauuuccugugaacaaucu

SEQ ID NO: 3012989 - RNA, 19 nt, Artificial Sequence
  Description of Artificial Sequence: Synthetic oligonucleotide
cacuggagcauuacuuugg

SEQ ID NO: 3012990 - RNA, 19 nt, Artificial Sequence
  Description of Artificial Sequence: Synthetic oligonucleotide
cacuacaugcauuugacaa

SEQ ID NO: 3012991 - RNA, 19 nt, Artificial Sequence
  Description of Artificial Sequence: Synthetic oligonucleotide
ugggcuuggagucuacaga

SEQ ID NO: 3012992 - RNA, 19 nt, Artificial Sequence
  Description of Artificial Sequence: Synthetic oligonucleotide
uugggcuuggagucuacag

SEQ ID NO: 3012993 - RNA, 19 nt, Artificial Sequence
  Description of Artificial Sequence: Synthetic oligonucleotide
ugcccuggaucccagacac

SEQ ID NO: 3012994 - RNA, 19 nt, Artificial Sequence
  Description of Artificial Sequence: Synthetic oligonucleotide
cauucaaguauuuugcaua

SEQ ID NO: 3012995 - RNA, 19 nt, Artificial Sequence
  Description of Artificial Sequence: Synthetic oligonucleotide
aggacaagagaggagagga

SEQ ID NO: 3012996 - RNA, 19 nt, Artificial Sequence
  Description of Artificial Sequence: Synthetic oligonucleotide
cuauuuccugugaacaauc

SEQ ID NO: 3012997 - RNA, 19 nt, Artificial Sequence
  Description of Artificial Sequence: Synthetic oligonucleotide
auagauguacaaauauugu

SEQ ID NO: 3012998 - RNA, 19 nt, Artificial Sequence
  Description of Artificial Sequence: Synthetic oligonucleotide
uuugcccuggaucccagac

SEQ ID NO: 3012999 - RNA, 19 nt, Artificial Sequence
  Description of Artificial Sequence: Synthetic oligonucleotide
acuacaugcauuugacaaa

SEQ ID NO: 3013000 - RNA, 19 nt, Artificial Sequence
  Description of Artificial Sequence: Synthetic oligonucleotide
cuaguuggugucccuagag

SEQ ID NO: 3013001 - RNA, 19 nt, Artificial Sequence
  Description of Artificial Sequence: Synthetic oligonucleotide
gagucuacagagccucuag

SEQ ID NO: 3013002 - RNA, 19 nt, Artificial Sequence
  Description of Artificial Sequence: Synthetic oligonucleotide
uaguuggugucccuagaga

SEQ ID NO: 3013003 - RNA, 19 nt, Artificial Sequence
  Description of Artificial Sequence: Synthetic oligonucleotide
cacaggcauacacacacag

SEQ ID NO: 3013004 - RNA, 19 nt, Artificial Sequence
  Description of Artificial Sequence: Synthetic oligonucleotide
agggguaccuuuccaguuc

SEQ ID NO: 3013005 - RNA, 19 nt, Artificial Sequence
  Description of Artificial Sequence: Synthetic oligonucleotide
aacaaggcaccauggccca

SEQ ID NO: 3013006 - RNA, 19 nt, Artificial Sequence
  Description of Artificial Sequence: Synthetic oligonucleotide
uucuaaugacaauuuguuu

SEQ ID NO: 3013007 - RNA, 19 nt, Artificial Sequence
  Description of Artificial Sequence: Synthetic oligonucleotide
cauuacuuugggguauugg

SEQ ID NO: 3013008 - RNA, 19 nt, Artificial Sequence
  Description of Artificial Sequence: Synthetic oligonucleotide
acaaucaauagaaggacaa

SEQ ID NO: 3013009 - RNA, 19 nt, Artificial Sequence
  Description of Artificial Sequence: Synthetic oligonucleotide
ucuaguuggugucccuaga

SEQ ID NO: 3013010 - RNA, 19 nt, Artificial Sequence
  Description of Artificial Sequence: Synthetic oligonucleotide
aucccagacacaggcauac

SEQ ID NO: 3013011 - RNA, 19 nt, Artificial Sequence
  Description of Artificial Sequence: Synthetic oligonucleotide
acacuggagcauuacuuug

SEQ ID NO: 3013012 - RNA, 19 nt, Artificial Sequence
  Description of Artificial Sequence: Synthetic oligonucleotide
cuaaugacaauuuguuuua

SEQ ID NO: 3013013 - RNA, 19 nt, Artificial Sequence
  Description of Artificial Sequence: Synthetic oligonucleotide
ugugaacaaucucccaaau

SEQ ID NO: 3013014 - RNA, 19 nt, Artificial Sequence
  Description of Artificial Sequence: Synthetic oligonucleotide
uugcauagauguacaaaua

SEQ ID NO: 3013015 - RNA, 19 nt, Artificial Sequence
  Description of Artificial Sequence: Synthetic oligonucleotide
uagagaagggguaccuuuc

SEQ ID NO: 3013016 - RNA, 19 nt, Artificial Sequence
  Description of Artificial Sequence: Synthetic oligonucleotide
guguguggaguccuuuggg

SEQ ID NO: 3013017 - RNA, 19 nt, Artificial Sequence
  Description of Artificial Sequence: Synthetic oligonucleotide
ucacuacaugcauuugaca

SEQ ID NO: 3013018 - RNA, 19 nt, Artificial Sequence
  Description of Artificial Sequence: Synthetic oligonucleotide
caaucaauagaaggacaag

SEQ ID NO: 3013019 - RNA, 19 nt, Artificial Sequence
  Description of Artificial Sequence: Synthetic oligonucleotide
aaggcaccauggcccauuc

SEQ ID NO: 3013020 - RNA, 19 nt, Artificial Sequence
  Description of Artificial Sequence: Synthetic oligonucleotide
acagucacacacgaggaca

SEQ ID NO: 3013021 - RNA, 19 nt, Artificial Sequence
  Description of Artificial Sequence: Synthetic oligonucleotide
ggcccauucaaguauuuug

SEQ ID NO: 3013022 - RNA, 19 nt, Artificial Sequence
  Description of Artificial Sequence: Synthetic oligonucleotide
gcuuggagucuacagagcc

SEQ ID NO: 3013023 - RNA, 19 nt, Artificial Sequence
  Description of Artificial Sequence: Synthetic oligonucleotide
gagaggagaggacuauuuc

SEQ ID NO: 3013024 - RNA, 19 nt, Artificial Sequence
  Description of Artificial Sequence: Synthetic oligonucleotide
uuggagucuacagagccuc

SEQ ID NO: 3013025 - RNA, 19 nt, Artificial Sequence
  Description of Artificial Sequence: Synthetic oligonucleotide
gaaggacaagagaggagag

SEQ ID NO: 3013026 - RNA, 19 nt, Artificial Sequence
  Description of Artificial Sequence: Synthetic oligonucleotide
gacuauuuccugugaacaa

SEQ ID NO: 3013027 - RNA, 19 nt, Artificial Sequence
  Description of Artificial Sequence: Synthetic oligonucleotide
gucacuacaugcauuugac

SEQ ID NO: 3013028 - RNA, 19 nt, Artificial Sequence
  Description of Artificial Sequence: Synthetic oligonucleotide
uaccuuuccaguucguguu

SEQ ID NO: 3013029 - RNA, 19 nt, Artificial Sequence
  Description of Artificial Sequence: Synthetic oligonucleotide
acuauuuccugugaacaau

SEQ ID NO: 3013030 - RNA, 19 nt, Artificial Sequence
  Description of Artificial Sequence: Synthetic oligonucleotide
gggcuuggagucuacagag

SEQ ID NO: 3013031 - RNA, 19 nt, Artificial Sequence
  Description of Artificial Sequence: Synthetic oligonucleotide
cucuaguuggugucccuag

SEQ ID NO: 3013032 - RNA, 19 nt, Artificial Sequence
  Description of Artificial Sequence: Synthetic oligonucleotide
auuuugcauagauguacaa

SEQ ID NO: 3013033 - RNA, 19 nt, Artificial Sequence
  Description of Artificial Sequence: Synthetic oligonucleotide
aagggguaccuuuccaguu

SEQ ID NO: 3013034 - RNA, 19 nt, Artificial Sequence
  Description of Artificial Sequence: Synthetic oligonucleotide
ugucccuagagaaggggua

SEQ ID NO: 3013035 - RNA, 19 nt, Artificial Sequence
  Description of Artificial Sequence: Synthetic oligonucleotide
uguucccuggcuugugugu

SEQ ID NO: 3013036 - RNA, 19 nt, Artificial Sequence
  Description of Artificial Sequence: Synthetic oligonucleotide
agucuacagagccucuagu

SEQ ID NO: 3013037 - RNA, 19 nt, Artificial Sequence
  Description of Artificial Sequence: Synthetic oligonucleotide
acaauuuguuuuaauuaaa

SEQ ID NO: 3013038 - RNA, 19 nt, Artificial Sequence
  Description of Artificial Sequence: Synthetic oligonucleotide
guuggugucccuagagaag

SEQ ID NO: 3013039 - RNA, 19 nt, Artificial Sequence
  Description of Artificial Sequence: Synthetic oligonucleotide
uacagagccucuaguuggu

SEQ ID NO: 3013040 - RNA, 19 nt, Artificial Sequence
  Description of Artificial Sequence: Synthetic oligonucleotide
aggagaggacuauuuccug

SEQ ID NO: 3013041 - RNA, 19 nt, Artificial Sequence
  Description of Artificial Sequence: Synthetic oligonucleotide
cuggagcauuacuuugggg

SEQ ID NO: 3013042 - RNA, 19 nt, Artificial Sequence
  Description of Artificial Sequence: Synthetic oligonucleotide
accuuuccaguucguguuc

SEQ ID NO: 3013043 - RNA, 19 nt, Artificial Sequence
  Description of Artificial Sequence: Synthetic oligonucleotide
uggugucccuagagaaggg

SEQ ID NO: 3013044 - RNA, 19 nt, Artificial Sequence
  Description of Artificial Sequence: Synthetic oligonucleotide
aggacacuggagcauuacu

SEQ ID NO: 3013045 - RNA, 19 nt, Artificial Sequence
  Description of Artificial Sequence: Synthetic oligonucleotide
guucguguucccuggcuug

SEQ ID NO: 3013046 - RNA, 19 nt, Artificial Sequence
  Description of Artificial Sequence: Synthetic oligonucleotide
cagucacacacgaggacac

SEQ ID NO: 3013047 - RNA, 19 nt, Artificial Sequence
  Description of Artificial Sequence: Synthetic oligonucleotide
gcauuugacaaaaugacua

SEQ ID NO: 3013048 - RNA, 19 nt, Artificial Sequence
  Description of Artificial Sequence: Synthetic oligonucleotide
caauuuguuuuaauuaaau

SEQ ID NO: 3013049 - RNA, 19 nt, Artificial Sequence
  Description of Artificial Sequence: Synthetic oligonucleotide
auucacauuugcccuggau

SEQ ID NO: 3013050 - RNA, 19 nt, Artificial Sequence
  Description of Artificial Sequence: Synthetic oligonucleotide
uucccuggcuugugugugg

SEQ ID NO: 3013051 - RNA, 19 nt, Artificial Sequence
  Description of Artificial Sequence: Synthetic oligonucleotide
gacaagagaggagaggacu

SEQ ID NO: 3013052 - RNA, 19 nt, Artificial Sequence
  Description of Artificial Sequence: Synthetic oligonucleotide
uugcccuggaucccagaca

SEQ ID NO: 3013053 - RNA, 19 nt, Artificial Sequence
  Description of Artificial Sequence: Synthetic oligonucleotide
acacgaggacacuggagca

SEQ ID NO: 3013054 - RNA, 19 nt, Artificial Sequence
  Description of Artificial Sequence: Synthetic oligonucleotide
cuuuccaguucguguuccc

SEQ ID NO: 3013055 - RNA, 19 nt, Artificial Sequence
  Description of Artificial Sequence: Synthetic oligonucleotide
agaggacuauuuccuguga

SEQ ID NO: 3013056 - RNA, 19 nt, Artificial Sequence
  Description of Artificial Sequence: Synthetic oligonucleotide
uuugggguauugggcuugg

SEQ ID NO: 3013057 - RNA, 19 nt, Artificial Sequence
  Description of Artificial Sequence: Synthetic oligonucleotide
aauucacauuugcccugga

SEQ ID NO: 3013058 - RNA, 19 nt, Artificial Sequence
  Description of Artificial Sequence: Synthetic oligonucleotide
ggguauugggcuuggaguc

SEQ ID NO: 3013059 - RNA, 19 nt, Artificial Sequence
  Description of Artificial Sequence: Synthetic oligonucleotide
cuggcuuguguguggaguc

SEQ ID NO: 3013060 - RNA, 19 nt, Artificial Sequence
  Description of Artificial Sequence: Synthetic oligonucleotide
gaggacuauuuccugugaa

SEQ ID NO: 3013061 - RNA, 19 nt, Artificial Sequence
  Description of Artificial Sequence: Synthetic oligonucleotide
gaacaaucucccaaauaaa

SEQ ID NO: 3013062 - RNA, 19 nt, Artificial Sequence
  Description of Artificial Sequence: Synthetic oligonucleotide
uccugugaacaaucuccca

SEQ ID NO: 3013063 - RNA, 19 nt, Artificial Sequence
  Description of Artificial Sequence: Synthetic oligonucleotide
cuacaugcauuugacaaaa

SEQ ID NO: 3013064 - RNA, 19 nt, Artificial Sequence
  Description of Artificial Sequence: Synthetic oligonucleotide
uaaugacaauuuguuuuaa

SEQ ID NO: 3013065 - RNA, 19 nt, Artificial Sequence
  Description of Artificial Sequence: Synthetic oligonucleotide
uuuccaguucguguucccu

SEQ ID NO: 3013066 - RNA, 19 nt, Artificial Sequence
  Description of Artificial Sequence: Synthetic oligonucleotide
gagaagggguaccuuucca

SEQ ID NO: 3013067 - RNA, 19 nt, Artificial Sequence
  Description of Artificial Sequence: Synthetic oligonucleotide
aguucguguucccuggcuu

SEQ ID NO: 3013068 - RNA, 19 nt, Artificial Sequence
  Description of Artificial Sequence: Synthetic oligonucleotide
uggaucccagacacaggca

SEQ ID NO: 3013069 - RNA, 19 nt, Artificial Sequence
  Description of Artificial Sequence: Synthetic oligonucleotide
uucaaguauuuugcauaga

SEQ ID NO: 3013070 - RNA, 19 nt, Artificial Sequence
  Description of Artificial Sequence: Synthetic oligonucleotide
agccucuaguugguguccc

SEQ ID NO: 3013071 - RNA, 19 nt, Artificial Sequence
  Description of Artificial Sequence: Synthetic oligonucleotide
ggacuauuuccugugaaca

SEQ ID NO: 3013072 - RNA, 19 nt, Artificial Sequence
  Description of Artificial Sequence: Synthetic oligonucleotide
gucacacacgaggacacug

SEQ ID NO: 3013073 - RNA, 19 nt, Artificial Sequence
  Description of Artificial Sequence: Synthetic oligonucleotide
gaagggguaccuuuccagu

SEQ ID NO: 3013074 - RNA, 19 nt, Artificial Sequence
  Description of Artificial Sequence: Synthetic oligonucleotide
gaggagaggacuauuuccu

SEQ ID NO: 3013075 - RNA, 19 nt, Artificial Sequence
  Description of Artificial Sequence: Synthetic oligonucleotide
aguauuuugcauagaugua

SEQ ID NO: 3013076 - RNA, 19 nt, Artificial Sequence
  Description of Artificial Sequence: Synthetic oligonucleotide
cugugaacaaucucccaaa

SEQ ID NO: 3013077 - RNA, 19 nt, Artificial Sequence
  Description of Artificial Sequence: Synthetic oligonucleotide
gggguaccuuuccaguucg

SEQ ID NO: 3013078 - RNA, 19 nt, Artificial Sequence
  Description of Artificial Sequence: Synthetic oligonucleotide
cacagucacacacgaggac

SEQ ID NO: 3013079 - RNA, 19 nt, Artificial Sequence
  Description of Artificial Sequence: Synthetic oligonucleotide
gcccauucaaguauuuugc

SEQ ID NO: 3013080 - RNA, 19 nt, Artificial Sequence
  Description of Artificial Sequence: Synthetic oligonucleotide
guaccuuuccaguucgugu

SEQ ID NO: 3013081 - RNA, 19 nt, Artificial Sequence
  Description of Artificial Sequence: Synthetic oligonucleotide
gacacuggagcauuacuuu

SEQ ID NO: 3013082 - RNA, 19 nt, Artificial Sequence
  Description of Artificial Sequence: Synthetic oligonucleotide
acacagucacacacgagga

SEQ ID NO: 3013083 - RNA, 19 nt, Artificial Sequence
  Description of Artificial Sequence: Synthetic oligonucleotide
accauggcccauucaagua

SEQ ID NO: 3013084 - RNA, 19 nt, Artificial Sequence
  Description of Artificial Sequence: Synthetic oligonucleotide
aagagaggagaggacuauu

SEQ ID NO: 3013085 - RNA, 19 nt, Artificial Sequence
  Description of Artificial Sequence: Synthetic oligonucleotide
ggcaccauggcccauucaa

SEQ ID NO: 3013086 - RNA, 19 nt, Artificial Sequence
  Description of Artificial Sequence: Synthetic oligonucleotide
gugaacaaucucccaaaua

SEQ ID NO: 3013087 - RNA, 19 nt, Artificial Sequence
  Description of Artificial Sequence: Synthetic oligonucleotide
guguucccuggcuugugug

SEQ ID NO: 3013088 - RNA, 19 nt, Artificial Sequence
  Description of Artificial Sequence: Synthetic oligonucleotide
cuuugggguauugggcuug

SEQ ID NO: 3013089 - RNA, 19 nt, Artificial Sequence
  Description of Artificial Sequence: Synthetic oligonucleotide
acauuugcccuggauccca

SEQ ID NO: 3013090 - RNA, 19 nt, Artificial Sequence
  Description of Artificial Sequence: Synthetic oligonucleotide
agagaggagaggacuauuu

SEQ ID NO: 3013091 - RNA, 19 nt, Artificial Sequence
  Description of Artificial Sequence: Synthetic oligonucleotide
ggugucccuagagaagggg

SEQ ID NO: 3013092 - RNA, 19 nt, Artificial Sequence
  Description of Artificial Sequence: Synthetic oligonucleotide
uacaugcauuugacaaaau

SEQ ID NO: 3013093 - RNA, 19 nt, Artificial Sequence
  Description of Artificial Sequence: Synthetic oligonucleotide
ucccuagagaagggguacc

SEQ ID NO: 3013094 - RNA, 19 nt, Artificial Sequence
  Description of Artificial Sequence: Synthetic oligonucleotide
uauugggcuuggagucuac

SEQ ID NO: 3013095 - RNA, 19 nt, Artificial Sequence
  Description of Artificial Sequence: Synthetic oligonucleotide
cauuugcccuggaucccag

SEQ ID NO: 3013096 - RNA, 19 nt, Artificial Sequence
  Description of Artificial Sequence: Synthetic oligonucleotide
cacauuugcccuggauccc

SEQ ID NO: 3013097 - RNA, 19 nt, Artificial Sequence
  Description of Artificial Sequence: Synthetic oligonucleotide
uggagucuacagagccucu

SEQ ID NO: 3013098 - RNA, 19 nt, Artificial Sequence
  Description of Artificial Sequence: Synthetic oligonucleotide
gguaccuuuccaguucgug

SEQ ID NO: 3013099 - RNA, 19 nt, Artificial Sequence
  Description of Artificial Sequence: Synthetic oligonucleotide
aggcauacacacacaguca

SEQ ID NO: 3013100 - RNA, 19 nt, Artificial Sequence
  Description of Artificial Sequence: Synthetic oligonucleotide
acacacgaggacacuggag

SEQ ID NO: 3013101 - RNA, 19 nt, Artificial Sequence
  Description of Artificial Sequence: Synthetic oligonucleotide
acaagagaggagaggacua

SEQ ID NO: 3013102 - RNA, 19 nt, Artificial Sequence
  Description of Artificial Sequence: Synthetic oligonucleotide
uucguguucccuggcuugu

SEQ ID NO: 3013103 - RNA, 19 nt, Artificial Sequence
  Description of Artificial Sequence: Synthetic oligonucleotide
guucccuggcuugugugug

SEQ ID NO: 3013104 - RNA, 19 nt, Artificial Sequence
  Description of Artificial Sequence: Synthetic oligonucleotide
gaggacacuggagcauuac

SEQ ID NO: 3013105 - RNA, 19 nt, Artificial Sequence
  Description of Artificial Sequence: Synthetic oligonucleotide
gagccucuaguuggugucc

SEQ ID NO: 3013106 - RNA, 19 nt, Artificial Sequence
  Description of Artificial Sequence: Synthetic oligonucleotide
acaggcauacacacacagu

SEQ ID NO: 3013107 - RNA, 19 nt, Artificial Sequence
  Description of Artificial Sequence: Synthetic oligonucleotide
gggguauugggcuuggagu

SEQ ID NO: 3013108 - RNA, 19 nt, Artificial Sequence
  Description of Artificial Sequence: Synthetic oligonucleotide
cuagagaagggguaccuuu

SEQ ID NO: 3013109 - RNA, 19 nt, Artificial Sequence
  Description of Artificial Sequence: Synthetic oligonucleotide
ggagcauuacuuuggggua

SEQ ID NO: 3013110 - RNA, 19 nt, Artificial Sequence
  Description of Artificial Sequence: Synthetic oligonucleotide
gucccuagagaagggguac

SEQ ID NO: 3013111 - RNA, 19 nt, Artificial Sequence
  Description of Artificial Sequence: Synthetic oligonucleotide
cccagacacaggcauacac

SEQ ID NO: 3013112 - RNA, 19 nt, Artificial Sequence
  Description of Artificial Sequence: Synthetic oligonucleotide
gucuacagagccucuaguu

SEQ ID NO: 3013113 - RNA, 19 nt, Artificial Sequence
  Description of Artificial Sequence: Synthetic oligonucleotide
auuugcccuggaucccaga

SEQ ID NO: 3013114 - RNA, 19 nt, Artificial Sequence
  Description of Artificial Sequence: Synthetic oligonucleotide
ccagacacaggcauacaca

SEQ ID NO: 3013115 - RNA, 19 nt, Artificial Sequence
  Description of Artificial Sequence: Synthetic oligonucleotide
cccuggaucccagacacag

SEQ ID NO: 3013116 - RNA, 19 nt, Artificial Sequence
  Description of Artificial Sequence: Synthetic oligonucleotide
ccugugaacaaucucccaa

SEQ ID NO: 3013117 - RNA, 19 nt, Artificial Sequence
  Description of Artificial Sequence: Synthetic oligonucleotide
acacacagucacacacgag

SEQ ID NO: 3013118 - RNA, 19 nt, Artificial Sequence
  Description of Artificial Sequence: Synthetic oligonucleotide
cuuggagucuacagagccu

SEQ ID NO: 3013119 - RNA, 19 nt, Artificial Sequence
  Description of Artificial Sequence: Synthetic oligonucleotide
cacacacgaggacacugga

SEQ ID NO: 3013120 - RNA, 19 nt, Artificial Sequence
  Description of Artificial Sequence: Synthetic oligonucleotide
caccauggcccauucaagu

SEQ ID NO: 3013121 - RNA, 19 nt, Artificial Sequence
  Description of Artificial Sequence: Synthetic oligonucleotide
ggggcugucacuacaugca

SEQ ID NO: 3013122 - RNA, 19 nt, Artificial Sequence
  Description of Artificial Sequence: Synthetic oligonucleotide
agacacaggcauacacaca

SEQ ID NO: 3013123 - RNA, 19 nt, Artificial Sequence
  Description of Artificial Sequence: Synthetic oligonucleotide
ggagaggacuauuuccugu

SEQ ID NO: 3013124 - RNA, 19 nt, Artificial Sequence
  Description of Artificial Sequence: Synthetic oligonucleotide
acagagccucuaguuggug

SEQ ID NO: 3013125 - RNA, 19 nt, Artificial Sequence
  Description of Artificial Sequence: Synthetic oligonucleotide
ucccuggcuugugugugga

SEQ ID NO: 3013126 - RNA, 19 nt, Artificial Sequence
  Description of Artificial Sequence: Synthetic oligonucleotide
gcugucacuacaugcauuu

SEQ ID NO: 3013127 - RNA, 19 nt, Artificial Sequence
  Description of Artificial Sequence: Synthetic oligonucleotide
cugucacuacaugcauuug

SEQ ID NO: 3013128 - RNA, 19 nt, Artificial Sequence
  Description of Artificial Sequence: Synthetic oligonucleotide
uggcccauucaaguauuuu

SEQ ID NO: 3013129 - RNA, 19 nt, Artificial Sequence
  Description of Artificial Sequence: Synthetic oligonucleotide
ccuggaucccagacacagg

SEQ ID NO: 3013130 - RNA, 19 nt, Artificial Sequence
  Description of Artificial Sequence: Synthetic oligonucleotide
ucguguucccuggcuugug

SEQ ID NO: 3013131 - RNA, 19 nt, Artificial Sequence
  Description of Artificial Sequence: Synthetic oligonucleotide
acgaggacacuggagcauu

SEQ ID NO: 3013132 - RNA, 19 nt, Artificial Sequence
  Description of Artificial Sequence: Synthetic oligonucleotide
agucacacacgaggacacu

SEQ ID NO: 3013133 - RNA, 19 nt, Artificial Sequence
  Description of Artificial Sequence: Synthetic oligonucleotide
ggaucccagacacaggcau

SEQ ID NO: 3013134 - RNA, 19 nt, Artificial Sequence
  Description of Artificial Sequence: Synthetic oligonucleotide
agcauuacuuugggguauu

SEQ ID NO: 3013135 - RNA, 19 nt, Artificial Sequence
  Description of Artificial Sequence: Synthetic oligonucleotide
gcaccauggcccauucaag

SEQ ID NO: 3013136 - RNA, 19 nt, Artificial Sequence
  Description of Artificial Sequence: Synthetic oligonucleotide
ccuuuccaguucguguucc

SEQ ID NO: 3013137 - RNA, 19 nt, Artificial Sequence
  Description of Artificial Sequence: Synthetic oligonucleotide
gaucccagacacaggcaua

SEQ ID NO: 3013138 - RNA, 19 nt, Artificial Sequence
  Description of Artificial Sequence: Synthetic oligonucleotide
ggacaagagaggagaggac

SEQ ID NO: 3013139 - RNA, 19 nt, Artificial Sequence
  Description of Artificial Sequence: Synthetic oligonucleotide
cagagccucuaguuggugu

SEQ ID NO: 3013140 - RNA, 19 nt, Artificial Sequence
  Description of Artificial Sequence: Synthetic oligonucleotide
ucccagacacaggcauaca

SEQ ID NO: 3013141 - RNA, 19 nt, Artificial Sequence
  Description of Artificial Sequence: Synthetic oligonucleotide
gagcauuacuuugggguau

SEQ ID NO: 3013142 - RNA, 19 nt, Artificial Sequence
  Description of Artificial Sequence: Synthetic oligonucleotide
ggcuuggagucuacagagc

SEQ ID NO: 3013143 - RNA, 19 nt, Artificial Sequence
  Description of Artificial Sequence: Synthetic oligonucleotide
guauugggcuuggagucua

SEQ ID NO: 3013144 - RNA, 19 nt, Artificial Sequence
  Description of Artificial Sequence: Synthetic oligonucleotide
gugucccuagagaaggggu

SEQ ID NO: 3013145 - RNA, 19 nt, Artificial Sequence
  Description of Artificial Sequence: Synthetic oligonucleotide
gcauagauguacaaauauu

SEQ ID NO: 3013146 - RNA, 19 nt, Artificial Sequence
  Description of Artificial Sequence: Synthetic oligonucleotide
aggcaccauggcccauuca

SEQ ID NO: 3013147 - RNA, 19 nt, Artificial Sequence
  Description of Artificial Sequence: Synthetic oligonucleotide
ccauucaaguauuuugcau

SEQ ID NO: 3013148 - RNA, 19 nt, Artificial Sequence
  Description of Artificial Sequence: Synthetic oligonucleotide
uugggguauugggcuugga

SEQ ID NO: 3013149 - RNA, 19 nt, Artificial Sequence
  Description of Artificial Sequence: Synthetic oligonucleotide
ggacacuggagcauuacuu

SEQ ID NO: 3013150 - RNA, 19 nt, Artificial Sequence
  Description of Artificial Sequence: Synthetic oligonucleotide
gcauuacuuugggguauug

SEQ ID NO: 3013151 - RNA, 19 nt, Artificial Sequence
  Description of Artificial Sequence: Synthetic oligonucleotide
ccaguucguguucccuggc

SEQ ID NO: 3013152 - RNA, 19 nt, Artificial Sequence
  Description of Artificial Sequence: Synthetic oligonucleotide
caagagaggagaggacuau

SEQ ID NO: 3013153 - RNA, 19 nt, Artificial Sequence
  Description of Artificial Sequence: Synthetic oligonucleotide
caguucguguucccuggcu

SEQ ID NO: 3013154 - RNA, 19 nt, Artificial Sequence
  Description of Artificial Sequence: Synthetic oligonucleotide
gguauugggcuuggagucu

SEQ ID NO: 3013155 - RNA, 19 nt, Artificial Sequence
  Description of Artificial Sequence: Synthetic oligonucleotide
auggcccauucaaguauuu

SEQ ID NO: 3013156 - RNA, 19 nt, Artificial Sequence
  Description of Artificial Sequence: Synthetic oligonucleotide
ggagucuacagagccucua

SEQ ID NO: 3013157 - RNA, 19 nt, Artificial Sequence
  Description of Artificial Sequence: Synthetic oligonucleotide
acaaggcaccauggcccau

SEQ ID NO: 3013158 - RNA, 19 nt, Artificial Sequence
  Description of Artificial Sequence: Synthetic oligonucleotide
ccauggcccauucaaguau

SEQ ID NO: 3013159 - RNA, 19 nt, Artificial Sequence
  Description of Artificial Sequence: Synthetic oligonucleotide
cacgaggacacuggagcau

SEQ ID NO: 3013160 - RNA, 19 nt, Artificial Sequence
  Description of Artificial Sequence: Synthetic oligonucleotide
gggcugucacuacaugcau

SEQ ID NO: 3013161 - RNA, 19 nt, Artificial Sequence
  Description of Artificial Sequence: Synthetic oligonucleotide
ggcuuguguguggaguccu

SEQ ID NO: 3013162 - RNA, 19 nt, Artificial Sequence
  Description of Artificial Sequence: Synthetic oligonucleotide
cccuggcuuguguguggag

SEQ ID NO: 3013163 - RNA, 19 nt, Artificial Sequence
  Description of Artificial Sequence: Synthetic oligonucleotide
ccuggcuuguguguggagu

SEQ ID NO: 3013164 - RNA, 19 nt, Artificial Sequence
  Description of Artificial Sequence: Synthetic oligonucleotide
caaggcaccauggcccauu

SEQ ID NO: 3013165 - RNA, 19 nt, Artificial Sequence
  Description of Artificial Sequence: Synthetic oligonucleotide
ccucuaguuggugucccua

SEQ ID NO: 3013166 - RNA, 19 nt, Artificial Sequence
  Description of Artificial Sequence: Synthetic oligonucleotide
ggcugucacuacaugcauu

SEQ ID NO: 3013167 - RNA, 19 nt, Artificial Sequence
  Description of Artificial Sequence: Synthetic oligonucleotide
cccuagagaagggguaccu

SEQ ID NO: 3013168 - RNA, 19 nt, Artificial Sequence
  Description of Artificial Sequence: Synthetic oligonucleotide
cguguucccuggcuugugu

SEQ ID NO: 3013169 - RNA, 19 nt, Artificial Sequence
  Description of Artificial Sequence: Synthetic oligonucleotide
cgaggacacuggagcauua

SEQ ID NO: 3013170 - RNA, 19 nt, Artificial Sequence
  Description of Artificial Sequence: Synthetic oligonucleotide
ccuagagaagggguaccuu

SEQ ID NO: 3013171 - RNA, 19 nt, Artificial Sequence
  Description of Artificial Sequence: Synthetic oligonucleotide
gcccuggaucccagacaca

SEQ ID NO: 3013172 - RNA, 19 nt, Artificial Sequence
  Description of Artificial Sequence: Synthetic oligonucleotide
ggguaccuuuccaguucgu

SEQ ID NO: 3013173 - RNA, 19 nt, Artificial Sequence
  Description of Artificial Sequence: Synthetic oligonucleotide
aaucuguacuuauacaucc

SEQ ID NO: 3013174 - RNA, 19 nt, Artificial Sequence
  Description of Artificial Sequence: Synthetic oligonucleotide
aaacacauaugucacaugg

SEQ ID NO: 3013175 - RNA, 19 nt, Artificial Sequence
  Description of Artificial Sequence: Synthetic oligonucleotide
aaaaucuguacuuauacau

SEQ ID NO: 3013176 - RNA, 19 nt, Artificial Sequence
  Description of Artificial Sequence: Synthetic oligonucleotide
ucuucuagaaacuccaggg

SEQ ID NO: 3013177 - RNA, 19 nt, Artificial Sequence
  Description of Artificial Sequence: Synthetic oligonucleotide
aaagcuaucuuucuaggug

SEQ ID NO: 3013178 - RNA, 19 nt, Artificial Sequence
  Description of Artificial Sequence: Synthetic oligonucleotide
uuaaaaucuguacuuauac

SEQ ID NO: 3013179 - RNA, 19 nt, Artificial Sequence
  Description of Artificial Sequence: Synthetic oligonucleotide
aaaggggaaacacauaugu

SEQ ID NO: 3013180 - RNA, 19 nt, Artificial Sequence
  Description of Artificial Sequence: Synthetic oligonucleotide
acacauaugucacaugggc

SEQ ID NO: 3013181 - RNA, 19 nt, Artificial Sequence
  Description of Artificial Sequence: Synthetic oligonucleotide
ucacccaccagcaugaaag

SEQ ID NO: 3013182 - RNA, 19 nt, Artificial Sequence
  Description of Artificial Sequence: Synthetic oligonucleotide
agaaagucagcccacacag

SEQ ID NO: 3013183 - RNA, 19 nt, Artificial Sequence
  Description of Artificial Sequence: Synthetic oligonucleotide
uacuuauacauccucucgg

SEQ ID NO: 3013184 - RNA, 19 nt, Artificial Sequence
  Description of Artificial Sequence: Synthetic oligonucleotide
ugaaaggggaaacacauau

SEQ ID NO: 3013185 - RNA, 19 nt, Artificial Sequence
  Description of Artificial Sequence: Synthetic oligonucleotide
uucuucuagaaacuccagg

SEQ ID NO: 3013186 - RNA, 19 nt, Artificial Sequence
  Description of Artificial Sequence: Synthetic oligonucleotide
uauacauccucucgggucc

SEQ ID NO: 3013187 - RNA, 19 nt, Artificial Sequence
  Description of Artificial Sequence: Synthetic oligonucleotide
aagacggccaccccugccc

SEQ ID NO: 3013188 - RNA, 19 nt, Artificial Sequence
  Description of Artificial Sequence: Synthetic oligonucleotide
aguaucuugucuuuuaaaa

SEQ ID NO: 3013189 - RNA, 19 nt, Artificial Sequence
  Description of Artificial Sequence: Synthetic oligonucleotide
aaaucuguacuuauacauc

SEQ ID NO: 3013190 - RNA, 19 nt, Artificial Sequence
  Description of Artificial Sequence: Synthetic oligonucleotide
ucuagaaacuccagggagc

SEQ ID NO: 3013191 - RNA, 19 nt, Artificial Sequence
  Description of Artificial Sequence: Synthetic oligonucleotide
ggaaguuuaaaugaguucc

SEQ ID NO: 3013192 - RNA, 19 nt, Artificial Sequence
  Description of Artificial Sequence: Synthetic oligonucleotide
acuuauacauccucucggg

SEQ ID NO: 3013193 - RNA, 19 nt, Artificial Sequence
  Description of Artificial Sequence: Synthetic oligonucleotide
accuuuagaaagucagccc

SEQ ID NO: 3013194 - RNA, 19 nt, Artificial Sequence
  Description of Artificial Sequence: Synthetic oligonucleotide
agucagcccacacaggagc

SEQ ID NO: 3013195 - RNA, 19 nt, Artificial Sequence
  Description of Artificial Sequence: Synthetic oligonucleotide
acauaugucacaugggcca

SEQ ID NO: 3013196 - RNA, 19 nt, Artificial Sequence
  Description of Artificial Sequence: Synthetic oligonucleotide
uaaaaucuguacuuauaca

SEQ ID NO: 3013197 - RNA, 19 nt, Artificial Sequence
  Description of Artificial Sequence: Synthetic oligonucleotide
cuagguguggacacggugg

SEQ ID NO: 3013198 - RNA, 19 nt, Artificial Sequence
  Description of Artificial Sequence: Synthetic oligonucleotide
aagcuaucuuucuaggugu

SEQ ID NO: 3013199 - RNA, 19 nt, Artificial Sequence
  Description of Artificial Sequence: Synthetic oligonucleotide
aggaaguuuaaaugaguuc

SEQ ID NO: 3013200 - RNA, 19 nt, Artificial Sequence
  Description of Artificial Sequence: Synthetic oligonucleotide
uggcgugaccuuuagaaag

SEQ ID NO: 3013201 - RNA, 19 nt, Artificial Sequence
  Description of Artificial Sequence: Synthetic oligonucleotide
uuucccuuggucuuccaag

SEQ ID NO: 3013202 - RNA, 19 nt, Artificial Sequence
  Description of Artificial Sequence: Synthetic oligonucleotide
cucaccaccaucugaacag

SEQ ID NO: 3013203 - RNA, 19 nt, Artificial Sequence
  Description of Artificial Sequence: Synthetic oligonucleotide
guacuuauacauccucucg

SEQ ID NO: 3013204 - RNA, 19 nt, Artificial Sequence
  Description of Artificial Sequence: Synthetic oligonucleotide
agcaucuguacaugugacc

SEQ ID NO: 3013205 - RNA, 19 nt, Artificial Sequence
  Description of Artificial Sequence: Synthetic oligonucleotide
ugaacaggagccaggaagu

SEQ ID NO: 3013206 - RNA, 19 nt, Artificial Sequence
  Description of Artificial Sequence: Synthetic oligonucleotide
uuauacauccucucggguc

SEQ ID NO: 3013207 - RNA, 19 nt, Artificial Sequence
  Description of Artificial Sequence: Synthetic oligonucleotide
gaccuuuagaaagucagcc

SEQ ID NO: 3013208 - RNA, 19 nt, Artificial Sequence
  Description of Artificial Sequence: Synthetic oligonucleotide
uguacuuauacauccucuc

SEQ ID NO: 3013209 - RNA, 19 nt, Artificial Sequence
  Description of Artificial Sequence: Synthetic oligonucleotide
agaaacuccagggagcuag

SEQ ID NO: 3013210 - RNA, 19 nt, Artificial Sequence
  Description of Artificial Sequence: Synthetic oligonucleotide
uagaaagucagcccacaca

SEQ ID NO: 3013211 - RNA, 19 nt, Artificial Sequence
  Description of Artificial Sequence: Synthetic oligonucleotide
gagccaggaaguuuaaaug

SEQ ID NO: 3013212 - RNA, 19 nt, Artificial Sequence
  Description of Artificial Sequence: Synthetic oligonucleotide
agcaugaaaggggaaacac

SEQ ID NO: 3013213 - RNA, 19 nt, Artificial Sequence
  Description of Artificial Sequence: Synthetic oligonucleotide
ugucacaugggccaacagu

SEQ ID NO: 3013214 - RNA, 19 nt, Artificial Sequence
  Description of Artificial Sequence: Synthetic oligonucleotide
uccaagcugugucugcugg

SEQ ID NO: 3013215 - RNA, 19 nt, Artificial Sequence
  Description of Artificial Sequence: Synthetic oligonucleotide
agagcaucuguacauguga

SEQ ID NO: 3013216 - RNA, 19 nt, Artificial Sequence
  Description of Artificial Sequence: Synthetic oligonucleotide
gugaccuuuagaaagucag

SEQ ID NO: 3013217 - RNA, 19 nt, Artificial Sequence
  Description of Artificial Sequence: Synthetic oligonucleotide
aacacauaugucacauggg

SEQ ID NO: 3013218 - RNA, 19 nt, Artificial Sequence
  Description of Artificial Sequence: Synthetic oligonucleotide
cacauaugucacaugggcc

SEQ ID NO: 3013219 - RNA, 19 nt, Artificial Sequence
  Description of Artificial Sequence: Synthetic oligonucleotide
ucuguacuuauacauccuc

SEQ ID NO: 3013220 - RNA, 19 nt, Artificial Sequence
  Description of Artificial Sequence: Synthetic oligonucleotide
guuggcgugaccuuuagaa

SEQ ID NO: 3013221 - RNA, 19 nt, Artificial Sequence
  Description of Artificial Sequence: Synthetic oligonucleotide
acacaggagccucaccacc

SEQ ID NO: 3013222 - RNA, 19 nt, Artificial Sequence
  Description of Artificial Sequence: Synthetic oligonucleotide
ucuagguguggacacggug

SEQ ID NO: 3013223 - RNA, 19 nt, Artificial Sequence
  Description of Artificial Sequence: Synthetic oligonucleotide
ugaccuuuagaaagucagc

SEQ ID NO: 3013224 - RNA, 19 nt, Artificial Sequence
  Description of Artificial Sequence: Synthetic oligonucleotide
uuucuagguguggacacgg

SEQ ID NO: 3013225 - RNA, 19 nt, Artificial Sequence
  Description of Artificial Sequence: Synthetic oligonucleotide
ucuuucuagguguggacac

SEQ ID NO: 3013226 - RNA, 19 nt, Artificial Sequence
  Description of Artificial Sequence: Synthetic oligonucleotide
caccaucugaacaggagcc

SEQ ID NO: 3013227 - RNA, 19 nt, Artificial Sequence
  Description of Artificial Sequence: Synthetic oligonucleotide
uggucuuccaagcuguguc

SEQ ID NO: 3013228 - RNA, 19 nt, Artificial Sequence
  Description of Artificial Sequence: Synthetic oligonucleotide
uuagaaagucagcccacac

SEQ ID NO: 3013229 - RNA, 19 nt, Artificial Sequence
  Description of Artificial Sequence: Synthetic oligonucleotide
caguucuucuagaaacucc

SEQ ID NO: 3013230 - RNA, 19 nt, Artificial Sequence
  Description of Artificial Sequence: Synthetic oligonucleotide
uguacaugugacccagagu

SEQ ID NO: 3013231 - RNA, 19 nt, Artificial Sequence
  Description of Artificial Sequence: Synthetic oligonucleotide
aggguaggcggccaagacg

SEQ ID NO: 3013232 - RNA, 19 nt, Artificial Sequence
  Description of Artificial Sequence: Synthetic oligonucleotide
aguuuaaaugaguuccuuu

SEQ ID NO: 3013233 - RNA, 19 nt, Artificial Sequence
  Description of Artificial Sequence: Synthetic oligonucleotide
aguucuucuagaaacucca

SEQ ID NO: 3013234 - RNA, 19 nt, Artificial Sequence
  Description of Artificial Sequence: Synthetic oligonucleotide
aaggggaaacacauauguc

SEQ ID NO: 3013235 - RNA, 19 nt, Artificial Sequence
  Description of Artificial Sequence: Synthetic oligonucleotide
cuuuagaaagucagcccac

SEQ ID NO: 3013236 - RNA, 19 nt, Artificial Sequence
  Description of Artificial Sequence: Synthetic oligonucleotide
ugucacucacccaccagca

SEQ ID NO: 3013237 - RNA, 19 nt, Artificial Sequence
  Description of Artificial Sequence: Synthetic oligonucleotide
acaugugacccagaguauc

SEQ ID NO: 3013238 - RNA, 19 nt, Artificial Sequence
  Description of Artificial Sequence: Synthetic oligonucleotide
ucuaccccauuucccuugg

SEQ ID NO: 3013239 - RNA, 19 nt, Artificial Sequence
  Description of Artificial Sequence: Synthetic oligonucleotide
cugucacucacccaccagc

SEQ ID NO: 3013240 - RNA, 19 nt, Artificial Sequence
  Description of Artificial Sequence: Synthetic oligonucleotide
ugugacccagaguaucuug

SEQ ID NO: 3013241 - RNA, 19 nt, Artificial Sequence
  Description of Artificial Sequence: Synthetic oligonucleotide
uggucuaccccauuucccu

SEQ ID NO: 3013242 - RNA, 19 nt, Artificial Sequence
  Description of Artificial Sequence: Synthetic oligonucleotide
gacacgguggucuacccca

SEQ ID NO: 3013243 - RNA, 19 nt, Artificial Sequence
  Description of Artificial Sequence: Synthetic oligonucleotide
gaaacacauaugucacaug

SEQ ID NO: 3013244 - RNA, 19 nt, Artificial Sequence
  Description of Artificial Sequence: Synthetic oligonucleotide
agggagcuaggguaggcgg

SEQ ID NO: 3013245 - RNA, 19 nt, Artificial Sequence
  Description of Artificial Sequence: Synthetic oligonucleotide
uuuagaaagucagcccaca

SEQ ID NO: 3013246 - RNA, 19 nt, Artificial Sequence
  Description of Artificial Sequence: Synthetic oligonucleotide
cuguacaugugacccagag

SEQ ID NO: 3013247 - RNA, 19 nt, Artificial Sequence
  Description of Artificial Sequence: Synthetic oligonucleotide
accccauuucccuuggucu

SEQ ID NO: 3013248 - RNA, 19 nt, Artificial Sequence
  Description of Artificial Sequence: Synthetic oligonucleotide
caucugaacaggagccagg

SEQ ID NO: 3013249 - RNA, 19 nt, Artificial Sequence
  Description of Artificial Sequence: Synthetic oligonucleotide
aagagcaucuguacaugug

SEQ ID NO: 3013250 - RNA, 19 nt, Artificial Sequence
  Description of Artificial Sequence: Synthetic oligonucleotide
guuuaaaugaguuccuuuu

SEQ ID NO: 3013251 - RNA, 19 nt, Artificial Sequence
  Description of Artificial Sequence: Synthetic oligonucleotide
aucuguacaugugacccag

SEQ ID NO: 3013252 - RNA, 19 nt, Artificial Sequence
  Description of Artificial Sequence: Synthetic oligonucleotide
gaaaggggaaacacauaug

SEQ ID NO: 3013253 - RNA, 19 nt, Artificial Sequence
  Description of Artificial Sequence: Synthetic oligonucleotide
agaguaucuugucuuuuaa

SEQ ID NO: 3013254 - RNA, 19 nt, Artificial Sequence
  Description of Artificial Sequence: Synthetic oligonucleotide
gcaucuguacaugugaccc

SEQ ID NO: 3013255 - RNA, 19 nt, Artificial Sequence
  Description of Artificial Sequence: Synthetic oligonucleotide
ucuuccaagcugugucugc

SEQ ID NO: 3013256 - RNA, 19 nt, Artificial Sequence
  Description of Artificial Sequence: Synthetic oligonucleotide
aaacuccagggagcuaggg

SEQ ID NO: 3013257 - RNA, 19 nt, Artificial Sequence
  Description of Artificial Sequence: Synthetic oligonucleotide
ggguaggcggccaagacgg

SEQ ID NO: 3013258 - RNA, 19 nt, Artificial Sequence
  Description of Artificial Sequence: Synthetic oligonucleotide
cugcccaaagcuaucuuuc

SEQ ID NO: 3013259 - RNA, 19 nt, Artificial Sequence
  Description of Artificial Sequence: Synthetic oligonucleotide
uaccccauuucccuugguc

SEQ ID NO: 3013260 - RNA, 19 nt, Artificial Sequence
  Description of Artificial Sequence: Synthetic oligonucleotide
cccaaagcuaucuuucuag

SEQ ID NO: 3013261 - RNA, 19 nt, Artificial Sequence
  Description of Artificial Sequence: Synthetic oligonucleotide
gaaagucagcccacacagg

SEQ ID NO: 3013262 - RNA, 19 nt, Artificial Sequence
  Description of Artificial Sequence: Synthetic oligonucleotide
uagguguggacacgguggu

SEQ ID NO: 3013263 - RNA, 19 nt, Artificial Sequence
  Description of Artificial Sequence: Synthetic oligonucleotide
caccaacugucacucaccc

SEQ ID NO: 3013264 - RNA, 19 nt, Artificial Sequence
  Description of Artificial Sequence: Synthetic oligonucleotide
agaagagcaucuguacaug

SEQ ID NO: 3013265 - RNA, 19 nt, Artificial Sequence
  Description of Artificial Sequence: Synthetic oligonucleotide
uaugucacaugggccaaca

SEQ ID NO: 3013266 - RNA, 19 nt, Artificial Sequence
  Description of Artificial Sequence: Synthetic oligonucleotide
aaguuuaaaugaguuccuu

SEQ ID NO: 3013267 - RNA, 19 nt, Artificial Sequence
  Description of Artificial Sequence: Synthetic oligonucleotide
cccaccagcaugaaagggg

SEQ ID NO: 3013268 - RNA, 19 nt, Artificial Sequence
  Description of Artificial Sequence: Synthetic oligonucleotide
uaggcggccaagacggcca

SEQ ID NO: 3013269 - RNA, 19 nt, Artificial Sequence
  Description of Artificial Sequence: Synthetic oligonucleotide
cuuucuagguguggacacg

SEQ ID NO: 3013270 - RNA, 19 nt, Artificial Sequence
  Description of Artificial Sequence: Synthetic oligonucleotide
gaguaucuugucuuuuaaa

SEQ ID NO: 3013271 - RNA, 19 nt, Artificial Sequence
  Description of Artificial Sequence: Synthetic oligonucleotide
cuucuagaaacuccaggga

SEQ ID NO: 3013272 - RNA, 19 nt, Artificial Sequence
  Description of Artificial Sequence: Synthetic oligonucleotide
uuggcgugaccuuuagaaa

SEQ ID NO: 3013273 - RNA, 19 nt, Artificial Sequence
  Description of Artificial Sequence: Synthetic oligonucleotide
ucaccaccaucugaacagg

SEQ ID NO: 3013274 - RNA, 19 nt, Artificial Sequence
  Description of Artificial Sequence: Synthetic oligonucleotide
gguggucuaccccauuucc

SEQ ID NO: 3013275 - RNA, 19 nt, Artificial Sequence
  Description of Artificial Sequence: Synthetic oligonucleotide
ccaaagcuaucuuucuagg

SEQ ID NO: 3013276 - RNA, 19 nt, Artificial Sequence
  Description of Artificial Sequence: Synthetic oligonucleotide
aagucagcccacacaggag

SEQ ID NO: 3013277 - RNA, 19 nt, Artificial Sequence
  Description of Artificial Sequence: Synthetic oligonucleotide
ugcccaaagcuaucuuucu

SEQ ID NO: 3013278 - RNA, 19 nt, Artificial Sequence
  Description of Artificial Sequence: Synthetic oligonucleotide
gaaacuccagggagcuagg

SEQ ID NO: 3013279 - RNA, 19 nt, Artificial Sequence
  Description of Artificial Sequence: Synthetic oligonucleotide
acccagaguaucuugucuu

SEQ ID NO: 3013280 - RNA, 19 nt, Artificial Sequence
  Description of Artificial Sequence: Synthetic oligonucleotide
ugggccaacaguucuucua

SEQ ID NO: 3013281 - RNA, 19 nt, Artificial Sequence
  Description of Artificial Sequence: Synthetic oligonucleotide
uaggguaggcggccaagac

SEQ ID NO: 3013282 - RNA, 19 nt, Artificial Sequence
  Description of Artificial Sequence: Synthetic oligonucleotide
uacaugugacccagaguau

SEQ ID NO: 3013283 - RNA, 19 nt, Artificial Sequence
  Description of Artificial Sequence: Synthetic oligonucleotide
gggccaacaguucuucuag

SEQ ID NO: 3013284 - RNA, 19 nt, Artificial Sequence
  Description of Artificial Sequence: Synthetic oligonucleotide
cuaucuuucuaggugugga

SEQ ID NO: 3013285 - RNA, 19 nt, Artificial Sequence
  Description of Artificial Sequence: Synthetic oligonucleotide
agcugugucugcuggccug

SEQ ID NO: 3013286 - RNA, 19 nt, Artificial Sequence
  Description of Artificial Sequence: Synthetic oligonucleotide
aagcugugucugcuggccu

SEQ ID NO: 3013287 - RNA, 19 nt, Artificial Sequence
  Description of Artificial Sequence: Synthetic oligonucleotide
ccuuuagaaagucagccca

SEQ ID NO: 3013288 - RNA, 19 nt, Artificial Sequence
  Description of Artificial Sequence: Synthetic oligonucleotide
cuccagggagcuaggguag

SEQ ID NO: 3013289 - RNA, 19 nt, Artificial Sequence
  Description of Artificial Sequence: Synthetic oligonucleotide
aucugaacaggagccagga

SEQ ID NO: 3013290 - RNA, 19 nt, Artificial Sequence
  Description of Artificial Sequence: Synthetic oligonucleotide
cacccaccagcaugaaagg

SEQ ID NO: 3013291 - RNA, 19 nt, Artificial Sequence
  Description of Artificial Sequence: Synthetic oligonucleotide
gucuaccccauuucccuug

SEQ ID NO: 3013292 - RNA, 19 nt, Artificial Sequence
  Description of Artificial Sequence: Synthetic oligonucleotide
gaagagcaucuguacaugu

SEQ ID NO: 3013293 - RNA, 19 nt, Artificial Sequence
  Description of Artificial Sequence: Synthetic oligonucleotide
accaccaucugaacaggag

SEQ ID NO: 3013294 - RNA, 19 nt, Artificial Sequence
  Description of Artificial Sequence: Synthetic oligonucleotide
ugacccagaguaucuuguc

SEQ ID NO: 3013295 - RNA, 19 nt, Artificial Sequence
  Description of Artificial Sequence: Synthetic oligonucleotide
gagcaucuguacaugugac

SEQ ID NO: 3013296 - RNA, 19 nt, Artificial Sequence
  Description of Artificial Sequence: Synthetic oligonucleotide
uguuggcgugaccuuuaga

SEQ ID NO: 3013297 - RNA, 19 nt, Artificial Sequence
  Description of Artificial Sequence: Synthetic oligonucleotide
auaugucacaugggccaac

SEQ ID NO: 3013298 - RNA, 19 nt, Artificial Sequence
  Description of Artificial Sequence: Synthetic oligonucleotide
auuucccuuggucuuccaa

SEQ ID NO: 3013299 - RNA, 19 nt, Artificial Sequence
  Description of Artificial Sequence: Synthetic oligonucleotide
caacugucacucacccacc

SEQ ID NO: 3013300 - RNA, 19 nt, Artificial Sequence
  Description of Artificial Sequence: Synthetic oligonucleotide
aacaggagccaggaaguuu

SEQ ID NO: 3013301 - RNA, 19 nt, Artificial Sequence
  Description of Artificial Sequence: Synthetic oligonucleotide
uuccaagcugugucugcug

SEQ ID NO: 3013302 - RNA, 19 nt, Artificial Sequence
  Description of Artificial Sequence: Synthetic oligonucleotide
ccaccaucugaacaggagc

SEQ ID NO: 3013303 - RNA, 19 nt, Artificial Sequence
  Description of Artificial Sequence: Synthetic oligonucleotide
ucccuuggucuuccaagcu

SEQ ID NO: 3013304 - RNA, 19 nt, Artificial Sequence
  Description of Artificial Sequence: Synthetic oligonucleotide
accagcaugaaaggggaaa

SEQ ID NO: 3013305 - RNA, 19 nt, Artificial Sequence
  Description of Artificial Sequence: Synthetic oligonucleotide
ugugucugcuggccuggca

SEQ ID NO: 3013306 - RNA, 19 nt, Artificial Sequence
  Description of Artificial Sequence: Synthetic oligonucleotide
acaggagccaggaaguuua

SEQ ID NO: 3013307 - RNA, 19 nt, Artificial Sequence
  Description of Artificial Sequence: Synthetic oligonucleotide
auccucucgggucccaccu

SEQ ID NO: 3013308 - RNA, 19 nt, Artificial Sequence
  Description of Artificial Sequence: Synthetic oligonucleotide
guucuucuagaaacuccag

SEQ ID NO: 3013309 - RNA, 19 nt, Artificial Sequence
  Description of Artificial Sequence: Synthetic oligonucleotide
ucgggucccaccucccgcc

SEQ ID NO: 3013310 - RNA, 19 nt, Artificial Sequence
  Description of Artificial Sequence: Synthetic oligonucleotide
gaaguuuaaaugaguuccu

SEQ ID NO: 3013311 - RNA, 19 nt, Artificial Sequence
  Description of Artificial Sequence: Synthetic oligonucleotide
aggagccucaccaccaucu

SEQ ID NO: 3013312 - RNA, 19 nt, Artificial Sequence
  Description of Artificial Sequence: Synthetic oligonucleotide
ucuguacaugugacccaga

SEQ ID NO: 3013313 - RNA, 19 nt, Artificial Sequence
  Description of Artificial Sequence: Synthetic oligonucleotide
augucacaugggccaacag

SEQ ID NO: 3013314 - RNA, 19 nt, Artificial Sequence
  Description of Artificial Sequence: Synthetic oligonucleotide
uucuagguguggacacggu

SEQ ID NO: 3013315 - RNA, 19 nt, Artificial Sequence
  Description of Artificial Sequence: Synthetic oligonucleotide
auacauccucucggguccc

SEQ ID NO: 3013316 - RNA, 19 nt, Artificial Sequence
  Description of Artificial Sequence: Synthetic oligonucleotide
acccaccagcaugaaaggg

SEQ ID NO: 3013317 - RNA, 19 nt, Artificial Sequence
  Description of Artificial Sequence: Synthetic oligonucleotide
cacucacccaccagcauga

SEQ ID NO: 3013318 - RNA, 19 nt, Artificial Sequence
  Description of Artificial Sequence: Synthetic oligonucleotide
gccaggaaguuuaaaugag

SEQ ID NO: 3013319 - RNA, 19 nt, Artificial Sequence
  Description of Artificial Sequence: Synthetic oligonucleotide
uggacacgguggucuaccc

SEQ ID NO: 3013320 - RNA, 19 nt, Artificial Sequence
  Description of Artificial Sequence: Synthetic oligonucleotide
uuggucuuccaagcugugu

SEQ ID NO: 3013321 - RNA, 19 nt, Artificial Sequence
  Description of Artificial Sequence: Synthetic oligonucleotide
cuguacuuauacauccucu

SEQ ID NO: 3013322 - RNA, 19 nt, Artificial Sequence
  Description of Artificial Sequence: Synthetic oligonucleotide
cagggagcuaggguaggcg

SEQ ID NO: 3013323 - RNA, 19 nt, Artificial Sequence
  Description of Artificial Sequence: Synthetic oligonucleotide
cauccucucgggucccacc

SEQ ID NO: 3013324 - RNA, 19 nt, Artificial Sequence
  Description of Artificial Sequence: Synthetic oligonucleotide
cuuggucuuccaagcugug

SEQ ID NO: 3013325 - RNA, 19 nt, Artificial Sequence
  Description of Artificial Sequence: Synthetic oligonucleotide
cacaggagccucaccacca

SEQ ID NO: 3013326 - RNA, 19 nt, Artificial Sequence
  Description of Artificial Sequence: Synthetic oligonucleotide
aucuguacuuauacauccu

SEQ ID NO: 3013327 - RNA, 19 nt, Artificial Sequence
  Description of Artificial Sequence: Synthetic oligonucleotide
caggaaguuuaaaugaguu

SEQ ID NO: 3013328 - RNA, 19 nt, Artificial Sequence
  Description of Artificial Sequence: Synthetic oligonucleotide
guggacacgguggucuacc

SEQ ID NO: 3013329 - RNA, 19 nt, Artificial Sequence
  Description of Artificial Sequence: Synthetic oligonucleotide
gacccagaguaucuugucu

SEQ ID NO: 3013330 - RNA, 19 nt, Artificial Sequence
  Description of Artificial Sequence: Synthetic oligonucleotide
gcuaucuuucuaggugugg

SEQ ID NO: 3013331 - RNA, 19 nt, Artificial Sequence
  Description of Artificial Sequence: Synthetic oligonucleotide
caagacggccaccccugcc

SEQ ID NO: 3013332 - RNA, 19 nt, Artificial Sequence
  Description of Artificial Sequence: Synthetic oligonucleotide
cccagaagagcaucuguac

SEQ ID NO: 3013333 - RNA, 19 nt, Artificial Sequence
  Description of Artificial Sequence: Synthetic oligonucleotide
ggagccaggaaguuuaaau

SEQ ID NO: 3013334 - RNA, 19 nt, Artificial Sequence
  Description of Artificial Sequence: Synthetic oligonucleotide
ccuggcacccagaagagca

SEQ ID NO: 3013335 - RNA, 19 nt, Artificial Sequence
  Description of Artificial Sequence: Synthetic oligonucleotide
caucuguacaugugaccca

SEQ ID NO: 3013336 - RNA, 19 nt, Artificial Sequence
  Description of Artificial Sequence: Synthetic oligonucleotide
cagaguaucuugucuuuua

SEQ ID NO: 3013337 - RNA, 19 nt, Artificial Sequence
  Description of Artificial Sequence: Synthetic oligonucleotide
agccucaccaccaucugaa

SEQ ID NO: 3013338 - RNA, 19 nt, Artificial Sequence
  Description of Artificial Sequence: Synthetic oligonucleotide
acgguggucuaccccauuu

SEQ ID NO: 3013339 - RNA, 19 nt, Artificial Sequence
  Description of Artificial Sequence: Synthetic oligonucleotide
gagccucaccaccaucuga

SEQ ID NO: 3013340 - RNA, 19 nt, Artificial Sequence
  Description of Artificial Sequence: Synthetic oligonucleotide
cucgggucccaccucccgc

SEQ ID NO: 3013341 - RNA, 19 nt, Artificial Sequence
  Description of Artificial Sequence: Synthetic oligonucleotide
gucuuccaagcugugucug

SEQ ID NO: 3013342 - RNA, 19 nt, Artificial Sequence
  Description of Artificial Sequence: Synthetic oligonucleotide
caugggccaacaguucuuc

SEQ ID NO: 3013343 - RNA, 19 nt, Artificial Sequence
  Description of Artificial Sequence: Synthetic oligonucleotide
guaggcggccaagacggcc

SEQ ID NO: 3013344 - RNA, 19 nt, Artificial Sequence
  Description of Artificial Sequence: Synthetic oligonucleotide
guguuggcgugaccuuuag

SEQ ID NO: 3013345 - RNA, 19 nt, Artificial Sequence
  Description of Artificial Sequence: Synthetic oligonucleotide
gucacaugggccaacaguu

SEQ ID NO: 3013346 - RNA, 19 nt, Artificial Sequence
  Description of Artificial Sequence: Synthetic oligonucleotide
caugugacccagaguaucu

SEQ ID NO: 3013347 - RNA, 19 nt, Artificial Sequence
  Description of Artificial Sequence: Synthetic oligonucleotide
agcuaucuuucuaggugug

SEQ ID NO: 3013348 - RNA, 19 nt, Artificial Sequence
  Description of Artificial Sequence: Synthetic oligonucleotide
cuagaaacuccagggagcu

SEQ ID NO: 3013349 - RNA, 19 nt, Artificial Sequence
  Description of Artificial Sequence: Synthetic oligonucleotide
gucagcccacacaggagcc

SEQ ID NO: 3013350 - RNA, 19 nt, Artificial Sequence
  Description of Artificial Sequence: Synthetic oligonucleotide
cuuauacauccucucgggu

SEQ ID NO: 3013351 - RNA, 19 nt, Artificial Sequence
  Description of Artificial Sequence: Synthetic oligonucleotide
ccaccaacugucacucacc

SEQ ID NO: 3013352 - RNA, 19 nt, Artificial Sequence
  Description of Artificial Sequence: Synthetic oligonucleotide
ggaaacacauaugucacau

SEQ ID NO: 3013353 - RNA, 19 nt, Artificial Sequence
  Description of Artificial Sequence: Synthetic oligonucleotide
gggaaacacauaugucaca

SEQ ID NO: 3013354 - RNA, 19 nt, Artificial Sequence
  Description of Artificial Sequence: Synthetic oligonucleotide
gcaugaaaggggaaacaca

SEQ ID NO: 3013355 - RNA, 19 nt, Artificial Sequence
  Description of Artificial Sequence: Synthetic oligonucleotide
ucagcccacacaggagccu

SEQ ID NO: 3013356 - RNA, 19 nt, Artificial Sequence
  Description of Artificial Sequence: Synthetic oligonucleotide
cccaccaacugucacucac

SEQ ID NO: 3013357 - RNA, 19 nt, Artificial Sequence
  Description of Artificial Sequence: Synthetic oligonucleotide
acccagaagagcaucugua

SEQ ID NO: 3013358 - RNA, 19 nt, Artificial Sequence
  Description of Artificial Sequence: Synthetic oligonucleotide
acaggagccucaccaccau

SEQ ID NO: 3013359 - RNA, 19 nt, Artificial Sequence
  Description of Artificial Sequence: Synthetic oligonucleotide
uguggacacgguggucuac

SEQ ID NO: 3013360 - RNA, 19 nt, Artificial Sequence
  Description of Artificial Sequence: Synthetic oligonucleotide
aggcggccaagacggccac

SEQ ID NO: 3013361 - RNA, 19 nt, Artificial Sequence
  Description of Artificial Sequence: Synthetic oligonucleotide
gccaacaguucuucuagaa

SEQ ID NO: 3013362 - RNA, 19 nt, Artificial Sequence
  Description of Artificial Sequence: Synthetic oligonucleotide
ggagcuaggguaggcggcc

SEQ ID NO: 3013363 - RNA, 19 nt, Artificial Sequence
  Description of Artificial Sequence: Synthetic oligonucleotide
ccagcaugaaaggggaaac

SEQ ID NO: 3013364 - RNA, 19 nt, Artificial Sequence
  Description of Artificial Sequence: Synthetic oligonucleotide
cuggccuggcacccagaag

SEQ ID NO: 3013365 - RNA, 19 nt, Artificial Sequence
  Description of Artificial Sequence: Synthetic oligonucleotide
ccagaagagcaucuguaca

SEQ ID NO: 3013366 - RNA, 19 nt, Artificial Sequence
  Description of Artificial Sequence: Synthetic oligonucleotide
ggacacgguggucuacccc

SEQ ID NO: 3013367 - RNA, 19 nt, Artificial Sequence
  Description of Artificial Sequence: Synthetic oligonucleotide
agacggccaccccugccca

SEQ ID NO: 3013368 - RNA, 19 nt, Artificial Sequence
  Description of Artificial Sequence: Synthetic oligonucleotide
cucucgggucccaccuccc

SEQ ID NO: 3013369 - RNA, 19 nt, Artificial Sequence
  Description of Artificial Sequence: Synthetic oligonucleotide
cccuuggucuuccaagcug

SEQ ID NO: 3013370 - RNA, 19 nt, Artificial Sequence
  Description of Artificial Sequence: Synthetic oligonucleotide
augaaaggggaaacacaua

SEQ ID NO: 3013371 - RNA, 19 nt, Artificial Sequence
  Description of Artificial Sequence: Synthetic oligonucleotide
cuaggguaggcggccaaga

SEQ ID NO: 3013372 - RNA, 19 nt, Artificial Sequence
  Description of Artificial Sequence: Synthetic oligonucleotide
cagcaugaaaggggaaaca

SEQ ID NO: 3013373 - RNA, 19 nt, Artificial Sequence
  Description of Artificial Sequence: Synthetic oligonucleotide
ggagccucaccaccaucug

SEQ ID NO: 3013374 - RNA, 19 nt, Artificial Sequence
  Description of Artificial Sequence: Synthetic oligonucleotide
agguguggacacggugguc

SEQ ID NO: 3013375 - RNA, 19 nt, Artificial Sequence
  Description of Artificial Sequence: Synthetic oligonucleotide
uggcacccagaagagcauc

SEQ ID NO: 3013376 - RNA, 19 nt, Artificial Sequence
  Description of Artificial Sequence: Synthetic oligonucleotide
cauaugucacaugggccaa

SEQ ID NO: 3013377 - RNA, 19 nt, Artificial Sequence
  Description of Artificial Sequence: Synthetic oligonucleotide
gguguggacacgguggucu

SEQ ID NO: 3013378 - RNA, 19 nt, Artificial Sequence
  Description of Artificial Sequence: Synthetic oligonucleotide
uccucucgggucccaccuc

SEQ ID NO: 3013379 - RNA, 19 nt, Artificial Sequence
  Description of Artificial Sequence: Synthetic oligonucleotide
ccaagcugugucugcuggc

SEQ ID NO: 3013380 - RNA, 19 nt, Artificial Sequence
  Description of Artificial Sequence: Synthetic oligonucleotide
gcugugucugcuggccugg

SEQ ID NO: 3013381 - RNA, 19 nt, Artificial Sequence
  Description of Artificial Sequence: Synthetic oligonucleotide
ccaacaguucuucuagaaa

SEQ ID NO: 3013382 - RNA, 19 nt, Artificial Sequence
  Description of Artificial Sequence: Synthetic oligonucleotide
caccaccaucugaacagga

SEQ ID NO: 3013383 - RNA, 19 nt, Artificial Sequence
  Description of Artificial Sequence: Synthetic oligonucleotide
gugacccagaguaucuugu

SEQ ID NO: 3013384 - RNA, 19 nt, Artificial Sequence
  Description of Artificial Sequence: Synthetic oligonucleotide
agcuaggguaggcggccaa

SEQ ID NO: 3013385 - RNA, 19 nt, Artificial Sequence
  Description of Artificial Sequence: Synthetic oligonucleotide
gggagcuaggguaggcggc

SEQ ID NO: 3013386 - RNA, 19 nt, Artificial Sequence
  Description of Artificial Sequence: Synthetic oligonucleotide
augugacccagaguaucuu

SEQ ID NO: 3013387 - RNA, 19 nt, Artificial Sequence
  Description of Artificial Sequence: Synthetic oligonucleotide
ugcuggccuggcacccaga

SEQ ID NO: 3013388 - RNA, 19 nt, Artificial Sequence
  Description of Artificial Sequence: Synthetic oligonucleotide
uacauccucucggguccca

SEQ ID NO: 3013389 - RNA, 19 nt, Artificial Sequence
  Description of Artificial Sequence: Synthetic oligonucleotide
gccaagacggccaccccug

SEQ ID NO: 3013390 - RNA, 19 nt, Artificial Sequence
  Description of Artificial Sequence: Synthetic oligonucleotide
caggagccucaccaccauc

SEQ ID NO: 3013391 - RNA, 19 nt, Artificial Sequence
  Description of Artificial Sequence: Synthetic oligonucleotide
cagcccacacaggagccuc

SEQ ID NO: 3013392 - RNA, 19 nt, Artificial Sequence
  Description of Artificial Sequence: Synthetic oligonucleotide
ccucaccaccaucugaaca

SEQ ID NO: 3013393 - RNA, 19 nt, Artificial Sequence
  Description of Artificial Sequence: Synthetic oligonucleotide
accccugcccaaagcuauc

SEQ ID NO: 3013394 - RNA, 19 nt, Artificial Sequence
  Description of Artificial Sequence: Synthetic oligonucleotide
uagaaacuccagggagcua

SEQ ID NO: 3013395 - RNA, 19 nt, Artificial Sequence
  Description of Artificial Sequence: Synthetic oligonucleotide
ggucuuccaagcugugucu

SEQ ID NO: 3013396 - RNA, 19 nt, Artificial Sequence
  Description of Artificial Sequence: Synthetic oligonucleotide
cucacccaccagcaugaaa

SEQ ID NO: 3013397 - RNA, 19 nt, Artificial Sequence
  Description of Artificial Sequence: Synthetic oligonucleotide
cuuccaagcugugucugcu

SEQ ID NO: 3013398 - RNA, 19 nt, Artificial Sequence
  Description of Artificial Sequence: Synthetic oligonucleotide
gcuaggguaggcggccaag

SEQ ID NO: 3013399 - RNA, 19 nt, Artificial Sequence
  Description of Artificial Sequence: Synthetic oligonucleotide
aggagccaggaaguuuaaa

SEQ ID NO: 3013400 - RNA, 19 nt, Artificial Sequence
  Description of Artificial Sequence: Synthetic oligonucleotide
cacccagaagagcaucugu

SEQ ID NO: 3013401 - RNA, 19 nt, Artificial Sequence
  Description of Artificial Sequence: Synthetic oligonucleotide
ggccaacaguucuucuaga

SEQ ID NO: 3013402 - RNA, 19 nt, Artificial Sequence
  Description of Artificial Sequence: Synthetic oligonucleotide
ccaggaaguuuaaaugagu

SEQ ID NO: 3013403 - RNA, 19 nt, Artificial Sequence
  Description of Artificial Sequence: Synthetic oligonucleotide
ccauuucccuuggucuucc

SEQ ID NO: 3013404 - RNA, 19 nt, Artificial Sequence
  Description of Artificial Sequence: Synthetic oligonucleotide
ccuuggucuuccaagcugu

SEQ ID NO: 3013405 - RNA, 19 nt, Artificial Sequence
  Description of Artificial Sequence: Synthetic oligonucleotide
gcacccagaagagcaucug

SEQ ID NO: 3013406 - RNA, 19 nt, Artificial Sequence
  Description of Artificial Sequence: Synthetic oligonucleotide
caccccugcccaaagcuau

SEQ ID NO: 3013407 - RNA, 19 nt, Artificial Sequence
  Description of Artificial Sequence: Synthetic oligonucleotide
cauuucccuuggucuucca

SEQ ID NO: 3013408 - RNA, 19 nt, Artificial Sequence
  Description of Artificial Sequence: Synthetic oligonucleotide
cugugucugcuggccuggc

SEQ ID NO: 3013409 - RNA, 19 nt, Artificial Sequence
  Description of Artificial Sequence: Synthetic oligonucleotide
gcccaaagcuaucuuucua

SEQ ID NO: 3013410 - RNA, 19 nt, Artificial Sequence
  Description of Artificial Sequence: Synthetic oligonucleotide
guguggacacgguggucua

SEQ ID NO: 3013411 - RNA, 19 nt, Artificial Sequence
  Description of Artificial Sequence: Synthetic oligonucleotide
gagcuaggguaggcggcca

SEQ ID NO: 3013412 - RNA, 19 nt, Artificial Sequence
  Description of Artificial Sequence: Synthetic oligonucleotide
cgugaccuuuagaaaguca

SEQ ID NO: 3013413 - RNA, 19 nt, Artificial Sequence
  Description of Artificial Sequence: Synthetic oligonucleotide
gccaccccugcccaaagcu

SEQ ID NO: 3013414 - RNA, 19 nt, Artificial Sequence
  Description of Artificial Sequence: Synthetic oligonucleotide
gcuggccuggcacccagaa

SEQ ID NO: 3013415 - RNA, 19 nt, Artificial Sequence
  Description of Artificial Sequence: Synthetic oligonucleotide
ggccaagacggccaccccu

SEQ ID NO: 3013416 - RNA, 19 nt, Artificial Sequence
  Description of Artificial Sequence: Synthetic oligonucleotide
ggccaccccugcccaaagc

SEQ ID NO: 3013417 - RNA, 19 nt, Artificial Sequence
  Description of Artificial Sequence: Synthetic oligonucleotide
gccucaccaccaucugaac

SEQ ID NO: 3013418 - RNA, 19 nt, Artificial Sequence
  Description of Artificial Sequence: Synthetic oligonucleotide
ggcgugaccuuuagaaagu

SEQ ID NO: 3013419 - RNA, 19 nt, Artificial Sequence
  Description of Artificial Sequence: Synthetic oligonucleotide
ccagggagcuaggguaggc

SEQ ID NO: 3013420 - RNA, 19 nt, Artificial Sequence
  Description of Artificial Sequence: Synthetic oligonucleotide
ccaagacggccaccccugc

SEQ ID NO: 3013421 - RNA, 19 nt, Artificial Sequence
  Description of Artificial Sequence: Synthetic oligonucleotide
caggagccaggaaguuuaa

SEQ ID NO: 3013422 - RNA, 19 nt, Artificial Sequence
  Description of Artificial Sequence: Synthetic oligonucleotide
gaacaggagccaggaaguu

SEQ ID NO: 3013423 - RNA, 19 nt, Artificial Sequence
  Description of Artificial Sequence: Synthetic oligonucleotide
acggccaccccugcccaaa

SEQ ID NO: 3013424 - RNA, 19 nt, Artificial Sequence
  Description of Artificial Sequence: Synthetic oligonucleotide
gucacucacccaccagcau

SEQ ID NO: 3013425 - RNA, 19 nt, Artificial Sequence
  Description of Artificial Sequence: Synthetic oligonucleotide
agcccacacaggagccuca

SEQ ID NO: 3013426 - RNA, 19 nt, Artificial Sequence
  Description of Artificial Sequence: Synthetic oligonucleotide
cccauuucccuuggucuuc

SEQ ID NO: 3013427 - RNA, 19 nt, Artificial Sequence
  Description of Artificial Sequence: Synthetic oligonucleotide
cccacacaggagccucacc

SEQ ID NO: 3013428 - RNA, 19 nt, Artificial Sequence
  Description of Artificial Sequence: Synthetic oligonucleotide
gcgugaccuuuagaaaguc

SEQ ID NO: 3013429 - RNA, 19 nt, Artificial Sequence
  Description of Artificial Sequence: Synthetic oligonucleotide
gguguuggcgugaccuuua

SEQ ID NO: 3013430 - RNA, 19 nt, Artificial Sequence
  Description of Artificial Sequence: Synthetic oligonucleotide
gggucccaccucccgcccc

SEQ ID NO: 3013431 - RNA, 19 nt, Artificial Sequence
  Description of Artificial Sequence: Synthetic oligonucleotide
acacgguggucuaccccau

SEQ ID NO: 3013432 - RNA, 19 nt, Artificial Sequence
  Description of Artificial Sequence: Synthetic oligonucleotide
gacggccaccccugcccaa

SEQ ID NO: 3013433 - RNA, 19 nt, Artificial Sequence
  Description of Artificial Sequence: Synthetic oligonucleotide
cuggcacccagaagagcau

SEQ ID NO: 3013434 - RNA, 19 nt, Artificial Sequence
  Description of Artificial Sequence: Synthetic oligonucleotide
gccuggcacccagaagagc

SEQ ID NO: 3013435 - RNA, 19 nt, Artificial Sequence
  Description of Artificial Sequence: Synthetic oligonucleotide
ggcacccagaagagcaucu

SEQ ID NO: 3013436 - RNA, 19 nt, Artificial Sequence
  Description of Artificial Sequence: Synthetic oligonucleotide
gguaggcggccaagacggc

SEQ ID NO: 3013437 - RNA, 19 nt, Artificial Sequence
  Description of Artificial Sequence: Synthetic oligonucleotide
cgguggucuaccccauuuc

SEQ ID NO: 3013438 - RNA, 19 nt, Artificial Sequence
  Description of Artificial Sequence: Synthetic oligonucleotide
gcccacacaggagccucac

SEQ ID NO: 3013439 - RNA, 19 nt, Artificial Sequence
  Description of Artificial Sequence: Synthetic oligonucleotide
ccaccccugcccaaagcua

SEQ ID NO: 3013440 - RNA, 19 nt, Artificial Sequence
  Description of Artificial Sequence: Synthetic oligonucleotide
cuaccccauuucccuuggu

SEQ ID NO: 3013441 - RNA, 19 nt, Artificial Sequence
  Description of Artificial Sequence: Synthetic oligonucleotide
cccagaguaucuugucuuu

SEQ ID NO: 3013442 - RNA, 19 nt, Artificial Sequence
  Description of Artificial Sequence: Synthetic oligonucleotide
ggcggccaagacggccacc

SEQ ID NO: 3013443 - RNA, 19 nt, Artificial Sequence
  Description of Artificial Sequence: Synthetic oligonucleotide
ccccauuucccuuggucuu

SEQ ID NO: 3013444 - RNA, 19 nt, Artificial Sequence
  Description of Artificial Sequence: Synthetic oligonucleotide
ggguguuggcgugaccuuu

SEQ ID NO: 3013445 - RNA, 19 nt, Artificial Sequence
  Description of Artificial Sequence: Synthetic oligonucleotide
gggguguuggcgugaccuu

SEQ ID NO: 3013446 - RNA, 19 nt, Artificial Sequence
  Description of Artificial Sequence: Synthetic oligonucleotide
cggccaagacggccacccc

SEQ ID NO: 3013447 - RNA, 19 nt, Artificial Sequence
  Description of Artificial Sequence: Synthetic oligonucleotide
cgggucccaccucccgccc

SEQ ID NO: 3013448 - RNA, 19 nt, Artificial Sequence
  Description of Artificial Sequence: Synthetic oligonucleotide
ccagaguaucuugucuuuu

SEQ ID NO: 3013449 - RNA, 19 nt, Artificial Sequence
  Description of Artificial Sequence: Synthetic oligonucleotide
cacgguggucuaccccauu

SEQ ID NO: 3013450 - RNA, 19 nt, Artificial Sequence
  Description of Artificial Sequence: Synthetic oligonucleotide
cggccaccccugcccaaag

SEQ ID NO: 3013451 - RNA, 19 nt, Artificial Sequence
  Description of Artificial Sequence: Synthetic oligonucleotide
ccccaccaacugucacuca

SEQ ID NO: 3013452 - RNA, 19 nt, Artificial Sequence
  Description of Artificial Sequence: Synthetic oligonucleotide
ccccugcccaaagcuaucu

SEQ ID NO: 3013453 - RNA, 19 nt, Artificial Sequence
  Description of Artificial Sequence: Synthetic oligonucleotide
cccugcccaaagcuaucuu

SEQ ID NO: 3013454 - RNA, 19 nt, Artificial Sequence
  Description of Artificial Sequence: Synthetic oligonucleotide
auaaucuuaacauaaauac

SEQ ID NO: 3013455 - RNA, 19 nt, Artificial Sequence
  Description of Artificial Sequence: Synthetic oligonucleotide
aauacacagaguuuggagc

SEQ ID NO: 3013456 - RNA, 19 nt, Artificial Sequence
  Description of Artificial Sequence: Synthetic oligonucleotide
uuauuuauaguaaagcaag

SEQ ID NO: 3013457 - RNA, 19 nt, Artificial Sequence
  Description of Artificial Sequence: Synthetic oligonucleotide
uuuaagaagaaacuggggc

SEQ ID NO: 3013458 - RNA, 19 nt, Artificial Sequence
  Description of Artificial Sequence: Synthetic oligonucleotide
ugaagaaucccuaaaacag

SEQ ID NO: 3013459 - RNA, 19 nt, Artificial Sequence
  Description of Artificial Sequence: Synthetic oligonucleotide
cuuaacauaaauacuauag

SEQ ID NO: 3013460 - RNA, 19 nt, Artificial Sequence
  Description of Artificial Sequence: Synthetic oligonucleotide
acagaauuuggacaaaacc

SEQ ID NO: 3013461 - RNA, 19 nt, Artificial Sequence
  Description of Artificial Sequence: Synthetic oligonucleotide
aauagcaugcuaucuuucc

SEQ ID NO: 3013462 - RNA, 19 nt, Artificial Sequence
  Description of Artificial Sequence: Synthetic oligonucleotide
aaaacgucacaauuuugcc

SEQ ID NO: 3013463 - RNA, 19 nt, Artificial Sequence
  Description of Artificial Sequence: Synthetic oligonucleotide
aacauaaauacuauagacg

SEQ ID NO: 3013464 - RNA, 19 nt, Artificial Sequence
  Description of Artificial Sequence: Synthetic oligonucleotide
uuaagaagaaacuggggcg

SEQ ID NO: 3013465 - RNA, 19 nt, Artificial Sequence
  Description of Artificial Sequence: Synthetic oligonucleotide
uuuauaguaaagcaagucu

SEQ ID NO: 3013466 - RNA, 19 nt, Artificial Sequence
  Description of Artificial Sequence: Synthetic oligonucleotide
acauaaauacuauagacga

SEQ ID NO: 3013467 - RNA, 19 nt, Artificial Sequence
  Description of Artificial Sequence: Synthetic oligonucleotide
uguauucugugauacaagg

SEQ ID NO: 3013468 - RNA, 19 nt, Artificial Sequence
  Description of Artificial Sequence: Synthetic oligonucleotide
aaaucacauagccagaugu

SEQ ID NO: 3013469 - RNA, 19 nt, Artificial Sequence
  Description of Artificial Sequence: Synthetic oligonucleotide
aauacuauagacgaagaga

SEQ ID NO: 3013470 - RNA, 19 nt, Artificial Sequence
  Description of Artificial Sequence: Synthetic oligonucleotide
ucuauuacccgcauaaucu

SEQ ID NO: 3013471 - RNA, 19 nt, Artificial Sequence
  Description of Artificial Sequence: Synthetic oligonucleotide
uauuuuacugucuauuacc

SEQ ID NO: 3013472 - RNA, 19 nt, Artificial Sequence
  Description of Artificial Sequence: Synthetic oligonucleotide
uuaacauaaauacuauaga

SEQ ID NO: 3013473 - RNA, 19 nt, Artificial Sequence
  Description of Artificial Sequence: Synthetic oligonucleotide
aacgucacaauuuugccug

SEQ ID NO: 3013474 - RNA, 19 nt, Artificial Sequence
  Description of Artificial Sequence: Synthetic oligonucleotide
uuuacugucuauuacccgc

SEQ ID NO: 3013475 - RNA, 19 nt, Artificial Sequence
  Description of Artificial Sequence: Synthetic oligonucleotide
aaauacuauagacgaagag

SEQ ID NO: 3013476 - RNA, 19 nt, Artificial Sequence
  Description of Artificial Sequence: Synthetic oligonucleotide
uaaaacagaguucaagugu

SEQ ID NO: 3013477 - RNA, 19 nt, Artificial Sequence
  Description of Artificial Sequence: Synthetic oligonucleotide
acuauagacgaagagaccg

SEQ ID NO: 3013478 - RNA, 19 nt, Artificial Sequence
  Description of Artificial Sequence: Synthetic oligonucleotide
auacuauagacgaagagac

SEQ ID NO: 3013479 - RNA, 19 nt, Artificial Sequence
  Description of Artificial Sequence: Synthetic oligonucleotide
auaaauacuauagacgaag

SEQ ID NO: 3013480 - RNA, 19 nt, Artificial Sequence
  Description of Artificial Sequence: Synthetic oligonucleotide
auuuaauuaauccacuuau

SEQ ID NO: 3013481 - RNA, 19 nt, Artificial Sequence
  Description of Artificial Sequence: Synthetic oligonucleotide
uggacaaaaccauugaaug

SEQ ID NO: 3013482 - RNA, 19 nt, Artificial Sequence
  Description of Artificial Sequence: Synthetic oligonucleotide
acuuauuuauaguaaagca

SEQ ID NO: 3013483 - RNA, 19 nt, Artificial Sequence
  Description of Artificial Sequence: Synthetic oligonucleotide
uuuuaagaagaaacugggg

SEQ ID NO: 3013484 - RNA, 19 nt, Artificial Sequence
  Description of Artificial Sequence: Synthetic oligonucleotide
gguacuugcacacaaauag

SEQ ID NO: 3013485 - RNA, 19 nt, Artificial Sequence
  Description of Artificial Sequence: Synthetic oligonucleotide
uauucugugauacaagguc

SEQ ID NO: 3013486 - RNA, 19 nt, Artificial Sequence
  Description of Artificial Sequence: Synthetic oligonucleotide
auugaauguggcuugcugg

SEQ ID NO: 3013487 - RNA, 19 nt, Artificial Sequence
  Description of Artificial Sequence: Synthetic oligonucleotide
uuaauuaauccacuuauuu

SEQ ID NO: 3013488 - RNA, 19 nt, Artificial Sequence
  Description of Artificial Sequence: Synthetic oligonucleotide
aaaacagaguucaaguguc

SEQ ID NO: 3013489 - RNA, 19 nt, Artificial Sequence
  Description of Artificial Sequence: Synthetic oligonucleotide
aaucuuaacauaaauacua

SEQ ID NO: 3013490 - RNA, 19 nt, Artificial Sequence
  Description of Artificial Sequence: Synthetic oligonucleotide
uucuucacgaugaagaauc

SEQ ID NO: 3013491 - RNA, 19 nt, Artificial Sequence
  Description of Artificial Sequence: Synthetic oligonucleotide
ugcuucuucacgaugaaga

SEQ ID NO: 3013492 - RNA, 19 nt, Artificial Sequence
  Description of Artificial Sequence: Synthetic oligonucleotide
uauaguaaagcaagucuug

SEQ ID NO: 3013493 - RNA, 19 nt, Artificial Sequence
  Description of Artificial Sequence: Synthetic oligonucleotide
uuaauccacuuauuuauag

SEQ ID NO: 3013494 - RNA, 19 nt, Artificial Sequence
  Description of Artificial Sequence: Synthetic oligonucleotide
guuacugacagguacuugc

SEQ ID NO: 3013495 - RNA, 19 nt, Artificial Sequence
  Description of Artificial Sequence: Synthetic oligonucleotide
aaaaccauugaauguggcu

SEQ ID NO: 3013496 - RNA, 19 nt, Artificial Sequence
  Description of Artificial Sequence: Synthetic oligonucleotide
aauccacuuauuuauagua

SEQ ID NO: 3013497 - RNA, 19 nt, Artificial Sequence
  Description of Artificial Sequence: Synthetic oligonucleotide
uaaucuuaacauaaauacu

SEQ ID NO: 3013498 - RNA, 19 nt, Artificial Sequence
  Description of Artificial Sequence: Synthetic oligonucleotide
auuuuacugucuauuaccc

SEQ ID NO: 3013499 - RNA, 19 nt, Artificial Sequence
  Description of Artificial Sequence: Synthetic oligonucleotide
auagcaugcuaucuuuccc

SEQ ID NO: 3013500 - RNA, 19 nt, Artificial Sequence
  Description of Artificial Sequence: Synthetic oligonucleotide
uuauaguaaagcaagucuu

SEQ ID NO: 3013501 - RNA, 19 nt, Artificial Sequence
  Description of Artificial Sequence: Synthetic oligonucleotide
aaggucuucauuuaagguu

SEQ ID NO: 3013502 - RNA, 19 nt, Artificial Sequence
  Description of Artificial Sequence: Synthetic oligonucleotide
auuuauaguaaagcaaguc

SEQ ID NO: 3013503 - RNA, 19 nt, Artificial Sequence
  Description of Artificial Sequence: Synthetic oligonucleotide
uucacgaugaagaaucccu

SEQ ID NO: 3013504 - RNA, 19 nt, Artificial Sequence
  Description of Artificial Sequence: Synthetic oligonucleotide
gacaaaaccauugaaugug

SEQ ID NO: 3013505 - RNA, 19 nt, Artificial Sequence
  Description of Artificial Sequence: Synthetic oligonucleotide
uuauuuuacugucuauuac

SEQ ID NO: 3013506 - RNA, 19 nt, Artificial Sequence
  Description of Artificial Sequence: Synthetic oligonucleotide
gaugaagaaucccuaaaac

SEQ ID NO: 3013507 - RNA, 19 nt, Artificial Sequence
  Description of Artificial Sequence: Synthetic oligonucleotide
augaagaaucccuaaaaca

SEQ ID NO: 3013508 - RNA, 19 nt, Artificial Sequence
  Description of Artificial Sequence: Synthetic oligonucleotide
aauuuggacaaaaccauug

SEQ ID NO: 3013509 - RNA, 19 nt, Artificial Sequence
  Description of Artificial Sequence: Synthetic oligonucleotide
accgucguaauacacagag

SEQ ID NO: 3013510 - RNA, 19 nt, Artificial Sequence
  Description of Artificial Sequence: Synthetic oligonucleotide
uugaauguggcuugcuggg

SEQ ID NO: 3013511 - RNA, 19 nt, Artificial Sequence
  Description of Artificial Sequence: Synthetic oligonucleotide
cagaauuuggacaaaacca

SEQ ID NO: 3013512 - RNA, 19 nt, Artificial Sequence
  Description of Artificial Sequence: Synthetic oligonucleotide
uuugccugcauuuaauuaa

SEQ ID NO: 3013513 - RNA, 19 nt, Artificial Sequence
  Description of Artificial Sequence: Synthetic oligonucleotide
uugcacacaaauagcaugc

SEQ ID NO: 3013514 - RNA, 19 nt, Artificial Sequence
  Description of Artificial Sequence: Synthetic oligonucleotide
uaagaagaaacuggggcgg

SEQ ID NO: 3013515 - RNA, 19 nt, Artificial Sequence
  Description of Artificial Sequence: Synthetic oligonucleotide
ugauacaaggucuucauuu

SEQ ID NO: 3013516 - RNA, 19 nt, Artificial Sequence
  Description of Artificial Sequence: Synthetic oligonucleotide
auaguaaagcaagucuugc

SEQ ID NO: 3013517 - RNA, 19 nt, Artificial Sequence
  Description of Artificial Sequence: Synthetic oligonucleotide
uacuugcacacaaauagca

SEQ ID NO: 3013518 - RNA, 19 nt, Artificial Sequence
  Description of Artificial Sequence: Synthetic oligonucleotide
aaacgucacaauuuugccu

SEQ ID NO: 3013519 - RNA, 19 nt, Artificial Sequence
  Description of Artificial Sequence: Synthetic oligonucleotide
uaauuaauccacuuauuua

SEQ ID NO: 3013520 - RNA, 19 nt, Artificial Sequence
  Description of Artificial Sequence: Synthetic oligonucleotide
ucguaauacacagaguuug

SEQ ID NO: 3013521 - RNA, 19 nt, Artificial Sequence
  Description of Artificial Sequence: Synthetic oligonucleotide
cugcauuuaauuaauccac

SEQ ID NO: 3013522 - RNA, 19 nt, Artificial Sequence
  Description of Artificial Sequence: Synthetic oligonucleotide
aguucaagugucuacagaa

SEQ ID NO: 3013523 - RNA, 19 nt, Artificial Sequence
  Description of Artificial Sequence: Synthetic oligonucleotide
cuuauuuauaguaaagcaa

SEQ ID NO: 3013524 - RNA, 19 nt, Artificial Sequence
  Description of Artificial Sequence: Synthetic oligonucleotide
cuaaaacagaguucaagug

SEQ ID NO: 3013525 - RNA, 19 nt, Artificial Sequence
  Description of Artificial Sequence: Synthetic oligonucleotide
uuuuacugucuauuacccg

SEQ ID NO: 3013526 - RNA, 19 nt, Artificial Sequence
  Description of Artificial Sequence: Synthetic oligonucleotide
uuaagguuggguuauuuua

SEQ ID NO: 3013527 - RNA, 19 nt, Artificial Sequence
  Description of Artificial Sequence: Synthetic oligonucleotide
uuggacaaaaccauugaau

SEQ ID NO: 3013528 - RNA, 19 nt, Artificial Sequence
  Description of Artificial Sequence: Synthetic oligonucleotide
aagaaucccuaaaacagag

SEQ ID NO: 3013529 - RNA, 19 nt, Artificial Sequence
  Description of Artificial Sequence: Synthetic oligonucleotide
uaagguuggguuauuuuac

SEQ ID NO: 3013530 - RNA, 19 nt, Artificial Sequence
  Description of Artificial Sequence: Synthetic oligonucleotide
uaaauacuauagacgaaga

SEQ ID NO: 3013531 - RNA, 19 nt, Artificial Sequence
  Description of Artificial Sequence: Synthetic oligonucleotide
acagaguucaagugucuac

SEQ ID NO: 3013532 - RNA, 19 nt, Artificial Sequence
  Description of Artificial Sequence: Synthetic oligonucleotide
ugucuacagaauuuggaca

SEQ ID NO: 3013533 - RNA, 19 nt, Artificial Sequence
  Description of Artificial Sequence: Synthetic oligonucleotide
uauuuauaguaaagcaagu

SEQ ID NO: 3013534 - RNA, 19 nt, Artificial Sequence
  Description of Artificial Sequence: Synthetic oligonucleotide
aaaaucacauagccagaug

SEQ ID NO: 3013535 - RNA, 19 nt, Artificial Sequence
  Description of Artificial Sequence: Synthetic oligonucleotide
cacuuauuuauaguaaagc

SEQ ID NO: 3013536 - RNA, 19 nt, Artificial Sequence
  Description of Artificial Sequence: Synthetic oligonucleotide
gaagagaccgucguaauac

SEQ ID NO: 3013537 - RNA, 19 nt, Artificial Sequence
  Description of Artificial Sequence: Synthetic oligonucleotide
acacaaauagcaugcuauc

SEQ ID NO: 3013538 - RNA, 19 nt, Artificial Sequence
  Description of Artificial Sequence: Synthetic oligonucleotide
aaccauugaauguggcuug

SEQ ID NO: 3013539 - RNA, 19 nt, Artificial Sequence
  Description of Artificial Sequence: Synthetic oligonucleotide
auacacagaguuuggagca

SEQ ID NO: 3013540 - RNA, 19 nt, Artificial Sequence
  Description of Artificial Sequence: Synthetic oligonucleotide
ugcauuuaauuaauccacu

SEQ ID NO: 3013541 - RNA, 19 nt, Artificial Sequence
  Description of Artificial Sequence: Synthetic oligonucleotide
aaaccauugaauguggcuu

SEQ ID NO: 3013542 - RNA, 19 nt, Artificial Sequence
  Description of Artificial Sequence: Synthetic oligonucleotide
aaucccuaaaacagaguuc

SEQ ID NO: 3013543 - RNA, 19 nt, Artificial Sequence
  Description of Artificial Sequence: Synthetic oligonucleotide
uuuggacaaaaccauugaa

SEQ ID NO: 3013544 - RNA, 19 nt, Artificial Sequence
  Description of Artificial Sequence: Synthetic oligonucleotide
aguaaagcaagucuugcuu

SEQ ID NO: 3013545 - RNA, 19 nt, Artificial Sequence
  Description of Artificial Sequence: Synthetic oligonucleotide
agaccgucguaauacacag

SEQ ID NO: 3013546 - RNA, 19 nt, Artificial Sequence
  Description of Artificial Sequence: Synthetic oligonucleotide
uccacuuauuuauaguaaa

SEQ ID NO: 3013547 - RNA, 19 nt, Artificial Sequence
  Description of Artificial Sequence: Synthetic oligonucleotide
aucccuaaaacagaguuca

SEQ ID NO: 3013548 - RNA, 19 nt, Artificial Sequence
  Description of Artificial Sequence: Synthetic oligonucleotide
uucauuuaagguuggguua

SEQ ID NO: 3013549 - RNA, 19 nt, Artificial Sequence
  Description of Artificial Sequence: Synthetic oligonucleotide
auuuggacaaaaccauuga

SEQ ID NO: 3013550 - RNA, 19 nt, Artificial Sequence
  Description of Artificial Sequence: Synthetic oligonucleotide
aaauagcaugcuaucuuuc

SEQ ID NO: 3013551 - RNA, 19 nt, Artificial Sequence
  Description of Artificial Sequence: Synthetic oligonucleotide
uaauccacuuauuuauagu

SEQ ID NO: 3013552 - RNA, 19 nt, Artificial Sequence
  Description of Artificial Sequence: Synthetic oligonucleotide
acugaacugcuucuucacg

SEQ ID NO: 3013553 - RNA, 19 nt, Artificial Sequence
  Description of Artificial Sequence: Synthetic oligonucleotide
uacagaauuuggacaaaac

SEQ ID NO: 3013554 - RNA, 19 nt, Artificial Sequence
  Description of Artificial Sequence: Synthetic oligonucleotide
gugucuacagaauuuggac

SEQ ID NO: 3013555 - RNA, 19 nt, Artificial Sequence
  Description of Artificial Sequence: Synthetic oligonucleotide
uucaagugucuacagaauu

SEQ ID NO: 3013556 - RNA, 19 nt, Artificial Sequence
  Description of Artificial Sequence: Synthetic oligonucleotide
ucaagugucuacagaauuu

SEQ ID NO: 3013557 - RNA, 19 nt, Artificial Sequence
  Description of Artificial Sequence: Synthetic oligonucleotide
acaaauagcaugcuaucuu

SEQ ID NO: 3013558 - RNA, 19 nt, Artificial Sequence
  Description of Artificial Sequence: Synthetic oligonucleotide
guuuggagcacugaacugc

SEQ ID NO: 3013559 - RNA, 19 nt, Artificial Sequence
  Description of Artificial Sequence: Synthetic oligonucleotide
acugacagguacuugcaca

SEQ ID NO: 3013560 - RNA, 19 nt, Artificial Sequence
  Description of Artificial Sequence: Synthetic oligonucleotide
uagacgaagagaccgucgu

SEQ ID NO: 3013561 - RNA, 19 nt, Artificial Sequence
  Description of Artificial Sequence: Synthetic oligonucleotide
aagguuggguuauuuuacu

SEQ ID NO: 3013562 - RNA, 19 nt, Artificial Sequence
  Description of Artificial Sequence: Synthetic oligonucleotide
ucuuaacauaaauacuaua

SEQ ID NO: 3013563 - RNA, 19 nt, Artificial Sequence
  Description of Artificial Sequence: Synthetic oligonucleotide
acccgcauaaucuuaacau

SEQ ID NO: 3013564 - RNA, 19 nt, Artificial Sequence
  Description of Artificial Sequence: Synthetic oligonucleotide
ucuucauuuaagguugggu

SEQ ID NO: 3013565 - RNA, 19 nt, Artificial Sequence
  Description of Artificial Sequence: Synthetic oligonucleotide
ugugauacaaggucuucau

SEQ ID NO: 3013566 - RNA, 19 nt, Artificial Sequence
  Description of Artificial Sequence: Synthetic oligonucleotide
cacauagccagauguauuc

SEQ ID NO: 3013567 - RNA, 19 nt, Artificial Sequence
  Description of Artificial Sequence: Synthetic oligonucleotide
uacuauagacgaagagacc

SEQ ID NO: 3013568 - RNA, 19 nt, Artificial Sequence
  Description of Artificial Sequence: Synthetic oligonucleotide
uagcaugcuaucuuuccca

SEQ ID NO: 3013569 - RNA, 19 nt, Artificial Sequence
  Description of Artificial Sequence: Synthetic oligonucleotide
uaguaaagcaagucuugcu

SEQ ID NO: 3013570 - RNA, 19 nt, Artificial Sequence
  Description of Artificial Sequence: Synthetic oligonucleotide
agaguuuggagcacugaac

SEQ ID NO: 3013571 - RNA, 19 nt, Artificial Sequence
  Description of Artificial Sequence: Synthetic oligonucleotide
agaauuuggacaaaaccau

SEQ ID NO: 3013572 - RNA, 19 nt, Artificial Sequence
  Description of Artificial Sequence: Synthetic oligonucleotide
uuuaagguuggguuauuuu

SEQ ID NO: 3013573 - RNA, 19 nt, Artificial Sequence
  Description of Artificial Sequence: Synthetic oligonucleotide
guuauuuuacugucuauua

SEQ ID NO: 3013574 - RNA, 19 nt, Artificial Sequence
  Description of Artificial Sequence: Synthetic oligonucleotide
uuacugacagguacuugca

SEQ ID NO: 3013575 - RNA, 19 nt, Artificial Sequence
  Description of Artificial Sequence: Synthetic oligonucleotide
aacugcuucuucacgauga

SEQ ID NO: 3013576 - RNA, 19 nt, Artificial Sequence
  Description of Artificial Sequence: Synthetic oligonucleotide
aauguggcuugcuggguga

SEQ ID NO: 3013577 - RNA, 19 nt, Artificial Sequence
  Description of Artificial Sequence: Synthetic oligonucleotide
uuacugucuauuacccgca

SEQ ID NO: 3013578 - RNA, 19 nt, Artificial Sequence
  Description of Artificial Sequence: Synthetic oligonucleotide
agaguucaagugucuacag

SEQ ID NO: 3013579 - RNA, 19 nt, Artificial Sequence
  Description of Artificial Sequence: Synthetic oligonucleotide
uggguuauuuuacugucua

SEQ ID NO: 3013580 - RNA, 19 nt, Artificial Sequence
  Description of Artificial Sequence: Synthetic oligonucleotide
uuuggagcacugaacugcu

SEQ ID NO: 3013581 - RNA, 19 nt, Artificial Sequence
  Description of Artificial Sequence: Synthetic oligonucleotide
caagucuugcuuuaaauua

SEQ ID NO: 3013582 - RNA, 19 nt, Artificial Sequence
  Description of Artificial Sequence: Synthetic oligonucleotide
guuggguuauuuuacuguc

SEQ ID NO: 3013583 - RNA, 19 nt, Artificial Sequence
  Description of Artificial Sequence: Synthetic oligonucleotide
aagugucuacagaauuugg

SEQ ID NO: 3013584 - RNA, 19 nt, Artificial Sequence
  Description of Artificial Sequence: Synthetic oligonucleotide
gucuauuacccgcauaauc

SEQ ID NO: 3013585 - RNA, 19 nt, Artificial Sequence
  Description of Artificial Sequence: Synthetic oligonucleotide
gaauguggcuugcugggug

SEQ ID NO: 3013586 - RNA, 19 nt, Artificial Sequence
  Description of Artificial Sequence: Synthetic oligonucleotide
agcacugaacugcuucuuc

SEQ ID NO: 3013587 - RNA, 19 nt, Artificial Sequence
  Description of Artificial Sequence: Synthetic oligonucleotide
acaaaaccauugaaugugg

SEQ ID NO: 3013588 - RNA, 19 nt, Artificial Sequence
  Description of Artificial Sequence: Synthetic oligonucleotide
cugacagguacuugcacac

SEQ ID NO: 3013589 - RNA, 19 nt, Artificial Sequence
  Description of Artificial Sequence: Synthetic oligonucleotide
uggagcacugaacugcuuc

SEQ ID NO: 3013590 - RNA, 19 nt, Artificial Sequence
  Description of Artificial Sequence: Synthetic oligonucleotide
caaaaccauugaauguggc

SEQ ID NO: 3013591 - RNA, 19 nt, Artificial Sequence
  Description of Artificial Sequence: Synthetic oligonucleotide
gucuacagaauuuggacaa

SEQ ID NO: 3013592 - RNA, 19 nt, Artificial Sequence
  Description of Artificial Sequence: Synthetic oligonucleotide
uacccgcauaaucuuaaca

SEQ ID NO: 3013593 - RNA, 19 nt, Artificial Sequence
  Description of Artificial Sequence: Synthetic oligonucleotide
aagaagaaacuggggcggg

SEQ ID NO: 3013594 - RNA, 19 nt, Artificial Sequence
  Description of Artificial Sequence: Synthetic oligonucleotide
ucuucacgaugaagaaucc

SEQ ID NO: 3013595 - RNA, 19 nt, Artificial Sequence
  Description of Artificial Sequence: Synthetic oligonucleotide
cauugaauguggcuugcug

SEQ ID NO: 3013596 - RNA, 19 nt, Artificial Sequence
  Description of Artificial Sequence: Synthetic oligonucleotide
gaaucccuaaaacagaguu

SEQ ID NO: 3013597 - RNA, 19 nt, Artificial Sequence
  Description of Artificial Sequence: Synthetic oligonucleotide
gauacaaggucuucauuua

SEQ ID NO: 3013598 - RNA, 19 nt, Artificial Sequence
  Description of Artificial Sequence: Synthetic oligonucleotide
gaagaaucccuaaaacaga

SEQ ID NO: 3013599 - RNA, 19 nt, Artificial Sequence
  Description of Artificial Sequence: Synthetic oligonucleotide
uuggguuauuuuacugucu

SEQ ID NO: 3013600 - RNA, 19 nt, Artificial Sequence
  Description of Artificial Sequence: Synthetic oligonucleotide
aagaaacuggggcgggugu

SEQ ID NO: 3013601 - RNA, 19 nt, Artificial Sequence
  Description of Artificial Sequence: Synthetic oligonucleotide
cauagccagauguauucug

SEQ ID NO: 3013602 - RNA, 19 nt, Artificial Sequence
  Description of Artificial Sequence: Synthetic oligonucleotide
caagugucuacagaauuug

SEQ ID NO: 3013603 - RNA, 19 nt, Artificial Sequence
  Description of Artificial Sequence: Synthetic oligonucleotide
agcaagucuugcuuuaaau

SEQ ID NO: 3013604 - RNA, 19 nt, Artificial Sequence
  Description of Artificial Sequence: Synthetic oligonucleotide
aauuuugccugcauuuaau

SEQ ID NO: 3013605 - RNA, 19 nt, Artificial Sequence
  Description of Artificial Sequence: Synthetic oligonucleotide
aagagaccgucguaauaca

SEQ ID NO: 3013606 - RNA, 19 nt, Artificial Sequence
  Description of Artificial Sequence: Synthetic oligonucleotide
ucauuuaagguuggguuau

SEQ ID NO: 3013607 - RNA, 19 nt, Artificial Sequence
  Description of Artificial Sequence: Synthetic oligonucleotide
aguuuggagcacugaacug

SEQ ID NO: 3013608 - RNA, 19 nt, Artificial Sequence
  Description of Artificial Sequence: Synthetic oligonucleotide
uaaagcaagucuugcuuua

SEQ ID NO: 3013609 - RNA, 19 nt, Artificial Sequence
  Description of Artificial Sequence: Synthetic oligonucleotide
cugucuauuacccgcauaa

SEQ ID NO: 3013610 - RNA, 19 nt, Artificial Sequence
  Description of Artificial Sequence: Synthetic oligonucleotide
gccugcauuuaauuaaucc

SEQ ID NO: 3013611 - RNA, 19 nt, Artificial Sequence
  Description of Artificial Sequence: Synthetic oligonucleotide
cauuuaauuaauccacuua

SEQ ID NO: 3013612 - RNA, 19 nt, Artificial Sequence
  Description of Artificial Sequence: Synthetic oligonucleotide
agugucuacagaauuugga

SEQ ID NO: 3013613 - RNA, 19 nt, Artificial Sequence
  Description of Artificial Sequence: Synthetic oligonucleotide
auucugugauacaaggucu

SEQ ID NO: 3013614 - RNA, 19 nt, Artificial Sequence
  Description of Artificial Sequence: Synthetic oligonucleotide
uauuacccgcauaaucuua

SEQ ID NO: 3013615 - RNA, 19 nt, Artificial Sequence
  Description of Artificial Sequence: Synthetic oligonucleotide
ucacauagccagauguauu

SEQ ID NO: 3013616 - RNA, 19 nt, Artificial Sequence
  Description of Artificial Sequence: Synthetic oligonucleotide
auagacgaagagaccgucg

SEQ ID NO: 3013617 - RNA, 19 nt, Artificial Sequence
  Description of Artificial Sequence: Synthetic oligonucleotide
uagccagauguauucugug

SEQ ID NO: 3013618 - RNA, 19 nt, Artificial Sequence
  Description of Artificial Sequence: Synthetic oligonucleotide
uugccugcauuuaauuaau

SEQ ID NO: 3013619 - RNA, 19 nt, Artificial Sequence
  Description of Artificial Sequence: Synthetic oligonucleotide
acgaugaagaaucccuaaa

SEQ ID NO: 3013620 - RNA, 19 nt, Artificial Sequence
  Description of Artificial Sequence: Synthetic oligonucleotide
aaacuggggcggguguuac

SEQ ID NO: 3013621 - RNA, 19 nt, Artificial Sequence
  Description of Artificial Sequence: Synthetic oligonucleotide
gaagaaacuggggcgggug

SEQ ID NO: 3013622 - RNA, 19 nt, Artificial Sequence
  Description of Artificial Sequence: Synthetic oligonucleotide
aagcaagucuugcuuuaaa

SEQ ID NO: 3013623 - RNA, 19 nt, Artificial Sequence
  Description of Artificial Sequence: Synthetic oligonucleotide
accauugaauguggcuugc

SEQ ID NO: 3013624 - RNA, 19 nt, Artificial Sequence
  Description of Artificial Sequence: Synthetic oligonucleotide
agccagauguauucuguga

SEQ ID NO: 3013625 - RNA, 19 nt, Artificial Sequence
  Description of Artificial Sequence: Synthetic oligonucleotide
guacuugcacacaaauagc

SEQ ID NO: 3013626 - RNA, 19 nt, Artificial Sequence
  Description of Artificial Sequence: Synthetic oligonucleotide
gacagguacuugcacacaa

SEQ ID NO: 3013627 - RNA, 19 nt, Artificial Sequence
  Description of Artificial Sequence: Synthetic oligonucleotide
acgucacaauuuugccugc

SEQ ID NO: 3013628 - RNA, 19 nt, Artificial Sequence
  Description of Artificial Sequence: Synthetic oligonucleotide
uucugugauacaaggucuu

SEQ ID NO: 3013629 - RNA, 19 nt, Artificial Sequence
  Description of Artificial Sequence: Synthetic oligonucleotide
gaacugcuucuucacgaug

SEQ ID NO: 3013630 - RNA, 19 nt, Artificial Sequence
  Description of Artificial Sequence: Synthetic oligonucleotide
auacaaggucuucauuuaa

SEQ ID NO: 3013631 - RNA, 19 nt, Artificial Sequence
  Description of Artificial Sequence: Synthetic oligonucleotide
uauagacgaagagaccguc

SEQ ID NO: 3013632 - RNA, 19 nt, Artificial Sequence
  Description of Artificial Sequence: Synthetic oligonucleotide
gaguucaagugucuacaga

SEQ ID NO: 3013633 - RNA, 19 nt, Artificial Sequence
  Description of Artificial Sequence: Synthetic oligonucleotide
agagaccgucguaauacac

SEQ ID NO: 3013634 - RNA, 19 nt, Artificial Sequence
  Description of Artificial Sequence: Synthetic oligonucleotide
cacacaaauagcaugcuau

SEQ ID NO: 3013635 - RNA, 19 nt, Artificial Sequence
  Description of Artificial Sequence: Synthetic oligonucleotide
aucacauagccagauguau

SEQ ID NO: 3013636 - RNA, 19 nt, Artificial Sequence
  Description of Artificial Sequence: Synthetic oligonucleotide
cuucauuuaagguuggguu

SEQ ID NO: 3013637 - RNA, 19 nt, Artificial Sequence
  Description of Artificial Sequence: Synthetic oligonucleotide
aaucacauagccagaugua

SEQ ID NO: 3013638 - RNA, 19 nt, Artificial Sequence
  Description of Artificial Sequence: Synthetic oligonucleotide
gacgaagagaccgucguaa

SEQ ID NO: 3013639 - RNA, 19 nt, Artificial Sequence
  Description of Artificial Sequence: Synthetic oligonucleotide
cacugaacugcuucuucac

SEQ ID NO: 3013640 - RNA, 19 nt, Artificial Sequence
  Description of Artificial Sequence: Synthetic oligonucleotide
ccacuuauuuauaguaaag

SEQ ID NO: 3013641 - RNA, 19 nt, Artificial Sequence
  Description of Artificial Sequence: Synthetic oligonucleotide
cuucacgaugaagaauccc

SEQ ID NO: 3013642 - RNA, 19 nt, Artificial Sequence
  Description of Artificial Sequence: Synthetic oligonucleotide
cauaaauacuauagacgaa

SEQ ID NO: 3013643 - RNA, 19 nt, Artificial Sequence
  Description of Artificial Sequence: Synthetic oligonucleotide
gagaccgucguaauacaca

SEQ ID NO: 3013644 - RNA, 19 nt, Artificial Sequence
  Description of Artificial Sequence: Synthetic oligonucleotide
uguuacugacagguacuug

SEQ ID NO: 3013645 - RNA, 19 nt, Artificial Sequence
  Description of Artificial Sequence: Synthetic oligonucleotide
aacagaguucaagugucua

SEQ ID NO: 3013646 - RNA, 19 nt, Artificial Sequence
  Description of Artificial Sequence: Synthetic oligonucleotide
aucuuaacauaaauacuau

SEQ ID NO: 3013647 - RNA, 19 nt, Artificial Sequence
  Description of Artificial Sequence: Synthetic oligonucleotide
ggguguuacugacagguac

SEQ ID NO: 3013648 - RNA, 19 nt, Artificial Sequence
  Description of Artificial Sequence: Synthetic oligonucleotide
auagccagauguauucugu

SEQ ID NO: 3013649 - RNA, 19 nt, Artificial Sequence
  Description of Artificial Sequence: Synthetic oligonucleotide
aaacagaguucaagugucu

SEQ ID NO: 3013650 - RNA, 19 nt, Artificial Sequence
  Description of Artificial Sequence: Synthetic oligonucleotide
aaagcaagucuugcuuuaa

SEQ ID NO: 3013651 - RNA, 19 nt, Artificial Sequence
  Description of Artificial Sequence: Synthetic oligonucleotide
guaauacacagaguuugga

SEQ ID NO: 3013652 - RNA, 19 nt, Artificial Sequence
  Description of Artificial Sequence: Synthetic oligonucleotide
cuugcugggugaccacagg

SEQ ID NO: 3013653 - RNA, 19 nt, Artificial Sequence
  Description of Artificial Sequence: Synthetic oligonucleotide
acuggggcggguguuacug

SEQ ID NO: 3013654 - RNA, 19 nt, Artificial Sequence
  Description of Artificial Sequence: Synthetic oligonucleotide
uuacccgcauaaucuuaac

SEQ ID NO: 3013655 - RNA, 19 nt, Artificial Sequence
  Description of Artificial Sequence: Synthetic oligonucleotide
cagaguucaagugucuaca

SEQ ID NO: 3013656 - RNA, 19 nt, Artificial Sequence
  Description of Artificial Sequence: Synthetic oligonucleotide
acaauuuugccugcauuua

SEQ ID NO: 3013657 - RNA, 19 nt, Artificial Sequence
  Description of Artificial Sequence: Synthetic oligonucleotide
auuacccgcauaaucuuaa

SEQ ID NO: 3013658 - RNA, 19 nt, Artificial Sequence
  Description of Artificial Sequence: Synthetic oligonucleotide
ucugugauacaaggucuuc

SEQ ID NO: 3013659 - RNA, 19 nt, Artificial Sequence
  Description of Artificial Sequence: Synthetic oligonucleotide
cguaauacacagaguuugg

SEQ ID NO: 3013660 - RNA, 19 nt, Artificial Sequence
  Description of Artificial Sequence: Synthetic oligonucleotide
agcaugcuaucuuucccaa

SEQ ID NO: 3013661 - RNA, 19 nt, Artificial Sequence
  Description of Artificial Sequence: Synthetic oligonucleotide
cacagaguuuggagcacug

SEQ ID NO: 3013662 - RNA, 19 nt, Artificial Sequence
  Description of Artificial Sequence: Synthetic oligonucleotide
cagaguuuggagcacugaa

SEQ ID NO: 3013663 - RNA, 19 nt, Artificial Sequence
  Description of Artificial Sequence: Synthetic oligonucleotide
caauuuugccugcauuuaa

SEQ ID NO: 3013664 - RNA, 19 nt, Artificial Sequence
  Description of Artificial Sequence: Synthetic oligonucleotide
auccacuuauuuauaguaa

SEQ ID NO: 3013665 - RNA, 19 nt, Artificial Sequence
  Description of Artificial Sequence: Synthetic oligonucleotide
ccuaaaacagaguucaagu

SEQ ID NO: 3013666 - RNA, 19 nt, Artificial Sequence
  Description of Artificial Sequence: Synthetic oligonucleotide
ucuacagaauuuggacaaa

SEQ ID NO: 3013667 - RNA, 19 nt, Artificial Sequence
  Description of Artificial Sequence: Synthetic oligonucleotide
gucuucauuuaagguuggg

SEQ ID NO: 3013668 - RNA, 19 nt, Artificial Sequence
  Description of Artificial Sequence: Synthetic oligonucleotide
cugggugaccacaggggac

SEQ ID NO: 3013669 - RNA, 19 nt, Artificial Sequence
  Description of Artificial Sequence: Synthetic oligonucleotide
auuuaagguuggguuauuu

SEQ ID NO: 3013670 - RNA, 19 nt, Artificial Sequence
  Description of Artificial Sequence: Synthetic oligonucleotide
ugaauguggcuugcugggu

SEQ ID NO: 3013671 - RNA, 19 nt, Artificial Sequence
  Description of Artificial Sequence: Synthetic oligonucleotide
acauagccagauguauucu

SEQ ID NO: 3013672 - RNA, 19 nt, Artificial Sequence
  Description of Artificial Sequence: Synthetic oligonucleotide
ugcacacaaauagcaugcu

SEQ ID NO: 3013673 - RNA, 19 nt, Artificial Sequence
  Description of Artificial Sequence: Synthetic oligonucleotide
gguuggguuauuuuacugu

SEQ ID NO: 3013674 - RNA, 19 nt, Artificial Sequence
  Description of Artificial Sequence: Synthetic oligonucleotide
caaggucuucauuuaaggu

SEQ ID NO: 3013675 - RNA, 19 nt, Artificial Sequence
  Description of Artificial Sequence: Synthetic oligonucleotide
ugccugcauuuaauuaauc

SEQ ID NO: 3013676 - RNA, 19 nt, Artificial Sequence
  Description of Artificial Sequence: Synthetic oligonucleotide
acuugcacacaaauagcau

SEQ ID NO: 3013677 - RNA, 19 nt, Artificial Sequence
  Description of Artificial Sequence: Synthetic oligonucleotide
guaaagcaagucuugcuuu

SEQ ID NO: 3013678 - RNA, 19 nt, Artificial Sequence
  Description of Artificial Sequence: Synthetic oligonucleotide
cccuaaaacagaguucaag

SEQ ID NO: 3013679 - RNA, 19 nt, Artificial Sequence
  Description of Artificial Sequence: Synthetic oligonucleotide
uacacagaguuuggagcac

SEQ ID NO: 3013680 - RNA, 19 nt, Artificial Sequence
  Description of Artificial Sequence: Synthetic oligonucleotide
acgaagagaccgucguaau

SEQ ID NO: 3013681 - RNA, 19 nt, Artificial Sequence
  Description of Artificial Sequence: Synthetic oligonucleotide
gggcggguguuacugacag

SEQ ID NO: 3013682 - RNA, 19 nt, Artificial Sequence
  Description of Artificial Sequence: Synthetic oligonucleotide
caaauagcaugcuaucuuu

SEQ ID NO: 3013683 - RNA, 19 nt, Artificial Sequence
  Description of Artificial Sequence: Synthetic oligonucleotide
cugugauacaaggucuuca

SEQ ID NO: 3013684 - RNA, 19 nt, Artificial Sequence
  Description of Artificial Sequence: Synthetic oligonucleotide
ggacaaaaccauugaaugu

SEQ ID NO: 3013685 - RNA, 19 nt, Artificial Sequence
  Description of Artificial Sequence: Synthetic oligonucleotide
uggggcggguguuacugac

SEQ ID NO: 3013686 - RNA, 19 nt, Artificial Sequence
  Description of Artificial Sequence: Synthetic oligonucleotide
ugucuauuacccgcauaau

SEQ ID NO: 3013687 - RNA, 19 nt, Artificial Sequence
  Description of Artificial Sequence: Synthetic oligonucleotide
uacugucuauuacccgcau

SEQ ID NO: 3013688 - RNA, 19 nt, Artificial Sequence
  Description of Artificial Sequence: Synthetic oligonucleotide
acugucuauuacccgcaua

SEQ ID NO: 3013689 - RNA, 19 nt, Artificial Sequence
  Description of Artificial Sequence: Synthetic oligonucleotide
agaaucccuaaaacagagu

SEQ ID NO: 3013690 - RNA, 19 nt, Artificial Sequence
  Description of Artificial Sequence: Synthetic oligonucleotide
aacuggggcggguguuacu

SEQ ID NO: 3013691 - RNA, 19 nt, Artificial Sequence
  Description of Artificial Sequence: Synthetic oligonucleotide
agucuugcuuuaaauuaaa

SEQ ID NO: 3013692 - RNA, 19 nt, Artificial Sequence
  Description of Artificial Sequence: Synthetic oligonucleotide
acagaguuuggagcacuga

SEQ ID NO: 3013693 - RNA, 19 nt, Artificial Sequence
  Description of Artificial Sequence: Synthetic oligonucleotide
ugacagguacuugcacaca

SEQ ID NO: 3013694 - RNA, 19 nt, Artificial Sequence
  Description of Artificial Sequence: Synthetic oligonucleotide
ucccuaaaacagaguucaa

SEQ ID NO: 3013695 - RNA, 19 nt, Artificial Sequence
  Description of Artificial Sequence: Synthetic oligonucleotide
cuacagaauuuggacaaaa

SEQ ID NO: 3013696 - RNA, 19 nt, Artificial Sequence
  Description of Artificial Sequence: Synthetic oligonucleotide
acacagaguuuggagcacu

SEQ ID NO: 3013697 - RNA, 19 nt, Artificial Sequence
  Description of Artificial Sequence: Synthetic oligonucleotide
agaagaaacuggggcgggu

SEQ ID NO: 3013698 - RNA, 19 nt, Artificial Sequence
  Description of Artificial Sequence: Synthetic oligonucleotide
gcauaaucuuaacauaaau

SEQ ID NO: 3013699 - RNA, 19 nt, Artificial Sequence
  Description of Artificial Sequence: Synthetic oligonucleotide
cuauagacgaagagaccgu

SEQ ID NO: 3013700 - RNA, 19 nt, Artificial Sequence
  Description of Artificial Sequence: Synthetic oligonucleotide
ccgcauaaucuuaacauaa

SEQ ID NO: 3013701 - RNA, 19 nt, Artificial Sequence
  Description of Artificial Sequence: Synthetic oligonucleotide
guauucugugauacaaggu

SEQ ID NO: 3013702 - RNA, 19 nt, Artificial Sequence
  Description of Artificial Sequence: Synthetic oligonucleotide
cacaaauagcaugcuaucu

SEQ ID NO: 3013703 - RNA, 19 nt, Artificial Sequence
  Description of Artificial Sequence: Synthetic oligonucleotide
agacgaagagaccgucgua

SEQ ID NO: 3013704 - RNA, 19 nt, Artificial Sequence
  Description of Artificial Sequence: Synthetic oligonucleotide
gcuucuucacgaugaagaa

SEQ ID NO: 3013705 - RNA, 19 nt, Artificial Sequence
  Description of Artificial Sequence: Synthetic oligonucleotide
agguacuugcacacaaaua

SEQ ID NO: 3013706 - RNA, 19 nt, Artificial Sequence
  Description of Artificial Sequence: Synthetic oligonucleotide
gguuauuuuacugucuauu

SEQ ID NO: 3013707 - RNA, 19 nt, Artificial Sequence
  Description of Artificial Sequence: Synthetic oligonucleotide
ggucuucauuuaagguugg

SEQ ID NO: 3013708 - RNA, 19 nt, Artificial Sequence
  Description of Artificial Sequence: Synthetic oligonucleotide
gcugggugaccacagggga

SEQ ID NO: 3013709 - RNA, 19 nt, Artificial Sequence
  Description of Artificial Sequence: Synthetic oligonucleotide
gcaagucuugcuuuaaauu

SEQ ID NO: 3013710 - RNA, 19 nt, Artificial Sequence
  Description of Artificial Sequence: Synthetic oligonucleotide
gucuugcuuuaaauuaaaa

SEQ ID NO: 3013711 - RNA, 19 nt, Artificial Sequence
  Description of Artificial Sequence: Synthetic oligonucleotide
gaaacuggggcggguguua

SEQ ID NO: 3013712 - RNA, 19 nt, Artificial Sequence
  Description of Artificial Sequence: Synthetic oligonucleotide
agaaacuggggcggguguu

SEQ ID NO: 3013713 - RNA, 19 nt, Artificial Sequence
  Description of Artificial Sequence: Synthetic oligonucleotide
acagguacuugcacacaaa

SEQ ID NO: 3013714 - RNA, 19 nt, Artificial Sequence
  Description of Artificial Sequence: Synthetic oligonucleotide
cagguacuugcacacaaau

SEQ ID NO: 3013715 - RNA, 19 nt, Artificial Sequence
  Description of Artificial Sequence: Synthetic oligonucleotide
gcauuuaauuaauccacuu

SEQ ID NO: 3013716 - RNA, 19 nt, Artificial Sequence
  Description of Artificial Sequence: Synthetic oligonucleotide
uuggagcacugaacugcuu

SEQ ID NO: 3013717 - RNA, 19 nt, Artificial Sequence
  Description of Artificial Sequence: Synthetic oligonucleotide
gguguuacugacagguacu

SEQ ID NO: 3013718 - RNA, 19 nt, Artificial Sequence
  Description of Artificial Sequence: Synthetic oligonucleotide
gucacaauuuugccugcau

SEQ ID NO: 3013719 - RNA, 19 nt, Artificial Sequence
  Description of Artificial Sequence: Synthetic oligonucleotide
gcggguguuacugacaggu

SEQ ID NO: 3013720 - RNA, 19 nt, Artificial Sequence
  Description of Artificial Sequence: Synthetic oligonucleotide
gcuugcugggugaccacag

SEQ ID NO: 3013721 - RNA, 19 nt, Artificial Sequence
  Description of Artificial Sequence: Synthetic oligonucleotide
ggagcacugaacugcuucu

SEQ ID NO: 3013722 - RNA, 19 nt, Artificial Sequence
  Description of Artificial Sequence: Synthetic oligonucleotide
cgaugaagaaucccuaaaa

SEQ ID NO: 3013723 - RNA, 19 nt, Artificial Sequence
  Description of Artificial Sequence: Synthetic oligonucleotide
uggcuugcugggugaccac

SEQ ID NO: 3013724 - RNA, 19 nt, Artificial Sequence
  Description of Artificial Sequence: Synthetic oligonucleotide
guucaagugucuacagaau

SEQ ID NO: 3013725 - RNA, 19 nt, Artificial Sequence
  Description of Artificial Sequence: Synthetic oligonucleotide
cgucguaauacacagaguu

SEQ ID NO: 3013726 - RNA, 19 nt, Artificial Sequence
  Description of Artificial Sequence: Synthetic oligonucleotide
ggcggguguuacugacagg

SEQ ID NO: 3013727 - RNA, 19 nt, Artificial Sequence
  Description of Artificial Sequence: Synthetic oligonucleotide
gugauacaaggucuucauu

SEQ ID NO: 3013728 - RNA, 19 nt, Artificial Sequence
  Description of Artificial Sequence: Synthetic oligonucleotide
gaccgucguaauacacaga

SEQ ID NO: 3013729 - RNA, 19 nt, Artificial Sequence
  Description of Artificial Sequence: Synthetic oligonucleotide
gucguaauacacagaguuu

SEQ ID NO: 3013730 - RNA, 19 nt, Artificial Sequence
  Description of Artificial Sequence: Synthetic oligonucleotide
cuucuucacgaugaagaau

SEQ ID NO: 3013731 - RNA, 19 nt, Artificial Sequence
  Description of Artificial Sequence: Synthetic oligonucleotide
cccgcauaaucuuaacaua

SEQ ID NO: 3013732 - RNA, 19 nt, Artificial Sequence
  Description of Artificial Sequence: Synthetic oligonucleotide
cgcauaaucuuaacauaaa

SEQ ID NO: 3013733 - RNA, 19 nt, Artificial Sequence
  Description of Artificial Sequence: Synthetic oligonucleotide
cuggggcggguguuacuga

SEQ ID NO: 3013734 - RNA, 19 nt, Artificial Sequence
  Description of Artificial Sequence: Synthetic oligonucleotide
guguuacugacagguacuu

SEQ ID NO: 3013735 - RNA, 19 nt, Artificial Sequence
  Description of Artificial Sequence: Synthetic oligonucleotide
ggguuauuuuacugucuau

SEQ ID NO: 3013736 - RNA, 19 nt, Artificial Sequence
  Description of Artificial Sequence: Synthetic oligonucleotide
gcaugcuaucuuucccaaa

SEQ ID NO: 3013737 - RNA, 19 nt, Artificial Sequence
  Description of Artificial Sequence: Synthetic oligonucleotide
gggugaccacaggggaccc

SEQ ID NO: 3013738 - RNA, 19 nt, Artificial Sequence
  Description of Artificial Sequence: Synthetic oligonucleotide
cgaagagaccgucguaaua

SEQ ID NO: 3013739 - RNA, 19 nt, Artificial Sequence
  Description of Artificial Sequence: Synthetic oligonucleotide
cauuuaagguuggguuauu

SEQ ID NO: 3013740 - RNA, 19 nt, Artificial Sequence
  Description of Artificial Sequence: Synthetic oligonucleotide
ccgucguaauacacagagu

SEQ ID NO: 3013741 - RNA, 19 nt, Artificial Sequence
  Description of Artificial Sequence: Synthetic oligonucleotide
cgucacaauuuugccugca

SEQ ID NO: 3013742 - RNA, 19 nt, Artificial Sequence
  Description of Artificial Sequence: Synthetic oligonucleotide
ccauugaauguggcuugcu

SEQ ID NO: 3013743 - RNA, 19 nt, Artificial Sequence
  Description of Artificial Sequence: Synthetic oligonucleotide
cggguguuacugacaggua

SEQ ID NO: 3013744 - RNA, 19 nt, Artificial Sequence
  Description of Artificial Sequence: Synthetic oligonucleotide
acuucgaggacucugcugc

SEQ ID NO: 3013745 - RNA, 19 nt, Artificial Sequence
  Description of Artificial Sequence: Synthetic oligonucleotide
uggaugagaacauagagcu

SEQ ID NO: 3013746 - RNA, 19 nt, Artificial Sequence
  Description of Artificial Sequence: Synthetic oligonucleotide
acaagccucacacucaucc

SEQ ID NO: 3013747 - RNA, 19 nt, Artificial Sequence
  Description of Artificial Sequence: Synthetic oligonucleotide
aucuguacaagccucacac

SEQ ID NO: 3013748 - RNA, 19 nt, Artificial Sequence
  Description of Artificial Sequence: Synthetic oligonucleotide
augucggugaccuucaggc

SEQ ID NO: 3013749 - RNA, 19 nt, Artificial Sequence
  Description of Artificial Sequence: Synthetic oligonucleotide
gaacauagagcuuuucugg

SEQ ID NO: 3013750 - RNA, 19 nt, Artificial Sequence
  Description of Artificial Sequence: Synthetic oligonucleotide
uccuuuuccacccuuauug

SEQ ID NO: 3013751 - RNA, 19 nt, Artificial Sequence
  Description of Artificial Sequence: Synthetic oligonucleotide
aacuguuuucaacauaucu

SEQ ID NO: 3013752 - RNA, 19 nt, Artificial Sequence
  Description of Artificial Sequence: Synthetic oligonucleotide
uuuucaacauaucuguaca

SEQ ID NO: 3013753 - RNA, 19 nt, Artificial Sequence
  Description of Artificial Sequence: Synthetic oligonucleotide
aacauagagcuuuucuggg

SEQ ID NO: 3013754 - RNA, 19 nt, Artificial Sequence
  Description of Artificial Sequence: Synthetic oligonucleotide
ucaacuguuuucaacauau

SEQ ID NO: 3013755 - RNA, 19 nt, Artificial Sequence
  Description of Artificial Sequence: Synthetic oligonucleotide
aagauaguggauguuggcg

SEQ ID NO: 3013756 - RNA, 19 nt, Artificial Sequence
  Description of Artificial Sequence: Synthetic oligonucleotide
ucaacauaucuguacaagc

SEQ ID NO: 3013757 - RNA, 19 nt, Artificial Sequence
  Description of Artificial Sequence: Synthetic oligonucleotide
agaacauagagcuuuucug

SEQ ID NO: 3013758 - RNA, 19 nt, Artificial Sequence
  Description of Artificial Sequence: Synthetic oligonucleotide
agauaguggauguuggcgg

SEQ ID NO: 3013759 - RNA, 19 nt, Artificial Sequence
  Description of Artificial Sequence: Synthetic oligonucleotide
aacauaucuguacaagccu

SEQ ID NO: 3013760 - RNA, 19 nt, Artificial Sequence
  Description of Artificial Sequence: Synthetic oligonucleotide
caacauaucuguacaagcc

SEQ ID NO: 3013761 - RNA, 19 nt, Artificial Sequence
  Description of Artificial Sequence: Synthetic oligonucleotide
acacucauccuuuuccacc

SEQ ID NO: 3013762 - RNA, 19 nt, Artificial Sequence
  Description of Artificial Sequence: Synthetic oligonucleotide
aaagcugcaagguggcaag

SEQ ID NO: 3013763 - RNA, 19 nt, Artificial Sequence
  Description of Artificial Sequence: Synthetic oligonucleotide
aagguggcaagauagugga

SEQ ID NO: 3013764 - RNA, 19 nt, Artificial Sequence
  Description of Artificial Sequence: Synthetic oligonucleotide
gugaccuucaggcagcugg

SEQ ID NO: 3013765 - RNA, 19 nt, Artificial Sequence
  Description of Artificial Sequence: Synthetic oligonucleotide
cuggaugagaacauagagc

SEQ ID NO: 3013766 - RNA, 19 nt, Artificial Sequence
  Description of Artificial Sequence: Synthetic oligonucleotide
uucaccuuucccaucaacu

SEQ ID NO: 3013767 - RNA, 19 nt, Artificial Sequence
  Description of Artificial Sequence: Synthetic oligonucleotide
guuuucaacauaucuguac

SEQ ID NO: 3013768 - RNA, 19 nt, Artificial Sequence
  Description of Artificial Sequence: Synthetic oligonucleotide
uuuuccacccuuauugccu

SEQ ID NO: 3013769 - RNA, 19 nt, Artificial Sequence
  Description of Artificial Sequence: Synthetic oligonucleotide
ucuucuggcugccagaaaa

SEQ ID NO: 3013770 - RNA, 19 nt, Artificial Sequence
  Description of Artificial Sequence: Synthetic oligonucleotide
aaaggcaguaugucgguga

SEQ ID NO: 3013771 - RNA, 19 nt, Artificial Sequence
  Description of Artificial Sequence: Synthetic oligonucleotide
ugccagaaaacauugcugu

SEQ ID NO: 3013772 - RNA, 19 nt, Artificial Sequence
  Description of Artificial Sequence: Synthetic oligonucleotide
caagguggcaagauagugg

SEQ ID NO: 3013773 - RNA, 19 nt, Artificial Sequence
  Description of Artificial Sequence: Synthetic oligonucleotide
uucaacauaucuguacaag

SEQ ID NO: 3013774 - RNA, 19 nt, Artificial Sequence
  Description of Artificial Sequence: Synthetic oligonucleotide
agggaaaggcaguaugucg

SEQ ID NO: 3013775 - RNA, 19 nt, Artificial Sequence
  Description of Artificial Sequence: Synthetic oligonucleotide
accacaagggccuuggaug

SEQ ID NO: 3013776 - RNA, 19 nt, Artificial Sequence
  Description of Artificial Sequence: Synthetic oligonucleotide
aaggcaguaugucggugac

SEQ ID NO: 3013777 - RNA, 19 nt, Artificial Sequence
  Description of Artificial Sequence: Synthetic oligonucleotide
gauaguggauguuggcggg

SEQ ID NO: 3013778 - RNA, 19 nt, Artificial Sequence
  Description of Artificial Sequence: Synthetic oligonucleotide
acuguuuucaacauaucug

SEQ ID NO: 3013779 - RNA, 19 nt, Artificial Sequence
  Description of Artificial Sequence: Synthetic oligonucleotide
uaugucggugaccuucagg

SEQ ID NO: 3013780 - RNA, 19 nt, Artificial Sequence
  Description of Artificial Sequence: Synthetic oligonucleotide
gaaaacauugcuguucuuc

SEQ ID NO: 3013781 - RNA, 19 nt, Artificial Sequence
  Description of Artificial Sequence: Synthetic oligonucleotide
cucacacucauccuuuucc

SEQ ID NO: 3013782 - RNA, 19 nt, Artificial Sequence
  Description of Artificial Sequence: Synthetic oligonucleotide
acauagagcuuuucugggg

SEQ ID NO: 3013783 - RNA, 19 nt, Artificial Sequence
  Description of Artificial Sequence: Synthetic oligonucleotide
uguacaagccucacacuca

SEQ ID NO: 3013784 - RNA, 19 nt, Artificial Sequence
  Description of Artificial Sequence: Synthetic oligonucleotide
ucaccuuucccaucaacug

SEQ ID NO: 3013785 - RNA, 19 nt, Artificial Sequence
  Description of Artificial Sequence: Synthetic oligonucleotide
cauagagcuuuucuggggc

SEQ ID NO: 3013786 - RNA, 19 nt, Artificial Sequence
  Description of Artificial Sequence: Synthetic oligonucleotide
cugcaagguggcaagauag

SEQ ID NO: 3013787 - RNA, 19 nt, Artificial Sequence
  Description of Artificial Sequence: Synthetic oligonucleotide
uuucccaucaacuguuuuc

SEQ ID NO: 3013788 - RNA, 19 nt, Artificial Sequence
  Description of Artificial Sequence: Synthetic oligonucleotide
uuauugccuuuucuucugg

SEQ ID NO: 3013789 - RNA, 19 nt, Artificial Sequence
  Description of Artificial Sequence: Synthetic oligonucleotide
aacauugcuguucuucuua

SEQ ID NO: 3013790 - RNA, 19 nt, Artificial Sequence
  Description of Artificial Sequence: Synthetic oligonucleotide
ugcuguucuucuuacucag

SEQ ID NO: 3013791 - RNA, 19 nt, Artificial Sequence
  Description of Artificial Sequence: Synthetic oligonucleotide
acucaggacauccaagcug

SEQ ID NO: 3013792 - RNA, 19 nt, Artificial Sequence
  Description of Artificial Sequence: Synthetic oligonucleotide
guucuucuuacucaggaca

SEQ ID NO: 3013793 - RNA, 19 nt, Artificial Sequence
  Description of Artificial Sequence: Synthetic oligonucleotide
acauugcuguucuucuuac

SEQ ID NO: 3013794 - RNA, 19 nt, Artificial Sequence
  Description of Artificial Sequence: Synthetic oligonucleotide
uggagggaaaggcaguaug

SEQ ID NO: 3013795 - RNA, 19 nt, Artificial Sequence
  Description of Artificial Sequence: Synthetic oligonucleotide
ucuuacucaggacauccaa

SEQ ID NO: 3013796 - RNA, 19 nt, Artificial Sequence
  Description of Artificial Sequence: Synthetic oligonucleotide
cuuuuccacccuuauugcc

SEQ ID NO: 3013797 - RNA, 19 nt, Artificial Sequence
  Description of Artificial Sequence: Synthetic oligonucleotide
cuuauugccuuuucuucug

SEQ ID NO: 3013798 - RNA, 19 nt, Artificial Sequence
  Description of Artificial Sequence: Synthetic oligonucleotide
gcuuuucuggggcagaagg

SEQ ID NO: 3013799 - RNA, 19 nt, Artificial Sequence
  Description of Artificial Sequence: Synthetic oligonucleotide
aaaagcugcaagguggcaa

SEQ ID NO: 3013800 - RNA, 19 nt, Artificial Sequence
  Description of Artificial Sequence: Synthetic oligonucleotide
cuguacaagccucacacuc

SEQ ID NO: 3013801 - RNA, 19 nt, Artificial Sequence
  Description of Artificial Sequence: Synthetic oligonucleotide
acauaucuguacaagccuc

SEQ ID NO: 3013802 - RNA, 19 nt, Artificial Sequence
  Description of Artificial Sequence: Synthetic oligonucleotide
uucuucuuacucaggacau

SEQ ID NO: 3013803 - RNA, 19 nt, Artificial Sequence
  Description of Artificial Sequence: Synthetic oligonucleotide
caagauaguggauguuggc

SEQ ID NO: 3013804 - RNA, 19 nt, Artificial Sequence
  Description of Artificial Sequence: Synthetic oligonucleotide
uucccaucaacuguuuuca

SEQ ID NO: 3013805 - RNA, 19 nt, Artificial Sequence
  Description of Artificial Sequence: Synthetic oligonucleotide
uguucuucuuacucaggac

SEQ ID NO: 3013806 - RNA, 19 nt, Artificial Sequence
  Description of Artificial Sequence: Synthetic oligonucleotide
aaccacaagggccuuggau

SEQ ID NO: 3013807 - RNA, 19 nt, Artificial Sequence
  Description of Artificial Sequence: Synthetic oligonucleotide
gucggugaccuucaggcag

SEQ ID NO: 3013808 - RNA, 19 nt, Artificial Sequence
  Description of Artificial Sequence: Synthetic oligonucleotide
agcacuucgaggacucugc

SEQ ID NO: 3013809 - RNA, 19 nt, Artificial Sequence
  Description of Artificial Sequence: Synthetic oligonucleotide
ugucucuuuucaccuuucc

SEQ ID NO: 3013810 - RNA, 19 nt, Artificial Sequence
  Description of Artificial Sequence: Synthetic oligonucleotide
uaucuguacaagccucaca

SEQ ID NO: 3013811 - RNA, 19 nt, Artificial Sequence
  Description of Artificial Sequence: Synthetic oligonucleotide
uggcugccagaaaacauug

SEQ ID NO: 3013812 - RNA, 19 nt, Artificial Sequence
  Description of Artificial Sequence: Synthetic oligonucleotide
uauugccuuuucuucuggc

SEQ ID NO: 3013813 - RNA, 19 nt, Artificial Sequence
  Description of Artificial Sequence: Synthetic oligonucleotide
cucaaagugucucuuuuca

SEQ ID NO: 3013814 - RNA, 19 nt, Artificial Sequence
  Description of Artificial Sequence: Synthetic oligonucleotide
gggaaaggcaguaugucgg

SEQ ID NO: 3013815 - RNA, 19 nt, Artificial Sequence
  Description of Artificial Sequence: Synthetic oligonucleotide
gagaacauagagcuuuucu

SEQ ID NO: 3013816 - RNA, 19 nt, Artificial Sequence
  Description of Artificial Sequence: Synthetic oligonucleotide
gacauccaagcuguugggg

SEQ ID NO: 3013817 - RNA, 19 nt, Artificial Sequence
  Description of Artificial Sequence: Synthetic oligonucleotide
cuguuuucaacauaucugu

SEQ ID NO: 3013818 - RNA, 19 nt, Artificial Sequence
  Description of Artificial Sequence: Synthetic oligonucleotide
uuucuggggcagaagggac

SEQ ID NO: 3013819 - RNA, 19 nt, Artificial Sequence
  Description of Artificial Sequence: Synthetic oligonucleotide
uucuggggcagaagggacc

SEQ ID NO: 3013820 - RNA, 19 nt, Artificial Sequence
  Description of Artificial Sequence: Synthetic oligonucleotide
ucuggcugccagaaaacau

SEQ ID NO: 3013821 - RNA, 19 nt, Artificial Sequence
  Description of Artificial Sequence: Synthetic oligonucleotide
uacucaggacauccaagcu

SEQ ID NO: 3013822 - RNA, 19 nt, Artificial Sequence
  Description of Artificial Sequence: Synthetic oligonucleotide
gaugagaacauagagcuuu

SEQ ID NO: 3013823 - RNA, 19 nt, Artificial Sequence
  Description of Artificial Sequence: Synthetic oligonucleotide
uguuuucaacauaucugua

SEQ ID NO: 3013824 - RNA, 19 nt, Artificial Sequence
  Description of Artificial Sequence: Synthetic oligonucleotide
uuucaccuuucccaucaac

SEQ ID NO: 3013825 - RNA, 19 nt, Artificial Sequence
  Description of Artificial Sequence: Synthetic oligonucleotide
ucgaggacucugcugccag

SEQ ID NO: 3013826 - RNA, 19 nt, Artificial Sequence
  Description of Artificial Sequence: Synthetic oligonucleotide
guguccgggccacaggugg

SEQ ID NO: 3013827 - RNA, 19 nt, Artificial Sequence
  Description of Artificial Sequence: Synthetic oligonucleotide
gguagagcuuugcagcggg

SEQ ID NO: 3013828 - RNA, 19 nt, Artificial Sequence
  Description of Artificial Sequence: Synthetic oligonucleotide
aagccucacacucauccuu

SEQ ID NO: 3013829 - RNA, 19 nt, Artificial Sequence
  Description of Artificial Sequence: Synthetic oligonucleotide
ugaccuucaggcagcuggc

SEQ ID NO: 3013830 - RNA, 19 nt, Artificial Sequence
  Description of Artificial Sequence: Synthetic oligonucleotide
uucuuacucaggacaucca

SEQ ID NO: 3013831 - RNA, 19 nt, Artificial Sequence
  Description of Artificial Sequence: Synthetic oligonucleotide
ugcaagguggcaagauagu

SEQ ID NO: 3013832 - RNA, 19 nt, Artificial Sequence
  Description of Artificial Sequence: Synthetic oligonucleotide
ugcaggcagcacuucgagg

SEQ ID NO: 3013833 - RNA, 19 nt, Artificial Sequence
  Description of Artificial Sequence: Synthetic oligonucleotide
cacagguggagggaaaggc

SEQ ID NO: 3013834 - RNA, 19 nt, Artificial Sequence
  Description of Artificial Sequence: Synthetic oligonucleotide
aagggccuuggaugugagg

SEQ ID NO: 3013835 - RNA, 19 nt, Artificial Sequence
  Description of Artificial Sequence: Synthetic oligonucleotide
gguggcaagauaguggaug

SEQ ID NO: 3013836 - RNA, 19 nt, Artificial Sequence
  Description of Artificial Sequence: Synthetic oligonucleotide
uggauguuggcggggcugg

SEQ ID NO: 3013837 - RNA, 19 nt, Artificial Sequence
  Description of Artificial Sequence: Synthetic oligonucleotide
ucuguacaagccucacacu

SEQ ID NO: 3013838 - RNA, 19 nt, Artificial Sequence
  Description of Artificial Sequence: Synthetic oligonucleotide
ucggugaccuucaggcagc

SEQ ID NO: 3013839 - RNA, 19 nt, Artificial Sequence
  Description of Artificial Sequence: Synthetic oligonucleotide
cuguucuucuuacucagga

SEQ ID NO: 3013840 - RNA, 19 nt, Artificial Sequence
  Description of Artificial Sequence: Synthetic oligonucleotide
acccuuauugccuuuucuu

SEQ ID NO: 3013841 - RNA, 19 nt, Artificial Sequence
  Description of Artificial Sequence: Synthetic oligonucleotide
gcaagauaguggauguugg

SEQ ID NO: 3013842 - RNA, 19 nt, Artificial Sequence
  Description of Artificial Sequence: Synthetic oligonucleotide
ggcaagauaguggauguug

SEQ ID NO: 3013843 - RNA, 19 nt, Artificial Sequence
  Description of Artificial Sequence: Synthetic oligonucleotide
uagagcuuuucuggggcag

SEQ ID NO: 3013844 - RNA, 19 nt, Artificial Sequence
  Description of Artificial Sequence: Synthetic oligonucleotide
cuucuggcugccagaaaac

SEQ ID NO: 3013845 - RNA, 19 nt, Artificial Sequence
  Description of Artificial Sequence: Synthetic oligonucleotide
caguaugucggugaccuuc

SEQ ID NO: 3013846 - RNA, 19 nt, Artificial Sequence
  Description of Artificial Sequence: Synthetic oligonucleotide
uguuggcggggcuggauga

SEQ ID NO: 3013847 - RNA, 19 nt, Artificial Sequence
  Description of Artificial Sequence: Synthetic oligonucleotide
auagagcuuuucuggggca

SEQ ID NO: 3013848 - RNA, 19 nt, Artificial Sequence
  Description of Artificial Sequence: Synthetic oligonucleotide
agcucaaagugucucuuuu

SEQ ID NO: 3013849 - RNA, 19 nt, Artificial Sequence
  Description of Artificial Sequence: Synthetic oligonucleotide
uuucuucuggcugccagaa

SEQ ID NO: 3013850 - RNA, 19 nt, Artificial Sequence
  Description of Artificial Sequence: Synthetic oligonucleotide
gcaggcagcacuucgagga

SEQ ID NO: 3013851 - RNA, 19 nt, Artificial Sequence
  Description of Artificial Sequence: Synthetic oligonucleotide
auguuggcggggcuggaug

SEQ ID NO: 3013852 - RNA, 19 nt, Artificial Sequence
  Description of Artificial Sequence: Synthetic oligonucleotide
uucuggcugccagaaaaca

SEQ ID NO: 3013853 - RNA, 19 nt, Artificial Sequence
  Description of Artificial Sequence: Synthetic oligonucleotide
ggcaggaaccacaagggcc

SEQ ID NO: 3013854 - RNA, 19 nt, Artificial Sequence
  Description of Artificial Sequence: Synthetic oligonucleotide
cagugcaggcagcacuucg

SEQ ID NO: 3013855 - RNA, 19 nt, Artificial Sequence
  Description of Artificial Sequence: Synthetic oligonucleotide
ggcagaagggaccagugca

SEQ ID NO: 3013856 - RNA, 19 nt, Artificial Sequence
  Description of Artificial Sequence: Synthetic oligonucleotide
gaagggaccagugcaggca

SEQ ID NO: 3013857 - RNA, 19 nt, Artificial Sequence
  Description of Artificial Sequence: Synthetic oligonucleotide
cacacucauccuuuuccac

SEQ ID NO: 3013858 - RNA, 19 nt, Artificial Sequence
  Description of Artificial Sequence: Synthetic oligonucleotide
cugccagcagcuguguccg

SEQ ID NO: 3013859 - RNA, 19 nt, Artificial Sequence
  Description of Artificial Sequence: Synthetic oligonucleotide
auaguggauguuggcgggg

SEQ ID NO: 3013860 - RNA, 19 nt, Artificial Sequence
  Description of Artificial Sequence: Synthetic oligonucleotide
cucaggacauccaagcugu

SEQ ID NO: 3013861 - RNA, 19 nt, Artificial Sequence
  Description of Artificial Sequence: Synthetic oligonucleotide
ucuuuucaccuuucccauc

SEQ ID NO: 3013862 - RNA, 19 nt, Artificial Sequence
  Description of Artificial Sequence: Synthetic oligonucleotide
gcugccagcagcugugucc

SEQ ID NO: 3013863 - RNA, 19 nt, Artificial Sequence
  Description of Artificial Sequence: Synthetic oligonucleotide
ugucggugaccuucaggca

SEQ ID NO: 3013864 - RNA, 19 nt, Artificial Sequence
  Description of Artificial Sequence: Synthetic oligonucleotide
cagaagggaccagugcagg

SEQ ID NO: 3013865 - RNA, 19 nt, Artificial Sequence
  Description of Artificial Sequence: Synthetic oligonucleotide
uguguccgggccacaggug

SEQ ID NO: 3013866 - RNA, 19 nt, Artificial Sequence
  Description of Artificial Sequence: Synthetic oligonucleotide
ggaaccacaagggccuugg

SEQ ID NO: 3013867 - RNA, 19 nt, Artificial Sequence
  Description of Artificial Sequence: Synthetic oligonucleotide
ggggcaggaaccacaaggg

SEQ ID NO: 3013868 - RNA, 19 nt, Artificial Sequence
  Description of Artificial Sequence: Synthetic oligonucleotide
uuuccacccuuauugccuu

SEQ ID NO: 3013869 - RNA, 19 nt, Artificial Sequence
  Description of Artificial Sequence: Synthetic oligonucleotide
ggacauccaagcuguuggg

SEQ ID NO: 3013870 - RNA, 19 nt, Artificial Sequence
  Description of Artificial Sequence: Synthetic oligonucleotide
cacuucgaggacucugcug

SEQ ID NO: 3013871 - RNA, 19 nt, Artificial Sequence
  Description of Artificial Sequence: Synthetic oligonucleotide
uaguggauguuggcggggc

SEQ ID NO: 3013872 - RNA, 19 nt, Artificial Sequence
  Description of Artificial Sequence: Synthetic oligonucleotide
ugugagggagcuggagaug

SEQ ID NO: 3013873 - RNA, 19 nt, Artificial Sequence
  Description of Artificial Sequence: Synthetic oligonucleotide
caacuguuuucaacauauc

SEQ ID NO: 3013874 - RNA, 19 nt, Artificial Sequence
  Description of Artificial Sequence: Synthetic oligonucleotide
ucuucuuacucaggacauc

SEQ ID NO: 3013875 - RNA, 19 nt, Artificial Sequence
  Description of Artificial Sequence: Synthetic oligonucleotide
uuuucaccuuucccaucaa

SEQ ID NO: 3013876 - RNA, 19 nt, Artificial Sequence
  Description of Artificial Sequence: Synthetic oligonucleotide
aguaugucggugaccuuca

SEQ ID NO: 3013877 - RNA, 19 nt, Artificial Sequence
  Description of Artificial Sequence: Synthetic oligonucleotide
cuucgaggacucugcugcc

SEQ ID NO: 3013878 - RNA, 19 nt, Artificial Sequence
  Description of Artificial Sequence: Synthetic oligonucleotide
ccagaaaacauugcuguuc

SEQ ID NO: 3013879 - RNA, 19 nt, Artificial Sequence
  Description of Artificial Sequence: Synthetic oligonucleotide
gcagcuggccagcucaaag

SEQ ID NO: 3013880 - RNA, 19 nt, Artificial Sequence
  Description of Artificial Sequence: Synthetic oligonucleotide
acagguggagggaaaggca

SEQ ID NO: 3013881 - RNA, 19 nt, Artificial Sequence
  Description of Artificial Sequence: Synthetic oligonucleotide
ugagaacauagagcuuuuc

SEQ ID NO: 3013882 - RNA, 19 nt, Artificial Sequence
  Description of Artificial Sequence: Synthetic oligonucleotide
aggcaguaugucggugacc

SEQ ID NO: 3013883 - RNA, 19 nt, Artificial Sequence
  Description of Artificial Sequence: Synthetic oligonucleotide
acaagggccuuggauguga

SEQ ID NO: 3013884 - RNA, 19 nt, Artificial Sequence
  Description of Artificial Sequence: Synthetic oligonucleotide
cccaucaacuguuuucaac

SEQ ID NO: 3013885 - RNA, 19 nt, Artificial Sequence
  Description of Artificial Sequence: Synthetic oligonucleotide
cccuuauugccuuuucuuc

SEQ ID NO: 3013886 - RNA, 19 nt, Artificial Sequence
  Description of Artificial Sequence: Synthetic oligonucleotide
gaggacucugcugccagca

SEQ ID NO: 3013887 - RNA, 19 nt, Artificial Sequence
  Description of Artificial Sequence: Synthetic oligonucleotide
caggcagcuggccagcuca

SEQ ID NO: 3013888 - RNA, 19 nt, Artificial Sequence
  Description of Artificial Sequence: Synthetic oligonucleotide
aggacucugcugccagcag

SEQ ID NO: 3013889 - RNA, 19 nt, Artificial Sequence
  Description of Artificial Sequence: Synthetic oligonucleotide
ggacucugcugccagcagc

SEQ ID NO: 3013890 - RNA, 19 nt, Artificial Sequence
  Description of Artificial Sequence: Synthetic oligonucleotide
uucgaggacucugcugcca

SEQ ID NO: 3013891 - RNA, 19 nt, Artificial Sequence
  Description of Artificial Sequence: Synthetic oligonucleotide
agcagcuguguccgggcca

SEQ ID NO: 3013892 - RNA, 19 nt, Artificial Sequence
  Description of Artificial Sequence: Synthetic oligonucleotide
gaccagugcaggcagcacu

SEQ ID NO: 3013893 - RNA, 19 nt, Artificial Sequence
  Description of Artificial Sequence: Synthetic oligonucleotide
gcaagguggcaagauagug

SEQ ID NO: 3013894 - RNA, 19 nt, Artificial Sequence
  Description of Artificial Sequence: Synthetic oligonucleotide
agugcaggcagcacuucga

SEQ ID NO: 3013895 - RNA, 19 nt, Artificial Sequence
  Description of Artificial Sequence: Synthetic oligonucleotide
uguccgggccacaggugga

SEQ ID NO: 3013896 - RNA, 19 nt, Artificial Sequence
  Description of Artificial Sequence: Synthetic oligonucleotide
guggcaagauaguggaugu

SEQ ID NO: 3013897 - RNA, 19 nt, Artificial Sequence
  Description of Artificial Sequence: Synthetic oligonucleotide
uggggcagaagggaccagu

SEQ ID NO: 3013898 - RNA, 19 nt, Artificial Sequence
  Description of Artificial Sequence: Synthetic oligonucleotide
aguggauguuggcggggcu

SEQ ID NO: 3013899 - RNA, 19 nt, Artificial Sequence
  Description of Artificial Sequence: Synthetic oligonucleotide
auccuuuuccacccuuauu

SEQ ID NO: 3013900 - RNA, 19 nt, Artificial Sequence
  Description of Artificial Sequence: Synthetic oligonucleotide
ccuucaggcagcuggccag

SEQ ID NO: 3013901 - RNA, 19 nt, Artificial Sequence
  Description of Artificial Sequence: Synthetic oligonucleotide
gcugccagaaaacauugcu

SEQ ID NO: 3013902 - RNA, 19 nt, Artificial Sequence
  Description of Artificial Sequence: Synthetic oligonucleotide
caagggccuuggaugugag

SEQ ID NO: 3013903 - RNA, 19 nt, Artificial Sequence
  Description of Artificial Sequence: Synthetic oligonucleotide
uggcggggcuggaugagaa

SEQ ID NO: 3013904 - RNA, 19 nt, Artificial Sequence
  Description of Artificial Sequence: Synthetic oligonucleotide
guggauguuggcggggcug

SEQ ID NO: 3013905 - RNA, 19 nt, Artificial Sequence
  Description of Artificial Sequence: Synthetic oligonucleotide
guagagcuuugcagcgggg

SEQ ID NO: 3013906 - RNA, 19 nt, Artificial Sequence
  Description of Artificial Sequence: Synthetic oligonucleotide
agcuuuucuggggcagaag

SEQ ID NO: 3013907 - RNA, 19 nt, Artificial Sequence
  Description of Artificial Sequence: Synthetic oligonucleotide
gcagaagggaccagugcag

SEQ ID NO: 3013908 - RNA, 19 nt, Artificial Sequence
  Description of Artificial Sequence: Synthetic oligonucleotide
agaaaacauugcuguucuu

SEQ ID NO: 3013909 - RNA, 19 nt, Artificial Sequence
  Description of Artificial Sequence: Synthetic oligonucleotide
guaugucggugaccuucag

SEQ ID NO: 3013910 - RNA, 19 nt, Artificial Sequence
  Description of Artificial Sequence: Synthetic oligonucleotide
gggcuggaugagaacauag

SEQ ID NO: 3013911 - RNA, 19 nt, Artificial Sequence
  Description of Artificial Sequence: Synthetic oligonucleotide
gcucaaagugucucuuuuc

SEQ ID NO: 3013912 - RNA, 19 nt, Artificial Sequence
  Description of Artificial Sequence: Synthetic oligonucleotide
accuuucccaucaacuguu

SEQ ID NO: 3013913 - RNA, 19 nt, Artificial Sequence
  Description of Artificial Sequence: Synthetic oligonucleotide
ucaggcagcuggccagcuc

SEQ ID NO: 3013914 - RNA, 19 nt, Artificial Sequence
  Description of Artificial Sequence: Synthetic oligonucleotide
agagcuuuucuggggcaga

SEQ ID NO: 3013915 - RNA, 19 nt, Artificial Sequence
  Description of Artificial Sequence: Synthetic oligonucleotide
uacaagccucacacucauc

SEQ ID NO: 3013916 - RNA, 19 nt, Artificial Sequence
  Description of Artificial Sequence: Synthetic oligonucleotide
cagcacuucgaggacucug

SEQ ID NO: 3013917 - RNA, 19 nt, Artificial Sequence
  Description of Artificial Sequence: Synthetic oligonucleotide
ggcaguaugucggugaccu

SEQ ID NO: 3013918 - RNA, 19 nt, Artificial Sequence
  Description of Artificial Sequence: Synthetic oligonucleotide
acucauccuuuuccacccu

SEQ ID NO: 3013919 - RNA, 19 nt, Artificial Sequence
  Description of Artificial Sequence: Synthetic oligonucleotide
cuucaggcagcuggccagc

SEQ ID NO: 3013920 - RNA, 19 nt, Artificial Sequence
  Description of Artificial Sequence: Synthetic oligonucleotide
gggcaggaaccacaagggc

SEQ ID NO: 3013921 - RNA, 19 nt, Artificial Sequence
  Description of Artificial Sequence: Synthetic oligonucleotide
ggccuuggaugugagggag

SEQ ID NO: 3013922 - RNA, 19 nt, Artificial Sequence
  Description of Artificial Sequence: Synthetic oligonucleotide
caggcagcacuucgaggac

SEQ ID NO: 3013923 - RNA, 19 nt, Artificial Sequence
  Description of Artificial Sequence: Synthetic oligonucleotide
gaccuucaggcagcuggcc

SEQ ID NO: 3013924 - RNA, 19 nt, Artificial Sequence
  Description of Artificial Sequence: Synthetic oligonucleotide
gggcagaagggaccagugc

SEQ ID NO: 3013925 - RNA, 19 nt, Artificial Sequence
  Description of Artificial Sequence: Synthetic oligonucleotide
aagcugcaagguggcaaga

SEQ ID NO: 3013926 - RNA, 19 nt, Artificial Sequence
  Description of Artificial Sequence: Synthetic oligonucleotide
ggaugugagggagcuggag

SEQ ID NO: 3013927 - RNA, 19 nt, Artificial Sequence
  Description of Artificial Sequence: Synthetic oligonucleotide
guacaagccucacacucau

SEQ ID NO: 3013928 - RNA, 19 nt, Artificial Sequence
  Description of Artificial Sequence: Synthetic oligonucleotide
gcuguucuucuuacucagg

SEQ ID NO: 3013929 - RNA, 19 nt, Artificial Sequence
  Description of Artificial Sequence: Synthetic oligonucleotide
agggaccagugcaggcagc

SEQ ID NO: 3013930 - RNA, 19 nt, Artificial Sequence
  Description of Artificial Sequence: Synthetic oligonucleotide
gcuguguccgggccacagg

SEQ ID NO: 3013931 - RNA, 19 nt, Artificial Sequence
  Description of Artificial Sequence: Synthetic oligonucleotide
agcugcaagguggcaagau

SEQ ID NO: 3013932 - RNA, 19 nt, Artificial Sequence
  Description of Artificial Sequence: Synthetic oligonucleotide
uuggcggggcuggaugaga

SEQ ID NO: 3013933 - RNA, 19 nt, Artificial Sequence
  Description of Artificial Sequence: Synthetic oligonucleotide
caccuuucccaucaacugu

SEQ ID NO: 3013934 - RNA, 19 nt, Artificial Sequence
  Description of Artificial Sequence: Synthetic oligonucleotide
guuggcggggcuggaugag

SEQ ID NO: 3013935 - RNA, 19 nt, Artificial Sequence
  Description of Artificial Sequence: Synthetic oligonucleotide
ggguagagcuuugcagcgg

SEQ ID NO: 3013936 - RNA, 19 nt, Artificial Sequence
  Description of Artificial Sequence: Synthetic oligonucleotide
cuuggaugugagggagcug

SEQ ID NO: 3013937 - RNA, 19 nt, Artificial Sequence
  Description of Artificial Sequence: Synthetic oligonucleotide
uccacccuuauugccuuuu

SEQ ID NO: 3013938 - RNA, 19 nt, Artificial Sequence
  Description of Artificial Sequence: Synthetic oligonucleotide
gaaccacaagggccuugga

SEQ ID NO: 3013939 - RNA, 19 nt, Artificial Sequence
  Description of Artificial Sequence: Synthetic oligonucleotide
ccuuauugccuuuucuucu

SEQ ID NO: 3013940 - RNA, 19 nt, Artificial Sequence
  Description of Artificial Sequence: Synthetic oligonucleotide
aggcagcacuucgaggacu

SEQ ID NO: 3013941 - RNA, 19 nt, Artificial Sequence
  Description of Artificial Sequence: Synthetic oligonucleotide
accagugcaggcagcacuu

SEQ ID NO: 3013942 - RNA, 19 nt, Artificial Sequence
  Description of Artificial Sequence: Synthetic oligonucleotide
ggcuggaugagaacauaga

SEQ ID NO: 3013943 - RNA, 19 nt, Artificial Sequence
  Description of Artificial Sequence: Synthetic oligonucleotide
aggaaccacaagggccuug

SEQ ID NO: 3013944 - RNA, 19 nt, Artificial Sequence
  Description of Artificial Sequence: Synthetic oligonucleotide
augagaacauagagcuuuu

SEQ ID NO: 3013945 - RNA, 19 nt, Artificial Sequence
  Description of Artificial Sequence: Synthetic oligonucleotide
cuguguccgggccacaggu

SEQ ID NO: 3013946 - RNA, 19 nt, Artificial Sequence
  Description of Artificial Sequence: Synthetic oligonucleotide
gccagcagcuguguccggg

SEQ ID NO: 3013947 - RNA, 19 nt, Artificial Sequence
  Description of Artificial Sequence: Synthetic oligonucleotide
gccacagguggagggaaag

SEQ ID NO: 3013948 - RNA, 19 nt, Artificial Sequence
  Description of Artificial Sequence: Synthetic oligonucleotide
ugccagcagcuguguccgg

SEQ ID NO: 3013949 - RNA, 19 nt, Artificial Sequence
  Description of Artificial Sequence: Synthetic oligonucleotide
ccagcagcuguguccgggc

SEQ ID NO: 3013950 - RNA, 19 nt, Artificial Sequence
  Description of Artificial Sequence: Synthetic oligonucleotide
gcaggaaccacaagggccu

SEQ ID NO: 3013951 - RNA, 19 nt, Artificial Sequence
  Description of Artificial Sequence: Synthetic oligonucleotide
cagcuggccagcucaaagu

SEQ ID NO: 3013952 - RNA, 19 nt, Artificial Sequence
  Description of Artificial Sequence: Synthetic oligonucleotide
ggagggaaaggcaguaugu

SEQ ID NO: 3013953 - RNA, 19 nt, Artificial Sequence
  Description of Artificial Sequence: Synthetic oligonucleotide
gcugcaagguggcaagaua

SEQ ID NO: 3013954 - RNA, 19 nt, Artificial Sequence
  Description of Artificial Sequence: Synthetic oligonucleotide
cauugcuguucuucuuacu

SEQ ID NO: 3013955 - RNA, 19 nt, Artificial Sequence
  Description of Artificial Sequence: Synthetic oligonucleotide
agccucacacucauccuuu

SEQ ID NO: 3013956 - RNA, 19 nt, Artificial Sequence
  Description of Artificial Sequence: Synthetic oligonucleotide
uggcaagauaguggauguu

SEQ ID NO: 3013957 - RNA, 19 nt, Artificial Sequence
  Description of Artificial Sequence: Synthetic oligonucleotide
caagccucacacucauccu

SEQ ID NO: 3013958 - RNA, 19 nt, Artificial Sequence
  Description of Artificial Sequence: Synthetic oligonucleotide
ggggcagaagggaccagug

SEQ ID NO: 3013959 - RNA, 19 nt, Artificial Sequence
  Description of Artificial Sequence: Synthetic oligonucleotide
gugucucuuuucaccuuuc

SEQ ID NO: 3013960 - RNA, 19 nt, Artificial Sequence
  Description of Artificial Sequence: Synthetic oligonucleotide
caaaagcugcaagguggca

SEQ ID NO: 3013961 - RNA, 19 nt, Artificial Sequence
  Description of Artificial Sequence: Synthetic oligonucleotide
cacaagggccuuggaugug

SEQ ID NO: 3013962 - RNA, 19 nt, Artificial Sequence
  Description of Artificial Sequence: Synthetic oligonucleotide
cacccuuauugccuuuucu

SEQ ID NO: 3013963 - RNA, 19 nt, Artificial Sequence
  Description of Artificial Sequence: Synthetic oligonucleotide
gcggggcuggaugagaaca

SEQ ID NO: 3013964 - RNA, 19 nt, Artificial Sequence
  Description of Artificial Sequence: Synthetic oligonucleotide
ggcugccagaaaacauugc

SEQ ID NO: 3013965 - RNA, 19 nt, Artificial Sequence
  Description of Artificial Sequence: Synthetic oligonucleotide
ggcagcacuucgaggacuc

SEQ ID NO: 3013966 - RNA, 19 nt, Artificial Sequence
  Description of Artificial Sequence: Synthetic oligonucleotide
gggccuuggaugugaggga

SEQ ID NO: 3013967 - RNA, 19 nt, Artificial Sequence
  Description of Artificial Sequence: Synthetic oligonucleotide
ccucacacucauccuuuuc

SEQ ID NO: 3013968 - RNA, 19 nt, Artificial Sequence
  Description of Artificial Sequence: Synthetic oligonucleotide
uuccacccuuauugccuuu

SEQ ID NO: 3013969 - RNA, 19 nt, Artificial Sequence
  Description of Artificial Sequence: Synthetic oligonucleotide
gcagcuguguccgggccac

SEQ ID NO: 3013970 - RNA, 19 nt, Artificial Sequence
  Description of Artificial Sequence: Synthetic oligonucleotide
gauguuggcggggcuggau

SEQ ID NO: 3013971 - RNA, 19 nt, Artificial Sequence
  Description of Artificial Sequence: Synthetic oligonucleotide
cuuucccaucaacuguuuu

SEQ ID NO: 3013972 - RNA, 19 nt, Artificial Sequence
  Description of Artificial Sequence: Synthetic oligonucleotide
gccagcucaaagugucucu

SEQ ID NO: 3013973 - RNA, 19 nt, Artificial Sequence
  Description of Artificial Sequence: Synthetic oligonucleotide
ccacaagggccuuggaugu

SEQ ID NO: 3013974 - RNA, 19 nt, Artificial Sequence
  Description of Artificial Sequence: Synthetic oligonucleotide
gccuuggaugugagggagc

SEQ ID NO: 3013975 - RNA, 19 nt, Artificial Sequence
  Description of Artificial Sequence: Synthetic oligonucleotide
ggcggggcuggaugagaac

SEQ ID NO: 3013976 - RNA, 19 nt, Artificial Sequence
  Description of Artificial Sequence: Synthetic oligonucleotide
ccacccuuauugccuuuuc

SEQ ID NO: 3013977 - RNA, 19 nt, Artificial Sequence
  Description of Artificial Sequence: Synthetic oligonucleotide
agguggcaagauaguggau

SEQ ID NO: 3013978 - RNA, 19 nt, Artificial Sequence
  Description of Artificial Sequence: Synthetic oligonucleotide
ggaccagugcaggcagcac

SEQ ID NO: 3013979 - RNA, 19 nt, Artificial Sequence
  Description of Artificial Sequence: Synthetic oligonucleotide
cgaggacucugcugccagc

SEQ ID NO: 3013980 - RNA, 19 nt, Artificial Sequence
  Description of Artificial Sequence: Synthetic oligonucleotide
gccagaaaacauugcuguu

SEQ ID NO: 3013981 - RNA, 19 nt, Artificial Sequence
  Description of Artificial Sequence: Synthetic oligonucleotide
cagcucaaagugucucuuu

SEQ ID NO: 3013982 - RNA, 19 nt, Artificial Sequence
  Description of Artificial Sequence: Synthetic oligonucleotide
ggugaccuucaggcagcug

SEQ ID NO: 3013983 - RNA, 19 nt, Artificial Sequence
  Description of Artificial Sequence: Synthetic oligonucleotide
ccuuggaugugagggagcu

SEQ ID NO: 3013984 - RNA, 19 nt, Artificial Sequence
  Description of Artificial Sequence: Synthetic oligonucleotide
guggagggaaaggcaguau

SEQ ID NO: 3013985 - RNA, 19 nt, Artificial Sequence
  Description of Artificial Sequence: Synthetic oligonucleotide
gcacuucgaggacucugcu

SEQ ID NO: 3013986 - RNA, 19 nt, Artificial Sequence
  Description of Artificial Sequence: Synthetic oligonucleotide
ggggcuggaugagaacaua

SEQ ID NO: 3013987 - RNA, 19 nt, Artificial Sequence
  Description of Artificial Sequence: Synthetic oligonucleotide
gcuggccagcucaaagugu

SEQ ID NO: 3013988 - RNA, 19 nt, Artificial Sequence
  Description of Artificial Sequence: Synthetic oligonucleotide
aggcagcuggccagcucaa

SEQ ID NO: 3013989 - RNA, 19 nt, Artificial Sequence
  Description of Artificial Sequence: Synthetic oligonucleotide
ggaugagaacauagagcuu

SEQ ID NO: 3013990 - RNA, 19 nt, Artificial Sequence
  Description of Artificial Sequence: Synthetic oligonucleotide
ggauguuggcggggcugga

SEQ ID NO: 3013991 - RNA, 19 nt, Artificial Sequence
  Description of Artificial Sequence: Synthetic oligonucleotide
ccagugcaggcagcacuuc

SEQ ID NO: 3013992 - RNA, 19 nt, Artificial Sequence
  Description of Artificial Sequence: Synthetic oligonucleotide
ggcagcuggccagcucaaa

SEQ ID NO: 3013993 - RNA, 19 nt, Artificial Sequence
  Description of Artificial Sequence: Synthetic oligonucleotide
ccuuucccaucaacuguuu

SEQ ID NO: 3013994 - RNA, 19 nt, Artificial Sequence
  Description of Artificial Sequence: Synthetic oligonucleotide
gcaguaugucggugaccuu

SEQ ID NO: 3013995 - RNA, 19 nt, Artificial Sequence
  Description of Artificial Sequence: Synthetic oligonucleotide
gcagcacuucgaggacucu

SEQ ID NO: 3013996 - RNA, 19 nt, Artificial Sequence
  Description of Artificial Sequence: Synthetic oligonucleotide
caggaaccacaagggccuu

SEQ ID NO: 3013997 - RNA, 19 nt, Artificial Sequence
  Description of Artificial Sequence: Synthetic oligonucleotide
cggggcuggaugagaacau

SEQ ID NO: 3013998 - RNA, 19 nt, Artificial Sequence
  Description of Artificial Sequence: Synthetic oligonucleotide
ugaaauguaagcaucaugg

SEQ ID NO: 3013999 - RNA, 19 nt, Artificial Sequence
  Description of Artificial Sequence: Synthetic oligonucleotide
uguuaaguagucuuuaucg

SEQ ID NO: 3014000 - RNA, 19 nt, Artificial Sequence
  Description of Artificial Sequence: Synthetic oligonucleotide
aagagcuagacacacagcg

SEQ ID NO: 3014001 - RNA, 19 nt, Artificial Sequence
  Description of Artificial Sequence: Synthetic oligonucleotide
aaugaugagcccugcaacc

SEQ ID NO: 3014002 - RNA, 19 nt, Artificial Sequence
  Description of Artificial Sequence: Synthetic oligonucleotide
uguacuacaaaauagucau

SEQ ID NO: 3014003 - RNA, 19 nt, Artificial Sequence
  Description of Artificial Sequence: Synthetic oligonucleotide
uccaugagcacucugaggu

SEQ ID NO: 3014004 - RNA, 19 nt, Artificial Sequence
  Description of Artificial Sequence: Synthetic oligonucleotide
auugcaugcaaugaugagc

SEQ ID NO: 3014005 - RNA, 19 nt, Artificial Sequence
  Description of Artificial Sequence: Synthetic oligonucleotide
uuaaguagucuuuaucgcc

SEQ ID NO: 3014006 - RNA, 19 nt, Artificial Sequence
  Description of Artificial Sequence: Synthetic oligonucleotide
uugcaugcaaugaugagcc

SEQ ID NO: 3014007 - RNA, 19 nt, Artificial Sequence
  Description of Artificial Sequence: Synthetic oligonucleotide
cauguguacuacaaaauag

SEQ ID NO: 3014008 - RNA, 19 nt, Artificial Sequence
  Description of Artificial Sequence: Synthetic oligonucleotide
uacaaaauagucauugcau

SEQ ID NO: 3014009 - RNA, 19 nt, Artificial Sequence
  Description of Artificial Sequence: Synthetic oligonucleotide
uaaguagucuuuaucgccc

SEQ ID NO: 3014010 - RNA, 19 nt, Artificial Sequence
  Description of Artificial Sequence: Synthetic oligonucleotide
uuauuuuguccacagccag

SEQ ID NO: 3014011 - RNA, 19 nt, Artificial Sequence
  Description of Artificial Sequence: Synthetic oligonucleotide
uacuacaaaauagucauug

SEQ ID NO: 3014012 - RNA, 19 nt, Artificial Sequence
  Description of Artificial Sequence: Synthetic oligonucleotide
acaaaauagucauugcaug

SEQ ID NO: 3014013 - RNA, 19 nt, Artificial Sequence
  Description of Artificial Sequence: Synthetic oligonucleotide
uucauuauuuuguccacag

SEQ ID NO: 3014014 - RNA, 19 nt, Artificial Sequence
  Description of Artificial Sequence: Synthetic oligonucleotide
caaaauagucauugcaugc

SEQ ID NO: 3014015 - RNA, 19 nt, Artificial Sequence
  Description of Artificial Sequence: Synthetic oligonucleotide
gucuguugaaaccugagcc

SEQ ID NO: 3014016 - RNA, 19 nt, Artificial Sequence
  Description of Artificial Sequence: Synthetic oligonucleotide
aauguaagcaucaugguuu

SEQ ID NO: 3014017 - RNA, 19 nt, Artificial Sequence
  Description of Artificial Sequence: Synthetic oligonucleotide
aaauguaagcaucaugguu

SEQ ID NO: 3014018 - RNA, 19 nt, Artificial Sequence
  Description of Artificial Sequence: Synthetic oligonucleotide
aaaauagucauugcaugca

SEQ ID NO: 3014019 - RNA, 19 nt, Artificial Sequence
  Description of Artificial Sequence: Synthetic oligonucleotide
uauuuuguccacagccagg

SEQ ID NO: 3014020 - RNA, 19 nt, Artificial Sequence
  Description of Artificial Sequence: Synthetic oligonucleotide
ucuguugaaaccugagccc

SEQ ID NO: 3014021 - RNA, 19 nt, Artificial Sequence
  Description of Artificial Sequence: Synthetic oligonucleotide
auagucauugcaugcaaug

SEQ ID NO: 3014022 - RNA, 19 nt, Artificial Sequence
  Description of Artificial Sequence: Synthetic oligonucleotide
gaaaccugagccccgaggc

SEQ ID NO: 3014023 - RNA, 19 nt, Artificial Sequence
  Description of Artificial Sequence: Synthetic oligonucleotide
guuaaguagucuuuaucgc

SEQ ID NO: 3014024 - RNA, 19 nt, Artificial Sequence
  Description of Artificial Sequence: Synthetic oligonucleotide
ucugugaaauguaagcauc

SEQ ID NO: 3014025 - RNA, 19 nt, Artificial Sequence
  Description of Artificial Sequence: Synthetic oligonucleotide
ucauugcaugcaaugauga

SEQ ID NO: 3014026 - RNA, 19 nt, Artificial Sequence
  Description of Artificial Sequence: Synthetic oligonucleotide
agacacacagcggugaggc

SEQ ID NO: 3014027 - RNA, 19 nt, Artificial Sequence
  Description of Artificial Sequence: Synthetic oligonucleotide
uuucccuucugcuucaugu

SEQ ID NO: 3014028 - RNA, 19 nt, Artificial Sequence
  Description of Artificial Sequence: Synthetic oligonucleotide
uguguacuacaaaauaguc

SEQ ID NO: 3014029 - RNA, 19 nt, Artificial Sequence
  Description of Artificial Sequence: Synthetic oligonucleotide
ucauguguacuacaaaaua

SEQ ID NO: 3014030 - RNA, 19 nt, Artificial Sequence
  Description of Artificial Sequence: Synthetic oligonucleotide
uuuccaugagcacucugag

SEQ ID NO: 3014031 - RNA, 19 nt, Artificial Sequence
  Description of Artificial Sequence: Synthetic oligonucleotide
uuuaucgcccgcaaaucug

SEQ ID NO: 3014032 - RNA, 19 nt, Artificial Sequence
  Description of Artificial Sequence: Synthetic oligonucleotide
ugaaaccugagccccgagg

SEQ ID NO: 3014033 - RNA, 19 nt, Artificial Sequence
  Description of Artificial Sequence: Synthetic oligonucleotide
ccuaggaagagcuagacac

SEQ ID NO: 3014034 - RNA, 19 nt, Artificial Sequence
  Description of Artificial Sequence: Synthetic oligonucleotide
aaguagucuuuaucgcccg

SEQ ID NO: 3014035 - RNA, 19 nt, Artificial Sequence
  Description of Artificial Sequence: Synthetic oligonucleotide
gaagaggucuguugaaacc

SEQ ID NO: 3014036 - RNA, 19 nt, Artificial Sequence
  Description of Artificial Sequence: Synthetic oligonucleotide
caaaucugugaaauguaag

SEQ ID NO: 3014037 - RNA, 19 nt, Artificial Sequence
  Description of Artificial Sequence: Synthetic oligonucleotide
uccuccuuuguuaaguagu

SEQ ID NO: 3014038 - RNA, 19 nt, Artificial Sequence
  Description of Artificial Sequence: Synthetic oligonucleotide
aaauagucauugcaugcaa

SEQ ID NO: 3014039 - RNA, 19 nt, Artificial Sequence
  Description of Artificial Sequence: Synthetic oligonucleotide
ggaagagcuagacacacag

SEQ ID NO: 3014040 - RNA, 19 nt, Artificial Sequence
  Description of Artificial Sequence: Synthetic oligonucleotide
uuguuaaguagucuuuauc

SEQ ID NO: 3014041 - RNA, 19 nt, Artificial Sequence
  Description of Artificial Sequence: Synthetic oligonucleotide
uucauguguacuacaaaau

SEQ ID NO: 3014042 - RNA, 19 nt, Artificial Sequence
  Description of Artificial Sequence: Synthetic oligonucleotide
ugaagaggucuguugaaac

SEQ ID NO: 3014043 - RNA, 19 nt, Artificial Sequence
  Description of Artificial Sequence: Synthetic oligonucleotide
aaaccugagccccgaggcg

SEQ ID NO: 3014044 - RNA, 19 nt, Artificial Sequence
  Description of Artificial Sequence: Synthetic oligonucleotide
ucggcacugguccaggucc

SEQ ID NO: 3014045 - RNA, 19 nt, Artificial Sequence
  Description of Artificial Sequence: Synthetic oligonucleotide
auccuuuugauuuuccaaa

SEQ ID NO: 3014046 - RNA, 19 nt, Artificial Sequence
  Description of Artificial Sequence: Synthetic oligonucleotide
caugcuccaucugagacgg

SEQ ID NO: 3014047 - RNA, 19 nt, Artificial Sequence
  Description of Artificial Sequence: Synthetic oligonucleotide
ucauuauuuuguccacagc

SEQ ID NO: 3014048 - RNA, 19 nt, Artificial Sequence
  Description of Artificial Sequence: Synthetic oligonucleotide
cuucauguguacuacaaaa

SEQ ID NO: 3014049 - RNA, 19 nt, Artificial Sequence
  Description of Artificial Sequence: Synthetic oligonucleotide
auguaagcaucaugguuuc

SEQ ID NO: 3014050 - RNA, 19 nt, Artificial Sequence
  Description of Artificial Sequence: Synthetic oligonucleotide
uguugaaaccugagccccg

SEQ ID NO: 3014051 - RNA, 19 nt, Artificial Sequence
  Description of Artificial Sequence: Synthetic oligonucleotide
uccuuuguuaaguagucuu

SEQ ID NO: 3014052 - RNA, 19 nt, Artificial Sequence
  Description of Artificial Sequence: Synthetic oligonucleotide
gugaaauguaagcaucaug

SEQ ID NO: 3014053 - RNA, 19 nt, Artificial Sequence
  Description of Artificial Sequence: Synthetic oligonucleotide
uuuguuaaguagucuuuau

SEQ ID NO: 3014054 - RNA, 19 nt, Artificial Sequence
  Description of Artificial Sequence: Synthetic oligonucleotide
aucugugaaauguaagcau

SEQ ID NO: 3014055 - RNA, 19 nt, Artificial Sequence
  Description of Artificial Sequence: Synthetic oligonucleotide
aagcaguccuaggaagagc

SEQ ID NO: 3014056 - RNA, 19 nt, Artificial Sequence
  Description of Artificial Sequence: Synthetic oligonucleotide
aguagucuuuaucgcccgc

SEQ ID NO: 3014057 - RNA, 19 nt, Artificial Sequence
  Description of Artificial Sequence: Synthetic oligonucleotide
uuaucgcccgcaaaucugu

SEQ ID NO: 3014058 - RNA, 19 nt, Artificial Sequence
  Description of Artificial Sequence: Synthetic oligonucleotide
caugcaaugaugagcccug

SEQ ID NO: 3014059 - RNA, 19 nt, Artificial Sequence
  Description of Artificial Sequence: Synthetic oligonucleotide
cacuuugccaucucggcac

SEQ ID NO: 3014060 - RNA, 19 nt, Artificial Sequence
  Description of Artificial Sequence: Synthetic oligonucleotide
caaugaugagcccugcaac

SEQ ID NO: 3014061 - RNA, 19 nt, Artificial Sequence
  Description of Artificial Sequence: Synthetic oligonucleotide
uuccaugagcacucugagg

SEQ ID NO: 3014062 - RNA, 19 nt, Artificial Sequence
  Description of Artificial Sequence: Synthetic oligonucleotide
ugcuucauguguacuacaa

SEQ ID NO: 3014063 - RNA, 19 nt, Artificial Sequence
  Description of Artificial Sequence: Synthetic oligonucleotide
agucauugcaugcaaugau

SEQ ID NO: 3014064 - RNA, 19 nt, Artificial Sequence
  Description of Artificial Sequence: Synthetic oligonucleotide
auguggccuacuucuuucc

SEQ ID NO: 3014065 - RNA, 19 nt, Artificial Sequence
  Description of Artificial Sequence: Synthetic oligonucleotide
cuuuccaugagcacucuga

SEQ ID NO: 3014066 - RNA, 19 nt, Artificial Sequence
  Description of Artificial Sequence: Synthetic oligonucleotide
ugaugagcccugcaaccag

SEQ ID NO: 3014067 - RNA, 19 nt, Artificial Sequence
  Description of Artificial Sequence: Synthetic oligonucleotide
uuugccaucucggcacugg

SEQ ID NO: 3014068 - RNA, 19 nt, Artificial Sequence
  Description of Artificial Sequence: Synthetic oligonucleotide
auguguacuacaaaauagu

SEQ ID NO: 3014069 - RNA, 19 nt, Artificial Sequence
  Description of Artificial Sequence: Synthetic oligonucleotide
caugguuuccauggcaugc

SEQ ID NO: 3014070 - RNA, 19 nt, Artificial Sequence
  Description of Artificial Sequence: Synthetic oligonucleotide
uccuuuugauuuuccaaaa

SEQ ID NO: 3014071 - RNA, 19 nt, Artificial Sequence
  Description of Artificial Sequence: Synthetic oligonucleotide
aaaagcucuggaagcccac

SEQ ID NO: 3014072 - RNA, 19 nt, Artificial Sequence
  Description of Artificial Sequence: Synthetic oligonucleotide
ucugagacggcaucuugaa

SEQ ID NO: 3014073 - RNA, 19 nt, Artificial Sequence
  Description of Artificial Sequence: Synthetic oligonucleotide
uagucauugcaugcaauga

SEQ ID NO: 3014074 - RNA, 19 nt, Artificial Sequence
  Description of Artificial Sequence: Synthetic oligonucleotide
gaagcaguccuaggaagag

SEQ ID NO: 3014075 - RNA, 19 nt, Artificial Sequence
  Description of Artificial Sequence: Synthetic oligonucleotide
cauugcaugcaaugaugag

SEQ ID NO: 3014076 - RNA, 19 nt, Artificial Sequence
  Description of Artificial Sequence: Synthetic oligonucleotide
cuguugaaaccugagcccc

SEQ ID NO: 3014077 - RNA, 19 nt, Artificial Sequence
  Description of Artificial Sequence: Synthetic oligonucleotide
caugagcacucugaggucc

SEQ ID NO: 3014078 - RNA, 19 nt, Artificial Sequence
  Description of Artificial Sequence: Synthetic oligonucleotide
aacucccuuuccaugagca

SEQ ID NO: 3014079 - RNA, 19 nt, Artificial Sequence
  Description of Artificial Sequence: Synthetic oligonucleotide
ucugcuucauguguacuac

SEQ ID NO: 3014080 - RNA, 19 nt, Artificial Sequence
  Description of Artificial Sequence: Synthetic oligonucleotide
uccuaggaagagcuagaca

SEQ ID NO: 3014081 - RNA, 19 nt, Artificial Sequence
  Description of Artificial Sequence: Synthetic oligonucleotide
uaggaagagcuagacacac

SEQ ID NO: 3014082 - RNA, 19 nt, Artificial Sequence
  Description of Artificial Sequence: Synthetic oligonucleotide
ugguccagguccuucauua

SEQ ID NO: 3014083 - RNA, 19 nt, Artificial Sequence
  Description of Artificial Sequence: Synthetic oligonucleotide
uggaagcccacuuugccau

SEQ ID NO: 3014084 - RNA, 19 nt, Artificial Sequence
  Description of Artificial Sequence: Synthetic oligonucleotide
uguggccuacuucuuuccc

SEQ ID NO: 3014085 - RNA, 19 nt, Artificial Sequence
  Description of Artificial Sequence: Synthetic oligonucleotide
gucauugcaugcaaugaug

SEQ ID NO: 3014086 - RNA, 19 nt, Artificial Sequence
  Description of Artificial Sequence: Synthetic oligonucleotide
uucugcuucauguguacua

SEQ ID NO: 3014087 - RNA, 19 nt, Artificial Sequence
  Description of Artificial Sequence: Synthetic oligonucleotide
uccauggcaugcuccaucu

SEQ ID NO: 3014088 - RNA, 19 nt, Artificial Sequence
  Description of Artificial Sequence: Synthetic oligonucleotide
guaagcaucaugguuucca

SEQ ID NO: 3014089 - RNA, 19 nt, Artificial Sequence
  Description of Artificial Sequence: Synthetic oligonucleotide
ucaugguuuccauggcaug

SEQ ID NO: 3014090 - RNA, 19 nt, Artificial Sequence
  Description of Artificial Sequence: Synthetic oligonucleotide
acucccuuuccaugagcac

SEQ ID NO: 3014091 - RNA, 19 nt, Artificial Sequence
  Description of Artificial Sequence: Synthetic oligonucleotide
uuguccacagccaggggau

SEQ ID NO: 3014092 - RNA, 19 nt, Artificial Sequence
  Description of Artificial Sequence: Synthetic oligonucleotide
cuacuucuuucccuucugc

SEQ ID NO: 3014093 - RNA, 19 nt, Artificial Sequence
  Description of Artificial Sequence: Synthetic oligonucleotide
uucccuucugcuucaugug

SEQ ID NO: 3014094 - RNA, 19 nt, Artificial Sequence
  Description of Artificial Sequence: Synthetic oligonucleotide
agagcuagacacacagcgg

SEQ ID NO: 3014095 - RNA, 19 nt, Artificial Sequence
  Description of Artificial Sequence: Synthetic oligonucleotide
aauagucauugcaugcaau

SEQ ID NO: 3014096 - RNA, 19 nt, Artificial Sequence
  Description of Artificial Sequence: Synthetic oligonucleotide
cauguggccuacuucuuuc

SEQ ID NO: 3014097 - RNA, 19 nt, Artificial Sequence
  Description of Artificial Sequence: Synthetic oligonucleotide
aaacccagggaacucccuu

SEQ ID NO: 3014098 - RNA, 19 nt, Artificial Sequence
  Description of Artificial Sequence: Synthetic oligonucleotide
gaaauguaagcaucauggu

SEQ ID NO: 3014099 - RNA, 19 nt, Artificial Sequence
  Description of Artificial Sequence: Synthetic oligonucleotide
ucccuucugcuucaugugu

SEQ ID NO: 3014100 - RNA, 19 nt, Artificial Sequence
  Description of Artificial Sequence: Synthetic oligonucleotide
guuuccauggcaugcucca

SEQ ID NO: 3014101 - RNA, 19 nt, Artificial Sequence
  Description of Artificial Sequence: Synthetic oligonucleotide
ugcaaugaugagcccugca

SEQ ID NO: 3014102 - RNA, 19 nt, Artificial Sequence
  Description of Artificial Sequence: Synthetic oligonucleotide
cugugaaauguaagcauca

SEQ ID NO: 3014103 - RNA, 19 nt, Artificial Sequence
  Description of Artificial Sequence: Synthetic oligonucleotide
ugcuccaucugagacggca

SEQ ID NO: 3014104 - RNA, 19 nt, Artificial Sequence
  Description of Artificial Sequence: Synthetic oligonucleotide
ucccuuuccaugagcacuc

SEQ ID NO: 3014105 - RNA, 19 nt, Artificial Sequence
  Description of Artificial Sequence: Synthetic oligonucleotide
ucugagguccuccuuuguu

SEQ ID NO: 3014106 - RNA, 19 nt, Artificial Sequence
  Description of Artificial Sequence: Synthetic oligonucleotide
aggcgaagcaguccuagga

SEQ ID NO: 3014107 - RNA, 19 nt, Artificial Sequence
  Description of Artificial Sequence: Synthetic oligonucleotide
uugaagaggucuguugaaa

SEQ ID NO: 3014108 - RNA, 19 nt, Artificial Sequence
  Description of Artificial Sequence: Synthetic oligonucleotide
caguccuaggaagagcuag

SEQ ID NO: 3014109 - RNA, 19 nt, Artificial Sequence
  Description of Artificial Sequence: Synthetic oligonucleotide
cauggcaugcuccaucuga

SEQ ID NO: 3014110 - RNA, 19 nt, Artificial Sequence
  Description of Artificial Sequence: Synthetic oligonucleotide
ucgcccgcaaaucugugaa

SEQ ID NO: 3014111 - RNA, 19 nt, Artificial Sequence
  Description of Artificial Sequence: Synthetic oligonucleotide
agcaguccuaggaagagcu

SEQ ID NO: 3014112 - RNA, 19 nt, Artificial Sequence
  Description of Artificial Sequence: Synthetic oligonucleotide
uagacacacagcggugagg

SEQ ID NO: 3014113 - RNA, 19 nt, Artificial Sequence
  Description of Artificial Sequence: Synthetic oligonucleotide
ucuuuaucgcccgcaaauc

SEQ ID NO: 3014114 - RNA, 19 nt, Artificial Sequence
  Description of Artificial Sequence: Synthetic oligonucleotide
agggaacucccuuuccaug

SEQ ID NO: 3014115 - RNA, 19 nt, Artificial Sequence
  Description of Artificial Sequence: Synthetic oligonucleotide
gaggcgaagcaguccuagg

SEQ ID NO: 3014116 - RNA, 19 nt, Artificial Sequence
  Description of Artificial Sequence: Synthetic oligonucleotide
ugugaaauguaagcaucau

SEQ ID NO: 3014117 - RNA, 19 nt, Artificial Sequence
  Description of Artificial Sequence: Synthetic oligonucleotide
cucuggaagcccacuuugc

SEQ ID NO: 3014118 - RNA, 19 nt, Artificial Sequence
  Description of Artificial Sequence: Synthetic oligonucleotide
gcaugcuccaucugagacg

SEQ ID NO: 3014119 - RNA, 19 nt, Artificial Sequence
  Description of Artificial Sequence: Synthetic oligonucleotide
cuagacacacagcggugag

SEQ ID NO: 3014120 - RNA, 19 nt, Artificial Sequence
  Description of Artificial Sequence: Synthetic oligonucleotide
gagcuagacacacagcggu

SEQ ID NO: 3014121 - RNA, 19 nt, Artificial Sequence
  Description of Artificial Sequence: Synthetic oligonucleotide
agcccacuuugccaucucg

SEQ ID NO: 3014122 - RNA, 19 nt, Artificial Sequence
  Description of Artificial Sequence: Synthetic oligonucleotide
uagucuuuaucgcccgcaa

SEQ ID NO: 3014123 - RNA, 19 nt, Artificial Sequence
  Description of Artificial Sequence: Synthetic oligonucleotide
accagggcuccauguggcc

SEQ ID NO: 3014124 - RNA, 19 nt, Artificial Sequence
  Description of Artificial Sequence: Synthetic oligonucleotide
aaccugagccccgaggcga

SEQ ID NO: 3014125 - RNA, 19 nt, Artificial Sequence
  Description of Artificial Sequence: Synthetic oligonucleotide
gccaucucggcacuggucc

SEQ ID NO: 3014126 - RNA, 19 nt, Artificial Sequence
  Description of Artificial Sequence: Synthetic oligonucleotide
ggucuguugaaaccugagc

SEQ ID NO: 3014127 - RNA, 19 nt, Artificial Sequence
  Description of Artificial Sequence: Synthetic oligonucleotide
gaacucccuuuccaugagc

SEQ ID NO: 3014128 - RNA, 19 nt, Artificial Sequence
  Description of Artificial Sequence: Synthetic oligonucleotide
acucugagguccuccuuug

SEQ ID NO: 3014129 - RNA, 19 nt, Artificial Sequence
  Description of Artificial Sequence: Synthetic oligonucleotide
gaagagcuagacacacagc

SEQ ID NO: 3014130 - RNA, 19 nt, Artificial Sequence
  Description of Artificial Sequence: Synthetic oligonucleotide
aggaccagggcuccaugug

SEQ ID NO: 3014131 - RNA, 19 nt, Artificial Sequence
  Description of Artificial Sequence: Synthetic oligonucleotide
guccuccuuuguuaaguag

SEQ ID NO: 3014132 - RNA, 19 nt, Artificial Sequence
  Description of Artificial Sequence: Synthetic oligonucleotide
aaagcucuggaagcccacu

SEQ ID NO: 3014133 - RNA, 19 nt, Artificial Sequence
  Description of Artificial Sequence: Synthetic oligonucleotide
cuaggaagagcuagacaca

SEQ ID NO: 3014134 - RNA, 19 nt, Artificial Sequence
  Description of Artificial Sequence: Synthetic oligonucleotide
aacccagggaacucccuuu

SEQ ID NO: 3014135 - RNA, 19 nt, Artificial Sequence
  Description of Artificial Sequence: Synthetic oligonucleotide
uccaucugagacggcaucu

SEQ ID NO: 3014136 - RNA, 19 nt, Artificial Sequence
  Description of Artificial Sequence: Synthetic oligonucleotide
uugaaaccugagccccgag

SEQ ID NO: 3014137 - RNA, 19 nt, Artificial Sequence
  Description of Artificial Sequence: Synthetic oligonucleotide
aagcccacuuugccaucuc

SEQ ID NO: 3014138 - RNA, 19 nt, Artificial Sequence
  Description of Artificial Sequence: Synthetic oligonucleotide
ggaccagggcuccaugugg

SEQ ID NO: 3014139 - RNA, 19 nt, Artificial Sequence
  Description of Artificial Sequence: Synthetic oligonucleotide
agccaggggauccuuuuga

SEQ ID NO: 3014140 - RNA, 19 nt, Artificial Sequence
  Description of Artificial Sequence: Synthetic oligonucleotide
ugagccccgaggcgaagca

SEQ ID NO: 3014141 - RNA, 19 nt, Artificial Sequence
  Description of Artificial Sequence: Synthetic oligonucleotide
caucugagacggcaucuug

SEQ ID NO: 3014142 - RNA, 19 nt, Artificial Sequence
  Description of Artificial Sequence: Synthetic oligonucleotide
aagcucuggaagcccacuu

SEQ ID NO: 3014143 - RNA, 19 nt, Artificial Sequence
  Description of Artificial Sequence: Synthetic oligonucleotide
agcacucugagguccuccu

SEQ ID NO: 3014144 - RNA, 19 nt, Artificial Sequence
  Description of Artificial Sequence: Synthetic oligonucleotide
aucaugguuuccauggcau

SEQ ID NO: 3014145 - RNA, 19 nt, Artificial Sequence
  Description of Artificial Sequence: Synthetic oligonucleotide
augaugagcccugcaacca

SEQ ID NO: 3014146 - RNA, 19 nt, Artificial Sequence
  Description of Artificial Sequence: Synthetic oligonucleotide
ugagcccugcaaccaguga

SEQ ID NO: 3014147 - RNA, 19 nt, Artificial Sequence
  Description of Artificial Sequence: Synthetic oligonucleotide
caucaugguuuccauggca

SEQ ID NO: 3014148 - RNA, 19 nt, Artificial Sequence
  Description of Artificial Sequence: Synthetic oligonucleotide
gucuuuaucgcccgcaaau

SEQ ID NO: 3014149 - RNA, 19 nt, Artificial Sequence
  Description of Artificial Sequence: Synthetic oligonucleotide
cuccauguggccuacuucu

SEQ ID NO: 3014150 - RNA, 19 nt, Artificial Sequence
  Description of Artificial Sequence: Synthetic oligonucleotide
cuggaagcccacuuugcca

SEQ ID NO: 3014151 - RNA, 19 nt, Artificial Sequence
  Description of Artificial Sequence: Synthetic oligonucleotide
gcgaagcaguccuaggaag

SEQ ID NO: 3014152 - RNA, 19 nt, Artificial Sequence
  Description of Artificial Sequence: Synthetic oligonucleotide
uaucgcccgcaaaucugug

SEQ ID NO: 3014153 - RNA, 19 nt, Artificial Sequence
  Description of Artificial Sequence: Synthetic oligonucleotide
cuugaagaggucuguugaa

SEQ ID NO: 3014154 - RNA, 19 nt, Artificial Sequence
  Description of Artificial Sequence: Synthetic oligonucleotide
aucugagacggcaucuuga

SEQ ID NO: 3014155 - RNA, 19 nt, Artificial Sequence
  Description of Artificial Sequence: Synthetic oligonucleotide
cugagacggcaucuugaag

SEQ ID NO: 3014156 - RNA, 19 nt, Artificial Sequence
  Description of Artificial Sequence: Synthetic oligonucleotide
aaaacccagggaacucccu

SEQ ID NO: 3014157 - RNA, 19 nt, Artificial Sequence
  Description of Artificial Sequence: Synthetic oligonucleotide
agucuuuaucgcccgcaaa

SEQ ID NO: 3014158 - RNA, 19 nt, Artificial Sequence
  Description of Artificial Sequence: Synthetic oligonucleotide
uguaagcaucaugguuucc

SEQ ID NO: 3014159 - RNA, 19 nt, Artificial Sequence
  Description of Artificial Sequence: Synthetic oligonucleotide
ugcaugcaaugaugagccc

SEQ ID NO: 3014160 - RNA, 19 nt, Artificial Sequence
  Description of Artificial Sequence: Synthetic oligonucleotide
uggccuacuucuuucccuu

SEQ ID NO: 3014161 - RNA, 19 nt, Artificial Sequence
  Description of Artificial Sequence: Synthetic oligonucleotide
gaccagggcuccauguggc

SEQ ID NO: 3014162 - RNA, 19 nt, Artificial Sequence
  Description of Artificial Sequence: Synthetic oligonucleotide
cuuuguuaaguagucuuua

SEQ ID NO: 3014163 - RNA, 19 nt, Artificial Sequence
  Description of Artificial Sequence: Synthetic oligonucleotide
caggggauccuuuugauuu

SEQ ID NO: 3014164 - RNA, 19 nt, Artificial Sequence
  Description of Artificial Sequence: Synthetic oligonucleotide
aucgcccgcaaaucuguga

SEQ ID NO: 3014165 - RNA, 19 nt, Artificial Sequence
  Description of Artificial Sequence: Synthetic oligonucleotide
aggucuguugaaaccugag

SEQ ID NO: 3014166 - RNA, 19 nt, Artificial Sequence
  Description of Artificial Sequence: Synthetic oligonucleotide
gggaacucccuuuccauga

SEQ ID NO: 3014167 - RNA, 19 nt, Artificial Sequence
  Description of Artificial Sequence: Synthetic oligonucleotide
gcaaugaugagcccugcaa

SEQ ID NO: 3014168 - RNA, 19 nt, Artificial Sequence
  Description of Artificial Sequence: Synthetic oligonucleotide
guagucuuuaucgcccgca

SEQ ID NO: 3014169 - RNA, 19 nt, Artificial Sequence
  Description of Artificial Sequence: Synthetic oligonucleotide
ugguuuccauggcaugcuc

SEQ ID NO: 3014170 - RNA, 19 nt, Artificial Sequence
  Description of Artificial Sequence: Synthetic oligonucleotide
ggauccuuuugauuuucca

SEQ ID NO: 3014171 - RNA, 19 nt, Artificial Sequence
  Description of Artificial Sequence: Synthetic oligonucleotide
gcucuggaagcccacuuug

SEQ ID NO: 3014172 - RNA, 19 nt, Artificial Sequence
  Description of Artificial Sequence: Synthetic oligonucleotide
uggcaugcuccaucugaga

SEQ ID NO: 3014173 - RNA, 19 nt, Artificial Sequence
  Description of Artificial Sequence: Synthetic oligonucleotide
cuuuaucgcccgcaaaucu

SEQ ID NO: 3014174 - RNA, 19 nt, Artificial Sequence
  Description of Artificial Sequence: Synthetic oligonucleotide
augguuuccauggcaugcu

SEQ ID NO: 3014175 - RNA, 19 nt, Artificial Sequence
  Description of Artificial Sequence: Synthetic oligonucleotide
ugccaucucggcacugguc

SEQ ID NO: 3014176 - RNA, 19 nt, Artificial Sequence
  Description of Artificial Sequence: Synthetic oligonucleotide
acagccaggggauccuuuu

SEQ ID NO: 3014177 - RNA, 19 nt, Artificial Sequence
  Description of Artificial Sequence: Synthetic oligonucleotide
ggaacucccuuuccaugag

SEQ ID NO: 3014178 - RNA, 19 nt, Artificial Sequence
  Description of Artificial Sequence: Synthetic oligonucleotide
aguccuaggaagagcuaga

SEQ ID NO: 3014179 - RNA, 19 nt, Artificial Sequence
  Description of Artificial Sequence: Synthetic oligonucleotide
cccacuuugccaucucggc

SEQ ID NO: 3014180 - RNA, 19 nt, Artificial Sequence
  Description of Artificial Sequence: Synthetic oligonucleotide
gguuuccauggcaugcucc

SEQ ID NO: 3014181 - RNA, 19 nt, Artificial Sequence
  Description of Artificial Sequence: Synthetic oligonucleotide
cuccaucugagacggcauc

SEQ ID NO: 3014182 - RNA, 19 nt, Artificial Sequence
  Description of Artificial Sequence: Synthetic oligonucleotide
gagcccugcaaccagugau

SEQ ID NO: 3014183 - RNA, 19 nt, Artificial Sequence
  Description of Artificial Sequence: Synthetic oligonucleotide
ccuccuuuguuaaguaguc

SEQ ID NO: 3014184 - RNA, 19 nt, Artificial Sequence
  Description of Artificial Sequence: Synthetic oligonucleotide
cuuucccuucugcuucaug

SEQ ID NO: 3014185 - RNA, 19 nt, Artificial Sequence
  Description of Artificial Sequence: Synthetic oligonucleotide
gagcacucugagguccucc

SEQ ID NO: 3014186 - RNA, 19 nt, Artificial Sequence
  Description of Artificial Sequence: Synthetic oligonucleotide
gaggucuguugaaaccuga

SEQ ID NO: 3014187 - RNA, 19 nt, Artificial Sequence
  Description of Artificial Sequence: Synthetic oligonucleotide
guccuaggaagagcuagac

SEQ ID NO: 3014188 - RNA, 19 nt, Artificial Sequence
  Description of Artificial Sequence: Synthetic oligonucleotide
uccauguggccuacuucuu

SEQ ID NO: 3014189 - RNA, 19 nt, Artificial Sequence
  Description of Artificial Sequence: Synthetic oligonucleotide
gcaaaucugugaaauguaa

SEQ ID NO: 3014190 - RNA, 19 nt, Artificial Sequence
  Description of Artificial Sequence: Synthetic oligonucleotide
guugaaaccugagccccga

SEQ ID NO: 3014191 - RNA, 19 nt, Artificial Sequence
  Description of Artificial Sequence: Synthetic oligonucleotide
agcuagacacacagcggug

SEQ ID NO: 3014192 - RNA, 19 nt, Artificial Sequence
  Description of Artificial Sequence: Synthetic oligonucleotide
aucucggcacugguccagg

SEQ ID NO: 3014193 - RNA, 19 nt, Artificial Sequence
  Description of Artificial Sequence: Synthetic oligonucleotide
aggggauccuuuugauuuu

SEQ ID NO: 3014194 - RNA, 19 nt, Artificial Sequence
  Description of Artificial Sequence: Synthetic oligonucleotide
caucucggcacugguccag

SEQ ID NO: 3014195 - RNA, 19 nt, Artificial Sequence
  Description of Artificial Sequence: Synthetic oligonucleotide
uccacagccaggggauccu

SEQ ID NO: 3014196 - RNA, 19 nt, Artificial Sequence
  Description of Artificial Sequence: Synthetic oligonucleotide
cucggcacugguccagguc

SEQ ID NO: 3014197 - RNA, 19 nt, Artificial Sequence
  Description of Artificial Sequence: Synthetic oligonucleotide
ccuucugcuucauguguac

SEQ ID NO: 3014198 - RNA, 19 nt, Artificial Sequence
  Description of Artificial Sequence: Synthetic oligonucleotide
gaggaccagggcuccaugu

SEQ ID NO: 3014199 - RNA, 19 nt, Artificial Sequence
  Description of Artificial Sequence: Synthetic oligonucleotide
gagggaggaccagggcucc

SEQ ID NO: 3014200 - RNA, 19 nt, Artificial Sequence
  Description of Artificial Sequence: Synthetic oligonucleotide
ggcgaagcaguccuaggaa

SEQ ID NO: 3014201 - RNA, 19 nt, Artificial Sequence
  Description of Artificial Sequence: Synthetic oligonucleotide
cugcuucauguguacuaca

SEQ ID NO: 3014202 - RNA, 19 nt, Artificial Sequence
  Description of Artificial Sequence: Synthetic oligonucleotide
augagcccugcaaccagug

SEQ ID NO: 3014203 - RNA, 19 nt, Artificial Sequence
  Description of Artificial Sequence: Synthetic oligonucleotide
ccuacuucuuucccuucug

SEQ ID NO: 3014204 - RNA, 19 nt, Artificial Sequence
  Description of Artificial Sequence: Synthetic oligonucleotide
cagccaggggauccuuuug

SEQ ID NO: 3014205 - RNA, 19 nt, Artificial Sequence
  Description of Artificial Sequence: Synthetic oligonucleotide
cugagccccgaggcgaagc

SEQ ID NO: 3014206 - RNA, 19 nt, Artificial Sequence
  Description of Artificial Sequence: Synthetic oligonucleotide
acggcaucuugaagagguc

SEQ ID NO: 3014207 - RNA, 19 nt, Artificial Sequence
  Description of Artificial Sequence: Synthetic oligonucleotide
ucucggcacugguccaggu

SEQ ID NO: 3014208 - RNA, 19 nt, Artificial Sequence
  Description of Artificial Sequence: Synthetic oligonucleotide
guggccuacuucuuucccu

SEQ ID NO: 3014209 - RNA, 19 nt, Artificial Sequence
  Description of Artificial Sequence: Synthetic oligonucleotide
gcuucauguguacuacaaa

SEQ ID NO: 3014210 - RNA, 19 nt, Artificial Sequence
  Description of Artificial Sequence: Synthetic oligonucleotide
gcuagacacacagcgguga

SEQ ID NO: 3014211 - RNA, 19 nt, Artificial Sequence
  Description of Artificial Sequence: Synthetic oligonucleotide
aggaagagcuagacacaca

SEQ ID NO: 3014212 - RNA, 19 nt, Artificial Sequence
  Description of Artificial Sequence: Synthetic oligonucleotide
ggagggaggaccagggcuc

SEQ ID NO: 3014213 - RNA, 19 nt, Artificial Sequence
  Description of Artificial Sequence: Synthetic oligonucleotide
cucccuuuccaugagcacu

SEQ ID NO: 3014214 - RNA, 19 nt, Artificial Sequence
  Description of Artificial Sequence: Synthetic oligonucleotide
gaugagcccugcaaccagu

SEQ ID NO: 3014215 - RNA, 19 nt, Artificial Sequence
  Description of Artificial Sequence: Synthetic oligonucleotide
cccgcaaaucugugaaaug

SEQ ID NO: 3014216 - RNA, 19 nt, Artificial Sequence
  Description of Artificial Sequence: Synthetic oligonucleotide
gcuccauguggccuacuuc

SEQ ID NO: 3014217 - RNA, 19 nt, Artificial Sequence
  Description of Artificial Sequence: Synthetic oligonucleotide
agggcuccauguggccuac

SEQ ID NO: 3014218 - RNA, 19 nt, Artificial Sequence
  Description of Artificial Sequence: Synthetic oligonucleotide
gaagcccacuuugccaucu

SEQ ID NO: 3014219 - RNA, 19 nt, Artificial Sequence
  Description of Artificial Sequence: Synthetic oligonucleotide
gggauccuuuugauuuucc

SEQ ID NO: 3014220 - RNA, 19 nt, Artificial Sequence
  Description of Artificial Sequence: Synthetic oligonucleotide
gcaugcaaugaugagcccu

SEQ ID NO: 3014221 - RNA, 19 nt, Artificial Sequence
  Description of Artificial Sequence: Synthetic oligonucleotide
agcccugcaaccagugaua

SEQ ID NO: 3014222 - RNA, 19 nt, Artificial Sequence
  Description of Artificial Sequence: Synthetic oligonucleotide
uguccacagccaggggauc

SEQ ID NO: 3014223 - RNA, 19 nt, Artificial Sequence
  Description of Artificial Sequence: Synthetic oligonucleotide
ugagcacucugagguccuc

SEQ ID NO: 3014224 - RNA, 19 nt, Artificial Sequence
  Description of Artificial Sequence: Synthetic oligonucleotide
cgaagcaguccuaggaaga

SEQ ID NO: 3014225 - RNA, 19 nt, Artificial Sequence
  Description of Artificial Sequence: Synthetic oligonucleotide
ccagggaacucccuuucca

SEQ ID NO: 3014226 - RNA, 19 nt, Artificial Sequence
  Description of Artificial Sequence: Synthetic oligonucleotide
ccacuuugccaucucggca

SEQ ID NO: 3014227 - RNA, 19 nt, Artificial Sequence
  Description of Artificial Sequence: Synthetic oligonucleotide
cagggaacucccuuuccau

SEQ ID NO: 3014228 - RNA, 19 nt, Artificial Sequence
  Description of Artificial Sequence: Synthetic oligonucleotide
gguccuccuuuguuaagua

SEQ ID NO: 3014229 - RNA, 19 nt, Artificial Sequence
  Description of Artificial Sequence: Synthetic oligonucleotide
ucuuucccuucugcuucau

SEQ ID NO: 3014230 - RNA, 19 nt, Artificial Sequence
  Description of Artificial Sequence: Synthetic oligonucleotide
cacucugagguccuccuuu

SEQ ID NO: 3014231 - RNA, 19 nt, Artificial Sequence
  Description of Artificial Sequence: Synthetic oligonucleotide
ccuuuccaugagcacucug

SEQ ID NO: 3014232 - RNA, 19 nt, Artificial Sequence
  Description of Artificial Sequence: Synthetic oligonucleotide
cagggcuccauguggccua

SEQ ID NO: 3014233 - RNA, 19 nt, Artificial Sequence
  Description of Artificial Sequence: Synthetic oligonucleotide
ggggauccuuuugauuuuc

SEQ ID NO: 3014234 - RNA, 19 nt, Artificial Sequence
  Description of Artificial Sequence: Synthetic oligonucleotide
ccgcaaaucugugaaaugu

SEQ ID NO: 3014235 - RNA, 19 nt, Artificial Sequence
  Description of Artificial Sequence: Synthetic oligonucleotide
gccuacuucuuucccuucu

SEQ ID NO: 3014236 - RNA, 19 nt, Artificial Sequence
  Description of Artificial Sequence: Synthetic oligonucleotide
augcuccaucugagacggc

SEQ ID NO: 3014237 - RNA, 19 nt, Artificial Sequence
  Description of Artificial Sequence: Synthetic oligonucleotide
cgaggcgaagcaguccuag

SEQ ID NO: 3014238 - RNA, 19 nt, Artificial Sequence
  Description of Artificial Sequence: Synthetic oligonucleotide
ccuuuguuaaguagucuuu

SEQ ID NO: 3014239 - RNA, 19 nt, Artificial Sequence
  Description of Artificial Sequence: Synthetic oligonucleotide
cuucugcuucauguguacu

SEQ ID NO: 3014240 - RNA, 19 nt, Artificial Sequence
  Description of Artificial Sequence: Synthetic oligonucleotide
cgcaaaucugugaaaugua

SEQ ID NO: 3014241 - RNA, 19 nt, Artificial Sequence
  Description of Artificial Sequence: Synthetic oligonucleotide
ggccuacuucuuucccuuc

SEQ ID NO: 3014242 - RNA, 19 nt, Artificial Sequence
  Description of Artificial Sequence: Synthetic oligonucleotide
guacuacaaaauagucauu

SEQ ID NO: 3014243 - RNA, 19 nt, Artificial Sequence
  Description of Artificial Sequence: Synthetic oligonucleotide
cccuucugcuucaugugua

SEQ ID NO: 3014244 - RNA, 19 nt, Artificial Sequence
  Description of Artificial Sequence: Synthetic oligonucleotide
cucugagguccuccuuugu

SEQ ID NO: 3014245 - RNA, 19 nt, Artificial Sequence
  Description of Artificial Sequence: Synthetic oligonucleotide
gcccgcaaaucugugaaau

SEQ ID NO: 3014246 - RNA, 19 nt, Artificial Sequence
  Description of Artificial Sequence: Synthetic oligonucleotide
accugagccccgaggcgaa

SEQ ID NO: 3014247 - RNA, 19 nt, Artificial Sequence
  Description of Artificial Sequence: Synthetic oligonucleotide
agggaggaccagggcucca

SEQ ID NO: 3014248 - RNA, 19 nt, Artificial Sequence
  Description of Artificial Sequence: Synthetic oligonucleotide
ccauggcaugcuccaucug

SEQ ID NO: 3014249 - RNA, 19 nt, Artificial Sequence
  Description of Artificial Sequence: Synthetic oligonucleotide
cccgaggcgaagcaguccu

SEQ ID NO: 3014250 - RNA, 19 nt, Artificial Sequence
  Description of Artificial Sequence: Synthetic oligonucleotide
ccaucucggcacuggucca

SEQ ID NO: 3014251 - RNA, 19 nt, Artificial Sequence
  Description of Artificial Sequence: Synthetic oligonucleotide
gguccagguccuucauuau

SEQ ID NO: 3014252 - RNA, 19 nt, Artificial Sequence
  Description of Artificial Sequence: Synthetic oligonucleotide
ggcuccauguggccuacuu

SEQ ID NO: 3014253 - RNA, 19 nt, Artificial Sequence
  Description of Artificial Sequence: Synthetic oligonucleotide
gcccugcaaccagugauaa

SEQ ID NO: 3014254 - RNA, 19 nt, Artificial Sequence
  Description of Artificial Sequence: Synthetic oligonucleotide
gccaggggauccuuuugau

SEQ ID NO: 3014255 - RNA, 19 nt, Artificial Sequence
  Description of Artificial Sequence: Synthetic oligonucleotide
ccccgaggcgaagcagucc

SEQ ID NO: 3014256 - RNA, 19 nt, Artificial Sequence
  Description of Artificial Sequence: Synthetic oligonucleotide
cugguccagguccuucauu

SEQ ID NO: 3014257 - RNA, 19 nt, Artificial Sequence
  Description of Artificial Sequence: Synthetic oligonucleotide
cacagccaggggauccuuu

SEQ ID NO: 3014258 - RNA, 19 nt, Artificial Sequence
  Description of Artificial Sequence: Synthetic oligonucleotide
gccccgaggcgaagcaguc

SEQ ID NO: 3014259 - RNA, 19 nt, Artificial Sequence
  Description of Artificial Sequence: Synthetic oligonucleotide
ccaggggauccuuuugauu

SEQ ID NO: 3014260 - RNA, 19 nt, Artificial Sequence
  Description of Artificial Sequence: Synthetic oligonucleotide
gcuccaucugagacggcau

SEQ ID NO: 3014261 - RNA, 19 nt, Artificial Sequence
  Description of Artificial Sequence: Synthetic oligonucleotide
cccugcaaccagugauaaa

SEQ ID NO: 3014262 - RNA, 19 nt, Artificial Sequence
  Description of Artificial Sequence: Synthetic oligonucleotide
ccauguggccuacuucuuu

SEQ ID NO: 3014263 - RNA, 19 nt, Artificial Sequence
  Description of Artificial Sequence: Synthetic oligonucleotide
ccugagccccgaggcgaag

SEQ ID NO: 3014264 - RNA, 19 nt, Artificial Sequence
  Description of Artificial Sequence: Synthetic oligonucleotide
gggaggaccagggcuccau

SEQ ID NO: 3014265 - RNA, 19 nt, Artificial Sequence
  Description of Artificial Sequence: Synthetic oligonucleotide
cggcaucuugaagaggucu

SEQ ID NO: 3014266 - RNA, 19 nt, Artificial Sequence
  Description of Artificial Sequence: Synthetic oligonucleotide
gcacucugagguccuccuu

SEQ ID NO: 3014267 - RNA, 19 nt, Artificial Sequence
  Description of Artificial Sequence: Synthetic oligonucleotide
ccagggcuccauguggccu

SEQ ID NO: 3014268 - RNA, 19 nt, Artificial Sequence
  Description of Artificial Sequence: Synthetic oligonucleotide
ccaucugagacggcaucuu

SEQ ID NO: 3014269 - RNA, 19 nt, Artificial Sequence
  Description of Artificial Sequence: Synthetic oligonucleotide
cgcccgcaaaucugugaaa

SEQ ID NO: 3014270 - RNA, 19 nt, Artificial Sequence
  Description of Artificial Sequence: Synthetic oligonucleotide
ccgaggcgaagcaguccua

SEQ ID NO: 3014271 - RNA, 19 nt, Artificial Sequence
  Description of Artificial Sequence: Synthetic oligonucleotide
cggcacugguccagguccu

SEQ ID NO: 3014272 - RNA, 19 nt, Artificial Sequence
  Description of Artificial Sequence: Synthetic oligonucleotide
cccuuuccaugagcacucu

SEQ ID NO: 3014273 - RNA, 19 nt, Artificial Sequence
  Description of Artificial Sequence: Synthetic oligonucleotide
gggcuccauguggccuacu

SEQ ID NO: 3014274 - RNA, 19 nt, Artificial Sequence
  Description of Artificial Sequence: Synthetic oligonucleotide
ccacagccaggggauccuu

SEQ ID NO: 3014275 - RNA, 19 nt, Artificial Sequence
  Description of Artificial Sequence: Synthetic oligonucleotide
aaucuuuguauacagaaug

SEQ ID NO: 3014276 - RNA, 19 nt, Artificial Sequence
  Description of Artificial Sequence: Synthetic oligonucleotide
ucaaccaucagaaacuggg

SEQ ID NO: 3014277 - RNA, 19 nt, Artificial Sequence
  Description of Artificial Sequence: Synthetic oligonucleotide
uucguuuucagccugaaug

SEQ ID NO: 3014278 - RNA, 19 nt, Artificial Sequence
  Description of Artificial Sequence: Synthetic oligonucleotide
aauugcacuauauaauucu

SEQ ID NO: 3014279 - RNA, 19 nt, Artificial Sequence
  Description of Artificial Sequence: Synthetic oligonucleotide
auauaauucuucaucaacc

SEQ ID NO: 3014280 - RNA, 19 nt, Artificial Sequence
  Description of Artificial Sequence: Synthetic oligonucleotide
uuuucuauaggcugcaugc

SEQ ID NO: 3014281 - RNA, 19 nt, Artificial Sequence
  Description of Artificial Sequence: Synthetic oligonucleotide
uaacagaacauuuaauugc

SEQ ID NO: 3014282 - RNA, 19 nt, Artificial Sequence
  Description of Artificial Sequence: Synthetic oligonucleotide
uucaucaaccaucagaaac

SEQ ID NO: 3014283 - RNA, 19 nt, Artificial Sequence
  Description of Artificial Sequence: Synthetic oligonucleotide
uuuaauugcacuauauaau

SEQ ID NO: 3014284 - RNA, 19 nt, Artificial Sequence
  Description of Artificial Sequence: Synthetic oligonucleotide
uguuucauaauaucgagaa

SEQ ID NO: 3014285 - RNA, 19 nt, Artificial Sequence
  Description of Artificial Sequence: Synthetic oligonucleotide
auaacagaacauuuaauug

SEQ ID NO: 3014286 - RNA, 19 nt, Artificial Sequence
  Description of Artificial Sequence: Synthetic oligonucleotide
gaaguguuucauaauaucg

SEQ ID NO: 3014287 - RNA, 19 nt, Artificial Sequence
  Description of Artificial Sequence: Synthetic oligonucleotide
auuuaauugcacuauauaa

SEQ ID NO: 3014288 - RNA, 19 nt, Artificial Sequence
  Description of Artificial Sequence: Synthetic oligonucleotide
uauauaauucuucaucaac

SEQ ID NO: 3014289 - RNA, 19 nt, Artificial Sequence
  Description of Artificial Sequence: Synthetic oligonucleotide
aacauuuuccuugccaggc

SEQ ID NO: 3014290 - RNA, 19 nt, Artificial Sequence
  Description of Artificial Sequence: Synthetic oligonucleotide
uuuucagccugaaugauca

SEQ ID NO: 3014291 - RNA, 19 nt, Artificial Sequence
  Description of Artificial Sequence: Synthetic oligonucleotide
uuucauaauaucgagaauc

SEQ ID NO: 3014292 - RNA, 19 nt, Artificial Sequence
  Description of Artificial Sequence: Synthetic oligonucleotide
acuauauaauucuucauca

SEQ ID NO: 3014293 - RNA, 19 nt, Artificial Sequence
  Description of Artificial Sequence: Synthetic oligonucleotide
ucugguuccgcuuugacca

SEQ ID NO: 3014294 - RNA, 19 nt, Artificial Sequence
  Description of Artificial Sequence: Synthetic oligonucleotide
ucuucaucaaccaucagaa

SEQ ID NO: 3014295 - RNA, 19 nt, Artificial Sequence
  Description of Artificial Sequence: Synthetic oligonucleotide
uuuguauacagaaugguua

SEQ ID NO: 3014296 - RNA, 19 nt, Artificial Sequence
  Description of Artificial Sequence: Synthetic oligonucleotide
uguauuuucuauaggcugc

SEQ ID NO: 3014297 - RNA, 19 nt, Artificial Sequence
  Description of Artificial Sequence: Synthetic oligonucleotide
agaaacugggaucauauug

SEQ ID NO: 3014298 - RNA, 19 nt, Artificial Sequence
  Description of Artificial Sequence: Synthetic oligonucleotide
gaucauauuggccacuucc

SEQ ID NO: 3014299 - RNA, 19 nt, Artificial Sequence
  Description of Artificial Sequence: Synthetic oligonucleotide
aaacugggaucauauuggc

SEQ ID NO: 3014300 - RNA, 19 nt, Artificial Sequence
  Description of Artificial Sequence: Synthetic oligonucleotide
uggagugucgcacacagcc

SEQ ID NO: 3014301 - RNA, 19 nt, Artificial Sequence
  Description of Artificial Sequence: Synthetic oligonucleotide
gaaacugggaucauauugg

SEQ ID NO: 3014302 - RNA, 19 nt, Artificial Sequence
  Description of Artificial Sequence: Synthetic oligonucleotide
cuguguauuuucuauaggc

SEQ ID NO: 3014303 - RNA, 19 nt, Artificial Sequence
  Description of Artificial Sequence: Synthetic oligonucleotide
uauaauucuucaucaacca

SEQ ID NO: 3014304 - RNA, 19 nt, Artificial Sequence
  Description of Artificial Sequence: Synthetic oligonucleotide
uaauucuucaucaaccauc

SEQ ID NO: 3014305 - RNA, 19 nt, Artificial Sequence
  Description of Artificial Sequence: Synthetic oligonucleotide
ucaucaaccaucagaaacu

SEQ ID NO: 3014306 - RNA, 19 nt, Artificial Sequence
  Description of Artificial Sequence: Synthetic oligonucleotide
auacagaaugguuagccuc

SEQ ID NO: 3014307 - RNA, 19 nt, Artificial Sequence
  Description of Artificial Sequence: Synthetic oligonucleotide
ugcacuauauaauucuuca

SEQ ID NO: 3014308 - RNA, 19 nt, Artificial Sequence
  Description of Artificial Sequence: Synthetic oligonucleotide
uccgcuuugaccaugucca

SEQ ID NO: 3014309 - RNA, 19 nt, Artificial Sequence
  Description of Artificial Sequence: Synthetic oligonucleotide
aaugguuagccucucgugu

SEQ ID NO: 3014310 - RNA, 19 nt, Artificial Sequence
  Description of Artificial Sequence: Synthetic oligonucleotide
uuguauacagaaugguuag

SEQ ID NO: 3014311 - RNA, 19 nt, Artificial Sequence
  Description of Artificial Sequence: Synthetic oligonucleotide
agaaucuuuguauacagaa

SEQ ID NO: 3014312 - RNA, 19 nt, Artificial Sequence
  Description of Artificial Sequence: Synthetic oligonucleotide
aguguuucauaauaucgag

SEQ ID NO: 3014313 - RNA, 19 nt, Artificial Sequence
  Description of Artificial Sequence: Synthetic oligonucleotide
aauaucgagaaucuuugua

SEQ ID NO: 3014314 - RNA, 19 nt, Artificial Sequence
  Description of Artificial Sequence: Synthetic oligonucleotide
uuaauugcacuauauaauu

SEQ ID NO: 3014315 - RNA, 19 nt, Artificial Sequence
  Description of Artificial Sequence: Synthetic oligonucleotide
uucauaauaucgagaaucu

SEQ ID NO: 3014316 - RNA, 19 nt, Artificial Sequence
  Description of Artificial Sequence: Synthetic oligonucleotide
auaggcugcaugcuuaggg

SEQ ID NO: 3014317 - RNA, 19 nt, Artificial Sequence
  Description of Artificial Sequence: Synthetic oligonucleotide
uguguauuuucuauaggcu

SEQ ID NO: 3014318 - RNA, 19 nt, Artificial Sequence
  Description of Artificial Sequence: Synthetic oligonucleotide
uguggagugucgcacacag

SEQ ID NO: 3014319 - RNA, 19 nt, Artificial Sequence
  Description of Artificial Sequence: Synthetic oligonucleotide
aaccccaucaggccggugg

SEQ ID NO: 3014320 - RNA, 19 nt, Artificial Sequence
  Description of Artificial Sequence: Synthetic oligonucleotide
uuuaacaucugguuccgcu

SEQ ID NO: 3014321 - RNA, 19 nt, Artificial Sequence
  Description of Artificial Sequence: Synthetic oligonucleotide
ucuguguauuuucuauagg

SEQ ID NO: 3014322 - RNA, 19 nt, Artificial Sequence
  Description of Artificial Sequence: Synthetic oligonucleotide
uuagggaaguguuucauaa

SEQ ID NO: 3014323 - RNA, 19 nt, Artificial Sequence
  Description of Artificial Sequence: Synthetic oligonucleotide
cacuauauaauucuucauc

SEQ ID NO: 3014324 - RNA, 19 nt, Artificial Sequence
  Description of Artificial Sequence: Synthetic oligonucleotide
auaucgagaaucuuuguau

SEQ ID NO: 3014325 - RNA, 19 nt, Artificial Sequence
  Description of Artificial Sequence: Synthetic oligonucleotide
aucgagaaucuuuguauac

SEQ ID NO: 3014326 - RNA, 19 nt, Artificial Sequence
  Description of Artificial Sequence: Synthetic oligonucleotide
aauucuucaucaaccauca

SEQ ID NO: 3014327 - RNA, 19 nt, Artificial Sequence
  Description of Artificial Sequence: Synthetic oligonucleotide
ucagaaacugggaucauau

SEQ ID NO: 3014328 - RNA, 19 nt, Artificial Sequence
  Description of Artificial Sequence: Synthetic oligonucleotide
auaauaucgagaaucuuug

SEQ ID NO: 3014329 - RNA, 19 nt, Artificial Sequence
  Description of Artificial Sequence: Synthetic oligonucleotide
gaucaccucuucuacuucg

SEQ ID NO: 3014330 - RNA, 19 nt, Artificial Sequence
  Description of Artificial Sequence: Synthetic oligonucleotide
accaucagaaacugggauc

SEQ ID NO: 3014331 - RNA, 19 nt, Artificial Sequence
  Description of Artificial Sequence: Synthetic oligonucleotide
agaacauuuaauugcacua

SEQ ID NO: 3014332 - RNA, 19 nt, Artificial Sequence
  Description of Artificial Sequence: Synthetic oligonucleotide
accucuucuacuucgccac

SEQ ID NO: 3014333 - RNA, 19 nt, Artificial Sequence
  Description of Artificial Sequence: Synthetic oligonucleotide
aaugaucaccucuucuacu

SEQ ID NO: 3014334 - RNA, 19 nt, Artificial Sequence
  Description of Artificial Sequence: Synthetic oligonucleotide
uuccacugcaacauuuucc

SEQ ID NO: 3014335 - RNA, 19 nt, Artificial Sequence
  Description of Artificial Sequence: Synthetic oligonucleotide
uccacugcaacauuuuccu

SEQ ID NO: 3014336 - RNA, 19 nt, Artificial Sequence
  Description of Artificial Sequence: Synthetic oligonucleotide
ugcaacauuuuccuugcca

SEQ ID NO: 3014337 - RNA, 19 nt, Artificial Sequence
  Description of Artificial Sequence: Synthetic oligonucleotide
acagccaaccccaucaggc

SEQ ID NO: 3014338 - RNA, 19 nt, Artificial Sequence
  Description of Artificial Sequence: Synthetic oligonucleotide
aacagaacauuuaauugca

SEQ ID NO: 3014339 - RNA, 19 nt, Artificial Sequence
  Description of Artificial Sequence: Synthetic oligonucleotide
ugaaugaucaccucuucua

SEQ ID NO: 3014340 - RNA, 19 nt, Artificial Sequence
  Description of Artificial Sequence: Synthetic oligonucleotide
gcuuaguucguuuucagcc

SEQ ID NO: 3014341 - RNA, 19 nt, Artificial Sequence
  Description of Artificial Sequence: Synthetic oligonucleotide
auuuucuauaggcugcaug

SEQ ID NO: 3014342 - RNA, 19 nt, Artificial Sequence
  Description of Artificial Sequence: Synthetic oligonucleotide
aaguguuucauaauaucga

SEQ ID NO: 3014343 - RNA, 19 nt, Artificial Sequence
  Description of Artificial Sequence: Synthetic oligonucleotide
aucuguucuguguauuuuc

SEQ ID NO: 3014344 - RNA, 19 nt, Artificial Sequence
  Description of Artificial Sequence: Synthetic oligonucleotide
guauacagaaugguuagcc

SEQ ID NO: 3014345 - RNA, 19 nt, Artificial Sequence
  Description of Artificial Sequence: Synthetic oligonucleotide
uacagaaugguuagccucu

SEQ ID NO: 3014346 - RNA, 19 nt, Artificial Sequence
  Description of Artificial Sequence: Synthetic oligonucleotide
aucauauuggccacuuccc

SEQ ID NO: 3014347 - RNA, 19 nt, Artificial Sequence
  Description of Artificial Sequence: Synthetic oligonucleotide
uguucuguguauuuucuau

SEQ ID NO: 3014348 - RNA, 19 nt, Artificial Sequence
  Description of Artificial Sequence: Synthetic oligonucleotide
uaauugcacuauauaauuc

SEQ ID NO: 3014349 - RNA, 19 nt, Artificial Sequence
  Description of Artificial Sequence: Synthetic oligonucleotide
uauacagaaugguuagccu

SEQ ID NO: 3014350 - RNA, 19 nt, Artificial Sequence
  Description of Artificial Sequence: Synthetic oligonucleotide
ucguuuucagccugaauga

SEQ ID NO: 3014351 - RNA, 19 nt, Artificial Sequence
  Description of Artificial Sequence: Synthetic oligonucleotide
cacugcaacauuuuccuug

SEQ ID NO: 3014352 - RNA, 19 nt, Artificial Sequence
  Description of Artificial Sequence: Synthetic oligonucleotide
uuccgcuuugaccaugucc

SEQ ID NO: 3014353 - RNA, 19 nt, Artificial Sequence
  Description of Artificial Sequence: Synthetic oligonucleotide
gaaugaucaccucuucuac

SEQ ID NO: 3014354 - RNA, 19 nt, Artificial Sequence
  Description of Artificial Sequence: Synthetic oligonucleotide
ucauauuggccacuuccca

SEQ ID NO: 3014355 - RNA, 19 nt, Artificial Sequence
  Description of Artificial Sequence: Synthetic oligonucleotide
uucgccacccugaagcaag

SEQ ID NO: 3014356 - RNA, 19 nt, Artificial Sequence
  Description of Artificial Sequence: Synthetic oligonucleotide
aaccaucagaaacugggau

SEQ ID NO: 3014357 - RNA, 19 nt, Artificial Sequence
  Description of Artificial Sequence: Synthetic oligonucleotide
ucuguucuguguauuuucu

SEQ ID NO: 3014358 - RNA, 19 nt, Artificial Sequence
  Description of Artificial Sequence: Synthetic oligonucleotide
uuaguucguuuucagccug

SEQ ID NO: 3014359 - RNA, 19 nt, Artificial Sequence
  Description of Artificial Sequence: Synthetic oligonucleotide
aucuuuguauacagaaugg

SEQ ID NO: 3014360 - RNA, 19 nt, Artificial Sequence
  Description of Artificial Sequence: Synthetic oligonucleotide
agaaugguuagccucucgu

SEQ ID NO: 3014361 - RNA, 19 nt, Artificial Sequence
  Description of Artificial Sequence: Synthetic oligonucleotide
ucuauaggcugcaugcuua

SEQ ID NO: 3014362 - RNA, 19 nt, Artificial Sequence
  Description of Artificial Sequence: Synthetic oligonucleotide
gaaugguuagccucucgug

SEQ ID NO: 3014363 - RNA, 19 nt, Artificial Sequence
  Description of Artificial Sequence: Synthetic oligonucleotide
ucuuuguauacagaauggu

SEQ ID NO: 3014364 - RNA, 19 nt, Artificial Sequence
  Description of Artificial Sequence: Synthetic oligonucleotide
ugaagcaaguuuucuaauu

SEQ ID NO: 3014365 - RNA, 19 nt, Artificial Sequence
  Description of Artificial Sequence: Synthetic oligonucleotide
gcaacauuuuccuugccag

SEQ ID NO: 3014366 - RNA, 19 nt, Artificial Sequence
  Description of Artificial Sequence: Synthetic oligonucleotide
aagcaaguuuucuaauuuu

SEQ ID NO: 3014367 - RNA, 19 nt, Artificial Sequence
  Description of Artificial Sequence: Synthetic oligonucleotide
cauauuggccacuucccac

SEQ ID NO: 3014368 - RNA, 19 nt, Artificial Sequence
  Description of Artificial Sequence: Synthetic oligonucleotide
uugcacuauauaauucuuc

SEQ ID NO: 3014369 - RNA, 19 nt, Artificial Sequence
  Description of Artificial Sequence: Synthetic oligonucleotide
auauuggccacuucccacu

SEQ ID NO: 3014370 - RNA, 19 nt, Artificial Sequence
  Description of Artificial Sequence: Synthetic oligonucleotide
cauaacagaacauuuaauu

SEQ ID NO: 3014371 - RNA, 19 nt, Artificial Sequence
  Description of Artificial Sequence: Synthetic oligonucleotide
uugaccauguccagcuucu

SEQ ID NO: 3014372 - RNA, 19 nt, Artificial Sequence
  Description of Artificial Sequence: Synthetic oligonucleotide
ugguuagccucucgugugg

SEQ ID NO: 3014373 - RNA, 19 nt, Artificial Sequence
  Description of Artificial Sequence: Synthetic oligonucleotide
caacauuuuccuugccagg

SEQ ID NO: 3014374 - RNA, 19 nt, Artificial Sequence
  Description of Artificial Sequence: Synthetic oligonucleotide
ucgagaaucuuuguauaca

SEQ ID NO: 3014375 - RNA, 19 nt, Artificial Sequence
  Description of Artificial Sequence: Synthetic oligonucleotide
agggaaguguuucauaaua

SEQ ID NO: 3014376 - RNA, 19 nt, Artificial Sequence
  Description of Artificial Sequence: Synthetic oligonucleotide
auaauucuucaucaaccau

SEQ ID NO: 3014377 - RNA, 19 nt, Artificial Sequence
  Description of Artificial Sequence: Synthetic oligonucleotide
uucagccugaaugaucacc

SEQ ID NO: 3014378 - RNA, 19 nt, Artificial Sequence
  Description of Artificial Sequence: Synthetic oligonucleotide
uaucgagaaucuuuguaua

SEQ ID NO: 3014379 - RNA, 19 nt, Artificial Sequence
  Description of Artificial Sequence: Synthetic oligonucleotide
augcuuagggaaguguuuc

SEQ ID NO: 3014380 - RNA, 19 nt, Artificial Sequence
  Description of Artificial Sequence: Synthetic oligonucleotide
ucgcacacagccaacccca

SEQ ID NO: 3014381 - RNA, 19 nt, Artificial Sequence
  Description of Artificial Sequence: Synthetic oligonucleotide
cauaauaucgagaaucuuu

SEQ ID NO: 3014382 - RNA, 19 nt, Artificial Sequence
  Description of Artificial Sequence: Synthetic oligonucleotide
augguuagccucucgugug

SEQ ID NO: 3014383 - RNA, 19 nt, Artificial Sequence
  Description of Artificial Sequence: Synthetic oligonucleotide
uaauaucgagaaucuuugu

SEQ ID NO: 3014384 - RNA, 19 nt, Artificial Sequence
  Description of Artificial Sequence: Synthetic oligonucleotide
aacaucugguuccgcuuug

SEQ ID NO: 3014385 - RNA, 19 nt, Artificial Sequence
  Description of Artificial Sequence: Synthetic oligonucleotide
uaggcugcaugcuuaggga

SEQ ID NO: 3014386 - RNA, 19 nt, Artificial Sequence
  Description of Artificial Sequence: Synthetic oligonucleotide
uuaacaucugguuccgcuu

SEQ ID NO: 3014387 - RNA, 19 nt, Artificial Sequence
  Description of Artificial Sequence: Synthetic oligonucleotide
uguauacagaaugguuagc

SEQ ID NO: 3014388 - RNA, 19 nt, Artificial Sequence
  Description of Artificial Sequence: Synthetic oligonucleotide
uuccuugccaggcuuaguu

SEQ ID NO: 3014389 - RNA, 19 nt, Artificial Sequence
  Description of Artificial Sequence: Synthetic oligonucleotide
ucacuggugaucuguucug

SEQ ID NO: 3014390 - RNA, 19 nt, Artificial Sequence
  Description of Artificial Sequence: Synthetic oligonucleotide
augaucaccucuucuacuu

SEQ ID NO: 3014391 - RNA, 19 nt, Artificial Sequence
  Description of Artificial Sequence: Synthetic oligonucleotide
agccaaccccaucaggccg

SEQ ID NO: 3014392 - RNA, 19 nt, Artificial Sequence
  Description of Artificial Sequence: Synthetic oligonucleotide
uucuauaggcugcaugcuu

SEQ ID NO: 3014393 - RNA, 19 nt, Artificial Sequence
  Description of Artificial Sequence: Synthetic oligonucleotide
agccugaaugaucaccucu

SEQ ID NO: 3014394 - RNA, 19 nt, Artificial Sequence
  Description of Artificial Sequence: Synthetic oligonucleotide
cuauaggcugcaugcuuag

SEQ ID NO: 3014395 - RNA, 19 nt, Artificial Sequence
  Description of Artificial Sequence: Synthetic oligonucleotide
ugucgcacacagccaaccc

SEQ ID NO: 3014396 - RNA, 19 nt, Artificial Sequence
  Description of Artificial Sequence: Synthetic oligonucleotide
ggaaguguuucauaauauc

SEQ ID NO: 3014397 - RNA, 19 nt, Artificial Sequence
  Description of Artificial Sequence: Synthetic oligonucleotide
cauuuaauugcacuauaua

SEQ ID NO: 3014398 - RNA, 19 nt, Artificial Sequence
  Description of Artificial Sequence: Synthetic oligonucleotide
cacacagccaaccccauca

SEQ ID NO: 3014399 - RNA, 19 nt, Artificial Sequence
  Description of Artificial Sequence: Synthetic oligonucleotide
uuuuccuugccaggcuuag

SEQ ID NO: 3014400 - RNA, 19 nt, Artificial Sequence
  Description of Artificial Sequence: Synthetic oligonucleotide
uggugaucuguucugugua

SEQ ID NO: 3014401 - RNA, 19 nt, Artificial Sequence
  Description of Artificial Sequence: Synthetic oligonucleotide
aggcucuuccacccggugg

SEQ ID NO: 3014402 - RNA, 19 nt, Artificial Sequence
  Description of Artificial Sequence: Synthetic oligonucleotide
gaagcaaguuuucuaauuu

SEQ ID NO: 3014403 - RNA, 19 nt, Artificial Sequence
  Description of Artificial Sequence: Synthetic oligonucleotide
uuucuauaggcugcaugcu

SEQ ID NO: 3014404 - RNA, 19 nt, Artificial Sequence
  Description of Artificial Sequence: Synthetic oligonucleotide
acagaacauuuaauugcac

SEQ ID NO: 3014405 - RNA, 19 nt, Artificial Sequence
  Description of Artificial Sequence: Synthetic oligonucleotide
acugguuggcaggaggcuc

SEQ ID NO: 3014406 - RNA, 19 nt, Artificial Sequence
  Description of Artificial Sequence: Synthetic oligonucleotide
ugaucuguucuguguauuu

SEQ ID NO: 3014407 - RNA, 19 nt, Artificial Sequence
  Description of Artificial Sequence: Synthetic oligonucleotide
acuggugaucuguucugug

SEQ ID NO: 3014408 - RNA, 19 nt, Artificial Sequence
  Description of Artificial Sequence: Synthetic oligonucleotide
ugcuuagggaaguguuuca

SEQ ID NO: 3014409 - RNA, 19 nt, Artificial Sequence
  Description of Artificial Sequence: Synthetic oligonucleotide
gucgcacacagccaacccc

SEQ ID NO: 3014410 - RNA, 19 nt, Artificial Sequence
  Description of Artificial Sequence: Synthetic oligonucleotide
aucaccucuucuacuucgc

SEQ ID NO: 3014411 - RNA, 19 nt, Artificial Sequence
  Description of Artificial Sequence: Synthetic oligonucleotide
uagccucucguguggagug

SEQ ID NO: 3014412 - RNA, 19 nt, Artificial Sequence
  Description of Artificial Sequence: Synthetic oligonucleotide
aggcuuaguucguuuucag

SEQ ID NO: 3014413 - RNA, 19 nt, Artificial Sequence
  Description of Artificial Sequence: Synthetic oligonucleotide
aggaggcucuuccacccgg

SEQ ID NO: 3014414 - RNA, 19 nt, Artificial Sequence
  Description of Artificial Sequence: Synthetic oligonucleotide
cacccgguggcucccaugg

SEQ ID NO: 3014415 - RNA, 19 nt, Artificial Sequence
  Description of Artificial Sequence: Synthetic oligonucleotide
acauuuuccuugccaggcu

SEQ ID NO: 3014416 - RNA, 19 nt, Artificial Sequence
  Description of Artificial Sequence: Synthetic oligonucleotide
ccuugccaggcuuaguucg

SEQ ID NO: 3014417 - RNA, 19 nt, Artificial Sequence
  Description of Artificial Sequence: Synthetic oligonucleotide
uauaggcugcaugcuuagg

SEQ ID NO: 3014418 - RNA, 19 nt, Artificial Sequence
  Description of Artificial Sequence: Synthetic oligonucleotide
uuagccucucguguggagu

SEQ ID NO: 3014419 - RNA, 19 nt, Artificial Sequence
  Description of Artificial Sequence: Synthetic oligonucleotide
ugaucaccucuucuacuuc

SEQ ID NO: 3014420 - RNA, 19 nt, Artificial Sequence
  Description of Artificial Sequence: Synthetic oligonucleotide
cagaacauuuaauugcacu

SEQ ID NO: 3014421 - RNA, 19 nt, Artificial Sequence
  Description of Artificial Sequence: Synthetic oligonucleotide
caucaaccaucagaaacug

SEQ ID NO: 3014422 - RNA, 19 nt, Artificial Sequence
  Description of Artificial Sequence: Synthetic oligonucleotide
gaccauguccagcuucuca

SEQ ID NO: 3014423 - RNA, 19 nt, Artificial Sequence
  Description of Artificial Sequence: Synthetic oligonucleotide
ucucguguggagugucgca

SEQ ID NO: 3014424 - RNA, 19 nt, Artificial Sequence
  Description of Artificial Sequence: Synthetic oligonucleotide
uaguucguuuucagccuga

SEQ ID NO: 3014425 - RNA, 19 nt, Artificial Sequence
  Description of Artificial Sequence: Synthetic oligonucleotide
gagugucgcacacagccaa

SEQ ID NO: 3014426 - RNA, 19 nt, Artificial Sequence
  Description of Artificial Sequence: Synthetic oligonucleotide
cagccaaccccaucaggcc

SEQ ID NO: 3014427 - RNA, 19 nt, Artificial Sequence
  Description of Artificial Sequence: Synthetic oligonucleotide
cugggaucauauuggccac

SEQ ID NO: 3014428 - RNA, 19 nt, Artificial Sequence
  Description of Artificial Sequence: Synthetic oligonucleotide
ugcaugcuuagggaagugu

SEQ ID NO: 3014429 - RNA, 19 nt, Artificial Sequence
  Description of Artificial Sequence: Synthetic oligonucleotide
cagaaugguuagccucucg

SEQ ID NO: 3014430 - RNA, 19 nt, Artificial Sequence
  Description of Artificial Sequence: Synthetic oligonucleotide
cgagaaucuuuguauacag

SEQ ID NO: 3014431 - RNA, 19 nt, Artificial Sequence
  Description of Artificial Sequence: Synthetic oligonucleotide
aggccgguggucuucuuca

SEQ ID NO: 3014432 - RNA, 19 nt, Artificial Sequence
  Description of Artificial Sequence: Synthetic oligonucleotide
uagggaaguguuucauaau

SEQ ID NO: 3014433 - RNA, 19 nt, Artificial Sequence
  Description of Artificial Sequence: Synthetic oligonucleotide
cuuuguauacagaaugguu

SEQ ID NO: 3014434 - RNA, 19 nt, Artificial Sequence
  Description of Artificial Sequence: Synthetic oligonucleotide
uuuuaacaucugguuccgc

SEQ ID NO: 3014435 - RNA, 19 nt, Artificial Sequence
  Description of Artificial Sequence: Synthetic oligonucleotide
gagaaucuuuguauacaga

SEQ ID NO: 3014436 - RNA, 19 nt, Artificial Sequence
  Description of Artificial Sequence: Synthetic oligonucleotide
ucauaauaucgagaaucuu

SEQ ID NO: 3014437 - RNA, 19 nt, Artificial Sequence
  Description of Artificial Sequence: Synthetic oligonucleotide
cacagccaaccccaucagg

SEQ ID NO: 3014438 - RNA, 19 nt, Artificial Sequence
  Description of Artificial Sequence: Synthetic oligonucleotide
gaacauuuaauugcacuau

SEQ ID NO: 3014439 - RNA, 19 nt, Artificial Sequence
  Description of Artificial Sequence: Synthetic oligonucleotide
aucaaccaucagaaacugg

SEQ ID NO: 3014440 - RNA, 19 nt, Artificial Sequence
  Description of Artificial Sequence: Synthetic oligonucleotide
guucuguguauuuucuaua

SEQ ID NO: 3014441 - RNA, 19 nt, Artificial Sequence
  Description of Artificial Sequence: Synthetic oligonucleotide
guuagccucucguguggag

SEQ ID NO: 3014442 - RNA, 19 nt, Artificial Sequence
  Description of Artificial Sequence: Synthetic oligonucleotide
ggcuuaguucguuuucagc

SEQ ID NO: 3014443 - RNA, 19 nt, Artificial Sequence
  Description of Artificial Sequence: Synthetic oligonucleotide
acacagccaaccccaucag

SEQ ID NO: 3014444 - RNA, 19 nt, Artificial Sequence
  Description of Artificial Sequence: Synthetic oligonucleotide
auucuucaucaaccaucag

SEQ ID NO: 3014445 - RNA, 19 nt, Artificial Sequence
  Description of Artificial Sequence: Synthetic oligonucleotide
cuuaguucguuuucagccu

SEQ ID NO: 3014446 - RNA, 19 nt, Artificial Sequence
  Description of Artificial Sequence: Synthetic oligonucleotide
guauuuucuauaggcugca

SEQ ID NO: 3014447 - RNA, 19 nt, Artificial Sequence
  Description of Artificial Sequence: Synthetic oligonucleotide
ucguguggagugucgcaca

SEQ ID NO: 3014448 - RNA, 19 nt, Artificial Sequence
  Description of Artificial Sequence: Synthetic oligonucleotide
guguuucauaauaucgaga

SEQ ID NO: 3014449 - RNA, 19 nt, Artificial Sequence
  Description of Artificial Sequence: Synthetic oligonucleotide
ucucacuggugaucuguuc

SEQ ID NO: 3014450 - RNA, 19 nt, Artificial Sequence
  Description of Artificial Sequence: Synthetic oligonucleotide
uccuugccaggcuuaguuc

SEQ ID NO: 3014451 - RNA, 19 nt, Artificial Sequence
  Description of Artificial Sequence: Synthetic oligonucleotide
caaccaucagaaacuggga

SEQ ID NO: 3014452 - RNA, 19 nt, Artificial Sequence
  Description of Artificial Sequence: Synthetic oligonucleotide
uucucacuggugaucuguu

SEQ ID NO: 3014453 - RNA, 19 nt, Artificial Sequence
  Description of Artificial Sequence: Synthetic oligonucleotide
acuucgccacccugaagca

SEQ ID NO: 3014454 - RNA, 19 nt, Artificial Sequence
  Description of Artificial Sequence: Synthetic oligonucleotide
acagaaugguuagccucuc

SEQ ID NO: 3014455 - RNA, 19 nt, Artificial Sequence
  Description of Artificial Sequence: Synthetic oligonucleotide
auugcacuauauaauucuu

SEQ ID NO: 3014456 - RNA, 19 nt, Artificial Sequence
  Description of Artificial Sequence: Synthetic oligonucleotide
cucguguggagugucgcac

SEQ ID NO: 3014457 - RNA, 19 nt, Artificial Sequence
  Description of Artificial Sequence: Synthetic oligonucleotide
gaaucuuuguauacagaau

SEQ ID NO: 3014458 - RNA, 19 nt, Artificial Sequence
  Description of Artificial Sequence: Synthetic oligonucleotide
cucacuggugaucuguucu

SEQ ID NO: 3014459 - RNA, 19 nt, Artificial Sequence
  Description of Artificial Sequence: Synthetic oligonucleotide
ccugaagcaaguuuucuaa

SEQ ID NO: 3014460 - RNA, 19 nt, Artificial Sequence
  Description of Artificial Sequence: Synthetic oligonucleotide
aggcugcaugcuuagggaa

SEQ ID NO: 3014461 - RNA, 19 nt, Artificial Sequence
  Description of Artificial Sequence: Synthetic oligonucleotide
caucugguuccgcuuugac

SEQ ID NO: 3014462 - RNA, 19 nt, Artificial Sequence
  Description of Artificial Sequence: Synthetic oligonucleotide
agugucgcacacagccaac

SEQ ID NO: 3014463 - RNA, 19 nt, Artificial Sequence
  Description of Artificial Sequence: Synthetic oligonucleotide
ggcaggaggcucuuccacc

SEQ ID NO: 3014464 - RNA, 19 nt, Artificial Sequence
  Description of Artificial Sequence: Synthetic oligonucleotide
cacccugaagcaaguuuuc

SEQ ID NO: 3014465 - RNA, 19 nt, Artificial Sequence
  Description of Artificial Sequence: Synthetic oligonucleotide
cucucguguggagugucgc

SEQ ID NO: 3014466 - RNA, 19 nt, Artificial Sequence
  Description of Artificial Sequence: Synthetic oligonucleotide
uuucagccugaaugaucac

SEQ ID NO: 3014467 - RNA, 19 nt, Artificial Sequence
  Description of Artificial Sequence: Synthetic oligonucleotide
aucagaaacugggaucaua

SEQ ID NO: 3014468 - RNA, 19 nt, Artificial Sequence
  Description of Artificial Sequence: Synthetic oligonucleotide
gaggcucuuccacccggug

SEQ ID NO: 3014469 - RNA, 19 nt, Artificial Sequence
  Description of Artificial Sequence: Synthetic oligonucleotide
gcuuugaccauguccagcu

SEQ ID NO: 3014470 - RNA, 19 nt, Artificial Sequence
  Description of Artificial Sequence: Synthetic oligonucleotide
gugucgcacacagccaacc

SEQ ID NO: 3014471 - RNA, 19 nt, Artificial Sequence
  Description of Artificial Sequence: Synthetic oligonucleotide
uucccacugguuggcagga

SEQ ID NO: 3014472 - RNA, 19 nt, Artificial Sequence
  Description of Artificial Sequence: Synthetic oligonucleotide
ccaucagaaacugggauca

SEQ ID NO: 3014473 - RNA, 19 nt, Artificial Sequence
  Description of Artificial Sequence: Synthetic oligonucleotide
cugaaugaucaccucuucu

SEQ ID NO: 3014474 - RNA, 19 nt, Artificial Sequence
  Description of Artificial Sequence: Synthetic oligonucleotide
ccacugguuggcaggaggc

SEQ ID NO: 3014475 - RNA, 19 nt, Artificial Sequence
  Description of Artificial Sequence: Synthetic oligonucleotide
guuucauaauaucgagaau

SEQ ID NO: 3014476 - RNA, 19 nt, Artificial Sequence
  Description of Artificial Sequence: Synthetic oligonucleotide
caggcuuaguucguuuuca

SEQ ID NO: 3014477 - RNA, 19 nt, Artificial Sequence
  Description of Artificial Sequence: Synthetic oligonucleotide
acccgguggcucccauggc

SEQ ID NO: 3014478 - RNA, 19 nt, Artificial Sequence
  Description of Artificial Sequence: Synthetic oligonucleotide
ggcugcaugcuuagggaag

SEQ ID NO: 3014479 - RNA, 19 nt, Artificial Sequence
  Description of Artificial Sequence: Synthetic oligonucleotide
caggaggcucuuccacccg

SEQ ID NO: 3014480 - RNA, 19 nt, Artificial Sequence
  Description of Artificial Sequence: Synthetic oligonucleotide
accccaucaggccgguggu

SEQ ID NO: 3014481 - RNA, 19 nt, Artificial Sequence
  Description of Artificial Sequence: Synthetic oligonucleotide
acccugaagcaaguuuucu

SEQ ID NO: 3014482 - RNA, 19 nt, Artificial Sequence
  Description of Artificial Sequence: Synthetic oligonucleotide
cuggugaucuguucugugu

SEQ ID NO: 3014483 - RNA, 19 nt, Artificial Sequence
  Description of Artificial Sequence: Synthetic oligonucleotide
ugggaucauauuggccacu

SEQ ID NO: 3014484 - RNA, 19 nt, Artificial Sequence
  Description of Artificial Sequence: Synthetic oligonucleotide
cccacugguuggcaggagg

SEQ ID NO: 3014485 - RNA, 19 nt, Artificial Sequence
  Description of Artificial Sequence: Synthetic oligonucleotide
cuucaucaaccaucagaaa

SEQ ID NO: 3014486 - RNA, 19 nt, Artificial Sequence
  Description of Artificial Sequence: Synthetic oligonucleotide
uuuccuugccaggcuuagu

SEQ ID NO: 3014487 - RNA, 19 nt, Artificial Sequence
  Description of Artificial Sequence: Synthetic oligonucleotide
cugcaacauuuuccuugcc

SEQ ID NO: 3014488 - RNA, 19 nt, Artificial Sequence
  Description of Artificial Sequence: Synthetic oligonucleotide
acaucugguuccgcuuuga

SEQ ID NO: 3014489 - RNA, 19 nt, Artificial Sequence
  Description of Artificial Sequence: Synthetic oligonucleotide
aguucguuuucagccugaa

SEQ ID NO: 3014490 - RNA, 19 nt, Artificial Sequence
  Description of Artificial Sequence: Synthetic oligonucleotide
ugguuccgcuuugaccaug

SEQ ID NO: 3014491 - RNA, 19 nt, Artificial Sequence
  Description of Artificial Sequence: Synthetic oligonucleotide
cuguucuguguauuuucua

SEQ ID NO: 3014492 - RNA, 19 nt, Artificial Sequence
  Description of Artificial Sequence: Synthetic oligonucleotide
ucgccacccugaagcaagu

SEQ ID NO: 3014493 - RNA, 19 nt, Artificial Sequence
  Description of Artificial Sequence: Synthetic oligonucleotide
auuuuccuugccaggcuua

SEQ ID NO: 3014494 - RNA, 19 nt, Artificial Sequence
  Description of Artificial Sequence: Synthetic oligonucleotide
caggccgguggucuucuuc

SEQ ID NO: 3014495 - RNA, 19 nt, Artificial Sequence
  Description of Artificial Sequence: Synthetic oligonucleotide
ugccaggcuuaguucguuu

SEQ ID NO: 3014496 - RNA, 19 nt, Artificial Sequence
  Description of Artificial Sequence: Synthetic oligonucleotide
caugcuuagggaaguguuu

SEQ ID NO: 3014497 - RNA, 19 nt, Artificial Sequence
  Description of Artificial Sequence: Synthetic oligonucleotide
cuucucacuggugaucugu

SEQ ID NO: 3014498 - RNA, 19 nt, Artificial Sequence
  Description of Artificial Sequence: Synthetic oligonucleotide
gaucuguucuguguauuuu

SEQ ID NO: 3014499 - RNA, 19 nt, Artificial Sequence
  Description of Artificial Sequence: Synthetic oligonucleotide
cagcuucucacuggugauc

SEQ ID NO: 3014500 - RNA, 19 nt, Artificial Sequence
  Description of Artificial Sequence: Synthetic oligonucleotide
ccugaaugaucaccucuuc

SEQ ID NO: 3014501 - RNA, 19 nt, Artificial Sequence
  Description of Artificial Sequence: Synthetic oligonucleotide
cugaagcaaguuuucuaau

SEQ ID NO: 3014502 - RNA, 19 nt, Artificial Sequence
  Description of Artificial Sequence: Synthetic oligonucleotide
gccaaccccaucaggccgg

SEQ ID NO: 3014503 - RNA, 19 nt, Artificial Sequence
  Description of Artificial Sequence: Synthetic oligonucleotide
ccaggcuuaguucguuuuc

SEQ ID NO: 3014504 - RNA, 19 nt, Artificial Sequence
  Description of Artificial Sequence: Synthetic oligonucleotide
ggaucauauuggccacuuc

SEQ ID NO: 3014505 - RNA, 19 nt, Artificial Sequence
  Description of Artificial Sequence: Synthetic oligonucleotide
uggcuuccacugcaacauu

SEQ ID NO: 3014506 - RNA, 19 nt, Artificial Sequence
  Description of Artificial Sequence: Synthetic oligonucleotide
ccucucguguggagugucg

SEQ ID NO: 3014507 - RNA, 19 nt, Artificial Sequence
  Description of Artificial Sequence: Synthetic oligonucleotide
cugguuggcaggaggcucu

SEQ ID NO: 3014508 - RNA, 19 nt, Artificial Sequence
  Description of Artificial Sequence: Synthetic oligonucleotide
cugcaugcuuagggaagug

SEQ ID NO: 3014509 - RNA, 19 nt, Artificial Sequence
  Description of Artificial Sequence: Synthetic oligonucleotide
aucaggccgguggucuucu

SEQ ID NO: 3014510 - RNA, 19 nt, Artificial Sequence
  Description of Artificial Sequence: Synthetic oligonucleotide
ucccacugguuggcaggag

SEQ ID NO: 3014511 - RNA, 19 nt, Artificial Sequence
  Description of Artificial Sequence: Synthetic oligonucleotide
cuugccaggcuuaguucgu

SEQ ID NO: 3014512 - RNA, 19 nt, Artificial Sequence
  Description of Artificial Sequence: Synthetic oligonucleotide
caucaggccgguggucuuc

SEQ ID NO: 3014513 - RNA, 19 nt, Artificial Sequence
  Description of Artificial Sequence: Synthetic oligonucleotide
cuuccacccgguggcuccc

SEQ ID NO: 3014514 - RNA, 19 nt, Artificial Sequence
  Description of Artificial Sequence: Synthetic oligonucleotide
cauuuuccuugccaggcuu

SEQ ID NO: 3014515 - RNA, 19 nt, Artificial Sequence
  Description of Artificial Sequence: Synthetic oligonucleotide
guggagugucgcacacagc

SEQ ID NO: 3014516 - RNA, 19 nt, Artificial Sequence
  Description of Artificial Sequence: Synthetic oligonucleotide
uugccaggcuuaguucguu

SEQ ID NO: 3014517 - RNA, 19 nt, Artificial Sequence
  Description of Artificial Sequence: Synthetic oligonucleotide
gcacuauauaauucuucau

SEQ ID NO: 3014518 - RNA, 19 nt, Artificial Sequence
  Description of Artificial Sequence: Synthetic oligonucleotide
uggccacuucccacugguu

SEQ ID NO: 3014519 - RNA, 19 nt, Artificial Sequence
  Description of Artificial Sequence: Synthetic oligonucleotide
gguggcucccauggcuucc

SEQ ID NO: 3014520 - RNA, 19 nt, Artificial Sequence
  Description of Artificial Sequence: Synthetic oligonucleotide
gggaaguguuucauaauau

SEQ ID NO: 3014521 - RNA, 19 nt, Artificial Sequence
  Description of Artificial Sequence: Synthetic oligonucleotide
ggugaucuguucuguguau

SEQ ID NO: 3014522 - RNA, 19 nt, Artificial Sequence
  Description of Artificial Sequence: Synthetic oligonucleotide
guucguuuucagccugaau

SEQ ID NO: 3014523 - RNA, 19 nt, Artificial Sequence
  Description of Artificial Sequence: Synthetic oligonucleotide
ccucuucuacuucgccacc

SEQ ID NO: 3014524 - RNA, 19 nt, Artificial Sequence
  Description of Artificial Sequence: Synthetic oligonucleotide
guuccgcuuugaccauguc

SEQ ID NO: 3014525 - RNA, 19 nt, Artificial Sequence
  Description of Artificial Sequence: Synthetic oligonucleotide
uccacccgguggcucccau

SEQ ID NO: 3014526 - RNA, 19 nt, Artificial Sequence
  Description of Artificial Sequence: Synthetic oligonucleotide
ggagugucgcacacagcca

SEQ ID NO: 3014527 - RNA, 19 nt, Artificial Sequence
  Description of Artificial Sequence: Synthetic oligonucleotide
gcuucucacuggugaucug

SEQ ID NO: 3014528 - RNA, 19 nt, Artificial Sequence
  Description of Artificial Sequence: Synthetic oligonucleotide
cccugaagcaaguuuucua

SEQ ID NO: 3014529 - RNA, 19 nt, Artificial Sequence
  Description of Artificial Sequence: Synthetic oligonucleotide
agccucucguguggagugu

SEQ ID NO: 3014530 - RNA, 19 nt, Artificial Sequence
  Description of Artificial Sequence: Synthetic oligonucleotide
guccagcuucucacuggug

SEQ ID NO: 3014531 - RNA, 19 nt, Artificial Sequence
  Description of Artificial Sequence: Synthetic oligonucleotide
guguggagugucgcacaca

SEQ ID NO: 3014532 - RNA, 19 nt, Artificial Sequence
  Description of Artificial Sequence: Synthetic oligonucleotide
cagaaacugggaucauauu

SEQ ID NO: 3014533 - RNA, 19 nt, Artificial Sequence
  Description of Artificial Sequence: Synthetic oligonucleotide
cguguggagugucgcacac

SEQ ID NO: 3014534 - RNA, 19 nt, Artificial Sequence
  Description of Artificial Sequence: Synthetic oligonucleotide
gguuagccucucgugugga

SEQ ID NO: 3014535 - RNA, 19 nt, Artificial Sequence
  Description of Artificial Sequence: Synthetic oligonucleotide
gugaucuguucuguguauu

SEQ ID NO: 3014536 - RNA, 19 nt, Artificial Sequence
  Description of Artificial Sequence: Synthetic oligonucleotide
cgcuuugaccauguccagc

SEQ ID NO: 3014537 - RNA, 19 nt, Artificial Sequence
  Description of Artificial Sequence: Synthetic oligonucleotide
ccgcuuugaccauguccag

SEQ ID NO: 3014538 - RNA, 19 nt, Artificial Sequence
  Description of Artificial Sequence: Synthetic oligonucleotide
cuucgccacccugaagcaa

SEQ ID NO: 3014539 - RNA, 19 nt, Artificial Sequence
  Description of Artificial Sequence: Synthetic oligonucleotide
guggcucccauggcuucca

SEQ ID NO: 3014540 - RNA, 19 nt, Artificial Sequence
  Description of Artificial Sequence: Synthetic oligonucleotide
gcacacagccaaccccauc

SEQ ID NO: 3014541 - RNA, 19 nt, Artificial Sequence
  Description of Artificial Sequence: Synthetic oligonucleotide
ccacccugaagcaaguuuu

SEQ ID NO: 3014542 - RNA, 19 nt, Artificial Sequence
  Description of Artificial Sequence: Synthetic oligonucleotide
gcugcaugcuuagggaagu

SEQ ID NO: 3014543 - RNA, 19 nt, Artificial Sequence
  Description of Artificial Sequence: Synthetic oligonucleotide
gcaugcuuagggaaguguu

SEQ ID NO: 3014544 - RNA, 19 nt, Artificial Sequence
  Description of Artificial Sequence: Synthetic oligonucleotide
ugguuggcaggaggcucuu

SEQ ID NO: 3014545 - RNA, 19 nt, Artificial Sequence
  Description of Artificial Sequence: Synthetic oligonucleotide
uuccacccgguggcuccca

SEQ ID NO: 3014546 - RNA, 19 nt, Artificial Sequence
  Description of Artificial Sequence: Synthetic oligonucleotide
gccacccugaagcaaguuu

SEQ ID NO: 3014547 - RNA, 19 nt, Artificial Sequence
  Description of Artificial Sequence: Synthetic oligonucleotide
cacuggugaucuguucugu

SEQ ID NO: 3014548 - RNA, 19 nt, Artificial Sequence
  Description of Artificial Sequence: Synthetic oligonucleotide
gcuuagggaaguguuucau

SEQ ID NO: 3014549 - RNA, 19 nt, Artificial Sequence
  Description of Artificial Sequence: Synthetic oligonucleotide
ucaggccgguggucuucuu

SEQ ID NO: 3014550 - RNA, 19 nt, Artificial Sequence
  Description of Artificial Sequence: Synthetic oligonucleotide
gguuccgcuuugaccaugu

SEQ ID NO: 3014551 - RNA, 19 nt, Artificial Sequence
  Description of Artificial Sequence: Synthetic oligonucleotide
cacuucccacugguuggca

SEQ ID NO: 3014552 - RNA, 19 nt, Artificial Sequence
  Description of Artificial Sequence: Synthetic oligonucleotide
cacugguuggcaggaggcu

SEQ ID NO: 3014553 - RNA, 19 nt, Artificial Sequence
  Description of Artificial Sequence: Synthetic oligonucleotide
gccugaaugaucaccucuu

SEQ ID NO: 3014554 - RNA, 19 nt, Artificial Sequence
  Description of Artificial Sequence: Synthetic oligonucleotide
cuuugaccauguccagcuu

SEQ ID NO: 3014555 - RNA, 19 nt, Artificial Sequence
  Description of Artificial Sequence: Synthetic oligonucleotide
gccaggcuuaguucguuuu

SEQ ID NO: 3014556 - RNA, 19 nt, Artificial Sequence
  Description of Artificial Sequence: Synthetic oligonucleotide
gggaucauauuggccacuu

SEQ ID NO: 3014557 - RNA, 19 nt, Artificial Sequence
  Description of Artificial Sequence: Synthetic oligonucleotide
ggcuuccacugcaacauuu

SEQ ID NO: 3014558 - RNA, 19 nt, Artificial Sequence
  Description of Artificial Sequence: Synthetic oligonucleotide
gccucucguguggaguguc

SEQ ID NO: 3014559 - RNA, 19 nt, Artificial Sequence
  Description of Artificial Sequence: Synthetic oligonucleotide
ggcucccauggcuuccacu

SEQ ID NO: 3014560 - RNA, 19 nt, Artificial Sequence
  Description of Artificial Sequence: Synthetic oligonucleotide
ccacccgguggcucccaug

SEQ ID NO: 3014561 - RNA, 19 nt, Artificial Sequence
  Description of Artificial Sequence: Synthetic oligonucleotide
ccauguccagcuucucacu

SEQ ID NO: 3014562 - RNA, 19 nt, Artificial Sequence
  Description of Artificial Sequence: Synthetic oligonucleotide
caaccccaucaggccggug

SEQ ID NO: 3014563 - RNA, 19 nt, Artificial Sequence
  Description of Artificial Sequence: Synthetic oligonucleotide
cugguuccgcuuugaccau

SEQ ID NO: 3014564 - RNA, 19 nt, Artificial Sequence
  Description of Artificial Sequence: Synthetic oligonucleotide
gguuggcaggaggcucuuc

SEQ ID NO: 3014565 - RNA, 19 nt, Artificial Sequence
  Description of Artificial Sequence: Synthetic oligonucleotide
cccgguggcucccauggcu

SEQ ID NO: 3014566 - RNA, 19 nt, Artificial Sequence
  Description of Artificial Sequence: Synthetic oligonucleotide
caucagaaacugggaucau

SEQ ID NO: 3014567 - RNA, 19 nt, Artificial Sequence
  Description of Artificial Sequence: Synthetic oligonucleotide
cccaucaggccgguggucu

SEQ ID NO: 3014568 - RNA, 19 nt, Artificial Sequence
  Description of Artificial Sequence: Synthetic oligonucleotide
ggaggcucuuccacccggu

SEQ ID NO: 3014569 - RNA, 19 nt, Artificial Sequence
  Description of Artificial Sequence: Synthetic oligonucleotide
cgguggcucccauggcuuc

SEQ ID NO: 3014570 - RNA, 19 nt, Artificial Sequence
  Description of Artificial Sequence: Synthetic oligonucleotide
ccccaucaggccggugguc

SEQ ID NO: 3014571 - RNA, 19 nt, Artificial Sequence
  Description of Artificial Sequence: Synthetic oligonucleotide
cguuuucagccugaaugau

SEQ ID NO: 3014572 - RNA, 19 nt, Artificial Sequence
  Description of Artificial Sequence: Synthetic oligonucleotide
ccgguggcucccauggcuu

SEQ ID NO: 3014573 - RNA, 19 nt, Artificial Sequence
  Description of Artificial Sequence: Synthetic oligonucleotide
ccacugcaacauuuuccuu

SEQ ID NO: 3014574 - RNA, 19 nt, Artificial Sequence
  Description of Artificial Sequence: Synthetic oligonucleotide
gcucuuccacccgguggcu

SEQ ID NO: 3014575 - RNA, 19 nt, Artificial Sequence
  Description of Artificial Sequence: Synthetic oligonucleotide
ccaucaggccgguggucuu

SEQ ID NO: 3014576 - RNA, 19 nt, Artificial Sequence
  Description of Artificial Sequence: Synthetic oligonucleotide
cgcacacagccaaccccau

SEQ ID NO: 3014577 - RNA, 19 nt, Artificial Sequence
  Description of Artificial Sequence: Synthetic oligonucleotide
ccaaccccaucaggccggu

SEQ ID NO: 3014578 - RNA, 19 nt, Artificial Sequence
  Description of Artificial Sequence: Synthetic oligonucleotide
cgccacccugaagcaaguu

SEQ ID NO: 3014579 - RNA, 19 nt, Artificial Sequence
  Description of Artificial Sequence: Synthetic oligonucleotide
auaaauuacuccuuagucc

SEQ ID NO: 3014580 - RNA, 19 nt, Artificial Sequence
  Description of Artificial Sequence: Synthetic oligonucleotide
aauccaaagaauucuguac

SEQ ID NO: 3014581 - RNA, 19 nt, Artificial Sequence
  Description of Artificial Sequence: Synthetic oligonucleotide
uuuauuuccuauaaaaugu

SEQ ID NO: 3014582 - RNA, 19 nt, Artificial Sequence
  Description of Artificial Sequence: Synthetic oligonucleotide
ucauaguucaggaacauag

SEQ ID NO: 3014583 - RNA, 19 nt, Artificial Sequence
  Description of Artificial Sequence: Synthetic oligonucleotide
uuugagauaaauuacuccu

SEQ ID NO: 3014584 - RNA, 19 nt, Artificial Sequence
  Description of Artificial Sequence: Synthetic oligonucleotide
ucuucgaaguccuucaugg

SEQ ID NO: 3014585 - RNA, 19 nt, Artificial Sequence
  Description of Artificial Sequence: Synthetic oligonucleotide
uaaauuacuccuuagucca

SEQ ID NO: 3014586 - RNA, 19 nt, Artificial Sequence
  Description of Artificial Sequence: Synthetic oligonucleotide
ucugaagucacuuuguacu

SEQ ID NO: 3014587 - RNA, 19 nt, Artificial Sequence
  Description of Artificial Sequence: Synthetic oligonucleotide
gauaaauuacuccuuaguc

SEQ ID NO: 3014588 - RNA, 19 nt, Artificial Sequence
  Description of Artificial Sequence: Synthetic oligonucleotide
agcuacaccaaacuuauag

SEQ ID NO: 3014589 - RNA, 19 nt, Artificial Sequence
  Description of Artificial Sequence: Synthetic oligonucleotide
aauucuguacauucugaag

SEQ ID NO: 3014590 - RNA, 19 nt, Artificial Sequence
  Description of Artificial Sequence: Synthetic oligonucleotide
acauauucccguuucauag

SEQ ID NO: 3014591 - RNA, 19 nt, Artificial Sequence
  Description of Artificial Sequence: Synthetic oligonucleotide
uuuugagauaaauuacucc

SEQ ID NO: 3014592 - RNA, 19 nt, Artificial Sequence
  Description of Artificial Sequence: Synthetic oligonucleotide
uacaccaaacuuauaggcg

SEQ ID NO: 3014593 - RNA, 19 nt, Artificial Sequence
  Description of Artificial Sequence: Synthetic oligonucleotide
uguagaaaucugcauacgc

SEQ ID NO: 3014594 - RNA, 19 nt, Artificial Sequence
  Description of Artificial Sequence: Synthetic oligonucleotide
aagaauucuguacauucug

SEQ ID NO: 3014595 - RNA, 19 nt, Artificial Sequence
  Description of Artificial Sequence: Synthetic oligonucleotide
ucacuuuguacucuggaag

SEQ ID NO: 3014596 - RNA, 19 nt, Artificial Sequence
  Description of Artificial Sequence: Synthetic oligonucleotide
auucuguacauucugaagu

SEQ ID NO: 3014597 - RNA, 19 nt, Artificial Sequence
  Description of Artificial Sequence: Synthetic oligonucleotide
acaccaaacuuauaggcgg

SEQ ID NO: 3014598 - RNA, 19 nt, Artificial Sequence
  Description of Artificial Sequence: Synthetic oligonucleotide
auaaaauguucguuuauug

SEQ ID NO: 3014599 - RNA, 19 nt, Artificial Sequence
  Description of Artificial Sequence: Synthetic oligonucleotide
cuucauggagucauaaucc

SEQ ID NO: 3014600 - RNA, 19 nt, Artificial Sequence
  Description of Artificial Sequence: Synthetic oligonucleotide
acuucuaucgagugcaauc

SEQ ID NO: 3014601 - RNA, 19 nt, Artificial Sequence
  Description of Artificial Sequence: Synthetic oligonucleotide
auuuccuauaaaauguucg

SEQ ID NO: 3014602 - RNA, 19 nt, Artificial Sequence
  Description of Artificial Sequence: Synthetic oligonucleotide
cuacaccaaacuuauaggc

SEQ ID NO: 3014603 - RNA, 19 nt, Artificial Sequence
  Description of Artificial Sequence: Synthetic oligonucleotide
aaucccuguagaaaucugc

SEQ ID NO: 3014604 - RNA, 19 nt, Artificial Sequence
  Description of Artificial Sequence: Synthetic oligonucleotide
ucugcauacgccuucuucc

SEQ ID NO: 3014605 - RNA, 19 nt, Artificial Sequence
  Description of Artificial Sequence: Synthetic oligonucleotide
uaaaauguucguuuauugu

SEQ ID NO: 3014606 - RNA, 19 nt, Artificial Sequence
  Description of Artificial Sequence: Synthetic oligonucleotide
uucgaaguccuucauggag

SEQ ID NO: 3014607 - RNA, 19 nt, Artificial Sequence
  Description of Artificial Sequence: Synthetic oligonucleotide
ugaacuucuaucgagugca

SEQ ID NO: 3014608 - RNA, 19 nt, Artificial Sequence
  Description of Artificial Sequence: Synthetic oligonucleotide
aacgcaccggaacucaugg

SEQ ID NO: 3014609 - RNA, 19 nt, Artificial Sequence
  Description of Artificial Sequence: Synthetic oligonucleotide
ucgagugcaauccaaagaa

SEQ ID NO: 3014610 - RNA, 19 nt, Artificial Sequence
  Description of Artificial Sequence: Synthetic oligonucleotide
gacgaugugaacccgcagg

SEQ ID NO: 3014611 - RNA, 19 nt, Artificial Sequence
  Description of Artificial Sequence: Synthetic oligonucleotide
augaacuucuaucgagugc

SEQ ID NO: 3014612 - RNA, 19 nt, Artificial Sequence
  Description of Artificial Sequence: Synthetic oligonucleotide
uuuguacucuggaagauuc

SEQ ID NO: 3014613 - RNA, 19 nt, Artificial Sequence
  Description of Artificial Sequence: Synthetic oligonucleotide
ucauaaucccuguagaaau

SEQ ID NO: 3014614 - RNA, 19 nt, Artificial Sequence
  Description of Artificial Sequence: Synthetic oligonucleotide
agauaaauuacuccuuagu

SEQ ID NO: 3014615 - RNA, 19 nt, Artificial Sequence
  Description of Artificial Sequence: Synthetic oligonucleotide
uuuccuauaaaauguucgu

SEQ ID NO: 3014616 - RNA, 19 nt, Artificial Sequence
  Description of Artificial Sequence: Synthetic oligonucleotide
uacuccuuaguccacauau

SEQ ID NO: 3014617 - RNA, 19 nt, Artificial Sequence
  Description of Artificial Sequence: Synthetic oligonucleotide
uagaaaucugcauacgccu

SEQ ID NO: 3014618 - RNA, 19 nt, Artificial Sequence
  Description of Artificial Sequence: Synthetic oligonucleotide
ucagcgaugaacuucuauc

SEQ ID NO: 3014619 - RNA, 19 nt, Artificial Sequence
  Description of Artificial Sequence: Synthetic oligonucleotide
aaacuuauaggcggcggcg

SEQ ID NO: 3014620 - RNA, 19 nt, Artificial Sequence
  Description of Artificial Sequence: Synthetic oligonucleotide
acgaugugaacccgcaggc

SEQ ID NO: 3014621 - RNA, 19 nt, Artificial Sequence
  Description of Artificial Sequence: Synthetic oligonucleotide
acauaggucagcgaugaac

SEQ ID NO: 3014622 - RNA, 19 nt, Artificial Sequence
  Description of Artificial Sequence: Synthetic oligonucleotide
gaugugaacccgcaggcgc

SEQ ID NO: 3014623 - RNA, 19 nt, Artificial Sequence
  Description of Artificial Sequence: Synthetic oligonucleotide
auccaaagaauucuguaca

SEQ ID NO: 3014624 - RNA, 19 nt, Artificial Sequence
  Description of Artificial Sequence: Synthetic oligonucleotide
auaguucaggaacauaggu

SEQ ID NO: 3014625 - RNA, 19 nt, Artificial Sequence
  Description of Artificial Sequence: Synthetic oligonucleotide
ucuuccugggcucagcuac

SEQ ID NO: 3014626 - RNA, 19 nt, Artificial Sequence
  Description of Artificial Sequence: Synthetic oligonucleotide
ucaggaacauaggucagcg

SEQ ID NO: 3014627 - RNA, 19 nt, Artificial Sequence
  Description of Artificial Sequence: Synthetic oligonucleotide
ucagcuacaccaaacuuau

SEQ ID NO: 3014628 - RNA, 19 nt, Artificial Sequence
  Description of Artificial Sequence: Synthetic oligonucleotide
gagauaaauuacuccuuag

SEQ ID NO: 3014629 - RNA, 19 nt, Artificial Sequence
  Description of Artificial Sequence: Synthetic oligonucleotide
ugagauaaauuacuccuua

SEQ ID NO: 3014630 - RNA, 19 nt, Artificial Sequence
  Description of Artificial Sequence: Synthetic oligonucleotide
uccuauaaaauguucguuu

SEQ ID NO: 3014631 - RNA, 19 nt, Artificial Sequence
  Description of Artificial Sequence: Synthetic oligonucleotide
cauaguucaggaacauagg

SEQ ID NO: 3014632 - RNA, 19 nt, Artificial Sequence
  Description of Artificial Sequence: Synthetic oligonucleotide
gaugaacuucuaucgagug

SEQ ID NO: 3014633 - RNA, 19 nt, Artificial Sequence
  Description of Artificial Sequence: Synthetic oligonucleotide
uccuuaguccacauauucc

SEQ ID NO: 3014634 - RNA, 19 nt, Artificial Sequence
  Description of Artificial Sequence: Synthetic oligonucleotide
ugcaauccaaagaauucug

SEQ ID NO: 3014635 - RNA, 19 nt, Artificial Sequence
  Description of Artificial Sequence: Synthetic oligonucleotide
cagcgaugaacuucuaucg

SEQ ID NO: 3014636 - RNA, 19 nt, Artificial Sequence
  Description of Artificial Sequence: Synthetic oligonucleotide
uucauggagucauaauccc

SEQ ID NO: 3014637 - RNA, 19 nt, Artificial Sequence
  Description of Artificial Sequence: Synthetic oligonucleotide
aggaacauaggucagcgau

SEQ ID NO: 3014638 - RNA, 19 nt, Artificial Sequence
  Description of Artificial Sequence: Synthetic oligonucleotide
agugcaauccaaagaauuc

SEQ ID NO: 3014639 - RNA, 19 nt, Artificial Sequence
  Description of Artificial Sequence: Synthetic oligonucleotide
uaucgagugcaauccaaag

SEQ ID NO: 3014640 - RNA, 19 nt, Artificial Sequence
  Description of Artificial Sequence: Synthetic oligonucleotide
uauuuccuauaaaauguuc

SEQ ID NO: 3014641 - RNA, 19 nt, Artificial Sequence
  Description of Artificial Sequence: Synthetic oligonucleotide
uaguucaggaacauagguc

SEQ ID NO: 3014642 - RNA, 19 nt, Artificial Sequence
  Description of Artificial Sequence: Synthetic oligonucleotide
guagaaaucugcauacgcc

SEQ ID NO: 3014643 - RNA, 19 nt, Artificial Sequence
  Description of Artificial Sequence: Synthetic oligonucleotide
cuuaguccacauauucccg

SEQ ID NO: 3014644 - RNA, 19 nt, Artificial Sequence
  Description of Artificial Sequence: Synthetic oligonucleotide
auucccguuucauaguuca

SEQ ID NO: 3014645 - RNA, 19 nt, Artificial Sequence
  Description of Artificial Sequence: Synthetic oligonucleotide
cuucuaucgagugcaaucc

SEQ ID NO: 3014646 - RNA, 19 nt, Artificial Sequence
  Description of Artificial Sequence: Synthetic oligonucleotide
ucgaaguccuucauggagu

SEQ ID NO: 3014647 - RNA, 19 nt, Artificial Sequence
  Description of Artificial Sequence: Synthetic oligonucleotide
uuauuuccuauaaaauguu

SEQ ID NO: 3014648 - RNA, 19 nt, Artificial Sequence
  Description of Artificial Sequence: Synthetic oligonucleotide
uguacauucugaagucacu

SEQ ID NO: 3014649 - RNA, 19 nt, Artificial Sequence
  Description of Artificial Sequence: Synthetic oligonucleotide
ggagucauaaucccuguag

SEQ ID NO: 3014650 - RNA, 19 nt, Artificial Sequence
  Description of Artificial Sequence: Synthetic oligonucleotide
gaagucacuuuguacucug

SEQ ID NO: 3014651 - RNA, 19 nt, Artificial Sequence
  Description of Artificial Sequence: Synthetic oligonucleotide
ugggguuugggcaacgcac

SEQ ID NO: 3014652 - RNA, 19 nt, Artificial Sequence
  Description of Artificial Sequence: Synthetic oligonucleotide
uucaucucuucgaaguccu

SEQ ID NO: 3014653 - RNA, 19 nt, Artificial Sequence
  Description of Artificial Sequence: Synthetic oligonucleotide
ucccguuucauaguucagg

SEQ ID NO: 3014654 - RNA, 19 nt, Artificial Sequence
  Description of Artificial Sequence: Synthetic oligonucleotide
uacgccuucuuccugggcu

SEQ ID NO: 3014655 - RNA, 19 nt, Artificial Sequence
  Description of Artificial Sequence: Synthetic oligonucleotide
auaggcggcggcgacaccc

SEQ ID NO: 3014656 - RNA, 19 nt, Artificial Sequence
  Description of Artificial Sequence: Synthetic oligonucleotide
uucugaagucacuuuguac

SEQ ID NO: 3014657 - RNA, 19 nt, Artificial Sequence
  Description of Artificial Sequence: Synthetic oligonucleotide
caaacuuauaggcggcggc

SEQ ID NO: 3014658 - RNA, 19 nt, Artificial Sequence
  Description of Artificial Sequence: Synthetic oligonucleotide
cucuggaagauuccagccg

SEQ ID NO: 3014659 - RNA, 19 nt, Artificial Sequence
  Description of Artificial Sequence: Synthetic oligonucleotide
uucuguacauucugaaguc

SEQ ID NO: 3014660 - RNA, 19 nt, Artificial Sequence
  Description of Artificial Sequence: Synthetic oligonucleotide
ucuaucgagugcaauccaa

SEQ ID NO: 3014661 - RNA, 19 nt, Artificial Sequence
  Description of Artificial Sequence: Synthetic oligonucleotide
aauguucguuuauuguuuu

SEQ ID NO: 3014662 - RNA, 19 nt, Artificial Sequence
  Description of Artificial Sequence: Synthetic oligonucleotide
aucgagugcaauccaaaga

SEQ ID NO: 3014663 - RNA, 19 nt, Artificial Sequence
  Description of Artificial Sequence: Synthetic oligonucleotide
uguacucuggaagauucca

SEQ ID NO: 3014664 - RNA, 19 nt, Artificial Sequence
  Description of Artificial Sequence: Synthetic oligonucleotide
gcuacaccaaacuuauagg

SEQ ID NO: 3014665 - RNA, 19 nt, Artificial Sequence
  Description of Artificial Sequence: Synthetic oligonucleotide
gaagauuccagccgccuuc

SEQ ID NO: 3014666 - RNA, 19 nt, Artificial Sequence
  Description of Artificial Sequence: Synthetic oligonucleotide
ccuuaguccacauauuccc

SEQ ID NO: 3014667 - RNA, 19 nt, Artificial Sequence
  Description of Artificial Sequence: Synthetic oligonucleotide
uuaguccacauauucccgu

SEQ ID NO: 3014668 - RNA, 19 nt, Artificial Sequence
  Description of Artificial Sequence: Synthetic oligonucleotide
aauuacuccuuaguccaca

SEQ ID NO: 3014669 - RNA, 19 nt, Artificial Sequence
  Description of Artificial Sequence: Synthetic oligonucleotide
aaauguucguuuauuguuu

SEQ ID NO: 3014670 - RNA, 19 nt, Artificial Sequence
  Description of Artificial Sequence: Synthetic oligonucleotide
gaauucuguacauucugaa

SEQ ID NO: 3014671 - RNA, 19 nt, Artificial Sequence
  Description of Artificial Sequence: Synthetic oligonucleotide
cuguacauucugaagucac

SEQ ID NO: 3014672 - RNA, 19 nt, Artificial Sequence
  Description of Artificial Sequence: Synthetic oligonucleotide
ucauggagucauaaucccu

SEQ ID NO: 3014673 - RNA, 19 nt, Artificial Sequence
  Description of Artificial Sequence: Synthetic oligonucleotide
uugagauaaauuacuccuu

SEQ ID NO: 3014674 - RNA, 19 nt, Artificial Sequence
  Description of Artificial Sequence: Synthetic oligonucleotide
aaguccuucauggagucau

SEQ ID NO: 3014675 - RNA, 19 nt, Artificial Sequence
  Description of Artificial Sequence: Synthetic oligonucleotide
acuuauaggcggcggcgac

SEQ ID NO: 3014676 - RNA, 19 nt, Artificial Sequence
  Description of Artificial Sequence: Synthetic oligonucleotide
aaauuacuccuuaguccac

SEQ ID NO: 3014677 - RNA, 19 nt, Artificial Sequence
  Description of Artificial Sequence: Synthetic oligonucleotide
agggccgugaggaaggcgc

SEQ ID NO: 3014678 - RNA, 19 nt, Artificial Sequence
  Description of Artificial Sequence: Synthetic oligonucleotide
agucauaaucccuguagaa

SEQ ID NO: 3014679 - RNA, 19 nt, Artificial Sequence
  Description of Artificial Sequence: Synthetic oligonucleotide
gagucauaaucccuguaga

SEQ ID NO: 3014680 - RNA, 19 nt, Artificial Sequence
  Description of Artificial Sequence: Synthetic oligonucleotide
gaaaucugcauacgccuuc

SEQ ID NO: 3014681 - RNA, 19 nt, Artificial Sequence
  Description of Artificial Sequence: Synthetic oligonucleotide
caggagaccgcgcaucugg

SEQ ID NO: 3014682 - RNA, 19 nt, Artificial Sequence
  Description of Artificial Sequence: Synthetic oligonucleotide
aucucuucgaaguccuuca

SEQ ID NO: 3014683 - RNA, 19 nt, Artificial Sequence
  Description of Artificial Sequence: Synthetic oligonucleotide
cuccuuaguccacauauuc

SEQ ID NO: 3014684 - RNA, 19 nt, Artificial Sequence
  Description of Artificial Sequence: Synthetic oligonucleotide
uaaucccuguagaaaucug

SEQ ID NO: 3014685 - RNA, 19 nt, Artificial Sequence
  Description of Artificial Sequence: Synthetic oligonucleotide
cuucaucucuucgaagucc

SEQ ID NO: 3014686 - RNA, 19 nt, Artificial Sequence
  Description of Artificial Sequence: Synthetic oligonucleotide
auaaucccuguagaaaucu

SEQ ID NO: 3014687 - RNA, 19 nt, Artificial Sequence
  Description of Artificial Sequence: Synthetic oligonucleotide
ugggcaacgcaccggaacu

SEQ ID NO: 3014688 - RNA, 19 nt, Artificial Sequence
  Description of Artificial Sequence: Synthetic oligonucleotide
gaacauaggucagcgauga

SEQ ID NO: 3014689 - RNA, 19 nt, Artificial Sequence
  Description of Artificial Sequence: Synthetic oligonucleotide
uccaaagaauucuguacau

SEQ ID NO: 3014690 - RNA, 19 nt, Artificial Sequence
  Description of Artificial Sequence: Synthetic oligonucleotide
uugggcaacgcaccggaac

SEQ ID NO: 3014691 - RNA, 19 nt, Artificial Sequence
  Description of Artificial Sequence: Synthetic oligonucleotide
agucacuuuguacucugga

SEQ ID NO: 3014692 - RNA, 19 nt, Artificial Sequence
  Description of Artificial Sequence: Synthetic oligonucleotide
uucuaucgagugcaaucca

SEQ ID NO: 3014693 - RNA, 19 nt, Artificial Sequence
  Description of Artificial Sequence: Synthetic oligonucleotide
aaaucugcauacgccuucu

SEQ ID NO: 3014694 - RNA, 19 nt, Artificial Sequence
  Description of Artificial Sequence: Synthetic oligonucleotide
guuucauaguucaggaaca

SEQ ID NO: 3014695 - RNA, 19 nt, Artificial Sequence
  Description of Artificial Sequence: Synthetic oligonucleotide
ucuguacauucugaaguca

SEQ ID NO: 3014696 - RNA, 19 nt, Artificial Sequence
  Description of Artificial Sequence: Synthetic oligonucleotide
ccuucauggagucauaauc

SEQ ID NO: 3014697 - RNA, 19 nt, Artificial Sequence
  Description of Artificial Sequence: Synthetic oligonucleotide
ccuguagaaaucugcauac

SEQ ID NO: 3014698 - RNA, 19 nt, Artificial Sequence
  Description of Artificial Sequence: Synthetic oligonucleotide
cugaagucacuuuguacuc

SEQ ID NO: 3014699 - RNA, 19 nt, Artificial Sequence
  Description of Artificial Sequence: Synthetic oligonucleotide
cauaggucagcgaugaacu

SEQ ID NO: 3014700 - RNA, 19 nt, Artificial Sequence
  Description of Artificial Sequence: Synthetic oligonucleotide
cguuucauaguucaggaac

SEQ ID NO: 3014701 - RNA, 19 nt, Artificial Sequence
  Description of Artificial Sequence: Synthetic oligonucleotide
cucagcuacaccaaacuua

SEQ ID NO: 3014702 - RNA, 19 nt, Artificial Sequence
  Description of Artificial Sequence: Synthetic oligonucleotide
agcgaugaacuucuaucga

SEQ ID NO: 3014703 - RNA, 19 nt, Artificial Sequence
  Description of Artificial Sequence: Synthetic oligonucleotide
cacuuuguacucuggaaga

SEQ ID NO: 3014704 - RNA, 19 nt, Artificial Sequence
  Description of Artificial Sequence: Synthetic oligonucleotide
auauucccguuucauaguu

SEQ ID NO: 3014705 - RNA, 19 nt, Artificial Sequence
  Description of Artificial Sequence: Synthetic oligonucleotide
agaauucuguacauucuga

SEQ ID NO: 3014706 - RNA, 19 nt, Artificial Sequence
  Description of Artificial Sequence: Synthetic oligonucleotide
gcgaugaacuucuaucgag

SEQ ID NO: 3014707 - RNA, 19 nt, Artificial Sequence
  Description of Artificial Sequence: Synthetic oligonucleotide
uuauaggcggcggcgacac

SEQ ID NO: 3014708 - RNA, 19 nt, Artificial Sequence
  Description of Artificial Sequence: Synthetic oligonucleotide
ugaagucacuuuguacucu

SEQ ID NO: 3014709 - RNA, 19 nt, Artificial Sequence
  Description of Artificial Sequence: Synthetic oligonucleotide
caccaaacuuauaggcggc

SEQ ID NO: 3014710 - RNA, 19 nt, Artificial Sequence
  Description of Artificial Sequence: Synthetic oligonucleotide
aacuuauaggcggcggcga

SEQ ID NO: 3014711 - RNA, 19 nt, Artificial Sequence
  Description of Artificial Sequence: Synthetic oligonucleotide
augugaacccgcaggcgcc

SEQ ID NO: 3014712 - RNA, 19 nt, Artificial Sequence
  Description of Artificial Sequence: Synthetic oligonucleotide
auucugaagucacuuugua

SEQ ID NO: 3014713 - RNA, 19 nt, Artificial Sequence
  Description of Artificial Sequence: Synthetic oligonucleotide
gcauacgccuucuuccugg

SEQ ID NO: 3014714 - RNA, 19 nt, Artificial Sequence
  Description of Artificial Sequence: Synthetic oligonucleotide
cuguagaaaucugcauacg

SEQ ID NO: 3014715 - RNA, 19 nt, Artificial Sequence
  Description of Artificial Sequence: Synthetic oligonucleotide
aagucacuuuguacucugg

SEQ ID NO: 3014716 - RNA, 19 nt, Artificial Sequence
  Description of Artificial Sequence: Synthetic oligonucleotide
uaggucagcgaugaacuuc

SEQ ID NO: 3014717 - RNA, 19 nt, Artificial Sequence
  Description of Artificial Sequence: Synthetic oligonucleotide
accaaacuuauaggcggcg

SEQ ID NO: 3014718 - RNA, 19 nt, Artificial Sequence
  Description of Artificial Sequence: Synthetic oligonucleotide
caauccaaagaauucugua

SEQ ID NO: 3014719 - RNA, 19 nt, Artificial Sequence
  Description of Artificial Sequence: Synthetic oligonucleotide
gaggaaggcgccgacgaug

SEQ ID NO: 3014720 - RNA, 19 nt, Artificial Sequence
  Description of Artificial Sequence: Synthetic oligonucleotide
ugcauacgccuucuuccug

SEQ ID NO: 3014721 - RNA, 19 nt, Artificial Sequence
  Description of Artificial Sequence: Synthetic oligonucleotide
gucauaaucccuguagaaa

SEQ ID NO: 3014722 - RNA, 19 nt, Artificial Sequence
  Description of Artificial Sequence: Synthetic oligonucleotide
uuccuauaaaauguucguu

SEQ ID NO: 3014723 - RNA, 19 nt, Artificial Sequence
  Description of Artificial Sequence: Synthetic oligonucleotide
uauucccguuucauaguuc

SEQ ID NO: 3014724 - RNA, 19 nt, Artificial Sequence
  Description of Artificial Sequence: Synthetic oligonucleotide
gucacuuuguacucuggaa

SEQ ID NO: 3014725 - RNA, 19 nt, Artificial Sequence
  Description of Artificial Sequence: Synthetic oligonucleotide
guuugggcaacgcaccgga

SEQ ID NO: 3014726 - RNA, 19 nt, Artificial Sequence
  Description of Artificial Sequence: Synthetic oligonucleotide
acacccagggccgugagga

SEQ ID NO: 3014727 - RNA, 19 nt, Artificial Sequence
  Description of Artificial Sequence: Synthetic oligonucleotide
cucuucgaaguccuucaug

SEQ ID NO: 3014728 - RNA, 19 nt, Artificial Sequence
  Description of Artificial Sequence: Synthetic oligonucleotide
auacgccuucuuccugggc

SEQ ID NO: 3014729 - RNA, 19 nt, Artificial Sequence
  Description of Artificial Sequence: Synthetic oligonucleotide
uucccguuucauaguucag

SEQ ID NO: 3014730 - RNA, 19 nt, Artificial Sequence
  Description of Artificial Sequence: Synthetic oligonucleotide
auuacuccuuaguccacau

SEQ ID NO: 3014731 - RNA, 19 nt, Artificial Sequence
  Description of Artificial Sequence: Synthetic oligonucleotide
uuucauaguucaggaacau

SEQ ID NO: 3014732 - RNA, 19 nt, Artificial Sequence
  Description of Artificial Sequence: Synthetic oligonucleotide
aacccgcaggcgccuggcc

SEQ ID NO: 3014733 - RNA, 19 nt, Artificial Sequence
  Description of Artificial Sequence: Synthetic oligonucleotide
ggcggcgacacccagggcc

SEQ ID NO: 3014734 - RNA, 19 nt, Artificial Sequence
  Description of Artificial Sequence: Synthetic oligonucleotide
cauacgccuucuuccuggg

SEQ ID NO: 3014735 - RNA, 19 nt, Artificial Sequence
  Description of Artificial Sequence: Synthetic oligonucleotide
guacucuggaagauuccag

SEQ ID NO: 3014736 - RNA, 19 nt, Artificial Sequence
  Description of Artificial Sequence: Synthetic oligonucleotide
aagauuccagccgccuuca

SEQ ID NO: 3014737 - RNA, 19 nt, Artificial Sequence
  Description of Artificial Sequence: Synthetic oligonucleotide
gaaggcgccgacgauguga

SEQ ID NO: 3014738 - RNA, 19 nt, Artificial Sequence
  Description of Artificial Sequence: Synthetic oligonucleotide
auggagucauaaucccugu

SEQ ID NO: 3014739 - RNA, 19 nt, Artificial Sequence
  Description of Artificial Sequence: Synthetic oligonucleotide
acgccuucuuccugggcuc

SEQ ID NO: 3014740 - RNA, 19 nt, Artificial Sequence
  Description of Artificial Sequence: Synthetic oligonucleotide
aggucagcgaugaacuucu

SEQ ID NO: 3014741 - RNA, 19 nt, Artificial Sequence
  Description of Artificial Sequence: Synthetic oligonucleotide
caucucuucgaaguccuuc

SEQ ID NO: 3014742 - RNA, 19 nt, Artificial Sequence
  Description of Artificial Sequence: Synthetic oligonucleotide
guccacauauucccguuuc

SEQ ID NO: 3014743 - RNA, 19 nt, Artificial Sequence
  Description of Artificial Sequence: Synthetic oligonucleotide
ucccuguagaaaucugcau

SEQ ID NO: 3014744 - RNA, 19 nt, Artificial Sequence
  Description of Artificial Sequence: Synthetic oligonucleotide
aucccuguagaaaucugca

SEQ ID NO: 3014745 - RNA, 19 nt, Artificial Sequence
  Description of Artificial Sequence: Synthetic oligonucleotide
cuaucgagugcaauccaaa

SEQ ID NO: 3014746 - RNA, 19 nt, Artificial Sequence
  Description of Artificial Sequence: Synthetic oligonucleotide
aacuucuaucgagugcaau

SEQ ID NO: 3014747 - RNA, 19 nt, Artificial Sequence
  Description of Artificial Sequence: Synthetic oligonucleotide
gacacccagggccgugagg

SEQ ID NO: 3014748 - RNA, 19 nt, Artificial Sequence
  Description of Artificial Sequence: Synthetic oligonucleotide
uucauaguucaggaacaua

SEQ ID NO: 3014749 - RNA, 19 nt, Artificial Sequence
  Description of Artificial Sequence: Synthetic oligonucleotide
uccagccgccuucaucucu

SEQ ID NO: 3014750 - RNA, 19 nt, Artificial Sequence
  Description of Artificial Sequence: Synthetic oligonucleotide
uggagucauaaucccugua

SEQ ID NO: 3014751 - RNA, 19 nt, Artificial Sequence
  Description of Artificial Sequence: Synthetic oligonucleotide
ucucuucgaaguccuucau

SEQ ID NO: 3014752 - RNA, 19 nt, Artificial Sequence
  Description of Artificial Sequence: Synthetic oligonucleotide
uuacuccuuaguccacaua

SEQ ID NO: 3014753 - RNA, 19 nt, Artificial Sequence
  Description of Artificial Sequence: Synthetic oligonucleotide
ggaacauaggucagcgaug

SEQ ID NO: 3014754 - RNA, 19 nt, Artificial Sequence
  Description of Artificial Sequence: Synthetic oligonucleotide
acuuuguacucuggaagau

SEQ ID NO: 3014755 - RNA, 19 nt, Artificial Sequence
  Description of Artificial Sequence: Synthetic oligonucleotide
caacgcaccggaacucaug

SEQ ID NO: 3014756 - RNA, 19 nt, Artificial Sequence
  Description of Artificial Sequence: Synthetic oligonucleotide
ggcgccgacgaugugaacc

SEQ ID NO: 3014757 - RNA, 19 nt, Artificial Sequence
  Description of Artificial Sequence: Synthetic oligonucleotide
cacauauucccguuucaua

SEQ ID NO: 3014758 - RNA, 19 nt, Artificial Sequence
  Description of Artificial Sequence: Synthetic oligonucleotide
uaguccacauauucccguu

SEQ ID NO: 3014759 - RNA, 19 nt, Artificial Sequence
  Description of Artificial Sequence: Synthetic oligonucleotide
ugggcucagcuacaccaaa

SEQ ID NO: 3014760 - RNA, 19 nt, Artificial Sequence
  Description of Artificial Sequence: Synthetic oligonucleotide
cauucugaagucacuuugu

SEQ ID NO: 3014761 - RNA, 19 nt, Artificial Sequence
  Description of Artificial Sequence: Synthetic oligonucleotide
aacauaggucagcgaugaa

SEQ ID NO: 3014762 - RNA, 19 nt, Artificial Sequence
  Description of Artificial Sequence: Synthetic oligonucleotide
gagugcaauccaaagaauu

SEQ ID NO: 3014763 - RNA, 19 nt, Artificial Sequence
  Description of Artificial Sequence: Synthetic oligonucleotide
aguccacauauucccguuu

SEQ ID NO: 3014764 - RNA, 19 nt, Artificial Sequence
  Description of Artificial Sequence: Synthetic oligonucleotide
gagaccgcgcaucuggggu

SEQ ID NO: 3014765 - RNA, 19 nt, Artificial Sequence
  Description of Artificial Sequence: Synthetic oligonucleotide
ggguuugggcaacgcaccg

SEQ ID NO: 3014766 - RNA, 19 nt, Artificial Sequence
  Description of Artificial Sequence: Synthetic oligonucleotide
auaggucagcgaugaacuu

SEQ ID NO: 3014767 - RNA, 19 nt, Artificial Sequence
  Description of Artificial Sequence: Synthetic oligonucleotide
gugcaauccaaagaauucu

SEQ ID NO: 3014768 - RNA, 19 nt, Artificial Sequence
  Description of Artificial Sequence: Synthetic oligonucleotide
aaucugcauacgccuucuu

SEQ ID NO: 3014769 - RNA, 19 nt, Artificial Sequence
  Description of Artificial Sequence: Synthetic oligonucleotide
cuucgaaguccuucaugga

SEQ ID NO: 3014770 - RNA, 19 nt, Artificial Sequence
  Description of Artificial Sequence: Synthetic oligonucleotide
aaggcgccgacgaugugaa

SEQ ID NO: 3014771 - RNA, 19 nt, Artificial Sequence
  Description of Artificial Sequence: Synthetic oligonucleotide
ccuauaaaauguucguuua

SEQ ID NO: 3014772 - RNA, 19 nt, Artificial Sequence
  Description of Artificial Sequence: Synthetic oligonucleotide
uuugggcaacgcaccggaa

SEQ ID NO: 3014773 - RNA, 19 nt, Artificial Sequence
  Description of Artificial Sequence: Synthetic oligonucleotide
agaaaucugcauacgccuu

SEQ ID NO: 3014774 - RNA, 19 nt, Artificial Sequence
  Description of Artificial Sequence: Synthetic oligonucleotide
aggaaggcgccgacgaugu

SEQ ID NO: 3014775 - RNA, 19 nt, Artificial Sequence
  Description of Artificial Sequence: Synthetic oligonucleotide
ccugggcucagcuacacca

SEQ ID NO: 3014776 - RNA, 19 nt, Artificial Sequence
  Description of Artificial Sequence: Synthetic oligonucleotide
ggagaccgcgcaucugggg

SEQ ID NO: 3014777 - RNA, 19 nt, Artificial Sequence
  Description of Artificial Sequence: Synthetic oligonucleotide
ccaaacuuauaggcggcgg

SEQ ID NO: 3014778 - RNA, 19 nt, Artificial Sequence
  Description of Artificial Sequence: Synthetic oligonucleotide
uucuuccugggcucagcua

SEQ ID NO: 3014779 - RNA, 19 nt, Artificial Sequence
  Description of Artificial Sequence: Synthetic oligonucleotide
cauauucccguuucauagu

SEQ ID NO: 3014780 - RNA, 19 nt, Artificial Sequence
  Description of Artificial Sequence: Synthetic oligonucleotide
gguuugggcaacgcaccgg

SEQ ID NO: 3014781 - RNA, 19 nt, Artificial Sequence
  Description of Artificial Sequence: Synthetic oligonucleotide
uaggcggcggcgacaccca

SEQ ID NO: 3014782 - RNA, 19 nt, Artificial Sequence
  Description of Artificial Sequence: Synthetic oligonucleotide
ugugaacccgcaggcgccu

SEQ ID NO: 3014783 - RNA, 19 nt, Artificial Sequence
  Description of Artificial Sequence: Synthetic oligonucleotide
acccagggccgugaggaag

SEQ ID NO: 3014784 - RNA, 19 nt, Artificial Sequence
  Description of Artificial Sequence: Synthetic oligonucleotide
aggcgccuggccaggagac

SEQ ID NO: 3014785 - RNA, 19 nt, Artificial Sequence
  Description of Artificial Sequence: Synthetic oligonucleotide
aggagaccgcgcaucuggg

SEQ ID NO: 3014786 - RNA, 19 nt, Artificial Sequence
  Description of Artificial Sequence: Synthetic oligonucleotide
acccgcaggcgccuggcca

SEQ ID NO: 3014787 - RNA, 19 nt, Artificial Sequence
  Description of Artificial Sequence: Synthetic oligonucleotide
ucaucucuucgaaguccuu

SEQ ID NO: 3014788 - RNA, 19 nt, Artificial Sequence
  Description of Artificial Sequence: Synthetic oligonucleotide
cccagggccgugaggaagg

SEQ ID NO: 3014789 - RNA, 19 nt, Artificial Sequence
  Description of Artificial Sequence: Synthetic oligonucleotide
uauaggcggcggcgacacc

SEQ ID NO: 3014790 - RNA, 19 nt, Artificial Sequence
  Description of Artificial Sequence: Synthetic oligonucleotide
gcgccgacgaugugaaccc

SEQ ID NO: 3014791 - RNA, 19 nt, Artificial Sequence
  Description of Artificial Sequence: Synthetic oligonucleotide
cuuauaggcggcggcgaca

SEQ ID NO: 3014792 - RNA, 19 nt, Artificial Sequence
  Description of Artificial Sequence: Synthetic oligonucleotide
gggguuugggcaacgcacc

SEQ ID NO: 3014793 - RNA, 19 nt, Artificial Sequence
  Description of Artificial Sequence: Synthetic oligonucleotide
guacauucugaagucacuu

SEQ ID NO: 3014794 - RNA, 19 nt, Artificial Sequence
  Description of Artificial Sequence: Synthetic oligonucleotide
cccguuucauaguucagga

SEQ ID NO: 3014795 - RNA, 19 nt, Artificial Sequence
  Description of Artificial Sequence: Synthetic oligonucleotide
gaaguccuucauggaguca

SEQ ID NO: 3014796 - RNA, 19 nt, Artificial Sequence
  Description of Artificial Sequence: Synthetic oligonucleotide
ccuucaucucuucgaaguc

SEQ ID NO: 3014797 - RNA, 19 nt, Artificial Sequence
  Description of Artificial Sequence: Synthetic oligonucleotide
uuccugggcucagcuacac

SEQ ID NO: 3014798 - RNA, 19 nt, Artificial Sequence
  Description of Artificial Sequence: Synthetic oligonucleotide
gaacccgcaggcgccuggc

SEQ ID NO: 3014799 - RNA, 19 nt, Artificial Sequence
  Description of Artificial Sequence: Synthetic oligonucleotide
aucugggguuugggcaacg

SEQ ID NO: 3014800 - RNA, 19 nt, Artificial Sequence
  Description of Artificial Sequence: Synthetic oligonucleotide
agaccgcgcaucugggguu

SEQ ID NO: 3014801 - RNA, 19 nt, Artificial Sequence
  Description of Artificial Sequence: Synthetic oligonucleotide
cccuguagaaaucugcaua

SEQ ID NO: 3014802 - RNA, 19 nt, Artificial Sequence
  Description of Artificial Sequence: Synthetic oligonucleotide
cuuccugggcucagcuaca

SEQ ID NO: 3014803 - RNA, 19 nt, Artificial Sequence
  Description of Artificial Sequence: Synthetic oligonucleotide
gcaucugggguuugggcaa

SEQ ID NO: 3014804 - RNA, 19 nt, Artificial Sequence
  Description of Artificial Sequence: Synthetic oligonucleotide
caggaacauaggucagcga

SEQ ID NO: 3014805 - RNA, 19 nt, Artificial Sequence
  Description of Artificial Sequence: Synthetic oligonucleotide
acgcaccggaacucauggu

SEQ ID NO: 3014806 - RNA, 19 nt, Artificial Sequence
  Description of Artificial Sequence: Synthetic oligonucleotide
gcgccuggccaggagaccg

SEQ ID NO: 3014807 - RNA, 19 nt, Artificial Sequence
  Description of Artificial Sequence: Synthetic oligonucleotide
gucagcgaugaacuucuau

SEQ ID NO: 3014808 - RNA, 19 nt, Artificial Sequence
  Description of Artificial Sequence: Synthetic oligonucleotide
acuccuuaguccacauauu

SEQ ID NO: 3014809 - RNA, 19 nt, Artificial Sequence
  Description of Artificial Sequence: Synthetic oligonucleotide
gcgcaucugggguuugggc

SEQ ID NO: 3014810 - RNA, 19 nt, Artificial Sequence
  Description of Artificial Sequence: Synthetic oligonucleotide
cugggcucagcuacaccaa

SEQ ID NO: 3014811 - RNA, 19 nt, Artificial Sequence
  Description of Artificial Sequence: Synthetic oligonucleotide
gaacuucuaucgagugcaa

SEQ ID NO: 3014812 - RNA, 19 nt, Artificial Sequence
  Description of Artificial Sequence: Synthetic oligonucleotide
cuucuuccugggcucagcu

SEQ ID NO: 3014813 - RNA, 19 nt, Artificial Sequence
  Description of Artificial Sequence: Synthetic oligonucleotide
uuccagccgccuucaucuc

SEQ ID NO: 3014814 - RNA, 19 nt, Artificial Sequence
  Description of Artificial Sequence: Synthetic oligonucleotide
caucugggguuugggcaac

SEQ ID NO: 3014815 - RNA, 19 nt, Artificial Sequence
  Description of Artificial Sequence: Synthetic oligonucleotide
gcggcgacacccagggccg

SEQ ID NO: 3014816 - RNA, 19 nt, Artificial Sequence
  Description of Artificial Sequence: Synthetic oligonucleotide
caggcgccuggccaggaga

SEQ ID NO: 3014817 - RNA, 19 nt, Artificial Sequence
  Description of Artificial Sequence: Synthetic oligonucleotide
cagggccgugaggaaggcg

SEQ ID NO: 3014818 - RNA, 19 nt, Artificial Sequence
  Description of Artificial Sequence: Synthetic oligonucleotide
aggcgccgacgaugugaac

SEQ ID NO: 3014819 - RNA, 19 nt, Artificial Sequence
  Description of Artificial Sequence: Synthetic oligonucleotide
agauuccagccgccuucau

SEQ ID NO: 3014820 - RNA, 19 nt, Artificial Sequence
  Description of Artificial Sequence: Synthetic oligonucleotide
cuuuguacucuggaagauu

SEQ ID NO: 3014821 - RNA, 19 nt, Artificial Sequence
  Description of Artificial Sequence: Synthetic oligonucleotide
ggcaacgcaccggaacuca

SEQ ID NO: 3014822 - RNA, 19 nt, Artificial Sequence
  Description of Artificial Sequence: Synthetic oligonucleotide
gccgacgaugugaacccgc

SEQ ID NO: 3014823 - RNA, 19 nt, Artificial Sequence
  Description of Artificial Sequence: Synthetic oligonucleotide
cccgcaggcgccuggccag

SEQ ID NO: 3014824 - RNA, 19 nt, Artificial Sequence
  Description of Artificial Sequence: Synthetic oligonucleotide
cgaugugaacccgcaggcg

SEQ ID NO: 3014825 - RNA, 19 nt, Artificial Sequence
  Description of Artificial Sequence: Synthetic oligonucleotide
ggccgugaggaaggcgccg

SEQ ID NO: 3014826 - RNA, 19 nt, Artificial Sequence
  Description of Artificial Sequence: Synthetic oligonucleotide
cgugaggaaggcgccgacg

SEQ ID NO: 3014827 - RNA, 19 nt, Artificial Sequence
  Description of Artificial Sequence: Synthetic oligonucleotide
aguccuucauggagucaua

SEQ ID NO: 3014828 - RNA, 19 nt, Artificial Sequence
  Description of Artificial Sequence: Synthetic oligonucleotide
ccgacgaugugaacccgca

SEQ ID NO: 3014829 - RNA, 19 nt, Artificial Sequence
  Description of Artificial Sequence: Synthetic oligonucleotide
ccuucuuccugggcucagc

SEQ ID NO: 3014830 - RNA, 19 nt, Artificial Sequence
  Description of Artificial Sequence: Synthetic oligonucleotide
ggaagauuccagccgccuu

SEQ ID NO: 3014831 - RNA, 19 nt, Artificial Sequence
  Description of Artificial Sequence: Synthetic oligonucleotide
cgaugaacuucuaucgagu

SEQ ID NO: 3014832 - RNA, 19 nt, Artificial Sequence
  Description of Artificial Sequence: Synthetic oligonucleotide
gcaggcgccuggccaggag

SEQ ID NO: 3014833 - RNA, 19 nt, Artificial Sequence
  Description of Artificial Sequence: Synthetic oligonucleotide
ggcggcggcgacacccagg

SEQ ID NO: 3014834 - RNA, 19 nt, Artificial Sequence
  Description of Artificial Sequence: Synthetic oligonucleotide
gcucagcuacaccaaacuu

SEQ ID NO: 3014835 - RNA, 19 nt, Artificial Sequence
  Description of Artificial Sequence: Synthetic oligonucleotide
cagccgccuucaucucuuc

SEQ ID NO: 3014836 - RNA, 19 nt, Artificial Sequence
  Description of Artificial Sequence: Synthetic oligonucleotide
gugaacccgcaggcgccug

SEQ ID NO: 3014837 - RNA, 19 nt, Artificial Sequence
  Description of Artificial Sequence: Synthetic oligonucleotide
cgccuucaucucuucgaag

SEQ ID NO: 3014838 - RNA, 19 nt, Artificial Sequence
  Description of Artificial Sequence: Synthetic oligonucleotide
ccguuucauaguucaggaa

SEQ ID NO: 3014839 - RNA, 19 nt, Artificial Sequence
  Description of Artificial Sequence: Synthetic oligonucleotide
ggaaggcgccgacgaugug

SEQ ID NO: 3014840 - RNA, 19 nt, Artificial Sequence
  Description of Artificial Sequence: Synthetic oligonucleotide
cgacgaugugaacccgcag

SEQ ID NO: 3014841 - RNA, 19 nt, Artificial Sequence
  Description of Artificial Sequence: Synthetic oligonucleotide
gggccgugaggaaggcgcc

SEQ ID NO: 3014842 - RNA, 19 nt, Artificial Sequence
  Description of Artificial Sequence: Synthetic oligonucleotide
gggcaacgcaccggaacuc

SEQ ID NO: 3014843 - RNA, 19 nt, Artificial Sequence
  Description of Artificial Sequence: Synthetic oligonucleotide
cgcgcaucugggguuuggg

SEQ ID NO: 3014844 - RNA, 19 nt, Artificial Sequence
  Description of Artificial Sequence: Synthetic oligonucleotide
cagcuacaccaaacuuaua

SEQ ID NO: 3014845 - RNA, 19 nt, Artificial Sequence
  Description of Artificial Sequence: Synthetic oligonucleotide
gccaggagaccgcgcaucu

SEQ ID NO: 3014846 - RNA, 19 nt, Artificial Sequence
  Description of Artificial Sequence: Synthetic oligonucleotide
gccuucuuccugggcucag

SEQ ID NO: 3014847 - RNA, 19 nt, Artificial Sequence
  Description of Artificial Sequence: Synthetic oligonucleotide
ccgccuucaucucuucgaa

SEQ ID NO: 3014848 - RNA, 19 nt, Artificial Sequence
  Description of Artificial Sequence: Synthetic oligonucleotide
gccgugaggaaggcgccga

SEQ ID NO: 3014849 - RNA, 19 nt, Artificial Sequence
  Description of Artificial Sequence: Synthetic oligonucleotide
ggcgccuggccaggagacc

SEQ ID NO: 3014850 - RNA, 19 nt, Artificial Sequence
  Description of Artificial Sequence: Synthetic oligonucleotide
accgcgcaucugggguuug

SEQ ID NO: 3014851 - RNA, 19 nt, Artificial Sequence
  Description of Artificial Sequence: Synthetic oligonucleotide
cacccagggccgugaggaa

SEQ ID NO: 3014852 - RNA, 19 nt, Artificial Sequence
  Description of Artificial Sequence: Synthetic oligonucleotide
ggcgacacccagggccgug

SEQ ID NO: 3014853 - RNA, 19 nt, Artificial Sequence
  Description of Artificial Sequence: Synthetic oligonucleotide
ccgugaggaaggcgccgac

SEQ ID NO: 3014854 - RNA, 19 nt, Artificial Sequence
  Description of Artificial Sequence: Synthetic oligonucleotide
ccaggagaccgcgcaucug

SEQ ID NO: 3014855 - RNA, 19 nt, Artificial Sequence
  Description of Artificial Sequence: Synthetic oligonucleotide
ccacauauucccguuucau

SEQ ID NO: 3014856 - RNA, 19 nt, Artificial Sequence
  Description of Artificial Sequence: Synthetic oligonucleotide
gcgacacccagggccguga

SEQ ID NO: 3014857 - RNA, 19 nt, Artificial Sequence
  Description of Artificial Sequence: Synthetic oligonucleotide
ccagggccgugaggaaggc

SEQ ID NO: 3014858 - RNA, 19 nt, Artificial Sequence
  Description of Artificial Sequence: Synthetic oligonucleotide
ccgcgcaucugggguuugg

SEQ ID NO: 3014859 - RNA, 19 nt, Artificial Sequence
  Description of Artificial Sequence: Synthetic oligonucleotide
gaccgcgcaucugggguuu

SEQ ID NO: 3014860 - RNA, 19 nt, Artificial Sequence
  Description of Artificial Sequence: Synthetic oligonucleotide
cgccuggccaggagaccgc

SEQ ID NO: 3014861 - RNA, 19 nt, Artificial Sequence
  Description of Artificial Sequence: Synthetic oligonucleotide
cgacacccagggccgugag

SEQ ID NO: 3014862 - RNA, 19 nt, Artificial Sequence
  Description of Artificial Sequence: Synthetic oligonucleotide
cgagugcaauccaaagaau

SEQ ID NO: 3014863 - RNA, 19 nt, Artificial Sequence
  Description of Artificial Sequence: Synthetic oligonucleotide
cgccgacgaugugaacccg

SEQ ID NO: 3014864 - RNA, 19 nt, Artificial Sequence
  Description of Artificial Sequence: Synthetic oligonucleotide
ccagccgccuucaucucuu

SEQ ID NO: 3014865 - RNA, 19 nt, Artificial Sequence
  Description of Artificial Sequence: Synthetic oligonucleotide
gcaacgcaccggaacucau

SEQ ID NO: 3014866 - RNA, 19 nt, Artificial Sequence
  Description of Artificial Sequence: Synthetic oligonucleotide
ccgcaggcgccuggccagg

SEQ ID NO: 3014867 - RNA, 19 nt, Artificial Sequence
  Description of Artificial Sequence: Synthetic oligonucleotide
ggucagcgaugaacuucua

SEQ ID NO: 3014868 - RNA, 19 nt, Artificial Sequence
  Description of Artificial Sequence: Synthetic oligonucleotide
cgccuucuuccugggcuca

SEQ ID NO: 3014869 - RNA, 19 nt, Artificial Sequence
  Description of Artificial Sequence: Synthetic oligonucleotide
cggcggcgacacccagggc

SEQ ID NO: 3014870 - RNA, 19 nt, Artificial Sequence
  Description of Artificial Sequence: Synthetic oligonucleotide
cgcaggcgccuggccagga

SEQ ID NO: 3014871 - RNA, 19 nt, Artificial Sequence
  Description of Artificial Sequence: Synthetic oligonucleotide
cggcgacacccagggccgu

SEQ ID NO: 3014872 - RNA, 19 nt, Artificial Sequence
  Description of Artificial Sequence: Synthetic oligonucleotide
acugaagugagucagaacc

SEQ ID NO: 3014873 - RNA, 19 nt, Artificial Sequence
  Description of Artificial Sequence: Synthetic oligonucleotide
agaguuacuucuuggaggc

SEQ ID NO: 3014874 - RNA, 19 nt, Artificial Sequence
  Description of Artificial Sequence: Synthetic oligonucleotide
uuuucucccaaccauaggc

SEQ ID NO: 3014875 - RNA, 19 nt, Artificial Sequence
  Description of Artificial Sequence: Synthetic oligonucleotide
uuugcuuuguccaucuggg

SEQ ID NO: 3014876 - RNA, 19 nt, Artificial Sequence
  Description of Artificial Sequence: Synthetic oligonucleotide
aaggccgucgguuuguacc

SEQ ID NO: 3014877 - RNA, 19 nt, Artificial Sequence
  Description of Artificial Sequence: Synthetic oligonucleotide
augccgaucacauaaaauc

SEQ ID NO: 3014878 - RNA, 19 nt, Artificial Sequence
  Description of Artificial Sequence: Synthetic oligonucleotide
ucacauaaaauccuacugc

SEQ ID NO: 3014879 - RNA, 19 nt, Artificial Sequence
  Description of Artificial Sequence: Synthetic oligonucleotide
uuuugcuuuguccaucugg

SEQ ID NO: 3014880 - RNA, 19 nt, Artificial Sequence
  Description of Artificial Sequence: Synthetic oligonucleotide
uccgcugucacccacaacc

SEQ ID NO: 3014881 - RNA, 19 nt, Artificial Sequence
  Description of Artificial Sequence: Synthetic oligonucleotide
cauaaaauccuacugcuag

SEQ ID NO: 3014882 - RNA, 19 nt, Artificial Sequence
  Description of Artificial Sequence: Synthetic oligonucleotide
ucugcuucaaagcacagcu

SEQ ID NO: 3014883 - RNA, 19 nt, Artificial Sequence
  Description of Artificial Sequence: Synthetic oligonucleotide
uagaguuacuucuuggagg

SEQ ID NO: 3014884 - RNA, 19 nt, Artificial Sequence
  Description of Artificial Sequence: Synthetic oligonucleotide
agaacagucacccaauaug

SEQ ID NO: 3014885 - RNA, 19 nt, Artificial Sequence
  Description of Artificial Sequence: Synthetic oligonucleotide
cauuucuugauuuggaaug

SEQ ID NO: 3014886 - RNA, 19 nt, Artificial Sequence
  Description of Artificial Sequence: Synthetic oligonucleotide
aaauccuacugcuagaguu

SEQ ID NO: 3014887 - RNA, 19 nt, Artificial Sequence
  Description of Artificial Sequence: Synthetic oligonucleotide
aagugagucagaaccagcc

SEQ ID NO: 3014888 - RNA, 19 nt, Artificial Sequence
  Description of Artificial Sequence: Synthetic oligonucleotide
cugggaaucauccagaguc

SEQ ID NO: 3014889 - RNA, 19 nt, Artificial Sequence
  Description of Artificial Sequence: Synthetic oligonucleotide
aaccccagaacagucaccc

SEQ ID NO: 3014890 - RNA, 19 nt, Artificial Sequence
  Description of Artificial Sequence: Synthetic oligonucleotide
uggaaugccgaucacauaa

SEQ ID NO: 3014891 - RNA, 19 nt, Artificial Sequence
  Description of Artificial Sequence: Synthetic oligonucleotide
agaaccagccucuuggcac

SEQ ID NO: 3014892 - RNA, 19 nt, Artificial Sequence
  Description of Artificial Sequence: Synthetic oligonucleotide
aucacauaaaauccuacug

SEQ ID NO: 3014893 - RNA, 19 nt, Artificial Sequence
  Description of Artificial Sequence: Synthetic oligonucleotide
ugauuuggaaugccgauca

SEQ ID NO: 3014894 - RNA, 19 nt, Artificial Sequence
  Description of Artificial Sequence: Synthetic oligonucleotide
uucuugauuuggaaugccg

SEQ ID NO: 3014895 - RNA, 19 nt, Artificial Sequence
  Description of Artificial Sequence: Synthetic oligonucleotide
aaagcacagcuucacuccg

SEQ ID NO: 3014896 - RNA, 19 nt, Artificial Sequence
  Description of Artificial Sequence: Synthetic oligonucleotide
ucuugauuuggaaugccga

SEQ ID NO: 3014897 - RNA, 19 nt, Artificial Sequence
  Description of Artificial Sequence: Synthetic oligonucleotide
ugcucuuuugcuuugucca

SEQ ID NO: 3014898 - RNA, 19 nt, Artificial Sequence
  Description of Artificial Sequence: Synthetic oligonucleotide
ugccgaucacauaaaaucc

SEQ ID NO: 3014899 - RNA, 19 nt, Artificial Sequence
  Description of Artificial Sequence: Synthetic oligonucleotide
uuuggaaugccgaucacau

SEQ ID NO: 3014900 - RNA, 19 nt, Artificial Sequence
  Description of Artificial Sequence: Synthetic oligonucleotide
uaaaauccuacugcuagag

SEQ ID NO: 3014901 - RNA, 19 nt, Artificial Sequence
  Description of Artificial Sequence: Synthetic oligonucleotide
uuucauuucuugauuugga

SEQ ID NO: 3014902 - RNA, 19 nt, Artificial Sequence
  Description of Artificial Sequence: Synthetic oligonucleotide
ucacccaauaugcagauuu

SEQ ID NO: 3014903 - RNA, 19 nt, Artificial Sequence
  Description of Artificial Sequence: Synthetic oligonucleotide
augcucuuuugcuuugucc

SEQ ID NO: 3014904 - RNA, 19 nt, Artificial Sequence
  Description of Artificial Sequence: Synthetic oligonucleotide
acagucacccaauaugcag

SEQ ID NO: 3014905 - RNA, 19 nt, Artificial Sequence
  Description of Artificial Sequence: Synthetic oligonucleotide
ugcagauuuucucccaacc

SEQ ID NO: 3014906 - RNA, 19 nt, Artificial Sequence
  Description of Artificial Sequence: Synthetic oligonucleotide
gaacagucacccaauaugc

SEQ ID NO: 3014907 - RNA, 19 nt, Artificial Sequence
  Description of Artificial Sequence: Synthetic oligonucleotide
ugcuucaaagcacagcuuc

SEQ ID NO: 3014908 - RNA, 19 nt, Artificial Sequence
  Description of Artificial Sequence: Synthetic oligonucleotide
ucaaagcacagcuucacuc

SEQ ID NO: 3014909 - RNA, 19 nt, Artificial Sequence
  Description of Artificial Sequence: Synthetic oligonucleotide
guuucauuucuugauuugg

SEQ ID NO: 3014910 - RNA, 19 nt, Artificial Sequence
  Description of Artificial Sequence: Synthetic oligonucleotide
caaagcacagcuucacucc

SEQ ID NO: 3014911 - RNA, 19 nt, Artificial Sequence
  Description of Artificial Sequence: Synthetic oligonucleotide
acagcuucgcaaaugcugc

SEQ ID NO: 3014912 - RNA, 19 nt, Artificial Sequence
  Description of Artificial Sequence: Synthetic oligonucleotide
uguaccucugacugaagug

SEQ ID NO: 3014913 - RNA, 19 nt, Artificial Sequence
  Description of Artificial Sequence: Synthetic oligonucleotide
ugcuagaguuacuucuugg

SEQ ID NO: 3014914 - RNA, 19 nt, Artificial Sequence
  Description of Artificial Sequence: Synthetic oligonucleotide
cuagaguuacuucuuggag

SEQ ID NO: 3014915 - RNA, 19 nt, Artificial Sequence
  Description of Artificial Sequence: Synthetic oligonucleotide
ugggaaucauccagagucg

SEQ ID NO: 3014916 - RNA, 19 nt, Artificial Sequence
  Description of Artificial Sequence: Synthetic oligonucleotide
ucauuucuugauuuggaau

SEQ ID NO: 3014917 - RNA, 19 nt, Artificial Sequence
  Description of Artificial Sequence: Synthetic oligonucleotide
aaucauccagagucgccuc

SEQ ID NO: 3014918 - RNA, 19 nt, Artificial Sequence
  Description of Artificial Sequence: Synthetic oligonucleotide
aaaugcugcugccaucugu

SEQ ID NO: 3014919 - RNA, 19 nt, Artificial Sequence
  Description of Artificial Sequence: Synthetic oligonucleotide
cuaacacugccucagcuug

SEQ ID NO: 3014920 - RNA, 19 nt, Artificial Sequence
  Description of Artificial Sequence: Synthetic oligonucleotide
gauuuucucccaaccauag

SEQ ID NO: 3014921 - RNA, 19 nt, Artificial Sequence
  Description of Artificial Sequence: Synthetic oligonucleotide
caacaggucugcuucaaag

SEQ ID NO: 3014922 - RNA, 19 nt, Artificial Sequence
  Description of Artificial Sequence: Synthetic oligonucleotide
ugcuuuguccaucugggaa

SEQ ID NO: 3014923 - RNA, 19 nt, Artificial Sequence
  Description of Artificial Sequence: Synthetic oligonucleotide
acugguuucauuucuugau

SEQ ID NO: 3014924 - RNA, 19 nt, Artificial Sequence
  Description of Artificial Sequence: Synthetic oligonucleotide
ucguggaucaacaggucug

SEQ ID NO: 3014925 - RNA, 19 nt, Artificial Sequence
  Description of Artificial Sequence: Synthetic oligonucleotide
cacagcuucgcaaaugcug

SEQ ID NO: 3014926 - RNA, 19 nt, Artificial Sequence
  Description of Artificial Sequence: Synthetic oligonucleotide
ugagucagaaccagccucu

SEQ ID NO: 3014927 - RNA, 19 nt, Artificial Sequence
  Description of Artificial Sequence: Synthetic oligonucleotide
aaaauccuacugcuagagu

SEQ ID NO: 3014928 - RNA, 19 nt, Artificial Sequence
  Description of Artificial Sequence: Synthetic oligonucleotide
uucauuucuugauuuggaa

SEQ ID NO: 3014929 - RNA, 19 nt, Artificial Sequence
  Description of Artificial Sequence: Synthetic oligonucleotide
ugcgaugccaucugucucc

SEQ ID NO: 3014930 - RNA, 19 nt, Artificial Sequence
  Description of Artificial Sequence: Synthetic oligonucleotide
auaaaauccuacugcuaga

SEQ ID NO: 3014931 - RNA, 19 nt, Artificial Sequence
  Description of Artificial Sequence: Synthetic oligonucleotide
uuucucccaaccauaggcu

SEQ ID NO: 3014932 - RNA, 19 nt, Artificial Sequence
  Description of Artificial Sequence: Synthetic oligonucleotide
cuuggcacggcacagcuuc

SEQ ID NO: 3014933 - RNA, 19 nt, Artificial Sequence
  Description of Artificial Sequence: Synthetic oligonucleotide
uuguaccucugacugaagu

SEQ ID NO: 3014934 - RNA, 19 nt, Artificial Sequence
  Description of Artificial Sequence: Synthetic oligonucleotide
gaaccagccucuuggcacg

SEQ ID NO: 3014935 - RNA, 19 nt, Artificial Sequence
  Description of Artificial Sequence: Synthetic oligonucleotide
ucugcgaugccaucugucu

SEQ ID NO: 3014936 - RNA, 19 nt, Artificial Sequence
  Description of Artificial Sequence: Synthetic oligonucleotide
auuuucucccaaccauagg

SEQ ID NO: 3014937 - RNA, 19 nt, Artificial Sequence
  Description of Artificial Sequence: Synthetic oligonucleotide
uucuuggaggccuaacacu

SEQ ID NO: 3014938 - RNA, 19 nt, Artificial Sequence
  Description of Artificial Sequence: Synthetic oligonucleotide
ucuuuugcuuuguccaucu

SEQ ID NO: 3014939 - RNA, 19 nt, Artificial Sequence
  Description of Artificial Sequence: Synthetic oligonucleotide
ucugucuccccuucucuag

SEQ ID NO: 3014940 - RNA, 19 nt, Artificial Sequence
  Description of Artificial Sequence: Synthetic oligonucleotide
cuucuuggaggccuaacac

SEQ ID NO: 3014941 - RNA, 19 nt, Artificial Sequence
  Description of Artificial Sequence: Synthetic oligonucleotide
cuucacuccgcugucaccc

SEQ ID NO: 3014942 - RNA, 19 nt, Artificial Sequence
  Description of Artificial Sequence: Synthetic oligonucleotide
uuggaggccuaacacugcc

SEQ ID NO: 3014943 - RNA, 19 nt, Artificial Sequence
  Description of Artificial Sequence: Synthetic oligonucleotide
ccuucucuagccaaggccg

SEQ ID NO: 3014944 - RNA, 19 nt, Artificial Sequence
  Description of Artificial Sequence: Synthetic oligonucleotide
uucaguucugcgaugccau

SEQ ID NO: 3014945 - RNA, 19 nt, Artificial Sequence
  Description of Artificial Sequence: Synthetic oligonucleotide
ucacccacaaccccagaac

SEQ ID NO: 3014946 - RNA, 19 nt, Artificial Sequence
  Description of Artificial Sequence: Synthetic oligonucleotide
auucaggagcacugguuuc

SEQ ID NO: 3014947 - RNA, 19 nt, Artificial Sequence
  Description of Artificial Sequence: Synthetic oligonucleotide
gaucacauaaaauccuacu

SEQ ID NO: 3014948 - RNA, 19 nt, Artificial Sequence
  Description of Artificial Sequence: Synthetic oligonucleotide
uucaaagcacagcuucacu

SEQ ID NO: 3014949 - RNA, 19 nt, Artificial Sequence
  Description of Artificial Sequence: Synthetic oligonucleotide
uaugcagauuuucucccaa

SEQ ID NO: 3014950 - RNA, 19 nt, Artificial Sequence
  Description of Artificial Sequence: Synthetic oligonucleotide
aggagcacugguuucauuu

SEQ ID NO: 3014951 - RNA, 19 nt, Artificial Sequence
  Description of Artificial Sequence: Synthetic oligonucleotide
agcuucacuccgcugucac

SEQ ID NO: 3014952 - RNA, 19 nt, Artificial Sequence
  Description of Artificial Sequence: Synthetic oligonucleotide
augcagauuuucucccaac

SEQ ID NO: 3014953 - RNA, 19 nt, Artificial Sequence
  Description of Artificial Sequence: Synthetic oligonucleotide
ucgguuuguaccucugacu

SEQ ID NO: 3014954 - RNA, 19 nt, Artificial Sequence
  Description of Artificial Sequence: Synthetic oligonucleotide
aucugggaaucauccagag

SEQ ID NO: 3014955 - RNA, 19 nt, Artificial Sequence
  Description of Artificial Sequence: Synthetic oligonucleotide
uaccucugacugaagugag

SEQ ID NO: 3014956 - RNA, 19 nt, Artificial Sequence
  Description of Artificial Sequence: Synthetic oligonucleotide
aaugccgaucacauaaaau

SEQ ID NO: 3014957 - RNA, 19 nt, Artificial Sequence
  Description of Artificial Sequence: Synthetic oligonucleotide
aguuacuucuuggaggccu

SEQ ID NO: 3014958 - RNA, 19 nt, Artificial Sequence
  Description of Artificial Sequence: Synthetic oligonucleotide
uuuucaguucugcgaugcc

SEQ ID NO: 3014959 - RNA, 19 nt, Artificial Sequence
  Description of Artificial Sequence: Synthetic oligonucleotide
uguggccaugcucuuuugc

SEQ ID NO: 3014960 - RNA, 19 nt, Artificial Sequence
  Description of Artificial Sequence: Synthetic oligonucleotide
aucauccagagucgccucg

SEQ ID NO: 3014961 - RNA, 19 nt, Artificial Sequence
  Description of Artificial Sequence: Synthetic oligonucleotide
ucucuagccaaggccgucg

SEQ ID NO: 3014962 - RNA, 19 nt, Artificial Sequence
  Description of Artificial Sequence: Synthetic oligonucleotide
auuuggaaugccgaucaca

SEQ ID NO: 3014963 - RNA, 19 nt, Artificial Sequence
  Description of Artificial Sequence: Synthetic oligonucleotide
ggaucaacaggucugcuuc

SEQ ID NO: 3014964 - RNA, 19 nt, Artificial Sequence
  Description of Artificial Sequence: Synthetic oligonucleotide
ugguuucauuucuugauuu

SEQ ID NO: 3014965 - RNA, 19 nt, Artificial Sequence
  Description of Artificial Sequence: Synthetic oligonucleotide
aguucugcgaugccaucug

SEQ ID NO: 3014966 - RNA, 19 nt, Artificial Sequence
  Description of Artificial Sequence: Synthetic oligonucleotide
ucagaaccagccucuuggc

SEQ ID NO: 3014967 - RNA, 19 nt, Artificial Sequence
  Description of Artificial Sequence: Synthetic oligonucleotide
uuucuugauuuggaaugcc

SEQ ID NO: 3014968 - RNA, 19 nt, Artificial Sequence
  Description of Artificial Sequence: Synthetic oligonucleotide
ugcugcugccaucuguggc

SEQ ID NO: 3014969 - RNA, 19 nt, Artificial Sequence
  Description of Artificial Sequence: Synthetic oligonucleotide
auccagagucgccucgugg

SEQ ID NO: 3014970 - RNA, 19 nt, Artificial Sequence
  Description of Artificial Sequence: Synthetic oligonucleotide
agugagucagaaccagccu

SEQ ID NO: 3014971 - RNA, 19 nt, Artificial Sequence
  Description of Artificial Sequence: Synthetic oligonucleotide
agagucgccucguggauca

SEQ ID NO: 3014972 - RNA, 19 nt, Artificial Sequence
  Description of Artificial Sequence: Synthetic oligonucleotide
uugauuuggaaugccgauc

SEQ ID NO: 3014973 - RNA, 19 nt, Artificial Sequence
  Description of Artificial Sequence: Synthetic oligonucleotide
gugagucagaaccagccuc

SEQ ID NO: 3014974 - RNA, 19 nt, Artificial Sequence
  Description of Artificial Sequence: Synthetic oligonucleotide
ugcauucaggagcacuggu

SEQ ID NO: 3014975 - RNA, 19 nt, Artificial Sequence
  Description of Artificial Sequence: Synthetic oligonucleotide
auaugcagauuuucuccca

SEQ ID NO: 3014976 - RNA, 19 nt, Artificial Sequence
  Description of Artificial Sequence: Synthetic oligonucleotide
gcugcugccaucuguggcg

SEQ ID NO: 3014977 - RNA, 19 nt, Artificial Sequence
  Description of Artificial Sequence: Synthetic oligonucleotide
acccaauaugcagauuuuc

SEQ ID NO: 3014978 - RNA, 19 nt, Artificial Sequence
  Description of Artificial Sequence: Synthetic oligonucleotide
aagcacagcuucacuccgc

SEQ ID NO: 3014979 - RNA, 19 nt, Artificial Sequence
  Description of Artificial Sequence: Synthetic oligonucleotide
acagcuucacuccgcuguc

SEQ ID NO: 3014980 - RNA, 19 nt, Artificial Sequence
  Description of Artificial Sequence: Synthetic oligonucleotide
ucugggaaucauccagagu

SEQ ID NO: 3014981 - RNA, 19 nt, Artificial Sequence
  Description of Artificial Sequence: Synthetic oligonucleotide
cacauaaaauccuacugcu

SEQ ID NO: 3014982 - RNA, 19 nt, Artificial Sequence
  Description of Artificial Sequence: Synthetic oligonucleotide
auccuacugcuagaguuac

SEQ ID NO: 3014983 - RNA, 19 nt, Artificial Sequence
  Description of Artificial Sequence: Synthetic oligonucleotide
gaagugagucagaaccagc

SEQ ID NO: 3014984 - RNA, 19 nt, Artificial Sequence
  Description of Artificial Sequence: Synthetic oligonucleotide
gguuucauuucuugauuug

SEQ ID NO: 3014985 - RNA, 19 nt, Artificial Sequence
  Description of Artificial Sequence: Synthetic oligonucleotide
aauccuacugcuagaguua

SEQ ID NO: 3014986 - RNA, 19 nt, Artificial Sequence
  Description of Artificial Sequence: Synthetic oligonucleotide
uuuguaccucugacugaag

SEQ ID NO: 3014987 - RNA, 19 nt, Artificial Sequence
  Description of Artificial Sequence: Synthetic oligonucleotide
uaacacugccucagcuugc

SEQ ID NO: 3014988 - RNA, 19 nt, Artificial Sequence
  Description of Artificial Sequence: Synthetic oligonucleotide
gucgguuuguaccucugac

SEQ ID NO: 3014989 - RNA, 19 nt, Artificial Sequence
  Description of Artificial Sequence: Synthetic oligonucleotide
cuucaaagcacagcuucac

SEQ ID NO: 3014990 - RNA, 19 nt, Artificial Sequence
  Description of Artificial Sequence: Synthetic oligonucleotide
guaccucugacugaaguga

SEQ ID NO: 3014991 - RNA, 19 nt, Artificial Sequence
  Description of Artificial Sequence: Synthetic oligonucleotide
uucgcaaaugcugcugcca

SEQ ID NO: 3014992 - RNA, 19 nt, Artificial Sequence
  Description of Artificial Sequence: Synthetic oligonucleotide
ugacugaagugagucagaa

SEQ ID NO: 3014993 - RNA, 19 nt, Artificial Sequence
  Description of Artificial Sequence: Synthetic oligonucleotide
ggcacagcuucgcaaaugc

SEQ ID NO: 3014994 - RNA, 19 nt, Artificial Sequence
  Description of Artificial Sequence: Synthetic oligonucleotide
cuuggaggccuaacacugc

SEQ ID NO: 3014995 - RNA, 19 nt, Artificial Sequence
  Description of Artificial Sequence: Synthetic oligonucleotide
ucgcaaaugcugcugccau

SEQ ID NO: 3014996 - RNA, 19 nt, Artificial Sequence
  Description of Artificial Sequence: Synthetic oligonucleotide
gaugccaucugucuccccu

SEQ ID NO: 3014997 - RNA, 19 nt, Artificial Sequence
  Description of Artificial Sequence: Synthetic oligonucleotide
ugucuccccuucucuagcc

SEQ ID NO: 3014998 - RNA, 19 nt, Artificial Sequence
  Description of Artificial Sequence: Synthetic oligonucleotide
caggucugcuucaaagcac

SEQ ID NO: 3014999 - RNA, 19 nt, Artificial Sequence
  Description of Artificial Sequence: Synthetic oligonucleotide
uucugcgaugccaucuguc

SEQ ID NO: 3015000 - RNA, 19 nt, Artificial Sequence
  Description of Artificial Sequence: Synthetic oligonucleotide
cuucgcaaaugcugcugcc

SEQ ID NO: 3015001 - RNA, 19 nt, Artificial Sequence
  Description of Artificial Sequence: Synthetic oligonucleotide
uggaucaacaggucugcuu

SEQ ID NO: 3015002 - RNA, 19 nt, Artificial Sequence
  Description of Artificial Sequence: Synthetic oligonucleotide
gacugaagugagucagaac

SEQ ID NO: 3015003 - RNA, 19 nt, Artificial Sequence
  Description of Artificial Sequence: Synthetic oligonucleotide
guuuguaccucugacugaa

SEQ ID NO: 3015004 - RNA, 19 nt, Artificial Sequence
  Description of Artificial Sequence: Synthetic oligonucleotide
ucuguggcgugcuguggcc

SEQ ID NO: 3015005 - RNA, 19 nt, Artificial Sequence
  Description of Artificial Sequence: Synthetic oligonucleotide
gaaucauccagagucgccu

SEQ ID NO: 3015006 - RNA, 19 nt, Artificial Sequence
  Description of Artificial Sequence: Synthetic oligonucleotide
cugaagugagucagaacca

SEQ ID NO: 3015007 - RNA, 19 nt, Artificial Sequence
  Description of Artificial Sequence: Synthetic oligonucleotide
ucaacaggucugcuucaaa

SEQ ID NO: 3015008 - RNA, 19 nt, Artificial Sequence
  Description of Artificial Sequence: Synthetic oligonucleotide
gaaugccgaucacauaaaa

SEQ ID NO: 3015009 - RNA, 19 nt, Artificial Sequence
  Description of Artificial Sequence: Synthetic oligonucleotide
gcuagaguuacuucuugga

SEQ ID NO: 3015010 - RNA, 19 nt, Artificial Sequence
  Description of Artificial Sequence: Synthetic oligonucleotide
agcacagcuucacuccgcu

SEQ ID NO: 3015011 - RNA, 19 nt, Artificial Sequence
  Description of Artificial Sequence: Synthetic oligonucleotide
agucacccaauaugcagau

SEQ ID NO: 3015012 - RNA, 19 nt, Artificial Sequence
  Description of Artificial Sequence: Synthetic oligonucleotide
aggccuaacacugccucag

SEQ ID NO: 3015013 - RNA, 19 nt, Artificial Sequence
  Description of Artificial Sequence: Synthetic oligonucleotide
cagucacccaauaugcaga

SEQ ID NO: 3015014 - RNA, 19 nt, Artificial Sequence
  Description of Artificial Sequence: Synthetic oligonucleotide
ucucccaaccauaggcuuu

SEQ ID NO: 3015015 - RNA, 19 nt, Artificial Sequence
  Description of Artificial Sequence: Synthetic oligonucleotide
agucagaaccagccucuug

SEQ ID NO: 3015016 - RNA, 19 nt, Artificial Sequence
  Description of Artificial Sequence: Synthetic oligonucleotide
gauuuggaaugccgaucac

SEQ ID NO: 3015017 - RNA, 19 nt, Artificial Sequence
  Description of Artificial Sequence: Synthetic oligonucleotide
augcauucaggagcacugg

SEQ ID NO: 3015018 - RNA, 19 nt, Artificial Sequence
  Description of Artificial Sequence: Synthetic oligonucleotide
gaucaacaggucugcuuca

SEQ ID NO: 3015019 - RNA, 19 nt, Artificial Sequence
  Description of Artificial Sequence: Synthetic oligonucleotide
uccccuucucuagccaagg

SEQ ID NO: 3015020 - RNA, 19 nt, Artificial Sequence
  Description of Artificial Sequence: Synthetic oligonucleotide
uuggcacggcacagcuucg

SEQ ID NO: 3015021 - RNA, 19 nt, Artificial Sequence
  Description of Artificial Sequence: Synthetic oligonucleotide
uugcuuuguccaucuggga

SEQ ID NO: 3015022 - RNA, 19 nt, Artificial Sequence
  Description of Artificial Sequence: Synthetic oligonucleotide
uucucccaaccauaggcuu

SEQ ID NO: 3015023 - RNA, 19 nt, Artificial Sequence
  Description of Artificial Sequence: Synthetic oligonucleotide
cuacugcuagaguuacuuc

SEQ ID NO: 3015024 - RNA, 19 nt, Artificial Sequence
  Description of Artificial Sequence: Synthetic oligonucleotide
ucuccccuucucuagccaa

SEQ ID NO: 3015025 - RNA, 19 nt, Artificial Sequence
  Description of Artificial Sequence: Synthetic oligonucleotide
augcugcugccaucugugg

SEQ ID NO: 3015026 - RNA, 19 nt, Artificial Sequence
  Description of Artificial Sequence: Synthetic oligonucleotide
cugcuagaguuacuucuug

SEQ ID NO: 3015027 - RNA, 19 nt, Artificial Sequence
  Description of Artificial Sequence: Synthetic oligonucleotide
aggucugcuucaaagcaca

SEQ ID NO: 3015028 - RNA, 19 nt, Artificial Sequence
  Description of Artificial Sequence: Synthetic oligonucleotide
cacugguuucauuucuuga

SEQ ID NO: 3015029 - RNA, 19 nt, Artificial Sequence
  Description of Artificial Sequence: Synthetic oligonucleotide
gcagauuuucucccaacca

SEQ ID NO: 3015030 - RNA, 19 nt, Artificial Sequence
  Description of Artificial Sequence: Synthetic oligonucleotide
aggccgucgguuuguaccu

SEQ ID NO: 3015031 - RNA, 19 nt, Artificial Sequence
  Description of Artificial Sequence: Synthetic oligonucleotide
cugucuccccuucucuagc

SEQ ID NO: 3015032 - RNA, 19 nt, Artificial Sequence
  Description of Artificial Sequence: Synthetic oligonucleotide
agauuuucucccaaccaua

SEQ ID NO: 3015033 - RNA, 19 nt, Artificial Sequence
  Description of Artificial Sequence: Synthetic oligonucleotide
caaccccagaacagucacc

SEQ ID NO: 3015034 - RNA, 19 nt, Artificial Sequence
  Description of Artificial Sequence: Synthetic oligonucleotide
gcuucgcaaaugcugcugc

SEQ ID NO: 3015035 - RNA, 19 nt, Artificial Sequence
  Description of Artificial Sequence: Synthetic oligonucleotide
uggaggccuaacacugccu

SEQ ID NO: 3015036 - RNA, 19 nt, Artificial Sequence
  Description of Artificial Sequence: Synthetic oligonucleotide
cuuuguccaucugggaauc

SEQ ID NO: 3015037 - RNA, 19 nt, Artificial Sequence
  Description of Artificial Sequence: Synthetic oligonucleotide
cucuagccaaggccgucgg

SEQ ID NO: 3015038 - RNA, 19 nt, Artificial Sequence
  Description of Artificial Sequence: Synthetic oligonucleotide
cccuucucuagccaaggcc

SEQ ID NO: 3015039 - RNA, 19 nt, Artificial Sequence
  Description of Artificial Sequence: Synthetic oligonucleotide
caugcucuuuugcuuuguc

SEQ ID NO: 3015040 - RNA, 19 nt, Artificial Sequence
  Description of Artificial Sequence: Synthetic oligonucleotide
agccucuuggcacggcaca

SEQ ID NO: 3015041 - RNA, 19 nt, Artificial Sequence
  Description of Artificial Sequence: Synthetic oligonucleotide
cuccccuucucuagccaag

SEQ ID NO: 3015042 - RNA, 19 nt, Artificial Sequence
  Description of Artificial Sequence: Synthetic oligonucleotide
agcuucgcaaaugcugcug

SEQ ID NO: 3015043 - RNA, 19 nt, Artificial Sequence
  Description of Artificial Sequence: Synthetic oligonucleotide
ucgccucguggaucaacag

SEQ ID NO: 3015044 - RNA, 19 nt, Artificial Sequence
  Description of Artificial Sequence: Synthetic oligonucleotide
uggccaugcucuuuugcuu

SEQ ID NO: 3015045 - RNA, 19 nt, Artificial Sequence
  Description of Artificial Sequence: Synthetic oligonucleotide
cgguuuguaccucugacug

SEQ ID NO: 3015046 - RNA, 19 nt, Artificial Sequence
  Description of Artificial Sequence: Synthetic oligonucleotide
ucuagccaaggccgucggu

SEQ ID NO: 3015047 - RNA, 19 nt, Artificial Sequence
  Description of Artificial Sequence: Synthetic oligonucleotide
cuugauuuggaaugccgau

SEQ ID NO: 3015048 - RNA, 19 nt, Artificial Sequence
  Description of Artificial Sequence: Synthetic oligonucleotide
cucuuuugcuuuguccauc

SEQ ID NO: 3015049 - RNA, 19 nt, Artificial Sequence
  Description of Artificial Sequence: Synthetic oligonucleotide
acauaaaauccuacugcua

SEQ ID NO: 3015050 - RNA, 19 nt, Artificial Sequence
  Description of Artificial Sequence: Synthetic oligonucleotide
cacccacaaccccagaaca

SEQ ID NO: 3015051 - RNA, 19 nt, Artificial Sequence
  Description of Artificial Sequence: Synthetic oligonucleotide
ucauccagagucgccucgu

SEQ ID NO: 3015052 - RNA, 19 nt, Artificial Sequence
  Description of Artificial Sequence: Synthetic oligonucleotide
agucgccucguggaucaac

SEQ ID NO: 3015053 - RNA, 19 nt, Artificial Sequence
  Description of Artificial Sequence: Synthetic oligonucleotide
acccacaaccccagaacag

SEQ ID NO: 3015054 - RNA, 19 nt, Artificial Sequence
  Description of Artificial Sequence: Synthetic oligonucleotide
gaggccuaacacugccuca

SEQ ID NO: 3015055 - RNA, 19 nt, Artificial Sequence
  Description of Artificial Sequence: Synthetic oligonucleotide
aucugucuccccuucucua

SEQ ID NO: 3015056 - RNA, 19 nt, Artificial Sequence
  Description of Artificial Sequence: Synthetic oligonucleotide
uuggaaugccgaucacaua

SEQ ID NO: 3015057 - RNA, 19 nt, Artificial Sequence
  Description of Artificial Sequence: Synthetic oligonucleotide
ggaggccuaacacugccuc

SEQ ID NO: 3015058 - RNA, 19 nt, Artificial Sequence
  Description of Artificial Sequence: Synthetic oligonucleotide
cagauuuucucccaaccau

SEQ ID NO: 3015059 - RNA, 19 nt, Artificial Sequence
  Description of Artificial Sequence: Synthetic oligonucleotide
ucaguucugcgaugccauc

SEQ ID NO: 3015060 - RNA, 19 nt, Artificial Sequence
  Description of Artificial Sequence: Synthetic oligonucleotide
gcacugguuucauuucuug

SEQ ID NO: 3015061 - RNA, 19 nt, Artificial Sequence
  Description of Artificial Sequence: Synthetic oligonucleotide
uccuacugcuagaguuacu

SEQ ID NO: 3015062 - RNA, 19 nt, Artificial Sequence
  Description of Artificial Sequence: Synthetic oligonucleotide
acugcuagaguuacuucuu

SEQ ID NO: 3015063 - RNA, 19 nt, Artificial Sequence
  Description of Artificial Sequence: Synthetic oligonucleotide
guggccaugcucuuuugcu

SEQ ID NO: 3015064 - RNA, 19 nt, Artificial Sequence
  Description of Artificial Sequence: Synthetic oligonucleotide
cucugacugaagugaguca

SEQ ID NO: 3015065 - RNA, 19 nt, Artificial Sequence
  Description of Artificial Sequence: Synthetic oligonucleotide
ggaaucauccagagucgcc

SEQ ID NO: 3015066 - RNA, 19 nt, Artificial Sequence
  Description of Artificial Sequence: Synthetic oligonucleotide
cugcgaugccaucugucuc

SEQ ID NO: 3015067 - RNA, 19 nt, Artificial Sequence
  Description of Artificial Sequence: Synthetic oligonucleotide
ucacuccgcugucacccac

SEQ ID NO: 3015068 - RNA, 19 nt, Artificial Sequence
  Description of Artificial Sequence: Synthetic oligonucleotide
ugccaucugucuccccuuc

SEQ ID NO: 3015069 - RNA, 19 nt, Artificial Sequence
  Description of Artificial Sequence: Synthetic oligonucleotide
aaccagccucuuggcacgg

SEQ ID NO: 3015070 - RNA, 19 nt, Artificial Sequence
  Description of Artificial Sequence: Synthetic oligonucleotide
agccaaggccgucgguuug

SEQ ID NO: 3015071 - RNA, 19 nt, Artificial Sequence
  Description of Artificial Sequence: Synthetic oligonucleotide
cugacugaagugagucaga

SEQ ID NO: 3015072 - RNA, 19 nt, Artificial Sequence
  Description of Artificial Sequence: Synthetic oligonucleotide
caucuguggcgugcugugg

SEQ ID NO: 3015073 - RNA, 19 nt, Artificial Sequence
  Description of Artificial Sequence: Synthetic oligonucleotide
uagccaaggccgucgguuu

SEQ ID NO: 3015074 - RNA, 19 nt, Artificial Sequence
  Description of Artificial Sequence: Synthetic oligonucleotide
ggagcacugguuucauuuc

SEQ ID NO: 3015075 - RNA, 19 nt, Artificial Sequence
  Description of Artificial Sequence: Synthetic oligonucleotide
cauucaggagcacugguuu

SEQ ID NO: 3015076 - RNA, 19 nt, Artificial Sequence
  Description of Artificial Sequence: Synthetic oligonucleotide
cacggcacagcuucgcaaa

SEQ ID NO: 3015077 - RNA, 19 nt, Artificial Sequence
  Description of Artificial Sequence: Synthetic oligonucleotide
uguggcgugcuguggccau

SEQ ID NO: 3015078 - RNA, 19 nt, Artificial Sequence
  Description of Artificial Sequence: Synthetic oligonucleotide
gaguuacuucuuggaggcc

SEQ ID NO: 3015079 - RNA, 19 nt, Artificial Sequence
  Description of Artificial Sequence: Synthetic oligonucleotide
gguuuguaccucugacuga

SEQ ID NO: 3015080 - RNA, 19 nt, Artificial Sequence
  Description of Artificial Sequence: Synthetic oligonucleotide
cgaucacauaaaauccuac

SEQ ID NO: 3015081 - RNA, 19 nt, Artificial Sequence
  Description of Artificial Sequence: Synthetic oligonucleotide
cagccucuuggcacggcac

SEQ ID NO: 3015082 - RNA, 19 nt, Artificial Sequence
  Description of Artificial Sequence: Synthetic oligonucleotide
gggaaucauccagagucgc

SEQ ID NO: 3015083 - RNA, 19 nt, Artificial Sequence
  Description of Artificial Sequence: Synthetic oligonucleotide
ccucugacugaagugaguc

SEQ ID NO: 3015084 - RNA, 19 nt, Artificial Sequence
  Description of Artificial Sequence: Synthetic oligonucleotide
aucaacaggucugcuucaa

SEQ ID NO: 3015085 - RNA, 19 nt, Artificial Sequence
  Description of Artificial Sequence: Synthetic oligonucleotide
caaaugcugcugccaucug

SEQ ID NO: 3015086 - RNA, 19 nt, Artificial Sequence
  Description of Artificial Sequence: Synthetic oligonucleotide
uucucuagccaaggccguc

SEQ ID NO: 3015087 - RNA, 19 nt, Artificial Sequence
  Description of Artificial Sequence: Synthetic oligonucleotide
ucuuggcacggcacagcuu

SEQ ID NO: 3015088 - RNA, 19 nt, Artificial Sequence
  Description of Artificial Sequence: Synthetic oligonucleotide
uggcgugcuguggccaugc

SEQ ID NO: 3015089 - RNA, 19 nt, Artificial Sequence
  Description of Artificial Sequence: Synthetic oligonucleotide
gucgccucguggaucaaca

SEQ ID NO: 3015090 - RNA, 19 nt, Artificial Sequence
  Description of Artificial Sequence: Synthetic oligonucleotide
cucguggaucaacaggucu

SEQ ID NO: 3015091 - RNA, 19 nt, Artificial Sequence
  Description of Artificial Sequence: Synthetic oligonucleotide
cauccagagucgccucgug

SEQ ID NO: 3015092 - RNA, 19 nt, Artificial Sequence
  Description of Artificial Sequence: Synthetic oligonucleotide
acuccgcugucacccacaa

SEQ ID NO: 3015093 - RNA, 19 nt, Artificial Sequence
  Description of Artificial Sequence: Synthetic oligonucleotide
uuacuucuuggaggccuaa

SEQ ID NO: 3015094 - RNA, 19 nt, Artificial Sequence
  Description of Artificial Sequence: Synthetic oligonucleotide
ugccaucuguggcgugcug

SEQ ID NO: 3015095 - RNA, 19 nt, Artificial Sequence
  Description of Artificial Sequence: Synthetic oligonucleotide
uggcacggcacagcuucgc

SEQ ID NO: 3015096 - RNA, 19 nt, Artificial Sequence
  Description of Artificial Sequence: Synthetic oligonucleotide
caaggccgucgguuuguac

SEQ ID NO: 3015097 - RNA, 19 nt, Artificial Sequence
  Description of Artificial Sequence: Synthetic oligonucleotide
augccaucugucuccccuu

SEQ ID NO: 3015098 - RNA, 19 nt, Artificial Sequence
  Description of Artificial Sequence: Synthetic oligonucleotide
ccaucuguggcgugcugug

SEQ ID NO: 3015099 - RNA, 19 nt, Artificial Sequence
  Description of Artificial Sequence: Synthetic oligonucleotide
cccaauaugcagauuuucu

SEQ ID NO: 3015100 - RNA, 19 nt, Artificial Sequence
  Description of Artificial Sequence: Synthetic oligonucleotide
gcaaaugcugcugccaucu

SEQ ID NO: 3015101 - RNA, 19 nt, Artificial Sequence
  Description of Artificial Sequence: Synthetic oligonucleotide
gcuuuguccaucugggaau

SEQ ID NO: 3015102 - RNA, 19 nt, Artificial Sequence
  Description of Artificial Sequence: Synthetic oligonucleotide
cagagucgccucguggauc

SEQ ID NO: 3015103 - RNA, 19 nt, Artificial Sequence
  Description of Artificial Sequence: Synthetic oligonucleotide
acggcacagcuucgcaaau

SEQ ID NO: 3015104 - RNA, 19 nt, Artificial Sequence
  Description of Artificial Sequence: Synthetic oligonucleotide
agcacugguuucauuucuu

SEQ ID NO: 3015105 - RNA, 19 nt, Artificial Sequence
  Description of Artificial Sequence: Synthetic oligonucleotide
gcuucacuccgcugucacc

SEQ ID NO: 3015106 - RNA, 19 nt, Artificial Sequence
  Description of Artificial Sequence: Synthetic oligonucleotide
cuguggccaugcucuuuug

SEQ ID NO: 3015107 - RNA, 19 nt, Artificial Sequence
  Description of Artificial Sequence: Synthetic oligonucleotide
gucuccccuucucuagcca

SEQ ID NO: 3015108 - RNA, 19 nt, Artificial Sequence
  Description of Artificial Sequence: Synthetic oligonucleotide
cugguuucauuucuugauu

SEQ ID NO: 3015109 - RNA, 19 nt, Artificial Sequence
  Description of Artificial Sequence: Synthetic oligonucleotide
accccagaacagucaccca

SEQ ID NO: 3015110 - RNA, 19 nt, Artificial Sequence
  Description of Artificial Sequence: Synthetic oligonucleotide
guuacuucuuggaggccua

SEQ ID NO: 3015111 - RNA, 19 nt, Artificial Sequence
  Description of Artificial Sequence: Synthetic oligonucleotide
accucugacugaagugagu

SEQ ID NO: 3015112 - RNA, 19 nt, Artificial Sequence
  Description of Artificial Sequence: Synthetic oligonucleotide
ccacaaccccagaacaguc

SEQ ID NO: 3015113 - RNA, 19 nt, Artificial Sequence
  Description of Artificial Sequence: Synthetic oligonucleotide
cgccucguggaucaacagg

SEQ ID NO: 3015114 - RNA, 19 nt, Artificial Sequence
  Description of Artificial Sequence: Synthetic oligonucleotide
gccaugcucuuuugcuuug

SEQ ID NO: 3015115 - RNA, 19 nt, Artificial Sequence
  Description of Artificial Sequence: Synthetic oligonucleotide
ccaucugucuccccuucuc

SEQ ID NO: 3015116 - RNA, 19 nt, Artificial Sequence
  Description of Artificial Sequence: Synthetic oligonucleotide
cucuuggcacggcacagcu

SEQ ID NO: 3015117 - RNA, 19 nt, Artificial Sequence
  Description of Artificial Sequence: Synthetic oligonucleotide
ccgcugucacccacaaccc

SEQ ID NO: 3015118 - RNA, 19 nt, Artificial Sequence
  Description of Artificial Sequence: Synthetic oligonucleotide
gccucguggaucaacaggu

SEQ ID NO: 3015119 - RNA, 19 nt, Artificial Sequence
  Description of Artificial Sequence: Synthetic oligonucleotide
cguggaucaacaggucugc

SEQ ID NO: 3015120 - RNA, 19 nt, Artificial Sequence
  Description of Artificial Sequence: Synthetic oligonucleotide
cgugcuguggccaugcucu

SEQ ID NO: 3015121 - RNA, 19 nt, Artificial Sequence
  Description of Artificial Sequence: Synthetic oligonucleotide
ugcugccaucuguggcgug

SEQ ID NO: 3015122 - RNA, 19 nt, Artificial Sequence
  Description of Artificial Sequence: Synthetic oligonucleotide
ggccuaacacugccucagc

SEQ ID NO: 3015123 - RNA, 19 nt, Artificial Sequence
  Description of Artificial Sequence: Synthetic oligonucleotide
cuucucuagccaaggccgu

SEQ ID NO: 3015124 - RNA, 19 nt, Artificial Sequence
  Description of Artificial Sequence: Synthetic oligonucleotide
ggucugcuucaaagcacag

SEQ ID NO: 3015125 - RNA, 19 nt, Artificial Sequence
  Description of Artificial Sequence: Synthetic oligonucleotide
ccgaucacauaaaauccua

SEQ ID NO: 3015126 - RNA, 19 nt, Artificial Sequence
  Description of Artificial Sequence: Synthetic oligonucleotide
cuagccaaggccgucgguu

SEQ ID NO: 3015127 - RNA, 19 nt, Artificial Sequence
  Description of Artificial Sequence: Synthetic oligonucleotide
ugcuguggccaugcucuuu

SEQ ID NO: 3015128 - RNA, 19 nt, Artificial Sequence
  Description of Artificial Sequence: Synthetic oligonucleotide
guucugcgaugccaucugu

SEQ ID NO: 3015129 - RNA, 19 nt, Artificial Sequence
  Description of Artificial Sequence: Synthetic oligonucleotide
caguucugcgaugccaucu

SEQ ID NO: 3015130 - RNA, 19 nt, Artificial Sequence
  Description of Artificial Sequence: Synthetic oligonucleotide
ccccagaacagucacccaa

SEQ ID NO: 3015131 - RNA, 19 nt, Artificial Sequence
  Description of Artificial Sequence: Synthetic oligonucleotide
ggaaugccgaucacauaaa

SEQ ID NO: 3015132 - RNA, 19 nt, Artificial Sequence
  Description of Artificial Sequence: Synthetic oligonucleotide
gccucuuggcacggcacag

SEQ ID NO: 3015133 - RNA, 19 nt, Artificial Sequence
  Description of Artificial Sequence: Synthetic oligonucleotide
gccgaucacauaaaauccu

SEQ ID NO: 3015134 - RNA, 19 nt, Artificial Sequence
  Description of Artificial Sequence: Synthetic oligonucleotide
ggcacggcacagcuucgca

SEQ ID NO: 3015135 - RNA, 19 nt, Artificial Sequence
  Description of Artificial Sequence: Synthetic oligonucleotide
ccucguggaucaacagguc

SEQ ID NO: 3015136 - RNA, 19 nt, Artificial Sequence
  Description of Artificial Sequence: Synthetic oligonucleotide
gcgugcuguggccaugcuc

SEQ ID NO: 3015137 - RNA, 19 nt, Artificial Sequence
  Description of Artificial Sequence: Synthetic oligonucleotide
cuccgcugucacccacaac

SEQ ID NO: 3015138 - RNA, 19 nt, Artificial Sequence
  Description of Artificial Sequence: Synthetic oligonucleotide
gccuaacacugccucagcu

SEQ ID NO: 3015139 - RNA, 19 nt, Artificial Sequence
  Description of Artificial Sequence: Synthetic oligonucleotide
ccccuucucuagccaaggc

SEQ ID NO: 3015140 - RNA, 19 nt, Artificial Sequence
  Description of Artificial Sequence: Synthetic oligonucleotide
gcacggcacagcuucgcaa

SEQ ID NO: 3015141 - RNA, 19 nt, Artificial Sequence
  Description of Artificial Sequence: Synthetic oligonucleotide
cacccaauaugcagauuuu

SEQ ID NO: 3015142 - RNA, 19 nt, Artificial Sequence
  Description of Artificial Sequence: Synthetic oligonucleotide
ccucuuggcacggcacagc

SEQ ID NO: 3015143 - RNA, 19 nt, Artificial Sequence
  Description of Artificial Sequence: Synthetic oligonucleotide
cuguggcgugcuguggcca

SEQ ID NO: 3015144 - RNA, 19 nt, Artificial Sequence
  Description of Artificial Sequence: Synthetic oligonucleotide
ccuacugcuagaguuacuu

SEQ ID NO: 3015145 - RNA, 19 nt, Artificial Sequence
  Description of Artificial Sequence: Synthetic oligonucleotide
ggccaugcucuuuugcuuu

SEQ ID NO: 3015146 - RNA, 19 nt, Artificial Sequence
  Description of Artificial Sequence: Synthetic oligonucleotide
gcgaugccaucugucuccc

SEQ ID NO: 3015147 - RNA, 19 nt, Artificial Sequence
  Description of Artificial Sequence: Synthetic oligonucleotide
cgcugucacccacaacccc

SEQ ID NO: 3015148 - RNA, 19 nt, Artificial Sequence
  Description of Artificial Sequence: Synthetic oligonucleotide
gcucuuuugcuuuguccau

SEQ ID NO: 3015149 - RNA, 19 nt, Artificial Sequence
  Description of Artificial Sequence: Synthetic oligonucleotide
guggcgugcuguggccaug

SEQ ID NO: 3015150 - RNA, 19 nt, Artificial Sequence
  Description of Artificial Sequence: Synthetic oligonucleotide
ccuaacacugccucagcuu

SEQ ID NO: 3015151 - RNA, 19 nt, Artificial Sequence
  Description of Artificial Sequence: Synthetic oligonucleotide
cagcuucgcaaaugcugcu

SEQ ID NO: 3015152 - RNA, 19 nt, Artificial Sequence
  Description of Artificial Sequence: Synthetic oligonucleotide
ccgucgguuuguaccucug

SEQ ID NO: 3015153 - RNA, 19 nt, Artificial Sequence
  Description of Artificial Sequence: Synthetic oligonucleotide
cugcuucaaagcacagcuu

SEQ ID NO: 3015154 - RNA, 19 nt, Artificial Sequence
  Description of Artificial Sequence: Synthetic oligonucleotide
cgcaaaugcugcugccauc

SEQ ID NO: 3015155 - RNA, 19 nt, Artificial Sequence
  Description of Artificial Sequence: Synthetic oligonucleotide
cagcuucacuccgcuguca

SEQ ID NO: 3015156 - RNA, 19 nt, Artificial Sequence
  Description of Artificial Sequence: Synthetic oligonucleotide
guggaucaacaggucugcu

SEQ ID NO: 3015157 - RNA, 19 nt, Artificial Sequence
  Description of Artificial Sequence: Synthetic oligonucleotide
ccagaacagucacccaaua

SEQ ID NO: 3015158 - RNA, 19 nt, Artificial Sequence
  Description of Artificial Sequence: Synthetic oligonucleotide
cucccaaccauaggcuuuu

SEQ ID NO: 3015159 - RNA, 19 nt, Artificial Sequence
  Description of Artificial Sequence: Synthetic oligonucleotide
gcauucaggagcacugguu

SEQ ID NO: 3015160 - RNA, 19 nt, Artificial Sequence
  Description of Artificial Sequence: Synthetic oligonucleotide
gccaucuguggcgugcugu

SEQ ID NO: 3015161 - RNA, 19 nt, Artificial Sequence
  Description of Artificial Sequence: Synthetic oligonucleotide
gagucagaaccagccucuu

SEQ ID NO: 3015162 - RNA, 19 nt, Artificial Sequence
  Description of Artificial Sequence: Synthetic oligonucleotide
cccacaaccccagaacagu

SEQ ID NO: 3015163 - RNA, 19 nt, Artificial Sequence
  Description of Artificial Sequence: Synthetic oligonucleotide
cccagaacagucacccaau

SEQ ID NO: 3015164 - RNA, 19 nt, Artificial Sequence
  Description of Artificial Sequence: Synthetic oligonucleotide
gccgucgguuuguaccucu

SEQ ID NO: 3015165 - RNA, 19 nt, Artificial Sequence
  Description of Artificial Sequence: Synthetic oligonucleotide
cgucgguuuguaccucuga

SEQ ID NO: 3015166 - RNA, 19 nt, Artificial Sequence
  Description of Artificial Sequence: Synthetic oligonucleotide
gccaucugucuccccuucu

SEQ ID NO: 3015167 - RNA, 19 nt, Artificial Sequence
  Description of Artificial Sequence: Synthetic oligonucleotide
cggcacagcuucgcaaaug

SEQ ID NO: 3015168 - RNA, 19 nt, Artificial Sequence
  Description of Artificial Sequence: Synthetic oligonucleotide
cugcugccaucuguggcgu

SEQ ID NO: 3015169 - RNA, 19 nt, Artificial Sequence
  Description of Artificial Sequence: Synthetic oligonucleotide
cugccaucuguggcgugcu

SEQ ID NO: 3015170 - RNA, 19 nt, Artificial Sequence
  Description of Artificial Sequence: Synthetic oligonucleotide
gcacagcuucgcaaaugcu

SEQ ID NO: 3015171 - RNA, 19 nt, Artificial Sequence
  Description of Artificial Sequence: Synthetic oligonucleotide
cgaugccaucugucucccc

SEQ ID NO: 3015172 - RNA, 19 nt, Artificial Sequence
  Description of Artificial Sequence: Synthetic oligonucleotide
caggagcacugguuucauu

SEQ ID NO: 3015173 - RNA, 19 nt, Artificial Sequence
  Description of Artificial Sequence: Synthetic oligonucleotide
gucacccaauaugcagauu

SEQ ID NO: 3015174 - RNA, 19 nt, Artificial Sequence
  Description of Artificial Sequence: Synthetic oligonucleotide
gagucgccucguggaucaa

SEQ ID NO: 3015175 - RNA, 19 nt, Artificial Sequence
  Description of Artificial Sequence: Synthetic oligonucleotide
gccaaggccgucgguuugu

SEQ ID NO: 3015176 - RNA, 19 nt, Artificial Sequence
  Description of Artificial Sequence: Synthetic oligonucleotide
ggccgucgguuuguaccuc

SEQ ID NO: 3015177 - RNA, 19 nt, Artificial Sequence
  Description of Artificial Sequence: Synthetic oligonucleotide
gugcuguggccaugcucuu

SEQ ID NO: 3015178 - RNA, 19 nt, Artificial Sequence
  Description of Artificial Sequence: Synthetic oligonucleotide
ccaugcucuuuugcuuugu

SEQ ID NO: 3015179 - RNA, 19 nt, Artificial Sequence
  Description of Artificial Sequence: Synthetic oligonucleotide
ggcgugcuguggccaugcu

SEQ ID NO: 3015180 - RNA, 19 nt, Artificial Sequence
  Description of Artificial Sequence: Synthetic oligonucleotide
ccaaggccgucgguuugua

SEQ ID NO: 3015181 - RNA, 19 nt, Artificial Sequence
  Description of Artificial Sequence: Synthetic oligonucleotide
ugaacaaccuccaagaugg

SEQ ID NO: 3015182 - RNA, 19 nt, Artificial Sequence
  Description of Artificial Sequence: Synthetic oligonucleotide
caaauuuucuguaaaagcc

SEQ ID NO: 3015183 - RNA, 19 nt, Artificial Sequence
  Description of Artificial Sequence: Synthetic oligonucleotide
aauuucucagcuuccagac

SEQ ID NO: 3015184 - RNA, 19 nt, Artificial Sequence
  Description of Artificial Sequence: Synthetic oligonucleotide
aaagccguacuccaggagc

SEQ ID NO: 3015185 - RNA, 19 nt, Artificial Sequence
  Description of Artificial Sequence: Synthetic oligonucleotide
aaccuugcgaagcacagcc

SEQ ID NO: 3015186 - RNA, 19 nt, Artificial Sequence
  Description of Artificial Sequence: Synthetic oligonucleotide
ucagcuuccagacagagca

SEQ ID NO: 3015187 - RNA, 19 nt, Artificial Sequence
  Description of Artificial Sequence: Synthetic oligonucleotide
acauaaauuucucagcuuc

SEQ ID NO: 3015188 - RNA, 19 nt, Artificial Sequence
  Description of Artificial Sequence: Synthetic oligonucleotide
ucaaauuuucuguaaaagc

SEQ ID NO: 3015189 - RNA, 19 nt, Artificial Sequence
  Description of Artificial Sequence: Synthetic oligonucleotide
ugagauuacuucaccaagg

SEQ ID NO: 3015190 - RNA, 19 nt, Artificial Sequence
  Description of Artificial Sequence: Synthetic oligonucleotide
ucuguaaaagccucggucc

SEQ ID NO: 3015191 - RNA, 19 nt, Artificial Sequence
  Description of Artificial Sequence: Synthetic oligonucleotide
agagcugugaacaaccucc

SEQ ID NO: 3015192 - RNA, 19 nt, Artificial Sequence
  Description of Artificial Sequence: Synthetic oligonucleotide
aagauggcccaucccaucc

SEQ ID NO: 3015193 - RNA, 19 nt, Artificial Sequence
  Description of Artificial Sequence: Synthetic oligonucleotide
gaggauugcagacagagac

SEQ ID NO: 3015194 - RNA, 19 nt, Artificial Sequence
  Description of Artificial Sequence: Synthetic oligonucleotide
agagcauauccucugggcc

SEQ ID NO: 3015195 - RNA, 19 nt, Artificial Sequence
  Description of Artificial Sequence: Synthetic oligonucleotide
aggacauaaauuucucagc

SEQ ID NO: 3015196 - RNA, 19 nt, Artificial Sequence
  Description of Artificial Sequence: Synthetic oligonucleotide
agacagagcaacuucagag

SEQ ID NO: 3015197 - RNA, 19 nt, Artificial Sequence
  Description of Artificial Sequence: Synthetic oligonucleotide
aauggacaucuucuugugc

SEQ ID NO: 3015198 - RNA, 19 nt, Artificial Sequence
  Description of Artificial Sequence: Synthetic oligonucleotide
gauuacuucaccaaggaga

SEQ ID NO: 3015199 - RNA, 19 nt, Artificial Sequence
  Description of Artificial Sequence: Synthetic oligonucleotide
auggacaucuucuugugcg

SEQ ID NO: 3015200 - RNA, 19 nt, Artificial Sequence
  Description of Artificial Sequence: Synthetic oligonucleotide
uucagaauggacaucuucu

SEQ ID NO: 3015201 - RNA, 19 nt, Artificial Sequence
  Description of Artificial Sequence: Synthetic oligonucleotide
ucucauuuguaucugagau

SEQ ID NO: 3015202 - RNA, 19 nt, Artificial Sequence
  Description of Artificial Sequence: Synthetic oligonucleotide
uguaucugagauuacuuca

SEQ ID NO: 3015203 - RNA, 19 nt, Artificial Sequence
  Description of Artificial Sequence: Synthetic oligonucleotide
aauuuucuguaaaagccuc

SEQ ID NO: 3015204 - RNA, 19 nt, Artificial Sequence
  Description of Artificial Sequence: Synthetic oligonucleotide
aagucagaaaccuugcgaa

SEQ ID NO: 3015205 - RNA, 19 nt, Artificial Sequence
  Description of Artificial Sequence: Synthetic oligonucleotide
auugcagacagagacaaag

SEQ ID NO: 3015206 - RNA, 19 nt, Artificial Sequence
  Description of Artificial Sequence: Synthetic oligonucleotide
auuacuucaccaaggagac

SEQ ID NO: 3015207 - RNA, 19 nt, Artificial Sequence
  Description of Artificial Sequence: Synthetic oligonucleotide
caggacauaaauuucucag

SEQ ID NO: 3015208 - RNA, 19 nt, Artificial Sequence
  Description of Artificial Sequence: Synthetic oligonucleotide
ugcagacagagacaaagcc

SEQ ID NO: 3015209 - RNA, 19 nt, Artificial Sequence
  Description of Artificial Sequence: Synthetic oligonucleotide
agagacaaagccguacucc

SEQ ID NO: 3015210 - RNA, 19 nt, Artificial Sequence
  Description of Artificial Sequence: Synthetic oligonucleotide
uucagagcugugaacaacc

SEQ ID NO: 3015211 - RNA, 19 nt, Artificial Sequence
  Description of Artificial Sequence: Synthetic oligonucleotide
acaaccuccaagauggccc

SEQ ID NO: 3015212 - RNA, 19 nt, Artificial Sequence
  Description of Artificial Sequence: Synthetic oligonucleotide
uccaagauggcccauccca

SEQ ID NO: 3015213 - RNA, 19 nt, Artificial Sequence
  Description of Artificial Sequence: Synthetic oligonucleotide
ucauuuguaucugagauua

SEQ ID NO: 3015214 - RNA, 19 nt, Artificial Sequence
  Description of Artificial Sequence: Synthetic oligonucleotide
aaauuuucuguaaaagccu

SEQ ID NO: 3015215 - RNA, 19 nt, Artificial Sequence
  Description of Artificial Sequence: Synthetic oligonucleotide
uuuucuguaaaagccucgg

SEQ ID NO: 3015216 - RNA, 19 nt, Artificial Sequence
  Description of Artificial Sequence: Synthetic oligonucleotide
agaauggacaucuucuugu

SEQ ID NO: 3015217 - RNA, 19 nt, Artificial Sequence
  Description of Artificial Sequence: Synthetic oligonucleotide
aacuucagagcugugaaca

SEQ ID NO: 3015218 - RNA, 19 nt, Artificial Sequence
  Description of Artificial Sequence: Synthetic oligonucleotide
uucuguaaaagccucgguc

SEQ ID NO: 3015219 - RNA, 19 nt, Artificial Sequence
  Description of Artificial Sequence: Synthetic oligonucleotide
aacaaccuccaagauggcc

SEQ ID NO: 3015220 - RNA, 19 nt, Artificial Sequence
  Description of Artificial Sequence: Synthetic oligonucleotide
gacaaagccguacuccagg

SEQ ID NO: 3015221 - RNA, 19 nt, Artificial Sequence
  Description of Artificial Sequence: Synthetic oligonucleotide
aaaugucaaauuuucugua

SEQ ID NO: 3015222 - RNA, 19 nt, Artificial Sequence
  Description of Artificial Sequence: Synthetic oligonucleotide
cauaaauuucucagcuucc

SEQ ID NO: 3015223 - RNA, 19 nt, Artificial Sequence
  Description of Artificial Sequence: Synthetic oligonucleotide
gacagagcaacuucagagc

SEQ ID NO: 3015224 - RNA, 19 nt, Artificial Sequence
  Description of Artificial Sequence: Synthetic oligonucleotide
ugagucuccucgaugaagu

SEQ ID NO: 3015225 - RNA, 19 nt, Artificial Sequence
  Description of Artificial Sequence: Synthetic oligonucleotide
uaaccagcgucucuccugg

SEQ ID NO: 3015226 - RNA, 19 nt, Artificial Sequence
  Description of Artificial Sequence: Synthetic oligonucleotide
ugggccaugcccaagcuug

SEQ ID NO: 3015227 - RNA, 19 nt, Artificial Sequence
  Description of Artificial Sequence: Synthetic oligonucleotide
ucagagcauauccucuggg

SEQ ID NO: 3015228 - RNA, 19 nt, Artificial Sequence
  Description of Artificial Sequence: Synthetic oligonucleotide
ucugagauuacuucaccaa

SEQ ID NO: 3015229 - RNA, 19 nt, Artificial Sequence
  Description of Artificial Sequence: Synthetic oligonucleotide
uuuguaucugagauuacuu

SEQ ID NO: 3015230 - RNA, 19 nt, Artificial Sequence
  Description of Artificial Sequence: Synthetic oligonucleotide
gaagucagagcauauccuc

SEQ ID NO: 3015231 - RNA, 19 nt, Artificial Sequence
  Description of Artificial Sequence: Synthetic oligonucleotide
aaagccucgguccuucaga

SEQ ID NO: 3015232 - RNA, 19 nt, Artificial Sequence
  Description of Artificial Sequence: Synthetic oligonucleotide
uuugucugcugcugggagg

SEQ ID NO: 3015233 - RNA, 19 nt, Artificial Sequence
  Description of Artificial Sequence: Synthetic oligonucleotide
cugguuaucauaggggccg

SEQ ID NO: 3015234 - RNA, 19 nt, Artificial Sequence
  Description of Artificial Sequence: Synthetic oligonucleotide
ucagaaaccuugcgaagca

SEQ ID NO: 3015235 - RNA, 19 nt, Artificial Sequence
  Description of Artificial Sequence: Synthetic oligonucleotide
uauccucugggccaugccc

SEQ ID NO: 3015236 - RNA, 19 nt, Artificial Sequence
  Description of Artificial Sequence: Synthetic oligonucleotide
auccaaaugucaaauuuuc

SEQ ID NO: 3015237 - RNA, 19 nt, Artificial Sequence
  Description of Artificial Sequence: Synthetic oligonucleotide
ugucaaauuuucuguaaaa

SEQ ID NO: 3015238 - RNA, 19 nt, Artificial Sequence
  Description of Artificial Sequence: Synthetic oligonucleotide
uccagacagagcaacuuca

SEQ ID NO: 3015239 - RNA, 19 nt, Artificial Sequence
  Description of Artificial Sequence: Synthetic oligonucleotide
uuaaccagcgucucuccug

SEQ ID NO: 3015240 - RNA, 19 nt, Artificial Sequence
  Description of Artificial Sequence: Synthetic oligonucleotide
acuuaaccagcgucucucc

SEQ ID NO: 3015241 - RNA, 19 nt, Artificial Sequence
  Description of Artificial Sequence: Synthetic oligonucleotide
cugagauuacuucaccaag

SEQ ID NO: 3015242 - RNA, 19 nt, Artificial Sequence
  Description of Artificial Sequence: Synthetic oligonucleotide
ugcugggagguacuuaacc

SEQ ID NO: 3015243 - RNA, 19 nt, Artificial Sequence
  Description of Artificial Sequence: Synthetic oligonucleotide
aaaccuugcgaagcacagc

SEQ ID NO: 3015244 - RNA, 19 nt, Artificial Sequence
  Description of Artificial Sequence: Synthetic oligonucleotide
gugaggauugcagacagag

SEQ ID NO: 3015245 - RNA, 19 nt, Artificial Sequence
  Description of Artificial Sequence: Synthetic oligonucleotide
cuucucauuuguaucugag

SEQ ID NO: 3015246 - RNA, 19 nt, Artificial Sequence
  Description of Artificial Sequence: Synthetic oligonucleotide
auuuguaucugagauuacu

SEQ ID NO: 3015247 - RNA, 19 nt, Artificial Sequence
  Description of Artificial Sequence: Synthetic oligonucleotide
gugaacaaccuccaagaug

SEQ ID NO: 3015248 - RNA, 19 nt, Artificial Sequence
  Description of Artificial Sequence: Synthetic oligonucleotide
agauuacuucaccaaggag

SEQ ID NO: 3015249 - RNA, 19 nt, Artificial Sequence
  Description of Artificial Sequence: Synthetic oligonucleotide
aaaagccucgguccuucag

SEQ ID NO: 3015250 - RNA, 19 nt, Artificial Sequence
  Description of Artificial Sequence: Synthetic oligonucleotide
aagcuugucuucucauuug

SEQ ID NO: 3015251 - RNA, 19 nt, Artificial Sequence
  Description of Artificial Sequence: Synthetic oligonucleotide
acagagcaacuucagagcu

SEQ ID NO: 3015252 - RNA, 19 nt, Artificial Sequence
  Description of Artificial Sequence: Synthetic oligonucleotide
uccuucagaauggacaucu

SEQ ID NO: 3015253 - RNA, 19 nt, Artificial Sequence
  Description of Artificial Sequence: Synthetic oligonucleotide
uccucgaugaagucagagc

SEQ ID NO: 3015254 - RNA, 19 nt, Artificial Sequence
  Description of Artificial Sequence: Synthetic oligonucleotide
uucucauuuguaucugaga

SEQ ID NO: 3015255 - RNA, 19 nt, Artificial Sequence
  Description of Artificial Sequence: Synthetic oligonucleotide
ugggagguacuuaaccagc

SEQ ID NO: 3015256 - RNA, 19 nt, Artificial Sequence
  Description of Artificial Sequence: Synthetic oligonucleotide
gagauuacuucaccaagga

SEQ ID NO: 3015257 - RNA, 19 nt, Artificial Sequence
  Description of Artificial Sequence: Synthetic oligonucleotide
gaauggacaucuucuugug

SEQ ID NO: 3015258 - RNA, 19 nt, Artificial Sequence
  Description of Artificial Sequence: Synthetic oligonucleotide
uuuccaggacauaaauuuc

SEQ ID NO: 3015259 - RNA, 19 nt, Artificial Sequence
  Description of Artificial Sequence: Synthetic oligonucleotide
uugcagacagagacaaagc

SEQ ID NO: 3015260 - RNA, 19 nt, Artificial Sequence
  Description of Artificial Sequence: Synthetic oligonucleotide
gaaaccuugcgaagcacag

SEQ ID NO: 3015261 - RNA, 19 nt, Artificial Sequence
  Description of Artificial Sequence: Synthetic oligonucleotide
cucuccugggacaggaacg

SEQ ID NO: 3015262 - RNA, 19 nt, Artificial Sequence
  Description of Artificial Sequence: Synthetic oligonucleotide
aucugagauuacuucacca

SEQ ID NO: 3015263 - RNA, 19 nt, Artificial Sequence
  Description of Artificial Sequence: Synthetic oligonucleotide
uugucuucucauuuguauc

SEQ ID NO: 3015264 - RNA, 19 nt, Artificial Sequence
  Description of Artificial Sequence: Synthetic oligonucleotide
uacuucaccaaggagacuu

SEQ ID NO: 3015265 - RNA, 19 nt, Artificial Sequence
  Description of Artificial Sequence: Synthetic oligonucleotide
acagagacaaagccguacu

SEQ ID NO: 3015266 - RNA, 19 nt, Artificial Sequence
  Description of Artificial Sequence: Synthetic oligonucleotide
gagacaaagccguacucca

SEQ ID NO: 3015267 - RNA, 19 nt, Artificial Sequence
  Description of Artificial Sequence: Synthetic oligonucleotide
uccugggacaggaacgcag

SEQ ID NO: 3015268 - RNA, 19 nt, Artificial Sequence
  Description of Artificial Sequence: Synthetic oligonucleotide
cugggagguacuuaaccag

SEQ ID NO: 3015269 - RNA, 19 nt, Artificial Sequence
  Description of Artificial Sequence: Synthetic oligonucleotide
cugugaacaaccuccaaga

SEQ ID NO: 3015270 - RNA, 19 nt, Artificial Sequence
  Description of Artificial Sequence: Synthetic oligonucleotide
cuucuugugcgccuguuug

SEQ ID NO: 3015271 - RNA, 19 nt, Artificial Sequence
  Description of Artificial Sequence: Synthetic oligonucleotide
gagguacuuaaccagcguc

SEQ ID NO: 3015272 - RNA, 19 nt, Artificial Sequence
  Description of Artificial Sequence: Synthetic oligonucleotide
agucagaaaccuugcgaag

SEQ ID NO: 3015273 - RNA, 19 nt, Artificial Sequence
  Description of Artificial Sequence: Synthetic oligonucleotide
uccuucaagucagaaaccu

SEQ ID NO: 3015274 - RNA, 19 nt, Artificial Sequence
  Description of Artificial Sequence: Synthetic oligonucleotide
cagagcauauccucugggc

SEQ ID NO: 3015275 - RNA, 19 nt, Artificial Sequence
  Description of Artificial Sequence: Synthetic oligonucleotide
agucagagcauauccucug

SEQ ID NO: 3015276 - RNA, 19 nt, Artificial Sequence
  Description of Artificial Sequence: Synthetic oligonucleotide
aggcgugaggauugcagac

SEQ ID NO: 3015277 - RNA, 19 nt, Artificial Sequence
  Description of Artificial Sequence: Synthetic oligonucleotide
auuuucuguaaaagccucg

SEQ ID NO: 3015278 - RNA, 19 nt, Artificial Sequence
  Description of Artificial Sequence: Synthetic oligonucleotide
augucaaauuuucuguaaa

SEQ ID NO: 3015279 - RNA, 19 nt, Artificial Sequence
  Description of Artificial Sequence: Synthetic oligonucleotide
auaaauuucucagcuucca

SEQ ID NO: 3015280 - RNA, 19 nt, Artificial Sequence
  Description of Artificial Sequence: Synthetic oligonucleotide
caaaugucaaauuuucugu

SEQ ID NO: 3015281 - RNA, 19 nt, Artificial Sequence
  Description of Artificial Sequence: Synthetic oligonucleotide
cuucagaauggacaucuuc

SEQ ID NO: 3015282 - RNA, 19 nt, Artificial Sequence
  Description of Artificial Sequence: Synthetic oligonucleotide
gucagaaaccuugcgaagc

SEQ ID NO: 3015283 - RNA, 19 nt, Artificial Sequence
  Description of Artificial Sequence: Synthetic oligonucleotide
gcugugaacaaccuccaag

SEQ ID NO: 3015284 - RNA, 19 nt, Artificial Sequence
  Description of Artificial Sequence: Synthetic oligonucleotide
ucucuccugggacaggaac

SEQ ID NO: 3015285 - RNA, 19 nt, Artificial Sequence
  Description of Artificial Sequence: Synthetic oligonucleotide
uuucuguaaaagccucggu

SEQ ID NO: 3015286 - RNA, 19 nt, Artificial Sequence
  Description of Artificial Sequence: Synthetic oligonucleotide
ucuucucauuuguaucuga

SEQ ID NO: 3015287 - RNA, 19 nt, Artificial Sequence
  Description of Artificial Sequence: Synthetic oligonucleotide
agagcaacuucagagcugu

SEQ ID NO: 3015288 - RNA, 19 nt, Artificial Sequence
  Description of Artificial Sequence: Synthetic oligonucleotide
caagucagaaaccuugcga

SEQ ID NO: 3015289 - RNA, 19 nt, Artificial Sequence
  Description of Artificial Sequence: Synthetic oligonucleotide
uacuuaaccagcgucucuc

SEQ ID NO: 3015290 - RNA, 19 nt, Artificial Sequence
  Description of Artificial Sequence: Synthetic oligonucleotide
guuugucugcugcugggag

SEQ ID NO: 3015291 - RNA, 19 nt, Artificial Sequence
  Description of Artificial Sequence: Synthetic oligonucleotide
gagcauauccucugggcca

SEQ ID NO: 3015292 - RNA, 19 nt, Artificial Sequence
  Description of Artificial Sequence: Synthetic oligonucleotide
ucagaauggacaucuucuu

SEQ ID NO: 3015293 - RNA, 19 nt, Artificial Sequence
  Description of Artificial Sequence: Synthetic oligonucleotide
ugggacaggaacgcaggcg

SEQ ID NO: 3015294 - RNA, 19 nt, Artificial Sequence
  Description of Artificial Sequence: Synthetic oligonucleotide
ugaggauugcagacagaga

SEQ ID NO: 3015295 - RNA, 19 nt, Artificial Sequence
  Description of Artificial Sequence: Synthetic oligonucleotide
gucuccucgaugaagucag

SEQ ID NO: 3015296 - RNA, 19 nt, Artificial Sequence
  Description of Artificial Sequence: Synthetic oligonucleotide
ugugaacaaccuccaagau

SEQ ID NO: 3015297 - RNA, 19 nt, Artificial Sequence
  Description of Artificial Sequence: Synthetic oligonucleotide
agcuuccagacagagcaac

SEQ ID NO: 3015298 - RNA, 19 nt, Artificial Sequence
  Description of Artificial Sequence: Synthetic oligonucleotide
gaugaagucagagcauauc

SEQ ID NO: 3015299 - RNA, 19 nt, Artificial Sequence
  Description of Artificial Sequence: Synthetic oligonucleotide
cagaauggacaucuucuug

SEQ ID NO: 3015300 - RNA, 19 nt, Artificial Sequence
  Description of Artificial Sequence: Synthetic oligonucleotide
uggacaucuucuugugcgc

SEQ ID NO: 3015301 - RNA, 19 nt, Artificial Sequence
  Description of Artificial Sequence: Synthetic oligonucleotide
gucagagcauauccucugg

SEQ ID NO: 3015302 - RNA, 19 nt, Artificial Sequence
  Description of Artificial Sequence: Synthetic oligonucleotide
uugugcgccuguuugucug

SEQ ID NO: 3015303 - RNA, 19 nt, Artificial Sequence
  Description of Artificial Sequence: Synthetic oligonucleotide
gcagacagagacaaagccg

SEQ ID NO: 3015304 - RNA, 19 nt, Artificial Sequence
  Description of Artificial Sequence: Synthetic oligonucleotide
aagucagagcauauccucu

SEQ ID NO: 3015305 - RNA, 19 nt, Artificial Sequence
  Description of Artificial Sequence: Synthetic oligonucleotide
cuguuugucugcugcuggg

SEQ ID NO: 3015306 - RNA, 19 nt, Artificial Sequence
  Description of Artificial Sequence: Synthetic oligonucleotide
guaucugagauuacuucac

SEQ ID NO: 3015307 - RNA, 19 nt, Artificial Sequence
  Description of Artificial Sequence: Synthetic oligonucleotide
agcuugucuucucauuugu

SEQ ID NO: 3015308 - RNA, 19 nt, Artificial Sequence
  Description of Artificial Sequence: Synthetic oligonucleotide
aacgcaggcgugaggauug

SEQ ID NO: 3015309 - RNA, 19 nt, Artificial Sequence
  Description of Artificial Sequence: Synthetic oligonucleotide
cagccgcugguuaucauag

SEQ ID NO: 3015310 - RNA, 19 nt, Artificial Sequence
  Description of Artificial Sequence: Synthetic oligonucleotide
gacagagacaaagccguac

SEQ ID NO: 3015311 - RNA, 19 nt, Artificial Sequence
  Description of Artificial Sequence: Synthetic oligonucleotide
ucuccugggacaggaacgc

SEQ ID NO: 3015312 - RNA, 19 nt, Artificial Sequence
  Description of Artificial Sequence: Synthetic oligonucleotide
cuccuucaagucagaaacc

SEQ ID NO: 3015313 - RNA, 19 nt, Artificial Sequence
  Description of Artificial Sequence: Synthetic oligonucleotide
agcaacuucagagcuguga

SEQ ID NO: 3015314 - RNA, 19 nt, Artificial Sequence
  Description of Artificial Sequence: Synthetic oligonucleotide
aggaacgcaggcgugagga

SEQ ID NO: 3015315 - RNA, 19 nt, Artificial Sequence
  Description of Artificial Sequence: Synthetic oligonucleotide
uacuccaggagcagccgcu

SEQ ID NO: 3015316 - RNA, 19 nt, Artificial Sequence
  Description of Artificial Sequence: Synthetic oligonucleotide
cagacagagacaaagccgu

SEQ ID NO: 3015317 - RNA, 19 nt, Artificial Sequence
  Description of Artificial Sequence: Synthetic oligonucleotide
ucgaugaagucagagcaua

SEQ ID NO: 3015318 - RNA, 19 nt, Artificial Sequence
  Description of Artificial Sequence: Synthetic oligonucleotide
gccgcugguuaucauaggg

SEQ ID NO: 3015319 - RNA, 19 nt, Artificial Sequence
  Description of Artificial Sequence: Synthetic oligonucleotide
uucuugugcgccuguuugu

SEQ ID NO: 3015320 - RNA, 19 nt, Artificial Sequence
  Description of Artificial Sequence: Synthetic oligonucleotide
cucagcuuccagacagagc

SEQ ID NO: 3015321 - RNA, 19 nt, Artificial Sequence
  Description of Artificial Sequence: Synthetic oligonucleotide
ucugcugcugggagguacu

SEQ ID NO: 3015322 - RNA, 19 nt, Artificial Sequence
  Description of Artificial Sequence: Synthetic oligonucleotide
agguacuuaaccagcgucu

SEQ ID NO: 3015323 - RNA, 19 nt, Artificial Sequence
  Description of Artificial Sequence: Synthetic oligonucleotide
agaaaccuugcgaagcaca

SEQ ID NO: 3015324 - RNA, 19 nt, Artificial Sequence
  Description of Artificial Sequence: Synthetic oligonucleotide
ggacauaaauuucucagcu

SEQ ID NO: 3015325 - RNA, 19 nt, Artificial Sequence
  Description of Artificial Sequence: Synthetic oligonucleotide
aagcacagccugagucucc

SEQ ID NO: 3015326 - RNA, 19 nt, Artificial Sequence
  Description of Artificial Sequence: Synthetic oligonucleotide
gccucgguccuucagaaug

SEQ ID NO: 3015327 - RNA, 19 nt, Artificial Sequence
  Description of Artificial Sequence: Synthetic oligonucleotide
caucccauccaaaugucaa

SEQ ID NO: 3015328 - RNA, 19 nt, Artificial Sequence
  Description of Artificial Sequence: Synthetic oligonucleotide
caacuucagagcugugaac

SEQ ID NO: 3015329 - RNA, 19 nt, Artificial Sequence
  Description of Artificial Sequence: Synthetic oligonucleotide
uguuugucugcugcuggga

SEQ ID NO: 3015330 - RNA, 19 nt, Artificial Sequence
  Description of Artificial Sequence: Synthetic oligonucleotide
uugcgaagcacagccugag

SEQ ID NO: 3015331 - RNA, 19 nt, Artificial Sequence
  Description of Artificial Sequence: Synthetic oligonucleotide
aagccguacuccaggagca

SEQ ID NO: 3015332 - RNA, 19 nt, Artificial Sequence
  Description of Artificial Sequence: Synthetic oligonucleotide
cucugggccaugcccaagc

SEQ ID NO: 3015333 - RNA, 19 nt, Artificial Sequence
  Description of Artificial Sequence: Synthetic oligonucleotide
cugagucuccucgaugaag

SEQ ID NO: 3015334 - RNA, 19 nt, Artificial Sequence
  Description of Artificial Sequence: Synthetic oligonucleotide
cuucagagcugugaacaac

SEQ ID NO: 3015335 - RNA, 19 nt, Artificial Sequence
  Description of Artificial Sequence: Synthetic oligonucleotide
agucuccucgaugaaguca

SEQ ID NO: 3015336 - RNA, 19 nt, Artificial Sequence
  Description of Artificial Sequence: Synthetic oligonucleotide
ccucgaugaagucagagca

SEQ ID NO: 3015337 - RNA, 19 nt, Artificial Sequence
  Description of Artificial Sequence: Synthetic oligonucleotide
uggcccaucccauccaaau

SEQ ID NO: 3015338 - RNA, 19 nt, Artificial Sequence
  Description of Artificial Sequence: Synthetic oligonucleotide
acuucagagcugugaacaa

SEQ ID NO: 3015339 - RNA, 19 nt, Artificial Sequence
  Description of Artificial Sequence: Synthetic oligonucleotide
uucucagcuuccagacaga

SEQ ID NO: 3015340 - RNA, 19 nt, Artificial Sequence
  Description of Artificial Sequence: Synthetic oligonucleotide
ucuugugcgccuguuuguc

SEQ ID NO: 3015341 - RNA, 19 nt, Artificial Sequence
  Description of Artificial Sequence: Synthetic oligonucleotide
gaagcacagccugagucuc

SEQ ID NO: 3015342 - RNA, 19 nt, Artificial Sequence
  Description of Artificial Sequence: Synthetic oligonucleotide
cauuuguaucugagauuac

SEQ ID NO: 3015343 - RNA, 19 nt, Artificial Sequence
  Description of Artificial Sequence: Synthetic oligonucleotide
ugugcgccuguuugucugc

SEQ ID NO: 3015344 - RNA, 19 nt, Artificial Sequence
  Description of Artificial Sequence: Synthetic oligonucleotide
caagauggcccaucccauc

SEQ ID NO: 3015345 - RNA, 19 nt, Artificial Sequence
  Description of Artificial Sequence: Synthetic oligonucleotide
acagccugagucuccucga

SEQ ID NO: 3015346 - RNA, 19 nt, Artificial Sequence
  Description of Artificial Sequence: Synthetic oligonucleotide
guaaaagccucgguccuuc

SEQ ID NO: 3015347 - RNA, 19 nt, Artificial Sequence
  Description of Artificial Sequence: Synthetic oligonucleotide
cauauccucugggccaugc

SEQ ID NO: 3015348 - RNA, 19 nt, Artificial Sequence
  Description of Artificial Sequence: Synthetic oligonucleotide
gcugggagguacuuaacca

SEQ ID NO: 3015349 - RNA, 19 nt, Artificial Sequence
  Description of Artificial Sequence: Synthetic oligonucleotide
ucugggccaugcccaagcu

SEQ ID NO: 3015350 - RNA, 19 nt, Artificial Sequence
  Description of Artificial Sequence: Synthetic oligonucleotide
uaaaagccucgguccuuca

SEQ ID NO: 3015351 - RNA, 19 nt, Artificial Sequence
  Description of Artificial Sequence: Synthetic oligonucleotide
gggagguacuuaaccagcg

SEQ ID NO: 3015352 - RNA, 19 nt, Artificial Sequence
  Description of Artificial Sequence: Synthetic oligonucleotide
accagcgucucuccuggga

SEQ ID NO: 3015353 - RNA, 19 nt, Artificial Sequence
  Description of Artificial Sequence: Synthetic oligonucleotide
aaccagcgucucuccuggg

SEQ ID NO: 3015354 - RNA, 19 nt, Artificial Sequence
  Description of Artificial Sequence: Synthetic oligonucleotide
gcaacuucagagcugugaa

SEQ ID NO: 3015355 - RNA, 19 nt, Artificial Sequence
  Description of Artificial Sequence: Synthetic oligonucleotide
ccuguuugucugcugcugg

SEQ ID NO: 3015356 - RNA, 19 nt, Artificial Sequence
  Description of Artificial Sequence: Synthetic oligonucleotide
ucgguccuucagaauggac

SEQ ID NO: 3015357 - RNA, 19 nt, Artificial Sequence
  Description of Artificial Sequence: Synthetic oligonucleotide
gcgaagcacagccugaguc

SEQ ID NO: 3015358 - RNA, 19 nt, Artificial Sequence
  Description of Artificial Sequence: Synthetic oligonucleotide
gcgugaggauugcagacag

SEQ ID NO: 3015359 - RNA, 19 nt, Artificial Sequence
  Description of Artificial Sequence: Synthetic oligonucleotide
agacaaagccguacuccag

SEQ ID NO: 3015360 - RNA, 19 nt, Artificial Sequence
  Description of Artificial Sequence: Synthetic oligonucleotide
cuugcgaagcacagccuga

SEQ ID NO: 3015361 - RNA, 19 nt, Artificial Sequence
  Description of Artificial Sequence: Synthetic oligonucleotide
agccugagucuccucgaug

SEQ ID NO: 3015362 - RNA, 19 nt, Artificial Sequence
  Description of Artificial Sequence: Synthetic oligonucleotide
aggauugcagacagagaca

SEQ ID NO: 3015363 - RNA, 19 nt, Artificial Sequence
  Description of Artificial Sequence: Synthetic oligonucleotide
gucuucucauuuguaucug

SEQ ID NO: 3015364 - RNA, 19 nt, Artificial Sequence
  Description of Artificial Sequence: Synthetic oligonucleotide
cgcugguuaucauaggggc

SEQ ID NO: 3015365 - RNA, 19 nt, Artificial Sequence
  Description of Artificial Sequence: Synthetic oligonucleotide
ugcgaagcacagccugagu

SEQ ID NO: 3015366 - RNA, 19 nt, Artificial Sequence
  Description of Artificial Sequence: Synthetic oligonucleotide
ccgcugguuaucauagggg

SEQ ID NO: 3015367 - RNA, 19 nt, Artificial Sequence
  Description of Artificial Sequence: Synthetic oligonucleotide
gacauaaauuucucagcuu

SEQ ID NO: 3015368 - RNA, 19 nt, Artificial Sequence
  Description of Artificial Sequence: Synthetic oligonucleotide
acaggaacgcaggcgugag

SEQ ID NO: 3015369 - RNA, 19 nt, Artificial Sequence
  Description of Artificial Sequence: Synthetic oligonucleotide
agauggcccaucccaucca

SEQ ID NO: 3015370 - RNA, 19 nt, Artificial Sequence
  Description of Artificial Sequence: Synthetic oligonucleotide
gacaggaacgcaggcguga

SEQ ID NO: 3015371 - RNA, 19 nt, Artificial Sequence
  Description of Artificial Sequence: Synthetic oligonucleotide
ggauugcagacagagacaa

SEQ ID NO: 3015372 - RNA, 19 nt, Artificial Sequence
  Description of Artificial Sequence: Synthetic oligonucleotide
agcgucucuccugggacag

SEQ ID NO: 3015373 - RNA, 19 nt, Artificial Sequence
  Description of Artificial Sequence: Synthetic oligonucleotide
uguaaaagccucgguccuu

SEQ ID NO: 3015374 - RNA, 19 nt, Artificial Sequence
  Description of Artificial Sequence: Synthetic oligonucleotide
gccugagucuccucgauga

SEQ ID NO: 3015375 - RNA, 19 nt, Artificial Sequence
  Description of Artificial Sequence: Synthetic oligonucleotide
cuccaagauggcccauccc

SEQ ID NO: 3015376 - RNA, 19 nt, Artificial Sequence
  Description of Artificial Sequence: Synthetic oligonucleotide
agccgcugguuaucauagg

SEQ ID NO: 3015377 - RNA, 19 nt, Artificial Sequence
  Description of Artificial Sequence: Synthetic oligonucleotide
caggcgugaggauugcaga

SEQ ID NO: 3015378 - RNA, 19 nt, Artificial Sequence
  Description of Artificial Sequence: Synthetic oligonucleotide
aggagcagccgcugguuau

SEQ ID NO: 3015379 - RNA, 19 nt, Artificial Sequence
  Description of Artificial Sequence: Synthetic oligonucleotide
cagacagagcaacuucaga

SEQ ID NO: 3015380 - RNA, 19 nt, Artificial Sequence
  Description of Artificial Sequence: Synthetic oligonucleotide
ccagacagagcaacuucag

SEQ ID NO: 3015381 - RNA, 19 nt, Artificial Sequence
  Description of Artificial Sequence: Synthetic oligonucleotide
ccuugcgaagcacagccug

SEQ ID NO: 3015382 - RNA, 19 nt, Artificial Sequence
  Description of Artificial Sequence: Synthetic oligonucleotide
gauggcccaucccauccaa

SEQ ID NO: 3015383 - RNA, 19 nt, Artificial Sequence
  Description of Artificial Sequence: Synthetic oligonucleotide
gagucuccucgaugaaguc

SEQ ID NO: 3015384 - RNA, 19 nt, Artificial Sequence
  Description of Artificial Sequence: Synthetic oligonucleotide
gcugcugggagguacuuaa

SEQ ID NO: 3015385 - RNA, 19 nt, Artificial Sequence
  Description of Artificial Sequence: Synthetic oligonucleotide
ccucgguccuucagaaugg

SEQ ID NO: 3015386 - RNA, 19 nt, Artificial Sequence
  Description of Artificial Sequence: Synthetic oligonucleotide
gacaucuucuugugcgccu

SEQ ID NO: 3015387 - RNA, 19 nt, Artificial Sequence
  Description of Artificial Sequence: Synthetic oligonucleotide
caaccuccaagauggccca

SEQ ID NO: 3015388 - RNA, 19 nt, Artificial Sequence
  Description of Artificial Sequence: Synthetic oligonucleotide
gcaggcgugaggauugcag

SEQ ID NO: 3015389 - RNA, 19 nt, Artificial Sequence
  Description of Artificial Sequence: Synthetic oligonucleotide
auccucugggccaugccca

SEQ ID NO: 3015390 - RNA, 19 nt, Artificial Sequence
  Description of Artificial Sequence: Synthetic oligonucleotide
gguacuuaaccagcgucuc

SEQ ID NO: 3015391 - RNA, 19 nt, Artificial Sequence
  Description of Artificial Sequence: Synthetic oligonucleotide
cagaaaccuugcgaagcac

SEQ ID NO: 3015392 - RNA, 19 nt, Artificial Sequence
  Description of Artificial Sequence: Synthetic oligonucleotide
caggaacgcaggcgugagg

SEQ ID NO: 3015393 - RNA, 19 nt, Artificial Sequence
  Description of Artificial Sequence: Synthetic oligonucleotide
agcacagccugagucuccu

SEQ ID NO: 3015394 - RNA, 19 nt, Artificial Sequence
  Description of Artificial Sequence: Synthetic oligonucleotide
ccguacuccaggagcagcc

SEQ ID NO: 3015395 - RNA, 19 nt, Artificial Sequence
  Description of Artificial Sequence: Synthetic oligonucleotide
caagcuugucuucucauuu

SEQ ID NO: 3015396 - RNA, 19 nt, Artificial Sequence
  Description of Artificial Sequence: Synthetic oligonucleotide
ugcgccuguuugucugcug

SEQ ID NO: 3015397 - RNA, 19 nt, Artificial Sequence
  Description of Artificial Sequence: Synthetic oligonucleotide
gcgccuguuugucugcugc

SEQ ID NO: 3015398 - RNA, 19 nt, Artificial Sequence
  Description of Artificial Sequence: Synthetic oligonucleotide
agcauauccucugggccau

SEQ ID NO: 3015399 - RNA, 19 nt, Artificial Sequence
  Description of Artificial Sequence: Synthetic oligonucleotide
ggcccaucccauccaaaug

SEQ ID NO: 3015400 - RNA, 19 nt, Artificial Sequence
  Description of Artificial Sequence: Synthetic oligonucleotide
ggacaucuucuugugcgcc

SEQ ID NO: 3015401 - RNA, 19 nt, Artificial Sequence
  Description of Artificial Sequence: Synthetic oligonucleotide
uuacuucaccaaggagacu

SEQ ID NO: 3015402 - RNA, 19 nt, Artificial Sequence
  Description of Artificial Sequence: Synthetic oligonucleotide
gagcugugaacaaccucca

SEQ ID NO: 3015403 - RNA, 19 nt, Artificial Sequence
  Description of Artificial Sequence: Synthetic oligonucleotide
agcugugaacaaccuccaa

SEQ ID NO: 3015404 - RNA, 19 nt, Artificial Sequence
  Description of Artificial Sequence: Synthetic oligonucleotide
gaacaaccuccaagauggc

SEQ ID NO: 3015405 - RNA, 19 nt, Artificial Sequence
  Description of Artificial Sequence: Synthetic oligonucleotide
gguccuucagaauggacau

SEQ ID NO: 3015406 - RNA, 19 nt, Artificial Sequence
  Description of Artificial Sequence: Synthetic oligonucleotide
ugcccaagcuugucuucuc

SEQ ID NO: 3015407 - RNA, 19 nt, Artificial Sequence
  Description of Artificial Sequence: Synthetic oligonucleotide
cucauuuguaucugagauu

SEQ ID NO: 3015408 - RNA, 19 nt, Artificial Sequence
  Description of Artificial Sequence: Synthetic oligonucleotide
cuguaaaagccucgguccu

SEQ ID NO: 3015409 - RNA, 19 nt, Artificial Sequence
  Description of Artificial Sequence: Synthetic oligonucleotide
cugcugggagguacuuaac

SEQ ID NO: 3015410 - RNA, 19 nt, Artificial Sequence
  Description of Artificial Sequence: Synthetic oligonucleotide
ugguuaucauaggggccgu

SEQ ID NO: 3015411 - RNA, 19 nt, Artificial Sequence
  Description of Artificial Sequence: Synthetic oligonucleotide
ccaggacauaaauuucuca

SEQ ID NO: 3015412 - RNA, 19 nt, Artificial Sequence
  Description of Artificial Sequence: Synthetic oligonucleotide
uccucugggccaugcccaa

SEQ ID NO: 3015413 - RNA, 19 nt, Artificial Sequence
  Description of Artificial Sequence: Synthetic oligonucleotide
guacuuaaccagcgucucu

SEQ ID NO: 3015414 - RNA, 19 nt, Artificial Sequence
  Description of Artificial Sequence: Synthetic oligonucleotide
gcccaucccauccaaaugu

SEQ ID NO: 3015415 - RNA, 19 nt, Artificial Sequence
  Description of Artificial Sequence: Synthetic oligonucleotide
ccagcgucucuccugggac

SEQ ID NO: 3015416 - RNA, 19 nt, Artificial Sequence
  Description of Artificial Sequence: Synthetic oligonucleotide
acgcaggcgugaggauugc

SEQ ID NO: 3015417 - RNA, 19 nt, Artificial Sequence
  Description of Artificial Sequence: Synthetic oligonucleotide
cuuaaccagcgucucuccu

SEQ ID NO: 3015418 - RNA, 19 nt, Artificial Sequence
  Description of Artificial Sequence: Synthetic oligonucleotide
agccguacuccaggagcag

SEQ ID NO: 3015419 - RNA, 19 nt, Artificial Sequence
  Description of Artificial Sequence: Synthetic oligonucleotide
gauugcagacagagacaaa

SEQ ID NO: 3015420 - RNA, 19 nt, Artificial Sequence
  Description of Artificial Sequence: Synthetic oligonucleotide
uccccuccuucaagucaga

SEQ ID NO: 3015421 - RNA, 19 nt, Artificial Sequence
  Description of Artificial Sequence: Synthetic oligonucleotide
cucgaugaagucagagcau

SEQ ID NO: 3015422 - RNA, 19 nt, Artificial Sequence
  Description of Artificial Sequence: Synthetic oligonucleotide
ugcugcugggagguacuua

SEQ ID NO: 3015423 - RNA, 19 nt, Artificial Sequence
  Description of Artificial Sequence: Synthetic oligonucleotide
cagcgucucuccugggaca

SEQ ID NO: 3015424 - RNA, 19 nt, Artificial Sequence
  Description of Artificial Sequence: Synthetic oligonucleotide
ccauccaaaugucaaauuu

SEQ ID NO: 3015425 - RNA, 19 nt, Artificial Sequence
  Description of Artificial Sequence: Synthetic oligonucleotide
gagcagccgcugguuauca

SEQ ID NO: 3015426 - RNA, 19 nt, Artificial Sequence
  Description of Artificial Sequence: Synthetic oligonucleotide
ggcgugaggauugcagaca

SEQ ID NO: 3015427 - RNA, 19 nt, Artificial Sequence
  Description of Artificial Sequence: Synthetic oligonucleotide
gccuguuugucugcugcug

SEQ ID NO: 3015428 - RNA, 19 nt, Artificial Sequence
  Description of Artificial Sequence: Synthetic oligonucleotide
gaacgcaggcgugaggauu

SEQ ID NO: 3015429 - RNA, 19 nt, Artificial Sequence
  Description of Artificial Sequence: Synthetic oligonucleotide
cuugugcgccuguuugucu

SEQ ID NO: 3015430 - RNA, 19 nt, Artificial Sequence
  Description of Artificial Sequence: Synthetic oligonucleotide
cccaucccauccaaauguc

SEQ ID NO: 3015431 - RNA, 19 nt, Artificial Sequence
  Description of Artificial Sequence: Synthetic oligonucleotide
gcagccgcugguuaucaua

SEQ ID NO: 3015432 - RNA, 19 nt, Artificial Sequence
  Description of Artificial Sequence: Synthetic oligonucleotide
ggagguacuuaaccagcgu

SEQ ID NO: 3015433 - RNA, 19 nt, Artificial Sequence
  Description of Artificial Sequence: Synthetic oligonucleotide
aucuucuugugcgccuguu

SEQ ID NO: 3015434 - RNA, 19 nt, Artificial Sequence
  Description of Artificial Sequence: Synthetic oligonucleotide
agccucgguccuucagaau

SEQ ID NO: 3015435 - RNA, 19 nt, Artificial Sequence
  Description of Artificial Sequence: Synthetic oligonucleotide
agcagccgcugguuaucau

SEQ ID NO: 3015436 - RNA, 19 nt, Artificial Sequence
  Description of Artificial Sequence: Synthetic oligonucleotide
acuucaccaaggagacuuu

SEQ ID NO: 3015437 - RNA, 19 nt, Artificial Sequence
  Description of Artificial Sequence: Synthetic oligonucleotide
accuugcgaagcacagccu

SEQ ID NO: 3015438 - RNA, 19 nt, Artificial Sequence
  Description of Artificial Sequence: Synthetic oligonucleotide
ccaucccauccaaauguca

SEQ ID NO: 3015439 - RNA, 19 nt, Artificial Sequence
  Description of Artificial Sequence: Synthetic oligonucleotide
guccuucagaauggacauc

SEQ ID NO: 3015440 - RNA, 19 nt, Artificial Sequence
  Description of Artificial Sequence: Synthetic oligonucleotide
gagcaacuucagagcugug

SEQ ID NO: 3015441 - RNA, 19 nt, Artificial Sequence
  Description of Artificial Sequence: Synthetic oligonucleotide
cuuccagacagagcaacuu

SEQ ID NO: 3015442 - RNA, 19 nt, Artificial Sequence
  Description of Artificial Sequence: Synthetic oligonucleotide
gcccaagcuugucuucuca

SEQ ID NO: 3015443 - RNA, 19 nt, Artificial Sequence
  Description of Artificial Sequence: Synthetic oligonucleotide
aaccuccaagauggcccau

SEQ ID NO: 3015444 - RNA, 19 nt, Artificial Sequence
  Description of Artificial Sequence: Synthetic oligonucleotide
cucgguccuucagaaugga

SEQ ID NO: 3015445 - RNA, 19 nt, Artificial Sequence
  Description of Artificial Sequence: Synthetic oligonucleotide
gccguacuccaggagcagc

SEQ ID NO: 3015446 - RNA, 19 nt, Artificial Sequence
  Description of Artificial Sequence: Synthetic oligonucleotide
ggacaggaacgcaggcgug

SEQ ID NO: 3015447 - RNA, 19 nt, Artificial Sequence
  Description of Artificial Sequence: Synthetic oligonucleotide
ggagcagccgcugguuauc

SEQ ID NO: 3015448 - RNA, 19 nt, Artificial Sequence
  Description of Artificial Sequence: Synthetic oligonucleotide
cccuccuucaagucagaaa

SEQ ID NO: 3015449 - RNA, 19 nt, Artificial Sequence
  Description of Artificial Sequence: Synthetic oligonucleotide
gccaugcccaagcuugucu

SEQ ID NO: 3015450 - RNA, 19 nt, Artificial Sequence
  Description of Artificial Sequence: Synthetic oligonucleotide
auggcccaucccauccaaa

SEQ ID NO: 3015451 - RNA, 19 nt, Artificial Sequence
  Description of Artificial Sequence: Synthetic oligonucleotide
cgaagcacagccugagucu

SEQ ID NO: 3015452 - RNA, 19 nt, Artificial Sequence
  Description of Artificial Sequence: Synthetic oligonucleotide
ugucugcugcugggaggua

SEQ ID NO: 3015453 - RNA, 19 nt, Artificial Sequence
  Description of Artificial Sequence: Synthetic oligonucleotide
cuucaccaaggagacuuuu

SEQ ID NO: 3015454 - RNA, 19 nt, Artificial Sequence
  Description of Artificial Sequence: Synthetic oligonucleotide
gcuuccagacagagcaacu

SEQ ID NO: 3015455 - RNA, 19 nt, Artificial Sequence
  Description of Artificial Sequence: Synthetic oligonucleotide
ccaagauggcccaucccau

SEQ ID NO: 3015456 - RNA, 19 nt, Artificial Sequence
  Description of Artificial Sequence: Synthetic oligonucleotide
gucucuccugggacaggaa

SEQ ID NO: 3015457 - RNA, 19 nt, Artificial Sequence
  Description of Artificial Sequence: Synthetic oligonucleotide
ccaagcuugucuucucauu

SEQ ID NO: 3015458 - RNA, 19 nt, Artificial Sequence
  Description of Artificial Sequence: Synthetic oligonucleotide
ccuucaagucagaaaccuu

SEQ ID NO: 3015459 - RNA, 19 nt, Artificial Sequence
  Description of Artificial Sequence: Synthetic oligonucleotide
gcgucucuccugggacagg

SEQ ID NO: 3015460 - RNA, 19 nt, Artificial Sequence
  Description of Artificial Sequence: Synthetic oligonucleotide
ggccaugcccaagcuuguc

SEQ ID NO: 3015461 - RNA, 19 nt, Artificial Sequence
  Description of Artificial Sequence: Synthetic oligonucleotide
ccugagucuccucgaugaa

SEQ ID NO: 3015462 - RNA, 19 nt, Artificial Sequence
  Description of Artificial Sequence: Synthetic oligonucleotide
gguuaucauaggggccgua

SEQ ID NO: 3015463 - RNA, 19 nt, Artificial Sequence
  Description of Artificial Sequence: Synthetic oligonucleotide
ggaacgcaggcgugaggau

SEQ ID NO: 3015464 - RNA, 19 nt, Artificial Sequence
  Description of Artificial Sequence: Synthetic oligonucleotide
cagccugagucuccucgau

SEQ ID NO: 3015465 - RNA, 19 nt, Artificial Sequence
  Description of Artificial Sequence: Synthetic oligonucleotide
cugggccaugcccaagcuu

SEQ ID NO: 3015466 - RNA, 19 nt, Artificial Sequence
  Description of Artificial Sequence: Synthetic oligonucleotide
ccaugcccaagcuugucuu

SEQ ID NO: 3015467 - RNA, 19 nt, Artificial Sequence
  Description of Artificial Sequence: Synthetic oligonucleotide
cgucucuccugggacagga

SEQ ID NO: 3015468 - RNA, 19 nt, Artificial Sequence
  Description of Artificial Sequence: Synthetic oligonucleotide
gcauauccucugggccaug

SEQ ID NO: 3015469 - RNA, 19 nt, Artificial Sequence
  Description of Artificial Sequence: Synthetic oligonucleotide
cccaagcuugucuucucau

SEQ ID NO: 3015470 - RNA, 19 nt, Artificial Sequence
  Description of Artificial Sequence: Synthetic oligonucleotide
cgugaggauugcagacaga

SEQ ID NO: 3015471 - RNA, 19 nt, Artificial Sequence
  Description of Artificial Sequence: Synthetic oligonucleotide
cccauccaaaugucaaauu

SEQ ID NO: 3015472 - RNA, 19 nt, Artificial Sequence
  Description of Artificial Sequence: Synthetic oligonucleotide
ccucugggccaugcccaag

SEQ ID NO: 3015473 - RNA, 19 nt, Artificial Sequence
  Description of Artificial Sequence: Synthetic oligonucleotide
gugcgccuguuugucugcu

SEQ ID NO: 3015474 - RNA, 19 nt, Artificial Sequence
  Description of Artificial Sequence: Synthetic oligonucleotide
cgaugaagucagagcauau

SEQ ID NO: 3015475 - RNA, 19 nt, Artificial Sequence
  Description of Artificial Sequence: Synthetic oligonucleotide
ccuucagaauggacaucuu

SEQ ID NO: 3015476 - RNA, 19 nt, Artificial Sequence
  Description of Artificial Sequence: Synthetic oligonucleotide
gggccaugcccaagcuugu

SEQ ID NO: 3015477 - RNA, 19 nt, Artificial Sequence
  Description of Artificial Sequence: Synthetic oligonucleotide
ccccuccuucaagucagaa

SEQ ID NO: 3015478 - RNA, 19 nt, Artificial Sequence
  Description of Artificial Sequence: Synthetic oligonucleotide
cugcugcugggagguacuu

SEQ ID NO: 3015479 - RNA, 19 nt, Artificial Sequence
  Description of Artificial Sequence: Synthetic oligonucleotide
cgccuguuugucugcugcu

SEQ ID NO: 3015480 - RNA, 19 nt, Artificial Sequence
  Description of Artificial Sequence: Synthetic oligonucleotide
cgcaggcgugaggauugca

SEQ ID NO: 3015481 - RNA, 19 nt, Artificial Sequence
  Description of Artificial Sequence: Synthetic oligonucleotide
uuucagaagacccucaaag

SEQ ID NO: 3015482 - RNA, 19 nt, Artificial Sequence
  Description of Artificial Sequence: Synthetic oligonucleotide
acuguuuuaggcuucuucc

SEQ ID NO: 3015483 - RNA, 19 nt, Artificial Sequence
  Description of Artificial Sequence: Synthetic oligonucleotide
ucaaaggugaaauggaagc

SEQ ID NO: 3015484 - RNA, 19 nt, Artificial Sequence
  Description of Artificial Sequence: Synthetic oligonucleotide
aaauggaagcauguguugc

SEQ ID NO: 3015485 - RNA, 19 nt, Artificial Sequence
  Description of Artificial Sequence: Synthetic oligonucleotide
guaaaugacuguuuuaggc

SEQ ID NO: 3015486 - RNA, 19 nt, Artificial Sequence
  Description of Artificial Sequence: Synthetic oligonucleotide
uugcagucagcucacaccg

SEQ ID NO: 3015487 - RNA, 19 nt, Artificial Sequence
  Description of Artificial Sequence: Synthetic oligonucleotide
uacauuguagucuuucacc

SEQ ID NO: 3015488 - RNA, 19 nt, Artificial Sequence
  Description of Artificial Sequence: Synthetic oligonucleotide
auagaguugaguuccuuuc

SEQ ID NO: 3015489 - RNA, 19 nt, Artificial Sequence
  Description of Artificial Sequence: Synthetic oligonucleotide
ucuuccaggccacauagag

SEQ ID NO: 3015490 - RNA, 19 nt, Artificial Sequence
  Description of Artificial Sequence: Synthetic oligonucleotide
caucucauugaacugagcc

SEQ ID NO: 3015491 - RNA, 19 nt, Artificial Sequence
  Description of Artificial Sequence: Synthetic oligonucleotide
gauggguucauuucagaag

SEQ ID NO: 3015492 - RNA, 19 nt, Artificial Sequence
  Description of Artificial Sequence: Synthetic oligonucleotide
uucagaagacccucaaagg

SEQ ID NO: 3015493 - RNA, 19 nt, Artificial Sequence
  Description of Artificial Sequence: Synthetic oligonucleotide
ucagaagacccucaaaggu

SEQ ID NO: 3015494 - RNA, 19 nt, Artificial Sequence
  Description of Artificial Sequence: Synthetic oligonucleotide
aacugagccaacuggcagg

SEQ ID NO: 3015495 - RNA, 19 nt, Artificial Sequence
  Description of Artificial Sequence: Synthetic oligonucleotide
gaagugguguccuucuugg

SEQ ID NO: 3015496 - RNA, 19 nt, Artificial Sequence
  Description of Artificial Sequence: Synthetic oligonucleotide
uguuuuaggcuucuuccag

SEQ ID NO: 3015497 - RNA, 19 nt, Artificial Sequence
  Description of Artificial Sequence: Synthetic oligonucleotide
uuaggcuucuuccaggcca

SEQ ID NO: 3015498 - RNA, 19 nt, Artificial Sequence
  Description of Artificial Sequence: Synthetic oligonucleotide
aguaaaugacuguuuuagg

SEQ ID NO: 3015499 - RNA, 19 nt, Artificial Sequence
  Description of Artificial Sequence: Synthetic oligonucleotide
guaagcuugaugcuccugg

SEQ ID NO: 3015500 - RNA, 19 nt, Artificial Sequence
  Description of Artificial Sequence: Synthetic oligonucleotide
ugaaauggaagcauguguu

SEQ ID NO: 3015501 - RNA, 19 nt, Artificial Sequence
  Description of Artificial Sequence: Synthetic oligonucleotide
auuguagucuuucaccucu

SEQ ID NO: 3015502 - RNA, 19 nt, Artificial Sequence
  Description of Artificial Sequence: Synthetic oligonucleotide
uagucuuucaccucugcca

SEQ ID NO: 3015503 - RNA, 19 nt, Artificial Sequence
  Description of Artificial Sequence: Synthetic oligonucleotide
caguaaaugacuguuuuag

SEQ ID NO: 3015504 - RNA, 19 nt, Artificial Sequence
  Description of Artificial Sequence: Synthetic oligonucleotide
aauggaagcauguguugca

SEQ ID NO: 3015505 - RNA, 19 nt, Artificial Sequence
  Description of Artificial Sequence: Synthetic oligonucleotide
ucugccagccaguaaauga

SEQ ID NO: 3015506 - RNA, 19 nt, Artificial Sequence
  Description of Artificial Sequence: Synthetic oligonucleotide
aaaugacuguuuuaggcuu

SEQ ID NO: 3015507 - RNA, 19 nt, Artificial Sequence
  Description of Artificial Sequence: Synthetic oligonucleotide
uuuuaggcuucuuccaggc

SEQ ID NO: 3015508 - RNA, 19 nt, Artificial Sequence
  Description of Artificial Sequence: Synthetic oligonucleotide
gaggcagaucucuacauug

SEQ ID NO: 3015509 - RNA, 19 nt, Artificial Sequence
  Description of Artificial Sequence: Synthetic oligonucleotide
agugguguccuucuuggag

SEQ ID NO: 3015510 - RNA, 19 nt, Artificial Sequence
  Description of Artificial Sequence: Synthetic oligonucleotide
cucaaaggugaaauggaag

SEQ ID NO: 3015511 - RNA, 19 nt, Artificial Sequence
  Description of Artificial Sequence: Synthetic oligonucleotide
gaaauggaagcauguguug

SEQ ID NO: 3015512 - RNA, 19 nt, Artificial Sequence
  Description of Artificial Sequence: Synthetic oligonucleotide
uccugggagaggcagaucu

SEQ ID NO: 3015513 - RNA, 19 nt, Artificial Sequence
  Description of Artificial Sequence: Synthetic oligonucleotide
agucuuucaccucugccag

SEQ ID NO: 3015514 - RNA, 19 nt, Artificial Sequence
  Description of Artificial Sequence: Synthetic oligonucleotide
agaucucuacauuguaguc

SEQ ID NO: 3015515 - RNA, 19 nt, Artificial Sequence
  Description of Artificial Sequence: Synthetic oligonucleotide
guuuuaggcuucuuccagg

SEQ ID NO: 3015516 - RNA, 19 nt, Artificial Sequence
  Description of Artificial Sequence: Synthetic oligonucleotide
ucuacauuguagucuuuca

SEQ ID NO: 3015517 - RNA, 19 nt, Artificial Sequence
  Description of Artificial Sequence: Synthetic oligonucleotide
uuccaggccacauagaguu

SEQ ID NO: 3015518 - RNA, 19 nt, Artificial Sequence
  Description of Artificial Sequence: Synthetic oligonucleotide
uguugccugcaucucauug

SEQ ID NO: 3015519 - RNA, 19 nt, Artificial Sequence
  Description of Artificial Sequence: Synthetic oligonucleotide
ccagcgguaagcuugaugc

SEQ ID NO: 3015520 - RNA, 19 nt, Artificial Sequence
  Description of Artificial Sequence: Synthetic oligonucleotide
guugcagucagcucacacc

SEQ ID NO: 3015521 - RNA, 19 nt, Artificial Sequence
  Description of Artificial Sequence: Synthetic oligonucleotide
ucucauugaacugagccaa

SEQ ID NO: 3015522 - RNA, 19 nt, Artificial Sequence
  Description of Artificial Sequence: Synthetic oligonucleotide
cuucuuccaggccacauag

SEQ ID NO: 3015523 - RNA, 19 nt, Artificial Sequence
  Description of Artificial Sequence: Synthetic oligonucleotide
ugcaucucauugaacugag

SEQ ID NO: 3015524 - RNA, 19 nt, Artificial Sequence
  Description of Artificial Sequence: Synthetic oligonucleotide
acccucaaaggugaaaugg

SEQ ID NO: 3015525 - RNA, 19 nt, Artificial Sequence
  Description of Artificial Sequence: Synthetic oligonucleotide
uguggagcagaggaagugg

SEQ ID NO: 3015526 - RNA, 19 nt, Artificial Sequence
  Description of Artificial Sequence: Synthetic oligonucleotide
aucucauugaacugagcca

SEQ ID NO: 3015527 - RNA, 19 nt, Artificial Sequence
  Description of Artificial Sequence: Synthetic oligonucleotide
gaacugagccaacuggcag

SEQ ID NO: 3015528 - RNA, 19 nt, Artificial Sequence
  Description of Artificial Sequence: Synthetic oligonucleotide
uuucaccucugccagccag

SEQ ID NO: 3015529 - RNA, 19 nt, Artificial Sequence
  Description of Artificial Sequence: Synthetic oligonucleotide
ugaacugagccaacuggca

SEQ ID NO: 3015530 - RNA, 19 nt, Artificial Sequence
  Description of Artificial Sequence: Synthetic oligonucleotide
aaaggugaaauggaagcau

SEQ ID NO: 3015531 - RNA, 19 nt, Artificial Sequence
  Description of Artificial Sequence: Synthetic oligonucleotide
ugagccaacuggcaggccu

SEQ ID NO: 3015532 - RNA, 19 nt, Artificial Sequence
  Description of Artificial Sequence: Synthetic oligonucleotide
uggaguguugccugcaucu

SEQ ID NO: 3015533 - RNA, 19 nt, Artificial Sequence
  Description of Artificial Sequence: Synthetic oligonucleotide
cagaagacccucaaaggug

SEQ ID NO: 3015534 - RNA, 19 nt, Artificial Sequence
  Description of Artificial Sequence: Synthetic oligonucleotide
accgguguggagcagagga

SEQ ID NO: 3015535 - RNA, 19 nt, Artificial Sequence
  Description of Artificial Sequence: Synthetic oligonucleotide
aaugacuguuuuaggcuuc

SEQ ID NO: 3015536 - RNA, 19 nt, Artificial Sequence
  Description of Artificial Sequence: Synthetic oligonucleotide
uuucaagccaaggaccagc

SEQ ID NO: 3015537 - RNA, 19 nt, Artificial Sequence
  Description of Artificial Sequence: Synthetic oligonucleotide
cuacauuguagucuuucac

SEQ ID NO: 3015538 - RNA, 19 nt, Artificial Sequence
  Description of Artificial Sequence: Synthetic oligonucleotide
ucuuucaccucugccagcc

SEQ ID NO: 3015539 - RNA, 19 nt, Artificial Sequence
  Description of Artificial Sequence: Synthetic oligonucleotide
agaguugaguuccuuucug

SEQ ID NO: 3015540 - RNA, 19 nt, Artificial Sequence
  Description of Artificial Sequence: Synthetic oligonucleotide
uagaguugaguuccuuucu

SEQ ID NO: 3015541 - RNA, 19 nt, Artificial Sequence
  Description of Artificial Sequence: Synthetic oligonucleotide
uucccuggauggaggaugg

SEQ ID NO: 3015542 - RNA, 19 nt, Artificial Sequence
  Description of Artificial Sequence: Synthetic oligonucleotide
gacuguuuuaggcuucuuc

SEQ ID NO: 3015543 - RNA, 19 nt, Artificial Sequence
  Description of Artificial Sequence: Synthetic oligonucleotide
uguagucuuucaccucugc

SEQ ID NO: 3015544 - RNA, 19 nt, Artificial Sequence
  Description of Artificial Sequence: Synthetic oligonucleotide
aaggugaaauggaagcaug

SEQ ID NO: 3015545 - RNA, 19 nt, Artificial Sequence
  Description of Artificial Sequence: Synthetic oligonucleotide
ucauuucagaagacccuca

SEQ ID NO: 3015546 - RNA, 19 nt, Artificial Sequence
  Description of Artificial Sequence: Synthetic oligonucleotide
uucauuucagaagacccuc

SEQ ID NO: 3015547 - RNA, 19 nt, Artificial Sequence
  Description of Artificial Sequence: Synthetic oligonucleotide
uucaagccaaggaccagca

SEQ ID NO: 3015548 - RNA, 19 nt, Artificial Sequence
  Description of Artificial Sequence: Synthetic oligonucleotide
guagucuuucaccucugcc

SEQ ID NO: 3015549 - RNA, 19 nt, Artificial Sequence
  Description of Artificial Sequence: Synthetic oligonucleotide
uguugcagucagcucacac

SEQ ID NO: 3015550 - RNA, 19 nt, Artificial Sequence
  Description of Artificial Sequence: Synthetic oligonucleotide
aucucuacauuguagucuu

SEQ ID NO: 3015551 - RNA, 19 nt, Artificial Sequence
  Description of Artificial Sequence: Synthetic oligonucleotide
agcagaggaaguggugucc

SEQ ID NO: 3015552 - RNA, 19 nt, Artificial Sequence
  Description of Artificial Sequence: Synthetic oligonucleotide
ucagcucacaccggugugg

SEQ ID NO: 3015553 - RNA, 19 nt, Artificial Sequence
  Description of Artificial Sequence: Synthetic oligonucleotide
uuuaggcuucuuccaggcc

SEQ ID NO: 3015554 - RNA, 19 nt, Artificial Sequence
  Description of Artificial Sequence: Synthetic oligonucleotide
uguguugcagucagcucac

SEQ ID NO: 3015555 - RNA, 19 nt, Artificial Sequence
  Description of Artificial Sequence: Synthetic oligonucleotide
cuucuuggaguguugccug

SEQ ID NO: 3015556 - RNA, 19 nt, Artificial Sequence
  Description of Artificial Sequence: Synthetic oligonucleotide
cugccagccaguaaaugac

SEQ ID NO: 3015557 - RNA, 19 nt, Artificial Sequence
  Description of Artificial Sequence: Synthetic oligonucleotide
cauugaacugagccaacug

SEQ ID NO: 3015558 - RNA, 19 nt, Artificial Sequence
  Description of Artificial Sequence: Synthetic oligonucleotide
agcgguaagcuugaugcuc

SEQ ID NO: 3015559 - RNA, 19 nt, Artificial Sequence
  Description of Artificial Sequence: Synthetic oligonucleotide
aguugaguuccuuucugaa

SEQ ID NO: 3015560 - RNA, 19 nt, Artificial Sequence
  Description of Artificial Sequence: Synthetic oligonucleotide
cuugaugcuccugggagag

SEQ ID NO: 3015561 - RNA, 19 nt, Artificial Sequence
  Description of Artificial Sequence: Synthetic oligonucleotide
aagcuugaugcuccuggga

SEQ ID NO: 3015562 - RNA, 19 nt, Artificial Sequence
  Description of Artificial Sequence: Synthetic oligonucleotide
agaggaagugguguccuuc

SEQ ID NO: 3015563 - RNA, 19 nt, Artificial Sequence
  Description of Artificial Sequence: Synthetic oligonucleotide
acuggcaggccucuuccag

SEQ ID NO: 3015564 - RNA, 19 nt, Artificial Sequence
  Description of Artificial Sequence: Synthetic oligonucleotide
agucagcucacaccggugu

SEQ ID NO: 3015565 - RNA, 19 nt, Artificial Sequence
  Description of Artificial Sequence: Synthetic oligonucleotide
ucuuccagcccuagccagc

SEQ ID NO: 3015566 - RNA, 19 nt, Artificial Sequence
  Description of Artificial Sequence: Synthetic oligonucleotide
uugccugcaucucauugaa

SEQ ID NO: 3015567 - RNA, 19 nt, Artificial Sequence
  Description of Artificial Sequence: Synthetic oligonucleotide
gaguugaguuccuuucuga

SEQ ID NO: 3015568 - RNA, 19 nt, Artificial Sequence
  Description of Artificial Sequence: Synthetic oligonucleotide
auuucagaagacccucaaa

SEQ ID NO: 3015569 - RNA, 19 nt, Artificial Sequence
  Description of Artificial Sequence: Synthetic oligonucleotide
uuuucaagccaaggaccag

SEQ ID NO: 3015570 - RNA, 19 nt, Artificial Sequence
  Description of Artificial Sequence: Synthetic oligonucleotide
agaagacccucaaagguga

SEQ ID NO: 3015571 - RNA, 19 nt, Artificial Sequence
  Description of Artificial Sequence: Synthetic oligonucleotide
guugccugcaucucauuga

SEQ ID NO: 3015572 - RNA, 19 nt, Artificial Sequence
  Description of Artificial Sequence: Synthetic oligonucleotide
gugaaauggaagcaugugu

SEQ ID NO: 3015573 - RNA, 19 nt, Artificial Sequence
  Description of Artificial Sequence: Synthetic oligonucleotide
uccuucuuggaguguugcc

SEQ ID NO: 3015574 - RNA, 19 nt, Artificial Sequence
  Description of Artificial Sequence: Synthetic oligonucleotide
ccacauagaguugaguucc

SEQ ID NO: 3015575 - RNA, 19 nt, Artificial Sequence
  Description of Artificial Sequence: Synthetic oligonucleotide
gaucucuacauuguagucu

SEQ ID NO: 3015576 - RNA, 19 nt, Artificial Sequence
  Description of Artificial Sequence: Synthetic oligonucleotide
caacuggcaggccucuucc

SEQ ID NO: 3015577 - RNA, 19 nt, Artificial Sequence
  Description of Artificial Sequence: Synthetic oligonucleotide
uccagcccuagccagcggu

SEQ ID NO: 3015578 - RNA, 19 nt, Artificial Sequence
  Description of Artificial Sequence: Synthetic oligonucleotide
ugcagucagcucacaccgg

SEQ ID NO: 3015579 - RNA, 19 nt, Artificial Sequence
  Description of Artificial Sequence: Synthetic oligonucleotide
uuguagucuuucaccucug

SEQ ID NO: 3015580 - RNA, 19 nt, Artificial Sequence
  Description of Artificial Sequence: Synthetic oligonucleotide
agacccucaaaggugaaau

SEQ ID NO: 3015581 - RNA, 19 nt, Artificial Sequence
  Description of Artificial Sequence: Synthetic oligonucleotide
aagccaaggaccagcacau

SEQ ID NO: 3015582 - RNA, 19 nt, Artificial Sequence
  Description of Artificial Sequence: Synthetic oligonucleotide
gacccucaaaggugaaaug

SEQ ID NO: 3015583 - RNA, 19 nt, Artificial Sequence
  Description of Artificial Sequence: Synthetic oligonucleotide
ugguguccuucuuggagug

SEQ ID NO: 3015584 - RNA, 19 nt, Artificial Sequence
  Description of Artificial Sequence: Synthetic oligonucleotide
cucuacauuguagucuuuc

SEQ ID NO: 3015585 - RNA, 19 nt, Artificial Sequence
  Description of Artificial Sequence: Synthetic oligonucleotide
cucuuccagcccuagccag

SEQ ID NO: 3015586 - RNA, 19 nt, Artificial Sequence
  Description of Artificial Sequence: Synthetic oligonucleotide
cauuguagucuuucaccuc

SEQ ID NO: 3015587 - RNA, 19 nt, Artificial Sequence
  Description of Artificial Sequence: Synthetic oligonucleotide
uguccuucuuggaguguug

SEQ ID NO: 3015588 - RNA, 19 nt, Artificial Sequence
  Description of Artificial Sequence: Synthetic oligonucleotide
uaggcuucuuccaggccac

SEQ ID NO: 3015589 - RNA, 19 nt, Artificial Sequence
  Description of Artificial Sequence: Synthetic oligonucleotide
ggaagcauguguugcaguc

SEQ ID NO: 3015590 - RNA, 19 nt, Artificial Sequence
  Description of Artificial Sequence: Synthetic oligonucleotide
uucuuggaguguugccugc

SEQ ID NO: 3015591 - RNA, 19 nt, Artificial Sequence
  Description of Artificial Sequence: Synthetic oligonucleotide
cuguuuuaggcuucuucca

SEQ ID NO: 3015592 - RNA, 19 nt, Artificial Sequence
  Description of Artificial Sequence: Synthetic oligonucleotide
aaggaccagcacauccuuc

SEQ ID NO: 3015593 - RNA, 19 nt, Artificial Sequence
  Description of Artificial Sequence: Synthetic oligonucleotide
auggaagcauguguugcag

SEQ ID NO: 3015594 - RNA, 19 nt, Artificial Sequence
  Description of Artificial Sequence: Synthetic oligonucleotide
ggaagugguguccuucuug

SEQ ID NO: 3015595 - RNA, 19 nt, Artificial Sequence
  Description of Artificial Sequence: Synthetic oligonucleotide
uucaccucugccagccagu

SEQ ID NO: 3015596 - RNA, 19 nt, Artificial Sequence
  Description of Artificial Sequence: Synthetic oligonucleotide
uuggaguguugccugcauc

SEQ ID NO: 3015597 - RNA, 19 nt, Artificial Sequence
  Description of Artificial Sequence: Synthetic oligonucleotide
auggaggauggguucauuu

SEQ ID NO: 3015598 - RNA, 19 nt, Artificial Sequence
  Description of Artificial Sequence: Synthetic oligonucleotide
gccucuuccagcccuagcc

SEQ ID NO: 3015599 - RNA, 19 nt, Artificial Sequence
  Description of Artificial Sequence: Synthetic oligonucleotide
ugccagccaguaaaugacu

SEQ ID NO: 3015600 - RNA, 19 nt, Artificial Sequence
  Description of Artificial Sequence: Synthetic oligonucleotide
gaguguugccugcaucuca

SEQ ID NO: 3015601 - RNA, 19 nt, Artificial Sequence
  Description of Artificial Sequence: Synthetic oligonucleotide
aagugguguccuucuugga

SEQ ID NO: 3015602 - RNA, 19 nt, Artificial Sequence
  Description of Artificial Sequence: Synthetic oligonucleotide
ggaggauggguucauuuca

SEQ ID NO: 3015603 - RNA, 19 nt, Artificial Sequence
  Description of Artificial Sequence: Synthetic oligonucleotide
uggaagcauguguugcagu

SEQ ID NO: 3015604 - RNA, 19 nt, Artificial Sequence
  Description of Artificial Sequence: Synthetic oligonucleotide
caaaggugaaauggaagca

SEQ ID NO: 3015605 - RNA, 19 nt, Artificial Sequence
  Description of Artificial Sequence: Synthetic oligonucleotide
cagaucucuacauuguagu

SEQ ID NO: 3015606 - RNA, 19 nt, Artificial Sequence
  Description of Artificial Sequence: Synthetic oligonucleotide
gccaaggaccagcacaucc

SEQ ID NO: 3015607 - RNA, 19 nt, Artificial Sequence
  Description of Artificial Sequence: Synthetic oligonucleotide
uggguucauuucagaagac

SEQ ID NO: 3015608 - RNA, 19 nt, Artificial Sequence
  Description of Artificial Sequence: Synthetic oligonucleotide
cuuccagcccuagccagcg

SEQ ID NO: 3015609 - RNA, 19 nt, Artificial Sequence
  Description of Artificial Sequence: Synthetic oligonucleotide
ggugaaauggaagcaugug

SEQ ID NO: 3015610 - RNA, 19 nt, Artificial Sequence
  Description of Artificial Sequence: Synthetic oligonucleotide
cauccuucccuggauggag

SEQ ID NO: 3015611 - RNA, 19 nt, Artificial Sequence
  Description of Artificial Sequence: Synthetic oligonucleotide
agaggcagaucucuacauu

SEQ ID NO: 3015612 - RNA, 19 nt, Artificial Sequence
  Description of Artificial Sequence: Synthetic oligonucleotide
uggauggaggauggguuca

SEQ ID NO: 3015613 - RNA, 19 nt, Artificial Sequence
  Description of Artificial Sequence: Synthetic oligonucleotide
gcagaucucuacauuguag

SEQ ID NO: 3015614 - RNA, 19 nt, Artificial Sequence
  Description of Artificial Sequence: Synthetic oligonucleotide
aacuggcaggccucuucca

SEQ ID NO: 3015615 - RNA, 19 nt, Artificial Sequence
  Description of Artificial Sequence: Synthetic oligonucleotide
ucaagccaaggaccagcac

SEQ ID NO: 3015616 - RNA, 19 nt, Artificial Sequence
  Description of Artificial Sequence: Synthetic oligonucleotide
gagcagaggaagugguguc

SEQ ID NO: 3015617 - RNA, 19 nt, Artificial Sequence
  Description of Artificial Sequence: Synthetic oligonucleotide
aggauggguucauuucaga

SEQ ID NO: 3015618 - RNA, 19 nt, Artificial Sequence
  Description of Artificial Sequence: Synthetic oligonucleotide
uucuuccaggccacauaga

SEQ ID NO: 3015619 - RNA, 19 nt, Artificial Sequence
  Description of Artificial Sequence: Synthetic oligonucleotide
agcacauccuucccuggau

SEQ ID NO: 3015620 - RNA, 19 nt, Artificial Sequence
  Description of Artificial Sequence: Synthetic oligonucleotide
cucauugaacugagccaac

SEQ ID NO: 3015621 - RNA, 19 nt, Artificial Sequence
  Description of Artificial Sequence: Synthetic oligonucleotide
aggugaaauggaagcaugu

SEQ ID NO: 3015622 - RNA, 19 nt, Artificial Sequence
  Description of Artificial Sequence: Synthetic oligonucleotide
uccuucccuggauggagga

SEQ ID NO: 3015623 - RNA, 19 nt, Artificial Sequence
  Description of Artificial Sequence: Synthetic oligonucleotide
uagccagcgguaagcuuga

SEQ ID NO: 3015624 - RNA, 19 nt, Artificial Sequence
  Description of Artificial Sequence: Synthetic oligonucleotide
gccacauagaguugaguuc

SEQ ID NO: 3015625 - RNA, 19 nt, Artificial Sequence
  Description of Artificial Sequence: Synthetic oligonucleotide
ggguucauuucagaagacc

SEQ ID NO: 3015626 - RNA, 19 nt, Artificial Sequence
  Description of Artificial Sequence: Synthetic oligonucleotide
ucuuggaguguugccugca

SEQ ID NO: 3015627 - RNA, 19 nt, Artificial Sequence
  Description of Artificial Sequence: Synthetic oligonucleotide
aagacccucaaaggugaaa

SEQ ID NO: 3015628 - RNA, 19 nt, Artificial Sequence
  Description of Artificial Sequence: Synthetic oligonucleotide
ggauggguucauuucagaa

SEQ ID NO: 3015629 - RNA, 19 nt, Artificial Sequence
  Description of Artificial Sequence: Synthetic oligonucleotide
uccaggccacauagaguug

SEQ ID NO: 3015630 - RNA, 19 nt, Artificial Sequence
  Description of Artificial Sequence: Synthetic oligonucleotide
guguggagcagaggaagug

SEQ ID NO: 3015631 - RNA, 19 nt, Artificial Sequence
  Description of Artificial Sequence: Synthetic oligonucleotide
cauuucagaagacccucaa

SEQ ID NO: 3015632 - RNA, 19 nt, Artificial Sequence
  Description of Artificial Sequence: Synthetic oligonucleotide
gucagcucacaccggugug

SEQ ID NO: 3015633 - RNA, 19 nt, Artificial Sequence
  Description of Artificial Sequence: Synthetic oligonucleotide
gccugcaucucauugaacu

SEQ ID NO: 3015634 - RNA, 19 nt, Artificial Sequence
  Description of Artificial Sequence: Synthetic oligonucleotide
cucacaccgguguggagca

SEQ ID NO: 3015635 - RNA, 19 nt, Artificial Sequence
  Description of Artificial Sequence: Synthetic oligonucleotide
agcccuagccagcgguaag

SEQ ID NO: 3015636 - RNA, 19 nt, Artificial Sequence
  Description of Artificial Sequence: Synthetic oligonucleotide
gcucacaccgguguggagc

SEQ ID NO: 3015637 - RNA, 19 nt, Artificial Sequence
  Description of Artificial Sequence: Synthetic oligonucleotide
augcuccugggagaggcag

SEQ ID NO: 3015638 - RNA, 19 nt, Artificial Sequence
  Description of Artificial Sequence: Synthetic oligonucleotide
guccuucuuggaguguugc

SEQ ID NO: 3015639 - RNA, 19 nt, Artificial Sequence
  Description of Artificial Sequence: Synthetic oligonucleotide
gaggaagugguguccuucu

SEQ ID NO: 3015640 - RNA, 19 nt, Artificial Sequence
  Description of Artificial Sequence: Synthetic oligonucleotide
aguguugccugcaucucau

SEQ ID NO: 3015641 - RNA, 19 nt, Artificial Sequence
  Description of Artificial Sequence: Synthetic oligonucleotide
guucauuucagaagacccu

SEQ ID NO: 3015642 - RNA, 19 nt, Artificial Sequence
  Description of Artificial Sequence: Synthetic oligonucleotide
augacuguuuuaggcuucu

SEQ ID NO: 3015643 - RNA, 19 nt, Artificial Sequence
  Description of Artificial Sequence: Synthetic oligonucleotide
auccuucccuggauggagg

SEQ ID NO: 3015644 - RNA, 19 nt, Artificial Sequence
  Description of Artificial Sequence: Synthetic oligonucleotide
ugggagaggcagaucucua

SEQ ID NO: 3015645 - RNA, 19 nt, Artificial Sequence
  Description of Artificial Sequence: Synthetic oligonucleotide
gugguguccuucuuggagu

SEQ ID NO: 3015646 - RNA, 19 nt, Artificial Sequence
  Description of Artificial Sequence: Synthetic oligonucleotide
caggccacauagaguugag

SEQ ID NO: 3015647 - RNA, 19 nt, Artificial Sequence
  Description of Artificial Sequence: Synthetic oligonucleotide
gucuuucaccucugccagc

SEQ ID NO: 3015648 - RNA, 19 nt, Artificial Sequence
  Description of Artificial Sequence: Synthetic oligonucleotide
uuccagcccuagccagcgg

SEQ ID NO: 3015649 - RNA, 19 nt, Artificial Sequence
  Description of Artificial Sequence: Synthetic oligonucleotide
cagucagcucacaccggug

SEQ ID NO: 3015650 - RNA, 19 nt, Artificial Sequence
  Description of Artificial Sequence: Synthetic oligonucleotide
cauagaguugaguuccuuu

SEQ ID NO: 3015651 - RNA, 19 nt, Artificial Sequence
  Description of Artificial Sequence: Synthetic oligonucleotide
ugccugcaucucauugaac

SEQ ID NO: 3015652 - RNA, 19 nt, Artificial Sequence
  Description of Artificial Sequence: Synthetic oligonucleotide
acauccuucccuggaugga

SEQ ID NO: 3015653 - RNA, 19 nt, Artificial Sequence
  Description of Artificial Sequence: Synthetic oligonucleotide
gcgguaagcuugaugcucc

SEQ ID NO: 3015654 - RNA, 19 nt, Artificial Sequence
  Description of Artificial Sequence: Synthetic oligonucleotide
ggccacauagaguugaguu

SEQ ID NO: 3015655 - RNA, 19 nt, Artificial Sequence
  Description of Artificial Sequence: Synthetic oligonucleotide
agcucacaccgguguggag

SEQ ID NO: 3015656 - RNA, 19 nt, Artificial Sequence
  Description of Artificial Sequence: Synthetic oligonucleotide
gcuugaugcuccugggaga

SEQ ID NO: 3015657 - RNA, 19 nt, Artificial Sequence
  Description of Artificial Sequence: Synthetic oligonucleotide
ucucuacauuguagucuuu

SEQ ID NO: 3015658 - RNA, 19 nt, Artificial Sequence
  Description of Artificial Sequence: Synthetic oligonucleotide
cccucaaaggugaaaugga

SEQ ID NO: 3015659 - RNA, 19 nt, Artificial Sequence
  Description of Artificial Sequence: Synthetic oligonucleotide
acaccgguguggagcagag

SEQ ID NO: 3015660 - RNA, 19 nt, Artificial Sequence
  Description of Artificial Sequence: Synthetic oligonucleotide
gagccaacuggcaggccuc

SEQ ID NO: 3015661 - RNA, 19 nt, Artificial Sequence
  Description of Artificial Sequence: Synthetic oligonucleotide
cuuccaggccacauagagu

SEQ ID NO: 3015662 - RNA, 19 nt, Artificial Sequence
  Description of Artificial Sequence: Synthetic oligonucleotide
acauagaguugaguuccuu

SEQ ID NO: 3015663 - RNA, 19 nt, Artificial Sequence
  Description of Artificial Sequence: Synthetic oligonucleotide
aggaagugguguccuucuu

SEQ ID NO: 3015664 - RNA, 19 nt, Artificial Sequence
  Description of Artificial Sequence: Synthetic oligonucleotide
ucaccucugccagccagua

SEQ ID NO: 3015665 - RNA, 19 nt, Artificial Sequence
  Description of Artificial Sequence: Synthetic oligonucleotide
gccagcgguaagcuugaug

SEQ ID NO: 3015666 - RNA, 19 nt, Artificial Sequence
  Description of Artificial Sequence: Synthetic oligonucleotide
gccagccaguaaaugacug

SEQ ID NO: 3015667 - RNA, 19 nt, Artificial Sequence
  Description of Artificial Sequence: Synthetic oligonucleotide
ccucaaaggugaaauggaa

SEQ ID NO: 3015668 - RNA, 19 nt, Artificial Sequence
  Description of Artificial Sequence: Synthetic oligonucleotide
ucccuggauggaggauggg

SEQ ID NO: 3015669 - RNA, 19 nt, Artificial Sequence
  Description of Artificial Sequence: Synthetic oligonucleotide
ggagcagaggaaguggugu

SEQ ID NO: 3015670 - RNA, 19 nt, Artificial Sequence
  Description of Artificial Sequence: Synthetic oligonucleotide
gguaagcuugaugcuccug

SEQ ID NO: 3015671 - RNA, 19 nt, Artificial Sequence
  Description of Artificial Sequence: Synthetic oligonucleotide
ccagcacauccuucccugg

SEQ ID NO: 3015672 - RNA, 19 nt, Artificial Sequence
  Description of Artificial Sequence: Synthetic oligonucleotide
agccaguaaaugacuguuu

SEQ ID NO: 3015673 - RNA, 19 nt, Artificial Sequence
  Description of Artificial Sequence: Synthetic oligonucleotide
agccaaggaccagcacauc

SEQ ID NO: 3015674 - RNA, 19 nt, Artificial Sequence
  Description of Artificial Sequence: Synthetic oligonucleotide
ggcagaucucuacauugua

SEQ ID NO: 3015675 - RNA, 19 nt, Artificial Sequence
  Description of Artificial Sequence: Synthetic oligonucleotide
ccaacuggcaggccucuuc

SEQ ID NO: 3015676 - RNA, 19 nt, Artificial Sequence
  Description of Artificial Sequence: Synthetic oligonucleotide
gccaguaaaugacuguuuu

SEQ ID NO: 3015677 - RNA, 19 nt, Artificial Sequence
  Description of Artificial Sequence: Synthetic oligonucleotide
cacaccgguguggagcaga

SEQ ID NO: 3015678 - RNA, 19 nt, Artificial Sequence
  Description of Artificial Sequence: Synthetic oligonucleotide
gaagacccucaaaggugaa

SEQ ID NO: 3015679 - RNA, 19 nt, Artificial Sequence
  Description of Artificial Sequence: Synthetic oligonucleotide
gcuucuuccaggccacaua

SEQ ID NO: 3015680 - RNA, 19 nt, Artificial Sequence
  Description of Artificial Sequence: Synthetic oligonucleotide
cugggagaggcagaucucu

SEQ ID NO: 3015681 - RNA, 19 nt, Artificial Sequence
  Description of Artificial Sequence: Synthetic oligonucleotide
guggagcagaggaaguggu

SEQ ID NO: 3015682 - RNA, 19 nt, Artificial Sequence
  Description of Artificial Sequence: Synthetic oligonucleotide
gcagucagcucacaccggu

SEQ ID NO: 3015683 - RNA, 19 nt, Artificial Sequence
  Description of Artificial Sequence: Synthetic oligonucleotide
gcccuagccagcgguaagc

SEQ ID NO: 3015684 - RNA, 19 nt, Artificial Sequence
  Description of Artificial Sequence: Synthetic oligonucleotide
ucacaccgguguggagcag

SEQ ID NO: 3015685 - RNA, 19 nt, Artificial Sequence
  Description of Artificial Sequence: Synthetic oligonucleotide
cgguguggagcagaggaag

SEQ ID NO: 3015686 - RNA, 19 nt, Artificial Sequence
  Description of Artificial Sequence: Synthetic oligonucleotide
ggaguguugccugcaucuc

SEQ ID NO: 3015687 - RNA, 19 nt, Artificial Sequence
  Description of Artificial Sequence: Synthetic oligonucleotide
agccaacuggcaggccucu

SEQ ID NO: 3015688 - RNA, 19 nt, Artificial Sequence
  Description of Artificial Sequence: Synthetic oligonucleotide
ugacuguuuuaggcuucuu

SEQ ID NO: 3015689 - RNA, 19 nt, Artificial Sequence
  Description of Artificial Sequence: Synthetic oligonucleotide
cacauagaguugaguuccu

SEQ ID NO: 3015690 - RNA, 19 nt, Artificial Sequence
  Description of Artificial Sequence: Synthetic oligonucleotide
caccgguguggagcagagg

SEQ ID NO: 3015691 - RNA, 19 nt, Artificial Sequence
  Description of Artificial Sequence: Synthetic oligonucleotide
gcaucucauugaacugagc

SEQ ID NO: 3015692 - RNA, 19 nt, Artificial Sequence
  Description of Artificial Sequence: Synthetic oligonucleotide
cagccaguaaaugacuguu

SEQ ID NO: 3015693 - RNA, 19 nt, Artificial Sequence
  Description of Artificial Sequence: Synthetic oligonucleotide
cagcucacaccggugugga

SEQ ID NO: 3015694 - RNA, 19 nt, Artificial Sequence
  Description of Artificial Sequence: Synthetic oligonucleotide
aggccucuuccagcccuag

SEQ ID NO: 3015695 - RNA, 19 nt, Artificial Sequence
  Description of Artificial Sequence: Synthetic oligonucleotide
ccugggagaggcagaucuc

SEQ ID NO: 3015696 - RNA, 19 nt, Artificial Sequence
  Description of Artificial Sequence: Synthetic oligonucleotide
ccaggccacauagaguuga

SEQ ID NO: 3015697 - RNA, 19 nt, Artificial Sequence
  Description of Artificial Sequence: Synthetic oligonucleotide
cugagccaacuggcaggcc

SEQ ID NO: 3015698 - RNA, 19 nt, Artificial Sequence
  Description of Artificial Sequence: Synthetic oligonucleotide
ggccucuuccagcccuagc

SEQ ID NO: 3015699 - RNA, 19 nt, Artificial Sequence
  Description of Artificial Sequence: Synthetic oligonucleotide
cuuggaguguugccugcau

SEQ ID NO: 3015700 - RNA, 19 nt, Artificial Sequence
  Description of Artificial Sequence: Synthetic oligonucleotide
ccucuuccagcccuagcca

SEQ ID NO: 3015701 - RNA, 19 nt, Artificial Sequence
  Description of Artificial Sequence: Synthetic oligonucleotide
ccuucuuggaguguugccu

SEQ ID NO: 3015702 - RNA, 19 nt, Artificial Sequence
  Description of Artificial Sequence: Synthetic oligonucleotide
caaggaccagcacauccuu

SEQ ID NO: 3015703 - RNA, 19 nt, Artificial Sequence
  Description of Artificial Sequence: Synthetic oligonucleotide
guguccuucuuggaguguu

SEQ ID NO: 3015704 - RNA, 19 nt, Artificial Sequence
  Description of Artificial Sequence: Synthetic oligonucleotide
cagcgguaagcuugaugcu

SEQ ID NO: 3015705 - RNA, 19 nt, Artificial Sequence
  Description of Artificial Sequence: Synthetic oligonucleotide
ggcaggccucuuccagccc

SEQ ID NO: 3015706 - RNA, 19 nt, Artificial Sequence
  Description of Artificial Sequence: Synthetic oligonucleotide
gcaggccucuuccagcccu

SEQ ID NO: 3015707 - RNA, 19 nt, Artificial Sequence
  Description of Artificial Sequence: Synthetic oligonucleotide
ccuggauggaggauggguu

SEQ ID NO: 3015708 - RNA, 19 nt, Artificial Sequence
  Description of Artificial Sequence: Synthetic oligonucleotide
ccagccaguaaaugacugu

SEQ ID NO: 3015709 - RNA, 19 nt, Artificial Sequence
  Description of Artificial Sequence: Synthetic oligonucleotide
gguguggagcagaggaagu

SEQ ID NO: 3015710 - RNA, 19 nt, Artificial Sequence
  Description of Artificial Sequence: Synthetic oligonucleotide
gauggaggauggguucauu

SEQ ID NO: 3015711 - RNA, 19 nt, Artificial Sequence
  Description of Artificial Sequence: Synthetic oligonucleotide
gcagaggaagugguguccu

SEQ ID NO: 3015712 - RNA, 19 nt, Artificial Sequence
  Description of Artificial Sequence: Synthetic oligonucleotide
cuccugggagaggcagauc

SEQ ID NO: 3015713 - RNA, 19 nt, Artificial Sequence
  Description of Artificial Sequence: Synthetic oligonucleotide
aggcuucuuccaggccaca

SEQ ID NO: 3015714 - RNA, 19 nt, Artificial Sequence
  Description of Artificial Sequence: Synthetic oligonucleotide
cagcccuagccagcgguaa

SEQ ID NO: 3015715 - RNA, 19 nt, Artificial Sequence
  Description of Artificial Sequence: Synthetic oligonucleotide
guguugcagucagcucaca

SEQ ID NO: 3015716 - RNA, 19 nt, Artificial Sequence
  Description of Artificial Sequence: Synthetic oligonucleotide
caggccucuuccagcccua

SEQ ID NO: 3015717 - RNA, 19 nt, Artificial Sequence
  Description of Artificial Sequence: Synthetic oligonucleotide
ccgguguggagcagaggaa

SEQ ID NO: 3015718 - RNA, 19 nt, Artificial Sequence
  Description of Artificial Sequence: Synthetic oligonucleotide
cagaggaagugguguccuu

SEQ ID NO: 3015719 - RNA, 19 nt, Artificial Sequence
  Description of Artificial Sequence: Synthetic oligonucleotide
cccuggauggaggaugggu

SEQ ID NO: 3015720 - RNA, 19 nt, Artificial Sequence
  Description of Artificial Sequence: Synthetic oligonucleotide
ccagcccuagccagcggua

SEQ ID NO: 3015721 - RNA, 19 nt, Artificial Sequence
  Description of Artificial Sequence: Synthetic oligonucleotide
ggauggaggauggguucau

SEQ ID NO: 3015722 - RNA, 19 nt, Artificial Sequence
  Description of Artificial Sequence: Synthetic oligonucleotide
gguguccuucuuggagugu

SEQ ID NO: 3015723 - RNA, 19 nt, Artificial Sequence
  Description of Artificial Sequence: Synthetic oligonucleotide
agccagcgguaagcuugau

SEQ ID NO: 3015724 - RNA, 19 nt, Artificial Sequence
  Description of Artificial Sequence: Synthetic oligonucleotide
ccucugccagccaguaaau

SEQ ID NO: 3015725 - RNA, 19 nt, Artificial Sequence
  Description of Artificial Sequence: Synthetic oligonucleotide
ccuagccagcgguaagcuu

SEQ ID NO: 3015726 - RNA, 19 nt, Artificial Sequence
  Description of Artificial Sequence: Synthetic oligonucleotide
cccuagccagcgguaagcu

SEQ ID NO: 3015727 - RNA, 19 nt, Artificial Sequence
  Description of Artificial Sequence: Synthetic oligonucleotide
ccuucccuggauggaggau

SEQ ID NO: 3015728 - RNA, 19 nt, Artificial Sequence
  Description of Artificial Sequence: Synthetic oligonucleotide
acaaaauuaaccuuguugg

SEQ ID NO: 3015729 - RNA, 19 nt, Artificial Sequence
  Description of Artificial Sequence: Synthetic oligonucleotide
aacaaaauuaaccuuguug

SEQ ID NO: 3015730 - RNA, 19 nt, Artificial Sequence
  Description of Artificial Sequence: Synthetic oligonucleotide
uaccacaucaaacugaugg

SEQ ID NO: 3015731 - RNA, 19 nt, Artificial Sequence
  Description of Artificial Sequence: Synthetic oligonucleotide
aaaauuaaccuuguuggcc

SEQ ID NO: 3015732 - RNA, 19 nt, Artificial Sequence
  Description of Artificial Sequence: Synthetic oligonucleotide
agaacuggaaauccgaugc

SEQ ID NO: 3015733 - RNA, 19 nt, Artificial Sequence
  Description of Artificial Sequence: Synthetic oligonucleotide
  modified_base (6)..(6): a, c, u, g, unknown or other
aaaagngccaccauuaaag

SEQ ID NO: 3015734 - RNA, 19 nt, Artificial Sequence
  Description of Artificial Sequence: Synthetic oligonucleotide
  modified_base (7)..(7): a, c, u, g, unknown or other
caugguncagccuaaaggc

SEQ ID NO: 3015735 - RNA, 19 nt, Artificial Sequence
  Description of Artificial Sequence: Synthetic oligonucleotide
ugcaacaaaauuaaccuug

SEQ ID NO: 3015736 - RNA, 19 nt, Artificial Sequence
  Description of Artificial Sequence: Synthetic oligonucleotide
gacaauugcauauggagcc

SEQ ID NO: 3015737 - RNA, 19 nt, Artificial Sequence
  Description of Artificial Sequence: Synthetic oligonucleotide
ucauuuaccacaucaaacu

SEQ ID NO: 3015738 - RNA, 19 nt, Artificial Sequence
  Description of Artificial Sequence: Synthetic oligonucleotide
aaauuaaccuuguuggccu

SEQ ID NO: 3015739 - RNA, 19 nt, Artificial Sequence
  Description of Artificial Sequence: Synthetic oligonucleotide
uguaguuguagcauaggag

SEQ ID NO: 3015740 - RNA, 19 nt, Artificial Sequence
  Description of Artificial Sequence: Synthetic oligonucleotide
  modified_base (5)..(5): a, c, u, g, unknown or other
aaagngccaccauuaaagg

SEQ ID NO: 3015741 - RNA, 19 nt, Artificial Sequence
  Description of Artificial Sequence: Synthetic oligonucleotide
guaguuguagcauaggagc

SEQ ID NO: 3015742 - RNA, 19 nt, Artificial Sequence
  Description of Artificial Sequence: Synthetic oligonucleotide
uucauacacaucaauagcu

SEQ ID NO: 3015743 - RNA, 19 nt, Artificial Sequence
  Description of Artificial Sequence: Synthetic oligonucleotide
  modified_base (8)..(8): a, c, u, g, unknown or other
acaugguncagccuaaagg

SEQ ID NO: 3015744 - RNA, 19 nt, Artificial Sequence
  Description of Artificial Sequence: Synthetic oligonucleotide
cuuguuggccucuacaugg

SEQ ID NO: 3015745 - RNA, 19 nt, Artificial Sequence
  Description of Artificial Sequence: Synthetic oligonucleotide
  modified_base (4)..(4): a, c, u, g, unknown or other
aagngccaccauuaaaggg

SEQ ID NO: 3015746 - RNA, 19 nt, Artificial Sequence
  Description of Artificial Sequence: Synthetic oligonucleotide
uuuaccaccaggcggaucu

SEQ ID NO: 3015747 - RNA, 19 nt, Artificial Sequence
  Description of Artificial Sequence: Synthetic oligonucleotide
cagacaauugcauauggag

SEQ ID NO: 3015748 - RNA, 19 nt, Artificial Sequence
  Description of Artificial Sequence: Synthetic oligonucleotide
aaacugauggcgauaugcc

SEQ ID NO: 3015749 - RNA, 19 nt, Artificial Sequence
  Description of Artificial Sequence: Synthetic oligonucleotide
  modified_base (3)..(3): a, c, u, g, unknown or other
agngccaccauuaaagggg

SEQ ID NO: 3015750 - RNA, 19 nt, Artificial Sequence
  Description of Artificial Sequence: Synthetic oligonucleotide
ugugcucucauuuaccaca

SEQ ID NO: 3015751 - RNA, 19 nt, Artificial Sequence
  Description of Artificial Sequence: Synthetic oligonucleotide
accacaucaaacugauggc

SEQ ID NO: 3015752 - RNA, 19 nt, Artificial Sequence
  Description of Artificial Sequence: Synthetic oligonucleotide
guagcauaggagcaggccg

SEQ ID NO: 3015753 - RNA, 19 nt, Artificial Sequence
  Description of Artificial Sequence: Synthetic oligonucleotide
uaugccacacagaugaggu

SEQ ID NO: 3015754 - RNA, 19 nt, Artificial Sequence
  Description of Artificial Sequence: Synthetic oligonucleotide
agacaauugcauauggagc

SEQ ID NO: 3015755 - RNA, 19 nt, Artificial Sequence
  Description of Artificial Sequence: Synthetic oligonucleotide
ucauacacaucaauagcug

SEQ ID NO: 3015756 - RNA, 19 nt, Artificial Sequence
  Description of Artificial Sequence: Synthetic oligonucleotide
cucauuuaccacaucaaac

SEQ ID NO: 3015757 - RNA, 19 nt, Artificial Sequence
  Description of Artificial Sequence: Synthetic oligonucleotide
aaaggcuuacuccugugcu

SEQ ID NO: 3015758 - RNA, 19 nt, Artificial Sequence
  Description of Artificial Sequence: Synthetic oligonucleotide
uuuaccacaucaaacugau

SEQ ID NO: 3015759 - RNA, 19 nt, Artificial Sequence
  Description of Artificial Sequence: Synthetic oligonucleotide
uucccauuuaccaccaggc

SEQ ID NO: 3015760 - RNA, 19 nt, Artificial Sequence
  Description of Artificial Sequence: Synthetic oligonucleotide
cuucauacacaucaauagc

SEQ ID NO: 3015761 - RNA, 19 nt, Artificial Sequence
  Description of Artificial Sequence: Synthetic oligonucleotide
uuauagaugcagcuguagu

SEQ ID NO: 3015762 - RNA, 19 nt, Artificial Sequence
  Description of Artificial Sequence: Synthetic oligonucleotide
ugcauauggagccugguuc

SEQ ID NO: 3015763 - RNA, 19 nt, Artificial Sequence
  Description of Artificial Sequence: Synthetic oligonucleotide
auggcgauaugccacacag

SEQ ID NO: 3015764 - RNA, 19 nt, Artificial Sequence
  Description of Artificial Sequence: Synthetic oligonucleotide
caaacugauggcgauaugc

SEQ ID NO: 3015765 - RNA, 19 nt, Artificial Sequence
  Description of Artificial Sequence: Synthetic oligonucleotide
aacuggaaauccgaugccg

SEQ ID NO: 3015766 - RNA, 19 nt, Artificial Sequence
  Description of Artificial Sequence: Synthetic oligonucleotide
caaaauuaaccuuguuggc

SEQ ID NO: 3015767 - RNA, 19 nt, Artificial Sequence
  Description of Artificial Sequence: Synthetic oligonucleotide
cauacacaucaauagcugc

SEQ ID NO: 3015768 - RNA, 19 nt, Artificial Sequence
  Description of Artificial Sequence: Synthetic oligonucleotide
aaggcuuacuccugugcuc

SEQ ID NO: 3015769 - RNA, 19 nt, Artificial Sequence
  Description of Artificial Sequence: Synthetic oligonucleotide
acagaugagguugucacuc

SEQ ID NO: 3015770 - RNA, 19 nt, Artificial Sequence
  Description of Artificial Sequence: Synthetic oligonucleotide
ugcuguguggaccagguuc

SEQ ID NO: 3015771 - RNA, 19 nt, Artificial Sequence
  Description of Artificial Sequence: Synthetic oligonucleotide
accauuaaaggggcaaacc

SEQ ID NO: 3015772 - RNA, 19 nt, Artificial Sequence
  Description of Artificial Sequence: Synthetic oligonucleotide
uaaaggcuuacuccugugc

SEQ ID NO: 3015773 - RNA, 19 nt, Artificial Sequence
  Description of Artificial Sequence: Synthetic oligonucleotide
ucucauuuaccacaucaaa

SEQ ID NO: 3015774 - RNA, 19 nt, Artificial Sequence
  Description of Artificial Sequence: Synthetic oligonucleotide
aauuaaccuuguuggccuc

SEQ ID NO: 3015775 - RNA, 19 nt, Artificial Sequence
  Description of Artificial Sequence: Synthetic oligonucleotide
uuuauagaugcagcuguag

SEQ ID NO: 3015776 - RNA, 19 nt, Artificial Sequence
  Description of Artificial Sequence: Synthetic oligonucleotide
uauagaugcagcuguaguu

SEQ ID NO: 3015777 - RNA, 19 nt, Artificial Sequence
  Description of Artificial Sequence: Synthetic oligonucleotide
  modified_base (9)..(9): a, c, u, g, unknown or other
uacaugguncagccuaaag

SEQ ID NO: 3015778 - RNA, 19 nt, Artificial Sequence
  Description of Artificial Sequence: Synthetic oligonucleotide
ucaauagcugcaacaaaau

SEQ ID NO: 3015779 - RNA, 19 nt, Artificial Sequence
  Description of Artificial Sequence: Synthetic oligonucleotide
guucccauuuaccaccagg

SEQ ID NO: 3015780 - RNA, 19 nt, Artificial Sequence
  Description of Artificial Sequence: Synthetic oligonucleotide
aacugauggcgauaugcca

SEQ ID NO: 3015781 - RNA, 19 nt, Artificial Sequence
  Description of Artificial Sequence: Synthetic oligonucleotide
auagaugcagcuguaguug

SEQ ID NO: 3015782 - RNA, 19 nt, Artificial Sequence
  Description of Artificial Sequence: Synthetic oligonucleotide
ucccauuuaccaccaggcg

SEQ ID NO: 3015783 - RNA, 19 nt, Artificial Sequence
  Description of Artificial Sequence: Synthetic oligonucleotide
uaguuguagcauaggagca

SEQ ID NO: 3015784 - RNA, 19 nt, Artificial Sequence
  Description of Artificial Sequence: Synthetic oligonucleotide
cagccuaaaggcuuacucc

SEQ ID NO: 3015785 - RNA, 19 nt, Artificial Sequence
  Description of Artificial Sequence: Synthetic oligonucleotide
accagguucccauuuacca

SEQ ID NO: 3015786 - RNA, 19 nt, Artificial Sequence
  Description of Artificial Sequence: Synthetic oligonucleotide
caacagaacuggaaauccg

SEQ ID NO: 3015787 - RNA, 19 nt, Artificial Sequence
  Description of Artificial Sequence: Synthetic oligonucleotide
cagguucccauuuaccacc

SEQ ID NO: 3015788 - RNA, 19 nt, Artificial Sequence
  Description of Artificial Sequence: Synthetic oligonucleotide
ggaaauccgaugccgaggg

SEQ ID NO: 3015789 - RNA, 19 nt, Artificial Sequence
  Description of Artificial Sequence: Synthetic oligonucleotide
agccuaaaggcuuacuccu

SEQ ID NO: 3015790 - RNA, 19 nt, Artificial Sequence
  Description of Artificial Sequence: Synthetic oligonucleotide
cauuuaccacaucaaacug

SEQ ID NO: 3015791 - RNA, 19 nt, Artificial Sequence
  Description of Artificial Sequence: Synthetic oligonucleotide
aacagaacuggaaauccga

SEQ ID NO: 3015792 - RNA, 19 nt, Artificial Sequence
  Description of Artificial Sequence: Synthetic oligonucleotide
aaccuuguuggccucuaca

SEQ ID NO: 3015793 - RNA, 19 nt, Artificial Sequence
  Description of Artificial Sequence: Synthetic oligonucleotide
aauugcauauggagccugg

SEQ ID NO: 3015794 - RNA, 19 nt, Artificial Sequence
  Description of Artificial Sequence: Synthetic oligonucleotide
ugccacacagaugagguug

SEQ ID NO: 3015795 - RNA, 19 nt, Artificial Sequence
  Description of Artificial Sequence: Synthetic oligonucleotide
gaugcagcuguaguuguag

SEQ ID NO: 3015796 - RNA, 19 nt, Artificial Sequence
  Description of Artificial Sequence: Synthetic oligonucleotide
auagcugcaacaaaauuaa

SEQ ID NO: 3015797 - RNA, 19 nt, Artificial Sequence
  Description of Artificial Sequence: Synthetic oligonucleotide
aucaauagcugcaacaaaa

SEQ ID NO: 3015798 - RNA, 19 nt, Artificial Sequence
  Description of Artificial Sequence: Synthetic oligonucleotide
aauugcuguguggaccagg

SEQ ID NO: 3015799 - RNA, 19 nt, Artificial Sequence
  Description of Artificial Sequence: Synthetic oligonucleotide
auaugccacacagaugagg

SEQ ID NO: 3015800 - RNA, 19 nt, Artificial Sequence
  Description of Artificial Sequence: Synthetic oligonucleotide
uguagcauaggagcaggcc

SEQ ID NO: 3015801 - RNA, 19 nt, Artificial Sequence
  Description of Artificial Sequence: Synthetic oligonucleotide
uggaaauccgaugccgagg

SEQ ID NO: 3015802 - RNA, 19 nt, Artificial Sequence
  Description of Artificial Sequence: Synthetic oligonucleotide
ggcuucuccaucuucauac

SEQ ID NO: 3015803 - RNA, 19 nt, Artificial Sequence
  Description of Artificial Sequence: Synthetic oligonucleotide
ugcagcuguaguuguagca

SEQ ID NO: 3015804 - RNA, 19 nt, Artificial Sequence
  Description of Artificial Sequence: Synthetic oligonucleotide
auaggagcaggccggcuuc

SEQ ID NO: 3015805 - RNA, 19 nt, Artificial Sequence
  Description of Artificial Sequence: Synthetic oligonucleotide
gagguugucacucucuucu

SEQ ID NO: 3015806 - RNA, 19 nt, Artificial Sequence
  Description of Artificial Sequence: Synthetic oligonucleotide
uuuuauagaugcagcugua

SEQ ID NO: 3015807 - RNA, 19 nt, Artificial Sequence
  Description of Artificial Sequence: Synthetic oligonucleotide
guuguagcauaggagcagg

SEQ ID NO: 3015808 - RNA, 19 nt, Artificial Sequence
  Description of Artificial Sequence: Synthetic oligonucleotide
ugcagcuguggcacaauug

SEQ ID NO: 3015809 - RNA, 19 nt, Artificial Sequence
  Description of Artificial Sequence: Synthetic oligonucleotide
  modified_base (17)..(17): a, c, u, g, unknown or other
uuggccucuacauggunca

SEQ ID NO: 3015810 - RNA, 19 nt, Artificial Sequence
  Description of Artificial Sequence: Synthetic oligonucleotide
auuuaccacaucaaacuga

SEQ ID NO: 3015811 - RNA, 19 nt, Artificial Sequence
  Description of Artificial Sequence: Synthetic oligonucleotide
guuccaacagaacuggaaa

SEQ ID NO: 3015812 - RNA, 19 nt, Artificial Sequence
  Description of Artificial Sequence: Synthetic oligonucleotide
augcagcuguaguuguagc

SEQ ID NO: 3015813 - RNA, 19 nt, Artificial Sequence
  Description of Artificial Sequence: Synthetic oligonucleotide
aguuguagcauaggagcag

SEQ ID NO: 3015814 - RNA, 19 nt, Artificial Sequence
  Description of Artificial Sequence: Synthetic oligonucleotide
aggagguaugggaaggcgc

SEQ ID NO: 3015815 - RNA, 19 nt, Artificial Sequence
  Description of Artificial Sequence: Synthetic oligonucleotide
cacaucaauagcugcaaca

SEQ ID NO: 3015816 - RNA, 19 nt, Artificial Sequence
  Description of Artificial Sequence: Synthetic oligonucleotide
uccaacagaacuggaaauc

SEQ ID NO: 3015817 - RNA, 19 nt, Artificial Sequence
  Description of Artificial Sequence: Synthetic oligonucleotide
gaacuggaaauccgaugcc

SEQ ID NO: 3015818 - RNA, 19 nt, Artificial Sequence
  Description of Artificial Sequence: Synthetic oligonucleotide
uguggcacaauugcugugu

SEQ ID NO: 3015819 - RNA, 19 nt, Artificial Sequence
  Description of Artificial Sequence: Synthetic oligonucleotide
uacuccugugcucucauuu

SEQ ID NO: 3015820 - RNA, 19 nt, Artificial Sequence
  Description of Artificial Sequence: Synthetic oligonucleotide
uggagccugguuccaacag

SEQ ID NO: 3015821 - RNA, 19 nt, Artificial Sequence
  Description of Artificial Sequence: Synthetic oligonucleotide
  modified_base (5)..(5): a, c, u, g, unknown or other
ugguncagccuaaaggcuu

SEQ ID NO: 3015822 - RNA, 19 nt, Artificial Sequence
  Description of Artificial Sequence: Synthetic oligonucleotide
  modified_base (11)..(11): a, c, u, g, unknown or other
ucuacaugguncagccuaa

SEQ ID NO: 3015823 - RNA, 19 nt, Artificial Sequence
  Description of Artificial Sequence: Synthetic oligonucleotide
cugguuccaacagaacugg

SEQ ID NO: 3015824 - RNA, 19 nt, Artificial Sequence
  Description of Artificial Sequence: Synthetic oligonucleotide
aaauccgaugccgaggguu

SEQ ID NO: 3015825 - RNA, 19 nt, Artificial Sequence
  Description of Artificial Sequence: Synthetic oligonucleotide
cagaacuggaaauccgaug

SEQ ID NO: 3015826 - RNA, 19 nt, Artificial Sequence
  Description of Artificial Sequence: Synthetic oligonucleotide
ucuccauggagucgguggu

SEQ ID NO: 3015827 - RNA, 19 nt, Artificial Sequence
  Description of Artificial Sequence: Synthetic oligonucleotide
gcugcaacaaaauuaaccu

SEQ ID NO: 3015828 - RNA, 19 nt, Artificial Sequence
  Description of Artificial Sequence: Synthetic oligonucleotide
gcagcuguggcacaauugc

SEQ ID NO: 3015829 - RNA, 19 nt, Artificial Sequence
  Description of Artificial Sequence: Synthetic oligonucleotide
  modified_base (14)..(14): a, c, u, g, unknown or other
gccucuacaugguncagcc

SEQ ID NO: 3015830 - RNA, 19 nt, Artificial Sequence
  Description of Artificial Sequence: Synthetic oligonucleotide
auacacaucaauagcugca

SEQ ID NO: 3015831 - RNA, 19 nt, Artificial Sequence
  Description of Artificial Sequence: Synthetic oligonucleotide
aauccgaugccgaggguug

SEQ ID NO: 3015832 - RNA, 19 nt, Artificial Sequence
  Description of Artificial Sequence: Synthetic oligonucleotide
auuaaaggggcaaaccuuu

SEQ ID NO: 3015833 - RNA, 19 nt, Artificial Sequence
  Description of Artificial Sequence: Synthetic oligonucleotide
uggcacaauugcugugugg

SEQ ID NO: 3015834 - RNA, 19 nt, Artificial Sequence
  Description of Artificial Sequence: Synthetic oligonucleotide
cccauuuaccaccaggcgg

SEQ ID NO: 3015835 - RNA, 19 nt, Artificial Sequence
  Description of Artificial Sequence: Synthetic oligonucleotide
cuggaaauccgaugccgag

SEQ ID NO: 3015836 - RNA, 19 nt, Artificial Sequence
  Description of Artificial Sequence: Synthetic oligonucleotide
accuuguuggccucuacau

SEQ ID NO: 3015837 - RNA, 19 nt, Artificial Sequence
  Description of Artificial Sequence: Synthetic oligonucleotide
acaucaaacugauggcgau

SEQ ID NO: 3015838 - RNA, 19 nt, Artificial Sequence
  Description of Artificial Sequence: Synthetic oligonucleotide
cgauaugccacacagauga

SEQ ID NO: 3015839 - RNA, 19 nt, Artificial Sequence
  Description of Artificial Sequence: Synthetic oligonucleotide
uagaugcagcuguaguugu

SEQ ID NO: 3015840 - RNA, 19 nt, Artificial Sequence
  Description of Artificial Sequence: Synthetic oligonucleotide
uuguagcauaggagcaggc

SEQ ID NO: 3015841 - RNA, 19 nt, Artificial Sequence
  Description of Artificial Sequence: Synthetic oligonucleotide
uauggagccugguuccaac

SEQ ID NO: 3015842 - RNA, 19 nt, Artificial Sequence
  Description of Artificial Sequence: Synthetic oligonucleotide
aucaaacugauggcgauau

SEQ ID NO: 3015843 - RNA, 19 nt, Artificial Sequence
  Description of Artificial Sequence: Synthetic oligonucleotide
cuguaguuguagcauagga

SEQ ID NO: 3015844 - RNA, 19 nt, Artificial Sequence
  Description of Artificial Sequence: Synthetic oligonucleotide
ugaaggccaggagguaugg

SEQ ID NO: 3015845 - RNA, 19 nt, Artificial Sequence
  Description of Artificial Sequence: Synthetic oligonucleotide
cuaaaggcuuacuccugug

SEQ ID NO: 3015846 - RNA, 19 nt, Artificial Sequence
  Description of Artificial Sequence: Synthetic oligonucleotide
gcucucauuuaccacauca

SEQ ID NO: 3015847 - RNA, 19 nt, Artificial Sequence
  Description of Artificial Sequence: Synthetic oligonucleotide
cacaucaaacugauggcga

SEQ ID NO: 3015848 - RNA, 19 nt, Artificial Sequence
  Description of Artificial Sequence: Synthetic oligonucleotide
  modified_base (12)..(12): a, c, u, g, unknown or other
cucuacaugguncagccua

SEQ ID NO: 3015849 - RNA, 19 nt, Artificial Sequence
  Description of Artificial Sequence: Synthetic oligonucleotide
gaaggcgcagacaauugca

SEQ ID NO: 3015850 - RNA, 19 nt, Artificial Sequence
  Description of Artificial Sequence: Synthetic oligonucleotide
cuucuccaucuucauacac

SEQ ID NO: 3015851 - RNA, 19 nt, Artificial Sequence
  Description of Artificial Sequence: Synthetic oligonucleotide
ucaaacugauggcgauaug

SEQ ID NO: 3015852 - RNA, 19 nt, Artificial Sequence
  Description of Artificial Sequence: Synthetic oligonucleotide
gcauauggagccugguucc

SEQ ID NO: 3015853 - RNA, 19 nt, Artificial Sequence
  Description of Artificial Sequence: Synthetic oligonucleotide
uugcauauggagccugguu

SEQ ID NO: 3015854 - RNA, 19 nt, Artificial Sequence
  Description of Artificial Sequence: Synthetic oligonucleotide
ccugguuccaacagaacug

SEQ ID NO: 3015855 - RNA, 19 nt, Artificial Sequence
  Description of Artificial Sequence: Synthetic oligonucleotide
agcuguggcacaauugcug

SEQ ID NO: 3015856 - RNA, 19 nt, Artificial Sequence
  Description of Artificial Sequence: Synthetic oligonucleotide
uuaaaggggcaaaccuuuu

SEQ ID NO: 3015857 - RNA, 19 nt, Artificial Sequence
  Description of Artificial Sequence: Synthetic oligonucleotide
  modified_base (18)..(18): a, c, u, g, unknown or other
guuggccucuacauggunc

SEQ ID NO: 3015858 - RNA, 19 nt, Artificial Sequence
  Description of Artificial Sequence: Synthetic oligonucleotide
agcuguaguuguagcauag

SEQ ID NO: 3015859 - RNA, 19 nt, Artificial Sequence
  Description of Artificial Sequence: Synthetic oligonucleotide
gagucgguggugaaggcca

SEQ ID NO: 3015860 - RNA, 19 nt, Artificial Sequence
  Description of Artificial Sequence: Synthetic oligonucleotide
  modified_base (2)..(2): a, c, u, g, unknown or other
gngccaccauuaaaggggc

SEQ ID NO: 3015861 - RNA, 19 nt, Artificial Sequence
  Description of Artificial Sequence: Synthetic oligonucleotide
uuaccacaucaaacugaug

SEQ ID NO: 3015862 - RNA, 19 nt, Artificial Sequence
  Description of Artificial Sequence: Synthetic oligonucleotide
ccaacagaacuggaaaucc

SEQ ID NO: 3015863 - RNA, 19 nt, Artificial Sequence
  Description of Artificial Sequence: Synthetic oligonucleotide
uccauggagucggugguga

SEQ ID NO: 3015864 - RNA, 19 nt, Artificial Sequence
  Description of Artificial Sequence: Synthetic oligonucleotide
uuguuggccucuacauggu

SEQ ID NO: 3015865 - RNA, 19 nt, Artificial Sequence
  Description of Artificial Sequence: Synthetic oligonucleotide
ugagguugucacucucuuc

SEQ ID NO: 3015866 - RNA, 19 nt, Artificial Sequence
  Description of Artificial Sequence: Synthetic oligonucleotide
agcauaggagcaggccggc

SEQ ID NO: 3015867 - RNA, 19 nt, Artificial Sequence
  Description of Artificial Sequence: Synthetic oligonucleotide
auugcuguguggaccaggu

SEQ ID NO: 3015868 - RNA, 19 nt, Artificial Sequence
  Description of Artificial Sequence: Synthetic oligonucleotide
cuccugugcucucauuuac

SEQ ID NO: 3015869 - RNA, 19 nt, Artificial Sequence
  Description of Artificial Sequence: Synthetic oligonucleotide
cucucauuuaccacaucaa

SEQ ID NO: 3015870 - RNA, 19 nt, Artificial Sequence
  Description of Artificial Sequence: Synthetic oligonucleotide
ggaaggcgcagacaauugc

SEQ ID NO: 3015871 - RNA, 19 nt, Artificial Sequence
  Description of Artificial Sequence: Synthetic oligonucleotide
ugggaaggcgcagacaauu

SEQ ID NO: 3015872 - RNA, 19 nt, Artificial Sequence
  Description of Artificial Sequence: Synthetic oligonucleotide
gaccagguucccauuuacc

SEQ ID NO: 3015873 - RNA, 19 nt, Artificial Sequence
  Description of Artificial Sequence: Synthetic oligonucleotide
acgagcugcagcuguggca

SEQ ID NO: 3015874 - RNA, 19 nt, Artificial Sequence
  Description of Artificial Sequence: Synthetic oligonucleotide
ccacaucaaacugauggcg

SEQ ID NO: 3015875 - RNA, 19 nt, Artificial Sequence
  Description of Artificial Sequence: Synthetic oligonucleotide
augagguugucacucucuu

SEQ ID NO: 3015876 - RNA, 19 nt, Artificial Sequence
  Description of Artificial Sequence: Synthetic oligonucleotide
cugugcucucauuuaccac

SEQ ID NO: 3015877 - RNA, 19 nt, Artificial Sequence
  Description of Artificial Sequence: Synthetic oligonucleotide
caggagguaugggaaggcg

SEQ ID NO: 3015878 - RNA, 19 nt, Artificial Sequence
  Description of Artificial Sequence: Synthetic oligonucleotide
acaauugcauauggagccu

SEQ ID NO: 3015879 - RNA, 19 nt, Artificial Sequence
  Description of Artificial Sequence: Synthetic oligonucleotide
cauggagucgguggugaag

SEQ ID NO: 3015880 - RNA, 19 nt, Artificial Sequence
  Description of Artificial Sequence: Synthetic oligonucleotide
acuggaaauccgaugccga

SEQ ID NO: 3015881 - RNA, 19 nt, Artificial Sequence
  Description of Artificial Sequence: Synthetic oligonucleotide
gauaugccacacagaugag

SEQ ID NO: 3015882 - RNA, 19 nt, Artificial Sequence
  Description of Artificial Sequence: Synthetic oligonucleotide
aggcuuacuccugugcucu

SEQ ID NO: 3015883 - RNA, 19 nt, Artificial Sequence
  Description of Artificial Sequence: Synthetic oligonucleotide
ucgguggugaaggccagga

SEQ ID NO: 3015884 - RNA, 19 nt, Artificial Sequence
  Description of Artificial Sequence: Synthetic oligonucleotide
uagcugcaacaaaauuaac

SEQ ID NO: 3015885 - RNA, 19 nt, Artificial Sequence
  Description of Artificial Sequence: Synthetic oligonucleotide
gauggcgauaugccacaca

SEQ ID NO: 3015886 - RNA, 19 nt, Artificial Sequence
  Description of Artificial Sequence: Synthetic oligonucleotide
caauugcauauggagccug

SEQ ID NO: 3015887 - RNA, 19 nt, Artificial Sequence
  Description of Artificial Sequence: Synthetic oligonucleotide
aaggcgcagacaauugcau

SEQ ID NO: 3015888 - RNA, 19 nt, Artificial Sequence
  Description of Artificial Sequence: Synthetic oligonucleotide
uggcgauaugccacacaga

SEQ ID NO: 3015889 - RNA, 19 nt, Artificial Sequence
  Description of Artificial Sequence: Synthetic oligonucleotide
agguugucacucucuucug

SEQ ID NO: 3015890 - RNA, 19 nt, Artificial Sequence
  Description of Artificial Sequence: Synthetic oligonucleotide
caccauuaaaggggcaaac

SEQ ID NO: 3015891 - RNA, 19 nt, Artificial Sequence
  Description of Artificial Sequence: Synthetic oligonucleotide
uaaccuuguuggccucuac

SEQ ID NO: 3015892 - RNA, 19 nt, Artificial Sequence
  Description of Artificial Sequence: Synthetic oligonucleotide
ccauuuaccaccaggcgga

SEQ ID NO: 3015893 - RNA, 19 nt, Artificial Sequence
  Description of Artificial Sequence: Synthetic oligonucleotide
ugguuccaacagaacugga

SEQ ID NO: 3015894 - RNA, 19 nt, Artificial Sequence
  Description of Artificial Sequence: Synthetic oligonucleotide
ggcgauaugccacacagau

SEQ ID NO: 3015895 - RNA, 19 nt, Artificial Sequence
  Description of Artificial Sequence: Synthetic oligonucleotide
  modified_base (19)..(19): a, c, u, g, unknown or other
uguuggccucuacauggun

SEQ ID NO: 3015896 - RNA, 19 nt, Artificial Sequence
  Description of Artificial Sequence: Synthetic oligonucleotide
auuaaccuuguuggccucu

SEQ ID NO: 3015897 - RNA, 19 nt, Artificial Sequence
  Description of Artificial Sequence: Synthetic oligonucleotide
uggaccagguucccauuua

SEQ ID NO: 3015898 - RNA, 19 nt, Artificial Sequence
  Description of Artificial Sequence: Synthetic oligonucleotide
  modified_base (6)..(6): a, c, u, g, unknown or other
augguncagccuaaaggcu

SEQ ID NO: 3015899 - RNA, 19 nt, Artificial Sequence
  Description of Artificial Sequence: Synthetic oligonucleotide
cauuaaaggggcaaaccuu

SEQ ID NO: 3015900 - RNA, 19 nt, Artificial Sequence
  Description of Artificial Sequence: Synthetic oligonucleotide
acuccugugcucucauuua

SEQ ID NO: 3015901 - RNA, 19 nt, Artificial Sequence
  Description of Artificial Sequence: Synthetic oligonucleotide
gguaugggaaggcgcagac

SEQ ID NO: 3015902 - RNA, 19 nt, Artificial Sequence
  Description of Artificial Sequence: Synthetic oligonucleotide
auugcauauggagccuggu

SEQ ID NO: 3015903 - RNA, 19 nt, Artificial Sequence
  Description of Artificial Sequence: Synthetic oligonucleotide
aggcggaucuccauggagu

SEQ ID NO: 3015904 - RNA, 19 nt, Artificial Sequence
  Description of Artificial Sequence: Synthetic oligonucleotide
cugauggcgauaugccaca

SEQ ID NO: 3015905 - RNA, 19 nt, Artificial Sequence
  Description of Artificial Sequence: Synthetic oligonucleotide
auuuaccaccaggcggauc

SEQ ID NO: 3015906 - RNA, 19 nt, Artificial Sequence
  Description of Artificial Sequence: Synthetic oligonucleotide
gagcaggccggcuucucca

SEQ ID NO: 3015907 - RNA, 19 nt, Artificial Sequence
  Description of Artificial Sequence: Synthetic oligonucleotide
uguguggaccagguuccca

SEQ ID NO: 3015908 - RNA, 19 nt, Artificial Sequence
  Description of Artificial Sequence: Synthetic oligonucleotide
ugccgaggguugaagcaaa

SEQ ID NO: 3015909 - RNA, 19 nt, Artificial Sequence
  Description of Artificial Sequence: Synthetic oligonucleotide
uggagucgguggugaaggc

SEQ ID NO: 3015910 - RNA, 19 nt, Artificial Sequence
  Description of Artificial Sequence: Synthetic oligonucleotide
acagaacuggaaauccgau

SEQ ID NO: 3015911 - RNA, 19 nt, Artificial Sequence
  Description of Artificial Sequence: Synthetic oligonucleotide
gugaaggccaggagguaug

SEQ ID NO: 3015912 - RNA, 19 nt, Artificial Sequence
  Description of Artificial Sequence: Synthetic oligonucleotide
ccagguucccauuuaccac

SEQ ID NO: 3015913 - RNA, 19 nt, Artificial Sequence
  Description of Artificial Sequence: Synthetic oligonucleotide
gcuguguggaccagguucc

SEQ ID NO: 3015914 - RNA, 19 nt, Artificial Sequence
  Description of Artificial Sequence: Synthetic oligonucleotide
  modified_base (16)..(16): a, c, u, g, unknown or other
uggccucuacaugguncag

SEQ ID NO: 3015915 - RNA, 19 nt, Artificial Sequence
  Description of Artificial Sequence: Synthetic oligonucleotide
guggcacaauugcugugug

SEQ ID NO: 3015916 - RNA, 19 nt, Artificial Sequence
  Description of Artificial Sequence: Synthetic oligonucleotide
gagccugguuccaacagaa

SEQ ID NO: 3015917 - RNA, 19 nt, Artificial Sequence
  Description of Artificial Sequence: Synthetic oligonucleotide
gaugagguugucacucucu

SEQ ID NO: 3015918 - RNA, 19 nt, Artificial Sequence
  Description of Artificial Sequence: Synthetic oligonucleotide
caucaauagcugcaacaaa

SEQ ID NO: 3015919 - RNA, 19 nt, Artificial Sequence
  Description of Artificial Sequence: Synthetic oligonucleotide
cuguggcacaauugcugug

SEQ ID NO: 3015920 - RNA, 19 nt, Artificial Sequence
  Description of Artificial Sequence: Synthetic oligonucleotide
  modified_base (2)..(2): a, c, u, g, unknown or other
uncagccuaaaggcuuacu

SEQ ID NO: 3015921 - RNA, 19 nt, Artificial Sequence
  Description of Artificial Sequence: Synthetic oligonucleotide
gcuguaguuguagcauagg

SEQ ID NO: 3015922 - RNA, 19 nt, Artificial Sequence
  Description of Artificial Sequence: Synthetic oligonucleotide
uuaaccuuguuggccucua

SEQ ID NO: 3015923 - RNA, 19 nt, Artificial Sequence
  Description of Artificial Sequence: Synthetic oligonucleotide
ggagguaugggaaggcgca

SEQ ID NO: 3015924 - RNA, 19 nt, Artificial Sequence
  Description of Artificial Sequence: Synthetic oligonucleotide
gaucuccauggagucggug

SEQ ID NO: 3015925 - RNA, 19 nt, Artificial Sequence
  Description of Artificial Sequence: Synthetic oligonucleotide
uaccaccaggcggaucucc

SEQ ID NO: 3015926 - RNA, 19 nt, Artificial Sequence
  Description of Artificial Sequence: Synthetic oligonucleotide
ggaccagguucccauuuac

SEQ ID NO: 3015927 - RNA, 19 nt, Artificial Sequence
  Description of Artificial Sequence: Synthetic oligonucleotide
gccaggagguaugggaagg

SEQ ID NO: 3015928 - RNA, 19 nt, Artificial Sequence
  Description of Artificial Sequence: Synthetic oligonucleotide
cacacagaugagguuguca

SEQ ID NO: 3015929 - RNA, 19 nt, Artificial Sequence
  Description of Artificial Sequence: Synthetic oligonucleotide
gguuccaacagaacuggaa

SEQ ID NO: 3015930 - RNA, 19 nt, Artificial Sequence
  Description of Artificial Sequence: Synthetic oligonucleotide
aggcgcagacaauugcaua

SEQ ID NO: 3015931 - RNA, 19 nt, Artificial Sequence
  Description of Artificial Sequence: Synthetic oligonucleotide
uguggaccagguucccauu

SEQ ID NO: 3015932 - RNA, 19 nt, Artificial Sequence
  Description of Artificial Sequence: Synthetic oligonucleotide
ggccaggagguaugggaag

SEQ ID NO: 3015933 - RNA, 19 nt, Artificial Sequence
  Description of Artificial Sequence: Synthetic oligonucleotide
augccgaggguugaagcaa

SEQ ID NO: 3015934 - RNA, 19 nt, Artificial Sequence
  Description of Artificial Sequence: Synthetic oligonucleotide
ccuuguuggccucuacaug

SEQ ID NO: 3015935 - RNA, 19 nt, Artificial Sequence
  Description of Artificial Sequence: Synthetic oligonucleotide
ggagucgguggugaaggcc

SEQ ID NO: 3015936 - RNA, 19 nt, Artificial Sequence
  Description of Artificial Sequence: Synthetic oligonucleotide
agccugguuccaacagaac

SEQ ID NO: 3015937 - RNA, 19 nt, Artificial Sequence
  Description of Artificial Sequence: Synthetic oligonucleotide
guugucacucucuucuguu

SEQ ID NO: 3015938 - RNA, 19 nt, Artificial Sequence
  Description of Artificial Sequence: Synthetic oligonucleotide
gccugguuccaacagaacu

SEQ ID NO: 3015939 - RNA, 19 nt, Artificial Sequence
  Description of Artificial Sequence: Synthetic oligonucleotide
ccauuaaaggggcaaaccu

SEQ ID NO: 3015940 - RNA, 19 nt, Artificial Sequence
  Description of Artificial Sequence: Synthetic oligonucleotide
ugcucucauuuaccacauc

SEQ ID NO: 3015941 - RNA, 19 nt, Artificial Sequence
  Description of Artificial Sequence: Synthetic oligonucleotide
ggagcaggccggcuucucc

SEQ ID NO: 3015942 - RNA, 19 nt, Artificial Sequence
  Description of Artificial Sequence: Synthetic oligonucleotide
ggcggaucuccauggaguc

SEQ ID NO: 3015943 - RNA, 19 nt, Artificial Sequence
  Description of Artificial Sequence: Synthetic oligonucleotide
ugauggcgauaugccacac

SEQ ID NO: 3015944 - RNA, 19 nt, Artificial Sequence
  Description of Artificial Sequence: Synthetic oligonucleotide
ggagccugguuccaacaga

SEQ ID NO: 3015945 - RNA, 19 nt, Artificial Sequence
  Description of Artificial Sequence: Synthetic oligonucleotide
ggcgcagacaauugcauau

SEQ ID NO: 3015946 - RNA, 19 nt, Artificial Sequence
  Description of Artificial Sequence: Synthetic oligonucleotide
caauagcugcaacaaaauu

SEQ ID NO: 3015947 - RNA, 19 nt, Artificial Sequence
  Description of Artificial Sequence: Synthetic oligonucleotide
auauggagccugguuccaa

SEQ ID NO: 3015948 - RNA, 19 nt, Artificial Sequence
  Description of Artificial Sequence: Synthetic oligonucleotide
aggccaggagguaugggaa

SEQ ID NO: 3015949 - RNA, 19 nt, Artificial Sequence
  Description of Artificial Sequence: Synthetic oligonucleotide
augccacacagaugagguu

SEQ ID NO: 3015950 - RNA, 19 nt, Artificial Sequence
  Description of Artificial Sequence: Synthetic oligonucleotide
guaugggaaggcgcagaca

SEQ ID NO: 3015951 - RNA, 19 nt, Artificial Sequence
  Description of Artificial Sequence: Synthetic oligonucleotide
  modified_base (15)..(15): a, c, u, g, unknown or other
ggccucuacaugguncagc

SEQ ID NO: 3015952 - RNA, 19 nt, Artificial Sequence
  Description of Artificial Sequence: Synthetic oligonucleotide
cugcaacaaaauuaaccuu

SEQ ID NO: 3015953 - RNA, 19 nt, Artificial Sequence
  Description of Artificial Sequence: Synthetic oligonucleotide
guguggaccagguucccau

SEQ ID NO: 3015954 - RNA, 19 nt, Artificial Sequence
  Description of Artificial Sequence: Synthetic oligonucleotide
  modified_base (10)..(10): a, c, u, g, unknown or other
cuacaugguncagccuaaa

SEQ ID NO: 3015955 - RNA, 19 nt, Artificial Sequence
  Description of Artificial Sequence: Synthetic oligonucleotide
cuccauggagucgguggug

SEQ ID NO: 3015956 - RNA, 19 nt, Artificial Sequence
  Description of Artificial Sequence: Synthetic oligonucleotide
cauauggagccugguucca

SEQ ID NO: 3015957 - RNA, 19 nt, Artificial Sequence
  Description of Artificial Sequence: Synthetic oligonucleotide
caauugcuguguggaccag

SEQ ID NO: 3015958 - RNA, 19 nt, Artificial Sequence
  Description of Artificial Sequence: Synthetic oligonucleotide
cgaugccgaggguugaagc

SEQ ID NO: 3015959 - RNA, 19 nt, Artificial Sequence
  Description of Artificial Sequence: Synthetic oligonucleotide
agguucccauuuaccacca

SEQ ID NO: 3015960 - RNA, 19 nt, Artificial Sequence
  Description of Artificial Sequence: Synthetic oligonucleotide
accaccaggcggaucucca

SEQ ID NO: 3015961 - RNA, 19 nt, Artificial Sequence
  Description of Artificial Sequence: Synthetic oligonucleotide
uccgaugccgaggguugaa

SEQ ID NO: 3015962 - RNA, 19 nt, Artificial Sequence
  Description of Artificial Sequence: Synthetic oligonucleotide
cuguguggaccagguuccc

SEQ ID NO: 3015963 - RNA, 19 nt, Artificial Sequence
  Description of Artificial Sequence: Synthetic oligonucleotide
aggagcaggccggcuucuc

SEQ ID NO: 3015964 - RNA, 19 nt, Artificial Sequence
  Description of Artificial Sequence: Synthetic oligonucleotide
  modified_base (3)..(3): a, c, u, g, unknown or other
guncagccuaaaggcuuac

SEQ ID NO: 3015965 - RNA, 19 nt, Artificial Sequence
  Description of Artificial Sequence: Synthetic oligonucleotide
gguugucacucucuucugu

SEQ ID NO: 3015966 - RNA, 19 nt, Artificial Sequence
  Description of Artificial Sequence: Synthetic oligonucleotide
gcaacaaaauuaaccuugu

SEQ ID NO: 3015967 - RNA, 19 nt, Artificial Sequence
  Description of Artificial Sequence: Synthetic oligonucleotide
  modified_base (4)..(4): a, c, u, g, unknown or other
gguncagccuaaaggcuua

SEQ ID NO: 3015968 - RNA, 19 nt, Artificial Sequence
  Description of Artificial Sequence: Synthetic oligonucleotide
caucaaacugauggcgaua

SEQ ID NO: 3015969 - RNA, 19 nt, Artificial Sequence
  Description of Artificial Sequence: Synthetic oligonucleotide
uaggagcaggccggcuucu

SEQ ID NO: 3015970 - RNA, 19 nt, Artificial Sequence
  Description of Artificial Sequence: Synthetic oligonucleotide
cauaggagcaggccggcuu

SEQ ID NO: 3015971 - RNA, 19 nt, Artificial Sequence
  Description of Artificial Sequence: Synthetic oligonucleotide
gcgauaugccacacagaug

SEQ ID NO: 3015972 - RNA, 19 nt, Artificial Sequence
  Description of Artificial Sequence: Synthetic oligonucleotide
gguucccauuuaccaccag

SEQ ID NO: 3015973 - RNA, 19 nt, Artificial Sequence
  Description of Artificial Sequence: Synthetic oligonucleotide
gcggaucuccauggagucg

SEQ ID NO: 3015974 - RNA, 19 nt, Artificial Sequence
  Description of Artificial Sequence: Synthetic oligonucleotide
gaaauccgaugccgagggu

SEQ ID NO: 3015975 - RNA, 19 nt, Artificial Sequence
  Description of Artificial Sequence: Synthetic oligonucleotide
gccaccauuaaaggggcaa

SEQ ID NO: 3015976 - RNA, 19 nt, Artificial Sequence
  Description of Artificial Sequence: Synthetic oligonucleotide
gccuaaaggcuuacuccug

SEQ ID NO: 3015977 - RNA, 19 nt, Artificial Sequence
  Description of Artificial Sequence: Synthetic oligonucleotide
gcgcagacaauugcauaug

SEQ ID NO: 3015978 - RNA, 19 nt, Artificial Sequence
  Description of Artificial Sequence: Synthetic oligonucleotide
agcugcagcuguggcacaa

SEQ ID NO: 3015979 - RNA, 19 nt, Artificial Sequence
  Description of Artificial Sequence: Synthetic oligonucleotide
agaugcagcuguaguugua

SEQ ID NO: 3015980 - RNA, 19 nt, Artificial Sequence
  Description of Artificial Sequence: Synthetic oligonucleotide
uuaccaccaggcggaucuc

SEQ ID NO: 3015981 - RNA, 19 nt, Artificial Sequence
  Description of Artificial Sequence: Synthetic oligonucleotide
ccaggagguaugggaaggc

SEQ ID NO: 3015982 - RNA, 19 nt, Artificial Sequence
  Description of Artificial Sequence: Synthetic oligonucleotide
cuuacuccugugcucucau

SEQ ID NO: 3015983 - RNA, 19 nt, Artificial Sequence
  Description of Artificial Sequence: Synthetic oligonucleotide
auccgaugccgaggguuga

SEQ ID NO: 3015984 - RNA, 19 nt, Artificial Sequence
  Description of Artificial Sequence: Synthetic oligonucleotide
cagcuguggcacaauugcu

SEQ ID NO: 3015985 - RNA, 19 nt, Artificial Sequence
  Description of Artificial Sequence: Synthetic oligonucleotide
gcagcuguaguuguagcau

SEQ ID NO: 3015986 - RNA, 19 nt, Artificial Sequence
  Description of Artificial Sequence: Synthetic oligonucleotide
gcuuacuccugugcucuca

SEQ ID NO: 3015987 - RNA, 19 nt, Artificial Sequence
  Description of Artificial Sequence: Synthetic oligonucleotide
ccuaaaggcuuacuccugu

SEQ ID NO: 3015988 - RNA, 19 nt, Artificial Sequence
  Description of Artificial Sequence: Synthetic oligonucleotide
ccacgagcugcagcugugg

SEQ ID NO: 3015989 - RNA, 19 nt, Artificial Sequence
  Description of Artificial Sequence: Synthetic oligonucleotide
guggaccagguucccauuu

SEQ ID NO: 3015990 - RNA, 19 nt, Artificial Sequence
  Description of Artificial Sequence: Synthetic oligonucleotide
gagcugcagcuguggcaca

SEQ ID NO: 3015991 - RNA, 19 nt, Artificial Sequence
  Description of Artificial Sequence: Synthetic oligonucleotide
gugcucucauuuaccacau

SEQ ID NO: 3015992 - RNA, 19 nt, Artificial Sequence
  Description of Artificial Sequence: Synthetic oligonucleotide
ccgaugccgaggguugaag

SEQ ID NO: 3015993 - RNA, 19 nt, Artificial Sequence
  Description of Artificial Sequence: Synthetic oligonucleotide
aggccggcuucuccaucuu

SEQ ID NO: 3015994 - RNA, 19 nt, Artificial Sequence
  Description of Artificial Sequence: Synthetic oligonucleotide
ggcuuacuccugugcucuc

SEQ ID NO: 3015995 - RNA, 19 nt, Artificial Sequence
  Description of Artificial Sequence: Synthetic oligonucleotide
ggccggcuucuccaucuuc

SEQ ID NO: 3015996 - RNA, 19 nt, Artificial Sequence
  Description of Artificial Sequence: Synthetic oligonucleotide
ccaccauuaaaggggcaaa

SEQ ID NO: 3015997 - RNA, 19 nt, Artificial Sequence
  Description of Artificial Sequence: Synthetic oligonucleotide
gccacacagaugagguugu

SEQ ID NO: 3015998 - RNA, 19 nt, Artificial Sequence
  Description of Artificial Sequence: Synthetic oligonucleotide
cauuuaccaccaggcggau

SEQ ID NO: 3015999 - RNA, 19 nt, Artificial Sequence
  Description of Artificial Sequence: Synthetic oligonucleotide
ccauggagucgguggugaa

SEQ ID NO: 3016000 - RNA, 19 nt, Artificial Sequence
  Description of Artificial Sequence: Synthetic oligonucleotide
  modified_base (13)..(13): a, c, u, g, unknown or other
ccucuacaugguncagccu

SEQ ID NO: 3016001 - RNA, 19 nt, Artificial Sequence
  Description of Artificial Sequence: Synthetic oligonucleotide
gccgaggguugaagcaaaa

SEQ ID NO: 3016002 - RNA, 19 nt, Artificial Sequence
  Description of Artificial Sequence: Synthetic oligonucleotide
gcauaggagcaggccggcu

SEQ ID NO: 3016003 - RNA, 19 nt, Artificial Sequence
  Description of Artificial Sequence: Synthetic oligonucleotide
cggcuucuccaucuucaua

SEQ ID NO: 3016004 - RNA, 19 nt, Artificial Sequence
  Description of Artificial Sequence: Synthetic oligonucleotide
gcugcagcuguggcacaau

SEQ ID NO: 3016005 - RNA, 19 nt, Artificial Sequence
  Description of Artificial Sequence: Synthetic oligonucleotide
ccaccaggcggaucuccau

SEQ ID NO: 3016006 - RNA, 19 nt, Artificial Sequence
  Description of Artificial Sequence: Synthetic oligonucleotide
  modified_base (1)..(1): a, c, u, g, unknown or other
ncagccuaaaggcuuacuc

SEQ ID NO: 3016007 - RNA, 19 nt, Artificial Sequence
  Description of Artificial Sequence: Synthetic oligonucleotide
  modified_base (1)..(1): a, c, u, g, unknown or other
ngccaccauuaaaggggca

SEQ ID NO: 3016008 - RNA, 19 nt, Artificial Sequence
  Description of Artificial Sequence: Synthetic oligonucleotide
uccauuuuggucuagaaga

SEQ ID NO: 3016009 - RNA, 19 nt, Artificial Sequence
  Description of Artificial Sequence: Synthetic oligonucleotide
aauuucagucuccauuuuc

SEQ ID NO: 3016010 - RNA, 19 nt, Artificial Sequence
  Description of Artificial Sequence: Synthetic oligonucleotide
uuuuaagguacuaccaggc

SEQ ID NO: 3016011 - RNA, 19 nt, Artificial Sequence
  Description of Artificial Sequence: Synthetic oligonucleotide
uuucaugucauccuuuucu

SEQ ID NO: 3016012 - RNA, 19 nt, Artificial Sequence
  Description of Artificial Sequence: Synthetic oligonucleotide
uuuuguuucucuuaauuuc

SEQ ID NO: 3016013 - RNA, 19 nt, Artificial Sequence
  Description of Artificial Sequence: Synthetic oligonucleotide
uuuguuucucuuaauuuca

SEQ ID NO: 3016014 - RNA, 19 nt, Artificial Sequence
  Description of Artificial Sequence: Synthetic oligonucleotide
ucugguucauccauacugg

SEQ ID NO: 3016015 - RNA, 19 nt, Artificial Sequence
  Description of Artificial Sequence: Synthetic oligonucleotide
uuaagguacuaccaggcca

SEQ ID NO: 3016016 - RNA, 19 nt, Artificial Sequence
  Description of Artificial Sequence: Synthetic oligonucleotide
uaagguacuaccaggccag

SEQ ID NO: 3016017 - RNA, 19 nt, Artificial Sequence
  Description of Artificial Sequence: Synthetic oligonucleotide
aaagggugcaccaacacug

SEQ ID NO: 3016018 - RNA, 19 nt, Artificial Sequence
  Description of Artificial Sequence: Synthetic oligonucleotide
uuuuguuuuguuuuguuuu

SEQ ID NO: 3016019 - RNA, 19 nt, Artificial Sequence
  Description of Artificial Sequence: Synthetic oligonucleotide
uuaauuucagucuccauuu

SEQ ID NO: 3016020 - RNA, 19 nt, Artificial Sequence
  Description of Artificial Sequence: Synthetic oligonucleotide
uuucucuuaauuucagucu

SEQ ID NO: 3016021 - RNA, 19 nt, Artificial Sequence
  Description of Artificial Sequence: Synthetic oligonucleotide
auuuuggucuagaagaguc

SEQ ID NO: 3016022 - RNA, 19 nt, Artificial Sequence
  Description of Artificial Sequence: Synthetic oligonucleotide
ugugauuaaagggugcacc

SEQ ID NO: 3016023 - RNA, 19 nt, Artificial Sequence
  Description of Artificial Sequence: Synthetic oligonucleotide
uuuaagguacuaccaggcc

SEQ ID NO: 3016024 - RNA, 19 nt, Artificial Sequence
  Description of Artificial Sequence: Synthetic oligonucleotide
cucugguucauccauacug

SEQ ID NO: 3016025 - RNA, 19 nt, Artificial Sequence
  Description of Artificial Sequence: Synthetic oligonucleotide
uucucuuaauuucagucuc

SEQ ID NO: 3016026 - RNA, 19 nt, Artificial Sequence
  Description of Artificial Sequence: Synthetic oligonucleotide
uuuucucugccucugguuc

SEQ ID NO: 3016027 - RNA, 19 nt, Artificial Sequence
  Description of Artificial Sequence: Synthetic oligonucleotide
gauuaaagggugcaccaac

SEQ ID NO: 3016028 - RNA, 19 nt, Artificial Sequence
  Description of Artificial Sequence: Synthetic oligonucleotide
ucucucuuugccuucaguc

SEQ ID NO: 3016029 - RNA, 19 nt, Artificial Sequence
  Description of Artificial Sequence: Synthetic oligonucleotide
uaaagggugcaccaacacu

SEQ ID NO: 3016030 - RNA, 19 nt, Artificial Sequence
  Description of Artificial Sequence: Synthetic oligonucleotide
uuguuucucuuaauuucag

SEQ ID NO: 3016031 - RNA, 19 nt, Artificial Sequence
  Description of Artificial Sequence: Synthetic oligonucleotide
accaacacugcccagccug

SEQ ID NO: 3016032 - RNA, 19 nt, Artificial Sequence
  Description of Artificial Sequence: Synthetic oligonucleotide
auccauacuggguacuguc

SEQ ID NO: 3016033 - RNA, 19 nt, Artificial Sequence
  Description of Artificial Sequence: Synthetic oligonucleotide
uggguacuguccauuuugg

SEQ ID NO: 3016034 - RNA, 19 nt, Artificial Sequence
  Description of Artificial Sequence: Synthetic oligonucleotide
uuuuggucuagaagagucu

SEQ ID NO: 3016035 - RNA, 19 nt, Artificial Sequence
  Description of Artificial Sequence: Synthetic oligonucleotide
uguucuggcacuugcucug

SEQ ID NO: 3016036 - RNA, 19 nt, Artificial Sequence
  Description of Artificial Sequence: Synthetic oligonucleotide
uucagucuccauuuucaug

SEQ ID NO: 3016037 - RNA, 19 nt, Artificial Sequence
  Description of Artificial Sequence: Synthetic oligonucleotide
guccauuuuggucuagaag

SEQ ID NO: 3016038 - RNA, 19 nt, Artificial Sequence
  Description of Artificial Sequence: Synthetic oligonucleotide
uccauacuggguacugucc

SEQ ID NO: 3016039 - RNA, 19 nt, Artificial Sequence
  Description of Artificial Sequence: Synthetic oligonucleotide
uguuucucuuaauuucagu

SEQ ID NO: 3016040 - RNA, 19 nt, Artificial Sequence
  Description of Artificial Sequence: Synthetic oligonucleotide
auuucagucuccauuuuca

SEQ ID NO: 3016041 - RNA, 19 nt, Artificial Sequence
  Description of Artificial Sequence: Synthetic oligonucleotide
cuggguacuguccauuuug

SEQ ID NO: 3016042 - RNA, 19 nt, Artificial Sequence
  Description of Artificial Sequence: Synthetic oligonucleotide
guacuguccauuuuggucu

SEQ ID NO: 3016043 - RNA, 19 nt, Artificial Sequence
  Description of Artificial Sequence: Synthetic oligonucleotide
uguagcuuuggagcccugg

SEQ ID NO: 3016044 - RNA, 19 nt, Artificial Sequence
  Description of Artificial Sequence: Synthetic oligonucleotide
auuuucaugucauccuuuu

SEQ ID NO: 3016045 - RNA, 19 nt, Artificial Sequence
  Description of Artificial Sequence: Synthetic oligonucleotide
gguacuguccauuuugguc

SEQ ID NO: 3016046 - RNA, 19 nt, Artificial Sequence
  Description of Artificial Sequence: Synthetic oligonucleotide
gguacuaccaggccaggcc

SEQ ID NO: 3016047 - RNA, 19 nt, Artificial Sequence
  Description of Artificial Sequence: Synthetic oligonucleotide
ugcugugauuaaagggugc

SEQ ID NO: 3016048 - RNA, 19 nt, Artificial Sequence
  Description of Artificial Sequence: Synthetic oligonucleotide
gugauuaaagggugcacca

SEQ ID NO: 3016049 - RNA, 19 nt, Artificial Sequence
  Description of Artificial Sequence: Synthetic oligonucleotide
ugguucauccauacugggu

SEQ ID NO: 3016050 - RNA, 19 nt, Artificial Sequence
  Description of Artificial Sequence: Synthetic oligonucleotide
uuucuucucucuuugccuu

SEQ ID NO: 3016051 - RNA, 19 nt, Artificial Sequence
  Description of Artificial Sequence: Synthetic oligonucleotide
uuuucaugucauccuuuuc

SEQ ID NO: 3016052 - RNA, 19 nt, Artificial Sequence
  Description of Artificial Sequence: Synthetic oligonucleotide
cuuaauuucagucuccauu

SEQ ID NO: 3016053 - RNA, 19 nt, Artificial Sequence
  Description of Artificial Sequence: Synthetic oligonucleotide
ugcaccaacacugcccagc

SEQ ID NO: 3016054 - RNA, 19 nt, Artificial Sequence
  Description of Artificial Sequence: Synthetic oligonucleotide
uucuucuuccgccgcacac

SEQ ID NO: 3016055 - RNA, 19 nt, Artificial Sequence
  Description of Artificial Sequence: Synthetic oligonucleotide
guacuaccaggccaggccc

SEQ ID NO: 3016056 - RNA, 19 nt, Artificial Sequence
  Description of Artificial Sequence: Synthetic oligonucleotide
cugguucauccauacuggg

SEQ ID NO: 3016057 - RNA, 19 nt, Artificial Sequence
  Description of Artificial Sequence: Synthetic oligonucleotide
guagcuuuggagcccuggc

SEQ ID NO: 3016058 - RNA, 19 nt, Artificial Sequence
  Description of Artificial Sequence: Synthetic oligonucleotide
uucaugucauccuuuucuu

SEQ ID NO: 3016059 - RNA, 19 nt, Artificial Sequence
  Description of Artificial Sequence: Synthetic oligonucleotide
auuaaagggugcaccaaca

SEQ ID NO: 3016060 - RNA, 19 nt, Artificial Sequence
  Description of Artificial Sequence: Synthetic oligonucleotide
uguccauuuuggucuagaa

SEQ ID NO: 3016061 - RNA, 19 nt, Artificial Sequence
  Description of Artificial Sequence: Synthetic oligonucleotide
uagcuuuggagcccuggcu

SEQ ID NO: 3016062 - RNA, 19 nt, Artificial Sequence
  Description of Artificial Sequence: Synthetic oligonucleotide
acagguguucucucugugu

SEQ ID NO: 3016063 - RNA, 19 nt, Artificial Sequence
  Description of Artificial Sequence: Synthetic oligonucleotide
uuuggucuagaagagucuu

SEQ ID NO: 3016064 - RNA, 19 nt, Artificial Sequence
  Description of Artificial Sequence: Synthetic oligonucleotide
uggcuguucuggcacuugc

SEQ ID NO: 3016065 - RNA, 19 nt, Artificial Sequence
  Description of Artificial Sequence: Synthetic oligonucleotide
uuucagucuccauuuucau

SEQ ID NO: 3016066 - RNA, 19 nt, Artificial Sequence
  Description of Artificial Sequence: Synthetic oligonucleotide
uucuucuucuuccgccgca

SEQ ID NO: 3016067 - RNA, 19 nt, Artificial Sequence
  Description of Artificial Sequence: Synthetic oligonucleotide
cucugccucugguucaucc

SEQ ID NO: 3016068 - RNA, 19 nt, Artificial Sequence
  Description of Artificial Sequence: Synthetic oligonucleotide
uuuuccugacagguguucu

SEQ ID NO: 3016069 - RNA, 19 nt, Artificial Sequence
  Description of Artificial Sequence: Synthetic oligonucleotide
ucauccauacuggguacug

SEQ ID NO: 3016070 - RNA, 19 nt, Artificial Sequence
  Description of Artificial Sequence: Synthetic oligonucleotide
ucuuaauuucagucuccau

SEQ ID NO: 3016071 - RNA, 19 nt, Artificial Sequence
  Description of Artificial Sequence: Synthetic oligonucleotide
gguucauccauacugggua

SEQ ID NO: 3016072 - RNA, 19 nt, Artificial Sequence
  Description of Artificial Sequence: Synthetic oligonucleotide
agguguucucucuguguag

SEQ ID NO: 3016073 - RNA, 19 nt, Artificial Sequence
  Description of Artificial Sequence: Synthetic oligonucleotide
uuuccugacagguguucuc

SEQ ID NO: 3016074 - RNA, 19 nt, Artificial Sequence
  Description of Artificial Sequence: Synthetic oligonucleotide
ugauuaaagggugcaccaa

SEQ ID NO: 3016075 - RNA, 19 nt, Artificial Sequence
  Description of Artificial Sequence: Synthetic oligonucleotide
ugacagguguucucucugu

SEQ ID NO: 3016076 - RNA, 19 nt, Artificial Sequence
  Description of Artificial Sequence: Synthetic oligonucleotide
uggucuagaagagucuuuu

SEQ ID NO: 3016077 - RNA, 19 nt, Artificial Sequence
  Description of Artificial Sequence: Synthetic oligonucleotide
guucauccauacuggguac

SEQ ID NO: 3016078 - RNA, 19 nt, Artificial Sequence
  Description of Artificial Sequence: Synthetic oligonucleotide
uuccugacagguguucucu

SEQ ID NO: 3016079 - RNA, 19 nt, Artificial Sequence
  Description of Artificial Sequence: Synthetic oligonucleotide
cugacagguguucucucug

SEQ ID NO: 3016080 - RNA, 19 nt, Artificial Sequence
  Description of Artificial Sequence: Synthetic oligonucleotide
ccauuuuggucuagaagag

SEQ ID NO: 3016081 - RNA, 19 nt, Artificial Sequence
  Description of Artificial Sequence: Synthetic oligonucleotide
ucucucuguguagcuuugg

SEQ ID NO: 3016082 - RNA, 19 nt, Artificial Sequence
  Description of Artificial Sequence: Synthetic oligonucleotide
ucuucucucuuugccuuca

SEQ ID NO: 3016083 - RNA, 19 nt, Artificial Sequence
  Description of Artificial Sequence: Synthetic oligonucleotide
uuggucuagaagagucuuu

SEQ ID NO: 3016084 - RNA, 19 nt, Artificial Sequence
  Description of Artificial Sequence: Synthetic oligonucleotide
aagguacuaccaggccagg

SEQ ID NO: 3016085 - RNA, 19 nt, Artificial Sequence
  Description of Artificial Sequence: Synthetic oligonucleotide
aacacugcccagccugcuu

SEQ ID NO: 3016086 - RNA, 19 nt, Artificial Sequence
  Description of Artificial Sequence: Synthetic oligonucleotide
gguguucucucuguguagc

SEQ ID NO: 3016087 - RNA, 19 nt, Artificial Sequence
  Description of Artificial Sequence: Synthetic oligonucleotide
uucauccauacuggguacu

SEQ ID NO: 3016088 - RNA, 19 nt, Artificial Sequence
  Description of Artificial Sequence: Synthetic oligonucleotide
uacuaccaggccaggcccu

SEQ ID NO: 3016089 - RNA, 19 nt, Artificial Sequence
  Description of Artificial Sequence: Synthetic oligonucleotide
gugcugugauuaaagggug

SEQ ID NO: 3016090 - RNA, 19 nt, Artificial Sequence
  Description of Artificial Sequence: Synthetic oligonucleotide
uuggagcccuggcuguucu

SEQ ID NO: 3016091 - RNA, 19 nt, Artificial Sequence
  Description of Artificial Sequence: Synthetic oligonucleotide
cucuuaauuucagucucca

SEQ ID NO: 3016092 - RNA, 19 nt, Artificial Sequence
  Description of Artificial Sequence: Synthetic oligonucleotide
uacuggguacuguccauuu

SEQ ID NO: 3016093 - RNA, 19 nt, Artificial Sequence
  Description of Artificial Sequence: Synthetic oligonucleotide
cugugauuaaagggugcac

SEQ ID NO: 3016094 - RNA, 19 nt, Artificial Sequence
  Description of Artificial Sequence: Synthetic oligonucleotide
cucucuuugccuucagucu

SEQ ID NO: 3016095 - RNA, 19 nt, Artificial Sequence
  Description of Artificial Sequence: Synthetic oligonucleotide
acacugcccagccugcuuu

SEQ ID NO: 3016096 - RNA, 19 nt, Artificial Sequence
  Description of Artificial Sequence: Synthetic oligonucleotide
aggcccuuggcugccuugg

SEQ ID NO: 3016097 - RNA, 19 nt, Artificial Sequence
  Description of Artificial Sequence: Synthetic oligonucleotide
gcuguucuggcacuugcuc

SEQ ID NO: 3016098 - RNA, 19 nt, Artificial Sequence
  Description of Artificial Sequence: Synthetic oligonucleotide
cagguguucucucugugua

SEQ ID NO: 3016099 - RNA, 19 nt, Artificial Sequence
  Description of Artificial Sequence: Synthetic oligonucleotide
acuggguacuguccauuuu

SEQ ID NO: 3016100 - RNA, 19 nt, Artificial Sequence
  Description of Artificial Sequence: Synthetic oligonucleotide
uccugacagguguucucuc

SEQ ID NO: 3016101 - RNA, 19 nt, Artificial Sequence
  Description of Artificial Sequence: Synthetic oligonucleotide
uacuguccauuuuggucua

SEQ ID NO: 3016102 - RNA, 19 nt, Artificial Sequence
  Description of Artificial Sequence: Synthetic oligonucleotide
ugccuuggcuuugcuuucc

SEQ ID NO: 3016103 - RNA, 19 nt, Artificial Sequence
  Description of Artificial Sequence: Synthetic oligonucleotide
cuucucucuuugccuucag

SEQ ID NO: 3016104 - RNA, 19 nt, Artificial Sequence
  Description of Artificial Sequence: Synthetic oligonucleotide
gcaccaacacugcccagcc

SEQ ID NO: 3016105 - RNA, 19 nt, Artificial Sequence
  Description of Artificial Sequence: Synthetic oligonucleotide
gggugcaccaacacugccc

SEQ ID NO: 3016106 - RNA, 19 nt, Artificial Sequence
  Description of Artificial Sequence: Synthetic oligonucleotide
uuuggagcccuggcuguuc

SEQ ID NO: 3016107 - RNA, 19 nt, Artificial Sequence
  Description of Artificial Sequence: Synthetic oligonucleotide
cagucuccauuuucauguc

SEQ ID NO: 3016108 - RNA, 19 nt, Artificial Sequence
  Description of Artificial Sequence: Synthetic oligonucleotide
cugccuuggcuuugcuuuc

SEQ ID NO: 3016109 - RNA, 19 nt, Artificial Sequence
  Description of Artificial Sequence: Synthetic oligonucleotide
cuguucuggcacuugcucu

SEQ ID NO: 3016110 - RNA, 19 nt, Artificial Sequence
  Description of Artificial Sequence: Synthetic oligonucleotide
auacuggguacuguccauu

SEQ ID NO: 3016111 - RNA, 19 nt, Artificial Sequence
  Description of Artificial Sequence: Synthetic oligonucleotide
gccucugguucauccauac

SEQ ID NO: 3016112 - RNA, 19 nt, Artificial Sequence
  Description of Artificial Sequence: Synthetic oligonucleotide
gcugccuuggcuuugcuuu

SEQ ID NO: 3016113 - RNA, 19 nt, Artificial Sequence
  Description of Artificial Sequence: Synthetic oligonucleotide
uucucugccucugguucau

SEQ ID NO: 3016114 - RNA, 19 nt, Artificial Sequence
  Description of Artificial Sequence: Synthetic oligonucleotide
ccaacacugcccagccugc

SEQ ID NO: 3016115 - RNA, 19 nt, Artificial Sequence
  Description of Artificial Sequence: Synthetic oligonucleotide
cauuuucaugucauccuuu

SEQ ID NO: 3016116 - RNA, 19 nt, Artificial Sequence
  Description of Artificial Sequence: Synthetic oligonucleotide
cuuggcugccuuggcuuug

SEQ ID NO: 3016117 - RNA, 19 nt, Artificial Sequence
  Description of Artificial Sequence: Synthetic oligonucleotide
ccauacuggguacugucca

SEQ ID NO: 3016118 - RNA, 19 nt, Artificial Sequence
  Description of Artificial Sequence: Synthetic oligonucleotide
uucuggcacuugcucugua

SEQ ID NO: 3016119 - RNA, 19 nt, Artificial Sequence
  Description of Artificial Sequence: Synthetic oligonucleotide
acuguccauuuuggucuag

SEQ ID NO: 3016120 - RNA, 19 nt, Artificial Sequence
  Description of Artificial Sequence: Synthetic oligonucleotide
ucuuugccuucagucuuuu

SEQ ID NO: 3016121 - RNA, 19 nt, Artificial Sequence
  Description of Artificial Sequence: Synthetic oligonucleotide
ccuuggcuuugcuuucccc

SEQ ID NO: 3016122 - RNA, 19 nt, Artificial Sequence
  Description of Artificial Sequence: Synthetic oligonucleotide
cauuuuggucuagaagagu

SEQ ID NO: 3016123 - RNA, 19 nt, Artificial Sequence
  Description of Artificial Sequence: Synthetic oligonucleotide
cuguccauuuuggucuaga

SEQ ID NO: 3016124 - RNA, 19 nt, Artificial Sequence
  Description of Artificial Sequence: Synthetic oligonucleotide
cuucuucuuccgccgcaca

SEQ ID NO: 3016125 - RNA, 19 nt, Artificial Sequence
  Description of Artificial Sequence: Synthetic oligonucleotide
caggcccuuggcugccuug

SEQ ID NO: 3016126 - RNA, 19 nt, Artificial Sequence
  Description of Artificial Sequence: Synthetic oligonucleotide
cuggcuguucuggcacuug

SEQ ID NO: 3016127 - RNA, 19 nt, Artificial Sequence
  Description of Artificial Sequence: Synthetic oligonucleotide
cauacuggguacuguccau

SEQ ID NO: 3016128 - RNA, 19 nt, Artificial Sequence
  Description of Artificial Sequence: Synthetic oligonucleotide
gugcaccaacacugcccag

SEQ ID NO: 3016129 - RNA, 19 nt, Artificial Sequence
  Description of Artificial Sequence: Synthetic oligonucleotide
gccuuggcuuugcuuuccc

SEQ ID NO: 3016130 - RNA, 19 nt, Artificial Sequence
  Description of Artificial Sequence: Synthetic oligonucleotide
acuaccaggccaggcccuu

SEQ ID NO: 3016131 - RNA, 19 nt, Artificial Sequence
  Description of Artificial Sequence: Synthetic oligonucleotide
cuaccaggccaggcccuug

SEQ ID NO: 3016132 - RNA, 19 nt, Artificial Sequence
  Description of Artificial Sequence: Synthetic oligonucleotide
cugccucugguucauccau

SEQ ID NO: 3016133 - RNA, 19 nt, Artificial Sequence
  Description of Artificial Sequence: Synthetic oligonucleotide
ggguacuguccauuuuggu

SEQ ID NO: 3016134 - RNA, 19 nt, Artificial Sequence
  Description of Artificial Sequence: Synthetic oligonucleotide
cauccauacuggguacugu

SEQ ID NO: 3016135 - RNA, 19 nt, Artificial Sequence
  Description of Artificial Sequence: Synthetic oligonucleotide
gcuuuggagcccuggcugu

SEQ ID NO: 3016136 - RNA, 19 nt, Artificial Sequence
  Description of Artificial Sequence: Synthetic oligonucleotide
cucuuugccuucagucuuu

SEQ ID NO: 3016137 - RNA, 19 nt, Artificial Sequence
  Description of Artificial Sequence: Synthetic oligonucleotide
cagccugcuuuccaguuuu

SEQ ID NO: 3016138 - RNA, 19 nt, Artificial Sequence
  Description of Artificial Sequence: Synthetic oligonucleotide
ggcccuuggcugccuuggc

SEQ ID NO: 3016139 - RNA, 19 nt, Artificial Sequence
  Description of Artificial Sequence: Synthetic oligonucleotide
ccugacagguguucucucu

SEQ ID NO: 3016140 - RNA, 19 nt, Artificial Sequence
  Description of Artificial Sequence: Synthetic oligonucleotide
guucuggcacuugcucugu

SEQ ID NO: 3016141 - RNA, 19 nt, Artificial Sequence
  Description of Artificial Sequence: Synthetic oligonucleotide
ggcuguucuggcacuugcu

SEQ ID NO: 3016142 - RNA, 19 nt, Artificial Sequence
  Description of Artificial Sequence: Synthetic oligonucleotide
gcccuuggcugccuuggcu

SEQ ID NO: 3016143 - RNA, 19 nt, Artificial Sequence
  Description of Artificial Sequence: Synthetic oligonucleotide
caccaacacugcccagccu

SEQ ID NO: 3016144 - RNA, 19 nt, Artificial Sequence
  Description of Artificial Sequence: Synthetic oligonucleotide
caacacugcccagccugcu

SEQ ID NO: 3016145 - RNA, 19 nt, Artificial Sequence
  Description of Artificial Sequence: Synthetic oligonucleotide
ggccaggcccuuggcugcc

SEQ ID NO: 3016146 - RNA, 19 nt, Artificial Sequence
  Description of Artificial Sequence: Synthetic oligonucleotide
cuuuggagcccuggcuguu

SEQ ID NO: 3016147 - RNA, 19 nt, Artificial Sequence
  Description of Artificial Sequence: Synthetic oligonucleotide
cccuuggcugccuuggcuu

SEQ ID NO: 3016148 - RNA, 19 nt, Artificial Sequence
  Description of Artificial Sequence: Synthetic oligonucleotide
gcccagccugcuuuccagu

SEQ ID NO: 3016149 - RNA, 19 nt, Artificial Sequence
  Description of Artificial Sequence: Synthetic oligonucleotide
ccaggccaggcccuuggcu

SEQ ID NO: 3016150 - RNA, 19 nt, Artificial Sequence
  Description of Artificial Sequence: Synthetic oligonucleotide
ccucugguucauccauacu

SEQ ID NO: 3016151 - RNA, 19 nt, Artificial Sequence
  Description of Artificial Sequence: Synthetic oligonucleotide
ccagccugcuuuccaguuu

SEQ ID NO: 3016152 - RNA, 19 nt, Artificial Sequence
  Description of Artificial Sequence: Synthetic oligonucleotide
cccagccugcuuuccaguu

SEQ ID NO: 3016153 - RNA, 19 nt, Artificial Sequence
  Description of Artificial Sequence: Synthetic oligonucleotide
ccaggcccuuggcugccuu

SEQ ID NO: 3016154 - RNA, 19 nt, Artificial Sequence
  Description of Artificial Sequence: Synthetic oligonucleotide
aauucuuuuagucaguuuc

SEQ ID NO: 3016155 - RNA, 19 nt, Artificial Sequence
  Description of Artificial Sequence: Synthetic oligonucleotide
ucuaaauuaauucuuuuag

SEQ ID NO: 3016156 - RNA, 19 nt, Artificial Sequence
  Description of Artificial Sequence: Synthetic oligonucleotide
uuaaagaacauguuuacag

SEQ ID NO: 3016157 - RNA, 19 nt, Artificial Sequence
  Description of Artificial Sequence: Synthetic oligonucleotide
aaauuaauucuuuuaguca

SEQ ID NO: 3016158 - RNA, 19 nt, Artificial Sequence
  Description of Artificial Sequence: Synthetic oligonucleotide
uaaauuaauucuuuuaguc

SEQ ID NO: 3016159 - RNA, 19 nt, Artificial Sequence
  Description of Artificial Sequence: Synthetic oligonucleotide
ucugaaguaagacugguac

SEQ ID NO: 3016160 - RNA, 19 nt, Artificial Sequence
  Description of Artificial Sequence: Synthetic oligonucleotide
aaagaacauguuuacagcu

SEQ ID NO: 3016161 - RNA, 19 nt, Artificial Sequence
  Description of Artificial Sequence: Synthetic oligonucleotide
agaacauguuuacagcugc

SEQ ID NO: 3016162 - RNA, 19 nt, Artificial Sequence
  Description of Artificial Sequence: Synthetic oligonucleotide
ucuugagacauacuucugg

SEQ ID NO: 3016163 - RNA, 19 nt, Artificial Sequence
  Description of Artificial Sequence: Synthetic oligonucleotide
uucacaagcauauggaagc

SEQ ID NO: 3016164 - RNA, 19 nt, Artificial Sequence
  Description of Artificial Sequence: Synthetic oligonucleotide
uuucacaagcauauggaag

SEQ ID NO: 3016165 - RNA, 19 nt, Artificial Sequence
  Description of Artificial Sequence: Synthetic oligonucleotide
uugcauacuaagcugaaug

SEQ ID NO: 3016166 - RNA, 19 nt, Artificial Sequence
  Description of Artificial Sequence: Synthetic oligonucleotide
uuuagucaguuucuuaaag

SEQ ID NO: 3016167 - RNA, 19 nt, Artificial Sequence
  Description of Artificial Sequence: Synthetic oligonucleotide
uucuuaaagaacauguuua

SEQ ID NO: 3016168 - RNA, 19 nt, Artificial Sequence
  Description of Artificial Sequence: Synthetic oligonucleotide
uaucuugagacauacuucu

SEQ ID NO: 3016169 - RNA, 19 nt, Artificial Sequence
  Description of Artificial Sequence: Synthetic oligonucleotide
uaaagaacauguuuacagc

SEQ ID NO: 3016170 - RNA, 19 nt, Artificial Sequence
  Description of Artificial Sequence: Synthetic oligonucleotide
auggaagcugucuaggugg

SEQ ID NO: 3016171 - RNA, 19 nt, Artificial Sequence
  Description of Artificial Sequence: Synthetic oligonucleotide
cauacuaagcugaauggcc

SEQ ID NO: 3016172 - RNA, 19 nt, Artificial Sequence
  Description of Artificial Sequence: Synthetic oligonucleotide
ugcauacuaagcugaaugg

SEQ ID NO: 3016173 - RNA, 19 nt, Artificial Sequence
  Description of Artificial Sequence: Synthetic oligonucleotide
aacauguuuacagcugccc

SEQ ID NO: 3016174 - RNA, 19 nt, Artificial Sequence
  Description of Artificial Sequence: Synthetic oligonucleotide
uacaaugucuccuuggacu

SEQ ID NO: 3016175 - RNA, 19 nt, Artificial Sequence
  Description of Artificial Sequence: Synthetic oligonucleotide
ugagacauacuucuggaac

SEQ ID NO: 3016176 - RNA, 19 nt, Artificial Sequence
  Description of Artificial Sequence: Synthetic oligonucleotide
ucuuucacaagcauaugga

SEQ ID NO: 3016177 - RNA, 19 nt, Artificial Sequence
  Description of Artificial Sequence: Synthetic oligonucleotide
uuucuuaaagaacauguuu

SEQ ID NO: 3016178 - RNA, 19 nt, Artificial Sequence
  Description of Artificial Sequence: Synthetic oligonucleotide
acuaucuugagacauacuu

SEQ ID NO: 3016179 - RNA, 19 nt, Artificial Sequence
  Description of Artificial Sequence: Synthetic oligonucleotide
ugaaguaagacugguacug

SEQ ID NO: 3016180 - RNA, 19 nt, Artificial Sequence
  Description of Artificial Sequence: Synthetic oligonucleotide
gucuuucacaagcauaugg

SEQ ID NO: 3016181 - RNA, 19 nt, Artificial Sequence
  Description of Artificial Sequence: Synthetic oligonucleotide
aagcaugucuucuucucuc

SEQ ID NO: 3016182 - RNA, 19 nt, Artificial Sequence
  Description of Artificial Sequence: Synthetic oligonucleotide
ugcuuucuaaauuaauucu

SEQ ID NO: 3016183 - RNA, 19 nt, Artificial Sequence
  Description of Artificial Sequence: Synthetic oligonucleotide
uuagucaguuucuuaaaga

SEQ ID NO: 3016184 - RNA, 19 nt, Artificial Sequence
  Description of Artificial Sequence: Synthetic oligonucleotide
ugcugcuuuucaaaguagg

SEQ ID NO: 3016185 - RNA, 19 nt, Artificial Sequence
  Description of Artificial Sequence: Synthetic oligonucleotide
uugcuuucuaaauuaauuc

SEQ ID NO: 3016186 - RNA, 19 nt, Artificial Sequence
  Description of Artificial Sequence: Synthetic oligonucleotide
ucuaggugggucuaacucc

SEQ ID NO: 3016187 - RNA, 19 nt, Artificial Sequence
  Description of Artificial Sequence: Synthetic oligonucleotide
aucuuuucacaucuggaag

SEQ ID NO: 3016188 - RNA, 19 nt, Artificial Sequence
  Description of Artificial Sequence: Synthetic oligonucleotide
acauguuuacagcugcccg

SEQ ID NO: 3016189 - RNA, 19 nt, Artificial Sequence
  Description of Artificial Sequence: Synthetic oligonucleotide
aacuaccuugcauacuaag

SEQ ID NO: 3016190 - RNA, 19 nt, Artificial Sequence
  Description of Artificial Sequence: Synthetic oligonucleotide
cuggggacuaucuugagac

SEQ ID NO: 3016191 - RNA, 19 nt, Artificial Sequence
  Description of Artificial Sequence: Synthetic oligonucleotide
uacuucuggaacuaccuug

SEQ ID NO: 3016192 - RNA, 19 nt, Artificial Sequence
  Description of Artificial Sequence: Synthetic oligonucleotide
acuaccuugcauacuaagc

SEQ ID NO: 3016193 - RNA, 19 nt, Artificial Sequence
  Description of Artificial Sequence: Synthetic oligonucleotide
uauggaagcugucuaggug

SEQ ID NO: 3016194 - RNA, 19 nt, Artificial Sequence
  Description of Artificial Sequence: Synthetic oligonucleotide
acaaugucuccuuggacuc

SEQ ID NO: 3016195 - RNA, 19 nt, Artificial Sequence
  Description of Artificial Sequence: Synthetic oligonucleotide
ucuggaacuaccuugcaua

SEQ ID NO: 3016196 - RNA, 19 nt, Artificial Sequence
  Description of Artificial Sequence: Synthetic oligonucleotide
uagucaguuucuuaaagaa

SEQ ID NO: 3016197 - RNA, 19 nt, Artificial Sequence
  Description of Artificial Sequence: Synthetic oligonucleotide
uuucaaaguaggcuucucu

SEQ ID NO: 3016198 - RNA, 19 nt, Artificial Sequence
  Description of Artificial Sequence: Synthetic oligonucleotide
auacuaagcugaauggccc

SEQ ID NO: 3016199 - RNA, 19 nt, Artificial Sequence
  Description of Artificial Sequence: Synthetic oligonucleotide
uuucacaucuggaaguuau

SEQ ID NO: 3016200 - RNA, 19 nt, Artificial Sequence
  Description of Artificial Sequence: Synthetic oligonucleotide
ucaucuuuucacaucugga

SEQ ID NO: 3016201 - RNA, 19 nt, Artificial Sequence
  Description of Artificial Sequence: Synthetic oligonucleotide
uuucuugcuuucuaaauua

SEQ ID NO: 3016202 - RNA, 19 nt, Artificial Sequence
  Description of Artificial Sequence: Synthetic oligonucleotide
cucaucuuuucacaucugg

SEQ ID NO: 3016203 - RNA, 19 nt, Artificial Sequence
  Description of Artificial Sequence: Synthetic oligonucleotide
aaaguaggcuucucuccuc

SEQ ID NO: 3016204 - RNA, 19 nt, Artificial Sequence
  Description of Artificial Sequence: Synthetic oligonucleotide
gucaguuucuuaaagaaca

SEQ ID NO: 3016205 - RNA, 19 nt, Artificial Sequence
  Description of Artificial Sequence: Synthetic oligonucleotide
uucaaaguaggcuucucuc

SEQ ID NO: 3016206 - RNA, 19 nt, Artificial Sequence
  Description of Artificial Sequence: Synthetic oligonucleotide
augucuucuucucucgagg

SEQ ID NO: 3016207 - RNA, 19 nt, Artificial Sequence
  Description of Artificial Sequence: Synthetic oligonucleotide
cuuuuagucaguuucuuaa

SEQ ID NO: 3016208 - RNA, 19 nt, Artificial Sequence
  Description of Artificial Sequence: Synthetic oligonucleotide
uaagacugguacuggaugu

SEQ ID NO: 3016209 - RNA, 19 nt, Artificial Sequence
  Description of Artificial Sequence: Synthetic oligonucleotide
cuaucuugagacauacuuc

SEQ ID NO: 3016210 - RNA, 19 nt, Artificial Sequence
  Description of Artificial Sequence: Synthetic oligonucleotide
ucucgaggcaucaccuugg

SEQ ID NO: 3016211 - RNA, 19 nt, Artificial Sequence
  Description of Artificial Sequence: Synthetic oligonucleotide
acauacuucuggaacuacc

SEQ ID NO: 3016212 - RNA, 19 nt, Artificial Sequence
  Description of Artificial Sequence: Synthetic oligonucleotide
guuuacagcugcccgaagc

SEQ ID NO: 3016213 - RNA, 19 nt, Artificial Sequence
  Description of Artificial Sequence: Synthetic oligonucleotide
aaguaagacugguacugga

SEQ ID NO: 3016214 - RNA, 19 nt, Artificial Sequence
  Description of Artificial Sequence: Synthetic oligonucleotide
agcucuucugaaguaagac

SEQ ID NO: 3016215 - RNA, 19 nt, Artificial Sequence
  Description of Artificial Sequence: Synthetic oligonucleotide
guaagacugguacuggaug

SEQ ID NO: 3016216 - RNA, 19 nt, Artificial Sequence
  Description of Artificial Sequence: Synthetic oligonucleotide
ucuuccgcagcucuucuga

SEQ ID NO: 3016217 - RNA, 19 nt, Artificial Sequence
  Description of Artificial Sequence: Synthetic oligonucleotide
ugucuggggacuaucuuga

SEQ ID NO: 3016218 - RNA, 19 nt, Artificial Sequence
  Description of Artificial Sequence: Synthetic oligonucleotide
aagaacauguuuacagcug

SEQ ID NO: 3016219 - RNA, 19 nt, Artificial Sequence
  Description of Artificial Sequence: Synthetic oligonucleotide
agcugaauggcccugcgga

SEQ ID NO: 3016220 - RNA, 19 nt, Artificial Sequence
  Description of Artificial Sequence: Synthetic oligonucleotide
augucuggggacuaucuug

SEQ ID NO: 3016221 - RNA, 19 nt, Artificial Sequence
  Description of Artificial Sequence: Synthetic oligonucleotide
agucaguuucuuaaagaac

SEQ ID NO: 3016222 - RNA, 19 nt, Artificial Sequence
  Description of Artificial Sequence: Synthetic oligonucleotide
gaaguaagacugguacugg

SEQ ID NO: 3016223 - RNA, 19 nt, Artificial Sequence
  Description of Artificial Sequence: Synthetic oligonucleotide
uuuuagucaguuucuuaaa

SEQ ID NO: 3016224 - RNA, 19 nt, Artificial Sequence
  Description of Artificial Sequence: Synthetic oligonucleotide
cauauggaagcugucuagg

SEQ ID NO: 3016225 - RNA, 19 nt, Artificial Sequence
  Description of Artificial Sequence: Synthetic oligonucleotide
uaccuugcauacuaagcug

SEQ ID NO: 3016226 - RNA, 19 nt, Artificial Sequence
  Description of Artificial Sequence: Synthetic oligonucleotide
uuucuaaauuaauucuuuu

SEQ ID NO: 3016227 - RNA, 19 nt, Artificial Sequence
  Description of Artificial Sequence: Synthetic oligonucleotide
ugggucuaacuccugcugc

SEQ ID NO: 3016228 - RNA, 19 nt, Artificial Sequence
  Description of Artificial Sequence: Synthetic oligonucleotide
aggugggucuaacuccugc

SEQ ID NO: 3016229 - RNA, 19 nt, Artificial Sequence
  Description of Artificial Sequence: Synthetic oligonucleotide
uaggcuucucuccucuucc

SEQ ID NO: 3016230 - RNA, 19 nt, Artificial Sequence
  Description of Artificial Sequence: Synthetic oligonucleotide
uaagcugaauggcccugcg

SEQ ID NO: 3016231 - RNA, 19 nt, Artificial Sequence
  Description of Artificial Sequence: Synthetic oligonucleotide
agcaugucuucuucucucg

SEQ ID NO: 3016232 - RNA, 19 nt, Artificial Sequence
  Description of Artificial Sequence: Synthetic oligonucleotide
aagcugaauggcccugcgg

SEQ ID NO: 3016233 - RNA, 19 nt, Artificial Sequence
  Description of Artificial Sequence: Synthetic oligonucleotide
acugucucaucuuuucaca

SEQ ID NO: 3016234 - RNA, 19 nt, Artificial Sequence
  Description of Artificial Sequence: Synthetic oligonucleotide
uccgcagcucuucugaagu

SEQ ID NO: 3016235 - RNA, 19 nt, Artificial Sequence
  Description of Artificial Sequence: Synthetic oligonucleotide
ugguacuggaugucugggg

SEQ ID NO: 3016236 - RNA, 19 nt, Artificial Sequence
  Description of Artificial Sequence: Synthetic oligonucleotide
aagacugguacuggauguc

SEQ ID NO: 3016237 - RNA, 19 nt, Artificial Sequence
  Description of Artificial Sequence: Synthetic oligonucleotide
aaguaggcuucucuccucu

SEQ ID NO: 3016238 - RNA, 19 nt, Artificial Sequence
  Description of Artificial Sequence: Synthetic oligonucleotide
ucuggggacuaucuugaga

SEQ ID NO: 3016239 - RNA, 19 nt, Artificial Sequence
  Description of Artificial Sequence: Synthetic oligonucleotide
cuucucucgaggcaucacc

SEQ ID NO: 3016240 - RNA, 19 nt, Artificial Sequence
  Description of Artificial Sequence: Synthetic oligonucleotide
uucucucgaggcaucaccu

SEQ ID NO: 3016241 - RNA, 19 nt, Artificial Sequence
  Description of Artificial Sequence: Synthetic oligonucleotide
uggaagcugucuagguggg

SEQ ID NO: 3016242 - RNA, 19 nt, Artificial Sequence
  Description of Artificial Sequence: Synthetic oligonucleotide
ucgaacuuggggucggucu

SEQ ID NO: 3016243 - RNA, 19 nt, Artificial Sequence
  Description of Artificial Sequence: Synthetic oligonucleotide
uacagcugcccgaagcaug

SEQ ID NO: 3016244 - RNA, 19 nt, Artificial Sequence
  Description of Artificial Sequence: Synthetic oligonucleotide
auauggaagcugucuaggu

SEQ ID NO: 3016245 - RNA, 19 nt, Artificial Sequence
  Description of Artificial Sequence: Synthetic oligonucleotide
aauggcccugcggagauca

SEQ ID NO: 3016246 - RNA, 19 nt, Artificial Sequence
  Description of Artificial Sequence: Synthetic oligonucleotide
cacugucucaucuuuucac

SEQ ID NO: 3016247 - RNA, 19 nt, Artificial Sequence
  Description of Artificial Sequence: Synthetic oligonucleotide
cuugagacauacuucugga

SEQ ID NO: 3016248 - RNA, 19 nt, Artificial Sequence
  Description of Artificial Sequence: Synthetic oligonucleotide
ucuuuuagucaguuucuua

SEQ ID NO: 3016249 - RNA, 19 nt, Artificial Sequence
  Description of Artificial Sequence: Synthetic oligonucleotide
acaagcauauggaagcugu

SEQ ID NO: 3016250 - RNA, 19 nt, Artificial Sequence
  Description of Artificial Sequence: Synthetic oligonucleotide
gucuccuuggacuccacug

SEQ ID NO: 3016251 - RNA, 19 nt, Artificial Sequence
  Description of Artificial Sequence: Synthetic oligonucleotide
caucuuuucacaucuggaa

SEQ ID NO: 3016252 - RNA, 19 nt, Artificial Sequence
  Description of Artificial Sequence: Synthetic oligonucleotide
aagcugucuaggugggucu

SEQ ID NO: 3016253 - RNA, 19 nt, Artificial Sequence
  Description of Artificial Sequence: Synthetic oligonucleotide
uuaauucuuuuagucaguu

SEQ ID NO: 3016254 - RNA, 19 nt, Artificial Sequence
  Description of Artificial Sequence: Synthetic oligonucleotide
gucuaggugggucuaacuc

SEQ ID NO: 3016255 - RNA, 19 nt, Artificial Sequence
  Description of Artificial Sequence: Synthetic oligonucleotide
gagacauacuucuggaacu

SEQ ID NO: 3016256 - RNA, 19 nt, Artificial Sequence
  Description of Artificial Sequence: Synthetic oligonucleotide
uucuugcuuucuaaauuaa

SEQ ID NO: 3016257 - RNA, 19 nt, Artificial Sequence
  Description of Artificial Sequence: Synthetic oligonucleotide
uuggggucggucuuucaca

SEQ ID NO: 3016258 - RNA, 19 nt, Artificial Sequence
  Description of Artificial Sequence: Synthetic oligonucleotide
ugucucaucuuuucacauc

SEQ ID NO: 3016259 - RNA, 19 nt, Artificial Sequence
  Description of Artificial Sequence: Synthetic oligonucleotide
agcauauggaagcugucua

SEQ ID NO: 3016260 - RNA, 19 nt, Artificial Sequence
  Description of Artificial Sequence: Synthetic oligonucleotide
cuuggggucggucuuucac

SEQ ID NO: 3016261 - RNA, 19 nt, Artificial Sequence
  Description of Artificial Sequence: Synthetic oligonucleotide
ucggucuuucacaagcaua

SEQ ID NO: 3016262 - RNA, 19 nt, Artificial Sequence
  Description of Artificial Sequence: Synthetic oligonucleotide
ucaccuuggcuguuuuccc

SEQ ID NO: 3016263 - RNA, 19 nt, Artificial Sequence
  Description of Artificial Sequence: Synthetic oligonucleotide
cuggaacuaccuugcauac

SEQ ID NO: 3016264 - RNA, 19 nt, Artificial Sequence
  Description of Artificial Sequence: Synthetic oligonucleotide
uugagacauacuucuggaa

SEQ ID NO: 3016265 - RNA, 19 nt, Artificial Sequence
  Description of Artificial Sequence: Synthetic oligonucleotide
auucuuuuagucaguuucu

SEQ ID NO: 3016266 - RNA, 19 nt, Artificial Sequence
  Description of Artificial Sequence: Synthetic oligonucleotide
uacuaagcugaauggcccu

SEQ ID NO: 3016267 - RNA, 19 nt, Artificial Sequence
  Description of Artificial Sequence: Synthetic oligonucleotide
ucacaucuggaaguuauua

SEQ ID NO: 3016268 - RNA, 19 nt, Artificial Sequence
  Description of Artificial Sequence: Synthetic oligonucleotide
gaagcugucuagguggguc

SEQ ID NO: 3016269 - RNA, 19 nt, Artificial Sequence
  Description of Artificial Sequence: Synthetic oligonucleotide
cauguuuacagcugcccga

SEQ ID NO: 3016270 - RNA, 19 nt, Artificial Sequence
  Description of Artificial Sequence: Synthetic oligonucleotide
cuugcuuucuaaauuaauu

SEQ ID NO: 3016271 - RNA, 19 nt, Artificial Sequence
  Description of Artificial Sequence: Synthetic oligonucleotide
cuuaaagaacauguuuaca

SEQ ID NO: 3016272 - RNA, 19 nt, Artificial Sequence
  Description of Artificial Sequence: Synthetic oligonucleotide
uucugaaguaagacuggua

SEQ ID NO: 3016273 - RNA, 19 nt, Artificial Sequence
  Description of Artificial Sequence: Synthetic oligonucleotide
cuaccuugcauacuaagcu

SEQ ID NO: 3016274 - RNA, 19 nt, Artificial Sequence
  Description of Artificial Sequence: Synthetic oligonucleotide
cuacaaugucuccuuggac

SEQ ID NO: 3016275 - RNA, 19 nt, Artificial Sequence
  Description of Artificial Sequence: Synthetic oligonucleotide
ugaauggcccugcggagau

SEQ ID NO: 3016276 - RNA, 19 nt, Artificial Sequence
  Description of Artificial Sequence: Synthetic oligonucleotide
gaacauguuuacagcugcc

SEQ ID NO: 3016277 - RNA, 19 nt, Artificial Sequence
  Description of Artificial Sequence: Synthetic oligonucleotide
ggaacuaccuugcauacua

SEQ ID NO: 3016278 - RNA, 19 nt, Artificial Sequence
  Description of Artificial Sequence: Synthetic oligonucleotide
gggucggucuuucacaagc

SEQ ID NO: 3016279 - RNA, 19 nt, Artificial Sequence
  Description of Artificial Sequence: Synthetic oligonucleotide
uuccgcagcucuucugaag

SEQ ID NO: 3016280 - RNA, 19 nt, Artificial Sequence
  Description of Artificial Sequence: Synthetic oligonucleotide
gucucaucuuuucacaucu

SEQ ID NO: 3016281 - RNA, 19 nt, Artificial Sequence
  Description of Artificial Sequence: Synthetic oligonucleotide
cgaggcaucaccuuggcug

SEQ ID NO: 3016282 - RNA, 19 nt, Artificial Sequence
  Description of Artificial Sequence: Synthetic oligonucleotide
gcauauggaagcugucuag

SEQ ID NO: 3016283 - RNA, 19 nt, Artificial Sequence
  Description of Artificial Sequence: Synthetic oligonucleotide
cugcugcugcuuuucaaag

SEQ ID NO: 3016284 - RNA, 19 nt, Artificial Sequence
  Description of Artificial Sequence: Synthetic oligonucleotide
cucucgaggcaucaccuug

SEQ ID NO: 3016285 - RNA, 19 nt, Artificial Sequence
  Description of Artificial Sequence: Synthetic oligonucleotide
ugcugcugcuuuucaaagu

SEQ ID NO: 3016286 - RNA, 19 nt, Artificial Sequence
  Description of Artificial Sequence: Synthetic oligonucleotide
uguuuacagcugcccgaag

SEQ ID NO: 3016287 - RNA, 19 nt, Artificial Sequence
  Description of Artificial Sequence: Synthetic oligonucleotide
ugucuaggugggucuaacu

SEQ ID NO: 3016288 - RNA, 19 nt, Artificial Sequence
  Description of Artificial Sequence: Synthetic oligonucleotide
uuggacuccacugucucau

SEQ ID NO: 3016289 - RNA, 19 nt, Artificial Sequence
  Description of Artificial Sequence: Synthetic oligonucleotide
uccuuggacuccacugucu

SEQ ID NO: 3016290 - RNA, 19 nt, Artificial Sequence
  Description of Artificial Sequence: Synthetic oligonucleotide
cauacuucuggaacuaccu

SEQ ID NO: 3016291 - RNA, 19 nt, Artificial Sequence
  Description of Artificial Sequence: Synthetic oligonucleotide
gcggagaucagcuucuuca

SEQ ID NO: 3016292 - RNA, 19 nt, Artificial Sequence
  Description of Artificial Sequence: Synthetic oligonucleotide
gguacuggaugucugggga

SEQ ID NO: 3016293 - RNA, 19 nt, Artificial Sequence
  Description of Artificial Sequence: Synthetic oligonucleotide
aacuuggggucggucuuuc

SEQ ID NO: 3016294 - RNA, 19 nt, Artificial Sequence
  Description of Artificial Sequence: Synthetic oligonucleotide
gugggucuaacuccugcug

SEQ ID NO: 3016295 - RNA, 19 nt, Artificial Sequence
  Description of Artificial Sequence: Synthetic oligonucleotide
ucacaagcauauggaagcu

SEQ ID NO: 3016296 - RNA, 19 nt, Artificial Sequence
  Description of Artificial Sequence: Synthetic oligonucleotide
cuaagcugaauggcccugc

SEQ ID NO: 3016297 - RNA, 19 nt, Artificial Sequence
  Description of Artificial Sequence: Synthetic oligonucleotide
aggcuucucuccucuuccg

SEQ ID NO: 3016298 - RNA, 19 nt, Artificial Sequence
  Description of Artificial Sequence: Synthetic oligonucleotide
gcauacuaagcugaauggc

SEQ ID NO: 3016299 - RNA, 19 nt, Artificial Sequence
  Description of Artificial Sequence: Synthetic oligonucleotide
aguaagacugguacuggau

SEQ ID NO: 3016300 - RNA, 19 nt, Artificial Sequence
  Description of Artificial Sequence: Synthetic oligonucleotide
gaagcaugucuucuucucu

SEQ ID NO: 3016301 - RNA, 19 nt, Artificial Sequence
  Description of Artificial Sequence: Synthetic oligonucleotide
uucacaucuggaaguuauu

SEQ ID NO: 3016302 - RNA, 19 nt, Artificial Sequence
  Description of Artificial Sequence: Synthetic oligonucleotide
accuugcauacuaagcuga

SEQ ID NO: 3016303 - RNA, 19 nt, Artificial Sequence
  Description of Artificial Sequence: Synthetic oligonucleotide
caagcauauggaagcuguc

SEQ ID NO: 3016304 - RNA, 19 nt, Artificial Sequence
  Description of Artificial Sequence: Synthetic oligonucleotide
ucucuccucuuccgcagcu

SEQ ID NO: 3016305 - RNA, 19 nt, Artificial Sequence
  Description of Artificial Sequence: Synthetic oligonucleotide
auacuucuggaacuaccuu

SEQ ID NO: 3016306 - RNA, 19 nt, Artificial Sequence
  Description of Artificial Sequence: Synthetic oligonucleotide
ugucuccuuggacuccacu

SEQ ID NO: 3016307 - RNA, 19 nt, Artificial Sequence
  Description of Artificial Sequence: Synthetic oligonucleotide
uggggucggucuuucacaa

SEQ ID NO: 3016308 - RNA, 19 nt, Artificial Sequence
  Description of Artificial Sequence: Synthetic oligonucleotide
guaggcuucucuccucuuc

SEQ ID NO: 3016309 - RNA, 19 nt, Artificial Sequence
  Description of Artificial Sequence: Synthetic oligonucleotide
uucuuuuagucaguuucuu

SEQ ID NO: 3016310 - RNA, 19 nt, Artificial Sequence
  Description of Artificial Sequence: Synthetic oligonucleotide
guacuggaugucuggggac

SEQ ID NO: 3016311 - RNA, 19 nt, Artificial Sequence
  Description of Artificial Sequence: Synthetic oligonucleotide
acuaagcugaauggcccug

SEQ ID NO: 3016312 - RNA, 19 nt, Artificial Sequence
  Description of Artificial Sequence: Synthetic oligonucleotide
gacugguacuggaugucug

SEQ ID NO: 3016313 - RNA, 19 nt, Artificial Sequence
  Description of Artificial Sequence: Synthetic oligonucleotide
uggggacuaucuugagaca

SEQ ID NO: 3016314 - RNA, 19 nt, Artificial Sequence
  Description of Artificial Sequence: Synthetic oligonucleotide
gacauacuucuggaacuac

SEQ ID NO: 3016315 - RNA, 19 nt, Artificial Sequence
  Description of Artificial Sequence: Synthetic oligonucleotide
gcugcuuuucaaaguaggc

SEQ ID NO: 3016316 - RNA, 19 nt, Artificial Sequence
  Description of Artificial Sequence: Synthetic oligonucleotide
uucuucucucgaggcauca

SEQ ID NO: 3016317 - RNA, 19 nt, Artificial Sequence
  Description of Artificial Sequence: Synthetic oligonucleotide
ggacuaucuugagacauac

SEQ ID NO: 3016318 - RNA, 19 nt, Artificial Sequence
  Description of Artificial Sequence: Synthetic oligonucleotide
auguuuacagcugcccgaa

SEQ ID NO: 3016319 - RNA, 19 nt, Artificial Sequence
  Description of Artificial Sequence: Synthetic oligonucleotide
caaaguaggcuucucuccu

SEQ ID NO: 3016320 - RNA, 19 nt, Artificial Sequence
  Description of Artificial Sequence: Synthetic oligonucleotide
uggaacuaccuugcauacu

SEQ ID NO: 3016321 - RNA, 19 nt, Artificial Sequence
  Description of Artificial Sequence: Synthetic oligonucleotide
caucuggaaguuauuauuu

SEQ ID NO: 3016322 - RNA, 19 nt, Artificial Sequence
  Description of Artificial Sequence: Synthetic oligonucleotide
cacaagcauauggaagcug

SEQ ID NO: 3016323 - RNA, 19 nt, Artificial Sequence
  Description of Artificial Sequence: Synthetic oligonucleotide
uuuucacaucuggaaguua

SEQ ID NO: 3016324 - RNA, 19 nt, Artificial Sequence
  Description of Artificial Sequence: Synthetic oligonucleotide
ucgaggcaucaccuuggcu

SEQ ID NO: 3016325 - RNA, 19 nt, Artificial Sequence
  Description of Artificial Sequence: Synthetic oligonucleotide
ugcggagaucagcuucuuc

SEQ ID NO: 3016326 - RNA, 19 nt, Artificial Sequence
  Description of Artificial Sequence: Synthetic oligonucleotide
cucgaggcaucaccuuggc

SEQ ID NO: 3016327 - RNA, 19 nt, Artificial Sequence
  Description of Artificial Sequence: Synthetic oligonucleotide
agacauacuucuggaacua

SEQ ID NO: 3016328 - RNA, 19 nt, Artificial Sequence
  Description of Artificial Sequence: Synthetic oligonucleotide
cugaaguaagacugguacu

SEQ ID NO: 3016329 - RNA, 19 nt, Artificial Sequence
  Description of Artificial Sequence: Synthetic oligonucleotide
cuucuucucucgaggcauc

SEQ ID NO: 3016330 - RNA, 19 nt, Artificial Sequence
  Description of Artificial Sequence: Synthetic oligonucleotide
caaugucuccuuggacucc

SEQ ID NO: 3016331 - RNA, 19 nt, Artificial Sequence
  Description of Artificial Sequence: Synthetic oligonucleotide
gaggcaucaccuuggcugu

SEQ ID NO: 3016332 - RNA, 19 nt, Artificial Sequence
  Description of Artificial Sequence: Synthetic oligonucleotide
uccucuuccgcagcucuuc

SEQ ID NO: 3016333 - RNA, 19 nt, Artificial Sequence
  Description of Artificial Sequence: Synthetic oligonucleotide
cuccuuggacuccacuguc

SEQ ID NO: 3016334 - RNA, 19 nt, Artificial Sequence
  Description of Artificial Sequence: Synthetic oligonucleotide
cuaggugggucuaacuccu

SEQ ID NO: 3016335 - RNA, 19 nt, Artificial Sequence
  Description of Artificial Sequence: Synthetic oligonucleotide
gcugaauggcccugcggag

SEQ ID NO: 3016336 - RNA, 19 nt, Artificial Sequence
  Description of Artificial Sequence: Synthetic oligonucleotide
ucuucucucgaggcaucac

SEQ ID NO: 3016337 - RNA, 19 nt, Artificial Sequence
  Description of Artificial Sequence: Synthetic oligonucleotide
cugcuuuucaaaguaggcu

SEQ ID NO: 3016338 - RNA, 19 nt, Artificial Sequence
  Description of Artificial Sequence: Synthetic oligonucleotide
uaggugggucuaacuccug

SEQ ID NO: 3016339 - RNA, 19 nt, Artificial Sequence
  Description of Artificial Sequence: Synthetic oligonucleotide
cuuggacuccacugucuca

SEQ ID NO: 3016340 - RNA, 19 nt, Artificial Sequence
  Description of Artificial Sequence: Synthetic oligonucleotide
uggaugucuggggacuauc

SEQ ID NO: 3016341 - RNA, 19 nt, Artificial Sequence
  Description of Artificial Sequence: Synthetic oligonucleotide
cucuuccgcagcucuucug

SEQ ID NO: 3016342 - RNA, 19 nt, Artificial Sequence
  Description of Artificial Sequence: Synthetic oligonucleotide
gucuggggacuaucuugag

SEQ ID NO: 3016343 - RNA, 19 nt, Artificial Sequence
  Description of Artificial Sequence: Synthetic oligonucleotide
cacaucuggaaguuauuau

SEQ ID NO: 3016344 - RNA, 19 nt, Artificial Sequence
  Description of Artificial Sequence: Synthetic oligonucleotide
gcugcugcugcuuuucaaa

SEQ ID NO: 3016345 - RNA, 19 nt, Artificial Sequence
  Description of Artificial Sequence: Synthetic oligonucleotide
caucaccuuggcuguuuuc

SEQ ID NO: 3016346 - RNA, 19 nt, Artificial Sequence
  Description of Artificial Sequence: Synthetic oligonucleotide
cagcucuucugaaguaaga

SEQ ID NO: 3016347 - RNA, 19 nt, Artificial Sequence
  Description of Artificial Sequence: Synthetic oligonucleotide
cugucuaggugggucuaac

SEQ ID NO: 3016348 - RNA, 19 nt, Artificial Sequence
  Description of Artificial Sequence: Synthetic oligonucleotide
uggcccugcggagaucagc

SEQ ID NO: 3016349 - RNA, 19 nt, Artificial Sequence
  Description of Artificial Sequence: Synthetic oligonucleotide
uucgaacuuggggucgguc

SEQ ID NO: 3016350 - RNA, 19 nt, Artificial Sequence
  Description of Artificial Sequence: Synthetic oligonucleotide
gcagcucuucugaaguaag

SEQ ID NO: 3016351 - RNA, 19 nt, Artificial Sequence
  Description of Artificial Sequence: Synthetic oligonucleotide
caccuuggcuguuuuccca

SEQ ID NO: 3016352 - RNA, 19 nt, Artificial Sequence
  Description of Artificial Sequence: Synthetic oligonucleotide
gaugucuggggacuaucuu

SEQ ID NO: 3016353 - RNA, 19 nt, Artificial Sequence
  Description of Artificial Sequence: Synthetic oligonucleotide
gcucuucugaaguaagacu

SEQ ID NO: 3016354 - RNA, 19 nt, Artificial Sequence
  Description of Artificial Sequence: Synthetic oligonucleotide
cugaauggcccugcggaga

SEQ ID NO: 3016355 - RNA, 19 nt, Artificial Sequence
  Description of Artificial Sequence: Synthetic oligonucleotide
acuuggggucggucuuuca

SEQ ID NO: 3016356 - RNA, 19 nt, Artificial Sequence
  Description of Artificial Sequence: Synthetic oligonucleotide
aguaggcuucucuccucuu

SEQ ID NO: 3016357 - RNA, 19 nt, Artificial Sequence
  Description of Artificial Sequence: Synthetic oligonucleotide
cgaagcaugucuucuucuc

SEQ ID NO: 3016358 - RNA, 19 nt, Artificial Sequence
  Description of Artificial Sequence: Synthetic oligonucleotide
gaacuaccuugcauacuaa

SEQ ID NO: 3016359 - RNA, 19 nt, Artificial Sequence
  Description of Artificial Sequence: Synthetic oligonucleotide
ccuuggacuccacugucuc

SEQ ID NO: 3016360 - RNA, 19 nt, Artificial Sequence
  Description of Artificial Sequence: Synthetic oligonucleotide
cuucugaaguaagacuggu

SEQ ID NO: 3016361 - RNA, 19 nt, Artificial Sequence
  Description of Artificial Sequence: Synthetic oligonucleotide
ggucuaacuccugcugcug

SEQ ID NO: 3016362 - RNA, 19 nt, Artificial Sequence
  Description of Artificial Sequence: Synthetic oligonucleotide
cugucucaucuuuucacau

SEQ ID NO: 3016363 - RNA, 19 nt, Artificial Sequence
  Description of Artificial Sequence: Synthetic oligonucleotide
ggucuuucacaagcauaug

SEQ ID NO: 3016364 - RNA, 19 nt, Artificial Sequence
  Description of Artificial Sequence: Synthetic oligonucleotide
ggugggucuaacuccugcu

SEQ ID NO: 3016365 - RNA, 19 nt, Artificial Sequence
  Description of Artificial Sequence: Synthetic oligonucleotide
cccugcggagaucagcuuc

SEQ ID NO: 3016366 - RNA, 19 nt, Artificial Sequence
  Description of Artificial Sequence: Synthetic oligonucleotide
cuuuucacaucuggaaguu

SEQ ID NO: 3016367 - RNA, 19 nt, Artificial Sequence
  Description of Artificial Sequence: Synthetic oligonucleotide
cccgaagcaugucuucuuc

SEQ ID NO: 3016368 - RNA, 19 nt, Artificial Sequence
  Description of Artificial Sequence: Synthetic oligonucleotide
cuuccgcagcucuucugaa

SEQ ID NO: 3016369 - RNA, 19 nt, Artificial Sequence
  Description of Artificial Sequence: Synthetic oligonucleotide
augucuccuuggacuccac

SEQ ID NO: 3016370 - RNA, 19 nt, Artificial Sequence
  Description of Artificial Sequence: Synthetic oligonucleotide
acuggaugucuggggacua

SEQ ID NO: 3016371 - RNA, 19 nt, Artificial Sequence
  Description of Artificial Sequence: Synthetic oligonucleotide
gacuaucuugagacauacu

SEQ ID NO: 3016372 - RNA, 19 nt, Artificial Sequence
  Description of Artificial Sequence: Synthetic oligonucleotide
gucggucuuucacaagcau

SEQ ID NO: 3016373 - RNA, 19 nt, Artificial Sequence
  Description of Artificial Sequence: Synthetic oligonucleotide
ggggucggucuuucacaag

SEQ ID NO: 3016374 - RNA, 19 nt, Artificial Sequence
  Description of Artificial Sequence: Synthetic oligonucleotide
ggucggucuuucacaagca

SEQ ID NO: 3016375 - RNA, 19 nt, Artificial Sequence
  Description of Artificial Sequence: Synthetic oligonucleotide
cucuccucuuccgcagcuc

SEQ ID NO: 3016376 - RNA, 19 nt, Artificial Sequence
  Description of Artificial Sequence: Synthetic oligonucleotide
cccuucgaacuuggggucg

SEQ ID NO: 3016377 - RNA, 19 nt, Artificial Sequence
  Description of Artificial Sequence: Synthetic oligonucleotide
cuugcauacuaagcugaau

SEQ ID NO: 3016378 - RNA, 19 nt, Artificial Sequence
  Description of Artificial Sequence: Synthetic oligonucleotide
ggggacuaucuugagacau

SEQ ID NO: 3016379 - RNA, 19 nt, Artificial Sequence
  Description of Artificial Sequence: Synthetic oligonucleotide
ccccuucgaacuugggguc

SEQ ID NO: 3016380 - RNA, 19 nt, Artificial Sequence
  Description of Artificial Sequence: Synthetic oligonucleotide
agcugucuaggugggucua

SEQ ID NO: 3016381 - RNA, 19 nt, Artificial Sequence
  Description of Artificial Sequence: Synthetic oligonucleotide
ggaugucuggggacuaucu

SEQ ID NO: 3016382 - RNA, 19 nt, Artificial Sequence
  Description of Artificial Sequence: Synthetic oligonucleotide
cggucuuucacaagcauau

SEQ ID NO: 3016383 - RNA, 19 nt, Artificial Sequence
  Description of Artificial Sequence: Synthetic oligonucleotide
ccuugcauacuaagcugaa

SEQ ID NO: 3016384 - RNA, 19 nt, Artificial Sequence
  Description of Artificial Sequence: Synthetic oligonucleotide
gaauggcccugcggagauc

SEQ ID NO: 3016385 - RNA, 19 nt, Artificial Sequence
  Description of Artificial Sequence: Synthetic oligonucleotide
gggacuaucuugagacaua

SEQ ID NO: 3016386 - RNA, 19 nt, Artificial Sequence
  Description of Artificial Sequence: Synthetic oligonucleotide
gaacuuggggucggucuuu

SEQ ID NO: 3016387 - RNA, 19 nt, Artificial Sequence
  Description of Artificial Sequence: Synthetic oligonucleotide
ccugcggagaucagcuucu

SEQ ID NO: 3016388 - RNA, 19 nt, Artificial Sequence
  Description of Artificial Sequence: Synthetic oligonucleotide
auggcccugcggagaucag

SEQ ID NO: 3016389 - RNA, 19 nt, Artificial Sequence
  Description of Artificial Sequence: Synthetic oligonucleotide
ccgaagcaugucuucuucu

SEQ ID NO: 3016390 - RNA, 19 nt, Artificial Sequence
  Description of Artificial Sequence: Synthetic oligonucleotide
gcugucuaggugggucuaa

SEQ ID NO: 3016391 - RNA, 19 nt, Artificial Sequence
  Description of Artificial Sequence: Synthetic oligonucleotide
aggcaucaccuuggcuguu

SEQ ID NO: 3016392 - RNA, 19 nt, Artificial Sequence
  Description of Artificial Sequence: Synthetic oligonucleotide
cuggaugucuggggacuau

SEQ ID NO: 3016393 - RNA, 19 nt, Artificial Sequence
  Description of Artificial Sequence: Synthetic oligonucleotide
cgcagcucuucugaaguaa

SEQ ID NO: 3016394 - RNA, 19 nt, Artificial Sequence
  Description of Artificial Sequence: Synthetic oligonucleotide
cuccucuuccgcagcucuu

SEQ ID NO: 3016395 - RNA, 19 nt, Artificial Sequence
  Description of Artificial Sequence: Synthetic oligonucleotide
cuucgaacuuggggucggu

SEQ ID NO: 3016396 - RNA, 19 nt, Artificial Sequence
  Description of Artificial Sequence: Synthetic oligonucleotide
ggaagcugucuaggugggu

SEQ ID NO: 3016397 - RNA, 19 nt, Artificial Sequence
  Description of Artificial Sequence: Synthetic oligonucleotide
cggagaucagcuucuucau

SEQ ID NO: 3016398 - RNA, 19 nt, Artificial Sequence
  Description of Artificial Sequence: Synthetic oligonucleotide
ccgcagcucuucugaagua

SEQ ID NO: 3016399 - RNA, 19 nt, Artificial Sequence
  Description of Artificial Sequence: Synthetic oligonucleotide
cgaacuuggggucggucuu

SEQ ID NO: 3016400 - RNA, 19 nt, Artificial Sequence
  Description of Artificial Sequence: Synthetic oligonucleotide
ccucuuccgcagcucuucu

SEQ ID NO: 3016401 - RNA, 19 nt, Artificial Sequence
  Description of Artificial Sequence: Synthetic oligonucleotide
cugcggagaucagcuucuu

SEQ ID NO: 3016402 - RNA, 19 nt, Artificial Sequence
  Description of Artificial Sequence: Synthetic oligonucleotide
gcccugcggagaucagcuu

SEQ ID NO: 3016403 - RNA, 19 nt, Artificial Sequence
  Description of Artificial Sequence: Synthetic oligonucleotide
auaauuuuccuuuuauucc

SEQ ID NO: 3016404 - RNA, 19 nt, Artificial Sequence
  Description of Artificial Sequence: Synthetic oligonucleotide
aucaaguacacauuggugg

SEQ ID NO: 3016405 - RNA, 19 nt, Artificial Sequence
  Description of Artificial Sequence: Synthetic oligonucleotide
cauagaaccaucaucaccc

SEQ ID NO: 3016406 - RNA, 19 nt, Artificial Sequence
  Description of Artificial Sequence: Synthetic oligonucleotide
aagauucucauaauuuucc

SEQ ID NO: 3016407 - RNA, 19 nt, Artificial Sequence
  Description of Artificial Sequence: Synthetic oligonucleotide
ugaaguuucauuccaacga

SEQ ID NO: 3016408 - RNA, 19 nt, Artificial Sequence
  Description of Artificial Sequence: Synthetic oligonucleotide
uuucagugaacuuuaauca

SEQ ID NO: 3016409 - RNA, 19 nt, Artificial Sequence
  Description of Artificial Sequence: Synthetic oligonucleotide
ugaacuuuaaucacuucag

SEQ ID NO: 3016410 - RNA, 19 nt, Artificial Sequence
  Description of Artificial Sequence: Synthetic oligonucleotide
cauaauuuuccuuuuauuc

SEQ ID NO: 3016411 - RNA, 19 nt, Artificial Sequence
  Description of Artificial Sequence: Synthetic oligonucleotide
aucacuaucaaguacacau

SEQ ID NO: 3016412 - RNA, 19 nt, Artificial Sequence
  Description of Artificial Sequence: Synthetic oligonucleotide
uuucauuccaacgagagcu

SEQ ID NO: 3016413 - RNA, 19 nt, Artificial Sequence
  Description of Artificial Sequence: Synthetic oligonucleotide
gagaccaaagcuaacaagg

SEQ ID NO: 3016414 - RNA, 19 nt, Artificial Sequence
  Description of Artificial Sequence: Synthetic oligonucleotide
uuggcauacaugaagagac

SEQ ID NO: 3016415 - RNA, 19 nt, Artificial Sequence
  Description of Artificial Sequence: Synthetic oligonucleotide
aacuuuaaucacuucaggu

SEQ ID NO: 3016416 - RNA, 19 nt, Artificial Sequence
  Description of Artificial Sequence: Synthetic oligonucleotide
acuuuaaucacuucaggug

SEQ ID NO: 3016417 - RNA, 19 nt, Artificial Sequence
  Description of Artificial Sequence: Synthetic oligonucleotide
acaagguuucuucugaagg

SEQ ID NO: 3016418 - RNA, 19 nt, Artificial Sequence
  Description of Artificial Sequence: Synthetic oligonucleotide
cuuuaaucacuucaggugc

SEQ ID NO: 3016419 - RNA, 19 nt, Artificial Sequence
  Description of Artificial Sequence: Synthetic oligonucleotide
cacaccauaacuuccagcc

SEQ ID NO: 3016420 - RNA, 19 nt, Artificial Sequence
  Description of Artificial Sequence: Synthetic oligonucleotide
aaggaucacuaucaaguac

SEQ ID NO: 3016421 - RNA, 19 nt, Artificial Sequence
  Description of Artificial Sequence: Synthetic oligonucleotide
ucauacuuucuugaaaugg

SEQ ID NO: 3016422 - RNA, 19 nt, Artificial Sequence
  Description of Artificial Sequence: Synthetic oligonucleotide
auaacuuccagccauggga

SEQ ID NO: 3016423 - RNA, 19 nt, Artificial Sequence
  Description of Artificial Sequence: Synthetic oligonucleotide
acuuucuugaaauggaaug

SEQ ID NO: 3016424 - RNA, 19 nt, Artificial Sequence
  Description of Artificial Sequence: Synthetic oligonucleotide
uacaugaagagaccaaagc

SEQ ID NO: 3016425 - RNA, 19 nt, Artificial Sequence
  Description of Artificial Sequence: Synthetic oligonucleotide
uguguaauccauagaacca

SEQ ID NO: 3016426 - RNA, 19 nt, Artificial Sequence
  Description of Artificial Sequence: Synthetic oligonucleotide
uuccuuuuauuccucuugg

SEQ ID NO: 3016427 - RNA, 19 nt, Artificial Sequence
  Description of Artificial Sequence: Synthetic oligonucleotide
aaagcuaacaaggaucacu

SEQ ID NO: 3016428 - RNA, 19 nt, Artificial Sequence
  Description of Artificial Sequence: Synthetic oligonucleotide
uaauuuuccuuuuauuccu

SEQ ID NO: 3016429 - RNA, 19 nt, Artificial Sequence
  Description of Artificial Sequence: Synthetic oligonucleotide
acacuaaagauucucauaa

SEQ ID NO: 3016430 - RNA, 19 nt, Artificial Sequence
  Description of Artificial Sequence: Synthetic oligonucleotide
gaaguuucauuccaacgag

SEQ ID NO: 3016431 - RNA, 19 nt, Artificial Sequence
  Description of Artificial Sequence: Synthetic oligonucleotide
ugagucugaaguuucauuc

SEQ ID NO: 3016432 - RNA, 19 nt, Artificial Sequence
  Description of Artificial Sequence: Synthetic oligonucleotide
aacaaggaucacuaucaag

SEQ ID NO: 3016433 - RNA, 19 nt, Artificial Sequence
  Description of Artificial Sequence: Synthetic oligonucleotide
ucuuaagcgaauuuugcuc

SEQ ID NO: 3016434 - RNA, 19 nt, Artificial Sequence
  Description of Artificial Sequence: Synthetic oligonucleotide
acaaggaucacuaucaagu

SEQ ID NO: 3016435 - RNA, 19 nt, Artificial Sequence
  Description of Artificial Sequence: Synthetic oligonucleotide
gaacuuuaaucacuucagg

SEQ ID NO: 3016436 - RNA, 19 nt, Artificial Sequence
  Description of Artificial Sequence: Synthetic oligonucleotide
cuaacaaggaucacuauca

SEQ ID NO: 3016437 - RNA, 19 nt, Artificial Sequence
  Description of Artificial Sequence: Synthetic oligonucleotide
uugucuuaagcgaauuuug

SEQ ID NO: 3016438 - RNA, 19 nt, Artificial Sequence
  Description of Artificial Sequence: Synthetic oligonucleotide
uucauuccaggcuucgugg

SEQ ID NO: 3016439 - RNA, 19 nt, Artificial Sequence
  Description of Artificial Sequence: Synthetic oligonucleotide
uaucaaguacacauuggug

SEQ ID NO: 3016440 - RNA, 19 nt, Artificial Sequence
  Description of Artificial Sequence: Synthetic oligonucleotide
accaucaucacccaucaca

SEQ ID NO: 3016441 - RNA, 19 nt, Artificial Sequence
  Description of Artificial Sequence: Synthetic oligonucleotide
ugucuuaagcgaauuuugc

SEQ ID NO: 3016442 - RNA, 19 nt, Artificial Sequence
  Description of Artificial Sequence: Synthetic oligonucleotide
uggacuguguaauccauag

SEQ ID NO: 3016443 - RNA, 19 nt, Artificial Sequence
  Description of Artificial Sequence: Synthetic oligonucleotide
gacuguguaauccauagaa

SEQ ID NO: 3016444 - RNA, 19 nt, Artificial Sequence
  Description of Artificial Sequence: Synthetic oligonucleotide
ucaaguacacauugguggc

SEQ ID NO: 3016445 - RNA, 19 nt, Artificial Sequence
  Description of Artificial Sequence: Synthetic oligonucleotide
aaucacuucaggugcugag

SEQ ID NO: 3016446 - RNA, 19 nt, Artificial Sequence
  Description of Artificial Sequence: Synthetic oligonucleotide
aagcgaauuuugcucauug

SEQ ID NO: 3016447 - RNA, 19 nt, Artificial Sequence
  Description of Artificial Sequence: Synthetic oligonucleotide
ucagugaacuuuaaucacu

SEQ ID NO: 3016448 - RNA, 19 nt, Artificial Sequence
  Description of Artificial Sequence: Synthetic oligonucleotide
acucauacuuucuugaaau

SEQ ID NO: 3016449 - RNA, 19 nt, Artificial Sequence
  Description of Artificial Sequence: Synthetic oligonucleotide
ugguuguugguacucauac

SEQ ID NO: 3016450 - RNA, 19 nt, Artificial Sequence
  Description of Artificial Sequence: Synthetic oligonucleotide
cugaaguuucauuccaacg

SEQ ID NO: 3016451 - RNA, 19 nt, Artificial Sequence
  Description of Artificial Sequence: Synthetic oligonucleotide
aaaauugggcucugacaag

SEQ ID NO: 3016452 - RNA, 19 nt, Artificial Sequence
  Description of Artificial Sequence: Synthetic oligonucleotide
gaagguggcacacuaaaga

SEQ ID NO: 3016453 - RNA, 19 nt, Artificial Sequence
  Description of Artificial Sequence: Synthetic oligonucleotide
ugcucauugugucauaaaa

SEQ ID NO: 3016454 - RNA, 19 nt, Artificial Sequence
  Description of Artificial Sequence: Synthetic oligonucleotide
accaaagcuaacaaggauc

SEQ ID NO: 3016455 - RNA, 19 nt, Artificial Sequence
  Description of Artificial Sequence: Synthetic oligonucleotide
aaauggaaugcauuuccaa

SEQ ID NO: 3016456 - RNA, 19 nt, Artificial Sequence
  Description of Artificial Sequence: Synthetic oligonucleotide
ccaacuguugucuuaagcg

SEQ ID NO: 3016457 - RNA, 19 nt, Artificial Sequence
  Description of Artificial Sequence: Synthetic oligonucleotide
acuaaagauucucauaauu

SEQ ID NO: 3016458 - RNA, 19 nt, Artificial Sequence
  Description of Artificial Sequence: Synthetic oligonucleotide
auccauagaaccaucauca

SEQ ID NO: 3016459 - RNA, 19 nt, Artificial Sequence
  Description of Artificial Sequence: Synthetic oligonucleotide
agagaccaaagcuaacaag

SEQ ID NO: 3016460 - RNA, 19 nt, Artificial Sequence
  Description of Artificial Sequence: Synthetic oligonucleotide
uucagugaacuuuaaucac

SEQ ID NO: 3016461 - RNA, 19 nt, Artificial Sequence
  Description of Artificial Sequence: Synthetic oligonucleotide
uccaacuguugucuuaagc

SEQ ID NO: 3016462 - RNA, 19 nt, Artificial Sequence
  Description of Artificial Sequence: Synthetic oligonucleotide
aagguggcacacuaaagau

SEQ ID NO: 3016463 - RNA, 19 nt, Artificial Sequence
  Description of Artificial Sequence: Synthetic oligonucleotide
uuuggguuuucagugaacu

SEQ ID NO: 3016464 - RNA, 19 nt, Artificial Sequence
  Description of Artificial Sequence: Synthetic oligonucleotide
ugaagguggcacacuaaag

SEQ ID NO: 3016465 - RNA, 19 nt, Artificial Sequence
  Description of Artificial Sequence: Synthetic oligonucleotide
ucugaaguuucauuccaac

SEQ ID NO: 3016466 - RNA, 19 nt, Artificial Sequence
  Description of Artificial Sequence: Synthetic oligonucleotide
agaaccaucaucacccauc

SEQ ID NO: 3016467 - RNA, 19 nt, Artificial Sequence
  Description of Artificial Sequence: Synthetic oligonucleotide
uuuaaucacuucaggugcu

SEQ ID NO: 3016468 - RNA, 19 nt, Artificial Sequence
  Description of Artificial Sequence: Synthetic oligonucleotide
aagagaccaaagcuaacaa

SEQ ID NO: 3016469 - RNA, 19 nt, Artificial Sequence
  Description of Artificial Sequence: Synthetic oligonucleotide
aguuucauuccaacgagag

SEQ ID NO: 3016470 - RNA, 19 nt, Artificial Sequence
  Description of Artificial Sequence: Synthetic oligonucleotide
gagucugaaguuucauucc

SEQ ID NO: 3016471 - RNA, 19 nt, Artificial Sequence
  Description of Artificial Sequence: Synthetic oligonucleotide
uccaacgagagcugcacgc

SEQ ID NO: 3016472 - RNA, 19 nt, Artificial Sequence
  Description of Artificial Sequence: Synthetic oligonucleotide
uuucuugaaauggaaugca

SEQ ID NO: 3016473 - RNA, 19 nt, Artificial Sequence
  Description of Artificial Sequence: Synthetic oligonucleotide
ucuugaaauggaaugcauu

SEQ ID NO: 3016474 - RNA, 19 nt, Artificial Sequence
  Description of Artificial Sequence: Synthetic oligonucleotide
cuuaagcgaauuuugcuca

SEQ ID NO: 3016475 - RNA, 19 nt, Artificial Sequence
  Description of Artificial Sequence: Synthetic oligonucleotide
aaugcauuuccaacuguug

SEQ ID NO: 3016476 - RNA, 19 nt, Artificial Sequence
  Description of Artificial Sequence: Synthetic oligonucleotide
cacgcugucagcuuggcuc

SEQ ID NO: 3016477 - RNA, 19 nt, Artificial Sequence
  Description of Artificial Sequence: Synthetic oligonucleotide
cacuaucaaguacacauug

SEQ ID NO: 3016478 - RNA, 19 nt, Artificial Sequence
  Description of Artificial Sequence: Synthetic oligonucleotide
gacaagguuucuucugaag

SEQ ID NO: 3016479 - RNA, 19 nt, Artificial Sequence
  Description of Artificial Sequence: Synthetic oligonucleotide
cauacuuucuugaaaugga

SEQ ID NO: 3016480 - RNA, 19 nt, Artificial Sequence
  Description of Artificial Sequence: Synthetic oligonucleotide
uuggcucugugguuguugg

SEQ ID NO: 3016481 - RNA, 19 nt, Artificial Sequence
  Description of Artificial Sequence: Synthetic oligonucleotide
gaagagaccaaagcuaaca

SEQ ID NO: 3016482 - RNA, 19 nt, Artificial Sequence
  Description of Artificial Sequence: Synthetic oligonucleotide
uguugguacucauacuuuc

SEQ ID NO: 3016483 - RNA, 19 nt, Artificial Sequence
  Description of Artificial Sequence: Synthetic oligonucleotide
aauuuuccuuuuauuccuc

SEQ ID NO: 3016484 - RNA, 19 nt, Artificial Sequence
  Description of Artificial Sequence: Synthetic oligonucleotide
gagagcugcacgcugucag

SEQ ID NO: 3016485 - RNA, 19 nt, Artificial Sequence
  Description of Artificial Sequence: Synthetic oligonucleotide
augcauuuccaacuguugu

SEQ ID NO: 3016486 - RNA, 19 nt, Artificial Sequence
  Description of Artificial Sequence: Synthetic oligonucleotide
ucauaauuuuccuuuuauu

SEQ ID NO: 3016487 - RNA, 19 nt, Artificial Sequence
  Description of Artificial Sequence: Synthetic oligonucleotide
ucuuggcauacaugaagag

SEQ ID NO: 3016488 - RNA, 19 nt, Artificial Sequence
  Description of Artificial Sequence: Synthetic oligonucleotide
acuguguaauccauagaac

SEQ ID NO: 3016489 - RNA, 19 nt, Artificial Sequence
  Description of Artificial Sequence: Synthetic oligonucleotide
aggaucacuaucaaguaca

SEQ ID NO: 3016490 - RNA, 19 nt, Artificial Sequence
  Description of Artificial Sequence: Synthetic oligonucleotide
ugcauuuccaacuguuguc

SEQ ID NO: 3016491 - RNA, 19 nt, Artificial Sequence
  Description of Artificial Sequence: Synthetic oligonucleotide
acuaucaaguacacauugg

SEQ ID NO: 3016492 - RNA, 19 nt, Artificial Sequence
  Description of Artificial Sequence: Synthetic oligonucleotide
uaauccauagaaccaucau

SEQ ID NO: 3016493 - RNA, 19 nt, Artificial Sequence
  Description of Artificial Sequence: Synthetic oligonucleotide
ugguacucauacuuucuug

SEQ ID NO: 3016494 - RNA, 19 nt, Artificial Sequence
  Description of Artificial Sequence: Synthetic oligonucleotide
uacuuucuugaaauggaau

SEQ ID NO: 3016495 - RNA, 19 nt, Artificial Sequence
  Description of Artificial Sequence: Synthetic oligonucleotide
agauucucauaauuuuccu

SEQ ID NO: 3016496 - RNA, 19 nt, Artificial Sequence
  Description of Artificial Sequence: Synthetic oligonucleotide
auuccaacgagagcugcac

SEQ ID NO: 3016497 - RNA, 19 nt, Artificial Sequence
  Description of Artificial Sequence: Synthetic oligonucleotide
agucugaaguuucauucca

SEQ ID NO: 3016498 - RNA, 19 nt, Artificial Sequence
  Description of Artificial Sequence: Synthetic oligonucleotide
uauuccucuuggcauacau

SEQ ID NO: 3016499 - RNA, 19 nt, Artificial Sequence
  Description of Artificial Sequence: Synthetic oligonucleotide
uguaauccauagaaccauc

SEQ ID NO: 3016500 - RNA, 19 nt, Artificial Sequence
  Description of Artificial Sequence: Synthetic oligonucleotide
caugaagagaccaaagcua

SEQ ID NO: 3016501 - RNA, 19 nt, Artificial Sequence
  Description of Artificial Sequence: Synthetic oligonucleotide
agugaacuuuaaucacuuc

SEQ ID NO: 3016502 - RNA, 19 nt, Artificial Sequence
  Description of Artificial Sequence: Synthetic oligonucleotide
cuucauuccaggcuucgug

SEQ ID NO: 3016503 - RNA, 19 nt, Artificial Sequence
  Description of Artificial Sequence: Synthetic oligonucleotide
agagcugcacgcugucagc

SEQ ID NO: 3016504 - RNA, 19 nt, Artificial Sequence
  Description of Artificial Sequence: Synthetic oligonucleotide
uaacuuccagccaugggau

SEQ ID NO: 3016505 - RNA, 19 nt, Artificial Sequence
  Description of Artificial Sequence: Synthetic oligonucleotide
uucguggacuguguaaucc

SEQ ID NO: 3016506 - RNA, 19 nt, Artificial Sequence
  Description of Artificial Sequence: Synthetic oligonucleotide
cauaacuuccagccauggg

SEQ ID NO: 3016507 - RNA, 19 nt, Artificial Sequence
  Description of Artificial Sequence: Synthetic oligonucleotide
guuucauuccaacgagagc

SEQ ID NO: 3016508 - RNA, 19 nt, Artificial Sequence
  Description of Artificial Sequence: Synthetic oligonucleotide
uucauuccaacgagagcug

SEQ ID NO: 3016509 - RNA, 19 nt, Artificial Sequence
  Description of Artificial Sequence: Synthetic oligonucleotide
uugguggcuucauuccagg

SEQ ID NO: 3016510 - RNA, 19 nt, Artificial Sequence
  Description of Artificial Sequence: Synthetic oligonucleotide
uucuugaaauggaaugcau

SEQ ID NO: 3016511 - RNA, 19 nt, Artificial Sequence
  Description of Artificial Sequence: Synthetic oligonucleotide
ucacuucaggugcugaguc

SEQ ID NO: 3016512 - RNA, 19 nt, Artificial Sequence
  Description of Artificial Sequence: Synthetic oligonucleotide
uuucuucugaagguggcac

SEQ ID NO: 3016513 - RNA, 19 nt, Artificial Sequence
  Description of Artificial Sequence: Synthetic oligonucleotide
gaaccaucaucacccauca

SEQ ID NO: 3016514 - RNA, 19 nt, Artificial Sequence
  Description of Artificial Sequence: Synthetic oligonucleotide
aacuuccagccaugggauc

SEQ ID NO: 3016515 - RNA, 19 nt, Artificial Sequence
  Description of Artificial Sequence: Synthetic oligonucleotide
uuccaacgagagcugcacg

SEQ ID NO: 3016516 - RNA, 19 nt, Artificial Sequence
  Description of Artificial Sequence: Synthetic oligonucleotide
uccuuuuauuccucuuggc

SEQ ID NO: 3016517 - RNA, 19 nt, Artificial Sequence
  Description of Artificial Sequence: Synthetic oligonucleotide
gcgaauuuugcucauugug

SEQ ID NO: 3016518 - RNA, 19 nt, Artificial Sequence
  Description of Artificial Sequence: Synthetic oligonucleotide
ucacaccauaacuuccagc

SEQ ID NO: 3016519 - RNA, 19 nt, Artificial Sequence
  Description of Artificial Sequence: Synthetic oligonucleotide
uugggcucugacaagguuu

SEQ ID NO: 3016520 - RNA, 19 nt, Artificial Sequence
  Description of Artificial Sequence: Synthetic oligonucleotide
aagcuaacaaggaucacua

SEQ ID NO: 3016521 - RNA, 19 nt, Artificial Sequence
  Description of Artificial Sequence: Synthetic oligonucleotide
ucucauaauuuuccuuuua

SEQ ID NO: 3016522 - RNA, 19 nt, Artificial Sequence
  Description of Artificial Sequence: Synthetic oligonucleotide
ugucagcuuggcucugugg

SEQ ID NO: 3016523 - RNA, 19 nt, Artificial Sequence
  Description of Artificial Sequence: Synthetic oligonucleotide
uuuccaacuguugucuuaa

SEQ ID NO: 3016524 - RNA, 19 nt, Artificial Sequence
  Description of Artificial Sequence: Synthetic oligonucleotide
uugaaauggaaugcauuuc

SEQ ID NO: 3016525 - RNA, 19 nt, Artificial Sequence
  Description of Artificial Sequence: Synthetic oligonucleotide
uucugaagguggcacacua

SEQ ID NO: 3016526 - RNA, 19 nt, Artificial Sequence
  Description of Artificial Sequence: Synthetic oligonucleotide
auacaugaagagaccaaag

SEQ ID NO: 3016527 - RNA, 19 nt, Artificial Sequence
  Description of Artificial Sequence: Synthetic oligonucleotide
uggcauacaugaagagacc

SEQ ID NO: 3016528 - RNA, 19 nt, Artificial Sequence
  Description of Artificial Sequence: Synthetic oligonucleotide
cucauacuuucuugaaaug

SEQ ID NO: 3016529 - RNA, 19 nt, Artificial Sequence
  Description of Artificial Sequence: Synthetic oligonucleotide
gcuaacaaggaucacuauc

SEQ ID NO: 3016530 - RNA, 19 nt, Artificial Sequence
  Description of Artificial Sequence: Synthetic oligonucleotide
gguacucauacuuucuuga

SEQ ID NO: 3016531 - RNA, 19 nt, Artificial Sequence
  Description of Artificial Sequence: Synthetic oligonucleotide
uuuuggguuuucagugaac

SEQ ID NO: 3016532 - RNA, 19 nt, Artificial Sequence
  Description of Artificial Sequence: Synthetic oligonucleotide
uaacaaggaucacuaucaa

SEQ ID NO: 3016533 - RNA, 19 nt, Artificial Sequence
  Description of Artificial Sequence: Synthetic oligonucleotide
uguugucuuaagcgaauuu

SEQ ID NO: 3016534 - RNA, 19 nt, Artificial Sequence
  Description of Artificial Sequence: Synthetic oligonucleotide
ugaagagaccaaagcuaac

SEQ ID NO: 3016535 - RNA, 19 nt, Artificial Sequence
  Description of Artificial Sequence: Synthetic oligonucleotide
caacuguugucuuaagcga

SEQ ID NO: 3016536 - RNA, 19 nt, Artificial Sequence
  Description of Artificial Sequence: Synthetic oligonucleotide
cucuuggcauacaugaaga

SEQ ID NO: 3016537 - RNA, 19 nt, Artificial Sequence
  Description of Artificial Sequence: Synthetic oligonucleotide
uugguacucauacuuucuu

SEQ ID NO: 3016538 - RNA, 19 nt, Artificial Sequence
  Description of Artificial Sequence: Synthetic oligonucleotide
ucuucugaagguggcacac

SEQ ID NO: 3016539 - RNA, 19 nt, Artificial Sequence
  Description of Artificial Sequence: Synthetic oligonucleotide
aucacaccauaacuuccag

SEQ ID NO: 3016540 - RNA, 19 nt, Artificial Sequence
  Description of Artificial Sequence: Synthetic oligonucleotide
uuugcucauugugucauaa

SEQ ID NO: 3016541 - RNA, 19 nt, Artificial Sequence
  Description of Artificial Sequence: Synthetic oligonucleotide
uucuucugaagguggcaca

SEQ ID NO: 3016542 - RNA, 19 nt, Artificial Sequence
  Description of Artificial Sequence: Synthetic oligonucleotide
guuguugguacucauacuu

SEQ ID NO: 3016543 - RNA, 19 nt, Artificial Sequence
  Description of Artificial Sequence: Synthetic oligonucleotide
uuaaucacuucaggugcug

SEQ ID NO: 3016544 - RNA, 19 nt, Artificial Sequence
  Description of Artificial Sequence: Synthetic oligonucleotide
aaccaucaucacccaucac

SEQ ID NO: 3016545 - RNA, 19 nt, Artificial Sequence
  Description of Artificial Sequence: Synthetic oligonucleotide
acuucaggugcugagucug

SEQ ID NO: 3016546 - RNA, 19 nt, Artificial Sequence
  Description of Artificial Sequence: Synthetic oligonucleotide
aacuguugucuuaagcgaa

SEQ ID NO: 3016547 - RNA, 19 nt, Artificial Sequence
  Description of Artificial Sequence: Synthetic oligonucleotide
uuuauuccucuuggcauac

SEQ ID NO: 3016548 - RNA, 19 nt, Artificial Sequence
  Description of Artificial Sequence: Synthetic oligonucleotide
gaaauggaaugcauuucca

SEQ ID NO: 3016549 - RNA, 19 nt, Artificial Sequence
  Description of Artificial Sequence: Synthetic oligonucleotide
ucguggacuguguaaucca

SEQ ID NO: 3016550 - RNA, 19 nt, Artificial Sequence
  Description of Artificial Sequence: Synthetic oligonucleotide
ugggcucugacaagguuuc

SEQ ID NO: 3016551 - RNA, 19 nt, Artificial Sequence
  Description of Artificial Sequence: Synthetic oligonucleotide
gguggcacacuaaagauuc

SEQ ID NO: 3016552 - RNA, 19 nt, Artificial Sequence
  Description of Artificial Sequence: Synthetic oligonucleotide
ucauuccaggcuucgugga

SEQ ID NO: 3016553 - RNA, 19 nt, Artificial Sequence
  Description of Artificial Sequence: Synthetic oligonucleotide
aguacacauugguggcuuc

SEQ ID NO: 3016554 - RNA, 19 nt, Artificial Sequence
  Description of Artificial Sequence: Synthetic oligonucleotide
augaagagaccaaagcuaa

SEQ ID NO: 3016555 - RNA, 19 nt, Artificial Sequence
  Description of Artificial Sequence: Synthetic oligonucleotide
cuugaaauggaaugcauuu

SEQ ID NO: 3016556 - RNA, 19 nt, Artificial Sequence
  Description of Artificial Sequence: Synthetic oligonucleotide
uccauagaaccaucaucac

SEQ ID NO: 3016557 - RNA, 19 nt, Artificial Sequence
  Description of Artificial Sequence: Synthetic oligonucleotide
cuaucaaguacacauuggu

SEQ ID NO: 3016558 - RNA, 19 nt, Artificial Sequence
  Description of Artificial Sequence: Synthetic oligonucleotide
agcgaauuuugcucauugu

SEQ ID NO: 3016559 - RNA, 19 nt, Artificial Sequence
  Description of Artificial Sequence: Synthetic oligonucleotide
uuguugguacucauacuuu

SEQ ID NO: 3016560 - RNA, 19 nt, Artificial Sequence
  Description of Artificial Sequence: Synthetic oligonucleotide
aaguuucauuccaacgaga

SEQ ID NO: 3016561 - RNA, 19 nt, Artificial Sequence
  Description of Artificial Sequence: Synthetic oligonucleotide
ucugaagguggcacacuaa

SEQ ID NO: 3016562 - RNA, 19 nt, Artificial Sequence
  Description of Artificial Sequence: Synthetic oligonucleotide
caucacaccauaacuucca

SEQ ID NO: 3016563 - RNA, 19 nt, Artificial Sequence
  Description of Artificial Sequence: Synthetic oligonucleotide
ccauagaaccaucaucacc

SEQ ID NO: 3016564 - RNA, 19 nt, Artificial Sequence
  Description of Artificial Sequence: Synthetic oligonucleotide
auugguggcuucauuccag

SEQ ID NO: 3016565 - RNA, 19 nt, Artificial Sequence
  Description of Artificial Sequence: Synthetic oligonucleotide
ugcugagucugaaguuuca

SEQ ID NO: 3016566 - RNA, 19 nt, Artificial Sequence
  Description of Artificial Sequence: Synthetic oligonucleotide
ucauuccaacgagagcugc

SEQ ID NO: 3016567 - RNA, 19 nt, Artificial Sequence
  Description of Artificial Sequence: Synthetic oligonucleotide
cuuggcauacaugaagaga

SEQ ID NO: 3016568 - RNA, 19 nt, Artificial Sequence
  Description of Artificial Sequence: Synthetic oligonucleotide
cugacaagguuucuucuga

SEQ ID NO: 3016569 - RNA, 19 nt, Artificial Sequence
  Description of Artificial Sequence: Synthetic oligonucleotide
uuaagcgaauuuugcucau

SEQ ID NO: 3016570 - RNA, 19 nt, Artificial Sequence
  Description of Artificial Sequence: Synthetic oligonucleotide
ccaucaucacccaucacac

SEQ ID NO: 3016571 - RNA, 19 nt, Artificial Sequence
  Description of Artificial Sequence: Synthetic oligonucleotide
ugacaagguuucuucugaa

SEQ ID NO: 3016572 - RNA, 19 nt, Artificial Sequence
  Description of Artificial Sequence: Synthetic oligonucleotide
guaauccauagaaccauca

SEQ ID NO: 3016573 - RNA, 19 nt, Artificial Sequence
  Description of Artificial Sequence: Synthetic oligonucleotide
cauacaugaagagaccaaa

SEQ ID NO: 3016574 - RNA, 19 nt, Artificial Sequence
  Description of Artificial Sequence: Synthetic oligonucleotide
ugugguuguugguacucau

SEQ ID NO: 3016575 - RNA, 19 nt, Artificial Sequence
  Description of Artificial Sequence: Synthetic oligonucleotide
auagaaccaucaucaccca

SEQ ID NO: 3016576 - RNA, 19 nt, Artificial Sequence
  Description of Artificial Sequence: Synthetic oligonucleotide
aaguacacauugguggcuu

SEQ ID NO: 3016577 - RNA, 19 nt, Artificial Sequence
  Description of Artificial Sequence: Synthetic oligonucleotide
ccucuuggcauacaugaag

SEQ ID NO: 3016578 - RNA, 19 nt, Artificial Sequence
  Description of Artificial Sequence: Synthetic oligonucleotide
uaaucacuucaggugcuga

SEQ ID NO: 3016579 - RNA, 19 nt, Artificial Sequence
  Description of Artificial Sequence: Synthetic oligonucleotide
caucaucacccaucacacc

SEQ ID NO: 3016580 - RNA, 19 nt, Artificial Sequence
  Description of Artificial Sequence: Synthetic oligonucleotide
gucuuaagcgaauuuugcu

SEQ ID NO: 3016581 - RNA, 19 nt, Artificial Sequence
  Description of Artificial Sequence: Synthetic oligonucleotide
aacgagagcugcacgcugu

SEQ ID NO: 3016582 - RNA, 19 nt, Artificial Sequence
  Description of Artificial Sequence: Synthetic oligonucleotide
ccaaagcuaacaaggauca

SEQ ID NO: 3016583 - RNA, 19 nt, Artificial Sequence
  Description of Artificial Sequence: Synthetic oligonucleotide
acaccauaacuuccagcca

SEQ ID NO: 3016584 - RNA, 19 nt, Artificial Sequence
  Description of Artificial Sequence: Synthetic oligonucleotide
agaccaaagcuaacaagga

SEQ ID NO: 3016585 - RNA, 19 nt, Artificial Sequence
  Description of Artificial Sequence: Synthetic oligonucleotide
cacacuaaagauucucaua

SEQ ID NO: 3016586 - RNA, 19 nt, Artificial Sequence
  Description of Artificial Sequence: Synthetic oligonucleotide
ucugugguuguugguacuc

SEQ ID NO: 3016587 - RNA, 19 nt, Artificial Sequence
  Description of Artificial Sequence: Synthetic oligonucleotide
uggcacacuaaagauucuc

SEQ ID NO: 3016588 - RNA, 19 nt, Artificial Sequence
  Description of Artificial Sequence: Synthetic oligonucleotide
aucacuucaggugcugagu

SEQ ID NO: 3016589 - RNA, 19 nt, Artificial Sequence
  Description of Artificial Sequence: Synthetic oligonucleotide
auacuuucuugaaauggaa

SEQ ID NO: 3016590 - RNA, 19 nt, Artificial Sequence
  Description of Artificial Sequence: Synthetic oligonucleotide
cugaagguggcacacuaaa

SEQ ID NO: 3016591 - RNA, 19 nt, Artificial Sequence
  Description of Artificial Sequence: Synthetic oligonucleotide
gucagcuuggcucuguggu

SEQ ID NO: 3016592 - RNA, 19 nt, Artificial Sequence
  Description of Artificial Sequence: Synthetic oligonucleotide
uagaaccaucaucacccau

SEQ ID NO: 3016593 - RNA, 19 nt, Artificial Sequence
  Description of Artificial Sequence: Synthetic oligonucleotide
caagguuucuucugaaggu

SEQ ID NO: 3016594 - RNA, 19 nt, Artificial Sequence
  Description of Artificial Sequence: Synthetic oligonucleotide
auuccaggcuucguggacu

SEQ ID NO: 3016595 - RNA, 19 nt, Artificial Sequence
  Description of Artificial Sequence: Synthetic oligonucleotide
aauugggcucugacaaggu

SEQ ID NO: 3016596 - RNA, 19 nt, Artificial Sequence
  Description of Artificial Sequence: Synthetic oligonucleotide
ugguggcuucauuccaggc

SEQ ID NO: 3016597 - RNA, 19 nt, Artificial Sequence
  Description of Artificial Sequence: Synthetic oligonucleotide
uuccaacuguugucuuaag

SEQ ID NO: 3016598 - RNA, 19 nt, Artificial Sequence
  Description of Artificial Sequence: Synthetic oligonucleotide
guacucauacuuucuugaa

SEQ ID NO: 3016599 - RNA, 19 nt, Artificial Sequence
  Description of Artificial Sequence: Synthetic oligonucleotide
cauuccaggcuucguggac

SEQ ID NO: 3016600 - RNA, 19 nt, Artificial Sequence
  Description of Artificial Sequence: Synthetic oligonucleotide
acgagagcugcacgcuguc

SEQ ID NO: 3016601 - RNA, 19 nt, Artificial Sequence
  Description of Artificial Sequence: Synthetic oligonucleotide
ccaucacaccauaacuucc

SEQ ID NO: 3016602 - RNA, 19 nt, Artificial Sequence
  Description of Artificial Sequence: Synthetic oligonucleotide
uugcucauugugucauaaa

SEQ ID NO: 3016603 - RNA, 19 nt, Artificial Sequence
  Description of Artificial Sequence: Synthetic oligonucleotide
acgcugucagcuuggcucu

SEQ ID NO: 3016604 - RNA, 19 nt, Artificial Sequence
  Description of Artificial Sequence: Synthetic oligonucleotide
auugggcucugacaagguu

SEQ ID NO: 3016605 - RNA, 19 nt, Artificial Sequence
  Description of Artificial Sequence: Synthetic oligonucleotide
cuuggcucugugguuguug

SEQ ID NO: 3016606 - RNA, 19 nt, Artificial Sequence
  Description of Artificial Sequence: Synthetic oligonucleotide
caaggaucacuaucaagua

SEQ ID NO: 3016607 - RNA, 19 nt, Artificial Sequence
  Description of Artificial Sequence: Synthetic oligonucleotide
cauuccaacgagagcugca

SEQ ID NO: 3016608 - RNA, 19 nt, Artificial Sequence
  Description of Artificial Sequence: Synthetic oligonucleotide
guugucuuaagcgaauuuu

SEQ ID NO: 3016609 - RNA, 19 nt, Artificial Sequence
  Description of Artificial Sequence: Synthetic oligonucleotide
gaucacuaucaaguacaca

SEQ ID NO: 3016610 - RNA, 19 nt, Artificial Sequence
  Description of Artificial Sequence: Synthetic oligonucleotide
gcucugacaagguuucuuc

SEQ ID NO: 3016611 - RNA, 19 nt, Artificial Sequence
  Description of Artificial Sequence: Synthetic oligonucleotide
gaccaaagcuaacaaggau

SEQ ID NO: 3016612 - RNA, 19 nt, Artificial Sequence
  Description of Artificial Sequence: Synthetic oligonucleotide
ucagcuuggcucugugguu

SEQ ID NO: 3016613 - RNA, 19 nt, Artificial Sequence
  Description of Artificial Sequence: Synthetic oligonucleotide
cccaucacaccauaacuuc

SEQ ID NO: 3016614 - RNA, 19 nt, Artificial Sequence
  Description of Artificial Sequence: Synthetic oligonucleotide
cuucguggacuguguaauc

SEQ ID NO: 3016615 - RNA, 19 nt, Artificial Sequence
  Description of Artificial Sequence: Synthetic oligonucleotide
caacgagagcugcacgcug

SEQ ID NO: 3016616 - RNA, 19 nt, Artificial Sequence
  Description of Artificial Sequence: Synthetic oligonucleotide
cugcacgcugucagcuugg

SEQ ID NO: 3016617 - RNA, 19 nt, Artificial Sequence
  Description of Artificial Sequence: Synthetic oligonucleotide
uuuugcucauugugucaua

SEQ ID NO: 3016618 - RNA, 19 nt, Artificial Sequence
  Description of Artificial Sequence: Synthetic oligonucleotide
cagcuuggcucugugguug

SEQ ID NO: 3016619 - RNA, 19 nt, Artificial Sequence
  Description of Artificial Sequence: Synthetic oligonucleotide
guuucuucugaagguggca

SEQ ID NO: 3016620 - RNA, 19 nt, Artificial Sequence
  Description of Artificial Sequence: Synthetic oligonucleotide
agcuaacaaggaucacuau

SEQ ID NO: 3016621 - RNA, 19 nt, Artificial Sequence
  Description of Artificial Sequence: Synthetic oligonucleotide
gguuucuucugaagguggc

SEQ ID NO: 3016622 - RNA, 19 nt, Artificial Sequence
  Description of Artificial Sequence: Synthetic oligonucleotide
ggcauacaugaagagacca

SEQ ID NO: 3016623 - RNA, 19 nt, Artificial Sequence
  Description of Artificial Sequence: Synthetic oligonucleotide
gaaugcauuuccaacuguu

SEQ ID NO: 3016624 - RNA, 19 nt, Artificial Sequence
  Description of Artificial Sequence: Synthetic oligonucleotide
acccaucacaccauaacuu

SEQ ID NO: 3016625 - RNA, 19 nt, Artificial Sequence
  Description of Artificial Sequence: Synthetic oligonucleotide
guuuucagugaacuuuaau

SEQ ID NO: 3016626 - RNA, 19 nt, Artificial Sequence
  Description of Artificial Sequence: Synthetic oligonucleotide
accauaacuuccagccaug

SEQ ID NO: 3016627 - RNA, 19 nt, Artificial Sequence
  Description of Artificial Sequence: Synthetic oligonucleotide
acuguugucuuaagcgaau

SEQ ID NO: 3016628 - RNA, 19 nt, Artificial Sequence
  Description of Artificial Sequence: Synthetic oligonucleotide
gcugcacgcugucagcuug

SEQ ID NO: 3016629 - RNA, 19 nt, Artificial Sequence
  Description of Artificial Sequence: Synthetic oligonucleotide
uucaggugcugagucugaa

SEQ ID NO: 3016630 - RNA, 19 nt, Artificial Sequence
  Description of Artificial Sequence: Synthetic oligonucleotide
caaagcuaacaaggaucac

SEQ ID NO: 3016631 - RNA, 19 nt, Artificial Sequence
  Description of Artificial Sequence: Synthetic oligonucleotide
ggcacacuaaagauucuca

SEQ ID NO: 3016632 - RNA, 19 nt, Artificial Sequence
  Description of Artificial Sequence: Synthetic oligonucleotide
uaagcgaauuuugcucauu

SEQ ID NO: 3016633 - RNA, 19 nt, Artificial Sequence
  Description of Artificial Sequence: Synthetic oligonucleotide
uuauuccucuuggcauaca

SEQ ID NO: 3016634 - RNA, 19 nt, Artificial Sequence
  Description of Artificial Sequence: Synthetic oligonucleotide
gcucugugguuguugguac

SEQ ID NO: 3016635 - RNA, 19 nt, Artificial Sequence
  Description of Artificial Sequence: Synthetic oligonucleotide
cacccaucacaccauaacu

SEQ ID NO: 3016636 - RNA, 19 nt, Artificial Sequence
  Description of Artificial Sequence: Synthetic oligonucleotide
guguaauccauagaaccau

SEQ ID NO: 3016637 - RNA, 19 nt, Artificial Sequence
  Description of Artificial Sequence: Synthetic oligonucleotide
guggcuucauuccaggcuu

SEQ ID NO: 3016638 - RNA, 19 nt, Artificial Sequence
  Description of Artificial Sequence: Synthetic oligonucleotide
gguggcuucauuccaggcu

SEQ ID NO: 3016639 - RNA, 19 nt, Artificial Sequence
  Description of Artificial Sequence: Synthetic oligonucleotide
guugguacucauacuuucu

SEQ ID NO: 3016640 - RNA, 19 nt, Artificial Sequence
  Description of Artificial Sequence: Synthetic oligonucleotide
caccauaacuuccagccau

SEQ ID NO: 3016641 - RNA, 19 nt, Artificial Sequence
  Description of Artificial Sequence: Synthetic oligonucleotide
cugucagcuuggcucugug

SEQ ID NO: 3016642 - RNA, 19 nt, Artificial Sequence
  Description of Artificial Sequence: Synthetic oligonucleotide
ggaucacuaucaaguacac

SEQ ID NO: 3016643 - RNA, 19 nt, Artificial Sequence
  Description of Artificial Sequence: Synthetic oligonucleotide
uggcuucauuccaggcuuc

SEQ ID NO: 3016644 - RNA, 19 nt, Artificial Sequence
  Description of Artificial Sequence: Synthetic oligonucleotide
ccauaacuuccagccaugg

SEQ ID NO: 3016645 - RNA, 19 nt, Artificial Sequence
  Description of Artificial Sequence: Synthetic oligonucleotide
ggcuucauuccaggcuucg

SEQ ID NO: 3016646 - RNA, 19 nt, Artificial Sequence
  Description of Artificial Sequence: Synthetic oligonucleotide
agguggcacacuaaagauu

SEQ ID NO: 3016647 - RNA, 19 nt, Artificial Sequence
  Description of Artificial Sequence: Synthetic oligonucleotide
cagugaacuuuaaucacuu

SEQ ID NO: 3016648 - RNA, 19 nt, Artificial Sequence
  Description of Artificial Sequence: Synthetic oligonucleotide
ugcacgcugucagcuuggc

SEQ ID NO: 3016649 - RNA, 19 nt, Artificial Sequence
  Description of Artificial Sequence: Synthetic oligonucleotide
uggcucugugguuguuggu

SEQ ID NO: 3016650 - RNA, 19 nt, Artificial Sequence
  Description of Artificial Sequence: Synthetic oligonucleotide
gugcugagucugaaguuuc

SEQ ID NO: 3016651 - RNA, 19 nt, Artificial Sequence
  Description of Artificial Sequence: Synthetic oligonucleotide
gucugaaguuucauuccaa

SEQ ID NO: 3016652 - RNA, 19 nt, Artificial Sequence
  Description of Artificial Sequence: Synthetic oligonucleotide
cuucaggugcugagucuga

SEQ ID NO: 3016653 - RNA, 19 nt, Artificial Sequence
  Description of Artificial Sequence: Synthetic oligonucleotide
cgaauuuugcucauugugu

SEQ ID NO: 3016654 - RNA, 19 nt, Artificial Sequence
  Description of Artificial Sequence: Synthetic oligonucleotide
ggacuguguaauccauaga

SEQ ID NO: 3016655 - RNA, 19 nt, Artificial Sequence
  Description of Artificial Sequence: Synthetic oligonucleotide
cugagucugaaguuucauu

SEQ ID NO: 3016656 - RNA, 19 nt, Artificial Sequence
  Description of Artificial Sequence: Synthetic oligonucleotide
gcauuuccaacuguugucu

SEQ ID NO: 3016657 - RNA, 19 nt, Artificial Sequence
  Description of Artificial Sequence: Synthetic oligonucleotide
aucacccaucacaccauaa

SEQ ID NO: 3016658 - RNA, 19 nt, Artificial Sequence
  Description of Artificial Sequence: Synthetic oligonucleotide
cacuaaagauucucauaau

SEQ ID NO: 3016659 - RNA, 19 nt, Artificial Sequence
  Description of Artificial Sequence: Synthetic oligonucleotide
ggguuuucagugaacuuua

SEQ ID NO: 3016660 - RNA, 19 nt, Artificial Sequence
  Description of Artificial Sequence: Synthetic oligonucleotide
ggcuucguggacuguguaa

SEQ ID NO: 3016661 - RNA, 19 nt, Artificial Sequence
  Description of Artificial Sequence: Synthetic oligonucleotide
agcugcacgcugucagcuu

SEQ ID NO: 3016662 - RNA, 19 nt, Artificial Sequence
  Description of Artificial Sequence: Synthetic oligonucleotide
gcacacuaaagauucucau

SEQ ID NO: 3016663 - RNA, 19 nt, Artificial Sequence
  Description of Artificial Sequence: Synthetic oligonucleotide
gguuguugguacucauacu

SEQ ID NO: 3016664 - RNA, 19 nt, Artificial Sequence
  Description of Artificial Sequence: Synthetic oligonucleotide
aggcuucguggacugugua

SEQ ID NO: 3016665 - RNA, 19 nt, Artificial Sequence
  Description of Artificial Sequence: Synthetic oligonucleotide
gugguuguugguacucaua

SEQ ID NO: 3016666 - RNA, 19 nt, Artificial Sequence
  Description of Artificial Sequence: Synthetic oligonucleotide
ggcucugugguuguuggua

SEQ ID NO: 3016667 - RNA, 19 nt, Artificial Sequence
  Description of Artificial Sequence: Synthetic oligonucleotide
gagcugcacgcugucagcu

SEQ ID NO: 3016668 - RNA, 19 nt, Artificial Sequence
  Description of Artificial Sequence: Synthetic oligonucleotide
ccaggcuucguggacugug

SEQ ID NO: 3016669 - RNA, 19 nt, Artificial Sequence
  Description of Artificial Sequence: Synthetic oligonucleotide
cacuucaggugcugagucu

SEQ ID NO: 3016670 - RNA, 19 nt, Artificial Sequence
  Description of Artificial Sequence: Synthetic oligonucleotide
guggacuguguaauccaua

SEQ ID NO: 3016671 - RNA, 19 nt, Artificial Sequence
  Description of Artificial Sequence: Synthetic oligonucleotide
caaguacacauugguggcu

SEQ ID NO: 3016672 - RNA, 19 nt, Artificial Sequence
  Description of Artificial Sequence: Synthetic oligonucleotide
caucacccaucacaccaua

SEQ ID NO: 3016673 - RNA, 19 nt, Artificial Sequence
  Description of Artificial Sequence: Synthetic oligonucleotide
ggugcugagucugaaguuu

SEQ ID NO: 3016674 - RNA, 19 nt, Artificial Sequence
  Description of Artificial Sequence: Synthetic oligonucleotide
cucugugguuguugguacu

SEQ ID NO: 3016675 - RNA, 19 nt, Artificial Sequence
  Description of Artificial Sequence: Synthetic oligonucleotide
gcuucguggacuguguaau

SEQ ID NO: 3016676 - RNA, 19 nt, Artificial Sequence
  Description of Artificial Sequence: Synthetic oligonucleotide
cauuuccaacuguugucuu

SEQ ID NO: 3016677 - RNA, 19 nt, Artificial Sequence
  Description of Artificial Sequence: Synthetic oligonucleotide
uccaggcuucguggacugu

SEQ ID NO: 3016678 - RNA, 19 nt, Artificial Sequence
  Description of Artificial Sequence: Synthetic oligonucleotide
caggcuucguggacugugu

SEQ ID NO: 3016679 - RNA, 19 nt, Artificial Sequence
  Description of Artificial Sequence: Synthetic oligonucleotide
gguuuucagugaacuuuaa

SEQ ID NO: 3016680 - RNA, 19 nt, Artificial Sequence
  Description of Artificial Sequence: Synthetic oligonucleotide
cuucugaagguggcacacu

SEQ ID NO: 3016681 - RNA, 19 nt, Artificial Sequence
  Description of Artificial Sequence: Synthetic oligonucleotide
cuguugucuuaagcgaauu

SEQ ID NO: 3016682 - RNA, 19 nt, Artificial Sequence
  Description of Artificial Sequence: Synthetic oligonucleotide
guggcacacuaaagauucu

SEQ ID NO: 3016683 - RNA, 19 nt, Artificial Sequence
  Description of Artificial Sequence: Synthetic oligonucleotide
ggcucugacaagguuucuu

SEQ ID NO: 3016684 - RNA, 19 nt, Artificial Sequence
  Description of Artificial Sequence: Synthetic oligonucleotide
gcuucauuccaggcuucgu

SEQ ID NO: 3016685 - RNA, 19 nt, Artificial Sequence
  Description of Artificial Sequence: Synthetic oligonucleotide
ccaacgagagcugcacgcu

SEQ ID NO: 3016686 - RNA, 19 nt, Artificial Sequence
  Description of Artificial Sequence: Synthetic oligonucleotide
cuuccagccaugggaucuu

SEQ ID NO: 3016687 - RNA, 19 nt, Artificial Sequence
  Description of Artificial Sequence: Synthetic oligonucleotide
gcacgcugucagcuuggcu

SEQ ID NO: 3016688 - RNA, 19 nt, Artificial Sequence
  Description of Artificial Sequence: Synthetic oligonucleotide
cguggacuguguaauccau

SEQ ID NO: 3016689 - RNA, 19 nt, Artificial Sequence
  Description of Artificial Sequence: Synthetic oligonucleotide
cgagagcugcacgcuguca

SEQ ID NO: 3016690 - RNA, 19 nt, Artificial Sequence
  Description of Artificial Sequence: Synthetic oligonucleotide
gggcucugacaagguuucu

SEQ ID NO: 3016691 - RNA, 19 nt, Artificial Sequence
  Description of Artificial Sequence: Synthetic oligonucleotide
cgcugucagcuuggcucug

SEQ ID NO: 3016692 - RNA, 19 nt, Artificial Sequence
  Description of Artificial Sequence: Synthetic oligonucleotide
gcuuggcucugugguuguu

SEQ ID NO: 3016693 - RNA, 19 nt, Artificial Sequence
  Description of Artificial Sequence: Synthetic oligonucleotide
cuugcuaccagcaauaagg

SEQ ID NO: 3016694 - RNA, 19 nt, Artificial Sequence
  Description of Artificial Sequence: Synthetic oligonucleotide
gaugaaaaggccaaggugc

SEQ ID NO: 3016695 - RNA, 19 nt, Artificial Sequence
  Description of Artificial Sequence: Synthetic oligonucleotide
aauaaggugggccggaucu

SEQ ID NO: 3016696 - RNA, 19 nt, Artificial Sequence
  Description of Artificial Sequence: Synthetic oligonucleotide
uguacauaaccccauggag

SEQ ID NO: 3016697 - RNA, 19 nt, Artificial Sequence
  Description of Artificial Sequence: Synthetic oligonucleotide
agcaaguccguguaggugc

SEQ ID NO: 3016698 - RNA, 19 nt, Artificial Sequence
  Description of Artificial Sequence: Synthetic oligonucleotide
uacauaaccccauggaggg

SEQ ID NO: 3016699 - RNA, 19 nt, Artificial Sequence
  Description of Artificial Sequence: Synthetic oligonucleotide
agaucugcuaccugguucc

SEQ ID NO: 3016700 - RNA, 19 nt, Artificial Sequence
  Description of Artificial Sequence: Synthetic oligonucleotide
aagaucugcuaccugguuc

SEQ ID NO: 3016701 - RNA, 19 nt, Artificial Sequence
  Description of Artificial Sequence: Synthetic oligonucleotide
auaggaagcaacuuggggu

SEQ ID NO: 3016702 - RNA, 19 nt, Artificial Sequence
  Description of Artificial Sequence: Synthetic oligonucleotide
uccucuaugacagacagca

SEQ ID NO: 3016703 - RNA, 19 nt, Artificial Sequence
  Description of Artificial Sequence: Synthetic oligonucleotide
gauaggaagcaacuugggg

SEQ ID NO: 3016704 - RNA, 19 nt, Artificial Sequence
  Description of Artificial Sequence: Synthetic oligonucleotide
aggaagaucugcuaccugg

SEQ ID NO: 3016705 - RNA, 19 nt, Artificial Sequence
  Description of Artificial Sequence: Synthetic oligonucleotide
aaaggucccgaugaaaagg

SEQ ID NO: 3016706 - RNA, 19 nt, Artificial Sequence
  Description of Artificial Sequence: Synthetic oligonucleotide
gaugaugccucucuucagg

SEQ ID NO: 3016707 - RNA, 19 nt, Artificial Sequence
  Description of Artificial Sequence: Synthetic oligonucleotide
aucgccuguacauaacccc

SEQ ID NO: 3016708 - RNA, 19 nt, Artificial Sequence
  Description of Artificial Sequence: Synthetic oligonucleotide
gaaccagguggcuucaucg

SEQ ID NO: 3016709 - RNA, 19 nt, Artificial Sequence
  Description of Artificial Sequence: Synthetic oligonucleotide
ucuccucuaugacagacag

SEQ ID NO: 3016710 - RNA, 19 nt, Artificial Sequence
  Description of Artificial Sequence: Synthetic oligonucleotide
uaugacagacagcaagucc

SEQ ID NO: 3016711 - RNA, 19 nt, Artificial Sequence
  Description of Artificial Sequence: Synthetic oligonucleotide
aaaaggccaaggugcuucc

SEQ ID NO: 3016712 - RNA, 19 nt, Artificial Sequence
  Description of Artificial Sequence: Synthetic oligonucleotide
ucugcuaccugguuccugg

SEQ ID NO: 3016713 - RNA, 19 nt, Artificial Sequence
  Description of Artificial Sequence: Synthetic oligonucleotide
ucuaugacagacagcaagu

SEQ ID NO: 3016714 - RNA, 19 nt, Artificial Sequence
  Description of Artificial Sequence: Synthetic oligonucleotide
cucuaugacagacagcaag

SEQ ID NO: 3016715 - RNA, 19 nt, Artificial Sequence
  Description of Artificial Sequence: Synthetic oligonucleotide
augacagacagcaaguccg

SEQ ID NO: 3016716 - RNA, 19 nt, Artificial Sequence
  Description of Artificial Sequence: Synthetic oligonucleotide
uguaggugcucugagagcc

SEQ ID NO: 3016717 - RNA, 19 nt, Artificial Sequence
  Description of Artificial Sequence: Synthetic oligonucleotide
gcuaccagcaauaaggugg

SEQ ID NO: 3016718 - RNA, 19 nt, Artificial Sequence
  Description of Artificial Sequence: Synthetic oligonucleotide
guacauaaccccauggagg

SEQ ID NO: 3016719 - RNA, 19 nt, Artificial Sequence
  Description of Artificial Sequence: Synthetic oligonucleotide
aaggucccgaugaaaaggc

SEQ ID NO: 3016720 - RNA, 19 nt, Artificial Sequence
  Description of Artificial Sequence: Synthetic oligonucleotide
agcccugggaaccaggugg

SEQ ID NO: 3016721 - RNA, 19 nt, Artificial Sequence
  Description of Artificial Sequence: Synthetic oligonucleotide
uggaugaugccucucuuca

SEQ ID NO: 3016722 - RNA, 19 nt, Artificial Sequence
  Description of Artificial Sequence: Synthetic oligonucleotide
gaucucuuuucccaucucc

SEQ ID NO: 3016723 - RNA, 19 nt, Artificial Sequence
  Description of Artificial Sequence: Synthetic oligonucleotide
agggacacaggacaggaag

SEQ ID NO: 3016724 - RNA, 19 nt, Artificial Sequence
  Description of Artificial Sequence: Synthetic oligonucleotide
accagcaauaaggugggcc

SEQ ID NO: 3016725 - RNA, 19 nt, Artificial Sequence
  Description of Artificial Sequence: Synthetic oligonucleotide
gaugccucucuucaggcgc

SEQ ID NO: 3016726 - RNA, 19 nt, Artificial Sequence
  Description of Artificial Sequence: Synthetic oligonucleotide
augaugccucucuucaggc

SEQ ID NO: 3016727 - RNA, 19 nt, Artificial Sequence
  Description of Artificial Sequence: Synthetic oligonucleotide
gaaaggucccgaugaaaag

SEQ ID NO: 3016728 - RNA, 19 nt, Artificial Sequence
  Description of Artificial Sequence: Synthetic oligonucleotide
ucaucgccuguacauaacc

SEQ ID NO: 3016729 - RNA, 19 nt, Artificial Sequence
  Description of Artificial Sequence: Synthetic oligonucleotide
aggauaggaagcaacuugg

SEQ ID NO: 3016730 - RNA, 19 nt, Artificial Sequence
  Description of Artificial Sequence: Synthetic oligonucleotide
ucugcaguggccggaaagg

SEQ ID NO: 3016731 - RNA, 19 nt, Artificial Sequence
  Description of Artificial Sequence: Synthetic oligonucleotide
uggggugaaggccaaggag

SEQ ID NO: 3016732 - RNA, 19 nt, Artificial Sequence
  Description of Artificial Sequence: Synthetic oligonucleotide
cuaccagcaauaagguggg

SEQ ID NO: 3016733 - RNA, 19 nt, Artificial Sequence
  Description of Artificial Sequence: Synthetic oligonucleotide
uccauagcacucuugcuac

SEQ ID NO: 3016734 - RNA, 19 nt, Artificial Sequence
  Description of Artificial Sequence: Synthetic oligonucleotide
ucuugcuaccagcaauaag

SEQ ID NO: 3016735 - RNA, 19 nt, Artificial Sequence
  Description of Artificial Sequence: Synthetic oligonucleotide
gacagcaaguccguguagg

SEQ ID NO: 3016736 - RNA, 19 nt, Artificial Sequence
  Description of Artificial Sequence: Synthetic oligonucleotide
gugaaggccaaggagaagc

SEQ ID NO: 3016737 - RNA, 19 nt, Artificial Sequence
  Description of Artificial Sequence: Synthetic oligonucleotide
gacaggaagcccaggauag

SEQ ID NO: 3016738 - RNA, 19 nt, Artificial Sequence
  Description of Artificial Sequence: Synthetic oligonucleotide
cauaaccccauggagggcg

SEQ ID NO: 3016739 - RNA, 19 nt, Artificial Sequence
  Description of Artificial Sequence: Synthetic oligonucleotide
caggauaggaagcaacuug

SEQ ID NO: 3016740 - RNA, 19 nt, Artificial Sequence
  Description of Artificial Sequence: Synthetic oligonucleotide
uggaggaagaucugcuacc

SEQ ID NO: 3016741 - RNA, 19 nt, Artificial Sequence
  Description of Artificial Sequence: Synthetic oligonucleotide
auggaugaugccucucuuc

SEQ ID NO: 3016742 - RNA, 19 nt, Artificial Sequence
  Description of Artificial Sequence: Synthetic oligonucleotide
ggugcuuccuguuacgugc

SEQ ID NO: 3016743 - RNA, 19 nt, Artificial Sequence
  Description of Artificial Sequence: Synthetic oligonucleotide
agcacucucugaccagugc

SEQ ID NO: 3016744 - RNA, 19 nt, Artificial Sequence
  Description of Artificial Sequence: Synthetic oligonucleotide
guugcguucugucucugcc

SEQ ID NO: 3016745 - RNA, 19 nt, Artificial Sequence
  Description of Artificial Sequence: Synthetic oligonucleotide
gaaaaggccaaggugcuuc

SEQ ID NO: 3016746 - RNA, 19 nt, Artificial Sequence
  Description of Artificial Sequence: Synthetic oligonucleotide
ugaugccucucuucaggcg

SEQ ID NO: 3016747 - RNA, 19 nt, Artificial Sequence
  Description of Artificial Sequence: Synthetic oligonucleotide
acagacagcaaguccgugu

SEQ ID NO: 3016748 - RNA, 19 nt, Artificial Sequence
  Description of Artificial Sequence: Synthetic oligonucleotide
aagcaggugcucugcagug

SEQ ID NO: 3016749 - RNA, 19 nt, Artificial Sequence
  Description of Artificial Sequence: Synthetic oligonucleotide
uugcuaccagcaauaaggu

SEQ ID NO: 3016750 - RNA, 19 nt, Artificial Sequence
  Description of Artificial Sequence: Synthetic oligonucleotide
cuuccuguuacgugcgggc

SEQ ID NO: 3016751 - RNA, 19 nt, Artificial Sequence
  Description of Artificial Sequence: Synthetic oligonucleotide
ucgccuguacauaacccca

SEQ ID NO: 3016752 - RNA, 19 nt, Artificial Sequence
  Description of Artificial Sequence: Synthetic oligonucleotide
cuggaggaagaucugcuac

SEQ ID NO: 3016753 - RNA, 19 nt, Artificial Sequence
  Description of Artificial Sequence: Synthetic oligonucleotide
agaagcaggugcucugcag

SEQ ID NO: 3016754 - RNA, 19 nt, Artificial Sequence
  Description of Artificial Sequence: Synthetic oligonucleotide
ugcucugagagcccuggga

SEQ ID NO: 3016755 - RNA, 19 nt, Artificial Sequence
  Description of Artificial Sequence: Synthetic oligonucleotide
ccagcaauaaggugggccg

SEQ ID NO: 3016756 - RNA, 19 nt, Artificial Sequence
  Description of Artificial Sequence: Synthetic oligonucleotide
uucugucucugccaagcac

SEQ ID NO: 3016757 - RNA, 19 nt, Artificial Sequence
  Description of Artificial Sequence: Synthetic oligonucleotide
caucgccuguacauaaccc

SEQ ID NO: 3016758 - RNA, 19 nt, Artificial Sequence
  Description of Artificial Sequence: Synthetic oligonucleotide
ugaaggccaaggagaagca

SEQ ID NO: 3016759 - RNA, 19 nt, Artificial Sequence
  Description of Artificial Sequence: Synthetic oligonucleotide
cucuucaggcgcuccauag

SEQ ID NO: 3016760 - RNA, 19 nt, Artificial Sequence
  Description of Artificial Sequence: Synthetic oligonucleotide
uccguguaggugcucugag

SEQ ID NO: 3016761 - RNA, 19 nt, Artificial Sequence
  Description of Artificial Sequence: Synthetic oligonucleotide
cuuggggugaaggccaagg

SEQ ID NO: 3016762 - RNA, 19 nt, Artificial Sequence
  Description of Artificial Sequence: Synthetic oligonucleotide
cugccaagcacucucugac

SEQ ID NO: 3016763 - RNA, 19 nt, Artificial Sequence
  Description of Artificial Sequence: Synthetic oligonucleotide
ucaggcgcuccauagcacu

SEQ ID NO: 3016764 - RNA, 19 nt, Artificial Sequence
  Description of Artificial Sequence: Synthetic oligonucleotide
auagcacucuugcuaccag

SEQ ID NO: 3016765 - RNA, 19 nt, Artificial Sequence
  Description of Artificial Sequence: Synthetic oligonucleotide
gccaaggagaagcaggugc

SEQ ID NO: 3016766 - RNA, 19 nt, Artificial Sequence
  Description of Artificial Sequence: Synthetic oligonucleotide
aacuggaggaagaucugcu

SEQ ID NO: 3016767 - RNA, 19 nt, Artificial Sequence
  Description of Artificial Sequence: Synthetic oligonucleotide
cacucucugaccagugccc

SEQ ID NO: 3016768 - RNA, 19 nt, Artificial Sequence
  Description of Artificial Sequence: Synthetic oligonucleotide
gcuaccugguuccuggagg

SEQ ID NO: 3016769 - RNA, 19 nt, Artificial Sequence
  Description of Artificial Sequence: Synthetic oligonucleotide
gaagcccaggauaggaagc

SEQ ID NO: 3016770 - RNA, 19 nt, Artificial Sequence
  Description of Artificial Sequence: Synthetic oligonucleotide
cccaucuccucuaugacag

SEQ ID NO: 3016771 - RNA, 19 nt, Artificial Sequence
  Description of Artificial Sequence: Synthetic oligonucleotide
caaggugcuuccuguuacg

SEQ ID NO: 3016772 - RNA, 19 nt, Artificial Sequence
  Description of Artificial Sequence: Synthetic oligonucleotide
uuggggugaaggccaagga

SEQ ID NO: 3016773 - RNA, 19 nt, Artificial Sequence
  Description of Artificial Sequence: Synthetic oligonucleotide
ugcuaccagcaauaaggug

SEQ ID NO: 3016774 - RNA, 19 nt, Artificial Sequence
  Description of Artificial Sequence: Synthetic oligonucleotide
ggaagcccaggauaggaag

SEQ ID NO: 3016775 - RNA, 19 nt, Artificial Sequence
  Description of Artificial Sequence: Synthetic oligonucleotide
ugggccggaucucuuuucc

SEQ ID NO: 3016776 - RNA, 19 nt, Artificial Sequence
  Description of Artificial Sequence: Synthetic oligonucleotide
ugcuaccugguuccuggag

SEQ ID NO: 3016777 - RNA, 19 nt, Artificial Sequence
  Description of Artificial Sequence: Synthetic oligonucleotide
ugacagacagcaaguccgu

SEQ ID NO: 3016778 - RNA, 19 nt, Artificial Sequence
  Description of Artificial Sequence: Synthetic oligonucleotide
ugcguucugucucugccaa

SEQ ID NO: 3016779 - RNA, 19 nt, Artificial Sequence
  Description of Artificial Sequence: Synthetic oligonucleotide
uagcacucuugcuaccagc

SEQ ID NO: 3016780 - RNA, 19 nt, Artificial Sequence
  Description of Artificial Sequence: Synthetic oligonucleotide
uucccaucuccucuaugac

SEQ ID NO: 3016781 - RNA, 19 nt, Artificial Sequence
  Description of Artificial Sequence: Synthetic oligonucleotide
uuccuguuacgugcgggcg

SEQ ID NO: 3016782 - RNA, 19 nt, Artificial Sequence
  Description of Artificial Sequence: Synthetic oligonucleotide
gaccagugcccgugcaugg

SEQ ID NO: 3016783 - RNA, 19 nt, Artificial Sequence
  Description of Artificial Sequence: Synthetic oligonucleotide
cuguacauaaccccaugga

SEQ ID NO: 3016784 - RNA, 19 nt, Artificial Sequence
  Description of Artificial Sequence: Synthetic oligonucleotide
uucaucgccuguacauaac

SEQ ID NO: 3016785 - RNA, 19 nt, Artificial Sequence
  Description of Artificial Sequence: Synthetic oligonucleotide
ucuuuucccaucuccucua

SEQ ID NO: 3016786 - RNA, 19 nt, Artificial Sequence
  Description of Artificial Sequence: Synthetic oligonucleotide
aagcccaggauaggaagca

SEQ ID NO: 3016787 - RNA, 19 nt, Artificial Sequence
  Description of Artificial Sequence: Synthetic oligonucleotide
ugaccagugcccgugcaug

SEQ ID NO: 3016788 - RNA, 19 nt, Artificial Sequence
  Description of Artificial Sequence: Synthetic oligonucleotide
acagcaaguccguguaggu

SEQ ID NO: 3016789 - RNA, 19 nt, Artificial Sequence
  Description of Artificial Sequence: Synthetic oligonucleotide
aaguccguguaggugcucu

SEQ ID NO: 3016790 - RNA, 19 nt, Artificial Sequence
  Description of Artificial Sequence: Synthetic oligonucleotide
guuacgugcgggcguugcg

SEQ ID NO: 3016791 - RNA, 19 nt, Artificial Sequence
  Description of Artificial Sequence: Synthetic oligonucleotide
gucucugccaagcacucuc

SEQ ID NO: 3016792 - RNA, 19 nt, Artificial Sequence
  Description of Artificial Sequence: Synthetic oligonucleotide
cugggaaccagguggcuuc

SEQ ID NO: 3016793 - RNA, 19 nt, Artificial Sequence
  Description of Artificial Sequence: Synthetic oligonucleotide
cucugcaguggccggaaag

SEQ ID NO: 3016794 - RNA, 19 nt, Artificial Sequence
  Description of Artificial Sequence: Synthetic oligonucleotide
cuucaggcgcuccauagca

SEQ ID NO: 3016795 - RNA, 19 nt, Artificial Sequence
  Description of Artificial Sequence: Synthetic oligonucleotide
caacuuggggugaaggcca

SEQ ID NO: 3016796 - RNA, 19 nt, Artificial Sequence
  Description of Artificial Sequence: Synthetic oligonucleotide
caacuggaggaagaucugc

SEQ ID NO: 3016797 - RNA, 19 nt, Artificial Sequence
  Description of Artificial Sequence: Synthetic oligonucleotide
aggugcucugcaguggccg

SEQ ID NO: 3016798 - RNA, 19 nt, Artificial Sequence
  Description of Artificial Sequence: Synthetic oligonucleotide
uugcguucugucucugcca

SEQ ID NO: 3016799 - RNA, 19 nt, Artificial Sequence
  Description of Artificial Sequence: Synthetic oligonucleotide
uccuguuacgugcgggcgu

SEQ ID NO: 3016800 - RNA, 19 nt, Artificial Sequence
  Description of Artificial Sequence: Synthetic oligonucleotide
ucucugaccagugcccgug

SEQ ID NO: 3016801 - RNA, 19 nt, Artificial Sequence
  Description of Artificial Sequence: Synthetic oligonucleotide
ugccaagcacucucugacc

SEQ ID NO: 3016802 - RNA, 19 nt, Artificial Sequence
  Description of Artificial Sequence: Synthetic oligonucleotide
agugcccgugcauggauga

SEQ ID NO: 3016803 - RNA, 19 nt, Artificial Sequence
  Description of Artificial Sequence: Synthetic oligonucleotide
ccuguacauaaccccaugg

SEQ ID NO: 3016804 - RNA, 19 nt, Artificial Sequence
  Description of Artificial Sequence: Synthetic oligonucleotide
aaggugcuuccuguuacgu

SEQ ID NO: 3016805 - RNA, 19 nt, Artificial Sequence
  Description of Artificial Sequence: Synthetic oligonucleotide
gacacaggacaggaagccc

SEQ ID NO: 3016806 - RNA, 19 nt, Artificial Sequence
  Description of Artificial Sequence: Synthetic oligonucleotide
ugcaguggccggaaagguc

SEQ ID NO: 3016807 - RNA, 19 nt, Artificial Sequence
  Description of Artificial Sequence: Synthetic oligonucleotide
acucucugaccagugcccg

SEQ ID NO: 3016808 - RNA, 19 nt, Artificial Sequence
  Description of Artificial Sequence: Synthetic oligonucleotide
caucuccucuaugacagac

SEQ ID NO: 3016809 - RNA, 19 nt, Artificial Sequence
  Description of Artificial Sequence: Synthetic oligonucleotide
aggugcuuccuguuacgug

SEQ ID NO: 3016810 - RNA, 19 nt, Artificial Sequence
  Description of Artificial Sequence: Synthetic oligonucleotide
gcaacuuggggugaaggcc

SEQ ID NO: 3016811 - RNA, 19 nt, Artificial Sequence
  Description of Artificial Sequence: Synthetic oligonucleotide
ugcuuccuguuacgugcgg

SEQ ID NO: 3016812 - RNA, 19 nt, Artificial Sequence
  Description of Artificial Sequence: Synthetic oligonucleotide
gaggaagaucugcuaccug

SEQ ID NO: 3016813 - RNA, 19 nt, Artificial Sequence
  Description of Artificial Sequence: Synthetic oligonucleotide
ucucugccaagcacucucu

SEQ ID NO: 3016814 - RNA, 19 nt, Artificial Sequence
  Description of Artificial Sequence: Synthetic oligonucleotide
cuccauagcacucuugcua

SEQ ID NO: 3016815 - RNA, 19 nt, Artificial Sequence
  Description of Artificial Sequence: Synthetic oligonucleotide
cuaugacagacagcaaguc

SEQ ID NO: 3016816 - RNA, 19 nt, Artificial Sequence
  Description of Artificial Sequence: Synthetic oligonucleotide
acauaaccccauggagggc

SEQ ID NO: 3016817 - RNA, 19 nt, Artificial Sequence
  Description of Artificial Sequence: Synthetic oligonucleotide
accccauggagggcggucc

SEQ ID NO: 3016818 - RNA, 19 nt, Artificial Sequence
  Description of Artificial Sequence: Synthetic oligonucleotide
ucugaccagugcccgugca

SEQ ID NO: 3016819 - RNA, 19 nt, Artificial Sequence
  Description of Artificial Sequence: Synthetic oligonucleotide
uucaggcgcuccauagcac

SEQ ID NO: 3016820 - RNA, 19 nt, Artificial Sequence
  Description of Artificial Sequence: Synthetic oligonucleotide
acacaggacaggaagccca

SEQ ID NO: 3016821 - RNA, 19 nt, Artificial Sequence
  Description of Artificial Sequence: Synthetic oligonucleotide
augaaaaggccaaggugcu

SEQ ID NO: 3016822 - RNA, 19 nt, Artificial Sequence
  Description of Artificial Sequence: Synthetic oligonucleotide
uguuacgugcgggcguugc

SEQ ID NO: 3016823 - RNA, 19 nt, Artificial Sequence
  Description of Artificial Sequence: Synthetic oligonucleotide
aaccccauggagggcgguc

SEQ ID NO: 3016824 - RNA, 19 nt, Artificial Sequence
  Description of Artificial Sequence: Synthetic oligonucleotide
acuggaggaagaucugcua

SEQ ID NO: 3016825 - RNA, 19 nt, Artificial Sequence
  Description of Artificial Sequence: Synthetic oligonucleotide
uaaggugggccggaucucu

SEQ ID NO: 3016826 - RNA, 19 nt, Artificial Sequence
  Description of Artificial Sequence: Synthetic oligonucleotide
cguguaggugcucugagag

SEQ ID NO: 3016827 - RNA, 19 nt, Artificial Sequence
  Description of Artificial Sequence: Synthetic oligonucleotide
agcacucuugcuaccagca

SEQ ID NO: 3016828 - RNA, 19 nt, Artificial Sequence
  Description of Artificial Sequence: Synthetic oligonucleotide
uuacgugcgggcguugcgu

SEQ ID NO: 3016829 - RNA, 19 nt, Artificial Sequence
  Description of Artificial Sequence: Synthetic oligonucleotide
aggacaggaagcccaggau

SEQ ID NO: 3016830 - RNA, 19 nt, Artificial Sequence
  Description of Artificial Sequence: Synthetic oligonucleotide
auaaggugggccggaucuc

SEQ ID NO: 3016831 - RNA, 19 nt, Artificial Sequence
  Description of Artificial Sequence: Synthetic oligonucleotide
gcacucucugaccagugcc

SEQ ID NO: 3016832 - RNA, 19 nt, Artificial Sequence
  Description of Artificial Sequence: Synthetic oligonucleotide
ggauaggaagcaacuuggg

SEQ ID NO: 3016833 - RNA, 19 nt, Artificial Sequence
  Description of Artificial Sequence: Synthetic oligonucleotide
gcaguggccggaaaggucc

SEQ ID NO: 3016834 - RNA, 19 nt, Artificial Sequence
  Description of Artificial Sequence: Synthetic oligonucleotide
cuucaucgccuguacauaa

SEQ ID NO: 3016835 - RNA, 19 nt, Artificial Sequence
  Description of Artificial Sequence: Synthetic oligonucleotide
ggaaaggucccgaugaaaa

SEQ ID NO: 3016836 - RNA, 19 nt, Artificial Sequence
  Description of Artificial Sequence: Synthetic oligonucleotide
cuaccugguuccuggagga

SEQ ID NO: 3016837 - RNA, 19 nt, Artificial Sequence
  Description of Artificial Sequence: Synthetic oligonucleotide
ccugguuccuggaggaugc

SEQ ID NO: 3016838 - RNA, 19 nt, Artificial Sequence
  Description of Artificial Sequence: Synthetic oligonucleotide
uggcuucaucgccuguaca

SEQ ID NO: 3016839 - RNA, 19 nt, Artificial Sequence
  Description of Artificial Sequence: Synthetic oligonucleotide
ugcccgugcauggaugaug

SEQ ID NO: 3016840 - RNA, 19 nt, Artificial Sequence
  Description of Artificial Sequence: Synthetic oligonucleotide
aggucccgaugaaaaggcc

SEQ ID NO: 3016841 - RNA, 19 nt, Artificial Sequence
  Description of Artificial Sequence: Synthetic oligonucleotide
cgaugaaaaggccaaggug

SEQ ID NO: 3016842 - RNA, 19 nt, Artificial Sequence
  Description of Artificial Sequence: Synthetic oligonucleotide
accugguuccuggaggaug

SEQ ID NO: 3016843 - RNA, 19 nt, Artificial Sequence
  Description of Artificial Sequence: Synthetic oligonucleotide
cuccucuaugacagacagc

SEQ ID NO: 3016844 - RNA, 19 nt, Artificial Sequence
  Description of Artificial Sequence: Synthetic oligonucleotide
caauaaggugggccggauc

SEQ ID NO: 3016845 - RNA, 19 nt, Artificial Sequence
  Description of Artificial Sequence: Synthetic oligonucleotide
cagcaauaaggugggccgg

SEQ ID NO: 3016846 - RNA, 19 nt, Artificial Sequence
  Description of Artificial Sequence: Synthetic oligonucleotide
ugguuccuggaggaugccc

SEQ ID NO: 3016847 - RNA, 19 nt, Artificial Sequence
  Description of Artificial Sequence: Synthetic oligonucleotide
gccggaaaggucccgauga

SEQ ID NO: 3016848 - RNA, 19 nt, Artificial Sequence
  Description of Artificial Sequence: Synthetic oligonucleotide
ggaugaugccucucuucag

SEQ ID NO: 3016849 - RNA, 19 nt, Artificial Sequence
  Description of Artificial Sequence: Synthetic oligonucleotide
cauagcacucuugcuacca

SEQ ID NO: 3016850 - RNA, 19 nt, Artificial Sequence
  Description of Artificial Sequence: Synthetic oligonucleotide
ucucuucaggcgcuccaua

SEQ ID NO: 3016851 - RNA, 19 nt, Artificial Sequence
  Description of Artificial Sequence: Synthetic oligonucleotide
gagaagcaggugcucugca

SEQ ID NO: 3016852 - RNA, 19 nt, Artificial Sequence
  Description of Artificial Sequence: Synthetic oligonucleotide
caggacaggaagcccagga

SEQ ID NO: 3016853 - RNA, 19 nt, Artificial Sequence
  Description of Artificial Sequence: Synthetic oligonucleotide
aagcacucucugaccagug

SEQ ID NO: 3016854 - RNA, 19 nt, Artificial Sequence
  Description of Artificial Sequence: Synthetic oligonucleotide
ggugcucugagagcccugg

SEQ ID NO: 3016855 - RNA, 19 nt, Artificial Sequence
  Description of Artificial Sequence: Synthetic oligonucleotide
agcaauaaggugggccgga

SEQ ID NO: 3016856 - RNA, 19 nt, Artificial Sequence
  Description of Artificial Sequence: Synthetic oligonucleotide
acucuugcuaccagcaaua

SEQ ID NO: 3016857 - RNA, 19 nt, Artificial Sequence
  Description of Artificial Sequence: Synthetic oligonucleotide
uaggugcucugagagcccu

SEQ ID NO: 3016858 - RNA, 19 nt, Artificial Sequence
  Description of Artificial Sequence: Synthetic oligonucleotide
ucccgaugaaaaggccaag

SEQ ID NO: 3016859 - RNA, 19 nt, Artificial Sequence
  Description of Artificial Sequence: Synthetic oligonucleotide
ccaaggugcuuccuguuac

SEQ ID NO: 3016860 - RNA, 19 nt, Artificial Sequence
  Description of Artificial Sequence: Synthetic oligonucleotide
aguccguguaggugcucug

SEQ ID NO: 3016861 - RNA, 19 nt, Artificial Sequence
  Description of Artificial Sequence: Synthetic oligonucleotide
aaaggccaaggugcuuccu

SEQ ID NO: 3016862 - RNA, 19 nt, Artificial Sequence
  Description of Artificial Sequence: Synthetic oligonucleotide
gugcuuccuguuacgugcg

SEQ ID NO: 3016863 - RNA, 19 nt, Artificial Sequence
  Description of Artificial Sequence: Synthetic oligonucleotide
auaaccccauggagggcgg

SEQ ID NO: 3016864 - RNA, 19 nt, Artificial Sequence
  Description of Artificial Sequence: Synthetic oligonucleotide
gacagacagcaaguccgug

SEQ ID NO: 3016865 - RNA, 19 nt, Artificial Sequence
  Description of Artificial Sequence: Synthetic oligonucleotide
gccaagcacucucugacca

SEQ ID NO: 3016866 - RNA, 19 nt, Artificial Sequence
  Description of Artificial Sequence: Synthetic oligonucleotide
cagcaaguccguguaggug

SEQ ID NO: 3016867 - RNA, 19 nt, Artificial Sequence
  Description of Artificial Sequence: Synthetic oligonucleotide
cucuuuucccaucuccucu

SEQ ID NO: 3016868 - RNA, 19 nt, Artificial Sequence
  Description of Artificial Sequence: Synthetic oligonucleotide
gagcccugggaaccaggug

SEQ ID NO: 3016869 - RNA, 19 nt, Artificial Sequence
  Description of Artificial Sequence: Synthetic oligonucleotide
cagacagcaaguccgugua

SEQ ID NO: 3016870 - RNA, 19 nt, Artificial Sequence
  Description of Artificial Sequence: Synthetic oligonucleotide
cgcuccauagcacucuugc

SEQ ID NO: 3016871 - RNA, 19 nt, Artificial Sequence
  Description of Artificial Sequence: Synthetic oligonucleotide
cccgaugaaaaggccaagg

SEQ ID NO: 3016872 - RNA, 19 nt, Artificial Sequence
  Description of Artificial Sequence: Synthetic oligonucleotide
gcaggugcucugcaguggc

SEQ ID NO: 3016873 - RNA, 19 nt, Artificial Sequence
  Description of Artificial Sequence: Synthetic oligonucleotide
ggacaggaagcccaggaua

SEQ ID NO: 3016874 - RNA, 19 nt, Artificial Sequence
  Description of Artificial Sequence: Synthetic oligonucleotide
guucugucucugccaagca

SEQ ID NO: 3016875 - RNA, 19 nt, Artificial Sequence
  Description of Artificial Sequence: Synthetic oligonucleotide
cagugcccgugcauggaug

SEQ ID NO: 3016876 - RNA, 19 nt, Artificial Sequence
  Description of Artificial Sequence: Synthetic oligonucleotide
gcuuccuguuacgugcggg

SEQ ID NO: 3016877 - RNA, 19 nt, Artificial Sequence
  Description of Artificial Sequence: Synthetic oligonucleotide
acaggacaggaagcccagg

SEQ ID NO: 3016878 - RNA, 19 nt, Artificial Sequence
  Description of Artificial Sequence: Synthetic oligonucleotide
acgugcgggcguugcguuc

SEQ ID NO: 3016879 - RNA, 19 nt, Artificial Sequence
  Description of Artificial Sequence: Synthetic oligonucleotide
cagguggcuucaucgccug

SEQ ID NO: 3016880 - RNA, 19 nt, Artificial Sequence
  Description of Artificial Sequence: Synthetic oligonucleotide
ggagaagcaggugcucugc

SEQ ID NO: 3016881 - RNA, 19 nt, Artificial Sequence
  Description of Artificial Sequence: Synthetic oligonucleotide
cucugaccagugcccgugc

SEQ ID NO: 3016882 - RNA, 19 nt, Artificial Sequence
  Description of Artificial Sequence: Synthetic oligonucleotide
agagcccugggaaccaggu

SEQ ID NO: 3016883 - RNA, 19 nt, Artificial Sequence
  Description of Artificial Sequence: Synthetic oligonucleotide
cgugcauggaugaugccuc

SEQ ID NO: 3016884 - RNA, 19 nt, Artificial Sequence
  Description of Artificial Sequence: Synthetic oligonucleotide
cccaagggacacaggacag

SEQ ID NO: 3016885 - RNA, 19 nt, Artificial Sequence
  Description of Artificial Sequence: Synthetic oligonucleotide
caaggagaagcaggugcuc

SEQ ID NO: 3016886 - RNA, 19 nt, Artificial Sequence
  Description of Artificial Sequence: Synthetic oligonucleotide
ggucccgaugaaaaggcca

SEQ ID NO: 3016887 - RNA, 19 nt, Artificial Sequence
  Description of Artificial Sequence: Synthetic oligonucleotide
gucccgaugaaaaggccaa

SEQ ID NO: 3016888 - RNA, 19 nt, Artificial Sequence
  Description of Artificial Sequence: Synthetic oligonucleotide
caguggccggaaagguccc

SEQ ID NO: 3016889 - RNA, 19 nt, Artificial Sequence
  Description of Artificial Sequence: Synthetic oligonucleotide
aguggccggaaaggucccg

SEQ ID NO: 3016890 - RNA, 19 nt, Artificial Sequence
  Description of Artificial Sequence: Synthetic oligonucleotide
ugucucugccaagcacucu

SEQ ID NO: 3016891 - RNA, 19 nt, Artificial Sequence
  Description of Artificial Sequence: Synthetic oligonucleotide
ggaaccagguggcuucauc

SEQ ID NO: 3016892 - RNA, 19 nt, Artificial Sequence
  Description of Artificial Sequence: Synthetic oligonucleotide
cguucugucucugccaagc

SEQ ID NO: 3016893 - RNA, 19 nt, Artificial Sequence
  Description of Artificial Sequence: Synthetic oligonucleotide
aagggacacaggacaggaa

SEQ ID NO: 3016894 - RNA, 19 nt, Artificial Sequence
  Description of Artificial Sequence: Synthetic oligonucleotide
caggcgcuccauagcacuc

SEQ ID NO: 3016895 - RNA, 19 nt, Artificial Sequence
  Description of Artificial Sequence: Synthetic oligonucleotide
guaggugcucugagagccc

SEQ ID NO: 3016896 - RNA, 19 nt, Artificial Sequence
  Description of Artificial Sequence: Synthetic oligonucleotide
ccaacuggaggaagaucug

SEQ ID NO: 3016897 - RNA, 19 nt, Artificial Sequence
  Description of Artificial Sequence: Synthetic oligonucleotide
uacgugcgggcguugcguu

SEQ ID NO: 3016898 - RNA, 19 nt, Artificial Sequence
  Description of Artificial Sequence: Synthetic oligonucleotide
gccuguacauaaccccaug

SEQ ID NO: 3016899 - RNA, 19 nt, Artificial Sequence
  Description of Artificial Sequence: Synthetic oligonucleotide
cacucuugcuaccagcaau

SEQ ID NO: 3016900 - RNA, 19 nt, Artificial Sequence
  Description of Artificial Sequence: Synthetic oligonucleotide
gggcguugcguucugucuc

SEQ ID NO: 3016901 - RNA, 19 nt, Artificial Sequence
  Description of Artificial Sequence: Synthetic oligonucleotide
aggaagcccaggauaggaa

SEQ ID NO: 3016902 - RNA, 19 nt, Artificial Sequence
  Description of Artificial Sequence: Synthetic oligonucleotide
ggcuucaucgccuguacau

SEQ ID NO: 3016903 - RNA, 19 nt, Artificial Sequence
  Description of Artificial Sequence: Synthetic oligonucleotide
ugggaaccagguggcuuca

SEQ ID NO: 3016904 - RNA, 19 nt, Artificial Sequence
  Description of Artificial Sequence: Synthetic oligonucleotide
gcccgugcauggaugaugc

SEQ ID NO: 3016905 - RNA, 19 nt, Artificial Sequence
  Description of Artificial Sequence: Synthetic oligonucleotide
aggaagcaacuugggguga

SEQ ID NO: 3016906 - RNA, 19 nt, Artificial Sequence
  Description of Artificial Sequence: Synthetic oligonucleotide
ccaagcacucucugaccag

SEQ ID NO: 3016907 - RNA, 19 nt, Artificial Sequence
  Description of Artificial Sequence: Synthetic oligonucleotide
gaagaucugcuaccugguu

SEQ ID NO: 3016908 - RNA, 19 nt, Artificial Sequence
  Description of Artificial Sequence: Synthetic oligonucleotide
ccaagggacacaggacagg

SEQ ID NO: 3016909 - RNA, 19 nt, Artificial Sequence
  Description of Artificial Sequence: Synthetic oligonucleotide
ccccaagggacacaggaca

SEQ ID NO: 3016910 - RNA, 19 nt, Artificial Sequence
  Description of Artificial Sequence: Synthetic oligonucleotide
ugcucugcaguggccggaa

SEQ ID NO: 3016911 - RNA, 19 nt, Artificial Sequence
  Description of Artificial Sequence: Synthetic oligonucleotide
aacuuggggugaaggccaa

SEQ ID NO: 3016912 - RNA, 19 nt, Artificial Sequence
  Description of Artificial Sequence: Synthetic oligonucleotide
ggugaaggccaaggagaag

SEQ ID NO: 3016913 - RNA, 19 nt, Artificial Sequence
  Description of Artificial Sequence: Synthetic oligonucleotide
uggccggaaaggucccgau

SEQ ID NO: 3016914 - RNA, 19 nt, Artificial Sequence
  Description of Artificial Sequence: Synthetic oligonucleotide
acuuggggugaaggccaag

SEQ ID NO: 3016915 - RNA, 19 nt, Artificial Sequence
  Description of Artificial Sequence: Synthetic oligonucleotide
gugggccggaucucuuuuc

SEQ ID NO: 3016916 - RNA, 19 nt, Artificial Sequence
  Description of Artificial Sequence: Synthetic oligonucleotide
aggcgcuccauagcacucu

SEQ ID NO: 3016917 - RNA, 19 nt, Artificial Sequence
  Description of Artificial Sequence: Synthetic oligonucleotide
ccauagcacucuugcuacc

SEQ ID NO: 3016918 - RNA, 19 nt, Artificial Sequence
  Description of Artificial Sequence: Synthetic oligonucleotide
aggugggccggaucucuuu

SEQ ID NO: 3016919 - RNA, 19 nt, Artificial Sequence
  Description of Artificial Sequence: Synthetic oligonucleotide
gcauggaugaugccucucu

SEQ ID NO: 3016920 - RNA, 19 nt, Artificial Sequence
  Description of Artificial Sequence: Synthetic oligonucleotide
ggccggaaaggucccgaug

SEQ ID NO: 3016921 - RNA, 19 nt, Artificial Sequence
  Description of Artificial Sequence: Synthetic oligonucleotide
uaccagcaauaaggugggc

SEQ ID NO: 3016922 - RNA, 19 nt, Artificial Sequence
  Description of Artificial Sequence: Synthetic oligonucleotide
gggccggaucucuuuuccc

SEQ ID NO: 3016923 - RNA, 19 nt, Artificial Sequence
  Description of Artificial Sequence: Synthetic oligonucleotide
guccguguaggugcucuga

SEQ ID NO: 3016924 - RNA, 19 nt, Artificial Sequence
  Description of Artificial Sequence: Synthetic oligonucleotide
augccucucuucaggcgcu

SEQ ID NO: 3016925 - RNA, 19 nt, Artificial Sequence
  Description of Artificial Sequence: Synthetic oligonucleotide
cugguuccuggaggaugcc

SEQ ID NO: 3016926 - RNA, 19 nt, Artificial Sequence
  Description of Artificial Sequence: Synthetic oligonucleotide
ggaggaagaucugcuaccu

SEQ ID NO: 3016927 - RNA, 19 nt, Artificial Sequence
  Description of Artificial Sequence: Synthetic oligonucleotide
gcccaggauaggaagcaac

SEQ ID NO: 3016928 - RNA, 19 nt, Artificial Sequence
  Description of Artificial Sequence: Synthetic oligonucleotide
caagcacucucugaccagu

SEQ ID NO: 3016929 - RNA, 19 nt, Artificial Sequence
  Description of Artificial Sequence: Synthetic oligonucleotide
agguggcuucaucgccugu

SEQ ID NO: 3016930 - RNA, 19 nt, Artificial Sequence
  Description of Artificial Sequence: Synthetic oligonucleotide
gggugaaggccaaggagaa

SEQ ID NO: 3016931 - RNA, 19 nt, Artificial Sequence
  Description of Artificial Sequence: Synthetic oligonucleotide
cucuugcuaccagcaauaa

SEQ ID NO: 3016932 - RNA, 19 nt, Artificial Sequence
  Description of Artificial Sequence: Synthetic oligonucleotide
ccaaggagaagcaggugcu

SEQ ID NO: 3016933 - RNA, 19 nt, Artificial Sequence
  Description of Artificial Sequence: Synthetic oligonucleotide
uaaccccauggagggcggu

SEQ ID NO: 3016934 - RNA, 19 nt, Artificial Sequence
  Description of Artificial Sequence: Synthetic oligonucleotide
aaggugggccggaucucuu

SEQ ID NO: 3016935 - RNA, 19 nt, Artificial Sequence
  Description of Artificial Sequence: Synthetic oligonucleotide
uaccugguuccuggaggau

SEQ ID NO: 3016936 - RNA, 19 nt, Artificial Sequence
  Description of Artificial Sequence: Synthetic oligonucleotide
ggaagaucugcuaccuggu

SEQ ID NO: 3016937 - RNA, 19 nt, Artificial Sequence
  Description of Artificial Sequence: Synthetic oligonucleotide
guggccggaaaggucccga

SEQ ID NO: 3016938 - RNA, 19 nt, Artificial Sequence
  Description of Artificial Sequence: Synthetic oligonucleotide
agcccaggauaggaagcaa

SEQ ID NO: 3016939 - RNA, 19 nt, Artificial Sequence
  Description of Artificial Sequence: Synthetic oligonucleotide
cccaggauaggaagcaacu

SEQ ID NO: 3016940 - RNA, 19 nt, Artificial Sequence
  Description of Artificial Sequence: Synthetic oligonucleotide
cauggaugaugccucucuu

SEQ ID NO: 3016941 - RNA, 19 nt, Artificial Sequence
  Description of Artificial Sequence: Synthetic oligonucleotide
gccaaggugcuuccuguua

SEQ ID NO: 3016942 - RNA, 19 nt, Artificial Sequence
  Description of Artificial Sequence: Synthetic oligonucleotide
cugcuaccugguuccugga

SEQ ID NO: 3016943 - RNA, 19 nt, Artificial Sequence
  Description of Artificial Sequence: Synthetic oligonucleotide
ccgaugaaaaggccaaggu

SEQ ID NO: 3016944 - RNA, 19 nt, Artificial Sequence
  Description of Artificial Sequence: Synthetic oligonucleotide
gcguucugucucugccaag

SEQ ID NO: 3016945 - RNA, 19 nt, Artificial Sequence
  Description of Artificial Sequence: Synthetic oligonucleotide
gcuucaucgccuguacaua

SEQ ID NO: 3016946 - RNA, 19 nt, Artificial Sequence
  Description of Artificial Sequence: Synthetic oligonucleotide
ccggaucucuuuucccauc

SEQ ID NO: 3016947 - RNA, 19 nt, Artificial Sequence
  Description of Artificial Sequence: Synthetic oligonucleotide
gcgggcguugcguucuguc

SEQ ID NO: 3016948 - RNA, 19 nt, Artificial Sequence
  Description of Artificial Sequence: Synthetic oligonucleotide
ggccaaggagaagcaggug

SEQ ID NO: 3016949 - RNA, 19 nt, Artificial Sequence
  Description of Artificial Sequence: Synthetic oligonucleotide
gcccugggaaccagguggc

SEQ ID NO: 3016950 - RNA, 19 nt, Artificial Sequence
  Description of Artificial Sequence: Synthetic oligonucleotide
gcuccauagcacucuugcu

SEQ ID NO: 3016951 - RNA, 19 nt, Artificial Sequence
  Description of Artificial Sequence: Synthetic oligonucleotide
aggugcucugagagcccug

SEQ ID NO: 3016952 - RNA, 19 nt, Artificial Sequence
  Description of Artificial Sequence: Synthetic oligonucleotide
gcacucuugcuaccagcaa

SEQ ID NO: 3016953 - RNA, 19 nt, Artificial Sequence
  Description of Artificial Sequence: Synthetic oligonucleotide
ugccucucuucaggcgcuc

SEQ ID NO: 3016954 - RNA, 19 nt, Artificial Sequence
  Description of Artificial Sequence: Synthetic oligonucleotide
cuuuucccaucuccucuau

SEQ ID NO: 3016955 - RNA, 19 nt, Artificial Sequence
  Description of Artificial Sequence: Synthetic oligonucleotide
cuguuacgugcgggcguug

SEQ ID NO: 3016956 - RNA, 19 nt, Artificial Sequence
  Description of Artificial Sequence: Synthetic oligonucleotide
ggcguugcguucugucucu

SEQ ID NO: 3016957 - RNA, 19 nt, Artificial Sequence
  Description of Artificial Sequence: Synthetic oligonucleotide
ugcgggcguugcguucugu

SEQ ID NO: 3016958 - RNA, 19 nt, Artificial Sequence
  Description of Artificial Sequence: Synthetic oligonucleotide
gugcucugcaguggccgga

SEQ ID NO: 3016959 - RNA, 19 nt, Artificial Sequence
  Description of Artificial Sequence: Synthetic oligonucleotide
caaguccguguaggugcuc

SEQ ID NO: 3016960 - RNA, 19 nt, Artificial Sequence
  Description of Artificial Sequence: Synthetic oligonucleotide
cugaccagugcccgugcau

SEQ ID NO: 3016961 - RNA, 19 nt, Artificial Sequence
  Description of Artificial Sequence: Synthetic oligonucleotide
cucucugaccagugcccgu

SEQ ID NO: 3016962 - RNA, 19 nt, Artificial Sequence
  Description of Artificial Sequence: Synthetic oligonucleotide
gaucugcuaccugguuccu

SEQ ID NO: 3016963 - RNA, 19 nt, Artificial Sequence
  Description of Artificial Sequence: Synthetic oligonucleotide
cugcaguggccggaaaggu

SEQ ID NO: 3016964 - RNA, 19 nt, Artificial Sequence
  Description of Artificial Sequence: Synthetic oligonucleotide
ccagguggcuucaucgccu

SEQ ID NO: 3016965 - RNA, 19 nt, Artificial Sequence
  Description of Artificial Sequence: Synthetic oligonucleotide
gugcgggcguugcguucug

SEQ ID NO: 3016966 - RNA, 19 nt, Artificial Sequence
  Description of Artificial Sequence: Synthetic oligonucleotide
cccgugcauggaugaugcc

SEQ ID NO: 3016967 - RNA, 19 nt, Artificial Sequence
  Description of Artificial Sequence: Synthetic oligonucleotide
gccucucuucaggcgcucc

SEQ ID NO: 3016968 - RNA, 19 nt, Artificial Sequence
  Description of Artificial Sequence: Synthetic oligonucleotide
ccgugcauggaugaugccu

SEQ ID NO: 3016969 - RNA, 19 nt, Artificial Sequence
  Description of Artificial Sequence: Synthetic oligonucleotide
gccggaucucuuuucccau

SEQ ID NO: 3016970 - RNA, 19 nt, Artificial Sequence
  Description of Artificial Sequence: Synthetic oligonucleotide
ggugggccggaucucuuuu

SEQ ID NO: 3016971 - RNA, 19 nt, Artificial Sequence
  Description of Artificial Sequence: Synthetic oligonucleotide
ccucuaugacagacagcaa

SEQ ID NO: 3016972 - RNA, 19 nt, Artificial Sequence
  Description of Artificial Sequence: Synthetic oligonucleotide
gcgcuccauagcacucuug

SEQ ID NO: 3016973 - RNA, 19 nt, Artificial Sequence
  Description of Artificial Sequence: Synthetic oligonucleotide
gcaaguccguguaggugcu

SEQ ID NO: 3016974 - RNA, 19 nt, Artificial Sequence
  Description of Artificial Sequence: Synthetic oligonucleotide
ccggaaaggucccgaugaa

SEQ ID NO: 3016975 - RNA, 19 nt, Artificial Sequence
  Description of Artificial Sequence: Synthetic oligonucleotide
cggaucucuuuucccaucu

SEQ ID NO: 3016976 - RNA, 19 nt, Artificial Sequence
  Description of Artificial Sequence: Synthetic oligonucleotide
gcguugcguucugucucug

SEQ ID NO: 3016977 - RNA, 19 nt, Artificial Sequence
  Description of Artificial Sequence: Synthetic oligonucleotide
gcaauaaggugggccggau

SEQ ID NO: 3016978 - RNA, 19 nt, Artificial Sequence
  Description of Artificial Sequence: Synthetic oligonucleotide
ccauggagggcgguccaaa

SEQ ID NO: 3016979 - RNA, 19 nt, Artificial Sequence
  Description of Artificial Sequence: Synthetic oligonucleotide
ggccaaggugcuuccuguu

SEQ ID NO: 3016980 - RNA, 19 nt, Artificial Sequence
  Description of Artificial Sequence: Synthetic oligonucleotide
cggaaaggucccgaugaaa

SEQ ID NO: 3016981 - RNA, 19 nt, Artificial Sequence
  Description of Artificial Sequence: Synthetic oligonucleotide
ccaggauaggaagcaacuu

SEQ ID NO: 3016982 - RNA, 19 nt, Artificial Sequence
  Description of Artificial Sequence: Synthetic oligonucleotide
gcucugcaguggccggaaa

SEQ ID NO: 3016983 - RNA, 19 nt, Artificial Sequence
  Description of Artificial Sequence: Synthetic oligonucleotide
ggcgcuccauagcacucuu

SEQ ID NO: 3016984 - RNA, 19 nt, Artificial Sequence
  Description of Artificial Sequence: Synthetic oligonucleotide
ccccauggagggcggucca

SEQ ID NO: 3016985 - RNA, 19 nt, Artificial Sequence
  Description of Artificial Sequence: Synthetic oligonucleotide
cgggcguugcguucugucu

SEQ ID NO: 3016986 - RNA, 19 nt, Artificial Sequence
  Description of Artificial Sequence: Synthetic oligonucleotide
ccagugcccgugcauggau

SEQ ID NO: 3016987 - RNA, 19 nt, Artificial Sequence
  Description of Artificial Sequence: Synthetic oligonucleotide
gugcccgugcauggaugau

SEQ ID NO: 3016988 - RNA, 19 nt, Artificial Sequence
  Description of Artificial Sequence: Synthetic oligonucleotide
ccugggaaccagguggcuu

SEQ ID NO: 3016989 - RNA, 19 nt, Artificial Sequence
  Description of Artificial Sequence: Synthetic oligonucleotide
ccuguuacgugcgggcguu

SEQ ID NO: 3016990 - RNA, 19 nt, Artificial Sequence
  Description of Artificial Sequence: Synthetic oligonucleotide
cgccuguacauaaccccau

SEQ ID NO: 3016991 - RNA, 19 nt, Artificial Sequence
  Description of Artificial Sequence: Synthetic oligonucleotide
cccauggagggcgguccaa

SEQ ID NO: 3016992 - RNA, 19 nt, Artificial Sequence
  Description of Artificial Sequence: Synthetic oligonucleotide
cgugcgggcguugcguucu

SEQ ID NO: 3016993 - RNA, 19 nt, Artificial Sequence
  Description of Artificial Sequence: Synthetic oligonucleotide
gggaaccagguggcuucau

SEQ ID NO: 3016994 - RNA, 19 nt, Artificial Sequence
  Description of Artificial Sequence: Synthetic oligonucleotide
cccugggaaccagguggcu

SEQ ID NO: 3016995 - RNA, 19 nt, Artificial Sequence
  Description of Artificial Sequence: Synthetic oligonucleotide
aauaaacugggacaaaagc

SEQ ID NO: 3016996 - RNA, 19 nt, Artificial Sequence
  Description of Artificial Sequence: Synthetic oligonucleotide
aaaugcauccaguaaaugg

SEQ ID NO: 3016997 - RNA, 19 nt, Artificial Sequence
  Description of Artificial Sequence: Synthetic oligonucleotide
uauauucuuauaaucaacc

SEQ ID NO: 3016998 - RNA, 19 nt, Artificial Sequence
  Description of Artificial Sequence: Synthetic oligonucleotide
uauacugugaacaaccucu

SEQ ID NO: 3016999 - RNA, 19 nt, Artificial Sequence
  Description of Artificial Sequence: Synthetic oligonucleotide
  modified_base (13)..(13): a, c, u, g, unknown or other
uauguaaccggcnuaaccc

SEQ ID NO: 3017000 - RNA, 19 nt, Artificial Sequence
  Description of Artificial Sequence: Synthetic oligonucleotide
cuuauaaucaaccuguuuc

SEQ ID NO: 3017001 - RNA, 19 nt, Artificial Sequence
  Description of Artificial Sequence: Synthetic oligonucleotide
aguaaauggagaaauaaac

SEQ ID NO: 3017002 - RNA, 19 nt, Artificial Sequence
  Description of Artificial Sequence: Synthetic oligonucleotide
uauucuuauaaucaaccug

SEQ ID NO: 3017003 - RNA, 19 nt, Artificial Sequence
  Description of Artificial Sequence: Synthetic oligonucleotide
uaaacugggacaaaagcug

SEQ ID NO: 3017004 - RNA, 19 nt, Artificial Sequence
  Description of Artificial Sequence: Synthetic oligonucleotide
aagauacacuucuuaaggg

SEQ ID NO: 3017005 - RNA, 19 nt, Artificial Sequence
  Description of Artificial Sequence: Synthetic oligonucleotide
aauggagaaauaaacuggg

SEQ ID NO: 3017006 - RNA, 19 nt, Artificial Sequence
  Description of Artificial Sequence: Synthetic oligonucleotide
caagauacacuucuuaagg

SEQ ID NO: 3017007 - RNA, 19 nt, Artificial Sequence
  Description of Artificial Sequence: Synthetic oligonucleotide
uguuucucgcacaagauac

SEQ ID NO: 3017008 - RNA, 19 nt, Artificial Sequence
  Description of Artificial Sequence: Synthetic oligonucleotide
uguuauuucuuucuguuuc

SEQ ID NO: 3017009 - RNA, 19 nt, Artificial Sequence
  Description of Artificial Sequence: Synthetic oligonucleotide
agauacacuucuuaagggg

SEQ ID NO: 3017010 - RNA, 19 nt, Artificial Sequence
  Description of Artificial Sequence: Synthetic oligonucleotide
auaaucaaccuguuucucg

SEQ ID NO: 3017011 - RNA, 19 nt, Artificial Sequence
  Description of Artificial Sequence: Synthetic oligonucleotide
aauggcuuuuguuauuucu

SEQ ID NO: 3017012 - RNA, 19 nt, Artificial Sequence
  Description of Artificial Sequence: Synthetic oligonucleotide
uggagaaauaaacugggac

SEQ ID NO: 3017013 - RNA, 19 nt, Artificial Sequence
  Description of Artificial Sequence: Synthetic oligonucleotide
  modified_base (7)..(7): a, c, u, g, unknown or other
accggcnuaacccauuuuc

SEQ ID NO: 3017014 - RNA, 19 nt, Artificial Sequence
  Description of Artificial Sequence: Synthetic oligonucleotide
aagcuuuuccucccuacac

SEQ ID NO: 3017015 - RNA, 19 nt, Artificial Sequence
  Description of Artificial Sequence: Synthetic oligonucleotide
uguauauucuuauaaucaa

SEQ ID NO: 3017016 - RNA, 19 nt, Artificial Sequence
  Description of Artificial Sequence: Synthetic oligonucleotide
uuauagggguuuuccaucg

SEQ ID NO: 3017017 - RNA, 19 nt, Artificial Sequence
  Description of Artificial Sequence: Synthetic oligonucleotide
uaaggggcuccuuauaggg

SEQ ID NO: 3017018 - RNA, 19 nt, Artificial Sequence
  Description of Artificial Sequence: Synthetic oligonucleotide
acaagauacacuucuuaag

SEQ ID NO: 3017019 - RNA, 19 nt, Artificial Sequence
  Description of Artificial Sequence: Synthetic oligonucleotide
guuuauacugugaacaacc

SEQ ID NO: 3017020 - RNA, 19 nt, Artificial Sequence
  Description of Artificial Sequence: Synthetic oligonucleotide
gauccuuguauguaaccgg

SEQ ID NO: 3017021 - RNA, 19 nt, Artificial Sequence
  Description of Artificial Sequence: Synthetic oligonucleotide
aaaagcuguauauucuuau

SEQ ID NO: 3017022 - RNA, 19 nt, Artificial Sequence
  Description of Artificial Sequence: Synthetic oligonucleotide
uuucugagcucucuuaaug

SEQ ID NO: 3017023 - RNA, 19 nt, Artificial Sequence
  Description of Artificial Sequence: Synthetic oligonucleotide
uuuuccaucgggauuggca

SEQ ID NO: 3017024 - RNA, 19 nt, Artificial Sequence
  Description of Artificial Sequence: Synthetic oligonucleotide
uuuccaucgggauuggcag

SEQ ID NO: 3017025 - RNA, 19 nt, Artificial Sequence
  Description of Artificial Sequence: Synthetic oligonucleotide
auucuuauaaucaaccugu

SEQ ID NO: 3017026 - RNA, 19 nt, Artificial Sequence
  Description of Artificial Sequence: Synthetic oligonucleotide
uaaucaaccuguuucucgc

SEQ ID NO: 3017027 - RNA, 19 nt, Artificial Sequence
  Description of Artificial Sequence: Synthetic oligonucleotide
  modified_base (14)..(14): a, c, u, g, unknown or other
guauguaaccggcnuaacc

SEQ ID NO: 3017028 - RNA, 19 nt, Artificial Sequence
  Description of Artificial Sequence: Synthetic oligonucleotide
aagcuguauauucuuauaa

SEQ ID NO: 3017029 - RNA, 19 nt, Artificial Sequence
  Description of Artificial Sequence: Synthetic oligonucleotide
agcuuuuccucccuacacc

SEQ ID NO: 3017030 - RNA, 19 nt, Artificial Sequence
  Description of Artificial Sequence: Synthetic oligonucleotide
uuaaggggcuccuuauagg

SEQ ID NO: 3017031 - RNA, 19 nt, Artificial Sequence
  Description of Artificial Sequence: Synthetic oligonucleotide
uuuuguuauuucuuucugu

SEQ ID NO: 3017032 - RNA, 19 nt, Artificial Sequence
  Description of Artificial Sequence: Synthetic oligonucleotide
auauucuuauaaucaaccu

SEQ ID NO: 3017033 - RNA, 19 nt, Artificial Sequence
  Description of Artificial Sequence: Synthetic oligonucleotide
gauacacuucuuaaggggc

SEQ ID NO: 3017034 - RNA, 19 nt, Artificial Sequence
  Description of Artificial Sequence: Synthetic oligonucleotide
auuggcagguccucauugc

SEQ ID NO: 3017035 - RNA, 19 nt, Artificial Sequence
  Description of Artificial Sequence: Synthetic oligonucleotide
uaugcaggauccuuguaug

SEQ ID NO: 3017036 - RNA, 19 nt, Artificial Sequence
  Description of Artificial Sequence: Synthetic oligonucleotide
auaaacugggacaaaagcu

SEQ ID NO: 3017037 - RNA, 19 nt, Artificial Sequence
  Description of Artificial Sequence: Synthetic oligonucleotide
uccacaaagaccuguuaug

SEQ ID NO: 3017038 - RNA, 19 nt, Artificial Sequence
  Description of Artificial Sequence: Synthetic oligonucleotide
cuuaaggggcuccuuauag

SEQ ID NO: 3017039 - RNA, 19 nt, Artificial Sequence
  Description of Artificial Sequence: Synthetic oligonucleotide
uuuauacugugaacaaccu

SEQ ID NO: 3017040 - RNA, 19 nt, Artificial Sequence
  Description of Artificial Sequence: Synthetic oligonucleotide
ugugccuuccguaaaugca

SEQ ID NO: 3017041 - RNA, 19 nt, Artificial Sequence
  Description of Artificial Sequence: Synthetic oligonucleotide
acugcagccggugucaagc

SEQ ID NO: 3017042 - RNA, 19 nt, Artificial Sequence
  Description of Artificial Sequence: Synthetic oligonucleotide
ucuuaauggcuuuuguuau

SEQ ID NO: 3017043 - RNA, 19 nt, Artificial Sequence
  Description of Artificial Sequence: Synthetic oligonucleotide
agagcugccaugguucucc

SEQ ID NO: 3017044 - RNA, 19 nt, Artificial Sequence
  Description of Artificial Sequence: Synthetic oligonucleotide
ucgcacaagauacacuucu

SEQ ID NO: 3017045 - RNA, 19 nt, Artificial Sequence
  Description of Artificial Sequence: Synthetic oligonucleotide
augugccuuccguaaaugc

SEQ ID NO: 3017046 - RNA, 19 nt, Artificial Sequence
  Description of Artificial Sequence: Synthetic oligonucleotide
guaaccagagcugccaugg

SEQ ID NO: 3017047 - RNA, 19 nt, Artificial Sequence
  Description of Artificial Sequence: Synthetic oligonucleotide
uuuccucccuacaccagcg

SEQ ID NO: 3017048 - RNA, 19 nt, Artificial Sequence
  Description of Artificial Sequence: Synthetic oligonucleotide
ucucgcacaagauacacuu

SEQ ID NO: 3017049 - RNA, 19 nt, Artificial Sequence
  Description of Artificial Sequence: Synthetic oligonucleotide
ucugagcucucuuaauggc

SEQ ID NO: 3017050 - RNA, 19 nt, Artificial Sequence
  Description of Artificial Sequence: Synthetic oligonucleotide
aggauccuuguauguaacc

SEQ ID NO: 3017051 - RNA, 19 nt, Artificial Sequence
  Description of Artificial Sequence: Synthetic oligonucleotide
auagggguuuuccaucggg

SEQ ID NO: 3017052 - RNA, 19 nt, Artificial Sequence
  Description of Artificial Sequence: Synthetic oligonucleotide
auaugcaggauccuuguau

SEQ ID NO: 3017053 - RNA, 19 nt, Artificial Sequence
  Description of Artificial Sequence: Synthetic oligonucleotide
ugaacaaccucuucuccac

SEQ ID NO: 3017054 - RNA, 19 nt, Artificial Sequence
  Description of Artificial Sequence: Synthetic oligonucleotide
ggagaaauaaacugggaca

SEQ ID NO: 3017055 - RNA, 19 nt, Artificial Sequence
  Description of Artificial Sequence: Synthetic oligonucleotide
caaagaccuguuaugugcc

SEQ ID NO: 3017056 - RNA, 19 nt, Artificial Sequence
  Description of Artificial Sequence: Synthetic oligonucleotide
uguuaugugccuuccguaa

SEQ ID NO: 3017057 - RNA, 19 nt, Artificial Sequence
  Description of Artificial Sequence: Synthetic oligonucleotide
  modified_base (16)..(16): a, c, u, g, unknown or other
uuguauguaaccggcnuaa

SEQ ID NO: 3017058 - RNA, 19 nt, Artificial Sequence
  Description of Artificial Sequence: Synthetic oligonucleotide
aaagcuguauauucuuaua

SEQ ID NO: 3017059 - RNA, 19 nt, Artificial Sequence
  Description of Artificial Sequence: Synthetic oligonucleotide
aucaaccuguuucucgcac

SEQ ID NO: 3017060 - RNA, 19 nt, Artificial Sequence
  Description of Artificial Sequence: Synthetic oligonucleotide
uuccacaaagaccuguuau

SEQ ID NO: 3017061 - RNA, 19 nt, Artificial Sequence
  Description of Artificial Sequence: Synthetic oligonucleotide
ugggacaaaagcuguauau

SEQ ID NO: 3017062 - RNA, 19 nt, Artificial Sequence
  Description of Artificial Sequence: Synthetic oligonucleotide
cuuuuguuauuucuuucug

SEQ ID NO: 3017063 - RNA, 19 nt, Artificial Sequence
  Description of Artificial Sequence: Synthetic oligonucleotide
gauuggcagguccucauug

SEQ ID NO: 3017064 - RNA, 19 nt, Artificial Sequence
  Description of Artificial Sequence: Synthetic oligonucleotide
accuguuuauacugugaac

SEQ ID NO: 3017065 - RNA, 19 nt, Artificial Sequence
  Description of Artificial Sequence: Synthetic oligonucleotide
uuauacugugaacaaccuc

SEQ ID NO: 3017066 - RNA, 19 nt, Artificial Sequence
  Description of Artificial Sequence: Synthetic oligonucleotide
uaccuguuuauacugugaa

SEQ ID NO: 3017067 - RNA, 19 nt, Artificial Sequence
  Description of Artificial Sequence: Synthetic oligonucleotide
gagaaauaaacugggacaa

SEQ ID NO: 3017068 - RNA, 19 nt, Artificial Sequence
  Description of Artificial Sequence: Synthetic oligonucleotide
aacccauuuucugagcucu

SEQ ID NO: 3017069 - RNA, 19 nt, Artificial Sequence
  Description of Artificial Sequence: Synthetic oligonucleotide
accuguuucucgcacaaga

SEQ ID NO: 3017070 - RNA, 19 nt, Artificial Sequence
  Description of Artificial Sequence: Synthetic oligonucleotide
auccuuguauguaaccggc

SEQ ID NO: 3017071 - RNA, 19 nt, Artificial Sequence
  Description of Artificial Sequence: Synthetic oligonucleotide
auuuucugagcucucuuaa

SEQ ID NO: 3017072 - RNA, 19 nt, Artificial Sequence
  Description of Artificial Sequence: Synthetic oligonucleotide
ucuuauaaucaaccuguuu

SEQ ID NO: 3017073 - RNA, 19 nt, Artificial Sequence
  Description of Artificial Sequence: Synthetic oligonucleotide
uucuuucuguuucuuucca

SEQ ID NO: 3017074 - RNA, 19 nt, Artificial Sequence
  Description of Artificial Sequence: Synthetic oligonucleotide
cuuccguaaaugcauccag

SEQ ID NO: 3017075 - RNA, 19 nt, Artificial Sequence
  Description of Artificial Sequence: Synthetic oligonucleotide
acaaaagcuguauauucuu

SEQ ID NO: 3017076 - RNA, 19 nt, Artificial Sequence
  Description of Artificial Sequence: Synthetic oligonucleotide
agcuguauauucuuauaau

SEQ ID NO: 3017077 - RNA, 19 nt, Artificial Sequence
  Description of Artificial Sequence: Synthetic oligonucleotide
guauauucuuauaaucaac

SEQ ID NO: 3017078 - RNA, 19 nt, Artificial Sequence
  Description of Artificial Sequence: Synthetic oligonucleotide
uauagggguuuuccaucgg

SEQ ID NO: 3017079 - RNA, 19 nt, Artificial Sequence
  Description of Artificial Sequence: Synthetic oligonucleotide
uacaccagcgcacacggua

SEQ ID NO: 3017080 - RNA, 19 nt, Artificial Sequence
  Description of Artificial Sequence: Synthetic oligonucleotide
agaccuguuaugugccuuc

SEQ ID NO: 3017081 - RNA, 19 nt, Artificial Sequence
  Description of Artificial Sequence: Synthetic oligonucleotide
uucuccacagcacggugug

SEQ ID NO: 3017082 - RNA, 19 nt, Artificial Sequence
  Description of Artificial Sequence: Synthetic oligonucleotide
agauaugcaggauccuugu

SEQ ID NO: 3017083 - RNA, 19 nt, Artificial Sequence
  Description of Artificial Sequence: Synthetic oligonucleotide
acacgguaaccagagcugc

SEQ ID NO: 3017084 - RNA, 19 nt, Artificial Sequence
  Description of Artificial Sequence: Synthetic oligonucleotide
uuucuguuucuuuccacaa

SEQ ID NO: 3017085 - RNA, 19 nt, Artificial Sequence
  Description of Artificial Sequence: Synthetic oligonucleotide
cuuucuguuucuuuccaca

SEQ ID NO: 3017086 - RNA, 19 nt, Artificial Sequence
  Description of Artificial Sequence: Synthetic oligonucleotide
ucucuuaauggcuuuuguu

SEQ ID NO: 3017087 - RNA, 19 nt, Artificial Sequence
  Description of Artificial Sequence: Synthetic oligonucleotide
ggauccuuguauguaaccg

SEQ ID NO: 3017088 - RNA, 19 nt, Artificial Sequence
  Description of Artificial Sequence: Synthetic oligonucleotide
uuaugugccuuccguaaau

SEQ ID NO: 3017089 - RNA, 19 nt, Artificial Sequence
  Description of Artificial Sequence: Synthetic oligonucleotide
ggacaaaagcuguauauuc

SEQ ID NO: 3017090 - RNA, 19 nt, Artificial Sequence
  Description of Artificial Sequence: Synthetic oligonucleotide
uccguaaaugcauccagua

SEQ ID NO: 3017091 - RNA, 19 nt, Artificial Sequence
  Description of Artificial Sequence: Synthetic oligonucleotide
uuccguaaaugcauccagu

SEQ ID NO: 3017092 - RNA, 19 nt, Artificial Sequence
  Description of Artificial Sequence: Synthetic oligonucleotide
ucaagcuuuuccucccuac

SEQ ID NO: 3017093 - RNA, 19 nt, Artificial Sequence
  Description of Artificial Sequence: Synthetic oligonucleotide
uggcuaccuguuuauacug

SEQ ID NO: 3017094 - RNA, 19 nt, Artificial Sequence
  Description of Artificial Sequence: Synthetic oligonucleotide
aaagaccuguuaugugccu

SEQ ID NO: 3017095 - RNA, 19 nt, Artificial Sequence
  Description of Artificial Sequence: Synthetic oligonucleotide
  modified_base (2)..(2): a, c, u, g, unknown or other
cnuaacccauuuucugagc

SEQ ID NO: 3017096 - RNA, 19 nt, Artificial Sequence
  Description of Artificial Sequence: Synthetic oligonucleotide
aaucaaccuguuucucgca

SEQ ID NO: 3017097 - RNA, 19 nt, Artificial Sequence
  Description of Artificial Sequence: Synthetic oligonucleotide
guaaauggagaaauaaacu

SEQ ID NO: 3017098 - RNA, 19 nt, Artificial Sequence
  Description of Artificial Sequence: Synthetic oligonucleotide
uagggguuuuccaucggga

SEQ ID NO: 3017099 - RNA, 19 nt, Artificial Sequence
  Description of Artificial Sequence: Synthetic oligonucleotide
accagagcugccaugguuc

SEQ ID NO: 3017100 - RNA, 19 nt, Artificial Sequence
  Description of Artificial Sequence: Synthetic oligonucleotide
uuaauggcuuuuguuauuu

SEQ ID NO: 3017101 - RNA, 19 nt, Artificial Sequence
  Description of Artificial Sequence: Synthetic oligonucleotide
ugagcucucuuaauggcuu

SEQ ID NO: 3017102 - RNA, 19 nt, Artificial Sequence
  Description of Artificial Sequence: Synthetic oligonucleotide
  modified_base (3)..(3): a, c, u, g, unknown or other
gcnuaacccauuuucugag

SEQ ID NO: 3017103 - RNA, 19 nt, Artificial Sequence
  Description of Artificial Sequence: Synthetic oligonucleotide
  modified_base (12)..(12): a, c, u, g, unknown or other
auguaaccggcnuaaccca

SEQ ID NO: 3017104 - RNA, 19 nt, Artificial Sequence
  Description of Artificial Sequence: Synthetic oligonucleotide
auugcuggcuaccuguuua

SEQ ID NO: 3017105 - RNA, 19 nt, Artificial Sequence
  Description of Artificial Sequence: Synthetic oligonucleotide
uuucucgcacaagauacac

SEQ ID NO: 3017106 - RNA, 19 nt, Artificial Sequence
  Description of Artificial Sequence: Synthetic oligonucleotide
ucaaccuguuucucgcaca

SEQ ID NO: 3017107 - RNA, 19 nt, Artificial Sequence
  Description of Artificial Sequence: Synthetic oligonucleotide
uccgcgauccgcgaggcag

SEQ ID NO: 3017108 - RNA, 19 nt, Artificial Sequence
  Description of Artificial Sequence: Synthetic oligonucleotide
aaccucuucuccacagcac

SEQ ID NO: 3017109 - RNA, 19 nt, Artificial Sequence
  Description of Artificial Sequence: Synthetic oligonucleotide
uucuguuucuuuccacaaa

SEQ ID NO: 3017110 - RNA, 19 nt, Artificial Sequence
  Description of Artificial Sequence: Synthetic oligonucleotide
aaacugggacaaaagcugu

SEQ ID NO: 3017111 - RNA, 19 nt, Artificial Sequence
  Description of Artificial Sequence: Synthetic oligonucleotide
auccaguaaauggagaaau

SEQ ID NO: 3017112 - RNA, 19 nt, Artificial Sequence
  Description of Artificial Sequence: Synthetic oligonucleotide
cacacgguaaccagagcug

SEQ ID NO: 3017113 - RNA, 19 nt, Artificial Sequence
  Description of Artificial Sequence: Synthetic oligonucleotide
cacaagauacacuucuuaa

SEQ ID NO: 3017114 - RNA, 19 nt, Artificial Sequence
  Description of Artificial Sequence: Synthetic oligonucleotide
cacaaagaccuguuaugug

SEQ ID NO: 3017115 - RNA, 19 nt, Artificial Sequence
  Description of Artificial Sequence: Synthetic oligonucleotide
uuuucugagcucucuuaau

SEQ ID NO: 3017116 - RNA, 19 nt, Artificial Sequence
  Description of Artificial Sequence: Synthetic oligonucleotide
uccaguaaauggagaaaua

SEQ ID NO: 3017117 - RNA, 19 nt, Artificial Sequence
  Description of Artificial Sequence: Synthetic oligonucleotide
caguaaauggagaaauaaa

SEQ ID NO: 3017118 - RNA, 19 nt, Artificial Sequence
  Description of Artificial Sequence: Synthetic oligonucleotide
  modified_base (19)..(19): a, c, u, g, unknown or other
uccuuguauguaaccggcn

SEQ ID NO: 3017119 - RNA, 19 nt, Artificial Sequence
  Description of Artificial Sequence: Synthetic oligonucleotide
aggggcuccuuauaggggu

SEQ ID NO: 3017120 - RNA, 19 nt, Artificial Sequence
  Description of Artificial Sequence: Synthetic oligonucleotide
uuccaucgggauuggcagg

SEQ ID NO: 3017121 - RNA, 19 nt, Artificial Sequence
  Description of Artificial Sequence: Synthetic oligonucleotide
uucuuaaggggcuccuuau

SEQ ID NO: 3017122 - RNA, 19 nt, Artificial Sequence
  Description of Artificial Sequence: Synthetic oligonucleotide
uuguuauuucuuucuguuu

SEQ ID NO: 3017123 - RNA, 19 nt, Artificial Sequence
  Description of Artificial Sequence: Synthetic oligonucleotide
uuggcagguccucauugcu

SEQ ID NO: 3017124 - RNA, 19 nt, Artificial Sequence
  Description of Artificial Sequence: Synthetic oligonucleotide
  modified_base (11)..(11): a, c, u, g, unknown or other
uguaaccggcnuaacccau

SEQ ID NO: 3017125 - RNA, 19 nt, Artificial Sequence
  Description of Artificial Sequence: Synthetic oligonucleotide
  modified_base (4)..(4): a, c, u, g, unknown or other
ggcnuaacccauuuucuga

SEQ ID NO: 3017126 - RNA, 19 nt, Artificial Sequence
  Description of Artificial Sequence: Synthetic oligonucleotide
acacuucuuaaggggcucc

SEQ ID NO: 3017127 - RNA, 19 nt, Artificial Sequence
  Description of Artificial Sequence: Synthetic oligonucleotide
uucucgcacaagauacacu

SEQ ID NO: 3017128 - RNA, 19 nt, Artificial Sequence
  Description of Artificial Sequence: Synthetic oligonucleotide
aaggggcuccuuauagggg

SEQ ID NO: 3017129 - RNA, 19 nt, Artificial Sequence
  Description of Artificial Sequence: Synthetic oligonucleotide
ucuuaaggggcuccuuaua

SEQ ID NO: 3017130 - RNA, 19 nt, Artificial Sequence
  Description of Artificial Sequence: Synthetic oligonucleotide
uccucccuacaccagcgca

SEQ ID NO: 3017131 - RNA, 19 nt, Artificial Sequence
  Description of Artificial Sequence: Synthetic oligonucleotide
uuuccacaaagaccuguua

SEQ ID NO: 3017132 - RNA, 19 nt, Artificial Sequence
  Description of Artificial Sequence: Synthetic oligonucleotide
uaugugccuuccguaaaug

SEQ ID NO: 3017133 - RNA, 19 nt, Artificial Sequence
  Description of Artificial Sequence: Synthetic oligonucleotide
uggcuuuuguuauuucuuu

SEQ ID NO: 3017134 - RNA, 19 nt, Artificial Sequence
  Description of Artificial Sequence: Synthetic oligonucleotide
gugucaagcuuuuccuccc

SEQ ID NO: 3017135 - RNA, 19 nt, Artificial Sequence
  Description of Artificial Sequence: Synthetic oligonucleotide
accuguuaugugccuuccg

SEQ ID NO: 3017136 - RNA, 19 nt, Artificial Sequence
  Description of Artificial Sequence: Synthetic oligonucleotide
ccuguuuauacugugaaca

SEQ ID NO: 3017137 - RNA, 19 nt, Artificial Sequence
  Description of Artificial Sequence: Synthetic oligonucleotide
uucuuauaaucaaccuguu

SEQ ID NO: 3017138 - RNA, 19 nt, Artificial Sequence
  Description of Artificial Sequence: Synthetic oligonucleotide
agcuccgcgauccgcgagg

SEQ ID NO: 3017139 - RNA, 19 nt, Artificial Sequence
  Description of Artificial Sequence: Synthetic oligonucleotide
uaacccauuuucugagcuc

SEQ ID NO: 3017140 - RNA, 19 nt, Artificial Sequence
  Description of Artificial Sequence: Synthetic oligonucleotide
ggguuuuccaucgggauug

SEQ ID NO: 3017141 - RNA, 19 nt, Artificial Sequence
  Description of Artificial Sequence: Synthetic oligonucleotide
caucgggauuggcaggucc

SEQ ID NO: 3017142 - RNA, 19 nt, Artificial Sequence
  Description of Artificial Sequence: Synthetic oligonucleotide
cuuuuccucccuacaccag

SEQ ID NO: 3017143 - RNA, 19 nt, Artificial Sequence
  Description of Artificial Sequence: Synthetic oligonucleotide
ugucaagcuuuuccucccu

SEQ ID NO: 3017144 - RNA, 19 nt, Artificial Sequence
  Description of Artificial Sequence: Synthetic oligonucleotide
ccuacaccagcgcacacgg

SEQ ID NO: 3017145 - RNA, 19 nt, Artificial Sequence
  Description of Artificial Sequence: Synthetic oligonucleotide
cuguuuauacugugaacaa

SEQ ID NO: 3017146 - RNA, 19 nt, Artificial Sequence
  Description of Artificial Sequence: Synthetic oligonucleotide
uacugugaacaaccucuuc

SEQ ID NO: 3017147 - RNA, 19 nt, Artificial Sequence
  Description of Artificial Sequence: Synthetic oligonucleotide
  modified_base (9)..(9): a, c, u, g, unknown or other
uaaccggcnuaacccauuu

SEQ ID NO: 3017148 - RNA, 19 nt, Artificial Sequence
  Description of Artificial Sequence: Synthetic oligonucleotide
cuccacagcacggugugag

SEQ ID NO: 3017149 - RNA, 19 nt, Artificial Sequence
  Description of Artificial Sequence: Synthetic oligonucleotide
caggauccuuguauguaac

SEQ ID NO: 3017150 - RNA, 19 nt, Artificial Sequence
  Description of Artificial Sequence: Synthetic oligonucleotide
cuaccuguuuauacuguga

SEQ ID NO: 3017151 - RNA, 19 nt, Artificial Sequence
  Description of Artificial Sequence: Synthetic oligonucleotide
accagcgcacacgguaacc

SEQ ID NO: 3017152 - RNA, 19 nt, Artificial Sequence
  Description of Artificial Sequence: Synthetic oligonucleotide
agggguuuuccaucgggau

SEQ ID NO: 3017153 - RNA, 19 nt, Artificial Sequence
  Description of Artificial Sequence: Synthetic oligonucleotide
gugagcuccgcgauccgcg

SEQ ID NO: 3017154 - RNA, 19 nt, Artificial Sequence
  Description of Artificial Sequence: Synthetic oligonucleotide
uaauggcuuuuguuauuuc

SEQ ID NO: 3017155 - RNA, 19 nt, Artificial Sequence
  Description of Artificial Sequence: Synthetic oligonucleotide
uccaucgggauuggcaggu

SEQ ID NO: 3017156 - RNA, 19 nt, Artificial Sequence
  Description of Artificial Sequence: Synthetic oligonucleotide
gccggugucaagcuuuucc

SEQ ID NO: 3017157 - RNA, 19 nt, Artificial Sequence
  Description of Artificial Sequence: Synthetic oligonucleotide
ggugugagcuccgcgaucc

SEQ ID NO: 3017158 - RNA, 19 nt, Artificial Sequence
  Description of Artificial Sequence: Synthetic oligonucleotide
auacacuucuuaaggggcu

SEQ ID NO: 3017159 - RNA, 19 nt, Artificial Sequence
  Description of Artificial Sequence: Synthetic oligonucleotide
augcaggauccuuguaugu

SEQ ID NO: 3017160 - RNA, 19 nt, Artificial Sequence
  Description of Artificial Sequence: Synthetic oligonucleotide
gcuaccuguuuauacugug

SEQ ID NO: 3017161 - RNA, 19 nt, Artificial Sequence
  Description of Artificial Sequence: Synthetic oligonucleotide
acugggacaaaagcuguau

SEQ ID NO: 3017162 - RNA, 19 nt, Artificial Sequence
  Description of Artificial Sequence: Synthetic oligonucleotide
gcuggcuaccuguuuauac

SEQ ID NO: 3017163 - RNA, 19 nt, Artificial Sequence
  Description of Artificial Sequence: Synthetic oligonucleotide
uucuuuccacaaagaccug

SEQ ID NO: 3017164 - RNA, 19 nt, Artificial Sequence
  Description of Artificial Sequence: Synthetic oligonucleotide
cacgguaaccagagcugcc

SEQ ID NO: 3017165 - RNA, 19 nt, Artificial Sequence
  Description of Artificial Sequence: Synthetic oligonucleotide
  modified_base (15)..(15): a, c, u, g, unknown or other
uguauguaaccggcnuaac

SEQ ID NO: 3017166 - RNA, 19 nt, Artificial Sequence
  Description of Artificial Sequence: Synthetic oligonucleotide
ugcaggauccuuguaugua

SEQ ID NO: 3017167 - RNA, 19 nt, Artificial Sequence
  Description of Artificial Sequence: Synthetic oligonucleotide
ugugagcuccgcgauccgc

SEQ ID NO: 3017168 - RNA, 19 nt, Artificial Sequence
  Description of Artificial Sequence: Synthetic oligonucleotide
cauuuucugagcucucuua

SEQ ID NO: 3017169 - RNA, 19 nt, Artificial Sequence
  Description of Artificial Sequence: Synthetic oligonucleotide
caaaagcuguauauucuua

SEQ ID NO: 3017170 - RNA, 19 nt, Artificial Sequence
  Description of Artificial Sequence: Synthetic oligonucleotide
guuaugugccuuccguaaa

SEQ ID NO: 3017171 - RNA, 19 nt, Artificial Sequence
  Description of Artificial Sequence: Synthetic oligonucleotide
uccacagcacggugugagc

SEQ ID NO: 3017172 - RNA, 19 nt, Artificial Sequence
  Description of Artificial Sequence: Synthetic oligonucleotide
gcauccaguaaauggagaa

SEQ ID NO: 3017173 - RNA, 19 nt, Artificial Sequence
  Description of Artificial Sequence: Synthetic oligonucleotide
agcugccaugguucuccgc

SEQ ID NO: 3017174 - RNA, 19 nt, Artificial Sequence
  Description of Artificial Sequence: Synthetic oligonucleotide
caagcuuuuccucccuaca

SEQ ID NO: 3017175 - RNA, 19 nt, Artificial Sequence
  Description of Artificial Sequence: Synthetic oligonucleotide
aagaccuguuaugugccuu

SEQ ID NO: 3017176 - RNA, 19 nt, Artificial Sequence
  Description of Artificial Sequence: Synthetic oligonucleotide
ugccuuccguaaaugcauc

SEQ ID NO: 3017177 - RNA, 19 nt, Artificial Sequence
  Description of Artificial Sequence: Synthetic oligonucleotide
gcuuuuccucccuacacca

SEQ ID NO: 3017178 - RNA, 19 nt, Artificial Sequence
  Description of Artificial Sequence: Synthetic oligonucleotide
uccucauugcuggcuaccu

SEQ ID NO: 3017179 - RNA, 19 nt, Artificial Sequence
  Description of Artificial Sequence: Synthetic oligonucleotide
uccgcgaggcagacugcag

SEQ ID NO: 3017180 - RNA, 19 nt, Artificial Sequence
  Description of Artificial Sequence: Synthetic oligonucleotide
  modified_base (17)..(17): a, c, u, g, unknown or other
cuuguauguaaccggcnua

SEQ ID NO: 3017181 - RNA, 19 nt, Artificial Sequence
  Description of Artificial Sequence: Synthetic oligonucleotide
cuguuucuuuccacaaaga

SEQ ID NO: 3017182 - RNA, 19 nt, Artificial Sequence
  Description of Artificial Sequence: Synthetic oligonucleotide
aaccuguuucucgcacaag

SEQ ID NO: 3017183 - RNA, 19 nt, Artificial Sequence
  Description of Artificial Sequence: Synthetic oligonucleotide
acgguaaccagagcugcca

SEQ ID NO: 3017184 - RNA, 19 nt, Artificial Sequence
  Description of Artificial Sequence: Synthetic oligonucleotide
ucauugcuggcuaccuguu

SEQ ID NO: 3017185 - RNA, 19 nt, Artificial Sequence
  Description of Artificial Sequence: Synthetic oligonucleotide
uuccucccuacaccagcgc

SEQ ID NO: 3017186 - RNA, 19 nt, Artificial Sequence
  Description of Artificial Sequence: Synthetic oligonucleotide
agaaauaaacugggacaaa

SEQ ID NO: 3017187 - RNA, 19 nt, Artificial Sequence
  Description of Artificial Sequence: Synthetic oligonucleotide
gaacaaccucuucuccaca

SEQ ID NO: 3017188 - RNA, 19 nt, Artificial Sequence
  Description of Artificial Sequence: Synthetic oligonucleotide
cacggugugagcuccgcga

SEQ ID NO: 3017189 - RNA, 19 nt, Artificial Sequence
  Description of Artificial Sequence: Synthetic oligonucleotide
ggcuuuuguuauuucuuuc

SEQ ID NO: 3017190 - RNA, 19 nt, Artificial Sequence
  Description of Artificial Sequence: Synthetic oligonucleotide
agcacggugugagcuccgc

SEQ ID NO: 3017191 - RNA, 19 nt, Artificial Sequence
  Description of Artificial Sequence: Synthetic oligonucleotide
auggagaaauaaacuggga

SEQ ID NO: 3017192 - RNA, 19 nt, Artificial Sequence
  Description of Artificial Sequence: Synthetic oligonucleotide
cguaaaugcauccaguaaa

SEQ ID NO: 3017193 - RNA, 19 nt, Artificial Sequence
  Description of Artificial Sequence: Synthetic oligonucleotide
uaaccagagcugccauggu

SEQ ID NO: 3017194 - RNA, 19 nt, Artificial Sequence
  Description of Artificial Sequence: Synthetic oligonucleotide
cucgcacaagauacacuuc

SEQ ID NO: 3017195 - RNA, 19 nt, Artificial Sequence
  Description of Artificial Sequence: Synthetic oligonucleotide
gguaaccagagcugccaug

SEQ ID NO: 3017196 - RNA, 19 nt, Artificial Sequence
  Description of Artificial Sequence: Synthetic oligonucleotide
gaccuguuaugugccuucc

SEQ ID NO: 3017197 - RNA, 19 nt, Artificial Sequence
  Description of Artificial Sequence: Synthetic oligonucleotide
uugcuggcuaccuguuuau

SEQ ID NO: 3017198 - RNA, 19 nt, Artificial Sequence
  Description of Artificial Sequence: Synthetic oligonucleotide
cuggcuaccuguuuauacu

SEQ ID NO: 3017199 - RNA, 19 nt, Artificial Sequence
  Description of Artificial Sequence: Synthetic oligonucleotide
gauaugcaggauccuugua

SEQ ID NO: 3017200 - RNA, 19 nt, Artificial Sequence
  Description of Artificial Sequence: Synthetic oligonucleotide
cagcgcacacgguaaccag

SEQ ID NO: 3017201 - RNA, 19 nt, Artificial Sequence
  Description of Artificial Sequence: Synthetic oligonucleotide
cuguuucucgcacaagaua

SEQ ID NO: 3017202 - RNA, 19 nt, Artificial Sequence
  Description of Artificial Sequence: Synthetic oligonucleotide
ugagcuccgcgauccgcga

SEQ ID NO: 3017203 - RNA, 19 nt, Artificial Sequence
  Description of Artificial Sequence: Synthetic oligonucleotide
cacagcacggugugagcuc

SEQ ID NO: 3017204 - RNA, 19 nt, Artificial Sequence
  Description of Artificial Sequence: Synthetic oligonucleotide
guuucucgcacaagauaca

SEQ ID NO: 3017205 - RNA, 19 nt, Artificial Sequence
  Description of Artificial Sequence: Synthetic oligonucleotide
gcacacgguaaccagagcu

SEQ ID NO: 3017206 - RNA, 19 nt, Artificial Sequence
  Description of Artificial Sequence: Synthetic oligonucleotide
cuguuaugugccuuccgua

SEQ ID NO: 3017207 - RNA, 19 nt, Artificial Sequence
  Description of Artificial Sequence: Synthetic oligonucleotide
cgauccgcgaggcagacug

SEQ ID NO: 3017208 - RNA, 19 nt, Artificial Sequence
  Description of Artificial Sequence: Synthetic oligonucleotide
agguccucauugcuggcua

SEQ ID NO: 3017209 - RNA, 19 nt, Artificial Sequence
  Description of Artificial Sequence: Synthetic oligonucleotide
aacugggacaaaagcugua

SEQ ID NO: 3017210 - RNA, 19 nt, Artificial Sequence
  Description of Artificial Sequence: Synthetic oligonucleotide
ccaguaaauggagaaauaa

SEQ ID NO: 3017211 - RNA, 19 nt, Artificial Sequence
  Description of Artificial Sequence: Synthetic oligonucleotide
  modified_base (8)..(8): a, c, u, g, unknown or other
aaccggcnuaacccauuuu

SEQ ID NO: 3017212 - RNA, 19 nt, Artificial Sequence
  Description of Artificial Sequence: Synthetic oligonucleotide
gcaggauccuuguauguaa

SEQ ID NO: 3017213 - RNA, 19 nt, Artificial Sequence
  Description of Artificial Sequence: Synthetic oligonucleotide
aucgggauuggcagguccu

SEQ ID NO: 3017214 - RNA, 19 nt, Artificial Sequence
  Description of Artificial Sequence: Synthetic oligonucleotide
cugagcucucuuaauggcu

SEQ ID NO: 3017215 - RNA, 19 nt, Artificial Sequence
  Description of Artificial Sequence: Synthetic oligonucleotide
caaccuguuucucgcacaa

SEQ ID NO: 3017216 - RNA, 19 nt, Artificial Sequence
  Description of Artificial Sequence: Synthetic oligonucleotide
acggugugagcuccgcgau

SEQ ID NO: 3017217 - RNA, 19 nt, Artificial Sequence
  Description of Artificial Sequence: Synthetic oligonucleotide
cauccaguaaauggagaaa

SEQ ID NO: 3017218 - RNA, 19 nt, Artificial Sequence
  Description of Artificial Sequence: Synthetic oligonucleotide
guccucauugcuggcuacc

SEQ ID NO: 3017219 - RNA, 19 nt, Artificial Sequence
  Description of Artificial Sequence: Synthetic oligonucleotide
gagcuccgcgauccgcgag

SEQ ID NO: 3017220 - RNA, 19 nt, Artificial Sequence
  Description of Artificial Sequence: Synthetic oligonucleotide
gcacaagauacacuucuua

SEQ ID NO: 3017221 - RNA, 19 nt, Artificial Sequence
  Description of Artificial Sequence: Synthetic oligonucleotide
gccuuccguaaaugcaucc

SEQ ID NO: 3017222 - RNA, 19 nt, Artificial Sequence
  Description of Artificial Sequence: Synthetic oligonucleotide
agcgcacacgguaaccaga

SEQ ID NO: 3017223 - RNA, 19 nt, Artificial Sequence
  Description of Artificial Sequence: Synthetic oligonucleotide
ugcagccggugucaagcuu

SEQ ID NO: 3017224 - RNA, 19 nt, Artificial Sequence
  Description of Artificial Sequence: Synthetic oligonucleotide
auacugugaacaaccucuu

SEQ ID NO: 3017225 - RNA, 19 nt, Artificial Sequence
  Description of Artificial Sequence: Synthetic oligonucleotide
gugugagcuccgcgauccg

SEQ ID NO: 3017226 - RNA, 19 nt, Artificial Sequence
  Description of Artificial Sequence: Synthetic oligonucleotide
guuuuccaucgggauuggc

SEQ ID NO: 3017227 - RNA, 19 nt, Artificial Sequence
  Description of Artificial Sequence: Synthetic oligonucleotide
cuuaauggcuuuuguuauu

SEQ ID NO: 3017228 - RNA, 19 nt, Artificial Sequence
  Description of Artificial Sequence: Synthetic oligonucleotide
cuuuccacaaagaccuguu

SEQ ID NO: 3017229 - RNA, 19 nt, Artificial Sequence
  Description of Artificial Sequence: Synthetic oligonucleotide
auccgcgaggcagacugca

SEQ ID NO: 3017230 - RNA, 19 nt, Artificial Sequence
  Description of Artificial Sequence: Synthetic oligonucleotide
cuucuccacagcacggugu

SEQ ID NO: 3017231 - RNA, 19 nt, Artificial Sequence
  Description of Artificial Sequence: Synthetic oligonucleotide
cucucuuaauggcuuuugu

SEQ ID NO: 3017232 - RNA, 19 nt, Artificial Sequence
  Description of Artificial Sequence: Synthetic oligonucleotide
gcagacugcagccgguguc

SEQ ID NO: 3017233 - RNA, 19 nt, Artificial Sequence
  Description of Artificial Sequence: Synthetic oligonucleotide
  modified_base (5)..(5): a, c, u, g, unknown or other
cggcnuaacccauuuucug

SEQ ID NO: 3017234 - RNA, 19 nt, Artificial Sequence
  Description of Artificial Sequence: Synthetic oligonucleotide
ucgggauuggcagguccuc

SEQ ID NO: 3017235 - RNA, 19 nt, Artificial Sequence
  Description of Artificial Sequence: Synthetic oligonucleotide
ccucccuacaccagcgcac

SEQ ID NO: 3017236 - RNA, 19 nt, Artificial Sequence
  Description of Artificial Sequence: Synthetic oligonucleotide
gcucucuuaauggcuuuug

SEQ ID NO: 3017237 - RNA, 19 nt, Artificial Sequence
  Description of Artificial Sequence: Synthetic oligonucleotide
acccauuuucugagcucuc

SEQ ID NO: 3017238 - RNA, 19 nt, Artificial Sequence
  Description of Artificial Sequence: Synthetic oligonucleotide
ucccuacaccagcgcacac

SEQ ID NO: 3017239 - RNA, 19 nt, Artificial Sequence
  Description of Artificial Sequence: Synthetic oligonucleotide
gcgcacacgguaaccagag

SEQ ID NO: 3017240 - RNA, 19 nt, Artificial Sequence
  Description of Artificial Sequence: Synthetic oligonucleotide
cugggacaaaagcuguaua

SEQ ID NO: 3017241 - RNA, 19 nt, Artificial Sequence
  Description of Artificial Sequence: Synthetic oligonucleotide
acaccagcgcacacgguaa

SEQ ID NO: 3017242 - RNA, 19 nt, Artificial Sequence
  Description of Artificial Sequence: Synthetic oligonucleotide
cccuacaccagcgcacacg

SEQ ID NO: 3017243 - RNA, 19 nt, Artificial Sequence
  Description of Artificial Sequence: Synthetic oligonucleotide
ucuccacagcacgguguga

SEQ ID NO: 3017244 - RNA, 19 nt, Artificial Sequence
  Description of Artificial Sequence: Synthetic oligonucleotide
aggcagacugcagccggug

SEQ ID NO: 3017245 - RNA, 19 nt, Artificial Sequence
  Description of Artificial Sequence: Synthetic oligonucleotide
gauccgcgaggcagacugc

SEQ ID NO: 3017246 - RNA, 19 nt, Artificial Sequence
  Description of Artificial Sequence: Synthetic oligonucleotide
gguuuuccaucgggauugg

SEQ ID NO: 3017247 - RNA, 19 nt, Artificial Sequence
  Description of Artificial Sequence: Synthetic oligonucleotide
cgaggcagacugcagccgg

SEQ ID NO: 3017248 - RNA, 19 nt, Artificial Sequence
  Description of Artificial Sequence: Synthetic oligonucleotide
cagcacggugugagcuccg

SEQ ID NO: 3017249 - RNA, 19 nt, Artificial Sequence
  Description of Artificial Sequence: Synthetic oligonucleotide
gcacggugugagcuccgcg

SEQ ID NO: 3017250 - RNA, 19 nt, Artificial Sequence
  Description of Artificial Sequence: Synthetic oligonucleotide
agcucucuuaauggcuuuu

SEQ ID NO: 3017251 - RNA, 19 nt, Artificial Sequence
  Description of Artificial Sequence: Synthetic oligonucleotide
gugccuuccguaaaugcau

SEQ ID NO: 3017252 - RNA, 19 nt, Artificial Sequence
  Description of Artificial Sequence: Synthetic oligonucleotide
cucccuacaccagcgcaca

SEQ ID NO: 3017253 - RNA, 19 nt, Artificial Sequence
  Description of Artificial Sequence: Synthetic oligonucleotide
ccgcgaggcagacugcagc

SEQ ID NO: 3017254 - RNA, 19 nt, Artificial Sequence
  Description of Artificial Sequence: Synthetic oligonucleotide
ugcuggcuaccuguuuaua

SEQ ID NO: 3017255 - RNA, 19 nt, Artificial Sequence
  Description of Artificial Sequence: Synthetic oligonucleotide
ccuguuaugugccuuccgu

SEQ ID NO: 3017256 - RNA, 19 nt, Artificial Sequence
  Description of Artificial Sequence: Synthetic oligonucleotide
ccucauugcuggcuaccug

SEQ ID NO: 3017257 - RNA, 19 nt, Artificial Sequence
  Description of Artificial Sequence: Synthetic oligonucleotide
ccguaaaugcauccaguaa

SEQ ID NO: 3017258 - RNA, 19 nt, Artificial Sequence
  Description of Artificial Sequence: Synthetic oligonucleotide
gcgaggcagacugcagccg

SEQ ID NO: 3017259 - RNA, 19 nt, Artificial Sequence
  Description of Artificial Sequence: Synthetic oligonucleotide
  modified_base (10)..(10): a, c, u, g, unknown or other
guaaccggcnuaacccauu

SEQ ID NO: 3017260 - RNA, 19 nt, Artificial Sequence
  Description of Artificial Sequence: Synthetic oligonucleotide
gggacaaaagcuguauauu

SEQ ID NO: 3017261 - RNA, 19 nt, Artificial Sequence
  Description of Artificial Sequence: Synthetic oligonucleotide
agccggugucaagcuuuuc

SEQ ID NO: 3017262 - RNA, 19 nt, Artificial Sequence
  Description of Artificial Sequence: Synthetic oligonucleotide
ccuuccguaaaugcaucca

SEQ ID NO: 3017263 - RNA, 19 nt, Artificial Sequence
  Description of Artificial Sequence: Synthetic oligonucleotide
gcagguccucauugcuggc

SEQ ID NO: 3017264 - RNA, 19 nt, Artificial Sequence
  Description of Artificial Sequence: Synthetic oligonucleotide
  modified_base (18)..(18): a, c, u, g, unknown or other
ccuuguauguaaccggcnu

SEQ ID NO: 3017265 - RNA, 19 nt, Artificial Sequence
  Description of Artificial Sequence: Synthetic oligonucleotide
ccacaaagaccuguuaugu

SEQ ID NO: 3017266 - RNA, 19 nt, Artificial Sequence
  Description of Artificial Sequence: Synthetic oligonucleotide
gagcucucuuaauggcuuu

SEQ ID NO: 3017267 - RNA, 19 nt, Artificial Sequence
  Description of Artificial Sequence: Synthetic oligonucleotide
cagagcugccaugguucuc

SEQ ID NO: 3017268 - RNA, 19 nt, Artificial Sequence
  Description of Artificial Sequence: Synthetic oligonucleotide
  modified_base (6)..(6): a, c, u, g, unknown or other
ccggcnuaacccauuuucu

SEQ ID NO: 3017269 - RNA, 19 nt, Artificial Sequence
  Description of Artificial Sequence: Synthetic oligonucleotide
cggugucaagcuuuuccuc

SEQ ID NO: 3017270 - RNA, 19 nt, Artificial Sequence
  Description of Artificial Sequence: Synthetic oligonucleotide
gcuccuuauagggguuuuc

SEQ ID NO: 3017271 - RNA, 19 nt, Artificial Sequence
  Description of Artificial Sequence: Synthetic oligonucleotide
gggguuuuccaucgggauu

SEQ ID NO: 3017272 - RNA, 19 nt, Artificial Sequence
  Description of Artificial Sequence: Synthetic oligonucleotide
agacugcagccggugucaa

SEQ ID NO: 3017273 - RNA, 19 nt, Artificial Sequence
  Description of Artificial Sequence: Synthetic oligonucleotide
ccggugucaagcuuuuccu

SEQ ID NO: 3017274 - RNA, 19 nt, Artificial Sequence
  Description of Artificial Sequence: Synthetic oligonucleotide
ccagcgcacacgguaacca

SEQ ID NO: 3017275 - RNA, 19 nt, Artificial Sequence
  Description of Artificial Sequence: Synthetic oligonucleotide
gaggcagacugcagccggu

SEQ ID NO: 3017276 - RNA, 19 nt, Artificial Sequence
  Description of Artificial Sequence: Synthetic oligonucleotide
gggauuggcagguccucau

SEQ ID NO: 3017277 - RNA, 19 nt, Artificial Sequence
  Description of Artificial Sequence: Synthetic oligonucleotide
cagguccucauugcuggcu

SEQ ID NO: 3017278 - RNA, 19 nt, Artificial Sequence
  Description of Artificial Sequence: Synthetic oligonucleotide
cauugcuggcuaccuguuu

SEQ ID NO: 3017279 - RNA, 19 nt, Artificial Sequence
  Description of Artificial Sequence: Synthetic oligonucleotide
ggcuaccuguuuauacugu

SEQ ID NO: 3017280 - RNA, 19 nt, Artificial Sequence
  Description of Artificial Sequence: Synthetic oligonucleotide
gcuccgcgauccgcgaggc

SEQ ID NO: 3017281 - RNA, 19 nt, Artificial Sequence
  Description of Artificial Sequence: Synthetic oligonucleotide
cugcagccggugucaagcu

SEQ ID NO: 3017282 - RNA, 19 nt, Artificial Sequence
  Description of Artificial Sequence: Synthetic oligonucleotide
ggcagacugcagccggugu

SEQ ID NO: 3017283 - RNA, 19 nt, Artificial Sequence
  Description of Artificial Sequence: Synthetic oligonucleotide
ggauuggcagguccucauu

SEQ ID NO: 3017284 - RNA, 19 nt, Artificial Sequence
  Description of Artificial Sequence: Synthetic oligonucleotide
cuacaccagcgcacacggu

SEQ ID NO: 3017285 - RNA, 19 nt, Artificial Sequence
  Description of Artificial Sequence: Synthetic oligonucleotide
ccauuuucugagcucucuu

SEQ ID NO: 3017286 - RNA, 19 nt, Artificial Sequence
  Description of Artificial Sequence: Synthetic oligonucleotide
cccauuuucugagcucucu

SEQ ID NO: 3017287 - RNA, 19 nt, Artificial Sequence
  Description of Artificial Sequence: Synthetic oligonucleotide
cuccgcgauccgcgaggca

SEQ ID NO: 3017288 - RNA, 19 nt, Artificial Sequence
  Description of Artificial Sequence: Synthetic oligonucleotide
ccgcgauccgcgaggcaga

SEQ ID NO: 3017289 - RNA, 19 nt, Artificial Sequence
  Description of Artificial Sequence: Synthetic oligonucleotide
cggugugagcuccgcgauc

SEQ ID NO: 3017290 - RNA, 19 nt, Artificial Sequence
  Description of Artificial Sequence: Synthetic oligonucleotide
ccaucgggauuggcagguc

SEQ ID NO: 3017291 - RNA, 19 nt, Artificial Sequence
  Description of Artificial Sequence: Synthetic oligonucleotide
cgggauuggcagguccuca

SEQ ID NO: 3017292 - RNA, 19 nt, Artificial Sequence
  Description of Artificial Sequence: Synthetic oligonucleotide
ggcuccuuauagggguuuu

SEQ ID NO: 3017293 - RNA, 19 nt, Artificial Sequence
  Description of Artificial Sequence: Synthetic oligonucleotide
cgcgauccgcgaggcagac

SEQ ID NO: 3017294 - RNA, 19 nt, Artificial Sequence
  Description of Artificial Sequence: Synthetic oligonucleotide
cgcacaagauacacuucuu

SEQ ID NO: 3017295 - RNA, 19 nt, Artificial Sequence
  Description of Artificial Sequence: Synthetic oligonucleotide
gggcuccuuauagggguuu

SEQ ID NO: 3017296 - RNA, 19 nt, Artificial Sequence
  Description of Artificial Sequence: Synthetic oligonucleotide
ggggcuccuuauagggguu

SEQ ID NO: 3017297 - RNA, 19 nt, Artificial Sequence
  Description of Artificial Sequence: Synthetic oligonucleotide
cgguaaccagagcugccau

SEQ ID NO: 3017298 - RNA, 19 nt, Artificial Sequence
  Description of Artificial Sequence: Synthetic oligonucleotide
gcgauccgcgaggcagacu

SEQ ID NO: 3017299 - RNA, 19 nt, Artificial Sequence
  Description of Artificial Sequence: Synthetic oligonucleotide
  modified_base (1)..(1): a, c, u, g, unknown or other
nuaacccauuuucugagcu

SEQ ID NO: 3017300 - RNA, 19 nt, Artificial Sequence
  Description of Artificial Sequence: Synthetic oligonucleotide
aaagcuuucaugucccgcc

SEQ ID NO: 3017301 - RNA, 19 nt, Artificial Sequence
  Description of Artificial Sequence: Synthetic oligonucleotide
uuuucaguugucuugauug

SEQ ID NO: 3017302 - RNA, 19 nt, Artificial Sequence
  Description of Artificial Sequence: Synthetic oligonucleotide
accaaaagcuuucaugucc

SEQ ID NO: 3017303 - RNA, 19 nt, Artificial Sequence
  Description of Artificial Sequence: Synthetic oligonucleotide
auuuggauggaguguagcc

SEQ ID NO: 3017304 - RNA, 19 nt, Artificial Sequence
  Description of Artificial Sequence: Synthetic oligonucleotide
agacaugcacaccaaaagc

SEQ ID NO: 3017305 - RNA, 19 nt, Artificial Sequence
  Description of Artificial Sequence: Synthetic oligonucleotide
ucuugauuggaucugccag

SEQ ID NO: 3017306 - RNA, 19 nt, Artificial Sequence
  Description of Artificial Sequence: Synthetic oligonucleotide
ucuaauguagccuucucca

SEQ ID NO: 3017307 - RNA, 19 nt, Artificial Sequence
  Description of Artificial Sequence: Synthetic oligonucleotide
uaagcugucauugaaaccu

SEQ ID NO: 3017308 - RNA, 19 nt, Artificial Sequence
  Description of Artificial Sequence: Synthetic oligonucleotide
uuuugaacaguccugguuc

SEQ ID NO: 3017309 - RNA, 19 nt, Artificial Sequence
  Description of Artificial Sequence: Synthetic oligonucleotide
uucaauacaugagacaugc

SEQ ID NO: 3017310 - RNA, 19 nt, Artificial Sequence
  Description of Artificial Sequence: Synthetic oligonucleotide
uucagugucacgucgauga

SEQ ID NO: 3017311 - RNA, 19 nt, Artificial Sequence
  Description of Artificial Sequence: Synthetic oligonucleotide
ucauugaaaccuuccaccg

SEQ ID NO: 3017312 - RNA, 19 nt, Artificial Sequence
  Description of Artificial Sequence: Synthetic oligonucleotide
ucuaccacuagagagaggu

SEQ ID NO: 3017313 - RNA, 19 nt, Artificial Sequence
  Description of Artificial Sequence: Synthetic oligonucleotide
aacaguccugguucaauac

SEQ ID NO: 3017314 - RNA, 19 nt, Artificial Sequence
  Description of Artificial Sequence: Synthetic oligonucleotide
agacauugauaacacgccc

SEQ ID NO: 3017315 - RNA, 19 nt, Artificial Sequence
  Description of Artificial Sequence: Synthetic oligonucleotide
acaccaaaagcuuucaugu

SEQ ID NO: 3017316 - RNA, 19 nt, Artificial Sequence
  Description of Artificial Sequence: Synthetic oligonucleotide
caauacaugagacaugcac

SEQ ID NO: 3017317 - RNA, 19 nt, Artificial Sequence
  Description of Artificial Sequence: Synthetic oligonucleotide
aaaagcuuucaugucccgc

SEQ ID NO: 3017318 - RNA, 19 nt, Artificial Sequence
  Description of Artificial Sequence: Synthetic oligonucleotide
uguguuuugaacaguccug

SEQ ID NO: 3017319 - RNA, 19 nt, Artificial Sequence
  Description of Artificial Sequence: Synthetic oligonucleotide
uucuaauguagccuucucc

SEQ ID NO: 3017320 - RNA, 19 nt, Artificial Sequence
  Description of Artificial Sequence: Synthetic oligonucleotide
gucauugaaaccuuccacc

SEQ ID NO: 3017321 - RNA, 19 nt, Artificial Sequence
  Description of Artificial Sequence: Synthetic oligonucleotide
gagacaugcacaccaaaag

SEQ ID NO: 3017322 - RNA, 19 nt, Artificial Sequence
  Description of Artificial Sequence: Synthetic oligonucleotide
aauguagccuucuccauau

SEQ ID NO: 3017323 - RNA, 19 nt, Artificial Sequence
  Description of Artificial Sequence: Synthetic oligonucleotide
cauauucagugucacgucg

SEQ ID NO: 3017324 - RNA, 19 nt, Artificial Sequence
  Description of Artificial Sequence: Synthetic oligonucleotide
uuucaguugucuugauugg

SEQ ID NO: 3017325 - RNA, 19 nt, Artificial Sequence
  Description of Artificial Sequence: Synthetic oligonucleotide
uucaugucccgccuuaagc

SEQ ID NO: 3017326 - RNA, 19 nt, Artificial Sequence
  Description of Artificial Sequence: Synthetic oligonucleotide
uguagccuucuccauauug

SEQ ID NO: 3017327 - RNA, 19 nt, Artificial Sequence
  Description of Artificial Sequence: Synthetic oligonucleotide
ugucauugaaaccuuccac

SEQ ID NO: 3017328 - RNA, 19 nt, Artificial Sequence
  Description of Artificial Sequence: Synthetic oligonucleotide
ucacaaaggauguauuacu

SEQ ID NO: 3017329 - RNA, 19 nt, Artificial Sequence
  Description of Artificial Sequence: Synthetic oligonucleotide
acaugagacaugcacacca

SEQ ID NO: 3017330 - RNA, 19 nt, Artificial Sequence
  Description of Artificial Sequence: Synthetic oligonucleotide
gacagguguuuccaaacgg

SEQ ID NO: 3017331 - RNA, 19 nt, Artificial Sequence
  Description of Artificial Sequence: Synthetic oligonucleotide
uucuccauauuguugcuug

SEQ ID NO: 3017332 - RNA, 19 nt, Artificial Sequence
  Description of Artificial Sequence: Synthetic oligonucleotide
acauugauaacacgcccuc

SEQ ID NO: 3017333 - RNA, 19 nt, Artificial Sequence
  Description of Artificial Sequence: Synthetic oligonucleotide
uauuguugcuugaugucug

SEQ ID NO: 3017334 - RNA, 19 nt, Artificial Sequence
  Description of Artificial Sequence: Synthetic oligonucleotide
agcauauucagugucacgu

SEQ ID NO: 3017335 - RNA, 19 nt, Artificial Sequence
  Description of Artificial Sequence: Synthetic oligonucleotide
aagcauauucagugucacg

SEQ ID NO: 3017336 - RNA, 19 nt, Artificial Sequence
  Description of Artificial Sequence: Synthetic oligonucleotide
auugauaacacgcccucga

SEQ ID NO: 3017337 - RNA, 19 nt, Artificial Sequence
  Description of Artificial Sequence: Synthetic oligonucleotide
cacaccaaaagcuuucaug

SEQ ID NO: 3017338 - RNA, 19 nt, Artificial Sequence
  Description of Artificial Sequence: Synthetic oligonucleotide
uccauauuguugcuugaug

SEQ ID NO: 3017339 - RNA, 19 nt, Artificial Sequence
  Description of Artificial Sequence: Synthetic oligonucleotide
uuggauggaguguagcccc

SEQ ID NO: 3017340 - RNA, 19 nt, Artificial Sequence
  Description of Artificial Sequence: Synthetic oligonucleotide
ugagacaugcacaccaaaa

SEQ ID NO: 3017341 - RNA, 19 nt, Artificial Sequence
  Description of Artificial Sequence: Synthetic oligonucleotide
uucacaaaggauguauuac

SEQ ID NO: 3017342 - RNA, 19 nt, Artificial Sequence
  Description of Artificial Sequence: Synthetic oligonucleotide
ugauaacacgcccucgagc

SEQ ID NO: 3017343 - RNA, 19 nt, Artificial Sequence
  Description of Artificial Sequence: Synthetic oligonucleotide
uccugguucaauacaugag

SEQ ID NO: 3017344 - RNA, 19 nt, Artificial Sequence
  Description of Artificial Sequence: Synthetic oligonucleotide
uuuucaguuuguguuagac

SEQ ID NO: 3017345 - RNA, 19 nt, Artificial Sequence
  Description of Artificial Sequence: Synthetic oligonucleotide
uuaagcugucauugaaacc

SEQ ID NO: 3017346 - RNA, 19 nt, Artificial Sequence
  Description of Artificial Sequence: Synthetic oligonucleotide
agacagguguuuccaaacg

SEQ ID NO: 3017347 - RNA, 19 nt, Artificial Sequence
  Description of Artificial Sequence: Synthetic oligonucleotide
uagagagagguccaaguuc

SEQ ID NO: 3017348 - RNA, 19 nt, Artificial Sequence
  Description of Artificial Sequence: Synthetic oligonucleotide
uaccacuagagagaggucc

SEQ ID NO: 3017349 - RNA, 19 nt, Artificial Sequence
  Description of Artificial Sequence: Synthetic oligonucleotide
ucaugucccgccuuaagcu

SEQ ID NO: 3017350 - RNA, 19 nt, Artificial Sequence
  Description of Artificial Sequence: Synthetic oligonucleotide
ggagacauugauaacacgc

SEQ ID NO: 3017351 - RNA, 19 nt, Artificial Sequence
  Description of Artificial Sequence: Synthetic oligonucleotide
gagacauugauaacacgcc

SEQ ID NO: 3017352 - RNA, 19 nt, Artificial Sequence
  Description of Artificial Sequence: Synthetic oligonucleotide
aguuguguuuugaacaguc

SEQ ID NO: 3017353 - RNA, 19 nt, Artificial Sequence
  Description of Artificial Sequence: Synthetic oligonucleotide
uuucaguuuguguuagacu

SEQ ID NO: 3017354 - RNA, 19 nt, Artificial Sequence
  Description of Artificial Sequence: Synthetic oligonucleotide
gauaacacgcccucgagcu

SEQ ID NO: 3017355 - RNA, 19 nt, Artificial Sequence
  Description of Artificial Sequence: Synthetic oligonucleotide
gagguccaaguucacaaag

SEQ ID NO: 3017356 - RNA, 19 nt, Artificial Sequence
  Description of Artificial Sequence: Synthetic oligonucleotide
acagguguuuccaaacggc

SEQ ID NO: 3017357 - RNA, 19 nt, Artificial Sequence
  Description of Artificial Sequence: Synthetic oligonucleotide
acuagagagagguccaagu

SEQ ID NO: 3017358 - RNA, 19 nt, Artificial Sequence
  Description of Artificial Sequence: Synthetic oligonucleotide
uugauaacacgcccucgag

SEQ ID NO: 3017359 - RNA, 19 nt, Artificial Sequence
  Description of Artificial Sequence: Synthetic oligonucleotide
uccaccgcauauuuggaug

SEQ ID NO: 3017360 - RNA, 19 nt, Artificial Sequence
  Description of Artificial Sequence: Synthetic oligonucleotide
auuguugcuugaugucugg

SEQ ID NO: 3017361 - RNA, 19 nt, Artificial Sequence
  Description of Artificial Sequence: Synthetic oligonucleotide
guguuuugaacaguccugg

SEQ ID NO: 3017362 - RNA, 19 nt, Artificial Sequence
  Description of Artificial Sequence: Synthetic oligonucleotide
cugguucaauacaugagac

SEQ ID NO: 3017363 - RNA, 19 nt, Artificial Sequence
  Description of Artificial Sequence: Synthetic oligonucleotide
cauauuguugcuugauguc

SEQ ID NO: 3017364 - RNA, 19 nt, Artificial Sequence
  Description of Artificial Sequence: Synthetic oligonucleotide
uggaagcauauucaguguc

SEQ ID NO: 3017365 - RNA, 19 nt, Artificial Sequence
  Description of Artificial Sequence: Synthetic oligonucleotide
gaugucuggagacaggugu

SEQ ID NO: 3017366 - RNA, 19 nt, Artificial Sequence
  Description of Artificial Sequence: Synthetic oligonucleotide
auauuguugcuugaugucu

SEQ ID NO: 3017367 - RNA, 19 nt, Artificial Sequence
  Description of Artificial Sequence: Synthetic oligonucleotide
uuucaugucccgccuuaag

SEQ ID NO: 3017368 - RNA, 19 nt, Artificial Sequence
  Description of Artificial Sequence: Synthetic oligonucleotide
ucaguugucuugauuggau

SEQ ID NO: 3017369 - RNA, 19 nt, Artificial Sequence
  Description of Artificial Sequence: Synthetic oligonucleotide
gaccaguggaagcauauuc

SEQ ID NO: 3017370 - RNA, 19 nt, Artificial Sequence
  Description of Artificial Sequence: Synthetic oligonucleotide
gauuggaucugccaguugu

SEQ ID NO: 3017371 - RNA, 19 nt, Artificial Sequence
  Description of Artificial Sequence: Synthetic oligonucleotide
ugguucaauacaugagaca

SEQ ID NO: 3017372 - RNA, 19 nt, Artificial Sequence
  Description of Artificial Sequence: Synthetic oligonucleotide
uuugaacaguccugguuca

SEQ ID NO: 3017373 - RNA, 19 nt, Artificial Sequence
  Description of Artificial Sequence: Synthetic oligonucleotide
uuuucuaauguagccuucu

SEQ ID NO: 3017374 - RNA, 19 nt, Artificial Sequence
  Description of Artificial Sequence: Synthetic oligonucleotide
ucuggagacagguguuucc

SEQ ID NO: 3017375 - RNA, 19 nt, Artificial Sequence
  Description of Artificial Sequence: Synthetic oligonucleotide
uaauguagccuucuccaua

SEQ ID NO: 3017376 - RNA, 19 nt, Artificial Sequence
  Description of Artificial Sequence: Synthetic oligonucleotide
ugguccaugcacucuacca

SEQ ID NO: 3017377 - RNA, 19 nt, Artificial Sequence
  Description of Artificial Sequence: Synthetic oligonucleotide
cuggagacauugauaacac

SEQ ID NO: 3017378 - RNA, 19 nt, Artificial Sequence
  Description of Artificial Sequence: Synthetic oligonucleotide
ccuuccaccgcauauuugg

SEQ ID NO: 3017379 - RNA, 19 nt, Artificial Sequence
  Description of Artificial Sequence: Synthetic oligonucleotide
gagagguccaaguucacaa

SEQ ID NO: 3017380 - RNA, 19 nt, Artificial Sequence
  Description of Artificial Sequence: Synthetic oligonucleotide
uggagacauugauaacacg

SEQ ID NO: 3017381 - RNA, 19 nt, Artificial Sequence
  Description of Artificial Sequence: Synthetic oligonucleotide
gagacagguguuuccaaac

SEQ ID NO: 3017382 - RNA, 19 nt, Artificial Sequence
  Description of Artificial Sequence: Synthetic oligonucleotide
uauuuggauggaguguagc

SEQ ID NO: 3017383 - RNA, 19 nt, Artificial Sequence
  Description of Artificial Sequence: Synthetic oligonucleotide
uugcuugaugucuggagac

SEQ ID NO: 3017384 - RNA, 19 nt, Artificial Sequence
  Description of Artificial Sequence: Synthetic oligonucleotide
gcacucuaccacuagagag

SEQ ID NO: 3017385 - RNA, 19 nt, Artificial Sequence
  Description of Artificial Sequence: Synthetic oligonucleotide
ugcacucuaccacuagaga

SEQ ID NO: 3017386 - RNA, 19 nt, Artificial Sequence
  Description of Artificial Sequence: Synthetic oligonucleotide
cuugaugucuggagacagg

SEQ ID NO: 3017387 - RNA, 19 nt, Artificial Sequence
  Description of Artificial Sequence: Synthetic oligonucleotide
uugaugucuggagacaggu

SEQ ID NO: 3017388 - RNA, 19 nt, Artificial Sequence
  Description of Artificial Sequence: Synthetic oligonucleotide
guugcuugaugucuggaga

SEQ ID NO: 3017389 - RNA, 19 nt, Artificial Sequence
  Description of Artificial Sequence: Synthetic oligonucleotide
agagagagguccaaguuca

SEQ ID NO: 3017390 - RNA, 19 nt, Artificial Sequence
  Description of Artificial Sequence: Synthetic oligonucleotide
ugucuugauuggaucugcc

SEQ ID NO: 3017391 - RNA, 19 nt, Artificial Sequence
  Description of Artificial Sequence: Synthetic oligonucleotide
cauugaaaccuuccaccgc

SEQ ID NO: 3017392 - RNA, 19 nt, Artificial Sequence
  Description of Artificial Sequence: Synthetic oligonucleotide
aaugcuggagacauugaua

SEQ ID NO: 3017393 - RNA, 19 nt, Artificial Sequence
  Description of Artificial Sequence: Synthetic oligonucleotide
gaagcauauucagugucac

SEQ ID NO: 3017394 - RNA, 19 nt, Artificial Sequence
  Description of Artificial Sequence: Synthetic oligonucleotide
acaaaggauguauuacuuu

SEQ ID NO: 3017395 - RNA, 19 nt, Artificial Sequence
  Description of Artificial Sequence: Synthetic oligonucleotide
uuucuaauguagccuucuc

SEQ ID NO: 3017396 - RNA, 19 nt, Artificial Sequence
  Description of Artificial Sequence: Synthetic oligonucleotide
uugaccaguggaagcauau

SEQ ID NO: 3017397 - RNA, 19 nt, Artificial Sequence
  Description of Artificial Sequence: Synthetic oligonucleotide
gccuucuccauauuguugc

SEQ ID NO: 3017398 - RNA, 19 nt, Artificial Sequence
  Description of Artificial Sequence: Synthetic oligonucleotide
uccgccgaaugcaagccug

SEQ ID NO: 3017399 - RNA, 19 nt, Artificial Sequence
  Description of Artificial Sequence: Synthetic oligonucleotide
ugccaguuguguuuugaac

SEQ ID NO: 3017400 - RNA, 19 nt, Artificial Sequence
  Description of Artificial Sequence: Synthetic oligonucleotide
acaguccugguucaauaca

SEQ ID NO: 3017401 - RNA, 19 nt, Artificial Sequence
  Description of Artificial Sequence: Synthetic oligonucleotide
acucuaccacuagagagag

SEQ ID NO: 3017402 - RNA, 19 nt, Artificial Sequence
  Description of Artificial Sequence: Synthetic oligonucleotide
ugaugucuggagacaggug

SEQ ID NO: 3017403 - RNA, 19 nt, Artificial Sequence
  Description of Artificial Sequence: Synthetic oligonucleotide
cacucuaccacuagagaga

SEQ ID NO: 3017404 - RNA, 19 nt, Artificial Sequence
  Description of Artificial Sequence: Synthetic oligonucleotide
aagcuuucaugucccgccu

SEQ ID NO: 3017405 - RNA, 19 nt, Artificial Sequence
  Description of Artificial Sequence: Synthetic oligonucleotide
caaaagcuuucaugucccg

SEQ ID NO: 3017406 - RNA, 19 nt, Artificial Sequence
  Description of Artificial Sequence: Synthetic oligonucleotide
ucagugucacgucgaugag

SEQ ID NO: 3017407 - RNA, 19 nt, Artificial Sequence
  Description of Artificial Sequence: Synthetic oligonucleotide
uucaguugucuugauugga

SEQ ID NO: 3017408 - RNA, 19 nt, Artificial Sequence
  Description of Artificial Sequence: Synthetic oligonucleotide
uugucuugauuggaucugc

SEQ ID NO: 3017409 - RNA, 19 nt, Artificial Sequence
  Description of Artificial Sequence: Synthetic oligonucleotide
ccaaaagcuuucauguccc

SEQ ID NO: 3017410 - RNA, 19 nt, Artificial Sequence
  Description of Artificial Sequence: Synthetic oligonucleotide
ucaauacaugagacaugca

SEQ ID NO: 3017411 - RNA, 19 nt, Artificial Sequence
  Description of Artificial Sequence: Synthetic oligonucleotide
uauucagugucacgucgau

SEQ ID NO: 3017412 - RNA, 19 nt, Artificial Sequence
  Description of Artificial Sequence: Synthetic oligonucleotide
agguccaaguucacaaagg

SEQ ID NO: 3017413 - RNA, 19 nt, Artificial Sequence
  Description of Artificial Sequence: Synthetic oligonucleotide
uguuuugaacaguccuggu

SEQ ID NO: 3017414 - RNA, 19 nt, Artificial Sequence
  Description of Artificial Sequence: Synthetic oligonucleotide
aagccugccuccaaugcug

SEQ ID NO: 3017415 - RNA, 19 nt, Artificial Sequence
  Description of Artificial Sequence: Synthetic oligonucleotide
gccaguuguguuuugaaca

SEQ ID NO: 3017416 - RNA, 19 nt, Artificial Sequence
  Description of Artificial Sequence: Synthetic oligonucleotide
gacaugcacaccaaaagcu

SEQ ID NO: 3017417 - RNA, 19 nt, Artificial Sequence
  Description of Artificial Sequence: Synthetic oligonucleotide
aaccuuccaccgcauauuu

SEQ ID NO: 3017418 - RNA, 19 nt, Artificial Sequence
  Description of Artificial Sequence: Synthetic oligonucleotide
aaugcaagccugccuccaa

SEQ ID NO: 3017419 - RNA, 19 nt, Artificial Sequence
  Description of Artificial Sequence: Synthetic oligonucleotide
ugcaagccugccuccaaug

SEQ ID NO: 3017420 - RNA, 19 nt, Artificial Sequence
  Description of Artificial Sequence: Synthetic oligonucleotide
guugucuugauuggaucug

SEQ ID NO: 3017421 - RNA, 19 nt, Artificial Sequence
  Description of Artificial Sequence: Synthetic oligonucleotide
cauugauaacacgcccucg

SEQ ID NO: 3017422 - RNA, 19 nt, Artificial Sequence
  Description of Artificial Sequence: Synthetic oligonucleotide
guccugguucaauacauga

SEQ ID NO: 3017423 - RNA, 19 nt, Artificial Sequence
  Description of Artificial Sequence: Synthetic oligonucleotide
guuguguuuugaacagucc

SEQ ID NO: 3017424 - RNA, 19 nt, Artificial Sequence
  Description of Artificial Sequence: Synthetic oligonucleotide
augcacucuaccacuagag

SEQ ID NO: 3017425 - RNA, 19 nt, Artificial Sequence
  Description of Artificial Sequence: Synthetic oligonucleotide
ucuccauauuguugcuuga

SEQ ID NO: 3017426 - RNA, 19 nt, Artificial Sequence
  Description of Artificial Sequence: Synthetic oligonucleotide
caugucccgccuuaagcug

SEQ ID NO: 3017427 - RNA, 19 nt, Artificial Sequence
  Description of Artificial Sequence: Synthetic oligonucleotide
uuugaccaguggaagcaua

SEQ ID NO: 3017428 - RNA, 19 nt, Artificial Sequence
  Description of Artificial Sequence: Synthetic oligonucleotide
accaguggaagcauauuca

SEQ ID NO: 3017429 - RNA, 19 nt, Artificial Sequence
  Description of Artificial Sequence: Synthetic oligonucleotide
cauauuuggauggagugua

SEQ ID NO: 3017430 - RNA, 19 nt, Artificial Sequence
  Description of Artificial Sequence: Synthetic oligonucleotide
aaaccuuccaccgcauauu

SEQ ID NO: 3017431 - RNA, 19 nt, Artificial Sequence
  Description of Artificial Sequence: Synthetic oligonucleotide
augcacaccaaaagcuuuc

SEQ ID NO: 3017432 - RNA, 19 nt, Artificial Sequence
  Description of Artificial Sequence: Synthetic oligonucleotide
ugauuggaucugccaguug

SEQ ID NO: 3017433 - RNA, 19 nt, Artificial Sequence
  Description of Artificial Sequence: Synthetic oligonucleotide
ucugccaguuguguuuuga

SEQ ID NO: 3017434 - RNA, 19 nt, Artificial Sequence
  Description of Artificial Sequence: Synthetic oligonucleotide
caguugucuugauuggauc

SEQ ID NO: 3017435 - RNA, 19 nt, Artificial Sequence
  Description of Artificial Sequence: Synthetic oligonucleotide
gaaaccuuccaccgcauau

SEQ ID NO: 3017436 - RNA, 19 nt, Artificial Sequence
  Description of Artificial Sequence: Synthetic oligonucleotide
guucaauacaugagacaug

SEQ ID NO: 3017437 - RNA, 19 nt, Artificial Sequence
  Description of Artificial Sequence: Synthetic oligonucleotide
gguccaaguucacaaagga

SEQ ID NO: 3017438 - RNA, 19 nt, Artificial Sequence
  Description of Artificial Sequence: Synthetic oligonucleotide
uacaugagacaugcacacc

SEQ ID NO: 3017439 - RNA, 19 nt, Artificial Sequence
  Description of Artificial Sequence: Synthetic oligonucleotide
gaacaguccugguucaaua

SEQ ID NO: 3017440 - RNA, 19 nt, Artificial Sequence
  Description of Artificial Sequence: Synthetic oligonucleotide
agguguuuccaaacggcag

SEQ ID NO: 3017441 - RNA, 19 nt, Artificial Sequence
  Description of Artificial Sequence: Synthetic oligonucleotide
cugucauugaaaccuucca

SEQ ID NO: 3017442 - RNA, 19 nt, Artificial Sequence
  Description of Artificial Sequence: Synthetic oligonucleotide
caaaggauguauuacuuuu

SEQ ID NO: 3017443 - RNA, 19 nt, Artificial Sequence
  Description of Artificial Sequence: Synthetic oligonucleotide
gucuugauuggaucugcca

SEQ ID NO: 3017444 - RNA, 19 nt, Artificial Sequence
  Description of Artificial Sequence: Synthetic oligonucleotide
gguccaugcacucuaccac

SEQ ID NO: 3017445 - RNA, 19 nt, Artificial Sequence
  Description of Artificial Sequence: Synthetic oligonucleotide
uuggaucugccaguugugu

SEQ ID NO: 3017446 - RNA, 19 nt, Artificial Sequence
  Description of Artificial Sequence: Synthetic oligonucleotide
ccaguggaagcauauucag

SEQ ID NO: 3017447 - RNA, 19 nt, Artificial Sequence
  Description of Artificial Sequence: Synthetic oligonucleotide
gguucaauacaugagacau

SEQ ID NO: 3017448 - RNA, 19 nt, Artificial Sequence
  Description of Artificial Sequence: Synthetic oligonucleotide
auauucagugucacgucga

SEQ ID NO: 3017449 - RNA, 19 nt, Artificial Sequence
  Description of Artificial Sequence: Synthetic oligonucleotide
gacauugauaacacgcccu

SEQ ID NO: 3017450 - RNA, 19 nt, Artificial Sequence
  Description of Artificial Sequence: Synthetic oligonucleotide
ugcuugaugucuggagaca

SEQ ID NO: 3017451 - RNA, 19 nt, Artificial Sequence
  Description of Artificial Sequence: Synthetic oligonucleotide
ugaacaguccugguucaau

SEQ ID NO: 3017452 - RNA, 19 nt, Artificial Sequence
  Description of Artificial Sequence: Synthetic oligonucleotide
cagguguuuccaaacggca

SEQ ID NO: 3017453 - RNA, 19 nt, Artificial Sequence
  Description of Artificial Sequence: Synthetic oligonucleotide
agagguccaaguucacaaa

SEQ ID NO: 3017454 - RNA, 19 nt, Artificial Sequence
  Description of Artificial Sequence: Synthetic oligonucleotide
caccaaaagcuuucauguc

SEQ ID NO: 3017455 - RNA, 19 nt, Artificial Sequence
  Description of Artificial Sequence: Synthetic oligonucleotide
ugcacaccaaaagcuuuca

SEQ ID NO: 3017456 - RNA, 19 nt, Artificial Sequence
  Description of Artificial Sequence: Synthetic oligonucleotide
uuccaccgcauauuuggau

SEQ ID NO: 3017457 - RNA, 19 nt, Artificial Sequence
  Description of Artificial Sequence: Synthetic oligonucleotide
ugaaaccuuccaccgcaua

SEQ ID NO: 3017458 - RNA, 19 nt, Artificial Sequence
  Description of Artificial Sequence: Synthetic oligonucleotide
augagacaugcacaccaaa

SEQ ID NO: 3017459 - RNA, 19 nt, Artificial Sequence
  Description of Artificial Sequence: Synthetic oligonucleotide
auauuuggauggaguguag

SEQ ID NO: 3017460 - RNA, 19 nt, Artificial Sequence
  Description of Artificial Sequence: Synthetic oligonucleotide
agagagguccaaguucaca

SEQ ID NO: 3017461 - RNA, 19 nt, Artificial Sequence
  Description of Artificial Sequence: Synthetic oligonucleotide
auuggaucugccaguugug

SEQ ID NO: 3017462 - RNA, 19 nt, Artificial Sequence
  Description of Artificial Sequence: Synthetic oligonucleotide
uugauuggaucugccaguu

SEQ ID NO: 3017463 - RNA, 19 nt, Artificial Sequence
  Description of Artificial Sequence: Synthetic oligonucleotide
caugcacucuaccacuaga

SEQ ID NO: 3017464 - RNA, 19 nt, Artificial Sequence
  Description of Artificial Sequence: Synthetic oligonucleotide
accgcauauuuggauggag

SEQ ID NO: 3017465 - RNA, 19 nt, Artificial Sequence
  Description of Artificial Sequence: Synthetic oligonucleotide
uccaugcacucuaccacua

SEQ ID NO: 3017466 - RNA, 19 nt, Artificial Sequence
  Description of Artificial Sequence: Synthetic oligonucleotide
uggaucugccaguuguguu

SEQ ID NO: 3017467 - RNA, 19 nt, Artificial Sequence
  Description of Artificial Sequence: Synthetic oligonucleotide
cuugauuggaucugccagu

SEQ ID NO: 3017468 - RNA, 19 nt, Artificial Sequence
  Description of Artificial Sequence: Synthetic oligonucleotide
ccaccgcauauuuggaugg

SEQ ID NO: 3017469 - RNA, 19 nt, Artificial Sequence
  Description of Artificial Sequence: Synthetic oligonucleotide
uuuugaccaguggaagcau

SEQ ID NO: 3017470 - RNA, 19 nt, Artificial Sequence
  Description of Artificial Sequence: Synthetic oligonucleotide
ugcuggagacauugauaac

SEQ ID NO: 3017471 - RNA, 19 nt, Artificial Sequence
  Description of Artificial Sequence: Synthetic oligonucleotide
uugaaaccuuccaccgcau

SEQ ID NO: 3017472 - RNA, 19 nt, Artificial Sequence
  Description of Artificial Sequence: Synthetic oligonucleotide
gcugucauugaaaccuucc

SEQ ID NO: 3017473 - RNA, 19 nt, Artificial Sequence
  Description of Artificial Sequence: Synthetic oligonucleotide
guuuugaacaguccugguu

SEQ ID NO: 3017474 - RNA, 19 nt, Artificial Sequence
  Description of Artificial Sequence: Synthetic oligonucleotide
gcuugaugucuggagacag

SEQ ID NO: 3017475 - RNA, 19 nt, Artificial Sequence
  Description of Artificial Sequence: Synthetic oligonucleotide
cgcauauuuggauggagug

SEQ ID NO: 3017476 - RNA, 19 nt, Artificial Sequence
  Description of Artificial Sequence: Synthetic oligonucleotide
uuguugcuugaugucugga

SEQ ID NO: 3017477 - RNA, 19 nt, Artificial Sequence
  Description of Artificial Sequence: Synthetic oligonucleotide
uaacacgcccucgagcuuu

SEQ ID NO: 3017478 - RNA, 19 nt, Artificial Sequence
  Description of Artificial Sequence: Synthetic oligonucleotide
cacuagagagagguccaag

SEQ ID NO: 3017479 - RNA, 19 nt, Artificial Sequence
  Description of Artificial Sequence: Synthetic oligonucleotide
uggagacagguguuuccaa

SEQ ID NO: 3017480 - RNA, 19 nt, Artificial Sequence
  Description of Artificial Sequence: Synthetic oligonucleotide
ccgaaugcaagccugccuc

SEQ ID NO: 3017481 - RNA, 19 nt, Artificial Sequence
  Description of Artificial Sequence: Synthetic oligonucleotide
agcugucauugaaaccuuc

SEQ ID NO: 3017482 - RNA, 19 nt, Artificial Sequence
  Description of Artificial Sequence: Synthetic oligonucleotide
accacuagagagaggucca

SEQ ID NO: 3017483 - RNA, 19 nt, Artificial Sequence
  Description of Artificial Sequence: Synthetic oligonucleotide
ggaagcauauucaguguca

SEQ ID NO: 3017484 - RNA, 19 nt, Artificial Sequence
  Description of Artificial Sequence: Synthetic oligonucleotide
guagccuucuccauauugu

SEQ ID NO: 3017485 - RNA, 19 nt, Artificial Sequence
  Description of Artificial Sequence: Synthetic oligonucleotide
aguccugguucaauacaug

SEQ ID NO: 3017486 - RNA, 19 nt, Artificial Sequence
  Description of Artificial Sequence: Synthetic oligonucleotide
guuuccaaacggcaguuuu

SEQ ID NO: 3017487 - RNA, 19 nt, Artificial Sequence
  Description of Artificial Sequence: Synthetic oligonucleotide
gugguccaugcacucuacc

SEQ ID NO: 3017488 - RNA, 19 nt, Artificial Sequence
  Description of Artificial Sequence: Synthetic oligonucleotide
cucuaccacuagagagagg

SEQ ID NO: 3017489 - RNA, 19 nt, Artificial Sequence
  Description of Artificial Sequence: Synthetic oligonucleotide
gaaugcaagccugccucca

SEQ ID NO: 3017490 - RNA, 19 nt, Artificial Sequence
  Description of Artificial Sequence: Synthetic oligonucleotide
gcaagccugccuccaaugc

SEQ ID NO: 3017491 - RNA, 19 nt, Artificial Sequence
  Description of Artificial Sequence: Synthetic oligonucleotide
caugagacaugcacaccaa

SEQ ID NO: 3017492 - RNA, 19 nt, Artificial Sequence
  Description of Artificial Sequence: Synthetic oligonucleotide
ugccuccaaugcuggagac

SEQ ID NO: 3017493 - RNA, 19 nt, Artificial Sequence
  Description of Artificial Sequence: Synthetic oligonucleotide
ccauauuguugcuugaugu

SEQ ID NO: 3017494 - RNA, 19 nt, Artificial Sequence
  Description of Artificial Sequence: Synthetic oligonucleotide
gguguuuccaaacggcagu

SEQ ID NO: 3017495 - RNA, 19 nt, Artificial Sequence
  Description of Artificial Sequence: Synthetic oligonucleotide
augcaagccugccuccaau

SEQ ID NO: 3017496 - RNA, 19 nt, Artificial Sequence
  Description of Artificial Sequence: Synthetic oligonucleotide
cuaccacuagagagagguc

SEQ ID NO: 3017497 - RNA, 19 nt, Artificial Sequence
  Description of Artificial Sequence: Synthetic oligonucleotide
gcauauucagugucacguc

SEQ ID NO: 3017498 - RNA, 19 nt, Artificial Sequence
  Description of Artificial Sequence: Synthetic oligonucleotide
cuggagacagguguuucca

SEQ ID NO: 3017499 - RNA, 19 nt, Artificial Sequence
  Description of Artificial Sequence: Synthetic oligonucleotide
cuuccaccgcauauuugga

SEQ ID NO: 3017500 - RNA, 19 nt, Artificial Sequence
  Description of Artificial Sequence: Synthetic oligonucleotide
ggagacagguguuuccaaa

SEQ ID NO: 3017501 - RNA, 19 nt, Artificial Sequence
  Description of Artificial Sequence: Synthetic oligonucleotide
ugucuggagacagguguuu

SEQ ID NO: 3017502 - RNA, 19 nt, Artificial Sequence
  Description of Artificial Sequence: Synthetic oligonucleotide
ucccgccuuaagcugucau

SEQ ID NO: 3017503 - RNA, 19 nt, Artificial Sequence
  Description of Artificial Sequence: Synthetic oligonucleotide
uugaacaguccugguucaa

SEQ ID NO: 3017504 - RNA, 19 nt, Artificial Sequence
  Description of Artificial Sequence: Synthetic oligonucleotide
guccaugcacucuaccacu

SEQ ID NO: 3017505 - RNA, 19 nt, Artificial Sequence
  Description of Artificial Sequence: Synthetic oligonucleotide
ugucccgccuuaagcuguc

SEQ ID NO: 3017506 - RNA, 19 nt, Artificial Sequence
  Description of Artificial Sequence: Synthetic oligonucleotide
cugccuccaaugcuggaga

SEQ ID NO: 3017507 - RNA, 19 nt, Artificial Sequence
  Description of Artificial Sequence: Synthetic oligonucleotide
uguuuccaaacggcaguuu

SEQ ID NO: 3017508 - RNA, 19 nt, Artificial Sequence
  Description of Artificial Sequence: Synthetic oligonucleotide
auaacacgcccucgagcuu

SEQ ID NO: 3017509 - RNA, 19 nt, Artificial Sequence
  Description of Artificial Sequence: Synthetic oligonucleotide
ccgccuuaagcugucauug

SEQ ID NO: 3017510 - RNA, 19 nt, Artificial Sequence
  Description of Artificial Sequence: Synthetic oligonucleotide
aagcugucauugaaaccuu

SEQ ID NO: 3017511 - RNA, 19 nt, Artificial Sequence
  Description of Artificial Sequence: Synthetic oligonucleotide
caaugcuggagacauugau

SEQ ID NO: 3017512 - RNA, 19 nt, Artificial Sequence
  Description of Artificial Sequence: Synthetic oligonucleotide
cuagagagagguccaaguu

SEQ ID NO: 3017513 - RNA, 19 nt, Artificial Sequence
  Description of Artificial Sequence: Synthetic oligonucleotide
augucccgccuuaagcugu

SEQ ID NO: 3017514 - RNA, 19 nt, Artificial Sequence
  Description of Artificial Sequence: Synthetic oligonucleotide
ugaccaguggaagcauauu

SEQ ID NO: 3017515 - RNA, 19 nt, Artificial Sequence
  Description of Artificial Sequence: Synthetic oligonucleotide
ccuuaagcugucauugaaa

SEQ ID NO: 3017516 - RNA, 19 nt, Artificial Sequence
  Description of Artificial Sequence: Synthetic oligonucleotide
cuaauguagccuucuccau

SEQ ID NO: 3017517 - RNA, 19 nt, Artificial Sequence
  Description of Artificial Sequence: Synthetic oligonucleotide
cugccaguuguguuuugaa

SEQ ID NO: 3017518 - RNA, 19 nt, Artificial Sequence
  Description of Artificial Sequence: Synthetic oligonucleotide
caguccugguucaauacau

SEQ ID NO: 3017519 - RNA, 19 nt, Artificial Sequence
  Description of Artificial Sequence: Synthetic oligonucleotide
caugcacaccaaaagcuuu

SEQ ID NO: 3017520 - RNA, 19 nt, Artificial Sequence
  Description of Artificial Sequence: Synthetic oligonucleotide
ccaaguucacaaaggaugu

SEQ ID NO: 3017521 - RNA, 19 nt, Artificial Sequence
  Description of Artificial Sequence: Synthetic oligonucleotide
gccuuaagcugucauugaa

SEQ ID NO: 3017522 - RNA, 19 nt, Artificial Sequence
  Description of Artificial Sequence: Synthetic oligonucleotide
agccugccuccaaugcugg

SEQ ID NO: 3017523 - RNA, 19 nt, Artificial Sequence
  Description of Artificial Sequence: Synthetic oligonucleotide
agcuuucaugucccgccuu

SEQ ID NO: 3017524 - RNA, 19 nt, Artificial Sequence
  Description of Artificial Sequence: Synthetic oligonucleotide
gucuggagacagguguuuc

SEQ ID NO: 3017525 - RNA, 19 nt, Artificial Sequence
  Description of Artificial Sequence: Synthetic oligonucleotide
ccugccuccaaugcuggag

SEQ ID NO: 3017526 - RNA, 19 nt, Artificial Sequence
  Description of Artificial Sequence: Synthetic oligonucleotide
caguggaagcauauucagu

SEQ ID NO: 3017527 - RNA, 19 nt, Artificial Sequence
  Description of Artificial Sequence: Synthetic oligonucleotide
aucugccaguuguguuuug

SEQ ID NO: 3017528 - RNA, 19 nt, Artificial Sequence
  Description of Artificial Sequence: Synthetic oligonucleotide
gagagagguccaaguucac

SEQ ID NO: 3017529 - RNA, 19 nt, Artificial Sequence
  Description of Artificial Sequence: Synthetic oligonucleotide
agcgugguccaugcacucu

SEQ ID NO: 3017530 - RNA, 19 nt, Artificial Sequence
  Description of Artificial Sequence: Synthetic oligonucleotide
cccuccgccgaaugcaagc

SEQ ID NO: 3017531 - RNA, 19 nt, Artificial Sequence
  Description of Artificial Sequence: Synthetic oligonucleotide
caagccugccuccaaugcu

SEQ ID NO: 3017532 - RNA, 19 nt, Artificial Sequence
  Description of Artificial Sequence: Synthetic oligonucleotide
accuuccaccgcauauuug

SEQ ID NO: 3017533 - RNA, 19 nt, Artificial Sequence
  Description of Artificial Sequence: Synthetic oligonucleotide
ggaucugccaguuguguuu

SEQ ID NO: 3017534 - RNA, 19 nt, Artificial Sequence
  Description of Artificial Sequence: Synthetic oligonucleotide
augucuggagacagguguu

SEQ ID NO: 3017535 - RNA, 19 nt, Artificial Sequence
  Description of Artificial Sequence: Synthetic oligonucleotide
gcauauuuggauggagugu

SEQ ID NO: 3017536 - RNA, 19 nt, Artificial Sequence
  Description of Artificial Sequence: Synthetic oligonucleotide
ccaugcacucuaccacuag

SEQ ID NO: 3017537 - RNA, 19 nt, Artificial Sequence
  Description of Artificial Sequence: Synthetic oligonucleotide
cgaaugcaagccugccucc

SEQ ID NO: 3017538 - RNA, 19 nt, Artificial Sequence
  Description of Artificial Sequence: Synthetic oligonucleotide
gcuuucaugucccgccuua

SEQ ID NO: 3017539 - RNA, 19 nt, Artificial Sequence
  Description of Artificial Sequence: Synthetic oligonucleotide
cuuucaugucccgccuuaa

SEQ ID NO: 3017540 - RNA, 19 nt, Artificial Sequence
  Description of Artificial Sequence: Synthetic oligonucleotide
caaguucacaaaggaugua

SEQ ID NO: 3017541 - RNA, 19 nt, Artificial Sequence
  Description of Artificial Sequence: Synthetic oligonucleotide
gaucugccaguuguguuuu

SEQ ID NO: 3017542 - RNA, 19 nt, Artificial Sequence
  Description of Artificial Sequence: Synthetic oligonucleotide
auguagccuucuccauauu

SEQ ID NO: 3017543 - RNA, 19 nt, Artificial Sequence
  Description of Artificial Sequence: Synthetic oligonucleotide
ccuccgccgaaugcaagcc

SEQ ID NO: 3017544 - RNA, 19 nt, Artificial Sequence
  Description of Artificial Sequence: Synthetic oligonucleotide
caguuuguguuagacuuuu

SEQ ID NO: 3017545 - RNA, 19 nt, Artificial Sequence
  Description of Artificial Sequence: Synthetic oligonucleotide
ccgccgaaugcaagccugc

SEQ ID NO: 3017546 - RNA, 19 nt, Artificial Sequence
  Description of Artificial Sequence: Synthetic oligonucleotide
cuccauauuguugcuugau

SEQ ID NO: 3017547 - RNA, 19 nt, Artificial Sequence
  Description of Artificial Sequence: Synthetic oligonucleotide
aacacgcccucgagcuuuu

SEQ ID NO: 3017548 - RNA, 19 nt, Artificial Sequence
  Description of Artificial Sequence: Synthetic oligonucleotide
ccaaugcuggagacauuga

SEQ ID NO: 3017549 - RNA, 19 nt, Artificial Sequence
  Description of Artificial Sequence: Synthetic oligonucleotide
caccgcauauuuggaugga

SEQ ID NO: 3017550 - RNA, 19 nt, Artificial Sequence
  Description of Artificial Sequence: Synthetic oligonucleotide
gcgugguccaugcacucua

SEQ ID NO: 3017551 - RNA, 19 nt, Artificial Sequence
  Description of Artificial Sequence: Synthetic oligonucleotide
ccgcauauuuggauggagu

SEQ ID NO: 3017552 - RNA, 19 nt, Artificial Sequence
  Description of Artificial Sequence: Synthetic oligonucleotide
gccgaaugcaagccugccu

SEQ ID NO: 3017553 - RNA, 19 nt, Artificial Sequence
  Description of Artificial Sequence: Synthetic oligonucleotide
caguuguguuuugaacagu

SEQ ID NO: 3017554 - RNA, 19 nt, Artificial Sequence
  Description of Artificial Sequence: Synthetic oligonucleotide
gccuccaaugcuggagaca

SEQ ID NO: 3017555 - RNA, 19 nt, Artificial Sequence
  Description of Artificial Sequence: Synthetic oligonucleotide
cgugguccaugcacucuac

SEQ ID NO: 3017556 - RNA, 19 nt, Artificial Sequence
  Description of Artificial Sequence: Synthetic oligonucleotide
cuccgccgaaugcaagccu

SEQ ID NO: 3017557 - RNA, 19 nt, Artificial Sequence
  Description of Artificial Sequence: Synthetic oligonucleotide
ccccuccgccgaaugcaag

SEQ ID NO: 3017558 - RNA, 19 nt, Artificial Sequence
  Description of Artificial Sequence: Synthetic oligonucleotide
gcacaccaaaagcuuucau

SEQ ID NO: 3017559 - RNA, 19 nt, Artificial Sequence
  Description of Artificial Sequence: Synthetic oligonucleotide
cgccuuaagcugucauuga

SEQ ID NO: 3017560 - RNA, 19 nt, Artificial Sequence
  Description of Artificial Sequence: Synthetic oligonucleotide
ccuucuccauauuguugcu

SEQ ID NO: 3017561 - RNA, 19 nt, Artificial Sequence
  Description of Artificial Sequence: Synthetic oligonucleotide
cgccgaaugcaagccugcc

SEQ ID NO: 3017562 - RNA, 19 nt, Artificial Sequence
  Description of Artificial Sequence: Synthetic oligonucleotide
gucccgccuuaagcuguca

SEQ ID NO: 3017563 - RNA, 19 nt, Artificial Sequence
  Description of Artificial Sequence: Synthetic oligonucleotide
gccugccuccaaugcugga

SEQ ID NO: 3017564 - RNA, 19 nt, Artificial Sequence
  Description of Artificial Sequence: Synthetic oligonucleotide
cuccaaugcuggagacauu

SEQ ID NO: 3017565 - RNA, 19 nt, Artificial Sequence
  Description of Artificial Sequence: Synthetic oligonucleotide
ccacuagagagagguccaa

SEQ ID NO: 3017566 - RNA, 19 nt, Artificial Sequence
  Description of Artificial Sequence: Synthetic oligonucleotide
cccgccuuaagcugucauu

SEQ ID NO: 3017567 - RNA, 19 nt, Artificial Sequence
  Description of Artificial Sequence: Synthetic oligonucleotide
aauaacuuggugaauaucu

SEQ ID NO: 3017568 - RNA, 19 nt, Artificial Sequence
  Description of Artificial Sequence: Synthetic oligonucleotide
uccaguuuaaaaccguggg

SEQ ID NO: 3017569 - RNA, 19 nt, Artificial Sequence
  Description of Artificial Sequence: Synthetic oligonucleotide
gaagcaacagaauaacuug

SEQ ID NO: 3017570 - RNA, 19 nt, Artificial Sequence
  Description of Artificial Sequence: Synthetic oligonucleotide
aacagaauaacuuggugaa

SEQ ID NO: 3017571 - RNA, 19 nt, Artificial Sequence
  Description of Artificial Sequence: Synthetic oligonucleotide
ugggacaggaaacagggcc

SEQ ID NO: 3017572 - RNA, 19 nt, Artificial Sequence
  Description of Artificial Sequence: Synthetic oligonucleotide
cuuggugaauaucucaucc

SEQ ID NO: 3017573 - RNA, 19 nt, Artificial Sequence
  Description of Artificial Sequence: Synthetic oligonucleotide
ucaucuggaagacaugaug

SEQ ID NO: 3017574 - RNA, 19 nt, Artificial Sequence
  Description of Artificial Sequence: Synthetic oligonucleotide
agacaugaugaucauguuc

SEQ ID NO: 3017575 - RNA, 19 nt, Artificial Sequence
  Description of Artificial Sequence: Synthetic oligonucleotide
uuuggaaagacaguuccag

SEQ ID NO: 3017576 - RNA, 19 nt, Artificial Sequence
  Description of Artificial Sequence: Synthetic oligonucleotide
gacaugaugaucauguuca

SEQ ID NO: 3017577 - RNA, 19 nt, Artificial Sequence
  Description of Artificial Sequence: Synthetic oligonucleotide
uugugcacaaccuugggac

SEQ ID NO: 3017578 - RNA, 19 nt, Artificial Sequence
  Description of Artificial Sequence: Synthetic oligonucleotide
ucuccuccaguuuaaaacc

SEQ ID NO: 3017579 - RNA, 19 nt, Artificial Sequence
  Description of Artificial Sequence: Synthetic oligonucleotide
aguuuaaaaccgugggagg

SEQ ID NO: 3017580 - RNA, 19 nt, Artificial Sequence
  Description of Artificial Sequence: Synthetic oligonucleotide
aguuccagaaaagucugcc

SEQ ID NO: 3017581 - RNA, 19 nt, Artificial Sequence
  Description of Artificial Sequence: Synthetic oligonucleotide
caguuuaaaaccgugggag

SEQ ID NO: 3017582 - RNA, 19 nt, Artificial Sequence
  Description of Artificial Sequence: Synthetic oligonucleotide
aagcaacagaauaacuugg

SEQ ID NO: 3017583 - RNA, 19 nt, Artificial Sequence
  Description of Artificial Sequence: Synthetic oligonucleotide
cucguugaccuccacaagg

SEQ ID NO: 3017584 - RNA, 19 nt, Artificial Sequence
  Description of Artificial Sequence: Synthetic oligonucleotide
uggaaagacaguuccagaa

SEQ ID NO: 3017585 - RNA, 19 nt, Artificial Sequence
  Description of Artificial Sequence: Synthetic oligonucleotide
uaacuuggugaauaucuca

SEQ ID NO: 3017586 - RNA, 19 nt, Artificial Sequence
  Description of Artificial Sequence: Synthetic oligonucleotide
acaaccuugggacaggaaa

SEQ ID NO: 3017587 - RNA, 19 nt, Artificial Sequence
  Description of Artificial Sequence: Synthetic oligonucleotide
uuuuggaaagacaguucca

SEQ ID NO: 3017588 - RNA, 19 nt, Artificial Sequence
  Description of Artificial Sequence: Synthetic oligonucleotide
ugcccuguccuccucaaag

SEQ ID NO: 3017589 - RNA, 19 nt, Artificial Sequence
  Description of Artificial Sequence: Synthetic oligonucleotide
gaaagacaguuccagaaaa

SEQ ID NO: 3017590 - RNA, 19 nt, Artificial Sequence
  Description of Artificial Sequence: Synthetic oligonucleotide
agggaagcaacagaauaac

SEQ ID NO: 3017591 - RNA, 19 nt, Artificial Sequence
  Description of Artificial Sequence: Synthetic oligonucleotide
uccacaaggacuugugcac

SEQ ID NO: 3017592 - RNA, 19 nt, Artificial Sequence
  Description of Artificial Sequence: Synthetic oligonucleotide
cuccaguuuaaaaccgugg

SEQ ID NO: 3017593 - RNA, 19 nt, Artificial Sequence
  Description of Artificial Sequence: Synthetic oligonucleotide
uugaccuccacaaggacuu

SEQ ID NO: 3017594 - RNA, 19 nt, Artificial Sequence
  Description of Artificial Sequence: Synthetic oligonucleotide
ucuggugcccuccucguug

SEQ ID NO: 3017595 - RNA, 19 nt, Artificial Sequence
  Description of Artificial Sequence: Synthetic oligonucleotide
acuuggugaauaucucauc

SEQ ID NO: 3017596 - RNA, 19 nt, Artificial Sequence
  Description of Artificial Sequence: Synthetic oligonucleotide
caucuggaagacaugauga

SEQ ID NO: 3017597 - RNA, 19 nt, Artificial Sequence
  Description of Artificial Sequence: Synthetic oligonucleotide
agacaguuccagaaaaguc

SEQ ID NO: 3017598 - RNA, 19 nt, Artificial Sequence
  Description of Artificial Sequence: Synthetic oligonucleotide
auaacuuggugaauaucuc

SEQ ID NO: 3017599 - RNA, 19 nt, Artificial Sequence
  Description of Artificial Sequence: Synthetic oligonucleotide
agaauaacuuggugaauau

SEQ ID NO: 3017600 - RNA, 19 nt, Artificial Sequence
  Description of Artificial Sequence: Synthetic oligonucleotide
ucguugaccuccacaagga

SEQ ID NO: 3017601 - RNA, 19 nt, Artificial Sequence
  Description of Artificial Sequence: Synthetic oligonucleotide
caaccuugggacaggaaac

SEQ ID NO: 3017602 - RNA, 19 nt, Artificial Sequence
  Description of Artificial Sequence: Synthetic oligonucleotide
aacuuggugaauaucucau

SEQ ID NO: 3017603 - RNA, 19 nt, Artificial Sequence
  Description of Artificial Sequence: Synthetic oligonucleotide
cuccuccaguuuaaaaccg

SEQ ID NO: 3017604 - RNA, 19 nt, Artificial Sequence
  Description of Artificial Sequence: Synthetic oligonucleotide
uuggaaagacaguuccaga

SEQ ID NO: 3017605 - RNA, 19 nt, Artificial Sequence
  Description of Artificial Sequence: Synthetic oligonucleotide
guuuaaaaccgugggagga

SEQ ID NO: 3017606 - RNA, 19 nt, Artificial Sequence
  Description of Artificial Sequence: Synthetic oligonucleotide
ugugcacaaccuugggaca

SEQ ID NO: 3017607 - RNA, 19 nt, Artificial Sequence
  Description of Artificial Sequence: Synthetic oligonucleotide
aaccuugggacaggaaaca

SEQ ID NO: 3017608 - RNA, 19 nt, Artificial Sequence
  Description of Artificial Sequence: Synthetic oligonucleotide
acaguuccagaaaagucug

SEQ ID NO: 3017609 - RNA, 19 nt, Artificial Sequence
  Description of Artificial Sequence: Synthetic oligonucleotide
uccuccaguuuaaaaccgu

SEQ ID NO: 3017610 - RNA, 19 nt, Artificial Sequence
  Description of Artificial Sequence: Synthetic oligonucleotide
uuaaaaccgugggaggaaa

SEQ ID NO: 3017611 - RNA, 19 nt, Artificial Sequence
  Description of Artificial Sequence: Synthetic oligonucleotide
uaaaaccgugggaggaaaa

SEQ ID NO: 3017612 - RNA, 19 nt, Artificial Sequence
  Description of Artificial Sequence: Synthetic oligonucleotide
gcaacagaauaacuuggug

SEQ ID NO: 3017613 - RNA, 19 nt, Artificial Sequence
  Description of Artificial Sequence: Synthetic oligonucleotide
uugggacaggaaacagggc

SEQ ID NO: 3017614 - RNA, 19 nt, Artificial Sequence
  Description of Artificial Sequence: Synthetic oligonucleotide
agcaacagaauaacuuggu

SEQ ID NO: 3017615 - RNA, 19 nt, Artificial Sequence
  Description of Artificial Sequence: Synthetic oligonucleotide
cagaauaacuuggugaaua

SEQ ID NO: 3017616 - RNA, 19 nt, Artificial Sequence
  Description of Artificial Sequence: Synthetic oligonucleotide
ugcacaaccuugggacagg

SEQ ID NO: 3017617 - RNA, 19 nt, Artificial Sequence
  Description of Artificial Sequence: Synthetic oligonucleotide
ccuugggacaggaaacagg

SEQ ID NO: 3017618 - RNA, 19 nt, Artificial Sequence
  Description of Artificial Sequence: Synthetic oligonucleotide
caguuccagaaaagucugc

SEQ ID NO: 3017619 - RNA, 19 nt, Artificial Sequence
  Description of Artificial Sequence: Synthetic oligonucleotide
gugcacaaccuugggacag

SEQ ID NO: 3017620 - RNA, 19 nt, Artificial Sequence
  Description of Artificial Sequence: Synthetic oligonucleotide
ggaaagacaguuccagaaa

SEQ ID NO: 3017621 - RNA, 19 nt, Artificial Sequence
  Description of Artificial Sequence: Synthetic oligonucleotide
ugugcucaucuggaagaca

SEQ ID NO: 3017622 - RNA, 19 nt, Artificial Sequence
  Description of Artificial Sequence: Synthetic oligonucleotide
accuugggacaggaaacag

SEQ ID NO: 3017623 - RNA, 19 nt, Artificial Sequence
  Description of Artificial Sequence: Synthetic oligonucleotide
gccucuggugcccuccucg

SEQ ID NO: 3017624 - RNA, 19 nt, Artificial Sequence
  Description of Artificial Sequence: Synthetic oligonucleotide
guugaccuccacaaggacu

SEQ ID NO: 3017625 - RNA, 19 nt, Artificial Sequence
  Description of Artificial Sequence: Synthetic oligonucleotide
acagaauaacuuggugaau

SEQ ID NO: 3017626 - RNA, 19 nt, Artificial Sequence
  Description of Artificial Sequence: Synthetic oligonucleotide
ggaagcaacagaauaacuu

SEQ ID NO: 3017627 - RNA, 19 nt, Artificial Sequence
  Description of Artificial Sequence: Synthetic oligonucleotide
gcucaucuggaagacauga

SEQ ID NO: 3017628 - RNA, 19 nt, Artificial Sequence
  Description of Artificial Sequence: Synthetic oligonucleotide
gcccuguccuccucaaagg

SEQ ID NO: 3017629 - RNA, 19 nt, Artificial Sequence
  Description of Artificial Sequence: Synthetic oligonucleotide
ucugcccuguccuccucaa

SEQ ID NO: 3017630 - RNA, 19 nt, Artificial Sequence
  Description of Artificial Sequence: Synthetic oligonucleotide
ccuccaguuuaaaaccgug

SEQ ID NO: 3017631 - RNA, 19 nt, Artificial Sequence
  Description of Artificial Sequence: Synthetic oligonucleotide
accuccacaaggacuugug

SEQ ID NO: 3017632 - RNA, 19 nt, Artificial Sequence
  Description of Artificial Sequence: Synthetic oligonucleotide
acaggaaacagggccuuuu

SEQ ID NO: 3017633 - RNA, 19 nt, Artificial Sequence
  Description of Artificial Sequence: Synthetic oligonucleotide
ccaguuuaaaaccguggga

SEQ ID NO: 3017634 - RNA, 19 nt, Artificial Sequence
  Description of Artificial Sequence: Synthetic oligonucleotide
agucugcccuguccuccuc

SEQ ID NO: 3017635 - RNA, 19 nt, Artificial Sequence
  Description of Artificial Sequence: Synthetic oligonucleotide
ccuccacaaggacuugugc

SEQ ID NO: 3017636 - RNA, 19 nt, Artificial Sequence
  Description of Artificial Sequence: Synthetic oligonucleotide
cccuguccuccucaaaggc

SEQ ID NO: 3017637 - RNA, 19 nt, Artificial Sequence
  Description of Artificial Sequence: Synthetic oligonucleotide
agccucuggugcccuccuc

SEQ ID NO: 3017638 - RNA, 19 nt, Artificial Sequence
  Description of Artificial Sequence: Synthetic oligonucleotide
ugaccuccacaaggacuug

SEQ ID NO: 3017639 - RNA, 19 nt, Artificial Sequence
  Description of Artificial Sequence: Synthetic oligonucleotide
ccuguccuccucaaaggca

SEQ ID NO: 3017640 - RNA, 19 nt, Artificial Sequence
  Description of Artificial Sequence: Synthetic oligonucleotide
cuggugcccuccucguuga

SEQ ID NO: 3017641 - RNA, 19 nt, Artificial Sequence
  Description of Artificial Sequence: Synthetic oligonucleotide
ccucguugaccuccacaag

SEQ ID NO: 3017642 - RNA, 19 nt, Artificial Sequence
  Description of Artificial Sequence: Synthetic oligonucleotide
cacaaccuugggacaggaa

SEQ ID NO: 3017643 - RNA, 19 nt, Artificial Sequence
  Description of Artificial Sequence: Synthetic oligonucleotide
gaccuccacaaggacuugu

SEQ ID NO: 3017644 - RNA, 19 nt, Artificial Sequence
  Description of Artificial Sequence: Synthetic oligonucleotide
gggacaggaaacagggccu

SEQ ID NO: 3017645 - RNA, 19 nt, Artificial Sequence
  Description of Artificial Sequence: Synthetic oligonucleotide
gggaagcaacagaauaacu

SEQ ID NO: 3017646 - RNA, 19 nt, Artificial Sequence
  Description of Artificial Sequence: Synthetic oligonucleotide
cguugaccuccacaaggac

SEQ ID NO: 3017647 - RNA, 19 nt, Artificial Sequence
  Description of Artificial Sequence: Synthetic oligonucleotide
ccacaaggacuugugcaca

SEQ ID NO: 3017648 - RNA, 19 nt, Artificial Sequence
  Description of Artificial Sequence: Synthetic oligonucleotide
gcacaaccuugggacagga

SEQ ID NO: 3017649 - RNA, 19 nt, Artificial Sequence
  Description of Artificial Sequence: Synthetic oligonucleotide
gacaggaaacagggccuuu

SEQ ID NO: 3017650 - RNA, 19 nt, Artificial Sequence
  Description of Artificial Sequence: Synthetic oligonucleotide
cugcccuguccuccucaaa

SEQ ID NO: 3017651 - RNA, 19 nt, Artificial Sequence
  Description of Artificial Sequence: Synthetic oligonucleotide
cucuggugcccuccucguu

SEQ ID NO: 3017652 - RNA, 19 nt, Artificial Sequence
  Description of Artificial Sequence: Synthetic oligonucleotide
cagccucuggugcccuccu

SEQ ID NO: 3017653 - RNA, 19 nt, Artificial Sequence
  Description of Artificial Sequence: Synthetic oligonucleotide
ccucuggugcccuccucgu

SEQ ID NO: 3017654 - RNA, 19 nt, Artificial Sequence
  Description of Artificial Sequence: Synthetic oligonucleotide
aauuccuugaaauagagug

SEQ ID NO: 3017655 - RNA, 19 nt, Artificial Sequence
  Description of Artificial Sequence: Synthetic oligonucleotide
caaauuauaauuuaauucc

SEQ ID NO: 3017656 - RNA, 19 nt, Artificial Sequence
  Description of Artificial Sequence: Synthetic oligonucleotide
cauaugacaacuuacaagg

SEQ ID NO: 3017657 - RNA, 19 nt, Artificial Sequence
  Description of Artificial Sequence: Synthetic oligonucleotide
uuuacuagaauucuuaaga

SEQ ID NO: 3017658 - RNA, 19 nt, Artificial Sequence
  Description of Artificial Sequence: Synthetic oligonucleotide
uauaauuuaauucccaaca

SEQ ID NO: 3017659 - RNA, 19 nt, Artificial Sequence
  Description of Artificial Sequence: Synthetic oligonucleotide
ugaaauauacaccacacug

SEQ ID NO: 3017660 - RNA, 19 nt, Artificial Sequence
  Description of Artificial Sequence: Synthetic oligonucleotide
ucaaauuauaauuuaauuc

SEQ ID NO: 3017661 - RNA, 19 nt, Artificial Sequence
  Description of Artificial Sequence: Synthetic oligonucleotide
ucaaucgugaucuagaacu

SEQ ID NO: 3017662 - RNA, 19 nt, Artificial Sequence
  Description of Artificial Sequence: Synthetic oligonucleotide
aauaacaauuccuugaaau

SEQ ID NO: 3017663 - RNA, 19 nt, Artificial Sequence
  Description of Artificial Sequence: Synthetic oligonucleotide
uuuuaauggugacaaaagg

SEQ ID NO: 3017664 - RNA, 19 nt, Artificial Sequence
  Description of Artificial Sequence: Synthetic oligonucleotide
aaauauacaccacacugag

SEQ ID NO: 3017665 - RNA, 19 nt, Artificial Sequence
  Description of Artificial Sequence: Synthetic oligonucleotide
uucaaaagcauacacaccu

SEQ ID NO: 3017666 - RNA, 19 nt, Artificial Sequence
  Description of Artificial Sequence: Synthetic oligonucleotide
ugaaauagagugcaacugg

SEQ ID NO: 3017667 - RNA, 19 nt, Artificial Sequence
  Description of Artificial Sequence: Synthetic oligonucleotide
aaauuauaauuuaauuccc

SEQ ID NO: 3017668 - RNA, 19 nt, Artificial Sequence
  Description of Artificial Sequence: Synthetic oligonucleotide
uuuaauggugacaaaagga

SEQ ID NO: 3017669 - RNA, 19 nt, Artificial Sequence
  Description of Artificial Sequence: Synthetic oligonucleotide
aacaauaacaauuccuuga

SEQ ID NO: 3017670 - RNA, 19 nt, Artificial Sequence
  Description of Artificial Sequence: Synthetic oligonucleotide
uguucaaaagcauacacac

SEQ ID NO: 3017671 - RNA, 19 nt, Artificial Sequence
  Description of Artificial Sequence: Synthetic oligonucleotide
uuuauuucuuuucucuggg

SEQ ID NO: 3017672 - RNA, 19 nt, Artificial Sequence
  Description of Artificial Sequence: Synthetic oligonucleotide
ucuuaagauguucaaaagc

SEQ ID NO: 3017673 - RNA, 19 nt, Artificial Sequence
  Description of Artificial Sequence: Synthetic oligonucleotide
uugaguuggaccucaaucg

SEQ ID NO: 3017674 - RNA, 19 nt, Artificial Sequence
  Description of Artificial Sequence: Synthetic oligonucleotide
auaauuuaauucccaacac

SEQ ID NO: 3017675 - RNA, 19 nt, Artificial Sequence
  Description of Artificial Sequence: Synthetic oligonucleotide
aaagcauacacaccuaaga

SEQ ID NO: 3017676 - RNA, 19 nt, Artificial Sequence
  Description of Artificial Sequence: Synthetic oligonucleotide
acuuaggacauuuuauugg

SEQ ID NO: 3017677 - RNA, 19 nt, Artificial Sequence
  Description of Artificial Sequence: Synthetic oligonucleotide
aagauguucaaaagcauac

SEQ ID NO: 3017678 - RNA, 19 nt, Artificial Sequence
  Description of Artificial Sequence: Synthetic oligonucleotide
auuuuauuggcauaugaca

SEQ ID NO: 3017679 - RNA, 19 nt, Artificial Sequence
  Description of Artificial Sequence: Synthetic oligonucleotide
uauguugccauuuugaguu

SEQ ID NO: 3017680 - RNA, 19 nt, Artificial Sequence
  Description of Artificial Sequence: Synthetic oligonucleotide
uuuuauuggcauaugacaa

SEQ ID NO: 3017681 - RNA, 19 nt, Artificial Sequence
  Description of Artificial Sequence: Synthetic oligonucleotide
aaggaacaauaacaauucc

SEQ ID NO: 3017682 - RNA, 19 nt, Artificial Sequence
  Description of Artificial Sequence: Synthetic oligonucleotide
aaaaggaacaauaacaauu

SEQ ID NO: 3017683 - RNA, 19 nt, Artificial Sequence
  Description of Artificial Sequence: Synthetic oligonucleotide
aguaagaaucguuuagccg

SEQ ID NO: 3017684 - RNA, 19 nt, Artificial Sequence
  Description of Artificial Sequence: Synthetic oligonucleotide
uguugaaauauacaccaca

SEQ ID NO: 3017685 - RNA, 19 nt, Artificial Sequence
  Description of Artificial Sequence: Synthetic oligonucleotide
cuuaagauguucaaaagca

SEQ ID NO: 3017686 - RNA, 19 nt, Artificial Sequence
  Description of Artificial Sequence: Synthetic oligonucleotide
uuuuacuagaauucuuaag

SEQ ID NO: 3017687 - RNA, 19 nt, Artificial Sequence
  Description of Artificial Sequence: Synthetic oligonucleotide
auauacaccacacugagua

SEQ ID NO: 3017688 - RNA, 19 nt, Artificial Sequence
  Description of Artificial Sequence: Synthetic oligonucleotide
gacaaaaggaacaauaaca

SEQ ID NO: 3017689 - RNA, 19 nt, Artificial Sequence
  Description of Artificial Sequence: Synthetic oligonucleotide
agcauacacaccuaagaac

SEQ ID NO: 3017690 - RNA, 19 nt, Artificial Sequence
  Description of Artificial Sequence: Synthetic oligonucleotide
uuugaguuggaccucaauc

SEQ ID NO: 3017691 - RNA, 19 nt, Artificial Sequence
  Description of Artificial Sequence: Synthetic oligonucleotide
uaauuuaauucccaacacu

SEQ ID NO: 3017692 - RNA, 19 nt, Artificial Sequence
  Description of Artificial Sequence: Synthetic oligonucleotide
acuagaauucuuaagaugu

SEQ ID NO: 3017693 - RNA, 19 nt, Artificial Sequence
  Description of Artificial Sequence: Synthetic oligonucleotide
uuauaauuuaauucccaac

SEQ ID NO: 3017694 - RNA, 19 nt, Artificial Sequence
  Description of Artificial Sequence: Synthetic oligonucleotide
aauagagugcaacuggaaa

SEQ ID NO: 3017695 - RNA, 19 nt, Artificial Sequence
  Description of Artificial Sequence: Synthetic oligonucleotide
auucuuaagauguucaaaa

SEQ ID NO: 3017696 - RNA, 19 nt, Artificial Sequence
  Description of Artificial Sequence: Synthetic oligonucleotide
uuucucugggcaaaggaag

SEQ ID NO: 3017697 - RNA, 19 nt, Artificial Sequence
  Description of Artificial Sequence: Synthetic oligonucleotide
gauguucaaaagcauacac

SEQ ID NO: 3017698 - RNA, 19 nt, Artificial Sequence
  Description of Artificial Sequence: Synthetic oligonucleotide
ugacaacuuacaaggaucc

SEQ ID NO: 3017699 - RNA, 19 nt, Artificial Sequence
  Description of Artificial Sequence: Synthetic oligonucleotide
uuuaauucccaacacugau

SEQ ID NO: 3017700 - RNA, 19 nt, Artificial Sequence
  Description of Artificial Sequence: Synthetic oligonucleotide
cauuuuauuggcauaugac

SEQ ID NO: 3017701 - RNA, 19 nt, Artificial Sequence
  Description of Artificial Sequence: Synthetic oligonucleotide
aauggugacaaaaggaaca

SEQ ID NO: 3017702 - RNA, 19 nt, Artificial Sequence
  Description of Artificial Sequence: Synthetic oligonucleotide
aguauguugccauuuugag

SEQ ID NO: 3017703 - RNA, 19 nt, Artificial Sequence
  Description of Artificial Sequence: Synthetic oligonucleotide
uacauucauucucaugggg

SEQ ID NO: 3017704 - RNA, 19 nt, Artificial Sequence
  Description of Artificial Sequence: Synthetic oligonucleotide
aaaggaaguauguugccau

SEQ ID NO: 3017705 - RNA, 19 nt, Artificial Sequence
  Description of Artificial Sequence: Synthetic oligonucleotide
ugacaaaaggaacaauaac

SEQ ID NO: 3017706 - RNA, 19 nt, Artificial Sequence
  Description of Artificial Sequence: Synthetic oligonucleotide
ugagucauggccuucugug

SEQ ID NO: 3017707 - RNA, 19 nt, Artificial Sequence
  Description of Artificial Sequence: Synthetic oligonucleotide
uucuuaagauguucaaaag

SEQ ID NO: 3017708 - RNA, 19 nt, Artificial Sequence
  Description of Artificial Sequence: Synthetic oligonucleotide
uacuagaauucuuaagaug

SEQ ID NO: 3017709 - RNA, 19 nt, Artificial Sequence
  Description of Artificial Sequence: Synthetic oligonucleotide
auuauaauuuaauucccaa

SEQ ID NO: 3017710 - RNA, 19 nt, Artificial Sequence
  Description of Artificial Sequence: Synthetic oligonucleotide
aauuauaauuuaauuccca

SEQ ID NO: 3017711 - RNA, 19 nt, Artificial Sequence
  Description of Artificial Sequence: Synthetic oligonucleotide
gaguaagaaucguuuagcc

SEQ ID NO: 3017712 - RNA, 19 nt, Artificial Sequence
  Description of Artificial Sequence: Synthetic oligonucleotide
ccaacacugauuuuaaugg

SEQ ID NO: 3017713 - RNA, 19 nt, Artificial Sequence
  Description of Artificial Sequence: Synthetic oligonucleotide
uaagaguugucccucaaau

SEQ ID NO: 3017714 - RNA, 19 nt, Artificial Sequence
  Description of Artificial Sequence: Synthetic oligonucleotide
uaugacaacuuacaaggau

SEQ ID NO: 3017715 - RNA, 19 nt, Artificial Sequence
  Description of Artificial Sequence: Synthetic oligonucleotide
aagcauacacaccuaagaa

SEQ ID NO: 3017716 - RNA, 19 nt, Artificial Sequence
  Description of Artificial Sequence: Synthetic oligonucleotide
cuuacaaggaucccuguug

SEQ ID NO: 3017717 - RNA, 19 nt, Artificial Sequence
  Description of Artificial Sequence: Synthetic oligonucleotide
ugucccucaaauuauaauu

SEQ ID NO: 3017718 - RNA, 19 nt, Artificial Sequence
  Description of Artificial Sequence: Synthetic oligonucleotide
uaauucccaacacugauuu

SEQ ID NO: 3017719 - RNA, 19 nt, Artificial Sequence
  Description of Artificial Sequence: Synthetic oligonucleotide
uaagauguucaaaagcaua

SEQ ID NO: 3017720 - RNA, 19 nt, Artificial Sequence
  Description of Artificial Sequence: Synthetic oligonucleotide
auuuuaauggugacaaaag

SEQ ID NO: 3017721 - RNA, 19 nt, Artificial Sequence
  Description of Artificial Sequence: Synthetic oligonucleotide
uugaaauagagugcaacug

SEQ ID NO: 3017722 - RNA, 19 nt, Artificial Sequence
  Description of Artificial Sequence: Synthetic oligonucleotide
uuuauuggcauaugacaac

SEQ ID NO: 3017723 - RNA, 19 nt, Artificial Sequence
  Description of Artificial Sequence: Synthetic oligonucleotide
agaguugucccucaaauua

SEQ ID NO: 3017724 - RNA, 19 nt, Artificial Sequence
  Description of Artificial Sequence: Synthetic oligonucleotide
ugaguaagaaucguuuagc

SEQ ID NO: 3017725 - RNA, 19 nt, Artificial Sequence
  Description of Artificial Sequence: Synthetic oligonucleotide
gaacaauaacaauuccuug

SEQ ID NO: 3017726 - RNA, 19 nt, Artificial Sequence
  Description of Artificial Sequence: Synthetic oligonucleotide
augggguaagaguuguccc

SEQ ID NO: 3017727 - RNA, 19 nt, Artificial Sequence
  Description of Artificial Sequence: Synthetic oligonucleotide
uggaccucaaucgugaucu

SEQ ID NO: 3017728 - RNA, 19 nt, Artificial Sequence
  Description of Artificial Sequence: Synthetic oligonucleotide
uucucaugggguaagaguu

SEQ ID NO: 3017729 - RNA, 19 nt, Artificial Sequence
  Description of Artificial Sequence: Synthetic oligonucleotide
guaagaaucguuuagccgu

SEQ ID NO: 3017730 - RNA, 19 nt, Artificial Sequence
  Description of Artificial Sequence: Synthetic oligonucleotide
acauuuuauuggcauauga

SEQ ID NO: 3017731 - RNA, 19 nt, Artificial Sequence
  Description of Artificial Sequence: Synthetic oligonucleotide
uuuucucugggcaaaggaa

SEQ ID NO: 3017732 - RNA, 19 nt, Artificial Sequence
  Description of Artificial Sequence: Synthetic oligonucleotide
uugaaauauacaccacacu

SEQ ID NO: 3017733 - RNA, 19 nt, Artificial Sequence
  Description of Artificial Sequence: Synthetic oligonucleotide
uaauggugacaaaaggaac

SEQ ID NO: 3017734 - RNA, 19 nt, Artificial Sequence
  Description of Artificial Sequence: Synthetic oligonucleotide
uggcauaugacaacuuaca

SEQ ID NO: 3017735 - RNA, 19 nt, Artificial Sequence
  Description of Artificial Sequence: Synthetic oligonucleotide
augacaacuuacaaggauc

SEQ ID NO: 3017736 - RNA, 19 nt, Artificial Sequence
  Description of Artificial Sequence: Synthetic oligonucleotide
uuggcauaugacaacuuac

SEQ ID NO: 3017737 - RNA, 19 nt, Artificial Sequence
  Description of Artificial Sequence: Synthetic oligonucleotide
auagagugcaacuggaaaa

SEQ ID NO: 3017738 - RNA, 19 nt, Artificial Sequence
  Description of Artificial Sequence: Synthetic oligonucleotide
auaacaauuccuugaaaua

SEQ ID NO: 3017739 - RNA, 19 nt, Artificial Sequence
  Description of Artificial Sequence: Synthetic oligonucleotide
aacacugauuuuaauggug

SEQ ID NO: 3017740 - RNA, 19 nt, Artificial Sequence
  Description of Artificial Sequence: Synthetic oligonucleotide
acaauaacaauuccuugaa

SEQ ID NO: 3017741 - RNA, 19 nt, Artificial Sequence
  Description of Artificial Sequence: Synthetic oligonucleotide
uuacaaggaucccuguuga

SEQ ID NO: 3017742 - RNA, 19 nt, Artificial Sequence
  Description of Artificial Sequence: Synthetic oligonucleotide
uuaagauguucaaaagcau

SEQ ID NO: 3017743 - RNA, 19 nt, Artificial Sequence
  Description of Artificial Sequence: Synthetic oligonucleotide
cugaguaagaaucguuuag

SEQ ID NO: 3017744 - RNA, 19 nt, Artificial Sequence
  Description of Artificial Sequence: Synthetic oligonucleotide
aauucuuaagauguucaaa

SEQ ID NO: 3017745 - RNA, 19 nt, Artificial Sequence
  Description of Artificial Sequence: Synthetic oligonucleotide
uuacuagaauucuuaagau

SEQ ID NO: 3017746 - RNA, 19 nt, Artificial Sequence
  Description of Artificial Sequence: Synthetic oligonucleotide
aaaagcauacacaccuaag

SEQ ID NO: 3017747 - RNA, 19 nt, Artificial Sequence
  Description of Artificial Sequence: Synthetic oligonucleotide
gaaauauacaccacacuga

SEQ ID NO: 3017748 - RNA, 19 nt, Artificial Sequence
  Description of Artificial Sequence: Synthetic oligonucleotide
aacuggaaaagacuugauu

SEQ ID NO: 3017749 - RNA, 19 nt, Artificial Sequence
  Description of Artificial Sequence: Synthetic oligonucleotide
auucucaugggguaagagu

SEQ ID NO: 3017750 - RNA, 19 nt, Artificial Sequence
  Description of Artificial Sequence: Synthetic oligonucleotide
acaccuaagaacugaguca

SEQ ID NO: 3017751 - RNA, 19 nt, Artificial Sequence
  Description of Artificial Sequence: Synthetic oligonucleotide
gaaguauguugccauuuug

SEQ ID NO: 3017752 - RNA, 19 nt, Artificial Sequence
  Description of Artificial Sequence: Synthetic oligonucleotide
uacacaccuaagaacugag

SEQ ID NO: 3017753 - RNA, 19 nt, Artificial Sequence
  Description of Artificial Sequence: Synthetic oligonucleotide
uagagugcaacuggaaaag

SEQ ID NO: 3017754 - RNA, 19 nt, Artificial Sequence
  Description of Artificial Sequence: Synthetic oligonucleotide
aaucguuuagccgucuaca

SEQ ID NO: 3017755 - RNA, 19 nt, Artificial Sequence
  Description of Artificial Sequence: Synthetic oligonucleotide
guugaaauauacaccacac

SEQ ID NO: 3017756 - RNA, 19 nt, Artificial Sequence
  Description of Artificial Sequence: Synthetic oligonucleotide
aaguauguugccauuuuga

SEQ ID NO: 3017757 - RNA, 19 nt, Artificial Sequence
  Description of Artificial Sequence: Synthetic oligonucleotide
gcauaugacaacuuacaag

SEQ ID NO: 3017758 - RNA, 19 nt, Artificial Sequence
  Description of Artificial Sequence: Synthetic oligonucleotide
uuauuggcauaugacaacu

SEQ ID NO: 3017759 - RNA, 19 nt, Artificial Sequence
  Description of Artificial Sequence: Synthetic oligonucleotide
cacaccuaagaacugaguc

SEQ ID NO: 3017760 - RNA, 19 nt, Artificial Sequence
  Description of Artificial Sequence: Synthetic oligonucleotide
uuccuugaaauagagugca

SEQ ID NO: 3017761 - RNA, 19 nt, Artificial Sequence
  Description of Artificial Sequence: Synthetic oligonucleotide
cacuuaggacauuuuauug

SEQ ID NO: 3017762 - RNA, 19 nt, Artificial Sequence
  Description of Artificial Sequence: Synthetic oligonucleotide
aacaauuccuugaaauaga

SEQ ID NO: 3017763 - RNA, 19 nt, Artificial Sequence
  Description of Artificial Sequence: Synthetic oligonucleotide
cuacauucauucucauggg

SEQ ID NO: 3017764 - RNA, 19 nt, Artificial Sequence
  Description of Artificial Sequence: Synthetic oligonucleotide
cuaagaacugagucauggc

SEQ ID NO: 3017765 - RNA, 19 nt, Artificial Sequence
  Description of Artificial Sequence: Synthetic oligonucleotide
caacuuacaaggaucccug

SEQ ID NO: 3017766 - RNA, 19 nt, Artificial Sequence
  Description of Artificial Sequence: Synthetic oligonucleotide
uaggacauuuuauuggcau

SEQ ID NO: 3017767 - RNA, 19 nt, Artificial Sequence
  Description of Artificial Sequence: Synthetic oligonucleotide
ugaguuggaccucaaucgu

SEQ ID NO: 3017768 - RNA, 19 nt, Artificial Sequence
  Description of Artificial Sequence: Synthetic oligonucleotide
uuauuucuuuucucugggc

SEQ ID NO: 3017769 - RNA, 19 nt, Artificial Sequence
  Description of Artificial Sequence: Synthetic oligonucleotide
ucugggcaaaggaaguaug

SEQ ID NO: 3017770 - RNA, 19 nt, Artificial Sequence
  Description of Artificial Sequence: Synthetic oligonucleotide
ugcaacuggaaaagacuug

SEQ ID NO: 3017771 - RNA, 19 nt, Artificial Sequence
  Description of Artificial Sequence: Synthetic oligonucleotide
aaucgugaucuagaacuag

SEQ ID NO: 3017772 - RNA, 19 nt, Artificial Sequence
  Description of Artificial Sequence: Synthetic oligonucleotide
uagccgucuacauucauuc

SEQ ID NO: 3017773 - RNA, 19 nt, Artificial Sequence
  Description of Artificial Sequence: Synthetic oligonucleotide
acaacuuacaaggaucccu

SEQ ID NO: 3017774 - RNA, 19 nt, Artificial Sequence
  Description of Artificial Sequence: Synthetic oligonucleotide
uuaauucccaacacugauu

SEQ ID NO: 3017775 - RNA, 19 nt, Artificial Sequence
  Description of Artificial Sequence: Synthetic oligonucleotide
agaauucuuaagauguuca

SEQ ID NO: 3017776 - RNA, 19 nt, Artificial Sequence
  Description of Artificial Sequence: Synthetic oligonucleotide
caugggguaagaguugucc

SEQ ID NO: 3017777 - RNA, 19 nt, Artificial Sequence
  Description of Artificial Sequence: Synthetic oligonucleotide
aggaacaauaacaauuccu

SEQ ID NO: 3017778 - RNA, 19 nt, Artificial Sequence
  Description of Artificial Sequence: Synthetic oligonucleotide
gaaucguuuagccgucuac

SEQ ID NO: 3017779 - RNA, 19 nt, Artificial Sequence
  Description of Artificial Sequence: Synthetic oligonucleotide
auuggcauaugacaacuua

SEQ ID NO: 3017780 - RNA, 19 nt, Artificial Sequence
  Description of Artificial Sequence: Synthetic oligonucleotide
acaauuccuugaaauagag

SEQ ID NO: 3017781 - RNA, 19 nt, Artificial Sequence
  Description of Artificial Sequence: Synthetic oligonucleotide
uagaauucuuaagauguuc

SEQ ID NO: 3017782 - RNA, 19 nt, Artificial Sequence
  Description of Artificial Sequence: Synthetic oligonucleotide
auacaccacacugaguaag

SEQ ID NO: 3017783 - RNA, 19 nt, Artificial Sequence
  Description of Artificial Sequence: Synthetic oligonucleotide
gaaauagagugcaacugga

SEQ ID NO: 3017784 - RNA, 19 nt, Artificial Sequence
  Description of Artificial Sequence: Synthetic oligonucleotide
acugauuuuaauggugaca

SEQ ID NO: 3017785 - RNA, 19 nt, Artificial Sequence
  Description of Artificial Sequence: Synthetic oligonucleotide
aagaguugucccucaaauu

SEQ ID NO: 3017786 - RNA, 19 nt, Artificial Sequence
  Description of Artificial Sequence: Synthetic oligonucleotide
gaauucuuaagauguucaa

SEQ ID NO: 3017787 - RNA, 19 nt, Artificial Sequence
  Description of Artificial Sequence: Synthetic oligonucleotide
ccuguugaaauauacacca

SEQ ID NO: 3017788 - RNA, 19 nt, Artificial Sequence
  Description of Artificial Sequence: Synthetic oligonucleotide
ucucaugggguaagaguug

SEQ ID NO: 3017789 - RNA, 19 nt, Artificial Sequence
  Description of Artificial Sequence: Synthetic oligonucleotide
uguugccauuuugaguugg

SEQ ID NO: 3017790 - RNA, 19 nt, Artificial Sequence
  Description of Artificial Sequence: Synthetic oligonucleotide
uucucugggcaaaggaagu

SEQ ID NO: 3017791 - RNA, 19 nt, Artificial Sequence
  Description of Artificial Sequence: Synthetic oligonucleotide
uaccacuuaggacauuuua

SEQ ID NO: 3017792 - RNA, 19 nt, Artificial Sequence
  Description of Artificial Sequence: Synthetic oligonucleotide
agucauggccuucugugcu

SEQ ID NO: 3017793 - RNA, 19 nt, Artificial Sequence
  Description of Artificial Sequence: Synthetic oligonucleotide
ugggguaagaguugucccu

SEQ ID NO: 3017794 - RNA, 19 nt, Artificial Sequence
  Description of Artificial Sequence: Synthetic oligonucleotide
uaagaaucguuuagccguc

SEQ ID NO: 3017795 - RNA, 19 nt, Artificial Sequence
  Description of Artificial Sequence: Synthetic oligonucleotide
ggcaaaggaaguauguugc

SEQ ID NO: 3017796 - RNA, 19 nt, Artificial Sequence
  Description of Artificial Sequence: Synthetic oligonucleotide
ucuuuucucugggcaaagg

SEQ ID NO: 3017797 - RNA, 19 nt, Artificial Sequence
  Description of Artificial Sequence: Synthetic oligonucleotide
uucauucucaugggguaag

SEQ ID NO: 3017798 - RNA, 19 nt, Artificial Sequence
  Description of Artificial Sequence: Synthetic oligonucleotide
ccuaagaacugagucaugg

SEQ ID NO: 3017799 - RNA, 19 nt, Artificial Sequence
  Description of Artificial Sequence: Synthetic oligonucleotide
acauucauucucauggggu

SEQ ID NO: 3017800 - RNA, 19 nt, Artificial Sequence
  Description of Artificial Sequence: Synthetic oligonucleotide
auucccaacacugauuuua

SEQ ID NO: 3017801 - RNA, 19 nt, Artificial Sequence
  Description of Artificial Sequence: Synthetic oligonucleotide
acugaguaagaaucguuua

SEQ ID NO: 3017802 - RNA, 19 nt, Artificial Sequence
  Description of Artificial Sequence: Synthetic oligonucleotide
auguucaaaagcauacaca

SEQ ID NO: 3017803 - RNA, 19 nt, Artificial Sequence
  Description of Artificial Sequence: Synthetic oligonucleotide
cuugaaauagagugcaacu

SEQ ID NO: 3017804 - RNA, 19 nt, Artificial Sequence
  Description of Artificial Sequence: Synthetic oligonucleotide
aacuuacaaggaucccugu

SEQ ID NO: 3017805 - RNA, 19 nt, Artificial Sequence
  Description of Artificial Sequence: Synthetic oligonucleotide
uuagccgucuacauucauu

SEQ ID NO: 3017806 - RNA, 19 nt, Artificial Sequence
  Description of Artificial Sequence: Synthetic oligonucleotide
gagugcaacuggaaaagac

SEQ ID NO: 3017807 - RNA, 19 nt, Artificial Sequence
  Description of Artificial Sequence: Synthetic oligonucleotide
gggcaaaggaaguauguug

SEQ ID NO: 3017808 - RNA, 19 nt, Artificial Sequence
  Description of Artificial Sequence: Synthetic oligonucleotide
ucaaaagcauacacaccua

SEQ ID NO: 3017809 - RNA, 19 nt, Artificial Sequence
  Description of Artificial Sequence: Synthetic oligonucleotide
cauacacaccuaagaacug

SEQ ID NO: 3017810 - RNA, 19 nt, Artificial Sequence
  Description of Artificial Sequence: Synthetic oligonucleotide
cuuuucucugggcaaagga

SEQ ID NO: 3017811 - RNA, 19 nt, Artificial Sequence
  Description of Artificial Sequence: Synthetic oligonucleotide
aauauacaccacacugagu

SEQ ID NO: 3017812 - RNA, 19 nt, Artificial Sequence
  Description of Artificial Sequence: Synthetic oligonucleotide
aaauagagugcaacuggaa

SEQ ID NO: 3017813 - RNA, 19 nt, Artificial Sequence
  Description of Artificial Sequence: Synthetic oligonucleotide
acacugauuuuaaugguga

SEQ ID NO: 3017814 - RNA, 19 nt, Artificial Sequence
  Description of Artificial Sequence: Synthetic oligonucleotide
uucccaacacugauuuuaa

SEQ ID NO: 3017815 - RNA, 19 nt, Artificial Sequence
  Description of Artificial Sequence: Synthetic oligonucleotide
ucccucaaauuauaauuua

SEQ ID NO: 3017816 - RNA, 19 nt, Artificial Sequence
  Description of Artificial Sequence: Synthetic oligonucleotide
cucaaauuauaauuuaauu

SEQ ID NO: 3017817 - RNA, 19 nt, Artificial Sequence
  Description of Artificial Sequence: Synthetic oligonucleotide
cucaaucgugaucuagaac

SEQ ID NO: 3017818 - RNA, 19 nt, Artificial Sequence
  Description of Artificial Sequence: Synthetic oligonucleotide
auacacaccuaagaacuga

SEQ ID NO: 3017819 - RNA, 19 nt, Artificial Sequence
  Description of Artificial Sequence: Synthetic oligonucleotide
agauguucaaaagcauaca

SEQ ID NO: 3017820 - RNA, 19 nt, Artificial Sequence
  Description of Artificial Sequence: Synthetic oligonucleotide
aaggaaguauguugccauu

SEQ ID NO: 3017821 - RNA, 19 nt, Artificial Sequence
  Description of Artificial Sequence: Synthetic oligonucleotide
gugacaaaaggaacaauaa

SEQ ID NO: 3017822 - RNA, 19 nt, Artificial Sequence
  Description of Artificial Sequence: Synthetic oligonucleotide
cuguugaaauauacaccac

SEQ ID NO: 3017823 - RNA, 19 nt, Artificial Sequence
  Description of Artificial Sequence: Synthetic oligonucleotide
aguuggaccucaaucguga

SEQ ID NO: 3017824 - RNA, 19 nt, Artificial Sequence
  Description of Artificial Sequence: Synthetic oligonucleotide
aucguuuagccgucuacau

SEQ ID NO: 3017825 - RNA, 19 nt, Artificial Sequence
  Description of Artificial Sequence: Synthetic oligonucleotide
acaaggaucccuguugaaa

SEQ ID NO: 3017826 - RNA, 19 nt, Artificial Sequence
  Description of Artificial Sequence: Synthetic oligonucleotide
gacauuuuauuggcauaug

SEQ ID NO: 3017827 - RNA, 19 nt, Artificial Sequence
  Description of Artificial Sequence: Synthetic oligonucleotide
cacugauuuuaauggugac

SEQ ID NO: 3017828 - RNA, 19 nt, Artificial Sequence
  Description of Artificial Sequence: Synthetic oligonucleotide
aaggaucccuguugaaaua

SEQ ID NO: 3017829 - RNA, 19 nt, Artificial Sequence
  Description of Artificial Sequence: Synthetic oligonucleotide
acuuacaaggaucccuguu

SEQ ID NO: 3017830 - RNA, 19 nt, Artificial Sequence
  Description of Artificial Sequence: Synthetic oligonucleotide
ugauuuuaauggugacaaa

SEQ ID NO: 3017831 - RNA, 19 nt, Artificial Sequence
  Description of Artificial Sequence: Synthetic oligonucleotide
cccuguugaaauauacacc

SEQ ID NO: 3017832 - RNA, 19 nt, Artificial Sequence
  Description of Artificial Sequence: Synthetic oligonucleotide
cguuuagccgucuacauuc

SEQ ID NO: 3017833 - RNA, 19 nt, Artificial Sequence
  Description of Artificial Sequence: Synthetic oligonucleotide
uuggaccucaaucgugauc

SEQ ID NO: 3017834 - RNA, 19 nt, Artificial Sequence
  Description of Artificial Sequence: Synthetic oligonucleotide
agaacugagucauggccuu

SEQ ID NO: 3017835 - RNA, 19 nt, Artificial Sequence
  Description of Artificial Sequence: Synthetic oligonucleotide
gaccucaaucgugaucuag

SEQ ID NO: 3017836 - RNA, 19 nt, Artificial Sequence
  Description of Artificial Sequence: Synthetic oligonucleotide
accacuuaggacauuuuau

SEQ ID NO: 3017837 - RNA, 19 nt, Artificial Sequence
  Description of Artificial Sequence: Synthetic oligonucleotide
caaaagcauacacaccuaa

SEQ ID NO: 3017838 - RNA, 19 nt, Artificial Sequence
  Description of Artificial Sequence: Synthetic oligonucleotide
ucguuuagccgucuacauu

SEQ ID NO: 3017839 - RNA, 19 nt, Artificial Sequence
  Description of Artificial Sequence: Synthetic oligonucleotide
cauucucaugggguaagag

SEQ ID NO: 3017840 - RNA, 19 nt, Artificial Sequence
  Description of Artificial Sequence: Synthetic oligonucleotide
ggugacaaaaggaacaaua

SEQ ID NO: 3017841 - RNA, 19 nt, Artificial Sequence
  Description of Artificial Sequence: Synthetic oligonucleotide
gacaacuuacaaggauccc

SEQ ID NO: 3017842 - RNA, 19 nt, Artificial Sequence
  Description of Artificial Sequence: Synthetic oligonucleotide
gaguuggaccucaaucgug

SEQ ID NO: 3017843 - RNA, 19 nt, Artificial Sequence
  Description of Artificial Sequence: Synthetic oligonucleotide
cauucauucucauggggua

SEQ ID NO: 3017844 - RNA, 19 nt, Artificial Sequence
  Description of Artificial Sequence: Synthetic oligonucleotide
aggacauuuuauuggcaua

SEQ ID NO: 3017845 - RNA, 19 nt, Artificial Sequence
  Description of Artificial Sequence: Synthetic oligonucleotide
uauuggcauaugacaacuu

SEQ ID NO: 3017846 - RNA, 19 nt, Artificial Sequence
  Description of Artificial Sequence: Synthetic oligonucleotide
guauguugccauuuugagu

SEQ ID NO: 3017847 - RNA, 19 nt, Artificial Sequence
  Description of Artificial Sequence: Synthetic oligonucleotide
accucaaucgugaucuaga

SEQ ID NO: 3017848 - RNA, 19 nt, Artificial Sequence
  Description of Artificial Sequence: Synthetic oligonucleotide
caaaggaaguauguugcca

SEQ ID NO: 3017849 - RNA, 19 nt, Artificial Sequence
  Description of Artificial Sequence: Synthetic oligonucleotide
aauucccaacacugauuuu

SEQ ID NO: 3017850 - RNA, 19 nt, Artificial Sequence
  Description of Artificial Sequence: Synthetic oligonucleotide
uuuagccgucuacauucau

SEQ ID NO: 3017851 - RNA, 19 nt, Artificial Sequence
  Description of Artificial Sequence: Synthetic oligonucleotide
auggugacaaaaggaacaa

SEQ ID NO: 3017852 - RNA, 19 nt, Artificial Sequence
  Description of Artificial Sequence: Synthetic oligonucleotide
ccacacugaguaagaaucg

SEQ ID NO: 3017853 - RNA, 19 nt, Artificial Sequence
  Description of Artificial Sequence: Synthetic oligonucleotide
gcauacacaccuaagaacu

SEQ ID NO: 3017854 - RNA, 19 nt, Artificial Sequence
  Description of Artificial Sequence: Synthetic oligonucleotide
uccuugaaauagagugcaa

SEQ ID NO: 3017855 - RNA, 19 nt, Artificial Sequence
  Description of Artificial Sequence: Synthetic oligonucleotide
guaagaguugucccucaaa

SEQ ID NO: 3017856 - RNA, 19 nt, Artificial Sequence
  Description of Artificial Sequence: Synthetic oligonucleotide
ccuugaaauagagugcaac

SEQ ID NO: 3017857 - RNA, 19 nt, Artificial Sequence
  Description of Artificial Sequence: Synthetic oligonucleotide
auaugacaacuuacaagga

SEQ ID NO: 3017858 - RNA, 19 nt, Artificial Sequence
  Description of Artificial Sequence: Synthetic oligonucleotide
gcaacuggaaaagacuuga

SEQ ID NO: 3017859 - RNA, 19 nt, Artificial Sequence
  Description of Artificial Sequence: Synthetic oligonucleotide
ucauucucaugggguaaga

SEQ ID NO: 3017860 - RNA, 19 nt, Artificial Sequence
  Description of Artificial Sequence: Synthetic oligonucleotide
uuaccacuuaggacauuuu

SEQ ID NO: 3017861 - RNA, 19 nt, Artificial Sequence
  Description of Artificial Sequence: Synthetic oligonucleotide
ugggcaaaggaaguauguu

SEQ ID NO: 3017862 - RNA, 19 nt, Artificial Sequence
  Description of Artificial Sequence: Synthetic oligonucleotide
auucauucucaugggguaa

SEQ ID NO: 3017863 - RNA, 19 nt, Artificial Sequence
  Description of Artificial Sequence: Synthetic oligonucleotide
cauuuugaguuggaccuca

SEQ ID NO: 3017864 - RNA, 19 nt, Artificial Sequence
  Description of Artificial Sequence: Synthetic oligonucleotide
acugagucauggccuucug

SEQ ID NO: 3017865 - RNA, 19 nt, Artificial Sequence
  Description of Artificial Sequence: Synthetic oligonucleotide
aagaaucguuuagccgucu

SEQ ID NO: 3017866 - RNA, 19 nt, Artificial Sequence
  Description of Artificial Sequence: Synthetic oligonucleotide
ggaacaauaacaauuccuu

SEQ ID NO: 3017867 - RNA, 19 nt, Artificial Sequence
  Description of Artificial Sequence: Synthetic oligonucleotide
ggcauaugacaacuuacaa

SEQ ID NO: 3017868 - RNA, 19 nt, Artificial Sequence
  Description of Artificial Sequence: Synthetic oligonucleotide
auguugccauuuugaguug

SEQ ID NO: 3017869 - RNA, 19 nt, Artificial Sequence
  Description of Artificial Sequence: Synthetic oligonucleotide
aggaucccuguugaaauau

SEQ ID NO: 3017870 - RNA, 19 nt, Artificial Sequence
  Description of Artificial Sequence: Synthetic oligonucleotide
caaggaucccuguugaaau

SEQ ID NO: 3017871 - RNA, 19 nt, Artificial Sequence
  Description of Artificial Sequence: Synthetic oligonucleotide
gccgucuacauucauucuc

SEQ ID NO: 3017872 - RNA, 19 nt, Artificial Sequence
  Description of Artificial Sequence: Synthetic oligonucleotide
caauaacaauuccuugaaa

SEQ ID NO: 3017873 - RNA, 19 nt, Artificial Sequence
  Description of Artificial Sequence: Synthetic oligonucleotide
agaaucguuuagccgucua

SEQ ID NO: 3017874 - RNA, 19 nt, Artificial Sequence
  Description of Artificial Sequence: Synthetic oligonucleotide
aggaaguauguugccauuu

SEQ ID NO: 3017875 - RNA, 19 nt, Artificial Sequence
  Description of Artificial Sequence: Synthetic oligonucleotide
ucaugggguaagaguuguc

SEQ ID NO: 3017876 - RNA, 19 nt, Artificial Sequence
  Description of Artificial Sequence: Synthetic oligonucleotide
agagugcaacuggaaaaga

SEQ ID NO: 3017877 - RNA, 19 nt, Artificial Sequence
  Description of Artificial Sequence: Synthetic oligonucleotide
ucucugggcaaaggaagua

SEQ ID NO: 3017878 - RNA, 19 nt, Artificial Sequence
  Description of Artificial Sequence: Synthetic oligonucleotide
cacugaguaagaaucguuu

SEQ ID NO: 3017879 - RNA, 19 nt, Artificial Sequence
  Description of Artificial Sequence: Synthetic oligonucleotide
agccgucuacauucauucu

SEQ ID NO: 3017880 - RNA, 19 nt, Artificial Sequence
  Description of Artificial Sequence: Synthetic oligonucleotide
caacacugauuuuaauggu

SEQ ID NO: 3017881 - RNA, 19 nt, Artificial Sequence
  Description of Artificial Sequence: Synthetic oligonucleotide
caaucgugaucuagaacua

SEQ ID NO: 3017882 - RNA, 19 nt, Artificial Sequence
  Description of Artificial Sequence: Synthetic oligonucleotide
ucccaacacugauuuuaau

SEQ ID NO: 3017883 - RNA, 19 nt, Artificial Sequence
  Description of Artificial Sequence: Synthetic oligonucleotide
uggugacaaaaggaacaau

SEQ ID NO: 3017884 - RNA, 19 nt, Artificial Sequence
  Description of Artificial Sequence: Synthetic oligonucleotide
acacugaguaagaaucguu

SEQ ID NO: 3017885 - RNA, 19 nt, Artificial Sequence
  Description of Artificial Sequence: Synthetic oligonucleotide
caauuccuugaaauagagu

SEQ ID NO: 3017886 - RNA, 19 nt, Artificial Sequence
  Description of Artificial Sequence: Synthetic oligonucleotide
cugggcaaaggaaguaugu

SEQ ID NO: 3017887 - RNA, 19 nt, Artificial Sequence
  Description of Artificial Sequence: Synthetic oligonucleotide
acacaccuaagaacugagu

SEQ ID NO: 3017888 - RNA, 19 nt, Artificial Sequence
  Description of Artificial Sequence: Synthetic oligonucleotide
aguugucccucaaauuaua

SEQ ID NO: 3017889 - RNA, 19 nt, Artificial Sequence
  Description of Artificial Sequence: Synthetic oligonucleotide
ccgucuacauucauucuca

SEQ ID NO: 3017890 - RNA, 19 nt, Artificial Sequence
  Description of Artificial Sequence: Synthetic oligonucleotide
guugccauuuugaguugga

SEQ ID NO: 3017891 - RNA, 19 nt, Artificial Sequence
  Description of Artificial Sequence: Synthetic oligonucleotide
cccucaaauuauaauuuaa

SEQ ID NO: 3017892 - RNA, 19 nt, Artificial Sequence
  Description of Artificial Sequence: Synthetic oligonucleotide
gaguugucccucaaauuau

SEQ ID NO: 3017893 - RNA, 19 nt, Artificial Sequence
  Description of Artificial Sequence: Synthetic oligonucleotide
caccuaagaacugagucau

SEQ ID NO: 3017894 - RNA, 19 nt, Artificial Sequence
  Description of Artificial Sequence: Synthetic oligonucleotide
guuuagccgucuacauuca

SEQ ID NO: 3017895 - RNA, 19 nt, Artificial Sequence
  Description of Artificial Sequence: Synthetic oligonucleotide
cuagaauucuuaagauguu

SEQ ID NO: 3017896 - RNA, 19 nt, Artificial Sequence
  Description of Artificial Sequence: Synthetic oligonucleotide
ccucaaauuauaauuuaau

SEQ ID NO: 3017897 - RNA, 19 nt, Artificial Sequence
  Description of Artificial Sequence: Synthetic oligonucleotide
acaccacacugaguaagaa

SEQ ID NO: 3017898 - RNA, 19 nt, Artificial Sequence
  Description of Artificial Sequence: Synthetic oligonucleotide
gucccucaaauuauaauuu

SEQ ID NO: 3017899 - RNA, 19 nt, Artificial Sequence
  Description of Artificial Sequence: Synthetic oligonucleotide
ggacauuuuauuggcauau

SEQ ID NO: 3017900 - RNA, 19 nt, Artificial Sequence
  Description of Artificial Sequence: Synthetic oligonucleotide
gugcaacuggaaaagacuu

SEQ ID NO: 3017901 - RNA, 19 nt, Artificial Sequence
  Description of Artificial Sequence: Synthetic oligonucleotide
ucauggccuucugugcuuu

SEQ ID NO: 3017902 - RNA, 19 nt, Artificial Sequence
  Description of Artificial Sequence: Synthetic oligonucleotide
gguaagaguugucccucaa

SEQ ID NO: 3017903 - RNA, 19 nt, Artificial Sequence
  Description of Artificial Sequence: Synthetic oligonucleotide
gggguaagaguugucccuc

SEQ ID NO: 3017904 - RNA, 19 nt, Artificial Sequence
  Description of Artificial Sequence: Synthetic oligonucleotide
accuaagaacugagucaug

SEQ ID NO: 3017905 - RNA, 19 nt, Artificial Sequence
  Description of Artificial Sequence: Synthetic oligonucleotide
cacacugaguaagaaucgu

SEQ ID NO: 3017906 - RNA, 19 nt, Artificial Sequence
  Description of Artificial Sequence: Synthetic oligonucleotide
cucaugggguaagaguugu

SEQ ID NO: 3017907 - RNA, 19 nt, Artificial Sequence
  Description of Artificial Sequence: Synthetic oligonucleotide
ggguaagaguugucccuca

SEQ ID NO: 3017908 - RNA, 19 nt, Artificial Sequence
  Description of Artificial Sequence: Synthetic oligonucleotide
ggaaguauguugccauuuu

SEQ ID NO: 3017909 - RNA, 19 nt, Artificial Sequence
  Description of Artificial Sequence: Synthetic oligonucleotide
ccucaaucgugaucuagaa

SEQ ID NO: 3017910 - RNA, 19 nt, Artificial Sequence
  Description of Artificial Sequence: Synthetic oligonucleotide
caacuggaaaagacuugau

SEQ ID NO: 3017911 - RNA, 19 nt, Artificial Sequence
  Description of Artificial Sequence: Synthetic oligonucleotide
ccacuuaggacauuuuauu

SEQ ID NO: 3017912 - RNA, 19 nt, Artificial Sequence
  Description of Artificial Sequence: Synthetic oligonucleotide
cucugggcaaaggaaguau

SEQ ID NO: 3017913 - RNA, 19 nt, Artificial Sequence
  Description of Artificial Sequence: Synthetic oligonucleotide
guuggaccucaaucgugau

SEQ ID NO: 3017914 - RNA, 19 nt, Artificial Sequence
  Description of Artificial Sequence: Synthetic oligonucleotide
ccauuuugaguuggaccuc

SEQ ID NO: 3017915 - RNA, 19 nt, Artificial Sequence
  Description of Artificial Sequence: Synthetic oligonucleotide
gucauggccuucugugcuu

SEQ ID NO: 3017916 - RNA, 19 nt, Artificial Sequence
  Description of Artificial Sequence: Synthetic oligonucleotide
ggaucccuguugaaauaua

SEQ ID NO: 3017917 - RNA, 19 nt, Artificial Sequence
  Description of Artificial Sequence: Synthetic oligonucleotide
ggaccucaaucgugaucua

SEQ ID NO: 3017918 - RNA, 19 nt, Artificial Sequence
  Description of Artificial Sequence: Synthetic oligonucleotide
cauggccuucugugcuuuu

SEQ ID NO: 3017919 - RNA, 19 nt, Artificial Sequence
  Description of Artificial Sequence: Synthetic oligonucleotide
cgucuacauucauucucau

SEQ ID NO: 3017920 - RNA, 19 nt, Artificial Sequence
  Description of Artificial Sequence: Synthetic oligonucleotide
aaucgccccacuuucuucc

SEQ ID NO: 3017921 - RNA, 19 nt, Artificial Sequence
  Description of Artificial Sequence: Synthetic oligonucleotide
aaugccacggccuccuccc

SEQ ID NO: 3017922 - RNA, 19 nt, Artificial Sequence
  Description of Artificial Sequence: Synthetic oligonucleotide
  modified_base (17)..(17): a, c, u, g, unknown or other
ugaacguccggcuggancc

SEQ ID NO: 3017923 - RNA, 19 nt, Artificial Sequence
  Description of Artificial Sequence: Synthetic oligonucleotide
cuuccuuuccaacagugac

SEQ ID NO: 3017924 - RNA, 19 nt, Artificial Sequence
  Description of Artificial Sequence: Synthetic oligonucleotide
uuccuuuccaacagugacc

SEQ ID NO: 3017925 - RNA, 19 nt, Artificial Sequence
  Description of Artificial Sequence: Synthetic oligonucleotide
uccuuuccaacagugaccc

SEQ ID NO: 3017926 - RNA, 19 nt, Artificial Sequence
  Description of Artificial Sequence: Synthetic oligonucleotide
  modified_base (2)..(2): a, c, u, g, unknown or other
anccagucacggcacgagg

SEQ ID NO: 3017927 - RNA, 19 nt, Artificial Sequence
  Description of Artificial Sequence: Synthetic oligonucleotide
gaucuggggaggcugcugg

SEQ ID NO: 3017928 - RNA, 19 nt, Artificial Sequence
  Description of Artificial Sequence: Synthetic oligonucleotide
uugcugaggaccgaucugg

SEQ ID NO: 3017929 - RNA, 19 nt, Artificial Sequence
  Description of Artificial Sequence: Synthetic oligonucleotide
uccuccagcaaugccacgg

SEQ ID NO: 3017930 - RNA, 19 nt, Artificial Sequence
  Description of Artificial Sequence: Synthetic oligonucleotide
  modified_base (11)..(11): a, c, u, g, unknown or other
uccggcugganccagucac

SEQ ID NO: 3017931 - RNA, 19 nt, Artificial Sequence
  Description of Artificial Sequence: Synthetic oligonucleotide
ucuuccuuuccaacaguga

SEQ ID NO: 3017932 - RNA, 19 nt, Artificial Sequence
  Description of Artificial Sequence: Synthetic oligonucleotide
ugaggaccgaucuggggag

SEQ ID NO: 3017933 - RNA, 19 nt, Artificial Sequence
  Description of Artificial Sequence: Synthetic oligonucleotide
uccuucgugugaacguccg

SEQ ID NO: 3017934 - RNA, 19 nt, Artificial Sequence
  Description of Artificial Sequence: Synthetic oligonucleotide
uccgucauaucccggggug

SEQ ID NO: 3017935 - RNA, 19 nt, Artificial Sequence
  Description of Artificial Sequence: Synthetic oligonucleotide
uccagcaaugccacggccu

SEQ ID NO: 3017936 - RNA, 19 nt, Artificial Sequence
  Description of Artificial Sequence: Synthetic oligonucleotide
cuucgugugaacguccggc

SEQ ID NO: 3017937 - RNA, 19 nt, Artificial Sequence
  Description of Artificial Sequence: Synthetic oligonucleotide
agcaucugcuccuucgugu

SEQ ID NO: 3017938 - RNA, 19 nt, Artificial Sequence
  Description of Artificial Sequence: Synthetic oligonucleotide
auugcugaggaccgaucug

SEQ ID NO: 3017939 - RNA, 19 nt, Artificial Sequence
  Description of Artificial Sequence: Synthetic oligonucleotide
  modified_base (6)..(6): a, c, u, g, unknown or other
ugggunucugcggggaggg

SEQ ID NO: 3017940 - RNA, 19 nt, Artificial Sequence
  Description of Artificial Sequence: Synthetic oligonucleotide
  modified_base (7)..(7): a, c, u, g, unknown or other
gcugganccagucacggca

SEQ ID NO: 3017941 - RNA, 19 nt, Artificial Sequence
  Description of Artificial Sequence: Synthetic oligonucleotide
uuucuuccuuuccaacagu

SEQ ID NO: 3017942 - RNA, 19 nt, Artificial Sequence
  Description of Artificial Sequence: Synthetic oligonucleotide
  modified_base (11)..(11): a, c, u, g, unknown or other
aggccugggunucugcggg

SEQ ID NO: 3017943 - RNA, 19 nt, Artificial Sequence
  Description of Artificial Sequence: Synthetic oligonucleotide
ugcugaggaccgaucuggg

SEQ ID NO: 3017944 - RNA, 19 nt, Artificial Sequence
  Description of Artificial Sequence: Synthetic oligonucleotide
  modified_base (5)..(5): a, c, u, g, unknown or other
ugganccagucacggcacg

SEQ ID NO: 3017945 - RNA, 19 nt, Artificial Sequence
  Description of Artificial Sequence: Synthetic oligonucleotide
agccuuccgucauaucccg

SEQ ID NO: 3017946 - RNA, 19 nt, Artificial Sequence
  Description of Artificial Sequence: Synthetic oligonucleotide
cugaggaccgaucugggga

SEQ ID NO: 3017947 - RNA, 19 nt, Artificial Sequence
  Description of Artificial Sequence: Synthetic oligonucleotide
gagccuuccgucauauccc

SEQ ID NO: 3017948 - RNA, 19 nt, Artificial Sequence
  Description of Artificial Sequence: Synthetic oligonucleotide
ugcuccuucgugugaacgu

SEQ ID NO: 3017949 - RNA, 19 nt, Artificial Sequence
  Description of Artificial Sequence: Synthetic oligonucleotide
uucgugugaacguccggcu

SEQ ID NO: 3017950 - RNA, 19 nt, Artificial Sequence
  Description of Artificial Sequence: Synthetic oligonucleotide
  modified_base (3)..(3): a, c, u, g, unknown or other
ganccagucacggcacgag

SEQ ID NO: 3017951 - RNA, 19 nt, Artificial Sequence
  Description of Artificial Sequence: Synthetic oligonucleotide
ucgugugaacguccggcug

SEQ ID NO: 3017952 - RNA, 19 nt, Artificial Sequence
  Description of Artificial Sequence: Synthetic oligonucleotide
  modified_base (7)..(7): a, c, u, g, unknown or other
cugggunucugcggggagg

SEQ ID NO: 3017953 - RNA, 19 nt, Artificial Sequence
  Description of Artificial Sequence: Synthetic oligonucleotide
  modified_base (18)..(18): a, c, u, g, unknown or other
gugaacguccggcugganc

SEQ ID NO: 3017954 - RNA, 19 nt, Artificial Sequence
  Description of Artificial Sequence: Synthetic oligonucleotide
cuuccgucauaucccgggg

SEQ ID NO: 3017955 - RNA, 19 nt, Artificial Sequence
  Description of Artificial Sequence: Synthetic oligonucleotide
ugcuuguaggggcgcgccg

SEQ ID NO: 3017956 - RNA, 19 nt, Artificial Sequence
  Description of Artificial Sequence: Synthetic oligonucleotide
cuccuccccacucuggggc

SEQ ID NO: 3017957 - RNA, 19 nt, Artificial Sequence
  Description of Artificial Sequence: Synthetic oligonucleotide
agucacggcacgagggcgc

SEQ ID NO: 3017958 - RNA, 19 nt, Artificial Sequence
  Description of Artificial Sequence: Synthetic oligonucleotide
ucccggggugcccucauug

SEQ ID NO: 3017959 - RNA, 19 nt, Artificial Sequence
  Description of Artificial Sequence: Synthetic oligonucleotide
cagagcuccuccagcaaug

SEQ ID NO: 3017960 - RNA, 19 nt, Artificial Sequence
  Description of Artificial Sequence: Synthetic oligonucleotide
cgagccuuccgucauaucc

SEQ ID NO: 3017961 - RNA, 19 nt, Artificial Sequence
  Description of Artificial Sequence: Synthetic oligonucleotide
uuccgucauaucccggggu

SEQ ID NO: 3017962 - RNA, 19 nt, Artificial Sequence
  Description of Artificial Sequence: Synthetic oligonucleotide
gaaucgccccacuuucuuc

SEQ ID NO: 3017963 - RNA, 19 nt, Artificial Sequence
  Description of Artificial Sequence: Synthetic oligonucleotide
ugcggggagggcacucagg

SEQ ID NO: 3017964 - RNA, 19 nt, Artificial Sequence
  Description of Artificial Sequence: Synthetic oligonucleotide
ggggagggcacucaggaac

SEQ ID NO: 3017965 - RNA, 19 nt, Artificial Sequence
  Description of Artificial Sequence: Synthetic oligonucleotide
  modified_base (12)..(12): a, c, u, g, unknown or other
caggccugggunucugcgg

SEQ ID NO: 3017966 - RNA, 19 nt, Artificial Sequence
  Description of Artificial Sequence: Synthetic oligonucleotide
gucccuacgggaaucgccc

SEQ ID NO: 3017967 - RNA, 19 nt, Artificial Sequence
  Description of Artificial Sequence: Synthetic oligonucleotide
gacgccccggucccuacgg

SEQ ID NO: 3017968 - RNA, 19 nt, Artificial Sequence
  Description of Artificial Sequence: Synthetic oligonucleotide
gagggcgcggagcagcccc

SEQ ID NO: 3017969 - RNA, 19 nt, Artificial Sequence
  Description of Artificial Sequence: Synthetic oligonucleotide
agccccagggcccucccgg

SEQ ID NO: 3017970 - RNA, 19 nt, Artificial Sequence
  Description of Artificial Sequence: Synthetic oligonucleotide
  modified_base (6)..(6): a, c, u, g, unknown or other
cugganccagucacggcac

SEQ ID NO: 3017971 - RNA, 19 nt, Artificial Sequence
  Description of Artificial Sequence: Synthetic oligonucleotide
ucauugcugaggaccgauc

SEQ ID NO: 3017972 - RNA, 19 nt, Artificial Sequence
  Description of Artificial Sequence: Synthetic oligonucleotide
ccuuccgucauaucccggg

SEQ ID NO: 3017973 - RNA, 19 nt, Artificial Sequence
  Description of Artificial Sequence: Synthetic oligonucleotide
cucccggaggcccugcugc

SEQ ID NO: 3017974 - RNA, 19 nt, Artificial Sequence
  Description of Artificial Sequence: Synthetic oligonucleotide
cuccuucgugugaacgucc

SEQ ID NO: 3017975 - RNA, 19 nt, Artificial Sequence
  Description of Artificial Sequence: Synthetic oligonucleotide
aggaccgaucuggggaggc

SEQ ID NO: 3017976 - RNA, 19 nt, Artificial Sequence
  Description of Artificial Sequence: Synthetic oligonucleotide
uguaggggcgcgccgccgu

SEQ ID NO: 3017977 - RNA, 19 nt, Artificial Sequence
  Description of Artificial Sequence: Synthetic oligonucleotide
ucauaucccggggugcccu

SEQ ID NO: 3017978 - RNA, 19 nt, Artificial Sequence
  Description of Artificial Sequence: Synthetic oligonucleotide
cugcuccuucgugugaacg

SEQ ID NO: 3017979 - RNA, 19 nt, Artificial Sequence
  Description of Artificial Sequence: Synthetic oligonucleotide
accgaucuggggaggcugc

SEQ ID NO: 3017980 - RNA, 19 nt, Artificial Sequence
  Description of Artificial Sequence: Synthetic oligonucleotide
acgggaaucgccccacuuu

SEQ ID NO: 3017981 - RNA, 19 nt, Artificial Sequence
  Description of Artificial Sequence: Synthetic oligonucleotide
cccucauugcugaggaccg

SEQ ID NO: 3017982 - RNA, 19 nt, Artificial Sequence
  Description of Artificial Sequence: Synthetic oligonucleotide
cuuguaggggcgcgccgcc

SEQ ID NO: 3017983 - RNA, 19 nt, Artificial Sequence
  Description of Artificial Sequence: Synthetic oligonucleotide
agggcccucccggaggccc

SEQ ID NO: 3017984 - RNA, 19 nt, Artificial Sequence
  Description of Artificial Sequence: Synthetic oligonucleotide
gaccgaucuggggaggcug

SEQ ID NO: 3017985 - RNA, 19 nt, Artificial Sequence
  Description of Artificial Sequence: Synthetic oligonucleotide
uccugcuuguaggggcgcg

SEQ ID NO: 3017986 - RNA, 19 nt, Artificial Sequence
  Description of Artificial Sequence: Synthetic oligonucleotide
gagggcacucaggaacugc

SEQ ID NO: 3017987 - RNA, 19 nt, Artificial Sequence
  Description of Artificial Sequence: Synthetic oligonucleotide
gugcccucauugcugagga

SEQ ID NO: 3017988 - RNA, 19 nt, Artificial Sequence
  Description of Artificial Sequence: Synthetic oligonucleotide
agcaaugccacggccuccu

SEQ ID NO: 3017989 - RNA, 19 nt, Artificial Sequence
  Description of Artificial Sequence: Synthetic oligonucleotide
guccccgacgccccggucc

SEQ ID NO: 3017990 - RNA, 19 nt, Artificial Sequence
  Description of Artificial Sequence: Synthetic oligonucleotide
gcccucauugcugaggacc

SEQ ID NO: 3017991 - RNA, 19 nt, Artificial Sequence
  Description of Artificial Sequence: Synthetic oligonucleotide
gcugaggaccgaucugggg

SEQ ID NO: 3017992 - RNA, 19 nt, Artificial Sequence
  Description of Artificial Sequence: Synthetic oligonucleotide
cuccagcaaugccacggcc

SEQ ID NO: 3017993 - RNA, 19 nt, Artificial Sequence
  Description of Artificial Sequence: Synthetic oligonucleotide
cagucacggcacgagggcg

SEQ ID NO: 3017994 - RNA, 19 nt, Artificial Sequence
  Description of Artificial Sequence: Synthetic oligonucleotide
uacgggaaucgccccacuu

SEQ ID NO: 3017995 - RNA, 19 nt, Artificial Sequence
  Description of Artificial Sequence: Synthetic oligonucleotide
  modified_base (3)..(3): a, c, u, g, unknown or other
gunucugcggggagggcac

SEQ ID NO: 3017996 - RNA, 19 nt, Artificial Sequence
  Description of Artificial Sequence: Synthetic oligonucleotide
ggugcccucauugcugagg

SEQ ID NO: 3017997 - RNA, 19 nt, Artificial Sequence
  Description of Artificial Sequence: Synthetic oligonucleotide
cauugcugaggaccgaucu

SEQ ID NO: 3017998 - RNA, 19 nt, Artificial Sequence
  Description of Artificial Sequence: Synthetic oligonucleotide
gcaucugcuccuucgugug

SEQ ID NO: 3017999 - RNA, 19 nt, Artificial Sequence
  Description of Artificial Sequence: Synthetic oligonucleotide
  modified_base (4)..(4): a, c, u, g, unknown or other
ggunucugcggggagggca

SEQ ID NO: 3018000 - RNA, 19 nt, Artificial Sequence
  Description of Artificial Sequence: Synthetic oligonucleotide
ggcggcugcacacccaggc

SEQ ID NO: 3018001 - RNA, 19 nt, Artificial Sequence
  Description of Artificial Sequence: Synthetic oligonucleotide
ucccuacgggaaucgcccc

SEQ ID NO: 3018002 - RNA, 19 nt, Artificial Sequence
  Description of Artificial Sequence: Synthetic oligonucleotide
ucugcuccuucgugugaac

SEQ ID NO: 3018003 - RNA, 19 nt, Artificial Sequence
  Description of Artificial Sequence: Synthetic oligonucleotide
agggcacucaggaacugcu

SEQ ID NO: 3018004 - RNA, 19 nt, Artificial Sequence
  Description of Artificial Sequence: Synthetic oligonucleotide
uccuccccacucuggggcc

SEQ ID NO: 3018005 - RNA, 19 nt, Artificial Sequence
  Description of Artificial Sequence: Synthetic oligonucleotide
  modified_base (17)..(17): a, c, u, g, unknown or other
acacccaggccugggunuc

SEQ ID NO: 3018006 - RNA, 19 nt, Artificial Sequence
  Description of Artificial Sequence: Synthetic oligonucleotide
cgugugaacguccggcugg

SEQ ID NO: 3018007 - RNA, 19 nt, Artificial Sequence
  Description of Artificial Sequence: Synthetic oligonucleotide
aggggcgcgccgccguccc

SEQ ID NO: 3018008 - RNA, 19 nt, Artificial Sequence
  Description of Artificial Sequence: Synthetic oligonucleotide
cacgagggcgcggagcagc

SEQ ID NO: 3018009 - RNA, 19 nt, Artificial Sequence
  Description of Artificial Sequence: Synthetic oligonucleotide
augccacggccuccucccc

SEQ ID NO: 3018010 - RNA, 19 nt, Artificial Sequence
  Description of Artificial Sequence: Synthetic oligonucleotide
  modified_base (13)..(13): a, c, u, g, unknown or other
ccaggccugggunucugcg

SEQ ID NO: 3018011 - RNA, 19 nt, Artificial Sequence
  Description of Artificial Sequence: Synthetic oligonucleotide
cagcaucugcuccuucgug

SEQ ID NO: 3018012 - RNA, 19 nt, Artificial Sequence
  Description of Artificial Sequence: Synthetic oligonucleotide
  modified_base (15)..(15): a, c, u, g, unknown or other
aacguccggcugganccag

SEQ ID NO: 3018013 - RNA, 19 nt, Artificial Sequence
  Description of Artificial Sequence: Synthetic oligonucleotide
uuguaggggcgcgccgccg

SEQ ID NO: 3018014 - RNA, 19 nt, Artificial Sequence
  Description of Artificial Sequence: Synthetic oligonucleotide
  modified_base (10)..(10): a, c, u, g, unknown or other
ccggcugganccagucacg

SEQ ID NO: 3018015 - RNA, 19 nt, Artificial Sequence
  Description of Artificial Sequence: Synthetic oligonucleotide
gaggaccgaucuggggagg

SEQ ID NO: 3018016 - RNA, 19 nt, Artificial Sequence
  Description of Artificial Sequence: Synthetic oligonucleotide
  modified_base (16)..(16): a, c, u, g, unknown or other
gaacguccggcuggancca

SEQ ID NO: 3018017 - RNA, 19 nt, Artificial Sequence
  Description of Artificial Sequence: Synthetic oligonucleotide
ucugcggggagggcacuca

SEQ ID NO: 3018018 - RNA, 19 nt, Artificial Sequence
  Description of Artificial Sequence: Synthetic oligonucleotide
cugcuuguaggggcgcgcc

SEQ ID NO: 3018019 - RNA, 19 nt, Artificial Sequence
  Description of Artificial Sequence: Synthetic oligonucleotide
acgagggcgcggagcagcc

SEQ ID NO: 3018020 - RNA, 19 nt, Artificial Sequence
  Description of Artificial Sequence: Synthetic oligonucleotide
ggucccuacgggaaucgcc

SEQ ID NO: 3018021 - RNA, 19 nt, Artificial Sequence
  Description of Artificial Sequence: Synthetic oligonucleotide
  modified_base (10)..(10): a, c, u, g, unknown or other
ggccugggunucugcgggg

SEQ ID NO: 3018022 - RNA, 19 nt, Artificial Sequence
  Description of Artificial Sequence: Synthetic oligonucleotide
ggcgccucuguccccgacg

SEQ ID NO: 3018023 - RNA, 19 nt, Artificial Sequence
  Description of Artificial Sequence: Synthetic oligonucleotide
guccccgccguccccgcgg

SEQ ID NO: 3018024 - RNA, 19 nt, Artificial Sequence
  Description of Artificial Sequence: Synthetic oligonucleotide
gucacggcacgagggcgcg

SEQ ID NO: 3018025 - RNA, 19 nt, Artificial Sequence
  Description of Artificial Sequence: Synthetic oligonucleotide
ccagucacggcacgagggc

SEQ ID NO: 3018026 - RNA, 19 nt, Artificial Sequence
  Description of Artificial Sequence: Synthetic oligonucleotide
ggcacgagggcgcggagca

SEQ ID NO: 3018027 - RNA, 19 nt, Artificial Sequence
  Description of Artificial Sequence: Synthetic oligonucleotide
cccacuuucuuccuuucca

SEQ ID NO: 3018028 - RNA, 19 nt, Artificial Sequence
  Description of Artificial Sequence: Synthetic oligonucleotide
gccucuguccccgacgccc

SEQ ID NO: 3018029 - RNA, 19 nt, Artificial Sequence
  Description of Artificial Sequence: Synthetic oligonucleotide
aucgccccacuuucuuccu

SEQ ID NO: 3018030 - RNA, 19 nt, Artificial Sequence
  Description of Artificial Sequence: Synthetic oligonucleotide
gucauaucccggggugccc

SEQ ID NO: 3018031 - RNA, 19 nt, Artificial Sequence
  Description of Artificial Sequence: Synthetic oligonucleotide
  modified_base (8)..(8): a, c, u, g, unknown or other
ggcugganccagucacggc

SEQ ID NO: 3018032 - RNA, 19 nt, Artificial Sequence
  Description of Artificial Sequence: Synthetic oligonucleotide
uaucccggggugcccucau

SEQ ID NO: 3018033 - RNA, 19 nt, Artificial Sequence
  Description of Artificial Sequence: Synthetic oligonucleotide
gcuuguaggggcgcgccgc

SEQ ID NO: 3018034 - RNA, 19 nt, Artificial Sequence
  Description of Artificial Sequence: Synthetic oligonucleotide
gcggggagggcacucagga

SEQ ID NO: 3018035 - RNA, 19 nt, Artificial Sequence
  Description of Artificial Sequence: Synthetic oligonucleotide
cauaucccggggugcccuc

SEQ ID NO: 3018036 - RNA, 19 nt, Artificial Sequence
  Description of Artificial Sequence: Synthetic oligonucleotide
ucuggggccggcggcugca

SEQ ID NO: 3018037 - RNA, 19 nt, Artificial Sequence
  Description of Artificial Sequence: Synthetic oligonucleotide
acgccccggucccuacggg

SEQ ID NO: 3018038 - RNA, 19 nt, Artificial Sequence
  Description of Artificial Sequence: Synthetic oligonucleotide
cugcggggagggcacucag

SEQ ID NO: 3018039 - RNA, 19 nt, Artificial Sequence
  Description of Artificial Sequence: Synthetic oligonucleotide
ugcccucauugcugaggac

SEQ ID NO: 3018040 - RNA, 19 nt, Artificial Sequence
  Description of Artificial Sequence: Synthetic oligonucleotide
ggccccagagcuccuccag

SEQ ID NO: 3018041 - RNA, 19 nt, Artificial Sequence
  Description of Artificial Sequence: Synthetic oligonucleotide
cagcaaugccacggccucc

SEQ ID NO: 3018042 - RNA, 19 nt, Artificial Sequence
  Description of Artificial Sequence: Synthetic oligonucleotide
ccuccagcaaugccacggc

SEQ ID NO: 3018043 - RNA, 19 nt, Artificial Sequence
  Description of Artificial Sequence: Synthetic oligonucleotide
  modified_base (4)..(4): a, c, u, g, unknown or other
gganccagucacggcacga

SEQ ID NO: 3018044 - RNA, 19 nt, Artificial Sequence
  Description of Artificial Sequence: Synthetic oligonucleotide
ccuucgugugaacguccgg

SEQ ID NO: 3018045 - RNA, 19 nt, Artificial Sequence
  Description of Artificial Sequence: Synthetic oligonucleotide
gcgccucuguccccgacgc

SEQ ID NO: 3018046 - RNA, 19 nt, Artificial Sequence
  Description of Artificial Sequence: Synthetic oligonucleotide
  modified_base (2)..(2): a, c, u, g, unknown or other
unucugcggggagggcacu

SEQ ID NO: 3018047 - RNA, 19 nt, Artificial Sequence
  Description of Artificial Sequence: Synthetic oligonucleotide
ggggugcccucauugcuga

SEQ ID NO: 3018048 - RNA, 19 nt, Artificial Sequence
  Description of Artificial Sequence: Synthetic oligonucleotide
auaucccggggugcccuca

SEQ ID NO: 3018049 - RNA, 19 nt, Artificial Sequence
  Description of Artificial Sequence: Synthetic oligonucleotide
  modified_base (12)..(12): a, c, u, g, unknown or other
guccggcugganccaguca

SEQ ID NO: 3018050 - RNA, 19 nt, Artificial Sequence
  Description of Artificial Sequence: Synthetic oligonucleotide
gcuccuucgugugaacguc

SEQ ID NO: 3018051 - RNA, 19 nt, Artificial Sequence
  Description of Artificial Sequence: Synthetic oligonucleotide
cccacucuggggccggcgg

SEQ ID NO: 3018052 - RNA, 19 nt, Artificial Sequence
  Description of Artificial Sequence: Synthetic oligonucleotide
uggggccggcggcugcaca

SEQ ID NO: 3018053 - RNA, 19 nt, Artificial Sequence
  Description of Artificial Sequence: Synthetic oligonucleotide
gcggcugcacacccaggcc

SEQ ID NO: 3018054 - RNA, 19 nt, Artificial Sequence
  Description of Artificial Sequence: Synthetic oligonucleotide
  modified_base (19)..(19): a, c, u, g, unknown or other
ugugaacguccggcuggan

SEQ ID NO: 3018055 - RNA, 19 nt, Artificial Sequence
  Description of Artificial Sequence: Synthetic oligonucleotide
ucacggcacgagggcgcgg

SEQ ID NO: 3018056 - RNA, 19 nt, Artificial Sequence
  Description of Artificial Sequence: Synthetic oligonucleotide
ccccacuuucuuccuuucc

SEQ ID NO: 3018057 - RNA, 19 nt, Artificial Sequence
  Description of Artificial Sequence: Synthetic oligonucleotide
cuccugcuuguaggggcgc

SEQ ID NO: 3018058 - RNA, 19 nt, Artificial Sequence
  Description of Artificial Sequence: Synthetic oligonucleotide
ucgccccacuuucuuccuu

SEQ ID NO: 3018059 - RNA, 19 nt, Artificial Sequence
  Description of Artificial Sequence: Synthetic oligonucleotide
gcggcgggcgccucugucc

SEQ ID NO: 3018060 - RNA, 19 nt, Artificial Sequence
  Description of Artificial Sequence: Synthetic oligonucleotide
  modified_base (14)..(14): a, c, u, g, unknown or other
cccaggccugggunucugc

SEQ ID NO: 3018061 - RNA, 19 nt, Artificial Sequence
  Description of Artificial Sequence: Synthetic oligonucleotide
uaggggcgcgccgccgucc

SEQ ID NO: 3018062 - RNA, 19 nt, Artificial Sequence
  Description of Artificial Sequence: Synthetic oligonucleotide
cucuggggccggcggcugc

SEQ ID NO: 3018063 - RNA, 19 nt, Artificial Sequence
  Description of Artificial Sequence: Synthetic oligonucleotide
gugugaacguccggcugga

SEQ ID NO: 3018064 - RNA, 19 nt, Artificial Sequence
  Description of Artificial Sequence: Synthetic oligonucleotide
acggcacgagggcgcggag

SEQ ID NO: 3018065 - RNA, 19 nt, Artificial Sequence
  Description of Artificial Sequence: Synthetic oligonucleotide
cgggaaucgccccacuuuc

SEQ ID NO: 3018066 - RNA, 19 nt, Artificial Sequence
  Description of Artificial Sequence: Synthetic oligonucleotide
cgucauaucccggggugcc

SEQ ID NO: 3018067 - RNA, 19 nt, Artificial Sequence
  Description of Artificial Sequence: Synthetic oligonucleotide
cccggggugcccucauugc

SEQ ID NO: 3018068 - RNA, 19 nt, Artificial Sequence
  Description of Artificial Sequence: Synthetic oligonucleotide
  modified_base (8)..(8): a, c, u, g, unknown or other
ccugggunucugcggggag

SEQ ID NO: 3018069 - RNA, 19 nt, Artificial Sequence
  Description of Artificial Sequence: Synthetic oligonucleotide
  modified_base (14)..(14): a, c, u, g, unknown or other
acguccggcugganccagu

SEQ ID NO: 3018070 - RNA, 19 nt, Artificial Sequence
  Description of Artificial Sequence: Synthetic oligonucleotide
ggcugcacacccaggccug

SEQ ID NO: 3018071 - RNA, 19 nt, Artificial Sequence
  Description of Artificial Sequence: Synthetic oligonucleotide
cuccccacucuggggccgg

SEQ ID NO: 3018072 - RNA, 19 nt, Artificial Sequence
  Description of Artificial Sequence: Synthetic oligonucleotide
ggggccggcggcugcacac

SEQ ID NO: 3018073 - RNA, 19 nt, Artificial Sequence
  Description of Artificial Sequence: Synthetic oligonucleotide
  modified_base (15)..(15): a, c, u, g, unknown or other
acccaggccugggunucug

SEQ ID NO: 3018074 - RNA, 19 nt, Artificial Sequence
  Description of Artificial Sequence: Synthetic oligonucleotide
cugcugggccccagagcuc

SEQ ID NO: 3018075 - RNA, 19 nt, Artificial Sequence
  Description of Artificial Sequence: Synthetic oligonucleotide
  modified_base (18)..(18): a, c, u, g, unknown or other
cacacccaggccugggunu

SEQ ID NO: 3018076 - RNA, 19 nt, Artificial Sequence
  Description of Artificial Sequence: Synthetic oligonucleotide
ccuacgggaaucgccccac

SEQ ID NO: 3018077 - RNA, 19 nt, Artificial Sequence
  Description of Artificial Sequence: Synthetic oligonucleotide
ccagggcccucccggaggc

SEQ ID NO: 3018078 - RNA, 19 nt, Artificial Sequence
  Description of Artificial Sequence: Synthetic oligonucleotide
cacggcacgagggcgcgga

SEQ ID NO: 3018079 - RNA, 19 nt, Artificial Sequence
  Description of Artificial Sequence: Synthetic oligonucleotide
ccgucauaucccggggugc

SEQ ID NO: 3018080 - RNA, 19 nt, Artificial Sequence
  Description of Artificial Sequence: Synthetic oligonucleotide
cucauugcugaggaccgau

SEQ ID NO: 3018081 - RNA, 19 nt, Artificial Sequence
  Description of Artificial Sequence: Synthetic oligonucleotide
cggagcagccccagggccc

SEQ ID NO: 3018082 - RNA, 19 nt, Artificial Sequence
  Description of Artificial Sequence: Synthetic oligonucleotide
ccggcggcugcacacccag

SEQ ID NO: 3018083 - RNA, 19 nt, Artificial Sequence
  Description of Artificial Sequence: Synthetic oligonucleotide
ccugcuuguaggggcgcgc

SEQ ID NO: 3018084 - RNA, 19 nt, Artificial Sequence
  Description of Artificial Sequence: Synthetic oligonucleotide
guaggggcgcgccgccguc

SEQ ID NO: 3018085 - RNA, 19 nt, Artificial Sequence
  Description of Artificial Sequence: Synthetic oligonucleotide
ccuuuccaacagugacccc

SEQ ID NO: 3018086 - RNA, 19 nt, Artificial Sequence
  Description of Artificial Sequence: Synthetic oligonucleotide
ggaaucgccccacuuucuu

SEQ ID NO: 3018087 - RNA, 19 nt, Artificial Sequence
  Description of Artificial Sequence: Synthetic oligonucleotide
ccccagagcuccuccagca

SEQ ID NO: 3018088 - RNA, 19 nt, Artificial Sequence
  Description of Artificial Sequence: Synthetic oligonucleotide
ggcgcggagcagccccagg

SEQ ID NO: 3018089 - RNA, 19 nt, Artificial Sequence
  Description of Artificial Sequence: Synthetic oligonucleotide
gccacggccuccuccccac

SEQ ID NO: 3018090 - RNA, 19 nt, Artificial Sequence
  Description of Artificial Sequence: Synthetic oligonucleotide
ggagggcacucaggaacug

SEQ ID NO: 3018091 - RNA, 19 nt, Artificial Sequence
  Description of Artificial Sequence: Synthetic oligonucleotide
ccacucuggggccggcggc

SEQ ID NO: 3018092 - RNA, 19 nt, Artificial Sequence
  Description of Artificial Sequence: Synthetic oligonucleotide
gcgggcgccucuguccccg

SEQ ID NO: 3018093 - RNA, 19 nt, Artificial Sequence
  Description of Artificial Sequence: Synthetic oligonucleotide
  modified_base (19)..(19): a, c, u, g, unknown or other
gcacacccaggccugggun

SEQ ID NO: 3018094 - RNA, 19 nt, Artificial Sequence
  Description of Artificial Sequence: Synthetic oligonucleotide
  modified_base (9)..(9): a, c, u, g, unknown or other
cggcugganccagucacgg

SEQ ID NO: 3018095 - RNA, 19 nt, Artificial Sequence
  Description of Artificial Sequence: Synthetic oligonucleotide
ggggaggcugcugggcccc

SEQ ID NO: 3018096 - RNA, 19 nt, Artificial Sequence
  Description of Artificial Sequence: Synthetic oligonucleotide
gccuuccgucauaucccgg

SEQ ID NO: 3018097 - RNA, 19 nt, Artificial Sequence
  Description of Artificial Sequence: Synthetic oligonucleotide
gggcgcgccgccguccccg

SEQ ID NO: 3018098 - RNA, 19 nt, Artificial Sequence
  Description of Artificial Sequence: Synthetic oligonucleotide
  modified_base (13)..(13): a, c, u, g, unknown or other
cguccggcugganccaguc

SEQ ID NO: 3018099 - RNA, 19 nt, Artificial Sequence
  Description of Artificial Sequence: Synthetic oligonucleotide
ccggucccuacgggaaucg

SEQ ID NO: 3018100 - RNA, 19 nt, Artificial Sequence
  Description of Artificial Sequence: Synthetic oligonucleotide
  modified_base (9)..(9): a, c, u, g, unknown or other
gccugggunucugcgggga

SEQ ID NO: 3018101 - RNA, 19 nt, Artificial Sequence
  Description of Artificial Sequence: Synthetic oligonucleotide
gccguccccgccguccccg

SEQ ID NO: 3018102 - RNA, 19 nt, Artificial Sequence
  Description of Artificial Sequence: Synthetic oligonucleotide
ggccggcggcugcacaccc

SEQ ID NO: 3018103 - RNA, 19 nt, Artificial Sequence
  Description of Artificial Sequence: Synthetic oligonucleotide
gggugcccucauugcugag

SEQ ID NO: 3018104 - RNA, 19 nt, Artificial Sequence
  Description of Artificial Sequence: Synthetic oligonucleotide
gggcacucaggaacugcuc

SEQ ID NO: 3018105 - RNA, 19 nt, Artificial Sequence
  Description of Artificial Sequence: Synthetic oligonucleotide
aucccggggugcccucauu

SEQ ID NO: 3018106 - RNA, 19 nt, Artificial Sequence
  Description of Artificial Sequence: Synthetic oligonucleotide
gccccacuuucuuccuuuc

SEQ ID NO: 3018107 - RNA, 19 nt, Artificial Sequence
  Description of Artificial Sequence: Synthetic oligonucleotide
gggagggcacucaggaacu

SEQ ID NO: 3018108 - RNA, 19 nt, Artificial Sequence
  Description of Artificial Sequence: Synthetic oligonucleotide
cugggccccagagcuccuc

SEQ ID NO: 3018109 - RNA, 19 nt, Artificial Sequence
  Description of Artificial Sequence: Synthetic oligonucleotide
uccccacucuggggccggc

SEQ ID NO: 3018110 - RNA, 19 nt, Artificial Sequence
  Description of Artificial Sequence: Synthetic oligonucleotide
  modified_base (5)..(5): a, c, u, g, unknown or other
gggunucugcggggagggc

SEQ ID NO: 3018111 - RNA, 19 nt, Artificial Sequence
  Description of Artificial Sequence: Synthetic oligonucleotide
gccgccguccccgccgucc

SEQ ID NO: 3018112 - RNA, 19 nt, Artificial Sequence
  Description of Artificial Sequence: Synthetic oligonucleotide
ccucccggaggcccugcug

SEQ ID NO: 3018113 - RNA, 19 nt, Artificial Sequence
  Description of Artificial Sequence: Synthetic oligonucleotide
ccuccccacucuggggccg

SEQ ID NO: 3018114 - RNA, 19 nt, Artificial Sequence
  Description of Artificial Sequence: Synthetic oligonucleotide
gggccccagagcuccucca

SEQ ID NO: 3018115 - RNA, 19 nt, Artificial Sequence
  Description of Artificial Sequence: Synthetic oligonucleotide
agggcgcggagcagcccca

SEQ ID NO: 3018116 - RNA, 19 nt, Artificial Sequence
  Description of Artificial Sequence: Synthetic oligonucleotide
ggaggcugcugggccccag

SEQ ID NO: 3018117 - RNA, 19 nt, Artificial Sequence
  Description of Artificial Sequence: Synthetic oligonucleotide
cccuacgggaaucgcccca

SEQ ID NO: 3018118 - RNA, 19 nt, Artificial Sequence
  Description of Artificial Sequence: Synthetic oligonucleotide
ccagcaucugcuccuucgu

SEQ ID NO: 3018119 - RNA, 19 nt, Artificial Sequence
  Description of Artificial Sequence: Synthetic oligonucleotide
cuacgggaaucgccccacu

SEQ ID NO: 3018120 - RNA, 19 nt, Artificial Sequence
  Description of Artificial Sequence: Synthetic oligonucleotide
gccguccccgcggcgggcg

SEQ ID NO: 3018121 - RNA, 19 nt, Artificial Sequence
  Description of Artificial Sequence: Synthetic oligonucleotide
cagggcccucccggaggcc

SEQ ID NO: 3018122 - RNA, 19 nt, Artificial Sequence
  Description of Artificial Sequence: Synthetic oligonucleotide
cggcgggcgccucuguccc

SEQ ID NO: 3018123 - RNA, 19 nt, Artificial Sequence
  Description of Artificial Sequence: Synthetic oligonucleotide
gggccggcggcugcacacc

SEQ ID NO: 3018124 - RNA, 19 nt, Artificial Sequence
  Description of Artificial Sequence: Synthetic oligonucleotide
ccagagcuccuccagcaau

SEQ ID NO: 3018125 - RNA, 19 nt, Artificial Sequence
  Description of Artificial Sequence: Synthetic oligonucleotide
gggaaucgccccacuuucu

SEQ ID NO: 3018126 - RNA, 19 nt, Artificial Sequence
  Description of Artificial Sequence: Synthetic oligonucleotide
cuggggccggcggcugcac

SEQ ID NO: 3018127 - RNA, 19 nt, Artificial Sequence
  Description of Artificial Sequence: Synthetic oligonucleotide
cacucuggggccggcggcu

SEQ ID NO: 3018128 - RNA, 19 nt, Artificial Sequence
  Description of Artificial Sequence: Synthetic oligonucleotide
ggcgggcgccucugucccc

SEQ ID NO: 3018129 - RNA, 19 nt, Artificial Sequence
  Description of Artificial Sequence: Synthetic oligonucleotide
cccggucccuacgggaauc

SEQ ID NO: 3018130 - RNA, 19 nt, Artificial Sequence
  Description of Artificial Sequence: Synthetic oligonucleotide
cgaucuggggaggcugcug

SEQ ID NO: 3018131 - RNA, 19 nt, Artificial Sequence
  Description of Artificial Sequence: Synthetic oligonucleotide
gcacgagggcgcggagcag

SEQ ID NO: 3018132 - RNA, 19 nt, Artificial Sequence
  Description of Artificial Sequence: Synthetic oligonucleotide
ggagcagccccagggcccu

SEQ ID NO: 3018133 - RNA, 19 nt, Artificial Sequence
  Description of Artificial Sequence: Synthetic oligonucleotide
gccccggucccuacgggaa

SEQ ID NO: 3018134 - RNA, 19 nt, Artificial Sequence
  Description of Artificial Sequence: Synthetic oligonucleotide
cccagagcuccuccagcaa

SEQ ID NO: 3018135 - RNA, 19 nt, Artificial Sequence
  Description of Artificial Sequence: Synthetic oligonucleotide
cgacgccccggucccuacg

SEQ ID NO: 3018136 - RNA, 19 nt, Artificial Sequence
  Description of Artificial Sequence: Synthetic oligonucleotide
ccgagccuuccgucauauc

SEQ ID NO: 3018137 - RNA, 19 nt, Artificial Sequence
  Description of Artificial Sequence: Synthetic oligonucleotide
cuguccccgacgccccggu

SEQ ID NO: 3018138 - RNA, 19 nt, Artificial Sequence
  Description of Artificial Sequence: Synthetic oligonucleotide
  modified_base (16)..(16): a, c, u, g, unknown or other
cacccaggccugggunucu

SEQ ID NO: 3018139 - RNA, 19 nt, Artificial Sequence
  Description of Artificial Sequence: Synthetic oligonucleotide
ccccacucuggggccggcg

SEQ ID NO: 3018140 - RNA, 19 nt, Artificial Sequence
  Description of Artificial Sequence: Synthetic oligonucleotide
gggcgccucuguccccgac

SEQ ID NO: 3018141 - RNA, 19 nt, Artificial Sequence
  Description of Artificial Sequence: Synthetic oligonucleotide
ggaccgaucuggggaggcu

SEQ ID NO: 3018142 - RNA, 19 nt, Artificial Sequence
  Description of Artificial Sequence: Synthetic oligonucleotide
gggcgcggagcagccccag

SEQ ID NO: 3018143 - RNA, 19 nt, Artificial Sequence
  Description of Artificial Sequence: Synthetic oligonucleotide
ccucauugcugaggaccga

SEQ ID NO: 3018144 - RNA, 19 nt, Artificial Sequence
  Description of Artificial Sequence: Synthetic oligonucleotide
ccgacgccccggucccuac

SEQ ID NO: 3018145 - RNA, 19 nt, Artificial Sequence
  Description of Artificial Sequence: Synthetic oligonucleotide
cggcacgagggcgcggagc

SEQ ID NO: 3018146 - RNA, 19 nt, Artificial Sequence
  Description of Artificial Sequence: Synthetic oligonucleotide
cggcugcacacccaggccu

SEQ ID NO: 3018147 - RNA, 19 nt, Artificial Sequence
  Description of Artificial Sequence: Synthetic oligonucleotide
cggucccuacgggaaucgc

SEQ ID NO: 3018148 - RNA, 19 nt, Artificial Sequence
  Description of Artificial Sequence: Synthetic oligonucleotide
ccguccccgccguccccgc

SEQ ID NO: 3018149 - RNA, 19 nt, Artificial Sequence
  Description of Artificial Sequence: Synthetic oligonucleotide
ggcccucccggaggcccug

SEQ ID NO: 3018150 - RNA, 19 nt, Artificial Sequence
  Description of Artificial Sequence: Synthetic oligonucleotide
cgccccggucccuacggga

SEQ ID NO: 3018151 - RNA, 19 nt, Artificial Sequence
  Description of Artificial Sequence: Synthetic oligonucleotide
cgccucuguccccgacgcc

SEQ ID NO: 3018152 - RNA, 19 nt, Artificial Sequence
  Description of Artificial Sequence: Synthetic oligonucleotide
cguccccgccguccccgcg

SEQ ID NO: 3018153 - RNA, 19 nt, Artificial Sequence
  Description of Artificial Sequence: Synthetic oligonucleotide
cccgcggcgggcgccucug

SEQ ID NO: 3018154 - RNA, 19 nt, Artificial Sequence
  Description of Artificial Sequence: Synthetic oligonucleotide
gccggcggcugcacaccca

SEQ ID NO: 3018155 - RNA, 19 nt, Artificial Sequence
  Description of Artificial Sequence: Synthetic oligonucleotide
ccguccccgcggcgggcgc

SEQ ID NO: 3018156 - RNA, 19 nt, Artificial Sequence
  Description of Artificial Sequence: Synthetic oligonucleotide
cgagggcgcggagcagccc

SEQ ID NO: 3018157 - RNA, 19 nt, Artificial Sequence
  Description of Artificial Sequence: Synthetic oligonucleotide
cgcggcgggcgccucuguc

SEQ ID NO: 3018158 - RNA, 19 nt, Artificial Sequence
  Description of Artificial Sequence: Synthetic oligonucleotide
cggggagggcacucaggaa

SEQ ID NO: 3018159 - RNA, 19 nt, Artificial Sequence
  Description of Artificial Sequence: Synthetic oligonucleotide
guccccgcggcgggcgccu

SEQ ID NO: 3018160 - RNA, 19 nt, Artificial Sequence
  Description of Artificial Sequence: Synthetic oligonucleotide
gggaggcugcugggcccca

SEQ ID NO: 3018161 - RNA, 19 nt, Artificial Sequence
  Description of Artificial Sequence: Synthetic oligonucleotide
ccccgccguccccgcggcg

SEQ ID NO: 3018162 - RNA, 19 nt, Artificial Sequence
  Description of Artificial Sequence: Synthetic oligonucleotide
cccgagccuuccgucauau

SEQ ID NO: 3018163 - RNA, 19 nt, Artificial Sequence
  Description of Artificial Sequence: Synthetic oligonucleotide
cgccccacuuucuuccuuu

SEQ ID NO: 3018164 - RNA, 19 nt, Artificial Sequence
  Description of Artificial Sequence: Synthetic oligonucleotide
cguccccgcggcgggcgcc

SEQ ID NO: 3018165 - RNA, 19 nt, Artificial Sequence
  Description of Artificial Sequence: Synthetic oligonucleotide
cgccguccccgccgucccc

SEQ ID NO: 3018166 - RNA, 19 nt, Artificial Sequence
  Description of Artificial Sequence: Synthetic oligonucleotide
ccccgagccuuccgucaua

SEQ ID NO: 3018167 - RNA, 19 nt, Artificial Sequence
  Description of Artificial Sequence: Synthetic oligonucleotide
ccgaucuggggaggcugcu

SEQ ID NO: 3018168 - RNA, 19 nt, Artificial Sequence
  Description of Artificial Sequence: Synthetic oligonucleotide
gggcccucccggaggcccu

SEQ ID NO: 3018169 - RNA, 19 nt, Artificial Sequence
  Description of Artificial Sequence: Synthetic oligonucleotide
cccgacgccccggucccua

SEQ ID NO: 3018170 - RNA, 19 nt, Artificial Sequence
  Description of Artificial Sequence: Synthetic oligonucleotide
ccccggucccuacgggaau

SEQ ID NO: 3018171 - RNA, 19 nt, Artificial Sequence
  Description of Artificial Sequence: Synthetic oligonucleotide
cgccguccccgcggcgggc

SEQ ID NO: 3018172 - RNA, 19 nt, Artificial Sequence
  Description of Artificial Sequence: Synthetic oligonucleotide
cccucccggaggcccugcu

SEQ ID NO: 3018173 - RNA, 19 nt, Artificial Sequence
  Description of Artificial Sequence: Synthetic oligonucleotide
ccacggccuccuccccacu

SEQ ID NO: 3018174 - RNA, 19 nt, Artificial Sequence
  Description of Artificial Sequence: Synthetic oligonucleotide
cgggcgccucuguccccga

SEQ ID NO: 3018175 - RNA, 19 nt, Artificial Sequence
  Description of Artificial Sequence: Synthetic oligonucleotide
ccccgcggcgggcgccucu

SEQ ID NO: 3018176 - RNA, 19 nt, Artificial Sequence
  Description of Artificial Sequence: Synthetic oligonucleotide
cgccgccguccccgccguc

SEQ ID NO: 3018177 - RNA, 19 nt, Artificial Sequence
  Description of Artificial Sequence: Synthetic oligonucleotide
ccgcggcgggcgccucugu

SEQ ID NO: 3018178 - RNA, 19 nt, Artificial Sequence
  Description of Artificial Sequence: Synthetic oligonucleotide
  modified_base (1)..(1): a, c, u, g, unknown or other
nccagucacggcacgaggg

SEQ ID NO: 3018179 - RNA, 19 nt, Artificial Sequence
  Description of Artificial Sequence: Synthetic oligonucleotide
  modified_base (1)..(1): a, c, u, g, unknown or other
nucugcggggagggcacuc

SEQ ID NO: 3018180 - RNA, 19 nt, Artificial Sequence
  Description of Artificial Sequence: Synthetic oligonucleotide
auuaauugcaccuaucagc

SEQ ID NO: 3018181 - RNA, 19 nt, Artificial Sequence
  Description of Artificial Sequence: Synthetic oligonucleotide
aaagauuucaauuccugac

SEQ ID NO: 3018182 - RNA, 19 nt, Artificial Sequence
  Description of Artificial Sequence: Synthetic oligonucleotide
aagaaugagaaugacaggc

SEQ ID NO: 3018183 - RNA, 19 nt, Artificial Sequence
  Description of Artificial Sequence: Synthetic oligonucleotide
uaaaguacggauucaaugg

SEQ ID NO: 3018184 - RNA, 19 nt, Artificial Sequence
  Description of Artificial Sequence: Synthetic oligonucleotide
uucuaguuaaaacacaucc

SEQ ID NO: 3018185 - RNA, 19 nt, Artificial Sequence
  Description of Artificial Sequence: Synthetic oligonucleotide
uuuagacuaaagcugauug

SEQ ID NO: 3018186 - RNA, 19 nt, Artificial Sequence
  Description of Artificial Sequence: Synthetic oligonucleotide
aagauuucaauuccugacg

SEQ ID NO: 3018187 - RNA, 19 nt, Artificial Sequence
  Description of Artificial Sequence: Synthetic oligonucleotide
uaaaacacauccaagaaaa

SEQ ID NO: 3018188 - RNA, 19 nt, Artificial Sequence
  Description of Artificial Sequence: Synthetic oligonucleotide
uuuguuugucuuaugaaag

SEQ ID NO: 3018189 - RNA, 19 nt, Artificial Sequence
  Description of Artificial Sequence: Synthetic oligonucleotide
auuaccaagaaugagaaug

SEQ ID NO: 3018190 - RNA, 19 nt, Artificial Sequence
  Description of Artificial Sequence: Synthetic oligonucleotide
auaaagacauaauuaauug

SEQ ID NO: 3018191 - RNA, 19 nt, Artificial Sequence
  Description of Artificial Sequence: Synthetic oligonucleotide
uuagcuaccacuuagggua

SEQ ID NO: 3018192 - RNA, 19 nt, Artificial Sequence
  Description of Artificial Sequence: Synthetic oligonucleotide
aauuaauugcaccuaucag

SEQ ID NO: 3018193 - RNA, 19 nt, Artificial Sequence
  Description of Artificial Sequence: Synthetic oligonucleotide
uacaaggccauuuucaucc

SEQ ID NO: 3018194 - RNA, 19 nt, Artificial Sequence
  Description of Artificial Sequence: Synthetic oligonucleotide
agacauaauuaauugcacc

SEQ ID NO: 3018195 - RNA, 19 nt, Artificial Sequence
  Description of Artificial Sequence: Synthetic oligonucleotide
uuaaaguacggauucaaug

SEQ ID NO: 3018196 - RNA, 19 nt, Artificial Sequence
  Description of Artificial Sequence: Synthetic oligonucleotide
aaagacauaauuaauugca

SEQ ID NO: 3018197 - RNA, 19 nt, Artificial Sequence
  Description of Artificial Sequence: Synthetic oligonucleotide
auuuucaucccugugaugg

SEQ ID NO: 3018198 - RNA, 19 nt, Artificial Sequence
  Description of Artificial Sequence: Synthetic oligonucleotide
uaauuaauugcaccuauca

SEQ ID NO: 3018199 - RNA, 19 nt, Artificial Sequence
  Description of Artificial Sequence: Synthetic oligonucleotide
aauugcaccuaucagcuug

SEQ ID NO: 3018200 - RNA, 19 nt, Artificial Sequence
  Description of Artificial Sequence: Synthetic oligonucleotide
uuccugacggucaaaaugg

SEQ ID NO: 3018201 - RNA, 19 nt, Artificial Sequence
  Description of Artificial Sequence: Synthetic oligonucleotide
uuaauugcaccuaucagcu

SEQ ID NO: 3018202 - RNA, 19 nt, Artificial Sequence
  Description of Artificial Sequence: Synthetic oligonucleotide
aguuaaaacacauccaaga

SEQ ID NO: 3018203 - RNA, 19 nt, Artificial Sequence
  Description of Artificial Sequence: Synthetic oligonucleotide
uucuguucuaguuaaaaca

SEQ ID NO: 3018204 - RNA, 19 nt, Artificial Sequence
  Description of Artificial Sequence: Synthetic oligonucleotide
aggacuuuagacuaaagcu

SEQ ID NO: 3018205 - RNA, 19 nt, Artificial Sequence
  Description of Artificial Sequence: Synthetic oligonucleotide
aaugguaguuuccuuuagg

SEQ ID NO: 3018206 - RNA, 19 nt, Artificial Sequence
  Description of Artificial Sequence: Synthetic oligonucleotide
aacuuuagcuaccacuuag

SEQ ID NO: 3018207 - RNA, 19 nt, Artificial Sequence
  Description of Artificial Sequence: Synthetic oligonucleotide
uaaagacauaauuaauugc

SEQ ID NO: 3018208 - RNA, 19 nt, Artificial Sequence
  Description of Artificial Sequence: Synthetic oligonucleotide
uaugaaagcacugucagac

SEQ ID NO: 3018209 - RNA, 19 nt, Artificial Sequence
  Description of Artificial Sequence: Synthetic oligonucleotide
ucuguucuaguuaaaacac

SEQ ID NO: 3018210 - RNA, 19 nt, Artificial Sequence
  Description of Artificial Sequence: Synthetic oligonucleotide
gauugggagauuuuguuug

SEQ ID NO: 3018211 - RNA, 19 nt, Artificial Sequence
  Description of Artificial Sequence: Synthetic oligonucleotide
uagacuaaagcugauuggg

SEQ ID NO: 3018212 - RNA, 19 nt, Artificial Sequence
  Description of Artificial Sequence: Synthetic oligonucleotide
uaggacuuuagacuaaagc

SEQ ID NO: 3018213 - RNA, 19 nt, Artificial Sequence
  Description of Artificial Sequence: Synthetic oligonucleotide
uuauuaccaagaaugagaa

SEQ ID NO: 3018214 - RNA, 19 nt, Artificial Sequence
  Description of Artificial Sequence: Synthetic oligonucleotide
uaggguaaggcauaaagac

SEQ ID NO: 3018215 - RNA, 19 nt, Artificial Sequence
  Description of Artificial Sequence: Synthetic oligonucleotide
uuuuguuugucuuaugaaa

SEQ ID NO: 3018216 - RNA, 19 nt, Artificial Sequence
  Description of Artificial Sequence: Synthetic oligonucleotide
uuaaaacacauccaagaaa

SEQ ID NO: 3018217 - RNA, 19 nt, Artificial Sequence
  Description of Artificial Sequence: Synthetic oligonucleotide
acagcaagagaacuuuagc

SEQ ID NO: 3018218 - RNA, 19 nt, Artificial Sequence
  Description of Artificial Sequence: Synthetic oligonucleotide
cuuaggguaaggcauaaag

SEQ ID NO: 3018219 - RNA, 19 nt, Artificial Sequence
  Description of Artificial Sequence: Synthetic oligonucleotide
cuuaugaaagcacugucag

SEQ ID NO: 3018220 - RNA, 19 nt, Artificial Sequence
  Description of Artificial Sequence: Synthetic oligonucleotide
agauuucaauuccugacgg

SEQ ID NO: 3018221 - RNA, 19 nt, Artificial Sequence
  Description of Artificial Sequence: Synthetic oligonucleotide
aaggcauaaagacauaauu

SEQ ID NO: 3018222 - RNA, 19 nt, Artificial Sequence
  Description of Artificial Sequence: Synthetic oligonucleotide
ucuuaugaaagcacuguca

SEQ ID NO: 3018223 - RNA, 19 nt, Artificial Sequence
  Description of Artificial Sequence: Synthetic oligonucleotide
uuugucuuaugaaagcacu

SEQ ID NO: 3018224 - RNA, 19 nt, Artificial Sequence
  Description of Artificial Sequence: Synthetic oligonucleotide
cugacggucaaaaugguag

SEQ ID NO: 3018225 - RNA, 19 nt, Artificial Sequence
  Description of Artificial Sequence: Synthetic oligonucleotide
uuaggguaaggcauaaaga

SEQ ID NO: 3018226 - RNA, 19 nt, Artificial Sequence
  Description of Artificial Sequence: Synthetic oligonucleotide
uccuuuaggacuuuagacu

SEQ ID NO: 3018227 - RNA, 19 nt, Artificial Sequence
  Description of Artificial Sequence: Synthetic oligonucleotide
aagacauaauuaauugcac

SEQ ID NO: 3018228 - RNA, 19 nt, Artificial Sequence
  Description of Artificial Sequence: Synthetic oligonucleotide
gauuuuguuugucuuauga

SEQ ID NO: 3018229 - RNA, 19 nt, Artificial Sequence
  Description of Artificial Sequence: Synthetic oligonucleotide
gacuaaagcugauugggag

SEQ ID NO: 3018230 - RNA, 19 nt, Artificial Sequence
  Description of Artificial Sequence: Synthetic oligonucleotide
auuccugacggucaaaaug

SEQ ID NO: 3018231 - RNA, 19 nt, Artificial Sequence
  Description of Artificial Sequence: Synthetic oligonucleotide
uguucuaguuaaaacacau

SEQ ID NO: 3018232 - RNA, 19 nt, Artificial Sequence
  Description of Artificial Sequence: Synthetic oligonucleotide
uaaagauuucaauuccuga

SEQ ID NO: 3018233 - RNA, 19 nt, Artificial Sequence
  Description of Artificial Sequence: Synthetic oligonucleotide
uaguuaaaacacauccaag

SEQ ID NO: 3018234 - RNA, 19 nt, Artificial Sequence
  Description of Artificial Sequence: Synthetic oligonucleotide
aaaguacggauucaauggu

SEQ ID NO: 3018235 - RNA, 19 nt, Artificial Sequence
  Description of Artificial Sequence: Synthetic oligonucleotide
uuaccaagaaugagaauga

SEQ ID NO: 3018236 - RNA, 19 nt, Artificial Sequence
  Description of Artificial Sequence: Synthetic oligonucleotide
auuucaauuccugacgguc

SEQ ID NO: 3018237 - RNA, 19 nt, Artificial Sequence
  Description of Artificial Sequence: Synthetic oligonucleotide
uuuccuuuaggacuuuaga

SEQ ID NO: 3018238 - RNA, 19 nt, Artificial Sequence
  Description of Artificial Sequence: Synthetic oligonucleotide
uuccuuuaggacuuuagac

SEQ ID NO: 3018239 - RNA, 19 nt, Artificial Sequence
  Description of Artificial Sequence: Synthetic oligonucleotide
uuggcuaaagauuucaauu

SEQ ID NO: 3018240 - RNA, 19 nt, Artificial Sequence
  Description of Artificial Sequence: Synthetic oligonucleotide
cuaaagauuucaauuccug

SEQ ID NO: 3018241 - RNA, 19 nt, Artificial Sequence
  Description of Artificial Sequence: Synthetic oligonucleotide
ucagcuuggcuaaagauuu

SEQ ID NO: 3018242 - RNA, 19 nt, Artificial Sequence
  Description of Artificial Sequence: Synthetic oligonucleotide
gaaugagaaugacaggcug

SEQ ID NO: 3018243 - RNA, 19 nt, Artificial Sequence
  Description of Artificial Sequence: Synthetic oligonucleotide
aaaugguaguuuccuuuag

SEQ ID NO: 3018244 - RNA, 19 nt, Artificial Sequence
  Description of Artificial Sequence: Synthetic oligonucleotide
aaaaugguaguuuccuuua

SEQ ID NO: 3018245 - RNA, 19 nt, Artificial Sequence
  Description of Artificial Sequence: Synthetic oligonucleotide
gacauaauuaauugcaccu

SEQ ID NO: 3018246 - RNA, 19 nt, Artificial Sequence
  Description of Artificial Sequence: Synthetic oligonucleotide
uuucaauuccugacgguca

SEQ ID NO: 3018247 - RNA, 19 nt, Artificial Sequence
  Description of Artificial Sequence: Synthetic oligonucleotide
uuuagcuaccacuuagggu

SEQ ID NO: 3018248 - RNA, 19 nt, Artificial Sequence
  Description of Artificial Sequence: Synthetic oligonucleotide
cuuuagcuaccacuuaggg

SEQ ID NO: 3018249 - RNA, 19 nt, Artificial Sequence
  Description of Artificial Sequence: Synthetic oligonucleotide
uuguuugucuuaugaaagc

SEQ ID NO: 3018250 - RNA, 19 nt, Artificial Sequence
  Description of Artificial Sequence: Synthetic oligonucleotide
uggcuaaagauuucaauuc

SEQ ID NO: 3018251 - RNA, 19 nt, Artificial Sequence
  Description of Artificial Sequence: Synthetic oligonucleotide
aaaacagcaagagaacuuu

SEQ ID NO: 3018252 - RNA, 19 nt, Artificial Sequence
  Description of Artificial Sequence: Synthetic oligonucleotide
aacagcaagagaacuuuag

SEQ ID NO: 3018253 - RNA, 19 nt, Artificial Sequence
  Description of Artificial Sequence: Synthetic oligonucleotide
uuuaaaguacggauucaau

SEQ ID NO: 3018254 - RNA, 19 nt, Artificial Sequence
  Description of Artificial Sequence: Synthetic oligonucleotide
augaaagcacugucagacc

SEQ ID NO: 3018255 - RNA, 19 nt, Artificial Sequence
  Description of Artificial Sequence: Synthetic oligonucleotide
uugucuuaugaaagcacug

SEQ ID NO: 3018256 - RNA, 19 nt, Artificial Sequence
  Description of Artificial Sequence: Synthetic oligonucleotide
cuaguuaaaacacauccaa

SEQ ID NO: 3018257 - RNA, 19 nt, Artificial Sequence
  Description of Artificial Sequence: Synthetic oligonucleotide
augguaguuuccuuuagga

SEQ ID NO: 3018258 - RNA, 19 nt, Artificial Sequence
  Description of Artificial Sequence: Synthetic oligonucleotide
uguuugucuuaugaaagca

SEQ ID NO: 3018259 - RNA, 19 nt, Artificial Sequence
  Description of Artificial Sequence: Synthetic oligonucleotide
uuuuaaaguacggauucaa

SEQ ID NO: 3018260 - RNA, 19 nt, Artificial Sequence
  Description of Artificial Sequence: Synthetic oligonucleotide
auuuuguuugucuuaugaa

SEQ ID NO: 3018261 - RNA, 19 nt, Artificial Sequence
  Description of Artificial Sequence: Synthetic oligonucleotide
guuaaaacacauccaagaa

SEQ ID NO: 3018262 - RNA, 19 nt, Artificial Sequence
  Description of Artificial Sequence: Synthetic oligonucleotide
acuaaagcugauugggaga

SEQ ID NO: 3018263 - RNA, 19 nt, Artificial Sequence
  Description of Artificial Sequence: Synthetic oligonucleotide
agcaagagaacuuuagcua

SEQ ID NO: 3018264 - RNA, 19 nt, Artificial Sequence
  Description of Artificial Sequence: Synthetic oligonucleotide
uguacaaggccauuuucau

SEQ ID NO: 3018265 - RNA, 19 nt, Artificial Sequence
  Description of Artificial Sequence: Synthetic oligonucleotide
aaugagaaugacaggcugu

SEQ ID NO: 3018266 - RNA, 19 nt, Artificial Sequence
  Description of Artificial Sequence: Synthetic oligonucleotide
ugacaggcuguacaaggcc

SEQ ID NO: 3018267 - RNA, 19 nt, Artificial Sequence
  Description of Artificial Sequence: Synthetic oligonucleotide
ugucuuaugaaagcacugu

SEQ ID NO: 3018268 - RNA, 19 nt, Artificial Sequence
  Description of Artificial Sequence: Synthetic oligonucleotide
guucuguucuaguuaaaac

SEQ ID NO: 3018269 - RNA, 19 nt, Artificial Sequence
  Description of Artificial Sequence: Synthetic oligonucleotide
uaaggcauaaagacauaau

SEQ ID NO: 3018270 - RNA, 19 nt, Artificial Sequence
  Description of Artificial Sequence: Synthetic oligonucleotide
auaauuaauugcaccuauc

SEQ ID NO: 3018271 - RNA, 19 nt, Artificial Sequence
  Description of Artificial Sequence: Synthetic oligonucleotide
aaagcugauugggagauuu

SEQ ID NO: 3018272 - RNA, 19 nt, Artificial Sequence
  Description of Artificial Sequence: Synthetic oligonucleotide
uaccacuuaggguaaggca

SEQ ID NO: 3018273 - RNA, 19 nt, Artificial Sequence
  Description of Artificial Sequence: Synthetic oligonucleotide
uuaugaaagcacugucaga

SEQ ID NO: 3018274 - RNA, 19 nt, Artificial Sequence
  Description of Artificial Sequence: Synthetic oligonucleotide
gagaacuuuagcuaccacu

SEQ ID NO: 3018275 - RNA, 19 nt, Artificial Sequence
  Description of Artificial Sequence: Synthetic oligonucleotide
gacuuuagacuaaagcuga

SEQ ID NO: 3018276 - RNA, 19 nt, Artificial Sequence
  Description of Artificial Sequence: Synthetic oligonucleotide
caagagaacuuuagcuacc

SEQ ID NO: 3018277 - RNA, 19 nt, Artificial Sequence
  Description of Artificial Sequence: Synthetic oligonucleotide
uaucagcuuggcuaaagau

SEQ ID NO: 3018278 - RNA, 19 nt, Artificial Sequence
  Description of Artificial Sequence: Synthetic oligonucleotide
cauaaagacauaauuaauu

SEQ ID NO: 3018279 - RNA, 19 nt, Artificial Sequence
  Description of Artificial Sequence: Synthetic oligonucleotide
ugguaguuuccuuuaggac

SEQ ID NO: 3018280 - RNA, 19 nt, Artificial Sequence
  Description of Artificial Sequence: Synthetic oligonucleotide
ugggagauuuuguuugucu

SEQ ID NO: 3018281 - RNA, 19 nt, Artificial Sequence
  Description of Artificial Sequence: Synthetic oligonucleotide
ucaucccugugauggaugc

SEQ ID NO: 3018282 - RNA, 19 nt, Artificial Sequence
  Description of Artificial Sequence: Synthetic oligonucleotide
aagagaacuuuagcuacca

SEQ ID NO: 3018283 - RNA, 19 nt, Artificial Sequence
  Description of Artificial Sequence: Synthetic oligonucleotide
ggcuaaagauuucaauucc

SEQ ID NO: 3018284 - RNA, 19 nt, Artificial Sequence
  Description of Artificial Sequence: Synthetic oligonucleotide
agagaacuuuagcuaccac

SEQ ID NO: 3018285 - RNA, 19 nt, Artificial Sequence
  Description of Artificial Sequence: Synthetic oligonucleotide
aauuccugacggucaaaau

SEQ ID NO: 3018286 - RNA, 19 nt, Artificial Sequence
  Description of Artificial Sequence: Synthetic oligonucleotide
acuuuagcuaccacuuagg

SEQ ID NO: 3018287 - RNA, 19 nt, Artificial Sequence
  Description of Artificial Sequence: Synthetic oligonucleotide
agaacuuuagcuaccacuu

SEQ ID NO: 3018288 - RNA, 19 nt, Artificial Sequence
  Description of Artificial Sequence: Synthetic oligonucleotide
gguaguuuccuuuaggacu

SEQ ID NO: 3018289 - RNA, 19 nt, Artificial Sequence
  Description of Artificial Sequence: Synthetic oligonucleotide
ugugauggaugcugugccc

SEQ ID NO: 3018290 - RNA, 19 nt, Artificial Sequence
  Description of Artificial Sequence: Synthetic oligonucleotide
uacggauucaaugguuuug

SEQ ID NO: 3018291 - RNA, 19 nt, Artificial Sequence
  Description of Artificial Sequence: Synthetic oligonucleotide
uucaauuccugacggucaa

SEQ ID NO: 3018292 - RNA, 19 nt, Artificial Sequence
  Description of Artificial Sequence: Synthetic oligonucleotide
ugauggaugcugugccccg

SEQ ID NO: 3018293 - RNA, 19 nt, Artificial Sequence
  Description of Artificial Sequence: Synthetic oligonucleotide
cuguacaaggccauuuuca

SEQ ID NO: 3018294 - RNA, 19 nt, Artificial Sequence
  Description of Artificial Sequence: Synthetic oligonucleotide
gcaagagaacuuuagcuac

SEQ ID NO: 3018295 - RNA, 19 nt, Artificial Sequence
  Description of Artificial Sequence: Synthetic oligonucleotide
uucaucccugugauggaug

SEQ ID NO: 3018296 - RNA, 19 nt, Artificial Sequence
  Description of Artificial Sequence: Synthetic oligonucleotide
uuuaggacuuuagacuaaa

SEQ ID NO: 3018297 - RNA, 19 nt, Artificial Sequence
  Description of Artificial Sequence: Synthetic oligonucleotide
aaggccauuuucaucccug

SEQ ID NO: 3018298 - RNA, 19 nt, Artificial Sequence
  Description of Artificial Sequence: Synthetic oligonucleotide
ugacggucaaaaugguagu

SEQ ID NO: 3018299 - RNA, 19 nt, Artificial Sequence
  Description of Artificial Sequence: Synthetic oligonucleotide
guuuccuuuaggacuuuag

SEQ ID NO: 3018300 - RNA, 19 nt, Artificial Sequence
  Description of Artificial Sequence: Synthetic oligonucleotide
ucaaaaugguaguuuccuu

SEQ ID NO: 3018301 - RNA, 19 nt, Artificial Sequence
  Description of Artificial Sequence: Synthetic oligonucleotide
guuugucuuaugaaagcac

SEQ ID NO: 3018302 - RNA, 19 nt, Artificial Sequence
  Description of Artificial Sequence: Synthetic oligonucleotide
auugggagauuuuguuugu

SEQ ID NO: 3018303 - RNA, 19 nt, Artificial Sequence
  Description of Artificial Sequence: Synthetic oligonucleotide
uuuucaucccugugaugga

SEQ ID NO: 3018304 - RNA, 19 nt, Artificial Sequence
  Description of Artificial Sequence: Synthetic oligonucleotide
accacuuaggguaaggcau

SEQ ID NO: 3018305 - RNA, 19 nt, Artificial Sequence
  Description of Artificial Sequence: Synthetic oligonucleotide
aggcauaaagacauaauua

SEQ ID NO: 3018306 - RNA, 19 nt, Artificial Sequence
  Description of Artificial Sequence: Synthetic oligonucleotide
gaugcugugccccgaguuc

SEQ ID NO: 3018307 - RNA, 19 nt, Artificial Sequence
  Description of Artificial Sequence: Synthetic oligonucleotide
aguucuguucuaguuaaaa

SEQ ID NO: 3018308 - RNA, 19 nt, Artificial Sequence
  Description of Artificial Sequence: Synthetic oligonucleotide
agaaugagaaugacaggcu

SEQ ID NO: 3018309 - RNA, 19 nt, Artificial Sequence
  Description of Artificial Sequence: Synthetic oligonucleotide
agauuuuguuugucuuaug

SEQ ID NO: 3018310 - RNA, 19 nt, Artificial Sequence
  Description of Artificial Sequence: Synthetic oligonucleotide
cuaccacuuaggguaaggc

SEQ ID NO: 3018311 - RNA, 19 nt, Artificial Sequence
  Description of Artificial Sequence: Synthetic oligonucleotide
ugcaccuaucagcuuggcu

SEQ ID NO: 3018312 - RNA, 19 nt, Artificial Sequence
  Description of Artificial Sequence: Synthetic oligonucleotide
aucccugugauggaugcug

SEQ ID NO: 3018313 - RNA, 19 nt, Artificial Sequence
  Description of Artificial Sequence: Synthetic oligonucleotide
auugcaccuaucagcuugg

SEQ ID NO: 3018314 - RNA, 19 nt, Artificial Sequence
  Description of Artificial Sequence: Synthetic oligonucleotide
acauaauuaauugcaccua

SEQ ID NO: 3018315 - RNA, 19 nt, Artificial Sequence
  Description of Artificial Sequence: Synthetic oligonucleotide
acggauucaaugguuuugu

SEQ ID NO: 3018316 - RNA, 19 nt, Artificial Sequence
  Description of Artificial Sequence: Synthetic oligonucleotide
gcaccuaucagcuuggcua

SEQ ID NO: 3018317 - RNA, 19 nt, Artificial Sequence
  Description of Artificial Sequence: Synthetic oligonucleotide
aucagcuuggcuaaagauu

SEQ ID NO: 3018318 - RNA, 19 nt, Artificial Sequence
  Description of Artificial Sequence: Synthetic oligonucleotide
guaaggcauaaagacauaa

SEQ ID NO: 3018319 - RNA, 19 nt, Artificial Sequence
  Description of Artificial Sequence: Synthetic oligonucleotide
cagcaagagaacuuuagcu

SEQ ID NO: 3018320 - RNA, 19 nt, Artificial Sequence
  Description of Artificial Sequence: Synthetic oligonucleotide
gccauuuucaucccuguga

SEQ ID NO: 3018321 - RNA, 19 nt, Artificial Sequence
  Description of Artificial Sequence: Synthetic oligonucleotide
aggguaaggcauaaagaca

SEQ ID NO: 3018322 - RNA, 19 nt, Artificial Sequence
  Description of Artificial Sequence: Synthetic oligonucleotide
ugugccccgaguucuguuc

SEQ ID NO: 3018323 - RNA, 19 nt, Artificial Sequence
  Description of Artificial Sequence: Synthetic oligonucleotide
cuguucuaguuaaaacaca

SEQ ID NO: 3018324 - RNA, 19 nt, Artificial Sequence
  Description of Artificial Sequence: Synthetic oligonucleotide
guacaaggccauuuucauc

SEQ ID NO: 3018325 - RNA, 19 nt, Artificial Sequence
  Description of Artificial Sequence: Synthetic oligonucleotide
agcuuggcuaaagauuuca

SEQ ID NO: 3018326 - RNA, 19 nt, Artificial Sequence
  Description of Artificial Sequence: Synthetic oligonucleotide
gugauggaugcugugcccc

SEQ ID NO: 3018327 - RNA, 19 nt, Artificial Sequence
  Description of Artificial Sequence: Synthetic oligonucleotide
gucaaaaugguaguuuccu

SEQ ID NO: 3018328 - RNA, 19 nt, Artificial Sequence
  Description of Artificial Sequence: Synthetic oligonucleotide
cauaauuaauugcaccuau

SEQ ID NO: 3018329 - RNA, 19 nt, Artificial Sequence
  Description of Artificial Sequence: Synthetic oligonucleotide
aguacggauucaaugguuu

SEQ ID NO: 3018330 - RNA, 19 nt, Artificial Sequence
  Description of Artificial Sequence: Synthetic oligonucleotide
caaaaugguaguuuccuuu

SEQ ID NO: 3018331 - RNA, 19 nt, Artificial Sequence
  Description of Artificial Sequence: Synthetic oligonucleotide
cauuuucaucccugugaug

SEQ ID NO: 3018332 - RNA, 19 nt, Artificial Sequence
  Description of Artificial Sequence: Synthetic oligonucleotide
cuaucagcuuggcuaaaga

SEQ ID NO: 3018333 - RNA, 19 nt, Artificial Sequence
  Description of Artificial Sequence: Synthetic oligonucleotide
uaccaagaaugagaaugac

SEQ ID NO: 3018334 - RNA, 19 nt, Artificial Sequence
  Description of Artificial Sequence: Synthetic oligonucleotide
guucuaguuaaaacacauc

SEQ ID NO: 3018335 - RNA, 19 nt, Artificial Sequence
  Description of Artificial Sequence: Synthetic oligonucleotide
agacuaaagcugauuggga

SEQ ID NO: 3018336 - RNA, 19 nt, Artificial Sequence
  Description of Artificial Sequence: Synthetic oligonucleotide
aaguacggauucaaugguu

SEQ ID NO: 3018337 - RNA, 19 nt, Artificial Sequence
  Description of Artificial Sequence: Synthetic oligonucleotide
uuucaucccugugauggau

SEQ ID NO: 3018338 - RNA, 19 nt, Artificial Sequence
  Description of Artificial Sequence: Synthetic oligonucleotide
gauuucaauuccugacggu

SEQ ID NO: 3018339 - RNA, 19 nt, Artificial Sequence
  Description of Artificial Sequence: Synthetic oligonucleotide
auggaugcugugccccgag

SEQ ID NO: 3018340 - RNA, 19 nt, Artificial Sequence
  Description of Artificial Sequence: Synthetic oligonucleotide
uccugacggucaaaauggu

SEQ ID NO: 3018341 - RNA, 19 nt, Artificial Sequence
  Description of Artificial Sequence: Synthetic oligonucleotide
augagaaugacaggcugua

SEQ ID NO: 3018342 - RNA, 19 nt, Artificial Sequence
  Description of Artificial Sequence: Synthetic oligonucleotide
ggucaaaaugguaguuucc

SEQ ID NO: 3018343 - RNA, 19 nt, Artificial Sequence
  Description of Artificial Sequence: Synthetic oligonucleotide
gagauuuuguuugucuuau

SEQ ID NO: 3018344 - RNA, 19 nt, Artificial Sequence
  Description of Artificial Sequence: Synthetic oligonucleotide
ugagaaugacaggcuguac

SEQ ID NO: 3018345 - RNA, 19 nt, Artificial Sequence
  Description of Artificial Sequence: Synthetic oligonucleotide
ucccugugauggaugcugu

SEQ ID NO: 3018346 - RNA, 19 nt, Artificial Sequence
  Description of Artificial Sequence: Synthetic oligonucleotide
cuuggcuaaagauuucaau

SEQ ID NO: 3018347 - RNA, 19 nt, Artificial Sequence
  Description of Artificial Sequence: Synthetic oligonucleotide
aggccauuuucaucccugu

SEQ ID NO: 3018348 - RNA, 19 nt, Artificial Sequence
  Description of Artificial Sequence: Synthetic oligonucleotide
gaacuuuagcuaccacuua

SEQ ID NO: 3018349 - RNA, 19 nt, Artificial Sequence
  Description of Artificial Sequence: Synthetic oligonucleotide
aaacagcaagagaacuuua

SEQ ID NO: 3018350 - RNA, 19 nt, Artificial Sequence
  Description of Artificial Sequence: Synthetic oligonucleotide
ggagauuuuguuugucuua

SEQ ID NO: 3018351 - RNA, 19 nt, Artificial Sequence
  Description of Artificial Sequence: Synthetic oligonucleotide
cuuuaggacuuuagacuaa

SEQ ID NO: 3018352 - RNA, 19 nt, Artificial Sequence
  Description of Artificial Sequence: Synthetic oligonucleotide
acggucaaaaugguaguuu

SEQ ID NO: 3018353 - RNA, 19 nt, Artificial Sequence
  Description of Artificial Sequence: Synthetic oligonucleotide
ccuuuaggacuuuagacua

SEQ ID NO: 3018354 - RNA, 19 nt, Artificial Sequence
  Description of Artificial Sequence: Synthetic oligonucleotide
uagcuaccacuuaggguaa

SEQ ID NO: 3018355 - RNA, 19 nt, Artificial Sequence
  Description of Artificial Sequence: Synthetic oligonucleotide
ccugugauggaugcugugc

SEQ ID NO: 3018356 - RNA, 19 nt, Artificial Sequence
  Description of Artificial Sequence: Synthetic oligonucleotide
uugggagauuuuguuuguc

SEQ ID NO: 3018357 - RNA, 19 nt, Artificial Sequence
  Description of Artificial Sequence: Synthetic oligonucleotide
caauuccugacggucaaaa

SEQ ID NO: 3018358 - RNA, 19 nt, Artificial Sequence
  Description of Artificial Sequence: Synthetic oligonucleotide
ugcugugccccgaguucug

SEQ ID NO: 3018359 - RNA, 19 nt, Artificial Sequence
  Description of Artificial Sequence: Synthetic oligonucleotide
augcugugccccgaguucu

SEQ ID NO: 3018360 - RNA, 19 nt, Artificial Sequence
  Description of Artificial Sequence: Synthetic oligonucleotide
gcuaccacuuaggguaagg

SEQ ID NO: 3018361 - RNA, 19 nt, Artificial Sequence
  Description of Artificial Sequence: Synthetic oligonucleotide
gcuguacaaggccauuuuc

SEQ ID NO: 3018362 - RNA, 19 nt, Artificial Sequence
  Description of Artificial Sequence: Synthetic oligonucleotide
caccuaucagcuuggcuaa

SEQ ID NO: 3018363 - RNA, 19 nt, Artificial Sequence
  Description of Artificial Sequence: Synthetic oligonucleotide
uggaugcugugccccgagu

SEQ ID NO: 3018364 - RNA, 19 nt, Artificial Sequence
  Description of Artificial Sequence: Synthetic oligonucleotide
uaauugcaccuaucagcuu

SEQ ID NO: 3018365 - RNA, 19 nt, Artificial Sequence
  Description of Artificial Sequence: Synthetic oligonucleotide
ggguaaggcauaaagacau

SEQ ID NO: 3018366 - RNA, 19 nt, Artificial Sequence
  Description of Artificial Sequence: Synthetic oligonucleotide
cugauugggagauuuuguu

SEQ ID NO: 3018367 - RNA, 19 nt, Artificial Sequence
  Description of Artificial Sequence: Synthetic oligonucleotide
cuaaagcugauugggagau

SEQ ID NO: 3018368 - RNA, 19 nt, Artificial Sequence
  Description of Artificial Sequence: Synthetic oligonucleotide
ucaauuccugacggucaaa

SEQ ID NO: 3018369 - RNA, 19 nt, Artificial Sequence
  Description of Artificial Sequence: Synthetic oligonucleotide
cggucaaaaugguaguuuc

SEQ ID NO: 3018370 - RNA, 19 nt, Artificial Sequence
  Description of Artificial Sequence: Synthetic oligonucleotide
acuuuagacuaaagcugau

SEQ ID NO: 3018371 - RNA, 19 nt, Artificial Sequence
  Description of Artificial Sequence: Synthetic oligonucleotide
ggccauuuucaucccugug

SEQ ID NO: 3018372 - RNA, 19 nt, Artificial Sequence
  Description of Artificial Sequence: Synthetic oligonucleotide
cagcuuggcuaaagauuuc

SEQ ID NO: 3018373 - RNA, 19 nt, Artificial Sequence
  Description of Artificial Sequence: Synthetic oligonucleotide
gauggaugcugugccccga

SEQ ID NO: 3018374 - RNA, 19 nt, Artificial Sequence
  Description of Artificial Sequence: Synthetic oligonucleotide
ccuaucagcuuggcuaaag

SEQ ID NO: 3018375 - RNA, 19 nt, Artificial Sequence
  Description of Artificial Sequence: Synthetic oligonucleotide
gcuaaagauuucaauuccu

SEQ ID NO: 3018376 - RNA, 19 nt, Artificial Sequence
  Description of Artificial Sequence: Synthetic oligonucleotide
uugcaccuaucagcuuggc

SEQ ID NO: 3018377 - RNA, 19 nt, Artificial Sequence
  Description of Artificial Sequence: Synthetic oligonucleotide
aggcuguacaaggccauuu

SEQ ID NO: 3018378 - RNA, 19 nt, Artificial Sequence
  Description of Artificial Sequence: Synthetic oligonucleotide
aguuuccuuuaggacuuua

SEQ ID NO: 3018379 - RNA, 19 nt, Artificial Sequence
  Description of Artificial Sequence: Synthetic oligonucleotide
acuuaggguaaggcauaaa

SEQ ID NO: 3018380 - RNA, 19 nt, Artificial Sequence
  Description of Artificial Sequence: Synthetic oligonucleotide
agcuaccacuuaggguaag

SEQ ID NO: 3018381 - RNA, 19 nt, Artificial Sequence
  Description of Artificial Sequence: Synthetic oligonucleotide
uaaagcugauugggagauu

SEQ ID NO: 3018382 - RNA, 19 nt, Artificial Sequence
  Description of Artificial Sequence: Synthetic oligonucleotide
gcauaaagacauaauuaau

SEQ ID NO: 3018383 - RNA, 19 nt, Artificial Sequence
  Description of Artificial Sequence: Synthetic oligonucleotide
cgaguucuguucuaguuaa

SEQ ID NO: 3018384 - RNA, 19 nt, Artificial Sequence
  Description of Artificial Sequence: Synthetic oligonucleotide
cuuuagacuaaagcugauu

SEQ ID NO: 3018385 - RNA, 19 nt, Artificial Sequence
  Description of Artificial Sequence: Synthetic oligonucleotide
gggagauuuuguuugucuu

SEQ ID NO: 3018386 - RNA, 19 nt, Artificial Sequence
  Description of Artificial Sequence: Synthetic oligonucleotide
guacggauucaaugguuuu

SEQ ID NO: 3018387 - RNA, 19 nt, Artificial Sequence
  Description of Artificial Sequence: Synthetic oligonucleotide
gcugauugggagauuuugu

SEQ ID NO: 3018388 - RNA, 19 nt, Artificial Sequence
  Description of Artificial Sequence: Synthetic oligonucleotide
gaguucuguucuaguuaaa

SEQ ID NO: 3018389 - RNA, 19 nt, Artificial Sequence
  Description of Artificial Sequence: Synthetic oligonucleotide
gacggucaaaaugguaguu

SEQ ID NO: 3018390 - RNA, 19 nt, Artificial Sequence
  Description of Artificial Sequence: Synthetic oligonucleotide
ugccccgaguucuguucua

SEQ ID NO: 3018391 - RNA, 19 nt, Artificial Sequence
  Description of Artificial Sequence: Synthetic oligonucleotide
cacuuaggguaaggcauaa

SEQ ID NO: 3018392 - RNA, 19 nt, Artificial Sequence
  Description of Artificial Sequence: Synthetic oligonucleotide
ccauuuucaucccugugau

SEQ ID NO: 3018393 - RNA, 19 nt, Artificial Sequence
  Description of Artificial Sequence: Synthetic oligonucleotide
caaggccauuuucaucccu

SEQ ID NO: 3018394 - RNA, 19 nt, Artificial Sequence
  Description of Artificial Sequence: Synthetic oligonucleotide
gugccccgaguucuguucu

SEQ ID NO: 3018395 - RNA, 19 nt, Artificial Sequence
  Description of Artificial Sequence: Synthetic oligonucleotide
ggaugcugugccccgaguu

SEQ ID NO: 3018396 - RNA, 19 nt, Artificial Sequence
  Description of Artificial Sequence: Synthetic oligonucleotide
gguaaggcauaaagacaua

SEQ ID NO: 3018397 - RNA, 19 nt, Artificial Sequence
  Description of Artificial Sequence: Synthetic oligonucleotide
ccacuuaggguaaggcaua

SEQ ID NO: 3018398 - RNA, 19 nt, Artificial Sequence
  Description of Artificial Sequence: Synthetic oligonucleotide
ccugacggucaaaauggua

SEQ ID NO: 3018399 - RNA, 19 nt, Artificial Sequence
  Description of Artificial Sequence: Synthetic oligonucleotide
ggcuguacaaggccauuuu

SEQ ID NO: 3018400 - RNA, 19 nt, Artificial Sequence
  Description of Artificial Sequence: Synthetic oligonucleotide
accuaucagcuuggcuaaa

SEQ ID NO: 3018401 - RNA, 19 nt, Artificial Sequence
  Description of Artificial Sequence: Synthetic oligonucleotide
cccgaguucuguucuaguu

SEQ ID NO: 3018402 - RNA, 19 nt, Artificial Sequence
  Description of Artificial Sequence: Synthetic oligonucleotide
caucccugugauggaugcu

SEQ ID NO: 3018403 - RNA, 19 nt, Artificial Sequence
  Description of Artificial Sequence: Synthetic oligonucleotide
cugugccccgaguucuguu

SEQ ID NO: 3018404 - RNA, 19 nt, Artificial Sequence
  Description of Artificial Sequence: Synthetic oligonucleotide
gcugugccccgaguucugu

SEQ ID NO: 3018405 - RNA, 19 nt, Artificial Sequence
  Description of Artificial Sequence: Synthetic oligonucleotide
ccccgaguucuguucuagu

SEQ ID NO: 3018406 - RNA, 19 nt, Artificial Sequence
  Description of Artificial Sequence: Synthetic oligonucleotide
cggauucaaugguuuuguu

SEQ ID NO: 3018407 - RNA, 19 nt, Artificial Sequence
  Description of Artificial Sequence: Synthetic oligonucleotide
uagaucauuaguuagaaca

SEQ ID NO: 3018408 - RNA, 19 nt, Artificial Sequence
  Description of Artificial Sequence: Synthetic oligonucleotide
aaauccacaggccaugccc

SEQ ID NO: 3018409 - RNA, 19 nt, Artificial Sequence
  Description of Artificial Sequence: Synthetic oligonucleotide
aaauugaauucuuugaaca

SEQ ID NO: 3018410 - RNA, 19 nt, Artificial Sequence
  Description of Artificial Sequence: Synthetic oligonucleotide
aauugaauucuuugaacac

SEQ ID NO: 3018411 - RNA, 19 nt, Artificial Sequence
  Description of Artificial Sequence: Synthetic oligonucleotide
uuaguuagaacacaggcaa

SEQ ID NO: 3018412 - RNA, 19 nt, Artificial Sequence
  Description of Artificial Sequence: Synthetic oligonucleotide
aaggccugcucuuuaagcc

SEQ ID NO: 3018413 - RNA, 19 nt, Artificial Sequence
  Description of Artificial Sequence: Synthetic oligonucleotide
auaaggacaauucccacgg

SEQ ID NO: 3018414 - RNA, 19 nt, Artificial Sequence
  Description of Artificial Sequence: Synthetic oligonucleotide
uagucaaaaccacagaccc

SEQ ID NO: 3018415 - RNA, 19 nt, Artificial Sequence
  Description of Artificial Sequence: Synthetic oligonucleotide
ugucuguuaaguaugaagu

SEQ ID NO: 3018416 - RNA, 19 nt, Artificial Sequence
  Description of Artificial Sequence: Synthetic oligonucleotide
uguauaaggacaauuccca

SEQ ID NO: 3018417 - RNA, 19 nt, Artificial Sequence
  Description of Artificial Sequence: Synthetic oligonucleotide
uuucauauuggauuuauuc

SEQ ID NO: 3018418 - RNA, 19 nt, Artificial Sequence
  Description of Artificial Sequence: Synthetic oligonucleotide
uuaaauugaauucuuugaa

SEQ ID NO: 3018419 - RNA, 19 nt, Artificial Sequence
  Description of Artificial Sequence: Synthetic oligonucleotide
uuguauaaggacaauuccc

SEQ ID NO: 3018420 - RNA, 19 nt, Artificial Sequence
  Description of Artificial Sequence: Synthetic oligonucleotide
uauaaggacaauucccacg

SEQ ID NO: 3018421 - RNA, 19 nt, Artificial Sequence
  Description of Artificial Sequence: Synthetic oligonucleotide
auuuauucaucucccaagg

SEQ ID NO: 3018422 - RNA, 19 nt, Artificial Sequence
  Description of Artificial Sequence: Synthetic oligonucleotide
uuggcaucuagucaaaacc

SEQ ID NO: 3018423 - RNA, 19 nt, Artificial Sequence
  Description of Artificial Sequence: Synthetic oligonucleotide
cauuaguuagaacacaggc

SEQ ID NO: 3018424 - RNA, 19 nt, Artificial Sequence
  Description of Artificial Sequence: Synthetic oligonucleotide
ucuagucaaaaccacagac

SEQ ID NO: 3018425 - RNA, 19 nt, Artificial Sequence
  Description of Artificial Sequence: Synthetic oligonucleotide
uucauauuggauuuauuca

SEQ ID NO: 3018426 - RNA, 19 nt, Artificial Sequence
  Description of Artificial Sequence: Synthetic oligonucleotide
uuugaacacuuguauaagg

SEQ ID NO: 3018427 - RNA, 19 nt, Artificial Sequence
  Description of Artificial Sequence: Synthetic oligonucleotide
uccaaucuggccaacagcc

SEQ ID NO: 3018428 - RNA, 19 nt, Artificial Sequence
  Description of Artificial Sequence: Synthetic oligonucleotide
ucuguuuucauauuggauu

SEQ ID NO: 3018429 - RNA, 19 nt, Artificial Sequence
  Description of Artificial Sequence: Synthetic oligonucleotide
aauugugccagcccaccac

SEQ ID NO: 3018430 - RNA, 19 nt, Artificial Sequence
  Description of Artificial Sequence: Synthetic oligonucleotide
uuagucuguuuucauauug

SEQ ID NO: 3018431 - RNA, 19 nt, Artificial Sequence
  Description of Artificial Sequence: Synthetic oligonucleotide
ucuuugaacacuuguauaa

SEQ ID NO: 3018432 - RNA, 19 nt, Artificial Sequence
  Description of Artificial Sequence: Synthetic oligonucleotide
uaggaaguuuccaaucugg

SEQ ID NO: 3018433 - RNA, 19 nt, Artificial Sequence
  Description of Artificial Sequence: Synthetic oligonucleotide
uaaauugaauucuuugaac

SEQ ID NO: 3018434 - RNA, 19 nt, Artificial Sequence
  Description of Artificial Sequence: Synthetic oligonucleotide
guuaaauugaauucuuuga

SEQ ID NO: 3018435 - RNA, 19 nt, Artificial Sequence
  Description of Artificial Sequence: Synthetic oligonucleotide
ucauuaguuagaacacagg

SEQ ID NO: 3018436 - RNA, 19 nt, Artificial Sequence
  Description of Artificial Sequence: Synthetic oligonucleotide
auugcaauugugccagccc

SEQ ID NO: 3018437 - RNA, 19 nt, Artificial Sequence
  Description of Artificial Sequence: Synthetic oligonucleotide
caggccaugcccaagaagg

SEQ ID NO: 3018438 - RNA, 19 nt, Artificial Sequence
  Description of Artificial Sequence: Synthetic oligonucleotide
cuuguauaaggacaauucc

SEQ ID NO: 3018439 - RNA, 19 nt, Artificial Sequence
  Description of Artificial Sequence: Synthetic oligonucleotide
acaguuguaaauccacagg

SEQ ID NO: 3018440 - RNA, 19 nt, Artificial Sequence
  Description of Artificial Sequence: Synthetic oligonucleotide
uugaacacuuguauaagga

SEQ ID NO: 3018441 - RNA, 19 nt, Artificial Sequence
  Description of Artificial Sequence: Synthetic oligonucleotide
aaggacaauucccacggag

SEQ ID NO: 3018442 - RNA, 19 nt, Artificial Sequence
  Description of Artificial Sequence: Synthetic oligonucleotide
ucauauuggauuuauucau

SEQ ID NO: 3018443 - RNA, 19 nt, Artificial Sequence
  Description of Artificial Sequence: Synthetic oligonucleotide
uuggauuuauucaucuccc

SEQ ID NO: 3018444 - RNA, 19 nt, Artificial Sequence
  Description of Artificial Sequence: Synthetic oligonucleotide
augucuguuaaguaugaag

SEQ ID NO: 3018445 - RNA, 19 nt, Artificial Sequence
  Description of Artificial Sequence: Synthetic oligonucleotide
gacaguuguaaauccacag

SEQ ID NO: 3018446 - RNA, 19 nt, Artificial Sequence
  Description of Artificial Sequence: Synthetic oligonucleotide
cuagucaaaaccacagacc

SEQ ID NO: 3018447 - RNA, 19 nt, Artificial Sequence
  Description of Artificial Sequence: Synthetic oligonucleotide
acuuguauaaggacaauuc

SEQ ID NO: 3018448 - RNA, 19 nt, Artificial Sequence
  Description of Artificial Sequence: Synthetic oligonucleotide
caguuguaaauccacaggc

SEQ ID NO: 3018449 - RNA, 19 nt, Artificial Sequence
  Description of Artificial Sequence: Synthetic oligonucleotide
ccaagaaggacccaaaugg

SEQ ID NO: 3018450 - RNA, 19 nt, Artificial Sequence
  Description of Artificial Sequence: Synthetic oligonucleotide
ucuuagucuguuuucauau

SEQ ID NO: 3018451 - RNA, 19 nt, Artificial Sequence
  Description of Artificial Sequence: Synthetic oligonucleotide
caucuagucaaaaccacag

SEQ ID NO: 3018452 - RNA, 19 nt, Artificial Sequence
  Description of Artificial Sequence: Synthetic oligonucleotide
acagccauugcaauugugc

SEQ ID NO: 3018453 - RNA, 19 nt, Artificial Sequence
  Description of Artificial Sequence: Synthetic oligonucleotide
ucucccaagguuaaauuga

SEQ ID NO: 3018454 - RNA, 19 nt, Artificial Sequence
  Description of Artificial Sequence: Synthetic oligonucleotide
uauucaucucccaagguua

SEQ ID NO: 3018455 - RNA, 19 nt, Artificial Sequence
  Description of Artificial Sequence: Synthetic oligonucleotide
ucuguuaaguaugaaguac

SEQ ID NO: 3018456 - RNA, 19 nt, Artificial Sequence
  Description of Artificial Sequence: Synthetic oligonucleotide
uuauucaucucccaagguu

SEQ ID NO: 3018457 - RNA, 19 nt, Artificial Sequence
  Description of Artificial Sequence: Synthetic oligonucleotide
uuuccaaucuggccaacag

SEQ ID NO: 3018458 - RNA, 19 nt, Artificial Sequence
  Description of Artificial Sequence: Synthetic oligonucleotide
agaucauuaguuagaacac

SEQ ID NO: 3018459 - RNA, 19 nt, Artificial Sequence
  Description of Artificial Sequence: Synthetic oligonucleotide
gguuaaauugaauucuuug

SEQ ID NO: 3018460 - RNA, 19 nt, Artificial Sequence
  Description of Artificial Sequence: Synthetic oligonucleotide
auauuggauuuauucaucu

SEQ ID NO: 3018461 - RNA, 19 nt, Artificial Sequence
  Description of Artificial Sequence: Synthetic oligonucleotide
acaauucccacggagacag

SEQ ID NO: 3018462 - RNA, 19 nt, Artificial Sequence
  Description of Artificial Sequence: Synthetic oligonucleotide
agaaggacccaaaugguac

SEQ ID NO: 3018463 - RNA, 19 nt, Artificial Sequence
  Description of Artificial Sequence: Synthetic oligonucleotide
uaugcuaggaaguuuccaa

SEQ ID NO: 3018464 - RNA, 19 nt, Artificial Sequence
  Description of Artificial Sequence: Synthetic oligonucleotide
ugaacacuuguauaaggac

SEQ ID NO: 3018465 - RNA, 19 nt, Artificial Sequence
  Description of Artificial Sequence: Synthetic oligonucleotide
uuuucugcuuggcaucuag

SEQ ID NO: 3018466 - RNA, 19 nt, Artificial Sequence
  Description of Artificial Sequence: Synthetic oligonucleotide
aaugguacuccaagggcac

SEQ ID NO: 3018467 - RNA, 19 nt, Artificial Sequence
  Description of Artificial Sequence: Synthetic oligonucleotide
ugagagucuuuucugcuug

SEQ ID NO: 3018468 - RNA, 19 nt, Artificial Sequence
  Description of Artificial Sequence: Synthetic oligonucleotide
aguuguaaauccacaggcc

SEQ ID NO: 3018469 - RNA, 19 nt, Artificial Sequence
  Description of Artificial Sequence: Synthetic oligonucleotide
uuagaacacaggcaacucu

SEQ ID NO: 3018470 - RNA, 19 nt, Artificial Sequence
  Description of Artificial Sequence: Synthetic oligonucleotide
auucuuugaacacuuguau

SEQ ID NO: 3018471 - RNA, 19 nt, Artificial Sequence
  Description of Artificial Sequence: Synthetic oligonucleotide
ucugcuuggcaucuaguca

SEQ ID NO: 3018472 - RNA, 19 nt, Artificial Sequence
  Description of Artificial Sequence: Synthetic oligonucleotide
aaaugguacuccaagggca

SEQ ID NO: 3018473 - RNA, 19 nt, Artificial Sequence
  Description of Artificial Sequence: Synthetic oligonucleotide
caaaugguacuccaagggc

SEQ ID NO: 3018474 - RNA, 19 nt, Artificial Sequence
  Description of Artificial Sequence: Synthetic oligonucleotide
aacacaggcaacucucacu

SEQ ID NO: 3018475 - RNA, 19 nt, Artificial Sequence
  Description of Artificial Sequence: Synthetic oligonucleotide
uggcaucuagucaaaacca

SEQ ID NO: 3018476 - RNA, 19 nt, Artificial Sequence
  Description of Artificial Sequence: Synthetic oligonucleotide
acacaggcaacucucacug

SEQ ID NO: 3018477 - RNA, 19 nt, Artificial Sequence
  Description of Artificial Sequence: Synthetic oligonucleotide
uccguugcaucuuagucug

SEQ ID NO: 3018478 - RNA, 19 nt, Artificial Sequence
  Description of Artificial Sequence: Synthetic oligonucleotide
uccaagggcacccaaggga

SEQ ID NO: 3018479 - RNA, 19 nt, Artificial Sequence
  Description of Artificial Sequence: Synthetic oligonucleotide
aagggagucaccaggacug

SEQ ID NO: 3018480 - RNA, 19 nt, Artificial Sequence
  Description of Artificial Sequence: Synthetic oligonucleotide
guuguaaauccacaggcca

SEQ ID NO: 3018481 - RNA, 19 nt, Artificial Sequence
  Description of Artificial Sequence: Synthetic oligonucleotide
uugcaauugugccagccca

SEQ ID NO: 3018482 - RNA, 19 nt, Artificial Sequence
  Description of Artificial Sequence: Synthetic oligonucleotide
uugaauucuuugaacacuu

SEQ ID NO: 3018483 - RNA, 19 nt, Artificial Sequence
  Description of Artificial Sequence: Synthetic oligonucleotide
acuccaagggcacccaagg

SEQ ID NO: 3018484 - RNA, 19 nt, Artificial Sequence
  Description of Artificial Sequence: Synthetic oligonucleotide
acaggcaacucucacugag

SEQ ID NO: 3018485 - RNA, 19 nt, Artificial Sequence
  Description of Artificial Sequence: Synthetic oligonucleotide
aucucccaagguuaaauug

SEQ ID NO: 3018486 - RNA, 19 nt, Artificial Sequence
  Description of Artificial Sequence: Synthetic oligonucleotide
uuguccacuagaucauuag

SEQ ID NO: 3018487 - RNA, 19 nt, Artificial Sequence
  Description of Artificial Sequence: Synthetic oligonucleotide
aucauuaguuagaacacag

SEQ ID NO: 3018488 - RNA, 19 nt, Artificial Sequence
  Description of Artificial Sequence: Synthetic oligonucleotide
auugaauucuuugaacacu

SEQ ID NO: 3018489 - RNA, 19 nt, Artificial Sequence
  Description of Artificial Sequence: Synthetic oligonucleotide
aauucuuugaacacuugua

SEQ ID NO: 3018490 - RNA, 19 nt, Artificial Sequence
  Description of Artificial Sequence: Synthetic oligonucleotide
auuaguuagaacacaggca

SEQ ID NO: 3018491 - RNA, 19 nt, Artificial Sequence
  Description of Artificial Sequence: Synthetic oligonucleotide
uuuauucaucucccaaggu

SEQ ID NO: 3018492 - RNA, 19 nt, Artificial Sequence
  Description of Artificial Sequence: Synthetic oligonucleotide
agucuuuucugcuuggcau

SEQ ID NO: 3018493 - RNA, 19 nt, Artificial Sequence
  Description of Artificial Sequence: Synthetic oligonucleotide
ccuauuguccacuagauca

SEQ ID NO: 3018494 - RNA, 19 nt, Artificial Sequence
  Description of Artificial Sequence: Synthetic oligonucleotide
aacacuuguauaaggacaa

SEQ ID NO: 3018495 - RNA, 19 nt, Artificial Sequence
  Description of Artificial Sequence: Synthetic oligonucleotide
aggccugcucuuuaagccc

SEQ ID NO: 3018496 - RNA, 19 nt, Artificial Sequence
  Description of Artificial Sequence: Synthetic oligonucleotide
gaacacuuguauaaggaca

SEQ ID NO: 3018497 - RNA, 19 nt, Artificial Sequence
  Description of Artificial Sequence: Synthetic oligonucleotide
uccacuagaucauuaguua

SEQ ID NO: 3018498 - RNA, 19 nt, Artificial Sequence
  Description of Artificial Sequence: Synthetic oligonucleotide
cauauuggauuuauucauc

SEQ ID NO: 3018499 - RNA, 19 nt, Artificial Sequence
  Description of Artificial Sequence: Synthetic oligonucleotide
acccaaaugguacuccaag

SEQ ID NO: 3018500 - RNA, 19 nt, Artificial Sequence
  Description of Artificial Sequence: Synthetic oligonucleotide
uguaaauccacaggccaug

SEQ ID NO: 3018501 - RNA, 19 nt, Artificial Sequence
  Description of Artificial Sequence: Synthetic oligonucleotide
cuuggcaucuagucaaaac

SEQ ID NO: 3018502 - RNA, 19 nt, Artificial Sequence
  Description of Artificial Sequence: Synthetic oligonucleotide
uuccaaucuggccaacagc

SEQ ID NO: 3018503 - RNA, 19 nt, Artificial Sequence
  Description of Artificial Sequence: Synthetic oligonucleotide
acaaugucuguuaaguaug

SEQ ID NO: 3018504 - RNA, 19 nt, Artificial Sequence
  Description of Artificial Sequence: Synthetic oligonucleotide
aguuagaacacaggcaacu

SEQ ID NO: 3018505 - RNA, 19 nt, Artificial Sequence
  Description of Artificial Sequence: Synthetic oligonucleotide
acggagacaguuguaaauc

SEQ ID NO: 3018506 - RNA, 19 nt, Artificial Sequence
  Description of Artificial Sequence: Synthetic oligonucleotide
ucacugagagucuuuucug

SEQ ID NO: 3018507 - RNA, 19 nt, Artificial Sequence
  Description of Artificial Sequence: Synthetic oligonucleotide
uguaugcuaggaaguuucc

SEQ ID NO: 3018508 - RNA, 19 nt, Artificial Sequence
  Description of Artificial Sequence: Synthetic oligonucleotide
uguccacuagaucauuagu

SEQ ID NO: 3018509 - RNA, 19 nt, Artificial Sequence
  Description of Artificial Sequence: Synthetic oligonucleotide
aggcaacucucacugagag

SEQ ID NO: 3018510 - RNA, 19 nt, Artificial Sequence
  Description of Artificial Sequence: Synthetic oligonucleotide
aggaaguuuccaaucuggc

SEQ ID NO: 3018511 - RNA, 19 nt, Artificial Sequence
  Description of Artificial Sequence: Synthetic oligonucleotide
ugaauucuuugaacacuug

SEQ ID NO: 3018512 - RNA, 19 nt, Artificial Sequence
  Description of Artificial Sequence: Synthetic oligonucleotide
acccaagggagucaccagg

SEQ ID NO: 3018513 - RNA, 19 nt, Artificial Sequence
  Description of Artificial Sequence: Synthetic oligonucleotide
uucuuugaacacuuguaua

SEQ ID NO: 3018514 - RNA, 19 nt, Artificial Sequence
  Description of Artificial Sequence: Synthetic oligonucleotide
uuguaaauccacaggccau

SEQ ID NO: 3018515 - RNA, 19 nt, Artificial Sequence
  Description of Artificial Sequence: Synthetic oligonucleotide
cagccauugcaauugugcc

SEQ ID NO: 3018516 - RNA, 19 nt, Artificial Sequence
  Description of Artificial Sequence: Synthetic oligonucleotide
uucugcuuggcaucuaguc

SEQ ID NO: 3018517 - RNA, 19 nt, Artificial Sequence
  Description of Artificial Sequence: Synthetic oligonucleotide
gagucaccaggacuguagg

SEQ ID NO: 3018518 - RNA, 19 nt, Artificial Sequence
  Description of Artificial Sequence: Synthetic oligonucleotide
ccaaaugguacuccaaggg

SEQ ID NO: 3018519 - RNA, 19 nt, Artificial Sequence
  Description of Artificial Sequence: Synthetic oligonucleotide
cacugagagucuuuucugc

SEQ ID NO: 3018520 - RNA, 19 nt, Artificial Sequence
  Description of Artificial Sequence: Synthetic oligonucleotide
cuuugaacacuuguauaag

SEQ ID NO: 3018521 - RNA, 19 nt, Artificial Sequence
  Description of Artificial Sequence: Synthetic oligonucleotide
caaggccugcucuuuaagc

SEQ ID NO: 3018522 - RNA, 19 nt, Artificial Sequence
  Description of Artificial Sequence: Synthetic oligonucleotide
gagacaguuguaaauccac

SEQ ID NO: 3018523 - RNA, 19 nt, Artificial Sequence
  Description of Artificial Sequence: Synthetic oligonucleotide
uauuggauuuauucaucuc

SEQ ID NO: 3018524 - RNA, 19 nt, Artificial Sequence
  Description of Artificial Sequence: Synthetic oligonucleotide
gaauucuuugaacacuugu

SEQ ID NO: 3018525 - RNA, 19 nt, Artificial Sequence
  Description of Artificial Sequence: Synthetic oligonucleotide
uaaauccacaggccaugcc

SEQ ID NO: 3018526 - RNA, 19 nt, Artificial Sequence
  Description of Artificial Sequence: Synthetic oligonucleotide
uacuccaagggcacccaag

SEQ ID NO: 3018527 - RNA, 19 nt, Artificial Sequence
  Description of Artificial Sequence: Synthetic oligonucleotide
acugagagucuuuucugcu

SEQ ID NO: 3018528 - RNA, 19 nt, Artificial Sequence
  Description of Artificial Sequence: Synthetic oligonucleotide
aaguuuccaaucuggccaa

SEQ ID NO: 3018529 - RNA, 19 nt, Artificial Sequence
  Description of Artificial Sequence: Synthetic oligonucleotide
agucaccaggacuguaggg

SEQ ID NO: 3018530 - RNA, 19 nt, Artificial Sequence
  Description of Artificial Sequence: Synthetic oligonucleotide
aaggacccaaaugguacuc

SEQ ID NO: 3018531 - RNA, 19 nt, Artificial Sequence
  Description of Artificial Sequence: Synthetic oligonucleotide
agucaaaaccacagacccc

SEQ ID NO: 3018532 - RNA, 19 nt, Artificial Sequence
  Description of Artificial Sequence: Synthetic oligonucleotide
cuaggaaguuuccaaucug

SEQ ID NO: 3018533 - RNA, 19 nt, Artificial Sequence
  Description of Artificial Sequence: Synthetic oligonucleotide
aagggcacccaagggaguc

SEQ ID NO: 3018534 - RNA, 19 nt, Artificial Sequence
  Description of Artificial Sequence: Synthetic oligonucleotide
uggauuuauucaucuccca

SEQ ID NO: 3018535 - RNA, 19 nt, Artificial Sequence
  Description of Artificial Sequence: Synthetic oligonucleotide
uugcaucuuagucuguuuu

SEQ ID NO: 3018536 - RNA, 19 nt, Artificial Sequence
  Description of Artificial Sequence: Synthetic oligonucleotide
ccaagguuaaauugaauuc

SEQ ID NO: 3018537 - RNA, 19 nt, Artificial Sequence
  Description of Artificial Sequence: Synthetic oligonucleotide
gcaacucucacugagaguc

SEQ ID NO: 3018538 - RNA, 19 nt, Artificial Sequence
  Description of Artificial Sequence: Synthetic oligonucleotide
ugcaucuuagucuguuuuc

SEQ ID NO: 3018539 - RNA, 19 nt, Artificial Sequence
  Description of Artificial Sequence: Synthetic oligonucleotide
gagagucuuuucugcuugg

SEQ ID NO: 3018540 - RNA, 19 nt, Artificial Sequence
  Description of Artificial Sequence: Synthetic oligonucleotide
ugcuaggaaguuuccaauc

SEQ ID NO: 3018541 - RNA, 19 nt, Artificial Sequence
  Description of Artificial Sequence: Synthetic oligonucleotide
agagucuuuucugcuuggc

SEQ ID NO: 3018542 - RNA, 19 nt, Artificial Sequence
  Description of Artificial Sequence: Synthetic oligonucleotide
uggccaacagccauugcaa

SEQ ID NO: 3018543 - RNA, 19 nt, Artificial Sequence
  Description of Artificial Sequence: Synthetic oligonucleotide
acuagaucauuaguuagaa

SEQ ID NO: 3018544 - RNA, 19 nt, Artificial Sequence
  Description of Artificial Sequence: Synthetic oligonucleotide
guauaaggacaauucccac

SEQ ID NO: 3018545 - RNA, 19 nt, Artificial Sequence
  Description of Artificial Sequence: Synthetic oligonucleotide
gaucauuaguuagaacaca

SEQ ID NO: 3018546 - RNA, 19 nt, Artificial Sequence
  Description of Artificial Sequence: Synthetic oligonucleotide
uucccacggagacaguugu

SEQ ID NO: 3018547 - RNA, 19 nt, Artificial Sequence
  Description of Artificial Sequence: Synthetic oligonucleotide
aucuagucaaaaccacaga

SEQ ID NO: 3018548 - RNA, 19 nt, Artificial Sequence
  Description of Artificial Sequence: Synthetic oligonucleotide
uuuucauauuggauuuauu

SEQ ID NO: 3018549 - RNA, 19 nt, Artificial Sequence
  Description of Artificial Sequence: Synthetic oligonucleotide
ucaccaggacuguagggac

SEQ ID NO: 3018550 - RNA, 19 nt, Artificial Sequence
  Description of Artificial Sequence: Synthetic oligonucleotide
cuagaucauuaguuagaac

SEQ ID NO: 3018551 - RNA, 19 nt, Artificial Sequence
  Description of Artificial Sequence: Synthetic oligonucleotide
agccauugcaauugugcca

SEQ ID NO: 3018552 - RNA, 19 nt, Artificial Sequence
  Description of Artificial Sequence: Synthetic oligonucleotide
cacuagaucauuaguuaga

SEQ ID NO: 3018553 - RNA, 19 nt, Artificial Sequence
  Description of Artificial Sequence: Synthetic oligonucleotide
uaguuagaacacaggcaac

SEQ ID NO: 3018554 - RNA, 19 nt, Artificial Sequence
  Description of Artificial Sequence: Synthetic oligonucleotide
accaggacuguagggaccg

SEQ ID NO: 3018555 - RNA, 19 nt, Artificial Sequence
  Description of Artificial Sequence: Synthetic oligonucleotide
aggacccaaaugguacucc

SEQ ID NO: 3018556 - RNA, 19 nt, Artificial Sequence
  Description of Artificial Sequence: Synthetic oligonucleotide
aauccacaggccaugccca

SEQ ID NO: 3018557 - RNA, 19 nt, Artificial Sequence
  Description of Artificial Sequence: Synthetic oligonucleotide
aagguuaaauugaauucuu

SEQ ID NO: 3018558 - RNA, 19 nt, Artificial Sequence
  Description of Artificial Sequence: Synthetic oligonucleotide
auugugccagcccaccaca

SEQ ID NO: 3018559 - RNA, 19 nt, Artificial Sequence
  Description of Artificial Sequence: Synthetic oligonucleotide
ugcaauugugccagcccac

SEQ ID NO: 3018560 - RNA, 19 nt, Artificial Sequence
  Description of Artificial Sequence: Synthetic oligonucleotide
gaacacaggcaacucucac

SEQ ID NO: 3018561 - RNA, 19 nt, Artificial Sequence
  Description of Artificial Sequence: Synthetic oligonucleotide
aauucccacggagacaguu

SEQ ID NO: 3018562 - RNA, 19 nt, Artificial Sequence
  Description of Artificial Sequence: Synthetic oligonucleotide
aucuuagucuguuuucaua

SEQ ID NO: 3018563 - RNA, 19 nt, Artificial Sequence
  Description of Artificial Sequence: Synthetic oligonucleotide
ucaucucccaagguuaaau

SEQ ID NO: 3018564 - RNA, 19 nt, Artificial Sequence
  Description of Artificial Sequence: Synthetic oligonucleotide
gagucuuuucugcuuggca

SEQ ID NO: 3018565 - RNA, 19 nt, Artificial Sequence
  Description of Artificial Sequence: Synthetic oligonucleotide
guguaugcuaggaaguuuc

SEQ ID NO: 3018566 - RNA, 19 nt, Artificial Sequence
  Description of Artificial Sequence: Synthetic oligonucleotide
acaggccaugcccaagaag

SEQ ID NO: 3018567 - RNA, 19 nt, Artificial Sequence
  Description of Artificial Sequence: Synthetic oligonucleotide
cauugcaauugugccagcc

SEQ ID NO: 3018568 - RNA, 19 nt, Artificial Sequence
  Description of Artificial Sequence: Synthetic oligonucleotide
uuucugcuuggcaucuagu

SEQ ID NO: 3018569 - RNA, 19 nt, Artificial Sequence
  Description of Artificial Sequence: Synthetic oligonucleotide
cuggccaacagccauugca

SEQ ID NO: 3018570 - RNA, 19 nt, Artificial Sequence
  Description of Artificial Sequence: Synthetic oligonucleotide
aagaaggacccaaauggua

SEQ ID NO: 3018571 - RNA, 19 nt, Artificial Sequence
  Description of Artificial Sequence: Synthetic oligonucleotide
gacuguagggaccgcggug

SEQ ID NO: 3018572 - RNA, 19 nt, Artificial Sequence
  Description of Artificial Sequence: Synthetic oligonucleotide
ugugccagcccaccacaca

SEQ ID NO: 3018573 - RNA, 19 nt, Artificial Sequence
  Description of Artificial Sequence: Synthetic oligonucleotide
augcuaggaaguuuccaau

SEQ ID NO: 3018574 - RNA, 19 nt, Artificial Sequence
  Description of Artificial Sequence: Synthetic oligonucleotide
cacaaugucuguuaaguau

SEQ ID NO: 3018575 - RNA, 19 nt, Artificial Sequence
  Description of Artificial Sequence: Synthetic oligonucleotide
cagcccaccacacaauguc

SEQ ID NO: 3018576 - RNA, 19 nt, Artificial Sequence
  Description of Artificial Sequence: Synthetic oligonucleotide
ggacaauucccacggagac

SEQ ID NO: 3018577 - RNA, 19 nt, Artificial Sequence
  Description of Artificial Sequence: Synthetic oligonucleotide
caagguuaaauugaauucu

SEQ ID NO: 3018578 - RNA, 19 nt, Artificial Sequence
  Description of Artificial Sequence: Synthetic oligonucleotide
gccauugcaauugugccag

SEQ ID NO: 3018579 - RNA, 19 nt, Artificial Sequence
  Description of Artificial Sequence: Synthetic oligonucleotide
aaugucuguuaaguaugaa

SEQ ID NO: 3018580 - RNA, 19 nt, Artificial Sequence
  Description of Artificial Sequence: Synthetic oligonucleotide
ugguacuccaagggcaccc

SEQ ID NO: 3018581 - RNA, 19 nt, Artificial Sequence
  Description of Artificial Sequence: Synthetic oligonucleotide
ccacuagaucauuaguuag

SEQ ID NO: 3018582 - RNA, 19 nt, Artificial Sequence
  Description of Artificial Sequence: Synthetic oligonucleotide
cccaaaugguacuccaagg

SEQ ID NO: 3018583 - RNA, 19 nt, Artificial Sequence
  Description of Artificial Sequence: Synthetic oligonucleotide
cucacugagagucuuuucu

SEQ ID NO: 3018584 - RNA, 19 nt, Artificial Sequence
  Description of Artificial Sequence: Synthetic oligonucleotide
aggacaauucccacggaga

SEQ ID NO: 3018585 - RNA, 19 nt, Artificial Sequence
  Description of Artificial Sequence: Synthetic oligonucleotide
acacaaugucuguuaagua

SEQ ID NO: 3018586 - RNA, 19 nt, Artificial Sequence
  Description of Artificial Sequence: Synthetic oligonucleotide
accacacaaugucuguuaa

SEQ ID NO: 3018587 - RNA, 19 nt, Artificial Sequence
  Description of Artificial Sequence: Synthetic oligonucleotide
caaugucuguuaaguauga

SEQ ID NO: 3018588 - RNA, 19 nt, Artificial Sequence
  Description of Artificial Sequence: Synthetic oligonucleotide
uaaggacaauucccacgga

SEQ ID NO: 3018589 - RNA, 19 nt, Artificial Sequence
  Description of Artificial Sequence: Synthetic oligonucleotide
cuccaagggcacccaaggg

SEQ ID NO: 3018590 - RNA, 19 nt, Artificial Sequence
  Description of Artificial Sequence: Synthetic oligonucleotide
guagggaccgcgguguaug

SEQ ID NO: 3018591 - RNA, 19 nt, Artificial Sequence
  Description of Artificial Sequence: Synthetic oligonucleotide
guuagaacacaggcaacuc

SEQ ID NO: 3018592 - RNA, 19 nt, Artificial Sequence
  Description of Artificial Sequence: Synthetic oligonucleotide
gucuguuaaguaugaagua

SEQ ID NO: 3018593 - RNA, 19 nt, Artificial Sequence
  Description of Artificial Sequence: Synthetic oligonucleotide
ggauuuauucaucucccaa

SEQ ID NO: 3018594 - RNA, 19 nt, Artificial Sequence
  Description of Artificial Sequence: Synthetic oligonucleotide
ccaagggcacccaagggag

SEQ ID NO: 3018595 - RNA, 19 nt, Artificial Sequence
  Description of Artificial Sequence: Synthetic oligonucleotide
cacacaaugucuguuaagu

SEQ ID NO: 3018596 - RNA, 19 nt, Artificial Sequence
  Description of Artificial Sequence: Synthetic oligonucleotide
aggacuguagggaccgcgg

SEQ ID NO: 3018597 - RNA, 19 nt, Artificial Sequence
  Description of Artificial Sequence: Synthetic oligonucleotide
aacagccauugcaauugug

SEQ ID NO: 3018598 - RNA, 19 nt, Artificial Sequence
  Description of Artificial Sequence: Synthetic oligonucleotide
agacaguuguaaauccaca

SEQ ID NO: 3018599 - RNA, 19 nt, Artificial Sequence
  Description of Artificial Sequence: Synthetic oligonucleotide
ucucacugagagucuuuuc

SEQ ID NO: 3018600 - RNA, 19 nt, Artificial Sequence
  Description of Artificial Sequence: Synthetic oligonucleotide
augguacuccaagggcacc

SEQ ID NO: 3018601 - RNA, 19 nt, Artificial Sequence
  Description of Artificial Sequence: Synthetic oligonucleotide
ccaacagccauugcaauug

SEQ ID NO: 3018602 - RNA, 19 nt, Artificial Sequence
  Description of Artificial Sequence: Synthetic oligonucleotide
ggagucaccaggacuguag

SEQ ID NO: 3018603 - RNA, 19 nt, Artificial Sequence
  Description of Artificial Sequence: Synthetic oligonucleotide
uccaaggccugcucuuuaa

SEQ ID NO: 3018604 - RNA, 19 nt, Artificial Sequence
  Description of Artificial Sequence: Synthetic oligonucleotide
gaaggacccaaaugguacu

SEQ ID NO: 3018605 - RNA, 19 nt, Artificial Sequence
  Description of Artificial Sequence: Synthetic oligonucleotide
ucccaagguuaaauugaau

SEQ ID NO: 3018606 - RNA, 19 nt, Artificial Sequence
  Description of Artificial Sequence: Synthetic oligonucleotide
caggacuguagggaccgcg

SEQ ID NO: 3018607 - RNA, 19 nt, Artificial Sequence
  Description of Artificial Sequence: Synthetic oligonucleotide
gacaauucccacggagaca

SEQ ID NO: 3018608 - RNA, 19 nt, Artificial Sequence
  Description of Artificial Sequence: Synthetic oligonucleotide
caccaggacuguagggacc

SEQ ID NO: 3018609 - RNA, 19 nt, Artificial Sequence
  Description of Artificial Sequence: Synthetic oligonucleotide
uguuuucauauuggauuua

SEQ ID NO: 3018610 - RNA, 19 nt, Artificial Sequence
  Description of Artificial Sequence: Synthetic oligonucleotide
cuccguugcaucuuagucu

SEQ ID NO: 3018611 - RNA, 19 nt, Artificial Sequence
  Description of Artificial Sequence: Synthetic oligonucleotide
aacucucacugagagucuu

SEQ ID NO: 3018612 - RNA, 19 nt, Artificial Sequence
  Description of Artificial Sequence: Synthetic oligonucleotide
auucccacggagacaguug

SEQ ID NO: 3018613 - RNA, 19 nt, Artificial Sequence
  Description of Artificial Sequence: Synthetic oligonucleotide
guaugcuaggaaguuucca

SEQ ID NO: 3018614 - RNA, 19 nt, Artificial Sequence
  Description of Artificial Sequence: Synthetic oligonucleotide
agaacacaggcaacucuca

SEQ ID NO: 3018615 - RNA, 19 nt, Artificial Sequence
  Description of Artificial Sequence: Synthetic oligonucleotide
aucuggccaacagccauug

SEQ ID NO: 3018616 - RNA, 19 nt, Artificial Sequence
  Description of Artificial Sequence: Synthetic oligonucleotide
uugugccagcccaccacac

SEQ ID NO: 3018617 - RNA, 19 nt, Artificial Sequence
  Description of Artificial Sequence: Synthetic oligonucleotide
caagaaggacccaaauggu

SEQ ID NO: 3018618 - RNA, 19 nt, Artificial Sequence
  Description of Artificial Sequence: Synthetic oligonucleotide
cuguuuucauauuggauuu

SEQ ID NO: 3018619 - RNA, 19 nt, Artificial Sequence
  Description of Artificial Sequence: Synthetic oligonucleotide
cucccaagguuaaauugaa

SEQ ID NO: 3018620 - RNA, 19 nt, Artificial Sequence
  Description of Artificial Sequence: Synthetic oligonucleotide
aaucuggccaacagccauu

SEQ ID NO: 3018621 - RNA, 19 nt, Artificial Sequence
  Description of Artificial Sequence: Synthetic oligonucleotide
ucuggccaacagccauugc

SEQ ID NO: 3018622 - RNA, 19 nt, Artificial Sequence
  Description of Artificial Sequence: Synthetic oligonucleotide
cgcgguguaugcuaggaag

SEQ ID NO: 3018623 - RNA, 19 nt, Artificial Sequence
  Description of Artificial Sequence: Synthetic oligonucleotide
aacccuccguugcaucuua

SEQ ID NO: 3018624 - RNA, 19 nt, Artificial Sequence
  Description of Artificial Sequence: Synthetic oligonucleotide
uagggaccgcgguguaugc

SEQ ID NO: 3018625 - RNA, 19 nt, Artificial Sequence
  Description of Artificial Sequence: Synthetic oligonucleotide
cacccaagggagucaccag

SEQ ID NO: 3018626 - RNA, 19 nt, Artificial Sequence
  Description of Artificial Sequence: Synthetic oligonucleotide
uauuguccacuagaucauu

SEQ ID NO: 3018627 - RNA, 19 nt, Artificial Sequence
  Description of Artificial Sequence: Synthetic oligonucleotide
ccaugcccaagaaggaccc

SEQ ID NO: 3018628 - RNA, 19 nt, Artificial Sequence
  Description of Artificial Sequence: Synthetic oligonucleotide
guuuucauauuggauuuau

SEQ ID NO: 3018629 - RNA, 19 nt, Artificial Sequence
  Description of Artificial Sequence: Synthetic oligonucleotide
gaccgcgguguaugcuagg

SEQ ID NO: 3018630 - RNA, 19 nt, Artificial Sequence
  Description of Artificial Sequence: Synthetic oligonucleotide
agguuaaauugaauucuuu

SEQ ID NO: 3018631 - RNA, 19 nt, Artificial Sequence
  Description of Artificial Sequence: Synthetic oligonucleotide
ggcaucuagucaaaaccac

SEQ ID NO: 3018632 - RNA, 19 nt, Artificial Sequence
  Description of Artificial Sequence: Synthetic oligonucleotide
gcuaggaaguuuccaaucu

SEQ ID NO: 3018633 - RNA, 19 nt, Artificial Sequence
  Description of Artificial Sequence: Synthetic oligonucleotide
auuguccacuagaucauua

SEQ ID NO: 3018634 - RNA, 19 nt, Artificial Sequence
  Description of Artificial Sequence: Synthetic oligonucleotide
guuuccaaucuggccaaca

SEQ ID NO: 3018635 - RNA, 19 nt, Artificial Sequence
  Description of Artificial Sequence: Synthetic oligonucleotide
gugccagcccaccacacaa

SEQ ID NO: 3018636 - RNA, 19 nt, Artificial Sequence
  Description of Artificial Sequence: Synthetic oligonucleotide
gcaucuuagucuguuuuca

SEQ ID NO: 3018637 - RNA, 19 nt, Artificial Sequence
  Description of Artificial Sequence: Synthetic oligonucleotide
ccuccguugcaucuuaguc

SEQ ID NO: 3018638 - RNA, 19 nt, Artificial Sequence
  Description of Artificial Sequence: Synthetic oligonucleotide
auucaucucccaagguuaa

SEQ ID NO: 3018639 - RNA, 19 nt, Artificial Sequence
  Description of Artificial Sequence: Synthetic oligonucleotide
ggagacaguuguaaaucca

SEQ ID NO: 3018640 - RNA, 19 nt, Artificial Sequence
  Description of Artificial Sequence: Synthetic oligonucleotide
cggagacaguuguaaaucc

SEQ ID NO: 3018641 - RNA, 19 nt, Artificial Sequence
  Description of Artificial Sequence: Synthetic oligonucleotide
caagggagucaccaggacu

SEQ ID NO: 3018642 - RNA, 19 nt, Artificial Sequence
  Description of Artificial Sequence: Synthetic oligonucleotide
ggacccaaaugguacucca

SEQ ID NO: 3018643 - RNA, 19 nt, Artificial Sequence
  Description of Artificial Sequence: Synthetic oligonucleotide
caggcaacucucacugaga

SEQ ID NO: 3018644 - RNA, 19 nt, Artificial Sequence
  Description of Artificial Sequence: Synthetic oligonucleotide
uucaucucccaagguuaaa

SEQ ID NO: 3018645 - RNA, 19 nt, Artificial Sequence
  Description of Artificial Sequence: Synthetic oligonucleotide
caauugugccagcccacca

SEQ ID NO: 3018646 - RNA, 19 nt, Artificial Sequence
  Description of Artificial Sequence: Synthetic oligonucleotide
caccacacaaugucuguua

SEQ ID NO: 3018647 - RNA, 19 nt, Artificial Sequence
  Description of Artificial Sequence: Synthetic oligonucleotide
gcaucuagucaaaaccaca

SEQ ID NO: 3018648 - RNA, 19 nt, Artificial Sequence
  Description of Artificial Sequence: Synthetic oligonucleotide
guccacuagaucauuaguu

SEQ ID NO: 3018649 - RNA, 19 nt, Artificial Sequence
  Description of Artificial Sequence: Synthetic oligonucleotide
ccacacaaugucuguuaag

SEQ ID NO: 3018650 - RNA, 19 nt, Artificial Sequence
  Description of Artificial Sequence: Synthetic oligonucleotide
accgcgguguaugcuagga

SEQ ID NO: 3018651 - RNA, 19 nt, Artificial Sequence
  Description of Artificial Sequence: Synthetic oligonucleotide
gcaauugugccagcccacc

SEQ ID NO: 3018652 - RNA, 19 nt, Artificial Sequence
  Description of Artificial Sequence: Synthetic oligonucleotide
cacggagacaguuguaaau

SEQ ID NO: 3018653 - RNA, 19 nt, Artificial Sequence
  Description of Artificial Sequence: Synthetic oligonucleotide
uguagggaccgcgguguau

SEQ ID NO: 3018654 - RNA, 19 nt, Artificial Sequence
  Description of Artificial Sequence: Synthetic oligonucleotide
ugccagcccaccacacaau

SEQ ID NO: 3018655 - RNA, 19 nt, Artificial Sequence
  Description of Artificial Sequence: Synthetic oligonucleotide
cccaagguuaaauugaauu

SEQ ID NO: 3018656 - RNA, 19 nt, Artificial Sequence
  Description of Artificial Sequence: Synthetic oligonucleotide
gccagcccaccacacaaug

SEQ ID NO: 3018657 - RNA, 19 nt, Artificial Sequence
  Description of Artificial Sequence: Synthetic oligonucleotide
caaucuggccaacagccau

SEQ ID NO: 3018658 - RNA, 19 nt, Artificial Sequence
  Description of Artificial Sequence: Synthetic oligonucleotide
gacccaaaugguacuccaa

SEQ ID NO: 3018659 - RNA, 19 nt, Artificial Sequence
  Description of Artificial Sequence: Synthetic oligonucleotide
gucuguuuucauauuggau

SEQ ID NO: 3018660 - RNA, 19 nt, Artificial Sequence
  Description of Artificial Sequence: Synthetic oligonucleotide
agcccaccacacaaugucu

SEQ ID NO: 3018661 - RNA, 19 nt, Artificial Sequence
  Description of Artificial Sequence: Synthetic oligonucleotide
acacuuguauaaggacaau

SEQ ID NO: 3018662 - RNA, 19 nt, Artificial Sequence
  Description of Artificial Sequence: Synthetic oligonucleotide
auccacaggccaugcccaa

SEQ ID NO: 3018663 - RNA, 19 nt, Artificial Sequence
  Description of Artificial Sequence: Synthetic oligonucleotide
ucccacggagacaguugua

SEQ ID NO: 3018664 - RNA, 19 nt, Artificial Sequence
  Description of Artificial Sequence: Synthetic oligonucleotide
ccaaggccugcucuuuaag

SEQ ID NO: 3018665 - RNA, 19 nt, Artificial Sequence
  Description of Artificial Sequence: Synthetic oligonucleotide
gcacccaagggagucacca

SEQ ID NO: 3018666 - RNA, 19 nt, Artificial Sequence
  Description of Artificial Sequence: Synthetic oligonucleotide
ggccugcucuuuaagcccc

SEQ ID NO: 3018667 - RNA, 19 nt, Artificial Sequence
  Description of Artificial Sequence: Synthetic oligonucleotide
cuuagucuguuuucauauu

SEQ ID NO: 3018668 - RNA, 19 nt, Artificial Sequence
  Description of Artificial Sequence: Synthetic oligonucleotide
guugcaucuuagucuguuu

SEQ ID NO: 3018669 - RNA, 19 nt, Artificial Sequence
  Description of Artificial Sequence: Synthetic oligonucleotide
caucuuagucuguuuucau

SEQ ID NO: 3018670 - RNA, 19 nt, Artificial Sequence
  Description of Artificial Sequence: Synthetic oligonucleotide
caucucccaagguuaaauu

SEQ ID NO: 3018671 - RNA, 19 nt, Artificial Sequence
  Description of Artificial Sequence: Synthetic oligonucleotide
cacuuguauaaggacaauu

SEQ ID NO: 3018672 - RNA, 19 nt, Artificial Sequence
  Description of Artificial Sequence: Synthetic oligonucleotide
ggccaugcccaagaaggac

SEQ ID NO: 3018673 - RNA, 19 nt, Artificial Sequence
  Description of Artificial Sequence: Synthetic oligonucleotide
cugagagucuuuucugcuu

SEQ ID NO: 3018674 - RNA, 19 nt, Artificial Sequence
  Description of Artificial Sequence: Synthetic oligonucleotide
gcccaccacacaaugucug

SEQ ID NO: 3018675 - RNA, 19 nt, Artificial Sequence
  Description of Artificial Sequence: Synthetic oligonucleotide
cacaggcaacucucacuga

SEQ ID NO: 3018676 - RNA, 19 nt, Artificial Sequence
  Description of Artificial Sequence: Synthetic oligonucleotide
guacuccaagggcacccaa

SEQ ID NO: 3018677 - RNA, 19 nt, Artificial Sequence
  Description of Artificial Sequence: Synthetic oligonucleotide
gggaccgcgguguaugcua

SEQ ID NO: 3018678 - RNA, 19 nt, Artificial Sequence
  Description of Artificial Sequence: Synthetic oligonucleotide
agggcacccaagggaguca

SEQ ID NO: 3018679 - RNA, 19 nt, Artificial Sequence
  Description of Artificial Sequence: Synthetic oligonucleotide
cccaagggagucaccagga

SEQ ID NO: 3018680 - RNA, 19 nt, Artificial Sequence
  Description of Artificial Sequence: Synthetic oligonucleotide
ggaccgcgguguaugcuag

SEQ ID NO: 3018681 - RNA, 19 nt, Artificial Sequence
  Description of Artificial Sequence: Synthetic oligonucleotide
agggaccgcgguguaugcu

SEQ ID NO: 3018682 - RNA, 19 nt, Artificial Sequence
  Description of Artificial Sequence: Synthetic oligonucleotide
ccaaucuggccaacagcca

SEQ ID NO: 3018683 - RNA, 19 nt, Artificial Sequence
  Description of Artificial Sequence: Synthetic oligonucleotide
acucucacugagagucuuu

SEQ ID NO: 3018684 - RNA, 19 nt, Artificial Sequence
  Description of Artificial Sequence: Synthetic oligonucleotide
gguacuccaagggcaccca

SEQ ID NO: 3018685 - RNA, 19 nt, Artificial Sequence
  Description of Artificial Sequence: Synthetic oligonucleotide
caacucucacugagagucu

SEQ ID NO: 3018686 - RNA, 19 nt, Artificial Sequence
  Description of Artificial Sequence: Synthetic oligonucleotide
cacaggccaugcccaagaa

SEQ ID NO: 3018687 - RNA, 19 nt, Artificial Sequence
  Description of Artificial Sequence: Synthetic oligonucleotide
ccacaggccaugcccaaga

SEQ ID NO: 3018688 - RNA, 19 nt, Artificial Sequence
  Description of Artificial Sequence: Synthetic oligonucleotide
acccuccguugcaucuuag

SEQ ID NO: 3018689 - RNA, 19 nt, Artificial Sequence
  Description of Artificial Sequence: Synthetic oligonucleotide
caacagccauugcaauugu

SEQ ID NO: 3018690 - RNA, 19 nt, Artificial Sequence
  Description of Artificial Sequence: Synthetic oligonucleotide
cccacggagacaguuguaa

SEQ ID NO: 3018691 - RNA, 19 nt, Artificial Sequence
  Description of Artificial Sequence: Synthetic oligonucleotide
ggcaacucucacugagagu

SEQ ID NO: 3018692 - RNA, 19 nt, Artificial Sequence
  Description of Artificial Sequence: Synthetic oligonucleotide
ccauugcaauugugccagc

SEQ ID NO: 3018693 - RNA, 19 nt, Artificial Sequence
  Description of Artificial Sequence: Synthetic oligonucleotide
cucucacugagagucuuuu

SEQ ID NO: 3018694 - RNA, 19 nt, Artificial Sequence
  Description of Artificial Sequence: Synthetic oligonucleotide
gguguaugcuaggaaguuu

SEQ ID NO: 3018695 - RNA, 19 nt, Artificial Sequence
  Description of Artificial Sequence: Synthetic oligonucleotide
ggacuguagggaccgcggu

SEQ ID NO: 3018696 - RNA, 19 nt, Artificial Sequence
  Description of Artificial Sequence: Synthetic oligonucleotide
caugcccaagaaggaccca

SEQ ID NO: 3018697 - RNA, 19 nt, Artificial Sequence
  Description of Artificial Sequence: Synthetic oligonucleotide
caagggcacccaagggagu

SEQ ID NO: 3018698 - RNA, 19 nt, Artificial Sequence
  Description of Artificial Sequence: Synthetic oligonucleotide
gcgguguaugcuaggaagu

SEQ ID NO: 3018699 - RNA, 19 nt, Artificial Sequence
  Description of Artificial Sequence: Synthetic oligonucleotide
cccaacccuccguugcauc

SEQ ID NO: 3018700 - RNA, 19 nt, Artificial Sequence
  Description of Artificial Sequence: Synthetic oligonucleotide
gggcacccaagggagucac

SEQ ID NO: 3018701 - RNA, 19 nt, Artificial Sequence
  Description of Artificial Sequence: Synthetic oligonucleotide
ccacggagacaguuguaaa

SEQ ID NO: 3018702 - RNA, 19 nt, Artificial Sequence
  Description of Artificial Sequence: Synthetic oligonucleotide
cuuuucugcuuggcaucua

SEQ ID NO: 3018703 - RNA, 19 nt, Artificial Sequence
  Description of Artificial Sequence: Synthetic oligonucleotide
ccaacccuccguugcaucu

SEQ ID NO: 3018704 - RNA, 19 nt, Artificial Sequence
  Description of Artificial Sequence: Synthetic oligonucleotide
ggcacccaagggagucacc

SEQ ID NO: 3018705 - RNA, 19 nt, Artificial Sequence
  Description of Artificial Sequence: Synthetic oligonucleotide
cuguagggaccgcggugua

SEQ ID NO: 3018706 - RNA, 19 nt, Artificial Sequence
  Description of Artificial Sequence: Synthetic oligonucleotide
cccaccacacaaugucugu

SEQ ID NO: 3018707 - RNA, 19 nt, Artificial Sequence
  Description of Artificial Sequence: Synthetic oligonucleotide
ccagcccaccacacaaugu

SEQ ID NO: 3018708 - RNA, 19 nt, Artificial Sequence
  Description of Artificial Sequence: Synthetic oligonucleotide
caauucccacggagacagu

SEQ ID NO: 3018709 - RNA, 19 nt, Artificial Sequence
  Description of Artificial Sequence: Synthetic oligonucleotide
gggagucaccaggacugua

SEQ ID NO: 3018710 - RNA, 19 nt, Artificial Sequence
  Description of Artificial Sequence: Synthetic oligonucleotide
ccaggacuguagggaccgc

SEQ ID NO: 3018711 - RNA, 19 nt, Artificial Sequence
  Description of Artificial Sequence: Synthetic oligonucleotide
cccuccguugcaucuuagu

SEQ ID NO: 3018712 - RNA, 19 nt, Artificial Sequence
  Description of Artificial Sequence: Synthetic oligonucleotide
caacccuccguugcaucuu

SEQ ID NO: 3018713 - RNA, 19 nt, Artificial Sequence
  Description of Artificial Sequence: Synthetic oligonucleotide
ccgcgguguaugcuaggaa

SEQ ID NO: 3018714 - RNA, 19 nt, Artificial Sequence
  Description of Artificial Sequence: Synthetic oligonucleotide
cguugcaucuuagucuguu

SEQ ID NO: 3018715 - RNA, 19 nt, Artificial Sequence
  Description of Artificial Sequence: Synthetic oligonucleotide
ccccuccaaggccugcucu

SEQ ID NO: 3018716 - RNA, 19 nt, Artificial Sequence
  Description of Artificial Sequence: Synthetic oligonucleotide
ccaccacacaaugucuguu

SEQ ID NO: 3018717 - RNA, 19 nt, Artificial Sequence
  Description of Artificial Sequence: Synthetic oligonucleotide
cgguguaugcuaggaaguu

SEQ ID NO: 3018718 - RNA, 19 nt, Artificial Sequence
  Description of Artificial Sequence: Synthetic oligonucleotide
ccguugcaucuuagucugu

SEQ ID NO: 3018719 - RNA, 19 nt, Artificial Sequence
  Description of Artificial Sequence: Synthetic oligonucleotide
ccuccaaggccugcucuuu

SEQ ID NO: 3018720 - RNA, 19 nt, Artificial Sequence
  Description of Artificial Sequence: Synthetic oligonucleotide
ccccaacccuccguugcau

SEQ ID NO: 3018721 - RNA, 19 nt, Artificial Sequence
  Description of Artificial Sequence: Synthetic oligonucleotide
aauaucuucuccuucaucu

SEQ ID NO: 3018722 - RNA, 19 nt, Artificial Sequence
  Description of Artificial Sequence: Synthetic oligonucleotide
acucuguuuaccuggaugc

SEQ ID NO: 3018723 - RNA, 19 nt, Artificial Sequence
  Description of Artificial Sequence: Synthetic oligonucleotide
auccucucgaacuucaugc

SEQ ID NO: 3018724 - RNA, 19 nt, Artificial Sequence
  Description of Artificial Sequence: Synthetic oligonucleotide
aacuucaugcucuggcgcc

SEQ ID NO: 3018725 - RNA, 19 nt, Artificial Sequence
  Description of Artificial Sequence: Synthetic oligonucleotide
ucauguauaccugggaugg

SEQ ID NO: 3018726 - RNA, 19 nt, Artificial Sequence
  Description of Artificial Sequence: Synthetic oligonucleotide
uuuaccuggaugcuuggag

SEQ ID NO: 3018727 - RNA, 19 nt, Artificial Sequence
  Description of Artificial Sequence: Synthetic oligonucleotide
uccauccaaagucugaaag

SEQ ID NO: 3018728 - RNA, 19 nt, Artificial Sequence
  Description of Artificial Sequence: Synthetic oligonucleotide
ucaauuucuccauccaaag

SEQ ID NO: 3018729 - RNA, 19 nt, Artificial Sequence
  Description of Artificial Sequence: Synthetic oligonucleotide
uaggucaucacucuguuua

SEQ ID NO: 3018730 - RNA, 19 nt, Artificial Sequence
  Description of Artificial Sequence: Synthetic oligonucleotide
cuucaugaggucauugucc

SEQ ID NO: 3018731 - RNA, 19 nt, Artificial Sequence
  Description of Artificial Sequence: Synthetic oligonucleotide
aucugauccagucaggcug

SEQ ID NO: 3018732 - RNA, 19 nt, Artificial Sequence
  Description of Artificial Sequence: Synthetic oligonucleotide
uuuggugaggagcuucagg

SEQ ID NO: 3018733 - RNA, 19 nt, Artificial Sequence
  Description of Artificial Sequence: Synthetic oligonucleotide
ucugaugacaccucagugu

SEQ ID NO: 3018734 - RNA, 19 nt, Artificial Sequence
  Description of Artificial Sequence: Synthetic oligonucleotide
aagucugaaaggcugagua

SEQ ID NO: 3018735 - RNA, 19 nt, Artificial Sequence
  Description of Artificial Sequence: Synthetic oligonucleotide
uuaccuggaugcuuggagg

SEQ ID NO: 3018736 - RNA, 19 nt, Artificial Sequence
  Description of Artificial Sequence: Synthetic oligonucleotide
acuucaugaggucauuguc

SEQ ID NO: 3018737 - RNA, 19 nt, Artificial Sequence
  Description of Artificial Sequence: Synthetic oligonucleotide
cuucaucugauccagucag

SEQ ID NO: 3018738 - RNA, 19 nt, Artificial Sequence
  Description of Artificial Sequence: Synthetic oligonucleotide
ucgaacuucaugcucuggc

SEQ ID NO: 3018739 - RNA, 19 nt, Artificial Sequence
  Description of Artificial Sequence: Synthetic oligonucleotide
aaaucuuccuccugcacau

SEQ ID NO: 3018740 - RNA, 19 nt, Artificial Sequence
  Description of Artificial Sequence: Synthetic oligonucleotide
uuggugaggagcuucaggu

SEQ ID NO: 3018741 - RNA, 19 nt, Artificial Sequence
  Description of Artificial Sequence: Synthetic oligonucleotide
uacagauggucccaguccc

SEQ ID NO: 3018742 - RNA, 19 nt, Artificial Sequence
  Description of Artificial Sequence: Synthetic oligonucleotide
cucaguguacagauggucc

SEQ ID NO: 3018743 - RNA, 19 nt, Artificial Sequence
  Description of Artificial Sequence: Synthetic oligonucleotide
uguauaccugggauggucc

SEQ ID NO: 3018744 - RNA, 19 nt, Artificial Sequence
  Description of Artificial Sequence: Synthetic oligonucleotide
gaggucauuguccagguca

SEQ ID NO: 3018745 - RNA, 19 nt, Artificial Sequence
  Description of Artificial Sequence: Synthetic oligonucleotide
gaaaucuuccuccugcaca

SEQ ID NO: 3018746 - RNA, 19 nt, Artificial Sequence
  Description of Artificial Sequence: Synthetic oligonucleotide
uucaugaggucauugucca

SEQ ID NO: 3018747 - RNA, 19 nt, Artificial Sequence
  Description of Artificial Sequence: Synthetic oligonucleotide
caccucaguguacagaugg

SEQ ID NO: 3018748 - RNA, 19 nt, Artificial Sequence
  Description of Artificial Sequence: Synthetic oligonucleotide
ugcugggucauguauaccu

SEQ ID NO: 3018749 - RNA, 19 nt, Artificial Sequence
  Description of Artificial Sequence: Synthetic oligonucleotide
aaaggcugaguacuucaug

SEQ ID NO: 3018750 - RNA, 19 nt, Artificial Sequence
  Description of Artificial Sequence: Synthetic oligonucleotide
aucacuggaauaucuucuc

SEQ ID NO: 3018751 - RNA, 19 nt, Artificial Sequence
  Description of Artificial Sequence: Synthetic oligonucleotide
agucugaaaggcugaguac

SEQ ID NO: 3018752 - RNA, 19 nt, Artificial Sequence
  Description of Artificial Sequence: Synthetic oligonucleotide
ucaguguacagaugguccc

SEQ ID NO: 3018753 - RNA, 19 nt, Artificial Sequence
  Description of Artificial Sequence: Synthetic oligonucleotide
agggucuuccuucucugcc

SEQ ID NO: 3018754 - RNA, 19 nt, Artificial Sequence
  Description of Artificial Sequence: Synthetic oligonucleotide
ucuggcgccagcacuuugg

SEQ ID NO: 3018755 - RNA, 19 nt, Artificial Sequence
  Description of Artificial Sequence: Synthetic oligonucleotide
cacgaaaucuuccuccugc

SEQ ID NO: 3018756 - RNA, 19 nt, Artificial Sequence
  Description of Artificial Sequence: Synthetic oligonucleotide
gauggucccagucccagcc

SEQ ID NO: 3018757 - RNA, 19 nt, Artificial Sequence
  Description of Artificial Sequence: Synthetic oligonucleotide
ugggucauguauaccuggg

SEQ ID NO: 3018758 - RNA, 19 nt, Artificial Sequence
  Description of Artificial Sequence: Synthetic oligonucleotide
uguacagauggucccaguc

SEQ ID NO: 3018759 - RNA, 19 nt, Artificial Sequence
  Description of Artificial Sequence: Synthetic oligonucleotide
uaccuggaugcuuggaggg

SEQ ID NO: 3018760 - RNA, 19 nt, Artificial Sequence
  Description of Artificial Sequence: Synthetic oligonucleotide
gaugcugggucauguauac

SEQ ID NO: 3018761 - RNA, 19 nt, Artificial Sequence
  Description of Artificial Sequence: Synthetic oligonucleotide
acaucuuccagauccggga

SEQ ID NO: 3018762 - RNA, 19 nt, Artificial Sequence
  Description of Artificial Sequence: Synthetic oligonucleotide
ucacuggaauaucuucucc

SEQ ID NO: 3018763 - RNA, 19 nt, Artificial Sequence
  Description of Artificial Sequence: Synthetic oligonucleotide
ugaggagcucugaugacac

SEQ ID NO: 3018764 - RNA, 19 nt, Artificial Sequence
  Description of Artificial Sequence: Synthetic oligonucleotide
uucaucugauccagucagg

SEQ ID NO: 3018765 - RNA, 19 nt, Artificial Sequence
  Description of Artificial Sequence: Synthetic oligonucleotide
uacuucaugaggucauugu

SEQ ID NO: 3018766 - RNA, 19 nt, Artificial Sequence
  Description of Artificial Sequence: Synthetic oligonucleotide
ucaucugauccagucaggc

SEQ ID NO: 3018767 - RNA, 19 nt, Artificial Sequence
  Description of Artificial Sequence: Synthetic oligonucleotide
guacagauggucccagucc

SEQ ID NO: 3018768 - RNA, 19 nt, Artificial Sequence
  Description of Artificial Sequence: Synthetic oligonucleotide
ugcacaucuuccagauccg

SEQ ID NO: 3018769 - RNA, 19 nt, Artificial Sequence
  Description of Artificial Sequence: Synthetic oligonucleotide
caggucaauuucuccaucc

SEQ ID NO: 3018770 - RNA, 19 nt, Artificial Sequence
  Description of Artificial Sequence: Synthetic oligonucleotide
cuguuuaccuggaugcuug

SEQ ID NO: 3018771 - RNA, 19 nt, Artificial Sequence
  Description of Artificial Sequence: Synthetic oligonucleotide
gucauuguccaggucacgg

SEQ ID NO: 3018772 - RNA, 19 nt, Artificial Sequence
  Description of Artificial Sequence: Synthetic oligonucleotide
cagcacgaaaucuuccucc

SEQ ID NO: 3018773 - RNA, 19 nt, Artificial Sequence
  Description of Artificial Sequence: Synthetic oligonucleotide
ucacgguaggucaucacuc

SEQ ID NO: 3018774 - RNA, 19 nt, Artificial Sequence
  Description of Artificial Sequence: Synthetic oligonucleotide
ugaguacuucaugagguca

SEQ ID NO: 3018775 - RNA, 19 nt, Artificial Sequence
  Description of Artificial Sequence: Synthetic oligonucleotide
ucaucacucuguuuaccug

SEQ ID NO: 3018776 - RNA, 19 nt, Artificial Sequence
  Description of Artificial Sequence: Synthetic oligonucleotide
ugcagcacgaaaucuuccu

SEQ ID NO: 3018777 - RNA, 19 nt, Artificial Sequence
  Description of Artificial Sequence: Synthetic oligonucleotide
auguauaccugggaugguc

SEQ ID NO: 3018778 - RNA, 19 nt, Artificial Sequence
  Description of Artificial Sequence: Synthetic oligonucleotide
agucccagcccacaucauc

SEQ ID NO: 3018779 - RNA, 19 nt, Artificial Sequence
  Description of Artificial Sequence: Synthetic oligonucleotide
ucuuccagauccgggauca

SEQ ID NO: 3018780 - RNA, 19 nt, Artificial Sequence
  Description of Artificial Sequence: Synthetic oligonucleotide
uuucuccauccaaagucug

SEQ ID NO: 3018781 - RNA, 19 nt, Artificial Sequence
  Description of Artificial Sequence: Synthetic oligonucleotide
gaugacaccucaguguaca

SEQ ID NO: 3018782 - RNA, 19 nt, Artificial Sequence
  Description of Artificial Sequence: Synthetic oligonucleotide
uguuuaccuggaugcuugg

SEQ ID NO: 3018783 - RNA, 19 nt, Artificial Sequence
  Description of Artificial Sequence: Synthetic oligonucleotide
uccuucaucugauccaguc

SEQ ID NO: 3018784 - RNA, 19 nt, Artificial Sequence
  Description of Artificial Sequence: Synthetic oligonucleotide
ucugauccagucaggcugu

SEQ ID NO: 3018785 - RNA, 19 nt, Artificial Sequence
  Description of Artificial Sequence: Synthetic oligonucleotide
cugggucauguauaccugg

SEQ ID NO: 3018786 - RNA, 19 nt, Artificial Sequence
  Description of Artificial Sequence: Synthetic oligonucleotide
cacucuguuuaccuggaug

SEQ ID NO: 3018787 - RNA, 19 nt, Artificial Sequence
  Description of Artificial Sequence: Synthetic oligonucleotide
uccgugaggagcucugaug

SEQ ID NO: 3018788 - RNA, 19 nt, Artificial Sequence
  Description of Artificial Sequence: Synthetic oligonucleotide
gaauaucuucuccuucauc

SEQ ID NO: 3018789 - RNA, 19 nt, Artificial Sequence
  Description of Artificial Sequence: Synthetic oligonucleotide
ggcugaguacuucaugagg

SEQ ID NO: 3018790 - RNA, 19 nt, Artificial Sequence
  Description of Artificial Sequence: Synthetic oligonucleotide
cucugaugacaccucagug

SEQ ID NO: 3018791 - RNA, 19 nt, Artificial Sequence
  Description of Artificial Sequence: Synthetic oligonucleotide
aucuuccagauccgggauc

SEQ ID NO: 3018792 - RNA, 19 nt, Artificial Sequence
  Description of Artificial Sequence: Synthetic oligonucleotide
aggagcuucaggucaauuu

SEQ ID NO: 3018793 - RNA, 19 nt, Artificial Sequence
  Description of Artificial Sequence: Synthetic oligonucleotide
agauggucccagucccagc

SEQ ID NO: 3018794 - RNA, 19 nt, Artificial Sequence
  Description of Artificial Sequence: Synthetic oligonucleotide
aaagucugaaaggcugagu

SEQ ID NO: 3018795 - RNA, 19 nt, Artificial Sequence
  Description of Artificial Sequence: Synthetic oligonucleotide
cuucucugcccgcagcagg

SEQ ID NO: 3018796 - RNA, 19 nt, Artificial Sequence
  Description of Artificial Sequence: Synthetic oligonucleotide
ucauuguccaggucacggu

SEQ ID NO: 3018797 - RNA, 19 nt, Artificial Sequence
  Description of Artificial Sequence: Synthetic oligonucleotide
agcacgaaaucuuccuccu

SEQ ID NO: 3018798 - RNA, 19 nt, Artificial Sequence
  Description of Artificial Sequence: Synthetic oligonucleotide
uccgggaucacuggaauau

SEQ ID NO: 3018799 - RNA, 19 nt, Artificial Sequence
  Description of Artificial Sequence: Synthetic oligonucleotide
aggcugaguacuucaugag

SEQ ID NO: 3018800 - RNA, 19 nt, Artificial Sequence
  Description of Artificial Sequence: Synthetic oligonucleotide
ucuccauccaaagucugaa

SEQ ID NO: 3018801 - RNA, 19 nt, Artificial Sequence
  Description of Artificial Sequence: Synthetic oligonucleotide
uccuucucugcccgcagca

SEQ ID NO: 3018802 - RNA, 19 nt, Artificial Sequence
  Description of Artificial Sequence: Synthetic oligonucleotide
ggagcuucaggucaauuuc

SEQ ID NO: 3018803 - RNA, 19 nt, Artificial Sequence
  Description of Artificial Sequence: Synthetic oligonucleotide
gauccagucaggcugugcu

SEQ ID NO: 3018804 - RNA, 19 nt, Artificial Sequence
  Description of Artificial Sequence: Synthetic oligonucleotide
ucugaaaggcugaguacuu

SEQ ID NO: 3018805 - RNA, 19 nt, Artificial Sequence
  Description of Artificial Sequence: Synthetic oligonucleotide
ggcgccagcacuuugguga

SEQ ID NO: 3018806 - RNA, 19 nt, Artificial Sequence
  Description of Artificial Sequence: Synthetic oligonucleotide
uccugcacaucuuccagau

SEQ ID NO: 3018807 - RNA, 19 nt, Artificial Sequence
  Description of Artificial Sequence: Synthetic oligonucleotide
aggucaauuucuccaucca

SEQ ID NO: 3018808 - RNA, 19 nt, Artificial Sequence
  Description of Artificial Sequence: Synthetic oligonucleotide
gacaccucaguguacagau

SEQ ID NO: 3018809 - RNA, 19 nt, Artificial Sequence
  Description of Artificial Sequence: Synthetic oligonucleotide
guauaccugggaugguccc

SEQ ID NO: 3018810 - RNA, 19 nt, Artificial Sequence
  Description of Artificial Sequence: Synthetic oligonucleotide
cagcacuuuggugaggagc

SEQ ID NO: 3018811 - RNA, 19 nt, Artificial Sequence
  Description of Artificial Sequence: Synthetic oligonucleotide
aggagcucugaugacaccu

SEQ ID NO: 3018812 - RNA, 19 nt, Artificial Sequence
  Description of Artificial Sequence: Synthetic oligonucleotide
aggucauuguccaggucac

SEQ ID NO: 3018813 - RNA, 19 nt, Artificial Sequence
  Description of Artificial Sequence: Synthetic oligonucleotide
acgaaaucuuccuccugca

SEQ ID NO: 3018814 - RNA, 19 nt, Artificial Sequence
  Description of Artificial Sequence: Synthetic oligonucleotide
cugaguacuucaugagguc

SEQ ID NO: 3018815 - RNA, 19 nt, Artificial Sequence
  Description of Artificial Sequence: Synthetic oligonucleotide
gucaauuucuccauccaaa

SEQ ID NO: 3018816 - RNA, 19 nt, Artificial Sequence
  Description of Artificial Sequence: Synthetic oligonucleotide
ggugaggagcuucagguca

SEQ ID NO: 3018817 - RNA, 19 nt, Artificial Sequence
  Description of Artificial Sequence: Synthetic oligonucleotide
cacaucauccucucgaacu

SEQ ID NO: 3018818 - RNA, 19 nt, Artificial Sequence
  Description of Artificial Sequence: Synthetic oligonucleotide
ucucgaacuucaugcucug

SEQ ID NO: 3018819 - RNA, 19 nt, Artificial Sequence
  Description of Artificial Sequence: Synthetic oligonucleotide
acaucauccucucgaacuu

SEQ ID NO: 3018820 - RNA, 19 nt, Artificial Sequence
  Description of Artificial Sequence: Synthetic oligonucleotide
ucccacuccgugaggagcu

SEQ ID NO: 3018821 - RNA, 19 nt, Artificial Sequence
  Description of Artificial Sequence: Synthetic oligonucleotide
uccucucgaacuucaugcu

SEQ ID NO: 3018822 - RNA, 19 nt, Artificial Sequence
  Description of Artificial Sequence: Synthetic oligonucleotide
gaucacuggaauaucuucu

SEQ ID NO: 3018823 - RNA, 19 nt, Artificial Sequence
  Description of Artificial Sequence: Synthetic oligonucleotide
ucaggcugugcugucugag

SEQ ID NO: 3018824 - RNA, 19 nt, Artificial Sequence
  Description of Artificial Sequence: Synthetic oligonucleotide
ucaugaggucauuguccag

SEQ ID NO: 3018825 - RNA, 19 nt, Artificial Sequence
  Description of Artificial Sequence: Synthetic oligonucleotide
ucugcccgcagcagguccc

SEQ ID NO: 3018826 - RNA, 19 nt, Artificial Sequence
  Description of Artificial Sequence: Synthetic oligonucleotide
agucaggcugugcugucug

SEQ ID NO: 3018827 - RNA, 19 nt, Artificial Sequence
  Description of Artificial Sequence: Synthetic oligonucleotide
aggggacgccaccugcagc

SEQ ID NO: 3018828 - RNA, 19 nt, Artificial Sequence
  Description of Artificial Sequence: Synthetic oligonucleotide
acgaugcugggucauguau

SEQ ID NO: 3018829 - RNA, 19 nt, Artificial Sequence
  Description of Artificial Sequence: Synthetic oligonucleotide
ggaucacuggaauaucuuc

SEQ ID NO: 3018830 - RNA, 19 nt, Artificial Sequence
  Description of Artificial Sequence: Synthetic oligonucleotide
auuguccaggucacgguag

SEQ ID NO: 3018831 - RNA, 19 nt, Artificial Sequence
  Description of Artificial Sequence: Synthetic oligonucleotide
caggcugugcugucugagg

SEQ ID NO: 3018832 - RNA, 19 nt, Artificial Sequence
  Description of Artificial Sequence: Synthetic oligonucleotide
gucccagcccacaucaucc

SEQ ID NO: 3018833 - RNA, 19 nt, Artificial Sequence
  Description of Artificial Sequence: Synthetic oligonucleotide
ugacaccucaguguacaga

SEQ ID NO: 3018834 - RNA, 19 nt, Artificial Sequence
  Description of Artificial Sequence: Synthetic oligonucleotide
aguguacagauggucccag

SEQ ID NO: 3018835 - RNA, 19 nt, Artificial Sequence
  Description of Artificial Sequence: Synthetic oligonucleotide
ugaugacaccucaguguac

SEQ ID NO: 3018836 - RNA, 19 nt, Artificial Sequence
  Description of Artificial Sequence: Synthetic oligonucleotide
agcuucaggucaauuucuc

SEQ ID NO: 3018837 - RNA, 19 nt, Artificial Sequence
  Description of Artificial Sequence: Synthetic oligonucleotide
cugcagcacgaaaucuucc

SEQ ID NO: 3018838 - RNA, 19 nt, Artificial Sequence
  Description of Artificial Sequence: Synthetic oligonucleotide
gaugcuuggaggggacgcc

SEQ ID NO: 3018839 - RNA, 19 nt, Artificial Sequence
  Description of Artificial Sequence: Synthetic oligonucleotide
uuccuucucugcccgcagc

SEQ ID NO: 3018840 - RNA, 19 nt, Artificial Sequence
  Description of Artificial Sequence: Synthetic oligonucleotide
ucuguuuaccuggaugcuu

SEQ ID NO: 3018841 - RNA, 19 nt, Artificial Sequence
  Description of Artificial Sequence: Synthetic oligonucleotide
cugaugacaccucagugua

SEQ ID NO: 3018842 - RNA, 19 nt, Artificial Sequence
  Description of Artificial Sequence: Synthetic oligonucleotide
uggucccagucccagccca

SEQ ID NO: 3018843 - RNA, 19 nt, Artificial Sequence
  Description of Artificial Sequence: Synthetic oligonucleotide
augacaccucaguguacag

SEQ ID NO: 3018844 - RNA, 19 nt, Artificial Sequence
  Description of Artificial Sequence: Synthetic oligonucleotide
ggucuuccuucucugcccg

SEQ ID NO: 3018845 - RNA, 19 nt, Artificial Sequence
  Description of Artificial Sequence: Synthetic oligonucleotide
guacuucaugaggucauug

SEQ ID NO: 3018846 - RNA, 19 nt, Artificial Sequence
  Description of Artificial Sequence: Synthetic oligonucleotide
gaggggacgccaccugcag

SEQ ID NO: 3018847 - RNA, 19 nt, Artificial Sequence
  Description of Artificial Sequence: Synthetic oligonucleotide
ucuucuccuucaucugauc

SEQ ID NO: 3018848 - RNA, 19 nt, Artificial Sequence
  Description of Artificial Sequence: Synthetic oligonucleotide
agcaggucccacuccguga

SEQ ID NO: 3018849 - RNA, 19 nt, Artificial Sequence
  Description of Artificial Sequence: Synthetic oligonucleotide
ugacgaugcugggucaugu

SEQ ID NO: 3018850 - RNA, 19 nt, Artificial Sequence
  Description of Artificial Sequence: Synthetic oligonucleotide
uggaugcuuggaggggacg

SEQ ID NO: 3018851 - RNA, 19 nt, Artificial Sequence
  Description of Artificial Sequence: Synthetic oligonucleotide
uggugaggagcuucagguc

SEQ ID NO: 3018852 - RNA, 19 nt, Artificial Sequence
  Description of Artificial Sequence: Synthetic oligonucleotide
gucugaaaggcugaguacu

SEQ ID NO: 3018853 - RNA, 19 nt, Artificial Sequence
  Description of Artificial Sequence: Synthetic oligonucleotide
cucucgaacuucaugcucu

SEQ ID NO: 3018854 - RNA, 19 nt, Artificial Sequence
  Description of Artificial Sequence: Synthetic oligonucleotide
cgaacuucaugcucuggcg

SEQ ID NO: 3018855 - RNA, 19 nt, Artificial Sequence
  Description of Artificial Sequence: Synthetic oligonucleotide
gucacgguaggucaucacu

SEQ ID NO: 3018856 - RNA, 19 nt, Artificial Sequence
  Description of Artificial Sequence: Synthetic oligonucleotide
gugaggagcucugaugaca

SEQ ID NO: 3018857 - RNA, 19 nt, Artificial Sequence
  Description of Artificial Sequence: Synthetic oligonucleotide
augcugggucauguauacc

SEQ ID NO: 3018858 - RNA, 19 nt, Artificial Sequence
  Description of Artificial Sequence: Synthetic oligonucleotide
cagggucuuccuucucugc

SEQ ID NO: 3018859 - RNA, 19 nt, Artificial Sequence
  Description of Artificial Sequence: Synthetic oligonucleotide
aucauccucucgaacuuca

SEQ ID NO: 3018860 - RNA, 19 nt, Artificial Sequence
  Description of Artificial Sequence: Synthetic oligonucleotide
acuuuggugaggagcuuca

SEQ ID NO: 3018861 - RNA, 19 nt, Artificial Sequence
  Description of Artificial Sequence: Synthetic oligonucleotide
gaggagcucugaugacacc

SEQ ID NO: 3018862 - RNA, 19 nt, Artificial Sequence
  Description of Artificial Sequence: Synthetic oligonucleotide
cagauggucccagucccag

SEQ ID NO: 3018863 - RNA, 19 nt, Artificial Sequence
  Description of Artificial Sequence: Synthetic oligonucleotide
caugcucuggcgccagcac

SEQ ID NO: 3018864 - RNA, 19 nt, Artificial Sequence
  Description of Artificial Sequence: Synthetic oligonucleotide
gcugugcugucugaggcgg

SEQ ID NO: 3018865 - RNA, 19 nt, Artificial Sequence
  Description of Artificial Sequence: Synthetic oligonucleotide
ggcugugcugucugaggcg

SEQ ID NO: 3018866 - RNA, 19 nt, Artificial Sequence
  Description of Artificial Sequence: Synthetic oligonucleotide
cucugcccgcagcaggucc

SEQ ID NO: 3018867 - RNA, 19 nt, Artificial Sequence
  Description of Artificial Sequence: Synthetic oligonucleotide
ugcuuggaggggacgccac

SEQ ID NO: 3018868 - RNA, 19 nt, Artificial Sequence
  Description of Artificial Sequence: Synthetic oligonucleotide
gcaggucccacuccgugag

SEQ ID NO: 3018869 - RNA, 19 nt, Artificial Sequence
  Description of Artificial Sequence: Synthetic oligonucleotide
ugauccagucaggcugugc

SEQ ID NO: 3018870 - RNA, 19 nt, Artificial Sequence
  Description of Artificial Sequence: Synthetic oligonucleotide
ugaggucauuguccagguc

SEQ ID NO: 3018871 - RNA, 19 nt, Artificial Sequence
  Description of Artificial Sequence: Synthetic oligonucleotide
ucauccucucgaacuucau

SEQ ID NO: 3018872 - RNA, 19 nt, Artificial Sequence
  Description of Artificial Sequence: Synthetic oligonucleotide
cacuuuggugaggagcuuc

SEQ ID NO: 3018873 - RNA, 19 nt, Artificial Sequence
  Description of Artificial Sequence: Synthetic oligonucleotide
cugaaaggcugaguacuuc

SEQ ID NO: 3018874 - RNA, 19 nt, Artificial Sequence
  Description of Artificial Sequence: Synthetic oligonucleotide
cuggaugcuuggaggggac

SEQ ID NO: 3018875 - RNA, 19 nt, Artificial Sequence
  Description of Artificial Sequence: Synthetic oligonucleotide
agcucugaugacaccucag

SEQ ID NO: 3018876 - RNA, 19 nt, Artificial Sequence
  Description of Artificial Sequence: Synthetic oligonucleotide
ggucaauuucuccauccaa

SEQ ID NO: 3018877 - RNA, 19 nt, Artificial Sequence
  Description of Artificial Sequence: Synthetic oligonucleotide
uucaugcucuggcgccagc

SEQ ID NO: 3018878 - RNA, 19 nt, Artificial Sequence
  Description of Artificial Sequence: Synthetic oligonucleotide
agcccacaucauccucucg

SEQ ID NO: 3018879 - RNA, 19 nt, Artificial Sequence
  Description of Artificial Sequence: Synthetic oligonucleotide
cucgaacuucaugcucugg

SEQ ID NO: 3018880 - RNA, 19 nt, Artificial Sequence
  Description of Artificial Sequence: Synthetic oligonucleotide
cacuccgugaggagcucug

SEQ ID NO: 3018881 - RNA, 19 nt, Artificial Sequence
  Description of Artificial Sequence: Synthetic oligonucleotide
cuuuggugaggagcuucag

SEQ ID NO: 3018882 - RNA, 19 nt, Artificial Sequence
  Description of Artificial Sequence: Synthetic oligonucleotide
ucacucuguuuaccuggau

SEQ ID NO: 3018883 - RNA, 19 nt, Artificial Sequence
  Description of Artificial Sequence: Synthetic oligonucleotide
ggaugcuuggaggggacgc

SEQ ID NO: 3018884 - RNA, 19 nt, Artificial Sequence
  Description of Artificial Sequence: Synthetic oligonucleotide
ucccagcccacaucauccu

SEQ ID NO: 3018885 - RNA, 19 nt, Artificial Sequence
  Description of Artificial Sequence: Synthetic oligonucleotide
gucccacuccgugaggagc

SEQ ID NO: 3018886 - RNA, 19 nt, Artificial Sequence
  Description of Artificial Sequence: Synthetic oligonucleotide
acuucaugcucuggcgcca

SEQ ID NO: 3018887 - RNA, 19 nt, Artificial Sequence
  Description of Artificial Sequence: Synthetic oligonucleotide
gacgccaccugcagcacga

SEQ ID NO: 3018888 - RNA, 19 nt, Artificial Sequence
  Description of Artificial Sequence: Synthetic oligonucleotide
ggggacgccaccugcagca

SEQ ID NO: 3018889 - RNA, 19 nt, Artificial Sequence
  Description of Artificial Sequence: Synthetic oligonucleotide
ccugcagcacgaaaucuuc

SEQ ID NO: 3018890 - RNA, 19 nt, Artificial Sequence
  Description of Artificial Sequence: Synthetic oligonucleotide
aucuucuccuucaucugau

SEQ ID NO: 3018891 - RNA, 19 nt, Artificial Sequence
  Description of Artificial Sequence: Synthetic oligonucleotide
ggucauguauaccugggau

SEQ ID NO: 3018892 - RNA, 19 nt, Artificial Sequence
  Description of Artificial Sequence: Synthetic oligonucleotide
cagcaggucccacuccgug

SEQ ID NO: 3018893 - RNA, 19 nt, Artificial Sequence
  Description of Artificial Sequence: Synthetic oligonucleotide
gcugaguacuucaugaggu

SEQ ID NO: 3018894 - RNA, 19 nt, Artificial Sequence
  Description of Artificial Sequence: Synthetic oligonucleotide
ccagauccgggaucacugg

SEQ ID NO: 3018895 - RNA, 19 nt, Artificial Sequence
  Description of Artificial Sequence: Synthetic oligonucleotide
agauccgggaucacuggaa

SEQ ID NO: 3018896 - RNA, 19 nt, Artificial Sequence
  Description of Artificial Sequence: Synthetic oligonucleotide
caucauccucucgaacuuc

SEQ ID NO: 3018897 - RNA, 19 nt, Artificial Sequence
  Description of Artificial Sequence: Synthetic oligonucleotide
gauccgggaucacuggaau

SEQ ID NO: 3018898 - RNA, 19 nt, Artificial Sequence
  Description of Artificial Sequence: Synthetic oligonucleotide
uggcgccagcacuuuggug

SEQ ID NO: 3018899 - RNA, 19 nt, Artificial Sequence
  Description of Artificial Sequence: Synthetic oligonucleotide
aguacuucaugaggucauu

SEQ ID NO: 3018900 - RNA, 19 nt, Artificial Sequence
  Description of Artificial Sequence: Synthetic oligonucleotide
agugacgaugcugggucau

SEQ ID NO: 3018901 - RNA, 19 nt, Artificial Sequence
  Description of Artificial Sequence: Synthetic oligonucleotide
uguccaggucacgguaggu

SEQ ID NO: 3018902 - RNA, 19 nt, Artificial Sequence
  Description of Artificial Sequence: Synthetic oligonucleotide
accugcagcacgaaaucuu

SEQ ID NO: 3018903 - RNA, 19 nt, Artificial Sequence
  Description of Artificial Sequence: Synthetic oligonucleotide
cuucaugcucuggcgccag

SEQ ID NO: 3018904 - RNA, 19 nt, Artificial Sequence
  Description of Artificial Sequence: Synthetic oligonucleotide
gagcuucaggucaauuucu

SEQ ID NO: 3018905 - RNA, 19 nt, Artificial Sequence
  Description of Artificial Sequence: Synthetic oligonucleotide
ccgugaggagcucugauga

SEQ ID NO: 3018906 - RNA, 19 nt, Artificial Sequence
  Description of Artificial Sequence: Synthetic oligonucleotide
guuuaccuggaugcuugga

SEQ ID NO: 3018907 - RNA, 19 nt, Artificial Sequence
  Description of Artificial Sequence: Synthetic oligonucleotide
gcagcacgaaaucuuccuc

SEQ ID NO: 3018908 - RNA, 19 nt, Artificial Sequence
  Description of Artificial Sequence: Synthetic oligonucleotide
auccgggaucacuggaaua

SEQ ID NO: 3018909 - RNA, 19 nt, Artificial Sequence
  Description of Artificial Sequence: Synthetic oligonucleotide
gacgaugcugggucaugua

SEQ ID NO: 3018910 - RNA, 19 nt, Artificial Sequence
  Description of Artificial Sequence: Synthetic oligonucleotide
augcuuggaggggacgcca

SEQ ID NO: 3018911 - RNA, 19 nt, Artificial Sequence
  Description of Artificial Sequence: Synthetic oligonucleotide
cagcccacaucauccucuc

SEQ ID NO: 3018912 - RNA, 19 nt, Artificial Sequence
  Description of Artificial Sequence: Synthetic oligonucleotide
gcacaucuuccagauccgg

SEQ ID NO: 3018913 - RNA, 19 nt, Artificial Sequence
  Description of Artificial Sequence: Synthetic oligonucleotide
cagauccgggaucacugga

SEQ ID NO: 3018914 - RNA, 19 nt, Artificial Sequence
  Description of Artificial Sequence: Synthetic oligonucleotide
ccaaagucugaaaggcuga

SEQ ID NO: 3018915 - RNA, 19 nt, Artificial Sequence
  Description of Artificial Sequence: Synthetic oligonucleotide
ggacgccaccugcagcacg

SEQ ID NO: 3018916 - RNA, 19 nt, Artificial Sequence
  Description of Artificial Sequence: Synthetic oligonucleotide
gggucauguauaccuggga

SEQ ID NO: 3018917 - RNA, 19 nt, Artificial Sequence
  Description of Artificial Sequence: Synthetic oligonucleotide
aggucacgguaggucauca

SEQ ID NO: 3018918 - RNA, 19 nt, Artificial Sequence
  Description of Artificial Sequence: Synthetic oligonucleotide
caucugauccagucaggcu

SEQ ID NO: 3018919 - RNA, 19 nt, Artificial Sequence
  Description of Artificial Sequence: Synthetic oligonucleotide
gaaaggcugaguacuucau

SEQ ID NO: 3018920 - RNA, 19 nt, Artificial Sequence
  Description of Artificial Sequence: Synthetic oligonucleotide
ccagucccagcccacauca

SEQ ID NO: 3018921 - RNA, 19 nt, Artificial Sequence
  Description of Artificial Sequence: Synthetic oligonucleotide
gugacgaugcugggucaug

SEQ ID NO: 3018922 - RNA, 19 nt, Artificial Sequence
  Description of Artificial Sequence: Synthetic oligonucleotide
ggucauuguccaggucacg

SEQ ID NO: 3018923 - RNA, 19 nt, Artificial Sequence
  Description of Artificial Sequence: Synthetic oligonucleotide
ccuucaucugauccaguca

SEQ ID NO: 3018924 - RNA, 19 nt, Artificial Sequence
  Description of Artificial Sequence: Synthetic oligonucleotide
ggucccacuccgugaggag

SEQ ID NO: 3018925 - RNA, 19 nt, Artificial Sequence
  Description of Artificial Sequence: Synthetic oligonucleotide
gcugggucauguauaccug

SEQ ID NO: 3018926 - RNA, 19 nt, Artificial Sequence
  Description of Artificial Sequence: Synthetic oligonucleotide
caguguacagaugguccca

SEQ ID NO: 3018927 - RNA, 19 nt, Artificial Sequence
  Description of Artificial Sequence: Synthetic oligonucleotide
acagauggucccaguccca

SEQ ID NO: 3018928 - RNA, 19 nt, Artificial Sequence
  Description of Artificial Sequence: Synthetic oligonucleotide
cgcagcaggucccacuccg

SEQ ID NO: 3018929 - RNA, 19 nt, Artificial Sequence
  Description of Artificial Sequence: Synthetic oligonucleotide
gcacgaaaucuuccuccug

SEQ ID NO: 3018930 - RNA, 19 nt, Artificial Sequence
  Description of Artificial Sequence: Synthetic oligonucleotide
ccucaguguacagaugguc

SEQ ID NO: 3018931 - RNA, 19 nt, Artificial Sequence
  Description of Artificial Sequence: Synthetic oligonucleotide
acaccucaguguacagaug

SEQ ID NO: 3018932 - RNA, 19 nt, Artificial Sequence
  Description of Artificial Sequence: Synthetic oligonucleotide
caggucccacuccgugagg

SEQ ID NO: 3018933 - RNA, 19 nt, Artificial Sequence
  Description of Artificial Sequence: Synthetic oligonucleotide
ccucucgaacuucaugcuc

SEQ ID NO: 3018934 - RNA, 19 nt, Artificial Sequence
  Description of Artificial Sequence: Synthetic oligonucleotide
cacgguaggucaucacucu

SEQ ID NO: 3018935 - RNA, 19 nt, Artificial Sequence
  Description of Artificial Sequence: Synthetic oligonucleotide
ccaccugcagcacgaaauc

SEQ ID NO: 3018936 - RNA, 19 nt, Artificial Sequence
  Description of Artificial Sequence: Synthetic oligonucleotide
gcucugaugacaccucagu

SEQ ID NO: 3018937 - RNA, 19 nt, Artificial Sequence
  Description of Artificial Sequence: Synthetic oligonucleotide
gucaggcugugcugucuga

SEQ ID NO: 3018938 - RNA, 19 nt, Artificial Sequence
  Description of Artificial Sequence: Synthetic oligonucleotide
cucuggcgccagcacuuug

SEQ ID NO: 3018939 - RNA, 19 nt, Artificial Sequence
  Description of Artificial Sequence: Synthetic oligonucleotide
ugaggagcuucaggucaau

SEQ ID NO: 3018940 - RNA, 19 nt, Artificial Sequence
  Description of Artificial Sequence: Synthetic oligonucleotide
acuccgugaggagcucuga

SEQ ID NO: 3018941 - RNA, 19 nt, Artificial Sequence
  Description of Artificial Sequence: Synthetic oligonucleotide
ggucacgguaggucaucac

SEQ ID NO: 3018942 - RNA, 19 nt, Artificial Sequence
  Description of Artificial Sequence: Synthetic oligonucleotide
caggucacgguaggucauc

SEQ ID NO: 3018943 - RNA, 19 nt, Artificial Sequence
  Description of Artificial Sequence: Synthetic oligonucleotide
ccacaucauccucucgaac

SEQ ID NO: 3018944 - RNA, 19 nt, Artificial Sequence
  Description of Artificial Sequence: Synthetic oligonucleotide
gcgccagcacuuuggugag

SEQ ID NO: 3018945 - RNA, 19 nt, Artificial Sequence
  Description of Artificial Sequence: Synthetic oligonucleotide
gugaggagcuucaggucaa

SEQ ID NO: 3018946 - RNA, 19 nt, Artificial Sequence
  Description of Artificial Sequence: Synthetic oligonucleotide
cgaaaucuuccuccugcac

SEQ ID NO: 3018947 - RNA, 19 nt, Artificial Sequence
  Description of Artificial Sequence: Synthetic oligonucleotide
ggagcucugaugacaccuc

SEQ ID NO: 3018948 - RNA, 19 nt, Artificial Sequence
  Description of Artificial Sequence: Synthetic oligonucleotide
ucucugcccgcagcagguc

SEQ ID NO: 3018949 - RNA, 19 nt, Artificial Sequence
  Description of Artificial Sequence: Synthetic oligonucleotide
caucuuccagauccgggau

SEQ ID NO: 3018950 - RNA, 19 nt, Artificial Sequence
  Description of Artificial Sequence: Synthetic oligonucleotide
gguaggucaucacucuguu

SEQ ID NO: 3018951 - RNA, 19 nt, Artificial Sequence
  Description of Artificial Sequence: Synthetic oligonucleotide
cuuccagauccgggaucac

SEQ ID NO: 3018952 - RNA, 19 nt, Artificial Sequence
  Description of Artificial Sequence: Synthetic oligonucleotide
guguacagauggucccagu

SEQ ID NO: 3018953 - RNA, 19 nt, Artificial Sequence
  Description of Artificial Sequence: Synthetic oligonucleotide
cccgcagcaggucccacuc

SEQ ID NO: 3018954 - RNA, 19 nt, Artificial Sequence
  Description of Artificial Sequence: Synthetic oligonucleotide
cugauccagucaggcugug

SEQ ID NO: 3018955 - RNA, 19 nt, Artificial Sequence
  Description of Artificial Sequence: Synthetic oligonucleotide
guaggucaucacucuguuu

SEQ ID NO: 3018956 - RNA, 19 nt, Artificial Sequence
  Description of Artificial Sequence: Synthetic oligonucleotide
cucuguuuaccuggaugcu

SEQ ID NO: 3018957 - RNA, 19 nt, Artificial Sequence
  Description of Artificial Sequence: Synthetic oligonucleotide
ccagcacuuuggugaggag

SEQ ID NO: 3018958 - RNA, 19 nt, Artificial Sequence
  Description of Artificial Sequence: Synthetic oligonucleotide
cgugaggagcucugaugac

SEQ ID NO: 3018959 - RNA, 19 nt, Artificial Sequence
  Description of Artificial Sequence: Synthetic oligonucleotide
ccuggaugcuuggagggga

SEQ ID NO: 3018960 - RNA, 19 nt, Artificial Sequence
  Description of Artificial Sequence: Synthetic oligonucleotide
cccacaucauccucucgaa

SEQ ID NO: 3018961 - RNA, 19 nt, Artificial Sequence
  Description of Artificial Sequence: Synthetic oligonucleotide
ccagcccacaucauccucu

SEQ ID NO: 3018962 - RNA, 19 nt, Artificial Sequence
  Description of Artificial Sequence: Synthetic oligonucleotide
ccagucaggcugugcuguc

SEQ ID NO: 3018963 - RNA, 19 nt, Artificial Sequence
  Description of Artificial Sequence: Synthetic oligonucleotide
cccagucccagcccacauc

SEQ ID NO: 3018964 - RNA, 19 nt, Artificial Sequence
  Description of Artificial Sequence: Synthetic oligonucleotide
caccugcagcacgaaaucu

SEQ ID NO: 3018965 - RNA, 19 nt, Artificial Sequence
  Description of Artificial Sequence: Synthetic oligonucleotide
cauguauaccugggauggu

SEQ ID NO: 3018966 - RNA, 19 nt, Artificial Sequence
  Description of Artificial Sequence: Synthetic oligonucleotide
cgaugcugggucauguaua

SEQ ID NO: 3018967 - RNA, 19 nt, Artificial Sequence
  Description of Artificial Sequence: Synthetic oligonucleotide
cuccgugaggagcucugau

SEQ ID NO: 3018968 - RNA, 19 nt, Artificial Sequence
  Description of Artificial Sequence: Synthetic oligonucleotide
gaggagcuucaggucaauu

SEQ ID NO: 3018969 - RNA, 19 nt, Artificial Sequence
  Description of Artificial Sequence: Synthetic oligonucleotide
gggaucacuggaauaucuu

SEQ ID NO: 3018970 - RNA, 19 nt, Artificial Sequence
  Description of Artificial Sequence: Synthetic oligonucleotide
ggucccagucccagcccac

SEQ ID NO: 3018971 - RNA, 19 nt, Artificial Sequence
  Description of Artificial Sequence: Synthetic oligonucleotide
ccgggaucacuggaauauc

SEQ ID NO: 3018972 - RNA, 19 nt, Artificial Sequence
  Description of Artificial Sequence: Synthetic oligonucleotide
ugcccgcagcaggucccac

SEQ ID NO: 3018973 - RNA, 19 nt, Artificial Sequence
  Description of Artificial Sequence: Synthetic oligonucleotide
cgggaucacuggaauaucu

SEQ ID NO: 3018974 - RNA, 19 nt, Artificial Sequence
  Description of Artificial Sequence: Synthetic oligonucleotide
ccgcagcaggucccacucc

SEQ ID NO: 3018975 - RNA, 19 nt, Artificial Sequence
  Description of Artificial Sequence: Synthetic oligonucleotide
cgguaggucaucacucugu

SEQ ID NO: 3018976 - RNA, 19 nt, Artificial Sequence
  Description of Artificial Sequence: Synthetic oligonucleotide
cugcccgcagcagguccca

SEQ ID NO: 3018977 - RNA, 19 nt, Artificial Sequence
  Description of Artificial Sequence: Synthetic oligonucleotide
gggacgccaccugcagcac

SEQ ID NO: 3018978 - RNA, 19 nt, Artificial Sequence
  Description of Artificial Sequence: Synthetic oligonucleotide
acgccaccugcagcacgaa

SEQ ID NO: 3018979 - RNA, 19 nt, Artificial Sequence
  Description of Artificial Sequence: Synthetic oligonucleotide
cagucccagcccacaucau

SEQ ID NO: 3018980 - RNA, 19 nt, Artificial Sequence
  Description of Artificial Sequence: Synthetic oligonucleotide
gcccgcagcaggucccacu

SEQ ID NO: 3018981 - RNA, 19 nt, Artificial Sequence
  Description of Artificial Sequence: Synthetic oligonucleotide
cccacuccgugaggagcuc

SEQ ID NO: 3018982 - RNA, 19 nt, Artificial Sequence
  Description of Artificial Sequence: Synthetic oligonucleotide
cgccaccugcagcacgaaa

SEQ ID NO: 3018983 - RNA, 19 nt, Artificial Sequence
  Description of Artificial Sequence: Synthetic oligonucleotide
ccacuccgugaggagcucu

SEQ ID NO: 3018984 - RNA, 19 nt, Artificial Sequence
  Description of Artificial Sequence: Synthetic oligonucleotide
gcucuggcgccagcacuuu

SEQ ID NO: 3018985 - RNA, 19 nt, Artificial Sequence
  Description of Artificial Sequence: Synthetic oligonucleotide
uccuuuaugagguugaugg

SEQ ID NO: 3018986 - RNA, 19 nt, Artificial Sequence
  Description of Artificial Sequence: Synthetic oligonucleotide
aaaucaugcgcacaauggc

SEQ ID NO: 3018987 - RNA, 19 nt, Artificial Sequence
  Description of Artificial Sequence: Synthetic oligonucleotide
uguuucaugggauucaggg

SEQ ID NO: 3018988 - RNA, 19 nt, Artificial Sequence
  Description of Artificial Sequence: Synthetic oligonucleotide
uauuucauagucaaugccu

SEQ ID NO: 3018989 - RNA, 19 nt, Artificial Sequence
  Description of Artificial Sequence: Synthetic oligonucleotide
uucggaaauaggaauagag

SEQ ID NO: 3018990 - RNA, 19 nt, Artificial Sequence
  Description of Artificial Sequence: Synthetic oligonucleotide
ucugaaauuccucugagaa

SEQ ID NO: 3018991 - RNA, 19 nt, Artificial Sequence
  Description of Artificial Sequence: Synthetic oligonucleotide
auaggaauagaggacaggc

SEQ ID NO: 3018992 - RNA, 19 nt, Artificial Sequence
  Description of Artificial Sequence: Synthetic oligonucleotide
ucggaaauaggaauagagg

SEQ ID NO: 3018993 - RNA, 19 nt, Artificial Sequence
  Description of Artificial Sequence: Synthetic oligonucleotide
uuucuuuggguccugaggc

SEQ ID NO: 3018994 - RNA, 19 nt, Artificial Sequence
  Description of Artificial Sequence: Synthetic oligonucleotide
uuuucuuuggguccugagg

SEQ ID NO: 3018995 - RNA, 19 nt, Artificial Sequence
  Description of Artificial Sequence: Synthetic oligonucleotide
ugaaauuccucugagaacu

SEQ ID NO: 3018996 - RNA, 19 nt, Artificial Sequence
  Description of Artificial Sequence: Synthetic oligonucleotide
auuggcacuuguuucaugg

SEQ ID NO: 3018997 - RNA, 19 nt, Artificial Sequence
  Description of Artificial Sequence: Synthetic oligonucleotide
cuugcuucaggacagacag

SEQ ID NO: 3018998 - RNA, 19 nt, Artificial Sequence
  Description of Artificial Sequence: Synthetic oligonucleotide
acuuauuucauagucaaug

SEQ ID NO: 3018999 - RNA, 19 nt, Artificial Sequence
  Description of Artificial Sequence: Synthetic oligonucleotide
uuauuucauagucaaugcc

SEQ ID NO: 3019000 - RNA, 19 nt, Artificial Sequence
  Description of Artificial Sequence: Synthetic oligonucleotide
gaaaucaugcgcacaaugg

SEQ ID NO: 3019001 - RNA, 19 nt, Artificial Sequence
  Description of Artificial Sequence: Synthetic oligonucleotide
uucugaaugggcuggaugc

SEQ ID NO: 3019002 - RNA, 19 nt, Artificial Sequence
  Description of Artificial Sequence: Synthetic oligonucleotide
cuuauuucauagucaaugc

SEQ ID NO: 3019003 - RNA, 19 nt, Artificial Sequence
  Description of Artificial Sequence: Synthetic oligonucleotide
ugggcuacuuauuucauag

SEQ ID NO: 3019004 - RNA, 19 nt, Artificial Sequence
  Description of Artificial Sequence: Synthetic oligonucleotide
uuucaugggauucaggguc

SEQ ID NO: 3019005 - RNA, 19 nt, Artificial Sequence
  Description of Artificial Sequence: Synthetic oligonucleotide
gauuccgucgaucuucagg

SEQ ID NO: 3019006 - RNA, 19 nt, Artificial Sequence
  Description of Artificial Sequence: Synthetic oligonucleotide
uucgaacucuccaugaaca

SEQ ID NO: 3019007 - RNA, 19 nt, Artificial Sequence
  Description of Artificial Sequence: Synthetic oligonucleotide
uuuaugagguugaugggcu

SEQ ID NO: 3019008 - RNA, 19 nt, Artificial Sequence
  Description of Artificial Sequence: Synthetic oligonucleotide
auagucaaugccuuuucag

SEQ ID NO: 3019009 - RNA, 19 nt, Artificial Sequence
  Description of Artificial Sequence: Synthetic oligonucleotide
ucagaaaucaugcgcacaa

SEQ ID NO: 3019010 - RNA, 19 nt, Artificial Sequence
  Description of Artificial Sequence: Synthetic oligonucleotide
augaggucagaaaucaugc

SEQ ID NO: 3019011 - RNA, 19 nt, Artificial Sequence
  Description of Artificial Sequence: Synthetic oligonucleotide
gaugccacuagcgaugagg

SEQ ID NO: 3019012 - RNA, 19 nt, Artificial Sequence
  Description of Artificial Sequence: Synthetic oligonucleotide
auucgaacucuccaugaac

SEQ ID NO: 3019013 - RNA, 19 nt, Artificial Sequence
  Description of Artificial Sequence: Synthetic oligonucleotide
ugaugggcuacuuauuuca

SEQ ID NO: 3019014 - RNA, 19 nt, Artificial Sequence
  Description of Artificial Sequence: Synthetic oligonucleotide
gaaauaggaauagaggaca

SEQ ID NO: 3019015 - RNA, 19 nt, Artificial Sequence
  Description of Artificial Sequence: Synthetic oligonucleotide
auuccgucgaucuucagga

SEQ ID NO: 3019016 - RNA, 19 nt, Artificial Sequence
  Description of Artificial Sequence: Synthetic oligonucleotide
aauaggaauagaggacagg

SEQ ID NO: 3019017 - RNA, 19 nt, Artificial Sequence
  Description of Artificial Sequence: Synthetic oligonucleotide
gaugaggucagaaaucaug

SEQ ID NO: 3019018 - RNA, 19 nt, Artificial Sequence
  Description of Artificial Sequence: Synthetic oligonucleotide
acagacagguucugaaugg

SEQ ID NO: 3019019 - RNA, 19 nt, Artificial Sequence
  Description of Artificial Sequence: Synthetic oligonucleotide
uccaugaacaggagcuucg

SEQ ID NO: 3019020 - RNA, 19 nt, Artificial Sequence
  Description of Artificial Sequence: Synthetic oligonucleotide
agaaaucaugcgcacaaug

SEQ ID NO: 3019021 - RNA, 19 nt, Artificial Sequence
  Description of Artificial Sequence: Synthetic oligonucleotide
ucgaucuucaggauuggca

SEQ ID NO: 3019022 - RNA, 19 nt, Artificial Sequence
  Description of Artificial Sequence: Synthetic oligonucleotide
agucaaugccuuuucagug

SEQ ID NO: 3019023 - RNA, 19 nt, Artificial Sequence
  Description of Artificial Sequence: Synthetic oligonucleotide
cuuuaugagguugaugggc

SEQ ID NO: 3019024 - RNA, 19 nt, Artificial Sequence
  Description of Artificial Sequence: Synthetic oligonucleotide
gacagacagguucugaaug

SEQ ID NO: 3019025 - RNA, 19 nt, Artificial Sequence
  Description of Artificial Sequence: Synthetic oligonucleotide
auagaggacaggcuucccg

SEQ ID NO: 3019026 - RNA, 19 nt, Artificial Sequence
  Description of Artificial Sequence: Synthetic oligonucleotide
uagaggacaggcuucccgg

SEQ ID NO: 3019027 - RNA, 19 nt, Artificial Sequence
  Description of Artificial Sequence: Synthetic oligonucleotide
aaugccuuuucagugccag

SEQ ID NO: 3019028 - RNA, 19 nt, Artificial Sequence
  Description of Artificial Sequence: Synthetic oligonucleotide
ugaggucagaaaucaugcg

SEQ ID NO: 3019029 - RNA, 19 nt, Artificial Sequence
  Description of Artificial Sequence: Synthetic oligonucleotide
uagucaaugccuuuucagu

SEQ ID NO: 3019030 - RNA, 19 nt, Artificial Sequence
  Description of Artificial Sequence: Synthetic oligonucleotide
aauggugauuccgucgauc

SEQ ID NO: 3019031 - RNA, 19 nt, Artificial Sequence
  Description of Artificial Sequence: Synthetic oligonucleotide
ucaaugccuuuucagugcc

SEQ ID NO: 3019032 - RNA, 19 nt, Artificial Sequence
  Description of Artificial Sequence: Synthetic oligonucleotide
aaauaggaauagaggacag

SEQ ID NO: 3019033 - RNA, 19 nt, Artificial Sequence
  Description of Artificial Sequence: Synthetic oligonucleotide
guuucuuccagguacucca

SEQ ID NO: 3019034 - RNA, 19 nt, Artificial Sequence
  Description of Artificial Sequence: Synthetic oligonucleotide
ucaggauuggcacuuguuu

SEQ ID NO: 3019035 - RNA, 19 nt, Artificial Sequence
  Description of Artificial Sequence: Synthetic oligonucleotide
augaacaggagcuucggaa

SEQ ID NO: 3019036 - RNA, 19 nt, Artificial Sequence
  Description of Artificial Sequence: Synthetic oligonucleotide
aguuucuuccagguacucc

SEQ ID NO: 3019037 - RNA, 19 nt, Artificial Sequence
  Description of Artificial Sequence: Synthetic oligonucleotide
uucaggacagacagguucu

SEQ ID NO: 3019038 - RNA, 19 nt, Artificial Sequence
  Description of Artificial Sequence: Synthetic oligonucleotide
agagcuauucgaacucucc

SEQ ID NO: 3019039 - RNA, 19 nt, Artificial Sequence
  Description of Artificial Sequence: Synthetic oligonucleotide
ucccacuugcuucaggaca

SEQ ID NO: 3019040 - RNA, 19 nt, Artificial Sequence
  Description of Artificial Sequence: Synthetic oligonucleotide
aggaauagaggacaggcuu

SEQ ID NO: 3019041 - RNA, 19 nt, Artificial Sequence
  Description of Artificial Sequence: Synthetic oligonucleotide
ugaacaggagcuucggaaa

SEQ ID NO: 3019042 - RNA, 19 nt, Artificial Sequence
  Description of Artificial Sequence: Synthetic oligonucleotide
uuccucugagaacuguugc

SEQ ID NO: 3019043 - RNA, 19 nt, Artificial Sequence
  Description of Artificial Sequence: Synthetic oligonucleotide
ugccuuuucagugccagag

SEQ ID NO: 3019044 - RNA, 19 nt, Artificial Sequence
  Description of Artificial Sequence: Synthetic oligonucleotide
uagcgaugaggucagaaau

SEQ ID NO: 3019045 - RNA, 19 nt, Artificial Sequence
  Description of Artificial Sequence: Synthetic oligonucleotide
gauucagggucugaaauuc

SEQ ID NO: 3019046 - RNA, 19 nt, Artificial Sequence
  Description of Artificial Sequence: Synthetic oligonucleotide
ugucccacuugcuucagga

SEQ ID NO: 3019047 - RNA, 19 nt, Artificial Sequence
  Description of Artificial Sequence: Synthetic oligonucleotide
uccaugauggccagugacu

SEQ ID NO: 3019048 - RNA, 19 nt, Artificial Sequence
  Description of Artificial Sequence: Synthetic oligonucleotide
cuacuuauuucauagucaa

SEQ ID NO: 3019049 - RNA, 19 nt, Artificial Sequence
  Description of Artificial Sequence: Synthetic oligonucleotide
gucaaugccuuuucagugc

SEQ ID NO: 3019050 - RNA, 19 nt, Artificial Sequence
  Description of Artificial Sequence: Synthetic oligonucleotide
aauagaggacaggcuuccc

SEQ ID NO: 3019051 - RNA, 19 nt, Artificial Sequence
  Description of Artificial Sequence: Synthetic oligonucleotide
uuuucagugccagagcuau

SEQ ID NO: 3019052 - RNA, 19 nt, Artificial Sequence
  Description of Artificial Sequence: Synthetic oligonucleotide
ucagugccagagcuauucg

SEQ ID NO: 3019053 - RNA, 19 nt, Artificial Sequence
  Description of Artificial Sequence: Synthetic oligonucleotide
auggugauuccgucgaucu

SEQ ID NO: 3019054 - RNA, 19 nt, Artificial Sequence
  Description of Artificial Sequence: Synthetic oligonucleotide
uccucugagaacuguugcc

SEQ ID NO: 3019055 - RNA, 19 nt, Artificial Sequence
  Description of Artificial Sequence: Synthetic oligonucleotide
agguugaugggcuacuuau

SEQ ID NO: 3019056 - RNA, 19 nt, Artificial Sequence
  Description of Artificial Sequence: Synthetic oligonucleotide
uaggaauagaggacaggcu

SEQ ID NO: 3019057 - RNA, 19 nt, Artificial Sequence
  Description of Artificial Sequence: Synthetic oligonucleotide
aggauuggcacuuguuuca

SEQ ID NO: 3019058 - RNA, 19 nt, Artificial Sequence
  Description of Artificial Sequence: Synthetic oligonucleotide
gaauagaggacaggcuucc

SEQ ID NO: 3019059 - RNA, 19 nt, Artificial Sequence
  Description of Artificial Sequence: Synthetic oligonucleotide
uuguuucaugggauucagg

SEQ ID NO: 3019060 - RNA, 19 nt, Artificial Sequence
  Description of Artificial Sequence: Synthetic oligonucleotide
uggcacuuguuucauggga

SEQ ID NO: 3019061 - RNA, 19 nt, Artificial Sequence
  Description of Artificial Sequence: Synthetic oligonucleotide
uauucgaacucuccaugaa

SEQ ID NO: 3019062 - RNA, 19 nt, Artificial Sequence
  Description of Artificial Sequence: Synthetic oligonucleotide
ucgaacucuccaugaacag

SEQ ID NO: 3019063 - RNA, 19 nt, Artificial Sequence
  Description of Artificial Sequence: Synthetic oligonucleotide
cugaaauuccucugagaac

SEQ ID NO: 3019064 - RNA, 19 nt, Artificial Sequence
  Description of Artificial Sequence: Synthetic oligonucleotide
ucauagucaaugccuuuuc

SEQ ID NO: 3019065 - RNA, 19 nt, Artificial Sequence
  Description of Artificial Sequence: Synthetic oligonucleotide
uacuccaugauggccagug

SEQ ID NO: 3019066 - RNA, 19 nt, Artificial Sequence
  Description of Artificial Sequence: Synthetic oligonucleotide
agaggacaggcuucccggc

SEQ ID NO: 3019067 - RNA, 19 nt, Artificial Sequence
  Description of Artificial Sequence: Synthetic oligonucleotide
acagguucugaaugggcug

SEQ ID NO: 3019068 - RNA, 19 nt, Artificial Sequence
  Description of Artificial Sequence: Synthetic oligonucleotide
uuggcacuuguuucauggg

SEQ ID NO: 3019069 - RNA, 19 nt, Artificial Sequence
  Description of Artificial Sequence: Synthetic oligonucleotide
ugccagagcuauucgaacu

SEQ ID NO: 3019070 - RNA, 19 nt, Artificial Sequence
  Description of Artificial Sequence: Synthetic oligonucleotide
aggagcuucggaaauagga

SEQ ID NO: 3019071 - RNA, 19 nt, Artificial Sequence
  Description of Artificial Sequence: Synthetic oligonucleotide
caggauuggcacuuguuuc

SEQ ID NO: 3019072 - RNA, 19 nt, Artificial Sequence
  Description of Artificial Sequence: Synthetic oligonucleotide
cuggaugccacuagcgaug

SEQ ID NO: 3019073 - RNA, 19 nt, Artificial Sequence
  Description of Artificial Sequence: Synthetic oligonucleotide
uucaugggauucagggucu

SEQ ID NO: 3019074 - RNA, 19 nt, Artificial Sequence
  Description of Artificial Sequence: Synthetic oligonucleotide
ggaaauaggaauagaggac

SEQ ID NO: 3019075 - RNA, 19 nt, Artificial Sequence
  Description of Artificial Sequence: Synthetic oligonucleotide
aaauuccucugagaacugu

SEQ ID NO: 3019076 - RNA, 19 nt, Artificial Sequence
  Description of Artificial Sequence: Synthetic oligonucleotide
agcuauucgaacucuccau

SEQ ID NO: 3019077 - RNA, 19 nt, Artificial Sequence
  Description of Artificial Sequence: Synthetic oligonucleotide
agacagguucugaaugggc

SEQ ID NO: 3019078 - RNA, 19 nt, Artificial Sequence
  Description of Artificial Sequence: Synthetic oligonucleotide
cucugagaacuguugcccc

SEQ ID NO: 3019079 - RNA, 19 nt, Artificial Sequence
  Description of Artificial Sequence: Synthetic oligonucleotide
ggcuacuuauuucauaguc

SEQ ID NO: 3019080 - RNA, 19 nt, Artificial Sequence
  Description of Artificial Sequence: Synthetic oligonucleotide
uugaugggcuacuuauuuc

SEQ ID NO: 3019081 - RNA, 19 nt, Artificial Sequence
  Description of Artificial Sequence: Synthetic oligonucleotide
gagcuauucgaacucucca

SEQ ID NO: 3019082 - RNA, 19 nt, Artificial Sequence
  Description of Artificial Sequence: Synthetic oligonucleotide
uggccaauggugauuccgu

SEQ ID NO: 3019083 - RNA, 19 nt, Artificial Sequence
  Description of Artificial Sequence: Synthetic oligonucleotide
cuuguuucaugggauucag

SEQ ID NO: 3019084 - RNA, 19 nt, Artificial Sequence
  Description of Artificial Sequence: Synthetic oligonucleotide
aggucagaaaucaugcgca

SEQ ID NO: 3019085 - RNA, 19 nt, Artificial Sequence
  Description of Artificial Sequence: Synthetic oligonucleotide
caucugguucuccuguccc

SEQ ID NO: 3019086 - RNA, 19 nt, Artificial Sequence
  Description of Artificial Sequence: Synthetic oligonucleotide
ugggcuggaugccacuagc

SEQ ID NO: 3019087 - RNA, 19 nt, Artificial Sequence
  Description of Artificial Sequence: Synthetic oligonucleotide
cuccaugauggccagugac

SEQ ID NO: 3019088 - RNA, 19 nt, Artificial Sequence
  Description of Artificial Sequence: Synthetic oligonucleotide
agcgaugaggucagaaauc

SEQ ID NO: 3019089 - RNA, 19 nt, Artificial Sequence
  Description of Artificial Sequence: Synthetic oligonucleotide
caugauggccagugacugg

SEQ ID NO: 3019090 - RNA, 19 nt, Artificial Sequence
  Description of Artificial Sequence: Synthetic oligonucleotide
ucagggucugaaauuccuc

SEQ ID NO: 3019091 - RNA, 19 nt, Artificial Sequence
  Description of Artificial Sequence: Synthetic oligonucleotide
cagugacuggccaauggug

SEQ ID NO: 3019092 - RNA, 19 nt, Artificial Sequence
  Description of Artificial Sequence: Synthetic oligonucleotide
cuauucgaacucuccauga

SEQ ID NO: 3019093 - RNA, 19 nt, Artificial Sequence
  Description of Artificial Sequence: Synthetic oligonucleotide
cuggccaauggugauuccg

SEQ ID NO: 3019094 - RNA, 19 nt, Artificial Sequence
  Description of Artificial Sequence: Synthetic oligonucleotide
ucugaaugggcuggaugcc

SEQ ID NO: 3019095 - RNA, 19 nt, Artificial Sequence
  Description of Artificial Sequence: Synthetic oligonucleotide
ugggccgaguuucuuccag

SEQ ID NO: 3019096 - RNA, 19 nt, Artificial Sequence
  Description of Artificial Sequence: Synthetic oligonucleotide
ucuccugucccacuugcuu

SEQ ID NO: 3019097 - RNA, 19 nt, Artificial Sequence
  Description of Artificial Sequence: Synthetic oligonucleotide
cuuuggguccugaggcagg

SEQ ID NO: 3019098 - RNA, 19 nt, Artificial Sequence
  Description of Artificial Sequence: Synthetic oligonucleotide
uucuuuggguccugaggca

SEQ ID NO: 3019099 - RNA, 19 nt, Artificial Sequence
  Description of Artificial Sequence: Synthetic oligonucleotide
agugacuggccaaugguga

SEQ ID NO: 3019100 - RNA, 19 nt, Artificial Sequence
  Description of Artificial Sequence: Synthetic oligonucleotide
acuuguuucaugggauuca

SEQ ID NO: 3019101 - RNA, 19 nt, Artificial Sequence
  Description of Artificial Sequence: Synthetic oligonucleotide
ccgaguuucuuccagguac

SEQ ID NO: 3019102 - RNA, 19 nt, Artificial Sequence
  Description of Artificial Sequence: Synthetic oligonucleotide
aggcuucccggcuugcauc

SEQ ID NO: 3019103 - RNA, 19 nt, Artificial Sequence
  Description of Artificial Sequence: Synthetic oligonucleotide
gcuauucgaacucuccaug

SEQ ID NO: 3019104 - RNA, 19 nt, Artificial Sequence
  Description of Artificial Sequence: Synthetic oligonucleotide
uucaggauuggcacuuguu

SEQ ID NO: 3019105 - RNA, 19 nt, Artificial Sequence
  Description of Artificial Sequence: Synthetic oligonucleotide
gccaauggugauuccgucg

SEQ ID NO: 3019106 - RNA, 19 nt, Artificial Sequence
  Description of Artificial Sequence: Synthetic oligonucleotide
uccugucccacuugcuuca

SEQ ID NO: 3019107 - RNA, 19 nt, Artificial Sequence
  Description of Artificial Sequence: Synthetic oligonucleotide
auuucauagucaaugccuu

SEQ ID NO: 3019108 - RNA, 19 nt, Artificial Sequence
  Description of Artificial Sequence: Synthetic oligonucleotide
aauuccucugagaacuguu

SEQ ID NO: 3019109 - RNA, 19 nt, Artificial Sequence
  Description of Artificial Sequence: Synthetic oligonucleotide
agguacuccaugauggcca

SEQ ID NO: 3019110 - RNA, 19 nt, Artificial Sequence
  Description of Artificial Sequence: Synthetic oligonucleotide
cagacagguucugaauggg

SEQ ID NO: 3019111 - RNA, 19 nt, Artificial Sequence
  Description of Artificial Sequence: Synthetic oligonucleotide
cuagcgaugaggucagaaa

SEQ ID NO: 3019112 - RNA, 19 nt, Artificial Sequence
  Description of Artificial Sequence: Synthetic oligonucleotide
uuucauagucaaugccuuu

SEQ ID NO: 3019113 - RNA, 19 nt, Artificial Sequence
  Description of Artificial Sequence: Synthetic oligonucleotide
uccgucgaucuucaggauu

SEQ ID NO: 3019114 - RNA, 19 nt, Artificial Sequence
  Description of Artificial Sequence: Synthetic oligonucleotide
ugggauucagggucugaaa

SEQ ID NO: 3019115 - RNA, 19 nt, Artificial Sequence
  Description of Artificial Sequence: Synthetic oligonucleotide
acuggccaauggugauucc

SEQ ID NO: 3019116 - RNA, 19 nt, Artificial Sequence
  Description of Artificial Sequence: Synthetic oligonucleotide
gaaauuccucugagaacug

SEQ ID NO: 3019117 - RNA, 19 nt, Artificial Sequence
  Description of Artificial Sequence: Synthetic oligonucleotide
cauagucaaugccuuuuca

SEQ ID NO: 3019118 - RNA, 19 nt, Artificial Sequence
  Description of Artificial Sequence: Synthetic oligonucleotide
cuccugucccacuugcuuc

SEQ ID NO: 3019119 - RNA, 19 nt, Artificial Sequence
  Description of Artificial Sequence: Synthetic oligonucleotide
ggugauuccgucgaucuuc

SEQ ID NO: 3019120 - RNA, 19 nt, Artificial Sequence
  Description of Artificial Sequence: Synthetic oligonucleotide
ggagacguggggugggccg

SEQ ID NO: 3019121 - RNA, 19 nt, Artificial Sequence
  Description of Artificial Sequence: Synthetic oligonucleotide
gacuggccaauggugauuc

SEQ ID NO: 3019122 - RNA, 19 nt, Artificial Sequence
  Description of Artificial Sequence: Synthetic oligonucleotide
agugccagagcuauucgaa

SEQ ID NO: 3019123 - RNA, 19 nt, Artificial Sequence
  Description of Artificial Sequence: Synthetic oligonucleotide
augggcuggaugccacuag

SEQ ID NO: 3019124 - RNA, 19 nt, Artificial Sequence
  Description of Artificial Sequence: Synthetic oligonucleotide
gucugaaauuccucugaga

SEQ ID NO: 3019125 - RNA, 19 nt, Artificial Sequence
  Description of Artificial Sequence: Synthetic oligonucleotide
ggugggccgaguuucuucc

SEQ ID NO: 3019126 - RNA, 19 nt, Artificial Sequence
  Description of Artificial Sequence: Synthetic oligonucleotide
gcuacuuauuucauaguca

SEQ ID NO: 3019127 - RNA, 19 nt, Artificial Sequence
  Description of Artificial Sequence: Synthetic oligonucleotide
cgaucuucaggauuggcac

SEQ ID NO: 3019128 - RNA, 19 nt, Artificial Sequence
  Description of Artificial Sequence: Synthetic oligonucleotide
ccuuuaugagguugauggg

SEQ ID NO: 3019129 - RNA, 19 nt, Artificial Sequence
  Description of Artificial Sequence: Synthetic oligonucleotide
aacucuccaugaacaggag

SEQ ID NO: 3019130 - RNA, 19 nt, Artificial Sequence
  Description of Artificial Sequence: Synthetic oligonucleotide
aucugguucuccuguccca

SEQ ID NO: 3019131 - RNA, 19 nt, Artificial Sequence
  Description of Artificial Sequence: Synthetic oligonucleotide
gcuucggaaauaggaauag

SEQ ID NO: 3019132 - RNA, 19 nt, Artificial Sequence
  Description of Artificial Sequence: Synthetic oligonucleotide
gauggccagugacuggcca

SEQ ID NO: 3019133 - RNA, 19 nt, Artificial Sequence
  Description of Artificial Sequence: Synthetic oligonucleotide
acuugcuucaggacagaca

SEQ ID NO: 3019134 - RNA, 19 nt, Artificial Sequence
  Description of Artificial Sequence: Synthetic oligonucleotide
ugauggccagugacuggcc

SEQ ID NO: 3019135 - RNA, 19 nt, Artificial Sequence
  Description of Artificial Sequence: Synthetic oligonucleotide
aggcaggagacguggggug

SEQ ID NO: 3019136 - RNA, 19 nt, Artificial Sequence
  Description of Artificial Sequence: Synthetic oligonucleotide
gacagguucugaaugggcu

SEQ ID NO: 3019137 - RNA, 19 nt, Artificial Sequence
  Description of Artificial Sequence: Synthetic oligonucleotide
uuaugagguugaugggcua

SEQ ID NO: 3019138 - RNA, 19 nt, Artificial Sequence
  Description of Artificial Sequence: Synthetic oligonucleotide
guuucaugggauucagggu

SEQ ID NO: 3019139 - RNA, 19 nt, Artificial Sequence
  Description of Artificial Sequence: Synthetic oligonucleotide
auccuuuaugagguugaug

SEQ ID NO: 3019140 - RNA, 19 nt, Artificial Sequence
  Description of Artificial Sequence: Synthetic oligonucleotide
guugaugggcuacuuauuu

SEQ ID NO: 3019141 - RNA, 19 nt, Artificial Sequence
  Description of Artificial Sequence: Synthetic oligonucleotide
cacuuguuucaugggauuc

SEQ ID NO: 3019142 - RNA, 19 nt, Artificial Sequence
  Description of Artificial Sequence: Synthetic oligonucleotide
cagagcuauucgaacucuc

SEQ ID NO: 3019143 - RNA, 19 nt, Artificial Sequence
  Description of Artificial Sequence: Synthetic oligonucleotide
caggagcuucggaaauagg

SEQ ID NO: 3019144 - RNA, 19 nt, Artificial Sequence
  Description of Artificial Sequence: Synthetic oligonucleotide
aacaggagcuucggaaaua

SEQ ID NO: 3019145 - RNA, 19 nt, Artificial Sequence
  Description of Artificial Sequence: Synthetic oligonucleotide
uccugaggcaggagacgug

SEQ ID NO: 3019146 - RNA, 19 nt, Artificial Sequence
  Description of Artificial Sequence: Synthetic oligonucleotide
cccacuugcuucaggacag

SEQ ID NO: 3019147 - RNA, 19 nt, Artificial Sequence
  Description of Artificial Sequence: Synthetic oligonucleotide
aaugggcuggaugccacua

SEQ ID NO: 3019148 - RNA, 19 nt, Artificial Sequence
  Description of Artificial Sequence: Synthetic oligonucleotide
acuagcgaugaggucagaa

SEQ ID NO: 3019149 - RNA, 19 nt, Artificial Sequence
  Description of Artificial Sequence: Synthetic oligonucleotide
uucuccugucccacuugcu

SEQ ID NO: 3019150 - RNA, 19 nt, Artificial Sequence
  Description of Artificial Sequence: Synthetic oligonucleotide
ccgucgaucuucaggauug

SEQ ID NO: 3019151 - RNA, 19 nt, Artificial Sequence
  Description of Artificial Sequence: Synthetic oligonucleotide
gagcuucggaaauaggaau

SEQ ID NO: 3019152 - RNA, 19 nt, Artificial Sequence
  Description of Artificial Sequence: Synthetic oligonucleotide
aggagacguggggugggcc

SEQ ID NO: 3019153 - RNA, 19 nt, Artificial Sequence
  Description of Artificial Sequence: Synthetic oligonucleotide
gugccagagcuauucgaac

SEQ ID NO: 3019154 - RNA, 19 nt, Artificial Sequence
  Description of Artificial Sequence: Synthetic oligonucleotide
gccagugacuggccaaugg

SEQ ID NO: 3019155 - RNA, 19 nt, Artificial Sequence
  Description of Artificial Sequence: Synthetic oligonucleotide
cugaggcaggagacguggg

SEQ ID NO: 3019156 - RNA, 19 nt, Artificial Sequence
  Description of Artificial Sequence: Synthetic oligonucleotide
gguacuccaugauggccag

SEQ ID NO: 3019157 - RNA, 19 nt, Artificial Sequence
  Description of Artificial Sequence: Synthetic oligonucleotide
augggcuacuuauuucaua

SEQ ID NO: 3019158 - RNA, 19 nt, Artificial Sequence
  Description of Artificial Sequence: Synthetic oligonucleotide
uggaugccacuagcgauga

SEQ ID NO: 3019159 - RNA, 19 nt, Artificial Sequence
  Description of Artificial Sequence: Synthetic oligonucleotide
augggauucagggucugaa

SEQ ID NO: 3019160 - RNA, 19 nt, Artificial Sequence
  Description of Artificial Sequence: Synthetic oligonucleotide
gaucuucaggauuggcacu

SEQ ID NO: 3019161 - RNA, 19 nt, Artificial Sequence
  Description of Artificial Sequence: Synthetic oligonucleotide
ccucugagaacuguugccc

SEQ ID NO: 3019162 - RNA, 19 nt, Artificial Sequence
  Description of Artificial Sequence: Synthetic oligonucleotide
ggaauagaggacaggcuuc

SEQ ID NO: 3019163 - RNA, 19 nt, Artificial Sequence
  Description of Artificial Sequence: Synthetic oligonucleotide
agcuucggaaauaggaaua

SEQ ID NO: 3019164 - RNA, 19 nt, Artificial Sequence
  Description of Artificial Sequence: Synthetic oligonucleotide
cuccaugaacaggagcuuc

SEQ ID NO: 3019165 - RNA, 19 nt, Artificial Sequence
  Description of Artificial Sequence: Synthetic oligonucleotide
ucaugcgcacaauggcuuu

SEQ ID NO: 3019166 - RNA, 19 nt, Artificial Sequence
  Description of Artificial Sequence: Synthetic oligonucleotide
ggucagaaaucaugcgcac

SEQ ID NO: 3019167 - RNA, 19 nt, Artificial Sequence
  Description of Artificial Sequence: Synthetic oligonucleotide
gggucugaaauuccucuga

SEQ ID NO: 3019168 - RNA, 19 nt, Artificial Sequence
  Description of Artificial Sequence: Synthetic oligonucleotide
ugauuccgucgaucuucag

SEQ ID NO: 3019169 - RNA, 19 nt, Artificial Sequence
  Description of Artificial Sequence: Synthetic oligonucleotide
auggccagugacuggccaa

SEQ ID NO: 3019170 - RNA, 19 nt, Artificial Sequence
  Description of Artificial Sequence: Synthetic oligonucleotide
aucaugcgcacaauggcuu

SEQ ID NO: 3019171 - RNA, 19 nt, Artificial Sequence
  Description of Artificial Sequence: Synthetic oligonucleotide
acuccaugauggccaguga

SEQ ID NO: 3019172 - RNA, 19 nt, Artificial Sequence
  Description of Artificial Sequence: Synthetic oligonucleotide
gagguugaugggcuacuua

SEQ ID NO: 3019173 - RNA, 19 nt, Artificial Sequence
  Description of Artificial Sequence: Synthetic oligonucleotide
caugaacaggagcuucgga

SEQ ID NO: 3019174 - RNA, 19 nt, Artificial Sequence
  Description of Artificial Sequence: Synthetic oligonucleotide
ccugaggcaggagacgugg

SEQ ID NO: 3019175 - RNA, 19 nt, Artificial Sequence
  Description of Artificial Sequence: Synthetic oligonucleotide
augagguugaugggcuacu

SEQ ID NO: 3019176 - RNA, 19 nt, Artificial Sequence
  Description of Artificial Sequence: Synthetic oligonucleotide
gcaucugguucuccugucc

SEQ ID NO: 3019177 - RNA, 19 nt, Artificial Sequence
  Description of Artificial Sequence: Synthetic oligonucleotide
ggagcuucggaaauaggaa

SEQ ID NO: 3019178 - RNA, 19 nt, Artificial Sequence
  Description of Artificial Sequence: Synthetic oligonucleotide
cagggucugaaauuccucu

SEQ ID NO: 3019179 - RNA, 19 nt, Artificial Sequence
  Description of Artificial Sequence: Synthetic oligonucleotide
cuuuucagugccagagcua

SEQ ID NO: 3019180 - RNA, 19 nt, Artificial Sequence
  Description of Artificial Sequence: Synthetic oligonucleotide
cagugccagagcuauucga

SEQ ID NO: 3019181 - RNA, 19 nt, Artificial Sequence
  Description of Artificial Sequence: Synthetic oligonucleotide
gaacaggagcuucggaaau

SEQ ID NO: 3019182 - RNA, 19 nt, Artificial Sequence
  Description of Artificial Sequence: Synthetic oligonucleotide
ucaugggauucagggucug

SEQ ID NO: 3019183 - RNA, 19 nt, Artificial Sequence
  Description of Artificial Sequence: Synthetic oligonucleotide
ucuccaugaacaggagcuu

SEQ ID NO: 3019184 - RNA, 19 nt, Artificial Sequence
  Description of Artificial Sequence: Synthetic oligonucleotide
uggugauuccgucgaucuu

SEQ ID NO: 3019185 - RNA, 19 nt, Artificial Sequence
  Description of Artificial Sequence: Synthetic oligonucleotide
ccaauggugauuccgucga

SEQ ID NO: 3019186 - RNA, 19 nt, Artificial Sequence
  Description of Artificial Sequence: Synthetic oligonucleotide
gucccacuugcuucaggac

SEQ ID NO: 3019187 - RNA, 19 nt, Artificial Sequence
  Description of Artificial Sequence: Synthetic oligonucleotide
augccuuuucagugccaga

SEQ ID NO: 3019188 - RNA, 19 nt, Artificial Sequence
  Description of Artificial Sequence: Synthetic oligonucleotide
gccagagcuauucgaacuc

SEQ ID NO: 3019189 - RNA, 19 nt, Artificial Sequence
  Description of Artificial Sequence: Synthetic oligonucleotide
gggccgaguuucuuccagg

SEQ ID NO: 3019190 - RNA, 19 nt, Artificial Sequence
  Description of Artificial Sequence: Synthetic oligonucleotide
aggacaggcuucccggcuu

SEQ ID NO: 3019191 - RNA, 19 nt, Artificial Sequence
  Description of Artificial Sequence: Synthetic oligonucleotide
ccagguacuccaugauggc

SEQ ID NO: 3019192 - RNA, 19 nt, Artificial Sequence
  Description of Artificial Sequence: Synthetic oligonucleotide
gguccugaggcaggagacg

SEQ ID NO: 3019193 - RNA, 19 nt, Artificial Sequence
  Description of Artificial Sequence: Synthetic oligonucleotide
guggggugggccgaguuuc

SEQ ID NO: 3019194 - RNA, 19 nt, Artificial Sequence
  Description of Artificial Sequence: Synthetic oligonucleotide
ccaugauggccagugacug

SEQ ID NO: 3019195 - RNA, 19 nt, Artificial Sequence
  Description of Artificial Sequence: Synthetic oligonucleotide
cuucggaaauaggaauaga

SEQ ID NO: 3019196 - RNA, 19 nt, Artificial Sequence
  Description of Artificial Sequence: Synthetic oligonucleotide
cacuugcuucaggacagac

SEQ ID NO: 3019197 - RNA, 19 nt, Artificial Sequence
  Description of Artificial Sequence: Synthetic oligonucleotide
ggcuggaugccacuagcga

SEQ ID NO: 3019198 - RNA, 19 nt, Artificial Sequence
  Description of Artificial Sequence: Synthetic oligonucleotide
gccuuuucagugccagagc

SEQ ID NO: 3019199 - RNA, 19 nt, Artificial Sequence
  Description of Artificial Sequence: Synthetic oligonucleotide
gaguuucuuccagguacuc

SEQ ID NO: 3019200 - RNA, 19 nt, Artificial Sequence
  Description of Artificial Sequence: Synthetic oligonucleotide
uuucagugccagagcuauu

SEQ ID NO: 3019201 - RNA, 19 nt, Artificial Sequence
  Description of Artificial Sequence: Synthetic oligonucleotide
ugagguugaugggcuacuu

SEQ ID NO: 3019202 - RNA, 19 nt, Artificial Sequence
  Description of Artificial Sequence: Synthetic oligonucleotide
uggggugggccgaguuucu

SEQ ID NO: 3019203 - RNA, 19 nt, Artificial Sequence
  Description of Artificial Sequence: Synthetic oligonucleotide
gggauucagggucugaaau

SEQ ID NO: 3019204 - RNA, 19 nt, Artificial Sequence
  Description of Artificial Sequence: Synthetic oligonucleotide
gugauuccgucgaucuuca

SEQ ID NO: 3019205 - RNA, 19 nt, Artificial Sequence
  Description of Artificial Sequence: Synthetic oligonucleotide
ugacuggccaauggugauu

SEQ ID NO: 3019206 - RNA, 19 nt, Artificial Sequence
  Description of Artificial Sequence: Synthetic oligonucleotide
ccacuagcgaugaggucag

SEQ ID NO: 3019207 - RNA, 19 nt, Artificial Sequence
  Description of Artificial Sequence: Synthetic oligonucleotide
gggcuggaugccacuagcg

SEQ ID NO: 3019208 - RNA, 19 nt, Artificial Sequence
  Description of Artificial Sequence: Synthetic oligonucleotide
ggcaggagacguggggugg

SEQ ID NO: 3019209 - RNA, 19 nt, Artificial Sequence
  Description of Artificial Sequence: Synthetic oligonucleotide
ccauccuuuaugagguuga

SEQ ID NO: 3019210 - RNA, 19 nt, Artificial Sequence
  Description of Artificial Sequence: Synthetic oligonucleotide
ccaugaacaggagcuucgg

SEQ ID NO: 3019211 - RNA, 19 nt, Artificial Sequence
  Description of Artificial Sequence: Synthetic oligonucleotide
uuccgucgaucuucaggau

SEQ ID NO: 3019212 - RNA, 19 nt, Artificial Sequence
  Description of Artificial Sequence: Synthetic oligonucleotide
uggccagugacuggccaau

SEQ ID NO: 3019213 - RNA, 19 nt, Artificial Sequence
  Description of Artificial Sequence: Synthetic oligonucleotide
gaggacaggcuucccggcu

SEQ ID NO: 3019214 - RNA, 19 nt, Artificial Sequence
  Description of Artificial Sequence: Synthetic oligonucleotide
uuggguccugaggcaggag

SEQ ID NO: 3019215 - RNA, 19 nt, Artificial Sequence
  Description of Artificial Sequence: Synthetic oligonucleotide
gagacguggggugggccga

SEQ ID NO: 3019216 - RNA, 19 nt, Artificial Sequence
  Description of Artificial Sequence: Synthetic oligonucleotide
caaugccuuuucagugcca

SEQ ID NO: 3019217 - RNA, 19 nt, Artificial Sequence
  Description of Artificial Sequence: Synthetic oligonucleotide
cccauccuuuaugagguug

SEQ ID NO: 3019218 - RNA, 19 nt, Artificial Sequence
  Description of Artificial Sequence: Synthetic oligonucleotide
ccuuuucagugccagagcu

SEQ ID NO: 3019219 - RNA, 19 nt, Artificial Sequence
  Description of Artificial Sequence: Synthetic oligonucleotide
acaggcuucccggcuugca

SEQ ID NO: 3019220 - RNA, 19 nt, Artificial Sequence
  Description of Artificial Sequence: Synthetic oligonucleotide
ggccaauggugauuccguc

SEQ ID NO: 3019221 - RNA, 19 nt, Artificial Sequence
  Description of Artificial Sequence: Synthetic oligonucleotide
ggacaggcuucccggcuug

SEQ ID NO: 3019222 - RNA, 19 nt, Artificial Sequence
  Description of Artificial Sequence: Synthetic oligonucleotide
ggguccugaggcaggagac

SEQ ID NO: 3019223 - RNA, 19 nt, Artificial Sequence
  Description of Artificial Sequence: Synthetic oligonucleotide
ggauucagggucugaaauu

SEQ ID NO: 3019224 - RNA, 19 nt, Artificial Sequence
  Description of Artificial Sequence: Synthetic oligonucleotide
gacaggcuucccggcuugc

SEQ ID NO: 3019225 - RNA, 19 nt, Artificial Sequence
  Description of Artificial Sequence: Synthetic oligonucleotide
gcuggaugccacuagcgau

SEQ ID NO: 3019226 - RNA, 19 nt, Artificial Sequence
  Description of Artificial Sequence: Synthetic oligonucleotide
gaugggcuacuuauuucau

SEQ ID NO: 3019227 - RNA, 19 nt, Artificial Sequence
  Description of Artificial Sequence: Synthetic oligonucleotide
agguucugaaugggcugga

SEQ ID NO: 3019228 - RNA, 19 nt, Artificial Sequence
  Description of Artificial Sequence: Synthetic oligonucleotide
gcaggagacgugggguggg

SEQ ID NO: 3019229 - RNA, 19 nt, Artificial Sequence
  Description of Artificial Sequence: Synthetic oligonucleotide
caggagacguggggugggc

SEQ ID NO: 3019230 - RNA, 19 nt, Artificial Sequence
  Description of Artificial Sequence: Synthetic oligonucleotide
gggugggccgaguuucuuc

SEQ ID NO: 3019231 - RNA, 19 nt, Artificial Sequence
  Description of Artificial Sequence: Synthetic oligonucleotide
gugacuggccaauggugau

SEQ ID NO: 3019232 - RNA, 19 nt, Artificial Sequence
  Description of Artificial Sequence: Synthetic oligonucleotide
cuucaggauuggcacuugu

SEQ ID NO: 3019233 - RNA, 19 nt, Artificial Sequence
  Description of Artificial Sequence: Synthetic oligonucleotide
guccugaggcaggagacgu

SEQ ID NO: 3019234 - RNA, 19 nt, Artificial Sequence
  Description of Artificial Sequence: Synthetic oligonucleotide
acguggggugggccgaguu

SEQ ID NO: 3019235 - RNA, 19 nt, Artificial Sequence
  Description of Artificial Sequence: Synthetic oligonucleotide
caugggauucagggucuga

SEQ ID NO: 3019236 - RNA, 19 nt, Artificial Sequence
  Description of Artificial Sequence: Synthetic oligonucleotide
agacguggggugggccgag

SEQ ID NO: 3019237 - RNA, 19 nt, Artificial Sequence
  Description of Artificial Sequence: Synthetic oligonucleotide
gugggccgaguuucuucca

SEQ ID NO: 3019238 - RNA, 19 nt, Artificial Sequence
  Description of Artificial Sequence: Synthetic oligonucleotide
ggcacuuguuucaugggau

SEQ ID NO: 3019239 - RNA, 19 nt, Artificial Sequence
  Description of Artificial Sequence: Synthetic oligonucleotide
ggccgaguuucuuccaggu

SEQ ID NO: 3019240 - RNA, 19 nt, Artificial Sequence
  Description of Artificial Sequence: Synthetic oligonucleotide
ggaugccacuagcgaugag

SEQ ID NO: 3019241 - RNA, 19 nt, Artificial Sequence
  Description of Artificial Sequence: Synthetic oligonucleotide
ggcuucccggcuugcaucu

SEQ ID NO: 3019242 - RNA, 19 nt, Artificial Sequence
  Description of Artificial Sequence: Synthetic oligonucleotide
ccagugacuggccaauggu

SEQ ID NO: 3019243 - RNA, 19 nt, Artificial Sequence
  Description of Artificial Sequence: Synthetic oligonucleotide
gggcuacuuauuucauagu

SEQ ID NO: 3019244 - RNA, 19 nt, Artificial Sequence
  Description of Artificial Sequence: Synthetic oligonucleotide
gcacuuguuucaugggauu

SEQ ID NO: 3019245 - RNA, 19 nt, Artificial Sequence
  Description of Artificial Sequence: Synthetic oligonucleotide
cugguucuccugucccacu

SEQ ID NO: 3019246 - RNA, 19 nt, Artificial Sequence
  Description of Artificial Sequence: Synthetic oligonucleotide
caggcuucccggcuugcau

SEQ ID NO: 3019247 - RNA, 19 nt, Artificial Sequence
  Description of Artificial Sequence: Synthetic oligonucleotide
gccgaguuucuuccaggua

SEQ ID NO: 3019248 - RNA, 19 nt, Artificial Sequence
  Description of Artificial Sequence: Synthetic oligonucleotide
cauccuuuaugagguugau

SEQ ID NO: 3019249 - RNA, 19 nt, Artificial Sequence
  Description of Artificial Sequence: Synthetic oligonucleotide
cagaaaucaugcgcacaau

SEQ ID NO: 3019250 - RNA, 19 nt, Artificial Sequence
  Description of Artificial Sequence: Synthetic oligonucleotide
ggccagugacuggccaaug

SEQ ID NO: 3019251 - RNA, 19 nt, Artificial Sequence
  Description of Artificial Sequence: Synthetic oligonucleotide
caauggugauuccgucgau

SEQ ID NO: 3019252 - RNA, 19 nt, Artificial Sequence
  Description of Artificial Sequence: Synthetic oligonucleotide
gguugaugggcuacuuauu

SEQ ID NO: 3019253 - RNA, 19 nt, Artificial Sequence
  Description of Artificial Sequence: Synthetic oligonucleotide
ggauuggcacuuguuucau

SEQ ID NO: 3019254 - RNA, 19 nt, Artificial Sequence
  Description of Artificial Sequence: Synthetic oligonucleotide
cgaguuucuuccagguacu

SEQ ID NO: 3019255 - RNA, 19 nt, Artificial Sequence
  Description of Artificial Sequence: Synthetic oligonucleotide
caugcgcacaauggcuuuu

SEQ ID NO: 3019256 - RNA, 19 nt, Artificial Sequence
  Description of Artificial Sequence: Synthetic oligonucleotide
ccagagcuauucgaacucu

SEQ ID NO: 3019257 - RNA, 19 nt, Artificial Sequence
  Description of Artificial Sequence: Synthetic oligonucleotide
guacuccaugauggccagu

SEQ ID NO: 3019258 - RNA, 19 nt, Artificial Sequence
  Description of Artificial Sequence: Synthetic oligonucleotide
cacuagcgaugaggucaga

SEQ ID NO: 3019259 - RNA, 19 nt, Artificial Sequence
  Description of Artificial Sequence: Synthetic oligonucleotide
gacguggggugggccgagu

SEQ ID NO: 3019260 - RNA, 19 nt, Artificial Sequence
  Description of Artificial Sequence: Synthetic oligonucleotide
ccacuugcuucaggacaga

SEQ ID NO: 3019261 - RNA, 19 nt, Artificial Sequence
  Description of Artificial Sequence: Synthetic oligonucleotide
cgaugaggucagaaaucau

SEQ ID NO: 3019262 - RNA, 19 nt, Artificial Sequence
  Description of Artificial Sequence: Synthetic oligonucleotide
cguggggugggccgaguuu

SEQ ID NO: 3019263 - RNA, 19 nt, Artificial Sequence
  Description of Artificial Sequence: Synthetic oligonucleotide
ccccauccuuuaugagguu

SEQ ID NO: 3019264 - RNA, 19 nt, Artificial Sequence
  Description of Artificial Sequence: Synthetic oligonucleotide
ugagguaucggccguaggc

SEQ ID NO: 3019265 - RNA, 19 nt, Artificial Sequence
  Description of Artificial Sequence: Synthetic oligonucleotide
uacucgguagacgaggucg

SEQ ID NO: 3019266 - RNA, 19 nt, Artificial Sequence
  Description of Artificial Sequence: Synthetic oligonucleotide
gagguaucggccguaggcg

SEQ ID NO: 3019267 - RNA, 19 nt, Artificial Sequence
  Description of Artificial Sequence: Synthetic oligonucleotide
ugguacucgguagacgagg

SEQ ID NO: 3019268 - RNA, 19 nt, Artificial Sequence
  Description of Artificial Sequence: Synthetic oligonucleotide
uacugcugguacucgguag

SEQ ID NO: 3019269 - RNA, 19 nt, Artificial Sequence
  Description of Artificial Sequence: Synthetic oligonucleotide
agguaucggccguaggcgg

SEQ ID NO: 3019270 - RNA, 19 nt, Artificial Sequence
  Description of Artificial Sequence: Synthetic oligonucleotide
acugcugguacucgguaga

SEQ ID NO: 3019271 - RNA, 19 nt, Artificial Sequence
  Description of Artificial Sequence: Synthetic oligonucleotide
ugcugguacucgguagacg

SEQ ID NO: 3019272 - RNA, 19 nt, Artificial Sequence
  Description of Artificial Sequence: Synthetic oligonucleotide
gcugguacucgguagacga

SEQ ID NO: 3019273 - RNA, 19 nt, Artificial Sequence
  Description of Artificial Sequence: Synthetic oligonucleotide
guagacgaggucguucaug

SEQ ID NO: 3019274 - RNA, 19 nt, Artificial Sequence
  Description of Artificial Sequence: Synthetic oligonucleotide
cugguacucgguagacgag

SEQ ID NO: 3019275 - RNA, 19 nt, Artificial Sequence
  Description of Artificial Sequence: Synthetic oligonucleotide
gugagguaucggccguagg

SEQ ID NO: 3019276 - RNA, 19 nt, Artificial Sequence
  Description of Artificial Sequence: Synthetic oligonucleotide
ucgguagacgaggucguuc

SEQ ID NO: 3019277 - RNA, 19 nt, Artificial Sequence
  Description of Artificial Sequence: Synthetic oligonucleotide
guaucggccguaggcgggg

SEQ ID NO: 3019278 - RNA, 19 nt, Artificial Sequence
  Description of Artificial Sequence: Synthetic oligonucleotide
gguaucggccguaggcggg

SEQ ID NO: 3019279 - RNA, 19 nt, Artificial Sequence
  Description of Artificial Sequence: Synthetic oligonucleotide
acucgguagacgaggucgu

SEQ ID NO: 3019280 - RNA, 19 nt, Artificial Sequence
  Description of Artificial Sequence: Synthetic oligonucleotide
guacucgguagacgagguc

SEQ ID NO: 3019281 - RNA, 19 nt, Artificial Sequence
  Description of Artificial Sequence: Synthetic oligonucleotide
cugcugguacucgguagac

SEQ ID NO: 3019282 - RNA, 19 nt, Artificial Sequence
  Description of Artificial Sequence: Synthetic oligonucleotide
cgguagacgaggucguuca

SEQ ID NO: 3019283 - RNA, 19 nt, Artificial Sequence
  Description of Artificial Sequence: Synthetic oligonucleotide
gguacucgguagacgaggu

SEQ ID NO: 3019284 - RNA, 19 nt, Artificial Sequence
  Description of Artificial Sequence: Synthetic oligonucleotide
gguagacgaggucguucau

SEQ ID NO: 3019285 - RNA, 19 nt, Artificial Sequence
  Description of Artificial Sequence: Synthetic oligonucleotide
cucgguagacgaggucguu

SEQ ID NO: 3019286 - RNA, 19 nt, Artificial Sequence
  Description of Artificial Sequence: Synthetic oligonucleotide
aauauauugaaacuguuuc

SEQ ID NO: 3019287 - RNA, 19 nt, Artificial Sequence
  Description of Artificial Sequence: Synthetic oligonucleotide
aaguauggaaauuaaauuc

SEQ ID NO: 3019288 - RNA, 19 nt, Artificial Sequence
  Description of Artificial Sequence: Synthetic oligonucleotide
aacacuacauaccagaauc

SEQ ID NO: 3019289 - RNA, 19 nt, Artificial Sequence
  Description of Artificial Sequence: Synthetic oligonucleotide
aacauuucaaaucacuaac

SEQ ID NO: 3019290 - RNA, 19 nt, Artificial Sequence
  Description of Artificial Sequence: Synthetic oligonucleotide
ucuaauaaucauuaggagg

SEQ ID NO: 3019291 - RNA, 19 nt, Artificial Sequence
  Description of Artificial Sequence: Synthetic oligonucleotide
uauucuaauaaucauuagg

SEQ ID NO: 3019292 - RNA, 19 nt, Artificial Sequence
  Description of Artificial Sequence: Synthetic oligonucleotide
aauuuuacaguauaaugag

SEQ ID NO: 3019293 - RNA, 19 nt, Artificial Sequence
  Description of Artificial Sequence: Synthetic oligonucleotide
cuaauaaucauuaggaggc

SEQ ID NO: 3019294 - RNA, 19 nt, Artificial Sequence
  Description of Artificial Sequence: Synthetic oligonucleotide
uuguaauuauacaagaugc

SEQ ID NO: 3019295 - RNA, 19 nt, Artificial Sequence
  Description of Artificial Sequence: Synthetic oligonucleotide
aucacuaacauuuucauug

SEQ ID NO: 3019296 - RNA, 19 nt, Artificial Sequence
  Description of Artificial Sequence: Synthetic oligonucleotide
aguauaaugagucaaauau

SEQ ID NO: 3019297 - RNA, 19 nt, Artificial Sequence
  Description of Artificial Sequence: Synthetic oligonucleotide
uuuguaauuauacaagaug

SEQ ID NO: 3019298 - RNA, 19 nt, Artificial Sequence
  Description of Artificial Sequence: Synthetic oligonucleotide
uuucaaaucacuaacauuu

SEQ ID NO: 3019299 - RNA, 19 nt, Artificial Sequence
  Description of Artificial Sequence: Synthetic oligonucleotide
ucaaauauucuaauaauca

SEQ ID NO: 3019300 - RNA, 19 nt, Artificial Sequence
  Description of Artificial Sequence: Synthetic oligonucleotide
uauacaagaugccuuaagg

SEQ ID NO: 3019301 - RNA, 19 nt, Artificial Sequence
  Description of Artificial Sequence: Synthetic oligonucleotide
uuuucauugcaaaucauag

SEQ ID NO: 3019302 - RNA, 19 nt, Artificial Sequence
  Description of Artificial Sequence: Synthetic oligonucleotide
ucuuuuguaauuauacaag

SEQ ID NO: 3019303 - RNA, 19 nt, Artificial Sequence
  Description of Artificial Sequence: Synthetic oligonucleotide
uauaaugagucaaauauuc

SEQ ID NO: 3019304 - RNA, 19 nt, Artificial Sequence
  Description of Artificial Sequence: Synthetic oligonucleotide
aacaaaacacuacauacca

SEQ ID NO: 3019305 - RNA, 19 nt, Artificial Sequence
  Description of Artificial Sequence: Synthetic oligonucleotide
ucaacaaaacacuacauac

SEQ ID NO: 3019306 - RNA, 19 nt, Artificial Sequence
  Description of Artificial Sequence: Synthetic oligonucleotide
auaggauucaacaaaacac

SEQ ID NO: 3019307 - RNA, 19 nt, Artificial Sequence
  Description of Artificial Sequence: Synthetic oligonucleotide
aaacguaucgguuaaacaa

SEQ ID NO: 3019308 - RNA, 19 nt, Artificial Sequence
  Description of Artificial Sequence: Synthetic oligonucleotide
uuuuacaguauaaugaguc

SEQ ID NO: 3019309 - RNA, 19 nt, Artificial Sequence
  Description of Artificial Sequence: Synthetic oligonucleotide
auuaaauucugguauucac

SEQ ID NO: 3019310 - RNA, 19 nt, Artificial Sequence
  Description of Artificial Sequence: Synthetic oligonucleotide
cuaacuguaaacuauagca

SEQ ID NO: 3019311 - RNA, 19 nt, Artificial Sequence
  Description of Artificial Sequence: Synthetic oligonucleotide
uccuaaaauauauugaaac

SEQ ID NO: 3019312 - RNA, 19 nt, Artificial Sequence
  Description of Artificial Sequence: Synthetic oligonucleotide
aauccuaaaauauauugaa

SEQ ID NO: 3019313 - RNA, 19 nt, Artificial Sequence
  Description of Artificial Sequence: Synthetic oligonucleotide
uaaacuauagcaauugguc

SEQ ID NO: 3019314 - RNA, 19 nt, Artificial Sequence
  Description of Artificial Sequence: Synthetic oligonucleotide
agaauccuaaaauauauug

SEQ ID NO: 3019315 - RNA, 19 nt, Artificial Sequence
  Description of Artificial Sequence: Synthetic oligonucleotide
aaacuguuucuacauuugc

SEQ ID NO: 3019316 - RNA, 19 nt, Artificial Sequence
  Description of Artificial Sequence: Synthetic oligonucleotide
uuaaauucugguauucacc

SEQ ID NO: 3019317 - RNA, 19 nt, Artificial Sequence
  Description of Artificial Sequence: Synthetic oligonucleotide
acaauuuuacaguauaaug

SEQ ID NO: 3019318 - RNA, 19 nt, Artificial Sequence
  Description of Artificial Sequence: Synthetic oligonucleotide
uauggaaauuaaauucugg

SEQ ID NO: 3019319 - RNA, 19 nt, Artificial Sequence
  Description of Artificial Sequence: Synthetic oligonucleotide
uagcaauuggucuugacag

SEQ ID NO: 3019320 - RNA, 19 nt, Artificial Sequence
  Description of Artificial Sequence: Synthetic oligonucleotide
uguaauuauacaagaugcc

SEQ ID NO: 3019321 - RNA, 19 nt, Artificial Sequence
  Description of Artificial Sequence: Synthetic oligonucleotide
aucauagcaggguauauuc

SEQ ID NO: 3019322 - RNA, 19 nt, Artificial Sequence
  Description of Artificial Sequence: Synthetic oligonucleotide
aaacuauagcaauuggucu

SEQ ID NO: 3019323 - RNA, 19 nt, Artificial Sequence
  Description of Artificial Sequence: Synthetic oligonucleotide
uguaaacuauagcaauugg

SEQ ID NO: 3019324 - RNA, 19 nt, Artificial Sequence
  Description of Artificial Sequence: Synthetic oligonucleotide
uucuuuuguaauuauacaa

SEQ ID NO: 3019325 - RNA, 19 nt, Artificial Sequence
  Description of Artificial Sequence: Synthetic oligonucleotide
ugaagaaaaguccuaugug

SEQ ID NO: 3019326 - RNA, 19 nt, Artificial Sequence
  Description of Artificial Sequence: Synthetic oligonucleotide
ucgagcaucagacaaacgu

SEQ ID NO: 3019327 - RNA, 19 nt, Artificial Sequence
  Description of Artificial Sequence: Synthetic oligonucleotide
caauuuuacaguauaauga

SEQ ID NO: 3019328 - RNA, 19 nt, Artificial Sequence
  Description of Artificial Sequence: Synthetic oligonucleotide
gauucaacaaaacacuaca

SEQ ID NO: 3019329 - RNA, 19 nt, Artificial Sequence
  Description of Artificial Sequence: Synthetic oligonucleotide
aaauuaaauucugguauuc

SEQ ID NO: 3019330 - RNA, 19 nt, Artificial Sequence
  Description of Artificial Sequence: Synthetic oligonucleotide
aacuguuucuacauuugcc

SEQ ID NO: 3019331 - RNA, 19 nt, Artificial Sequence
  Description of Artificial Sequence: Synthetic oligonucleotide
aaacauuucaaaucacuaa

SEQ ID NO: 3019332 - RNA, 19 nt, Artificial Sequence
  Description of Artificial Sequence: Synthetic oligonucleotide
aauauucuaauaaucauua

SEQ ID NO: 3019333 - RNA, 19 nt, Artificial Sequence
  Description of Artificial Sequence: Synthetic oligonucleotide
cauugcaaaucauagcagg

SEQ ID NO: 3019334 - RNA, 19 nt, Artificial Sequence
  Description of Artificial Sequence: Synthetic oligonucleotide
uaaacaauuuuacaguaua

SEQ ID NO: 3019335 - RNA, 19 nt, Artificial Sequence
  Description of Artificial Sequence: Synthetic oligonucleotide
aucauuaggaggcuuaucu

SEQ ID NO: 3019336 - RNA, 19 nt, Artificial Sequence
  Description of Artificial Sequence: Synthetic oligonucleotide
aaaugucuaacuguaaacu

SEQ ID NO: 3019337 - RNA, 19 nt, Artificial Sequence
  Description of Artificial Sequence: Synthetic oligonucleotide
uaggauucaacaaaacacu

SEQ ID NO: 3019338 - RNA, 19 nt, Artificial Sequence
  Description of Artificial Sequence: Synthetic oligonucleotide
auucuaauaaucauuagga

SEQ ID NO: 3019339 - RNA, 19 nt, Artificial Sequence
  Description of Artificial Sequence: Synthetic oligonucleotide
ucuaacuguaaacuauagc

SEQ ID NO: 3019340 - RNA, 19 nt, Artificial Sequence
  Description of Artificial Sequence: Synthetic oligonucleotide
aauuauacaagaugccuua

SEQ ID NO: 3019341 - RNA, 19 nt, Artificial Sequence
  Description of Artificial Sequence: Synthetic oligonucleotide
uucuaauaaucauuaggag

SEQ ID NO: 3019342 - RNA, 19 nt, Artificial Sequence
  Description of Artificial Sequence: Synthetic oligonucleotide
auauugaaacuguuucuac

SEQ ID NO: 3019343 - RNA, 19 nt, Artificial Sequence
  Description of Artificial Sequence: Synthetic oligonucleotide
agaaaaguccuauguguac

SEQ ID NO: 3019344 - RNA, 19 nt, Artificial Sequence
  Description of Artificial Sequence: Synthetic oligonucleotide
aaagugaugaaaugucuaa

SEQ ID NO: 3019345 - RNA, 19 nt, Artificial Sequence
  Description of Artificial Sequence: Synthetic oligonucleotide
aacuguaaacuauagcaau

SEQ ID NO: 3019346 - RNA, 19 nt, Artificial Sequence
  Description of Artificial Sequence: Synthetic oligonucleotide
aggaggcuuaucuacaaac

SEQ ID NO: 3019347 - RNA, 19 nt, Artificial Sequence
  Description of Artificial Sequence: Synthetic oligonucleotide
uuaaggaauggcuugccug

SEQ ID NO: 3019348 - RNA, 19 nt, Artificial Sequence
  Description of Artificial Sequence: Synthetic oligonucleotide
gaaaugucuaacuguaaac

SEQ ID NO: 3019349 - RNA, 19 nt, Artificial Sequence
  Description of Artificial Sequence: Synthetic oligonucleotide
aauucugguauucaccaau

SEQ ID NO: 3019350 - RNA, 19 nt, Artificial Sequence
  Description of Artificial Sequence: Synthetic oligonucleotide
uccuauguguacaaguaug

SEQ ID NO: 3019351 - RNA, 19 nt, Artificial Sequence
  Description of Artificial Sequence: Synthetic oligonucleotide
uuauacaagaugccuuaag

SEQ ID NO: 3019352 - RNA, 19 nt, Artificial Sequence
  Description of Artificial Sequence: Synthetic oligonucleotide
auggaaauuaaauucuggu

SEQ ID NO: 3019353 - RNA, 19 nt, Artificial Sequence
  Description of Artificial Sequence: Synthetic oligonucleotide
ugaugaaaugucuaacugu

SEQ ID NO: 3019354 - RNA, 19 nt, Artificial Sequence
  Description of Artificial Sequence: Synthetic oligonucleotide
acagccauaggauucaaca

SEQ ID NO: 3019355 - RNA, 19 nt, Artificial Sequence
  Description of Artificial Sequence: Synthetic oligonucleotide
uauugaaacuguuucuaca

SEQ ID NO: 3019356 - RNA, 19 nt, Artificial Sequence
  Description of Artificial Sequence: Synthetic oligonucleotide
caacaaaacacuacauacc

SEQ ID NO: 3019357 - RNA, 19 nt, Artificial Sequence
  Description of Artificial Sequence: Synthetic oligonucleotide
acuguuucuacauuugccu

SEQ ID NO: 3019358 - RNA, 19 nt, Artificial Sequence
  Description of Artificial Sequence: Synthetic oligonucleotide
uacaagaugccuuaaggaa

SEQ ID NO: 3019359 - RNA, 19 nt, Artificial Sequence
  Description of Artificial Sequence: Synthetic oligonucleotide
uuucuuuuguaauuauaca

SEQ ID NO: 3019360 - RNA, 19 nt, Artificial Sequence
  Description of Artificial Sequence: Synthetic oligonucleotide
gagucaaauauucuaauaa

SEQ ID NO: 3019361 - RNA, 19 nt, Artificial Sequence
  Description of Artificial Sequence: Synthetic oligonucleotide
uauguguacaaguauggaa

SEQ ID NO: 3019362 - RNA, 19 nt, Artificial Sequence
  Description of Artificial Sequence: Synthetic oligonucleotide
uuuacaguauaaugaguca

SEQ ID NO: 3019363 - RNA, 19 nt, Artificial Sequence
  Description of Artificial Sequence: Synthetic oligonucleotide
uaaugagucaaauauucua

SEQ ID NO: 3019364 - RNA, 19 nt, Artificial Sequence
  Description of Artificial Sequence: Synthetic oligonucleotide
auagcaauuggucuugaca

SEQ ID NO: 3019365 - RNA, 19 nt, Artificial Sequence
  Description of Artificial Sequence: Synthetic oligonucleotide
guauauucgagcaucagac

SEQ ID NO: 3019366 - RNA, 19 nt, Artificial Sequence
  Description of Artificial Sequence: Synthetic oligonucleotide
aagugaugaaaugucuaac

SEQ ID NO: 3019367 - RNA, 19 nt, Artificial Sequence
  Description of Artificial Sequence: Synthetic oligonucleotide
uuuuguaauuauacaagau

SEQ ID NO: 3019368 - RNA, 19 nt, Artificial Sequence
  Description of Artificial Sequence: Synthetic oligonucleotide
ucugguauucaccaaugcu

SEQ ID NO: 3019369 - RNA, 19 nt, Artificial Sequence
  Description of Artificial Sequence: Synthetic oligonucleotide
auauauugaaacuguuucu

SEQ ID NO: 3019370 - RNA, 19 nt, Artificial Sequence
  Description of Artificial Sequence: Synthetic oligonucleotide
uucaacaaaacacuacaua

SEQ ID NO: 3019371 - RNA, 19 nt, Artificial Sequence
  Description of Artificial Sequence: Synthetic oligonucleotide
aaugucuaacuguaaacua

SEQ ID NO: 3019372 - RNA, 19 nt, Artificial Sequence
  Description of Artificial Sequence: Synthetic oligonucleotide
aaauauucuaauaaucauu

SEQ ID NO: 3019373 - RNA, 19 nt, Artificial Sequence
  Description of Artificial Sequence: Synthetic oligonucleotide
uaauuauacaagaugccuu

SEQ ID NO: 3019374 - RNA, 19 nt, Artificial Sequence
  Description of Artificial Sequence: Synthetic oligonucleotide
aacaauuuuacaguauaau

SEQ ID NO: 3019375 - RNA, 19 nt, Artificial Sequence
  Description of Artificial Sequence: Synthetic oligonucleotide
aacuauagcaauuggucuu

SEQ ID NO: 3019376 - RNA, 19 nt, Artificial Sequence
  Description of Artificial Sequence: Synthetic oligonucleotide
aaguccuauguguacaagu

SEQ ID NO: 3019377 - RNA, 19 nt, Artificial Sequence
  Description of Artificial Sequence: Synthetic oligonucleotide
ucauugcaaaucauagcag

SEQ ID NO: 3019378 - RNA, 19 nt, Artificial Sequence
  Description of Artificial Sequence: Synthetic oligonucleotide
uaucgguuaaacaauuuua

SEQ ID NO: 3019379 - RNA, 19 nt, Artificial Sequence
  Description of Artificial Sequence: Synthetic oligonucleotide
ucauagcaggguauauucg

SEQ ID NO: 3019380 - RNA, 19 nt, Artificial Sequence
  Description of Artificial Sequence: Synthetic oligonucleotide
aucgguuaaacaauuuuac

SEQ ID NO: 3019381 - RNA, 19 nt, Artificial Sequence
  Description of Artificial Sequence: Synthetic oligonucleotide
auacaagaugccuuaagga

SEQ ID NO: 3019382 - RNA, 19 nt, Artificial Sequence
  Description of Artificial Sequence: Synthetic oligonucleotide
auugaaacuguuucuacau

SEQ ID NO: 3019383 - RNA, 19 nt, Artificial Sequence
  Description of Artificial Sequence: Synthetic oligonucleotide
aaugagucaaauauucuaa

SEQ ID NO: 3019384 - RNA, 19 nt, Artificial Sequence
  Description of Artificial Sequence: Synthetic oligonucleotide
uguacaaguauggaaauua

SEQ ID NO: 3019385 - RNA, 19 nt, Artificial Sequence
  Description of Artificial Sequence: Synthetic oligonucleotide
aauuaaauucugguauuca

SEQ ID NO: 3019386 - RNA, 19 nt, Artificial Sequence
  Description of Artificial Sequence: Synthetic oligonucleotide
cauuaggaggcuuaucuac

SEQ ID NO: 3019387 - RNA, 19 nt, Artificial Sequence
  Description of Artificial Sequence: Synthetic oligonucleotide
uggaguagacagcugaaga

SEQ ID NO: 3019388 - RNA, 19 nt, Artificial Sequence
  Description of Artificial Sequence: Synthetic oligonucleotide
caaaacacuacauaccaga

SEQ ID NO: 3019389 - RNA, 19 nt, Artificial Sequence
  Description of Artificial Sequence: Synthetic oligonucleotide
gaagaaaaguccuaugugu

SEQ ID NO: 3019390 - RNA, 19 nt, Artificial Sequence
  Description of Artificial Sequence: Synthetic oligonucleotide
uggaaauuaaauucuggua

SEQ ID NO: 3019391 - RNA, 19 nt, Artificial Sequence
  Description of Artificial Sequence: Synthetic oligonucleotide
caaaucacuaacauuuuca

SEQ ID NO: 3019392 - RNA, 19 nt, Artificial Sequence
  Description of Artificial Sequence: Synthetic oligonucleotide
agucaaauauucuaauaau

SEQ ID NO: 3019393 - RNA, 19 nt, Artificial Sequence
  Description of Artificial Sequence: Synthetic oligonucleotide
uuaaacaauuuuacaguau

SEQ ID NO: 3019394 - RNA, 19 nt, Artificial Sequence
  Description of Artificial Sequence: Synthetic oligonucleotide
aguauggaaauuaaauucu

SEQ ID NO: 3019395 - RNA, 19 nt, Artificial Sequence
  Description of Artificial Sequence: Synthetic oligonucleotide
acaaguauggaaauuaaau

SEQ ID NO: 3019396 - RNA, 19 nt, Artificial Sequence
  Description of Artificial Sequence: Synthetic oligonucleotide
ugguauucaccaaugcucu

SEQ ID NO: 3019397 - RNA, 19 nt, Artificial Sequence
  Description of Artificial Sequence: Synthetic oligonucleotide
acaaacguaucgguuaaac

SEQ ID NO: 3019398 - RNA, 19 nt, Artificial Sequence
  Description of Artificial Sequence: Synthetic oligonucleotide
ugaaacuguuucuacauuu

SEQ ID NO: 3019399 - RNA, 19 nt, Artificial Sequence
  Description of Artificial Sequence: Synthetic oligonucleotide
agcaauuggucuugacagc

SEQ ID NO: 3019400 - RNA, 19 nt, Artificial Sequence
  Description of Artificial Sequence: Synthetic oligonucleotide
auauucgagcaucagacaa

SEQ ID NO: 3019401 - RNA, 19 nt, Artificial Sequence
  Description of Artificial Sequence: Synthetic oligonucleotide
uauauugaaacuguuucua

SEQ ID NO: 3019402 - RNA, 19 nt, Artificial Sequence
  Description of Artificial Sequence: Synthetic oligonucleotide
gacagcugaagaaaagucc

SEQ ID NO: 3019403 - RNA, 19 nt, Artificial Sequence
  Description of Artificial Sequence: Synthetic oligonucleotide
gugaugaaaugucuaacug

SEQ ID NO: 3019404 - RNA, 19 nt, Artificial Sequence
  Description of Artificial Sequence: Synthetic oligonucleotide
uuggucuugacagccauag

SEQ ID NO: 3019405 - RNA, 19 nt, Artificial Sequence
  Description of Artificial Sequence: Synthetic oligonucleotide
uaccagaauccuaaaauau

SEQ ID NO: 3019406 - RNA, 19 nt, Artificial Sequence
  Description of Artificial Sequence: Synthetic oligonucleotide
ucaaaucacuaacauuuuc

SEQ ID NO: 3019407 - RNA, 19 nt, Artificial Sequence
  Description of Artificial Sequence: Synthetic oligonucleotide
aaauauauugaaacuguuu

SEQ ID NO: 3019408 - RNA, 19 nt, Artificial Sequence
  Description of Artificial Sequence: Synthetic oligonucleotide
gaauccuaaaauauauuga

SEQ ID NO: 3019409 - RNA, 19 nt, Artificial Sequence
  Description of Artificial Sequence: Synthetic oligonucleotide
auauucuaauaaucauuag

SEQ ID NO: 3019410 - RNA, 19 nt, Artificial Sequence
  Description of Artificial Sequence: Synthetic oligonucleotide
ucgguuaaacaauuuuaca

SEQ ID NO: 3019411 - RNA, 19 nt, Artificial Sequence
  Description of Artificial Sequence: Synthetic oligonucleotide
cauaggauucaacaaaaca

SEQ ID NO: 3019412 - RNA, 19 nt, Artificial Sequence
  Description of Artificial Sequence: Synthetic oligonucleotide
uacaguauaaugagucaaa

SEQ ID NO: 3019413 - RNA, 19 nt, Artificial Sequence
  Description of Artificial Sequence: Synthetic oligonucleotide
auugcaaaucauagcaggg

SEQ ID NO: 3019414 - RNA, 19 nt, Artificial Sequence
  Description of Artificial Sequence: Synthetic oligonucleotide
aaacacuacauaccagaau

SEQ ID NO: 3019415 - RNA, 19 nt, Artificial Sequence
  Description of Artificial Sequence: Synthetic oligonucleotide
ucacuaacauuuucauugc

SEQ ID NO: 3019416 - RNA, 19 nt, Artificial Sequence
  Description of Artificial Sequence: Synthetic oligonucleotide
cuugacagccauaggauuc

SEQ ID NO: 3019417 - RNA, 19 nt, Artificial Sequence
  Description of Artificial Sequence: Synthetic oligonucleotide
auucgagcaucagacaaac

SEQ ID NO: 3019418 - RNA, 19 nt, Artificial Sequence
  Description of Artificial Sequence: Synthetic oligonucleotide
uacaaguauggaaauuaaa

SEQ ID NO: 3019419 - RNA, 19 nt, Artificial Sequence
  Description of Artificial Sequence: Synthetic oligonucleotide
aaaaguccuauguguacaa

SEQ ID NO: 3019420 - RNA, 19 nt, Artificial Sequence
  Description of Artificial Sequence: Synthetic oligonucleotide
caagaugccuuaaggaaug

SEQ ID NO: 3019421 - RNA, 19 nt, Artificial Sequence
  Description of Artificial Sequence: Synthetic oligonucleotide
gucaaauauucuaauaauc

SEQ ID NO: 3019422 - RNA, 19 nt, Artificial Sequence
  Description of Artificial Sequence: Synthetic oligonucleotide
auuucaaaucacuaacauu

SEQ ID NO: 3019423 - RNA, 19 nt, Artificial Sequence
  Description of Artificial Sequence: Synthetic oligonucleotide
uucaccaaugcucuguauu

SEQ ID NO: 3019424 - RNA, 19 nt, Artificial Sequence
  Description of Artificial Sequence: Synthetic oligonucleotide
uauauucgagcaucagaca

SEQ ID NO: 3019425 - RNA, 19 nt, Artificial Sequence
  Description of Artificial Sequence: Synthetic oligonucleotide
aaucacuaacauuuucauu

SEQ ID NO: 3019426 - RNA, 19 nt, Artificial Sequence
  Description of Artificial Sequence: Synthetic oligonucleotide
ugcaaaucauagcagggua

SEQ ID NO: 3019427 - RNA, 19 nt, Artificial Sequence
  Description of Artificial Sequence: Synthetic oligonucleotide
gaugaaaugucuaacugua

SEQ ID NO: 3019428 - RNA, 19 nt, Artificial Sequence
  Description of Artificial Sequence: Synthetic oligonucleotide
ugagucaaauauucuaaua

SEQ ID NO: 3019429 - RNA, 19 nt, Artificial Sequence
  Description of Artificial Sequence: Synthetic oligonucleotide
caucagacaaacguaucgg

SEQ ID NO: 3019430 - RNA, 19 nt, Artificial Sequence
  Description of Artificial Sequence: Synthetic oligonucleotide
uuacaguauaaugagucaa

SEQ ID NO: 3019431 - RNA, 19 nt, Artificial Sequence
  Description of Artificial Sequence: Synthetic oligonucleotide
gcaucagacaaacguaucg

SEQ ID NO: 3019432 - RNA, 19 nt, Artificial Sequence
  Description of Artificial Sequence: Synthetic oligonucleotide
auaccagaauccuaaaaua

SEQ ID NO: 3019433 - RNA, 19 nt, Artificial Sequence
  Description of Artificial Sequence: Synthetic oligonucleotide
ugucuaacuguaaacuaua

SEQ ID NO: 3019434 - RNA, 19 nt, Artificial Sequence
  Description of Artificial Sequence: Synthetic oligonucleotide
agcaggguauauucgagca

SEQ ID NO: 3019435 - RNA, 19 nt, Artificial Sequence
  Description of Artificial Sequence: Synthetic oligonucleotide
cuaacauuuucauugcaaa

SEQ ID NO: 3019436 - RNA, 19 nt, Artificial Sequence
  Description of Artificial Sequence: Synthetic oligonucleotide
aaaagugaugaaaugucua

SEQ ID NO: 3019437 - RNA, 19 nt, Artificial Sequence
  Description of Artificial Sequence: Synthetic oligonucleotide
uguuucuacauuugccuau

SEQ ID NO: 3019438 - RNA, 19 nt, Artificial Sequence
  Description of Artificial Sequence: Synthetic oligonucleotide
uucugguauucaccaaugc

SEQ ID NO: 3019439 - RNA, 19 nt, Artificial Sequence
  Description of Artificial Sequence: Synthetic oligonucleotide
aaucauuaggaggcuuauc

SEQ ID NO: 3019440 - RNA, 19 nt, Artificial Sequence
  Description of Artificial Sequence: Synthetic oligonucleotide
uauucgagcaucagacaaa

SEQ ID NO: 3019441 - RNA, 19 nt, Artificial Sequence
  Description of Artificial Sequence: Synthetic oligonucleotide
ugccuuaaggaauggcuug

SEQ ID NO: 3019442 - RNA, 19 nt, Artificial Sequence
  Description of Artificial Sequence: Synthetic oligonucleotide
cuacauaccagaauccuaa

SEQ ID NO: 3019443 - RNA, 19 nt, Artificial Sequence
  Description of Artificial Sequence: Synthetic oligonucleotide
ugcucuguauuauggaaaa

SEQ ID NO: 3019444 - RNA, 19 nt, Artificial Sequence
  Description of Artificial Sequence: Synthetic oligonucleotide
cuguaaacuauagcaauug

SEQ ID NO: 3019445 - RNA, 19 nt, Artificial Sequence
  Description of Artificial Sequence: Synthetic oligonucleotide
uagacagcugaagaaaagu

SEQ ID NO: 3019446 - RNA, 19 nt, Artificial Sequence
  Description of Artificial Sequence: Synthetic oligonucleotide
acacuacauaccagaaucc

SEQ ID NO: 3019447 - RNA, 19 nt, Artificial Sequence
  Description of Artificial Sequence: Synthetic oligonucleotide
gaaaaguccuauguguaca

SEQ ID NO: 3019448 - RNA, 19 nt, Artificial Sequence
  Description of Artificial Sequence: Synthetic oligonucleotide
agacagcugaagaaaaguc

SEQ ID NO: 3019449 - RNA, 19 nt, Artificial Sequence
  Description of Artificial Sequence: Synthetic oligonucleotide
agccauaggauucaacaaa

SEQ ID NO: 3019450 - RNA, 19 nt, Artificial Sequence
  Description of Artificial Sequence: Synthetic oligonucleotide
aaacaauuuuacaguauaa

SEQ ID NO: 3019451 - RNA, 19 nt, Artificial Sequence
  Description of Artificial Sequence: Synthetic oligonucleotide
cgguuaaacaauuuuacag

SEQ ID NO: 3019452 - RNA, 19 nt, Artificial Sequence
  Description of Artificial Sequence: Synthetic oligonucleotide
ucagacaaacguaucgguu

SEQ ID NO: 3019453 - RNA, 19 nt, Artificial Sequence
  Description of Artificial Sequence: Synthetic oligonucleotide
aucagacaaacguaucggu

SEQ ID NO: 3019454 - RNA, 19 nt, Artificial Sequence
  Description of Artificial Sequence: Synthetic oligonucleotide
aauggcuugccuggaguag

SEQ ID NO: 3019455 - RNA, 19 nt, Artificial Sequence
  Description of Artificial Sequence: Synthetic oligonucleotide
ucaccaaugcucuguauua

SEQ ID NO: 3019456 - RNA, 19 nt, Artificial Sequence
  Description of Artificial Sequence: Synthetic oligonucleotide
ccuauguguacaaguaugg

SEQ ID NO: 3019457 - RNA, 19 nt, Artificial Sequence
  Description of Artificial Sequence: Synthetic oligonucleotide
uguguacaaguauggaaau

SEQ ID NO: 3019458 - RNA, 19 nt, Artificial Sequence
  Description of Artificial Sequence: Synthetic oligonucleotide
aaaacacuacauaccagaa

SEQ ID NO: 3019459 - RNA, 19 nt, Artificial Sequence
  Description of Artificial Sequence: Synthetic oligonucleotide
aagaaaaguccuaugugua

SEQ ID NO: 3019460 - RNA, 19 nt, Artificial Sequence
  Description of Artificial Sequence: Synthetic oligonucleotide
aacguaucgguuaaacaau

SEQ ID NO: 3019461 - RNA, 19 nt, Artificial Sequence
  Description of Artificial Sequence: Synthetic oligonucleotide
ggucuugacagccauagga

SEQ ID NO: 3019462 - RNA, 19 nt, Artificial Sequence
  Description of Artificial Sequence: Synthetic oligonucleotide
cauagcaggguauauucga

SEQ ID NO: 3019463 - RNA, 19 nt, Artificial Sequence
  Description of Artificial Sequence: Synthetic oligonucleotide
guauggaaauuaaauucug

SEQ ID NO: 3019464 - RNA, 19 nt, Artificial Sequence
  Description of Artificial Sequence: Synthetic oligonucleotide
aaauucugguauucaccaa

SEQ ID NO: 3019465 - RNA, 19 nt, Artificial Sequence
  Description of Artificial Sequence: Synthetic oligonucleotide
aaucauagcaggguauauu

SEQ ID NO: 3019466 - RNA, 19 nt, Artificial Sequence
  Description of Artificial Sequence: Synthetic oligonucleotide
aaaguccuauguguacaag

SEQ ID NO: 3019467 - RNA, 19 nt, Artificial Sequence
  Description of Artificial Sequence: Synthetic oligonucleotide
agaugccuuaaggaauggc

SEQ ID NO: 3019468 - RNA, 19 nt, Artificial Sequence
  Description of Artificial Sequence: Synthetic oligonucleotide
uugcaaaucauagcagggu

SEQ ID NO: 3019469 - RNA, 19 nt, Artificial Sequence
  Description of Artificial Sequence: Synthetic oligonucleotide
acuauagcaauuggucuug

SEQ ID NO: 3019470 - RNA, 19 nt, Artificial Sequence
  Description of Artificial Sequence: Synthetic oligonucleotide
gguuaaacaauuuuacagu

SEQ ID NO: 3019471 - RNA, 19 nt, Artificial Sequence
  Description of Artificial Sequence: Synthetic oligonucleotide
augagucaaauauucuaau

SEQ ID NO: 3019472 - RNA, 19 nt, Artificial Sequence
  Description of Artificial Sequence: Synthetic oligonucleotide
uagcaggguauauucgagc

SEQ ID NO: 3019473 - RNA, 19 nt, Artificial Sequence
  Description of Artificial Sequence: Synthetic oligonucleotide
guaauuauacaagaugccu

SEQ ID NO: 3019474 - RNA, 19 nt, Artificial Sequence
  Description of Artificial Sequence: Synthetic oligonucleotide
ccaaugcucuguauuaugg

SEQ ID NO: 3019475 - RNA, 19 nt, Artificial Sequence
  Description of Artificial Sequence: Synthetic oligonucleotide
aauaaucauuaggaggcuu

SEQ ID NO: 3019476 - RNA, 19 nt, Artificial Sequence
  Description of Artificial Sequence: Synthetic oligonucleotide
cuugccuggaguagacagc

SEQ ID NO: 3019477 - RNA, 19 nt, Artificial Sequence
  Description of Artificial Sequence: Synthetic oligonucleotide
gguauauucgagcaucaga

SEQ ID NO: 3019478 - RNA, 19 nt, Artificial Sequence
  Description of Artificial Sequence: Synthetic oligonucleotide
uuaggaggcuuaucuacaa

SEQ ID NO: 3019479 - RNA, 19 nt, Artificial Sequence
  Description of Artificial Sequence: Synthetic oligonucleotide
auuuucauugcaaaucaua

SEQ ID NO: 3019480 - RNA, 19 nt, Artificial Sequence
  Description of Artificial Sequence: Synthetic oligonucleotide
acuaacauuuucauugcaa

SEQ ID NO: 3019481 - RNA, 19 nt, Artificial Sequence
  Description of Artificial Sequence: Synthetic oligonucleotide
uucaaaucacuaacauuuu

SEQ ID NO: 3019482 - RNA, 19 nt, Artificial Sequence
  Description of Artificial Sequence: Synthetic oligonucleotide
acauuucaaaucacuaaca

SEQ ID NO: 3019483 - RNA, 19 nt, Artificial Sequence
  Description of Artificial Sequence: Synthetic oligonucleotide
auaaugagucaaauauucu

SEQ ID NO: 3019484 - RNA, 19 nt, Artificial Sequence
  Description of Artificial Sequence: Synthetic oligonucleotide
uauagcaauuggucuugac

SEQ ID NO: 3019485 - RNA, 19 nt, Artificial Sequence
  Description of Artificial Sequence: Synthetic oligonucleotide
uauucaccaaugcucugua

SEQ ID NO: 3019486 - RNA, 19 nt, Artificial Sequence
  Description of Artificial Sequence: Synthetic oligonucleotide
cauaccagaauccuaaaau

SEQ ID NO: 3019487 - RNA, 19 nt, Artificial Sequence
  Description of Artificial Sequence: Synthetic oligonucleotide
ucauuaggaggcuuaucua

SEQ ID NO: 3019488 - RNA, 19 nt, Artificial Sequence
  Description of Artificial Sequence: Synthetic oligonucleotide
acauaccagaauccuaaaa

SEQ ID NO: 3019489 - RNA, 19 nt, Artificial Sequence
  Description of Artificial Sequence: Synthetic oligonucleotide
gaaauuaaauucugguauu

SEQ ID NO: 3019490 - RNA, 19 nt, Artificial Sequence
  Description of Artificial Sequence: Synthetic oligonucleotide
gaugccuuaaggaauggcu

SEQ ID NO: 3019491 - RNA, 19 nt, Artificial Sequence
  Description of Artificial Sequence: Synthetic oligonucleotide
uucgagcaucagacaaacg

SEQ ID NO: 3019492 - RNA, 19 nt, Artificial Sequence
  Description of Artificial Sequence: Synthetic oligonucleotide
caaacguaucgguuaaaca

SEQ ID NO: 3019493 - RNA, 19 nt, Artificial Sequence
  Description of Artificial Sequence: Synthetic oligonucleotide
aaaucauagcaggguauau

SEQ ID NO: 3019494 - RNA, 19 nt, Artificial Sequence
  Description of Artificial Sequence: Synthetic oligonucleotide
guagacagcugaagaaaag

SEQ ID NO: 3019495 - RNA, 19 nt, Artificial Sequence
  Description of Artificial Sequence: Synthetic oligonucleotide
ucuugacagccauaggauu

SEQ ID NO: 3019496 - RNA, 19 nt, Artificial Sequence
  Description of Artificial Sequence: Synthetic oligonucleotide
cugaagaaaaguccuaugu

SEQ ID NO: 3019497 - RNA, 19 nt, Artificial Sequence
  Description of Artificial Sequence: Synthetic oligonucleotide
acaagaugccuuaaggaau

SEQ ID NO: 3019498 - RNA, 19 nt, Artificial Sequence
  Description of Artificial Sequence: Synthetic oligonucleotide
auuuuacaguauaaugagu

SEQ ID NO: 3019499 - RNA, 19 nt, Artificial Sequence
  Description of Artificial Sequence: Synthetic oligonucleotide
aagaugccuuaaggaaugg

SEQ ID NO: 3019500 - RNA, 19 nt, Artificial Sequence
  Description of Artificial Sequence: Synthetic oligonucleotide
agacaaacguaucgguuaa

SEQ ID NO: 3019501 - RNA, 19 nt, Artificial Sequence
  Description of Artificial Sequence: Synthetic oligonucleotide
caaauauucuaauaaucau

SEQ ID NO: 3019502 - RNA, 19 nt, Artificial Sequence
  Description of Artificial Sequence: Synthetic oligonucleotide
uaauaaucauuaggaggcu

SEQ ID NO: 3019503 - RNA, 19 nt, Artificial Sequence
  Description of Artificial Sequence: Synthetic oligonucleotide
uugacagccauaggauuca

SEQ ID NO: 3019504 - RNA, 19 nt, Artificial Sequence
  Description of Artificial Sequence: Synthetic oligonucleotide
gcuugccuggaguagacag

SEQ ID NO: 3019505 - RNA, 19 nt, Artificial Sequence
  Description of Artificial Sequence: Synthetic oligonucleotide
acaaaacacuacauaccag

SEQ ID NO: 3019506 - RNA, 19 nt, Artificial Sequence
  Description of Artificial Sequence: Synthetic oligonucleotide
uugccuggaguagacagcu

SEQ ID NO: 3019507 - RNA, 19 nt, Artificial Sequence
  Description of Artificial Sequence: Synthetic oligonucleotide
augucuaacuguaaacuau

SEQ ID NO: 3019508 - RNA, 19 nt, Artificial Sequence
  Description of Artificial Sequence: Synthetic oligonucleotide
auagcaggguauauucgag

SEQ ID NO: 3019509 - RNA, 19 nt, Artificial Sequence
  Description of Artificial Sequence: Synthetic oligonucleotide
gucuaacuguaaacuauag

SEQ ID NO: 3019510 - RNA, 19 nt, Artificial Sequence
  Description of Artificial Sequence: Synthetic oligonucleotide
guaaacuauagcaauuggu

SEQ ID NO: 3019511 - RNA, 19 nt, Artificial Sequence
  Description of Artificial Sequence: Synthetic oligonucleotide
auuaggaggcuuaucuaca

SEQ ID NO: 3019512 - RNA, 19 nt, Artificial Sequence
  Description of Artificial Sequence: Synthetic oligonucleotide
caggguauauucgagcauc

SEQ ID NO: 3019513 - RNA, 19 nt, Artificial Sequence
  Description of Artificial Sequence: Synthetic oligonucleotide
uggucuugacagccauagg

SEQ ID NO: 3019514 - RNA, 19 nt, Artificial Sequence
  Description of Artificial Sequence: Synthetic oligonucleotide
acaguauaaugagucaaau

SEQ ID NO: 3019515 - RNA, 19 nt, Artificial Sequence
  Description of Artificial Sequence: Synthetic oligonucleotide
caaguauggaaauuaaauu

SEQ ID NO: 3019516 - RNA, 19 nt, Artificial Sequence
  Description of Artificial Sequence: Synthetic oligonucleotide
gaguagacagcugaagaaa

SEQ ID NO: 3019517 - RNA, 19 nt, Artificial Sequence
  Description of Artificial Sequence: Synthetic oligonucleotide
cagacaaacguaucgguua

SEQ ID NO: 3019518 - RNA, 19 nt, Artificial Sequence
  Description of Artificial Sequence: Synthetic oligonucleotide
auaaucauuaggaggcuua

SEQ ID NO: 3019519 - RNA, 19 nt, Artificial Sequence
  Description of Artificial Sequence: Synthetic oligonucleotide
uaaucauuaggaggcuuau

SEQ ID NO: 3019520 - RNA, 19 nt, Artificial Sequence
  Description of Artificial Sequence: Synthetic oligonucleotide
gcaauuggucuugacagcc

SEQ ID NO: 3019521 - RNA, 19 nt, Artificial Sequence
  Description of Artificial Sequence: Synthetic oligonucleotide
agcaucagacaaacguauc

SEQ ID NO: 3019522 - RNA, 19 nt, Artificial Sequence
  Description of Artificial Sequence: Synthetic oligonucleotide
aggaauggcuugccuggag

SEQ ID NO: 3019523 - RNA, 19 nt, Artificial Sequence
  Description of Artificial Sequence: Synthetic oligonucleotide
ggauucaacaaaacacuac

SEQ ID NO: 3019524 - RNA, 19 nt, Artificial Sequence
  Description of Artificial Sequence: Synthetic oligonucleotide
auucaacaaaacacuacau

SEQ ID NO: 3019525 - RNA, 19 nt, Artificial Sequence
  Description of Artificial Sequence: Synthetic oligonucleotide
acuguaaacuauagcaauu

SEQ ID NO: 3019526 - RNA, 19 nt, Artificial Sequence
  Description of Artificial Sequence: Synthetic oligonucleotide
agcugaagaaaaguccuau

SEQ ID NO: 3019527 - RNA, 19 nt, Artificial Sequence
  Description of Artificial Sequence: Synthetic oligonucleotide
uacauaccagaauccuaaa

SEQ ID NO: 3019528 - RNA, 19 nt, Artificial Sequence
  Description of Artificial Sequence: Synthetic oligonucleotide
uaggaggcuuaucuacaaa

SEQ ID NO: 3019529 - RNA, 19 nt, Artificial Sequence
  Description of Artificial Sequence: Synthetic oligonucleotide
cuggaguagacagcugaag

SEQ ID NO: 3019530 - RNA, 19 nt, Artificial Sequence
  Description of Artificial Sequence: Synthetic oligonucleotide
cauuucaaaucacuaacau

SEQ ID NO: 3019531 - RNA, 19 nt, Artificial Sequence
  Description of Artificial Sequence: Synthetic oligonucleotide
gcugaagaaaaguccuaug

SEQ ID NO: 3019532 - RNA, 19 nt, Artificial Sequence
  Description of Artificial Sequence: Synthetic oligonucleotide
ggaguagacagcugaagaa

SEQ ID NO: 3019533 - RNA, 19 nt, Artificial Sequence
  Description of Artificial Sequence: Synthetic oligonucleotide
auccuaaaauauauugaaa

SEQ ID NO: 3019534 - RNA, 19 nt, Artificial Sequence
  Description of Artificial Sequence: Synthetic oligonucleotide
aguccuauguguacaagua

SEQ ID NO: 3019535 - RNA, 19 nt, Artificial Sequence
  Description of Artificial Sequence: Synthetic oligonucleotide
accagaauccuaaaauaua

SEQ ID NO: 3019536 - RNA, 19 nt, Artificial Sequence
  Description of Artificial Sequence: Synthetic oligonucleotide
caguauaaugagucaaaua

SEQ ID NO: 3019537 - RNA, 19 nt, Artificial Sequence
  Description of Artificial Sequence: Synthetic oligonucleotide
gaauggcuugccuggagua

SEQ ID NO: 3019538 - RNA, 19 nt, Artificial Sequence
  Description of Artificial Sequence: Synthetic oligonucleotide
guaucgguuaaacaauuuu

SEQ ID NO: 3019539 - RNA, 19 nt, Artificial Sequence
  Description of Artificial Sequence: Synthetic oligonucleotide
ccuaaaauauauugaaacu

SEQ ID NO: 3019540 - RNA, 19 nt, Artificial Sequence
  Description of Artificial Sequence: Synthetic oligonucleotide
auuauacaagaugccuuaa

SEQ ID NO: 3019541 - RNA, 19 nt, Artificial Sequence
  Description of Artificial Sequence: Synthetic oligonucleotide
cuauguguacaaguaugga

SEQ ID NO: 3019542 - RNA, 19 nt, Artificial Sequence
  Description of Artificial Sequence: Synthetic oligonucleotide
acuacauaccagaauccua

SEQ ID NO: 3019543 - RNA, 19 nt, Artificial Sequence
  Description of Artificial Sequence: Synthetic oligonucleotide
uuucuacauuugccuauuu

SEQ ID NO: 3019544 - RNA, 19 nt, Artificial Sequence
  Description of Artificial Sequence: Synthetic oligonucleotide
aaggaauggcuugccugga

SEQ ID NO: 3019545 - RNA, 19 nt, Artificial Sequence
  Description of Artificial Sequence: Synthetic oligonucleotide
aggauucaacaaaacacua

SEQ ID NO: 3019546 - RNA, 19 nt, Artificial Sequence
  Description of Artificial Sequence: Synthetic oligonucleotide
guacaaguauggaaauuaa

SEQ ID NO: 3019547 - RNA, 19 nt, Artificial Sequence
  Description of Artificial Sequence: Synthetic oligonucleotide
uggcuugccuggaguagac

SEQ ID NO: 3019548 - RNA, 19 nt, Artificial Sequence
  Description of Artificial Sequence: Synthetic oligonucleotide
cagccauaggauucaacaa

SEQ ID NO: 3019549 - RNA, 19 nt, Artificial Sequence
  Description of Artificial Sequence: Synthetic oligonucleotide
caaaucauagcaggguaua

SEQ ID NO: 3019550 - RNA, 19 nt, Artificial Sequence
  Description of Artificial Sequence: Synthetic oligonucleotide
cuguuucuacauuugccua

SEQ ID NO: 3019551 - RNA, 19 nt, Artificial Sequence
  Description of Artificial Sequence: Synthetic oligonucleotide
auggcuugccuggaguaga

SEQ ID NO: 3019552 - RNA, 19 nt, Artificial Sequence
  Description of Artificial Sequence: Synthetic oligonucleotide
guauucaccaaugcucugu

SEQ ID NO: 3019553 - RNA, 19 nt, Artificial Sequence
  Description of Artificial Sequence: Synthetic oligonucleotide
augccuuaaggaauggcuu

SEQ ID NO: 3019554 - RNA, 19 nt, Artificial Sequence
  Description of Artificial Sequence: Synthetic oligonucleotide
auucaccaaugcucuguau

SEQ ID NO: 3019555 - RNA, 19 nt, Artificial Sequence
  Description of Artificial Sequence: Synthetic oligonucleotide
caauuggucuugacagcca

SEQ ID NO: 3019556 - RNA, 19 nt, Artificial Sequence
  Description of Artificial Sequence: Synthetic oligonucleotide
ggaggcuuaucuacaaaca

SEQ ID NO: 3019557 - RNA, 19 nt, Artificial Sequence
  Description of Artificial Sequence: Synthetic oligonucleotide
guauaaugagucaaauauu

SEQ ID NO: 3019558 - RNA, 19 nt, Artificial Sequence
  Description of Artificial Sequence: Synthetic oligonucleotide
cacuaacauuuucauugca

SEQ ID NO: 3019559 - RNA, 19 nt, Artificial Sequence
  Description of Artificial Sequence: Synthetic oligonucleotide
gguauucaccaaugcucug

SEQ ID NO: 3019560 - RNA, 19 nt, Artificial Sequence
  Description of Artificial Sequence: Synthetic oligonucleotide
ccauaggauucaacaaaac

SEQ ID NO: 3019561 - RNA, 19 nt, Artificial Sequence
  Description of Artificial Sequence: Synthetic oligonucleotide
gacagccauaggauucaac

SEQ ID NO: 3019562 - RNA, 19 nt, Artificial Sequence
  Description of Artificial Sequence: Synthetic oligonucleotide
aggguauauucgagcauca

SEQ ID NO: 3019563 - RNA, 19 nt, Artificial Sequence
  Description of Artificial Sequence: Synthetic oligonucleotide
gagcaucagacaaacguau

SEQ ID NO: 3019564 - RNA, 19 nt, Artificial Sequence
  Description of Artificial Sequence: Synthetic oligonucleotide
ggcuuaucuacaaacagau

SEQ ID NO: 3019565 - RNA, 19 nt, Artificial Sequence
  Description of Artificial Sequence: Synthetic oligonucleotide
cuuaaggaauggcuugccu

SEQ ID NO: 3019566 - RNA, 19 nt, Artificial Sequence
  Description of Artificial Sequence: Synthetic oligonucleotide
ccagaauccuaaaauauau

SEQ ID NO: 3019567 - RNA, 19 nt, Artificial Sequence
  Description of Artificial Sequence: Synthetic oligonucleotide
ugccuggaguagacagcug

SEQ ID NO: 3019568 - RNA, 19 nt, Artificial Sequence
  Description of Artificial Sequence: Synthetic oligonucleotide
gccuuaaggaauggcuugc

SEQ ID NO: 3019569 - RNA, 19 nt, Artificial Sequence
  Description of Artificial Sequence: Synthetic oligonucleotide
ggguauauucgagcaucag

SEQ ID NO: 3019570 - RNA, 19 nt, Artificial Sequence
  Description of Artificial Sequence: Synthetic oligonucleotide
acguaucgguuaaacaauu

SEQ ID NO: 3019571 - RNA, 19 nt, Artificial Sequence
  Description of Artificial Sequence: Synthetic oligonucleotide
gcuuaucuacaaacagaug

SEQ ID NO: 3019572 - RNA, 19 nt, Artificial Sequence
  Description of Artificial Sequence: Synthetic oligonucleotide
gccauaggauucaacaaaa

SEQ ID NO: 3019573 - RNA, 19 nt, Artificial Sequence
  Description of Artificial Sequence: Synthetic oligonucleotide
guccuauguguacaaguau

SEQ ID NO: 3019574 - RNA, 19 nt, Artificial Sequence
  Description of Artificial Sequence: Synthetic oligonucleotide
cacuacauaccagaauccu

SEQ ID NO: 3019575 - RNA, 19 nt, Artificial Sequence
  Description of Artificial Sequence: Synthetic oligonucleotide
cagaauccuaaaauauauu

SEQ ID NO: 3019576 - RNA, 19 nt, Artificial Sequence
  Description of Artificial Sequence: Synthetic oligonucleotide
cauuuucauugcaaaucau

SEQ ID NO: 3019577 - RNA, 19 nt, Artificial Sequence
  Description of Artificial Sequence: Synthetic oligonucleotide
ccuuaaggaauggcuugcc

SEQ ID NO: 3019578 - RNA, 19 nt, Artificial Sequence
  Description of Artificial Sequence: Synthetic oligonucleotide
ggaauggcuugccuggagu

SEQ ID NO: 3019579 - RNA, 19 nt, Artificial Sequence
  Description of Artificial Sequence: Synthetic oligonucleotide
gacaaacguaucgguuaaa

SEQ ID NO: 3019580 - RNA, 19 nt, Artificial Sequence
  Description of Artificial Sequence: Synthetic oligonucleotide
ugacagccauaggauucaa

SEQ ID NO: 3019581 - RNA, 19 nt, Artificial Sequence
  Description of Artificial Sequence: Synthetic oligonucleotide
cuauagcaauuggucuuga

SEQ ID NO: 3019582 - RNA, 19 nt, Artificial Sequence
  Description of Artificial Sequence: Synthetic oligonucleotide
auuggucuugacagccaua

SEQ ID NO: 3019583 - RNA, 19 nt, Artificial Sequence
  Description of Artificial Sequence: Synthetic oligonucleotide
guuucuacauuugccuauu

SEQ ID NO: 3019584 - RNA, 19 nt, Artificial Sequence
  Description of Artificial Sequence: Synthetic oligonucleotide
cgagcaucagacaaacgua

SEQ ID NO: 3019585 - RNA, 19 nt, Artificial Sequence
  Description of Artificial Sequence: Synthetic oligonucleotide
guguacaaguauggaaauu

SEQ ID NO: 3019586 - RNA, 19 nt, Artificial Sequence
  Description of Artificial Sequence: Synthetic oligonucleotide
gcaaaucauagcaggguau

SEQ ID NO: 3019587 - RNA, 19 nt, Artificial Sequence
  Description of Artificial Sequence: Synthetic oligonucleotide
ccuggaguagacagcugaa

SEQ ID NO: 3019588 - RNA, 19 nt, Artificial Sequence
  Description of Artificial Sequence: Synthetic oligonucleotide
gcaggguauauucgagcau

SEQ ID NO: 3019589 - RNA, 19 nt, Artificial Sequence
  Description of Artificial Sequence: Synthetic oligonucleotide
ggcuugccuggaguagaca

SEQ ID NO: 3019590 - RNA, 19 nt, Artificial Sequence
  Description of Artificial Sequence: Synthetic oligonucleotide
cguaucgguuaaacaauuu

SEQ ID NO: 3019591 - RNA, 19 nt, Artificial Sequence
  Description of Artificial Sequence: Synthetic oligonucleotide
cuauuggucacucugccgg

SEQ ID NO: 3019592 - RNA, 19 nt, Artificial Sequence
  Description of Artificial Sequence: Synthetic oligonucleotide
ugccaggucacucacgagg

SEQ ID NO: 3019593 - RNA, 19 nt, Artificial Sequence
  Description of Artificial Sequence: Synthetic oligonucleotide
ucuacuccggcacucagug

SEQ ID NO: 3019594 - RNA, 19 nt, Artificial Sequence
  Description of Artificial Sequence: Synthetic oligonucleotide
uuuguaggcugcaugccag

SEQ ID NO: 3019595 - RNA, 19 nt, Artificial Sequence
  Description of Artificial Sequence: Synthetic oligonucleotide
uacuccggcacucagugcc

SEQ ID NO: 3019596 - RNA, 19 nt, Artificial Sequence
  Description of Artificial Sequence: Synthetic oligonucleotide
ucccauagcucgcaauggg

SEQ ID NO: 3019597 - RNA, 19 nt, Artificial Sequence
  Description of Artificial Sequence: Synthetic oligonucleotide
aucgagcucagacaccggg

SEQ ID NO: 3019598 - RNA, 19 nt, Artificial Sequence
  Description of Artificial Sequence: Synthetic oligonucleotide
aaggauccgcgcgagcccc

SEQ ID NO: 3019599 - RNA, 19 nt, Artificial Sequence
  Description of Artificial Sequence: Synthetic oligonucleotide
ucgagcucagacaccgggg

SEQ ID NO: 3019600 - RNA, 19 nt, Artificial Sequence
  Description of Artificial Sequence: Synthetic oligonucleotide
auagcucgcaauggggccc

SEQ ID NO: 3019601 - RNA, 19 nt, Artificial Sequence
  Description of Artificial Sequence: Synthetic oligonucleotide
uugcggaggagccaggcgu

SEQ ID NO: 3019602 - RNA, 19 nt, Artificial Sequence
  Description of Artificial Sequence: Synthetic oligonucleotide
ugccuauuggucacucugc

SEQ ID NO: 3019603 - RNA, 19 nt, Artificial Sequence
  Description of Artificial Sequence: Synthetic oligonucleotide
cauagcucgcaauggggcc

SEQ ID NO: 3019604 - RNA, 19 nt, Artificial Sequence
  Description of Artificial Sequence: Synthetic oligonucleotide
acucagugccuauugguca

SEQ ID NO: 3019605 - RNA, 19 nt, Artificial Sequence
  Description of Artificial Sequence: Synthetic oligonucleotide
gagaccuaggcuccgcccc

SEQ ID NO: 3019606 - RNA, 19 nt, Artificial Sequence
  Description of Artificial Sequence: Synthetic oligonucleotide
gugccuauuggucacucug

SEQ ID NO: 3019607 - RNA, 19 nt, Artificial Sequence
  Description of Artificial Sequence: Synthetic oligonucleotide
gauuggcugacuccccgcc

SEQ ID NO: 3019608 - RNA, 19 nt, Artificial Sequence
  Description of Artificial Sequence: Synthetic oligonucleotide
aauggggcccgagaccuag

SEQ ID NO: 3019609 - RNA, 19 nt, Artificial Sequence
  Description of Artificial Sequence: Synthetic oligonucleotide
ggugucuucgccucugucc

SEQ ID NO: 3019610 - RNA, 19 nt, Artificial Sequence
  Description of Artificial Sequence: Synthetic oligonucleotide
uucgccucuguccucugug

SEQ ID NO: 3019611 - RNA, 19 nt, Artificial Sequence
  Description of Artificial Sequence: Synthetic oligonucleotide
cacucagugccuauugguc

SEQ ID NO: 3019612 - RNA, 19 nt, Artificial Sequence
  Description of Artificial Sequence: Synthetic oligonucleotide
guuuguaggcugcaugcca

SEQ ID NO: 3019613 - RNA, 19 nt, Artificial Sequence
  Description of Artificial Sequence: Synthetic oligonucleotide
ucgcaauggggcccgagac

SEQ ID NO: 3019614 - RNA, 19 nt, Artificial Sequence
  Description of Artificial Sequence: Synthetic oligonucleotide
uccucgugugccuugcgga

SEQ ID NO: 3019615 - RNA, 19 nt, Artificial Sequence
  Description of Artificial Sequence: Synthetic oligonucleotide
cuccccgccacucuacucc

SEQ ID NO: 3019616 - RNA, 19 nt, Artificial Sequence
  Description of Artificial Sequence: Synthetic oligonucleotide
gaaggauccgcgcgagccc

SEQ ID NO: 3019617 - RNA, 19 nt, Artificial Sequence
  Description of Artificial Sequence: Synthetic oligonucleotide
ucugccggugucuucgccu

SEQ ID NO: 3019618 - RNA, 19 nt, Artificial Sequence
  Description of Artificial Sequence: Synthetic oligonucleotide
cucagugccuauuggucac

SEQ ID NO: 3019619 - RNA, 19 nt, Artificial Sequence
  Description of Artificial Sequence: Synthetic oligonucleotide
ugcgguggcagcagcgacc

SEQ ID NO: 3019620 - RNA, 19 nt, Artificial Sequence
  Description of Artificial Sequence: Synthetic oligonucleotide
cacucugccggugucuucg

SEQ ID NO: 3019621 - RNA, 19 nt, Artificial Sequence
  Description of Artificial Sequence: Synthetic oligonucleotide
ugcaugccaggucacucac

SEQ ID NO: 3019622 - RNA, 19 nt, Artificial Sequence
  Description of Artificial Sequence: Synthetic oligonucleotide
uuggcugacuccccgccac

SEQ ID NO: 3019623 - RNA, 19 nt, Artificial Sequence
  Description of Artificial Sequence: Synthetic oligonucleotide
caugccaggucacucacga

SEQ ID NO: 3019624 - RNA, 19 nt, Artificial Sequence
  Description of Artificial Sequence: Synthetic oligonucleotide
ucgugugccuugcggagga

SEQ ID NO: 3019625 - RNA, 19 nt, Artificial Sequence
  Description of Artificial Sequence: Synthetic oligonucleotide
caggucacucacgaggggc

SEQ ID NO: 3019626 - RNA, 19 nt, Artificial Sequence
  Description of Artificial Sequence: Synthetic oligonucleotide
uauuggucacucugccggu

SEQ ID NO: 3019627 - RNA, 19 nt, Artificial Sequence
  Description of Artificial Sequence: Synthetic oligonucleotide
guccucgugugccuugcgg

SEQ ID NO: 3019628 - RNA, 19 nt, Artificial Sequence
  Description of Artificial Sequence: Synthetic oligonucleotide
ccauagcucgcaauggggc

SEQ ID NO: 3019629 - RNA, 19 nt, Artificial Sequence
  Description of Artificial Sequence: Synthetic oligonucleotide
ucgccgauuggcugacucc

SEQ ID NO: 3019630 - RNA, 19 nt, Artificial Sequence
  Description of Artificial Sequence: Synthetic oligonucleotide
cucccauagcucgcaaugg

SEQ ID NO: 3019631 - RNA, 19 nt, Artificial Sequence
  Description of Artificial Sequence: Synthetic oligonucleotide
ugccuugcggaggagccag

SEQ ID NO: 3019632 - RNA, 19 nt, Artificial Sequence
  Description of Artificial Sequence: Synthetic oligonucleotide
acucuacuccggcacucag

SEQ ID NO: 3019633 - RNA, 19 nt, Artificial Sequence
  Description of Artificial Sequence: Synthetic oligonucleotide
ucugugccgguagugugug

SEQ ID NO: 3019634 - RNA, 19 nt, Artificial Sequence
  Description of Artificial Sequence: Synthetic oligonucleotide
ccguuuguaggcugcaugc

SEQ ID NO: 3019635 - RNA, 19 nt, Artificial Sequence
  Description of Artificial Sequence: Synthetic oligonucleotide
aggucacucacgaggggcg

SEQ ID NO: 3019636 - RNA, 19 nt, Artificial Sequence
  Description of Artificial Sequence: Synthetic oligonucleotide
uggggcccgagaccuaggc

SEQ ID NO: 3019637 - RNA, 19 nt, Artificial Sequence
  Description of Artificial Sequence: Synthetic oligonucleotide
ggcacucagugccuauugg

SEQ ID NO: 3019638 - RNA, 19 nt, Artificial Sequence
  Description of Artificial Sequence: Synthetic oligonucleotide
ugcggggccgcugcggugg

SEQ ID NO: 3019639 - RNA, 19 nt, Artificial Sequence
  Description of Artificial Sequence: Synthetic oligonucleotide
uguccucgugugccuugcg

SEQ ID NO: 3019640 - RNA, 19 nt, Artificial Sequence
  Description of Artificial Sequence: Synthetic oligonucleotide
ggggcgaaggauccgcgcg

SEQ ID NO: 3019641 - RNA, 19 nt, Artificial Sequence
  Description of Artificial Sequence: Synthetic oligonucleotide
uccccgccacucuacuccg

SEQ ID NO: 3019642 - RNA, 19 nt, Artificial Sequence
  Description of Artificial Sequence: Synthetic oligonucleotide
aggagccaggcguccgcgc

SEQ ID NO: 3019643 - RNA, 19 nt, Artificial Sequence
  Description of Artificial Sequence: Synthetic oligonucleotide
aagcgcaggcgggccaggc

SEQ ID NO: 3019644 - RNA, 19 nt, Artificial Sequence
  Description of Artificial Sequence: Synthetic oligonucleotide
uccucugugccgguagugu

SEQ ID NO: 3019645 - RNA, 19 nt, Artificial Sequence
  Description of Artificial Sequence: Synthetic oligonucleotide
ucgccucuguccucugugc

SEQ ID NO: 3019646 - RNA, 19 nt, Artificial Sequence
  Description of Artificial Sequence: Synthetic oligonucleotide
ccuauuggucacucugccg

SEQ ID NO: 3019647 - RNA, 19 nt, Artificial Sequence
  Description of Artificial Sequence: Synthetic oligonucleotide
agugccuauuggucacucu

SEQ ID NO: 3019648 - RNA, 19 nt, Artificial Sequence
  Description of Artificial Sequence: Synthetic oligonucleotide
acucacgaggggcgccucg

SEQ ID NO: 3019649 - RNA, 19 nt, Artificial Sequence
  Description of Artificial Sequence: Synthetic oligonucleotide
cuguccucugugccgguag

SEQ ID NO: 3019650 - RNA, 19 nt, Artificial Sequence
  Description of Artificial Sequence: Synthetic oligonucleotide
uguaggcugcaugccaggu

SEQ ID NO: 3019651 - RNA, 19 nt, Artificial Sequence
  Description of Artificial Sequence: Synthetic oligonucleotide
cccauagcucgcaaugggg

SEQ ID NO: 3019652 - RNA, 19 nt, Artificial Sequence
  Description of Artificial Sequence: Synthetic oligonucleotide
uguccucugugccgguagu

SEQ ID NO: 3019653 - RNA, 19 nt, Artificial Sequence
  Description of Artificial Sequence: Synthetic oligonucleotide
acuccccgccacucuacuc

SEQ ID NO: 3019654 - RNA, 19 nt, Artificial Sequence
  Description of Artificial Sequence: Synthetic oligonucleotide
aggggcgccucgccgauug

SEQ ID NO: 3019655 - RNA, 19 nt, Artificial Sequence
  Description of Artificial Sequence: Synthetic oligonucleotide
uagcucgcaauggggcccg

SEQ ID NO: 3019656 - RNA, 19 nt, Artificial Sequence
  Description of Artificial Sequence: Synthetic oligonucleotide
cucgccgauuggcugacuc

SEQ ID NO: 3019657 - RNA, 19 nt, Artificial Sequence
  Description of Artificial Sequence: Synthetic oligonucleotide
gccuauuggucacucugcc

SEQ ID NO: 3019658 - RNA, 19 nt, Artificial Sequence
  Description of Artificial Sequence: Synthetic oligonucleotide
agcgcaggcgggccaggcg

SEQ ID NO: 3019659 - RNA, 19 nt, Artificial Sequence
  Description of Artificial Sequence: Synthetic oligonucleotide
ugacuccccgccacucuac

SEQ ID NO: 3019660 - RNA, 19 nt, Artificial Sequence
  Description of Artificial Sequence: Synthetic oligonucleotide
ggagccaggcguccgcgcg

SEQ ID NO: 3019661 - RNA, 19 nt, Artificial Sequence
  Description of Artificial Sequence: Synthetic oligonucleotide
cacgaggggcgccucgccg

SEQ ID NO: 3019662 - RNA, 19 nt, Artificial Sequence
  Description of Artificial Sequence: Synthetic oligonucleotide
gugucuucgccucuguccu

SEQ ID NO: 3019663 - RNA, 19 nt, Artificial Sequence
  Description of Artificial Sequence: Synthetic oligonucleotide
guaggcugcaugccagguc

SEQ ID NO: 3019664 - RNA, 19 nt, Artificial Sequence
  Description of Artificial Sequence: Synthetic oligonucleotide
ucacgaggggcgccucgcc

SEQ ID NO: 3019665 - RNA, 19 nt, Artificial Sequence
  Description of Artificial Sequence: Synthetic oligonucleotide
cucgugugccuugcggagg

SEQ ID NO: 3019666 - RNA, 19 nt, Artificial Sequence
  Description of Artificial Sequence: Synthetic oligonucleotide
gaggagccaggcguccgcg

SEQ ID NO: 3019667 - RNA, 19 nt, Artificial Sequence
  Description of Artificial Sequence: Synthetic oligonucleotide
gggcccgagaccuaggcuc

SEQ ID NO: 3019668 - RNA, 19 nt, Artificial Sequence
  Description of Artificial Sequence: Synthetic oligonucleotide
ccucccauagcucgcaaug

SEQ ID NO: 3019669 - RNA, 19 nt, Artificial Sequence
  Description of Artificial Sequence: Synthetic oligonucleotide
gccguuuguaggcugcaug

SEQ ID NO: 3019670 - RNA, 19 nt, Artificial Sequence
  Description of Artificial Sequence: Synthetic oligonucleotide
auuggucacucugccggug

SEQ ID NO: 3019671 - RNA, 19 nt, Artificial Sequence
  Description of Artificial Sequence: Synthetic oligonucleotide
gaucgagcucagacaccgg

SEQ ID NO: 3019672 - RNA, 19 nt, Artificial Sequence
  Description of Artificial Sequence: Synthetic oligonucleotide
cgaucgagcucagacaccg

SEQ ID NO: 3019673 - RNA, 19 nt, Artificial Sequence
  Description of Artificial Sequence: Synthetic oligonucleotide
accagccgccucccauagc

SEQ ID NO: 3019674 - RNA, 19 nt, Artificial Sequence
  Description of Artificial Sequence: Synthetic oligonucleotide
cuacuccggcacucagugc

SEQ ID NO: 3019675 - RNA, 19 nt, Artificial Sequence
  Description of Artificial Sequence: Synthetic oligonucleotide
cugcaugccaggucacuca

SEQ ID NO: 3019676 - RNA, 19 nt, Artificial Sequence
  Description of Artificial Sequence: Synthetic oligonucleotide
gacccgagcccaccaccag

SEQ ID NO: 3019677 - RNA, 19 nt, Artificial Sequence
  Description of Artificial Sequence: Synthetic oligonucleotide
augccaggucacucacgag

SEQ ID NO: 3019678 - RNA, 19 nt, Artificial Sequence
  Description of Artificial Sequence: Synthetic oligonucleotide
accaccagccgccucccau

SEQ ID NO: 3019679 - RNA, 19 nt, Artificial Sequence
  Description of Artificial Sequence: Synthetic oligonucleotide
acgaggggcgccucgccga

SEQ ID NO: 3019680 - RNA, 19 nt, Artificial Sequence
  Description of Artificial Sequence: Synthetic oligonucleotide
uggucacucugccgguguc

SEQ ID NO: 3019681 - RNA, 19 nt, Artificial Sequence
  Description of Artificial Sequence: Synthetic oligonucleotide
ucacucacgaggggcgccu

SEQ ID NO: 3019682 - RNA, 19 nt, Artificial Sequence
  Description of Artificial Sequence: Synthetic oligonucleotide
cccacgggccguuuguagg

SEQ ID NO: 3019683 - RNA, 19 nt, Artificial Sequence
  Description of Artificial Sequence: Synthetic oligonucleotide
cucgcaauggggcccgaga

SEQ ID NO: 3019684 - RNA, 19 nt, Artificial Sequence
  Description of Artificial Sequence: Synthetic oligonucleotide
guccgcgcgaucgagcuca

SEQ ID NO: 3019685 - RNA, 19 nt, Artificial Sequence
  Description of Artificial Sequence: Synthetic oligonucleotide
cugccggugucuucgccuc

SEQ ID NO: 3019686 - RNA, 19 nt, Artificial Sequence
  Description of Artificial Sequence: Synthetic oligonucleotide
cucacgaggggcgccucgc

SEQ ID NO: 3019687 - RNA, 19 nt, Artificial Sequence
  Description of Artificial Sequence: Synthetic oligonucleotide
cgcgaucgagcucagacac

SEQ ID NO: 3019688 - RNA, 19 nt, Artificial Sequence
  Description of Artificial Sequence: Synthetic oligonucleotide
ucagugccuauuggucacu

SEQ ID NO: 3019689 - RNA, 19 nt, Artificial Sequence
  Description of Artificial Sequence: Synthetic oligonucleotide
cgaaggauccgcgcgagcc

SEQ ID NO: 3019690 - RNA, 19 nt, Artificial Sequence
  Description of Artificial Sequence: Synthetic oligonucleotide
caccagccgccucccauag

SEQ ID NO: 3019691 - RNA, 19 nt, Artificial Sequence
  Description of Artificial Sequence: Synthetic oligonucleotide
ccgauuggcugacuccccg

SEQ ID NO: 3019692 - RNA, 19 nt, Artificial Sequence
  Description of Artificial Sequence: Synthetic oligonucleotide
acgggccguuuguaggcug

SEQ ID NO: 3019693 - RNA, 19 nt, Artificial Sequence
  Description of Artificial Sequence: Synthetic oligonucleotide
cuguccucgugugccuugc

SEQ ID NO: 3019694 - RNA, 19 nt, Artificial Sequence
  Description of Artificial Sequence: Synthetic oligonucleotide
cucugccggugucuucgcc

SEQ ID NO: 3019695 - RNA, 19 nt, Artificial Sequence
  Description of Artificial Sequence: Synthetic oligonucleotide
ucuucgccucuguccucug

SEQ ID NO: 3019696 - RNA, 19 nt, Artificial Sequence
  Description of Artificial Sequence: Synthetic oligonucleotide
uggcugacuccccgccacu

SEQ ID NO: 3019697 - RNA, 19 nt, Artificial Sequence
  Description of Artificial Sequence: Synthetic oligonucleotide
ccaggcguccgcgcgaucg

SEQ ID NO: 3019698 - RNA, 19 nt, Artificial Sequence
  Description of Artificial Sequence: Synthetic oligonucleotide
ccacgggccguuuguaggc

SEQ ID NO: 3019699 - RNA, 19 nt, Artificial Sequence
  Description of Artificial Sequence: Synthetic oligonucleotide
cugcgguggcagcagcgac

SEQ ID NO: 3019700 - RNA, 19 nt, Artificial Sequence
  Description of Artificial Sequence: Synthetic oligonucleotide
ugucuucgccucuguccuc

SEQ ID NO: 3019701 - RNA, 19 nt, Artificial Sequence
  Description of Artificial Sequence: Synthetic oligonucleotide
ccucgugugccuugcggag

SEQ ID NO: 3019702 - RNA, 19 nt, Artificial Sequence
  Description of Artificial Sequence: Synthetic oligonucleotide
gucacucacgaggggcgcc

SEQ ID NO: 3019703 - RNA, 19 nt, Artificial Sequence
  Description of Artificial Sequence: Synthetic oligonucleotide
cgcgcgaucgagcucagac

SEQ ID NO: 3019704 - RNA, 19 nt, Artificial Sequence
  Description of Artificial Sequence: Synthetic oligonucleotide
gaagcgcaggcgggccagg

SEQ ID NO: 3019705 - RNA, 19 nt, Artificial Sequence
  Description of Artificial Sequence: Synthetic oligonucleotide
ggaggagccaggcguccgc

SEQ ID NO: 3019706 - RNA, 19 nt, Artificial Sequence
  Description of Artificial Sequence: Synthetic oligonucleotide
ucacucugccggugucuuc

SEQ ID NO: 3019707 - RNA, 19 nt, Artificial Sequence
  Description of Artificial Sequence: Synthetic oligonucleotide
ccucugugccgguagugug

SEQ ID NO: 3019708 - RNA, 19 nt, Artificial Sequence
  Description of Artificial Sequence: Synthetic oligonucleotide
guccucugugccgguagug

SEQ ID NO: 3019709 - RNA, 19 nt, Artificial Sequence
  Description of Artificial Sequence: Synthetic oligonucleotide
aggccccacgcgcgggccg

SEQ ID NO: 3019710 - RNA, 19 nt, Artificial Sequence
  Description of Artificial Sequence: Synthetic oligonucleotide
cucugugccgguagugugu

SEQ ID NO: 3019711 - RNA, 19 nt, Artificial Sequence
  Description of Artificial Sequence: Synthetic oligonucleotide
gcgcaggcgggccaggcgc

SEQ ID NO: 3019712 - RNA, 19 nt, Artificial Sequence
  Description of Artificial Sequence: Synthetic oligonucleotide
ggcggcgaggccccacgcg

SEQ ID NO: 3019713 - RNA, 19 nt, Artificial Sequence
  Description of Artificial Sequence: Synthetic oligonucleotide
uccggcacucagugccuau

SEQ ID NO: 3019714 - RNA, 19 nt, Artificial Sequence
  Description of Artificial Sequence: Synthetic oligonucleotide
gcggcgaggccccacgcgc

SEQ ID NO: 3019715 - RNA, 19 nt, Artificial Sequence
  Description of Artificial Sequence: Synthetic oligonucleotide
gcacucagugccuauuggu

SEQ ID NO: 3019716 - RNA, 19 nt, Artificial Sequence
  Description of Artificial Sequence: Synthetic oligonucleotide
ugccggugucuucgccucu

SEQ ID NO: 3019717 - RNA, 19 nt, Artificial Sequence
  Description of Artificial Sequence: Synthetic oligonucleotide
gagccaggcguccgcgcga

SEQ ID NO: 3019718 - RNA, 19 nt, Artificial Sequence
  Description of Artificial Sequence: Synthetic oligonucleotide
cagugccuauuggucacuc

SEQ ID NO: 3019719 - RNA, 19 nt, Artificial Sequence
  Description of Artificial Sequence: Synthetic oligonucleotide
ggaagcgcaggcgggccag

SEQ ID NO: 3019720 - RNA, 19 nt, Artificial Sequence
  Description of Artificial Sequence: Synthetic oligonucleotide
gcgacccgagcccaccacc

SEQ ID NO: 3019721 - RNA, 19 nt, Artificial Sequence
  Description of Artificial Sequence: Synthetic oligonucleotide
aggcugcaugccaggucac

SEQ ID NO: 3019722 - RNA, 19 nt, Artificial Sequence
  Description of Artificial Sequence: Synthetic oligonucleotide
gcaauggggcccgagaccu

SEQ ID NO: 3019723 - RNA, 19 nt, Artificial Sequence
  Description of Artificial Sequence: Synthetic oligonucleotide
cucuacuccggcacucagu

SEQ ID NO: 3019724 - RNA, 19 nt, Artificial Sequence
  Description of Artificial Sequence: Synthetic oligonucleotide
gcugcaugccaggucacuc

SEQ ID NO: 3019725 - RNA, 19 nt, Artificial Sequence
  Description of Artificial Sequence: Synthetic oligonucleotide
uccgcgcgaucgagcucag

SEQ ID NO: 3019726 - RNA, 19 nt, Artificial Sequence
  Description of Artificial Sequence: Synthetic oligonucleotide
gcgguggcagcagcgaccc

SEQ ID NO: 3019727 - RNA, 19 nt, Artificial Sequence
  Description of Artificial Sequence: Synthetic oligonucleotide
ggcgaaggauccgcgcgag

SEQ ID NO: 3019728 - RNA, 19 nt, Artificial Sequence
  Description of Artificial Sequence: Synthetic oligonucleotide
ggcgaggccccacgcgcgg

SEQ ID NO: 3019729 - RNA, 19 nt, Artificial Sequence
  Description of Artificial Sequence: Synthetic oligonucleotide
gcgcgaucgagcucagaca

SEQ ID NO: 3019730 - RNA, 19 nt, Artificial Sequence
  Description of Artificial Sequence: Synthetic oligonucleotide
ccaggucacucacgagggg

SEQ ID NO: 3019731 - RNA, 19 nt, Artificial Sequence
  Description of Artificial Sequence: Synthetic oligonucleotide
ggggcggcgaggccccacg

SEQ ID NO: 3019732 - RNA, 19 nt, Artificial Sequence
  Description of Artificial Sequence: Synthetic oligonucleotide
cugacuccccgccacucua

SEQ ID NO: 3019733 - RNA, 19 nt, Artificial Sequence
  Description of Artificial Sequence: Synthetic oligonucleotide
gcaugccaggucacucacg

SEQ ID NO: 3019734 - RNA, 19 nt, Artificial Sequence
  Description of Artificial Sequence: Synthetic oligonucleotide
cguuuguaggcugcaugcc

SEQ ID NO: 3019735 - RNA, 19 nt, Artificial Sequence
  Description of Artificial Sequence: Synthetic oligonucleotide
cgcaauggggcccgagacc

SEQ ID NO: 3019736 - RNA, 19 nt, Artificial Sequence
  Description of Artificial Sequence: Synthetic oligonucleotide
cgagaccuaggcuccgccc

SEQ ID NO: 3019737 - RNA, 19 nt, Artificial Sequence
  Description of Artificial Sequence: Synthetic oligonucleotide
cccgccacucuacuccggc

SEQ ID NO: 3019738 - RNA, 19 nt, Artificial Sequence
  Description of Artificial Sequence: Synthetic oligonucleotide
ggucacucacgaggggcgc

SEQ ID NO: 3019739 - RNA, 19 nt, Artificial Sequence
  Description of Artificial Sequence: Synthetic oligonucleotide
cacucuacuccggcacuca

SEQ ID NO: 3019740 - RNA, 19 nt, Artificial Sequence
  Description of Artificial Sequence: Synthetic oligonucleotide
ggcccgagaccuaggcucc

SEQ ID NO: 3019741 - RNA, 19 nt, Artificial Sequence
  Description of Artificial Sequence: Synthetic oligonucleotide
acuccggcacucagugccu

SEQ ID NO: 3019742 - RNA, 19 nt, Artificial Sequence
  Description of Artificial Sequence: Synthetic oligonucleotide
gacuccccgccacucuacu

SEQ ID NO: 3019743 - RNA, 19 nt, Artificial Sequence
  Description of Artificial Sequence: Synthetic oligonucleotide
gucuucgccucuguccucu

SEQ ID NO: 3019744 - RNA, 19 nt, Artificial Sequence
  Description of Artificial Sequence: Synthetic oligonucleotide
gggcgaaggauccgcgcga

SEQ ID NO: 3019745 - RNA, 19 nt, Artificial Sequence
  Description of Artificial Sequence: Synthetic oligonucleotide
gaggccccacgcgcgggcc

SEQ ID NO: 3019746 - RNA, 19 nt, Artificial Sequence
  Description of Artificial Sequence: Synthetic oligonucleotide
acgcgcgggccguggccgg

SEQ ID NO: 3019747 - RNA, 19 nt, Artificial Sequence
  Description of Artificial Sequence: Synthetic oligonucleotide
cgauuggcugacuccccgc

SEQ ID NO: 3019748 - RNA, 19 nt, Artificial Sequence
  Description of Artificial Sequence: Synthetic oligonucleotide
cgccgauuggcugacuccc

SEQ ID NO: 3019749 - RNA, 19 nt, Artificial Sequence
  Description of Artificial Sequence: Synthetic oligonucleotide
ccgagaccuaggcuccgcc

SEQ ID NO: 3019750 - RNA, 19 nt, Artificial Sequence
  Description of Artificial Sequence: Synthetic oligonucleotide
cagccgccucccauagcuc

SEQ ID NO: 3019751 - RNA, 19 nt, Artificial Sequence
  Description of Artificial Sequence: Synthetic oligonucleotide
ccuugcggaggagccaggc

SEQ ID NO: 3019752 - RNA, 19 nt, Artificial Sequence
  Description of Artificial Sequence: Synthetic oligonucleotide
ggggccgcugcgguggcag

SEQ ID NO: 3019753 - RNA, 19 nt, Artificial Sequence
  Description of Artificial Sequence: Synthetic oligonucleotide
cgagcccaccaccagccgc

SEQ ID NO: 3019754 - RNA, 19 nt, Artificial Sequence
  Description of Artificial Sequence: Synthetic oligonucleotide
ccccacgggccguuuguag

SEQ ID NO: 3019755 - RNA, 19 nt, Artificial Sequence
  Description of Artificial Sequence: Synthetic oligonucleotide
cgccacucuacuccggcac

SEQ ID NO: 3019756 - RNA, 19 nt, Artificial Sequence
  Description of Artificial Sequence: Synthetic oligonucleotide
ccagccgccucccauagcu

SEQ ID NO: 3019757 - RNA, 19 nt, Artificial Sequence
  Description of Artificial Sequence: Synthetic oligonucleotide
gcgccucgccgauuggcug

SEQ ID NO: 3019758 - RNA, 19 nt, Artificial Sequence
  Description of Artificial Sequence: Synthetic oligonucleotide
ccccggaagcgcaggcggg

SEQ ID NO: 3019759 - RNA, 19 nt, Artificial Sequence
  Description of Artificial Sequence: Synthetic oligonucleotide
gcgaucgagcucagacacc

SEQ ID NO: 3019760 - RNA, 19 nt, Artificial Sequence
  Description of Artificial Sequence: Synthetic oligonucleotide
cccgcugcggggccgcugc

SEQ ID NO: 3019761 - RNA, 19 nt, Artificial Sequence
  Description of Artificial Sequence: Synthetic oligonucleotide
gcgaaggauccgcgcgagc

SEQ ID NO: 3019762 - RNA, 19 nt, Artificial Sequence
  Description of Artificial Sequence: Synthetic oligonucleotide
cugcggggccgcugcggug

SEQ ID NO: 3019763 - RNA, 19 nt, Artificial Sequence
  Description of Artificial Sequence: Synthetic oligonucleotide
cgggccguuuguaggcugc

SEQ ID NO: 3019764 - RNA, 19 nt, Artificial Sequence
  Description of Artificial Sequence: Synthetic oligonucleotide
gggccaggcgcgcgacccg

SEQ ID NO: 3019765 - RNA, 19 nt, Artificial Sequence
  Description of Artificial Sequence: Synthetic oligonucleotide
caggcguccgcgcgaucga

SEQ ID NO: 3019766 - RNA, 19 nt, Artificial Sequence
  Description of Artificial Sequence: Synthetic oligonucleotide
gccgauuggcugacucccc

SEQ ID NO: 3019767 - RNA, 19 nt, Artificial Sequence
  Description of Artificial Sequence: Synthetic oligonucleotide
cgcugcgguggcagcagcg

SEQ ID NO: 3019768 - RNA, 19 nt, Artificial Sequence
  Description of Artificial Sequence: Synthetic oligonucleotide
gcugcgguggcagcagcga

SEQ ID NO: 3019769 - RNA, 19 nt, Artificial Sequence
  Description of Artificial Sequence: Synthetic oligonucleotide
gggcgccucgccgauuggc

SEQ ID NO: 3019770 - RNA, 19 nt, Artificial Sequence
  Description of Artificial Sequence: Synthetic oligonucleotide
cggcacucagugccuauug

SEQ ID NO: 3019771 - RNA, 19 nt, Artificial Sequence
  Description of Artificial Sequence: Synthetic oligonucleotide
ggcguccgcgcgaucgagc

SEQ ID NO: 3019772 - RNA, 19 nt, Artificial Sequence
  Description of Artificial Sequence: Synthetic oligonucleotide
agccaggcguccgcgcgau

SEQ ID NO: 3019773 - RNA, 19 nt, Artificial Sequence
  Description of Artificial Sequence: Synthetic oligonucleotide
gccggugucuucgccucug

SEQ ID NO: 3019774 - RNA, 19 nt, Artificial Sequence
  Description of Artificial Sequence: Synthetic oligonucleotide
ccacucuacuccggcacuc

SEQ ID NO: 3019775 - RNA, 19 nt, Artificial Sequence
  Description of Artificial Sequence: Synthetic oligonucleotide
cccggaagcgcaggcgggc

SEQ ID NO: 3019776 - RNA, 19 nt, Artificial Sequence
  Description of Artificial Sequence: Synthetic oligonucleotide
ccaggcgcgcgacccgagc

SEQ ID NO: 3019777 - RNA, 19 nt, Artificial Sequence
  Description of Artificial Sequence: Synthetic oligonucleotide
gccgcugcgguggcagcag

SEQ ID NO: 3019778 - RNA, 19 nt, Artificial Sequence
  Description of Artificial Sequence: Synthetic oligonucleotide
gucacucugccggugucuu

SEQ ID NO: 3019779 - RNA, 19 nt, Artificial Sequence
  Description of Artificial Sequence: Synthetic oligonucleotide
ggcugacuccccgccacuc

SEQ ID NO: 3019780 - RNA, 19 nt, Artificial Sequence
  Description of Artificial Sequence: Synthetic oligonucleotide
gcguccgcgcgaucgagcu

SEQ ID NO: 3019781 - RNA, 19 nt, Artificial Sequence
  Description of Artificial Sequence: Synthetic oligonucleotide
gcucgcaauggggcccgag

SEQ ID NO: 3019782 - RNA, 19 nt, Artificial Sequence
  Description of Artificial Sequence: Synthetic oligonucleotide
cuucgccucuguccucugu

SEQ ID NO: 3019783 - RNA, 19 nt, Artificial Sequence
  Description of Artificial Sequence: Synthetic oligonucleotide
ggggcgccucgccgauugg

SEQ ID NO: 3019784 - RNA, 19 nt, Artificial Sequence
  Description of Artificial Sequence: Synthetic oligonucleotide
gcugacuccccgccacucu

SEQ ID NO: 3019785 - RNA, 19 nt, Artificial Sequence
  Description of Artificial Sequence: Synthetic oligonucleotide
cacucacgaggggcgccuc

SEQ ID NO: 3019786 - RNA, 19 nt, Artificial Sequence
  Description of Artificial Sequence: Synthetic oligonucleotide
gccgccucccauagcucgc

SEQ ID NO: 3019787 - RNA, 19 nt, Artificial Sequence
  Description of Artificial Sequence: Synthetic oligonucleotide
ccacgcgcgggccguggcc

SEQ ID NO: 3019788 - RNA, 19 nt, Artificial Sequence
  Description of Artificial Sequence: Synthetic oligonucleotide
gcggaggagccaggcgucc

SEQ ID NO: 3019789 - RNA, 19 nt, Artificial Sequence
  Description of Artificial Sequence: Synthetic oligonucleotide
gccacucuacuccggcacu

SEQ ID NO: 3019790 - RNA, 19 nt, Artificial Sequence
  Description of Artificial Sequence: Synthetic oligonucleotide
agcccaccaccagccgccu

SEQ ID NO: 3019791 - RNA, 19 nt, Artificial Sequence
  Description of Artificial Sequence: Synthetic oligonucleotide
caauggggcccgagaccua

SEQ ID NO: 3019792 - RNA, 19 nt, Artificial Sequence
  Description of Artificial Sequence: Synthetic oligonucleotide
ccggaagcgcaggcgggcc

SEQ ID NO: 3019793 - RNA, 19 nt, Artificial Sequence
  Description of Artificial Sequence: Synthetic oligonucleotide
ggucacucugccggugucu

SEQ ID NO: 3019794 - RNA, 19 nt, Artificial Sequence
  Description of Artificial Sequence: Synthetic oligonucleotide
cccgagaccuaggcuccgc

SEQ ID NO: 3019795 - RNA, 19 nt, Artificial Sequence
  Description of Artificial Sequence: Synthetic oligonucleotide
gggcggcgaggccccacgc

SEQ ID NO: 3019796 - RNA, 19 nt, Artificial Sequence
  Description of Artificial Sequence: Synthetic oligonucleotide
gcccgagaccuaggcuccg

SEQ ID NO: 3019797 - RNA, 19 nt, Artificial Sequence
  Description of Artificial Sequence: Synthetic oligonucleotide
cggcgaggccccacgcgcg

SEQ ID NO: 3019798 - RNA, 19 nt, Artificial Sequence
  Description of Artificial Sequence: Synthetic oligonucleotide
gccuugcggaggagccagg

SEQ ID NO: 3019799 - RNA, 19 nt, Artificial Sequence
  Description of Artificial Sequence: Synthetic oligonucleotide
ccccgccacucuacuccgg

SEQ ID NO: 3019800 - RNA, 19 nt, Artificial Sequence
  Description of Artificial Sequence: Synthetic oligonucleotide
cgggccaggcgcgcgaccc

SEQ ID NO: 3019801 - RNA, 19 nt, Artificial Sequence
  Description of Artificial Sequence: Synthetic oligonucleotide
cgacccgagcccaccacca

SEQ ID NO: 3019802 - RNA, 19 nt, Artificial Sequence
  Description of Artificial Sequence: Synthetic oligonucleotide
gcgaggccccacgcgcggg

SEQ ID NO: 3019803 - RNA, 19 nt, Artificial Sequence
  Description of Artificial Sequence: Synthetic oligonucleotide
ggggcccgagaccuaggcu

SEQ ID NO: 3019804 - RNA, 19 nt, Artificial Sequence
  Description of Artificial Sequence: Synthetic oligonucleotide
gcugcggggccgcugcggu

SEQ ID NO: 3019805 - RNA, 19 nt, Artificial Sequence
  Description of Artificial Sequence: Synthetic oligonucleotide
ccaccagccgccucccaua

SEQ ID NO: 3019806 - RNA, 19 nt, Artificial Sequence
  Description of Artificial Sequence: Synthetic oligonucleotide
cggaggagccaggcguccg

SEQ ID NO: 3019807 - RNA, 19 nt, Artificial Sequence
  Description of Artificial Sequence: Synthetic oligonucleotide
ggccgcugcgguggcagca

SEQ ID NO: 3019808 - RNA, 19 nt, Artificial Sequence
  Description of Artificial Sequence: Synthetic oligonucleotide
gggccguuuguaggcugca

SEQ ID NO: 3019809 - RNA, 19 nt, Artificial Sequence
  Description of Artificial Sequence: Synthetic oligonucleotide
ggcgccucgccgauuggcu

SEQ ID NO: 3019810 - RNA, 19 nt, Artificial Sequence
  Description of Artificial Sequence: Synthetic oligonucleotide
gggccgcugcgguggcagc

SEQ ID NO: 3019811 - RNA, 19 nt, Artificial Sequence
  Description of Artificial Sequence: Synthetic oligonucleotide
ggcgcgcgacccgagccca

SEQ ID NO: 3019812 - RNA, 19 nt, Artificial Sequence
  Description of Artificial Sequence: Synthetic oligonucleotide
cccacgcgcgggccguggc

SEQ ID NO: 3019813 - RNA, 19 nt, Artificial Sequence
  Description of Artificial Sequence: Synthetic oligonucleotide
cgaggccccacgcgcgggc

SEQ ID NO: 3019814 - RNA, 19 nt, Artificial Sequence
  Description of Artificial Sequence: Synthetic oligonucleotide
gccucgccgauuggcugac

SEQ ID NO: 3019815 - RNA, 19 nt, Artificial Sequence
  Description of Artificial Sequence: Synthetic oligonucleotide
ccgccacucuacuccggca

SEQ ID NO: 3019816 - RNA, 19 nt, Artificial Sequence
  Description of Artificial Sequence: Synthetic oligonucleotide
ccgcugcgguggcagcagc

SEQ ID NO: 3019817 - RNA, 19 nt, Artificial Sequence
  Description of Artificial Sequence: Synthetic oligonucleotide
cgccucgccgauuggcuga

SEQ ID NO: 3019818 - RNA, 19 nt, Artificial Sequence
  Description of Artificial Sequence: Synthetic oligonucleotide
gccucccauagcucgcaau

SEQ ID NO: 3019819 - RNA, 19 nt, Artificial Sequence
  Description of Artificial Sequence: Synthetic oligonucleotide
ggccaggcgcgcgacccga

SEQ ID NO: 3019820 - RNA, 19 nt, Artificial Sequence
  Description of Artificial Sequence: Synthetic oligonucleotide
ggcugcaugccaggucacu

SEQ ID NO: 3019821 - RNA, 19 nt, Artificial Sequence
  Description of Artificial Sequence: Synthetic oligonucleotide
gcgcgacccgagcccacca

SEQ ID NO: 3019822 - RNA, 19 nt, Artificial Sequence
  Description of Artificial Sequence: Synthetic oligonucleotide
caccaccagccgccuccca

SEQ ID NO: 3019823 - RNA, 19 nt, Artificial Sequence
  Description of Artificial Sequence: Synthetic oligonucleotide
cacgggccguuuguaggcu

SEQ ID NO: 3019824 - RNA, 19 nt, Artificial Sequence
  Description of Artificial Sequence: Synthetic oligonucleotide
cuccggcacucagugccua

SEQ ID NO: 3019825 - RNA, 19 nt, Artificial Sequence
  Description of Artificial Sequence: Synthetic oligonucleotide
agcucgcaauggggcccga

SEQ ID NO: 3019826 - RNA, 19 nt, Artificial Sequence
  Description of Artificial Sequence: Synthetic oligonucleotide
gcgggccaggcgcgcgacc

SEQ ID NO: 3019827 - RNA, 19 nt, Artificial Sequence
  Description of Artificial Sequence: Synthetic oligonucleotide
cucuguccucugugccggu

SEQ ID NO: 3019828 - RNA, 19 nt, Artificial Sequence
  Description of Artificial Sequence: Synthetic oligonucleotide
gccaggcgcgcgacccgag

SEQ ID NO: 3019829 - RNA, 19 nt, Artificial Sequence
  Description of Artificial Sequence: Synthetic oligonucleotide
cgcgacccgagcccaccac

SEQ ID NO: 3019830 - RNA, 19 nt, Artificial Sequence
  Description of Artificial Sequence: Synthetic oligonucleotide
cgcugcggggccgcugcgg

SEQ ID NO: 3019831 - RNA, 19 nt, Artificial Sequence
  Description of Artificial Sequence: Synthetic oligonucleotide
cgcgcgacccgagcccacc

SEQ ID NO: 3019832 - RNA, 19 nt, Artificial Sequence
  Description of Artificial Sequence: Synthetic oligonucleotide
gcggggccgcugcgguggc

SEQ ID NO: 3019833 - RNA, 19 nt, Artificial Sequence
  Description of Artificial Sequence: Synthetic oligonucleotide
ccccacgcgcgggccgugg

SEQ ID NO: 3019834 - RNA, 19 nt, Artificial Sequence
  Description of Artificial Sequence: Synthetic oligonucleotide
ccgcugcggggccgcugcg

SEQ ID NO: 3019835 - RNA, 19 nt, Artificial Sequence
  Description of Artificial Sequence: Synthetic oligonucleotide
gcccaccaccagccgccuc

SEQ ID NO: 3019836 - RNA, 19 nt, Artificial Sequence
  Description of Artificial Sequence: Synthetic oligonucleotide
cggaagcgcaggcgggcca

SEQ ID NO: 3019837 - RNA, 19 nt, Artificial Sequence
  Description of Artificial Sequence: Synthetic oligonucleotide
cgugugccuugcggaggag

SEQ ID NO: 3019838 - RNA, 19 nt, Artificial Sequence
  Description of Artificial Sequence: Synthetic oligonucleotide
ggccguuuguaggcugcau

SEQ ID NO: 3019839 - RNA, 19 nt, Artificial Sequence
  Description of Artificial Sequence: Synthetic oligonucleotide
cguccgcgcgaucgagcuc

SEQ ID NO: 3019840 - RNA, 19 nt, Artificial Sequence
  Description of Artificial Sequence: Synthetic oligonucleotide
ccgccucccauagcucgca

SEQ ID NO: 3019841 - RNA, 19 nt, Artificial Sequence
  Description of Artificial Sequence: Synthetic oligonucleotide
gccaggcguccgcgcgauc

SEQ ID NO: 3019842 - RNA, 19 nt, Artificial Sequence
  Description of Artificial Sequence: Synthetic oligonucleotide
ccggugucuucgccucugu

SEQ ID NO: 3019843 - RNA, 19 nt, Artificial Sequence
  Description of Artificial Sequence: Synthetic oligonucleotide
gaggggcgccucgccgauu

SEQ ID NO: 3019844 - RNA, 19 nt, Artificial Sequence
  Description of Artificial Sequence: Synthetic oligonucleotide
cgguggcagcagcgacccc

SEQ ID NO: 3019845 - RNA, 19 nt, Artificial Sequence
  Description of Artificial Sequence: Synthetic oligonucleotide
ggccccacgcgcgggccgu

SEQ ID NO: 3019846 - RNA, 19 nt, Artificial Sequence
  Description of Artificial Sequence: Synthetic oligonucleotide
gcgcgcgacccgagcccac

SEQ ID NO: 3019847 - RNA, 19 nt, Artificial Sequence
  Description of Artificial Sequence: Synthetic oligonucleotide
ccccgcugcggggccgcug

SEQ ID NO: 3019848 - RNA, 19 nt, Artificial Sequence
  Description of Artificial Sequence: Synthetic oligonucleotide
gccccacgcgcgggccgug

SEQ ID NO: 3019849 - RNA, 19 nt, Artificial Sequence
  Description of Artificial Sequence: Synthetic oligonucleotide
ccggcacucagugccuauu

SEQ ID NO: 3019850 - RNA, 19 nt, Artificial Sequence
  Description of Artificial Sequence: Synthetic oligonucleotide
cgccucccauagcucgcaa

SEQ ID NO: 3019851 - RNA, 19 nt, Artificial Sequence
  Description of Artificial Sequence: Synthetic oligonucleotide
ccgcgcgaucgagcucaga

SEQ ID NO: 3019852 - RNA, 19 nt, Artificial Sequence
  Description of Artificial Sequence: Synthetic oligonucleotide
cgaggggcgccucgccgau

SEQ ID NO: 3019853 - RNA, 19 nt, Artificial Sequence
  Description of Artificial Sequence: Synthetic oligonucleotide
ccucgccgauuggcugacu

SEQ ID NO: 3019854 - RNA, 19 nt, Artificial Sequence
  Description of Artificial Sequence: Synthetic oligonucleotide
cggggccgcugcgguggca

SEQ ID NO: 3019855 - RNA, 19 nt, Artificial Sequence
  Description of Artificial Sequence: Synthetic oligonucleotide
aauaguaaaauacacggag

SEQ ID NO: 3019856 - RNA, 19 nt, Artificial Sequence
  Description of Artificial Sequence: Synthetic oligonucleotide
caaauaguaaaauacacgg

SEQ ID NO: 3019857 - RNA, 19 nt, Artificial Sequence
  Description of Artificial Sequence: Synthetic oligonucleotide
uuaaauauauaaauaaccu

SEQ ID NO: 3019858 - RNA, 19 nt, Artificial Sequence
  Description of Artificial Sequence: Synthetic oligonucleotide
auauaaauaaccucaaaag

SEQ ID NO: 3019859 - RNA, 19 nt, Artificial Sequence
  Description of Artificial Sequence: Synthetic oligonucleotide
aaauauauaaauaaccuca

SEQ ID NO: 3019860 - RNA, 19 nt, Artificial Sequence
  Description of Artificial Sequence: Synthetic oligonucleotide
aauuaaauauauaaauaac

SEQ ID NO: 3019861 - RNA, 19 nt, Artificial Sequence
  Description of Artificial Sequence: Synthetic oligonucleotide
aaagaaauguguucauccc

SEQ ID NO: 3019862 - RNA, 19 nt, Artificial Sequence
  Description of Artificial Sequence: Synthetic oligonucleotide
uaauuaaauauauaaauaa

SEQ ID NO: 3019863 - RNA, 19 nt, Artificial Sequence
  Description of Artificial Sequence: Synthetic oligonucleotide
aauguguucauccccaauc

SEQ ID NO: 3019864 - RNA, 19 nt, Artificial Sequence
  Description of Artificial Sequence: Synthetic oligonucleotide
uauaaauaaccucaaaagu

SEQ ID NO: 3019865 - RNA, 19 nt, Artificial Sequence
  Description of Artificial Sequence: Synthetic oligonucleotide
uugauugacaucaauaaga

SEQ ID NO: 3019866 - RNA, 19 nt, Artificial Sequence
  Description of Artificial Sequence: Synthetic oligonucleotide
aauaaccucaaaaguaucc

SEQ ID NO: 3019867 - RNA, 19 nt, Artificial Sequence
  Description of Artificial Sequence: Synthetic oligonucleotide
uguuauuucacugucauca

SEQ ID NO: 3019868 - RNA, 19 nt, Artificial Sequence
  Description of Artificial Sequence: Synthetic oligonucleotide
acaucauucuuauaauugc

SEQ ID NO: 3019869 - RNA, 19 nt, Artificial Sequence
  Description of Artificial Sequence: Synthetic oligonucleotide
aacacuaagcauuucaagu

SEQ ID NO: 3019870 - RNA, 19 nt, Artificial Sequence
  Description of Artificial Sequence: Synthetic oligonucleotide
uuauaauugcuguuguugg

SEQ ID NO: 3019871 - RNA, 19 nt, Artificial Sequence
  Description of Artificial Sequence: Synthetic oligonucleotide
aaguaucccauucaaauug

SEQ ID NO: 3019872 - RNA, 19 nt, Artificial Sequence
  Description of Artificial Sequence: Synthetic oligonucleotide
uuuucuuaucaucacauca

SEQ ID NO: 3019873 - RNA, 19 nt, Artificial Sequence
  Description of Artificial Sequence: Synthetic oligonucleotide
aaucacaauuucaaguucc

SEQ ID NO: 3019874 - RNA, 19 nt, Artificial Sequence
  Description of Artificial Sequence: Synthetic oligonucleotide
ugugguaaaagaaaugugu

SEQ ID NO: 3019875 - RNA, 19 nt, Artificial Sequence
  Description of Artificial Sequence: Synthetic oligonucleotide
ugaaaugaaguccaaugag

SEQ ID NO: 3019876 - RNA, 19 nt, Artificial Sequence
  Description of Artificial Sequence: Synthetic oligonucleotide
aaaugaaguccaaugagac

SEQ ID NO: 3019877 - RNA, 19 nt, Artificial Sequence
  Description of Artificial Sequence: Synthetic oligonucleotide
aaugagacugaacacuaag

SEQ ID NO: 3019878 - RNA, 19 nt, Artificial Sequence
  Description of Artificial Sequence: Synthetic oligonucleotide
auucaaauuggcuuaaucu

SEQ ID NO: 3019879 - RNA, 19 nt, Artificial Sequence
  Description of Artificial Sequence: Synthetic oligonucleotide
ugauugacaucaauaagag

SEQ ID NO: 3019880 - RNA, 19 nt, Artificial Sequence
  Description of Artificial Sequence: Synthetic oligonucleotide
uaguaaaauacacggaggc

SEQ ID NO: 3019881 - RNA, 19 nt, Artificial Sequence
  Description of Artificial Sequence: Synthetic oligonucleotide
auuggcuuaaucuugaaau

SEQ ID NO: 3019882 - RNA, 19 nt, Artificial Sequence
  Description of Artificial Sequence: Synthetic oligonucleotide
aauuucaaguuccugucug

SEQ ID NO: 3019883 - RNA, 19 nt, Artificial Sequence
  Description of Artificial Sequence: Synthetic oligonucleotide
uaaucuugaaaugaagucc

SEQ ID NO: 3019884 - RNA, 19 nt, Artificial Sequence
  Description of Artificial Sequence: Synthetic oligonucleotide
cuugaaaugaaguccaaug

SEQ ID NO: 3019885 - RNA, 19 nt, Artificial Sequence
  Description of Artificial Sequence: Synthetic oligonucleotide
ugagacugaacacuaagca

SEQ ID NO: 3019886 - RNA, 19 nt, Artificial Sequence
  Description of Artificial Sequence: Synthetic oligonucleotide
uuugaugugguaaaagaaa

SEQ ID NO: 3019887 - RNA, 19 nt, Artificial Sequence
  Description of Artificial Sequence: Synthetic oligonucleotide
ucaaauuggcuuaaucuug

SEQ ID NO: 3019888 - RNA, 19 nt, Artificial Sequence
  Description of Artificial Sequence: Synthetic oligonucleotide
uuaaucuugaaaugaaguc

SEQ ID NO: 3019889 - RNA, 19 nt, Artificial Sequence
  Description of Artificial Sequence: Synthetic oligonucleotide
acacuaagcauuucaaguc

SEQ ID NO: 3019890 - RNA, 19 nt, Artificial Sequence
  Description of Artificial Sequence: Synthetic oligonucleotide
uacacucuugugaacauag

SEQ ID NO: 3019891 - RNA, 19 nt, Artificial Sequence
  Description of Artificial Sequence: Synthetic oligonucleotide
auaaccucaaaaguauccc

SEQ ID NO: 3019892 - RNA, 19 nt, Artificial Sequence
  Description of Artificial Sequence: Synthetic oligonucleotide
ucuuccauuacacucuugu

SEQ ID NO: 3019893 - RNA, 19 nt, Artificial Sequence
  Description of Artificial Sequence: Synthetic oligonucleotide
gauugauugacaucaauaa

SEQ ID NO: 3019894 - RNA, 19 nt, Artificial Sequence
  Description of Artificial Sequence: Synthetic oligonucleotide
uuuugaugugguaaaagaa

SEQ ID NO: 3019895 - RNA, 19 nt, Artificial Sequence
  Description of Artificial Sequence: Synthetic oligonucleotide
uuuguuauuucacugucau

SEQ ID NO: 3019896 - RNA, 19 nt, Artificial Sequence
  Description of Artificial Sequence: Synthetic oligonucleotide
auugauugacaucaauaag

SEQ ID NO: 3019897 - RNA, 19 nt, Artificial Sequence
  Description of Artificial Sequence: Synthetic oligonucleotide
acucuugugaacauaggcc

SEQ ID NO: 3019898 - RNA, 19 nt, Artificial Sequence
  Description of Artificial Sequence: Synthetic oligonucleotide
augaaguccaaugagacug

SEQ ID NO: 3019899 - RNA, 19 nt, Artificial Sequence
  Description of Artificial Sequence: Synthetic oligonucleotide
cuuauaauugcuguuguug

SEQ ID NO: 3019900 - RNA, 19 nt, Artificial Sequence
  Description of Artificial Sequence: Synthetic oligonucleotide
aguaaaauacacggaggcc

SEQ ID NO: 3019901 - RNA, 19 nt, Artificial Sequence
  Description of Artificial Sequence: Synthetic oligonucleotide
agcauuucaaguccugcac

SEQ ID NO: 3019902 - RNA, 19 nt, Artificial Sequence
  Description of Artificial Sequence: Synthetic oligonucleotide
accaaauaguaaaauacac

SEQ ID NO: 3019903 - RNA, 19 nt, Artificial Sequence
  Description of Artificial Sequence: Synthetic oligonucleotide
ucuuuucuuaucaucacau

SEQ ID NO: 3019904 - RNA, 19 nt, Artificial Sequence
  Description of Artificial Sequence: Synthetic oligonucleotide
auuucaaguuccugucugc

SEQ ID NO: 3019905 - RNA, 19 nt, Artificial Sequence
  Description of Artificial Sequence: Synthetic oligonucleotide
uucaguucuuccauuacac

SEQ ID NO: 3019906 - RNA, 19 nt, Artificial Sequence
  Description of Artificial Sequence: Synthetic oligonucleotide
uucaaauuggcuuaaucuu

SEQ ID NO: 3019907 - RNA, 19 nt, Artificial Sequence
  Description of Artificial Sequence: Synthetic oligonucleotide
ucuuuuguuauuucacugu

SEQ ID NO: 3019908 - RNA, 19 nt, Artificial Sequence
  Description of Artificial Sequence: Synthetic oligonucleotide
aaucuugaaaugaagucca

SEQ ID NO: 3019909 - RNA, 19 nt, Artificial Sequence
  Description of Artificial Sequence: Synthetic oligonucleotide
aaugaaguccaaugagacu

SEQ ID NO: 3019910 - RNA, 19 nt, Artificial Sequence
  Description of Artificial Sequence: Synthetic oligonucleotide
aaagcaucguccucuuuug

SEQ ID NO: 3019911 - RNA, 19 nt, Artificial Sequence
  Description of Artificial Sequence: Synthetic oligonucleotide
gaacacuaagcauuucaag

SEQ ID NO: 3019912 - RNA, 19 nt, Artificial Sequence
  Description of Artificial Sequence: Synthetic oligonucleotide
ucugccaacccugucaggg

SEQ ID NO: 3019913 - RNA, 19 nt, Artificial Sequence
  Description of Artificial Sequence: Synthetic oligonucleotide
cuuggauugauugacauca

SEQ ID NO: 3019914 - RNA, 19 nt, Artificial Sequence
  Description of Artificial Sequence: Synthetic oligonucleotide
uugaugugguaaaagaaau

SEQ ID NO: 3019915 - RNA, 19 nt, Artificial Sequence
  Description of Artificial Sequence: Synthetic oligonucleotide
ucaauaagagaaccuauuu

SEQ ID NO: 3019916 - RNA, 19 nt, Artificial Sequence
  Description of Artificial Sequence: Synthetic oligonucleotide
auucuuauaauugcuguug

SEQ ID NO: 3019917 - RNA, 19 nt, Artificial Sequence
  Description of Artificial Sequence: Synthetic oligonucleotide
aaaguaucccauucaaauu

SEQ ID NO: 3019918 - RNA, 19 nt, Artificial Sequence
  Description of Artificial Sequence: Synthetic oligonucleotide
uauaauugcuguuguuggc

SEQ ID NO: 3019919 - RNA, 19 nt, Artificial Sequence
  Description of Artificial Sequence: Synthetic oligonucleotide
ccaaauaguaaaauacacg

SEQ ID NO: 3019920 - RNA, 19 nt, Artificial Sequence
  Description of Artificial Sequence: Synthetic oligonucleotide
ugaugugguaaaagaaaug

SEQ ID NO: 3019921 - RNA, 19 nt, Artificial Sequence
  Description of Artificial Sequence: Synthetic oligonucleotide
uuuuguuauuucacuguca

SEQ ID NO: 3019922 - RNA, 19 nt, Artificial Sequence
  Description of Artificial Sequence: Synthetic oligonucleotide
auaguaaaauacacggagg

SEQ ID NO: 3019923 - RNA, 19 nt, Artificial Sequence
  Description of Artificial Sequence: Synthetic oligonucleotide
caucacaucauucuuauaa

SEQ ID NO: 3019924 - RNA, 19 nt, Artificial Sequence
  Description of Artificial Sequence: Synthetic oligonucleotide
aucaauaauucucuucagu

SEQ ID NO: 3019925 - RNA, 19 nt, Artificial Sequence
  Description of Artificial Sequence: Synthetic oligonucleotide
uccauuacacucuugugaa

SEQ ID NO: 3019926 - RNA, 19 nt, Artificial Sequence
  Description of Artificial Sequence: Synthetic oligonucleotide
aauauauaaauaaccucaa

SEQ ID NO: 3019927 - RNA, 19 nt, Artificial Sequence
  Description of Artificial Sequence: Synthetic oligonucleotide
ugaacacuaagcauuucaa

SEQ ID NO: 3019928 - RNA, 19 nt, Artificial Sequence
  Description of Artificial Sequence: Synthetic oligonucleotide
uacacggaggccuucagga

SEQ ID NO: 3019929 - RNA, 19 nt, Artificial Sequence
  Description of Artificial Sequence: Synthetic oligonucleotide
aagcauuucaaguccugca

SEQ ID NO: 3019930 - RNA, 19 nt, Artificial Sequence
  Description of Artificial Sequence: Synthetic oligonucleotide
aaauaaccucaaaaguauc

SEQ ID NO: 3019931 - RNA, 19 nt, Artificial Sequence
  Description of Artificial Sequence: Synthetic oligonucleotide
uccugcaccaaauaguaaa

SEQ ID NO: 3019932 - RNA, 19 nt, Artificial Sequence
  Description of Artificial Sequence: Synthetic oligonucleotide
uuggcuuaaucuugaaaug

SEQ ID NO: 3019933 - RNA, 19 nt, Artificial Sequence
  Description of Artificial Sequence: Synthetic oligonucleotide
augagacugaacacuaagc

SEQ ID NO: 3019934 - RNA, 19 nt, Artificial Sequence
  Description of Artificial Sequence: Synthetic oligonucleotide
aaauaguaaaauacacgga

SEQ ID NO: 3019935 - RNA, 19 nt, Artificial Sequence
  Description of Artificial Sequence: Synthetic oligonucleotide
ucuuaucaucacaucauuc

SEQ ID NO: 3019936 - RNA, 19 nt, Artificial Sequence
  Description of Artificial Sequence: Synthetic oligonucleotide
cacucuugugaacauaggc

SEQ ID NO: 3019937 - RNA, 19 nt, Artificial Sequence
  Description of Artificial Sequence: Synthetic oligonucleotide
uccucuuuuguuauuucac

SEQ ID NO: 3019938 - RNA, 19 nt, Artificial Sequence
  Description of Artificial Sequence: Synthetic oligonucleotide
gaaaugaaguccaaugaga

SEQ ID NO: 3019939 - RNA, 19 nt, Artificial Sequence
  Description of Artificial Sequence: Synthetic oligonucleotide
uccaaugagacugaacacu

SEQ ID NO: 3019940 - RNA, 19 nt, Artificial Sequence
  Description of Artificial Sequence: Synthetic oligonucleotide
uucuuauaauugcuguugu

SEQ ID NO: 3019941 - RNA, 19 nt, Artificial Sequence
  Description of Artificial Sequence: Synthetic oligonucleotide
uccccaaucacaauuucaa

SEQ ID NO: 3019942 - RNA, 19 nt, Artificial Sequence
  Description of Artificial Sequence: Synthetic oligonucleotide
ucaaguuccugucugccaa

SEQ ID NO: 3019943 - RNA, 19 nt, Artificial Sequence
  Description of Artificial Sequence: Synthetic oligonucleotide
ugguaaaagaaauguguuc

SEQ ID NO: 3019944 - RNA, 19 nt, Artificial Sequence
  Description of Artificial Sequence: Synthetic oligonucleotide
aggauccuuggauugauug

SEQ ID NO: 3019945 - RNA, 19 nt, Artificial Sequence
  Description of Artificial Sequence: Synthetic oligonucleotide
uaucccauucaaauuggcu

SEQ ID NO: 3019946 - RNA, 19 nt, Artificial Sequence
  Description of Artificial Sequence: Synthetic oligonucleotide
cacuaagcauuucaagucc

SEQ ID NO: 3019947 - RNA, 19 nt, Artificial Sequence
  Description of Artificial Sequence: Synthetic oligonucleotide
cucuuuuguuauuucacug

SEQ ID NO: 3019948 - RNA, 19 nt, Artificial Sequence
  Description of Artificial Sequence: Synthetic oligonucleotide
uaggccucuuuucuuauca

SEQ ID NO: 3019949 - RNA, 19 nt, Artificial Sequence
  Description of Artificial Sequence: Synthetic oligonucleotide
ugaacauaggccucuuuuc

SEQ ID NO: 3019950 - RNA, 19 nt, Artificial Sequence
  Description of Artificial Sequence: Synthetic oligonucleotide
ccuuuaauuaaauauauaa

SEQ ID NO: 3019951 - RNA, 19 nt, Artificial Sequence
  Description of Artificial Sequence: Synthetic oligonucleotide
uucauccccaaucacaauu

SEQ ID NO: 3019952 - RNA, 19 nt, Artificial Sequence
  Description of Artificial Sequence: Synthetic oligonucleotide
gaugugguaaaagaaaugu

SEQ ID NO: 3019953 - RNA, 19 nt, Artificial Sequence
  Description of Artificial Sequence: Synthetic oligonucleotide
ugcaccaaauaguaaaaua

SEQ ID NO: 3019954 - RNA, 19 nt, Artificial Sequence
  Description of Artificial Sequence: Synthetic oligonucleotide
gguaaaagaaauguguuca

SEQ ID NO: 3019955 - RNA, 19 nt, Artificial Sequence
  Description of Artificial Sequence: Synthetic oligonucleotide
cuuuuguuauuucacuguc

SEQ ID NO: 3019956 - RNA, 19 nt, Artificial Sequence
  Description of Artificial Sequence: Synthetic oligonucleotide
caguucuuccauuacacuc

SEQ ID NO: 3019957 - RNA, 19 nt, Artificial Sequence
  Description of Artificial Sequence: Synthetic oligonucleotide
uaucaucacaucauucuua

SEQ ID NO: 3019958 - RNA, 19 nt, Artificial Sequence
  Description of Artificial Sequence: Synthetic oligonucleotide
ugucugccaacccugucag

SEQ ID NO: 3019959 - RNA, 19 nt, Artificial Sequence
  Description of Artificial Sequence: Synthetic oligonucleotide
aucccauucaaauuggcuu

SEQ ID NO: 3019960 - RNA, 19 nt, Artificial Sequence
  Description of Artificial Sequence: Synthetic oligonucleotide
uaaccucaaaaguauccca

SEQ ID NO: 3019961 - RNA, 19 nt, Artificial Sequence
  Description of Artificial Sequence: Synthetic oligonucleotide
cuuaaucuugaaaugaagu

SEQ ID NO: 3019962 - RNA, 19 nt, Artificial Sequence
  Description of Artificial Sequence: Synthetic oligonucleotide
aauacacggaggccuucag

SEQ ID NO: 3019963 - RNA, 19 nt, Artificial Sequence
  Description of Artificial Sequence: Synthetic oligonucleotide
uguuguuggcguuaucuaa

SEQ ID NO: 3019964 - RNA, 19 nt, Artificial Sequence
  Description of Artificial Sequence: Synthetic oligonucleotide
caaguccugcaccaaauag

SEQ ID NO: 3019965 - RNA, 19 nt, Artificial Sequence
  Description of Artificial Sequence: Synthetic oligonucleotide
aaguuccugucugccaacc

SEQ ID NO: 3019966 - RNA, 19 nt, Artificial Sequence
  Description of Artificial Sequence: Synthetic oligonucleotide
gauccuuggauugauugac

SEQ ID NO: 3019967 - RNA, 19 nt, Artificial Sequence
  Description of Artificial Sequence: Synthetic oligonucleotide
cuuaucaucacaucauucu

SEQ ID NO: 3019968 - RNA, 19 nt, Artificial Sequence
  Description of Artificial Sequence: Synthetic oligonucleotide
uggcuuaaucuugaaauga

SEQ ID NO: 3019969 - RNA, 19 nt, Artificial Sequence
  Description of Artificial Sequence: Synthetic oligonucleotide
aucaucacaucauucuuau

SEQ ID NO: 3019970 - RNA, 19 nt, Artificial Sequence
  Description of Artificial Sequence: Synthetic oligonucleotide
uaagcauuucaaguccugc

SEQ ID NO: 3019971 - RNA, 19 nt, Artificial Sequence
  Description of Artificial Sequence: Synthetic oligonucleotide
auauauaaauaaccucaaa

SEQ ID NO: 3019972 - RNA, 19 nt, Artificial Sequence
  Description of Artificial Sequence: Synthetic oligonucleotide
cauucaaauuggcuuaauc

SEQ ID NO: 3019973 - RNA, 19 nt, Artificial Sequence
  Description of Artificial Sequence: Synthetic oligonucleotide
aguuccugucugccaaccc

SEQ ID NO: 3019974 - RNA, 19 nt, Artificial Sequence
  Description of Artificial Sequence: Synthetic oligonucleotide
aaguccugcaccaaauagu

SEQ ID NO: 3019975 - RNA, 19 nt, Artificial Sequence
  Description of Artificial Sequence: Synthetic oligonucleotide
caccaaauaguaaaauaca

SEQ ID NO: 3019976 - RNA, 19 nt, Artificial Sequence
  Description of Artificial Sequence: Synthetic oligonucleotide
uuauuucacugucaucaau

SEQ ID NO: 3019977 - RNA, 19 nt, Artificial Sequence
  Description of Artificial Sequence: Synthetic oligonucleotide
auguguucauccccaauca

SEQ ID NO: 3019978 - RNA, 19 nt, Artificial Sequence
  Description of Artificial Sequence: Synthetic oligonucleotide
guuguuggcguuaucuaag

SEQ ID NO: 3019979 - RNA, 19 nt, Artificial Sequence
  Description of Artificial Sequence: Synthetic oligonucleotide
uuucaaguccugcaccaaa

SEQ ID NO: 3019980 - RNA, 19 nt, Artificial Sequence
  Description of Artificial Sequence: Synthetic oligonucleotide
uuucaaguuccugucugcc

SEQ ID NO: 3019981 - RNA, 19 nt, Artificial Sequence
  Description of Artificial Sequence: Synthetic oligonucleotide
aucacaucauucuuauaau

SEQ ID NO: 3019982 - RNA, 19 nt, Artificial Sequence
  Description of Artificial Sequence: Synthetic oligonucleotide
aucauucuuauaauugcug

SEQ ID NO: 3019983 - RNA, 19 nt, Artificial Sequence
  Description of Artificial Sequence: Synthetic oligonucleotide
auacacggaggccuucagg

SEQ ID NO: 3019984 - RNA, 19 nt, Artificial Sequence
  Description of Artificial Sequence: Synthetic oligonucleotide
gcaccaaauaguaaaauac

SEQ ID NO: 3019985 - RNA, 19 nt, Artificial Sequence
  Description of Artificial Sequence: Synthetic oligonucleotide
cuucaggauccuuggauug

SEQ ID NO: 3019986 - RNA, 19 nt, Artificial Sequence
  Description of Artificial Sequence: Synthetic oligonucleotide
guaaaauacacggaggccu

SEQ ID NO: 3019987 - RNA, 19 nt, Artificial Sequence
  Description of Artificial Sequence: Synthetic oligonucleotide
aguucuuccauuacacucu

SEQ ID NO: 3019988 - RNA, 19 nt, Artificial Sequence
  Description of Artificial Sequence: Synthetic oligonucleotide
aguaucccauucaaauugg

SEQ ID NO: 3019989 - RNA, 19 nt, Artificial Sequence
  Description of Artificial Sequence: Synthetic oligonucleotide
caucaauaauucucuucag

SEQ ID NO: 3019990 - RNA, 19 nt, Artificial Sequence
  Description of Artificial Sequence: Synthetic oligonucleotide
aaaauacacggaggccuuc

SEQ ID NO: 3019991 - RNA, 19 nt, Artificial Sequence
  Description of Artificial Sequence: Synthetic oligonucleotide
cugaacacuaagcauuuca

SEQ ID NO: 3019992 - RNA, 19 nt, Artificial Sequence
  Description of Artificial Sequence: Synthetic oligonucleotide
acaucaauaagagaaccua

SEQ ID NO: 3019993 - RNA, 19 nt, Artificial Sequence
  Description of Artificial Sequence: Synthetic oligonucleotide
aacauaggccucuuuucuu

SEQ ID NO: 3019994 - RNA, 19 nt, Artificial Sequence
  Description of Artificial Sequence: Synthetic oligonucleotide
aaauguguucauccccaau

SEQ ID NO: 3019995 - RNA, 19 nt, Artificial Sequence
  Description of Artificial Sequence: Synthetic oligonucleotide
uaaaauacacggaggccuu

SEQ ID NO: 3019996 - RNA, 19 nt, Artificial Sequence
  Description of Artificial Sequence: Synthetic oligonucleotide
uucaaguccugcaccaaau

SEQ ID NO: 3019997 - RNA, 19 nt, Artificial Sequence
  Description of Artificial Sequence: Synthetic oligonucleotide
ucacaucauucuuauaauu

SEQ ID NO: 3019998 - RNA, 19 nt, Artificial Sequence
  Description of Artificial Sequence: Synthetic oligonucleotide
uucaaguuccugucugcca

SEQ ID NO: 3019999 - RNA, 19 nt, Artificial Sequence
  Description of Artificial Sequence: Synthetic oligonucleotide
ugaaguccaaugagacuga

SEQ ID NO: 3020000 - RNA, 19 nt, Artificial Sequence
  Description of Artificial Sequence: Synthetic oligonucleotide
ucccauucaaauuggcuua

SEQ ID NO: 3020001 - RNA, 19 nt, Artificial Sequence
  Description of Artificial Sequence: Synthetic oligonucleotide
cuuuucuuaucaucacauc

SEQ ID NO: 3020002 - RNA, 19 nt, Artificial Sequence
  Description of Artificial Sequence: Synthetic oligonucleotide
ucaguucuuccauuacacu

SEQ ID NO: 3020003 - RNA, 19 nt, Artificial Sequence
  Description of Artificial Sequence: Synthetic oligonucleotide
uuccugucugccaacccug

SEQ ID NO: 3020004 - RNA, 19 nt, Artificial Sequence
  Description of Artificial Sequence: Synthetic oligonucleotide
caaauuggcuuaaucuuga

SEQ ID NO: 3020005 - RNA, 19 nt, Artificial Sequence
  Description of Artificial Sequence: Synthetic oligonucleotide
cacaauuucaaguuccugu

SEQ ID NO: 3020006 - RNA, 19 nt, Artificial Sequence
  Description of Artificial Sequence: Synthetic oligonucleotide
cauuacacucuugugaaca

SEQ ID NO: 3020007 - RNA, 19 nt, Artificial Sequence
  Description of Artificial Sequence: Synthetic oligonucleotide
aaauacacggaggccuuca

SEQ ID NO: 3020008 - RNA, 19 nt, Artificial Sequence
  Description of Artificial Sequence: Synthetic oligonucleotide
cuaagcauuucaaguccug

SEQ ID NO: 3020009 - RNA, 19 nt, Artificial Sequence
  Description of Artificial Sequence: Synthetic oligonucleotide
cuuccauuacacucuugug

SEQ ID NO: 3020010 - RNA, 19 nt, Artificial Sequence
  Description of Artificial Sequence: Synthetic oligonucleotide
cauuucaaguccugcacca

SEQ ID NO: 3020011 - RNA, 19 nt, Artificial Sequence
  Description of Artificial Sequence: Synthetic oligonucleotide
uggauugauugacaucaau

SEQ ID NO: 3020012 - RNA, 19 nt, Artificial Sequence
  Description of Artificial Sequence: Synthetic oligonucleotide
ucuugugaacauaggccuc

SEQ ID NO: 3020013 - RNA, 19 nt, Artificial Sequence
  Description of Artificial Sequence: Synthetic oligonucleotide
cucaaaaguaucccauuca

SEQ ID NO: 3020014 - RNA, 19 nt, Artificial Sequence
  Description of Artificial Sequence: Synthetic oligonucleotide
uccuuggauugauugacau

SEQ ID NO: 3020015 - RNA, 19 nt, Artificial Sequence
  Description of Artificial Sequence: Synthetic oligonucleotide
ucauccccaaucacaauuu

SEQ ID NO: 3020016 - RNA, 19 nt, Artificial Sequence
  Description of Artificial Sequence: Synthetic oligonucleotide
aaccucaaaaguaucccau

SEQ ID NO: 3020017 - RNA, 19 nt, Artificial Sequence
  Description of Artificial Sequence: Synthetic oligonucleotide
acggaggccuucaggaucc

SEQ ID NO: 3020018 - RNA, 19 nt, Artificial Sequence
  Description of Artificial Sequence: Synthetic oligonucleotide
ucuuauaauugcuguuguu

SEQ ID NO: 3020019 - RNA, 19 nt, Artificial Sequence
  Description of Artificial Sequence: Synthetic oligonucleotide
gaacauaggccucuuuucu

SEQ ID NO: 3020020 - RNA, 19 nt, Artificial Sequence
  Description of Artificial Sequence: Synthetic oligonucleotide
auuacacucuugugaacau

SEQ ID NO: 3020021 - RNA, 19 nt, Artificial Sequence
  Description of Artificial Sequence: Synthetic oligonucleotide
auaggccucuuuucuuauc

SEQ ID NO: 3020022 - RNA, 19 nt, Artificial Sequence
  Description of Artificial Sequence: Synthetic oligonucleotide
ucacaauuucaaguuccug

SEQ ID NO: 3020023 - RNA, 19 nt, Artificial Sequence
  Description of Artificial Sequence: Synthetic oligonucleotide
ucuugaaaugaaguccaau

SEQ ID NO: 3020024 - RNA, 19 nt, Artificial Sequence
  Description of Artificial Sequence: Synthetic oligonucleotide
ucaaguccugcaccaaaua

SEQ ID NO: 3020025 - RNA, 19 nt, Artificial Sequence
  Description of Artificial Sequence: Synthetic oligonucleotide
augugguaaaagaaaugug

SEQ ID NO: 3020026 - RNA, 19 nt, Artificial Sequence
  Description of Artificial Sequence: Synthetic oligonucleotide
cucuugugaacauaggccu

SEQ ID NO: 3020027 - RNA, 19 nt, Artificial Sequence
  Description of Artificial Sequence: Synthetic oligonucleotide
acauaggccucuuuucuua

SEQ ID NO: 3020028 - RNA, 19 nt, Artificial Sequence
  Description of Artificial Sequence: Synthetic oligonucleotide
guccaaugagacugaacac

SEQ ID NO: 3020029 - RNA, 19 nt, Artificial Sequence
  Description of Artificial Sequence: Synthetic oligonucleotide
guggccacaaagcaucguc

SEQ ID NO: 3020030 - RNA, 19 nt, Artificial Sequence
  Description of Artificial Sequence: Synthetic oligonucleotide
aauugcuguuguuggcguu

SEQ ID NO: 3020031 - RNA, 19 nt, Artificial Sequence
  Description of Artificial Sequence: Synthetic oligonucleotide
uuguuauuucacugucauc

SEQ ID NO: 3020032 - RNA, 19 nt, Artificial Sequence
  Description of Artificial Sequence: Synthetic oligonucleotide
aagcaucguccucuuuugu

SEQ ID NO: 3020033 - RNA, 19 nt, Artificial Sequence
  Description of Artificial Sequence: Synthetic oligonucleotide
gcuuaaucuugaaaugaag

SEQ ID NO: 3020034 - RNA, 19 nt, Artificial Sequence
  Description of Artificial Sequence: Synthetic oligonucleotide
guccucuuuuguuauuuca

SEQ ID NO: 3020035 - RNA, 19 nt, Artificial Sequence
  Description of Artificial Sequence: Synthetic oligonucleotide
uucaggauccuuggauuga

SEQ ID NO: 3020036 - RNA, 19 nt, Artificial Sequence
  Description of Artificial Sequence: Synthetic oligonucleotide
guguucauccccaaucaca

SEQ ID NO: 3020037 - RNA, 19 nt, Artificial Sequence
  Description of Artificial Sequence: Synthetic oligonucleotide
acuaagcauuucaaguccu

SEQ ID NO: 3020038 - RNA, 19 nt, Artificial Sequence
  Description of Artificial Sequence: Synthetic oligonucleotide
agcaucguccucuuuuguu

SEQ ID NO: 3020039 - RNA, 19 nt, Artificial Sequence
  Description of Artificial Sequence: Synthetic oligonucleotide
uuggauugauugacaucaa

SEQ ID NO: 3020040 - RNA, 19 nt, Artificial Sequence
  Description of Artificial Sequence: Synthetic oligonucleotide
caucauucuuauaauugcu

SEQ ID NO: 3020041 - RNA, 19 nt, Artificial Sequence
  Description of Artificial Sequence: Synthetic oligonucleotide
aucacaauuucaaguuccu

SEQ ID NO: 3020042 - RNA, 19 nt, Artificial Sequence
  Description of Artificial Sequence: Synthetic oligonucleotide
aguccugcaccaaauagua

SEQ ID NO: 3020043 - RNA, 19 nt, Artificial Sequence
  Description of Artificial Sequence: Synthetic oligonucleotide
cugccaacccugucagggg

SEQ ID NO: 3020044 - RNA, 19 nt, Artificial Sequence
  Description of Artificial Sequence: Synthetic oligonucleotide
cugucugccaacccuguca

SEQ ID NO: 3020045 - RNA, 19 nt, Artificial Sequence
  Description of Artificial Sequence: Synthetic oligonucleotide
accucaaaaguaucccauu

SEQ ID NO: 3020046 - RNA, 19 nt, Artificial Sequence
  Description of Artificial Sequence: Synthetic oligonucleotide
ggauugauugacaucaaua

SEQ ID NO: 3020047 - RNA, 19 nt, Artificial Sequence
  Description of Artificial Sequence: Synthetic oligonucleotide
uucuuccauuacacucuug

SEQ ID NO: 3020048 - RNA, 19 nt, Artificial Sequence
  Description of Artificial Sequence: Synthetic oligonucleotide
cacggaggccuucaggauc

SEQ ID NO: 3020049 - RNA, 19 nt, Artificial Sequence
  Description of Artificial Sequence: Synthetic oligonucleotide
acugaacacuaagcauuuc

SEQ ID NO: 3020050 - RNA, 19 nt, Artificial Sequence
  Description of Artificial Sequence: Synthetic oligonucleotide
guaucccauucaaauuggc

SEQ ID NO: 3020051 - RNA, 19 nt, Artificial Sequence
  Description of Artificial Sequence: Synthetic oligonucleotide
caauaagagaaccuauuuu

SEQ ID NO: 3020052 - RNA, 19 nt, Artificial Sequence
  Description of Artificial Sequence: Synthetic oligonucleotide
guaaaagaaauguguucau

SEQ ID NO: 3020053 - RNA, 19 nt, Artificial Sequence
  Description of Artificial Sequence: Synthetic oligonucleotide
acacucuugugaacauagg

SEQ ID NO: 3020054 - RNA, 19 nt, Artificial Sequence
  Description of Artificial Sequence: Synthetic oligonucleotide
ugugaacauaggccucuuu

SEQ ID NO: 3020055 - RNA, 19 nt, Artificial Sequence
  Description of Artificial Sequence: Synthetic oligonucleotide
ggauccuuggauugauuga

SEQ ID NO: 3020056 - RNA, 19 nt, Artificial Sequence
  Description of Artificial Sequence: Synthetic oligonucleotide
ccucaaaaguaucccauuc

SEQ ID NO: 3020057 - RNA, 19 nt, Artificial Sequence
  Description of Artificial Sequence: Synthetic oligonucleotide
ucaggauccuuggauugau

SEQ ID NO: 3020058 - RNA, 19 nt, Artificial Sequence
  Description of Artificial Sequence: Synthetic oligonucleotide
auccccaaucacaauuuca

SEQ ID NO: 3020059 - RNA, 19 nt, Artificial Sequence
  Description of Artificial Sequence: Synthetic oligonucleotide
gugaacauaggccucuuuu

SEQ ID NO: 3020060 - RNA, 19 nt, Artificial Sequence
  Description of Artificial Sequence: Synthetic oligonucleotide
gccucuuuucuuaucauca

SEQ ID NO: 3020061 - RNA, 19 nt, Artificial Sequence
  Description of Artificial Sequence: Synthetic oligonucleotide
uuacacucuugugaacaua

SEQ ID NO: 3020062 - RNA, 19 nt, Artificial Sequence
  Description of Artificial Sequence: Synthetic oligonucleotide
caaguuccugucugccaac

SEQ ID NO: 3020063 - RNA, 19 nt, Artificial Sequence
  Description of Artificial Sequence: Synthetic oligonucleotide
ucguccucuuuuguuauuu

SEQ ID NO: 3020064 - RNA, 19 nt, Artificial Sequence
  Description of Artificial Sequence: Synthetic oligonucleotide
cauccccaaucacaauuuc

SEQ ID NO: 3020065 - RNA, 19 nt, Artificial Sequence
  Description of Artificial Sequence: Synthetic oligonucleotide
uccugucugccaacccugu

SEQ ID NO: 3020066 - RNA, 19 nt, Artificial Sequence
  Description of Artificial Sequence: Synthetic oligonucleotide
caaagcaucguccucuuuu

SEQ ID NO: 3020067 - RNA, 19 nt, Artificial Sequence
  Description of Artificial Sequence: Synthetic oligonucleotide
guuccugucugccaacccu

SEQ ID NO: 3020068 - RNA, 19 nt, Artificial Sequence
  Description of Artificial Sequence: Synthetic oligonucleotide
ucaucacaucauucuuaua

SEQ ID NO: 3020069 - RNA, 19 nt, Artificial Sequence
  Description of Artificial Sequence: Synthetic oligonucleotide
cauucuuauaauugcuguu

SEQ ID NO: 3020070 - RNA, 19 nt, Artificial Sequence
  Description of Artificial Sequence: Synthetic oligonucleotide
cuguuguuggcguuaucua

SEQ ID NO: 3020071 - RNA, 19 nt, Artificial Sequence
  Description of Artificial Sequence: Synthetic oligonucleotide
auuucaaguccugcaccaa

SEQ ID NO: 3020072 - RNA, 19 nt, Artificial Sequence
  Description of Artificial Sequence: Synthetic oligonucleotide
gugguaaaagaaauguguu

SEQ ID NO: 3020073 - RNA, 19 nt, Artificial Sequence
  Description of Artificial Sequence: Synthetic oligonucleotide
cccaaucacaauuucaagu

SEQ ID NO: 3020074 - RNA, 19 nt, Artificial Sequence
  Description of Artificial Sequence: Synthetic oligonucleotide
caaugagacugaacacuaa

SEQ ID NO: 3020075 - RNA, 19 nt, Artificial Sequence
  Description of Artificial Sequence: Synthetic oligonucleotide
acacggaggccuucaggau

SEQ ID NO: 3020076 - RNA, 19 nt, Artificial Sequence
  Description of Artificial Sequence: Synthetic oligonucleotide
gggguggccacaaagcauc

SEQ ID NO: 3020077 - RNA, 19 nt, Artificial Sequence
  Description of Artificial Sequence: Synthetic oligonucleotide
caauuucaaguuccugucu

SEQ ID NO: 3020078 - RNA, 19 nt, Artificial Sequence
  Description of Artificial Sequence: Synthetic oligonucleotide
ggcuuaaucuugaaaugaa

SEQ ID NO: 3020079 - RNA, 19 nt, Artificial Sequence
  Description of Artificial Sequence: Synthetic oligonucleotide
ccccaaucacaauuucaag

SEQ ID NO: 3020080 - RNA, 19 nt, Artificial Sequence
  Description of Artificial Sequence: Synthetic oligonucleotide
gcaucguccucuuuuguua

SEQ ID NO: 3020081 - RNA, 19 nt, Artificial Sequence
  Description of Artificial Sequence: Synthetic oligonucleotide
ccuuggauugauugacauc

SEQ ID NO: 3020082 - RNA, 19 nt, Artificial Sequence
  Description of Artificial Sequence: Synthetic oligonucleotide
aggccucuuuucuuaucau

SEQ ID NO: 3020083 - RNA, 19 nt, Artificial Sequence
  Description of Artificial Sequence: Synthetic oligonucleotide
gucugccaacccugucagg

SEQ ID NO: 3020084 - RNA, 19 nt, Artificial Sequence
  Description of Artificial Sequence: Synthetic oligonucleotide
gcuguuguuggcguuaucu

SEQ ID NO: 3020085 - RNA, 19 nt, Artificial Sequence
  Description of Artificial Sequence: Synthetic oligonucleotide
auccuuggauugauugaca

SEQ ID NO: 3020086 - RNA, 19 nt, Artificial Sequence
  Description of Artificial Sequence: Synthetic oligonucleotide
cuugugaacauaggccucu

SEQ ID NO: 3020087 - RNA, 19 nt, Artificial Sequence
  Description of Artificial Sequence: Synthetic oligonucleotide
gaaguccaaugagacugaa

SEQ ID NO: 3020088 - RNA, 19 nt, Artificial Sequence
  Description of Artificial Sequence: Synthetic oligonucleotide
ccaaugagacugaacacua

SEQ ID NO: 3020089 - RNA, 19 nt, Artificial Sequence
  Description of Artificial Sequence: Synthetic oligonucleotide
acaaagcaucguccucuuu

SEQ ID NO: 3020090 - RNA, 19 nt, Artificial Sequence
  Description of Artificial Sequence: Synthetic oligonucleotide
uugcuguuguuggcguuau

SEQ ID NO: 3020091 - RNA, 19 nt, Artificial Sequence
  Description of Artificial Sequence: Synthetic oligonucleotide
ugcuguuguuggcguuauc

SEQ ID NO: 3020092 - RNA, 19 nt, Artificial Sequence
  Description of Artificial Sequence: Synthetic oligonucleotide
aucguccucuuuuguuauu

SEQ ID NO: 3020093 - RNA, 19 nt, Artificial Sequence
  Description of Artificial Sequence: Synthetic oligonucleotide
aucuugaaaugaaguccaa

SEQ ID NO: 3020094 - RNA, 19 nt, Artificial Sequence
  Description of Artificial Sequence: Synthetic oligonucleotide
ccauuacacucuugugaac

SEQ ID NO: 3020095 - RNA, 19 nt, Artificial Sequence
  Description of Artificial Sequence: Synthetic oligonucleotide
uugugaacauaggccucuu

SEQ ID NO: 3020096 - RNA, 19 nt, Artificial Sequence
  Description of Artificial Sequence: Synthetic oligonucleotide
gccacaaagcaucguccuc

SEQ ID NO: 3020097 - RNA, 19 nt, Artificial Sequence
  Description of Artificial Sequence: Synthetic oligonucleotide
ccucuuuuguuauuucacu

SEQ ID NO: 3020098 - RNA, 19 nt, Artificial Sequence
  Description of Artificial Sequence: Synthetic oligonucleotide
caucguccucuuuuguuau

SEQ ID NO: 3020099 - RNA, 19 nt, Artificial Sequence
  Description of Artificial Sequence: Synthetic oligonucleotide
ggccacaaagcaucguccu

SEQ ID NO: 3020100 - RNA, 19 nt, Artificial Sequence
  Description of Artificial Sequence: Synthetic oligonucleotide
cauaggccucuuuucuuau

SEQ ID NO: 3020101 - RNA, 19 nt, Artificial Sequence
  Description of Artificial Sequence: Synthetic oligonucleotide
gccuucaggauccuuggau

SEQ ID NO: 3020102 - RNA, 19 nt, Artificial Sequence
  Description of Artificial Sequence: Synthetic oligonucleotide
guucauccccaaucacaau

SEQ ID NO: 3020103 - RNA, 19 nt, Artificial Sequence
  Description of Artificial Sequence: Synthetic oligonucleotide
cugcaccaaauaguaaaau

SEQ ID NO: 3020104 - RNA, 19 nt, Artificial Sequence
  Description of Artificial Sequence: Synthetic oligonucleotide
guccugcaccaaauaguaa

SEQ ID NO: 3020105 - RNA, 19 nt, Artificial Sequence
  Description of Artificial Sequence: Synthetic oligonucleotide
ccacaaagcaucguccucu

SEQ ID NO: 3020106 - RNA, 19 nt, Artificial Sequence
  Description of Artificial Sequence: Synthetic oligonucleotide
cguccucuuuuguuauuuc

SEQ ID NO: 3020107 - RNA, 19 nt, Artificial Sequence
  Description of Artificial Sequence: Synthetic oligonucleotide
ccuucaggauccuuggauu

SEQ ID NO: 3020108 - RNA, 19 nt, Artificial Sequence
  Description of Artificial Sequence: Synthetic oligonucleotide
ggccuucaggauccuugga

SEQ ID NO: 3020109 - RNA, 19 nt, Artificial Sequence
  Description of Artificial Sequence: Synthetic oligonucleotide
cacaaagcaucguccucuu

SEQ ID NO: 3020110 - RNA, 19 nt, Artificial Sequence
  Description of Artificial Sequence: Synthetic oligonucleotide
ccugucugccaacccuguc

SEQ ID NO: 3020111 - RNA, 19 nt, Artificial Sequence
  Description of Artificial Sequence: Synthetic oligonucleotide
cccauucaaauuggcuuaa

SEQ ID NO: 3020112 - RNA, 19 nt, Artificial Sequence
  Description of Artificial Sequence: Synthetic oligonucleotide
caggauccuuggauugauu

SEQ ID NO: 3020113 - RNA, 19 nt, Artificial Sequence
  Description of Artificial Sequence: Synthetic oligonucleotide
gguggccacaaagcaucgu

SEQ ID NO: 3020114 - RNA, 19 nt, Artificial Sequence
  Description of Artificial Sequence: Synthetic oligonucleotide
ccauucaaauuggcuuaau

SEQ ID NO: 3020115 - RNA, 19 nt, Artificial Sequence
  Description of Artificial Sequence: Synthetic oligonucleotide
ggaggccuucaggauccuu

SEQ ID NO: 3020116 - RNA, 19 nt, Artificial Sequence
  Description of Artificial Sequence: Synthetic oligonucleotide
cggaggccuucaggauccu

SEQ ID NO: 3020117 - RNA, 19 nt, Artificial Sequence
  Description of Artificial Sequence: Synthetic oligonucleotide
aaaacaaggcauuaugucc

SEQ ID NO: 3020118 - RNA, 19 nt, Artificial Sequence
  Description of Artificial Sequence: Synthetic oligonucleotide
aaccauauuaucuacauug

SEQ ID NO: 3020119 - RNA, 19 nt, Artificial Sequence
  Description of Artificial Sequence: Synthetic oligonucleotide
auuuacaucaccuacagug

SEQ ID NO: 3020120 - RNA, 19 nt, Artificial Sequence
  Description of Artificial Sequence: Synthetic oligonucleotide
agcuuugucaaauucagcc

SEQ ID NO: 3020121 - RNA, 19 nt, Artificial Sequence
  Description of Artificial Sequence: Synthetic oligonucleotide
uaauuuaucagaaccauau

SEQ ID NO: 3020122 - RNA, 19 nt, Artificial Sequence
  Description of Artificial Sequence: Synthetic oligonucleotide
aaucuggcuuauuauauuc

SEQ ID NO: 3020123 - RNA, 19 nt, Artificial Sequence
  Description of Artificial Sequence: Synthetic oligonucleotide
aguuccuuuaaguuuauuc

SEQ ID NO: 3020124 - RNA, 19 nt, Artificial Sequence
  Description of Artificial Sequence: Synthetic oligonucleotide
uuugagguccaaaagcccg

SEQ ID NO: 3020125 - RNA, 19 nt, Artificial Sequence
  Description of Artificial Sequence: Synthetic oligonucleotide
uuuacaucaccuacagugg

SEQ ID NO: 3020126 - RNA, 19 nt, Artificial Sequence
  Description of Artificial Sequence: Synthetic oligonucleotide
auauuaucuacauugaaaa

SEQ ID NO: 3020127 - RNA, 19 nt, Artificial Sequence
  Description of Artificial Sequence: Synthetic oligonucleotide
uuaaguuuauuccaggaau

SEQ ID NO: 3020128 - RNA, 19 nt, Artificial Sequence
  Description of Artificial Sequence: Synthetic oligonucleotide
uuaaaguggcuguagauga

SEQ ID NO: 3020129 - RNA, 19 nt, Artificial Sequence
  Description of Artificial Sequence: Synthetic oligonucleotide
uuuaucagaaccauauuau

SEQ ID NO: 3020130 - RNA, 19 nt, Artificial Sequence
  Description of Artificial Sequence: Synthetic oligonucleotide
aaguuuauuccaggaaucc

SEQ ID NO: 3020131 - RNA, 19 nt, Artificial Sequence
  Description of Artificial Sequence: Synthetic oligonucleotide
uauuauauuccguauuucu

SEQ ID NO: 3020132 - RNA, 19 nt, Artificial Sequence
  Description of Artificial Sequence: Synthetic oligonucleotide
guuccuuuaaguuuauucc

SEQ ID NO: 3020133 - RNA, 19 nt, Artificial Sequence
  Description of Artificial Sequence: Synthetic oligonucleotide
uguauuuacaucaccuaca

SEQ ID NO: 3020134 - RNA, 19 nt, Artificial Sequence
  Description of Artificial Sequence: Synthetic oligonucleotide
ucuggcuuauuauauuccg

SEQ ID NO: 3020135 - RNA, 19 nt, Artificial Sequence
  Description of Artificial Sequence: Synthetic oligonucleotide
uuaauucuggcucuaauuu

SEQ ID NO: 3020136 - RNA, 19 nt, Artificial Sequence
  Description of Artificial Sequence: Synthetic oligonucleotide
uuuaaaguggcuguagaug

SEQ ID NO: 3020137 - RNA, 19 nt, Artificial Sequence
  Description of Artificial Sequence: Synthetic oligonucleotide
uuuaaguuuauuccaggaa

SEQ ID NO: 3020138 - RNA, 19 nt, Artificial Sequence
  Description of Artificial Sequence: Synthetic oligonucleotide
uuauauuccguauuucuuc

SEQ ID NO: 3020139 - RNA, 19 nt, Artificial Sequence
  Description of Artificial Sequence: Synthetic oligonucleotide
auuuaucagaaccauauua

SEQ ID NO: 3020140 - RNA, 19 nt, Artificial Sequence
  Description of Artificial Sequence: Synthetic oligonucleotide
cucuucaucaguuggcugg

SEQ ID NO: 3020141 - RNA, 19 nt, Artificial Sequence
  Description of Artificial Sequence: Synthetic oligonucleotide
uccuuuaaguuuauuccag

SEQ ID NO: 3020142 - RNA, 19 nt, Artificial Sequence
  Description of Artificial Sequence: Synthetic oligonucleotide
aagagcaucucuucaucag

SEQ ID NO: 3020143 - RNA, 19 nt, Artificial Sequence
  Description of Artificial Sequence: Synthetic oligonucleotide
aggcauuauguccucaugg

SEQ ID NO: 3020144 - RNA, 19 nt, Artificial Sequence
  Description of Artificial Sequence: Synthetic oligonucleotide
agguccaaaagcccgggcc

SEQ ID NO: 3020145 - RNA, 19 nt, Artificial Sequence
  Description of Artificial Sequence: Synthetic oligonucleotide
acuuucuccacauagguuu

SEQ ID NO: 3020146 - RNA, 19 nt, Artificial Sequence
  Description of Artificial Sequence: Synthetic oligonucleotide
guauuuacaucaccuacag

SEQ ID NO: 3020147 - RNA, 19 nt, Artificial Sequence
  Description of Artificial Sequence: Synthetic oligonucleotide
ucuggcucuaauuuaucag

SEQ ID NO: 3020148 - RNA, 19 nt, Artificial Sequence
  Description of Artificial Sequence: Synthetic oligonucleotide
uccacuuucuccacauagg

SEQ ID NO: 3020149 - RNA, 19 nt, Artificial Sequence
  Description of Artificial Sequence: Synthetic oligonucleotide
uggcuguagaugaagagca

SEQ ID NO: 3020150 - RNA, 19 nt, Artificial Sequence
  Description of Artificial Sequence: Synthetic oligonucleotide
guccucaugggucucaugg

SEQ ID NO: 3020151 - RNA, 19 nt, Artificial Sequence
  Description of Artificial Sequence: Synthetic oligonucleotide
uaaguuuauuccaggaauc

SEQ ID NO: 3020152 - RNA, 19 nt, Artificial Sequence
  Description of Artificial Sequence: Synthetic oligonucleotide
uguuuaaaguggcuguaga

SEQ ID NO: 3020153 - RNA, 19 nt, Artificial Sequence
  Description of Artificial Sequence: Synthetic oligonucleotide
cauuauguccucauggguc

SEQ ID NO: 3020154 - RNA, 19 nt, Artificial Sequence
  Description of Artificial Sequence: Synthetic oligonucleotide
aguuuauuccaggaauccc

SEQ ID NO: 3020155 - RNA, 19 nt, Artificial Sequence
  Description of Artificial Sequence: Synthetic oligonucleotide
uuggccuugccuuugaggu

SEQ ID NO: 3020156 - RNA, 19 nt, Artificial Sequence
  Description of Artificial Sequence: Synthetic oligonucleotide
ucagcgauuaauucuggcu

SEQ ID NO: 3020157 - RNA, 19 nt, Artificial Sequence
  Description of Artificial Sequence: Synthetic oligonucleotide
guuggcugggucuugaggc

SEQ ID NO: 3020158 - RNA, 19 nt, Artificial Sequence
  Description of Artificial Sequence: Synthetic oligonucleotide
ucaugggucacaugugcgg

SEQ ID NO: 3020159 - RNA, 19 nt, Artificial Sequence
  Description of Artificial Sequence: Synthetic oligonucleotide
aaacaaggcauuauguccu

SEQ ID NO: 3020160 - RNA, 19 nt, Artificial Sequence
  Description of Artificial Sequence: Synthetic oligonucleotide
uacaguggcuuguuuaaag

SEQ ID NO: 3020161 - RNA, 19 nt, Artificial Sequence
  Description of Artificial Sequence: Synthetic oligonucleotide
uauauuccguauuucuucu

SEQ ID NO: 3020162 - RNA, 19 nt, Artificial Sequence
  Description of Artificial Sequence: Synthetic oligonucleotide
agaugaagagcaucucuuc

SEQ ID NO: 3020163 - RNA, 19 nt, Artificial Sequence
  Description of Artificial Sequence: Synthetic oligonucleotide
ucucaugggucacaugugc

SEQ ID NO: 3020164 - RNA, 19 nt, Artificial Sequence
  Description of Artificial Sequence: Synthetic oligonucleotide
aggaucagcgauuaauucu

SEQ ID NO: 3020165 - RNA, 19 nt, Artificial Sequence
  Description of Artificial Sequence: Synthetic oligonucleotide
auuaauucuggcucuaauu

SEQ ID NO: 3020166 - RNA, 19 nt, Artificial Sequence
  Description of Artificial Sequence: Synthetic oligonucleotide
uuacaucaccuacaguggc

SEQ ID NO: 3020167 - RNA, 19 nt, Artificial Sequence
  Description of Artificial Sequence: Synthetic oligonucleotide
aguggcuuguuuaaagugg

SEQ ID NO: 3020168 - RNA, 19 nt, Artificial Sequence
  Description of Artificial Sequence: Synthetic oligonucleotide
agaaccauauuaucuacau

SEQ ID NO: 3020169 - RNA, 19 nt, Artificial Sequence
  Description of Artificial Sequence: Synthetic oligonucleotide
cuguauuuacaucaccuac

SEQ ID NO: 3020170 - RNA, 19 nt, Artificial Sequence
  Description of Artificial Sequence: Synthetic oligonucleotide
aucagcgauuaauucuggc

SEQ ID NO: 3020171 - RNA, 19 nt, Artificial Sequence
  Description of Artificial Sequence: Synthetic oligonucleotide
auuauguccucaugggucu

SEQ ID NO: 3020172 - RNA, 19 nt, Artificial Sequence
  Description of Artificial Sequence: Synthetic oligonucleotide
uuuauuccaggaaucccac

SEQ ID NO: 3020173 - RNA, 19 nt, Artificial Sequence
  Description of Artificial Sequence: Synthetic oligonucleotide
uuccaggaaucccacuugg

SEQ ID NO: 3020174 - RNA, 19 nt, Artificial Sequence
  Description of Artificial Sequence: Synthetic oligonucleotide
uuaucagaaccauauuauc

SEQ ID NO: 3020175 - RNA, 19 nt, Artificial Sequence
  Description of Artificial Sequence: Synthetic oligonucleotide
ucuaauuuaucagaaccau

SEQ ID NO: 3020176 - RNA, 19 nt, Artificial Sequence
  Description of Artificial Sequence: Synthetic oligonucleotide
aaaguggcuguagaugaag

SEQ ID NO: 3020177 - RNA, 19 nt, Artificial Sequence
  Description of Artificial Sequence: Synthetic oligonucleotide
uugagguccaaaagcccgg

SEQ ID NO: 3020178 - RNA, 19 nt, Artificial Sequence
  Description of Artificial Sequence: Synthetic oligonucleotide
uauuccguauuucuucuuc

SEQ ID NO: 3020179 - RNA, 19 nt, Artificial Sequence
  Description of Artificial Sequence: Synthetic oligonucleotide
aucagaaccauauuaucua

SEQ ID NO: 3020180 - RNA, 19 nt, Artificial Sequence
  Description of Artificial Sequence: Synthetic oligonucleotide
aaucccacuuggccuugcc

SEQ ID NO: 3020181 - RNA, 19 nt, Artificial Sequence
  Description of Artificial Sequence: Synthetic oligonucleotide
aacaaggcauuauguccuc

SEQ ID NO: 3020182 - RNA, 19 nt, Artificial Sequence
  Description of Artificial Sequence: Synthetic oligonucleotide
aauuuaucagaaccauauu

SEQ ID NO: 3020183 - RNA, 19 nt, Artificial Sequence
  Description of Artificial Sequence: Synthetic oligonucleotide
gaugaagagcaucucuuca

SEQ ID NO: 3020184 - RNA, 19 nt, Artificial Sequence
  Description of Artificial Sequence: Synthetic oligonucleotide
ucagaaccauauuaucuac

SEQ ID NO: 3020185 - RNA, 19 nt, Artificial Sequence
  Description of Artificial Sequence: Synthetic oligonucleotide
uggaaguuccuuuaaguuu

SEQ ID NO: 3020186 - RNA, 19 nt, Artificial Sequence
  Description of Artificial Sequence: Synthetic oligonucleotide
uagaugaagagcaucucuu

SEQ ID NO: 3020187 - RNA, 19 nt, Artificial Sequence
  Description of Artificial Sequence: Synthetic oligonucleotide
uucauggcacuuuccuugg

SEQ ID NO: 3020188 - RNA, 19 nt, Artificial Sequence
  Description of Artificial Sequence: Synthetic oligonucleotide
uccguauuucuucuucagc

SEQ ID NO: 3020189 - RNA, 19 nt, Artificial Sequence
  Description of Artificial Sequence: Synthetic oligonucleotide
aauucuggcucuaauuuau

SEQ ID NO: 3020190 - RNA, 19 nt, Artificial Sequence
  Description of Artificial Sequence: Synthetic oligonucleotide
aaaucuggcuuauuauauu

SEQ ID NO: 3020191 - RNA, 19 nt, Artificial Sequence
  Description of Artificial Sequence: Synthetic oligonucleotide
gaucuguauuuacaucacc

SEQ ID NO: 3020192 - RNA, 19 nt, Artificial Sequence
  Description of Artificial Sequence: Synthetic oligonucleotide
cuuugagguccaaaagccc

SEQ ID NO: 3020193 - RNA, 19 nt, Artificial Sequence
  Description of Artificial Sequence: Synthetic oligonucleotide
acauagguuuucauggcac

SEQ ID NO: 3020194 - RNA, 19 nt, Artificial Sequence
  Description of Artificial Sequence: Synthetic oligonucleotide
uuggaaguuccuuuaaguu

SEQ ID NO: 3020195 - RNA, 19 nt, Artificial Sequence
  Description of Artificial Sequence: Synthetic oligonucleotide
cucuaauuuaucagaacca

SEQ ID NO: 3020196 - RNA, 19 nt, Artificial Sequence
  Description of Artificial Sequence: Synthetic oligonucleotide
ucuguauuuacaucaccua

SEQ ID NO: 3020197 - RNA, 19 nt, Artificial Sequence
  Description of Artificial Sequence: Synthetic oligonucleotide
aaggcauuauguccucaug

SEQ ID NO: 3020198 - RNA, 19 nt, Artificial Sequence
  Description of Artificial Sequence: Synthetic oligonucleotide
ucaucaguuggcugggucu

SEQ ID NO: 3020199 - RNA, 19 nt, Artificial Sequence
  Description of Artificial Sequence: Synthetic oligonucleotide
ugccuuugagguccaaaag

SEQ ID NO: 3020200 - RNA, 19 nt, Artificial Sequence
  Description of Artificial Sequence: Synthetic oligonucleotide
caucucuucaucaguuggc

SEQ ID NO: 3020201 - RNA, 19 nt, Artificial Sequence
  Description of Artificial Sequence: Synthetic oligonucleotide
cuuuaaguuuauuccagga

SEQ ID NO: 3020202 - RNA, 19 nt, Artificial Sequence
  Description of Artificial Sequence: Synthetic oligonucleotide
agguuuucauggcacuuuc

SEQ ID NO: 3020203 - RNA, 19 nt, Artificial Sequence
  Description of Artificial Sequence: Synthetic oligonucleotide
ggcauuauguccucauggg

SEQ ID NO: 3020204 - RNA, 19 nt, Artificial Sequence
  Description of Artificial Sequence: Synthetic oligonucleotide
uggcuuauuauauuccgua

SEQ ID NO: 3020205 - RNA, 19 nt, Artificial Sequence
  Description of Artificial Sequence: Synthetic oligonucleotide
uuccguauuucuucuucag

SEQ ID NO: 3020206 - RNA, 19 nt, Artificial Sequence
  Description of Artificial Sequence: Synthetic oligonucleotide
aguuggcugggucuugagg

SEQ ID NO: 3020207 - RNA, 19 nt, Artificial Sequence
  Description of Artificial Sequence: Synthetic oligonucleotide
aucuguauuuacaucaccu

SEQ ID NO: 3020208 - RNA, 19 nt, Artificial Sequence
  Description of Artificial Sequence: Synthetic oligonucleotide
cuugaggcgcuucaccucc

SEQ ID NO: 3020209 - RNA, 19 nt, Artificial Sequence
  Description of Artificial Sequence: Synthetic oligonucleotide
cuuggccuugccuuugagg

SEQ ID NO: 3020210 - RNA, 19 nt, Artificial Sequence
  Description of Artificial Sequence: Synthetic oligonucleotide
uuguuuaaaguggcuguag

SEQ ID NO: 3020211 - RNA, 19 nt, Artificial Sequence
  Description of Artificial Sequence: Synthetic oligonucleotide
ccuuugagguccaaaagcc

SEQ ID NO: 3020212 - RNA, 19 nt, Artificial Sequence
  Description of Artificial Sequence: Synthetic oligonucleotide
cagcgauuaauucuggcuc

SEQ ID NO: 3020213 - RNA, 19 nt, Artificial Sequence
  Description of Artificial Sequence: Synthetic oligonucleotide
gaagagcaucucuucauca

SEQ ID NO: 3020214 - RNA, 19 nt, Artificial Sequence
  Description of Artificial Sequence: Synthetic oligonucleotide
uaauucuggcucuaauuua

SEQ ID NO: 3020215 - RNA, 19 nt, Artificial Sequence
  Description of Artificial Sequence: Synthetic oligonucleotide
ucaugggucucauggguca

SEQ ID NO: 3020216 - RNA, 19 nt, Artificial Sequence
  Description of Artificial Sequence: Synthetic oligonucleotide
cucaugggucacaugugcg

SEQ ID NO: 3020217 - RNA, 19 nt, Artificial Sequence
  Description of Artificial Sequence: Synthetic oligonucleotide
ucuucaucaguuggcuggg

SEQ ID NO: 3020218 - RNA, 19 nt, Artificial Sequence
  Description of Artificial Sequence: Synthetic oligonucleotide
uuuccuuggaaguuccuuu

SEQ ID NO: 3020219 - RNA, 19 nt, Artificial Sequence
  Description of Artificial Sequence: Synthetic oligonucleotide
acaguggcuuguuuaaagu

SEQ ID NO: 3020220 - RNA, 19 nt, Artificial Sequence
  Description of Artificial Sequence: Synthetic oligonucleotide
uuauuauauuccguauuuc

SEQ ID NO: 3020221 - RNA, 19 nt, Artificial Sequence
  Description of Artificial Sequence: Synthetic oligonucleotide
uacaucaccuacaguggcu

SEQ ID NO: 3020222 - RNA, 19 nt, Artificial Sequence
  Description of Artificial Sequence: Synthetic oligonucleotide
agcgauuaauucuggcucu

SEQ ID NO: 3020223 - RNA, 19 nt, Artificial Sequence
  Description of Artificial Sequence: Synthetic oligonucleotide
agagcaucucuucaucagu

SEQ ID NO: 3020224 - RNA, 19 nt, Artificial Sequence
  Description of Artificial Sequence: Synthetic oligonucleotide
uuggcugggucuugaggcg

SEQ ID NO: 3020225 - RNA, 19 nt, Artificial Sequence
  Description of Artificial Sequence: Synthetic oligonucleotide
gaggaucagcgauuaauuc

SEQ ID NO: 3020226 - RNA, 19 nt, Artificial Sequence
  Description of Artificial Sequence: Synthetic oligonucleotide
uggcucuaauuuaucagaa

SEQ ID NO: 3020227 - RNA, 19 nt, Artificial Sequence
  Description of Artificial Sequence: Synthetic oligonucleotide
auuccaggaaucccacuug

SEQ ID NO: 3020228 - RNA, 19 nt, Artificial Sequence
  Description of Artificial Sequence: Synthetic oligonucleotide
augaagagcaucucuucau

SEQ ID NO: 3020229 - RNA, 19 nt, Artificial Sequence
  Description of Artificial Sequence: Synthetic oligonucleotide
auuccguauuucuucuuca

SEQ ID NO: 3020230 - RNA, 19 nt, Artificial Sequence
  Description of Artificial Sequence: Synthetic oligonucleotide
guggcuguagaugaagagc

SEQ ID NO: 3020231 - RNA, 19 nt, Artificial Sequence
  Description of Artificial Sequence: Synthetic oligonucleotide
uauuuacaucaccuacagu

SEQ ID NO: 3020232 - RNA, 19 nt, Artificial Sequence
  Description of Artificial Sequence: Synthetic oligonucleotide
gcaucucuucaucaguugg

SEQ ID NO: 3020233 - RNA, 19 nt, Artificial Sequence
  Description of Artificial Sequence: Synthetic oligonucleotide
caguggcuuguuuaaagug

SEQ ID NO: 3020234 - RNA, 19 nt, Artificial Sequence
  Description of Artificial Sequence: Synthetic oligonucleotide
cuggcucuaauuuaucaga

SEQ ID NO: 3020235 - RNA, 19 nt, Artificial Sequence
  Description of Artificial Sequence: Synthetic oligonucleotide
uucaucaguuggcuggguc

SEQ ID NO: 3020236 - RNA, 19 nt, Artificial Sequence
  Description of Artificial Sequence: Synthetic oligonucleotide
uuuucauggcacuuuccuu

SEQ ID NO: 3020237 - RNA, 19 nt, Artificial Sequence
  Description of Artificial Sequence: Synthetic oligonucleotide
gccuuugagguccaaaagc

SEQ ID NO: 3020238 - RNA, 19 nt, Artificial Sequence
  Description of Artificial Sequence: Synthetic oligonucleotide
gguccaaaagcccgggccg

SEQ ID NO: 3020239 - RNA, 19 nt, Artificial Sequence
  Description of Artificial Sequence: Synthetic oligonucleotide
auuauauuccguauuucuu

SEQ ID NO: 3020240 - RNA, 19 nt, Artificial Sequence
  Description of Artificial Sequence: Synthetic oligonucleotide
ggaucagcgauuaauucug

SEQ ID NO: 3020241 - RNA, 19 nt, Artificial Sequence
  Description of Artificial Sequence: Synthetic oligonucleotide
guuuucauggcacuuuccu

SEQ ID NO: 3020242 - RNA, 19 nt, Artificial Sequence
  Description of Artificial Sequence: Synthetic oligonucleotide
agcaucucuucaucaguug

SEQ ID NO: 3020243 - RNA, 19 nt, Artificial Sequence
  Description of Artificial Sequence: Synthetic oligonucleotide
uggcacuuuccuuggaagu

SEQ ID NO: 3020244 - RNA, 19 nt, Artificial Sequence
  Description of Artificial Sequence: Synthetic oligonucleotide
uccaggaaucccacuuggc

SEQ ID NO: 3020245 - RNA, 19 nt, Artificial Sequence
  Description of Artificial Sequence: Synthetic oligonucleotide
uaaaguggcuguagaugaa

SEQ ID NO: 3020246 - RNA, 19 nt, Artificial Sequence
  Description of Artificial Sequence: Synthetic oligonucleotide
agcagcuuugucaaauuca

SEQ ID NO: 3020247 - RNA, 19 nt, Artificial Sequence
  Description of Artificial Sequence: Synthetic oligonucleotide
ccuuuaaguuuauuccagg

SEQ ID NO: 3020248 - RNA, 19 nt, Artificial Sequence
  Description of Artificial Sequence: Synthetic oligonucleotide
aggaggaucagcgauuaau

SEQ ID NO: 3020249 - RNA, 19 nt, Artificial Sequence
  Description of Artificial Sequence: Synthetic oligonucleotide
cuuggaaguuccuuuaagu

SEQ ID NO: 3020250 - RNA, 19 nt, Artificial Sequence
  Description of Artificial Sequence: Synthetic oligonucleotide
guagaugaagagcaucucu

SEQ ID NO: 3020251 - RNA, 19 nt, Artificial Sequence
  Description of Artificial Sequence: Synthetic oligonucleotide
gaucagcgauuaauucugg

SEQ ID NO: 3020252 - RNA, 19 nt, Artificial Sequence
  Description of Artificial Sequence: Synthetic oligonucleotide
guggcuuguuuaaaguggc

SEQ ID NO: 3020253 - RNA, 19 nt, Artificial Sequence
  Description of Artificial Sequence: Synthetic oligonucleotide
gcagcuuugucaaauucag

SEQ ID NO: 3020254 - RNA, 19 nt, Artificial Sequence
  Description of Artificial Sequence: Synthetic oligonucleotide
ugagguccaaaagcccggg

SEQ ID NO: 3020255 - RNA, 19 nt, Artificial Sequence
  Description of Artificial Sequence: Synthetic oligonucleotide
aggcgcuucaccuccucag

SEQ ID NO: 3020256 - RNA, 19 nt, Artificial Sequence
  Description of Artificial Sequence: Synthetic oligonucleotide
accuacaguggcuuguuua

SEQ ID NO: 3020257 - RNA, 19 nt, Artificial Sequence
  Description of Artificial Sequence: Synthetic oligonucleotide
ugggucuugaggcgcuuca

SEQ ID NO: 3020258 - RNA, 19 nt, Artificial Sequence
  Description of Artificial Sequence: Synthetic oligonucleotide
cuaauuuaucagaaccaua

SEQ ID NO: 3020259 - RNA, 19 nt, Artificial Sequence
  Description of Artificial Sequence: Synthetic oligonucleotide
ugugcggcuggccaccaaa

SEQ ID NO: 3020260 - RNA, 19 nt, Artificial Sequence
  Description of Artificial Sequence: Synthetic oligonucleotide
ucagcucuuccacuuucuc

SEQ ID NO: 3020261 - RNA, 19 nt, Artificial Sequence
  Description of Artificial Sequence: Synthetic oligonucleotide
accauauuaucuacauuga

SEQ ID NO: 3020262 - RNA, 19 nt, Artificial Sequence
  Description of Artificial Sequence: Synthetic oligonucleotide
uuauuccaggaaucccacu

SEQ ID NO: 3020263 - RNA, 19 nt, Artificial Sequence
  Description of Artificial Sequence: Synthetic oligonucleotide
guauuucuucuucagcucu

SEQ ID NO: 3020264 - RNA, 19 nt, Artificial Sequence
  Description of Artificial Sequence: Synthetic oligonucleotide
caugggucacaugugcggc

SEQ ID NO: 3020265 - RNA, 19 nt, Artificial Sequence
  Description of Artificial Sequence: Synthetic oligonucleotide
uucuccacauagguuuuca

SEQ ID NO: 3020266 - RNA, 19 nt, Artificial Sequence
  Description of Artificial Sequence: Synthetic oligonucleotide
ucccacuuggccuugccuu

SEQ ID NO: 3020267 - RNA, 19 nt, Artificial Sequence
  Description of Artificial Sequence: Synthetic oligonucleotide
aaaagcccgggccgaucug

SEQ ID NO: 3020268 - RNA, 19 nt, Artificial Sequence
  Description of Artificial Sequence: Synthetic oligonucleotide
ccaggaaucccacuuggcc

SEQ ID NO: 3020269 - RNA, 19 nt, Artificial Sequence
  Description of Artificial Sequence: Synthetic oligonucleotide
ccgaucuguauuuacauca

SEQ ID NO: 3020270 - RNA, 19 nt, Artificial Sequence
  Description of Artificial Sequence: Synthetic oligonucleotide
uuccuuggaaguuccuuua

SEQ ID NO: 3020271 - RNA, 19 nt, Artificial Sequence
  Description of Artificial Sequence: Synthetic oligonucleotide
ucuugaggcgcuucaccuc

SEQ ID NO: 3020272 - RNA, 19 nt, Artificial Sequence
  Description of Artificial Sequence: Synthetic oligonucleotide
ggucucaugggucacaugu

SEQ ID NO: 3020273 - RNA, 19 nt, Artificial Sequence
  Description of Artificial Sequence: Synthetic oligonucleotide
cucaugggucucauggguc

SEQ ID NO: 3020274 - RNA, 19 nt, Artificial Sequence
  Description of Artificial Sequence: Synthetic oligonucleotide
uccuuggaaguuccuuuaa

SEQ ID NO: 3020275 - RNA, 19 nt, Artificial Sequence
  Description of Artificial Sequence: Synthetic oligonucleotide
gauuaauucuggcucuaau

SEQ ID NO: 3020276 - RNA, 19 nt, Artificial Sequence
  Description of Artificial Sequence: Synthetic oligonucleotide
cagcuuugucaaauucagc

SEQ ID NO: 3020277 - RNA, 19 nt, Artificial Sequence
  Description of Artificial Sequence: Synthetic oligonucleotide
caaaucuggcuuauuauau

SEQ ID NO: 3020278 - RNA, 19 nt, Artificial Sequence
  Description of Artificial Sequence: Synthetic oligonucleotide
cagaaccauauuaucuaca

SEQ ID NO: 3020279 - RNA, 19 nt, Artificial Sequence
  Description of Artificial Sequence: Synthetic oligonucleotide
aggaaucccacuuggccuu

SEQ ID NO: 3020280 - RNA, 19 nt, Artificial Sequence
  Description of Artificial Sequence: Synthetic oligonucleotide
cuucagcucuuccacuuuc

SEQ ID NO: 3020281 - RNA, 19 nt, Artificial Sequence
  Description of Artificial Sequence: Synthetic oligonucleotide
guuuaaaguggcuguagau

SEQ ID NO: 3020282 - RNA, 19 nt, Artificial Sequence
  Description of Artificial Sequence: Synthetic oligonucleotide
aaagcccgggccgaucugu

SEQ ID NO: 3020283 - RNA, 19 nt, Artificial Sequence
  Description of Artificial Sequence: Synthetic oligonucleotide
ggcuuguuuaaaguggcug

SEQ ID NO: 3020284 - RNA, 19 nt, Artificial Sequence
  Description of Artificial Sequence: Synthetic oligonucleotide
cacauagguuuucauggca

SEQ ID NO: 3020285 - RNA, 19 nt, Artificial Sequence
  Description of Artificial Sequence: Synthetic oligonucleotide
uggccaccaaaucuggcuu

SEQ ID NO: 3020286 - RNA, 19 nt, Artificial Sequence
  Description of Artificial Sequence: Synthetic oligonucleotide
uggcuuguuuaaaguggcu

SEQ ID NO: 3020287 - RNA, 19 nt, Artificial Sequence
  Description of Artificial Sequence: Synthetic oligonucleotide
ggaaguuccuuuaaguuua

SEQ ID NO: 3020288 - RNA, 19 nt, Artificial Sequence
  Description of Artificial Sequence: Synthetic oligonucleotide
auucuggcucuaauuuauc

SEQ ID NO: 3020289 - RNA, 19 nt, Artificial Sequence
  Description of Artificial Sequence: Synthetic oligonucleotide
aucaccuacaguggcuugu

SEQ ID NO: 3020290 - RNA, 19 nt, Artificial Sequence
  Description of Artificial Sequence: Synthetic oligonucleotide
uagguuuucauggcacuuu

SEQ ID NO: 3020291 - RNA, 19 nt, Artificial Sequence
  Description of Artificial Sequence: Synthetic oligonucleotide
ggucuugaggcgcuucacc

SEQ ID NO: 3020292 - RNA, 19 nt, Artificial Sequence
  Description of Artificial Sequence: Synthetic oligonucleotide
ucuccacauagguuuucau

SEQ ID NO: 3020293 - RNA, 19 nt, Artificial Sequence
  Description of Artificial Sequence: Synthetic oligonucleotide
ugggucacaugugcggcug

SEQ ID NO: 3020294 - RNA, 19 nt, Artificial Sequence
  Description of Artificial Sequence: Synthetic oligonucleotide
gagguccaaaagcccgggc

SEQ ID NO: 3020295 - RNA, 19 nt, Artificial Sequence
  Description of Artificial Sequence: Synthetic oligonucleotide
ggcucuaauuuaucagaac

SEQ ID NO: 3020296 - RNA, 19 nt, Artificial Sequence
  Description of Artificial Sequence: Synthetic oligonucleotide
auagguuuucauggcacuu

SEQ ID NO: 3020297 - RNA, 19 nt, Artificial Sequence
  Description of Artificial Sequence: Synthetic oligonucleotide
augggucacaugugcggcu

SEQ ID NO: 3020298 - RNA, 19 nt, Artificial Sequence
  Description of Artificial Sequence: Synthetic oligonucleotide
aucccacuuggccuugccu

SEQ ID NO: 3020299 - RNA, 19 nt, Artificial Sequence
  Description of Artificial Sequence: Synthetic oligonucleotide
ccuuggaaguuccuuuaag

SEQ ID NO: 3020300 - RNA, 19 nt, Artificial Sequence
  Description of Artificial Sequence: Synthetic oligonucleotide
ccacauagguuuucauggc

SEQ ID NO: 3020301 - RNA, 19 nt, Artificial Sequence
  Description of Artificial Sequence: Synthetic oligonucleotide
caggaaucccacuuggccu

SEQ ID NO: 3020302 - RNA, 19 nt, Artificial Sequence
  Description of Artificial Sequence: Synthetic oligonucleotide
auauuccguauuucuucuu

SEQ ID NO: 3020303 - RNA, 19 nt, Artificial Sequence
  Description of Artificial Sequence: Synthetic oligonucleotide
ggccuugccuuugaggucc

SEQ ID NO: 3020304 - RNA, 19 nt, Artificial Sequence
  Description of Artificial Sequence: Synthetic oligonucleotide
ugcggcuggccaccaaauc

SEQ ID NO: 3020305 - RNA, 19 nt, Artificial Sequence
  Description of Artificial Sequence: Synthetic oligonucleotide
gcuuguuuaaaguggcugu

SEQ ID NO: 3020306 - RNA, 19 nt, Artificial Sequence
  Description of Artificial Sequence: Synthetic oligonucleotide
acaucaccuacaguggcuu

SEQ ID NO: 3020307 - RNA, 19 nt, Artificial Sequence
  Description of Artificial Sequence: Synthetic oligonucleotide
uguccucaugggucucaug

SEQ ID NO: 3020308 - RNA, 19 nt, Artificial Sequence
  Description of Artificial Sequence: Synthetic oligonucleotide
caucaccuacaguggcuug

SEQ ID NO: 3020309 - RNA, 19 nt, Artificial Sequence
  Description of Artificial Sequence: Synthetic oligonucleotide
gucucaugggucacaugug

SEQ ID NO: 3020310 - RNA, 19 nt, Artificial Sequence
  Description of Artificial Sequence: Synthetic oligonucleotide
cauagguuuucauggcacu

SEQ ID NO: 3020311 - RNA, 19 nt, Artificial Sequence
  Description of Artificial Sequence: Synthetic oligonucleotide
cuuguuuaaaguggcugua

SEQ ID NO: 3020312 - RNA, 19 nt, Artificial Sequence
  Description of Artificial Sequence: Synthetic oligonucleotide
ccaaaucuggcuuauuaua

SEQ ID NO: 3020313 - RNA, 19 nt, Artificial Sequence
  Description of Artificial Sequence: Synthetic oligonucleotide
uuucuccacauagguuuuc

SEQ ID NO: 3020314 - RNA, 19 nt, Artificial Sequence
  Description of Artificial Sequence: Synthetic oligonucleotide
cuggccaccaaaucuggcu

SEQ ID NO: 3020315 - RNA, 19 nt, Artificial Sequence
  Description of Artificial Sequence: Synthetic oligonucleotide
gaaccauauuaucuacauu

SEQ ID NO: 3020316 - RNA, 19 nt, Artificial Sequence
  Description of Artificial Sequence: Synthetic oligonucleotide
gcuguagaugaagagcauc

SEQ ID NO: 3020317 - RNA, 19 nt, Artificial Sequence
  Description of Artificial Sequence: Synthetic oligonucleotide
uggccuugccuuugagguc

SEQ ID NO: 3020318 - RNA, 19 nt, Artificial Sequence
  Description of Artificial Sequence: Synthetic oligonucleotide
acaaggcauuauguccuca

SEQ ID NO: 3020319 - RNA, 19 nt, Artificial Sequence
  Description of Artificial Sequence: Synthetic oligonucleotide
cuggcuuauuauauuccgu

SEQ ID NO: 3020320 - RNA, 19 nt, Artificial Sequence
  Description of Artificial Sequence: Synthetic oligonucleotide
gguuuucauggcacuuucc

SEQ ID NO: 3020321 - RNA, 19 nt, Artificial Sequence
  Description of Artificial Sequence: Synthetic oligonucleotide
ugggucucaugggucacau

SEQ ID NO: 3020322 - RNA, 19 nt, Artificial Sequence
  Description of Artificial Sequence: Synthetic oligonucleotide
ugaggcgcuucaccuccuc

SEQ ID NO: 3020323 - RNA, 19 nt, Artificial Sequence
  Description of Artificial Sequence: Synthetic oligonucleotide
caguuggcugggucuugag

SEQ ID NO: 3020324 - RNA, 19 nt, Artificial Sequence
  Description of Artificial Sequence: Synthetic oligonucleotide
gaggcgcuucaccuccuca

SEQ ID NO: 3020325 - RNA, 19 nt, Artificial Sequence
  Description of Artificial Sequence: Synthetic oligonucleotide
gcuuauuauauuccguauu

SEQ ID NO: 3020326 - RNA, 19 nt, Artificial Sequence
  Description of Artificial Sequence: Synthetic oligonucleotide
uugaggcgcuucaccuccu

SEQ ID NO: 3020327 - RNA, 19 nt, Artificial Sequence
  Description of Artificial Sequence: Synthetic oligonucleotide
ggcgcuucaccuccucagc

SEQ ID NO: 3020328 - RNA, 19 nt, Artificial Sequence
  Description of Artificial Sequence: Synthetic oligonucleotide
aaguuccuuuaaguuuauu

SEQ ID NO: 3020329 - RNA, 19 nt, Artificial Sequence
  Description of Artificial Sequence: Synthetic oligonucleotide
ccuacaguggcuuguuuaa

SEQ ID NO: 3020330 - RNA, 19 nt, Artificial Sequence
  Description of Artificial Sequence: Synthetic oligonucleotide
ucaccuacaguggcuuguu

SEQ ID NO: 3020331 - RNA, 19 nt, Artificial Sequence
  Description of Artificial Sequence: Synthetic oligonucleotide
cgaucuguauuuacaucac

SEQ ID NO: 3020332 - RNA, 19 nt, Artificial Sequence
  Description of Artificial Sequence: Synthetic oligonucleotide
gccgaucuguauuuacauc

SEQ ID NO: 3020333 - RNA, 19 nt, Artificial Sequence
  Description of Artificial Sequence: Synthetic oligonucleotide
uuauguccucaugggucuc

SEQ ID NO: 3020334 - RNA, 19 nt, Artificial Sequence
  Description of Artificial Sequence: Synthetic oligonucleotide
uucaccuccucagcagcuu

SEQ ID NO: 3020335 - RNA, 19 nt, Artificial Sequence
  Description of Artificial Sequence: Synthetic oligonucleotide
ccauauuaucuacauugaa

SEQ ID NO: 3020336 - RNA, 19 nt, Artificial Sequence
  Description of Artificial Sequence: Synthetic oligonucleotide
caaaagcccgggccgaucu

SEQ ID NO: 3020337 - RNA, 19 nt, Artificial Sequence
  Description of Artificial Sequence: Synthetic oligonucleotide
gaaucccacuuggccuugc

SEQ ID NO: 3020338 - RNA, 19 nt, Artificial Sequence
  Description of Artificial Sequence: Synthetic oligonucleotide
aucaguuggcugggucuug

SEQ ID NO: 3020339 - RNA, 19 nt, Artificial Sequence
  Description of Artificial Sequence: Synthetic oligonucleotide
caugggucucaugggucac

SEQ ID NO: 3020340 - RNA, 19 nt, Artificial Sequence
  Description of Artificial Sequence: Synthetic oligonucleotide
caaggcauuauguccucau

SEQ ID NO: 3020341 - RNA, 19 nt, Artificial Sequence
  Description of Artificial Sequence: Synthetic oligonucleotide
gcauuauguccucaugggu

SEQ ID NO: 3020342 - RNA, 19 nt, Artificial Sequence
  Description of Artificial Sequence: Synthetic oligonucleotide
ggcuuauuauauuccguau

SEQ ID NO: 3020343 - RNA, 19 nt, Artificial Sequence
  Description of Artificial Sequence: Synthetic oligonucleotide
ggcuggccaccaaaucugg

SEQ ID NO: 3020344 - RNA, 19 nt, Artificial Sequence
  Description of Artificial Sequence: Synthetic oligonucleotide
gagcaucucuucaucaguu

SEQ ID NO: 3020345 - RNA, 19 nt, Artificial Sequence
  Description of Artificial Sequence: Synthetic oligonucleotide
uccaaaagcccgggccgau

SEQ ID NO: 3020346 - RNA, 19 nt, Artificial Sequence
  Description of Artificial Sequence: Synthetic oligonucleotide
gcacuuuccuuggaaguuc

SEQ ID NO: 3020347 - RNA, 19 nt, Artificial Sequence
  Description of Artificial Sequence: Synthetic oligonucleotide
cagggaggaggaucagcga

SEQ ID NO: 3020348 - RNA, 19 nt, Artificial Sequence
  Description of Artificial Sequence: Synthetic oligonucleotide
acuuuccuuggaaguuccu

SEQ ID NO: 3020349 - RNA, 19 nt, Artificial Sequence
  Description of Artificial Sequence: Synthetic oligonucleotide
acacagggaggaggaucag

SEQ ID NO: 3020350 - RNA, 19 nt, Artificial Sequence
  Description of Artificial Sequence: Synthetic oligonucleotide
cucagcagcuuugucaaau

SEQ ID NO: 3020351 - RNA, 19 nt, Artificial Sequence
  Description of Artificial Sequence: Synthetic oligonucleotide
cuucaccuccucagcagcu

SEQ ID NO: 3020352 - RNA, 19 nt, Artificial Sequence
  Description of Artificial Sequence: Synthetic oligonucleotide
guccaaaagcccgggccga

SEQ ID NO: 3020353 - RNA, 19 nt, Artificial Sequence
  Description of Artificial Sequence: Synthetic oligonucleotide
gcggcuggccaccaaaucu

SEQ ID NO: 3020354 - RNA, 19 nt, Artificial Sequence
  Description of Artificial Sequence: Synthetic oligonucleotide
gggccgaucuguauuuaca

SEQ ID NO: 3020355 - RNA, 19 nt, Artificial Sequence
  Description of Artificial Sequence: Synthetic oligonucleotide
cuuuccuuggaaguuccuu

SEQ ID NO: 3020356 - RNA, 19 nt, Artificial Sequence
  Description of Artificial Sequence: Synthetic oligonucleotide
ggccgaucuguauuuacau

SEQ ID NO: 3020357 - RNA, 19 nt, Artificial Sequence
  Description of Artificial Sequence: Synthetic oligonucleotide
cuuucuccacauagguuuu

SEQ ID NO: 3020358 - RNA, 19 nt, Artificial Sequence
  Description of Artificial Sequence: Synthetic oligonucleotide
ggaggaucagcgauuaauu

SEQ ID NO: 3020359 - RNA, 19 nt, Artificial Sequence
  Description of Artificial Sequence: Synthetic oligonucleotide
gaggaggaucagcgauuaa

SEQ ID NO: 3020360 - RNA, 19 nt, Artificial Sequence
  Description of Artificial Sequence: Synthetic oligonucleotide
cacuuucuccacauagguu

SEQ ID NO: 3020361 - RNA, 19 nt, Artificial Sequence
  Description of Artificial Sequence: Synthetic oligonucleotide
ccacuuucuccacauaggu

SEQ ID NO: 3020362 - RNA, 19 nt, Artificial Sequence
  Description of Artificial Sequence: Synthetic oligonucleotide
cggcuggccaccaaaucug

SEQ ID NO: 3020363 - RNA, 19 nt, Artificial Sequence
  Description of Artificial Sequence: Synthetic oligonucleotide
ggaggaggaucagcgauua

SEQ ID NO: 3020364 - RNA, 19 nt, Artificial Sequence
  Description of Artificial Sequence: Synthetic oligonucleotide
cugggucuugaggcgcuuc

SEQ ID NO: 3020365 - RNA, 19 nt, Artificial Sequence
  Description of Artificial Sequence: Synthetic oligonucleotide
agcccgggccgaucuguau

SEQ ID NO: 3020366 - RNA, 19 nt, Artificial Sequence
  Description of Artificial Sequence: Synthetic oligonucleotide
cacuuggccuugccuuuga

SEQ ID NO: 3020367 - RNA, 19 nt, Artificial Sequence
  Description of Artificial Sequence: Synthetic oligonucleotide
gaaguuccuuuaaguuuau

SEQ ID NO: 3020368 - RNA, 19 nt, Artificial Sequence
  Description of Artificial Sequence: Synthetic oligonucleotide
cuuccacuuucuccacaua

SEQ ID NO: 3020369 - RNA, 19 nt, Artificial Sequence
  Description of Artificial Sequence: Synthetic oligonucleotide
gcuggccaccaaaucuggc

SEQ ID NO: 3020370 - RNA, 19 nt, Artificial Sequence
  Description of Artificial Sequence: Synthetic oligonucleotide
ggaaucccacuuggccuug

SEQ ID NO: 3020371 - RNA, 19 nt, Artificial Sequence
  Description of Artificial Sequence: Synthetic oligonucleotide
gggucuugaggcgcuucac

SEQ ID NO: 3020372 - RNA, 19 nt, Artificial Sequence
  Description of Artificial Sequence: Synthetic oligonucleotide
aagcccgggccgaucugua

SEQ ID NO: 3020373 - RNA, 19 nt, Artificial Sequence
  Description of Artificial Sequence: Synthetic oligonucleotide
ggccaccaaaucuggcuua

SEQ ID NO: 3020374 - RNA, 19 nt, Artificial Sequence
  Description of Artificial Sequence: Synthetic oligonucleotide
ggcacuuuccuuggaaguu

SEQ ID NO: 3020375 - RNA, 19 nt, Artificial Sequence
  Description of Artificial Sequence: Synthetic oligonucleotide
augugcggcuggccaccaa

SEQ ID NO: 3020376 - RNA, 19 nt, Artificial Sequence
  Description of Artificial Sequence: Synthetic oligonucleotide
cgggccgaucuguauuuac

SEQ ID NO: 3020377 - RNA, 19 nt, Artificial Sequence
  Description of Artificial Sequence: Synthetic oligonucleotide
caucaguuggcugggucuu

SEQ ID NO: 3020378 - RNA, 19 nt, Artificial Sequence
  Description of Artificial Sequence: Synthetic oligonucleotide
ccuccucagcagcuuuguc

SEQ ID NO: 3020379 - RNA, 19 nt, Artificial Sequence
  Description of Artificial Sequence: Synthetic oligonucleotide
gcgauuaauucuggcucua

SEQ ID NO: 3020380 - RNA, 19 nt, Artificial Sequence
  Description of Artificial Sequence: Synthetic oligonucleotide
caugugcggcuggccacca

SEQ ID NO: 3020381 - RNA, 19 nt, Artificial Sequence
  Description of Artificial Sequence: Synthetic oligonucleotide
ccacuuggccuugccuuug

SEQ ID NO: 3020382 - RNA, 19 nt, Artificial Sequence
  Description of Artificial Sequence: Synthetic oligonucleotide
ccaaaagcccgggccgauc

SEQ ID NO: 3020383 - RNA, 19 nt, Artificial Sequence
  Description of Artificial Sequence: Synthetic oligonucleotide
gggaggaggaucagcgauu

SEQ ID NO: 3020384 - RNA, 19 nt, Artificial Sequence
  Description of Artificial Sequence: Synthetic oligonucleotide
gugcggcuggccaccaaau

SEQ ID NO: 3020385 - RNA, 19 nt, Artificial Sequence
  Description of Artificial Sequence: Synthetic oligonucleotide
ggcuguagaugaagagcau

SEQ ID NO: 3020386 - RNA, 19 nt, Artificial Sequence
  Description of Artificial Sequence: Synthetic oligonucleotide
cgauuaauucuggcucuaa

SEQ ID NO: 3020387 - RNA, 19 nt, Artificial Sequence
  Description of Artificial Sequence: Synthetic oligonucleotide
caccuacaguggcuuguuu

SEQ ID NO: 3020388 - RNA, 19 nt, Artificial Sequence
  Description of Artificial Sequence: Synthetic oligonucleotide
gcccgggccgaucuguauu

SEQ ID NO: 3020389 - RNA, 19 nt, Artificial Sequence
  Description of Artificial Sequence: Synthetic oligonucleotide
ggcugggucuugaggcgcu

SEQ ID NO: 3020390 - RNA, 19 nt, Artificial Sequence
  Description of Artificial Sequence: Synthetic oligonucleotide
cccacuuggccuugccuuu

SEQ ID NO: 3020391 - RNA, 19 nt, Artificial Sequence
  Description of Artificial Sequence: Synthetic oligonucleotide
cccgggccgaucuguauuu

SEQ ID NO: 3020392 - RNA, 19 nt, Artificial Sequence
  Description of Artificial Sequence: Synthetic oligonucleotide
gcugggucuugaggcgcuu

SEQ ID NO: 3020393 - RNA, 19 nt, Artificial Sequence
  Description of Artificial Sequence: Synthetic oligonucleotide
ccgggccgaucuguauuua

SEQ ID NO: 3020394 - RNA, 19 nt, Artificial Sequence
  Description of Artificial Sequence: Synthetic oligonucleotide
uuuuauuuaguaauaagag

SEQ ID NO: 3020395 - RNA, 19 nt, Artificial Sequence
  Description of Artificial Sequence: Synthetic oligonucleotide
cuuacuauaaagaagggag

SEQ ID NO: 3020396 - RNA, 19 nt, Artificial Sequence
  Description of Artificial Sequence: Synthetic oligonucleotide
aaaauggcaaauucuuucc

SEQ ID NO: 3020397 - RNA, 19 nt, Artificial Sequence
  Description of Artificial Sequence: Synthetic oligonucleotide
aguaauaagaguucaagag

SEQ ID NO: 3020398 - RNA, 19 nt, Artificial Sequence
  Description of Artificial Sequence: Synthetic oligonucleotide
ugccuuacuauaaagaagg

SEQ ID NO: 3020399 - RNA, 19 nt, Artificial Sequence
  Description of Artificial Sequence: Synthetic oligonucleotide
ucuucauucuguuagagag

SEQ ID NO: 3020400 - RNA, 19 nt, Artificial Sequence
  Description of Artificial Sequence: Synthetic oligonucleotide
aauuuuauuuaguaauaag

SEQ ID NO: 3020401 - RNA, 19 nt, Artificial Sequence
  Description of Artificial Sequence: Synthetic oligonucleotide
uuauuuaguaauaagaguu

SEQ ID NO: 3020402 - RNA, 19 nt, Artificial Sequence
  Description of Artificial Sequence: Synthetic oligonucleotide
ucuuaaacaaucuucauuc

SEQ ID NO: 3020403 - RNA, 19 nt, Artificial Sequence
  Description of Artificial Sequence: Synthetic oligonucleotide
agagagaugaauuaaauau

SEQ ID NO: 3020404 - RNA, 19 nt, Artificial Sequence
  Description of Artificial Sequence: Synthetic oligonucleotide
uaauccaauuuucagauca

SEQ ID NO: 3020405 - RNA, 19 nt, Artificial Sequence
  Description of Artificial Sequence: Synthetic oligonucleotide
acaaucuucauucuguuag

SEQ ID NO: 3020406 - RNA, 19 nt, Artificial Sequence
  Description of Artificial Sequence: Synthetic oligonucleotide
agaugaauuaaauauccuc

SEQ ID NO: 3020407 - RNA, 19 nt, Artificial Sequence
  Description of Artificial Sequence: Synthetic oligonucleotide
gaguucaagaguuuaaucc

SEQ ID NO: 3020408 - RNA, 19 nt, Artificial Sequence
  Description of Artificial Sequence: Synthetic oligonucleotide
aauggcaaauucuuucccg

SEQ ID NO: 3020409 - RNA, 19 nt, Artificial Sequence
  Description of Artificial Sequence: Synthetic oligonucleotide
uacaauuuuauuuaguaau

SEQ ID NO: 3020410 - RNA, 19 nt, Artificial Sequence
  Description of Artificial Sequence: Synthetic oligonucleotide
agagaugaauuaaauaucc

SEQ ID NO: 3020411 - RNA, 19 nt, Artificial Sequence
  Description of Artificial Sequence: Synthetic oligonucleotide
aaauggcaaauucuuuccc

SEQ ID NO: 3020412 - RNA, 19 nt, Artificial Sequence
  Description of Artificial Sequence: Synthetic oligonucleotide
uuuauuuaguaauaagagu

SEQ ID NO: 3020413 - RNA, 19 nt, Artificial Sequence
  Description of Artificial Sequence: Synthetic oligonucleotide
uuauuuacaauuuuauuua

SEQ ID NO: 3020414 - RNA, 19 nt, Artificial Sequence
  Description of Artificial Sequence: Synthetic oligonucleotide
uuuaauccaauuuucagau

SEQ ID NO: 3020415 - RNA, 19 nt, Artificial Sequence
  Description of Artificial Sequence: Synthetic oligonucleotide
uaaacaaucuucauucugu

SEQ ID NO: 3020416 - RNA, 19 nt, Artificial Sequence
  Description of Artificial Sequence: Synthetic oligonucleotide
aagaguuuaauccaauuuu

SEQ ID NO: 3020417 - RNA, 19 nt, Artificial Sequence
  Description of Artificial Sequence: Synthetic oligonucleotide
uuaguaauaagaguucaag

SEQ ID NO: 3020418 - RNA, 19 nt, Artificial Sequence
  Description of Artificial Sequence: Synthetic oligonucleotide
aaauccagauccaaaguac

SEQ ID NO: 3020419 - RNA, 19 nt, Artificial Sequence
  Description of Artificial Sequence: Synthetic oligonucleotide
uuaaacaaucuucauucug

SEQ ID NO: 3020420 - RNA, 19 nt, Artificial Sequence
  Description of Artificial Sequence: Synthetic oligonucleotide
auuuuauuuaguaauaaga

SEQ ID NO: 3020421 - RNA, 19 nt, Artificial Sequence
  Description of Artificial Sequence: Synthetic oligonucleotide
uacacagucaucauagcca

SEQ ID NO: 3020422 - RNA, 19 nt, Artificial Sequence
  Description of Artificial Sequence: Synthetic oligonucleotide
aguuuaauccaauuuucag

SEQ ID NO: 3020423 - RNA, 19 nt, Artificial Sequence
  Description of Artificial Sequence: Synthetic oligonucleotide
gaaaauggcaaauucuuuc

SEQ ID NO: 3020424 - RNA, 19 nt, Artificial Sequence
  Description of Artificial Sequence: Synthetic oligonucleotide
uacuauaaagaagggagcg

SEQ ID NO: 3020425 - RNA, 19 nt, Artificial Sequence
  Description of Artificial Sequence: Synthetic oligonucleotide
aaguacacagucaucauag

SEQ ID NO: 3020426 - RNA, 19 nt, Artificial Sequence
  Description of Artificial Sequence: Synthetic oligonucleotide
cuuguuuccacugaaaaug

SEQ ID NO: 3020427 - RNA, 19 nt, Artificial Sequence
  Description of Artificial Sequence: Synthetic oligonucleotide
uaucucuuaaacaaucuuc

SEQ ID NO: 3020428 - RNA, 19 nt, Artificial Sequence
  Description of Artificial Sequence: Synthetic oligonucleotide
gaugaauuaaauauccuca

SEQ ID NO: 3020429 - RNA, 19 nt, Artificial Sequence
  Description of Artificial Sequence: Synthetic oligonucleotide
aauuaaauauccucauuuu

SEQ ID NO: 3020430 - RNA, 19 nt, Artificial Sequence
  Description of Artificial Sequence: Synthetic oligonucleotide
agaagggagcggcaaaucc

SEQ ID NO: 3020431 - RNA, 19 nt, Artificial Sequence
  Description of Artificial Sequence: Synthetic oligonucleotide
uauuuacaauuuuauuuag

SEQ ID NO: 3020432 - RNA, 19 nt, Artificial Sequence
  Description of Artificial Sequence: Synthetic oligonucleotide
uuacuauaaagaagggagc

SEQ ID NO: 3020433 - RNA, 19 nt, Artificial Sequence
  Description of Artificial Sequence: Synthetic oligonucleotide
aucauagccaguaaccgcc

SEQ ID NO: 3020434 - RNA, 19 nt, Artificial Sequence
  Description of Artificial Sequence: Synthetic oligonucleotide
aauuuucagaucauaucuc

SEQ ID NO: 3020435 - RNA, 19 nt, Artificial Sequence
  Description of Artificial Sequence: Synthetic oligonucleotide
uauuuaguaauaagaguuc

SEQ ID NO: 3020436 - RNA, 19 nt, Artificial Sequence
  Description of Artificial Sequence: Synthetic oligonucleotide
uuguuuccacugaaaaugg

SEQ ID NO: 3020437 - RNA, 19 nt, Artificial Sequence
  Description of Artificial Sequence: Synthetic oligonucleotide
ucuguuagagagaugaauu

SEQ ID NO: 3020438 - RNA, 19 nt, Artificial Sequence
  Description of Artificial Sequence: Synthetic oligonucleotide
aguucaagaguuuaaucca

SEQ ID NO: 3020439 - RNA, 19 nt, Artificial Sequence
  Description of Artificial Sequence: Synthetic oligonucleotide
uaguaauaagaguucaaga

SEQ ID NO: 3020440 - RNA, 19 nt, Artificial Sequence
  Description of Artificial Sequence: Synthetic oligonucleotide
ucauaucucuuaaacaauc

SEQ ID NO: 3020441 - RNA, 19 nt, Artificial Sequence
  Description of Artificial Sequence: Synthetic oligonucleotide
aacauggcgccgcaggagg

SEQ ID NO: 3020442 - RNA, 19 nt, Artificial Sequence
  Description of Artificial Sequence: Synthetic oligonucleotide
ucaucauagccaguaaccg

SEQ ID NO: 3020443 - RNA, 19 nt, Artificial Sequence
  Description of Artificial Sequence: Synthetic oligonucleotide
guuuaauccaauuuucaga

SEQ ID NO: 3020444 - RNA, 19 nt, Artificial Sequence
  Description of Artificial Sequence: Synthetic oligonucleotide
agaguucaagaguuuaauc

SEQ ID NO: 3020445 - RNA, 19 nt, Artificial Sequence
  Description of Artificial Sequence: Synthetic oligonucleotide
cagaucauaucucuuaaac

SEQ ID NO: 3020446 - RNA, 19 nt, Artificial Sequence
  Description of Artificial Sequence: Synthetic oligonucleotide
agaucauaucucuuaaaca

SEQ ID NO: 3020447 - RNA, 19 nt, Artificial Sequence
  Description of Artificial Sequence: Synthetic oligonucleotide
uuagagagaugaauuaaau

SEQ ID NO: 3020448 - RNA, 19 nt, Artificial Sequence
  Description of Artificial Sequence: Synthetic oligonucleotide
uccaauuuucagaucauau

SEQ ID NO: 3020449 - RNA, 19 nt, Artificial Sequence
  Description of Artificial Sequence: Synthetic oligonucleotide
aggcggaagaaacugcccc

SEQ ID NO: 3020450 - RNA, 19 nt, Artificial Sequence
  Description of Artificial Sequence: Synthetic oligonucleotide
cuauaaagaagggagcggc

SEQ ID NO: 3020451 - RNA, 19 nt, Artificial Sequence
  Description of Artificial Sequence: Synthetic oligonucleotide
agaguuuaauccaauuuuc

SEQ ID NO: 3020452 - RNA, 19 nt, Artificial Sequence
  Description of Artificial Sequence: Synthetic oligonucleotide
auggcaaauucuuucccgg

SEQ ID NO: 3020453 - RNA, 19 nt, Artificial Sequence
  Description of Artificial Sequence: Synthetic oligonucleotide
uuuaguaauaagaguucaa

SEQ ID NO: 3020454 - RNA, 19 nt, Artificial Sequence
  Description of Artificial Sequence: Synthetic oligonucleotide
uuuccacugaaaauggcaa

SEQ ID NO: 3020455 - RNA, 19 nt, Artificial Sequence
  Description of Artificial Sequence: Synthetic oligonucleotide
cauucuguuagagagauga

SEQ ID NO: 3020456 - RNA, 19 nt, Artificial Sequence
  Description of Artificial Sequence: Synthetic oligonucleotide
aagaaacugccccggcaac

SEQ ID NO: 3020457 - RNA, 19 nt, Artificial Sequence
  Description of Artificial Sequence: Synthetic oligonucleotide
ugaaccuccggacacucug

SEQ ID NO: 3020458 - RNA, 19 nt, Artificial Sequence
  Description of Artificial Sequence: Synthetic oligonucleotide
aaaguacacagucaucaua

SEQ ID NO: 3020459 - RNA, 19 nt, Artificial Sequence
  Description of Artificial Sequence: Synthetic oligonucleotide
uuucagaucauaucucuua

SEQ ID NO: 3020460 - RNA, 19 nt, Artificial Sequence
  Description of Artificial Sequence: Synthetic oligonucleotide
aguacacagucaucauagc

SEQ ID NO: 3020461 - RNA, 19 nt, Artificial Sequence
  Description of Artificial Sequence: Synthetic oligonucleotide
gagcggcaaauccagaucc

SEQ ID NO: 3020462 - RNA, 19 nt, Artificial Sequence
  Description of Artificial Sequence: Synthetic oligonucleotide
aaucuucauucuguuagag

SEQ ID NO: 3020463 - RNA, 19 nt, Artificial Sequence
  Description of Artificial Sequence: Synthetic oligonucleotide
acacagucaucauagccag

SEQ ID NO: 3020464 - RNA, 19 nt, Artificial Sequence
  Description of Artificial Sequence: Synthetic oligonucleotide
aguaaccgccacuuguuuc

SEQ ID NO: 3020465 - RNA, 19 nt, Artificial Sequence
  Description of Artificial Sequence: Synthetic oligonucleotide
cucauaguggcugcgacgg

SEQ ID NO: 3020466 - RNA, 19 nt, Artificial Sequence
  Description of Artificial Sequence: Synthetic oligonucleotide
uauaaagaagggagcggca

SEQ ID NO: 3020467 - RNA, 19 nt, Artificial Sequence
  Description of Artificial Sequence: Synthetic oligonucleotide
acuauaaagaagggagcgg

SEQ ID NO: 3020468 - RNA, 19 nt, Artificial Sequence
  Description of Artificial Sequence: Synthetic oligonucleotide
guaaccgccacuuguuucc

SEQ ID NO: 3020469 - RNA, 19 nt, Artificial Sequence
  Description of Artificial Sequence: Synthetic oligonucleotide
auuuaguaauaagaguuca

SEQ ID NO: 3020470 - RNA, 19 nt, Artificial Sequence
  Description of Artificial Sequence: Synthetic oligonucleotide
uaagaguucaagaguuuaa

SEQ ID NO: 3020471 - RNA, 19 nt, Artificial Sequence
  Description of Artificial Sequence: Synthetic oligonucleotide
augaauuaaauauccucau

SEQ ID NO: 3020472 - RNA, 19 nt, Artificial Sequence
  Description of Artificial Sequence: Synthetic oligonucleotide
uucagaucauaucucuuaa

SEQ ID NO: 3020473 - RNA, 19 nt, Artificial Sequence
  Description of Artificial Sequence: Synthetic oligonucleotide
ggcaaauccagauccaaag

SEQ ID NO: 3020474 - RNA, 19 nt, Artificial Sequence
  Description of Artificial Sequence: Synthetic oligonucleotide
aaccuccggacacucuggc

SEQ ID NO: 3020475 - RNA, 19 nt, Artificial Sequence
  Description of Artificial Sequence: Synthetic oligonucleotide
uggugccuuacuauaaaga

SEQ ID NO: 3020476 - RNA, 19 nt, Artificial Sequence
  Description of Artificial Sequence: Synthetic oligonucleotide
aacggacccggcuuucuuc

SEQ ID NO: 3020477 - RNA, 19 nt, Artificial Sequence
  Description of Artificial Sequence: Synthetic oligonucleotide
caauuuucagaucauaucu

SEQ ID NO: 3020478 - RNA, 19 nt, Artificial Sequence
  Description of Artificial Sequence: Synthetic oligonucleotide
uagagagaugaauuaaaua

SEQ ID NO: 3020479 - RNA, 19 nt, Artificial Sequence
  Description of Artificial Sequence: Synthetic oligonucleotide
gucaucauagccaguaacc

SEQ ID NO: 3020480 - RNA, 19 nt, Artificial Sequence
  Description of Artificial Sequence: Synthetic oligonucleotide
aguuuauuuacaauuuuau

SEQ ID NO: 3020481 - RNA, 19 nt, Artificial Sequence
  Description of Artificial Sequence: Synthetic oligonucleotide
caucauagccaguaaccgc

SEQ ID NO: 3020482 - RNA, 19 nt, Artificial Sequence
  Description of Artificial Sequence: Synthetic oligonucleotide
acugaaaauggcaaauucu

SEQ ID NO: 3020483 - RNA, 19 nt, Artificial Sequence
  Description of Artificial Sequence: Synthetic oligonucleotide
gacacucuggcccaacaug

SEQ ID NO: 3020484 - RNA, 19 nt, Artificial Sequence
  Description of Artificial Sequence: Synthetic oligonucleotide
uguuagagagaugaauuaa

SEQ ID NO: 3020485 - RNA, 19 nt, Artificial Sequence
  Description of Artificial Sequence: Synthetic oligonucleotide
gagagaugaauuaaauauc

SEQ ID NO: 3020486 - RNA, 19 nt, Artificial Sequence
  Description of Artificial Sequence: Synthetic oligonucleotide
ugaaaauggcaaauucuuu

SEQ ID NO: 3020487 - RNA, 19 nt, Artificial Sequence
  Description of Artificial Sequence: Synthetic oligonucleotide
auccaaaguacacagucau

SEQ ID NO: 3020488 - RNA, 19 nt, Artificial Sequence
  Description of Artificial Sequence: Synthetic oligonucleotide
aucucuuaaacaaucuuca

SEQ ID NO: 3020489 - RNA, 19 nt, Artificial Sequence
  Description of Artificial Sequence: Synthetic oligonucleotide
accacggagguggugaacc

SEQ ID NO: 3020490 - RNA, 19 nt, Artificial Sequence
  Description of Artificial Sequence: Synthetic oligonucleotide
guaauaagaguucaagagu

SEQ ID NO: 3020491 - RNA, 19 nt, Artificial Sequence
  Description of Artificial Sequence: Synthetic oligonucleotide
aaacaaucuucauucuguu

SEQ ID NO: 3020492 - RNA, 19 nt, Artificial Sequence
  Description of Artificial Sequence: Synthetic oligonucleotide
uucauucuguuagagagau

SEQ ID NO: 3020493 - RNA, 19 nt, Artificial Sequence
  Description of Artificial Sequence: Synthetic oligonucleotide
uuggugccuuacuauaaag

SEQ ID NO: 3020494 - RNA, 19 nt, Artificial Sequence
  Description of Artificial Sequence: Synthetic oligonucleotide
aagaguucaagaguuuaau

SEQ ID NO: 3020495 - RNA, 19 nt, Artificial Sequence
  Description of Artificial Sequence: Synthetic oligonucleotide
uggcaaauucuuucccggg

SEQ ID NO: 3020496 - RNA, 19 nt, Artificial Sequence
  Description of Artificial Sequence: Synthetic oligonucleotide
acuuguuuccacugaaaau

SEQ ID NO: 3020497 - RNA, 19 nt, Artificial Sequence
  Description of Artificial Sequence: Synthetic oligonucleotide
uggaaggcggaagaaacug

SEQ ID NO: 3020498 - RNA, 19 nt, Artificial Sequence
  Description of Artificial Sequence: Synthetic oligonucleotide
aaggcggaagaaacugccc

SEQ ID NO: 3020499 - RNA, 19 nt, Artificial Sequence
  Description of Artificial Sequence: Synthetic oligonucleotide
auaucucuuaaacaaucuu

SEQ ID NO: 3020500 - RNA, 19 nt, Artificial Sequence
  Description of Artificial Sequence: Synthetic oligonucleotide
cacugaaaauggcaaauuc

SEQ ID NO: 3020501 - RNA, 19 nt, Artificial Sequence
  Description of Artificial Sequence: Synthetic oligonucleotide
acucuggcccaacauggcg

SEQ ID NO: 3020502 - RNA, 19 nt, Artificial Sequence
  Description of Artificial Sequence: Synthetic oligonucleotide
gaaggcggaagaaacugcc

SEQ ID NO: 3020503 - RNA, 19 nt, Artificial Sequence
  Description of Artificial Sequence: Synthetic oligonucleotide
aguaguuggugccuuacua

SEQ ID NO: 3020504 - RNA, 19 nt, Artificial Sequence
  Description of Artificial Sequence: Synthetic oligonucleotide
gaaacugccccggcaacgg

SEQ ID NO: 3020505 - RNA, 19 nt, Artificial Sequence
  Description of Artificial Sequence: Synthetic oligonucleotide
agguggugaaccuccggac

SEQ ID NO: 3020506 - RNA, 19 nt, Artificial Sequence
  Description of Artificial Sequence: Synthetic oligonucleotide
uucuguuagagagaugaau

SEQ ID NO: 3020507 - RNA, 19 nt, Artificial Sequence
  Description of Artificial Sequence: Synthetic oligonucleotide
aacaaucuucauucuguua

SEQ ID NO: 3020508 - RNA, 19 nt, Artificial Sequence
  Description of Artificial Sequence: Synthetic oligonucleotide
gaagaaacugccccggcaa

SEQ ID NO: 3020509 - RNA, 19 nt, Artificial Sequence
  Description of Artificial Sequence: Synthetic oligonucleotide
uaaagaagggagcggcaaa

SEQ ID NO: 3020510 - RNA, 19 nt, Artificial Sequence
  Description of Artificial Sequence: Synthetic oligonucleotide
aauucuuucccgggcccuc

SEQ ID NO: 3020511 - RNA, 19 nt, Artificial Sequence
  Description of Artificial Sequence: Synthetic oligonucleotide
agagcuggaaggcggaaga

SEQ ID NO: 3020512 - RNA, 19 nt, Artificial Sequence
  Description of Artificial Sequence: Synthetic oligonucleotide
aagggagcggcaaauccag

SEQ ID NO: 3020513 - RNA, 19 nt, Artificial Sequence
  Description of Artificial Sequence: Synthetic oligonucleotide
aaagaagggagcggcaaau

SEQ ID NO: 3020514 - RNA, 19 nt, Artificial Sequence
  Description of Artificial Sequence: Synthetic oligonucleotide
uuuucagaucauaucucuu

SEQ ID NO: 3020515 - RNA, 19 nt, Artificial Sequence
  Description of Artificial Sequence: Synthetic oligonucleotide
aucuucauucuguuagaga

SEQ ID NO: 3020516 - RNA, 19 nt, Artificial Sequence
  Description of Artificial Sequence: Synthetic oligonucleotide
caaauucuuucccgggccc

SEQ ID NO: 3020517 - RNA, 19 nt, Artificial Sequence
  Description of Artificial Sequence: Synthetic oligonucleotide
gaguuuaauccaauuuuca

SEQ ID NO: 3020518 - RNA, 19 nt, Artificial Sequence
  Description of Artificial Sequence: Synthetic oligonucleotide
guuuccacugaaaauggca

SEQ ID NO: 3020519 - RNA, 19 nt, Artificial Sequence
  Description of Artificial Sequence: Synthetic oligonucleotide
agaaacugccccggcaacg

SEQ ID NO: 3020520 - RNA, 19 nt, Artificial Sequence
  Description of Artificial Sequence: Synthetic oligonucleotide
acggagguggugaaccucc

SEQ ID NO: 3020521 - RNA, 19 nt, Artificial Sequence
  Description of Artificial Sequence: Synthetic oligonucleotide
ucagaucauaucucuuaaa

SEQ ID NO: 3020522 - RNA, 19 nt, Artificial Sequence
  Description of Artificial Sequence: Synthetic oligonucleotide
cucuggcccaacauggcgc

SEQ ID NO: 3020523 - RNA, 19 nt, Artificial Sequence
  Description of Artificial Sequence: Synthetic oligonucleotide
auccagauccaaaguacac

SEQ ID NO: 3020524 - RNA, 19 nt, Artificial Sequence
  Description of Artificial Sequence: Synthetic oligonucleotide
uccacugaaaauggcaaau

SEQ ID NO: 3020525 - RNA, 19 nt, Artificial Sequence
  Description of Artificial Sequence: Synthetic oligonucleotide
gugccuuacuauaaagaag

SEQ ID NO: 3020526 - RNA, 19 nt, Artificial Sequence
  Description of Artificial Sequence: Synthetic oligonucleotide
uuuugaguaguuggugccu

SEQ ID NO: 3020527 - RNA, 19 nt, Artificial Sequence
  Description of Artificial Sequence: Synthetic oligonucleotide
acaauuuuauuuaguaaua

SEQ ID NO: 3020528 - RNA, 19 nt, Artificial Sequence
  Description of Artificial Sequence: Synthetic oligonucleotide
ucucuuaaacaaucuucau

SEQ ID NO: 3020529 - RNA, 19 nt, Artificial Sequence
  Description of Artificial Sequence: Synthetic oligonucleotide
auaguggcugcgacggacc

SEQ ID NO: 3020530 - RNA, 19 nt, Artificial Sequence
  Description of Artificial Sequence: Synthetic oligonucleotide
uuaauccaauuuucagauc

SEQ ID NO: 3020531 - RNA, 19 nt, Artificial Sequence
  Description of Artificial Sequence: Synthetic oligonucleotide
gagguggugaaccuccgga

SEQ ID NO: 3020532 - RNA, 19 nt, Artificial Sequence
  Description of Artificial Sequence: Synthetic oligonucleotide
ggugccuuacuauaaagaa

SEQ ID NO: 3020533 - RNA, 19 nt, Artificial Sequence
  Description of Artificial Sequence: Synthetic oligonucleotide
auaagaguucaagaguuua

SEQ ID NO: 3020534 - RNA, 19 nt, Artificial Sequence
  Description of Artificial Sequence: Synthetic oligonucleotide
guuagagagaugaauuaaa

SEQ ID NO: 3020535 - RNA, 19 nt, Artificial Sequence
  Description of Artificial Sequence: Synthetic oligonucleotide
ucuggcccaacauggcgcc

SEQ ID NO: 3020536 - RNA, 19 nt, Artificial Sequence
  Description of Artificial Sequence: Synthetic oligonucleotide
ccaauuuucagaucauauc

SEQ ID NO: 3020537 - RNA, 19 nt, Artificial Sequence
  Description of Artificial Sequence: Synthetic oligonucleotide
uccucauaguggcugcgac

SEQ ID NO: 3020538 - RNA, 19 nt, Artificial Sequence
  Description of Artificial Sequence: Synthetic oligonucleotide
uaguuggugccuuacuaua

SEQ ID NO: 3020539 - RNA, 19 nt, Artificial Sequence
  Description of Artificial Sequence: Synthetic oligonucleotide
aacugccccggcaacggac

SEQ ID NO: 3020540 - RNA, 19 nt, Artificial Sequence
  Description of Artificial Sequence: Synthetic oligonucleotide
uccaaaguacacagucauc

SEQ ID NO: 3020541 - RNA, 19 nt, Artificial Sequence
  Description of Artificial Sequence: Synthetic oligonucleotide
auagccaguaaccgccacu

SEQ ID NO: 3020542 - RNA, 19 nt, Artificial Sequence
  Description of Artificial Sequence: Synthetic oligonucleotide
acagucaucauagccagua

SEQ ID NO: 3020543 - RNA, 19 nt, Artificial Sequence
  Description of Artificial Sequence: Synthetic oligonucleotide
aauaagaguucaagaguuu

SEQ ID NO: 3020544 - RNA, 19 nt, Artificial Sequence
  Description of Artificial Sequence: Synthetic oligonucleotide
gauccaaaguacacaguca

SEQ ID NO: 3020545 - RNA, 19 nt, Artificial Sequence
  Description of Artificial Sequence: Synthetic oligonucleotide
ucccgggcccuccucauag

SEQ ID NO: 3020546 - RNA, 19 nt, Artificial Sequence
  Description of Artificial Sequence: Synthetic oligonucleotide
auaaagaagggagcggcaa

SEQ ID NO: 3020547 - RNA, 19 nt, Artificial Sequence
  Description of Artificial Sequence: Synthetic oligonucleotide
gcaaauucuuucccgggcc

SEQ ID NO: 3020548 - RNA, 19 nt, Artificial Sequence
  Description of Artificial Sequence: Synthetic oligonucleotide
gaagggagcggcaaaucca

SEQ ID NO: 3020549 - RNA, 19 nt, Artificial Sequence
  Description of Artificial Sequence: Synthetic oligonucleotide
uuccacugaaaauggcaaa

SEQ ID NO: 3020550 - RNA, 19 nt, Artificial Sequence
  Description of Artificial Sequence: Synthetic oligonucleotide
accuccggacacucuggcc

SEQ ID NO: 3020551 - RNA, 19 nt, Artificial Sequence
  Description of Artificial Sequence: Synthetic oligonucleotide
gcugcgacggaccacggag

SEQ ID NO: 3020552 - RNA, 19 nt, Artificial Sequence
  Description of Artificial Sequence: Synthetic oligonucleotide
guggcugcgacggaccacg

SEQ ID NO: 3020553 - RNA, 19 nt, Artificial Sequence
  Description of Artificial Sequence: Synthetic oligonucleotide
ucauagccaguaaccgcca

SEQ ID NO: 3020554 - RNA, 19 nt, Artificial Sequence
  Description of Artificial Sequence: Synthetic oligonucleotide
ggcaaauucuuucccgggc

SEQ ID NO: 3020555 - RNA, 19 nt, Artificial Sequence
  Description of Artificial Sequence: Synthetic oligonucleotide
aaccgccacuuguuuccac

SEQ ID NO: 3020556 - RNA, 19 nt, Artificial Sequence
  Description of Artificial Sequence: Synthetic oligonucleotide
cugaaaauggcaaauucuu

SEQ ID NO: 3020557 - RNA, 19 nt, Artificial Sequence
  Description of Artificial Sequence: Synthetic oligonucleotide
auucuuucccgggcccucc

SEQ ID NO: 3020558 - RNA, 19 nt, Artificial Sequence
  Description of Artificial Sequence: Synthetic oligonucleotide
cauaguggcugcgacggac

SEQ ID NO: 3020559 - RNA, 19 nt, Artificial Sequence
  Description of Artificial Sequence: Synthetic oligonucleotide
guggugaaccuccggacac

SEQ ID NO: 3020560 - RNA, 19 nt, Artificial Sequence
  Description of Artificial Sequence: Synthetic oligonucleotide
aauccaauuuucagaucau

SEQ ID NO: 3020561 - RNA, 19 nt, Artificial Sequence
  Description of Artificial Sequence: Synthetic oligonucleotide
ugaguaguuggugccuuac

SEQ ID NO: 3020562 - RNA, 19 nt, Artificial Sequence
  Description of Artificial Sequence: Synthetic oligonucleotide
cuucauucuguuagagaga

SEQ ID NO: 3020563 - RNA, 19 nt, Artificial Sequence
  Description of Artificial Sequence: Synthetic oligonucleotide
ggcggaagaaacugccccg

SEQ ID NO: 3020564 - RNA, 19 nt, Artificial Sequence
  Description of Artificial Sequence: Synthetic oligonucleotide
cacuuguuuccacugaaaa

SEQ ID NO: 3020565 - RNA, 19 nt, Artificial Sequence
  Description of Artificial Sequence: Synthetic oligonucleotide
ucauucuguuagagagaug

SEQ ID NO: 3020566 - RNA, 19 nt, Artificial Sequence
  Description of Artificial Sequence: Synthetic oligonucleotide
gaaccuccggacacucugg

SEQ ID NO: 3020567 - RNA, 19 nt, Artificial Sequence
  Description of Artificial Sequence: Synthetic oligonucleotide
ccaaaguacacagucauca

SEQ ID NO: 3020568 - RNA, 19 nt, Artificial Sequence
  Description of Artificial Sequence: Synthetic oligonucleotide
cuguuagagagaugaauua

SEQ ID NO: 3020569 - RNA, 19 nt, Artificial Sequence
  Description of Artificial Sequence: Synthetic oligonucleotide
cauaucucuuaaacaaucu

SEQ ID NO: 3020570 - RNA, 19 nt, Artificial Sequence
  Description of Artificial Sequence: Synthetic oligonucleotide
ugcgacggaccacggaggu

SEQ ID NO: 3020571 - RNA, 19 nt, Artificial Sequence
  Description of Artificial Sequence: Synthetic oligonucleotide
accgccacuuguuuccacu

SEQ ID NO: 3020572 - RNA, 19 nt, Artificial Sequence
  Description of Artificial Sequence: Synthetic oligonucleotide
acugccccggcaacggacc

SEQ ID NO: 3020573 - RNA, 19 nt, Artificial Sequence
  Description of Artificial Sequence: Synthetic oligonucleotide
caaucuucauucuguuaga

SEQ ID NO: 3020574 - RNA, 19 nt, Artificial Sequence
  Description of Artificial Sequence: Synthetic oligonucleotide
caagaguuuaauccaauuu

SEQ ID NO: 3020575 - RNA, 19 nt, Artificial Sequence
  Description of Artificial Sequence: Synthetic oligonucleotide
ccuccggacacucuggccc

SEQ ID NO: 3020576 - RNA, 19 nt, Artificial Sequence
  Description of Artificial Sequence: Synthetic oligonucleotide
guuggugccuuacuauaaa

SEQ ID NO: 3020577 - RNA, 19 nt, Artificial Sequence
  Description of Artificial Sequence: Synthetic oligonucleotide
uuugaguaguuggugccuu

SEQ ID NO: 3020578 - RNA, 19 nt, Artificial Sequence
  Description of Artificial Sequence: Synthetic oligonucleotide
cugcgacggaccacggagg

SEQ ID NO: 3020579 - RNA, 19 nt, Artificial Sequence
  Description of Artificial Sequence: Synthetic oligonucleotide
aggcccgcagagcuggaag

SEQ ID NO: 3020580 - RNA, 19 nt, Artificial Sequence
  Description of Artificial Sequence: Synthetic oligonucleotide
gacccggcuuucuucacga

SEQ ID NO: 3020581 - RNA, 19 nt, Artificial Sequence
  Description of Artificial Sequence: Synthetic oligonucleotide
acggacccggcuuucuuca

SEQ ID NO: 3020582 - RNA, 19 nt, Artificial Sequence
  Description of Artificial Sequence: Synthetic oligonucleotide
uaguggcugcgacggacca

SEQ ID NO: 3020583 - RNA, 19 nt, Artificial Sequence
  Description of Artificial Sequence: Synthetic oligonucleotide
aaacugccccggcaacgga

SEQ ID NO: 3020584 - RNA, 19 nt, Artificial Sequence
  Description of Artificial Sequence: Synthetic oligonucleotide
cuuaaacaaucuucauucu

SEQ ID NO: 3020585 - RNA, 19 nt, Artificial Sequence
  Description of Artificial Sequence: Synthetic oligonucleotide
cucuuaaacaaucuucauu

SEQ ID NO: 3020586 - RNA, 19 nt, Artificial Sequence
  Description of Artificial Sequence: Synthetic oligonucleotide
uagccaguaaccgccacuu

SEQ ID NO: 3020587 - RNA, 19 nt, Artificial Sequence
  Description of Artificial Sequence: Synthetic oligonucleotide
gcuuucuucacgaccuugc

SEQ ID NO: 3020588 - RNA, 19 nt, Artificial Sequence
  Description of Artificial Sequence: Synthetic oligonucleotide
gcuggaaggcggaagaaac

SEQ ID NO: 3020589 - RNA, 19 nt, Artificial Sequence
  Description of Artificial Sequence: Synthetic oligonucleotide
gagaugaauuaaauauccu

SEQ ID NO: 3020590 - RNA, 19 nt, Artificial Sequence
  Description of Artificial Sequence: Synthetic oligonucleotide
guaguuggugccuuacuau

SEQ ID NO: 3020591 - RNA, 19 nt, Artificial Sequence
  Description of Artificial Sequence: Synthetic oligonucleotide
ccucauaguggcugcgacg

SEQ ID NO: 3020592 - RNA, 19 nt, Artificial Sequence
  Description of Artificial Sequence: Synthetic oligonucleotide
ggaagaaacugccccggca

SEQ ID NO: 3020593 - RNA, 19 nt, Artificial Sequence
  Description of Artificial Sequence: Synthetic oligonucleotide
ucauaguggcugcgacgga

SEQ ID NO: 3020594 - RNA, 19 nt, Artificial Sequence
  Description of Artificial Sequence: Synthetic oligonucleotide
aguuggugccuuacuauaa

SEQ ID NO: 3020595 - RNA, 19 nt, Artificial Sequence
  Description of Artificial Sequence: Synthetic oligonucleotide
cccaacauggcgccgcagg

SEQ ID NO: 3020596 - RNA, 19 nt, Artificial Sequence
  Description of Artificial Sequence: Synthetic oligonucleotide
caacauggcgccgcaggag

SEQ ID NO: 3020597 - RNA, 19 nt, Artificial Sequence
  Description of Artificial Sequence: Synthetic oligonucleotide
gggcccuccucauaguggc

SEQ ID NO: 3020598 - RNA, 19 nt, Artificial Sequence
  Description of Artificial Sequence: Synthetic oligonucleotide
uugaguaguuggugccuua

SEQ ID NO: 3020599 - RNA, 19 nt, Artificial Sequence
  Description of Artificial Sequence: Synthetic oligonucleotide
cagagcuggaaggcggaag

SEQ ID NO: 3020600 - RNA, 19 nt, Artificial Sequence
  Description of Artificial Sequence: Synthetic oligonucleotide
cauagccaguaaccgccac

SEQ ID NO: 3020601 - RNA, 19 nt, Artificial Sequence
  Description of Artificial Sequence: Synthetic oligonucleotide
aguggcugcgacggaccac

SEQ ID NO: 3020602 - RNA, 19 nt, Artificial Sequence
  Description of Artificial Sequence: Synthetic oligonucleotide
ggacccggcuuucuucacg

SEQ ID NO: 3020603 - RNA, 19 nt, Artificial Sequence
  Description of Artificial Sequence: Synthetic oligonucleotide
gguggugaaccuccggaca

SEQ ID NO: 3020604 - RNA, 19 nt, Artificial Sequence
  Description of Artificial Sequence: Synthetic oligonucleotide
uggcccaacauggcgccgc

SEQ ID NO: 3020605 - RNA, 19 nt, Artificial Sequence
  Description of Artificial Sequence: Synthetic oligonucleotide
auccaauuuucagaucaua

SEQ ID NO: 3020606 - RNA, 19 nt, Artificial Sequence
  Description of Artificial Sequence: Synthetic oligonucleotide
ggagguggugaaccuccgg

SEQ ID NO: 3020607 - RNA, 19 nt, Artificial Sequence
  Description of Artificial Sequence: Synthetic oligonucleotide
ggagcggcaaauccagauc

SEQ ID NO: 3020608 - RNA, 19 nt, Artificial Sequence
  Description of Artificial Sequence: Synthetic oligonucleotide
ggaaggcggaagaaacugc

SEQ ID NO: 3020609 - RNA, 19 nt, Artificial Sequence
  Description of Artificial Sequence: Synthetic oligonucleotide
agcuggaaggcggaagaaa

SEQ ID NO: 3020610 - RNA, 19 nt, Artificial Sequence
  Description of Artificial Sequence: Synthetic oligonucleotide
cuccgcgaggcccgcagag

SEQ ID NO: 3020611 - RNA, 19 nt, Artificial Sequence
  Description of Artificial Sequence: Synthetic oligonucleotide
gccuuacuauaaagaaggg

SEQ ID NO: 3020612 - RNA, 19 nt, Artificial Sequence
  Description of Artificial Sequence: Synthetic oligonucleotide
ccuuacuauaaagaaggga

SEQ ID NO: 3020613 - RNA, 19 nt, Artificial Sequence
  Description of Artificial Sequence: Synthetic oligonucleotide
agccaguaaccgccacuug

SEQ ID NO: 3020614 - RNA, 19 nt, Artificial Sequence
  Description of Artificial Sequence: Synthetic oligonucleotide
acccggcuuucuucacgac

SEQ ID NO: 3020615 - RNA, 19 nt, Artificial Sequence
  Description of Artificial Sequence: Synthetic oligonucleotide
uggugaaccuccggacacu

SEQ ID NO: 3020616 - RNA, 19 nt, Artificial Sequence
  Description of Artificial Sequence: Synthetic oligonucleotide
gaguaguuggugccuuacu

SEQ ID NO: 3020617 - RNA, 19 nt, Artificial Sequence
  Description of Artificial Sequence: Synthetic oligonucleotide
cgacggaccacggaggugg

SEQ ID NO: 3020618 - RNA, 19 nt, Artificial Sequence
  Description of Artificial Sequence: Synthetic oligonucleotide
ucuuucccgggcccuccuc

SEQ ID NO: 3020619 - RNA, 19 nt, Artificial Sequence
  Description of Artificial Sequence: Synthetic oligonucleotide
gcggaagaaacugccccgg

SEQ ID NO: 3020620 - RNA, 19 nt, Artificial Sequence
  Description of Artificial Sequence: Synthetic oligonucleotide
cuuucccgggcccuccuca

SEQ ID NO: 3020621 - RNA, 19 nt, Artificial Sequence
  Description of Artificial Sequence: Synthetic oligonucleotide
uaaccgccacuuguuucca

SEQ ID NO: 3020622 - RNA, 19 nt, Artificial Sequence
  Description of Artificial Sequence: Synthetic oligonucleotide
auucuguuagagagaugaa

SEQ ID NO: 3020623 - RNA, 19 nt, Artificial Sequence
  Description of Artificial Sequence: Synthetic oligonucleotide
cccggcuuucuucacgacc

SEQ ID NO: 3020624 - RNA, 19 nt, Artificial Sequence
  Description of Artificial Sequence: Synthetic oligonucleotide
ccgcagagcuggaaggcgg

SEQ ID NO: 3020625 - RNA, 19 nt, Artificial Sequence
  Description of Artificial Sequence: Synthetic oligonucleotide
ugccccggcaacggacccg

SEQ ID NO: 3020626 - RNA, 19 nt, Artificial Sequence
  Description of Artificial Sequence: Synthetic oligonucleotide
uggcugcgacggaccacgg

SEQ ID NO: 3020627 - RNA, 19 nt, Artificial Sequence
  Description of Artificial Sequence: Synthetic oligonucleotide
uuucccgggcccuccucau

SEQ ID NO: 3020628 - RNA, 19 nt, Artificial Sequence
  Description of Artificial Sequence: Synthetic oligonucleotide
caaaguacacagucaucau

SEQ ID NO: 3020629 - RNA, 19 nt, Artificial Sequence
  Description of Artificial Sequence: Synthetic oligonucleotide
cuuucuucacgaccuugcu

SEQ ID NO: 3020630 - RNA, 19 nt, Artificial Sequence
  Description of Artificial Sequence: Synthetic oligonucleotide
uccgcgaggcccgcagagc

SEQ ID NO: 3020631 - RNA, 19 nt, Artificial Sequence
  Description of Artificial Sequence: Synthetic oligonucleotide
cuggaaggcggaagaaacu

SEQ ID NO: 3020632 - RNA, 19 nt, Artificial Sequence
  Description of Artificial Sequence: Synthetic oligonucleotide
auggcgccgcaggaggcuc

SEQ ID NO: 3020633 - RNA, 19 nt, Artificial Sequence
  Description of Artificial Sequence: Synthetic oligonucleotide
gccaguaaccgccacuugu

SEQ ID NO: 3020634 - RNA, 19 nt, Artificial Sequence
  Description of Artificial Sequence: Synthetic oligonucleotide
ggaggcuccgcgaggcccg

SEQ ID NO: 3020635 - RNA, 19 nt, Artificial Sequence
  Description of Artificial Sequence: Synthetic oligonucleotide
agcggcaaauccagaucca

SEQ ID NO: 3020636 - RNA, 19 nt, Artificial Sequence
  Description of Artificial Sequence: Synthetic oligonucleotide
uggcgccgcaggaggcucc

SEQ ID NO: 3020637 - RNA, 19 nt, Artificial Sequence
  Description of Artificial Sequence: Synthetic oligonucleotide
gcgaggcccgcagagcugg

SEQ ID NO: 3020638 - RNA, 19 nt, Artificial Sequence
  Description of Artificial Sequence: Synthetic oligonucleotide
gccacuuguuuccacugaa

SEQ ID NO: 3020639 - RNA, 19 nt, Artificial Sequence
  Description of Artificial Sequence: Synthetic oligonucleotide
gcaggaggcuccgcgaggc

SEQ ID NO: 3020640 - RNA, 19 nt, Artificial Sequence
  Description of Artificial Sequence: Synthetic oligonucleotide
cacggagguggugaaccuc

SEQ ID NO: 3020641 - RNA, 19 nt, Artificial Sequence
  Description of Artificial Sequence: Synthetic oligonucleotide
cuccggacacucuggccca

SEQ ID NO: 3020642 - RNA, 19 nt, Artificial Sequence
  Description of Artificial Sequence: Synthetic oligonucleotide
cugccccggcaacggaccc

SEQ ID NO: 3020643 - RNA, 19 nt, Artificial Sequence
  Description of Artificial Sequence: Synthetic oligonucleotide
ggugaaccuccggacacuc

SEQ ID NO: 3020644 - RNA, 19 nt, Artificial Sequence
  Description of Artificial Sequence: Synthetic oligonucleotide
gaccacggagguggugaac

SEQ ID NO: 3020645 - RNA, 19 nt, Artificial Sequence
  Description of Artificial Sequence: Synthetic oligonucleotide
gagcuggaaggcggaagaa

SEQ ID NO: 3020646 - RNA, 19 nt, Artificial Sequence
  Description of Artificial Sequence: Synthetic oligonucleotide
cccuccucauaguggcugc

SEQ ID NO: 3020647 - RNA, 19 nt, Artificial Sequence
  Description of Artificial Sequence: Synthetic oligonucleotide
uucccgggcccuccucaua

SEQ ID NO: 3020648 - RNA, 19 nt, Artificial Sequence
  Description of Artificial Sequence: Synthetic oligonucleotide
ggcuccgcgaggcccgcag

SEQ ID NO: 3020649 - RNA, 19 nt, Artificial Sequence
  Description of Artificial Sequence: Synthetic oligonucleotide
gcccuccucauaguggcug

SEQ ID NO: 3020650 - RNA, 19 nt, Artificial Sequence
  Description of Artificial Sequence: Synthetic oligonucleotide
cuccucauaguggcugcga

SEQ ID NO: 3020651 - RNA, 19 nt, Artificial Sequence
  Description of Artificial Sequence: Synthetic oligonucleotide
ccggcuuucuucacgaccu

SEQ ID NO: 3020652 - RNA, 19 nt, Artificial Sequence
  Description of Artificial Sequence: Synthetic oligonucleotide
gggagcggcaaauccagau

SEQ ID NO: 3020653 - RNA, 19 nt, Artificial Sequence
  Description of Artificial Sequence: Synthetic oligonucleotide
cuggcccaacauggcgccg

SEQ ID NO: 3020654 - RNA, 19 nt, Artificial Sequence
  Description of Artificial Sequence: Synthetic oligonucleotide
cccgcagagcuggaaggcg

SEQ ID NO: 3020655 - RNA, 19 nt, Artificial Sequence
  Description of Artificial Sequence: Synthetic oligonucleotide
cgggcccuccucauagugg

SEQ ID NO: 3020656 - RNA, 19 nt, Artificial Sequence
  Description of Artificial Sequence: Synthetic oligonucleotide
ccgccacuuguuuccacug

SEQ ID NO: 3020657 - RNA, 19 nt, Artificial Sequence
  Description of Artificial Sequence: Synthetic oligonucleotide
ccaacauggcgccgcagga

SEQ ID NO: 3020658 - RNA, 19 nt, Artificial Sequence
  Description of Artificial Sequence: Synthetic oligonucleotide
gccccggcaacggacccgg

SEQ ID NO: 3020659 - RNA, 19 nt, Artificial Sequence
  Description of Artificial Sequence: Synthetic oligonucleotide
ccuccucauaguggcugcg

SEQ ID NO: 3020660 - RNA, 19 nt, Artificial Sequence
  Description of Artificial Sequence: Synthetic oligonucleotide
ccacuuguuuccacugaaa

SEQ ID NO: 3020661 - RNA, 19 nt, Artificial Sequence
  Description of Artificial Sequence: Synthetic oligonucleotide
gcccgcagagcuggaaggc

SEQ ID NO: 3020662 - RNA, 19 nt, Artificial Sequence
  Description of Artificial Sequence: Synthetic oligonucleotide
acggaccacggagguggug

SEQ ID NO: 3020663 - RNA, 19 nt, Artificial Sequence
  Description of Artificial Sequence: Synthetic oligonucleotide
agggagcggcaaauccaga

SEQ ID NO: 3020664 - RNA, 19 nt, Artificial Sequence
  Description of Artificial Sequence: Synthetic oligonucleotide
ccgcaggaggcuccgcgag

SEQ ID NO: 3020665 - RNA, 19 nt, Artificial Sequence
  Description of Artificial Sequence: Synthetic oligonucleotide
cggaagaaacugccccggc

SEQ ID NO: 3020666 - RNA, 19 nt, Artificial Sequence
  Description of Artificial Sequence: Synthetic oligonucleotide
ccgggcccuccucauagug

SEQ ID NO: 3020667 - RNA, 19 nt, Artificial Sequence
  Description of Artificial Sequence: Synthetic oligonucleotide
ggacacucuggcccaacau

SEQ ID NO: 3020668 - RNA, 19 nt, Artificial Sequence
  Description of Artificial Sequence: Synthetic oligonucleotide
gaggcuccgcgaggcccgc

SEQ ID NO: 3020669 - RNA, 19 nt, Artificial Sequence
  Description of Artificial Sequence: Synthetic oligonucleotide
uccggacacucuggcccaa

SEQ ID NO: 3020670 - RNA, 19 nt, Artificial Sequence
  Description of Artificial Sequence: Synthetic oligonucleotide
gccgcaggaggcuccgcga

SEQ ID NO: 3020671 - RNA, 19 nt, Artificial Sequence
  Description of Artificial Sequence: Synthetic oligonucleotide
cggagguggugaaccuccg

SEQ ID NO: 3020672 - RNA, 19 nt, Artificial Sequence
  Description of Artificial Sequence: Synthetic oligonucleotide
caguaaccgccacuuguuu

SEQ ID NO: 3020673 - RNA, 19 nt, Artificial Sequence
  Description of Artificial Sequence: Synthetic oligonucleotide
gaggcccgcagagcuggaa

SEQ ID NO: 3020674 - RNA, 19 nt, Artificial Sequence
  Description of Artificial Sequence: Synthetic oligonucleotide
cgccgcaggaggcuccgcg

SEQ ID NO: 3020675 - RNA, 19 nt, Artificial Sequence
  Description of Artificial Sequence: Synthetic oligonucleotide
ggcgccgcaggaggcuccg

SEQ ID NO: 3020676 - RNA, 19 nt, Artificial Sequence
  Description of Artificial Sequence: Synthetic oligonucleotide
cacagucaucauagccagu

SEQ ID NO: 3020677 - RNA, 19 nt, Artificial Sequence
  Description of Artificial Sequence: Synthetic oligonucleotide
ggcugcgacggaccacgga

SEQ ID NO: 3020678 - RNA, 19 nt, Artificial Sequence
  Description of Artificial Sequence: Synthetic oligonucleotide
cgcaggaggcuccgcgagg

SEQ ID NO: 3020679 - RNA, 19 nt, Artificial Sequence
  Description of Artificial Sequence: Synthetic oligonucleotide
ccaguaaccgccacuuguu

SEQ ID NO: 3020680 - RNA, 19 nt, Artificial Sequence
  Description of Artificial Sequence: Synthetic oligonucleotide
cggaccacggaggugguga

SEQ ID NO: 3020681 - RNA, 19 nt, Artificial Sequence
  Description of Artificial Sequence: Synthetic oligonucleotide
cggcaaauccagauccaaa

SEQ ID NO: 3020682 - RNA, 19 nt, Artificial Sequence
  Description of Artificial Sequence: Synthetic oligonucleotide
ggcccaacauggcgccgca

SEQ ID NO: 3020683 - RNA, 19 nt, Artificial Sequence
  Description of Artificial Sequence: Synthetic oligonucleotide
gugaaccuccggacacucu

SEQ ID NO: 3020684 - RNA, 19 nt, Artificial Sequence
  Description of Artificial Sequence: Synthetic oligonucleotide
cauggcgccgcaggaggcu

SEQ ID NO: 3020685 - RNA, 19 nt, Artificial Sequence
  Description of Artificial Sequence: Synthetic oligonucleotide
gcgacggaccacggaggug

SEQ ID NO: 3020686 - RNA, 19 nt, Artificial Sequence
  Description of Artificial Sequence: Synthetic oligonucleotide
ggcaacggacccggcuuuc

SEQ ID NO: 3020687 - RNA, 19 nt, Artificial Sequence
  Description of Artificial Sequence: Synthetic oligonucleotide
caacggacccggcuuucuu

SEQ ID NO: 3020688 - RNA, 19 nt, Artificial Sequence
  Description of Artificial Sequence: Synthetic oligonucleotide
cgcagagcuggaaggcgga

SEQ ID NO: 3020689 - RNA, 19 nt, Artificial Sequence
  Description of Artificial Sequence: Synthetic oligonucleotide
gcagagcuggaaggcggaa

SEQ ID NO: 3020690 - RNA, 19 nt, Artificial Sequence
  Description of Artificial Sequence: Synthetic oligonucleotide
gacggaccacggagguggu

SEQ ID NO: 3020691 - RNA, 19 nt, Artificial Sequence
  Description of Artificial Sequence: Synthetic oligonucleotide
gcccaacauggcgccgcag

SEQ ID NO: 3020692 - RNA, 19 nt, Artificial Sequence
  Description of Artificial Sequence: Synthetic oligonucleotide
gcuccgcgaggcccgcaga

SEQ ID NO: 3020693 - RNA, 19 nt, Artificial Sequence
  Description of Artificial Sequence: Synthetic oligonucleotide
cgccacuuguuuccacuga

SEQ ID NO: 3020694 - RNA, 19 nt, Artificial Sequence
  Description of Artificial Sequence: Synthetic oligonucleotide
ccacugaaaauggcaaauu

SEQ ID NO: 3020695 - RNA, 19 nt, Artificial Sequence
  Description of Artificial Sequence: Synthetic oligonucleotide
cggacacucuggcccaaca

SEQ ID NO: 3020696 - RNA, 19 nt, Artificial Sequence
  Description of Artificial Sequence: Synthetic oligonucleotide
cgcgaggcccgcagagcug

SEQ ID NO: 3020697 - RNA, 19 nt, Artificial Sequence
  Description of Artificial Sequence: Synthetic oligonucleotide
gcaacggacccggcuuucu

SEQ ID NO: 3020698 - RNA, 19 nt, Artificial Sequence
  Description of Artificial Sequence: Synthetic oligonucleotide
ccgcgaggcccgcagagcu

SEQ ID NO: 3020699 - RNA, 19 nt, Artificial Sequence
  Description of Artificial Sequence: Synthetic oligonucleotide
cggacccggcuuucuucac

SEQ ID NO: 3020700 - RNA, 19 nt, Artificial Sequence
  Description of Artificial Sequence: Synthetic oligonucleotide
ccggacacucuggcccaac

SEQ ID NO: 3020701 - RNA, 19 nt, Artificial Sequence
  Description of Artificial Sequence: Synthetic oligonucleotide
aggcuccgcgaggcccgca

SEQ ID NO: 3020702 - RNA, 19 nt, Artificial Sequence
  Description of Artificial Sequence: Synthetic oligonucleotide
ccggcaacggacccggcuu

SEQ ID NO: 3020703 - RNA, 19 nt, Artificial Sequence
  Description of Artificial Sequence: Synthetic oligonucleotide
ccacggagguggugaaccu

SEQ ID NO: 3020704 - RNA, 19 nt, Artificial Sequence
  Description of Artificial Sequence: Synthetic oligonucleotide
cccggcaacggacccggcu

SEQ ID NO: 3020705 - RNA, 19 nt, Artificial Sequence
  Description of Artificial Sequence: Synthetic oligonucleotide
ccccggcaacggacccggc

SEQ ID NO: 3020706 - RNA, 19 nt, Artificial Sequence
  Description of Artificial Sequence: Synthetic oligonucleotide
gcgccgcaggaggcuccgc

SEQ ID NO: 3020707 - RNA, 19 nt, Artificial Sequence
  Description of Artificial Sequence: Synthetic oligonucleotide
cccgggcccuccucauagu

SEQ ID NO: 3020708 - RNA, 19 nt, Artificial Sequence
  Description of Artificial Sequence: Synthetic oligonucleotide
cgaggcccgcagagcugga

SEQ ID NO: 3020709 - RNA, 19 nt, Artificial Sequence
  Description of Artificial Sequence: Synthetic oligonucleotide
cggcaacggacccggcuuu

SEQ ID NO: 3020710 - RNA, 19 nt, Artificial Sequence
  Description of Artificial Sequence: Synthetic oligonucleotide
aaauauaguauuuucauca

SEQ ID NO: 3020711 - RNA, 19 nt, Artificial Sequence
  Description of Artificial Sequence: Synthetic oligonucleotide
uauaguauuuucaucaagg

SEQ ID NO: 3020712 - RNA, 19 nt, Artificial Sequence
  Description of Artificial Sequence: Synthetic oligonucleotide
ugaagauuguuuuaaaagg

SEQ ID NO: 3020713 - RNA, 19 nt, Artificial Sequence
  Description of Artificial Sequence: Synthetic oligonucleotide
uuaaccauaaucuacaaaa

SEQ ID NO: 3020714 - RNA, 19 nt, Artificial Sequence
  Description of Artificial Sequence: Synthetic oligonucleotide
aaaauauaguauuuucauc

SEQ ID NO: 3020715 - RNA, 19 nt, Artificial Sequence
  Description of Artificial Sequence: Synthetic oligonucleotide
aaaagcagagcauaugauc

SEQ ID NO: 3020716 - RNA, 19 nt, Artificial Sequence
  Description of Artificial Sequence: Synthetic oligonucleotide
auaaauaucguacauagau

SEQ ID NO: 3020717 - RNA, 19 nt, Artificial Sequence
  Description of Artificial Sequence: Synthetic oligonucleotide
auggagagaaguuaaaugg

SEQ ID NO: 3020718 - RNA, 19 nt, Artificial Sequence
  Description of Artificial Sequence: Synthetic oligonucleotide
cuauaaauaucguacauag

SEQ ID NO: 3020719 - RNA, 19 nt, Artificial Sequence
  Description of Artificial Sequence: Synthetic oligonucleotide
uugauaaugauacuauugc

SEQ ID NO: 3020720 - RNA, 19 nt, Artificial Sequence
  Description of Artificial Sequence: Synthetic oligonucleotide
cacaucacuauaaauaucg

SEQ ID NO: 3020721 - RNA, 19 nt, Artificial Sequence
  Description of Artificial Sequence: Synthetic oligonucleotide
uaaucuacaaaauauagua

SEQ ID NO: 3020722 - RNA, 19 nt, Artificial Sequence
  Description of Artificial Sequence: Synthetic oligonucleotide
auauuuaucuuacugaacu

SEQ ID NO: 3020723 - RNA, 19 nt, Artificial Sequence
  Description of Artificial Sequence: Synthetic oligonucleotide
aauggagagaaguuaaaug

SEQ ID NO: 3020724 - RNA, 19 nt, Artificial Sequence
  Description of Artificial Sequence: Synthetic oligonucleotide
aucacuauaaauaucguac

SEQ ID NO: 3020725 - RNA, 19 nt, Artificial Sequence
  Description of Artificial Sequence: Synthetic oligonucleotide
uuuagacaaaagcagagca

SEQ ID NO: 3020726 - RNA, 19 nt, Artificial Sequence
  Description of Artificial Sequence: Synthetic oligonucleotide
agauuauuaggguuaaagg

SEQ ID NO: 3020727 - RNA, 19 nt, Artificial Sequence
  Description of Artificial Sequence: Synthetic oligonucleotide
auaguauuuucaucaaggc

SEQ ID NO: 3020728 - RNA, 19 nt, Artificial Sequence
  Description of Artificial Sequence: Synthetic oligonucleotide
auaaugauacuauugcauc

SEQ ID NO: 3020729 - RNA, 19 nt, Artificial Sequence
  Description of Artificial Sequence: Synthetic oligonucleotide
uaaaccagauaucagaagu

SEQ ID NO: 3020730 - RNA, 19 nt, Artificial Sequence
  Description of Artificial Sequence: Synthetic oligonucleotide
aaauaucguacauagauuu

SEQ ID NO: 3020731 - RNA, 19 nt, Artificial Sequence
  Description of Artificial Sequence: Synthetic oligonucleotide
acugaacuaauuuucuccc

SEQ ID NO: 3020732 - RNA, 19 nt, Artificial Sequence
  Description of Artificial Sequence: Synthetic oligonucleotide
gauacuauugcaucuuuag

SEQ ID NO: 3020733 - RNA, 19 nt, Artificial Sequence
  Description of Artificial Sequence: Synthetic oligonucleotide
ucagaaguuaaauggagag

SEQ ID NO: 3020734 - RNA, 19 nt, Artificial Sequence
  Description of Artificial Sequence: Synthetic oligonucleotide
cauaaucuacaaaauauag

SEQ ID NO: 3020735 - RNA, 19 nt, Artificial Sequence
  Description of Artificial Sequence: Synthetic oligonucleotide
aaugcuaaaccagauauca

SEQ ID NO: 3020736 - RNA, 19 nt, Artificial Sequence
  Description of Artificial Sequence: Synthetic oligonucleotide
  modified_base (19)..(19): a, c, u, g, unknown or other
ucguacauagauuucaucn

SEQ ID NO: 3020737 - RNA, 19 nt, Artificial Sequence
  Description of Artificial Sequence: Synthetic oligonucleotide
uuaaauggagcucauauuu

SEQ ID NO: 3020738 - RNA, 19 nt, Artificial Sequence
  Description of Artificial Sequence: Synthetic oligonucleotide
uaauuuucucccuuuaacc

SEQ ID NO: 3020739 - RNA, 19 nt, Artificial Sequence
  Description of Artificial Sequence: Synthetic oligonucleotide
ucauguaaugcuaaaccag

SEQ ID NO: 3020740 - RNA, 19 nt, Artificial Sequence
  Description of Artificial Sequence: Synthetic oligonucleotide
aguauuuucaucaaggccu

SEQ ID NO: 3020741 - RNA, 19 nt, Artificial Sequence
  Description of Artificial Sequence: Synthetic oligonucleotide
cugaagauuguuuuaaaag

SEQ ID NO: 3020742 - RNA, 19 nt, Artificial Sequence
  Description of Artificial Sequence: Synthetic oligonucleotide
uacuauugcaucuuuagac

SEQ ID NO: 3020743 - RNA, 19 nt, Artificial Sequence
  Description of Artificial Sequence: Synthetic oligonucleotide
ucuuuagacaaaagcagag

SEQ ID NO: 3020744 - RNA, 19 nt, Artificial Sequence
  Description of Artificial Sequence: Synthetic oligonucleotide
aaauggcaaaaguaaacug

SEQ ID NO: 3020745 - RNA, 19 nt, Artificial Sequence
  Description of Artificial Sequence: Synthetic oligonucleotide
ugugaaaauggcaaaagua

SEQ ID NO: 3020746 - RNA, 19 nt, Artificial Sequence
  Description of Artificial Sequence: Synthetic oligonucleotide
aaaauggcaaaaguaaacu

SEQ ID NO: 3020747 - RNA, 19 nt, Artificial Sequence
  Description of Artificial Sequence: Synthetic oligonucleotide
ucugaaauugauaaugaua

SEQ ID NO: 3020748 - RNA, 19 nt, Artificial Sequence
  Description of Artificial Sequence: Synthetic oligonucleotide
uacugaacuaauuuucucc

SEQ ID NO: 3020749 - RNA, 19 nt, Artificial Sequence
  Description of Artificial Sequence: Synthetic oligonucleotide
uuaaauggagagaaguuaa

SEQ ID NO: 3020750 - RNA, 19 nt, Artificial Sequence
  Description of Artificial Sequence: Synthetic oligonucleotide
caucuuuagacaaaagcag

SEQ ID NO: 3020751 - RNA, 19 nt, Artificial Sequence
  Description of Artificial Sequence: Synthetic oligonucleotide
uaucagaaguuaaauggag

SEQ ID NO: 3020752 - RNA, 19 nt, Artificial Sequence
  Description of Artificial Sequence: Synthetic oligonucleotide
caucauguaaugcuaaacc

SEQ ID NO: 3020753 - RNA, 19 nt, Artificial Sequence
  Description of Artificial Sequence: Synthetic oligonucleotide
gagauuauuaggguuaaag

SEQ ID NO: 3020754 - RNA, 19 nt, Artificial Sequence
  Description of Artificial Sequence: Synthetic oligonucleotide
uaguauuuucaucaaggcc

SEQ ID NO: 3020755 - RNA, 19 nt, Artificial Sequence
  Description of Artificial Sequence: Synthetic oligonucleotide
ucuuacugaacuaauuuuc

SEQ ID NO: 3020756 - RNA, 19 nt, Artificial Sequence
  Description of Artificial Sequence: Synthetic oligonucleotide
agagaaguuaaauggagcu

SEQ ID NO: 3020757 - RNA, 19 nt, Artificial Sequence
  Description of Artificial Sequence: Synthetic oligonucleotide
auaugaucaacacaucaug

SEQ ID NO: 3020758 - RNA, 19 nt, Artificial Sequence
  Description of Artificial Sequence: Synthetic oligonucleotide
ucauauuuaucuuacugaa

SEQ ID NO: 3020759 - RNA, 19 nt, Artificial Sequence
  Description of Artificial Sequence: Synthetic oligonucleotide
gauuauuaggguuaaaggu

SEQ ID NO: 3020760 - RNA, 19 nt, Artificial Sequence
  Description of Artificial Sequence: Synthetic oligonucleotide
aguuaaauggagcucauau

SEQ ID NO: 3020761 - RNA, 19 nt, Artificial Sequence
  Description of Artificial Sequence: Synthetic oligonucleotide
auuguuuuaaaagguuccc

SEQ ID NO: 3020762 - RNA, 19 nt, Artificial Sequence
  Description of Artificial Sequence: Synthetic oligonucleotide
aauggcaaaaguaaacuga

SEQ ID NO: 3020763 - RNA, 19 nt, Artificial Sequence
  Description of Artificial Sequence: Synthetic oligonucleotide
uguuuuaaaagguuccccu

SEQ ID NO: 3020764 - RNA, 19 nt, Artificial Sequence
  Description of Artificial Sequence: Synthetic oligonucleotide
aaguuaaauggagagaagu

SEQ ID NO: 3020765 - RNA, 19 nt, Artificial Sequence
  Description of Artificial Sequence: Synthetic oligonucleotide
ugcuaaaccagauaucaga

SEQ ID NO: 3020766 - RNA, 19 nt, Artificial Sequence
  Description of Artificial Sequence: Synthetic oligonucleotide
acaaaagcagagcauauga

SEQ ID NO: 3020767 - RNA, 19 nt, Artificial Sequence
  Description of Artificial Sequence: Synthetic oligonucleotide
aucuuucugaaauugauaa

SEQ ID NO: 3020768 - RNA, 19 nt, Artificial Sequence
  Description of Artificial Sequence: Synthetic oligonucleotide
auuauuaggguuaaaggug

SEQ ID NO: 3020769 - RNA, 19 nt, Artificial Sequence
  Description of Artificial Sequence: Synthetic oligonucleotide
uuucugaaauugauaauga

SEQ ID NO: 3020770 - RNA, 19 nt, Artificial Sequence
  Description of Artificial Sequence: Synthetic oligonucleotide
ucucccuuuaaccauaauc

SEQ ID NO: 3020771 - RNA, 19 nt, Artificial Sequence
  Description of Artificial Sequence: Synthetic oligonucleotide
uuuuaaaagguuccccugu

SEQ ID NO: 3020772 - RNA, 19 nt, Artificial Sequence
  Description of Artificial Sequence: Synthetic oligonucleotide
gauuguuuuaaaagguucc

SEQ ID NO: 3020773 - RNA, 19 nt, Artificial Sequence
  Description of Artificial Sequence: Synthetic oligonucleotide
uaugaucaacacaucaugu

SEQ ID NO: 3020774 - RNA, 19 nt, Artificial Sequence
  Description of Artificial Sequence: Synthetic oligonucleotide
ugaucaacacaucauguaa

SEQ ID NO: 3020775 - RNA, 19 nt, Artificial Sequence
  Description of Artificial Sequence: Synthetic oligonucleotide
  modified_base (16)..(16): a, c, u, g, unknown or other
uacauagauuucaucncca

SEQ ID NO: 3020776 - RNA, 19 nt, Artificial Sequence
  Description of Artificial Sequence: Synthetic oligonucleotide
ugaaaauggcaaaaguaaa

SEQ ID NO: 3020777 - RNA, 19 nt, Artificial Sequence
  Description of Artificial Sequence: Synthetic oligonucleotide
aauauaguauuuucaucaa

SEQ ID NO: 3020778 - RNA, 19 nt, Artificial Sequence
  Description of Artificial Sequence: Synthetic oligonucleotide
aguaaacugaguccuuuuc

SEQ ID NO: 3020779 - RNA, 19 nt, Artificial Sequence
  Description of Artificial Sequence: Synthetic oligonucleotide
auugauaaugauacuauug

SEQ ID NO: 3020780 - RNA, 19 nt, Artificial Sequence
  Description of Artificial Sequence: Synthetic oligonucleotide
ugauaaugauacuauugca

SEQ ID NO: 3020781 - RNA, 19 nt, Artificial Sequence
  Description of Artificial Sequence: Synthetic oligonucleotide
uaucuuacugaacuaauuu

SEQ ID NO: 3020782 - RNA, 19 nt, Artificial Sequence
  Description of Artificial Sequence: Synthetic oligonucleotide
cuaauuuucucccuuuaac

SEQ ID NO: 3020783 - RNA, 19 nt, Artificial Sequence
  Description of Artificial Sequence: Synthetic oligonucleotide
aucauguaaugcuaaacca

SEQ ID NO: 3020784 - RNA, 19 nt, Artificial Sequence
  Description of Artificial Sequence: Synthetic oligonucleotide
uauucaguccaucuuucug

SEQ ID NO: 3020785 - RNA, 19 nt, Artificial Sequence
  Description of Artificial Sequence: Synthetic oligonucleotide
acuauugcaucuuuagaca

SEQ ID NO: 3020786 - RNA, 19 nt, Artificial Sequence
  Description of Artificial Sequence: Synthetic oligonucleotide
aaauggagcucauauuuau

SEQ ID NO: 3020787 - RNA, 19 nt, Artificial Sequence
  Description of Artificial Sequence: Synthetic oligonucleotide
aucuacaaaauauaguauu

SEQ ID NO: 3020788 - RNA, 19 nt, Artificial Sequence
  Description of Artificial Sequence: Synthetic oligonucleotide
agaaguuaaauggagagaa

SEQ ID NO: 3020789 - RNA, 19 nt, Artificial Sequence
  Description of Artificial Sequence: Synthetic oligonucleotide
uuuaaaagguuccccugug

SEQ ID NO: 3020790 - RNA, 19 nt, Artificial Sequence
  Description of Artificial Sequence: Synthetic oligonucleotide
aaauugauaaugauacuau

SEQ ID NO: 3020791 - RNA, 19 nt, Artificial Sequence
  Description of Artificial Sequence: Synthetic oligonucleotide
gaaaauggcaaaaguaaac

SEQ ID NO: 3020792 - RNA, 19 nt, Artificial Sequence
  Description of Artificial Sequence: Synthetic oligonucleotide
augacagucuccuauaaaa

SEQ ID NO: 3020793 - RNA, 19 nt, Artificial Sequence
  Description of Artificial Sequence: Synthetic oligonucleotide
uaaugauacuauugcaucu

SEQ ID NO: 3020794 - RNA, 19 nt, Artificial Sequence
  Description of Artificial Sequence: Synthetic oligonucleotide
ucacuauaaauaucguaca

SEQ ID NO: 3020795 - RNA, 19 nt, Artificial Sequence
  Description of Artificial Sequence: Synthetic oligonucleotide
aagcauauucaguccaucu

SEQ ID NO: 3020796 - RNA, 19 nt, Artificial Sequence
  Description of Artificial Sequence: Synthetic oligonucleotide
aaccauaaucuacaaaaua

SEQ ID NO: 3020797 - RNA, 19 nt, Artificial Sequence
  Description of Artificial Sequence: Synthetic oligonucleotide
agauuguuuuaaaagguuc

SEQ ID NO: 3020798 - RNA, 19 nt, Artificial Sequence
  Description of Artificial Sequence: Synthetic oligonucleotide
auggagcucauauuuaucu

SEQ ID NO: 3020799 - RNA, 19 nt, Artificial Sequence
  Description of Artificial Sequence: Synthetic oligonucleotide
agaaguuaaauggagcuca

SEQ ID NO: 3020800 - RNA, 19 nt, Artificial Sequence
  Description of Artificial Sequence: Synthetic oligonucleotide
gaaauugauaaugauacua

SEQ ID NO: 3020801 - RNA, 19 nt, Artificial Sequence
  Description of Artificial Sequence: Synthetic oligonucleotide
auucaguccaucuuucuga

SEQ ID NO: 3020802 - RNA, 19 nt, Artificial Sequence
  Description of Artificial Sequence: Synthetic oligonucleotide
  modified_base (17)..(17): a, c, u, g, unknown or other
guacauagauuucaucncc

SEQ ID NO: 3020803 - RNA, 19 nt, Artificial Sequence
  Description of Artificial Sequence: Synthetic oligonucleotide
aaagguuccccugugaaaa

SEQ ID NO: 3020804 - RNA, 19 nt, Artificial Sequence
  Description of Artificial Sequence: Synthetic oligonucleotide
aauaucguacauagauuuc

SEQ ID NO: 3020805 - RNA, 19 nt, Artificial Sequence
  Description of Artificial Sequence: Synthetic oligonucleotide
uuuaucuuacugaacuaau

SEQ ID NO: 3020806 - RNA, 19 nt, Artificial Sequence
  Description of Artificial Sequence: Synthetic oligonucleotide
uauaaauaucguacauaga

SEQ ID NO: 3020807 - RNA, 19 nt, Artificial Sequence
  Description of Artificial Sequence: Synthetic oligonucleotide
uggagagaaguuaaaugga

SEQ ID NO: 3020808 - RNA, 19 nt, Artificial Sequence
  Description of Artificial Sequence: Synthetic oligonucleotide
cucauauuuaucuuacuga

SEQ ID NO: 3020809 - RNA, 19 nt, Artificial Sequence
  Description of Artificial Sequence: Synthetic oligonucleotide
acaaaauauaguauuuuca

SEQ ID NO: 3020810 - RNA, 19 nt, Artificial Sequence
  Description of Artificial Sequence: Synthetic oligonucleotide
uaaaagguuccccugugaa

SEQ ID NO: 3020811 - RNA, 19 nt, Artificial Sequence
  Description of Artificial Sequence: Synthetic oligonucleotide
uaaauaucguacauagauu

SEQ ID NO: 3020812 - RNA, 19 nt, Artificial Sequence
  Description of Artificial Sequence: Synthetic oligonucleotide
  modified_base (13)..(13): a, c, u, g, unknown or other
auagauuucaucnccaaaa

SEQ ID NO: 3020813 - RNA, 19 nt, Artificial Sequence
  Description of Artificial Sequence: Synthetic oligonucleotide
aucaacacaucauguaaug

SEQ ID NO: 3020814 - RNA, 19 nt, Artificial Sequence
  Description of Artificial Sequence: Synthetic oligonucleotide
uuuaaccauaaucuacaaa

SEQ ID NO: 3020815 - RNA, 19 nt, Artificial Sequence
  Description of Artificial Sequence: Synthetic oligonucleotide
aaagcauauucaguccauc

SEQ ID NO: 3020816 - RNA, 19 nt, Artificial Sequence
  Description of Artificial Sequence: Synthetic oligonucleotide
acaucauguaaugcuaaac

SEQ ID NO: 3020817 - RNA, 19 nt, Artificial Sequence
  Description of Artificial Sequence: Synthetic oligonucleotide
uuagacaaaagcagagcau

SEQ ID NO: 3020818 - RNA, 19 nt, Artificial Sequence
  Description of Artificial Sequence: Synthetic oligonucleotide
ucaucaaggccugagauua

SEQ ID NO: 3020819 - RNA, 19 nt, Artificial Sequence
  Description of Artificial Sequence: Synthetic oligonucleotide
agagcauaugaucaacaca

SEQ ID NO: 3020820 - RNA, 19 nt, Artificial Sequence
  Description of Artificial Sequence: Synthetic oligonucleotide
uguaaugcuaaaccagaua

SEQ ID NO: 3020821 - RNA, 19 nt, Artificial Sequence
  Description of Artificial Sequence: Synthetic oligonucleotide
ggcaaaaguaaacugaguc

SEQ ID NO: 3020822 - RNA, 19 nt, Artificial Sequence
  Description of Artificial Sequence: Synthetic oligonucleotide
gcaaaaguaaacugagucc

SEQ ID NO: 3020823 - RNA, 19 nt, Artificial Sequence
  Description of Artificial Sequence: Synthetic oligonucleotide
ugucugcugcugaagauug

SEQ ID NO: 3020824 - RNA, 19 nt, Artificial Sequence
  Description of Artificial Sequence: Synthetic oligonucleotide
guccuuuucuccaugacag

SEQ ID NO: 3020825 - RNA, 19 nt, Artificial Sequence
  Description of Artificial Sequence: Synthetic oligonucleotide
uuaggguuaaaggugucug

SEQ ID NO: 3020826 - RNA, 19 nt, Artificial Sequence
  Description of Artificial Sequence: Synthetic oligonucleotide
auaaucuacaaaauauagu

SEQ ID NO: 3020827 - RNA, 19 nt, Artificial Sequence
  Description of Artificial Sequence: Synthetic oligonucleotide
ugacagucuccuauaaaac

SEQ ID NO: 3020828 - RNA, 19 nt, Artificial Sequence
  Description of Artificial Sequence: Synthetic oligonucleotide
uccccugugaaaauggcaa

SEQ ID NO: 3020829 - RNA, 19 nt, Artificial Sequence
  Description of Artificial Sequence: Synthetic oligonucleotide
aaauggagagaaguuaaau

SEQ ID NO: 3020830 - RNA, 19 nt, Artificial Sequence
  Description of Artificial Sequence: Synthetic oligonucleotide
uuaaaagguuccccuguga

SEQ ID NO: 3020831 - RNA, 19 nt, Artificial Sequence
  Description of Artificial Sequence: Synthetic oligonucleotide
aggccugagauuauuaggg

SEQ ID NO: 3020832 - RNA, 19 nt, Artificial Sequence
  Description of Artificial Sequence: Synthetic oligonucleotide
auaucguacauagauuuca

SEQ ID NO: 3020833 - RNA, 19 nt, Artificial Sequence
  Description of Artificial Sequence: Synthetic oligonucleotide
aaaagguuccccugugaaa

SEQ ID NO: 3020834 - RNA, 19 nt, Artificial Sequence
  Description of Artificial Sequence: Synthetic oligonucleotide
ugaacuaauuuucucccuu

SEQ ID NO: 3020835 - RNA, 19 nt, Artificial Sequence
  Description of Artificial Sequence: Synthetic oligonucleotide
uuguuuuaaaagguucccc

SEQ ID NO: 3020836 - RNA, 19 nt, Artificial Sequence
  Description of Artificial Sequence: Synthetic oligonucleotide
aauggagcucauauuuauc

SEQ ID NO: 3020837 - RNA, 19 nt, Artificial Sequence
  Description of Artificial Sequence: Synthetic oligonucleotide
guaaugcuaaaccagauau

SEQ ID NO: 3020838 - RNA, 19 nt, Artificial Sequence
  Description of Artificial Sequence: Synthetic oligonucleotide
uuaucuuacugaacuaauu

SEQ ID NO: 3020839 - RNA, 19 nt, Artificial Sequence
  Description of Artificial Sequence: Synthetic oligonucleotide
cuuuagacaaaagcagagc

SEQ ID NO: 3020840 - RNA, 19 nt, Artificial Sequence
  Description of Artificial Sequence: Synthetic oligonucleotide
ugaaauugauaaugauacu

SEQ ID NO: 3020841 - RNA, 19 nt, Artificial Sequence
  Description of Artificial Sequence: Synthetic oligonucleotide
cauguaaugcuaaaccaga

SEQ ID NO: 3020842 - RNA, 19 nt, Artificial Sequence
  Description of Artificial Sequence: Synthetic oligonucleotide
gagagaaguuaaauggagc

SEQ ID NO: 3020843 - RNA, 19 nt, Artificial Sequence
  Description of Artificial Sequence: Synthetic oligonucleotide
aaucuacaaaauauaguau

SEQ ID NO: 3020844 - RNA, 19 nt, Artificial Sequence
  Description of Artificial Sequence: Synthetic oligonucleotide
aguccuuuucuccaugaca

SEQ ID NO: 3020845 - RNA, 19 nt, Artificial Sequence
  Description of Artificial Sequence: Synthetic oligonucleotide
uccaucuuucugaaauuga

SEQ ID NO: 3020846 - RNA, 19 nt, Artificial Sequence
  Description of Artificial Sequence: Synthetic oligonucleotide
auacuauugcaucuuuaga

SEQ ID NO: 3020847 - RNA, 19 nt, Artificial Sequence
  Description of Artificial Sequence: Synthetic oligonucleotide
aucguacauagauuucauc

SEQ ID NO: 3020848 - RNA, 19 nt, Artificial Sequence
  Description of Artificial Sequence: Synthetic oligonucleotide
ucaacacaucauguaaugc

SEQ ID NO: 3020849 - RNA, 19 nt, Artificial Sequence
  Description of Artificial Sequence: Synthetic oligonucleotide
auggcaaaaguaaacugag

SEQ ID NO: 3020850 - RNA, 19 nt, Artificial Sequence
  Description of Artificial Sequence: Synthetic oligonucleotide
gcucauauuuaucuuacug

SEQ ID NO: 3020851 - RNA, 19 nt, Artificial Sequence
  Description of Artificial Sequence: Synthetic oligonucleotide
uaaauggagcucauauuua

SEQ ID NO: 3020852 - RNA, 19 nt, Artificial Sequence
  Description of Artificial Sequence: Synthetic oligonucleotide
auuuaucuuacugaacuaa

SEQ ID NO: 3020853 - RNA, 19 nt, Artificial Sequence
  Description of Artificial Sequence: Synthetic oligonucleotide
uaaugcuaaaccagauauc

SEQ ID NO: 3020854 - RNA, 19 nt, Artificial Sequence
  Description of Artificial Sequence: Synthetic oligonucleotide
gguuaaaggugucugcugc

SEQ ID NO: 3020855 - RNA, 19 nt, Artificial Sequence
  Description of Artificial Sequence: Synthetic oligonucleotide
uaaauggagagaaguuaaa

SEQ ID NO: 3020856 - RNA, 19 nt, Artificial Sequence
  Description of Artificial Sequence: Synthetic oligonucleotide
aucuuacugaacuaauuuu

SEQ ID NO: 3020857 - RNA, 19 nt, Artificial Sequence
  Description of Artificial Sequence: Synthetic oligonucleotide
uuacugaacuaauuuucuc

SEQ ID NO: 3020858 - RNA, 19 nt, Artificial Sequence
  Description of Artificial Sequence: Synthetic oligonucleotide
caaggccugagauuauuag

SEQ ID NO: 3020859 - RNA, 19 nt, Artificial Sequence
  Description of Artificial Sequence: Synthetic oligonucleotide
cucccuuuaaccauaaucu

SEQ ID NO: 3020860 - RNA, 19 nt, Artificial Sequence
  Description of Artificial Sequence: Synthetic oligonucleotide
gauaaugauacuauugcau

SEQ ID NO: 3020861 - RNA, 19 nt, Artificial Sequence
  Description of Artificial Sequence: Synthetic oligonucleotide
uauuuaucuuacugaacua

SEQ ID NO: 3020862 - RNA, 19 nt, Artificial Sequence
  Description of Artificial Sequence: Synthetic oligonucleotide
auaucagaaguuaaaugga

SEQ ID NO: 3020863 - RNA, 19 nt, Artificial Sequence
  Description of Artificial Sequence: Synthetic oligonucleotide
uauugcaucuuuagacaaa

SEQ ID NO: 3020864 - RNA, 19 nt, Artificial Sequence
  Description of Artificial Sequence: Synthetic oligonucleotide
gagcauaugaucaacacau

SEQ ID NO: 3020865 - RNA, 19 nt, Artificial Sequence
  Description of Artificial Sequence: Synthetic oligonucleotide
cagagcauaugaucaacac

SEQ ID NO: 3020866 - RNA, 19 nt, Artificial Sequence
  Description of Artificial Sequence: Synthetic oligonucleotide
aacuaauuuucucccuuua

SEQ ID NO: 3020867 - RNA, 19 nt, Artificial Sequence
  Description of Artificial Sequence: Synthetic oligonucleotide
uucugaaauugauaaugau

SEQ ID NO: 3020868 - RNA, 19 nt, Artificial Sequence
  Description of Artificial Sequence: Synthetic oligonucleotide
uaaaggugucugcugcuga

SEQ ID NO: 3020869 - RNA, 19 nt, Artificial Sequence
  Description of Artificial Sequence: Synthetic oligonucleotide
aagauuguuuuaaaagguu

SEQ ID NO: 3020870 - RNA, 19 nt, Artificial Sequence
  Description of Artificial Sequence: Synthetic oligonucleotide
aaaguaaacugaguccuuu

SEQ ID NO: 3020871 - RNA, 19 nt, Artificial Sequence
  Description of Artificial Sequence: Synthetic oligonucleotide
gaaguuaaauggagagaag

SEQ ID NO: 3020872 - RNA, 19 nt, Artificial Sequence
  Description of Artificial Sequence: Synthetic oligonucleotide
gaagauuguuuuaaaaggu

SEQ ID NO: 3020873 - RNA, 19 nt, Artificial Sequence
  Description of Artificial Sequence: Synthetic oligonucleotide
acuauaaauaucguacaua

SEQ ID NO: 3020874 - RNA, 19 nt, Artificial Sequence
  Description of Artificial Sequence: Synthetic oligonucleotide
gacaaaagcagagcauaug

SEQ ID NO: 3020875 - RNA, 19 nt, Artificial Sequence
  Description of Artificial Sequence: Synthetic oligonucleotide
gcaucuuuagacaaaagca

SEQ ID NO: 3020876 - RNA, 19 nt, Artificial Sequence
  Description of Artificial Sequence: Synthetic oligonucleotide
augaucaacacaucaugua

SEQ ID NO: 3020877 - RNA, 19 nt, Artificial Sequence
  Description of Artificial Sequence: Synthetic oligonucleotide
uuaaaggugucugcugcug

SEQ ID NO: 3020878 - RNA, 19 nt, Artificial Sequence
  Description of Artificial Sequence: Synthetic oligonucleotide
aaaggugucugcugcugaa

SEQ ID NO: 3020879 - RNA, 19 nt, Artificial Sequence
  Description of Artificial Sequence: Synthetic oligonucleotide
uaucguacauagauuucau

SEQ ID NO: 3020880 - RNA, 19 nt, Artificial Sequence
  Description of Artificial Sequence: Synthetic oligonucleotide
guuaaauggagagaaguua

SEQ ID NO: 3020881 - RNA, 19 nt, Artificial Sequence
  Description of Artificial Sequence: Synthetic oligonucleotide
ugauacuauugcaucuuua

SEQ ID NO: 3020882 - RNA, 19 nt, Artificial Sequence
  Description of Artificial Sequence: Synthetic oligonucleotide
aacacaucauguaaugcua

SEQ ID NO: 3020883 - RNA, 19 nt, Artificial Sequence
  Description of Artificial Sequence: Synthetic oligonucleotide
aaguaaacugaguccuuuu

SEQ ID NO: 3020884 - RNA, 19 nt, Artificial Sequence
  Description of Artificial Sequence: Synthetic oligonucleotide
agcagagcauaugaucaac

SEQ ID NO: 3020885 - RNA, 19 nt, Artificial Sequence
  Description of Artificial Sequence: Synthetic oligonucleotide
aucuuuagacaaaagcaga

SEQ ID NO: 3020886 - RNA, 19 nt, Artificial Sequence
  Description of Artificial Sequence: Synthetic oligonucleotide
gacagucuccuauaaaacu

SEQ ID NO: 3020887 - RNA, 19 nt, Artificial Sequence
  Description of Artificial Sequence: Synthetic oligonucleotide
uuccccugugaaaauggca

SEQ ID NO: 3020888 - RNA, 19 nt, Artificial Sequence
  Description of Artificial Sequence: Synthetic oligonucleotide
aaccagauaucagaaguua

SEQ ID NO: 3020889 - RNA, 19 nt, Artificial Sequence
  Description of Artificial Sequence: Synthetic oligonucleotide
auauucaguccaucuuucu

SEQ ID NO: 3020890 - RNA, 19 nt, Artificial Sequence
  Description of Artificial Sequence: Synthetic oligonucleotide
auugcaucuuuagacaaaa

SEQ ID NO: 3020891 - RNA, 19 nt, Artificial Sequence
  Description of Artificial Sequence: Synthetic oligonucleotide
ugaguccuuuucuccauga

SEQ ID NO: 3020892 - RNA, 19 nt, Artificial Sequence
  Description of Artificial Sequence: Synthetic oligonucleotide
ggagagaaguuaaauggag

SEQ ID NO: 3020893 - RNA, 19 nt, Artificial Sequence
  Description of Artificial Sequence: Synthetic oligonucleotide
agcauauucaguccaucuu

SEQ ID NO: 3020894 - RNA, 19 nt, Artificial Sequence
  Description of Artificial Sequence: Synthetic oligonucleotide
uugcaucuuuagacaaaag

SEQ ID NO: 3020895 - RNA, 19 nt, Artificial Sequence
  Description of Artificial Sequence: Synthetic oligonucleotide
caaaaguaaacugaguccu

SEQ ID NO: 3020896 - RNA, 19 nt, Artificial Sequence
  Description of Artificial Sequence: Synthetic oligonucleotide
aagcagagcauaugaucaa

SEQ ID NO: 3020897 - RNA, 19 nt, Artificial Sequence
  Description of Artificial Sequence: Synthetic oligonucleotide
gagcucauauuuaucuuac

SEQ ID NO: 3020898 - RNA, 19 nt, Artificial Sequence
  Description of Artificial Sequence: Synthetic oligonucleotide
aaaagcauauucaguccau

SEQ ID NO: 3020899 - RNA, 19 nt, Artificial Sequence
  Description of Artificial Sequence: Synthetic oligonucleotide
  modified_base (14)..(14): a, c, u, g, unknown or other
cauagauuucaucnccaaa

SEQ ID NO: 3020900 - RNA, 19 nt, Artificial Sequence
  Description of Artificial Sequence: Synthetic oligonucleotide
uucaucaaggccugagauu

SEQ ID NO: 3020901 - RNA, 19 nt, Artificial Sequence
  Description of Artificial Sequence: Synthetic oligonucleotide
gagaaguuaaauggagcuc

SEQ ID NO: 3020902 - RNA, 19 nt, Artificial Sequence
  Description of Artificial Sequence: Synthetic oligonucleotide
auuaggguuaaaggugucu

SEQ ID NO: 3020903 - RNA, 19 nt, Artificial Sequence
  Description of Artificial Sequence: Synthetic oligonucleotide
gcauaugaucaacacauca

SEQ ID NO: 3020904 - RNA, 19 nt, Artificial Sequence
  Description of Artificial Sequence: Synthetic oligonucleotide
  modified_base (15)..(15): a, c, u, g, unknown or other
acauagauuucaucnccaa

SEQ ID NO: 3020905 - RNA, 19 nt, Artificial Sequence
  Description of Artificial Sequence: Synthetic oligonucleotide
uggcaaaaguaaacugagu

SEQ ID NO: 3020906 - RNA, 19 nt, Artificial Sequence
  Description of Artificial Sequence: Synthetic oligonucleotide
aucagaaguuaaauggaga

SEQ ID NO: 3020907 - RNA, 19 nt, Artificial Sequence
  Description of Artificial Sequence: Synthetic oligonucleotide
caacacaucauguaaugcu

SEQ ID NO: 3020908 - RNA, 19 nt, Artificial Sequence
  Description of Artificial Sequence: Synthetic oligonucleotide
uucaguccaucuuucugaa

SEQ ID NO: 3020909 - RNA, 19 nt, Artificial Sequence
  Description of Artificial Sequence: Synthetic oligonucleotide
aaaccagauaucagaaguu

SEQ ID NO: 3020910 - RNA, 19 nt, Artificial Sequence
  Description of Artificial Sequence: Synthetic oligonucleotide
ucaaggccugagauuauua

SEQ ID NO: 3020911 - RNA, 19 nt, Artificial Sequence
  Description of Artificial Sequence: Synthetic oligonucleotide
cuuacugaacuaauuuucu

SEQ ID NO: 3020912 - RNA, 19 nt, Artificial Sequence
  Description of Artificial Sequence: Synthetic oligonucleotide
aguuaaauggagagaaguu

SEQ ID NO: 3020913 - RNA, 19 nt, Artificial Sequence
  Description of Artificial Sequence: Synthetic oligonucleotide
cuauugcaucuuuagacaa

SEQ ID NO: 3020914 - RNA, 19 nt, Artificial Sequence
  Description of Artificial Sequence: Synthetic oligonucleotide
ucccuuuaaccauaaucua

SEQ ID NO: 3020915 - RNA, 19 nt, Artificial Sequence
  Description of Artificial Sequence: Synthetic oligonucleotide
caucacuauaaauaucgua

SEQ ID NO: 3020916 - RNA, 19 nt, Artificial Sequence
  Description of Artificial Sequence: Synthetic oligonucleotide
aaggugucugcugcugaag

SEQ ID NO: 3020917 - RNA, 19 nt, Artificial Sequence
  Description of Artificial Sequence: Synthetic oligonucleotide
ccuuuaaccauaaucuaca

SEQ ID NO: 3020918 - RNA, 19 nt, Artificial Sequence
  Description of Artificial Sequence: Synthetic oligonucleotide
cccuuuaaccauaaucuac

SEQ ID NO: 3020919 - RNA, 19 nt, Artificial Sequence
  Description of Artificial Sequence: Synthetic oligonucleotide
uauuaggguuaaagguguc

SEQ ID NO: 3020920 - RNA, 19 nt, Artificial Sequence
  Description of Artificial Sequence: Synthetic oligonucleotide
guccaucuuucugaaauug

SEQ ID NO: 3020921 - RNA, 19 nt, Artificial Sequence
  Description of Artificial Sequence: Synthetic oligonucleotide
cauaugaucaacacaucau

SEQ ID NO: 3020922 - RNA, 19 nt, Artificial Sequence
  Description of Artificial Sequence: Synthetic oligonucleotide
ugcugaagauuguuuuaaa

SEQ ID NO: 3020923 - RNA, 19 nt, Artificial Sequence
  Description of Artificial Sequence: Synthetic oligonucleotide
uccaugacagucuccuaua

SEQ ID NO: 3020924 - RNA, 19 nt, Artificial Sequence
  Description of Artificial Sequence: Synthetic oligonucleotide
uuucuccaugacagucucc

SEQ ID NO: 3020925 - RNA, 19 nt, Artificial Sequence
  Description of Artificial Sequence: Synthetic oligonucleotide
aggugucugcugcugaaga

SEQ ID NO: 3020926 - RNA, 19 nt, Artificial Sequence
  Description of Artificial Sequence: Synthetic oligonucleotide
acagucuccuauaaaacuu

SEQ ID NO: 3020927 - RNA, 19 nt, Artificial Sequence
  Description of Artificial Sequence: Synthetic oligonucleotide
aaaaguaaacugaguccuu

SEQ ID NO: 3020928 - RNA, 19 nt, Artificial Sequence
  Description of Artificial Sequence: Synthetic oligonucleotide
agcucauauuuaucuuacu

SEQ ID NO: 3020929 - RNA, 19 nt, Artificial Sequence
  Description of Artificial Sequence: Synthetic oligonucleotide
  modified_base (18)..(18): a, c, u, g, unknown or other
cguacauagauuucaucnc

SEQ ID NO: 3020930 - RNA, 19 nt, Artificial Sequence
  Description of Artificial Sequence: Synthetic oligonucleotide
uggagcucauauuuaucuu

SEQ ID NO: 3020931 - RNA, 19 nt, Artificial Sequence
  Description of Artificial Sequence: Synthetic oligonucleotide
gguuccccugugaaaaugg

SEQ ID NO: 3020932 - RNA, 19 nt, Artificial Sequence
  Description of Artificial Sequence: Synthetic oligonucleotide
gaguccuuuucuccaugac

SEQ ID NO: 3020933 - RNA, 19 nt, Artificial Sequence
  Description of Artificial Sequence: Synthetic oligonucleotide
agcauaugaucaacacauc

SEQ ID NO: 3020934 - RNA, 19 nt, Artificial Sequence
  Description of Artificial Sequence: Synthetic oligonucleotide
augauacuauugcaucuuu

SEQ ID NO: 3020935 - RNA, 19 nt, Artificial Sequence
  Description of Artificial Sequence: Synthetic oligonucleotide
caucuuucugaaauugaua

SEQ ID NO: 3020936 - RNA, 19 nt, Artificial Sequence
  Description of Artificial Sequence: Synthetic oligonucleotide
cuuuaaccauaaucuacaa

SEQ ID NO: 3020937 - RNA, 19 nt, Artificial Sequence
  Description of Artificial Sequence: Synthetic oligonucleotide
acugaguccuuuucuccau

SEQ ID NO: 3020938 - RNA, 19 nt, Artificial Sequence
  Description of Artificial Sequence: Synthetic oligonucleotide
aagguuccccugugaaaau

SEQ ID NO: 3020939 - RNA, 19 nt, Artificial Sequence
  Description of Artificial Sequence: Synthetic oligonucleotide
ucugcugcugaagauuguu

SEQ ID NO: 3020940 - RNA, 19 nt, Artificial Sequence
  Description of Artificial Sequence: Synthetic oligonucleotide
gcugaagauuguuuuaaaa

SEQ ID NO: 3020941 - RNA, 19 nt, Artificial Sequence
  Description of Artificial Sequence: Synthetic oligonucleotide
aguccaucuuucugaaauu

SEQ ID NO: 3020942 - RNA, 19 nt, Artificial Sequence
  Description of Artificial Sequence: Synthetic oligonucleotide
augcuaaaccagauaucag

SEQ ID NO: 3020943 - RNA, 19 nt, Artificial Sequence
  Description of Artificial Sequence: Synthetic oligonucleotide
uccuuuucuccaugacagu

SEQ ID NO: 3020944 - RNA, 19 nt, Artificial Sequence
  Description of Artificial Sequence: Synthetic oligonucleotide
guuaaauggagcucauauu

SEQ ID NO: 3020945 - RNA, 19 nt, Artificial Sequence
  Description of Artificial Sequence: Synthetic oligonucleotide
caguccaucuuucugaaau

SEQ ID NO: 3020946 - RNA, 19 nt, Artificial Sequence
  Description of Artificial Sequence: Synthetic oligonucleotide
cagaaguuaaauggagaga

SEQ ID NO: 3020947 - RNA, 19 nt, Artificial Sequence
  Description of Artificial Sequence: Synthetic oligonucleotide
ggagcucauauuuaucuua

SEQ ID NO: 3020948 - RNA, 19 nt, Artificial Sequence
  Description of Artificial Sequence: Synthetic oligonucleotide
gaucaacacaucauguaau

SEQ ID NO: 3020949 - RNA, 19 nt, Artificial Sequence
  Description of Artificial Sequence: Synthetic oligonucleotide
aaguuaaauggagcucaua

SEQ ID NO: 3020950 - RNA, 19 nt, Artificial Sequence
  Description of Artificial Sequence: Synthetic oligonucleotide
acaucacuauaaauaucgu

SEQ ID NO: 3020951 - RNA, 19 nt, Artificial Sequence
  Description of Artificial Sequence: Synthetic oligonucleotide
ccugugaaaauggcaaaag

SEQ ID NO: 3020952 - RNA, 19 nt, Artificial Sequence
  Description of Artificial Sequence: Synthetic oligonucleotide
ggguuaaaggugucugcug

SEQ ID NO: 3020953 - RNA, 19 nt, Artificial Sequence
  Description of Artificial Sequence: Synthetic oligonucleotide
accagauaucagaaguuaa

SEQ ID NO: 3020954 - RNA, 19 nt, Artificial Sequence
  Description of Artificial Sequence: Synthetic oligonucleotide
auguaaugcuaaaccagau

SEQ ID NO: 3020955 - RNA, 19 nt, Artificial Sequence
  Description of Artificial Sequence: Synthetic oligonucleotide
gcuaaaccagauaucagaa

SEQ ID NO: 3020956 - RNA, 19 nt, Artificial Sequence
  Description of Artificial Sequence: Synthetic oligonucleotide
ccauaaucuacaaaauaua

SEQ ID NO: 3020957 - RNA, 19 nt, Artificial Sequence
  Description of Artificial Sequence: Synthetic oligonucleotide
cugaguccuuuucuccaug

SEQ ID NO: 3020958 - RNA, 19 nt, Artificial Sequence
  Description of Artificial Sequence: Synthetic oligonucleotide
guuaaaggugucugcugcu

SEQ ID NO: 3020959 - RNA, 19 nt, Artificial Sequence
  Description of Artificial Sequence: Synthetic oligonucleotide
cacaucauguaaugcuaaa

SEQ ID NO: 3020960 - RNA, 19 nt, Artificial Sequence
  Description of Artificial Sequence: Synthetic oligonucleotide
ccugagauuauuaggguua

SEQ ID NO: 3020961 - RNA, 19 nt, Artificial Sequence
  Description of Artificial Sequence: Synthetic oligonucleotide
agguuccccugugaaaaug

SEQ ID NO: 3020962 - RNA, 19 nt, Artificial Sequence
  Description of Artificial Sequence: Synthetic oligonucleotide
guuccccugugaaaauggc

SEQ ID NO: 3020963 - RNA, 19 nt, Artificial Sequence
  Description of Artificial Sequence: Synthetic oligonucleotide
ccagauaucagaaguuaaa

SEQ ID NO: 3020964 - RNA, 19 nt, Artificial Sequence
  Description of Artificial Sequence: Synthetic oligonucleotide
acacaucauguaaugcuaa

SEQ ID NO: 3020965 - RNA, 19 nt, Artificial Sequence
  Description of Artificial Sequence: Synthetic oligonucleotide
caugacagucuccuauaaa

SEQ ID NO: 3020966 - RNA, 19 nt, Artificial Sequence
  Description of Artificial Sequence: Synthetic oligonucleotide
ucaguccaucuuucugaaa

SEQ ID NO: 3020967 - RNA, 19 nt, Artificial Sequence
  Description of Artificial Sequence: Synthetic oligonucleotide
ugagauuauuaggguuaaa

SEQ ID NO: 3020968 - RNA, 19 nt, Artificial Sequence
  Description of Artificial Sequence: Synthetic oligonucleotide
cacuauaaauaucguacau

SEQ ID NO: 3020969 - RNA, 19 nt, Artificial Sequence
  Description of Artificial Sequence: Synthetic oligonucleotide
cugcugaagauuguuuuaa

SEQ ID NO: 3020970 - RNA, 19 nt, Artificial Sequence
  Description of Artificial Sequence: Synthetic oligonucleotide
caaaagcagagcauaugau

SEQ ID NO: 3020971 - RNA, 19 nt, Artificial Sequence
  Description of Artificial Sequence: Synthetic oligonucleotide
ccuuuucuccaugacaguc

SEQ ID NO: 3020972 - RNA, 19 nt, Artificial Sequence
  Description of Artificial Sequence: Synthetic oligonucleotide
cagauaucagaaguuaaau

SEQ ID NO: 3020973 - RNA, 19 nt, Artificial Sequence
  Description of Artificial Sequence: Synthetic oligonucleotide
aucaaggccugagauuauu

SEQ ID NO: 3020974 - RNA, 19 nt, Artificial Sequence
  Description of Artificial Sequence: Synthetic oligonucleotide
cugaacuaauuuucucccu

SEQ ID NO: 3020975 - RNA, 19 nt, Artificial Sequence
  Description of Artificial Sequence: Synthetic oligonucleotide
ucuccaugacagucuccua

SEQ ID NO: 3020976 - RNA, 19 nt, Artificial Sequence
  Description of Artificial Sequence: Synthetic oligonucleotide
cugagauuauuaggguuaa

SEQ ID NO: 3020977 - RNA, 19 nt, Artificial Sequence
  Description of Artificial Sequence: Synthetic oligonucleotide
cuccaugacagucuccuau

SEQ ID NO: 3020978 - RNA, 19 nt, Artificial Sequence
  Description of Artificial Sequence: Synthetic oligonucleotide
agucuccuauaaaacuuuu

SEQ ID NO: 3020979 - RNA, 19 nt, Artificial Sequence
  Description of Artificial Sequence: Synthetic oligonucleotide
gcagagcauaugaucaaca

SEQ ID NO: 3020980 - RNA, 19 nt, Artificial Sequence
  Description of Artificial Sequence: Synthetic oligonucleotide
gcugcugaagauuguuuua

SEQ ID NO: 3020981 - RNA, 19 nt, Artificial Sequence
  Description of Artificial Sequence: Synthetic oligonucleotide
gaaguuaaauggagcucau

SEQ ID NO: 3020982 - RNA, 19 nt, Artificial Sequence
  Description of Artificial Sequence: Synthetic oligonucleotide
cagucuccuauaaaacuuu

SEQ ID NO: 3020983 - RNA, 19 nt, Artificial Sequence
  Description of Artificial Sequence: Synthetic oligonucleotide
ccaucuuucugaaauugau

SEQ ID NO: 3020984 - RNA, 19 nt, Artificial Sequence
  Description of Artificial Sequence: Synthetic oligonucleotide
gugucugcugcugaagauu

SEQ ID NO: 3020985 - RNA, 19 nt, Artificial Sequence
  Description of Artificial Sequence: Synthetic oligonucleotide
ggccugagauuauuagggu

SEQ ID NO: 3020986 - RNA, 19 nt, Artificial Sequence
  Description of Artificial Sequence: Synthetic oligonucleotide
gccugagauuauuaggguu

SEQ ID NO: 3020987 - RNA, 19 nt, Artificial Sequence
  Description of Artificial Sequence: Synthetic oligonucleotide
ggugucugcugcugaagau

SEQ ID NO: 3020988 - RNA, 19 nt, Artificial Sequence
  Description of Artificial Sequence: Synthetic oligonucleotide
ccaugacagucuccuauaa

SEQ ID NO: 3020989 - RNA, 19 nt, Artificial Sequence
  Description of Artificial Sequence: Synthetic oligonucleotide
cccugugaaaauggcaaaa

SEQ ID NO: 3020990 - RNA, 19 nt, Artificial Sequence
  Description of Artificial Sequence: Synthetic oligonucleotide
caucaaggccugagauuau

SEQ ID NO: 3020991 - RNA, 19 nt, Artificial Sequence
  Description of Artificial Sequence: Synthetic oligonucleotide
ccccugugaaaauggcaaa

SEQ ID NO: 3020992 - RNA, 19 nt, Artificial Sequence
  Description of Artificial Sequence: Synthetic oligonucleotide
gucugcugcugaagauugu

SEQ ID NO: 3020993 - RNA, 19 nt, Artificial Sequence
  Description of Artificial Sequence: Synthetic oligonucleotide
aauuuuguacuucucaccg

SEQ ID NO: 3020994 - RNA, 19 nt, Artificial Sequence
  Description of Artificial Sequence: Synthetic oligonucleotide
aaauuuauuagaguuuccc

SEQ ID NO: 3020995 - RNA, 19 nt, Artificial Sequence
  Description of Artificial Sequence: Synthetic oligonucleotide
gauaaaguagccuagccag

SEQ ID NO: 3020996 - RNA, 19 nt, Artificial Sequence
  Description of Artificial Sequence: Synthetic oligonucleotide
aaauguuagcauuugcuuc

SEQ ID NO: 3020997 - RNA, 19 nt, Artificial Sequence
  Description of Artificial Sequence: Synthetic oligonucleotide
ugaagguacauauaaauug

SEQ ID NO: 3020998 - RNA, 19 nt, Artificial Sequence
  Description of Artificial Sequence: Synthetic oligonucleotide
uuuucguuaaauuuauuag

SEQ ID NO: 3020999 - RNA, 19 nt, Artificial Sequence
  Description of Artificial Sequence: Synthetic oligonucleotide
uuucuuguuaaaauguuag

SEQ ID NO: 3021000 - RNA, 19 nt, Artificial Sequence
  Description of Artificial Sequence: Synthetic oligonucleotide
auuugcuucaaauuccagc

SEQ ID NO: 3021001 - RNA, 19 nt, Artificial Sequence
  Description of Artificial Sequence: Synthetic oligonucleotide
uucguuaaauuuauuagag

SEQ ID NO: 3021002 - RNA, 19 nt, Artificial Sequence
  Description of Artificial Sequence: Synthetic oligonucleotide
aaguagccuagccagaagc

SEQ ID NO: 3021003 - RNA, 19 nt, Artificial Sequence
  Description of Artificial Sequence: Synthetic oligonucleotide
uuaagaacuggaauucugg

SEQ ID NO: 3021004 - RNA, 19 nt, Artificial Sequence
  Description of Artificial Sequence: Synthetic oligonucleotide
uauugcucagccuuaaagg

SEQ ID NO: 3021005 - RNA, 19 nt, Artificial Sequence
  Description of Artificial Sequence: Synthetic oligonucleotide
auuauuaccucccugccuc

SEQ ID NO: 3021006 - RNA, 19 nt, Artificial Sequence
  Description of Artificial Sequence: Synthetic oligonucleotide
agaauuuuguacuucucac

SEQ ID NO: 3021007 - RNA, 19 nt, Artificial Sequence
  Description of Artificial Sequence: Synthetic oligonucleotide
uaaaauguuagcauuugcu

SEQ ID NO: 3021008 - RNA, 19 nt, Artificial Sequence
  Description of Artificial Sequence: Synthetic oligonucleotide
uuugcuucaaauuccagca

SEQ ID NO: 3021009 - RNA, 19 nt, Artificial Sequence
  Description of Artificial Sequence: Synthetic oligonucleotide
ucugauguuucucuuacag

SEQ ID NO: 3021010 - RNA, 19 nt, Artificial Sequence
  Description of Artificial Sequence: Synthetic oligonucleotide
uauaaauuggcgauucccc

SEQ ID NO: 3021011 - RNA, 19 nt, Artificial Sequence
  Description of Artificial Sequence: Synthetic oligonucleotide
aauguuagcauuugcuuca

SEQ ID NO: 3021012 - RNA, 19 nt, Artificial Sequence
  Description of Artificial Sequence: Synthetic oligonucleotide
uaaaggguagguaugauaa

SEQ ID NO: 3021013 - RNA, 19 nt, Artificial Sequence
  Description of Artificial Sequence: Synthetic oligonucleotide
auauaaauuggcgauuccc

SEQ ID NO: 3021014 - RNA, 19 nt, Artificial Sequence
  Description of Artificial Sequence: Synthetic oligonucleotide
aagagauugauuauuaccu

SEQ ID NO: 3021015 - RNA, 19 nt, Artificial Sequence
  Description of Artificial Sequence: Synthetic oligonucleotide
agaacuggaauucugguug

SEQ ID NO: 3021016 - RNA, 19 nt, Artificial Sequence
  Description of Artificial Sequence: Synthetic oligonucleotide
uuauugcucagccuuaaag

SEQ ID NO: 3021017 - RNA, 19 nt, Artificial Sequence
  Description of Artificial Sequence: Synthetic oligonucleotide
uugauuauuaccucccugc

SEQ ID NO: 3021018 - RNA, 19 nt, Artificial Sequence
  Description of Artificial Sequence: Synthetic oligonucleotide
uuucguuaaauuuauuaga

SEQ ID NO: 3021019 - RNA, 19 nt, Artificial Sequence
  Description of Artificial Sequence: Synthetic oligonucleotide
uuacagauguccucuaagg

SEQ ID NO: 3021020 - RNA, 19 nt, Artificial Sequence
  Description of Artificial Sequence: Synthetic oligonucleotide
gaagguacauauaaauugg

SEQ ID NO: 3021021 - RNA, 19 nt, Artificial Sequence
  Description of Artificial Sequence: Synthetic oligonucleotide
guagguaugauaaaguagc

SEQ ID NO: 3021022 - RNA, 19 nt, Artificial Sequence
  Description of Artificial Sequence: Synthetic oligonucleotide
auugcucagccuuaaaggg

SEQ ID NO: 3021023 - RNA, 19 nt, Artificial Sequence
  Description of Artificial Sequence: Synthetic oligonucleotide
caagagauugauuauuacc

SEQ ID NO: 3021024 - RNA, 19 nt, Artificial Sequence
  Description of Artificial Sequence: Synthetic oligonucleotide
ucaucucugauauuggacc

SEQ ID NO: 3021025 - RNA, 19 nt, Artificial Sequence
  Description of Artificial Sequence: Synthetic oligonucleotide
ucuuguuaaaauguuagca

SEQ ID NO: 3021026 - RNA, 19 nt, Artificial Sequence
  Description of Artificial Sequence: Synthetic oligonucleotide
aauucugguugcaugauuc

SEQ ID NO: 3021027 - RNA, 19 nt, Artificial Sequence
  Description of Artificial Sequence: Synthetic oligonucleotide
uauauggaguuccauagcu

SEQ ID NO: 3021028 - RNA, 19 nt, Artificial Sequence
  Description of Artificial Sequence: Synthetic oligonucleotide
uguccucuaaggauaaagg

SEQ ID NO: 3021029 - RNA, 19 nt, Artificial Sequence
  Description of Artificial Sequence: Synthetic oligonucleotide
aaaauguuagcauuugcuu

SEQ ID NO: 3021030 - RNA, 19 nt, Artificial Sequence
  Description of Artificial Sequence: Synthetic oligonucleotide
ucaagguagaauuuuguac

SEQ ID NO: 3021031 - RNA, 19 nt, Artificial Sequence
  Description of Artificial Sequence: Synthetic oligonucleotide
augauaaaguagccuagcc

SEQ ID NO: 3021032 - RNA, 19 nt, Artificial Sequence
  Description of Artificial Sequence: Synthetic oligonucleotide
aaaacauuucugauguuuc

SEQ ID NO: 3021033 - RNA, 19 nt, Artificial Sequence
  Description of Artificial Sequence: Synthetic oligonucleotide
uuaaauuuauuagaguuuc

SEQ ID NO: 3021034 - RNA, 19 nt, Artificial Sequence
  Description of Artificial Sequence: Synthetic oligonucleotide
ugauguuucucuuacagau

SEQ ID NO: 3021035 - RNA, 19 nt, Artificial Sequence
  Description of Artificial Sequence: Synthetic oligonucleotide
uagaauuuuguacuucuca

SEQ ID NO: 3021036 - RNA, 19 nt, Artificial Sequence
  Description of Artificial Sequence: Synthetic oligonucleotide
ugauaaaguagccuagcca

SEQ ID NO: 3021037 - RNA, 19 nt, Artificial Sequence
  Description of Artificial Sequence: Synthetic oligonucleotide
uuaaaauguuagcauuugc

SEQ ID NO: 3021038 - RNA, 19 nt, Artificial Sequence
  Description of Artificial Sequence: Synthetic oligonucleotide
gauuccugcagguagaauc

SEQ ID NO: 3021039 - RNA, 19 nt, Artificial Sequence
  Description of Artificial Sequence: Synthetic oligonucleotide
uccagcaagagauugauua

SEQ ID NO: 3021040 - RNA, 19 nt, Artificial Sequence
  Description of Artificial Sequence: Synthetic oligonucleotide
uccaaaacaugccuugugc

SEQ ID NO: 3021041 - RNA, 19 nt, Artificial Sequence
  Description of Artificial Sequence: Synthetic oligonucleotide
gaauuuuguacuucucacc

SEQ ID NO: 3021042 - RNA, 19 nt, Artificial Sequence
  Description of Artificial Sequence: Synthetic oligonucleotide
gagauugauuauuaccucc

SEQ ID NO: 3021043 - RNA, 19 nt, Artificial Sequence
  Description of Artificial Sequence: Synthetic oligonucleotide
uagaguuucccuuaagaac

SEQ ID NO: 3021044 - RNA, 19 nt, Artificial Sequence
  Description of Artificial Sequence: Synthetic oligonucleotide
aguuccauagcuucccagg

SEQ ID NO: 3021045 - RNA, 19 nt, Artificial Sequence
  Description of Artificial Sequence: Synthetic oligonucleotide
uucaaauuccagcaagaga

SEQ ID NO: 3021046 - RNA, 19 nt, Artificial Sequence
  Description of Artificial Sequence: Synthetic oligonucleotide
agcauuucaucucugauau

SEQ ID NO: 3021047 - RNA, 19 nt, Artificial Sequence
  Description of Artificial Sequence: Synthetic oligonucleotide
aaggguagguaugauaaag

SEQ ID NO: 3021048 - RNA, 19 nt, Artificial Sequence
  Description of Artificial Sequence: Synthetic oligonucleotide
cauuucaucucugauauug

SEQ ID NO: 3021049 - RNA, 19 nt, Artificial Sequence
  Description of Artificial Sequence: Synthetic oligonucleotide
uuagaguuucccuuaagaa

SEQ ID NO: 3021050 - RNA, 19 nt, Artificial Sequence
  Description of Artificial Sequence: Synthetic oligonucleotide
ucugauauuggaccugcgc

SEQ ID NO: 3021051 - RNA, 19 nt, Artificial Sequence
  Description of Artificial Sequence: Synthetic oligonucleotide
aagguacauauaaauuggc

SEQ ID NO: 3021052 - RNA, 19 nt, Artificial Sequence
  Description of Artificial Sequence: Synthetic oligonucleotide
ucaccgaaaacauuucuga

SEQ ID NO: 3021053 - RNA, 19 nt, Artificial Sequence
  Description of Artificial Sequence: Synthetic oligonucleotide
agauugauuauuaccuccc

SEQ ID NO: 3021054 - RNA, 19 nt, Artificial Sequence
  Description of Artificial Sequence: Synthetic oligonucleotide
auuuauuagaguuucccuu

SEQ ID NO: 3021055 - RNA, 19 nt, Artificial Sequence
  Description of Artificial Sequence: Synthetic oligonucleotide
uccauagcuucccagggag

SEQ ID NO: 3021056 - RNA, 19 nt, Artificial Sequence
  Description of Artificial Sequence: Synthetic oligonucleotide
agagauugauuauuaccuc

SEQ ID NO: 3021057 - RNA, 19 nt, Artificial Sequence
  Description of Artificial Sequence: Synthetic oligonucleotide
uuuuguacuucucaccgaa

SEQ ID NO: 3021058 - RNA, 19 nt, Artificial Sequence
  Description of Artificial Sequence: Synthetic oligonucleotide
uguuaaaauguuagcauuu

SEQ ID NO: 3021059 - RNA, 19 nt, Artificial Sequence
  Description of Artificial Sequence: Synthetic oligonucleotide
uuucugauguuucucuuac

SEQ ID NO: 3021060 - RNA, 19 nt, Artificial Sequence
  Description of Artificial Sequence: Synthetic oligonucleotide
aaacauuucugauguuucu

SEQ ID NO: 3021061 - RNA, 19 nt, Artificial Sequence
  Description of Artificial Sequence: Synthetic oligonucleotide
uuuauuagaguuucccuua

SEQ ID NO: 3021062 - RNA, 19 nt, Artificial Sequence
  Description of Artificial Sequence: Synthetic oligonucleotide
auguuucucuuacagaugu

SEQ ID NO: 3021063 - RNA, 19 nt, Artificial Sequence
  Description of Artificial Sequence: Synthetic oligonucleotide
aaacaugccuugugcagag

SEQ ID NO: 3021064 - RNA, 19 nt, Artificial Sequence
  Description of Artificial Sequence: Synthetic oligonucleotide
acauauaaauuggcgauuc

SEQ ID NO: 3021065 - RNA, 19 nt, Artificial Sequence
  Description of Artificial Sequence: Synthetic oligonucleotide
accgaaaacauuucugaug

SEQ ID NO: 3021066 - RNA, 19 nt, Artificial Sequence
  Description of Artificial Sequence: Synthetic oligonucleotide
uaaauuuauuagaguuucc

SEQ ID NO: 3021067 - RNA, 19 nt, Artificial Sequence
  Description of Artificial Sequence: Synthetic oligonucleotide
aaauuccagcaagagauug

SEQ ID NO: 3021068 - RNA, 19 nt, Artificial Sequence
  Description of Artificial Sequence: Synthetic oligonucleotide
agaguuucccuuaagaacu

SEQ ID NO: 3021069 - RNA, 19 nt, Artificial Sequence
  Description of Artificial Sequence: Synthetic oligonucleotide
ugauauuggaccugcgcug

SEQ ID NO: 3021070 - RNA, 19 nt, Artificial Sequence
  Description of Artificial Sequence: Synthetic oligonucleotide
ugauuauuaccucccugcc

SEQ ID NO: 3021071 - RNA, 19 nt, Artificial Sequence
  Description of Artificial Sequence: Synthetic oligonucleotide
uauggaguuccauagcuuc

SEQ ID NO: 3021072 - RNA, 19 nt, Artificial Sequence
  Description of Artificial Sequence: Synthetic oligonucleotide
auucugguugcaugauucc

SEQ ID NO: 3021073 - RNA, 19 nt, Artificial Sequence
  Description of Artificial Sequence: Synthetic oligonucleotide
cuuaagaacuggaauucug

SEQ ID NO: 3021074 - RNA, 19 nt, Artificial Sequence
  Description of Artificial Sequence: Synthetic oligonucleotide
ucugguugcaugauuccug

SEQ ID NO: 3021075 - RNA, 19 nt, Artificial Sequence
  Description of Artificial Sequence: Synthetic oligonucleotide
guugcaugauuccugcagg

SEQ ID NO: 3021076 - RNA, 19 nt, Artificial Sequence
  Description of Artificial Sequence: Synthetic oligonucleotide
uucuuguuaaaauguuagc

SEQ ID NO: 3021077 - RNA, 19 nt, Artificial Sequence
  Description of Artificial Sequence: Synthetic oligonucleotide
auuggaccugcgcugaagg

SEQ ID NO: 3021078 - RNA, 19 nt, Artificial Sequence
  Description of Artificial Sequence: Synthetic oligonucleotide
caaaacaugccuugugcag

SEQ ID NO: 3021079 - RNA, 19 nt, Artificial Sequence
  Description of Artificial Sequence: Synthetic oligonucleotide
uacagauguccucuaagga

SEQ ID NO: 3021080 - RNA, 19 nt, Artificial Sequence
  Description of Artificial Sequence: Synthetic oligonucleotide
uggaauucugguugcauga

SEQ ID NO: 3021081 - RNA, 19 nt, Artificial Sequence
  Description of Artificial Sequence: Synthetic oligonucleotide
auugauuauuaccucccug

SEQ ID NO: 3021082 - RNA, 19 nt, Artificial Sequence
  Description of Artificial Sequence: Synthetic oligonucleotide
uuagcauuugcuucaaauu

SEQ ID NO: 3021083 - RNA, 19 nt, Artificial Sequence
  Description of Artificial Sequence: Synthetic oligonucleotide
auuccugcagguagaaucc

SEQ ID NO: 3021084 - RNA, 19 nt, Artificial Sequence
  Description of Artificial Sequence: Synthetic oligonucleotide
uccucuaaggauaaagguu

SEQ ID NO: 3021085 - RNA, 19 nt, Artificial Sequence
  Description of Artificial Sequence: Synthetic oligonucleotide
aagcauuucaucucugaua

SEQ ID NO: 3021086 - RNA, 19 nt, Artificial Sequence
  Description of Artificial Sequence: Synthetic oligonucleotide
uagaaucccuugcuuauug

SEQ ID NO: 3021087 - RNA, 19 nt, Artificial Sequence
  Description of Artificial Sequence: Synthetic oligonucleotide
uuguuaaaauguuagcauu

SEQ ID NO: 3021088 - RNA, 19 nt, Artificial Sequence
  Description of Artificial Sequence: Synthetic oligonucleotide
gguacauauaaauuggcga

SEQ ID NO: 3021089 - RNA, 19 nt, Artificial Sequence
  Description of Artificial Sequence: Synthetic oligonucleotide
auaaauuggcgauucccca

SEQ ID NO: 3021090 - RNA, 19 nt, Artificial Sequence
  Description of Artificial Sequence: Synthetic oligonucleotide
agaaucccuugcuuauugc

SEQ ID NO: 3021091 - RNA, 19 nt, Artificial Sequence
  Description of Artificial Sequence: Synthetic oligonucleotide
aaaacaugccuugugcaga

SEQ ID NO: 3021092 - RNA, 19 nt, Artificial Sequence
  Description of Artificial Sequence: Synthetic oligonucleotide
aaucccuugcuuauugcuc

SEQ ID NO: 3021093 - RNA, 19 nt, Artificial Sequence
  Description of Artificial Sequence: Synthetic oligonucleotide
uaugauaaaguagccuagc

SEQ ID NO: 3021094 - RNA, 19 nt, Artificial Sequence
  Description of Artificial Sequence: Synthetic oligonucleotide
cuuacagauguccucuaag

SEQ ID NO: 3021095 - RNA, 19 nt, Artificial Sequence
  Description of Artificial Sequence: Synthetic oligonucleotide
guuucucuuacagaugucc

SEQ ID NO: 3021096 - RNA, 19 nt, Artificial Sequence
  Description of Artificial Sequence: Synthetic oligonucleotide
agauguugcuucaagguag

SEQ ID NO: 3021097 - RNA, 19 nt, Artificial Sequence
  Description of Artificial Sequence: Synthetic oligonucleotide
uugcuuauugcucagccuu

SEQ ID NO: 3021098 - RNA, 19 nt, Artificial Sequence
  Description of Artificial Sequence: Synthetic oligonucleotide
uaagaacuggaauucuggu

SEQ ID NO: 3021099 - RNA, 19 nt, Artificial Sequence
  Description of Artificial Sequence: Synthetic oligonucleotide
uuucaucucugauauugga

SEQ ID NO: 3021100 - RNA, 19 nt, Artificial Sequence
  Description of Artificial Sequence: Synthetic oligonucleotide
aaaguagccuagccagaag

SEQ ID NO: 3021101 - RNA, 19 nt, Artificial Sequence
  Description of Artificial Sequence: Synthetic oligonucleotide
uuucucuuacagauguccu

SEQ ID NO: 3021102 - RNA, 19 nt, Artificial Sequence
  Description of Artificial Sequence: Synthetic oligonucleotide
aagaacuggaauucugguu

SEQ ID NO: 3021103 - RNA, 19 nt, Artificial Sequence
  Description of Artificial Sequence: Synthetic oligonucleotide
uagguaugauaaaguagcc

SEQ ID NO: 3021104 - RNA, 19 nt, Artificial Sequence
  Description of Artificial Sequence: Synthetic oligonucleotide
agguacauauaaauuggcg

SEQ ID NO: 3021105 - RNA, 19 nt, Artificial Sequence
  Description of Artificial Sequence: Synthetic oligonucleotide
ugcagguagaaucccuugc

SEQ ID NO: 3021106 - RNA, 19 nt, Artificial Sequence
  Description of Artificial Sequence: Synthetic oligonucleotide
uuggcgauuccccauuucu

SEQ ID NO: 3021107 - RNA, 19 nt, Artificial Sequence
  Description of Artificial Sequence: Synthetic oligonucleotide
uuaaaggguagguaugaua

SEQ ID NO: 3021108 - RNA, 19 nt, Artificial Sequence
  Description of Artificial Sequence: Synthetic oligonucleotide
uuucccuuaagaacuggaa

SEQ ID NO: 3021109 - RNA, 19 nt, Artificial Sequence
  Description of Artificial Sequence: Synthetic oligonucleotide
ucccuuaagaacuggaauu

SEQ ID NO: 3021110 - RNA, 19 nt, Artificial Sequence
  Description of Artificial Sequence: Synthetic oligonucleotide
cucaccgaaaacauuucug

SEQ ID NO: 3021111 - RNA, 19 nt, Artificial Sequence
  Description of Artificial Sequence: Synthetic oligonucleotide
ucguuaaauuuauuagagu

SEQ ID NO: 3021112 - RNA, 19 nt, Artificial Sequence
  Description of Artificial Sequence: Synthetic oligonucleotide
guuccauagcuucccaggg

SEQ ID NO: 3021113 - RNA, 19 nt, Artificial Sequence
  Description of Artificial Sequence: Synthetic oligonucleotide
uucaagguagaauuuugua

SEQ ID NO: 3021114 - RNA, 19 nt, Artificial Sequence
  Description of Artificial Sequence: Synthetic oligonucleotide
uucccuuaagaacuggaau

SEQ ID NO: 3021115 - RNA, 19 nt, Artificial Sequence
  Description of Artificial Sequence: Synthetic oligonucleotide
agccuuaaaggguagguau

SEQ ID NO: 3021116 - RNA, 19 nt, Artificial Sequence
  Description of Artificial Sequence: Synthetic oligonucleotide
ucucuuacagauguccucu

SEQ ID NO: 3021117 - RNA, 19 nt, Artificial Sequence
  Description of Artificial Sequence: Synthetic oligonucleotide
gguaugauaaaguagccua

SEQ ID NO: 3021118 - RNA, 19 nt, Artificial Sequence
  Description of Artificial Sequence: Synthetic oligonucleotide
guugcuucaagguagaauu

SEQ ID NO: 3021119 - RNA, 19 nt, Artificial Sequence
  Description of Artificial Sequence: Synthetic oligonucleotide
agaagcauuucaucucuga

SEQ ID NO: 3021120 - RNA, 19 nt, Artificial Sequence
  Description of Artificial Sequence: Synthetic oligonucleotide
caagguagaauuuuguacu

SEQ ID NO: 3021121 - RNA, 19 nt, Artificial Sequence
  Description of Artificial Sequence: Synthetic oligonucleotide
ucucaccgaaaacauuucu

SEQ ID NO: 3021122 - RNA, 19 nt, Artificial Sequence
  Description of Artificial Sequence: Synthetic oligonucleotide
guaugauaaaguagccuag

SEQ ID NO: 3021123 - RNA, 19 nt, Artificial Sequence
  Description of Artificial Sequence: Synthetic oligonucleotide
uuauuagaguuucccuuaa

SEQ ID NO: 3021124 - RNA, 19 nt, Artificial Sequence
  Description of Artificial Sequence: Synthetic oligonucleotide
uacuucucaccgaaaacau

SEQ ID NO: 3021125 - RNA, 19 nt, Artificial Sequence
  Description of Artificial Sequence: Synthetic oligonucleotide
auguccucuaaggauaaag

SEQ ID NO: 3021126 - RNA, 19 nt, Artificial Sequence
  Description of Artificial Sequence: Synthetic oligonucleotide
cauauaaauuggcgauucc

SEQ ID NO: 3021127 - RNA, 19 nt, Artificial Sequence
  Description of Artificial Sequence: Synthetic oligonucleotide
cuucaaauuccagcaagag

SEQ ID NO: 3021128 - RNA, 19 nt, Artificial Sequence
  Description of Artificial Sequence: Synthetic oligonucleotide
gguagguaugauaaaguag

SEQ ID NO: 3021129 - RNA, 19 nt, Artificial Sequence
  Description of Artificial Sequence: Synthetic oligonucleotide
gguugcaugauuccugcag

SEQ ID NO: 3021130 - RNA, 19 nt, Artificial Sequence
  Description of Artificial Sequence: Synthetic oligonucleotide
cuggaauucugguugcaug

SEQ ID NO: 3021131 - RNA, 19 nt, Artificial Sequence
  Description of Artificial Sequence: Synthetic oligonucleotide
aagguagaauuuuguacuu

SEQ ID NO: 3021132 - RNA, 19 nt, Artificial Sequence
  Description of Artificial Sequence: Synthetic oligonucleotide
uaaauuggcgauuccccau

SEQ ID NO: 3021133 - RNA, 19 nt, Artificial Sequence
  Description of Artificial Sequence: Synthetic oligonucleotide
guacuucucaccgaaaaca

SEQ ID NO: 3021134 - RNA, 19 nt, Artificial Sequence
  Description of Artificial Sequence: Synthetic oligonucleotide
aaauuggcgauuccccauu

SEQ ID NO: 3021135 - RNA, 19 nt, Artificial Sequence
  Description of Artificial Sequence: Synthetic oligonucleotide
cugguugcaugauuccugc

SEQ ID NO: 3021136 - RNA, 19 nt, Artificial Sequence
  Description of Artificial Sequence: Synthetic oligonucleotide
aauuccagcaagagauuga

SEQ ID NO: 3021137 - RNA, 19 nt, Artificial Sequence
  Description of Artificial Sequence: Synthetic oligonucleotide
uugcucagccuuaaagggu

SEQ ID NO: 3021138 - RNA, 19 nt, Artificial Sequence
  Description of Artificial Sequence: Synthetic oligonucleotide
acaugccuugugcagagcu

SEQ ID NO: 3021139 - RNA, 19 nt, Artificial Sequence
  Description of Artificial Sequence: Synthetic oligonucleotide
ucucugauauuggaccugc

SEQ ID NO: 3021140 - RNA, 19 nt, Artificial Sequence
  Description of Artificial Sequence: Synthetic oligonucleotide
aaaggguagguaugauaaa

SEQ ID NO: 3021141 - RNA, 19 nt, Artificial Sequence
  Description of Artificial Sequence: Synthetic oligonucleotide
gaacuggaauucugguugc

SEQ ID NO: 3021142 - RNA, 19 nt, Artificial Sequence
  Description of Artificial Sequence: Synthetic oligonucleotide
aucccuugcuuauugcuca

SEQ ID NO: 3021143 - RNA, 19 nt, Artificial Sequence
  Description of Artificial Sequence: Synthetic oligonucleotide
ugcucagccuuaaagggua

SEQ ID NO: 3021144 - RNA, 19 nt, Artificial Sequence
  Description of Artificial Sequence: Synthetic oligonucleotide
uucucuuacagauguccuc

SEQ ID NO: 3021145 - RNA, 19 nt, Artificial Sequence
  Description of Artificial Sequence: Synthetic oligonucleotide
uaaaguagccuagccagaa

SEQ ID NO: 3021146 - RNA, 19 nt, Artificial Sequence
  Description of Artificial Sequence: Synthetic oligonucleotide
gauguuucucuuacagaug

SEQ ID NO: 3021147 - RNA, 19 nt, Artificial Sequence
  Description of Artificial Sequence: Synthetic oligonucleotide
gcaugauuccugcagguag

SEQ ID NO: 3021148 - RNA, 19 nt, Artificial Sequence
  Description of Artificial Sequence: Synthetic oligonucleotide
guacauauaaauuggcgau

SEQ ID NO: 3021149 - RNA, 19 nt, Artificial Sequence
  Description of Artificial Sequence: Synthetic oligonucleotide
cuuguuaaaauguuagcau

SEQ ID NO: 3021150 - RNA, 19 nt, Artificial Sequence
  Description of Artificial Sequence: Synthetic oligonucleotide
agggagauguugcuucaag

SEQ ID NO: 3021151 - RNA, 19 nt, Artificial Sequence
  Description of Artificial Sequence: Synthetic oligonucleotide
ucuuacagauguccucuaa

SEQ ID NO: 3021152 - RNA, 19 nt, Artificial Sequence
  Description of Artificial Sequence: Synthetic oligonucleotide
gggagauguugcuucaagg

SEQ ID NO: 3021153 - RNA, 19 nt, Artificial Sequence
  Description of Artificial Sequence: Synthetic oligonucleotide
auuuuguacuucucaccga

SEQ ID NO: 3021154 - RNA, 19 nt, Artificial Sequence
  Description of Artificial Sequence: Synthetic oligonucleotide
auggaguuccauagcuucc

SEQ ID NO: 3021155 - RNA, 19 nt, Artificial Sequence
  Description of Artificial Sequence: Synthetic oligonucleotide
auuucugauguuucucuua

SEQ ID NO: 3021156 - RNA, 19 nt, Artificial Sequence
  Description of Artificial Sequence: Synthetic oligonucleotide
ucagccuuaaaggguaggu

SEQ ID NO: 3021157 - RNA, 19 nt, Artificial Sequence
  Description of Artificial Sequence: Synthetic oligonucleotide
guuagcauuugcuucaaau

SEQ ID NO: 3021158 - RNA, 19 nt, Artificial Sequence
  Description of Artificial Sequence: Synthetic oligonucleotide
uguugcuucaagguagaau

SEQ ID NO: 3021159 - RNA, 19 nt, Artificial Sequence
  Description of Artificial Sequence: Synthetic oligonucleotide
uggaguuccauagcuuccc

SEQ ID NO: 3021160 - RNA, 19 nt, Artificial Sequence
  Description of Artificial Sequence: Synthetic oligonucleotide
gagauguugcuucaaggua

SEQ ID NO: 3021161 - RNA, 19 nt, Artificial Sequence
  Description of Artificial Sequence: Synthetic oligonucleotide
cccauuucuuguuaaaaug

SEQ ID NO: 3021162 - RNA, 19 nt, Artificial Sequence
  Description of Artificial Sequence: Synthetic oligonucleotide
auuggcgauuccccauuuc

SEQ ID NO: 3021163 - RNA, 19 nt, Artificial Sequence
  Description of Artificial Sequence: Synthetic oligonucleotide
agguagaauuuuguacuuc

SEQ ID NO: 3021164 - RNA, 19 nt, Artificial Sequence
  Description of Artificial Sequence: Synthetic oligonucleotide
uagcuucccagggagaugu

SEQ ID NO: 3021165 - RNA, 19 nt, Artificial Sequence
  Description of Artificial Sequence: Synthetic oligonucleotide
agguaugauaaaguagccu

SEQ ID NO: 3021166 - RNA, 19 nt, Artificial Sequence
  Description of Artificial Sequence: Synthetic oligonucleotide
gaaaacauuucugauguuu

SEQ ID NO: 3021167 - RNA, 19 nt, Artificial Sequence
  Description of Artificial Sequence: Synthetic oligonucleotide
agguagaaucccuugcuua

SEQ ID NO: 3021168 - RNA, 19 nt, Artificial Sequence
  Description of Artificial Sequence: Synthetic oligonucleotide
uauuggaccugcgcugaag

SEQ ID NO: 3021169 - RNA, 19 nt, Artificial Sequence
  Description of Artificial Sequence: Synthetic oligonucleotide
gauauuggaccugcgcuga

SEQ ID NO: 3021170 - RNA, 19 nt, Artificial Sequence
  Description of Artificial Sequence: Synthetic oligonucleotide
uuauuaccucccugccucc

SEQ ID NO: 3021171 - RNA, 19 nt, Artificial Sequence
  Description of Artificial Sequence: Synthetic oligonucleotide
uucucaccgaaaacauuuc

SEQ ID NO: 3021172 - RNA, 19 nt, Artificial Sequence
  Description of Artificial Sequence: Synthetic oligonucleotide
uacauauaaauuggcgauu

SEQ ID NO: 3021173 - RNA, 19 nt, Artificial Sequence
  Description of Artificial Sequence: Synthetic oligonucleotide
gauuauuaccucccugccu

SEQ ID NO: 3021174 - RNA, 19 nt, Artificial Sequence
  Description of Artificial Sequence: Synthetic oligonucleotide
uagccagaagcauuucauc

SEQ ID NO: 3021175 - RNA, 19 nt, Artificial Sequence
  Description of Artificial Sequence: Synthetic oligonucleotide
auuucuuguuaaaauguua

SEQ ID NO: 3021176 - RNA, 19 nt, Artificial Sequence
  Description of Artificial Sequence: Synthetic oligonucleotide
accucccugccuccaaaac

SEQ ID NO: 3021177 - RNA, 19 nt, Artificial Sequence
  Description of Artificial Sequence: Synthetic oligonucleotide
cuccaaaacaugccuugug

SEQ ID NO: 3021178 - RNA, 19 nt, Artificial Sequence
  Description of Artificial Sequence: Synthetic oligonucleotide
aacaugccuugugcagagc

SEQ ID NO: 3021179 - RNA, 19 nt, Artificial Sequence
  Description of Artificial Sequence: Synthetic oligonucleotide
uucugguugcaugauuccu

SEQ ID NO: 3021180 - RNA, 19 nt, Artificial Sequence
  Description of Artificial Sequence: Synthetic oligonucleotide
gaaucccuugcuuauugcu

SEQ ID NO: 3021181 - RNA, 19 nt, Artificial Sequence
  Description of Artificial Sequence: Synthetic oligonucleotide
ggcgauuccccauuucuug

SEQ ID NO: 3021182 - RNA, 19 nt, Artificial Sequence
  Description of Artificial Sequence: Synthetic oligonucleotide
auuccagcaagagauugau

SEQ ID NO: 3021183 - RNA, 19 nt, Artificial Sequence
  Description of Artificial Sequence: Synthetic oligonucleotide
caugauuccugcagguaga

SEQ ID NO: 3021184 - RNA, 19 nt, Artificial Sequence
  Description of Artificial Sequence: Synthetic oligonucleotide
uucugauguuucucuuaca

SEQ ID NO: 3021185 - RNA, 19 nt, Artificial Sequence
  Description of Artificial Sequence: Synthetic oligonucleotide
cugauauuggaccugcgcu

SEQ ID NO: 3021186 - RNA, 19 nt, Artificial Sequence
  Description of Artificial Sequence: Synthetic oligonucleotide
aguuucccuuaagaacugg

SEQ ID NO: 3021187 - RNA, 19 nt, Artificial Sequence
  Description of Artificial Sequence: Synthetic oligonucleotide
cagauguccucuaaggaua

SEQ ID NO: 3021188 - RNA, 19 nt, Artificial Sequence
  Description of Artificial Sequence: Synthetic oligonucleotide
uccugcagguagaaucccu

SEQ ID NO: 3021189 - RNA, 19 nt, Artificial Sequence
  Description of Artificial Sequence: Synthetic oligonucleotide
uguuucucuuacagauguc

SEQ ID NO: 3021190 - RNA, 19 nt, Artificial Sequence
  Description of Artificial Sequence: Synthetic oligonucleotide
cugauguuucucuuacaga

SEQ ID NO: 3021191 - RNA, 19 nt, Artificial Sequence
  Description of Artificial Sequence: Synthetic oligonucleotide
aauuggcgauuccccauuu

SEQ ID NO: 3021192 - RNA, 19 nt, Artificial Sequence
  Description of Artificial Sequence: Synthetic oligonucleotide
uagccuagccagaagcauu

SEQ ID NO: 3021193 - RNA, 19 nt, Artificial Sequence
  Description of Artificial Sequence: Synthetic oligonucleotide
ugcuucaagguagaauuuu

SEQ ID NO: 3021194 - RNA, 19 nt, Artificial Sequence
  Description of Artificial Sequence: Synthetic oligonucleotide
guuaaauuuauuagaguuu

SEQ ID NO: 3021195 - RNA, 19 nt, Artificial Sequence
  Description of Artificial Sequence: Synthetic oligonucleotide
gauugauuauuaccucccu

SEQ ID NO: 3021196 - RNA, 19 nt, Artificial Sequence
  Description of Artificial Sequence: Synthetic oligonucleotide
ugcuuauugcucagccuua

SEQ ID NO: 3021197 - RNA, 19 nt, Artificial Sequence
  Description of Artificial Sequence: Synthetic oligonucleotide
ccuugcuuauugcucagcc

SEQ ID NO: 3021198 - RNA, 19 nt, Artificial Sequence
  Description of Artificial Sequence: Synthetic oligonucleotide
gaagcauuucaucucugau

SEQ ID NO: 3021199 - RNA, 19 nt, Artificial Sequence
  Description of Artificial Sequence: Synthetic oligonucleotide
aggguagguaugauaaagu

SEQ ID NO: 3021200 - RNA, 19 nt, Artificial Sequence
  Description of Artificial Sequence: Synthetic oligonucleotide
cucugauauuggaccugcg

SEQ ID NO: 3021201 - RNA, 19 nt, Artificial Sequence
  Description of Artificial Sequence: Synthetic oligonucleotide
guccucuaaggauaaaggu

SEQ ID NO: 3021202 - RNA, 19 nt, Artificial Sequence
  Description of Artificial Sequence: Synthetic oligonucleotide
gauguugcuucaagguaga

SEQ ID NO: 3021203 - RNA, 19 nt, Artificial Sequence
  Description of Artificial Sequence: Synthetic oligonucleotide
agcaagagauugauuauua

SEQ ID NO: 3021204 - RNA, 19 nt, Artificial Sequence
  Description of Artificial Sequence: Synthetic oligonucleotide
aguagccuagccagaagca

SEQ ID NO: 3021205 - RNA, 19 nt, Artificial Sequence
  Description of Artificial Sequence: Synthetic oligonucleotide
ggagauguugcuucaaggu

SEQ ID NO: 3021206 - RNA, 19 nt, Artificial Sequence
  Description of Artificial Sequence: Synthetic oligonucleotide
ugcgcugaagguacauaua

SEQ ID NO: 3021207 - RNA, 19 nt, Artificial Sequence
  Description of Artificial Sequence: Synthetic oligonucleotide
auuccccauuucuuguuaa

SEQ ID NO: 3021208 - RNA, 19 nt, Artificial Sequence
  Description of Artificial Sequence: Synthetic oligonucleotide
cugcagguagaaucccuug

SEQ ID NO: 3021209 - RNA, 19 nt, Artificial Sequence
  Description of Artificial Sequence: Synthetic oligonucleotide
gcugaagguacauauaaau

SEQ ID NO: 3021210 - RNA, 19 nt, Artificial Sequence
  Description of Artificial Sequence: Synthetic oligonucleotide
gcaagagauugauuauuac

SEQ ID NO: 3021211 - RNA, 19 nt, Artificial Sequence
  Description of Artificial Sequence: Synthetic oligonucleotide
auaaaguagccuagccaga

SEQ ID NO: 3021212 - RNA, 19 nt, Artificial Sequence
  Description of Artificial Sequence: Synthetic oligonucleotide
guagaauuuuguacuucuc

SEQ ID NO: 3021213 - RNA, 19 nt, Artificial Sequence
  Description of Artificial Sequence: Synthetic oligonucleotide
uucccagggagauguugcu

SEQ ID NO: 3021214 - RNA, 19 nt, Artificial Sequence
  Description of Artificial Sequence: Synthetic oligonucleotide
ucccuugcuuauugcucag

SEQ ID NO: 3021215 - RNA, 19 nt, Artificial Sequence
  Description of Artificial Sequence: Synthetic oligonucleotide
uuaccucccugccuccaaa

SEQ ID NO: 3021216 - RNA, 19 nt, Artificial Sequence
  Description of Artificial Sequence: Synthetic oligonucleotide
gauuccccauuucuuguua

SEQ ID NO: 3021217 - RNA, 19 nt, Artificial Sequence
  Description of Artificial Sequence: Synthetic oligonucleotide
uggaccugcgcugaaggua

SEQ ID NO: 3021218 - RNA, 19 nt, Artificial Sequence
  Description of Artificial Sequence: Synthetic oligonucleotide
aucucugauauuggaccug

SEQ ID NO: 3021219 - RNA, 19 nt, Artificial Sequence
  Description of Artificial Sequence: Synthetic oligonucleotide
ccugccuccaaaacaugcc

SEQ ID NO: 3021220 - RNA, 19 nt, Artificial Sequence
  Description of Artificial Sequence: Synthetic oligonucleotide
ugccuccaaaacaugccuu

SEQ ID NO: 3021221 - RNA, 19 nt, Artificial Sequence
  Description of Artificial Sequence: Synthetic oligonucleotide
aacuggaauucugguugca

SEQ ID NO: 3021222 - RNA, 19 nt, Artificial Sequence
  Description of Artificial Sequence: Synthetic oligonucleotide
uggcgauuccccauuucuu

SEQ ID NO: 3021223 - RNA, 19 nt, Artificial Sequence
  Description of Artificial Sequence: Synthetic oligonucleotide
uguuagcauuugcuucaaa

SEQ ID NO: 3021224 - RNA, 19 nt, Artificial Sequence
  Description of Artificial Sequence: Synthetic oligonucleotide
guuucccuuaagaacugga

SEQ ID NO: 3021225 - RNA, 19 nt, Artificial Sequence
  Description of Artificial Sequence: Synthetic oligonucleotide
cucagccuuaaaggguagg

SEQ ID NO: 3021226 - RNA, 19 nt, Artificial Sequence
  Description of Artificial Sequence: Synthetic oligonucleotide
gccuccaaaacaugccuug

SEQ ID NO: 3021227 - RNA, 19 nt, Artificial Sequence
  Description of Artificial Sequence: Synthetic oligonucleotide
cugaagguacauauaaauu

SEQ ID NO: 3021228 - RNA, 19 nt, Artificial Sequence
  Description of Artificial Sequence: Synthetic oligonucleotide
cuagccagaagcauuucau

SEQ ID NO: 3021229 - RNA, 19 nt, Artificial Sequence
  Description of Artificial Sequence: Synthetic oligonucleotide
uauuaccucccugccucca

SEQ ID NO: 3021230 - RNA, 19 nt, Artificial Sequence
  Description of Artificial Sequence: Synthetic oligonucleotide
ggguagguaugauaaagua

SEQ ID NO: 3021231 - RNA, 19 nt, Artificial Sequence
  Description of Artificial Sequence: Synthetic oligonucleotide
auuaccucccugccuccaa

SEQ ID NO: 3021232 - RNA, 19 nt, Artificial Sequence
  Description of Artificial Sequence: Synthetic oligonucleotide
ccgaaaacauuucugaugu

SEQ ID NO: 3021233 - RNA, 19 nt, Artificial Sequence
  Description of Artificial Sequence: Synthetic oligonucleotide
ugcaugauuccugcaggua

SEQ ID NO: 3021234 - RNA, 19 nt, Artificial Sequence
  Description of Artificial Sequence: Synthetic oligonucleotide
cauuucuuguuaaaauguu

SEQ ID NO: 3021235 - RNA, 19 nt, Artificial Sequence
  Description of Artificial Sequence: Synthetic oligonucleotide
cguuaaauuuauuagaguu

SEQ ID NO: 3021236 - RNA, 19 nt, Artificial Sequence
  Description of Artificial Sequence: Synthetic oligonucleotide
uuccugcagguagaauccc

SEQ ID NO: 3021237 - RNA, 19 nt, Artificial Sequence
  Description of Artificial Sequence: Synthetic oligonucleotide
ugguugcaugauuccugca

SEQ ID NO: 3021238 - RNA, 19 nt, Artificial Sequence
  Description of Artificial Sequence: Synthetic oligonucleotide
ccaaaacaugccuugugca

SEQ ID NO: 3021239 - RNA, 19 nt, Artificial Sequence
  Description of Artificial Sequence: Synthetic oligonucleotide
auagcuucccagggagaug

SEQ ID NO: 3021240 - RNA, 19 nt, Artificial Sequence
  Description of Artificial Sequence: Synthetic oligonucleotide
cccugccuccaaaacaugc

SEQ ID NO: 3021241 - RNA, 19 nt, Artificial Sequence
  Description of Artificial Sequence: Synthetic oligonucleotide
ccauuucuuguuaaaaugu

SEQ ID NO: 3021242 - RNA, 19 nt, Artificial Sequence
  Description of Artificial Sequence: Synthetic oligonucleotide
gcgcugaagguacauauaa

SEQ ID NO: 3021243 - RNA, 19 nt, Artificial Sequence
  Description of Artificial Sequence: Synthetic oligonucleotide
ucccugccuccaaaacaug

SEQ ID NO: 3021244 - RNA, 19 nt, Artificial Sequence
  Description of Artificial Sequence: Synthetic oligonucleotide
auauggaguuccauagcuu

SEQ ID NO: 3021245 - RNA, 19 nt, Artificial Sequence
  Description of Artificial Sequence: Synthetic oligonucleotide
caucucugauauuggaccu

SEQ ID NO: 3021246 - RNA, 19 nt, Artificial Sequence
  Description of Artificial Sequence: Synthetic oligonucleotide
cuugcuuauugcucagccu

SEQ ID NO: 3021247 - RNA, 19 nt, Artificial Sequence
  Description of Artificial Sequence: Synthetic oligonucleotide
gguagaaucccuugcuuau

SEQ ID NO: 3021248 - RNA, 19 nt, Artificial Sequence
  Description of Artificial Sequence: Synthetic oligonucleotide
cccuuaagaacuggaauuc

SEQ ID NO: 3021249 - RNA, 19 nt, Artificial Sequence
  Description of Artificial Sequence: Synthetic oligonucleotide
cccagggagauguugcuuc

SEQ ID NO: 3021250 - RNA, 19 nt, Artificial Sequence
  Description of Artificial Sequence: Synthetic oligonucleotide
uaccucccugccuccaaaa

SEQ ID NO: 3021251 - RNA, 19 nt, Artificial Sequence
  Description of Artificial Sequence: Synthetic oligonucleotide
gaauucugguugcaugauu

SEQ ID NO: 3021252 - RNA, 19 nt, Artificial Sequence
  Description of Artificial Sequence: Synthetic oligonucleotide
ggaccugcgcugaagguac

SEQ ID NO: 3021253 - RNA, 19 nt, Artificial Sequence
  Description of Artificial Sequence: Synthetic oligonucleotide
gccuuaaaggguagguaug

SEQ ID NO: 3021254 - RNA, 19 nt, Artificial Sequence
  Description of Artificial Sequence: Synthetic oligonucleotide
agauguccucuaaggauaa

SEQ ID NO: 3021255 - RNA, 19 nt, Artificial Sequence
  Description of Artificial Sequence: Synthetic oligonucleotide
augauuccugcagguagaa

SEQ ID NO: 3021256 - RNA, 19 nt, Artificial Sequence
  Description of Artificial Sequence: Synthetic oligonucleotide
cucccugccuccaaaacau

SEQ ID NO: 3021257 - RNA, 19 nt, Artificial Sequence
  Description of Artificial Sequence: Synthetic oligonucleotide
auauuggaccugcgcugaa

SEQ ID NO: 3021258 - RNA, 19 nt, Artificial Sequence
  Description of Artificial Sequence: Synthetic oligonucleotide
cuuauugcucagccuuaaa

SEQ ID NO: 3021259 - RNA, 19 nt, Artificial Sequence
  Description of Artificial Sequence: Synthetic oligonucleotide
ccucuaaggauaaagguuu

SEQ ID NO: 3021260 - RNA, 19 nt, Artificial Sequence
  Description of Artificial Sequence: Synthetic oligonucleotide
ugauuccugcagguagaau

SEQ ID NO: 3021261 - RNA, 19 nt, Artificial Sequence
  Description of Artificial Sequence: Synthetic oligonucleotide
agccuagccagaagcauuu

SEQ ID NO: 3021262 - RNA, 19 nt, Artificial Sequence
  Description of Artificial Sequence: Synthetic oligonucleotide
cugcgcugaagguacauau

SEQ ID NO: 3021263 - RNA, 19 nt, Artificial Sequence
  Description of Artificial Sequence: Synthetic oligonucleotide
ccuuaaaggguagguauga

SEQ ID NO: 3021264 - RNA, 19 nt, Artificial Sequence
  Description of Artificial Sequence: Synthetic oligonucleotide
gcagguagaaucccuugcu

SEQ ID NO: 3021265 - RNA, 19 nt, Artificial Sequence
  Description of Artificial Sequence: Synthetic oligonucleotide
auguuagcauuugcuucaa

SEQ ID NO: 3021266 - RNA, 19 nt, Artificial Sequence
  Description of Artificial Sequence: Synthetic oligonucleotide
cauagcuucccagggagau

SEQ ID NO: 3021267 - RNA, 19 nt, Artificial Sequence
  Description of Artificial Sequence: Synthetic oligonucleotide
ccuagccagaagcauuuca

SEQ ID NO: 3021268 - RNA, 19 nt, Artificial Sequence
  Description of Artificial Sequence: Synthetic oligonucleotide
caccgaaaacauuucugau

SEQ ID NO: 3021269 - RNA, 19 nt, Artificial Sequence
  Description of Artificial Sequence: Synthetic oligonucleotide
gcuucccagggagauguug

SEQ ID NO: 3021270 - RNA, 19 nt, Artificial Sequence
  Description of Artificial Sequence: Synthetic oligonucleotide
ggaguuccauagcuuccca

SEQ ID NO: 3021271 - RNA, 19 nt, Artificial Sequence
  Description of Artificial Sequence: Synthetic oligonucleotide
ucccagggagauguugcuu

SEQ ID NO: 3021272 - RNA, 19 nt, Artificial Sequence
  Description of Artificial Sequence: Synthetic oligonucleotide
guagccuagccagaagcau

SEQ ID NO: 3021273 - RNA, 19 nt, Artificial Sequence
  Description of Artificial Sequence: Synthetic oligonucleotide
ccucccugccuccaaaaca

SEQ ID NO: 3021274 - RNA, 19 nt, Artificial Sequence
  Description of Artificial Sequence: Synthetic oligonucleotide
cucuuacagauguccucua

SEQ ID NO: 3021275 - RNA, 19 nt, Artificial Sequence
  Description of Artificial Sequence: Synthetic oligonucleotide
gauguccucuaaggauaaa

SEQ ID NO: 3021276 - RNA, 19 nt, Artificial Sequence
  Description of Artificial Sequence: Synthetic oligonucleotide
cagccuuaaaggguaggua

SEQ ID NO: 3021277 - RNA, 19 nt, Artificial Sequence
  Description of Artificial Sequence: Synthetic oligonucleotide
cuuaaaggguagguaugau

SEQ ID NO: 3021278 - RNA, 19 nt, Artificial Sequence
  Description of Artificial Sequence: Synthetic oligonucleotide
auguugcuucaagguagaa

SEQ ID NO: 3021279 - RNA, 19 nt, Artificial Sequence
  Description of Artificial Sequence: Synthetic oligonucleotide
cucuaaggauaaagguuuu

SEQ ID NO: 3021280 - RNA, 19 nt, Artificial Sequence
  Description of Artificial Sequence: Synthetic oligonucleotide
cagcaagagauugauuauu

SEQ ID NO: 3021281 - RNA, 19 nt, Artificial Sequence
  Description of Artificial Sequence: Synthetic oligonucleotide
gcuuauugcucagccuuaa

SEQ ID NO: 3021282 - RNA, 19 nt, Artificial Sequence
  Description of Artificial Sequence: Synthetic oligonucleotide
accugcgcugaagguacau

SEQ ID NO: 3021283 - RNA, 19 nt, Artificial Sequence
  Description of Artificial Sequence: Synthetic oligonucleotide
cagguagaaucccuugcuu

SEQ ID NO: 3021284 - RNA, 19 nt, Artificial Sequence
  Description of Artificial Sequence: Synthetic oligonucleotide
gcgauuccccauuucuugu

SEQ ID NO: 3021285 - RNA, 19 nt, Artificial Sequence
  Description of Artificial Sequence: Synthetic oligonucleotide
guagaaucccuugcuuauu

SEQ ID NO: 3021286 - RNA, 19 nt, Artificial Sequence
  Description of Artificial Sequence: Synthetic oligonucleotide
gcucagccuuaaaggguag

SEQ ID NO: 3021287 - RNA, 19 nt, Artificial Sequence
  Description of Artificial Sequence: Synthetic oligonucleotide
ccagggagauguugcuuca

SEQ ID NO: 3021288 - RNA, 19 nt, Artificial Sequence
  Description of Artificial Sequence: Synthetic oligonucleotide
ccagcaagagauugauuau

SEQ ID NO: 3021289 - RNA, 19 nt, Artificial Sequence
  Description of Artificial Sequence: Synthetic oligonucleotide
cccuugcuuauugcucagc

SEQ ID NO: 3021290 - RNA, 19 nt, Artificial Sequence
  Description of Artificial Sequence: Synthetic oligonucleotide
ccauagcuucccagggaga

SEQ ID NO: 3021291 - RNA, 19 nt, Artificial Sequence
  Description of Artificial Sequence: Synthetic oligonucleotide
ggaauucugguugcaugau

SEQ ID NO: 3021292 - RNA, 19 nt, Artificial Sequence
  Description of Artificial Sequence: Synthetic oligonucleotide
cagggagauguugcuucaa

SEQ ID NO: 3021293 - RNA, 19 nt, Artificial Sequence
  Description of Artificial Sequence: Synthetic oligonucleotide
ccuuaagaacuggaauucu

SEQ ID NO: 3021294 - RNA, 19 nt, Artificial Sequence
  Description of Artificial Sequence: Synthetic oligonucleotide
gaccugcgcugaagguaca

SEQ ID NO: 3021295 - RNA, 19 nt, Artificial Sequence
  Description of Artificial Sequence: Synthetic oligonucleotide
ccugcagguagaaucccuu

SEQ ID NO: 3021296 - RNA, 19 nt, Artificial Sequence
  Description of Artificial Sequence: Synthetic oligonucleotide
gccuagccagaagcauuuc

SEQ ID NO: 3021297 - RNA, 19 nt, Artificial Sequence
  Description of Artificial Sequence: Synthetic oligonucleotide
ccuccaaaacaugccuugu

SEQ ID NO: 3021298 - RNA, 19 nt, Artificial Sequence
  Description of Artificial Sequence: Synthetic oligonucleotide
agcuucccagggagauguu

SEQ ID NO: 3021299 - RNA, 19 nt, Artificial Sequence
  Description of Artificial Sequence: Synthetic oligonucleotide
gcauuucaucucugauauu

SEQ ID NO: 3021300 - RNA, 19 nt, Artificial Sequence
  Description of Artificial Sequence: Synthetic oligonucleotide
ccugcgcugaagguacaua

SEQ ID NO: 3021301 - RNA, 19 nt, Artificial Sequence
  Description of Artificial Sequence: Synthetic oligonucleotide
cgauuccccauuucuuguu

SEQ ID NO: 3021302 - RNA, 19 nt, Artificial Sequence
  Description of Artificial Sequence: Synthetic oligonucleotide
cgaaaacauuucugauguu

SEQ ID NO: 3021303 - RNA, 19 nt, Artificial Sequence
  Description of Artificial Sequence: Synthetic oligonucleotide
aaaauguaaggacauuuug

SEQ ID NO: 3021304 - RNA, 19 nt, Artificial Sequence
  Description of Artificial Sequence: Synthetic oligonucleotide
agucauugcagucggaccc

SEQ ID NO: 3021305 - RNA, 19 nt, Artificial Sequence
  Description of Artificial Sequence: Synthetic oligonucleotide
aauguaaggacauuuugau

SEQ ID NO: 3021306 - RNA, 19 nt, Artificial Sequence
  Description of Artificial Sequence: Synthetic oligonucleotide
uuugagucauugcagucgg

SEQ ID NO: 3021307 - RNA, 19 nt, Artificial Sequence
  Description of Artificial Sequence: Synthetic oligonucleotide
uguguuguagcaauaggcu

SEQ ID NO: 3021308 - RNA, 19 nt, Artificial Sequence
  Description of Artificial Sequence: Synthetic oligonucleotide
ucuugcacugcccugaacu

SEQ ID NO: 3021309 - RNA, 19 nt, Artificial Sequence
  Description of Artificial Sequence: Synthetic oligonucleotide
aggacauuuugaugcaugc

SEQ ID NO: 3021310 - RNA, 19 nt, Artificial Sequence
  Description of Artificial Sequence: Synthetic oligonucleotide
uuugaugcaugccuccuag

SEQ ID NO: 3021311 - RNA, 19 nt, Artificial Sequence
  Description of Artificial Sequence: Synthetic oligonucleotide
uguuguagcaauaggcugu

SEQ ID NO: 3021312 - RNA, 19 nt, Artificial Sequence
  Description of Artificial Sequence: Synthetic oligonucleotide
aaauguaaggacauuuuga

SEQ ID NO: 3021313 - RNA, 19 nt, Artificial Sequence
  Description of Artificial Sequence: Synthetic oligonucleotide
ucuguguuguagcaauagg

SEQ ID NO: 3021314 - RNA, 19 nt, Artificial Sequence
  Description of Artificial Sequence: Synthetic oligonucleotide
aguguccugagcccaaacc

SEQ ID NO: 3021315 - RNA, 19 nt, Artificial Sequence
  Description of Artificial Sequence: Synthetic oligonucleotide
agcuguaagucccaagagg

SEQ ID NO: 3021316 - RNA, 19 nt, Artificial Sequence
  Description of Artificial Sequence: Synthetic oligonucleotide
cucgacacugcacacaucc

SEQ ID NO: 3021317 - RNA, 19 nt, Artificial Sequence
  Description of Artificial Sequence: Synthetic oligonucleotide
ugauuagagcuguaagucc

SEQ ID NO: 3021318 - RNA, 19 nt, Artificial Sequence
  Description of Artificial Sequence: Synthetic oligonucleotide
gauuagagcuguaaguccc

SEQ ID NO: 3021319 - RNA, 19 nt, Artificial Sequence
  Description of Artificial Sequence: Synthetic oligonucleotide
guauguucugccuucgucc

SEQ ID NO: 3021320 - RNA, 19 nt, Artificial Sequence
  Description of Artificial Sequence: Synthetic oligonucleotide
guagcaauaggcuguguag

SEQ ID NO: 3021321 - RNA, 19 nt, Artificial Sequence
  Description of Artificial Sequence: Synthetic oligonucleotide
cuguguaguguccugagcc

SEQ ID NO: 3021322 - RNA, 19 nt, Artificial Sequence
  Description of Artificial Sequence: Synthetic oligonucleotide
aaaaccucccucuguguug

SEQ ID NO: 3021323 - RNA, 19 nt, Artificial Sequence
  Description of Artificial Sequence: Synthetic oligonucleotide
agagcuguaagucccaaga

SEQ ID NO: 3021324 - RNA, 19 nt, Artificial Sequence
  Description of Artificial Sequence: Synthetic oligonucleotide
ucuuugucaagagaggaga

SEQ ID NO: 3021325 - RNA, 19 nt, Artificial Sequence
  Description of Artificial Sequence: Synthetic oligonucleotide
aaggauguaggccuggguu

SEQ ID NO: 3021326 - RNA, 19 nt, Artificial Sequence
  Description of Artificial Sequence: Synthetic oligonucleotide
cuuugagucauugcagucg

SEQ ID NO: 3021327 - RNA, 19 nt, Artificial Sequence
  Description of Artificial Sequence: Synthetic oligonucleotide
auaggcaaaggucucuuug

SEQ ID NO: 3021328 - RNA, 19 nt, Artificial Sequence
  Description of Artificial Sequence: Synthetic oligonucleotide
uggacugcaccugagcucg

SEQ ID NO: 3021329 - RNA, 19 nt, Artificial Sequence
  Description of Artificial Sequence: Synthetic oligonucleotide
aauguguauguucugccuu

SEQ ID NO: 3021330 - RNA, 19 nt, Artificial Sequence
  Description of Artificial Sequence: Synthetic oligonucleotide
gagagcaugucccugcagc

SEQ ID NO: 3021331 - RNA, 19 nt, Artificial Sequence
  Description of Artificial Sequence: Synthetic oligonucleotide
agaucauaggcaaaggucu

SEQ ID NO: 3021332 - RNA, 19 nt, Artificial Sequence
  Description of Artificial Sequence: Synthetic oligonucleotide
acuuccucgacacugcaca

SEQ ID NO: 3021333 - RNA, 19 nt, Artificial Sequence
  Description of Artificial Sequence: Synthetic oligonucleotide
agagaucauaggcaaaggu

SEQ ID NO: 3021334 - RNA, 19 nt, Artificial Sequence
  Description of Artificial Sequence: Synthetic oligonucleotide
ugcggagagaucauaggca

SEQ ID NO: 3021335 - RNA, 19 nt, Artificial Sequence
  Description of Artificial Sequence: Synthetic oligonucleotide
uguagcaauaggcugugua

SEQ ID NO: 3021336 - RNA, 19 nt, Artificial Sequence
  Description of Artificial Sequence: Synthetic oligonucleotide
aauaggcuguguagugucc

SEQ ID NO: 3021337 - RNA, 19 nt, Artificial Sequence
  Description of Artificial Sequence: Synthetic oligonucleotide
cuggguuuugcacacuucc

SEQ ID NO: 3021338 - RNA, 19 nt, Artificial Sequence
  Description of Artificial Sequence: Synthetic oligonucleotide
gacauuuugaugcaugccu

SEQ ID NO: 3021339 - RNA, 19 nt, Artificial Sequence
  Description of Artificial Sequence: Synthetic oligonucleotide
uucgugagagucuugcacu

SEQ ID NO: 3021340 - RNA, 19 nt, Artificial Sequence
  Description of Artificial Sequence: Synthetic oligonucleotide
uguauguucugccuucguc

SEQ ID NO: 3021341 - RNA, 19 nt, Artificial Sequence
  Description of Artificial Sequence: Synthetic oligonucleotide
gacugcaugaccacugcgg

SEQ ID NO: 3021342 - RNA, 19 nt, Artificial Sequence
  Description of Artificial Sequence: Synthetic oligonucleotide
auguguauguucugccuuc

SEQ ID NO: 3021343 - RNA, 19 nt, Artificial Sequence
  Description of Artificial Sequence: Synthetic oligonucleotide
uguccugagcccaaacccc

SEQ ID NO: 3021344 - RNA, 19 nt, Artificial Sequence
  Description of Artificial Sequence: Synthetic oligonucleotide
gagaucauaggcaaagguc

SEQ ID NO: 3021345 - RNA, 19 nt, Artificial Sequence
  Description of Artificial Sequence: Synthetic oligonucleotide
aaaaggauguaggccuggg

SEQ ID NO: 3021346 - RNA, 19 nt, Artificial Sequence
  Description of Artificial Sequence: Synthetic oligonucleotide
aaaggucucuuugucaaga

SEQ ID NO: 3021347 - RNA, 19 nt, Artificial Sequence
  Description of Artificial Sequence: Synthetic oligonucleotide
cugauuagagcuguaaguc

SEQ ID NO: 3021348 - RNA, 19 nt, Artificial Sequence
  Description of Artificial Sequence: Synthetic oligonucleotide
ucaagagaggagagcaugu

SEQ ID NO: 3021349 - RNA, 19 nt, Artificial Sequence
  Description of Artificial Sequence: Synthetic oligonucleotide
ugaugcaugccuccuaguc

SEQ ID NO: 3021350 - RNA, 19 nt, Artificial Sequence
  Description of Artificial Sequence: Synthetic oligonucleotide
aaggucucuuugucaagag

SEQ ID NO: 3021351 - RNA, 19 nt, Artificial Sequence
  Description of Artificial Sequence: Synthetic oligonucleotide
gguuuugcacacuuccucg

SEQ ID NO: 3021352 - RNA, 19 nt, Artificial Sequence
  Description of Artificial Sequence: Synthetic oligonucleotide
uguguaguguccugagccc

SEQ ID NO: 3021353 - RNA, 19 nt, Artificial Sequence
  Description of Artificial Sequence: Synthetic oligonucleotide
cauuuugaugcaugccucc

SEQ ID NO: 3021354 - RNA, 19 nt, Artificial Sequence
  Description of Artificial Sequence: Synthetic oligonucleotide
ugaacuguucuucgagugu

SEQ ID NO: 3021355 - RNA, 19 nt, Artificial Sequence
  Description of Artificial Sequence: Synthetic oligonucleotide
acugcggagagaucauagg

SEQ ID NO: 3021356 - RNA, 19 nt, Artificial Sequence
  Description of Artificial Sequence: Synthetic oligonucleotide
cuugcugcuggacugcacc

SEQ ID NO: 3021357 - RNA, 19 nt, Artificial Sequence
  Description of Artificial Sequence: Synthetic oligonucleotide
uuugucaagagaggagagc

SEQ ID NO: 3021358 - RNA, 19 nt, Artificial Sequence
  Description of Artificial Sequence: Synthetic oligonucleotide
agcccaaaccccuuucccg

SEQ ID NO: 3021359 - RNA, 19 nt, Artificial Sequence
  Description of Artificial Sequence: Synthetic oligonucleotide
uguaagucccaagaggaaa

SEQ ID NO: 3021360 - RNA, 19 nt, Artificial Sequence
  Description of Artificial Sequence: Synthetic oligonucleotide
ggucucuuugucaagagag

SEQ ID NO: 3021361 - RNA, 19 nt, Artificial Sequence
  Description of Artificial Sequence: Synthetic oligonucleotide
uuugcacacuuccucgaca

SEQ ID NO: 3021362 - RNA, 19 nt, Artificial Sequence
  Description of Artificial Sequence: Synthetic oligonucleotide
auguaaggacauuuugaug

SEQ ID NO: 3021363 - RNA, 19 nt, Artificial Sequence
  Description of Artificial Sequence: Synthetic oligonucleotide
guguccugagcccaaaccc

SEQ ID NO: 3021364 - RNA, 19 nt, Artificial Sequence
  Description of Artificial Sequence: Synthetic oligonucleotide
cucuuugucaagagaggag

SEQ ID NO: 3021365 - RNA, 19 nt, Artificial Sequence
  Description of Artificial Sequence: Synthetic oligonucleotide
cuuugucaagagaggagag

SEQ ID NO: 3021366 - RNA, 19 nt, Artificial Sequence
  Description of Artificial Sequence: Synthetic oligonucleotide
ucccgugacugcaugacca

SEQ ID NO: 3021367 - RNA, 19 nt, Artificial Sequence
  Description of Artificial Sequence: Synthetic oligonucleotide
cugaacuguucuucgagug

SEQ ID NO: 3021368 - RNA, 19 nt, Artificial Sequence
  Description of Artificial Sequence: Synthetic oligonucleotide
agcaauaggcuguguagug

SEQ ID NO: 3021369 - RNA, 19 nt, Artificial Sequence
  Description of Artificial Sequence: Synthetic oligonucleotide
guguuguagcaauaggcug

SEQ ID NO: 3021370 - RNA, 19 nt, Artificial Sequence
  Description of Artificial Sequence: Synthetic oligonucleotide
cugcggagagaucauaggc

SEQ ID NO: 3021371 - RNA, 19 nt, Artificial Sequence
  Description of Artificial Sequence: Synthetic oligonucleotide
gaugcaugccuccuaguca

SEQ ID NO: 3021372 - RNA, 19 nt, Artificial Sequence
  Description of Artificial Sequence: Synthetic oligonucleotide
aaaggauguaggccugggu

SEQ ID NO: 3021373 - RNA, 19 nt, Artificial Sequence
  Description of Artificial Sequence: Synthetic oligonucleotide
gagucauugcagucggacc

SEQ ID NO: 3021374 - RNA, 19 nt, Artificial Sequence
  Description of Artificial Sequence: Synthetic oligonucleotide
aaggacauuuugaugcaug

SEQ ID NO: 3021375 - RNA, 19 nt, Artificial Sequence
  Description of Artificial Sequence: Synthetic oligonucleotide
ugcaugaccacugcggaga

SEQ ID NO: 3021376 - RNA, 19 nt, Artificial Sequence
  Description of Artificial Sequence: Synthetic oligonucleotide
uauguucugccuucguccu

SEQ ID NO: 3021377 - RNA, 19 nt, Artificial Sequence
  Description of Artificial Sequence: Synthetic oligonucleotide
ugacugcaugaccacugcg

SEQ ID NO: 3021378 - RNA, 19 nt, Artificial Sequence
  Description of Artificial Sequence: Synthetic oligonucleotide
auugcagucggacccaaaa

SEQ ID NO: 3021379 - RNA, 19 nt, Artificial Sequence
  Description of Artificial Sequence: Synthetic oligonucleotide
agcuuugagucauugcagu

SEQ ID NO: 3021380 - RNA, 19 nt, Artificial Sequence
  Description of Artificial Sequence: Synthetic oligonucleotide
ugagucauugcagucggac

SEQ ID NO: 3021381 - RNA, 19 nt, Artificial Sequence
  Description of Artificial Sequence: Synthetic oligonucleotide
acauuuugaugcaugccuc

SEQ ID NO: 3021382 - RNA, 19 nt, Artificial Sequence
  Description of Artificial Sequence: Synthetic oligonucleotide
guucgugagagucuugcac

SEQ ID NO: 3021383 - RNA, 19 nt, Artificial Sequence
  Description of Artificial Sequence: Synthetic oligonucleotide
uaggccuggguuuugcaca

SEQ ID NO: 3021384 - RNA, 19 nt, Artificial Sequence
  Description of Artificial Sequence: Synthetic oligonucleotide
uuuugcacacuuccucgac

SEQ ID NO: 3021385 - RNA, 19 nt, Artificial Sequence
  Description of Artificial Sequence: Synthetic oligonucleotide
acugcacacauccagcuuu

SEQ ID NO: 3021386 - RNA, 19 nt, Artificial Sequence
  Description of Artificial Sequence: Synthetic oligonucleotide
aaccccuuucccgugacug

SEQ ID NO: 3021387 - RNA, 19 nt, Artificial Sequence
  Description of Artificial Sequence: Synthetic oligonucleotide
gagcuguaagucccaagag

SEQ ID NO: 3021388 - RNA, 19 nt, Artificial Sequence
  Description of Artificial Sequence: Synthetic oligonucleotide
ugcccugaacuguucuucg

SEQ ID NO: 3021389 - RNA, 19 nt, Artificial Sequence
  Description of Artificial Sequence: Synthetic oligonucleotide
ugagcccaaaccccuuucc

SEQ ID NO: 3021390 - RNA, 19 nt, Artificial Sequence
  Description of Artificial Sequence: Synthetic oligonucleotide
uugcacacuuccucgacac

SEQ ID NO: 3021391 - RNA, 19 nt, Artificial Sequence
  Description of Artificial Sequence: Synthetic oligonucleotide
gaggagagcaugucccugc

SEQ ID NO: 3021392 - RNA, 19 nt, Artificial Sequence
  Description of Artificial Sequence: Synthetic oligonucleotide
uguguauguucugccuucg

SEQ ID NO: 3021393 - RNA, 19 nt, Artificial Sequence
  Description of Artificial Sequence: Synthetic oligonucleotide
ucggaguugggguucguga

SEQ ID NO: 3021394 - RNA, 19 nt, Artificial Sequence
  Description of Artificial Sequence: Synthetic oligonucleotide
caauaggcuguguaguguc

SEQ ID NO: 3021395 - RNA, 19 nt, Artificial Sequence
  Description of Artificial Sequence: Synthetic oligonucleotide
ggagagaucauaggcaaag

SEQ ID NO: 3021396 - RNA, 19 nt, Artificial Sequence
  Description of Artificial Sequence: Synthetic oligonucleotide
acugcaugaccacugcgga

SEQ ID NO: 3021397 - RNA, 19 nt, Artificial Sequence
  Description of Artificial Sequence: Synthetic oligonucleotide
gagagaucauaggcaaagg

SEQ ID NO: 3021398 - RNA, 19 nt, Artificial Sequence
  Description of Artificial Sequence: Synthetic oligonucleotide
cagcuuugagucauugcag

SEQ ID NO: 3021399 - RNA, 19 nt, Artificial Sequence
  Description of Artificial Sequence: Synthetic oligonucleotide
ugagagucuugcacugccc

SEQ ID NO: 3021400 - RNA, 19 nt, Artificial Sequence
  Description of Artificial Sequence: Synthetic oligonucleotide
ggaauguguauguucugcc

SEQ ID NO: 3021401 - RNA, 19 nt, Artificial Sequence
  Description of Artificial Sequence: Synthetic oligonucleotide
uguucugccuucguccuug

SEQ ID NO: 3021402 - RNA, 19 nt, Artificial Sequence
  Description of Artificial Sequence: Synthetic oligonucleotide
gucaagagaggagagcaug

SEQ ID NO: 3021403 - RNA, 19 nt, Artificial Sequence
  Description of Artificial Sequence: Synthetic oligonucleotide
gacacugcacacauccagc

SEQ ID NO: 3021404 - RNA, 19 nt, Artificial Sequence
  Description of Artificial Sequence: Synthetic oligonucleotide
gugagagucuugcacugcc

SEQ ID NO: 3021405 - RNA, 19 nt, Artificial Sequence
  Description of Artificial Sequence: Synthetic oligonucleotide
uccagcuuugagucauugc

SEQ ID NO: 3021406 - RNA, 19 nt, Artificial Sequence
  Description of Artificial Sequence: Synthetic oligonucleotide
uccucgacacugcacacau

SEQ ID NO: 3021407 - RNA, 19 nt, Artificial Sequence
  Description of Artificial Sequence: Synthetic oligonucleotide
uagcaauaggcuguguagu

SEQ ID NO: 3021408 - RNA, 19 nt, Artificial Sequence
  Description of Artificial Sequence: Synthetic oligonucleotide
cacugcggagagaucauag

SEQ ID NO: 3021409 - RNA, 19 nt, Artificial Sequence
  Description of Artificial Sequence: Synthetic oligonucleotide
uggguuuugcacacuuccu

SEQ ID NO: 3021410 - RNA, 19 nt, Artificial Sequence
  Description of Artificial Sequence: Synthetic oligonucleotide
accccuuucccgugacugc

SEQ ID NO: 3021411 - RNA, 19 nt, Artificial Sequence
  Description of Artificial Sequence: Synthetic oligonucleotide
ucgugagagucuugcacug

SEQ ID NO: 3021412 - RNA, 19 nt, Artificial Sequence
  Description of Artificial Sequence: Synthetic oligonucleotide
gucucuuugucaagagagg

SEQ ID NO: 3021413 - RNA, 19 nt, Artificial Sequence
  Description of Artificial Sequence: Synthetic oligonucleotide
ucguccuugcugcuggacu

SEQ ID NO: 3021414 - RNA, 19 nt, Artificial Sequence
  Description of Artificial Sequence: Synthetic oligonucleotide
uagagcuguaagucccaag

SEQ ID NO: 3021415 - RNA, 19 nt, Artificial Sequence
  Description of Artificial Sequence: Synthetic oligonucleotide
aggggaauguguauguucu

SEQ ID NO: 3021416 - RNA, 19 nt, Artificial Sequence
  Description of Artificial Sequence: Synthetic oligonucleotide
augaccacugcggagagau

SEQ ID NO: 3021417 - RNA, 19 nt, Artificial Sequence
  Description of Artificial Sequence: Synthetic oligonucleotide
uuuugaugcaugccuccua

SEQ ID NO: 3021418 - RNA, 19 nt, Artificial Sequence
  Description of Artificial Sequence: Synthetic oligonucleotide
cuugcacugcccugaacug

SEQ ID NO: 3021419 - RNA, 19 nt, Artificial Sequence
  Description of Artificial Sequence: Synthetic oligonucleotide
cacacuuccucgacacugc

SEQ ID NO: 3021420 - RNA, 19 nt, Artificial Sequence
  Description of Artificial Sequence: Synthetic oligonucleotide
cucuguguuguagcaauag

SEQ ID NO: 3021421 - RNA, 19 nt, Artificial Sequence
  Description of Artificial Sequence: Synthetic oligonucleotide
caugccuccuagucagggg

SEQ ID NO: 3021422 - RNA, 19 nt, Artificial Sequence
  Description of Artificial Sequence: Synthetic oligonucleotide
ugcaccugagcucggaguu

SEQ ID NO: 3021423 - RNA, 19 nt, Artificial Sequence
  Description of Artificial Sequence: Synthetic oligonucleotide
augccuccuagucagggga

SEQ ID NO: 3021424 - RNA, 19 nt, Artificial Sequence
  Description of Artificial Sequence: Synthetic oligonucleotide
agucaggggaauguguaug

SEQ ID NO: 3021425 - RNA, 19 nt, Artificial Sequence
  Description of Artificial Sequence: Synthetic oligonucleotide
acacugcacacauccagcu

SEQ ID NO: 3021426 - RNA, 19 nt, Artificial Sequence
  Description of Artificial Sequence: Synthetic oligonucleotide
ggcugauuagagcuguaag

SEQ ID NO: 3021427 - RNA, 19 nt, Artificial Sequence
  Description of Artificial Sequence: Synthetic oligonucleotide
guaaggacauuuugaugca

SEQ ID NO: 3021428 - RNA, 19 nt, Artificial Sequence
  Description of Artificial Sequence: Synthetic oligonucleotide
aggccuggguuuugcacac

SEQ ID NO: 3021429 - RNA, 19 nt, Artificial Sequence
  Description of Artificial Sequence: Synthetic oligonucleotide
ugcuggacugcaccugagc

SEQ ID NO: 3021430 - RNA, 19 nt, Artificial Sequence
  Description of Artificial Sequence: Synthetic oligonucleotide
caggggaauguguauguuc

SEQ ID NO: 3021431 - RNA, 19 nt, Artificial Sequence
  Description of Artificial Sequence: Synthetic oligonucleotide
uucccgugacugcaugacc

SEQ ID NO: 3021432 - RNA, 19 nt, Artificial Sequence
  Description of Artificial Sequence: Synthetic oligonucleotide
agagucuugcacugcccug

SEQ ID NO: 3021433 - RNA, 19 nt, Artificial Sequence
  Description of Artificial Sequence: Synthetic oligonucleotide
caaaggucucuuugucaag

SEQ ID NO: 3021434 - RNA, 19 nt, Artificial Sequence
  Description of Artificial Sequence: Synthetic oligonucleotide
uugggguucgugagagucu

SEQ ID NO: 3021435 - RNA, 19 nt, Artificial Sequence
  Description of Artificial Sequence: Synthetic oligonucleotide
uuucccgugacugcaugac

SEQ ID NO: 3021436 - RNA, 19 nt, Artificial Sequence
  Description of Artificial Sequence: Synthetic oligonucleotide
gaauguguauguucugccu

SEQ ID NO: 3021437 - RNA, 19 nt, Artificial Sequence
  Description of Artificial Sequence: Synthetic oligonucleotide
guugggguucgugagaguc

SEQ ID NO: 3021438 - RNA, 19 nt, Artificial Sequence
  Description of Artificial Sequence: Synthetic oligonucleotide
ugucaagagaggagagcau

SEQ ID NO: 3021439 - RNA, 19 nt, Artificial Sequence
  Description of Artificial Sequence: Synthetic oligonucleotide
uguaguguccugagcccaa

SEQ ID NO: 3021440 - RNA, 19 nt, Artificial Sequence
  Description of Artificial Sequence: Synthetic oligonucleotide
aggauguaggccuggguuu

SEQ ID NO: 3021441 - RNA, 19 nt, Artificial Sequence
  Description of Artificial Sequence: Synthetic oligonucleotide
cacacauccagcuuugagu

SEQ ID NO: 3021442 - RNA, 19 nt, Artificial Sequence
  Description of Artificial Sequence: Synthetic oligonucleotide
auuuugaugcaugccuccu

SEQ ID NO: 3021443 - RNA, 19 nt, Artificial Sequence
  Description of Artificial Sequence: Synthetic oligonucleotide
aggucucuuugucaagaga

SEQ ID NO: 3021444 - RNA, 19 nt, Artificial Sequence
  Description of Artificial Sequence: Synthetic oligonucleotide
guuguagcaauaggcugug

SEQ ID NO: 3021445 - RNA, 19 nt, Artificial Sequence
  Description of Artificial Sequence: Synthetic oligonucleotide
ccagcuuugagucauugca

SEQ ID NO: 3021446 - RNA, 19 nt, Artificial Sequence
  Description of Artificial Sequence: Synthetic oligonucleotide
cuagucaggggaaugugua

SEQ ID NO: 3021447 - RNA, 19 nt, Artificial Sequence
  Description of Artificial Sequence: Synthetic oligonucleotide
gaucauaggcaaaggucuc

SEQ ID NO: 3021448 - RNA, 19 nt, Artificial Sequence
  Description of Artificial Sequence: Synthetic oligonucleotide
ugcacugcccugaacuguu

SEQ ID NO: 3021449 - RNA, 19 nt, Artificial Sequence
  Description of Artificial Sequence: Synthetic oligonucleotide
uguaggccuggguuuugca

SEQ ID NO: 3021450 - RNA, 19 nt, Artificial Sequence
  Description of Artificial Sequence: Synthetic oligonucleotide
gcaaaggucucuuugucaa

SEQ ID NO: 3021451 - RNA, 19 nt, Artificial Sequence
  Description of Artificial Sequence: Synthetic oligonucleotide
uccuagucaggggaaugug

SEQ ID NO: 3021452 - RNA, 19 nt, Artificial Sequence
  Description of Artificial Sequence: Synthetic oligonucleotide
acauccagcuuugagucau

SEQ ID NO: 3021453 - RNA, 19 nt, Artificial Sequence
  Description of Artificial Sequence: Synthetic oligonucleotide
cuggacugcaccugagcuc

SEQ ID NO: 3021454 - RNA, 19 nt, Artificial Sequence
  Description of Artificial Sequence: Synthetic oligonucleotide
ucgacacugcacacaucca

SEQ ID NO: 3021455 - RNA, 19 nt, Artificial Sequence
  Description of Artificial Sequence: Synthetic oligonucleotide
uaggcuguguaguguccug

SEQ ID NO: 3021456 - RNA, 19 nt, Artificial Sequence
  Description of Artificial Sequence: Synthetic oligonucleotide
aucauaggcaaaggucucu

SEQ ID NO: 3021457 - RNA, 19 nt, Artificial Sequence
  Description of Artificial Sequence: Synthetic oligonucleotide
ugagcucggaguugggguu

SEQ ID NO: 3021458 - RNA, 19 nt, Artificial Sequence
  Description of Artificial Sequence: Synthetic oligonucleotide
gaacuguucuucgagugua

SEQ ID NO: 3021459 - RNA, 19 nt, Artificial Sequence
  Description of Artificial Sequence: Synthetic oligonucleotide
uagucaggggaauguguau

SEQ ID NO: 3021460 - RNA, 19 nt, Artificial Sequence
  Description of Artificial Sequence: Synthetic oligonucleotide
gcugauuagagcuguaagu

SEQ ID NO: 3021461 - RNA, 19 nt, Artificial Sequence
  Description of Artificial Sequence: Synthetic oligonucleotide
auaggcuguguaguguccu

SEQ ID NO: 3021462 - RNA, 19 nt, Artificial Sequence
  Description of Artificial Sequence: Synthetic oligonucleotide
guaagucccaagaggaaaa

SEQ ID NO: 3021463 - RNA, 19 nt, Artificial Sequence
  Description of Artificial Sequence: Synthetic oligonucleotide
gagucuugcacugcccuga

SEQ ID NO: 3021464 - RNA, 19 nt, Artificial Sequence
  Description of Artificial Sequence: Synthetic oligonucleotide
aaaccccuuucccgugacu

SEQ ID NO: 3021465 - RNA, 19 nt, Artificial Sequence
  Description of Artificial Sequence: Synthetic oligonucleotide
caccugagcucggaguugg

SEQ ID NO: 3021466 - RNA, 19 nt, Artificial Sequence
  Description of Artificial Sequence: Synthetic oligonucleotide
cugcaugaccacugcggag

SEQ ID NO: 3021467 - RNA, 19 nt, Artificial Sequence
  Description of Artificial Sequence: Synthetic oligonucleotide
ggguuuugcacacuuccuc

SEQ ID NO: 3021468 - RNA, 19 nt, Artificial Sequence
  Description of Artificial Sequence: Synthetic oligonucleotide
gagagucuugcacugcccu

SEQ ID NO: 3021469 - RNA, 19 nt, Artificial Sequence
  Description of Artificial Sequence: Synthetic oligonucleotide
uaguguccugagcccaaac

SEQ ID NO: 3021470 - RNA, 19 nt, Artificial Sequence
  Description of Artificial Sequence: Synthetic oligonucleotide
uugcugcuggacugcaccu

SEQ ID NO: 3021471 - RNA, 19 nt, Artificial Sequence
  Description of Artificial Sequence: Synthetic oligonucleotide
uugaugcaugccuccuagu

SEQ ID NO: 3021472 - RNA, 19 nt, Artificial Sequence
  Description of Artificial Sequence: Synthetic oligonucleotide
cugcacacauccagcuuug

SEQ ID NO: 3021473 - RNA, 19 nt, Artificial Sequence
  Description of Artificial Sequence: Synthetic oligonucleotide
cuuccucgacacugcacac

SEQ ID NO: 3021474 - RNA, 19 nt, Artificial Sequence
  Description of Artificial Sequence: Synthetic oligonucleotide
auuagagcuguaaguccca

SEQ ID NO: 3021475 - RNA, 19 nt, Artificial Sequence
  Description of Artificial Sequence: Synthetic oligonucleotide
gcacacauccagcuuugag

SEQ ID NO: 3021476 - RNA, 19 nt, Artificial Sequence
  Description of Artificial Sequence: Synthetic oligonucleotide
agaggagagcaugucccug

SEQ ID NO: 3021477 - RNA, 19 nt, Artificial Sequence
  Description of Artificial Sequence: Synthetic oligonucleotide
uaaggacauuuugaugcau

SEQ ID NO: 3021478 - RNA, 19 nt, Artificial Sequence
  Description of Artificial Sequence: Synthetic oligonucleotide
cuguucuucgaguguaaaa

SEQ ID NO: 3021479 - RNA, 19 nt, Artificial Sequence
  Description of Artificial Sequence: Synthetic oligonucleotide
caagagaggagagcauguc

SEQ ID NO: 3021480 - RNA, 19 nt, Artificial Sequence
  Description of Artificial Sequence: Synthetic oligonucleotide
uuccucgacacugcacaca

SEQ ID NO: 3021481 - RNA, 19 nt, Artificial Sequence
  Description of Artificial Sequence: Synthetic oligonucleotide
ggcaaaggucucuuuguca

SEQ ID NO: 3021482 - RNA, 19 nt, Artificial Sequence
  Description of Artificial Sequence: Synthetic oligonucleotide
uugcacugcccugaacugu

SEQ ID NO: 3021483 - RNA, 19 nt, Artificial Sequence
  Description of Artificial Sequence: Synthetic oligonucleotide
uggcugauuagagcuguaa

SEQ ID NO: 3021484 - RNA, 19 nt, Artificial Sequence
  Description of Artificial Sequence: Synthetic oligonucleotide
uugagucauugcagucgga

SEQ ID NO: 3021485 - RNA, 19 nt, Artificial Sequence
  Description of Artificial Sequence: Synthetic oligonucleotide
ugcacacuuccucgacacu

SEQ ID NO: 3021486 - RNA, 19 nt, Artificial Sequence
  Description of Artificial Sequence: Synthetic oligonucleotide
ggacauuuugaugcaugcc

SEQ ID NO: 3021487 - RNA, 19 nt, Artificial Sequence
  Description of Artificial Sequence: Synthetic oligonucleotide
uuagagcuguaagucccaa

SEQ ID NO: 3021488 - RNA, 19 nt, Artificial Sequence
  Description of Artificial Sequence: Synthetic oligonucleotide
ccuucguccuugcugcugg

SEQ ID NO: 3021489 - RNA, 19 nt, Artificial Sequence
  Description of Artificial Sequence: Synthetic oligonucleotide
aggagagcaugucccugca

SEQ ID NO: 3021490 - RNA, 19 nt, Artificial Sequence
  Description of Artificial Sequence: Synthetic oligonucleotide
cacuuccucgacacugcac

SEQ ID NO: 3021491 - RNA, 19 nt, Artificial Sequence
  Description of Artificial Sequence: Synthetic oligonucleotide
gcacacuuccucgacacug

SEQ ID NO: 3021492 - RNA, 19 nt, Artificial Sequence
  Description of Artificial Sequence: Synthetic oligonucleotide
acacuuccucgacacugca

SEQ ID NO: 3021493 - RNA, 19 nt, Artificial Sequence
  Description of Artificial Sequence: Synthetic oligonucleotide
ggcuguguaguguccugag

SEQ ID NO: 3021494 - RNA, 19 nt, Artificial Sequence
  Description of Artificial Sequence: Synthetic oligonucleotide
ggguucgugagagucuugc

SEQ ID NO: 3021495 - RNA, 19 nt, Artificial Sequence
  Description of Artificial Sequence: Synthetic oligonucleotide
ugcugcuggacugcaccug

SEQ ID NO: 3021496 - RNA, 19 nt, Artificial Sequence
  Description of Artificial Sequence: Synthetic oligonucleotide
acugcccugaacuguucuu

SEQ ID NO: 3021497 - RNA, 19 nt, Artificial Sequence
  Description of Artificial Sequence: Synthetic oligonucleotide
aacuguucuucgaguguaa

SEQ ID NO: 3021498 - RNA, 19 nt, Artificial Sequence
  Description of Artificial Sequence: Synthetic oligonucleotide
cuuucccgugacugcauga

SEQ ID NO: 3021499 - RNA, 19 nt, Artificial Sequence
  Description of Artificial Sequence: Synthetic oligonucleotide
accucccucuguguuguag

SEQ ID NO: 3021500 - RNA, 19 nt, Artificial Sequence
  Description of Artificial Sequence: Synthetic oligonucleotide
ugccuccuagucaggggaa

SEQ ID NO: 3021501 - RNA, 19 nt, Artificial Sequence
  Description of Artificial Sequence: Synthetic oligonucleotide
caaaccccuuucccgugac

SEQ ID NO: 3021502 - RNA, 19 nt, Artificial Sequence
  Description of Artificial Sequence: Synthetic oligonucleotide
cccugaacuguucuucgag

SEQ ID NO: 3021503 - RNA, 19 nt, Artificial Sequence
  Description of Artificial Sequence: Synthetic oligonucleotide
gcuuugagucauugcaguc

SEQ ID NO: 3021504 - RNA, 19 nt, Artificial Sequence
  Description of Artificial Sequence: Synthetic oligonucleotide
gauguaggccuggguuuug

SEQ ID NO: 3021505 - RNA, 19 nt, Artificial Sequence
  Description of Artificial Sequence: Synthetic oligonucleotide
acuguucuucgaguguaaa

SEQ ID NO: 3021506 - RNA, 19 nt, Artificial Sequence
  Description of Artificial Sequence: Synthetic oligonucleotide
ugggguucgugagagucuu

SEQ ID NO: 3021507 - RNA, 19 nt, Artificial Sequence
  Description of Artificial Sequence: Synthetic oligonucleotide
gucaggggaauguguaugu

SEQ ID NO: 3021508 - RNA, 19 nt, Artificial Sequence
  Description of Artificial Sequence: Synthetic oligonucleotide
cuguaagucccaagaggaa

SEQ ID NO: 3021509 - RNA, 19 nt, Artificial Sequence
  Description of Artificial Sequence: Synthetic oligonucleotide
gcuguguaguguccugagc

SEQ ID NO: 3021510 - RNA, 19 nt, Artificial Sequence
  Description of Artificial Sequence: Synthetic oligonucleotide
cugagcccaaaccccuuuc

SEQ ID NO: 3021511 - RNA, 19 nt, Artificial Sequence
  Description of Artificial Sequence: Synthetic oligonucleotide
gagaggagagcaugucccu

SEQ ID NO: 3021512 - RNA, 19 nt, Artificial Sequence
  Description of Artificial Sequence: Synthetic oligonucleotide
gcggagagaucauaggcaa

SEQ ID NO: 3021513 - RNA, 19 nt, Artificial Sequence
  Description of Artificial Sequence: Synthetic oligonucleotide
cugagcucggaguuggggu

SEQ ID NO: 3021514 - RNA, 19 nt, Artificial Sequence
  Description of Artificial Sequence: Synthetic oligonucleotide
gcaugccuccuagucaggg

SEQ ID NO: 3021515 - RNA, 19 nt, Artificial Sequence
  Description of Artificial Sequence: Synthetic oligonucleotide
cgacacugcacacauccag

SEQ ID NO: 3021516 - RNA, 19 nt, Artificial Sequence
  Description of Artificial Sequence: Synthetic oligonucleotide
cucccucuguguuguagca

SEQ ID NO: 3021517 - RNA, 19 nt, Artificial Sequence
  Description of Artificial Sequence: Synthetic oligonucleotide
uucugccuucguccuugcu

SEQ ID NO: 3021518 - RNA, 19 nt, Artificial Sequence
  Description of Artificial Sequence: Synthetic oligonucleotide
agcucggaguugggguucg

SEQ ID NO: 3021519 - RNA, 19 nt, Artificial Sequence
  Description of Artificial Sequence: Synthetic oligonucleotide
uucguccuugcugcuggac

SEQ ID NO: 3021520 - RNA, 19 nt, Artificial Sequence
  Description of Artificial Sequence: Synthetic oligonucleotide
ucaggggaauguguauguu

SEQ ID NO: 3021521 - RNA, 19 nt, Artificial Sequence
  Description of Artificial Sequence: Synthetic oligonucleotide
cugcuggacugcaccugag

SEQ ID NO: 3021522 - RNA, 19 nt, Artificial Sequence
  Description of Artificial Sequence: Synthetic oligonucleotide
aggcuguguaguguccuga

SEQ ID NO: 3021523 - RNA, 19 nt, Artificial Sequence
  Description of Artificial Sequence: Synthetic oligonucleotide
ggggaauguguauguucug

SEQ ID NO: 3021524 - RNA, 19 nt, Artificial Sequence
  Description of Artificial Sequence: Synthetic oligonucleotide
agucuugcacugcccugaa

SEQ ID NO: 3021525 - RNA, 19 nt, Artificial Sequence
  Description of Artificial Sequence: Synthetic oligonucleotide
ggaguugggguucgugaga

SEQ ID NO: 3021526 - RNA, 19 nt, Artificial Sequence
  Description of Artificial Sequence: Synthetic oligonucleotide
cucggaguugggguucgug

SEQ ID NO: 3021527 - RNA, 19 nt, Artificial Sequence
  Description of Artificial Sequence: Synthetic oligonucleotide
ucccucuguguuguagcaa

SEQ ID NO: 3021528 - RNA, 19 nt, Artificial Sequence
  Description of Artificial Sequence: Synthetic oligonucleotide
gucauugcagucggaccca

SEQ ID NO: 3021529 - RNA, 19 nt, Artificial Sequence
  Description of Artificial Sequence: Synthetic oligonucleotide
cacauccagcuuugaguca

SEQ ID NO: 3021530 - RNA, 19 nt, Artificial Sequence
  Description of Artificial Sequence: Synthetic oligonucleotide
ugcacacauccagcuuuga

SEQ ID NO: 3021531 - RNA, 19 nt, Artificial Sequence
  Description of Artificial Sequence: Synthetic oligonucleotide
uccuugcugcuggacugca

SEQ ID NO: 3021532 - RNA, 19 nt, Artificial Sequence
  Description of Artificial Sequence: Synthetic oligonucleotide
ucauugcagucggacccaa

SEQ ID NO: 3021533 - RNA, 19 nt, Artificial Sequence
  Description of Artificial Sequence: Synthetic oligonucleotide
gguucgugagagucuugca

SEQ ID NO: 3021534 - RNA, 19 nt, Artificial Sequence
  Description of Artificial Sequence: Synthetic oligonucleotide
ugaccacugcggagagauc

SEQ ID NO: 3021535 - RNA, 19 nt, Artificial Sequence
  Description of Artificial Sequence: Synthetic oligonucleotide
gcaugaccacugcggagag

SEQ ID NO: 3021536 - RNA, 19 nt, Artificial Sequence
  Description of Artificial Sequence: Synthetic oligonucleotide
gcuggacugcaccugagcu

SEQ ID NO: 3021537 - RNA, 19 nt, Artificial Sequence
  Description of Artificial Sequence: Synthetic oligonucleotide
guucugccuucguccuugc

SEQ ID NO: 3021538 - RNA, 19 nt, Artificial Sequence
  Description of Artificial Sequence: Synthetic oligonucleotide
guccuugcugcuggacugc

SEQ ID NO: 3021539 - RNA, 19 nt, Artificial Sequence
  Description of Artificial Sequence: Synthetic oligonucleotide
ccugagcucggaguugggg

SEQ ID NO: 3021540 - RNA, 19 nt, Artificial Sequence
  Description of Artificial Sequence: Synthetic oligonucleotide
cggaguugggguucgugag

SEQ ID NO: 3021541 - RNA, 19 nt, Artificial Sequence
  Description of Artificial Sequence: Synthetic oligonucleotide
gcugcuggacugcaccuga

SEQ ID NO: 3021542 - RNA, 19 nt, Artificial Sequence
  Description of Artificial Sequence: Synthetic oligonucleotide
uuguagcaauaggcugugu

SEQ ID NO: 3021543 - RNA, 19 nt, Artificial Sequence
  Description of Artificial Sequence: Synthetic oligonucleotide
cguccuugcugcuggacug

SEQ ID NO: 3021544 - RNA, 19 nt, Artificial Sequence
  Description of Artificial Sequence: Synthetic oligonucleotide
gagcucggaguugggguuc

SEQ ID NO: 3021545 - RNA, 19 nt, Artificial Sequence
  Description of Artificial Sequence: Synthetic oligonucleotide
gucuugcacugcccugaac

SEQ ID NO: 3021546 - RNA, 19 nt, Artificial Sequence
  Description of Artificial Sequence: Synthetic oligonucleotide
auguucugccuucguccuu

SEQ ID NO: 3021547 - RNA, 19 nt, Artificial Sequence
  Description of Artificial Sequence: Synthetic oligonucleotide
gacugcaccugagcucgga

SEQ ID NO: 3021548 - RNA, 19 nt, Artificial Sequence
  Description of Artificial Sequence: Synthetic oligonucleotide
ccuggguuuugcacacuuc

SEQ ID NO: 3021549 - RNA, 19 nt, Artificial Sequence
  Description of Artificial Sequence: Synthetic oligonucleotide
cugcaccugagcucggagu

SEQ ID NO: 3021550 - RNA, 19 nt, Artificial Sequence
  Description of Artificial Sequence: Synthetic oligonucleotide
ccuuucccgugacugcaug

SEQ ID NO: 3021551 - RNA, 19 nt, Artificial Sequence
  Description of Artificial Sequence: Synthetic oligonucleotide
cuccuagucaggggaaugu

SEQ ID NO: 3021552 - RNA, 19 nt, Artificial Sequence
  Description of Artificial Sequence: Synthetic oligonucleotide
guguauguucugccuucgu

SEQ ID NO: 3021553 - RNA, 19 nt, Artificial Sequence
  Description of Artificial Sequence: Synthetic oligonucleotide
accugagcucggaguuggg

SEQ ID NO: 3021554 - RNA, 19 nt, Artificial Sequence
  Description of Artificial Sequence: Synthetic oligonucleotide
cccgugacugcaugaccac

SEQ ID NO: 3021555 - RNA, 19 nt, Artificial Sequence
  Description of Artificial Sequence: Synthetic oligonucleotide
cauugcagucggacccaaa

SEQ ID NO: 3021556 - RNA, 19 nt, Artificial Sequence
  Description of Artificial Sequence: Synthetic oligonucleotide
guaguguccugagcccaaa

SEQ ID NO: 3021557 - RNA, 19 nt, Artificial Sequence
  Description of Artificial Sequence: Synthetic oligonucleotide
ccuagucaggggaaugugu

SEQ ID NO: 3021558 - RNA, 19 nt, Artificial Sequence
  Description of Artificial Sequence: Synthetic oligonucleotide
gcccaaaccccuuucccgu

SEQ ID NO: 3021559 - RNA, 19 nt, Artificial Sequence
  Description of Artificial Sequence: Synthetic oligonucleotide
cuucguccuugcugcugga

SEQ ID NO: 3021560 - RNA, 19 nt, Artificial Sequence
  Description of Artificial Sequence: Synthetic oligonucleotide
ccugaacuguucuucgagu

SEQ ID NO: 3021561 - RNA, 19 nt, Artificial Sequence
  Description of Artificial Sequence: Synthetic oligonucleotide
cauaggcaaaggucucuuu

SEQ ID NO: 3021562 - RNA, 19 nt, Artificial Sequence
  Description of Artificial Sequence: Synthetic oligonucleotide
ccuccuagucaggggaaug

SEQ ID NO: 3021563 - RNA, 19 nt, Artificial Sequence
  Description of Artificial Sequence: Synthetic oligonucleotide
gcccugaacuguucuucga

SEQ ID NO: 3021564 - RNA, 19 nt, Artificial Sequence
  Description of Artificial Sequence: Synthetic oligonucleotide
ccuugcugcuggacugcac

SEQ ID NO: 3021565 - RNA, 19 nt, Artificial Sequence
  Description of Artificial Sequence: Synthetic oligonucleotide
gcaccugagcucggaguug

SEQ ID NO: 3021566 - RNA, 19 nt, Artificial Sequence
  Description of Artificial Sequence: Synthetic oligonucleotide
cgugagagucuugcacugc

SEQ ID NO: 3021567 - RNA, 19 nt, Artificial Sequence
  Description of Artificial Sequence: Synthetic oligonucleotide
caugaccacugcggagaga

SEQ ID NO: 3021568 - RNA, 19 nt, Artificial Sequence
  Description of Artificial Sequence: Synthetic oligonucleotide
ccaaaccccuuucccguga

SEQ ID NO: 3021569 - RNA, 19 nt, Artificial Sequence
  Description of Artificial Sequence: Synthetic oligonucleotide
cacugcacacauccagcuu

SEQ ID NO: 3021570 - RNA, 19 nt, Artificial Sequence
  Description of Artificial Sequence: Synthetic oligonucleotide
ggauguaggccuggguuuu

SEQ ID NO: 3021571 - RNA, 19 nt, Artificial Sequence
  Description of Artificial Sequence: Synthetic oligonucleotide
ggacugcaccugagcucgg

SEQ ID NO: 3021572 - RNA, 19 nt, Artificial Sequence
  Description of Artificial Sequence: Synthetic oligonucleotide
ccucgacacugcacacauc

SEQ ID NO: 3021573 - RNA, 19 nt, Artificial Sequence
  Description of Artificial Sequence: Synthetic oligonucleotide
ccccuuucccgugacugca

SEQ ID NO: 3021574 - RNA, 19 nt, Artificial Sequence
  Description of Artificial Sequence: Synthetic oligonucleotide
gggguucgugagagucuug

SEQ ID NO: 3021575 - RNA, 19 nt, Artificial Sequence
  Description of Artificial Sequence: Synthetic oligonucleotide
gccuggguuuugcacacuu

SEQ ID NO: 3021576 - RNA, 19 nt, Artificial Sequence
  Description of Artificial Sequence: Synthetic oligonucleotide
cggagagaucauaggcaaa

SEQ ID NO: 3021577 - RNA, 19 nt, Artificial Sequence
  Description of Artificial Sequence: Synthetic oligonucleotide
gcacugcccugaacuguuc

SEQ ID NO: 3021578 - RNA, 19 nt, Artificial Sequence
  Description of Artificial Sequence: Synthetic oligonucleotide
ccugagcccaaaccccuuu

SEQ ID NO: 3021579 - RNA, 19 nt, Artificial Sequence
  Description of Artificial Sequence: Synthetic oligonucleotide
gccuccuagucaggggaau

SEQ ID NO: 3021580 - RNA, 19 nt, Artificial Sequence
  Description of Artificial Sequence: Synthetic oligonucleotide
cccuuucccgugacugcau

SEQ ID NO: 3021581 - RNA, 19 nt, Artificial Sequence
  Description of Artificial Sequence: Synthetic oligonucleotide
ggccuggguuuugcacacu

SEQ ID NO: 3021582 - RNA, 19 nt, Artificial Sequence
  Description of Artificial Sequence: Synthetic oligonucleotide
gcucggaguugggguucgu

SEQ ID NO: 3021583 - RNA, 19 nt, Artificial Sequence
  Description of Artificial Sequence: Synthetic oligonucleotide
aguggguucaccuugaggg

SEQ ID NO: 3021584 - RNA, 19 nt, Artificial Sequence
  Description of Artificial Sequence: Synthetic oligonucleotide
ucaaugaaggucuucaccg

SEQ ID NO: 3021585 - RNA, 19 nt, Artificial Sequence
  Description of Artificial Sequence: Synthetic oligonucleotide
uucugcgucucaaugaagg

SEQ ID NO: 3021586 - RNA, 19 nt, Artificial Sequence
  Description of Artificial Sequence: Synthetic oligonucleotide
acgaaguugcgcuugcagc

SEQ ID NO: 3021587 - RNA, 19 nt, Artificial Sequence
  Description of Artificial Sequence: Synthetic oligonucleotide
uggaucucagccagcaggg

SEQ ID NO: 3021588 - RNA, 19 nt, Artificial Sequence
  Description of Artificial Sequence: Synthetic oligonucleotide
uucaccgccuccuucuugg

SEQ ID NO: 3021589 - RNA, 19 nt, Artificial Sequence
  Description of Artificial Sequence: Synthetic oligonucleotide
cucaaugaaggucuucacc

SEQ ID NO: 3021590 - RNA, 19 nt, Artificial Sequence
  Description of Artificial Sequence: Synthetic oligonucleotide
agugccaugagucgucguc

SEQ ID NO: 3021591 - RNA, 19 nt, Artificial Sequence
  Description of Artificial Sequence: Synthetic oligonucleotide
ugagucgucgucgucgucg

SEQ ID NO: 3021592 - RNA, 19 nt, Artificial Sequence
  Description of Artificial Sequence: Synthetic oligonucleotide
uucaccuugagggccaagg

SEQ ID NO: 3021593 - RNA, 19 nt, Artificial Sequence
  Description of Artificial Sequence: Synthetic oligonucleotide
accagcacgaaguugcgcu

SEQ ID NO: 3021594 - RNA, 19 nt, Artificial Sequence
  Description of Artificial Sequence: Synthetic oligonucleotide
aggggccccauucugugcc

SEQ ID NO: 3021595 - RNA, 19 nt, Artificial Sequence
  Description of Artificial Sequence: Synthetic oligonucleotide
ugaucucgggcauggaggc

SEQ ID NO: 3021596 - RNA, 19 nt, Artificial Sequence
  Description of Artificial Sequence: Synthetic oligonucleotide
accuugagggccaagggac

SEQ ID NO: 3021597 - RNA, 19 nt, Artificial Sequence
  Description of Artificial Sequence: Synthetic oligonucleotide
agggacagugccaugaguc

SEQ ID NO: 3021598 - RNA, 19 nt, Artificial Sequence
  Description of Artificial Sequence: Synthetic oligonucleotide
cuugcagccguucuggauc

SEQ ID NO: 3021599 - RNA, 19 nt, Artificial Sequence
  Description of Artificial Sequence: Synthetic oligonucleotide
gugaucucgggcauggagg

SEQ ID NO: 3021600 - RNA, 19 nt, Artificial Sequence
  Description of Artificial Sequence: Synthetic oligonucleotide
uggcucgcgguccaggucc

SEQ ID NO: 3021601 - RNA, 19 nt, Artificial Sequence
  Description of Artificial Sequence: Synthetic oligonucleotide
ugcggugauggugaucucg

SEQ ID NO: 3021602 - RNA, 19 nt, Artificial Sequence
  Description of Artificial Sequence: Synthetic oligonucleotide
caaugaaggucuucaccgc

SEQ ID NO: 3021603 - RNA, 19 nt, Artificial Sequence
  Description of Artificial Sequence: Synthetic oligonucleotide
gaguggguucaccuugagg

SEQ ID NO: 3021604 - RNA, 19 nt, Artificial Sequence
  Description of Artificial Sequence: Synthetic oligonucleotide
gugauggugaucucgggca

SEQ ID NO: 3021605 - RNA, 19 nt, Artificial Sequence
  Description of Artificial Sequence: Synthetic oligonucleotide
ucgcgcaccagcacgaagu

SEQ ID NO: 3021606 - RNA, 19 nt, Artificial Sequence
  Description of Artificial Sequence: Synthetic oligonucleotide
agcacgaaguugcgcuugc

SEQ ID NO: 3021607 - RNA, 19 nt, Artificial Sequence
  Description of Artificial Sequence: Synthetic oligonucleotide
agguccaggggccccauuc

SEQ ID NO: 3021608 - RNA, 19 nt, Artificial Sequence
  Description of Artificial Sequence: Synthetic oligonucleotide
uccagguccaggcgaagca

SEQ ID NO: 3021609 - RNA, 19 nt, Artificial Sequence
  Description of Artificial Sequence: Synthetic oligonucleotide
gaaguugcgcuugcagccg

SEQ ID NO: 3021610 - RNA, 19 nt, Artificial Sequence
  Description of Artificial Sequence: Synthetic oligonucleotide
uuucugcgucucaaugaag

SEQ ID NO: 3021611 - RNA, 19 nt, Artificial Sequence
  Description of Artificial Sequence: Synthetic oligonucleotide
agggaguggguucaccuug

SEQ ID NO: 3021612 - RNA, 19 nt, Artificial Sequence
  Description of Artificial Sequence: Synthetic oligonucleotide
guccaggcgaagcagggag

SEQ ID NO: 3021613 - RNA, 19 nt, Artificial Sequence
  Description of Artificial Sequence: Synthetic oligonucleotide
aucucgggcauggaggccg

SEQ ID NO: 3021614 - RNA, 19 nt, Artificial Sequence
  Description of Artificial Sequence: Synthetic oligonucleotide
ucucaaugaaggucuucac

SEQ ID NO: 3021615 - RNA, 19 nt, Artificial Sequence
  Description of Artificial Sequence: Synthetic oligonucleotide
uggcagguccccaggcucg

SEQ ID NO: 3021616 - RNA, 19 nt, Artificial Sequence
  Description of Artificial Sequence: Synthetic oligonucleotide
gaguccgaguccgagucgg

SEQ ID NO: 3021617 - RNA, 19 nt, Artificial Sequence
  Description of Artificial Sequence: Synthetic oligonucleotide
aaggucuucaccgccuccu

SEQ ID NO: 3021618 - RNA, 19 nt, Artificial Sequence
  Description of Artificial Sequence: Synthetic oligonucleotide
agccguucuggaucucagc

SEQ ID NO: 3021619 - RNA, 19 nt, Artificial Sequence
  Description of Artificial Sequence: Synthetic oligonucleotide
aagggacagugccaugagu

SEQ ID NO: 3021620 - RNA, 19 nt, Artificial Sequence
  Description of Artificial Sequence: Synthetic oligonucleotide
gucgucgucgucgucgucg

SEQ ID NO: 3021621 - RNA, 19 nt, Artificial Sequence
  Description of Artificial Sequence: Synthetic oligonucleotide
ucugcgucucaaugaaggu

SEQ ID NO: 3021622 - RNA, 19 nt, Artificial Sequence
  Description of Artificial Sequence: Synthetic oligonucleotide
cacgaaguugcgcuugcag

SEQ ID NO: 3021623 - RNA, 19 nt, Artificial Sequence
  Description of Artificial Sequence: Synthetic oligonucleotide
auggugaucucgggcaugg

SEQ ID NO: 3021624 - RNA, 19 nt, Artificial Sequence
  Description of Artificial Sequence: Synthetic oligonucleotide
gucucaaugaaggucuuca

SEQ ID NO: 3021625 - RNA, 19 nt, Artificial Sequence
  Description of Artificial Sequence: Synthetic oligonucleotide
ugcgcuugcagccguucug

SEQ ID NO: 3021626 - RNA, 19 nt, Artificial Sequence
  Description of Artificial Sequence: Synthetic oligonucleotide
ggugauggugaucucgggc

SEQ ID NO: 3021627 - RNA, 19 nt, Artificial Sequence
  Description of Artificial Sequence: Synthetic oligonucleotide
uccugcuccucccgguccg

SEQ ID NO: 3021628 - RNA, 19 nt, Artificial Sequence
  Description of Artificial Sequence: Synthetic oligonucleotide
uccgaguccgagucggggc

SEQ ID NO: 3021629 - RNA, 19 nt, Artificial Sequence
  Description of Artificial Sequence: Synthetic oligonucleotide
ggugaucucgggcauggag

SEQ ID NO: 3021630 - RNA, 19 nt, Artificial Sequence
  Description of Artificial Sequence: Synthetic oligonucleotide
aggcgaagcagggaguggg

SEQ ID NO: 3021631 - RNA, 19 nt, Artificial Sequence
  Description of Artificial Sequence: Synthetic oligonucleotide
uggguucaccuugagggcc

SEQ ID NO: 3021632 - RNA, 19 nt, Artificial Sequence
  Description of Artificial Sequence: Synthetic oligonucleotide
ucguccaggggccgggugc

SEQ ID NO: 3021633 - RNA, 19 nt, Artificial Sequence
  Description of Artificial Sequence: Synthetic oligonucleotide
gggacagugccaugagucg

SEQ ID NO: 3021634 - RNA, 19 nt, Artificial Sequence
  Description of Artificial Sequence: Synthetic oligonucleotide
cuuucugcgucucaaugaa

SEQ ID NO: 3021635 - RNA, 19 nt, Artificial Sequence
  Description of Artificial Sequence: Synthetic oligonucleotide
ugaaggucuucaccgccuc

SEQ ID NO: 3021636 - RNA, 19 nt, Artificial Sequence
  Description of Artificial Sequence: Synthetic oligonucleotide
cagguccaggcgaagcagg

SEQ ID NO: 3021637 - RNA, 19 nt, Artificial Sequence
  Description of Artificial Sequence: Synthetic oligonucleotide
uccuucuuggcucgcgguc

SEQ ID NO: 3021638 - RNA, 19 nt, Artificial Sequence
  Description of Artificial Sequence: Synthetic oligonucleotide
gugccaugagucgucgucg

SEQ ID NO: 3021639 - RNA, 19 nt, Artificial Sequence
  Description of Artificial Sequence: Synthetic oligonucleotide
ugcagcggcugcuucuccc

SEQ ID NO: 3021640 - RNA, 19 nt, Artificial Sequence
  Description of Artificial Sequence: Synthetic oligonucleotide
gaagcagggaguggguuca

SEQ ID NO: 3021641 - RNA, 19 nt, Artificial Sequence
  Description of Artificial Sequence: Synthetic oligonucleotide
agguccagguccaggggcc

SEQ ID NO: 3021642 - RNA, 19 nt, Artificial Sequence
  Description of Artificial Sequence: Synthetic oligonucleotide
uccaggggccccauucugu

SEQ ID NO: 3021643 - RNA, 19 nt, Artificial Sequence
  Description of Artificial Sequence: Synthetic oligonucleotide
gaaggucuucaccgccucc

SEQ ID NO: 3021644 - RNA, 19 nt, Artificial Sequence
  Description of Artificial Sequence: Synthetic oligonucleotide
guggguucaccuugagggc

SEQ ID NO: 3021645 - RNA, 19 nt, Artificial Sequence
  Description of Artificial Sequence: Synthetic oligonucleotide
cgcaccagcacgaaguugc

SEQ ID NO: 3021646 - RNA, 19 nt, Artificial Sequence
  Description of Artificial Sequence: Synthetic oligonucleotide
ugauggugaucucgggcau

SEQ ID NO: 3021647 - RNA, 19 nt, Artificial Sequence
  Description of Artificial Sequence: Synthetic oligonucleotide
ucgcgguccagguccaggc

SEQ ID NO: 3021648 - RNA, 19 nt, Artificial Sequence
  Description of Artificial Sequence: Synthetic oligonucleotide
aaguugcgcuugcagccgu

SEQ ID NO: 3021649 - RNA, 19 nt, Artificial Sequence
  Description of Artificial Sequence: Synthetic oligonucleotide
ucuuggcucgcgguccagg

SEQ ID NO: 3021650 - RNA, 19 nt, Artificial Sequence
  Description of Artificial Sequence: Synthetic oligonucleotide
cgaaguugcgcuugcagcc

SEQ ID NO: 3021651 - RNA, 19 nt, Artificial Sequence
  Description of Artificial Sequence: Synthetic oligonucleotide
cuugagggccaagggacag

SEQ ID NO: 3021652 - RNA, 19 nt, Artificial Sequence
  Description of Artificial Sequence: Synthetic oligonucleotide
uugcagccguucuggaucu

SEQ ID NO: 3021653 - RNA, 19 nt, Artificial Sequence
  Description of Artificial Sequence: Synthetic oligonucleotide
ggcuuucugcgucucaaug

SEQ ID NO: 3021654 - RNA, 19 nt, Artificial Sequence
  Description of Artificial Sequence: Synthetic oligonucleotide
ccaugagucgucgucgucg

SEQ ID NO: 3021655 - RNA, 19 nt, Artificial Sequence
  Description of Artificial Sequence: Synthetic oligonucleotide
acagugccaugagucgucg

SEQ ID NO: 3021656 - RNA, 19 nt, Artificial Sequence
  Description of Artificial Sequence: Synthetic oligonucleotide
gcuuucugcgucucaauga

SEQ ID NO: 3021657 - RNA, 19 nt, Artificial Sequence
  Description of Artificial Sequence: Synthetic oligonucleotide
ucagccagcagggcuuucu

SEQ ID NO: 3021658 - RNA, 19 nt, Artificial Sequence
  Description of Artificial Sequence: Synthetic oligonucleotide
gauggugaucucgggcaug

SEQ ID NO: 3021659 - RNA, 19 nt, Artificial Sequence
  Description of Artificial Sequence: Synthetic oligonucleotide
ucgggcauggaggccgccg

SEQ ID NO: 3021660 - RNA, 19 nt, Artificial Sequence
  Description of Artificial Sequence: Synthetic oligonucleotide
uccgaguccgaguccgagu

SEQ ID NO: 3021661 - RNA, 19 nt, Artificial Sequence
  Description of Artificial Sequence: Synthetic oligonucleotide
cugcgucucaaugaagguc

SEQ ID NO: 3021662 - RNA, 19 nt, Artificial Sequence
  Description of Artificial Sequence: Synthetic oligonucleotide
ugccaugagucgucgucgu

SEQ ID NO: 3021663 - RNA, 19 nt, Artificial Sequence
  Description of Artificial Sequence: Synthetic oligonucleotide
uugcgcuugcagccguucu

SEQ ID NO: 3021664 - RNA, 19 nt, Artificial Sequence
  Description of Artificial Sequence: Synthetic oligonucleotide
cagguccccaggcucgucc

SEQ ID NO: 3021665 - RNA, 19 nt, Artificial Sequence
  Description of Artificial Sequence: Synthetic oligonucleotide
cauggaggccgccggcugc

SEQ ID NO: 3021666 - RNA, 19 nt, Artificial Sequence
  Description of Artificial Sequence: Synthetic oligonucleotide
cuggcagguccccaggcuc

SEQ ID NO: 3021667 - RNA, 19 nt, Artificial Sequence
  Description of Artificial Sequence: Synthetic oligonucleotide
uccuccuccuccuccuccu

SEQ ID NO: 3021668 - RNA, 19 nt, Artificial Sequence
  Description of Artificial Sequence: Synthetic oligonucleotide
gacagugccaugagucguc

SEQ ID NO: 3021669 - RNA, 19 nt, Artificial Sequence
  Description of Artificial Sequence: Synthetic oligonucleotide
augaaggucuucaccgccu

SEQ ID NO: 3021670 - RNA, 19 nt, Artificial Sequence
  Description of Artificial Sequence: Synthetic oligonucleotide
caccuugagggccaaggga

SEQ ID NO: 3021671 - RNA, 19 nt, Artificial Sequence
  Description of Artificial Sequence: Synthetic oligonucleotide
cagccguucuggaucucag

SEQ ID NO: 3021672 - RNA, 19 nt, Artificial Sequence
  Description of Artificial Sequence: Synthetic oligonucleotide
ucccgcucgcgcaccagca

SEQ ID NO: 3021673 - RNA, 19 nt, Artificial Sequence
  Description of Artificial Sequence: Synthetic oligonucleotide
agcagggcuuucugcgucu

SEQ ID NO: 3021674 - RNA, 19 nt, Artificial Sequence
  Description of Artificial Sequence: Synthetic oligonucleotide
ggugcggugauggugaucu

SEQ ID NO: 3021675 - RNA, 19 nt, Artificial Sequence
  Description of Artificial Sequence: Synthetic oligonucleotide
guccgaguccgagucgggg

SEQ ID NO: 3021676 - RNA, 19 nt, Artificial Sequence
  Description of Artificial Sequence: Synthetic oligonucleotide
ucgucgucgucgucgucgu

SEQ ID NO: 3021677 - RNA, 19 nt, Artificial Sequence
  Description of Artificial Sequence: Synthetic oligonucleotide
gcggugauggugaucucgg

SEQ ID NO: 3021678 - RNA, 19 nt, Artificial Sequence
  Description of Artificial Sequence: Synthetic oligonucleotide
cuucaccgccuccuucuug

SEQ ID NO: 3021679 - RNA, 19 nt, Artificial Sequence
  Description of Artificial Sequence: Synthetic oligonucleotide
cuccuccuccuccuccugc

SEQ ID NO: 3021680 - RNA, 19 nt, Artificial Sequence
  Description of Artificial Sequence: Synthetic oligonucleotide
cugcuucucccgcucgcgc

SEQ ID NO: 3021681 - RNA, 19 nt, Artificial Sequence
  Description of Artificial Sequence: Synthetic oligonucleotide
uuggcucgcgguccagguc

SEQ ID NO: 3021682 - RNA, 19 nt, Artificial Sequence
  Description of Artificial Sequence: Synthetic oligonucleotide
uccggguccgaguccgagu

SEQ ID NO: 3021683 - RNA, 19 nt, Artificial Sequence
  Description of Artificial Sequence: Synthetic oligonucleotide
ucucgggcauggaggccgc

SEQ ID NO: 3021684 - RNA, 19 nt, Artificial Sequence
  Description of Artificial Sequence: Synthetic oligonucleotide
augagucgucgucgucguc

SEQ ID NO: 3021685 - RNA, 19 nt, Artificial Sequence
  Description of Artificial Sequence: Synthetic oligonucleotide
agggcuuucugcgucucaa

SEQ ID NO: 3021686 - RNA, 19 nt, Artificial Sequence
  Description of Artificial Sequence: Synthetic oligonucleotide
uccgagucggggccagguc

SEQ ID NO: 3021687 - RNA, 19 nt, Artificial Sequence
  Description of Artificial Sequence: Synthetic oligonucleotide
cccaggcucguccaggggc

SEQ ID NO: 3021688 - RNA, 19 nt, Artificial Sequence
  Description of Artificial Sequence: Synthetic oligonucleotide
cucgcgcaccagcacgaag

SEQ ID NO: 3021689 - RNA, 19 nt, Artificial Sequence
  Description of Artificial Sequence: Synthetic oligonucleotide
guccagguccaggcgaagc

SEQ ID NO: 3021690 - RNA, 19 nt, Artificial Sequence
  Description of Artificial Sequence: Synthetic oligonucleotide
gaucucgggcauggaggcc

SEQ ID NO: 3021691 - RNA, 19 nt, Artificial Sequence
  Description of Artificial Sequence: Synthetic oligonucleotide
ucaccgccuccuucuuggc

SEQ ID NO: 3021692 - RNA, 19 nt, Artificial Sequence
  Description of Artificial Sequence: Synthetic oligonucleotide
cagcagggcuuucugcguc

SEQ ID NO: 3021693 - RNA, 19 nt, Artificial Sequence
  Description of Artificial Sequence: Synthetic oligonucleotide
ccgagucggggccaggucc

SEQ ID NO: 3021694 - RNA, 19 nt, Artificial Sequence
  Description of Artificial Sequence: Synthetic oligonucleotide
uucucccgcucgcgcacca

SEQ ID NO: 3021695 - RNA, 19 nt, Artificial Sequence
  Description of Artificial Sequence: Synthetic oligonucleotide
uugagggccaagggacagu

SEQ ID NO: 3021696 - RNA, 19 nt, Artificial Sequence
  Description of Artificial Sequence: Synthetic oligonucleotide
caggggccccauucugugc

SEQ ID NO: 3021697 - RNA, 19 nt, Artificial Sequence
  Description of Artificial Sequence: Synthetic oligonucleotide
cagcacgaaguugcgcuug

SEQ ID NO: 3021698 - RNA, 19 nt, Artificial Sequence
  Description of Artificial Sequence: Synthetic oligonucleotide
agcggcugcuucucccgcu

SEQ ID NO: 3021699 - RNA, 19 nt, Artificial Sequence
  Description of Artificial Sequence: Synthetic oligonucleotide
caggcgaagcagggagugg

SEQ ID NO: 3021700 - RNA, 19 nt, Artificial Sequence
  Description of Artificial Sequence: Synthetic oligonucleotide
ccuucuuggcucgcggucc

SEQ ID NO: 3021701 - RNA, 19 nt, Artificial Sequence
  Description of Artificial Sequence: Synthetic oligonucleotide
gcgcuugcagccguucugg

SEQ ID NO: 3021702 - RNA, 19 nt, Artificial Sequence
  Description of Artificial Sequence: Synthetic oligonucleotide
caccagcacgaaguugcgc

SEQ ID NO: 3021703 - RNA, 19 nt, Artificial Sequence
  Description of Artificial Sequence: Synthetic oligonucleotide
agucgucgucgucgucguc

SEQ ID NO: 3021704 - RNA, 19 nt, Artificial Sequence
  Description of Artificial Sequence: Synthetic oligonucleotide
ccgaguccgaguccgaguc

SEQ ID NO: 3021705 - RNA, 19 nt, Artificial Sequence
  Description of Artificial Sequence: Synthetic oligonucleotide
ccuccuucuuggcucgcgg

SEQ ID NO: 3021706 - RNA, 19 nt, Artificial Sequence
  Description of Artificial Sequence: Synthetic oligonucleotide
ggaguggguucaccuugag

SEQ ID NO: 3021707 - RNA, 19 nt, Artificial Sequence
  Description of Artificial Sequence: Synthetic oligonucleotide
caugagucgucgucgucgu

SEQ ID NO: 3021708 - RNA, 19 nt, Artificial Sequence
  Description of Artificial Sequence: Synthetic oligonucleotide
cuucuuggcucgcggucca

SEQ ID NO: 3021709 - RNA, 19 nt, Artificial Sequence
  Description of Artificial Sequence: Synthetic oligonucleotide
uucuuggcucgcgguccag

SEQ ID NO: 3021710 - RNA, 19 nt, Artificial Sequence
  Description of Artificial Sequence: Synthetic oligonucleotide
agucggggccagguccagg

SEQ ID NO: 3021711 - RNA, 19 nt, Artificial Sequence
  Description of Artificial Sequence: Synthetic oligonucleotide
guucuggaucucagccagc

SEQ ID NO: 3021712 - RNA, 19 nt, Artificial Sequence
  Description of Artificial Sequence: Synthetic oligonucleotide
gaguccgagucggggccag

SEQ ID NO: 3021713 - RNA, 19 nt, Artificial Sequence
  Description of Artificial Sequence: Synthetic oligonucleotide
gggccgggugcggugaugg

SEQ ID NO: 3021714 - RNA, 19 nt, Artificial Sequence
  Description of Artificial Sequence: Synthetic oligonucleotide
ccgaguccgagucggggcc

SEQ ID NO: 3021715 - RNA, 19 nt, Artificial Sequence
  Description of Artificial Sequence: Synthetic oligonucleotide
ucccgguccggguccgagu

SEQ ID NO: 3021716 - RNA, 19 nt, Artificial Sequence
  Description of Artificial Sequence: Synthetic oligonucleotide
gagucgucgucgucgucgu

SEQ ID NO: 3021717 - RNA, 19 nt, Artificial Sequence
  Description of Artificial Sequence: Synthetic oligonucleotide
guugcgcuugcagccguuc

SEQ ID NO: 3021718 - RNA, 19 nt, Artificial Sequence
  Description of Artificial Sequence: Synthetic oligonucleotide
ccaagggacagugccauga

SEQ ID NO: 3021719 - RNA, 19 nt, Artificial Sequence
  Description of Artificial Sequence: Synthetic oligonucleotide
cagcggcugcuucucccgc

SEQ ID NO: 3021720 - RNA, 19 nt, Artificial Sequence
  Description of Artificial Sequence: Synthetic oligonucleotide
gucggggccagguccaggu

SEQ ID NO: 3021721 - RNA, 19 nt, Artificial Sequence
  Description of Artificial Sequence: Synthetic oligonucleotide
uccucccgguccggguccg

SEQ ID NO: 3021722 - RNA, 19 nt, Artificial Sequence
  Description of Artificial Sequence: Synthetic oligonucleotide
ccaggggccccauucugug

SEQ ID NO: 3021723 - RNA, 19 nt, Artificial Sequence
  Description of Artificial Sequence: Synthetic oligonucleotide
cucguccaggggccgggug

SEQ ID NO: 3021724 - RNA, 19 nt, Artificial Sequence
  Description of Artificial Sequence: Synthetic oligonucleotide
cgaagcagggaguggguuc

SEQ ID NO: 3021725 - RNA, 19 nt, Artificial Sequence
  Description of Artificial Sequence: Synthetic oligonucleotide
cuucucccgcucgcgcacc

SEQ ID NO: 3021726 - RNA, 19 nt, Artificial Sequence
  Description of Artificial Sequence: Synthetic oligonucleotide
cugcagcggcugcuucucc

SEQ ID NO: 3021727 - RNA, 19 nt, Artificial Sequence
  Description of Artificial Sequence: Synthetic oligonucleotide
cuuggcucgcgguccaggu

SEQ ID NO: 3021728 - RNA, 19 nt, Artificial Sequence
  Description of Artificial Sequence: Synthetic oligonucleotide
guccggguccgaguccgag

SEQ ID NO: 3021729 - RNA, 19 nt, Artificial Sequence
  Description of Artificial Sequence: Synthetic oligonucleotide
ucucccgcucgcgcaccag

SEQ ID NO: 3021730 - RNA, 19 nt, Artificial Sequence
  Description of Artificial Sequence: Synthetic oligonucleotide
auggaggccgccggcugca

SEQ ID NO: 3021731 - RNA, 19 nt, Artificial Sequence
  Description of Artificial Sequence: Synthetic oligonucleotide
ccgcucgcgcaccagcacg

SEQ ID NO: 3021732 - RNA, 19 nt, Artificial Sequence
  Description of Artificial Sequence: Synthetic oligonucleotide
gcagggaguggguucaccu

SEQ ID NO: 3021733 - RNA, 19 nt, Artificial Sequence
  Description of Artificial Sequence: Synthetic oligonucleotide
gcauggaggccgccggcug

SEQ ID NO: 3021734 - RNA, 19 nt, Artificial Sequence
  Description of Artificial Sequence: Synthetic oligonucleotide
gcggcuggcagguccccag

SEQ ID NO: 3021735 - RNA, 19 nt, Artificial Sequence
  Description of Artificial Sequence: Synthetic oligonucleotide
ccaggcgaagcagggagug

SEQ ID NO: 3021736 - RNA, 19 nt, Artificial Sequence
  Description of Artificial Sequence: Synthetic oligonucleotide
ccggguccgaguccgaguc

SEQ ID NO: 3021737 - RNA, 19 nt, Artificial Sequence
  Description of Artificial Sequence: Synthetic oligonucleotide
ggaucucagccagcagggc

SEQ ID NO: 3021738 - RNA, 19 nt, Artificial Sequence
  Description of Artificial Sequence: Synthetic oligonucleotide
guucaccuugagggccaag

SEQ ID NO: 3021739 - RNA, 19 nt, Artificial Sequence
  Description of Artificial Sequence: Synthetic oligonucleotide
uggugaucucgggcaugga

SEQ ID NO: 3021740 - RNA, 19 nt, Artificial Sequence
  Description of Artificial Sequence: Synthetic oligonucleotide
aggcucguccaggggccgg

SEQ ID NO: 3021741 - RNA, 19 nt, Artificial Sequence
  Description of Artificial Sequence: Synthetic oligonucleotide
gagucggggccagguccag

SEQ ID NO: 3021742 - RNA, 19 nt, Artificial Sequence
  Description of Artificial Sequence: Synthetic oligonucleotide
gcaccagcacgaaguugcg

SEQ ID NO: 3021743 - RNA, 19 nt, Artificial Sequence
  Description of Artificial Sequence: Synthetic oligonucleotide
ccgggugcggugaugguga

SEQ ID NO: 3021744 - RNA, 19 nt, Artificial Sequence
  Description of Artificial Sequence: Synthetic oligonucleotide
aguccgagucggggccagg

SEQ ID NO: 3021745 - RNA, 19 nt, Artificial Sequence
  Description of Artificial Sequence: Synthetic oligonucleotide
caggcucguccaggggccg

SEQ ID NO: 3021746 - RNA, 19 nt, Artificial Sequence
  Description of Artificial Sequence: Synthetic oligonucleotide
ccguucuggaucucagcca

SEQ ID NO: 3021747 - RNA, 19 nt, Artificial Sequence
  Description of Artificial Sequence: Synthetic oligonucleotide
cucccgguccggguccgag

SEQ ID NO: 3021748 - RNA, 19 nt, Artificial Sequence
  Description of Artificial Sequence: Synthetic oligonucleotide
gccgggugcggugauggug

SEQ ID NO: 3021749 - RNA, 19 nt, Artificial Sequence
  Description of Artificial Sequence: Synthetic oligonucleotide
guccagguccaggggcccc

SEQ ID NO: 3021750 - RNA, 19 nt, Artificial Sequence
  Description of Artificial Sequence: Synthetic oligonucleotide
ccuugagggccaagggaca

SEQ ID NO: 3021751 - RNA, 19 nt, Artificial Sequence
  Description of Artificial Sequence: Synthetic oligonucleotide
cuccuucuuggcucgcggu

SEQ ID NO: 3021752 - RNA, 19 nt, Artificial Sequence
  Description of Artificial Sequence: Synthetic oligonucleotide
gggcauggaggccgccggc

SEQ ID NO: 3021753 - RNA, 19 nt, Artificial Sequence
  Description of Artificial Sequence: Synthetic oligonucleotide
aggccgccggcugcagcgg

SEQ ID NO: 3021754 - RNA, 19 nt, Artificial Sequence
  Description of Artificial Sequence: Synthetic oligonucleotide
gcagccguucuggaucuca

SEQ ID NO: 3021755 - RNA, 19 nt, Artificial Sequence
  Description of Artificial Sequence: Synthetic oligonucleotide
uggaggccgccggcugcag

SEQ ID NO: 3021756 - RNA, 19 nt, Artificial Sequence
  Description of Artificial Sequence: Synthetic oligonucleotide
cagggcuuucugcgucuca

SEQ ID NO: 3021757 - RNA, 19 nt, Artificial Sequence
  Description of Artificial Sequence: Synthetic oligonucleotide
cggugauggugaucucggg

SEQ ID NO: 3021758 - RNA, 19 nt, Artificial Sequence
  Description of Artificial Sequence: Synthetic oligonucleotide
gggaguggguucaccuuga

SEQ ID NO: 3021759 - RNA, 19 nt, Artificial Sequence
  Description of Artificial Sequence: Synthetic oligonucleotide
ggacagugccaugagucgu

SEQ ID NO: 3021760 - RNA, 19 nt, Artificial Sequence
  Description of Artificial Sequence: Synthetic oligonucleotide
ggaggccgccggcugcagc

SEQ ID NO: 3021761 - RNA, 19 nt, Artificial Sequence
  Description of Artificial Sequence: Synthetic oligonucleotide
gguccagguccaggggccc

SEQ ID NO: 3021762 - RNA, 19 nt, Artificial Sequence
  Description of Artificial Sequence: Synthetic oligonucleotide
gcugcagcggcugcuucuc

SEQ ID NO: 3021763 - RNA, 19 nt, Artificial Sequence
  Description of Artificial Sequence: Synthetic oligonucleotide
gccaagggacagugccaug

SEQ ID NO: 3021764 - RNA, 19 nt, Artificial Sequence
  Description of Artificial Sequence: Synthetic oligonucleotide
ggggccccauucugugccc

SEQ ID NO: 3021765 - RNA, 19 nt, Artificial Sequence
  Description of Artificial Sequence: Synthetic oligonucleotide
cgggcauggaggccgccgg

SEQ ID NO: 3021766 - RNA, 19 nt, Artificial Sequence
  Description of Artificial Sequence: Synthetic oligonucleotide
cgaguccgaguccgagucg

SEQ ID NO: 3021767 - RNA, 19 nt, Artificial Sequence
  Description of Artificial Sequence: Synthetic oligonucleotide
cccgguccggguccgaguc

SEQ ID NO: 3021768 - RNA, 19 nt, Artificial Sequence
  Description of Artificial Sequence: Synthetic oligonucleotide
gguccaggggccccauucu

SEQ ID NO: 3021769 - RNA, 19 nt, Artificial Sequence
  Description of Artificial Sequence: Synthetic oligonucleotide
cccgcggcuggcagguccc

SEQ ID NO: 3021770 - RNA, 19 nt, Artificial Sequence
  Description of Artificial Sequence: Synthetic oligonucleotide
gguccagguccaggcgaag

SEQ ID NO: 3021771 - RNA, 19 nt, Artificial Sequence
  Description of Artificial Sequence: Synthetic oligonucleotide
gguccaggcgaagcaggga

SEQ ID NO: 3021772 - RNA, 19 nt, Artificial Sequence
  Description of Artificial Sequence: Synthetic oligonucleotide
gccaugagucgucgucguc

SEQ ID NO: 3021773 - RNA, 19 nt, Artificial Sequence
  Description of Artificial Sequence: Synthetic oligonucleotide
ccccgcggcuggcaggucc

SEQ ID NO: 3021774 - RNA, 19 nt, Artificial Sequence
  Description of Artificial Sequence: Synthetic oligonucleotide
gggccaagggacagugcca

SEQ ID NO: 3021775 - RNA, 19 nt, Artificial Sequence
  Description of Artificial Sequence: Synthetic oligonucleotide
cagggaguggguucaccuu

SEQ ID NO: 3021776 - RNA, 19 nt, Artificial Sequence
  Description of Artificial Sequence: Synthetic oligonucleotide
guccaggggccgggugcgg

SEQ ID NO: 3021777 - RNA, 19 nt, Artificial Sequence
  Description of Artificial Sequence: Synthetic oligonucleotide
cgguccggguccgaguccg

SEQ ID NO: 3021778 - RNA, 19 nt, Artificial Sequence
  Description of Artificial Sequence: Synthetic oligonucleotide
cgaguccgaguccgagucc

SEQ ID NO: 3021779 - RNA, 19 nt, Artificial Sequence
  Description of Artificial Sequence: Synthetic oligonucleotide
gugcggugauggugaucuc

SEQ ID NO: 3021780 - RNA, 19 nt, Artificial Sequence
  Description of Artificial Sequence: Synthetic oligonucleotide
aguugcgcuugcagccguu

SEQ ID NO: 3021781 - RNA, 19 nt, Artificial Sequence
  Description of Artificial Sequence: Synthetic oligonucleotide
gcuugcagccguucuggau

SEQ ID NO: 3021782 - RNA, 19 nt, Artificial Sequence
  Description of Artificial Sequence: Synthetic oligonucleotide
gcuggcagguccccaggcu

SEQ ID NO: 3021783 - RNA, 19 nt, Artificial Sequence
  Description of Artificial Sequence: Synthetic oligonucleotide
cucgggcauggaggccgcc

SEQ ID NO: 3021784 - RNA, 19 nt, Artificial Sequence
  Description of Artificial Sequence: Synthetic oligonucleotide
gcgcaccagcacgaaguug

SEQ ID NO: 3021785 - RNA, 19 nt, Artificial Sequence
  Description of Artificial Sequence: Synthetic oligonucleotide
ugcagccguucuggaucuc

SEQ ID NO: 3021786 - RNA, 19 nt, Artificial Sequence
  Description of Artificial Sequence: Synthetic oligonucleotide
ccaggggccgggugcggug

SEQ ID NO: 3021787 - RNA, 19 nt, Artificial Sequence
  Description of Artificial Sequence: Synthetic oligonucleotide
guccgagucggggccaggu

SEQ ID NO: 3021788 - RNA, 19 nt, Artificial Sequence
  Description of Artificial Sequence: Synthetic oligonucleotide
ggccaagggacagugccau

SEQ ID NO: 3021789 - RNA, 19 nt, Artificial Sequence
  Description of Artificial Sequence: Synthetic oligonucleotide
gggccccauucugugcccc

SEQ ID NO: 3021790 - RNA, 19 nt, Artificial Sequence
  Description of Artificial Sequence: Synthetic oligonucleotide
cguccaggggccgggugcg

SEQ ID NO: 3021791 - RNA, 19 nt, Artificial Sequence
  Description of Artificial Sequence: Synthetic oligonucleotide
caccgccuccuucuuggcu

SEQ ID NO: 3021792 - RNA, 19 nt, Artificial Sequence
  Description of Artificial Sequence: Synthetic oligonucleotide
ccccaggcucguccagggg

SEQ ID NO: 3021793 - RNA, 19 nt, Artificial Sequence
  Description of Artificial Sequence: Synthetic oligonucleotide
aggggccgggugcggugau

SEQ ID NO: 3021794 - RNA, 19 nt, Artificial Sequence
  Description of Artificial Sequence: Synthetic oligonucleotide
caggggccgggugcgguga

SEQ ID NO: 3021795 - RNA, 19 nt, Artificial Sequence
  Description of Artificial Sequence: Synthetic oligonucleotide
cgagucggggccaggucca

SEQ ID NO: 3021796 - RNA, 19 nt, Artificial Sequence
  Description of Artificial Sequence: Synthetic oligonucleotide
cccgcucgcgcaccagcac

SEQ ID NO: 3021797 - RNA, 19 nt, Artificial Sequence
  Description of Artificial Sequence: Synthetic oligonucleotide
cgucucaaugaaggucuuc

SEQ ID NO: 3021798 - RNA, 19 nt, Artificial Sequence
  Description of Artificial Sequence: Synthetic oligonucleotide
ccgguccggguccgagucc

SEQ ID NO: 3021799 - RNA, 19 nt, Artificial Sequence
  Description of Artificial Sequence: Synthetic oligonucleotide
gcacgaaguugcgcuugca

SEQ ID NO: 3021800 - RNA, 19 nt, Artificial Sequence
  Description of Artificial Sequence: Synthetic oligonucleotide
ccuccuccuccuccuccug

SEQ ID NO: 3021801 - RNA, 19 nt, Artificial Sequence
  Description of Artificial Sequence: Synthetic oligonucleotide
cagugccaugagucgucgu

SEQ ID NO: 3021802 - RNA, 19 nt, Artificial Sequence
  Description of Artificial Sequence: Synthetic oligonucleotide
gcagggcuuucugcgucuc

SEQ ID NO: 3021803 - RNA, 19 nt, Artificial Sequence
  Description of Artificial Sequence: Synthetic oligonucleotide
gggcuuucugcgucucaau

SEQ ID NO: 3021804 - RNA, 19 nt, Artificial Sequence
  Description of Artificial Sequence: Synthetic oligonucleotide
ccagcagggcuuucugcgu

SEQ ID NO: 3021805 - RNA, 19 nt, Artificial Sequence
  Description of Artificial Sequence: Synthetic oligonucleotide
cggcugcuucucccgcucg

SEQ ID NO: 3021806 - RNA, 19 nt, Artificial Sequence
  Description of Artificial Sequence: Synthetic oligonucleotide
cggguccgaguccgagucc

SEQ ID NO: 3021807 - RNA, 19 nt, Artificial Sequence
  Description of Artificial Sequence: Synthetic oligonucleotide
gggugcggugauggugauc

SEQ ID NO: 3021808 - RNA, 19 nt, Artificial Sequence
  Description of Artificial Sequence: Synthetic oligonucleotide
ggcgaagcagggagugggu

SEQ ID NO: 3021809 - RNA, 19 nt, Artificial Sequence
  Description of Artificial Sequence: Synthetic oligonucleotide
cgcucgcgcaccagcacga

SEQ ID NO: 3021810 - RNA, 19 nt, Artificial Sequence
  Description of Artificial Sequence: Synthetic oligonucleotide
ggggccgggugcggugaug

SEQ ID NO: 3021811 - RNA, 19 nt, Artificial Sequence
  Description of Artificial Sequence: Synthetic oligonucleotide
gcucgcgguccagguccag

SEQ ID NO: 3021812 - RNA, 19 nt, Artificial Sequence
  Description of Artificial Sequence: Synthetic oligonucleotide
cgguccagguccaggcgaa

SEQ ID NO: 3021813 - RNA, 19 nt, Artificial Sequence
  Description of Artificial Sequence: Synthetic oligonucleotide
gcgaagcagggaguggguu

SEQ ID NO: 3021814 - RNA, 19 nt, Artificial Sequence
  Description of Artificial Sequence: Synthetic oligonucleotide
ccagcacgaaguugcgcuu

SEQ ID NO: 3021815 - RNA, 19 nt, Artificial Sequence
  Description of Artificial Sequence: Synthetic oligonucleotide
ccgccggcugcagcggcug

SEQ ID NO: 3021816 - RNA, 19 nt, Artificial Sequence
  Description of Artificial Sequence: Synthetic oligonucleotide
cgcuugcagccguucugga

SEQ ID NO: 3021817 - RNA, 19 nt, Artificial Sequence
  Description of Artificial Sequence: Synthetic oligonucleotide
gcagguccccaggcucguc

SEQ ID NO: 3021818 - RNA, 19 nt, Artificial Sequence
  Description of Artificial Sequence: Synthetic oligonucleotide
ggcagguccccaggcucgu

SEQ ID NO: 3021819 - RNA, 19 nt, Artificial Sequence
  Description of Artificial Sequence: Synthetic oligonucleotide
gguccggguccgaguccga

SEQ ID NO: 3021820 - RNA, 19 nt, Artificial Sequence
  Description of Artificial Sequence: Synthetic oligonucleotide
gcucgcgcaccagcacgaa

SEQ ID NO: 3021821 - RNA, 19 nt, Artificial Sequence
  Description of Artificial Sequence: Synthetic oligonucleotide
ggccgggugcggugauggu

SEQ ID NO: 3021822 - RNA, 19 nt, Artificial Sequence
  Description of Artificial Sequence: Synthetic oligonucleotide
cggcugcagcggcugcuuc

SEQ ID NO: 3021823 - RNA, 19 nt, Artificial Sequence
  Description of Artificial Sequence: Synthetic oligonucleotide
cgaguccgagucggggcca

SEQ ID NO: 3021824 - RNA, 19 nt, Artificial Sequence
  Description of Artificial Sequence: Synthetic oligonucleotide
cgucgucgucgucgucguc

SEQ ID NO: 3021825 - RNA, 19 nt, Artificial Sequence
  Description of Artificial Sequence: Synthetic oligonucleotide
gcgucucaaugaaggucuu

SEQ ID NO: 3021826 - RNA, 19 nt, Artificial Sequence
  Description of Artificial Sequence: Synthetic oligonucleotide
cagguccaggggccccauu

SEQ ID NO: 3021827 - RNA, 19 nt, Artificial Sequence
  Description of Artificial Sequence: Synthetic oligonucleotide
gcucguccaggggccgggu

SEQ ID NO: 3021828 - RNA, 19 nt, Artificial Sequence
  Description of Artificial Sequence: Synthetic oligonucleotide
gccgccggcugcagcggcu

SEQ ID NO: 3021829 - RNA, 19 nt, Artificial Sequence
  Description of Artificial Sequence: Synthetic oligonucleotide
cgcgcaccagcacgaaguu

SEQ ID NO: 3021830 - RNA, 19 nt, Artificial Sequence
  Description of Artificial Sequence: Synthetic oligonucleotide
cgcggcuggcaggucccca

SEQ ID NO: 3021831 - RNA, 19 nt, Artificial Sequence
  Description of Artificial Sequence: Synthetic oligonucleotide
ccucccgguccggguccga

SEQ ID NO: 3021832 - RNA, 19 nt, Artificial Sequence
  Description of Artificial Sequence: Synthetic oligonucleotide
ccagguccaggggccccau

SEQ ID NO: 3021833 - RNA, 19 nt, Artificial Sequence
  Description of Artificial Sequence: Synthetic oligonucleotide
cgggugcggugauggugau

SEQ ID NO: 3021834 - RNA, 19 nt, Artificial Sequence
  Description of Artificial Sequence: Synthetic oligonucleotide
auauuaugcacguaggggc

SEQ ID NO: 3021835 - RNA, 19 nt, Artificial Sequence
  Description of Artificial Sequence: Synthetic oligonucleotide
ugugauauuaugcacguag

SEQ ID NO: 3021836 - RNA, 19 nt, Artificial Sequence
  Description of Artificial Sequence: Synthetic oligonucleotide
uaucauacagcaaagaccu

SEQ ID NO: 3021837 - RNA, 19 nt, Artificial Sequence
  Description of Artificial Sequence: Synthetic oligonucleotide
gauacuuucgguuuguuac

SEQ ID NO: 3021838 - RNA, 19 nt, Artificial Sequence
  Description of Artificial Sequence: Synthetic oligonucleotide
aauuaguccguuuccacag

SEQ ID NO: 3021839 - RNA, 19 nt, Artificial Sequence
  Description of Artificial Sequence: Synthetic oligonucleotide
aauucaugcuugcagcugg

SEQ ID NO: 3021840 - RNA, 19 nt, Artificial Sequence
  Description of Artificial Sequence: Synthetic oligonucleotide
ucagcuuccuaucauacag

SEQ ID NO: 3021841 - RNA, 19 nt, Artificial Sequence
  Description of Artificial Sequence: Synthetic oligonucleotide
cuaucauacagcaaagacc

SEQ ID NO: 3021842 - RNA, 19 nt, Artificial Sequence
  Description of Artificial Sequence: Synthetic oligonucleotide
ugaagcugcaugaaguagg

SEQ ID NO: 3021843 - RNA, 19 nt, Artificial Sequence
  Description of Artificial Sequence: Synthetic oligonucleotide
acagcaaagaccuucagca

SEQ ID NO: 3021844 - RNA, 19 nt, Artificial Sequence
  Description of Artificial Sequence: Synthetic oligonucleotide
acaaaauucaugcuugcag

SEQ ID NO: 3021845 - RNA, 19 nt, Artificial Sequence
  Description of Artificial Sequence: Synthetic oligonucleotide
gauauuaugcacguagggg

SEQ ID NO: 3021846 - RNA, 19 nt, Artificial Sequence
  Description of Artificial Sequence: Synthetic oligonucleotide
ugauauuaugcacguaggg

SEQ ID NO: 3021847 - RNA, 19 nt, Artificial Sequence
  Description of Artificial Sequence: Synthetic oligonucleotide
ucagcuuuggauacuuucg

SEQ ID NO: 3021848 - RNA, 19 nt, Artificial Sequence
  Description of Artificial Sequence: Synthetic oligonucleotide
ugcagaacgggucugaagc

SEQ ID NO: 3021849 - RNA, 19 nt, Artificial Sequence
  Description of Artificial Sequence: Synthetic oligonucleotide
agcugcaugaaguaggcac

SEQ ID NO: 3021850 - RNA, 19 nt, Artificial Sequence
  Description of Artificial Sequence: Synthetic oligonucleotide
aagcacaucauccacuucu

SEQ ID NO: 3021851 - RNA, 19 nt, Artificial Sequence
  Description of Artificial Sequence: Synthetic oligonucleotide
uccacauucucccaggcag

SEQ ID NO: 3021852 - RNA, 19 nt, Artificial Sequence
  Description of Artificial Sequence: Synthetic oligonucleotide
caaaauucaugcuugcagc

SEQ ID NO: 3021853 - RNA, 19 nt, Artificial Sequence
  Description of Artificial Sequence: Synthetic oligonucleotide
uagucauuggcucaucugc

SEQ ID NO: 3021854 - RNA, 19 nt, Artificial Sequence
  Description of Artificial Sequence: Synthetic oligonucleotide
ugcaguagaguccacauuc

SEQ ID NO: 3021855 - RNA, 19 nt, Artificial Sequence
  Description of Artificial Sequence: Synthetic oligonucleotide
gauguucacauuuuggaca

SEQ ID NO: 3021856 - RNA, 19 nt, Artificial Sequence
  Description of Artificial Sequence: Synthetic oligonucleotide
cagcacacaaaauucaugc

SEQ ID NO: 3021857 - RNA, 19 nt, Artificial Sequence
  Description of Artificial Sequence: Synthetic oligonucleotide
agaagguagucauuggcuc

SEQ ID NO: 3021858 - RNA, 19 nt, Artificial Sequence
  Description of Artificial Sequence: Synthetic oligonucleotide
aaguguugcaggcgaaacg

SEQ ID NO: 3021859 - RNA, 19 nt, Artificial Sequence
  Description of Artificial Sequence: Synthetic oligonucleotide
cuugcgugugauauuaugc

SEQ ID NO: 3021860 - RNA, 19 nt, Artificial Sequence
  Description of Artificial Sequence: Synthetic oligonucleotide
aacgauggcaacgcugucc

SEQ ID NO: 3021861 - RNA, 19 nt, Artificial Sequence
  Description of Artificial Sequence: Synthetic oligonucleotide
acuucuuucagcuuuggau

SEQ ID NO: 3021862 - RNA, 19 nt, Artificial Sequence
  Description of Artificial Sequence: Synthetic oligonucleotide
auacuuucgguuuguuacc

SEQ ID NO: 3021863 - RNA, 19 nt, Artificial Sequence
  Description of Artificial Sequence: Synthetic oligonucleotide
aguagaguccacauucucc

SEQ ID NO: 3021864 - RNA, 19 nt, Artificial Sequence
  Description of Artificial Sequence: Synthetic oligonucleotide
acaauuaguccguuuccac

SEQ ID NO: 3021865 - RNA, 19 nt, Artificial Sequence
  Description of Artificial Sequence: Synthetic oligonucleotide
ucacauuuuggacauggcu

SEQ ID NO: 3021866 - RNA, 19 nt, Artificial Sequence
  Description of Artificial Sequence: Synthetic oligonucleotide
uuggacauggcucugcagu

SEQ ID NO: 3021867 - RNA, 19 nt, Artificial Sequence
  Description of Artificial Sequence: Synthetic oligonucleotide
cacauuuuggacauggcuc

SEQ ID NO: 3021868 - RNA, 19 nt, Artificial Sequence
  Description of Artificial Sequence: Synthetic oligonucleotide
uccacaauuaguccguuuc

SEQ ID NO: 3021869 - RNA, 19 nt, Artificial Sequence
  Description of Artificial Sequence: Synthetic oligonucleotide
cacacaaaauucaugcuug

SEQ ID NO: 3021870 - RNA, 19 nt, Artificial Sequence
  Description of Artificial Sequence: Synthetic oligonucleotide
acgauggcaacgcuguccc

SEQ ID NO: 3021871 - RNA, 19 nt, Artificial Sequence
  Description of Artificial Sequence: Synthetic oligonucleotide
guagaguccacauucuccc

SEQ ID NO: 3021872 - RNA, 19 nt, Artificial Sequence
  Description of Artificial Sequence: Synthetic oligonucleotide
agucucuccagcgaugucc

SEQ ID NO: 3021873 - RNA, 19 nt, Artificial Sequence
  Description of Artificial Sequence: Synthetic oligonucleotide
agcauugcagcacuuguag

SEQ ID NO: 3021874 - RNA, 19 nt, Artificial Sequence
  Description of Artificial Sequence: Synthetic oligonucleotide
uccacacugagcauugcag

SEQ ID NO: 3021875 - RNA, 19 nt, Artificial Sequence
  Description of Artificial Sequence: Synthetic oligonucleotide
uguagaagguagucauugg

SEQ ID NO: 3021876 - RNA, 19 nt, Artificial Sequence
  Description of Artificial Sequence: Synthetic oligonucleotide
aguccguuuccacagcucg

SEQ ID NO: 3021877 - RNA, 19 nt, Artificial Sequence
  Description of Artificial Sequence: Synthetic oligonucleotide
acacaaaauucaugcuugc

SEQ ID NO: 3021878 - RNA, 19 nt, Artificial Sequence
  Description of Artificial Sequence: Synthetic oligonucleotide
uuggcucaucugcagaacg

SEQ ID NO: 3021879 - RNA, 19 nt, Artificial Sequence
  Description of Artificial Sequence: Synthetic oligonucleotide
uuuggauacuuucgguuug

SEQ ID NO: 3021880 - RNA, 19 nt, Artificial Sequence
  Description of Artificial Sequence: Synthetic oligonucleotide
uuguagaagguagucauug

SEQ ID NO: 3021881 - RNA, 19 nt, Artificial Sequence
  Description of Artificial Sequence: Synthetic oligonucleotide
acuuguagaagguagucau

SEQ ID NO: 3021882 - RNA, 19 nt, Artificial Sequence
  Description of Artificial Sequence: Synthetic oligonucleotide
auggcucugcaguagaguc

SEQ ID NO: 3021883 - RNA, 19 nt, Artificial Sequence
  Description of Artificial Sequence: Synthetic oligonucleotide
uauuaugcacguaggggca

SEQ ID NO: 3021884 - RNA, 19 nt, Artificial Sequence
  Description of Artificial Sequence: Synthetic oligonucleotide
acauuuuggacauggcucu

SEQ ID NO: 3021885 - RNA, 19 nt, Artificial Sequence
  Description of Artificial Sequence: Synthetic oligonucleotide
aacgcugucccuccuccac

SEQ ID NO: 3021886 - RNA, 19 nt, Artificial Sequence
  Description of Artificial Sequence: Synthetic oligonucleotide
guucacauuuuggacaugg

SEQ ID NO: 3021887 - RNA, 19 nt, Artificial Sequence
  Description of Artificial Sequence: Synthetic oligonucleotide
ucagcacacaaaauucaug

SEQ ID NO: 3021888 - RNA, 19 nt, Artificial Sequence
  Description of Artificial Sequence: Synthetic oligonucleotide
uucgguuuguuaccuugcg

SEQ ID NO: 3021889 - RNA, 19 nt, Artificial Sequence
  Description of Artificial Sequence: Synthetic oligonucleotide
cuugcagcuggguaagucc

SEQ ID NO: 3021890 - RNA, 19 nt, Artificial Sequence
  Description of Artificial Sequence: Synthetic oligonucleotide
guugcaggcgaaacgaugg

SEQ ID NO: 3021891 - RNA, 19 nt, Artificial Sequence
  Description of Artificial Sequence: Synthetic oligonucleotide
uugcgugugauauuaugca

SEQ ID NO: 3021892 - RNA, 19 nt, Artificial Sequence
  Description of Artificial Sequence: Synthetic oligonucleotide
uuuguuaccuugcguguga

SEQ ID NO: 3021893 - RNA, 19 nt, Artificial Sequence
  Description of Artificial Sequence: Synthetic oligonucleotide
uugcagcacuuguagaagg

SEQ ID NO: 3021894 - RNA, 19 nt, Artificial Sequence
  Description of Artificial Sequence: Synthetic oligonucleotide
agcuggguaaguccugccc

SEQ ID NO: 3021895 - RNA, 19 nt, Artificial Sequence
  Description of Artificial Sequence: Synthetic oligonucleotide
ugagcauugcagcacuugu

SEQ ID NO: 3021896 - RNA, 19 nt, Artificial Sequence
  Description of Artificial Sequence: Synthetic oligonucleotide
auuaguccguuuccacagc

SEQ ID NO: 3021897 - RNA, 19 nt, Artificial Sequence
  Description of Artificial Sequence: Synthetic oligonucleotide
uguugcaggcgaaacgaug

SEQ ID NO: 3021898 - RNA, 19 nt, Artificial Sequence
  Description of Artificial Sequence: Synthetic oligonucleotide
cuccuccacaauuaguccg

SEQ ID NO: 3021899 - RNA, 19 nt, Artificial Sequence
  Description of Artificial Sequence: Synthetic oligonucleotide
uucagcuuuggauacuuuc

SEQ ID NO: 3021900 - RNA, 19 nt, Artificial Sequence
  Description of Artificial Sequence: Synthetic oligonucleotide
ucaucugcagaacgggucu

SEQ ID NO: 3021901 - RNA, 19 nt, Artificial Sequence
  Description of Artificial Sequence: Synthetic oligonucleotide
uuccuaucauacagcaaag

SEQ ID NO: 3021902 - RNA, 19 nt, Artificial Sequence
  Description of Artificial Sequence: Synthetic oligonucleotide
cauucucccaggcagcugc

SEQ ID NO: 3021903 - RNA, 19 nt, Artificial Sequence
  Description of Artificial Sequence: Synthetic oligonucleotide
ucauacagcaaagaccuuc

SEQ ID NO: 3021904 - RNA, 19 nt, Artificial Sequence
  Description of Artificial Sequence: Synthetic oligonucleotide
aaauucaugcuugcagcug

SEQ ID NO: 3021905 - RNA, 19 nt, Artificial Sequence
  Description of Artificial Sequence: Synthetic oligonucleotide
aggggcaaguguugcaggc

SEQ ID NO: 3021906 - RNA, 19 nt, Artificial Sequence
  Description of Artificial Sequence: Synthetic oligonucleotide
uuucgguuuguuaccuugc

SEQ ID NO: 3021907 - RNA, 19 nt, Artificial Sequence
  Description of Artificial Sequence: Synthetic oligonucleotide
cuuucgguuuguuaccuug

SEQ ID NO: 3021908 - RNA, 19 nt, Artificial Sequence
  Description of Artificial Sequence: Synthetic oligonucleotide
accuucagcacacaaaauu

SEQ ID NO: 3021909 - RNA, 19 nt, Artificial Sequence
  Description of Artificial Sequence: Synthetic oligonucleotide
uggcucaucugcagaacgg

SEQ ID NO: 3021910 - RNA, 19 nt, Artificial Sequence
  Description of Artificial Sequence: Synthetic oligonucleotide
cacaucauccacuucuuuc

SEQ ID NO: 3021911 - RNA, 19 nt, Artificial Sequence
  Description of Artificial Sequence: Synthetic oligonucleotide
aaagaccuucagcacacaa

SEQ ID NO: 3021912 - RNA, 19 nt, Artificial Sequence
  Description of Artificial Sequence: Synthetic oligonucleotide
auggcaacgcugucccucc

SEQ ID NO: 3021913 - RNA, 19 nt, Artificial Sequence
  Description of Artificial Sequence: Synthetic oligonucleotide
uucuuucagcuuuggauac

SEQ ID NO: 3021914 - RNA, 19 nt, Artificial Sequence
  Description of Artificial Sequence: Synthetic oligonucleotide
uucagcacacaaaauucau

SEQ ID NO: 3021915 - RNA, 19 nt, Artificial Sequence
  Description of Artificial Sequence: Synthetic oligonucleotide
gugauauuaugcacguagg

SEQ ID NO: 3021916 - RNA, 19 nt, Artificial Sequence
  Description of Artificial Sequence: Synthetic oligonucleotide
aguguugcaggcgaaacga

SEQ ID NO: 3021917 - RNA, 19 nt, Artificial Sequence
  Description of Artificial Sequence: Synthetic oligonucleotide
cagcacuuguagaagguag

SEQ ID NO: 3021918 - RNA, 19 nt, Artificial Sequence
  Description of Artificial Sequence: Synthetic oligonucleotide
agaguccacauucucccag

SEQ ID NO: 3021919 - RNA, 19 nt, Artificial Sequence
  Description of Artificial Sequence: Synthetic oligonucleotide
aguccacauucucccaggc

SEQ ID NO: 3021920 - RNA, 19 nt, Artificial Sequence
  Description of Artificial Sequence: Synthetic oligonucleotide
agcuuccuaucauacagca

SEQ ID NO: 3021921 - RNA, 19 nt, Artificial Sequence
  Description of Artificial Sequence: Synthetic oligonucleotide
uaaguccugcccuuagucu

SEQ ID NO: 3021922 - RNA, 19 nt, Artificial Sequence
  Description of Artificial Sequence: Synthetic oligonucleotide
ucauuggcucaucugcaga

SEQ ID NO: 3021923 - RNA, 19 nt, Artificial Sequence
  Description of Artificial Sequence: Synthetic oligonucleotide
cagcuuuggauacuuucgg

SEQ ID NO: 3021924 - RNA, 19 nt, Artificial Sequence
  Description of Artificial Sequence: Synthetic oligonucleotide
uucacauuuuggacauggc

SEQ ID NO: 3021925 - RNA, 19 nt, Artificial Sequence
  Description of Artificial Sequence: Synthetic oligonucleotide
ugcacguaggggcaagugu

SEQ ID NO: 3021926 - RNA, 19 nt, Artificial Sequence
  Description of Artificial Sequence: Synthetic oligonucleotide
uuaguccguuuccacagcu

SEQ ID NO: 3021927 - RNA, 19 nt, Artificial Sequence
  Description of Artificial Sequence: Synthetic oligonucleotide
ucugcaguagaguccacau

SEQ ID NO: 3021928 - RNA, 19 nt, Artificial Sequence
  Description of Artificial Sequence: Synthetic oligonucleotide
gaguccacauucucccagg

SEQ ID NO: 3021929 - RNA, 19 nt, Artificial Sequence
  Description of Artificial Sequence: Synthetic oligonucleotide
auguucacauuuuggacau

SEQ ID NO: 3021930 - RNA, 19 nt, Artificial Sequence
  Description of Artificial Sequence: Synthetic oligonucleotide
gaagguagucauuggcuca

SEQ ID NO: 3021931 - RNA, 19 nt, Artificial Sequence
  Description of Artificial Sequence: Synthetic oligonucleotide
cuucuuucagcuuuggaua

SEQ ID NO: 3021932 - RNA, 19 nt, Artificial Sequence
  Description of Artificial Sequence: Synthetic oligonucleotide
agaacgggucugaagcugc

SEQ ID NO: 3021933 - RNA, 19 nt, Artificial Sequence
  Description of Artificial Sequence: Synthetic oligonucleotide
ugcgugugauauuaugcac

SEQ ID NO: 3021934 - RNA, 19 nt, Artificial Sequence
  Description of Artificial Sequence: Synthetic oligonucleotide
guagucauuggcucaucug

SEQ ID NO: 3021935 - RNA, 19 nt, Artificial Sequence
  Description of Artificial Sequence: Synthetic oligonucleotide
ucuccagcgauguccacac

SEQ ID NO: 3021936 - RNA, 19 nt, Artificial Sequence
  Description of Artificial Sequence: Synthetic oligonucleotide
ccuaucauacagcaaagac

SEQ ID NO: 3021937 - RNA, 19 nt, Artificial Sequence
  Description of Artificial Sequence: Synthetic oligonucleotide
gaagcugcaugaaguaggc

SEQ ID NO: 3021938 - RNA, 19 nt, Artificial Sequence
  Description of Artificial Sequence: Synthetic oligonucleotide
ugcccuuagucucuccagc

SEQ ID NO: 3021939 - RNA, 19 nt, Artificial Sequence
  Description of Artificial Sequence: Synthetic oligonucleotide
auugcagcacuuguagaag

SEQ ID NO: 3021940 - RNA, 19 nt, Artificial Sequence
  Description of Artificial Sequence: Synthetic oligonucleotide
guaaguccugcccuuaguc

SEQ ID NO: 3021941 - RNA, 19 nt, Artificial Sequence
  Description of Artificial Sequence: Synthetic oligonucleotide
aaacgauggcaacgcuguc

SEQ ID NO: 3021942 - RNA, 19 nt, Artificial Sequence
  Description of Artificial Sequence: Synthetic oligonucleotide
caugaaguaggcacgggga

SEQ ID NO: 3021943 - RNA, 19 nt, Artificial Sequence
  Description of Artificial Sequence: Synthetic oligonucleotide
uccuccacaauuaguccgu

SEQ ID NO: 3021944 - RNA, 19 nt, Artificial Sequence
  Description of Artificial Sequence: Synthetic oligonucleotide
cauugcagcacuuguagaa

SEQ ID NO: 3021945 - RNA, 19 nt, Artificial Sequence
  Description of Artificial Sequence: Synthetic oligonucleotide
cucaucugcagaacggguc

SEQ ID NO: 3021946 - RNA, 19 nt, Artificial Sequence
  Description of Artificial Sequence: Synthetic oligonucleotide
agcacacaaaauucaugcu

SEQ ID NO: 3021947 - RNA, 19 nt, Artificial Sequence
  Description of Artificial Sequence: Synthetic oligonucleotide
agcgauguccacacugagc

SEQ ID NO: 3021948 - RNA, 19 nt, Artificial Sequence
  Description of Artificial Sequence: Synthetic oligonucleotide
cuucagcacacaaaauuca

SEQ ID NO: 3021949 - RNA, 19 nt, Artificial Sequence
  Description of Artificial Sequence: Synthetic oligonucleotide
uuagucucuccagcgaugu

SEQ ID NO: 3021950 - RNA, 19 nt, Artificial Sequence
  Description of Artificial Sequence: Synthetic oligonucleotide
uuuggacauggcucugcag

SEQ ID NO: 3021951 - RNA, 19 nt, Artificial Sequence
  Description of Artificial Sequence: Synthetic oligonucleotide
uugcagcuggguaaguccu

SEQ ID NO: 3021952 - RNA, 19 nt, Artificial Sequence
  Description of Artificial Sequence: Synthetic oligonucleotide
cauacagcaaagaccuuca

SEQ ID NO: 3021953 - RNA, 19 nt, Artificial Sequence
  Description of Artificial Sequence: Synthetic oligonucleotide
ugcagcacuuguagaaggu

SEQ ID NO: 3021954 - RNA, 19 nt, Artificial Sequence
  Description of Artificial Sequence: Synthetic oligonucleotide
caauuaguccguuuccaca

SEQ ID NO: 3021955 - RNA, 19 nt, Artificial Sequence
  Description of Artificial Sequence: Synthetic oligonucleotide
gucauuggcucaucugcag

SEQ ID NO: 3021956 - RNA, 19 nt, Artificial Sequence
  Description of Artificial Sequence: Synthetic oligonucleotide
ggauguucacauuuuggac

SEQ ID NO: 3021957 - RNA, 19 nt, Artificial Sequence
  Description of Artificial Sequence: Synthetic oligonucleotide
gggauguucacauuuugga

SEQ ID NO: 3021958 - RNA, 19 nt, Artificial Sequence
  Description of Artificial Sequence: Synthetic oligonucleotide
ucaugcuugcagcugggua

SEQ ID NO: 3021959 - RNA, 19 nt, Artificial Sequence
  Description of Artificial Sequence: Synthetic oligonucleotide
gcgauguccacacugagca

SEQ ID NO: 3021960 - RNA, 19 nt, Artificial Sequence
  Description of Artificial Sequence: Synthetic oligonucleotide
acacugagcauugcagcac

SEQ ID NO: 3021961 - RNA, 19 nt, Artificial Sequence
  Description of Artificial Sequence: Synthetic oligonucleotide
uaggggcaaguguugcagg

SEQ ID NO: 3021962 - RNA, 19 nt, Artificial Sequence
  Description of Artificial Sequence: Synthetic oligonucleotide
cuuagucucuccagcgaug

SEQ ID NO: 3021963 - RNA, 19 nt, Artificial Sequence
  Description of Artificial Sequence: Synthetic oligonucleotide
caugcuugcagcuggguaa

SEQ ID NO: 3021964 - RNA, 19 nt, Artificial Sequence
  Description of Artificial Sequence: Synthetic oligonucleotide
uggcucugcaguagagucc

SEQ ID NO: 3021965 - RNA, 19 nt, Artificial Sequence
  Description of Artificial Sequence: Synthetic oligonucleotide
ucgguuuguuaccuugcgu

SEQ ID NO: 3021966 - RNA, 19 nt, Artificial Sequence
  Description of Artificial Sequence: Synthetic oligonucleotide
aagaccuucagcacacaaa

SEQ ID NO: 3021967 - RNA, 19 nt, Artificial Sequence
  Description of Artificial Sequence: Synthetic oligonucleotide
gaaacgauggcaacgcugu

SEQ ID NO: 3021968 - RNA, 19 nt, Artificial Sequence
  Description of Artificial Sequence: Synthetic oligonucleotide
agcuuuggauacuuucggu

SEQ ID NO: 3021969 - RNA, 19 nt, Artificial Sequence
  Description of Artificial Sequence: Synthetic oligonucleotide
auuggcucaucugcagaac

SEQ ID NO: 3021970 - RNA, 19 nt, Artificial Sequence
  Description of Artificial Sequence: Synthetic oligonucleotide
ugucccuccuccacaauua

SEQ ID NO: 3021971 - RNA, 19 nt, Artificial Sequence
  Description of Artificial Sequence: Synthetic oligonucleotide
guaggggcaaguguugcag

SEQ ID NO: 3021972 - RNA, 19 nt, Artificial Sequence
  Description of Artificial Sequence: Synthetic oligonucleotide
aggcgaaacgauggcaacg

SEQ ID NO: 3021973 - RNA, 19 nt, Artificial Sequence
  Description of Artificial Sequence: Synthetic oligonucleotide
uccuaucauacagcaaaga

SEQ ID NO: 3021974 - RNA, 19 nt, Artificial Sequence
  Description of Artificial Sequence: Synthetic oligonucleotide
acgggucugaagcugcaug

SEQ ID NO: 3021975 - RNA, 19 nt, Artificial Sequence
  Description of Artificial Sequence: Synthetic oligonucleotide
gauggcaacgcugucccuc

SEQ ID NO: 3021976 - RNA, 19 nt, Artificial Sequence
  Description of Artificial Sequence: Synthetic oligonucleotide
gcgugugauauuaugcacg

SEQ ID NO: 3021977 - RNA, 19 nt, Artificial Sequence
  Description of Artificial Sequence: Synthetic oligonucleotide
acguaggggcaaguguugc

SEQ ID NO: 3021978 - RNA, 19 nt, Artificial Sequence
  Description of Artificial Sequence: Synthetic oligonucleotide
guuuguuaccuugcgugug

SEQ ID NO: 3021979 - RNA, 19 nt, Artificial Sequence
  Description of Artificial Sequence: Synthetic oligonucleotide
cagcuuccuaucauacagc

SEQ ID NO: 3021980 - RNA, 19 nt, Artificial Sequence
  Description of Artificial Sequence: Synthetic oligonucleotide
cugaagcugcaugaaguag

SEQ ID NO: 3021981 - RNA, 19 nt, Artificial Sequence
  Description of Artificial Sequence: Synthetic oligonucleotide
aagguagucauuggcucau

SEQ ID NO: 3021982 - RNA, 19 nt, Artificial Sequence
  Description of Artificial Sequence: Synthetic oligonucleotide
caucauccacuucuuucag

SEQ ID NO: 3021983 - RNA, 19 nt, Artificial Sequence
  Description of Artificial Sequence: Synthetic oligonucleotide
uaccuugcgugugauauua

SEQ ID NO: 3021984 - RNA, 19 nt, Artificial Sequence
  Description of Artificial Sequence: Synthetic oligonucleotide
cacacugagcauugcagca

SEQ ID NO: 3021985 - RNA, 19 nt, Artificial Sequence
  Description of Artificial Sequence: Synthetic oligonucleotide
uccguuuccacagcucgga

SEQ ID NO: 3021986 - RNA, 19 nt, Artificial Sequence
  Description of Artificial Sequence: Synthetic oligonucleotide
guuaccuugcgugugauau

SEQ ID NO: 3021987 - RNA, 19 nt, Artificial Sequence
  Description of Artificial Sequence: Synthetic oligonucleotide
uacuuucgguuuguuaccu

SEQ ID NO: 3021988 - RNA, 19 nt, Artificial Sequence
  Description of Artificial Sequence: Synthetic oligonucleotide
gcugcaugaaguaggcacg

SEQ ID NO: 3021989 - RNA, 19 nt, Artificial Sequence
  Description of Artificial Sequence: Synthetic oligonucleotide
ggggauguucacauuuugg

SEQ ID NO: 3021990 - RNA, 19 nt, Artificial Sequence
  Description of Artificial Sequence: Synthetic oligonucleotide
uuaugcacguaggggcaag

SEQ ID NO: 3021991 - RNA, 19 nt, Artificial Sequence
  Description of Artificial Sequence: Synthetic oligonucleotide
caaguguugcaggcgaaac

SEQ ID NO: 3021992 - RNA, 19 nt, Artificial Sequence
  Description of Artificial Sequence: Synthetic oligonucleotide
gacauggcucugcaguaga

SEQ ID NO: 3021993 - RNA, 19 nt, Artificial Sequence
  Description of Artificial Sequence: Synthetic oligonucleotide
cugcaugaaguaggcacgg

SEQ ID NO: 3021994 - RNA, 19 nt, Artificial Sequence
  Description of Artificial Sequence: Synthetic oligonucleotide
cagcaaagaccuucagcac

SEQ ID NO: 3021995 - RNA, 19 nt, Artificial Sequence
  Description of Artificial Sequence: Synthetic oligonucleotide
uggacauggcucugcagua

SEQ ID NO: 3021996 - RNA, 19 nt, Artificial Sequence
  Description of Artificial Sequence: Synthetic oligonucleotide
ugcaggcgaaacgauggca

SEQ ID NO: 3021997 - RNA, 19 nt, Artificial Sequence
  Description of Artificial Sequence: Synthetic oligonucleotide
ugcagcuggguaaguccug

SEQ ID NO: 3021998 - RNA, 19 nt, Artificial Sequence
  Description of Artificial Sequence: Synthetic oligonucleotide
cugcccuuagucucuccag

SEQ ID NO: 3021999 - RNA, 19 nt, Artificial Sequence
  Description of Artificial Sequence: Synthetic oligonucleotide
cugcagaacgggucugaag

SEQ ID NO: 3022000 - RNA, 19 nt, Artificial Sequence
  Description of Artificial Sequence: Synthetic oligonucleotide
uagaguccacauucuccca

SEQ ID NO: 3022001 - RNA, 19 nt, Artificial Sequence
  Description of Artificial Sequence: Synthetic oligonucleotide
caccaagcacaucauccac

SEQ ID NO: 3022002 - RNA, 19 nt, Artificial Sequence
  Description of Artificial Sequence: Synthetic oligonucleotide
uuccacagcucggacagaa

SEQ ID NO: 3022003 - RNA, 19 nt, Artificial Sequence
  Description of Artificial Sequence: Synthetic oligonucleotide
guaggcacggggauguuca

SEQ ID NO: 3022004 - RNA, 19 nt, Artificial Sequence
  Description of Artificial Sequence: Synthetic oligonucleotide
cccuccuccacaauuaguc

SEQ ID NO: 3022005 - RNA, 19 nt, Artificial Sequence
  Description of Artificial Sequence: Synthetic oligonucleotide
uuggauacuuucgguuugu

SEQ ID NO: 3022006 - RNA, 19 nt, Artificial Sequence
  Description of Artificial Sequence: Synthetic oligonucleotide
cauuggcucaucugcagaa

SEQ ID NO: 3022007 - RNA, 19 nt, Artificial Sequence
  Description of Artificial Sequence: Synthetic oligonucleotide
cacguaggggcaaguguug

SEQ ID NO: 3022008 - RNA, 19 nt, Artificial Sequence
  Description of Artificial Sequence: Synthetic oligonucleotide
cacaauuaguccguuucca

SEQ ID NO: 3022009 - RNA, 19 nt, Artificial Sequence
  Description of Artificial Sequence: Synthetic oligonucleotide
agcacuuguagaagguagu

SEQ ID NO: 3022010 - RNA, 19 nt, Artificial Sequence
  Description of Artificial Sequence: Synthetic oligonucleotide
caguagaguccacauucuc

SEQ ID NO: 3022011 - RNA, 19 nt, Artificial Sequence
  Description of Artificial Sequence: Synthetic oligonucleotide
ucuuucagcuuuggauacu

SEQ ID NO: 3022012 - RNA, 19 nt, Artificial Sequence
  Description of Artificial Sequence: Synthetic oligonucleotide
cgguuuguuaccuugcgug

SEQ ID NO: 3022013 - RNA, 19 nt, Artificial Sequence
  Description of Artificial Sequence: Synthetic oligonucleotide
uaguccguuuccacagcuc

SEQ ID NO: 3022014 - RNA, 19 nt, Artificial Sequence
  Description of Artificial Sequence: Synthetic oligonucleotide
auucaugcuugcagcuggg

SEQ ID NO: 3022015 - RNA, 19 nt, Artificial Sequence
  Description of Artificial Sequence: Synthetic oligonucleotide
ucccuccuccacaauuagu

SEQ ID NO: 3022016 - RNA, 19 nt, Artificial Sequence
  Description of Artificial Sequence: Synthetic oligonucleotide
gcccuuagucucuccagcg

SEQ ID NO: 3022017 - RNA, 19 nt, Artificial Sequence
  Description of Artificial Sequence: Synthetic oligonucleotide
cugagcauugcagcacuug

SEQ ID NO: 3022018 - RNA, 19 nt, Artificial Sequence
  Description of Artificial Sequence: Synthetic oligonucleotide
ggcgaaacgauggcaacgc

SEQ ID NO: 3022019 - RNA, 19 nt, Artificial Sequence
  Description of Artificial Sequence: Synthetic oligonucleotide
accaagcacaucauccacu

SEQ ID NO: 3022020 - RNA, 19 nt, Artificial Sequence
  Description of Artificial Sequence: Synthetic oligonucleotide
caggcgaaacgauggcaac

SEQ ID NO: 3022021 - RNA, 19 nt, Artificial Sequence
  Description of Artificial Sequence: Synthetic oligonucleotide
ccacaauuaguccguuucc

SEQ ID NO: 3022022 - RNA, 19 nt, Artificial Sequence
  Description of Artificial Sequence: Synthetic oligonucleotide
cuuuggauacuuucgguuu

SEQ ID NO: 3022023 - RNA, 19 nt, Artificial Sequence
  Description of Artificial Sequence: Synthetic oligonucleotide
cagaacgggucugaagcug

SEQ ID NO: 3022024 - RNA, 19 nt, Artificial Sequence
  Description of Artificial Sequence: Synthetic oligonucleotide
gucugaagcugcaugaagu

SEQ ID NO: 3022025 - RNA, 19 nt, Artificial Sequence
  Description of Artificial Sequence: Synthetic oligonucleotide
gucccuccuccacaauuag

SEQ ID NO: 3022026 - RNA, 19 nt, Artificial Sequence
  Description of Artificial Sequence: Synthetic oligonucleotide
cacuuguagaagguaguca

SEQ ID NO: 3022027 - RNA, 19 nt, Artificial Sequence
  Description of Artificial Sequence: Synthetic oligonucleotide
cacaaaauucaugcuugca

SEQ ID NO: 3022028 - RNA, 19 nt, Artificial Sequence
  Description of Artificial Sequence: Synthetic oligonucleotide
auguccacacugagcauug

SEQ ID NO: 3022029 - RNA, 19 nt, Artificial Sequence
  Description of Artificial Sequence: Synthetic oligonucleotide
uuaccuugcgugugauauu

SEQ ID NO: 3022030 - RNA, 19 nt, Artificial Sequence
  Description of Artificial Sequence: Synthetic oligonucleotide
gcaaagaccuucagcacac

SEQ ID NO: 3022031 - RNA, 19 nt, Artificial Sequence
  Description of Artificial Sequence: Synthetic oligonucleotide
ccuugcgugugauauuaug

SEQ ID NO: 3022032 - RNA, 19 nt, Artificial Sequence
  Description of Artificial Sequence: Synthetic oligonucleotide
uguuaccuugcgugugaua

SEQ ID NO: 3022033 - RNA, 19 nt, Artificial Sequence
  Description of Artificial Sequence: Synthetic oligonucleotide
cagcgauguccacacugag

SEQ ID NO: 3022034 - RNA, 19 nt, Artificial Sequence
  Description of Artificial Sequence: Synthetic oligonucleotide
gcaacgcugucccuccucc

SEQ ID NO: 3022035 - RNA, 19 nt, Artificial Sequence
  Description of Artificial Sequence: Synthetic oligonucleotide
uaugcacguaggggcaagu

SEQ ID NO: 3022036 - RNA, 19 nt, Artificial Sequence
  Description of Artificial Sequence: Synthetic oligonucleotide
cgaaacgauggcaacgcug

SEQ ID NO: 3022037 - RNA, 19 nt, Artificial Sequence
  Description of Artificial Sequence: Synthetic oligonucleotide
ucugcagaacgggucugaa

SEQ ID NO: 3022038 - RNA, 19 nt, Artificial Sequence
  Description of Artificial Sequence: Synthetic oligonucleotide
acauggcucugcaguagag

SEQ ID NO: 3022039 - RNA, 19 nt, Artificial Sequence
  Description of Artificial Sequence: Synthetic oligonucleotide
uucaugcuugcagcugggu

SEQ ID NO: 3022040 - RNA, 19 nt, Artificial Sequence
  Description of Artificial Sequence: Synthetic oligonucleotide
ccuccuccacaauuagucc

SEQ ID NO: 3022041 - RNA, 19 nt, Artificial Sequence
  Description of Artificial Sequence: Synthetic oligonucleotide
aagcugcaugaaguaggca

SEQ ID NO: 3022042 - RNA, 19 nt, Artificial Sequence
  Description of Artificial Sequence: Synthetic oligonucleotide
auuaugcacguaggggcaa

SEQ ID NO: 3022043 - RNA, 19 nt, Artificial Sequence
  Description of Artificial Sequence: Synthetic oligonucleotide
cauuuuggacauggcucug

SEQ ID NO: 3022044 - RNA, 19 nt, Artificial Sequence
  Description of Artificial Sequence: Synthetic oligonucleotide
uguucacauuuuggacaug

SEQ ID NO: 3022045 - RNA, 19 nt, Artificial Sequence
  Description of Artificial Sequence: Synthetic oligonucleotide
augcacguaggggcaagug

SEQ ID NO: 3022046 - RNA, 19 nt, Artificial Sequence
  Description of Artificial Sequence: Synthetic oligonucleotide
ggauacuuucgguuuguua

SEQ ID NO: 3022047 - RNA, 19 nt, Artificial Sequence
  Description of Artificial Sequence: Synthetic oligonucleotide
acuuucgguuuguuaccuu

SEQ ID NO: 3022048 - RNA, 19 nt, Artificial Sequence
  Description of Artificial Sequence: Synthetic oligonucleotide
cagcuggguaaguccugcc

SEQ ID NO: 3022049 - RNA, 19 nt, Artificial Sequence
  Description of Artificial Sequence: Synthetic oligonucleotide
ggguaaguccugcccuuag

SEQ ID NO: 3022050 - RNA, 19 nt, Artificial Sequence
  Description of Artificial Sequence: Synthetic oligonucleotide
acgcugucccuccuccaca

SEQ ID NO: 3022051 - RNA, 19 nt, Artificial Sequence
  Description of Artificial Sequence: Synthetic oligonucleotide
gcacacaaaauucaugcuu

SEQ ID NO: 3022052 - RNA, 19 nt, Artificial Sequence
  Description of Artificial Sequence: Synthetic oligonucleotide
caagcacaucauccacuuc

SEQ ID NO: 3022053 - RNA, 19 nt, Artificial Sequence
  Description of Artificial Sequence: Synthetic oligonucleotide
aucugcagaacgggucuga

SEQ ID NO: 3022054 - RNA, 19 nt, Artificial Sequence
  Description of Artificial Sequence: Synthetic oligonucleotide
ggggcaaguguugcaggcg

SEQ ID NO: 3022055 - RNA, 19 nt, Artificial Sequence
  Description of Artificial Sequence: Synthetic oligonucleotide
cacuucuuucagcuuugga

SEQ ID NO: 3022056 - RNA, 19 nt, Artificial Sequence
  Description of Artificial Sequence: Synthetic oligonucleotide
aacgggucugaagcugcau

SEQ ID NO: 3022057 - RNA, 19 nt, Artificial Sequence
  Description of Artificial Sequence: Synthetic oligonucleotide
ggcucugcaguagagucca

SEQ ID NO: 3022058 - RNA, 19 nt, Artificial Sequence
  Description of Artificial Sequence: Synthetic oligonucleotide
gguuuguuaccuugcgugu

SEQ ID NO: 3022059 - RNA, 19 nt, Artificial Sequence
  Description of Artificial Sequence: Synthetic oligonucleotide
cucuccagcgauguccaca

SEQ ID NO: 3022060 - RNA, 19 nt, Artificial Sequence
  Description of Artificial Sequence: Synthetic oligonucleotide
ccacauucucccaggcagc

SEQ ID NO: 3022061 - RNA, 19 nt, Artificial Sequence
  Description of Artificial Sequence: Synthetic oligonucleotide
gagcauugcagcacuugua

SEQ ID NO: 3022062 - RNA, 19 nt, Artificial Sequence
  Description of Artificial Sequence: Synthetic oligonucleotide
gucucuccagcgaugucca

SEQ ID NO: 3022063 - RNA, 19 nt, Artificial Sequence
  Description of Artificial Sequence: Synthetic oligonucleotide
uagucucuccagcgauguc

SEQ ID NO: 3022064 - RNA, 19 nt, Artificial Sequence
  Description of Artificial Sequence: Synthetic oligonucleotide
uuguuaccuugcgugugau

SEQ ID NO: 3022065 - RNA, 19 nt, Artificial Sequence
  Description of Artificial Sequence: Synthetic oligonucleotide
gggcaaguguugcaggcga

SEQ ID NO: 3022066 - RNA, 19 nt, Artificial Sequence
  Description of Artificial Sequence: Synthetic oligonucleotide
agguagucauuggcucauc

SEQ ID NO: 3022067 - RNA, 19 nt, Artificial Sequence
  Description of Artificial Sequence: Synthetic oligonucleotide
ggacauggcucugcaguag

SEQ ID NO: 3022068 - RNA, 19 nt, Artificial Sequence
  Description of Artificial Sequence: Synthetic oligonucleotide
cucugcaguagaguccaca

SEQ ID NO: 3022069 - RNA, 19 nt, Artificial Sequence
  Description of Artificial Sequence: Synthetic oligonucleotide
uaggcacggggauguucac

SEQ ID NO: 3022070 - RNA, 19 nt, Artificial Sequence
  Description of Artificial Sequence: Synthetic oligonucleotide
caucugcagaacgggucug

SEQ ID NO: 3022071 - RNA, 19 nt, Artificial Sequence
  Description of Artificial Sequence: Synthetic oligonucleotide
gguagucauuggcucaucu

SEQ ID NO: 3022072 - RNA, 19 nt, Artificial Sequence
  Description of Artificial Sequence: Synthetic oligonucleotide
gcuuuggauacuuucgguu

SEQ ID NO: 3022073 - RNA, 19 nt, Artificial Sequence
  Description of Artificial Sequence: Synthetic oligonucleotide
gcacuuguagaagguaguc

SEQ ID NO: 3022074 - RNA, 19 nt, Artificial Sequence
  Description of Artificial Sequence: Synthetic oligonucleotide
agcacaucauccacuucuu

SEQ ID NO: 3022075 - RNA, 19 nt, Artificial Sequence
  Description of Artificial Sequence: Synthetic oligonucleotide
uccugcccuuagucucucc

SEQ ID NO: 3022076 - RNA, 19 nt, Artificial Sequence
  Description of Artificial Sequence: Synthetic oligonucleotide
uggguaaguccugcccuua

SEQ ID NO: 3022077 - RNA, 19 nt, Artificial Sequence
  Description of Artificial Sequence: Synthetic oligonucleotide
uggauacuuucgguuuguu

SEQ ID NO: 3022078 - RNA, 19 nt, Artificial Sequence
  Description of Artificial Sequence: Synthetic oligonucleotide
gaacgggucugaagcugca

SEQ ID NO: 3022079 - RNA, 19 nt, Artificial Sequence
  Description of Artificial Sequence: Synthetic oligonucleotide
uuuccacagcucggacaga

SEQ ID NO: 3022080 - RNA, 19 nt, Artificial Sequence
  Description of Artificial Sequence: Synthetic oligonucleotide
ucucuccagcgauguccac

SEQ ID NO: 3022081 - RNA, 19 nt, Artificial Sequence
  Description of Artificial Sequence: Synthetic oligonucleotide
cucccaggcagcugcucca

SEQ ID NO: 3022082 - RNA, 19 nt, Artificial Sequence
  Description of Artificial Sequence: Synthetic oligonucleotide
gcuggguaaguccugcccu

SEQ ID NO: 3022083 - RNA, 19 nt, Artificial Sequence
  Description of Artificial Sequence: Synthetic oligonucleotide
cuuguagaagguagucauu

SEQ ID NO: 3022084 - RNA, 19 nt, Artificial Sequence
  Description of Artificial Sequence: Synthetic oligonucleotide
aggcacggggauguucaca

SEQ ID NO: 3022085 - RNA, 19 nt, Artificial Sequence
  Description of Artificial Sequence: Synthetic oligonucleotide
gcaggcgaaacgauggcaa

SEQ ID NO: 3022086 - RNA, 19 nt, Artificial Sequence
  Description of Artificial Sequence: Synthetic oligonucleotide
ccagcgauguccacacuga

SEQ ID NO: 3022087 - RNA, 19 nt, Artificial Sequence
  Description of Artificial Sequence: Synthetic oligonucleotide
cacugagcauugcagcacu

SEQ ID NO: 3022088 - RNA, 19 nt, Artificial Sequence
  Description of Artificial Sequence: Synthetic oligonucleotide
ggcacggggauguucacau

SEQ ID NO: 3022089 - RNA, 19 nt, Artificial Sequence
  Description of Artificial Sequence: Synthetic oligonucleotide
uggcaacgcugucccuccu

SEQ ID NO: 3022090 - RNA, 19 nt, Artificial Sequence
  Description of Artificial Sequence: Synthetic oligonucleotide
ucccaggcagcugcuccac

SEQ ID NO: 3022091 - RNA, 19 nt, Artificial Sequence
  Description of Artificial Sequence: Synthetic oligonucleotide
gcuugcagcuggguaaguc

SEQ ID NO: 3022092 - RNA, 19 nt, Artificial Sequence
  Description of Artificial Sequence: Synthetic oligonucleotide
gguaaguccugcccuuagu

SEQ ID NO: 3022093 - RNA, 19 nt, Artificial Sequence
  Description of Artificial Sequence: Synthetic oligonucleotide
acggggauguucacauuuu

SEQ ID NO: 3022094 - RNA, 19 nt, Artificial Sequence
  Description of Artificial Sequence: Synthetic oligonucleotide
cuuucagcuuuggauacuu

SEQ ID NO: 3022095 - RNA, 19 nt, Artificial Sequence
  Description of Artificial Sequence: Synthetic oligonucleotide
caacgcugucccuccucca

SEQ ID NO: 3022096 - RNA, 19 nt, Artificial Sequence
  Description of Artificial Sequence: Synthetic oligonucleotide
ggcaacgcugucccuccuc

SEQ ID NO: 3022097 - RNA, 19 nt, Artificial Sequence
  Description of Artificial Sequence: Synthetic oligonucleotide
ugcuugcagcuggguaagu

SEQ ID NO: 3022098 - RNA, 19 nt, Artificial Sequence
  Description of Artificial Sequence: Synthetic oligonucleotide
ccugcccuuagucucucca

SEQ ID NO: 3022099 - RNA, 19 nt, Artificial Sequence
  Description of Artificial Sequence: Synthetic oligonucleotide
cguuuccacagcucggaca

SEQ ID NO: 3022100 - RNA, 19 nt, Artificial Sequence
  Description of Artificial Sequence: Synthetic oligonucleotide
gcagaacgggucugaagcu

SEQ ID NO: 3022101 - RNA, 19 nt, Artificial Sequence
  Description of Artificial Sequence: Synthetic oligonucleotide
caaagaccuucagcacaca

SEQ ID NO: 3022102 - RNA, 19 nt, Artificial Sequence
  Description of Artificial Sequence: Synthetic oligonucleotide
cugucccuccuccacaauu

SEQ ID NO: 3022103 - RNA, 19 nt, Artificial Sequence
  Description of Artificial Sequence: Synthetic oligonucleotide
gcaaguguugcaggcgaaa

SEQ ID NO: 3022104 - RNA, 19 nt, Artificial Sequence
  Description of Artificial Sequence: Synthetic oligonucleotide
acugagcauugcagcacuu

SEQ ID NO: 3022105 - RNA, 19 nt, Artificial Sequence
  Description of Artificial Sequence: Synthetic oligonucleotide
cacauucucccaggcagcu

SEQ ID NO: 3022106 - RNA, 19 nt, Artificial Sequence
  Description of Artificial Sequence: Synthetic oligonucleotide
cgugugauauuaugcacgu

SEQ ID NO: 3022107 - RNA, 19 nt, Artificial Sequence
  Description of Artificial Sequence: Synthetic oligonucleotide
aucauacagcaaagaccuu

SEQ ID NO: 3022108 - RNA, 19 nt, Artificial Sequence
  Description of Artificial Sequence: Synthetic oligonucleotide
cccuuagucucuccagcga

SEQ ID NO: 3022109 - RNA, 19 nt, Artificial Sequence
  Description of Artificial Sequence: Synthetic oligonucleotide
gugugauauuaugcacgua

SEQ ID NO: 3022110 - RNA, 19 nt, Artificial Sequence
  Description of Artificial Sequence: Synthetic oligonucleotide
gcagcacuuguagaaggua

SEQ ID NO: 3022111 - RNA, 19 nt, Artificial Sequence
  Description of Artificial Sequence: Synthetic oligonucleotide
cuggguaaguccugcccuu

SEQ ID NO: 3022112 - RNA, 19 nt, Artificial Sequence
  Description of Artificial Sequence: Synthetic oligonucleotide
gggucugaagcugcaugaa

SEQ ID NO: 3022113 - RNA, 19 nt, Artificial Sequence
  Description of Artificial Sequence: Synthetic oligonucleotide
ccaagcacaucauccacuu

SEQ ID NO: 3022114 - RNA, 19 nt, Artificial Sequence
  Description of Artificial Sequence: Synthetic oligonucleotide
accuugcgugugauauuau

SEQ ID NO: 3022115 - RNA, 19 nt, Artificial Sequence
  Description of Artificial Sequence: Synthetic oligonucleotide
gcaguagaguccacauucu

SEQ ID NO: 3022116 - RNA, 19 nt, Artificial Sequence
  Description of Artificial Sequence: Synthetic oligonucleotide
gcacguaggggcaaguguu

SEQ ID NO: 3022117 - RNA, 19 nt, Artificial Sequence
  Description of Artificial Sequence: Synthetic oligonucleotide
ccguuuccacagcucggac

SEQ ID NO: 3022118 - RNA, 19 nt, Artificial Sequence
  Description of Artificial Sequence: Synthetic oligonucleotide
ccuuagucucuccagcgau

SEQ ID NO: 3022119 - RNA, 19 nt, Artificial Sequence
  Description of Artificial Sequence: Synthetic oligonucleotide
cugcaguagaguccacauu

SEQ ID NO: 3022120 - RNA, 19 nt, Artificial Sequence
  Description of Artificial Sequence: Synthetic oligonucleotide
cuccacaauuaguccguuu

SEQ ID NO: 3022121 - RNA, 19 nt, Artificial Sequence
  Description of Artificial Sequence: Synthetic oligonucleotide
cguaggggcaaguguugca

SEQ ID NO: 3022122 - RNA, 19 nt, Artificial Sequence
  Description of Artificial Sequence: Synthetic oligonucleotide
cauccacuucuuucagcuu

SEQ ID NO: 3022123 - RNA, 19 nt, Artificial Sequence
  Description of Artificial Sequence: Synthetic oligonucleotide
gcucaucugcagaacgggu

SEQ ID NO: 3022124 - RNA, 19 nt, Artificial Sequence
  Description of Artificial Sequence: Synthetic oligonucleotide
ggcaaguguugcaggcgaa

SEQ ID NO: 3022125 - RNA, 19 nt, Artificial Sequence
  Description of Artificial Sequence: Synthetic oligonucleotide
guguugcaggcgaaacgau

SEQ ID NO: 3022126 - RNA, 19 nt, Artificial Sequence
  Description of Artificial Sequence: Synthetic oligonucleotide
guccugcccuuagucucuc

SEQ ID NO: 3022127 - RNA, 19 nt, Artificial Sequence
  Description of Artificial Sequence: Synthetic oligonucleotide
cccaggcagcugcuccacc

SEQ ID NO: 3022128 - RNA, 19 nt, Artificial Sequence
  Description of Artificial Sequence: Synthetic oligonucleotide
gcgaaacgauggcaacgcu

SEQ ID NO: 3022129 - RNA, 19 nt, Artificial Sequence
  Description of Artificial Sequence: Synthetic oligonucleotide
cgcugucccuccuccacaa

SEQ ID NO: 3022130 - RNA, 19 nt, Artificial Sequence
  Description of Artificial Sequence: Synthetic oligonucleotide
cuccagcgauguccacacu

SEQ ID NO: 3022131 - RNA, 19 nt, Artificial Sequence
  Description of Artificial Sequence: Synthetic oligonucleotide
gcucugcaguagaguccac

SEQ ID NO: 3022132 - RNA, 19 nt, Artificial Sequence
  Description of Artificial Sequence: Synthetic oligonucleotide
cgauguccacacugagcau

SEQ ID NO: 3022133 - RNA, 19 nt, Artificial Sequence
  Description of Artificial Sequence: Synthetic oligonucleotide
ccuccacaauuaguccguu

SEQ ID NO: 3022134 - RNA, 19 nt, Artificial Sequence
  Description of Artificial Sequence: Synthetic oligonucleotide
cgauggcaacgcugucccu

SEQ ID NO: 3022135 - RNA, 19 nt, Artificial Sequence
  Description of Artificial Sequence: Synthetic oligonucleotide
aaucacauguacuucgucc

SEQ ID NO: 3022136 - RNA, 19 nt, Artificial Sequence
  Description of Artificial Sequence: Synthetic oligonucleotide
aauauuucauuaaugagac

SEQ ID NO: 3022137 - RNA, 19 nt, Artificial Sequence
  Description of Artificial Sequence: Synthetic oligonucleotide
aagaauaguaaucacaugu

SEQ ID NO: 3022138 - RNA, 19 nt, Artificial Sequence
  Description of Artificial Sequence: Synthetic oligonucleotide
aaguauuuguuccaauucc

SEQ ID NO: 3022139 - RNA, 19 nt, Artificial Sequence
  Description of Artificial Sequence: Synthetic oligonucleotide
ucaaauauuucauuaauga

SEQ ID NO: 3022140 - RNA, 19 nt, Artificial Sequence
  Description of Artificial Sequence: Synthetic oligonucleotide
uggacugcaacuuuuaccg

SEQ ID NO: 3022141 - RNA, 19 nt, Artificial Sequence
  Description of Artificial Sequence: Synthetic oligonucleotide
auuaaugagacugucaagg

SEQ ID NO: 3022142 - RNA, 19 nt, Artificial Sequence
  Description of Artificial Sequence: Synthetic oligonucleotide
aaauauuucauuaaugaga

SEQ ID NO: 3022143 - RNA, 19 nt, Artificial Sequence
  Description of Artificial Sequence: Synthetic oligonucleotide
ugaauggaagcucugacag

SEQ ID NO: 3022144 - RNA, 19 nt, Artificial Sequence
  Description of Artificial Sequence: Synthetic oligonucleotide
acuucguccacauauaguc

SEQ ID NO: 3022145 - RNA, 19 nt, Artificial Sequence
  Description of Artificial Sequence: Synthetic oligonucleotide
cuuguuaucaaaguuaggc

SEQ ID NO: 3022146 - RNA, 19 nt, Artificial Sequence
  Description of Artificial Sequence: Synthetic oligonucleotide
uuuaccgaggccuugaaug

SEQ ID NO: 3022147 - RNA, 19 nt, Artificial Sequence
  Description of Artificial Sequence: Synthetic oligonucleotide
aguaaucacauguacuucg

SEQ ID NO: 3022148 - RNA, 19 nt, Artificial Sequence
  Description of Artificial Sequence: Synthetic oligonucleotide
aaagucacaggcuacacaa

SEQ ID NO: 3022149 - RNA, 19 nt, Artificial Sequence
  Description of Artificial Sequence: Synthetic oligonucleotide
uccaauuccacauggaaug

SEQ ID NO: 3022150 - RNA, 19 nt, Artificial Sequence
  Description of Artificial Sequence: Synthetic oligonucleotide
ucuagaagaauaguaauca

SEQ ID NO: 3022151 - RNA, 19 nt, Artificial Sequence
  Description of Artificial Sequence: Synthetic oligonucleotide
uuuguaaaagacuuguuau

SEQ ID NO: 3022152 - RNA, 19 nt, Artificial Sequence
  Description of Artificial Sequence: Synthetic oligonucleotide
ucauuaaugagacugucaa

SEQ ID NO: 3022153 - RNA, 19 nt, Artificial Sequence
  Description of Artificial Sequence: Synthetic oligonucleotide
uuuuguaaaagacuuguua

SEQ ID NO: 3022154 - RNA, 19 nt, Artificial Sequence
  Description of Artificial Sequence: Synthetic oligonucleotide
uagaagaauaguaaucaca

SEQ ID NO: 3022155 - RNA, 19 nt, Artificial Sequence
  Description of Artificial Sequence: Synthetic oligonucleotide
caaauauuucauuaaugag

SEQ ID NO: 3022156 - RNA, 19 nt, Artificial Sequence
  Description of Artificial Sequence: Synthetic oligonucleotide
uguaaaagacuuguuauca

SEQ ID NO: 3022157 - RNA, 19 nt, Artificial Sequence
  Description of Artificial Sequence: Synthetic oligonucleotide
aaugagacugucaagguca

SEQ ID NO: 3022158 - RNA, 19 nt, Artificial Sequence
  Description of Artificial Sequence: Synthetic oligonucleotide
aaagacuuguuaucaaagu

SEQ ID NO: 3022159 - RNA, 19 nt, Artificial Sequence
  Description of Artificial Sequence: Synthetic oligonucleotide
cuauccgaaagucacaggc

SEQ ID NO: 3022160 - RNA, 19 nt, Artificial Sequence
  Description of Artificial Sequence: Synthetic oligonucleotide
uguuguuucuagaagaaua

SEQ ID NO: 3022161 - RNA, 19 nt, Artificial Sequence
  Description of Artificial Sequence: Synthetic oligonucleotide
aaaguuaggcuccucaaau

SEQ ID NO: 3022162 - RNA, 19 nt, Artificial Sequence
  Description of Artificial Sequence: Synthetic oligonucleotide
uguuaucaaaguuaggcuc

SEQ ID NO: 3022163 - RNA, 19 nt, Artificial Sequence
  Description of Artificial Sequence: Synthetic oligonucleotide
uguuucuagaagaauagua

SEQ ID NO: 3022164 - RNA, 19 nt, Artificial Sequence
  Description of Artificial Sequence: Synthetic oligonucleotide
acgcaguuuggucacaugc

SEQ ID NO: 3022165 - RNA, 19 nt, Artificial Sequence
  Description of Artificial Sequence: Synthetic oligonucleotide
aauaguaaucacauguacu

SEQ ID NO: 3022166 - RNA, 19 nt, Artificial Sequence
  Description of Artificial Sequence: Synthetic oligonucleotide
uguuacuugaagaucugga

SEQ ID NO: 3022167 - RNA, 19 nt, Artificial Sequence
  Description of Artificial Sequence: Synthetic oligonucleotide
uuuuacauguuucgguuga

SEQ ID NO: 3022168 - RNA, 19 nt, Artificial Sequence
  Description of Artificial Sequence: Synthetic oligonucleotide
auaguaaucacauguacuu

SEQ ID NO: 3022169 - RNA, 19 nt, Artificial Sequence
  Description of Artificial Sequence: Synthetic oligonucleotide
agauacacuggacugcaac

SEQ ID NO: 3022170 - RNA, 19 nt, Artificial Sequence
  Description of Artificial Sequence: Synthetic oligonucleotide
agucacaggcuacacaacg

SEQ ID NO: 3022171 - RNA, 19 nt, Artificial Sequence
  Description of Artificial Sequence: Synthetic oligonucleotide
gaauaguaaucacauguac

SEQ ID NO: 3022172 - RNA, 19 nt, Artificial Sequence
  Description of Artificial Sequence: Synthetic oligonucleotide
cucacuauccgaaagucac

SEQ ID NO: 3022173 - RNA, 19 nt, Artificial Sequence
  Description of Artificial Sequence: Synthetic oligonucleotide
uucuagaagaauaguaauc

SEQ ID NO: 3022174 - RNA, 19 nt, Artificial Sequence
  Description of Artificial Sequence: Synthetic oligonucleotide
uuguuccaauuccacaugg

SEQ ID NO: 3022175 - RNA, 19 nt, Artificial Sequence
  Description of Artificial Sequence: Synthetic oligonucleotide
cucaaauauuucauuaaug

SEQ ID NO: 3022176 - RNA, 19 nt, Artificial Sequence
  Description of Artificial Sequence: Synthetic oligonucleotide
uccacugagauacacugga

SEQ ID NO: 3022177 - RNA, 19 nt, Artificial Sequence
  Description of Artificial Sequence: Synthetic oligonucleotide
gaaguauuuguuccaauuc

SEQ ID NO: 3022178 - RNA, 19 nt, Artificial Sequence
  Description of Artificial Sequence: Synthetic oligonucleotide
aagaucuggauuucaauuu

SEQ ID NO: 3022179 - RNA, 19 nt, Artificial Sequence
  Description of Artificial Sequence: Synthetic oligonucleotide
aagacuuguuaucaaaguu

SEQ ID NO: 3022180 - RNA, 19 nt, Artificial Sequence
  Description of Artificial Sequence: Synthetic oligonucleotide
cacauauagucauuguagc

SEQ ID NO: 3022181 - RNA, 19 nt, Artificial Sequence
  Description of Artificial Sequence: Synthetic oligonucleotide
uacauguuucgguugaucu

SEQ ID NO: 3022182 - RNA, 19 nt, Artificial Sequence
  Description of Artificial Sequence: Synthetic oligonucleotide
ucauuguagcucacuaucc

SEQ ID NO: 3022183 - RNA, 19 nt, Artificial Sequence
  Description of Artificial Sequence: Synthetic oligonucleotide
uucauuaaugagacuguca

SEQ ID NO: 3022184 - RNA, 19 nt, Artificial Sequence
  Description of Artificial Sequence: Synthetic oligonucleotide
gacuuguuaucaaaguuag

SEQ ID NO: 3022185 - RNA, 19 nt, Artificial Sequence
  Description of Artificial Sequence: Synthetic oligonucleotide
uaaaagacuuguuaucaaa

SEQ ID NO: 3022186 - RNA, 19 nt, Artificial Sequence
  Description of Artificial Sequence: Synthetic oligonucleotide
uuguuaucaaaguuaggcu

SEQ ID NO: 3022187 - RNA, 19 nt, Artificial Sequence
  Description of Artificial Sequence: Synthetic oligonucleotide
ugacagauguguuacuuga

SEQ ID NO: 3022188 - RNA, 19 nt, Artificial Sequence
  Description of Artificial Sequence: Synthetic oligonucleotide
uauuuguuccaauuccaca

SEQ ID NO: 3022189 - RNA, 19 nt, Artificial Sequence
  Description of Artificial Sequence: Synthetic oligonucleotide
auguacuucguccacauau

SEQ ID NO: 3022190 - RNA, 19 nt, Artificial Sequence
  Description of Artificial Sequence: Synthetic oligonucleotide
auauagucauuguagcuca

SEQ ID NO: 3022191 - RNA, 19 nt, Artificial Sequence
  Description of Artificial Sequence: Synthetic oligonucleotide
uuucuagaagaauaguaau

SEQ ID NO: 3022192 - RNA, 19 nt, Artificial Sequence
  Description of Artificial Sequence: Synthetic oligonucleotide
aauggaagcucugacagau

SEQ ID NO: 3022193 - RNA, 19 nt, Artificial Sequence
  Description of Artificial Sequence: Synthetic oligonucleotide
cuuccacugagauacacug

SEQ ID NO: 3022194 - RNA, 19 nt, Artificial Sequence
  Description of Artificial Sequence: Synthetic oligonucleotide
uuaccgaggccuugaaugg

SEQ ID NO: 3022195 - RNA, 19 nt, Artificial Sequence
  Description of Artificial Sequence: Synthetic oligonucleotide
ggugcuuccacugagauac

SEQ ID NO: 3022196 - RNA, 19 nt, Artificial Sequence
  Description of Artificial Sequence: Synthetic oligonucleotide
guuguuucuagaagaauag

SEQ ID NO: 3022197 - RNA, 19 nt, Artificial Sequence
  Description of Artificial Sequence: Synthetic oligonucleotide
uacuugaagaucuggauuu

SEQ ID NO: 3022198 - RNA, 19 nt, Artificial Sequence
  Description of Artificial Sequence: Synthetic oligonucleotide
gacugcaacuuuuaccgag

SEQ ID NO: 3022199 - RNA, 19 nt, Artificial Sequence
  Description of Artificial Sequence: Synthetic oligonucleotide
uuaggcuccucaaauauuu

SEQ ID NO: 3022200 - RNA, 19 nt, Artificial Sequence
  Description of Artificial Sequence: Synthetic oligonucleotide
agaagaauaguaaucacau

SEQ ID NO: 3022201 - RNA, 19 nt, Artificial Sequence
  Description of Artificial Sequence: Synthetic oligonucleotide
uggaagcucugacagaugu

SEQ ID NO: 3022202 - RNA, 19 nt, Artificial Sequence
  Description of Artificial Sequence: Synthetic oligonucleotide
cauuguagcucacuauccg

SEQ ID NO: 3022203 - RNA, 19 nt, Artificial Sequence
  Description of Artificial Sequence: Synthetic oligonucleotide
uugaauggaagcucugaca

SEQ ID NO: 3022204 - RNA, 19 nt, Artificial Sequence
  Description of Artificial Sequence: Synthetic oligonucleotide
aguuuggucacaugcucuc

SEQ ID NO: 3022205 - RNA, 19 nt, Artificial Sequence
  Description of Artificial Sequence: Synthetic oligonucleotide
agauguguuacuugaagau

SEQ ID NO: 3022206 - RNA, 19 nt, Artificial Sequence
  Description of Artificial Sequence: Synthetic oligonucleotide
uuguaaaagacuuguuauc

SEQ ID NO: 3022207 - RNA, 19 nt, Artificial Sequence
  Description of Artificial Sequence: Synthetic oligonucleotide
guuaucaaaguuaggcucc

SEQ ID NO: 3022208 - RNA, 19 nt, Artificial Sequence
  Description of Artificial Sequence: Synthetic oligonucleotide
cauauagucauuguagcuc

SEQ ID NO: 3022209 - RNA, 19 nt, Artificial Sequence
  Description of Artificial Sequence: Synthetic oligonucleotide
ugaaguauuuguuccaauu

SEQ ID NO: 3022210 - RNA, 19 nt, Artificial Sequence
  Description of Artificial Sequence: Synthetic oligonucleotide
uuacuugaagaucuggauu

SEQ ID NO: 3022211 - RNA, 19 nt, Artificial Sequence
  Description of Artificial Sequence: Synthetic oligonucleotide
ugaucugagguucucuuuc

SEQ ID NO: 3022212 - RNA, 19 nt, Artificial Sequence
  Description of Artificial Sequence: Synthetic oligonucleotide
uccacauauagucauugua

SEQ ID NO: 3022213 - RNA, 19 nt, Artificial Sequence
  Description of Artificial Sequence: Synthetic oligonucleotide
acauauagucauuguagcu

SEQ ID NO: 3022214 - RNA, 19 nt, Artificial Sequence
  Description of Artificial Sequence: Synthetic oligonucleotide
uuaaugagacugucaaggu

SEQ ID NO: 3022215 - RNA, 19 nt, Artificial Sequence
  Description of Artificial Sequence: Synthetic oligonucleotide
cuggacugcaacuuuuacc

SEQ ID NO: 3022216 - RNA, 19 nt, Artificial Sequence
  Description of Artificial Sequence: Synthetic oligonucleotide
gaagaauaguaaucacaug

SEQ ID NO: 3022217 - RNA, 19 nt, Artificial Sequence
  Description of Artificial Sequence: Synthetic oligonucleotide
uaaugagacugucaagguc

SEQ ID NO: 3022218 - RNA, 19 nt, Artificial Sequence
  Description of Artificial Sequence: Synthetic oligonucleotide
gaucugagguucucuuucg

SEQ ID NO: 3022219 - RNA, 19 nt, Artificial Sequence
  Description of Artificial Sequence: Synthetic oligonucleotide
aucacauguacuucgucca

SEQ ID NO: 3022220 - RNA, 19 nt, Artificial Sequence
  Description of Artificial Sequence: Synthetic oligonucleotide
uuccaauuccacauggaau

SEQ ID NO: 3022221 - RNA, 19 nt, Artificial Sequence
  Description of Artificial Sequence: Synthetic oligonucleotide
uggaauggugcuuccacug

SEQ ID NO: 3022222 - RNA, 19 nt, Artificial Sequence
  Description of Artificial Sequence: Synthetic oligonucleotide
ucugagguucucuuucgcc

SEQ ID NO: 3022223 - RNA, 19 nt, Artificial Sequence
  Description of Artificial Sequence: Synthetic oligonucleotide
gucauuguagcucacuauc

SEQ ID NO: 3022224 - RNA, 19 nt, Artificial Sequence
  Description of Artificial Sequence: Synthetic oligonucleotide
uuuggucacaugcucucug

SEQ ID NO: 3022225 - RNA, 19 nt, Artificial Sequence
  Description of Artificial Sequence: Synthetic oligonucleotide
cuagaagaauaguaaucac

SEQ ID NO: 3022226 - RNA, 19 nt, Artificial Sequence
  Description of Artificial Sequence: Synthetic oligonucleotide
aguuaggcuccucaaauau

SEQ ID NO: 3022227 - RNA, 19 nt, Artificial Sequence
  Description of Artificial Sequence: Synthetic oligonucleotide
ucacaggcuacacaacgca

SEQ ID NO: 3022228 - RNA, 19 nt, Artificial Sequence
  Description of Artificial Sequence: Synthetic oligonucleotide
uccucaaauauuucauuaa

SEQ ID NO: 3022229 - RNA, 19 nt, Artificial Sequence
  Description of Artificial Sequence: Synthetic oligonucleotide
cuugaauggaagcucugac

SEQ ID NO: 3022230 - RNA, 19 nt, Artificial Sequence
  Description of Artificial Sequence: Synthetic oligonucleotide
ccacauauagucauuguag

SEQ ID NO: 3022231 - RNA, 19 nt, Artificial Sequence
  Description of Artificial Sequence: Synthetic oligonucleotide
gaauggugcuuccacugag

SEQ ID NO: 3022232 - RNA, 19 nt, Artificial Sequence
  Description of Artificial Sequence: Synthetic oligonucleotide
acuggacugcaacuuuuac

SEQ ID NO: 3022233 - RNA, 19 nt, Artificial Sequence
  Description of Artificial Sequence: Synthetic oligonucleotide
uuccacugagauacacugg

SEQ ID NO: 3022234 - RNA, 19 nt, Artificial Sequence
  Description of Artificial Sequence: Synthetic oligonucleotide
uugaagaucuggauuucaa

SEQ ID NO: 3022235 - RNA, 19 nt, Artificial Sequence
  Description of Artificial Sequence: Synthetic oligonucleotide
cauuaaugagacugucaag

SEQ ID NO: 3022236 - RNA, 19 nt, Artificial Sequence
  Description of Artificial Sequence: Synthetic oligonucleotide
uucucuuucgccugggcuc

SEQ ID NO: 3022237 - RNA, 19 nt, Artificial Sequence
  Description of Artificial Sequence: Synthetic oligonucleotide
uauccgaaagucacaggcu

SEQ ID NO: 3022238 - RNA, 19 nt, Artificial Sequence
  Description of Artificial Sequence: Synthetic oligonucleotide
aucugagguucucuuucgc

SEQ ID NO: 3022239 - RNA, 19 nt, Artificial Sequence
  Description of Artificial Sequence: Synthetic oligonucleotide
auguguuacuugaagaucu

SEQ ID NO: 3022240 - RNA, 19 nt, Artificial Sequence
  Description of Artificial Sequence: Synthetic oligonucleotide
auuguagcucacuauccga

SEQ ID NO: 3022241 - RNA, 19 nt, Artificial Sequence
  Description of Artificial Sequence: Synthetic oligonucleotide
guuucuagaagaauaguaa

SEQ ID NO: 3022242 - RNA, 19 nt, Artificial Sequence
  Description of Artificial Sequence: Synthetic oligonucleotide
guagcucacuauccgaaag

SEQ ID NO: 3022243 - RNA, 19 nt, Artificial Sequence
  Description of Artificial Sequence: Synthetic oligonucleotide
auuccacauggaauggugc

SEQ ID NO: 3022244 - RNA, 19 nt, Artificial Sequence
  Description of Artificial Sequence: Synthetic oligonucleotide
ucaaaguuaggcuccucaa

SEQ ID NO: 3022245 - RNA, 19 nt, Artificial Sequence
  Description of Artificial Sequence: Synthetic oligonucleotide
acauguuucgguugaucug

SEQ ID NO: 3022246 - RNA, 19 nt, Artificial Sequence
  Description of Artificial Sequence: Synthetic oligonucleotide
uguguuacuugaagaucug

SEQ ID NO: 3022247 - RNA, 19 nt, Artificial Sequence
  Description of Artificial Sequence: Synthetic oligonucleotide
uuguagcucacuauccgaa

SEQ ID NO: 3022248 - RNA, 19 nt, Artificial Sequence
  Description of Artificial Sequence: Synthetic oligonucleotide
ugaagaucuggauuucaau

SEQ ID NO: 3022249 - RNA, 19 nt, Artificial Sequence
  Description of Artificial Sequence: Synthetic oligonucleotide
cucugugaaguauuuguuc

SEQ ID NO: 3022250 - RNA, 19 nt, Artificial Sequence
  Description of Artificial Sequence: Synthetic oligonucleotide
uacacaacgcaguuugguc

SEQ ID NO: 3022251 - RNA, 19 nt, Artificial Sequence
  Description of Artificial Sequence: Synthetic oligonucleotide
cauggaauggugcuuccac

SEQ ID NO: 3022252 - RNA, 19 nt, Artificial Sequence
  Description of Artificial Sequence: Synthetic oligonucleotide
ugagauacacuggacugca

SEQ ID NO: 3022253 - RNA, 19 nt, Artificial Sequence
  Description of Artificial Sequence: Synthetic oligonucleotide
ggcuacacaacgcaguuug

SEQ ID NO: 3022254 - RNA, 19 nt, Artificial Sequence
  Description of Artificial Sequence: Synthetic oligonucleotide
ugcaacuuuuaccgaggcc

SEQ ID NO: 3022255 - RNA, 19 nt, Artificial Sequence
  Description of Artificial Sequence: Synthetic oligonucleotide
uagucauuguagcucacua

SEQ ID NO: 3022256 - RNA, 19 nt, Artificial Sequence
  Description of Artificial Sequence: Synthetic oligonucleotide
gauguguuacuugaagauc

SEQ ID NO: 3022257 - RNA, 19 nt, Artificial Sequence
  Description of Artificial Sequence: Synthetic oligonucleotide
uguuccaauuccacaugga

SEQ ID NO: 3022258 - RNA, 19 nt, Artificial Sequence
  Description of Artificial Sequence: Synthetic oligonucleotide
uuccacauggaauggugcu

SEQ ID NO: 3022259 - RNA, 19 nt, Artificial Sequence
  Description of Artificial Sequence: Synthetic oligonucleotide
guacuucguccacauauag

SEQ ID NO: 3022260 - RNA, 19 nt, Artificial Sequence
  Description of Artificial Sequence: Synthetic oligonucleotide
uucguccacauauagucau

SEQ ID NO: 3022261 - RNA, 19 nt, Artificial Sequence
  Description of Artificial Sequence: Synthetic oligonucleotide
uguacuucguccacauaua

SEQ ID NO: 3022262 - RNA, 19 nt, Artificial Sequence
  Description of Artificial Sequence: Synthetic oligonucleotide
aguauuuguuccaauucca

SEQ ID NO: 3022263 - RNA, 19 nt, Artificial Sequence
  Description of Artificial Sequence: Synthetic oligonucleotide
ugagguucucuuucgccug

SEQ ID NO: 3022264 - RNA, 19 nt, Artificial Sequence
  Description of Artificial Sequence: Synthetic oligonucleotide
uagcucacuauccgaaagu

SEQ ID NO: 3022265 - RNA, 19 nt, Artificial Sequence
  Description of Artificial Sequence: Synthetic oligonucleotide
uacuucguccacauauagu

SEQ ID NO: 3022266 - RNA, 19 nt, Artificial Sequence
  Description of Artificial Sequence: Synthetic oligonucleotide
gaaagucacaggcuacaca

SEQ ID NO: 3022267 - RNA, 19 nt, Artificial Sequence
  Description of Artificial Sequence: Synthetic oligonucleotide
acuauccgaaagucacagg

SEQ ID NO: 3022268 - RNA, 19 nt, Artificial Sequence
  Description of Artificial Sequence: Synthetic oligonucleotide
aaguuaggcuccucaaaua

SEQ ID NO: 3022269 - RNA, 19 nt, Artificial Sequence
  Description of Artificial Sequence: Synthetic oligonucleotide
uguuucgguugaucugagg

SEQ ID NO: 3022270 - RNA, 19 nt, Artificial Sequence
  Description of Artificial Sequence: Synthetic oligonucleotide
guuucgguugaucugaggu

SEQ ID NO: 3022271 - RNA, 19 nt, Artificial Sequence
  Description of Artificial Sequence: Synthetic oligonucleotide
ucucuuucgccugggcucg

SEQ ID NO: 3022272 - RNA, 19 nt, Artificial Sequence
  Description of Artificial Sequence: Synthetic oligonucleotide
agcucacuauccgaaaguc

SEQ ID NO: 3022273 - RNA, 19 nt, Artificial Sequence
  Description of Artificial Sequence: Synthetic oligonucleotide
gaagaucuggauuucaauu

SEQ ID NO: 3022274 - RNA, 19 nt, Artificial Sequence
  Description of Artificial Sequence: Synthetic oligonucleotide
uucgguugaucugagguuc

SEQ ID NO: 3022275 - RNA, 19 nt, Artificial Sequence
  Description of Artificial Sequence: Synthetic oligonucleotide
gagacugucaaggucaucu

SEQ ID NO: 3022276 - RNA, 19 nt, Artificial Sequence
  Description of Artificial Sequence: Synthetic oligonucleotide
auuucauuaaugagacugu

SEQ ID NO: 3022277 - RNA, 19 nt, Artificial Sequence
  Description of Artificial Sequence: Synthetic oligonucleotide
ugugaaguauuuguuccaa

SEQ ID NO: 3022278 - RNA, 19 nt, Artificial Sequence
  Description of Artificial Sequence: Synthetic oligonucleotide
ucacuauccgaaagucaca

SEQ ID NO: 3022279 - RNA, 19 nt, Artificial Sequence
  Description of Artificial Sequence: Synthetic oligonucleotide
cacuauccgaaagucacag

SEQ ID NO: 3022280 - RNA, 19 nt, Artificial Sequence
  Description of Artificial Sequence: Synthetic oligonucleotide
acugucaaggucaucuucu

SEQ ID NO: 3022281 - RNA, 19 nt, Artificial Sequence
  Description of Artificial Sequence: Synthetic oligonucleotide
agacuuguuaucaaaguua

SEQ ID NO: 3022282 - RNA, 19 nt, Artificial Sequence
  Description of Artificial Sequence: Synthetic oligonucleotide
agaucuggauuucaauuuu

SEQ ID NO: 3022283 - RNA, 19 nt, Artificial Sequence
  Description of Artificial Sequence: Synthetic oligonucleotide
cagauguguuacuugaaga

SEQ ID NO: 3022284 - RNA, 19 nt, Artificial Sequence
  Description of Artificial Sequence: Synthetic oligonucleotide
aggcuccucaaauauuuca

SEQ ID NO: 3022285 - RNA, 19 nt, Artificial Sequence
  Description of Artificial Sequence: Synthetic oligonucleotide
acugcaacuuuuaccgagg

SEQ ID NO: 3022286 - RNA, 19 nt, Artificial Sequence
  Description of Artificial Sequence: Synthetic oligonucleotide
gauacacuggacugcaacu

SEQ ID NO: 3022287 - RNA, 19 nt, Artificial Sequence
  Description of Artificial Sequence: Synthetic oligonucleotide
uaaucacauguacuucguc

SEQ ID NO: 3022288 - RNA, 19 nt, Artificial Sequence
  Description of Artificial Sequence: Synthetic oligonucleotide
guuccaauuccacauggaa

SEQ ID NO: 3022289 - RNA, 19 nt, Artificial Sequence
  Description of Artificial Sequence: Synthetic oligonucleotide
cugagauacacuggacugc

SEQ ID NO: 3022290 - RNA, 19 nt, Artificial Sequence
  Description of Artificial Sequence: Synthetic oligonucleotide
agucauuguagcucacuau

SEQ ID NO: 3022291 - RNA, 19 nt, Artificial Sequence
  Description of Artificial Sequence: Synthetic oligonucleotide
ucacaugcucucugugaag

SEQ ID NO: 3022292 - RNA, 19 nt, Artificial Sequence
  Description of Artificial Sequence: Synthetic oligonucleotide
guaaaagacuuguuaucaa

SEQ ID NO: 3022293 - RNA, 19 nt, Artificial Sequence
  Description of Artificial Sequence: Synthetic oligonucleotide
uuguuucuagaagaauagu

SEQ ID NO: 3022294 - RNA, 19 nt, Artificial Sequence
  Description of Artificial Sequence: Synthetic oligonucleotide
uccgaaagucacaggcuac

SEQ ID NO: 3022295 - RNA, 19 nt, Artificial Sequence
  Description of Artificial Sequence: Synthetic oligonucleotide
uuucgguugaucugagguu

SEQ ID NO: 3022296 - RNA, 19 nt, Artificial Sequence
  Description of Artificial Sequence: Synthetic oligonucleotide
gagguucucuuucgccugg

SEQ ID NO: 3022297 - RNA, 19 nt, Artificial Sequence
  Description of Artificial Sequence: Synthetic oligonucleotide
aagucacaggcuacacaac

SEQ ID NO: 3022298 - RNA, 19 nt, Artificial Sequence
  Description of Artificial Sequence: Synthetic oligonucleotide
aacgcaguuuggucacaug

SEQ ID NO: 3022299 - RNA, 19 nt, Artificial Sequence
  Description of Artificial Sequence: Synthetic oligonucleotide
auggaauggugcuuccacu

SEQ ID NO: 3022300 - RNA, 19 nt, Artificial Sequence
  Description of Artificial Sequence: Synthetic oligonucleotide
ucacauguacuucguccac

SEQ ID NO: 3022301 - RNA, 19 nt, Artificial Sequence
  Description of Artificial Sequence: Synthetic oligonucleotide
cauguuucgguugaucuga

SEQ ID NO: 3022302 - RNA, 19 nt, Artificial Sequence
  Description of Artificial Sequence: Synthetic oligonucleotide
acauguacuucguccacau

SEQ ID NO: 3022303 - RNA, 19 nt, Artificial Sequence
  Description of Artificial Sequence: Synthetic oligonucleotide
guauuuguuccaauuccac

SEQ ID NO: 3022304 - RNA, 19 nt, Artificial Sequence
  Description of Artificial Sequence: Synthetic oligonucleotide
uuuuaccgaggccuugaau

SEQ ID NO: 3022305 - RNA, 19 nt, Artificial Sequence
  Description of Artificial Sequence: Synthetic oligonucleotide
uguagcucacuauccgaaa

SEQ ID NO: 3022306 - RNA, 19 nt, Artificial Sequence
  Description of Artificial Sequence: Synthetic oligonucleotide
guguuacuugaagaucugg

SEQ ID NO: 3022307 - RNA, 19 nt, Artificial Sequence
  Description of Artificial Sequence: Synthetic oligonucleotide
ucugacagauguguuacuu

SEQ ID NO: 3022308 - RNA, 19 nt, Artificial Sequence
  Description of Artificial Sequence: Synthetic oligonucleotide
gacugucaaggucaucuuc

SEQ ID NO: 3022309 - RNA, 19 nt, Artificial Sequence
  Description of Artificial Sequence: Synthetic oligonucleotide
cacaacgcaguuuggucac

SEQ ID NO: 3022310 - RNA, 19 nt, Artificial Sequence
  Description of Artificial Sequence: Synthetic oligonucleotide
auccgaaagucacaggcua

SEQ ID NO: 3022311 - RNA, 19 nt, Artificial Sequence
  Description of Artificial Sequence: Synthetic oligonucleotide
agaauaguaaucacaugua

SEQ ID NO: 3022312 - RNA, 19 nt, Artificial Sequence
  Description of Artificial Sequence: Synthetic oligonucleotide
gaagcucugacagaugugu

SEQ ID NO: 3022313 - RNA, 19 nt, Artificial Sequence
  Description of Artificial Sequence: Synthetic oligonucleotide
uucgccugggcucgcgucc

SEQ ID NO: 3022314 - RNA, 19 nt, Artificial Sequence
  Description of Artificial Sequence: Synthetic oligonucleotide
uaguaaucacauguacuuc

SEQ ID NO: 3022315 - RNA, 19 nt, Artificial Sequence
  Description of Artificial Sequence: Synthetic oligonucleotide
uggucacaugcucucugug

SEQ ID NO: 3022316 - RNA, 19 nt, Artificial Sequence
  Description of Artificial Sequence: Synthetic oligonucleotide
cacaggcuacacaacgcag

SEQ ID NO: 3022317 - RNA, 19 nt, Artificial Sequence
  Description of Artificial Sequence: Synthetic oligonucleotide
uuggucacaugcucucugu

SEQ ID NO: 3022318 - RNA, 19 nt, Artificial Sequence
  Description of Artificial Sequence: Synthetic oligonucleotide
auauuucauuaaugagacu

SEQ ID NO: 3022319 - RNA, 19 nt, Artificial Sequence
  Description of Artificial Sequence: Synthetic oligonucleotide
uuaucaaaguuaggcuccu

SEQ ID NO: 3022320 - RNA, 19 nt, Artificial Sequence
  Description of Artificial Sequence: Synthetic oligonucleotide
aauggugcuuccacugaga

SEQ ID NO: 3022321 - RNA, 19 nt, Artificial Sequence
  Description of Artificial Sequence: Synthetic oligonucleotide
uauagucauuguagcucac

SEQ ID NO: 3022322 - RNA, 19 nt, Artificial Sequence
  Description of Artificial Sequence: Synthetic oligonucleotide
guuacuugaagaucuggau

SEQ ID NO: 3022323 - RNA, 19 nt, Artificial Sequence
  Description of Artificial Sequence: Synthetic oligonucleotide
aggccuugaauggaagcuc

SEQ ID NO: 3022324 - RNA, 19 nt, Artificial Sequence
  Description of Artificial Sequence: Synthetic oligonucleotide
uacacuggacugcaacuuu

SEQ ID NO: 3022325 - RNA, 19 nt, Artificial Sequence
  Description of Artificial Sequence: Synthetic oligonucleotide
aacuuuuaccgaggccuug

SEQ ID NO: 3022326 - RNA, 19 nt, Artificial Sequence
  Description of Artificial Sequence: Synthetic oligonucleotide
gucacaugcucucugugaa

SEQ ID NO: 3022327 - RNA, 19 nt, Artificial Sequence
  Description of Artificial Sequence: Synthetic oligonucleotide
acuuguuaucaaaguuagg

SEQ ID NO: 3022328 - RNA, 19 nt, Artificial Sequence
  Description of Artificial Sequence: Synthetic oligonucleotide
gaauggaagcucugacaga

SEQ ID NO: 3022329 - RNA, 19 nt, Artificial Sequence
  Description of Artificial Sequence: Synthetic oligonucleotide
uuacauguuucgguugauc

SEQ ID NO: 3022330 - RNA, 19 nt, Artificial Sequence
  Description of Artificial Sequence: Synthetic oligonucleotide
auagucauuguagcucacu

SEQ ID NO: 3022331 - RNA, 19 nt, Artificial Sequence
  Description of Artificial Sequence: Synthetic oligonucleotide
agcucugacagauguguua

SEQ ID NO: 3022332 - RNA, 19 nt, Artificial Sequence
  Description of Artificial Sequence: Synthetic oligonucleotide
cugcaacuuuuaccgaggc

SEQ ID NO: 3022333 - RNA, 19 nt, Artificial Sequence
  Description of Artificial Sequence: Synthetic oligonucleotide
auggugcuuccacugagau

SEQ ID NO: 3022334 - RNA, 19 nt, Artificial Sequence
  Description of Artificial Sequence: Synthetic oligonucleotide
uugaucugagguucucuuu

SEQ ID NO: 3022335 - RNA, 19 nt, Artificial Sequence
  Description of Artificial Sequence: Synthetic oligonucleotide
gucaaggucaucuucuuuu

SEQ ID NO: 3022336 - RNA, 19 nt, Artificial Sequence
  Description of Artificial Sequence: Synthetic oligonucleotide
acuuuuaccgaggccuuga

SEQ ID NO: 3022337 - RNA, 19 nt, Artificial Sequence
  Description of Artificial Sequence: Synthetic oligonucleotide
gcaacuuuuaccgaggccu

SEQ ID NO: 3022338 - RNA, 19 nt, Artificial Sequence
  Description of Artificial Sequence: Synthetic oligonucleotide
acaggcuacacaacgcagu

SEQ ID NO: 3022339 - RNA, 19 nt, Artificial Sequence
  Description of Artificial Sequence: Synthetic oligonucleotide
cugugaaguauuuguucca

SEQ ID NO: 3022340 - RNA, 19 nt, Artificial Sequence
  Description of Artificial Sequence: Synthetic oligonucleotide
uaggcuccucaaauauuuc

SEQ ID NO: 3022341 - RNA, 19 nt, Artificial Sequence
  Description of Artificial Sequence: Synthetic oligonucleotide
ucgguugaucugagguucu

SEQ ID NO: 3022342 - RNA, 19 nt, Artificial Sequence
  Description of Artificial Sequence: Synthetic oligonucleotide
cugggcucgcguccggucg

SEQ ID NO: 3022343 - RNA, 19 nt, Artificial Sequence
  Description of Artificial Sequence: Synthetic oligonucleotide
cuucguccacauauaguca

SEQ ID NO: 3022344 - RNA, 19 nt, Artificial Sequence
  Description of Artificial Sequence: Synthetic oligonucleotide
cacauggaauggugcuucc

SEQ ID NO: 3022345 - RNA, 19 nt, Artificial Sequence
  Description of Artificial Sequence: Synthetic oligonucleotide
ugcucucugugaaguauuu

SEQ ID NO: 3022346 - RNA, 19 nt, Artificial Sequence
  Description of Artificial Sequence: Synthetic oligonucleotide
auacacuggacugcaacuu

SEQ ID NO: 3022347 - RNA, 19 nt, Artificial Sequence
  Description of Artificial Sequence: Synthetic oligonucleotide
ugcuuccacugagauacac

SEQ ID NO: 3022348 - RNA, 19 nt, Artificial Sequence
  Description of Artificial Sequence: Synthetic oligonucleotide
uuuacauguuucgguugau

SEQ ID NO: 3022349 - RNA, 19 nt, Artificial Sequence
  Description of Artificial Sequence: Synthetic oligonucleotide
cuugaagaucuggauuuca

SEQ ID NO: 3022350 - RNA, 19 nt, Artificial Sequence
  Description of Artificial Sequence: Synthetic oligonucleotide
ggucacaugcucucuguga

SEQ ID NO: 3022351 - RNA, 19 nt, Artificial Sequence
  Description of Artificial Sequence: Synthetic oligonucleotide
gcaguuuggucacaugcuc

SEQ ID NO: 3022352 - RNA, 19 nt, Artificial Sequence
  Description of Artificial Sequence: Synthetic oligonucleotide
cugagguucucuuucgccu

SEQ ID NO: 3022353 - RNA, 19 nt, Artificial Sequence
  Description of Artificial Sequence: Synthetic oligonucleotide
ucuuucgccugggcucgcg

SEQ ID NO: 3022354 - RNA, 19 nt, Artificial Sequence
  Description of Artificial Sequence: Synthetic oligonucleotide
gcucugacagauguguuac

SEQ ID NO: 3022355 - RNA, 19 nt, Artificial Sequence
  Description of Artificial Sequence: Synthetic oligonucleotide
guucucuuucgccugggcu

SEQ ID NO: 3022356 - RNA, 19 nt, Artificial Sequence
  Description of Artificial Sequence: Synthetic oligonucleotide
guccggucgccgcuguggg

SEQ ID NO: 3022357 - RNA, 19 nt, Artificial Sequence
  Description of Artificial Sequence: Synthetic oligonucleotide
uuucgccugggcucgcguc

SEQ ID NO: 3022358 - RNA, 19 nt, Artificial Sequence
  Description of Artificial Sequence: Synthetic oligonucleotide
uccacauggaauggugcuu

SEQ ID NO: 3022359 - RNA, 19 nt, Artificial Sequence
  Description of Artificial Sequence: Synthetic oligonucleotide
ugugggugccgccgccgcc

SEQ ID NO: 3022360 - RNA, 19 nt, Artificial Sequence
  Description of Artificial Sequence: Synthetic oligonucleotide
ucguccacauauagucauu

SEQ ID NO: 3022361 - RNA, 19 nt, Artificial Sequence
  Description of Artificial Sequence: Synthetic oligonucleotide
agacugucaaggucaucuu

SEQ ID NO: 3022362 - RNA, 19 nt, Artificial Sequence
  Description of Artificial Sequence: Synthetic oligonucleotide
guugaucugagguucucuu

SEQ ID NO: 3022363 - RNA, 19 nt, Artificial Sequence
  Description of Artificial Sequence: Synthetic oligonucleotide
acauggaauggugcuucca

SEQ ID NO: 3022364 - RNA, 19 nt, Artificial Sequence
  Description of Artificial Sequence: Synthetic oligonucleotide
gacagauguguuacuugaa

SEQ ID NO: 3022365 - RNA, 19 nt, Artificial Sequence
  Description of Artificial Sequence: Synthetic oligonucleotide
ggaauggugcuuccacuga

SEQ ID NO: 3022366 - RNA, 19 nt, Artificial Sequence
  Description of Artificial Sequence: Synthetic oligonucleotide
ccaauuccacauggaaugg

SEQ ID NO: 3022367 - RNA, 19 nt, Artificial Sequence
  Description of Artificial Sequence: Synthetic oligonucleotide
acaugcucucugugaagua

SEQ ID NO: 3022368 - RNA, 19 nt, Artificial Sequence
  Description of Artificial Sequence: Synthetic oligonucleotide
gugggugccgccgccgccg

SEQ ID NO: 3022369 - RNA, 19 nt, Artificial Sequence
  Description of Artificial Sequence: Synthetic oligonucleotide
guaaucacauguacuucgu

SEQ ID NO: 3022370 - RNA, 19 nt, Artificial Sequence
  Description of Artificial Sequence: Synthetic oligonucleotide
cacauguacuucguccaca

SEQ ID NO: 3022371 - RNA, 19 nt, Artificial Sequence
  Description of Artificial Sequence: Synthetic oligonucleotide
caguuuggucacaugcucu

SEQ ID NO: 3022372 - RNA, 19 nt, Artificial Sequence
  Description of Artificial Sequence: Synthetic oligonucleotide
auguuucgguugaucugag

SEQ ID NO: 3022373 - RNA, 19 nt, Artificial Sequence
  Description of Artificial Sequence: Synthetic oligonucleotide
ucgccugggcucgcguccg

SEQ ID NO: 3022374 - RNA, 19 nt, Artificial Sequence
  Description of Artificial Sequence: Synthetic oligonucleotide
gguucucuuucgccugggc

SEQ ID NO: 3022375 - RNA, 19 nt, Artificial Sequence
  Description of Artificial Sequence: Synthetic oligonucleotide
aagcucugacagauguguu

SEQ ID NO: 3022376 - RNA, 19 nt, Artificial Sequence
  Description of Artificial Sequence: Synthetic oligonucleotide
gcuacacaacgcaguuugg

SEQ ID NO: 3022377 - RNA, 19 nt, Artificial Sequence
  Description of Artificial Sequence: Synthetic oligonucleotide
cuacacaacgcaguuuggu

SEQ ID NO: 3022378 - RNA, 19 nt, Artificial Sequence
  Description of Artificial Sequence: Synthetic oligonucleotide
cugugggugccgccgccgc

SEQ ID NO: 3022379 - RNA, 19 nt, Artificial Sequence
  Description of Artificial Sequence: Synthetic oligonucleotide
cacaugcucucugugaagu

SEQ ID NO: 3022380 - RNA, 19 nt, Artificial Sequence
  Description of Artificial Sequence: Synthetic oligonucleotide
ggaagcucugacagaugug

SEQ ID NO: 3022381 - RNA, 19 nt, Artificial Sequence
  Description of Artificial Sequence: Synthetic oligonucleotide
guccacauauagucauugu

SEQ ID NO: 3022382 - RNA, 19 nt, Artificial Sequence
  Description of Artificial Sequence: Synthetic oligonucleotide
cuuuuaccgaggccuugaa

SEQ ID NO: 3022383 - RNA, 19 nt, Artificial Sequence
  Description of Artificial Sequence: Synthetic oligonucleotide
acacuggacugcaacuuuu

SEQ ID NO: 3022384 - RNA, 19 nt, Artificial Sequence
  Description of Artificial Sequence: Synthetic oligonucleotide
auggaagcucugacagaug

SEQ ID NO: 3022385 - RNA, 19 nt, Artificial Sequence
  Description of Artificial Sequence: Synthetic oligonucleotide
gugaaguauuuguuccaau

SEQ ID NO: 3022386 - RNA, 19 nt, Artificial Sequence
  Description of Artificial Sequence: Synthetic oligonucleotide
cacuggacugcaacuuuua

SEQ ID NO: 3022387 - RNA, 19 nt, Artificial Sequence
  Description of Artificial Sequence: Synthetic oligonucleotide
cgaggccuugaauggaagc

SEQ ID NO: 3022388 - RNA, 19 nt, Artificial Sequence
  Description of Artificial Sequence: Synthetic oligonucleotide
ccacauggaauggugcuuc

SEQ ID NO: 3022389 - RNA, 19 nt, Artificial Sequence
  Description of Artificial Sequence: Synthetic oligonucleotide
augcucucugugaaguauu

SEQ ID NO: 3022390 - RNA, 19 nt, Artificial Sequence
  Description of Artificial Sequence: Synthetic oligonucleotide
ugagacugucaaggucauc

SEQ ID NO: 3022391 - RNA, 19 nt, Artificial Sequence
  Description of Artificial Sequence: Synthetic oligonucleotide
accgaggccuugaauggaa

SEQ ID NO: 3022392 - RNA, 19 nt, Artificial Sequence
  Description of Artificial Sequence: Synthetic oligonucleotide
ccacugagauacacuggac

SEQ ID NO: 3022393 - RNA, 19 nt, Artificial Sequence
  Description of Artificial Sequence: Synthetic oligonucleotide
augagacugucaaggucau

SEQ ID NO: 3022394 - RNA, 19 nt, Artificial Sequence
  Description of Artificial Sequence: Synthetic oligonucleotide
gcucacuauccgaaaguca

SEQ ID NO: 3022395 - RNA, 19 nt, Artificial Sequence
  Description of Artificial Sequence: Synthetic oligonucleotide
caugcucucugugaaguau

SEQ ID NO: 3022396 - RNA, 19 nt, Artificial Sequence
  Description of Artificial Sequence: Synthetic oligonucleotide
gcucucugugaaguauuug

SEQ ID NO: 3022397 - RNA, 19 nt, Artificial Sequence
  Description of Artificial Sequence: Synthetic oligonucleotide
ccucaaauauuucauuaau

SEQ ID NO: 3022398 - RNA, 19 nt, Artificial Sequence
  Description of Artificial Sequence: Synthetic oligonucleotide
gccgcugugggugccgccg

SEQ ID NO: 3022399 - RNA, 19 nt, Artificial Sequence
  Description of Artificial Sequence: Synthetic oligonucleotide
acaacgcaguuuggucaca

SEQ ID NO: 3022400 - RNA, 19 nt, Artificial Sequence
  Description of Artificial Sequence: Synthetic oligonucleotide
cguccacauauagucauug

SEQ ID NO: 3022401 - RNA, 19 nt, Artificial Sequence
  Description of Artificial Sequence: Synthetic oligonucleotide
ggacugcaacuuuuaccga

SEQ ID NO: 3022402 - RNA, 19 nt, Artificial Sequence
  Description of Artificial Sequence: Synthetic oligonucleotide
ccuugaauggaagcucuga

SEQ ID NO: 3022403 - RNA, 19 nt, Artificial Sequence
  Description of Artificial Sequence: Synthetic oligonucleotide
uccggucgccgcugugggu

SEQ ID NO: 3022404 - RNA, 19 nt, Artificial Sequence
  Description of Artificial Sequence: Synthetic oligonucleotide
caauuccacauggaauggu

SEQ ID NO: 3022405 - RNA, 19 nt, Artificial Sequence
  Description of Artificial Sequence: Synthetic oligonucleotide
guuaggcuccucaaauauu

SEQ ID NO: 3022406 - RNA, 19 nt, Artificial Sequence
  Description of Artificial Sequence: Synthetic oligonucleotide
guuuggucacaugcucucu

SEQ ID NO: 3022407 - RNA, 19 nt, Artificial Sequence
  Description of Artificial Sequence: Synthetic oligonucleotide
gucgccgcugugggugccg

SEQ ID NO: 3022408 - RNA, 19 nt, Artificial Sequence
  Description of Artificial Sequence: Synthetic oligonucleotide
ccgaggccuugaauggaag

SEQ ID NO: 3022409 - RNA, 19 nt, Artificial Sequence
  Description of Artificial Sequence: Synthetic oligonucleotide
aggcuacacaacgcaguuu

SEQ ID NO: 3022410 - RNA, 19 nt, Artificial Sequence
  Description of Artificial Sequence: Synthetic oligonucleotide
caacuuuuaccgaggccuu

SEQ ID NO: 3022411 - RNA, 19 nt, Artificial Sequence
  Description of Artificial Sequence: Synthetic oligonucleotide
cauguacuucguccacaua

SEQ ID NO: 3022412 - RNA, 19 nt, Artificial Sequence
  Description of Artificial Sequence: Synthetic oligonucleotide
ggcuccucaaauauuucau

SEQ ID NO: 3022413 - RNA, 19 nt, Artificial Sequence
  Description of Artificial Sequence: Synthetic oligonucleotide
gcugugggugccgccgccg

SEQ ID NO: 3022414 - RNA, 19 nt, Artificial Sequence
  Description of Artificial Sequence: Synthetic oligonucleotide
caggcuacacaacgcaguu

SEQ ID NO: 3022415 - RNA, 19 nt, Artificial Sequence
  Description of Artificial Sequence: Synthetic oligonucleotide
gguugaucugagguucucu

SEQ ID NO: 3022416 - RNA, 19 nt, Artificial Sequence
  Description of Artificial Sequence: Synthetic oligonucleotide
ccgaaagucacaggcuaca

SEQ ID NO: 3022417 - RNA, 19 nt, Artificial Sequence
  Description of Artificial Sequence: Synthetic oligonucleotide
cucugacagauguguuacu

SEQ ID NO: 3022418 - RNA, 19 nt, Artificial Sequence
  Description of Artificial Sequence: Synthetic oligonucleotide
gcuccucaaauauuucauu

SEQ ID NO: 3022419 - RNA, 19 nt, Artificial Sequence
  Description of Artificial Sequence: Synthetic oligonucleotide
gccuugaauggaagcucug

SEQ ID NO: 3022420 - RNA, 19 nt, Artificial Sequence
  Description of Artificial Sequence: Synthetic oligonucleotide
cgaaagucacaggcuacac

SEQ ID NO: 3022421 - RNA, 19 nt, Artificial Sequence
  Description of Artificial Sequence: Synthetic oligonucleotide
cugucaaggucaucuucuu

SEQ ID NO: 3022422 - RNA, 19 nt, Artificial Sequence
  Description of Artificial Sequence: Synthetic oligonucleotide
ccggucgccgcugugggug

SEQ ID NO: 3022423 - RNA, 19 nt, Artificial Sequence
  Description of Artificial Sequence: Synthetic oligonucleotide
gcucgcguccggucgccgc

SEQ ID NO: 3022424 - RNA, 19 nt, Artificial Sequence
  Description of Artificial Sequence: Synthetic oligonucleotide
ucgcguccggucgccgcug

SEQ ID NO: 3022425 - RNA, 19 nt, Artificial Sequence
  Description of Artificial Sequence: Synthetic oligonucleotide
gcuuccacugagauacacu

SEQ ID NO: 3022426 - RNA, 19 nt, Artificial Sequence
  Description of Artificial Sequence: Synthetic oligonucleotide
ggccuugaauggaagcucu

SEQ ID NO: 3022427 - RNA, 19 nt, Artificial Sequence
  Description of Artificial Sequence: Synthetic oligonucleotide
cguccggucgccgcugugg

SEQ ID NO: 3022428 - RNA, 19 nt, Artificial Sequence
  Description of Artificial Sequence: Synthetic oligonucleotide
cucuuucgccugggcucgc

SEQ ID NO: 3022429 - RNA, 19 nt, Artificial Sequence
  Description of Artificial Sequence: Synthetic oligonucleotide
cuuucgccugggcucgcgu

SEQ ID NO: 3022430 - RNA, 19 nt, Artificial Sequence
  Description of Artificial Sequence: Synthetic oligonucleotide
ccugggcucgcguccgguc

SEQ ID NO: 3022431 - RNA, 19 nt, Artificial Sequence
  Description of Artificial Sequence: Synthetic oligonucleotide
cgcaguuuggucacaugcu

SEQ ID NO: 3022432 - RNA, 19 nt, Artificial Sequence
  Description of Artificial Sequence: Synthetic oligonucleotide
cucgcguccggucgccgcu

SEQ ID NO: 3022433 - RNA, 19 nt, Artificial Sequence
  Description of Artificial Sequence: Synthetic oligonucleotide
caacgcaguuuggucacau

SEQ ID NO: 3022434 - RNA, 19 nt, Artificial Sequence
  Description of Artificial Sequence: Synthetic oligonucleotide
gugcuuccacugagauaca

SEQ ID NO: 3022435 - RNA, 19 nt, Artificial Sequence
  Description of Artificial Sequence: Synthetic oligonucleotide
ggcucgcguccggucgccg

SEQ ID NO: 3022436 - RNA, 19 nt, Artificial Sequence
  Description of Artificial Sequence: Synthetic oligonucleotide
ggucgccgcugugggugcc

SEQ ID NO: 3022437 - RNA, 19 nt, Artificial Sequence
  Description of Artificial Sequence: Synthetic oligonucleotide
gggcucgcguccggucgcc

SEQ ID NO: 3022438 - RNA, 19 nt, Artificial Sequence
  Description of Artificial Sequence: Synthetic oligonucleotide
cgcugugggugccgccgcc

SEQ ID NO: 3022439 - RNA, 19 nt, Artificial Sequence
  Description of Artificial Sequence: Synthetic oligonucleotide
gcguccggucgccgcugug

SEQ ID NO: 3022440 - RNA, 19 nt, Artificial Sequence
  Description of Artificial Sequence: Synthetic oligonucleotide
cgguugaucugagguucuc

SEQ ID NO: 3022441 - RNA, 19 nt, Artificial Sequence
  Description of Artificial Sequence: Synthetic oligonucleotide
cggucgccgcugugggugc

SEQ ID NO: 3022442 - RNA, 19 nt, Artificial Sequence
  Description of Artificial Sequence: Synthetic oligonucleotide
cgccugggcucgcguccgg

SEQ ID NO: 3022443 - RNA, 19 nt, Artificial Sequence
  Description of Artificial Sequence: Synthetic oligonucleotide
gccugggcucgcguccggu

SEQ ID NO: 3022444 - RNA, 19 nt, Artificial Sequence
  Description of Artificial Sequence: Synthetic oligonucleotide
cgcguccggucgccgcugu

SEQ ID NO: 3022445 - RNA, 19 nt, Artificial Sequence
  Description of Artificial Sequence: Synthetic oligonucleotide
uuuaaugcaguauucauag

SEQ ID NO: 3022446 - RNA, 19 nt, Artificial Sequence
  Description of Artificial Sequence: Synthetic oligonucleotide
aaguccagaauguagagag

SEQ ID NO: 3022447 - RNA, 19 nt, Artificial Sequence
  Description of Artificial Sequence: Synthetic oligonucleotide
uaaugcaguauucauagag

SEQ ID NO: 3022448 - RNA, 19 nt, Artificial Sequence
  Description of Artificial Sequence: Synthetic oligonucleotide
aaugaugcgacccacuucu

SEQ ID NO: 3022449 - RNA, 19 nt, Artificial Sequence
  Description of Artificial Sequence: Synthetic oligonucleotide
aaaguuggugucccgaguc

SEQ ID NO: 3022450 - RNA, 19 nt, Artificial Sequence
  Description of Artificial Sequence: Synthetic oligonucleotide
agcccaauaaggcaggagc

SEQ ID NO: 3022451 - RNA, 19 nt, Artificial Sequence
  Description of Artificial Sequence: Synthetic oligonucleotide
aaugcaguuugucccaaag

SEQ ID NO: 3022452 - RNA, 19 nt, Artificial Sequence
  Description of Artificial Sequence: Synthetic oligonucleotide
uccaaaguccagaauguag

SEQ ID NO: 3022453 - RNA, 19 nt, Artificial Sequence
  Description of Artificial Sequence: Synthetic oligonucleotide
agaagagcuccucaggagg

SEQ ID NO: 3022454 - RNA, 19 nt, Artificial Sequence
  Description of Artificial Sequence: Synthetic oligonucleotide
aauaaggcaggagccaacg

SEQ ID NO: 3022455 - RNA, 19 nt, Artificial Sequence
  Description of Artificial Sequence: Synthetic oligonucleotide
uaaggcaggagccaacgag

SEQ ID NO: 3022456 - RNA, 19 nt, Artificial Sequence
  Description of Artificial Sequence: Synthetic oligonucleotide
aaugcgugcacucaaugau

SEQ ID NO: 3022457 - RNA, 19 nt, Artificial Sequence
  Description of Artificial Sequence: Synthetic oligonucleotide
agguccaaaguccagaaug

SEQ ID NO: 3022458 - RNA, 19 nt, Artificial Sequence
  Description of Artificial Sequence: Synthetic oligonucleotide
aggggugucagccagagca

SEQ ID NO: 3022459 - RNA, 19 nt, Artificial Sequence
  Description of Artificial Sequence: Synthetic oligonucleotide
ugcauagccuucuuuaaug

SEQ ID NO: 3022460 - RNA, 19 nt, Artificial Sequence
  Description of Artificial Sequence: Synthetic oligonucleotide
cugaaugcagcguaggcag

SEQ ID NO: 3022461 - RNA, 19 nt, Artificial Sequence
  Description of Artificial Sequence: Synthetic oligonucleotide
acuucuagcuugcuuuucg

SEQ ID NO: 3022462 - RNA, 19 nt, Artificial Sequence
  Description of Artificial Sequence: Synthetic oligonucleotide
gaggaggucaccuguagag

SEQ ID NO: 3022463 - RNA, 19 nt, Artificial Sequence
  Description of Artificial Sequence: Synthetic oligonucleotide
agcacagauucucguagcc

SEQ ID NO: 3022464 - RNA, 19 nt, Artificial Sequence
  Description of Artificial Sequence: Synthetic oligonucleotide
ugcaguuugucccaaaguu

SEQ ID NO: 3022465 - RNA, 19 nt, Artificial Sequence
  Description of Artificial Sequence: Synthetic oligonucleotide
uucggaacucggcaaaugc

SEQ ID NO: 3022466 - RNA, 19 nt, Artificial Sequence
  Description of Artificial Sequence: Synthetic oligonucleotide
uuuugaggaggucaccugu

SEQ ID NO: 3022467 - RNA, 19 nt, Artificial Sequence
  Description of Artificial Sequence: Synthetic oligonucleotide
cuugcuuuucggaacucgg

SEQ ID NO: 3022468 - RNA, 19 nt, Artificial Sequence
  Description of Artificial Sequence: Synthetic oligonucleotide
accuguagagcccaugcuc

SEQ ID NO: 3022469 - RNA, 19 nt, Artificial Sequence
  Description of Artificial Sequence: Synthetic oligonucleotide
ucuuuaaugcaguauucau

SEQ ID NO: 3022470 - RNA, 19 nt, Artificial Sequence
  Description of Artificial Sequence: Synthetic oligonucleotide
aaccccggcagccacaaug

SEQ ID NO: 3022471 - RNA, 19 nt, Artificial Sequence
  Description of Artificial Sequence: Synthetic oligonucleotide
uuuccacuuugcaaucagg

SEQ ID NO: 3022472 - RNA, 19 nt, Artificial Sequence
  Description of Artificial Sequence: Synthetic oligonucleotide
uuugucccaaaguuggugu

SEQ ID NO: 3022473 - RNA, 19 nt, Artificial Sequence
  Description of Artificial Sequence: Synthetic oligonucleotide
gaugcgacccacuucuagc

SEQ ID NO: 3022474 - RNA, 19 nt, Artificial Sequence
  Description of Artificial Sequence: Synthetic oligonucleotide
aaugcaguauucauagagu

SEQ ID NO: 3022475 - RNA, 19 nt, Artificial Sequence
  Description of Artificial Sequence: Synthetic oligonucleotide
uccagaauguagagagggg

SEQ ID NO: 3022476 - RNA, 19 nt, Artificial Sequence
  Description of Artificial Sequence: Synthetic oligonucleotide
ugcuuuucggaacucggca

SEQ ID NO: 3022477 - RNA, 19 nt, Artificial Sequence
  Description of Artificial Sequence: Synthetic oligonucleotide
uucucuaggcaccacucug

SEQ ID NO: 3022478 - RNA, 19 nt, Artificial Sequence
  Description of Artificial Sequence: Synthetic oligonucleotide
ggcaaaugcaguuuguccc

SEQ ID NO: 3022479 - RNA, 19 nt, Artificial Sequence
  Description of Artificial Sequence: Synthetic oligonucleotide
ucaccuguagagcccaugc

SEQ ID NO: 3022480 - RNA, 19 nt, Artificial Sequence
  Description of Artificial Sequence: Synthetic oligonucleotide
cuaggcaccacucugagaa

SEQ ID NO: 3022481 - RNA, 19 nt, Artificial Sequence
  Description of Artificial Sequence: Synthetic oligonucleotide
ucuagcuugcuuuucggaa

SEQ ID NO: 3022482 - RNA, 19 nt, Artificial Sequence
  Description of Artificial Sequence: Synthetic oligonucleotide
guccagaauguagagaggg

SEQ ID NO: 3022483 - RNA, 19 nt, Artificial Sequence
  Description of Artificial Sequence: Synthetic oligonucleotide
uucuuuaaugcaguauuca

SEQ ID NO: 3022484 - RNA, 19 nt, Artificial Sequence
  Description of Artificial Sequence: Synthetic oligonucleotide
aaggcaggagccaacgagg

SEQ ID NO: 3022485 - RNA, 19 nt, Artificial Sequence
  Description of Artificial Sequence: Synthetic oligonucleotide
ugcgugcacucaaugaugc

SEQ ID NO: 3022486 - RNA, 19 nt, Artificial Sequence
  Description of Artificial Sequence: Synthetic oligonucleotide
auagccuucuuuaaugcag

SEQ ID NO: 3022487 - RNA, 19 nt, Artificial Sequence
  Description of Artificial Sequence: Synthetic oligonucleotide
gagccaacgagguccaaag

SEQ ID NO: 3022488 - RNA, 19 nt, Artificial Sequence
  Description of Artificial Sequence: Synthetic oligonucleotide
uaggcagcacagauucucg

SEQ ID NO: 3022489 - RNA, 19 nt, Artificial Sequence
  Description of Artificial Sequence: Synthetic oligonucleotide
aggaggguagcccaauaag

SEQ ID NO: 3022490 - RNA, 19 nt, Artificial Sequence
  Description of Artificial Sequence: Synthetic oligonucleotide
ucagccagagcaaccccgg

SEQ ID NO: 3022491 - RNA, 19 nt, Artificial Sequence
  Description of Artificial Sequence: Synthetic oligonucleotide
caaaguccagaauguagag

SEQ ID NO: 3022492 - RNA, 19 nt, Artificial Sequence
  Description of Artificial Sequence: Synthetic oligonucleotide
ugaugcgacccacuucuag

SEQ ID NO: 3022493 - RNA, 19 nt, Artificial Sequence
  Description of Artificial Sequence: Synthetic oligonucleotide
gaggguagcccaauaaggc

SEQ ID NO: 3022494 - RNA, 19 nt, Artificial Sequence
  Description of Artificial Sequence: Synthetic oligonucleotide
ugcagcguaggcagcacag

SEQ ID NO: 3022495 - RNA, 19 nt, Artificial Sequence
  Description of Artificial Sequence: Synthetic oligonucleotide
ugcaguauucauagaguuc

SEQ ID NO: 3022496 - RNA, 19 nt, Artificial Sequence
  Description of Artificial Sequence: Synthetic oligonucleotide
cuucuuuaaugcaguauuc

SEQ ID NO: 3022497 - RNA, 19 nt, Artificial Sequence
  Description of Artificial Sequence: Synthetic oligonucleotide
guagagaggggugucagcc

SEQ ID NO: 3022498 - RNA, 19 nt, Artificial Sequence
  Description of Artificial Sequence: Synthetic oligonucleotide
uugaggaggucaccuguag

SEQ ID NO: 3022499 - RNA, 19 nt, Artificial Sequence
  Description of Artificial Sequence: Synthetic oligonucleotide
ucucuaggcaccacucuga

SEQ ID NO: 3022500 - RNA, 19 nt, Artificial Sequence
  Description of Artificial Sequence: Synthetic oligonucleotide
ucaaugaugcgacccacuu

SEQ ID NO: 3022501 - RNA, 19 nt, Artificial Sequence
  Description of Artificial Sequence: Synthetic oligonucleotide
uugcuuuucggaacucggc

SEQ ID NO: 3022502 - RNA, 19 nt, Artificial Sequence
  Description of Artificial Sequence: Synthetic oligonucleotide
ucuucucuaggcaccacuc

SEQ ID NO: 3022503 - RNA, 19 nt, Artificial Sequence
  Description of Artificial Sequence: Synthetic oligonucleotide
cuucuagcuugcuuuucgg

SEQ ID NO: 3022504 - RNA, 19 nt, Artificial Sequence
  Description of Artificial Sequence: Synthetic oligonucleotide
ucggaacucggcaaaugca

SEQ ID NO: 3022505 - RNA, 19 nt, Artificial Sequence
  Description of Artificial Sequence: Synthetic oligonucleotide
agagaggggugucagccag

SEQ ID NO: 3022506 - RNA, 19 nt, Artificial Sequence
  Description of Artificial Sequence: Synthetic oligonucleotide
cugagaagagcuccucagg

SEQ ID NO: 3022507 - RNA, 19 nt, Artificial Sequence
  Description of Artificial Sequence: Synthetic oligonucleotide
augcaguauucauagaguu

SEQ ID NO: 3022508 - RNA, 19 nt, Artificial Sequence
  Description of Artificial Sequence: Synthetic oligonucleotide
acaaugcgugcacucaaug

SEQ ID NO: 3022509 - RNA, 19 nt, Artificial Sequence
  Description of Artificial Sequence: Synthetic oligonucleotide
uucuagcuugcuuuucgga

SEQ ID NO: 3022510 - RNA, 19 nt, Artificial Sequence
  Description of Artificial Sequence: Synthetic oligonucleotide
auucucguagcccugcuuu

SEQ ID NO: 3022511 - RNA, 19 nt, Artificial Sequence
  Description of Artificial Sequence: Synthetic oligonucleotide
aaguuggugucccgagucu

SEQ ID NO: 3022512 - RNA, 19 nt, Artificial Sequence
  Description of Artificial Sequence: Synthetic oligonucleotide
aaugcagcguaggcagcac

SEQ ID NO: 3022513 - RNA, 19 nt, Artificial Sequence
  Description of Artificial Sequence: Synthetic oligonucleotide
ucccgagucugaaugcagc

SEQ ID NO: 3022514 - RNA, 19 nt, Artificial Sequence
  Description of Artificial Sequence: Synthetic oligonucleotide
ugaggaggucaccuguaga

SEQ ID NO: 3022515 - RNA, 19 nt, Artificial Sequence
  Description of Artificial Sequence: Synthetic oligonucleotide
aggaggucaccuguagagc

SEQ ID NO: 3022516 - RNA, 19 nt, Artificial Sequence
  Description of Artificial Sequence: Synthetic oligonucleotide
agaauguagagaggggugu

SEQ ID NO: 3022517 - RNA, 19 nt, Artificial Sequence
  Description of Artificial Sequence: Synthetic oligonucleotide
ggaggguagcccaauaagg

SEQ ID NO: 3022518 - RNA, 19 nt, Artificial Sequence
  Description of Artificial Sequence: Synthetic oligonucleotide
ccaacgagguccaaagucc

SEQ ID NO: 3022519 - RNA, 19 nt, Artificial Sequence
  Description of Artificial Sequence: Synthetic oligonucleotide
aggguagcccaauaaggca

SEQ ID NO: 3022520 - RNA, 19 nt, Artificial Sequence
  Description of Artificial Sequence: Synthetic oligonucleotide
ggugucccgagucugaaug

SEQ ID NO: 3022521 - RNA, 19 nt, Artificial Sequence
  Description of Artificial Sequence: Synthetic oligonucleotide
uuaaugcaguauucauaga

SEQ ID NO: 3022522 - RNA, 19 nt, Artificial Sequence
  Description of Artificial Sequence: Synthetic oligonucleotide
uguagagaggggugucagc

SEQ ID NO: 3022523 - RNA, 19 nt, Artificial Sequence
  Description of Artificial Sequence: Synthetic oligonucleotide
acucggcaaaugcaguuug

SEQ ID NO: 3022524 - RNA, 19 nt, Artificial Sequence
  Description of Artificial Sequence: Synthetic oligonucleotide
ggaggucaccuguagagcc

SEQ ID NO: 3022525 - RNA, 19 nt, Artificial Sequence
  Description of Artificial Sequence: Synthetic oligonucleotide
acucaaugaugcgacccac

SEQ ID NO: 3022526 - RNA, 19 nt, Artificial Sequence
  Description of Artificial Sequence: Synthetic oligonucleotide
agccacaaugcgugcacuc

SEQ ID NO: 3022527 - RNA, 19 nt, Artificial Sequence
  Description of Artificial Sequence: Synthetic oligonucleotide
ugucccaaaguuggugucc

SEQ ID NO: 3022528 - RNA, 19 nt, Artificial Sequence
  Description of Artificial Sequence: Synthetic oligonucleotide
cugggucucuucucuaggc

SEQ ID NO: 3022529 - RNA, 19 nt, Artificial Sequence
  Description of Artificial Sequence: Synthetic oligonucleotide
gucugaaugcagcguaggc

SEQ ID NO: 3022530 - RNA, 19 nt, Artificial Sequence
  Description of Artificial Sequence: Synthetic oligonucleotide
agucugaaugcagcguagg

SEQ ID NO: 3022531 - RNA, 19 nt, Artificial Sequence
  Description of Artificial Sequence: Synthetic oligonucleotide
uuugaggaggucaccugua

SEQ ID NO: 3022532 - RNA, 19 nt, Artificial Sequence
  Description of Artificial Sequence: Synthetic oligonucleotide
guuugucccaaaguuggug

SEQ ID NO: 3022533 - RNA, 19 nt, Artificial Sequence
  Description of Artificial Sequence: Synthetic oligonucleotide
augcaguuugucccaaagu

SEQ ID NO: 3022534 - RNA, 19 nt, Artificial Sequence
  Description of Artificial Sequence: Synthetic oligonucleotide
gagcccaugcucccucugg

SEQ ID NO: 3022535 - RNA, 19 nt, Artificial Sequence
  Description of Artificial Sequence: Synthetic oligonucleotide
ugaaugcagcguaggcagc

SEQ ID NO: 3022536 - RNA, 19 nt, Artificial Sequence
  Description of Artificial Sequence: Synthetic oligonucleotide
uccacuuugcaaucagguu

SEQ ID NO: 3022537 - RNA, 19 nt, Artificial Sequence
  Description of Artificial Sequence: Synthetic oligonucleotide
gcagcacagauucucguag

SEQ ID NO: 3022538 - RNA, 19 nt, Artificial Sequence
  Description of Artificial Sequence: Synthetic oligonucleotide
ugucagccagagcaacccc

SEQ ID NO: 3022539 - RNA, 19 nt, Artificial Sequence
  Description of Artificial Sequence: Synthetic oligonucleotide
agcccaugcucccucuggg

SEQ ID NO: 3022540 - RNA, 19 nt, Artificial Sequence
  Description of Artificial Sequence: Synthetic oligonucleotide
augcgacccacuucuagcu

SEQ ID NO: 3022541 - RNA, 19 nt, Artificial Sequence
  Description of Artificial Sequence: Synthetic oligonucleotide
cucugggucucuucucuag

SEQ ID NO: 3022542 - RNA, 19 nt, Artificial Sequence
  Description of Artificial Sequence: Synthetic oligonucleotide
gucagccagagcaaccccg

SEQ ID NO: 3022543 - RNA, 19 nt, Artificial Sequence
  Description of Artificial Sequence: Synthetic oligonucleotide
caaugcgugcacucaauga

SEQ ID NO: 3022544 - RNA, 19 nt, Artificial Sequence
  Description of Artificial Sequence: Synthetic oligonucleotide
uuucggaacucggcaaaug

SEQ ID NO: 3022545 - RNA, 19 nt, Artificial Sequence
  Description of Artificial Sequence: Synthetic oligonucleotide
aaaugcaguuugucccaaa

SEQ ID NO: 3022546 - RNA, 19 nt, Artificial Sequence
  Description of Artificial Sequence: Synthetic oligonucleotide
gcauagccuucuuuaaugc

SEQ ID NO: 3022547 - RNA, 19 nt, Artificial Sequence
  Description of Artificial Sequence: Synthetic oligonucleotide
auguagagaggggugucag

SEQ ID NO: 3022548 - RNA, 19 nt, Artificial Sequence
  Description of Artificial Sequence: Synthetic oligonucleotide
ugcacucaaugaugcgacc

SEQ ID NO: 3022549 - RNA, 19 nt, Artificial Sequence
  Description of Artificial Sequence: Synthetic oligonucleotide
cauagccuucuuuaaugca

SEQ ID NO: 3022550 - RNA, 19 nt, Artificial Sequence
  Description of Artificial Sequence: Synthetic oligonucleotide
cucaggaggaggguagccc

SEQ ID NO: 3022551 - RNA, 19 nt, Artificial Sequence
  Description of Artificial Sequence: Synthetic oligonucleotide
aagagcuccucaggaggag

SEQ ID NO: 3022552 - RNA, 19 nt, Artificial Sequence
  Description of Artificial Sequence: Synthetic oligonucleotide
gagcuccucaggaggaggg

SEQ ID NO: 3022553 - RNA, 19 nt, Artificial Sequence
  Description of Artificial Sequence: Synthetic oligonucleotide
cagcacagauucucguagc

SEQ ID NO: 3022554 - RNA, 19 nt, Artificial Sequence
  Description of Artificial Sequence: Synthetic oligonucleotide
ccaaaguccagaauguaga

SEQ ID NO: 3022555 - RNA, 19 nt, Artificial Sequence
  Description of Artificial Sequence: Synthetic oligonucleotide
gugucagccagagcaaccc

SEQ ID NO: 3022556 - RNA, 19 nt, Artificial Sequence
  Description of Artificial Sequence: Synthetic oligonucleotide
cucuaggcaccacucugag

SEQ ID NO: 3022557 - RNA, 19 nt, Artificial Sequence
  Description of Artificial Sequence: Synthetic oligonucleotide
auaaggcaggagccaacga

SEQ ID NO: 3022558 - RNA, 19 nt, Artificial Sequence
  Description of Artificial Sequence: Synthetic oligonucleotide
gcguaggcagcacagauuc

SEQ ID NO: 3022559 - RNA, 19 nt, Artificial Sequence
  Description of Artificial Sequence: Synthetic oligonucleotide
agagcuccucaggaggagg

SEQ ID NO: 3022560 - RNA, 19 nt, Artificial Sequence
  Description of Artificial Sequence: Synthetic oligonucleotide
uagagaggggugucagcca

SEQ ID NO: 3022561 - RNA, 19 nt, Artificial Sequence
  Description of Artificial Sequence: Synthetic oligonucleotide
accccggcagccacaaugc

SEQ ID NO: 3022562 - RNA, 19 nt, Artificial Sequence
  Description of Artificial Sequence: Synthetic oligonucleotide
ugucccgagucugaaugca

SEQ ID NO: 3022563 - RNA, 19 nt, Artificial Sequence
  Description of Artificial Sequence: Synthetic oligonucleotide
aacgagguccaaaguccag

SEQ ID NO: 3022564 - RNA, 19 nt, Artificial Sequence
  Description of Artificial Sequence: Synthetic oligonucleotide
ucuaggcaccacucugaga

SEQ ID NO: 3022565 - RNA, 19 nt, Artificial Sequence
  Description of Artificial Sequence: Synthetic oligonucleotide
caaugaugcgacccacuuc

SEQ ID NO: 3022566 - RNA, 19 nt, Artificial Sequence
  Description of Artificial Sequence: Synthetic oligonucleotide
ucggcaaaugcaguuuguc

SEQ ID NO: 3022567 - RNA, 19 nt, Artificial Sequence
  Description of Artificial Sequence: Synthetic oligonucleotide
gaaugcagcguaggcagca

SEQ ID NO: 3022568 - RNA, 19 nt, Artificial Sequence
  Description of Artificial Sequence: Synthetic oligonucleotide
agccagagcaaccccggca

SEQ ID NO: 3022569 - RNA, 19 nt, Artificial Sequence
  Description of Artificial Sequence: Synthetic oligonucleotide
uugucccaaaguugguguc

SEQ ID NO: 3022570 - RNA, 19 nt, Artificial Sequence
  Description of Artificial Sequence: Synthetic oligonucleotide
gccaacgagguccaaaguc

SEQ ID NO: 3022571 - RNA, 19 nt, Artificial Sequence
  Description of Artificial Sequence: Synthetic oligonucleotide
gaagagcuccucaggagga

SEQ ID NO: 3022572 - RNA, 19 nt, Artificial Sequence
  Description of Artificial Sequence: Synthetic oligonucleotide
aacucggcaaaugcaguuu

SEQ ID NO: 3022573 - RNA, 19 nt, Artificial Sequence
  Description of Artificial Sequence: Synthetic oligonucleotide
gaggaggguagcccaauaa

SEQ ID NO: 3022574 - RNA, 19 nt, Artificial Sequence
  Description of Artificial Sequence: Synthetic oligonucleotide
aguccagaauguagagagg

SEQ ID NO: 3022575 - RNA, 19 nt, Artificial Sequence
  Description of Artificial Sequence: Synthetic oligonucleotide
ucccaaaguuggugucccg

SEQ ID NO: 3022576 - RNA, 19 nt, Artificial Sequence
  Description of Artificial Sequence: Synthetic oligonucleotide
cacagauucucguagcccu

SEQ ID NO: 3022577 - RNA, 19 nt, Artificial Sequence
  Description of Artificial Sequence: Synthetic oligonucleotide
aguuggugucccgagucug

SEQ ID NO: 3022578 - RNA, 19 nt, Artificial Sequence
  Description of Artificial Sequence: Synthetic oligonucleotide
gccagagcaaccccggcag

SEQ ID NO: 3022579 - RNA, 19 nt, Artificial Sequence
  Description of Artificial Sequence: Synthetic oligonucleotide
ugucugcauagccuucuuu

SEQ ID NO: 3022580 - RNA, 19 nt, Artificial Sequence
  Description of Artificial Sequence: Synthetic oligonucleotide
uagcccaauaaggcaggag

SEQ ID NO: 3022581 - RNA, 19 nt, Artificial Sequence
  Description of Artificial Sequence: Synthetic oligonucleotide
gugcacucaaugaugcgac

SEQ ID NO: 3022582 - RNA, 19 nt, Artificial Sequence
  Description of Artificial Sequence: Synthetic oligonucleotide
gaggucaccuguagagccc

SEQ ID NO: 3022583 - RNA, 19 nt, Artificial Sequence
  Description of Artificial Sequence: Synthetic oligonucleotide
gcaguuugucccaaaguug

SEQ ID NO: 3022584 - RNA, 19 nt, Artificial Sequence
  Description of Artificial Sequence: Synthetic oligonucleotide
uaggcaccacucugagaag

SEQ ID NO: 3022585 - RNA, 19 nt, Artificial Sequence
  Description of Artificial Sequence: Synthetic oligonucleotide
cagagcaaccccggcagcc

SEQ ID NO: 3022586 - RNA, 19 nt, Artificial Sequence
  Description of Artificial Sequence: Synthetic oligonucleotide
uuuucggaacucggcaaau

SEQ ID NO: 3022587 - RNA, 19 nt, Artificial Sequence
  Description of Artificial Sequence: Synthetic oligonucleotide
uguagagcccaugcucccu

SEQ ID NO: 3022588 - RNA, 19 nt, Artificial Sequence
  Description of Artificial Sequence: Synthetic oligonucleotide
acgagguccaaaguccaga

SEQ ID NO: 3022589 - RNA, 19 nt, Artificial Sequence
  Description of Artificial Sequence: Synthetic oligonucleotide
cuuuucggaacucggcaaa

SEQ ID NO: 3022590 - RNA, 19 nt, Artificial Sequence
  Description of Artificial Sequence: Synthetic oligonucleotide
gugucccgagucugaaugc

SEQ ID NO: 3022591 - RNA, 19 nt, Artificial Sequence
  Description of Artificial Sequence: Synthetic oligonucleotide
cacucaaugaugcgaccca

SEQ ID NO: 3022592 - RNA, 19 nt, Artificial Sequence
  Description of Artificial Sequence: Synthetic oligonucleotide
agauucucguagcccugcu

SEQ ID NO: 3022593 - RNA, 19 nt, Artificial Sequence
  Description of Artificial Sequence: Synthetic oligonucleotide
cagauucucguagcccugc

SEQ ID NO: 3022594 - RNA, 19 nt, Artificial Sequence
  Description of Artificial Sequence: Synthetic oligonucleotide
gucccaaaguugguguccc

SEQ ID NO: 3022595 - RNA, 19 nt, Artificial Sequence
  Description of Artificial Sequence: Synthetic oligonucleotide
caacgagguccaaagucca

SEQ ID NO: 3022596 - RNA, 19 nt, Artificial Sequence
  Description of Artificial Sequence: Synthetic oligonucleotide
gcuugcuuuucggaacucg

SEQ ID NO: 3022597 - RNA, 19 nt, Artificial Sequence
  Description of Artificial Sequence: Synthetic oligonucleotide
ccaaaguuggugucccgag

SEQ ID NO: 3022598 - RNA, 19 nt, Artificial Sequence
  Description of Artificial Sequence: Synthetic oligonucleotide
augcgugcacucaaugaug

SEQ ID NO: 3022599 - RNA, 19 nt, Artificial Sequence
  Description of Artificial Sequence: Synthetic oligonucleotide
gggucucuucucuaggcac

SEQ ID NO: 3022600 - RNA, 19 nt, Artificial Sequence
  Description of Artificial Sequence: Synthetic oligonucleotide
aggcagcacagauucucgu

SEQ ID NO: 3022601 - RNA, 19 nt, Artificial Sequence
  Description of Artificial Sequence: Synthetic oligonucleotide
gcacucaaugaugcgaccc

SEQ ID NO: 3022602 - RNA, 19 nt, Artificial Sequence
  Description of Artificial Sequence: Synthetic oligonucleotide
cggaacucggcaaaugcag

SEQ ID NO: 3022603 - RNA, 19 nt, Artificial Sequence
  Description of Artificial Sequence: Synthetic oligonucleotide
aggcaccacucugagaaga

SEQ ID NO: 3022604 - RNA, 19 nt, Artificial Sequence
  Description of Artificial Sequence: Synthetic oligonucleotide
ccggcagccacaaugcgug

SEQ ID NO: 3022605 - RNA, 19 nt, Artificial Sequence
  Description of Artificial Sequence: Synthetic oligonucleotide
caccacucugagaagagcu

SEQ ID NO: 3022606 - RNA, 19 nt, Artificial Sequence
  Description of Artificial Sequence: Synthetic oligonucleotide
guagagcccaugcucccuc

SEQ ID NO: 3022607 - RNA, 19 nt, Artificial Sequence
  Description of Artificial Sequence: Synthetic oligonucleotide
cccgagucugaaugcagcg

SEQ ID NO: 3022608 - RNA, 19 nt, Artificial Sequence
  Description of Artificial Sequence: Synthetic oligonucleotide
agccaacgagguccaaagu

SEQ ID NO: 3022609 - RNA, 19 nt, Artificial Sequence
  Description of Artificial Sequence: Synthetic oligonucleotide
uucucguagcccugcuuuu

SEQ ID NO: 3022610 - RNA, 19 nt, Artificial Sequence
  Description of Artificial Sequence: Synthetic oligonucleotide
augcagcguaggcagcaca

SEQ ID NO: 3022611 - RNA, 19 nt, Artificial Sequence
  Description of Artificial Sequence: Synthetic oligonucleotide
gcgacccacuucuagcuug

SEQ ID NO: 3022612 - RNA, 19 nt, Artificial Sequence
  Description of Artificial Sequence: Synthetic oligonucleotide
ggucucuucucuaggcacc

SEQ ID NO: 3022613 - RNA, 19 nt, Artificial Sequence
  Description of Artificial Sequence: Synthetic oligonucleotide
gcccaauaaggcaggagcc

SEQ ID NO: 3022614 - RNA, 19 nt, Artificial Sequence
  Description of Artificial Sequence: Synthetic oligonucleotide
agagcccaugcucccucug

SEQ ID NO: 3022615 - RNA, 19 nt, Artificial Sequence
  Description of Artificial Sequence: Synthetic oligonucleotide
uccucaggaggaggguagc

SEQ ID NO: 3022616 - RNA, 19 nt, Artificial Sequence
  Description of Artificial Sequence: Synthetic oligonucleotide
gaacucggcaaaugcaguu

SEQ ID NO: 3022617 - RNA, 19 nt, Artificial Sequence
  Description of Artificial Sequence: Synthetic oligonucleotide
acagauucucguagcccug

SEQ ID NO: 3022618 - RNA, 19 nt, Artificial Sequence
  Description of Artificial Sequence: Synthetic oligonucleotide
cggcaaaugcaguuugucc

SEQ ID NO: 3022619 - RNA, 19 nt, Artificial Sequence
  Description of Artificial Sequence: Synthetic oligonucleotide
uagagcccaugcucccucu

SEQ ID NO: 3022620 - RNA, 19 nt, Artificial Sequence
  Description of Artificial Sequence: Synthetic oligonucleotide
agagcaaccccggcagcca

SEQ ID NO: 3022621 - RNA, 19 nt, Artificial Sequence
  Description of Artificial Sequence: Synthetic oligonucleotide
ggugucagccagagcaacc

SEQ ID NO: 3022622 - RNA, 19 nt, Artificial Sequence
  Description of Artificial Sequence: Synthetic oligonucleotide
gcacagauucucguagccc

SEQ ID NO: 3022623 - RNA, 19 nt, Artificial Sequence
  Description of Artificial Sequence: Synthetic oligonucleotide
gagcaaccccggcagccac

SEQ ID NO: 3022624 - RNA, 19 nt, Artificial Sequence
  Description of Artificial Sequence: Synthetic oligonucleotide
uuggugucccgagucugaa

SEQ ID NO: 3022625 - RNA, 19 nt, Artificial Sequence
  Description of Artificial Sequence: Synthetic oligonucleotide
acccacuucuagcuugcuu

SEQ ID NO: 3022626 - RNA, 19 nt, Artificial Sequence
  Description of Artificial Sequence: Synthetic oligonucleotide
ugcgacccacuucuagcuu

SEQ ID NO: 3022627 - RNA, 19 nt, Artificial Sequence
  Description of Artificial Sequence: Synthetic oligonucleotide
agcuugcuuuucggaacuc

SEQ ID NO: 3022628 - RNA, 19 nt, Artificial Sequence
  Description of Artificial Sequence: Synthetic oligonucleotide
gucccgagucugaaugcag

SEQ ID NO: 3022629 - RNA, 19 nt, Artificial Sequence
  Description of Artificial Sequence: Synthetic oligonucleotide
aggucaccuguagagccca

SEQ ID NO: 3022630 - RNA, 19 nt, Artificial Sequence
  Description of Artificial Sequence: Synthetic oligonucleotide
gcuuuucggaacucggcaa

SEQ ID NO: 3022631 - RNA, 19 nt, Artificial Sequence
  Description of Artificial Sequence: Synthetic oligonucleotide
gcagccacaaugcgugcac

SEQ ID NO: 3022632 - RNA, 19 nt, Artificial Sequence
  Description of Artificial Sequence: Synthetic oligonucleotide
gucaccuguagagcccaug

SEQ ID NO: 3022633 - RNA, 19 nt, Artificial Sequence
  Description of Artificial Sequence: Synthetic oligonucleotide
agccuucuuuaaugcagua

SEQ ID NO: 3022634 - RNA, 19 nt, Artificial Sequence
  Description of Artificial Sequence: Synthetic oligonucleotide
guuggugucccgagucuga

SEQ ID NO: 3022635 - RNA, 19 nt, Artificial Sequence
  Description of Artificial Sequence: Synthetic oligonucleotide
aggcaggagccaacgaggu

SEQ ID NO: 3022636 - RNA, 19 nt, Artificial Sequence
  Description of Artificial Sequence: Synthetic oligonucleotide
ggcaccacucugagaagag

SEQ ID NO: 3022637 - RNA, 19 nt, Artificial Sequence
  Description of Artificial Sequence: Synthetic oligonucleotide
ccuucuuuaaugcaguauu

SEQ ID NO: 3022638 - RNA, 19 nt, Artificial Sequence
  Description of Artificial Sequence: Synthetic oligonucleotide
gucucuucucuaggcacca

SEQ ID NO: 3022639 - RNA, 19 nt, Artificial Sequence
  Description of Artificial Sequence: Synthetic oligonucleotide
uggugucccgagucugaau

SEQ ID NO: 3022640 - RNA, 19 nt, Artificial Sequence
  Description of Artificial Sequence: Synthetic oligonucleotide
gcgugcacucaaugaugcg

SEQ ID NO: 3022641 - RNA, 19 nt, Artificial Sequence
  Description of Artificial Sequence: Synthetic oligonucleotide
cucuucucuaggcaccacu

SEQ ID NO: 3022642 - RNA, 19 nt, Artificial Sequence
  Description of Artificial Sequence: Synthetic oligonucleotide
cucaaugaugcgacccacu

SEQ ID NO: 3022643 - RNA, 19 nt, Artificial Sequence
  Description of Artificial Sequence: Synthetic oligonucleotide
cacuucuagcuugcuuuuc

SEQ ID NO: 3022644 - RNA, 19 nt, Artificial Sequence
  Description of Artificial Sequence: Synthetic oligonucleotide
caaaguuggugucccgagu

SEQ ID NO: 3022645 - RNA, 19 nt, Artificial Sequence
  Description of Artificial Sequence: Synthetic oligonucleotide
cagccagagcaaccccggc

SEQ ID NO: 3022646 - RNA, 19 nt, Artificial Sequence
  Description of Artificial Sequence: Synthetic oligonucleotide
ucucuucucuaggcaccac

SEQ ID NO: 3022647 - RNA, 19 nt, Artificial Sequence
  Description of Artificial Sequence: Synthetic oligonucleotide
cuucucuaggcaccacucu

SEQ ID NO: 3022648 - RNA, 19 nt, Artificial Sequence
  Description of Artificial Sequence: Synthetic oligonucleotide
gguccaaaguccagaaugu

SEQ ID NO: 3022649 - RNA, 19 nt, Artificial Sequence
  Description of Artificial Sequence: Synthetic oligonucleotide
caugcucccucugggucuc

SEQ ID NO: 3022650 - RNA, 19 nt, Artificial Sequence
  Description of Artificial Sequence: Synthetic oligonucleotide
agcguaggcagcacagauu

SEQ ID NO: 3022651 - RNA, 19 nt, Artificial Sequence
  Description of Artificial Sequence: Synthetic oligonucleotide
gauucucguagcccugcuu

SEQ ID NO: 3022652 - RNA, 19 nt, Artificial Sequence
  Description of Artificial Sequence: Synthetic oligonucleotide
ggcagcacagauucucgua

SEQ ID NO: 3022653 - RNA, 19 nt, Artificial Sequence
  Description of Artificial Sequence: Synthetic oligonucleotide
caggagccaacgaggucca

SEQ ID NO: 3022654 - RNA, 19 nt, Artificial Sequence
  Description of Artificial Sequence: Synthetic oligonucleotide
cacucugagaagagcuccu

SEQ ID NO: 3022655 - RNA, 19 nt, Artificial Sequence
  Description of Artificial Sequence: Synthetic oligonucleotide
cugcauagccuucuuuaau

SEQ ID NO: 3022656 - RNA, 19 nt, Artificial Sequence
  Description of Artificial Sequence: Synthetic oligonucleotide
gagguccaaaguccagaau

SEQ ID NO: 3022657 - RNA, 19 nt, Artificial Sequence
  Description of Artificial Sequence: Synthetic oligonucleotide
guccaaaguccagaaugua

SEQ ID NO: 3022658 - RNA, 19 nt, Artificial Sequence
  Description of Artificial Sequence: Synthetic oligonucleotide
gcaccacucugagaagagc

SEQ ID NO: 3022659 - RNA, 19 nt, Artificial Sequence
  Description of Artificial Sequence: Synthetic oligonucleotide
guagcccaauaaggcagga

SEQ ID NO: 3022660 - RNA, 19 nt, Artificial Sequence
  Description of Artificial Sequence: Synthetic oligonucleotide
cccaugcucccucuggguc

SEQ ID NO: 3022661 - RNA, 19 nt, Artificial Sequence
  Description of Artificial Sequence: Synthetic oligonucleotide
gccacaaugcgugcacuca

SEQ ID NO: 3022662 - RNA, 19 nt, Artificial Sequence
  Description of Artificial Sequence: Synthetic oligonucleotide
cccacuucuagcuugcuuu

SEQ ID NO: 3022663 - RNA, 19 nt, Artificial Sequence
  Description of Artificial Sequence: Synthetic oligonucleotide
aggaggaggguagcccaau

SEQ ID NO: 3022664 - RNA, 19 nt, Artificial Sequence
  Description of Artificial Sequence: Synthetic oligonucleotide
gagaggggugucagccaga

SEQ ID NO: 3022665 - RNA, 19 nt, Artificial Sequence
  Description of Artificial Sequence: Synthetic oligonucleotide
ccagaauguagagaggggu

SEQ ID NO: 3022666 - RNA, 19 nt, Artificial Sequence
  Description of Artificial Sequence: Synthetic oligonucleotide
cacaaugcgugcacucaau

SEQ ID NO: 3022667 - RNA, 19 nt, Artificial Sequence
  Description of Artificial Sequence: Synthetic oligonucleotide
ggagccaacgagguccaaa

SEQ ID NO: 3022668 - RNA, 19 nt, Artificial Sequence
  Description of Artificial Sequence: Synthetic oligonucleotide
cgugcacucaaugaugcga

SEQ ID NO: 3022669 - RNA, 19 nt, Artificial Sequence
  Description of Artificial Sequence: Synthetic oligonucleotide
cagcguaggcagcacagau

SEQ ID NO: 3022670 - RNA, 19 nt, Artificial Sequence
  Description of Artificial Sequence: Synthetic oligonucleotide
gggugucagccagagcaac

SEQ ID NO: 3022671 - RNA, 19 nt, Artificial Sequence
  Description of Artificial Sequence: Synthetic oligonucleotide
cccaauaaggcaggagcca

SEQ ID NO: 3022672 - RNA, 19 nt, Artificial Sequence
  Description of Artificial Sequence: Synthetic oligonucleotide
ccaauaaggcaggagccaa

SEQ ID NO: 3022673 - RNA, 19 nt, Artificial Sequence
  Description of Artificial Sequence: Synthetic oligonucleotide
cgacccacuucuagcuugc

SEQ ID NO: 3022674 - RNA, 19 nt, Artificial Sequence
  Description of Artificial Sequence: Synthetic oligonucleotide
caggaggaggguagcccaa

SEQ ID NO: 3022675 - RNA, 19 nt, Artificial Sequence
  Description of Artificial Sequence: Synthetic oligonucleotide
ggcaggagccaacgagguc

SEQ ID NO: 3022676 - RNA, 19 nt, Artificial Sequence
  Description of Artificial Sequence: Synthetic oligonucleotide
ccucaggaggaggguagcc

SEQ ID NO: 3022677 - RNA, 19 nt, Artificial Sequence
  Description of Artificial Sequence: Synthetic oligonucleotide
agcaaccccggcagccaca

SEQ ID NO: 3022678 - RNA, 19 nt, Artificial Sequence
  Description of Artificial Sequence: Synthetic oligonucleotide
caccuguagagcccaugcu

SEQ ID NO: 3022679 - RNA, 19 nt, Artificial Sequence
  Description of Artificial Sequence: Synthetic oligonucleotide
ggaacucggcaaaugcagu

SEQ ID NO: 3022680 - RNA, 19 nt, Artificial Sequence
  Description of Artificial Sequence: Synthetic oligonucleotide
ccagagcaaccccggcagc

SEQ ID NO: 3022681 - RNA, 19 nt, Artificial Sequence
  Description of Artificial Sequence: Synthetic oligonucleotide
cccaaaguuggugucccga

SEQ ID NO: 3022682 - RNA, 19 nt, Artificial Sequence
  Description of Artificial Sequence: Synthetic oligonucleotide
cgagucugaaugcagcgua

SEQ ID NO: 3022683 - RNA, 19 nt, Artificial Sequence
  Description of Artificial Sequence: Synthetic oligonucleotide
ggaggaggguagcccaaua

SEQ ID NO: 3022684 - RNA, 19 nt, Artificial Sequence
  Description of Artificial Sequence: Synthetic oligonucleotide
ccacaaugcgugcacucaa

SEQ ID NO: 3022685 - RNA, 19 nt, Artificial Sequence
  Description of Artificial Sequence: Synthetic oligonucleotide
gcucccucugggucucuuc

SEQ ID NO: 3022686 - RNA, 19 nt, Artificial Sequence
  Description of Artificial Sequence: Synthetic oligonucleotide
cgagguccaaaguccagaa

SEQ ID NO: 3022687 - RNA, 19 nt, Artificial Sequence
  Description of Artificial Sequence: Synthetic oligonucleotide
gcagcguaggcagcacaga

SEQ ID NO: 3022688 - RNA, 19 nt, Artificial Sequence
  Description of Artificial Sequence: Synthetic oligonucleotide
ugcucccucugggucucuu

SEQ ID NO: 3022689 - RNA, 19 nt, Artificial Sequence
  Description of Artificial Sequence: Synthetic oligonucleotide
ccccggcagccacaaugcg

SEQ ID NO: 3022690 - RNA, 19 nt, Artificial Sequence
  Description of Artificial Sequence: Synthetic oligonucleotide
gccuucuuuaaugcaguau

SEQ ID NO: 3022691 - RNA, 19 nt, Artificial Sequence
  Description of Artificial Sequence: Synthetic oligonucleotide
augaugcgacccacuucua

SEQ ID NO: 3022692 - RNA, 19 nt, Artificial Sequence
  Description of Artificial Sequence: Synthetic oligonucleotide
ggggugucagccagagcaa

SEQ ID NO: 3022693 - RNA, 19 nt, Artificial Sequence
  Description of Artificial Sequence: Synthetic oligonucleotide
ccaugcucccucugggucu

SEQ ID NO: 3022694 - RNA, 19 nt, Artificial Sequence
  Description of Artificial Sequence: Synthetic oligonucleotide
gcaaccccggcagccacaa

SEQ ID NO: 3022695 - RNA, 19 nt, Artificial Sequence
  Description of Artificial Sequence: Synthetic oligonucleotide
cccggcagccacaaugcgu

SEQ ID NO: 3022696 - RNA, 19 nt, Artificial Sequence
  Description of Artificial Sequence: Synthetic oligonucleotide
gacccacuucuagcuugcu

SEQ ID NO: 3022697 - RNA, 19 nt, Artificial Sequence
  Description of Artificial Sequence: Synthetic oligonucleotide
gcccaugcucccucugggu

SEQ ID NO: 3022698 - RNA, 19 nt, Artificial Sequence
  Description of Artificial Sequence: Synthetic oligonucleotide
cagccacaaugcgugcacu

SEQ ID NO: 3022699 - RNA, 19 nt, Artificial Sequence
  Description of Artificial Sequence: Synthetic oligonucleotide
aggagccaacgagguccaa

SEQ ID NO: 3022700 - RNA, 19 nt, Artificial Sequence
  Description of Artificial Sequence: Synthetic oligonucleotide
ccucugggucucuucucua

SEQ ID NO: 3022701 - RNA, 19 nt, Artificial Sequence
  Description of Artificial Sequence: Synthetic oligonucleotide
ccacuucuagcuugcuuuu

SEQ ID NO: 3022702 - RNA, 19 nt, Artificial Sequence
  Description of Artificial Sequence: Synthetic oligonucleotide
augcucccucugggucucu

SEQ ID NO: 3022703 - RNA, 19 nt, Artificial Sequence
  Description of Artificial Sequence: Synthetic oligonucleotide
ccgagucugaaugcagcgu

SEQ ID NO: 3022704 - RNA, 19 nt, Artificial Sequence
  Description of Artificial Sequence: Synthetic oligonucleotide
ggucaccuguagagcccau

SEQ ID NO: 3022705 - RNA, 19 nt, Artificial Sequence
  Description of Artificial Sequence: Synthetic oligonucleotide
caaccccggcagccacaau

SEQ ID NO: 3022706 - RNA, 19 nt, Artificial Sequence
  Description of Artificial Sequence: Synthetic oligonucleotide
aaaaguauuucugacaugc

SEQ ID NO: 3022707 - RNA, 19 nt, Artificial Sequence
  Description of Artificial Sequence: Synthetic oligonucleotide
uauacauaugcauauaugg

SEQ ID NO: 3022708 - RNA, 19 nt, Artificial Sequence
  Description of Artificial Sequence: Synthetic oligonucleotide
auuauacauauacauaugc

SEQ ID NO: 3022709 - RNA, 19 nt, Artificial Sequence
  Description of Artificial Sequence: Synthetic oligonucleotide
aagagagagaucuauauag

SEQ ID NO: 3022710 - RNA, 19 nt, Artificial Sequence
  Description of Artificial Sequence: Synthetic oligonucleotide
uauuaaaacagaaacaaac

SEQ ID NO: 3022711 - RNA, 19 nt, Artificial Sequence
  Description of Artificial Sequence: Synthetic oligonucleotide
gaaacaaacaaaaugauug

SEQ ID NO: 3022712 - RNA, 19 nt, Artificial Sequence
  Description of Artificial Sequence: Synthetic oligonucleotide
aauagugugaaccuuugag

SEQ ID NO: 3022713 - RNA, 19 nt, Artificial Sequence
  Description of Artificial Sequence: Synthetic oligonucleotide
aauaaaaugaacuuuuaua

SEQ ID NO: 3022714 - RNA, 19 nt, Artificial Sequence
  Description of Artificial Sequence: Synthetic oligonucleotide
guuauauuuacuuugaaca

SEQ ID NO: 3022715 - RNA, 19 nt, Artificial Sequence
  Description of Artificial Sequence: Synthetic oligonucleotide
guaaagguaaaauaaaaug

SEQ ID NO: 3022716 - RNA, 19 nt, Artificial Sequence
  Description of Artificial Sequence: Synthetic oligonucleotide
auaaaaugaacuuuuauau

SEQ ID NO: 3022717 - RNA, 19 nt, Artificial Sequence
  Description of Artificial Sequence: Synthetic oligonucleotide
ucuauauagaacaaaagua

SEQ ID NO: 3022718 - RNA, 19 nt, Artificial Sequence
  Description of Artificial Sequence: Synthetic oligonucleotide
uugaguauuagaaugaaaa

SEQ ID NO: 3022719 - RNA, 19 nt, Artificial Sequence
  Description of Artificial Sequence: Synthetic oligonucleotide
acuuugaacaguuuacagc

SEQ ID NO: 3022720 - RNA, 19 nt, Artificial Sequence
  Description of Artificial Sequence: Synthetic oligonucleotide
aaaugauugucuuugaaaa

SEQ ID NO: 3022721 - RNA, 19 nt, Artificial Sequence
  Description of Artificial Sequence: Synthetic oligonucleotide
ugaacuuuuauauuuaaaa

SEQ ID NO: 3022722 - RNA, 19 nt, Artificial Sequence
  Description of Artificial Sequence: Synthetic oligonucleotide
uauuguuauauuuacuuug

SEQ ID NO: 3022723 - RNA, 19 nt, Artificial Sequence
  Description of Artificial Sequence: Synthetic oligonucleotide
cacaagaauauuaaaacag

SEQ ID NO: 3022724 - RNA, 19 nt, Artificial Sequence
  Description of Artificial Sequence: Synthetic oligonucleotide
aacaaaaugauugucuuug

SEQ ID NO: 3022725 - RNA, 19 nt, Artificial Sequence
  Description of Artificial Sequence: Synthetic oligonucleotide
aaagagacagagaagagag

SEQ ID NO: 3022726 - RNA, 19 nt, Artificial Sequence
  Description of Artificial Sequence: Synthetic oligonucleotide
uauuagaaugaaaaucucc

SEQ ID NO: 3022727 - RNA, 19 nt, Artificial Sequence
  Description of Artificial Sequence: Synthetic oligonucleotide
acaguuuacagcuguauac

SEQ ID NO: 3022728 - RNA, 19 nt, Artificial Sequence
  Description of Artificial Sequence: Synthetic oligonucleotide
aucuauauagaacaaaagu

SEQ ID NO: 3022729 - RNA, 19 nt, Artificial Sequence
  Description of Artificial Sequence: Synthetic oligonucleotide
uuuauuguuauauuuacuu

SEQ ID NO: 3022730 - RNA, 19 nt, Artificial Sequence
  Description of Artificial Sequence: Synthetic oligonucleotide
uuauauuuacuuugaacag

SEQ ID NO: 3022731 - RNA, 19 nt, Artificial Sequence
  Description of Artificial Sequence: Synthetic oligonucleotide
uuaaaacagaaacaaacaa

SEQ ID NO: 3022732 - RNA, 19 nt, Artificial Sequence
  Description of Artificial Sequence: Synthetic oligonucleotide
acauuauacauauacauau

SEQ ID NO: 3022733 - RNA, 19 nt, Artificial Sequence
  Description of Artificial Sequence: Synthetic oligonucleotide
aaaucuccugaccaccugc

SEQ ID NO: 3022734 - RNA, 19 nt, Artificial Sequence
  Description of Artificial Sequence: Synthetic oligonucleotide
gagaguuucacauuaucag

SEQ ID NO: 3022735 - RNA, 19 nt, Artificial Sequence
  Description of Artificial Sequence: Synthetic oligonucleotide
uuuacuuugaacaguuuac

SEQ ID NO: 3022736 - RNA, 19 nt, Artificial Sequence
  Description of Artificial Sequence: Synthetic oligonucleotide
agaaugaaaaucuccugac

SEQ ID NO: 3022737 - RNA, 19 nt, Artificial Sequence
  Description of Artificial Sequence: Synthetic oligonucleotide
gagagaucuauauagaaca

SEQ ID NO: 3022738 - RNA, 19 nt, Artificial Sequence
  Description of Artificial Sequence: Synthetic oligonucleotide
cuguauacuuaaaagagag

SEQ ID NO: 3022739 - RNA, 19 nt, Artificial Sequence
  Description of Artificial Sequence: Synthetic oligonucleotide
aaugauugucuuugaaaag

SEQ ID NO: 3022740 - RNA, 19 nt, Artificial Sequence
  Description of Artificial Sequence: Synthetic oligonucleotide
aguauuucugacaugcugc

SEQ ID NO: 3022741 - RNA, 19 nt, Artificial Sequence
  Description of Artificial Sequence: Synthetic oligonucleotide
aacaaaaguauuucugaca

SEQ ID NO: 3022742 - RNA, 19 nt, Artificial Sequence
  Description of Artificial Sequence: Synthetic oligonucleotide
aguauuagaaugaaaaucu

SEQ ID NO: 3022743 - RNA, 19 nt, Artificial Sequence
  Description of Artificial Sequence: Synthetic oligonucleotide
uagaacaaaaguauuucug

SEQ ID NO: 3022744 - RNA, 19 nt, Artificial Sequence
  Description of Artificial Sequence: Synthetic oligonucleotide
uuucacaauagugugaacc

SEQ ID NO: 3022745 - RNA, 19 nt, Artificial Sequence
  Description of Artificial Sequence: Synthetic oligonucleotide
uagaaugaaaaucuccuga

SEQ ID NO: 3022746 - RNA, 19 nt, Artificial Sequence
  Description of Artificial Sequence: Synthetic oligonucleotide
uguuauauuuacuuugaac

SEQ ID NO: 3022747 - RNA, 19 nt, Artificial Sequence
  Description of Artificial Sequence: Synthetic oligonucleotide
ugcuuugugauuaugucug

SEQ ID NO: 3022748 - RNA, 19 nt, Artificial Sequence
  Description of Artificial Sequence: Synthetic oligonucleotide
uucacauuaucaguaaagg

SEQ ID NO: 3022749 - RNA, 19 nt, Artificial Sequence
  Description of Artificial Sequence: Synthetic oligonucleotide
uguacauuauacauauaca

SEQ ID NO: 3022750 - RNA, 19 nt, Artificial Sequence
  Description of Artificial Sequence: Synthetic oligonucleotide
acagcuguauacuuaaaag

SEQ ID NO: 3022751 - RNA, 19 nt, Artificial Sequence
  Description of Artificial Sequence: Synthetic oligonucleotide
aaacaaacaaaaugauugu

SEQ ID NO: 3022752 - RNA, 19 nt, Artificial Sequence
  Description of Artificial Sequence: Synthetic oligonucleotide
gucacaagaauauuaaaac

SEQ ID NO: 3022753 - RNA, 19 nt, Artificial Sequence
  Description of Artificial Sequence: Synthetic oligonucleotide
guguacauuauacauauac

SEQ ID NO: 3022754 - RNA, 19 nt, Artificial Sequence
  Description of Artificial Sequence: Synthetic oligonucleotide
uuuauuuuggguaucuuuu

SEQ ID NO: 3022755 - RNA, 19 nt, Artificial Sequence
  Description of Artificial Sequence: Synthetic oligonucleotide
ugagaguuucacauuauca

SEQ ID NO: 3022756 - RNA, 19 nt, Artificial Sequence
  Description of Artificial Sequence: Synthetic oligonucleotide
uuuaguuugucacaagaau

SEQ ID NO: 3022757 - RNA, 19 nt, Artificial Sequence
  Description of Artificial Sequence: Synthetic oligonucleotide
agaacaaaaguauuucuga

SEQ ID NO: 3022758 - RNA, 19 nt, Artificial Sequence
  Description of Artificial Sequence: Synthetic oligonucleotide
uuuugaaagccuuucacaa

SEQ ID NO: 3022759 - RNA, 19 nt, Artificial Sequence
  Description of Artificial Sequence: Synthetic oligonucleotide
ucacaagaauauuaaaaca

SEQ ID NO: 3022760 - RNA, 19 nt, Artificial Sequence
  Description of Artificial Sequence: Synthetic oligonucleotide
acaaaaguauuucugacau

SEQ ID NO: 3022761 - RNA, 19 nt, Artificial Sequence
  Description of Artificial Sequence: Synthetic oligonucleotide
aacaaacaaaaugauuguc

SEQ ID NO: 3022762 - RNA, 19 nt, Artificial Sequence
  Description of Artificial Sequence: Synthetic oligonucleotide
aaagguaaaauaaaaugaa

SEQ ID NO: 3022763 - RNA, 19 nt, Artificial Sequence
  Description of Artificial Sequence: Synthetic oligonucleotide
accuuugaguauuagaaug

SEQ ID NO: 3022764 - RNA, 19 nt, Artificial Sequence
  Description of Artificial Sequence: Synthetic oligonucleotide
guauacuuaaaagagagca

SEQ ID NO: 3022765 - RNA, 19 nt, Artificial Sequence
  Description of Artificial Sequence: Synthetic oligonucleotide
uugucuuugaaaagcaacu

SEQ ID NO: 3022766 - RNA, 19 nt, Artificial Sequence
  Description of Artificial Sequence: Synthetic oligonucleotide
uuaguuugucacaagaaua

SEQ ID NO: 3022767 - RNA, 19 nt, Artificial Sequence
  Description of Artificial Sequence: Synthetic oligonucleotide
aaaagagacagagaagaga

SEQ ID NO: 3022768 - RNA, 19 nt, Artificial Sequence
  Description of Artificial Sequence: Synthetic oligonucleotide
ucaguaaagguaaaauaaa

SEQ ID NO: 3022769 - RNA, 19 nt, Artificial Sequence
  Description of Artificial Sequence: Synthetic oligonucleotide
augaaaaucuccugaccac

SEQ ID NO: 3022770 - RNA, 19 nt, Artificial Sequence
  Description of Artificial Sequence: Synthetic oligonucleotide
auugucuuugaaaagcaac

SEQ ID NO: 3022771 - RNA, 19 nt, Artificial Sequence
  Description of Artificial Sequence: Synthetic oligonucleotide
uuuugagaguuucacauua

SEQ ID NO: 3022772 - RNA, 19 nt, Artificial Sequence
  Description of Artificial Sequence: Synthetic oligonucleotide
auuagaaugaaaaucuccu

SEQ ID NO: 3022773 - RNA, 19 nt, Artificial Sequence
  Description of Artificial Sequence: Synthetic oligonucleotide
uacauaugcauauauggau

SEQ ID NO: 3022774 - RNA, 19 nt, Artificial Sequence
  Description of Artificial Sequence: Synthetic oligonucleotide
aaagccuuucacaauagug

SEQ ID NO: 3022775 - RNA, 19 nt, Artificial Sequence
  Description of Artificial Sequence: Synthetic oligonucleotide
gaguauuagaaugaaaauc

SEQ ID NO: 3022776 - RNA, 19 nt, Artificial Sequence
  Description of Artificial Sequence: Synthetic oligonucleotide
agagacagagaagagagag

SEQ ID NO: 3022777 - RNA, 19 nt, Artificial Sequence
  Description of Artificial Sequence: Synthetic oligonucleotide
uuuuauuguuauauuuacu

SEQ ID NO: 3022778 - RNA, 19 nt, Artificial Sequence
  Description of Artificial Sequence: Synthetic oligonucleotide
uauagaacaaaaguauuuc

SEQ ID NO: 3022779 - RNA, 19 nt, Artificial Sequence
  Description of Artificial Sequence: Synthetic oligonucleotide
uuuacagcuguauacuuaa

SEQ ID NO: 3022780 - RNA, 19 nt, Artificial Sequence
  Description of Artificial Sequence: Synthetic oligonucleotide
uauauagaacaaaaguauu

SEQ ID NO: 3022781 - RNA, 19 nt, Artificial Sequence
  Description of Artificial Sequence: Synthetic oligonucleotide
uuagaaugaaaaucuccug

SEQ ID NO: 3022782 - RNA, 19 nt, Artificial Sequence
  Description of Artificial Sequence: Synthetic oligonucleotide
agguaaaauaaaaugaacu

SEQ ID NO: 3022783 - RNA, 19 nt, Artificial Sequence
  Description of Artificial Sequence: Synthetic oligonucleotide
auuaaaacagaaacaaaca

SEQ ID NO: 3022784 - RNA, 19 nt, Artificial Sequence
  Description of Artificial Sequence: Synthetic oligonucleotide
uacuuugaacaguuuacag

SEQ ID NO: 3022785 - RNA, 19 nt, Artificial Sequence
  Description of Artificial Sequence: Synthetic oligonucleotide
uuugugauuaugucugugu

SEQ ID NO: 3022786 - RNA, 19 nt, Artificial Sequence
  Description of Artificial Sequence: Synthetic oligonucleotide
uaguuugucacaagaauau

SEQ ID NO: 3022787 - RNA, 19 nt, Artificial Sequence
  Description of Artificial Sequence: Synthetic oligonucleotide
uucacaauagugugaaccu

SEQ ID NO: 3022788 - RNA, 19 nt, Artificial Sequence
  Description of Artificial Sequence: Synthetic oligonucleotide
agagagaucuauauagaac

SEQ ID NO: 3022789 - RNA, 19 nt, Artificial Sequence
  Description of Artificial Sequence: Synthetic oligonucleotide
agcuguauacuuaaaagag

SEQ ID NO: 3022790 - RNA, 19 nt, Artificial Sequence
  Description of Artificial Sequence: Synthetic oligonucleotide
uaucaguaaagguaaaaua

SEQ ID NO: 3022791 - RNA, 19 nt, Artificial Sequence
  Description of Artificial Sequence: Synthetic oligonucleotide
cauaugcauauauggauag

SEQ ID NO: 3022792 - RNA, 19 nt, Artificial Sequence
  Description of Artificial Sequence: Synthetic oligonucleotide
gaacaaaaguauuucugac

SEQ ID NO: 3022793 - RNA, 19 nt, Artificial Sequence
  Description of Artificial Sequence: Synthetic oligonucleotide
uguauacuuaaaagagagc

SEQ ID NO: 3022794 - RNA, 19 nt, Artificial Sequence
  Description of Artificial Sequence: Synthetic oligonucleotide
auagaacaaaaguauuucu

SEQ ID NO: 3022795 - RNA, 19 nt, Artificial Sequence
  Description of Artificial Sequence: Synthetic oligonucleotide
augucuguguacauuauac

SEQ ID NO: 3022796 - RNA, 19 nt, Artificial Sequence
  Description of Artificial Sequence: Synthetic oligonucleotide
auagugugaaccuuugagu

SEQ ID NO: 3022797 - RNA, 19 nt, Artificial Sequence
  Description of Artificial Sequence: Synthetic oligonucleotide
uuuuauuuuggguaucuuu

SEQ ID NO: 3022798 - RNA, 19 nt, Artificial Sequence
  Description of Artificial Sequence: Synthetic oligonucleotide
gaaugaaaaucuccugacc

SEQ ID NO: 3022799 - RNA, 19 nt, Artificial Sequence
  Description of Artificial Sequence: Synthetic oligonucleotide
uauauuuacuuugaacagu

SEQ ID NO: 3022800 - RNA, 19 nt, Artificial Sequence
  Description of Artificial Sequence: Synthetic oligonucleotide
ugauugucuuugaaaagca

SEQ ID NO: 3022801 - RNA, 19 nt, Artificial Sequence
  Description of Artificial Sequence: Synthetic oligonucleotide
uugaaagccuuucacaaua

SEQ ID NO: 3022802 - RNA, 19 nt, Artificial Sequence
  Description of Artificial Sequence: Synthetic oligonucleotide
auuuacuuugaacaguuua

SEQ ID NO: 3022803 - RNA, 19 nt, Artificial Sequence
  Description of Artificial Sequence: Synthetic oligonucleotide
gaucuauauagaacaaaag

SEQ ID NO: 3022804 - RNA, 19 nt, Artificial Sequence
  Description of Artificial Sequence: Synthetic oligonucleotide
ugaaccuuugaguauuaga

SEQ ID NO: 3022805 - RNA, 19 nt, Artificial Sequence
  Description of Artificial Sequence: Synthetic oligonucleotide
uugaacaguuuacagcugu

SEQ ID NO: 3022806 - RNA, 19 nt, Artificial Sequence
  Description of Artificial Sequence: Synthetic oligonucleotide
auuaugucuguguacauua

SEQ ID NO: 3022807 - RNA, 19 nt, Artificial Sequence
  Description of Artificial Sequence: Synthetic oligonucleotide
uauacuuaaaagagagcau

SEQ ID NO: 3022808 - RNA, 19 nt, Artificial Sequence
  Description of Artificial Sequence: Synthetic oligonucleotide
aucaguaaagguaaaauaa

SEQ ID NO: 3022809 - RNA, 19 nt, Artificial Sequence
  Description of Artificial Sequence: Synthetic oligonucleotide
aagccuuucacaauagugu

SEQ ID NO: 3022810 - RNA, 19 nt, Artificial Sequence
  Description of Artificial Sequence: Synthetic oligonucleotide
agaagagagagaucuauau

SEQ ID NO: 3022811 - RNA, 19 nt, Artificial Sequence
  Description of Artificial Sequence: Synthetic oligonucleotide
cacauuaucaguaaaggua

SEQ ID NO: 3022812 - RNA, 19 nt, Artificial Sequence
  Description of Artificial Sequence: Synthetic oligonucleotide
ugaguauuagaaugaaaau

SEQ ID NO: 3022813 - RNA, 19 nt, Artificial Sequence
  Description of Artificial Sequence: Synthetic oligonucleotide
ucacauuaucaguaaaggu

SEQ ID NO: 3022814 - RNA, 19 nt, Artificial Sequence
  Description of Artificial Sequence: Synthetic oligonucleotide
agaguuucacauuaucagu

SEQ ID NO: 3022815 - RNA, 19 nt, Artificial Sequence
  Description of Artificial Sequence: Synthetic oligonucleotide
gaaccuuugaguauuagaa

SEQ ID NO: 3022816 - RNA, 19 nt, Artificial Sequence
  Description of Artificial Sequence: Synthetic oligonucleotide
uuaucaguaaagguaaaau

SEQ ID NO: 3022817 - RNA, 19 nt, Artificial Sequence
  Description of Artificial Sequence: Synthetic oligonucleotide
acaaacaaaaugauugucu

SEQ ID NO: 3022818 - RNA, 19 nt, Artificial Sequence
  Description of Artificial Sequence: Synthetic oligonucleotide
ucuguguacauuauacaua

SEQ ID NO: 3022819 - RNA, 19 nt, Artificial Sequence
  Description of Artificial Sequence: Synthetic oligonucleotide
uacagcuguauacuuaaaa

SEQ ID NO: 3022820 - RNA, 19 nt, Artificial Sequence
  Description of Artificial Sequence: Synthetic oligonucleotide
uaaaaugaacuuuuauauu

SEQ ID NO: 3022821 - RNA, 19 nt, Artificial Sequence
  Description of Artificial Sequence: Synthetic oligonucleotide
uaugcauauauggauagau

SEQ ID NO: 3022822 - RNA, 19 nt, Artificial Sequence
  Description of Artificial Sequence: Synthetic oligonucleotide
cauuauacauauacauaug

SEQ ID NO: 3022823 - RNA, 19 nt, Artificial Sequence
  Description of Artificial Sequence: Synthetic oligonucleotide
ugugauuaugucuguguac

SEQ ID NO: 3022824 - RNA, 19 nt, Artificial Sequence
  Description of Artificial Sequence: Synthetic oligonucleotide
cuuugaacaguuuacagcu

SEQ ID NO: 3022825 - RNA, 19 nt, Artificial Sequence
  Description of Artificial Sequence: Synthetic oligonucleotide
uagugugaaccuuugagua

SEQ ID NO: 3022826 - RNA, 19 nt, Artificial Sequence
  Description of Artificial Sequence: Synthetic oligonucleotide
aacaguuuacagcuguaua

SEQ ID NO: 3022827 - RNA, 19 nt, Artificial Sequence
  Description of Artificial Sequence: Synthetic oligonucleotide
cuauauagaacaaaaguau

SEQ ID NO: 3022828 - RNA, 19 nt, Artificial Sequence
  Description of Artificial Sequence: Synthetic oligonucleotide
aaacaaaaugauugucuuu

SEQ ID NO: 3022829 - RNA, 19 nt, Artificial Sequence
  Description of Artificial Sequence: Synthetic oligonucleotide
uuugaguauuagaaugaaa

SEQ ID NO: 3022830 - RNA, 19 nt, Artificial Sequence
  Description of Artificial Sequence: Synthetic oligonucleotide
uuacuuugaacaguuuaca

SEQ ID NO: 3022831 - RNA, 19 nt, Artificial Sequence
  Description of Artificial Sequence: Synthetic oligonucleotide
aaaaucuccugaccaccug

SEQ ID NO: 3022832 - RNA, 19 nt, Artificial Sequence
  Description of Artificial Sequence: Synthetic oligonucleotide
aguaaagguaaaauaaaau

SEQ ID NO: 3022833 - RNA, 19 nt, Artificial Sequence
  Description of Artificial Sequence: Synthetic oligonucleotide
aaccuuugaguauuagaau

SEQ ID NO: 3022834 - RNA, 19 nt, Artificial Sequence
  Description of Artificial Sequence: Synthetic oligonucleotide
agaucuauauagaacaaaa

SEQ ID NO: 3022835 - RNA, 19 nt, Artificial Sequence
  Description of Artificial Sequence: Synthetic oligonucleotide
ugucuguguacauuauaca

SEQ ID NO: 3022836 - RNA, 19 nt, Artificial Sequence
  Description of Artificial Sequence: Synthetic oligonucleotide
acaagaauauuaaaacaga

SEQ ID NO: 3022837 - RNA, 19 nt, Artificial Sequence
  Description of Artificial Sequence: Synthetic oligonucleotide
guacauuauacauauacau

SEQ ID NO: 3022838 - RNA, 19 nt, Artificial Sequence
  Description of Artificial Sequence: Synthetic oligonucleotide
cugacaugcugcuuuuccg

SEQ ID NO: 3022839 - RNA, 19 nt, Artificial Sequence
  Description of Artificial Sequence: Synthetic oligonucleotide
uuccgguuuaguuugucac

SEQ ID NO: 3022840 - RNA, 19 nt, Artificial Sequence
  Description of Artificial Sequence: Synthetic oligonucleotide
agccuuucacaauagugug

SEQ ID NO: 3022841 - RNA, 19 nt, Artificial Sequence
  Description of Artificial Sequence: Synthetic oligonucleotide
auuguuauauuuacuuuga

SEQ ID NO: 3022842 - RNA, 19 nt, Artificial Sequence
  Description of Artificial Sequence: Synthetic oligonucleotide
acauuaucaguaaagguaa

SEQ ID NO: 3022843 - RNA, 19 nt, Artificial Sequence
  Description of Artificial Sequence: Synthetic oligonucleotide
uugagaguuucacauuauc

SEQ ID NO: 3022844 - RNA, 19 nt, Artificial Sequence
  Description of Artificial Sequence: Synthetic oligonucleotide
agacagagaagagagagau

SEQ ID NO: 3022845 - RNA, 19 nt, Artificial Sequence
  Description of Artificial Sequence: Synthetic oligonucleotide
uuugaacaguuuacagcug

SEQ ID NO: 3022846 - RNA, 19 nt, Artificial Sequence
  Description of Artificial Sequence: Synthetic oligonucleotide
uugugauuaugucugugua

SEQ ID NO: 3022847 - RNA, 19 nt, Artificial Sequence
  Description of Artificial Sequence: Synthetic oligonucleotide
auacuuaaaagagagcauu

SEQ ID NO: 3022848 - RNA, 19 nt, Artificial Sequence
  Description of Artificial Sequence: Synthetic oligonucleotide
uacuuaaaagagagcauuu

SEQ ID NO: 3022849 - RNA, 19 nt, Artificial Sequence
  Description of Artificial Sequence: Synthetic oligonucleotide
gagagagaucuauauagaa

SEQ ID NO: 3022850 - RNA, 19 nt, Artificial Sequence
  Description of Artificial Sequence: Synthetic oligonucleotide
auauagaacaaaaguauuu

SEQ ID NO: 3022851 - RNA, 19 nt, Artificial Sequence
  Description of Artificial Sequence: Synthetic oligonucleotide
ugcuuuuccgguuuaguuu

SEQ ID NO: 3022852 - RNA, 19 nt, Artificial Sequence
  Description of Artificial Sequence: Synthetic oligonucleotide
uuugaaagccuuucacaau

SEQ ID NO: 3022853 - RNA, 19 nt, Artificial Sequence
  Description of Artificial Sequence: Synthetic oligonucleotide
cagcuguauacuuaaaaga

SEQ ID NO: 3022854 - RNA, 19 nt, Artificial Sequence
  Description of Artificial Sequence: Synthetic oligonucleotide
gugauuaugucuguguaca

SEQ ID NO: 3022855 - RNA, 19 nt, Artificial Sequence
  Description of Artificial Sequence: Synthetic oligonucleotide
uuuccgguuuaguuuguca

SEQ ID NO: 3022856 - RNA, 19 nt, Artificial Sequence
  Description of Artificial Sequence: Synthetic oligonucleotide
aaaugaacuuuuauauuua

SEQ ID NO: 3022857 - RNA, 19 nt, Artificial Sequence
  Description of Artificial Sequence: Synthetic oligonucleotide
uaugucuguguacauuaua

SEQ ID NO: 3022858 - RNA, 19 nt, Artificial Sequence
  Description of Artificial Sequence: Synthetic oligonucleotide
uuguuauauuuacuuugaa

SEQ ID NO: 3022859 - RNA, 19 nt, Artificial Sequence
  Description of Artificial Sequence: Synthetic oligonucleotide
caguaaagguaaaauaaaa

SEQ ID NO: 3022860 - RNA, 19 nt, Artificial Sequence
  Description of Artificial Sequence: Synthetic oligonucleotide
uccgguuuaguuugucaca

SEQ ID NO: 3022861 - RNA, 19 nt, Artificial Sequence
  Description of Artificial Sequence: Synthetic oligonucleotide
acaaaaugauugucuuuga

SEQ ID NO: 3022862 - RNA, 19 nt, Artificial Sequence
  Description of Artificial Sequence: Synthetic oligonucleotide
auuaucaguaaagguaaaa

SEQ ID NO: 3022863 - RNA, 19 nt, Artificial Sequence
  Description of Artificial Sequence: Synthetic oligonucleotide
auauuuacuuugaacaguu

SEQ ID NO: 3022864 - RNA, 19 nt, Artificial Sequence
  Description of Artificial Sequence: Synthetic oligonucleotide
gaagagagagaucuauaua

SEQ ID NO: 3022865 - RNA, 19 nt, Artificial Sequence
  Description of Artificial Sequence: Synthetic oligonucleotide
uuugagaguuucacauuau

SEQ ID NO: 3022866 - RNA, 19 nt, Artificial Sequence
  Description of Artificial Sequence: Synthetic oligonucleotide
gguuuaguuugucacaaga

SEQ ID NO: 3022867 - RNA, 19 nt, Artificial Sequence
  Description of Artificial Sequence: Synthetic oligonucleotide
gcuuuuccgguuuaguuug

SEQ ID NO: 3022868 - RNA, 19 nt, Artificial Sequence
  Description of Artificial Sequence: Synthetic oligonucleotide
gguaaaauaaaaugaacuu

SEQ ID NO: 3022869 - RNA, 19 nt, Artificial Sequence
  Description of Artificial Sequence: Synthetic oligonucleotide
uugucacaagaauauuaaa

SEQ ID NO: 3022870 - RNA, 19 nt, Artificial Sequence
  Description of Artificial Sequence: Synthetic oligonucleotide
agaaacaaacaaaaugauu

SEQ ID NO: 3022871 - RNA, 19 nt, Artificial Sequence
  Description of Artificial Sequence: Synthetic oligonucleotide
agugugaaccuuugaguau

SEQ ID NO: 3022872 - RNA, 19 nt, Artificial Sequence
  Description of Artificial Sequence: Synthetic oligonucleotide
guaaaauaaaaugaacuuu

SEQ ID NO: 3022873 - RNA, 19 nt, Artificial Sequence
  Description of Artificial Sequence: Synthetic oligonucleotide
ucuccugaccaccugcuuu

SEQ ID NO: 3022874 - RNA, 19 nt, Artificial Sequence
  Description of Artificial Sequence: Synthetic oligonucleotide
aaaguauuucugacaugcu

SEQ ID NO: 3022875 - RNA, 19 nt, Artificial Sequence
  Description of Artificial Sequence: Synthetic oligonucleotide
aguuuacagcuguauacuu

SEQ ID NO: 3022876 - RNA, 19 nt, Artificial Sequence
  Description of Artificial Sequence: Synthetic oligonucleotide
gaguuucacauuaucagua

SEQ ID NO: 3022877 - RNA, 19 nt, Artificial Sequence
  Description of Artificial Sequence: Synthetic oligonucleotide
uuaugucuguguacauuau

SEQ ID NO: 3022878 - RNA, 19 nt, Artificial Sequence
  Description of Artificial Sequence: Synthetic oligonucleotide
ugaacaguuuacagcugua

SEQ ID NO: 3022879 - RNA, 19 nt, Artificial Sequence
  Description of Artificial Sequence: Synthetic oligonucleotide
cugaccaccugcuuuguga

SEQ ID NO: 3022880 - RNA, 19 nt, Artificial Sequence
  Description of Artificial Sequence: Synthetic oligonucleotide
ugucuuugaaaagcaacuu

SEQ ID NO: 3022881 - RNA, 19 nt, Artificial Sequence
  Description of Artificial Sequence: Synthetic oligonucleotide
acauaugcauauauggaua

SEQ ID NO: 3022882 - RNA, 19 nt, Artificial Sequence
  Description of Artificial Sequence: Synthetic oligonucleotide
agagagagaucuauauaga

SEQ ID NO: 3022883 - RNA, 19 nt, Artificial Sequence
  Description of Artificial Sequence: Synthetic oligonucleotide
guuuaguuugucacaagaa

SEQ ID NO: 3022884 - RNA, 19 nt, Artificial Sequence
  Description of Artificial Sequence: Synthetic oligonucleotide
guauuagaaugaaaaucuc

SEQ ID NO: 3022885 - RNA, 19 nt, Artificial Sequence
  Description of Artificial Sequence: Synthetic oligonucleotide
gagaucuauauagaacaaa

SEQ ID NO: 3022886 - RNA, 19 nt, Artificial Sequence
  Description of Artificial Sequence: Synthetic oligonucleotide
cuccugaccaccugcuuug

SEQ ID NO: 3022887 - RNA, 19 nt, Artificial Sequence
  Description of Artificial Sequence: Synthetic oligonucleotide
acuuaaaagagagcauuuu

SEQ ID NO: 3022888 - RNA, 19 nt, Artificial Sequence
  Description of Artificial Sequence: Synthetic oligonucleotide
gucuguguacauuauacau

SEQ ID NO: 3022889 - RNA, 19 nt, Artificial Sequence
  Description of Artificial Sequence: Synthetic oligonucleotide
acaauagugugaaccuuug

SEQ ID NO: 3022890 - RNA, 19 nt, Artificial Sequence
  Description of Artificial Sequence: Synthetic oligonucleotide
uauuuacuuugaacaguuu

SEQ ID NO: 3022891 - RNA, 19 nt, Artificial Sequence
  Description of Artificial Sequence: Synthetic oligonucleotide
cuuugugauuaugucugug

SEQ ID NO: 3022892 - RNA, 19 nt, Artificial Sequence
  Description of Artificial Sequence: Synthetic oligonucleotide
aaucuccugaccaccugcu

SEQ ID NO: 3022893 - RNA, 19 nt, Artificial Sequence
  Description of Artificial Sequence: Synthetic oligonucleotide
ugauuaugucuguguacau

SEQ ID NO: 3022894 - RNA, 19 nt, Artificial Sequence
  Description of Artificial Sequence: Synthetic oligonucleotide
ugaccaccugcuuugugau

SEQ ID NO: 3022895 - RNA, 19 nt, Artificial Sequence
  Description of Artificial Sequence: Synthetic oligonucleotide
caaacaaaaugauugucuu

SEQ ID NO: 3022896 - RNA, 19 nt, Artificial Sequence
  Description of Artificial Sequence: Synthetic oligonucleotide
accugcuuugugauuaugu

SEQ ID NO: 3022897 - RNA, 19 nt, Artificial Sequence
  Description of Artificial Sequence: Synthetic oligonucleotide
aagagacagagaagagaga

SEQ ID NO: 3022898 - RNA, 19 nt, Artificial Sequence
  Description of Artificial Sequence: Synthetic oligonucleotide
auaugcauauauggauaga

SEQ ID NO: 3022899 - RNA, 19 nt, Artificial Sequence
  Description of Artificial Sequence: Synthetic oligonucleotide
gauugucuuugaaaagcaa

SEQ ID NO: 3022900 - RNA, 19 nt, Artificial Sequence
  Description of Artificial Sequence: Synthetic oligonucleotide
uuacagcuguauacuuaaa

SEQ ID NO: 3022901 - RNA, 19 nt, Artificial Sequence
  Description of Artificial Sequence: Synthetic oligonucleotide
ugugaaccuuugaguauua

SEQ ID NO: 3022902 - RNA, 19 nt, Artificial Sequence
  Description of Artificial Sequence: Synthetic oligonucleotide
uuucugacaugcugcuuuu

SEQ ID NO: 3022903 - RNA, 19 nt, Artificial Sequence
  Description of Artificial Sequence: Synthetic oligonucleotide
accaccugcuuugugauua

SEQ ID NO: 3022904 - RNA, 19 nt, Artificial Sequence
  Description of Artificial Sequence: Synthetic oligonucleotide
cuuucacaauagugugaac

SEQ ID NO: 3022905 - RNA, 19 nt, Artificial Sequence
  Description of Artificial Sequence: Synthetic oligonucleotide
gagacagagaagagagaga

SEQ ID NO: 3022906 - RNA, 19 nt, Artificial Sequence
  Description of Artificial Sequence: Synthetic oligonucleotide
guauuucugacaugcugcu

SEQ ID NO: 3022907 - RNA, 19 nt, Artificial Sequence
  Description of Artificial Sequence: Synthetic oligonucleotide
agagaucuauauagaacaa

SEQ ID NO: 3022908 - RNA, 19 nt, Artificial Sequence
  Description of Artificial Sequence: Synthetic oligonucleotide
ccugcuuugugauuauguc

SEQ ID NO: 3022909 - RNA, 19 nt, Artificial Sequence
  Description of Artificial Sequence: Synthetic oligonucleotide
ucacaauagugugaaccuu

SEQ ID NO: 3022910 - RNA, 19 nt, Artificial Sequence
  Description of Artificial Sequence: Synthetic oligonucleotide
ccuuugaguauuagaauga

SEQ ID NO: 3022911 - RNA, 19 nt, Artificial Sequence
  Description of Artificial Sequence: Synthetic oligonucleotide
cuuugaguauuagaaugaa

SEQ ID NO: 3022912 - RNA, 19 nt, Artificial Sequence
  Description of Artificial Sequence: Synthetic oligonucleotide
guuuacagcuguauacuua

SEQ ID NO: 3022913 - RNA, 19 nt, Artificial Sequence
  Description of Artificial Sequence: Synthetic oligonucleotide
gaaagccuuucacaauagu

SEQ ID NO: 3022914 - RNA, 19 nt, Artificial Sequence
  Description of Artificial Sequence: Synthetic oligonucleotide
cugcuuugugauuaugucu

SEQ ID NO: 3022915 - RNA, 19 nt, Artificial Sequence
  Description of Artificial Sequence: Synthetic oligonucleotide
gcuguauacuuaaaagaga

SEQ ID NO: 3022916 - RNA, 19 nt, Artificial Sequence
  Description of Artificial Sequence: Synthetic oligonucleotide
gaaaaucuccugaccaccu

SEQ ID NO: 3022917 - RNA, 19 nt, Artificial Sequence
  Description of Artificial Sequence: Synthetic oligonucleotide
aguuugucacaagaauauu

SEQ ID NO: 3022918 - RNA, 19 nt, Artificial Sequence
  Description of Artificial Sequence: Synthetic oligonucleotide
uuuuccgguuuaguuuguc

SEQ ID NO: 3022919 - RNA, 19 nt, Artificial Sequence
  Description of Artificial Sequence: Synthetic oligonucleotide
gagaagagagagaucuaua

SEQ ID NO: 3022920 - RNA, 19 nt, Artificial Sequence
  Description of Artificial Sequence: Synthetic oligonucleotide
ugcugcuuuuccgguuuag

SEQ ID NO: 3022921 - RNA, 19 nt, Artificial Sequence
  Description of Artificial Sequence: Synthetic oligonucleotide
gugaaccuuugaguauuag

SEQ ID NO: 3022922 - RNA, 19 nt, Artificial Sequence
  Description of Artificial Sequence: Synthetic oligonucleotide
caauagugugaaccuuuga

SEQ ID NO: 3022923 - RNA, 19 nt, Artificial Sequence
  Description of Artificial Sequence: Synthetic oligonucleotide
augcauauauggauagaua

SEQ ID NO: 3022924 - RNA, 19 nt, Artificial Sequence
  Description of Artificial Sequence: Synthetic oligonucleotide
gauuaugucuguguacauu

SEQ ID NO: 3022925 - RNA, 19 nt, Artificial Sequence
  Description of Artificial Sequence: Synthetic oligonucleotide
gacagagaagagagagauc

SEQ ID NO: 3022926 - RNA, 19 nt, Artificial Sequence
  Description of Artificial Sequence: Synthetic oligonucleotide
cauuaucaguaaagguaaa

SEQ ID NO: 3022927 - RNA, 19 nt, Artificial Sequence
  Description of Artificial Sequence: Synthetic oligonucleotide
gacaugcugcuuuuccggu

SEQ ID NO: 3022928 - RNA, 19 nt, Artificial Sequence
  Description of Artificial Sequence: Synthetic oligonucleotide
acaugcugcuuuuccgguu

SEQ ID NO: 3022929 - RNA, 19 nt, Artificial Sequence
  Description of Artificial Sequence: Synthetic oligonucleotide
cacaauagugugaaccuuu

SEQ ID NO: 3022930 - RNA, 19 nt, Artificial Sequence
  Description of Artificial Sequence: Synthetic oligonucleotide
gaacaguuuacagcuguau

SEQ ID NO: 3022931 - RNA, 19 nt, Artificial Sequence
  Description of Artificial Sequence: Synthetic oligonucleotide
uauuucugacaugcugcuu

SEQ ID NO: 3022932 - RNA, 19 nt, Artificial Sequence
  Description of Artificial Sequence: Synthetic oligonucleotide
caguuuacagcuguauacu

SEQ ID NO: 3022933 - RNA, 19 nt, Artificial Sequence
  Description of Artificial Sequence: Synthetic oligonucleotide
ccuuucacaauagugugaa

SEQ ID NO: 3022934 - RNA, 19 nt, Artificial Sequence
  Description of Artificial Sequence: Synthetic oligonucleotide
uucugacaugcugcuuuuc

SEQ ID NO: 3022935 - RNA, 19 nt, Artificial Sequence
  Description of Artificial Sequence: Synthetic oligonucleotide
cugcuuuuccgguuuaguu

SEQ ID NO: 3022936 - RNA, 19 nt, Artificial Sequence
  Description of Artificial Sequence: Synthetic oligonucleotide
aucuccugaccaccugcuu

SEQ ID NO: 3022937 - RNA, 19 nt, Artificial Sequence
  Description of Artificial Sequence: Synthetic oligonucleotide
gugugaaccuuugaguauu

SEQ ID NO: 3022938 - RNA, 19 nt, Artificial Sequence
  Description of Artificial Sequence: Synthetic oligonucleotide
caugcugcuuuuccgguuu

SEQ ID NO: 3022939 - RNA, 19 nt, Artificial Sequence
  Description of Artificial Sequence: Synthetic oligonucleotide
uccugaccaccugcuuugu

SEQ ID NO: 3022940 - RNA, 19 nt, Artificial Sequence
  Description of Artificial Sequence: Synthetic oligonucleotide
caccugcuuugugauuaug

SEQ ID NO: 3022941 - RNA, 19 nt, Artificial Sequence
  Description of Artificial Sequence: Synthetic oligonucleotide
gccuuucacaauaguguga

SEQ ID NO: 3022942 - RNA, 19 nt, Artificial Sequence
  Description of Artificial Sequence: Synthetic oligonucleotide
augcugcuuuuccgguuua

SEQ ID NO: 3022943 - RNA, 19 nt, Artificial Sequence
  Description of Artificial Sequence: Synthetic oligonucleotide
ccgguuuaguuugucacaa

SEQ ID NO: 3022944 - RNA, 19 nt, Artificial Sequence
  Description of Artificial Sequence: Synthetic oligonucleotide
cgguuuaguuugucacaag

SEQ ID NO: 3022945 - RNA, 19 nt, Artificial Sequence
  Description of Artificial Sequence: Synthetic oligonucleotide
gcuuugugauuaugucugu

SEQ ID NO: 3022946 - RNA, 19 nt, Artificial Sequence
  Description of Artificial Sequence: Synthetic oligonucleotide
ccugaccaccugcuuugug

SEQ ID NO: 3022947 - RNA, 19 nt, Artificial Sequence
  Description of Artificial Sequence: Synthetic oligonucleotide
gcugcuuuuccgguuuagu

SEQ ID NO: 3022948 - RNA, 19 nt, Artificial Sequence
  Description of Artificial Sequence: Synthetic oligonucleotide
gaccaccugcuuugugauu

SEQ ID NO: 3022949 - RNA, 19 nt, Artificial Sequence
  Description of Artificial Sequence: Synthetic oligonucleotide
ccaccugcuuugugauuau

SEQ ID NO: 3022950 - RNA, 19 nt, Artificial Sequence
  Description of Artificial Sequence: Synthetic oligonucleotide
ugcguuaaucugcagaggg

SEQ ID NO: 3022951 - RNA, 19 nt, Artificial Sequence
  Description of Artificial Sequence: Synthetic oligonucleotide
uaugcguuaaucugcagag

SEQ ID NO: 3022952 - RNA, 19 nt, Artificial Sequence
  Description of Artificial Sequence: Synthetic oligonucleotide
cagacugggaagaagaucc

SEQ ID NO: 3022953 - RNA, 19 nt, Artificial Sequence
  Description of Artificial Sequence: Synthetic oligonucleotide
uuucugcugacuuauauac

SEQ ID NO: 3022954 - RNA, 19 nt, Artificial Sequence
  Description of Artificial Sequence: Synthetic oligonucleotide
acugagaccgcauggaagg

SEQ ID NO: 3022955 - RNA, 19 nt, Artificial Sequence
  Description of Artificial Sequence: Synthetic oligonucleotide
aaucugcagagggagagcc

SEQ ID NO: 3022956 - RNA, 19 nt, Artificial Sequence
  Description of Artificial Sequence: Synthetic oligonucleotide
ucugcugacuuauauacca

SEQ ID NO: 3022957 - RNA, 19 nt, Artificial Sequence
  Description of Artificial Sequence: Synthetic oligonucleotide
acuuauauaccaucccuuc

SEQ ID NO: 3022958 - RNA, 19 nt, Artificial Sequence
  Description of Artificial Sequence: Synthetic oligonucleotide
cucuuuauugcccaggcag

SEQ ID NO: 3022959 - RNA, 19 nt, Artificial Sequence
  Description of Artificial Sequence: Synthetic oligonucleotide
uauggcagugguuacagug

SEQ ID NO: 3022960 - RNA, 19 nt, Artificial Sequence
  Description of Artificial Sequence: Synthetic oligonucleotide
gagacuaugcguuaaucug

SEQ ID NO: 3022961 - RNA, 19 nt, Artificial Sequence
  Description of Artificial Sequence: Synthetic oligonucleotide
aguguucucagucaguucu

SEQ ID NO: 3022962 - RNA, 19 nt, Artificial Sequence
  Description of Artificial Sequence: Synthetic oligonucleotide
ucucucuuuccccauagag

SEQ ID NO: 3022963 - RNA, 19 nt, Artificial Sequence
  Description of Artificial Sequence: Synthetic oligonucleotide
ucuuuauugcccaggcagg

SEQ ID NO: 3022964 - RNA, 19 nt, Artificial Sequence
  Description of Artificial Sequence: Synthetic oligonucleotide
ggugccaacacugagaccg

SEQ ID NO: 3022965 - RNA, 19 nt, Artificial Sequence
  Description of Artificial Sequence: Synthetic oligonucleotide
uuauauaccaucccuucuc

SEQ ID NO: 3022966 - RNA, 19 nt, Artificial Sequence
  Description of Artificial Sequence: Synthetic oligonucleotide
aaagagcucuuuauugccc

SEQ ID NO: 3022967 - RNA, 19 nt, Artificial Sequence
  Description of Artificial Sequence: Synthetic oligonucleotide
aagaagauccugaagccuc

SEQ ID NO: 3022968 - RNA, 19 nt, Artificial Sequence
  Description of Artificial Sequence: Synthetic oligonucleotide
ugacuuauauaccaucccu

SEQ ID NO: 3022969 - RNA, 19 nt, Artificial Sequence
  Description of Artificial Sequence: Synthetic oligonucleotide
gaaagagcucuuuauugcc

SEQ ID NO: 3022970 - RNA, 19 nt, Artificial Sequence
  Description of Artificial Sequence: Synthetic oligonucleotide
uggggacuggcucagaugc

SEQ ID NO: 3022971 - RNA, 19 nt, Artificial Sequence
  Description of Artificial Sequence: Synthetic oligonucleotide
acaguggucacauugggga

SEQ ID NO: 3022972 - RNA, 19 nt, Artificial Sequence
  Description of Artificial Sequence: Synthetic oligonucleotide
gggaagaagauccugaagc

SEQ ID NO: 3022973 - RNA, 19 nt, Artificial Sequence
  Description of Artificial Sequence: Synthetic oligonucleotide
uuaaucugcagagggagag

SEQ ID NO: 3022974 - RNA, 19 nt, Artificial Sequence
  Description of Artificial Sequence: Synthetic oligonucleotide
uauaccaucccuucucucu

SEQ ID NO: 3022975 - RNA, 19 nt, Artificial Sequence
  Description of Artificial Sequence: Synthetic oligonucleotide
agagccugcccacuggugc

SEQ ID NO: 3022976 - RNA, 19 nt, Artificial Sequence
  Description of Artificial Sequence: Synthetic oligonucleotide
uuacaguggucacauuggg

SEQ ID NO: 3022977 - RNA, 19 nt, Artificial Sequence
  Description of Artificial Sequence: Synthetic oligonucleotide
agcucuuuauugcccaggc

SEQ ID NO: 3022978 - RNA, 19 nt, Artificial Sequence
  Description of Artificial Sequence: Synthetic oligonucleotide
agagacuaugcguuaaucu

SEQ ID NO: 3022979 - RNA, 19 nt, Artificial Sequence
  Description of Artificial Sequence: Synthetic oligonucleotide
ucauguugccccuaagagc

SEQ ID NO: 3022980 - RNA, 19 nt, Artificial Sequence
  Description of Artificial Sequence: Synthetic oligonucleotide
cauguugccccuaagagca

SEQ ID NO: 3022981 - RNA, 19 nt, Artificial Sequence
  Description of Artificial Sequence: Synthetic oligonucleotide
uccccauagagacuaugcg

SEQ ID NO: 3022982 - RNA, 19 nt, Artificial Sequence
  Description of Artificial Sequence: Synthetic oligonucleotide
gaagccuccaucucuuucc

SEQ ID NO: 3022983 - RNA, 19 nt, Artificial Sequence
  Description of Artificial Sequence: Synthetic oligonucleotide
ugucccaggaccuuucugc

SEQ ID NO: 3022984 - RNA, 19 nt, Artificial Sequence
  Description of Artificial Sequence: Synthetic oligonucleotide
uuauugcccaggcagggcc

SEQ ID NO: 3022985 - RNA, 19 nt, Artificial Sequence
  Description of Artificial Sequence: Synthetic oligonucleotide
agacuaugcguuaaucugc

SEQ ID NO: 3022986 - RNA, 19 nt, Artificial Sequence
  Description of Artificial Sequence: Synthetic oligonucleotide
uacaguggucacauugggg

SEQ ID NO: 3022987 - RNA, 19 nt, Artificial Sequence
  Description of Artificial Sequence: Synthetic oligonucleotide
cucauguugccccuaagag

SEQ ID NO: 3022988 - RNA, 19 nt, Artificial Sequence
  Description of Artificial Sequence: Synthetic oligonucleotide
agagcaauggugucccagg

SEQ ID NO: 3022989 - RNA, 19 nt, Artificial Sequence
  Description of Artificial Sequence: Synthetic oligonucleotide
ucucuguggauuccacugg

SEQ ID NO: 3022990 - RNA, 19 nt, Artificial Sequence
  Description of Artificial Sequence: Synthetic oligonucleotide
ucagaugccaucaggcagu

SEQ ID NO: 3022991 - RNA, 19 nt, Artificial Sequence
  Description of Artificial Sequence: Synthetic oligonucleotide
uuccccauagagacuaugc

SEQ ID NO: 3022992 - RNA, 19 nt, Artificial Sequence
  Description of Artificial Sequence: Synthetic oligonucleotide
uauauaccaucccuucucu

SEQ ID NO: 3022993 - RNA, 19 nt, Artificial Sequence
  Description of Artificial Sequence: Synthetic oligonucleotide
guuacaguggucacauugg

SEQ ID NO: 3022994 - RNA, 19 nt, Artificial Sequence
  Description of Artificial Sequence: Synthetic oligonucleotide
agauccugaagccuccauc

SEQ ID NO: 3022995 - RNA, 19 nt, Artificial Sequence
  Description of Artificial Sequence: Synthetic oligonucleotide
aaggaaagagcucuuuauu

SEQ ID NO: 3022996 - RNA, 19 nt, Artificial Sequence
  Description of Artificial Sequence: Synthetic oligonucleotide
aagagcucuuuauugccca

SEQ ID NO: 3022997 - RNA, 19 nt, Artificial Sequence
  Description of Artificial Sequence: Synthetic oligonucleotide
aucccuucucucuuucccc

SEQ ID NO: 3022998 - RNA, 19 nt, Artificial Sequence
  Description of Artificial Sequence: Synthetic oligonucleotide
ucagguauggcagugguua

SEQ ID NO: 3022999 - RNA, 19 nt, Artificial Sequence
  Description of Artificial Sequence: Synthetic oligonucleotide
ucuuccagcaugucgucug

SEQ ID NO: 3023000 - RNA, 19 nt, Artificial Sequence
  Description of Artificial Sequence: Synthetic oligonucleotide
caugucgucugucuucugg

SEQ ID NO: 3023001 - RNA, 19 nt, Artificial Sequence
  Description of Artificial Sequence: Synthetic oligonucleotide
ggaaagagcucuuuauugc

SEQ ID NO: 3023002 - RNA, 19 nt, Artificial Sequence
  Description of Artificial Sequence: Synthetic oligonucleotide
ucaggcaguguucucaguc

SEQ ID NO: 3023003 - RNA, 19 nt, Artificial Sequence
  Description of Artificial Sequence: Synthetic oligonucleotide
cuaagagcaaugguguccc

SEQ ID NO: 3023004 - RNA, 19 nt, Artificial Sequence
  Description of Artificial Sequence: Synthetic oligonucleotide
cucagaugccaucaggcag

SEQ ID NO: 3023005 - RNA, 19 nt, Artificial Sequence
  Description of Artificial Sequence: Synthetic oligonucleotide
cugacuuauauaccauccc

SEQ ID NO: 3023006 - RNA, 19 nt, Artificial Sequence
  Description of Artificial Sequence: Synthetic oligonucleotide
ugggaagaagauccugaag

SEQ ID NO: 3023007 - RNA, 19 nt, Artificial Sequence
  Description of Artificial Sequence: Synthetic oligonucleotide
uccacuggccucuucagac

SEQ ID NO: 3023008 - RNA, 19 nt, Artificial Sequence
  Description of Artificial Sequence: Synthetic oligonucleotide
aucucuuucccuggagucc

SEQ ID NO: 3023009 - RNA, 19 nt, Artificial Sequence
  Description of Artificial Sequence: Synthetic oligonucleotide
aguucuucuguuucucugu

SEQ ID NO: 3023010 - RNA, 19 nt, Artificial Sequence
  Description of Artificial Sequence: Synthetic oligonucleotide
cuucagacugggaagaaga

SEQ ID NO: 3023011 - RNA, 19 nt, Artificial Sequence
  Description of Artificial Sequence: Synthetic oligonucleotide
ucuguuucucuguggauuc

SEQ ID NO: 3023012 - RNA, 19 nt, Artificial Sequence
  Description of Artificial Sequence: Synthetic oligonucleotide
acucauguugccccuaaga

SEQ ID NO: 3023013 - RNA, 19 nt, Artificial Sequence
  Description of Artificial Sequence: Synthetic oligonucleotide
agcaauggugucccaggac

SEQ ID NO: 3023014 - RNA, 19 nt, Artificial Sequence
  Description of Artificial Sequence: Synthetic oligonucleotide
gauuccacuggccucuuca

SEQ ID NO: 3023015 - RNA, 19 nt, Artificial Sequence
  Description of Artificial Sequence: Synthetic oligonucleotide
aagagcaauggugucccag

SEQ ID NO: 3023016 - RNA, 19 nt, Artificial Sequence
  Description of Artificial Sequence: Synthetic oligonucleotide
uucugcugacuuauauacc

SEQ ID NO: 3023017 - RNA, 19 nt, Artificial Sequence
  Description of Artificial Sequence: Synthetic oligonucleotide
ggaagaagauccugaagcc

SEQ ID NO: 3023018 - RNA, 19 nt, Artificial Sequence
  Description of Artificial Sequence: Synthetic oligonucleotide
cuuuauugcccaggcaggg

SEQ ID NO: 3023019 - RNA, 19 nt, Artificial Sequence
  Description of Artificial Sequence: Synthetic oligonucleotide
uggcucagaugccaucagg

SEQ ID NO: 3023020 - RNA, 19 nt, Artificial Sequence
  Description of Artificial Sequence: Synthetic oligonucleotide
caacacugagaccgcaugg

SEQ ID NO: 3023021 - RNA, 19 nt, Artificial Sequence
  Description of Artificial Sequence: Synthetic oligonucleotide
auauaccaucccuucucuc

SEQ ID NO: 3023022 - RNA, 19 nt, Artificial Sequence
  Description of Artificial Sequence: Synthetic oligonucleotide
ucugcagagggagagccug

SEQ ID NO: 3023023 - RNA, 19 nt, Artificial Sequence
  Description of Artificial Sequence: Synthetic oligonucleotide
accgcauggaaggaaagag

SEQ ID NO: 3023024 - RNA, 19 nt, Artificial Sequence
  Description of Artificial Sequence: Synthetic oligonucleotide
ucuuuccccauagagacua

SEQ ID NO: 3023025 - RNA, 19 nt, Artificial Sequence
  Description of Artificial Sequence: Synthetic oligonucleotide
cuggugccaacacugagac

SEQ ID NO: 3023026 - RNA, 19 nt, Artificial Sequence
  Description of Artificial Sequence: Synthetic oligonucleotide
agaagauccugaagccucc

SEQ ID NO: 3023027 - RNA, 19 nt, Artificial Sequence
  Description of Artificial Sequence: Synthetic oligonucleotide
gcaauggugucccaggacc

SEQ ID NO: 3023028 - RNA, 19 nt, Artificial Sequence
  Description of Artificial Sequence: Synthetic oligonucleotide
cuaugcguuaaucugcaga

SEQ ID NO: 3023029 - RNA, 19 nt, Artificial Sequence
  Description of Artificial Sequence: Synthetic oligonucleotide
ucgucugucuucuggacuc

SEQ ID NO: 3023030 - RNA, 19 nt, Artificial Sequence
  Description of Artificial Sequence: Synthetic oligonucleotide
ucuucagacugggaagaag

SEQ ID NO: 3023031 - RNA, 19 nt, Artificial Sequence
  Description of Artificial Sequence: Synthetic oligonucleotide
ucuguggauuccacuggcc

SEQ ID NO: 3023032 - RNA, 19 nt, Artificial Sequence
  Description of Artificial Sequence: Synthetic oligonucleotide
agagggagagccugcccac

SEQ ID NO: 3023033 - RNA, 19 nt, Artificial Sequence
  Description of Artificial Sequence: Synthetic oligonucleotide
gauccugaagccuccaucu

SEQ ID NO: 3023034 - RNA, 19 nt, Artificial Sequence
  Description of Artificial Sequence: Synthetic oligonucleotide
cacugagaccgcauggaag

SEQ ID NO: 3023035 - RNA, 19 nt, Artificial Sequence
  Description of Artificial Sequence: Synthetic oligonucleotide
ugcugacuuauauaccauc

SEQ ID NO: 3023036 - RNA, 19 nt, Artificial Sequence
  Description of Artificial Sequence: Synthetic oligonucleotide
auggcagugguuacagugg

SEQ ID NO: 3023037 - RNA, 19 nt, Artificial Sequence
  Description of Artificial Sequence: Synthetic oligonucleotide
gaugccaucaggcaguguu

SEQ ID NO: 3023038 - RNA, 19 nt, Artificial Sequence
  Description of Artificial Sequence: Synthetic oligonucleotide
cucucuuuccccauagaga

SEQ ID NO: 3023039 - RNA, 19 nt, Artificial Sequence
  Description of Artificial Sequence: Synthetic oligonucleotide
caucucuuucccuggaguc

SEQ ID NO: 3023040 - RNA, 19 nt, Artificial Sequence
  Description of Artificial Sequence: Synthetic oligonucleotide
uccagcaugucgucugucu

SEQ ID NO: 3023041 - RNA, 19 nt, Artificial Sequence
  Description of Artificial Sequence: Synthetic oligonucleotide
caguucuucuguuucucug

SEQ ID NO: 3023042 - RNA, 19 nt, Artificial Sequence
  Description of Artificial Sequence: Synthetic oligonucleotide
ucaguucuucuguuucucu

SEQ ID NO: 3023043 - RNA, 19 nt, Artificial Sequence
  Description of Artificial Sequence: Synthetic oligonucleotide
ugaagccuccaucucuuuc

SEQ ID NO: 3023044 - RNA, 19 nt, Artificial Sequence
  Description of Artificial Sequence: Synthetic oligonucleotide
agucaguucuucuguuucu

SEQ ID NO: 3023045 - RNA, 19 nt, Artificial Sequence
  Description of Artificial Sequence: Synthetic oligonucleotide
gaaggaaagagcucuuuau

SEQ ID NO: 3023046 - RNA, 19 nt, Artificial Sequence
  Description of Artificial Sequence: Synthetic oligonucleotide
uuuauugcccaggcagggc

SEQ ID NO: 3023047 - RNA, 19 nt, Artificial Sequence
  Description of Artificial Sequence: Synthetic oligonucleotide
uucagacugggaagaagau

SEQ ID NO: 3023048 - RNA, 19 nt, Artificial Sequence
  Description of Artificial Sequence: Synthetic oligonucleotide
uugccccuaagagcaaugg

SEQ ID NO: 3023049 - RNA, 19 nt, Artificial Sequence
  Description of Artificial Sequence: Synthetic oligonucleotide
acucagguauggcaguggu

SEQ ID NO: 3023050 - RNA, 19 nt, Artificial Sequence
  Description of Artificial Sequence: Synthetic oligonucleotide
gcugacuuauauaccaucc

SEQ ID NO: 3023051 - RNA, 19 nt, Artificial Sequence
  Description of Artificial Sequence: Synthetic oligonucleotide
uguuucucuguggauucca

SEQ ID NO: 3023052 - RNA, 19 nt, Artificial Sequence
  Description of Artificial Sequence: Synthetic oligonucleotide
ucagacugggaagaagauc

SEQ ID NO: 3023053 - RNA, 19 nt, Artificial Sequence
  Description of Artificial Sequence: Synthetic oligonucleotide
augucgucugucuucugga

SEQ ID NO: 3023054 - RNA, 19 nt, Artificial Sequence
  Description of Artificial Sequence: Synthetic oligonucleotide
acugggaagaagauccuga

SEQ ID NO: 3023055 - RNA, 19 nt, Artificial Sequence
  Description of Artificial Sequence: Synthetic oligonucleotide
auagagacuaugcguuaau

SEQ ID NO: 3023056 - RNA, 19 nt, Artificial Sequence
  Description of Artificial Sequence: Synthetic oligonucleotide
gagcucuuuauugcccagg

SEQ ID NO: 3023057 - RNA, 19 nt, Artificial Sequence
  Description of Artificial Sequence: Synthetic oligonucleotide
uggcagugguuacaguggu

SEQ ID NO: 3023058 - RNA, 19 nt, Artificial Sequence
  Description of Artificial Sequence: Synthetic oligonucleotide
uuggggacuggcucagaug

SEQ ID NO: 3023059 - RNA, 19 nt, Artificial Sequence
  Description of Artificial Sequence: Synthetic oligonucleotide
aggaccuuucugcugacuu

SEQ ID NO: 3023060 - RNA, 19 nt, Artificial Sequence
  Description of Artificial Sequence: Synthetic oligonucleotide
cuucuggacucagguaugg

SEQ ID NO: 3023061 - RNA, 19 nt, Artificial Sequence
  Description of Artificial Sequence: Synthetic oligonucleotide
uucccuggagucccugggc

SEQ ID NO: 3023062 - RNA, 19 nt, Artificial Sequence
  Description of Artificial Sequence: Synthetic oligonucleotide
uuccacuggccucuucaga

SEQ ID NO: 3023063 - RNA, 19 nt, Artificial Sequence
  Description of Artificial Sequence: Synthetic oligonucleotide
auuggggacuggcucagau

SEQ ID NO: 3023064 - RNA, 19 nt, Artificial Sequence
  Description of Artificial Sequence: Synthetic oligonucleotide
gacucagguauggcagugg

SEQ ID NO: 3023065 - RNA, 19 nt, Artificial Sequence
  Description of Artificial Sequence: Synthetic oligonucleotide
ucccuucucucuuucccca

SEQ ID NO: 3023066 - RNA, 19 nt, Artificial Sequence
  Description of Artificial Sequence: Synthetic oligonucleotide
uaaucugcagagggagagc

SEQ ID NO: 3023067 - RNA, 19 nt, Artificial Sequence
  Description of Artificial Sequence: Synthetic oligonucleotide
ucagucaguucuucuguuu

SEQ ID NO: 3023068 - RNA, 19 nt, Artificial Sequence
  Description of Artificial Sequence: Synthetic oligonucleotide
uagagacuaugcguuaauc

SEQ ID NO: 3023069 - RNA, 19 nt, Artificial Sequence
  Description of Artificial Sequence: Synthetic oligonucleotide
aagauccugaagccuccau

SEQ ID NO: 3023070 - RNA, 19 nt, Artificial Sequence
  Description of Artificial Sequence: Synthetic oligonucleotide
gguauggcagugguuacag

SEQ ID NO: 3023071 - RNA, 19 nt, Artificial Sequence
  Description of Artificial Sequence: Synthetic oligonucleotide
agugguuacaguggucaca

SEQ ID NO: 3023072 - RNA, 19 nt, Artificial Sequence
  Description of Artificial Sequence: Synthetic oligonucleotide
gacuaugcguuaaucugca

SEQ ID NO: 3023073 - RNA, 19 nt, Artificial Sequence
  Description of Artificial Sequence: Synthetic oligonucleotide
acuggcucagaugccauca

SEQ ID NO: 3023074 - RNA, 19 nt, Artificial Sequence
  Description of Artificial Sequence: Synthetic oligonucleotide
ucccuggagucccugggcu

SEQ ID NO: 3023075 - RNA, 19 nt, Artificial Sequence
  Description of Artificial Sequence: Synthetic oligonucleotide
cauggaaggaaagagcucu

SEQ ID NO: 3023076 - RNA, 19 nt, Artificial Sequence
  Description of Artificial Sequence: Synthetic oligonucleotide
ugccccuaagagcaauggu

SEQ ID NO: 3023077 - RNA, 19 nt, Artificial Sequence
  Description of Artificial Sequence: Synthetic oligonucleotide
ugucgucugucuucuggac

SEQ ID NO: 3023078 - RNA, 19 nt, Artificial Sequence
  Description of Artificial Sequence: Synthetic oligonucleotide
cuuucugcugacuuauaua

SEQ ID NO: 3023079 - RNA, 19 nt, Artificial Sequence
  Description of Artificial Sequence: Synthetic oligonucleotide
uuuccccauagagacuaug

SEQ ID NO: 3023080 - RNA, 19 nt, Artificial Sequence
  Description of Artificial Sequence: Synthetic oligonucleotide
uauugcccaggcagggccu

SEQ ID NO: 3023081 - RNA, 19 nt, Artificial Sequence
  Description of Artificial Sequence: Synthetic oligonucleotide
uucucucuuuccccauaga

SEQ ID NO: 3023082 - RNA, 19 nt, Artificial Sequence
  Description of Artificial Sequence: Synthetic oligonucleotide
acuggugccaacacugaga

SEQ ID NO: 3023083 - RNA, 19 nt, Artificial Sequence
  Description of Artificial Sequence: Synthetic oligonucleotide
uggacucagguauggcagu

SEQ ID NO: 3023084 - RNA, 19 nt, Artificial Sequence
  Description of Artificial Sequence: Synthetic oligonucleotide
acuaugcguuaaucugcag

SEQ ID NO: 3023085 - RNA, 19 nt, Artificial Sequence
  Description of Artificial Sequence: Synthetic oligonucleotide
gacugggaagaagauccug

SEQ ID NO: 3023086 - RNA, 19 nt, Artificial Sequence
  Description of Artificial Sequence: Synthetic oligonucleotide
ccuaagagcaauggugucc

SEQ ID NO: 3023087 - RNA, 19 nt, Artificial Sequence
  Description of Artificial Sequence: Synthetic oligonucleotide
gacucauguugccccuaag

SEQ ID NO: 3023088 - RNA, 19 nt, Artificial Sequence
  Description of Artificial Sequence: Synthetic oligonucleotide
auaccaucccuucucucuu

SEQ ID NO: 3023089 - RNA, 19 nt, Artificial Sequence
  Description of Artificial Sequence: Synthetic oligonucleotide
augcguuaaucugcagagg

SEQ ID NO: 3023090 - RNA, 19 nt, Artificial Sequence
  Description of Artificial Sequence: Synthetic oligonucleotide
aguggucacauuggggacu

SEQ ID NO: 3023091 - RNA, 19 nt, Artificial Sequence
  Description of Artificial Sequence: Synthetic oligonucleotide
gagccugcccacuggugcc

SEQ ID NO: 3023092 - RNA, 19 nt, Artificial Sequence
  Description of Artificial Sequence: Synthetic oligonucleotide
ccaggacucauguugcccc

SEQ ID NO: 3023093 - RNA, 19 nt, Artificial Sequence
  Description of Artificial Sequence: Synthetic oligonucleotide
agcaugucgucugucuucu

SEQ ID NO: 3023094 - RNA, 19 nt, Artificial Sequence
  Description of Artificial Sequence: Synthetic oligonucleotide
cccacuggugccaacacug

SEQ ID NO: 3023095 - RNA, 19 nt, Artificial Sequence
  Description of Artificial Sequence: Synthetic oligonucleotide
ggcucagaugccaucaggc

SEQ ID NO: 3023096 - RNA, 19 nt, Artificial Sequence
  Description of Artificial Sequence: Synthetic oligonucleotide
cagcaugucgucugucuuc

SEQ ID NO: 3023097 - RNA, 19 nt, Artificial Sequence
  Description of Artificial Sequence: Synthetic oligonucleotide
gaagaagauccugaagccu

SEQ ID NO: 3023098 - RNA, 19 nt, Artificial Sequence
  Description of Artificial Sequence: Synthetic oligonucleotide
uguucucagucaguucuuc

SEQ ID NO: 3023099 - RNA, 19 nt, Artificial Sequence
  Description of Artificial Sequence: Synthetic oligonucleotide
cuuauauaccaucccuucu

SEQ ID NO: 3023100 - RNA, 19 nt, Artificial Sequence
  Description of Artificial Sequence: Synthetic oligonucleotide
gccccuaagagcaauggug

SEQ ID NO: 3023101 - RNA, 19 nt, Artificial Sequence
  Description of Artificial Sequence: Synthetic oligonucleotide
cacuggugccaacacugag

SEQ ID NO: 3023102 - RNA, 19 nt, Artificial Sequence
  Description of Artificial Sequence: Synthetic oligonucleotide
acacugagaccgcauggaa

SEQ ID NO: 3023103 - RNA, 19 nt, Artificial Sequence
  Description of Artificial Sequence: Synthetic oligonucleotide
cacuggccucuucagacug

SEQ ID NO: 3023104 - RNA, 19 nt, Artificial Sequence
  Description of Artificial Sequence: Synthetic oligonucleotide
gagcaauggugucccagga

SEQ ID NO: 3023105 - RNA, 19 nt, Artificial Sequence
  Description of Artificial Sequence: Synthetic oligonucleotide
caguggucacauuggggac

SEQ ID NO: 3023106 - RNA, 19 nt, Artificial Sequence
  Description of Artificial Sequence: Synthetic oligonucleotide
gccuccaucucuuucccug

SEQ ID NO: 3023107 - RNA, 19 nt, Artificial Sequence
  Description of Artificial Sequence: Synthetic oligonucleotide
ugcagagggagagccugcc

SEQ ID NO: 3023108 - RNA, 19 nt, Artificial Sequence
  Description of Artificial Sequence: Synthetic oligonucleotide
ugagaccgcauggaaggaa

SEQ ID NO: 3023109 - RNA, 19 nt, Artificial Sequence
  Description of Artificial Sequence: Synthetic oligonucleotide
gugucuuccagcaugucgu

SEQ ID NO: 3023110 - RNA, 19 nt, Artificial Sequence
  Description of Artificial Sequence: Synthetic oligonucleotide
cguuaaucugcagagggag

SEQ ID NO: 3023111 - RNA, 19 nt, Artificial Sequence
  Description of Artificial Sequence: Synthetic oligonucleotide
uucuggacucagguauggc

SEQ ID NO: 3023112 - RNA, 19 nt, Artificial Sequence
  Description of Artificial Sequence: Synthetic oligonucleotide
augccaucaggcaguguuc

SEQ ID NO: 3023113 - RNA, 19 nt, Artificial Sequence
  Description of Artificial Sequence: Synthetic oligonucleotide
guuaaucugcagagggaga

SEQ ID NO: 3023114 - RNA, 19 nt, Artificial Sequence
  Description of Artificial Sequence: Synthetic oligonucleotide
caggcaguguucucaguca

SEQ ID NO: 3023115 - RNA, 19 nt, Artificial Sequence
  Description of Artificial Sequence: Synthetic oligonucleotide
cagguauggcagugguuac

SEQ ID NO: 3023116 - RNA, 19 nt, Artificial Sequence
  Description of Artificial Sequence: Synthetic oligonucleotide
ugucuuccagcaugucguc

SEQ ID NO: 3023117 - RNA, 19 nt, Artificial Sequence
  Description of Artificial Sequence: Synthetic oligonucleotide
cuccuggugucuuccagca

SEQ ID NO: 3023118 - RNA, 19 nt, Artificial Sequence
  Description of Artificial Sequence: Synthetic oligonucleotide
aauggugucccaggaccuu

SEQ ID NO: 3023119 - RNA, 19 nt, Artificial Sequence
  Description of Artificial Sequence: Synthetic oligonucleotide
aggcagggccuccuggugu

SEQ ID NO: 3023120 - RNA, 19 nt, Artificial Sequence
  Description of Artificial Sequence: Synthetic oligonucleotide
ugcccacuggugccaacac

SEQ ID NO: 3023121 - RNA, 19 nt, Artificial Sequence
  Description of Artificial Sequence: Synthetic oligonucleotide
cugggaagaagauccugaa

SEQ ID NO: 3023122 - RNA, 19 nt, Artificial Sequence
  Description of Artificial Sequence: Synthetic oligonucleotide
gagaccgcauggaaggaaa

SEQ ID NO: 3023123 - RNA, 19 nt, Artificial Sequence
  Description of Artificial Sequence: Synthetic oligonucleotide
cagugguuacaguggucac

SEQ ID NO: 3023124 - RNA, 19 nt, Artificial Sequence
  Description of Artificial Sequence: Synthetic oligonucleotide
guuucucuguggauuccac

SEQ ID NO: 3023125 - RNA, 19 nt, Artificial Sequence
  Description of Artificial Sequence: Synthetic oligonucleotide
gaccgcauggaaggaaaga

SEQ ID NO: 3023126 - RNA, 19 nt, Artificial Sequence
  Description of Artificial Sequence: Synthetic oligonucleotide
gacuuauauaccaucccuu

SEQ ID NO: 3023127 - RNA, 19 nt, Artificial Sequence
  Description of Artificial Sequence: Synthetic oligonucleotide
uaagagcaaugguguccca

SEQ ID NO: 3023128 - RNA, 19 nt, Artificial Sequence
  Description of Artificial Sequence: Synthetic oligonucleotide
ccgcauggaaggaaagagc

SEQ ID NO: 3023129 - RNA, 19 nt, Artificial Sequence
  Description of Artificial Sequence: Synthetic oligonucleotide
ggaaggaaagagcucuuua

SEQ ID NO: 3023130 - RNA, 19 nt, Artificial Sequence
  Description of Artificial Sequence: Synthetic oligonucleotide
uggaaggaaagagcucuuu

SEQ ID NO: 3023131 - RNA, 19 nt, Artificial Sequence
  Description of Artificial Sequence: Synthetic oligonucleotide
cuggcucagaugccaucag

SEQ ID NO: 3023132 - RNA, 19 nt, Artificial Sequence
  Description of Artificial Sequence: Synthetic oligonucleotide
cugcagagggagagccugc

SEQ ID NO: 3023133 - RNA, 19 nt, Artificial Sequence
  Description of Artificial Sequence: Synthetic oligonucleotide
caguguucucagucaguuc

SEQ ID NO: 3023134 - RNA, 19 nt, Artificial Sequence
  Description of Artificial Sequence: Synthetic oligonucleotide
cauagagacuaugcguuaa

SEQ ID NO: 3023135 - RNA, 19 nt, Artificial Sequence
  Description of Artificial Sequence: Synthetic oligonucleotide
agggccuccuggugucuuc

SEQ ID NO: 3023136 - RNA, 19 nt, Artificial Sequence
  Description of Artificial Sequence: Synthetic oligonucleotide
ggccucuucagacugggaa

SEQ ID NO: 3023137 - RNA, 19 nt, Artificial Sequence
  Description of Artificial Sequence: Synthetic oligonucleotide
ggucacauuggggacuggc

SEQ ID NO: 3023138 - RNA, 19 nt, Artificial Sequence
  Description of Artificial Sequence: Synthetic oligonucleotide
agguauggcagugguuaca

SEQ ID NO: 3023139 - RNA, 19 nt, Artificial Sequence
  Description of Artificial Sequence: Synthetic oligonucleotide
guggucacauuggggacug

SEQ ID NO: 3023140 - RNA, 19 nt, Artificial Sequence
  Description of Artificial Sequence: Synthetic oligonucleotide
guugccccuaagagcaaug

SEQ ID NO: 3023141 - RNA, 19 nt, Artificial Sequence
  Description of Artificial Sequence: Synthetic oligonucleotide
gacuggcucagaugccauc

SEQ ID NO: 3023142 - RNA, 19 nt, Artificial Sequence
  Description of Artificial Sequence: Synthetic oligonucleotide
uggugucccaggaccuuuc

SEQ ID NO: 3023143 - RNA, 19 nt, Artificial Sequence
  Description of Artificial Sequence: Synthetic oligonucleotide
uguugccccuaagagcaau

SEQ ID NO: 3023144 - RNA, 19 nt, Artificial Sequence
  Description of Artificial Sequence: Synthetic oligonucleotide
cuguuucucuguggauucc

SEQ ID NO: 3023145 - RNA, 19 nt, Artificial Sequence
  Description of Artificial Sequence: Synthetic oligonucleotide
auugcccaggcagggccuc

SEQ ID NO: 3023146 - RNA, 19 nt, Artificial Sequence
  Description of Artificial Sequence: Synthetic oligonucleotide
ccaacacugagaccgcaug

SEQ ID NO: 3023147 - RNA, 19 nt, Artificial Sequence
  Description of Artificial Sequence: Synthetic oligonucleotide
uggugccaacacugagacc

SEQ ID NO: 3023148 - RNA, 19 nt, Artificial Sequence
  Description of Artificial Sequence: Synthetic oligonucleotide
agaccgcauggaaggaaag

SEQ ID NO: 3023149 - RNA, 19 nt, Artificial Sequence
  Description of Artificial Sequence: Synthetic oligonucleotide
gcucagaugccaucaggca

SEQ ID NO: 3023150 - RNA, 19 nt, Artificial Sequence
  Description of Artificial Sequence: Synthetic oligonucleotide
aucaggcaguguucucagu

SEQ ID NO: 3023151 - RNA, 19 nt, Artificial Sequence
  Description of Artificial Sequence: Synthetic oligonucleotide
ccuccuggugucuuccagc

SEQ ID NO: 3023152 - RNA, 19 nt, Artificial Sequence
  Description of Artificial Sequence: Synthetic oligonucleotide
gaagauccugaagccucca

SEQ ID NO: 3023153 - RNA, 19 nt, Artificial Sequence
  Description of Artificial Sequence: Synthetic oligonucleotide
gagagccugcccacuggug

SEQ ID NO: 3023154 - RNA, 19 nt, Artificial Sequence
  Description of Artificial Sequence: Synthetic oligonucleotide
ugccaacacugagaccgca

SEQ ID NO: 3023155 - RNA, 19 nt, Artificial Sequence
  Description of Artificial Sequence: Synthetic oligonucleotide
gaccuuucugcugacuuau

SEQ ID NO: 3023156 - RNA, 19 nt, Artificial Sequence
  Description of Artificial Sequence: Synthetic oligonucleotide
gugguuacaguggucacau

SEQ ID NO: 3023157 - RNA, 19 nt, Artificial Sequence
  Description of Artificial Sequence: Synthetic oligonucleotide
gucgucugucuucuggacu

SEQ ID NO: 3023158 - RNA, 19 nt, Artificial Sequence
  Description of Artificial Sequence: Synthetic oligonucleotide
gucugucuucuggacucag

SEQ ID NO: 3023159 - RNA, 19 nt, Artificial Sequence
  Description of Artificial Sequence: Synthetic oligonucleotide
uaccaucccuucucucuuu

SEQ ID NO: 3023160 - RNA, 19 nt, Artificial Sequence
  Description of Artificial Sequence: Synthetic oligonucleotide
uggccucuucagacuggga

SEQ ID NO: 3023161 - RNA, 19 nt, Artificial Sequence
  Description of Artificial Sequence: Synthetic oligonucleotide
uccuggugucuuccagcau

SEQ ID NO: 3023162 - RNA, 19 nt, Artificial Sequence
  Description of Artificial Sequence: Synthetic oligonucleotide
caauggugucccaggaccu

SEQ ID NO: 3023163 - RNA, 19 nt, Artificial Sequence
  Description of Artificial Sequence: Synthetic oligonucleotide
agacugggaagaagauccu

SEQ ID NO: 3023164 - RNA, 19 nt, Artificial Sequence
  Description of Artificial Sequence: Synthetic oligonucleotide
agccuccaucucuuucccu

SEQ ID NO: 3023165 - RNA, 19 nt, Artificial Sequence
  Description of Artificial Sequence: Synthetic oligonucleotide
gucacauuggggacuggcu

SEQ ID NO: 3023166 - RNA, 19 nt, Artificial Sequence
  Description of Artificial Sequence: Synthetic oligonucleotide
ggacucagguauggcagug

SEQ ID NO: 3023167 - RNA, 19 nt, Artificial Sequence
  Description of Artificial Sequence: Synthetic oligonucleotide
cccaggaccuuucugcuga

SEQ ID NO: 3023168 - RNA, 19 nt, Artificial Sequence
  Description of Artificial Sequence: Synthetic oligonucleotide
gggacuggcucagaugcca

SEQ ID NO: 3023169 - RNA, 19 nt, Artificial Sequence
  Description of Artificial Sequence: Synthetic oligonucleotide
gccuccuggugucuuccag

SEQ ID NO: 3023170 - RNA, 19 nt, Artificial Sequence
  Description of Artificial Sequence: Synthetic oligonucleotide
cagaugccaucaggcagug

SEQ ID NO: 3023171 - RNA, 19 nt, Artificial Sequence
  Description of Artificial Sequence: Synthetic oligonucleotide
ggaccuuucugcugacuua

SEQ ID NO: 3023172 - RNA, 19 nt, Artificial Sequence
  Description of Artificial Sequence: Synthetic oligonucleotide
uggucacauuggggacugg

SEQ ID NO: 3023173 - RNA, 19 nt, Artificial Sequence
  Description of Artificial Sequence: Synthetic oligonucleotide
cgcauggaaggaaagagcu

SEQ ID NO: 3023174 - RNA, 19 nt, Artificial Sequence
  Description of Artificial Sequence: Synthetic oligonucleotide
aucugcagagggagagccu

SEQ ID NO: 3023175 - RNA, 19 nt, Artificial Sequence
  Description of Artificial Sequence: Synthetic oligonucleotide
cuccaucucuuucccugga

SEQ ID NO: 3023176 - RNA, 19 nt, Artificial Sequence
  Description of Artificial Sequence: Synthetic oligonucleotide
auggugucccaggaccuuu

SEQ ID NO: 3023177 - RNA, 19 nt, Artificial Sequence
  Description of Artificial Sequence: Synthetic oligonucleotide
ccaucaggcaguguucuca

SEQ ID NO: 3023178 - RNA, 19 nt, Artificial Sequence
  Description of Artificial Sequence: Synthetic oligonucleotide
gugccaacacugagaccgc

SEQ ID NO: 3023179 - RNA, 19 nt, Artificial Sequence
  Description of Artificial Sequence: Synthetic oligonucleotide
cccauagagacuaugcguu

SEQ ID NO: 3023180 - RNA, 19 nt, Artificial Sequence
  Description of Artificial Sequence: Synthetic oligonucleotide
cccuaagagcaaugguguc

SEQ ID NO: 3023181 - RNA, 19 nt, Artificial Sequence
  Description of Artificial Sequence: Synthetic oligonucleotide
auggaaggaaagagcucuu

SEQ ID NO: 3023182 - RNA, 19 nt, Artificial Sequence
  Description of Artificial Sequence: Synthetic oligonucleotide
gcguuaaucugcagaggga

SEQ ID NO: 3023183 - RNA, 19 nt, Artificial Sequence
  Description of Artificial Sequence: Synthetic oligonucleotide
ccccuaagagcaauggugu

SEQ ID NO: 3023184 - RNA, 19 nt, Artificial Sequence
  Description of Artificial Sequence: Synthetic oligonucleotide
ccccauagagacuaugcgu

SEQ ID NO: 3023185 - RNA, 19 nt, Artificial Sequence
  Description of Artificial Sequence: Synthetic oligonucleotide
ugguuacaguggucacauu

SEQ ID NO: 3023186 - RNA, 19 nt, Artificial Sequence
  Description of Artificial Sequence: Synthetic oligonucleotide
ggacucauguugccccuaa

SEQ ID NO: 3023187 - RNA, 19 nt, Artificial Sequence
  Description of Artificial Sequence: Synthetic oligonucleotide
ccucuucagacugggaaga

SEQ ID NO: 3023188 - RNA, 19 nt, Artificial Sequence
  Description of Artificial Sequence: Synthetic oligonucleotide
cugcugacuuauauaccau

SEQ ID NO: 3023189 - RNA, 19 nt, Artificial Sequence
  Description of Artificial Sequence: Synthetic oligonucleotide
uggagucccugggcucaug

SEQ ID NO: 3023190 - RNA, 19 nt, Artificial Sequence
  Description of Artificial Sequence: Synthetic oligonucleotide
cugagaccgcauggaagga

SEQ ID NO: 3023191 - RNA, 19 nt, Artificial Sequence
  Description of Artificial Sequence: Synthetic oligonucleotide
guauggcagugguuacagu

SEQ ID NO: 3023192 - RNA, 19 nt, Artificial Sequence
  Description of Artificial Sequence: Synthetic oligonucleotide
cucuuuccccauagagacu

SEQ ID NO: 3023193 - RNA, 19 nt, Artificial Sequence
  Description of Artificial Sequence: Synthetic oligonucleotide
cuuccagcaugucgucugu

SEQ ID NO: 3023194 - RNA, 19 nt, Artificial Sequence
  Description of Artificial Sequence: Synthetic oligonucleotide
cucuucagacugggaagaa

SEQ ID NO: 3023195 - RNA, 19 nt, Artificial Sequence
  Description of Artificial Sequence: Synthetic oligonucleotide
agccugcccacuggugcca

SEQ ID NO: 3023196 - RNA, 19 nt, Artificial Sequence
  Description of Artificial Sequence: Synthetic oligonucleotide
gcaguguucucagucaguu

SEQ ID NO: 3023197 - RNA, 19 nt, Artificial Sequence
  Description of Artificial Sequence: Synthetic oligonucleotide
ggagagccugcccacuggu

SEQ ID NO: 3023198 - RNA, 19 nt, Artificial Sequence
  Description of Artificial Sequence: Synthetic oligonucleotide
ccuuucugcugacuuauau

SEQ ID NO: 3023199 - RNA, 19 nt, Artificial Sequence
  Description of Artificial Sequence: Synthetic oligonucleotide
ggagucccugggcucaugu

SEQ ID NO: 3023200 - RNA, 19 nt, Artificial Sequence
  Description of Artificial Sequence: Synthetic oligonucleotide
aggacucauguugccccua

SEQ ID NO: 3023201 - RNA, 19 nt, Artificial Sequence
  Description of Artificial Sequence: Synthetic oligonucleotide
caggacucauguugccccu

SEQ ID NO: 3023202 - RNA, 19 nt, Artificial Sequence
  Description of Artificial Sequence: Synthetic oligonucleotide
ccauagagacuaugcguua

SEQ ID NO: 3023203 - RNA, 19 nt, Artificial Sequence
  Description of Artificial Sequence: Synthetic oligonucleotide
ggggacuggcucagaugcc

SEQ ID NO: 3023204 - RNA, 19 nt, Artificial Sequence
  Description of Artificial Sequence: Synthetic oligonucleotide
gucuuccagcaugucgucu

SEQ ID NO: 3023205 - RNA, 19 nt, Artificial Sequence
  Description of Artificial Sequence: Synthetic oligonucleotide
gccaucaggcaguguucuc

SEQ ID NO: 3023206 - RNA, 19 nt, Artificial Sequence
  Description of Artificial Sequence: Synthetic oligonucleotide
ccaucucuuucccuggagu

SEQ ID NO: 3023207 - RNA, 19 nt, Artificial Sequence
  Description of Artificial Sequence: Synthetic oligonucleotide
gggccuccuggugucuucc

SEQ ID NO: 3023208 - RNA, 19 nt, Artificial Sequence
  Description of Artificial Sequence: Synthetic oligonucleotide
cucagguauggcagugguu

SEQ ID NO: 3023209 - RNA, 19 nt, Artificial Sequence
  Description of Artificial Sequence: Synthetic oligonucleotide
ggcagugguuacagugguc

SEQ ID NO: 3023210 - RNA, 19 nt, Artificial Sequence
  Description of Artificial Sequence: Synthetic oligonucleotide
uggauuccacuggccucuu

SEQ ID NO: 3023211 - RNA, 19 nt, Artificial Sequence
  Description of Artificial Sequence: Synthetic oligonucleotide
gcaugucgucugucuucug

SEQ ID NO: 3023212 - RNA, 19 nt, Artificial Sequence
  Description of Artificial Sequence: Synthetic oligonucleotide
gagggagagccugcccacu

SEQ ID NO: 3023213 - RNA, 19 nt, Artificial Sequence
  Description of Artificial Sequence: Synthetic oligonucleotide
ccacuggugccaacacuga

SEQ ID NO: 3023214 - RNA, 19 nt, Artificial Sequence
  Description of Artificial Sequence: Synthetic oligonucleotide
ccuggagucccugggcuca

SEQ ID NO: 3023215 - RNA, 19 nt, Artificial Sequence
  Description of Artificial Sequence: Synthetic oligonucleotide
ccaggaccuuucugcugac

SEQ ID NO: 3023216 - RNA, 19 nt, Artificial Sequence
  Description of Artificial Sequence: Synthetic oligonucleotide
ggugucccaggaccuuucu

SEQ ID NO: 3023217 - RNA, 19 nt, Artificial Sequence
  Description of Artificial Sequence: Synthetic oligonucleotide
auguugccccuaagagcaa

SEQ ID NO: 3023218 - RNA, 19 nt, Artificial Sequence
  Description of Artificial Sequence: Synthetic oligonucleotide
cauuggggacuggcucaga

SEQ ID NO: 3023219 - RNA, 19 nt, Artificial Sequence
  Description of Artificial Sequence: Synthetic oligonucleotide
cuuuccccauagagacuau

SEQ ID NO: 3023220 - RNA, 19 nt, Artificial Sequence
  Description of Artificial Sequence: Synthetic oligonucleotide
guguucucagucaguucuu

SEQ ID NO: 3023221 - RNA, 19 nt, Artificial Sequence
  Description of Artificial Sequence: Synthetic oligonucleotide
ggccuccuggugucuucca

SEQ ID NO: 3023222 - RNA, 19 nt, Artificial Sequence
  Description of Artificial Sequence: Synthetic oligonucleotide
ggcaguguucucagucagu

SEQ ID NO: 3023223 - RNA, 19 nt, Artificial Sequence
  Description of Artificial Sequence: Synthetic oligonucleotide
ccuucucucuuuccccaua

SEQ ID NO: 3023224 - RNA, 19 nt, Artificial Sequence
  Description of Artificial Sequence: Synthetic oligonucleotide
cugaagccuccaucucuuu

SEQ ID NO: 3023225 - RNA, 19 nt, Artificial Sequence
  Description of Artificial Sequence: Synthetic oligonucleotide
gcccacuggugccaacacu

SEQ ID NO: 3023226 - RNA, 19 nt, Artificial Sequence
  Description of Artificial Sequence: Synthetic oligonucleotide
ccugcccacuggugccaac

SEQ ID NO: 3023227 - RNA, 19 nt, Artificial Sequence
  Description of Artificial Sequence: Synthetic oligonucleotide
ccacuggccucuucagacu

SEQ ID NO: 3023228 - RNA, 19 nt, Artificial Sequence
  Description of Artificial Sequence: Synthetic oligonucleotide
caggaccuuucugcugacu

SEQ ID NO: 3023229 - RNA, 19 nt, Artificial Sequence
  Description of Artificial Sequence: Synthetic oligonucleotide
gccaacacugagaccgcau

SEQ ID NO: 3023230 - RNA, 19 nt, Artificial Sequence
  Description of Artificial Sequence: Synthetic oligonucleotide
ccagcaugucgucugucuu

SEQ ID NO: 3023231 - RNA, 19 nt, Artificial Sequence
  Description of Artificial Sequence: Synthetic oligonucleotide
ggacuggcucagaugccau

SEQ ID NO: 3023232 - RNA, 19 nt, Artificial Sequence
  Description of Artificial Sequence: Synthetic oligonucleotide
cuggagucccugggcucau

SEQ ID NO: 3023233 - RNA, 19 nt, Artificial Sequence
  Description of Artificial Sequence: Synthetic oligonucleotide
cagggccuccuggugucuu

SEQ ID NO: 3023234 - RNA, 19 nt, Artificial Sequence
  Description of Artificial Sequence: Synthetic oligonucleotide
gaugguucugauuagcucg

SEQ ID NO: 3023235 - RNA, 19 nt, Artificial Sequence
  Description of Artificial Sequence: Synthetic oligonucleotide
uccacauuagcaaucaucc

SEQ ID NO: 3023236 - RNA, 19 nt, Artificial Sequence
  Description of Artificial Sequence: Synthetic oligonucleotide
uuagcaaucauccucugca

SEQ ID NO: 3023237 - RNA, 19 nt, Artificial Sequence
  Description of Artificial Sequence: Synthetic oligonucleotide
aaagauagucacugucugc

SEQ ID NO: 3023238 - RNA, 19 nt, Artificial Sequence
  Description of Artificial Sequence: Synthetic oligonucleotide
aagggcaacaacccggccc

SEQ ID NO: 3023239 - RNA, 19 nt, Artificial Sequence
  Description of Artificial Sequence: Synthetic oligonucleotide
cuagcaaaguagaaaaggg

SEQ ID NO: 3023240 - RNA, 19 nt, Artificial Sequence
  Description of Artificial Sequence: Synthetic oligonucleotide
uugagcaccaguuugcuag

SEQ ID NO: 3023241 - RNA, 19 nt, Artificial Sequence
  Description of Artificial Sequence: Synthetic oligonucleotide
aguagaaaagggcaacaac

SEQ ID NO: 3023242 - RNA, 19 nt, Artificial Sequence
  Description of Artificial Sequence: Synthetic oligonucleotide
aaucauccucugcagcucc

SEQ ID NO: 3023243 - RNA, 19 nt, Artificial Sequence
  Description of Artificial Sequence: Synthetic oligonucleotide
guagaaaagggcaacaacc

SEQ ID NO: 3023244 - RNA, 19 nt, Artificial Sequence
  Description of Artificial Sequence: Synthetic oligonucleotide
uguucuuccagaucgugag

SEQ ID NO: 3023245 - RNA, 19 nt, Artificial Sequence
  Description of Artificial Sequence: Synthetic oligonucleotide
uuaguauccacauuagcaa

SEQ ID NO: 3023246 - RNA, 19 nt, Artificial Sequence
  Description of Artificial Sequence: Synthetic oligonucleotide
aguuaguauccacauuagc

SEQ ID NO: 3023247 - RNA, 19 nt, Artificial Sequence
  Description of Artificial Sequence: Synthetic oligonucleotide
gaggacuccagccacaaag

SEQ ID NO: 3023248 - RNA, 19 nt, Artificial Sequence
  Description of Artificial Sequence: Synthetic oligonucleotide
uggucuuggauccagacaa

SEQ ID NO: 3023249 - RNA, 19 nt, Artificial Sequence
  Description of Artificial Sequence: Synthetic oligonucleotide
gucacugucugccaggugg

SEQ ID NO: 3023250 - RNA, 19 nt, Artificial Sequence
  Description of Artificial Sequence: Synthetic oligonucleotide
gaaaagggcaacaacccgg

SEQ ID NO: 3023251 - RNA, 19 nt, Artificial Sequence
  Description of Artificial Sequence: Synthetic oligonucleotide
auuagcaaucauccucugc

SEQ ID NO: 3023252 - RNA, 19 nt, Artificial Sequence
  Description of Artificial Sequence: Synthetic oligonucleotide
aagaagaccucucgugggg

SEQ ID NO: 3023253 - RNA, 19 nt, Artificial Sequence
  Description of Artificial Sequence: Synthetic oligonucleotide
aguugaaguugccaucagc

SEQ ID NO: 3023254 - RNA, 19 nt, Artificial Sequence
  Description of Artificial Sequence: Synthetic oligonucleotide
uagcaaaguagaaaagggc

SEQ ID NO: 3023255 - RNA, 19 nt, Artificial Sequence
  Description of Artificial Sequence: Synthetic oligonucleotide
ggcacuuugguacacaggg

SEQ ID NO: 3023256 - RNA, 19 nt, Artificial Sequence
  Description of Artificial Sequence: Synthetic oligonucleotide
aaaagggcaacaacccggc

SEQ ID NO: 3023257 - RNA, 19 nt, Artificial Sequence
  Description of Artificial Sequence: Synthetic oligonucleotide
aaacaugucagcugccaca

SEQ ID NO: 3023258 - RNA, 19 nt, Artificial Sequence
  Description of Artificial Sequence: Synthetic oligonucleotide
guuaguauccacauuagca

SEQ ID NO: 3023259 - RNA, 19 nt, Artificial Sequence
  Description of Artificial Sequence: Synthetic oligonucleotide
agaaaagggcaacaacccg

SEQ ID NO: 3023260 - RNA, 19 nt, Artificial Sequence
  Description of Artificial Sequence: Synthetic oligonucleotide
gaagaagaccucucguggg

SEQ ID NO: 3023261 - RNA, 19 nt, Artificial Sequence
  Description of Artificial Sequence: Synthetic oligonucleotide
aacaugucagcugccacac

SEQ ID NO: 3023262 - RNA, 19 nt, Artificial Sequence
  Description of Artificial Sequence: Synthetic oligonucleotide
cuuggauccagacaagcag

SEQ ID NO: 3023263 - RNA, 19 nt, Artificial Sequence
  Description of Artificial Sequence: Synthetic oligonucleotide
uugcuagcaaaguagaaaa

SEQ ID NO: 3023264 - RNA, 19 nt, Artificial Sequence
  Description of Artificial Sequence: Synthetic oligonucleotide
agggcaacaacccggcccc

SEQ ID NO: 3023265 - RNA, 19 nt, Artificial Sequence
  Description of Artificial Sequence: Synthetic oligonucleotide
ucgugagugaggcagugag

SEQ ID NO: 3023266 - RNA, 19 nt, Artificial Sequence
  Description of Artificial Sequence: Synthetic oligonucleotide
caugucagcugccacacgg

SEQ ID NO: 3023267 - RNA, 19 nt, Artificial Sequence
  Description of Artificial Sequence: Synthetic oligonucleotide
caguuugcuagcaaaguag

SEQ ID NO: 3023268 - RNA, 19 nt, Artificial Sequence
  Description of Artificial Sequence: Synthetic oligonucleotide
ucagcaaacaugucagcug

SEQ ID NO: 3023269 - RNA, 19 nt, Artificial Sequence
  Description of Artificial Sequence: Synthetic oligonucleotide
agcaaucauccucugcagc

SEQ ID NO: 3023270 - RNA, 19 nt, Artificial Sequence
  Description of Artificial Sequence: Synthetic oligonucleotide
cacauuagcaaucauccuc

SEQ ID NO: 3023271 - RNA, 19 nt, Artificial Sequence
  Description of Artificial Sequence: Synthetic oligonucleotide
cacuuugguacacagggcc

SEQ ID NO: 3023272 - RNA, 19 nt, Artificial Sequence
  Description of Artificial Sequence: Synthetic oligonucleotide
uuugcuagcaaaguagaaa

SEQ ID NO: 3023273 - RNA, 19 nt, Artificial Sequence
  Description of Artificial Sequence: Synthetic oligonucleotide
guugccaucagcaaacaug

SEQ ID NO: 3023274 - RNA, 19 nt, Artificial Sequence
  Description of Artificial Sequence: Synthetic oligonucleotide
gauagucacugucugccag

SEQ ID NO: 3023275 - RNA, 19 nt, Artificial Sequence
  Description of Artificial Sequence: Synthetic oligonucleotide
ugagaggaggccaucccag

SEQ ID NO: 3023276 - RNA, 19 nt, Artificial Sequence
  Description of Artificial Sequence: Synthetic oligonucleotide
agcaaaguagaaaagggca

SEQ ID NO: 3023277 - RNA, 19 nt, Artificial Sequence
  Description of Artificial Sequence: Synthetic oligonucleotide
ucuuggauccagacaagca

SEQ ID NO: 3023278 - RNA, 19 nt, Artificial Sequence
  Description of Artificial Sequence: Synthetic oligonucleotide
agaggaggccaucccagcc

SEQ ID NO: 3023279 - RNA, 19 nt, Artificial Sequence
  Description of Artificial Sequence: Synthetic oligonucleotide
aaaguagaaaagggcaaca

SEQ ID NO: 3023280 - RNA, 19 nt, Artificial Sequence
  Description of Artificial Sequence: Synthetic oligonucleotide
ggaagaagaccucucgugg

SEQ ID NO: 3023281 - RNA, 19 nt, Artificial Sequence
  Description of Artificial Sequence: Synthetic oligonucleotide
aggaaguccaguguccagc

SEQ ID NO: 3023282 - RNA, 19 nt, Artificial Sequence
  Description of Artificial Sequence: Synthetic oligonucleotide
gaaguugccaucagcaaac

SEQ ID NO: 3023283 - RNA, 19 nt, Artificial Sequence
  Description of Artificial Sequence: Synthetic oligonucleotide
caaagauagucacugucug

SEQ ID NO: 3023284 - RNA, 19 nt, Artificial Sequence
  Description of Artificial Sequence: Synthetic oligonucleotide
uucugauuagcucgggcac

SEQ ID NO: 3023285 - RNA, 19 nt, Artificial Sequence
  Description of Artificial Sequence: Synthetic oligonucleotide
gcuagcaaaguagaaaagg

SEQ ID NO: 3023286 - RNA, 19 nt, Artificial Sequence
  Description of Artificial Sequence: Synthetic oligonucleotide
auagucacugucugccagg

SEQ ID NO: 3023287 - RNA, 19 nt, Artificial Sequence
  Description of Artificial Sequence: Synthetic oligonucleotide
uaugagaggaggccauccc

SEQ ID NO: 3023288 - RNA, 19 nt, Artificial Sequence
  Description of Artificial Sequence: Synthetic oligonucleotide
ugcuagcaaaguagaaaag

SEQ ID NO: 3023289 - RNA, 19 nt, Artificial Sequence
  Description of Artificial Sequence: Synthetic oligonucleotide
aaagggcaacaacccggcc

SEQ ID NO: 3023290 - RNA, 19 nt, Artificial Sequence
  Description of Artificial Sequence: Synthetic oligonucleotide
uuccagaucgugagugagg

SEQ ID NO: 3023291 - RNA, 19 nt, Artificial Sequence
  Description of Artificial Sequence: Synthetic oligonucleotide
uggggaguuaguauccaca

SEQ ID NO: 3023292 - RNA, 19 nt, Artificial Sequence
  Description of Artificial Sequence: Synthetic oligonucleotide
auccacauuagcaaucauc

SEQ ID NO: 3023293 - RNA, 19 nt, Artificial Sequence
  Description of Artificial Sequence: Synthetic oligonucleotide
cagaucgugagugaggcag

SEQ ID NO: 3023294 - RNA, 19 nt, Artificial Sequence
  Description of Artificial Sequence: Synthetic oligonucleotide
cacaaagauagucacuguc

SEQ ID NO: 3023295 - RNA, 19 nt, Artificial Sequence
  Description of Artificial Sequence: Synthetic oligonucleotide
uucuuccagaucgugagug

SEQ ID NO: 3023296 - RNA, 19 nt, Artificial Sequence
  Description of Artificial Sequence: Synthetic oligonucleotide
aucccagccacccuggucu

SEQ ID NO: 3023297 - RNA, 19 nt, Artificial Sequence
  Description of Artificial Sequence: Synthetic oligonucleotide
acaaagauagucacugucu

SEQ ID NO: 3023298 - RNA, 19 nt, Artificial Sequence
  Description of Artificial Sequence: Synthetic oligonucleotide
cucugcagcuccauguugc

SEQ ID NO: 3023299 - RNA, 19 nt, Artificial Sequence
  Description of Artificial Sequence: Synthetic oligonucleotide
guucugauuagcucgggca

SEQ ID NO: 3023300 - RNA, 19 nt, Artificial Sequence
  Description of Artificial Sequence: Synthetic oligonucleotide
aguguccagcccaugaugg

SEQ ID NO: 3023301 - RNA, 19 nt, Artificial Sequence
  Description of Artificial Sequence: Synthetic oligonucleotide
gauuagcucgggcacuuug

SEQ ID NO: 3023302 - RNA, 19 nt, Artificial Sequence
  Description of Artificial Sequence: Synthetic oligonucleotide
ucacugucugccagguggg

SEQ ID NO: 3023303 - RNA, 19 nt, Artificial Sequence
  Description of Artificial Sequence: Synthetic oligonucleotide
ucucggaggaaguccagug

SEQ ID NO: 3023304 - RNA, 19 nt, Artificial Sequence
  Description of Artificial Sequence: Synthetic oligonucleotide
ggaguuaguauccacauua

SEQ ID NO: 3023305 - RNA, 19 nt, Artificial Sequence
  Description of Artificial Sequence: Synthetic oligonucleotide
caagcagccgcucucggag

SEQ ID NO: 3023306 - RNA, 19 nt, Artificial Sequence
  Description of Artificial Sequence: Synthetic oligonucleotide
acauuagcaaucauccucu

SEQ ID NO: 3023307 - RNA, 19 nt, Artificial Sequence
  Description of Artificial Sequence: Synthetic oligonucleotide
caaaguagaaaagggcaac

SEQ ID NO: 3023308 - RNA, 19 nt, Artificial Sequence
  Description of Artificial Sequence: Synthetic oligonucleotide
ugaugguucugauuagcuc

SEQ ID NO: 3023309 - RNA, 19 nt, Artificial Sequence
  Description of Artificial Sequence: Synthetic oligonucleotide
uccaguguccagcccauga

SEQ ID NO: 3023310 - RNA, 19 nt, Artificial Sequence
  Description of Artificial Sequence: Synthetic oligonucleotide
cacggaagaagaccucucg

SEQ ID NO: 3023311 - RNA, 19 nt, Artificial Sequence
  Description of Artificial Sequence: Synthetic oligonucleotide
aucagcaaacaugucagcu

SEQ ID NO: 3023312 - RNA, 19 nt, Artificial Sequence
  Description of Artificial Sequence: Synthetic oligonucleotide
cucguggggaguuaguauc

SEQ ID NO: 3023313 - RNA, 19 nt, Artificial Sequence
  Description of Artificial Sequence: Synthetic oligonucleotide
ucggaggaaguccaguguc

SEQ ID NO: 3023314 - RNA, 19 nt, Artificial Sequence
  Description of Artificial Sequence: Synthetic oligonucleotide
aacaacccggccccaguug

SEQ ID NO: 3023315 - RNA, 19 nt, Artificial Sequence
  Description of Artificial Sequence: Synthetic oligonucleotide
gaaguaugagaggaggcca

SEQ ID NO: 3023316 - RNA, 19 nt, Artificial Sequence
  Description of Artificial Sequence: Synthetic oligonucleotide
aaguagaaaagggcaacaa

SEQ ID NO: 3023317 - RNA, 19 nt, Artificial Sequence
  Description of Artificial Sequence: Synthetic oligonucleotide
uaguauccacauuagcaau

SEQ ID NO: 3023318 - RNA, 19 nt, Artificial Sequence
  Description of Artificial Sequence: Synthetic oligonucleotide
auuagcucgggcacuuugg

SEQ ID NO: 3023319 - RNA, 19 nt, Artificial Sequence
  Description of Artificial Sequence: Synthetic oligonucleotide
ucguggggaguuaguaucc

SEQ ID NO: 3023320 - RNA, 19 nt, Artificial Sequence
  Description of Artificial Sequence: Synthetic oligonucleotide
gaguuaguauccacauuag

SEQ ID NO: 3023321 - RNA, 19 nt, Artificial Sequence
  Description of Artificial Sequence: Synthetic oligonucleotide
uugaaguugccaucagcaa

SEQ ID NO: 3023322 - RNA, 19 nt, Artificial Sequence
  Description of Artificial Sequence: Synthetic oligonucleotide
uuagcucgggcacuuuggu

SEQ ID NO: 3023323 - RNA, 19 nt, Artificial Sequence
  Description of Artificial Sequence: Synthetic oligonucleotide
caugaugguucugauuagc

SEQ ID NO: 3023324 - RNA, 19 nt, Artificial Sequence
  Description of Artificial Sequence: Synthetic oligonucleotide
uccaagacggcgggcaggg

SEQ ID NO: 3023325 - RNA, 19 nt, Artificial Sequence
  Description of Artificial Sequence: Synthetic oligonucleotide
caccaguuugcuagcaaag

SEQ ID NO: 3023326 - RNA, 19 nt, Artificial Sequence
  Description of Artificial Sequence: Synthetic oligonucleotide
ucagcccauguucuuccag

SEQ ID NO: 3023327 - RNA, 19 nt, Artificial Sequence
  Description of Artificial Sequence: Synthetic oligonucleotide
acacagggccuugagcacc

SEQ ID NO: 3023328 - RNA, 19 nt, Artificial Sequence
  Description of Artificial Sequence: Synthetic oligonucleotide
gaagaccucucguggggag

SEQ ID NO: 3023329 - RNA, 19 nt, Artificial Sequence
  Description of Artificial Sequence: Synthetic oligonucleotide
gccacaaagauagucacug

SEQ ID NO: 3023330 - RNA, 19 nt, Artificial Sequence
  Description of Artificial Sequence: Synthetic oligonucleotide
augagaggaggccauccca

SEQ ID NO: 3023331 - RNA, 19 nt, Artificial Sequence
  Description of Artificial Sequence: Synthetic oligonucleotide
aggaggccaucccagccac

SEQ ID NO: 3023332 - RNA, 19 nt, Artificial Sequence
  Description of Artificial Sequence: Synthetic oligonucleotide
aguuugcuagcaaaguaga

SEQ ID NO: 3023333 - RNA, 19 nt, Artificial Sequence
  Description of Artificial Sequence: Synthetic oligonucleotide
ucuuccagaucgugaguga

SEQ ID NO: 3023334 - RNA, 19 nt, Artificial Sequence
  Description of Artificial Sequence: Synthetic oligonucleotide
cagccacaaagauagucac

SEQ ID NO: 3023335 - RNA, 19 nt, Artificial Sequence
  Description of Artificial Sequence: Synthetic oligonucleotide
gugagugaggcagugagga

SEQ ID NO: 3023336 - RNA, 19 nt, Artificial Sequence
  Description of Artificial Sequence: Synthetic oligonucleotide
caaacaugucagcugccac

SEQ ID NO: 3023337 - RNA, 19 nt, Artificial Sequence
  Description of Artificial Sequence: Synthetic oligonucleotide
agugaggcagugaggacuc

SEQ ID NO: 3023338 - RNA, 19 nt, Artificial Sequence
  Description of Artificial Sequence: Synthetic oligonucleotide
ggcagugaggacuccagcc

SEQ ID NO: 3023339 - RNA, 19 nt, Artificial Sequence
  Description of Artificial Sequence: Synthetic oligonucleotide
acggaagaagaccucucgu

SEQ ID NO: 3023340 - RNA, 19 nt, Artificial Sequence
  Description of Artificial Sequence: Synthetic oligonucleotide
ucccgaaguaugagaggag

SEQ ID NO: 3023341 - RNA, 19 nt, Artificial Sequence
  Description of Artificial Sequence: Synthetic oligonucleotide
ugagcaccaguuugcuagc

SEQ ID NO: 3023342 - RNA, 19 nt, Artificial Sequence
  Description of Artificial Sequence: Synthetic oligonucleotide
caucagcaaacaugucagc

SEQ ID NO: 3023343 - RNA, 19 nt, Artificial Sequence
  Description of Artificial Sequence: Synthetic oligonucleotide
ucugauuagcucgggcacu

SEQ ID NO: 3023344 - RNA, 19 nt, Artificial Sequence
  Description of Artificial Sequence: Synthetic oligonucleotide
agacaagcagccgcucucg

SEQ ID NO: 3023345 - RNA, 19 nt, Artificial Sequence
  Description of Artificial Sequence: Synthetic oligonucleotide
gaggaaguccaguguccag

SEQ ID NO: 3023346 - RNA, 19 nt, Artificial Sequence
  Description of Artificial Sequence: Synthetic oligonucleotide
guaugagaggaggccaucc

SEQ ID NO: 3023347 - RNA, 19 nt, Artificial Sequence
  Description of Artificial Sequence: Synthetic oligonucleotide
cuuccagaucgugagugag

SEQ ID NO: 3023348 - RNA, 19 nt, Artificial Sequence
  Description of Artificial Sequence: Synthetic oligonucleotide
augguucugauuagcucgg

SEQ ID NO: 3023349 - RNA, 19 nt, Artificial Sequence
  Description of Artificial Sequence: Synthetic oligonucleotide
ucucguggggaguuaguau

SEQ ID NO: 3023350 - RNA, 19 nt, Artificial Sequence
  Description of Artificial Sequence: Synthetic oligonucleotide
aguaugagaggaggccauc

SEQ ID NO: 3023351 - RNA, 19 nt, Artificial Sequence
  Description of Artificial Sequence: Synthetic oligonucleotide
gacaagcagccgcucucgg

SEQ ID NO: 3023352 - RNA, 19 nt, Artificial Sequence
  Description of Artificial Sequence: Synthetic oligonucleotide
gaggccaucccagccaccc

SEQ ID NO: 3023353 - RNA, 19 nt, Artificial Sequence
  Description of Artificial Sequence: Synthetic oligonucleotide
ugucagcugccacacggaa

SEQ ID NO: 3023354 - RNA, 19 nt, Artificial Sequence
  Description of Artificial Sequence: Synthetic oligonucleotide
acaacccggccccaguuga

SEQ ID NO: 3023355 - RNA, 19 nt, Artificial Sequence
  Description of Artificial Sequence: Synthetic oligonucleotide
agauagucacugucugcca

SEQ ID NO: 3023356 - RNA, 19 nt, Artificial Sequence
  Description of Artificial Sequence: Synthetic oligonucleotide
gagaggaggccaucccagc

SEQ ID NO: 3023357 - RNA, 19 nt, Artificial Sequence
  Description of Artificial Sequence: Synthetic oligonucleotide
uuugguacacagggccuug

SEQ ID NO: 3023358 - RNA, 19 nt, Artificial Sequence
  Description of Artificial Sequence: Synthetic oligonucleotide
augaugguucugauuagcu

SEQ ID NO: 3023359 - RNA, 19 nt, Artificial Sequence
  Description of Artificial Sequence: Synthetic oligonucleotide
gguacacagggccuugagc

SEQ ID NO: 3023360 - RNA, 19 nt, Artificial Sequence
  Description of Artificial Sequence: Synthetic oligonucleotide
uacacagggccuugagcac

SEQ ID NO: 3023361 - RNA, 19 nt, Artificial Sequence
  Description of Artificial Sequence: Synthetic oligonucleotide
gucccgaaguaugagagga

SEQ ID NO: 3023362 - RNA, 19 nt, Artificial Sequence
  Description of Artificial Sequence: Synthetic oligonucleotide
gucuuggauccagacaagc

SEQ ID NO: 3023363 - RNA, 19 nt, Artificial Sequence
  Description of Artificial Sequence: Synthetic oligonucleotide
aaguaugagaggaggccau

SEQ ID NO: 3023364 - RNA, 19 nt, Artificial Sequence
  Description of Artificial Sequence: Synthetic oligonucleotide
agcaaacaugucagcugcc

SEQ ID NO: 3023365 - RNA, 19 nt, Artificial Sequence
  Description of Artificial Sequence: Synthetic oligonucleotide
accaguuugcuagcaaagu

SEQ ID NO: 3023366 - RNA, 19 nt, Artificial Sequence
  Description of Artificial Sequence: Synthetic oligonucleotide
aguccaagacggcgggcag

SEQ ID NO: 3023367 - RNA, 19 nt, Artificial Sequence
  Description of Artificial Sequence: Synthetic oligonucleotide
caguguccagcccaugaug

SEQ ID NO: 3023368 - RNA, 19 nt, Artificial Sequence
  Description of Artificial Sequence: Synthetic oligonucleotide
gaggaggccaucccagcca

SEQ ID NO: 3023369 - RNA, 19 nt, Artificial Sequence
  Description of Artificial Sequence: Synthetic oligonucleotide
gaaguccaguguccagccc

SEQ ID NO: 3023370 - RNA, 19 nt, Artificial Sequence
  Description of Artificial Sequence: Synthetic oligonucleotide
gguucugauuagcucgggc

SEQ ID NO: 3023371 - RNA, 19 nt, Artificial Sequence
  Description of Artificial Sequence: Synthetic oligonucleotide
ugagugaggcagugaggac

SEQ ID NO: 3023372 - RNA, 19 nt, Artificial Sequence
  Description of Artificial Sequence: Synthetic oligonucleotide
cagacaagcagccgcucuc

SEQ ID NO: 3023373 - RNA, 19 nt, Artificial Sequence
  Description of Artificial Sequence: Synthetic oligonucleotide
ugaggcagugaggacucca

SEQ ID NO: 3023374 - RNA, 19 nt, Artificial Sequence
  Description of Artificial Sequence: Synthetic oligonucleotide
cagugaggacuccagccac

SEQ ID NO: 3023375 - RNA, 19 nt, Artificial Sequence
  Description of Artificial Sequence: Synthetic oligonucleotide
cauuagcaaucauccucug

SEQ ID NO: 3023376 - RNA, 19 nt, Artificial Sequence
  Description of Artificial Sequence: Synthetic oligonucleotide
aacccggccccaguugaag

SEQ ID NO: 3023377 - RNA, 19 nt, Artificial Sequence
  Description of Artificial Sequence: Synthetic oligonucleotide
gaucgugagugaggcagug

SEQ ID NO: 3023378 - RNA, 19 nt, Artificial Sequence
  Description of Artificial Sequence: Synthetic oligonucleotide
ggccuugagcaccaguuug

SEQ ID NO: 3023379 - RNA, 19 nt, Artificial Sequence
  Description of Artificial Sequence: Synthetic oligonucleotide
cccaugaugguucugauua

SEQ ID NO: 3023380 - RNA, 19 nt, Artificial Sequence
  Description of Artificial Sequence: Synthetic oligonucleotide
auguucuuccagaucguga

SEQ ID NO: 3023381 - RNA, 19 nt, Artificial Sequence
  Description of Artificial Sequence: Synthetic oligonucleotide
acaugucagcugccacacg

SEQ ID NO: 3023382 - RNA, 19 nt, Artificial Sequence
  Description of Artificial Sequence: Synthetic oligonucleotide
gagugaggcagugaggacu

SEQ ID NO: 3023383 - RNA, 19 nt, Artificial Sequence
  Description of Artificial Sequence: Synthetic oligonucleotide
ggucccgaaguaugagagg

SEQ ID NO: 3023384 - RNA, 19 nt, Artificial Sequence
  Description of Artificial Sequence: Synthetic oligonucleotide
uccucugcagcuccauguu

SEQ ID NO: 3023385 - RNA, 19 nt, Artificial Sequence
  Description of Artificial Sequence: Synthetic oligonucleotide
uauccacauuagcaaucau

SEQ ID NO: 3023386 - RNA, 19 nt, Artificial Sequence
  Description of Artificial Sequence: Synthetic oligonucleotide
gggucccgaaguaugagag

SEQ ID NO: 3023387 - RNA, 19 nt, Artificial Sequence
  Description of Artificial Sequence: Synthetic oligonucleotide
aagacggcgggcagggccu

SEQ ID NO: 3023388 - RNA, 19 nt, Artificial Sequence
  Description of Artificial Sequence: Synthetic oligonucleotide
aguugccaucagcaaacau

SEQ ID NO: 3023389 - RNA, 19 nt, Artificial Sequence
  Description of Artificial Sequence: Synthetic oligonucleotide
acacggaagaagaccucuc

SEQ ID NO: 3023390 - RNA, 19 nt, Artificial Sequence
  Description of Artificial Sequence: Synthetic oligonucleotide
acuuugguacacagggccu

SEQ ID NO: 3023391 - RNA, 19 nt, Artificial Sequence
  Description of Artificial Sequence: Synthetic oligonucleotide
aagaccucucguggggagu

SEQ ID NO: 3023392 - RNA, 19 nt, Artificial Sequence
  Description of Artificial Sequence: Synthetic oligonucleotide
uagucacugucugccaggu

SEQ ID NO: 3023393 - RNA, 19 nt, Artificial Sequence
  Description of Artificial Sequence: Synthetic oligonucleotide
ccgaaguaugagaggaggc

SEQ ID NO: 3023394 - RNA, 19 nt, Artificial Sequence
  Description of Artificial Sequence: Synthetic oligonucleotide
ugguucugauuagcucggg

SEQ ID NO: 3023395 - RNA, 19 nt, Artificial Sequence
  Description of Artificial Sequence: Synthetic oligonucleotide
cccgaaguaugagaggagg

SEQ ID NO: 3023396 - RNA, 19 nt, Artificial Sequence
  Description of Artificial Sequence: Synthetic oligonucleotide
gucagcugccacacggaag

SEQ ID NO: 3023397 - RNA, 19 nt, Artificial Sequence
  Description of Artificial Sequence: Synthetic oligonucleotide
cuggucuuggauccagaca

SEQ ID NO: 3023398 - RNA, 19 nt, Artificial Sequence
  Description of Artificial Sequence: Synthetic oligonucleotide
agcaccaguuugcuagcaa

SEQ ID NO: 3023399 - RNA, 19 nt, Artificial Sequence
  Description of Artificial Sequence: Synthetic oligonucleotide
caaucauccucugcagcuc

SEQ ID NO: 3023400 - RNA, 19 nt, Artificial Sequence
  Description of Artificial Sequence: Synthetic oligonucleotide
uguccagcccaugaugguu

SEQ ID NO: 3023401 - RNA, 19 nt, Artificial Sequence
  Description of Artificial Sequence: Synthetic oligonucleotide
agaagaccucucgugggga

SEQ ID NO: 3023402 - RNA, 19 nt, Artificial Sequence
  Description of Artificial Sequence: Synthetic oligonucleotide
cgaaguaugagaggaggcc

SEQ ID NO: 3023403 - RNA, 19 nt, Artificial Sequence
  Description of Artificial Sequence: Synthetic oligonucleotide
guggggaguuaguauccac

SEQ ID NO: 3023404 - RNA, 19 nt, Artificial Sequence
  Description of Artificial Sequence: Synthetic oligonucleotide
gacuccagccacaaagaua

SEQ ID NO: 3023405 - RNA, 19 nt, Artificial Sequence
  Description of Artificial Sequence: Synthetic oligonucleotide
gcaaucauccucugcagcu

SEQ ID NO: 3023406 - RNA, 19 nt, Artificial Sequence
  Description of Artificial Sequence: Synthetic oligonucleotide
uccagcccaugaugguucu

SEQ ID NO: 3023407 - RNA, 19 nt, Artificial Sequence
  Description of Artificial Sequence: Synthetic oligonucleotide
agcagccgcucucggagga

SEQ ID NO: 3023408 - RNA, 19 nt, Artificial Sequence
  Description of Artificial Sequence: Synthetic oligonucleotide
guuugcuagcaaaguagaa

SEQ ID NO: 3023409 - RNA, 19 nt, Artificial Sequence
  Description of Artificial Sequence: Synthetic oligonucleotide
agggccuugagcaccaguu

SEQ ID NO: 3023410 - RNA, 19 nt, Artificial Sequence
  Description of Artificial Sequence: Synthetic oligonucleotide
gcaaaguagaaaagggcaa

SEQ ID NO: 3023411 - RNA, 19 nt, Artificial Sequence
  Description of Artificial Sequence: Synthetic oligonucleotide
guccaagacggcgggcagg

SEQ ID NO: 3023412 - RNA, 19 nt, Artificial Sequence
  Description of Artificial Sequence: Synthetic oligonucleotide
auccagacaagcagccgcu

SEQ ID NO: 3023413 - RNA, 19 nt, Artificial Sequence
  Description of Artificial Sequence: Synthetic oligonucleotide
agucacugucugccaggug

SEQ ID NO: 3023414 - RNA, 19 nt, Artificial Sequence
  Description of Artificial Sequence: Synthetic oligonucleotide
cggaagaagaccucucgug

SEQ ID NO: 3023415 - RNA, 19 nt, Artificial Sequence
  Description of Artificial Sequence: Synthetic oligonucleotide
accucucguggggaguuag

SEQ ID NO: 3023416 - RNA, 19 nt, Artificial Sequence
  Description of Artificial Sequence: Synthetic oligonucleotide
uugguacacagggccuuga

SEQ ID NO: 3023417 - RNA, 19 nt, Artificial Sequence
  Description of Artificial Sequence: Synthetic oligonucleotide
ugaggacuccagccacaaa

SEQ ID NO: 3023418 - RNA, 19 nt, Artificial Sequence
  Description of Artificial Sequence: Synthetic oligonucleotide
uagcucgggcacuuuggua

SEQ ID NO: 3023419 - RNA, 19 nt, Artificial Sequence
  Description of Artificial Sequence: Synthetic oligonucleotide
agccacaaagauagucacu

SEQ ID NO: 3023420 - RNA, 19 nt, Artificial Sequence
  Description of Artificial Sequence: Synthetic oligonucleotide
ccuggucuuggauccagac

SEQ ID NO: 3023421 - RNA, 19 nt, Artificial Sequence
  Description of Artificial Sequence: Synthetic oligonucleotide
caucccagccacccugguc

SEQ ID NO: 3023422 - RNA, 19 nt, Artificial Sequence
  Description of Artificial Sequence: Synthetic oligonucleotide
gccacccuggucuuggauc

SEQ ID NO: 3023423 - RNA, 19 nt, Artificial Sequence
  Description of Artificial Sequence: Synthetic oligonucleotide
ccaugaugguucugauuag

SEQ ID NO: 3023424 - RNA, 19 nt, Artificial Sequence
  Description of Artificial Sequence: Synthetic oligonucleotide
ggccaucccagccacccug

SEQ ID NO: 3023425 - RNA, 19 nt, Artificial Sequence
  Description of Artificial Sequence: Synthetic oligonucleotide
agugaggacuccagccaca

SEQ ID NO: 3023426 - RNA, 19 nt, Artificial Sequence
  Description of Artificial Sequence: Synthetic oligonucleotide
gcaccaguuugcuagcaaa

SEQ ID NO: 3023427 - RNA, 19 nt, Artificial Sequence
  Description of Artificial Sequence: Synthetic oligonucleotide
cagcccaugaugguucuga

SEQ ID NO: 3023428 - RNA, 19 nt, Artificial Sequence
  Description of Artificial Sequence: Synthetic oligonucleotide
agcccaugaugguucugau

SEQ ID NO: 3023429 - RNA, 19 nt, Artificial Sequence
  Description of Artificial Sequence: Synthetic oligonucleotide
guccagcccaugaugguuc

SEQ ID NO: 3023430 - RNA, 19 nt, Artificial Sequence
  Description of Artificial Sequence: Synthetic oligonucleotide
acccggccccaguugaagu

SEQ ID NO: 3023431 - RNA, 19 nt, Artificial Sequence
  Description of Artificial Sequence: Synthetic oligonucleotide
ucgggcacuuugguacaca

SEQ ID NO: 3023432 - RNA, 19 nt, Artificial Sequence
  Description of Artificial Sequence: Synthetic oligonucleotide
acccuggucuuggauccag

SEQ ID NO: 3023433 - RNA, 19 nt, Artificial Sequence
  Description of Artificial Sequence: Synthetic oligonucleotide
aucgugagugaggcaguga

SEQ ID NO: 3023434 - RNA, 19 nt, Artificial Sequence
  Description of Artificial Sequence: Synthetic oligonucleotide
cccaguugaaguugccauc

SEQ ID NO: 3023435 - RNA, 19 nt, Artificial Sequence
  Description of Artificial Sequence: Synthetic oligonucleotide
augucagcugccacacgga

SEQ ID NO: 3023436 - RNA, 19 nt, Artificial Sequence
  Description of Artificial Sequence: Synthetic oligonucleotide
cgugagugaggcagugagg

SEQ ID NO: 3023437 - RNA, 19 nt, Artificial Sequence
  Description of Artificial Sequence: Synthetic oligonucleotide
gggcacuuugguacacagg

SEQ ID NO: 3023438 - RNA, 19 nt, Artificial Sequence
  Description of Artificial Sequence: Synthetic oligonucleotide
ggaggaaguccagugucca

SEQ ID NO: 3023439 - RNA, 19 nt, Artificial Sequence
  Description of Artificial Sequence: Synthetic oligonucleotide
cacugucugccaggugggg

SEQ ID NO: 3023440 - RNA, 19 nt, Artificial Sequence
  Description of Artificial Sequence: Synthetic oligonucleotide
cuugagcaccaguuugcua

SEQ ID NO: 3023441 - RNA, 19 nt, Artificial Sequence
  Description of Artificial Sequence: Synthetic oligonucleotide
ggcgggcagggccucagcc

SEQ ID NO: 3023442 - RNA, 19 nt, Artificial Sequence
  Description of Artificial Sequence: Synthetic oligonucleotide
ggggucccgaaguaugaga

SEQ ID NO: 3023443 - RNA, 19 nt, Artificial Sequence
  Description of Artificial Sequence: Synthetic oligonucleotide
cacagggccuugagcacca

SEQ ID NO: 3023444 - RNA, 19 nt, Artificial Sequence
  Description of Artificial Sequence: Synthetic oligonucleotide
uccagacaagcagccgcuc

SEQ ID NO: 3023445 - RNA, 19 nt, Artificial Sequence
  Description of Artificial Sequence: Synthetic oligonucleotide
ggucuuggauccagacaag

SEQ ID NO: 3023446 - RNA, 19 nt, Artificial Sequence
  Description of Artificial Sequence: Synthetic oligonucleotide
ccaguuugcuagcaaagua

SEQ ID NO: 3023447 - RNA, 19 nt, Artificial Sequence
  Description of Artificial Sequence: Synthetic oligonucleotide
ggggaguuaguauccacau

SEQ ID NO: 3023448 - RNA, 19 nt, Artificial Sequence
  Description of Artificial Sequence: Synthetic oligonucleotide
agaccucucguggggaguu

SEQ ID NO: 3023449 - RNA, 19 nt, Artificial Sequence
  Description of Artificial Sequence: Synthetic oligonucleotide
agccacccuggucuuggau

SEQ ID NO: 3023450 - RNA, 19 nt, Artificial Sequence
  Description of Artificial Sequence: Synthetic oligonucleotide
gcacuuugguacacagggc

SEQ ID NO: 3023451 - RNA, 19 nt, Artificial Sequence
  Description of Artificial Sequence: Synthetic oligonucleotide
cagccgcucucggaggaag

SEQ ID NO: 3023452 - RNA, 19 nt, Artificial Sequence
  Description of Artificial Sequence: Synthetic oligonucleotide
cacacggaagaagaccucu

SEQ ID NO: 3023453 - RNA, 19 nt, Artificial Sequence
  Description of Artificial Sequence: Synthetic oligonucleotide
ccagccacccuggucuugg

SEQ ID NO: 3023454 - RNA, 19 nt, Artificial Sequence
  Description of Artificial Sequence: Synthetic oligonucleotide
cucggaggaaguccagugu

SEQ ID NO: 3023455 - RNA, 19 nt, Artificial Sequence
  Description of Artificial Sequence: Synthetic oligonucleotide
guucuuccagaucgugagu

SEQ ID NO: 3023456 - RNA, 19 nt, Artificial Sequence
  Description of Artificial Sequence: Synthetic oligonucleotide
cucucguggggaguuagua

SEQ ID NO: 3023457 - RNA, 19 nt, Artificial Sequence
  Description of Artificial Sequence: Synthetic oligonucleotide
gagcaccaguuugcuagca

SEQ ID NO: 3023458 - RNA, 19 nt, Artificial Sequence
  Description of Artificial Sequence: Synthetic oligonucleotide
gugaggacuccagccacaa

SEQ ID NO: 3023459 - RNA, 19 nt, Artificial Sequence
  Description of Artificial Sequence: Synthetic oligonucleotide
gcgggcagggccucagccc

SEQ ID NO: 3023460 - RNA, 19 nt, Artificial Sequence
  Description of Artificial Sequence: Synthetic oligonucleotide
aggccaucccagccacccu

SEQ ID NO: 3023461 - RNA, 19 nt, Artificial Sequence
  Description of Artificial Sequence: Synthetic oligonucleotide
aguccaguguccagcccau

SEQ ID NO: 3023462 - RNA, 19 nt, Artificial Sequence
  Description of Artificial Sequence: Synthetic oligonucleotide
ugauuagcucgggcacuuu

SEQ ID NO: 3023463 - RNA, 19 nt, Artificial Sequence
  Description of Artificial Sequence: Synthetic oligonucleotide
ggcaacaacccggccccag

SEQ ID NO: 3023464 - RNA, 19 nt, Artificial Sequence
  Description of Artificial Sequence: Synthetic oligonucleotide
cgggcacuuugguacacag

SEQ ID NO: 3023465 - RNA, 19 nt, Artificial Sequence
  Description of Artificial Sequence: Synthetic oligonucleotide
ccucugcagcuccauguug

SEQ ID NO: 3023466 - RNA, 19 nt, Artificial Sequence
  Description of Artificial Sequence: Synthetic oligonucleotide
cucgggcacuuugguacac

SEQ ID NO: 3023467 - RNA, 19 nt, Artificial Sequence
  Description of Artificial Sequence: Synthetic oligonucleotide
gccaucccagccacccugg

SEQ ID NO: 3023468 - RNA, 19 nt, Artificial Sequence
  Description of Artificial Sequence: Synthetic oligonucleotide
gcccauguucuuccagauc

SEQ ID NO: 3023469 - RNA, 19 nt, Artificial Sequence
  Description of Artificial Sequence: Synthetic oligonucleotide
cuuugguacacagggccuu

SEQ ID NO: 3023470 - RNA, 19 nt, Artificial Sequence
  Description of Artificial Sequence: Synthetic oligonucleotide
ccgcucucggaggaagucc

SEQ ID NO: 3023471 - RNA, 19 nt, Artificial Sequence
  Description of Artificial Sequence: Synthetic oligonucleotide
acggcgggcagggccucag

SEQ ID NO: 3023472 - RNA, 19 nt, Artificial Sequence
  Description of Artificial Sequence: Synthetic oligonucleotide
ccacacggaagaagaccuc

SEQ ID NO: 3023473 - RNA, 19 nt, Artificial Sequence
  Description of Artificial Sequence: Synthetic oligonucleotide
gcucgggcacuuugguaca

SEQ ID NO: 3023474 - RNA, 19 nt, Artificial Sequence
  Description of Artificial Sequence: Synthetic oligonucleotide
gugaggcagugaggacucc

SEQ ID NO: 3023475 - RNA, 19 nt, Artificial Sequence
  Description of Artificial Sequence: Synthetic oligonucleotide
agacggcgggcagggccuc

SEQ ID NO: 3023476 - RNA, 19 nt, Artificial Sequence
  Description of Artificial Sequence: Synthetic oligonucleotide
ucccagccacccuggucuu

SEQ ID NO: 3023477 - RNA, 19 nt, Artificial Sequence
  Description of Artificial Sequence: Synthetic oligonucleotide
ggacuccagccacaaagau

SEQ ID NO: 3023478 - RNA, 19 nt, Artificial Sequence
  Description of Artificial Sequence: Synthetic oligonucleotide
agccgcucucggaggaagu

SEQ ID NO: 3023479 - RNA, 19 nt, Artificial Sequence
  Description of Artificial Sequence: Synthetic oligonucleotide
gccccaguugaaguugcca

SEQ ID NO: 3023480 - RNA, 19 nt, Artificial Sequence
  Description of Artificial Sequence: Synthetic oligonucleotide
guccaguguccagcccaug

SEQ ID NO: 3023481 - RNA, 19 nt, Artificial Sequence
  Description of Artificial Sequence: Synthetic oligonucleotide
caacccggccccaguugaa

SEQ ID NO: 3023482 - RNA, 19 nt, Artificial Sequence
  Description of Artificial Sequence: Synthetic oligonucleotide
cucucggaggaaguccagu

SEQ ID NO: 3023483 - RNA, 19 nt, Artificial Sequence
  Description of Artificial Sequence: Synthetic oligonucleotide
gcucucggaggaaguccag

SEQ ID NO: 3023484 - RNA, 19 nt, Artificial Sequence
  Description of Artificial Sequence: Synthetic oligonucleotide
cugauuagcucgggcacuu

SEQ ID NO: 3023485 - RNA, 19 nt, Artificial Sequence
  Description of Artificial Sequence: Synthetic oligonucleotide
gcaacaacccggccccagu

SEQ ID NO: 3023486 - RNA, 19 nt, Artificial Sequence
  Description of Artificial Sequence: Synthetic oligonucleotide
ccggccccaguugaaguug

SEQ ID NO: 3023487 - RNA, 19 nt, Artificial Sequence
  Description of Artificial Sequence: Synthetic oligonucleotide
cgcucucggaggaagucca

SEQ ID NO: 3023488 - RNA, 19 nt, Artificial Sequence
  Description of Artificial Sequence: Synthetic oligonucleotide
gggaguuaguauccacauu

SEQ ID NO: 3023489 - RNA, 19 nt, Artificial Sequence
  Description of Artificial Sequence: Synthetic oligonucleotide
caacaacccggccccaguu

SEQ ID NO: 3023490 - RNA, 19 nt, Artificial Sequence
  Description of Artificial Sequence: Synthetic oligonucleotide
ccacauuagcaaucauccu

SEQ ID NO: 3023491 - RNA, 19 nt, Artificial Sequence
  Description of Artificial Sequence: Synthetic oligonucleotide
ccccaguugaaguugccau

SEQ ID NO: 3023492 - RNA, 19 nt, Artificial Sequence
  Description of Artificial Sequence: Synthetic oligonucleotide
cggccccaguugaaguugc

SEQ ID NO: 3023493 - RNA, 19 nt, Artificial Sequence
  Description of Artificial Sequence: Synthetic oligonucleotide
gccgcucucggaggaaguc

SEQ ID NO: 3023494 - RNA, 19 nt, Artificial Sequence
  Description of Artificial Sequence: Synthetic oligonucleotide
ggccccaguugaaguugcc

SEQ ID NO: 3023495 - RNA, 19 nt, Artificial Sequence
  Description of Artificial Sequence: Synthetic oligonucleotide
ccagaucgugagugaggca

SEQ ID NO: 3023496 - RNA, 19 nt, Artificial Sequence
  Description of Artificial Sequence: Synthetic oligonucleotide
ccacaaagauagucacugu

SEQ ID NO: 3023497 - RNA, 19 nt, Artificial Sequence
  Description of Artificial Sequence: Synthetic oligonucleotide
ccagacaagcagccgcucu

SEQ ID NO: 3023498 - RNA, 19 nt, Artificial Sequence
  Description of Artificial Sequence: Synthetic oligonucleotide
ggaggccaucccagccacc

SEQ ID NO: 3023499 - RNA, 19 nt, Artificial Sequence
  Description of Artificial Sequence: Synthetic oligonucleotide
cagggccuugagcaccagu

SEQ ID NO: 3023500 - RNA, 19 nt, Artificial Sequence
  Description of Artificial Sequence: Synthetic oligonucleotide
gaccucucguggggaguua

SEQ ID NO: 3023501 - RNA, 19 nt, Artificial Sequence
  Description of Artificial Sequence: Synthetic oligonucleotide
ccauguucuuccagaucgu

SEQ ID NO: 3023502 - RNA, 19 nt, Artificial Sequence
  Description of Artificial Sequence: Synthetic oligonucleotide
gacggcgggcagggccuca

SEQ ID NO: 3023503 - RNA, 19 nt, Artificial Sequence
  Description of Artificial Sequence: Synthetic oligonucleotide
gggccuugagcaccaguuu

SEQ ID NO: 3023504 - RNA, 19 nt, Artificial Sequence
  Description of Artificial Sequence: Synthetic oligonucleotide
cacccuggucuuggaucca

SEQ ID NO: 3023505 - RNA, 19 nt, Artificial Sequence
  Description of Artificial Sequence: Synthetic oligonucleotide
ccaguguccagcccaugau

SEQ ID NO: 3023506 - RNA, 19 nt, Artificial Sequence
  Description of Artificial Sequence: Synthetic oligonucleotide
ccuugagcaccaguuugcu

SEQ ID NO: 3023507 - RNA, 19 nt, Artificial Sequence
  Description of Artificial Sequence: Synthetic oligonucleotide
cagggccucagcccauguu

SEQ ID NO: 3023508 - RNA, 19 nt, Artificial Sequence
  Description of Artificial Sequence: Synthetic oligonucleotide
ccagcccaugaugguucug

SEQ ID NO: 3023509 - RNA, 19 nt, Artificial Sequence
  Description of Artificial Sequence: Synthetic oligonucleotide
cguggggaguuaguaucca

SEQ ID NO: 3023510 - RNA, 19 nt, Artificial Sequence
  Description of Artificial Sequence: Synthetic oligonucleotide
ccaagacggcgggcagggc

SEQ ID NO: 3023511 - RNA, 19 nt, Artificial Sequence
  Description of Artificial Sequence: Synthetic oligonucleotide
ccucucguggggaguuagu

SEQ ID NO: 3023512 - RNA, 19 nt, Artificial Sequence
  Description of Artificial Sequence: Synthetic oligonucleotide
gcagccgcucucggaggaa

SEQ ID NO: 3023513 - RNA, 19 nt, Artificial Sequence
  Description of Artificial Sequence: Synthetic oligonucleotide
gggcaacaacccggcccca

SEQ ID NO: 3023514 - RNA, 19 nt, Artificial Sequence
  Description of Artificial Sequence: Synthetic oligonucleotide
cccggccccaguugaaguu

SEQ ID NO: 3023515 - RNA, 19 nt, Artificial Sequence
  Description of Artificial Sequence: Synthetic oligonucleotide
ccaucccagccacccuggu

SEQ ID NO: 3023516 - RNA, 19 nt, Artificial Sequence
  Description of Artificial Sequence: Synthetic oligonucleotide
gaugaaaucccucacaccc

SEQ ID NO: 3023517 - RNA, 19 nt, Artificial Sequence
  Description of Artificial Sequence: Synthetic oligonucleotide
acuuagguuguucagagac

SEQ ID NO: 3023518 - RNA, 19 nt, Artificial Sequence
  Description of Artificial Sequence: Synthetic oligonucleotide
aaagggagaccacauuucc

SEQ ID NO: 3023519 - RNA, 19 nt, Artificial Sequence
  Description of Artificial Sequence: Synthetic oligonucleotide
agcaguaagcuuuauaagg

SEQ ID NO: 3023520 - RNA, 19 nt, Artificial Sequence
  Description of Artificial Sequence: Synthetic oligonucleotide
uauucaguccaguagagcc

SEQ ID NO: 3023521 - RNA, 19 nt, Artificial Sequence
  Description of Artificial Sequence: Synthetic oligonucleotide
cucaucagcacuuagguug

SEQ ID NO: 3023522 - RNA, 19 nt, Artificial Sequence
  Description of Artificial Sequence: Synthetic oligonucleotide
auuguauucaguccaguag

SEQ ID NO: 3023523 - RNA, 19 nt, Artificial Sequence
  Description of Artificial Sequence: Synthetic oligonucleotide
agggagaccacauuucccc

SEQ ID NO: 3023524 - RNA, 19 nt, Artificial Sequence
  Description of Artificial Sequence: Synthetic oligonucleotide
uauaaggaaagggagacca

SEQ ID NO: 3023525 - RNA, 19 nt, Artificial Sequence
  Description of Artificial Sequence: Synthetic oligonucleotide
aagcuuuauaaggaaaggg

SEQ ID NO: 3023526 - RNA, 19 nt, Artificial Sequence
  Description of Artificial Sequence: Synthetic oligonucleotide
acauucgcggauuagaaug

SEQ ID NO: 3023527 - RNA, 19 nt, Artificial Sequence
  Description of Artificial Sequence: Synthetic oligonucleotide
uuuauaaggaaagggagac

SEQ ID NO: 3023528 - RNA, 19 nt, Artificial Sequence
  Description of Artificial Sequence: Synthetic oligonucleotide
aaaucccucacacccuggc

SEQ ID NO: 3023529 - RNA, 19 nt, Artificial Sequence
  Description of Artificial Sequence: Synthetic oligonucleotide
gauuagaaugggaaggccg

SEQ ID NO: 3023530 - RNA, 19 nt, Artificial Sequence
  Description of Artificial Sequence: Synthetic oligonucleotide
cuucucuugaccgaaagcg

SEQ ID NO: 3023531 - RNA, 19 nt, Artificial Sequence
  Description of Artificial Sequence: Synthetic oligonucleotide
ucugguuaccucaucagca

SEQ ID NO: 3023532 - RNA, 19 nt, Artificial Sequence
  Description of Artificial Sequence: Synthetic oligonucleotide
acacauucuucucuugacc

SEQ ID NO: 3023533 - RNA, 19 nt, Artificial Sequence
  Description of Artificial Sequence: Synthetic oligonucleotide
ugaccgaaagcguagcggg

SEQ ID NO: 3023534 - RNA, 19 nt, Artificial Sequence
  Description of Artificial Sequence: Synthetic oligonucleotide
uucagagacacauucuucu

SEQ ID NO: 3023535 - RNA, 19 nt, Artificial Sequence
  Description of Artificial Sequence: Synthetic oligonucleotide
auccacguaacguugcugg

SEQ ID NO: 3023536 - RNA, 19 nt, Artificial Sequence
  Description of Artificial Sequence: Synthetic oligonucleotide
accacauuuccccacauug

SEQ ID NO: 3023537 - RNA, 19 nt, Artificial Sequence
  Description of Artificial Sequence: Synthetic oligonucleotide
aacguugcuggaugaaauc

SEQ ID NO: 3023538 - RNA, 19 nt, Artificial Sequence
  Description of Artificial Sequence: Synthetic oligonucleotide
uaagcuuuauaaggaaagg

SEQ ID NO: 3023539 - RNA, 19 nt, Artificial Sequence
  Description of Artificial Sequence: Synthetic oligonucleotide
guaagcuuuauaaggaaag

SEQ ID NO: 3023540 - RNA, 19 nt, Artificial Sequence
  Description of Artificial Sequence: Synthetic oligonucleotide
uaccucaucagcacuuagg

SEQ ID NO: 3023541 - RNA, 19 nt, Artificial Sequence
  Description of Artificial Sequence: Synthetic oligonucleotide
ucuucagauccacguaacg

SEQ ID NO: 3023542 - RNA, 19 nt, Artificial Sequence
  Description of Artificial Sequence: Synthetic oligonucleotide
guggaugcgaaucucacgc

SEQ ID NO: 3023543 - RNA, 19 nt, Artificial Sequence
  Description of Artificial Sequence: Synthetic oligonucleotide
gaucacucguucuagcagc

SEQ ID NO: 3023544 - RNA, 19 nt, Artificial Sequence
  Description of Artificial Sequence: Synthetic oligonucleotide
acauaaguggaugcgaauc

SEQ ID NO: 3023545 - RNA, 19 nt, Artificial Sequence
  Description of Artificial Sequence: Synthetic oligonucleotide
acucaucacauucuccagg

SEQ ID NO: 3023546 - RNA, 19 nt, Artificial Sequence
  Description of Artificial Sequence: Synthetic oligonucleotide
auuagaaugggaaggccgg

SEQ ID NO: 3023547 - RNA, 19 nt, Artificial Sequence
  Description of Artificial Sequence: Synthetic oligonucleotide
ucagauccacguaacguug

SEQ ID NO: 3023548 - RNA, 19 nt, Artificial Sequence
  Description of Artificial Sequence: Synthetic oligonucleotide
uuagguuguucagagacac

SEQ ID NO: 3023549 - RNA, 19 nt, Artificial Sequence
  Description of Artificial Sequence: Synthetic oligonucleotide
ugaaaucccucacacccug

SEQ ID NO: 3023550 - RNA, 19 nt, Artificial Sequence
  Description of Artificial Sequence: Synthetic oligonucleotide
ucagcacuuagguuguuca

SEQ ID NO: 3023551 - RNA, 19 nt, Artificial Sequence
  Description of Artificial Sequence: Synthetic oligonucleotide
cuugguacccgaucacucg

SEQ ID NO: 3023552 - RNA, 19 nt, Artificial Sequence
  Description of Artificial Sequence: Synthetic oligonucleotide
cuuuauaaggaaagggaga

SEQ ID NO: 3023553 - RNA, 19 nt, Artificial Sequence
  Description of Artificial Sequence: Synthetic oligonucleotide
acguugcuggaugaaaucc

SEQ ID NO: 3023554 - RNA, 19 nt, Artificial Sequence
  Description of Artificial Sequence: Synthetic oligonucleotide
uugaccgaaagcguagcgg

SEQ ID NO: 3023555 - RNA, 19 nt, Artificial Sequence
  Description of Artificial Sequence: Synthetic oligonucleotide
ugcaccuccgaacauucgc

SEQ ID NO: 3023556 - RNA, 19 nt, Artificial Sequence
  Description of Artificial Sequence: Synthetic oligonucleotide
ucuucucuugaccgaaagc

SEQ ID NO: 3023557 - RNA, 19 nt, Artificial Sequence
  Description of Artificial Sequence: Synthetic oligonucleotide
uucuucucuugaccgaaag

SEQ ID NO: 3023558 - RNA, 19 nt, Artificial Sequence
  Description of Artificial Sequence: Synthetic oligonucleotide
aagggagaccacauuuccc

SEQ ID NO: 3023559 - RNA, 19 nt, Artificial Sequence
  Description of Artificial Sequence: Synthetic oligonucleotide
caugcuuugccacucauca

SEQ ID NO: 3023560 - RNA, 19 nt, Artificial Sequence
  Description of Artificial Sequence: Synthetic oligonucleotide
aguggaugcgaaucucacg

SEQ ID NO: 3023561 - RNA, 19 nt, Artificial Sequence
  Description of Artificial Sequence: Synthetic oligonucleotide
augcgaaucucacgcagcg

SEQ ID NO: 3023562 - RNA, 19 nt, Artificial Sequence
  Description of Artificial Sequence: Synthetic oligonucleotide
agcuuuauaaggaaaggga

SEQ ID NO: 3023563 - RNA, 19 nt, Artificial Sequence
  Description of Artificial Sequence: Synthetic oligonucleotide
aaucucacgcagcgccagc

SEQ ID NO: 3023564 - RNA, 19 nt, Artificial Sequence
  Description of Artificial Sequence: Synthetic oligonucleotide
cauucgcggauuagaaugg

SEQ ID NO: 3023565 - RNA, 19 nt, Artificial Sequence
  Description of Artificial Sequence: Synthetic oligonucleotide
accucaucagcacuuaggu

SEQ ID NO: 3023566 - RNA, 19 nt, Artificial Sequence
  Description of Artificial Sequence: Synthetic oligonucleotide
ugcuggaugaaaucccuca

SEQ ID NO: 3023567 - RNA, 19 nt, Artificial Sequence
  Description of Artificial Sequence: Synthetic oligonucleotide
ugacauaaguggaugcgaa

SEQ ID NO: 3023568 - RNA, 19 nt, Artificial Sequence
  Description of Artificial Sequence: Synthetic oligonucleotide
uucagauccacguaacguu

SEQ ID NO: 3023569 - RNA, 19 nt, Artificial Sequence
  Description of Artificial Sequence: Synthetic oligonucleotide
ugcucacaguccuucaugc

SEQ ID NO: 3023570 - RNA, 19 nt, Artificial Sequence
  Description of Artificial Sequence: Synthetic oligonucleotide
ugcucuugcucacaguccu

SEQ ID NO: 3023571 - RNA, 19 nt, Artificial Sequence
  Description of Artificial Sequence: Synthetic oligonucleotide
uaaggaaagggagaccaca

SEQ ID NO: 3023572 - RNA, 19 nt, Artificial Sequence
  Description of Artificial Sequence: Synthetic oligonucleotide
auuuccccacauuguauuc

SEQ ID NO: 3023573 - RNA, 19 nt, Artificial Sequence
  Description of Artificial Sequence: Synthetic oligonucleotide
gacacauucuucucuugac

SEQ ID NO: 3023574 - RNA, 19 nt, Artificial Sequence
  Description of Artificial Sequence: Synthetic oligonucleotide
aacauucgcggauuagaau

SEQ ID NO: 3023575 - RNA, 19 nt, Artificial Sequence
  Description of Artificial Sequence: Synthetic oligonucleotide
uaacguugcuggaugaaau

SEQ ID NO: 3023576 - RNA, 19 nt, Artificial Sequence
  Description of Artificial Sequence: Synthetic oligonucleotide
ucgcggauuagaaugggaa

SEQ ID NO: 3023577 - RNA, 19 nt, Artificial Sequence
  Description of Artificial Sequence: Synthetic oligonucleotide
gcuuuauaaggaaagggag

SEQ ID NO: 3023578 - RNA, 19 nt, Artificial Sequence
  Description of Artificial Sequence: Synthetic oligonucleotide
uucucuugaccgaaagcgu

SEQ ID NO: 3023579 - RNA, 19 nt, Artificial Sequence
  Description of Artificial Sequence: Synthetic oligonucleotide
uugcucacaguccuucaug

SEQ ID NO: 3023580 - RNA, 19 nt, Artificial Sequence
  Description of Artificial Sequence: Synthetic oligonucleotide
agacacauucuucucuuga

SEQ ID NO: 3023581 - RNA, 19 nt, Artificial Sequence
  Description of Artificial Sequence: Synthetic oligonucleotide
ugggcugcaccuccgaaca

SEQ ID NO: 3023582 - RNA, 19 nt, Artificial Sequence
  Description of Artificial Sequence: Synthetic oligonucleotide
aguccuucaugcuuugcca

SEQ ID NO: 3023583 - RNA, 19 nt, Artificial Sequence
  Description of Artificial Sequence: Synthetic oligonucleotide
uuguucagagacacauucu

SEQ ID NO: 3023584 - RNA, 19 nt, Artificial Sequence
  Description of Artificial Sequence: Synthetic oligonucleotide
caguccuucaugcuuugcc

SEQ ID NO: 3023585 - RNA, 19 nt, Artificial Sequence
  Description of Artificial Sequence: Synthetic oligonucleotide
ucaucagcacuuagguugu

SEQ ID NO: 3023586 - RNA, 19 nt, Artificial Sequence
  Description of Artificial Sequence: Synthetic oligonucleotide
aagcguagcgggcccacag

SEQ ID NO: 3023587 - RNA, 19 nt, Artificial Sequence
  Description of Artificial Sequence: Synthetic oligonucleotide
uuccccacauuguauucag

SEQ ID NO: 3023588 - RNA, 19 nt, Artificial Sequence
  Description of Artificial Sequence: Synthetic oligonucleotide
uucuucagauccacguaac

SEQ ID NO: 3023589 - RNA, 19 nt, Artificial Sequence
  Description of Artificial Sequence: Synthetic oligonucleotide
ucucuugaccgaaagcgua

SEQ ID NO: 3023590 - RNA, 19 nt, Artificial Sequence
  Description of Artificial Sequence: Synthetic oligonucleotide
aucacauucuccagggcuc

SEQ ID NO: 3023591 - RNA, 19 nt, Artificial Sequence
  Description of Artificial Sequence: Synthetic oligonucleotide
cucugguuaccucaucagc

SEQ ID NO: 3023592 - RNA, 19 nt, Artificial Sequence
  Description of Artificial Sequence: Synthetic oligonucleotide
uuauaaggaaagggagacc

SEQ ID NO: 3023593 - RNA, 19 nt, Artificial Sequence
  Description of Artificial Sequence: Synthetic oligonucleotide
uagaaugggaaggccgggg

SEQ ID NO: 3023594 - RNA, 19 nt, Artificial Sequence
  Description of Artificial Sequence: Synthetic oligonucleotide
uuagaaugggaaggccggg

SEQ ID NO: 3023595 - RNA, 19 nt, Artificial Sequence
  Description of Artificial Sequence: Synthetic oligonucleotide
ucacgcagcgccagcuugg

SEQ ID NO: 3023596 - RNA, 19 nt, Artificial Sequence
  Description of Artificial Sequence: Synthetic oligonucleotide
aucccucacacccuggcug

SEQ ID NO: 3023597 - RNA, 19 nt, Artificial Sequence
  Description of Artificial Sequence: Synthetic oligonucleotide
uuaccucaucagcacuuag

SEQ ID NO: 3023598 - RNA, 19 nt, Artificial Sequence
  Description of Artificial Sequence: Synthetic oligonucleotide
cucuugaccgaaagcguag

SEQ ID NO: 3023599 - RNA, 19 nt, Artificial Sequence
  Description of Artificial Sequence: Synthetic oligonucleotide
cacauuguauucaguccag

SEQ ID NO: 3023600 - RNA, 19 nt, Artificial Sequence
  Description of Artificial Sequence: Synthetic oligonucleotide
cuugaccgaaagcguagcg

SEQ ID NO: 3023601 - RNA, 19 nt, Artificial Sequence
  Description of Artificial Sequence: Synthetic oligonucleotide
aaucccucacacccuggcu

SEQ ID NO: 3023602 - RNA, 19 nt, Artificial Sequence
  Description of Artificial Sequence: Synthetic oligonucleotide
cugguuaccucaucagcac

SEQ ID NO: 3023603 - RNA, 19 nt, Artificial Sequence
  Description of Artificial Sequence: Synthetic oligonucleotide
cacucguucuagcagcggc

SEQ ID NO: 3023604 - RNA, 19 nt, Artificial Sequence
  Description of Artificial Sequence: Synthetic oligonucleotide
ugcgcuuucuucagaucca

SEQ ID NO: 3023605 - RNA, 19 nt, Artificial Sequence
  Description of Artificial Sequence: Synthetic oligonucleotide
ucacaguccuucaugcuuu

SEQ ID NO: 3023606 - RNA, 19 nt, Artificial Sequence
  Description of Artificial Sequence: Synthetic oligonucleotide
gaaagggagaccacauuuc

SEQ ID NO: 3023607 - RNA, 19 nt, Artificial Sequence
  Description of Artificial Sequence: Synthetic oligonucleotide
ucagagacacauucuucuc

SEQ ID NO: 3023608 - RNA, 19 nt, Artificial Sequence
  Description of Artificial Sequence: Synthetic oligonucleotide
cgaacgcugacauaagugg

SEQ ID NO: 3023609 - RNA, 19 nt, Artificial Sequence
  Description of Artificial Sequence: Synthetic oligonucleotide
uugguacccgaucacucgu

SEQ ID NO: 3023610 - RNA, 19 nt, Artificial Sequence
  Description of Artificial Sequence: Synthetic oligonucleotide
gcggauuagaaugggaagg

SEQ ID NO: 3023611 - RNA, 19 nt, Artificial Sequence
  Description of Artificial Sequence: Synthetic oligonucleotide
gaugcgaaucucacgcagc

SEQ ID NO: 3023612 - RNA, 19 nt, Artificial Sequence
  Description of Artificial Sequence: Synthetic oligonucleotide
cacguaacguugcuggaug

SEQ ID NO: 3023613 - RNA, 19 nt, Artificial Sequence
  Description of Artificial Sequence: Synthetic oligonucleotide
uucaguccaguagagccca

SEQ ID NO: 3023614 - RNA, 19 nt, Artificial Sequence
  Description of Artificial Sequence: Synthetic oligonucleotide
aguagagcccagguucugg

SEQ ID NO: 3023615 - RNA, 19 nt, Artificial Sequence
  Description of Artificial Sequence: Synthetic oligonucleotide
augcuuugccacucaucac

SEQ ID NO: 3023616 - RNA, 19 nt, Artificial Sequence
  Description of Artificial Sequence: Synthetic oligonucleotide
aguccaguagagcccaggu

SEQ ID NO: 3023617 - RNA, 19 nt, Artificial Sequence
  Description of Artificial Sequence: Synthetic oligonucleotide
agaaugggaaggccggggu

SEQ ID NO: 3023618 - RNA, 19 nt, Artificial Sequence
  Description of Artificial Sequence: Synthetic oligonucleotide
uuuccccacauuguauuca

SEQ ID NO: 3023619 - RNA, 19 nt, Artificial Sequence
  Description of Artificial Sequence: Synthetic oligonucleotide
acauucuucucuugaccga

SEQ ID NO: 3023620 - RNA, 19 nt, Artificial Sequence
  Description of Artificial Sequence: Synthetic oligonucleotide
agcguagcgggcccacagc

SEQ ID NO: 3023621 - RNA, 19 nt, Artificial Sequence
  Description of Artificial Sequence: Synthetic oligonucleotide
uucgcggauuagaauggga

SEQ ID NO: 3023622 - RNA, 19 nt, Artificial Sequence
  Description of Artificial Sequence: Synthetic oligonucleotide
uugccacucaucacauucu

SEQ ID NO: 3023623 - RNA, 19 nt, Artificial Sequence
  Description of Artificial Sequence: Synthetic oligonucleotide
gcacuuagguuguucagag

SEQ ID NO: 3023624 - RNA, 19 nt, Artificial Sequence
  Description of Artificial Sequence: Synthetic oligonucleotide
ucaugcuuugccacucauc

SEQ ID NO: 3023625 - RNA, 19 nt, Artificial Sequence
  Description of Artificial Sequence: Synthetic oligonucleotide
auaaggaaagggagaccac

SEQ ID NO: 3023626 - RNA, 19 nt, Artificial Sequence
  Description of Artificial Sequence: Synthetic oligonucleotide
guagcgggcccacagcuug

SEQ ID NO: 3023627 - RNA, 19 nt, Artificial Sequence
  Description of Artificial Sequence: Synthetic oligonucleotide
ucaucacauucuccagggc

SEQ ID NO: 3023628 - RNA, 19 nt, Artificial Sequence
  Description of Artificial Sequence: Synthetic oligonucleotide
gcgaaucucacgcagcgcc

SEQ ID NO: 3023629 - RNA, 19 nt, Artificial Sequence
  Description of Artificial Sequence: Synthetic oligonucleotide
aguaagcuuuauaaggaaa

SEQ ID NO: 3023630 - RNA, 19 nt, Artificial Sequence
  Description of Artificial Sequence: Synthetic oligonucleotide
ggugcucuugcucacaguc

SEQ ID NO: 3023631 - RNA, 19 nt, Artificial Sequence
  Description of Artificial Sequence: Synthetic oligonucleotide
agcacuuagguuguucaga

SEQ ID NO: 3023632 - RNA, 19 nt, Artificial Sequence
  Description of Artificial Sequence: Synthetic oligonucleotide
ugguuaccucaucagcacu

SEQ ID NO: 3023633 - RNA, 19 nt, Artificial Sequence
  Description of Artificial Sequence: Synthetic oligonucleotide
aucagcacuuagguuguuc

SEQ ID NO: 3023634 - RNA, 19 nt, Artificial Sequence
  Description of Artificial Sequence: Synthetic oligonucleotide
gcugacauaaguggaugcg

SEQ ID NO: 3023635 - RNA, 19 nt, Artificial Sequence
  Description of Artificial Sequence: Synthetic oligonucleotide
uugggcugcaccuccgaac

SEQ ID NO: 3023636 - RNA, 19 nt, Artificial Sequence
  Description of Artificial Sequence: Synthetic oligonucleotide
aacgcugacauaaguggau

SEQ ID NO: 3023637 - RNA, 19 nt, Artificial Sequence
  Description of Artificial Sequence: Synthetic oligonucleotide
cagauccacguaacguugc

SEQ ID NO: 3023638 - RNA, 19 nt, Artificial Sequence
  Description of Artificial Sequence: Synthetic oligonucleotide
aaggaaagggagaccacau

SEQ ID NO: 3023639 - RNA, 19 nt, Artificial Sequence
  Description of Artificial Sequence: Synthetic oligonucleotide
uccuucaugcuuugccacu

SEQ ID NO: 3023640 - RNA, 19 nt, Artificial Sequence
  Description of Artificial Sequence: Synthetic oligonucleotide
gagacacauucuucucuug

SEQ ID NO: 3023641 - RNA, 19 nt, Artificial Sequence
  Description of Artificial Sequence: Synthetic oligonucleotide
cuuagguuguucagagaca

SEQ ID NO: 3023642 - RNA, 19 nt, Artificial Sequence
  Description of Artificial Sequence: Synthetic oligonucleotide
ucuugaccgaaagcguagc

SEQ ID NO: 3023643 - RNA, 19 nt, Artificial Sequence
  Description of Artificial Sequence: Synthetic oligonucleotide
uacccgaucacucguucua

SEQ ID NO: 3023644 - RNA, 19 nt, Artificial Sequence
  Description of Artificial Sequence: Synthetic oligonucleotide
ggaugcgaaucucacgcag

SEQ ID NO: 3023645 - RNA, 19 nt, Artificial Sequence
  Description of Artificial Sequence: Synthetic oligonucleotide
acauucuccagggcucugg

SEQ ID NO: 3023646 - RNA, 19 nt, Artificial Sequence
  Description of Artificial Sequence: Synthetic oligonucleotide
gaacauucgcggauuagaa

SEQ ID NO: 3023647 - RNA, 19 nt, Artificial Sequence
  Description of Artificial Sequence: Synthetic oligonucleotide
cccacauuguauucagucc

SEQ ID NO: 3023648 - RNA, 19 nt, Artificial Sequence
  Description of Artificial Sequence: Synthetic oligonucleotide
caccuccgaacauucgcgg

SEQ ID NO: 3023649 - RNA, 19 nt, Artificial Sequence
  Description of Artificial Sequence: Synthetic oligonucleotide
ucccucacacccuggcugc

SEQ ID NO: 3023650 - RNA, 19 nt, Artificial Sequence
  Description of Artificial Sequence: Synthetic oligonucleotide
cauuguauucaguccagua

SEQ ID NO: 3023651 - RNA, 19 nt, Artificial Sequence
  Description of Artificial Sequence: Synthetic oligonucleotide
agauccacguaacguugcu

SEQ ID NO: 3023652 - RNA, 19 nt, Artificial Sequence
  Description of Artificial Sequence: Synthetic oligonucleotide
gagaccacauuuccccaca

SEQ ID NO: 3023653 - RNA, 19 nt, Artificial Sequence
  Description of Artificial Sequence: Synthetic oligonucleotide
auucgcggauuagaauggg

SEQ ID NO: 3023654 - RNA, 19 nt, Artificial Sequence
  Description of Artificial Sequence: Synthetic oligonucleotide
ggaugaaaucccucacacc

SEQ ID NO: 3023655 - RNA, 19 nt, Artificial Sequence
  Description of Artificial Sequence: Synthetic oligonucleotide
gaaaucccucacacccugg

SEQ ID NO: 3023656 - RNA, 19 nt, Artificial Sequence
  Description of Artificial Sequence: Synthetic oligonucleotide
gaacgcugacauaagugga

SEQ ID NO: 3023657 - RNA, 19 nt, Artificial Sequence
  Description of Artificial Sequence: Synthetic oligonucleotide
uucaugcuuugccacucau

SEQ ID NO: 3023658 - RNA, 19 nt, Artificial Sequence
  Description of Artificial Sequence: Synthetic oligonucleotide
uggaugcgaaucucacgca

SEQ ID NO: 3023659 - RNA, 19 nt, Artificial Sequence
  Description of Artificial Sequence: Synthetic oligonucleotide
cagcacuuagguuguucag

SEQ ID NO: 3023660 - RNA, 19 nt, Artificial Sequence
  Description of Artificial Sequence: Synthetic oligonucleotide
aucacucguucuagcagcg

SEQ ID NO: 3023661 - RNA, 19 nt, Artificial Sequence
  Description of Artificial Sequence: Synthetic oligonucleotide
uccacguaacguugcugga

SEQ ID NO: 3023662 - RNA, 19 nt, Artificial Sequence
  Description of Artificial Sequence: Synthetic oligonucleotide
cuggaugaaaucccucaca

SEQ ID NO: 3023663 - RNA, 19 nt, Artificial Sequence
  Description of Artificial Sequence: Synthetic oligonucleotide
gcaguaagcuuuauaagga

SEQ ID NO: 3023664 - RNA, 19 nt, Artificial Sequence
  Description of Artificial Sequence: Synthetic oligonucleotide
gauccacguaacguugcug

SEQ ID NO: 3023665 - RNA, 19 nt, Artificial Sequence
  Description of Artificial Sequence: Synthetic oligonucleotide
aaggccggggugcgcuuuc

SEQ ID NO: 3023666 - RNA, 19 nt, Artificial Sequence
  Description of Artificial Sequence: Synthetic oligonucleotide
acagcuugggcugcaccuc

SEQ ID NO: 3023667 - RNA, 19 nt, Artificial Sequence
  Description of Artificial Sequence: Synthetic oligonucleotide
caucacauucuccagggcu

SEQ ID NO: 3023668 - RNA, 19 nt, Artificial Sequence
  Description of Artificial Sequence: Synthetic oligonucleotide
cauaaguggaugcgaaucu

SEQ ID NO: 3023669 - RNA, 19 nt, Artificial Sequence
  Description of Artificial Sequence: Synthetic oligonucleotide
acaguccuucaugcuuugc

SEQ ID NO: 3023670 - RNA, 19 nt, Artificial Sequence
  Description of Artificial Sequence: Synthetic oligonucleotide
uugcuggaugaaaucccuc

SEQ ID NO: 3023671 - RNA, 19 nt, Artificial Sequence
  Description of Artificial Sequence: Synthetic oligonucleotide
caguaagcuuuauaaggaa

SEQ ID NO: 3023672 - RNA, 19 nt, Artificial Sequence
  Description of Artificial Sequence: Synthetic oligonucleotide
cucacgcagcgccagcuug

SEQ ID NO: 3023673 - RNA, 19 nt, Artificial Sequence
  Description of Artificial Sequence: Synthetic oligonucleotide
ucacucguucuagcagcgg

SEQ ID NO: 3023674 - RNA, 19 nt, Artificial Sequence
  Description of Artificial Sequence: Synthetic oligonucleotide
cugacauaaguggaugcga

SEQ ID NO: 3023675 - RNA, 19 nt, Artificial Sequence
  Description of Artificial Sequence: Synthetic oligonucleotide
acguaacguugcuggauga

SEQ ID NO: 3023676 - RNA, 19 nt, Artificial Sequence
  Description of Artificial Sequence: Synthetic oligonucleotide
gguucuggugcucuugcuc

SEQ ID NO: 3023677 - RNA, 19 nt, Artificial Sequence
  Description of Artificial Sequence: Synthetic oligonucleotide
gcucugguuaccucaucag

SEQ ID NO: 3023678 - RNA, 19 nt, Artificial Sequence
  Description of Artificial Sequence: Synthetic oligonucleotide
ccccacauuguauucaguc

SEQ ID NO: 3023679 - RNA, 19 nt, Artificial Sequence
  Description of Artificial Sequence: Synthetic oligonucleotide
acgcugacauaaguggaug

SEQ ID NO: 3023680 - RNA, 19 nt, Artificial Sequence
  Description of Artificial Sequence: Synthetic oligonucleotide
ccacauuguauucagucca

SEQ ID NO: 3023681 - RNA, 19 nt, Artificial Sequence
  Description of Artificial Sequence: Synthetic oligonucleotide
ggauuagaaugggaaggcc

SEQ ID NO: 3023682 - RNA, 19 nt, Artificial Sequence
  Description of Artificial Sequence: Synthetic oligonucleotide
accuccgaacauucgcgga

SEQ ID NO: 3023683 - RNA, 19 nt, Artificial Sequence
  Description of Artificial Sequence: Synthetic oligonucleotide
guaacguugcuggaugaaa

SEQ ID NO: 3023684 - RNA, 19 nt, Artificial Sequence
  Description of Artificial Sequence: Synthetic oligonucleotide
uagcgggcccacagcuugg

SEQ ID NO: 3023685 - RNA, 19 nt, Artificial Sequence
  Description of Artificial Sequence: Synthetic oligonucleotide
acauuguauucaguccagu

SEQ ID NO: 3023686 - RNA, 19 nt, Artificial Sequence
  Description of Artificial Sequence: Synthetic oligonucleotide
augaaaucccucacacccu

SEQ ID NO: 3023687 - RNA, 19 nt, Artificial Sequence
  Description of Artificial Sequence: Synthetic oligonucleotide
uucuggugcucuugcucac

SEQ ID NO: 3023688 - RNA, 19 nt, Artificial Sequence
  Description of Artificial Sequence: Synthetic oligonucleotide
agcuugguacccgaucacu

SEQ ID NO: 3023689 - RNA, 19 nt, Artificial Sequence
  Description of Artificial Sequence: Synthetic oligonucleotide
cucuugcucacaguccuuc

SEQ ID NO: 3023690 - RNA, 19 nt, Artificial Sequence
  Description of Artificial Sequence: Synthetic oligonucleotide
uccgaacauucgcggauua

SEQ ID NO: 3023691 - RNA, 19 nt, Artificial Sequence
  Description of Artificial Sequence: Synthetic oligonucleotide
cuucagauccacguaacgu

SEQ ID NO: 3023692 - RNA, 19 nt, Artificial Sequence
  Description of Artificial Sequence: Synthetic oligonucleotide
ugcgaaucucacgcagcgc

SEQ ID NO: 3023693 - RNA, 19 nt, Artificial Sequence
  Description of Artificial Sequence: Synthetic oligonucleotide
gcgaacgcugacauaagug

SEQ ID NO: 3023694 - RNA, 19 nt, Artificial Sequence
  Description of Artificial Sequence: Synthetic oligonucleotide
ggcucugguuaccucauca

SEQ ID NO: 3023695 - RNA, 19 nt, Artificial Sequence
  Description of Artificial Sequence: Synthetic oligonucleotide
acauuuccccacauuguau

SEQ ID NO: 3023696 - RNA, 19 nt, Artificial Sequence
  Description of Artificial Sequence: Synthetic oligonucleotide
ggaaagggagaccacauuu

SEQ ID NO: 3023697 - RNA, 19 nt, Artificial Sequence
  Description of Artificial Sequence: Synthetic oligonucleotide
cguugcuggaugaaauccc

SEQ ID NO: 3023698 - RNA, 19 nt, Artificial Sequence
  Description of Artificial Sequence: Synthetic oligonucleotide
cugcaccuccgaacauucg

SEQ ID NO: 3023699 - RNA, 19 nt, Artificial Sequence
  Description of Artificial Sequence: Synthetic oligonucleotide
gcaccuccgaacauucgcg

SEQ ID NO: 3023700 - RNA, 19 nt, Artificial Sequence
  Description of Artificial Sequence: Synthetic oligonucleotide
gaccgaaagcguagcgggc

SEQ ID NO: 3023701 - RNA, 19 nt, Artificial Sequence
  Description of Artificial Sequence: Synthetic oligonucleotide
gacauaaguggaugcgaau

SEQ ID NO: 3023702 - RNA, 19 nt, Artificial Sequence
  Description of Artificial Sequence: Synthetic oligonucleotide
ucaguccaguagagcccag

SEQ ID NO: 3023703 - RNA, 19 nt, Artificial Sequence
  Description of Artificial Sequence: Synthetic oligonucleotide
ucuggugcucuugcucaca

SEQ ID NO: 3023704 - RNA, 19 nt, Artificial Sequence
  Description of Artificial Sequence: Synthetic oligonucleotide
caguccaguagagcccagg

SEQ ID NO: 3023705 - RNA, 19 nt, Artificial Sequence
  Description of Artificial Sequence: Synthetic oligonucleotide
agcgccagcuugguacccg

SEQ ID NO: 3023706 - RNA, 19 nt, Artificial Sequence
  Description of Artificial Sequence: Synthetic oligonucleotide
cauucuucucuugaccgaa

SEQ ID NO: 3023707 - RNA, 19 nt, Artificial Sequence
  Description of Artificial Sequence: Synthetic oligonucleotide
acccgaucacucguucuag

SEQ ID NO: 3023708 - RNA, 19 nt, Artificial Sequence
  Description of Artificial Sequence: Synthetic oligonucleotide
uccccacauuguauucagu

SEQ ID NO: 3023709 - RNA, 19 nt, Artificial Sequence
  Description of Artificial Sequence: Synthetic oligonucleotide
gugcucuugcucacagucc

SEQ ID NO: 3023710 - RNA, 19 nt, Artificial Sequence
  Description of Artificial Sequence: Synthetic oligonucleotide
ggagaccacauuuccccac

SEQ ID NO: 3023711 - RNA, 19 nt, Artificial Sequence
  Description of Artificial Sequence: Synthetic oligonucleotide
gaaagcguagcgggcccac

SEQ ID NO: 3023712 - RNA, 19 nt, Artificial Sequence
  Description of Artificial Sequence: Synthetic oligonucleotide
uccagggcucugguuaccu

SEQ ID NO: 3023713 - RNA, 19 nt, Artificial Sequence
  Description of Artificial Sequence: Synthetic oligonucleotide
acacccuggcugcccggcg

SEQ ID NO: 3023714 - RNA, 19 nt, Artificial Sequence
  Description of Artificial Sequence: Synthetic oligonucleotide
cacaguccuucaugcuuug

SEQ ID NO: 3023715 - RNA, 19 nt, Artificial Sequence
  Description of Artificial Sequence: Synthetic oligonucleotide
aaagcguagcgggcccaca

SEQ ID NO: 3023716 - RNA, 19 nt, Artificial Sequence
  Description of Artificial Sequence: Synthetic oligonucleotide
aucucacgcagcgccagcu

SEQ ID NO: 3023717 - RNA, 19 nt, Artificial Sequence
  Description of Artificial Sequence: Synthetic oligonucleotide
augggaaggccggggugcg

SEQ ID NO: 3023718 - RNA, 19 nt, Artificial Sequence
  Description of Artificial Sequence: Synthetic oligonucleotide
cuggcugcccggcgaacgc

SEQ ID NO: 3023719 - RNA, 19 nt, Artificial Sequence
  Description of Artificial Sequence: Synthetic oligonucleotide
cgcagcgccagcuugguac

SEQ ID NO: 3023720 - RNA, 19 nt, Artificial Sequence
  Description of Artificial Sequence: Synthetic oligonucleotide
cagagacacauucuucucu

SEQ ID NO: 3023721 - RNA, 19 nt, Artificial Sequence
  Description of Artificial Sequence: Synthetic oligonucleotide
cauuuccccacauuguauu

SEQ ID NO: 3023722 - RNA, 19 nt, Artificial Sequence
  Description of Artificial Sequence: Synthetic oligonucleotide
ugguacccgaucacucguu

SEQ ID NO: 3023723 - RNA, 19 nt, Artificial Sequence
  Description of Artificial Sequence: Synthetic oligonucleotide
agaccacauuuccccacau

SEQ ID NO: 3023724 - RNA, 19 nt, Artificial Sequence
  Description of Artificial Sequence: Synthetic oligonucleotide
cagcuugguacccgaucac

SEQ ID NO: 3023725 - RNA, 19 nt, Artificial Sequence
  Description of Artificial Sequence: Synthetic oligonucleotide
cacagcuugggcugcaccu

SEQ ID NO: 3023726 - RNA, 19 nt, Artificial Sequence
  Description of Artificial Sequence: Synthetic oligonucleotide
uggugcucuugcucacagu

SEQ ID NO: 3023727 - RNA, 19 nt, Artificial Sequence
  Description of Artificial Sequence: Synthetic oligonucleotide
cgaucacucguucuagcag

SEQ ID NO: 3023728 - RNA, 19 nt, Artificial Sequence
  Description of Artificial Sequence: Synthetic oligonucleotide
cgcggauuagaaugggaag

SEQ ID NO: 3023729 - RNA, 19 nt, Artificial Sequence
  Description of Artificial Sequence: Synthetic oligonucleotide
ccagcuugguacccgauca

SEQ ID NO: 3023730 - RNA, 19 nt, Artificial Sequence
  Description of Artificial Sequence: Synthetic oligonucleotide
guagagcccagguucuggu

SEQ ID NO: 3023731 - RNA, 19 nt, Artificial Sequence
  Description of Artificial Sequence: Synthetic oligonucleotide
gguacccgaucacucguuc

SEQ ID NO: 3023732 - RNA, 19 nt, Artificial Sequence
  Description of Artificial Sequence: Synthetic oligonucleotide
cuucaugcuuugccacuca

SEQ ID NO: 3023733 - RNA, 19 nt, Artificial Sequence
  Description of Artificial Sequence: Synthetic oligonucleotide
cacuuagguuguucagaga

SEQ ID NO: 3023734 - RNA, 19 nt, Artificial Sequence
  Description of Artificial Sequence: Synthetic oligonucleotide
cggauuagaaugggaaggc

SEQ ID NO: 3023735 - RNA, 19 nt, Artificial Sequence
  Description of Artificial Sequence: Synthetic oligonucleotide
ugcccggcgaacgcugaca

SEQ ID NO: 3023736 - RNA, 19 nt, Artificial Sequence
  Description of Artificial Sequence: Synthetic oligonucleotide
guuaccucaucagcacuua

SEQ ID NO: 3023737 - RNA, 19 nt, Artificial Sequence
  Description of Artificial Sequence: Synthetic oligonucleotide
gcagcgccagcuugguacc

SEQ ID NO: 3023738 - RNA, 19 nt, Artificial Sequence
  Description of Artificial Sequence: Synthetic oligonucleotide
cgcugacauaaguggaugc

SEQ ID NO: 3023739 - RNA, 19 nt, Artificial Sequence
  Description of Artificial Sequence: Synthetic oligonucleotide
agcgggcccacagcuuggg

SEQ ID NO: 3023740 - RNA, 19 nt, Artificial Sequence
  Description of Artificial Sequence: Synthetic oligonucleotide
gcuugguacccgaucacuc

SEQ ID NO: 3023741 - RNA, 19 nt, Artificial Sequence
  Description of Artificial Sequence: Synthetic oligonucleotide
cacacccuggcugcccggc

SEQ ID NO: 3023742 - RNA, 19 nt, Artificial Sequence
  Description of Artificial Sequence: Synthetic oligonucleotide
gccacucaucacauucucc

SEQ ID NO: 3023743 - RNA, 19 nt, Artificial Sequence
  Description of Artificial Sequence: Synthetic oligonucleotide
guacccgaucacucguucu

SEQ ID NO: 3023744 - RNA, 19 nt, Artificial Sequence
  Description of Artificial Sequence: Synthetic oligonucleotide
cccgaucacucguucuagc

SEQ ID NO: 3023745 - RNA, 19 nt, Artificial Sequence
  Description of Artificial Sequence: Synthetic oligonucleotide
ccgaucacucguucuagca

SEQ ID NO: 3023746 - RNA, 19 nt, Artificial Sequence
  Description of Artificial Sequence: Synthetic oligonucleotide
auucuucucuugaccgaaa

SEQ ID NO: 3023747 - RNA, 19 nt, Artificial Sequence
  Description of Artificial Sequence: Synthetic oligonucleotide
ggugcgcuuucuucagauc

SEQ ID NO: 3023748 - RNA, 19 nt, Artificial Sequence
  Description of Artificial Sequence: Synthetic oligonucleotide
gggagaccacauuucccca

SEQ ID NO: 3023749 - RNA, 19 nt, Artificial Sequence
  Description of Artificial Sequence: Synthetic oligonucleotide
gccagcuugguacccgauc

SEQ ID NO: 3023750 - RNA, 19 nt, Artificial Sequence
  Description of Artificial Sequence: Synthetic oligonucleotide
cuugcucacaguccuucau

SEQ ID NO: 3023751 - RNA, 19 nt, Artificial Sequence
  Description of Artificial Sequence: Synthetic oligonucleotide
caguagagcccagguucug

SEQ ID NO: 3023752 - RNA, 19 nt, Artificial Sequence
  Description of Artificial Sequence: Synthetic oligonucleotide
cuugggcugcaccuccgaa

SEQ ID NO: 3023753 - RNA, 19 nt, Artificial Sequence
  Description of Artificial Sequence: Synthetic oligonucleotide
gcugcaccuccgaacauuc

SEQ ID NO: 3023754 - RNA, 19 nt, Artificial Sequence
  Description of Artificial Sequence: Synthetic oligonucleotide
ccgaaagcguagcgggccc

SEQ ID NO: 3023755 - RNA, 19 nt, Artificial Sequence
  Description of Artificial Sequence: Synthetic oligonucleotide
ccuucaugcuuugccacuc

SEQ ID NO: 3023756 - RNA, 19 nt, Artificial Sequence
  Description of Artificial Sequence: Synthetic oligonucleotide
cgaacauucgcggauuaga

SEQ ID NO: 3023757 - RNA, 19 nt, Artificial Sequence
  Description of Artificial Sequence: Synthetic oligonucleotide
ccggcgaacgcugacauaa

SEQ ID NO: 3023758 - RNA, 19 nt, Artificial Sequence
  Description of Artificial Sequence: Synthetic oligonucleotide
agcccagguucuggugcuc

SEQ ID NO: 3023759 - RNA, 19 nt, Artificial Sequence
  Description of Artificial Sequence: Synthetic oligonucleotide
gaccacauuuccccacauu

SEQ ID NO: 3023760 - RNA, 19 nt, Artificial Sequence
  Description of Artificial Sequence: Synthetic oligonucleotide
cauucuccagggcucuggu

SEQ ID NO: 3023761 - RNA, 19 nt, Artificial Sequence
  Description of Artificial Sequence: Synthetic oligonucleotide
ccuggcugcccggcgaacg

SEQ ID NO: 3023762 - RNA, 19 nt, Artificial Sequence
  Description of Artificial Sequence: Synthetic oligonucleotide
uggcugcccggcgaacgcu

SEQ ID NO: 3023763 - RNA, 19 nt, Artificial Sequence
  Description of Artificial Sequence: Synthetic oligonucleotide
ccacagcuugggcugcacc

SEQ ID NO: 3023764 - RNA, 19 nt, Artificial Sequence
  Description of Artificial Sequence: Synthetic oligonucleotide
ggcgaacgcugacauaagu

SEQ ID NO: 3023765 - RNA, 19 nt, Artificial Sequence
  Description of Artificial Sequence: Synthetic oligonucleotide
ugggaaggccggggugcgc

SEQ ID NO: 3023766 - RNA, 19 nt, Artificial Sequence
  Description of Artificial Sequence: Synthetic oligonucleotide
gccggggugcgcuuucuuc

SEQ ID NO: 3023767 - RNA, 19 nt, Artificial Sequence
  Description of Artificial Sequence: Synthetic oligonucleotide
acccuggcugcccggcgaa

SEQ ID NO: 3023768 - RNA, 19 nt, Artificial Sequence
  Description of Artificial Sequence: Synthetic oligonucleotide
ccgaacauucgcggauuag

SEQ ID NO: 3023769 - RNA, 19 nt, Artificial Sequence
  Description of Artificial Sequence: Synthetic oligonucleotide
cugcccggcgaacgcugac

SEQ ID NO: 3023770 - RNA, 19 nt, Artificial Sequence
  Description of Artificial Sequence: Synthetic oligonucleotide
ccagguucuggugcucuug

SEQ ID NO: 3023771 - RNA, 19 nt, Artificial Sequence
  Description of Artificial Sequence: Synthetic oligonucleotide
ccggggugcgcuuucuuca

SEQ ID NO: 3023772 - RNA, 19 nt, Artificial Sequence
  Description of Artificial Sequence: Synthetic oligonucleotide
guccaguagagcccagguu

SEQ ID NO: 3023773 - RNA, 19 nt, Artificial Sequence
  Description of Artificial Sequence: Synthetic oligonucleotide
gcgcuuucuucagauccac

SEQ ID NO: 3023774 - RNA, 19 nt, Artificial Sequence
  Description of Artificial Sequence: Synthetic oligonucleotide
cacccuggcugcccggcga

SEQ ID NO: 3023775 - RNA, 19 nt, Artificial Sequence
  Description of Artificial Sequence: Synthetic oligonucleotide
ccacauuuccccacauugu

SEQ ID NO: 3023776 - RNA, 19 nt, Artificial Sequence
  Description of Artificial Sequence: Synthetic oligonucleotide
gguuaccucaucagcacuu

SEQ ID NO: 3023777 - RNA, 19 nt, Artificial Sequence
  Description of Artificial Sequence: Synthetic oligonucleotide
cagcgccagcuugguaccc

SEQ ID NO: 3023778 - RNA, 19 nt, Artificial Sequence
  Description of Artificial Sequence: Synthetic oligonucleotide
gggugcgcuuucuucagau

SEQ ID NO: 3023779 - RNA, 19 nt, Artificial Sequence
  Description of Artificial Sequence: Synthetic oligonucleotide
gcuugggcugcaccuccga

SEQ ID NO: 3023780 - RNA, 19 nt, Artificial Sequence
  Description of Artificial Sequence: Synthetic oligonucleotide
gcguagcgggcccacagcu

SEQ ID NO: 3023781 - RNA, 19 nt, Artificial Sequence
  Description of Artificial Sequence: Synthetic oligonucleotide
ccaguagagcccagguucu

SEQ ID NO: 3023782 - RNA, 19 nt, Artificial Sequence
  Description of Artificial Sequence: Synthetic oligonucleotide
cggggugcgcuuucuucag

SEQ ID NO: 3023783 - RNA, 19 nt, Artificial Sequence
  Description of Artificial Sequence: Synthetic oligonucleotide
ggggugcgcuuucuucaga

SEQ ID NO: 3023784 - RNA, 19 nt, Artificial Sequence
  Description of Artificial Sequence: Synthetic oligonucleotide
cgaaucucacgcagcgcca

SEQ ID NO: 3023785 - RNA, 19 nt, Artificial Sequence
  Description of Artificial Sequence: Synthetic oligonucleotide
acgcagcgccagcuuggua

SEQ ID NO: 3023786 - RNA, 19 nt, Artificial Sequence
  Description of Artificial Sequence: Synthetic oligonucleotide
gcuuugccacucaucacau

SEQ ID NO: 3023787 - RNA, 19 nt, Artificial Sequence
  Description of Artificial Sequence: Synthetic oligonucleotide
gcgccagcuugguacccga

SEQ ID NO: 3023788 - RNA, 19 nt, Artificial Sequence
  Description of Artificial Sequence: Synthetic oligonucleotide
gggcucugguuaccucauc

SEQ ID NO: 3023789 - RNA, 19 nt, Artificial Sequence
  Description of Artificial Sequence: Synthetic oligonucleotide
aggccggggugcgcuuucu

SEQ ID NO: 3023790 - RNA, 19 nt, Artificial Sequence
  Description of Artificial Sequence: Synthetic oligonucleotide
gcgggcccacagcuugggc

SEQ ID NO: 3023791 - RNA, 19 nt, Artificial Sequence
  Description of Artificial Sequence: Synthetic oligonucleotide
ccuccgaacauucgcggau

SEQ ID NO: 3023792 - RNA, 19 nt, Artificial Sequence
  Description of Artificial Sequence: Synthetic oligonucleotide
cggcgaacgcugacauaag

SEQ ID NO: 3023793 - RNA, 19 nt, Artificial Sequence
  Description of Artificial Sequence: Synthetic oligonucleotide
ggcccacagcuugggcugc

SEQ ID NO: 3023794 - RNA, 19 nt, Artificial Sequence
  Description of Artificial Sequence: Synthetic oligonucleotide
cuccgaacauucgcggauu

SEQ ID NO: 3023795 - RNA, 19 nt, Artificial Sequence
  Description of Artificial Sequence: Synthetic oligonucleotide
gaaggccggggugcgcuuu

SEQ ID NO: 3023796 - RNA, 19 nt, Artificial Sequence
  Description of Artificial Sequence: Synthetic oligonucleotide
cguaacguugcuggaugaa

SEQ ID NO: 3023797 - RNA, 19 nt, Artificial Sequence
  Description of Artificial Sequence: Synthetic oligonucleotide
ggcugcaccuccgaacauu

SEQ ID NO: 3023798 - RNA, 19 nt, Artificial Sequence
  Description of Artificial Sequence: Synthetic oligonucleotide
ccucaucagcacuuagguu

SEQ ID NO: 3023799 - RNA, 19 nt, Artificial Sequence
  Description of Artificial Sequence: Synthetic oligonucleotide
cccucacacccuggcugcc

SEQ ID NO: 3023800 - RNA, 19 nt, Artificial Sequence
  Description of Artificial Sequence: Synthetic oligonucleotide
gcccggcgaacgcugacau

SEQ ID NO: 3023801 - RNA, 19 nt, Artificial Sequence
  Description of Artificial Sequence: Synthetic oligonucleotide
cacgcagcgccagcuuggu

SEQ ID NO: 3023802 - RNA, 19 nt, Artificial Sequence
  Description of Artificial Sequence: Synthetic oligonucleotide
cccacagcuugggcugcac

SEQ ID NO: 3023803 - RNA, 19 nt, Artificial Sequence
  Description of Artificial Sequence: Synthetic oligonucleotide
cgggcccacagcuugggcu

SEQ ID NO: 3023804 - RNA, 19 nt, Artificial Sequence
  Description of Artificial Sequence: Synthetic oligonucleotide
gcugcccggcgaacgcuga

SEQ ID NO: 3023805 - RNA, 19 nt, Artificial Sequence
  Description of Artificial Sequence: Synthetic oligonucleotide
ccacguaacguugcuggau

SEQ ID NO: 3023806 - RNA, 19 nt, Artificial Sequence
  Description of Artificial Sequence: Synthetic oligonucleotide
gcccagguucuggugcucu

SEQ ID NO: 3023807 - RNA, 19 nt, Artificial Sequence
  Description of Artificial Sequence: Synthetic oligonucleotide
cgaaagcguagcgggccca

SEQ ID NO: 3023808 - RNA, 19 nt, Artificial Sequence
  Description of Artificial Sequence: Synthetic oligonucleotide
gcccacagcuugggcugca

SEQ ID NO: 3023809 - RNA, 19 nt, Artificial Sequence
  Description of Artificial Sequence: Synthetic oligonucleotide
ggaaggccggggugcgcuu

SEQ ID NO: 3023810 - RNA, 19 nt, Artificial Sequence
  Description of Artificial Sequence: Synthetic oligonucleotide
gggcugcaccuccgaacau

SEQ ID NO: 3023811 - RNA, 19 nt, Artificial Sequence
  Description of Artificial Sequence: Synthetic oligonucleotide
cccuggcugcccggcgaac

SEQ ID NO: 3023812 - RNA, 19 nt, Artificial Sequence
  Description of Artificial Sequence: Synthetic oligonucleotide
cccggcgaacgcugacaua

SEQ ID NO: 3023813 - RNA, 19 nt, Artificial Sequence
  Description of Artificial Sequence: Synthetic oligonucleotide
ggccggggugcgcuuucuu

SEQ ID NO: 3023814 - RNA, 19 nt, Artificial Sequence
  Description of Artificial Sequence: Synthetic oligonucleotide
cguagcgggcccacagcuu

SEQ ID NO: 3023815 - RNA, 19 nt, Artificial Sequence
  Description of Artificial Sequence: Synthetic oligonucleotide
cgccagcuugguacccgau

SEQ ID NO: 3023816 - RNA, 19 nt, Artificial Sequence
  Description of Artificial Sequence: Synthetic oligonucleotide
aauaguagcguucaagcca

SEQ ID NO: 3023817 - RNA, 19 nt, Artificial Sequence
  Description of Artificial Sequence: Synthetic oligonucleotide
aacugguuacccuggaagc

SEQ ID NO: 3023818 - RNA, 19 nt, Artificial Sequence
  Description of Artificial Sequence: Synthetic oligonucleotide
acauuaaugcagucaagcc

SEQ ID NO: 3023819 - RNA, 19 nt, Artificial Sequence
  Description of Artificial Sequence: Synthetic oligonucleotide
aaggcugaggugcaauucc

SEQ ID NO: 3023820 - RNA, 19 nt, Artificial Sequence
  Description of Artificial Sequence: Synthetic oligonucleotide
uggucagacauuaaugcag

SEQ ID NO: 3023821 - RNA, 19 nt, Artificial Sequence
  Description of Artificial Sequence: Synthetic oligonucleotide
agcuaugccaaccaucacg

SEQ ID NO: 3023822 - RNA, 19 nt, Artificial Sequence
  Description of Artificial Sequence: Synthetic oligonucleotide
gucacgggcauccagaggg

SEQ ID NO: 3023823 - RNA, 19 nt, Artificial Sequence
  Description of Artificial Sequence: Synthetic oligonucleotide
acggcuggaguccagacgc

SEQ ID NO: 3023824 - RNA, 19 nt, Artificial Sequence
  Description of Artificial Sequence: Synthetic oligonucleotide
auuaaugcagucaagccag

SEQ ID NO: 3023825 - RNA, 19 nt, Artificial Sequence
  Description of Artificial Sequence: Synthetic oligonucleotide
uauuccugugaccaguugc

SEQ ID NO: 3023826 - RNA, 19 nt, Artificial Sequence
  Description of Artificial Sequence: Synthetic oligonucleotide
ugagcaaugggccagcuau

SEQ ID NO: 3023827 - RNA, 19 nt, Artificial Sequence
  Description of Artificial Sequence: Synthetic oligonucleotide
gacauuaaugcagucaagc

SEQ ID NO: 3023828 - RNA, 19 nt, Artificial Sequence
  Description of Artificial Sequence: Synthetic oligonucleotide
gaacugguuacccuggaag

SEQ ID NO: 3023829 - RNA, 19 nt, Artificial Sequence
  Description of Artificial Sequence: Synthetic oligonucleotide
gaaugcauaggaugggugc

SEQ ID NO: 3023830 - RNA, 19 nt, Artificial Sequence
  Description of Artificial Sequence: Synthetic oligonucleotide
auaggaugggugcuauucc

SEQ ID NO: 3023831 - RNA, 19 nt, Artificial Sequence
  Description of Artificial Sequence: Synthetic oligonucleotide
gaaaaggcagcaucuacug

SEQ ID NO: 3023832 - RNA, 19 nt, Artificial Sequence
  Description of Artificial Sequence: Synthetic oligonucleotide
ugaggugcaauucccaaca

SEQ ID NO: 3023833 - RNA, 19 nt, Artificial Sequence
  Description of Artificial Sequence: Synthetic oligonucleotide
aaaggcagcaucuacuguu

SEQ ID NO: 3023834 - RNA, 19 nt, Artificial Sequence
  Description of Artificial Sequence: Synthetic oligonucleotide
auuucugugucuaccaugg

SEQ ID NO: 3023835 - RNA, 19 nt, Artificial Sequence
  Description of Artificial Sequence: Synthetic oligonucleotide
uaugccaaccaucacggcu

SEQ ID NO: 3023836 - RNA, 19 nt, Artificial Sequence
  Description of Artificial Sequence: Synthetic oligonucleotide
agcaucuacuguugcaggc

SEQ ID NO: 3023837 - RNA, 19 nt, Artificial Sequence
  Description of Artificial Sequence: Synthetic oligonucleotide
caggaucugggcuacagcg

SEQ ID NO: 3023838 - RNA, 19 nt, Artificial Sequence
  Description of Artificial Sequence: Synthetic oligonucleotide
augcagucaagccaggauc

SEQ ID NO: 3023839 - RNA, 19 nt, Artificial Sequence
  Description of Artificial Sequence: Synthetic oligonucleotide
ucuaccauggccucugcca

SEQ ID NO: 3023840 - RNA, 19 nt, Artificial Sequence
  Description of Artificial Sequence: Synthetic oligonucleotide
guucaagccaccucaaggc

SEQ ID NO: 3023841 - RNA, 19 nt, Artificial Sequence
  Description of Artificial Sequence: Synthetic oligonucleotide
aaccaucacggcuggaguc

SEQ ID NO: 3023842 - RNA, 19 nt, Artificial Sequence
  Description of Artificial Sequence: Synthetic oligonucleotide
aaugcagucaagccaggau

SEQ ID NO: 3023843 - RNA, 19 nt, Artificial Sequence
  Description of Artificial Sequence: Synthetic oligonucleotide
aguagugggagccagugaa

SEQ ID NO: 3023844 - RNA, 19 nt, Artificial Sequence
  Description of Artificial Sequence: Synthetic oligonucleotide
caauaguagcguucaagcc

SEQ ID NO: 3023845 - RNA, 19 nt, Artificial Sequence
  Description of Artificial Sequence: Synthetic oligonucleotide
ucagacauuaaugcaguca

SEQ ID NO: 3023846 - RNA, 19 nt, Artificial Sequence
  Description of Artificial Sequence: Synthetic oligonucleotide
gaaguagucacgggcaucc

SEQ ID NO: 3023847 - RNA, 19 nt, Artificial Sequence
  Description of Artificial Sequence: Synthetic oligonucleotide
auaguagcguucaagccac

SEQ ID NO: 3023848 - RNA, 19 nt, Artificial Sequence
  Description of Artificial Sequence: Synthetic oligonucleotide
uagcguucaagccaccuca

SEQ ID NO: 3023849 - RNA, 19 nt, Artificial Sequence
  Description of Artificial Sequence: Synthetic oligonucleotide
cauuaaugcagucaagcca

SEQ ID NO: 3023850 - RNA, 19 nt, Artificial Sequence
  Description of Artificial Sequence: Synthetic oligonucleotide
uccagaggguaucugggag

SEQ ID NO: 3023851 - RNA, 19 nt, Artificial Sequence
  Description of Artificial Sequence: Synthetic oligonucleotide
gcaauaguagcguucaagc

SEQ ID NO: 3023852 - RNA, 19 nt, Artificial Sequence
  Description of Artificial Sequence: Synthetic oligonucleotide
agcgggaaugcauaggaug

SEQ ID NO: 3023853 - RNA, 19 nt, Artificial Sequence
  Description of Artificial Sequence: Synthetic oligonucleotide
cagggcaugaaguagucac

SEQ ID NO: 3023854 - RNA, 19 nt, Artificial Sequence
  Description of Artificial Sequence: Synthetic oligonucleotide
auagguggcaccacggugg

SEQ ID NO: 3023855 - RNA, 19 nt, Artificial Sequence
  Description of Artificial Sequence: Synthetic oligonucleotide
cagugaugagcaaugggcc

SEQ ID NO: 3023856 - RNA, 19 nt, Artificial Sequence
  Description of Artificial Sequence: Synthetic oligonucleotide
uacccuggaagcaauagua

SEQ ID NO: 3023857 - RNA, 19 nt, Artificial Sequence
  Description of Artificial Sequence: Synthetic oligonucleotide
agugggagccagugaaggc

SEQ ID NO: 3023858 - RNA, 19 nt, Artificial Sequence
  Description of Artificial Sequence: Synthetic oligonucleotide
ugcauuucugugucuacca

SEQ ID NO: 3023859 - RNA, 19 nt, Artificial Sequence
  Description of Artificial Sequence: Synthetic oligonucleotide
ugcagucaagccaggaucu

SEQ ID NO: 3023860 - RNA, 19 nt, Artificial Sequence
  Description of Artificial Sequence: Synthetic oligonucleotide
agcaauaguagcguucaag

SEQ ID NO: 3023861 - RNA, 19 nt, Artificial Sequence
  Description of Artificial Sequence: Synthetic oligonucleotide
aaugcauaggaugggugcu

SEQ ID NO: 3023862 - RNA, 19 nt, Artificial Sequence
  Description of Artificial Sequence: Synthetic oligonucleotide
aaaaggcagcaucuacugu

SEQ ID NO: 3023863 - RNA, 19 nt, Artificial Sequence
  Description of Artificial Sequence: Synthetic oligonucleotide
ugggcagugaugagcaaug

SEQ ID NO: 3023864 - RNA, 19 nt, Artificial Sequence
  Description of Artificial Sequence: Synthetic oligonucleotide
acagcgggaaugcauagga

SEQ ID NO: 3023865 - RNA, 19 nt, Artificial Sequence
  Description of Artificial Sequence: Synthetic oligonucleotide
ugaccaguugcauuucugu

SEQ ID NO: 3023866 - RNA, 19 nt, Artificial Sequence
  Description of Artificial Sequence: Synthetic oligonucleotide
gaagcaauaguagcguuca

SEQ ID NO: 3023867 - RNA, 19 nt, Artificial Sequence
  Description of Artificial Sequence: Synthetic oligonucleotide
ucaagccaggaucugggcu

SEQ ID NO: 3023868 - RNA, 19 nt, Artificial Sequence
  Description of Artificial Sequence: Synthetic oligonucleotide
agcaaugggccagcuaugc

SEQ ID NO: 3023869 - RNA, 19 nt, Artificial Sequence
  Description of Artificial Sequence: Synthetic oligonucleotide
ugugacuggguugaagcgc

SEQ ID NO: 3023870 - RNA, 19 nt, Artificial Sequence
  Description of Artificial Sequence: Synthetic oligonucleotide
cauuucugugucuaccaug

SEQ ID NO: 3023871 - RNA, 19 nt, Artificial Sequence
  Description of Artificial Sequence: Synthetic oligonucleotide
uuacccuggaagcaauagu

SEQ ID NO: 3023872 - RNA, 19 nt, Artificial Sequence
  Description of Artificial Sequence: Synthetic oligonucleotide
uacuguugcaggcccuggg

SEQ ID NO: 3023873 - RNA, 19 nt, Artificial Sequence
  Description of Artificial Sequence: Synthetic oligonucleotide
uuaaugcagucaagccagg

SEQ ID NO: 3023874 - RNA, 19 nt, Artificial Sequence
  Description of Artificial Sequence: Synthetic oligonucleotide
agugaugagcaaugggcca

SEQ ID NO: 3023875 - RNA, 19 nt, Artificial Sequence
  Description of Artificial Sequence: Synthetic oligonucleotide
cauaggaugggugcuauuc

SEQ ID NO: 3023876 - RNA, 19 nt, Artificial Sequence
  Description of Artificial Sequence: Synthetic oligonucleotide
accaucacggcuggagucc

SEQ ID NO: 3023877 - RNA, 19 nt, Artificial Sequence
  Description of Artificial Sequence: Synthetic oligonucleotide
aguagucacgggcauccag

SEQ ID NO: 3023878 - RNA, 19 nt, Artificial Sequence
  Description of Artificial Sequence: Synthetic oligonucleotide
uucaagccaccucaaggcu

SEQ ID NO: 3023879 - RNA, 19 nt, Artificial Sequence
  Description of Artificial Sequence: Synthetic oligonucleotide
gaccaguugcauuucugug

SEQ ID NO: 3023880 - RNA, 19 nt, Artificial Sequence
  Description of Artificial Sequence: Synthetic oligonucleotide
aucugggaggcaccucucc

SEQ ID NO: 3023881 - RNA, 19 nt, Artificial Sequence
  Description of Artificial Sequence: Synthetic oligonucleotide
uguugcaggcccugggcag

SEQ ID NO: 3023882 - RNA, 19 nt, Artificial Sequence
  Description of Artificial Sequence: Synthetic oligonucleotide
ucuccugugacuggguuga

SEQ ID NO: 3023883 - RNA, 19 nt, Artificial Sequence
  Description of Artificial Sequence: Synthetic oligonucleotide
cagacauuaaugcagucaa

SEQ ID NO: 3023884 - RNA, 19 nt, Artificial Sequence
  Description of Artificial Sequence: Synthetic oligonucleotide
cugugacuggguugaagcg

SEQ ID NO: 3023885 - RNA, 19 nt, Artificial Sequence
  Description of Artificial Sequence: Synthetic oligonucleotide
gcagugaugagcaaugggc

SEQ ID NO: 3023886 - RNA, 19 nt, Artificial Sequence
  Description of Artificial Sequence: Synthetic oligonucleotide
uugcauuucugugucuacc

SEQ ID NO: 3023887 - RNA, 19 nt, Artificial Sequence
  Description of Artificial Sequence: Synthetic oligonucleotide
uaggaugggugcuauuccu

SEQ ID NO: 3023888 - RNA, 19 nt, Artificial Sequence
  Description of Artificial Sequence: Synthetic oligonucleotide
uccagacgccaguaguggg

SEQ ID NO: 3023889 - RNA, 19 nt, Artificial Sequence
  Description of Artificial Sequence: Synthetic oligonucleotide
acuggguugaagcgcagga

SEQ ID NO: 3023890 - RNA, 19 nt, Artificial Sequence
  Description of Artificial Sequence: Synthetic oligonucleotide
gcuaugccaaccaucacgg

SEQ ID NO: 3023891 - RNA, 19 nt, Artificial Sequence
  Description of Artificial Sequence: Synthetic oligonucleotide
agucaagccaggaucuggg

SEQ ID NO: 3023892 - RNA, 19 nt, Artificial Sequence
  Description of Artificial Sequence: Synthetic oligonucleotide
caucuacuguugcaggccc

SEQ ID NO: 3023893 - RNA, 19 nt, Artificial Sequence
  Description of Artificial Sequence: Synthetic oligonucleotide
aggcauagguggcaccacg

SEQ ID NO: 3023894 - RNA, 19 nt, Artificial Sequence
  Description of Artificial Sequence: Synthetic oligonucleotide
caaugggccagcuaugcca

SEQ ID NO: 3023895 - RNA, 19 nt, Artificial Sequence
  Description of Artificial Sequence: Synthetic oligonucleotide
gacgccaguagugggagcc

SEQ ID NO: 3023896 - RNA, 19 nt, Artificial Sequence
  Description of Artificial Sequence: Synthetic oligonucleotide
ggaucugggcuacagcggg

SEQ ID NO: 3023897 - RNA, 19 nt, Artificial Sequence
  Description of Artificial Sequence: Synthetic oligonucleotide
ggugcuauuccugugacca

SEQ ID NO: 3023898 - RNA, 19 nt, Artificial Sequence
  Description of Artificial Sequence: Synthetic oligonucleotide
guuacccuggaagcaauag

SEQ ID NO: 3023899 - RNA, 19 nt, Artificial Sequence
  Description of Artificial Sequence: Synthetic oligonucleotide
uagucacgggcauccagag

SEQ ID NO: 3023900 - RNA, 19 nt, Artificial Sequence
  Description of Artificial Sequence: Synthetic oligonucleotide
ccugugacuggguugaagc

SEQ ID NO: 3023901 - RNA, 19 nt, Artificial Sequence
  Description of Artificial Sequence: Synthetic oligonucleotide
cauagguggcaccacggug

SEQ ID NO: 3023902 - RNA, 19 nt, Artificial Sequence
  Description of Artificial Sequence: Synthetic oligonucleotide
cuaccauggccucugccag

SEQ ID NO: 3023903 - RNA, 19 nt, Artificial Sequence
  Description of Artificial Sequence: Synthetic oligonucleotide
uugaagcgcaggaacuggu

SEQ ID NO: 3023904 - RNA, 19 nt, Artificial Sequence
  Description of Artificial Sequence: Synthetic oligonucleotide
gaggguaucugggaggcac

SEQ ID NO: 3023905 - RNA, 19 nt, Artificial Sequence
  Description of Artificial Sequence: Synthetic oligonucleotide
ugugaccaguugcauuucu

SEQ ID NO: 3023906 - RNA, 19 nt, Artificial Sequence
  Description of Artificial Sequence: Synthetic oligonucleotide
augggugcuauuccuguga

SEQ ID NO: 3023907 - RNA, 19 nt, Artificial Sequence
  Description of Artificial Sequence: Synthetic oligonucleotide
caggaacugguuacccugg

SEQ ID NO: 3023908 - RNA, 19 nt, Artificial Sequence
  Description of Artificial Sequence: Synthetic oligonucleotide
gaugggugcuauuccugug

SEQ ID NO: 3023909 - RNA, 19 nt, Artificial Sequence
  Description of Artificial Sequence: Synthetic oligonucleotide
ucugggaggcaccucuccu

SEQ ID NO: 3023910 - RNA, 19 nt, Artificial Sequence
  Description of Artificial Sequence: Synthetic oligonucleotide
uacagcgggaaugcauagg

SEQ ID NO: 3023911 - RNA, 19 nt, Artificial Sequence
  Description of Artificial Sequence: Synthetic oligonucleotide
ugggcuacagcgggaaugc

SEQ ID NO: 3023912 - RNA, 19 nt, Artificial Sequence
  Description of Artificial Sequence: Synthetic oligonucleotide
aaggcauagguggcaccac

SEQ ID NO: 3023913 - RNA, 19 nt, Artificial Sequence
  Description of Artificial Sequence: Synthetic oligonucleotide
cugaggugcaauucccaac

SEQ ID NO: 3023914 - RNA, 19 nt, Artificial Sequence
  Description of Artificial Sequence: Synthetic oligonucleotide
acgguggucagacauuaau

SEQ ID NO: 3023915 - RNA, 19 nt, Artificial Sequence
  Description of Artificial Sequence: Synthetic oligonucleotide
gaaggcauagguggcacca

SEQ ID NO: 3023916 - RNA, 19 nt, Artificial Sequence
  Description of Artificial Sequence: Synthetic oligonucleotide
agcgcaggaacugguuacc

SEQ ID NO: 3023917 - RNA, 19 nt, Artificial Sequence
  Description of Artificial Sequence: Synthetic oligonucleotide
aggcagcaucuacuguugc

SEQ ID NO: 3023918 - RNA, 19 nt, Artificial Sequence
  Description of Artificial Sequence: Synthetic oligonucleotide
ugcuauuccugugaccagu

SEQ ID NO: 3023919 - RNA, 19 nt, Artificial Sequence
  Description of Artificial Sequence: Synthetic oligonucleotide
guggucagacauuaaugca

SEQ ID NO: 3023920 - RNA, 19 nt, Artificial Sequence
  Description of Artificial Sequence: Synthetic oligonucleotide
gugaugagcaaugggccag

SEQ ID NO: 3023921 - RNA, 19 nt, Artificial Sequence
  Description of Artificial Sequence: Synthetic oligonucleotide
ggcagugaugagcaauggg

SEQ ID NO: 3023922 - RNA, 19 nt, Artificial Sequence
  Description of Artificial Sequence: Synthetic oligonucleotide
ugaaggcauagguggcacc

SEQ ID NO: 3023923 - RNA, 19 nt, Artificial Sequence
  Description of Artificial Sequence: Synthetic oligonucleotide
augccaaccaucacggcug

SEQ ID NO: 3023924 - RNA, 19 nt, Artificial Sequence
  Description of Artificial Sequence: Synthetic oligonucleotide
auuccugugaccaguugca

SEQ ID NO: 3023925 - RNA, 19 nt, Artificial Sequence
  Description of Artificial Sequence: Synthetic oligonucleotide
aagccaggaucugggcuac

SEQ ID NO: 3023926 - RNA, 19 nt, Artificial Sequence
  Description of Artificial Sequence: Synthetic oligonucleotide
gcaggaacugguuacccug

SEQ ID NO: 3023927 - RNA, 19 nt, Artificial Sequence
  Description of Artificial Sequence: Synthetic oligonucleotide
ugggugcuauuccugugac

SEQ ID NO: 3023928 - RNA, 19 nt, Artificial Sequence
  Description of Artificial Sequence: Synthetic oligonucleotide
gcgggaaugcauaggaugg

SEQ ID NO: 3023929 - RNA, 19 nt, Artificial Sequence
  Description of Artificial Sequence: Synthetic oligonucleotide
uuucugugucuaccauggc

SEQ ID NO: 3023930 - RNA, 19 nt, Artificial Sequence
  Description of Artificial Sequence: Synthetic oligonucleotide
agucacgggcauccagagg

SEQ ID NO: 3023931 - RNA, 19 nt, Artificial Sequence
  Description of Artificial Sequence: Synthetic oligonucleotide
aggcugaggugcaauuccc

SEQ ID NO: 3023932 - RNA, 19 nt, Artificial Sequence
  Description of Artificial Sequence: Synthetic oligonucleotide
ugggaggcaccucuccugu

SEQ ID NO: 3023933 - RNA, 19 nt, Artificial Sequence
  Description of Artificial Sequence: Synthetic oligonucleotide
ugccaaccaucacggcugg

SEQ ID NO: 3023934 - RNA, 19 nt, Artificial Sequence
  Description of Artificial Sequence: Synthetic oligonucleotide
uaccauggccucugccagg

SEQ ID NO: 3023935 - RNA, 19 nt, Artificial Sequence
  Description of Artificial Sequence: Synthetic oligonucleotide
cuacagcgggaaugcauag

SEQ ID NO: 3023936 - RNA, 19 nt, Artificial Sequence
  Description of Artificial Sequence: Synthetic oligonucleotide
cagaggguaucugggaggc

SEQ ID NO: 3023937 - RNA, 19 nt, Artificial Sequence
  Description of Artificial Sequence: Synthetic oligonucleotide
cguucaagccaccucaagg

SEQ ID NO: 3023938 - RNA, 19 nt, Artificial Sequence
  Description of Artificial Sequence: Synthetic oligonucleotide
uaaugcagucaagccagga

SEQ ID NO: 3023939 - RNA, 19 nt, Artificial Sequence
  Description of Artificial Sequence: Synthetic oligonucleotide
cagucaagccaggaucugg

SEQ ID NO: 3023940 - RNA, 19 nt, Artificial Sequence
  Description of Artificial Sequence: Synthetic oligonucleotide
gaggugcaauucccaacag

SEQ ID NO: 3023941 - RNA, 19 nt, Artificial Sequence
  Description of Artificial Sequence: Synthetic oligonucleotide
cacggcuggaguccagacg

SEQ ID NO: 3023942 - RNA, 19 nt, Artificial Sequence
  Description of Artificial Sequence: Synthetic oligonucleotide
agggcaugaaguagucacg

SEQ ID NO: 3023943 - RNA, 19 nt, Artificial Sequence
  Description of Artificial Sequence: Synthetic oligonucleotide
aaugggccagcuaugccaa

SEQ ID NO: 3023944 - RNA, 19 nt, Artificial Sequence
  Description of Artificial Sequence: Synthetic oligonucleotide
guccagacgccaguagugg

SEQ ID NO: 3023945 - RNA, 19 nt, Artificial Sequence
  Description of Artificial Sequence: Synthetic oligonucleotide
cucuccugugacuggguug

SEQ ID NO: 3023946 - RNA, 19 nt, Artificial Sequence
  Description of Artificial Sequence: Synthetic oligonucleotide
aguccagacgccaguagug

SEQ ID NO: 3023947 - RNA, 19 nt, Artificial Sequence
  Description of Artificial Sequence: Synthetic oligonucleotide
agugaaggcauagguggca

SEQ ID NO: 3023948 - RNA, 19 nt, Artificial Sequence
  Description of Artificial Sequence: Synthetic oligonucleotide
gacuggguugaagcgcagg

SEQ ID NO: 3023949 - RNA, 19 nt, Artificial Sequence
  Description of Artificial Sequence: Synthetic oligonucleotide
gggcaugaaguagucacgg

SEQ ID NO: 3023950 - RNA, 19 nt, Artificial Sequence
  Description of Artificial Sequence: Synthetic oligonucleotide
aggaucugggcuacagcgg

SEQ ID NO: 3023951 - RNA, 19 nt, Artificial Sequence
  Description of Artificial Sequence: Synthetic oligonucleotide
auccagaggguaucuggga

SEQ ID NO: 3023952 - RNA, 19 nt, Artificial Sequence
  Description of Artificial Sequence: Synthetic oligonucleotide
gagccagugaaggcauagg

SEQ ID NO: 3023953 - RNA, 19 nt, Artificial Sequence
  Description of Artificial Sequence: Synthetic oligonucleotide
aguugcauuucugugucua

SEQ ID NO: 3023954 - RNA, 19 nt, Artificial Sequence
  Description of Artificial Sequence: Synthetic oligonucleotide
guagcguucaagccaccuc

SEQ ID NO: 3023955 - RNA, 19 nt, Artificial Sequence
  Description of Artificial Sequence: Synthetic oligonucleotide
ucaaggcugaggugcaauu

SEQ ID NO: 3023956 - RNA, 19 nt, Artificial Sequence
  Description of Artificial Sequence: Synthetic oligonucleotide
gaagcgcaggaacugguua

SEQ ID NO: 3023957 - RNA, 19 nt, Artificial Sequence
  Description of Artificial Sequence: Synthetic oligonucleotide
ugaagcgcaggaacugguu

SEQ ID NO: 3023958 - RNA, 19 nt, Artificial Sequence
  Description of Artificial Sequence: Synthetic oligonucleotide
ugggccagcuaugccaacc

SEQ ID NO: 3023959 - RNA, 19 nt, Artificial Sequence
  Description of Artificial Sequence: Synthetic oligonucleotide
guaucugggaggcaccucu

SEQ ID NO: 3023960 - RNA, 19 nt, Artificial Sequence
  Description of Artificial Sequence: Synthetic oligonucleotide
ucugccagggcagggcaug

SEQ ID NO: 3023961 - RNA, 19 nt, Artificial Sequence
  Description of Artificial Sequence: Synthetic oligonucleotide
guagucacgggcauccaga

SEQ ID NO: 3023962 - RNA, 19 nt, Artificial Sequence
  Description of Artificial Sequence: Synthetic oligonucleotide
agacauuaaugcagucaag

SEQ ID NO: 3023963 - RNA, 19 nt, Artificial Sequence
  Description of Artificial Sequence: Synthetic oligonucleotide
cugggcuacagcgggaaug

SEQ ID NO: 3023964 - RNA, 19 nt, Artificial Sequence
  Description of Artificial Sequence: Synthetic oligonucleotide
ugaugagcaaugggccagc

SEQ ID NO: 3023965 - RNA, 19 nt, Artificial Sequence
  Description of Artificial Sequence: Synthetic oligonucleotide
agacgccaguagugggagc

SEQ ID NO: 3023966 - RNA, 19 nt, Artificial Sequence
  Description of Artificial Sequence: Synthetic oligonucleotide
cccuggaagcaauaguagc

SEQ ID NO: 3023967 - RNA, 19 nt, Artificial Sequence
  Description of Artificial Sequence: Synthetic oligonucleotide
uccugugacuggguugaag

SEQ ID NO: 3023968 - RNA, 19 nt, Artificial Sequence
  Description of Artificial Sequence: Synthetic oligonucleotide
ccagcuaugccaaccauca

SEQ ID NO: 3023969 - RNA, 19 nt, Artificial Sequence
  Description of Artificial Sequence: Synthetic oligonucleotide
ugggagccagugaaggcau

SEQ ID NO: 3023970 - RNA, 19 nt, Artificial Sequence
  Description of Artificial Sequence: Synthetic oligonucleotide
aggguaucugggaggcacc

SEQ ID NO: 3023971 - RNA, 19 nt, Artificial Sequence
  Description of Artificial Sequence: Synthetic oligonucleotide
cugggaggcaccucuccug

SEQ ID NO: 3023972 - RNA, 19 nt, Artificial Sequence
  Description of Artificial Sequence: Synthetic oligonucleotide
acccuggaagcaauaguag

SEQ ID NO: 3023973 - RNA, 19 nt, Artificial Sequence
  Description of Artificial Sequence: Synthetic oligonucleotide
ugaaguagucacgggcauc

SEQ ID NO: 3023974 - RNA, 19 nt, Artificial Sequence
  Description of Artificial Sequence: Synthetic oligonucleotide
uggaagcaauaguagcguu

SEQ ID NO: 3023975 - RNA, 19 nt, Artificial Sequence
  Description of Artificial Sequence: Synthetic oligonucleotide
aguagcguucaagccaccu

SEQ ID NO: 3023976 - RNA, 19 nt, Artificial Sequence
  Description of Artificial Sequence: Synthetic oligonucleotide
gucaagccaggaucugggc

SEQ ID NO: 3023977 - RNA, 19 nt, Artificial Sequence
  Description of Artificial Sequence: Synthetic oligonucleotide
uccugugaccaguugcauu

SEQ ID NO: 3023978 - RNA, 19 nt, Artificial Sequence
  Description of Artificial Sequence: Synthetic oligonucleotide
cuauuccugugaccaguug

SEQ ID NO: 3023979 - RNA, 19 nt, Artificial Sequence
  Description of Artificial Sequence: Synthetic oligonucleotide
caagccaggaucugggcua

SEQ ID NO: 3023980 - RNA, 19 nt, Artificial Sequence
  Description of Artificial Sequence: Synthetic oligonucleotide
cuaugccaaccaucacggc

SEQ ID NO: 3023981 - RNA, 19 nt, Artificial Sequence
  Description of Artificial Sequence: Synthetic oligonucleotide
gugggagccagugaaggca

SEQ ID NO: 3023982 - RNA, 19 nt, Artificial Sequence
  Description of Artificial Sequence: Synthetic oligonucleotide
ugguuacccuggaagcaau

SEQ ID NO: 3023983 - RNA, 19 nt, Artificial Sequence
  Description of Artificial Sequence: Synthetic oligonucleotide
guagugggagccagugaag

SEQ ID NO: 3023984 - RNA, 19 nt, Artificial Sequence
  Description of Artificial Sequence: Synthetic oligonucleotide
aagcaauaguagcguucaa

SEQ ID NO: 3023985 - RNA, 19 nt, Artificial Sequence
  Description of Artificial Sequence: Synthetic oligonucleotide
ugugucuaccauggccucu

SEQ ID NO: 3023986 - RNA, 19 nt, Artificial Sequence
  Description of Artificial Sequence: Synthetic oligonucleotide
gguggcaccacggugguca

SEQ ID NO: 3023987 - RNA, 19 nt, Artificial Sequence
  Description of Artificial Sequence: Synthetic oligonucleotide
ggaaugcauaggaugggug

SEQ ID NO: 3023988 - RNA, 19 nt, Artificial Sequence
  Description of Artificial Sequence: Synthetic oligonucleotide
gugucuaccauggccucug

SEQ ID NO: 3023989 - RNA, 19 nt, Artificial Sequence
  Description of Artificial Sequence: Synthetic oligonucleotide
caaggcugaggugcaauuc

SEQ ID NO: 3023990 - RNA, 19 nt, Artificial Sequence
  Description of Artificial Sequence: Synthetic oligonucleotide
gaguccagacgccaguagu

SEQ ID NO: 3023991 - RNA, 19 nt, Artificial Sequence
  Description of Artificial Sequence: Synthetic oligonucleotide
ggaagcaauaguagcguuc

SEQ ID NO: 3023992 - RNA, 19 nt, Artificial Sequence
  Description of Artificial Sequence: Synthetic oligonucleotide
gugaccaguugcauuucug

SEQ ID NO: 3023993 - RNA, 19 nt, Artificial Sequence
  Description of Artificial Sequence: Synthetic oligonucleotide
gguugaagcgcaggaacug

SEQ ID NO: 3023994 - RNA, 19 nt, Artificial Sequence
  Description of Artificial Sequence: Synthetic oligonucleotide
gaggcaccucuccugugac

SEQ ID NO: 3023995 - RNA, 19 nt, Artificial Sequence
  Description of Artificial Sequence: Synthetic oligonucleotide
uaucugggaggcaccucuc

SEQ ID NO: 3023996 - RNA, 19 nt, Artificial Sequence
  Description of Artificial Sequence: Synthetic oligonucleotide
ucacggcuggaguccagac

SEQ ID NO: 3023997 - RNA, 19 nt, Artificial Sequence
  Description of Artificial Sequence: Synthetic oligonucleotide
uagguggcaccacgguggu

SEQ ID NO: 3023998 - RNA, 19 nt, Artificial Sequence
  Description of Artificial Sequence: Synthetic oligonucleotide
gucuaccauggccucugcc

SEQ ID NO: 3023999 - RNA, 19 nt, Artificial Sequence
  Description of Artificial Sequence: Synthetic oligonucleotide
ugacuggguugaagcgcag

SEQ ID NO: 3024000 - RNA, 19 nt, Artificial Sequence
  Description of Artificial Sequence: Synthetic oligonucleotide
gugacuggguugaagcgca

SEQ ID NO: 3024001 - RNA, 19 nt, Artificial Sequence
  Description of Artificial Sequence: Synthetic oligonucleotide
ggcaccucuccugugacug

SEQ ID NO: 3024002 - RNA, 19 nt, Artificial Sequence
  Description of Artificial Sequence: Synthetic oligonucleotide
ggcauagguggcaccacgg

SEQ ID NO: 3024003 - RNA, 19 nt, Artificial Sequence
  Description of Artificial Sequence: Synthetic oligonucleotide
ugucuaccauggccucugc

SEQ ID NO: 3024004 - RNA, 19 nt, Artificial Sequence
  Description of Artificial Sequence: Synthetic oligonucleotide
cagacgccaguagugggag

SEQ ID NO: 3024005 - RNA, 19 nt, Artificial Sequence
  Description of Artificial Sequence: Synthetic oligonucleotide
caccucuccugugacuggg

SEQ ID NO: 3024006 - RNA, 19 nt, Artificial Sequence
  Description of Artificial Sequence: Synthetic oligonucleotide
ccaguugcauuucuguguc

SEQ ID NO: 3024007 - RNA, 19 nt, Artificial Sequence
  Description of Artificial Sequence: Synthetic oligonucleotide
ugcauaggaugggugcuau

SEQ ID NO: 3024008 - RNA, 19 nt, Artificial Sequence
  Description of Artificial Sequence: Synthetic oligonucleotide
aggaugggugcuauuccug

SEQ ID NO: 3024009 - RNA, 19 nt, Artificial Sequence
  Description of Artificial Sequence: Synthetic oligonucleotide
gucagacauuaaugcaguc

SEQ ID NO: 3024010 - RNA, 19 nt, Artificial Sequence
  Description of Artificial Sequence: Synthetic oligonucleotide
ccaaccaucacggcuggag

SEQ ID NO: 3024011 - RNA, 19 nt, Artificial Sequence
  Description of Artificial Sequence: Synthetic oligonucleotide
ggagccagugaaggcauag

SEQ ID NO: 3024012 - RNA, 19 nt, Artificial Sequence
  Description of Artificial Sequence: Synthetic oligonucleotide
ucacgggcauccagagggu

SEQ ID NO: 3024013 - RNA, 19 nt, Artificial Sequence
  Description of Artificial Sequence: Synthetic oligonucleotide
cuacuguugcaggcccugg

SEQ ID NO: 3024014 - RNA, 19 nt, Artificial Sequence
  Description of Artificial Sequence: Synthetic oligonucleotide
gagcaaugggccagcuaug

SEQ ID NO: 3024015 - RNA, 19 nt, Artificial Sequence
  Description of Artificial Sequence: Synthetic oligonucleotide
ggaguccagacgccaguag

SEQ ID NO: 3024016 - RNA, 19 nt, Artificial Sequence
  Description of Artificial Sequence: Synthetic oligonucleotide
ggaaaaggcagcaucuacu

SEQ ID NO: 3024017 - RNA, 19 nt, Artificial Sequence
  Description of Artificial Sequence: Synthetic oligonucleotide
uaguagcguucaagccacc

SEQ ID NO: 3024018 - RNA, 19 nt, Artificial Sequence
  Description of Artificial Sequence: Synthetic oligonucleotide
augggccagcuaugccaac

SEQ ID NO: 3024019 - RNA, 19 nt, Artificial Sequence
  Description of Artificial Sequence: Synthetic oligonucleotide
aaguagucacgggcaucca

SEQ ID NO: 3024020 - RNA, 19 nt, Artificial Sequence
  Description of Artificial Sequence: Synthetic oligonucleotide
augagcaaugggccagcua

SEQ ID NO: 3024021 - RNA, 19 nt, Artificial Sequence
  Description of Artificial Sequence: Synthetic oligonucleotide
ggaggcaccucuccuguga

SEQ ID NO: 3024022 - RNA, 19 nt, Artificial Sequence
  Description of Artificial Sequence: Synthetic oligonucleotide
gcaaugggccagcuaugcc

SEQ ID NO: 3024023 - RNA, 19 nt, Artificial Sequence
  Description of Artificial Sequence: Synthetic oligonucleotide
aucacggcuggaguccaga

SEQ ID NO: 3024024 - RNA, 19 nt, Artificial Sequence
  Description of Artificial Sequence: Synthetic oligonucleotide
agccaccucaaggcugagg

SEQ ID NO: 3024025 - RNA, 19 nt, Artificial Sequence
  Description of Artificial Sequence: Synthetic oligonucleotide
ucugggcuacagcgggaau

SEQ ID NO: 3024026 - RNA, 19 nt, Artificial Sequence
  Description of Artificial Sequence: Synthetic oligonucleotide
uggaguccagacgccagua

SEQ ID NO: 3024027 - RNA, 19 nt, Artificial Sequence
  Description of Artificial Sequence: Synthetic oligonucleotide
gccagggcagggcaugaag

SEQ ID NO: 3024028 - RNA, 19 nt, Artificial Sequence
  Description of Artificial Sequence: Synthetic oligonucleotide
cgguggucagacauuaaug

SEQ ID NO: 3024029 - RNA, 19 nt, Artificial Sequence
  Description of Artificial Sequence: Synthetic oligonucleotide
aucugggcuacagcgggaa

SEQ ID NO: 3024030 - RNA, 19 nt, Artificial Sequence
  Description of Artificial Sequence: Synthetic oligonucleotide
cuggaagcaauaguagcgu

SEQ ID NO: 3024031 - RNA, 19 nt, Artificial Sequence
  Description of Artificial Sequence: Synthetic oligonucleotide
cugguuacccuggaagcaa

SEQ ID NO: 3024032 - RNA, 19 nt, Artificial Sequence
  Description of Artificial Sequence: Synthetic oligonucleotide
uggccucugccagggcagg

SEQ ID NO: 3024033 - RNA, 19 nt, Artificial Sequence
  Description of Artificial Sequence: Synthetic oligonucleotide
uuccugugaccaguugcau

SEQ ID NO: 3024034 - RNA, 19 nt, Artificial Sequence
  Description of Artificial Sequence: Synthetic oligonucleotide
gcugaggugcaauucccaa

SEQ ID NO: 3024035 - RNA, 19 nt, Artificial Sequence
  Description of Artificial Sequence: Synthetic oligonucleotide
gggugcuauuccugugacc

SEQ ID NO: 3024036 - RNA, 19 nt, Artificial Sequence
  Description of Artificial Sequence: Synthetic oligonucleotide
aggcaccucuccugugacu

SEQ ID NO: 3024037 - RNA, 19 nt, Artificial Sequence
  Description of Artificial Sequence: Synthetic oligonucleotide
caucacggcuggaguccag

SEQ ID NO: 3024038 - RNA, 19 nt, Artificial Sequence
  Description of Artificial Sequence: Synthetic oligonucleotide
cagcuaugccaaccaucac

SEQ ID NO: 3024039 - RNA, 19 nt, Artificial Sequence
  Description of Artificial Sequence: Synthetic oligonucleotide
ccaggaucugggcuacagc

SEQ ID NO: 3024040 - RNA, 19 nt, Artificial Sequence
  Description of Artificial Sequence: Synthetic oligonucleotide
gcguucaagccaccucaag

SEQ ID NO: 3024041 - RNA, 19 nt, Artificial Sequence
  Description of Artificial Sequence: Synthetic oligonucleotide
cagggcagggcaugaagua

SEQ ID NO: 3024042 - RNA, 19 nt, Artificial Sequence
  Description of Artificial Sequence: Synthetic oligonucleotide
gggcagugaugagcaaugg

SEQ ID NO: 3024043 - RNA, 19 nt, Artificial Sequence
  Description of Artificial Sequence: Synthetic oligonucleotide
gcuacagcgggaaugcaua

SEQ ID NO: 3024044 - RNA, 19 nt, Artificial Sequence
  Description of Artificial Sequence: Synthetic oligonucleotide
gccaggaucugggcuacag

SEQ ID NO: 3024045 - RNA, 19 nt, Artificial Sequence
  Description of Artificial Sequence: Synthetic oligonucleotide
aucuacuguugcaggcccu

SEQ ID NO: 3024046 - RNA, 19 nt, Artificial Sequence
  Description of Artificial Sequence: Synthetic oligonucleotide
gaucugggcuacagcggga

SEQ ID NO: 3024047 - RNA, 19 nt, Artificial Sequence
  Description of Artificial Sequence: Synthetic oligonucleotide
ggaacugguuacccuggaa

SEQ ID NO: 3024048 - RNA, 19 nt, Artificial Sequence
  Description of Artificial Sequence: Synthetic oligonucleotide
ggaugggugcuauuccugu

SEQ ID NO: 3024049 - RNA, 19 nt, Artificial Sequence
  Description of Artificial Sequence: Synthetic oligonucleotide
augcauaggaugggugcua

SEQ ID NO: 3024050 - RNA, 19 nt, Artificial Sequence
  Description of Artificial Sequence: Synthetic oligonucleotide
caguagugggagccaguga

SEQ ID NO: 3024051 - RNA, 19 nt, Artificial Sequence
  Description of Artificial Sequence: Synthetic oligonucleotide
ccaggaaaaggcagcaucu

SEQ ID NO: 3024052 - RNA, 19 nt, Artificial Sequence
  Description of Artificial Sequence: Synthetic oligonucleotide
ggucagacauuaaugcagu

SEQ ID NO: 3024053 - RNA, 19 nt, Artificial Sequence
  Description of Artificial Sequence: Synthetic oligonucleotide
uugcaggcccugggcagug

SEQ ID NO: 3024054 - RNA, 19 nt, Artificial Sequence
  Description of Artificial Sequence: Synthetic oligonucleotide
accucaaggcugaggugca

SEQ ID NO: 3024055 - RNA, 19 nt, Artificial Sequence
  Description of Artificial Sequence: Synthetic oligonucleotide
gcaccucuccugugacugg

SEQ ID NO: 3024056 - RNA, 19 nt, Artificial Sequence
  Description of Artificial Sequence: Synthetic oligonucleotide
gcuggaguccagacgccag

SEQ ID NO: 3024057 - RNA, 19 nt, Artificial Sequence
  Description of Artificial Sequence: Synthetic oligonucleotide
caaccaucacggcuggagu

SEQ ID NO: 3024058 - RNA, 19 nt, Artificial Sequence
  Description of Artificial Sequence: Synthetic oligonucleotide
gccagcuaugccaaccauc

SEQ ID NO: 3024059 - RNA, 19 nt, Artificial Sequence
  Description of Artificial Sequence: Synthetic oligonucleotide
acgggcauccagaggguau

SEQ ID NO: 3024060 - RNA, 19 nt, Artificial Sequence
  Description of Artificial Sequence: Synthetic oligonucleotide
cuggguugaagcgcaggaa

SEQ ID NO: 3024061 - RNA, 19 nt, Artificial Sequence
  Description of Artificial Sequence: Synthetic oligonucleotide
caccacgguggucagacau

SEQ ID NO: 3024062 - RNA, 19 nt, Artificial Sequence
  Description of Artificial Sequence: Synthetic oligonucleotide
ccagacgccaguaguggga

SEQ ID NO: 3024063 - RNA, 19 nt, Artificial Sequence
  Description of Artificial Sequence: Synthetic oligonucleotide
aagccaccucaaggcugag

SEQ ID NO: 3024064 - RNA, 19 nt, Artificial Sequence
  Description of Artificial Sequence: Synthetic oligonucleotide
ccugugaccaguugcauuu

SEQ ID NO: 3024065 - RNA, 19 nt, Artificial Sequence
  Description of Artificial Sequence: Synthetic oligonucleotide
gcccugggcagugaugagc

SEQ ID NO: 3024066 - RNA, 19 nt, Artificial Sequence
  Description of Artificial Sequence: Synthetic oligonucleotide
gggccagcuaugccaacca

SEQ ID NO: 3024067 - RNA, 19 nt, Artificial Sequence
  Description of Artificial Sequence: Synthetic oligonucleotide
caggaaaaggcagcaucua

SEQ ID NO: 3024068 - RNA, 19 nt, Artificial Sequence
  Description of Artificial Sequence: Synthetic oligonucleotide
agcguucaagccaccucaa

SEQ ID NO: 3024069 - RNA, 19 nt, Artificial Sequence
  Description of Artificial Sequence: Synthetic oligonucleotide
agaggguaucugggaggca

SEQ ID NO: 3024070 - RNA, 19 nt, Artificial Sequence
  Description of Artificial Sequence: Synthetic oligonucleotide
ggcauccagaggguaucug

SEQ ID NO: 3024071 - RNA, 19 nt, Artificial Sequence
  Description of Artificial Sequence: Synthetic oligonucleotide
gaugagcaaugggccagcu

SEQ ID NO: 3024072 - RNA, 19 nt, Artificial Sequence
  Description of Artificial Sequence: Synthetic oligonucleotide
accacgguggucagacauu

SEQ ID NO: 3024073 - RNA, 19 nt, Artificial Sequence
  Description of Artificial Sequence: Synthetic oligonucleotide
gcagucaagccaggaucug

SEQ ID NO: 3024074 - RNA, 19 nt, Artificial Sequence
  Description of Artificial Sequence: Synthetic oligonucleotide
gggaaugcauaggaugggu

SEQ ID NO: 3024075 - RNA, 19 nt, Artificial Sequence
  Description of Artificial Sequence: Synthetic oligonucleotide
acgccaguagugggagcca

SEQ ID NO: 3024076 - RNA, 19 nt, Artificial Sequence
  Description of Artificial Sequence: Synthetic oligonucleotide
ggcugaggugcaauuccca

SEQ ID NO: 3024077 - RNA, 19 nt, Artificial Sequence
  Description of Artificial Sequence: Synthetic oligonucleotide
cuggaguccagacgccagu

SEQ ID NO: 3024078 - RNA, 19 nt, Artificial Sequence
  Description of Artificial Sequence: Synthetic oligonucleotide
ccaccucaaggcugaggug

SEQ ID NO: 3024079 - RNA, 19 nt, Artificial Sequence
  Description of Artificial Sequence: Synthetic oligonucleotide
cgggaaugcauaggauggg

SEQ ID NO: 3024080 - RNA, 19 nt, Artificial Sequence
  Description of Artificial Sequence: Synthetic oligonucleotide
gcgcaggaacugguuaccc

SEQ ID NO: 3024081 - RNA, 19 nt, Artificial Sequence
  Description of Artificial Sequence: Synthetic oligonucleotide
ggguugaagcgcaggaacu

SEQ ID NO: 3024082 - RNA, 19 nt, Artificial Sequence
  Description of Artificial Sequence: Synthetic oligonucleotide
gcauagguggcaccacggu

SEQ ID NO: 3024083 - RNA, 19 nt, Artificial Sequence
  Description of Artificial Sequence: Synthetic oligonucleotide
ugccagggcagggcaugaa

SEQ ID NO: 3024084 - RNA, 19 nt, Artificial Sequence
  Description of Artificial Sequence: Synthetic oligonucleotide
cugggcagugaugagcaau

SEQ ID NO: 3024085 - RNA, 19 nt, Artificial Sequence
  Description of Artificial Sequence: Synthetic oligonucleotide
agguggcaccacggugguc

SEQ ID NO: 3024086 - RNA, 19 nt, Artificial Sequence
  Description of Artificial Sequence: Synthetic oligonucleotide
gguaucugggaggcaccuc

SEQ ID NO: 3024087 - RNA, 19 nt, Artificial Sequence
  Description of Artificial Sequence: Synthetic oligonucleotide
gggaggcaccucuccugug

SEQ ID NO: 3024088 - RNA, 19 nt, Artificial Sequence
  Description of Artificial Sequence: Synthetic oligonucleotide
ugcaggcccugggcaguga

SEQ ID NO: 3024089 - RNA, 19 nt, Artificial Sequence
  Description of Artificial Sequence: Synthetic oligonucleotide
accucuccugugacugggu

SEQ ID NO: 3024090 - RNA, 19 nt, Artificial Sequence
  Description of Artificial Sequence: Synthetic oligonucleotide
ggcuggaguccagacgcca

SEQ ID NO: 3024091 - RNA, 19 nt, Artificial Sequence
  Description of Artificial Sequence: Synthetic oligonucleotide
gcauuucugugucuaccau

SEQ ID NO: 3024092 - RNA, 19 nt, Artificial Sequence
  Description of Artificial Sequence: Synthetic oligonucleotide
cacgguggucagacauuaa

SEQ ID NO: 3024093 - RNA, 19 nt, Artificial Sequence
  Description of Artificial Sequence: Synthetic oligonucleotide
ggcccugggcagugaugag

SEQ ID NO: 3024094 - RNA, 19 nt, Artificial Sequence
  Description of Artificial Sequence: Synthetic oligonucleotide
cucaaggcugaggugcaau

SEQ ID NO: 3024095 - RNA, 19 nt, Artificial Sequence
  Description of Artificial Sequence: Synthetic oligonucleotide
gcagggcaugaaguaguca

SEQ ID NO: 3024096 - RNA, 19 nt, Artificial Sequence
  Description of Artificial Sequence: Synthetic oligonucleotide
ggccucugccagggcaggg

SEQ ID NO: 3024097 - RNA, 19 nt, Artificial Sequence
  Description of Artificial Sequence: Synthetic oligonucleotide
gggcagggcaugaaguagu

SEQ ID NO: 3024098 - RNA, 19 nt, Artificial Sequence
  Description of Artificial Sequence: Synthetic oligonucleotide
ggcuacagcgggaaugcau

SEQ ID NO: 3024099 - RNA, 19 nt, Artificial Sequence
  Description of Artificial Sequence: Synthetic oligonucleotide
caguugcauuucugugucu

SEQ ID NO: 3024100 - RNA, 19 nt, Artificial Sequence
  Description of Artificial Sequence: Synthetic oligonucleotide
gguuacccuggaagcaaua

SEQ ID NO: 3024101 - RNA, 19 nt, Artificial Sequence
  Description of Artificial Sequence: Synthetic oligonucleotide
cagcgggaaugcauaggau

SEQ ID NO: 3024102 - RNA, 19 nt, Artificial Sequence
  Description of Artificial Sequence: Synthetic oligonucleotide
ggguaucugggaggcaccu

SEQ ID NO: 3024103 - RNA, 19 nt, Artificial Sequence
  Description of Artificial Sequence: Synthetic oligonucleotide
cacgggcauccagagggua

SEQ ID NO: 3024104 - RNA, 19 nt, Artificial Sequence
  Description of Artificial Sequence: Synthetic oligonucleotide
ccacgguggucagacauua

SEQ ID NO: 3024105 - RNA, 19 nt, Artificial Sequence
  Description of Artificial Sequence: Synthetic oligonucleotide
agccaggaucugggcuaca

SEQ ID NO: 3024106 - RNA, 19 nt, Artificial Sequence
  Description of Artificial Sequence: Synthetic oligonucleotide
cgggcauccagaggguauc

SEQ ID NO: 3024107 - RNA, 19 nt, Artificial Sequence
  Description of Artificial Sequence: Synthetic oligonucleotide
gcuauuccugugaccaguu

SEQ ID NO: 3024108 - RNA, 19 nt, Artificial Sequence
  Description of Artificial Sequence: Synthetic oligonucleotide
cgccaguagugggagccag

SEQ ID NO: 3024109 - RNA, 19 nt, Artificial Sequence
  Description of Artificial Sequence: Synthetic oligonucleotide
cggcuggaguccagacgcc

SEQ ID NO: 3024110 - RNA, 19 nt, Artificial Sequence
  Description of Artificial Sequence: Synthetic oligonucleotide
gcaccacgguggucagaca

SEQ ID NO: 3024111 - RNA, 19 nt, Artificial Sequence
  Description of Artificial Sequence: Synthetic oligonucleotide
ccaucacggcuggagucca

SEQ ID NO: 3024112 - RNA, 19 nt, Artificial Sequence
  Description of Artificial Sequence: Synthetic oligonucleotide
ggccagcuaugccaaccau

SEQ ID NO: 3024113 - RNA, 19 nt, Artificial Sequence
  Description of Artificial Sequence: Synthetic oligonucleotide
gggcuacagcgggaaugca

SEQ ID NO: 3024114 - RNA, 19 nt, Artificial Sequence
  Description of Artificial Sequence: Synthetic oligonucleotide
cgcaggaacugguuacccu

SEQ ID NO: 3024115 - RNA, 19 nt, Artificial Sequence
  Description of Artificial Sequence: Synthetic oligonucleotide
gggcauccagaggguaucu

SEQ ID NO: 3024116 - RNA, 19 nt, Artificial Sequence
  Description of Artificial Sequence: Synthetic oligonucleotide
gcauaggaugggugcuauu

SEQ ID NO: 3024117 - RNA, 19 nt, Artificial Sequence
  Description of Artificial Sequence: Synthetic oligonucleotide
gcaggcccugggcagugau

SEQ ID NO: 3024118 - RNA, 19 nt, Artificial Sequence
  Description of Artificial Sequence: Synthetic oligonucleotide
gccaguagugggagccagu

SEQ ID NO: 3024119 - RNA, 19 nt, Artificial Sequence
  Description of Artificial Sequence: Synthetic oligonucleotide
cuccugugacuggguugaa

SEQ ID NO: 3024120 - RNA, 19 nt, Artificial Sequence
  Description of Artificial Sequence: Synthetic oligonucleotide
gggagccagugaaggcaua

SEQ ID NO: 3024121 - RNA, 19 nt, Artificial Sequence
  Description of Artificial Sequence: Synthetic oligonucleotide
gccaaccaucacggcugga

SEQ ID NO: 3024122 - RNA, 19 nt, Artificial Sequence
  Description of Artificial Sequence: Synthetic oligonucleotide
ccucuccugugacuggguu

SEQ ID NO: 3024123 - RNA, 19 nt, Artificial Sequence
  Description of Artificial Sequence: Synthetic oligonucleotide
aaagauagggcuuaccacc

SEQ ID NO: 3024124 - RNA, 19 nt, Artificial Sequence
  Description of Artificial Sequence: Synthetic oligonucleotide
cauauaaaucuuuugaggg

SEQ ID NO: 3024125 - RNA, 19 nt, Artificial Sequence
  Description of Artificial Sequence: Synthetic oligonucleotide
uuaaauucuuuucugaggc

SEQ ID NO: 3024126 - RNA, 19 nt, Artificial Sequence
  Description of Artificial Sequence: Synthetic oligonucleotide
ucauauaaaucuuuugagg

SEQ ID NO: 3024127 - RNA, 19 nt, Artificial Sequence
  Description of Artificial Sequence: Synthetic oligonucleotide
uauuacaucucucauauaa

SEQ ID NO: 3024128 - RNA, 19 nt, Artificial Sequence
  Description of Artificial Sequence: Synthetic oligonucleotide
ucucauauaaaucuuuuga

SEQ ID NO: 3024129 - RNA, 19 nt, Artificial Sequence
  Description of Artificial Sequence: Synthetic oligonucleotide
auauaaaucuuuugagggc

SEQ ID NO: 3024130 - RNA, 19 nt, Artificial Sequence
  Description of Artificial Sequence: Synthetic oligonucleotide
augacagcuggcuugaugc

SEQ ID NO: 3024131 - RNA, 19 nt, Artificial Sequence
  Description of Artificial Sequence: Synthetic oligonucleotide
uugacuuucucgaagaucu

SEQ ID NO: 3024132 - RNA, 19 nt, Artificial Sequence
  Description of Artificial Sequence: Synthetic oligonucleotide
aauaauauccuuauuacau

SEQ ID NO: 3024133 - RNA, 19 nt, Artificial Sequence
  Description of Artificial Sequence: Synthetic oligonucleotide
auaaaagguggccacauuc

SEQ ID NO: 3024134 - RNA, 19 nt, Artificial Sequence
  Description of Artificial Sequence: Synthetic oligonucleotide
guaaucgacagaaagauag

SEQ ID NO: 3024135 - RNA, 19 nt, Artificial Sequence
  Description of Artificial Sequence: Synthetic oligonucleotide
aaauaauauccuuauuaca

SEQ ID NO: 3024136 - RNA, 19 nt, Artificial Sequence
  Description of Artificial Sequence: Synthetic oligonucleotide
ucuguuguggcccaaauaa

SEQ ID NO: 3024137 - RNA, 19 nt, Artificial Sequence
  Description of Artificial Sequence: Synthetic oligonucleotide
ucugcuuaaauucuuuucu

SEQ ID NO: 3024138 - RNA, 19 nt, Artificial Sequence
  Description of Artificial Sequence: Synthetic oligonucleotide
acaucucucauauaaaucu

SEQ ID NO: 3024139 - RNA, 19 nt, Artificial Sequence
  Description of Artificial Sequence: Synthetic oligonucleotide
caaauaauauccuuauuac

SEQ ID NO: 3024140 - RNA, 19 nt, Artificial Sequence
  Description of Artificial Sequence: Synthetic oligonucleotide
gggaaaaugacccaaacag

SEQ ID NO: 3024141 - RNA, 19 nt, Artificial Sequence
  Description of Artificial Sequence: Synthetic oligonucleotide
uguggcccaaauaauaucc

SEQ ID NO: 3024142 - RNA, 19 nt, Artificial Sequence
  Description of Artificial Sequence: Synthetic oligonucleotide
cuucuagggaaaaugaccc

SEQ ID NO: 3024143 - RNA, 19 nt, Artificial Sequence
  Description of Artificial Sequence: Synthetic oligonucleotide
auaauauccuuauuacauc

SEQ ID NO: 3024144 - RNA, 19 nt, Artificial Sequence
  Description of Artificial Sequence: Synthetic oligonucleotide
cucauauaaaucuuuugag

SEQ ID NO: 3024145 - RNA, 19 nt, Artificial Sequence
  Description of Artificial Sequence: Synthetic oligonucleotide
uguuaagauuuucagacuc

SEQ ID NO: 3024146 - RNA, 19 nt, Artificial Sequence
  Description of Artificial Sequence: Synthetic oligonucleotide
acccaaacagcuuacaaag

SEQ ID NO: 3024147 - RNA, 19 nt, Artificial Sequence
  Description of Artificial Sequence: Synthetic oligonucleotide
aaucgacagaaagauaggg

SEQ ID NO: 3024148 - RNA, 19 nt, Artificial Sequence
  Description of Artificial Sequence: Synthetic oligonucleotide
agaggcauugacuuucucg

SEQ ID NO: 3024149 - RNA, 19 nt, Artificial Sequence
  Description of Artificial Sequence: Synthetic oligonucleotide
ucuuuugagggcuucuagg

SEQ ID NO: 3024150 - RNA, 19 nt, Artificial Sequence
  Description of Artificial Sequence: Synthetic oligonucleotide
ucugaggcaacagagaggc

SEQ ID NO: 3024151 - RNA, 19 nt, Artificial Sequence
  Description of Artificial Sequence: Synthetic oligonucleotide
agaaagauagggcuuacca

SEQ ID NO: 3024152 - RNA, 19 nt, Artificial Sequence
  Description of Artificial Sequence: Synthetic oligonucleotide
cuuuugagggcuucuaggg

SEQ ID NO: 3024153 - RNA, 19 nt, Artificial Sequence
  Description of Artificial Sequence: Synthetic oligonucleotide
ucgacagaaagauagggcu

SEQ ID NO: 3024154 - RNA, 19 nt, Artificial Sequence
  Description of Artificial Sequence: Synthetic oligonucleotide
uaauauccuuauuacaucu

SEQ ID NO: 3024155 - RNA, 19 nt, Artificial Sequence
  Description of Artificial Sequence: Synthetic oligonucleotide
aacagagaggcauugacuu

SEQ ID NO: 3024156 - RNA, 19 nt, Artificial Sequence
  Description of Artificial Sequence: Synthetic oligonucleotide
cuuuucugaggcaacagag

SEQ ID NO: 3024157 - RNA, 19 nt, Artificial Sequence
  Description of Artificial Sequence: Synthetic oligonucleotide
uuacaaaggauguuaagau

SEQ ID NO: 3024158 - RNA, 19 nt, Artificial Sequence
  Description of Artificial Sequence: Synthetic oligonucleotide
aggauguuaagauuuucag

SEQ ID NO: 3024159 - RNA, 19 nt, Artificial Sequence
  Description of Artificial Sequence: Synthetic oligonucleotide
uauaaaucuuuugagggcu

SEQ ID NO: 3024160 - RNA, 19 nt, Artificial Sequence
  Description of Artificial Sequence: Synthetic oligonucleotide
uaaucgacagaaagauagg

SEQ ID NO: 3024161 - RNA, 19 nt, Artificial Sequence
  Description of Artificial Sequence: Synthetic oligonucleotide
ugcugggcauaaaaggugg

SEQ ID NO: 3024162 - RNA, 19 nt, Artificial Sequence
  Description of Artificial Sequence: Synthetic oligonucleotide
aaaugacccaaacagcuua

SEQ ID NO: 3024163 - RNA, 19 nt, Artificial Sequence
  Description of Artificial Sequence: Synthetic oligonucleotide
gaaagauagggcuuaccac

SEQ ID NO: 3024164 - RNA, 19 nt, Artificial Sequence
  Description of Artificial Sequence: Synthetic oligonucleotide
auucucuucuguuguggcc

SEQ ID NO: 3024165 - RNA, 19 nt, Artificial Sequence
  Description of Artificial Sequence: Synthetic oligonucleotide
aaugacagcuggcuugaug

SEQ ID NO: 3024166 - RNA, 19 nt, Artificial Sequence
  Description of Artificial Sequence: Synthetic oligonucleotide
auauccuuauuacaucucu

SEQ ID NO: 3024167 - RNA, 19 nt, Artificial Sequence
  Description of Artificial Sequence: Synthetic oligonucleotide
uuacaucucucauauaaau

SEQ ID NO: 3024168 - RNA, 19 nt, Artificial Sequence
  Description of Artificial Sequence: Synthetic oligonucleotide
uuuccucuccccguaaucg

SEQ ID NO: 3024169 - RNA, 19 nt, Artificial Sequence
  Description of Artificial Sequence: Synthetic oligonucleotide
uccacagcagcgaagggug

SEQ ID NO: 3024170 - RNA, 19 nt, Artificial Sequence
  Description of Artificial Sequence: Synthetic oligonucleotide
uuuucugaggcaacagaga

SEQ ID NO: 3024171 - RNA, 19 nt, Artificial Sequence
  Description of Artificial Sequence: Synthetic oligonucleotide
aaaggauguuaagauuuuc

SEQ ID NO: 3024172 - RNA, 19 nt, Artificial Sequence
  Description of Artificial Sequence: Synthetic oligonucleotide
cuucugcucaugaagacug

SEQ ID NO: 3024173 - RNA, 19 nt, Artificial Sequence
  Description of Artificial Sequence: Synthetic oligonucleotide
ucgaagaucuccacagcag

SEQ ID NO: 3024174 - RNA, 19 nt, Artificial Sequence
  Description of Artificial Sequence: Synthetic oligonucleotide
ucuuuucugaggcaacaga

SEQ ID NO: 3024175 - RNA, 19 nt, Artificial Sequence
  Description of Artificial Sequence: Synthetic oligonucleotide
aauauccuuauuacaucuc

SEQ ID NO: 3024176 - RNA, 19 nt, Artificial Sequence
  Description of Artificial Sequence: Synthetic oligonucleotide
gaggcauugacuuucucga

SEQ ID NO: 3024177 - RNA, 19 nt, Artificial Sequence
  Description of Artificial Sequence: Synthetic oligonucleotide
aaauucuuuucugaggcaa

SEQ ID NO: 3024178 - RNA, 19 nt, Artificial Sequence
  Description of Artificial Sequence: Synthetic oligonucleotide
aucgacagaaagauagggc

SEQ ID NO: 3024179 - RNA, 19 nt, Artificial Sequence
  Description of Artificial Sequence: Synthetic oligonucleotide
gaugcgagcaacuccuccc

SEQ ID NO: 3024180 - RNA, 19 nt, Artificial Sequence
  Description of Artificial Sequence: Synthetic oligonucleotide
cuuacaaaggauguuaaga

SEQ ID NO: 3024181 - RNA, 19 nt, Artificial Sequence
  Description of Artificial Sequence: Synthetic oligonucleotide
uacaucucucauauaaauc

SEQ ID NO: 3024182 - RNA, 19 nt, Artificial Sequence
  Description of Artificial Sequence: Synthetic oligonucleotide
auccuuauuacaucucuca

SEQ ID NO: 3024183 - RNA, 19 nt, Artificial Sequence
  Description of Artificial Sequence: Synthetic oligonucleotide
uucugaggcaacagagagg

SEQ ID NO: 3024184 - RNA, 19 nt, Artificial Sequence
  Description of Artificial Sequence: Synthetic oligonucleotide
aaggauguuaagauuuuca

SEQ ID NO: 3024185 - RNA, 19 nt, Artificial Sequence
  Description of Artificial Sequence: Synthetic oligonucleotide
uuugagggcuucuagggaa

SEQ ID NO: 3024186 - RNA, 19 nt, Artificial Sequence
  Description of Artificial Sequence: Synthetic oligonucleotide
uguuguggcccaaauaaua

SEQ ID NO: 3024187 - RNA, 19 nt, Artificial Sequence
  Description of Artificial Sequence: Synthetic oligonucleotide
uucuucuuccccaugcggu

SEQ ID NO: 3024188 - RNA, 19 nt, Artificial Sequence
  Description of Artificial Sequence: Synthetic oligonucleotide
aagacugcccugcugggca

SEQ ID NO: 3024189 - RNA, 19 nt, Artificial Sequence
  Description of Artificial Sequence: Synthetic oligonucleotide
uuucaucuucugcucauga

SEQ ID NO: 3024190 - RNA, 19 nt, Artificial Sequence
  Description of Artificial Sequence: Synthetic oligonucleotide
ugcucaugaagacugcccu

SEQ ID NO: 3024191 - RNA, 19 nt, Artificial Sequence
  Description of Artificial Sequence: Synthetic oligonucleotide
gaaaaugacccaaacagcu

SEQ ID NO: 3024192 - RNA, 19 nt, Artificial Sequence
  Description of Artificial Sequence: Synthetic oligonucleotide
auugacuuucucgaagauc

SEQ ID NO: 3024193 - RNA, 19 nt, Artificial Sequence
  Description of Artificial Sequence: Synthetic oligonucleotide
ugcuguagcacuccauucu

SEQ ID NO: 3024194 - RNA, 19 nt, Artificial Sequence
  Description of Artificial Sequence: Synthetic oligonucleotide
aaugacccaaacagcuuac

SEQ ID NO: 3024195 - RNA, 19 nt, Artificial Sequence
  Description of Artificial Sequence: Synthetic oligonucleotide
gaagaucuccacagcagcg

SEQ ID NO: 3024196 - RNA, 19 nt, Artificial Sequence
  Description of Artificial Sequence: Synthetic oligonucleotide
uuucucgaagaucuccaca

SEQ ID NO: 3024197 - RNA, 19 nt, Artificial Sequence
  Description of Artificial Sequence: Synthetic oligonucleotide
uucucuucuguuguggccc

SEQ ID NO: 3024198 - RNA, 19 nt, Artificial Sequence
  Description of Artificial Sequence: Synthetic oligonucleotide
uagcacuccauucucuucu

SEQ ID NO: 3024199 - RNA, 19 nt, Artificial Sequence
  Description of Artificial Sequence: Synthetic oligonucleotide
uuuugagggcuucuaggga

SEQ ID NO: 3024200 - RNA, 19 nt, Artificial Sequence
  Description of Artificial Sequence: Synthetic oligonucleotide
uucugcuuaaauucuuuuc

SEQ ID NO: 3024201 - RNA, 19 nt, Artificial Sequence
  Description of Artificial Sequence: Synthetic oligonucleotide
gcuuaaauucuuuucugag

SEQ ID NO: 3024202 - RNA, 19 nt, Artificial Sequence
  Description of Artificial Sequence: Synthetic oligonucleotide
cuuaccaccauucugcuua

SEQ ID NO: 3024203 - RNA, 19 nt, Artificial Sequence
  Description of Artificial Sequence: Synthetic oligonucleotide
acaaaggauguuaagauuu

SEQ ID NO: 3024204 - RNA, 19 nt, Artificial Sequence
  Description of Artificial Sequence: Synthetic oligonucleotide
cuuauuacaucucucauau

SEQ ID NO: 3024205 - RNA, 19 nt, Artificial Sequence
  Description of Artificial Sequence: Synthetic oligonucleotide
agggaaaaugacccaaaca

SEQ ID NO: 3024206 - RNA, 19 nt, Artificial Sequence
  Description of Artificial Sequence: Synthetic oligonucleotide
uaaauucuuuucugaggca

SEQ ID NO: 3024207 - RNA, 19 nt, Artificial Sequence
  Description of Artificial Sequence: Synthetic oligonucleotide
aucuuuugagggcuucuag

SEQ ID NO: 3024208 - RNA, 19 nt, Artificial Sequence
  Description of Artificial Sequence: Synthetic oligonucleotide
agcaacuccucccuggcug

SEQ ID NO: 3024209 - RNA, 19 nt, Artificial Sequence
  Description of Artificial Sequence: Synthetic oligonucleotide
cucucauauaaaucuuuug

SEQ ID NO: 3024210 - RNA, 19 nt, Artificial Sequence
  Description of Artificial Sequence: Synthetic oligonucleotide
ugaggcaacagagaggcau

SEQ ID NO: 3024211 - RNA, 19 nt, Artificial Sequence
  Description of Artificial Sequence: Synthetic oligonucleotide
uagggaaaaugacccaaac

SEQ ID NO: 3024212 - RNA, 19 nt, Artificial Sequence
  Description of Artificial Sequence: Synthetic oligonucleotide
ugguuggcuucuuucaucu

SEQ ID NO: 3024213 - RNA, 19 nt, Artificial Sequence
  Description of Artificial Sequence: Synthetic oligonucleotide
ucucucauauaaaucuuuu

SEQ ID NO: 3024214 - RNA, 19 nt, Artificial Sequence
  Description of Artificial Sequence: Synthetic oligonucleotide
uauccuuauuacaucucuc

SEQ ID NO: 3024215 - RNA, 19 nt, Artificial Sequence
  Description of Artificial Sequence: Synthetic oligonucleotide
caugcgguaggcuuccuug

SEQ ID NO: 3024216 - RNA, 19 nt, Artificial Sequence
  Description of Artificial Sequence: Synthetic oligonucleotide
ucuagggaaaaugacccaa

SEQ ID NO: 3024217 - RNA, 19 nt, Artificial Sequence
  Description of Artificial Sequence: Synthetic oligonucleotide
uacaaaggauguuaagauu

SEQ ID NO: 3024218 - RNA, 19 nt, Artificial Sequence
  Description of Artificial Sequence: Synthetic oligonucleotide
ugaugcgagcaacuccucc

SEQ ID NO: 3024219 - RNA, 19 nt, Artificial Sequence
  Description of Artificial Sequence: Synthetic oligonucleotide
cugcuuaaauucuuuucug

SEQ ID NO: 3024220 - RNA, 19 nt, Artificial Sequence
  Description of Artificial Sequence: Synthetic oligonucleotide
cauucucuucuguuguggc

SEQ ID NO: 3024221 - RNA, 19 nt, Artificial Sequence
  Description of Artificial Sequence: Synthetic oligonucleotide
gacuuucucgaagaucucc

SEQ ID NO: 3024222 - RNA, 19 nt, Artificial Sequence
  Description of Artificial Sequence: Synthetic oligonucleotide
uccuuauuacaucucucau

SEQ ID NO: 3024223 - RNA, 19 nt, Artificial Sequence
  Description of Artificial Sequence: Synthetic oligonucleotide
auguuaagauuuucagacu

SEQ ID NO: 3024224 - RNA, 19 nt, Artificial Sequence
  Description of Artificial Sequence: Synthetic oligonucleotide
ugacccaaacagcuuacaa

SEQ ID NO: 3024225 - RNA, 19 nt, Artificial Sequence
  Description of Artificial Sequence: Synthetic oligonucleotide
uuggccuugcuguagcacu

SEQ ID NO: 3024226 - RNA, 19 nt, Artificial Sequence
  Description of Artificial Sequence: Synthetic oligonucleotide
ugggcauaaaagguggcca

SEQ ID NO: 3024227 - RNA, 19 nt, Artificial Sequence
  Description of Artificial Sequence: Synthetic oligonucleotide
ugaagacugcccugcuggg

SEQ ID NO: 3024228 - RNA, 19 nt, Artificial Sequence
  Description of Artificial Sequence: Synthetic oligonucleotide
gacccaaacagcuuacaaa

SEQ ID NO: 3024229 - RNA, 19 nt, Artificial Sequence
  Description of Artificial Sequence: Synthetic oligonucleotide
cucaugaagacugcccugc

SEQ ID NO: 3024230 - RNA, 19 nt, Artificial Sequence
  Description of Artificial Sequence: Synthetic oligonucleotide
aaaucuuuugagggcuucu

SEQ ID NO: 3024231 - RNA, 19 nt, Artificial Sequence
  Description of Artificial Sequence: Synthetic oligonucleotide
auagggcuuaccaccauuc

SEQ ID NO: 3024232 - RNA, 19 nt, Artificial Sequence
  Description of Artificial Sequence: Synthetic oligonucleotide
agggcuuaccaccauucug

SEQ ID NO: 3024233 - RNA, 19 nt, Artificial Sequence
  Description of Artificial Sequence: Synthetic oligonucleotide
aagaucuccacagcagcga

SEQ ID NO: 3024234 - RNA, 19 nt, Artificial Sequence
  Description of Artificial Sequence: Synthetic oligonucleotide
uucuuuucugaggcaacag

SEQ ID NO: 3024235 - RNA, 19 nt, Artificial Sequence
  Description of Artificial Sequence: Synthetic oligonucleotide
cugcucaugaagacugccc

SEQ ID NO: 3024236 - RNA, 19 nt, Artificial Sequence
  Description of Artificial Sequence: Synthetic oligonucleotide
ccaaauaauauccuuauua

SEQ ID NO: 3024237 - RNA, 19 nt, Artificial Sequence
  Description of Artificial Sequence: Synthetic oligonucleotide
ucucgaagaucuccacagc

SEQ ID NO: 3024238 - RNA, 19 nt, Artificial Sequence
  Description of Artificial Sequence: Synthetic oligonucleotide
ugacagcuggcuugaugcg

SEQ ID NO: 3024239 - RNA, 19 nt, Artificial Sequence
  Description of Artificial Sequence: Synthetic oligonucleotide
ucuucugcucaugaagacu

SEQ ID NO: 3024240 - RNA, 19 nt, Artificial Sequence
  Description of Artificial Sequence: Synthetic oligonucleotide
ugugguuuccucuccccgu

SEQ ID NO: 3024241 - RNA, 19 nt, Artificial Sequence
  Description of Artificial Sequence: Synthetic oligonucleotide
gcuucuagggaaaaugacc

SEQ ID NO: 3024242 - RNA, 19 nt, Artificial Sequence
  Description of Artificial Sequence: Synthetic oligonucleotide
uucuuccccaugcgguagg

SEQ ID NO: 3024243 - RNA, 19 nt, Artificial Sequence
  Description of Artificial Sequence: Synthetic oligonucleotide
uucaucuucugcucaugaa

SEQ ID NO: 3024244 - RNA, 19 nt, Artificial Sequence
  Description of Artificial Sequence: Synthetic oligonucleotide
aagauagggcuuaccacca

SEQ ID NO: 3024245 - RNA, 19 nt, Artificial Sequence
  Description of Artificial Sequence: Synthetic oligonucleotide
accaccauucugcuuaaau

SEQ ID NO: 3024246 - RNA, 19 nt, Artificial Sequence
  Description of Artificial Sequence: Synthetic oligonucleotide
ggauguuaagauuuucaga

SEQ ID NO: 3024247 - RNA, 19 nt, Artificial Sequence
  Description of Artificial Sequence: Synthetic oligonucleotide
cuugaugcgagcaacuccu

SEQ ID NO: 3024248 - RNA, 19 nt, Artificial Sequence
  Description of Artificial Sequence: Synthetic oligonucleotide
ggcauugacuuucucgaag

SEQ ID NO: 3024249 - RNA, 19 nt, Artificial Sequence
  Description of Artificial Sequence: Synthetic oligonucleotide
ggaaaaugacccaaacagc

SEQ ID NO: 3024250 - RNA, 19 nt, Artificial Sequence
  Description of Artificial Sequence: Synthetic oligonucleotide
augcgguaggcuuccuugg

SEQ ID NO: 3024251 - RNA, 19 nt, Artificial Sequence
  Description of Artificial Sequence: Synthetic oligonucleotide
ucugcucaugaagacugcc

SEQ ID NO: 3024252 - RNA, 19 nt, Artificial Sequence
  Description of Artificial Sequence: Synthetic oligonucleotide
uguagcacuccauucucuu

SEQ ID NO: 3024253 - RNA, 19 nt, Artificial Sequence
  Description of Artificial Sequence: Synthetic oligonucleotide
agcagcgaagggugguugg

SEQ ID NO: 3024254 - RNA, 19 nt, Artificial Sequence
  Description of Artificial Sequence: Synthetic oligonucleotide
uuguggcccaaauaauauc

SEQ ID NO: 3024255 - RNA, 19 nt, Artificial Sequence
  Description of Artificial Sequence: Synthetic oligonucleotide
cuuucucgaagaucuccac

SEQ ID NO: 3024256 - RNA, 19 nt, Artificial Sequence
  Description of Artificial Sequence: Synthetic oligonucleotide
cugugguuuccucuccccg

SEQ ID NO: 3024257 - RNA, 19 nt, Artificial Sequence
  Description of Artificial Sequence: Synthetic oligonucleotide
aaaaugacccaaacagcuu

SEQ ID NO: 3024258 - RNA, 19 nt, Artificial Sequence
  Description of Artificial Sequence: Synthetic oligonucleotide
auucugcuuaaauucuuuu

SEQ ID NO: 3024259 - RNA, 19 nt, Artificial Sequence
  Description of Artificial Sequence: Synthetic oligonucleotide
cucgaagaucuccacagca

SEQ ID NO: 3024260 - RNA, 19 nt, Artificial Sequence
  Description of Artificial Sequence: Synthetic oligonucleotide
uucuguuguggcccaaaua

SEQ ID NO: 3024261 - RNA, 19 nt, Artificial Sequence
  Description of Artificial Sequence: Synthetic oligonucleotide
ugcgguaggcuuccuuggc

SEQ ID NO: 3024262 - RNA, 19 nt, Artificial Sequence
  Description of Artificial Sequence: Synthetic oligonucleotide
ucuccacagcagcgaaggg

SEQ ID NO: 3024263 - RNA, 19 nt, Artificial Sequence
  Description of Artificial Sequence: Synthetic oligonucleotide
cugggcauaaaagguggcc

SEQ ID NO: 3024264 - RNA, 19 nt, Artificial Sequence
  Description of Artificial Sequence: Synthetic oligonucleotide
ugcccugcugggcauaaaa

SEQ ID NO: 3024265 - RNA, 19 nt, Artificial Sequence
  Description of Artificial Sequence: Synthetic oligonucleotide
uucugcucaugaagacugc

SEQ ID NO: 3024266 - RNA, 19 nt, Artificial Sequence
  Description of Artificial Sequence: Synthetic oligonucleotide
auuacaucucucauauaaa

SEQ ID NO: 3024267 - RNA, 19 nt, Artificial Sequence
  Description of Artificial Sequence: Synthetic oligonucleotide
uaaaucuuuugagggcuuc

SEQ ID NO: 3024268 - RNA, 19 nt, Artificial Sequence
  Description of Artificial Sequence: Synthetic oligonucleotide
acagaaagauagggcuuac

SEQ ID NO: 3024269 - RNA, 19 nt, Artificial Sequence
  Description of Artificial Sequence: Synthetic oligonucleotide
aaucuuuugagggcuucua

SEQ ID NO: 3024270 - RNA, 19 nt, Artificial Sequence
  Description of Artificial Sequence: Synthetic oligonucleotide
cagagaggcauugacuuuc

SEQ ID NO: 3024271 - RNA, 19 nt, Artificial Sequence
  Description of Artificial Sequence: Synthetic oligonucleotide
acuuucucgaagaucucca

SEQ ID NO: 3024272 - RNA, 19 nt, Artificial Sequence
  Description of Artificial Sequence: Synthetic oligonucleotide
ucuucuuccccaugcggua

SEQ ID NO: 3024273 - RNA, 19 nt, Artificial Sequence
  Description of Artificial Sequence: Synthetic oligonucleotide
uagggcuuaccaccauucu

SEQ ID NO: 3024274 - RNA, 19 nt, Artificial Sequence
  Description of Artificial Sequence: Synthetic oligonucleotide
gcuuacaaaggauguuaag

SEQ ID NO: 3024275 - RNA, 19 nt, Artificial Sequence
  Description of Artificial Sequence: Synthetic oligonucleotide
uugcuguagcacuccauuc

SEQ ID NO: 3024276 - RNA, 19 nt, Artificial Sequence
  Description of Artificial Sequence: Synthetic oligonucleotide
gcaacagagaggcauugac

SEQ ID NO: 3024277 - RNA, 19 nt, Artificial Sequence
  Description of Artificial Sequence: Synthetic oligonucleotide
gggcuuaccaccauucugc

SEQ ID NO: 3024278 - RNA, 19 nt, Artificial Sequence
  Description of Artificial Sequence: Synthetic oligonucleotide
accauucugcuuaaauucu

SEQ ID NO: 3024279 - RNA, 19 nt, Artificial Sequence
  Description of Artificial Sequence: Synthetic oligonucleotide
cccugcugggcauaaaagg

SEQ ID NO: 3024280 - RNA, 19 nt, Artificial Sequence
  Description of Artificial Sequence: Synthetic oligonucleotide
ucaugaagacugcccugcu

SEQ ID NO: 3024281 - RNA, 19 nt, Artificial Sequence
  Description of Artificial Sequence: Synthetic oligonucleotide
caugaagacugcccugcug

SEQ ID NO: 3024282 - RNA, 19 nt, Artificial Sequence
  Description of Artificial Sequence: Synthetic oligonucleotide
uccucuccccguaaucgac

SEQ ID NO: 3024283 - RNA, 19 nt, Artificial Sequence
  Description of Artificial Sequence: Synthetic oligonucleotide
aacuccucccuggcugugg

SEQ ID NO: 3024284 - RNA, 19 nt, Artificial Sequence
  Description of Artificial Sequence: Synthetic oligonucleotide
uuccucuccccguaaucga

SEQ ID NO: 3024285 - RNA, 19 nt, Artificial Sequence
  Description of Artificial Sequence: Synthetic oligonucleotide
gacagaaagauagggcuua

SEQ ID NO: 3024286 - RNA, 19 nt, Artificial Sequence
  Description of Artificial Sequence: Synthetic oligonucleotide
uuccccaugcgguaggcuu

SEQ ID NO: 3024287 - RNA, 19 nt, Artificial Sequence
  Description of Artificial Sequence: Synthetic oligonucleotide
gcuugaugcgagcaacucc

SEQ ID NO: 3024288 - RNA, 19 nt, Artificial Sequence
  Description of Artificial Sequence: Synthetic oligonucleotide
uugagggcuucuagggaaa

SEQ ID NO: 3024289 - RNA, 19 nt, Artificial Sequence
  Description of Artificial Sequence: Synthetic oligonucleotide
uggcuugaugcgagcaacu

SEQ ID NO: 3024290 - RNA, 19 nt, Artificial Sequence
  Description of Artificial Sequence: Synthetic oligonucleotide
cucuccccguaaucgacag

SEQ ID NO: 3024291 - RNA, 19 nt, Artificial Sequence
  Description of Artificial Sequence: Synthetic oligonucleotide
ccaaacagcuuacaaagga

SEQ ID NO: 3024292 - RNA, 19 nt, Artificial Sequence
  Description of Artificial Sequence: Synthetic oligonucleotide
acagcuggcuugaugcgag

SEQ ID NO: 3024293 - RNA, 19 nt, Artificial Sequence
  Description of Artificial Sequence: Synthetic oligonucleotide
agaucuccacagcagcgaa

SEQ ID NO: 3024294 - RNA, 19 nt, Artificial Sequence
  Description of Artificial Sequence: Synthetic oligonucleotide
gaagacugcccugcugggc

SEQ ID NO: 3024295 - RNA, 19 nt, Artificial Sequence
  Description of Artificial Sequence: Synthetic oligonucleotide
gcauugacuuucucgaaga

SEQ ID NO: 3024296 - RNA, 19 nt, Artificial Sequence
  Description of Artificial Sequence: Synthetic oligonucleotide
uggcccaaauaauauccuu

SEQ ID NO: 3024297 - RNA, 19 nt, Artificial Sequence
  Description of Artificial Sequence: Synthetic oligonucleotide
guuuccucuccccguaauc

SEQ ID NO: 3024298 - RNA, 19 nt, Artificial Sequence
  Description of Artificial Sequence: Synthetic oligonucleotide
cuggcuugaugcgagcaac

SEQ ID NO: 3024299 - RNA, 19 nt, Artificial Sequence
  Description of Artificial Sequence: Synthetic oligonucleotide
cagaaagauagggcuuacc

SEQ ID NO: 3024300 - RNA, 19 nt, Artificial Sequence
  Description of Artificial Sequence: Synthetic oligonucleotide
ucucuucuguuguggccca

SEQ ID NO: 3024301 - RNA, 19 nt, Artificial Sequence
  Description of Artificial Sequence: Synthetic oligonucleotide
agcacuccauucucuucug

SEQ ID NO: 3024302 - RNA, 19 nt, Artificial Sequence
  Description of Artificial Sequence: Synthetic oligonucleotide
augcgagcaacuccucccu

SEQ ID NO: 3024303 - RNA, 19 nt, Artificial Sequence
  Description of Artificial Sequence: Synthetic oligonucleotide
gugguuggcuucuuucauc

SEQ ID NO: 3024304 - RNA, 19 nt, Artificial Sequence
  Description of Artificial Sequence: Synthetic oligonucleotide
ccccguaaucgacagaaag

SEQ ID NO: 3024305 - RNA, 19 nt, Artificial Sequence
  Description of Artificial Sequence: Synthetic oligonucleotide
cuagggaaaaugacccaaa

SEQ ID NO: 3024306 - RNA, 19 nt, Artificial Sequence
  Description of Artificial Sequence: Synthetic oligonucleotide
uuccuuggccuugcuguag

SEQ ID NO: 3024307 - RNA, 19 nt, Artificial Sequence
  Description of Artificial Sequence: Synthetic oligonucleotide
ugacuuucucgaagaucuc

SEQ ID NO: 3024308 - RNA, 19 nt, Artificial Sequence
  Description of Artificial Sequence: Synthetic oligonucleotide
ugcgagcaacuccucccug

SEQ ID NO: 3024309 - RNA, 19 nt, Artificial Sequence
  Description of Artificial Sequence: Synthetic oligonucleotide
uggccuugcuguagcacuc

SEQ ID NO: 3024310 - RNA, 19 nt, Artificial Sequence
  Description of Artificial Sequence: Synthetic oligonucleotide
acagagaggcauugacuuu

SEQ ID NO: 3024311 - RNA, 19 nt, Artificial Sequence
  Description of Artificial Sequence: Synthetic oligonucleotide
uccccaugcgguaggcuuc

SEQ ID NO: 3024312 - RNA, 19 nt, Artificial Sequence
  Description of Artificial Sequence: Synthetic oligonucleotide
aucucucauauaaaucuuu

SEQ ID NO: 3024313 - RNA, 19 nt, Artificial Sequence
  Description of Artificial Sequence: Synthetic oligonucleotide
cccaaacagcuuacaaagg

SEQ ID NO: 3024314 - RNA, 19 nt, Artificial Sequence
  Description of Artificial Sequence: Synthetic oligonucleotide
gcgagcaacuccucccugg

SEQ ID NO: 3024315 - RNA, 19 nt, Artificial Sequence
  Description of Artificial Sequence: Synthetic oligonucleotide
caaacagcuuacaaaggau

SEQ ID NO: 3024316 - RNA, 19 nt, Artificial Sequence
  Description of Artificial Sequence: Synthetic oligonucleotide
cuucuuccccaugcgguag

SEQ ID NO: 3024317 - RNA, 19 nt, Artificial Sequence
  Description of Artificial Sequence: Synthetic oligonucleotide
cuccccguaaucgacagaa

SEQ ID NO: 3024318 - RNA, 19 nt, Artificial Sequence
  Description of Artificial Sequence: Synthetic oligonucleotide
gggcauaaaagguggccac

SEQ ID NO: 3024319 - RNA, 19 nt, Artificial Sequence
  Description of Artificial Sequence: Synthetic oligonucleotide
cgaagaucuccacagcagc

SEQ ID NO: 3024320 - RNA, 19 nt, Artificial Sequence
  Description of Artificial Sequence: Synthetic oligonucleotide
gcuuccuuggccuugcugu

SEQ ID NO: 3024321 - RNA, 19 nt, Artificial Sequence
  Description of Artificial Sequence: Synthetic oligonucleotide
agcuuacaaaggauguuaa

SEQ ID NO: 3024322 - RNA, 19 nt, Artificial Sequence
  Description of Artificial Sequence: Synthetic oligonucleotide
gacagcuggcuugaugcga

SEQ ID NO: 3024323 - RNA, 19 nt, Artificial Sequence
  Description of Artificial Sequence: Synthetic oligonucleotide
cuuggccuugcuguagcac

SEQ ID NO: 3024324 - RNA, 19 nt, Artificial Sequence
  Description of Artificial Sequence: Synthetic oligonucleotide
acagcuuacaaaggauguu

SEQ ID NO: 3024325 - RNA, 19 nt, Artificial Sequence
  Description of Artificial Sequence: Synthetic oligonucleotide
caacagagaggcauugacu

SEQ ID NO: 3024326 - RNA, 19 nt, Artificial Sequence
  Description of Artificial Sequence: Synthetic oligonucleotide
uuaccaccauucugcuuaa

SEQ ID NO: 3024327 - RNA, 19 nt, Artificial Sequence
  Description of Artificial Sequence: Synthetic oligonucleotide
ucuucuguuguggcccaaa

SEQ ID NO: 3024328 - RNA, 19 nt, Artificial Sequence
  Description of Artificial Sequence: Synthetic oligonucleotide
uugaugcgagcaacuccuc

SEQ ID NO: 3024329 - RNA, 19 nt, Artificial Sequence
  Description of Artificial Sequence: Synthetic oligonucleotide
ccauucucuucuguugugg

SEQ ID NO: 3024330 - RNA, 19 nt, Artificial Sequence
  Description of Artificial Sequence: Synthetic oligonucleotide
agcgaagggugguuggcuu

SEQ ID NO: 3024331 - RNA, 19 nt, Artificial Sequence
  Description of Artificial Sequence: Synthetic oligonucleotide
cagcuuacaaaggauguua

SEQ ID NO: 3024332 - RNA, 19 nt, Artificial Sequence
  Description of Artificial Sequence: Synthetic oligonucleotide
ucuuccccaugcgguaggc

SEQ ID NO: 3024333 - RNA, 19 nt, Artificial Sequence
  Description of Artificial Sequence: Synthetic oligonucleotide
cccguaaucgacagaaaga

SEQ ID NO: 3024334 - RNA, 19 nt, Artificial Sequence
  Description of Artificial Sequence: Synthetic oligonucleotide
ucuccccguaaucgacaga

SEQ ID NO: 3024335 - RNA, 19 nt, Artificial Sequence
  Description of Artificial Sequence: Synthetic oligonucleotide
aggcauugacuuucucgaa

SEQ ID NO: 3024336 - RNA, 19 nt, Artificial Sequence
  Description of Artificial Sequence: Synthetic oligonucleotide
gcuguagcacuccauucuc

SEQ ID NO: 3024337 - RNA, 19 nt, Artificial Sequence
  Description of Artificial Sequence: Synthetic oligonucleotide
acuccucccuggcuguggu

SEQ ID NO: 3024338 - RNA, 19 nt, Artificial Sequence
  Description of Artificial Sequence: Synthetic oligonucleotide
guuguggcccaaauaauau

SEQ ID NO: 3024339 - RNA, 19 nt, Artificial Sequence
  Description of Artificial Sequence: Synthetic oligonucleotide
aggcaacagagaggcauug

SEQ ID NO: 3024340 - RNA, 19 nt, Artificial Sequence
  Description of Artificial Sequence: Synthetic oligonucleotide
guaggcuuccuuggccuug

SEQ ID NO: 3024341 - RNA, 19 nt, Artificial Sequence
  Description of Artificial Sequence: Synthetic oligonucleotide
cuugcuguagcacuccauu

SEQ ID NO: 3024342 - RNA, 19 nt, Artificial Sequence
  Description of Artificial Sequence: Synthetic oligonucleotide
ggcuucuagggaaaaugac

SEQ ID NO: 3024343 - RNA, 19 nt, Artificial Sequence
  Description of Artificial Sequence: Synthetic oligonucleotide
agauagggcuuaccaccau

SEQ ID NO: 3024344 - RNA, 19 nt, Artificial Sequence
  Description of Artificial Sequence: Synthetic oligonucleotide
ccuuauuacaucucucaua

SEQ ID NO: 3024345 - RNA, 19 nt, Artificial Sequence
  Description of Artificial Sequence: Synthetic oligonucleotide
augacccaaacagcuuaca

SEQ ID NO: 3024346 - RNA, 19 nt, Artificial Sequence
  Description of Artificial Sequence: Synthetic oligonucleotide
gauagggcuuaccaccauu

SEQ ID NO: 3024347 - RNA, 19 nt, Artificial Sequence
  Description of Artificial Sequence: Synthetic oligonucleotide
ugguuuccucuccccguaa

SEQ ID NO: 3024348 - RNA, 19 nt, Artificial Sequence
  Description of Artificial Sequence: Synthetic oligonucleotide
gcugugguuuccucucccc

SEQ ID NO: 3024349 - RNA, 19 nt, Artificial Sequence
  Description of Artificial Sequence: Synthetic oligonucleotide
auaaaucuuuugagggcuu

SEQ ID NO: 3024350 - RNA, 19 nt, Artificial Sequence
  Description of Artificial Sequence: Synthetic oligonucleotide
gggugguuggcuucuuuca

SEQ ID NO: 3024351 - RNA, 19 nt, Artificial Sequence
  Description of Artificial Sequence: Synthetic oligonucleotide
agcuggcuugaugcgagca

SEQ ID NO: 3024352 - RNA, 19 nt, Artificial Sequence
  Description of Artificial Sequence: Synthetic oligonucleotide
uccccguaaucgacagaaa

SEQ ID NO: 3024353 - RNA, 19 nt, Artificial Sequence
  Description of Artificial Sequence: Synthetic oligonucleotide
gagaggcauugacuuucuc

SEQ ID NO: 3024354 - RNA, 19 nt, Artificial Sequence
  Description of Artificial Sequence: Synthetic oligonucleotide
agagaggcauugacuuucu

SEQ ID NO: 3024355 - RNA, 19 nt, Artificial Sequence
  Description of Artificial Sequence: Synthetic oligonucleotide
ugagggcuucuagggaaaa

SEQ ID NO: 3024356 - RNA, 19 nt, Artificial Sequence
  Description of Artificial Sequence: Synthetic oligonucleotide
cauucugcuuaaauucuuu

SEQ ID NO: 3024357 - RNA, 19 nt, Artificial Sequence
  Description of Artificial Sequence: Synthetic oligonucleotide
gcgguaggcuuccuuggcc

SEQ ID NO: 3024358 - RNA, 19 nt, Artificial Sequence
  Description of Artificial Sequence: Synthetic oligonucleotide
ggcugugguuuccucuccc

SEQ ID NO: 3024359 - RNA, 19 nt, Artificial Sequence
  Description of Artificial Sequence: Synthetic oligonucleotide
caaaggauguuaagauuuu

SEQ ID NO: 3024360 - RNA, 19 nt, Artificial Sequence
  Description of Artificial Sequence: Synthetic oligonucleotide
gggcuucuagggaaaauga

SEQ ID NO: 3024361 - RNA, 19 nt, Artificial Sequence
  Description of Artificial Sequence: Synthetic oligonucleotide
ggcccaaauaauauccuua

SEQ ID NO: 3024362 - RNA, 19 nt, Artificial Sequence
  Description of Artificial Sequence: Synthetic oligonucleotide
caucucucauauaaaucuu

SEQ ID NO: 3024363 - RNA, 19 nt, Artificial Sequence
  Description of Artificial Sequence: Synthetic oligonucleotide
gcccaaauaauauccuuau

SEQ ID NO: 3024364 - RNA, 19 nt, Artificial Sequence
  Description of Artificial Sequence: Synthetic oligonucleotide
gugguuuccucuccccgua

SEQ ID NO: 3024365 - RNA, 19 nt, Artificial Sequence
  Description of Artificial Sequence: Synthetic oligonucleotide
cagcuggcuugaugcgagc

SEQ ID NO: 3024366 - RNA, 19 nt, Artificial Sequence
  Description of Artificial Sequence: Synthetic oligonucleotide
cuuccuuggccuugcugua

SEQ ID NO: 3024367 - RNA, 19 nt, Artificial Sequence
  Description of Artificial Sequence: Synthetic oligonucleotide
cagcagcgaagggugguug

SEQ ID NO: 3024368 - RNA, 19 nt, Artificial Sequence
  Description of Artificial Sequence: Synthetic oligonucleotide
cuccacagcagcgaagggu

SEQ ID NO: 3024369 - RNA, 19 nt, Artificial Sequence
  Description of Artificial Sequence: Synthetic oligonucleotide
acagcagcgaagggugguu

SEQ ID NO: 3024370 - RNA, 19 nt, Artificial Sequence
  Description of Artificial Sequence: Synthetic oligonucleotide
gcccugcugggcauaaaag

SEQ ID NO: 3024371 - RNA, 19 nt, Artificial Sequence
  Description of Artificial Sequence: Synthetic oligonucleotide
cuguagcacuccauucucu

SEQ ID NO: 3024372 - RNA, 19 nt, Artificial Sequence
  Description of Artificial Sequence: Synthetic oligonucleotide
agacugcccugcugggcau

SEQ ID NO: 3024373 - RNA, 19 nt, Artificial Sequence
  Description of Artificial Sequence: Synthetic oligonucleotide
ggcuugaugcgagcaacuc

SEQ ID NO: 3024374 - RNA, 19 nt, Artificial Sequence
  Description of Artificial Sequence: Synthetic oligonucleotide
cuguuguggcccaaauaau

SEQ ID NO: 3024375 - RNA, 19 nt, Artificial Sequence
  Description of Artificial Sequence: Synthetic oligonucleotide
cacuccauucucuucuguu

SEQ ID NO: 3024376 - RNA, 19 nt, Artificial Sequence
  Description of Artificial Sequence: Synthetic oligonucleotide
gcagcgaagggugguuggc

SEQ ID NO: 3024377 - RNA, 19 nt, Artificial Sequence
  Description of Artificial Sequence: Synthetic oligonucleotide
cauugacuuucucgaagau

SEQ ID NO: 3024378 - RNA, 19 nt, Artificial Sequence
  Description of Artificial Sequence: Synthetic oligonucleotide
cgagcaacuccucccuggc

SEQ ID NO: 3024379 - RNA, 19 nt, Artificial Sequence
  Description of Artificial Sequence: Synthetic oligonucleotide
gcugggcauaaaagguggc

SEQ ID NO: 3024380 - RNA, 19 nt, Artificial Sequence
  Description of Artificial Sequence: Synthetic oligonucleotide
gcuggcuugaugcgagcaa

SEQ ID NO: 3024381 - RNA, 19 nt, Artificial Sequence
  Description of Artificial Sequence: Synthetic oligonucleotide
guggcccaaauaauauccu

SEQ ID NO: 3024382 - RNA, 19 nt, Artificial Sequence
  Description of Artificial Sequence: Synthetic oligonucleotide
ccacagcagcgaagggugg

SEQ ID NO: 3024383 - RNA, 19 nt, Artificial Sequence
  Description of Artificial Sequence: Synthetic oligonucleotide
gcgaagggugguuggcuuc

SEQ ID NO: 3024384 - RNA, 19 nt, Artificial Sequence
  Description of Artificial Sequence: Synthetic oligonucleotide
gagcaacuccucccuggcu

SEQ ID NO: 3024385 - RNA, 19 nt, Artificial Sequence
  Description of Artificial Sequence: Synthetic oligonucleotide
ggugguuggcuucuuucau

SEQ ID NO: 3024386 - RNA, 19 nt, Artificial Sequence
  Description of Artificial Sequence: Synthetic oligonucleotide
cauaaaagguggccacauu

SEQ ID NO: 3024387 - RNA, 19 nt, Artificial Sequence
  Description of Artificial Sequence: Synthetic oligonucleotide
cuucuguuguggcccaaau

SEQ ID NO: 3024388 - RNA, 19 nt, Artificial Sequence
  Description of Artificial Sequence: Synthetic oligonucleotide
ccguaaucgacagaaagau

SEQ ID NO: 3024389 - RNA, 19 nt, Artificial Sequence
  Description of Artificial Sequence: Synthetic oligonucleotide
gaggcaacagagaggcauu

SEQ ID NO: 3024390 - RNA, 19 nt, Artificial Sequence
  Description of Artificial Sequence: Synthetic oligonucleotide
acugcccugcugggcauaa

SEQ ID NO: 3024391 - RNA, 19 nt, Artificial Sequence
  Description of Artificial Sequence: Synthetic oligonucleotide
ggccuugcuguagcacucc

SEQ ID NO: 3024392 - RNA, 19 nt, Artificial Sequence
  Description of Artificial Sequence: Synthetic oligonucleotide
gcauaaaagguggccacau

SEQ ID NO: 3024393 - RNA, 19 nt, Artificial Sequence
  Description of Artificial Sequence: Synthetic oligonucleotide
caacuccucccuggcugug

SEQ ID NO: 3024394 - RNA, 19 nt, Artificial Sequence
  Description of Artificial Sequence: Synthetic oligonucleotide
cugaggcaacagagaggca

SEQ ID NO: 3024395 - RNA, 19 nt, Artificial Sequence
  Description of Artificial Sequence: Synthetic oligonucleotide
ggcuuaccaccauucugcu

SEQ ID NO: 3024396 - RNA, 19 nt, Artificial Sequence
  Description of Artificial Sequence: Synthetic oligonucleotide
gagggcuucuagggaaaau

SEQ ID NO: 3024397 - RNA, 19 nt, Artificial Sequence
  Description of Artificial Sequence: Synthetic oligonucleotide
ccucuccccguaaucgaca

SEQ ID NO: 3024398 - RNA, 19 nt, Artificial Sequence
  Description of Artificial Sequence: Synthetic oligonucleotide
gccuugcuguagcacucca

SEQ ID NO: 3024399 - RNA, 19 nt, Artificial Sequence
  Description of Artificial Sequence: Synthetic oligonucleotide
gcaacuccucccuggcugu

SEQ ID NO: 3024400 - RNA, 19 nt, Artificial Sequence
  Description of Artificial Sequence: Synthetic oligonucleotide
cguaaucgacagaaagaua

SEQ ID NO: 3024401 - RNA, 19 nt, Artificial Sequence
  Description of Artificial Sequence: Synthetic oligonucleotide
cacagcagcgaaggguggu

SEQ ID NO: 3024402 - RNA, 19 nt, Artificial Sequence
  Description of Artificial Sequence: Synthetic oligonucleotide
gguuuccucuccccguaau

SEQ ID NO: 3024403 - RNA, 19 nt, Artificial Sequence
  Description of Artificial Sequence: Synthetic oligonucleotide
ccuggcugugguuuccucu

SEQ ID NO: 3024404 - RNA, 19 nt, Artificial Sequence
  Description of Artificial Sequence: Synthetic oligonucleotide
ccccaugcgguaggcuucc

SEQ ID NO: 3024405 - RNA, 19 nt, Artificial Sequence
  Description of Artificial Sequence: Synthetic oligonucleotide
cagcgaagggugguuggcu

SEQ ID NO: 3024406 - RNA, 19 nt, Artificial Sequence
  Description of Artificial Sequence: Synthetic oligonucleotide
ccuuggccuugcuguagca

SEQ ID NO: 3024407 - RNA, 19 nt, Artificial Sequence
  Description of Artificial Sequence: Synthetic oligonucleotide
gacugcccugcugggcaua

SEQ ID NO: 3024408 - RNA, 19 nt, Artificial Sequence
  Description of Artificial Sequence: Synthetic oligonucleotide
gcacuccauucucuucugu

SEQ ID NO: 3024409 - RNA, 19 nt, Artificial Sequence
  Description of Artificial Sequence: Synthetic oligonucleotide
gguaggcuuccuuggccuu

SEQ ID NO: 3024410 - RNA, 19 nt, Artificial Sequence
  Description of Artificial Sequence: Synthetic oligonucleotide
cuuccccaugcgguaggcu

SEQ ID NO: 3024411 - RNA, 19 nt, Artificial Sequence
  Description of Artificial Sequence: Synthetic oligonucleotide
gcuuaccaccauucugcuu

SEQ ID NO: 3024412 - RNA, 19 nt, Artificial Sequence
  Description of Artificial Sequence: Synthetic oligonucleotide
ccacauucuucuuccccau

SEQ ID NO: 3024413 - RNA, 19 nt, Artificial Sequence
  Description of Artificial Sequence: Synthetic oligonucleotide
cgacagaaagauagggcuu

SEQ ID NO: 3024414 - RNA, 19 nt, Artificial Sequence
  Description of Artificial Sequence: Synthetic oligonucleotide
cgguaggcuuccuuggccu

SEQ ID NO: 3024415 - RNA, 19 nt, Artificial Sequence
  Description of Artificial Sequence: Synthetic oligonucleotide
gguuggcuucuuucaucuu

SEQ ID NO: 3024416 - RNA, 19 nt, Artificial Sequence
  Description of Artificial Sequence: Synthetic oligonucleotide
ccuugcuguagcacuccau

SEQ ID NO: 3024417 - RNA, 19 nt, Artificial Sequence
  Description of Artificial Sequence: Synthetic oligonucleotide
cugcccugcugggcauaaa

SEQ ID NO: 3024418 - RNA, 19 nt, Artificial Sequence
  Description of Artificial Sequence: Synthetic oligonucleotide
cgaagggugguuggcuucu

SEQ ID NO: 3024419 - RNA, 19 nt, Artificial Sequence
  Description of Artificial Sequence: Synthetic oligonucleotide
cuccucccuggcugugguu

SEQ ID NO: 3024420 - RNA, 19 nt, Artificial Sequence
  Description of Artificial Sequence: Synthetic oligonucleotide
ccaugcgguaggcuuccuu

SEQ ID NO: 3024421 - RNA, 19 nt, Artificial Sequence
  Description of Artificial Sequence: Synthetic oligonucleotide
aaaauauugcugcugcaac

SEQ ID NO: 3024422 - RNA, 19 nt, Artificial Sequence
  Description of Artificial Sequence: Synthetic oligonucleotide
gauccuaaaauauugcugc

SEQ ID NO: 3024423 - RNA, 19 nt, Artificial Sequence
  Description of Artificial Sequence: Synthetic oligonucleotide
ucagcugacacacagaccu

SEQ ID NO: 3024424 - RNA, 19 nt, Artificial Sequence
  Description of Artificial Sequence: Synthetic oligonucleotide
ucgaucuugacacagcugc

SEQ ID NO: 3024425 - RNA, 19 nt, Artificial Sequence
  Description of Artificial Sequence: Synthetic oligonucleotide
uucucguccacacacggcg

SEQ ID NO: 3024426 - RNA, 19 nt, Artificial Sequence
  Description of Artificial Sequence: Synthetic oligonucleotide
ugauccuaaaauauugcug

SEQ ID NO: 3024427 - RNA, 19 nt, Artificial Sequence
  Description of Artificial Sequence: Synthetic oligonucleotide
aauauugcugcugcaacag

SEQ ID NO: 3024428 - RNA, 19 nt, Artificial Sequence
  Description of Artificial Sequence: Synthetic oligonucleotide
aaauauugcugcugcaaca

SEQ ID NO: 3024429 - RNA, 19 nt, Artificial Sequence
  Description of Artificial Sequence: Synthetic oligonucleotide
gaccugaucagguucaaag

SEQ ID NO: 3024430 - RNA, 19 nt, Artificial Sequence
  Description of Artificial Sequence: Synthetic oligonucleotide
ggagauucgaucuugacac

SEQ ID NO: 3024431 - RNA, 19 nt, Artificial Sequence
  Description of Artificial Sequence: Synthetic oligonucleotide
ugacacacagaccuuuccg

SEQ ID NO: 3024432 - RNA, 19 nt, Artificial Sequence
  Description of Artificial Sequence: Synthetic oligonucleotide
uucacugauccuaaaauau

SEQ ID NO: 3024433 - RNA, 19 nt, Artificial Sequence
  Description of Artificial Sequence: Synthetic oligonucleotide
uuugcagauguucauguaa

SEQ ID NO: 3024434 - RNA, 19 nt, Artificial Sequence
  Description of Artificial Sequence: Synthetic oligonucleotide
uggagauucgaucuugaca

SEQ ID NO: 3024435 - RNA, 19 nt, Artificial Sequence
  Description of Artificial Sequence: Synthetic oligonucleotide
accugaucagguucaaagc

SEQ ID NO: 3024436 - RNA, 19 nt, Artificial Sequence
  Description of Artificial Sequence: Synthetic oligonucleotide
accuuuccgucuuucaccc

SEQ ID NO: 3024437 - RNA, 19 nt, Artificial Sequence
  Description of Artificial Sequence: Synthetic oligonucleotide
uucaaagccgcacacguuc

SEQ ID NO: 3024438 - RNA, 19 nt, Artificial Sequence
  Description of Artificial Sequence: Synthetic oligonucleotide
agggguagcauggagauuc

SEQ ID NO: 3024439 - RNA, 19 nt, Artificial Sequence
  Description of Artificial Sequence: Synthetic oligonucleotide
ucucagcugacacacagac

SEQ ID NO: 3024440 - RNA, 19 nt, Artificial Sequence
  Description of Artificial Sequence: Synthetic oligonucleotide
cugaucagguucaaagccg

SEQ ID NO: 3024441 - RNA, 19 nt, Artificial Sequence
  Description of Artificial Sequence: Synthetic oligonucleotide
acugauccuaaaauauugc

SEQ ID NO: 3024442 - RNA, 19 nt, Artificial Sequence
  Description of Artificial Sequence: Synthetic oligonucleotide
aagcugaacucuuugcaga

SEQ ID NO: 3024443 - RNA, 19 nt, Artificial Sequence
  Description of Artificial Sequence: Synthetic oligonucleotide
cacugauccuaaaauauug

SEQ ID NO: 3024444 - RNA, 19 nt, Artificial Sequence
  Description of Artificial Sequence: Synthetic oligonucleotide
agaccuuuccgucuuucac

SEQ ID NO: 3024445 - RNA, 19 nt, Artificial Sequence
  Description of Artificial Sequence: Synthetic oligonucleotide
uucacccguacuuugaccu

SEQ ID NO: 3024446 - RNA, 19 nt, Artificial Sequence
  Description of Artificial Sequence: Synthetic oligonucleotide
ugaucagguucaaagccgc

SEQ ID NO: 3024447 - RNA, 19 nt, Artificial Sequence
  Description of Artificial Sequence: Synthetic oligonucleotide
uguucucccucucagcuga

SEQ ID NO: 3024448 - RNA, 19 nt, Artificial Sequence
  Description of Artificial Sequence: Synthetic oligonucleotide
uaaaauauugcugcugcaa

SEQ ID NO: 3024449 - RNA, 19 nt, Artificial Sequence
  Description of Artificial Sequence: Synthetic oligonucleotide
ucuuugcagauguucaugu

SEQ ID NO: 3024450 - RNA, 19 nt, Artificial Sequence
  Description of Artificial Sequence: Synthetic oligonucleotide
guaggucacgucuuucucg

SEQ ID NO: 3024451 - RNA, 19 nt, Artificial Sequence
  Description of Artificial Sequence: Synthetic oligonucleotide
ucuuucucguccacacacg

SEQ ID NO: 3024452 - RNA, 19 nt, Artificial Sequence
  Description of Artificial Sequence: Synthetic oligonucleotide
uugcagauguucauguaac

SEQ ID NO: 3024453 - RNA, 19 nt, Artificial Sequence
  Description of Artificial Sequence: Synthetic oligonucleotide
acgucuuucucguccacac

SEQ ID NO: 3024454 - RNA, 19 nt, Artificial Sequence
  Description of Artificial Sequence: Synthetic oligonucleotide
uagcauggagauucgaucu

SEQ ID NO: 3024455 - RNA, 19 nt, Artificial Sequence
  Description of Artificial Sequence: Synthetic oligonucleotide
ucagguucaaagccgcaca

SEQ ID NO: 3024456 - RNA, 19 nt, Artificial Sequence
  Description of Artificial Sequence: Synthetic oligonucleotide
caagcugaacucuuugcag

SEQ ID NO: 3024457 - RNA, 19 nt, Artificial Sequence
  Description of Artificial Sequence: Synthetic oligonucleotide
gaucuugacacagcugccg

SEQ ID NO: 3024458 - RNA, 19 nt, Artificial Sequence
  Description of Artificial Sequence: Synthetic oligonucleotide
gaccuuuccgucuuucacc

SEQ ID NO: 3024459 - RNA, 19 nt, Artificial Sequence
  Description of Artificial Sequence: Synthetic oligonucleotide
auguucauguaacuguacu

SEQ ID NO: 3024460 - RNA, 19 nt, Artificial Sequence
  Description of Artificial Sequence: Synthetic oligonucleotide
uacuuugaccugaucaggu

SEQ ID NO: 3024461 - RNA, 19 nt, Artificial Sequence
  Description of Artificial Sequence: Synthetic oligonucleotide
aguaggucacgucuuucuc

SEQ ID NO: 3024462 - RNA, 19 nt, Artificial Sequence
  Description of Artificial Sequence: Synthetic oligonucleotide
aacucuuugcagauguuca

SEQ ID NO: 3024463 - RNA, 19 nt, Artificial Sequence
  Description of Artificial Sequence: Synthetic oligonucleotide
auucgaucuugacacagcu

SEQ ID NO: 3024464 - RNA, 19 nt, Artificial Sequence
  Description of Artificial Sequence: Synthetic oligonucleotide
gacacagcugccgagcccg

SEQ ID NO: 3024465 - RNA, 19 nt, Artificial Sequence
  Description of Artificial Sequence: Synthetic oligonucleotide
ccuaaaauauugcugcugc

SEQ ID NO: 3024466 - RNA, 19 nt, Artificial Sequence
  Description of Artificial Sequence: Synthetic oligonucleotide
cuuucucguccacacacgg

SEQ ID NO: 3024467 - RNA, 19 nt, Artificial Sequence
  Description of Artificial Sequence: Synthetic oligonucleotide
acacacagaccuuuccguc

SEQ ID NO: 3024468 - RNA, 19 nt, Artificial Sequence
  Description of Artificial Sequence: Synthetic oligonucleotide
aagugcagggguagcaugg

SEQ ID NO: 3024469 - RNA, 19 nt, Artificial Sequence
  Description of Artificial Sequence: Synthetic oligonucleotide
ugcaacaggaggaggccag

SEQ ID NO: 3024470 - RNA, 19 nt, Artificial Sequence
  Description of Artificial Sequence: Synthetic oligonucleotide
guagcauggagauucgauc

SEQ ID NO: 3024471 - RNA, 19 nt, Artificial Sequence
  Description of Artificial Sequence: Synthetic oligonucleotide
ucuuucacccguacuuuga

SEQ ID NO: 3024472 - RNA, 19 nt, Artificial Sequence
  Description of Artificial Sequence: Synthetic oligonucleotide
auggagauucgaucuugac

SEQ ID NO: 3024473 - RNA, 19 nt, Artificial Sequence
  Description of Artificial Sequence: Synthetic oligonucleotide
uuuggauccgaggcagucg

SEQ ID NO: 3024474 - RNA, 19 nt, Artificial Sequence
  Description of Artificial Sequence: Synthetic oligonucleotide
uguucauguaacuguacuu

SEQ ID NO: 3024475 - RNA, 19 nt, Artificial Sequence
  Description of Artificial Sequence: Synthetic oligonucleotide
aagccgcacacguucacug

SEQ ID NO: 3024476 - RNA, 19 nt, Artificial Sequence
  Description of Artificial Sequence: Synthetic oligonucleotide
ugcagggguagcauggaga

SEQ ID NO: 3024477 - RNA, 19 nt, Artificial Sequence
  Description of Artificial Sequence: Synthetic oligonucleotide
uccuaaaauauugcugcug

SEQ ID NO: 3024478 - RNA, 19 nt, Artificial Sequence
  Description of Artificial Sequence: Synthetic oligonucleotide
aucagguucaaagccgcac

SEQ ID NO: 3024479 - RNA, 19 nt, Artificial Sequence
  Description of Artificial Sequence: Synthetic oligonucleotide
uaccuguucucccucucag

SEQ ID NO: 3024480 - RNA, 19 nt, Artificial Sequence
  Description of Artificial Sequence: Synthetic oligonucleotide
auauugcugcugcaacagg

SEQ ID NO: 3024481 - RNA, 19 nt, Artificial Sequence
  Description of Artificial Sequence: Synthetic oligonucleotide
uuggauccgaggcagucgu

SEQ ID NO: 3024482 - RNA, 19 nt, Artificial Sequence
  Description of Artificial Sequence: Synthetic oligonucleotide
agauucgaucuugacacag

SEQ ID NO: 3024483 - RNA, 19 nt, Artificial Sequence
  Description of Artificial Sequence: Synthetic oligonucleotide
ucacugauccuaaaauauu

SEQ ID NO: 3024484 - RNA, 19 nt, Artificial Sequence
  Description of Artificial Sequence: Synthetic oligonucleotide
acaggaggaggccagaauu

SEQ ID NO: 3024485 - RNA, 19 nt, Artificial Sequence
  Description of Artificial Sequence: Synthetic oligonucleotide
uuucacccguacuuugacc

SEQ ID NO: 3024486 - RNA, 19 nt, Artificial Sequence
  Description of Artificial Sequence: Synthetic oligonucleotide
uucgaucuugacacagcug

SEQ ID NO: 3024487 - RNA, 19 nt, Artificial Sequence
  Description of Artificial Sequence: Synthetic oligonucleotide
gaagugcagggguagcaug

SEQ ID NO: 3024488 - RNA, 19 nt, Artificial Sequence
  Description of Artificial Sequence: Synthetic oligonucleotide
uaggucacgucuuucucgu

SEQ ID NO: 3024489 - RNA, 19 nt, Artificial Sequence
  Description of Artificial Sequence: Synthetic oligonucleotide
accuguucucccucucagc

SEQ ID NO: 3024490 - RNA, 19 nt, Artificial Sequence
  Description of Artificial Sequence: Synthetic oligonucleotide
uugacacagcugccgagcc

SEQ ID NO: 3024491 - RNA, 19 nt, Artificial Sequence
  Description of Artificial Sequence: Synthetic oligonucleotide
ucucccucucagcugacac

SEQ ID NO: 3024492 - RNA, 19 nt, Artificial Sequence
  Description of Artificial Sequence: Synthetic oligonucleotide
ucuugacacagcugccgag

SEQ ID NO: 3024493 - RNA, 19 nt, Artificial Sequence
  Description of Artificial Sequence: Synthetic oligonucleotide
uuucucguccacacacggc

SEQ ID NO: 3024494 - RNA, 19 nt, Artificial Sequence
  Description of Artificial Sequence: Synthetic oligonucleotide
ccugaucagguucaaagcc

SEQ ID NO: 3024495 - RNA, 19 nt, Artificial Sequence
  Description of Artificial Sequence: Synthetic oligonucleotide
gaacucuuugcagauguuc

SEQ ID NO: 3024496 - RNA, 19 nt, Artificial Sequence
  Description of Artificial Sequence: Synthetic oligonucleotide
gguugcaagggucgcaggg

SEQ ID NO: 3024497 - RNA, 19 nt, Artificial Sequence
  Description of Artificial Sequence: Synthetic oligonucleotide
ucaaagccgcacacguuca

SEQ ID NO: 3024498 - RNA, 19 nt, Artificial Sequence
  Description of Artificial Sequence: Synthetic oligonucleotide
acggcggcaagcugaacuc

SEQ ID NO: 3024499 - RNA, 19 nt, Artificial Sequence
  Description of Artificial Sequence: Synthetic oligonucleotide
ugcagauguucauguaacu

SEQ ID NO: 3024500 - RNA, 19 nt, Artificial Sequence
  Description of Artificial Sequence: Synthetic oligonucleotide
cuugacacagcugccgagc

SEQ ID NO: 3024501 - RNA, 19 nt, Artificial Sequence
  Description of Artificial Sequence: Synthetic oligonucleotide
agcccguaggaguagguca

SEQ ID NO: 3024502 - RNA, 19 nt, Artificial Sequence
  Description of Artificial Sequence: Synthetic oligonucleotide
gguugcagggguugcaggg

SEQ ID NO: 3024503 - RNA, 19 nt, Artificial Sequence
  Description of Artificial Sequence: Synthetic oligonucleotide
gauucgaucuugacacagc

SEQ ID NO: 3024504 - RNA, 19 nt, Artificial Sequence
  Description of Artificial Sequence: Synthetic oligonucleotide
ucucguccacacacggcgg

SEQ ID NO: 3024505 - RNA, 19 nt, Artificial Sequence
  Description of Artificial Sequence: Synthetic oligonucleotide
aacaggaggaggccagaau

SEQ ID NO: 3024506 - RNA, 19 nt, Artificial Sequence
  Description of Artificial Sequence: Synthetic oligonucleotide
guucacugauccuaaaaua

SEQ ID NO: 3024507 - RNA, 19 nt, Artificial Sequence
  Description of Artificial Sequence: Synthetic oligonucleotide
guaggaguaggucacgucu

SEQ ID NO: 3024508 - RNA, 19 nt, Artificial Sequence
  Description of Artificial Sequence: Synthetic oligonucleotide
acagcugccgagcccguag

SEQ ID NO: 3024509 - RNA, 19 nt, Artificial Sequence
  Description of Artificial Sequence: Synthetic oligonucleotide
cuuucacccguacuuugac

SEQ ID NO: 3024510 - RNA, 19 nt, Artificial Sequence
  Description of Artificial Sequence: Synthetic oligonucleotide
aucuugacacagcugccga

SEQ ID NO: 3024511 - RNA, 19 nt, Artificial Sequence
  Description of Artificial Sequence: Synthetic oligonucleotide
auugcugcugcaacaggag

SEQ ID NO: 3024512 - RNA, 19 nt, Artificial Sequence
  Description of Artificial Sequence: Synthetic oligonucleotide
gauccgaggcagucguacc

SEQ ID NO: 3024513 - RNA, 19 nt, Artificial Sequence
  Description of Artificial Sequence: Synthetic oligonucleotide
cuaaaauauugcugcugca

SEQ ID NO: 3024514 - RNA, 19 nt, Artificial Sequence
  Description of Artificial Sequence: Synthetic oligonucleotide
agucguaccuguucucccu

SEQ ID NO: 3024515 - RNA, 19 nt, Artificial Sequence
  Description of Artificial Sequence: Synthetic oligonucleotide
ggucacgucuuucucgucc

SEQ ID NO: 3024516 - RNA, 19 nt, Artificial Sequence
  Description of Artificial Sequence: Synthetic oligonucleotide
cagauguucauguaacugu

SEQ ID NO: 3024517 - RNA, 19 nt, Artificial Sequence
  Description of Artificial Sequence: Synthetic oligonucleotide
uuuuggauccgaggcaguc

SEQ ID NO: 3024518 - RNA, 19 nt, Artificial Sequence
  Description of Artificial Sequence: Synthetic oligonucleotide
gauguucauguaacuguac

SEQ ID NO: 3024519 - RNA, 19 nt, Artificial Sequence
  Description of Artificial Sequence: Synthetic oligonucleotide
ugcaagggucgcagggucc

SEQ ID NO: 3024520 - RNA, 19 nt, Artificial Sequence
  Description of Artificial Sequence: Synthetic oligonucleotide
gaggcagucguaccuguuc

SEQ ID NO: 3024521 - RNA, 19 nt, Artificial Sequence
  Description of Artificial Sequence: Synthetic oligonucleotide
aaagccgcacacguucacu

SEQ ID NO: 3024522 - RNA, 19 nt, Artificial Sequence
  Description of Artificial Sequence: Synthetic oligonucleotide
acguucacugauccuaaaa

SEQ ID NO: 3024523 - RNA, 19 nt, Artificial Sequence
  Description of Artificial Sequence: Synthetic oligonucleotide
ugacacagcugccgagccc

SEQ ID NO: 3024524 - RNA, 19 nt, Artificial Sequence
  Description of Artificial Sequence: Synthetic oligonucleotide
gucuuucacccguacuuug

SEQ ID NO: 3024525 - RNA, 19 nt, Artificial Sequence
  Description of Artificial Sequence: Synthetic oligonucleotide
uugcaagggucgcaggguc

SEQ ID NO: 3024526 - RNA, 19 nt, Artificial Sequence
  Description of Artificial Sequence: Synthetic oligonucleotide
agguucaaagccgcacacg

SEQ ID NO: 3024527 - RNA, 19 nt, Artificial Sequence
  Description of Artificial Sequence: Synthetic oligonucleotide
uccgucuuucacccguacu

SEQ ID NO: 3024528 - RNA, 19 nt, Artificial Sequence
  Description of Artificial Sequence: Synthetic oligonucleotide
aggcagucguaccuguucu

SEQ ID NO: 3024529 - RNA, 19 nt, Artificial Sequence
  Description of Artificial Sequence: Synthetic oligonucleotide
cucuuugcagauguucaug

SEQ ID NO: 3024530 - RNA, 19 nt, Artificial Sequence
  Description of Artificial Sequence: Synthetic oligonucleotide
acucuuugcagauguucau

SEQ ID NO: 3024531 - RNA, 19 nt, Artificial Sequence
  Description of Artificial Sequence: Synthetic oligonucleotide
agcugaacucuuugcagau

SEQ ID NO: 3024532 - RNA, 19 nt, Artificial Sequence
  Description of Artificial Sequence: Synthetic oligonucleotide
gacacacagaccuuuccgu

SEQ ID NO: 3024533 - RNA, 19 nt, Artificial Sequence
  Description of Artificial Sequence: Synthetic oligonucleotide
caggaggaggccagaauuc

SEQ ID NO: 3024534 - RNA, 19 nt, Artificial Sequence
  Description of Artificial Sequence: Synthetic oligonucleotide
uaggaguaggucacgucuu

SEQ ID NO: 3024535 - RNA, 19 nt, Artificial Sequence
  Description of Artificial Sequence: Synthetic oligonucleotide
cagucguaccuguucuccc

SEQ ID NO: 3024536 - RNA, 19 nt, Artificial Sequence
  Description of Artificial Sequence: Synthetic oligonucleotide
gcagauguucauguaacug

SEQ ID NO: 3024537 - RNA, 19 nt, Artificial Sequence
  Description of Artificial Sequence: Synthetic oligonucleotide
auccgaggcagucguaccu

SEQ ID NO: 3024538 - RNA, 19 nt, Artificial Sequence
  Description of Artificial Sequence: Synthetic oligonucleotide
ggcaagcugaacucuuugc

SEQ ID NO: 3024539 - RNA, 19 nt, Artificial Sequence
  Description of Artificial Sequence: Synthetic oligonucleotide
cugauccuaaaauauugcu

SEQ ID NO: 3024540 - RNA, 19 nt, Artificial Sequence
  Description of Artificial Sequence: Synthetic oligonucleotide
cagguucaaagccgcacac

SEQ ID NO: 3024541 - RNA, 19 nt, Artificial Sequence
  Description of Artificial Sequence: Synthetic oligonucleotide
gaguaggucacgucuuucu

SEQ ID NO: 3024542 - RNA, 19 nt, Artificial Sequence
  Description of Artificial Sequence: Synthetic oligonucleotide
ucacccguacuuugaccug

SEQ ID NO: 3024543 - RNA, 19 nt, Artificial Sequence
  Description of Artificial Sequence: Synthetic oligonucleotide
acagaccuuuccgucuuuc

SEQ ID NO: 3024544 - RNA, 19 nt, Artificial Sequence
  Description of Artificial Sequence: Synthetic oligonucleotide
agauguucauguaacugua

SEQ ID NO: 3024545 - RNA, 19 nt, Artificial Sequence
  Description of Artificial Sequence: Synthetic oligonucleotide
guccgcaggguccgcaggg

SEQ ID NO: 3024546 - RNA, 19 nt, Artificial Sequence
  Description of Artificial Sequence: Synthetic oligonucleotide
cauggagauucgaucuuga

SEQ ID NO: 3024547 - RNA, 19 nt, Artificial Sequence
  Description of Artificial Sequence: Synthetic oligonucleotide
uccgcagggguugcagggg

SEQ ID NO: 3024548 - RNA, 19 nt, Artificial Sequence
  Description of Artificial Sequence: Synthetic oligonucleotide
gguucaaagccgcacacgu

SEQ ID NO: 3024549 - RNA, 19 nt, Artificial Sequence
  Description of Artificial Sequence: Synthetic oligonucleotide
ugaacucuuugcagauguu

SEQ ID NO: 3024550 - RNA, 19 nt, Artificial Sequence
  Description of Artificial Sequence: Synthetic oligonucleotide
ggucgcaggguccgcaggg

SEQ ID NO: 3024551 - RNA, 19 nt, Artificial Sequence
  Description of Artificial Sequence: Synthetic oligonucleotide
ccguacuuugaccugauca

SEQ ID NO: 3024552 - RNA, 19 nt, Artificial Sequence
  Description of Artificial Sequence: Synthetic oligonucleotide
gagauucgaucuugacaca

SEQ ID NO: 3024553 - RNA, 19 nt, Artificial Sequence
  Description of Artificial Sequence: Synthetic oligonucleotide
cacacguucacugauccua

SEQ ID NO: 3024554 - RNA, 19 nt, Artificial Sequence
  Description of Artificial Sequence: Synthetic oligonucleotide
uccgaggcagucguaccug

SEQ ID NO: 3024555 - RNA, 19 nt, Artificial Sequence
  Description of Artificial Sequence: Synthetic oligonucleotide
acacacggcggcaagcuga

SEQ ID NO: 3024556 - RNA, 19 nt, Artificial Sequence
  Description of Artificial Sequence: Synthetic oligonucleotide
cucguccacacacggcggc

SEQ ID NO: 3024557 - RNA, 19 nt, Artificial Sequence
  Description of Artificial Sequence: Synthetic oligonucleotide
ccucucagcugacacacag

SEQ ID NO: 3024558 - RNA, 19 nt, Artificial Sequence
  Description of Artificial Sequence: Synthetic oligonucleotide
agcauggagauucgaucuu

SEQ ID NO: 3024559 - RNA, 19 nt, Artificial Sequence
  Description of Artificial Sequence: Synthetic oligonucleotide
gucacgucuuucucgucca

SEQ ID NO: 3024560 - RNA, 19 nt, Artificial Sequence
  Description of Artificial Sequence: Synthetic oligonucleotide
acacagaccuuuccgucuu

SEQ ID NO: 3024561 - RNA, 19 nt, Artificial Sequence
  Description of Artificial Sequence: Synthetic oligonucleotide
uccacacacggcggcaagc

SEQ ID NO: 3024562 - RNA, 19 nt, Artificial Sequence
  Description of Artificial Sequence: Synthetic oligonucleotide
uuccgucuuucacccguac

SEQ ID NO: 3024563 - RNA, 19 nt, Artificial Sequence
  Description of Artificial Sequence: Synthetic oligonucleotide
ucguaccuguucucccucu

SEQ ID NO: 3024564 - RNA, 19 nt, Artificial Sequence
  Description of Artificial Sequence: Synthetic oligonucleotide
guaccuguucucccucuca

SEQ ID NO: 3024565 - RNA, 19 nt, Artificial Sequence
  Description of Artificial Sequence: Synthetic oligonucleotide
uuuccgucuuucacccgua

SEQ ID NO: 3024566 - RNA, 19 nt, Artificial Sequence
  Description of Artificial Sequence: Synthetic oligonucleotide
ugccgagcccguaggagua

SEQ ID NO: 3024567 - RNA, 19 nt, Artificial Sequence
  Description of Artificial Sequence: Synthetic oligonucleotide
gugcagggguagcauggag

SEQ ID NO: 3024568 - RNA, 19 nt, Artificial Sequence
  Description of Artificial Sequence: Synthetic oligonucleotide
cuuuccgucuuucacccgu

SEQ ID NO: 3024569 - RNA, 19 nt, Artificial Sequence
  Description of Artificial Sequence: Synthetic oligonucleotide
caaagccgcacacguucac

SEQ ID NO: 3024570 - RNA, 19 nt, Artificial Sequence
  Description of Artificial Sequence: Synthetic oligonucleotide
gcagggguugcaagggucg

SEQ ID NO: 3024571 - RNA, 19 nt, Artificial Sequence
  Description of Artificial Sequence: Synthetic oligonucleotide
ucacgucuuucucguccac

SEQ ID NO: 3024572 - RNA, 19 nt, Artificial Sequence
  Description of Artificial Sequence: Synthetic oligonucleotide
uccgcaggguccgcagggg

SEQ ID NO: 3024573 - RNA, 19 nt, Artificial Sequence
  Description of Artificial Sequence: Synthetic oligonucleotide
ggacugcagggguugcagg

SEQ ID NO: 3024574 - RNA, 19 nt, Artificial Sequence
  Description of Artificial Sequence: Synthetic oligonucleotide
aagggucgcaggguccgca

SEQ ID NO: 3024575 - RNA, 19 nt, Artificial Sequence
  Description of Artificial Sequence: Synthetic oligonucleotide
ugcagggacugcagggguu

SEQ ID NO: 3024576 - RNA, 19 nt, Artificial Sequence
  Description of Artificial Sequence: Synthetic oligonucleotide
gcagucguaccuguucucc

SEQ ID NO: 3024577 - RNA, 19 nt, Artificial Sequence
  Description of Artificial Sequence: Synthetic oligonucleotide
aggucacgucuuucucguc

SEQ ID NO: 3024578 - RNA, 19 nt, Artificial Sequence
  Description of Artificial Sequence: Synthetic oligonucleotide
agccgcacacguucacuga

SEQ ID NO: 3024579 - RNA, 19 nt, Artificial Sequence
  Description of Artificial Sequence: Synthetic oligonucleotide
gcaagggucgcaggguccg

SEQ ID NO: 3024580 - RNA, 19 nt, Artificial Sequence
  Description of Artificial Sequence: Synthetic oligonucleotide
gguccgcagggguugcagg

SEQ ID NO: 3024581 - RNA, 19 nt, Artificial Sequence
  Description of Artificial Sequence: Synthetic oligonucleotide
ggguugcagggguugcagg

SEQ ID NO: 3024582 - RNA, 19 nt, Artificial Sequence
  Description of Artificial Sequence: Synthetic oligonucleotide
cagaccuuuccgucuuuca

SEQ ID NO: 3024583 - RNA, 19 nt, Artificial Sequence
  Description of Artificial Sequence: Synthetic oligonucleotide
cuuugcagauguucaugua

SEQ ID NO: 3024584 - RNA, 19 nt, Artificial Sequence
  Description of Artificial Sequence: Synthetic oligonucleotide
gcauggagauucgaucuug

SEQ ID NO: 3024585 - RNA, 19 nt, Artificial Sequence
  Description of Artificial Sequence: Synthetic oligonucleotide
agcugacacacagaccuuu

SEQ ID NO: 3024586 - RNA, 19 nt, Artificial Sequence
  Description of Artificial Sequence: Synthetic oligonucleotide
ggauccgaggcagucguac

SEQ ID NO: 3024587 - RNA, 19 nt, Artificial Sequence
  Description of Artificial Sequence: Synthetic oligonucleotide
ucgcaggguccgcaggguc

SEQ ID NO: 3024588 - RNA, 19 nt, Artificial Sequence
  Description of Artificial Sequence: Synthetic oligonucleotide
cucucagcugacacacaga

SEQ ID NO: 3024589 - RNA, 19 nt, Artificial Sequence
  Description of Artificial Sequence: Synthetic oligonucleotide
cagcugccgagcccguagg

SEQ ID NO: 3024590 - RNA, 19 nt, Artificial Sequence
  Description of Artificial Sequence: Synthetic oligonucleotide
gggguugcaagggucgcag

SEQ ID NO: 3024591 - RNA, 19 nt, Artificial Sequence
  Description of Artificial Sequence: Synthetic oligonucleotide
agugcagggguagcaugga

SEQ ID NO: 3024592 - RNA, 19 nt, Artificial Sequence
  Description of Artificial Sequence: Synthetic oligonucleotide
gagcccguaggaguagguc

SEQ ID NO: 3024593 - RNA, 19 nt, Artificial Sequence
  Description of Artificial Sequence: Synthetic oligonucleotide
gucguaccuguucucccuc

SEQ ID NO: 3024594 - RNA, 19 nt, Artificial Sequence
  Description of Artificial Sequence: Synthetic oligonucleotide
cacacagaccuuuccgucu

SEQ ID NO: 3024595 - RNA, 19 nt, Artificial Sequence
  Description of Artificial Sequence: Synthetic oligonucleotide
gaucagguucaaagccgca

SEQ ID NO: 3024596 - RNA, 19 nt, Artificial Sequence
  Description of Artificial Sequence: Synthetic oligonucleotide
ugaccugaucagguucaaa

SEQ ID NO: 3024597 - RNA, 19 nt, Artificial Sequence
  Description of Artificial Sequence: Synthetic oligonucleotide
cugcugcaacaggaggagg

SEQ ID NO: 3024598 - RNA, 19 nt, Artificial Sequence
  Description of Artificial Sequence: Synthetic oligonucleotide
ucguccacacacggcggca

SEQ ID NO: 3024599 - RNA, 19 nt, Artificial Sequence
  Description of Artificial Sequence: Synthetic oligonucleotide
cacggcggcaagcugaacu

SEQ ID NO: 3024600 - RNA, 19 nt, Artificial Sequence
  Description of Artificial Sequence: Synthetic oligonucleotide
cgcacacguucacugaucc

SEQ ID NO: 3024601 - RNA, 19 nt, Artificial Sequence
  Description of Artificial Sequence: Synthetic oligonucleotide
cacacacggcggcaagcug

SEQ ID NO: 3024602 - RNA, 19 nt, Artificial Sequence
  Description of Artificial Sequence: Synthetic oligonucleotide
acacguucacugauccuaa

SEQ ID NO: 3024603 - RNA, 19 nt, Artificial Sequence
  Description of Artificial Sequence: Synthetic oligonucleotide
agcugccgagcccguagga

SEQ ID NO: 3024604 - RNA, 19 nt, Artificial Sequence
  Description of Artificial Sequence: Synthetic oligonucleotide
ggguugcaggggcugcagg

SEQ ID NO: 3024605 - RNA, 19 nt, Artificial Sequence
  Description of Artificial Sequence: Synthetic oligonucleotide
ugcagggguugcagggguu

SEQ ID NO: 3024606 - RNA, 19 nt, Artificial Sequence
  Description of Artificial Sequence: Synthetic oligonucleotide
gguccgcaggguccgcagg

SEQ ID NO: 3024607 - RNA, 19 nt, Artificial Sequence
  Description of Artificial Sequence: Synthetic oligonucleotide
guugcaagggucgcagggu

SEQ ID NO: 3024608 - RNA, 19 nt, Artificial Sequence
  Description of Artificial Sequence: Synthetic oligonucleotide
ggguugcaagggucgcagg

SEQ ID NO: 3024609 - RNA, 19 nt, Artificial Sequence
  Description of Artificial Sequence: Synthetic oligonucleotide
gggguugcagggguugcag

SEQ ID NO: 3024610 - RNA, 19 nt, Artificial Sequence
  Description of Artificial Sequence: Synthetic oligonucleotide
cagggguugcagggguugc

SEQ ID NO: 3024611 - RNA, 19 nt, Artificial Sequence
  Description of Artificial Sequence: Synthetic oligonucleotide
agggguugcaagggucgca

SEQ ID NO: 3024612 - RNA, 19 nt, Artificial Sequence
  Description of Artificial Sequence: Synthetic oligonucleotide
gcugccgagcccguaggag

SEQ ID NO: 3024613 - RNA, 19 nt, Artificial Sequence
  Description of Artificial Sequence: Synthetic oligonucleotide
cgaucuugacacagcugcc

SEQ ID NO: 3024614 - RNA, 19 nt, Artificial Sequence
  Description of Artificial Sequence: Synthetic oligonucleotide
cacgucuuucucguccaca

SEQ ID NO: 3024615 - RNA, 19 nt, Artificial Sequence
  Description of Artificial Sequence: Synthetic oligonucleotide
cacccguacuuugaccuga

SEQ ID NO: 3024616 - RNA, 19 nt, Artificial Sequence
  Description of Artificial Sequence: Synthetic oligonucleotide
gcugaacucuuugcagaug

SEQ ID NO: 3024617 - RNA, 19 nt, Artificial Sequence
  Description of Artificial Sequence: Synthetic oligonucleotide
gguagcauggagauucgau

SEQ ID NO: 3024618 - RNA, 19 nt, Artificial Sequence
  Description of Artificial Sequence: Synthetic oligonucleotide
gcagggacugcagggguug

SEQ ID NO: 3024619 - RNA, 19 nt, Artificial Sequence
  Description of Artificial Sequence: Synthetic oligonucleotide
uggauccgaggcagucgua

SEQ ID NO: 3024620 - RNA, 19 nt, Artificial Sequence
  Description of Artificial Sequence: Synthetic oligonucleotide
cagggguugcaggggcugc

SEQ ID NO: 3024621 - RNA, 19 nt, Artificial Sequence
  Description of Artificial Sequence: Synthetic oligonucleotide
gggucgcaggguccgcagg

SEQ ID NO: 3024622 - RNA, 19 nt, Artificial Sequence
  Description of Artificial Sequence: Synthetic oligonucleotide
agggguugcagggguugca

SEQ ID NO: 3024623 - RNA, 19 nt, Artificial Sequence
  Description of Artificial Sequence: Synthetic oligonucleotide
uccgcaggguccgcagggu

SEQ ID NO: 3024624 - RNA, 19 nt, Artificial Sequence
  Description of Artificial Sequence: Synthetic oligonucleotide
gcagggguagcauggagau

SEQ ID NO: 3024625 - RNA, 19 nt, Artificial Sequence
  Description of Artificial Sequence: Synthetic oligonucleotide
cugccgagcccguaggagu

SEQ ID NO: 3024626 - RNA, 19 nt, Artificial Sequence
  Description of Artificial Sequence: Synthetic oligonucleotide
gggguagcauggagauucg

SEQ ID NO: 3024627 - RNA, 19 nt, Artificial Sequence
  Description of Artificial Sequence: Synthetic oligonucleotide
cacacggcggcaagcugaa

SEQ ID NO: 3024628 - RNA, 19 nt, Artificial Sequence
  Description of Artificial Sequence: Synthetic oligonucleotide
gggaagugcagggguagca

SEQ ID NO: 3024629 - RNA, 19 nt, Artificial Sequence
  Description of Artificial Sequence: Synthetic oligonucleotide
agggacugcagggguugca

SEQ ID NO: 3024630 - RNA, 19 nt, Artificial Sequence
  Description of Artificial Sequence: Synthetic oligonucleotide
agggguugcaggggcugca

SEQ ID NO: 3024631 - RNA, 19 nt, Artificial Sequence
  Description of Artificial Sequence: Synthetic oligonucleotide
gcagggguugcagggguug

SEQ ID NO: 3024632 - RNA, 19 nt, Artificial Sequence
  Description of Artificial Sequence: Synthetic oligonucleotide
ggcagucguaccuguucuc

SEQ ID NO: 3024633 - RNA, 19 nt, Artificial Sequence
  Description of Artificial Sequence: Synthetic oligonucleotide
ggguccgcaggguccgcag

SEQ ID NO: 3024634 - RNA, 19 nt, Artificial Sequence
  Description of Artificial Sequence: Synthetic oligonucleotide
gcccguaggaguaggucac

SEQ ID NO: 3024635 - RNA, 19 nt, Artificial Sequence
  Description of Artificial Sequence: Synthetic oligonucleotide
ccuuuccgucuuucacccg

SEQ ID NO: 3024636 - RNA, 19 nt, Artificial Sequence
  Description of Artificial Sequence: Synthetic oligonucleotide
cguaggaguaggucacguc

SEQ ID NO: 3024637 - RNA, 19 nt, Artificial Sequence
  Description of Artificial Sequence: Synthetic oligonucleotide
cacguucacugauccuaaa

SEQ ID NO: 3024638 - RNA, 19 nt, Artificial Sequence
  Description of Artificial Sequence: Synthetic oligonucleotide
gcugacacacagaccuuuc

SEQ ID NO: 3024639 - RNA, 19 nt, Artificial Sequence
  Description of Artificial Sequence: Synthetic oligonucleotide
caagggucgcaggguccgc

SEQ ID NO: 3024640 - RNA, 19 nt, Artificial Sequence
  Description of Artificial Sequence: Synthetic oligonucleotide
cagggacugcagggguugc

SEQ ID NO: 3024641 - RNA, 19 nt, Artificial Sequence
  Description of Artificial Sequence: Synthetic oligonucleotide
caacaggaggaggccagaa

SEQ ID NO: 3024642 - RNA, 19 nt, Artificial Sequence
  Description of Artificial Sequence: Synthetic oligonucleotide
ggggaagugcagggguagc

SEQ ID NO: 3024643 - RNA, 19 nt, Artificial Sequence
  Description of Artificial Sequence: Synthetic oligonucleotide
acacggcggcaagcugaac

SEQ ID NO: 3024644 - RNA, 19 nt, Artificial Sequence
  Description of Artificial Sequence: Synthetic oligonucleotide
cguucacugauccuaaaau

SEQ ID NO: 3024645 - RNA, 19 nt, Artificial Sequence
  Description of Artificial Sequence: Synthetic oligonucleotide
gcagggguugcaggggcug

SEQ ID NO: 3024646 - RNA, 19 nt, Artificial Sequence
  Description of Artificial Sequence: Synthetic oligonucleotide
ggguccgcagggguugcag

SEQ ID NO: 3024647 - RNA, 19 nt, Artificial Sequence
  Description of Artificial Sequence: Synthetic oligonucleotide
gggguugcaggggcugcag

SEQ ID NO: 3024648 - RNA, 19 nt, Artificial Sequence
  Description of Artificial Sequence: Synthetic oligonucleotide
aggguccgcaggguccgca

SEQ ID NO: 3024649 - RNA, 19 nt, Artificial Sequence
  Description of Artificial Sequence: Synthetic oligonucleotide
ccgcagggguugcaggggc

SEQ ID NO: 3024650 - RNA, 19 nt, Artificial Sequence
  Description of Artificial Sequence: Synthetic oligonucleotide
ccgcacacguucacugauc

SEQ ID NO: 3024651 - RNA, 19 nt, Artificial Sequence
  Description of Artificial Sequence: Synthetic oligonucleotide
caggguccgcagggguugc

SEQ ID NO: 3024652 - RNA, 19 nt, Artificial Sequence
  Description of Artificial Sequence: Synthetic oligonucleotide
cggcaagcugaacucuuug

SEQ ID NO: 3024653 - RNA, 19 nt, Artificial Sequence
  Description of Artificial Sequence: Synthetic oligonucleotide
cugcagggacugcaggggu

SEQ ID NO: 3024654 - RNA, 19 nt, Artificial Sequence
  Description of Artificial Sequence: Synthetic oligonucleotide
cugcagggguugcaggggu

SEQ ID NO: 3024655 - RNA, 19 nt, Artificial Sequence
  Description of Artificial Sequence: Synthetic oligonucleotide
guucaaagccgcacacguu

SEQ ID NO: 3024656 - RNA, 19 nt, Artificial Sequence
  Description of Artificial Sequence: Synthetic oligonucleotide
cccguaggaguaggucacg

SEQ ID NO: 3024657 - RNA, 19 nt, Artificial Sequence
  Description of Artificial Sequence: Synthetic oligonucleotide
ccgucuuucacccguacuu

SEQ ID NO: 3024658 - RNA, 19 nt, Artificial Sequence
  Description of Artificial Sequence: Synthetic oligonucleotide
acccguacuuugaccugau

SEQ ID NO: 3024659 - RNA, 19 nt, Artificial Sequence
  Description of Artificial Sequence: Synthetic oligonucleotide
ggaagugcagggguagcau

SEQ ID NO: 3024660 - RNA, 19 nt, Artificial Sequence
  Description of Artificial Sequence: Synthetic oligonucleotide
guucucccucucagcugac

SEQ ID NO: 3024661 - RNA, 19 nt, Artificial Sequence
  Description of Artificial Sequence: Synthetic oligonucleotide
ccgagcccguaggaguagg

SEQ ID NO: 3024662 - RNA, 19 nt, Artificial Sequence
  Description of Artificial Sequence: Synthetic oligonucleotide
gcaacaggaggaggccaga

SEQ ID NO: 3024663 - RNA, 19 nt, Artificial Sequence
  Description of Artificial Sequence: Synthetic oligonucleotide
cguaccuguucucccucuc

SEQ ID NO: 3024664 - RNA, 19 nt, Artificial Sequence
  Description of Artificial Sequence: Synthetic oligonucleotide
ggguagcauggagauucga

SEQ ID NO: 3024665 - RNA, 19 nt, Artificial Sequence
  Description of Artificial Sequence: Synthetic oligonucleotide
caggggcugcagggacugc

SEQ ID NO: 3024666 - RNA, 19 nt, Artificial Sequence
  Description of Artificial Sequence: Synthetic oligonucleotide
gccgagcccguaggaguag

SEQ ID NO: 3024667 - RNA, 19 nt, Artificial Sequence
  Description of Artificial Sequence: Synthetic oligonucleotide
aggguccgcagggguugca

SEQ ID NO: 3024668 - RNA, 19 nt, Artificial Sequence
  Description of Artificial Sequence: Synthetic oligonucleotide
gccgcacacguucacugau

SEQ ID NO: 3024669 - RNA, 19 nt, Artificial Sequence
  Description of Artificial Sequence: Synthetic oligonucleotide
acacagcugccgagcccgu

SEQ ID NO: 3024670 - RNA, 19 nt, Artificial Sequence
  Description of Artificial Sequence: Synthetic oligonucleotide
gcacacguucacugauccu

SEQ ID NO: 3024671 - RNA, 19 nt, Artificial Sequence
  Description of Artificial Sequence: Synthetic oligonucleotide
cccguacuuugaccugauc

SEQ ID NO: 3024672 - RNA, 19 nt, Artificial Sequence
  Description of Artificial Sequence: Synthetic oligonucleotide
caggguccgcaggguccgc

SEQ ID NO: 3024673 - RNA, 19 nt, Artificial Sequence
  Description of Artificial Sequence: Synthetic oligonucleotide
gucgcaggguccgcagggu

SEQ ID NO: 3024674 - RNA, 19 nt, Artificial Sequence
  Description of Artificial Sequence: Synthetic oligonucleotide
ccgcaggguccgcaggguc

SEQ ID NO: 3024675 - RNA, 19 nt, Artificial Sequence
  Description of Artificial Sequence: Synthetic oligonucleotide
cgucuuucucguccacaca

SEQ ID NO: 3024676 - RNA, 19 nt, Artificial Sequence
  Description of Artificial Sequence: Synthetic oligonucleotide
cagcugacacacagaccuu

SEQ ID NO: 3024677 - RNA, 19 nt, Artificial Sequence
  Description of Artificial Sequence: Synthetic oligonucleotide
ccacacacggcggcaagcu

SEQ ID NO: 3024678 - RNA, 19 nt, Artificial Sequence
  Description of Artificial Sequence: Synthetic oligonucleotide
cacagcugccgagcccgua

SEQ ID NO: 3024679 - RNA, 19 nt, Artificial Sequence
  Description of Artificial Sequence: Synthetic oligonucleotide
ggcggcaagcugaacucuu

SEQ ID NO: 3024680 - RNA, 19 nt, Artificial Sequence
  Description of Artificial Sequence: Synthetic oligonucleotide
cccucucagcugacacaca

SEQ ID NO: 3024681 - RNA, 19 nt, Artificial Sequence
  Description of Artificial Sequence: Synthetic oligonucleotide
cacagaccuuuccgucuuu

SEQ ID NO: 3024682 - RNA, 19 nt, Artificial Sequence
  Description of Artificial Sequence: Synthetic oligonucleotide
ccgaggcagucguaccugu

SEQ ID NO: 3024683 - RNA, 19 nt, Artificial Sequence
  Description of Artificial Sequence: Synthetic oligonucleotide
ccguaggaguaggucacgu

SEQ ID NO: 3024684 - RNA, 19 nt, Artificial Sequence
  Description of Artificial Sequence: Synthetic oligonucleotide
cagggguagcauggagauu

SEQ ID NO: 3024685 - RNA, 19 nt, Artificial Sequence
  Description of Artificial Sequence: Synthetic oligonucleotide
cgucuuucacccguacuuu

SEQ ID NO: 3024686 - RNA, 19 nt, Artificial Sequence
  Description of Artificial Sequence: Synthetic oligonucleotide
cguccacacacggcggcaa

SEQ ID NO: 3024687 - RNA, 19 nt, Artificial Sequence
  Description of Artificial Sequence: Synthetic oligonucleotide
cgagcccguaggaguaggu

SEQ ID NO: 3024688 - RNA, 19 nt, Artificial Sequence
  Description of Artificial Sequence: Synthetic oligonucleotide
ccgcaggguccgcaggggu

SEQ ID NO: 3024689 - RNA, 19 nt, Artificial Sequence
  Description of Artificial Sequence: Synthetic oligonucleotide
cgcaggguccgcagggguu

SEQ ID NO: 3024690 - RNA, 19 nt, Artificial Sequence
  Description of Artificial Sequence: Synthetic oligonucleotide
cgaggcagucguaccuguu

SEQ ID NO: 3024691 - RNA, 19 nt, Artificial Sequence
  Description of Artificial Sequence: Synthetic oligonucleotide
cggcggcaagcugaacucu

SEQ ID NO: 3024692 - RNA, 19 nt, Artificial Sequence
  Description of Artificial Sequence: Synthetic oligonucleotide
aaugcuuucccacagaacu

SEQ ID NO: 3024693 - RNA, 19 nt, Artificial Sequence
  Description of Artificial Sequence: Synthetic oligonucleotide
aguauaaaacgguauuucc

SEQ ID NO: 3024694 - RNA, 19 nt, Artificial Sequence
  Description of Artificial Sequence: Synthetic oligonucleotide
acauuguuuacauacauag

SEQ ID NO: 3024695 - RNA, 19 nt, Artificial Sequence
  Description of Artificial Sequence: Synthetic oligonucleotide
uguuuuacauacaaauggg

SEQ ID NO: 3024696 - RNA, 19 nt, Artificial Sequence
  Description of Artificial Sequence: Synthetic oligonucleotide
agcugugauacauaaaggc

SEQ ID NO: 3024697 - RNA, 19 nt, Artificial Sequence
  Description of Artificial Sequence: Synthetic oligonucleotide
cuguuuuacauacaaaugg

SEQ ID NO: 3024698 - RNA, 19 nt, Artificial Sequence
  Description of Artificial Sequence: Synthetic oligonucleotide
agagcugugauacauaaag

SEQ ID NO: 3024699 - RNA, 19 nt, Artificial Sequence
  Description of Artificial Sequence: Synthetic oligonucleotide
uauaaaacgguauuuccca

SEQ ID NO: 3024700 - RNA, 19 nt, Artificial Sequence
  Description of Artificial Sequence: Synthetic oligonucleotide
aauccuuucauuuccacau

SEQ ID NO: 3024701 - RNA, 19 nt, Artificial Sequence
  Description of Artificial Sequence: Synthetic oligonucleotide
cacuuaaaguauaaaacgg

SEQ ID NO: 3024702 - RNA, 19 nt, Artificial Sequence
  Description of Artificial Sequence: Synthetic oligonucleotide
ugugaauccuuucauuucc

SEQ ID NO: 3024703 - RNA, 19 nt, Artificial Sequence
  Description of Artificial Sequence: Synthetic oligonucleotide
auacaaauggguuucucuc

SEQ ID NO: 3024704 - RNA, 19 nt, Artificial Sequence
  Description of Artificial Sequence: Synthetic oligonucleotide
gauacauaaaggcuuuccc

SEQ ID NO: 3024705 - RNA, 19 nt, Artificial Sequence
  Description of Artificial Sequence: Synthetic oligonucleotide
uguggauucguucauggca

SEQ ID NO: 3024706 - RNA, 19 nt, Artificial Sequence
  Description of Artificial Sequence: Synthetic oligonucleotide
uucauuuccacauuguuua

SEQ ID NO: 3024707 - RNA, 19 nt, Artificial Sequence
  Description of Artificial Sequence: Synthetic oligonucleotide
auacauaggguuucucacc

SEQ ID NO: 3024708 - RNA, 19 nt, Artificial Sequence
  Description of Artificial Sequence: Synthetic oligonucleotide
uuaaaguauaaaacgguau

SEQ ID NO: 3024709 - RNA, 19 nt, Artificial Sequence
  Description of Artificial Sequence: Synthetic oligonucleotide
aacacuguuuuacauacaa

SEQ ID NO: 3024710 - RNA, 19 nt, Artificial Sequence
  Description of Artificial Sequence: Synthetic oligonucleotide
aaaacgguauuucccaaca

SEQ ID NO: 3024711 - RNA, 19 nt, Artificial Sequence
  Description of Artificial Sequence: Synthetic oligonucleotide
uaaaguauaaaacgguauu

SEQ ID NO: 3024712 - RNA, 19 nt, Artificial Sequence
  Description of Artificial Sequence: Synthetic oligonucleotide
acgaagagagcugugauac

SEQ ID NO: 3024713 - RNA, 19 nt, Artificial Sequence
  Description of Artificial Sequence: Synthetic oligonucleotide
uacauaaaggcuuucccac

SEQ ID NO: 3024714 - RNA, 19 nt, Artificial Sequence
  Description of Artificial Sequence: Synthetic oligonucleotide
aacgguauuucccaacacu

SEQ ID NO: 3024715 - RNA, 19 nt, Artificial Sequence
  Description of Artificial Sequence: Synthetic oligonucleotide
ucguucauggcaacgaaga

SEQ ID NO: 3024716 - RNA, 19 nt, Artificial Sequence
  Description of Artificial Sequence: Synthetic oligonucleotide
auacauaaaggcuuuccca

SEQ ID NO: 3024717 - RNA, 19 nt, Artificial Sequence
  Description of Artificial Sequence: Synthetic oligonucleotide
aagggaacugugaucagcg

SEQ ID NO: 3024718 - RNA, 19 nt, Artificial Sequence
  Description of Artificial Sequence: Synthetic oligonucleotide
aaacgguauuucccaacac

SEQ ID NO: 3024719 - RNA, 19 nt, Artificial Sequence
  Description of Artificial Sequence: Synthetic oligonucleotide
cauacauaggguuucucac

SEQ ID NO: 3024720 - RNA, 19 nt, Artificial Sequence
  Description of Artificial Sequence: Synthetic oligonucleotide
guauaaaacgguauuuccc

SEQ ID NO: 3024721 - RNA, 19 nt, Artificial Sequence
  Description of Artificial Sequence: Synthetic oligonucleotide
uuucauuuccacauuguuu

SEQ ID NO: 3024722 - RNA, 19 nt, Artificial Sequence
  Description of Artificial Sequence: Synthetic oligonucleotide
cauuguuuacauacauagg

SEQ ID NO: 3024723 - RNA, 19 nt, Artificial Sequence
  Description of Artificial Sequence: Synthetic oligonucleotide
uacaaauggguuucucucc

SEQ ID NO: 3024724 - RNA, 19 nt, Artificial Sequence
  Description of Artificial Sequence: Synthetic oligonucleotide
aaaguauaaaacgguauuu

SEQ ID NO: 3024725 - RNA, 19 nt, Artificial Sequence
  Description of Artificial Sequence: Synthetic oligonucleotide
uccgguaugaguccucuca

SEQ ID NO: 3024726 - RNA, 19 nt, Artificial Sequence
  Description of Artificial Sequence: Synthetic oligonucleotide
aacuugcacacauaggguu

SEQ ID NO: 3024727 - RNA, 19 nt, Artificial Sequence
  Description of Artificial Sequence: Synthetic oligonucleotide
gaauucuuucauggcaucg

SEQ ID NO: 3024728 - RNA, 19 nt, Artificial Sequence
  Description of Artificial Sequence: Synthetic oligonucleotide
ugauacauaaaggcuuucc

SEQ ID NO: 3024729 - RNA, 19 nt, Artificial Sequence
  Description of Artificial Sequence: Synthetic oligonucleotide
uuucccaacacuguuuuac

SEQ ID NO: 3024730 - RNA, 19 nt, Artificial Sequence
  Description of Artificial Sequence: Synthetic oligonucleotide
aaauggguuucucuccacu

SEQ ID NO: 3024731 - RNA, 19 nt, Artificial Sequence
  Description of Artificial Sequence: Synthetic oligonucleotide
uccuuucauuuccacauug

SEQ ID NO: 3024732 - RNA, 19 nt, Artificial Sequence
  Description of Artificial Sequence: Synthetic oligonucleotide
aauucuuucauggcaucga

SEQ ID NO: 3024733 - RNA, 19 nt, Artificial Sequence
  Description of Artificial Sequence: Synthetic oligonucleotide
uuacauacaaauggguuuc

SEQ ID NO: 3024734 - RNA, 19 nt, Artificial Sequence
  Description of Artificial Sequence: Synthetic oligonucleotide
uucguucauggcaacgaag

SEQ ID NO: 3024735 - RNA, 19 nt, Artificial Sequence
  Description of Artificial Sequence: Synthetic oligonucleotide
acuuaaaguauaaaacggu

SEQ ID NO: 3024736 - RNA, 19 nt, Artificial Sequence
  Description of Artificial Sequence: Synthetic oligonucleotide
uaaaacgguauuucccaac

SEQ ID NO: 3024737 - RNA, 19 nt, Artificial Sequence
  Description of Artificial Sequence: Synthetic oligonucleotide
acugugaucagcgaaugcu

SEQ ID NO: 3024738 - RNA, 19 nt, Artificial Sequence
  Description of Artificial Sequence: Synthetic oligonucleotide
ucagcgaaugcuuucccac

SEQ ID NO: 3024739 - RNA, 19 nt, Artificial Sequence
  Description of Artificial Sequence: Synthetic oligonucleotide
ugugauacauaaaggcuuu

SEQ ID NO: 3024740 - RNA, 19 nt, Artificial Sequence
  Description of Artificial Sequence: Synthetic oligonucleotide
cuuaaaguauaaaacggua

SEQ ID NO: 3024741 - RNA, 19 nt, Artificial Sequence
  Description of Artificial Sequence: Synthetic oligonucleotide
acuguuuuacauacaaaug

SEQ ID NO: 3024742 - RNA, 19 nt, Artificial Sequence
  Description of Artificial Sequence: Synthetic oligonucleotide
gaauccuuucauuuccaca

SEQ ID NO: 3024743 - RNA, 19 nt, Artificial Sequence
  Description of Artificial Sequence: Synthetic oligonucleotide
acaaauggguuucucucca

SEQ ID NO: 3024744 - RNA, 19 nt, Artificial Sequence
  Description of Artificial Sequence: Synthetic oligonucleotide
ugaucagcgaaugcuuucc

SEQ ID NO: 3024745 - RNA, 19 nt, Artificial Sequence
  Description of Artificial Sequence: Synthetic oligonucleotide
agagagcugugauacauaa

SEQ ID NO: 3024746 - RNA, 19 nt, Artificial Sequence
  Description of Artificial Sequence: Synthetic oligonucleotide
aacgaagagagcugugaua

SEQ ID NO: 3024747 - RNA, 19 nt, Artificial Sequence
  Description of Artificial Sequence: Synthetic oligonucleotide
gagcugugauacauaaagg

SEQ ID NO: 3024748 - RNA, 19 nt, Artificial Sequence
  Description of Artificial Sequence: Synthetic oligonucleotide
agcgaaugcuuucccacag

SEQ ID NO: 3024749 - RNA, 19 nt, Artificial Sequence
  Description of Artificial Sequence: Synthetic oligonucleotide
uccccuguggauucguuca

SEQ ID NO: 3024750 - RNA, 19 nt, Artificial Sequence
  Description of Artificial Sequence: Synthetic oligonucleotide
acauaaaggcuuucccaca

SEQ ID NO: 3024751 - RNA, 19 nt, Artificial Sequence
  Description of Artificial Sequence: Synthetic oligonucleotide
gauucguucauggcaacga

SEQ ID NO: 3024752 - RNA, 19 nt, Artificial Sequence
  Description of Artificial Sequence: Synthetic oligonucleotide
cacuguuuuacauacaaau

SEQ ID NO: 3024753 - RNA, 19 nt, Artificial Sequence
  Description of Artificial Sequence: Synthetic oligonucleotide
uuuacacacauaggguuuc

SEQ ID NO: 3024754 - RNA, 19 nt, Artificial Sequence
  Description of Artificial Sequence: Synthetic oligonucleotide
acgguauuucccaacacug

SEQ ID NO: 3024755 - RNA, 19 nt, Artificial Sequence
  Description of Artificial Sequence: Synthetic oligonucleotide
uucccaacacuguuuuaca

SEQ ID NO: 3024756 - RNA, 19 nt, Artificial Sequence
  Description of Artificial Sequence: Synthetic oligonucleotide
cugugaauccuuucauuuc

SEQ ID NO: 3024757 - RNA, 19 nt, Artificial Sequence
  Description of Artificial Sequence: Synthetic oligonucleotide
ugaauucuuucauggcauc

SEQ ID NO: 3024758 - RNA, 19 nt, Artificial Sequence
  Description of Artificial Sequence: Synthetic oligonucleotide
ugugaucagcgaaugcuuu

SEQ ID NO: 3024759 - RNA, 19 nt, Artificial Sequence
  Description of Artificial Sequence: Synthetic oligonucleotide
auaaaacgguauuucccaa

SEQ ID NO: 3024760 - RNA, 19 nt, Artificial Sequence
  Description of Artificial Sequence: Synthetic oligonucleotide
gaucagcgaaugcuuuccc

SEQ ID NO: 3024761 - RNA, 19 nt, Artificial Sequence
  Description of Artificial Sequence: Synthetic oligonucleotide
aucagcgaaugcuuuccca

SEQ ID NO: 3024762 - RNA, 19 nt, Artificial Sequence
  Description of Artificial Sequence: Synthetic oligonucleotide
cauacaaauggguuucucu

SEQ ID NO: 3024763 - RNA, 19 nt, Artificial Sequence
  Description of Artificial Sequence: Synthetic oligonucleotide
ucauuuccacauuguuuac

SEQ ID NO: 3024764 - RNA, 19 nt, Artificial Sequence
  Description of Artificial Sequence: Synthetic oligonucleotide
gaacugugaucagcgaaug

SEQ ID NO: 3024765 - RNA, 19 nt, Artificial Sequence
  Description of Artificial Sequence: Synthetic oligonucleotide
cuguggauucguucauggc

SEQ ID NO: 3024766 - RNA, 19 nt, Artificial Sequence
  Description of Artificial Sequence: Synthetic oligonucleotide
ccuguggauucguucaugg

SEQ ID NO: 3024767 - RNA, 19 nt, Artificial Sequence
  Description of Artificial Sequence: Synthetic oligonucleotide
cauggcaacgaagagagcu

SEQ ID NO: 3024768 - RNA, 19 nt, Artificial Sequence
  Description of Artificial Sequence: Synthetic oligonucleotide
auucguucauggcaacgaa

SEQ ID NO: 3024769 - RNA, 19 nt, Artificial Sequence
  Description of Artificial Sequence: Synthetic oligonucleotide
ucccaacacuguuuuacau

SEQ ID NO: 3024770 - RNA, 19 nt, Artificial Sequence
  Description of Artificial Sequence: Synthetic oligonucleotide
cugugauacauaaaggcuu

SEQ ID NO: 3024771 - RNA, 19 nt, Artificial Sequence
  Description of Artificial Sequence: Synthetic oligonucleotide
gugaucagcgaaugcuuuc

SEQ ID NO: 3024772 - RNA, 19 nt, Artificial Sequence
  Description of Artificial Sequence: Synthetic oligonucleotide
auggcaucgaagggaacug

SEQ ID NO: 3024773 - RNA, 19 nt, Artificial Sequence
  Description of Artificial Sequence: Synthetic oligonucleotide
gaagagagcugugauacau

SEQ ID NO: 3024774 - RNA, 19 nt, Artificial Sequence
  Description of Artificial Sequence: Synthetic oligonucleotide
caaauggguuucucuccac

SEQ ID NO: 3024775 - RNA, 19 nt, Artificial Sequence
  Description of Artificial Sequence: Synthetic oligonucleotide
auggcaacgaagagagcug

SEQ ID NO: 3024776 - RNA, 19 nt, Artificial Sequence
  Description of Artificial Sequence: Synthetic oligonucleotide
uggcaacgaagagagcugu

SEQ ID NO: 3024777 - RNA, 19 nt, Artificial Sequence
  Description of Artificial Sequence: Synthetic oligonucleotide
caccagugugaauucuuuc

SEQ ID NO: 3024778 - RNA, 19 nt, Artificial Sequence
  Description of Artificial Sequence: Synthetic oligonucleotide
cuugcacacauaggguuuc

SEQ ID NO: 3024779 - RNA, 19 nt, Artificial Sequence
  Description of Artificial Sequence: Synthetic oligonucleotide
guggauucguucauggcaa

SEQ ID NO: 3024780 - RNA, 19 nt, Artificial Sequence
  Description of Artificial Sequence: Synthetic oligonucleotide
ggauucguucauggcaacg

SEQ ID NO: 3024781 - RNA, 19 nt, Artificial Sequence
  Description of Artificial Sequence: Synthetic oligonucleotide
ucauggcaacgaagagagc

SEQ ID NO: 3024782 - RNA, 19 nt, Artificial Sequence
  Description of Artificial Sequence: Synthetic oligonucleotide
uggauucguucauggcaac

SEQ ID NO: 3024783 - RNA, 19 nt, Artificial Sequence
  Description of Artificial Sequence: Synthetic oligonucleotide
aagagagcugugauacaua

SEQ ID NO: 3024784 - RNA, 19 nt, Artificial Sequence
  Description of Artificial Sequence: Synthetic oligonucleotide
cuccccuguggauucguuc

SEQ ID NO: 3024785 - RNA, 19 nt, Artificial Sequence
  Description of Artificial Sequence: Synthetic oligonucleotide
agggaacugugaucagcga

SEQ ID NO: 3024786 - RNA, 19 nt, Artificial Sequence
  Description of Artificial Sequence: Synthetic oligonucleotide
gggaacugugaucagcgaa

SEQ ID NO: 3024787 - RNA, 19 nt, Artificial Sequence
  Description of Artificial Sequence: Synthetic oligonucleotide
ucauggcaucgaagggaac

SEQ ID NO: 3024788 - RNA, 19 nt, Artificial Sequence
  Description of Artificial Sequence: Synthetic oligonucleotide
cauggcaucgaagggaacu

SEQ ID NO: 3024789 - RNA, 19 nt, Artificial Sequence
  Description of Artificial Sequence: Synthetic oligonucleotide
cuuucauuuccacauuguu

SEQ ID NO: 3024790 - RNA, 19 nt, Artificial Sequence
  Description of Artificial Sequence: Synthetic oligonucleotide
acuugcacacauaggguuu

SEQ ID NO: 3024791 - RNA, 19 nt, Artificial Sequence
  Description of Artificial Sequence: Synthetic oligonucleotide
auccuuucauuuccacauu

SEQ ID NO: 3024792 - RNA, 19 nt, Artificial Sequence
  Description of Artificial Sequence: Synthetic oligonucleotide
gcugugauacauaaaggcu

SEQ ID NO: 3024793 - RNA, 19 nt, Artificial Sequence
  Description of Artificial Sequence: Synthetic oligonucleotide
uggcaucgaagggaacugu

SEQ ID NO: 3024794 - RNA, 19 nt, Artificial Sequence
  Description of Artificial Sequence: Synthetic oligonucleotide
auuucccaacacuguuuua

SEQ ID NO: 3024795 - RNA, 19 nt, Artificial Sequence
  Description of Artificial Sequence: Synthetic oligonucleotide
acacuguuuuacauacaaa

SEQ ID NO: 3024796 - RNA, 19 nt, Artificial Sequence
  Description of Artificial Sequence: Synthetic oligonucleotide
gugaauccuuucauuucca

SEQ ID NO: 3024797 - RNA, 19 nt, Artificial Sequence
  Description of Artificial Sequence: Synthetic oligonucleotide
gcaacgaagagagcuguga

SEQ ID NO: 3024798 - RNA, 19 nt, Artificial Sequence
  Description of Artificial Sequence: Synthetic oligonucleotide
cagcgaaugcuuucccaca

SEQ ID NO: 3024799 - RNA, 19 nt, Artificial Sequence
  Description of Artificial Sequence: Synthetic oligonucleotide
ucucuccccuguggauucg

SEQ ID NO: 3024800 - RNA, 19 nt, Artificial Sequence
  Description of Artificial Sequence: Synthetic oligonucleotide
gguauuucccaacacuguu

SEQ ID NO: 3024801 - RNA, 19 nt, Artificial Sequence
  Description of Artificial Sequence: Synthetic oligonucleotide
caacacuguuuuacauaca

SEQ ID NO: 3024802 - RNA, 19 nt, Artificial Sequence
  Description of Artificial Sequence: Synthetic oligonucleotide
ggcaucgaagggaacugug

SEQ ID NO: 3024803 - RNA, 19 nt, Artificial Sequence
  Description of Artificial Sequence: Synthetic oligonucleotide
caucgaagggaacugugau

SEQ ID NO: 3024804 - RNA, 19 nt, Artificial Sequence
  Description of Artificial Sequence: Synthetic oligonucleotide
guuuacacacauaggguuu

SEQ ID NO: 3024805 - RNA, 19 nt, Artificial Sequence
  Description of Artificial Sequence: Synthetic oligonucleotide
gugauacauaaaggcuuuc

SEQ ID NO: 3024806 - RNA, 19 nt, Artificial Sequence
  Description of Artificial Sequence: Synthetic oligonucleotide
gagagcugugauacauaaa

SEQ ID NO: 3024807 - RNA, 19 nt, Artificial Sequence
  Description of Artificial Sequence: Synthetic oligonucleotide
ucuccccuguggauucguu

SEQ ID NO: 3024808 - RNA, 19 nt, Artificial Sequence
  Description of Artificial Sequence: Synthetic oligonucleotide
cguucauggcaacgaagag

SEQ ID NO: 3024809 - RNA, 19 nt, Artificial Sequence
  Description of Artificial Sequence: Synthetic oligonucleotide
ggaacugugaucagcgaau

SEQ ID NO: 3024810 - RNA, 19 nt, Artificial Sequence
  Description of Artificial Sequence: Synthetic oligonucleotide
gcaucgaagggaacuguga

SEQ ID NO: 3024811 - RNA, 19 nt, Artificial Sequence
  Description of Artificial Sequence: Synthetic oligonucleotide
cugugaucagcgaaugcuu

SEQ ID NO: 3024812 - RNA, 19 nt, Artificial Sequence
  Description of Artificial Sequence: Synthetic oligonucleotide
guauuucccaacacuguuu

SEQ ID NO: 3024813 - RNA, 19 nt, Artificial Sequence
  Description of Artificial Sequence: Synthetic oligonucleotide
caacgaagagagcugugau

SEQ ID NO: 3024814 - RNA, 19 nt, Artificial Sequence
  Description of Artificial Sequence: Synthetic oligonucleotide
cccaacacuguuuuacaua

SEQ ID NO: 3024815 - RNA, 19 nt, Artificial Sequence
  Description of Artificial Sequence: Synthetic oligonucleotide
cuccgguaugaguccucuc

SEQ ID NO: 3024816 - RNA, 19 nt, Artificial Sequence
  Description of Artificial Sequence: Synthetic oligonucleotide
ggcaacgaagagagcugug

SEQ ID NO: 3024817 - RNA, 19 nt, Artificial Sequence
  Description of Artificial Sequence: Synthetic oligonucleotide
gcgaaugcuuucccacaga

SEQ ID NO: 3024818 - RNA, 19 nt, Artificial Sequence
  Description of Artificial Sequence: Synthetic oligonucleotide
ccuuucauuuccacauugu

SEQ ID NO: 3024819 - RNA, 19 nt, Artificial Sequence
  Description of Artificial Sequence: Synthetic oligonucleotide
cgaaugcuuucccacagaa

SEQ ID NO: 3024820 - RNA, 19 nt, Artificial Sequence
  Description of Artificial Sequence: Synthetic oligonucleotide
cgguaugaguccucucaug

SEQ ID NO: 3024821 - RNA, 19 nt, Artificial Sequence
  Description of Artificial Sequence: Synthetic oligonucleotide
cccuguggauucguucaug

SEQ ID NO: 3024822 - RNA, 19 nt, Artificial Sequence
  Description of Artificial Sequence: Synthetic oligonucleotide
cgaagagagcugugauaca

SEQ ID NO: 3024823 - RNA, 19 nt, Artificial Sequence
  Description of Artificial Sequence: Synthetic oligonucleotide
cucuccccuguggauucgu

SEQ ID NO: 3024824 - RNA, 19 nt, Artificial Sequence
  Description of Artificial Sequence: Synthetic oligonucleotide
ccccuguggauucguucau

SEQ ID NO: 3024825 - RNA, 19 nt, Artificial Sequence
  Description of Artificial Sequence: Synthetic oligonucleotide
ucuucuagaacucaggacc

SEQ ID NO: 3024826 - RNA, 19 nt, Artificial Sequence
  Description of Artificial Sequence: Synthetic oligonucleotide
aaaaccaggcaguacagac

SEQ ID NO: 3024827 - RNA, 19 nt, Artificial Sequence
  Description of Artificial Sequence: Synthetic oligonucleotide
cuauugaucacuaacugag

SEQ ID NO: 3024828 - RNA, 19 nt, Artificial Sequence
  Description of Artificial Sequence: Synthetic oligonucleotide
auuuagaugccauggaggg

SEQ ID NO: 3024829 - RNA, 19 nt, Artificial Sequence
  Description of Artificial Sequence: Synthetic oligonucleotide
agaaagucaggacaggaac

SEQ ID NO: 3024830 - RNA, 19 nt, Artificial Sequence
  Description of Artificial Sequence: Synthetic oligonucleotide
ucacuaacugagaagaugc

SEQ ID NO: 3024831 - RNA, 19 nt, Artificial Sequence
  Description of Artificial Sequence: Synthetic oligonucleotide
uacacuuucagcauugcug

SEQ ID NO: 3024832 - RNA, 19 nt, Artificial Sequence
  Description of Artificial Sequence: Synthetic oligonucleotide
uaggcuuacacuuucagca

SEQ ID NO: 3024833 - RNA, 19 nt, Artificial Sequence
  Description of Artificial Sequence: Synthetic oligonucleotide
gaagaugccuuacagcugg

SEQ ID NO: 3024834 - RNA, 19 nt, Artificial Sequence
  Description of Artificial Sequence: Synthetic oligonucleotide
ucuagcuugugucagguug

SEQ ID NO: 3024835 - RNA, 19 nt, Artificial Sequence
  Description of Artificial Sequence: Synthetic oligonucleotide
gaggaaaggguuuauuagg

SEQ ID NO: 3024836 - RNA, 19 nt, Artificial Sequence
  Description of Artificial Sequence: Synthetic oligonucleotide
ugauuuagaugccauggag

SEQ ID NO: 3024837 - RNA, 19 nt, Artificial Sequence
  Description of Artificial Sequence: Synthetic oligonucleotide
gaugguaccacccacccug

SEQ ID NO: 3024838 - RNA, 19 nt, Artificial Sequence
  Description of Artificial Sequence: Synthetic oligonucleotide
uugcuguucaucauggaag

SEQ ID NO: 3024839 - RNA, 19 nt, Artificial Sequence
  Description of Artificial Sequence: Synthetic oligonucleotide
uggaagaaagucaggacag

SEQ ID NO: 3024840 - RNA, 19 nt, Artificial Sequence
  Description of Artificial Sequence: Synthetic oligonucleotide
agguugacacgccaaaacc

SEQ ID NO: 3024841 - RNA, 19 nt, Artificial Sequence
  Description of Artificial Sequence: Synthetic oligonucleotide
gauuuagaugccauggagg

SEQ ID NO: 3024842 - RNA, 19 nt, Artificial Sequence
  Description of Artificial Sequence: Synthetic oligonucleotide
acuuaaacagggcuggauc

SEQ ID NO: 3024843 - RNA, 19 nt, Artificial Sequence
  Description of Artificial Sequence: Synthetic oligonucleotide
ugaucacuaacugagaaga

SEQ ID NO: 3024844 - RNA, 19 nt, Artificial Sequence
  Description of Artificial Sequence: Synthetic oligonucleotide
agaacucaggaccaccagc

SEQ ID NO: 3024845 - RNA, 19 nt, Artificial Sequence
  Description of Artificial Sequence: Synthetic oligonucleotide
cuuaaacagggcuggaucc

SEQ ID NO: 3024846 - RNA, 19 nt, Artificial Sequence
  Description of Artificial Sequence: Synthetic oligonucleotide
auggaagaaagucaggaca

SEQ ID NO: 3024847 - RNA, 19 nt, Artificial Sequence
  Description of Artificial Sequence: Synthetic oligonucleotide
ucuuugaugacucuagcuu

SEQ ID NO: 3024848 - RNA, 19 nt, Artificial Sequence
  Description of Artificial Sequence: Synthetic oligonucleotide
ucagcauugcuguucauca

SEQ ID NO: 3024849 - RNA, 19 nt, Artificial Sequence
  Description of Artificial Sequence: Synthetic oligonucleotide
uuucuucuagaacucagga

SEQ ID NO: 3024850 - RNA, 19 nt, Artificial Sequence
  Description of Artificial Sequence: Synthetic oligonucleotide
uucucuuugaugacucuag

SEQ ID NO: 3024851 - RNA, 19 nt, Artificial Sequence
  Description of Artificial Sequence: Synthetic oligonucleotide
caucauggaagaaagucag

SEQ ID NO: 3024852 - RNA, 19 nt, Artificial Sequence
  Description of Artificial Sequence: Synthetic oligonucleotide
uucaucauggaagaaaguc

SEQ ID NO: 3024853 - RNA, 19 nt, Artificial Sequence
  Description of Artificial Sequence: Synthetic oligonucleotide
gaugacucuagcuuguguc

SEQ ID NO: 3024854 - RNA, 19 nt, Artificial Sequence
  Description of Artificial Sequence: Synthetic oligonucleotide
uugaucacuaacugagaag

SEQ ID NO: 3024855 - RNA, 19 nt, Artificial Sequence
  Description of Artificial Sequence: Synthetic oligonucleotide
cuuucuucuagaacucagg

SEQ ID NO: 3024856 - RNA, 19 nt, Artificial Sequence
  Description of Artificial Sequence: Synthetic oligonucleotide
ucauggaagaaagucagga

SEQ ID NO: 3024857 - RNA, 19 nt, Artificial Sequence
  Description of Artificial Sequence: Synthetic oligonucleotide
ugagaagaugccuuacagc

SEQ ID NO: 3024858 - RNA, 19 nt, Artificial Sequence
  Description of Artificial Sequence: Synthetic oligonucleotide
cuuugaugacucuagcuug

SEQ ID NO: 3024859 - RNA, 19 nt, Artificial Sequence
  Description of Artificial Sequence: Synthetic oligonucleotide
uuagaugccauggaggggu

SEQ ID NO: 3024860 - RNA, 19 nt, Artificial Sequence
  Description of Artificial Sequence: Synthetic oligonucleotide
gagaagaugccuuacagcu

SEQ ID NO: 3024861 - RNA, 19 nt, Artificial Sequence
  Description of Artificial Sequence: Synthetic oligonucleotide
uuaggcuuacacuuucagc

SEQ ID NO: 3024862 - RNA, 19 nt, Artificial Sequence
  Description of Artificial Sequence: Synthetic oligonucleotide
auuaggcuuacacuuucag

SEQ ID NO: 3024863 - RNA, 19 nt, Artificial Sequence
  Description of Artificial Sequence: Synthetic oligonucleotide
ugacacgccaaaaccaggc

SEQ ID NO: 3024864 - RNA, 19 nt, Artificial Sequence
  Description of Artificial Sequence: Synthetic oligonucleotide
aacucaggaccaccagccc

SEQ ID NO: 3024865 - RNA, 19 nt, Artificial Sequence
  Description of Artificial Sequence: Synthetic oligonucleotide
auugaucacuaacugagaa

SEQ ID NO: 3024866 - RNA, 19 nt, Artificial Sequence
  Description of Artificial Sequence: Synthetic oligonucleotide
agggcuggauccuggaggc

SEQ ID NO: 3024867 - RNA, 19 nt, Artificial Sequence
  Description of Artificial Sequence: Synthetic oligonucleotide
uuugaugacucuagcuugu

SEQ ID NO: 3024868 - RNA, 19 nt, Artificial Sequence
  Description of Artificial Sequence: Synthetic oligonucleotide
uccccuauugaucacuaac

SEQ ID NO: 3024869 - RNA, 19 nt, Artificial Sequence
  Description of Artificial Sequence: Synthetic oligonucleotide
uuauuaggcuuacacuuuc

SEQ ID NO: 3024870 - RNA, 19 nt, Artificial Sequence
  Description of Artificial Sequence: Synthetic oligonucleotide
uuguggcuuacucagucug

SEQ ID NO: 3024871 - RNA, 19 nt, Artificial Sequence
  Description of Artificial Sequence: Synthetic oligonucleotide
uuuauuaggcuuacacuuu

SEQ ID NO: 3024872 - RNA, 19 nt, Artificial Sequence
  Description of Artificial Sequence: Synthetic oligonucleotide
cugagaagaugccuuacag

SEQ ID NO: 3024873 - RNA, 19 nt, Artificial Sequence
  Description of Artificial Sequence: Synthetic oligonucleotide
gaacucaggaccaccagcc

SEQ ID NO: 3024874 - RNA, 19 nt, Artificial Sequence
  Description of Artificial Sequence: Synthetic oligonucleotide
agcauugcuguucaucaug

SEQ ID NO: 3024875 - RNA, 19 nt, Artificial Sequence
  Description of Artificial Sequence: Synthetic oligonucleotide
guuuauuaggcuuacacuu

SEQ ID NO: 3024876 - RNA, 19 nt, Artificial Sequence
  Description of Artificial Sequence: Synthetic oligonucleotide
ucaggacaggaacuuaaac

SEQ ID NO: 3024877 - RNA, 19 nt, Artificial Sequence
  Description of Artificial Sequence: Synthetic oligonucleotide
uucuucuagaacucaggac

SEQ ID NO: 3024878 - RNA, 19 nt, Artificial Sequence
  Description of Artificial Sequence: Synthetic oligonucleotide
uauugaucacuaacugaga

SEQ ID NO: 3024879 - RNA, 19 nt, Artificial Sequence
  Description of Artificial Sequence: Synthetic oligonucleotide
caggacaggaacuuaaaca

SEQ ID NO: 3024880 - RNA, 19 nt, Artificial Sequence
  Description of Artificial Sequence: Synthetic oligonucleotide
uugacacgccaaaaccagg

SEQ ID NO: 3024881 - RNA, 19 nt, Artificial Sequence
  Description of Artificial Sequence: Synthetic oligonucleotide
ugcuguucaucauggaaga

SEQ ID NO: 3024882 - RNA, 19 nt, Artificial Sequence
  Description of Artificial Sequence: Synthetic oligonucleotide
aacugagaagaugccuuac

SEQ ID NO: 3024883 - RNA, 19 nt, Artificial Sequence
  Description of Artificial Sequence: Synthetic oligonucleotide
aucacuaacugagaagaug

SEQ ID NO: 3024884 - RNA, 19 nt, Artificial Sequence
  Description of Artificial Sequence: Synthetic oligonucleotide
gcugauuuagaugccaugg

SEQ ID NO: 3024885 - RNA, 19 nt, Artificial Sequence
  Description of Artificial Sequence: Synthetic oligonucleotide
ucucuuugaugacucuagc

SEQ ID NO: 3024886 - RNA, 19 nt, Artificial Sequence
  Description of Artificial Sequence: Synthetic oligonucleotide
gaggcauuuccucagcuga

SEQ ID NO: 3024887 - RNA, 19 nt, Artificial Sequence
  Description of Artificial Sequence: Synthetic oligonucleotide
ggaacuuaaacagggcugg

SEQ ID NO: 3024888 - RNA, 19 nt, Artificial Sequence
  Description of Artificial Sequence: Synthetic oligonucleotide
ucauggaggcauuuccuca

SEQ ID NO: 3024889 - RNA, 19 nt, Artificial Sequence
  Description of Artificial Sequence: Synthetic oligonucleotide
uuuagaugccauggagggg

SEQ ID NO: 3024890 - RNA, 19 nt, Artificial Sequence
  Description of Artificial Sequence: Synthetic oligonucleotide
uuacacuuucagcauugcu

SEQ ID NO: 3024891 - RNA, 19 nt, Artificial Sequence
  Description of Artificial Sequence: Synthetic oligonucleotide
ucucauggaggcauuuccu

SEQ ID NO: 3024892 - RNA, 19 nt, Artificial Sequence
  Description of Artificial Sequence: Synthetic oligonucleotide
guugacacgccaaaaccag

SEQ ID NO: 3024893 - RNA, 19 nt, Artificial Sequence
  Description of Artificial Sequence: Synthetic oligonucleotide
acacgccaaaaccaggcag

SEQ ID NO: 3024894 - RNA, 19 nt, Artificial Sequence
  Description of Artificial Sequence: Synthetic oligonucleotide
uauuaggcuuacacuuuca

SEQ ID NO: 3024895 - RNA, 19 nt, Artificial Sequence
  Description of Artificial Sequence: Synthetic oligonucleotide
uagaacucaggaccaccag

SEQ ID NO: 3024896 - RNA, 19 nt, Artificial Sequence
  Description of Artificial Sequence: Synthetic oligonucleotide
uguggcuuacucagucugc

SEQ ID NO: 3024897 - RNA, 19 nt, Artificial Sequence
  Description of Artificial Sequence: Synthetic oligonucleotide
ugggcuuuccccuauugau

SEQ ID NO: 3024898 - RNA, 19 nt, Artificial Sequence
  Description of Artificial Sequence: Synthetic oligonucleotide
ucuagaacucaggaccacc

SEQ ID NO: 3024899 - RNA, 19 nt, Artificial Sequence
  Description of Artificial Sequence: Synthetic oligonucleotide
cagggcuggauccuggagg

SEQ ID NO: 3024900 - RNA, 19 nt, Artificial Sequence
  Description of Artificial Sequence: Synthetic oligonucleotide
acugagaagaugccuuaca

SEQ ID NO: 3024901 - RNA, 19 nt, Artificial Sequence
  Description of Artificial Sequence: Synthetic oligonucleotide
augacucuagcuuguguca

SEQ ID NO: 3024902 - RNA, 19 nt, Artificial Sequence
  Description of Artificial Sequence: Synthetic oligonucleotide
uacucagucugcuuucuuc

SEQ ID NO: 3024903 - RNA, 19 nt, Artificial Sequence
  Description of Artificial Sequence: Synthetic oligonucleotide
uugugucagguugacacgc

SEQ ID NO: 3024904 - RNA, 19 nt, Artificial Sequence
  Description of Artificial Sequence: Synthetic oligonucleotide
agcaaguugggaggaaagg

SEQ ID NO: 3024905 - RNA, 19 nt, Artificial Sequence
  Description of Artificial Sequence: Synthetic oligonucleotide
acuaacugagaagaugccu

SEQ ID NO: 3024906 - RNA, 19 nt, Artificial Sequence
  Description of Artificial Sequence: Synthetic oligonucleotide
aggaacuuaaacagggcug

SEQ ID NO: 3024907 - RNA, 19 nt, Artificial Sequence
  Description of Artificial Sequence: Synthetic oligonucleotide
guaccacccacccuggagc

SEQ ID NO: 3024908 - RNA, 19 nt, Artificial Sequence
  Description of Artificial Sequence: Synthetic oligonucleotide
gacucuagcuugugucagg

SEQ ID NO: 3024909 - RNA, 19 nt, Artificial Sequence
  Description of Artificial Sequence: Synthetic oligonucleotide
gaagaaagucaggacagga

SEQ ID NO: 3024910 - RNA, 19 nt, Artificial Sequence
  Description of Artificial Sequence: Synthetic oligonucleotide
aaagcaaguugggaggaaa

SEQ ID NO: 3024911 - RNA, 19 nt, Artificial Sequence
  Description of Artificial Sequence: Synthetic oligonucleotide
gaggggugcugcuuacugg

SEQ ID NO: 3024912 - RNA, 19 nt, Artificial Sequence
  Description of Artificial Sequence: Synthetic oligonucleotide
auggaggcauuuccucagc

SEQ ID NO: 3024913 - RNA, 19 nt, Artificial Sequence
  Description of Artificial Sequence: Synthetic oligonucleotide
aagcaaguugggaggaaag

SEQ ID NO: 3024914 - RNA, 19 nt, Artificial Sequence
  Description of Artificial Sequence: Synthetic oligonucleotide
aagaaagucaggacaggaa

SEQ ID NO: 3024915 - RNA, 19 nt, Artificial Sequence
  Description of Artificial Sequence: Synthetic oligonucleotide
uuuguggcuuacucagucu

SEQ ID NO: 3024916 - RNA, 19 nt, Artificial Sequence
  Description of Artificial Sequence: Synthetic oligonucleotide
ugaugacucuagcuugugu

SEQ ID NO: 3024917 - RNA, 19 nt, Artificial Sequence
  Description of Artificial Sequence: Synthetic oligonucleotide
cucaggaccaccagcccag

SEQ ID NO: 3024918 - RNA, 19 nt, Artificial Sequence
  Description of Artificial Sequence: Synthetic oligonucleotide
cagguugacacgccaaaac

SEQ ID NO: 3024919 - RNA, 19 nt, Artificial Sequence
  Description of Artificial Sequence: Synthetic oligonucleotide
agcugauuuagaugccaug

SEQ ID NO: 3024920 - RNA, 19 nt, Artificial Sequence
  Description of Artificial Sequence: Synthetic oligonucleotide
gcaaguugggaggaaaggg

SEQ ID NO: 3024921 - RNA, 19 nt, Artificial Sequence
  Description of Artificial Sequence: Synthetic oligonucleotide
uuaaacagggcuggauccu

SEQ ID NO: 3024922 - RNA, 19 nt, Artificial Sequence
  Description of Artificial Sequence: Synthetic oligonucleotide
ugacucuagcuugugucag

SEQ ID NO: 3024923 - RNA, 19 nt, Artificial Sequence
  Description of Artificial Sequence: Synthetic oligonucleotide
aacuuaaacagggcuggau

SEQ ID NO: 3024924 - RNA, 19 nt, Artificial Sequence
  Description of Artificial Sequence: Synthetic oligonucleotide
cacuaacugagaagaugcc

SEQ ID NO: 3024925 - RNA, 19 nt, Artificial Sequence
  Description of Artificial Sequence: Synthetic oligonucleotide
ugugucagguugacacgcc

SEQ ID NO: 3024926 - RNA, 19 nt, Artificial Sequence
  Description of Artificial Sequence: Synthetic oligonucleotide
cucauggaggcauuuccuc

SEQ ID NO: 3024927 - RNA, 19 nt, Artificial Sequence
  Description of Artificial Sequence: Synthetic oligonucleotide
cuagaacucaggaccacca

SEQ ID NO: 3024928 - RNA, 19 nt, Artificial Sequence
  Description of Artificial Sequence: Synthetic oligonucleotide
gccaaaaccaggcaguaca

SEQ ID NO: 3024929 - RNA, 19 nt, Artificial Sequence
  Description of Artificial Sequence: Synthetic oligonucleotide
aggggugcugcuuacuggu

SEQ ID NO: 3024930 - RNA, 19 nt, Artificial Sequence
  Description of Artificial Sequence: Synthetic oligonucleotide
acucaggaccaccagccca

SEQ ID NO: 3024931 - RNA, 19 nt, Artificial Sequence
  Description of Artificial Sequence: Synthetic oligonucleotide
agggaugguaccacccacc

SEQ ID NO: 3024932 - RNA, 19 nt, Artificial Sequence
  Description of Artificial Sequence: Synthetic oligonucleotide
ggauccuggaggcaggagc

SEQ ID NO: 3024933 - RNA, 19 nt, Artificial Sequence
  Description of Artificial Sequence: Synthetic oligonucleotide
ugucagguugacacgccaa

SEQ ID NO: 3024934 - RNA, 19 nt, Artificial Sequence
  Description of Artificial Sequence: Synthetic oligonucleotide
cuucuagaacucaggacca

SEQ ID NO: 3024935 - RNA, 19 nt, Artificial Sequence
  Description of Artificial Sequence: Synthetic oligonucleotide
uaacugagaagaugccuua

SEQ ID NO: 3024936 - RNA, 19 nt, Artificial Sequence
  Description of Artificial Sequence: Synthetic oligonucleotide
cuuucagcauugcuguuca

SEQ ID NO: 3024937 - RNA, 19 nt, Artificial Sequence
  Description of Artificial Sequence: Synthetic oligonucleotide
ugcuuacugguuuucuuuu

SEQ ID NO: 3024938 - RNA, 19 nt, Artificial Sequence
  Description of Artificial Sequence: Synthetic oligonucleotide
uccuuucucuuugaugacu

SEQ ID NO: 3024939 - RNA, 19 nt, Artificial Sequence
  Description of Artificial Sequence: Synthetic oligonucleotide
aacagggcuggauccugga

SEQ ID NO: 3024940 - RNA, 19 nt, Artificial Sequence
  Description of Artificial Sequence: Synthetic oligonucleotide
uuuccccuauugaucacua

SEQ ID NO: 3024941 - RNA, 19 nt, Artificial Sequence
  Description of Artificial Sequence: Synthetic oligonucleotide
uggaggcauuuccucagcu

SEQ ID NO: 3024942 - RNA, 19 nt, Artificial Sequence
  Description of Artificial Sequence: Synthetic oligonucleotide
cuagcuugugucagguuga

SEQ ID NO: 3024943 - RNA, 19 nt, Artificial Sequence
  Description of Artificial Sequence: Synthetic oligonucleotide
aucauggaagaaagucagg

SEQ ID NO: 3024944 - RNA, 19 nt, Artificial Sequence
  Description of Artificial Sequence: Synthetic oligonucleotide
aaguugggaggaaaggguu

SEQ ID NO: 3024945 - RNA, 19 nt, Artificial Sequence
  Description of Artificial Sequence: Synthetic oligonucleotide
gguuuauuaggcuuacacu

SEQ ID NO: 3024946 - RNA, 19 nt, Artificial Sequence
  Description of Artificial Sequence: Synthetic oligonucleotide
cugauuuagaugccaugga

SEQ ID NO: 3024947 - RNA, 19 nt, Artificial Sequence
  Description of Artificial Sequence: Synthetic oligonucleotide
gguaccacccacccuggag

SEQ ID NO: 3024948 - RNA, 19 nt, Artificial Sequence
  Description of Artificial Sequence: Synthetic oligonucleotide
cuuacacuuucagcauugc

SEQ ID NO: 3024949 - RNA, 19 nt, Artificial Sequence
  Description of Artificial Sequence: Synthetic oligonucleotide
gaaagucaggacaggaacu

SEQ ID NO: 3024950 - RNA, 19 nt, Artificial Sequence
  Description of Artificial Sequence: Synthetic oligonucleotide
acagggcuggauccuggag

SEQ ID NO: 3024951 - RNA, 19 nt, Artificial Sequence
  Description of Artificial Sequence: Synthetic oligonucleotide
ggcuuuccccuauugauca

SEQ ID NO: 3024952 - RNA, 19 nt, Artificial Sequence
  Description of Artificial Sequence: Synthetic oligonucleotide
aaaagcaaguugggaggaa

SEQ ID NO: 3024953 - RNA, 19 nt, Artificial Sequence
  Description of Artificial Sequence: Synthetic oligonucleotide
gcaggagcugauuuagaug

SEQ ID NO: 3024954 - RNA, 19 nt, Artificial Sequence
  Description of Artificial Sequence: Synthetic oligonucleotide
agaagaugccuuacagcug

SEQ ID NO: 3024955 - RNA, 19 nt, Artificial Sequence
  Description of Artificial Sequence: Synthetic oligonucleotide
cuguucaucauggaagaaa

SEQ ID NO: 3024956 - RNA, 19 nt, Artificial Sequence
  Description of Artificial Sequence: Synthetic oligonucleotide
ucagguugacacgccaaaa

SEQ ID NO: 3024957 - RNA, 19 nt, Artificial Sequence
  Description of Artificial Sequence: Synthetic oligonucleotide
caaguugggaggaaagggu

SEQ ID NO: 3024958 - RNA, 19 nt, Artificial Sequence
  Description of Artificial Sequence: Synthetic oligonucleotide
gacacgccaaaaccaggca

SEQ ID NO: 3024959 - RNA, 19 nt, Artificial Sequence
  Description of Artificial Sequence: Synthetic oligonucleotide
uugaugacucuagcuugug

SEQ ID NO: 3024960 - RNA, 19 nt, Artificial Sequence
  Description of Artificial Sequence: Synthetic oligonucleotide
ggaagaaagucaggacagg

SEQ ID NO: 3024961 - RNA, 19 nt, Artificial Sequence
  Description of Artificial Sequence: Synthetic oligonucleotide
acucuagcuugugucaggu

SEQ ID NO: 3024962 - RNA, 19 nt, Artificial Sequence
  Description of Artificial Sequence: Synthetic oligonucleotide
aggcuuacacuuucagcau

SEQ ID NO: 3024963 - RNA, 19 nt, Artificial Sequence
  Description of Artificial Sequence: Synthetic oligonucleotide
ccuauugaucacuaacuga

SEQ ID NO: 3024964 - RNA, 19 nt, Artificial Sequence
  Description of Artificial Sequence: Synthetic oligonucleotide
ggaggcauuuccucagcug

SEQ ID NO: 3024965 - RNA, 19 nt, Artificial Sequence
  Description of Artificial Sequence: Synthetic oligonucleotide
agucaggacaggaacuuaa

SEQ ID NO: 3024966 - RNA, 19 nt, Artificial Sequence
  Description of Artificial Sequence: Synthetic oligonucleotide
gguugacacgccaaaacca

SEQ ID NO: 3024967 - RNA, 19 nt, Artificial Sequence
  Description of Artificial Sequence: Synthetic oligonucleotide
agaugccauggaggggugc

SEQ ID NO: 3024968 - RNA, 19 nt, Artificial Sequence
  Description of Artificial Sequence: Synthetic oligonucleotide
gcuuucuucuagaacucag

SEQ ID NO: 3024969 - RNA, 19 nt, Artificial Sequence
  Description of Artificial Sequence: Synthetic oligonucleotide
caggaacuuaaacagggcu

SEQ ID NO: 3024970 - RNA, 19 nt, Artificial Sequence
  Description of Artificial Sequence: Synthetic oligonucleotide
cccuauugaucacuaacug

SEQ ID NO: 3024971 - RNA, 19 nt, Artificial Sequence
  Description of Artificial Sequence: Synthetic oligonucleotide
gggaugguaccacccaccc

SEQ ID NO: 3024972 - RNA, 19 nt, Artificial Sequence
  Description of Artificial Sequence: Synthetic oligonucleotide
gcauuuccucagcugaggc

SEQ ID NO: 3024973 - RNA, 19 nt, Artificial Sequence
  Description of Artificial Sequence: Synthetic oligonucleotide
cucuuugaugacucuagcu

SEQ ID NO: 3024974 - RNA, 19 nt, Artificial Sequence
  Description of Artificial Sequence: Synthetic oligonucleotide
accagcccagggaugguac

SEQ ID NO: 3024975 - RNA, 19 nt, Artificial Sequence
  Description of Artificial Sequence: Synthetic oligonucleotide
ccuuucucuuugaugacuc

SEQ ID NO: 3024976 - RNA, 19 nt, Artificial Sequence
  Description of Artificial Sequence: Synthetic oligonucleotide
ccaaaaccaggcaguacag

SEQ ID NO: 3024977 - RNA, 19 nt, Artificial Sequence
  Description of Artificial Sequence: Synthetic oligonucleotide
uucuagaacucaggaccac

SEQ ID NO: 3024978 - RNA, 19 nt, Artificial Sequence
  Description of Artificial Sequence: Synthetic oligonucleotide
uagaugccauggaggggug

SEQ ID NO: 3024979 - RNA, 19 nt, Artificial Sequence
  Description of Artificial Sequence: Synthetic oligonucleotide
ggcauuuccucagcugagg

SEQ ID NO: 3024980 - RNA, 19 nt, Artificial Sequence
  Description of Artificial Sequence: Synthetic oligonucleotide
ggaggggugcugcuuacug

SEQ ID NO: 3024981 - RNA, 19 nt, Artificial Sequence
  Description of Artificial Sequence: Synthetic oligonucleotide
gcuuacacuuucagcauug

SEQ ID NO: 3024982 - RNA, 19 nt, Artificial Sequence
  Description of Artificial Sequence: Synthetic oligonucleotide
uuacucagucugcuuucuu

SEQ ID NO: 3024983 - RNA, 19 nt, Artificial Sequence
  Description of Artificial Sequence: Synthetic oligonucleotide
gucagguugacacgccaaa

SEQ ID NO: 3024984 - RNA, 19 nt, Artificial Sequence
  Description of Artificial Sequence: Synthetic oligonucleotide
gauccuggaggcaggagcu

SEQ ID NO: 3024985 - RNA, 19 nt, Artificial Sequence
  Description of Artificial Sequence: Synthetic oligonucleotide
aagucaggacaggaacuua

SEQ ID NO: 3024986 - RNA, 19 nt, Artificial Sequence
  Description of Artificial Sequence: Synthetic oligonucleotide
aggcauuuccucagcugag

SEQ ID NO: 3024987 - RNA, 19 nt, Artificial Sequence
  Description of Artificial Sequence: Synthetic oligonucleotide
ggcuggauccuggaggcag

SEQ ID NO: 3024988 - RNA, 19 nt, Artificial Sequence
  Description of Artificial Sequence: Synthetic oligonucleotide
gugucagguugacacgcca

SEQ ID NO: 3024989 - RNA, 19 nt, Artificial Sequence
  Description of Artificial Sequence: Synthetic oligonucleotide
uuccccuauugaucacuaa

SEQ ID NO: 3024990 - RNA, 19 nt, Artificial Sequence
  Description of Artificial Sequence: Synthetic oligonucleotide
gcuuacucagucugcuuuc

SEQ ID NO: 3024991 - RNA, 19 nt, Artificial Sequence
  Description of Artificial Sequence: Synthetic oligonucleotide
cugggcuuuccccuauuga

SEQ ID NO: 3024992 - RNA, 19 nt, Artificial Sequence
  Description of Artificial Sequence: Synthetic oligonucleotide
gaacuuaaacagggcugga

SEQ ID NO: 3024993 - RNA, 19 nt, Artificial Sequence
  Description of Artificial Sequence: Synthetic oligonucleotide
cacgccaaaaccaggcagu

SEQ ID NO: 3024994 - RNA, 19 nt, Artificial Sequence
  Description of Artificial Sequence: Synthetic oligonucleotide
uggaucucauggaggcauu

SEQ ID NO: 3024995 - RNA, 19 nt, Artificial Sequence
  Description of Artificial Sequence: Synthetic oligonucleotide
uggauccuggaggcaggag

SEQ ID NO: 3024996 - RNA, 19 nt, Artificial Sequence
  Description of Artificial Sequence: Synthetic oligonucleotide
gaggcuccuuucucuuuga

SEQ ID NO: 3024997 - RNA, 19 nt, Artificial Sequence
  Description of Artificial Sequence: Synthetic oligonucleotide
augguaccacccacccugg

SEQ ID NO: 3024998 - RNA, 19 nt, Artificial Sequence
  Description of Artificial Sequence: Synthetic oligonucleotide
caaaaccaggcaguacaga

SEQ ID NO: 3024999 - RNA, 19 nt, Artificial Sequence
  Description of Artificial Sequence: Synthetic oligonucleotide
gaugccauggaggggugcu

SEQ ID NO: 3025000 - RNA, 19 nt, Artificial Sequence
  Description of Artificial Sequence: Synthetic oligonucleotide
guugggaggaaaggguuua

SEQ ID NO: 3025001 - RNA, 19 nt, Artificial Sequence
  Description of Artificial Sequence: Synthetic oligonucleotide
uagcuugugucagguugac

SEQ ID NO: 3025002 - RNA, 19 nt, Artificial Sequence
  Description of Artificial Sequence: Synthetic oligonucleotide
cauuuccucagcugaggcu

SEQ ID NO: 3025003 - RNA, 19 nt, Artificial Sequence
  Description of Artificial Sequence: Synthetic oligonucleotide
aguugggaggaaaggguuu

SEQ ID NO: 3025004 - RNA, 19 nt, Artificial Sequence
  Description of Artificial Sequence: Synthetic oligonucleotide
ugguaccacccacccugga

SEQ ID NO: 3025005 - RNA, 19 nt, Artificial Sequence
  Description of Artificial Sequence: Synthetic oligonucleotide
uggcuuacucagucugcuu

SEQ ID NO: 3025006 - RNA, 19 nt, Artificial Sequence
  Description of Artificial Sequence: Synthetic oligonucleotide
uugggaggaaaggguuuau

SEQ ID NO: 3025007 - RNA, 19 nt, Artificial Sequence
  Description of Artificial Sequence: Synthetic oligonucleotide
agaugccuuacagcuggau

SEQ ID NO: 3025008 - RNA, 19 nt, Artificial Sequence
  Description of Artificial Sequence: Synthetic oligonucleotide
gcugggcuuuccccuauug

SEQ ID NO: 3025009 - RNA, 19 nt, Artificial Sequence
  Description of Artificial Sequence: Synthetic oligonucleotide
uuucagcauugcuguucau

SEQ ID NO: 3025010 - RNA, 19 nt, Artificial Sequence
  Description of Artificial Sequence: Synthetic oligonucleotide
gucaggacaggaacuuaaa

SEQ ID NO: 3025011 - RNA, 19 nt, Artificial Sequence
  Description of Artificial Sequence: Synthetic oligonucleotide
aagaugccuuacagcugga

SEQ ID NO: 3025012 - RNA, 19 nt, Artificial Sequence
  Description of Artificial Sequence: Synthetic oligonucleotide
ggcaggagcugauuuagau

SEQ ID NO: 3025013 - RNA, 19 nt, Artificial Sequence
  Description of Artificial Sequence: Synthetic oligonucleotide
cuuucucuuugaugacucu

SEQ ID NO: 3025014 - RNA, 19 nt, Artificial Sequence
  Description of Artificial Sequence: Synthetic oligonucleotide
ggaggcaggagcugauuua

SEQ ID NO: 3025015 - RNA, 19 nt, Artificial Sequence
  Description of Artificial Sequence: Synthetic oligonucleotide
uggaggggugcugcuuacu

SEQ ID NO: 3025016 - RNA, 19 nt, Artificial Sequence
  Description of Artificial Sequence: Synthetic oligonucleotide
gcuggauccuggaggcagg

SEQ ID NO: 3025017 - RNA, 19 nt, Artificial Sequence
  Description of Artificial Sequence: Synthetic oligonucleotide
gaucacuaacugagaagau

SEQ ID NO: 3025018 - RNA, 19 nt, Artificial Sequence
  Description of Artificial Sequence: Synthetic oligonucleotide
cuuuccccuauugaucacu

SEQ ID NO: 3025019 - RNA, 19 nt, Artificial Sequence
  Description of Artificial Sequence: Synthetic oligonucleotide
gggcuuuccccuauugauc

SEQ ID NO: 3025020 - RNA, 19 nt, Artificial Sequence
  Description of Artificial Sequence: Synthetic oligonucleotide
cuggaucucauggaggcau

SEQ ID NO: 3025021 - RNA, 19 nt, Artificial Sequence
  Description of Artificial Sequence: Synthetic oligonucleotide
cucagucugcuuucuucua

SEQ ID NO: 3025022 - RNA, 19 nt, Artificial Sequence
  Description of Artificial Sequence: Synthetic oligonucleotide
ggcuuacucagucugcuuu

SEQ ID NO: 3025023 - RNA, 19 nt, Artificial Sequence
  Description of Artificial Sequence: Synthetic oligonucleotide
guggcuuacucagucugcu

SEQ ID NO: 3025024 - RNA, 19 nt, Artificial Sequence
  Description of Artificial Sequence: Synthetic oligonucleotide
augccauggaggggugcug

SEQ ID NO: 3025025 - RNA, 19 nt, Artificial Sequence
  Description of Artificial Sequence: Synthetic oligonucleotide
ccccuauugaucacuaacu

SEQ ID NO: 3025026 - RNA, 19 nt, Artificial Sequence
  Description of Artificial Sequence: Synthetic oligonucleotide
auccuggaggcaggagcug

SEQ ID NO: 3025027 - RNA, 19 nt, Artificial Sequence
  Description of Artificial Sequence: Synthetic oligonucleotide
guucaucauggaagaaagu

SEQ ID NO: 3025028 - RNA, 19 nt, Artificial Sequence
  Description of Artificial Sequence: Synthetic oligonucleotide
gagcugauuuagaugccau

SEQ ID NO: 3025029 - RNA, 19 nt, Artificial Sequence
  Description of Artificial Sequence: Synthetic oligonucleotide
acgccaaaaccaggcagua

SEQ ID NO: 3025030 - RNA, 19 nt, Artificial Sequence
  Description of Artificial Sequence: Synthetic oligonucleotide
cuuacucagucugcuuucu

SEQ ID NO: 3025031 - RNA, 19 nt, Artificial Sequence
  Description of Artificial Sequence: Synthetic oligonucleotide
ccagcccagggaugguacc

SEQ ID NO: 3025032 - RNA, 19 nt, Artificial Sequence
  Description of Artificial Sequence: Synthetic oligonucleotide
gcuuuccccuauugaucac

SEQ ID NO: 3025033 - RNA, 19 nt, Artificial Sequence
  Description of Artificial Sequence: Synthetic oligonucleotide
cagcccagggaugguacca

SEQ ID NO: 3025034 - RNA, 19 nt, Artificial Sequence
  Description of Artificial Sequence: Synthetic oligonucleotide
cacccacccuggagcuggg

SEQ ID NO: 3025035 - RNA, 19 nt, Artificial Sequence
  Description of Artificial Sequence: Synthetic oligonucleotide
gugcugcuuacugguuuuc

SEQ ID NO: 3025036 - RNA, 19 nt, Artificial Sequence
  Description of Artificial Sequence: Synthetic oligonucleotide
cuggauccuggaggcagga

SEQ ID NO: 3025037 - RNA, 19 nt, Artificial Sequence
  Description of Artificial Sequence: Synthetic oligonucleotide
accacccacccuggagcug

SEQ ID NO: 3025038 - RNA, 19 nt, Artificial Sequence
  Description of Artificial Sequence: Synthetic oligonucleotide
agcugggcuuuccccuauu

SEQ ID NO: 3025039 - RNA, 19 nt, Artificial Sequence
  Description of Artificial Sequence: Synthetic oligonucleotide
gcugcuuacugguuuucuu

SEQ ID NO: 3025040 - RNA, 19 nt, Artificial Sequence
  Description of Artificial Sequence: Synthetic oligonucleotide
ggagcugggcuuuccccua

SEQ ID NO: 3025041 - RNA, 19 nt, Artificial Sequence
  Description of Artificial Sequence: Synthetic oligonucleotide
ggcuuacacuuucagcauu

SEQ ID NO: 3025042 - RNA, 19 nt, Artificial Sequence
  Description of Artificial Sequence: Synthetic oligonucleotide
cagcauugcuguucaucau

SEQ ID NO: 3025043 - RNA, 19 nt, Artificial Sequence
  Description of Artificial Sequence: Synthetic oligonucleotide
gcuguucaucauggaagaa

SEQ ID NO: 3025044 - RNA, 19 nt, Artificial Sequence
  Description of Artificial Sequence: Synthetic oligonucleotide
gggugcugcuuacugguuu

SEQ ID NO: 3025045 - RNA, 19 nt, Artificial Sequence
  Description of Artificial Sequence: Synthetic oligonucleotide
gagcugggcuuuccccuau

SEQ ID NO: 3025046 - RNA, 19 nt, Artificial Sequence
  Description of Artificial Sequence: Synthetic oligonucleotide
gcugaggcuccuuucucuu

SEQ ID NO: 3025047 - RNA, 19 nt, Artificial Sequence
  Description of Artificial Sequence: Synthetic oligonucleotide
cugaggcuccuuucucuuu

SEQ ID NO: 3025048 - RNA, 19 nt, Artificial Sequence
  Description of Artificial Sequence: Synthetic oligonucleotide
caccagcccagggauggua

SEQ ID NO: 3025049 - RNA, 19 nt, Artificial Sequence
  Description of Artificial Sequence: Synthetic oligonucleotide
cucuagcuugugucagguu

SEQ ID NO: 3025050 - RNA, 19 nt, Artificial Sequence
  Description of Artificial Sequence: Synthetic oligonucleotide
cacuuucagcauugcuguu

SEQ ID NO: 3025051 - RNA, 19 nt, Artificial Sequence
  Description of Artificial Sequence: Synthetic oligonucleotide
cgccaaaaccaggcaguac

SEQ ID NO: 3025052 - RNA, 19 nt, Artificial Sequence
  Description of Artificial Sequence: Synthetic oligonucleotide
cccuggagcugggcuuucc

SEQ ID NO: 3025053 - RNA, 19 nt, Artificial Sequence
  Description of Artificial Sequence: Synthetic oligonucleotide
ggaucucauggaggcauuu

SEQ ID NO: 3025054 - RNA, 19 nt, Artificial Sequence
  Description of Artificial Sequence: Synthetic oligonucleotide
cccacccuggagcugggcu

SEQ ID NO: 3025055 - RNA, 19 nt, Artificial Sequence
  Description of Artificial Sequence: Synthetic oligonucleotide
cacccuggagcugggcuuu

SEQ ID NO: 3025056 - RNA, 19 nt, Artificial Sequence
  Description of Artificial Sequence: Synthetic oligonucleotide
gggcuggauccuggaggca

SEQ ID NO: 3025057 - RNA, 19 nt, Artificial Sequence
  Description of Artificial Sequence: Synthetic oligonucleotide
ggggugcugcuuacugguu

SEQ ID NO: 3025058 - RNA, 19 nt, Artificial Sequence
  Description of Artificial Sequence: Synthetic oligonucleotide
ccaccagcccagggauggu

SEQ ID NO: 3025059 - RNA, 19 nt, Artificial Sequence
  Description of Artificial Sequence: Synthetic oligonucleotide
uuuaagaugaacuucaugg

SEQ ID NO: 3025060 - RNA, 19 nt, Artificial Sequence
  Description of Artificial Sequence: Synthetic oligonucleotide
aacuucaugguuuagaagu

SEQ ID NO: 3025061 - RNA, 19 nt, Artificial Sequence
  Description of Artificial Sequence: Synthetic oligonucleotide
uuaaguggaaaauugugcg

SEQ ID NO: 3025062 - RNA, 19 nt, Artificial Sequence
  Description of Artificial Sequence: Synthetic oligonucleotide
cugaguagaacuuauauug

SEQ ID NO: 3025063 - RNA, 19 nt, Artificial Sequence
  Description of Artificial Sequence: Synthetic oligonucleotide
auuucaugcauucagagga

SEQ ID NO: 3025064 - RNA, 19 nt, Artificial Sequence
  Description of Artificial Sequence: Synthetic oligonucleotide
acuuauauuggucauuggg

SEQ ID NO: 3025065 - RNA, 19 nt, Artificial Sequence
  Description of Artificial Sequence: Synthetic oligonucleotide
uuugcuguaguccacauuc

SEQ ID NO: 3025066 - RNA, 19 nt, Artificial Sequence
  Description of Artificial Sequence: Synthetic oligonucleotide
ugguuuagaagucagggcc

SEQ ID NO: 3025067 - RNA, 19 nt, Artificial Sequence
  Description of Artificial Sequence: Synthetic oligonucleotide
auuguaagcagcuuuaaga

SEQ ID NO: 3025068 - RNA, 19 nt, Artificial Sequence
  Description of Artificial Sequence: Synthetic oligonucleotide
uggaaaauugugcggaugg

SEQ ID NO: 3025069 - RNA, 19 nt, Artificial Sequence
  Description of Artificial Sequence: Synthetic oligonucleotide
  modified_base (5)..(5): a, c, u, g, unknown or other
uucunagggaccuucauug

SEQ ID NO: 3025070 - RNA, 19 nt, Artificial Sequence
  Description of Artificial Sequence: Synthetic oligonucleotide
acacauacagugcugcucc

SEQ ID NO: 3025071 - RNA, 19 nt, Artificial Sequence
  Description of Artificial Sequence: Synthetic oligonucleotide
auauuggucauugggaccc

SEQ ID NO: 3025072 - RNA, 19 nt, Artificial Sequence
  Description of Artificial Sequence: Synthetic oligonucleotide
aggguuauuuuccuguccc

SEQ ID NO: 3025073 - RNA, 19 nt, Artificial Sequence
  Description of Artificial Sequence: Synthetic oligonucleotide
ugaguagaacuuauauugg

SEQ ID NO: 3025074 - RNA, 19 nt, Artificial Sequence
  Description of Artificial Sequence: Synthetic oligonucleotide
aguauuccugguuaagugg

SEQ ID NO: 3025075 - RNA, 19 nt, Artificial Sequence
  Description of Artificial Sequence: Synthetic oligonucleotide
gauuucaugcauucagagg

SEQ ID NO: 3025076 - RNA, 19 nt, Artificial Sequence
  Description of Artificial Sequence: Synthetic oligonucleotide
caugauuucaugcauucag

SEQ ID NO: 3025077 - RNA, 19 nt, Artificial Sequence
  Description of Artificial Sequence: Synthetic oligonucleotide
uuauauuggucauugggac

SEQ ID NO: 3025078 - RNA, 19 nt, Artificial Sequence
  Description of Artificial Sequence: Synthetic oligonucleotide
aagagcggaaucaagcugg

SEQ ID NO: 3025079 - RNA, 19 nt, Artificial Sequence
  Description of Artificial Sequence: Synthetic oligonucleotide
ugauuucaugcauucagag

SEQ ID NO: 3025080 - RNA, 19 nt, Artificial Sequence
  Description of Artificial Sequence: Synthetic oligonucleotide
augguuuagaagucagggc

SEQ ID NO: 3025081 - RNA, 19 nt, Artificial Sequence
  Description of Artificial Sequence: Synthetic oligonucleotide
acauucacugaguagaacu

SEQ ID NO: 3025082 - RNA, 19 nt, Artificial Sequence
  Description of Artificial Sequence: Synthetic oligonucleotide
aaaacgaagagcggaauca

SEQ ID NO: 3025083 - RNA, 19 nt, Artificial Sequence
  Description of Artificial Sequence: Synthetic oligonucleotide
uaaguggaaaauugugcgg

SEQ ID NO: 3025084 - RNA, 19 nt, Artificial Sequence
  Description of Artificial Sequence: Synthetic oligonucleotide
aaauugugcggauggcuuc

SEQ ID NO: 3025085 - RNA, 19 nt, Artificial Sequence
  Description of Artificial Sequence: Synthetic oligonucleotide
uccacauucacugaguaga

SEQ ID NO: 3025086 - RNA, 19 nt, Artificial Sequence
  Description of Artificial Sequence: Synthetic oligonucleotide
aaggcucaggguuauuuuc

SEQ ID NO: 3025087 - RNA, 19 nt, Artificial Sequence
  Description of Artificial Sequence: Synthetic oligonucleotide
caugguuuagaagucaggg

SEQ ID NO: 3025088 - RNA, 19 nt, Artificial Sequence
  Description of Artificial Sequence: Synthetic oligonucleotide
uucagaggaguauuccugg

SEQ ID NO: 3025089 - RNA, 19 nt, Artificial Sequence
  Description of Artificial Sequence: Synthetic oligonucleotide
uuaagaugaacuucauggu

SEQ ID NO: 3025090 - RNA, 19 nt, Artificial Sequence
  Description of Artificial Sequence: Synthetic oligonucleotide
gucauugggacccaguuug

SEQ ID NO: 3025091 - RNA, 19 nt, Artificial Sequence
  Description of Artificial Sequence: Synthetic oligonucleotide
uucaguuugcuguagucca

SEQ ID NO: 3025092 - RNA, 19 nt, Artificial Sequence
  Description of Artificial Sequence: Synthetic oligonucleotide
guuaaguggaaaauugugc

SEQ ID NO: 3025093 - RNA, 19 nt, Artificial Sequence
  Description of Artificial Sequence: Synthetic oligonucleotide
uuauuuuccugucccagcu

SEQ ID NO: 3025094 - RNA, 19 nt, Artificial Sequence
  Description of Artificial Sequence: Synthetic oligonucleotide
cuuauauuggucauuggga

SEQ ID NO: 3025095 - RNA, 19 nt, Artificial Sequence
  Description of Artificial Sequence: Synthetic oligonucleotide
aacaaugccaggcgcaaca

SEQ ID NO: 3025096 - RNA, 19 nt, Artificial Sequence
  Description of Artificial Sequence: Synthetic oligonucleotide
  modified_base (15)..(15): a, c, u, g, unknown or other
ugcggauggcuucunaggg

SEQ ID NO: 3025097 - RNA, 19 nt, Artificial Sequence
  Description of Artificial Sequence: Synthetic oligonucleotide
uucaugguuuagaagucag

SEQ ID NO: 3025098 - RNA, 19 nt, Artificial Sequence
  Description of Artificial Sequence: Synthetic oligonucleotide
aucuggguugaacaaugcc

SEQ ID NO: 3025099 - RNA, 19 nt, Artificial Sequence
  Description of Artificial Sequence: Synthetic oligonucleotide
ugaacuucaugguuuagaa

SEQ ID NO: 3025100 - RNA, 19 nt, Artificial Sequence
  Description of Artificial Sequence: Synthetic oligonucleotide
aacacauacagugcugcuc

SEQ ID NO: 3025101 - RNA, 19 nt, Artificial Sequence
  Description of Artificial Sequence: Synthetic oligonucleotide
acagugcugcuccaguucc

SEQ ID NO: 3025102 - RNA, 19 nt, Artificial Sequence
  Description of Artificial Sequence: Synthetic oligonucleotide
uuguaagcagcuuuaagau

SEQ ID NO: 3025103 - RNA, 19 nt, Artificial Sequence
  Description of Artificial Sequence: Synthetic oligonucleotide
cugguuaaguggaaaauug

SEQ ID NO: 3025104 - RNA, 19 nt, Artificial Sequence
  Description of Artificial Sequence: Synthetic oligonucleotide
aggcgcaacacauacagug

SEQ ID NO: 3025105 - RNA, 19 nt, Artificial Sequence
  Description of Artificial Sequence: Synthetic oligonucleotide
guagaacuuauauugguca

SEQ ID NO: 3025106 - RNA, 19 nt, Artificial Sequence
  Description of Artificial Sequence: Synthetic oligonucleotide
gaacuuauauuggucauug

SEQ ID NO: 3025107 - RNA, 19 nt, Artificial Sequence
  Description of Artificial Sequence: Synthetic oligonucleotide
uauauuggucauugggacc

SEQ ID NO: 3025108 - RNA, 19 nt, Artificial Sequence
  Description of Artificial Sequence: Synthetic oligonucleotide
gaguauuccugguuaagug

SEQ ID NO: 3025109 - RNA, 19 nt, Artificial Sequence
  Description of Artificial Sequence: Synthetic oligonucleotide
ucaugguuuagaagucagg

SEQ ID NO: 3025110 - RNA, 19 nt, Artificial Sequence
  Description of Artificial Sequence: Synthetic oligonucleotide
aacuuauauuggucauugg

SEQ ID NO: 3025111 - RNA, 19 nt, Artificial Sequence
  Description of Artificial Sequence: Synthetic oligonucleotide
acgaagagcggaaucaagc

SEQ ID NO: 3025112 - RNA, 19 nt, Artificial Sequence
  Description of Artificial Sequence: Synthetic oligonucleotide
auugggacccaguuuguuc

SEQ ID NO: 3025113 - RNA, 19 nt, Artificial Sequence
  Description of Artificial Sequence: Synthetic oligonucleotide
guaagcagcuuuaagauga

SEQ ID NO: 3025114 - RNA, 19 nt, Artificial Sequence
  Description of Artificial Sequence: Synthetic oligonucleotide
aguagaacuuauauugguc

SEQ ID NO: 3025115 - RNA, 19 nt, Artificial Sequence
  Description of Artificial Sequence: Synthetic oligonucleotide
aaguggaaaauugugcgga

SEQ ID NO: 3025116 - RNA, 19 nt, Artificial Sequence
  Description of Artificial Sequence: Synthetic oligonucleotide
uguaagcagcuuuaagaug

SEQ ID NO: 3025117 - RNA, 19 nt, Artificial Sequence
  Description of Artificial Sequence: Synthetic oligonucleotide
cuggguugaacaaugccag

SEQ ID NO: 3025118 - RNA, 19 nt, Artificial Sequence
  Description of Artificial Sequence: Synthetic oligonucleotide
  modified_base (2)..(2): a, c, u, g, unknown or other
unagggaccuucauuguaa

SEQ ID NO: 3025119 - RNA, 19 nt, Artificial Sequence
  Description of Artificial Sequence: Synthetic oligonucleotide
uugggacccaguuuguucc

SEQ ID NO: 3025120 - RNA, 19 nt, Artificial Sequence
  Description of Artificial Sequence: Synthetic oligonucleotide
acccaguuuguuccaaggc

SEQ ID NO: 3025121 - RNA, 19 nt, Artificial Sequence
  Description of Artificial Sequence: Synthetic oligonucleotide
uugaacaaugccaggcgca

SEQ ID NO: 3025122 - RNA, 19 nt, Artificial Sequence
  Description of Artificial Sequence: Synthetic oligonucleotide
aaucaagcugggaugcuuc

SEQ ID NO: 3025123 - RNA, 19 nt, Artificial Sequence
  Description of Artificial Sequence: Synthetic oligonucleotide
uuucaugcauucagaggag

SEQ ID NO: 3025124 - RNA, 19 nt, Artificial Sequence
  Description of Artificial Sequence: Synthetic oligonucleotide
ugguuaaguggaaaauugu

SEQ ID NO: 3025125 - RNA, 19 nt, Artificial Sequence
  Description of Artificial Sequence: Synthetic oligonucleotide
uucauuguaagcagcuuua

SEQ ID NO: 3025126 - RNA, 19 nt, Artificial Sequence
  Description of Artificial Sequence: Synthetic oligonucleotide
  modified_base (16)..(16): a, c, u, g, unknown or other
gugcggauggcuucunagg

SEQ ID NO: 3025127 - RNA, 19 nt, Artificial Sequence
  Description of Artificial Sequence: Synthetic oligonucleotide
gaagagcggaaucaagcug

SEQ ID NO: 3025128 - RNA, 19 nt, Artificial Sequence
  Description of Artificial Sequence: Synthetic oligonucleotide
uugcccgaggaucuggcgg

SEQ ID NO: 3025129 - RNA, 19 nt, Artificial Sequence
  Description of Artificial Sequence: Synthetic oligonucleotide
gaacuucaugguuuagaag

SEQ ID NO: 3025130 - RNA, 19 nt, Artificial Sequence
  Description of Artificial Sequence: Synthetic oligonucleotide
guuauuuuccugucccagc

SEQ ID NO: 3025131 - RNA, 19 nt, Artificial Sequence
  Description of Artificial Sequence: Synthetic oligonucleotide
agcggaaucaagcugggau

SEQ ID NO: 3025132 - RNA, 19 nt, Artificial Sequence
  Description of Artificial Sequence: Synthetic oligonucleotide
guaguccacauucacugag

SEQ ID NO: 3025133 - RNA, 19 nt, Artificial Sequence
  Description of Artificial Sequence: Synthetic oligonucleotide
cuuuaagaugaacuucaug

SEQ ID NO: 3025134 - RNA, 19 nt, Artificial Sequence
  Description of Artificial Sequence: Synthetic oligonucleotide
  modified_base (17)..(17): a, c, u, g, unknown or other
ugugcggauggcuucunag

SEQ ID NO: 3025135 - RNA, 19 nt, Artificial Sequence
  Description of Artificial Sequence: Synthetic oligonucleotide
auuuuccugucccagcuga

SEQ ID NO: 3025136 - RNA, 19 nt, Artificial Sequence
  Description of Artificial Sequence: Synthetic oligonucleotide
acugaguagaacuuauauu

SEQ ID NO: 3025137 - RNA, 19 nt, Artificial Sequence
  Description of Artificial Sequence: Synthetic oligonucleotide
gacccaguuuguuccaagg

SEQ ID NO: 3025138 - RNA, 19 nt, Artificial Sequence
  Description of Artificial Sequence: Synthetic oligonucleotide
guugaacaaugccaggcgc

SEQ ID NO: 3025139 - RNA, 19 nt, Artificial Sequence
  Description of Artificial Sequence: Synthetic oligonucleotide
aagcugggaugcuucuugg

SEQ ID NO: 3025140 - RNA, 19 nt, Artificial Sequence
  Description of Artificial Sequence: Synthetic oligonucleotide
agcuuuaagaugaacuuca

SEQ ID NO: 3025141 - RNA, 19 nt, Artificial Sequence
  Description of Artificial Sequence: Synthetic oligonucleotide
cuucaguuugcuguagucc

SEQ ID NO: 3025142 - RNA, 19 nt, Artificial Sequence
  Description of Artificial Sequence: Synthetic oligonucleotide
agcagcuuuaagaugaacu

SEQ ID NO: 3025143 - RNA, 19 nt, Artificial Sequence
  Description of Artificial Sequence: Synthetic oligonucleotide
gaugcuucuuggcuugccc

SEQ ID NO: 3025144 - RNA, 19 nt, Artificial Sequence
  Description of Artificial Sequence: Synthetic oligonucleotide
cauuguaagcagcuuuaag

SEQ ID NO: 3025145 - RNA, 19 nt, Artificial Sequence
  Description of Artificial Sequence: Synthetic oligonucleotide
uucacugaguagaacuuau

SEQ ID NO: 3025146 - RNA, 19 nt, Artificial Sequence
  Description of Artificial Sequence: Synthetic oligonucleotide
uccuccugcuccaauaaaa

SEQ ID NO: 3025147 - RNA, 19 nt, Artificial Sequence
  Description of Artificial Sequence: Synthetic oligonucleotide
gguugaacaaugccaggcg

SEQ ID NO: 3025148 - RNA, 19 nt, Artificial Sequence
  Description of Artificial Sequence: Synthetic oligonucleotide
aaugccaggcgcaacacau

SEQ ID NO: 3025149 - RNA, 19 nt, Artificial Sequence
  Description of Artificial Sequence: Synthetic oligonucleotide
augcuucuuggcuugcccg

SEQ ID NO: 3025150 - RNA, 19 nt, Artificial Sequence
  Description of Artificial Sequence: Synthetic oligonucleotide
cauguuugcggcagaggcc

SEQ ID NO: 3025151 - RNA, 19 nt, Artificial Sequence
  Description of Artificial Sequence: Synthetic oligonucleotide
uggcggagcauguuugcgg

SEQ ID NO: 3025152 - RNA, 19 nt, Artificial Sequence
  Description of Artificial Sequence: Synthetic oligonucleotide
cugacaucuggguugaaca

SEQ ID NO: 3025153 - RNA, 19 nt, Artificial Sequence
  Description of Artificial Sequence: Synthetic oligonucleotide
agaggaguauuccugguua

SEQ ID NO: 3025154 - RNA, 19 nt, Artificial Sequence
  Description of Artificial Sequence: Synthetic oligonucleotide
ucuucaguuugcuguaguc

SEQ ID NO: 3025155 - RNA, 19 nt, Artificial Sequence
  Description of Artificial Sequence: Synthetic oligonucleotide
  modified_base (4)..(4): a, c, u, g, unknown or other
ucunagggaccuucauugu

SEQ ID NO: 3025156 - RNA, 19 nt, Artificial Sequence
  Description of Artificial Sequence: Synthetic oligonucleotide
uagaacuuauauuggucau

SEQ ID NO: 3025157 - RNA, 19 nt, Artificial Sequence
  Description of Artificial Sequence: Synthetic oligonucleotide
agggaccuucauuguaagc

SEQ ID NO: 3025158 - RNA, 19 nt, Artificial Sequence
  Description of Artificial Sequence: Synthetic oligonucleotide
uuggcuugcccgaggaucu

SEQ ID NO: 3025159 - RNA, 19 nt, Artificial Sequence
  Description of Artificial Sequence: Synthetic oligonucleotide
gaggccuaccuccacggag

SEQ ID NO: 3025160 - RNA, 19 nt, Artificial Sequence
  Description of Artificial Sequence: Synthetic oligonucleotide
gcauguuugcggcagaggc

SEQ ID NO: 3025161 - RNA, 19 nt, Artificial Sequence
  Description of Artificial Sequence: Synthetic oligonucleotide
uauuuuccugucccagcug

SEQ ID NO: 3025162 - RNA, 19 nt, Artificial Sequence
  Description of Artificial Sequence: Synthetic oligonucleotide
gguuaaguggaaaauugug

SEQ ID NO: 3025163 - RNA, 19 nt, Artificial Sequence
  Description of Artificial Sequence: Synthetic oligonucleotide
ugcuguaguccacauucac

SEQ ID NO: 3025164 - RNA, 19 nt, Artificial Sequence
  Description of Artificial Sequence: Synthetic oligonucleotide
ugcauucagaggaguauuc

SEQ ID NO: 3025165 - RNA, 19 nt, Artificial Sequence
  Description of Artificial Sequence: Synthetic oligonucleotide
auucagaggaguauuccug

SEQ ID NO: 3025166 - RNA, 19 nt, Artificial Sequence
  Description of Artificial Sequence: Synthetic oligonucleotide
uuagaagucagggccuucu

SEQ ID NO: 3025167 - RNA, 19 nt, Artificial Sequence
  Description of Artificial Sequence: Synthetic oligonucleotide
aggcucaggguuauuuucc

SEQ ID NO: 3025168 - RNA, 19 nt, Artificial Sequence
  Description of Artificial Sequence: Synthetic oligonucleotide
agcugggaugcuucuuggc

SEQ ID NO: 3025169 - RNA, 19 nt, Artificial Sequence
  Description of Artificial Sequence: Synthetic oligonucleotide
aagucagggccuucuuucu

SEQ ID NO: 3025170 - RNA, 19 nt, Artificial Sequence
  Description of Artificial Sequence: Synthetic oligonucleotide
caagcugggaugcuucuug

SEQ ID NO: 3025171 - RNA, 19 nt, Artificial Sequence
  Description of Artificial Sequence: Synthetic oligonucleotide
ugccaggcgcaacacauac

SEQ ID NO: 3025172 - RNA, 19 nt, Artificial Sequence
  Description of Artificial Sequence: Synthetic oligonucleotide
aacgaagagcggaaucaag

SEQ ID NO: 3025173 - RNA, 19 nt, Artificial Sequence
  Description of Artificial Sequence: Synthetic oligonucleotide
ucaugcauucagaggagua

SEQ ID NO: 3025174 - RNA, 19 nt, Artificial Sequence
  Description of Artificial Sequence: Synthetic oligonucleotide
aauugugcggauggcuucu

SEQ ID NO: 3025175 - RNA, 19 nt, Artificial Sequence
  Description of Artificial Sequence: Synthetic oligonucleotide
guuuguuccaaggcucagg

SEQ ID NO: 3025176 - RNA, 19 nt, Artificial Sequence
  Description of Artificial Sequence: Synthetic oligonucleotide
uacagugcugcuccaguuc

SEQ ID NO: 3025177 - RNA, 19 nt, Artificial Sequence
  Description of Artificial Sequence: Synthetic oligonucleotide
uguaguccacauucacuga

SEQ ID NO: 3025178 - RNA, 19 nt, Artificial Sequence
  Description of Artificial Sequence: Synthetic oligonucleotide
uuccugguuaaguggaaaa

SEQ ID NO: 3025179 - RNA, 19 nt, Artificial Sequence
  Description of Artificial Sequence: Synthetic oligonucleotide
uggguugaacaaugccagg

SEQ ID NO: 3025180 - RNA, 19 nt, Artificial Sequence
  Description of Artificial Sequence: Synthetic oligonucleotide
uucuuggcuugcccgagga

SEQ ID NO: 3025181 - RNA, 19 nt, Artificial Sequence
  Description of Artificial Sequence: Synthetic oligonucleotide
ugggaugcuucuuggcuug

SEQ ID NO: 3025182 - RNA, 19 nt, Artificial Sequence
  Description of Artificial Sequence: Synthetic oligonucleotide
ugacaucuggguugaacaa

SEQ ID NO: 3025183 - RNA, 19 nt, Artificial Sequence
  Description of Artificial Sequence: Synthetic oligonucleotide
auguuugcggcagaggccu

SEQ ID NO: 3025184 - RNA, 19 nt, Artificial Sequence
  Description of Artificial Sequence: Synthetic oligonucleotide
gaguagaacuuauauuggu

SEQ ID NO: 3025185 - RNA, 19 nt, Artificial Sequence
  Description of Artificial Sequence: Synthetic oligonucleotide
uaguccacauucacugagu

SEQ ID NO: 3025186 - RNA, 19 nt, Artificial Sequence
  Description of Artificial Sequence: Synthetic oligonucleotide
ucaguuugcuguaguccac

SEQ ID NO: 3025187 - RNA, 19 nt, Artificial Sequence
  Description of Artificial Sequence: Synthetic oligonucleotide
acaucuggguugaacaaug

SEQ ID NO: 3025188 - RNA, 19 nt, Artificial Sequence
  Description of Artificial Sequence: Synthetic oligonucleotide
cagaggccuaccuccacgg

SEQ ID NO: 3025189 - RNA, 19 nt, Artificial Sequence
  Description of Artificial Sequence: Synthetic oligonucleotide
uggucauugggacccaguu

SEQ ID NO: 3025190 - RNA, 19 nt, Artificial Sequence
  Description of Artificial Sequence: Synthetic oligonucleotide
aaacgaagagcggaaucaa

SEQ ID NO: 3025191 - RNA, 19 nt, Artificial Sequence
  Description of Artificial Sequence: Synthetic oligonucleotide
ucaggguuauuuuccuguc

SEQ ID NO: 3025192 - RNA, 19 nt, Artificial Sequence
  Description of Artificial Sequence: Synthetic oligonucleotide
cuuggcuugcccgaggauc

SEQ ID NO: 3025193 - RNA, 19 nt, Artificial Sequence
  Description of Artificial Sequence: Synthetic oligonucleotide
agaugaacuucaugguuua

SEQ ID NO: 3025194 - RNA, 19 nt, Artificial Sequence
  Description of Artificial Sequence: Synthetic oligonucleotide
ugcuucuuggcuugcccga

SEQ ID NO: 3025195 - RNA, 19 nt, Artificial Sequence
  Description of Artificial Sequence: Synthetic oligonucleotide
guccacauucacugaguag

SEQ ID NO: 3025196 - RNA, 19 nt, Artificial Sequence
  Description of Artificial Sequence: Synthetic oligonucleotide
ccaggcgcaacacauacag

SEQ ID NO: 3025197 - RNA, 19 nt, Artificial Sequence
  Description of Artificial Sequence: Synthetic oligonucleotide
ucuggcggagcauguuugc

SEQ ID NO: 3025198 - RNA, 19 nt, Artificial Sequence
  Description of Artificial Sequence: Synthetic oligonucleotide
uuccugucccagcugacau

SEQ ID NO: 3025199 - RNA, 19 nt, Artificial Sequence
  Description of Artificial Sequence: Synthetic oligonucleotide
ucagaggaguauuccuggu

SEQ ID NO: 3025200 - RNA, 19 nt, Artificial Sequence
  Description of Artificial Sequence: Synthetic oligonucleotide
gguuauuuuccugucccag

SEQ ID NO: 3025201 - RNA, 19 nt, Artificial Sequence
  Description of Artificial Sequence: Synthetic oligonucleotide
guauuccugguuaagugga

SEQ ID NO: 3025202 - RNA, 19 nt, Artificial Sequence
  Description of Artificial Sequence: Synthetic oligonucleotide
caggguuauuuuccugucc

SEQ ID NO: 3025203 - RNA, 19 nt, Artificial Sequence
  Description of Artificial Sequence: Synthetic oligonucleotide
ugaacaaugccaggcgcaa

SEQ ID NO: 3025204 - RNA, 19 nt, Artificial Sequence
  Description of Artificial Sequence: Synthetic oligonucleotide
gggaccuucauuguaagca

SEQ ID NO: 3025205 - RNA, 19 nt, Artificial Sequence
  Description of Artificial Sequence: Synthetic oligonucleotide
augauuucaugcauucaga

SEQ ID NO: 3025206 - RNA, 19 nt, Artificial Sequence
  Description of Artificial Sequence: Synthetic oligonucleotide
uauuccugguuaaguggaa

SEQ ID NO: 3025207 - RNA, 19 nt, Artificial Sequence
  Description of Artificial Sequence: Synthetic oligonucleotide
caucuggguugaacaaugc

SEQ ID NO: 3025208 - RNA, 19 nt, Artificial Sequence
  Description of Artificial Sequence: Synthetic oligonucleotide
acaaugccaggcgcaacac

SEQ ID NO: 3025209 - RNA, 19 nt, Artificial Sequence
  Description of Artificial Sequence: Synthetic oligonucleotide
gaggaucuggcggagcaug

SEQ ID NO: 3025210 - RNA, 19 nt, Artificial Sequence
  Description of Artificial Sequence: Synthetic oligonucleotide
uuuccugucccagcugaca

SEQ ID NO: 3025211 - RNA, 19 nt, Artificial Sequence
  Description of Artificial Sequence: Synthetic oligonucleotide
ccagcugacaucuggguug

SEQ ID NO: 3025212 - RNA, 19 nt, Artificial Sequence
  Description of Artificial Sequence: Synthetic oligonucleotide
gaugaacuucaugguuuag

SEQ ID NO: 3025213 - RNA, 19 nt, Artificial Sequence
  Description of Artificial Sequence: Synthetic oligonucleotide
aguggaaaauugugcggau

SEQ ID NO: 3025214 - RNA, 19 nt, Artificial Sequence
  Description of Artificial Sequence: Synthetic oligonucleotide
uuuuccugucccagcugac

SEQ ID NO: 3025215 - RNA, 19 nt, Artificial Sequence
  Description of Artificial Sequence: Synthetic oligonucleotide
uuggucauugggacccagu

SEQ ID NO: 3025216 - RNA, 19 nt, Artificial Sequence
  Description of Artificial Sequence: Synthetic oligonucleotide
aguuccuccugcuccaaua

SEQ ID NO: 3025217 - RNA, 19 nt, Artificial Sequence
  Description of Artificial Sequence: Synthetic oligonucleotide
uaagcagcuuuaagaugaa

SEQ ID NO: 3025218 - RNA, 19 nt, Artificial Sequence
  Description of Artificial Sequence: Synthetic oligonucleotide
ucagggccuucuuucuuca

SEQ ID NO: 3025219 - RNA, 19 nt, Artificial Sequence
  Description of Artificial Sequence: Synthetic oligonucleotide
cagcuuuaagaugaacuuc

SEQ ID NO: 3025220 - RNA, 19 nt, Artificial Sequence
  Description of Artificial Sequence: Synthetic oligonucleotide
uucaugcauucagaggagu

SEQ ID NO: 3025221 - RNA, 19 nt, Artificial Sequence
  Description of Artificial Sequence: Synthetic oligonucleotide
agaagucagggccuucuuu

SEQ ID NO: 3025222 - RNA, 19 nt, Artificial Sequence
  Description of Artificial Sequence: Synthetic oligonucleotide
aggaguauuccugguuaag

SEQ ID NO: 3025223 - RNA, 19 nt, Artificial Sequence
  Description of Artificial Sequence: Synthetic oligonucleotide
ucacugaguagaacuuaua

SEQ ID NO: 3025224 - RNA, 19 nt, Artificial Sequence
  Description of Artificial Sequence: Synthetic oligonucleotide
aguccacauucacugagua

SEQ ID NO: 3025225 - RNA, 19 nt, Artificial Sequence
  Description of Artificial Sequence: Synthetic oligonucleotide
uccugguuaaguggaaaau

SEQ ID NO: 3025226 - RNA, 19 nt, Artificial Sequence
  Description of Artificial Sequence: Synthetic oligonucleotide
cuugcccgaggaucuggcg

SEQ ID NO: 3025227 - RNA, 19 nt, Artificial Sequence
  Description of Artificial Sequence: Synthetic oligonucleotide
ucauuguaagcagcuuuaa

SEQ ID NO: 3025228 - RNA, 19 nt, Artificial Sequence
  Description of Artificial Sequence: Synthetic oligonucleotide
ugcccgaggaucuggcgga

SEQ ID NO: 3025229 - RNA, 19 nt, Artificial Sequence
  Description of Artificial Sequence: Synthetic oligonucleotide
ucauugggacccaguuugu

SEQ ID NO: 3025230 - RNA, 19 nt, Artificial Sequence
  Description of Artificial Sequence: Synthetic oligonucleotide
gccuucuuucuucaguuug

SEQ ID NO: 3025231 - RNA, 19 nt, Artificial Sequence
  Description of Artificial Sequence: Synthetic oligonucleotide
ggguugaacaaugccaggc

SEQ ID NO: 3025232 - RNA, 19 nt, Artificial Sequence
  Description of Artificial Sequence: Synthetic oligonucleotide
agcauguuugcggcagagg

SEQ ID NO: 3025233 - RNA, 19 nt, Artificial Sequence
  Description of Artificial Sequence: Synthetic oligonucleotide
aucaagcugggaugcuucu

SEQ ID NO: 3025234 - RNA, 19 nt, Artificial Sequence
  Description of Artificial Sequence: Synthetic oligonucleotide
agaacuuauauuggucauu

SEQ ID NO: 3025235 - RNA, 19 nt, Artificial Sequence
  Description of Artificial Sequence: Synthetic oligonucleotide
acauacagugcugcuccag

SEQ ID NO: 3025236 - RNA, 19 nt, Artificial Sequence
  Description of Artificial Sequence: Synthetic oligonucleotide
cucaggguuauuuuccugu

SEQ ID NO: 3025237 - RNA, 19 nt, Artificial Sequence
  Description of Artificial Sequence: Synthetic oligonucleotide
gcggaaucaagcugggaug

SEQ ID NO: 3025238 - RNA, 19 nt, Artificial Sequence
  Description of Artificial Sequence: Synthetic oligonucleotide
gcaacacauacagugcugc

SEQ ID NO: 3025239 - RNA, 19 nt, Artificial Sequence
  Description of Artificial Sequence: Synthetic oligonucleotide
cuucuuggcuugcccgagg

SEQ ID NO: 3025240 - RNA, 19 nt, Artificial Sequence
  Description of Artificial Sequence: Synthetic oligonucleotide
ccaguuuguuccaaggcuc

SEQ ID NO: 3025241 - RNA, 19 nt, Artificial Sequence
  Description of Artificial Sequence: Synthetic oligonucleotide
gagcauguuugcggcagag

SEQ ID NO: 3025242 - RNA, 19 nt, Artificial Sequence
  Description of Artificial Sequence: Synthetic oligonucleotide
auacagugcugcuccaguu

SEQ ID NO: 3025243 - RNA, 19 nt, Artificial Sequence
  Description of Artificial Sequence: Synthetic oligonucleotide
aguuuguuccaaggcucag

SEQ ID NO: 3025244 - RNA, 19 nt, Artificial Sequence
  Description of Artificial Sequence: Synthetic oligonucleotide
ugcggcagaggccuaccuc

SEQ ID NO: 3025245 - RNA, 19 nt, Artificial Sequence
  Description of Artificial Sequence: Synthetic oligonucleotide
cauucagaggaguauuccu

SEQ ID NO: 3025246 - RNA, 19 nt, Artificial Sequence
  Description of Artificial Sequence: Synthetic oligonucleotide
gaggaguauuccugguuaa

SEQ ID NO: 3025247 - RNA, 19 nt, Artificial Sequence
  Description of Artificial Sequence: Synthetic oligonucleotide
gcggcagaggccuaccucc

SEQ ID NO: 3025248 - RNA, 19 nt, Artificial Sequence
  Description of Artificial Sequence: Synthetic oligonucleotide
gucccagcugacaucuggg

SEQ ID NO: 3025249 - RNA, 19 nt, Artificial Sequence
  Description of Artificial Sequence: Synthetic oligonucleotide
aguuugcuguaguccacau

SEQ ID NO: 3025250 - RNA, 19 nt, Artificial Sequence
  Description of Artificial Sequence: Synthetic oligonucleotide
gcagaggccuaccuccacg

SEQ ID NO: 3025251 - RNA, 19 nt, Artificial Sequence
  Description of Artificial Sequence: Synthetic oligonucleotide
  modified_base (11)..(11): a, c, u, g, unknown or other
gauggcuucunagggaccu

SEQ ID NO: 3025252 - RNA, 19 nt, Artificial Sequence
  Description of Artificial Sequence: Synthetic oligonucleotide
auucacugaguagaacuua

SEQ ID NO: 3025253 - RNA, 19 nt, Artificial Sequence
  Description of Artificial Sequence: Synthetic oligonucleotide
  modified_base (3)..(3): a, c, u, g, unknown or other
cunagggaccuucauugua

SEQ ID NO: 3025254 - RNA, 19 nt, Artificial Sequence
  Description of Artificial Sequence: Synthetic oligonucleotide
caguuuguuccaaggcuca

SEQ ID NO: 3025255 - RNA, 19 nt, Artificial Sequence
  Description of Artificial Sequence: Synthetic oligonucleotide
uuccuccugcuccaauaaa

SEQ ID NO: 3025256 - RNA, 19 nt, Artificial Sequence
  Description of Artificial Sequence: Synthetic oligonucleotide
uuguuccaaggcucagggu

SEQ ID NO: 3025257 - RNA, 19 nt, Artificial Sequence
  Description of Artificial Sequence: Synthetic oligonucleotide
cacugaguagaacuuauau

SEQ ID NO: 3025258 - RNA, 19 nt, Artificial Sequence
  Description of Artificial Sequence: Synthetic oligonucleotide
ggcggagcauguuugcggc

SEQ ID NO: 3025259 - RNA, 19 nt, Artificial Sequence
  Description of Artificial Sequence: Synthetic oligonucleotide
uuugcggcagaggccuacc

SEQ ID NO: 3025260 - RNA, 19 nt, Artificial Sequence
  Description of Artificial Sequence: Synthetic oligonucleotide
agagcggaaucaagcuggg

SEQ ID NO: 3025261 - RNA, 19 nt, Artificial Sequence
  Description of Artificial Sequence: Synthetic oligonucleotide
cuggcggagcauguuugcg

SEQ ID NO: 3025262 - RNA, 19 nt, Artificial Sequence
  Description of Artificial Sequence: Synthetic oligonucleotide
gcauucagaggaguauucc

SEQ ID NO: 3025263 - RNA, 19 nt, Artificial Sequence
  Description of Artificial Sequence: Synthetic oligonucleotide
auuccugguuaaguggaaa

SEQ ID NO: 3025264 - RNA, 19 nt, Artificial Sequence
  Description of Artificial Sequence: Synthetic oligonucleotide
  modified_base (9)..(9): a, c, u, g, unknown or other
uggcuucunagggaccuuc

SEQ ID NO: 3025265 - RNA, 19 nt, Artificial Sequence
  Description of Artificial Sequence: Synthetic oligonucleotide
cacauucacugaguagaac

SEQ ID NO: 3025266 - RNA, 19 nt, Artificial Sequence
  Description of Artificial Sequence: Synthetic oligonucleotide
uuuagaagucagggccuuc

SEQ ID NO: 3025267 - RNA, 19 nt, Artificial Sequence
  Description of Artificial Sequence: Synthetic oligonucleotide
aucuggcggagcauguuug

SEQ ID NO: 3025268 - RNA, 19 nt, Artificial Sequence
  Description of Artificial Sequence: Synthetic oligonucleotide
augcauucagaggaguauu

SEQ ID NO: 3025269 - RNA, 19 nt, Artificial Sequence
  Description of Artificial Sequence: Synthetic oligonucleotide
uagaagucagggccuucuu

SEQ ID NO: 3025270 - RNA, 19 nt, Artificial Sequence
  Description of Artificial Sequence: Synthetic oligonucleotide
guuccuccugcuccaauaa

SEQ ID NO: 3025271 - RNA, 19 nt, Artificial Sequence
  Description of Artificial Sequence: Synthetic oligonucleotide
  modified_base (18)..(18): a, c, u, g, unknown or other
uugugcggauggcuucuna

SEQ ID NO: 3025272 - RNA, 19 nt, Artificial Sequence
  Description of Artificial Sequence: Synthetic oligonucleotide
auuggucauugggacccag

SEQ ID NO: 3025273 - RNA, 19 nt, Artificial Sequence
  Description of Artificial Sequence: Synthetic oligonucleotide
ucuuggcuugcccgaggau

SEQ ID NO: 3025274 - RNA, 19 nt, Artificial Sequence
  Description of Artificial Sequence: Synthetic oligonucleotide
ugggacccaguuuguucca

SEQ ID NO: 3025275 - RNA, 19 nt, Artificial Sequence
  Description of Artificial Sequence: Synthetic oligonucleotide
ggcgcaacacauacagugc

SEQ ID NO: 3025276 - RNA, 19 nt, Artificial Sequence
  Description of Artificial Sequence: Synthetic oligonucleotide
uccugucccagcugacauc

SEQ ID NO: 3025277 - RNA, 19 nt, Artificial Sequence
  Description of Artificial Sequence: Synthetic oligonucleotide
gaacaaugccaggcgcaac

SEQ ID NO: 3025278 - RNA, 19 nt, Artificial Sequence
  Description of Artificial Sequence: Synthetic oligonucleotide
  modified_base (14)..(14): a, c, u, g, unknown or other
gcggauggcuucunaggga

SEQ ID NO: 3025279 - RNA, 19 nt, Artificial Sequence
  Description of Artificial Sequence: Synthetic oligonucleotide
aggccuaccuccacggaga

SEQ ID NO: 3025280 - RNA, 19 nt, Artificial Sequence
  Description of Artificial Sequence: Synthetic oligonucleotide
ggacccaguuuguuccaag

SEQ ID NO: 3025281 - RNA, 19 nt, Artificial Sequence
  Description of Artificial Sequence: Synthetic oligonucleotide
cauucacugaguagaacuu

SEQ ID NO: 3025282 - RNA, 19 nt, Artificial Sequence
  Description of Artificial Sequence: Synthetic oligonucleotide
gcagcuuuaagaugaacuu

SEQ ID NO: 3025283 - RNA, 19 nt, Artificial Sequence
  Description of Artificial Sequence: Synthetic oligonucleotide
agaggccuaccuccacgga

SEQ ID NO: 3025284 - RNA, 19 nt, Artificial Sequence
  Description of Artificial Sequence: Synthetic oligonucleotide
cauacagugcugcuccagu

SEQ ID NO: 3025285 - RNA, 19 nt, Artificial Sequence
  Description of Artificial Sequence: Synthetic oligonucleotide
  modified_base (13)..(13): a, c, u, g, unknown or other
cggauggcuucunagggac

SEQ ID NO: 3025286 - RNA, 19 nt, Artificial Sequence
  Description of Artificial Sequence: Synthetic oligonucleotide
gaucuggcggagcauguuu

SEQ ID NO: 3025287 - RNA, 19 nt, Artificial Sequence
  Description of Artificial Sequence: Synthetic oligonucleotide
gcugacaucuggguugaac

SEQ ID NO: 3025288 - RNA, 19 nt, Artificial Sequence
  Description of Artificial Sequence: Synthetic oligonucleotide
gacaucuggguugaacaau

SEQ ID NO: 3025289 - RNA, 19 nt, Artificial Sequence
  Description of Artificial Sequence: Synthetic oligonucleotide
gcucaggguuauuuuccug

SEQ ID NO: 3025290 - RNA, 19 nt, Artificial Sequence
  Description of Artificial Sequence: Synthetic oligonucleotide
caaugccaggcgcaacaca

SEQ ID NO: 3025291 - RNA, 19 nt, Artificial Sequence
  Description of Artificial Sequence: Synthetic oligonucleotide
  modified_base (6)..(6): a, c, u, g, unknown or other
cuucunagggaccuucauu

SEQ ID NO: 3025292 - RNA, 19 nt, Artificial Sequence
  Description of Artificial Sequence: Synthetic oligonucleotide
guuugcggcagaggccuac

SEQ ID NO: 3025293 - RNA, 19 nt, Artificial Sequence
  Description of Artificial Sequence: Synthetic oligonucleotide
ggguuauuuuccuguccca

SEQ ID NO: 3025294 - RNA, 19 nt, Artificial Sequence
  Description of Artificial Sequence: Synthetic oligonucleotide
ggaguauuccugguuaagu

SEQ ID NO: 3025295 - RNA, 19 nt, Artificial Sequence
  Description of Artificial Sequence: Synthetic oligonucleotide
caugcauucagaggaguau

SEQ ID NO: 3025296 - RNA, 19 nt, Artificial Sequence
  Description of Artificial Sequence: Synthetic oligonucleotide
caguuugcuguaguccaca

SEQ ID NO: 3025297 - RNA, 19 nt, Artificial Sequence
  Description of Artificial Sequence: Synthetic oligonucleotide
guuccaaggcucaggguua

SEQ ID NO: 3025298 - RNA, 19 nt, Artificial Sequence
  Description of Artificial Sequence: Synthetic oligonucleotide
gaaucaagcugggaugcuu

SEQ ID NO: 3025299 - RNA, 19 nt, Artificial Sequence
  Description of Artificial Sequence: Synthetic oligonucleotide
gcugggaugcuucuuggcu

SEQ ID NO: 3025300 - RNA, 19 nt, Artificial Sequence
  Description of Artificial Sequence: Synthetic oligonucleotide
uuccaaggcucaggguuau

SEQ ID NO: 3025301 - RNA, 19 nt, Artificial Sequence
  Description of Artificial Sequence: Synthetic oligonucleotide
cagggccuucuuucuucag

SEQ ID NO: 3025302 - RNA, 19 nt, Artificial Sequence
  Description of Artificial Sequence: Synthetic oligonucleotide
cggaaucaagcugggaugc

SEQ ID NO: 3025303 - RNA, 19 nt, Artificial Sequence
  Description of Artificial Sequence: Synthetic oligonucleotide
aggaucuggcggagcaugu

SEQ ID NO: 3025304 - RNA, 19 nt, Artificial Sequence
  Description of Artificial Sequence: Synthetic oligonucleotide
gguuuagaagucagggccu

SEQ ID NO: 3025305 - RNA, 19 nt, Artificial Sequence
  Description of Artificial Sequence: Synthetic oligonucleotide
cacauacagugcugcucca

SEQ ID NO: 3025306 - RNA, 19 nt, Artificial Sequence
  Description of Artificial Sequence: Synthetic oligonucleotide
caacacauacagugcugcu

SEQ ID NO: 3025307 - RNA, 19 nt, Artificial Sequence
  Description of Artificial Sequence: Synthetic oligonucleotide
gcuucuuggcuugcccgag

SEQ ID NO: 3025308 - RNA, 19 nt, Artificial Sequence
  Description of Artificial Sequence: Synthetic oligonucleotide
uguuugcggcagaggccua

SEQ ID NO: 3025309 - RNA, 19 nt, Artificial Sequence
  Description of Artificial Sequence: Synthetic oligonucleotide
ggaugcuucuuggcuugcc

SEQ ID NO: 3025310 - RNA, 19 nt, Artificial Sequence
  Description of Artificial Sequence: Synthetic oligonucleotide
cugggaugcuucuuggcuu

SEQ ID NO: 3025311 - RNA, 19 nt, Artificial Sequence
  Description of Artificial Sequence: Synthetic oligonucleotide
ggcuugcccgaggaucugg

SEQ ID NO: 3025312 - RNA, 19 nt, Artificial Sequence
  Description of Artificial Sequence: Synthetic oligonucleotide
cgcaacacauacagugcug

SEQ ID NO: 3025313 - RNA, 19 nt, Artificial Sequence
  Description of Artificial Sequence: Synthetic oligonucleotide
  modified_base (12)..(12): a, c, u, g, unknown or other
ggauggcuucunagggacc

SEQ ID NO: 3025314 - RNA, 19 nt, Artificial Sequence
  Description of Artificial Sequence: Synthetic oligonucleotide
  modified_base (10)..(10): a, c, u, g, unknown or other
auggcuucunagggaccuu

SEQ ID NO: 3025315 - RNA, 19 nt, Artificial Sequence
  Description of Artificial Sequence: Synthetic oligonucleotide
caaggcucaggguuauuuu

SEQ ID NO: 3025316 - RNA, 19 nt, Artificial Sequence
  Description of Artificial Sequence: Synthetic oligonucleotide
cccaguuuguuccaaggcu

SEQ ID NO: 3025317 - RNA, 19 nt, Artificial Sequence
  Description of Artificial Sequence: Synthetic oligonucleotide
gcgcaacacauacagugcu

SEQ ID NO: 3025318 - RNA, 19 nt, Artificial Sequence
  Description of Artificial Sequence: Synthetic oligonucleotide
  modified_base (7)..(7): a, c, u, g, unknown or other
gcuucunagggaccuucau

SEQ ID NO: 3025319 - RNA, 19 nt, Artificial Sequence
  Description of Artificial Sequence: Synthetic oligonucleotide
uggcuugcccgaggaucug

SEQ ID NO: 3025320 - RNA, 19 nt, Artificial Sequence
  Description of Artificial Sequence: Synthetic oligonucleotide
cagcugacaucuggguuga

SEQ ID NO: 3025321 - RNA, 19 nt, Artificial Sequence
  Description of Artificial Sequence: Synthetic oligonucleotide
gagcggaaucaagcuggga

SEQ ID NO: 3025322 - RNA, 19 nt, Artificial Sequence
  Description of Artificial Sequence: Synthetic oligonucleotide
guuuagaagucagggccuu

SEQ ID NO: 3025323 - RNA, 19 nt, Artificial Sequence
  Description of Artificial Sequence: Synthetic oligonucleotide
cugucccagcugacaucug

SEQ ID NO: 3025324 - RNA, 19 nt, Artificial Sequence
  Description of Artificial Sequence: Synthetic oligonucleotide
gcuugcccgaggaucuggc

SEQ ID NO: 3025325 - RNA, 19 nt, Artificial Sequence
  Description of Artificial Sequence: Synthetic oligonucleotide
ggagcauguuugcggcaga

SEQ ID NO: 3025326 - RNA, 19 nt, Artificial Sequence
  Description of Artificial Sequence: Synthetic oligonucleotide
cagaggaguauuccugguu

SEQ ID NO: 3025327 - RNA, 19 nt, Artificial Sequence
  Description of Artificial Sequence: Synthetic oligonucleotide
ggcucaggguuauuuuccu

SEQ ID NO: 3025328 - RNA, 19 nt, Artificial Sequence
  Description of Artificial Sequence: Synthetic oligonucleotide
ggcagaggccuaccuccac

SEQ ID NO: 3025329 - RNA, 19 nt, Artificial Sequence
  Description of Artificial Sequence: Synthetic oligonucleotide
ccgaggaucuggcggagca

SEQ ID NO: 3025330 - RNA, 19 nt, Artificial Sequence
  Description of Artificial Sequence: Synthetic oligonucleotide
  modified_base (19)..(19): a, c, u, g, unknown or other
auugugcggauggcuucun

SEQ ID NO: 3025331 - RNA, 19 nt, Artificial Sequence
  Description of Artificial Sequence: Synthetic oligonucleotide
  modified_base (8)..(8): a, c, u, g, unknown or other
ggcuucunagggaccuuca

SEQ ID NO: 3025332 - RNA, 19 nt, Artificial Sequence
  Description of Artificial Sequence: Synthetic oligonucleotide
cggagcauguuugcggcag

SEQ ID NO: 3025333 - RNA, 19 nt, Artificial Sequence
  Description of Artificial Sequence: Synthetic oligonucleotide
gggccuucuuucuucaguu

SEQ ID NO: 3025334 - RNA, 19 nt, Artificial Sequence
  Description of Artificial Sequence: Synthetic oligonucleotide
ggucauugggacccaguuu

SEQ ID NO: 3025335 - RNA, 19 nt, Artificial Sequence
  Description of Artificial Sequence: Synthetic oligonucleotide
cgaagagcggaaucaagcu

SEQ ID NO: 3025336 - RNA, 19 nt, Artificial Sequence
  Description of Artificial Sequence: Synthetic oligonucleotide
augccaggcgcaacacaua

SEQ ID NO: 3025337 - RNA, 19 nt, Artificial Sequence
  Description of Artificial Sequence: Synthetic oligonucleotide
uccaaggcucaggguuauu

SEQ ID NO: 3025338 - RNA, 19 nt, Artificial Sequence
  Description of Artificial Sequence: Synthetic oligonucleotide
ccugguuaaguggaaaauu

SEQ ID NO: 3025339 - RNA, 19 nt, Artificial Sequence
  Description of Artificial Sequence: Synthetic oligonucleotide
ccugucccagcugacaucu

SEQ ID NO: 3025340 - RNA, 19 nt, Artificial Sequence
  Description of Artificial Sequence: Synthetic oligonucleotide
caggcgcaacacauacagu

SEQ ID NO: 3025341 - RNA, 19 nt, Artificial Sequence
  Description of Artificial Sequence: Synthetic oligonucleotide
cagugcugcuccaguuccu

SEQ ID NO: 3025342 - RNA, 19 nt, Artificial Sequence
  Description of Artificial Sequence: Synthetic oligonucleotide
gcuuuaagaugaacuucau

SEQ ID NO: 3025343 - RNA, 19 nt, Artificial Sequence
  Description of Artificial Sequence: Synthetic oligonucleotide
gcggagcauguuugcggca

SEQ ID NO: 3025344 - RNA, 19 nt, Artificial Sequence
  Description of Artificial Sequence: Synthetic oligonucleotide
ggaaucaagcugggaugcu

SEQ ID NO: 3025345 - RNA, 19 nt, Artificial Sequence
  Description of Artificial Sequence: Synthetic oligonucleotide
cauugggacccaguuuguu

SEQ ID NO: 3025346 - RNA, 19 nt, Artificial Sequence
  Description of Artificial Sequence: Synthetic oligonucleotide
gccaggcgcaacacauaca

SEQ ID NO: 3025347 - RNA, 19 nt, Artificial Sequence
  Description of Artificial Sequence: Synthetic oligonucleotide
gggacccaguuuguuccaa

SEQ ID NO: 3025348 - RNA, 19 nt, Artificial Sequence
  Description of Artificial Sequence: Synthetic oligonucleotide
cccgaggaucuggcggagc

SEQ ID NO: 3025349 - RNA, 19 nt, Artificial Sequence
  Description of Artificial Sequence: Synthetic oligonucleotide
ccaaggcucaggguuauuu

SEQ ID NO: 3025350 - RNA, 19 nt, Artificial Sequence
  Description of Artificial Sequence: Synthetic oligonucleotide
gcccgaggaucuggcggag

SEQ ID NO: 3025351 - RNA, 19 nt, Artificial Sequence
  Description of Artificial Sequence: Synthetic oligonucleotide
cccagcugacaucuggguu

SEQ ID NO: 3025352 - RNA, 19 nt, Artificial Sequence
  Description of Artificial Sequence: Synthetic oligonucleotide
ggaucuggcggagcauguu

SEQ ID NO: 3025353 - RNA, 19 nt, Artificial Sequence
  Description of Artificial Sequence: Synthetic oligonucleotide
cggcagaggccuaccucca

SEQ ID NO: 3025354 - RNA, 19 nt, Artificial Sequence
  Description of Artificial Sequence: Synthetic oligonucleotide
  modified_base (1)..(1): a, c, u, g, unknown or other
nagggaccuucauuguaag

SEQ ID NO: 3025355 - RNA, 19 nt, Artificial Sequence
  Description of Artificial Sequence: Synthetic oligonucleotide
aaaacauaaaauuuuauug

SEQ ID NO: 3025356 - RNA, 19 nt, Artificial Sequence
  Description of Artificial Sequence: Synthetic oligonucleotide
aauuuuauuguguacacac

SEQ ID NO: 3025357 - RNA, 19 nt, Artificial Sequence
  Description of Artificial Sequence: Synthetic oligonucleotide
aauaguuuaguauuaaaca

SEQ ID NO: 3025358 - RNA, 19 nt, Artificial Sequence
  Description of Artificial Sequence: Synthetic oligonucleotide
aaaauaauuucccaguaag

SEQ ID NO: 3025359 - RNA, 19 nt, Artificial Sequence
  Description of Artificial Sequence: Synthetic oligonucleotide
uauugaacauuuuauaugg

SEQ ID NO: 3025360 - RNA, 19 nt, Artificial Sequence
  Description of Artificial Sequence: Synthetic oligonucleotide
aauaauaagaggccaguac

SEQ ID NO: 3025361 - RNA, 19 nt, Artificial Sequence
  Description of Artificial Sequence: Synthetic oligonucleotide
gauucaugaaaacaaaugg

SEQ ID NO: 3025362 - RNA, 19 nt, Artificial Sequence
  Description of Artificial Sequence: Synthetic oligonucleotide
uuuaguauuaaacauuuug

SEQ ID NO: 3025363 - RNA, 19 nt, Artificial Sequence
  Description of Artificial Sequence: Synthetic oligonucleotide
guauuaaacauuuugaagc

SEQ ID NO: 3025364 - RNA, 19 nt, Artificial Sequence
  Description of Artificial Sequence: Synthetic oligonucleotide
aauggagaaaauaauuucc

SEQ ID NO: 3025365 - RNA, 19 nt, Artificial Sequence
  Description of Artificial Sequence: Synthetic oligonucleotide
acaaauggcagguaggucc

SEQ ID NO: 3025366 - RNA, 19 nt, Artificial Sequence
  Description of Artificial Sequence: Synthetic oligonucleotide
aaaauuuuauuguguacac

SEQ ID NO: 3025367 - RNA, 19 nt, Artificial Sequence
  Description of Artificial Sequence: Synthetic oligonucleotide
aaauaguuuaguauuaaac

SEQ ID NO: 3025368 - RNA, 19 nt, Artificial Sequence
  Description of Artificial Sequence: Synthetic oligonucleotide
auugauccaacauagauug

SEQ ID NO: 3025369 - RNA, 19 nt, Artificial Sequence
  Description of Artificial Sequence: Synthetic oligonucleotide
uuauaucugauauugaaca

SEQ ID NO: 3025370 - RNA, 19 nt, Artificial Sequence
  Description of Artificial Sequence: Synthetic oligonucleotide
uucaugaaaacaaauggag

SEQ ID NO: 3025371 - RNA, 19 nt, Artificial Sequence
  Description of Artificial Sequence: Synthetic oligonucleotide
aguuaacaaaucuauuucc

SEQ ID NO: 3025372 - RNA, 19 nt, Artificial Sequence
  Description of Artificial Sequence: Synthetic oligonucleotide
ugaacauggggacaaaugg

SEQ ID NO: 3025373 - RNA, 19 nt, Artificial Sequence
  Description of Artificial Sequence: Synthetic oligonucleotide
uuuuauuguguacacacag

SEQ ID NO: 3025374 - RNA, 19 nt, Artificial Sequence
  Description of Artificial Sequence: Synthetic oligonucleotide
uuaguauuaaacauuuuga

SEQ ID NO: 3025375 - RNA, 19 nt, Artificial Sequence
  Description of Artificial Sequence: Synthetic oligonucleotide
aacauaaaauuuuauugug

SEQ ID NO: 3025376 - RNA, 19 nt, Artificial Sequence
  Description of Artificial Sequence: Synthetic oligonucleotide
uuguuuucuauaaaagagg

SEQ ID NO: 3025377 - RNA, 19 nt, Artificial Sequence
  Description of Artificial Sequence: Synthetic oligonucleotide
uuuucuauaaaagagguuc

SEQ ID NO: 3025378 - RNA, 19 nt, Artificial Sequence
  Description of Artificial Sequence: Synthetic oligonucleotide
ggaaauaauaauaagaggc

SEQ ID NO: 3025379 - RNA, 19 nt, Artificial Sequence
  Description of Artificial Sequence: Synthetic oligonucleotide
uuauauggaaucuuuaaac

SEQ ID NO: 3025380 - RNA, 19 nt, Artificial Sequence
  Description of Artificial Sequence: Synthetic oligonucleotide
aaacuugaaguucaacagg

SEQ ID NO: 3025381 - RNA, 19 nt, Artificial Sequence
  Description of Artificial Sequence: Synthetic oligonucleotide
aauaauuucccaguaagca

SEQ ID NO: 3025382 - RNA, 19 nt, Artificial Sequence
  Description of Artificial Sequence: Synthetic oligonucleotide
auaaaagagguucaguuug

SEQ ID NO: 3025383 - RNA, 19 nt, Artificial Sequence
  Description of Artificial Sequence: Synthetic oligonucleotide
uucaauucaaaauaaaguu

SEQ ID NO: 3025384 - RNA, 19 nt, Artificial Sequence
  Description of Artificial Sequence: Synthetic oligonucleotide
aucuuuaaacuguaucucc

SEQ ID NO: 3025385 - RNA, 19 nt, Artificial Sequence
  Description of Artificial Sequence: Synthetic oligonucleotide
auaaaauuuuauuguguac

SEQ ID NO: 3025386 - RNA, 19 nt, Artificial Sequence
  Description of Artificial Sequence: Synthetic oligonucleotide
uggaaauaauaauaagagg

SEQ ID NO: 3025387 - RNA, 19 nt, Artificial Sequence
  Description of Artificial Sequence: Synthetic oligonucleotide
aaauaauuucccaguaagc

SEQ ID NO: 3025388 - RNA, 19 nt, Artificial Sequence
  Description of Artificial Sequence: Synthetic oligonucleotide
auaauuucccaguaagcac

SEQ ID NO: 3025389 - RNA, 19 nt, Artificial Sequence
  Description of Artificial Sequence: Synthetic oligonucleotide
uuaaacauuuugaagcucu

SEQ ID NO: 3025390 - RNA, 19 nt, Artificial Sequence
  Description of Artificial Sequence: Synthetic oligonucleotide
auuguuuucuauaaaagag

SEQ ID NO: 3025391 - RNA, 19 nt, Artificial Sequence
  Description of Artificial Sequence: Synthetic oligonucleotide
auauugaacauuuuauaug

SEQ ID NO: 3025392 - RNA, 19 nt, Artificial Sequence
  Description of Artificial Sequence: Synthetic oligonucleotide
guuucaaugaccuuuucug

SEQ ID NO: 3025393 - RNA, 19 nt, Artificial Sequence
  Description of Artificial Sequence: Synthetic oligonucleotide
uuuauaucugauauugaac

SEQ ID NO: 3025394 - RNA, 19 nt, Artificial Sequence
  Description of Artificial Sequence: Synthetic oligonucleotide
gaaauaauaauaagaggcc

SEQ ID NO: 3025395 - RNA, 19 nt, Artificial Sequence
  Description of Artificial Sequence: Synthetic oligonucleotide
aaucuuuaaacuguaucuc

SEQ ID NO: 3025396 - RNA, 19 nt, Artificial Sequence
  Description of Artificial Sequence: Synthetic oligonucleotide
gaggccaguacauugaucc

SEQ ID NO: 3025397 - RNA, 19 nt, Artificial Sequence
  Description of Artificial Sequence: Synthetic oligonucleotide
uguuuucuauaaaagaggu

SEQ ID NO: 3025398 - RNA, 19 nt, Artificial Sequence
  Description of Artificial Sequence: Synthetic oligonucleotide
uauggaaucuuuaaacugu

SEQ ID NO: 3025399 - RNA, 19 nt, Artificial Sequence
  Description of Artificial Sequence: Synthetic oligonucleotide
uuuucugagaagaaaacau

SEQ ID NO: 3025400 - RNA, 19 nt, Artificial Sequence
  Description of Artificial Sequence: Synthetic oligonucleotide
uuugaagcucuuuauaucu

SEQ ID NO: 3025401 - RNA, 19 nt, Artificial Sequence
  Description of Artificial Sequence: Synthetic oligonucleotide
ugagaagaaaacauaaaau

SEQ ID NO: 3025402 - RNA, 19 nt, Artificial Sequence
  Description of Artificial Sequence: Synthetic oligonucleotide
aauaauaauaagaggccag

SEQ ID NO: 3025403 - RNA, 19 nt, Artificial Sequence
  Description of Artificial Sequence: Synthetic oligonucleotide
uauauggaaucuuuaaacu

SEQ ID NO: 3025404 - RNA, 19 nt, Artificial Sequence
  Description of Artificial Sequence: Synthetic oligonucleotide
uuuauauggaaucuuuaaa

SEQ ID NO: 3025405 - RNA, 19 nt, Artificial Sequence
  Description of Artificial Sequence: Synthetic oligonucleotide
auaauaagaggccaguaca

SEQ ID NO: 3025406 - RNA, 19 nt, Artificial Sequence
  Description of Artificial Sequence: Synthetic oligonucleotide
aagagguucaguuugguuu

SEQ ID NO: 3025407 - RNA, 19 nt, Artificial Sequence
  Description of Artificial Sequence: Synthetic oligonucleotide
uaauuucccaguaagcaca

SEQ ID NO: 3025408 - RNA, 19 nt, Artificial Sequence
  Description of Artificial Sequence: Synthetic oligonucleotide
cauggaaauaauaauaaga

SEQ ID NO: 3025409 - RNA, 19 nt, Artificial Sequence
  Description of Artificial Sequence: Synthetic oligonucleotide
uggagauucaugaaaacaa

SEQ ID NO: 3025410 - RNA, 19 nt, Artificial Sequence
  Description of Artificial Sequence: Synthetic oligonucleotide
uauuaaacauuuugaagcu

SEQ ID NO: 3025411 - RNA, 19 nt, Artificial Sequence
  Description of Artificial Sequence: Synthetic oligonucleotide
gaacauuuuauauggaauc

SEQ ID NO: 3025412 - RNA, 19 nt, Artificial Sequence
  Description of Artificial Sequence: Synthetic oligonucleotide
aaauaauaauaagaggcca

SEQ ID NO: 3025413 - RNA, 19 nt, Artificial Sequence
  Description of Artificial Sequence: Synthetic oligonucleotide
uuuuauauggaaucuuuaa

SEQ ID NO: 3025414 - RNA, 19 nt, Artificial Sequence
  Description of Artificial Sequence: Synthetic oligonucleotide
ucugauauugaacauuuua

SEQ ID NO: 3025415 - RNA, 19 nt, Artificial Sequence
  Description of Artificial Sequence: Synthetic oligonucleotide
auaguuuaguauuaaacau

SEQ ID NO: 3025416 - RNA, 19 nt, Artificial Sequence
  Description of Artificial Sequence: Synthetic oligonucleotide
auauggaaucuuuaaacug

SEQ ID NO: 3025417 - RNA, 19 nt, Artificial Sequence
  Description of Artificial Sequence: Synthetic oligonucleotide
guaagcacagugaacaugg

SEQ ID NO: 3025418 - RNA, 19 nt, Artificial Sequence
  Description of Artificial Sequence: Synthetic oligonucleotide
ucaugaaaacaaauggaga

SEQ ID NO: 3025419 - RNA, 19 nt, Artificial Sequence
  Description of Artificial Sequence: Synthetic oligonucleotide
ugaacauuuuauauggaau

SEQ ID NO: 3025420 - RNA, 19 nt, Artificial Sequence
  Description of Artificial Sequence: Synthetic oligonucleotide
aacauuuugaagcucuuua

SEQ ID NO: 3025421 - RNA, 19 nt, Artificial Sequence
  Description of Artificial Sequence: Synthetic oligonucleotide
auuguguacacacaguuaa

SEQ ID NO: 3025422 - RNA, 19 nt, Artificial Sequence
  Description of Artificial Sequence: Synthetic oligonucleotide
uuucccaguaagcacagug

SEQ ID NO: 3025423 - RNA, 19 nt, Artificial Sequence
  Description of Artificial Sequence: Synthetic oligonucleotide
uaaaagagguucaguuugg

SEQ ID NO: 3025424 - RNA, 19 nt, Artificial Sequence
  Description of Artificial Sequence: Synthetic oligonucleotide
uagauuguuuucuauaaaa

SEQ ID NO: 3025425 - RNA, 19 nt, Artificial Sequence
  Description of Artificial Sequence: Synthetic oligonucleotide
aacaggauucaauucaaaa

SEQ ID NO: 3025426 - RNA, 19 nt, Artificial Sequence
  Description of Artificial Sequence: Synthetic oligonucleotide
ucuuuaaacuguaucucca

SEQ ID NO: 3025427 - RNA, 19 nt, Artificial Sequence
  Description of Artificial Sequence: Synthetic oligonucleotide
aaaacaaauggagaaaaua

SEQ ID NO: 3025428 - RNA, 19 nt, Artificial Sequence
  Description of Artificial Sequence: Synthetic oligonucleotide
acaguuaacaaaucuauuu

SEQ ID NO: 3025429 - RNA, 19 nt, Artificial Sequence
  Description of Artificial Sequence: Synthetic oligonucleotide
uucugagaagaaaacauaa

SEQ ID NO: 3025430 - RNA, 19 nt, Artificial Sequence
  Description of Artificial Sequence: Synthetic oligonucleotide
gaaucuuuaaacuguaucu

SEQ ID NO: 3025431 - RNA, 19 nt, Artificial Sequence
  Description of Artificial Sequence: Synthetic oligonucleotide
auggagaaaauaauuuccc

SEQ ID NO: 3025432 - RNA, 19 nt, Artificial Sequence
  Description of Artificial Sequence: Synthetic oligonucleotide
uaguauuaaacauuuugaa

SEQ ID NO: 3025433 - RNA, 19 nt, Artificial Sequence
  Description of Artificial Sequence: Synthetic oligonucleotide
auuuugaagcucuuuauau

SEQ ID NO: 3025434 - RNA, 19 nt, Artificial Sequence
  Description of Artificial Sequence: Synthetic oligonucleotide
aagcacagugaacaugggg

SEQ ID NO: 3025435 - RNA, 19 nt, Artificial Sequence
  Description of Artificial Sequence: Synthetic oligonucleotide
aguacauugauccaacaua

SEQ ID NO: 3025436 - RNA, 19 nt, Artificial Sequence
  Description of Artificial Sequence: Synthetic oligonucleotide
uuauuguguacacacaguu

SEQ ID NO: 3025437 - RNA, 19 nt, Artificial Sequence
  Description of Artificial Sequence: Synthetic oligonucleotide
uaucuccagaaauucacag

SEQ ID NO: 3025438 - RNA, 19 nt, Artificial Sequence
  Description of Artificial Sequence: Synthetic oligonucleotide
auaagaggccaguacauug

SEQ ID NO: 3025439 - RNA, 19 nt, Artificial Sequence
  Description of Artificial Sequence: Synthetic oligonucleotide
aaacuguaucuccagaaau

SEQ ID NO: 3025440 - RNA, 19 nt, Artificial Sequence
  Description of Artificial Sequence: Synthetic oligonucleotide
uuucuauaaaagagguuca

SEQ ID NO: 3025441 - RNA, 19 nt, Artificial Sequence
  Description of Artificial Sequence: Synthetic oligonucleotide
agcucuuuauaucugauau

SEQ ID NO: 3025442 - RNA, 19 nt, Artificial Sequence
  Description of Artificial Sequence: Synthetic oligonucleotide
agguccuucugccacaugg

SEQ ID NO: 3025443 - RNA, 19 nt, Artificial Sequence
  Description of Artificial Sequence: Synthetic oligonucleotide
aacauuuuauauggaaucu

SEQ ID NO: 3025444 - RNA, 19 nt, Artificial Sequence
  Description of Artificial Sequence: Synthetic oligonucleotide
uuuaaacuguaucuccaga

SEQ ID NO: 3025445 - RNA, 19 nt, Artificial Sequence
  Description of Artificial Sequence: Synthetic oligonucleotide
uugaacauuuuauauggaa

SEQ ID NO: 3025446 - RNA, 19 nt, Artificial Sequence
  Description of Artificial Sequence: Synthetic oligonucleotide
ugauauugaacauuuuaua

SEQ ID NO: 3025447 - RNA, 19 nt, Artificial Sequence
  Description of Artificial Sequence: Synthetic oligonucleotide
ggagaaaauaauuucccag

SEQ ID NO: 3025448 - RNA, 19 nt, Artificial Sequence
  Description of Artificial Sequence: Synthetic oligonucleotide
acauggaaauaauaauaag

SEQ ID NO: 3025449 - RNA, 19 nt, Artificial Sequence
  Description of Artificial Sequence: Synthetic oligonucleotide
acaggauucaauucaaaau

SEQ ID NO: 3025450 - RNA, 19 nt, Artificial Sequence
  Description of Artificial Sequence: Synthetic oligonucleotide
ucauggagauucaugaaaa

SEQ ID NO: 3025451 - RNA, 19 nt, Artificial Sequence
  Description of Artificial Sequence: Synthetic oligonucleotide
ugccacauggaaauaauaa

SEQ ID NO: 3025452 - RNA, 19 nt, Artificial Sequence
  Description of Artificial Sequence: Synthetic oligonucleotide
guucaguuugguuucaaug

SEQ ID NO: 3025453 - RNA, 19 nt, Artificial Sequence
  Description of Artificial Sequence: Synthetic oligonucleotide
uaucugauauugaacauuu

SEQ ID NO: 3025454 - RNA, 19 nt, Artificial Sequence
  Description of Artificial Sequence: Synthetic oligonucleotide
acauugauccaacauagau

SEQ ID NO: 3025455 - RNA, 19 nt, Artificial Sequence
  Description of Artificial Sequence: Synthetic oligonucleotide
uuuauuguguacacacagu

SEQ ID NO: 3025456 - RNA, 19 nt, Artificial Sequence
  Description of Artificial Sequence: Synthetic oligonucleotide
guacauugauccaacauag

SEQ ID NO: 3025457 - RNA, 19 nt, Artificial Sequence
  Description of Artificial Sequence: Synthetic oligonucleotide
gauauugaacauuuuauau

SEQ ID NO: 3025458 - RNA, 19 nt, Artificial Sequence
  Description of Artificial Sequence: Synthetic oligonucleotide
aguucaacaggauucaauu

SEQ ID NO: 3025459 - RNA, 19 nt, Artificial Sequence
  Description of Artificial Sequence: Synthetic oligonucleotide
uguacacacaguuaacaaa

SEQ ID NO: 3025460 - RNA, 19 nt, Artificial Sequence
  Description of Artificial Sequence: Synthetic oligonucleotide
gagaagaaaacauaaaauu

SEQ ID NO: 3025461 - RNA, 19 nt, Artificial Sequence
  Description of Artificial Sequence: Synthetic oligonucleotide
aacuugaaguucaacagga

SEQ ID NO: 3025462 - RNA, 19 nt, Artificial Sequence
  Description of Artificial Sequence: Synthetic oligonucleotide
agauucaugaaaacaaaug

SEQ ID NO: 3025463 - RNA, 19 nt, Artificial Sequence
  Description of Artificial Sequence: Synthetic oligonucleotide
uuugguuucaaugaccuuu

SEQ ID NO: 3025464 - RNA, 19 nt, Artificial Sequence
  Description of Artificial Sequence: Synthetic oligonucleotide
uuucaaugaccuuuucuga

SEQ ID NO: 3025465 - RNA, 19 nt, Artificial Sequence
  Description of Artificial Sequence: Synthetic oligonucleotide
uuuugaagcucuuuauauc

SEQ ID NO: 3025466 - RNA, 19 nt, Artificial Sequence
  Description of Artificial Sequence: Synthetic oligonucleotide
acuguaucuccagaaauuc

SEQ ID NO: 3025467 - RNA, 19 nt, Artificial Sequence
  Description of Artificial Sequence: Synthetic oligonucleotide
gaaaacauaaaauuuuauu

SEQ ID NO: 3025468 - RNA, 19 nt, Artificial Sequence
  Description of Artificial Sequence: Synthetic oligonucleotide
ucaguuugguuucaaugac

SEQ ID NO: 3025469 - RNA, 19 nt, Artificial Sequence
  Description of Artificial Sequence: Synthetic oligonucleotide
uaaacuguaucuccagaaa

SEQ ID NO: 3025470 - RNA, 19 nt, Artificial Sequence
  Description of Artificial Sequence: Synthetic oligonucleotide
cuuuaaacuguaucuccag

SEQ ID NO: 3025471 - RNA, 19 nt, Artificial Sequence
  Description of Artificial Sequence: Synthetic oligonucleotide
ucugagaagaaaacauaaa

SEQ ID NO: 3025472 - RNA, 19 nt, Artificial Sequence
  Description of Artificial Sequence: Synthetic oligonucleotide
aacauagauuguuuucuau

SEQ ID NO: 3025473 - RNA, 19 nt, Artificial Sequence
  Description of Artificial Sequence: Synthetic oligonucleotide
agauuguuuucuauaaaag

SEQ ID NO: 3025474 - RNA, 19 nt, Artificial Sequence
  Description of Artificial Sequence: Synthetic oligonucleotide
uuucugagaagaaaacaua

SEQ ID NO: 3025475 - RNA, 19 nt, Artificial Sequence
  Description of Artificial Sequence: Synthetic oligonucleotide
uaauaagaggccaguacau

SEQ ID NO: 3025476 - RNA, 19 nt, Artificial Sequence
  Description of Artificial Sequence: Synthetic oligonucleotide
uaagaggccaguacauuga

SEQ ID NO: 3025477 - RNA, 19 nt, Artificial Sequence
  Description of Artificial Sequence: Synthetic oligonucleotide
agaagaaaacauaaaauuu

SEQ ID NO: 3025478 - RNA, 19 nt, Artificial Sequence
  Description of Artificial Sequence: Synthetic oligonucleotide
ugaagcucuuuauaucuga

SEQ ID NO: 3025479 - RNA, 19 nt, Artificial Sequence
  Description of Artificial Sequence: Synthetic oligonucleotide
ucaaugaccuuuucugaga

SEQ ID NO: 3025480 - RNA, 19 nt, Artificial Sequence
  Description of Artificial Sequence: Synthetic oligonucleotide
ucuuuauaucugauauuga

SEQ ID NO: 3025481 - RNA, 19 nt, Artificial Sequence
  Description of Artificial Sequence: Synthetic oligonucleotide
cauaaaauuuuauugugua

SEQ ID NO: 3025482 - RNA, 19 nt, Artificial Sequence
  Description of Artificial Sequence: Synthetic oligonucleotide
aacauggggacaaauggca

SEQ ID NO: 3025483 - RNA, 19 nt, Artificial Sequence
  Description of Artificial Sequence: Synthetic oligonucleotide
gaaaauaauuucccaguaa

SEQ ID NO: 3025484 - RNA, 19 nt, Artificial Sequence
  Description of Artificial Sequence: Synthetic oligonucleotide
auucaugaaaacaaaugga

SEQ ID NO: 3025485 - RNA, 19 nt, Artificial Sequence
  Description of Artificial Sequence: Synthetic oligonucleotide
aaauuuuauuguguacaca

SEQ ID NO: 3025486 - RNA, 19 nt, Artificial Sequence
  Description of Artificial Sequence: Synthetic oligonucleotide
cugagaagaaaacauaaaa

SEQ ID NO: 3025487 - RNA, 19 nt, Artificial Sequence
  Description of Artificial Sequence: Synthetic oligonucleotide
uucuauaaaagagguucag

SEQ ID NO: 3025488 - RNA, 19 nt, Artificial Sequence
  Description of Artificial Sequence: Synthetic oligonucleotide
cuauuuccaaauaguuuag

SEQ ID NO: 3025489 - RNA, 19 nt, Artificial Sequence
  Description of Artificial Sequence: Synthetic oligonucleotide
ucuauaaaagagguucagu

SEQ ID NO: 3025490 - RNA, 19 nt, Artificial Sequence
  Description of Artificial Sequence: Synthetic oligonucleotide
aaugaccuuuucugagaag

SEQ ID NO: 3025491 - RNA, 19 nt, Artificial Sequence
  Description of Artificial Sequence: Synthetic oligonucleotide
agaaaauaauuucccagua

SEQ ID NO: 3025492 - RNA, 19 nt, Artificial Sequence
  Description of Artificial Sequence: Synthetic oligonucleotide
agguagguccuucugccac

SEQ ID NO: 3025493 - RNA, 19 nt, Artificial Sequence
  Description of Artificial Sequence: Synthetic oligonucleotide
uccaacauagauuguuuuc

SEQ ID NO: 3025494 - RNA, 19 nt, Artificial Sequence
  Description of Artificial Sequence: Synthetic oligonucleotide
uccaaauaguuuaguauua

SEQ ID NO: 3025495 - RNA, 19 nt, Artificial Sequence
  Description of Artificial Sequence: Synthetic oligonucleotide
auuaaacauuuugaagcuc

SEQ ID NO: 3025496 - RNA, 19 nt, Artificial Sequence
  Description of Artificial Sequence: Synthetic oligonucleotide
uauaucugauauugaacau

SEQ ID NO: 3025497 - RNA, 19 nt, Artificial Sequence
  Description of Artificial Sequence: Synthetic oligonucleotide
cauggggacaaauggcagg

SEQ ID NO: 3025498 - RNA, 19 nt, Artificial Sequence
  Description of Artificial Sequence: Synthetic oligonucleotide
cauagauuguuuucuauaa

SEQ ID NO: 3025499 - RNA, 19 nt, Artificial Sequence
  Description of Artificial Sequence: Synthetic oligonucleotide
auaauaauaagaggccagu

SEQ ID NO: 3025500 - RNA, 19 nt, Artificial Sequence
  Description of Artificial Sequence: Synthetic oligonucleotide
ugaaguucaacaggauuca

SEQ ID NO: 3025501 - RNA, 19 nt, Artificial Sequence
  Description of Artificial Sequence: Synthetic oligonucleotide
uucccaguaagcacaguga

SEQ ID NO: 3025502 - RNA, 19 nt, Artificial Sequence
  Description of Artificial Sequence: Synthetic oligonucleotide
cacauggaaauaauaauaa

SEQ ID NO: 3025503 - RNA, 19 nt, Artificial Sequence
  Description of Artificial Sequence: Synthetic oligonucleotide
agcacagugaacaugggga

SEQ ID NO: 3025504 - RNA, 19 nt, Artificial Sequence
  Description of Artificial Sequence: Synthetic oligonucleotide
acauagauuguuuucuaua

SEQ ID NO: 3025505 - RNA, 19 nt, Artificial Sequence
  Description of Artificial Sequence: Synthetic oligonucleotide
uugaagcucuuuauaucug

SEQ ID NO: 3025506 - RNA, 19 nt, Artificial Sequence
  Description of Artificial Sequence: Synthetic oligonucleotide
guuaacaaaucuauuucca

SEQ ID NO: 3025507 - RNA, 19 nt, Artificial Sequence
  Description of Artificial Sequence: Synthetic oligonucleotide
acauaaaauuuuauugugu

SEQ ID NO: 3025508 - RNA, 19 nt, Artificial Sequence
  Description of Artificial Sequence: Synthetic oligonucleotide
ggaaucuuuaaacuguauc

SEQ ID NO: 3025509 - RNA, 19 nt, Artificial Sequence
  Description of Artificial Sequence: Synthetic oligonucleotide
gaacauggggacaaauggc

SEQ ID NO: 3025510 - RNA, 19 nt, Artificial Sequence
  Description of Artificial Sequence: Synthetic oligonucleotide
aguuuaguauuaaacauuu

SEQ ID NO: 3025511 - RNA, 19 nt, Artificial Sequence
  Description of Artificial Sequence: Synthetic oligonucleotide
uauuguguacacacaguua

SEQ ID NO: 3025512 - RNA, 19 nt, Artificial Sequence
  Description of Artificial Sequence: Synthetic oligonucleotide
caggauucaauucaaaaua

SEQ ID NO: 3025513 - RNA, 19 nt, Artificial Sequence
  Description of Artificial Sequence: Synthetic oligonucleotide
acauuuugaagcucuuuau

SEQ ID NO: 3025514 - RNA, 19 nt, Artificial Sequence
  Description of Artificial Sequence: Synthetic oligonucleotide
auggagauucaugaaaaca

SEQ ID NO: 3025515 - RNA, 19 nt, Artificial Sequence
  Description of Artificial Sequence: Synthetic oligonucleotide
acaaauggagaaaauaauu

SEQ ID NO: 3025516 - RNA, 19 nt, Artificial Sequence
  Description of Artificial Sequence: Synthetic oligonucleotide
aguuugguuucaaugaccu

SEQ ID NO: 3025517 - RNA, 19 nt, Artificial Sequence
  Description of Artificial Sequence: Synthetic oligonucleotide
uccagaaauucacagccuu

SEQ ID NO: 3025518 - RNA, 19 nt, Artificial Sequence
  Description of Artificial Sequence: Synthetic oligonucleotide
aaagagguucaguuugguu

SEQ ID NO: 3025519 - RNA, 19 nt, Artificial Sequence
  Description of Artificial Sequence: Synthetic oligonucleotide
caguuugguuucaaugacc

SEQ ID NO: 3025520 - RNA, 19 nt, Artificial Sequence
  Description of Artificial Sequence: Synthetic oligonucleotide
aauggcagguagguccuuc

SEQ ID NO: 3025521 - RNA, 19 nt, Artificial Sequence
  Description of Artificial Sequence: Synthetic oligonucleotide
ugauccaacauagauuguu

SEQ ID NO: 3025522 - RNA, 19 nt, Artificial Sequence
  Description of Artificial Sequence: Synthetic oligonucleotide
auagauuguuuucuauaaa

SEQ ID NO: 3025523 - RNA, 19 nt, Artificial Sequence
  Description of Artificial Sequence: Synthetic oligonucleotide
ucccaguaagcacagugaa

SEQ ID NO: 3025524 - RNA, 19 nt, Artificial Sequence
  Description of Artificial Sequence: Synthetic oligonucleotide
uaagcacagugaacauggg

SEQ ID NO: 3025525 - RNA, 19 nt, Artificial Sequence
  Description of Artificial Sequence: Synthetic oligonucleotide
aauuucccaguaagcacag

SEQ ID NO: 3025526 - RNA, 19 nt, Artificial Sequence
  Description of Artificial Sequence: Synthetic oligonucleotide
aguaagcacagugaacaug

SEQ ID NO: 3025527 - RNA, 19 nt, Artificial Sequence
  Description of Artificial Sequence: Synthetic oligonucleotide
uacauugauccaacauaga

SEQ ID NO: 3025528 - RNA, 19 nt, Artificial Sequence
  Description of Artificial Sequence: Synthetic oligonucleotide
cuauaaaagagguucaguu

SEQ ID NO: 3025529 - RNA, 19 nt, Artificial Sequence
  Description of Artificial Sequence: Synthetic oligonucleotide
acaaaucuauuuccaaaua

SEQ ID NO: 3025530 - RNA, 19 nt, Artificial Sequence
  Description of Artificial Sequence: Synthetic oligonucleotide
acacaguuaacaaaucuau

SEQ ID NO: 3025531 - RNA, 19 nt, Artificial Sequence
  Description of Artificial Sequence: Synthetic oligonucleotide
gucauggagauucaugaaa

SEQ ID NO: 3025532 - RNA, 19 nt, Artificial Sequence
  Description of Artificial Sequence: Synthetic oligonucleotide
ccaaacuugaaguucaaca

SEQ ID NO: 3025533 - RNA, 19 nt, Artificial Sequence
  Description of Artificial Sequence: Synthetic oligonucleotide
aacuguaucuccagaaauu

SEQ ID NO: 3025534 - RNA, 19 nt, Artificial Sequence
  Description of Artificial Sequence: Synthetic oligonucleotide
ucugccacauggaaauaau

SEQ ID NO: 3025535 - RNA, 19 nt, Artificial Sequence
  Description of Artificial Sequence: Synthetic oligonucleotide
cauggagauucaugaaaac

SEQ ID NO: 3025536 - RNA, 19 nt, Artificial Sequence
  Description of Artificial Sequence: Synthetic oligonucleotide
aagcucuuuauaucugaua

SEQ ID NO: 3025537 - RNA, 19 nt, Artificial Sequence
  Description of Artificial Sequence: Synthetic oligonucleotide
aauaagaggccaguacauu

SEQ ID NO: 3025538 - RNA, 19 nt, Artificial Sequence
  Description of Artificial Sequence: Synthetic oligonucleotide
aaaagagguucaguuuggu

SEQ ID NO: 3025539 - RNA, 19 nt, Artificial Sequence
  Description of Artificial Sequence: Synthetic oligonucleotide
cuuuucugagaagaaaaca

SEQ ID NO: 3025540 - RNA, 19 nt, Artificial Sequence
  Description of Artificial Sequence: Synthetic oligonucleotide
uuguguacacacaguuaac

SEQ ID NO: 3025541 - RNA, 19 nt, Artificial Sequence
  Description of Artificial Sequence: Synthetic oligonucleotide
aaguucaacaggauucaau

SEQ ID NO: 3025542 - RNA, 19 nt, Artificial Sequence
  Description of Artificial Sequence: Synthetic oligonucleotide
uaauaauaagaggccagua

SEQ ID NO: 3025543 - RNA, 19 nt, Artificial Sequence
  Description of Artificial Sequence: Synthetic oligonucleotide
guucaacaggauucaauuc

SEQ ID NO: 3025544 - RNA, 19 nt, Artificial Sequence
  Description of Artificial Sequence: Synthetic oligonucleotide
auaucugauauugaacauu

SEQ ID NO: 3025545 - RNA, 19 nt, Artificial Sequence
  Description of Artificial Sequence: Synthetic oligonucleotide
cugauauugaacauuuuau

SEQ ID NO: 3025546 - RNA, 19 nt, Artificial Sequence
  Description of Artificial Sequence: Synthetic oligonucleotide
caaauggagaaaauaauuu

SEQ ID NO: 3025547 - RNA, 19 nt, Artificial Sequence
  Description of Artificial Sequence: Synthetic oligonucleotide
gugaacauggggacaaaug

SEQ ID NO: 3025548 - RNA, 19 nt, Artificial Sequence
  Description of Artificial Sequence: Synthetic oligonucleotide
uccuucugccacauggaaa

SEQ ID NO: 3025549 - RNA, 19 nt, Artificial Sequence
  Description of Artificial Sequence: Synthetic oligonucleotide
agaaaacauaaaauuuuau

SEQ ID NO: 3025550 - RNA, 19 nt, Artificial Sequence
  Description of Artificial Sequence: Synthetic oligonucleotide
cacacaguuaacaaaucua

SEQ ID NO: 3025551 - RNA, 19 nt, Artificial Sequence
  Description of Artificial Sequence: Synthetic oligonucleotide
caaauaguuuaguauuaaa

SEQ ID NO: 3025552 - RNA, 19 nt, Artificial Sequence
  Description of Artificial Sequence: Synthetic oligonucleotide
uaaacauuuugaagcucuu

SEQ ID NO: 3025553 - RNA, 19 nt, Artificial Sequence
  Description of Artificial Sequence: Synthetic oligonucleotide
ugaccuuuucugagaagaa

SEQ ID NO: 3025554 - RNA, 19 nt, Artificial Sequence
  Description of Artificial Sequence: Synthetic oligonucleotide
accuuuucugagaagaaaa

SEQ ID NO: 3025555 - RNA, 19 nt, Artificial Sequence
  Description of Artificial Sequence: Synthetic oligonucleotide
aagaggccaguacauugau

SEQ ID NO: 3025556 - RNA, 19 nt, Artificial Sequence
  Description of Artificial Sequence: Synthetic oligonucleotide
auuuuauuguguacacaca

SEQ ID NO: 3025557 - RNA, 19 nt, Artificial Sequence
  Description of Artificial Sequence: Synthetic oligonucleotide
ggggacaaauggcagguag

SEQ ID NO: 3025558 - RNA, 19 nt, Artificial Sequence
  Description of Artificial Sequence: Synthetic oligonucleotide
aggauucaauucaaaauaa

SEQ ID NO: 3025559 - RNA, 19 nt, Artificial Sequence
  Description of Artificial Sequence: Synthetic oligonucleotide
uggaaucuuuaaacuguau

SEQ ID NO: 3025560 - RNA, 19 nt, Artificial Sequence
  Description of Artificial Sequence: Synthetic oligonucleotide
auuuuauauggaaucuuua

SEQ ID NO: 3025561 - RNA, 19 nt, Artificial Sequence
  Description of Artificial Sequence: Synthetic oligonucleotide
cauuuugaagcucuuuaua

SEQ ID NO: 3025562 - RNA, 19 nt, Artificial Sequence
  Description of Artificial Sequence: Synthetic oligonucleotide
uucugccacauggaaauaa

SEQ ID NO: 3025563 - RNA, 19 nt, Artificial Sequence
  Description of Artificial Sequence: Synthetic oligonucleotide
auccaacauagauuguuuu

SEQ ID NO: 3025564 - RNA, 19 nt, Artificial Sequence
  Description of Artificial Sequence: Synthetic oligonucleotide
acagugaacauggggacaa

SEQ ID NO: 3025565 - RNA, 19 nt, Artificial Sequence
  Description of Artificial Sequence: Synthetic oligonucleotide
gcagguagguccuucugcc

SEQ ID NO: 3025566 - RNA, 19 nt, Artificial Sequence
  Description of Artificial Sequence: Synthetic oligonucleotide
auggggacaaauggcaggu

SEQ ID NO: 3025567 - RNA, 19 nt, Artificial Sequence
  Description of Artificial Sequence: Synthetic oligonucleotide
ccuuuucugagaagaaaac

SEQ ID NO: 3025568 - RNA, 19 nt, Artificial Sequence
  Description of Artificial Sequence: Synthetic oligonucleotide
guacacacaguuaacaaau

SEQ ID NO: 3025569 - RNA, 19 nt, Artificial Sequence
  Description of Artificial Sequence: Synthetic oligonucleotide
cauuuuauauggaaucuuu

SEQ ID NO: 3025570 - RNA, 19 nt, Artificial Sequence
  Description of Artificial Sequence: Synthetic oligonucleotide
ccaguaagcacagugaaca

SEQ ID NO: 3025571 - RNA, 19 nt, Artificial Sequence
  Description of Artificial Sequence: Synthetic oligonucleotide
uugauccaacauagauugu

SEQ ID NO: 3025572 - RNA, 19 nt, Artificial Sequence
  Description of Artificial Sequence: Synthetic oligonucleotide
auugaacauuuuauaugga

SEQ ID NO: 3025573 - RNA, 19 nt, Artificial Sequence
  Description of Artificial Sequence: Synthetic oligonucleotide
cauugauccaacauagauu

SEQ ID NO: 3025574 - RNA, 19 nt, Artificial Sequence
  Description of Artificial Sequence: Synthetic oligonucleotide
acauggggacaaauggcag

SEQ ID NO: 3025575 - RNA, 19 nt, Artificial Sequence
  Description of Artificial Sequence: Synthetic oligonucleotide
ggcagguagguccuucugc

SEQ ID NO: 3025576 - RNA, 19 nt, Artificial Sequence
  Description of Artificial Sequence: Synthetic oligonucleotide
gggacaaauggcagguagg

SEQ ID NO: 3025577 - RNA, 19 nt, Artificial Sequence
  Description of Artificial Sequence: Synthetic oligonucleotide
gagauucaugaaaacaaau

SEQ ID NO: 3025578 - RNA, 19 nt, Artificial Sequence
  Description of Artificial Sequence: Synthetic oligonucleotide
caaugaccuuuucugagaa

SEQ ID NO: 3025579 - RNA, 19 nt, Artificial Sequence
  Description of Artificial Sequence: Synthetic oligonucleotide
guaucuccagaaauucaca

SEQ ID NO: 3025580 - RNA, 19 nt, Artificial Sequence
  Description of Artificial Sequence: Synthetic oligonucleotide
ccacauggaaauaauaaua

SEQ ID NO: 3025581 - RNA, 19 nt, Artificial Sequence
  Description of Artificial Sequence: Synthetic oligonucleotide
gacaaauggcagguagguc

SEQ ID NO: 3025582 - RNA, 19 nt, Artificial Sequence
  Description of Artificial Sequence: Synthetic oligonucleotide
auggcagguagguccuucu

SEQ ID NO: 3025583 - RNA, 19 nt, Artificial Sequence
  Description of Artificial Sequence: Synthetic oligonucleotide
agugaacauggggacaaau

SEQ ID NO: 3025584 - RNA, 19 nt, Artificial Sequence
  Description of Artificial Sequence: Synthetic oligonucleotide
cuugaaguucaacaggauu

SEQ ID NO: 3025585 - RNA, 19 nt, Artificial Sequence
  Description of Artificial Sequence: Synthetic oligonucleotide
agaggccaguacauugauc

SEQ ID NO: 3025586 - RNA, 19 nt, Artificial Sequence
  Description of Artificial Sequence: Synthetic oligonucleotide
caacauagauuguuuucua

SEQ ID NO: 3025587 - RNA, 19 nt, Artificial Sequence
  Description of Artificial Sequence: Synthetic oligonucleotide
ugguuucaaugaccuuuuc

SEQ ID NO: 3025588 - RNA, 19 nt, Artificial Sequence
  Description of Artificial Sequence: Synthetic oligonucleotide
aggccaguacauugaucca

SEQ ID NO: 3025589 - RNA, 19 nt, Artificial Sequence
  Description of Artificial Sequence: Synthetic oligonucleotide
auggaaucuuuaaacugua

SEQ ID NO: 3025590 - RNA, 19 nt, Artificial Sequence
  Description of Artificial Sequence: Synthetic oligonucleotide
ggagauucaugaaaacaaa

SEQ ID NO: 3025591 - RNA, 19 nt, Artificial Sequence
  Description of Artificial Sequence: Synthetic oligonucleotide
ggauucaauucaaaauaaa

SEQ ID NO: 3025592 - RNA, 19 nt, Artificial Sequence
  Description of Artificial Sequence: Synthetic oligonucleotide
acuugaaguucaacaggau

SEQ ID NO: 3025593 - RNA, 19 nt, Artificial Sequence
  Description of Artificial Sequence: Synthetic oligonucleotide
gauccaacauagauuguuu

SEQ ID NO: 3025594 - RNA, 19 nt, Artificial Sequence
  Description of Artificial Sequence: Synthetic oligonucleotide
gaaguucaacaggauucaa

SEQ ID NO: 3025595 - RNA, 19 nt, Artificial Sequence
  Description of Artificial Sequence: Synthetic oligonucleotide
caaauggcagguagguccu

SEQ ID NO: 3025596 - RNA, 19 nt, Artificial Sequence
  Description of Artificial Sequence: Synthetic oligonucleotide
caacaggauucaauucaaa

SEQ ID NO: 3025597 - RNA, 19 nt, Artificial Sequence
  Description of Artificial Sequence: Synthetic oligonucleotide
guccuucugccacauggaa

SEQ ID NO: 3025598 - RNA, 19 nt, Artificial Sequence
  Description of Artificial Sequence: Synthetic oligonucleotide
gccacauggaaauaauaau

SEQ ID NO: 3025599 - RNA, 19 nt, Artificial Sequence
  Description of Artificial Sequence: Synthetic oligonucleotide
gaagcucuuuauaucugau

SEQ ID NO: 3025600 - RNA, 19 nt, Artificial Sequence
  Description of Artificial Sequence: Synthetic oligonucleotide
cugccacauggaaauaaua

SEQ ID NO: 3025601 - RNA, 19 nt, Artificial Sequence
  Description of Artificial Sequence: Synthetic oligonucleotide
gguagguccuucugccaca

SEQ ID NO: 3025602 - RNA, 19 nt, Artificial Sequence
  Description of Artificial Sequence: Synthetic oligonucleotide
cacagugaacauggggaca

SEQ ID NO: 3025603 - RNA, 19 nt, Artificial Sequence
  Description of Artificial Sequence: Synthetic oligonucleotide
cacaguuaacaaaucuauu

SEQ ID NO: 3025604 - RNA, 19 nt, Artificial Sequence
  Description of Artificial Sequence: Synthetic oligonucleotide
gccaguacauugauccaac

SEQ ID NO: 3025605 - RNA, 19 nt, Artificial Sequence
  Description of Artificial Sequence: Synthetic oligonucleotide
ccaacauagauuguuuucu

SEQ ID NO: 3025606 - RNA, 19 nt, Artificial Sequence
  Description of Artificial Sequence: Synthetic oligonucleotide
ccuucugccacauggaaau

SEQ ID NO: 3025607 - RNA, 19 nt, Artificial Sequence
  Description of Artificial Sequence: Synthetic oligonucleotide
ggacaaauggcagguaggu

SEQ ID NO: 3025608 - RNA, 19 nt, Artificial Sequence
  Description of Artificial Sequence: Synthetic oligonucleotide
cagguagguccuucugcca

SEQ ID NO: 3025609 - RNA, 19 nt, Artificial Sequence
  Description of Artificial Sequence: Synthetic oligonucleotide
guuuucuauaaaagagguu

SEQ ID NO: 3025610 - RNA, 19 nt, Artificial Sequence
  Description of Artificial Sequence: Synthetic oligonucleotide
cagaaauucacagccuuuu

SEQ ID NO: 3025611 - RNA, 19 nt, Artificial Sequence
  Description of Artificial Sequence: Synthetic oligonucleotide
gagguucaguuugguuuca

SEQ ID NO: 3025612 - RNA, 19 nt, Artificial Sequence
  Description of Artificial Sequence: Synthetic oligonucleotide
cuccagaaauucacagccu

SEQ ID NO: 3025613 - RNA, 19 nt, Artificial Sequence
  Description of Artificial Sequence: Synthetic oligonucleotide
auuucccaguaagcacagu

SEQ ID NO: 3025614 - RNA, 19 nt, Artificial Sequence
  Description of Artificial Sequence: Synthetic oligonucleotide
ccaaauaguuuaguauuaa

SEQ ID NO: 3025615 - RNA, 19 nt, Artificial Sequence
  Description of Artificial Sequence: Synthetic oligonucleotide
ggccaguacauugauccaa

SEQ ID NO: 3025616 - RNA, 19 nt, Artificial Sequence
  Description of Artificial Sequence: Synthetic oligonucleotide
aucugauauugaacauuuu

SEQ ID NO: 3025617 - RNA, 19 nt, Artificial Sequence
  Description of Artificial Sequence: Synthetic oligonucleotide
aaauggcagguagguccuu

SEQ ID NO: 3025618 - RNA, 19 nt, Artificial Sequence
  Description of Artificial Sequence: Synthetic oligonucleotide
agguucaguuugguuucaa

SEQ ID NO: 3025619 - RNA, 19 nt, Artificial Sequence
  Description of Artificial Sequence: Synthetic oligonucleotide
cccaaacuugaaguucaac

SEQ ID NO: 3025620 - RNA, 19 nt, Artificial Sequence
  Description of Artificial Sequence: Synthetic oligonucleotide
gguucaguuugguuucaau

SEQ ID NO: 3025621 - RNA, 19 nt, Artificial Sequence
  Description of Artificial Sequence: Synthetic oligonucleotide
guuuaguauuaaacauuuu

SEQ ID NO: 3025622 - RNA, 19 nt, Artificial Sequence
  Description of Artificial Sequence: Synthetic oligonucleotide
uggggacaaauggcaggua

SEQ ID NO: 3025623 - RNA, 19 nt, Artificial Sequence
  Description of Artificial Sequence: Synthetic oligonucleotide
guuugguuucaaugaccuu

SEQ ID NO: 3025624 - RNA, 19 nt, Artificial Sequence
  Description of Artificial Sequence: Synthetic oligonucleotide
caguaagcacagugaacau

SEQ ID NO: 3025625 - RNA, 19 nt, Artificial Sequence
  Description of Artificial Sequence: Synthetic oligonucleotide
gcucuuuauaucugauauu

SEQ ID NO: 3025626 - RNA, 19 nt, Artificial Sequence
  Description of Artificial Sequence: Synthetic oligonucleotide
guagguccuucugccacau

SEQ ID NO: 3025627 - RNA, 19 nt, Artificial Sequence
  Description of Artificial Sequence: Synthetic oligonucleotide
cuucugccacauggaaaua

SEQ ID NO: 3025628 - RNA, 19 nt, Artificial Sequence
  Description of Artificial Sequence: Synthetic oligonucleotide
ccagaaauucacagccuuu

SEQ ID NO: 3025629 - RNA, 19 nt, Artificial Sequence
  Description of Artificial Sequence: Synthetic oligonucleotide
cagugaacauggggacaaa

SEQ ID NO: 3025630 - RNA, 19 nt, Artificial Sequence
  Description of Artificial Sequence: Synthetic oligonucleotide
ucugcaaguauuuugcucc

SEQ ID NO: 3025631 - RNA, 19 nt, Artificial Sequence
  Description of Artificial Sequence: Synthetic oligonucleotide
aaguauuuugcuccuguag

SEQ ID NO: 3025632 - RNA, 19 nt, Artificial Sequence
  Description of Artificial Sequence: Synthetic oligonucleotide
uuuuguuuggccucaaugu

SEQ ID NO: 3025633 - RNA, 19 nt, Artificial Sequence
  Description of Artificial Sequence: Synthetic oligonucleotide
acaccuacgauuuuguuug

SEQ ID NO: 3025634 - RNA, 19 nt, Artificial Sequence
  Description of Artificial Sequence: Synthetic oligonucleotide
ccaaauauuaucuccaugg

SEQ ID NO: 3025635 - RNA, 19 nt, Artificial Sequence
  Description of Artificial Sequence: Synthetic oligonucleotide
auuccugccaaauauuauc

SEQ ID NO: 3025636 - RNA, 19 nt, Artificial Sequence
  Description of Artificial Sequence: Synthetic oligonucleotide
aaugguuguacuugcuauc

SEQ ID NO: 3025637 - RNA, 19 nt, Artificial Sequence
  Description of Artificial Sequence: Synthetic oligonucleotide
aguaggagaagcuuuggag

SEQ ID NO: 3025638 - RNA, 19 nt, Artificial Sequence
  Description of Artificial Sequence: Synthetic oligonucleotide
guagguaucgcucugcaag

SEQ ID NO: 3025639 - RNA, 19 nt, Artificial Sequence
  Description of Artificial Sequence: Synthetic oligonucleotide
aaccaaugguuguacuugc

SEQ ID NO: 3025640 - RNA, 19 nt, Artificial Sequence
  Description of Artificial Sequence: Synthetic oligonucleotide
uguucuuucuuauuccugc

SEQ ID NO: 3025641 - RNA, 19 nt, Artificial Sequence
  Description of Artificial Sequence: Synthetic oligonucleotide
ucuuauuccugccaaauau

SEQ ID NO: 3025642 - RNA, 19 nt, Artificial Sequence
  Description of Artificial Sequence: Synthetic oligonucleotide
auuuuguuuggccucaaug

SEQ ID NO: 3025643 - RNA, 19 nt, Artificial Sequence
  Description of Artificial Sequence: Synthetic oligonucleotide
aguauuuugcuccuguaga

SEQ ID NO: 3025644 - RNA, 19 nt, Artificial Sequence
  Description of Artificial Sequence: Synthetic oligonucleotide
aacucugacaccuacgauu

SEQ ID NO: 3025645 - RNA, 19 nt, Artificial Sequence
  Description of Artificial Sequence: Synthetic oligonucleotide
uaugccauuguuccaaacu

SEQ ID NO: 3025646 - RNA, 19 nt, Artificial Sequence
  Description of Artificial Sequence: Synthetic oligonucleotide
aagcaggguccccugaagc

SEQ ID NO: 3025647 - RNA, 19 nt, Artificial Sequence
  Description of Artificial Sequence: Synthetic oligonucleotide
caauguuuggcguuuguag

SEQ ID NO: 3025648 - RNA, 19 nt, Artificial Sequence
  Description of Artificial Sequence: Synthetic oligonucleotide
aaaccaaugguuguacuug

SEQ ID NO: 3025649 - RNA, 19 nt, Artificial Sequence
  Description of Artificial Sequence: Synthetic oligonucleotide
gucacuguggcugacaccg

SEQ ID NO: 3025650 - RNA, 19 nt, Artificial Sequence
  Description of Artificial Sequence: Synthetic oligonucleotide
agcuguucuuucuuauucc

SEQ ID NO: 3025651 - RNA, 19 nt, Artificial Sequence
  Description of Artificial Sequence: Synthetic oligonucleotide
uuggccucaauguuuggcg

SEQ ID NO: 3025652 - RNA, 19 nt, Artificial Sequence
  Description of Artificial Sequence: Synthetic oligonucleotide
uccccugaagccauguugg

SEQ ID NO: 3025653 - RNA, 19 nt, Artificial Sequence
  Description of Artificial Sequence: Synthetic oligonucleotide
uuguuccaaacucugacac

SEQ ID NO: 3025654 - RNA, 19 nt, Artificial Sequence
  Description of Artificial Sequence: Synthetic oligonucleotide
cauguuggaaucuugccug

SEQ ID NO: 3025655 - RNA, 19 nt, Artificial Sequence
  Description of Artificial Sequence: Synthetic oligonucleotide
ugugggacaaguaggagaa

SEQ ID NO: 3025656 - RNA, 19 nt, Artificial Sequence
  Description of Artificial Sequence: Synthetic oligonucleotide
caggccaucaaaccaaugg

SEQ ID NO: 3025657 - RNA, 19 nt, Artificial Sequence
  Description of Artificial Sequence: Synthetic oligonucleotide
aaucuugccugucacugug

SEQ ID NO: 3025658 - RNA, 19 nt, Artificial Sequence
  Description of Artificial Sequence: Synthetic oligonucleotide
augccauuguuccaaacuc

SEQ ID NO: 3025659 - RNA, 19 nt, Artificial Sequence
  Description of Artificial Sequence: Synthetic oligonucleotide
acugugugcaucccaggcc

SEQ ID NO: 3025660 - RNA, 19 nt, Artificial Sequence
  Description of Artificial Sequence: Synthetic oligonucleotide
uugucugugaaagucuggg

SEQ ID NO: 3025661 - RNA, 19 nt, Artificial Sequence
  Description of Artificial Sequence: Synthetic oligonucleotide
uguuuggccucaauguuug

SEQ ID NO: 3025662 - RNA, 19 nt, Artificial Sequence
  Description of Artificial Sequence: Synthetic oligonucleotide
ugaaagucugggauggugu

SEQ ID NO: 3025663 - RNA, 19 nt, Artificial Sequence
  Description of Artificial Sequence: Synthetic oligonucleotide
ucugugaaagucugggaug

SEQ ID NO: 3025664 - RNA, 19 nt, Artificial Sequence
  Description of Artificial Sequence: Synthetic oligonucleotide
uuugucacgggucugggua

SEQ ID NO: 3025665 - RNA, 19 nt, Artificial Sequence
  Description of Artificial Sequence: Synthetic oligonucleotide
augguuguacuugcuaucc

SEQ ID NO: 3025666 - RNA, 19 nt, Artificial Sequence
  Description of Artificial Sequence: Synthetic oligonucleotide
auuuugcuccuguagaaga

SEQ ID NO: 3025667 - RNA, 19 nt, Artificial Sequence
  Description of Artificial Sequence: Synthetic oligonucleotide
gaagcuuuggagaagaugu

SEQ ID NO: 3025668 - RNA, 19 nt, Artificial Sequence
  Description of Artificial Sequence: Synthetic oligonucleotide
uuauuccugccaaauauua

SEQ ID NO: 3025669 - RNA, 19 nt, Artificial Sequence
  Description of Artificial Sequence: Synthetic oligonucleotide
aagucugggaugguguggg

SEQ ID NO: 3025670 - RNA, 19 nt, Artificial Sequence
  Description of Artificial Sequence: Synthetic oligonucleotide
agcaggguccccugaagcc

SEQ ID NO: 3025671 - RNA, 19 nt, Artificial Sequence
  Description of Artificial Sequence: Synthetic oligonucleotide
uuccugccaaauauuaucu

SEQ ID NO: 3025672 - RNA, 19 nt, Artificial Sequence
  Description of Artificial Sequence: Synthetic oligonucleotide
ugauggagaagcuguggag

SEQ ID NO: 3025673 - RNA, 19 nt, Artificial Sequence
  Description of Artificial Sequence: Synthetic oligonucleotide
aaguaggagaagcuuugga

SEQ ID NO: 3025674 - RNA, 19 nt, Artificial Sequence
  Description of Artificial Sequence: Synthetic oligonucleotide
accuccccgucuuugaugg

SEQ ID NO: 3025675 - RNA, 19 nt, Artificial Sequence
  Description of Artificial Sequence: Synthetic oligonucleotide
uauuuugcuccuguagaag

SEQ ID NO: 3025676 - RNA, 19 nt, Artificial Sequence
  Description of Artificial Sequence: Synthetic oligonucleotide
ucugacaccuacgauuuug

SEQ ID NO: 3025677 - RNA, 19 nt, Artificial Sequence
  Description of Artificial Sequence: Synthetic oligonucleotide
agggccaggccaucaaacc

SEQ ID NO: 3025678 - RNA, 19 nt, Artificial Sequence
  Description of Artificial Sequence: Synthetic oligonucleotide
uuuguuuggccucaauguu

SEQ ID NO: 3025679 - RNA, 19 nt, Artificial Sequence
  Description of Artificial Sequence: Synthetic oligonucleotide
aaagucugggauggugugg

SEQ ID NO: 3025680 - RNA, 19 nt, Artificial Sequence
  Description of Artificial Sequence: Synthetic oligonucleotide
auuguuccaaacucugaca

SEQ ID NO: 3025681 - RNA, 19 nt, Artificial Sequence
  Description of Artificial Sequence: Synthetic oligonucleotide
uuuugcuccuguagaagac

SEQ ID NO: 3025682 - RNA, 19 nt, Artificial Sequence
  Description of Artificial Sequence: Synthetic oligonucleotide
ugggacaaguaggagaagc

SEQ ID NO: 3025683 - RNA, 19 nt, Artificial Sequence
  Description of Artificial Sequence: Synthetic oligonucleotide
aucaaaccaaugguuguac

SEQ ID NO: 3025684 - RNA, 19 nt, Artificial Sequence
  Description of Artificial Sequence: Synthetic oligonucleotide
ucuggguaugccauuguuc

SEQ ID NO: 3025685 - RNA, 19 nt, Artificial Sequence
  Description of Artificial Sequence: Synthetic oligonucleotide
gaaagucugggauggugug

SEQ ID NO: 3025686 - RNA, 19 nt, Artificial Sequence
  Description of Artificial Sequence: Synthetic oligonucleotide
uccuguagaagaccucccc

SEQ ID NO: 3025687 - RNA, 19 nt, Artificial Sequence
  Description of Artificial Sequence: Synthetic oligonucleotide
uuggcguuuguagguaucg

SEQ ID NO: 3025688 - RNA, 19 nt, Artificial Sequence
  Description of Artificial Sequence: Synthetic oligonucleotide
cugugaaagucugggaugg

SEQ ID NO: 3025689 - RNA, 19 nt, Artificial Sequence
  Description of Artificial Sequence: Synthetic oligonucleotide
uguuccaaacucugacacc

SEQ ID NO: 3025690 - RNA, 19 nt, Artificial Sequence
  Description of Artificial Sequence: Synthetic oligonucleotide
uuggaaucuugccugucac

SEQ ID NO: 3025691 - RNA, 19 nt, Artificial Sequence
  Description of Artificial Sequence: Synthetic oligonucleotide
ucugggauggugugggaca

SEQ ID NO: 3025692 - RNA, 19 nt, Artificial Sequence
  Description of Artificial Sequence: Synthetic oligonucleotide
uacgauuuuguuuggccuc

SEQ ID NO: 3025693 - RNA, 19 nt, Artificial Sequence
  Description of Artificial Sequence: Synthetic oligonucleotide
uccaaacucugacaccuac

SEQ ID NO: 3025694 - RNA, 19 nt, Artificial Sequence
  Description of Artificial Sequence: Synthetic oligonucleotide
cugugugcaucccaggccc

SEQ ID NO: 3025695 - RNA, 19 nt, Artificial Sequence
  Description of Artificial Sequence: Synthetic oligonucleotide
uggugugggacaaguagga

SEQ ID NO: 3025696 - RNA, 19 nt, Artificial Sequence
  Description of Artificial Sequence: Synthetic oligonucleotide
uuuggccucaauguuuggc

SEQ ID NO: 3025697 - RNA, 19 nt, Artificial Sequence
  Description of Artificial Sequence: Synthetic oligonucleotide
ucuugccugucacuguggc

SEQ ID NO: 3025698 - RNA, 19 nt, Artificial Sequence
  Description of Artificial Sequence: Synthetic oligonucleotide
aagggccaggccaucaaac

SEQ ID NO: 3025699 - RNA, 19 nt, Artificial Sequence
  Description of Artificial Sequence: Synthetic oligonucleotide
uuugcuccuguagaagacc

SEQ ID NO: 3025700 - RNA, 19 nt, Artificial Sequence
  Description of Artificial Sequence: Synthetic oligonucleotide
ugccauuguuccaaacucu

SEQ ID NO: 3025701 - RNA, 19 nt, Artificial Sequence
  Description of Artificial Sequence: Synthetic oligonucleotide
gauggagaagcuguggaga

SEQ ID NO: 3025702 - RNA, 19 nt, Artificial Sequence
  Description of Artificial Sequence: Synthetic oligonucleotide
auguuuggcguuuguaggu

SEQ ID NO: 3025703 - RNA, 19 nt, Artificial Sequence
  Description of Artificial Sequence: Synthetic oligonucleotide
gguuguacuugcuaucccc

SEQ ID NO: 3025704 - RNA, 19 nt, Artificial Sequence
  Description of Artificial Sequence: Synthetic oligonucleotide
aggccaucaaaccaauggu

SEQ ID NO: 3025705 - RNA, 19 nt, Artificial Sequence
  Description of Artificial Sequence: Synthetic oligonucleotide
ccugccaaauauuaucucc

SEQ ID NO: 3025706 - RNA, 19 nt, Artificial Sequence
  Description of Artificial Sequence: Synthetic oligonucleotide
ucgcucugcaaguauuuug

SEQ ID NO: 3025707 - RNA, 19 nt, Artificial Sequence
  Description of Artificial Sequence: Synthetic oligonucleotide
ggagaagcuguggagaagg

SEQ ID NO: 3025708 - RNA, 19 nt, Artificial Sequence
  Description of Artificial Sequence: Synthetic oligonucleotide
auggugugggacaaguagg

SEQ ID NO: 3025709 - RNA, 19 nt, Artificial Sequence
  Description of Artificial Sequence: Synthetic oligonucleotide
aggcaguugucugugaaag

SEQ ID NO: 3025710 - RNA, 19 nt, Artificial Sequence
  Description of Artificial Sequence: Synthetic oligonucleotide
uuuguagguaucgcucugc

SEQ ID NO: 3025711 - RNA, 19 nt, Artificial Sequence
  Description of Artificial Sequence: Synthetic oligonucleotide
caaacucugacaccuacga

SEQ ID NO: 3025712 - RNA, 19 nt, Artificial Sequence
  Description of Artificial Sequence: Synthetic oligonucleotide
uuguagguaucgcucugca

SEQ ID NO: 3025713 - RNA, 19 nt, Artificial Sequence
  Description of Artificial Sequence: Synthetic oligonucleotide
uuguuuggccucaauguuu

SEQ ID NO: 3025714 - RNA, 19 nt, Artificial Sequence
  Description of Artificial Sequence: Synthetic oligonucleotide
uguagaagaccuccccguc

SEQ ID NO: 3025715 - RNA, 19 nt, Artificial Sequence
  Description of Artificial Sequence: Synthetic oligonucleotide
ucaaaccaaugguuguacu

SEQ ID NO: 3025716 - RNA, 19 nt, Artificial Sequence
  Description of Artificial Sequence: Synthetic oligonucleotide
cuuugauggagaagcugug

SEQ ID NO: 3025717 - RNA, 19 nt, Artificial Sequence
  Description of Artificial Sequence: Synthetic oligonucleotide
uucuuauuccugccaaaua

SEQ ID NO: 3025718 - RNA, 19 nt, Artificial Sequence
  Description of Artificial Sequence: Synthetic oligonucleotide
uugcuccuguagaagaccu

SEQ ID NO: 3025719 - RNA, 19 nt, Artificial Sequence
  Description of Artificial Sequence: Synthetic oligonucleotide
caaauauuaucuccaugga

SEQ ID NO: 3025720 - RNA, 19 nt, Artificial Sequence
  Description of Artificial Sequence: Synthetic oligonucleotide
acaaguaggagaagcuuug

SEQ ID NO: 3025721 - RNA, 19 nt, Artificial Sequence
  Description of Artificial Sequence: Synthetic oligonucleotide
cucugcaaguauuuugcuc

SEQ ID NO: 3025722 - RNA, 19 nt, Artificial Sequence
  Description of Artificial Sequence: Synthetic oligonucleotide
aaacucugacaccuacgau

SEQ ID NO: 3025723 - RNA, 19 nt, Artificial Sequence
  Description of Artificial Sequence: Synthetic oligonucleotide
ucaggcaguugucugugaa

SEQ ID NO: 3025724 - RNA, 19 nt, Artificial Sequence
  Description of Artificial Sequence: Synthetic oligonucleotide
uagguaucgcucugcaagu

SEQ ID NO: 3025725 - RNA, 19 nt, Artificial Sequence
  Description of Artificial Sequence: Synthetic oligonucleotide
cacugugugcaucccaggc

SEQ ID NO: 3025726 - RNA, 19 nt, Artificial Sequence
  Description of Artificial Sequence: Synthetic oligonucleotide
gaagcaggguccccugaag

SEQ ID NO: 3025727 - RNA, 19 nt, Artificial Sequence
  Description of Artificial Sequence: Synthetic oligonucleotide
ugucugugaaagucuggga

SEQ ID NO: 3025728 - RNA, 19 nt, Artificial Sequence
  Description of Artificial Sequence: Synthetic oligonucleotide
ugguuguacuugcuauccc

SEQ ID NO: 3025729 - RNA, 19 nt, Artificial Sequence
  Description of Artificial Sequence: Synthetic oligonucleotide
aagaccuccccgucuuuga

SEQ ID NO: 3025730 - RNA, 19 nt, Artificial Sequence
  Description of Artificial Sequence: Synthetic oligonucleotide
cugccaaauauuaucucca

SEQ ID NO: 3025731 - RNA, 19 nt, Artificial Sequence
  Description of Artificial Sequence: Synthetic oligonucleotide
gugugggacaaguaggaga

SEQ ID NO: 3025732 - RNA, 19 nt, Artificial Sequence
  Description of Artificial Sequence: Synthetic oligonucleotide
guccccugaagccauguug

SEQ ID NO: 3025733 - RNA, 19 nt, Artificial Sequence
  Description of Artificial Sequence: Synthetic oligonucleotide
ccgucuuugauggagaagc

SEQ ID NO: 3025734 - RNA, 19 nt, Artificial Sequence
  Description of Artificial Sequence: Synthetic oligonucleotide
ccuacgauuuuguuuggcc

SEQ ID NO: 3025735 - RNA, 19 nt, Artificial Sequence
  Description of Artificial Sequence: Synthetic oligonucleotide
ggaaucuugccugucacug

SEQ ID NO: 3025736 - RNA, 19 nt, Artificial Sequence
  Description of Artificial Sequence: Synthetic oligonucleotide
guuggaaucuugccuguca

SEQ ID NO: 3025737 - RNA, 19 nt, Artificial Sequence
  Description of Artificial Sequence: Synthetic oligonucleotide
ucccaggcccauuucgaag

SEQ ID NO: 3025738 - RNA, 19 nt, Artificial Sequence
  Description of Artificial Sequence: Synthetic oligonucleotide
accuacgauuuuguuuggc

SEQ ID NO: 3025739 - RNA, 19 nt, Artificial Sequence
  Description of Artificial Sequence: Synthetic oligonucleotide
uuuggcguuuguagguauc

SEQ ID NO: 3025740 - RNA, 19 nt, Artificial Sequence
  Description of Artificial Sequence: Synthetic oligonucleotide
aguugucugugaaagucug

SEQ ID NO: 3025741 - RNA, 19 nt, Artificial Sequence
  Description of Artificial Sequence: Synthetic oligonucleotide
guuuguagguaucgcucug

SEQ ID NO: 3025742 - RNA, 19 nt, Artificial Sequence
  Description of Artificial Sequence: Synthetic oligonucleotide
uagaagaccuccccgucuu

SEQ ID NO: 3025743 - RNA, 19 nt, Artificial Sequence
  Description of Artificial Sequence: Synthetic oligonucleotide
ucaauguuuggcguuugua

SEQ ID NO: 3025744 - RNA, 19 nt, Artificial Sequence
  Description of Artificial Sequence: Synthetic oligonucleotide
auggagaagcuguggagaa

SEQ ID NO: 3025745 - RNA, 19 nt, Artificial Sequence
  Description of Artificial Sequence: Synthetic oligonucleotide
uaucgcucugcaaguauuu

SEQ ID NO: 3025746 - RNA, 19 nt, Artificial Sequence
  Description of Artificial Sequence: Synthetic oligonucleotide
uuucgaagcaggguccccu

SEQ ID NO: 3025747 - RNA, 19 nt, Artificial Sequence
  Description of Artificial Sequence: Synthetic oligonucleotide
uggaaucuugccugucacu

SEQ ID NO: 3025748 - RNA, 19 nt, Artificial Sequence
  Description of Artificial Sequence: Synthetic oligonucleotide
caaguaggagaagcuuugg

SEQ ID NO: 3025749 - RNA, 19 nt, Artificial Sequence
  Description of Artificial Sequence: Synthetic oligonucleotide
ugccaaauauuaucuccau

SEQ ID NO: 3025750 - RNA, 19 nt, Artificial Sequence
  Description of Artificial Sequence: Synthetic oligonucleotide
uggagaagggccaggccau

SEQ ID NO: 3025751 - RNA, 19 nt, Artificial Sequence
  Description of Artificial Sequence: Synthetic oligonucleotide
gacaccuacgauuuuguuu

SEQ ID NO: 3025752 - RNA, 19 nt, Artificial Sequence
  Description of Artificial Sequence: Synthetic oligonucleotide
gugaaagucugggauggug

SEQ ID NO: 3025753 - RNA, 19 nt, Artificial Sequence
  Description of Artificial Sequence: Synthetic oligonucleotide
uuuugucacgggucugggu

SEQ ID NO: 3025754 - RNA, 19 nt, Artificial Sequence
  Description of Artificial Sequence: Synthetic oligonucleotide
guugucugugaaagucugg

SEQ ID NO: 3025755 - RNA, 19 nt, Artificial Sequence
  Description of Artificial Sequence: Synthetic oligonucleotide
uguagguaucgcucugcaa

SEQ ID NO: 3025756 - RNA, 19 nt, Artificial Sequence
  Description of Artificial Sequence: Synthetic oligonucleotide
guuccaaacucugacaccu

SEQ ID NO: 3025757 - RNA, 19 nt, Artificial Sequence
  Description of Artificial Sequence: Synthetic oligonucleotide
cugucacuguggcugacac

SEQ ID NO: 3025758 - RNA, 19 nt, Artificial Sequence
  Description of Artificial Sequence: Synthetic oligonucleotide
uccagcuguucuuucuuau

SEQ ID NO: 3025759 - RNA, 19 nt, Artificial Sequence
  Description of Artificial Sequence: Synthetic oligonucleotide
aggcccauuucgaagcagg

SEQ ID NO: 3025760 - RNA, 19 nt, Artificial Sequence
  Description of Artificial Sequence: Synthetic oligonucleotide
cccauuucgaagcaggguc

SEQ ID NO: 3025761 - RNA, 19 nt, Artificial Sequence
  Description of Artificial Sequence: Synthetic oligonucleotide
ugucacuguggcugacacc

SEQ ID NO: 3025762 - RNA, 19 nt, Artificial Sequence
  Description of Artificial Sequence: Synthetic oligonucleotide
gaagaccuccccgucuuug

SEQ ID NO: 3025763 - RNA, 19 nt, Artificial Sequence
  Description of Artificial Sequence: Synthetic oligonucleotide
uucgaagcaggguccccug

SEQ ID NO: 3025764 - RNA, 19 nt, Artificial Sequence
  Description of Artificial Sequence: Synthetic oligonucleotide
cauuucgaagcaggguccc

SEQ ID NO: 3025765 - RNA, 19 nt, Artificial Sequence
  Description of Artificial Sequence: Synthetic oligonucleotide
uccugccaaauauuaucuc

SEQ ID NO: 3025766 - RNA, 19 nt, Artificial Sequence
  Description of Artificial Sequence: Synthetic oligonucleotide
gccaucaaaccaaugguug

SEQ ID NO: 3025767 - RNA, 19 nt, Artificial Sequence
  Description of Artificial Sequence: Synthetic oligonucleotide
ugacaccggcuccagcugu

SEQ ID NO: 3025768 - RNA, 19 nt, Artificial Sequence
  Description of Artificial Sequence: Synthetic oligonucleotide
gcaucccaggcccauuucg

SEQ ID NO: 3025769 - RNA, 19 nt, Artificial Sequence
  Description of Artificial Sequence: Synthetic oligonucleotide
uggccucaauguuuggcgu

SEQ ID NO: 3025770 - RNA, 19 nt, Artificial Sequence
  Description of Artificial Sequence: Synthetic oligonucleotide
ccaaacucugacaccuacg

SEQ ID NO: 3025771 - RNA, 19 nt, Artificial Sequence
  Description of Artificial Sequence: Synthetic oligonucleotide
gucugugaaagucugggau

SEQ ID NO: 3025772 - RNA, 19 nt, Artificial Sequence
  Description of Artificial Sequence: Synthetic oligonucleotide
gaccuccccgucuuugaug

SEQ ID NO: 3025773 - RNA, 19 nt, Artificial Sequence
  Description of Artificial Sequence: Synthetic oligonucleotide
gccaaauauuaucuccaug

SEQ ID NO: 3025774 - RNA, 19 nt, Artificial Sequence
  Description of Artificial Sequence: Synthetic oligonucleotide
auguuggaaucuugccugu

SEQ ID NO: 3025775 - RNA, 19 nt, Artificial Sequence
  Description of Artificial Sequence: Synthetic oligonucleotide
ugaagccauguuggaaucu

SEQ ID NO: 3025776 - RNA, 19 nt, Artificial Sequence
  Description of Artificial Sequence: Synthetic oligonucleotide
uccccgucuuugauggaga

SEQ ID NO: 3025777 - RNA, 19 nt, Artificial Sequence
  Description of Artificial Sequence: Synthetic oligonucleotide
cuacgauuuuguuuggccu

SEQ ID NO: 3025778 - RNA, 19 nt, Artificial Sequence
  Description of Artificial Sequence: Synthetic oligonucleotide
gccauguuggaaucuugcc

SEQ ID NO: 3025779 - RNA, 19 nt, Artificial Sequence
  Description of Artificial Sequence: Synthetic oligonucleotide
acucugacaccuacgauuu

SEQ ID NO: 3025780 - RNA, 19 nt, Artificial Sequence
  Description of Artificial Sequence: Synthetic oligonucleotide
ccauuucgaagcagggucc

SEQ ID NO: 3025781 - RNA, 19 nt, Artificial Sequence
  Description of Artificial Sequence: Synthetic oligonucleotide
acgauuuuguuuggccuca

SEQ ID NO: 3025782 - RNA, 19 nt, Artificial Sequence
  Description of Artificial Sequence: Synthetic oligonucleotide
aagcuguggagaagggcca

SEQ ID NO: 3025783 - RNA, 19 nt, Artificial Sequence
  Description of Artificial Sequence: Synthetic oligonucleotide
cgcucugcaaguauuuugc

SEQ ID NO: 3025784 - RNA, 19 nt, Artificial Sequence
  Description of Artificial Sequence: Synthetic oligonucleotide
aggagaagcuuuggagaag

SEQ ID NO: 3025785 - RNA, 19 nt, Artificial Sequence
  Description of Artificial Sequence: Synthetic oligonucleotide
uguuuggcguuuguaggua

SEQ ID NO: 3025786 - RNA, 19 nt, Artificial Sequence
  Description of Artificial Sequence: Synthetic oligonucleotide
guuuggccucaauguuugg

SEQ ID NO: 3025787 - RNA, 19 nt, Artificial Sequence
  Description of Artificial Sequence: Synthetic oligonucleotide
ugcaaguauuuugcuccug

SEQ ID NO: 3025788 - RNA, 19 nt, Artificial Sequence
  Description of Artificial Sequence: Synthetic oligonucleotide
ucgaagcaggguccccuga

SEQ ID NO: 3025789 - RNA, 19 nt, Artificial Sequence
  Description of Artificial Sequence: Synthetic oligonucleotide
cuguggagaagggccaggc

SEQ ID NO: 3025790 - RNA, 19 nt, Artificial Sequence
  Description of Artificial Sequence: Synthetic oligonucleotide
guaugccauuguuccaaac

SEQ ID NO: 3025791 - RNA, 19 nt, Artificial Sequence
  Description of Artificial Sequence: Synthetic oligonucleotide
caaugguuguacuugcuau

SEQ ID NO: 3025792 - RNA, 19 nt, Artificial Sequence
  Description of Artificial Sequence: Synthetic oligonucleotide
cuccccgucuuugauggag

SEQ ID NO: 3025793 - RNA, 19 nt, Artificial Sequence
  Description of Artificial Sequence: Synthetic oligonucleotide
cuuucuuauuccugccaaa

SEQ ID NO: 3025794 - RNA, 19 nt, Artificial Sequence
  Description of Artificial Sequence: Synthetic oligonucleotide
agcuuuggagaagauguuu

SEQ ID NO: 3025795 - RNA, 19 nt, Artificial Sequence
  Description of Artificial Sequence: Synthetic oligonucleotide
uugucacgggucuggguau

SEQ ID NO: 3025796 - RNA, 19 nt, Artificial Sequence
  Description of Artificial Sequence: Synthetic oligonucleotide
cccaggcccauuucgaagc

SEQ ID NO: 3025797 - RNA, 19 nt, Artificial Sequence
  Description of Artificial Sequence: Synthetic oligonucleotide
uggcguuuguagguaucgc

SEQ ID NO: 3025798 - RNA, 19 nt, Artificial Sequence
  Description of Artificial Sequence: Synthetic oligonucleotide
agaagggccaggccaucaa

SEQ ID NO: 3025799 - RNA, 19 nt, Artificial Sequence
  Description of Artificial Sequence: Synthetic oligonucleotide
ugcuccuguagaagaccuc

SEQ ID NO: 3025800 - RNA, 19 nt, Artificial Sequence
  Description of Artificial Sequence: Synthetic oligonucleotide
gaaucuugccugucacugu

SEQ ID NO: 3025801 - RNA, 19 nt, Artificial Sequence
  Description of Artificial Sequence: Synthetic oligonucleotide
caucccaggcccauuucga

SEQ ID NO: 3025802 - RNA, 19 nt, Artificial Sequence
  Description of Artificial Sequence: Synthetic oligonucleotide
gccauuguuccaaacucug

SEQ ID NO: 3025803 - RNA, 19 nt, Artificial Sequence
  Description of Artificial Sequence: Synthetic oligonucleotide
ugacaccuacgauuuuguu

SEQ ID NO: 3025804 - RNA, 19 nt, Artificial Sequence
  Description of Artificial Sequence: Synthetic oligonucleotide
caccuacgauuuuguuugg

SEQ ID NO: 3025805 - RNA, 19 nt, Artificial Sequence
  Description of Artificial Sequence: Synthetic oligonucleotide
gaagggccaggccaucaaa

SEQ ID NO: 3025806 - RNA, 19 nt, Artificial Sequence
  Description of Artificial Sequence: Synthetic oligonucleotide
cuuauuccugccaaauauu

SEQ ID NO: 3025807 - RNA, 19 nt, Artificial Sequence
  Description of Artificial Sequence: Synthetic oligonucleotide
cugacaccggcuccagcug

SEQ ID NO: 3025808 - RNA, 19 nt, Artificial Sequence
  Description of Artificial Sequence: Synthetic oligonucleotide
caaaccaaugguuguacuu

SEQ ID NO: 3025809 - RNA, 19 nt, Artificial Sequence
  Description of Artificial Sequence: Synthetic oligonucleotide
uguuggaaucuugccuguc

SEQ ID NO: 3025810 - RNA, 19 nt, Artificial Sequence
  Description of Artificial Sequence: Synthetic oligonucleotide
aucuugccugucacugugg

SEQ ID NO: 3025811 - RNA, 19 nt, Artificial Sequence
  Description of Artificial Sequence: Synthetic oligonucleotide
ugcaucccaggcccauuuc

SEQ ID NO: 3025812 - RNA, 19 nt, Artificial Sequence
  Description of Artificial Sequence: Synthetic oligonucleotide
caaguauuuugcuccugua

SEQ ID NO: 3025813 - RNA, 19 nt, Artificial Sequence
  Description of Artificial Sequence: Synthetic oligonucleotide
cuguagaagaccuccccgu

SEQ ID NO: 3025814 - RNA, 19 nt, Artificial Sequence
  Description of Artificial Sequence: Synthetic oligonucleotide
cuguggcugacaccggcuc

SEQ ID NO: 3025815 - RNA, 19 nt, Artificial Sequence
  Description of Artificial Sequence: Synthetic oligonucleotide
aucccaggcccauuucgaa

SEQ ID NO: 3025816 - RNA, 19 nt, Artificial Sequence
  Description of Artificial Sequence: Synthetic oligonucleotide
guagaagaccuccccgucu

SEQ ID NO: 3025817 - RNA, 19 nt, Artificial Sequence
  Description of Artificial Sequence: Synthetic oligonucleotide
uuccaaacucugacaccua

SEQ ID NO: 3025818 - RNA, 19 nt, Artificial Sequence
  Description of Artificial Sequence: Synthetic oligonucleotide
ugugaaagucugggauggu

SEQ ID NO: 3025819 - RNA, 19 nt, Artificial Sequence
  Description of Artificial Sequence: Synthetic oligonucleotide
ucacgggucuggguaugcc

SEQ ID NO: 3025820 - RNA, 19 nt, Artificial Sequence
  Description of Artificial Sequence: Synthetic oligonucleotide
ugccugucacuguggcuga

SEQ ID NO: 3025821 - RNA, 19 nt, Artificial Sequence
  Description of Artificial Sequence: Synthetic oligonucleotide
ugucacgggucuggguaug

SEQ ID NO: 3025822 - RNA, 19 nt, Artificial Sequence
  Description of Artificial Sequence: Synthetic oligonucleotide
gucugggauggugugggac

SEQ ID NO: 3025823 - RNA, 19 nt, Artificial Sequence
  Description of Artificial Sequence: Synthetic oligonucleotide
caucaaaccaaugguugua

SEQ ID NO: 3025824 - RNA, 19 nt, Artificial Sequence
  Description of Artificial Sequence: Synthetic oligonucleotide
agaccuccccgucuuugau

SEQ ID NO: 3025825 - RNA, 19 nt, Artificial Sequence
  Description of Artificial Sequence: Synthetic oligonucleotide
cacgggucuggguaugcca

SEQ ID NO: 3025826 - RNA, 19 nt, Artificial Sequence
  Description of Artificial Sequence: Synthetic oligonucleotide
gcaaguauuuugcuccugu

SEQ ID NO: 3025827 - RNA, 19 nt, Artificial Sequence
  Description of Artificial Sequence: Synthetic oligonucleotide
gagaagggccaggccauca

SEQ ID NO: 3025828 - RNA, 19 nt, Artificial Sequence
  Description of Artificial Sequence: Synthetic oligonucleotide
ggugugggacaaguaggag

SEQ ID NO: 3025829 - RNA, 19 nt, Artificial Sequence
  Description of Artificial Sequence: Synthetic oligonucleotide
gcugacaccggcuccagcu

SEQ ID NO: 3025830 - RNA, 19 nt, Artificial Sequence
  Description of Artificial Sequence: Synthetic oligonucleotide
accaaugguuguacuugcu

SEQ ID NO: 3025831 - RNA, 19 nt, Artificial Sequence
  Description of Artificial Sequence: Synthetic oligonucleotide
acuguggcugacaccggcu

SEQ ID NO: 3025832 - RNA, 19 nt, Artificial Sequence
  Description of Artificial Sequence: Synthetic oligonucleotide
gauuuuguuuggccucaau

SEQ ID NO: 3025833 - RNA, 19 nt, Artificial Sequence
  Description of Artificial Sequence: Synthetic oligonucleotide
cugacaccuacgauuuugu

SEQ ID NO: 3025834 - RNA, 19 nt, Artificial Sequence
  Description of Artificial Sequence: Synthetic oligonucleotide
ggcccauuucgaagcaggg

SEQ ID NO: 3025835 - RNA, 19 nt, Artificial Sequence
  Description of Artificial Sequence: Synthetic oligonucleotide
gcguuuguagguaucgcuc

SEQ ID NO: 3025836 - RNA, 19 nt, Artificial Sequence
  Description of Artificial Sequence: Synthetic oligonucleotide
caggcaguugucugugaaa

SEQ ID NO: 3025837 - RNA, 19 nt, Artificial Sequence
  Description of Artificial Sequence: Synthetic oligonucleotide
gcuguucuuucuuauuccu

SEQ ID NO: 3025838 - RNA, 19 nt, Artificial Sequence
  Description of Artificial Sequence: Synthetic oligonucleotide
gggccaggccaucaaacca

SEQ ID NO: 3025839 - RNA, 19 nt, Artificial Sequence
  Description of Artificial Sequence: Synthetic oligonucleotide
ggcguuuguagguaucgcu

SEQ ID NO: 3025840 - RNA, 19 nt, Artificial Sequence
  Description of Artificial Sequence: Synthetic oligonucleotide
accggcuccagcuguucuu

SEQ ID NO: 3025841 - RNA, 19 nt, Artificial Sequence
  Description of Artificial Sequence: Synthetic oligonucleotide
gaagccauguuggaaucuu

SEQ ID NO: 3025842 - RNA, 19 nt, Artificial Sequence
  Description of Artificial Sequence: Synthetic oligonucleotide
agucugggaugguguggga

SEQ ID NO: 3025843 - RNA, 19 nt, Artificial Sequence
  Description of Artificial Sequence: Synthetic oligonucleotide
ggguaugccauuguuccaa

SEQ ID NO: 3025844 - RNA, 19 nt, Artificial Sequence
  Description of Artificial Sequence: Synthetic oligonucleotide
acgggucuggguaugccau

SEQ ID NO: 3025845 - RNA, 19 nt, Artificial Sequence
  Description of Artificial Sequence: Synthetic oligonucleotide
guggcugacaccggcucca

SEQ ID NO: 3025846 - RNA, 19 nt, Artificial Sequence
  Description of Artificial Sequence: Synthetic oligonucleotide
acaccggcuccagcuguuc

SEQ ID NO: 3025847 - RNA, 19 nt, Artificial Sequence
  Description of Artificial Sequence: Synthetic oligonucleotide
aucgcucugcaaguauuuu

SEQ ID NO: 3025848 - RNA, 19 nt, Artificial Sequence
  Description of Artificial Sequence: Synthetic oligonucleotide
gggucuggguaugccauug

SEQ ID NO: 3025849 - RNA, 19 nt, Artificial Sequence
  Description of Artificial Sequence: Synthetic oligonucleotide
agaagaccuccccgucuuu

SEQ ID NO: 3025850 - RNA, 19 nt, Artificial Sequence
  Description of Artificial Sequence: Synthetic oligonucleotide
ccauguuggaaucuugccu

SEQ ID NO: 3025851 - RNA, 19 nt, Artificial Sequence
  Description of Artificial Sequence: Synthetic oligonucleotide
caggcccauuucgaagcag

SEQ ID NO: 3025852 - RNA, 19 nt, Artificial Sequence
  Description of Artificial Sequence: Synthetic oligonucleotide
ccacugugugcaucccagg

SEQ ID NO: 3025853 - RNA, 19 nt, Artificial Sequence
  Description of Artificial Sequence: Synthetic oligonucleotide
gucacgggucuggguaugc

SEQ ID NO: 3025854 - RNA, 19 nt, Artificial Sequence
  Description of Artificial Sequence: Synthetic oligonucleotide
ccauuguuccaaacucuga

SEQ ID NO: 3025855 - RNA, 19 nt, Artificial Sequence
  Description of Artificial Sequence: Synthetic oligonucleotide
guuuggcguuuguagguau

SEQ ID NO: 3025856 - RNA, 19 nt, Artificial Sequence
  Description of Artificial Sequence: Synthetic oligonucleotide
uggcugacaccggcuccag

SEQ ID NO: 3025857 - RNA, 19 nt, Artificial Sequence
  Description of Artificial Sequence: Synthetic oligonucleotide
ugugcaucccaggcccauu

SEQ ID NO: 3025858 - RNA, 19 nt, Artificial Sequence
  Description of Artificial Sequence: Synthetic oligonucleotide
gguaugccauuguuccaaa

SEQ ID NO: 3025859 - RNA, 19 nt, Artificial Sequence
  Description of Artificial Sequence: Synthetic oligonucleotide
cuccagcuguucuuucuua

SEQ ID NO: 3025860 - RNA, 19 nt, Artificial Sequence
  Description of Artificial Sequence: Synthetic oligonucleotide
cugcaaguauuuugcuccu

SEQ ID NO: 3025861 - RNA, 19 nt, Artificial Sequence
  Description of Artificial Sequence: Synthetic oligonucleotide
agguaucgcucugcaagua

SEQ ID NO: 3025862 - RNA, 19 nt, Artificial Sequence
  Description of Artificial Sequence: Synthetic oligonucleotide
cucaauguuuggcguuugu

SEQ ID NO: 3025863 - RNA, 19 nt, Artificial Sequence
  Description of Artificial Sequence: Synthetic oligonucleotide
gguaucgcucugcaaguau

SEQ ID NO: 3025864 - RNA, 19 nt, Artificial Sequence
  Description of Artificial Sequence: Synthetic oligonucleotide
ccaaugguuguacuugcua

SEQ ID NO: 3025865 - RNA, 19 nt, Artificial Sequence
  Description of Artificial Sequence: Synthetic oligonucleotide
ccaucaaaccaaugguugu

SEQ ID NO: 3025866 - RNA, 19 nt, Artificial Sequence
  Description of Artificial Sequence: Synthetic oligonucleotide
gggacaaguaggagaagcu

SEQ ID NO: 3025867 - RNA, 19 nt, Artificial Sequence
  Description of Artificial Sequence: Synthetic oligonucleotide
guaucgcucugcaaguauu

SEQ ID NO: 3025868 - RNA, 19 nt, Artificial Sequence
  Description of Artificial Sequence: Synthetic oligonucleotide
gcaggguccccugaagcca

SEQ ID NO: 3025869 - RNA, 19 nt, Artificial Sequence
  Description of Artificial Sequence: Synthetic oligonucleotide
ccaggccaucaaaccaaug

SEQ ID NO: 3025870 - RNA, 19 nt, Artificial Sequence
  Description of Artificial Sequence: Synthetic oligonucleotide
cccgucuuugauggagaag

SEQ ID NO: 3025871 - RNA, 19 nt, Artificial Sequence
  Description of Artificial Sequence: Synthetic oligonucleotide
gggauggugugggacaagu

SEQ ID NO: 3025872 - RNA, 19 nt, Artificial Sequence
  Description of Artificial Sequence: Synthetic oligonucleotide
ggacaaguaggagaagcuu

SEQ ID NO: 3025873 - RNA, 19 nt, Artificial Sequence
  Description of Artificial Sequence: Synthetic oligonucleotide
ggcugacaccggcuccagc

SEQ ID NO: 3025874 - RNA, 19 nt, Artificial Sequence
  Description of Artificial Sequence: Synthetic oligonucleotide
gugcaucccaggcccauuu

SEQ ID NO: 3025875 - RNA, 19 nt, Artificial Sequence
  Description of Artificial Sequence: Synthetic oligonucleotide
cguuuguagguaucgcucu

SEQ ID NO: 3025876 - RNA, 19 nt, Artificial Sequence
  Description of Artificial Sequence: Synthetic oligonucleotide
ggccaucaaaccaaugguu

SEQ ID NO: 3025877 - RNA, 19 nt, Artificial Sequence
  Description of Artificial Sequence: Synthetic oligonucleotide
ccucaauguuuggcguuug

SEQ ID NO: 3025878 - RNA, 19 nt, Artificial Sequence
  Description of Artificial Sequence: Synthetic oligonucleotide
ggauggugugggacaagua

SEQ ID NO: 3025879 - RNA, 19 nt, Artificial Sequence
  Description of Artificial Sequence: Synthetic oligonucleotide
caggguccccugaagccau

SEQ ID NO: 3025880 - RNA, 19 nt, Artificial Sequence
  Description of Artificial Sequence: Synthetic oligonucleotide
ggucuggguaugccauugu

SEQ ID NO: 3025881 - RNA, 19 nt, Artificial Sequence
  Description of Artificial Sequence: Synthetic oligonucleotide
ggagaagggccaggccauc

SEQ ID NO: 3025882 - RNA, 19 nt, Artificial Sequence
  Description of Artificial Sequence: Synthetic oligonucleotide
aggguccccugaagccaug

SEQ ID NO: 3025883 - RNA, 19 nt, Artificial Sequence
  Description of Artificial Sequence: Synthetic oligonucleotide
ggccucaauguuuggcguu

SEQ ID NO: 3025884 - RNA, 19 nt, Artificial Sequence
  Description of Artificial Sequence: Synthetic oligonucleotide
gcccauuucgaagcagggu

SEQ ID NO: 3025885 - RNA, 19 nt, Artificial Sequence
  Description of Artificial Sequence: Synthetic oligonucleotide
ccaggcccauuucgaagca

SEQ ID NO: 3025886 - RNA, 19 nt, Artificial Sequence
  Description of Artificial Sequence: Synthetic oligonucleotide
cccugaagccauguuggaa

SEQ ID NO: 3025887 - RNA, 19 nt, Artificial Sequence
  Description of Artificial Sequence: Synthetic oligonucleotide
caccggcuccagcuguucu

SEQ ID NO: 3025888 - RNA, 19 nt, Artificial Sequence
  Description of Artificial Sequence: Synthetic oligonucleotide
gacaccggcuccagcuguu

SEQ ID NO: 3025889 - RNA, 19 nt, Artificial Sequence
  Description of Artificial Sequence: Synthetic oligonucleotide
ccccugaagccauguugga

SEQ ID NO: 3025890 - RNA, 19 nt, Artificial Sequence
  Description of Artificial Sequence: Synthetic oligonucleotide
cgaagcaggguccccugaa

SEQ ID NO: 3025891 - RNA, 19 nt, Artificial Sequence
  Description of Artificial Sequence: Synthetic oligonucleotide
gugugcaucccaggcccau

SEQ ID NO: 3025892 - RNA, 19 nt, Artificial Sequence
  Description of Artificial Sequence: Synthetic oligonucleotide
ccccgucuuugauggagaa

SEQ ID NO: 3025893 - RNA, 19 nt, Artificial Sequence
  Description of Artificial Sequence: Synthetic oligonucleotide
ccagcuguucuuucuuauu

SEQ ID NO: 3025894 - RNA, 19 nt, Artificial Sequence
  Description of Artificial Sequence: Synthetic oligonucleotide
gccucaauguuuggcguuu

SEQ ID NO: 3025895 - RNA, 19 nt, Artificial Sequence
  Description of Artificial Sequence: Synthetic oligonucleotide
cgucuuugauggagaagcu

SEQ ID NO: 3025896 - RNA, 19 nt, Artificial Sequence
  Description of Artificial Sequence: Synthetic oligonucleotide
cucugacaccuacgauuuu

SEQ ID NO: 3025897 - RNA, 19 nt, Artificial Sequence
  Description of Artificial Sequence: Synthetic oligonucleotide
gguccccugaagccauguu

SEQ ID NO: 3025898 - RNA, 19 nt, Artificial Sequence
  Description of Artificial Sequence: Synthetic oligonucleotide
gccugucacuguggcugac

SEQ ID NO: 3025899 - RNA, 19 nt, Artificial Sequence
  Description of Artificial Sequence: Synthetic oligonucleotide
ggguccccugaagccaugu

SEQ ID NO: 3025900 - RNA, 19 nt, Artificial Sequence
  Description of Artificial Sequence: Synthetic oligonucleotide
gccaggccaucaaaccaau

SEQ ID NO: 3025901 - RNA, 19 nt, Artificial Sequence
  Description of Artificial Sequence: Synthetic oligonucleotide
cggcuccagcuguucuuuc

SEQ ID NO: 3025902 - RNA, 19 nt, Artificial Sequence
  Description of Artificial Sequence: Synthetic oligonucleotide
ccuccccgucuuugaugga

SEQ ID NO: 3025903 - RNA, 19 nt, Artificial Sequence
  Description of Artificial Sequence: Synthetic oligonucleotide
cgauuuuguuuggccucaa

SEQ ID NO: 3025904 - RNA, 19 nt, Artificial Sequence
  Description of Artificial Sequence: Synthetic oligonucleotide
ccggcuccagcuguucuuu

SEQ ID NO: 3025905 - RNA, 19 nt, Artificial Sequence
  Description of Artificial Sequence: Synthetic oligonucleotide
cgggucuggguaugccauu

SEQ ID NO: 3025906 - RNA, 19 nt, Artificial Sequence
  Description of Artificial Sequence: Synthetic oligonucleotide
aaagacagcugucagaggc

SEQ ID NO: 3025907 - RNA, 19 nt, Artificial Sequence
  Description of Artificial Sequence: Synthetic oligonucleotide
uuugcauauuuaaagacag

SEQ ID NO: 3025908 - RNA, 19 nt, Artificial Sequence
  Description of Artificial Sequence: Synthetic oligonucleotide
aguuugcauauuuaaagac

SEQ ID NO: 3025909 - RNA, 19 nt, Artificial Sequence
  Description of Artificial Sequence: Synthetic oligonucleotide
cagacauuggcaaaggugg

SEQ ID NO: 3025910 - RNA, 19 nt, Artificial Sequence
  Description of Artificial Sequence: Synthetic oligonucleotide
ucacauaugccaagcaugg

SEQ ID NO: 3025911 - RNA, 19 nt, Artificial Sequence
  Description of Artificial Sequence: Synthetic oligonucleotide
ucucuugggguucagagcc

SEQ ID NO: 3025912 - RNA, 19 nt, Artificial Sequence
  Description of Artificial Sequence: Synthetic oligonucleotide
uguuuauuuugucuucccg

SEQ ID NO: 3025913 - RNA, 19 nt, Artificial Sequence
  Description of Artificial Sequence: Synthetic oligonucleotide
gugcaaaggauucugagag

SEQ ID NO: 3025914 - RNA, 19 nt, Artificial Sequence
  Description of Artificial Sequence: Synthetic oligonucleotide
ugcauauuuaaagacagcu

SEQ ID NO: 3025915 - RNA, 19 nt, Artificial Sequence
  Description of Artificial Sequence: Synthetic oligonucleotide
aacugaggguccuagaagu

SEQ ID NO: 3025916 - RNA, 19 nt, Artificial Sequence
  Description of Artificial Sequence: Synthetic oligonucleotide
agaccacacaaacagcgcc

SEQ ID NO: 3025917 - RNA, 19 nt, Artificial Sequence
  Description of Artificial Sequence: Synthetic oligonucleotide
ggaguuugcauauuuaaag

SEQ ID NO: 3025918 - RNA, 19 nt, Artificial Sequence
  Description of Artificial Sequence: Synthetic oligonucleotide
uuuauuuugucuucccgac

SEQ ID NO: 3025919 - RNA, 19 nt, Artificial Sequence
  Description of Artificial Sequence: Synthetic oligonucleotide
aaacugaggguccuagaag

SEQ ID NO: 3025920 - RNA, 19 nt, Artificial Sequence
  Description of Artificial Sequence: Synthetic oligonucleotide
uauuuugucuucccgacuc

SEQ ID NO: 3025921 - RNA, 19 nt, Artificial Sequence
  Description of Artificial Sequence: Synthetic oligonucleotide
aaaggauucugagaggaug

SEQ ID NO: 3025922 - RNA, 19 nt, Artificial Sequence
  Description of Artificial Sequence: Synthetic oligonucleotide
acgaggaucacauaugcca

SEQ ID NO: 3025923 - RNA, 19 nt, Artificial Sequence
  Description of Artificial Sequence: Synthetic oligonucleotide
uuuaaagacagcugucaga

SEQ ID NO: 3025924 - RNA, 19 nt, Artificial Sequence
  Description of Artificial Sequence: Synthetic oligonucleotide
auuuaaagacagcugucag

SEQ ID NO: 3025925 - RNA, 19 nt, Artificial Sequence
  Description of Artificial Sequence: Synthetic oligonucleotide
uauuuaaagacagcuguca

SEQ ID NO: 3025926 - RNA, 19 nt, Artificial Sequence
  Description of Artificial Sequence: Synthetic oligonucleotide
aauuggggaggguuucugg

SEQ ID NO: 3025927 - RNA, 19 nt, Artificial Sequence
  Description of Artificial Sequence: Synthetic oligonucleotide
ucagaggcgggaaauuggg

SEQ ID NO: 3025928 - RNA, 19 nt, Artificial Sequence
  Description of Artificial Sequence: Synthetic oligonucleotide
gugcagaccacacaaacag

SEQ ID NO: 3025929 - RNA, 19 nt, Artificial Sequence
  Description of Artificial Sequence: Synthetic oligonucleotide
aaggauucugagaggaugg

SEQ ID NO: 3025930 - RNA, 19 nt, Artificial Sequence
  Description of Artificial Sequence: Synthetic oligonucleotide
acaagaggaagccaaguca

SEQ ID NO: 3025931 - RNA, 19 nt, Artificial Sequence
  Description of Artificial Sequence: Synthetic oligonucleotide
caagaggaagccaagucag

SEQ ID NO: 3025932 - RNA, 19 nt, Artificial Sequence
  Description of Artificial Sequence: Synthetic oligonucleotide
acauaugccaagcauggca

SEQ ID NO: 3025933 - RNA, 19 nt, Artificial Sequence
  Description of Artificial Sequence: Synthetic oligonucleotide
gauucugagaggaugggug

SEQ ID NO: 3025934 - RNA, 19 nt, Artificial Sequence
  Description of Artificial Sequence: Synthetic oligonucleotide
aggaagccaagucagucac

SEQ ID NO: 3025935 - RNA, 19 nt, Artificial Sequence
  Description of Artificial Sequence: Synthetic oligonucleotide
ugugcaaaggauucugaga

SEQ ID NO: 3025936 - RNA, 19 nt, Artificial Sequence
  Description of Artificial Sequence: Synthetic oligonucleotide
gaacgaggaucacauaugc

SEQ ID NO: 3025937 - RNA, 19 nt, Artificial Sequence
  Description of Artificial Sequence: Synthetic oligonucleotide
uuucuugugcaaaggauuc

SEQ ID NO: 3025938 - RNA, 19 nt, Artificial Sequence
  Description of Artificial Sequence: Synthetic oligonucleotide
gucacagacacagacauug

SEQ ID NO: 3025939 - RNA, 19 nt, Artificial Sequence
  Description of Artificial Sequence: Synthetic oligonucleotide
cacuguacgcauuaccacg

SEQ ID NO: 3025940 - RNA, 19 nt, Artificial Sequence
  Description of Artificial Sequence: Synthetic oligonucleotide
aggugcagaccacacaaac

SEQ ID NO: 3025941 - RNA, 19 nt, Artificial Sequence
  Description of Artificial Sequence: Synthetic oligonucleotide
caaacagcgccacuguacg

SEQ ID NO: 3025942 - RNA, 19 nt, Artificial Sequence
  Description of Artificial Sequence: Synthetic oligonucleotide
ucuggaggaggaaacugag

SEQ ID NO: 3025943 - RNA, 19 nt, Artificial Sequence
  Description of Artificial Sequence: Synthetic oligonucleotide
gaguuugcauauuuaaaga

SEQ ID NO: 3025944 - RNA, 19 nt, Artificial Sequence
  Description of Artificial Sequence: Synthetic oligonucleotide
cuucucuugggguucagag

SEQ ID NO: 3025945 - RNA, 19 nt, Artificial Sequence
  Description of Artificial Sequence: Synthetic oligonucleotide
guuuauuuugucuucccga

SEQ ID NO: 3025946 - RNA, 19 nt, Artificial Sequence
  Description of Artificial Sequence: Synthetic oligonucleotide
uacgcauuaccacgggcgg

SEQ ID NO: 3025947 - RNA, 19 nt, Artificial Sequence
  Description of Artificial Sequence: Synthetic oligonucleotide
uugugcaaaggauucugag

SEQ ID NO: 3025948 - RNA, 19 nt, Artificial Sequence
  Description of Artificial Sequence: Synthetic oligonucleotide
cauauuuaaagacagcugu

SEQ ID NO: 3025949 - RNA, 19 nt, Artificial Sequence
  Description of Artificial Sequence: Synthetic oligonucleotide
gaagccaagucagucacag

SEQ ID NO: 3025950 - RNA, 19 nt, Artificial Sequence
  Description of Artificial Sequence: Synthetic oligonucleotide
aaacagcgccacuguacgc

SEQ ID NO: 3025951 - RNA, 19 nt, Artificial Sequence
  Description of Artificial Sequence: Synthetic oligonucleotide
cauaugccaagcauggcac

SEQ ID NO: 3025952 - RNA, 19 nt, Artificial Sequence
  Description of Artificial Sequence: Synthetic oligonucleotide
aacgaggaucacauaugcc

SEQ ID NO: 3025953 - RNA, 19 nt, Artificial Sequence
  Description of Artificial Sequence: Synthetic oligonucleotide
uucuggaggaggaaacuga

SEQ ID NO: 3025954 - RNA, 19 nt, Artificial Sequence
  Description of Artificial Sequence: Synthetic oligonucleotide
auauuuaaagacagcuguc

SEQ ID NO: 3025955 - RNA, 19 nt, Artificial Sequence
  Description of Artificial Sequence: Synthetic oligonucleotide
acgaacgaggaucacauau

SEQ ID NO: 3025956 - RNA, 19 nt, Artificial Sequence
  Description of Artificial Sequence: Synthetic oligonucleotide
aggaucacauaugccaagc

SEQ ID NO: 3025957 - RNA, 19 nt, Artificial Sequence
  Description of Artificial Sequence: Synthetic oligonucleotide
uggaguuugcauauuuaaa

SEQ ID NO: 3025958 - RNA, 19 nt, Artificial Sequence
  Description of Artificial Sequence: Synthetic oligonucleotide
acaaacagcgccacuguac

SEQ ID NO: 3025959 - RNA, 19 nt, Artificial Sequence
  Description of Artificial Sequence: Synthetic oligonucleotide
uuuugucugggccuuugcu

SEQ ID NO: 3025960 - RNA, 19 nt, Artificial Sequence
  Description of Artificial Sequence: Synthetic oligonucleotide
guacgcauuaccacgggcg

SEQ ID NO: 3025961 - RNA, 19 nt, Artificial Sequence
  Description of Artificial Sequence: Synthetic oligonucleotide
uugcuuguuuauuuugucu

SEQ ID NO: 3025962 - RNA, 19 nt, Artificial Sequence
  Description of Artificial Sequence: Synthetic oligonucleotide
uggagguuggagcaaggug

SEQ ID NO: 3025963 - RNA, 19 nt, Artificial Sequence
  Description of Artificial Sequence: Synthetic oligonucleotide
cuuguuuauuuugucuucc

SEQ ID NO: 3025964 - RNA, 19 nt, Artificial Sequence
  Description of Artificial Sequence: Synthetic oligonucleotide
caagcauggcacaagagga

SEQ ID NO: 3025965 - RNA, 19 nt, Artificial Sequence
  Description of Artificial Sequence: Synthetic oligonucleotide
ugcuuguuuauuuugucuu

SEQ ID NO: 3025966 - RNA, 19 nt, Artificial Sequence
  Description of Artificial Sequence: Synthetic oligonucleotide
uuguuuauuuugucuuccc

SEQ ID NO: 3025967 - RNA, 19 nt, Artificial Sequence
  Description of Artificial Sequence: Synthetic oligonucleotide
aucacauaugccaagcaug

SEQ ID NO: 3025968 - RNA, 19 nt, Artificial Sequence
  Description of Artificial Sequence: Synthetic oligonucleotide
gaaacugaggguccuagaa

SEQ ID NO: 3025969 - RNA, 19 nt, Artificial Sequence
  Description of Artificial Sequence: Synthetic oligonucleotide
uucccgacucuucucuugg

SEQ ID NO: 3025970 - RNA, 19 nt, Artificial Sequence
  Description of Artificial Sequence: Synthetic oligonucleotide
uuugcuuguuuauuuuguc

SEQ ID NO: 3025971 - RNA, 19 nt, Artificial Sequence
  Description of Artificial Sequence: Synthetic oligonucleotide
agaggcgggaaauugggga

SEQ ID NO: 3025972 - RNA, 19 nt, Artificial Sequence
  Description of Artificial Sequence: Synthetic oligonucleotide
agaggaagccaagucaguc

SEQ ID NO: 3025973 - RNA, 19 nt, Artificial Sequence
  Description of Artificial Sequence: Synthetic oligonucleotide
ucacagacacagacauugg

SEQ ID NO: 3025974 - RNA, 19 nt, Artificial Sequence
  Description of Artificial Sequence: Synthetic oligonucleotide
acagacauuggcaaaggug

SEQ ID NO: 3025975 - RNA, 19 nt, Artificial Sequence
  Description of Artificial Sequence: Synthetic oligonucleotide
guuugcauauuuaaagaca

SEQ ID NO: 3025976 - RNA, 19 nt, Artificial Sequence
  Description of Artificial Sequence: Synthetic oligonucleotide
uguacgcauuaccacgggc

SEQ ID NO: 3025977 - RNA, 19 nt, Artificial Sequence
  Description of Artificial Sequence: Synthetic oligonucleotide
uugcauauuuaaagacagc

SEQ ID NO: 3025978 - RNA, 19 nt, Artificial Sequence
  Description of Artificial Sequence: Synthetic oligonucleotide
ugaggguccuagaagugga

SEQ ID NO: 3025979 - RNA, 19 nt, Artificial Sequence
  Description of Artificial Sequence: Synthetic oligonucleotide
gguucagagccgcugaggg

SEQ ID NO: 3025980 - RNA, 19 nt, Artificial Sequence
  Description of Artificial Sequence: Synthetic oligonucleotide
uuauuuugucuucccgacu

SEQ ID NO: 3025981 - RNA, 19 nt, Artificial Sequence
  Description of Artificial Sequence: Synthetic oligonucleotide
uucagagccgcugaggggu

SEQ ID NO: 3025982 - RNA, 19 nt, Artificial Sequence
  Description of Artificial Sequence: Synthetic oligonucleotide
uucucuugggguucagagc

SEQ ID NO: 3025983 - RNA, 19 nt, Artificial Sequence
  Description of Artificial Sequence: Synthetic oligonucleotide
gacauuggcaaaggugggg

SEQ ID NO: 3025984 - RNA, 19 nt, Artificial Sequence
  Description of Artificial Sequence: Synthetic oligonucleotide
ccaagcauggcacaagagg

SEQ ID NO: 3025985 - RNA, 19 nt, Artificial Sequence
  Description of Artificial Sequence: Synthetic oligonucleotide
ggagguuggagcaaggugc

SEQ ID NO: 3025986 - RNA, 19 nt, Artificial Sequence
  Description of Artificial Sequence: Synthetic oligonucleotide
aguggggagaccacuggcc

SEQ ID NO: 3025987 - RNA, 19 nt, Artificial Sequence
  Description of Artificial Sequence: Synthetic oligonucleotide
uggcacaagaggaagccaa

SEQ ID NO: 3025988 - RNA, 19 nt, Artificial Sequence
  Description of Artificial Sequence: Synthetic oligonucleotide
gaggcgggaaauuggggag

SEQ ID NO: 3025989 - RNA, 19 nt, Artificial Sequence
  Description of Artificial Sequence: Synthetic oligonucleotide
aagacagcugucagaggcg

SEQ ID NO: 3025990 - RNA, 19 nt, Artificial Sequence
  Description of Artificial Sequence: Synthetic oligonucleotide
gaggaggaaacugaggguc

SEQ ID NO: 3025991 - RNA, 19 nt, Artificial Sequence
  Description of Artificial Sequence: Synthetic oligonucleotide
uuucuggaggaggaaacug

SEQ ID NO: 3025992 - RNA, 19 nt, Artificial Sequence
  Description of Artificial Sequence: Synthetic oligonucleotide
aacagcgccacuguacgca

SEQ ID NO: 3025993 - RNA, 19 nt, Artificial Sequence
  Description of Artificial Sequence: Synthetic oligonucleotide
cacagacacagacauuggc

SEQ ID NO: 3025994 - RNA, 19 nt, Artificial Sequence
  Description of Artificial Sequence: Synthetic oligonucleotide
cauggcacaagaggaagcc

SEQ ID NO: 3025995 - RNA, 19 nt, Artificial Sequence
  Description of Artificial Sequence: Synthetic oligonucleotide
cacacaaacagcgccacug

SEQ ID NO: 3025996 - RNA, 19 nt, Artificial Sequence
  Description of Artificial Sequence: Synthetic oligonucleotide
gaggaucacauaugccaag

SEQ ID NO: 3025997 - RNA, 19 nt, Artificial Sequence
  Description of Artificial Sequence: Synthetic oligonucleotide
gauggguggaguuugcaua

SEQ ID NO: 3025998 - RNA, 19 nt, Artificial Sequence
  Description of Artificial Sequence: Synthetic oligonucleotide
gcagaccacacaaacagcg

SEQ ID NO: 3025999 - RNA, 19 nt, Artificial Sequence
  Description of Artificial Sequence: Synthetic oligonucleotide
acuguacgcauuaccacgg

SEQ ID NO: 3026000 - RNA, 19 nt, Artificial Sequence
  Description of Artificial Sequence: Synthetic oligonucleotide
auuggggaggguuucugga

SEQ ID NO: 3026001 - RNA, 19 nt, Artificial Sequence
  Description of Artificial Sequence: Synthetic oligonucleotide
agaccacuggccuuucuug

SEQ ID NO: 3026002 - RNA, 19 nt, Artificial Sequence
  Description of Artificial Sequence: Synthetic oligonucleotide
uuggggaggguuucuggag

SEQ ID NO: 3026003 - RNA, 19 nt, Artificial Sequence
  Description of Artificial Sequence: Synthetic oligonucleotide
ugcagaccacacaaacagc

SEQ ID NO: 3026004 - RNA, 19 nt, Artificial Sequence
  Description of Artificial Sequence: Synthetic oligonucleotide
uggccuuucuugugcaaag

SEQ ID NO: 3026005 - RNA, 19 nt, Artificial Sequence
  Description of Artificial Sequence: Synthetic oligonucleotide
aaauuggggaggguuucug

SEQ ID NO: 3026006 - RNA, 19 nt, Artificial Sequence
  Description of Artificial Sequence: Synthetic oligonucleotide
ugccaagcauggcacaaga

SEQ ID NO: 3026007 - RNA, 19 nt, Artificial Sequence
  Description of Artificial Sequence: Synthetic oligonucleotide
guuggagcaaggugcagac

SEQ ID NO: 3026008 - RNA, 19 nt, Artificial Sequence
  Description of Artificial Sequence: Synthetic oligonucleotide
ggguccuagaaguggaagg

SEQ ID NO: 3026009 - RNA, 19 nt, Artificial Sequence
  Description of Artificial Sequence: Synthetic oligonucleotide
ugucagaggcgggaaauug

SEQ ID NO: 3026010 - RNA, 19 nt, Artificial Sequence
  Description of Artificial Sequence: Synthetic oligonucleotide
gaggaagccaagucaguca

SEQ ID NO: 3026011 - RNA, 19 nt, Artificial Sequence
  Description of Artificial Sequence: Synthetic oligonucleotide
cacaagaggaagccaaguc

SEQ ID NO: 3026012 - RNA, 19 nt, Artificial Sequence
  Description of Artificial Sequence: Synthetic oligonucleotide
cugaggguccuagaagugg

SEQ ID NO: 3026013 - RNA, 19 nt, Artificial Sequence
  Description of Artificial Sequence: Synthetic oligonucleotide
guggaguuugcauauuuaa

SEQ ID NO: 3026014 - RNA, 19 nt, Artificial Sequence
  Description of Artificial Sequence: Synthetic oligonucleotide
cuggaggaggaaacugagg

SEQ ID NO: 3026015 - RNA, 19 nt, Artificial Sequence
  Description of Artificial Sequence: Synthetic oligonucleotide
ucugagaggauggguggag

SEQ ID NO: 3026016 - RNA, 19 nt, Artificial Sequence
  Description of Artificial Sequence: Synthetic oligonucleotide
caaggugcagaccacacaa

SEQ ID NO: 3026017 - RNA, 19 nt, Artificial Sequence
  Description of Artificial Sequence: Synthetic oligonucleotide
agcauggcacaagaggaag

SEQ ID NO: 3026018 - RNA, 19 nt, Artificial Sequence
  Description of Artificial Sequence: Synthetic oligonucleotide
gucagaggcgggaaauugg

SEQ ID NO: 3026019 - RNA, 19 nt, Artificial Sequence
  Description of Artificial Sequence: Synthetic oligonucleotide
cagaccacacaaacagcgc

SEQ ID NO: 3026020 - RNA, 19 nt, Artificial Sequence
  Description of Artificial Sequence: Synthetic oligonucleotide
caaguccaggcaaggagug

SEQ ID NO: 3026021 - RNA, 19 nt, Artificial Sequence
  Description of Artificial Sequence: Synthetic oligonucleotide
agaggauggguggaguuug

SEQ ID NO: 3026022 - RNA, 19 nt, Artificial Sequence
  Description of Artificial Sequence: Synthetic oligonucleotide
aaguccaggcaaggagugg

SEQ ID NO: 3026023 - RNA, 19 nt, Artificial Sequence
  Description of Artificial Sequence: Synthetic oligonucleotide
guucagagccgcugagggg

SEQ ID NO: 3026024 - RNA, 19 nt, Artificial Sequence
  Description of Artificial Sequence: Synthetic oligonucleotide
gaguggggagaccacuggc

SEQ ID NO: 3026025 - RNA, 19 nt, Artificial Sequence
  Description of Artificial Sequence: Synthetic oligonucleotide
agacagcugucagaggcgg

SEQ ID NO: 3026026 - RNA, 19 nt, Artificial Sequence
  Description of Artificial Sequence: Synthetic oligonucleotide
gaucacauaugccaagcau

SEQ ID NO: 3026027 - RNA, 19 nt, Artificial Sequence
  Description of Artificial Sequence: Synthetic oligonucleotide
auggguggaguuugcauau

SEQ ID NO: 3026028 - RNA, 19 nt, Artificial Sequence
  Description of Artificial Sequence: Synthetic oligonucleotide
auuaccacgggcggcacga

SEQ ID NO: 3026029 - RNA, 19 nt, Artificial Sequence
  Description of Artificial Sequence: Synthetic oligonucleotide
acacaaacagcgccacugu

SEQ ID NO: 3026030 - RNA, 19 nt, Artificial Sequence
  Description of Artificial Sequence: Synthetic oligonucleotide
ugggguucagagccgcuga

SEQ ID NO: 3026031 - RNA, 19 nt, Artificial Sequence
  Description of Artificial Sequence: Synthetic oligonucleotide
auuuugucuucccgacucu

SEQ ID NO: 3026032 - RNA, 19 nt, Artificial Sequence
  Description of Artificial Sequence: Synthetic oligonucleotide
accacacaaacagcgccac

SEQ ID NO: 3026033 - RNA, 19 nt, Artificial Sequence
  Description of Artificial Sequence: Synthetic oligonucleotide
acacagacauuggcaaagg

SEQ ID NO: 3026034 - RNA, 19 nt, Artificial Sequence
  Description of Artificial Sequence: Synthetic oligonucleotide
cagacacagacauuggcaa

SEQ ID NO: 3026035 - RNA, 19 nt, Artificial Sequence
  Description of Artificial Sequence: Synthetic oligonucleotide
caaggaguggagguuggag

SEQ ID NO: 3026036 - RNA, 19 nt, Artificial Sequence
  Description of Artificial Sequence: Synthetic oligonucleotide
agcaaggugcagaccacac

SEQ ID NO: 3026037 - RNA, 19 nt, Artificial Sequence
  Description of Artificial Sequence: Synthetic oligonucleotide
gcauauuuaaagacagcug

SEQ ID NO: 3026038 - RNA, 19 nt, Artificial Sequence
  Description of Artificial Sequence: Synthetic oligonucleotide
accacgggcggcacgaacg

SEQ ID NO: 3026039 - RNA, 19 nt, Artificial Sequence
  Description of Artificial Sequence: Synthetic oligonucleotide
aggauucugagaggauggg

SEQ ID NO: 3026040 - RNA, 19 nt, Artificial Sequence
  Description of Artificial Sequence: Synthetic oligonucleotide
agacauuggcaaagguggg

SEQ ID NO: 3026041 - RNA, 19 nt, Artificial Sequence
  Description of Artificial Sequence: Synthetic oligonucleotide
accacuggccuuucuugug

SEQ ID NO: 3026042 - RNA, 19 nt, Artificial Sequence
  Description of Artificial Sequence: Synthetic oligonucleotide
auaugccaagcauggcaca

SEQ ID NO: 3026043 - RNA, 19 nt, Artificial Sequence
  Description of Artificial Sequence: Synthetic oligonucleotide
aguccaggcaaggagugga

SEQ ID NO: 3026044 - RNA, 19 nt, Artificial Sequence
  Description of Artificial Sequence: Synthetic oligonucleotide
cuuugcuuguuuauuuugu

SEQ ID NO: 3026045 - RNA, 19 nt, Artificial Sequence
  Description of Artificial Sequence: Synthetic oligonucleotide
ucuugggguucagagccgc

SEQ ID NO: 3026046 - RNA, 19 nt, Artificial Sequence
  Description of Artificial Sequence: Synthetic oligonucleotide
ugagaggauggguggaguu

SEQ ID NO: 3026047 - RNA, 19 nt, Artificial Sequence
  Description of Artificial Sequence: Synthetic oligonucleotide
cuuucuugugcaaaggauu

SEQ ID NO: 3026048 - RNA, 19 nt, Artificial Sequence
  Description of Artificial Sequence: Synthetic oligonucleotide
cuucccgacucuucucuug

SEQ ID NO: 3026049 - RNA, 19 nt, Artificial Sequence
  Description of Artificial Sequence: Synthetic oligonucleotide
gaguggagguuggagcaag

SEQ ID NO: 3026050 - RNA, 19 nt, Artificial Sequence
  Description of Artificial Sequence: Synthetic oligonucleotide
uugggguucagagccgcug

SEQ ID NO: 3026051 - RNA, 19 nt, Artificial Sequence
  Description of Artificial Sequence: Synthetic oligonucleotide
gcaaaggauucugagagga

SEQ ID NO: 3026052 - RNA, 19 nt, Artificial Sequence
  Description of Artificial Sequence: Synthetic oligonucleotide
agacacagacauuggcaaa

SEQ ID NO: 3026053 - RNA, 19 nt, Artificial Sequence
  Description of Artificial Sequence: Synthetic oligonucleotide
aggguccuagaaguggaag

SEQ ID NO: 3026054 - RNA, 19 nt, Artificial Sequence
  Description of Artificial Sequence: Synthetic oligonucleotide
ugggccuuugcuuguuuau

SEQ ID NO: 3026055 - RNA, 19 nt, Artificial Sequence
  Description of Artificial Sequence: Synthetic oligonucleotide
acgcauuaccacgggcggc

SEQ ID NO: 3026056 - RNA, 19 nt, Artificial Sequence
  Description of Artificial Sequence: Synthetic oligonucleotide
acagcugucagaggcggga

SEQ ID NO: 3026057 - RNA, 19 nt, Artificial Sequence
  Description of Artificial Sequence: Synthetic oligonucleotide
aagaggaagccaagucagu

SEQ ID NO: 3026058 - RNA, 19 nt, Artificial Sequence
  Description of Artificial Sequence: Synthetic oligonucleotide
aagccaagucagucacaga

SEQ ID NO: 3026059 - RNA, 19 nt, Artificial Sequence
  Description of Artificial Sequence: Synthetic oligonucleotide
cuguacgcauuaccacggg

SEQ ID NO: 3026060 - RNA, 19 nt, Artificial Sequence
  Description of Artificial Sequence: Synthetic oligonucleotide
aagcauggcacaagaggaa

SEQ ID NO: 3026061 - RNA, 19 nt, Artificial Sequence
  Description of Artificial Sequence: Synthetic oligonucleotide
cucuugggguucagagccg

SEQ ID NO: 3026062 - RNA, 19 nt, Artificial Sequence
  Description of Artificial Sequence: Synthetic oligonucleotide
gaccacacaaacagcgcca

SEQ ID NO: 3026063 - RNA, 19 nt, Artificial Sequence
  Description of Artificial Sequence: Synthetic oligonucleotide
ggaggguuucuggaggagg

SEQ ID NO: 3026064 - RNA, 19 nt, Artificial Sequence
  Description of Artificial Sequence: Synthetic oligonucleotide
cauuaccacgggcggcacg

SEQ ID NO: 3026065 - RNA, 19 nt, Artificial Sequence
  Description of Artificial Sequence: Synthetic oligonucleotide
aggcaaggaguggagguug

SEQ ID NO: 3026066 - RNA, 19 nt, Artificial Sequence
  Description of Artificial Sequence: Synthetic oligonucleotide
ucuucucuugggguucaga

SEQ ID NO: 3026067 - RNA, 19 nt, Artificial Sequence
  Description of Artificial Sequence: Synthetic oligonucleotide
gcuuguuuauuuugucuuc

SEQ ID NO: 3026068 - RNA, 19 nt, Artificial Sequence
  Description of Artificial Sequence: Synthetic oligonucleotide
acgggcggcacgaacgagg

SEQ ID NO: 3026069 - RNA, 19 nt, Artificial Sequence
  Description of Artificial Sequence: Synthetic oligonucleotide
gguuucuggaggaggaaac

SEQ ID NO: 3026070 - RNA, 19 nt, Artificial Sequence
  Description of Artificial Sequence: Synthetic oligonucleotide
aggcgggaaauuggggagg

SEQ ID NO: 3026071 - RNA, 19 nt, Artificial Sequence
  Description of Artificial Sequence: Synthetic oligonucleotide
agcgccacuguacgcauua

SEQ ID NO: 3026072 - RNA, 19 nt, Artificial Sequence
  Description of Artificial Sequence: Synthetic oligonucleotide
gacucuucucuugggguuc

SEQ ID NO: 3026073 - RNA, 19 nt, Artificial Sequence
  Description of Artificial Sequence: Synthetic oligonucleotide
cagucacagacacagacau

SEQ ID NO: 3026074 - RNA, 19 nt, Artificial Sequence
  Description of Artificial Sequence: Synthetic oligonucleotide
ucagagccgcugaggggug

SEQ ID NO: 3026075 - RNA, 19 nt, Artificial Sequence
  Description of Artificial Sequence: Synthetic oligonucleotide
gagguuggagcaaggugca

SEQ ID NO: 3026076 - RNA, 19 nt, Artificial Sequence
  Description of Artificial Sequence: Synthetic oligonucleotide
cacauaugccaagcauggc

SEQ ID NO: 3026077 - RNA, 19 nt, Artificial Sequence
  Description of Artificial Sequence: Synthetic oligonucleotide
agccgcugagggguggggc

SEQ ID NO: 3026078 - RNA, 19 nt, Artificial Sequence
  Description of Artificial Sequence: Synthetic oligonucleotide
ugucugggccuuugcuugu

SEQ ID NO: 3026079 - RNA, 19 nt, Artificial Sequence
  Description of Artificial Sequence: Synthetic oligonucleotide
acugaggguccuagaagug

SEQ ID NO: 3026080 - RNA, 19 nt, Artificial Sequence
  Description of Artificial Sequence: Synthetic oligonucleotide
augccaagcauggcacaag

SEQ ID NO: 3026081 - RNA, 19 nt, Artificial Sequence
  Description of Artificial Sequence: Synthetic oligonucleotide
gacagcugucagaggcggg

SEQ ID NO: 3026082 - RNA, 19 nt, Artificial Sequence
  Description of Artificial Sequence: Synthetic oligonucleotide
gccacuguacgcauuacca

SEQ ID NO: 3026083 - RNA, 19 nt, Artificial Sequence
  Description of Artificial Sequence: Synthetic oligonucleotide
ggcggcacgaacgaggauc

SEQ ID NO: 3026084 - RNA, 19 nt, Artificial Sequence
  Description of Artificial Sequence: Synthetic oligonucleotide
uuggagcaaggugcagacc

SEQ ID NO: 3026085 - RNA, 19 nt, Artificial Sequence
  Description of Artificial Sequence: Synthetic oligonucleotide
uaccacgggcggcacgaac

SEQ ID NO: 3026086 - RNA, 19 nt, Artificial Sequence
  Description of Artificial Sequence: Synthetic oligonucleotide
ggaucacauaugccaagca

SEQ ID NO: 3026087 - RNA, 19 nt, Artificial Sequence
  Description of Artificial Sequence: Synthetic oligonucleotide
ccacuguacgcauuaccac

SEQ ID NO: 3026088 - RNA, 19 nt, Artificial Sequence
  Description of Artificial Sequence: Synthetic oligonucleotide
ggaaauuggggaggguuuc

SEQ ID NO: 3026089 - RNA, 19 nt, Artificial Sequence
  Description of Artificial Sequence: Synthetic oligonucleotide
cgaacgaggaucacauaug

SEQ ID NO: 3026090 - RNA, 19 nt, Artificial Sequence
  Description of Artificial Sequence: Synthetic oligonucleotide
gaccacuggccuuucuugu

SEQ ID NO: 3026091 - RNA, 19 nt, Artificial Sequence
  Description of Artificial Sequence: Synthetic oligonucleotide
gccuuucuugugcaaagga

SEQ ID NO: 3026092 - RNA, 19 nt, Artificial Sequence
  Description of Artificial Sequence: Synthetic oligonucleotide
aaggugcagaccacacaaa

SEQ ID NO: 3026093 - RNA, 19 nt, Artificial Sequence
  Description of Artificial Sequence: Synthetic oligonucleotide
auggcacaagaggaagcca

SEQ ID NO: 3026094 - RNA, 19 nt, Artificial Sequence
  Description of Artificial Sequence: Synthetic oligonucleotide
gguuggagcaaggugcaga

SEQ ID NO: 3026095 - RNA, 19 nt, Artificial Sequence
  Description of Artificial Sequence: Synthetic oligonucleotide
ggugcagaccacacaaaca

SEQ ID NO: 3026096 - RNA, 19 nt, Artificial Sequence
  Description of Artificial Sequence: Synthetic oligonucleotide
gaggauggguggaguuugc

SEQ ID NO: 3026097 - RNA, 19 nt, Artificial Sequence
  Description of Artificial Sequence: Synthetic oligonucleotide
ggccuuucuugugcaaagg

SEQ ID NO: 3026098 - RNA, 19 nt, Artificial Sequence
  Description of Artificial Sequence: Synthetic oligonucleotide
acagcgccacuguacgcau

SEQ ID NO: 3026099 - RNA, 19 nt, Artificial Sequence
  Description of Artificial Sequence: Synthetic oligonucleotide
ggcacaagaggaagccaag

SEQ ID NO: 3026100 - RNA, 19 nt, Artificial Sequence
  Description of Artificial Sequence: Synthetic oligonucleotide
gucuucccgacucuucucu

SEQ ID NO: 3026101 - RNA, 19 nt, Artificial Sequence
  Description of Artificial Sequence: Synthetic oligonucleotide
ggcgggaaauuggggaggg

SEQ ID NO: 3026102 - RNA, 19 nt, Artificial Sequence
  Description of Artificial Sequence: Synthetic oligonucleotide
ccacuggccuuucuugugc

SEQ ID NO: 3026103 - RNA, 19 nt, Artificial Sequence
  Description of Artificial Sequence: Synthetic oligonucleotide
agcugucagaggcgggaaa

SEQ ID NO: 3026104 - RNA, 19 nt, Artificial Sequence
  Description of Artificial Sequence: Synthetic oligonucleotide
ggaaacugaggguccuaga

SEQ ID NO: 3026105 - RNA, 19 nt, Artificial Sequence
  Description of Artificial Sequence: Synthetic oligonucleotide
ggguucagagccgcugagg

SEQ ID NO: 3026106 - RNA, 19 nt, Artificial Sequence
  Description of Artificial Sequence: Synthetic oligonucleotide
acuggccuuucuugugcaa

SEQ ID NO: 3026107 - RNA, 19 nt, Artificial Sequence
  Description of Artificial Sequence: Synthetic oligonucleotide
gaaauuggggaggguuucu

SEQ ID NO: 3026108 - RNA, 19 nt, Artificial Sequence
  Description of Artificial Sequence: Synthetic oligonucleotide
ucugggccuuugcuuguuu

SEQ ID NO: 3026109 - RNA, 19 nt, Artificial Sequence
  Description of Artificial Sequence: Synthetic oligonucleotide
aggauggguggaguuugca

SEQ ID NO: 3026110 - RNA, 19 nt, Artificial Sequence
  Description of Artificial Sequence: Synthetic oligonucleotide
guuucuggaggaggaaacu

SEQ ID NO: 3026111 - RNA, 19 nt, Artificial Sequence
  Description of Artificial Sequence: Synthetic oligonucleotide
ggcaaggaguggagguugg

SEQ ID NO: 3026112 - RNA, 19 nt, Artificial Sequence
  Description of Artificial Sequence: Synthetic oligonucleotide
gcauggcacaagaggaagc

SEQ ID NO: 3026113 - RNA, 19 nt, Artificial Sequence
  Description of Artificial Sequence: Synthetic oligonucleotide
uggggagaccacuggccuu

SEQ ID NO: 3026114 - RNA, 19 nt, Artificial Sequence
  Description of Artificial Sequence: Synthetic oligonucleotide
ggcacgaacgaggaucaca

SEQ ID NO: 3026115 - RNA, 19 nt, Artificial Sequence
  Description of Artificial Sequence: Synthetic oligonucleotide
guggggagaccacuggccu

SEQ ID NO: 3026116 - RNA, 19 nt, Artificial Sequence
  Description of Artificial Sequence: Synthetic oligonucleotide
acucuucucuugggguuca

SEQ ID NO: 3026117 - RNA, 19 nt, Artificial Sequence
  Description of Artificial Sequence: Synthetic oligonucleotide
gggguucagagccgcugag

SEQ ID NO: 3026118 - RNA, 19 nt, Artificial Sequence
  Description of Artificial Sequence: Synthetic oligonucleotide
cacuggccuuucuugugca

SEQ ID NO: 3026119 - RNA, 19 nt, Artificial Sequence
  Description of Artificial Sequence: Synthetic oligonucleotide
cacaaacagcgccacugua

SEQ ID NO: 3026120 - RNA, 19 nt, Artificial Sequence
  Description of Artificial Sequence: Synthetic oligonucleotide
agguuggagcaaggugcag

SEQ ID NO: 3026121 - RNA, 19 nt, Artificial Sequence
  Description of Artificial Sequence: Synthetic oligonucleotide
cuggccuuucuugugcaaa

SEQ ID NO: 3026122 - RNA, 19 nt, Artificial Sequence
  Description of Artificial Sequence: Synthetic oligonucleotide
gagccgcugaggggugggg

SEQ ID NO: 3026123 - RNA, 19 nt, Artificial Sequence
  Description of Artificial Sequence: Synthetic oligonucleotide
agucagucacagacacaga

SEQ ID NO: 3026124 - RNA, 19 nt, Artificial Sequence
  Description of Artificial Sequence: Synthetic oligonucleotide
gccaagcauggcacaagag

SEQ ID NO: 3026125 - RNA, 19 nt, Artificial Sequence
  Description of Artificial Sequence: Synthetic oligonucleotide
ggggaggguuucuggagga

SEQ ID NO: 3026126 - RNA, 19 nt, Artificial Sequence
  Description of Artificial Sequence: Synthetic oligonucleotide
gguggaguuugcauauuua

SEQ ID NO: 3026127 - RNA, 19 nt, Artificial Sequence
  Description of Artificial Sequence: Synthetic oligonucleotide
caaaggauucugagaggau

SEQ ID NO: 3026128 - RNA, 19 nt, Artificial Sequence
  Description of Artificial Sequence: Synthetic oligonucleotide
aggguuucuggaggaggaa

SEQ ID NO: 3026129 - RNA, 19 nt, Artificial Sequence
  Description of Artificial Sequence: Synthetic oligonucleotide
cacagacauuggcaaaggu

SEQ ID NO: 3026130 - RNA, 19 nt, Artificial Sequence
  Description of Artificial Sequence: Synthetic oligonucleotide
gcaaguccaggcaaggagu

SEQ ID NO: 3026131 - RNA, 19 nt, Artificial Sequence
  Description of Artificial Sequence: Synthetic oligonucleotide
gagaggauggguggaguuu

SEQ ID NO: 3026132 - RNA, 19 nt, Artificial Sequence
  Description of Artificial Sequence: Synthetic oligonucleotide
gaggguccuagaaguggaa

SEQ ID NO: 3026133 - RNA, 19 nt, Artificial Sequence
  Description of Artificial Sequence: Synthetic oligonucleotide
ggauggguggaguuugcau

SEQ ID NO: 3026134 - RNA, 19 nt, Artificial Sequence
  Description of Artificial Sequence: Synthetic oligonucleotide
ggguuucuggaggaggaaa

SEQ ID NO: 3026135 - RNA, 19 nt, Artificial Sequence
  Description of Artificial Sequence: Synthetic oligonucleotide
agucacagacacagacauu

SEQ ID NO: 3026136 - RNA, 19 nt, Artificial Sequence
  Description of Artificial Sequence: Synthetic oligonucleotide
cgccacuguacgcauuacc

SEQ ID NO: 3026137 - RNA, 19 nt, Artificial Sequence
  Description of Artificial Sequence: Synthetic oligonucleotide
gaggaaacugaggguccua

SEQ ID NO: 3026138 - RNA, 19 nt, Artificial Sequence
  Description of Artificial Sequence: Synthetic oligonucleotide
gggaggguuucuggaggag

SEQ ID NO: 3026139 - RNA, 19 nt, Artificial Sequence
  Description of Artificial Sequence: Synthetic oligonucleotide
cgaggaucacauaugccaa

SEQ ID NO: 3026140 - RNA, 19 nt, Artificial Sequence
  Description of Artificial Sequence: Synthetic oligonucleotide
gcacgaacgaggaucacau

SEQ ID NO: 3026141 - RNA, 19 nt, Artificial Sequence
  Description of Artificial Sequence: Synthetic oligonucleotide
ggccuuugcuuguuuauuu

SEQ ID NO: 3026142 - RNA, 19 nt, Artificial Sequence
  Description of Artificial Sequence: Synthetic oligonucleotide
ggauucugagaggaugggu

SEQ ID NO: 3026143 - RNA, 19 nt, Artificial Sequence
  Description of Artificial Sequence: Synthetic oligonucleotide
uggguggaguuugcauauu

SEQ ID NO: 3026144 - RNA, 19 nt, Artificial Sequence
  Description of Artificial Sequence: Synthetic oligonucleotide
gggguggggcaaguccagg

SEQ ID NO: 3026145 - RNA, 19 nt, Artificial Sequence
  Description of Artificial Sequence: Synthetic oligonucleotide
gccgcugagggguggggca

SEQ ID NO: 3026146 - RNA, 19 nt, Artificial Sequence
  Description of Artificial Sequence: Synthetic oligonucleotide
uuaccacgggcggcacgaa

SEQ ID NO: 3026147 - RNA, 19 nt, Artificial Sequence
  Description of Artificial Sequence: Synthetic oligonucleotide
cacgggcggcacgaacgag

SEQ ID NO: 3026148 - RNA, 19 nt, Artificial Sequence
  Description of Artificial Sequence: Synthetic oligonucleotide
gcggcacgaacgaggauca

SEQ ID NO: 3026149 - RNA, 19 nt, Artificial Sequence
  Description of Artificial Sequence: Synthetic oligonucleotide
cacgaacgaggaucacaua

SEQ ID NO: 3026150 - RNA, 19 nt, Artificial Sequence
  Description of Artificial Sequence: Synthetic oligonucleotide
ggaagccaagucagucaca

SEQ ID NO: 3026151 - RNA, 19 nt, Artificial Sequence
  Description of Artificial Sequence: Synthetic oligonucleotide
ggguggaguuugcauauuu

SEQ ID NO: 3026152 - RNA, 19 nt, Artificial Sequence
  Description of Artificial Sequence: Synthetic oligonucleotide
cugagaggauggguggagu

SEQ ID NO: 3026153 - RNA, 19 nt, Artificial Sequence
  Description of Artificial Sequence: Synthetic oligonucleotide
gggaaauuggggaggguuu

SEQ ID NO: 3026154 - RNA, 19 nt, Artificial Sequence
  Description of Artificial Sequence: Synthetic oligonucleotide
ggaggaaacugaggguccu

SEQ ID NO: 3026155 - RNA, 19 nt, Artificial Sequence
  Description of Artificial Sequence: Synthetic oligonucleotide
gcacaagaggaagccaagu

SEQ ID NO: 3026156 - RNA, 19 nt, Artificial Sequence
  Description of Artificial Sequence: Synthetic oligonucleotide
gggcaaguccaggcaagga

SEQ ID NO: 3026157 - RNA, 19 nt, Artificial Sequence
  Description of Artificial Sequence: Synthetic oligonucleotide
ccgacucuucucuuggggu

SEQ ID NO: 3026158 - RNA, 19 nt, Artificial Sequence
  Description of Artificial Sequence: Synthetic oligonucleotide
gcugucagaggcgggaaau

SEQ ID NO: 3026159 - RNA, 19 nt, Artificial Sequence
  Description of Artificial Sequence: Synthetic oligonucleotide
ggaguggagguuggagcaa

SEQ ID NO: 3026160 - RNA, 19 nt, Artificial Sequence
  Description of Artificial Sequence: Synthetic oligonucleotide
gcaaggaguggagguugga

SEQ ID NO: 3026161 - RNA, 19 nt, Artificial Sequence
  Description of Artificial Sequence: Synthetic oligonucleotide
cgcauuaccacgggcggca

SEQ ID NO: 3026162 - RNA, 19 nt, Artificial Sequence
  Description of Artificial Sequence: Synthetic oligonucleotide
cagcugucagaggcgggaa

SEQ ID NO: 3026163 - RNA, 19 nt, Artificial Sequence
  Description of Artificial Sequence: Synthetic oligonucleotide
caggcaaggaguggagguu

SEQ ID NO: 3026164 - RNA, 19 nt, Artificial Sequence
  Description of Artificial Sequence: Synthetic oligonucleotide
gcauuaccacgggcggcac

SEQ ID NO: 3026165 - RNA, 19 nt, Artificial Sequence
  Description of Artificial Sequence: Synthetic oligonucleotide
ggggaguggggagaccacu

SEQ ID NO: 3026166 - RNA, 19 nt, Artificial Sequence
  Description of Artificial Sequence: Synthetic oligonucleotide
ccacgggcggcacgaacga

SEQ ID NO: 3026167 - RNA, 19 nt, Artificial Sequence
  Description of Artificial Sequence: Synthetic oligonucleotide
cugucagaggcgggaaauu

SEQ ID NO: 3026168 - RNA, 19 nt, Artificial Sequence
  Description of Artificial Sequence: Synthetic oligonucleotide
ggggagaccacuggccuuu

SEQ ID NO: 3026169 - RNA, 19 nt, Artificial Sequence
  Description of Artificial Sequence: Synthetic oligonucleotide
ggagaccacuggccuuucu

SEQ ID NO: 3026170 - RNA, 19 nt, Artificial Sequence
  Description of Artificial Sequence: Synthetic oligonucleotide
cgggcggcacgaacgagga

SEQ ID NO: 3026171 - RNA, 19 nt, Artificial Sequence
  Description of Artificial Sequence: Synthetic oligonucleotide
gggccuuugcuuguuuauu

SEQ ID NO: 3026172 - RNA, 19 nt, Artificial Sequence
  Description of Artificial Sequence: Synthetic oligonucleotide
gcgccacuguacgcauuac

SEQ ID NO: 3026173 - RNA, 19 nt, Artificial Sequence
  Description of Artificial Sequence: Synthetic oligonucleotide
gggagaccacuggccuuuc

SEQ ID NO: 3026174 - RNA, 19 nt, Artificial Sequence
  Description of Artificial Sequence: Synthetic oligonucleotide
cgacucuucucuugggguu

SEQ ID NO: 3026175 - RNA, 19 nt, Artificial Sequence
  Description of Artificial Sequence: Synthetic oligonucleotide
gucugggccuuugcuuguu

SEQ ID NO: 3026176 - RNA, 19 nt, Artificial Sequence
  Description of Artificial Sequence: Synthetic oligonucleotide
cgggaaauuggggaggguu

SEQ ID NO: 3026177 - RNA, 19 nt, Artificial Sequence
  Description of Artificial Sequence: Synthetic oligonucleotide
ccacacaaacagcgccacu

SEQ ID NO: 3026178 - RNA, 19 nt, Artificial Sequence
  Description of Artificial Sequence: Synthetic oligonucleotide
cgcugagggguggggcaag

SEQ ID NO: 3026179 - RNA, 19 nt, Artificial Sequence
  Description of Artificial Sequence: Synthetic oligonucleotide
cagcgccacuguacgcauu

SEQ ID NO: 3026180 - RNA, 19 nt, Artificial Sequence
  Description of Artificial Sequence: Synthetic oligonucleotide
gcgggaaauuggggagggu

SEQ ID NO: 3026181 - RNA, 19 nt, Artificial Sequence
  Description of Artificial Sequence: Synthetic oligonucleotide
ccgcugagggguggggcaa

SEQ ID NO: 3026182 - RNA, 19 nt, Artificial Sequence
  Description of Artificial Sequence: Synthetic oligonucleotide
gggcggcacgaacgaggau

SEQ ID NO: 3026183 - RNA, 19 nt, Artificial Sequence
  Description of Artificial Sequence: Synthetic oligonucleotide
cggcacgaacgaggaucac

SEQ ID NO: 3026184 - RNA, 19 nt, Artificial Sequence
  Description of Artificial Sequence: Synthetic oligonucleotide
auccauuugggguagaugg

SEQ ID NO: 3026185 - RNA, 19 nt, Artificial Sequence
  Description of Artificial Sequence: Synthetic oligonucleotide
aacagguaagaauaggucu

SEQ ID NO: 3026186 - RNA, 19 nt, Artificial Sequence
  Description of Artificial Sequence: Synthetic oligonucleotide
gaggaugucagucucaaag

SEQ ID NO: 3026187 - RNA, 19 nt, Artificial Sequence
  Description of Artificial Sequence: Synthetic oligonucleotide
uuuccaaagacauacugga

SEQ ID NO: 3026188 - RNA, 19 nt, Artificial Sequence
  Description of Artificial Sequence: Synthetic oligonucleotide
uuugugcuggaccagagcc

SEQ ID NO: 3026189 - RNA, 19 nt, Artificial Sequence
  Description of Artificial Sequence: Synthetic oligonucleotide
ugaaggguaggaaaacagg

SEQ ID NO: 3026190 - RNA, 19 nt, Artificial Sequence
  Description of Artificial Sequence: Synthetic oligonucleotide
aaggguaccaguguguggg

SEQ ID NO: 3026191 - RNA, 19 nt, Artificial Sequence
  Description of Artificial Sequence: Synthetic oligonucleotide
ucagcucccauccauuugg

SEQ ID NO: 3026192 - RNA, 19 nt, Artificial Sequence
  Description of Artificial Sequence: Synthetic oligonucleotide
aauguauaaggguaccagu

SEQ ID NO: 3026193 - RNA, 19 nt, Artificial Sequence
  Description of Artificial Sequence: Synthetic oligonucleotide
uaagaauaggucuugccac

SEQ ID NO: 3026194 - RNA, 19 nt, Artificial Sequence
  Description of Artificial Sequence: Synthetic oligonucleotide
cuuggcauggguuuugugc

SEQ ID NO: 3026195 - RNA, 19 nt, Artificial Sequence
  Description of Artificial Sequence: Synthetic oligonucleotide
aaaacagguaagaauaggu

SEQ ID NO: 3026196 - RNA, 19 nt, Artificial Sequence
  Description of Artificial Sequence: Synthetic oligonucleotide
auggguuuugugcuggacc

SEQ ID NO: 3026197 - RNA, 19 nt, Artificial Sequence
  Description of Artificial Sequence: Synthetic oligonucleotide
aaacagguaagaauagguc

SEQ ID NO: 3026198 - RNA, 19 nt, Artificial Sequence
  Description of Artificial Sequence: Synthetic oligonucleotide
ucuccaauguauaagggua

SEQ ID NO: 3026199 - RNA, 19 nt, Artificial Sequence
  Description of Artificial Sequence: Synthetic oligonucleotide
agagaguccugucuugggc

SEQ ID NO: 3026200 - RNA, 19 nt, Artificial Sequence
  Description of Artificial Sequence: Synthetic oligonucleotide
gaaaacagguaagaauagg

SEQ ID NO: 3026201 - RNA, 19 nt, Artificial Sequence
  Description of Artificial Sequence: Synthetic oligonucleotide
uguauaaggguaccagugu

SEQ ID NO: 3026202 - RNA, 19 nt, Artificial Sequence
  Description of Artificial Sequence: Synthetic oligonucleotide
aggaugucagucucaaagg

SEQ ID NO: 3026203 - RNA, 19 nt, Artificial Sequence
  Description of Artificial Sequence: Synthetic oligonucleotide
ucaaaggccaccacugucu

SEQ ID NO: 3026204 - RNA, 19 nt, Artificial Sequence
  Description of Artificial Sequence: Synthetic oligonucleotide
cuggaggucaucagcaugg

SEQ ID NO: 3026205 - RNA, 19 nt, Artificial Sequence
  Description of Artificial Sequence: Synthetic oligonucleotide
uggaccagagccaucucgg

SEQ ID NO: 3026206 - RNA, 19 nt, Artificial Sequence
  Description of Artificial Sequence: Synthetic oligonucleotide
gugauguccagguaguugc

SEQ ID NO: 3026207 - RNA, 19 nt, Artificial Sequence
  Description of Artificial Sequence: Synthetic oligonucleotide
gcaaaguugguccaguagg

SEQ ID NO: 3026208 - RNA, 19 nt, Artificial Sequence
  Description of Artificial Sequence: Synthetic oligonucleotide
aauggaguggcgaagggcu

SEQ ID NO: 3026209 - RNA, 19 nt, Artificial Sequence
  Description of Artificial Sequence: Synthetic oligonucleotide
uaggucuugccacucuugg

SEQ ID NO: 3026210 - RNA, 19 nt, Artificial Sequence
  Description of Artificial Sequence: Synthetic oligonucleotide
aagaauaggucuugccacu

SEQ ID NO: 3026211 - RNA, 19 nt, Artificial Sequence
  Description of Artificial Sequence: Synthetic oligonucleotide
cauacuggaggucaucagc

SEQ ID NO: 3026212 - RNA, 19 nt, Artificial Sequence
  Description of Artificial Sequence: Synthetic oligonucleotide
cuccuagcaaaguuggucc

SEQ ID NO: 3026213 - RNA, 19 nt, Artificial Sequence
  Description of Artificial Sequence: Synthetic oligonucleotide
uucuccaauguauaagggu

SEQ ID NO: 3026214 - RNA, 19 nt, Artificial Sequence
  Description of Artificial Sequence: Synthetic oligonucleotide
uauaaggguaccagugugu

SEQ ID NO: 3026215 - RNA, 19 nt, Artificial Sequence
  Description of Artificial Sequence: Synthetic oligonucleotide
gaggucaucagcaugguca

SEQ ID NO: 3026216 - RNA, 19 nt, Artificial Sequence
  Description of Artificial Sequence: Synthetic oligonucleotide
uuagugauguccagguagu

SEQ ID NO: 3026217 - RNA, 19 nt, Artificial Sequence
  Description of Artificial Sequence: Synthetic oligonucleotide
caaaguugguccaguaggc

SEQ ID NO: 3026218 - RNA, 19 nt, Artificial Sequence
  Description of Artificial Sequence: Synthetic oligonucleotide
caaucauggccuuggagag

SEQ ID NO: 3026219 - RNA, 19 nt, Artificial Sequence
  Description of Artificial Sequence: Synthetic oligonucleotide
guggguaucaggaagagga

SEQ ID NO: 3026220 - RNA, 19 nt, Artificial Sequence
  Description of Artificial Sequence: Synthetic oligonucleotide
uccauuugggguagauggg

SEQ ID NO: 3026221 - RNA, 19 nt, Artificial Sequence
  Description of Artificial Sequence: Synthetic oligonucleotide
aggaaaacagguaagaaua

SEQ ID NO: 3026222 - RNA, 19 nt, Artificial Sequence
  Description of Artificial Sequence: Synthetic oligonucleotide
uggguuuugugcuggacca

SEQ ID NO: 3026223 - RNA, 19 nt, Artificial Sequence
  Description of Artificial Sequence: Synthetic oligonucleotide
acuccuagcaaaguugguc

SEQ ID NO: 3026224 - RNA, 19 nt, Artificial Sequence
  Description of Artificial Sequence: Synthetic oligonucleotide
guauaaggguaccagugug

SEQ ID NO: 3026225 - RNA, 19 nt, Artificial Sequence
  Description of Artificial Sequence: Synthetic oligonucleotide
aaggccaccacugucuucu

SEQ ID NO: 3026226 - RNA, 19 nt, Artificial Sequence
  Description of Artificial Sequence: Synthetic oligonucleotide
agaguccugucuugggccc

SEQ ID NO: 3026227 - RNA, 19 nt, Artificial Sequence
  Description of Artificial Sequence: Synthetic oligonucleotide
uaggcaaucauggccuugg

SEQ ID NO: 3026228 - RNA, 19 nt, Artificial Sequence
  Description of Artificial Sequence: Synthetic oligonucleotide
caauguauaaggguaccag

SEQ ID NO: 3026229 - RNA, 19 nt, Artificial Sequence
  Description of Artificial Sequence: Synthetic oligonucleotide
ugucuucuucuuauucucc

SEQ ID NO: 3026230 - RNA, 19 nt, Artificial Sequence
  Description of Artificial Sequence: Synthetic oligonucleotide
cagguaguugccauucucc

SEQ ID NO: 3026231 - RNA, 19 nt, Artificial Sequence
  Description of Artificial Sequence: Synthetic oligonucleotide
uugccauucuccaauguau

SEQ ID NO: 3026232 - RNA, 19 nt, Artificial Sequence
  Description of Artificial Sequence: Synthetic oligonucleotide
aaguugguccaguaggcaa

SEQ ID NO: 3026233 - RNA, 19 nt, Artificial Sequence
  Description of Artificial Sequence: Synthetic oligonucleotide
gagaguccugucuugggcc

SEQ ID NO: 3026234 - RNA, 19 nt, Artificial Sequence
  Description of Artificial Sequence: Synthetic oligonucleotide
uuccaaagacauacuggag

SEQ ID NO: 3026235 - RNA, 19 nt, Artificial Sequence
  Description of Artificial Sequence: Synthetic oligonucleotide
agcauggucagcucccauc

SEQ ID NO: 3026236 - RNA, 19 nt, Artificial Sequence
  Description of Artificial Sequence: Synthetic oligonucleotide
guccaguaggcaaucaugg

SEQ ID NO: 3026237 - RNA, 19 nt, Artificial Sequence
  Description of Artificial Sequence: Synthetic oligonucleotide
uuuugugcuggaccagagc

SEQ ID NO: 3026238 - RNA, 19 nt, Artificial Sequence
  Description of Artificial Sequence: Synthetic oligonucleotide
agaugggcauccgugaagg

SEQ ID NO: 3026239 - RNA, 19 nt, Artificial Sequence
  Description of Artificial Sequence: Synthetic oligonucleotide
uugggauccccacuccuag

SEQ ID NO: 3026240 - RNA, 19 nt, Artificial Sequence
  Description of Artificial Sequence: Synthetic oligonucleotide
auguauaaggguaccagug

SEQ ID NO: 3026241 - RNA, 19 nt, Artificial Sequence
  Description of Artificial Sequence: Synthetic oligonucleotide
uccgugaaggguaggaaaa

SEQ ID NO: 3026242 - RNA, 19 nt, Artificial Sequence
  Description of Artificial Sequence: Synthetic oligonucleotide
uagaugggcauccgugaag

SEQ ID NO: 3026243 - RNA, 19 nt, Artificial Sequence
  Description of Artificial Sequence: Synthetic oligonucleotide
gcaaucauggccuuggaga

SEQ ID NO: 3026244 - RNA, 19 nt, Artificial Sequence
  Description of Artificial Sequence: Synthetic oligonucleotide
aauaggucuugccacucuu

SEQ ID NO: 3026245 - RNA, 19 nt, Artificial Sequence
  Description of Artificial Sequence: Synthetic oligonucleotide
aucaggaagaggaugucag

SEQ ID NO: 3026246 - RNA, 19 nt, Artificial Sequence
  Description of Artificial Sequence: Synthetic oligonucleotide
uaaggguaccagugugugg

SEQ ID NO: 3026247 - RNA, 19 nt, Artificial Sequence
  Description of Artificial Sequence: Synthetic oligonucleotide
aggucuugccacucuuggc

SEQ ID NO: 3026248 - RNA, 19 nt, Artificial Sequence
  Description of Artificial Sequence: Synthetic oligonucleotide
aagggcuuuccaaagacau

SEQ ID NO: 3026249 - RNA, 19 nt, Artificial Sequence
  Description of Artificial Sequence: Synthetic oligonucleotide
ggugaguugcccauguugg

SEQ ID NO: 3026250 - RNA, 19 nt, Artificial Sequence
  Description of Artificial Sequence: Synthetic oligonucleotide
aggaagaggaugucagucu

SEQ ID NO: 3026251 - RNA, 19 nt, Artificial Sequence
  Description of Artificial Sequence: Synthetic oligonucleotide
aucauggccuuggagagag

SEQ ID NO: 3026252 - RNA, 19 nt, Artificial Sequence
  Description of Artificial Sequence: Synthetic oligonucleotide
aucagcauggucagcuccc

SEQ ID NO: 3026253 - RNA, 19 nt, Artificial Sequence
  Description of Artificial Sequence: Synthetic oligonucleotide
gagagaguccugucuuggg

SEQ ID NO: 3026254 - RNA, 19 nt, Artificial Sequence
  Description of Artificial Sequence: Synthetic oligonucleotide
cauguugggauccccacuc

SEQ ID NO: 3026255 - RNA, 19 nt, Artificial Sequence
  Description of Artificial Sequence: Synthetic oligonucleotide
accacugucuucuucuuau

SEQ ID NO: 3026256 - RNA, 19 nt, Artificial Sequence
  Description of Artificial Sequence: Synthetic oligonucleotide
gguaagaauaggucuugcc

SEQ ID NO: 3026257 - RNA, 19 nt, Artificial Sequence
  Description of Artificial Sequence: Synthetic oligonucleotide
cuggaccagagccaucucg

SEQ ID NO: 3026258 - RNA, 19 nt, Artificial Sequence
  Description of Artificial Sequence: Synthetic oligonucleotide
uccaauguauaaggguacc

SEQ ID NO: 3026259 - RNA, 19 nt, Artificial Sequence
  Description of Artificial Sequence: Synthetic oligonucleotide
cucgguggguaucaggaag

SEQ ID NO: 3026260 - RNA, 19 nt, Artificial Sequence
  Description of Artificial Sequence: Synthetic oligonucleotide
ucgguggguaucaggaaga

SEQ ID NO: 3026261 - RNA, 19 nt, Artificial Sequence
  Description of Artificial Sequence: Synthetic oligonucleotide
acuggaggucaucagcaug

SEQ ID NO: 3026262 - RNA, 19 nt, Artificial Sequence
  Description of Artificial Sequence: Synthetic oligonucleotide
uccaguaggcaaucauggc

SEQ ID NO: 3026263 - RNA, 19 nt, Artificial Sequence
  Description of Artificial Sequence: Synthetic oligonucleotide
auaaggguaccagugugug

SEQ ID NO: 3026264 - RNA, 19 nt, Artificial Sequence
  Description of Artificial Sequence: Synthetic oligonucleotide
uaucaggaagaggauguca

SEQ ID NO: 3026265 - RNA, 19 nt, Artificial Sequence
  Description of Artificial Sequence: Synthetic oligonucleotide
acauacuggaggucaucag

SEQ ID NO: 3026266 - RNA, 19 nt, Artificial Sequence
  Description of Artificial Sequence: Synthetic oligonucleotide
cuccaauguauaaggguac

SEQ ID NO: 3026267 - RNA, 19 nt, Artificial Sequence
  Description of Artificial Sequence: Synthetic oligonucleotide
agguaagaauaggucuugc

SEQ ID NO: 3026268 - RNA, 19 nt, Artificial Sequence
  Description of Artificial Sequence: Synthetic oligonucleotide
ugggcauccgugaagggua

SEQ ID NO: 3026269 - RNA, 19 nt, Artificial Sequence
  Description of Artificial Sequence: Synthetic oligonucleotide
ggaugucagucucaaaggc

SEQ ID NO: 3026270 - RNA, 19 nt, Artificial Sequence
  Description of Artificial Sequence: Synthetic oligonucleotide
caucagcauggucagcucc

SEQ ID NO: 3026271 - RNA, 19 nt, Artificial Sequence
  Description of Artificial Sequence: Synthetic oligonucleotide
ucagucucaaaggccacca

SEQ ID NO: 3026272 - RNA, 19 nt, Artificial Sequence
  Description of Artificial Sequence: Synthetic oligonucleotide
agguaguugccauucucca

SEQ ID NO: 3026273 - RNA, 19 nt, Artificial Sequence
  Description of Artificial Sequence: Synthetic oligonucleotide
ugaguugcccauguuggga

SEQ ID NO: 3026274 - RNA, 19 nt, Artificial Sequence
  Description of Artificial Sequence: Synthetic oligonucleotide
cuugccacucuuggcaugg

SEQ ID NO: 3026275 - RNA, 19 nt, Artificial Sequence
  Description of Artificial Sequence: Synthetic oligonucleotide
ccaguaggcaaucauggcc

SEQ ID NO: 3026276 - RNA, 19 nt, Artificial Sequence
  Description of Artificial Sequence: Synthetic oligonucleotide
uguugggauccccacuccu

SEQ ID NO: 3026277 - RNA, 19 nt, Artificial Sequence
  Description of Artificial Sequence: Synthetic oligonucleotide
ucucaaaggccaccacugu

SEQ ID NO: 3026278 - RNA, 19 nt, Artificial Sequence
  Description of Artificial Sequence: Synthetic oligonucleotide
gcuuuccaaagacauacug

SEQ ID NO: 3026279 - RNA, 19 nt, Artificial Sequence
  Description of Artificial Sequence: Synthetic oligonucleotide
agaauaggucuugccacuc

SEQ ID NO: 3026280 - RNA, 19 nt, Artificial Sequence
  Description of Artificial Sequence: Synthetic oligonucleotide
ugauguccagguaguugcc

SEQ ID NO: 3026281 - RNA, 19 nt, Artificial Sequence
  Description of Artificial Sequence: Synthetic oligonucleotide
gaaggguaggaaaacaggu

SEQ ID NO: 3026282 - RNA, 19 nt, Artificial Sequence
  Description of Artificial Sequence: Synthetic oligonucleotide
aagaggaugucagucucaa

SEQ ID NO: 3026283 - RNA, 19 nt, Artificial Sequence
  Description of Artificial Sequence: Synthetic oligonucleotide
gugaguugcccauguuggg

SEQ ID NO: 3026284 - RNA, 19 nt, Artificial Sequence
  Description of Artificial Sequence: Synthetic oligonucleotide
auacuggaggucaucagca

SEQ ID NO: 3026285 - RNA, 19 nt, Artificial Sequence
  Description of Artificial Sequence: Synthetic oligonucleotide
ugcuggaccagagccaucu

SEQ ID NO: 3026286 - RNA, 19 nt, Artificial Sequence
  Description of Artificial Sequence: Synthetic oligonucleotide
auggccuuggagagagucc

SEQ ID NO: 3026287 - RNA, 19 nt, Artificial Sequence
  Description of Artificial Sequence: Synthetic oligonucleotide
ugccauucuccaauguaua

SEQ ID NO: 3026288 - RNA, 19 nt, Artificial Sequence
  Description of Artificial Sequence: Synthetic oligonucleotide
auccgugaaggguaggaaa

SEQ ID NO: 3026289 - RNA, 19 nt, Artificial Sequence
  Description of Artificial Sequence: Synthetic oligonucleotide
aucucgguggguaucagga

SEQ ID NO: 3026290 - RNA, 19 nt, Artificial Sequence
  Description of Artificial Sequence: Synthetic oligonucleotide
uugggguagaugggcaucc

SEQ ID NO: 3026291 - RNA, 19 nt, Artificial Sequence
  Description of Artificial Sequence: Synthetic oligonucleotide
uggagagaguccugucuug

SEQ ID NO: 3026292 - RNA, 19 nt, Artificial Sequence
  Description of Artificial Sequence: Synthetic oligonucleotide
ggucuugccacucuuggca

SEQ ID NO: 3026293 - RNA, 19 nt, Artificial Sequence
  Description of Artificial Sequence: Synthetic oligonucleotide
cagugugugggcacgggug

SEQ ID NO: 3026294 - RNA, 19 nt, Artificial Sequence
  Description of Artificial Sequence: Synthetic oligonucleotide
caauggaguggcgaagggc

SEQ ID NO: 3026295 - RNA, 19 nt, Artificial Sequence
  Description of Artificial Sequence: Synthetic oligonucleotide
caucucgguggguaucagg

SEQ ID NO: 3026296 - RNA, 19 nt, Artificial Sequence
  Description of Artificial Sequence: Synthetic oligonucleotide
ggaaaacagguaagaauag

SEQ ID NO: 3026297 - RNA, 19 nt, Artificial Sequence
  Description of Artificial Sequence: Synthetic oligonucleotide
gaugggcauccgugaaggg

SEQ ID NO: 3026298 - RNA, 19 nt, Artificial Sequence
  Description of Artificial Sequence: Synthetic oligonucleotide
cucaaaggccaccacuguc

SEQ ID NO: 3026299 - RNA, 19 nt, Artificial Sequence
  Description of Artificial Sequence: Synthetic oligonucleotide
caggaagaggaugucaguc

SEQ ID NO: 3026300 - RNA, 19 nt, Artificial Sequence
  Description of Artificial Sequence: Synthetic oligonucleotide
gggcuuuccaaagacauac

SEQ ID NO: 3026301 - RNA, 19 nt, Artificial Sequence
  Description of Artificial Sequence: Synthetic oligonucleotide
uggccuuggagagaguccu

SEQ ID NO: 3026302 - RNA, 19 nt, Artificial Sequence
  Description of Artificial Sequence: Synthetic oligonucleotide
aguugcccauguugggauc

SEQ ID NO: 3026303 - RNA, 19 nt, Artificial Sequence
  Description of Artificial Sequence: Synthetic oligonucleotide
ugguccaguaggcaaucau

SEQ ID NO: 3026304 - RNA, 19 nt, Artificial Sequence
  Description of Artificial Sequence: Synthetic oligonucleotide
uaguugccauucuccaaug

SEQ ID NO: 3026305 - RNA, 19 nt, Artificial Sequence
  Description of Artificial Sequence: Synthetic oligonucleotide
aggguaccagugugugggc

SEQ ID NO: 3026306 - RNA, 19 nt, Artificial Sequence
  Description of Artificial Sequence: Synthetic oligonucleotide
cugucuugggcccgguagc

SEQ ID NO: 3026307 - RNA, 19 nt, Artificial Sequence
  Description of Artificial Sequence: Synthetic oligonucleotide
gggugaguugcccauguug

SEQ ID NO: 3026308 - RNA, 19 nt, Artificial Sequence
  Description of Artificial Sequence: Synthetic oligonucleotide
auuugggguagaugggcau

SEQ ID NO: 3026309 - RNA, 19 nt, Artificial Sequence
  Description of Artificial Sequence: Synthetic oligonucleotide
acagguaagaauaggucuu

SEQ ID NO: 3026310 - RNA, 19 nt, Artificial Sequence
  Description of Artificial Sequence: Synthetic oligonucleotide
uggcgaagggcuuuccaaa

SEQ ID NO: 3026311 - RNA, 19 nt, Artificial Sequence
  Description of Artificial Sequence: Synthetic oligonucleotide
guugccauucuccaaugua

SEQ ID NO: 3026312 - RNA, 19 nt, Artificial Sequence
  Description of Artificial Sequence: Synthetic oligonucleotide
gcauggucagcucccaucc

SEQ ID NO: 3026313 - RNA, 19 nt, Artificial Sequence
  Description of Artificial Sequence: Synthetic oligonucleotide
gguaggaaaacagguaaga

SEQ ID NO: 3026314 - RNA, 19 nt, Artificial Sequence
  Description of Artificial Sequence: Synthetic oligonucleotide
auggucagcucccauccau

SEQ ID NO: 3026315 - RNA, 19 nt, Artificial Sequence
  Description of Artificial Sequence: Synthetic oligonucleotide
aguugccauucuccaaugu

SEQ ID NO: 3026316 - RNA, 19 nt, Artificial Sequence
  Description of Artificial Sequence: Synthetic oligonucleotide
guaguugccauucuccaau

SEQ ID NO: 3026317 - RNA, 19 nt, Artificial Sequence
  Description of Artificial Sequence: Synthetic oligonucleotide
ucuugccacucuuggcaug

SEQ ID NO: 3026318 - RNA, 19 nt, Artificial Sequence
  Description of Artificial Sequence: Synthetic oligonucleotide
ugucagucucaaaggccac

SEQ ID NO: 3026319 - RNA, 19 nt, Artificial Sequence
  Description of Artificial Sequence: Synthetic oligonucleotide
cauggccuuggagagaguc

SEQ ID NO: 3026320 - RNA, 19 nt, Artificial Sequence
  Description of Artificial Sequence: Synthetic oligonucleotide
guuuugugcuggaccagag

SEQ ID NO: 3026321 - RNA, 19 nt, Artificial Sequence
  Description of Artificial Sequence: Synthetic oligonucleotide
aaucauggccuuggagaga

SEQ ID NO: 3026322 - RNA, 19 nt, Artificial Sequence
  Description of Artificial Sequence: Synthetic oligonucleotide
agacauacuggaggucauc

SEQ ID NO: 3026323 - RNA, 19 nt, Artificial Sequence
  Description of Artificial Sequence: Synthetic oligonucleotide
uggguaucaggaagaggau

SEQ ID NO: 3026324 - RNA, 19 nt, Artificial Sequence
  Description of Artificial Sequence: Synthetic oligonucleotide
aguggcgaagggcuuucca

SEQ ID NO: 3026325 - RNA, 19 nt, Artificial Sequence
  Description of Artificial Sequence: Synthetic oligonucleotide
ggaagaggaugucagucuc

SEQ ID NO: 3026326 - RNA, 19 nt, Artificial Sequence
  Description of Artificial Sequence: Synthetic oligonucleotide
cauuugggguagaugggca

SEQ ID NO: 3026327 - RNA, 19 nt, Artificial Sequence
  Description of Artificial Sequence: Synthetic oligonucleotide
guugcccauguugggaucc

SEQ ID NO: 3026328 - RNA, 19 nt, Artificial Sequence
  Description of Artificial Sequence: Synthetic oligonucleotide
gauccccacuccuagcaaa

SEQ ID NO: 3026329 - RNA, 19 nt, Artificial Sequence
  Description of Artificial Sequence: Synthetic oligonucleotide
augggcauccgugaagggu

SEQ ID NO: 3026330 - RNA, 19 nt, Artificial Sequence
  Description of Artificial Sequence: Synthetic oligonucleotide
ugucuugggcccgguagcc

SEQ ID NO: 3026331 - RNA, 19 nt, Artificial Sequence
  Description of Artificial Sequence: Synthetic oligonucleotide
ggcaaucauggccuuggag

SEQ ID NO: 3026332 - RNA, 19 nt, Artificial Sequence
  Description of Artificial Sequence: Synthetic oligonucleotide
uagcccaauggaguggcga

SEQ ID NO: 3026333 - RNA, 19 nt, Artificial Sequence
  Description of Artificial Sequence: Synthetic oligonucleotide
ggagagaguccugucuugg

SEQ ID NO: 3026334 - RNA, 19 nt, Artificial Sequence
  Description of Artificial Sequence: Synthetic oligonucleotide
gguagaugggcauccguga

SEQ ID NO: 3026335 - RNA, 19 nt, Artificial Sequence
  Description of Artificial Sequence: Synthetic oligonucleotide
guaccagugugugggcacg

SEQ ID NO: 3026336 - RNA, 19 nt, Artificial Sequence
  Description of Artificial Sequence: Synthetic oligonucleotide
caguaggcaaucauggccu

SEQ ID NO: 3026337 - RNA, 19 nt, Artificial Sequence
  Description of Artificial Sequence: Synthetic oligonucleotide
cagguaagaauaggucuug

SEQ ID NO: 3026338 - RNA, 19 nt, Artificial Sequence
  Description of Artificial Sequence: Synthetic oligonucleotide
gaagggcuuuccaaagaca

SEQ ID NO: 3026339 - RNA, 19 nt, Artificial Sequence
  Description of Artificial Sequence: Synthetic oligonucleotide
cauccauuugggguagaug

SEQ ID NO: 3026340 - RNA, 19 nt, Artificial Sequence
  Description of Artificial Sequence: Synthetic oligonucleotide
gucagcucccauccauuug

SEQ ID NO: 3026341 - RNA, 19 nt, Artificial Sequence
  Description of Artificial Sequence: Synthetic oligonucleotide
gguccaguaggcaaucaug

SEQ ID NO: 3026342 - RNA, 19 nt, Artificial Sequence
  Description of Artificial Sequence: Synthetic oligonucleotide
ucaucagcauggucagcuc

SEQ ID NO: 3026343 - RNA, 19 nt, Artificial Sequence
  Description of Artificial Sequence: Synthetic oligonucleotide
ggcgaagggcuuuccaaag

SEQ ID NO: 3026344 - RNA, 19 nt, Artificial Sequence
  Description of Artificial Sequence: Synthetic oligonucleotide
uggcauggguuuugugcug

SEQ ID NO: 3026345 - RNA, 19 nt, Artificial Sequence
  Description of Artificial Sequence: Synthetic oligonucleotide
auaggucuugccacucuug

SEQ ID NO: 3026346 - RNA, 19 nt, Artificial Sequence
  Description of Artificial Sequence: Synthetic oligonucleotide
agagccaucucggugggua

SEQ ID NO: 3026347 - RNA, 19 nt, Artificial Sequence
  Description of Artificial Sequence: Synthetic oligonucleotide
ugccacucuuggcaugggu

SEQ ID NO: 3026348 - RNA, 19 nt, Artificial Sequence
  Description of Artificial Sequence: Synthetic oligonucleotide
agcccaauggaguggcgaa

SEQ ID NO: 3026349 - RNA, 19 nt, Artificial Sequence
  Description of Artificial Sequence: Synthetic oligonucleotide
cccacuccuagcaaaguug

SEQ ID NO: 3026350 - RNA, 19 nt, Artificial Sequence
  Description of Artificial Sequence: Synthetic oligonucleotide
uacuggaggucaucagcau

SEQ ID NO: 3026351 - RNA, 19 nt, Artificial Sequence
  Description of Artificial Sequence: Synthetic oligonucleotide
ucucgguggguaucaggaa

SEQ ID NO: 3026352 - RNA, 19 nt, Artificial Sequence
  Description of Artificial Sequence: Synthetic oligonucleotide
ccugucuugggcccgguag

SEQ ID NO: 3026353 - RNA, 19 nt, Artificial Sequence
  Description of Artificial Sequence: Synthetic oligonucleotide
ugggauccccacuccuagc

SEQ ID NO: 3026354 - RNA, 19 nt, Artificial Sequence
  Description of Artificial Sequence: Synthetic oligonucleotide
uagcaaaguugguccagua

SEQ ID NO: 3026355 - RNA, 19 nt, Artificial Sequence
  Description of Artificial Sequence: Synthetic oligonucleotide
guagaugggcauccgugaa

SEQ ID NO: 3026356 - RNA, 19 nt, Artificial Sequence
  Description of Artificial Sequence: Synthetic oligonucleotide
acgggugaguugcccaugu

SEQ ID NO: 3026357 - RNA, 19 nt, Artificial Sequence
  Description of Artificial Sequence: Synthetic oligonucleotide
aguugguccaguaggcaau

SEQ ID NO: 3026358 - RNA, 19 nt, Artificial Sequence
  Description of Artificial Sequence: Synthetic oligonucleotide
gucagucucaaaggccacc

SEQ ID NO: 3026359 - RNA, 19 nt, Artificial Sequence
  Description of Artificial Sequence: Synthetic oligonucleotide
cuuggagagaguccugucu

SEQ ID NO: 3026360 - RNA, 19 nt, Artificial Sequence
  Description of Artificial Sequence: Synthetic oligonucleotide
gguaccagugugugggcac

SEQ ID NO: 3026361 - RNA, 19 nt, Artificial Sequence
  Description of Artificial Sequence: Synthetic oligonucleotide
gguaucaggaagaggaugu

SEQ ID NO: 3026362 - RNA, 19 nt, Artificial Sequence
  Description of Artificial Sequence: Synthetic oligonucleotide
guggcgaagggcuuuccaa

SEQ ID NO: 3026363 - RNA, 19 nt, Artificial Sequence
  Description of Artificial Sequence: Synthetic oligonucleotide
ggguagaugggcauccgug

SEQ ID NO: 3026364 - RNA, 19 nt, Artificial Sequence
  Description of Artificial Sequence: Synthetic oligonucleotide
gguagcccaauggaguggc

SEQ ID NO: 3026365 - RNA, 19 nt, Artificial Sequence
  Description of Artificial Sequence: Synthetic oligonucleotide
caaagacauacuggagguc

SEQ ID NO: 3026366 - RNA, 19 nt, Artificial Sequence
  Description of Artificial Sequence: Synthetic oligonucleotide
ugugggcacgggugaguug

SEQ ID NO: 3026367 - RNA, 19 nt, Artificial Sequence
  Description of Artificial Sequence: Synthetic oligonucleotide
uaccagugugugggcacgg

SEQ ID NO: 3026368 - RNA, 19 nt, Artificial Sequence
  Description of Artificial Sequence: Synthetic oligonucleotide
ugggguagaugggcauccg

SEQ ID NO: 3026369 - RNA, 19 nt, Artificial Sequence
  Description of Artificial Sequence: Synthetic oligonucleotide
cucccauccauuuggggua

SEQ ID NO: 3026370 - RNA, 19 nt, Artificial Sequence
  Description of Artificial Sequence: Synthetic oligonucleotide
auccccacuccuagcaaag

SEQ ID NO: 3026371 - RNA, 19 nt, Artificial Sequence
  Description of Artificial Sequence: Synthetic oligonucleotide
gaauaggucuugccacucu

SEQ ID NO: 3026372 - RNA, 19 nt, Artificial Sequence
  Description of Artificial Sequence: Synthetic oligonucleotide
uggucagcucccauccauu

SEQ ID NO: 3026373 - RNA, 19 nt, Artificial Sequence
  Description of Artificial Sequence: Synthetic oligonucleotide
ucccauccauuugggguag

SEQ ID NO: 3026374 - RNA, 19 nt, Artificial Sequence
  Description of Artificial Sequence: Synthetic oligonucleotide
ggguaucaggaagaggaug

SEQ ID NO: 3026375 - RNA, 19 nt, Artificial Sequence
  Description of Artificial Sequence: Synthetic oligonucleotide
ggcauggguuuugugcugg

SEQ ID NO: 3026376 - RNA, 19 nt, Artificial Sequence
  Description of Artificial Sequence: Synthetic oligonucleotide
uguccagguaguugccauu

SEQ ID NO: 3026377 - RNA, 19 nt, Artificial Sequence
  Description of Artificial Sequence: Synthetic oligonucleotide
ccauuugggguagaugggc

SEQ ID NO: 3026378 - RNA, 19 nt, Artificial Sequence
  Description of Artificial Sequence: Synthetic oligonucleotide
gguggguaucaggaagagg

SEQ ID NO: 3026379 - RNA, 19 nt, Artificial Sequence
  Description of Artificial Sequence: Synthetic oligonucleotide
acucuuggcauggguuuug

SEQ ID NO: 3026380 - RNA, 19 nt, Artificial Sequence
  Description of Artificial Sequence: Synthetic oligonucleotide
guccagguaguugccauuc

SEQ ID NO: 3026381 - RNA, 19 nt, Artificial Sequence
  Description of Artificial Sequence: Synthetic oligonucleotide
cauggguuuugugcuggac

SEQ ID NO: 3026382 - RNA, 19 nt, Artificial Sequence
  Description of Artificial Sequence: Synthetic oligonucleotide
gaguccugucuugggcccg

SEQ ID NO: 3026383 - RNA, 19 nt, Artificial Sequence
  Description of Artificial Sequence: Synthetic oligonucleotide
ugugugggcacgggugagu

SEQ ID NO: 3026384 - RNA, 19 nt, Artificial Sequence
  Description of Artificial Sequence: Synthetic oligonucleotide
agccaucucgguggguauc

SEQ ID NO: 3026385 - RNA, 19 nt, Artificial Sequence
  Description of Artificial Sequence: Synthetic oligonucleotide
gaguugcccauguugggau

SEQ ID NO: 3026386 - RNA, 19 nt, Artificial Sequence
  Description of Artificial Sequence: Synthetic oligonucleotide
aguccugucuugggcccgg

SEQ ID NO: 3026387 - RNA, 19 nt, Artificial Sequence
  Description of Artificial Sequence: Synthetic oligonucleotide
aguaggcaaucauggccuu

SEQ ID NO: 3026388 - RNA, 19 nt, Artificial Sequence
  Description of Artificial Sequence: Synthetic oligonucleotide
guaucaggaagaggauguc

SEQ ID NO: 3026389 - RNA, 19 nt, Artificial Sequence
  Description of Artificial Sequence: Synthetic oligonucleotide
cccaauggaguggcgaagg

SEQ ID NO: 3026390 - RNA, 19 nt, Artificial Sequence
  Description of Artificial Sequence: Synthetic oligonucleotide
guaggcaaucauggccuug

SEQ ID NO: 3026391 - RNA, 19 nt, Artificial Sequence
  Description of Artificial Sequence: Synthetic oligonucleotide
gggcccgguagcccaaugg

SEQ ID NO: 3026392 - RNA, 19 nt, Artificial Sequence
  Description of Artificial Sequence: Synthetic oligonucleotide
gggauccccacuccuagca

SEQ ID NO: 3026393 - RNA, 19 nt, Artificial Sequence
  Description of Artificial Sequence: Synthetic oligonucleotide
gcucccauccauuuggggu

SEQ ID NO: 3026394 - RNA, 19 nt, Artificial Sequence
  Description of Artificial Sequence: Synthetic oligonucleotide
gguaguugccauucuccaa

SEQ ID NO: 3026395 - RNA, 19 nt, Artificial Sequence
  Description of Artificial Sequence: Synthetic oligonucleotide
cgaagggcuuuccaaagac

SEQ ID NO: 3026396 - RNA, 19 nt, Artificial Sequence
  Description of Artificial Sequence: Synthetic oligonucleotide
agaggaugucagucucaaa

SEQ ID NO: 3026397 - RNA, 19 nt, Artificial Sequence
  Description of Artificial Sequence: Synthetic oligonucleotide
ccaauggaguggcgaaggg

SEQ ID NO: 3026398 - RNA, 19 nt, Artificial Sequence
  Description of Artificial Sequence: Synthetic oligonucleotide
ccaaagacauacuggaggu

SEQ ID NO: 3026399 - RNA, 19 nt, Artificial Sequence
  Description of Artificial Sequence: Synthetic oligonucleotide
uggaggucaucagcauggu

SEQ ID NO: 3026400 - RNA, 19 nt, Artificial Sequence
  Description of Artificial Sequence: Synthetic oligonucleotide
gguuuugugcuggaccaga

SEQ ID NO: 3026401 - RNA, 19 nt, Artificial Sequence
  Description of Artificial Sequence: Synthetic oligonucleotide
uugcccauguugggauccc

SEQ ID NO: 3026402 - RNA, 19 nt, Artificial Sequence
  Description of Artificial Sequence: Synthetic oligonucleotide
ugggcacgggugaguugcc

SEQ ID NO: 3026403 - RNA, 19 nt, Artificial Sequence
  Description of Artificial Sequence: Synthetic oligonucleotide
ugcccauguugggaucccc

SEQ ID NO: 3026404 - RNA, 19 nt, Artificial Sequence
  Description of Artificial Sequence: Synthetic oligonucleotide
aggcaaucauggccuugga

SEQ ID NO: 3026405 - RNA, 19 nt, Artificial Sequence
  Description of Artificial Sequence: Synthetic oligonucleotide
guagcccaauggaguggcg

SEQ ID NO: 3026406 - RNA, 19 nt, Artificial Sequence
  Description of Artificial Sequence: Synthetic oligonucleotide
ccgguagcccaauggagug

SEQ ID NO: 3026407 - RNA, 19 nt, Artificial Sequence
  Description of Artificial Sequence: Synthetic oligonucleotide
uggaguggcgaagggcuuu

SEQ ID NO: 3026408 - RNA, 19 nt, Artificial Sequence
  Description of Artificial Sequence: Synthetic oligonucleotide
ccuagcaaaguugguccag

SEQ ID NO: 3026409 - RNA, 19 nt, Artificial Sequence
  Description of Artificial Sequence: Synthetic oligonucleotide
ugggcccgguagcccaaug

SEQ ID NO: 3026410 - RNA, 19 nt, Artificial Sequence
  Description of Artificial Sequence: Synthetic oligonucleotide
uccccacuccuagcaaagu

SEQ ID NO: 3026411 - RNA, 19 nt, Artificial Sequence
  Description of Artificial Sequence: Synthetic oligonucleotide
cccauguugggauccccac

SEQ ID NO: 3026412 - RNA, 19 nt, Artificial Sequence
  Description of Artificial Sequence: Synthetic oligonucleotide
uagugauguccagguaguu

SEQ ID NO: 3026413 - RNA, 19 nt, Artificial Sequence
  Description of Artificial Sequence: Synthetic oligonucleotide
guugggauccccacuccua

SEQ ID NO: 3026414 - RNA, 19 nt, Artificial Sequence
  Description of Artificial Sequence: Synthetic oligonucleotide
ggcccgguagcccaaugga

SEQ ID NO: 3026415 - RNA, 19 nt, Artificial Sequence
  Description of Artificial Sequence: Synthetic oligonucleotide
ggcacgggugaguugccca

SEQ ID NO: 3026416 - RNA, 19 nt, Artificial Sequence
  Description of Artificial Sequence: Synthetic oligonucleotide
gucuugggcccgguagccc

SEQ ID NO: 3026417 - RNA, 19 nt, Artificial Sequence
  Description of Artificial Sequence: Synthetic oligonucleotide
uccugucuugggcccggua

SEQ ID NO: 3026418 - RNA, 19 nt, Artificial Sequence
  Description of Artificial Sequence: Synthetic oligonucleotide
ggaggucaucagcaugguc

SEQ ID NO: 3026419 - RNA, 19 nt, Artificial Sequence
  Description of Artificial Sequence: Synthetic oligonucleotide
cuagcaaaguugguccagu

SEQ ID NO: 3026420 - RNA, 19 nt, Artificial Sequence
  Description of Artificial Sequence: Synthetic oligonucleotide
gcgaagggcuuuccaaaga

SEQ ID NO: 3026421 - RNA, 19 nt, Artificial Sequence
  Description of Artificial Sequence: Synthetic oligonucleotide
cauggucagcucccaucca

SEQ ID NO: 3026422 - RNA, 19 nt, Artificial Sequence
  Description of Artificial Sequence: Synthetic oligonucleotide
cauccgugaaggguaggaa

SEQ ID NO: 3026423 - RNA, 19 nt, Artificial Sequence
  Description of Artificial Sequence: Synthetic oligonucleotide
gaguggcgaagggcuuucc

SEQ ID NO: 3026424 - RNA, 19 nt, Artificial Sequence
  Description of Artificial Sequence: Synthetic oligonucleotide
gcauccgugaaggguagga

SEQ ID NO: 3026425 - RNA, 19 nt, Artificial Sequence
  Description of Artificial Sequence: Synthetic oligonucleotide
ggguuuugugcuggaccag

SEQ ID NO: 3026426 - RNA, 19 nt, Artificial Sequence
  Description of Artificial Sequence: Synthetic oligonucleotide
agggcuuuccaaagacaua

SEQ ID NO: 3026427 - RNA, 19 nt, Artificial Sequence
  Description of Artificial Sequence: Synthetic oligonucleotide
ccagagccaucucgguggg

SEQ ID NO: 3026428 - RNA, 19 nt, Artificial Sequence
  Description of Artificial Sequence: Synthetic oligonucleotide
ccaauguauaaggguacca

SEQ ID NO: 3026429 - RNA, 19 nt, Artificial Sequence
  Description of Artificial Sequence: Synthetic oligonucleotide
gcccgguagcccaauggag

SEQ ID NO: 3026430 - RNA, 19 nt, Artificial Sequence
  Description of Artificial Sequence: Synthetic oligonucleotide
ccuuggagagaguccuguc

SEQ ID NO: 3026431 - RNA, 19 nt, Artificial Sequence
  Description of Artificial Sequence: Synthetic oligonucleotide
cacgggugaguugcccaug

SEQ ID NO: 3026432 - RNA, 19 nt, Artificial Sequence
  Description of Artificial Sequence: Synthetic oligonucleotide
gcccaauggaguggcgaag

SEQ ID NO: 3026433 - RNA, 19 nt, Artificial Sequence
  Description of Artificial Sequence: Synthetic oligonucleotide
ccgugaaggguaggaaaac

SEQ ID NO: 3026434 - RNA, 19 nt, Artificial Sequence
  Description of Artificial Sequence: Synthetic oligonucleotide
ggauccccacuccuagcaa

SEQ ID NO: 3026435 - RNA, 19 nt, Artificial Sequence
  Description of Artificial Sequence: Synthetic oligonucleotide
gccaucucgguggguauca

SEQ ID NO: 3026436 - RNA, 19 nt, Artificial Sequence
  Description of Artificial Sequence: Synthetic oligonucleotide
ggcauccgugaaggguagg

SEQ ID NO: 3026437 - RNA, 19 nt, Artificial Sequence
  Description of Artificial Sequence: Synthetic oligonucleotide
gggcauccgugaaggguag

SEQ ID NO: 3026438 - RNA, 19 nt, Artificial Sequence
  Description of Artificial Sequence: Synthetic oligonucleotide
ggucaucagcauggucagc

SEQ ID NO: 3026439 - RNA, 19 nt, Artificial Sequence
  Description of Artificial Sequence: Synthetic oligonucleotide
auggaguggcgaagggcuu

SEQ ID NO: 3026440 - RNA, 19 nt, Artificial Sequence
  Description of Artificial Sequence: Synthetic oligonucleotide
cgugaaggguaggaaaaca

SEQ ID NO: 3026441 - RNA, 19 nt, Artificial Sequence
  Description of Artificial Sequence: Synthetic oligonucleotide
cacuccuagcaaaguuggu

SEQ ID NO: 3026442 - RNA, 19 nt, Artificial Sequence
  Description of Artificial Sequence: Synthetic oligonucleotide
ggaguggcgaagggcuuuc

SEQ ID NO: 3026443 - RNA, 19 nt, Artificial Sequence
  Description of Artificial Sequence: Synthetic oligonucleotide
cuugggcccgguagcccaa

SEQ ID NO: 3026444 - RNA, 19 nt, Artificial Sequence
  Description of Artificial Sequence: Synthetic oligonucleotide
cccgguagcccaauggagu

SEQ ID NO: 3026445 - RNA, 19 nt, Artificial Sequence
  Description of Artificial Sequence: Synthetic oligonucleotide
caaaggccaccacugucuu

SEQ ID NO: 3026446 - RNA, 19 nt, Artificial Sequence
  Description of Artificial Sequence: Synthetic oligonucleotide
gcauggguuuugugcugga

SEQ ID NO: 3026447 - RNA, 19 nt, Artificial Sequence
  Description of Artificial Sequence: Synthetic oligonucleotide
gggguagaugggcauccgu

SEQ ID NO: 3026448 - RNA, 19 nt, Artificial Sequence
  Description of Artificial Sequence: Synthetic oligonucleotide
ggucagcucccauccauuu

SEQ ID NO: 3026449 - RNA, 19 nt, Artificial Sequence
  Description of Artificial Sequence: Synthetic oligonucleotide
gcccauguugggaucccca

SEQ ID NO: 3026450 - RNA, 19 nt, Artificial Sequence
  Description of Artificial Sequence: Synthetic oligonucleotide
ggaccagagccaucucggu

SEQ ID NO: 3026451 - RNA, 19 nt, Artificial Sequence
  Description of Artificial Sequence: Synthetic oligonucleotide
gggcacgggugaguugccc

SEQ ID NO: 3026452 - RNA, 19 nt, Artificial Sequence
  Description of Artificial Sequence: Synthetic oligonucleotide
uugggcccgguagcccaau

SEQ ID NO: 3026453 - RNA, 19 nt, Artificial Sequence
  Description of Artificial Sequence: Synthetic oligonucleotide
cgguagcccaauggagugg

SEQ ID NO: 3026454 - RNA, 19 nt, Artificial Sequence
  Description of Artificial Sequence: Synthetic oligonucleotide
gcuggaccagagccaucuc

SEQ ID NO: 3026455 - RNA, 19 nt, Artificial Sequence
  Description of Artificial Sequence: Synthetic oligonucleotide
ggccuuggagagaguccug

SEQ ID NO: 3026456 - RNA, 19 nt, Artificial Sequence
  Description of Artificial Sequence: Synthetic oligonucleotide
gccuuggagagaguccugu

SEQ ID NO: 3026457 - RNA, 19 nt, Artificial Sequence
  Description of Artificial Sequence: Synthetic oligonucleotide
cgguggguaucaggaagag

SEQ ID NO: 3026458 - RNA, 19 nt, Artificial Sequence
  Description of Artificial Sequence: Synthetic oligonucleotide
ccaucucgguggguaucag

SEQ ID NO: 3026459 - RNA, 19 nt, Artificial Sequence
  Description of Artificial Sequence: Synthetic oligonucleotide
ccacucuuggcauggguuu

SEQ ID NO: 3026460 - RNA, 19 nt, Artificial Sequence
  Description of Artificial Sequence: Synthetic oligonucleotide
ggcuuuccaaagacauacu

SEQ ID NO: 3026461 - RNA, 19 nt, Artificial Sequence
  Description of Artificial Sequence: Synthetic oligonucleotide
gccacucuuggcauggguu

SEQ ID NO: 3026462 - RNA, 19 nt, Artificial Sequence
  Description of Artificial Sequence: Synthetic oligonucleotide
ccauguugggauccccacu

SEQ ID NO: 3026463 - RNA, 19 nt, Artificial Sequence
  Description of Artificial Sequence: Synthetic oligonucleotide
gugugggcacgggugaguu

SEQ ID NO: 3026464 - RNA, 19 nt, Artificial Sequence
  Description of Artificial Sequence: Synthetic oligonucleotide
gcacgggugaguugcccau

SEQ ID NO: 3026465 - RNA, 19 nt, Artificial Sequence
  Description of Artificial Sequence: Synthetic oligonucleotide
cacucuuggcauggguuuu

SEQ ID NO: 3026466 - RNA, 19 nt, Artificial Sequence
  Description of Artificial Sequence: Synthetic oligonucleotide
gugcuggaccagagccauc

SEQ ID NO: 3026467 - RNA, 19 nt, Artificial Sequence
  Description of Artificial Sequence: Synthetic oligonucleotide
cagcauggucagcucccau

SEQ ID NO: 3026468 - RNA, 19 nt, Artificial Sequence
  Description of Artificial Sequence: Synthetic oligonucleotide
ccccacuccuagcaaaguu

SEQ ID NO: 3026469 - RNA, 19 nt, Artificial Sequence
  Description of Artificial Sequence: Synthetic oligonucleotide
ccauccauuugggguagau

SEQ ID NO: 3026470 - RNA, 19 nt, Artificial Sequence
  Description of Artificial Sequence: Synthetic oligonucleotide
ccaccacugucuucuucuu

SEQ ID NO: 3026471 - RNA, 19 nt, Artificial Sequence
  Description of Artificial Sequence: Synthetic oligonucleotide
cagagccaucucggugggu

SEQ ID NO: 3026472 - RNA, 19 nt, Artificial Sequence
  Description of Artificial Sequence: Synthetic oligonucleotide
guccugucuugggcccggu

SEQ ID NO: 3026473 - RNA, 19 nt, Artificial Sequence
  Description of Artificial Sequence: Synthetic oligonucleotide
cccauccauuugggguaga

SEQ ID NO: 3026474 - RNA, 19 nt, Artificial Sequence
  Description of Artificial Sequence: Synthetic oligonucleotide
cgggugaguugcccauguu

SEQ ID NO: 3026475 - RNA, 19 nt, Artificial Sequence
  Description of Artificial Sequence: Synthetic oligonucleotide
auuuauuuugcuuucuggc

SEQ ID NO: 3026476 - RNA, 19 nt, Artificial Sequence
  Description of Artificial Sequence: Synthetic oligonucleotide
uguaggaaagccuacgucg

SEQ ID NO: 3026477 - RNA, 19 nt, Artificial Sequence
  Description of Artificial Sequence: Synthetic oligonucleotide
agguaaacaauccuguugc

SEQ ID NO: 3026478 - RNA, 19 nt, Artificial Sequence
  Description of Artificial Sequence: Synthetic oligonucleotide
aggaaagcccgcuugaucc

SEQ ID NO: 3026479 - RNA, 19 nt, Artificial Sequence
  Description of Artificial Sequence: Synthetic oligonucleotide
uuucacaacaauuuucugc

SEQ ID NO: 3026480 - RNA, 19 nt, Artificial Sequence
  Description of Artificial Sequence: Synthetic oligonucleotide
gauuuauuuugcuuucugg

SEQ ID NO: 3026481 - RNA, 19 nt, Artificial Sequence
  Description of Artificial Sequence: Synthetic oligonucleotide
uaaacaauccuguugccag

SEQ ID NO: 3026482 - RNA, 19 nt, Artificial Sequence
  Description of Artificial Sequence: Synthetic oligonucleotide
aauaaggaaagcccgcuug

SEQ ID NO: 3026483 - RNA, 19 nt, Artificial Sequence
  Description of Artificial Sequence: Synthetic oligonucleotide
aagguaaacaauccuguug

SEQ ID NO: 3026484 - RNA, 19 nt, Artificial Sequence
  Description of Artificial Sequence: Synthetic oligonucleotide
uucacaacaauuuucugcu

SEQ ID NO: 3026485 - RNA, 19 nt, Artificial Sequence
  Description of Artificial Sequence: Synthetic oligonucleotide
uccucaauaaggaaagccc

SEQ ID NO: 3026486 - RNA, 19 nt, Artificial Sequence
  Description of Artificial Sequence: Synthetic oligonucleotide
uauaaagguaaacaauccu

SEQ ID NO: 3026487 - RNA, 19 nt, Artificial Sequence
  Description of Artificial Sequence: Synthetic oligonucleotide
uaaagguaaacaauccugu

SEQ ID NO: 3026488 - RNA, 19 nt, Artificial Sequence
  Description of Artificial Sequence: Synthetic oligonucleotide
ucugccugggcacacaccg

SEQ ID NO: 3026489 - RNA, 19 nt, Artificial Sequence
  Description of Artificial Sequence: Synthetic oligonucleotide
ucucauaagaacuuucggu

SEQ ID NO: 3026490 - RNA, 19 nt, Artificial Sequence
  Description of Artificial Sequence: Synthetic oligonucleotide
uguauuguaggaaagccua

SEQ ID NO: 3026491 - RNA, 19 nt, Artificial Sequence
  Description of Artificial Sequence: Synthetic oligonucleotide
gcuucuuugucuuagacag

SEQ ID NO: 3026492 - RNA, 19 nt, Artificial Sequence
  Description of Artificial Sequence: Synthetic oligonucleotide
uuucugcuccucaauaagg

SEQ ID NO: 3026493 - RNA, 19 nt, Artificial Sequence
  Description of Artificial Sequence: Synthetic oligonucleotide
uuuauuuugcuuucuggcu

SEQ ID NO: 3026494 - RNA, 19 nt, Artificial Sequence
  Description of Artificial Sequence: Synthetic oligonucleotide
uuuucugcuccucaauaag

SEQ ID NO: 3026495 - RNA, 19 nt, Artificial Sequence
  Description of Artificial Sequence: Synthetic oligonucleotide
acuuggcacacauggagcc

SEQ ID NO: 3026496 - RNA, 19 nt, Artificial Sequence
  Description of Artificial Sequence: Synthetic oligonucleotide
ugugcuugugccuucaaca

SEQ ID NO: 3026497 - RNA, 19 nt, Artificial Sequence
  Description of Artificial Sequence: Synthetic oligonucleotide
uugguauaaagguaaacaa

SEQ ID NO: 3026498 - RNA, 19 nt, Artificial Sequence
  Description of Artificial Sequence: Synthetic oligonucleotide
cucauaagaacuuucgguc

SEQ ID NO: 3026499 - RNA, 19 nt, Artificial Sequence
  Description of Artificial Sequence: Synthetic oligonucleotide
gacagccuaguuuuguugg

SEQ ID NO: 3026500 - RNA, 19 nt, Artificial Sequence
  Description of Artificial Sequence: Synthetic oligonucleotide
ugcuccucaauaaggaaag

SEQ ID NO: 3026501 - RNA, 19 nt, Artificial Sequence
  Description of Artificial Sequence: Synthetic oligonucleotide
acgucgguaugucaaacgc

SEQ ID NO: 3026502 - RNA, 19 nt, Artificial Sequence
  Description of Artificial Sequence: Synthetic oligonucleotide
uuauuuugcuuucuggcuc

SEQ ID NO: 3026503 - RNA, 19 nt, Artificial Sequence
  Description of Artificial Sequence: Synthetic oligonucleotide
auaaagguaaacaauccug

SEQ ID NO: 3026504 - RNA, 19 nt, Artificial Sequence
  Description of Artificial Sequence: Synthetic oligonucleotide
ugugccuucaacacuuuca

SEQ ID NO: 3026505 - RNA, 19 nt, Artificial Sequence
  Description of Artificial Sequence: Synthetic oligonucleotide
uuuguuggaggcuguauug

SEQ ID NO: 3026506 - RNA, 19 nt, Artificial Sequence
  Description of Artificial Sequence: Synthetic oligonucleotide
aaggaaagcccgcuugauc

SEQ ID NO: 3026507 - RNA, 19 nt, Artificial Sequence
  Description of Artificial Sequence: Synthetic oligonucleotide
aaacaauccuguugccagg

SEQ ID NO: 3026508 - RNA, 19 nt, Artificial Sequence
  Description of Artificial Sequence: Synthetic oligonucleotide
ugcagauuuauuuugcuuu

SEQ ID NO: 3026509 - RNA, 19 nt, Artificial Sequence
  Description of Artificial Sequence: Synthetic oligonucleotide
uaugucaaacgcuggacca

SEQ ID NO: 3026510 - RNA, 19 nt, Artificial Sequence
  Description of Artificial Sequence: Synthetic oligonucleotide
uuuaggugcuuucccaacc

SEQ ID NO: 3026511 - RNA, 19 nt, Artificial Sequence
  Description of Artificial Sequence: Synthetic oligonucleotide
ucuuagacagucucauaag

SEQ ID NO: 3026512 - RNA, 19 nt, Artificial Sequence
  Description of Artificial Sequence: Synthetic oligonucleotide
uuagacagucucauaagaa

SEQ ID NO: 3026513 - RNA, 19 nt, Artificial Sequence
  Description of Artificial Sequence: Synthetic oligonucleotide
accuucuugguauaaaggu

SEQ ID NO: 3026514 - RNA, 19 nt, Artificial Sequence
  Description of Artificial Sequence: Synthetic oligonucleotide
ugguauaaagguaaacaau

SEQ ID NO: 3026515 - RNA, 19 nt, Artificial Sequence
  Description of Artificial Sequence: Synthetic oligonucleotide
ucugacagcacgaaccccu

SEQ ID NO: 3026516 - RNA, 19 nt, Artificial Sequence
  Description of Artificial Sequence: Synthetic oligonucleotide
uuugucuuagacagucuca

SEQ ID NO: 3026517 - RNA, 19 nt, Artificial Sequence
  Description of Artificial Sequence: Synthetic oligonucleotide
aauuuucugcuccucaaua

SEQ ID NO: 3026518 - RNA, 19 nt, Artificial Sequence
  Description of Artificial Sequence: Synthetic oligonucleotide
cacaacaauuuucugcucc

SEQ ID NO: 3026519 - RNA, 19 nt, Artificial Sequence
  Description of Artificial Sequence: Synthetic oligonucleotide
uuggaggcuguauuguagg

SEQ ID NO: 3026520 - RNA, 19 nt, Artificial Sequence
  Description of Artificial Sequence: Synthetic oligonucleotide
cuuucggucugacagcacg

SEQ ID NO: 3026521 - RNA, 19 nt, Artificial Sequence
  Description of Artificial Sequence: Synthetic oligonucleotide
uucgagacagccuaguuuu

SEQ ID NO: 3026522 - RNA, 19 nt, Artificial Sequence
  Description of Artificial Sequence: Synthetic oligonucleotide
aaccuucuugguauaaagg

SEQ ID NO: 3026523 - RNA, 19 nt, Artificial Sequence
  Description of Artificial Sequence: Synthetic oligonucleotide
aacgcuggaccauucugag

SEQ ID NO: 3026524 - RNA, 19 nt, Artificial Sequence
  Description of Artificial Sequence: Synthetic oligonucleotide
agauuuauuuugcuuucug

SEQ ID NO: 3026525 - RNA, 19 nt, Artificial Sequence
  Description of Artificial Sequence: Synthetic oligonucleotide
cuugguauaaagguaaaca

SEQ ID NO: 3026526 - RNA, 19 nt, Artificial Sequence
  Description of Artificial Sequence: Synthetic oligonucleotide
guauaaagguaaacaaucc

SEQ ID NO: 3026527 - RNA, 19 nt, Artificial Sequence
  Description of Artificial Sequence: Synthetic oligonucleotide
uucugcuccucaauaagga

SEQ ID NO: 3026528 - RNA, 19 nt, Artificial Sequence
  Description of Artificial Sequence: Synthetic oligonucleotide
gucucauaagaacuuucgg

SEQ ID NO: 3026529 - RNA, 19 nt, Artificial Sequence
  Description of Artificial Sequence: Synthetic oligonucleotide
gguauaaagguaaacaauc

SEQ ID NO: 3026530 - RNA, 19 nt, Artificial Sequence
  Description of Artificial Sequence: Synthetic oligonucleotide
aacaauccuguugccaggg

SEQ ID NO: 3026531 - RNA, 19 nt, Artificial Sequence
  Description of Artificial Sequence: Synthetic oligonucleotide
cucaauaaggaaagcccgc

SEQ ID NO: 3026532 - RNA, 19 nt, Artificial Sequence
  Description of Artificial Sequence: Synthetic oligonucleotide
agucucauaagaacuuucg

SEQ ID NO: 3026533 - RNA, 19 nt, Artificial Sequence
  Description of Artificial Sequence: Synthetic oligonucleotide
guaugucaaacgcuggacc

SEQ ID NO: 3026534 - RNA, 19 nt, Artificial Sequence
  Description of Artificial Sequence: Synthetic oligonucleotide
acuuucacaacaauuuucu

SEQ ID NO: 3026535 - RNA, 19 nt, Artificial Sequence
  Description of Artificial Sequence: Synthetic oligonucleotide
acauggagccaccguaggc

SEQ ID NO: 3026536 - RNA, 19 nt, Artificial Sequence
  Description of Artificial Sequence: Synthetic oligonucleotide
ugcuucuuugucuuagaca

SEQ ID NO: 3026537 - RNA, 19 nt, Artificial Sequence
  Description of Artificial Sequence: Synthetic oligonucleotide
uacgucgguaugucaaacg

SEQ ID NO: 3026538 - RNA, 19 nt, Artificial Sequence
  Description of Artificial Sequence: Synthetic oligonucleotide
caaccuucuugguauaaag

SEQ ID NO: 3026539 - RNA, 19 nt, Artificial Sequence
  Description of Artificial Sequence: Synthetic oligonucleotide
uuuuguuggaggcuguauu

SEQ ID NO: 3026540 - RNA, 19 nt, Artificial Sequence
  Description of Artificial Sequence: Synthetic oligonucleotide
uucaacacuuucacaacaa

SEQ ID NO: 3026541 - RNA, 19 nt, Artificial Sequence
  Description of Artificial Sequence: Synthetic oligonucleotide
ugcuuucccaaccuucuug

SEQ ID NO: 3026542 - RNA, 19 nt, Artificial Sequence
  Description of Artificial Sequence: Synthetic oligonucleotide
auuguaggaaagccuacgu

SEQ ID NO: 3026543 - RNA, 19 nt, Artificial Sequence
  Description of Artificial Sequence: Synthetic oligonucleotide
augcuucuuugucuuagac

SEQ ID NO: 3026544 - RNA, 19 nt, Artificial Sequence
  Description of Artificial Sequence: Synthetic oligonucleotide
aaagguaaacaauccuguu

SEQ ID NO: 3026545 - RNA, 19 nt, Artificial Sequence
  Description of Artificial Sequence: Synthetic oligonucleotide
uucuuugucuuagacaguc

SEQ ID NO: 3026546 - RNA, 19 nt, Artificial Sequence
  Description of Artificial Sequence: Synthetic oligonucleotide
agacugcagauuuauuuug

SEQ ID NO: 3026547 - RNA, 19 nt, Artificial Sequence
  Description of Artificial Sequence: Synthetic oligonucleotide
guugccagggguucgagac

SEQ ID NO: 3026548 - RNA, 19 nt, Artificial Sequence
  Description of Artificial Sequence: Synthetic oligonucleotide
cuuugucuuagacagucuc

SEQ ID NO: 3026549 - RNA, 19 nt, Artificial Sequence
  Description of Artificial Sequence: Synthetic oligonucleotide
agcacgaaccccucgaagu

SEQ ID NO: 3026550 - RNA, 19 nt, Artificial Sequence
  Description of Artificial Sequence: Synthetic oligonucleotide
gucuuagacagucucauaa

SEQ ID NO: 3026551 - RNA, 19 nt, Artificial Sequence
  Description of Artificial Sequence: Synthetic oligonucleotide
uucccaaccuucuugguau

SEQ ID NO: 3026552 - RNA, 19 nt, Artificial Sequence
  Description of Artificial Sequence: Synthetic oligonucleotide
cacuuucacaacaauuuuc

SEQ ID NO: 3026553 - RNA, 19 nt, Artificial Sequence
  Description of Artificial Sequence: Synthetic oligonucleotide
cauaagaacuuucggucug

SEQ ID NO: 3026554 - RNA, 19 nt, Artificial Sequence
  Description of Artificial Sequence: Synthetic oligonucleotide
cuucuugguauaaagguaa

SEQ ID NO: 3026555 - RNA, 19 nt, Artificial Sequence
  Description of Artificial Sequence: Synthetic oligonucleotide
agccuaguuuuguuggagg

SEQ ID NO: 3026556 - RNA, 19 nt, Artificial Sequence
  Description of Artificial Sequence: Synthetic oligonucleotide
auggagccaccguaggccc

SEQ ID NO: 3026557 - RNA, 19 nt, Artificial Sequence
  Description of Artificial Sequence: Synthetic oligonucleotide
acaacaauuuucugcuccu

SEQ ID NO: 3026558 - RNA, 19 nt, Artificial Sequence
  Description of Artificial Sequence: Synthetic oligonucleotide
aaagccuacgucgguaugu

SEQ ID NO: 3026559 - RNA, 19 nt, Artificial Sequence
  Description of Artificial Sequence: Synthetic oligonucleotide
auuuucugcuccucaauaa

SEQ ID NO: 3026560 - RNA, 19 nt, Artificial Sequence
  Description of Artificial Sequence: Synthetic oligonucleotide
cuaguuuuguuggaggcug

SEQ ID NO: 3026561 - RNA, 19 nt, Artificial Sequence
  Description of Artificial Sequence: Synthetic oligonucleotide
auaaggaaagcccgcuuga

SEQ ID NO: 3026562 - RNA, 19 nt, Artificial Sequence
  Description of Artificial Sequence: Synthetic oligonucleotide
uuaggugcuuucccaaccu

SEQ ID NO: 3026563 - RNA, 19 nt, Artificial Sequence
  Description of Artificial Sequence: Synthetic oligonucleotide
uuguaggaaagccuacguc

SEQ ID NO: 3026564 - RNA, 19 nt, Artificial Sequence
  Description of Artificial Sequence: Synthetic oligonucleotide
cuccucaauaaggaaagcc

SEQ ID NO: 3026565 - RNA, 19 nt, Artificial Sequence
  Description of Artificial Sequence: Synthetic oligonucleotide
ucaauaaggaaagcccgcu

SEQ ID NO: 3026566 - RNA, 19 nt, Artificial Sequence
  Description of Artificial Sequence: Synthetic oligonucleotide
ucgguaugucaaacgcugg

SEQ ID NO: 3026567 - RNA, 19 nt, Artificial Sequence
  Description of Artificial Sequence: Synthetic oligonucleotide
guaggaaagccuacgucgg

SEQ ID NO: 3026568 - RNA, 19 nt, Artificial Sequence
  Description of Artificial Sequence: Synthetic oligonucleotide
ccucaauaaggaaagcccg

SEQ ID NO: 3026569 - RNA, 19 nt, Artificial Sequence
  Description of Artificial Sequence: Synthetic oligonucleotide
accgcaugcggauuuaggu

SEQ ID NO: 3026570 - RNA, 19 nt, Artificial Sequence
  Description of Artificial Sequence: Synthetic oligonucleotide
cauggagccaccguaggcc

SEQ ID NO: 3026571 - RNA, 19 nt, Artificial Sequence
  Description of Artificial Sequence: Synthetic oligonucleotide
cuuagacagucucauaaga

SEQ ID NO: 3026572 - RNA, 19 nt, Artificial Sequence
  Description of Artificial Sequence: Synthetic oligonucleotide
ucacggacacacuuggcac

SEQ ID NO: 3026573 - RNA, 19 nt, Artificial Sequence
  Description of Artificial Sequence: Synthetic oligonucleotide
uuucccaaccuucuuggua

SEQ ID NO: 3026574 - RNA, 19 nt, Artificial Sequence
  Description of Artificial Sequence: Synthetic oligonucleotide
cugucacggacacacuugg

SEQ ID NO: 3026575 - RNA, 19 nt, Artificial Sequence
  Description of Artificial Sequence: Synthetic oligonucleotide
acaauuuucugcuccucaa

SEQ ID NO: 3026576 - RNA, 19 nt, Artificial Sequence
  Description of Artificial Sequence: Synthetic oligonucleotide
acugcagauuuauuuugcu

SEQ ID NO: 3026577 - RNA, 19 nt, Artificial Sequence
  Description of Artificial Sequence: Synthetic oligonucleotide
ucaacacuuucacaacaau

SEQ ID NO: 3026578 - RNA, 19 nt, Artificial Sequence
  Description of Artificial Sequence: Synthetic oligonucleotide
aaacgcuggaccauucuga

SEQ ID NO: 3026579 - RNA, 19 nt, Artificial Sequence
  Description of Artificial Sequence: Synthetic oligonucleotide
gucgguaugucaaacgcug

SEQ ID NO: 3026580 - RNA, 19 nt, Artificial Sequence
  Description of Artificial Sequence: Synthetic oligonucleotide
gaggcuguauuguaggaaa

SEQ ID NO: 3026581 - RNA, 19 nt, Artificial Sequence
  Description of Artificial Sequence: Synthetic oligonucleotide
agacagccuaguuuuguug

SEQ ID NO: 3026582 - RNA, 19 nt, Artificial Sequence
  Description of Artificial Sequence: Synthetic oligonucleotide
gauuuaggugcuuucccaa

SEQ ID NO: 3026583 - RNA, 19 nt, Artificial Sequence
  Description of Artificial Sequence: Synthetic oligonucleotide
uugcuuucuggcucugugc

SEQ ID NO: 3026584 - RNA, 19 nt, Artificial Sequence
  Description of Artificial Sequence: Synthetic oligonucleotide
uuucggucugacagcacga

SEQ ID NO: 3026585 - RNA, 19 nt, Artificial Sequence
  Description of Artificial Sequence: Synthetic oligonucleotide
ucuugguauaaagguaaac

SEQ ID NO: 3026586 - RNA, 19 nt, Artificial Sequence
  Description of Artificial Sequence: Synthetic oligonucleotide
ucaaacgcuggaccauucu

SEQ ID NO: 3026587 - RNA, 19 nt, Artificial Sequence
  Description of Artificial Sequence: Synthetic oligonucleotide
gacugcagauuuauuuugc

SEQ ID NO: 3026588 - RNA, 19 nt, Artificial Sequence
  Description of Artificial Sequence: Synthetic oligonucleotide
uugauccugucacggacac

SEQ ID NO: 3026589 - RNA, 19 nt, Artificial Sequence
  Description of Artificial Sequence: Synthetic oligonucleotide
gcuuucccaaccuucuugg

SEQ ID NO: 3026590 - RNA, 19 nt, Artificial Sequence
  Description of Artificial Sequence: Synthetic oligonucleotide
gucacggacacacuuggca

SEQ ID NO: 3026591 - RNA, 19 nt, Artificial Sequence
  Description of Artificial Sequence: Synthetic oligonucleotide
uugucuuagacagucucau

SEQ ID NO: 3026592 - RNA, 19 nt, Artificial Sequence
  Description of Artificial Sequence: Synthetic oligonucleotide
cuuucuggcucugugcuug

SEQ ID NO: 3026593 - RNA, 19 nt, Artificial Sequence
  Description of Artificial Sequence: Synthetic oligonucleotide
caaacgcuggaccauucug

SEQ ID NO: 3026594 - RNA, 19 nt, Artificial Sequence
  Description of Artificial Sequence: Synthetic oligonucleotide
aagccuacgucgguauguc

SEQ ID NO: 3026595 - RNA, 19 nt, Artificial Sequence
  Description of Artificial Sequence: Synthetic oligonucleotide
ugacaugcuucuuugucuu

SEQ ID NO: 3026596 - RNA, 19 nt, Artificial Sequence
  Description of Artificial Sequence: Synthetic oligonucleotide
guuggaggcuguauuguag

SEQ ID NO: 3026597 - RNA, 19 nt, Artificial Sequence
  Description of Artificial Sequence: Synthetic oligonucleotide
ugcuugugccuucaacacu

SEQ ID NO: 3026598 - RNA, 19 nt, Artificial Sequence
  Description of Artificial Sequence: Synthetic oligonucleotide
gugccuucaacacuuucac

SEQ ID NO: 3026599 - RNA, 19 nt, Artificial Sequence
  Description of Artificial Sequence: Synthetic oligonucleotide
agucugccugggcacacac

SEQ ID NO: 3026600 - RNA, 19 nt, Artificial Sequence
  Description of Artificial Sequence: Synthetic oligonucleotide
cuucaacacuuucacaaca

SEQ ID NO: 3026601 - RNA, 19 nt, Artificial Sequence
  Description of Artificial Sequence: Synthetic oligonucleotide
aaccccucgaagucugccu

SEQ ID NO: 3026602 - RNA, 19 nt, Artificial Sequence
  Description of Artificial Sequence: Synthetic oligonucleotide
ucuuugucuuagacagucu

SEQ ID NO: 3026603 - RNA, 19 nt, Artificial Sequence
  Description of Artificial Sequence: Synthetic oligonucleotide
ugacagcacgaaccccucg

SEQ ID NO: 3026604 - RNA, 19 nt, Artificial Sequence
  Description of Artificial Sequence: Synthetic oligonucleotide
ucgaagucugccugggcac

SEQ ID NO: 3026605 - RNA, 19 nt, Artificial Sequence
  Description of Artificial Sequence: Synthetic oligonucleotide
ucugcuccucaauaaggaa

SEQ ID NO: 3026606 - RNA, 19 nt, Artificial Sequence
  Description of Artificial Sequence: Synthetic oligonucleotide
guaaacaauccuguugcca

SEQ ID NO: 3026607 - RNA, 19 nt, Artificial Sequence
  Description of Artificial Sequence: Synthetic oligonucleotide
uucuugguauaaagguaaa

SEQ ID NO: 3026608 - RNA, 19 nt, Artificial Sequence
  Description of Artificial Sequence: Synthetic oligonucleotide
agggguucgagacagccua

SEQ ID NO: 3026609 - RNA, 19 nt, Artificial Sequence
  Description of Artificial Sequence: Synthetic oligonucleotide
acacuuucacaacaauuuu

SEQ ID NO: 3026610 - RNA, 19 nt, Artificial Sequence
  Description of Artificial Sequence: Synthetic oligonucleotide
gcuguauuguaggaaagcc

SEQ ID NO: 3026611 - RNA, 19 nt, Artificial Sequence
  Description of Artificial Sequence: Synthetic oligonucleotide
ugccugggcacacaccgca

SEQ ID NO: 3026612 - RNA, 19 nt, Artificial Sequence
  Description of Artificial Sequence: Synthetic oligonucleotide
gccuucaacacuuucacaa

SEQ ID NO: 3026613 - RNA, 19 nt, Artificial Sequence
  Description of Artificial Sequence: Synthetic oligonucleotide
ugccagggguucgagacag

SEQ ID NO: 3026614 - RNA, 19 nt, Artificial Sequence
  Description of Artificial Sequence: Synthetic oligonucleotide
acaauccuguugccagggg

SEQ ID NO: 3026615 - RNA, 19 nt, Artificial Sequence
  Description of Artificial Sequence: Synthetic oligonucleotide
gugcuugugccuucaacac

SEQ ID NO: 3026616 - RNA, 19 nt, Artificial Sequence
  Description of Artificial Sequence: Synthetic oligonucleotide
cagucucauaagaacuuuc

SEQ ID NO: 3026617 - RNA, 19 nt, Artificial Sequence
  Description of Artificial Sequence: Synthetic oligonucleotide
cugcugacaugcuucuuug

SEQ ID NO: 3026618 - RNA, 19 nt, Artificial Sequence
  Description of Artificial Sequence: Synthetic oligonucleotide
uguuggaggcuguauugua

SEQ ID NO: 3026619 - RNA, 19 nt, Artificial Sequence
  Description of Artificial Sequence: Synthetic oligonucleotide
gaaagccuacgucgguaug

SEQ ID NO: 3026620 - RNA, 19 nt, Artificial Sequence
  Description of Artificial Sequence: Synthetic oligonucleotide
uuguuggaggcuguauugu

SEQ ID NO: 3026621 - RNA, 19 nt, Artificial Sequence
  Description of Artificial Sequence: Synthetic oligonucleotide
cucgaagucugccugggca

SEQ ID NO: 3026622 - RNA, 19 nt, Artificial Sequence
  Description of Artificial Sequence: Synthetic oligonucleotide
uccugucacggacacacuu

SEQ ID NO: 3026623 - RNA, 19 nt, Artificial Sequence
  Description of Artificial Sequence: Synthetic oligonucleotide
cacauggagccaccguagg

SEQ ID NO: 3026624 - RNA, 19 nt, Artificial Sequence
  Description of Artificial Sequence: Synthetic oligonucleotide
aauccuguugccagggguu

SEQ ID NO: 3026625 - RNA, 19 nt, Artificial Sequence
  Description of Artificial Sequence: Synthetic oligonucleotide
uggaggcuguauuguagga

SEQ ID NO: 3026626 - RNA, 19 nt, Artificial Sequence
  Description of Artificial Sequence: Synthetic oligonucleotide
cugggcacacaccgcaugc

SEQ ID NO: 3026627 - RNA, 19 nt, Artificial Sequence
  Description of Artificial Sequence: Synthetic oligonucleotide
guaggcccugcugacaugc

SEQ ID NO: 3026628 - RNA, 19 nt, Artificial Sequence
  Description of Artificial Sequence: Synthetic oligonucleotide
aggugcuuucccaaccuuc

SEQ ID NO: 3026629 - RNA, 19 nt, Artificial Sequence
  Description of Artificial Sequence: Synthetic oligonucleotide
uaggaaagccuacgucggu

SEQ ID NO: 3026630 - RNA, 19 nt, Artificial Sequence
  Description of Artificial Sequence: Synthetic oligonucleotide
acggacacacuuggcacac

SEQ ID NO: 3026631 - RNA, 19 nt, Artificial Sequence
  Description of Artificial Sequence: Synthetic oligonucleotide
ggucugacagcacgaaccc

SEQ ID NO: 3026632 - RNA, 19 nt, Artificial Sequence
  Description of Artificial Sequence: Synthetic oligonucleotide
ggauuuaggugcuuuccca

SEQ ID NO: 3026633 - RNA, 19 nt, Artificial Sequence
  Description of Artificial Sequence: Synthetic oligonucleotide
ugucacggacacacuuggc

SEQ ID NO: 3026634 - RNA, 19 nt, Artificial Sequence
  Description of Artificial Sequence: Synthetic oligonucleotide
cuugauccugucacggaca

SEQ ID NO: 3026635 - RNA, 19 nt, Artificial Sequence
  Description of Artificial Sequence: Synthetic oligonucleotide
uggaccauucugagugccu

SEQ ID NO: 3026636 - RNA, 19 nt, Artificial Sequence
  Description of Artificial Sequence: Synthetic oligonucleotide
ugcggauuuaggugcuuuc

SEQ ID NO: 3026637 - RNA, 19 nt, Artificial Sequence
  Description of Artificial Sequence: Synthetic oligonucleotide
caccgcaugcggauuuagg

SEQ ID NO: 3026638 - RNA, 19 nt, Artificial Sequence
  Description of Artificial Sequence: Synthetic oligonucleotide
uuggcacacauggagccac

SEQ ID NO: 3026639 - RNA, 19 nt, Artificial Sequence
  Description of Artificial Sequence: Synthetic oligonucleotide
uaguuuuguuggaggcugu

SEQ ID NO: 3026640 - RNA, 19 nt, Artificial Sequence
  Description of Artificial Sequence: Synthetic oligonucleotide
acagccuaguuuuguugga

SEQ ID NO: 3026641 - RNA, 19 nt, Artificial Sequence
  Description of Artificial Sequence: Synthetic oligonucleotide
auaagaacuuucggucuga

SEQ ID NO: 3026642 - RNA, 19 nt, Artificial Sequence
  Description of Artificial Sequence: Synthetic oligonucleotide
cugcuccucaauaaggaaa

SEQ ID NO: 3026643 - RNA, 19 nt, Artificial Sequence
  Description of Artificial Sequence: Synthetic oligonucleotide
gguaaacaauccuguugcc

SEQ ID NO: 3026644 - RNA, 19 nt, Artificial Sequence
  Description of Artificial Sequence: Synthetic oligonucleotide
ucggucugacagcacgaac

SEQ ID NO: 3026645 - RNA, 19 nt, Artificial Sequence
  Description of Artificial Sequence: Synthetic oligonucleotide
uguugccagggguucgaga

SEQ ID NO: 3026646 - RNA, 19 nt, Artificial Sequence
  Description of Artificial Sequence: Synthetic oligonucleotide
ugccuucaacacuuucaca

SEQ ID NO: 3026647 - RNA, 19 nt, Artificial Sequence
  Description of Artificial Sequence: Synthetic oligonucleotide
gccuaguuuuguuggaggc

SEQ ID NO: 3026648 - RNA, 19 nt, Artificial Sequence
  Description of Artificial Sequence: Synthetic oligonucleotide
acacauggagccaccguag

SEQ ID NO: 3026649 - RNA, 19 nt, Artificial Sequence
  Description of Artificial Sequence: Synthetic oligonucleotide
aagcccgcuugauccuguc

SEQ ID NO: 3026650 - RNA, 19 nt, Artificial Sequence
  Description of Artificial Sequence: Synthetic oligonucleotide
gcagauuuauuuugcuuuc

SEQ ID NO: 3026651 - RNA, 19 nt, Artificial Sequence
  Description of Artificial Sequence: Synthetic oligonucleotide
ucgagacagccuaguuuug

SEQ ID NO: 3026652 - RNA, 19 nt, Artificial Sequence
  Description of Artificial Sequence: Synthetic oligonucleotide
accccucgaagucugccug

SEQ ID NO: 3026653 - RNA, 19 nt, Artificial Sequence
  Description of Artificial Sequence: Synthetic oligonucleotide
cugugcuugugccuucaac

SEQ ID NO: 3026654 - RNA, 19 nt, Artificial Sequence
  Description of Artificial Sequence: Synthetic oligonucleotide
aaaagacugcagauuuauu

SEQ ID NO: 3026655 - RNA, 19 nt, Artificial Sequence
  Description of Artificial Sequence: Synthetic oligonucleotide
gcuugauccugucacggac

SEQ ID NO: 3026656 - RNA, 19 nt, Artificial Sequence
  Description of Artificial Sequence: Synthetic oligonucleotide
uugugccuucaacacuuuc

SEQ ID NO: 3026657 - RNA, 19 nt, Artificial Sequence
  Description of Artificial Sequence: Synthetic oligonucleotide
ucacaacaauuuucugcuc

SEQ ID NO: 3026658 - RNA, 19 nt, Artificial Sequence
  Description of Artificial Sequence: Synthetic oligonucleotide
guauuguaggaaagccuac

SEQ ID NO: 3026659 - RNA, 19 nt, Artificial Sequence
  Description of Artificial Sequence: Synthetic oligonucleotide
cgcuggaccauucugagug

SEQ ID NO: 3026660 - RNA, 19 nt, Artificial Sequence
  Description of Artificial Sequence: Synthetic oligonucleotide
uaagaacuuucggucugac

SEQ ID NO: 3026661 - RNA, 19 nt, Artificial Sequence
  Description of Artificial Sequence: Synthetic oligonucleotide
cuguauuguaggaaagccu

SEQ ID NO: 3026662 - RNA, 19 nt, Artificial Sequence
  Description of Artificial Sequence: Synthetic oligonucleotide
cugacaugcuucuuugucu

SEQ ID NO: 3026663 - RNA, 19 nt, Artificial Sequence
  Description of Artificial Sequence: Synthetic oligonucleotide
gguaugucaaacgcuggac

SEQ ID NO: 3026664 - RNA, 19 nt, Artificial Sequence
  Description of Artificial Sequence: Synthetic oligonucleotide
ugucuuagacagucucaua

SEQ ID NO: 3026665 - RNA, 19 nt, Artificial Sequence
  Description of Artificial Sequence: Synthetic oligonucleotide
uugccagggguucgagaca

SEQ ID NO: 3026666 - RNA, 19 nt, Artificial Sequence
  Description of Artificial Sequence: Synthetic oligonucleotide
uccuguugccagggguucg

SEQ ID NO: 3026667 - RNA, 19 nt, Artificial Sequence
  Description of Artificial Sequence: Synthetic oligonucleotide
uaaggaaagcccgcuugau

SEQ ID NO: 3026668 - RNA, 19 nt, Artificial Sequence
  Description of Artificial Sequence: Synthetic oligonucleotide
gaaagcccgcuugauccug

SEQ ID NO: 3026669 - RNA, 19 nt, Artificial Sequence
  Description of Artificial Sequence: Synthetic oligonucleotide
gaaccccucgaagucugcc

SEQ ID NO: 3026670 - RNA, 19 nt, Artificial Sequence
  Description of Artificial Sequence: Synthetic oligonucleotide
ugcugacaugcuucuuugu

SEQ ID NO: 3026671 - RNA, 19 nt, Artificial Sequence
  Description of Artificial Sequence: Synthetic oligonucleotide
ggcuguauuguaggaaagc

SEQ ID NO: 3026672 - RNA, 19 nt, Artificial Sequence
  Description of Artificial Sequence: Synthetic oligonucleotide
auccuguugccagggguuc

SEQ ID NO: 3026673 - RNA, 19 nt, Artificial Sequence
  Description of Artificial Sequence: Synthetic oligonucleotide
cgcaugcggauuuaggugc

SEQ ID NO: 3026674 - RNA, 19 nt, Artificial Sequence
  Description of Artificial Sequence: Synthetic oligonucleotide
cacacauggagccaccgua

SEQ ID NO: 3026675 - RNA, 19 nt, Artificial Sequence
  Description of Artificial Sequence: Synthetic oligonucleotide
cuggaccauucugagugcc

SEQ ID NO: 3026676 - RNA, 19 nt, Artificial Sequence
  Description of Artificial Sequence: Synthetic oligonucleotide
cagccuaguuuuguuggag

SEQ ID NO: 3026677 - RNA, 19 nt, Artificial Sequence
  Description of Artificial Sequence: Synthetic oligonucleotide
cagcacgaaccccucgaag

SEQ ID NO: 3026678 - RNA, 19 nt, Artificial Sequence
  Description of Artificial Sequence: Synthetic oligonucleotide
ccuucaacacuuucacaac

SEQ ID NO: 3026679 - RNA, 19 nt, Artificial Sequence
  Description of Artificial Sequence: Synthetic oligonucleotide
ugucaaacgcuggaccauu

SEQ ID NO: 3026680 - RNA, 19 nt, Artificial Sequence
  Description of Artificial Sequence: Synthetic oligonucleotide
gggcacacaccgcaugcgg

SEQ ID NO: 3026681 - RNA, 19 nt, Artificial Sequence
  Description of Artificial Sequence: Synthetic oligonucleotide
uuuugcuuucuggcucugu

SEQ ID NO: 3026682 - RNA, 19 nt, Artificial Sequence
  Description of Artificial Sequence: Synthetic oligonucleotide
acagucucauaagaacuuu

SEQ ID NO: 3026683 - RNA, 19 nt, Artificial Sequence
  Description of Artificial Sequence: Synthetic oligonucleotide
aggcuguauuguaggaaag

SEQ ID NO: 3026684 - RNA, 19 nt, Artificial Sequence
  Description of Artificial Sequence: Synthetic oligonucleotide
cuacgucgguaugucaaac

SEQ ID NO: 3026685 - RNA, 19 nt, Artificial Sequence
  Description of Artificial Sequence: Synthetic oligonucleotide
caugcuucuuugucuuaga

SEQ ID NO: 3026686 - RNA, 19 nt, Artificial Sequence
  Description of Artificial Sequence: Synthetic oligonucleotide
caacacuuucacaacaauu

SEQ ID NO: 3026687 - RNA, 19 nt, Artificial Sequence
  Description of Artificial Sequence: Synthetic oligonucleotide
uggcacacauggagccacc

SEQ ID NO: 3026688 - RNA, 19 nt, Artificial Sequence
  Description of Artificial Sequence: Synthetic oligonucleotide
guucgagacagccuaguuu

SEQ ID NO: 3026689 - RNA, 19 nt, Artificial Sequence
  Description of Artificial Sequence: Synthetic oligonucleotide
uaggugcuuucccaaccuu

SEQ ID NO: 3026690 - RNA, 19 nt, Artificial Sequence
  Description of Artificial Sequence: Synthetic oligonucleotide
cacggacacacuuggcaca

SEQ ID NO: 3026691 - RNA, 19 nt, Artificial Sequence
  Description of Artificial Sequence: Synthetic oligonucleotide
ccugucacggacacacuug

SEQ ID NO: 3026692 - RNA, 19 nt, Artificial Sequence
  Description of Artificial Sequence: Synthetic oligonucleotide
uucggucugacagcacgaa

SEQ ID NO: 3026693 - RNA, 19 nt, Artificial Sequence
  Description of Artificial Sequence: Synthetic oligonucleotide
aaagcccgcuugauccugu

SEQ ID NO: 3026694 - RNA, 19 nt, Artificial Sequence
  Description of Artificial Sequence: Synthetic oligonucleotide
uuucuggcucugugcuugu

SEQ ID NO: 3026695 - RNA, 19 nt, Artificial Sequence
  Description of Artificial Sequence: Synthetic oligonucleotide
ucugugcuugugccuucaa

SEQ ID NO: 3026696 - RNA, 19 nt, Artificial Sequence
  Description of Artificial Sequence: Synthetic oligonucleotide
cugacagcacgaaccccuc

SEQ ID NO: 3026697 - RNA, 19 nt, Artificial Sequence
  Description of Artificial Sequence: Synthetic oligonucleotide
augucaaacgcuggaccau

SEQ ID NO: 3026698 - RNA, 19 nt, Artificial Sequence
  Description of Artificial Sequence: Synthetic oligonucleotide
uggcucugugcuugugccu

SEQ ID NO: 3026699 - RNA, 19 nt, Artificial Sequence
  Description of Artificial Sequence: Synthetic oligonucleotide
acacaccgcaugcggauuu

SEQ ID NO: 3026700 - RNA, 19 nt, Artificial Sequence
  Description of Artificial Sequence: Synthetic oligonucleotide
gcccgcuugauccugucac

SEQ ID NO: 3026701 - RNA, 19 nt, Artificial Sequence
  Description of Artificial Sequence: Synthetic oligonucleotide
aggaaagccuacgucggua

SEQ ID NO: 3026702 - RNA, 19 nt, Artificial Sequence
  Description of Artificial Sequence: Synthetic oligonucleotide
gcggauuuaggugcuuucc

SEQ ID NO: 3026703 - RNA, 19 nt, Artificial Sequence
  Description of Artificial Sequence: Synthetic oligonucleotide
gaagucugccugggcacac

SEQ ID NO: 3026704 - RNA, 19 nt, Artificial Sequence
  Description of Artificial Sequence: Synthetic oligonucleotide
gacagucucauaagaacuu

SEQ ID NO: 3026705 - RNA, 19 nt, Artificial Sequence
  Description of Artificial Sequence: Synthetic oligonucleotide
ccgcaugcggauuuaggug

SEQ ID NO: 3026706 - RNA, 19 nt, Artificial Sequence
  Description of Artificial Sequence: Synthetic oligonucleotide
acgaaccccucgaagucug

SEQ ID NO: 3026707 - RNA, 19 nt, Artificial Sequence
  Description of Artificial Sequence: Synthetic oligonucleotide
aagucugccugggcacaca

SEQ ID NO: 3026708 - RNA, 19 nt, Artificial Sequence
  Description of Artificial Sequence: Synthetic oligonucleotide
cggauuuaggugcuuuccc

SEQ ID NO: 3026709 - RNA, 19 nt, Artificial Sequence
  Description of Artificial Sequence: Synthetic oligonucleotide
caccguaggcccugcugac

SEQ ID NO: 3026710 - RNA, 19 nt, Artificial Sequence
  Description of Artificial Sequence: Synthetic oligonucleotide
acgcuggaccauucugagu

SEQ ID NO: 3026711 - RNA, 19 nt, Artificial Sequence
  Description of Artificial Sequence: Synthetic oligonucleotide
uggagccaccguaggcccu

SEQ ID NO: 3026712 - RNA, 19 nt, Artificial Sequence
  Description of Artificial Sequence: Synthetic oligonucleotide
agccuacgucgguauguca

SEQ ID NO: 3026713 - RNA, 19 nt, Artificial Sequence
  Description of Artificial Sequence: Synthetic oligonucleotide
cugccugggcacacaccgc

SEQ ID NO: 3026714 - RNA, 19 nt, Artificial Sequence
  Description of Artificial Sequence: Synthetic oligonucleotide
acaccgcaugcggauuuag

SEQ ID NO: 3026715 - RNA, 19 nt, Artificial Sequence
  Description of Artificial Sequence: Synthetic oligonucleotide
gagacagccuaguuuuguu

SEQ ID NO: 3026716 - RNA, 19 nt, Artificial Sequence
  Description of Artificial Sequence: Synthetic oligonucleotide
gucugacagcacgaacccc

SEQ ID NO: 3026717 - RNA, 19 nt, Artificial Sequence
  Description of Artificial Sequence: Synthetic oligonucleotide
ccuucuugguauaaaggua

SEQ ID NO: 3026718 - RNA, 19 nt, Artificial Sequence
  Description of Artificial Sequence: Synthetic oligonucleotide
gacaugcuucuuugucuua

SEQ ID NO: 3026719 - RNA, 19 nt, Artificial Sequence
  Description of Artificial Sequence: Synthetic oligonucleotide
gaccauucugagugccucu

SEQ ID NO: 3026720 - RNA, 19 nt, Artificial Sequence
  Description of Artificial Sequence: Synthetic oligonucleotide
ccagggguucgagacagcc

SEQ ID NO: 3026721 - RNA, 19 nt, Artificial Sequence
  Description of Artificial Sequence: Synthetic oligonucleotide
gcacgaaccccucgaaguc

SEQ ID NO: 3026722 - RNA, 19 nt, Artificial Sequence
  Description of Artificial Sequence: Synthetic oligonucleotide
ggaccauucugagugccuc

SEQ ID NO: 3026723 - RNA, 19 nt, Artificial Sequence
  Description of Artificial Sequence: Synthetic oligonucleotide
uaggcccugcugacaugcu

SEQ ID NO: 3026724 - RNA, 19 nt, Artificial Sequence
  Description of Artificial Sequence: Synthetic oligonucleotide
caauuuucugcuccucaau

SEQ ID NO: 3026725 - RNA, 19 nt, Artificial Sequence
  Description of Artificial Sequence: Synthetic oligonucleotide
cccgcuugauccugucacg

SEQ ID NO: 3026726 - RNA, 19 nt, Artificial Sequence
  Description of Artificial Sequence: Synthetic oligonucleotide
gcuggaccauucugagugc

SEQ ID NO: 3026727 - RNA, 19 nt, Artificial Sequence
  Description of Artificial Sequence: Synthetic oligonucleotide
cuuggcacacauggagcca

SEQ ID NO: 3026728 - RNA, 19 nt, Artificial Sequence
  Description of Artificial Sequence: Synthetic oligonucleotide
gucaaacgcuggaccauuc

SEQ ID NO: 3026729 - RNA, 19 nt, Artificial Sequence
  Description of Artificial Sequence: Synthetic oligonucleotide
cugcagauuuauuuugcuu

SEQ ID NO: 3026730 - RNA, 19 nt, Artificial Sequence
  Description of Artificial Sequence: Synthetic oligonucleotide
gccaccguaggcccugcug

SEQ ID NO: 3026731 - RNA, 19 nt, Artificial Sequence
  Description of Artificial Sequence: Synthetic oligonucleotide
aggcccugcugacaugcuu

SEQ ID NO: 3026732 - RNA, 19 nt, Artificial Sequence
  Description of Artificial Sequence: Synthetic oligonucleotide
ccgcuugauccugucacgg

SEQ ID NO: 3026733 - RNA, 19 nt, Artificial Sequence
  Description of Artificial Sequence: Synthetic oligonucleotide
augcggauuuaggugcuuu

SEQ ID NO: 3026734 - RNA, 19 nt, Artificial Sequence
  Description of Artificial Sequence: Synthetic oligonucleotide
ggaggcuguauuguaggaa

SEQ ID NO: 3026735 - RNA, 19 nt, Artificial Sequence
  Description of Artificial Sequence: Synthetic oligonucleotide
ggugcuuucccaaccuucu

SEQ ID NO: 3026736 - RNA, 19 nt, Artificial Sequence
  Description of Artificial Sequence: Synthetic oligonucleotide
guuuuguuggaggcuguau

SEQ ID NO: 3026737 - RNA, 19 nt, Artificial Sequence
  Description of Artificial Sequence: Synthetic oligonucleotide
ggcccugcugacaugcuuc

SEQ ID NO: 3026738 - RNA, 19 nt, Artificial Sequence
  Description of Artificial Sequence: Synthetic oligonucleotide
accguaggcccugcugaca

SEQ ID NO: 3026739 - RNA, 19 nt, Artificial Sequence
  Description of Artificial Sequence: Synthetic oligonucleotide
gucugccugggcacacacc

SEQ ID NO: 3026740 - RNA, 19 nt, Artificial Sequence
  Description of Artificial Sequence: Synthetic oligonucleotide
cuucuuugucuuagacagu

SEQ ID NO: 3026741 - RNA, 19 nt, Artificial Sequence
  Description of Artificial Sequence: Synthetic oligonucleotide
cagauuuauuuugcuuucu

SEQ ID NO: 3026742 - RNA, 19 nt, Artificial Sequence
  Description of Artificial Sequence: Synthetic oligonucleotide
gccuacgucgguaugucaa

SEQ ID NO: 3026743 - RNA, 19 nt, Artificial Sequence
  Description of Artificial Sequence: Synthetic oligonucleotide
ggaaagccuacgucgguau

SEQ ID NO: 3026744 - RNA, 19 nt, Artificial Sequence
  Description of Artificial Sequence: Synthetic oligonucleotide
cuguugccagggguucgag

SEQ ID NO: 3026745 - RNA, 19 nt, Artificial Sequence
  Description of Artificial Sequence: Synthetic oligonucleotide
ccaccguaggcccugcuga

SEQ ID NO: 3026746 - RNA, 19 nt, Artificial Sequence
  Description of Artificial Sequence: Synthetic oligonucleotide
caauaaggaaagcccgcuu

SEQ ID NO: 3026747 - RNA, 19 nt, Artificial Sequence
  Description of Artificial Sequence: Synthetic oligonucleotide
ggacacacuuggcacacau

SEQ ID NO: 3026748 - RNA, 19 nt, Artificial Sequence
  Description of Artificial Sequence: Synthetic oligonucleotide
cuuucccaaccuucuuggu

SEQ ID NO: 3026749 - RNA, 19 nt, Artificial Sequence
  Description of Artificial Sequence: Synthetic oligonucleotide
ccccucgaagucugccugg

SEQ ID NO: 3026750 - RNA, 19 nt, Artificial Sequence
  Description of Artificial Sequence: Synthetic oligonucleotide
ccugggcacacaccgcaug

SEQ ID NO: 3026751 - RNA, 19 nt, Artificial Sequence
  Description of Artificial Sequence: Synthetic oligonucleotide
ggagccaccguaggcccug

SEQ ID NO: 3026752 - RNA, 19 nt, Artificial Sequence
  Description of Artificial Sequence: Synthetic oligonucleotide
gcuccucaauaaggaaagc

SEQ ID NO: 3026753 - RNA, 19 nt, Artificial Sequence
  Description of Artificial Sequence: Synthetic oligonucleotide
gcuugugccuucaacacuu

SEQ ID NO: 3026754 - RNA, 19 nt, Artificial Sequence
  Description of Artificial Sequence: Synthetic oligonucleotide
ggcacacaccgcaugcgga

SEQ ID NO: 3026755 - RNA, 19 nt, Artificial Sequence
  Description of Artificial Sequence: Synthetic oligonucleotide
ggaaagcccgcuugauccu

SEQ ID NO: 3026756 - RNA, 19 nt, Artificial Sequence
  Description of Artificial Sequence: Synthetic oligonucleotide
cucugugcuugugccuuca

SEQ ID NO: 3026757 - RNA, 19 nt, Artificial Sequence
  Description of Artificial Sequence: Synthetic oligonucleotide
cagggguucgagacagccu

SEQ ID NO: 3026758 - RNA, 19 nt, Artificial Sequence
  Description of Artificial Sequence: Synthetic oligonucleotide
ccuacgucgguaugucaaa

SEQ ID NO: 3026759 - RNA, 19 nt, Artificial Sequence
  Description of Artificial Sequence: Synthetic oligonucleotide
cccucgaagucugccuggg

SEQ ID NO: 3026760 - RNA, 19 nt, Artificial Sequence
  Description of Artificial Sequence: Synthetic oligonucleotide
gggguucgagacagccuag

SEQ ID NO: 3026761 - RNA, 19 nt, Artificial Sequence
  Description of Artificial Sequence: Synthetic oligonucleotide
ccucgaagucugccugggc

SEQ ID NO: 3026762 - RNA, 19 nt, Artificial Sequence
  Description of Artificial Sequence: Synthetic oligonucleotide
cacgaaccccucgaagucu

SEQ ID NO: 3026763 - RNA, 19 nt, Artificial Sequence
  Description of Artificial Sequence: Synthetic oligonucleotide
agccaccguaggcccugcu

SEQ ID NO: 3026764 - RNA, 19 nt, Artificial Sequence
  Description of Artificial Sequence: Synthetic oligonucleotide
cgguaugucaaacgcugga

SEQ ID NO: 3026765 - RNA, 19 nt, Artificial Sequence
  Description of Artificial Sequence: Synthetic oligonucleotide
auccugucacggacacacu

SEQ ID NO: 3026766 - RNA, 19 nt, Artificial Sequence
  Description of Artificial Sequence: Synthetic oligonucleotide
gguucgagacagccuaguu

SEQ ID NO: 3026767 - RNA, 19 nt, Artificial Sequence
  Description of Artificial Sequence: Synthetic oligonucleotide
gagccaccguaggcccugc

SEQ ID NO: 3026768 - RNA, 19 nt, Artificial Sequence
  Description of Artificial Sequence: Synthetic oligonucleotide
ccugcugacaugcuucuuu

SEQ ID NO: 3026769 - RNA, 19 nt, Artificial Sequence
  Description of Artificial Sequence: Synthetic oligonucleotide
ccaaccuucuugguauaaa

SEQ ID NO: 3026770 - RNA, 19 nt, Artificial Sequence
  Description of Artificial Sequence: Synthetic oligonucleotide
ccuaguuuuguuggaggcu

SEQ ID NO: 3026771 - RNA, 19 nt, Artificial Sequence
  Description of Artificial Sequence: Synthetic oligonucleotide
gcacacaccgcaugcggau

SEQ ID NO: 3026772 - RNA, 19 nt, Artificial Sequence
  Description of Artificial Sequence: Synthetic oligonucleotide
gcucugugcuugugccuuc

SEQ ID NO: 3026773 - RNA, 19 nt, Artificial Sequence
  Description of Artificial Sequence: Synthetic oligonucleotide
gugcuuucccaaccuucuu

SEQ ID NO: 3026774 - RNA, 19 nt, Artificial Sequence
  Description of Artificial Sequence: Synthetic oligonucleotide
cuugugccuucaacacuuu

SEQ ID NO: 3026775 - RNA, 19 nt, Artificial Sequence
  Description of Artificial Sequence: Synthetic oligonucleotide
cgaaccccucgaagucugc

SEQ ID NO: 3026776 - RNA, 19 nt, Artificial Sequence
  Description of Artificial Sequence: Synthetic oligonucleotide
ggcucugugcuugugccuu

SEQ ID NO: 3026777 - RNA, 19 nt, Artificial Sequence
  Description of Artificial Sequence: Synthetic oligonucleotide
ccuguugccagggguucga

SEQ ID NO: 3026778 - RNA, 19 nt, Artificial Sequence
  Description of Artificial Sequence: Synthetic oligonucleotide
cacaccgcaugcggauuua

SEQ ID NO: 3026779 - RNA, 19 nt, Artificial Sequence
  Description of Artificial Sequence: Synthetic oligonucleotide
cgucgguaugucaaacgcu

SEQ ID NO: 3026780 - RNA, 19 nt, Artificial Sequence
  Description of Artificial Sequence: Synthetic oligonucleotide
cgcuugauccugucacgga

SEQ ID NO: 3026781 - RNA, 19 nt, Artificial Sequence
  Description of Artificial Sequence: Synthetic oligonucleotide
ggguucgagacagccuagu

SEQ ID NO: 3026782 - RNA, 19 nt, Artificial Sequence
  Description of Artificial Sequence: Synthetic oligonucleotide
cguaggcccugcugacaug

SEQ ID NO: 3026783 - RNA, 19 nt, Artificial Sequence
  Description of Artificial Sequence: Synthetic oligonucleotide
gcccugcugacaugcuucu

SEQ ID NO: 3026784 - RNA, 19 nt, Artificial Sequence
  Description of Artificial Sequence: Synthetic oligonucleotide
gcuuucuggcucugugcuu

SEQ ID NO: 3026785 - RNA, 19 nt, Artificial Sequence
  Description of Artificial Sequence: Synthetic oligonucleotide
gcaugcggauuuaggugcu

SEQ ID NO: 3026786 - RNA, 19 nt, Artificial Sequence
  Description of Artificial Sequence: Synthetic oligonucleotide
cccaaccuucuugguauaa

SEQ ID NO: 3026787 - RNA, 19 nt, Artificial Sequence
  Description of Artificial Sequence: Synthetic oligonucleotide
cgaagucugccugggcaca

SEQ ID NO: 3026788 - RNA, 19 nt, Artificial Sequence
  Description of Artificial Sequence: Synthetic oligonucleotide
ccguaggcccugcugacau

SEQ ID NO: 3026789 - RNA, 19 nt, Artificial Sequence
  Description of Artificial Sequence: Synthetic oligonucleotide
gccagggguucgagacagc

SEQ ID NO: 3026790 - RNA, 19 nt, Artificial Sequence
  Description of Artificial Sequence: Synthetic oligonucleotide
cacacaccgcaugcggauu

SEQ ID NO: 3026791 - RNA, 19 nt, Artificial Sequence
  Description of Artificial Sequence: Synthetic oligonucleotide
cgagacagccuaguuuugu

SEQ ID NO: 3026792 - RNA, 19 nt, Artificial Sequence
  Description of Artificial Sequence: Synthetic oligonucleotide
caugcggauuuaggugcuu

SEQ ID NO: 3026793 - RNA, 19 nt, Artificial Sequence
  Description of Artificial Sequence: Synthetic oligonucleotide
gccugggcacacaccgcau

SEQ ID NO: 3026794 - RNA, 19 nt, Artificial Sequence
  Description of Artificial Sequence: Synthetic oligonucleotide
uuuuguuuuguuuuguuug

SEQ ID NO: 3026795 - RNA, 19 nt, Artificial Sequence
  Description of Artificial Sequence: Synthetic oligonucleotide
aagcuuuuguuuuggauuc

SEQ ID NO: 3026796 - RNA, 19 nt, Artificial Sequence
  Description of Artificial Sequence: Synthetic oligonucleotide
aaagcuuuuguuuuggauu

SEQ ID NO: 3026797 - RNA, 19 nt, Artificial Sequence
  Description of Artificial Sequence: Synthetic oligonucleotide
uuuguuuuggauucuuuug

SEQ ID NO: 3026798 - RNA, 19 nt, Artificial Sequence
  Description of Artificial Sequence: Synthetic oligonucleotide
uuguuuuggauucuuuugu

SEQ ID NO: 3026799 - RNA, 19 nt, Artificial Sequence
  Description of Artificial Sequence: Synthetic oligonucleotide
gauuaaagcuuuuguuuug

SEQ ID NO: 3026800 - RNA, 19 nt, Artificial Sequence
  Description of Artificial Sequence: Synthetic oligonucleotide
uaggccagcacucugcuac

SEQ ID NO: 3026801 - RNA, 19 nt, Artificial Sequence
  Description of Artificial Sequence: Synthetic oligonucleotide
auuaaagcuuuuguuuugg

SEQ ID NO: 3026802 - RNA, 19 nt, Artificial Sequence
  Description of Artificial Sequence: Synthetic oligonucleotide
uuuuguuuuggauucuuuu

SEQ ID NO: 3026803 - RNA, 19 nt, Artificial Sequence
  Description of Artificial Sequence: Synthetic oligonucleotide
uaaagcuuuuguuuuggau

SEQ ID NO: 3026804 - RNA, 19 nt, Artificial Sequence
  Description of Artificial Sequence: Synthetic oligonucleotide
cuuuaggccagcacucugc

SEQ ID NO: 3026805 - RNA, 19 nt, Artificial Sequence
  Description of Artificial Sequence: Synthetic oligonucleotide
uccacuguguagaccaggc

SEQ ID NO: 3026806 - RNA, 19 nt, Artificial Sequence
  Description of Artificial Sequence: Synthetic oligonucleotide
ugggauuaaagcuuuuguu

SEQ ID NO: 3026807 - RNA, 19 nt, Artificial Sequence
  Description of Artificial Sequence: Synthetic oligonucleotide
caaugccuggcuuuaggcc

SEQ ID NO: 3026808 - RNA, 19 nt, Artificial Sequence
  Description of Artificial Sequence: Synthetic oligonucleotide
accaaugccuggcuuuagg

SEQ ID NO: 3026809 - RNA, 19 nt, Artificial Sequence
  Description of Artificial Sequence: Synthetic oligonucleotide
uuaaagcuuuuguuuugga

SEQ ID NO: 3026810 - RNA, 19 nt, Artificial Sequence
  Description of Artificial Sequence: Synthetic oligonucleotide
aggcaggcgguaccaaugc

SEQ ID NO: 3026811 - RNA, 19 nt, Artificial Sequence
  Description of Artificial Sequence: Synthetic oligonucleotide
uuuaggccagcacucugcu

SEQ ID NO: 3026812 - RNA, 19 nt, Artificial Sequence
  Description of Artificial Sequence: Synthetic oligonucleotide
uggcacucggcucuggaga

SEQ ID NO: 3026813 - RNA, 19 nt, Artificial Sequence
  Description of Artificial Sequence: Synthetic oligonucleotide
aaaggcaggcgguaccaau

SEQ ID NO: 3026814 - RNA, 19 nt, Artificial Sequence
  Description of Artificial Sequence: Synthetic oligonucleotide
uguuuuggauucuuuuguu

SEQ ID NO: 3026815 - RNA, 19 nt, Artificial Sequence
  Description of Artificial Sequence: Synthetic oligonucleotide
uuggauucuuuuguuuugu

SEQ ID NO: 3026816 - RNA, 19 nt, Artificial Sequence
  Description of Artificial Sequence: Synthetic oligonucleotide
uggcuuuaggccagcacuc

SEQ ID NO: 3026817 - RNA, 19 nt, Artificial Sequence
  Description of Artificial Sequence: Synthetic oligonucleotide
uucuuuuguuuuguuuugu

SEQ ID NO: 3026818 - RNA, 19 nt, Artificial Sequence
  Description of Artificial Sequence: Synthetic oligonucleotide
aaggcaggcgguaccaaug

SEQ ID NO: 3026819 - RNA, 19 nt, Artificial Sequence
  Description of Artificial Sequence: Synthetic oligonucleotide
uuuccacuguguagaccag

SEQ ID NO: 3026820 - RNA, 19 nt, Artificial Sequence
  Description of Artificial Sequence: Synthetic oligonucleotide
uuccacuguguagaccagg

SEQ ID NO: 3026821 - RNA, 19 nt, Artificial Sequence
  Description of Artificial Sequence: Synthetic oligonucleotide
ucggcucuggagaccaggc

SEQ ID NO: 3026822 - RNA, 19 nt, Artificial Sequence
  Description of Artificial Sequence: Synthetic oligonucleotide
agcacucugcuacuuaauu

SEQ ID NO: 3026823 - RNA, 19 nt, Artificial Sequence
  Description of Artificial Sequence: Synthetic oligonucleotide
caggcgguaccaaugccug

SEQ ID NO: 3026824 - RNA, 19 nt, Artificial Sequence
  Description of Artificial Sequence: Synthetic oligonucleotide
cuauccuggcacucggcuc

SEQ ID NO: 3026825 - RNA, 19 nt, Artificial Sequence
  Description of Artificial Sequence: Synthetic oligonucleotide
guuuuguuuuguuuguuuu

SEQ ID NO: 3026826 - RNA, 19 nt, Artificial Sequence
  Description of Artificial Sequence: Synthetic oligonucleotide
gggauuaaagcuuuuguuu

SEQ ID NO: 3026827 - RNA, 19 nt, Artificial Sequence
  Description of Artificial Sequence: Synthetic oligonucleotide
cuggcuuuaggccagcacu

SEQ ID NO: 3026828 - RNA, 19 nt, Artificial Sequence
  Description of Artificial Sequence: Synthetic oligonucleotide
ccaaugccuggcuuuaggc

SEQ ID NO: 3026829 - RNA, 19 nt, Artificial Sequence
  Description of Artificial Sequence: Synthetic oligonucleotide
cuggcacucggcucuggag

SEQ ID NO: 3026830 - RNA, 19 nt, Artificial Sequence
  Description of Artificial Sequence: Synthetic oligonucleotide
acucugcuacuuaauuuug

SEQ ID NO: 3026831 - RNA, 19 nt, Artificial Sequence
  Description of Artificial Sequence: Synthetic oligonucleotide
ggauuaaagcuuuuguuuu

SEQ ID NO: 3026832 - RNA, 19 nt, Artificial Sequence
  Description of Artificial Sequence: Synthetic oligonucleotide
uggauucuuuuguuuuguu

SEQ ID NO: 3026833 - RNA, 19 nt, Artificial Sequence
  Description of Artificial Sequence: Synthetic oligonucleotide
cugggauuaaagcuuuugu

SEQ ID NO: 3026834 - RNA, 19 nt, Artificial Sequence
  Description of Artificial Sequence: Synthetic oligonucleotide
cacucugcuacuuaauuuu

SEQ ID NO: 3026835 - RNA, 19 nt, Artificial Sequence
  Description of Artificial Sequence: Synthetic oligonucleotide
aggcgguaccaaugccugg

SEQ ID NO: 3026836 - RNA, 19 nt, Artificial Sequence
  Description of Artificial Sequence: Synthetic oligonucleotide
cucggcucuggagaccagg

SEQ ID NO: 3026837 - RNA, 19 nt, Artificial Sequence
  Description of Artificial Sequence: Synthetic oligonucleotide
gcugggauuaaagcuuuug

SEQ ID NO: 3026838 - RNA, 19 nt, Artificial Sequence
  Description of Artificial Sequence: Synthetic oligonucleotide
uaccaaugccuggcuuuag

SEQ ID NO: 3026839 - RNA, 19 nt, Artificial Sequence
  Description of Artificial Sequence: Synthetic oligonucleotide
ggcgguaccaaugccuggc

SEQ ID NO: 3026840 - RNA, 19 nt, Artificial Sequence
  Description of Artificial Sequence: Synthetic oligonucleotide
uaaaggcaggcgguaccaa

SEQ ID NO: 3026841 - RNA, 19 nt, Artificial Sequence
  Description of Artificial Sequence: Synthetic oligonucleotide
gcuuuaggccagcacucug

SEQ ID NO: 3026842 - RNA, 19 nt, Artificial Sequence
  Description of Artificial Sequence: Synthetic oligonucleotide
uuaggccagcacucugcua

SEQ ID NO: 3026843 - RNA, 19 nt, Artificial Sequence
  Description of Artificial Sequence: Synthetic oligonucleotide
agcuuuuguuuuggauucu

SEQ ID NO: 3026844 - RNA, 19 nt, Artificial Sequence
  Description of Artificial Sequence: Synthetic oligonucleotide
ggcacucggcucuggagac

SEQ ID NO: 3026845 - RNA, 19 nt, Artificial Sequence
  Description of Artificial Sequence: Synthetic oligonucleotide
augccuggcuuuaggccag

SEQ ID NO: 3026846 - RNA, 19 nt, Artificial Sequence
  Description of Artificial Sequence: Synthetic oligonucleotide
aggccagcacucugcuacu

SEQ ID NO: 3026847 - RNA, 19 nt, Artificial Sequence
  Description of Artificial Sequence: Synthetic oligonucleotide
gguaccaaugccuggcuuu

SEQ ID NO: 3026848 - RNA, 19 nt, Artificial Sequence
  Description of Artificial Sequence: Synthetic oligonucleotide
guaccaaugccuggcuuua

SEQ ID NO: 3026849 - RNA, 19 nt, Artificial Sequence
  Description of Artificial Sequence: Synthetic oligonucleotide
ggcaggcgguaccaaugcc

SEQ ID NO: 3026850 - RNA, 19 nt, Artificial Sequence
  Description of Artificial Sequence: Synthetic oligonucleotide
gggauuaaaggcaggcggu

SEQ ID NO: 3026851 - RNA, 19 nt, Artificial Sequence
  Description of Artificial Sequence: Synthetic oligonucleotide
ccagcacucugcuacuuaa

SEQ ID NO: 3026852 - RNA, 19 nt, Artificial Sequence
  Description of Artificial Sequence: Synthetic oligonucleotide
gcacucugcuacuuaauuu

SEQ ID NO: 3026853 - RNA, 19 nt, Artificial Sequence
  Description of Artificial Sequence: Synthetic oligonucleotide
gcaggcgguaccaaugccu

SEQ ID NO: 3026854 - RNA, 19 nt, Artificial Sequence
  Description of Artificial Sequence: Synthetic oligonucleotide
ucccaggugcugggauuaa

SEQ ID NO: 3026855 - RNA, 19 nt, Artificial Sequence
  Description of Artificial Sequence: Synthetic oligonucleotide
ccuauccuggcacucggcu

SEQ ID NO: 3026856 - RNA, 19 nt, Artificial Sequence
  Description of Artificial Sequence: Synthetic oligonucleotide
cagcacucugcuacuuaau

SEQ ID NO: 3026857 - RNA, 19 nt, Artificial Sequence
  Description of Artificial Sequence: Synthetic oligonucleotide
gccagcacucugcuacuua

SEQ ID NO: 3026858 - RNA, 19 nt, Artificial Sequence
  Description of Artificial Sequence: Synthetic oligonucleotide
gugcugggauuaaagcuuu

SEQ ID NO: 3026859 - RNA, 19 nt, Artificial Sequence
  Description of Artificial Sequence: Synthetic oligonucleotide
acucggcucuggagaccag

SEQ ID NO: 3026860 - RNA, 19 nt, Artificial Sequence
  Description of Artificial Sequence: Synthetic oligonucleotide
gcacucggcucuggagacc

SEQ ID NO: 3026861 - RNA, 19 nt, Artificial Sequence
  Description of Artificial Sequence: Synthetic oligonucleotide
ggcuuuaggccagcacucu

SEQ ID NO: 3026862 - RNA, 19 nt, Artificial Sequence
  Description of Artificial Sequence: Synthetic oligonucleotide
ccuggcacucggcucugga

SEQ ID NO: 3026863 - RNA, 19 nt, Artificial Sequence
  Description of Artificial Sequence: Synthetic oligonucleotide
gcgguaccaaugccuggcu

SEQ ID NO: 3026864 - RNA, 19 nt, Artificial Sequence
  Description of Artificial Sequence: Synthetic oligonucleotide
gccucccaggugcugggau

SEQ ID NO: 3026865 - RNA, 19 nt, Artificial Sequence
  Description of Artificial Sequence: Synthetic oligonucleotide
cccaggugcugggauuaaa

SEQ ID NO: 3026866 - RNA, 19 nt, Artificial Sequence
  Description of Artificial Sequence: Synthetic oligonucleotide
ccucccaggugcugggauu

SEQ ID NO: 3026867 - RNA, 19 nt, Artificial Sequence
  Description of Artificial Sequence: Synthetic oligonucleotide
ggccagcacucugcuacuu

SEQ ID NO: 3026868 - RNA, 19 nt, Artificial Sequence
  Description of Artificial Sequence: Synthetic oligonucleotide
cggcucuggagaccaggcu

SEQ ID NO: 3026869 - RNA, 19 nt, Artificial Sequence
  Description of Artificial Sequence: Synthetic oligonucleotide
cgguaccaaugccuggcuu

SEQ ID NO: 3026870 - RNA, 19 nt, Artificial Sequence
  Description of Artificial Sequence: Synthetic oligonucleotide
aaacauauaaauuacacac

SEQ ID NO: 3026871 - RNA, 19 nt, Artificial Sequence
  Description of Artificial Sequence: Synthetic oligonucleotide
acacuuagaaaauacaugc

SEQ ID NO: 3026872 - RNA, 19 nt, Artificial Sequence
  Description of Artificial Sequence: Synthetic oligonucleotide
uauaauaucuauuacauuc

SEQ ID NO: 3026873 - RNA, 19 nt, Artificial Sequence
  Description of Artificial Sequence: Synthetic oligonucleotide
uuacauuccaauaacuugg

SEQ ID NO: 3026874 - RNA, 19 nt, Artificial Sequence
  Description of Artificial Sequence: Synthetic oligonucleotide
auuccaauaacuuggacac

SEQ ID NO: 3026875 - RNA, 19 nt, Artificial Sequence
  Description of Artificial Sequence: Synthetic oligonucleotide
auauaaauuacacacuuag

SEQ ID NO: 3026876 - RNA, 19 nt, Artificial Sequence
  Description of Artificial Sequence: Synthetic oligonucleotide
aaugacuuuaaauauacau

SEQ ID NO: 3026877 - RNA, 19 nt, Artificial Sequence
  Description of Artificial Sequence: Synthetic oligonucleotide
aaauuacacacuuagaaau

SEQ ID NO: 3026878 - RNA, 19 nt, Artificial Sequence
  Description of Artificial Sequence: Synthetic oligonucleotide
auaaacucagaauucaggg

SEQ ID NO: 3026879 - RNA, 19 nt, Artificial Sequence
  Description of Artificial Sequence: Synthetic oligonucleotide
aauucauacaaacacauua

SEQ ID NO: 3026880 - RNA, 19 nt, Artificial Sequence
  Description of Artificial Sequence: Synthetic oligonucleotide
aaauuugucaaguaugccu

SEQ ID NO: 3026881 - RNA, 19 nt, Artificial Sequence
  Description of Artificial Sequence: Synthetic oligonucleotide
aaauguauaauaucuauua

SEQ ID NO: 3026882 - RNA, 19 nt, Artificial Sequence
  Description of Artificial Sequence: Synthetic oligonucleotide
uuacaaaacauauaaauua

SEQ ID NO: 3026883 - RNA, 19 nt, Artificial Sequence
  Description of Artificial Sequence: Synthetic oligonucleotide
ucaagauaaacucagaauu

SEQ ID NO: 3026884 - RNA, 19 nt, Artificial Sequence
  Description of Artificial Sequence: Synthetic oligonucleotide
aaauacaugcucauaauuc

SEQ ID NO: 3026885 - RNA, 19 nt, Artificial Sequence
  Description of Artificial Sequence: Synthetic oligonucleotide
uguauaauaucuauuacau

SEQ ID NO: 3026886 - RNA, 19 nt, Artificial Sequence
  Description of Artificial Sequence: Synthetic oligonucleotide
ucaaguaugccuauagaag

SEQ ID NO: 3026887 - RNA, 19 nt, Artificial Sequence
  Description of Artificial Sequence: Synthetic oligonucleotide
aacuuggacacuuagaaaa

SEQ ID NO: 3026888 - RNA, 19 nt, Artificial Sequence
  Description of Artificial Sequence: Synthetic oligonucleotide
acuuagaaaauacaugcuc

SEQ ID NO: 3026889 - RNA, 19 nt, Artificial Sequence
  Description of Artificial Sequence: Synthetic oligonucleotide
uuaaauauacauucucaag

SEQ ID NO: 3026890 - RNA, 19 nt, Artificial Sequence
  Description of Artificial Sequence: Synthetic oligonucleotide
ugaaauuugucaaguaugc

SEQ ID NO: 3026891 - RNA, 19 nt, Artificial Sequence
  Description of Artificial Sequence: Synthetic oligonucleotide
ucaaguaugaauucuaaaa

SEQ ID NO: 3026892 - RNA, 19 nt, Artificial Sequence
  Description of Artificial Sequence: Synthetic oligonucleotide
acauucucaagauaaacuc

SEQ ID NO: 3026893 - RNA, 19 nt, Artificial Sequence
  Description of Artificial Sequence: Synthetic oligonucleotide
uuucuugaggcaaucauag

SEQ ID NO: 3026894 - RNA, 19 nt, Artificial Sequence
  Description of Artificial Sequence: Synthetic oligonucleotide
aauacaugcucauaauuca

SEQ ID NO: 3026895 - RNA, 19 nt, Artificial Sequence
  Description of Artificial Sequence: Synthetic oligonucleotide
uugaaauuugucaaguaug

SEQ ID NO: 3026896 - RNA, 19 nt, Artificial Sequence
  Description of Artificial Sequence: Synthetic oligonucleotide
ugacuuuaaauauacauuc

SEQ ID NO: 3026897 - RNA, 19 nt, Artificial Sequence
  Description of Artificial Sequence: Synthetic oligonucleotide
acuuuaaauauacauucuc

SEQ ID NO: 3026898 - RNA, 19 nt, Artificial Sequence
  Description of Artificial Sequence: Synthetic oligonucleotide
uaccaaauguauaauaucu

SEQ ID NO: 3026899 - RNA, 19 nt, Artificial Sequence
  Description of Artificial Sequence: Synthetic oligonucleotide
uauagaagcaacagaacca

SEQ ID NO: 3026900 - RNA, 19 nt, Artificial Sequence
  Description of Artificial Sequence: Synthetic oligonucleotide
cuauagaagcaacagaacc

SEQ ID NO: 3026901 - RNA, 19 nt, Artificial Sequence
  Description of Artificial Sequence: Synthetic oligonucleotide
aauucaggguuucacaucu

SEQ ID NO: 3026902 - RNA, 19 nt, Artificial Sequence
  Description of Artificial Sequence: Synthetic oligonucleotide
caaaacauauaaauuacac

SEQ ID NO: 3026903 - RNA, 19 nt, Artificial Sequence
  Description of Artificial Sequence: Synthetic oligonucleotide
auuacauuccaauaacuug

SEQ ID NO: 3026904 - RNA, 19 nt, Artificial Sequence
  Description of Artificial Sequence: Synthetic oligonucleotide
uuuuaggugagauugcuga

SEQ ID NO: 3026905 - RNA, 19 nt, Artificial Sequence
  Description of Artificial Sequence: Synthetic oligonucleotide
aaauauacauucucaagau

SEQ ID NO: 3026906 - RNA, 19 nt, Artificial Sequence
  Description of Artificial Sequence: Synthetic oligonucleotide
uucagugcagacuagaacu

SEQ ID NO: 3026907 - RNA, 19 nt, Artificial Sequence
  Description of Artificial Sequence: Synthetic oligonucleotide
uuuaaauauacauucucaa

SEQ ID NO: 3026908 - RNA, 19 nt, Artificial Sequence
  Description of Artificial Sequence: Synthetic oligonucleotide
uacaaaacauauaaauuac

SEQ ID NO: 3026909 - RNA, 19 nt, Artificial Sequence
  Description of Artificial Sequence: Synthetic oligonucleotide
ucuauuacauuccaauaac

SEQ ID NO: 3026910 - RNA, 19 nt, Artificial Sequence
  Description of Artificial Sequence: Synthetic oligonucleotide
caaguaugccuauagaagc

SEQ ID NO: 3026911 - RNA, 19 nt, Artificial Sequence
  Description of Artificial Sequence: Synthetic oligonucleotide
agaaaauacaugcucauaa

SEQ ID NO: 3026912 - RNA, 19 nt, Artificial Sequence
  Description of Artificial Sequence: Synthetic oligonucleotide
auaauaucuauuacauucc

SEQ ID NO: 3026913 - RNA, 19 nt, Artificial Sequence
  Description of Artificial Sequence: Synthetic oligonucleotide
auguauaauaucuauuaca

SEQ ID NO: 3026914 - RNA, 19 nt, Artificial Sequence
  Description of Artificial Sequence: Synthetic oligonucleotide
uuugugguuaugagaaagg

SEQ ID NO: 3026915 - RNA, 19 nt, Artificial Sequence
  Description of Artificial Sequence: Synthetic oligonucleotide
auaacuuggacacuuagaa

SEQ ID NO: 3026916 - RNA, 19 nt, Artificial Sequence
  Description of Artificial Sequence: Synthetic oligonucleotide
gauaaacucagaauucagg

SEQ ID NO: 3026917 - RNA, 19 nt, Artificial Sequence
  Description of Artificial Sequence: Synthetic oligonucleotide
ugcagacuagaacucaugg

SEQ ID NO: 3026918 - RNA, 19 nt, Artificial Sequence
  Description of Artificial Sequence: Synthetic oligonucleotide
acaugcucauaauucauac

SEQ ID NO: 3026919 - RNA, 19 nt, Artificial Sequence
  Description of Artificial Sequence: Synthetic oligonucleotide
uuaugagaaagguacuugc

SEQ ID NO: 3026920 - RNA, 19 nt, Artificial Sequence
  Description of Artificial Sequence: Synthetic oligonucleotide
cagacuagaacucaugggc

SEQ ID NO: 3026921 - RNA, 19 nt, Artificial Sequence
  Description of Artificial Sequence: Synthetic oligonucleotide
auaucuauuacauuccaau

SEQ ID NO: 3026922 - RNA, 19 nt, Artificial Sequence
  Description of Artificial Sequence: Synthetic oligonucleotide
uacauucucaagauaaacu

SEQ ID NO: 3026923 - RNA, 19 nt, Artificial Sequence
  Description of Artificial Sequence: Synthetic oligonucleotide
uagaaauucaaguaugaau

SEQ ID NO: 3026924 - RNA, 19 nt, Artificial Sequence
  Description of Artificial Sequence: Synthetic oligonucleotide
aaacucagaauucaggguu

SEQ ID NO: 3026925 - RNA, 19 nt, Artificial Sequence
  Description of Artificial Sequence: Synthetic oligonucleotide
ugcugaaauuucuugaggc

SEQ ID NO: 3026926 - RNA, 19 nt, Artificial Sequence
  Description of Artificial Sequence: Synthetic oligonucleotide
aaaauacaugcucauaauu

SEQ ID NO: 3026927 - RNA, 19 nt, Artificial Sequence
  Description of Artificial Sequence: Synthetic oligonucleotide
ugagaaagguacuugcuug

SEQ ID NO: 3026928 - RNA, 19 nt, Artificial Sequence
  Description of Artificial Sequence: Synthetic oligonucleotide
uuucacaucuugaaauuug

SEQ ID NO: 3026929 - RNA, 19 nt, Artificial Sequence
  Description of Artificial Sequence: Synthetic oligonucleotide
uauaaauuacacacuuaga

SEQ ID NO: 3026930 - RNA, 19 nt, Artificial Sequence
  Description of Artificial Sequence: Synthetic oligonucleotide
uuuugugguuaugagaaag

SEQ ID NO: 3026931 - RNA, 19 nt, Artificial Sequence
  Description of Artificial Sequence: Synthetic oligonucleotide
agaaauucaaguaugaauu

SEQ ID NO: 3026932 - RNA, 19 nt, Artificial Sequence
  Description of Artificial Sequence: Synthetic oligonucleotide
aacacauuacaaaacauau

SEQ ID NO: 3026933 - RNA, 19 nt, Artificial Sequence
  Description of Artificial Sequence: Synthetic oligonucleotide
cacauuacaaaacauauaa

SEQ ID NO: 3026934 - RNA, 19 nt, Artificial Sequence
  Description of Artificial Sequence: Synthetic oligonucleotide
uucauacaaacacauuaca

SEQ ID NO: 3026935 - RNA, 19 nt, Artificial Sequence
  Description of Artificial Sequence: Synthetic oligonucleotide
auucauacaaacacauuac

SEQ ID NO: 3026936 - RNA, 19 nt, Artificial Sequence
  Description of Artificial Sequence: Synthetic oligonucleotide
gugguuaugagaaagguac

SEQ ID NO: 3026937 - RNA, 19 nt, Artificial Sequence
  Description of Artificial Sequence: Synthetic oligonucleotide
uauuacauuccaauaacuu

SEQ ID NO: 3026938 - RNA, 19 nt, Artificial Sequence
  Description of Artificial Sequence: Synthetic oligonucleotide
uugucaaguaugccuauag

SEQ ID NO: 3026939 - RNA, 19 nt, Artificial Sequence
  Description of Artificial Sequence: Synthetic oligonucleotide
ucucaagauaaacucagaa

SEQ ID NO: 3026940 - RNA, 19 nt, Artificial Sequence
  Description of Artificial Sequence: Synthetic oligonucleotide
cuuuaaauauacauucuca

SEQ ID NO: 3026941 - RNA, 19 nt, Artificial Sequence
  Description of Artificial Sequence: Synthetic oligonucleotide
uacaaacacauuacaaaac

SEQ ID NO: 3026942 - RNA, 19 nt, Artificial Sequence
  Description of Artificial Sequence: Synthetic oligonucleotide
aagauaaacucagaauuca

SEQ ID NO: 3026943 - RNA, 19 nt, Artificial Sequence
  Description of Artificial Sequence: Synthetic oligonucleotide
ucuugaggcaaucauaguu

SEQ ID NO: 3026944 - RNA, 19 nt, Artificial Sequence
  Description of Artificial Sequence: Synthetic oligonucleotide
aucuauuacauuccaauaa

SEQ ID NO: 3026945 - RNA, 19 nt, Artificial Sequence
  Description of Artificial Sequence: Synthetic oligonucleotide
cuuagaaaauacaugcuca

SEQ ID NO: 3026946 - RNA, 19 nt, Artificial Sequence
  Description of Artificial Sequence: Synthetic oligonucleotide
aaauucaaguaugaauucu

SEQ ID NO: 3026947 - RNA, 19 nt, Artificial Sequence
  Description of Artificial Sequence: Synthetic oligonucleotide
aaagguacuugcuuguuuu

SEQ ID NO: 3026948 - RNA, 19 nt, Artificial Sequence
  Description of Artificial Sequence: Synthetic oligonucleotide
augcucauaauucauacaa

SEQ ID NO: 3026949 - RNA, 19 nt, Artificial Sequence
  Description of Artificial Sequence: Synthetic oligonucleotide
uaauaucuauuacauucca

SEQ ID NO: 3026950 - RNA, 19 nt, Artificial Sequence
  Description of Artificial Sequence: Synthetic oligonucleotide
ugagauugcugaaauuucu

SEQ ID NO: 3026951 - RNA, 19 nt, Artificial Sequence
  Description of Artificial Sequence: Synthetic oligonucleotide
uugcugaaauuucuugagg

SEQ ID NO: 3026952 - RNA, 19 nt, Artificial Sequence
  Description of Artificial Sequence: Synthetic oligonucleotide
auauacauucucaagauaa

SEQ ID NO: 3026953 - RNA, 19 nt, Artificial Sequence
  Description of Artificial Sequence: Synthetic oligonucleotide
auacauucucaagauaaac

SEQ ID NO: 3026954 - RNA, 19 nt, Artificial Sequence
  Description of Artificial Sequence: Synthetic oligonucleotide
auuacacacuuagaaauuc

SEQ ID NO: 3026955 - RNA, 19 nt, Artificial Sequence
  Description of Artificial Sequence: Synthetic oligonucleotide
uaugccuauagaagcaaca

SEQ ID NO: 3026956 - RNA, 19 nt, Artificial Sequence
  Description of Artificial Sequence: Synthetic oligonucleotide
uuggacacuuagaaaauac

SEQ ID NO: 3026957 - RNA, 19 nt, Artificial Sequence
  Description of Artificial Sequence: Synthetic oligonucleotide
gacacuuagaaaauacaug

SEQ ID NO: 3026958 - RNA, 19 nt, Artificial Sequence
  Description of Artificial Sequence: Synthetic oligonucleotide
cauuccaauaacuuggaca

SEQ ID NO: 3026959 - RNA, 19 nt, Artificial Sequence
  Description of Artificial Sequence: Synthetic oligonucleotide
gauugcugaaauuucuuga

SEQ ID NO: 3026960 - RNA, 19 nt, Artificial Sequence
  Description of Artificial Sequence: Synthetic oligonucleotide
caagauaaacucagaauuc

SEQ ID NO: 3026961 - RNA, 19 nt, Artificial Sequence
  Description of Artificial Sequence: Synthetic oligonucleotide
cauaauucauacaaacaca

SEQ ID NO: 3026962 - RNA, 19 nt, Artificial Sequence
  Description of Artificial Sequence: Synthetic oligonucleotide
uaugagaaagguacuugcu

SEQ ID NO: 3026963 - RNA, 19 nt, Artificial Sequence
  Description of Artificial Sequence: Synthetic oligonucleotide
gaaauucaaguaugaauuc

SEQ ID NO: 3026964 - RNA, 19 nt, Artificial Sequence
  Description of Artificial Sequence: Synthetic oligonucleotide
aacauauaaauuacacacu

SEQ ID NO: 3026965 - RNA, 19 nt, Artificial Sequence
  Description of Artificial Sequence: Synthetic oligonucleotide
gaacucaugggcugaagug

SEQ ID NO: 3026966 - RNA, 19 nt, Artificial Sequence
  Description of Artificial Sequence: Synthetic oligonucleotide
aauauacauucucaagaua

SEQ ID NO: 3026967 - RNA, 19 nt, Artificial Sequence
  Description of Artificial Sequence: Synthetic oligonucleotide
cauuacaaaacauauaaau

SEQ ID NO: 3026968 - RNA, 19 nt, Artificial Sequence
  Description of Artificial Sequence: Synthetic oligonucleotide
uucacaucuugaaauuugu

SEQ ID NO: 3026969 - RNA, 19 nt, Artificial Sequence
  Description of Artificial Sequence: Synthetic oligonucleotide
cacaucuugaaauuuguca

SEQ ID NO: 3026970 - RNA, 19 nt, Artificial Sequence
  Description of Artificial Sequence: Synthetic oligonucleotide
agauugcugaaauuucuug

SEQ ID NO: 3026971 - RNA, 19 nt, Artificial Sequence
  Description of Artificial Sequence: Synthetic oligonucleotide
auucucaagauaaacucag

SEQ ID NO: 3026972 - RNA, 19 nt, Artificial Sequence
  Description of Artificial Sequence: Synthetic oligonucleotide
aauaacuuggacacuuaga

SEQ ID NO: 3026973 - RNA, 19 nt, Artificial Sequence
  Description of Artificial Sequence: Synthetic oligonucleotide
uuacacacuuagaaauuca

SEQ ID NO: 3026974 - RNA, 19 nt, Artificial Sequence
  Description of Artificial Sequence: Synthetic oligonucleotide
uggacacuuagaaaauaca

SEQ ID NO: 3026975 - RNA, 19 nt, Artificial Sequence
  Description of Artificial Sequence: Synthetic oligonucleotide
uauacauucucaagauaaa

SEQ ID NO: 3026976 - RNA, 19 nt, Artificial Sequence
  Description of Artificial Sequence: Synthetic oligonucleotide
aauuugucaaguaugccua

SEQ ID NO: 3026977 - RNA, 19 nt, Artificial Sequence
  Description of Artificial Sequence: Synthetic oligonucleotide
cuuguuuuguucagugcag

SEQ ID NO: 3026978 - RNA, 19 nt, Artificial Sequence
  Description of Artificial Sequence: Synthetic oligonucleotide
uucaggguuucacaucuug

SEQ ID NO: 3026979 - RNA, 19 nt, Artificial Sequence
  Description of Artificial Sequence: Synthetic oligonucleotide
auaauucauacaaacacau

SEQ ID NO: 3026980 - RNA, 19 nt, Artificial Sequence
  Description of Artificial Sequence: Synthetic oligonucleotide
acacuuagaaauucaagua

SEQ ID NO: 3026981 - RNA, 19 nt, Artificial Sequence
  Description of Artificial Sequence: Synthetic oligonucleotide
uaucuauuacauuccaaua

SEQ ID NO: 3026982 - RNA, 19 nt, Artificial Sequence
  Description of Artificial Sequence: Synthetic oligonucleotide
uacacacuuagaaauucaa

SEQ ID NO: 3026983 - RNA, 19 nt, Artificial Sequence
  Description of Artificial Sequence: Synthetic oligonucleotide
cuuagaaauucaaguauga

SEQ ID NO: 3026984 - RNA, 19 nt, Artificial Sequence
  Description of Artificial Sequence: Synthetic oligonucleotide
ugaaauuucuugaggcaau

SEQ ID NO: 3026985 - RNA, 19 nt, Artificial Sequence
  Description of Artificial Sequence: Synthetic oligonucleotide
ucaugggcugaagugaucc

SEQ ID NO: 3026986 - RNA, 19 nt, Artificial Sequence
  Description of Artificial Sequence: Synthetic oligonucleotide
caucuugaaauuugucaag

SEQ ID NO: 3026987 - RNA, 19 nt, Artificial Sequence
  Description of Artificial Sequence: Synthetic oligonucleotide
ugucaaguaugccuauaga

SEQ ID NO: 3026988 - RNA, 19 nt, Artificial Sequence
  Description of Artificial Sequence: Synthetic oligonucleotide
gucaaguaugccuauagaa

SEQ ID NO: 3026989 - RNA, 19 nt, Artificial Sequence
  Description of Artificial Sequence: Synthetic oligonucleotide
aacucaugggcugaaguga

SEQ ID NO: 3026990 - RNA, 19 nt, Artificial Sequence
  Description of Artificial Sequence: Synthetic oligonucleotide
cucauaauucauacaaaca

SEQ ID NO: 3026991 - RNA, 19 nt, Artificial Sequence
  Description of Artificial Sequence: Synthetic oligonucleotide
uucaaguaugaauucuaaa

SEQ ID NO: 3026992 - RNA, 19 nt, Artificial Sequence
  Description of Artificial Sequence: Synthetic oligonucleotide
uugcuuguuuuguucagug

SEQ ID NO: 3026993 - RNA, 19 nt, Artificial Sequence
  Description of Artificial Sequence: Synthetic oligonucleotide
aauucaaguaugaauucua

SEQ ID NO: 3026994 - RNA, 19 nt, Artificial Sequence
  Description of Artificial Sequence: Synthetic oligonucleotide
ugugguuaugagaaaggua

SEQ ID NO: 3026995 - RNA, 19 nt, Artificial Sequence
  Description of Artificial Sequence: Synthetic oligonucleotide
caauaacuuggacacuuag

SEQ ID NO: 3026996 - RNA, 19 nt, Artificial Sequence
  Description of Artificial Sequence: Synthetic oligonucleotide
agaacucaugggcugaagu

SEQ ID NO: 3026997 - RNA, 19 nt, Artificial Sequence
  Description of Artificial Sequence: Synthetic oligonucleotide
ugccuauagaagcaacaga

SEQ ID NO: 3026998 - RNA, 19 nt, Artificial Sequence
  Description of Artificial Sequence: Synthetic oligonucleotide
ucagaauucaggguuucac

SEQ ID NO: 3026999 - RNA, 19 nt, Artificial Sequence
  Description of Artificial Sequence: Synthetic oligonucleotide
guuaugagaaagguacuug

SEQ ID NO: 3027000 - RNA, 19 nt, Artificial Sequence
  Description of Artificial Sequence: Synthetic oligonucleotide
uacauuccaauaacuugga

SEQ ID NO: 3027001 - RNA, 19 nt, Artificial Sequence
  Description of Artificial Sequence: Synthetic oligonucleotide
gacuagaacucaugggcug

SEQ ID NO: 3027002 - RNA, 19 nt, Artificial Sequence
  Description of Artificial Sequence: Synthetic oligonucleotide
gcucauaauucauacaaac

SEQ ID NO: 3027003 - RNA, 19 nt, Artificial Sequence
  Description of Artificial Sequence: Synthetic oligonucleotide
uuagaaauucaaguaugaa

SEQ ID NO: 3027004 - RNA, 19 nt, Artificial Sequence
  Description of Artificial Sequence: Synthetic oligonucleotide
uguuuuguucagugcagac

SEQ ID NO: 3027005 - RNA, 19 nt, Artificial Sequence
  Description of Artificial Sequence: Synthetic oligonucleotide
acauuccaauaacuuggac

SEQ ID NO: 3027006 - RNA, 19 nt, Artificial Sequence
  Description of Artificial Sequence: Synthetic oligonucleotide
ugggcugaagugauccucc

SEQ ID NO: 3027007 - RNA, 19 nt, Artificial Sequence
  Description of Artificial Sequence: Synthetic oligonucleotide
aagguacuugcuuguuuug

SEQ ID NO: 3027008 - RNA, 19 nt, Artificial Sequence
  Description of Artificial Sequence: Synthetic oligonucleotide
aaauuucuugaggcaauca

SEQ ID NO: 3027009 - RNA, 19 nt, Artificial Sequence
  Description of Artificial Sequence: Synthetic oligonucleotide
uguucagugcagacuagaa

SEQ ID NO: 3027010 - RNA, 19 nt, Artificial Sequence
  Description of Artificial Sequence: Synthetic oligonucleotide
aauaucuauuacauuccaa

SEQ ID NO: 3027011 - RNA, 19 nt, Artificial Sequence
  Description of Artificial Sequence: Synthetic oligonucleotide
uaggugagauugcugaaau

SEQ ID NO: 3027012 - RNA, 19 nt, Artificial Sequence
  Description of Artificial Sequence: Synthetic oligonucleotide
uuuguucagugcagacuag

SEQ ID NO: 3027013 - RNA, 19 nt, Artificial Sequence
  Description of Artificial Sequence: Synthetic oligonucleotide
augacuuuaaauauacauu

SEQ ID NO: 3027014 - RNA, 19 nt, Artificial Sequence
  Description of Artificial Sequence: Synthetic oligonucleotide
cauucucaagauaaacuca

SEQ ID NO: 3027015 - RNA, 19 nt, Artificial Sequence
  Description of Artificial Sequence: Synthetic oligonucleotide
aauuacacacuuagaaauu

SEQ ID NO: 3027016 - RNA, 19 nt, Artificial Sequence
  Description of Artificial Sequence: Synthetic oligonucleotide
aaguaugccuauagaagca

SEQ ID NO: 3027017 - RNA, 19 nt, Artificial Sequence
  Description of Artificial Sequence: Synthetic oligonucleotide
acaaaacauauaaauuaca

SEQ ID NO: 3027018 - RNA, 19 nt, Artificial Sequence
  Description of Artificial Sequence: Synthetic oligonucleotide
uacaugcucauaauucaua

SEQ ID NO: 3027019 - RNA, 19 nt, Artificial Sequence
  Description of Artificial Sequence: Synthetic oligonucleotide
agauaaacucagaauucag

SEQ ID NO: 3027020 - RNA, 19 nt, Artificial Sequence
  Description of Artificial Sequence: Synthetic oligonucleotide
augccuauagaagcaacag

SEQ ID NO: 3027021 - RNA, 19 nt, Artificial Sequence
  Description of Artificial Sequence: Synthetic oligonucleotide
uccaauaacuuggacacuu

SEQ ID NO: 3027022 - RNA, 19 nt, Artificial Sequence
  Description of Artificial Sequence: Synthetic oligonucleotide
ugcucauaauucauacaaa

SEQ ID NO: 3027023 - RNA, 19 nt, Artificial Sequence
  Description of Artificial Sequence: Synthetic oligonucleotide
auagaagcaacagaaccau

SEQ ID NO: 3027024 - RNA, 19 nt, Artificial Sequence
  Description of Artificial Sequence: Synthetic oligonucleotide
augagaaagguacuugcuu

SEQ ID NO: 3027025 - RNA, 19 nt, Artificial Sequence
  Description of Artificial Sequence: Synthetic oligonucleotide
gaauucaggguuucacauc

SEQ ID NO: 3027026 - RNA, 19 nt, Artificial Sequence
  Description of Artificial Sequence: Synthetic oligonucleotide
uucucaagauaaacucaga

SEQ ID NO: 3027027 - RNA, 19 nt, Artificial Sequence
  Description of Artificial Sequence: Synthetic oligonucleotide
ugcuuguuuuguucagugc

SEQ ID NO: 3027028 - RNA, 19 nt, Artificial Sequence
  Description of Artificial Sequence: Synthetic oligonucleotide
uugugguuaugagaaaggu

SEQ ID NO: 3027029 - RNA, 19 nt, Artificial Sequence
  Description of Artificial Sequence: Synthetic oligonucleotide
aucuugaaauuugucaagu

SEQ ID NO: 3027030 - RNA, 19 nt, Artificial Sequence
  Description of Artificial Sequence: Synthetic oligonucleotide
ucuugaaauuugucaagua

SEQ ID NO: 3027031 - RNA, 19 nt, Artificial Sequence
  Description of Artificial Sequence: Synthetic oligonucleotide
acuugcuuguuuuguucag

SEQ ID NO: 3027032 - RNA, 19 nt, Artificial Sequence
  Description of Artificial Sequence: Synthetic oligonucleotide
uaauucauacaaacacauu

SEQ ID NO: 3027033 - RNA, 19 nt, Artificial Sequence
  Description of Artificial Sequence: Synthetic oligonucleotide
uaacuuggacacuuagaaa

SEQ ID NO: 3027034 - RNA, 19 nt, Artificial Sequence
  Description of Artificial Sequence: Synthetic oligonucleotide
guucagugcagacuagaac

SEQ ID NO: 3027035 - RNA, 19 nt, Artificial Sequence
  Description of Artificial Sequence: Synthetic oligonucleotide
ucagugcagacuagaacuc

SEQ ID NO: 3027036 - RNA, 19 nt, Artificial Sequence
  Description of Artificial Sequence: Synthetic oligonucleotide
uuuaggugagauugcugaa

SEQ ID NO: 3027037 - RNA, 19 nt, Artificial Sequence
  Description of Artificial Sequence: Synthetic oligonucleotide
ucacaucuugaaauuuguc

SEQ ID NO: 3027038 - RNA, 19 nt, Artificial Sequence
  Description of Artificial Sequence: Synthetic oligonucleotide
gcagacuagaacucauggg

SEQ ID NO: 3027039 - RNA, 19 nt, Artificial Sequence
  Description of Artificial Sequence: Synthetic oligonucleotide
ugguuaugagaaagguacu

SEQ ID NO: 3027040 - RNA, 19 nt, Artificial Sequence
  Description of Artificial Sequence: Synthetic oligonucleotide
acacacuuagaaauucaag

SEQ ID NO: 3027041 - RNA, 19 nt, Artificial Sequence
  Description of Artificial Sequence: Synthetic oligonucleotide
gcuuguuuuguucagugca

SEQ ID NO: 3027042 - RNA, 19 nt, Artificial Sequence
  Description of Artificial Sequence: Synthetic oligonucleotide
gcaaucauaguuuaaauuu

SEQ ID NO: 3027043 - RNA, 19 nt, Artificial Sequence
  Description of Artificial Sequence: Synthetic oligonucleotide
gaggcaaucauaguuuaaa

SEQ ID NO: 3027044 - RNA, 19 nt, Artificial Sequence
  Description of Artificial Sequence: Synthetic oligonucleotide
uuaggugagauugcugaaa

SEQ ID NO: 3027045 - RNA, 19 nt, Artificial Sequence
  Description of Artificial Sequence: Synthetic oligonucleotide
gaaaauacaugcucauaau

SEQ ID NO: 3027046 - RNA, 19 nt, Artificial Sequence
  Description of Artificial Sequence: Synthetic oligonucleotide
uagaagcaacagaaccaug

SEQ ID NO: 3027047 - RNA, 19 nt, Artificial Sequence
  Description of Artificial Sequence: Synthetic oligonucleotide
cuugaaauuugucaaguau

SEQ ID NO: 3027048 - RNA, 19 nt, Artificial Sequence
  Description of Artificial Sequence: Synthetic oligonucleotide
guacuugcuuguuuuguuc

SEQ ID NO: 3027049 - RNA, 19 nt, Artificial Sequence
  Description of Artificial Sequence: Synthetic oligonucleotide
gaaauuucuugaggcaauc

SEQ ID NO: 3027050 - RNA, 19 nt, Artificial Sequence
  Description of Artificial Sequence: Synthetic oligonucleotide
uugaggcaaucauaguuua

SEQ ID NO: 3027051 - RNA, 19 nt, Artificial Sequence
  Description of Artificial Sequence: Synthetic oligonucleotide
uuguuuuguucagugcaga

SEQ ID NO: 3027052 - RNA, 19 nt, Artificial Sequence
  Description of Artificial Sequence: Synthetic oligonucleotide
aggcaaucauaguuuaaau

SEQ ID NO: 3027053 - RNA, 19 nt, Artificial Sequence
  Description of Artificial Sequence: Synthetic oligonucleotide
cagaauucaggguuucaca

SEQ ID NO: 3027054 - RNA, 19 nt, Artificial Sequence
  Description of Artificial Sequence: Synthetic oligonucleotide
aggguuucacaucuugaaa

SEQ ID NO: 3027055 - RNA, 19 nt, Artificial Sequence
  Description of Artificial Sequence: Synthetic oligonucleotide
augggcugaagugauccuc

SEQ ID NO: 3027056 - RNA, 19 nt, Artificial Sequence
  Description of Artificial Sequence: Synthetic oligonucleotide
uuguucagugcagacuaga

SEQ ID NO: 3027057 - RNA, 19 nt, Artificial Sequence
  Description of Artificial Sequence: Synthetic oligonucleotide
ugaggcaaucauaguuuaa

SEQ ID NO: 3027058 - RNA, 19 nt, Artificial Sequence
  Description of Artificial Sequence: Synthetic oligonucleotide
cauauaaauuacacacuua

SEQ ID NO: 3027059 - RNA, 19 nt, Artificial Sequence
  Description of Artificial Sequence: Synthetic oligonucleotide
ugaagugauccuccuccau

SEQ ID NO: 3027060 - RNA, 19 nt, Artificial Sequence
  Description of Artificial Sequence: Synthetic oligonucleotide
cucaagauaaacucagaau

SEQ ID NO: 3027061 - RNA, 19 nt, Artificial Sequence
  Description of Artificial Sequence: Synthetic oligonucleotide
agacuagaacucaugggcu

SEQ ID NO: 3027062 - RNA, 19 nt, Artificial Sequence
  Description of Artificial Sequence: Synthetic oligonucleotide
cuauuacauuccaauaacu

SEQ ID NO: 3027063 - RNA, 19 nt, Artificial Sequence
  Description of Artificial Sequence: Synthetic oligonucleotide
cugaaauuucuugaggcaa

SEQ ID NO: 3027064 - RNA, 19 nt, Artificial Sequence
  Description of Artificial Sequence: Synthetic oligonucleotide
uucuugaggcaaucauagu

SEQ ID NO: 3027065 - RNA, 19 nt, Artificial Sequence
  Description of Artificial Sequence: Synthetic oligonucleotide
auucaaguaugaauucuaa

SEQ ID NO: 3027066 - RNA, 19 nt, Artificial Sequence
  Description of Artificial Sequence: Synthetic oligonucleotide
caugcucauaauucauaca

SEQ ID NO: 3027067 - RNA, 19 nt, Artificial Sequence
  Description of Artificial Sequence: Synthetic oligonucleotide
acucagaauucaggguuuc

SEQ ID NO: 3027068 - RNA, 19 nt, Artificial Sequence
  Description of Artificial Sequence: Synthetic oligonucleotide
gccuauagaagcaacagaa

SEQ ID NO: 3027069 - RNA, 19 nt, Artificial Sequence
  Description of Artificial Sequence: Synthetic oligonucleotide
gagaaagguacuugcuugu

SEQ ID NO: 3027070 - RNA, 19 nt, Artificial Sequence
  Description of Artificial Sequence: Synthetic oligonucleotide
auuugucaaguaugccuau

SEQ ID NO: 3027071 - RNA, 19 nt, Artificial Sequence
  Description of Artificial Sequence: Synthetic oligonucleotide
acuagaacucaugggcuga

SEQ ID NO: 3027072 - RNA, 19 nt, Artificial Sequence
  Description of Artificial Sequence: Synthetic oligonucleotide
gugagauugcugaaauuuc

SEQ ID NO: 3027073 - RNA, 19 nt, Artificial Sequence
  Description of Artificial Sequence: Synthetic oligonucleotide
ccuauagaagcaacagaac

SEQ ID NO: 3027074 - RNA, 19 nt, Artificial Sequence
  Description of Artificial Sequence: Synthetic oligonucleotide
gcugaaauuucuugaggca

SEQ ID NO: 3027075 - RNA, 19 nt, Artificial Sequence
  Description of Artificial Sequence: Synthetic oligonucleotide
cacuuagaaauucaaguau

SEQ ID NO: 3027076 - RNA, 19 nt, Artificial Sequence
  Description of Artificial Sequence: Synthetic oligonucleotide
caggguuucacaucuugaa

SEQ ID NO: 3027077 - RNA, 19 nt, Artificial Sequence
  Description of Artificial Sequence: Synthetic oligonucleotide
aguaugccuauagaagcaa

SEQ ID NO: 3027078 - RNA, 19 nt, Artificial Sequence
  Description of Artificial Sequence: Synthetic oligonucleotide
gacuuuaaauauacauucu

SEQ ID NO: 3027079 - RNA, 19 nt, Artificial Sequence
  Description of Artificial Sequence: Synthetic oligonucleotide
cuugaggcaaucauaguuu

SEQ ID NO: 3027080 - RNA, 19 nt, Artificial Sequence
  Description of Artificial Sequence: Synthetic oligonucleotide
agguacuugcuuguuuugu

SEQ ID NO: 3027081 - RNA, 19 nt, Artificial Sequence
  Description of Artificial Sequence: Synthetic oligonucleotide
aacucagaauucaggguuu

SEQ ID NO: 3027082 - RNA, 19 nt, Artificial Sequence
  Description of Artificial Sequence: Synthetic oligonucleotide
uuugucaaguaugccuaua

SEQ ID NO: 3027083 - RNA, 19 nt, Artificial Sequence
  Description of Artificial Sequence: Synthetic oligonucleotide
accaaauguauaauaucua

SEQ ID NO: 3027084 - RNA, 19 nt, Artificial Sequence
  Description of Artificial Sequence: Synthetic oligonucleotide
uagaacucaugggcugaag

SEQ ID NO: 3027085 - RNA, 19 nt, Artificial Sequence
  Description of Artificial Sequence: Synthetic oligonucleotide
auacaugcucauaauucau

SEQ ID NO: 3027086 - RNA, 19 nt, Artificial Sequence
  Description of Artificial Sequence: Synthetic oligonucleotide
caaucauaguuuaaauuuu

SEQ ID NO: 3027087 - RNA, 19 nt, Artificial Sequence
  Description of Artificial Sequence: Synthetic oligonucleotide
guaugccuauagaagcaac

SEQ ID NO: 3027088 - RNA, 19 nt, Artificial Sequence
  Description of Artificial Sequence: Synthetic oligonucleotide
ggguuucacaucuugaaau

SEQ ID NO: 3027089 - RNA, 19 nt, Artificial Sequence
  Description of Artificial Sequence: Synthetic oligonucleotide
gaaagguacuugcuuguuu

SEQ ID NO: 3027090 - RNA, 19 nt, Artificial Sequence
  Description of Artificial Sequence: Synthetic oligonucleotide
cacuuagaaaauacaugcu

SEQ ID NO: 3027091 - RNA, 19 nt, Artificial Sequence
  Description of Artificial Sequence: Synthetic oligonucleotide
ggugagauugcugaaauuu

SEQ ID NO: 3027092 - RNA, 19 nt, Artificial Sequence
  Description of Artificial Sequence: Synthetic oligonucleotide
guauaauaucuauuacauu

SEQ ID NO: 3027093 - RNA, 19 nt, Artificial Sequence
  Description of Artificial Sequence: Synthetic oligonucleotide
agugcagacuagaacucau

SEQ ID NO: 3027094 - RNA, 19 nt, Artificial Sequence
  Description of Artificial Sequence: Synthetic oligonucleotide
uuccaauaacuuggacacu

SEQ ID NO: 3027095 - RNA, 19 nt, Artificial Sequence
  Description of Artificial Sequence: Synthetic oligonucleotide
gugcagacuagaacucaug

SEQ ID NO: 3027096 - RNA, 19 nt, Artificial Sequence
  Description of Artificial Sequence: Synthetic oligonucleotide
ggcaaucauaguuuaaauu

SEQ ID NO: 3027097 - RNA, 19 nt, Artificial Sequence
  Description of Artificial Sequence: Synthetic oligonucleotide
ccaaauguauaauaucuau

SEQ ID NO: 3027098 - RNA, 19 nt, Artificial Sequence
  Description of Artificial Sequence: Synthetic oligonucleotide
aggugagauugcugaaauu

SEQ ID NO: 3027099 - RNA, 19 nt, Artificial Sequence
  Description of Artificial Sequence: Synthetic oligonucleotide
agaaagguacuugcuuguu

SEQ ID NO: 3027100 - RNA, 19 nt, Artificial Sequence
  Description of Artificial Sequence: Synthetic oligonucleotide
acucaugggcugaagugau

SEQ ID NO: 3027101 - RNA, 19 nt, Artificial Sequence
  Description of Artificial Sequence: Synthetic oligonucleotide
ggacacuuagaaaauacau

SEQ ID NO: 3027102 - RNA, 19 nt, Artificial Sequence
  Description of Artificial Sequence: Synthetic oligonucleotide
cucaugggcugaagugauc

SEQ ID NO: 3027103 - RNA, 19 nt, Artificial Sequence
  Description of Artificial Sequence: Synthetic oligonucleotide
cuuggacacuuagaaaaua

SEQ ID NO: 3027104 - RNA, 19 nt, Artificial Sequence
  Description of Artificial Sequence: Synthetic oligonucleotide
gagauugcugaaauuucuu

SEQ ID NO: 3027105 - RNA, 19 nt, Artificial Sequence
  Description of Artificial Sequence: Synthetic oligonucleotide
gguuucacaucuugaaauu

SEQ ID NO: 3027106 - RNA, 19 nt, Artificial Sequence
  Description of Artificial Sequence: Synthetic oligonucleotide
cagugcagacuagaacuca

SEQ ID NO: 3027107 - RNA, 19 nt, Artificial Sequence
  Description of Artificial Sequence: Synthetic oligonucleotide
guuucacaucuugaaauuu

SEQ ID NO: 3027108 - RNA, 19 nt, Artificial Sequence
  Description of Artificial Sequence: Synthetic oligonucleotide
cucagaauucaggguuuca

SEQ ID NO: 3027109 - RNA, 19 nt, Artificial Sequence
  Description of Artificial Sequence: Synthetic oligonucleotide
cuugcuuguuuuguucagu

SEQ ID NO: 3027110 - RNA, 19 nt, Artificial Sequence
  Description of Artificial Sequence: Synthetic oligonucleotide
gguacuugcuuguuuuguu

SEQ ID NO: 3027111 - RNA, 19 nt, Artificial Sequence
  Description of Artificial Sequence: Synthetic oligonucleotide
gguuaugagaaagguacuu

SEQ ID NO: 3027112 - RNA, 19 nt, Artificial Sequence
  Description of Artificial Sequence: Synthetic oligonucleotide
cuagaacucaugggcugaa

SEQ ID NO: 3027113 - RNA, 19 nt, Artificial Sequence
  Description of Artificial Sequence: Synthetic oligonucleotide
caugggcugaagugauccu

SEQ ID NO: 3027114 - RNA, 19 nt, Artificial Sequence
  Description of Artificial Sequence: Synthetic oligonucleotide
ccaauaacuuggacacuua

SEQ ID NO: 3027115 - RNA, 19 nt, Artificial Sequence
  Description of Artificial Sequence: Synthetic oligonucleotide
auucaggguuucacaucuu

SEQ ID NO: 3027116 - RNA, 19 nt, Artificial Sequence
  Description of Artificial Sequence: Synthetic oligonucleotide
gggcugaagugauccuccu

SEQ ID NO: 3027117 - RNA, 19 nt, Artificial Sequence
  Description of Artificial Sequence: Synthetic oligonucleotide
auucacauaacauuggucc

SEQ ID NO: 3027118 - RNA, 19 nt, Artificial Sequence
  Description of Artificial Sequence: Synthetic oligonucleotide
aauauuuacucaugaaaac

SEQ ID NO: 3027119 - RNA, 19 nt, Artificial Sequence
  Description of Artificial Sequence: Synthetic oligonucleotide
aauaauaaaacaaagcuaa

SEQ ID NO: 3027120 - RNA, 19 nt, Artificial Sequence
  Description of Artificial Sequence: Synthetic oligonucleotide
auaaauaauaaaacaaagc

SEQ ID NO: 3027121 - RNA, 19 nt, Artificial Sequence
  Description of Artificial Sequence: Synthetic oligonucleotide
aaaacguucagcugacuac

SEQ ID NO: 3027122 - RNA, 19 nt, Artificial Sequence
  Description of Artificial Sequence: Synthetic oligonucleotide
aaacuagcguuuccgaugc

SEQ ID NO: 3027123 - RNA, 19 nt, Artificial Sequence
  Description of Artificial Sequence: Synthetic oligonucleotide
uuuaauacccaaaccaagc

SEQ ID NO: 3027124 - RNA, 19 nt, Artificial Sequence
  Description of Artificial Sequence: Synthetic oligonucleotide
uucuuuagcauucacauaa

SEQ ID NO: 3027125 - RNA, 19 nt, Artificial Sequence
  Description of Artificial Sequence: Synthetic oligonucleotide
aauaugcauuaccugacac

SEQ ID NO: 3027126 - RNA, 19 nt, Artificial Sequence
  Description of Artificial Sequence: Synthetic oligonucleotide
agaacgagagauucaagcc

SEQ ID NO: 3027127 - RNA, 19 nt, Artificial Sequence
  Description of Artificial Sequence: Synthetic oligonucleotide
ucuuuugaaaaccauuccc

SEQ ID NO: 3027128 - RNA, 19 nt, Artificial Sequence
  Description of Artificial Sequence: Synthetic oligonucleotide
auauuuacucaugaaaacg

SEQ ID NO: 3027129 - RNA, 19 nt, Artificial Sequence
  Description of Artificial Sequence: Synthetic oligonucleotide
auaugcauuaccugacacc

SEQ ID NO: 3027130 - RNA, 19 nt, Artificial Sequence
  Description of Artificial Sequence: Synthetic oligonucleotide
uauuuacucaugaaaacgu

SEQ ID NO: 3027131 - RNA, 19 nt, Artificial Sequence
  Description of Artificial Sequence: Synthetic oligonucleotide
aaaauaugcauuaccugac

SEQ ID NO: 3027132 - RNA, 19 nt, Artificial Sequence
  Description of Artificial Sequence: Synthetic oligonucleotide
auaacauugguccacaaaa

SEQ ID NO: 3027133 - RNA, 19 nt, Artificial Sequence
  Description of Artificial Sequence: Synthetic oligonucleotide
aaacguucagcugacuacc

SEQ ID NO: 3027134 - RNA, 19 nt, Artificial Sequence
  Description of Artificial Sequence: Synthetic oligonucleotide
accuuuaauacccaaacca

SEQ ID NO: 3027135 - RNA, 19 nt, Artificial Sequence
  Description of Artificial Sequence: Synthetic oligonucleotide
ugcuggucuaugcagaacg

SEQ ID NO: 3027136 - RNA, 19 nt, Artificial Sequence
  Description of Artificial Sequence: Synthetic oligonucleotide
uuaauacccaaaccaagcc

SEQ ID NO: 3027137 - RNA, 19 nt, Artificial Sequence
  Description of Artificial Sequence: Synthetic oligonucleotide
uuacucaugaaaacguuca

SEQ ID NO: 3027138 - RNA, 19 nt, Artificial Sequence
  Description of Artificial Sequence: Synthetic oligonucleotide
uagcauucacauaacauug

SEQ ID NO: 3027139 - RNA, 19 nt, Artificial Sequence
  Description of Artificial Sequence: Synthetic oligonucleotide
gacaccaacuguuuucugg

SEQ ID NO: 3027140 - RNA, 19 nt, Artificial Sequence
  Description of Artificial Sequence: Synthetic oligonucleotide
uuagcauucacauaacauu

SEQ ID NO: 3027141 - RNA, 19 nt, Artificial Sequence
  Description of Artificial Sequence: Synthetic oligonucleotide
aaaaccauucccaauaaaa

SEQ ID NO: 3027142 - RNA, 19 nt, Artificial Sequence
  Description of Artificial Sequence: Synthetic oligonucleotide
acaccaacuguuuucuggc

SEQ ID NO: 3027143 - RNA, 19 nt, Artificial Sequence
  Description of Artificial Sequence: Synthetic oligonucleotide
uaugcauuaccugacacca

SEQ ID NO: 3027144 - RNA, 19 nt, Artificial Sequence
  Description of Artificial Sequence: Synthetic oligonucleotide
uaauacccaaaccaagccc

SEQ ID NO: 3027145 - RNA, 19 nt, Artificial Sequence
  Description of Artificial Sequence: Synthetic oligonucleotide
aacucaagaguucuuuuga

SEQ ID NO: 3027146 - RNA, 19 nt, Artificial Sequence
  Description of Artificial Sequence: Synthetic oligonucleotide
cuuuaauacccaaaccaag

SEQ ID NO: 3027147 - RNA, 19 nt, Artificial Sequence
  Description of Artificial Sequence: Synthetic oligonucleotide
cagaacgagagauucaagc

SEQ ID NO: 3027148 - RNA, 19 nt, Artificial Sequence
  Description of Artificial Sequence: Synthetic oligonucleotide
gaacgagagauucaagccc

SEQ ID NO: 3027149 - RNA, 19 nt, Artificial Sequence
  Description of Artificial Sequence: Synthetic oligonucleotide
ugugaugugaaccugccuu

SEQ ID NO: 3027150 - RNA, 19 nt, Artificial Sequence
  Description of Artificial Sequence: Synthetic oligonucleotide
ugacaauauuuacucauga

SEQ ID NO: 3027151 - RNA, 19 nt, Artificial Sequence
  Description of Artificial Sequence: Synthetic oligonucleotide
uucuuuugaaaaccauucc

SEQ ID NO: 3027152 - RNA, 19 nt, Artificial Sequence
  Description of Artificial Sequence: Synthetic oligonucleotide
uuuacucaugaaaacguuc

SEQ ID NO: 3027153 - RNA, 19 nt, Artificial Sequence
  Description of Artificial Sequence: Synthetic oligonucleotide
caugaaaacguucagcuga

SEQ ID NO: 3027154 - RNA, 19 nt, Artificial Sequence
  Description of Artificial Sequence: Synthetic oligonucleotide
aauacccaaaccaagcccu

SEQ ID NO: 3027155 - RNA, 19 nt, Artificial Sequence
  Description of Artificial Sequence: Synthetic oligonucleotide
cuaccuuuaauacccaaac

SEQ ID NO: 3027156 - RNA, 19 nt, Artificial Sequence
  Description of Artificial Sequence: Synthetic oligonucleotide
aagcaaacuagcguuuccg

SEQ ID NO: 3027157 - RNA, 19 nt, Artificial Sequence
  Description of Artificial Sequence: Synthetic oligonucleotide
aaauaugcauuaccugaca

SEQ ID NO: 3027158 - RNA, 19 nt, Artificial Sequence
  Description of Artificial Sequence: Synthetic oligonucleotide
gaacucaagaguucuuuug

SEQ ID NO: 3027159 - RNA, 19 nt, Artificial Sequence
  Description of Artificial Sequence: Synthetic oligonucleotide
cuuuugaaaaccauuccca

SEQ ID NO: 3027160 - RNA, 19 nt, Artificial Sequence
  Description of Artificial Sequence: Synthetic oligonucleotide
gaugcagacacucuuaggu

SEQ ID NO: 3027161 - RNA, 19 nt, Artificial Sequence
  Description of Artificial Sequence: Synthetic oligonucleotide
uuuugaaaaccauucccaa

SEQ ID NO: 3027162 - RNA, 19 nt, Artificial Sequence
  Description of Artificial Sequence: Synthetic oligonucleotide
gauucaagcccuaauuuac

SEQ ID NO: 3027163 - RNA, 19 nt, Artificial Sequence
  Description of Artificial Sequence: Synthetic oligonucleotide
gaaguuugcuggucuaugc

SEQ ID NO: 3027164 - RNA, 19 nt, Artificial Sequence
  Description of Artificial Sequence: Synthetic oligonucleotide
ugcauuaccugacaccaac

SEQ ID NO: 3027165 - RNA, 19 nt, Artificial Sequence
  Description of Artificial Sequence: Synthetic oligonucleotide
aaagcagaacucaagaguu

SEQ ID NO: 3027166 - RNA, 19 nt, Artificial Sequence
  Description of Artificial Sequence: Synthetic oligonucleotide
aguuugcuggucuaugcag

SEQ ID NO: 3027167 - RNA, 19 nt, Artificial Sequence
  Description of Artificial Sequence: Synthetic oligonucleotide
caaacuagcguuuccgaug

SEQ ID NO: 3027168 - RNA, 19 nt, Artificial Sequence
  Description of Artificial Sequence: Synthetic oligonucleotide
uuaccugacaccaacuguu

SEQ ID NO: 3027169 - RNA, 19 nt, Artificial Sequence
  Description of Artificial Sequence: Synthetic oligonucleotide
uucaagcccuaauuuaccc

SEQ ID NO: 3027170 - RNA, 19 nt, Artificial Sequence
  Description of Artificial Sequence: Synthetic oligonucleotide
uaugcagaacgagagauuc

SEQ ID NO: 3027171 - RNA, 19 nt, Artificial Sequence
  Description of Artificial Sequence: Synthetic oligonucleotide
uaccuuuaauacccaaacc

SEQ ID NO: 3027172 - RNA, 19 nt, Artificial Sequence
  Description of Artificial Sequence: Synthetic oligonucleotide
cuugcagaggggaaguuug

SEQ ID NO: 3027173 - RNA, 19 nt, Artificial Sequence
  Description of Artificial Sequence: Synthetic oligonucleotide
uggcugacaauauuuacuc

SEQ ID NO: 3027174 - RNA, 19 nt, Artificial Sequence
  Description of Artificial Sequence: Synthetic oligonucleotide
guuacuaggggcugaagca

SEQ ID NO: 3027175 - RNA, 19 nt, Artificial Sequence
  Description of Artificial Sequence: Synthetic oligonucleotide
uuucuggcugacaauauuu

SEQ ID NO: 3027176 - RNA, 19 nt, Artificial Sequence
  Description of Artificial Sequence: Synthetic oligonucleotide
ugugugaugugaaccugcc

SEQ ID NO: 3027177 - RNA, 19 nt, Artificial Sequence
  Description of Artificial Sequence: Synthetic oligonucleotide
guucuuuugaaaaccauuc

SEQ ID NO: 3027178 - RNA, 19 nt, Artificial Sequence
  Description of Artificial Sequence: Synthetic oligonucleotide
auuaccugacaccaacugu

SEQ ID NO: 3027179 - RNA, 19 nt, Artificial Sequence
  Description of Artificial Sequence: Synthetic oligonucleotide
agagauucaagcccuaauu

SEQ ID NO: 3027180 - RNA, 19 nt, Artificial Sequence
  Description of Artificial Sequence: Synthetic oligonucleotide
uucacauaacauuggucca

SEQ ID NO: 3027181 - RNA, 19 nt, Artificial Sequence
  Description of Artificial Sequence: Synthetic oligonucleotide
ucaugaaaacguucagcug

SEQ ID NO: 3027182 - RNA, 19 nt, Artificial Sequence
  Description of Artificial Sequence: Synthetic oligonucleotide
uuugaaaaccauucccaau

SEQ ID NO: 3027183 - RNA, 19 nt, Artificial Sequence
  Description of Artificial Sequence: Synthetic oligonucleotide
ugcagacacucuuaggugu

SEQ ID NO: 3027184 - RNA, 19 nt, Artificial Sequence
  Description of Artificial Sequence: Synthetic oligonucleotide
ucaagcccuaauuuacccc

SEQ ID NO: 3027185 - RNA, 19 nt, Artificial Sequence
  Description of Artificial Sequence: Synthetic oligonucleotide
auucaagcccuaauuuacc

SEQ ID NO: 3027186 - RNA, 19 nt, Artificial Sequence
  Description of Artificial Sequence: Synthetic oligonucleotide
cugacaauauuuacucaug

SEQ ID NO: 3027187 - RNA, 19 nt, Artificial Sequence
  Description of Artificial Sequence: Synthetic oligonucleotide
ugaaaaccauucccaauaa

SEQ ID NO: 3027188 - RNA, 19 nt, Artificial Sequence
  Description of Artificial Sequence: Synthetic oligonucleotide
uaggugugugaugugaacc

SEQ ID NO: 3027189 - RNA, 19 nt, Artificial Sequence
  Description of Artificial Sequence: Synthetic oligonucleotide
ucuuaggugugugauguga

SEQ ID NO: 3027190 - RNA, 19 nt, Artificial Sequence
  Description of Artificial Sequence: Synthetic oligonucleotide
agauucaagcccuaauuua

SEQ ID NO: 3027191 - RNA, 19 nt, Artificial Sequence
  Description of Artificial Sequence: Synthetic oligonucleotide
uguuuucuggcugacaaua

SEQ ID NO: 3027192 - RNA, 19 nt, Artificial Sequence
  Description of Artificial Sequence: Synthetic oligonucleotide
gaagcaaacuagcguuucc

SEQ ID NO: 3027193 - RNA, 19 nt, Artificial Sequence
  Description of Artificial Sequence: Synthetic oligonucleotide
augugaaccugccuugcag

SEQ ID NO: 3027194 - RNA, 19 nt, Artificial Sequence
  Description of Artificial Sequence: Synthetic oligonucleotide
aacgagagauucaagcccu

SEQ ID NO: 3027195 - RNA, 19 nt, Artificial Sequence
  Description of Artificial Sequence: Synthetic oligonucleotide
ucuggcugacaauauuuac

SEQ ID NO: 3027196 - RNA, 19 nt, Artificial Sequence
  Description of Artificial Sequence: Synthetic oligonucleotide
gacaauauuuacucaugaa

SEQ ID NO: 3027197 - RNA, 19 nt, Artificial Sequence
  Description of Artificial Sequence: Synthetic oligonucleotide
acucuuaggugugugaugu

SEQ ID NO: 3027198 - RNA, 19 nt, Artificial Sequence
  Description of Artificial Sequence: Synthetic oligonucleotide
aaaccaagcccugagguua

SEQ ID NO: 3027199 - RNA, 19 nt, Artificial Sequence
  Description of Artificial Sequence: Synthetic oligonucleotide
gguuacuaggggcugaagc

SEQ ID NO: 3027200 - RNA, 19 nt, Artificial Sequence
  Description of Artificial Sequence: Synthetic oligonucleotide
cauucacauaacauugguc

SEQ ID NO: 3027201 - RNA, 19 nt, Artificial Sequence
  Description of Artificial Sequence: Synthetic oligonucleotide
cauuaccugacaccaacug

SEQ ID NO: 3027202 - RNA, 19 nt, Artificial Sequence
  Description of Artificial Sequence: Synthetic oligonucleotide
gaaaacguucagcugacua

SEQ ID NO: 3027203 - RNA, 19 nt, Artificial Sequence
  Description of Artificial Sequence: Synthetic oligonucleotide
cucaugaaaacguucagcu

SEQ ID NO: 3027204 - RNA, 19 nt, Artificial Sequence
  Description of Artificial Sequence: Synthetic oligonucleotide
agcccuaauuuaccccugc

SEQ ID NO: 3027205 - RNA, 19 nt, Artificial Sequence
  Description of Artificial Sequence: Synthetic oligonucleotide
ucuuuagcauucacauaac

SEQ ID NO: 3027206 - RNA, 19 nt, Artificial Sequence
  Description of Artificial Sequence: Synthetic oligonucleotide
ugcagaacgagagauucaa

SEQ ID NO: 3027207 - RNA, 19 nt, Artificial Sequence
  Description of Artificial Sequence: Synthetic oligonucleotide
accaacuguuuucuggcug

SEQ ID NO: 3027208 - RNA, 19 nt, Artificial Sequence
  Description of Artificial Sequence: Synthetic oligonucleotide
ucagcugacuaccuuuaau

SEQ ID NO: 3027209 - RNA, 19 nt, Artificial Sequence
  Description of Artificial Sequence: Synthetic oligonucleotide
uuaggugugugaugugaac

SEQ ID NO: 3027210 - RNA, 19 nt, Artificial Sequence
  Description of Artificial Sequence: Synthetic oligonucleotide
uuuucuggcugacaauauu

SEQ ID NO: 3027211 - RNA, 19 nt, Artificial Sequence
  Description of Artificial Sequence: Synthetic oligonucleotide
augcagacacucuuaggug

SEQ ID NO: 3027212 - RNA, 19 nt, Artificial Sequence
  Description of Artificial Sequence: Synthetic oligonucleotide
accccugcccuucuuuagc

SEQ ID NO: 3027213 - RNA, 19 nt, Artificial Sequence
  Description of Artificial Sequence: Synthetic oligonucleotide
ucacauaacauugguccac

SEQ ID NO: 3027214 - RNA, 19 nt, Artificial Sequence
  Description of Artificial Sequence: Synthetic oligonucleotide
augaaaacguucagcugac

SEQ ID NO: 3027215 - RNA, 19 nt, Artificial Sequence
  Description of Artificial Sequence: Synthetic oligonucleotide
agcauucacauaacauugg

SEQ ID NO: 3027216 - RNA, 19 nt, Artificial Sequence
  Description of Artificial Sequence: Synthetic oligonucleotide
aagcagaacucaagaguuc

SEQ ID NO: 3027217 - RNA, 19 nt, Artificial Sequence
  Description of Artificial Sequence: Synthetic oligonucleotide
acuagcguuuccgaugcag

SEQ ID NO: 3027218 - RNA, 19 nt, Artificial Sequence
  Description of Artificial Sequence: Synthetic oligonucleotide
uuuccgaugcagacacucu

SEQ ID NO: 3027219 - RNA, 19 nt, Artificial Sequence
  Description of Artificial Sequence: Synthetic oligonucleotide
gugaugugaaccugccuug

SEQ ID NO: 3027220 - RNA, 19 nt, Artificial Sequence
  Description of Artificial Sequence: Synthetic oligonucleotide
uuugcuggucuaugcagaa

SEQ ID NO: 3027221 - RNA, 19 nt, Artificial Sequence
  Description of Artificial Sequence: Synthetic oligonucleotide
uucuggcugacaauauuua

SEQ ID NO: 3027222 - RNA, 19 nt, Artificial Sequence
  Description of Artificial Sequence: Synthetic oligonucleotide
caaagcagaacucaagagu

SEQ ID NO: 3027223 - RNA, 19 nt, Artificial Sequence
  Description of Artificial Sequence: Synthetic oligonucleotide
agcagaacucaagaguucu

SEQ ID NO: 3027224 - RNA, 19 nt, Artificial Sequence
  Description of Artificial Sequence: Synthetic oligonucleotide
agcaaacuagcguuuccga

SEQ ID NO: 3027225 - RNA, 19 nt, Artificial Sequence
  Description of Artificial Sequence: Synthetic oligonucleotide
ugaaccugccuugcagagg

SEQ ID NO: 3027226 - RNA, 19 nt, Artificial Sequence
  Description of Artificial Sequence: Synthetic oligonucleotide
uaauuuaccccugcccuuc

SEQ ID NO: 3027227 - RNA, 19 nt, Artificial Sequence
  Description of Artificial Sequence: Synthetic oligonucleotide
uaggggcugaagcaaacua

SEQ ID NO: 3027228 - RNA, 19 nt, Artificial Sequence
  Description of Artificial Sequence: Synthetic oligonucleotide
acccaaaccaagcccugag

SEQ ID NO: 3027229 - RNA, 19 nt, Artificial Sequence
  Description of Artificial Sequence: Synthetic oligonucleotide
acucaagaguucuuuugaa

SEQ ID NO: 3027230 - RNA, 19 nt, Artificial Sequence
  Description of Artificial Sequence: Synthetic oligonucleotide
aauuuaccccugcccuucu

SEQ ID NO: 3027231 - RNA, 19 nt, Artificial Sequence
  Description of Artificial Sequence: Synthetic oligonucleotide
uagcguuuccgaugcagac

SEQ ID NO: 3027232 - RNA, 19 nt, Artificial Sequence
  Description of Artificial Sequence: Synthetic oligonucleotide
uuacuaggggcugaagcaa

SEQ ID NO: 3027233 - RNA, 19 nt, Artificial Sequence
  Description of Artificial Sequence: Synthetic oligonucleotide
uugcagaggggaaguuugc

SEQ ID NO: 3027234 - RNA, 19 nt, Artificial Sequence
  Description of Artificial Sequence: Synthetic oligonucleotide
uuuaccccugcccuucuuu

SEQ ID NO: 3027235 - RNA, 19 nt, Artificial Sequence
  Description of Artificial Sequence: Synthetic oligonucleotide
ugaagcaaacuagcguuuc

SEQ ID NO: 3027236 - RNA, 19 nt, Artificial Sequence
  Description of Artificial Sequence: Synthetic oligonucleotide
gaaaaccauucccaauaaa

SEQ ID NO: 3027237 - RNA, 19 nt, Artificial Sequence
  Description of Artificial Sequence: Synthetic oligonucleotide
agcccugagguuacuaggg

SEQ ID NO: 3027238 - RNA, 19 nt, Artificial Sequence
  Description of Artificial Sequence: Synthetic oligonucleotide
ugaugugaaccugccuugc

SEQ ID NO: 3027239 - RNA, 19 nt, Artificial Sequence
  Description of Artificial Sequence: Synthetic oligonucleotide
aggggaaguuugcuggucu

SEQ ID NO: 3027240 - RNA, 19 nt, Artificial Sequence
  Description of Artificial Sequence: Synthetic oligonucleotide
guuuccgaugcagacacuc

SEQ ID NO: 3027241 - RNA, 19 nt, Artificial Sequence
  Description of Artificial Sequence: Synthetic oligonucleotide
aaccaagcccugagguuac

SEQ ID NO: 3027242 - RNA, 19 nt, Artificial Sequence
  Description of Artificial Sequence: Synthetic oligonucleotide
gacacucuuagguguguga

SEQ ID NO: 3027243 - RNA, 19 nt, Artificial Sequence
  Description of Artificial Sequence: Synthetic oligonucleotide
aggggcugaagcaaacuag

SEQ ID NO: 3027244 - RNA, 19 nt, Artificial Sequence
  Description of Artificial Sequence: Synthetic oligonucleotide
uuccgaugcagacacucuu

SEQ ID NO: 3027245 - RNA, 19 nt, Artificial Sequence
  Description of Artificial Sequence: Synthetic oligonucleotide
cucaagaguucuuuugaaa

SEQ ID NO: 3027246 - RNA, 19 nt, Artificial Sequence
  Description of Artificial Sequence: Synthetic oligonucleotide
uacuaggggcugaagcaaa

SEQ ID NO: 3027247 - RNA, 19 nt, Artificial Sequence
  Description of Artificial Sequence: Synthetic oligonucleotide
uccgaugcagacacucuua

SEQ ID NO: 3027248 - RNA, 19 nt, Artificial Sequence
  Description of Artificial Sequence: Synthetic oligonucleotide
auaauaaaacaaagcuaaa

SEQ ID NO: 3027249 - RNA, 19 nt, Artificial Sequence
  Description of Artificial Sequence: Synthetic oligonucleotide
acuaccuuuaauacccaaa

SEQ ID NO: 3027250 - RNA, 19 nt, Artificial Sequence
  Description of Artificial Sequence: Synthetic oligonucleotide
gagauucaagcccuaauuu

SEQ ID NO: 3027251 - RNA, 19 nt, Artificial Sequence
  Description of Artificial Sequence: Synthetic oligonucleotide
cauaacauugguccacaaa

SEQ ID NO: 3027252 - RNA, 19 nt, Artificial Sequence
  Description of Artificial Sequence: Synthetic oligonucleotide
ugacuaccuuuaauaccca

SEQ ID NO: 3027253 - RNA, 19 nt, Artificial Sequence
  Description of Artificial Sequence: Synthetic oligonucleotide
gaugugaaccugccuugca

SEQ ID NO: 3027254 - RNA, 19 nt, Artificial Sequence
  Description of Artificial Sequence: Synthetic oligonucleotide
cacucuuaggugugugaug

SEQ ID NO: 3027255 - RNA, 19 nt, Artificial Sequence
  Description of Artificial Sequence: Synthetic oligonucleotide
acuaggggcugaagcaaac

SEQ ID NO: 3027256 - RNA, 19 nt, Artificial Sequence
  Description of Artificial Sequence: Synthetic oligonucleotide
cuagcguuuccgaugcaga

SEQ ID NO: 3027257 - RNA, 19 nt, Artificial Sequence
  Description of Artificial Sequence: Synthetic oligonucleotide
cugcccuucuuuagcauuc

SEQ ID NO: 3027258 - RNA, 19 nt, Artificial Sequence
  Description of Artificial Sequence: Synthetic oligonucleotide
cuggcugacaauauuuacu

SEQ ID NO: 3027259 - RNA, 19 nt, Artificial Sequence
  Description of Artificial Sequence: Synthetic oligonucleotide
uaccccugcccuucuuuag

SEQ ID NO: 3027260 - RNA, 19 nt, Artificial Sequence
  Description of Artificial Sequence: Synthetic oligonucleotide
cuggucuaugcagaacgag

SEQ ID NO: 3027261 - RNA, 19 nt, Artificial Sequence
  Description of Artificial Sequence: Synthetic oligonucleotide
gugugugaugugaaccugc

SEQ ID NO: 3027262 - RNA, 19 nt, Artificial Sequence
  Description of Artificial Sequence: Synthetic oligonucleotide
uucagcugacuaccuuuaa

SEQ ID NO: 3027263 - RNA, 19 nt, Artificial Sequence
  Description of Artificial Sequence: Synthetic oligonucleotide
cuuaggugugugaugugaa

SEQ ID NO: 3027264 - RNA, 19 nt, Artificial Sequence
  Description of Artificial Sequence: Synthetic oligonucleotide
aacuguuuucuggcugaca

SEQ ID NO: 3027265 - RNA, 19 nt, Artificial Sequence
  Description of Artificial Sequence: Synthetic oligonucleotide
cccuaauuuaccccugccc

SEQ ID NO: 3027266 - RNA, 19 nt, Artificial Sequence
  Description of Artificial Sequence: Synthetic oligonucleotide
acacucuuaggugugugau

SEQ ID NO: 3027267 - RNA, 19 nt, Artificial Sequence
  Description of Artificial Sequence: Synthetic oligonucleotide
ugagguuacuaggggcuga

SEQ ID NO: 3027268 - RNA, 19 nt, Artificial Sequence
  Description of Artificial Sequence: Synthetic oligonucleotide
gcguuuccgaugcagacac

SEQ ID NO: 3027269 - RNA, 19 nt, Artificial Sequence
  Description of Artificial Sequence: Synthetic oligonucleotide
guuugcuggucuaugcaga

SEQ ID NO: 3027270 - RNA, 19 nt, Artificial Sequence
  Description of Artificial Sequence: Synthetic oligonucleotide
ugcagaggggaaguuugcu

SEQ ID NO: 3027271 - RNA, 19 nt, Artificial Sequence
  Description of Artificial Sequence: Synthetic oligonucleotide
ccugacaccaacuguuuuc

SEQ ID NO: 3027272 - RNA, 19 nt, Artificial Sequence
  Description of Artificial Sequence: Synthetic oligonucleotide
caagcccuaauuuaccccu

SEQ ID NO: 3027273 - RNA, 19 nt, Artificial Sequence
  Description of Artificial Sequence: Synthetic oligonucleotide
ugacaccaacuguuuucug

SEQ ID NO: 3027274 - RNA, 19 nt, Artificial Sequence
  Description of Artificial Sequence: Synthetic oligonucleotide
ccuuuaauacccaaaccaa

SEQ ID NO: 3027275 - RNA, 19 nt, Artificial Sequence
  Description of Artificial Sequence: Synthetic oligonucleotide
uuaccccugcccuucuuua

SEQ ID NO: 3027276 - RNA, 19 nt, Artificial Sequence
  Description of Artificial Sequence: Synthetic oligonucleotide
gcagaggggaaguuugcug

SEQ ID NO: 3027277 - RNA, 19 nt, Artificial Sequence
  Description of Artificial Sequence: Synthetic oligonucleotide
gucuaugcagaacgagaga

SEQ ID NO: 3027278 - RNA, 19 nt, Artificial Sequence
  Description of Artificial Sequence: Synthetic oligonucleotide
gacuaccuuuaauacccaa

SEQ ID NO: 3027279 - RNA, 19 nt, Artificial Sequence
  Description of Artificial Sequence: Synthetic oligonucleotide
uaccugacaccaacuguuu

SEQ ID NO: 3027280 - RNA, 19 nt, Artificial Sequence
  Description of Artificial Sequence: Synthetic oligonucleotide
gcugacaauauuuacucau

SEQ ID NO: 3027281 - RNA, 19 nt, Artificial Sequence
  Description of Artificial Sequence: Synthetic oligonucleotide
aacguucagcugacuaccu

SEQ ID NO: 3027282 - RNA, 19 nt, Artificial Sequence
  Description of Artificial Sequence: Synthetic oligonucleotide
agcguuuccgaugcagaca

SEQ ID NO: 3027283 - RNA, 19 nt, Artificial Sequence
  Description of Artificial Sequence: Synthetic oligonucleotide
ggggcugaagcaaacuagc

SEQ ID NO: 3027284 - RNA, 19 nt, Artificial Sequence
  Description of Artificial Sequence: Synthetic oligonucleotide
gagagauucaagcccuaau

SEQ ID NO: 3027285 - RNA, 19 nt, Artificial Sequence
  Description of Artificial Sequence: Synthetic oligonucleotide
ggaaguuugcuggucuaug

SEQ ID NO: 3027286 - RNA, 19 nt, Artificial Sequence
  Description of Artificial Sequence: Synthetic oligonucleotide
acauaacauugguccacaa

SEQ ID NO: 3027287 - RNA, 19 nt, Artificial Sequence
  Description of Artificial Sequence: Synthetic oligonucleotide
gcugaagcaaacuagcguu

SEQ ID NO: 3027288 - RNA, 19 nt, Artificial Sequence
  Description of Artificial Sequence: Synthetic oligonucleotide
cugccuugcagaggggaag

SEQ ID NO: 3027289 - RNA, 19 nt, Artificial Sequence
  Description of Artificial Sequence: Synthetic oligonucleotide
agacacucuuaggugugug

SEQ ID NO: 3027290 - RNA, 19 nt, Artificial Sequence
  Description of Artificial Sequence: Synthetic oligonucleotide
ccuucuuuagcauucacau

SEQ ID NO: 3027291 - RNA, 19 nt, Artificial Sequence
  Description of Artificial Sequence: Synthetic oligonucleotide
aagcccuaauuuaccccug

SEQ ID NO: 3027292 - RNA, 19 nt, Artificial Sequence
  Description of Artificial Sequence: Synthetic oligonucleotide
uacccaaaccaagcccuga

SEQ ID NO: 3027293 - RNA, 19 nt, Artificial Sequence
  Description of Artificial Sequence: Synthetic oligonucleotide
ugaaaacguucagcugacu

SEQ ID NO: 3027294 - RNA, 19 nt, Artificial Sequence
  Description of Artificial Sequence: Synthetic oligonucleotide
ugccuugcagaggggaagu

SEQ ID NO: 3027295 - RNA, 19 nt, Artificial Sequence
  Description of Artificial Sequence: Synthetic oligonucleotide
gggcugaagcaaacuagcg

SEQ ID NO: 3027296 - RNA, 19 nt, Artificial Sequence
  Description of Artificial Sequence: Synthetic oligonucleotide
cuucuuuagcauucacaua

SEQ ID NO: 3027297 - RNA, 19 nt, Artificial Sequence
  Description of Artificial Sequence: Synthetic oligonucleotide
cccugagguuacuaggggc

SEQ ID NO: 3027298 - RNA, 19 nt, Artificial Sequence
  Description of Artificial Sequence: Synthetic oligonucleotide
cacauaacauugguccaca

SEQ ID NO: 3027299 - RNA, 19 nt, Artificial Sequence
  Description of Artificial Sequence: Synthetic oligonucleotide
cugagguuacuaggggcug

SEQ ID NO: 3027300 - RNA, 19 nt, Artificial Sequence
  Description of Artificial Sequence: Synthetic oligonucleotide
cucuuaggugugugaugug

SEQ ID NO: 3027301 - RNA, 19 nt, Artificial Sequence
  Description of Artificial Sequence: Synthetic oligonucleotide
aacuagcguuuccgaugca

SEQ ID NO: 3027302 - RNA, 19 nt, Artificial Sequence
  Description of Artificial Sequence: Synthetic oligonucleotide
ccuaauuuaccccugcccu

SEQ ID NO: 3027303 - RNA, 19 nt, Artificial Sequence
  Description of Artificial Sequence: Synthetic oligonucleotide
accugacaccaacuguuuu

SEQ ID NO: 3027304 - RNA, 19 nt, Artificial Sequence
  Description of Artificial Sequence: Synthetic oligonucleotide
auacccaaaccaagcccug

SEQ ID NO: 3027305 - RNA, 19 nt, Artificial Sequence
  Description of Artificial Sequence: Synthetic oligonucleotide
gcccugagguuacuagggg

SEQ ID NO: 3027306 - RNA, 19 nt, Artificial Sequence
  Description of Artificial Sequence: Synthetic oligonucleotide
cccaaaccaagcccugagg

SEQ ID NO: 3027307 - RNA, 19 nt, Artificial Sequence
  Description of Artificial Sequence: Synthetic oligonucleotide
uugcuggucuaugcagaac

SEQ ID NO: 3027308 - RNA, 19 nt, Artificial Sequence
  Description of Artificial Sequence: Synthetic oligonucleotide
ggcugaagcaaacuagcgu

SEQ ID NO: 3027309 - RNA, 19 nt, Artificial Sequence
  Description of Artificial Sequence: Synthetic oligonucleotide
ggugugugaugugaaccug

SEQ ID NO: 3027310 - RNA, 19 nt, Artificial Sequence
  Description of Artificial Sequence: Synthetic oligonucleotide
ccgaugcagacacucuuag

SEQ ID NO: 3027311 - RNA, 19 nt, Artificial Sequence
  Description of Artificial Sequence: Synthetic oligonucleotide
acguucagcugacuaccuu

SEQ ID NO: 3027312 - RNA, 19 nt, Artificial Sequence
  Description of Artificial Sequence: Synthetic oligonucleotide
accugccuugcagagggga

SEQ ID NO: 3027313 - RNA, 19 nt, Artificial Sequence
  Description of Artificial Sequence: Synthetic oligonucleotide
ugcccuucuuuagcauuca

SEQ ID NO: 3027314 - RNA, 19 nt, Artificial Sequence
  Description of Artificial Sequence: Synthetic oligonucleotide
ggcugacaauauuuacuca

SEQ ID NO: 3027315 - RNA, 19 nt, Artificial Sequence
  Description of Artificial Sequence: Synthetic oligonucleotide
gcauucacauaacauuggu

SEQ ID NO: 3027316 - RNA, 19 nt, Artificial Sequence
  Description of Artificial Sequence: Synthetic oligonucleotide
cccuucuuuagcauucaca

SEQ ID NO: 3027317 - RNA, 19 nt, Artificial Sequence
  Description of Artificial Sequence: Synthetic oligonucleotide
gaggggaaguuugcugguc

SEQ ID NO: 3027318 - RNA, 19 nt, Artificial Sequence
  Description of Artificial Sequence: Synthetic oligonucleotide
augcagaacgagagauuca

SEQ ID NO: 3027319 - RNA, 19 nt, Artificial Sequence
  Description of Artificial Sequence: Synthetic oligonucleotide
cuaauuuaccccugcccuu

SEQ ID NO: 3027320 - RNA, 19 nt, Artificial Sequence
  Description of Artificial Sequence: Synthetic oligonucleotide
agguuacuaggggcugaag

SEQ ID NO: 3027321 - RNA, 19 nt, Artificial Sequence
  Description of Artificial Sequence: Synthetic oligonucleotide
gagguuacuaggggcugaa

SEQ ID NO: 3027322 - RNA, 19 nt, Artificial Sequence
  Description of Artificial Sequence: Synthetic oligonucleotide
gcagacacucuuaggugug

SEQ ID NO: 3027323 - RNA, 19 nt, Artificial Sequence
  Description of Artificial Sequence: Synthetic oligonucleotide
auuuaccccugcccuucuu

SEQ ID NO: 3027324 - RNA, 19 nt, Artificial Sequence
  Description of Artificial Sequence: Synthetic oligonucleotide
aaccugccuugcagagggg

SEQ ID NO: 3027325 - RNA, 19 nt, Artificial Sequence
  Description of Artificial Sequence: Synthetic oligonucleotide
cgaugcagacacucuuagg

SEQ ID NO: 3027326 - RNA, 19 nt, Artificial Sequence
  Description of Artificial Sequence: Synthetic oligonucleotide
gcagaacgagagauucaag

SEQ ID NO: 3027327 - RNA, 19 nt, Artificial Sequence
  Description of Artificial Sequence: Synthetic oligonucleotide
caaaccaagcccugagguu

SEQ ID NO: 3027328 - RNA, 19 nt, Artificial Sequence
  Description of Artificial Sequence: Synthetic oligonucleotide
ccaaaccaagcccugaggu

SEQ ID NO: 3027329 - RNA, 19 nt, Artificial Sequence
  Description of Artificial Sequence: Synthetic oligonucleotide
gcaaacuagcguuuccgau

SEQ ID NO: 3027330 - RNA, 19 nt, Artificial Sequence
  Description of Artificial Sequence: Synthetic oligonucleotide
ccugagguuacuaggggcu

SEQ ID NO: 3027331 - RNA, 19 nt, Artificial Sequence
  Description of Artificial Sequence: Synthetic oligonucleotide
cugaagcaaacuagcguuu

SEQ ID NO: 3027332 - RNA, 19 nt, Artificial Sequence
  Description of Artificial Sequence: Synthetic oligonucleotide
guuuucuggcugacaauau

SEQ ID NO: 3027333 - RNA, 19 nt, Artificial Sequence
  Description of Artificial Sequence: Synthetic oligonucleotide
cagaacucaagaguucuuu

SEQ ID NO: 3027334 - RNA, 19 nt, Artificial Sequence
  Description of Artificial Sequence: Synthetic oligonucleotide
augcauuaccugacaccaa

SEQ ID NO: 3027335 - RNA, 19 nt, Artificial Sequence
  Description of Artificial Sequence: Synthetic oligonucleotide
cuguuuucuggcugacaau

SEQ ID NO: 3027336 - RNA, 19 nt, Artificial Sequence
  Description of Artificial Sequence: Synthetic oligonucleotide
gcuggucuaugcagaacga

SEQ ID NO: 3027337 - RNA, 19 nt, Artificial Sequence
  Description of Artificial Sequence: Synthetic oligonucleotide
cuaggggcugaagcaaacu

SEQ ID NO: 3027338 - RNA, 19 nt, Artificial Sequence
  Description of Artificial Sequence: Synthetic oligonucleotide
ggggaaguuugcuggucua

SEQ ID NO: 3027339 - RNA, 19 nt, Artificial Sequence
  Description of Artificial Sequence: Synthetic oligonucleotide
gcccuucuuuagcauucac

SEQ ID NO: 3027340 - RNA, 19 nt, Artificial Sequence
  Description of Artificial Sequence: Synthetic oligonucleotide
acgagagauucaagcccua

SEQ ID NO: 3027341 - RNA, 19 nt, Artificial Sequence
  Description of Artificial Sequence: Synthetic oligonucleotide
gcauuaccugacaccaacu

SEQ ID NO: 3027342 - RNA, 19 nt, Artificial Sequence
  Description of Artificial Sequence: Synthetic oligonucleotide
ccugccuugcagaggggaa

SEQ ID NO: 3027343 - RNA, 19 nt, Artificial Sequence
  Description of Artificial Sequence: Synthetic oligonucleotide
ccccugcccuucuuuagca

SEQ ID NO: 3027344 - RNA, 19 nt, Artificial Sequence
  Description of Artificial Sequence: Synthetic oligonucleotide
cagacacucuuaggugugu

SEQ ID NO: 3027345 - RNA, 19 nt, Artificial Sequence
  Description of Artificial Sequence: Synthetic oligonucleotide
gcagaacucaagaguucuu

SEQ ID NO: 3027346 - RNA, 19 nt, Artificial Sequence
  Description of Artificial Sequence: Synthetic oligonucleotide
cgagagauucaagcccuaa

SEQ ID NO: 3027347 - RNA, 19 nt, Artificial Sequence
  Description of Artificial Sequence: Synthetic oligonucleotide
ccuugcagaggggaaguuu

SEQ ID NO: 3027348 - RNA, 19 nt, Artificial Sequence
  Description of Artificial Sequence: Synthetic oligonucleotide
cccugcccuucuuuagcau

SEQ ID NO: 3027349 - RNA, 19 nt, Artificial Sequence
  Description of Artificial Sequence: Synthetic oligonucleotide
gccuugcagaggggaaguu

SEQ ID NO: 3027350 - RNA, 19 nt, Artificial Sequence
  Description of Artificial Sequence: Synthetic oligonucleotide
cguuuccgaugcagacacu

SEQ ID NO: 3027351 - RNA, 19 nt, Artificial Sequence
  Description of Artificial Sequence: Synthetic oligonucleotide
aacuuguuuuacuugaggc

SEQ ID NO: 3027352 - RNA, 19 nt, Artificial Sequence
  Description of Artificial Sequence: Synthetic oligonucleotide
ugguuuaagagcaugaucc

SEQ ID NO: 3027353 - RNA, 19 nt, Artificial Sequence
  Description of Artificial Sequence: Synthetic oligonucleotide
cuuguaaaacauaacggcc

SEQ ID NO: 3027354 - RNA, 19 nt, Artificial Sequence
  Description of Artificial Sequence: Synthetic oligonucleotide
aaacuuguuuuacuugagg

SEQ ID NO: 3027355 - RNA, 19 nt, Artificial Sequence
  Description of Artificial Sequence: Synthetic oligonucleotide
uuuugguaggcuuugaaaa

SEQ ID NO: 3027356 - RNA, 19 nt, Artificial Sequence
  Description of Artificial Sequence: Synthetic oligonucleotide
uuuauuggcaguagggcug

SEQ ID NO: 3027357 - RNA, 19 nt, Artificial Sequence
  Description of Artificial Sequence: Synthetic oligonucleotide
ugaaggcagauuuugguag

SEQ ID NO: 3027358 - RNA, 19 nt, Artificial Sequence
  Description of Artificial Sequence: Synthetic oligonucleotide
uuguaaaacauaacggccu

SEQ ID NO: 3027359 - RNA, 19 nt, Artificial Sequence
  Description of Artificial Sequence: Synthetic oligonucleotide
uucaaacccaccucuauag

SEQ ID NO: 3027360 - RNA, 19 nt, Artificial Sequence
  Description of Artificial Sequence: Synthetic oligonucleotide
aaacauaacggccugcaaa

SEQ ID NO: 3027361 - RNA, 19 nt, Artificial Sequence
  Description of Artificial Sequence: Synthetic oligonucleotide
ucuauaguacccaccacug

SEQ ID NO: 3027362 - RNA, 19 nt, Artificial Sequence
  Description of Artificial Sequence: Synthetic oligonucleotide
gucauuuuggguucaaacc

SEQ ID NO: 3027363 - RNA, 19 nt, Artificial Sequence
  Description of Artificial Sequence: Synthetic oligonucleotide
ucugggugguuuaagagca

SEQ ID NO: 3027364 - RNA, 19 nt, Artificial Sequence
  Description of Artificial Sequence: Synthetic oligonucleotide
uuuuacuugaggcuccaca

SEQ ID NO: 3027365 - RNA, 19 nt, Artificial Sequence
  Description of Artificial Sequence: Synthetic oligonucleotide
uuuggguucaaacccaccu

SEQ ID NO: 3027366 - RNA, 19 nt, Artificial Sequence
  Description of Artificial Sequence: Synthetic oligonucleotide
ugaucuucccuuuauuggc

SEQ ID NO: 3027367 - RNA, 19 nt, Artificial Sequence
  Description of Artificial Sequence: Synthetic oligonucleotide
aacauaacggccugcaaau

SEQ ID NO: 3027368 - RNA, 19 nt, Artificial Sequence
  Description of Artificial Sequence: Synthetic oligonucleotide
uuuaagagcaugauccguc

SEQ ID NO: 3027369 - RNA, 19 nt, Artificial Sequence
  Description of Artificial Sequence: Synthetic oligonucleotide
uauaguacccaccacugaa

SEQ ID NO: 3027370 - RNA, 19 nt, Artificial Sequence
  Description of Artificial Sequence: Synthetic oligonucleotide
aaacccaccucuauaguac

SEQ ID NO: 3027371 - RNA, 19 nt, Artificial Sequence
  Description of Artificial Sequence: Synthetic oligonucleotide
uuaagagcaugauccgucg

SEQ ID NO: 3027372 - RNA, 19 nt, Artificial Sequence
  Description of Artificial Sequence: Synthetic oligonucleotide
uguaaaacauaacggccug

SEQ ID NO: 3027373 - RNA, 19 nt, Artificial Sequence
  Description of Artificial Sequence: Synthetic oligonucleotide
uacuugaggcuccacaugc

SEQ ID NO: 3027374 - RNA, 19 nt, Artificial Sequence
  Description of Artificial Sequence: Synthetic oligonucleotide
cugaucuucccuuuauugg

SEQ ID NO: 3027375 - RNA, 19 nt, Artificial Sequence
  Description of Artificial Sequence: Synthetic oligonucleotide
ugucauuuuggguucaaac

SEQ ID NO: 3027376 - RNA, 19 nt, Artificial Sequence
  Description of Artificial Sequence: Synthetic oligonucleotide
aguauuaaugcugccucgc

SEQ ID NO: 3027377 - RNA, 19 nt, Artificial Sequence
  Description of Artificial Sequence: Synthetic oligonucleotide
aacccaccucuauaguacc

SEQ ID NO: 3027378 - RNA, 19 nt, Artificial Sequence
  Description of Artificial Sequence: Synthetic oligonucleotide
gcuuguaaaacauaacggc

SEQ ID NO: 3027379 - RNA, 19 nt, Artificial Sequence
  Description of Artificial Sequence: Synthetic oligonucleotide
ugacaccuaguauuaaugc

SEQ ID NO: 3027380 - RNA, 19 nt, Artificial Sequence
  Description of Artificial Sequence: Synthetic oligonucleotide
ucgcguuuugucauuuugg

SEQ ID NO: 3027381 - RNA, 19 nt, Artificial Sequence
  Description of Artificial Sequence: Synthetic oligonucleotide
acuuguuuuacuugaggcu

SEQ ID NO: 3027382 - RNA, 19 nt, Artificial Sequence
  Description of Artificial Sequence: Synthetic oligonucleotide
cuaguauuaaugcugccuc

SEQ ID NO: 3027383 - RNA, 19 nt, Artificial Sequence
  Description of Artificial Sequence: Synthetic oligonucleotide
uuuacuugaggcuccacau

SEQ ID NO: 3027384 - RNA, 19 nt, Artificial Sequence
  Description of Artificial Sequence: Synthetic oligonucleotide
uaguacccaccacugaagg

SEQ ID NO: 3027385 - RNA, 19 nt, Artificial Sequence
  Description of Artificial Sequence: Synthetic oligonucleotide
cauaacggccugcaaaucc

SEQ ID NO: 3027386 - RNA, 19 nt, Artificial Sequence
  Description of Artificial Sequence: Synthetic oligonucleotide
uaguauuaaugcugccucg

SEQ ID NO: 3027387 - RNA, 19 nt, Artificial Sequence
  Description of Artificial Sequence: Synthetic oligonucleotide
uuggcaguagggcugacac

SEQ ID NO: 3027388 - RNA, 19 nt, Artificial Sequence
  Description of Artificial Sequence: Synthetic oligonucleotide
aagagcaugauccgucggu

SEQ ID NO: 3027389 - RNA, 19 nt, Artificial Sequence
  Description of Artificial Sequence: Synthetic oligonucleotide
uguacuggccaugacuccg

SEQ ID NO: 3027390 - RNA, 19 nt, Artificial Sequence
  Description of Artificial Sequence: Synthetic oligonucleotide
uaaaacauaacggccugca

SEQ ID NO: 3027391 - RNA, 19 nt, Artificial Sequence
  Description of Artificial Sequence: Synthetic oligonucleotide
agcaauggucaguccaacc

SEQ ID NO: 3027392 - RNA, 19 nt, Artificial Sequence
  Description of Artificial Sequence: Synthetic oligonucleotide
acuguacuggccaugacuc

SEQ ID NO: 3027393 - RNA, 19 nt, Artificial Sequence
  Description of Artificial Sequence: Synthetic oligonucleotide
accgcuaccacuguacugg

SEQ ID NO: 3027394 - RNA, 19 nt, Artificial Sequence
  Description of Artificial Sequence: Synthetic oligonucleotide
uauuaaugcugccucgcgu

SEQ ID NO: 3027395 - RNA, 19 nt, Artificial Sequence
  Description of Artificial Sequence: Synthetic oligonucleotide
aguacccaccacugaaggc

SEQ ID NO: 3027396 - RNA, 19 nt, Artificial Sequence
  Description of Artificial Sequence: Synthetic oligonucleotide
ugucugggugguuuaagag

SEQ ID NO: 3027397 - RNA, 19 nt, Artificial Sequence
  Description of Artificial Sequence: Synthetic oligonucleotide
cuuguuuuacuugaggcuc

SEQ ID NO: 3027398 - RNA, 19 nt, Artificial Sequence
  Description of Artificial Sequence: Synthetic oligonucleotide
cuggccaugacuccgcucc

SEQ ID NO: 3027399 - RNA, 19 nt, Artificial Sequence
  Description of Artificial Sequence: Synthetic oligonucleotide
aaaacuuguuuuacuugag

SEQ ID NO: 3027400 - RNA, 19 nt, Artificial Sequence
  Description of Artificial Sequence: Synthetic oligonucleotide
ugagcaucccugaucuucc

SEQ ID NO: 3027401 - RNA, 19 nt, Artificial Sequence
  Description of Artificial Sequence: Synthetic oligonucleotide
auuuugguaggcuuugaaa

SEQ ID NO: 3027402 - RNA, 19 nt, Artificial Sequence
  Description of Artificial Sequence: Synthetic oligonucleotide
gcaauggucaguccaaccg

SEQ ID NO: 3027403 - RNA, 19 nt, Artificial Sequence
  Description of Artificial Sequence: Synthetic oligonucleotide
aaggcagauuuugguaggc

SEQ ID NO: 3027404 - RNA, 19 nt, Artificial Sequence
  Description of Artificial Sequence: Synthetic oligonucleotide
cugacaccuaguauuaaug

SEQ ID NO: 3027405 - RNA, 19 nt, Artificial Sequence
  Description of Artificial Sequence: Synthetic oligonucleotide
ucccuuuauuggcaguagg

SEQ ID NO: 3027406 - RNA, 19 nt, Artificial Sequence
  Description of Artificial Sequence: Synthetic oligonucleotide
ugcaaauccugcagcagca

SEQ ID NO: 3027407 - RNA, 19 nt, Artificial Sequence
  Description of Artificial Sequence: Synthetic oligonucleotide
aaauccugcagcagcaaug

SEQ ID NO: 3027408 - RNA, 19 nt, Artificial Sequence
  Description of Artificial Sequence: Synthetic oligonucleotide
guauuaaugcugccucgcg

SEQ ID NO: 3027409 - RNA, 19 nt, Artificial Sequence
  Description of Artificial Sequence: Synthetic oligonucleotide
uggguucaaacccaccucu

SEQ ID NO: 3027410 - RNA, 19 nt, Artificial Sequence
  Description of Artificial Sequence: Synthetic oligonucleotide
uuguuuuacuugaggcucc

SEQ ID NO: 3027411 - RNA, 19 nt, Artificial Sequence
  Description of Artificial Sequence: Synthetic oligonucleotide
uaagagcaugauccgucgg

SEQ ID NO: 3027412 - RNA, 19 nt, Artificial Sequence
  Description of Artificial Sequence: Synthetic oligonucleotide
ggcuuguaaaacauaacgg

SEQ ID NO: 3027413 - RNA, 19 nt, Artificial Sequence
  Description of Artificial Sequence: Synthetic oligonucleotide
caccuaguauuaaugcugc

SEQ ID NO: 3027414 - RNA, 19 nt, Artificial Sequence
  Description of Artificial Sequence: Synthetic oligonucleotide
agcagcaauggucagucca

SEQ ID NO: 3027415 - RNA, 19 nt, Artificial Sequence
  Description of Artificial Sequence: Synthetic oligonucleotide
uuacuugaggcuccacaug

SEQ ID NO: 3027416 - RNA, 19 nt, Artificial Sequence
  Description of Artificial Sequence: Synthetic oligonucleotide
uucacggcuuguaaaacau

SEQ ID NO: 3027417 - RNA, 19 nt, Artificial Sequence
  Description of Artificial Sequence: Synthetic oligonucleotide
agggcugacaccuaguauu

SEQ ID NO: 3027418 - RNA, 19 nt, Artificial Sequence
  Description of Artificial Sequence: Synthetic oligonucleotide
acaccuaguauuaaugcug

SEQ ID NO: 3027419 - RNA, 19 nt, Artificial Sequence
  Description of Artificial Sequence: Synthetic oligonucleotide
auuaaugcugccucgcguu

SEQ ID NO: 3027420 - RNA, 19 nt, Artificial Sequence
  Description of Artificial Sequence: Synthetic oligonucleotide
cugcaaauccugcagcagc

SEQ ID NO: 3027421 - RNA, 19 nt, Artificial Sequence
  Description of Artificial Sequence: Synthetic oligonucleotide
aaugcugccucgcguuuug

SEQ ID NO: 3027422 - RNA, 19 nt, Artificial Sequence
  Description of Artificial Sequence: Synthetic oligonucleotide
gguuuaagagcaugauccg

SEQ ID NO: 3027423 - RNA, 19 nt, Artificial Sequence
  Description of Artificial Sequence: Synthetic oligonucleotide
aaaacauaacggccugcaa

SEQ ID NO: 3027424 - RNA, 19 nt, Artificial Sequence
  Description of Artificial Sequence: Synthetic oligonucleotide
caauggucaguccaaccgc

SEQ ID NO: 3027425 - RNA, 19 nt, Artificial Sequence
  Description of Artificial Sequence: Synthetic oligonucleotide
agcaugauccgucggugag

SEQ ID NO: 3027426 - RNA, 19 nt, Artificial Sequence
  Description of Artificial Sequence: Synthetic oligonucleotide
accuaguauuaaugcugcc

SEQ ID NO: 3027427 - RNA, 19 nt, Artificial Sequence
  Description of Artificial Sequence: Synthetic oligonucleotide
ugcuucacggcuuguaaaa

SEQ ID NO: 3027428 - RNA, 19 nt, Artificial Sequence
  Description of Artificial Sequence: Synthetic oligonucleotide
uugucugggugguuuaaga

SEQ ID NO: 3027429 - RNA, 19 nt, Artificial Sequence
  Description of Artificial Sequence: Synthetic oligonucleotide
uuuuggguucaaacccacc

SEQ ID NO: 3027430 - RNA, 19 nt, Artificial Sequence
  Description of Artificial Sequence: Synthetic oligonucleotide
caugacuccgcuccgcggc

SEQ ID NO: 3027431 - RNA, 19 nt, Artificial Sequence
  Description of Artificial Sequence: Synthetic oligonucleotide
ggcuccacaugcuucacgg

SEQ ID NO: 3027432 - RNA, 19 nt, Artificial Sequence
  Description of Artificial Sequence: Synthetic oligonucleotide
guuuugucauuuuggguuc

SEQ ID NO: 3027433 - RNA, 19 nt, Artificial Sequence
  Description of Artificial Sequence: Synthetic oligonucleotide
aaccgcuaccacuguacug

SEQ ID NO: 3027434 - RNA, 19 nt, Artificial Sequence
  Description of Artificial Sequence: Synthetic oligonucleotide
ucaaacccaccucuauagu

SEQ ID NO: 3027435 - RNA, 19 nt, Artificial Sequence
  Description of Artificial Sequence: Synthetic oligonucleotide
aacggccugcaaauccugc

SEQ ID NO: 3027436 - RNA, 19 nt, Artificial Sequence
  Description of Artificial Sequence: Synthetic oligonucleotide
auuuuggguucaaacccac

SEQ ID NO: 3027437 - RNA, 19 nt, Artificial Sequence
  Description of Artificial Sequence: Synthetic oligonucleotide
aauggucaguccaaccgcu

SEQ ID NO: 3027438 - RNA, 19 nt, Artificial Sequence
  Description of Artificial Sequence: Synthetic oligonucleotide
uuggguucaaacccaccuc

SEQ ID NO: 3027439 - RNA, 19 nt, Artificial Sequence
  Description of Artificial Sequence: Synthetic oligonucleotide
aguccaaccgcuaccacug

SEQ ID NO: 3027440 - RNA, 19 nt, Artificial Sequence
  Description of Artificial Sequence: Synthetic oligonucleotide
gauuuugguaggcuuugaa

SEQ ID NO: 3027441 - RNA, 19 nt, Artificial Sequence
  Description of Artificial Sequence: Synthetic oligonucleotide
gugguuuaagagcaugauc

SEQ ID NO: 3027442 - RNA, 19 nt, Artificial Sequence
  Description of Artificial Sequence: Synthetic oligonucleotide
ugauccgucggugagcauc

SEQ ID NO: 3027443 - RNA, 19 nt, Artificial Sequence
  Description of Artificial Sequence: Synthetic oligonucleotide
cggcuuguaaaacauaacg

SEQ ID NO: 3027444 - RNA, 19 nt, Artificial Sequence
  Description of Artificial Sequence: Synthetic oligonucleotide
cauuuuggguucaaaccca

SEQ ID NO: 3027445 - RNA, 19 nt, Artificial Sequence
  Description of Artificial Sequence: Synthetic oligonucleotide
gacaccuaguauuaaugcu

SEQ ID NO: 3027446 - RNA, 19 nt, Artificial Sequence
  Description of Artificial Sequence: Synthetic oligonucleotide
uugaggcuccacaugcuuc

SEQ ID NO: 3027447 - RNA, 19 nt, Artificial Sequence
  Description of Artificial Sequence: Synthetic oligonucleotide
aucuucccuuuauuggcag

SEQ ID NO: 3027448 - RNA, 19 nt, Artificial Sequence
  Description of Artificial Sequence: Synthetic oligonucleotide
guacccaccacugaaggca

SEQ ID NO: 3027449 - RNA, 19 nt, Artificial Sequence
  Description of Artificial Sequence: Synthetic oligonucleotide
cucgcguuuugucauuuug

SEQ ID NO: 3027450 - RNA, 19 nt, Artificial Sequence
  Description of Artificial Sequence: Synthetic oligonucleotide
cccuuuauuggcaguaggg

SEQ ID NO: 3027451 - RNA, 19 nt, Artificial Sequence
  Description of Artificial Sequence: Synthetic oligonucleotide
uggucaguccaaccgcuac

SEQ ID NO: 3027452 - RNA, 19 nt, Artificial Sequence
  Description of Artificial Sequence: Synthetic oligonucleotide
cuguggagagcgcagcggc

SEQ ID NO: 3027453 - RNA, 19 nt, Artificial Sequence
  Description of Artificial Sequence: Synthetic oligonucleotide
auaguacccaccacugaag

SEQ ID NO: 3027454 - RNA, 19 nt, Artificial Sequence
  Description of Artificial Sequence: Synthetic oligonucleotide
cuuuauuggcaguagggcu

SEQ ID NO: 3027455 - RNA, 19 nt, Artificial Sequence
  Description of Artificial Sequence: Synthetic oligonucleotide
uacccaccacugaaggcag

SEQ ID NO: 3027456 - RNA, 19 nt, Artificial Sequence
  Description of Artificial Sequence: Synthetic oligonucleotide
cacggcuuguaaaacauaa

SEQ ID NO: 3027457 - RNA, 19 nt, Artificial Sequence
  Description of Artificial Sequence: Synthetic oligonucleotide
augacuccgcuccgcggcc

SEQ ID NO: 3027458 - RNA, 19 nt, Artificial Sequence
  Description of Artificial Sequence: Synthetic oligonucleotide
ucggugagcaucccugauc

SEQ ID NO: 3027459 - RNA, 19 nt, Artificial Sequence
  Description of Artificial Sequence: Synthetic oligonucleotide
cuucacggcuuguaaaaca

SEQ ID NO: 3027460 - RNA, 19 nt, Artificial Sequence
  Description of Artificial Sequence: Synthetic oligonucleotide
ccugaucuucccuuuauug

SEQ ID NO: 3027461 - RNA, 19 nt, Artificial Sequence
  Description of Artificial Sequence: Synthetic oligonucleotide
agcacgccuguggagagcg

SEQ ID NO: 3027462 - RNA, 19 nt, Artificial Sequence
  Description of Artificial Sequence: Synthetic oligonucleotide
uuauuggcaguagggcuga

SEQ ID NO: 3027463 - RNA, 19 nt, Artificial Sequence
  Description of Artificial Sequence: Synthetic oligonucleotide
gauccgucggugagcaucc

SEQ ID NO: 3027464 - RNA, 19 nt, Artificial Sequence
  Description of Artificial Sequence: Synthetic oligonucleotide
uccgcggcccggcagcgcg

SEQ ID NO: 3027465 - RNA, 19 nt, Artificial Sequence
  Description of Artificial Sequence: Synthetic oligonucleotide
uaacggccugcaaauccug

SEQ ID NO: 3027466 - RNA, 19 nt, Artificial Sequence
  Description of Artificial Sequence: Synthetic oligonucleotide
acggcuuguaaaacauaac

SEQ ID NO: 3027467 - RNA, 19 nt, Artificial Sequence
  Description of Artificial Sequence: Synthetic oligonucleotide
guaaaacauaacggccugc

SEQ ID NO: 3027468 - RNA, 19 nt, Artificial Sequence
  Description of Artificial Sequence: Synthetic oligonucleotide
cucuauaguacccaccacu

SEQ ID NO: 3027469 - RNA, 19 nt, Artificial Sequence
  Description of Artificial Sequence: Synthetic oligonucleotide
auaacggccugcaaauccu

SEQ ID NO: 3027470 - RNA, 19 nt, Artificial Sequence
  Description of Artificial Sequence: Synthetic oligonucleotide
ugggugguuuaagagcaug

SEQ ID NO: 3027471 - RNA, 19 nt, Artificial Sequence
  Description of Artificial Sequence: Synthetic oligonucleotide
caccucuauaguacccacc

SEQ ID NO: 3027472 - RNA, 19 nt, Artificial Sequence
  Description of Artificial Sequence: Synthetic oligonucleotide
agagcaugauccgucggug

SEQ ID NO: 3027473 - RNA, 19 nt, Artificial Sequence
  Description of Artificial Sequence: Synthetic oligonucleotide
uucccuuuauuggcaguag

SEQ ID NO: 3027474 - RNA, 19 nt, Artificial Sequence
  Description of Artificial Sequence: Synthetic oligonucleotide
gcuaccacuguacuggcca

SEQ ID NO: 3027475 - RNA, 19 nt, Artificial Sequence
  Description of Artificial Sequence: Synthetic oligonucleotide
gugagcaucccugaucuuc

SEQ ID NO: 3027476 - RNA, 19 nt, Artificial Sequence
  Description of Artificial Sequence: Synthetic oligonucleotide
uccacaugcuucacggcuu

SEQ ID NO: 3027477 - RNA, 19 nt, Artificial Sequence
  Description of Artificial Sequence: Synthetic oligonucleotide
uguuuuacuugaggcucca

SEQ ID NO: 3027478 - RNA, 19 nt, Artificial Sequence
  Description of Artificial Sequence: Synthetic oligonucleotide
ccuuuauuggcaguagggc

SEQ ID NO: 3027479 - RNA, 19 nt, Artificial Sequence
  Description of Artificial Sequence: Synthetic oligonucleotide
agcccaccgccacagcacg

SEQ ID NO: 3027480 - RNA, 19 nt, Artificial Sequence
  Description of Artificial Sequence: Synthetic oligonucleotide
agagcgcagcggcccagcc

SEQ ID NO: 3027481 - RNA, 19 nt, Artificial Sequence
  Description of Artificial Sequence: Synthetic oligonucleotide
agcgcgagcccaccgccac

SEQ ID NO: 3027482 - RNA, 19 nt, Artificial Sequence
  Description of Artificial Sequence: Synthetic oligonucleotide
acagcacgccuguggagag

SEQ ID NO: 3027483 - RNA, 19 nt, Artificial Sequence
  Description of Artificial Sequence: Synthetic oligonucleotide
agcgcagcggcccagccaa

SEQ ID NO: 3027484 - RNA, 19 nt, Artificial Sequence
  Description of Artificial Sequence: Synthetic oligonucleotide
uuaaugcugccucgcguuu

SEQ ID NO: 3027485 - RNA, 19 nt, Artificial Sequence
  Description of Artificial Sequence: Synthetic oligonucleotide
caaacccaccucuauagua

SEQ ID NO: 3027486 - RNA, 19 nt, Artificial Sequence
  Description of Artificial Sequence: Synthetic oligonucleotide
gaucuucccuuuauuggca

SEQ ID NO: 3027487 - RNA, 19 nt, Artificial Sequence
  Description of Artificial Sequence: Synthetic oligonucleotide
uagggcugacaccuaguau

SEQ ID NO: 3027488 - RNA, 19 nt, Artificial Sequence
  Description of Artificial Sequence: Synthetic oligonucleotide
aggcuccacaugcuucacg

SEQ ID NO: 3027489 - RNA, 19 nt, Artificial Sequence
  Description of Artificial Sequence: Synthetic oligonucleotide
ucuucccuuuauuggcagu

SEQ ID NO: 3027490 - RNA, 19 nt, Artificial Sequence
  Description of Artificial Sequence: Synthetic oligonucleotide
cuguacuggccaugacucc

SEQ ID NO: 3027491 - RNA, 19 nt, Artificial Sequence
  Description of Artificial Sequence: Synthetic oligonucleotide
cugaaggcagauuuuggua

SEQ ID NO: 3027492 - RNA, 19 nt, Artificial Sequence
  Description of Artificial Sequence: Synthetic oligonucleotide
acauaacggccugcaaauc

SEQ ID NO: 3027493 - RNA, 19 nt, Artificial Sequence
  Description of Artificial Sequence: Synthetic oligonucleotide
caguagggcugacaccuag

SEQ ID NO: 3027494 - RNA, 19 nt, Artificial Sequence
  Description of Artificial Sequence: Synthetic oligonucleotide
guucaaacccaccucuaua

SEQ ID NO: 3027495 - RNA, 19 nt, Artificial Sequence
  Description of Artificial Sequence: Synthetic oligonucleotide
augcuucacggcuuguaaa

SEQ ID NO: 3027496 - RNA, 19 nt, Artificial Sequence
  Description of Artificial Sequence: Synthetic oligonucleotide
ucccugaucuucccuuuau

SEQ ID NO: 3027497 - RNA, 19 nt, Artificial Sequence
  Description of Artificial Sequence: Synthetic oligonucleotide
acuggccaugacuccgcuc

SEQ ID NO: 3027498 - RNA, 19 nt, Artificial Sequence
  Description of Artificial Sequence: Synthetic oligonucleotide
acggccugcaaauccugca

SEQ ID NO: 3027499 - RNA, 19 nt, Artificial Sequence
  Description of Artificial Sequence: Synthetic oligonucleotide
cgcguuuugucauuuuggg

SEQ ID NO: 3027500 - RNA, 19 nt, Artificial Sequence
  Description of Artificial Sequence: Synthetic oligonucleotide
uggccaugacuccgcuccg

SEQ ID NO: 3027501 - RNA, 19 nt, Artificial Sequence
  Description of Artificial Sequence: Synthetic oligonucleotide
uggcaguagggcugacacc

SEQ ID NO: 3027502 - RNA, 19 nt, Artificial Sequence
  Description of Artificial Sequence: Synthetic oligonucleotide
acccaccucuauaguaccc

SEQ ID NO: 3027503 - RNA, 19 nt, Artificial Sequence
  Description of Artificial Sequence: Synthetic oligonucleotide
gagcaugauccgucgguga

SEQ ID NO: 3027504 - RNA, 19 nt, Artificial Sequence
  Description of Artificial Sequence: Synthetic oligonucleotide
cuauaguacccaccacuga

SEQ ID NO: 3027505 - RNA, 19 nt, Artificial Sequence
  Description of Artificial Sequence: Synthetic oligonucleotide
accacuguacuggccauga

SEQ ID NO: 3027506 - RNA, 19 nt, Artificial Sequence
  Description of Artificial Sequence: Synthetic oligonucleotide
ucacggcuuguaaaacaua

SEQ ID NO: 3027507 - RNA, 19 nt, Artificial Sequence
  Description of Artificial Sequence: Synthetic oligonucleotide
ggucaguccaaccgcuacc

SEQ ID NO: 3027508 - RNA, 19 nt, Artificial Sequence
  Description of Artificial Sequence: Synthetic oligonucleotide
ucaguccaaccgcuaccac

SEQ ID NO: 3027509 - RNA, 19 nt, Artificial Sequence
  Description of Artificial Sequence: Synthetic oligonucleotide
caugauccgucggugagca

SEQ ID NO: 3027510 - RNA, 19 nt, Artificial Sequence
  Description of Artificial Sequence: Synthetic oligonucleotide
caugcuucacggcuuguaa

SEQ ID NO: 3027511 - RNA, 19 nt, Artificial Sequence
  Description of Artificial Sequence: Synthetic oligonucleotide
ccaaccgcuaccacuguac

SEQ ID NO: 3027512 - RNA, 19 nt, Artificial Sequence
  Description of Artificial Sequence: Synthetic oligonucleotide
uuugucauuuuggguucaa

SEQ ID NO: 3027513 - RNA, 19 nt, Artificial Sequence
  Description of Artificial Sequence: Synthetic oligonucleotide
uccaaccgcuaccacugua

SEQ ID NO: 3027514 - RNA, 19 nt, Artificial Sequence
  Description of Artificial Sequence: Synthetic oligonucleotide
uugucauuuuggguucaaa

SEQ ID NO: 3027515 - RNA, 19 nt, Artificial Sequence
  Description of Artificial Sequence: Synthetic oligonucleotide
gucaguccaaccgcuacca

SEQ ID NO: 3027516 - RNA, 19 nt, Artificial Sequence
  Description of Artificial Sequence: Synthetic oligonucleotide
guagggcugacaccuagua

SEQ ID NO: 3027517 - RNA, 19 nt, Artificial Sequence
  Description of Artificial Sequence: Synthetic oligonucleotide
gagcaucccugaucuuccc

SEQ ID NO: 3027518 - RNA, 19 nt, Artificial Sequence
  Description of Artificial Sequence: Synthetic oligonucleotide
guggagagcgcagcggccc

SEQ ID NO: 3027519 - RNA, 19 nt, Artificial Sequence
  Description of Artificial Sequence: Synthetic oligonucleotide
accgccacagcacgccugu

SEQ ID NO: 3027520 - RNA, 19 nt, Artificial Sequence
  Description of Artificial Sequence: Synthetic oligonucleotide
ucaucccagcgcgagccca

SEQ ID NO: 3027521 - RNA, 19 nt, Artificial Sequence
  Description of Artificial Sequence: Synthetic oligonucleotide
guuuaagagcaugauccgu

SEQ ID NO: 3027522 - RNA, 19 nt, Artificial Sequence
  Description of Artificial Sequence: Synthetic oligonucleotide
uggagagcgcagcggccca

SEQ ID NO: 3027523 - RNA, 19 nt, Artificial Sequence
  Description of Artificial Sequence: Synthetic oligonucleotide
cacuguacuggccaugacu

SEQ ID NO: 3027524 - RNA, 19 nt, Artificial Sequence
  Description of Artificial Sequence: Synthetic oligonucleotide
agcggcccagccaacgccg

SEQ ID NO: 3027525 - RNA, 19 nt, Artificial Sequence
  Description of Artificial Sequence: Synthetic oligonucleotide
agauuuugguaggcuuuga

SEQ ID NO: 3027526 - RNA, 19 nt, Artificial Sequence
  Description of Artificial Sequence: Synthetic oligonucleotide
agcgcgcgcucaucccagc

SEQ ID NO: 3027527 - RNA, 19 nt, Artificial Sequence
  Description of Artificial Sequence: Synthetic oligonucleotide
cacagcacgccuguggaga

SEQ ID NO: 3027528 - RNA, 19 nt, Artificial Sequence
  Description of Artificial Sequence: Synthetic oligonucleotide
gcugccucgcguuuuguca

SEQ ID NO: 3027529 - RNA, 19 nt, Artificial Sequence
  Description of Artificial Sequence: Synthetic oligonucleotide
gccaugacuccgcuccgcg

SEQ ID NO: 3027530 - RNA, 19 nt, Artificial Sequence
  Description of Artificial Sequence: Synthetic oligonucleotide
gacuccgcuccgcggcccg

SEQ ID NO: 3027531 - RNA, 19 nt, Artificial Sequence
  Description of Artificial Sequence: Synthetic oligonucleotide
uacuggccaugacuccgcu

SEQ ID NO: 3027532 - RNA, 19 nt, Artificial Sequence
  Description of Artificial Sequence: Synthetic oligonucleotide
uaccacuguacuggccaug

SEQ ID NO: 3027533 - RNA, 19 nt, Artificial Sequence
  Description of Artificial Sequence: Synthetic oligonucleotide
cuccacaugcuucacggcu

SEQ ID NO: 3027534 - RNA, 19 nt, Artificial Sequence
  Description of Artificial Sequence: Synthetic oligonucleotide
gcucaucccagcgcgagcc

SEQ ID NO: 3027535 - RNA, 19 nt, Artificial Sequence
  Description of Artificial Sequence: Synthetic oligonucleotide
ggccugcaaauccugcagc

SEQ ID NO: 3027536 - RNA, 19 nt, Artificial Sequence
  Description of Artificial Sequence: Synthetic oligonucleotide
ggcaguagggcugacaccu

SEQ ID NO: 3027537 - RNA, 19 nt, Artificial Sequence
  Description of Artificial Sequence: Synthetic oligonucleotide
guacuggccaugacuccgc

SEQ ID NO: 3027538 - RNA, 19 nt, Artificial Sequence
  Description of Artificial Sequence: Synthetic oligonucleotide
gagcccaccgccacagcac

SEQ ID NO: 3027539 - RNA, 19 nt, Artificial Sequence
  Description of Artificial Sequence: Synthetic oligonucleotide
gcgcgcucaucccagcgcg

SEQ ID NO: 3027540 - RNA, 19 nt, Artificial Sequence
  Description of Artificial Sequence: Synthetic oligonucleotide
cagcggcccagccaacgcc

SEQ ID NO: 3027541 - RNA, 19 nt, Artificial Sequence
  Description of Artificial Sequence: Synthetic oligonucleotide
aggcagauuuugguaggcu

SEQ ID NO: 3027542 - RNA, 19 nt, Artificial Sequence
  Description of Artificial Sequence: Synthetic oligonucleotide
aguagggcugacaccuagu

SEQ ID NO: 3027543 - RNA, 19 nt, Artificial Sequence
  Description of Artificial Sequence: Synthetic oligonucleotide
cuucccuuuauuggcagua

SEQ ID NO: 3027544 - RNA, 19 nt, Artificial Sequence
  Description of Artificial Sequence: Synthetic oligonucleotide
caucccagcgcgagcccac

SEQ ID NO: 3027545 - RNA, 19 nt, Artificial Sequence
  Description of Artificial Sequence: Synthetic oligonucleotide
uaaugcugccucgcguuuu

SEQ ID NO: 3027546 - RNA, 19 nt, Artificial Sequence
  Description of Artificial Sequence: Synthetic oligonucleotide
ccacugaaggcagauuuug

SEQ ID NO: 3027547 - RNA, 19 nt, Artificial Sequence
  Description of Artificial Sequence: Synthetic oligonucleotide
gccuguggagagcgcagcg

SEQ ID NO: 3027548 - RNA, 19 nt, Artificial Sequence
  Description of Artificial Sequence: Synthetic oligonucleotide
acuugaggcuccacaugcu

SEQ ID NO: 3027549 - RNA, 19 nt, Artificial Sequence
  Description of Artificial Sequence: Synthetic oligonucleotide
cucaucccagcgcgagccc

SEQ ID NO: 3027550 - RNA, 19 nt, Artificial Sequence
  Description of Artificial Sequence: Synthetic oligonucleotide
caccacugaaggcagauuu

SEQ ID NO: 3027551 - RNA, 19 nt, Artificial Sequence
  Description of Artificial Sequence: Synthetic oligonucleotide
acaugcuucacggcuugua

SEQ ID NO: 3027552 - RNA, 19 nt, Artificial Sequence
  Description of Artificial Sequence: Synthetic oligonucleotide
caguccaaccgcuaccacu

SEQ ID NO: 3027553 - RNA, 19 nt, Artificial Sequence
  Description of Artificial Sequence: Synthetic oligonucleotide
aucccagcgcgagcccacc

SEQ ID NO: 3027554 - RNA, 19 nt, Artificial Sequence
  Description of Artificial Sequence: Synthetic oligonucleotide
cguuuugucauuuuggguu

SEQ ID NO: 3027555 - RNA, 19 nt, Artificial Sequence
  Description of Artificial Sequence: Synthetic oligonucleotide
cagcaauggucaguccaac

SEQ ID NO: 3027556 - RNA, 19 nt, Artificial Sequence
  Description of Artificial Sequence: Synthetic oligonucleotide
gccugcaaauccugcagca

SEQ ID NO: 3027557 - RNA, 19 nt, Artificial Sequence
  Description of Artificial Sequence: Synthetic oligonucleotide
ccgucggugagcaucccug

SEQ ID NO: 3027558 - RNA, 19 nt, Artificial Sequence
  Description of Artificial Sequence: Synthetic oligonucleotide
cagcgcgcgcucaucccag

SEQ ID NO: 3027559 - RNA, 19 nt, Artificial Sequence
  Description of Artificial Sequence: Synthetic oligonucleotide
guuuuacuugaggcuccac

SEQ ID NO: 3027560 - RNA, 19 nt, Artificial Sequence
  Description of Artificial Sequence: Synthetic oligonucleotide
cagcagcaauggucagucc

SEQ ID NO: 3027561 - RNA, 19 nt, Artificial Sequence
  Description of Artificial Sequence: Synthetic oligonucleotide
aucccugaucuucccuuua

SEQ ID NO: 3027562 - RNA, 19 nt, Artificial Sequence
  Description of Artificial Sequence: Synthetic oligonucleotide
accacugaaggcagauuuu

SEQ ID NO: 3027563 - RNA, 19 nt, Artificial Sequence
  Description of Artificial Sequence: Synthetic oligonucleotide
gggugguuuaagagcauga

SEQ ID NO: 3027564 - RNA, 19 nt, Artificial Sequence
  Description of Artificial Sequence: Synthetic oligonucleotide
gagcgcagcggcccagcca

SEQ ID NO: 3027565 - RNA, 19 nt, Artificial Sequence
  Description of Artificial Sequence: Synthetic oligonucleotide
caccgccacagcacgccug

SEQ ID NO: 3027566 - RNA, 19 nt, Artificial Sequence
  Description of Artificial Sequence: Synthetic oligonucleotide
gccacagcacgccugugga

SEQ ID NO: 3027567 - RNA, 19 nt, Artificial Sequence
  Description of Artificial Sequence: Synthetic oligonucleotide
gagagcgcagcggcccagc

SEQ ID NO: 3027568 - RNA, 19 nt, Artificial Sequence
  Description of Artificial Sequence: Synthetic oligonucleotide
ccaugacuccgcuccgcgg

SEQ ID NO: 3027569 - RNA, 19 nt, Artificial Sequence
  Description of Artificial Sequence: Synthetic oligonucleotide
ccaccucuauaguacccac

SEQ ID NO: 3027570 - RNA, 19 nt, Artificial Sequence
  Description of Artificial Sequence: Synthetic oligonucleotide
gcaugauccgucggugagc

SEQ ID NO: 3027571 - RNA, 19 nt, Artificial Sequence
  Description of Artificial Sequence: Synthetic oligonucleotide
gcuucacggcuuguaaaac

SEQ ID NO: 3027572 - RNA, 19 nt, Artificial Sequence
  Description of Artificial Sequence: Synthetic oligonucleotide
gcugacaccuaguauuaau

SEQ ID NO: 3027573 - RNA, 19 nt, Artificial Sequence
  Description of Artificial Sequence: Synthetic oligonucleotide
ccuaguauuaaugcugccu

SEQ ID NO: 3027574 - RNA, 19 nt, Artificial Sequence
  Description of Artificial Sequence: Synthetic oligonucleotide
ugacuccgcuccgcggccc

SEQ ID NO: 3027575 - RNA, 19 nt, Artificial Sequence
  Description of Artificial Sequence: Synthetic oligonucleotide
ggcccagccaacgccgccg

SEQ ID NO: 3027576 - RNA, 19 nt, Artificial Sequence
  Description of Artificial Sequence: Synthetic oligonucleotide
acgccuguggagagcgcag

SEQ ID NO: 3027577 - RNA, 19 nt, Artificial Sequence
  Description of Artificial Sequence: Synthetic oligonucleotide
gguucaaacccaccucuau

SEQ ID NO: 3027578 - RNA, 19 nt, Artificial Sequence
  Description of Artificial Sequence: Synthetic oligonucleotide
ggcagauuuugguaggcuu

SEQ ID NO: 3027579 - RNA, 19 nt, Artificial Sequence
  Description of Artificial Sequence: Synthetic oligonucleotide
cacgccuguggagagcgca

SEQ ID NO: 3027580 - RNA, 19 nt, Artificial Sequence
  Description of Artificial Sequence: Synthetic oligonucleotide
auccgucggugagcauccc

SEQ ID NO: 3027581 - RNA, 19 nt, Artificial Sequence
  Description of Artificial Sequence: Synthetic oligonucleotide
gcagcaauggucaguccaa

SEQ ID NO: 3027582 - RNA, 19 nt, Artificial Sequence
  Description of Artificial Sequence: Synthetic oligonucleotide
gcagcggcccagccaacgc

SEQ ID NO: 3027583 - RNA, 19 nt, Artificial Sequence
  Description of Artificial Sequence: Synthetic oligonucleotide
uccgcuccgcggcccggca

SEQ ID NO: 3027584 - RNA, 19 nt, Artificial Sequence
  Description of Artificial Sequence: Synthetic oligonucleotide
ccacaugcuucacggcuug

SEQ ID NO: 3027585 - RNA, 19 nt, Artificial Sequence
  Description of Artificial Sequence: Synthetic oligonucleotide
gcguuuugucauuuugggu

SEQ ID NO: 3027586 - RNA, 19 nt, Artificial Sequence
  Description of Artificial Sequence: Synthetic oligonucleotide
ggcagcgcgcgcucauccc

SEQ ID NO: 3027587 - RNA, 19 nt, Artificial Sequence
  Description of Artificial Sequence: Synthetic oligonucleotide
ugccucgcguuuugucauu

SEQ ID NO: 3027588 - RNA, 19 nt, Artificial Sequence
  Description of Artificial Sequence: Synthetic oligonucleotide
ggugguuuaagagcaugau

SEQ ID NO: 3027589 - RNA, 19 nt, Artificial Sequence
  Description of Artificial Sequence: Synthetic oligonucleotide
caaccgcuaccacuguacu

SEQ ID NO: 3027590 - RNA, 19 nt, Artificial Sequence
  Description of Artificial Sequence: Synthetic oligonucleotide
uauuggcaguagggcugac

SEQ ID NO: 3027591 - RNA, 19 nt, Artificial Sequence
  Description of Artificial Sequence: Synthetic oligonucleotide
gcgcgcgcucaucccagcg

SEQ ID NO: 3027592 - RNA, 19 nt, Artificial Sequence
  Description of Artificial Sequence: Synthetic oligonucleotide
gcagcgcgcgcucauccca

SEQ ID NO: 3027593 - RNA, 19 nt, Artificial Sequence
  Description of Artificial Sequence: Synthetic oligonucleotide
cagcacgccuguggagagc

SEQ ID NO: 3027594 - RNA, 19 nt, Artificial Sequence
  Description of Artificial Sequence: Synthetic oligonucleotide
cggccugcaaauccugcag

SEQ ID NO: 3027595 - RNA, 19 nt, Artificial Sequence
  Description of Artificial Sequence: Synthetic oligonucleotide
cccagcgcgagcccaccgc

SEQ ID NO: 3027596 - RNA, 19 nt, Artificial Sequence
  Description of Artificial Sequence: Synthetic oligonucleotide
auggucaguccaaccgcua

SEQ ID NO: 3027597 - RNA, 19 nt, Artificial Sequence
  Description of Artificial Sequence: Synthetic oligonucleotide
cccaccgccacagcacgcc

SEQ ID NO: 3027598 - RNA, 19 nt, Artificial Sequence
  Description of Artificial Sequence: Synthetic oligonucleotide
gcgcucaucccagcgcgag

SEQ ID NO: 3027599 - RNA, 19 nt, Artificial Sequence
  Description of Artificial Sequence: Synthetic oligonucleotide
cugccucgcguuuugucau

SEQ ID NO: 3027600 - RNA, 19 nt, Artificial Sequence
  Description of Artificial Sequence: Synthetic oligonucleotide
gcagauuuugguaggcuuu

SEQ ID NO: 3027601 - RNA, 19 nt, Artificial Sequence
  Description of Artificial Sequence: Synthetic oligonucleotide
ccgcuaccacuguacuggc

SEQ ID NO: 3027602 - RNA, 19 nt, Artificial Sequence
  Description of Artificial Sequence: Synthetic oligonucleotide
augauccgucggugagcau

SEQ ID NO: 3027603 - RNA, 19 nt, Artificial Sequence
  Description of Artificial Sequence: Synthetic oligonucleotide
cccaccucuauaguaccca

SEQ ID NO: 3027604 - RNA, 19 nt, Artificial Sequence
  Description of Artificial Sequence: Synthetic oligonucleotide
ggccaugacuccgcuccgc

SEQ ID NO: 3027605 - RNA, 19 nt, Artificial Sequence
  Description of Artificial Sequence: Synthetic oligonucleotide
cuaccacuguacuggccau

SEQ ID NO: 3027606 - RNA, 19 nt, Artificial Sequence
  Description of Artificial Sequence: Synthetic oligonucleotide
gcaucccugaucuucccuu

SEQ ID NO: 3027607 - RNA, 19 nt, Artificial Sequence
  Description of Artificial Sequence: Synthetic oligonucleotide
gucggugagcaucccugau

SEQ ID NO: 3027608 - RNA, 19 nt, Artificial Sequence
  Description of Artificial Sequence: Synthetic oligonucleotide
gggcugacaccuaguauua

SEQ ID NO: 3027609 - RNA, 19 nt, Artificial Sequence
  Description of Artificial Sequence: Synthetic oligonucleotide
ggagagcgcagcggcccag

SEQ ID NO: 3027610 - RNA, 19 nt, Artificial Sequence
  Description of Artificial Sequence: Synthetic oligonucleotide
augcugccucgcguuuugu

SEQ ID NO: 3027611 - RNA, 19 nt, Artificial Sequence
  Description of Artificial Sequence: Synthetic oligonucleotide
cagcgcgagcccaccgcca

SEQ ID NO: 3027612 - RNA, 19 nt, Artificial Sequence
  Description of Artificial Sequence: Synthetic oligonucleotide
cgcuaccacuguacuggcc

SEQ ID NO: 3027613 - RNA, 19 nt, Artificial Sequence
  Description of Artificial Sequence: Synthetic oligonucleotide
cggugagcaucccugaucu

SEQ ID NO: 3027614 - RNA, 19 nt, Artificial Sequence
  Description of Artificial Sequence: Synthetic oligonucleotide
gcccagccaacgccgccgc

SEQ ID NO: 3027615 - RNA, 19 nt, Artificial Sequence
  Description of Artificial Sequence: Synthetic oligonucleotide
ccacuguacuggccaugac

SEQ ID NO: 3027616 - RNA, 19 nt, Artificial Sequence
  Description of Artificial Sequence: Synthetic oligonucleotide
cgcgcgcucaucccagcgc

SEQ ID NO: 3027617 - RNA, 19 nt, Artificial Sequence
  Description of Artificial Sequence: Synthetic oligonucleotide
ggguucaaacccaccucua

SEQ ID NO: 3027618 - RNA, 19 nt, Artificial Sequence
  Description of Artificial Sequence: Synthetic oligonucleotide
acccaccacugaaggcaga

SEQ ID NO: 3027619 - RNA, 19 nt, Artificial Sequence
  Description of Artificial Sequence: Synthetic oligonucleotide
cggcagcgcgcgcucaucc

SEQ ID NO: 3027620 - RNA, 19 nt, Artificial Sequence
  Description of Artificial Sequence: Synthetic oligonucleotide
guccaaccgcuaccacugu

SEQ ID NO: 3027621 - RNA, 19 nt, Artificial Sequence
  Description of Artificial Sequence: Synthetic oligonucleotide
ggcugacaccuaguauuaa

SEQ ID NO: 3027622 - RNA, 19 nt, Artificial Sequence
  Description of Artificial Sequence: Synthetic oligonucleotide
cugggugguuuaagagcau

SEQ ID NO: 3027623 - RNA, 19 nt, Artificial Sequence
  Description of Artificial Sequence: Synthetic oligonucleotide
cgcagcggcccagccaacg

SEQ ID NO: 3027624 - RNA, 19 nt, Artificial Sequence
  Description of Artificial Sequence: Synthetic oligonucleotide
cgcucaucccagcgcgagc

SEQ ID NO: 3027625 - RNA, 19 nt, Artificial Sequence
  Description of Artificial Sequence: Synthetic oligonucleotide
cgcgagcccaccgccacag

SEQ ID NO: 3027626 - RNA, 19 nt, Artificial Sequence
  Description of Artificial Sequence: Synthetic oligonucleotide
gcuccgcggcccggcagcg

SEQ ID NO: 3027627 - RNA, 19 nt, Artificial Sequence
  Description of Artificial Sequence: Synthetic oligonucleotide
cuccgcggcccggcagcgc

SEQ ID NO: 3027628 - RNA, 19 nt, Artificial Sequence
  Description of Artificial Sequence: Synthetic oligonucleotide
cgucggugagcaucccuga

SEQ ID NO: 3027629 - RNA, 19 nt, Artificial Sequence
  Description of Artificial Sequence: Synthetic oligonucleotide
cgccuguggagagcgcagc

SEQ ID NO: 3027630 - RNA, 19 nt, Artificial Sequence
  Description of Artificial Sequence: Synthetic oligonucleotide
gcgagcccaccgccacagc

SEQ ID NO: 3027631 - RNA, 19 nt, Artificial Sequence
  Description of Artificial Sequence: Synthetic oligonucleotide
ccuugucugggugguuuaa

SEQ ID NO: 3027632 - RNA, 19 nt, Artificial Sequence
  Description of Artificial Sequence: Synthetic oligonucleotide
cccuugucugggugguuua

SEQ ID NO: 3027633 - RNA, 19 nt, Artificial Sequence
  Description of Artificial Sequence: Synthetic oligonucleotide
cccagccaacgccgccgcc

SEQ ID NO: 3027634 - RNA, 19 nt, Artificial Sequence
  Description of Artificial Sequence: Synthetic oligonucleotide
gcggcccagccaacgccgc

SEQ ID NO: 3027635 - RNA, 19 nt, Artificial Sequence
  Description of Artificial Sequence: Synthetic oligonucleotide
cacaugcuucacggcuugu

SEQ ID NO: 3027636 - RNA, 19 nt, Artificial Sequence
  Description of Artificial Sequence: Synthetic oligonucleotide
gcccaccgccacagcacgc

SEQ ID NO: 3027637 - RNA, 19 nt, Artificial Sequence
  Description of Artificial Sequence: Synthetic oligonucleotide
ggcccggcagcgcgcgcuc

SEQ ID NO: 3027638 - RNA, 19 nt, Artificial Sequence
  Description of Artificial Sequence: Synthetic oligonucleotide
ggugagcaucccugaucuu

SEQ ID NO: 3027639 - RNA, 19 nt, Artificial Sequence
  Description of Artificial Sequence: Synthetic oligonucleotide
gcacgccuguggagagcgc

SEQ ID NO: 3027640 - RNA, 19 nt, Artificial Sequence
  Description of Artificial Sequence: Synthetic oligonucleotide
ccgcuccgcggcccggcag

SEQ ID NO: 3027641 - RNA, 19 nt, Artificial Sequence
  Description of Artificial Sequence: Synthetic oligonucleotide
gcgcgagcccaccgccaca

SEQ ID NO: 3027642 - RNA, 19 nt, Artificial Sequence
  Description of Artificial Sequence: Synthetic oligonucleotide
gcaguagggcugacaccua

SEQ ID NO: 3027643 - RNA, 19 nt, Artificial Sequence
  Description of Artificial Sequence: Synthetic oligonucleotide
cggcccagccaacgccgcc

SEQ ID NO: 3027644 - RNA, 19 nt, Artificial Sequence
  Description of Artificial Sequence: Synthetic oligonucleotide
cccugaucuucccuuuauu

SEQ ID NO: 3027645 - RNA, 19 nt, Artificial Sequence
  Description of Artificial Sequence: Synthetic oligonucleotide
cccaccacugaaggcagau

SEQ ID NO: 3027646 - RNA, 19 nt, Artificial Sequence
  Description of Artificial Sequence: Synthetic oligonucleotide
ccgcggcccggcagcgcgc

SEQ ID NO: 3027647 - RNA, 19 nt, Artificial Sequence
  Description of Artificial Sequence: Synthetic oligonucleotide
ccggcagcgcgcgcucauc

SEQ ID NO: 3027648 - RNA, 19 nt, Artificial Sequence
  Description of Artificial Sequence: Synthetic oligonucleotide
cgcggcccggcagcgcgcg

SEQ ID NO: 3027649 - RNA, 19 nt, Artificial Sequence
  Description of Artificial Sequence: Synthetic oligonucleotide
gccucgcguuuugucauuu

SEQ ID NO: 3027650 - RNA, 19 nt, Artificial Sequence
  Description of Artificial Sequence: Synthetic oligonucleotide
cgcgcucaucccagcgcga

SEQ ID NO: 3027651 - RNA, 19 nt, Artificial Sequence
  Description of Artificial Sequence: Synthetic oligonucleotide
ccucgcguuuugucauuuu

SEQ ID NO: 3027652 - RNA, 19 nt, Artificial Sequence
  Description of Artificial Sequence: Synthetic oligonucleotide
ccaccgccacagcacgccu

SEQ ID NO: 3027653 - RNA, 19 nt, Artificial Sequence
  Description of Artificial Sequence: Synthetic oligonucleotide
gcgcagcggcccagccaac

SEQ ID NO: 3027654 - RNA, 19 nt, Artificial Sequence
  Description of Artificial Sequence: Synthetic oligonucleotide
gcccggcagcgcgcgcuca

SEQ ID NO: 3027655 - RNA, 19 nt, Artificial Sequence
  Description of Artificial Sequence: Synthetic oligonucleotide
ccaccacugaaggcagauu

SEQ ID NO: 3027656 - RNA, 19 nt, Artificial Sequence
  Description of Artificial Sequence: Synthetic oligonucleotide
cccggcagcgcgcgcucau

SEQ ID NO: 3027657 - RNA, 19 nt, Artificial Sequence
  Description of Artificial Sequence: Synthetic oligonucleotide
cggcccggcagcgcgcgcu

SEQ ID NO: 3027658 - RNA, 19 nt, Artificial Sequence
  Description of Artificial Sequence: Synthetic oligonucleotide
ucaaaggucaccauggagg

SEQ ID NO: 3027659 - RNA, 19 nt, Artificial Sequence
  Description of Artificial Sequence: Synthetic oligonucleotide
uguguuuucauccagaaua

SEQ ID NO: 3027660 - RNA, 19 nt, Artificial Sequence
  Description of Artificial Sequence: Synthetic oligonucleotide
ucguauaugaguuucauca

SEQ ID NO: 3027661 - RNA, 19 nt, Artificial Sequence
  Description of Artificial Sequence: Synthetic oligonucleotide
aaagucacuaggcagauga

SEQ ID NO: 3027662 - RNA, 19 nt, Artificial Sequence
  Description of Artificial Sequence: Synthetic oligonucleotide
ucaucaaaggucaccaugg

SEQ ID NO: 3027663 - RNA, 19 nt, Artificial Sequence
  Description of Artificial Sequence: Synthetic oligonucleotide
uggacuuugacuuucagcu

SEQ ID NO: 3027664 - RNA, 19 nt, Artificial Sequence
  Description of Artificial Sequence: Synthetic oligonucleotide
ucauccagaauacugcugg

SEQ ID NO: 3027665 - RNA, 19 nt, Artificial Sequence
  Description of Artificial Sequence: Synthetic oligonucleotide
uuuguauguguuuucaucc

SEQ ID NO: 3027666 - RNA, 19 nt, Artificial Sequence
  Description of Artificial Sequence: Synthetic oligonucleotide
uauaugaguuucaucaaag

SEQ ID NO: 3027667 - RNA, 19 nt, Artificial Sequence
  Description of Artificial Sequence: Synthetic oligonucleotide
aauaugguggacuuugacu

SEQ ID NO: 3027668 - RNA, 19 nt, Artificial Sequence
  Description of Artificial Sequence: Synthetic oligonucleotide
uuuucauccagaauacugc

SEQ ID NO: 3027669 - RNA, 19 nt, Artificial Sequence
  Description of Artificial Sequence: Synthetic oligonucleotide
uuggagauguucaagaugu

SEQ ID NO: 3027670 - RNA, 19 nt, Artificial Sequence
  Description of Artificial Sequence: Synthetic oligonucleotide
ugaguuucaucaaagguca

SEQ ID NO: 3027671 - RNA, 19 nt, Artificial Sequence
  Description of Artificial Sequence: Synthetic oligonucleotide
aaggcaucuguucacuagc

SEQ ID NO: 3027672 - RNA, 19 nt, Artificial Sequence
  Description of Artificial Sequence: Synthetic oligonucleotide
agucuugucaccgugaugg

SEQ ID NO: 3027673 - RNA, 19 nt, Artificial Sequence
  Description of Artificial Sequence: Synthetic oligonucleotide
ucugcagucagucuuguca

SEQ ID NO: 3027674 - RNA, 19 nt, Artificial Sequence
  Description of Artificial Sequence: Synthetic oligonucleotide
gagauguucaagauguucg

SEQ ID NO: 3027675 - RNA, 19 nt, Artificial Sequence
  Description of Artificial Sequence: Synthetic oligonucleotide
uuuguaaggcaucuguuca

SEQ ID NO: 3027676 - RNA, 19 nt, Artificial Sequence
  Description of Artificial Sequence: Synthetic oligonucleotide
gauacacagcaauggaucg

SEQ ID NO: 3027677 - RNA, 19 nt, Artificial Sequence
  Description of Artificial Sequence: Synthetic oligonucleotide
auguucgucaugcugaguc

SEQ ID NO: 3027678 - RNA, 19 nt, Artificial Sequence
  Description of Artificial Sequence: Synthetic oligonucleotide
augaguuucaucaaagguc

SEQ ID NO: 3027679 - RNA, 19 nt, Artificial Sequence
  Description of Artificial Sequence: Synthetic oligonucleotide
aggccuauaggauacacag

SEQ ID NO: 3027680 - RNA, 19 nt, Artificial Sequence
  Description of Artificial Sequence: Synthetic oligonucleotide
aagauggugagggugaaag

SEQ ID NO: 3027681 - RNA, 19 nt, Artificial Sequence
  Description of Artificial Sequence: Synthetic oligonucleotide
aaaggacggaugugcaggc

SEQ ID NO: 3027682 - RNA, 19 nt, Artificial Sequence
  Description of Artificial Sequence: Synthetic oligonucleotide
uucaucaaaggucaccaug

SEQ ID NO: 3027683 - RNA, 19 nt, Artificial Sequence
  Description of Artificial Sequence: Synthetic oligonucleotide
uucaagauguucgucaugc

SEQ ID NO: 3027684 - RNA, 19 nt, Artificial Sequence
  Description of Artificial Sequence: Synthetic oligonucleotide
uaccacagaggucuggugg

SEQ ID NO: 3027685 - RNA, 19 nt, Artificial Sequence
  Description of Artificial Sequence: Synthetic oligonucleotide
gagggugaaagucacuagg

SEQ ID NO: 3027686 - RNA, 19 nt, Artificial Sequence
  Description of Artificial Sequence: Synthetic oligonucleotide
uuuuguauguguuuucauc

SEQ ID NO: 3027687 - RNA, 19 nt, Artificial Sequence
  Description of Artificial Sequence: Synthetic oligonucleotide
gacuuugacuuucagcugc

SEQ ID NO: 3027688 - RNA, 19 nt, Artificial Sequence
  Description of Artificial Sequence: Synthetic oligonucleotide
aauacugcuggcaacuuug

SEQ ID NO: 3027689 - RNA, 19 nt, Artificial Sequence
  Description of Artificial Sequence: Synthetic oligonucleotide
agcaauggaucguggauac

SEQ ID NO: 3027690 - RNA, 19 nt, Artificial Sequence
  Description of Artificial Sequence: Synthetic oligonucleotide
uguauguguuuucauccag

SEQ ID NO: 3027691 - RNA, 19 nt, Artificial Sequence
  Description of Artificial Sequence: Synthetic oligonucleotide
aguuucaucaaaggucacc

SEQ ID NO: 3027692 - RNA, 19 nt, Artificial Sequence
  Description of Artificial Sequence: Synthetic oligonucleotide
auaugguggacuuugacuu

SEQ ID NO: 3027693 - RNA, 19 nt, Artificial Sequence
  Description of Artificial Sequence: Synthetic oligonucleotide
uguucacuagccaaaggac

SEQ ID NO: 3027694 - RNA, 19 nt, Artificial Sequence
  Description of Artificial Sequence: Synthetic oligonucleotide
agaggucugguggagaacc

SEQ ID NO: 3027695 - RNA, 19 nt, Artificial Sequence
  Description of Artificial Sequence: Synthetic oligonucleotide
aagauguucgucaugcuga

SEQ ID NO: 3027696 - RNA, 19 nt, Artificial Sequence
  Description of Artificial Sequence: Synthetic oligonucleotide
gaugaucacggccaggaac

SEQ ID NO: 3027697 - RNA, 19 nt, Artificial Sequence
  Description of Artificial Sequence: Synthetic oligonucleotide
uucagcugcgcacagauuu

SEQ ID NO: 3027698 - RNA, 19 nt, Artificial Sequence
  Description of Artificial Sequence: Synthetic oligonucleotide
accgugaugggguagaagu

SEQ ID NO: 3027699 - RNA, 19 nt, Artificial Sequence
  Description of Artificial Sequence: Synthetic oligonucleotide
auguucaagauguucguca

SEQ ID NO: 3027700 - RNA, 19 nt, Artificial Sequence
  Description of Artificial Sequence: Synthetic oligonucleotide
gaggaguugaggccuauag

SEQ ID NO: 3027701 - RNA, 19 nt, Artificial Sequence
  Description of Artificial Sequence: Synthetic oligonucleotide
uaaggcaucuguucacuag

SEQ ID NO: 3027702 - RNA, 19 nt, Artificial Sequence
  Description of Artificial Sequence: Synthetic oligonucleotide
uugacuuucagcugcgcac

SEQ ID NO: 3027703 - RNA, 19 nt, Artificial Sequence
  Description of Artificial Sequence: Synthetic oligonucleotide
uuugacuuucagcugcgca

SEQ ID NO: 3027704 - RNA, 19 nt, Artificial Sequence
  Description of Artificial Sequence: Synthetic oligonucleotide
cuuuguaaggcaucuguuc

SEQ ID NO: 3027705 - RNA, 19 nt, Artificial Sequence
  Description of Artificial Sequence: Synthetic oligonucleotide
uaggcagaugaucacggcc

SEQ ID NO: 3027706 - RNA, 19 nt, Artificial Sequence
  Description of Artificial Sequence: Synthetic oligonucleotide
agccaaaggacggaugugc

SEQ ID NO: 3027707 - RNA, 19 nt, Artificial Sequence
  Description of Artificial Sequence: Synthetic oligonucleotide
guucacuagccaaaggacg

SEQ ID NO: 3027708 - RNA, 19 nt, Artificial Sequence
  Description of Artificial Sequence: Synthetic oligonucleotide
acugcuggcaacuuuguaa

SEQ ID NO: 3027709 - RNA, 19 nt, Artificial Sequence
  Description of Artificial Sequence: Synthetic oligonucleotide
ggugaaagucacuaggcag

SEQ ID NO: 3027710 - RNA, 19 nt, Artificial Sequence
  Description of Artificial Sequence: Synthetic oligonucleotide
aaggucaccauggaggagu

SEQ ID NO: 3027711 - RNA, 19 nt, Artificial Sequence
  Description of Artificial Sequence: Synthetic oligonucleotide
uguucgucaugcugagucg

SEQ ID NO: 3027712 - RNA, 19 nt, Artificial Sequence
  Description of Artificial Sequence: Synthetic oligonucleotide
ucuguucacuagccaaagg

SEQ ID NO: 3027713 - RNA, 19 nt, Artificial Sequence
  Description of Artificial Sequence: Synthetic oligonucleotide
ugcugagucguauaugagu

SEQ ID NO: 3027714 - RNA, 19 nt, Artificial Sequence
  Description of Artificial Sequence: Synthetic oligonucleotide
caaaggacggaugugcagg

SEQ ID NO: 3027715 - RNA, 19 nt, Artificial Sequence
  Description of Artificial Sequence: Synthetic oligonucleotide
aggaguugaggccuauagg

SEQ ID NO: 3027716 - RNA, 19 nt, Artificial Sequence
  Description of Artificial Sequence: Synthetic oligonucleotide
uggccuaccacagaggucu

SEQ ID NO: 3027717 - RNA, 19 nt, Artificial Sequence
  Description of Artificial Sequence: Synthetic oligonucleotide
uuucauccagaauacugcu

SEQ ID NO: 3027718 - RNA, 19 nt, Artificial Sequence
  Description of Artificial Sequence: Synthetic oligonucleotide
uauguguuuucauccagaa

SEQ ID NO: 3027719 - RNA, 19 nt, Artificial Sequence
  Description of Artificial Sequence: Synthetic oligonucleotide
caauggaucguggauacag

SEQ ID NO: 3027720 - RNA, 19 nt, Artificial Sequence
  Description of Artificial Sequence: Synthetic oligonucleotide
ugcgcacagauuuuguaug

SEQ ID NO: 3027721 - RNA, 19 nt, Artificial Sequence
  Description of Artificial Sequence: Synthetic oligonucleotide
guuggagauguucaagaug

SEQ ID NO: 3027722 - RNA, 19 nt, Artificial Sequence
  Description of Artificial Sequence: Synthetic oligonucleotide
uccagaauacugcuggcaa

SEQ ID NO: 3027723 - RNA, 19 nt, Artificial Sequence
  Description of Artificial Sequence: Synthetic oligonucleotide
aauggaucguggauacagg

SEQ ID NO: 3027724 - RNA, 19 nt, Artificial Sequence
  Description of Artificial Sequence: Synthetic oligonucleotide
agggugaaagucacuaggc

SEQ ID NO: 3027725 - RNA, 19 nt, Artificial Sequence
  Description of Artificial Sequence: Synthetic oligonucleotide
caugcugagucguauauga

SEQ ID NO: 3027726 - RNA, 19 nt, Artificial Sequence
  Description of Artificial Sequence: Synthetic oligonucleotide
gauggugagggugaaaguc

SEQ ID NO: 3027727 - RNA, 19 nt, Artificial Sequence
  Description of Artificial Sequence: Synthetic oligonucleotide
guagaaguugcuguuggag

SEQ ID NO: 3027728 - RNA, 19 nt, Artificial Sequence
  Description of Artificial Sequence: Synthetic oligonucleotide
caagauguucgucaugcug

SEQ ID NO: 3027729 - RNA, 19 nt, Artificial Sequence
  Description of Artificial Sequence: Synthetic oligonucleotide
agaaguugcuguuggagau

SEQ ID NO: 3027730 - RNA, 19 nt, Artificial Sequence
  Description of Artificial Sequence: Synthetic oligonucleotide
cugcuggcaacuuuguaag

SEQ ID NO: 3027731 - RNA, 19 nt, Artificial Sequence
  Description of Artificial Sequence: Synthetic oligonucleotide
gaauaugguggacuuugac

SEQ ID NO: 3027732 - RNA, 19 nt, Artificial Sequence
  Description of Artificial Sequence: Synthetic oligonucleotide
ggaguugaggccuauagga

SEQ ID NO: 3027733 - RNA, 19 nt, Artificial Sequence
  Description of Artificial Sequence: Synthetic oligonucleotide
uuguauguguuuucaucca

SEQ ID NO: 3027734 - RNA, 19 nt, Artificial Sequence
  Description of Artificial Sequence: Synthetic oligonucleotide
uucauccagaauacugcug

SEQ ID NO: 3027735 - RNA, 19 nt, Artificial Sequence
  Description of Artificial Sequence: Synthetic oligonucleotide
aggacggaugugcaggcgg

SEQ ID NO: 3027736 - RNA, 19 nt, Artificial Sequence
  Description of Artificial Sequence: Synthetic oligonucleotide
augggguagaaguugcugu

SEQ ID NO: 3027737 - RNA, 19 nt, Artificial Sequence
  Description of Artificial Sequence: Synthetic oligonucleotide
aaccucugcagucagucuu

SEQ ID NO: 3027738 - RNA, 19 nt, Artificial Sequence
  Description of Artificial Sequence: Synthetic oligonucleotide
cuguucacuagccaaagga

SEQ ID NO: 3027739 - RNA, 19 nt, Artificial Sequence
  Description of Artificial Sequence: Synthetic oligonucleotide
ugagggugaaagucacuag

SEQ ID NO: 3027740 - RNA, 19 nt, Artificial Sequence
  Description of Artificial Sequence: Synthetic oligonucleotide
agauguucaagauguucgu

SEQ ID NO: 3027741 - RNA, 19 nt, Artificial Sequence
  Description of Artificial Sequence: Synthetic oligonucleotide
guuucaucaaaggucacca

SEQ ID NO: 3027742 - RNA, 19 nt, Artificial Sequence
  Description of Artificial Sequence: Synthetic oligonucleotide
guggacuuugacuuucagc

SEQ ID NO: 3027743 - RNA, 19 nt, Artificial Sequence
  Description of Artificial Sequence: Synthetic oligonucleotide
agucacuaggcagaugauc

SEQ ID NO: 3027744 - RNA, 19 nt, Artificial Sequence
  Description of Artificial Sequence: Synthetic oligonucleotide
ugagucguauaugaguuuc

SEQ ID NO: 3027745 - RNA, 19 nt, Artificial Sequence
  Description of Artificial Sequence: Synthetic oligonucleotide
acuaggcagaugaucacgg

SEQ ID NO: 3027746 - RNA, 19 nt, Artificial Sequence
  Description of Artificial Sequence: Synthetic oligonucleotide
gccuauaggauacacagca

SEQ ID NO: 3027747 - RNA, 19 nt, Artificial Sequence
  Description of Artificial Sequence: Synthetic oligonucleotide
ucugguggagaaccucugc

SEQ ID NO: 3027748 - RNA, 19 nt, Artificial Sequence
  Description of Artificial Sequence: Synthetic oligonucleotide
uguucaagauguucgucau

SEQ ID NO: 3027749 - RNA, 19 nt, Artificial Sequence
  Description of Artificial Sequence: Synthetic oligonucleotide
ucuugucaccgugaugggg

SEQ ID NO: 3027750 - RNA, 19 nt, Artificial Sequence
  Description of Artificial Sequence: Synthetic oligonucleotide
gucacuaggcagaugauca

SEQ ID NO: 3027751 - RNA, 19 nt, Artificial Sequence
  Description of Artificial Sequence: Synthetic oligonucleotide
agauguucgucaugcugag

SEQ ID NO: 3027752 - RNA, 19 nt, Artificial Sequence
  Description of Artificial Sequence: Synthetic oligonucleotide
acagauuuuguauguguuu

SEQ ID NO: 3027753 - RNA, 19 nt, Artificial Sequence
  Description of Artificial Sequence: Synthetic oligonucleotide
auggaucguggauacagga

SEQ ID NO: 3027754 - RNA, 19 nt, Artificial Sequence
  Description of Artificial Sequence: Synthetic oligonucleotide
aaguugcuguuggagaugu

SEQ ID NO: 3027755 - RNA, 19 nt, Artificial Sequence
  Description of Artificial Sequence: Synthetic oligonucleotide
acagcaauggaucguggau

SEQ ID NO: 3027756 - RNA, 19 nt, Artificial Sequence
  Description of Artificial Sequence: Synthetic oligonucleotide
guauaugaguuucaucaaa

SEQ ID NO: 3027757 - RNA, 19 nt, Artificial Sequence
  Description of Artificial Sequence: Synthetic oligonucleotide
uuguaaggcaucuguucac

SEQ ID NO: 3027758 - RNA, 19 nt, Artificial Sequence
  Description of Artificial Sequence: Synthetic oligonucleotide
gaugggguagaaguugcug

SEQ ID NO: 3027759 - RNA, 19 nt, Artificial Sequence
  Description of Artificial Sequence: Synthetic oligonucleotide
auuuuguauguguuuucau

SEQ ID NO: 3027760 - RNA, 19 nt, Artificial Sequence
  Description of Artificial Sequence: Synthetic oligonucleotide
aucacggccaggaacacug

SEQ ID NO: 3027761 - RNA, 19 nt, Artificial Sequence
  Description of Artificial Sequence: Synthetic oligonucleotide
uguaaggcaucuguucacu

SEQ ID NO: 3027762 - RNA, 19 nt, Artificial Sequence
  Description of Artificial Sequence: Synthetic oligonucleotide
ugcaggcggaggcugcugg

SEQ ID NO: 3027763 - RNA, 19 nt, Artificial Sequence
  Description of Artificial Sequence: Synthetic oligonucleotide
aguugaggccuauaggaua

SEQ ID NO: 3027764 - RNA, 19 nt, Artificial Sequence
  Description of Artificial Sequence: Synthetic oligonucleotide
augaucacggccaggaaca

SEQ ID NO: 3027765 - RNA, 19 nt, Artificial Sequence
  Description of Artificial Sequence: Synthetic oligonucleotide
uggaucguggauacaggaa

SEQ ID NO: 3027766 - RNA, 19 nt, Artificial Sequence
  Description of Artificial Sequence: Synthetic oligonucleotide
ucagucuugucaccgugau

SEQ ID NO: 3027767 - RNA, 19 nt, Artificial Sequence
  Description of Artificial Sequence: Synthetic oligonucleotide
cugcagucagucuugucac

SEQ ID NO: 3027768 - RNA, 19 nt, Artificial Sequence
  Description of Artificial Sequence: Synthetic oligonucleotide
ucaccauggaggaguugag

SEQ ID NO: 3027769 - RNA, 19 nt, Artificial Sequence
  Description of Artificial Sequence: Synthetic oligonucleotide
guugaggccuauaggauac

SEQ ID NO: 3027770 - RNA, 19 nt, Artificial Sequence
  Description of Artificial Sequence: Synthetic oligonucleotide
gugaaagucacuaggcaga

SEQ ID NO: 3027771 - RNA, 19 nt, Artificial Sequence
  Description of Artificial Sequence: Synthetic oligonucleotide
guugcuguuggagauguuc

SEQ ID NO: 3027772 - RNA, 19 nt, Artificial Sequence
  Description of Artificial Sequence: Synthetic oligonucleotide
agucagucuugucaccgug

SEQ ID NO: 3027773 - RNA, 19 nt, Artificial Sequence
  Description of Artificial Sequence: Synthetic oligonucleotide
cacuaggcagaugaucacg

SEQ ID NO: 3027774 - RNA, 19 nt, Artificial Sequence
  Description of Artificial Sequence: Synthetic oligonucleotide
caaaggucaccauggagga

SEQ ID NO: 3027775 - RNA, 19 nt, Artificial Sequence
  Description of Artificial Sequence: Synthetic oligonucleotide
ugacuuucagcugcgcaca

SEQ ID NO: 3027776 - RNA, 19 nt, Artificial Sequence
  Description of Artificial Sequence: Synthetic oligonucleotide
uggugagggugaaagucac

SEQ ID NO: 3027777 - RNA, 19 nt, Artificial Sequence
  Description of Artificial Sequence: Synthetic oligonucleotide
ugcuggcaacuuuguaagg

SEQ ID NO: 3027778 - RNA, 19 nt, Artificial Sequence
  Description of Artificial Sequence: Synthetic oligonucleotide
gucaccauggaggaguuga

SEQ ID NO: 3027779 - RNA, 19 nt, Artificial Sequence
  Description of Artificial Sequence: Synthetic oligonucleotide
augguggacuuugacuuuc

SEQ ID NO: 3027780 - RNA, 19 nt, Artificial Sequence
  Description of Artificial Sequence: Synthetic oligonucleotide
uggagaaccucugcaguca

SEQ ID NO: 3027781 - RNA, 19 nt, Artificial Sequence
  Description of Artificial Sequence: Synthetic oligonucleotide
aggcaucuguucacuagcc

SEQ ID NO: 3027782 - RNA, 19 nt, Artificial Sequence
  Description of Artificial Sequence: Synthetic oligonucleotide
accacagaggucuggugga

SEQ ID NO: 3027783 - RNA, 19 nt, Artificial Sequence
  Description of Artificial Sequence: Synthetic oligonucleotide
guguuuucauccagaauac

SEQ ID NO: 3027784 - RNA, 19 nt, Artificial Sequence
  Description of Artificial Sequence: Synthetic oligonucleotide
ucaugcugagucguauaug

SEQ ID NO: 3027785 - RNA, 19 nt, Artificial Sequence
  Description of Artificial Sequence: Synthetic oligonucleotide
gauguucaagauguucguc

SEQ ID NO: 3027786 - RNA, 19 nt, Artificial Sequence
  Description of Artificial Sequence: Synthetic oligonucleotide
aucuguucacuagccaaag

SEQ ID NO: 3027787 - RNA, 19 nt, Artificial Sequence
  Description of Artificial Sequence: Synthetic oligonucleotide
ucaagauguucgucaugcu

SEQ ID NO: 3027788 - RNA, 19 nt, Artificial Sequence
  Description of Artificial Sequence: Synthetic oligonucleotide
acagaggucugguggagaa

SEQ ID NO: 3027789 - RNA, 19 nt, Artificial Sequence
  Description of Artificial Sequence: Synthetic oligonucleotide
ucacuaggcagaugaucac

SEQ ID NO: 3027790 - RNA, 19 nt, Artificial Sequence
  Description of Artificial Sequence: Synthetic oligonucleotide
gaaguugcuguuggagaug

SEQ ID NO: 3027791 - RNA, 19 nt, Artificial Sequence
  Description of Artificial Sequence: Synthetic oligonucleotide
cauccagaauacugcuggc

SEQ ID NO: 3027792 - RNA, 19 nt, Artificial Sequence
  Description of Artificial Sequence: Synthetic oligonucleotide
uguuuucauccagaauacu

SEQ ID NO: 3027793 - RNA, 19 nt, Artificial Sequence
  Description of Artificial Sequence: Synthetic oligonucleotide
aaaggucaccauggaggag

SEQ ID NO: 3027794 - RNA, 19 nt, Artificial Sequence
  Description of Artificial Sequence: Synthetic oligonucleotide
uggcaacuuuguaaggcau

SEQ ID NO: 3027795 - RNA, 19 nt, Artificial Sequence
  Description of Artificial Sequence: Synthetic oligonucleotide
aaggacggaugugcaggcg

SEQ ID NO: 3027796 - RNA, 19 nt, Artificial Sequence
  Description of Artificial Sequence: Synthetic oligonucleotide
ggaucguggauacaggaaa

SEQ ID NO: 3027797 - RNA, 19 nt, Artificial Sequence
  Description of Artificial Sequence: Synthetic oligonucleotide
acuuugacuuucagcugcg

SEQ ID NO: 3027798 - RNA, 19 nt, Artificial Sequence
  Description of Artificial Sequence: Synthetic oligonucleotide
gucguauaugaguuucauc

SEQ ID NO: 3027799 - RNA, 19 nt, Artificial Sequence
  Description of Artificial Sequence: Synthetic oligonucleotide
agauggugagggugaaagu

SEQ ID NO: 3027800 - RNA, 19 nt, Artificial Sequence
  Description of Artificial Sequence: Synthetic oligonucleotide
cuggcaacuuuguaaggca

SEQ ID NO: 3027801 - RNA, 19 nt, Artificial Sequence
  Description of Artificial Sequence: Synthetic oligonucleotide
aaaagauggugagggugaa

SEQ ID NO: 3027802 - RNA, 19 nt, Artificial Sequence
  Description of Artificial Sequence: Synthetic oligonucleotide
ugaaagucacuaggcagau

SEQ ID NO: 3027803 - RNA, 19 nt, Artificial Sequence
  Description of Artificial Sequence: Synthetic oligonucleotide
uuucaucaaaggucaccau

SEQ ID NO: 3027804 - RNA, 19 nt, Artificial Sequence
  Description of Artificial Sequence: Synthetic oligonucleotide
guucaagauguucgucaug

SEQ ID NO: 3027805 - RNA, 19 nt, Artificial Sequence
  Description of Artificial Sequence: Synthetic oligonucleotide
ugcagucagucuugucacc

SEQ ID NO: 3027806 - RNA, 19 nt, Artificial Sequence
  Description of Artificial Sequence: Synthetic oligonucleotide
cuugucaccgugauggggu

SEQ ID NO: 3027807 - RNA, 19 nt, Artificial Sequence
  Description of Artificial Sequence: Synthetic oligonucleotide
guggagaaccucugcaguc

SEQ ID NO: 3027808 - RNA, 19 nt, Artificial Sequence
  Description of Artificial Sequence: Synthetic oligonucleotide
gugaugggguagaaguugc

SEQ ID NO: 3027809 - RNA, 19 nt, Artificial Sequence
  Description of Artificial Sequence: Synthetic oligonucleotide
auguguuuucauccagaau

SEQ ID NO: 3027810 - RNA, 19 nt, Artificial Sequence
  Description of Artificial Sequence: Synthetic oligonucleotide
aggauacacagcaauggau

SEQ ID NO: 3027811 - RNA, 19 nt, Artificial Sequence
  Description of Artificial Sequence: Synthetic oligonucleotide
ugaggccuauaggauacac

SEQ ID NO: 3027812 - RNA, 19 nt, Artificial Sequence
  Description of Artificial Sequence: Synthetic oligonucleotide
cuauaggauacacagcaau

SEQ ID NO: 3027813 - RNA, 19 nt, Artificial Sequence
  Description of Artificial Sequence: Synthetic oligonucleotide
gcuggcaacuuuguaaggc

SEQ ID NO: 3027814 - RNA, 19 nt, Artificial Sequence
  Description of Artificial Sequence: Synthetic oligonucleotide
ugggguagaaguugcuguu

SEQ ID NO: 3027815 - RNA, 19 nt, Artificial Sequence
  Description of Artificial Sequence: Synthetic oligonucleotide
cagaugaucacggccagga

SEQ ID NO: 3027816 - RNA, 19 nt, Artificial Sequence
  Description of Artificial Sequence: Synthetic oligonucleotide
guauguguuuucauccaga

SEQ ID NO: 3027817 - RNA, 19 nt, Artificial Sequence
  Description of Artificial Sequence: Synthetic oligonucleotide
gacuuucagcugcgcacag

SEQ ID NO: 3027818 - RNA, 19 nt, Artificial Sequence
  Description of Artificial Sequence: Synthetic oligonucleotide
cuagccaaaggacggaugu

SEQ ID NO: 3027819 - RNA, 19 nt, Artificial Sequence
  Description of Artificial Sequence: Synthetic oligonucleotide
gcagucagucuugucaccg

SEQ ID NO: 3027820 - RNA, 19 nt, Artificial Sequence
  Description of Artificial Sequence: Synthetic oligonucleotide
auccagaauacugcuggca

SEQ ID NO: 3027821 - RNA, 19 nt, Artificial Sequence
  Description of Artificial Sequence: Synthetic oligonucleotide
agucguauaugaguuucau

SEQ ID NO: 3027822 - RNA, 19 nt, Artificial Sequence
  Description of Artificial Sequence: Synthetic oligonucleotide
gucaccuggccuaccacag

SEQ ID NO: 3027823 - RNA, 19 nt, Artificial Sequence
  Description of Artificial Sequence: Synthetic oligonucleotide
uaugguggacuuugacuuu

SEQ ID NO: 3027824 - RNA, 19 nt, Artificial Sequence
  Description of Artificial Sequence: Synthetic oligonucleotide
caccauggaggaguugagg

SEQ ID NO: 3027825 - RNA, 19 nt, Artificial Sequence
  Description of Artificial Sequence: Synthetic oligonucleotide
auacacagcaauggaucgu

SEQ ID NO: 3027826 - RNA, 19 nt, Artificial Sequence
  Description of Artificial Sequence: Synthetic oligonucleotide
caucuguucacuagccaaa

SEQ ID NO: 3027827 - RNA, 19 nt, Artificial Sequence
  Description of Artificial Sequence: Synthetic oligonucleotide
gucuugucaccgugauggg

SEQ ID NO: 3027828 - RNA, 19 nt, Artificial Sequence
  Description of Artificial Sequence: Synthetic oligonucleotide
ugguggacuuugacuuuca

SEQ ID NO: 3027829 - RNA, 19 nt, Artificial Sequence
  Description of Artificial Sequence: Synthetic oligonucleotide
ucacuagccaaaggacgga

SEQ ID NO: 3027830 - RNA, 19 nt, Artificial Sequence
  Description of Artificial Sequence: Synthetic oligonucleotide
cugguggagaaccucugca

SEQ ID NO: 3027831 - RNA, 19 nt, Artificial Sequence
  Description of Artificial Sequence: Synthetic oligonucleotide
cacagcaauggaucgugga

SEQ ID NO: 3027832 - RNA, 19 nt, Artificial Sequence
  Description of Artificial Sequence: Synthetic oligonucleotide
ucagcugcgcacagauuuu

SEQ ID NO: 3027833 - RNA, 19 nt, Artificial Sequence
  Description of Artificial Sequence: Synthetic oligonucleotide
acggaugugcaggcggagg

SEQ ID NO: 3027834 - RNA, 19 nt, Artificial Sequence
  Description of Artificial Sequence: Synthetic oligonucleotide
cuaccacagaggucuggug

SEQ ID NO: 3027835 - RNA, 19 nt, Artificial Sequence
  Description of Artificial Sequence: Synthetic oligonucleotide
aggucugguggagaaccuc

SEQ ID NO: 3027836 - RNA, 19 nt, Artificial Sequence
  Description of Artificial Sequence: Synthetic oligonucleotide
gaucguggauacaggaaaa

SEQ ID NO: 3027837 - RNA, 19 nt, Artificial Sequence
  Description of Artificial Sequence: Synthetic oligonucleotide
gugagggugaaagucacua

SEQ ID NO: 3027838 - RNA, 19 nt, Artificial Sequence
  Description of Artificial Sequence: Synthetic oligonucleotide
gcaucuguucacuagccaa

SEQ ID NO: 3027839 - RNA, 19 nt, Artificial Sequence
  Description of Artificial Sequence: Synthetic oligonucleotide
aaagauggugagggugaaa

SEQ ID NO: 3027840 - RNA, 19 nt, Artificial Sequence
  Description of Artificial Sequence: Synthetic oligonucleotide
gaggccuauaggauacaca

SEQ ID NO: 3027841 - RNA, 19 nt, Artificial Sequence
  Description of Artificial Sequence: Synthetic oligonucleotide
uagccaaaggacggaugug

SEQ ID NO: 3027842 - RNA, 19 nt, Artificial Sequence
  Description of Artificial Sequence: Synthetic oligonucleotide
uacugcuggcaacuuugua

SEQ ID NO: 3027843 - RNA, 19 nt, Artificial Sequence
  Description of Artificial Sequence: Synthetic oligonucleotide
ggacuuugacuuucagcug

SEQ ID NO: 3027844 - RNA, 19 nt, Artificial Sequence
  Description of Artificial Sequence: Synthetic oligonucleotide
uucgucaugcugagucgua

SEQ ID NO: 3027845 - RNA, 19 nt, Artificial Sequence
  Description of Artificial Sequence: Synthetic oligonucleotide
acuuuguaaggcaucuguu

SEQ ID NO: 3027846 - RNA, 19 nt, Artificial Sequence
  Description of Artificial Sequence: Synthetic oligonucleotide
acuagccaaaggacggaug

SEQ ID NO: 3027847 - RNA, 19 nt, Artificial Sequence
  Description of Artificial Sequence: Synthetic oligonucleotide
gaaagucacuaggcagaug

SEQ ID NO: 3027848 - RNA, 19 nt, Artificial Sequence
  Description of Artificial Sequence: Synthetic oligonucleotide
gggugaaagucacuaggca

SEQ ID NO: 3027849 - RNA, 19 nt, Artificial Sequence
  Description of Artificial Sequence: Synthetic oligonucleotide
ggagaaccucugcagucag

SEQ ID NO: 3027850 - RNA, 19 nt, Artificial Sequence
  Description of Artificial Sequence: Synthetic oligonucleotide
agaauaugguggacuuuga

SEQ ID NO: 3027851 - RNA, 19 nt, Artificial Sequence
  Description of Artificial Sequence: Synthetic oligonucleotide
uggucaccuggccuaccac

SEQ ID NO: 3027852 - RNA, 19 nt, Artificial Sequence
  Description of Artificial Sequence: Synthetic oligonucleotide
cuuucagcugcgcacagau

SEQ ID NO: 3027853 - RNA, 19 nt, Artificial Sequence
  Description of Artificial Sequence: Synthetic oligonucleotide
cuuugacuuucagcugcgc

SEQ ID NO: 3027854 - RNA, 19 nt, Artificial Sequence
  Description of Artificial Sequence: Synthetic oligonucleotide
caucaaaggucaccaugga

SEQ ID NO: 3027855 - RNA, 19 nt, Artificial Sequence
  Description of Artificial Sequence: Synthetic oligonucleotide
cacggccaggaacacugag

SEQ ID NO: 3027856 - RNA, 19 nt, Artificial Sequence
  Description of Artificial Sequence: Synthetic oligonucleotide
gguggacuuugacuuucag

SEQ ID NO: 3027857 - RNA, 19 nt, Artificial Sequence
  Description of Artificial Sequence: Synthetic oligonucleotide
augugcaggcggaggcugc

SEQ ID NO: 3027858 - RNA, 19 nt, Artificial Sequence
  Description of Artificial Sequence: Synthetic oligonucleotide
gagucguauaugaguuuca

SEQ ID NO: 3027859 - RNA, 19 nt, Artificial Sequence
  Description of Artificial Sequence: Synthetic oligonucleotide
ugucaccgugaugggguag

SEQ ID NO: 3027860 - RNA, 19 nt, Artificial Sequence
  Description of Artificial Sequence: Synthetic oligonucleotide
ccaaaggacggaugugcag

SEQ ID NO: 3027861 - RNA, 19 nt, Artificial Sequence
  Description of Artificial Sequence: Synthetic oligonucleotide
agaugaucacggccaggaa

SEQ ID NO: 3027862 - RNA, 19 nt, Artificial Sequence
  Description of Artificial Sequence: Synthetic oligonucleotide
acacagcaauggaucgugg

SEQ ID NO: 3027863 - RNA, 19 nt, Artificial Sequence
  Description of Artificial Sequence: Synthetic oligonucleotide
ccagaauacugcuggcaac

SEQ ID NO: 3027864 - RNA, 19 nt, Artificial Sequence
  Description of Artificial Sequence: Synthetic oligonucleotide
augcugagucguauaugag

SEQ ID NO: 3027865 - RNA, 19 nt, Artificial Sequence
  Description of Artificial Sequence: Synthetic oligonucleotide
aggcggaggcugcugguca

SEQ ID NO: 3027866 - RNA, 19 nt, Artificial Sequence
  Description of Artificial Sequence: Synthetic oligonucleotide
ucgucaugcugagucguau

SEQ ID NO: 3027867 - RNA, 19 nt, Artificial Sequence
  Description of Artificial Sequence: Synthetic oligonucleotide
caacuuuguaaggcaucug

SEQ ID NO: 3027868 - RNA, 19 nt, Artificial Sequence
  Description of Artificial Sequence: Synthetic oligonucleotide
gacggaugugcaggcggag

SEQ ID NO: 3027869 - RNA, 19 nt, Artificial Sequence
  Description of Artificial Sequence: Synthetic oligonucleotide
ggcagaugaucacggccag

SEQ ID NO: 3027870 - RNA, 19 nt, Artificial Sequence
  Description of Artificial Sequence: Synthetic oligonucleotide
ggucaccuggccuaccaca

SEQ ID NO: 3027871 - RNA, 19 nt, Artificial Sequence
  Description of Artificial Sequence: Synthetic oligonucleotide
uuucagcugcgcacagauu

SEQ ID NO: 3027872 - RNA, 19 nt, Artificial Sequence
  Description of Artificial Sequence: Synthetic oligonucleotide
uggagauguucaagauguu

SEQ ID NO: 3027873 - RNA, 19 nt, Artificial Sequence
  Description of Artificial Sequence: Synthetic oligonucleotide
accucugcagucagucuug

SEQ ID NO: 3027874 - RNA, 19 nt, Artificial Sequence
  Description of Artificial Sequence: Synthetic oligonucleotide
gguagaaguugcuguugga

SEQ ID NO: 3027875 - RNA, 19 nt, Artificial Sequence
  Description of Artificial Sequence: Synthetic oligonucleotide
cagaauacugcuggcaacu

SEQ ID NO: 3027876 - RNA, 19 nt, Artificial Sequence
  Description of Artificial Sequence: Synthetic oligonucleotide
gucaugcugagucguauau

SEQ ID NO: 3027877 - RNA, 19 nt, Artificial Sequence
  Description of Artificial Sequence: Synthetic oligonucleotide
gaauacugcuggcaacuuu

SEQ ID NO: 3027878 - RNA, 19 nt, Artificial Sequence
  Description of Artificial Sequence: Synthetic oligonucleotide
cacagauuuuguauguguu

SEQ ID NO: 3027879 - RNA, 19 nt, Artificial Sequence
  Description of Artificial Sequence: Synthetic oligonucleotide
acggccaggaacacugaga

SEQ ID NO: 3027880 - RNA, 19 nt, Artificial Sequence
  Description of Artificial Sequence: Synthetic oligonucleotide
cggccaggaacacugagag

SEQ ID NO: 3027881 - RNA, 19 nt, Artificial Sequence
  Description of Artificial Sequence: Synthetic oligonucleotide
ucacggccaggaacacuga

SEQ ID NO: 3027882 - RNA, 19 nt, Artificial Sequence
  Description of Artificial Sequence: Synthetic oligonucleotide
cuggccuaccacagagguc

SEQ ID NO: 3027883 - RNA, 19 nt, Artificial Sequence
  Description of Artificial Sequence: Synthetic oligonucleotide
aagucacuaggcagaugau

SEQ ID NO: 3027884 - RNA, 19 nt, Artificial Sequence
  Description of Artificial Sequence: Synthetic oligonucleotide
guaaggcaucuguucacua

SEQ ID NO: 3027885 - RNA, 19 nt, Artificial Sequence
  Description of Artificial Sequence: Synthetic oligonucleotide
cagucuugucaccgugaug

SEQ ID NO: 3027886 - RNA, 19 nt, Artificial Sequence
  Description of Artificial Sequence: Synthetic oligonucleotide
ugaucacggccaggaacac

SEQ ID NO: 3027887 - RNA, 19 nt, Artificial Sequence
  Description of Artificial Sequence: Synthetic oligonucleotide
cagauuuuguauguguuuu

SEQ ID NO: 3027888 - RNA, 19 nt, Artificial Sequence
  Description of Artificial Sequence: Synthetic oligonucleotide
gucagucuugucaccguga

SEQ ID NO: 3027889 - RNA, 19 nt, Artificial Sequence
  Description of Artificial Sequence: Synthetic oligonucleotide
uugucaccgugauggggua

SEQ ID NO: 3027890 - RNA, 19 nt, Artificial Sequence
  Description of Artificial Sequence: Synthetic oligonucleotide
gaguuucaucaaaggucac

SEQ ID NO: 3027891 - RNA, 19 nt, Artificial Sequence
  Description of Artificial Sequence: Synthetic oligonucleotide
ugugcaggcggaggcugcu

SEQ ID NO: 3027892 - RNA, 19 nt, Artificial Sequence
  Description of Artificial Sequence: Synthetic oligonucleotide
acuuucagcugcgcacaga

SEQ ID NO: 3027893 - RNA, 19 nt, Artificial Sequence
  Description of Artificial Sequence: Synthetic oligonucleotide
gucugguggagaaccucug

SEQ ID NO: 3027894 - RNA, 19 nt, Artificial Sequence
  Description of Artificial Sequence: Synthetic oligonucleotide
auacugcuggcaacuuugu

SEQ ID NO: 3027895 - RNA, 19 nt, Artificial Sequence
  Description of Artificial Sequence: Synthetic oligonucleotide
gcacagauuuuguaugugu

SEQ ID NO: 3027896 - RNA, 19 nt, Artificial Sequence
  Description of Artificial Sequence: Synthetic oligonucleotide
uugaggccuauaggauaca

SEQ ID NO: 3027897 - RNA, 19 nt, Artificial Sequence
  Description of Artificial Sequence: Synthetic oligonucleotide
accuggccuaccacagagg

SEQ ID NO: 3027898 - RNA, 19 nt, Artificial Sequence
  Description of Artificial Sequence: Synthetic oligonucleotide
gucaccgugaugggguaga

SEQ ID NO: 3027899 - RNA, 19 nt, Artificial Sequence
  Description of Artificial Sequence: Synthetic oligonucleotide
ggcaucuguucacuagcca

SEQ ID NO: 3027900 - RNA, 19 nt, Artificial Sequence
  Description of Artificial Sequence: Synthetic oligonucleotide
agaauacugcuggcaacuu

SEQ ID NO: 3027901 - RNA, 19 nt, Artificial Sequence
  Description of Artificial Sequence: Synthetic oligonucleotide
cagcaauggaucguggaua

SEQ ID NO: 3027902 - RNA, 19 nt, Artificial Sequence
  Description of Artificial Sequence: Synthetic oligonucleotide
cugcgcacagauuuuguau

SEQ ID NO: 3027903 - RNA, 19 nt, Artificial Sequence
  Description of Artificial Sequence: Synthetic oligonucleotide
gaaccucugcagucagucu

SEQ ID NO: 3027904 - RNA, 19 nt, Artificial Sequence
  Description of Artificial Sequence: Synthetic oligonucleotide
gguggagaaccucugcagu

SEQ ID NO: 3027905 - RNA, 19 nt, Artificial Sequence
  Description of Artificial Sequence: Synthetic oligonucleotide
ggcaacuuuguaaggcauc

SEQ ID NO: 3027906 - RNA, 19 nt, Artificial Sequence
  Description of Artificial Sequence: Synthetic oligonucleotide
cagcugcgcacagauuuug

SEQ ID NO: 3027907 - RNA, 19 nt, Artificial Sequence
  Description of Artificial Sequence: Synthetic oligonucleotide
gaguugaggccuauaggau

SEQ ID NO: 3027908 - RNA, 19 nt, Artificial Sequence
  Description of Artificial Sequence: Synthetic oligonucleotide
cgugaugggguagaaguug

SEQ ID NO: 3027909 - RNA, 19 nt, Artificial Sequence
  Description of Artificial Sequence: Synthetic oligonucleotide
gcaacuuuguaaggcaucu

SEQ ID NO: 3027910 - RNA, 19 nt, Artificial Sequence
  Description of Artificial Sequence: Synthetic oligonucleotide
caccgugaugggguagaag

SEQ ID NO: 3027911 - RNA, 19 nt, Artificial Sequence
  Description of Artificial Sequence: Synthetic oligonucleotide
ggccuauaggauacacagc

SEQ ID NO: 3027912 - RNA, 19 nt, Artificial Sequence
  Description of Artificial Sequence: Synthetic oligonucleotide
cucugcagucagucuuguc

SEQ ID NO: 3027913 - RNA, 19 nt, Artificial Sequence
  Description of Artificial Sequence: Synthetic oligonucleotide
cugcuggucaccuggccua

SEQ ID NO: 3027914 - RNA, 19 nt, Artificial Sequence
  Description of Artificial Sequence: Synthetic oligonucleotide
ugcuggucaccuggccuac

SEQ ID NO: 3027915 - RNA, 19 nt, Artificial Sequence
  Description of Artificial Sequence: Synthetic oligonucleotide
cagaggucugguggagaac

SEQ ID NO: 3027916 - RNA, 19 nt, Artificial Sequence
  Description of Artificial Sequence: Synthetic oligonucleotide
cggaugugcaggcggaggc

SEQ ID NO: 3027917 - RNA, 19 nt, Artificial Sequence
  Description of Artificial Sequence: Synthetic oligonucleotide
agcugcgcacagauuuugu

SEQ ID NO: 3027918 - RNA, 19 nt, Artificial Sequence
  Description of Artificial Sequence: Synthetic oligonucleotide
gcagaugaucacggccagg

SEQ ID NO: 3027919 - RNA, 19 nt, Artificial Sequence
  Description of Artificial Sequence: Synthetic oligonucleotide
guucgucaugcugagucgu

SEQ ID NO: 3027920 - RNA, 19 nt, Artificial Sequence
  Description of Artificial Sequence: Synthetic oligonucleotide
gcugagucguauaugaguu

SEQ ID NO: 3027921 - RNA, 19 nt, Artificial Sequence
  Description of Artificial Sequence: Synthetic oligonucleotide
ggccaggaacacugagagc

SEQ ID NO: 3027922 - RNA, 19 nt, Artificial Sequence
  Description of Artificial Sequence: Synthetic oligonucleotide
ucaccgugaugggguagaa

SEQ ID NO: 3027923 - RNA, 19 nt, Artificial Sequence
  Description of Artificial Sequence: Synthetic oligonucleotide
gcugcgcacagauuuugua

SEQ ID NO: 3027924 - RNA, 19 nt, Artificial Sequence
  Description of Artificial Sequence: Synthetic oligonucleotide
cguauaugaguuucaucaa

SEQ ID NO: 3027925 - RNA, 19 nt, Artificial Sequence
  Description of Artificial Sequence: Synthetic oligonucleotide
ccuauaggauacacagcaa

SEQ ID NO: 3027926 - RNA, 19 nt, Artificial Sequence
  Description of Artificial Sequence: Synthetic oligonucleotide
caggcggaggcugcugguc

SEQ ID NO: 3027927 - RNA, 19 nt, Artificial Sequence
  Description of Artificial Sequence: Synthetic oligonucleotide
gaucacggccaggaacacu

SEQ ID NO: 3027928 - RNA, 19 nt, Artificial Sequence
  Description of Artificial Sequence: Synthetic oligonucleotide
gcugcuggucaccuggccu

SEQ ID NO: 3027929 - RNA, 19 nt, Artificial Sequence
  Description of Artificial Sequence: Synthetic oligonucleotide
gccaaaggacggaugugca

SEQ ID NO: 3027930 - RNA, 19 nt, Artificial Sequence
  Description of Artificial Sequence: Synthetic oligonucleotide
ggaggcugcuggucaccug

SEQ ID NO: 3027931 - RNA, 19 nt, Artificial Sequence
  Description of Artificial Sequence: Synthetic oligonucleotide
ggucugguggagaaccucu

SEQ ID NO: 3027932 - RNA, 19 nt, Artificial Sequence
  Description of Artificial Sequence: Synthetic oligonucleotide
gccuaccacagaggucugg

SEQ ID NO: 3027933 - RNA, 19 nt, Artificial Sequence
  Description of Artificial Sequence: Synthetic oligonucleotide
gauguucgucaugcugagu

SEQ ID NO: 3027934 - RNA, 19 nt, Artificial Sequence
  Description of Artificial Sequence: Synthetic oligonucleotide
ggcggaggcugcuggucac

SEQ ID NO: 3027935 - RNA, 19 nt, Artificial Sequence
  Description of Artificial Sequence: Synthetic oligonucleotide
ggacggaugugcaggcgga

SEQ ID NO: 3027936 - RNA, 19 nt, Artificial Sequence
  Description of Artificial Sequence: Synthetic oligonucleotide
gcgcacagauuuuguaugu

SEQ ID NO: 3027937 - RNA, 19 nt, Artificial Sequence
  Description of Artificial Sequence: Synthetic oligonucleotide
cagucagucuugucaccgu

SEQ ID NO: 3027938 - RNA, 19 nt, Artificial Sequence
  Description of Artificial Sequence: Synthetic oligonucleotide
cugagucguauaugaguuu

SEQ ID NO: 3027939 - RNA, 19 nt, Artificial Sequence
  Description of Artificial Sequence: Synthetic oligonucleotide
ccuggccuaccacagaggu

SEQ ID NO: 3027940 - RNA, 19 nt, Artificial Sequence
  Description of Artificial Sequence: Synthetic oligonucleotide
gaggucugguggagaaccu

SEQ ID NO: 3027941 - RNA, 19 nt, Artificial Sequence
  Description of Artificial Sequence: Synthetic oligonucleotide
gagaaccucugcagucagu

SEQ ID NO: 3027942 - RNA, 19 nt, Artificial Sequence
  Description of Artificial Sequence: Synthetic oligonucleotide
aggucaccauggaggaguu

SEQ ID NO: 3027943 - RNA, 19 nt, Artificial Sequence
  Description of Artificial Sequence: Synthetic oligonucleotide
cgcacagauuuuguaugug

SEQ ID NO: 3027944 - RNA, 19 nt, Artificial Sequence
  Description of Artificial Sequence: Synthetic oligonucleotide
gugcaggcggaggcugcug

SEQ ID NO: 3027945 - RNA, 19 nt, Artificial Sequence
  Description of Artificial Sequence: Synthetic oligonucleotide
auggaggaguugaggccua

SEQ ID NO: 3027946 - RNA, 19 nt, Artificial Sequence
  Description of Artificial Sequence: Synthetic oligonucleotide
ggucaccauggaggaguug

SEQ ID NO: 3027947 - RNA, 19 nt, Artificial Sequence
  Description of Artificial Sequence: Synthetic oligonucleotide
cacuagccaaaggacggau

SEQ ID NO: 3027948 - RNA, 19 nt, Artificial Sequence
  Description of Artificial Sequence: Synthetic oligonucleotide
gcaauggaucguggauaca

SEQ ID NO: 3027949 - RNA, 19 nt, Artificial Sequence
  Description of Artificial Sequence: Synthetic oligonucleotide
ccuaccacagaggucuggu

SEQ ID NO: 3027950 - RNA, 19 nt, Artificial Sequence
  Description of Artificial Sequence: Synthetic oligonucleotide
gcggaggcugcuggucacc

SEQ ID NO: 3027951 - RNA, 19 nt, Artificial Sequence
  Description of Artificial Sequence: Synthetic oligonucleotide
ggugagggugaaagucacu

SEQ ID NO: 3027952 - RNA, 19 nt, Artificial Sequence
  Description of Artificial Sequence: Synthetic oligonucleotide
ggaggaguugaggccuaua

SEQ ID NO: 3027953 - RNA, 19 nt, Artificial Sequence
  Description of Artificial Sequence: Synthetic oligonucleotide
cgucaugcugagucguaua

SEQ ID NO: 3027954 - RNA, 19 nt, Artificial Sequence
  Description of Artificial Sequence: Synthetic oligonucleotide
ggccuaccacagaggucug

SEQ ID NO: 3027955 - RNA, 19 nt, Artificial Sequence
  Description of Artificial Sequence: Synthetic oligonucleotide
gcaggcggaggcugcuggu

SEQ ID NO: 3027956 - RNA, 19 nt, Artificial Sequence
  Description of Artificial Sequence: Synthetic oligonucleotide
ccgugaugggguagaaguu

SEQ ID NO: 3027957 - RNA, 19 nt, Artificial Sequence
  Description of Artificial Sequence: Synthetic oligonucleotide
ccucugcagucagucuugu

SEQ ID NO: 3027958 - RNA, 19 nt, Artificial Sequence
  Description of Artificial Sequence: Synthetic oligonucleotide
cggaggcugcuggucaccu

SEQ ID NO: 3027959 - RNA, 19 nt, Artificial Sequence
  Description of Artificial Sequence: Synthetic oligonucleotide
gaaaguuugaaucagcucc

SEQ ID NO: 3027960 - RNA, 19 nt, Artificial Sequence
  Description of Artificial Sequence: Synthetic oligonucleotide
uuugcagacaccaauagcc

SEQ ID NO: 3027961 - RNA, 19 nt, Artificial Sequence
  Description of Artificial Sequence: Synthetic oligonucleotide
aguaagggcaaacaggccc

SEQ ID NO: 3027962 - RNA, 19 nt, Artificial Sequence
  Description of Artificial Sequence: Synthetic oligonucleotide
aaagcagucacccugccag

SEQ ID NO: 3027963 - RNA, 19 nt, Artificial Sequence
  Description of Artificial Sequence: Synthetic oligonucleotide
ugaaugaaguccuagguag

SEQ ID NO: 3027964 - RNA, 19 nt, Artificial Sequence
  Description of Artificial Sequence: Synthetic oligonucleotide
aaaauuuggacaccccaac

SEQ ID NO: 3027965 - RNA, 19 nt, Artificial Sequence
  Description of Artificial Sequence: Synthetic oligonucleotide
ucugugacagaacagagug

SEQ ID NO: 3027966 - RNA, 19 nt, Artificial Sequence
  Description of Artificial Sequence: Synthetic oligonucleotide
accaauagcccauucaggc

SEQ ID NO: 3027967 - RNA, 19 nt, Artificial Sequence
  Description of Artificial Sequence: Synthetic oligonucleotide
auagaaggaaaccucuccc

SEQ ID NO: 3027968 - RNA, 19 nt, Artificial Sequence
  Description of Artificial Sequence: Synthetic oligonucleotide
guaaaguugucccugaaag

SEQ ID NO: 3027969 - RNA, 19 nt, Artificial Sequence
  Description of Artificial Sequence: Synthetic oligonucleotide
uuaaaauuuggacacccca

SEQ ID NO: 3027970 - RNA, 19 nt, Artificial Sequence
  Description of Artificial Sequence: Synthetic oligonucleotide
ucgggcaugcuauagaagg

SEQ ID NO: 3027971 - RNA, 19 nt, Artificial Sequence
  Description of Artificial Sequence: Synthetic oligonucleotide
uauagaaggaaaccucucc

SEQ ID NO: 3027972 - RNA, 19 nt, Artificial Sequence
  Description of Artificial Sequence: Synthetic oligonucleotide
gaaguaagggcaaacaggc

SEQ ID NO: 3027973 - RNA, 19 nt, Artificial Sequence
  Description of Artificial Sequence: Synthetic oligonucleotide
agaaaugucucccagaauu

SEQ ID NO: 3027974 - RNA, 19 nt, Artificial Sequence
  Description of Artificial Sequence: Synthetic oligonucleotide
uagaaguaagggcaaacag

SEQ ID NO: 3027975 - RNA, 19 nt, Artificial Sequence
  Description of Artificial Sequence: Synthetic oligonucleotide
aacagaguguaagagguuc

SEQ ID NO: 3027976 - RNA, 19 nt, Artificial Sequence
  Description of Artificial Sequence: Synthetic oligonucleotide
cagaauuaaaauuuggaca

SEQ ID NO: 3027977 - RNA, 19 nt, Artificial Sequence
  Description of Artificial Sequence: Synthetic oligonucleotide
uccugagacaucaaagcag

SEQ ID NO: 3027978 - RNA, 19 nt, Artificial Sequence
  Description of Artificial Sequence: Synthetic oligonucleotide
aaugccaaugcguuuggcu

SEQ ID NO: 3027979 - RNA, 19 nt, Artificial Sequence
  Description of Artificial Sequence: Synthetic oligonucleotide
ucucccagaauuaaaauuu

SEQ ID NO: 3027980 - RNA, 19 nt, Artificial Sequence
  Description of Artificial Sequence: Synthetic oligonucleotide
uucugaaugaaguccuagg

SEQ ID NO: 3027981 - RNA, 19 nt, Artificial Sequence
  Description of Artificial Sequence: Synthetic oligonucleotide
cuagguagaaguaagggca

SEQ ID NO: 3027982 - RNA, 19 nt, Artificial Sequence
  Description of Artificial Sequence: Synthetic oligonucleotide
ucccugaaaguacagaugu

SEQ ID NO: 3027983 - RNA, 19 nt, Artificial Sequence
  Description of Artificial Sequence: Synthetic oligonucleotide
ugaaguccuagguagaagu

SEQ ID NO: 3027984 - RNA, 19 nt, Artificial Sequence
  Description of Artificial Sequence: Synthetic oligonucleotide
agaaguaagggcaaacagg

SEQ ID NO: 3027985 - RNA, 19 nt, Artificial Sequence
  Description of Artificial Sequence: Synthetic oligonucleotide
acaccaauagcccauucag

SEQ ID NO: 3027986 - RNA, 19 nt, Artificial Sequence
  Description of Artificial Sequence: Synthetic oligonucleotide
agaugugagauuucucggg

SEQ ID NO: 3027987 - RNA, 19 nt, Artificial Sequence
  Description of Artificial Sequence: Synthetic oligonucleotide
gaaaaugccaaugcguuug

SEQ ID NO: 3027988 - RNA, 19 nt, Artificial Sequence
  Description of Artificial Sequence: Synthetic oligonucleotide
aaggaaaccucucccagcu

SEQ ID NO: 3027989 - RNA, 19 nt, Artificial Sequence
  Description of Artificial Sequence: Synthetic oligonucleotide
uccaggaaaaugccaaugc

SEQ ID NO: 3027990 - RNA, 19 nt, Artificial Sequence
  Description of Artificial Sequence: Synthetic oligonucleotide
uaaaauuuggacaccccaa

SEQ ID NO: 3027991 - RNA, 19 nt, Artificial Sequence
  Description of Artificial Sequence: Synthetic oligonucleotide
uuugaaucagcuccugaga

SEQ ID NO: 3027992 - RNA, 19 nt, Artificial Sequence
  Description of Artificial Sequence: Synthetic oligonucleotide
agauuggcuuugcagacac

SEQ ID NO: 3027993 - RNA, 19 nt, Artificial Sequence
  Description of Artificial Sequence: Synthetic oligonucleotide
gagacaucaaagcagucac

SEQ ID NO: 3027994 - RNA, 19 nt, Artificial Sequence
  Description of Artificial Sequence: Synthetic oligonucleotide
uguaagagguucugaauga

SEQ ID NO: 3027995 - RNA, 19 nt, Artificial Sequence
  Description of Artificial Sequence: Synthetic oligonucleotide
augcguuuggcucuugugg

SEQ ID NO: 3027996 - RNA, 19 nt, Artificial Sequence
  Description of Artificial Sequence: Synthetic oligonucleotide
acagauuggcuuugcagac

SEQ ID NO: 3027997 - RNA, 19 nt, Artificial Sequence
  Description of Artificial Sequence: Synthetic oligonucleotide
ucuuguggccugcugaaag

SEQ ID NO: 3027998 - RNA, 19 nt, Artificial Sequence
  Description of Artificial Sequence: Synthetic oligonucleotide
gacagauuggcuuugcaga

SEQ ID NO: 3027999 - RNA, 19 nt, Artificial Sequence
  Description of Artificial Sequence: Synthetic oligonucleotide
aaaaugccaaugcguuugg

SEQ ID NO: 3028000 - RNA, 19 nt, Artificial Sequence
  Description of Artificial Sequence: Synthetic oligonucleotide
ucccagaauuaaaauuugg

SEQ ID NO: 3028001 - RNA, 19 nt, Artificial Sequence
  Description of Artificial Sequence: Synthetic oligonucleotide
aaauuuggacaccccaaca

SEQ ID NO: 3028002 - RNA, 19 nt, Artificial Sequence
  Description of Artificial Sequence: Synthetic oligonucleotide
guguaagagguucugaaug

SEQ ID NO: 3028003 - RNA, 19 nt, Artificial Sequence
  Description of Artificial Sequence: Synthetic oligonucleotide
uugaaucagcuccugagac

SEQ ID NO: 3028004 - RNA, 19 nt, Artificial Sequence
  Description of Artificial Sequence: Synthetic oligonucleotide
aaaguugucccugaaagua

SEQ ID NO: 3028005 - RNA, 19 nt, Artificial Sequence
  Description of Artificial Sequence: Synthetic oligonucleotide
cagaacagaguguaagagg

SEQ ID NO: 3028006 - RNA, 19 nt, Artificial Sequence
  Description of Artificial Sequence: Synthetic oligonucleotide
ugaaaguacagaugugaga

SEQ ID NO: 3028007 - RNA, 19 nt, Artificial Sequence
  Description of Artificial Sequence: Synthetic oligonucleotide
augccaaugcguuuggcuc

SEQ ID NO: 3028008 - RNA, 19 nt, Artificial Sequence
  Description of Artificial Sequence: Synthetic oligonucleotide
auuaaaauuuggacacccc

SEQ ID NO: 3028009 - RNA, 19 nt, Artificial Sequence
  Description of Artificial Sequence: Synthetic oligonucleotide
uccuagguagaaguaaggg

SEQ ID NO: 3028010 - RNA, 19 nt, Artificial Sequence
  Description of Artificial Sequence: Synthetic oligonucleotide
gaugugagauuucucgggc

SEQ ID NO: 3028011 - RNA, 19 nt, Artificial Sequence
  Description of Artificial Sequence: Synthetic oligonucleotide
aaugcguuuggcucuugug

SEQ ID NO: 3028012 - RNA, 19 nt, Artificial Sequence
  Description of Artificial Sequence: Synthetic oligonucleotide
caauccuccagcauccccg

SEQ ID NO: 3028013 - RNA, 19 nt, Artificial Sequence
  Description of Artificial Sequence: Synthetic oligonucleotide
ugacagaacagaguguaag

SEQ ID NO: 3028014 - RNA, 19 nt, Artificial Sequence
  Description of Artificial Sequence: Synthetic oligonucleotide
caugcuauagaaggaaacc

SEQ ID NO: 3028015 - RNA, 19 nt, Artificial Sequence
  Description of Artificial Sequence: Synthetic oligonucleotide
ugccucaguggacagauug

SEQ ID NO: 3028016 - RNA, 19 nt, Artificial Sequence
  Description of Artificial Sequence: Synthetic oligonucleotide
ugagacaucaaagcaguca

SEQ ID NO: 3028017 - RNA, 19 nt, Artificial Sequence
  Description of Artificial Sequence: Synthetic oligonucleotide
agaacagaguguaagaggu

SEQ ID NO: 3028018 - RNA, 19 nt, Artificial Sequence
  Description of Artificial Sequence: Synthetic oligonucleotide
agaaggaaaccucucccag

SEQ ID NO: 3028019 - RNA, 19 nt, Artificial Sequence
  Description of Artificial Sequence: Synthetic oligonucleotide
ugcuauagaaggaaaccuc

SEQ ID NO: 3028020 - RNA, 19 nt, Artificial Sequence
  Description of Artificial Sequence: Synthetic oligonucleotide
uucucuccuaccuucaccu

SEQ ID NO: 3028021 - RNA, 19 nt, Artificial Sequence
  Description of Artificial Sequence: Synthetic oligonucleotide
gagguucugaaugaagucc

SEQ ID NO: 3028022 - RNA, 19 nt, Artificial Sequence
  Description of Artificial Sequence: Synthetic oligonucleotide
caucaaagcagucacccug

SEQ ID NO: 3028023 - RNA, 19 nt, Artificial Sequence
  Description of Artificial Sequence: Synthetic oligonucleotide
aaccucucccagcucauag

SEQ ID NO: 3028024 - RNA, 19 nt, Artificial Sequence
  Description of Artificial Sequence: Synthetic oligonucleotide
uaguccaggaaaaugccaa

SEQ ID NO: 3028025 - RNA, 19 nt, Artificial Sequence
  Description of Artificial Sequence: Synthetic oligonucleotide
aaguugucccugaaaguac

SEQ ID NO: 3028026 - RNA, 19 nt, Artificial Sequence
  Description of Artificial Sequence: Synthetic oligonucleotide
ucaccucccagaaaugucu

SEQ ID NO: 3028027 - RNA, 19 nt, Artificial Sequence
  Description of Artificial Sequence: Synthetic oligonucleotide
aaguacagaugugagauuu

SEQ ID NO: 3028028 - RNA, 19 nt, Artificial Sequence
  Description of Artificial Sequence: Synthetic oligonucleotide
acaauccuccagcaucccc

SEQ ID NO: 3028029 - RNA, 19 nt, Artificial Sequence
  Description of Artificial Sequence: Synthetic oligonucleotide
agacaauccuccagcaucc

SEQ ID NO: 3028030 - RNA, 19 nt, Artificial Sequence
  Description of Artificial Sequence: Synthetic oligonucleotide
ugccagacaauccuccagc

SEQ ID NO: 3028031 - RNA, 19 nt, Artificial Sequence
  Description of Artificial Sequence: Synthetic oligonucleotide
ccagaauuaaaauuuggac

SEQ ID NO: 3028032 - RNA, 19 nt, Artificial Sequence
  Description of Artificial Sequence: Synthetic oligonucleotide
uaaaguugucccugaaagu

SEQ ID NO: 3028033 - RNA, 19 nt, Artificial Sequence
  Description of Artificial Sequence: Synthetic oligonucleotide
gaaaguacagaugugagau

SEQ ID NO: 3028034 - RNA, 19 nt, Artificial Sequence
  Description of Artificial Sequence: Synthetic oligonucleotide
ugugacagaacagagugua

SEQ ID NO: 3028035 - RNA, 19 nt, Artificial Sequence
  Description of Artificial Sequence: Synthetic oligonucleotide
ugucccugaaaguacagau

SEQ ID NO: 3028036 - RNA, 19 nt, Artificial Sequence
  Description of Artificial Sequence: Synthetic oligonucleotide
acagaacagaguguaagag

SEQ ID NO: 3028037 - RNA, 19 nt, Artificial Sequence
  Description of Artificial Sequence: Synthetic oligonucleotide
ugaaaguuugaaucagcuc

SEQ ID NO: 3028038 - RNA, 19 nt, Artificial Sequence
  Description of Artificial Sequence: Synthetic oligonucleotide
ucucccagcucauagucca

SEQ ID NO: 3028039 - RNA, 19 nt, Artificial Sequence
  Description of Artificial Sequence: Synthetic oligonucleotide
cagacaauccuccagcauc

SEQ ID NO: 3028040 - RNA, 19 nt, Artificial Sequence
  Description of Artificial Sequence: Synthetic oligonucleotide
uagaaggaaaccucuccca

SEQ ID NO: 3028041 - RNA, 19 nt, Artificial Sequence
  Description of Artificial Sequence: Synthetic oligonucleotide
ccugcugaaaguuugaauc

SEQ ID NO: 3028042 - RNA, 19 nt, Artificial Sequence
  Description of Artificial Sequence: Synthetic oligonucleotide
accuucaccucccagaaau

SEQ ID NO: 3028043 - RNA, 19 nt, Artificial Sequence
  Description of Artificial Sequence: Synthetic oligonucleotide
uugcagacaccaauagccc

SEQ ID NO: 3028044 - RNA, 19 nt, Artificial Sequence
  Description of Artificial Sequence: Synthetic oligonucleotide
cagaggaccaccuugccuc

SEQ ID NO: 3028045 - RNA, 19 nt, Artificial Sequence
  Description of Artificial Sequence: Synthetic oligonucleotide
ucaggcuucucuccuaccu

SEQ ID NO: 3028046 - RNA, 19 nt, Artificial Sequence
  Description of Artificial Sequence: Synthetic oligonucleotide
gaaggaaaccucucccagc

SEQ ID NO: 3028047 - RNA, 19 nt, Artificial Sequence
  Description of Artificial Sequence: Synthetic oligonucleotide
aaaguuugaaucagcuccu

SEQ ID NO: 3028048 - RNA, 19 nt, Artificial Sequence
  Description of Artificial Sequence: Synthetic oligonucleotide
ugcguuuggcucuuguggc

SEQ ID NO: 3028049 - RNA, 19 nt, Artificial Sequence
  Description of Artificial Sequence: Synthetic oligonucleotide
cuuugcagacaccaauagc

SEQ ID NO: 3028050 - RNA, 19 nt, Artificial Sequence
  Description of Artificial Sequence: Synthetic oligonucleotide
aaacaggcccaguaaaguu

SEQ ID NO: 3028051 - RNA, 19 nt, Artificial Sequence
  Description of Artificial Sequence: Synthetic oligonucleotide
aucaaagcagucacccugc

SEQ ID NO: 3028052 - RNA, 19 nt, Artificial Sequence
  Description of Artificial Sequence: Synthetic oligonucleotide
ugagauuucucgggcaugc

SEQ ID NO: 3028053 - RNA, 19 nt, Artificial Sequence
  Description of Artificial Sequence: Synthetic oligonucleotide
auuggcuuugcagacacca

SEQ ID NO: 3028054 - RNA, 19 nt, Artificial Sequence
  Description of Artificial Sequence: Synthetic oligonucleotide
ucaguggacagauuggcuu

SEQ ID NO: 3028055 - RNA, 19 nt, Artificial Sequence
  Description of Artificial Sequence: Synthetic oligonucleotide
aacaggcccaguaaaguug

SEQ ID NO: 3028056 - RNA, 19 nt, Artificial Sequence
  Description of Artificial Sequence: Synthetic oligonucleotide
ugaaucagcuccugagaca

SEQ ID NO: 3028057 - RNA, 19 nt, Artificial Sequence
  Description of Artificial Sequence: Synthetic oligonucleotide
aaguaagggcaaacaggcc

SEQ ID NO: 3028058 - RNA, 19 nt, Artificial Sequence
  Description of Artificial Sequence: Synthetic oligonucleotide
gacagaacagaguguaaga

SEQ ID NO: 3028059 - RNA, 19 nt, Artificial Sequence
  Description of Artificial Sequence: Synthetic oligonucleotide
aaaugccaaugcguuuggc

SEQ ID NO: 3028060 - RNA, 19 nt, Artificial Sequence
  Description of Artificial Sequence: Synthetic oligonucleotide
ugugagauuucucgggcau

SEQ ID NO: 3028061 - RNA, 19 nt, Artificial Sequence
  Description of Artificial Sequence: Synthetic oligonucleotide
ugcugaaaguuugaaucag

SEQ ID NO: 3028062 - RNA, 19 nt, Artificial Sequence
  Description of Artificial Sequence: Synthetic oligonucleotide
aguaaaguugucccugaaa

SEQ ID NO: 3028063 - RNA, 19 nt, Artificial Sequence
  Description of Artificial Sequence: Synthetic oligonucleotide
aaugaaguccuagguagaa

SEQ ID NO: 3028064 - RNA, 19 nt, Artificial Sequence
  Description of Artificial Sequence: Synthetic oligonucleotide
aguguaagagguucugaau

SEQ ID NO: 3028065 - RNA, 19 nt, Artificial Sequence
  Description of Artificial Sequence: Synthetic oligonucleotide
aggcccaguaaaguugucc

SEQ ID NO: 3028066 - RNA, 19 nt, Artificial Sequence
  Description of Artificial Sequence: Synthetic oligonucleotide
caccaauagcccauucagg

SEQ ID NO: 3028067 - RNA, 19 nt, Artificial Sequence
  Description of Artificial Sequence: Synthetic oligonucleotide
ucccagaaaugucucccag

SEQ ID NO: 3028068 - RNA, 19 nt, Artificial Sequence
  Description of Artificial Sequence: Synthetic oligonucleotide
uccagcauccccgagggac

SEQ ID NO: 3028069 - RNA, 19 nt, Artificial Sequence
  Description of Artificial Sequence: Synthetic oligonucleotide
gaguguaagagguucugaa

SEQ ID NO: 3028070 - RNA, 19 nt, Artificial Sequence
  Description of Artificial Sequence: Synthetic oligonucleotide
gacaccaauagcccauuca

SEQ ID NO: 3028071 - RNA, 19 nt, Artificial Sequence
  Description of Artificial Sequence: Synthetic oligonucleotide
ccuagguagaaguaagggc

SEQ ID NO: 3028072 - RNA, 19 nt, Artificial Sequence
  Description of Artificial Sequence: Synthetic oligonucleotide
cucuccuaccuucaccucc

SEQ ID NO: 3028073 - RNA, 19 nt, Artificial Sequence
  Description of Artificial Sequence: Synthetic oligonucleotide
cuauagaaggaaaccucuc

SEQ ID NO: 3028074 - RNA, 19 nt, Artificial Sequence
  Description of Artificial Sequence: Synthetic oligonucleotide
aggcuucucuccuaccuuc

SEQ ID NO: 3028075 - RNA, 19 nt, Artificial Sequence
  Description of Artificial Sequence: Synthetic oligonucleotide
augcuauagaaggaaaccu

SEQ ID NO: 3028076 - RNA, 19 nt, Artificial Sequence
  Description of Artificial Sequence: Synthetic oligonucleotide
ggacagauuggcuuugcag

SEQ ID NO: 3028077 - RNA, 19 nt, Artificial Sequence
  Description of Artificial Sequence: Synthetic oligonucleotide
auccccgagggacagagga

SEQ ID NO: 3028078 - RNA, 19 nt, Artificial Sequence
  Description of Artificial Sequence: Synthetic oligonucleotide
aaaugucucccagaauuaa

SEQ ID NO: 3028079 - RNA, 19 nt, Artificial Sequence
  Description of Artificial Sequence: Synthetic oligonucleotide
ucucgggcaugcuauagaa

SEQ ID NO: 3028080 - RNA, 19 nt, Artificial Sequence
  Description of Artificial Sequence: Synthetic oligonucleotide
aaguccuagguagaaguaa

SEQ ID NO: 3028081 - RNA, 19 nt, Artificial Sequence
  Description of Artificial Sequence: Synthetic oligonucleotide
aguccuagguagaaguaag

SEQ ID NO: 3028082 - RNA, 19 nt, Artificial Sequence
  Description of Artificial Sequence: Synthetic oligonucleotide
aguuugaaucagcuccuga

SEQ ID NO: 3028083 - RNA, 19 nt, Artificial Sequence
  Description of Artificial Sequence: Synthetic oligonucleotide
uucaccucccagaaauguc

SEQ ID NO: 3028084 - RNA, 19 nt, Artificial Sequence
  Description of Artificial Sequence: Synthetic oligonucleotide
cuucucuccuaccuucacc

SEQ ID NO: 3028085 - RNA, 19 nt, Artificial Sequence
  Description of Artificial Sequence: Synthetic oligonucleotide
aauagcccauucaggcuuc

SEQ ID NO: 3028086 - RNA, 19 nt, Artificial Sequence
  Description of Artificial Sequence: Synthetic oligonucleotide
aaaguacagaugugagauu

SEQ ID NO: 3028087 - RNA, 19 nt, Artificial Sequence
  Description of Artificial Sequence: Synthetic oligonucleotide
uagguagaaguaagggcaa

SEQ ID NO: 3028088 - RNA, 19 nt, Artificial Sequence
  Description of Artificial Sequence: Synthetic oligonucleotide
agcccauucaggcuucucu

SEQ ID NO: 3028089 - RNA, 19 nt, Artificial Sequence
  Description of Artificial Sequence: Synthetic oligonucleotide
cucccagaauuaaaauuug

SEQ ID NO: 3028090 - RNA, 19 nt, Artificial Sequence
  Description of Artificial Sequence: Synthetic oligonucleotide
gcuccugagacaucaaagc

SEQ ID NO: 3028091 - RNA, 19 nt, Artificial Sequence
  Description of Artificial Sequence: Synthetic oligonucleotide
uucucgggcaugcuauaga

SEQ ID NO: 3028092 - RNA, 19 nt, Artificial Sequence
  Description of Artificial Sequence: Synthetic oligonucleotide
uggcuuugcagacaccaau

SEQ ID NO: 3028093 - RNA, 19 nt, Artificial Sequence
  Description of Artificial Sequence: Synthetic oligonucleotide
agcuccugagacaucaaag

SEQ ID NO: 3028094 - RNA, 19 nt, Artificial Sequence
  Description of Artificial Sequence: Synthetic oligonucleotide
uacagaugugagauuucuc

SEQ ID NO: 3028095 - RNA, 19 nt, Artificial Sequence
  Description of Artificial Sequence: Synthetic oligonucleotide
ugucucccagaauuaaaau

SEQ ID NO: 3028096 - RNA, 19 nt, Artificial Sequence
  Description of Artificial Sequence: Synthetic oligonucleotide
ucacccugccagacaaucc

SEQ ID NO: 3028097 - RNA, 19 nt, Artificial Sequence
  Description of Artificial Sequence: Synthetic oligonucleotide
guucugaaugaaguccuag

SEQ ID NO: 3028098 - RNA, 19 nt, Artificial Sequence
  Description of Artificial Sequence: Synthetic oligonucleotide
aauccuccagcauccccga

SEQ ID NO: 3028099 - RNA, 19 nt, Artificial Sequence
  Description of Artificial Sequence: Synthetic oligonucleotide
guagaaguaagggcaaaca

SEQ ID NO: 3028100 - RNA, 19 nt, Artificial Sequence
  Description of Artificial Sequence: Synthetic oligonucleotide
aaugucucccagaauuaaa

SEQ ID NO: 3028101 - RNA, 19 nt, Artificial Sequence
  Description of Artificial Sequence: Synthetic oligonucleotide
ucaaagcagucacccugcc

SEQ ID NO: 3028102 - RNA, 19 nt, Artificial Sequence
  Description of Artificial Sequence: Synthetic oligonucleotide
acagaggaccaccuugccu

SEQ ID NO: 3028103 - RNA, 19 nt, Artificial Sequence
  Description of Artificial Sequence: Synthetic oligonucleotide
gaccaccuugccucagugg

SEQ ID NO: 3028104 - RNA, 19 nt, Artificial Sequence
  Description of Artificial Sequence: Synthetic oligonucleotide
ugccaaugcguuuggcucu

SEQ ID NO: 3028105 - RNA, 19 nt, Artificial Sequence
  Description of Artificial Sequence: Synthetic oligonucleotide
uuucucgggcaugcuauag

SEQ ID NO: 3028106 - RNA, 19 nt, Artificial Sequence
  Description of Artificial Sequence: Synthetic oligonucleotide
ccaggaaaaugccaaugcg

SEQ ID NO: 3028107 - RNA, 19 nt, Artificial Sequence
  Description of Artificial Sequence: Synthetic oligonucleotide
aggaaaaugccaaugcguu

SEQ ID NO: 3028108 - RNA, 19 nt, Artificial Sequence
  Description of Artificial Sequence: Synthetic oligonucleotide
cugcugaaaguuugaauca

SEQ ID NO: 3028109 - RNA, 19 nt, Artificial Sequence
  Description of Artificial Sequence: Synthetic oligonucleotide
ggcccaguaaaguuguccc

SEQ ID NO: 3028110 - RNA, 19 nt, Artificial Sequence
  Description of Artificial Sequence: Synthetic oligonucleotide
uggacagauuggcuuugca

SEQ ID NO: 3028111 - RNA, 19 nt, Artificial Sequence
  Description of Artificial Sequence: Synthetic oligonucleotide
cugaaaguuugaaucagcu

SEQ ID NO: 3028112 - RNA, 19 nt, Artificial Sequence
  Description of Artificial Sequence: Synthetic oligonucleotide
augugagauuucucgggca

SEQ ID NO: 3028113 - RNA, 19 nt, Artificial Sequence
  Description of Artificial Sequence: Synthetic oligonucleotide
aguacagaugugagauuuc

SEQ ID NO: 3028114 - RNA, 19 nt, Artificial Sequence
  Description of Artificial Sequence: Synthetic oligonucleotide
aaguuugaaucagcuccug

SEQ ID NO: 3028115 - RNA, 19 nt, Artificial Sequence
  Description of Artificial Sequence: Synthetic oligonucleotide
gcuuugcagacaccaauag

SEQ ID NO: 3028116 - RNA, 19 nt, Artificial Sequence
  Description of Artificial Sequence: Synthetic oligonucleotide
augaaguccuagguagaag

SEQ ID NO: 3028117 - RNA, 19 nt, Artificial Sequence
  Description of Artificial Sequence: Synthetic oligonucleotide
agauuucucgggcaugcua

SEQ ID NO: 3028118 - RNA, 19 nt, Artificial Sequence
  Description of Artificial Sequence: Synthetic oligonucleotide
cuccugagacaucaaagca

SEQ ID NO: 3028119 - RNA, 19 nt, Artificial Sequence
  Description of Artificial Sequence: Synthetic oligonucleotide
agacaccaauagcccauuc

SEQ ID NO: 3028120 - RNA, 19 nt, Artificial Sequence
  Description of Artificial Sequence: Synthetic oligonucleotide
ggaaaccucucccagcuca

SEQ ID NO: 3028121 - RNA, 19 nt, Artificial Sequence
  Description of Artificial Sequence: Synthetic oligonucleotide
agggcaaacaggcccagua

SEQ ID NO: 3028122 - RNA, 19 nt, Artificial Sequence
  Description of Artificial Sequence: Synthetic oligonucleotide
agguucugaaugaaguccu

SEQ ID NO: 3028123 - RNA, 19 nt, Artificial Sequence
  Description of Artificial Sequence: Synthetic oligonucleotide
gacagaggaccaccuugcc

SEQ ID NO: 3028124 - RNA, 19 nt, Artificial Sequence
  Description of Artificial Sequence: Synthetic oligonucleotide
guccuagguagaaguaagg

SEQ ID NO: 3028125 - RNA, 19 nt, Artificial Sequence
  Description of Artificial Sequence: Synthetic oligonucleotide
uccuaccuucaccucccag

SEQ ID NO: 3028126 - RNA, 19 nt, Artificial Sequence
  Description of Artificial Sequence: Synthetic oligonucleotide
caggaaaaugccaaugcgu

SEQ ID NO: 3028127 - RNA, 19 nt, Artificial Sequence
  Description of Artificial Sequence: Synthetic oligonucleotide
augucucccagaauuaaaa

SEQ ID NO: 3028128 - RNA, 19 nt, Artificial Sequence
  Description of Artificial Sequence: Synthetic oligonucleotide
auaguccaggaaaaugcca

SEQ ID NO: 3028129 - RNA, 19 nt, Artificial Sequence
  Description of Artificial Sequence: Synthetic oligonucleotide
uugucccugaaaguacaga

SEQ ID NO: 3028130 - RNA, 19 nt, Artificial Sequence
  Description of Artificial Sequence: Synthetic oligonucleotide
agcagucacccugccagac

SEQ ID NO: 3028131 - RNA, 19 nt, Artificial Sequence
  Description of Artificial Sequence: Synthetic oligonucleotide
gaaugaaguccuagguaga

SEQ ID NO: 3028132 - RNA, 19 nt, Artificial Sequence
  Description of Artificial Sequence: Synthetic oligonucleotide
uuggcuuugcagacaccaa

SEQ ID NO: 3028133 - RNA, 19 nt, Artificial Sequence
  Description of Artificial Sequence: Synthetic oligonucleotide
cugccagacaauccuccag

SEQ ID NO: 3028134 - RNA, 19 nt, Artificial Sequence
  Description of Artificial Sequence: Synthetic oligonucleotide
gaaucagcuccugagacau

SEQ ID NO: 3028135 - RNA, 19 nt, Artificial Sequence
  Description of Artificial Sequence: Synthetic oligonucleotide
agaguguaagagguucuga

SEQ ID NO: 3028136 - RNA, 19 nt, Artificial Sequence
  Description of Artificial Sequence: Synthetic oligonucleotide
cccagaauuaaaauuugga

SEQ ID NO: 3028137 - RNA, 19 nt, Artificial Sequence
  Description of Artificial Sequence: Synthetic oligonucleotide
cucgggcaugcuauagaag

SEQ ID NO: 3028138 - RNA, 19 nt, Artificial Sequence
  Description of Artificial Sequence: Synthetic oligonucleotide
aguugucccugaaaguaca

SEQ ID NO: 3028139 - RNA, 19 nt, Artificial Sequence
  Description of Artificial Sequence: Synthetic oligonucleotide
aagcagucacccugccaga

SEQ ID NO: 3028140 - RNA, 19 nt, Artificial Sequence
  Description of Artificial Sequence: Synthetic oligonucleotide
aucugugacagaacagagu

SEQ ID NO: 3028141 - RNA, 19 nt, Artificial Sequence
  Description of Artificial Sequence: Synthetic oligonucleotide
guaagggcaaacaggccca

SEQ ID NO: 3028142 - RNA, 19 nt, Artificial Sequence
  Description of Artificial Sequence: Synthetic oligonucleotide
gauuucucgggcaugcuau

SEQ ID NO: 3028143 - RNA, 19 nt, Artificial Sequence
  Description of Artificial Sequence: Synthetic oligonucleotide
guggccugcugaaaguuug

SEQ ID NO: 3028144 - RNA, 19 nt, Artificial Sequence
  Description of Artificial Sequence: Synthetic oligonucleotide
uucaggcuucucuccuacc

SEQ ID NO: 3028145 - RNA, 19 nt, Artificial Sequence
  Description of Artificial Sequence: Synthetic oligonucleotide
gucccugaaaguacagaug

SEQ ID NO: 3028146 - RNA, 19 nt, Artificial Sequence
  Description of Artificial Sequence: Synthetic oligonucleotide
uguggccugcugaaaguuu

SEQ ID NO: 3028147 - RNA, 19 nt, Artificial Sequence
  Description of Artificial Sequence: Synthetic oligonucleotide
gcaaacaggcccaguaaag

SEQ ID NO: 3028148 - RNA, 19 nt, Artificial Sequence
  Description of Artificial Sequence: Synthetic oligonucleotide
aggaaaccucucccagcuc

SEQ ID NO: 3028149 - RNA, 19 nt, Artificial Sequence
  Description of Artificial Sequence: Synthetic oligonucleotide
cagaguguaagagguucug

SEQ ID NO: 3028150 - RNA, 19 nt, Artificial Sequence
  Description of Artificial Sequence: Synthetic oligonucleotide
uggccugcugaaaguuuga

SEQ ID NO: 3028151 - RNA, 19 nt, Artificial Sequence
  Description of Artificial Sequence: Synthetic oligonucleotide
guugucccugaaaguacag

SEQ ID NO: 3028152 - RNA, 19 nt, Artificial Sequence
  Description of Artificial Sequence: Synthetic oligonucleotide
accucucccagcucauagu

SEQ ID NO: 3028153 - RNA, 19 nt, Artificial Sequence
  Description of Artificial Sequence: Synthetic oligonucleotide
agcucauaguccaggaaaa

SEQ ID NO: 3028154 - RNA, 19 nt, Artificial Sequence
  Description of Artificial Sequence: Synthetic oligonucleotide
acagaguguaagagguucu

SEQ ID NO: 3028155 - RNA, 19 nt, Artificial Sequence
  Description of Artificial Sequence: Synthetic oligonucleotide
acaggcccaguaaaguugu

SEQ ID NO: 3028156 - RNA, 19 nt, Artificial Sequence
  Description of Artificial Sequence: Synthetic oligonucleotide
cuaccuucaccucccagaa

SEQ ID NO: 3028157 - RNA, 19 nt, Artificial Sequence
  Description of Artificial Sequence: Synthetic oligonucleotide
uaagggcaaacaggcccag

SEQ ID NO: 3028158 - RNA, 19 nt, Artificial Sequence
  Description of Artificial Sequence: Synthetic oligonucleotide
aguggacagauuggcuuug

SEQ ID NO: 3028159 - RNA, 19 nt, Artificial Sequence
  Description of Artificial Sequence: Synthetic oligonucleotide
ccugaaaguacagauguga

SEQ ID NO: 3028160 - RNA, 19 nt, Artificial Sequence
  Description of Artificial Sequence: Synthetic oligonucleotide
gucucccagaauuaaaauu

SEQ ID NO: 3028161 - RNA, 19 nt, Artificial Sequence
  Description of Artificial Sequence: Synthetic oligonucleotide
uuuggcucuuguggccugc

SEQ ID NO: 3028162 - RNA, 19 nt, Artificial Sequence
  Description of Artificial Sequence: Synthetic oligonucleotide
gcaugcuauagaaggaaac

SEQ ID NO: 3028163 - RNA, 19 nt, Artificial Sequence
  Description of Artificial Sequence: Synthetic oligonucleotide
aaucagcuccugagacauc

SEQ ID NO: 3028164 - RNA, 19 nt, Artificial Sequence
  Description of Artificial Sequence: Synthetic oligonucleotide
ggacagaggaccaccuugc

SEQ ID NO: 3028165 - RNA, 19 nt, Artificial Sequence
  Description of Artificial Sequence: Synthetic oligonucleotide
ccuccagcauccccgaggg

SEQ ID NO: 3028166 - RNA, 19 nt, Artificial Sequence
  Description of Artificial Sequence: Synthetic oligonucleotide
uccccgagggacagaggac

SEQ ID NO: 3028167 - RNA, 19 nt, Artificial Sequence
  Description of Artificial Sequence: Synthetic oligonucleotide
agaggaccaccuugccuca

SEQ ID NO: 3028168 - RNA, 19 nt, Artificial Sequence
  Description of Artificial Sequence: Synthetic oligonucleotide
guacagaugugagauuucu

SEQ ID NO: 3028169 - RNA, 19 nt, Artificial Sequence
  Description of Artificial Sequence: Synthetic oligonucleotide
cugagacaucaaagcaguc

SEQ ID NO: 3028170 - RNA, 19 nt, Artificial Sequence
  Description of Artificial Sequence: Synthetic oligonucleotide
guaagagguucugaaugaa

SEQ ID NO: 3028171 - RNA, 19 nt, Artificial Sequence
  Description of Artificial Sequence: Synthetic oligonucleotide
ggcaaacaggcccaguaaa

SEQ ID NO: 3028172 - RNA, 19 nt, Artificial Sequence
  Description of Artificial Sequence: Synthetic oligonucleotide
gucacccugccagacaauc

SEQ ID NO: 3028173 - RNA, 19 nt, Artificial Sequence
  Description of Artificial Sequence: Synthetic oligonucleotide
gaaguccuagguagaagua

SEQ ID NO: 3028174 - RNA, 19 nt, Artificial Sequence
  Description of Artificial Sequence: Synthetic oligonucleotide
gugagauuucucgggcaug

SEQ ID NO: 3028175 - RNA, 19 nt, Artificial Sequence
  Description of Artificial Sequence: Synthetic oligonucleotide
ucagcuccugagacaucaa

SEQ ID NO: 3028176 - RNA, 19 nt, Artificial Sequence
  Description of Artificial Sequence: Synthetic oligonucleotide
auuucucgggcaugcuaua

SEQ ID NO: 3028177 - RNA, 19 nt, Artificial Sequence
  Description of Artificial Sequence: Synthetic oligonucleotide
accuugccucaguggacag

SEQ ID NO: 3028178 - RNA, 19 nt, Artificial Sequence
  Description of Artificial Sequence: Synthetic oligonucleotide
guuuggcucuuguggccug

SEQ ID NO: 3028179 - RNA, 19 nt, Artificial Sequence
  Description of Artificial Sequence: Synthetic oligonucleotide
uggcucuuguggccugcug

SEQ ID NO: 3028180 - RNA, 19 nt, Artificial Sequence
  Description of Artificial Sequence: Synthetic oligonucleotide
ccagaaaugucucccagaa

SEQ ID NO: 3028181 - RNA, 19 nt, Artificial Sequence
  Description of Artificial Sequence: Synthetic oligonucleotide
gacaauccuccagcauccc

SEQ ID NO: 3028182 - RNA, 19 nt, Artificial Sequence
  Description of Artificial Sequence: Synthetic oligonucleotide
ucucuccuaccuucaccuc

SEQ ID NO: 3028183 - RNA, 19 nt, Artificial Sequence
  Description of Artificial Sequence: Synthetic oligonucleotide
ggcucuuguggccugcuga

SEQ ID NO: 3028184 - RNA, 19 nt, Artificial Sequence
  Description of Artificial Sequence: Synthetic oligonucleotide
cagucacccugccagacaa

SEQ ID NO: 3028185 - RNA, 19 nt, Artificial Sequence
  Description of Artificial Sequence: Synthetic oligonucleotide
ccucaguggacagauuggc

SEQ ID NO: 3028186 - RNA, 19 nt, Artificial Sequence
  Description of Artificial Sequence: Synthetic oligonucleotide
caaagcagucacccugcca

SEQ ID NO: 3028187 - RNA, 19 nt, Artificial Sequence
  Description of Artificial Sequence: Synthetic oligonucleotide
caauagcccauucaggcuu

SEQ ID NO: 3028188 - RNA, 19 nt, Artificial Sequence
  Description of Artificial Sequence: Synthetic oligonucleotide
gauuggcuuugcagacacc

SEQ ID NO: 3028189 - RNA, 19 nt, Artificial Sequence
  Description of Artificial Sequence: Synthetic oligonucleotide
gcuauagaaggaaaccucu

SEQ ID NO: 3028190 - RNA, 19 nt, Artificial Sequence
  Description of Artificial Sequence: Synthetic oligonucleotide
ccucccagaaaugucuccc

SEQ ID NO: 3028191 - RNA, 19 nt, Artificial Sequence
  Description of Artificial Sequence: Synthetic oligonucleotide
uaccuucaccucccagaaa

SEQ ID NO: 3028192 - RNA, 19 nt, Artificial Sequence
  Description of Artificial Sequence: Synthetic oligonucleotide
gccucaguggacagauugg

SEQ ID NO: 3028193 - RNA, 19 nt, Artificial Sequence
  Description of Artificial Sequence: Synthetic oligonucleotide
caaacaggcccaguaaagu

SEQ ID NO: 3028194 - RNA, 19 nt, Artificial Sequence
  Description of Artificial Sequence: Synthetic oligonucleotide
cccaguaaaguugucccug

SEQ ID NO: 3028195 - RNA, 19 nt, Artificial Sequence
  Description of Artificial Sequence: Synthetic oligonucleotide
cucccagcucauaguccag

SEQ ID NO: 3028196 - RNA, 19 nt, Artificial Sequence
  Description of Artificial Sequence: Synthetic oligonucleotide
ggaccaccuugccucagug

SEQ ID NO: 3028197 - RNA, 19 nt, Artificial Sequence
  Description of Artificial Sequence: Synthetic oligonucleotide
cuuguggccugcugaaagu

SEQ ID NO: 3028198 - RNA, 19 nt, Artificial Sequence
  Description of Artificial Sequence: Synthetic oligonucleotide
cccugccagacaauccucc

SEQ ID NO: 3028199 - RNA, 19 nt, Artificial Sequence
  Description of Artificial Sequence: Synthetic oligonucleotide
acccugccagacaauccuc

SEQ ID NO: 3028200 - RNA, 19 nt, Artificial Sequence
  Description of Artificial Sequence: Synthetic oligonucleotide
ccugagacaucaaagcagu

SEQ ID NO: 3028201 - RNA, 19 nt, Artificial Sequence
  Description of Artificial Sequence: Synthetic oligonucleotide
gcguuuggcucuuguggcc

SEQ ID NO: 3028202 - RNA, 19 nt, Artificial Sequence
  Description of Artificial Sequence: Synthetic oligonucleotide
gcccauucaggcuucucuc

SEQ ID NO: 3028203 - RNA, 19 nt, Artificial Sequence
  Description of Artificial Sequence: Synthetic oligonucleotide
ccucucccagcucauaguc

SEQ ID NO: 3028204 - RNA, 19 nt, Artificial Sequence
  Description of Artificial Sequence: Synthetic oligonucleotide
guggacagauuggcuuugc

SEQ ID NO: 3028205 - RNA, 19 nt, Artificial Sequence
  Description of Artificial Sequence: Synthetic oligonucleotide
aaaccucucccagcucaua

SEQ ID NO: 3028206 - RNA, 19 nt, Artificial Sequence
  Description of Artificial Sequence: Synthetic oligonucleotide
agguagaaguaagggcaaa

SEQ ID NO: 3028207 - RNA, 19 nt, Artificial Sequence
  Description of Artificial Sequence: Synthetic oligonucleotide
agggacagaggaccaccuu

SEQ ID NO: 3028208 - RNA, 19 nt, Artificial Sequence
  Description of Artificial Sequence: Synthetic oligonucleotide
cucaguggacagauuggcu

SEQ ID NO: 3028209 - RNA, 19 nt, Artificial Sequence
  Description of Artificial Sequence: Synthetic oligonucleotide
cuugccucaguggacagau

SEQ ID NO: 3028210 - RNA, 19 nt, Artificial Sequence
  Description of Artificial Sequence: Synthetic oligonucleotide
cacccugccagacaauccu

SEQ ID NO: 3028211 - RNA, 19 nt, Artificial Sequence
  Description of Artificial Sequence: Synthetic oligonucleotide
cauucaggcuucucuccua

SEQ ID NO: 3028212 - RNA, 19 nt, Artificial Sequence
  Description of Artificial Sequence: Synthetic oligonucleotide
auccuccagcauccccgag

SEQ ID NO: 3028213 - RNA, 19 nt, Artificial Sequence
  Description of Artificial Sequence: Synthetic oligonucleotide
cagauuggcuuugcagaca

SEQ ID NO: 3028214 - RNA, 19 nt, Artificial Sequence
  Description of Artificial Sequence: Synthetic oligonucleotide
ccccgagggacagaggacc

SEQ ID NO: 3028215 - RNA, 19 nt, Artificial Sequence
  Description of Artificial Sequence: Synthetic oligonucleotide
gccagacaauccuccagca

SEQ ID NO: 3028216 - RNA, 19 nt, Artificial Sequence
  Description of Artificial Sequence: Synthetic oligonucleotide
caguaaaguugucccugaa

SEQ ID NO: 3028217 - RNA, 19 nt, Artificial Sequence
  Description of Artificial Sequence: Synthetic oligonucleotide
uuggcucuuguggccugcu

SEQ ID NO: 3028218 - RNA, 19 nt, Artificial Sequence
  Description of Artificial Sequence: Synthetic oligonucleotide
gggcaaacaggcccaguaa

SEQ ID NO: 3028219 - RNA, 19 nt, Artificial Sequence
  Description of Artificial Sequence: Synthetic oligonucleotide
gcuucucuccuaccuucac

SEQ ID NO: 3028220 - RNA, 19 nt, Artificial Sequence
  Description of Artificial Sequence: Synthetic oligonucleotide
ccaguaaaguugucccuga

SEQ ID NO: 3028221 - RNA, 19 nt, Artificial Sequence
  Description of Artificial Sequence: Synthetic oligonucleotide
gggcaugcuauagaaggaa

SEQ ID NO: 3028222 - RNA, 19 nt, Artificial Sequence
  Description of Artificial Sequence: Synthetic oligonucleotide
cagcauccccgagggacag

SEQ ID NO: 3028223 - RNA, 19 nt, Artificial Sequence
  Description of Artificial Sequence: Synthetic oligonucleotide
ccuucaccucccagaaaug

SEQ ID NO: 3028224 - RNA, 19 nt, Artificial Sequence
  Description of Artificial Sequence: Synthetic oligonucleotide
gcucuuguggccugcugaa

SEQ ID NO: 3028225 - RNA, 19 nt, Artificial Sequence
  Description of Artificial Sequence: Synthetic oligonucleotide
ggcuuugcagacaccaaua

SEQ ID NO: 3028226 - RNA, 19 nt, Artificial Sequence
  Description of Artificial Sequence: Synthetic oligonucleotide
ggaaaaugccaaugcguuu

SEQ ID NO: 3028227 - RNA, 19 nt, Artificial Sequence
  Description of Artificial Sequence: Synthetic oligonucleotide
ggcaugcuauagaaggaaa

SEQ ID NO: 3028228 - RNA, 19 nt, Artificial Sequence
  Description of Artificial Sequence: Synthetic oligonucleotide
cccagaaaugucucccaga

SEQ ID NO: 3028229 - RNA, 19 nt, Artificial Sequence
  Description of Artificial Sequence: Synthetic oligonucleotide
auagcccauucaggcuucu

SEQ ID NO: 3028230 - RNA, 19 nt, Artificial Sequence
  Description of Artificial Sequence: Synthetic oligonucleotide
caguggacagauuggcuuu

SEQ ID NO: 3028231 - RNA, 19 nt, Artificial Sequence
  Description of Artificial Sequence: Synthetic oligonucleotide
gagggacagaggaccaccu

SEQ ID NO: 3028232 - RNA, 19 nt, Artificial Sequence
  Description of Artificial Sequence: Synthetic oligonucleotide
caaugcguuuggcucuugu

SEQ ID NO: 3028233 - RNA, 19 nt, Artificial Sequence
  Description of Artificial Sequence: Synthetic oligonucleotide
uugccucaguggacagauu

SEQ ID NO: 3028234 - RNA, 19 nt, Artificial Sequence
  Description of Artificial Sequence: Synthetic oligonucleotide
gcagucacccugccagaca

SEQ ID NO: 3028235 - RNA, 19 nt, Artificial Sequence
  Description of Artificial Sequence: Synthetic oligonucleotide
cgagggacagaggaccacc

SEQ ID NO: 3028236 - RNA, 19 nt, Artificial Sequence
  Description of Artificial Sequence: Synthetic oligonucleotide
uagcccauucaggcuucuc

SEQ ID NO: 3028237 - RNA, 19 nt, Artificial Sequence
  Description of Artificial Sequence: Synthetic oligonucleotide
caggcccaguaaaguuguc

SEQ ID NO: 3028238 - RNA, 19 nt, Artificial Sequence
  Description of Artificial Sequence: Synthetic oligonucleotide
gaacagaguguaagagguu

SEQ ID NO: 3028239 - RNA, 19 nt, Artificial Sequence
  Description of Artificial Sequence: Synthetic oligonucleotide
gagauuucucgggcaugcu

SEQ ID NO: 3028240 - RNA, 19 nt, Artificial Sequence
  Description of Artificial Sequence: Synthetic oligonucleotide
ccaauagcccauucaggcu

SEQ ID NO: 3028241 - RNA, 19 nt, Artificial Sequence
  Description of Artificial Sequence: Synthetic oligonucleotide
ccagcauccccgagggaca

SEQ ID NO: 3028242 - RNA, 19 nt, Artificial Sequence
  Description of Artificial Sequence: Synthetic oligonucleotide
cagaaaugucucccagaau

SEQ ID NO: 3028243 - RNA, 19 nt, Artificial Sequence
  Description of Artificial Sequence: Synthetic oligonucleotide
ccugccagacaauccucca

SEQ ID NO: 3028244 - RNA, 19 nt, Artificial Sequence
  Description of Artificial Sequence: Synthetic oligonucleotide
gccugcugaaaguuugaau

SEQ ID NO: 3028245 - RNA, 19 nt, Artificial Sequence
  Description of Artificial Sequence: Synthetic oligonucleotide
gcagacaccaauagcccau

SEQ ID NO: 3028246 - RNA, 19 nt, Artificial Sequence
  Description of Artificial Sequence: Synthetic oligonucleotide
gguucugaaugaaguccua

SEQ ID NO: 3028247 - RNA, 19 nt, Artificial Sequence
  Description of Artificial Sequence: Synthetic oligonucleotide
gcccaguaaaguugucccu

SEQ ID NO: 3028248 - RNA, 19 nt, Artificial Sequence
  Description of Artificial Sequence: Synthetic oligonucleotide
agucacccugccagacaau

SEQ ID NO: 3028249 - RNA, 19 nt, Artificial Sequence
  Description of Artificial Sequence: Synthetic oligonucleotide
caggcuucucuccuaccuu

SEQ ID NO: 3028250 - RNA, 19 nt, Artificial Sequence
  Description of Artificial Sequence: Synthetic oligonucleotide
ccauucaggcuucucuccu

SEQ ID NO: 3028251 - RNA, 19 nt, Artificial Sequence
  Description of Artificial Sequence: Synthetic oligonucleotide
cgggcaugcuauagaagga

SEQ ID NO: 3028252 - RNA, 19 nt, Artificial Sequence
  Description of Artificial Sequence: Synthetic oligonucleotide
ggccugcugaaaguuugaa

SEQ ID NO: 3028253 - RNA, 19 nt, Artificial Sequence
  Description of Artificial Sequence: Synthetic oligonucleotide
cccgagggacagaggacca

SEQ ID NO: 3028254 - RNA, 19 nt, Artificial Sequence
  Description of Artificial Sequence: Synthetic oligonucleotide
ccagacaauccuccagcau

SEQ ID NO: 3028255 - RNA, 19 nt, Artificial Sequence
  Description of Artificial Sequence: Synthetic oligonucleotide
cagacaccaauagcccauu

SEQ ID NO: 3028256 - RNA, 19 nt, Artificial Sequence
  Description of Artificial Sequence: Synthetic oligonucleotide
ccuugccucaguggacaga

SEQ ID NO: 3028257 - RNA, 19 nt, Artificial Sequence
  Description of Artificial Sequence: Synthetic oligonucleotide
ccaaugcguuuggcucuug

SEQ ID NO: 3028258 - RNA, 19 nt, Artificial Sequence
  Description of Artificial Sequence: Synthetic oligonucleotide
cguuuggcucuuguggccu

SEQ ID NO: 3028259 - RNA, 19 nt, Artificial Sequence
  Description of Artificial Sequence: Synthetic oligonucleotide
gccaaugcguuuggcucuu

SEQ ID NO: 3028260 - RNA, 19 nt, Artificial Sequence
  Description of Artificial Sequence: Synthetic oligonucleotide
ucauaaucaggauacaugg

SEQ ID NO: 3028261 - RNA, 19 nt, Artificial Sequence
  Description of Artificial Sequence: Synthetic oligonucleotide
ucucaguugaaacagagug

SEQ ID NO: 3028262 - RNA, 19 nt, Artificial Sequence
  Description of Artificial Sequence: Synthetic oligonucleotide
acgaccauaacccauagag

SEQ ID NO: 3028263 - RNA, 19 nt, Artificial Sequence
  Description of Artificial Sequence: Synthetic oligonucleotide
auagccauucuuuugcagc

SEQ ID NO: 3028264 - RNA, 19 nt, Artificial Sequence
  Description of Artificial Sequence: Synthetic oligonucleotide
cacaucaggaaucugagcg

SEQ ID NO: 3028265 - RNA, 19 nt, Artificial Sequence
  Description of Artificial Sequence: Synthetic oligonucleotide
auagauauccgcaugguac

SEQ ID NO: 3028266 - RNA, 19 nt, Artificial Sequence
  Description of Artificial Sequence: Synthetic oligonucleotide
uuugucauagauauccgca

SEQ ID NO: 3028267 - RNA, 19 nt, Artificial Sequence
  Description of Artificial Sequence: Synthetic oligonucleotide
cauagaguagccauacacg

SEQ ID NO: 3028268 - RNA, 19 nt, Artificial Sequence
  Description of Artificial Sequence: Synthetic oligonucleotide
aggaaucugagcgaggucc

SEQ ID NO: 3028269 - RNA, 19 nt, Artificial Sequence
  Description of Artificial Sequence: Synthetic oligonucleotide
aguugaaacagagugcugg

SEQ ID NO: 3028270 - RNA, 19 nt, Artificial Sequence
  Description of Artificial Sequence: Synthetic oligonucleotide
cacuuugucauagauaucc

SEQ ID NO: 3028271 - RNA, 19 nt, Artificial Sequence
  Description of Artificial Sequence: Synthetic oligonucleotide
auccgcaugguacucagcc

SEQ ID NO: 3028272 - RNA, 19 nt, Artificial Sequence
  Description of Artificial Sequence: Synthetic oligonucleotide
auggcuuugaucuucucag

SEQ ID NO: 3028273 - RNA, 19 nt, Artificial Sequence
  Description of Artificial Sequence: Synthetic oligonucleotide
ugaaacagagugcugggca

SEQ ID NO: 3028274 - RNA, 19 nt, Artificial Sequence
  Description of Artificial Sequence: Synthetic oligonucleotide
ugaagacuccaucagaguc

SEQ ID NO: 3028275 - RNA, 19 nt, Artificial Sequence
  Description of Artificial Sequence: Synthetic oligonucleotide
guggacucgaaucagcacg

SEQ ID NO: 3028276 - RNA, 19 nt, Artificial Sequence
  Description of Artificial Sequence: Synthetic oligonucleotide
cucauaaucaggauacaug

SEQ ID NO: 3028277 - RNA, 19 nt, Artificial Sequence
  Description of Artificial Sequence: Synthetic oligonucleotide
auagaguagccauacacgu

SEQ ID NO: 3028278 - RNA, 19 nt, Artificial Sequence
  Description of Artificial Sequence: Synthetic oligonucleotide
gucauagauauccgcaugg

SEQ ID NO: 3028279 - RNA, 19 nt, Artificial Sequence
  Description of Artificial Sequence: Synthetic oligonucleotide
cugggcacgaccauaaccc

SEQ ID NO: 3028280 - RNA, 19 nt, Artificial Sequence
  Description of Artificial Sequence: Synthetic oligonucleotide
gacacuuugucauagauau

SEQ ID NO: 3028281 - RNA, 19 nt, Artificial Sequence
  Description of Artificial Sequence: Synthetic oligonucleotide
aucagcacguacuugaaga

SEQ ID NO: 3028282 - RNA, 19 nt, Artificial Sequence
  Description of Artificial Sequence: Synthetic oligonucleotide
auuuccuugcacuccgucg

SEQ ID NO: 3028283 - RNA, 19 nt, Artificial Sequence
  Description of Artificial Sequence: Synthetic oligonucleotide
ucaguagccaucgucagcc

SEQ ID NO: 3028284 - RNA, 19 nt, Artificial Sequence
  Description of Artificial Sequence: Synthetic oligonucleotide
agaguagccauacacgugu

SEQ ID NO: 3028285 - RNA, 19 nt, Artificial Sequence
  Description of Artificial Sequence: Synthetic oligonucleotide
ucaguugaaacagagugcu

SEQ ID NO: 3028286 - RNA, 19 nt, Artificial Sequence
  Description of Artificial Sequence: Synthetic oligonucleotide
uacuugaagacuccaucag

SEQ ID NO: 3028287 - RNA, 19 nt, Artificial Sequence
  Description of Artificial Sequence: Synthetic oligonucleotide
gaagacuccaucagagucg

SEQ ID NO: 3028288 - RNA, 19 nt, Artificial Sequence
  Description of Artificial Sequence: Synthetic oligonucleotide
gucauagccauucuuuugc

SEQ ID NO: 3028289 - RNA, 19 nt, Artificial Sequence
  Description of Artificial Sequence: Synthetic oligonucleotide
uccacaucaggaaucugag

SEQ ID NO: 3028290 - RNA, 19 nt, Artificial Sequence
  Description of Artificial Sequence: Synthetic oligonucleotide
acucagcccauuuguagcc

SEQ ID NO: 3028291 - RNA, 19 nt, Artificial Sequence
  Description of Artificial Sequence: Synthetic oligonucleotide
uuugcagcucgccugacac

SEQ ID NO: 3028292 - RNA, 19 nt, Artificial Sequence
  Description of Artificial Sequence: Synthetic oligonucleotide
gaccauaacccauagagua

SEQ ID NO: 3028293 - RNA, 19 nt, Artificial Sequence
  Description of Artificial Sequence: Synthetic oligonucleotide
agagucgauguccacauca

SEQ ID NO: 3028294 - RNA, 19 nt, Artificial Sequence
  Description of Artificial Sequence: Synthetic oligonucleotide
aaucagcacguacuugaag

SEQ ID NO: 3028295 - RNA, 19 nt, Artificial Sequence
  Description of Artificial Sequence: Synthetic oligonucleotide
cuuugucauagauauccgc

SEQ ID NO: 3028296 - RNA, 19 nt, Artificial Sequence
  Description of Artificial Sequence: Synthetic oligonucleotide
cucaguugaaacagagugc

SEQ ID NO: 3028297 - RNA, 19 nt, Artificial Sequence
  Description of Artificial Sequence: Synthetic oligonucleotide
uaggcacucacagucauag

SEQ ID NO: 3028298 - RNA, 19 nt, Artificial Sequence
  Description of Artificial Sequence: Synthetic oligonucleotide
uuuccuugcacuccgucgu

SEQ ID NO: 3028299 - RNA, 19 nt, Artificial Sequence
  Description of Artificial Sequence: Synthetic oligonucleotide
aaucugagcgagguccgcc

SEQ ID NO: 3028300 - RNA, 19 nt, Artificial Sequence
  Description of Artificial Sequence: Synthetic oligonucleotide
ugcuaaguggacucgaauc

SEQ ID NO: 3028301 - RNA, 19 nt, Artificial Sequence
  Description of Artificial Sequence: Synthetic oligonucleotide
uucuuuugcagcucgccug

SEQ ID NO: 3028302 - RNA, 19 nt, Artificial Sequence
  Description of Artificial Sequence: Synthetic oligonucleotide
ugucauagauauccgcaug

SEQ ID NO: 3028303 - RNA, 19 nt, Artificial Sequence
  Description of Artificial Sequence: Synthetic oligonucleotide
guugaaacagagugcuggg

SEQ ID NO: 3028304 - RNA, 19 nt, Artificial Sequence
  Description of Artificial Sequence: Synthetic oligonucleotide
acguguaucuuccuguucu

SEQ ID NO: 3028305 - RNA, 19 nt, Artificial Sequence
  Description of Artificial Sequence: Synthetic oligonucleotide
ggauacauggcuuugaucu

SEQ ID NO: 3028306 - RNA, 19 nt, Artificial Sequence
  Description of Artificial Sequence: Synthetic oligonucleotide
uacucagcccauuuguagc

SEQ ID NO: 3028307 - RNA, 19 nt, Artificial Sequence
  Description of Artificial Sequence: Synthetic oligonucleotide
acgauuuccuugcacuccg

SEQ ID NO: 3028308 - RNA, 19 nt, Artificial Sequence
  Description of Artificial Sequence: Synthetic oligonucleotide
uaacccauagaguagccau

SEQ ID NO: 3028309 - RNA, 19 nt, Artificial Sequence
  Description of Artificial Sequence: Synthetic oligonucleotide
uaaguggacucgaaucagc

SEQ ID NO: 3028310 - RNA, 19 nt, Artificial Sequence
  Description of Artificial Sequence: Synthetic oligonucleotide
uccaucagagucgaugucc

SEQ ID NO: 3028311 - RNA, 19 nt, Artificial Sequence
  Description of Artificial Sequence: Synthetic oligonucleotide
cauaaucaggauacauggc

SEQ ID NO: 3028312 - RNA, 19 nt, Artificial Sequence
  Description of Artificial Sequence: Synthetic oligonucleotide
uacacguguaucuuccugu

SEQ ID NO: 3028313 - RNA, 19 nt, Artificial Sequence
  Description of Artificial Sequence: Synthetic oligonucleotide
ugguacucagcccauuugu

SEQ ID NO: 3028314 - RNA, 19 nt, Artificial Sequence
  Description of Artificial Sequence: Synthetic oligonucleotide
uagauauccgcaugguacu

SEQ ID NO: 3028315 - RNA, 19 nt, Artificial Sequence
  Description of Artificial Sequence: Synthetic oligonucleotide
ccuguucuggcucugaugg

SEQ ID NO: 3028316 - RNA, 19 nt, Artificial Sequence
  Description of Artificial Sequence: Synthetic oligonucleotide
aguggacucgaaucagcac

SEQ ID NO: 3028317 - RNA, 19 nt, Artificial Sequence
  Description of Artificial Sequence: Synthetic oligonucleotide
ggcacucacagucauagcc

SEQ ID NO: 3028318 - RNA, 19 nt, Artificial Sequence
  Description of Artificial Sequence: Synthetic oligonucleotide
agcacguacuugaagacuc

SEQ ID NO: 3028319 - RNA, 19 nt, Artificial Sequence
  Description of Artificial Sequence: Synthetic oligonucleotide
acuccaucagagucgaugu

SEQ ID NO: 3028320 - RNA, 19 nt, Artificial Sequence
  Description of Artificial Sequence: Synthetic oligonucleotide
ucuuuugcagcucgccuga

SEQ ID NO: 3028321 - RNA, 19 nt, Artificial Sequence
  Description of Artificial Sequence: Synthetic oligonucleotide
guacucagcccauuuguag

SEQ ID NO: 3028322 - RNA, 19 nt, Artificial Sequence
  Description of Artificial Sequence: Synthetic oligonucleotide
ugaccucauaaucaggaua

SEQ ID NO: 3028323 - RNA, 19 nt, Artificial Sequence
  Description of Artificial Sequence: Synthetic oligonucleotide
aaacagagugcugggcacg

SEQ ID NO: 3028324 - RNA, 19 nt, Artificial Sequence
  Description of Artificial Sequence: Synthetic oligonucleotide
uagccauacacguguaucu

SEQ ID NO: 3028325 - RNA, 19 nt, Artificial Sequence
  Description of Artificial Sequence: Synthetic oligonucleotide
gaaacagagugcugggcac

SEQ ID NO: 3028326 - RNA, 19 nt, Artificial Sequence
  Description of Artificial Sequence: Synthetic oligonucleotide
accgccuaggcacucacag

SEQ ID NO: 3028327 - RNA, 19 nt, Artificial Sequence
  Description of Artificial Sequence: Synthetic oligonucleotide
uagaguagccauacacgug

SEQ ID NO: 3028328 - RNA, 19 nt, Artificial Sequence
  Description of Artificial Sequence: Synthetic oligonucleotide
guacuugaagacuccauca

SEQ ID NO: 3028329 - RNA, 19 nt, Artificial Sequence
  Description of Artificial Sequence: Synthetic oligonucleotide
acuugaagacuccaucaga

SEQ ID NO: 3028330 - RNA, 19 nt, Artificial Sequence
  Description of Artificial Sequence: Synthetic oligonucleotide
ucaggaaucugagcgaggu

SEQ ID NO: 3028331 - RNA, 19 nt, Artificial Sequence
  Description of Artificial Sequence: Synthetic oligonucleotide
aggauacauggcuuugauc

SEQ ID NO: 3028332 - RNA, 19 nt, Artificial Sequence
  Description of Artificial Sequence: Synthetic oligonucleotide
cuuugaucuucucaguuga

SEQ ID NO: 3028333 - RNA, 19 nt, Artificial Sequence
  Description of Artificial Sequence: Synthetic oligonucleotide
auucuuuugcagcucgccu

SEQ ID NO: 3028334 - RNA, 19 nt, Artificial Sequence
  Description of Artificial Sequence: Synthetic oligonucleotide
caggugaccucauaaucag

SEQ ID NO: 3028335 - RNA, 19 nt, Artificial Sequence
  Description of Artificial Sequence: Synthetic oligonucleotide
ugacacuuugucauagaua

SEQ ID NO: 3028336 - RNA, 19 nt, Artificial Sequence
  Description of Artificial Sequence: Synthetic oligonucleotide
ucagagucgauguccacau

SEQ ID NO: 3028337 - RNA, 19 nt, Artificial Sequence
  Description of Artificial Sequence: Synthetic oligonucleotide
auacauggcuuugaucuuc

SEQ ID NO: 3028338 - RNA, 19 nt, Artificial Sequence
  Description of Artificial Sequence: Synthetic oligonucleotide
agucgauguccacaucagg

SEQ ID NO: 3028339 - RNA, 19 nt, Artificial Sequence
  Description of Artificial Sequence: Synthetic oligonucleotide
ucgccugacacuuugucau

SEQ ID NO: 3028340 - RNA, 19 nt, Artificial Sequence
  Description of Artificial Sequence: Synthetic oligonucleotide
auauccgcaugguacucag

SEQ ID NO: 3028341 - RNA, 19 nt, Artificial Sequence
  Description of Artificial Sequence: Synthetic oligonucleotide
uugucauagauauccgcau

SEQ ID NO: 3028342 - RNA, 19 nt, Artificial Sequence
  Description of Artificial Sequence: Synthetic oligonucleotide
uucucaguugaaacagagu

SEQ ID NO: 3028343 - RNA, 19 nt, Artificial Sequence
  Description of Artificial Sequence: Synthetic oligonucleotide
augggagaugcguccaccg

SEQ ID NO: 3028344 - RNA, 19 nt, Artificial Sequence
  Description of Artificial Sequence: Synthetic oligonucleotide
auacacguguaucuuccug

SEQ ID NO: 3028345 - RNA, 19 nt, Artificial Sequence
  Description of Artificial Sequence: Synthetic oligonucleotide
gaugcguccaccgccuagg

SEQ ID NO: 3028346 - RNA, 19 nt, Artificial Sequence
  Description of Artificial Sequence: Synthetic oligonucleotide
uagccauucuuuugcagcu

SEQ ID NO: 3028347 - RNA, 19 nt, Artificial Sequence
  Description of Artificial Sequence: Synthetic oligonucleotide
uaucuuccuguucuggcuc

SEQ ID NO: 3028348 - RNA, 19 nt, Artificial Sequence
  Description of Artificial Sequence: Synthetic oligonucleotide
cucacagucauagccauuc

SEQ ID NO: 3028349 - RNA, 19 nt, Artificial Sequence
  Description of Artificial Sequence: Synthetic oligonucleotide
uguucuggcucugauggga

SEQ ID NO: 3028350 - RNA, 19 nt, Artificial Sequence
  Description of Artificial Sequence: Synthetic oligonucleotide
acccauagaguagccauac

SEQ ID NO: 3028351 - RNA, 19 nt, Artificial Sequence
  Description of Artificial Sequence: Synthetic oligonucleotide
ucuucucaguugaaacaga

SEQ ID NO: 3028352 - RNA, 19 nt, Artificial Sequence
  Description of Artificial Sequence: Synthetic oligonucleotide
ucgauguccacaucaggaa

SEQ ID NO: 3028353 - RNA, 19 nt, Artificial Sequence
  Description of Artificial Sequence: Synthetic oligonucleotide
ucagcacguacuugaagac

SEQ ID NO: 3028354 - RNA, 19 nt, Artificial Sequence
  Description of Artificial Sequence: Synthetic oligonucleotide
aucugagcgagguccgccg

SEQ ID NO: 3028355 - RNA, 19 nt, Artificial Sequence
  Description of Artificial Sequence: Synthetic oligonucleotide
cauagccauucuuuugcag

SEQ ID NO: 3028356 - RNA, 19 nt, Artificial Sequence
  Description of Artificial Sequence: Synthetic oligonucleotide
uggacucgaaucagcacgu

SEQ ID NO: 3028357 - RNA, 19 nt, Artificial Sequence
  Description of Artificial Sequence: Synthetic oligonucleotide
ucgucggauccccggaggg

SEQ ID NO: 3028358 - RNA, 19 nt, Artificial Sequence
  Description of Artificial Sequence: Synthetic oligonucleotide
acaucaggaaucugagcga

SEQ ID NO: 3028359 - RNA, 19 nt, Artificial Sequence
  Description of Artificial Sequence: Synthetic oligonucleotide
ccauuuguagccacgcacg

SEQ ID NO: 3028360 - RNA, 19 nt, Artificial Sequence
  Description of Artificial Sequence: Synthetic oligonucleotide
aagacuccaucagagucga

SEQ ID NO: 3028361 - RNA, 19 nt, Artificial Sequence
  Description of Artificial Sequence: Synthetic oligonucleotide
cauaacccauagaguagcc

SEQ ID NO: 3028362 - RNA, 19 nt, Artificial Sequence
  Description of Artificial Sequence: Synthetic oligonucleotide
ucauagccauucuuuugca

SEQ ID NO: 3028363 - RNA, 19 nt, Artificial Sequence
  Description of Artificial Sequence: Synthetic oligonucleotide
gacucgaaucagcacguac

SEQ ID NO: 3028364 - RNA, 19 nt, Artificial Sequence
  Description of Artificial Sequence: Synthetic oligonucleotide
ccauagaguagccauacac

SEQ ID NO: 3028365 - RNA, 19 nt, Artificial Sequence
  Description of Artificial Sequence: Synthetic oligonucleotide
gauguccacaucaggaauc

SEQ ID NO: 3028366 - RNA, 19 nt, Artificial Sequence
  Description of Artificial Sequence: Synthetic oligonucleotide
cauucuuuugcagcucgcc

SEQ ID NO: 3028367 - RNA, 19 nt, Artificial Sequence
  Description of Artificial Sequence: Synthetic oligonucleotide
aaguggacucgaaucagca

SEQ ID NO: 3028368 - RNA, 19 nt, Artificial Sequence
  Description of Artificial Sequence: Synthetic oligonucleotide
uuuugcagcucgccugaca

SEQ ID NO: 3028369 - RNA, 19 nt, Artificial Sequence
  Description of Artificial Sequence: Synthetic oligonucleotide
agcccauuuguagccacgc

SEQ ID NO: 3028370 - RNA, 19 nt, Artificial Sequence
  Description of Artificial Sequence: Synthetic oligonucleotide
acucgaaucagcacguacu

SEQ ID NO: 3028371 - RNA, 19 nt, Artificial Sequence
  Description of Artificial Sequence: Synthetic oligonucleotide
uugaucuucucaguugaaa

SEQ ID NO: 3028372 - RNA, 19 nt, Artificial Sequence
  Description of Artificial Sequence: Synthetic oligonucleotide
acuuugucauagauauccg

SEQ ID NO: 3028373 - RNA, 19 nt, Artificial Sequence
  Description of Artificial Sequence: Synthetic oligonucleotide
cuaaguggacucgaaucag

SEQ ID NO: 3028374 - RNA, 19 nt, Artificial Sequence
  Description of Artificial Sequence: Synthetic oligonucleotide
guagccacgcacgauuucc

SEQ ID NO: 3028375 - RNA, 19 nt, Artificial Sequence
  Description of Artificial Sequence: Synthetic oligonucleotide
uugaaacagagugcugggc

SEQ ID NO: 3028376 - RNA, 19 nt, Artificial Sequence
  Description of Artificial Sequence: Synthetic oligonucleotide
augguacucagcccauuug

SEQ ID NO: 3028377 - RNA, 19 nt, Artificial Sequence
  Description of Artificial Sequence: Synthetic oligonucleotide
caucaggaaucugagcgag

SEQ ID NO: 3028378 - RNA, 19 nt, Artificial Sequence
  Description of Artificial Sequence: Synthetic oligonucleotide
ucauagauauccgcauggu

SEQ ID NO: 3028379 - RNA, 19 nt, Artificial Sequence
  Description of Artificial Sequence: Synthetic oligonucleotide
gucgauguccacaucagga

SEQ ID NO: 3028380 - RNA, 19 nt, Artificial Sequence
  Description of Artificial Sequence: Synthetic oligonucleotide
gcuaaguggacucgaauca

SEQ ID NO: 3028381 - RNA, 19 nt, Artificial Sequence
  Description of Artificial Sequence: Synthetic oligonucleotide
accauaacccauagaguag

SEQ ID NO: 3028382 - RNA, 19 nt, Artificial Sequence
  Description of Artificial Sequence: Synthetic oligonucleotide
uccuguucuggcucugaug

SEQ ID NO: 3028383 - RNA, 19 nt, Artificial Sequence
  Description of Artificial Sequence: Synthetic oligonucleotide
gcuuugaucuucucaguug

SEQ ID NO: 3028384 - RNA, 19 nt, Artificial Sequence
  Description of Artificial Sequence: Synthetic oligonucleotide
uccgucgucggauccccgg

SEQ ID NO: 3028385 - RNA, 19 nt, Artificial Sequence
  Description of Artificial Sequence: Synthetic oligonucleotide
aucagagucgauguccaca

SEQ ID NO: 3028386 - RNA, 19 nt, Artificial Sequence
  Description of Artificial Sequence: Synthetic oligonucleotide
ucaggauacauggcuuuga

SEQ ID NO: 3028387 - RNA, 19 nt, Artificial Sequence
  Description of Artificial Sequence: Synthetic oligonucleotide
ugggagaugcguccaccgc

SEQ ID NO: 3028388 - RNA, 19 nt, Artificial Sequence
  Description of Artificial Sequence: Synthetic oligonucleotide
gauuuccuugcacuccguc

SEQ ID NO: 3028389 - RNA, 19 nt, Artificial Sequence
  Description of Artificial Sequence: Synthetic oligonucleotide
ccauacacguguaucuucc

SEQ ID NO: 3028390 - RNA, 19 nt, Artificial Sequence
  Description of Artificial Sequence: Synthetic oligonucleotide
cagagugcugggcacgacc

SEQ ID NO: 3028391 - RNA, 19 nt, Artificial Sequence
  Description of Artificial Sequence: Synthetic oligonucleotide
gagucgauguccacaucag

SEQ ID NO: 3028392 - RNA, 19 nt, Artificial Sequence
  Description of Artificial Sequence: Synthetic oligonucleotide
guagccauacacguguauc

SEQ ID NO: 3028393 - RNA, 19 nt, Artificial Sequence
  Description of Artificial Sequence: Synthetic oligonucleotide
agggccucaguagccaucg

SEQ ID NO: 3028394 - RNA, 19 nt, Artificial Sequence
  Description of Artificial Sequence: Synthetic oligonucleotide
cucaguagccaucgucagc

SEQ ID NO: 3028395 - RNA, 19 nt, Artificial Sequence
  Description of Artificial Sequence: Synthetic oligonucleotide
gaugggagaugcguccacc

SEQ ID NO: 3028396 - RNA, 19 nt, Artificial Sequence
  Description of Artificial Sequence: Synthetic oligonucleotide
uccgcaugguacucagccc

SEQ ID NO: 3028397 - RNA, 19 nt, Artificial Sequence
  Description of Artificial Sequence: Synthetic oligonucleotide
cacgauuuccuugcacucc

SEQ ID NO: 3028398 - RNA, 19 nt, Artificial Sequence
  Description of Artificial Sequence: Synthetic oligonucleotide
aguagccaucgucagccca

SEQ ID NO: 3028399 - RNA, 19 nt, Artificial Sequence
  Description of Artificial Sequence: Synthetic oligonucleotide
guagccaucgucagcccag

SEQ ID NO: 3028400 - RNA, 19 nt, Artificial Sequence
  Description of Artificial Sequence: Synthetic oligonucleotide
acgcacgauuuccuugcac

SEQ ID NO: 3028401 - RNA, 19 nt, Artificial Sequence
  Description of Artificial Sequence: Synthetic oligonucleotide
gccauucuuuugcagcucg

SEQ ID NO: 3028402 - RNA, 19 nt, Artificial Sequence
  Description of Artificial Sequence: Synthetic oligonucleotide
guguaucuuccuguucugg

SEQ ID NO: 3028403 - RNA, 19 nt, Artificial Sequence
  Description of Artificial Sequence: Synthetic oligonucleotide
guccacaucaggaaucuga

SEQ ID NO: 3028404 - RNA, 19 nt, Artificial Sequence
  Description of Artificial Sequence: Synthetic oligonucleotide
cucugaugggagaugcguc

SEQ ID NO: 3028405 - RNA, 19 nt, Artificial Sequence
  Description of Artificial Sequence: Synthetic oligonucleotide
gucggauccccggagggcg

SEQ ID NO: 3028406 - RNA, 19 nt, Artificial Sequence
  Description of Artificial Sequence: Synthetic oligonucleotide
agauauccgcaugguacuc

SEQ ID NO: 3028407 - RNA, 19 nt, Artificial Sequence
  Description of Artificial Sequence: Synthetic oligonucleotide
auaacccauagaguagcca

SEQ ID NO: 3028408 - RNA, 19 nt, Artificial Sequence
  Description of Artificial Sequence: Synthetic oligonucleotide
agaugcguccaccgccuag

SEQ ID NO: 3028409 - RNA, 19 nt, Artificial Sequence
  Description of Artificial Sequence: Synthetic oligonucleotide
acuccgucgucggaucccc

SEQ ID NO: 3028410 - RNA, 19 nt, Artificial Sequence
  Description of Artificial Sequence: Synthetic oligonucleotide
ucgaaucagcacguacuug

SEQ ID NO: 3028411 - RNA, 19 nt, Artificial Sequence
  Description of Artificial Sequence: Synthetic oligonucleotide
ggugaccucauaaucagga

SEQ ID NO: 3028412 - RNA, 19 nt, Artificial Sequence
  Description of Artificial Sequence: Synthetic oligonucleotide
uccuugcacuccgucgucg

SEQ ID NO: 3028413 - RNA, 19 nt, Artificial Sequence
  Description of Artificial Sequence: Synthetic oligonucleotide
aucgucagcccaggugacc

SEQ ID NO: 3028414 - RNA, 19 nt, Artificial Sequence
  Description of Artificial Sequence: Synthetic oligonucleotide
aacagagugcugggcacga

SEQ ID NO: 3028415 - RNA, 19 nt, Artificial Sequence
  Description of Artificial Sequence: Synthetic oligonucleotide
ucacagucauagccauucu

SEQ ID NO: 3028416 - RNA, 19 nt, Artificial Sequence
  Description of Artificial Sequence: Synthetic oligonucleotide
ugaugggagaugcguccac

SEQ ID NO: 3028417 - RNA, 19 nt, Artificial Sequence
  Description of Artificial Sequence: Synthetic oligonucleotide
ucagcccauuuguagccac

SEQ ID NO: 3028418 - RNA, 19 nt, Artificial Sequence
  Description of Artificial Sequence: Synthetic oligonucleotide
gauauccgcaugguacuca

SEQ ID NO: 3028419 - RNA, 19 nt, Artificial Sequence
  Description of Artificial Sequence: Synthetic oligonucleotide
aucaggauacauggcuuug

SEQ ID NO: 3028420 - RNA, 19 nt, Artificial Sequence
  Description of Artificial Sequence: Synthetic oligonucleotide
augcguccaccgccuaggc

SEQ ID NO: 3028421 - RNA, 19 nt, Artificial Sequence
  Description of Artificial Sequence: Synthetic oligonucleotide
gggagaugcguccaccgcc

SEQ ID NO: 3028422 - RNA, 19 nt, Artificial Sequence
  Description of Artificial Sequence: Synthetic oligonucleotide
aguagccauacacguguau

SEQ ID NO: 3028423 - RNA, 19 nt, Artificial Sequence
  Description of Artificial Sequence: Synthetic oligonucleotide
gucgucggauccccggagg

SEQ ID NO: 3028424 - RNA, 19 nt, Artificial Sequence
  Description of Artificial Sequence: Synthetic oligonucleotide
ucuggcucugaugggagau

SEQ ID NO: 3028425 - RNA, 19 nt, Artificial Sequence
  Description of Artificial Sequence: Synthetic oligonucleotide
ucgucagcccaggugaccu

SEQ ID NO: 3028426 - RNA, 19 nt, Artificial Sequence
  Description of Artificial Sequence: Synthetic oligonucleotide
gcugggcacgaccauaacc

SEQ ID NO: 3028427 - RNA, 19 nt, Artificial Sequence
  Description of Artificial Sequence: Synthetic oligonucleotide
agcccaggugaccucauaa

SEQ ID NO: 3028428 - RNA, 19 nt, Artificial Sequence
  Description of Artificial Sequence: Synthetic oligonucleotide
gcguccaccgccuaggcac

SEQ ID NO: 3028429 - RNA, 19 nt, Artificial Sequence
  Description of Artificial Sequence: Synthetic oligonucleotide
uguagccacgcacgauuuc

SEQ ID NO: 3028430 - RNA, 19 nt, Artificial Sequence
  Description of Artificial Sequence: Synthetic oligonucleotide
cuguucuggcucugauggg

SEQ ID NO: 3028431 - RNA, 19 nt, Artificial Sequence
  Description of Artificial Sequence: Synthetic oligonucleotide
uuguagccacgcacgauuu

SEQ ID NO: 3028432 - RNA, 19 nt, Artificial Sequence
  Description of Artificial Sequence: Synthetic oligonucleotide
uggcuuugaucuucucagu

SEQ ID NO: 3028433 - RNA, 19 nt, Artificial Sequence
  Description of Artificial Sequence: Synthetic oligonucleotide
uauccgcaugguacucagc

SEQ ID NO: 3028434 - RNA, 19 nt, Artificial Sequence
  Description of Artificial Sequence: Synthetic oligonucleotide
cccauuuguagccacgcac

SEQ ID NO: 3028435 - RNA, 19 nt, Artificial Sequence
  Description of Artificial Sequence: Synthetic oligonucleotide
uagccacgcacgauuuccu

SEQ ID NO: 3028436 - RNA, 19 nt, Artificial Sequence
  Description of Artificial Sequence: Synthetic oligonucleotide
ugggcacgaccauaaccca

SEQ ID NO: 3028437 - RNA, 19 nt, Artificial Sequence
  Description of Artificial Sequence: Synthetic oligonucleotide
cagcccauuuguagccacg

SEQ ID NO: 3028438 - RNA, 19 nt, Artificial Sequence
  Description of Artificial Sequence: Synthetic oligonucleotide
guaucuuccuguucuggcu

SEQ ID NO: 3028439 - RNA, 19 nt, Artificial Sequence
  Description of Artificial Sequence: Synthetic oligonucleotide
cucgccugacacuuuguca

SEQ ID NO: 3028440 - RNA, 19 nt, Artificial Sequence
  Description of Artificial Sequence: Synthetic oligonucleotide
cauagauauccgcauggua

SEQ ID NO: 3028441 - RNA, 19 nt, Artificial Sequence
  Description of Artificial Sequence: Synthetic oligonucleotide
ucggauccccggagggcgg

SEQ ID NO: 3028442 - RNA, 19 nt, Artificial Sequence
  Description of Artificial Sequence: Synthetic oligonucleotide
ggaaucugagcgagguccg

SEQ ID NO: 3028443 - RNA, 19 nt, Artificial Sequence
  Description of Artificial Sequence: Synthetic oligonucleotide
agagugcugggcacgacca

SEQ ID NO: 3028444 - RNA, 19 nt, Artificial Sequence
  Description of Artificial Sequence: Synthetic oligonucleotide
uuccuguucuggcucugau

SEQ ID NO: 3028445 - RNA, 19 nt, Artificial Sequence
  Description of Artificial Sequence: Synthetic oligonucleotide
uucuggcucugaugggaga

SEQ ID NO: 3028446 - RNA, 19 nt, Artificial Sequence
  Description of Artificial Sequence: Synthetic oligonucleotide
guucuggcucugaugggag

SEQ ID NO: 3028447 - RNA, 19 nt, Artificial Sequence
  Description of Artificial Sequence: Synthetic oligonucleotide
ccaggugaccucauaauca

SEQ ID NO: 3028448 - RNA, 19 nt, Artificial Sequence
  Description of Artificial Sequence: Synthetic oligonucleotide
acacguguaucuuccuguu

SEQ ID NO: 3028449 - RNA, 19 nt, Artificial Sequence
  Description of Artificial Sequence: Synthetic oligonucleotide
ccacgcacgauuuccuugc

SEQ ID NO: 3028450 - RNA, 19 nt, Artificial Sequence
  Description of Artificial Sequence: Synthetic oligonucleotide
ggagggcggugcuaagugg

SEQ ID NO: 3028451 - RNA, 19 nt, Artificial Sequence
  Description of Artificial Sequence: Synthetic oligonucleotide
caguugaaacagagugcug

SEQ ID NO: 3028452 - RNA, 19 nt, Artificial Sequence
  Description of Artificial Sequence: Synthetic oligonucleotide
gaaucugagcgagguccgc

SEQ ID NO: 3028453 - RNA, 19 nt, Artificial Sequence
  Description of Artificial Sequence: Synthetic oligonucleotide
ugcguccaccgccuaggca

SEQ ID NO: 3028454 - RNA, 19 nt, Artificial Sequence
  Description of Artificial Sequence: Synthetic oligonucleotide
aucaggaaucugagcgagg

SEQ ID NO: 3028455 - RNA, 19 nt, Artificial Sequence
  Description of Artificial Sequence: Synthetic oligonucleotide
gagggcggugcuaagugga

SEQ ID NO: 3028456 - RNA, 19 nt, Artificial Sequence
  Description of Artificial Sequence: Synthetic oligonucleotide
cgaaucagcacguacuuga

SEQ ID NO: 3028457 - RNA, 19 nt, Artificial Sequence
  Description of Artificial Sequence: Synthetic oligonucleotide
uagccaucgucagcccagg

SEQ ID NO: 3028458 - RNA, 19 nt, Artificial Sequence
  Description of Artificial Sequence: Synthetic oligonucleotide
aggugaccucauaaucagg

SEQ ID NO: 3028459 - RNA, 19 nt, Artificial Sequence
  Description of Artificial Sequence: Synthetic oligonucleotide
agccauucuuuugcagcuc

SEQ ID NO: 3028460 - RNA, 19 nt, Artificial Sequence
  Description of Artificial Sequence: Synthetic oligonucleotide
ugcacuccgucgucggauc

SEQ ID NO: 3028461 - RNA, 19 nt, Artificial Sequence
  Description of Artificial Sequence: Synthetic oligonucleotide
aacccauagaguagccaua

SEQ ID NO: 3028462 - RNA, 19 nt, Artificial Sequence
  Description of Artificial Sequence: Synthetic oligonucleotide
cguacuugaagacuccauc

SEQ ID NO: 3028463 - RNA, 19 nt, Artificial Sequence
  Description of Artificial Sequence: Synthetic oligonucleotide
acacuuugucauagauauc

SEQ ID NO: 3028464 - RNA, 19 nt, Artificial Sequence
  Description of Artificial Sequence: Synthetic oligonucleotide
ccaucgucagcccagguga

SEQ ID NO: 3028465 - RNA, 19 nt, Artificial Sequence
  Description of Artificial Sequence: Synthetic oligonucleotide
gccaucgucagcccaggug

SEQ ID NO: 3028466 - RNA, 19 nt, Artificial Sequence
  Description of Artificial Sequence: Synthetic oligonucleotide
caucagagucgauguccac

SEQ ID NO: 3028467 - RNA, 19 nt, Artificial Sequence
  Description of Artificial Sequence: Synthetic oligonucleotide
uugcacuccgucgucggau

SEQ ID NO: 3028468 - RNA, 19 nt, Artificial Sequence
  Description of Artificial Sequence: Synthetic oligonucleotide
gaaucagcacguacuugaa

SEQ ID NO: 3028469 - RNA, 19 nt, Artificial Sequence
  Description of Artificial Sequence: Synthetic oligonucleotide
cacguguaucuuccuguuc

SEQ ID NO: 3028470 - RNA, 19 nt, Artificial Sequence
  Description of Artificial Sequence: Synthetic oligonucleotide
uuccuugcacuccgucguc

SEQ ID NO: 3028471 - RNA, 19 nt, Artificial Sequence
  Description of Artificial Sequence: Synthetic oligonucleotide
caucgucagcccaggugac

SEQ ID NO: 3028472 - RNA, 19 nt, Artificial Sequence
  Description of Artificial Sequence: Synthetic oligonucleotide
uugcagcucgccugacacu

SEQ ID NO: 3028473 - RNA, 19 nt, Artificial Sequence
  Description of Artificial Sequence: Synthetic oligonucleotide
gauacauggcuuugaucuu

SEQ ID NO: 3028474 - RNA, 19 nt, Artificial Sequence
  Description of Artificial Sequence: Synthetic oligonucleotide
ggcggugcuaaguggacuc

SEQ ID NO: 3028475 - RNA, 19 nt, Artificial Sequence
  Description of Artificial Sequence: Synthetic oligonucleotide
cagcucgccugacacuuug

SEQ ID NO: 3028476 - RNA, 19 nt, Artificial Sequence
  Description of Artificial Sequence: Synthetic oligonucleotide
cccaggugaccucauaauc

SEQ ID NO: 3028477 - RNA, 19 nt, Artificial Sequence
  Description of Artificial Sequence: Synthetic oligonucleotide
agggcggugcuaaguggac

SEQ ID NO: 3028478 - RNA, 19 nt, Artificial Sequence
  Description of Artificial Sequence: Synthetic oligonucleotide
acagagugcugggcacgac

SEQ ID NO: 3028479 - RNA, 19 nt, Artificial Sequence
  Description of Artificial Sequence: Synthetic oligonucleotide
cuccaucagagucgauguc

SEQ ID NO: 3028480 - RNA, 19 nt, Artificial Sequence
  Description of Artificial Sequence: Synthetic oligonucleotide
gccucaguagccaucguca

SEQ ID NO: 3028481 - RNA, 19 nt, Artificial Sequence
  Description of Artificial Sequence: Synthetic oligonucleotide
gccauacacguguaucuuc

SEQ ID NO: 3028482 - RNA, 19 nt, Artificial Sequence
  Description of Artificial Sequence: Synthetic oligonucleotide
cugacacuuugucauagau

SEQ ID NO: 3028483 - RNA, 19 nt, Artificial Sequence
  Description of Artificial Sequence: Synthetic oligonucleotide
caguagccaucgucagccc

SEQ ID NO: 3028484 - RNA, 19 nt, Artificial Sequence
  Description of Artificial Sequence: Synthetic oligonucleotide
ugcugggcacgaccauaac

SEQ ID NO: 3028485 - RNA, 19 nt, Artificial Sequence
  Description of Artificial Sequence: Synthetic oligonucleotide
ccucaguagccaucgucag

SEQ ID NO: 3028486 - RNA, 19 nt, Artificial Sequence
  Description of Artificial Sequence: Synthetic oligonucleotide
gcacgauuuccuugcacuc

SEQ ID NO: 3028487 - RNA, 19 nt, Artificial Sequence
  Description of Artificial Sequence: Synthetic oligonucleotide
ccuugcacuccgucgucgg

SEQ ID NO: 3028488 - RNA, 19 nt, Artificial Sequence
  Description of Artificial Sequence: Synthetic oligonucleotide
agugcugggcacgaccaua

SEQ ID NO: 3028489 - RNA, 19 nt, Artificial Sequence
  Description of Artificial Sequence: Synthetic oligonucleotide
ccacaucaggaaucugagc

SEQ ID NO: 3028490 - RNA, 19 nt, Artificial Sequence
  Description of Artificial Sequence: Synthetic oligonucleotide
acguacuugaagacuccau

SEQ ID NO: 3028491 - RNA, 19 nt, Artificial Sequence
  Description of Artificial Sequence: Synthetic oligonucleotide
accucauaaucaggauaca

SEQ ID NO: 3028492 - RNA, 19 nt, Artificial Sequence
  Description of Artificial Sequence: Synthetic oligonucleotide
ggccucaguagccaucguc

SEQ ID NO: 3028493 - RNA, 19 nt, Artificial Sequence
  Description of Artificial Sequence: Synthetic oligonucleotide
cacuccgucgucggauccc

SEQ ID NO: 3028494 - RNA, 19 nt, Artificial Sequence
  Description of Artificial Sequence: Synthetic oligonucleotide
agccauacacguguaucuu

SEQ ID NO: 3028495 - RNA, 19 nt, Artificial Sequence
  Description of Artificial Sequence: Synthetic oligonucleotide
gccugacacuuugucauag

SEQ ID NO: 3028496 - RNA, 19 nt, Artificial Sequence
  Description of Artificial Sequence: Synthetic oligonucleotide
gauccccggagggcggugc

SEQ ID NO: 3028497 - RNA, 19 nt, Artificial Sequence
  Description of Artificial Sequence: Synthetic oligonucleotide
gcacucacagucauagcca

SEQ ID NO: 3028498 - RNA, 19 nt, Artificial Sequence
  Description of Artificial Sequence: Synthetic oligonucleotide
ccauucuuuugcagcucgc

SEQ ID NO: 3028499 - RNA, 19 nt, Artificial Sequence
  Description of Artificial Sequence: Synthetic oligonucleotide
gcacgaccauaacccauag

SEQ ID NO: 3028500 - RNA, 19 nt, Artificial Sequence
  Description of Artificial Sequence: Synthetic oligonucleotide
cacguacuugaagacucca

SEQ ID NO: 3028501 - RNA, 19 nt, Artificial Sequence
  Description of Artificial Sequence: Synthetic oligonucleotide
uccaccgccuaggcacuca

SEQ ID NO: 3028502 - RNA, 19 nt, Artificial Sequence
  Description of Artificial Sequence: Synthetic oligonucleotide
agccacgcacgauuuccuu

SEQ ID NO: 3028503 - RNA, 19 nt, Artificial Sequence
  Description of Artificial Sequence: Synthetic oligonucleotide
cugaugggagaugcgucca

SEQ ID NO: 3028504 - RNA, 19 nt, Artificial Sequence
  Description of Artificial Sequence: Synthetic oligonucleotide
cuugcacuccgucgucgga

SEQ ID NO: 3028505 - RNA, 19 nt, Artificial Sequence
  Description of Artificial Sequence: Synthetic oligonucleotide
gguagggccucaguagcca

SEQ ID NO: 3028506 - RNA, 19 nt, Artificial Sequence
  Description of Artificial Sequence: Synthetic oligonucleotide
gugaccucauaaucaggau

SEQ ID NO: 3028507 - RNA, 19 nt, Artificial Sequence
  Description of Artificial Sequence: Synthetic oligonucleotide
cucgaaucagcacguacuu

SEQ ID NO: 3028508 - RNA, 19 nt, Artificial Sequence
  Description of Artificial Sequence: Synthetic oligonucleotide
gcucgccugacacuuuguc

SEQ ID NO: 3028509 - RNA, 19 nt, Artificial Sequence
  Description of Artificial Sequence: Synthetic oligonucleotide
cuccgucgucggauccccg

SEQ ID NO: 3028510 - RNA, 19 nt, Artificial Sequence
  Description of Artificial Sequence: Synthetic oligonucleotide
ccgcaugguacucagccca

SEQ ID NO: 3028511 - RNA, 19 nt, Artificial Sequence
  Description of Artificial Sequence: Synthetic oligonucleotide
cacgaccauaacccauaga

SEQ ID NO: 3028512 - RNA, 19 nt, Artificial Sequence
  Description of Artificial Sequence: Synthetic oligonucleotide
ggcucugaugggagaugcg

SEQ ID NO: 3028513 - RNA, 19 nt, Artificial Sequence
  Description of Artificial Sequence: Synthetic oligonucleotide
cauacacguguaucuuccu

SEQ ID NO: 3028514 - RNA, 19 nt, Artificial Sequence
  Description of Artificial Sequence: Synthetic oligonucleotide
cuuuugcagcucgccugac

SEQ ID NO: 3028515 - RNA, 19 nt, Artificial Sequence
  Description of Artificial Sequence: Synthetic oligonucleotide
caugguacucagcccauuu

SEQ ID NO: 3028516 - RNA, 19 nt, Artificial Sequence
  Description of Artificial Sequence: Synthetic oligonucleotide
cuaggcacucacagucaua

SEQ ID NO: 3028517 - RNA, 19 nt, Artificial Sequence
  Description of Artificial Sequence: Synthetic oligonucleotide
cacucacagucauagccau

SEQ ID NO: 3028518 - RNA, 19 nt, Artificial Sequence
  Description of Artificial Sequence: Synthetic oligonucleotide
gugcuaaguggacucgaau

SEQ ID NO: 3028519 - RNA, 19 nt, Artificial Sequence
  Description of Artificial Sequence: Synthetic oligonucleotide
cagagucgauguccacauc

SEQ ID NO: 3028520 - RNA, 19 nt, Artificial Sequence
  Description of Artificial Sequence: Synthetic oligonucleotide
caggauacauggcuuugau

SEQ ID NO: 3028521 - RNA, 19 nt, Artificial Sequence
  Description of Artificial Sequence: Synthetic oligonucleotide
gcacguacuugaagacucc

SEQ ID NO: 3028522 - RNA, 19 nt, Artificial Sequence
  Description of Artificial Sequence: Synthetic oligonucleotide
agccaucgucagcccaggu

SEQ ID NO: 3028523 - RNA, 19 nt, Artificial Sequence
  Description of Artificial Sequence: Synthetic oligonucleotide
ggguagggccucaguagcc

SEQ ID NO: 3028524 - RNA, 19 nt, Artificial Sequence
  Description of Artificial Sequence: Synthetic oligonucleotide
gugcugggcacgaccauaa

SEQ ID NO: 3028525 - RNA, 19 nt, Artificial Sequence
  Description of Artificial Sequence: Synthetic oligonucleotide
ggcuuugaucuucucaguu

SEQ ID NO: 3028526 - RNA, 19 nt, Artificial Sequence
  Description of Artificial Sequence: Synthetic oligonucleotide
gguacucagcccauuugua

SEQ ID NO: 3028527 - RNA, 19 nt, Artificial Sequence
  Description of Artificial Sequence: Synthetic oligonucleotide
cguguaucuuccuguucug

SEQ ID NO: 3028528 - RNA, 19 nt, Artificial Sequence
  Description of Artificial Sequence: Synthetic oligonucleotide
cacagucauagccauucuu

SEQ ID NO: 3028529 - RNA, 19 nt, Artificial Sequence
  Description of Artificial Sequence: Synthetic oligonucleotide
gcggugcuaaguggacucg

SEQ ID NO: 3028530 - RNA, 19 nt, Artificial Sequence
  Description of Artificial Sequence: Synthetic oligonucleotide
auccccggagggcggugcu

SEQ ID NO: 3028531 - RNA, 19 nt, Artificial Sequence
  Description of Artificial Sequence: Synthetic oligonucleotide
cucagcccauuuguagcca

SEQ ID NO: 3028532 - RNA, 19 nt, Artificial Sequence
  Description of Artificial Sequence: Synthetic oligonucleotide
ggcacgaccauaacccaua

SEQ ID NO: 3028533 - RNA, 19 nt, Artificial Sequence
  Description of Artificial Sequence: Synthetic oligonucleotide
cuuccuguucuggcucuga

SEQ ID NO: 3028534 - RNA, 19 nt, Artificial Sequence
  Description of Artificial Sequence: Synthetic oligonucleotide
ggugcuaaguggacucgaa

SEQ ID NO: 3028535 - RNA, 19 nt, Artificial Sequence
  Description of Artificial Sequence: Synthetic oligonucleotide
gcucugaugggagaugcgu

SEQ ID NO: 3028536 - RNA, 19 nt, Artificial Sequence
  Description of Artificial Sequence: Synthetic oligonucleotide
gcacuccgucgucggaucc

SEQ ID NO: 3028537 - RNA, 19 nt, Artificial Sequence
  Description of Artificial Sequence: Synthetic oligonucleotide
gaguagccauacacgugua

SEQ ID NO: 3028538 - RNA, 19 nt, Artificial Sequence
  Description of Artificial Sequence: Synthetic oligonucleotide
cagcacguacuugaagacu

SEQ ID NO: 3028539 - RNA, 19 nt, Artificial Sequence
  Description of Artificial Sequence: Synthetic oligonucleotide
ccugacacuuugucauaga

SEQ ID NO: 3028540 - RNA, 19 nt, Artificial Sequence
  Description of Artificial Sequence: Synthetic oligonucleotide
cggagggcggugcuaagug

SEQ ID NO: 3028541 - RNA, 19 nt, Artificial Sequence
  Description of Artificial Sequence: Synthetic oligonucleotide
cacgcacgauuuccuugca

SEQ ID NO: 3028542 - RNA, 19 nt, Artificial Sequence
  Description of Artificial Sequence: Synthetic oligonucleotide
acucacagucauagccauu

SEQ ID NO: 3028543 - RNA, 19 nt, Artificial Sequence
  Description of Artificial Sequence: Synthetic oligonucleotide
agcucgccugacacuuugu

SEQ ID NO: 3028544 - RNA, 19 nt, Artificial Sequence
  Description of Artificial Sequence: Synthetic oligonucleotide
gcccauuuguagccacgca

SEQ ID NO: 3028545 - RNA, 19 nt, Artificial Sequence
  Description of Artificial Sequence: Synthetic oligonucleotide
cgcacgauuuccuugcacu

SEQ ID NO: 3028546 - RNA, 19 nt, Artificial Sequence
  Description of Artificial Sequence: Synthetic oligonucleotide
gagaugcguccaccgccua

SEQ ID NO: 3028547 - RNA, 19 nt, Artificial Sequence
  Description of Artificial Sequence: Synthetic oligonucleotide
guagggccucaguagccau

SEQ ID NO: 3028548 - RNA, 19 nt, Artificial Sequence
  Description of Artificial Sequence: Synthetic oligonucleotide
ggagaugcguccaccgccu

SEQ ID NO: 3028549 - RNA, 19 nt, Artificial Sequence
  Description of Artificial Sequence: Synthetic oligonucleotide
caccgccuaggcacucaca

SEQ ID NO: 3028550 - RNA, 19 nt, Artificial Sequence
  Description of Artificial Sequence: Synthetic oligonucleotide
gagugcugggcacgaccau

SEQ ID NO: 3028551 - RNA, 19 nt, Artificial Sequence
  Description of Artificial Sequence: Synthetic oligonucleotide
gccuaggcacucacaguca

SEQ ID NO: 3028552 - RNA, 19 nt, Artificial Sequence
  Description of Artificial Sequence: Synthetic oligonucleotide
ccucauaaucaggauacau

SEQ ID NO: 3028553 - RNA, 19 nt, Artificial Sequence
  Description of Artificial Sequence: Synthetic oligonucleotide
ccaccgccuaggcacucac

SEQ ID NO: 3028554 - RNA, 19 nt, Artificial Sequence
  Description of Artificial Sequence: Synthetic oligonucleotide
cgucgucggauccccggag

SEQ ID NO: 3028555 - RNA, 19 nt, Artificial Sequence
  Description of Artificial Sequence: Synthetic oligonucleotide
gcccaggugaccucauaau

SEQ ID NO: 3028556 - RNA, 19 nt, Artificial Sequence
  Description of Artificial Sequence: Synthetic oligonucleotide
cccauagaguagccauaca

SEQ ID NO: 3028557 - RNA, 19 nt, Artificial Sequence
  Description of Artificial Sequence: Synthetic oligonucleotide
cgaccauaacccauagagu

SEQ ID NO: 3028558 - RNA, 19 nt, Artificial Sequence
  Description of Artificial Sequence: Synthetic oligonucleotide
uccccggagggcggugcua

SEQ ID NO: 3028559 - RNA, 19 nt, Artificial Sequence
  Description of Artificial Sequence: Synthetic oligonucleotide
cgucggauccccggagggc

SEQ ID NO: 3028560 - RNA, 19 nt, Artificial Sequence
  Description of Artificial Sequence: Synthetic oligonucleotide
ccuaggcacucacagucau

SEQ ID NO: 3028561 - RNA, 19 nt, Artificial Sequence
  Description of Artificial Sequence: Synthetic oligonucleotide
cagcccaggugaccucaua

SEQ ID NO: 3028562 - RNA, 19 nt, Artificial Sequence
  Description of Artificial Sequence: Synthetic oligonucleotide
guccaccgccuaggcacuc

SEQ ID NO: 3028563 - RNA, 19 nt, Artificial Sequence
  Description of Artificial Sequence: Synthetic oligonucleotide
ggauccccggagggcggug

SEQ ID NO: 3028564 - RNA, 19 nt, Artificial Sequence
  Description of Artificial Sequence: Synthetic oligonucleotide
ccgucgucggauccccgga

SEQ ID NO: 3028565 - RNA, 19 nt, Artificial Sequence
  Description of Artificial Sequence: Synthetic oligonucleotide
cgauguccacaucaggaau

SEQ ID NO: 3028566 - RNA, 19 nt, Artificial Sequence
  Description of Artificial Sequence: Synthetic oligonucleotide
cccggagggcggugcuaag

SEQ ID NO: 3028567 - RNA, 19 nt, Artificial Sequence
  Description of Artificial Sequence: Synthetic oligonucleotide
agacuccaucagagucgau

SEQ ID NO: 3028568 - RNA, 19 nt, Artificial Sequence
  Description of Artificial Sequence: Synthetic oligonucleotide
ggacucgaaucagcacgua

SEQ ID NO: 3028569 - RNA, 19 nt, Artificial Sequence
  Description of Artificial Sequence: Synthetic oligonucleotide
gggcacgaccauaacccau

SEQ ID NO: 3028570 - RNA, 19 nt, Artificial Sequence
  Description of Artificial Sequence: Synthetic oligonucleotide
gggcggugcuaaguggacu

SEQ ID NO: 3028571 - RNA, 19 nt, Artificial Sequence
  Description of Artificial Sequence: Synthetic oligonucleotide
cggugcuaaguggacucga

SEQ ID NO: 3028572 - RNA, 19 nt, Artificial Sequence
  Description of Artificial Sequence: Synthetic oligonucleotide
ccccggagggcggugcuaa

SEQ ID NO: 3028573 - RNA, 19 nt, Artificial Sequence
  Description of Artificial Sequence: Synthetic oligonucleotide
gcaugguacucagcccauu

SEQ ID NO: 3028574 - RNA, 19 nt, Artificial Sequence
  Description of Artificial Sequence: Synthetic oligonucleotide
cgccugacacuuugucaua

SEQ ID NO: 3028575 - RNA, 19 nt, Artificial Sequence
  Description of Artificial Sequence: Synthetic oligonucleotide
ccggagggcggugcuaagu

SEQ ID NO: 3028576 - RNA, 19 nt, Artificial Sequence
  Description of Artificial Sequence: Synthetic oligonucleotide
gggccucaguagccaucgu

SEQ ID NO: 3028577 - RNA, 19 nt, Artificial Sequence
  Description of Artificial Sequence: Synthetic oligonucleotide
cgcaugguacucagcccau

SEQ ID NO: 3028578 - RNA, 19 nt, Artificial Sequence
  Description of Artificial Sequence: Synthetic oligonucleotide
cguccaccgccuaggcacu

SEQ ID NO: 3028579 - RNA, 19 nt, Artificial Sequence
  Description of Artificial Sequence: Synthetic oligonucleotide
gcagcucgccugacacuuu

SEQ ID NO: 3028580 - RNA, 19 nt, Artificial Sequence
  Description of Artificial Sequence: Synthetic oligonucleotide
cggauccccggagggcggu

SEQ ID NO: 3028581 - RNA, 19 nt, Artificial Sequence
  Description of Artificial Sequence: Synthetic oligonucleotide
aauaaacaauuuuaaaagc

SEQ ID NO: 3028582 - RNA, 19 nt, Artificial Sequence
  Description of Artificial Sequence: Synthetic oligonucleotide
ucaucaaggacacagcucg

SEQ ID NO: 3028583 - RNA, 19 nt, Artificial Sequence
  Description of Artificial Sequence: Synthetic oligonucleotide
aggaaaacggagcaaagcc

SEQ ID NO: 3028584 - RNA, 19 nt, Artificial Sequence
  Description of Artificial Sequence: Synthetic oligonucleotide
agcccaaauacccaguucc

SEQ ID NO: 3028585 - RNA, 19 nt, Artificial Sequence
  Description of Artificial Sequence: Synthetic oligonucleotide
guuuuguauccacagaucg

SEQ ID NO: 3028586 - RNA, 19 nt, Artificial Sequence
  Description of Artificial Sequence: Synthetic oligonucleotide
aaaaccguagcuaucuuuc

SEQ ID NO: 3028587 - RNA, 19 nt, Artificial Sequence
  Description of Artificial Sequence: Synthetic oligonucleotide
  modified_base (18)..(18): a, c, u, g, unknown or other
uuuguauccacagaucgng

SEQ ID NO: 3028588 - RNA, 19 nt, Artificial Sequence
  Description of Artificial Sequence: Synthetic oligonucleotide
uugagcacuacacaguugu

SEQ ID NO: 3028589 - RNA, 19 nt, Artificial Sequence
  Description of Artificial Sequence: Synthetic oligonucleotide
agcacuacacaguuguugg

SEQ ID NO: 3028590 - RNA, 19 nt, Artificial Sequence
  Description of Artificial Sequence: Synthetic oligonucleotide
accauguccuuucacaaac

SEQ ID NO: 3028591 - RNA, 19 nt, Artificial Sequence
  Description of Artificial Sequence: Synthetic oligonucleotide
uucaagcucacucucgugc

SEQ ID NO: 3028592 - RNA, 19 nt, Artificial Sequence
  Description of Artificial Sequence: Synthetic oligonucleotide
  modified_base (10)..(10): a, c, u, g, unknown or other
cacagaucgnguuuguggc

SEQ ID NO: 3028593 - RNA, 19 nt, Artificial Sequence
  Description of Artificial Sequence: Synthetic oligonucleotide
auguuugagcacuacacag

SEQ ID NO: 3028594 - RNA, 19 nt, Artificial Sequence
  Description of Artificial Sequence: Synthetic oligonucleotide
caguuguugguuuuguugg

SEQ ID NO: 3028595 - RNA, 19 nt, Artificial Sequence
  Description of Artificial Sequence: Synthetic oligonucleotide
auaaacaauuuuaaaagca

SEQ ID NO: 3028596 - RNA, 19 nt, Artificial Sequence
  Description of Artificial Sequence: Synthetic oligonucleotide
cacuugaccacaaugccgg

SEQ ID NO: 3028597 - RNA, 19 nt, Artificial Sequence
  Description of Artificial Sequence: Synthetic oligonucleotide
uucuguuuuguauccacag

SEQ ID NO: 3028598 - RNA, 19 nt, Artificial Sequence
  Description of Artificial Sequence: Synthetic oligonucleotide
ucacaaacuguucuucaag

SEQ ID NO: 3028599 - RNA, 19 nt, Artificial Sequence
  Description of Artificial Sequence: Synthetic oligonucleotide
agugcuggcuucugaagcc

SEQ ID NO: 3028600 - RNA, 19 nt, Artificial Sequence
  Description of Artificial Sequence: Synthetic oligonucleotide
uuuguugguggccuggccc

SEQ ID NO: 3028601 - RNA, 19 nt, Artificial Sequence
  Description of Artificial Sequence: Synthetic oligonucleotide
acauguuugagcacuacac

SEQ ID NO: 3028602 - RNA, 19 nt, Artificial Sequence
  Description of Artificial Sequence: Synthetic oligonucleotide
aauacccaguucccugagc

SEQ ID NO: 3028603 - RNA, 19 nt, Artificial Sequence
  Description of Artificial Sequence: Synthetic oligonucleotide
  modified_base (2)..(2): a, c, u, g, unknown or other
gnguuuguggcacuugacc

SEQ ID NO: 3028604 - RNA, 19 nt, Artificial Sequence
  Description of Artificial Sequence: Synthetic oligonucleotide
aagcagagcaggauagucc

SEQ ID NO: 3028605 - RNA, 19 nt, Artificial Sequence
  Description of Artificial Sequence: Synthetic oligonucleotide
aacaauuuuaaaagcaaaa

SEQ ID NO: 3028606 - RNA, 19 nt, Artificial Sequence
  Description of Artificial Sequence: Synthetic oligonucleotide
uggcacuugaccacaaugc

SEQ ID NO: 3028607 - RNA, 19 nt, Artificial Sequence
  Description of Artificial Sequence: Synthetic oligonucleotide
uuguugguuuuguuggugg

SEQ ID NO: 3028608 - RNA, 19 nt, Artificial Sequence
  Description of Artificial Sequence: Synthetic oligonucleotide
aaugccggagggcacaugu

SEQ ID NO: 3028609 - RNA, 19 nt, Artificial Sequence
  Description of Artificial Sequence: Synthetic oligonucleotide
uguucuucaagcucacucu

SEQ ID NO: 3028610 - RNA, 19 nt, Artificial Sequence
  Description of Artificial Sequence: Synthetic oligonucleotide
  modified_base (19)..(19): a, c, u, g, unknown or other
uuuuguauccacagaucgn

SEQ ID NO: 3028611 - RNA, 19 nt, Artificial Sequence
  Description of Artificial Sequence: Synthetic oligonucleotide
auauccugaucaguggugc

SEQ ID NO: 3028612 - RNA, 19 nt, Artificial Sequence
  Description of Artificial Sequence: Synthetic oligonucleotide
uaucuuucuguuuuguauc

SEQ ID NO: 3028613 - RNA, 19 nt, Artificial Sequence
  Description of Artificial Sequence: Synthetic oligonucleotide
cacaaacuguucuucaagc

SEQ ID NO: 3028614 - RNA, 19 nt, Artificial Sequence
  Description of Artificial Sequence: Synthetic oligonucleotide
ugaucaguggugcaggaaa

SEQ ID NO: 3028615 - RNA, 19 nt, Artificial Sequence
  Description of Artificial Sequence: Synthetic oligonucleotide
aaacuguucuucaagcuca

SEQ ID NO: 3028616 - RNA, 19 nt, Artificial Sequence
  Description of Artificial Sequence: Synthetic oligonucleotide
uccuuucacaaacuguucu

SEQ ID NO: 3028617 - RNA, 19 nt, Artificial Sequence
  Description of Artificial Sequence: Synthetic oligonucleotide
cuucugaagcccaaauacc

SEQ ID NO: 3028618 - RNA, 19 nt, Artificial Sequence
  Description of Artificial Sequence: Synthetic oligonucleotide
uguuugagcacuacacagu

SEQ ID NO: 3028619 - RNA, 19 nt, Artificial Sequence
  Description of Artificial Sequence: Synthetic oligonucleotide
ucaguggugcaggaaaacg

SEQ ID NO: 3028620 - RNA, 19 nt, Artificial Sequence
  Description of Artificial Sequence: Synthetic oligonucleotide
agcauauccugaucagugg

SEQ ID NO: 3028621 - RNA, 19 nt, Artificial Sequence
  Description of Artificial Sequence: Synthetic oligonucleotide
ucuguuuuguauccacaga

SEQ ID NO: 3028622 - RNA, 19 nt, Artificial Sequence
  Description of Artificial Sequence: Synthetic oligonucleotide
aguccuuccugccugccac

SEQ ID NO: 3028623 - RNA, 19 nt, Artificial Sequence
  Description of Artificial Sequence: Synthetic oligonucleotide
uggaccauguccuuucaca

SEQ ID NO: 3028624 - RNA, 19 nt, Artificial Sequence
  Description of Artificial Sequence: Synthetic oligonucleotide
aaagcccaggugcucauca

SEQ ID NO: 3028625 - RNA, 19 nt, Artificial Sequence
  Description of Artificial Sequence: Synthetic oligonucleotide
caguggugcaggaaaacgg

SEQ ID NO: 3028626 - RNA, 19 nt, Artificial Sequence
  Description of Artificial Sequence: Synthetic oligonucleotide
agcucgcuguggcagaacc

SEQ ID NO: 3028627 - RNA, 19 nt, Artificial Sequence
  Description of Artificial Sequence: Synthetic oligonucleotide
gagggcacauguuugagca

SEQ ID NO: 3028628 - RNA, 19 nt, Artificial Sequence
  Description of Artificial Sequence: Synthetic oligonucleotide
uguuuuguauccacagauc

SEQ ID NO: 3028629 - RNA, 19 nt, Artificial Sequence
  Description of Artificial Sequence: Synthetic oligonucleotide
ucugaagcccaaauaccca

SEQ ID NO: 3028630 - RNA, 19 nt, Artificial Sequence
  Description of Artificial Sequence: Synthetic oligonucleotide
  modified_base (14)..(14): a, c, u, g, unknown or other
uauccacagaucgnguuug

SEQ ID NO: 3028631 - RNA, 19 nt, Artificial Sequence
  Description of Artificial Sequence: Synthetic oligonucleotide
uuucuguuuuguauccaca

SEQ ID NO: 3028632 - RNA, 19 nt, Artificial Sequence
  Description of Artificial Sequence: Synthetic oligonucleotide
  modified_base (4)..(4): a, c, u, g, unknown or other
ucgnguuuguggcacuuga

SEQ ID NO: 3028633 - RNA, 19 nt, Artificial Sequence
  Description of Artificial Sequence: Synthetic oligonucleotide
aaccguagcuaucuuucug

SEQ ID NO: 3028634 - RNA, 19 nt, Artificial Sequence
  Description of Artificial Sequence: Synthetic oligonucleotide
ucuucaagcucacucucgu

SEQ ID NO: 3028635 - RNA, 19 nt, Artificial Sequence
  Description of Artificial Sequence: Synthetic oligonucleotide
caaacuguucuucaagcuc

SEQ ID NO: 3028636 - RNA, 19 nt, Artificial Sequence
  Description of Artificial Sequence: Synthetic oligonucleotide
cuuucuguuuuguauccac

SEQ ID NO: 3028637 - RNA, 19 nt, Artificial Sequence
  Description of Artificial Sequence: Synthetic oligonucleotide
acaaacuguucuucaagcu

SEQ ID NO: 3028638 - RNA, 19 nt, Artificial Sequence
  Description of Artificial Sequence: Synthetic oligonucleotide
aaauacccaguucccugag

SEQ ID NO: 3028639 - RNA, 19 nt, Artificial Sequence
  Description of Artificial Sequence: Synthetic oligonucleotide
  modified_base (16)..(16): a, c, u, g, unknown or other
uguauccacagaucgnguu

SEQ ID NO: 3028640 - RNA, 19 nt, Artificial Sequence
  Description of Artificial Sequence: Synthetic oligonucleotide
aacggagcaaagcccaggu

SEQ ID NO: 3028641 - RNA, 19 nt, Artificial Sequence
  Description of Artificial Sequence: Synthetic oligonucleotide
uggugcaggaaaacggagc

SEQ ID NO: 3028642 - RNA, 19 nt, Artificial Sequence
  Description of Artificial Sequence: Synthetic oligonucleotide
agcaggauaguccuuccug

SEQ ID NO: 3028643 - RNA, 19 nt, Artificial Sequence
  Description of Artificial Sequence: Synthetic oligonucleotide
gcuucugaagcccaaauac

SEQ ID NO: 3028644 - RNA, 19 nt, Artificial Sequence
  Description of Artificial Sequence: Synthetic oligonucleotide
gagcauauccugaucagug

SEQ ID NO: 3028645 - RNA, 19 nt, Artificial Sequence
  Description of Artificial Sequence: Synthetic oligonucleotide
aaggacacagcucgcugug

SEQ ID NO: 3028646 - RNA, 19 nt, Artificial Sequence
  Description of Artificial Sequence: Synthetic oligonucleotide
ucaaggacacagcucgcug

SEQ ID NO: 3028647 - RNA, 19 nt, Artificial Sequence
  Description of Artificial Sequence: Synthetic oligonucleotide
gaaaacggagcaaagccca

SEQ ID NO: 3028648 - RNA, 19 nt, Artificial Sequence
  Description of Artificial Sequence: Synthetic oligonucleotide
cuguucuucaagcucacuc

SEQ ID NO: 3028649 - RNA, 19 nt, Artificial Sequence
  Description of Artificial Sequence: Synthetic oligonucleotide
agagcaggauaguccuucc

SEQ ID NO: 3028650 - RNA, 19 nt, Artificial Sequence
  Description of Artificial Sequence: Synthetic oligonucleotide
gugcucaucaaggacacag

SEQ ID NO: 3028651 - RNA, 19 nt, Artificial Sequence
  Description of Artificial Sequence: Synthetic oligonucleotide
uguugguuuuguugguggc

SEQ ID NO: 3028652 - RNA, 19 nt, Artificial Sequence
  Description of Artificial Sequence: Synthetic oligonucleotide
aaacggagcaaagcccagg

SEQ ID NO: 3028653 - RNA, 19 nt, Artificial Sequence
  Description of Artificial Sequence: Synthetic oligonucleotide
aaaccguagcuaucuuucu

SEQ ID NO: 3028654 - RNA, 19 nt, Artificial Sequence
  Description of Artificial Sequence: Synthetic oligonucleotide
uucacaaacuguucuucaa

SEQ ID NO: 3028655 - RNA, 19 nt, Artificial Sequence
  Description of Artificial Sequence: Synthetic oligonucleotide
accguagcuaucuuucugu

SEQ ID NO: 3028656 - RNA, 19 nt, Artificial Sequence
  Description of Artificial Sequence: Synthetic oligonucleotide
cauauccugaucaguggug

SEQ ID NO: 3028657 - RNA, 19 nt, Artificial Sequence
  Description of Artificial Sequence: Synthetic oligonucleotide
ugcaggaaaacggagcaaa

SEQ ID NO: 3028658 - RNA, 19 nt, Artificial Sequence
  Description of Artificial Sequence: Synthetic oligonucleotide
uuuuguugguggccuggcc

SEQ ID NO: 3028659 - RNA, 19 nt, Artificial Sequence
  Description of Artificial Sequence: Synthetic oligonucleotide
cauguccuuucacaaacug

SEQ ID NO: 3028660 - RNA, 19 nt, Artificial Sequence
  Description of Artificial Sequence: Synthetic oligonucleotide
ugcucaucaaggacacagc

SEQ ID NO: 3028661 - RNA, 19 nt, Artificial Sequence
  Description of Artificial Sequence: Synthetic oligonucleotide
cugggaagagcagugcugg

SEQ ID NO: 3028662 - RNA, 19 nt, Artificial Sequence
  Description of Artificial Sequence: Synthetic oligonucleotide
uucccugagcauauccuga

SEQ ID NO: 3028663 - RNA, 19 nt, Artificial Sequence
  Description of Artificial Sequence: Synthetic oligonucleotide
gagcacuacacaguuguug

SEQ ID NO: 3028664 - RNA, 19 nt, Artificial Sequence
  Description of Artificial Sequence: Synthetic oligonucleotide
guucccugagcauauccug

SEQ ID NO: 3028665 - RNA, 19 nt, Artificial Sequence
  Description of Artificial Sequence: Synthetic oligonucleotide
  modified_base (11)..(11): a, c, u, g, unknown or other
ccacagaucgnguuugugg

SEQ ID NO: 3028666 - RNA, 19 nt, Artificial Sequence
  Description of Artificial Sequence: Synthetic oligonucleotide
uccugaucaguggugcagg

SEQ ID NO: 3028667 - RNA, 19 nt, Artificial Sequence
  Description of Artificial Sequence: Synthetic oligonucleotide
cagugcuggcuucugaagc

SEQ ID NO: 3028668 - RNA, 19 nt, Artificial Sequence
  Description of Artificial Sequence: Synthetic oligonucleotide
uguaccacagcagcagcca

SEQ ID NO: 3028669 - RNA, 19 nt, Artificial Sequence
  Description of Artificial Sequence: Synthetic oligonucleotide
cugagcauauccugaucag

SEQ ID NO: 3028670 - RNA, 19 nt, Artificial Sequence
  Description of Artificial Sequence: Synthetic oligonucleotide
guuuguggcacuugaccac

SEQ ID NO: 3028671 - RNA, 19 nt, Artificial Sequence
  Description of Artificial Sequence: Synthetic oligonucleotide
ucgugcaggggaagcagag

SEQ ID NO: 3028672 - RNA, 19 nt, Artificial Sequence
  Description of Artificial Sequence: Synthetic oligonucleotide
caggaaaacggagcaaagc

SEQ ID NO: 3028673 - RNA, 19 nt, Artificial Sequence
  Description of Artificial Sequence: Synthetic oligonucleotide
cucaucaaggacacagcuc

SEQ ID NO: 3028674 - RNA, 19 nt, Artificial Sequence
  Description of Artificial Sequence: Synthetic oligonucleotide
ugccaccuguaccacagca

SEQ ID NO: 3028675 - RNA, 19 nt, Artificial Sequence
  Description of Artificial Sequence: Synthetic oligonucleotide
accacaaugccggagggca

SEQ ID NO: 3028676 - RNA, 19 nt, Artificial Sequence
  Description of Artificial Sequence: Synthetic oligonucleotide
accacagcagcagccauuc

SEQ ID NO: 3028677 - RNA, 19 nt, Artificial Sequence
  Description of Artificial Sequence: Synthetic oligonucleotide
uuuguggcacuugaccaca

SEQ ID NO: 3028678 - RNA, 19 nt, Artificial Sequence
  Description of Artificial Sequence: Synthetic oligonucleotide
cuguaccacagcagcagcc

SEQ ID NO: 3028679 - RNA, 19 nt, Artificial Sequence
  Description of Artificial Sequence: Synthetic oligonucleotide
cauguuugagcacuacaca

SEQ ID NO: 3028680 - RNA, 19 nt, Artificial Sequence
  Description of Artificial Sequence: Synthetic oligonucleotide
aacuguucuucaagcucac

SEQ ID NO: 3028681 - RNA, 19 nt, Artificial Sequence
  Description of Artificial Sequence: Synthetic oligonucleotide
gauaguccuuccugccugc

SEQ ID NO: 3028682 - RNA, 19 nt, Artificial Sequence
  Description of Artificial Sequence: Synthetic oligonucleotide
ugagcauauccugaucagu

SEQ ID NO: 3028683 - RNA, 19 nt, Artificial Sequence
  Description of Artificial Sequence: Synthetic oligonucleotide
uccugggaagagcagugcu

SEQ ID NO: 3028684 - RNA, 19 nt, Artificial Sequence
  Description of Artificial Sequence: Synthetic oligonucleotide
ugcaggggaagcagagcag

SEQ ID NO: 3028685 - RNA, 19 nt, Artificial Sequence
  Description of Artificial Sequence: Synthetic oligonucleotide
aucaguggugcaggaaaac

SEQ ID NO: 3028686 - RNA, 19 nt, Artificial Sequence
  Description of Artificial Sequence: Synthetic oligonucleotide
guagcuaucuuucuguuuu

SEQ ID NO: 3028687 - RNA, 19 nt, Artificial Sequence
  Description of Artificial Sequence: Synthetic oligonucleotide
caggauaguccuuccugcc

SEQ ID NO: 3028688 - RNA, 19 nt, Artificial Sequence
  Description of Artificial Sequence: Synthetic oligonucleotide
gaagcagagcaggauaguc

SEQ ID NO: 3028689 - RNA, 19 nt, Artificial Sequence
  Description of Artificial Sequence: Synthetic oligonucleotide
caggugcucaucaaggaca

SEQ ID NO: 3028690 - RNA, 19 nt, Artificial Sequence
  Description of Artificial Sequence: Synthetic oligonucleotide
uacacaguuguugguuuug

SEQ ID NO: 3028691 - RNA, 19 nt, Artificial Sequence
  Description of Artificial Sequence: Synthetic oligonucleotide
guugguuuuguugguggcc

SEQ ID NO: 3028692 - RNA, 19 nt, Artificial Sequence
  Description of Artificial Sequence: Synthetic oligonucleotide
acuacacaguuguugguuu

SEQ ID NO: 3028693 - RNA, 19 nt, Artificial Sequence
  Description of Artificial Sequence: Synthetic oligonucleotide
aguuguugguuuuguuggu

SEQ ID NO: 3028694 - RNA, 19 nt, Artificial Sequence
  Description of Artificial Sequence: Synthetic oligonucleotide
  modified_base (17)..(17): a, c, u, g, unknown or other
uuguauccacagaucgngu

SEQ ID NO: 3028695 - RNA, 19 nt, Artificial Sequence
  Description of Artificial Sequence: Synthetic oligonucleotide
agcucacucucgugcaggg

SEQ ID NO: 3028696 - RNA, 19 nt, Artificial Sequence
  Description of Artificial Sequence: Synthetic oligonucleotide
aggauaguccuuccugccu

SEQ ID NO: 3028697 - RNA, 19 nt, Artificial Sequence
  Description of Artificial Sequence: Synthetic oligonucleotide
accuguaccacagcagcag

SEQ ID NO: 3028698 - RNA, 19 nt, Artificial Sequence
  Description of Artificial Sequence: Synthetic oligonucleotide
aaaacggagcaaagcccag

SEQ ID NO: 3028699 - RNA, 19 nt, Artificial Sequence
  Description of Artificial Sequence: Synthetic oligonucleotide
ggaaaacggagcaaagccc

SEQ ID NO: 3028700 - RNA, 19 nt, Artificial Sequence
  Description of Artificial Sequence: Synthetic oligonucleotide
caguucccugagcauaucc

SEQ ID NO: 3028701 - RNA, 19 nt, Artificial Sequence
  Description of Artificial Sequence: Synthetic oligonucleotide
gugcaggggaagcagagca

SEQ ID NO: 3028702 - RNA, 19 nt, Artificial Sequence
  Description of Artificial Sequence: Synthetic oligonucleotide
  modified_base (9)..(9): a, c, u, g, unknown or other
acagaucgnguuuguggca

SEQ ID NO: 3028703 - RNA, 19 nt, Artificial Sequence
  Description of Artificial Sequence: Synthetic oligonucleotide
caaauacccaguucccuga

SEQ ID NO: 3028704 - RNA, 19 nt, Artificial Sequence
  Description of Artificial Sequence: Synthetic oligonucleotide
ggcacuugaccacaaugcc

SEQ ID NO: 3028705 - RNA, 19 nt, Artificial Sequence
  Description of Artificial Sequence: Synthetic oligonucleotide
acucucgugcaggggaagc

SEQ ID NO: 3028706 - RNA, 19 nt, Artificial Sequence
  Description of Artificial Sequence: Synthetic oligonucleotide
ggugcaggaaaacggagca

SEQ ID NO: 3028707 - RNA, 19 nt, Artificial Sequence
  Description of Artificial Sequence: Synthetic oligonucleotide
ucucgugcaggggaagcag

SEQ ID NO: 3028708 - RNA, 19 nt, Artificial Sequence
  Description of Artificial Sequence: Synthetic oligonucleotide
agcccaggugcucaucaag

SEQ ID NO: 3028709 - RNA, 19 nt, Artificial Sequence
  Description of Artificial Sequence: Synthetic oligonucleotide
uauccugaucaguggugca

SEQ ID NO: 3028710 - RNA, 19 nt, Artificial Sequence
  Description of Artificial Sequence: Synthetic oligonucleotide
aguggugcaggaaaacgga

SEQ ID NO: 3028711 - RNA, 19 nt, Artificial Sequence
  Description of Artificial Sequence: Synthetic oligonucleotide
aggugcucaucaaggacac

SEQ ID NO: 3028712 - RNA, 19 nt, Artificial Sequence
  Description of Artificial Sequence: Synthetic oligonucleotide
guuguugguuuuguuggug

SEQ ID NO: 3028713 - RNA, 19 nt, Artificial Sequence
  Description of Artificial Sequence: Synthetic oligonucleotide
ggauaguccuuccugccug

SEQ ID NO: 3028714 - RNA, 19 nt, Artificial Sequence
  Description of Artificial Sequence: Synthetic oligonucleotide
auccugaucaguggugcag

SEQ ID NO: 3028715 - RNA, 19 nt, Artificial Sequence
  Description of Artificial Sequence: Synthetic oligonucleotide
gcaggauaguccuuccugc

SEQ ID NO: 3028716 - RNA, 19 nt, Artificial Sequence
  Description of Artificial Sequence: Synthetic oligonucleotide
cucacucucgugcagggga

SEQ ID NO: 3028717 - RNA, 19 nt, Artificial Sequence
  Description of Artificial Sequence: Synthetic oligonucleotide
agcagugcuggcuucugaa

SEQ ID NO: 3028718 - RNA, 19 nt, Artificial Sequence
  Description of Artificial Sequence: Synthetic oligonucleotide
uagcuaucuuucuguuuug

SEQ ID NO: 3028719 - RNA, 19 nt, Artificial Sequence
  Description of Artificial Sequence: Synthetic oligonucleotide
agggcacauguuugagcac

SEQ ID NO: 3028720 - RNA, 19 nt, Artificial Sequence
  Description of Artificial Sequence: Synthetic oligonucleotide
ccaaauacccaguucccug

SEQ ID NO: 3028721 - RNA, 19 nt, Artificial Sequence
  Description of Artificial Sequence: Synthetic oligonucleotide
acacagcucgcuguggcag

SEQ ID NO: 3028722 - RNA, 19 nt, Artificial Sequence
  Description of Artificial Sequence: Synthetic oligonucleotide
cuguuuuguauccacagau

SEQ ID NO: 3028723 - RNA, 19 nt, Artificial Sequence
  Description of Artificial Sequence: Synthetic oligonucleotide
  modified_base (8)..(8): a, c, u, g, unknown or other
cagaucgnguuuguggcac

SEQ ID NO: 3028724 - RNA, 19 nt, Artificial Sequence
  Description of Artificial Sequence: Synthetic oligonucleotide
cuugaccacaaugccggag

SEQ ID NO: 3028725 - RNA, 19 nt, Artificial Sequence
  Description of Artificial Sequence: Synthetic oligonucleotide
cacauguuugagcacuaca

SEQ ID NO: 3028726 - RNA, 19 nt, Artificial Sequence
  Description of Artificial Sequence: Synthetic oligonucleotide
gcacuugaccacaaugccg

SEQ ID NO: 3028727 - RNA, 19 nt, Artificial Sequence
  Description of Artificial Sequence: Synthetic oligonucleotide
uaguccuuccugccugcca

SEQ ID NO: 3028728 - RNA, 19 nt, Artificial Sequence
  Description of Artificial Sequence: Synthetic oligonucleotide
  modified_base (7)..(7): a, c, u, g, unknown or other
agaucgnguuuguggcacu

SEQ ID NO: 3028729 - RNA, 19 nt, Artificial Sequence
  Description of Artificial Sequence: Synthetic oligonucleotide
auaguccuuccugccugcc

SEQ ID NO: 3028730 - RNA, 19 nt, Artificial Sequence
  Description of Artificial Sequence: Synthetic oligonucleotide
aguucccugagcauauccu

SEQ ID NO: 3028731 - RNA, 19 nt, Artificial Sequence
  Description of Artificial Sequence: Synthetic oligonucleotide
  modified_base (12)..(12): a, c, u, g, unknown or other
uccacagaucgnguuugug

SEQ ID NO: 3028732 - RNA, 19 nt, Artificial Sequence
  Description of Artificial Sequence: Synthetic oligonucleotide
aucaaggacacagcucgcu

SEQ ID NO: 3028733 - RNA, 19 nt, Artificial Sequence
  Description of Artificial Sequence: Synthetic oligonucleotide
cuucaagcucacucucgug

SEQ ID NO: 3028734 - RNA, 19 nt, Artificial Sequence
  Description of Artificial Sequence: Synthetic oligonucleotide
cagagcaggauaguccuuc

SEQ ID NO: 3028735 - RNA, 19 nt, Artificial Sequence
  Description of Artificial Sequence: Synthetic oligonucleotide
ugccggagggcacauguuu

SEQ ID NO: 3028736 - RNA, 19 nt, Artificial Sequence
  Description of Artificial Sequence: Synthetic oligonucleotide
caucaaggacacagcucgc

SEQ ID NO: 3028737 - RNA, 19 nt, Artificial Sequence
  Description of Artificial Sequence: Synthetic oligonucleotide
ucacucucgugcaggggaa

SEQ ID NO: 3028738 - RNA, 19 nt, Artificial Sequence
  Description of Artificial Sequence: Synthetic oligonucleotide
gguuuuguugguggccugg

SEQ ID NO: 3028739 - RNA, 19 nt, Artificial Sequence
  Description of Artificial Sequence: Synthetic oligonucleotide
gggaagcagagcaggauag

SEQ ID NO: 3028740 - RNA, 19 nt, Artificial Sequence
  Description of Artificial Sequence: Synthetic oligonucleotide
ucccugagcauauccugau

SEQ ID NO: 3028741 - RNA, 19 nt, Artificial Sequence
  Description of Artificial Sequence: Synthetic oligonucleotide
gaagagcagugcuggcuuc

SEQ ID NO: 3028742 - RNA, 19 nt, Artificial Sequence
  Description of Artificial Sequence: Synthetic oligonucleotide
guuuuguugguggccuggc

SEQ ID NO: 3028743 - RNA, 19 nt, Artificial Sequence
  Description of Artificial Sequence: Synthetic oligonucleotide
gaccauguccuuucacaaa

SEQ ID NO: 3028744 - RNA, 19 nt, Artificial Sequence
  Description of Artificial Sequence: Synthetic oligonucleotide
ugguuuuguugguggccug

SEQ ID NO: 3028745 - RNA, 19 nt, Artificial Sequence
  Description of Artificial Sequence: Synthetic oligonucleotide
ggagggcacauguuugagc

SEQ ID NO: 3028746 - RNA, 19 nt, Artificial Sequence
  Description of Artificial Sequence: Synthetic oligonucleotide
guuugagcacuacacaguu

SEQ ID NO: 3028747 - RNA, 19 nt, Artificial Sequence
  Description of Artificial Sequence: Synthetic oligonucleotide
agcagccauuccugggaag

SEQ ID NO: 3028748 - RNA, 19 nt, Artificial Sequence
  Description of Artificial Sequence: Synthetic oligonucleotide
agcuaucuuucuguuuugu

SEQ ID NO: 3028749 - RNA, 19 nt, Artificial Sequence
  Description of Artificial Sequence: Synthetic oligonucleotide
guggugcaggaaaacggag

SEQ ID NO: 3028750 - RNA, 19 nt, Artificial Sequence
  Description of Artificial Sequence: Synthetic oligonucleotide
uguggcacuugaccacaau

SEQ ID NO: 3028751 - RNA, 19 nt, Artificial Sequence
  Description of Artificial Sequence: Synthetic oligonucleotide
ccugagcauauccugauca

SEQ ID NO: 3028752 - RNA, 19 nt, Artificial Sequence
  Description of Artificial Sequence: Synthetic oligonucleotide
ccugccaccuguaccacag

SEQ ID NO: 3028753 - RNA, 19 nt, Artificial Sequence
  Description of Artificial Sequence: Synthetic oligonucleotide
gacacagcucgcuguggca

SEQ ID NO: 3028754 - RNA, 19 nt, Artificial Sequence
  Description of Artificial Sequence: Synthetic oligonucleotide
gcaggggaagcagagcagg

SEQ ID NO: 3028755 - RNA, 19 nt, Artificial Sequence
  Description of Artificial Sequence: Synthetic oligonucleotide
ugggaagagcagugcuggc

SEQ ID NO: 3028756 - RNA, 19 nt, Artificial Sequence
  Description of Artificial Sequence: Synthetic oligonucleotide
ggacacagcucgcuguggc

SEQ ID NO: 3028757 - RNA, 19 nt, Artificial Sequence
  Description of Artificial Sequence: Synthetic oligonucleotide
uuccugggaagagcagugc

SEQ ID NO: 3028758 - RNA, 19 nt, Artificial Sequence
  Description of Artificial Sequence: Synthetic oligonucleotide
gaucaguggugcaggaaaa

SEQ ID NO: 3028759 - RNA, 19 nt, Artificial Sequence
  Description of Artificial Sequence: Synthetic oligonucleotide
acggagcaaagcccaggug

SEQ ID NO: 3028760 - RNA, 19 nt, Artificial Sequence
  Description of Artificial Sequence: Synthetic oligonucleotide
aagcccaggugcucaucaa

SEQ ID NO: 3028761 - RNA, 19 nt, Artificial Sequence
  Description of Artificial Sequence: Synthetic oligonucleotide
  modified_base (5)..(5): a, c, u, g, unknown or other
aucgnguuuguggcacuug

SEQ ID NO: 3028762 - RNA, 19 nt, Artificial Sequence
  Description of Artificial Sequence: Synthetic oligonucleotide
ugagcacuacacaguuguu

SEQ ID NO: 3028763 - RNA, 19 nt, Artificial Sequence
  Description of Artificial Sequence: Synthetic oligonucleotide
gcagugcuggcuucugaag

SEQ ID NO: 3028764 - RNA, 19 nt, Artificial Sequence
  Description of Artificial Sequence: Synthetic oligonucleotide
ggaccauguccuuucacaa

SEQ ID NO: 3028765 - RNA, 19 nt, Artificial Sequence
  Description of Artificial Sequence: Synthetic oligonucleotide
aggacacagcucgcugugg

SEQ ID NO: 3028766 - RNA, 19 nt, Artificial Sequence
  Description of Artificial Sequence: Synthetic oligonucleotide
cuggaccauguccuuucac

SEQ ID NO: 3028767 - RNA, 19 nt, Artificial Sequence
  Description of Artificial Sequence: Synthetic oligonucleotide
gcccaggugcucaucaagg

SEQ ID NO: 3028768 - RNA, 19 nt, Artificial Sequence
  Description of Artificial Sequence: Synthetic oligonucleotide
ccugggaagagcagugcug

SEQ ID NO: 3028769 - RNA, 19 nt, Artificial Sequence
  Description of Artificial Sequence: Synthetic oligonucleotide
uacccaguucccugagcau

SEQ ID NO: 3028770 - RNA, 19 nt, Artificial Sequence
  Description of Artificial Sequence: Synthetic oligonucleotide
uccugccugccaccuguac

SEQ ID NO: 3028771 - RNA, 19 nt, Artificial Sequence
  Description of Artificial Sequence: Synthetic oligonucleotide
acuugaccacaaugccgga

SEQ ID NO: 3028772 - RNA, 19 nt, Artificial Sequence
  Description of Artificial Sequence: Synthetic oligonucleotide
  modified_base (15)..(15): a, c, u, g, unknown or other
guauccacagaucgnguuu

SEQ ID NO: 3028773 - RNA, 19 nt, Artificial Sequence
  Description of Artificial Sequence: Synthetic oligonucleotide
gcaggaaaacggagcaaag

SEQ ID NO: 3028774 - RNA, 19 nt, Artificial Sequence
  Description of Artificial Sequence: Synthetic oligonucleotide
ccaggugcucaucaaggac

SEQ ID NO: 3028775 - RNA, 19 nt, Artificial Sequence
  Description of Artificial Sequence: Synthetic oligonucleotide
caaggacacagcucgcugu

SEQ ID NO: 3028776 - RNA, 19 nt, Artificial Sequence
  Description of Artificial Sequence: Synthetic oligonucleotide
caccuguaccacagcagca

SEQ ID NO: 3028777 - RNA, 19 nt, Artificial Sequence
  Description of Artificial Sequence: Synthetic oligonucleotide
cagccauuccugggaagag

SEQ ID NO: 3028778 - RNA, 19 nt, Artificial Sequence
  Description of Artificial Sequence: Synthetic oligonucleotide
agagcagugcuggcuucug

SEQ ID NO: 3028779 - RNA, 19 nt, Artificial Sequence
  Description of Artificial Sequence: Synthetic oligonucleotide
aggggaagcagagcaggau

SEQ ID NO: 3028780 - RNA, 19 nt, Artificial Sequence
  Description of Artificial Sequence: Synthetic oligonucleotide
cucgugcaggggaagcaga

SEQ ID NO: 3028781 - RNA, 19 nt, Artificial Sequence
  Description of Artificial Sequence: Synthetic oligonucleotide
ccuguaccacagcagcagc

SEQ ID NO: 3028782 - RNA, 19 nt, Artificial Sequence
  Description of Artificial Sequence: Synthetic oligonucleotide
gcuaucuuucuguuuugua

SEQ ID NO: 3028783 - RNA, 19 nt, Artificial Sequence
  Description of Artificial Sequence: Synthetic oligonucleotide
gccauuccugggaagagca

SEQ ID NO: 3028784 - RNA, 19 nt, Artificial Sequence
  Description of Artificial Sequence: Synthetic oligonucleotide
gcauauccugaucaguggu

SEQ ID NO: 3028785 - RNA, 19 nt, Artificial Sequence
  Description of Artificial Sequence: Synthetic oligonucleotide
acuguucuucaagcucacu

SEQ ID NO: 3028786 - RNA, 19 nt, Artificial Sequence
  Description of Artificial Sequence: Synthetic oligonucleotide
ggggaagcagagcaggaua

SEQ ID NO: 3028787 - RNA, 19 nt, Artificial Sequence
  Description of Artificial Sequence: Synthetic oligonucleotide
cacaaugccggagggcaca

SEQ ID NO: 3028788 - RNA, 19 nt, Artificial Sequence
  Description of Artificial Sequence: Synthetic oligonucleotide
cauuccugggaagagcagu

SEQ ID NO: 3028789 - RNA, 19 nt, Artificial Sequence
  Description of Artificial Sequence: Synthetic oligonucleotide
guccuuccugccugccacc

SEQ ID NO: 3028790 - RNA, 19 nt, Artificial Sequence
  Description of Artificial Sequence: Synthetic oligonucleotide
gccaccuguaccacagcag

SEQ ID NO: 3028791 - RNA, 19 nt, Artificial Sequence
  Description of Artificial Sequence: Synthetic oligonucleotide
gcagccauuccugggaaga

SEQ ID NO: 3028792 - RNA, 19 nt, Artificial Sequence
  Description of Artificial Sequence: Synthetic oligonucleotide
gagcaggauaguccuuccu

SEQ ID NO: 3028793 - RNA, 19 nt, Artificial Sequence
  Description of Artificial Sequence: Synthetic oligonucleotide
cacucucgugcaggggaag

SEQ ID NO: 3028794 - RNA, 19 nt, Artificial Sequence
  Description of Artificial Sequence: Synthetic oligonucleotide
  modified_base (13)..(13): a, c, u, g, unknown or other
auccacagaucgnguuugu

SEQ ID NO: 3028795 - RNA, 19 nt, Artificial Sequence
  Description of Artificial Sequence: Synthetic oligonucleotide
cucucgugcaggggaagca

SEQ ID NO: 3028796 - RNA, 19 nt, Artificial Sequence
  Description of Artificial Sequence: Synthetic oligonucleotide
cacagcucgcuguggcaga

SEQ ID NO: 3028797 - RNA, 19 nt, Artificial Sequence
  Description of Artificial Sequence: Synthetic oligonucleotide
  modified_base (3)..(3): a, c, u, g, unknown or other
cgnguuuguggcacuugac

SEQ ID NO: 3028798 - RNA, 19 nt, Artificial Sequence
  Description of Artificial Sequence: Synthetic oligonucleotide
ccauuccugggaagagcag

SEQ ID NO: 3028799 - RNA, 19 nt, Artificial Sequence
  Description of Artificial Sequence: Synthetic oligonucleotide
ggaagagcagugcuggcuu

SEQ ID NO: 3028800 - RNA, 19 nt, Artificial Sequence
  Description of Artificial Sequence: Synthetic oligonucleotide
cccuggaccauguccuuuc

SEQ ID NO: 3028801 - RNA, 19 nt, Artificial Sequence
  Description of Artificial Sequence: Synthetic oligonucleotide
gccggagggcacauguuug

SEQ ID NO: 3028802 - RNA, 19 nt, Artificial Sequence
  Description of Artificial Sequence: Synthetic oligonucleotide
acaaugccggagggcacau

SEQ ID NO: 3028803 - RNA, 19 nt, Artificial Sequence
  Description of Artificial Sequence: Synthetic oligonucleotide
uuccugccugccaccugua

SEQ ID NO: 3028804 - RNA, 19 nt, Artificial Sequence
  Description of Artificial Sequence: Synthetic oligonucleotide
cugaucaguggugcaggaa

SEQ ID NO: 3028805 - RNA, 19 nt, Artificial Sequence
  Description of Artificial Sequence: Synthetic oligonucleotide
acagcucgcuguggcagaa

SEQ ID NO: 3028806 - RNA, 19 nt, Artificial Sequence
  Description of Artificial Sequence: Synthetic oligonucleotide
cacuacacaguuguugguu

SEQ ID NO: 3028807 - RNA, 19 nt, Artificial Sequence
  Description of Artificial Sequence: Synthetic oligonucleotide
gggcacauguuugagcacu

SEQ ID NO: 3028808 - RNA, 19 nt, Artificial Sequence
  Description of Artificial Sequence: Synthetic oligonucleotide
cuacacaguuguugguuuu

SEQ ID NO: 3028809 - RNA, 19 nt, Artificial Sequence
  Description of Artificial Sequence: Synthetic oligonucleotide
gcucacucucgugcagggg

SEQ ID NO: 3028810 - RNA, 19 nt, Artificial Sequence
  Description of Artificial Sequence: Synthetic oligonucleotide
  modified_base (6)..(6): a, c, u, g, unknown or other
gaucgnguuuguggcacuu

SEQ ID NO: 3028811 - RNA, 19 nt, Artificial Sequence
  Description of Artificial Sequence: Synthetic oligonucleotide
cccaggugcucaucaagga

SEQ ID NO: 3028812 - RNA, 19 nt, Artificial Sequence
  Description of Artificial Sequence: Synthetic oligonucleotide
gugcaggaaaacggagcaa

SEQ ID NO: 3028813 - RNA, 19 nt, Artificial Sequence
  Description of Artificial Sequence: Synthetic oligonucleotide
gcacauguuugagcacuac

SEQ ID NO: 3028814 - RNA, 19 nt, Artificial Sequence
  Description of Artificial Sequence: Synthetic oligonucleotide
gggaagagcagugcuggcu

SEQ ID NO: 3028815 - RNA, 19 nt, Artificial Sequence
  Description of Artificial Sequence: Synthetic oligonucleotide
ccacaaugccggagggcac

SEQ ID NO: 3028816 - RNA, 19 nt, Artificial Sequence
  Description of Artificial Sequence: Synthetic oligonucleotide
guaccacagcagcagccau

SEQ ID NO: 3028817 - RNA, 19 nt, Artificial Sequence
  Description of Artificial Sequence: Synthetic oligonucleotide
cuggcuucugaagcccaaa

SEQ ID NO: 3028818 - RNA, 19 nt, Artificial Sequence
  Description of Artificial Sequence: Synthetic oligonucleotide
caaugccggagggcacaug

SEQ ID NO: 3028819 - RNA, 19 nt, Artificial Sequence
  Description of Artificial Sequence: Synthetic oligonucleotide
ccugaucaguggugcagga

SEQ ID NO: 3028820 - RNA, 19 nt, Artificial Sequence
  Description of Artificial Sequence: Synthetic oligonucleotide
cccugagcauauccugauc

SEQ ID NO: 3028821 - RNA, 19 nt, Artificial Sequence
  Description of Artificial Sequence: Synthetic oligonucleotide
ccggagggcacauguuuga

SEQ ID NO: 3028822 - RNA, 19 nt, Artificial Sequence
  Description of Artificial Sequence: Synthetic oligonucleotide
gcacuacacaguuguuggu

SEQ ID NO: 3028823 - RNA, 19 nt, Artificial Sequence
  Description of Artificial Sequence: Synthetic oligonucleotide
ggaagcagagcaggauagu

SEQ ID NO: 3028824 - RNA, 19 nt, Artificial Sequence
  Description of Artificial Sequence: Synthetic oligonucleotide
cagcucgcuguggcagaac

SEQ ID NO: 3028825 - RNA, 19 nt, Artificial Sequence
  Description of Artificial Sequence: Synthetic oligonucleotide
augccggagggcacauguu

SEQ ID NO: 3028826 - RNA, 19 nt, Artificial Sequence
  Description of Artificial Sequence: Synthetic oligonucleotide
ggcacauguuugagcacua

SEQ ID NO: 3028827 - RNA, 19 nt, Artificial Sequence
  Description of Artificial Sequence: Synthetic oligonucleotide
cggagggcacauguuugag

SEQ ID NO: 3028828 - RNA, 19 nt, Artificial Sequence
  Description of Artificial Sequence: Synthetic oligonucleotide
ggugcucaucaaggacaca

SEQ ID NO: 3028829 - RNA, 19 nt, Artificial Sequence
  Description of Artificial Sequence: Synthetic oligonucleotide
cccaaauacccaguucccu

SEQ ID NO: 3028830 - RNA, 19 nt, Artificial Sequence
  Description of Artificial Sequence: Synthetic oligonucleotide
cccaguucccugagcauau

SEQ ID NO: 3028831 - RNA, 19 nt, Artificial Sequence
  Description of Artificial Sequence: Synthetic oligonucleotide
gcaaagcccaggugcucau

SEQ ID NO: 3028832 - RNA, 19 nt, Artificial Sequence
  Description of Artificial Sequence: Synthetic oligonucleotide
ccaguucccugagcauauc

SEQ ID NO: 3028833 - RNA, 19 nt, Artificial Sequence
  Description of Artificial Sequence: Synthetic oligonucleotide
gcucgcuguggcagaaccu

SEQ ID NO: 3028834 - RNA, 19 nt, Artificial Sequence
  Description of Artificial Sequence: Synthetic oligonucleotide
cguagcuaucuuucuguuu

SEQ ID NO: 3028835 - RNA, 19 nt, Artificial Sequence
  Description of Artificial Sequence: Synthetic oligonucleotide
ccguagcuaucuuucuguu

SEQ ID NO: 3028836 - RNA, 19 nt, Artificial Sequence
  Description of Artificial Sequence: Synthetic oligonucleotide
gcagagcaggauaguccuu

SEQ ID NO: 3028837 - RNA, 19 nt, Artificial Sequence
  Description of Artificial Sequence: Synthetic oligonucleotide
ccccuggaccauguccuuu

SEQ ID NO: 3028838 - RNA, 19 nt, Artificial Sequence
  Description of Artificial Sequence: Synthetic oligonucleotide
  modified_base (1)..(1): a, c, u, g, unknown or other
nguuuguggcacuugacca

SEQ ID NO: 3028839 - RNA, 19 nt, Artificial Sequence
  Description of Artificial Sequence: Synthetic oligonucleotide
aauauaucaaaguagauga

SEQ ID NO: 3028840 - RNA, 19 nt, Artificial Sequence
  Description of Artificial Sequence: Synthetic oligonucleotide
aaaaccacuauacucacgc

SEQ ID NO: 3028841 - RNA, 19 nt, Artificial Sequence
  Description of Artificial Sequence: Synthetic oligonucleotide
aaaacuaaaaggcaaguuc

SEQ ID NO: 3028842 - RNA, 19 nt, Artificial Sequence
  Description of Artificial Sequence: Synthetic oligonucleotide
aaagaaaaccacuauacuc

SEQ ID NO: 3028843 - RNA, 19 nt, Artificial Sequence
  Description of Artificial Sequence: Synthetic oligonucleotide
ucugagaucagcuaguagg

SEQ ID NO: 3028844 - RNA, 19 nt, Artificial Sequence
  Description of Artificial Sequence: Synthetic oligonucleotide
ugacauaaaauacaaacug

SEQ ID NO: 3028845 - RNA, 19 nt, Artificial Sequence
  Description of Artificial Sequence: Synthetic oligonucleotide
aaggacugguuauaaaucc

SEQ ID NO: 3028846 - RNA, 19 nt, Artificial Sequence
  Description of Artificial Sequence: Synthetic oligonucleotide
aaugacuccauuauaaggg

SEQ ID NO: 3028847 - RNA, 19 nt, Artificial Sequence
  Description of Artificial Sequence: Synthetic oligonucleotide
aaauauaucaaaguagaug

SEQ ID NO: 3028848 - RNA, 19 nt, Artificial Sequence
  Description of Artificial Sequence: Synthetic oligonucleotide
ucaaagaaaaccacuauac

SEQ ID NO: 3028849 - RNA, 19 nt, Artificial Sequence
  Description of Artificial Sequence: Synthetic oligonucleotide
auaaaauacaaacuggaga

SEQ ID NO: 3028850 - RNA, 19 nt, Artificial Sequence
  Description of Artificial Sequence: Synthetic oligonucleotide
aaugucucagugaaaaggc

SEQ ID NO: 3028851 - RNA, 19 nt, Artificial Sequence
  Description of Artificial Sequence: Synthetic oligonucleotide
aacaaccaaaccuugcuuc

SEQ ID NO: 3028852 - RNA, 19 nt, Artificial Sequence
  Description of Artificial Sequence: Synthetic oligonucleotide
ugcauuucaaagaaaacca

SEQ ID NO: 3028853 - RNA, 19 nt, Artificial Sequence
  Description of Artificial Sequence: Synthetic oligonucleotide
ucagaguucacuuuagacc

SEQ ID NO: 3028854 - RNA, 19 nt, Artificial Sequence
  Description of Artificial Sequence: Synthetic oligonucleotide
uagaugaugacauaaaaua

SEQ ID NO: 3028855 - RNA, 19 nt, Artificial Sequence
  Description of Artificial Sequence: Synthetic oligonucleotide
uggacugucuuuaacaacc

SEQ ID NO: 3028856 - RNA, 19 nt, Artificial Sequence
  Description of Artificial Sequence: Synthetic oligonucleotide
aaggccauuaucuaauuga

SEQ ID NO: 3028857 - RNA, 19 nt, Artificial Sequence
  Description of Artificial Sequence: Synthetic oligonucleotide
uaaugucucagugaaaagg

SEQ ID NO: 3028858 - RNA, 19 nt, Artificial Sequence
  Description of Artificial Sequence: Synthetic oligonucleotide
ucuaaaaugacuccauuau

SEQ ID NO: 3028859 - RNA, 19 nt, Artificial Sequence
  Description of Artificial Sequence: Synthetic oligonucleotide
ucaaaguagaugaugacau

SEQ ID NO: 3028860 - RNA, 19 nt, Artificial Sequence
  Description of Artificial Sequence: Synthetic oligonucleotide
aagaaaaccacuauacuca

SEQ ID NO: 3028861 - RNA, 19 nt, Artificial Sequence
  Description of Artificial Sequence: Synthetic oligonucleotide
uuaacaaccaaaccuugcu

SEQ ID NO: 3028862 - RNA, 19 nt, Artificial Sequence
  Description of Artificial Sequence: Synthetic oligonucleotide
cuauacucacgcaaggugg

SEQ ID NO: 3028863 - RNA, 19 nt, Artificial Sequence
  Description of Artificial Sequence: Synthetic oligonucleotide
aaaacuuuauucagaguuc

SEQ ID NO: 3028864 - RNA, 19 nt, Artificial Sequence
  Description of Artificial Sequence: Synthetic oligonucleotide
aaacuaaaaggcaaguucu

SEQ ID NO: 3028865 - RNA, 19 nt, Artificial Sequence
  Description of Artificial Sequence: Synthetic oligonucleotide
cauaaaauacaaacuggag

SEQ ID NO: 3028866 - RNA, 19 nt, Artificial Sequence
  Description of Artificial Sequence: Synthetic oligonucleotide
aaaucccucucccauagug

SEQ ID NO: 3028867 - RNA, 19 nt, Artificial Sequence
  Description of Artificial Sequence: Synthetic oligonucleotide
aaauacaaacuggagagga

SEQ ID NO: 3028868 - RNA, 19 nt, Artificial Sequence
  Description of Artificial Sequence: Synthetic oligonucleotide
ucuuuaacaaccaaaccuu

SEQ ID NO: 3028869 - RNA, 19 nt, Artificial Sequence
  Description of Artificial Sequence: Synthetic oligonucleotide
uauaucaaaguagaugaug

SEQ ID NO: 3028870 - RNA, 19 nt, Artificial Sequence
  Description of Artificial Sequence: Synthetic oligonucleotide
uuuaacaaccaaaccuugc

SEQ ID NO: 3028871 - RNA, 19 nt, Artificial Sequence
  Description of Artificial Sequence: Synthetic oligonucleotide
uauaagggcuccccaaagg

SEQ ID NO: 3028872 - RNA, 19 nt, Artificial Sequence
  Description of Artificial Sequence: Synthetic oligonucleotide
acaaccaaaccuugcuucc

SEQ ID NO: 3028873 - RNA, 19 nt, Artificial Sequence
  Description of Artificial Sequence: Synthetic oligonucleotide
agagucuuggccuuugauc

SEQ ID NO: 3028874 - RNA, 19 nt, Artificial Sequence
  Description of Artificial Sequence: Synthetic oligonucleotide
uucacugcauuucaaagaa

SEQ ID NO: 3028875 - RNA, 19 nt, Artificial Sequence
  Description of Artificial Sequence: Synthetic oligonucleotide
cugcauuucaaagaaaacc

SEQ ID NO: 3028876 - RNA, 19 nt, Artificial Sequence
  Description of Artificial Sequence: Synthetic oligonucleotide
uacaaacuggagaggaagg

SEQ ID NO: 3028877 - RNA, 19 nt, Artificial Sequence
  Description of Artificial Sequence: Synthetic oligonucleotide
agugaaaaggccauuaucu

SEQ ID NO: 3028878 - RNA, 19 nt, Artificial Sequence
  Description of Artificial Sequence: Synthetic oligonucleotide
augacuccauuauaagggc

SEQ ID NO: 3028879 - RNA, 19 nt, Artificial Sequence
  Description of Artificial Sequence: Synthetic oligonucleotide
agaugaugacauaaaauac

SEQ ID NO: 3028880 - RNA, 19 nt, Artificial Sequence
  Description of Artificial Sequence: Synthetic oligonucleotide
aaaauacaaacuggagagg

SEQ ID NO: 3028881 - RNA, 19 nt, Artificial Sequence
  Description of Artificial Sequence: Synthetic oligonucleotide
uuauaaaucccucucccau

SEQ ID NO: 3028882 - RNA, 19 nt, Artificial Sequence
  Description of Artificial Sequence: Synthetic oligonucleotide
uucaaagaaaaccacuaua

SEQ ID NO: 3028883 - RNA, 19 nt, Artificial Sequence
  Description of Artificial Sequence: Synthetic oligonucleotide
aaaguagaugaugacauaa

SEQ ID NO: 3028884 - RNA, 19 nt, Artificial Sequence
  Description of Artificial Sequence: Synthetic oligonucleotide
gaugaugacauaaaauaca

SEQ ID NO: 3028885 - RNA, 19 nt, Artificial Sequence
  Description of Artificial Sequence: Synthetic oligonucleotide
agaaaaccacuauacucac

SEQ ID NO: 3028886 - RNA, 19 nt, Artificial Sequence
  Description of Artificial Sequence: Synthetic oligonucleotide
acuauacucacgcaaggug

SEQ ID NO: 3028887 - RNA, 19 nt, Artificial Sequence
  Description of Artificial Sequence: Synthetic oligonucleotide
auaaaucccucucccauag

SEQ ID NO: 3028888 - RNA, 19 nt, Artificial Sequence
  Description of Artificial Sequence: Synthetic oligonucleotide
aaccuugcuuccaagaguc

SEQ ID NO: 3028889 - RNA, 19 nt, Artificial Sequence
  Description of Artificial Sequence: Synthetic oligonucleotide
gcuaguaggucucacaggg

SEQ ID NO: 3028890 - RNA, 19 nt, Artificial Sequence
  Description of Artificial Sequence: Synthetic oligonucleotide
uucagaguucacuuuagac

SEQ ID NO: 3028891 - RNA, 19 nt, Artificial Sequence
  Description of Artificial Sequence: Synthetic oligonucleotide
ugucuuuaacaaccaaacc

SEQ ID NO: 3028892 - RNA, 19 nt, Artificial Sequence
  Description of Artificial Sequence: Synthetic oligonucleotide
uuauucagaguucacuuua

SEQ ID NO: 3028893 - RNA, 19 nt, Artificial Sequence
  Description of Artificial Sequence: Synthetic oligonucleotide
ugucucagugaaaaggcca

SEQ ID NO: 3028894 - RNA, 19 nt, Artificial Sequence
  Description of Artificial Sequence: Synthetic oligonucleotide
aaaccuugcuuccaagagu

SEQ ID NO: 3028895 - RNA, 19 nt, Artificial Sequence
  Description of Artificial Sequence: Synthetic oligonucleotide
uuauaagggcuccccaaag

SEQ ID NO: 3028896 - RNA, 19 nt, Artificial Sequence
  Description of Artificial Sequence: Synthetic oligonucleotide
uaguaggucucacagggca

SEQ ID NO: 3028897 - RNA, 19 nt, Artificial Sequence
  Description of Artificial Sequence: Synthetic oligonucleotide
uaucuaauugaagugauuu

SEQ ID NO: 3028898 - RNA, 19 nt, Artificial Sequence
  Description of Artificial Sequence: Synthetic oligonucleotide
ugguuauaaaucccucucc

SEQ ID NO: 3028899 - RNA, 19 nt, Artificial Sequence
  Description of Artificial Sequence: Synthetic oligonucleotide
uuuucuaaaaugacuccau

SEQ ID NO: 3028900 - RNA, 19 nt, Artificial Sequence
  Description of Artificial Sequence: Synthetic oligonucleotide
auguuaaugucucagugaa

SEQ ID NO: 3028901 - RNA, 19 nt, Artificial Sequence
  Description of Artificial Sequence: Synthetic oligonucleotide
auaucaaaguagaugauga

SEQ ID NO: 3028902 - RNA, 19 nt, Artificial Sequence
  Description of Artificial Sequence: Synthetic oligonucleotide
ugaaaaggccauuaucuaa

SEQ ID NO: 3028903 - RNA, 19 nt, Artificial Sequence
  Description of Artificial Sequence: Synthetic oligonucleotide
uauucagaguucacuuuag

SEQ ID NO: 3028904 - RNA, 19 nt, Artificial Sequence
  Description of Artificial Sequence: Synthetic oligonucleotide
uuagaccuuucugagauca

SEQ ID NO: 3028905 - RNA, 19 nt, Artificial Sequence
  Description of Artificial Sequence: Synthetic oligonucleotide
gucuuuaacaaccaaaccu

SEQ ID NO: 3028906 - RNA, 19 nt, Artificial Sequence
  Description of Artificial Sequence: Synthetic oligonucleotide
uaguggacugucuuuaaca

SEQ ID NO: 3028907 - RNA, 19 nt, Artificial Sequence
  Description of Artificial Sequence: Synthetic oligonucleotide
uucuaaaaugacuccauua

SEQ ID NO: 3028908 - RNA, 19 nt, Artificial Sequence
  Description of Artificial Sequence: Synthetic oligonucleotide
auaguggacugucuuuaac

SEQ ID NO: 3028909 - RNA, 19 nt, Artificial Sequence
  Description of Artificial Sequence: Synthetic oligonucleotide
aguagaugaugacauaaaa

SEQ ID NO: 3028910 - RNA, 19 nt, Artificial Sequence
  Description of Artificial Sequence: Synthetic oligonucleotide
aaccacuauacucacgcaa

SEQ ID NO: 3028911 - RNA, 19 nt, Artificial Sequence
  Description of Artificial Sequence: Synthetic oligonucleotide
uuucaaagaaaaccacuau

SEQ ID NO: 3028912 - RNA, 19 nt, Artificial Sequence
  Description of Artificial Sequence: Synthetic oligonucleotide
uuaaugucucagugaaaag

SEQ ID NO: 3028913 - RNA, 19 nt, Artificial Sequence
  Description of Artificial Sequence: Synthetic oligonucleotide
auacaaacuggagaggaag

SEQ ID NO: 3028914 - RNA, 19 nt, Artificial Sequence
  Description of Artificial Sequence: Synthetic oligonucleotide
aggucuaggaaggagcugg

SEQ ID NO: 3028915 - RNA, 19 nt, Artificial Sequence
  Description of Artificial Sequence: Synthetic oligonucleotide
ucacagggcauguuaaugu

SEQ ID NO: 3028916 - RNA, 19 nt, Artificial Sequence
  Description of Artificial Sequence: Synthetic oligonucleotide
caaaccuugcuuccaagag

SEQ ID NO: 3028917 - RNA, 19 nt, Artificial Sequence
  Description of Artificial Sequence: Synthetic oligonucleotide
augacauaaaauacaaacu

SEQ ID NO: 3028918 - RNA, 19 nt, Artificial Sequence
  Description of Artificial Sequence: Synthetic oligonucleotide
gaauuuucacugcauuuca

SEQ ID NO: 3028919 - RNA, 19 nt, Artificial Sequence
  Description of Artificial Sequence: Synthetic oligonucleotide
uauacucacgcaaggugga

SEQ ID NO: 3028920 - RNA, 19 nt, Artificial Sequence
  Description of Artificial Sequence: Synthetic oligonucleotide
cacuuuagaccuuucugag

SEQ ID NO: 3028921 - RNA, 19 nt, Artificial Sequence
  Description of Artificial Sequence: Synthetic oligonucleotide
agcuggggaauuuucacug

SEQ ID NO: 3028922 - RNA, 19 nt, Artificial Sequence
  Description of Artificial Sequence: Synthetic oligonucleotide
acugguuauaaaucccucu

SEQ ID NO: 3028923 - RNA, 19 nt, Artificial Sequence
  Description of Artificial Sequence: Synthetic oligonucleotide
gguuauaaaucccucuccc

SEQ ID NO: 3028924 - RNA, 19 nt, Artificial Sequence
  Description of Artificial Sequence: Synthetic oligonucleotide
aaucccucucccauagugg

SEQ ID NO: 3028925 - RNA, 19 nt, Artificial Sequence
  Description of Artificial Sequence: Synthetic oligonucleotide
auaagggcuccccaaaggu

SEQ ID NO: 3028926 - RNA, 19 nt, Artificial Sequence
  Description of Artificial Sequence: Synthetic oligonucleotide
cuuuaacaaccaaaccuug

SEQ ID NO: 3028927 - RNA, 19 nt, Artificial Sequence
  Description of Artificial Sequence: Synthetic oligonucleotide
aaacuggagaggaaggacu

SEQ ID NO: 3028928 - RNA, 19 nt, Artificial Sequence
  Description of Artificial Sequence: Synthetic oligonucleotide
acuuuauucagaguucacu

SEQ ID NO: 3028929 - RNA, 19 nt, Artificial Sequence
  Description of Artificial Sequence: Synthetic oligonucleotide
aaaauauaucaaaguagau

SEQ ID NO: 3028930 - RNA, 19 nt, Artificial Sequence
  Description of Artificial Sequence: Synthetic oligonucleotide
uuuauucagaguucacuuu

SEQ ID NO: 3028931 - RNA, 19 nt, Artificial Sequence
  Description of Artificial Sequence: Synthetic oligonucleotide
auuauaagggcuccccaaa

SEQ ID NO: 3028932 - RNA, 19 nt, Artificial Sequence
  Description of Artificial Sequence: Synthetic oligonucleotide
cugguuauaaaucccucuc

SEQ ID NO: 3028933 - RNA, 19 nt, Artificial Sequence
  Description of Artificial Sequence: Synthetic oligonucleotide
aacuuuauucagaguucac

SEQ ID NO: 3028934 - RNA, 19 nt, Artificial Sequence
  Description of Artificial Sequence: Synthetic oligonucleotide
aaaggucuaggaaggagcu

SEQ ID NO: 3028935 - RNA, 19 nt, Artificial Sequence
  Description of Artificial Sequence: Synthetic oligonucleotide
cauuaucuaauugaaguga

SEQ ID NO: 3028936 - RNA, 19 nt, Artificial Sequence
  Description of Artificial Sequence: Synthetic oligonucleotide
cuugcuuccaagagucuug

SEQ ID NO: 3028937 - RNA, 19 nt, Artificial Sequence
  Description of Artificial Sequence: Synthetic oligonucleotide
uccauuauaagggcucccc

SEQ ID NO: 3028938 - RNA, 19 nt, Artificial Sequence
  Description of Artificial Sequence: Synthetic oligonucleotide
acugcauuucaaagaaaac

SEQ ID NO: 3028939 - RNA, 19 nt, Artificial Sequence
  Description of Artificial Sequence: Synthetic oligonucleotide
auuucaaagaaaaccacua

SEQ ID NO: 3028940 - RNA, 19 nt, Artificial Sequence
  Description of Artificial Sequence: Synthetic oligonucleotide
aggacugguuauaaauccc

SEQ ID NO: 3028941 - RNA, 19 nt, Artificial Sequence
  Description of Artificial Sequence: Synthetic oligonucleotide
ucacgcaagguggaaauug

SEQ ID NO: 3028942 - RNA, 19 nt, Artificial Sequence
  Description of Artificial Sequence: Synthetic oligonucleotide
acuccauuauaagggcucc

SEQ ID NO: 3028943 - RNA, 19 nt, Artificial Sequence
  Description of Artificial Sequence: Synthetic oligonucleotide
cauguuaaugucucaguga

SEQ ID NO: 3028944 - RNA, 19 nt, Artificial Sequence
  Description of Artificial Sequence: Synthetic oligonucleotide
uucugagaucagcuaguag

SEQ ID NO: 3028945 - RNA, 19 nt, Artificial Sequence
  Description of Artificial Sequence: Synthetic oligonucleotide
gaaggacugguuauaaauc

SEQ ID NO: 3028946 - RNA, 19 nt, Artificial Sequence
  Description of Artificial Sequence: Synthetic oligonucleotide
aguggacugucuuuaacaa

SEQ ID NO: 3028947 - RNA, 19 nt, Artificial Sequence
  Description of Artificial Sequence: Synthetic oligonucleotide
cagcuaguaggucucacag

SEQ ID NO: 3028948 - RNA, 19 nt, Artificial Sequence
  Description of Artificial Sequence: Synthetic oligonucleotide
agcuaguaggucucacagg

SEQ ID NO: 3028949 - RNA, 19 nt, Artificial Sequence
  Description of Artificial Sequence: Synthetic oligonucleotide
ucagcuaguaggucucaca

SEQ ID NO: 3028950 - RNA, 19 nt, Artificial Sequence
  Description of Artificial Sequence: Synthetic oligonucleotide
gcuuccaagagucuuggcc

SEQ ID NO: 3028951 - RNA, 19 nt, Artificial Sequence
  Description of Artificial Sequence: Synthetic oligonucleotide
agaaaacuuuauucagagu

SEQ ID NO: 3028952 - RNA, 19 nt, Artificial Sequence
  Description of Artificial Sequence: Synthetic oligonucleotide
ucagugaaaaggccauuau

SEQ ID NO: 3028953 - RNA, 19 nt, Artificial Sequence
  Description of Artificial Sequence: Synthetic oligonucleotide
gaaaaccacuauacucacg

SEQ ID NO: 3028954 - RNA, 19 nt, Artificial Sequence
  Description of Artificial Sequence: Synthetic oligonucleotide
aagggcuccccaaaggucu

SEQ ID NO: 3028955 - RNA, 19 nt, Artificial Sequence
  Description of Artificial Sequence: Synthetic oligonucleotide
cagaguucacuuuagaccu

SEQ ID NO: 3028956 - RNA, 19 nt, Artificial Sequence
  Description of Artificial Sequence: Synthetic oligonucleotide
augucucagugaaaaggcc

SEQ ID NO: 3028957 - RNA, 19 nt, Artificial Sequence
  Description of Artificial Sequence: Synthetic oligonucleotide
accacuauacucacgcaag

SEQ ID NO: 3028958 - RNA, 19 nt, Artificial Sequence
  Description of Artificial Sequence: Synthetic oligonucleotide
aaaccacuauacucacgca

SEQ ID NO: 3028959 - RNA, 19 nt, Artificial Sequence
  Description of Artificial Sequence: Synthetic oligonucleotide
acuuuagaccuuucugaga

SEQ ID NO: 3028960 - RNA, 19 nt, Artificial Sequence
  Description of Artificial Sequence: Synthetic oligonucleotide
aacuggagaggaaggacug

SEQ ID NO: 3028961 - RNA, 19 nt, Artificial Sequence
  Description of Artificial Sequence: Synthetic oligonucleotide
aagagucuuggccuuugau

SEQ ID NO: 3028962 - RNA, 19 nt, Artificial Sequence
  Description of Artificial Sequence: Synthetic oligonucleotide
uuaucuaauugaagugauu

SEQ ID NO: 3028963 - RNA, 19 nt, Artificial Sequence
  Description of Artificial Sequence: Synthetic oligonucleotide
cacgcaagguggaaauugc

SEQ ID NO: 3028964 - RNA, 19 nt, Artificial Sequence
  Description of Artificial Sequence: Synthetic oligonucleotide
uaacaaccaaaccuugcuu

SEQ ID NO: 3028965 - RNA, 19 nt, Artificial Sequence
  Description of Artificial Sequence: Synthetic oligonucleotide
gagaucagcuaguaggucu

SEQ ID NO: 3028966 - RNA, 19 nt, Artificial Sequence
  Description of Artificial Sequence: Synthetic oligonucleotide
aaaaggccauuaucuaauu

SEQ ID NO: 3028967 - RNA, 19 nt, Artificial Sequence
  Description of Artificial Sequence: Synthetic oligonucleotide
auuaucuaauugaagugau

SEQ ID NO: 3028968 - RNA, 19 nt, Artificial Sequence
  Description of Artificial Sequence: Synthetic oligonucleotide
gcauguuaaugucucagug

SEQ ID NO: 3028969 - RNA, 19 nt, Artificial Sequence
  Description of Artificial Sequence: Synthetic oligonucleotide
aucuaauugaagugauuuu

SEQ ID NO: 3028970 - RNA, 19 nt, Artificial Sequence
  Description of Artificial Sequence: Synthetic oligonucleotide
gccauuaucuaauugaagu

SEQ ID NO: 3028971 - RNA, 19 nt, Artificial Sequence
  Description of Artificial Sequence: Synthetic oligonucleotide
cagugaaaaggccauuauc

SEQ ID NO: 3028972 - RNA, 19 nt, Artificial Sequence
  Description of Artificial Sequence: Synthetic oligonucleotide
aaggagcuggggaauuuuc

SEQ ID NO: 3028973 - RNA, 19 nt, Artificial Sequence
  Description of Artificial Sequence: Synthetic oligonucleotide
acugucuuuaacaaccaaa

SEQ ID NO: 3028974 - RNA, 19 nt, Artificial Sequence
  Description of Artificial Sequence: Synthetic oligonucleotide
aaccaaaccuugcuuccaa

SEQ ID NO: 3028975 - RNA, 19 nt, Artificial Sequence
  Description of Artificial Sequence: Synthetic oligonucleotide
aauacaaacuggagaggaa

SEQ ID NO: 3028976 - RNA, 19 nt, Artificial Sequence
  Description of Artificial Sequence: Synthetic oligonucleotide
auucagaguucacuuuaga

SEQ ID NO: 3028977 - RNA, 19 nt, Artificial Sequence
  Description of Artificial Sequence: Synthetic oligonucleotide
uaagggcuccccaaagguc

SEQ ID NO: 3028978 - RNA, 19 nt, Artificial Sequence
  Description of Artificial Sequence: Synthetic oligonucleotide
agaucagcuaguaggucuc

SEQ ID NO: 3028979 - RNA, 19 nt, Artificial Sequence
  Description of Artificial Sequence: Synthetic oligonucleotide
cuuuagaccuuucugagau

SEQ ID NO: 3028980 - RNA, 19 nt, Artificial Sequence
  Description of Artificial Sequence: Synthetic oligonucleotide
aaguagaugaugacauaaa

SEQ ID NO: 3028981 - RNA, 19 nt, Artificial Sequence
  Description of Artificial Sequence: Synthetic oligonucleotide
gacuccauuauaagggcuc

SEQ ID NO: 3028982 - RNA, 19 nt, Artificial Sequence
  Description of Artificial Sequence: Synthetic oligonucleotide
ggaauuuucacugcauuuc

SEQ ID NO: 3028983 - RNA, 19 nt, Artificial Sequence
  Description of Artificial Sequence: Synthetic oligonucleotide
uguuaaugucucagugaaa

SEQ ID NO: 3028984 - RNA, 19 nt, Artificial Sequence
  Description of Artificial Sequence: Synthetic oligonucleotide
caaacuggagaggaaggac

SEQ ID NO: 3028985 - RNA, 19 nt, Artificial Sequence
  Description of Artificial Sequence: Synthetic oligonucleotide
acuaaaaggcaaguucuaa

SEQ ID NO: 3028986 - RNA, 19 nt, Artificial Sequence
  Description of Artificial Sequence: Synthetic oligonucleotide
aucccucucccauagugga

SEQ ID NO: 3028987 - RNA, 19 nt, Artificial Sequence
  Description of Artificial Sequence: Synthetic oligonucleotide
ccuuucugagaucagcuag

SEQ ID NO: 3028988 - RNA, 19 nt, Artificial Sequence
  Description of Artificial Sequence: Synthetic oligonucleotide
acaaacuggagaggaagga

SEQ ID NO: 3028989 - RNA, 19 nt, Artificial Sequence
  Description of Artificial Sequence: Synthetic oligonucleotide
acucacgcaagguggaaau

SEQ ID NO: 3028990 - RNA, 19 nt, Artificial Sequence
  Description of Artificial Sequence: Synthetic oligonucleotide
cuaguaggucucacagggc

SEQ ID NO: 3028991 - RNA, 19 nt, Artificial Sequence
  Description of Artificial Sequence: Synthetic oligonucleotide
cauuauaagggcuccccaa

SEQ ID NO: 3028992 - RNA, 19 nt, Artificial Sequence
  Description of Artificial Sequence: Synthetic oligonucleotide
cuaggaaggagcuggggaa

SEQ ID NO: 3028993 - RNA, 19 nt, Artificial Sequence
  Description of Artificial Sequence: Synthetic oligonucleotide
cuuuauucagaguucacuu

SEQ ID NO: 3028994 - RNA, 19 nt, Artificial Sequence
  Description of Artificial Sequence: Synthetic oligonucleotide
accaaaccuugcuuccaag

SEQ ID NO: 3028995 - RNA, 19 nt, Artificial Sequence
  Description of Artificial Sequence: Synthetic oligonucleotide
cuuccaagagucuuggccu

SEQ ID NO: 3028996 - RNA, 19 nt, Artificial Sequence
  Description of Artificial Sequence: Synthetic oligonucleotide
gaaaaggccauuaucuaau

SEQ ID NO: 3028997 - RNA, 19 nt, Artificial Sequence
  Description of Artificial Sequence: Synthetic oligonucleotide
cucacagggcauguuaaug

SEQ ID NO: 3028998 - RNA, 19 nt, Artificial Sequence
  Description of Artificial Sequence: Synthetic oligonucleotide
acgcaagguggaaauugcc

SEQ ID NO: 3028999 - RNA, 19 nt, Artificial Sequence
  Description of Artificial Sequence: Synthetic oligonucleotide
aacuaaaaggcaaguucua

SEQ ID NO: 3029000 - RNA, 19 nt, Artificial Sequence
  Description of Artificial Sequence: Synthetic oligonucleotide
ucccauaguggacugucuu

SEQ ID NO: 3029001 - RNA, 19 nt, Artificial Sequence
  Description of Artificial Sequence: Synthetic oligonucleotide
uggggaauuuucacugcau

SEQ ID NO: 3029002 - RNA, 19 nt, Artificial Sequence
  Description of Artificial Sequence: Synthetic oligonucleotide
cacagggcauguuaauguc

SEQ ID NO: 3029003 - RNA, 19 nt, Artificial Sequence
  Description of Artificial Sequence: Synthetic oligonucleotide
ucucccauaguggacuguc

SEQ ID NO: 3029004 - RNA, 19 nt, Artificial Sequence
  Description of Artificial Sequence: Synthetic oligonucleotide
aucagcuaguaggucucac

SEQ ID NO: 3029005 - RNA, 19 nt, Artificial Sequence
  Description of Artificial Sequence: Synthetic oligonucleotide
caaagaaaaccacuauacu

SEQ ID NO: 3029006 - RNA, 19 nt, Artificial Sequence
  Description of Artificial Sequence: Synthetic oligonucleotide
gugaaaaggccauuaucua

SEQ ID NO: 3029007 - RNA, 19 nt, Artificial Sequence
  Description of Artificial Sequence: Synthetic oligonucleotide
uuuagaccuuucugagauc

SEQ ID NO: 3029008 - RNA, 19 nt, Artificial Sequence
  Description of Artificial Sequence: Synthetic oligonucleotide
acuggagaggaaggacugg

SEQ ID NO: 3029009 - RNA, 19 nt, Artificial Sequence
  Description of Artificial Sequence: Synthetic oligonucleotide
ggaaggacugguuauaaau

SEQ ID NO: 3029010 - RNA, 19 nt, Artificial Sequence
  Description of Artificial Sequence: Synthetic oligonucleotide
aaggucuaggaaggagcug

SEQ ID NO: 3029011 - RNA, 19 nt, Artificial Sequence
  Description of Artificial Sequence: Synthetic oligonucleotide
ucucacagggcauguuaau

SEQ ID NO: 3029012 - RNA, 19 nt, Artificial Sequence
  Description of Artificial Sequence: Synthetic oligonucleotide
ggagcuggggaauuuucac

SEQ ID NO: 3029013 - RNA, 19 nt, Artificial Sequence
  Description of Artificial Sequence: Synthetic oligonucleotide
uuucugagaucagcuagua

SEQ ID NO: 3029014 - RNA, 19 nt, Artificial Sequence
  Description of Artificial Sequence: Synthetic oligonucleotide
gacugguuauaaaucccuc

SEQ ID NO: 3029015 - RNA, 19 nt, Artificial Sequence
  Description of Artificial Sequence: Synthetic oligonucleotide
guaggucucacagggcaug

SEQ ID NO: 3029016 - RNA, 19 nt, Artificial Sequence
  Description of Artificial Sequence: Synthetic oligonucleotide
ccccaaaggucuaggaagg

SEQ ID NO: 3029017 - RNA, 19 nt, Artificial Sequence
  Description of Artificial Sequence: Synthetic oligonucleotide
caagguggaaauugccuaa

SEQ ID NO: 3029018 - RNA, 19 nt, Artificial Sequence
  Description of Artificial Sequence: Synthetic oligonucleotide
auauaucaaaguagaugau

SEQ ID NO: 3029019 - RNA, 19 nt, Artificial Sequence
  Description of Artificial Sequence: Synthetic oligonucleotide
uaaaucccucucccauagu

SEQ ID NO: 3029020 - RNA, 19 nt, Artificial Sequence
  Description of Artificial Sequence: Synthetic oligonucleotide
ugagaucagcuaguagguc

SEQ ID NO: 3029021 - RNA, 19 nt, Artificial Sequence
  Description of Artificial Sequence: Synthetic oligonucleotide
aggaaggacugguuauaaa

SEQ ID NO: 3029022 - RNA, 19 nt, Artificial Sequence
  Description of Artificial Sequence: Synthetic oligonucleotide
cugagaucagcuaguaggu

SEQ ID NO: 3029023 - RNA, 19 nt, Artificial Sequence
  Description of Artificial Sequence: Synthetic oligonucleotide
gagaggaaggacugguuau

SEQ ID NO: 3029024 - RNA, 19 nt, Artificial Sequence
  Description of Artificial Sequence: Synthetic oligonucleotide
cuuucugagaucagcuagu

SEQ ID NO: 3029025 - RNA, 19 nt, Artificial Sequence
  Description of Artificial Sequence: Synthetic oligonucleotide
accuuucugagaucagcua

SEQ ID NO: 3029026 - RNA, 19 nt, Artificial Sequence
  Description of Artificial Sequence: Synthetic oligonucleotide
gggcauguuaaugucucag

SEQ ID NO: 3029027 - RNA, 19 nt, Artificial Sequence
  Description of Artificial Sequence: Synthetic oligonucleotide
agguggaaauugccuaaaa

SEQ ID NO: 3029028 - RNA, 19 nt, Artificial Sequence
  Description of Artificial Sequence: Synthetic oligonucleotide
uacucacgcaagguggaaa

SEQ ID NO: 3029029 - RNA, 19 nt, Artificial Sequence
  Description of Artificial Sequence: Synthetic oligonucleotide
uggagaggaaggacugguu

SEQ ID NO: 3029030 - RNA, 19 nt, Artificial Sequence
  Description of Artificial Sequence: Synthetic oligonucleotide
aggccauuaucuaauugaa

SEQ ID NO: 3029031 - RNA, 19 nt, Artificial Sequence
  Description of Artificial Sequence: Synthetic oligonucleotide
cuggggaauuuucacugca

SEQ ID NO: 3029032 - RNA, 19 nt, Artificial Sequence
  Description of Artificial Sequence: Synthetic oligonucleotide
gacugucuuuaacaaccaa

SEQ ID NO: 3029033 - RNA, 19 nt, Artificial Sequence
  Description of Artificial Sequence: Synthetic oligonucleotide
ccacuauacucacgcaagg

SEQ ID NO: 3029034 - RNA, 19 nt, Artificial Sequence
  Description of Artificial Sequence: Synthetic oligonucleotide
uuccaagagucuuggccuu

SEQ ID NO: 3029035 - RNA, 19 nt, Artificial Sequence
  Description of Artificial Sequence: Synthetic oligonucleotide
agggcauguuaaugucuca

SEQ ID NO: 3029036 - RNA, 19 nt, Artificial Sequence
  Description of Artificial Sequence: Synthetic oligonucleotide
gagcuggggaauuuucacu

SEQ ID NO: 3029037 - RNA, 19 nt, Artificial Sequence
  Description of Artificial Sequence: Synthetic oligonucleotide
aguucacuuuagaccuuuc

SEQ ID NO: 3029038 - RNA, 19 nt, Artificial Sequence
  Description of Artificial Sequence: Synthetic oligonucleotide
gaccuuucugagaucagcu

SEQ ID NO: 3029039 - RNA, 19 nt, Artificial Sequence
  Description of Artificial Sequence: Synthetic oligonucleotide
gcaagguggaaauugccua

SEQ ID NO: 3029040 - RNA, 19 nt, Artificial Sequence
  Description of Artificial Sequence: Synthetic oligonucleotide
gaggaaggacugguuauaa

SEQ ID NO: 3029041 - RNA, 19 nt, Artificial Sequence
  Description of Artificial Sequence: Synthetic oligonucleotide
ucccucucccauaguggac

SEQ ID NO: 3029042 - RNA, 19 nt, Artificial Sequence
  Description of Artificial Sequence: Synthetic oligonucleotide
ggagaggaaggacugguua

SEQ ID NO: 3029043 - RNA, 19 nt, Artificial Sequence
  Description of Artificial Sequence: Synthetic oligonucleotide
ggccauuaucuaauugaag

SEQ ID NO: 3029044 - RNA, 19 nt, Artificial Sequence
  Description of Artificial Sequence: Synthetic oligonucleotide
caaaguagaugaugacaua

SEQ ID NO: 3029045 - RNA, 19 nt, Artificial Sequence
  Description of Artificial Sequence: Synthetic oligonucleotide
agaggaaggacugguuaua

SEQ ID NO: 3029046 - RNA, 19 nt, Artificial Sequence
  Description of Artificial Sequence: Synthetic oligonucleotide
ccaaaggucuaggaaggag

SEQ ID NO: 3029047 - RNA, 19 nt, Artificial Sequence
  Description of Artificial Sequence: Synthetic oligonucleotide
cucagugaaaaggccauua

SEQ ID NO: 3029048 - RNA, 19 nt, Artificial Sequence
  Description of Artificial Sequence: Synthetic oligonucleotide
cauaguggacugucuuuaa

SEQ ID NO: 3029049 - RNA, 19 nt, Artificial Sequence
  Description of Artificial Sequence: Synthetic oligonucleotide
cuccccaaaggucuaggaa

SEQ ID NO: 3029050 - RNA, 19 nt, Artificial Sequence
  Description of Artificial Sequence: Synthetic oligonucleotide
uaggucucacagggcaugu

SEQ ID NO: 3029051 - RNA, 19 nt, Artificial Sequence
  Description of Artificial Sequence: Synthetic oligonucleotide
aguaggucucacagggcau

SEQ ID NO: 3029052 - RNA, 19 nt, Artificial Sequence
  Description of Artificial Sequence: Synthetic oligonucleotide
ccaaaccuugcuuccaaga

SEQ ID NO: 3029053 - RNA, 19 nt, Artificial Sequence
  Description of Artificial Sequence: Synthetic oligonucleotide
ggucucacagggcauguua

SEQ ID NO: 3029054 - RNA, 19 nt, Artificial Sequence
  Description of Artificial Sequence: Synthetic oligonucleotide
gucucacagggcauguuaa

SEQ ID NO: 3029055 - RNA, 19 nt, Artificial Sequence
  Description of Artificial Sequence: Synthetic oligonucleotide
gaucagcuaguaggucuca

SEQ ID NO: 3029056 - RNA, 19 nt, Artificial Sequence
  Description of Artificial Sequence: Synthetic oligonucleotide
ucucagugaaaaggccauu

SEQ ID NO: 3029057 - RNA, 19 nt, Artificial Sequence
  Description of Artificial Sequence: Synthetic oligonucleotide
ggucuaggaaggagcuggg

SEQ ID NO: 3029058 - RNA, 19 nt, Artificial Sequence
  Description of Artificial Sequence: Synthetic oligonucleotide
gggaauuuucacugcauuu

SEQ ID NO: 3029059 - RNA, 19 nt, Artificial Sequence
  Description of Artificial Sequence: Synthetic oligonucleotide
ggcauguuaaugucucagu

SEQ ID NO: 3029060 - RNA, 19 nt, Artificial Sequence
  Description of Artificial Sequence: Synthetic oligonucleotide
caaccaaaccuugcuucca

SEQ ID NO: 3029061 - RNA, 19 nt, Artificial Sequence
  Description of Artificial Sequence: Synthetic oligonucleotide
auacucacgcaagguggaa

SEQ ID NO: 3029062 - RNA, 19 nt, Artificial Sequence
  Description of Artificial Sequence: Synthetic oligonucleotide
caagagucuuggccuuuga

SEQ ID NO: 3029063 - RNA, 19 nt, Artificial Sequence
  Description of Artificial Sequence: Synthetic oligonucleotide
ggacugguuauaaaucccu

SEQ ID NO: 3029064 - RNA, 19 nt, Artificial Sequence
  Description of Artificial Sequence: Synthetic oligonucleotide
gucucagugaaaaggccau

SEQ ID NO: 3029065 - RNA, 19 nt, Artificial Sequence
  Description of Artificial Sequence: Synthetic oligonucleotide
cacuauacucacgcaaggu

SEQ ID NO: 3029066 - RNA, 19 nt, Artificial Sequence
  Description of Artificial Sequence: Synthetic oligonucleotide
ccauuauaagggcucccca

SEQ ID NO: 3029067 - RNA, 19 nt, Artificial Sequence
  Description of Artificial Sequence: Synthetic oligonucleotide
aggaaggagcuggggaauu

SEQ ID NO: 3029068 - RNA, 19 nt, Artificial Sequence
  Description of Artificial Sequence: Synthetic oligonucleotide
cuggagaggaaggacuggu

SEQ ID NO: 3029069 - RNA, 19 nt, Artificial Sequence
  Description of Artificial Sequence: Synthetic oligonucleotide
ggacugucuuuaacaacca

SEQ ID NO: 3029070 - RNA, 19 nt, Artificial Sequence
  Description of Artificial Sequence: Synthetic oligonucleotide
agaguucacuuuagaccuu

SEQ ID NO: 3029071 - RNA, 19 nt, Artificial Sequence
  Description of Artificial Sequence: Synthetic oligonucleotide
accuugcuuccaagagucu

SEQ ID NO: 3029072 - RNA, 19 nt, Artificial Sequence
  Description of Artificial Sequence: Synthetic oligonucleotide
ccauaguggacugucuuua

SEQ ID NO: 3029073 - RNA, 19 nt, Artificial Sequence
  Description of Artificial Sequence: Synthetic oligonucleotide
cucccauaguggacugucu

SEQ ID NO: 3029074 - RNA, 19 nt, Artificial Sequence
  Description of Artificial Sequence: Synthetic oligonucleotide
ccucucccauaguggacug

SEQ ID NO: 3029075 - RNA, 19 nt, Artificial Sequence
  Description of Artificial Sequence: Synthetic oligonucleotide
aggucucacagggcauguu

SEQ ID NO: 3029076 - RNA, 19 nt, Artificial Sequence
  Description of Artificial Sequence: Synthetic oligonucleotide
cgcaagguggaaauugccu

SEQ ID NO: 3029077 - RNA, 19 nt, Artificial Sequence
  Description of Artificial Sequence: Synthetic oligonucleotide
agggcuccccaaaggucua

SEQ ID NO: 3029078 - RNA, 19 nt, Artificial Sequence
  Description of Artificial Sequence: Synthetic oligonucleotide
cccauaguggacugucuuu

SEQ ID NO: 3029079 - RNA, 19 nt, Artificial Sequence
  Description of Artificial Sequence: Synthetic oligonucleotide
cccaaaggucuaggaagga

SEQ ID NO: 3029080 - RNA, 19 nt, Artificial Sequence
  Description of Artificial Sequence: Synthetic oligonucleotide
cccucucccauaguggacu

SEQ ID NO: 3029081 - RNA, 19 nt, Artificial Sequence
  Description of Artificial Sequence: Synthetic oligonucleotide
ggaaggagcuggggaauuu

SEQ ID NO: 3029082 - RNA, 19 nt, Artificial Sequence
  Description of Artificial Sequence: Synthetic oligonucleotide
cucacgcaagguggaaauu

SEQ ID NO: 3029083 - RNA, 19 nt, Artificial Sequence
  Description of Artificial Sequence: Synthetic oligonucleotide
ccuugcuuccaagagucuu

SEQ ID NO: 3029084 - RNA, 19 nt, Artificial Sequence
  Description of Artificial Sequence: Synthetic oligonucleotide
cucucccauaguggacugu

SEQ ID NO: 3029085 - RNA, 19 nt, Artificial Sequence
  Description of Artificial Sequence: Synthetic oligonucleotide
aaaacaauagccuuguacu

SEQ ID NO: 3029086 - RNA, 19 nt, Artificial Sequence
  Description of Artificial Sequence: Synthetic oligonucleotide
auuacaaagccauacuucc

SEQ ID NO: 3029087 - RNA, 19 nt, Artificial Sequence
  Description of Artificial Sequence: Synthetic oligonucleotide
aaagaacaaaaccucggcc

SEQ ID NO: 3029088 - RNA, 19 nt, Artificial Sequence
  Description of Artificial Sequence: Synthetic oligonucleotide
uggauaaagaacaaaaccu

SEQ ID NO: 3029089 - RNA, 19 nt, Artificial Sequence
  Description of Artificial Sequence: Synthetic oligonucleotide
uugucuuguaacaaggugg

SEQ ID NO: 3029090 - RNA, 19 nt, Artificial Sequence
  Description of Artificial Sequence: Synthetic oligonucleotide
aaaaguccaaccuuguuga

SEQ ID NO: 3029091 - RNA, 19 nt, Artificial Sequence
  Description of Artificial Sequence: Synthetic oligonucleotide
aagaacaaaaccucggccu

SEQ ID NO: 3029092 - RNA, 19 nt, Artificial Sequence
  Description of Artificial Sequence: Synthetic oligonucleotide
aauuacaaagccauacuuc

SEQ ID NO: 3029093 - RNA, 19 nt, Artificial Sequence
  Description of Artificial Sequence: Synthetic oligonucleotide
gaaaaguccaaccuuguug

SEQ ID NO: 3029094 - RNA, 19 nt, Artificial Sequence
  Description of Artificial Sequence: Synthetic oligonucleotide
cuuaacuggauaaagaaca

SEQ ID NO: 3029095 - RNA, 19 nt, Artificial Sequence
  Description of Artificial Sequence: Synthetic oligonucleotide
aaaaccucggccuggcugg

SEQ ID NO: 3029096 - RNA, 19 nt, Artificial Sequence
  Description of Artificial Sequence: Synthetic oligonucleotide
gaaaacaauagccuuguac

SEQ ID NO: 3029097 - RNA, 19 nt, Artificial Sequence
  Description of Artificial Sequence: Synthetic oligonucleotide
ugugaaaaguccaaccuug

SEQ ID NO: 3029098 - RNA, 19 nt, Artificial Sequence
  Description of Artificial Sequence: Synthetic oligonucleotide
gaugaaacaggacaugggc

SEQ ID NO: 3029099 - RNA, 19 nt, Artificial Sequence
  Description of Artificial Sequence: Synthetic oligonucleotide
gauaaagaacaaaaccucg

SEQ ID NO: 3029100 - RNA, 19 nt, Artificial Sequence
  Description of Artificial Sequence: Synthetic oligonucleotide
uaaagaacaaaaccucggc

SEQ ID NO: 3029101 - RNA, 19 nt, Artificial Sequence
  Description of Artificial Sequence: Synthetic oligonucleotide
ugcugaaucacaauguccu

SEQ ID NO: 3029102 - RNA, 19 nt, Artificial Sequence
  Description of Artificial Sequence: Synthetic oligonucleotide
cacaccagcaccaauauug

SEQ ID NO: 3029103 - RNA, 19 nt, Artificial Sequence
  Description of Artificial Sequence: Synthetic oligonucleotide
ggugacagcaauuacaaag

SEQ ID NO: 3029104 - RNA, 19 nt, Artificial Sequence
  Description of Artificial Sequence: Synthetic oligonucleotide
caaacuccaucucugaugg

SEQ ID NO: 3029105 - RNA, 19 nt, Artificial Sequence
  Description of Artificial Sequence: Synthetic oligonucleotide
uggaguuuggaucaaacuc

SEQ ID NO: 3029106 - RNA, 19 nt, Artificial Sequence
  Description of Artificial Sequence: Synthetic oligonucleotide
ugaaacaggacaugggccc

SEQ ID NO: 3029107 - RNA, 19 nt, Artificial Sequence
  Description of Artificial Sequence: Synthetic oligonucleotide
aaugucgagagaugaaaca

SEQ ID NO: 3029108 - RNA, 19 nt, Artificial Sequence
  Description of Artificial Sequence: Synthetic oligonucleotide
uagccuuguacuuaacugg

SEQ ID NO: 3029109 - RNA, 19 nt, Artificial Sequence
  Description of Artificial Sequence: Synthetic oligonucleotide
agcaauuacaaagccauac

SEQ ID NO: 3029110 - RNA, 19 nt, Artificial Sequence
  Description of Artificial Sequence: Synthetic oligonucleotide
uacaaagccauacuucccc

SEQ ID NO: 3029111 - RNA, 19 nt, Artificial Sequence
  Description of Artificial Sequence: Synthetic oligonucleotide
ucugugaaaaguccaaccu

SEQ ID NO: 3029112 - RNA, 19 nt, Artificial Sequence
  Description of Artificial Sequence: Synthetic oligonucleotide
uguacuuaacuggauaaag

SEQ ID NO: 3029113 - RNA, 19 nt, Artificial Sequence
  Description of Artificial Sequence: Synthetic oligonucleotide
auagccuuguacuuaacug

SEQ ID NO: 3029114 - RNA, 19 nt, Artificial Sequence
  Description of Artificial Sequence: Synthetic oligonucleotide
acaaucuucaagcggaucu

SEQ ID NO: 3029115 - RNA, 19 nt, Artificial Sequence
  Description of Artificial Sequence: Synthetic oligonucleotide
uacuuaacuggauaaagaa

SEQ ID NO: 3029116 - RNA, 19 nt, Artificial Sequence
  Description of Artificial Sequence: Synthetic oligonucleotide
ugucgagagaugaaacagg

SEQ ID NO: 3029117 - RNA, 19 nt, Artificial Sequence
  Description of Artificial Sequence: Synthetic oligonucleotide
accaccucaccuuuaaagg

SEQ ID NO: 3029118 - RNA, 19 nt, Artificial Sequence
  Description of Artificial Sequence: Synthetic oligonucleotide
aaguccaaccuuguugacc

SEQ ID NO: 3029119 - RNA, 19 nt, Artificial Sequence
  Description of Artificial Sequence: Synthetic oligonucleotide
auaaagaacaaaaccucgg

SEQ ID NO: 3029120 - RNA, 19 nt, Artificial Sequence
  Description of Artificial Sequence: Synthetic oligonucleotide
uccaccucgguaaaggagc

SEQ ID NO: 3029121 - RNA, 19 nt, Artificial Sequence
  Description of Artificial Sequence: Synthetic oligonucleotide
gagaugaaacaggacaugg

SEQ ID NO: 3029122 - RNA, 19 nt, Artificial Sequence
  Description of Artificial Sequence: Synthetic oligonucleotide
auugucuuguaacaaggug

SEQ ID NO: 3029123 - RNA, 19 nt, Artificial Sequence
  Description of Artificial Sequence: Synthetic oligonucleotide
aauauugucgaugguggug

SEQ ID NO: 3029124 - RNA, 19 nt, Artificial Sequence
  Description of Artificial Sequence: Synthetic oligonucleotide
uucugugaaaaguccaacc

SEQ ID NO: 3029125 - RNA, 19 nt, Artificial Sequence
  Description of Artificial Sequence: Synthetic oligonucleotide
cuuguaacaagguggguug

SEQ ID NO: 3029126 - RNA, 19 nt, Artificial Sequence
  Description of Artificial Sequence: Synthetic oligonucleotide
uccauugucuuguaacaag

SEQ ID NO: 3029127 - RNA, 19 nt, Artificial Sequence
  Description of Artificial Sequence: Synthetic oligonucleotide
ucucugaugggauggaaug

SEQ ID NO: 3029128 - RNA, 19 nt, Artificial Sequence
  Description of Artificial Sequence: Synthetic oligonucleotide
ugggauggaaugucgagag

SEQ ID NO: 3029129 - RNA, 19 nt, Artificial Sequence
  Description of Artificial Sequence: Synthetic oligonucleotide
aagccauacuuccccgugc

SEQ ID NO: 3029130 - RNA, 19 nt, Artificial Sequence
  Description of Artificial Sequence: Synthetic oligonucleotide
caauuucugugaaaagucc

SEQ ID NO: 3029131 - RNA, 19 nt, Artificial Sequence
  Description of Artificial Sequence: Synthetic oligonucleotide
accagcaccaauauugucg

SEQ ID NO: 3029132 - RNA, 19 nt, Artificial Sequence
  Description of Artificial Sequence: Synthetic oligonucleotide
acuuaacuggauaaagaac

SEQ ID NO: 3029133 - RNA, 19 nt, Artificial Sequence
  Description of Artificial Sequence: Synthetic oligonucleotide
aggacaugggcccaauuuc

SEQ ID NO: 3029134 - RNA, 19 nt, Artificial Sequence
  Description of Artificial Sequence: Synthetic oligonucleotide
aacaagguggguuggaguu

SEQ ID NO: 3029135 - RNA, 19 nt, Artificial Sequence
  Description of Artificial Sequence: Synthetic oligonucleotide
aaagccauacuuccccgug

SEQ ID NO: 3029136 - RNA, 19 nt, Artificial Sequence
  Description of Artificial Sequence: Synthetic oligonucleotide
aguccaaccuuguugaccu

SEQ ID NO: 3029137 - RNA, 19 nt, Artificial Sequence
  Description of Artificial Sequence: Synthetic oligonucleotide
guccccacaaucuucaagc

SEQ ID NO: 3029138 - RNA, 19 nt, Artificial Sequence
  Description of Artificial Sequence: Synthetic oligonucleotide
acaauguccucauccauug

SEQ ID NO: 3029139 - RNA, 19 nt, Artificial Sequence
  Description of Artificial Sequence: Synthetic oligonucleotide
uugucgaugguggugacag

SEQ ID NO: 3029140 - RNA, 19 nt, Artificial Sequence
  Description of Artificial Sequence: Synthetic oligonucleotide
aacaaaaccucggccuggc

SEQ ID NO: 3029141 - RNA, 19 nt, Artificial Sequence
  Description of Artificial Sequence: Synthetic oligonucleotide
uuuaaagggccggaaaaca

SEQ ID NO: 3029142 - RNA, 19 nt, Artificial Sequence
  Description of Artificial Sequence: Synthetic oligonucleotide
aauuucugugaaaagucca

SEQ ID NO: 3029143 - RNA, 19 nt, Artificial Sequence
  Description of Artificial Sequence: Synthetic oligonucleotide
agggccggaaaacaauagc

SEQ ID NO: 3029144 - RNA, 19 nt, Artificial Sequence
  Description of Artificial Sequence: Synthetic oligonucleotide
uggaucaaacuccaucucu

SEQ ID NO: 3029145 - RNA, 19 nt, Artificial Sequence
  Description of Artificial Sequence: Synthetic oligonucleotide
gaucucgucauccugcuga

SEQ ID NO: 3029146 - RNA, 19 nt, Artificial Sequence
  Description of Artificial Sequence: Synthetic oligonucleotide
accaauauugucgauggug

SEQ ID NO: 3029147 - RNA, 19 nt, Artificial Sequence
  Description of Artificial Sequence: Synthetic oligonucleotide
aaucuucaagcggaucucg

SEQ ID NO: 3029148 - RNA, 19 nt, Artificial Sequence
  Description of Artificial Sequence: Synthetic oligonucleotide
gaugggauggaaugucgag

SEQ ID NO: 3029149 - RNA, 19 nt, Artificial Sequence
  Description of Artificial Sequence: Synthetic oligonucleotide
uuaaagggccggaaaacaa

SEQ ID NO: 3029150 - RNA, 19 nt, Artificial Sequence
  Description of Artificial Sequence: Synthetic oligonucleotide
uuaacuggauaaagaacaa

SEQ ID NO: 3029151 - RNA, 19 nt, Artificial Sequence
  Description of Artificial Sequence: Synthetic oligonucleotide
uuacaaagccauacuuccc

SEQ ID NO: 3029152 - RNA, 19 nt, Artificial Sequence
  Description of Artificial Sequence: Synthetic oligonucleotide
guuuggaucaaacuccauc

SEQ ID NO: 3029153 - RNA, 19 nt, Artificial Sequence
  Description of Artificial Sequence: Synthetic oligonucleotide
uggguuggaguuuggauca

SEQ ID NO: 3029154 - RNA, 19 nt, Artificial Sequence
  Description of Artificial Sequence: Synthetic oligonucleotide
agaacaaaaccucggccug

SEQ ID NO: 3029155 - RNA, 19 nt, Artificial Sequence
  Description of Artificial Sequence: Synthetic oligonucleotide
aaaguccaaccuuguugac

SEQ ID NO: 3029156 - RNA, 19 nt, Artificial Sequence
  Description of Artificial Sequence: Synthetic oligonucleotide
ucgguaaaggagcuucugc

SEQ ID NO: 3029157 - RNA, 19 nt, Artificial Sequence
  Description of Artificial Sequence: Synthetic oligonucleotide
ccaauauugucgauggugg

SEQ ID NO: 3029158 - RNA, 19 nt, Artificial Sequence
  Description of Artificial Sequence: Synthetic oligonucleotide
aaacaauagccuuguacuu

SEQ ID NO: 3029159 - RNA, 19 nt, Artificial Sequence
  Description of Artificial Sequence: Synthetic oligonucleotide
uccaucucugaugggaugg

SEQ ID NO: 3029160 - RNA, 19 nt, Artificial Sequence
  Description of Artificial Sequence: Synthetic oligonucleotide
acagcaauuacaaagccau

SEQ ID NO: 3029161 - RNA, 19 nt, Artificial Sequence
  Description of Artificial Sequence: Synthetic oligonucleotide
auccugcugaaucacaaug

SEQ ID NO: 3029162 - RNA, 19 nt, Artificial Sequence
  Description of Artificial Sequence: Synthetic oligonucleotide
augucgagagaugaaacag

SEQ ID NO: 3029163 - RNA, 19 nt, Artificial Sequence
  Description of Artificial Sequence: Synthetic oligonucleotide
caccaccucaccuuuaaag

SEQ ID NO: 3029164 - RNA, 19 nt, Artificial Sequence
  Description of Artificial Sequence: Synthetic oligonucleotide
acaaagccauacuuccccg

SEQ ID NO: 3029165 - RNA, 19 nt, Artificial Sequence
  Description of Artificial Sequence: Synthetic oligonucleotide
uuggaguuuggaucaaacu

SEQ ID NO: 3029166 - RNA, 19 nt, Artificial Sequence
  Description of Artificial Sequence: Synthetic oligonucleotide
uugaccugagugaccacag

SEQ ID NO: 3029167 - RNA, 19 nt, Artificial Sequence
  Description of Artificial Sequence: Synthetic oligonucleotide
gugacagcaauuacaaagc

SEQ ID NO: 3029168 - RNA, 19 nt, Artificial Sequence
  Description of Artificial Sequence: Synthetic oligonucleotide
gcaccaauauugucgaugg

SEQ ID NO: 3029169 - RNA, 19 nt, Artificial Sequence
  Description of Artificial Sequence: Synthetic oligonucleotide
uccugcugaaucacaaugu

SEQ ID NO: 3029170 - RNA, 19 nt, Artificial Sequence
  Description of Artificial Sequence: Synthetic oligonucleotide
ucuuguaacaagguggguu

SEQ ID NO: 3029171 - RNA, 19 nt, Artificial Sequence
  Description of Artificial Sequence: Synthetic oligonucleotide
cugagugaccacagcaucc

SEQ ID NO: 3029172 - RNA, 19 nt, Artificial Sequence
  Description of Artificial Sequence: Synthetic oligonucleotide
uguccccacaaucuucaag

SEQ ID NO: 3029173 - RNA, 19 nt, Artificial Sequence
  Description of Artificial Sequence: Synthetic oligonucleotide
uuguugaccugagugacca

SEQ ID NO: 3029174 - RNA, 19 nt, Artificial Sequence
  Description of Artificial Sequence: Synthetic oligonucleotide
cugcugaaucacaaugucc

SEQ ID NO: 3029175 - RNA, 19 nt, Artificial Sequence
  Description of Artificial Sequence: Synthetic oligonucleotide
uaaagggccggaaaacaau

SEQ ID NO: 3029176 - RNA, 19 nt, Artificial Sequence
  Description of Artificial Sequence: Synthetic oligonucleotide
agugaccacagcauccacc

SEQ ID NO: 3029177 - RNA, 19 nt, Artificial Sequence
  Description of Artificial Sequence: Synthetic oligonucleotide
ggaguuuggaucaaacucc

SEQ ID NO: 3029178 - RNA, 19 nt, Artificial Sequence
  Description of Artificial Sequence: Synthetic oligonucleotide
ucauccugcugaaucacaa

SEQ ID NO: 3029179 - RNA, 19 nt, Artificial Sequence
  Description of Artificial Sequence: Synthetic oligonucleotide
cuuguacuuaacuggauaa

SEQ ID NO: 3029180 - RNA, 19 nt, Artificial Sequence
  Description of Artificial Sequence: Synthetic oligonucleotide
cugaugggauggaaugucg

SEQ ID NO: 3029181 - RNA, 19 nt, Artificial Sequence
  Description of Artificial Sequence: Synthetic oligonucleotide
caccucaccuuuaaagggc

SEQ ID NO: 3029182 - RNA, 19 nt, Artificial Sequence
  Description of Artificial Sequence: Synthetic oligonucleotide
agaugaaacaggacauggg

SEQ ID NO: 3029183 - RNA, 19 nt, Artificial Sequence
  Description of Artificial Sequence: Synthetic oligonucleotide
acaauagccuuguacuuaa

SEQ ID NO: 3029184 - RNA, 19 nt, Artificial Sequence
  Description of Artificial Sequence: Synthetic oligonucleotide
aacaauagccuuguacuua

SEQ ID NO: 3029185 - RNA, 19 nt, Artificial Sequence
  Description of Artificial Sequence: Synthetic oligonucleotide
guggguuggaguuuggauc

SEQ ID NO: 3029186 - RNA, 19 nt, Artificial Sequence
  Description of Artificial Sequence: Synthetic oligonucleotide
cuuuaaagggccggaaaac

SEQ ID NO: 3029187 - RNA, 19 nt, Artificial Sequence
  Description of Artificial Sequence: Synthetic oligonucleotide
agcaccaauauugucgaug

SEQ ID NO: 3029188 - RNA, 19 nt, Artificial Sequence
  Description of Artificial Sequence: Synthetic oligonucleotide
cucgucauccugcugaauc

SEQ ID NO: 3029189 - RNA, 19 nt, Artificial Sequence
  Description of Artificial Sequence: Synthetic oligonucleotide
caaaaccucggccuggcug

SEQ ID NO: 3029190 - RNA, 19 nt, Artificial Sequence
  Description of Artificial Sequence: Synthetic oligonucleotide
accucgguaaaggagcuuc

SEQ ID NO: 3029191 - RNA, 19 nt, Artificial Sequence
  Description of Artificial Sequence: Synthetic oligonucleotide
uacuuccccgugcaggugc

SEQ ID NO: 3029192 - RNA, 19 nt, Artificial Sequence
  Description of Artificial Sequence: Synthetic oligonucleotide
gaaugucgagagaugaaac

SEQ ID NO: 3029193 - RNA, 19 nt, Artificial Sequence
  Description of Artificial Sequence: Synthetic oligonucleotide
uaacaagguggguuggagu

SEQ ID NO: 3029194 - RNA, 19 nt, Artificial Sequence
  Description of Artificial Sequence: Synthetic oligonucleotide
uccccacaaucuucaagcg

SEQ ID NO: 3029195 - RNA, 19 nt, Artificial Sequence
  Description of Artificial Sequence: Synthetic oligonucleotide
gaccugagugaccacagca

SEQ ID NO: 3029196 - RNA, 19 nt, Artificial Sequence
  Description of Artificial Sequence: Synthetic oligonucleotide
ccauugucuuguaacaagg

SEQ ID NO: 3029197 - RNA, 19 nt, Artificial Sequence
  Description of Artificial Sequence: Synthetic oligonucleotide
gaacaaaaccucggccugg

SEQ ID NO: 3029198 - RNA, 19 nt, Artificial Sequence
  Description of Artificial Sequence: Synthetic oligonucleotide
ccaauuucugugaaaaguc

SEQ ID NO: 3029199 - RNA, 19 nt, Artificial Sequence
  Description of Artificial Sequence: Synthetic oligonucleotide
ugaaaaguccaaccuuguu

SEQ ID NO: 3029200 - RNA, 19 nt, Artificial Sequence
  Description of Artificial Sequence: Synthetic oligonucleotide
auggaaugucgagagauga

SEQ ID NO: 3029201 - RNA, 19 nt, Artificial Sequence
  Description of Artificial Sequence: Synthetic oligonucleotide
ucuucaagcggaucucguc

SEQ ID NO: 3029202 - RNA, 19 nt, Artificial Sequence
  Description of Artificial Sequence: Synthetic oligonucleotide
gugaccacagcauccacca

SEQ ID NO: 3029203 - RNA, 19 nt, Artificial Sequence
  Description of Artificial Sequence: Synthetic oligonucleotide
uuucugugaaaaguccaac

SEQ ID NO: 3029204 - RNA, 19 nt, Artificial Sequence
  Description of Artificial Sequence: Synthetic oligonucleotide
ucugaugggauggaauguc

SEQ ID NO: 3029205 - RNA, 19 nt, Artificial Sequence
  Description of Artificial Sequence: Synthetic oligonucleotide
gauggaaugucgagagaug

SEQ ID NO: 3029206 - RNA, 19 nt, Artificial Sequence
  Description of Artificial Sequence: Synthetic oligonucleotide
cucaccuuuaaagggccgg

SEQ ID NO: 3029207 - RNA, 19 nt, Artificial Sequence
  Description of Artificial Sequence: Synthetic oligonucleotide
caugggcccaauuucugug

SEQ ID NO: 3029208 - RNA, 19 nt, Artificial Sequence
  Description of Artificial Sequence: Synthetic oligonucleotide
uuguaacaagguggguugg

SEQ ID NO: 3029209 - RNA, 19 nt, Artificial Sequence
  Description of Artificial Sequence: Synthetic oligonucleotide
guacuuaacuggauaaaga

SEQ ID NO: 3029210 - RNA, 19 nt, Artificial Sequence
  Description of Artificial Sequence: Synthetic oligonucleotide
uggaaugucgagagaugaa

SEQ ID NO: 3029211 - RNA, 19 nt, Artificial Sequence
  Description of Artificial Sequence: Synthetic oligonucleotide
guaacaagguggguuggag

SEQ ID NO: 3029212 - RNA, 19 nt, Artificial Sequence
  Description of Artificial Sequence: Synthetic oligonucleotide
accucaccuuuaaagggcc

SEQ ID NO: 3029213 - RNA, 19 nt, Artificial Sequence
  Description of Artificial Sequence: Synthetic oligonucleotide
aaacuccaucucugauggg

SEQ ID NO: 3029214 - RNA, 19 nt, Artificial Sequence
  Description of Artificial Sequence: Synthetic oligonucleotide
ucacaauguccucauccau

SEQ ID NO: 3029215 - RNA, 19 nt, Artificial Sequence
  Description of Artificial Sequence: Synthetic oligonucleotide
agagaugaaacaggacaug

SEQ ID NO: 3029216 - RNA, 19 nt, Artificial Sequence
  Description of Artificial Sequence: Synthetic oligonucleotide
cuucaagcggaucucguca

SEQ ID NO: 3029217 - RNA, 19 nt, Artificial Sequence
  Description of Artificial Sequence: Synthetic oligonucleotide
ucgagagaugaaacaggac

SEQ ID NO: 3029218 - RNA, 19 nt, Artificial Sequence
  Description of Artificial Sequence: Synthetic oligonucleotide
cuccaccucgguaaaggag

SEQ ID NO: 3029219 - RNA, 19 nt, Artificial Sequence
  Description of Artificial Sequence: Synthetic oligonucleotide
caagcggaucucgucaucc

SEQ ID NO: 3029220 - RNA, 19 nt, Artificial Sequence
  Description of Artificial Sequence: Synthetic oligonucleotide
aagggccggaaaacaauag

SEQ ID NO: 3029221 - RNA, 19 nt, Artificial Sequence
  Description of Artificial Sequence: Synthetic oligonucleotide
uuguacuuaacuggauaaa

SEQ ID NO: 3029222 - RNA, 19 nt, Artificial Sequence
  Description of Artificial Sequence: Synthetic oligonucleotide
uguaacaagguggguugga

SEQ ID NO: 3029223 - RNA, 19 nt, Artificial Sequence
  Description of Artificial Sequence: Synthetic oligonucleotide
gcuggaucacaccagcacc

SEQ ID NO: 3029224 - RNA, 19 nt, Artificial Sequence
  Description of Artificial Sequence: Synthetic oligonucleotide
acaugggcccaauuucugu

SEQ ID NO: 3029225 - RNA, 19 nt, Artificial Sequence
  Description of Artificial Sequence: Synthetic oligonucleotide
cuggcuggaucacaccagc

SEQ ID NO: 3029226 - RNA, 19 nt, Artificial Sequence
  Description of Artificial Sequence: Synthetic oligonucleotide
auuucugugaaaaguccaa

SEQ ID NO: 3029227 - RNA, 19 nt, Artificial Sequence
  Description of Artificial Sequence: Synthetic oligonucleotide
cacacguguccccacaauc

SEQ ID NO: 3029228 - RNA, 19 nt, Artificial Sequence
  Description of Artificial Sequence: Synthetic oligonucleotide
accuuuaaagggccggaaa

SEQ ID NO: 3029229 - RNA, 19 nt, Artificial Sequence
  Description of Artificial Sequence: Synthetic oligonucleotide
aaagggccggaaaacaaua

SEQ ID NO: 3029230 - RNA, 19 nt, Artificial Sequence
  Description of Artificial Sequence: Synthetic oligonucleotide
ccaccucaccuuuaaaggg

SEQ ID NO: 3029231 - RNA, 19 nt, Artificial Sequence
  Description of Artificial Sequence: Synthetic oligonucleotide
uccaaccuuguugaccuga

SEQ ID NO: 3029232 - RNA, 19 nt, Artificial Sequence
  Description of Artificial Sequence: Synthetic oligonucleotide
gucgagagaugaaacagga

SEQ ID NO: 3029233 - RNA, 19 nt, Artificial Sequence
  Description of Artificial Sequence: Synthetic oligonucleotide
ugaccugagugaccacagc

SEQ ID NO: 3029234 - RNA, 19 nt, Artificial Sequence
  Description of Artificial Sequence: Synthetic oligonucleotide
ggaucaaacuccaucucug

SEQ ID NO: 3029235 - RNA, 19 nt, Artificial Sequence
  Description of Artificial Sequence: Synthetic oligonucleotide
augggauggaaugucgaga

SEQ ID NO: 3029236 - RNA, 19 nt, Artificial Sequence
  Description of Artificial Sequence: Synthetic oligonucleotide
uucaagcggaucucgucau

SEQ ID NO: 3029237 - RNA, 19 nt, Artificial Sequence
  Description of Artificial Sequence: Synthetic oligonucleotide
cgagagaugaaacaggaca

SEQ ID NO: 3029238 - RNA, 19 nt, Artificial Sequence
  Description of Artificial Sequence: Synthetic oligonucleotide
agccauacuuccccgugca

SEQ ID NO: 3029239 - RNA, 19 nt, Artificial Sequence
  Description of Artificial Sequence: Synthetic oligonucleotide
agcggaucucgucauccug

SEQ ID NO: 3029240 - RNA, 19 nt, Artificial Sequence
  Description of Artificial Sequence: Synthetic oligonucleotide
gaguuuggaucaaacucca

SEQ ID NO: 3029241 - RNA, 19 nt, Artificial Sequence
  Description of Artificial Sequence: Synthetic oligonucleotide
cuggaucacaccagcacca

SEQ ID NO: 3029242 - RNA, 19 nt, Artificial Sequence
  Description of Artificial Sequence: Synthetic oligonucleotide
gggccggaaaacaauagcc

SEQ ID NO: 3029243 - RNA, 19 nt, Artificial Sequence
  Description of Artificial Sequence: Synthetic oligonucleotide
cugaaucacaauguccuca

SEQ ID NO: 3029244 - RNA, 19 nt, Artificial Sequence
  Description of Artificial Sequence: Synthetic oligonucleotide
ucaccuuuaaagggccgga

SEQ ID NO: 3029245 - RNA, 19 nt, Artificial Sequence
  Description of Artificial Sequence: Synthetic oligonucleotide
guggugacagcaauuacaa

SEQ ID NO: 3029246 - RNA, 19 nt, Artificial Sequence
  Description of Artificial Sequence: Synthetic oligonucleotide
gguggugacagcaauuaca

SEQ ID NO: 3029247 - RNA, 19 nt, Artificial Sequence
  Description of Artificial Sequence: Synthetic oligonucleotide
guccucauccauugucuug

SEQ ID NO: 3029248 - RNA, 19 nt, Artificial Sequence
  Description of Artificial Sequence: Synthetic oligonucleotide
ugguggugacagcaauuac

SEQ ID NO: 3029249 - RNA, 19 nt, Artificial Sequence
  Description of Artificial Sequence: Synthetic oligonucleotide
guugaccugagugaccaca

SEQ ID NO: 3029250 - RNA, 19 nt, Artificial Sequence
  Description of Artificial Sequence: Synthetic oligonucleotide
accucggccuggcuggauc

SEQ ID NO: 3029251 - RNA, 19 nt, Artificial Sequence
  Description of Artificial Sequence: Synthetic oligonucleotide
gucgaugguggugacagca

SEQ ID NO: 3029252 - RNA, 19 nt, Artificial Sequence
  Description of Artificial Sequence: Synthetic oligonucleotide
gacaugggcccaauuucug

SEQ ID NO: 3029253 - RNA, 19 nt, Artificial Sequence
  Description of Artificial Sequence: Synthetic oligonucleotide
ucgaugguggugacagcaa

SEQ ID NO: 3029254 - RNA, 19 nt, Artificial Sequence
  Description of Artificial Sequence: Synthetic oligonucleotide
cccacaaucuucaagcgga

SEQ ID NO: 3029255 - RNA, 19 nt, Artificial Sequence
  Description of Artificial Sequence: Synthetic oligonucleotide
acacguguccccacaaucu

SEQ ID NO: 3029256 - RNA, 19 nt, Artificial Sequence
  Description of Artificial Sequence: Synthetic oligonucleotide
caagguggguuggaguuug

SEQ ID NO: 3029257 - RNA, 19 nt, Artificial Sequence
  Description of Artificial Sequence: Synthetic oligonucleotide
caaucuucaagcggaucuc

SEQ ID NO: 3029258 - RNA, 19 nt, Artificial Sequence
  Description of Artificial Sequence: Synthetic oligonucleotide
ccggaaaacaauagccuug

SEQ ID NO: 3029259 - RNA, 19 nt, Artificial Sequence
  Description of Artificial Sequence: Synthetic oligonucleotide
augguggugacagcaauua

SEQ ID NO: 3029260 - RNA, 19 nt, Artificial Sequence
  Description of Artificial Sequence: Synthetic oligonucleotide
agccuuguacuuaacugga

SEQ ID NO: 3029261 - RNA, 19 nt, Artificial Sequence
  Description of Artificial Sequence: Synthetic oligonucleotide
uggcuggaucacaccagca

SEQ ID NO: 3029262 - RNA, 19 nt, Artificial Sequence
  Description of Artificial Sequence: Synthetic oligonucleotide
caauuacaaagccauacuu

SEQ ID NO: 3029263 - RNA, 19 nt, Artificial Sequence
  Description of Artificial Sequence: Synthetic oligonucleotide
ugggcccaauuucugugaa

SEQ ID NO: 3029264 - RNA, 19 nt, Artificial Sequence
  Description of Artificial Sequence: Synthetic oligonucleotide
ucaagcggaucucgucauc

SEQ ID NO: 3029265 - RNA, 19 nt, Artificial Sequence
  Description of Artificial Sequence: Synthetic oligonucleotide
ggcuggaucacaccagcac

SEQ ID NO: 3029266 - RNA, 19 nt, Artificial Sequence
  Description of Artificial Sequence: Synthetic oligonucleotide
uguccucauccauugucuu

SEQ ID NO: 3029267 - RNA, 19 nt, Artificial Sequence
  Description of Artificial Sequence: Synthetic oligonucleotide
uauugucgaugguggugac

SEQ ID NO: 3029268 - RNA, 19 nt, Artificial Sequence
  Description of Artificial Sequence: Synthetic oligonucleotide
uccacacguguccccacaa

SEQ ID NO: 3029269 - RNA, 19 nt, Artificial Sequence
  Description of Artificial Sequence: Synthetic oligonucleotide
ccauacuuccccgugcagg

SEQ ID NO: 3029270 - RNA, 19 nt, Artificial Sequence
  Description of Artificial Sequence: Synthetic oligonucleotide
cuccaucucugaugggaug

SEQ ID NO: 3029271 - RNA, 19 nt, Artificial Sequence
  Description of Artificial Sequence: Synthetic oligonucleotide
ggaaugucgagagaugaaa

SEQ ID NO: 3029272 - RNA, 19 nt, Artificial Sequence
  Description of Artificial Sequence: Synthetic oligonucleotide
gaaacaggacaugggccca

SEQ ID NO: 3029273 - RNA, 19 nt, Artificial Sequence
  Description of Artificial Sequence: Synthetic oligonucleotide
auccauugucuuguaacaa

SEQ ID NO: 3029274 - RNA, 19 nt, Artificial Sequence
  Description of Artificial Sequence: Synthetic oligonucleotide
gugcccuccaccucgguaa

SEQ ID NO: 3029275 - RNA, 19 nt, Artificial Sequence
  Description of Artificial Sequence: Synthetic oligonucleotide
cauacuuccccgugcaggu

SEQ ID NO: 3029276 - RNA, 19 nt, Artificial Sequence
  Description of Artificial Sequence: Synthetic oligonucleotide
acguguccccacaaucuuc

SEQ ID NO: 3029277 - RNA, 19 nt, Artificial Sequence
  Description of Artificial Sequence: Synthetic oligonucleotide
aucucugaugggauggaau

SEQ ID NO: 3029278 - RNA, 19 nt, Artificial Sequence
  Description of Artificial Sequence: Synthetic oligonucleotide
cucgguaaaggagcuucug

SEQ ID NO: 3029279 - RNA, 19 nt, Artificial Sequence
  Description of Artificial Sequence: Synthetic oligonucleotide
acaccagcaccaauauugu

SEQ ID NO: 3029280 - RNA, 19 nt, Artificial Sequence
  Description of Artificial Sequence: Synthetic oligonucleotide
uggugacagcaauuacaaa

SEQ ID NO: 3029281 - RNA, 19 nt, Artificial Sequence
  Description of Artificial Sequence: Synthetic oligonucleotide
cauugucuuguaacaaggu

SEQ ID NO: 3029282 - RNA, 19 nt, Artificial Sequence
  Description of Artificial Sequence: Synthetic oligonucleotide
gcaauuacaaagccauacu

SEQ ID NO: 3029283 - RNA, 19 nt, Artificial Sequence
  Description of Artificial Sequence: Synthetic oligonucleotide
acuuccccgugcaggugcc

SEQ ID NO: 3029284 - RNA, 19 nt, Artificial Sequence
  Description of Artificial Sequence: Synthetic oligonucleotide
ccugcugaaucacaauguc

SEQ ID NO: 3029285 - RNA, 19 nt, Artificial Sequence
  Description of Artificial Sequence: Synthetic oligonucleotide
auugucgaugguggugaca

SEQ ID NO: 3029286 - RNA, 19 nt, Artificial Sequence
  Description of Artificial Sequence: Synthetic oligonucleotide
caauagccuuguacuuaac

SEQ ID NO: 3029287 - RNA, 19 nt, Artificial Sequence
  Description of Artificial Sequence: Synthetic oligonucleotide
aaacaggacaugggcccaa

SEQ ID NO: 3029288 - RNA, 19 nt, Artificial Sequence
  Description of Artificial Sequence: Synthetic oligonucleotide
gagugaccacagcauccac

SEQ ID NO: 3029289 - RNA, 19 nt, Artificial Sequence
  Description of Artificial Sequence: Synthetic oligonucleotide
ccccacaaucuucaagcgg

SEQ ID NO: 3029290 - RNA, 19 nt, Artificial Sequence
  Description of Artificial Sequence: Synthetic oligonucleotide
ugaccacagcauccaccac

SEQ ID NO: 3029291 - RNA, 19 nt, Artificial Sequence
  Description of Artificial Sequence: Synthetic oligonucleotide
ccuuuaaagggccggaaaa

SEQ ID NO: 3029292 - RNA, 19 nt, Artificial Sequence
  Description of Artificial Sequence: Synthetic oligonucleotide
acaaaaccucggccuggcu

SEQ ID NO: 3029293 - RNA, 19 nt, Artificial Sequence
  Description of Artificial Sequence: Synthetic oligonucleotide
uguugaccugagugaccac

SEQ ID NO: 3029294 - RNA, 19 nt, Artificial Sequence
  Description of Artificial Sequence: Synthetic oligonucleotide
aagguggguuggaguuugg

SEQ ID NO: 3029295 - RNA, 19 nt, Artificial Sequence
  Description of Artificial Sequence: Synthetic oligonucleotide
gcccaauuucugugaaaag

SEQ ID NO: 3029296 - RNA, 19 nt, Artificial Sequence
  Description of Artificial Sequence: Synthetic oligonucleotide
ugcaggugcccuccaccuc

SEQ ID NO: 3029297 - RNA, 19 nt, Artificial Sequence
  Description of Artificial Sequence: Synthetic oligonucleotide
caccagcaccaauauuguc

SEQ ID NO: 3029298 - RNA, 19 nt, Artificial Sequence
  Description of Artificial Sequence: Synthetic oligonucleotide
cacaaucuucaagcggauc

SEQ ID NO: 3029299 - RNA, 19 nt, Artificial Sequence
  Description of Artificial Sequence: Synthetic oligonucleotide
ccugagugaccacagcauc

SEQ ID NO: 3029300 - RNA, 19 nt, Artificial Sequence
  Description of Artificial Sequence: Synthetic oligonucleotide
uggaucacaccagcaccaa

SEQ ID NO: 3029301 - RNA, 19 nt, Artificial Sequence
  Description of Artificial Sequence: Synthetic oligonucleotide
ggauggaaugucgagagau

SEQ ID NO: 3029302 - RNA, 19 nt, Artificial Sequence
  Description of Artificial Sequence: Synthetic oligonucleotide
ccaaccuuguugaccugag

SEQ ID NO: 3029303 - RNA, 19 nt, Artificial Sequence
  Description of Artificial Sequence: Synthetic oligonucleotide
ccagcaccaauauugucga

SEQ ID NO: 3029304 - RNA, 19 nt, Artificial Sequence
  Description of Artificial Sequence: Synthetic oligonucleotide
cacaauguccucauccauu

SEQ ID NO: 3029305 - RNA, 19 nt, Artificial Sequence
  Description of Artificial Sequence: Synthetic oligonucleotide
aacaggacaugggcccaau

SEQ ID NO: 3029306 - RNA, 19 nt, Artificial Sequence
  Description of Artificial Sequence: Synthetic oligonucleotide
ccuggcuggaucacaccag

SEQ ID NO: 3029307 - RNA, 19 nt, Artificial Sequence
  Description of Artificial Sequence: Synthetic oligonucleotide
caauauugucgaugguggu

SEQ ID NO: 3029308 - RNA, 19 nt, Artificial Sequence
  Description of Artificial Sequence: Synthetic oligonucleotide
gcugaaucacaauguccuc

SEQ ID NO: 3029309 - RNA, 19 nt, Artificial Sequence
  Description of Artificial Sequence: Synthetic oligonucleotide
cugugaaaaguccaaccuu

SEQ ID NO: 3029310 - RNA, 19 nt, Artificial Sequence
  Description of Artificial Sequence: Synthetic oligonucleotide
gcggaucucgucauccugc

SEQ ID NO: 3029311 - RNA, 19 nt, Artificial Sequence
  Description of Artificial Sequence: Synthetic oligonucleotide
caggugcccuccaccucgg

SEQ ID NO: 3029312 - RNA, 19 nt, Artificial Sequence
  Description of Artificial Sequence: Synthetic oligonucleotide
uuccccgugcaggugcccu

SEQ ID NO: 3029313 - RNA, 19 nt, Artificial Sequence
  Description of Artificial Sequence: Synthetic oligonucleotide
cccuccaccucgguaaagg

SEQ ID NO: 3029314 - RNA, 19 nt, Artificial Sequence
  Description of Artificial Sequence: Synthetic oligonucleotide
gccuggcuggaucacacca

SEQ ID NO: 3029315 - RNA, 19 nt, Artificial Sequence
  Description of Artificial Sequence: Synthetic oligonucleotide
agguggguuggaguuugga

SEQ ID NO: 3029316 - RNA, 19 nt, Artificial Sequence
  Description of Artificial Sequence: Synthetic oligonucleotide
gucauccugcugaaucaca

SEQ ID NO: 3029317 - RNA, 19 nt, Artificial Sequence
  Description of Artificial Sequence: Synthetic oligonucleotide
acaagguggguuggaguuu

SEQ ID NO: 3029318 - RNA, 19 nt, Artificial Sequence
  Description of Artificial Sequence: Synthetic oligonucleotide
cagcauccaccaccucacc

SEQ ID NO: 3029319 - RNA, 19 nt, Artificial Sequence
  Description of Artificial Sequence: Synthetic oligonucleotide
ugcccuccaccucgguaaa

SEQ ID NO: 3029320 - RNA, 19 nt, Artificial Sequence
  Description of Artificial Sequence: Synthetic oligonucleotide
auacuuccccgugcaggug

SEQ ID NO: 3029321 - RNA, 19 nt, Artificial Sequence
  Description of Artificial Sequence: Synthetic oligonucleotide
ucggccuggcuggaucaca

SEQ ID NO: 3029322 - RNA, 19 nt, Artificial Sequence
  Description of Artificial Sequence: Synthetic oligonucleotide
ccuuguacuuaacuggaua

SEQ ID NO: 3029323 - RNA, 19 nt, Artificial Sequence
  Description of Artificial Sequence: Synthetic oligonucleotide
caggacaugggcccaauuu

SEQ ID NO: 3029324 - RNA, 19 nt, Artificial Sequence
  Description of Artificial Sequence: Synthetic oligonucleotide
ccucaccuuuaaagggccg

SEQ ID NO: 3029325 - RNA, 19 nt, Artificial Sequence
  Description of Artificial Sequence: Synthetic oligonucleotide
cccaauuucugugaaaagu

SEQ ID NO: 3029326 - RNA, 19 nt, Artificial Sequence
  Description of Artificial Sequence: Synthetic oligonucleotide
acaggacaugggcccaauu

SEQ ID NO: 3029327 - RNA, 19 nt, Artificial Sequence
  Description of Artificial Sequence: Synthetic oligonucleotide
guccacacguguccccaca

SEQ ID NO: 3029328 - RNA, 19 nt, Artificial Sequence
  Description of Artificial Sequence: Synthetic oligonucleotide
aaaccucggccuggcugga

SEQ ID NO: 3029329 - RNA, 19 nt, Artificial Sequence
  Description of Artificial Sequence: Synthetic oligonucleotide
gugaaaaguccaaccuugu

SEQ ID NO: 3029330 - RNA, 19 nt, Artificial Sequence
  Description of Artificial Sequence: Synthetic oligonucleotide
gaugguggugacagcaauu

SEQ ID NO: 3029331 - RNA, 19 nt, Artificial Sequence
  Description of Artificial Sequence: Synthetic oligonucleotide
gguggguuggaguuuggau

SEQ ID NO: 3029332 - RNA, 19 nt, Artificial Sequence
  Description of Artificial Sequence: Synthetic oligonucleotide
caaagccauacuuccccgu

SEQ ID NO: 3029333 - RNA, 19 nt, Artificial Sequence
  Description of Artificial Sequence: Synthetic oligonucleotide
gugcaggugcccuccaccu

SEQ ID NO: 3029334 - RNA, 19 nt, Artificial Sequence
  Description of Artificial Sequence: Synthetic oligonucleotide
aguuuggaucaaacuccau

SEQ ID NO: 3029335 - RNA, 19 nt, Artificial Sequence
  Description of Artificial Sequence: Synthetic oligonucleotide
ggaucucgucauccugcug

SEQ ID NO: 3029336 - RNA, 19 nt, Artificial Sequence
  Description of Artificial Sequence: Synthetic oligonucleotide
cgugcaggugcccuccacc

SEQ ID NO: 3029337 - RNA, 19 nt, Artificial Sequence
  Description of Artificial Sequence: Synthetic oligonucleotide
guccaaccuuguugaccug

SEQ ID NO: 3029338 - RNA, 19 nt, Artificial Sequence
  Description of Artificial Sequence: Synthetic oligonucleotide
gccauacuuccccgugcag

SEQ ID NO: 3029339 - RNA, 19 nt, Artificial Sequence
  Description of Artificial Sequence: Synthetic oligonucleotide
uccccgugcaggugcccuc

SEQ ID NO: 3029340 - RNA, 19 nt, Artificial Sequence
  Description of Artificial Sequence: Synthetic oligonucleotide
cucugaugggauggaaugu

SEQ ID NO: 3029341 - RNA, 19 nt, Artificial Sequence
  Description of Artificial Sequence: Synthetic oligonucleotide
ggccggaaaacaauagccu

SEQ ID NO: 3029342 - RNA, 19 nt, Artificial Sequence
  Description of Artificial Sequence: Synthetic oligonucleotide
ggacaugggcccaauuucu

SEQ ID NO: 3029343 - RNA, 19 nt, Artificial Sequence
  Description of Artificial Sequence: Synthetic oligonucleotide
gggauggaaugucgagaga

SEQ ID NO: 3029344 - RNA, 19 nt, Artificial Sequence
  Description of Artificial Sequence: Synthetic oligonucleotide
gccggaaaacaauagccuu

SEQ ID NO: 3029345 - RNA, 19 nt, Artificial Sequence
  Description of Artificial Sequence: Synthetic oligonucleotide
ucucgucauccugcugaau

SEQ ID NO: 3029346 - RNA, 19 nt, Artificial Sequence
  Description of Artificial Sequence: Synthetic oligonucleotide
cauccugcugaaucacaau

SEQ ID NO: 3029347 - RNA, 19 nt, Artificial Sequence
  Description of Artificial Sequence: Synthetic oligonucleotide
caccuuuaaagggccggaa

SEQ ID NO: 3029348 - RNA, 19 nt, Artificial Sequence
  Description of Artificial Sequence: Synthetic oligonucleotide
ggccuggcuggaucacacc

SEQ ID NO: 3029349 - RNA, 19 nt, Artificial Sequence
  Description of Artificial Sequence: Synthetic oligonucleotide
ggaaaacaauagccuugua

SEQ ID NO: 3029350 - RNA, 19 nt, Artificial Sequence
  Description of Artificial Sequence: Synthetic oligonucleotide
cuuccccgugcaggugccc

SEQ ID NO: 3029351 - RNA, 19 nt, Artificial Sequence
  Description of Artificial Sequence: Synthetic oligonucleotide
ggugcccuccaccucggua

SEQ ID NO: 3029352 - RNA, 19 nt, Artificial Sequence
  Description of Artificial Sequence: Synthetic oligonucleotide
cucggccuggcuggaucac

SEQ ID NO: 3029353 - RNA, 19 nt, Artificial Sequence
  Description of Artificial Sequence: Synthetic oligonucleotide
gguuggaguuuggaucaaa

SEQ ID NO: 3029354 - RNA, 19 nt, Artificial Sequence
  Description of Artificial Sequence: Synthetic oligonucleotide
caaccuuguugaccugagu

SEQ ID NO: 3029355 - RNA, 19 nt, Artificial Sequence
  Description of Artificial Sequence: Synthetic oligonucleotide
caauguccucauccauugu

SEQ ID NO: 3029356 - RNA, 19 nt, Artificial Sequence
  Description of Artificial Sequence: Synthetic oligonucleotide
aaccucggccuggcuggau

SEQ ID NO: 3029357 - RNA, 19 nt, Artificial Sequence
  Description of Artificial Sequence: Synthetic oligonucleotide
ccuccaccucgguaaagga

SEQ ID NO: 3029358 - RNA, 19 nt, Artificial Sequence
  Description of Artificial Sequence: Synthetic oligonucleotide
guguccccacaaucuucaa

SEQ ID NO: 3029359 - RNA, 19 nt, Artificial Sequence
  Description of Artificial Sequence: Synthetic oligonucleotide
cacguguccccacaaucuu

SEQ ID NO: 3029360 - RNA, 19 nt, Artificial Sequence
  Description of Artificial Sequence: Synthetic oligonucleotide
aggugcccuccaccucggu

SEQ ID NO: 3029361 - RNA, 19 nt, Artificial Sequence
  Description of Artificial Sequence: Synthetic oligonucleotide
gucuuguaacaaggugggu

SEQ ID NO: 3029362 - RNA, 19 nt, Artificial Sequence
  Description of Artificial Sequence: Synthetic oligonucleotide
gggcccaauuucugugaaa

SEQ ID NO: 3029363 - RNA, 19 nt, Artificial Sequence
  Description of Artificial Sequence: Synthetic oligonucleotide
caccaauauugucgauggu

SEQ ID NO: 3029364 - RNA, 19 nt, Artificial Sequence
  Description of Artificial Sequence: Synthetic oligonucleotide
cggccuggcuggaucacac

SEQ ID NO: 3029365 - RNA, 19 nt, Artificial Sequence
  Description of Artificial Sequence: Synthetic oligonucleotide
ggaucacaccagcaccaau

SEQ ID NO: 3029366 - RNA, 19 nt, Artificial Sequence
  Description of Artificial Sequence: Synthetic oligonucleotide
cggaaaacaauagccuugu

SEQ ID NO: 3029367 - RNA, 19 nt, Artificial Sequence
  Description of Artificial Sequence: Synthetic oligonucleotide
auccaccaccucaccuuua

SEQ ID NO: 3029368 - RNA, 19 nt, Artificial Sequence
  Description of Artificial Sequence: Synthetic oligonucleotide
ccccgugcaggugcccucc

SEQ ID NO: 3029369 - RNA, 19 nt, Artificial Sequence
  Description of Artificial Sequence: Synthetic oligonucleotide
ccgugcaggugcccuccac

SEQ ID NO: 3029370 - RNA, 19 nt, Artificial Sequence
  Description of Artificial Sequence: Synthetic oligonucleotide
gcccuccaccucgguaaag

SEQ ID NO: 3029371 - RNA, 19 nt, Artificial Sequence
  Description of Artificial Sequence: Synthetic oligonucleotide
ccucgguaaaggagcuucu

SEQ ID NO: 3029372 - RNA, 19 nt, Artificial Sequence
  Description of Artificial Sequence: Synthetic oligonucleotide
ccaccucgguaaaggagcu

SEQ ID NO: 3029373 - RNA, 19 nt, Artificial Sequence
  Description of Artificial Sequence: Synthetic oligonucleotide
ggguuggaguuuggaucaa

SEQ ID NO: 3029374 - RNA, 19 nt, Artificial Sequence
  Description of Artificial Sequence: Synthetic oligonucleotide
cagcaccaauauugucgau

SEQ ID NO: 3029375 - RNA, 19 nt, Artificial Sequence
  Description of Artificial Sequence: Synthetic oligonucleotide
ccacaaucuucaagcggau

SEQ ID NO: 3029376 - RNA, 19 nt, Artificial Sequence
  Description of Artificial Sequence: Synthetic oligonucleotide
gccuuguacuuaacuggau

SEQ ID NO: 3029377 - RNA, 19 nt, Artificial Sequence
  Description of Artificial Sequence: Synthetic oligonucleotide
ccaccaccucaccuuuaaa

SEQ ID NO: 3029378 - RNA, 19 nt, Artificial Sequence
  Description of Artificial Sequence: Synthetic oligonucleotide
cgaugguggugacagcaau

SEQ ID NO: 3029379 - RNA, 19 nt, Artificial Sequence
  Description of Artificial Sequence: Synthetic oligonucleotide
cggaucucgucauccugcu

SEQ ID NO: 3029380 - RNA, 19 nt, Artificial Sequence
  Description of Artificial Sequence: Synthetic oligonucleotide
ccacacguguccccacaau

SEQ ID NO: 3029381 - RNA, 19 nt, Artificial Sequence
  Description of Artificial Sequence: Synthetic oligonucleotide
caccucgguaaaggagcuu

SEQ ID NO: 3029382 - RNA, 19 nt, Artificial Sequence
  Description of Artificial Sequence: Synthetic oligonucleotide
cccgugcaggugcccucca

SEQ ID NO: 3029383 - RNA, 19 nt, Artificial Sequence
  Description of Artificial Sequence: Synthetic oligonucleotide
aagguucucgaacuucugc

SEQ ID NO: 3029384 - RNA, 19 nt, Artificial Sequence
  Description of Artificial Sequence: Synthetic oligonucleotide
agguucucgaacuucugcc

SEQ ID NO: 3029385 - RNA, 19 nt, Artificial Sequence
  Description of Artificial Sequence: Synthetic oligonucleotide
uggagcucaucuuaggcgg

SEQ ID NO: 3029386 - RNA, 19 nt, Artificial Sequence
  Description of Artificial Sequence: Synthetic oligonucleotide
aaaacaggaucgugggcgg

SEQ ID NO: 3029387 - RNA, 19 nt, Artificial Sequence
  Description of Artificial Sequence: Synthetic oligonucleotide
aggagcgcgagcuaacugc

SEQ ID NO: 3029388 - RNA, 19 nt, Artificial Sequence
  Description of Artificial Sequence: Synthetic oligonucleotide
ucgaacuucugccucagug

SEQ ID NO: 3029389 - RNA, 19 nt, Artificial Sequence
  Description of Artificial Sequence: Synthetic oligonucleotide
cauucauggccacauaggc

SEQ ID NO: 3029390 - RNA, 19 nt, Artificial Sequence
  Description of Artificial Sequence: Synthetic oligonucleotide
agguccucggcucuuaggg

SEQ ID NO: 3029391 - RNA, 19 nt, Artificial Sequence
  Description of Artificial Sequence: Synthetic oligonucleotide
ucaucuuaggcggaggagc

SEQ ID NO: 3029392 - RNA, 19 nt, Artificial Sequence
  Description of Artificial Sequence: Synthetic oligonucleotide
ucuaggagguggcugaggu

SEQ ID NO: 3029393 - RNA, 19 nt, Artificial Sequence
  Description of Artificial Sequence: Synthetic oligonucleotide
cucauucauggccacauag

SEQ ID NO: 3029394 - RNA, 19 nt, Artificial Sequence
  Description of Artificial Sequence: Synthetic oligonucleotide
cuggagcucaucuuaggcg

SEQ ID NO: 3029395 - RNA, 19 nt, Artificial Sequence
  Description of Artificial Sequence: Synthetic oligonucleotide
uugguagaucugcucaugc

SEQ ID NO: 3029396 - RNA, 19 nt, Artificial Sequence
  Description of Artificial Sequence: Synthetic oligonucleotide
auucauggccacauaggcc

SEQ ID NO: 3029397 - RNA, 19 nt, Artificial Sequence
  Description of Artificial Sequence: Synthetic oligonucleotide
gaacuucugccucagugug

SEQ ID NO: 3029398 - RNA, 19 nt, Artificial Sequence
  Description of Artificial Sequence: Synthetic oligonucleotide
cugacauccugcucuagcc

SEQ ID NO: 3029399 - RNA, 19 nt, Artificial Sequence
  Description of Artificial Sequence: Synthetic oligonucleotide
guagaucugcucaugcugg

SEQ ID NO: 3029400 - RNA, 19 nt, Artificial Sequence
  Description of Artificial Sequence: Synthetic oligonucleotide
aacaggaucgugggcgggc

SEQ ID NO: 3029401 - RNA, 19 nt, Artificial Sequence
  Description of Artificial Sequence: Synthetic oligonucleotide
ucuuaggcggaggagcgcg

SEQ ID NO: 3029402 - RNA, 19 nt, Artificial Sequence
  Description of Artificial Sequence: Synthetic oligonucleotide
ucuuagggauggaucuggg

SEQ ID NO: 3029403 - RNA, 19 nt, Artificial Sequence
  Description of Artificial Sequence: Synthetic oligonucleotide
caucuuaggcggaggagcg

SEQ ID NO: 3029404 - RNA, 19 nt, Artificial Sequence
  Description of Artificial Sequence: Synthetic oligonucleotide
cugcucuagccucugaccg

SEQ ID NO: 3029405 - RNA, 19 nt, Artificial Sequence
  Description of Artificial Sequence: Synthetic oligonucleotide
ugcagccgcucauucaugg

SEQ ID NO: 3029406 - RNA, 19 nt, Artificial Sequence
  Description of Artificial Sequence: Synthetic oligonucleotide
guguccuuggcucuaggag

SEQ ID NO: 3029407 - RNA, 19 nt, Artificial Sequence
  Description of Artificial Sequence: Synthetic oligonucleotide
cuuagggauggaucugggg

SEQ ID NO: 3029408 - RNA, 19 nt, Artificial Sequence
  Description of Artificial Sequence: Synthetic oligonucleotide
ucaguguguccuuugccug

SEQ ID NO: 3029409 - RNA, 19 nt, Artificial Sequence
  Description of Artificial Sequence: Synthetic oligonucleotide
ugugggaggagccgggcgc

SEQ ID NO: 3029410 - RNA, 19 nt, Artificial Sequence
  Description of Artificial Sequence: Synthetic oligonucleotide
aucugcuccacugugggag

SEQ ID NO: 3029411 - RNA, 19 nt, Artificial Sequence
  Description of Artificial Sequence: Synthetic oligonucleotide
ucuuccggggccagggcgg

SEQ ID NO: 3029412 - RNA, 19 nt, Artificial Sequence
  Description of Artificial Sequence: Synthetic oligonucleotide
aagguccucggcucuuagg

SEQ ID NO: 3029413 - RNA, 19 nt, Artificial Sequence
  Description of Artificial Sequence: Synthetic oligonucleotide
ugggcuucaagguccucgg

SEQ ID NO: 3029414 - RNA, 19 nt, Artificial Sequence
  Description of Artificial Sequence: Synthetic oligonucleotide
ucaugcugggcuucaaggu

SEQ ID NO: 3029415 - RNA, 19 nt, Artificial Sequence
  Description of Artificial Sequence: Synthetic oligonucleotide
agcgcgagcuaacugcagg

SEQ ID NO: 3029416 - RNA, 19 nt, Artificial Sequence
  Description of Artificial Sequence: Synthetic oligonucleotide
uagaucugcucaugcuggg

SEQ ID NO: 3029417 - RNA, 19 nt, Artificial Sequence
  Description of Artificial Sequence: Synthetic oligonucleotide
uccuuugccugcugcagcc

SEQ ID NO: 3029418 - RNA, 19 nt, Artificial Sequence
  Description of Artificial Sequence: Synthetic oligonucleotide
ugcucuagccucugaccgg

SEQ ID NO: 3029419 - RNA, 19 nt, Artificial Sequence
  Description of Artificial Sequence: Synthetic oligonucleotide
augcugggcuucaaggucc

SEQ ID NO: 3029420 - RNA, 19 nt, Artificial Sequence
  Description of Artificial Sequence: Synthetic oligonucleotide
ucuguugguagaucugcuc

SEQ ID NO: 3029421 - RNA, 19 nt, Artificial Sequence
  Description of Artificial Sequence: Synthetic oligonucleotide
cucuuagggauggaucugg

SEQ ID NO: 3029422 - RNA, 19 nt, Artificial Sequence
  Description of Artificial Sequence: Synthetic oligonucleotide
ucucgcacguccuccagga

SEQ ID NO: 3029423 - RNA, 19 nt, Artificial Sequence
  Description of Artificial Sequence: Synthetic oligonucleotide
ugacauccugcucuagccu

SEQ ID NO: 3029424 - RNA, 19 nt, Artificial Sequence
  Description of Artificial Sequence: Synthetic oligonucleotide
ugccgaagguucucgaacu

SEQ ID NO: 3029425 - RNA, 19 nt, Artificial Sequence
  Description of Artificial Sequence: Synthetic oligonucleotide
accacgcguuucuugcccc

SEQ ID NO: 3029426 - RNA, 19 nt, Artificial Sequence
  Description of Artificial Sequence: Synthetic oligonucleotide
uucucgaacuucugccuca

SEQ ID NO: 3029427 - RNA, 19 nt, Artificial Sequence
  Description of Artificial Sequence: Synthetic oligonucleotide
ggaucugcuccacuguggg

SEQ ID NO: 3029428 - RNA, 19 nt, Artificial Sequence
  Description of Artificial Sequence: Synthetic oligonucleotide
gacauccugcucuagccuc

SEQ ID NO: 3029429 - RNA, 19 nt, Artificial Sequence
  Description of Artificial Sequence: Synthetic oligonucleotide
ugguagaucugcucaugcu

SEQ ID NO: 3029430 - RNA, 19 nt, Artificial Sequence
  Description of Artificial Sequence: Synthetic oligonucleotide
agaucugcucaugcugggc

SEQ ID NO: 3029431 - RNA, 19 nt, Artificial Sequence
  Description of Artificial Sequence: Synthetic oligonucleotide
uccacugugggaggagccg

SEQ ID NO: 3029432 - RNA, 19 nt, Artificial Sequence
  Description of Artificial Sequence: Synthetic oligonucleotide
cuuggcucuaggagguggc

SEQ ID NO: 3029433 - RNA, 19 nt, Artificial Sequence
  Description of Artificial Sequence: Synthetic oligonucleotide
uguccuuugccugcugcag

SEQ ID NO: 3029434 - RNA, 19 nt, Artificial Sequence
  Description of Artificial Sequence: Synthetic oligonucleotide
uguugguagaucugcucau

SEQ ID NO: 3029435 - RNA, 19 nt, Artificial Sequence
  Description of Artificial Sequence: Synthetic oligonucleotide
caugcugggcuucaagguc

SEQ ID NO: 3029436 - RNA, 19 nt, Artificial Sequence
  Description of Artificial Sequence: Synthetic oligonucleotide
cuguugguagaucugcuca

SEQ ID NO: 3029437 - RNA, 19 nt, Artificial Sequence
  Description of Artificial Sequence: Synthetic oligonucleotide
cugggcuucaagguccucg

SEQ ID NO: 3029438 - RNA, 19 nt, Artificial Sequence
  Description of Artificial Sequence: Synthetic oligonucleotide
cagccgcucauucauggcc

SEQ ID NO: 3029439 - RNA, 19 nt, Artificial Sequence
  Description of Artificial Sequence: Synthetic oligonucleotide
ucgcacguccuccaggauc

SEQ ID NO: 3029440 - RNA, 19 nt, Artificial Sequence
  Description of Artificial Sequence: Synthetic oligonucleotide
gucuuccggggccagggcg

SEQ ID NO: 3029441 - RNA, 19 nt, Artificial Sequence
  Description of Artificial Sequence: Synthetic oligonucleotide
caguguguccuuugccugc

SEQ ID NO: 3029442 - RNA, 19 nt, Artificial Sequence
  Description of Artificial Sequence: Synthetic oligonucleotide
ucuagccucugaccggccu

SEQ ID NO: 3029443 - RNA, 19 nt, Artificial Sequence
  Description of Artificial Sequence: Synthetic oligonucleotide
aaacaggaucgugggcggg

SEQ ID NO: 3029444 - RNA, 19 nt, Artificial Sequence
  Description of Artificial Sequence: Synthetic oligonucleotide
aggaucgugggcgggcgcc

SEQ ID NO: 3029445 - RNA, 19 nt, Artificial Sequence
  Description of Artificial Sequence: Synthetic oligonucleotide
cugccgaagguucucgaac

SEQ ID NO: 3029446 - RNA, 19 nt, Artificial Sequence
  Description of Artificial Sequence: Synthetic oligonucleotide
uucugccucaguguguccu

SEQ ID NO: 3029447 - RNA, 19 nt, Artificial Sequence
  Description of Artificial Sequence: Synthetic oligonucleotide
ggucaccuggcugacaucc

SEQ ID NO: 3029448 - RNA, 19 nt, Artificial Sequence
  Description of Artificial Sequence: Synthetic oligonucleotide
cugaccggccugccgaagg

SEQ ID NO: 3029449 - RNA, 19 nt, Artificial Sequence
  Description of Artificial Sequence: Synthetic oligonucleotide
uuugccugcugcagccgcu

SEQ ID NO: 3029450 - RNA, 19 nt, Artificial Sequence
  Description of Artificial Sequence: Synthetic oligonucleotide
gaggagcgcgagcuaacug

SEQ ID NO: 3029451 - RNA, 19 nt, Artificial Sequence
  Description of Artificial Sequence: Synthetic oligonucleotide
guucucgaacuucugccuc

SEQ ID NO: 3029452 - RNA, 19 nt, Artificial Sequence
  Description of Artificial Sequence: Synthetic oligonucleotide
aucuuaggcggaggagcgc

SEQ ID NO: 3029453 - RNA, 19 nt, Artificial Sequence
  Description of Artificial Sequence: Synthetic oligonucleotide
gaucugcucaugcugggcu

SEQ ID NO: 3029454 - RNA, 19 nt, Artificial Sequence
  Description of Artificial Sequence: Synthetic oligonucleotide
caggaucugcuccacugug

SEQ ID NO: 3029455 - RNA, 19 nt, Artificial Sequence
  Description of Artificial Sequence: Synthetic oligonucleotide
guugguagaucugcucaug

SEQ ID NO: 3029456 - RNA, 19 nt, Artificial Sequence
  Description of Artificial Sequence: Synthetic oligonucleotide
cauaggcccggcucuguug

SEQ ID NO: 3029457 - RNA, 19 nt, Artificial Sequence
  Description of Artificial Sequence: Synthetic oligonucleotide
cuccacugugggaggagcc

SEQ ID NO: 3029458 - RNA, 19 nt, Artificial Sequence
  Description of Artificial Sequence: Synthetic oligonucleotide
ucucgaacuucugccucag

SEQ ID NO: 3029459 - RNA, 19 nt, Artificial Sequence
  Description of Artificial Sequence: Synthetic oligonucleotide
cuggcugacauccugcucu

SEQ ID NO: 3029460 - RNA, 19 nt, Artificial Sequence
  Description of Artificial Sequence: Synthetic oligonucleotide
gaagguucucgaacuucug

SEQ ID NO: 3029461 - RNA, 19 nt, Artificial Sequence
  Description of Artificial Sequence: Synthetic oligonucleotide
acgcguuucuugccccugg

SEQ ID NO: 3029462 - RNA, 19 nt, Artificial Sequence
  Description of Artificial Sequence: Synthetic oligonucleotide
uccucggcucuuagggaug

SEQ ID NO: 3029463 - RNA, 19 nt, Artificial Sequence
  Description of Artificial Sequence: Synthetic oligonucleotide
cucucgcacguccuccagg

SEQ ID NO: 3029464 - RNA, 19 nt, Artificial Sequence
  Description of Artificial Sequence: Synthetic oligonucleotide
caccacgcguuucuugccc

SEQ ID NO: 3029465 - RNA, 19 nt, Artificial Sequence
  Description of Artificial Sequence: Synthetic oligonucleotide
uuaggcggaggagcgcgag

SEQ ID NO: 3029466 - RNA, 19 nt, Artificial Sequence
  Description of Artificial Sequence: Synthetic oligonucleotide
ccuggagcucaucuuaggc

SEQ ID NO: 3029467 - RNA, 19 nt, Artificial Sequence
  Description of Artificial Sequence: Synthetic oligonucleotide
gcgagcuaacugcaggucc

SEQ ID NO: 3029468 - RNA, 19 nt, Artificial Sequence
  Description of Artificial Sequence: Synthetic oligonucleotide
cuagccucugaccggccug

SEQ ID NO: 3029469 - RNA, 19 nt, Artificial Sequence
  Description of Artificial Sequence: Synthetic oligonucleotide
acaggaucgugggcgggcg

SEQ ID NO: 3029470 - RNA, 19 nt, Artificial Sequence
  Description of Artificial Sequence: Synthetic oligonucleotide
cacugugggaggagccggg

SEQ ID NO: 3029471 - RNA, 19 nt, Artificial Sequence
  Description of Artificial Sequence: Synthetic oligonucleotide
cugugggaggagccgggcg

SEQ ID NO: 3029472 - RNA, 19 nt, Artificial Sequence
  Description of Artificial Sequence: Synthetic oligonucleotide
ugaccggccugccgaaggu

SEQ ID NO: 3029473 - RNA, 19 nt, Artificial Sequence
  Description of Artificial Sequence: Synthetic oligonucleotide
cguuucuugccccuggagc

SEQ ID NO: 3029474 - RNA, 19 nt, Artificial Sequence
  Description of Artificial Sequence: Synthetic oligonucleotide
agcucaucuuaggcggagg

SEQ ID NO: 3029475 - RNA, 19 nt, Artificial Sequence
  Description of Artificial Sequence: Synthetic oligonucleotide
gagcucaucuuaggcggag

SEQ ID NO: 3029476 - RNA, 19 nt, Artificial Sequence
  Description of Artificial Sequence: Synthetic oligonucleotide
uggcucuaggagguggcug

SEQ ID NO: 3029477 - RNA, 19 nt, Artificial Sequence
  Description of Artificial Sequence: Synthetic oligonucleotide
ccugcucuagccucugacc

SEQ ID NO: 3029478 - RNA, 19 nt, Artificial Sequence
  Description of Artificial Sequence: Synthetic oligonucleotide
ugccucaguguguccuuug

SEQ ID NO: 3029479 - RNA, 19 nt, Artificial Sequence
  Description of Artificial Sequence: Synthetic oligonucleotide
gcucuguugguagaucugc

SEQ ID NO: 3029480 - RNA, 19 nt, Artificial Sequence
  Description of Artificial Sequence: Synthetic oligonucleotide
cuaggagguggcugagguc

SEQ ID NO: 3029481 - RNA, 19 nt, Artificial Sequence
  Description of Artificial Sequence: Synthetic oligonucleotide
gcuucaagguccucggcuc

SEQ ID NO: 3029482 - RNA, 19 nt, Artificial Sequence
  Description of Artificial Sequence: Synthetic oligonucleotide
uaggcggaggagcgcgagc

SEQ ID NO: 3029483 - RNA, 19 nt, Artificial Sequence
  Description of Artificial Sequence: Synthetic oligonucleotide
uggcugaggucaccuggcu

SEQ ID NO: 3029484 - RNA, 19 nt, Artificial Sequence
  Description of Artificial Sequence: Synthetic oligonucleotide
ggcucuuagggauggaucu

SEQ ID NO: 3029485 - RNA, 19 nt, Artificial Sequence
  Description of Artificial Sequence: Synthetic oligonucleotide
agguguccuuggcucuagg

SEQ ID NO: 3029486 - RNA, 19 nt, Artificial Sequence
  Description of Artificial Sequence: Synthetic oligonucleotide
guguccuuugccugcugca

SEQ ID NO: 3029487 - RNA, 19 nt, Artificial Sequence
  Description of Artificial Sequence: Synthetic oligonucleotide
uucuugccccuggagcuca

SEQ ID NO: 3029488 - RNA, 19 nt, Artificial Sequence
  Description of Artificial Sequence: Synthetic oligonucleotide
ucugcucaugcugggcuuc

SEQ ID NO: 3029489 - RNA, 19 nt, Artificial Sequence
  Description of Artificial Sequence: Synthetic oligonucleotide
uuucuugccccuggagcuc

SEQ ID NO: 3029490 - RNA, 19 nt, Artificial Sequence
  Description of Artificial Sequence: Synthetic oligonucleotide
gaucugcuccacuguggga

SEQ ID NO: 3029491 - RNA, 19 nt, Artificial Sequence
  Description of Artificial Sequence: Synthetic oligonucleotide
ucggcucuuagggauggau

SEQ ID NO: 3029492 - RNA, 19 nt, Artificial Sequence
  Description of Artificial Sequence: Synthetic oligonucleotide
guggcugaggucaccuggc

SEQ ID NO: 3029493 - RNA, 19 nt, Artificial Sequence
  Description of Artificial Sequence: Synthetic oligonucleotide
ggcucuaggagguggcuga

SEQ ID NO: 3029494 - RNA, 19 nt, Artificial Sequence
  Description of Artificial Sequence: Synthetic oligonucleotide
caagguccucggcucuuag

SEQ ID NO: 3029495 - RNA, 19 nt, Artificial Sequence
  Description of Artificial Sequence: Synthetic oligonucleotide
aguguguccuuugccugcu

SEQ ID NO: 3029496 - RNA, 19 nt, Artificial Sequence
  Description of Artificial Sequence: Synthetic oligonucleotide
accggccugccgaagguuc

SEQ ID NO: 3029497 - RNA, 19 nt, Artificial Sequence
  Description of Artificial Sequence: Synthetic oligonucleotide
aggcggaggagcgcgagcu

SEQ ID NO: 3029498 - RNA, 19 nt, Artificial Sequence
  Description of Artificial Sequence: Synthetic oligonucleotide
ucugccucaguguguccuu

SEQ ID NO: 3029499 - RNA, 19 nt, Artificial Sequence
  Description of Artificial Sequence: Synthetic oligonucleotide
ugggcgggcgccucucgca

SEQ ID NO: 3029500 - RNA, 19 nt, Artificial Sequence
  Description of Artificial Sequence: Synthetic oligonucleotide
gcucaugcugggcuucaag

SEQ ID NO: 3029501 - RNA, 19 nt, Artificial Sequence
  Description of Artificial Sequence: Synthetic oligonucleotide
aucugcucaugcugggcuu

SEQ ID NO: 3029502 - RNA, 19 nt, Artificial Sequence
  Description of Artificial Sequence: Synthetic oligonucleotide
cagcaccacgcguuucuug

SEQ ID NO: 3029503 - RNA, 19 nt, Artificial Sequence
  Description of Artificial Sequence: Synthetic oligonucleotide
gguguccuuggcucuagga

SEQ ID NO: 3029504 - RNA, 19 nt, Artificial Sequence
  Description of Artificial Sequence: Synthetic oligonucleotide
gagccgggcgcgugggcag

SEQ ID NO: 3029505 - RNA, 19 nt, Artificial Sequence
  Description of Artificial Sequence: Synthetic oligonucleotide
uuggcucuaggagguggcu

SEQ ID NO: 3029506 - RNA, 19 nt, Artificial Sequence
  Description of Artificial Sequence: Synthetic oligonucleotide
aggagccgggcgcgugggc

SEQ ID NO: 3029507 - RNA, 19 nt, Artificial Sequence
  Description of Artificial Sequence: Synthetic oligonucleotide
cauggccacauaggcccgg

SEQ ID NO: 3029508 - RNA, 19 nt, Artificial Sequence
  Description of Artificial Sequence: Synthetic oligonucleotide
ggaggagccgggcgcgugg

SEQ ID NO: 3029509 - RNA, 19 nt, Artificial Sequence
  Description of Artificial Sequence: Synthetic oligonucleotide
agguggcugaggucaccug

SEQ ID NO: 3029510 - RNA, 19 nt, Artificial Sequence
  Description of Artificial Sequence: Synthetic oligonucleotide
agccgcucauucauggcca

SEQ ID NO: 3029511 - RNA, 19 nt, Artificial Sequence
  Description of Artificial Sequence: Synthetic oligonucleotide
gugggaggagccgggcgcg

SEQ ID NO: 3029512 - RNA, 19 nt, Artificial Sequence
  Description of Artificial Sequence: Synthetic oligonucleotide
ucugaccggccugccgaag

SEQ ID NO: 3029513 - RNA, 19 nt, Artificial Sequence
  Description of Artificial Sequence: Synthetic oligonucleotide
ccucaguguguccuuugcc

SEQ ID NO: 3029514 - RNA, 19 nt, Artificial Sequence
  Description of Artificial Sequence: Synthetic oligonucleotide
acauaggcccggcucuguu

SEQ ID NO: 3029515 - RNA, 19 nt, Artificial Sequence
  Description of Artificial Sequence: Synthetic oligonucleotide
gggucuuccggggccaggg

SEQ ID NO: 3029516 - RNA, 19 nt, Artificial Sequence
  Description of Artificial Sequence: Synthetic oligonucleotide
acauccugcucuagccucu

SEQ ID NO: 3029517 - RNA, 19 nt, Artificial Sequence
  Description of Artificial Sequence: Synthetic oligonucleotide
gaggagccgggcgcguggg

SEQ ID NO: 3029518 - RNA, 19 nt, Artificial Sequence
  Description of Artificial Sequence: Synthetic oligonucleotide
ggcugaggucaccuggcug

SEQ ID NO: 3029519 - RNA, 19 nt, Artificial Sequence
  Description of Artificial Sequence: Synthetic oligonucleotide
ucagguguccuuggcucua

SEQ ID NO: 3029520 - RNA, 19 nt, Artificial Sequence
  Description of Artificial Sequence: Synthetic oligonucleotide
ugggcagcaccacgcguuu

SEQ ID NO: 3029521 - RNA, 19 nt, Artificial Sequence
  Description of Artificial Sequence: Synthetic oligonucleotide
gccucaguguguccuuugc

SEQ ID NO: 3029522 - RNA, 19 nt, Artificial Sequence
  Description of Artificial Sequence: Synthetic oligonucleotide
cacguccuccaggaucugc

SEQ ID NO: 3029523 - RNA, 19 nt, Artificial Sequence
  Description of Artificial Sequence: Synthetic oligonucleotide
ggccacauaggcccggcuc

SEQ ID NO: 3029524 - RNA, 19 nt, Artificial Sequence
  Description of Artificial Sequence: Synthetic oligonucleotide
uggcugacauccugcucua

SEQ ID NO: 3029525 - RNA, 19 nt, Artificial Sequence
  Description of Artificial Sequence: Synthetic oligonucleotide
gguucucgaacuucugccu

SEQ ID NO: 3029526 - RNA, 19 nt, Artificial Sequence
  Description of Artificial Sequence: Synthetic oligonucleotide
ccuuggcucuaggaggugg

SEQ ID NO: 3029527 - RNA, 19 nt, Artificial Sequence
  Description of Artificial Sequence: Synthetic oligonucleotide
ucaagguccucggcucuua

SEQ ID NO: 3029528 - RNA, 19 nt, Artificial Sequence
  Description of Artificial Sequence: Synthetic oligonucleotide
gcucuagccucugaccggc

SEQ ID NO: 3029529 - RNA, 19 nt, Artificial Sequence
  Description of Artificial Sequence: Synthetic oligonucleotide
cugcagccgcucauucaug

SEQ ID NO: 3029530 - RNA, 19 nt, Artificial Sequence
  Description of Artificial Sequence: Synthetic oligonucleotide
ggcuucaagguccucggcu

SEQ ID NO: 3029531 - RNA, 19 nt, Artificial Sequence
  Description of Artificial Sequence: Synthetic oligonucleotide
uggccacauaggcccggcu

SEQ ID NO: 3029532 - RNA, 19 nt, Artificial Sequence
  Description of Artificial Sequence: Synthetic oligonucleotide
ugccccuggagcucaucuu

SEQ ID NO: 3029533 - RNA, 19 nt, Artificial Sequence
  Description of Artificial Sequence: Synthetic oligonucleotide
cucuagccucugaccggcc

SEQ ID NO: 3029534 - RNA, 19 nt, Artificial Sequence
  Description of Artificial Sequence: Synthetic oligonucleotide
ggcccggcucuguugguag

SEQ ID NO: 3029535 - RNA, 19 nt, Artificial Sequence
  Description of Artificial Sequence: Synthetic oligonucleotide
uucaagguccucggcucuu

SEQ ID NO: 3029536 - RNA, 19 nt, Artificial Sequence
  Description of Artificial Sequence: Synthetic oligonucleotide
gagcgcgagcuaacugcag

SEQ ID NO: 3029537 - RNA, 19 nt, Artificial Sequence
  Description of Artificial Sequence: Synthetic oligonucleotide
guccucggcucuuagggau

SEQ ID NO: 3029538 - RNA, 19 nt, Artificial Sequence
  Description of Artificial Sequence: Synthetic oligonucleotide
cccuggagcucaucuuagg

SEQ ID NO: 3029539 - RNA, 19 nt, Artificial Sequence
  Description of Artificial Sequence: Synthetic oligonucleotide
uccggggccagggcgguaa

SEQ ID NO: 3029540 - RNA, 19 nt, Artificial Sequence
  Description of Artificial Sequence: Synthetic oligonucleotide
cucuguugguagaucugcu

SEQ ID NO: 3029541 - RNA, 19 nt, Artificial Sequence
  Description of Artificial Sequence: Synthetic oligonucleotide
cugaggucaccuggcugac

SEQ ID NO: 3029542 - RNA, 19 nt, Artificial Sequence
  Description of Artificial Sequence: Synthetic oligonucleotide
ggcucuguugguagaucug

SEQ ID NO: 3029543 - RNA, 19 nt, Artificial Sequence
  Description of Artificial Sequence: Synthetic oligonucleotide
cuuaggcggaggagcgcga

SEQ ID NO: 3029544 - RNA, 19 nt, Artificial Sequence
  Description of Artificial Sequence: Synthetic oligonucleotide
agccucugaccggccugcc

SEQ ID NO: 3029545 - RNA, 19 nt, Artificial Sequence
  Description of Artificial Sequence: Synthetic oligonucleotide
gcagccgcucauucauggc

SEQ ID NO: 3029546 - RNA, 19 nt, Artificial Sequence
  Description of Artificial Sequence: Synthetic oligonucleotide
uccuuggcucuaggaggug

SEQ ID NO: 3029547 - RNA, 19 nt, Artificial Sequence
  Description of Artificial Sequence: Synthetic oligonucleotide
caggaucgugggcgggcgc

SEQ ID NO: 3029548 - RNA, 19 nt, Artificial Sequence
  Description of Artificial Sequence: Synthetic oligonucleotide
aucgugggcgggcgccucu

SEQ ID NO: 3029549 - RNA, 19 nt, Artificial Sequence
  Description of Artificial Sequence: Synthetic oligonucleotide
gcucuuagggauggaucug

SEQ ID NO: 3029550 - RNA, 19 nt, Artificial Sequence
  Description of Artificial Sequence: Synthetic oligonucleotide
gugggcgggcgccucucgc

SEQ ID NO: 3029551 - RNA, 19 nt, Artificial Sequence
  Description of Artificial Sequence: Synthetic oligonucleotide
cagguguccuuggcucuag

SEQ ID NO: 3029552 - RNA, 19 nt, Artificial Sequence
  Description of Artificial Sequence: Synthetic oligonucleotide
gguccucggcucuuaggga

SEQ ID NO: 3029553 - RNA, 19 nt, Artificial Sequence
  Description of Artificial Sequence: Synthetic oligonucleotide
gagguggcugaggucaccu

SEQ ID NO: 3029554 - RNA, 19 nt, Artificial Sequence
  Description of Artificial Sequence: Synthetic oligonucleotide
gccucugaccggccugccg

SEQ ID NO: 3029555 - RNA, 19 nt, Artificial Sequence
  Description of Artificial Sequence: Synthetic oligonucleotide
gcgugggcagcaccacgcg

SEQ ID NO: 3029556 - RNA, 19 nt, Artificial Sequence
  Description of Artificial Sequence: Synthetic oligonucleotide
ccacugugggaggagccgg

SEQ ID NO: 3029557 - RNA, 19 nt, Artificial Sequence
  Description of Artificial Sequence: Synthetic oligonucleotide
cacgcguuucuugccccug

SEQ ID NO: 3029558 - RNA, 19 nt, Artificial Sequence
  Description of Artificial Sequence: Synthetic oligonucleotide
ccccuggagcucaucuuag

SEQ ID NO: 3029559 - RNA, 19 nt, Artificial Sequence
  Description of Artificial Sequence: Synthetic oligonucleotide
cuucaagguccucggcucu

SEQ ID NO: 3029560 - RNA, 19 nt, Artificial Sequence
  Description of Artificial Sequence: Synthetic oligonucleotide
ggagcgcgagcuaacugca

SEQ ID NO: 3029561 - RNA, 19 nt, Artificial Sequence
  Description of Artificial Sequence: Synthetic oligonucleotide
cgcgugggcagcaccacgc

SEQ ID NO: 3029562 - RNA, 19 nt, Artificial Sequence
  Description of Artificial Sequence: Synthetic oligonucleotide
agccgggcgcgugggcagc

SEQ ID NO: 3029563 - RNA, 19 nt, Artificial Sequence
  Description of Artificial Sequence: Synthetic oligonucleotide
ccucugaccggccugccga

SEQ ID NO: 3029564 - RNA, 19 nt, Artificial Sequence
  Description of Artificial Sequence: Synthetic oligonucleotide
uaggcccggcucuguuggu

SEQ ID NO: 3029565 - RNA, 19 nt, Artificial Sequence
  Description of Artificial Sequence: Synthetic oligonucleotide
ucuugccccuggagcucau

SEQ ID NO: 3029566 - RNA, 19 nt, Artificial Sequence
  Description of Artificial Sequence: Synthetic oligonucleotide
ugcucaugcugggcuucaa

SEQ ID NO: 3029567 - RNA, 19 nt, Artificial Sequence
  Description of Artificial Sequence: Synthetic oligonucleotide
ggucuuccggggccagggc

SEQ ID NO: 3029568 - RNA, 19 nt, Artificial Sequence
  Description of Artificial Sequence: Synthetic oligonucleotide
ccucggcucuuagggaugg

SEQ ID NO: 3029569 - RNA, 19 nt, Artificial Sequence
  Description of Artificial Sequence: Synthetic oligonucleotide
gcgcgugggcagcaccacg

SEQ ID NO: 3029570 - RNA, 19 nt, Artificial Sequence
  Description of Artificial Sequence: Synthetic oligonucleotide
ccgaagguucucgaacuuc

SEQ ID NO: 3029571 - RNA, 19 nt, Artificial Sequence
  Description of Artificial Sequence: Synthetic oligonucleotide
gggcuucaagguccucggc

SEQ ID NO: 3029572 - RNA, 19 nt, Artificial Sequence
  Description of Artificial Sequence: Synthetic oligonucleotide
gggcgccucucgcacgucc

SEQ ID NO: 3029573 - RNA, 19 nt, Artificial Sequence
  Description of Artificial Sequence: Synthetic oligonucleotide
cggcucuuagggauggauc

SEQ ID NO: 3029574 - RNA, 19 nt, Artificial Sequence
  Description of Artificial Sequence: Synthetic oligonucleotide
gccccuggagcucaucuua

SEQ ID NO: 3029575 - RNA, 19 nt, Artificial Sequence
  Description of Artificial Sequence: Synthetic oligonucleotide
ggcgggcgccucucgcacg

SEQ ID NO: 3029576 - RNA, 19 nt, Artificial Sequence
  Description of Artificial Sequence: Synthetic oligonucleotide
cgaagguucucgaacuucu

SEQ ID NO: 3029577 - RNA, 19 nt, Artificial Sequence
  Description of Artificial Sequence: Synthetic oligonucleotide
gaucgugggcgggcgccuc

SEQ ID NO: 3029578 - RNA, 19 nt, Artificial Sequence
  Description of Artificial Sequence: Synthetic oligonucleotide
cucugaccggccugccgaa

SEQ ID NO: 3029579 - RNA, 19 nt, Artificial Sequence
  Description of Artificial Sequence: Synthetic oligonucleotide
cuugccccuggagcucauc

SEQ ID NO: 3029580 - RNA, 19 nt, Artificial Sequence
  Description of Artificial Sequence: Synthetic oligonucleotide
ggagcucaucuuaggcgga

SEQ ID NO: 3029581 - RNA, 19 nt, Artificial Sequence
  Description of Artificial Sequence: Synthetic oligonucleotide
ggagccgggcgcgugggca

SEQ ID NO: 3029582 - RNA, 19 nt, Artificial Sequence
  Description of Artificial Sequence: Synthetic oligonucleotide
ccuggcugacauccugcuc

SEQ ID NO: 3029583 - RNA, 19 nt, Artificial Sequence
  Description of Artificial Sequence: Synthetic oligonucleotide
ugggaggagccgggcgcgu

SEQ ID NO: 3029584 - RNA, 19 nt, Artificial Sequence
  Description of Artificial Sequence: Synthetic oligonucleotide
gccgcucauucauggccac

SEQ ID NO: 3029585 - RNA, 19 nt, Artificial Sequence
  Description of Artificial Sequence: Synthetic oligonucleotide
cugcucaugcugggcuuca

SEQ ID NO: 3029586 - RNA, 19 nt, Artificial Sequence
  Description of Artificial Sequence: Synthetic oligonucleotide
ucgugggcgggcgccucuc

SEQ ID NO: 3029587 - RNA, 19 nt, Artificial Sequence
  Description of Artificial Sequence: Synthetic oligonucleotide
gccucucgcacguccucca

SEQ ID NO: 3029588 - RNA, 19 nt, Artificial Sequence
  Description of Artificial Sequence: Synthetic oligonucleotide
ccucucgcacguccuccag

SEQ ID NO: 3029589 - RNA, 19 nt, Artificial Sequence
  Description of Artificial Sequence: Synthetic oligonucleotide
ggcugacauccugcucuag

SEQ ID NO: 3029590 - RNA, 19 nt, Artificial Sequence
  Description of Artificial Sequence: Synthetic oligonucleotide
gggcgggcgccucucgcac

SEQ ID NO: 3029591 - RNA, 19 nt, Artificial Sequence
  Description of Artificial Sequence: Synthetic oligonucleotide
aggcccggcucuguuggua

SEQ ID NO: 3029592 - RNA, 19 nt, Artificial Sequence
  Description of Artificial Sequence: Synthetic oligonucleotide
gcgcgagcuaacugcaggu

SEQ ID NO: 3029593 - RNA, 19 nt, Artificial Sequence
  Description of Artificial Sequence: Synthetic oligonucleotide
gccugccgaagguucucga

SEQ ID NO: 3029594 - RNA, 19 nt, Artificial Sequence
  Description of Artificial Sequence: Synthetic oligonucleotide
gcggaggagcgcgagcuaa

SEQ ID NO: 3029595 - RNA, 19 nt, Artificial Sequence
  Description of Artificial Sequence: Synthetic oligonucleotide
cgcacguccuccaggaucu

SEQ ID NO: 3029596 - RNA, 19 nt, Artificial Sequence
  Description of Artificial Sequence: Synthetic oligonucleotide
ggaggagcgcgagcuaacu

SEQ ID NO: 3029597 - RNA, 19 nt, Artificial Sequence
  Description of Artificial Sequence: Synthetic oligonucleotide
gggaggagccgggcgcgug

SEQ ID NO: 3029598 - RNA, 19 nt, Artificial Sequence
  Description of Artificial Sequence: Synthetic oligonucleotide
cggaggagcgcgagcuaac

SEQ ID NO: 3029599 - RNA, 19 nt, Artificial Sequence
  Description of Artificial Sequence: Synthetic oligonucleotide
gucaccuggcugacauccu

SEQ ID NO: 3029600 - RNA, 19 nt, Artificial Sequence
  Description of Artificial Sequence: Synthetic oligonucleotide
gggcgcgugggcagcacca

SEQ ID NO: 3029601 - RNA, 19 nt, Artificial Sequence
  Description of Artificial Sequence: Synthetic oligonucleotide
cucgaacuucugccucagu

SEQ ID NO: 3029602 - RNA, 19 nt, Artificial Sequence
  Description of Artificial Sequence: Synthetic oligonucleotide
ggcgcgugggcagcaccac

SEQ ID NO: 3029603 - RNA, 19 nt, Artificial Sequence
  Description of Artificial Sequence: Synthetic oligonucleotide
cgcgagcuaacugcagguc

SEQ ID NO: 3029604 - RNA, 19 nt, Artificial Sequence
  Description of Artificial Sequence: Synthetic oligonucleotide
cucggcucuuagggaugga

SEQ ID NO: 3029605 - RNA, 19 nt, Artificial Sequence
  Description of Artificial Sequence: Synthetic oligonucleotide
cgccucucgcacguccucc

SEQ ID NO: 3029606 - RNA, 19 nt, Artificial Sequence
  Description of Artificial Sequence: Synthetic oligonucleotide
ccggcucuguugguagauc

SEQ ID NO: 3029607 - RNA, 19 nt, Artificial Sequence
  Description of Artificial Sequence: Synthetic oligonucleotide
gcgccucucgcacguccuc

SEQ ID NO: 3029608 - RNA, 19 nt, Artificial Sequence
  Description of Artificial Sequence: Synthetic oligonucleotide
cggcucuguugguagaucu

SEQ ID NO: 3029609 - RNA, 19 nt, Artificial Sequence
  Description of Artificial Sequence: Synthetic oligonucleotide
gcccggcucuguugguaga

SEQ ID NO: 3029610 - RNA, 19 nt, Artificial Sequence
  Description of Artificial Sequence: Synthetic oligonucleotide
gccgaagguucucgaacuu

SEQ ID NO: 3029611 - RNA, 19 nt, Artificial Sequence
  Description of Artificial Sequence: Synthetic oligonucleotide
cgugggcgggcgccucucg

SEQ ID NO: 3029612 - RNA, 19 nt, Artificial Sequence
  Description of Artificial Sequence: Synthetic oligonucleotide
ggcggaggagcgcgagcua

SEQ ID NO: 3029613 - RNA, 19 nt, Artificial Sequence
  Description of Artificial Sequence: Synthetic oligonucleotide
gaccggccugccgaagguu

SEQ ID NO: 3029614 - RNA, 19 nt, Artificial Sequence
  Description of Artificial Sequence: Synthetic oligonucleotide
uuccggggccagggcggua

SEQ ID NO: 3029615 - RNA, 19 nt, Artificial Sequence
  Description of Artificial Sequence: Synthetic oligonucleotide
cgggcgcgugggcagcacc

SEQ ID NO: 3029616 - RNA, 19 nt, Artificial Sequence
  Description of Artificial Sequence: Synthetic oligonucleotide
cucgcacguccuccaggau

SEQ ID NO: 3029617 - RNA, 19 nt, Artificial Sequence
  Description of Artificial Sequence: Synthetic oligonucleotide
gcgggcgccucucgcacgu

SEQ ID NO: 3029618 - RNA, 19 nt, Artificial Sequence
  Description of Artificial Sequence: Synthetic oligonucleotide
cgcguuucuugccccugga

SEQ ID NO: 3029619 - RNA, 19 nt, Artificial Sequence
  Description of Artificial Sequence: Synthetic oligonucleotide
cuuccggggccagggcggu

SEQ ID NO: 3029620 - RNA, 19 nt, Artificial Sequence
  Description of Artificial Sequence: Synthetic oligonucleotide
gcacguccuccaggaucug

SEQ ID NO: 3029621 - RNA, 19 nt, Artificial Sequence
  Description of Artificial Sequence: Synthetic oligonucleotide
ggcgccucucgcacguccu

SEQ ID NO: 3029622 - RNA, 19 nt, Artificial Sequence
  Description of Artificial Sequence: Synthetic oligonucleotide
cgcucauucauggccacau

SEQ ID NO: 3029623 - RNA, 19 nt, Artificial Sequence
  Description of Artificial Sequence: Synthetic oligonucleotide
ggaucgugggcgggcgccu

SEQ ID NO: 3029624 - RNA, 19 nt, Artificial Sequence
  Description of Artificial Sequence: Synthetic oligonucleotide
cugccucaguguguccuuu

SEQ ID NO: 3029625 - RNA, 19 nt, Artificial Sequence
  Description of Artificial Sequence: Synthetic oligonucleotide
ccacgcguuucuugccccu

SEQ ID NO: 3029626 - RNA, 19 nt, Artificial Sequence
  Description of Artificial Sequence: Synthetic oligonucleotide
ccgcucauucauggccaca

SEQ ID NO: 3029627 - RNA, 19 nt, Artificial Sequence
  Description of Artificial Sequence: Synthetic oligonucleotide
ccggccugccgaagguucu

SEQ ID NO: 3029628 - RNA, 19 nt, Artificial Sequence
  Description of Artificial Sequence: Synthetic oligonucleotide
gcagcaccacgcguuucuu

SEQ ID NO: 3029629 - RNA, 19 nt, Artificial Sequence
  Description of Artificial Sequence: Synthetic oligonucleotide
cggccugccgaagguucuc

SEQ ID NO: 3029630 - RNA, 19 nt, Artificial Sequence
  Description of Artificial Sequence: Synthetic oligonucleotide
gccgggcgcgugggcagca

SEQ ID NO: 3029631 - RNA, 19 nt, Artificial Sequence
  Description of Artificial Sequence: Synthetic oligonucleotide
cccggcucuguugguagau

SEQ ID NO: 3029632 - RNA, 19 nt, Artificial Sequence
  Description of Artificial Sequence: Synthetic oligonucleotide
ccgggcgcgugggcagcac

SEQ ID NO: 3029633 - RNA, 19 nt, Artificial Sequence
  Description of Artificial Sequence: Synthetic oligonucleotide
cggggccagggcgguaaaa

SEQ ID NO: 3029634 - RNA, 19 nt, Artificial Sequence
  Description of Artificial Sequence: Synthetic oligonucleotide
cgggcgccucucgcacguc

SEQ ID NO: 3029635 - RNA, 19 nt, Artificial Sequence
  Description of Artificial Sequence: Synthetic oligonucleotide
agugaaauaaauccuuucc

SEQ ID NO: 3029636 - RNA, 19 nt, Artificial Sequence
  Description of Artificial Sequence: Synthetic oligonucleotide
aauaaauccuuuccuuucc

SEQ ID NO: 3029637 - RNA, 19 nt, Artificial Sequence
  Description of Artificial Sequence: Synthetic oligonucleotide
aacaguaccccucaauggc

SEQ ID NO: 3029638 - RNA, 19 nt, Artificial Sequence
  Description of Artificial Sequence: Synthetic oligonucleotide
augaugaacuguuacaugg

SEQ ID NO: 3029639 - RNA, 19 nt, Artificial Sequence
  Description of Artificial Sequence: Synthetic oligonucleotide
uaagaaagcaggcugagca

SEQ ID NO: 3029640 - RNA, 19 nt, Artificial Sequence
  Description of Artificial Sequence: Synthetic oligonucleotide
uguuacauggaacugugag

SEQ ID NO: 3029641 - RNA, 19 nt, Artificial Sequence
  Description of Artificial Sequence: Synthetic oligonucleotide
cugugagugaaauaaaucc

SEQ ID NO: 3029642 - RNA, 19 nt, Artificial Sequence
  Description of Artificial Sequence: Synthetic oligonucleotide
uugugugucaacuugacac

SEQ ID NO: 3029643 - RNA, 19 nt, Artificial Sequence
  Description of Artificial Sequence: Synthetic oligonucleotide
uaaacaguaccccucaaug

SEQ ID NO: 3029644 - RNA, 19 nt, Artificial Sequence
  Description of Artificial Sequence: Synthetic oligonucleotide
ugaacuguuacauggaacu

SEQ ID NO: 3029645 - RNA, 19 nt, Artificial Sequence
  Description of Artificial Sequence: Synthetic oligonucleotide
aaacaguaccccucaaugg

SEQ ID NO: 3029646 - RNA, 19 nt, Artificial Sequence
  Description of Artificial Sequence: Synthetic oligonucleotide
gucaacuugacacacaagc

SEQ ID NO: 3029647 - RNA, 19 nt, Artificial Sequence
  Description of Artificial Sequence: Synthetic oligonucleotide
ugacacacaagcuagaguc

SEQ ID NO: 3029648 - RNA, 19 nt, Artificial Sequence
  Description of Artificial Sequence: Synthetic oligonucleotide
uccauaagaaagcaggcug

SEQ ID NO: 3029649 - RNA, 19 nt, Artificial Sequence
  Description of Artificial Sequence: Synthetic oligonucleotide
aaauccuuuccuuuccaag

SEQ ID NO: 3029650 - RNA, 19 nt, Artificial Sequence
  Description of Artificial Sequence: Synthetic oligonucleotide
auaauugugugucaacuug

SEQ ID NO: 3029651 - RNA, 19 nt, Artificial Sequence
  Description of Artificial Sequence: Synthetic oligonucleotide
uuacauggaacugugagug

SEQ ID NO: 3029652 - RNA, 19 nt, Artificial Sequence
  Description of Artificial Sequence: Synthetic oligonucleotide
ugaguuucuguccucacug

SEQ ID NO: 3029653 - RNA, 19 nt, Artificial Sequence
  Description of Artificial Sequence: Synthetic oligonucleotide
ugugagugaaauaaauccu

SEQ ID NO: 3029654 - RNA, 19 nt, Artificial Sequence
  Description of Artificial Sequence: Synthetic oligonucleotide
ugagcaagccaguaaacag

SEQ ID NO: 3029655 - RNA, 19 nt, Artificial Sequence
  Description of Artificial Sequence: Synthetic oligonucleotide
aauugauggaagagggccc

SEQ ID NO: 3029656 - RNA, 19 nt, Artificial Sequence
  Description of Artificial Sequence: Synthetic oligonucleotide
aagccaguaaacaguaccc

SEQ ID NO: 3029657 - RNA, 19 nt, Artificial Sequence
  Description of Artificial Sequence: Synthetic oligonucleotide
gaugccaucccugagcagg

SEQ ID NO: 3029658 - RNA, 19 nt, Artificial Sequence
  Description of Artificial Sequence: Synthetic oligonucleotide
acugcuuuugaugaugaac

SEQ ID NO: 3029659 - RNA, 19 nt, Artificial Sequence
  Description of Artificial Sequence: Synthetic oligonucleotide
uuagcaauugauggaagag

SEQ ID NO: 3029660 - RNA, 19 nt, Artificial Sequence
  Description of Artificial Sequence: Synthetic oligonucleotide
uccaaguugcucuugguca

SEQ ID NO: 3029661 - RNA, 19 nt, Artificial Sequence
  Description of Artificial Sequence: Synthetic oligonucleotide
caagccaguaaacaguacc

SEQ ID NO: 3029662 - RNA, 19 nt, Artificial Sequence
  Description of Artificial Sequence: Synthetic oligonucleotide
caauugauggaagagggcc

SEQ ID NO: 3029663 - RNA, 19 nt, Artificial Sequence
  Description of Artificial Sequence: Synthetic oligonucleotide
gguuccauaagaaagcagg

SEQ ID NO: 3029664 - RNA, 19 nt, Artificial Sequence
  Description of Artificial Sequence: Synthetic oligonucleotide
aacuugacacacaagcuag

SEQ ID NO: 3029665 - RNA, 19 nt, Artificial Sequence
  Description of Artificial Sequence: Synthetic oligonucleotide
uugaugaugaacuguuaca

SEQ ID NO: 3029666 - RNA, 19 nt, Artificial Sequence
  Description of Artificial Sequence: Synthetic oligonucleotide
ugaugagcaagccaguaaa

SEQ ID NO: 3029667 - RNA, 19 nt, Artificial Sequence
  Description of Artificial Sequence: Synthetic oligonucleotide
agcaauugauggaagaggg

SEQ ID NO: 3029668 - RNA, 19 nt, Artificial Sequence
  Description of Artificial Sequence: Synthetic oligonucleotide
ucaacuugacacacaagcu

SEQ ID NO: 3029669 - RNA, 19 nt, Artificial Sequence
  Description of Artificial Sequence: Synthetic oligonucleotide
uaauugugugucaacuuga

SEQ ID NO: 3029670 - RNA, 19 nt, Artificial Sequence
  Description of Artificial Sequence: Synthetic oligonucleotide
uagcaauugauggaagagg

SEQ ID NO: 3029671 - RNA, 19 nt, Artificial Sequence
  Description of Artificial Sequence: Synthetic oligonucleotide
caagccaugaugagcaagc

SEQ ID NO: 3029672 - RNA, 19 nt, Artificial Sequence
  Description of Artificial Sequence: Synthetic oligonucleotide
aauugugugucaacuugac

SEQ ID NO: 3029673 - RNA, 19 nt, Artificial Sequence
  Description of Artificial Sequence: Synthetic oligonucleotide
uuccuuuccaaguugcucu

SEQ ID NO: 3029674 - RNA, 19 nt, Artificial Sequence
  Description of Artificial Sequence: Synthetic oligonucleotide
gaugaugaacuguuacaug

SEQ ID NO: 3029675 - RNA, 19 nt, Artificial Sequence
  Description of Artificial Sequence: Synthetic oligonucleotide
uccucacugcuuuugauga

SEQ ID NO: 3029676 - RNA, 19 nt, Artificial Sequence
  Description of Artificial Sequence: Synthetic oligonucleotide
cuggguuccauaagaaagc

SEQ ID NO: 3029677 - RNA, 19 nt, Artificial Sequence
  Description of Artificial Sequence: Synthetic oligonucleotide
aacuguuacauggaacugu

SEQ ID NO: 3029678 - RNA, 19 nt, Artificial Sequence
  Description of Artificial Sequence: Synthetic oligonucleotide
ugaugaugaacuguuacau

SEQ ID NO: 3029679 - RNA, 19 nt, Artificial Sequence
  Description of Artificial Sequence: Synthetic oligonucleotide
acugugagugaaauaaauc

SEQ ID NO: 3029680 - RNA, 19 nt, Artificial Sequence
  Description of Artificial Sequence: Synthetic oligonucleotide
ugugugucaacuugacaca

SEQ ID NO: 3029681 - RNA, 19 nt, Artificial Sequence
  Description of Artificial Sequence: Synthetic oligonucleotide
cuuuccaaguugcucuugg

SEQ ID NO: 3029682 - RNA, 19 nt, Artificial Sequence
  Description of Artificial Sequence: Synthetic oligonucleotide
ugaugaacuguuacaugga

SEQ ID NO: 3029683 - RNA, 19 nt, Artificial Sequence
  Description of Artificial Sequence: Synthetic oligonucleotide
gauggaagagggcccagcc

SEQ ID NO: 3029684 - RNA, 19 nt, Artificial Sequence
  Description of Artificial Sequence: Synthetic oligonucleotide
auugugggugaugccaucc

SEQ ID NO: 3029685 - RNA, 19 nt, Artificial Sequence
  Description of Artificial Sequence: Synthetic oligonucleotide
auaagaaagcaggcugagc

SEQ ID NO: 3029686 - RNA, 19 nt, Artificial Sequence
  Description of Artificial Sequence: Synthetic oligonucleotide
ugagcaagccaugaugagc

SEQ ID NO: 3029687 - RNA, 19 nt, Artificial Sequence
  Description of Artificial Sequence: Synthetic oligonucleotide
auggaagagggcccagccc

SEQ ID NO: 3029688 - RNA, 19 nt, Artificial Sequence
  Description of Artificial Sequence: Synthetic oligonucleotide
agcccauugugggugaugc

SEQ ID NO: 3029689 - RNA, 19 nt, Artificial Sequence
  Description of Artificial Sequence: Synthetic oligonucleotide
ucugcaucagcuccugccu

SEQ ID NO: 3029690 - RNA, 19 nt, Artificial Sequence
  Description of Artificial Sequence: Synthetic oligonucleotide
gagugaaauaaauccuuuc

SEQ ID NO: 3029691 - RNA, 19 nt, Artificial Sequence
  Description of Artificial Sequence: Synthetic oligonucleotide
ccuggguuccauaagaaag

SEQ ID NO: 3029692 - RNA, 19 nt, Artificial Sequence
  Description of Artificial Sequence: Synthetic oligonucleotide
aagccaugaugagcaagcc

SEQ ID NO: 3029693 - RNA, 19 nt, Artificial Sequence
  Description of Artificial Sequence: Synthetic oligonucleotide
augaacuguuacauggaac

SEQ ID NO: 3029694 - RNA, 19 nt, Artificial Sequence
  Description of Artificial Sequence: Synthetic oligonucleotide
ugagugaaauaaauccuuu

SEQ ID NO: 3029695 - RNA, 19 nt, Artificial Sequence
  Description of Artificial Sequence: Synthetic oligonucleotide
ugcuggauaauuguguguc

SEQ ID NO: 3029696 - RNA, 19 nt, Artificial Sequence
  Description of Artificial Sequence: Synthetic oligonucleotide
aaguugcucuuggucaugg

SEQ ID NO: 3029697 - RNA, 19 nt, Artificial Sequence
  Description of Artificial Sequence: Synthetic oligonucleotide
agccaguaaacaguacccc

SEQ ID NO: 3029698 - RNA, 19 nt, Artificial Sequence
  Description of Artificial Sequence: Synthetic oligonucleotide
uuccaaguugcucuugguc

SEQ ID NO: 3029699 - RNA, 19 nt, Artificial Sequence
  Description of Artificial Sequence: Synthetic oligonucleotide
uugaguuucuguccucacu

SEQ ID NO: 3029700 - RNA, 19 nt, Artificial Sequence
  Description of Artificial Sequence: Synthetic oligonucleotide
ggaacugugagugaaauaa

SEQ ID NO: 3029701 - RNA, 19 nt, Artificial Sequence
  Description of Artificial Sequence: Synthetic oligonucleotide
aagaaagcaggcugagcaa

SEQ ID NO: 3029702 - RNA, 19 nt, Artificial Sequence
  Description of Artificial Sequence: Synthetic oligonucleotide
aacugugagugaaauaaau

SEQ ID NO: 3029703 - RNA, 19 nt, Artificial Sequence
  Description of Artificial Sequence: Synthetic oligonucleotide
ugcuuuugaugaugaacug

SEQ ID NO: 3029704 - RNA, 19 nt, Artificial Sequence
  Description of Artificial Sequence: Synthetic oligonucleotide
auaaauccuuuccuuucca

SEQ ID NO: 3029705 - RNA, 19 nt, Artificial Sequence
  Description of Artificial Sequence: Synthetic oligonucleotide
gagcaagccaugaugagca

SEQ ID NO: 3029706 - RNA, 19 nt, Artificial Sequence
  Description of Artificial Sequence: Synthetic oligonucleotide
acaguaccccucaauggcc

SEQ ID NO: 3029707 - RNA, 19 nt, Artificial Sequence
  Description of Artificial Sequence: Synthetic oligonucleotide
aucagcuccugccuccagg

SEQ ID NO: 3029708 - RNA, 19 nt, Artificial Sequence
  Description of Artificial Sequence: Synthetic oligonucleotide
gaaauaaauccuuuccuuu

SEQ ID NO: 3029709 - RNA, 19 nt, Artificial Sequence
  Description of Artificial Sequence: Synthetic oligonucleotide
gaugaacuguuacauggaa

SEQ ID NO: 3029710 - RNA, 19 nt, Artificial Sequence
  Description of Artificial Sequence: Synthetic oligonucleotide
uuccauaagaaagcaggcu

SEQ ID NO: 3029711 - RNA, 19 nt, Artificial Sequence
  Description of Artificial Sequence: Synthetic oligonucleotide
gccaugaugagcaagccag

SEQ ID NO: 3029712 - RNA, 19 nt, Artificial Sequence
  Description of Artificial Sequence: Synthetic oligonucleotide
ugucaacuugacacacaag

SEQ ID NO: 3029713 - RNA, 19 nt, Artificial Sequence
  Description of Artificial Sequence: Synthetic oligonucleotide
cuugacacacaagcuagag

SEQ ID NO: 3029714 - RNA, 19 nt, Artificial Sequence
  Description of Artificial Sequence: Synthetic oligonucleotide
ugugucaacuugacacaca

SEQ ID NO: 3029715 - RNA, 19 nt, Artificial Sequence
  Description of Artificial Sequence: Synthetic oligonucleotide
uuucuguccucacugcuuu

SEQ ID NO: 3029716 - RNA, 19 nt, Artificial Sequence
  Description of Artificial Sequence: Synthetic oligonucleotide
cugcuuuugaugaugaacu

SEQ ID NO: 3029717 - RNA, 19 nt, Artificial Sequence
  Description of Artificial Sequence: Synthetic oligonucleotide
gugaaauaaauccuuuccu

SEQ ID NO: 3029718 - RNA, 19 nt, Artificial Sequence
  Description of Artificial Sequence: Synthetic oligonucleotide
uaaauccuuuccuuuccaa

SEQ ID NO: 3029719 - RNA, 19 nt, Artificial Sequence
  Description of Artificial Sequence: Synthetic oligonucleotide
aguuucuguccucacugcu

SEQ ID NO: 3029720 - RNA, 19 nt, Artificial Sequence
  Description of Artificial Sequence: Synthetic oligonucleotide
aagagggcccagcccauug

SEQ ID NO: 3029721 - RNA, 19 nt, Artificial Sequence
  Description of Artificial Sequence: Synthetic oligonucleotide
auugugugucaacuugaca

SEQ ID NO: 3029722 - RNA, 19 nt, Artificial Sequence
  Description of Artificial Sequence: Synthetic oligonucleotide
uuuugaugaugaacuguua

SEQ ID NO: 3029723 - RNA, 19 nt, Artificial Sequence
  Description of Artificial Sequence: Synthetic oligonucleotide
guuccauaagaaagcaggc

SEQ ID NO: 3029724 - RNA, 19 nt, Artificial Sequence
  Description of Artificial Sequence: Synthetic oligonucleotide
cauaagaaagcaggcugag

SEQ ID NO: 3029725 - RNA, 19 nt, Artificial Sequence
  Description of Artificial Sequence: Synthetic oligonucleotide
guccucacugcuuuugaug

SEQ ID NO: 3029726 - RNA, 19 nt, Artificial Sequence
  Description of Artificial Sequence: Synthetic oligonucleotide
uuuccuuuccaaguugcuc

SEQ ID NO: 3029727 - RNA, 19 nt, Artificial Sequence
  Description of Artificial Sequence: Synthetic oligonucleotide
aucccugagcagguggucc

SEQ ID NO: 3029728 - RNA, 19 nt, Artificial Sequence
  Description of Artificial Sequence: Synthetic oligonucleotide
agcaggugguccuggguuc

SEQ ID NO: 3029729 - RNA, 19 nt, Artificial Sequence
  Description of Artificial Sequence: Synthetic oligonucleotide
augagcaagccaguaaaca

SEQ ID NO: 3029730 - RNA, 19 nt, Artificial Sequence
  Description of Artificial Sequence: Synthetic oligonucleotide
ggugaugccaucccugagc

SEQ ID NO: 3029731 - RNA, 19 nt, Artificial Sequence
  Description of Artificial Sequence: Synthetic oligonucleotide
ugugggugaugccaucccu

SEQ ID NO: 3029732 - RNA, 19 nt, Artificial Sequence
  Description of Artificial Sequence: Synthetic oligonucleotide
gaguuucuguccucacugc

SEQ ID NO: 3029733 - RNA, 19 nt, Artificial Sequence
  Description of Artificial Sequence: Synthetic oligonucleotide
augaugagcaagccaguaa

SEQ ID NO: 3029734 - RNA, 19 nt, Artificial Sequence
  Description of Artificial Sequence: Synthetic oligonucleotide
gaacuguuacauggaacug

SEQ ID NO: 3029735 - RNA, 19 nt, Artificial Sequence
  Description of Artificial Sequence: Synthetic oligonucleotide
uggguuccauaagaaagca

SEQ ID NO: 3029736 - RNA, 19 nt, Artificial Sequence
  Description of Artificial Sequence: Synthetic oligonucleotide
ugggugaugccaucccuga

SEQ ID NO: 3029737 - RNA, 19 nt, Artificial Sequence
  Description of Artificial Sequence: Synthetic oligonucleotide
uuuccaaguugcucuuggu

SEQ ID NO: 3029738 - RNA, 19 nt, Artificial Sequence
  Description of Artificial Sequence: Synthetic oligonucleotide
guuacauggaacugugagu

SEQ ID NO: 3029739 - RNA, 19 nt, Artificial Sequence
  Description of Artificial Sequence: Synthetic oligonucleotide
gaugagcaagccaguaaac

SEQ ID NO: 3029740 - RNA, 19 nt, Artificial Sequence
  Description of Artificial Sequence: Synthetic oligonucleotide
gugucaacuugacacacaa

SEQ ID NO: 3029741 - RNA, 19 nt, Artificial Sequence
  Description of Artificial Sequence: Synthetic oligonucleotide
cucaauggccucugcauca

SEQ ID NO: 3029742 - RNA, 19 nt, Artificial Sequence
  Description of Artificial Sequence: Synthetic oligonucleotide
auugauggaagagggccca

SEQ ID NO: 3029743 - RNA, 19 nt, Artificial Sequence
  Description of Artificial Sequence: Synthetic oligonucleotide
ugguccuggguuccauaag

SEQ ID NO: 3029744 - RNA, 19 nt, Artificial Sequence
  Description of Artificial Sequence: Synthetic oligonucleotide
cucacugcuuuugaugaug

SEQ ID NO: 3029745 - RNA, 19 nt, Artificial Sequence
  Description of Artificial Sequence: Synthetic oligonucleotide
caacuugacacacaagcua

SEQ ID NO: 3029746 - RNA, 19 nt, Artificial Sequence
  Description of Artificial Sequence: Synthetic oligonucleotide
uccuggguuccauaagaaa

SEQ ID NO: 3029747 - RNA, 19 nt, Artificial Sequence
  Description of Artificial Sequence: Synthetic oligonucleotide
cugagcaagccaugaugag

SEQ ID NO: 3029748 - RNA, 19 nt, Artificial Sequence
  Description of Artificial Sequence: Synthetic oligonucleotide
cuuuugaugaugaacuguu

SEQ ID NO: 3029749 - RNA, 19 nt, Artificial Sequence
  Description of Artificial Sequence: Synthetic oligonucleotide
uuacugcccugcuugaguu

SEQ ID NO: 3029750 - RNA, 19 nt, Artificial Sequence
  Description of Artificial Sequence: Synthetic oligonucleotide
ccugcuugaguuucugucc

SEQ ID NO: 3029751 - RNA, 19 nt, Artificial Sequence
  Description of Artificial Sequence: Synthetic oligonucleotide
agccaugaugagcaagcca

SEQ ID NO: 3029752 - RNA, 19 nt, Artificial Sequence
  Description of Artificial Sequence: Synthetic oligonucleotide
ggcugagcaagccaugaug

SEQ ID NO: 3029753 - RNA, 19 nt, Artificial Sequence
  Description of Artificial Sequence: Synthetic oligonucleotide
gugaugccaucccugagca

SEQ ID NO: 3029754 - RNA, 19 nt, Artificial Sequence
  Description of Artificial Sequence: Synthetic oligonucleotide
uacauggaacugugaguga

SEQ ID NO: 3029755 - RNA, 19 nt, Artificial Sequence
  Description of Artificial Sequence: Synthetic oligonucleotide
cuugaguuucuguccucac

SEQ ID NO: 3029756 - RNA, 19 nt, Artificial Sequence
  Description of Artificial Sequence: Synthetic oligonucleotide
ugagcaggugguccugggu

SEQ ID NO: 3029757 - RNA, 19 nt, Artificial Sequence
  Description of Artificial Sequence: Synthetic oligonucleotide
acauggaacugugagugaa

SEQ ID NO: 3029758 - RNA, 19 nt, Artificial Sequence
  Description of Artificial Sequence: Synthetic oligonucleotide
aguaccccucaauggccuc

SEQ ID NO: 3029759 - RNA, 19 nt, Artificial Sequence
  Description of Artificial Sequence: Synthetic oligonucleotide
ccuuuccuuuccaaguugc

SEQ ID NO: 3029760 - RNA, 19 nt, Artificial Sequence
  Description of Artificial Sequence: Synthetic oligonucleotide
ugauggaagagggcccagc

SEQ ID NO: 3029761 - RNA, 19 nt, Artificial Sequence
  Description of Artificial Sequence: Synthetic oligonucleotide
auccuuuccuuuccaaguu

SEQ ID NO: 3029762 - RNA, 19 nt, Artificial Sequence
  Description of Artificial Sequence: Synthetic oligonucleotide
caguaaacaguaccccuca

SEQ ID NO: 3029763 - RNA, 19 nt, Artificial Sequence
  Description of Artificial Sequence: Synthetic oligonucleotide
agcuccugccuccagguua

SEQ ID NO: 3029764 - RNA, 19 nt, Artificial Sequence
  Description of Artificial Sequence: Synthetic oligonucleotide
uggaacugugagugaaaua

SEQ ID NO: 3029765 - RNA, 19 nt, Artificial Sequence
  Description of Artificial Sequence: Synthetic oligonucleotide
auggaacugugagugaaau

SEQ ID NO: 3029766 - RNA, 19 nt, Artificial Sequence
  Description of Artificial Sequence: Synthetic oligonucleotide
uguccucacugcuuuugau

SEQ ID NO: 3029767 - RNA, 19 nt, Artificial Sequence
  Description of Artificial Sequence: Synthetic oligonucleotide
aguaaacaguaccccucaa

SEQ ID NO: 3029768 - RNA, 19 nt, Artificial Sequence
  Description of Artificial Sequence: Synthetic oligonucleotide
acacacaagcuagagucau

SEQ ID NO: 3029769 - RNA, 19 nt, Artificial Sequence
  Description of Artificial Sequence: Synthetic oligonucleotide
gagggcccagcccauugug

SEQ ID NO: 3029770 - RNA, 19 nt, Artificial Sequence
  Description of Artificial Sequence: Synthetic oligonucleotide
ccaguaaacaguaccccuc

SEQ ID NO: 3029771 - RNA, 19 nt, Artificial Sequence
  Description of Artificial Sequence: Synthetic oligonucleotide
gguccuggguuccauaaga

SEQ ID NO: 3029772 - RNA, 19 nt, Artificial Sequence
  Description of Artificial Sequence: Synthetic oligonucleotide
gacacacaagcuagaguca

SEQ ID NO: 3029773 - RNA, 19 nt, Artificial Sequence
  Description of Artificial Sequence: Synthetic oligonucleotide
uccagguuacugcccugcu

SEQ ID NO: 3029774 - RNA, 19 nt, Artificial Sequence
  Description of Artificial Sequence: Synthetic oligonucleotide
cugagcaggugguccuggg

SEQ ID NO: 3029775 - RNA, 19 nt, Artificial Sequence
  Description of Artificial Sequence: Synthetic oligonucleotide
guaaacaguaccccucaau

SEQ ID NO: 3029776 - RNA, 19 nt, Artificial Sequence
  Description of Artificial Sequence: Synthetic oligonucleotide
ugaugccaucccugagcag

SEQ ID NO: 3029777 - RNA, 19 nt, Artificial Sequence
  Description of Artificial Sequence: Synthetic oligonucleotide
guuacugcccugcuugagu

SEQ ID NO: 3029778 - RNA, 19 nt, Artificial Sequence
  Description of Artificial Sequence: Synthetic oligonucleotide
cuccagguuacugcccugc

SEQ ID NO: 3029779 - RNA, 19 nt, Artificial Sequence
  Description of Artificial Sequence: Synthetic oligonucleotide
ugcucuuggucaugguguu

SEQ ID NO: 3029780 - RNA, 19 nt, Artificial Sequence
  Description of Artificial Sequence: Synthetic oligonucleotide
agcaagccaguaaacagua

SEQ ID NO: 3029781 - RNA, 19 nt, Artificial Sequence
  Description of Artificial Sequence: Synthetic oligonucleotide
gaacugugagugaaauaaa

SEQ ID NO: 3029782 - RNA, 19 nt, Artificial Sequence
  Description of Artificial Sequence: Synthetic oligonucleotide
gugggugaugccaucccug

SEQ ID NO: 3029783 - RNA, 19 nt, Artificial Sequence
  Description of Artificial Sequence: Synthetic oligonucleotide
agcaggcugagcaagccau

SEQ ID NO: 3029784 - RNA, 19 nt, Artificial Sequence
  Description of Artificial Sequence: Synthetic oligonucleotide
uugauggaagagggcccag

SEQ ID NO: 3029785 - RNA, 19 nt, Artificial Sequence
  Description of Artificial Sequence: Synthetic oligonucleotide
ccauaagaaagcaggcuga

SEQ ID NO: 3029786 - RNA, 19 nt, Artificial Sequence
  Description of Artificial Sequence: Synthetic oligonucleotide
cuggauaauugugugucaa

SEQ ID NO: 3029787 - RNA, 19 nt, Artificial Sequence
  Description of Artificial Sequence: Synthetic oligonucleotide
agagggcccagcccauugu

SEQ ID NO: 3029788 - RNA, 19 nt, Artificial Sequence
  Description of Artificial Sequence: Synthetic oligonucleotide
aguugcucuuggucauggu

SEQ ID NO: 3029789 - RNA, 19 nt, Artificial Sequence
  Description of Artificial Sequence: Synthetic oligonucleotide
cauugugggugaugccauc

SEQ ID NO: 3029790 - RNA, 19 nt, Artificial Sequence
  Description of Artificial Sequence: Synthetic oligonucleotide
uccuuuccaaguugcucuu

SEQ ID NO: 3029791 - RNA, 19 nt, Artificial Sequence
  Description of Artificial Sequence: Synthetic oligonucleotide
agguuacugcccugcuuga

SEQ ID NO: 3029792 - RNA, 19 nt, Artificial Sequence
  Description of Artificial Sequence: Synthetic oligonucleotide
cccugcuugaguuucuguc

SEQ ID NO: 3029793 - RNA, 19 nt, Artificial Sequence
  Description of Artificial Sequence: Synthetic oligonucleotide
accccucaauggccucugc

SEQ ID NO: 3029794 - RNA, 19 nt, Artificial Sequence
  Description of Artificial Sequence: Synthetic oligonucleotide
cauggaacugugagugaaa

SEQ ID NO: 3029795 - RNA, 19 nt, Artificial Sequence
  Description of Artificial Sequence: Synthetic oligonucleotide
gcaauugauggaagagggc

SEQ ID NO: 3029796 - RNA, 19 nt, Artificial Sequence
  Description of Artificial Sequence: Synthetic oligonucleotide
gugguccuggguuccauaa

SEQ ID NO: 3029797 - RNA, 19 nt, Artificial Sequence
  Description of Artificial Sequence: Synthetic oligonucleotide
gugagugaaauaaauccuu

SEQ ID NO: 3029798 - RNA, 19 nt, Artificial Sequence
  Description of Artificial Sequence: Synthetic oligonucleotide
acuugacacacaagcuaga

SEQ ID NO: 3029799 - RNA, 19 nt, Artificial Sequence
  Description of Artificial Sequence: Synthetic oligonucleotide
gcaagccaugaugagcaag

SEQ ID NO: 3029800 - RNA, 19 nt, Artificial Sequence
  Description of Artificial Sequence: Synthetic oligonucleotide
cugcaucagcuccugccuc

SEQ ID NO: 3029801 - RNA, 19 nt, Artificial Sequence
  Description of Artificial Sequence: Synthetic oligonucleotide
uaccccucaauggccucug

SEQ ID NO: 3029802 - RNA, 19 nt, Artificial Sequence
  Description of Artificial Sequence: Synthetic oligonucleotide
cuguuacauggaacuguga

SEQ ID NO: 3029803 - RNA, 19 nt, Artificial Sequence
  Description of Artificial Sequence: Synthetic oligonucleotide
caaguugcucuuggucaug

SEQ ID NO: 3029804 - RNA, 19 nt, Artificial Sequence
  Description of Artificial Sequence: Synthetic oligonucleotide
ggguuccauaagaaagcag

SEQ ID NO: 3029805 - RNA, 19 nt, Artificial Sequence
  Description of Artificial Sequence: Synthetic oligonucleotide
caugaugagcaagccagua

SEQ ID NO: 3029806 - RNA, 19 nt, Artificial Sequence
  Description of Artificial Sequence: Synthetic oligonucleotide
gagcaggugguccuggguu

SEQ ID NO: 3029807 - RNA, 19 nt, Artificial Sequence
  Description of Artificial Sequence: Synthetic oligonucleotide
cuguccucacugcuuuuga

SEQ ID NO: 3029808 - RNA, 19 nt, Artificial Sequence
  Description of Artificial Sequence: Synthetic oligonucleotide
gcuggauaauuguguguca

SEQ ID NO: 3029809 - RNA, 19 nt, Artificial Sequence
  Description of Artificial Sequence: Synthetic oligonucleotide
ccucaauggccucugcauc

SEQ ID NO: 3029810 - RNA, 19 nt, Artificial Sequence
  Description of Artificial Sequence: Synthetic oligonucleotide
gguuacugcccugcuugag

SEQ ID NO: 3029811 - RNA, 19 nt, Artificial Sequence
  Description of Artificial Sequence: Synthetic oligonucleotide
cugcuugaguuucuguccu

SEQ ID NO: 3029812 - RNA, 19 nt, Artificial Sequence
  Description of Artificial Sequence: Synthetic oligonucleotide
gcuugaguuucuguccuca

SEQ ID NO: 3029813 - RNA, 19 nt, Artificial Sequence
  Description of Artificial Sequence: Synthetic oligonucleotide
gccaguaaacaguaccccu

SEQ ID NO: 3029814 - RNA, 19 nt, Artificial Sequence
  Description of Artificial Sequence: Synthetic oligonucleotide
gugcuggauaauugugugu

SEQ ID NO: 3029815 - RNA, 19 nt, Artificial Sequence
  Description of Artificial Sequence: Synthetic oligonucleotide
gcuuuugaugaugaacugu

SEQ ID NO: 3029816 - RNA, 19 nt, Artificial Sequence
  Description of Artificial Sequence: Synthetic oligonucleotide
gggugaugccaucccugag

SEQ ID NO: 3029817 - RNA, 19 nt, Artificial Sequence
  Description of Artificial Sequence: Synthetic oligonucleotide
uacugcccugcuugaguuu

SEQ ID NO: 3029818 - RNA, 19 nt, Artificial Sequence
  Description of Artificial Sequence: Synthetic oligonucleotide
caucagcuccugccuccag

SEQ ID NO: 3029819 - RNA, 19 nt, Artificial Sequence
  Description of Artificial Sequence: Synthetic oligonucleotide
cccauugugggugaugcca

SEQ ID NO: 3029820 - RNA, 19 nt, Artificial Sequence
  Description of Artificial Sequence: Synthetic oligonucleotide
uucuguccucacugcuuuu

SEQ ID NO: 3029821 - RNA, 19 nt, Artificial Sequence
  Description of Artificial Sequence: Synthetic oligonucleotide
augccaucccugagcaggu

SEQ ID NO: 3029822 - RNA, 19 nt, Artificial Sequence
  Description of Artificial Sequence: Synthetic oligonucleotide
guccuggguuccauaagaa

SEQ ID NO: 3029823 - RNA, 19 nt, Artificial Sequence
  Description of Artificial Sequence: Synthetic oligonucleotide
caucccugagcaggugguc

SEQ ID NO: 3029824 - RNA, 19 nt, Artificial Sequence
  Description of Artificial Sequence: Synthetic oligonucleotide
caguaccccucaauggccu

SEQ ID NO: 3029825 - RNA, 19 nt, Artificial Sequence
  Description of Artificial Sequence: Synthetic oligonucleotide
ugccaucccugagcaggug

SEQ ID NO: 3029826 - RNA, 19 nt, Artificial Sequence
  Description of Artificial Sequence: Synthetic oligonucleotide
guuucuguccucacugcuu

SEQ ID NO: 3029827 - RNA, 19 nt, Artificial Sequence
  Description of Artificial Sequence: Synthetic oligonucleotide
gcuccugccuccagguuac

SEQ ID NO: 3029828 - RNA, 19 nt, Artificial Sequence
  Description of Artificial Sequence: Synthetic oligonucleotide
cagcccauugugggugaug

SEQ ID NO: 3029829 - RNA, 19 nt, Artificial Sequence
  Description of Artificial Sequence: Synthetic oligonucleotide
ccugagcaggugguccugg

SEQ ID NO: 3029830 - RNA, 19 nt, Artificial Sequence
  Description of Artificial Sequence: Synthetic oligonucleotide
gcccauugugggugaugcc

SEQ ID NO: 3029831 - RNA, 19 nt, Artificial Sequence
  Description of Artificial Sequence: Synthetic oligonucleotide
guaccccucaauggccucu

SEQ ID NO: 3029832 - RNA, 19 nt, Artificial Sequence
  Description of Artificial Sequence: Synthetic oligonucleotide
ggugguccuggguuccaua

SEQ ID NO: 3029833 - RNA, 19 nt, Artificial Sequence
  Description of Artificial Sequence: Synthetic oligonucleotide
ccaaguugcucuuggucau

SEQ ID NO: 3029834 - RNA, 19 nt, Artificial Sequence
  Description of Artificial Sequence: Synthetic oligonucleotide
cccucaauggccucugcau

SEQ ID NO: 3029835 - RNA, 19 nt, Artificial Sequence
  Description of Artificial Sequence: Synthetic oligonucleotide
ccuccagguuacugcccug

SEQ ID NO: 3029836 - RNA, 19 nt, Artificial Sequence
  Description of Artificial Sequence: Synthetic oligonucleotide
ccccucaauggccucugca

SEQ ID NO: 3029837 - RNA, 19 nt, Artificial Sequence
  Description of Artificial Sequence: Synthetic oligonucleotide
ccaugaugagcaagccagu

SEQ ID NO: 3029838 - RNA, 19 nt, Artificial Sequence
  Description of Artificial Sequence: Synthetic oligonucleotide
gaagagggcccagcccauu

SEQ ID NO: 3029839 - RNA, 19 nt, Artificial Sequence
  Description of Artificial Sequence: Synthetic oligonucleotide
cccugagcaggugguccug

SEQ ID NO: 3029840 - RNA, 19 nt, Artificial Sequence
  Description of Artificial Sequence: Synthetic oligonucleotide
gcccugcuugaguuucugu

SEQ ID NO: 3029841 - RNA, 19 nt, Artificial Sequence
  Description of Artificial Sequence: Synthetic oligonucleotide
cccagcccauuguggguga

SEQ ID NO: 3029842 - RNA, 19 nt, Artificial Sequence
  Description of Artificial Sequence: Synthetic oligonucleotide
ggaagagggcccagcccau

SEQ ID NO: 3029843 - RNA, 19 nt, Artificial Sequence
  Description of Artificial Sequence: Synthetic oligonucleotide
ccucacugcuuuugaugau

SEQ ID NO: 3029844 - RNA, 19 nt, Artificial Sequence
  Description of Artificial Sequence: Synthetic oligonucleotide
ccagguuacugcccugcuu

SEQ ID NO: 3029845 - RNA, 19 nt, Artificial Sequence
  Description of Artificial Sequence: Synthetic oligonucleotide
uuuaugaccugcaugauug

SEQ ID NO: 3029846 - RNA, 19 nt, Artificial Sequence
  Description of Artificial Sequence: Synthetic oligonucleotide
aagaauuugccacacuccg

SEQ ID NO: 3029847 - RNA, 19 nt, Artificial Sequence
  Description of Artificial Sequence: Synthetic oligonucleotide
  modified_base (11)..(11): a, c, u, g, unknown or other
agugguaaggnuuuucccc

SEQ ID NO: 3029848 - RNA, 19 nt, Artificial Sequence
  Description of Artificial Sequence: Synthetic oligonucleotide
  modified_base (8)..(8): a, c, u, g, unknown or other
acuugugngguuuaugacc

SEQ ID NO: 3029849 - RNA, 19 nt, Artificial Sequence
  Description of Artificial Sequence: Synthetic oligonucleotide
uuggaggcaacacugaagg

SEQ ID NO: 3029850 - RNA, 19 nt, Artificial Sequence
  Description of Artificial Sequence: Synthetic oligonucleotide
ugcaugauugcgcaaaugc

SEQ ID NO: 3029851 - RNA, 19 nt, Artificial Sequence
  Description of Artificial Sequence: Synthetic oligonucleotide
ugcagugcaagcuuggagg

SEQ ID NO: 3029852 - RNA, 19 nt, Artificial Sequence
  Description of Artificial Sequence: Synthetic oligonucleotide
  modified_base (5)..(5): a, c, u, g, unknown or other
aaggnuuuuccccagugug

SEQ ID NO: 3029853 - RNA, 19 nt, Artificial Sequence
  Description of Artificial Sequence: Synthetic oligonucleotide
aaggucauaucgcuguccg

SEQ ID NO: 3029854 - RNA, 19 nt, Artificial Sequence
  Description of Artificial Sequence: Synthetic oligonucleotide
uaagaauuugccacacucc

SEQ ID NO: 3029855 - RNA, 19 nt, Artificial Sequence
  Description of Artificial Sequence: Synthetic oligonucleotide
ugcacauugagguuggaga

SEQ ID NO: 3029856 - RNA, 19 nt, Artificial Sequence
  Description of Artificial Sequence: Synthetic oligonucleotide
aaucgcuugccacacagcu

SEQ ID NO: 3029857 - RNA, 19 nt, Artificial Sequence
  Description of Artificial Sequence: Synthetic oligonucleotide
uguccucucaccuaggugu

SEQ ID NO: 3029858 - RNA, 19 nt, Artificial Sequence
  Description of Artificial Sequence: Synthetic oligonucleotide
uugagguuggagaugcagg

SEQ ID NO: 3029859 - RNA, 19 nt, Artificial Sequence
  Description of Artificial Sequence: Synthetic oligonucleotide
gaauuugccacacuccgug

SEQ ID NO: 3029860 - RNA, 19 nt, Artificial Sequence
  Description of Artificial Sequence: Synthetic oligonucleotide
ugaaucgcuugccacacag

SEQ ID NO: 3029861 - RNA, 19 nt, Artificial Sequence
  Description of Artificial Sequence: Synthetic oligonucleotide
cuaagaauuugccacacuc

SEQ ID NO: 3029862 - RNA, 19 nt, Artificial Sequence
  Description of Artificial Sequence: Synthetic oligonucleotide
caugauugcgcaaaugcac

SEQ ID NO: 3029863 - RNA, 19 nt, Artificial Sequence
  Description of Artificial Sequence: Synthetic oligonucleotide
ugccacacagcucacagug

SEQ ID NO: 3029864 - RNA, 19 nt, Artificial Sequence
  Description of Artificial Sequence: Synthetic oligonucleotide
ugcgcaaaugcacauugag

SEQ ID NO: 3029865 - RNA, 19 nt, Artificial Sequence
  Description of Artificial Sequence: Synthetic oligonucleotide
uggagaugcaggugaaucg

SEQ ID NO: 3029866 - RNA, 19 nt, Artificial Sequence
  Description of Artificial Sequence: Synthetic oligonucleotide
guggcuaagaauuugccac

SEQ ID NO: 3029867 - RNA, 19 nt, Artificial Sequence
  Description of Artificial Sequence: Synthetic oligonucleotide
guaccacaaggucauaucg

SEQ ID NO: 3029868 - RNA, 19 nt, Artificial Sequence
  Description of Artificial Sequence: Synthetic oligonucleotide
auugcgcaaaugcacauug

SEQ ID NO: 3029869 - RNA, 19 nt, Artificial Sequence
  Description of Artificial Sequence: Synthetic oligonucleotide
uuuggugaggucugagcgg

SEQ ID NO: 3029870 - RNA, 19 nt, Artificial Sequence
  Description of Artificial Sequence: Synthetic oligonucleotide
  modified_base (13)..(13): a, c, u, g, unknown or other
acagugguaaggnuuuucc

SEQ ID NO: 3029871 - RNA, 19 nt, Artificial Sequence
  Description of Artificial Sequence: Synthetic oligonucleotide
ucgcuugccacacagcuca

SEQ ID NO: 3029872 - RNA, 19 nt, Artificial Sequence
  Description of Artificial Sequence: Synthetic oligonucleotide
uuuucugugcagugcaagc

SEQ ID NO: 3029873 - RNA, 19 nt, Artificial Sequence
  Description of Artificial Sequence: Synthetic oligonucleotide
  modified_base (2)..(2): a, c, u, g, unknown or other
gngguuuaugaccugcaug

SEQ ID NO: 3029874 - RNA, 19 nt, Artificial Sequence
  Description of Artificial Sequence: Synthetic oligonucleotide
cuagguguguuuucugugc

SEQ ID NO: 3029875 - RNA, 19 nt, Artificial Sequence
  Description of Artificial Sequence: Synthetic oligonucleotide
  modified_base (7)..(7): a, c, u, g, unknown or other
guaaggnuuuuccccagug

SEQ ID NO: 3029876 - RNA, 19 nt, Artificial Sequence
  Description of Artificial Sequence: Synthetic oligonucleotide
uaccacaaggucauaucgc

SEQ ID NO: 3029877 - RNA, 19 nt, Artificial Sequence
  Description of Artificial Sequence: Synthetic oligonucleotide
augcaggugaaucgcuugc

SEQ ID NO: 3029878 - RNA, 19 nt, Artificial Sequence
  Description of Artificial Sequence: Synthetic oligonucleotide
ugagguuggagaugcaggu

SEQ ID NO: 3029879 - RNA, 19 nt, Artificial Sequence
  Description of Artificial Sequence: Synthetic oligonucleotide
ucauaucgcuguccgaagc

SEQ ID NO: 3029880 - RNA, 19 nt, Artificial Sequence
  Description of Artificial Sequence: Synthetic oligonucleotide
caaaugcacauugagguug

SEQ ID NO: 3029881 - RNA, 19 nt, Artificial Sequence
  Description of Artificial Sequence: Synthetic oligonucleotide
  modified_base (6)..(6): a, c, u, g, unknown or other
uaaggnuuuuccccagugu

SEQ ID NO: 3029882 - RNA, 19 nt, Artificial Sequence
  Description of Artificial Sequence: Synthetic oligonucleotide
augggaagggccucucccc

SEQ ID NO: 3029883 - RNA, 19 nt, Artificial Sequence
  Description of Artificial Sequence: Synthetic oligonucleotide
aaaugcacauugagguugg

SEQ ID NO: 3029884 - RNA, 19 nt, Artificial Sequence
  Description of Artificial Sequence: Synthetic oligonucleotide
uaugaccugcaugauugcg

SEQ ID NO: 3029885 - RNA, 19 nt, Artificial Sequence
  Description of Artificial Sequence: Synthetic oligonucleotide
augaccugcaugauugcgc

SEQ ID NO: 3029886 - RNA, 19 nt, Artificial Sequence
  Description of Artificial Sequence: Synthetic oligonucleotide
cuuggaggcaacacugaag

SEQ ID NO: 3029887 - RNA, 19 nt, Artificial Sequence
  Description of Artificial Sequence: Synthetic oligonucleotide
  modified_base (5)..(5): a, c, u, g, unknown or other
ugugngguuuaugaccugc

SEQ ID NO: 3029888 - RNA, 19 nt, Artificial Sequence
  Description of Artificial Sequence: Synthetic oligonucleotide
uguguuuucugugcagugc

SEQ ID NO: 3029889 - RNA, 19 nt, Artificial Sequence
  Description of Artificial Sequence: Synthetic oligonucleotide
gaugcaggugaaucgcuug

SEQ ID NO: 3029890 - RNA, 19 nt, Artificial Sequence
  Description of Artificial Sequence: Synthetic oligonucleotide
ucugugcagugcaagcuug

SEQ ID NO: 3029891 - RNA, 19 nt, Artificial Sequence
  Description of Artificial Sequence: Synthetic oligonucleotide
gucugugaagccucguccg

SEQ ID NO: 3029892 - RNA, 19 nt, Artificial Sequence
  Description of Artificial Sequence: Synthetic oligonucleotide
uguaccacaaggucauauc

SEQ ID NO: 3029893 - RNA, 19 nt, Artificial Sequence
  Description of Artificial Sequence: Synthetic oligonucleotide
aagcuuggaggcaacacug

SEQ ID NO: 3029894 - RNA, 19 nt, Artificial Sequence
  Description of Artificial Sequence: Synthetic oligonucleotide
auaucgcuguccgaagccc

SEQ ID NO: 3029895 - RNA, 19 nt, Artificial Sequence
  Description of Artificial Sequence: Synthetic oligonucleotide
acuccgugcacucugcugu

SEQ ID NO: 3029896 - RNA, 19 nt, Artificial Sequence
  Description of Artificial Sequence: Synthetic oligonucleotide
auugagguuggagaugcag

SEQ ID NO: 3029897 - RNA, 19 nt, Artificial Sequence
  Description of Artificial Sequence: Synthetic oligonucleotide
cauaucgcuguccgaagcc

SEQ ID NO: 3029898 - RNA, 19 nt, Artificial Sequence
  Description of Artificial Sequence: Synthetic oligonucleotide
ugaccugcaugauugcgca

SEQ ID NO: 3029899 - RNA, 19 nt, Artificial Sequence
  Description of Artificial Sequence: Synthetic oligonucleotide
ugguguaccacaaggucau

SEQ ID NO: 3029900 - RNA, 19 nt, Artificial Sequence
  Description of Artificial Sequence: Synthetic oligonucleotide
ggacuugccacacucuggg

SEQ ID NO: 3029901 - RNA, 19 nt, Artificial Sequence
  Description of Artificial Sequence: Synthetic oligonucleotide
caugggaagggccucuccc

SEQ ID NO: 3029902 - RNA, 19 nt, Artificial Sequence
  Description of Artificial Sequence: Synthetic oligonucleotide
  modified_base (7)..(7): a, c, u, g, unknown or other
cuugugngguuuaugaccu

SEQ ID NO: 3029903 - RNA, 19 nt, Artificial Sequence
  Description of Artificial Sequence: Synthetic oligonucleotide
  modified_base (12)..(12): a, c, u, g, unknown or other
cagugguaaggnuuuuccc

SEQ ID NO: 3029904 - RNA, 19 nt, Artificial Sequence
  Description of Artificial Sequence: Synthetic oligonucleotide
uuggagaugcaggugaauc

SEQ ID NO: 3029905 - RNA, 19 nt, Artificial Sequence
  Description of Artificial Sequence: Synthetic oligonucleotide
uagguguguuuucugugca

SEQ ID NO: 3029906 - RNA, 19 nt, Artificial Sequence
  Description of Artificial Sequence: Synthetic oligonucleotide
ucugugaagccucguccgc

SEQ ID NO: 3029907 - RNA, 19 nt, Artificial Sequence
  Description of Artificial Sequence: Synthetic oligonucleotide
  modified_base (18)..(18): a, c, u, g, unknown or other
cacucugggcacuugugng

SEQ ID NO: 3029908 - RNA, 19 nt, Artificial Sequence
  Description of Artificial Sequence: Synthetic oligonucleotide
acagcucacagugguaagg

SEQ ID NO: 3029909 - RNA, 19 nt, Artificial Sequence
  Description of Artificial Sequence: Synthetic oligonucleotide
uuucugugcagugcaagcu

SEQ ID NO: 3029910 - RNA, 19 nt, Artificial Sequence
  Description of Artificial Sequence: Synthetic oligonucleotide
  modified_base (3)..(3): a, c, u, g, unknown or other
ugngguuuaugaccugcau

SEQ ID NO: 3029911 - RNA, 19 nt, Artificial Sequence
  Description of Artificial Sequence: Synthetic oligonucleotide
uggcuaagaauuugccaca

SEQ ID NO: 3029912 - RNA, 19 nt, Artificial Sequence
  Description of Artificial Sequence: Synthetic oligonucleotide
ucugggcaugggaagggcc

SEQ ID NO: 3029913 - RNA, 19 nt, Artificial Sequence
  Description of Artificial Sequence: Synthetic oligonucleotide
aggugaaucgcuugccaca

SEQ ID NO: 3029914 - RNA, 19 nt, Artificial Sequence
  Description of Artificial Sequence: Synthetic oligonucleotide
acaaggucauaucgcuguc

SEQ ID NO: 3029915 - RNA, 19 nt, Artificial Sequence
  Description of Artificial Sequence: Synthetic oligonucleotide
  modified_base (10)..(10): a, c, u, g, unknown or other
gcacuugugngguuuauga

SEQ ID NO: 3029916 - RNA, 19 nt, Artificial Sequence
  Description of Artificial Sequence: Synthetic oligonucleotide
ucugagcggucugugaagc

SEQ ID NO: 3029917 - RNA, 19 nt, Artificial Sequence
  Description of Artificial Sequence: Synthetic oligonucleotide
cugguguaccacaagguca

SEQ ID NO: 3029918 - RNA, 19 nt, Artificial Sequence
  Description of Artificial Sequence: Synthetic oligonucleotide
  modified_base (9)..(9): a, c, u, g, unknown or other
cacuugugngguuuaugac

SEQ ID NO: 3029919 - RNA, 19 nt, Artificial Sequence
  Description of Artificial Sequence: Synthetic oligonucleotide
ugugacagugaccggccgu

SEQ ID NO: 3029920 - RNA, 19 nt, Artificial Sequence
  Description of Artificial Sequence: Synthetic oligonucleotide
guuuucugugcagugcaag

SEQ ID NO: 3029921 - RNA, 19 nt, Artificial Sequence
  Description of Artificial Sequence: Synthetic oligonucleotide
uuaugaccugcaugauugc

SEQ ID NO: 3029922 - RNA, 19 nt, Artificial Sequence
  Description of Artificial Sequence: Synthetic oligonucleotide
accuagguguguuuucugu

SEQ ID NO: 3029923 - RNA, 19 nt, Artificial Sequence
  Description of Artificial Sequence: Synthetic oligonucleotide
  modified_base (9)..(9): a, c, u, g, unknown or other
ugguaaggnuuuuccccag

SEQ ID NO: 3029924 - RNA, 19 nt, Artificial Sequence
  Description of Artificial Sequence: Synthetic oligonucleotide
acucugcuguccucucacc

SEQ ID NO: 3029925 - RNA, 19 nt, Artificial Sequence
  Description of Artificial Sequence: Synthetic oligonucleotide
guguuuucugugcagugca

SEQ ID NO: 3029926 - RNA, 19 nt, Artificial Sequence
  Description of Artificial Sequence: Synthetic oligonucleotide
ugugcgcagguguuuggug

SEQ ID NO: 3029927 - RNA, 19 nt, Artificial Sequence
  Description of Artificial Sequence: Synthetic oligonucleotide
ggucugugaagccucgucc

SEQ ID NO: 3029928 - RNA, 19 nt, Artificial Sequence
  Description of Artificial Sequence: Synthetic oligonucleotide
gucauaucgcuguccgaag

SEQ ID NO: 3029929 - RNA, 19 nt, Artificial Sequence
  Description of Artificial Sequence: Synthetic oligonucleotide
uuggugaggucugagcggu

SEQ ID NO: 3029930 - RNA, 19 nt, Artificial Sequence
  Description of Artificial Sequence: Synthetic oligonucleotide
ggaggcaacacugaaggac

SEQ ID NO: 3029931 - RNA, 19 nt, Artificial Sequence
  Description of Artificial Sequence: Synthetic oligonucleotide
ugagcggucugugaagccu

SEQ ID NO: 3029932 - RNA, 19 nt, Artificial Sequence
  Description of Artificial Sequence: Synthetic oligonucleotide
augauugcgcaaaugcaca

SEQ ID NO: 3029933 - RNA, 19 nt, Artificial Sequence
  Description of Artificial Sequence: Synthetic oligonucleotide
caggugaaucgcuugccac

SEQ ID NO: 3029934 - RNA, 19 nt, Artificial Sequence
  Description of Artificial Sequence: Synthetic oligonucleotide
ugaagccucguccgcacuc

SEQ ID NO: 3029935 - RNA, 19 nt, Artificial Sequence
  Description of Artificial Sequence: Synthetic oligonucleotide
ugugaagccucguccgcac

SEQ ID NO: 3029936 - RNA, 19 nt, Artificial Sequence
  Description of Artificial Sequence: Synthetic oligonucleotide
uaucgcuguccgaagcccu

SEQ ID NO: 3029937 - RNA, 19 nt, Artificial Sequence
  Description of Artificial Sequence: Synthetic oligonucleotide
agguguguuuucugugcag

SEQ ID NO: 3029938 - RNA, 19 nt, Artificial Sequence
  Description of Artificial Sequence: Synthetic oligonucleotide
gugcagugcaagcuuggag

SEQ ID NO: 3029939 - RNA, 19 nt, Artificial Sequence
  Description of Artificial Sequence: Synthetic oligonucleotide
gaagcccuugccacaagug

SEQ ID NO: 3029940 - RNA, 19 nt, Artificial Sequence
  Description of Artificial Sequence: Synthetic oligonucleotide
ugauugcgcaaaugcacau

SEQ ID NO: 3029941 - RNA, 19 nt, Artificial Sequence
  Description of Artificial Sequence: Synthetic oligonucleotide
guguguuuucugugcagug

SEQ ID NO: 3029942 - RNA, 19 nt, Artificial Sequence
  Description of Artificial Sequence: Synthetic oligonucleotide
cugugcagugcaagcuugg

SEQ ID NO: 3029943 - RNA, 19 nt, Artificial Sequence
  Description of Artificial Sequence: Synthetic oligonucleotide
  modified_base (4)..(4): a, c, u, g, unknown or other
aggnuuuuccccagugugu

SEQ ID NO: 3029944 - RNA, 19 nt, Artificial Sequence
  Description of Artificial Sequence: Synthetic oligonucleotide
augcacauugagguuggag

SEQ ID NO: 3029945 - RNA, 19 nt, Artificial Sequence
  Description of Artificial Sequence: Synthetic oligonucleotide
uugcgcaaaugcacauuga

SEQ ID NO: 3029946 - RNA, 19 nt, Artificial Sequence
  Description of Artificial Sequence: Synthetic oligonucleotide
ugcgcugguguaccacaag

SEQ ID NO: 3029947 - RNA, 19 nt, Artificial Sequence
  Description of Artificial Sequence: Synthetic oligonucleotide
acagugaccggccguggcu

SEQ ID NO: 3029948 - RNA, 19 nt, Artificial Sequence
  Description of Artificial Sequence: Synthetic oligonucleotide
  modified_base (3)..(3): a, c, u, g, unknown or other
ggnuuuuccccagugugug

SEQ ID NO: 3029949 - RNA, 19 nt, Artificial Sequence
  Description of Artificial Sequence: Synthetic oligonucleotide
gucugagcggucugugaag

SEQ ID NO: 3029950 - RNA, 19 nt, Artificial Sequence
  Description of Artificial Sequence: Synthetic oligonucleotide
agugcaagcuuggaggcaa

SEQ ID NO: 3029951 - RNA, 19 nt, Artificial Sequence
  Description of Artificial Sequence: Synthetic oligonucleotide
ugcaggugaaucgcuugcc

SEQ ID NO: 3029952 - RNA, 19 nt, Artificial Sequence
  Description of Artificial Sequence: Synthetic oligonucleotide
caaggucauaucgcugucc

SEQ ID NO: 3029953 - RNA, 19 nt, Artificial Sequence
  Description of Artificial Sequence: Synthetic oligonucleotide
aggacuugccacacucugg

SEQ ID NO: 3029954 - RNA, 19 nt, Artificial Sequence
  Description of Artificial Sequence: Synthetic oligonucleotide
ggagaugcaggugaaucgc

SEQ ID NO: 3029955 - RNA, 19 nt, Artificial Sequence
  Description of Artificial Sequence: Synthetic oligonucleotide
cacaaggucauaucgcugu

SEQ ID NO: 3029956 - RNA, 19 nt, Artificial Sequence
  Description of Artificial Sequence: Synthetic oligonucleotide
uccccuguguggcugcgcu

SEQ ID NO: 3029957 - RNA, 19 nt, Artificial Sequence
  Description of Artificial Sequence: Synthetic oligonucleotide
  modified_base (14)..(14): a, c, u, g, unknown or other
cacagugguaaggnuuuuc

SEQ ID NO: 3029958 - RNA, 19 nt, Artificial Sequence
  Description of Artificial Sequence: Synthetic oligonucleotide
cacucugcuguccucucac

SEQ ID NO: 3029959 - RNA, 19 nt, Artificial Sequence
  Description of Artificial Sequence: Synthetic oligonucleotide
acacagcucacagugguaa

SEQ ID NO: 3029960 - RNA, 19 nt, Artificial Sequence
  Description of Artificial Sequence: Synthetic oligonucleotide
gcgcaaaugcacauugagg

SEQ ID NO: 3029961 - RNA, 19 nt, Artificial Sequence
  Description of Artificial Sequence: Synthetic oligonucleotide
ugugcagugcaagcuugga

SEQ ID NO: 3029962 - RNA, 19 nt, Artificial Sequence
  Description of Artificial Sequence: Synthetic oligonucleotide
cacagcucacagugguaag

SEQ ID NO: 3029963 - RNA, 19 nt, Artificial Sequence
  Description of Artificial Sequence: Synthetic oligonucleotide
gcugguguaccacaagguc

SEQ ID NO: 3029964 - RNA, 19 nt, Artificial Sequence
  Description of Artificial Sequence: Synthetic oligonucleotide
agaauuugccacacuccgu

SEQ ID NO: 3029965 - RNA, 19 nt, Artificial Sequence
  Description of Artificial Sequence: Synthetic oligonucleotide
gcagugcaagcuuggaggc

SEQ ID NO: 3029966 - RNA, 19 nt, Artificial Sequence
  Description of Artificial Sequence: Synthetic oligonucleotide
uggaggcaacacugaagga

SEQ ID NO: 3029967 - RNA, 19 nt, Artificial Sequence
  Description of Artificial Sequence: Synthetic oligonucleotide
gaggcaacacugaaggacu

SEQ ID NO: 3029968 - RNA, 19 nt, Artificial Sequence
  Description of Artificial Sequence: Synthetic oligonucleotide
gaaucgcuugccacacagc

SEQ ID NO: 3029969 - RNA, 19 nt, Artificial Sequence
  Description of Artificial Sequence: Synthetic oligonucleotide
  modified_base (16)..(16): a, c, u, g, unknown or other
cucacagugguaaggnuuu

SEQ ID NO: 3029970 - RNA, 19 nt, Artificial Sequence
  Description of Artificial Sequence: Synthetic oligonucleotide
gugacagugaccggccgug

SEQ ID NO: 3029971 - RNA, 19 nt, Artificial Sequence
  Description of Artificial Sequence: Synthetic oligonucleotide
cuguccucucaccuaggug

SEQ ID NO: 3029972 - RNA, 19 nt, Artificial Sequence
  Description of Artificial Sequence: Synthetic oligonucleotide
cacacuccgugcacucugc

SEQ ID NO: 3029973 - RNA, 19 nt, Artificial Sequence
  Description of Artificial Sequence: Synthetic oligonucleotide
uccccagugugugugcgca

SEQ ID NO: 3029974 - RNA, 19 nt, Artificial Sequence
  Description of Artificial Sequence: Synthetic oligonucleotide
  modified_base (6)..(6): a, c, u, g, unknown or other
uugugngguuuaugaccug

SEQ ID NO: 3029975 - RNA, 19 nt, Artificial Sequence
  Description of Artificial Sequence: Synthetic oligonucleotide
accugcaugauugcgcaaa

SEQ ID NO: 3029976 - RNA, 19 nt, Artificial Sequence
  Description of Artificial Sequence: Synthetic oligonucleotide
aucgcuugccacacagcuc

SEQ ID NO: 3029977 - RNA, 19 nt, Artificial Sequence
  Description of Artificial Sequence: Synthetic oligonucleotide
ugaggucugagcggucugu

SEQ ID NO: 3029978 - RNA, 19 nt, Artificial Sequence
  Description of Artificial Sequence: Synthetic oligonucleotide
uguggcugcgcugguguac

SEQ ID NO: 3029979 - RNA, 19 nt, Artificial Sequence
  Description of Artificial Sequence: Synthetic oligonucleotide
cugagcggucugugaagcc

SEQ ID NO: 3029980 - RNA, 19 nt, Artificial Sequence
  Description of Artificial Sequence: Synthetic oligonucleotide
ucucaccuagguguguuuu

SEQ ID NO: 3029981 - RNA, 19 nt, Artificial Sequence
  Description of Artificial Sequence: Synthetic oligonucleotide
ggucauaucgcuguccgaa

SEQ ID NO: 3029982 - RNA, 19 nt, Artificial Sequence
  Description of Artificial Sequence: Synthetic oligonucleotide
ccuagguguguuuucugug

SEQ ID NO: 3029983 - RNA, 19 nt, Artificial Sequence
  Description of Artificial Sequence: Synthetic oligonucleotide
cacuccgugcacucugcug

SEQ ID NO: 3029984 - RNA, 19 nt, Artificial Sequence
  Description of Artificial Sequence: Synthetic oligonucleotide
cugugacagugaccggccg

SEQ ID NO: 3029985 - RNA, 19 nt, Artificial Sequence
  Description of Artificial Sequence: Synthetic oligonucleotide
cucguccgcacucugggca

SEQ ID NO: 3029986 - RNA, 19 nt, Artificial Sequence
  Description of Artificial Sequence: Synthetic oligonucleotide
caagcuuggaggcaacacu

SEQ ID NO: 3029987 - RNA, 19 nt, Artificial Sequence
  Description of Artificial Sequence: Synthetic oligonucleotide
ugcaagcuuggaggcaaca

SEQ ID NO: 3029988 - RNA, 19 nt, Artificial Sequence
  Description of Artificial Sequence: Synthetic oligonucleotide
aagccucguccgcacucug

SEQ ID NO: 3029989 - RNA, 19 nt, Artificial Sequence
  Description of Artificial Sequence: Synthetic oligonucleotide
  modified_base (18)..(18): a, c, u, g, unknown or other
agcucacagugguaaggnu

SEQ ID NO: 3029990 - RNA, 19 nt, Artificial Sequence
  Description of Artificial Sequence: Synthetic oligonucleotide
aggucugagcggucuguga

SEQ ID NO: 3029991 - RNA, 19 nt, Artificial Sequence
  Description of Artificial Sequence: Synthetic oligonucleotide
cuguccgaagcccuugcca

SEQ ID NO: 3029992 - RNA, 19 nt, Artificial Sequence
  Description of Artificial Sequence: Synthetic oligonucleotide
guuuaugaccugcaugauu

SEQ ID NO: 3029993 - RNA, 19 nt, Artificial Sequence
  Description of Artificial Sequence: Synthetic oligonucleotide
gccucguccgcacucuggg

SEQ ID NO: 3029994 - RNA, 19 nt, Artificial Sequence
  Description of Artificial Sequence: Synthetic oligonucleotide
agguguuuggugaggucug

SEQ ID NO: 3029995 - RNA, 19 nt, Artificial Sequence
  Description of Artificial Sequence: Synthetic oligonucleotide
caccuagguguguuuucug

SEQ ID NO: 3029996 - RNA, 19 nt, Artificial Sequence
  Description of Artificial Sequence: Synthetic oligonucleotide
ggugaaucgcuugccacac

SEQ ID NO: 3029997 - RNA, 19 nt, Artificial Sequence
  Description of Artificial Sequence: Synthetic oligonucleotide
cgcaaaugcacauugaggu

SEQ ID NO: 3029998 - RNA, 19 nt, Artificial Sequence
  Description of Artificial Sequence: Synthetic oligonucleotide
guguuuggugaggucugag

SEQ ID NO: 3029999 - RNA, 19 nt, Artificial Sequence
  Description of Artificial Sequence: Synthetic oligonucleotide
  modified_base (4)..(4): a, c, u, g, unknown or other
gugngguuuaugaccugca

SEQ ID NO: 3030000 - RNA, 19 nt, Artificial Sequence
  Description of Artificial Sequence: Synthetic oligonucleotide
aggucauaucgcuguccga

SEQ ID NO: 3030001 - RNA, 19 nt, Artificial Sequence
  Description of Artificial Sequence: Synthetic oligonucleotide
aaugcacauugagguugga

SEQ ID NO: 3030002 - RNA, 19 nt, Artificial Sequence
  Description of Artificial Sequence: Synthetic oligonucleotide
gcaugauugcgcaaaugca

SEQ ID NO: 3030003 - RNA, 19 nt, Artificial Sequence
  Description of Artificial Sequence: Synthetic oligonucleotide
  modified_base (2)..(2): a, c, u, g, unknown or other
gnuuuuccccagugugugu

SEQ ID NO: 3030004 - RNA, 19 nt, Artificial Sequence
  Description of Artificial Sequence: Synthetic oligonucleotide
ugccacacuccgugcacuc

SEQ ID NO: 3030005 - RNA, 19 nt, Artificial Sequence
  Description of Artificial Sequence: Synthetic oligonucleotide
ggucugagcggucugugaa

SEQ ID NO: 3030006 - RNA, 19 nt, Artificial Sequence
  Description of Artificial Sequence: Synthetic oligonucleotide
  modified_base (13)..(13): a, c, u, g, unknown or other
ugggcacuugugngguuua

SEQ ID NO: 3030007 - RNA, 19 nt, Artificial Sequence
  Description of Artificial Sequence: Synthetic oligonucleotide
gugaggucugagcggucug

SEQ ID NO: 3030008 - RNA, 19 nt, Artificial Sequence
  Description of Artificial Sequence: Synthetic oligonucleotide
guggcugcgcugguguacc

SEQ ID NO: 3030009 - RNA, 19 nt, Artificial Sequence
  Description of Artificial Sequence: Synthetic oligonucleotide
ugaccggccguggcuaaga

SEQ ID NO: 3030010 - RNA, 19 nt, Artificial Sequence
  Description of Artificial Sequence: Synthetic oligonucleotide
cugcaugauugcgcaaaug

SEQ ID NO: 3030011 - RNA, 19 nt, Artificial Sequence
  Description of Artificial Sequence: Synthetic oligonucleotide
ugcacucugcuguccucuc

SEQ ID NO: 3030012 - RNA, 19 nt, Artificial Sequence
  Description of Artificial Sequence: Synthetic oligonucleotide
ccguggcuaagaauuugcc

SEQ ID NO: 3030013 - RNA, 19 nt, Artificial Sequence
  Description of Artificial Sequence: Synthetic oligonucleotide
  modified_base (19)..(19): a, c, u, g, unknown or other
cagcucacagugguaaggn

SEQ ID NO: 3030014 - RNA, 19 nt, Artificial Sequence
  Description of Artificial Sequence: Synthetic oligonucleotide
ucguccgcacucugggcau

SEQ ID NO: 3030015 - RNA, 19 nt, Artificial Sequence
  Description of Artificial Sequence: Synthetic oligonucleotide
cagguguuuggugaggucu

SEQ ID NO: 3030016 - RNA, 19 nt, Artificial Sequence
  Description of Artificial Sequence: Synthetic oligonucleotide
acacuccgugcacucugcu

SEQ ID NO: 3030017 - RNA, 19 nt, Artificial Sequence
  Description of Artificial Sequence: Synthetic oligonucleotide
ggcuaagaauuugccacac

SEQ ID NO: 3030018 - RNA, 19 nt, Artificial Sequence
  Description of Artificial Sequence: Synthetic oligonucleotide
uccgugcacucugcugucc

SEQ ID NO: 3030019 - RNA, 19 nt, Artificial Sequence
  Description of Artificial Sequence: Synthetic oligonucleotide
gccguggcuaagaauuugc

SEQ ID NO: 3030020 - RNA, 19 nt, Artificial Sequence
  Description of Artificial Sequence: Synthetic oligonucleotide
gagcggucugugaagccuc

SEQ ID NO: 3030021 - RNA, 19 nt, Artificial Sequence
  Description of Artificial Sequence: Synthetic oligonucleotide
  modified_base (11)..(11): a, c, u, g, unknown or other
ggcacuugugngguuuaug

SEQ ID NO: 3030022 - RNA, 19 nt, Artificial Sequence
  Description of Artificial Sequence: Synthetic oligonucleotide
agaugcaggugaaucgcuu

SEQ ID NO: 3030023 - RNA, 19 nt, Artificial Sequence
  Description of Artificial Sequence: Synthetic oligonucleotide
agcuuggaggcaacacuga

SEQ ID NO: 3030024 - RNA, 19 nt, Artificial Sequence
  Description of Artificial Sequence: Synthetic oligonucleotide
gcugugacagugaccggcc

SEQ ID NO: 3030025 - RNA, 19 nt, Artificial Sequence
  Description of Artificial Sequence: Synthetic oligonucleotide
agcggucugugaagccucg

SEQ ID NO: 3030026 - RNA, 19 nt, Artificial Sequence
  Description of Artificial Sequence: Synthetic oligonucleotide
agccucguccgcacucugg

SEQ ID NO: 3030027 - RNA, 19 nt, Artificial Sequence
  Description of Artificial Sequence: Synthetic oligonucleotide
ucgcuguccgaagcccuug

SEQ ID NO: 3030028 - RNA, 19 nt, Artificial Sequence
  Description of Artificial Sequence: Synthetic oligonucleotide
gugcugugacagugaccgg

SEQ ID NO: 3030029 - RNA, 19 nt, Artificial Sequence
  Description of Artificial Sequence: Synthetic oligonucleotide
guccucucaccuaggugug

SEQ ID NO: 3030030 - RNA, 19 nt, Artificial Sequence
  Description of Artificial Sequence: Synthetic oligonucleotide
cagugugugugcgcaggug

SEQ ID NO: 3030031 - RNA, 19 nt, Artificial Sequence
  Description of Artificial Sequence: Synthetic oligonucleotide
gaagggccucuccccugug

SEQ ID NO: 3030032 - RNA, 19 nt, Artificial Sequence
  Description of Artificial Sequence: Synthetic oligonucleotide
guccgaagcccuugccaca

SEQ ID NO: 3030033 - RNA, 19 nt, Artificial Sequence
  Description of Artificial Sequence: Synthetic oligonucleotide
cugugaagccucguccgca

SEQ ID NO: 3030034 - RNA, 19 nt, Artificial Sequence
  Description of Artificial Sequence: Synthetic oligonucleotide
accggccguggcuaagaau

SEQ ID NO: 3030035 - RNA, 19 nt, Artificial Sequence
  Description of Artificial Sequence: Synthetic oligonucleotide
cuccgugcacucugcuguc

SEQ ID NO: 3030036 - RNA, 19 nt, Artificial Sequence
  Description of Artificial Sequence: Synthetic oligonucleotide
gcuuggaggcaacacugaa

SEQ ID NO: 3030037 - RNA, 19 nt, Artificial Sequence
  Description of Artificial Sequence: Synthetic oligonucleotide
agugaccggccguggcuaa

SEQ ID NO: 3030038 - RNA, 19 nt, Artificial Sequence
  Description of Artificial Sequence: Synthetic oligonucleotide
cguggcuaagaauuugcca

SEQ ID NO: 3030039 - RNA, 19 nt, Artificial Sequence
  Description of Artificial Sequence: Synthetic oligonucleotide
gcugcgcugguguaccaca

SEQ ID NO: 3030040 - RNA, 19 nt, Artificial Sequence
  Description of Artificial Sequence: Synthetic oligonucleotide
gcuguccgaagcccuugcc

SEQ ID NO: 3030041 - RNA, 19 nt, Artificial Sequence
  Description of Artificial Sequence: Synthetic oligonucleotide
  modified_base (16)..(16): a, c, u, g, unknown or other
cucugggcacuugugnggu

SEQ ID NO: 3030042 - RNA, 19 nt, Artificial Sequence
  Description of Artificial Sequence: Synthetic oligonucleotide
gccacacagcucacagugg

SEQ ID NO: 3030043 - RNA, 19 nt, Artificial Sequence
  Description of Artificial Sequence: Synthetic oligonucleotide
cauugagguuggagaugca

SEQ ID NO: 3030044 - RNA, 19 nt, Artificial Sequence
  Description of Artificial Sequence: Synthetic oligonucleotide
gcaugggaagggccucucc

SEQ ID NO: 3030045 - RNA, 19 nt, Artificial Sequence
  Description of Artificial Sequence: Synthetic oligonucleotide
gugaaucgcuugccacaca

SEQ ID NO: 3030046 - RNA, 19 nt, Artificial Sequence
  Description of Artificial Sequence: Synthetic oligonucleotide
gauugcgcaaaugcacauu

SEQ ID NO: 3030047 - RNA, 19 nt, Artificial Sequence
  Description of Artificial Sequence: Synthetic oligonucleotide
gaagccucguccgcacucu

SEQ ID NO: 3030048 - RNA, 19 nt, Artificial Sequence
  Description of Artificial Sequence: Synthetic oligonucleotide
  modified_base (15)..(15): a, c, u, g, unknown or other
ucugggcacuugugngguu

SEQ ID NO: 3030049 - RNA, 19 nt, Artificial Sequence
  Description of Artificial Sequence: Synthetic oligonucleotide
guguaccacaaggucauau

SEQ ID NO: 3030050 - RNA, 19 nt, Artificial Sequence
  Description of Artificial Sequence: Synthetic oligonucleotide
  modified_base (15)..(15): a, c, u, g, unknown or other
ucacagugguaaggnuuuu

SEQ ID NO: 3030051 - RNA, 19 nt, Artificial Sequence
  Description of Artificial Sequence: Synthetic oligonucleotide
cuguguggcugcgcuggug

SEQ ID NO: 3030052 - RNA, 19 nt, Artificial Sequence
  Description of Artificial Sequence: Synthetic oligonucleotide
cacacagcucacaguggua

SEQ ID NO: 3030053 - RNA, 19 nt, Artificial Sequence
  Description of Artificial Sequence: Synthetic oligonucleotide
  modified_base (8)..(8): a, c, u, g, unknown or other
gguaaggnuuuuccccagu

SEQ ID NO: 3030054 - RNA, 19 nt, Artificial Sequence
  Description of Artificial Sequence: Synthetic oligonucleotide
ggccguggcuaagaauuug

SEQ ID NO: 3030055 - RNA, 19 nt, Artificial Sequence
  Description of Artificial Sequence: Synthetic oligonucleotide
gaccugcaugauugcgcaa

SEQ ID NO: 3030056 - RNA, 19 nt, Artificial Sequence
  Description of Artificial Sequence: Synthetic oligonucleotide
uggcugcgcugguguacca

SEQ ID NO: 3030057 - RNA, 19 nt, Artificial Sequence
  Description of Artificial Sequence: Synthetic oligonucleotide
gcagguguuuggugagguc

SEQ ID NO: 3030058 - RNA, 19 nt, Artificial Sequence
  Description of Artificial Sequence: Synthetic oligonucleotide
gcaaaugcacauugagguu

SEQ ID NO: 3030059 - RNA, 19 nt, Artificial Sequence
  Description of Artificial Sequence: Synthetic oligonucleotide
gugaccggccguggcuaag

SEQ ID NO: 3030060 - RNA, 19 nt, Artificial Sequence
  Description of Artificial Sequence: Synthetic oligonucleotide
gcuaagaauuugccacacu

SEQ ID NO: 3030061 - RNA, 19 nt, Artificial Sequence
  Description of Artificial Sequence: Synthetic oligonucleotide
cugcgcugguguaccacaa

SEQ ID NO: 3030062 - RNA, 19 nt, Artificial Sequence
  Description of Artificial Sequence: Synthetic oligonucleotide
gaccggccguggcuaagaa

SEQ ID NO: 3030063 - RNA, 19 nt, Artificial Sequence
  Description of Artificial Sequence: Synthetic oligonucleotide
gguguuuggugaggucuga

SEQ ID NO: 3030064 - RNA, 19 nt, Artificial Sequence
  Description of Artificial Sequence: Synthetic oligonucleotide
cagugcaagcuuggaggca

SEQ ID NO: 3030065 - RNA, 19 nt, Artificial Sequence
  Description of Artificial Sequence: Synthetic oligonucleotide
ccggccguggcuaagaauu

SEQ ID NO: 3030066 - RNA, 19 nt, Artificial Sequence
  Description of Artificial Sequence: Synthetic oligonucleotide
gugcacucugcuguccucu

SEQ ID NO: 3030067 - RNA, 19 nt, Artificial Sequence
  Description of Artificial Sequence: Synthetic oligonucleotide
aucgcuguccgaagcccuu

SEQ ID NO: 3030068 - RNA, 19 nt, Artificial Sequence
  Description of Artificial Sequence: Synthetic oligonucleotide
ggugaggucugagcggucu

SEQ ID NO: 3030069 - RNA, 19 nt, Artificial Sequence
  Description of Artificial Sequence: Synthetic oligonucleotide
  modified_base (17)..(17): a, c, u, g, unknown or other
gcucacagugguaaggnuu

SEQ ID NO: 3030070 - RNA, 19 nt, Artificial Sequence
  Description of Artificial Sequence: Synthetic oligonucleotide
  modified_base (14)..(14): a, c, u, g, unknown or other
cugggcacuugugngguuu

SEQ ID NO: 3030071 - RNA, 19 nt, Artificial Sequence
  Description of Artificial Sequence: Synthetic oligonucleotide
ccucguccgcacucugggc

SEQ ID NO: 3030072 - RNA, 19 nt, Artificial Sequence
  Description of Artificial Sequence: Synthetic oligonucleotide
gugcaagcuuggaggcaac

SEQ ID NO: 3030073 - RNA, 19 nt, Artificial Sequence
  Description of Artificial Sequence: Synthetic oligonucleotide
cuccccuguguggcugcgc

SEQ ID NO: 3030074 - RNA, 19 nt, Artificial Sequence
  Description of Artificial Sequence: Synthetic oligonucleotide
gcuguccucucaccuaggu

SEQ ID NO: 3030075 - RNA, 19 nt, Artificial Sequence
  Description of Artificial Sequence: Synthetic oligonucleotide
gcacucugcuguccucuca

SEQ ID NO: 3030076 - RNA, 19 nt, Artificial Sequence
  Description of Artificial Sequence: Synthetic oligonucleotide
ggaagggccucuccccugu

SEQ ID NO: 3030077 - RNA, 19 nt, Artificial Sequence
  Description of Artificial Sequence: Synthetic oligonucleotide
guuggagaugcaggugaau

SEQ ID NO: 3030078 - RNA, 19 nt, Artificial Sequence
  Description of Artificial Sequence: Synthetic oligonucleotide
gugaagccucguccgcacu

SEQ ID NO: 3030079 - RNA, 19 nt, Artificial Sequence
  Description of Artificial Sequence: Synthetic oligonucleotide
cagugaccggccguggcua

SEQ ID NO: 3030080 - RNA, 19 nt, Artificial Sequence
  Description of Artificial Sequence: Synthetic oligonucleotide
ggcugcgcugguguaccac

SEQ ID NO: 3030081 - RNA, 19 nt, Artificial Sequence
  Description of Artificial Sequence: Synthetic oligonucleotide
guguggcugcgcuggugua

SEQ ID NO: 3030082 - RNA, 19 nt, Artificial Sequence
  Description of Artificial Sequence: Synthetic oligonucleotide
gguuuaugaccugcaugau

SEQ ID NO: 3030083 - RNA, 19 nt, Artificial Sequence
  Description of Artificial Sequence: Synthetic oligonucleotide
cgcuguccgaagcccuugc

SEQ ID NO: 3030084 - RNA, 19 nt, Artificial Sequence
  Description of Artificial Sequence: Synthetic oligonucleotide
cucucaccuagguguguuu

SEQ ID NO: 3030085 - RNA, 19 nt, Artificial Sequence
  Description of Artificial Sequence: Synthetic oligonucleotide
ccccagugugugugcgcag

SEQ ID NO: 3030086 - RNA, 19 nt, Artificial Sequence
  Description of Artificial Sequence: Synthetic oligonucleotide
cgugcacucugcuguccuc

SEQ ID NO: 3030087 - RNA, 19 nt, Artificial Sequence
  Description of Artificial Sequence: Synthetic oligonucleotide
ccgaagcccuugccacaag

SEQ ID NO: 3030088 - RNA, 19 nt, Artificial Sequence
  Description of Artificial Sequence: Synthetic oligonucleotide
ccugcaugauugcgcaaau

SEQ ID NO: 3030089 - RNA, 19 nt, Artificial Sequence
  Description of Artificial Sequence: Synthetic oligonucleotide
cgaagcccuugccacaagu

SEQ ID NO: 3030090 - RNA, 19 nt, Artificial Sequence
  Description of Artificial Sequence: Synthetic oligonucleotide
gguguaccacaaggucaua

SEQ ID NO: 3030091 - RNA, 19 nt, Artificial Sequence
  Description of Artificial Sequence: Synthetic oligonucleotide
ccagugugugugcgcaggu

SEQ ID NO: 3030092 - RNA, 19 nt, Artificial Sequence
  Description of Artificial Sequence: Synthetic oligonucleotide
cgcuugccacacagcucac

SEQ ID NO: 3030093 - RNA, 19 nt, Artificial Sequence
  Description of Artificial Sequence: Synthetic oligonucleotide
gccucuccccuguguggcu

SEQ ID NO: 3030094 - RNA, 19 nt, Artificial Sequence
  Description of Artificial Sequence: Synthetic oligonucleotide
  modified_base (12)..(12): a, c, u, g, unknown or other
gggcacuugugngguuuau

SEQ ID NO: 3030095 - RNA, 19 nt, Artificial Sequence
  Description of Artificial Sequence: Synthetic oligonucleotide
ccucucaccuagguguguu

SEQ ID NO: 3030096 - RNA, 19 nt, Artificial Sequence
  Description of Artificial Sequence: Synthetic oligonucleotide
cguccgcacucugggcaug

SEQ ID NO: 3030097 - RNA, 19 nt, Artificial Sequence
  Description of Artificial Sequence: Synthetic oligonucleotide
gcggucugugaagccucgu

SEQ ID NO: 3030098 - RNA, 19 nt, Artificial Sequence
  Description of Artificial Sequence: Synthetic oligonucleotide
cggccguggcuaagaauuu

SEQ ID NO: 3030099 - RNA, 19 nt, Artificial Sequence
  Description of Artificial Sequence: Synthetic oligonucleotide
  modified_base (1)..(1): a, c, u, g, unknown or other
ngguuuaugaccugcauga

SEQ ID NO: 3030100 - RNA, 19 nt, Artificial Sequence
  Description of Artificial Sequence: Synthetic oligonucleotide
aaaauaaaggagcaaaugg

SEQ ID NO: 3030101 - RNA, 19 nt, Artificial Sequence
  Description of Artificial Sequence: Synthetic oligonucleotide
aaaacugauagaaagauuc

SEQ ID NO: 3030102 - RNA, 19 nt, Artificial Sequence
  Description of Artificial Sequence: Synthetic oligonucleotide
aaauaaaggagcaaauggc

SEQ ID NO: 3030103 - RNA, 19 nt, Artificial Sequence
  Description of Artificial Sequence: Synthetic oligonucleotide
uguaggaaaauaaaggagc

SEQ ID NO: 3030104 - RNA, 19 nt, Artificial Sequence
  Description of Artificial Sequence: Synthetic oligonucleotide
aaagcugaacaucaggauc

SEQ ID NO: 3030105 - RNA, 19 nt, Artificial Sequence
  Description of Artificial Sequence: Synthetic oligonucleotide
uuuauuagucauuugguug

SEQ ID NO: 3030106 - RNA, 19 nt, Artificial Sequence
  Description of Artificial Sequence: Synthetic oligonucleotide
aaagauucaucaaagcacg

SEQ ID NO: 3030107 - RNA, 19 nt, Artificial Sequence
  Description of Artificial Sequence: Synthetic oligonucleotide
uguuaugcagccauggaag

SEQ ID NO: 3030108 - RNA, 19 nt, Artificial Sequence
  Description of Artificial Sequence: Synthetic oligonucleotide
agucauuugguuguuaugc

SEQ ID NO: 3030109 - RNA, 19 nt, Artificial Sequence
  Description of Artificial Sequence: Synthetic oligonucleotide
  modified_base (4)..(4): a, c, u, g, unknown or other
aacnuguccguguggaugg

SEQ ID NO: 3030110 - RNA, 19 nt, Artificial Sequence
  Description of Artificial Sequence: Synthetic oligonucleotide
aaaggugaugagugcagcc

SEQ ID NO: 3030111 - RNA, 19 nt, Artificial Sequence
  Description of Artificial Sequence: Synthetic oligonucleotide
uagagaaggagcaagccag

SEQ ID NO: 3030112 - RNA, 19 nt, Artificial Sequence
  Description of Artificial Sequence: Synthetic oligonucleotide
ucaucaacagcacaccuag

SEQ ID NO: 3030113 - RNA, 19 nt, Artificial Sequence
  Description of Artificial Sequence: Synthetic oligonucleotide
gaaagauucaucaaagcac

SEQ ID NO: 3030114 - RNA, 19 nt, Artificial Sequence
  Description of Artificial Sequence: Synthetic oligonucleotide
gaugagugcagccaguaag

SEQ ID NO: 3030115 - RNA, 19 nt, Artificial Sequence
  Description of Artificial Sequence: Synthetic oligonucleotide
auuugguuguuaugcagcc

SEQ ID NO: 3030116 - RNA, 19 nt, Artificial Sequence
  Description of Artificial Sequence: Synthetic oligonucleotide
  modified_base (19)..(19): a, c, u, g, unknown or other
gugaugaucgcuuugaacn

SEQ ID NO: 3030117 - RNA, 19 nt, Artificial Sequence
  Description of Artificial Sequence: Synthetic oligonucleotide
uuauuagucauuugguugu

SEQ ID NO: 3030118 - RNA, 19 nt, Artificial Sequence
  Description of Artificial Sequence: Synthetic oligonucleotide
gauagaaagauucaucaaa

SEQ ID NO: 3030119 - RNA, 19 nt, Artificial Sequence
  Description of Artificial Sequence: Synthetic oligonucleotide
cuggaagugcaguagagcg

SEQ ID NO: 3030120 - RNA, 19 nt, Artificial Sequence
  Description of Artificial Sequence: Synthetic oligonucleotide
aauaaaggagcaaauggcu

SEQ ID NO: 3030121 - RNA, 19 nt, Artificial Sequence
  Description of Artificial Sequence: Synthetic oligonucleotide
aucaacagcacaccuagag

SEQ ID NO: 3030122 - RNA, 19 nt, Artificial Sequence
  Description of Artificial Sequence: Synthetic oligonucleotide
aacaucaggaucaucaaca

SEQ ID NO: 3030123 - RNA, 19 nt, Artificial Sequence
  Description of Artificial Sequence: Synthetic oligonucleotide
uuaaacagugcuccgguga

SEQ ID NO: 3030124 - RNA, 19 nt, Artificial Sequence
  Description of Artificial Sequence: Synthetic oligonucleotide
  modified_base (13)..(13): a, c, u, g, unknown or other
aucgcuuugaacnuguccg

SEQ ID NO: 3030125 - RNA, 19 nt, Artificial Sequence
  Description of Artificial Sequence: Synthetic oligonucleotide
gauucugcaagcuaagcuc

SEQ ID NO: 3030126 - RNA, 19 nt, Artificial Sequence
  Description of Artificial Sequence: Synthetic oligonucleotide
ugcaguagagcgcuguagg

SEQ ID NO: 3030127 - RNA, 19 nt, Artificial Sequence
  Description of Artificial Sequence: Synthetic oligonucleotide
aaaaggugaugagugcagc

SEQ ID NO: 3030128 - RNA, 19 nt, Artificial Sequence
  Description of Artificial Sequence: Synthetic oligonucleotide
aacagugcuccggugaggc

SEQ ID NO: 3030129 - RNA, 19 nt, Artificial Sequence
  Description of Artificial Sequence: Synthetic oligonucleotide
uucaucaaagcacgggaag

SEQ ID NO: 3030130 - RNA, 19 nt, Artificial Sequence
  Description of Artificial Sequence: Synthetic oligonucleotide
aucaggaucaucaacagca

SEQ ID NO: 3030131 - RNA, 19 nt, Artificial Sequence
  Description of Artificial Sequence: Synthetic oligonucleotide
  modified_base (14)..(14): a, c, u, g, unknown or other
gaucgcuuugaacnugucc

SEQ ID NO: 3030132 - RNA, 19 nt, Artificial Sequence
  Description of Artificial Sequence: Synthetic oligonucleotide
cugauagaaagauucauca

SEQ ID NO: 3030133 - RNA, 19 nt, Artificial Sequence
  Description of Artificial Sequence: Synthetic oligonucleotide
cauuugguuguuaugcagc

SEQ ID NO: 3030134 - RNA, 19 nt, Artificial Sequence
  Description of Artificial Sequence: Synthetic oligonucleotide
aaaagcugaacaucaggau

SEQ ID NO: 3030135 - RNA, 19 nt, Artificial Sequence
  Description of Artificial Sequence: Synthetic oligonucleotide
gauucaucaaagcacggga

SEQ ID NO: 3030136 - RNA, 19 nt, Artificial Sequence
  Description of Artificial Sequence: Synthetic oligonucleotide
aagccaguauacuacaaaa

SEQ ID NO: 3030137 - RNA, 19 nt, Artificial Sequence
  Description of Artificial Sequence: Synthetic oligonucleotide
uuuuauuagucauuugguu

SEQ ID NO: 3030138 - RNA, 19 nt, Artificial Sequence
  Description of Artificial Sequence: Synthetic oligonucleotide
uaaguggaugcgaagcuug

SEQ ID NO: 3030139 - RNA, 19 nt, Artificial Sequence
  Description of Artificial Sequence: Synthetic oligonucleotide
uaaacagugcuccggugag

SEQ ID NO: 3030140 - RNA, 19 nt, Artificial Sequence
  Description of Artificial Sequence: Synthetic oligonucleotide
aggaucaucaacagcacac

SEQ ID NO: 3030141 - RNA, 19 nt, Artificial Sequence
  Description of Artificial Sequence: Synthetic oligonucleotide
agugcaacgaaagugccag

SEQ ID NO: 3030142 - RNA, 19 nt, Artificial Sequence
  Description of Artificial Sequence: Synthetic oligonucleotide
  modified_base (8)..(8): a, c, u, g, unknown or other
uuugaacnuguccgugugg

SEQ ID NO: 3030143 - RNA, 19 nt, Artificial Sequence
  Description of Artificial Sequence: Synthetic oligonucleotide
uuguuaugcagccauggaa

SEQ ID NO: 3030144 - RNA, 19 nt, Artificial Sequence
  Description of Artificial Sequence: Synthetic oligonucleotide
cuugguucggaccuccugg

SEQ ID NO: 3030145 - RNA, 19 nt, Artificial Sequence
  Description of Artificial Sequence: Synthetic oligonucleotide
acugauagaaagauucauc

SEQ ID NO: 3030146 - RNA, 19 nt, Artificial Sequence
  Description of Artificial Sequence: Synthetic oligonucleotide
uaaaggagcaaauggcuuc

SEQ ID NO: 3030147 - RNA, 19 nt, Artificial Sequence
  Description of Artificial Sequence: Synthetic oligonucleotide
auucugcaagcuaagcucc

SEQ ID NO: 3030148 - RNA, 19 nt, Artificial Sequence
  Description of Artificial Sequence: Synthetic oligonucleotide
ucaacagcacaccuagaga

SEQ ID NO: 3030149 - RNA, 19 nt, Artificial Sequence
  Description of Artificial Sequence: Synthetic oligonucleotide
aagcugaacaucaggauca

SEQ ID NO: 3030150 - RNA, 19 nt, Artificial Sequence
  Description of Artificial Sequence: Synthetic oligonucleotide
aagcacgggaagugcaacg

SEQ ID NO: 3030151 - RNA, 19 nt, Artificial Sequence
  Description of Artificial Sequence: Synthetic oligonucleotide
ugcuggguuaaacagugcu

SEQ ID NO: 3030152 - RNA, 19 nt, Artificial Sequence
  Description of Artificial Sequence: Synthetic oligonucleotide
  modified_base (7)..(7): a, c, u, g, unknown or other
uugaacnuguccgugugga

SEQ ID NO: 3030153 - RNA, 19 nt, Artificial Sequence
  Description of Artificial Sequence: Synthetic oligonucleotide
agauucaucaaagcacggg

SEQ ID NO: 3030154 - RNA, 19 nt, Artificial Sequence
  Description of Artificial Sequence: Synthetic oligonucleotide
uugguuguuaugcagccau

SEQ ID NO: 3030155 - RNA, 19 nt, Artificial Sequence
  Description of Artificial Sequence: Synthetic oligonucleotide
guggaugggauucugcaag

SEQ ID NO: 3030156 - RNA, 19 nt, Artificial Sequence
  Description of Artificial Sequence: Synthetic oligonucleotide
uuagucauuugguuguuau

SEQ ID NO: 3030157 - RNA, 19 nt, Artificial Sequence
  Description of Artificial Sequence: Synthetic oligonucleotide
gagugcagccaguaagugg

SEQ ID NO: 3030158 - RNA, 19 nt, Artificial Sequence
  Description of Artificial Sequence: Synthetic oligonucleotide
guuaugcagccauggaagg

SEQ ID NO: 3030159 - RNA, 19 nt, Artificial Sequence
  Description of Artificial Sequence: Synthetic oligonucleotide
aggaaaauaaaggagcaaa

SEQ ID NO: 3030160 - RNA, 19 nt, Artificial Sequence
  Description of Artificial Sequence: Synthetic oligonucleotide
cuggguuaaacagugcucc

SEQ ID NO: 3030161 - RNA, 19 nt, Artificial Sequence
  Description of Artificial Sequence: Synthetic oligonucleotide
ucaaagcacgggaagugca

SEQ ID NO: 3030162 - RNA, 19 nt, Artificial Sequence
  Description of Artificial Sequence: Synthetic oligonucleotide
aucaaagcacgggaagugc

SEQ ID NO: 3030163 - RNA, 19 nt, Artificial Sequence
  Description of Artificial Sequence: Synthetic oligonucleotide
aguaaguggaugcgaagcu

SEQ ID NO: 3030164 - RNA, 19 nt, Artificial Sequence
  Description of Artificial Sequence: Synthetic oligonucleotide
aaagcacgggaagugcaac

SEQ ID NO: 3030165 - RNA, 19 nt, Artificial Sequence
  Description of Artificial Sequence: Synthetic oligonucleotide
ugauagaaagauucaucaa

SEQ ID NO: 3030166 - RNA, 19 nt, Artificial Sequence
  Description of Artificial Sequence: Synthetic oligonucleotide
ucugugaugaucgcuuuga

SEQ ID NO: 3030167 - RNA, 19 nt, Artificial Sequence
  Description of Artificial Sequence: Synthetic oligonucleotide
  modified_base (5)..(5): a, c, u, g, unknown or other
gaacnuguccguguggaug

SEQ ID NO: 3030168 - RNA, 19 nt, Artificial Sequence
  Description of Artificial Sequence: Synthetic oligonucleotide
aacugauagaaagauucau

SEQ ID NO: 3030169 - RNA, 19 nt, Artificial Sequence
  Description of Artificial Sequence: Synthetic oligonucleotide
acgaaagugccagugcugg

SEQ ID NO: 3030170 - RNA, 19 nt, Artificial Sequence
  Description of Artificial Sequence: Synthetic oligonucleotide
acagcacaccuagagaagg

SEQ ID NO: 3030171 - RNA, 19 nt, Artificial Sequence
  Description of Artificial Sequence: Synthetic oligonucleotide
uggaagugcaguagagcgc

SEQ ID NO: 3030172 - RNA, 19 nt, Artificial Sequence
  Description of Artificial Sequence: Synthetic oligonucleotide
gcuguaggaaaauaaagga

SEQ ID NO: 3030173 - RNA, 19 nt, Artificial Sequence
  Description of Artificial Sequence: Synthetic oligonucleotide
gaacaucaggaucaucaac

SEQ ID NO: 3030174 - RNA, 19 nt, Artificial Sequence
  Description of Artificial Sequence: Synthetic oligonucleotide
gaaggagcaagccaguaua

SEQ ID NO: 3030175 - RNA, 19 nt, Artificial Sequence
  Description of Artificial Sequence: Synthetic oligonucleotide
aaacugauagaaagauuca

SEQ ID NO: 3030176 - RNA, 19 nt, Artificial Sequence
  Description of Artificial Sequence: Synthetic oligonucleotide
  modified_base (9)..(9): a, c, u, g, unknown or other
cuuugaacnuguccgugug

SEQ ID NO: 3030177 - RNA, 19 nt, Artificial Sequence
  Description of Artificial Sequence: Synthetic oligonucleotide
aaggagcaagccaguauac

SEQ ID NO: 3030178 - RNA, 19 nt, Artificial Sequence
  Description of Artificial Sequence: Synthetic oligonucleotide
ggaagugcaacgaaagugc

SEQ ID NO: 3030179 - RNA, 19 nt, Artificial Sequence
  Description of Artificial Sequence: Synthetic oligonucleotide
aguagagcgcuguaggaaa

SEQ ID NO: 3030180 - RNA, 19 nt, Artificial Sequence
  Description of Artificial Sequence: Synthetic oligonucleotide
caguaaguggaugcgaagc

SEQ ID NO: 3030181 - RNA, 19 nt, Artificial Sequence
  Description of Artificial Sequence: Synthetic oligonucleotide
aaaggagcaaauggcuucu

SEQ ID NO: 3030182 - RNA, 19 nt, Artificial Sequence
  Description of Artificial Sequence: Synthetic oligonucleotide
ugcaacgaaagugccagug

SEQ ID NO: 3030183 - RNA, 19 nt, Artificial Sequence
  Description of Artificial Sequence: Synthetic oligonucleotide
aaggugaugagugcagcca

SEQ ID NO: 3030184 - RNA, 19 nt, Artificial Sequence
  Description of Artificial Sequence: Synthetic oligonucleotide
ugaacaucaggaucaucaa

SEQ ID NO: 3030185 - RNA, 19 nt, Artificial Sequence
  Description of Artificial Sequence: Synthetic oligonucleotide
ucaucaaagcacgggaagu

SEQ ID NO: 3030186 - RNA, 19 nt, Artificial Sequence
  Description of Artificial Sequence: Synthetic oligonucleotide
uggguuaaacagugcuccg

SEQ ID NO: 3030187 - RNA, 19 nt, Artificial Sequence
  Description of Artificial Sequence: Synthetic oligonucleotide
agugcuggguuaaacagug

SEQ ID NO: 3030188 - RNA, 19 nt, Artificial Sequence
  Description of Artificial Sequence: Synthetic oligonucleotide
uaugcagccauggaaggaa

SEQ ID NO: 3030189 - RNA, 19 nt, Artificial Sequence
  Description of Artificial Sequence: Synthetic oligonucleotide
uagucauuugguuguuaug

SEQ ID NO: 3030190 - RNA, 19 nt, Artificial Sequence
  Description of Artificial Sequence: Synthetic oligonucleotide
aagauucaucaaagcacgg

SEQ ID NO: 3030191 - RNA, 19 nt, Artificial Sequence
  Description of Artificial Sequence: Synthetic oligonucleotide
ugggauucugcaagcuaag

SEQ ID NO: 3030192 - RNA, 19 nt, Artificial Sequence
  Description of Artificial Sequence: Synthetic oligonucleotide
accuagagaaggagcaagc

SEQ ID NO: 3030193 - RNA, 19 nt, Artificial Sequence
  Description of Artificial Sequence: Synthetic oligonucleotide
aagcuugguucggaccucc

SEQ ID NO: 3030194 - RNA, 19 nt, Artificial Sequence
  Description of Artificial Sequence: Synthetic oligonucleotide
  modified_base (18)..(18): a, c, u, g, unknown or other
ugaugaucgcuuugaacnu

SEQ ID NO: 3030195 - RNA, 19 nt, Artificial Sequence
  Description of Artificial Sequence: Synthetic oligonucleotide
ucaggaucaucaacagcac

SEQ ID NO: 3030196 - RNA, 19 nt, Artificial Sequence
  Description of Artificial Sequence: Synthetic oligonucleotide
cacaccuagagaaggagca

SEQ ID NO: 3030197 - RNA, 19 nt, Artificial Sequence
  Description of Artificial Sequence: Synthetic oligonucleotide
guaggaaaauaaaggagca

SEQ ID NO: 3030198 - RNA, 19 nt, Artificial Sequence
  Description of Artificial Sequence: Synthetic oligonucleotide
aacagcacaccuagagaag

SEQ ID NO: 3030199 - RNA, 19 nt, Artificial Sequence
  Description of Artificial Sequence: Synthetic oligonucleotide
uggaugcgaagcuugguuc

SEQ ID NO: 3030200 - RNA, 19 nt, Artificial Sequence
  Description of Artificial Sequence: Synthetic oligonucleotide
cgcuguaggaaaauaaagg

SEQ ID NO: 3030201 - RNA, 19 nt, Artificial Sequence
  Description of Artificial Sequence: Synthetic oligonucleotide
cuagagaaggagcaagcca

SEQ ID NO: 3030202 - RNA, 19 nt, Artificial Sequence
  Description of Artificial Sequence: Synthetic oligonucleotide
ggaugcgaagcuugguucg

SEQ ID NO: 3030203 - RNA, 19 nt, Artificial Sequence
  Description of Artificial Sequence: Synthetic oligonucleotide
gaagugcaacgaaagugcc

SEQ ID NO: 3030204 - RNA, 19 nt, Artificial Sequence
  Description of Artificial Sequence: Synthetic oligonucleotide
gagcaagccaguauacuac

SEQ ID NO: 3030205 - RNA, 19 nt, Artificial Sequence
  Description of Artificial Sequence: Synthetic oligonucleotide
gguuguuaugcagccaugg

SEQ ID NO: 3030206 - RNA, 19 nt, Artificial Sequence
  Description of Artificial Sequence: Synthetic oligonucleotide
uguggaugggauucugcaa

SEQ ID NO: 3030207 - RNA, 19 nt, Artificial Sequence
  Description of Artificial Sequence: Synthetic oligonucleotide
aaguggaugcgaagcuugg

SEQ ID NO: 3030208 - RNA, 19 nt, Artificial Sequence
  Description of Artificial Sequence: Synthetic oligonucleotide
agaaggagcaagccaguau

SEQ ID NO: 3030209 - RNA, 19 nt, Artificial Sequence
  Description of Artificial Sequence: Synthetic oligonucleotide
  modified_base (17)..(17): a, c, u, g, unknown or other
gaugaucgcuuugaacnug

SEQ ID NO: 3030210 - RNA, 19 nt, Artificial Sequence
  Description of Artificial Sequence: Synthetic oligonucleotide
uggaugggauucugcaagc

SEQ ID NO: 3030211 - RNA, 19 nt, Artificial Sequence
  Description of Artificial Sequence: Synthetic oligonucleotide
aacgaaagugccagugcug

SEQ ID NO: 3030212 - RNA, 19 nt, Artificial Sequence
  Description of Artificial Sequence: Synthetic oligonucleotide
agcaagccaguauacuaca

SEQ ID NO: 3030213 - RNA, 19 nt, Artificial Sequence
  Description of Artificial Sequence: Synthetic oligonucleotide
gaggcucccuccugcauag

SEQ ID NO: 3030214 - RNA, 19 nt, Artificial Sequence
  Description of Artificial Sequence: Synthetic oligonucleotide
caucaggaucaucaacagc

SEQ ID NO: 3030215 - RNA, 19 nt, Artificial Sequence
  Description of Artificial Sequence: Synthetic oligonucleotide
guuaaacagugcuccggug

SEQ ID NO: 3030216 - RNA, 19 nt, Artificial Sequence
  Description of Artificial Sequence: Synthetic oligonucleotide
caaauggcuucugugauga

SEQ ID NO: 3030217 - RNA, 19 nt, Artificial Sequence
  Description of Artificial Sequence: Synthetic oligonucleotide
aaacagugcuccggugagg

SEQ ID NO: 3030218 - RNA, 19 nt, Artificial Sequence
  Description of Artificial Sequence: Synthetic oligonucleotide
aaagugccagugcuggguu

SEQ ID NO: 3030219 - RNA, 19 nt, Artificial Sequence
  Description of Artificial Sequence: Synthetic oligonucleotide
gaugcgaagcuugguucgg

SEQ ID NO: 3030220 - RNA, 19 nt, Artificial Sequence
  Description of Artificial Sequence: Synthetic oligonucleotide
caucaaagcacgggaagug

SEQ ID NO: 3030221 - RNA, 19 nt, Artificial Sequence
  Description of Artificial Sequence: Synthetic oligonucleotide
gcagccaguaaguggaugc

SEQ ID NO: 3030222 - RNA, 19 nt, Artificial Sequence
  Description of Artificial Sequence: Synthetic oligonucleotide
uuaugcagccauggaagga

SEQ ID NO: 3030223 - RNA, 19 nt, Artificial Sequence
  Description of Artificial Sequence: Synthetic oligonucleotide
uaggaaaauaaaggagcaa

SEQ ID NO: 3030224 - RNA, 19 nt, Artificial Sequence
  Description of Artificial Sequence: Synthetic oligonucleotide
guguggaugggauucugca

SEQ ID NO: 3030225 - RNA, 19 nt, Artificial Sequence
  Description of Artificial Sequence: Synthetic oligonucleotide
gucauuugguuguuaugca

SEQ ID NO: 3030226 - RNA, 19 nt, Artificial Sequence
  Description of Artificial Sequence: Synthetic oligonucleotide
guuguuaugcagccaugga

SEQ ID NO: 3030227 - RNA, 19 nt, Artificial Sequence
  Description of Artificial Sequence: Synthetic oligonucleotide
acgggaagugcaacgaaag

SEQ ID NO: 3030228 - RNA, 19 nt, Artificial Sequence
  Description of Artificial Sequence: Synthetic oligonucleotide
agcacaccuagagaaggag

SEQ ID NO: 3030229 - RNA, 19 nt, Artificial Sequence
  Description of Artificial Sequence: Synthetic oligonucleotide
ugaugagugcagccaguaa

SEQ ID NO: 3030230 - RNA, 19 nt, Artificial Sequence
  Description of Artificial Sequence: Synthetic oligonucleotide
gguucggaccuccuggaag

SEQ ID NO: 3030231 - RNA, 19 nt, Artificial Sequence
  Description of Artificial Sequence: Synthetic oligonucleotide
  modified_base (12)..(12): a, c, u, g, unknown or other
ucgcuuugaacnuguccgu

SEQ ID NO: 3030232 - RNA, 19 nt, Artificial Sequence
  Description of Artificial Sequence: Synthetic oligonucleotide
ugaggcucccuccugcaua

SEQ ID NO: 3030233 - RNA, 19 nt, Artificial Sequence
  Description of Artificial Sequence: Synthetic oligonucleotide
  modified_base (16)..(16): a, c, u, g, unknown or other
augaucgcuuugaacnugu

SEQ ID NO: 3030234 - RNA, 19 nt, Artificial Sequence
  Description of Artificial Sequence: Synthetic oligonucleotide
ugguuguuaugcagccaug

SEQ ID NO: 3030235 - RNA, 19 nt, Artificial Sequence
  Description of Artificial Sequence: Synthetic oligonucleotide
ccagugcuggguuaaacag

SEQ ID NO: 3030236 - RNA, 19 nt, Artificial Sequence
  Description of Artificial Sequence: Synthetic oligonucleotide
aggagcaaauggcuucugu

SEQ ID NO: 3030237 - RNA, 19 nt, Artificial Sequence
  Description of Artificial Sequence: Synthetic oligonucleotide
uuugguuguuaugcagcca

SEQ ID NO: 3030238 - RNA, 19 nt, Artificial Sequence
  Description of Artificial Sequence: Synthetic oligonucleotide
uugguucggaccuccugga

SEQ ID NO: 3030239 - RNA, 19 nt, Artificial Sequence
  Description of Artificial Sequence: Synthetic oligonucleotide
ugagugcagccaguaagug

SEQ ID NO: 3030240 - RNA, 19 nt, Artificial Sequence
  Description of Artificial Sequence: Synthetic oligonucleotide
augggauucugcaagcuaa

SEQ ID NO: 3030241 - RNA, 19 nt, Artificial Sequence
  Description of Artificial Sequence: Synthetic oligonucleotide
gaugggauucugcaagcua

SEQ ID NO: 3030242 - RNA, 19 nt, Artificial Sequence
  Description of Artificial Sequence: Synthetic oligonucleotide
auaaaggagcaaauggcuu

SEQ ID NO: 3030243 - RNA, 19 nt, Artificial Sequence
  Description of Artificial Sequence: Synthetic oligonucleotide
aagugcaacgaaagugcca

SEQ ID NO: 3030244 - RNA, 19 nt, Artificial Sequence
  Description of Artificial Sequence: Synthetic oligonucleotide
ugcaagcuaagcuccucuc

SEQ ID NO: 3030245 - RNA, 19 nt, Artificial Sequence
  Description of Artificial Sequence: Synthetic oligonucleotide
agugcuccggugaggcucc

SEQ ID NO: 3030246 - RNA, 19 nt, Artificial Sequence
  Description of Artificial Sequence: Synthetic oligonucleotide
augagugcagccaguaagu

SEQ ID NO: 3030247 - RNA, 19 nt, Artificial Sequence
  Description of Artificial Sequence: Synthetic oligonucleotide
uucugcaagcuaagcuccu

SEQ ID NO: 3030248 - RNA, 19 nt, Artificial Sequence
  Description of Artificial Sequence: Synthetic oligonucleotide
gaucaucaacagcacaccu

SEQ ID NO: 3030249 - RNA, 19 nt, Artificial Sequence
  Description of Artificial Sequence: Synthetic oligonucleotide
ugcgaagcuugguucggac

SEQ ID NO: 3030250 - RNA, 19 nt, Artificial Sequence
  Description of Artificial Sequence: Synthetic oligonucleotide
ggguuaaacagugcuccgg

SEQ ID NO: 3030251 - RNA, 19 nt, Artificial Sequence
  Description of Artificial Sequence: Synthetic oligonucleotide
  modified_base (6)..(6): a, c, u, g, unknown or other
ugaacnuguccguguggau

SEQ ID NO: 3030252 - RNA, 19 nt, Artificial Sequence
  Description of Artificial Sequence: Synthetic oligonucleotide
gcaacgaaagugccagugc

SEQ ID NO: 3030253 - RNA, 19 nt, Artificial Sequence
  Description of Artificial Sequence: Synthetic oligonucleotide
uccggugaggcucccuccu

SEQ ID NO: 3030254 - RNA, 19 nt, Artificial Sequence
  Description of Artificial Sequence: Synthetic oligonucleotide
caagccaguauacuacaaa

SEQ ID NO: 3030255 - RNA, 19 nt, Artificial Sequence
  Description of Artificial Sequence: Synthetic oligonucleotide
auucaucaaagcacgggaa

SEQ ID NO: 3030256 - RNA, 19 nt, Artificial Sequence
  Description of Artificial Sequence: Synthetic oligonucleotide
ugcagccauggaaggaaaa

SEQ ID NO: 3030257 - RNA, 19 nt, Artificial Sequence
  Description of Artificial Sequence: Synthetic oligonucleotide
ggaucaucaacagcacacc

SEQ ID NO: 3030258 - RNA, 19 nt, Artificial Sequence
  Description of Artificial Sequence: Synthetic oligonucleotide
agcgcuguaggaaaauaaa

SEQ ID NO: 3030259 - RNA, 19 nt, Artificial Sequence
  Description of Artificial Sequence: Synthetic oligonucleotide
ggagcaagccaguauacua

SEQ ID NO: 3030260 - RNA, 19 nt, Artificial Sequence
  Description of Artificial Sequence: Synthetic oligonucleotide
gaaagugccagugcugggu

SEQ ID NO: 3030261 - RNA, 19 nt, Artificial Sequence
  Description of Artificial Sequence: Synthetic oligonucleotide
cagccaguaaguggaugcg

SEQ ID NO: 3030262 - RNA, 19 nt, Artificial Sequence
  Description of Artificial Sequence: Synthetic oligonucleotide
ggauucugcaagcuaagcu

SEQ ID NO: 3030263 - RNA, 19 nt, Artificial Sequence
  Description of Artificial Sequence: Synthetic oligonucleotide
gcgcuguaggaaaauaaag

SEQ ID NO: 3030264 - RNA, 19 nt, Artificial Sequence
  Description of Artificial Sequence: Synthetic oligonucleotide
agcacgggaagugcaacga

SEQ ID NO: 3030265 - RNA, 19 nt, Artificial Sequence
  Description of Artificial Sequence: Synthetic oligonucleotide
aucaucaacagcacaccua

SEQ ID NO: 3030266 - RNA, 19 nt, Artificial Sequence
  Description of Artificial Sequence: Synthetic oligonucleotide
ugcagccaguaaguggaug

SEQ ID NO: 3030267 - RNA, 19 nt, Artificial Sequence
  Description of Artificial Sequence: Synthetic oligonucleotide
aggagcaagccaguauacu

SEQ ID NO: 3030268 - RNA, 19 nt, Artificial Sequence
  Description of Artificial Sequence: Synthetic oligonucleotide
gugcaguagagcgcuguag

SEQ ID NO: 3030269 - RNA, 19 nt, Artificial Sequence
  Description of Artificial Sequence: Synthetic oligonucleotide
gagcgcuguaggaaaauaa

SEQ ID NO: 3030270 - RNA, 19 nt, Artificial Sequence
  Description of Artificial Sequence: Synthetic oligonucleotide
guucggaccuccuggaagu

SEQ ID NO: 3030271 - RNA, 19 nt, Artificial Sequence
  Description of Artificial Sequence: Synthetic oligonucleotide
cucccuccugcauaggcca

SEQ ID NO: 3030272 - RNA, 19 nt, Artificial Sequence
  Description of Artificial Sequence: Synthetic oligonucleotide
guccguguggaugggauuc

SEQ ID NO: 3030273 - RNA, 19 nt, Artificial Sequence
  Description of Artificial Sequence: Synthetic oligonucleotide
caacgaaagugccagugcu

SEQ ID NO: 3030274 - RNA, 19 nt, Artificial Sequence
  Description of Artificial Sequence: Synthetic oligonucleotide
ugggugugguuauuccuuu

SEQ ID NO: 3030275 - RNA, 19 nt, Artificial Sequence
  Description of Artificial Sequence: Synthetic oligonucleotide
ucugcaagcuaagcuccuc

SEQ ID NO: 3030276 - RNA, 19 nt, Artificial Sequence
  Description of Artificial Sequence: Synthetic oligonucleotide
caaagcacgggaagugcaa

SEQ ID NO: 3030277 - RNA, 19 nt, Artificial Sequence
  Description of Artificial Sequence: Synthetic oligonucleotide
aaggagcaaauggcuucug

SEQ ID NO: 3030278 - RNA, 19 nt, Artificial Sequence
  Description of Artificial Sequence: Synthetic oligonucleotide
  modified_base (15)..(15): a, c, u, g, unknown or other
ugaucgcuuugaacnuguc

SEQ ID NO: 3030279 - RNA, 19 nt, Artificial Sequence
  Description of Artificial Sequence: Synthetic oligonucleotide
ccuagagaaggagcaagcc

SEQ ID NO: 3030280 - RNA, 19 nt, Artificial Sequence
  Description of Artificial Sequence: Synthetic oligonucleotide
agugcaguagagcgcugua

SEQ ID NO: 3030281 - RNA, 19 nt, Artificial Sequence
  Description of Artificial Sequence: Synthetic oligonucleotide
cagugcuccggugaggcuc

SEQ ID NO: 3030282 - RNA, 19 nt, Artificial Sequence
  Description of Artificial Sequence: Synthetic oligonucleotide
uauuagucauuugguuguu

SEQ ID NO: 3030283 - RNA, 19 nt, Artificial Sequence
  Description of Artificial Sequence: Synthetic oligonucleotide
cacgggaagugcaacgaaa

SEQ ID NO: 3030284 - RNA, 19 nt, Artificial Sequence
  Description of Artificial Sequence: Synthetic oligonucleotide
ucggaccuccuggaagugc

SEQ ID NO: 3030285 - RNA, 19 nt, Artificial Sequence
  Description of Artificial Sequence: Synthetic oligonucleotide
gguuaaacagugcuccggu

SEQ ID NO: 3030286 - RNA, 19 nt, Artificial Sequence
  Description of Artificial Sequence: Synthetic oligonucleotide
caggaucaucaacagcaca

SEQ ID NO: 3030287 - RNA, 19 nt, Artificial Sequence
  Description of Artificial Sequence: Synthetic oligonucleotide
aguggaugcgaagcuuggu

SEQ ID NO: 3030288 - RNA, 19 nt, Artificial Sequence
  Description of Artificial Sequence: Synthetic oligonucleotide
gccagugcuggguuaaaca

SEQ ID NO: 3030289 - RNA, 19 nt, Artificial Sequence
  Description of Artificial Sequence: Synthetic oligonucleotide
aagugccagugcuggguua

SEQ ID NO: 3030290 - RNA, 19 nt, Artificial Sequence
  Description of Artificial Sequence: Synthetic oligonucleotide
cuccggugaggcucccucc

SEQ ID NO: 3030291 - RNA, 19 nt, Artificial Sequence
  Description of Artificial Sequence: Synthetic oligonucleotide
ccaguaaguggaugcgaag

SEQ ID NO: 3030292 - RNA, 19 nt, Artificial Sequence
  Description of Artificial Sequence: Synthetic oligonucleotide
agugccagugcuggguuaa

SEQ ID NO: 3030293 - RNA, 19 nt, Artificial Sequence
  Description of Artificial Sequence: Synthetic oligonucleotide
ugguucggaccuccuggaa

SEQ ID NO: 3030294 - RNA, 19 nt, Artificial Sequence
  Description of Artificial Sequence: Synthetic oligonucleotide
uggcuucugugaugaucgc

SEQ ID NO: 3030295 - RNA, 19 nt, Artificial Sequence
  Description of Artificial Sequence: Synthetic oligonucleotide
  modified_base (10)..(10): a, c, u, g, unknown or other
gcuuugaacnuguccgugu

SEQ ID NO: 3030296 - RNA, 19 nt, Artificial Sequence
  Description of Artificial Sequence: Synthetic oligonucleotide
agagaaggagcaagccagu

SEQ ID NO: 3030297 - RNA, 19 nt, Artificial Sequence
  Description of Artificial Sequence: Synthetic oligonucleotide
agccaguaaguggaugcga

SEQ ID NO: 3030298 - RNA, 19 nt, Artificial Sequence
  Description of Artificial Sequence: Synthetic oligonucleotide
auuagucauuugguuguua

SEQ ID NO: 3030299 - RNA, 19 nt, Artificial Sequence
  Description of Artificial Sequence: Synthetic oligonucleotide
cuccuggaagugcaguaga

SEQ ID NO: 3030300 - RNA, 19 nt, Artificial Sequence
  Description of Artificial Sequence: Synthetic oligonucleotide
ggcucccuccugcauaggc

SEQ ID NO: 3030301 - RNA, 19 nt, Artificial Sequence
  Description of Artificial Sequence: Synthetic oligonucleotide
ccuggaagugcaguagagc

SEQ ID NO: 3030302 - RNA, 19 nt, Artificial Sequence
  Description of Artificial Sequence: Synthetic oligonucleotide
gcgaagcuugguucggacc

SEQ ID NO: 3030303 - RNA, 19 nt, Artificial Sequence
  Description of Artificial Sequence: Synthetic oligonucleotide
  modified_base (3)..(3): a, c, u, g, unknown or other
acnuguccguguggauggg

SEQ ID NO: 3030304 - RNA, 19 nt, Artificial Sequence
  Description of Artificial Sequence: Synthetic oligonucleotide
uagagcgcuguaggaaaau

SEQ ID NO: 3030305 - RNA, 19 nt, Artificial Sequence
  Description of Artificial Sequence: Synthetic oligonucleotide
ggaaaauaaaggagcaaau

SEQ ID NO: 3030306 - RNA, 19 nt, Artificial Sequence
  Description of Artificial Sequence: Synthetic oligonucleotide
gaagcuugguucggaccuc

SEQ ID NO: 3030307 - RNA, 19 nt, Artificial Sequence
  Description of Artificial Sequence: Synthetic oligonucleotide
gcacaccuagagaaggagc

SEQ ID NO: 3030308 - RNA, 19 nt, Artificial Sequence
  Description of Artificial Sequence: Synthetic oligonucleotide
ggaagugcaguagagcgcu

SEQ ID NO: 3030309 - RNA, 19 nt, Artificial Sequence
  Description of Artificial Sequence: Synthetic oligonucleotide
agagcgcuguaggaaaaua

SEQ ID NO: 3030310 - RNA, 19 nt, Artificial Sequence
  Description of Artificial Sequence: Synthetic oligonucleotide
gcaguagagcgcuguagga

SEQ ID NO: 3030311 - RNA, 19 nt, Artificial Sequence
  Description of Artificial Sequence: Synthetic oligonucleotide
caguagagcgcuguaggaa

SEQ ID NO: 3030312 - RNA, 19 nt, Artificial Sequence
  Description of Artificial Sequence: Synthetic oligonucleotide
gggauucugcaagcuaagc

SEQ ID NO: 3030313 - RNA, 19 nt, Artificial Sequence
  Description of Artificial Sequence: Synthetic oligonucleotide
gcuugguucggaccuccug

SEQ ID NO: 3030314 - RNA, 19 nt, Artificial Sequence
  Description of Artificial Sequence: Synthetic oligonucleotide
cagcacaccuagagaagga

SEQ ID NO: 3030315 - RNA, 19 nt, Artificial Sequence
  Description of Artificial Sequence: Synthetic oligonucleotide
uccguguggaugggauucu

SEQ ID NO: 3030316 - RNA, 19 nt, Artificial Sequence
  Description of Artificial Sequence: Synthetic oligonucleotide
acaccuagagaaggagcaa

SEQ ID NO: 3030317 - RNA, 19 nt, Artificial Sequence
  Description of Artificial Sequence: Synthetic oligonucleotide
guggaugcgaagcuugguu

SEQ ID NO: 3030318 - RNA, 19 nt, Artificial Sequence
  Description of Artificial Sequence: Synthetic oligonucleotide
gagaaggagcaagccagua

SEQ ID NO: 3030319 - RNA, 19 nt, Artificial Sequence
  Description of Artificial Sequence: Synthetic oligonucleotide
gcuggguuaaacagugcuc

SEQ ID NO: 3030320 - RNA, 19 nt, Artificial Sequence
  Description of Artificial Sequence: Synthetic oligonucleotide
acagugcuccggugaggcu

SEQ ID NO: 3030321 - RNA, 19 nt, Artificial Sequence
  Description of Artificial Sequence: Synthetic oligonucleotide
cagugcuggguuaaacagu

SEQ ID NO: 3030322 - RNA, 19 nt, Artificial Sequence
  Description of Artificial Sequence: Synthetic oligonucleotide
gaagugcaguagagcgcug

SEQ ID NO: 3030323 - RNA, 19 nt, Artificial Sequence
  Description of Artificial Sequence: Synthetic oligonucleotide
gugaugagugcagccagua

SEQ ID NO: 3030324 - RNA, 19 nt, Artificial Sequence
  Description of Artificial Sequence: Synthetic oligonucleotide
caucaacagcacaccuaga

SEQ ID NO: 3030325 - RNA, 19 nt, Artificial Sequence
  Description of Artificial Sequence: Synthetic oligonucleotide
cguguggaugggauucugc

SEQ ID NO: 3030326 - RNA, 19 nt, Artificial Sequence
  Description of Artificial Sequence: Synthetic oligonucleotide
gcucccuccugcauaggcc

SEQ ID NO: 3030327 - RNA, 19 nt, Artificial Sequence
  Description of Artificial Sequence: Synthetic oligonucleotide
cugugaugaucgcuuugaa

SEQ ID NO: 3030328 - RNA, 19 nt, Artificial Sequence
  Description of Artificial Sequence: Synthetic oligonucleotide
ucccuccugcauaggccaa

SEQ ID NO: 3030329 - RNA, 19 nt, Artificial Sequence
  Description of Artificial Sequence: Synthetic oligonucleotide
augcgaagcuugguucgga

SEQ ID NO: 3030330 - RNA, 19 nt, Artificial Sequence
  Description of Artificial Sequence: Synthetic oligonucleotide
guagagcgcuguaggaaaa

SEQ ID NO: 3030331 - RNA, 19 nt, Artificial Sequence
  Description of Artificial Sequence: Synthetic oligonucleotide
agcugaacaucaggaucau

SEQ ID NO: 3030332 - RNA, 19 nt, Artificial Sequence
  Description of Artificial Sequence: Synthetic oligonucleotide
cugcaagcuaagcuccucu

SEQ ID NO: 3030333 - RNA, 19 nt, Artificial Sequence
  Description of Artificial Sequence: Synthetic oligonucleotide
ggugaggcucccuccugca

SEQ ID NO: 3030334 - RNA, 19 nt, Artificial Sequence
  Description of Artificial Sequence: Synthetic oligonucleotide
gccaguaaguggaugcgaa

SEQ ID NO: 3030335 - RNA, 19 nt, Artificial Sequence
  Description of Artificial Sequence: Synthetic oligonucleotide
gcuccggugaggcucccuc

SEQ ID NO: 3030336 - RNA, 19 nt, Artificial Sequence
  Description of Artificial Sequence: Synthetic oligonucleotide
  modified_base (2)..(2): a, c, u, g, unknown or other
cnuguccguguggauggga

SEQ ID NO: 3030337 - RNA, 19 nt, Artificial Sequence
  Description of Artificial Sequence: Synthetic oligonucleotide
augcagccauggaaggaaa

SEQ ID NO: 3030338 - RNA, 19 nt, Artificial Sequence
  Description of Artificial Sequence: Synthetic oligonucleotide
gaccuccuggaagugcagu

SEQ ID NO: 3030339 - RNA, 19 nt, Artificial Sequence
  Description of Artificial Sequence: Synthetic oligonucleotide
cgaagcuugguucggaccu

SEQ ID NO: 3030340 - RNA, 19 nt, Artificial Sequence
  Description of Artificial Sequence: Synthetic oligonucleotide
ggaccuccuggaagugcag

SEQ ID NO: 3030341 - RNA, 19 nt, Artificial Sequence
  Description of Artificial Sequence: Synthetic oligonucleotide
agcuugguucggaccuccu

SEQ ID NO: 3030342 - RNA, 19 nt, Artificial Sequence
  Description of Artificial Sequence: Synthetic oligonucleotide
gcacgggaagugcaacgaa

SEQ ID NO: 3030343 - RNA, 19 nt, Artificial Sequence
  Description of Artificial Sequence: Synthetic oligonucleotide
  modified_base (11)..(11): a, c, u, g, unknown or other
cgcuuugaacnuguccgug

SEQ ID NO: 3030344 - RNA, 19 nt, Artificial Sequence
  Description of Artificial Sequence: Synthetic oligonucleotide
gcaagccaguauacuacaa

SEQ ID NO: 3030345 - RNA, 19 nt, Artificial Sequence
  Description of Artificial Sequence: Synthetic oligonucleotide
cggugaggcucccuccugc

SEQ ID NO: 3030346 - RNA, 19 nt, Artificial Sequence
  Description of Artificial Sequence: Synthetic oligonucleotide
cggaccuccuggaagugca

SEQ ID NO: 3030347 - RNA, 19 nt, Artificial Sequence
  Description of Artificial Sequence: Synthetic oligonucleotide
gcugaacaucaggaucauc

SEQ ID NO: 3030348 - RNA, 19 nt, Artificial Sequence
  Description of Artificial Sequence: Synthetic oligonucleotide
ggcuucugugaugaucgcu

SEQ ID NO: 3030349 - RNA, 19 nt, Artificial Sequence
  Description of Artificial Sequence: Synthetic oligonucleotide
ggaugggauucugcaagcu

SEQ ID NO: 3030350 - RNA, 19 nt, Artificial Sequence
  Description of Artificial Sequence: Synthetic oligonucleotide
gugcaacgaaagugccagu

SEQ ID NO: 3030351 - RNA, 19 nt, Artificial Sequence
  Description of Artificial Sequence: Synthetic oligonucleotide
ggugaugagugcagccagu

SEQ ID NO: 3030352 - RNA, 19 nt, Artificial Sequence
  Description of Artificial Sequence: Synthetic oligonucleotide
ccggugaggcucccuccug

SEQ ID NO: 3030353 - RNA, 19 nt, Artificial Sequence
  Description of Artificial Sequence: Synthetic oligonucleotide
ccguguggaugggauucug

SEQ ID NO: 3030354 - RNA, 19 nt, Artificial Sequence
  Description of Artificial Sequence: Synthetic oligonucleotide
gugccagugcuggguuaaa

SEQ ID NO: 3030355 - RNA, 19 nt, Artificial Sequence
  Description of Artificial Sequence: Synthetic oligonucleotide
gggugugguuauuccuuuu

SEQ ID NO: 3030356 - RNA, 19 nt, Artificial Sequence
  Description of Artificial Sequence: Synthetic oligonucleotide
ccuccugcauaggccaaaa

SEQ ID NO: 3030357 - RNA, 19 nt, Artificial Sequence
  Description of Artificial Sequence: Synthetic oligonucleotide
cgggaagugcaacgaaagu

SEQ ID NO: 3030358 - RNA, 19 nt, Artificial Sequence
  Description of Artificial Sequence: Synthetic oligonucleotide
gugcagccaguaaguggau

SEQ ID NO: 3030359 - RNA, 19 nt, Artificial Sequence
  Description of Artificial Sequence: Synthetic oligonucleotide
cccuccugcauaggccaaa

SEQ ID NO: 3030360 - RNA, 19 nt, Artificial Sequence
  Description of Artificial Sequence: Synthetic oligonucleotide
  modified_base (1)..(1): a, c, u, g, unknown or other
nuguccguguggaugggau

SEQ ID NO: 3030361 - RNA, 19 nt, Artificial Sequence
  Description of Artificial Sequence: Synthetic oligonucleotide
aaggcaguguacuacaggc

SEQ ID NO: 3030362 - RNA, 19 nt, Artificial Sequence
  Description of Artificial Sequence: Synthetic oligonucleotide
agaugaaauucccagcagc

SEQ ID NO: 3030363 - RNA, 19 nt, Artificial Sequence
  Description of Artificial Sequence: Synthetic oligonucleotide
acugccaccgcucagcccc

SEQ ID NO: 3030364 - RNA, 19 nt, Artificial Sequence
  Description of Artificial Sequence: Synthetic oligonucleotide
aaaaugugcagacuagaga

SEQ ID NO: 3030365 - RNA, 19 nt, Artificial Sequence
  Description of Artificial Sequence: Synthetic oligonucleotide
ugaaauucccagcagcaug

SEQ ID NO: 3030366 - RNA, 19 nt, Artificial Sequence
  Description of Artificial Sequence: Synthetic oligonucleotide
uguacuacaggcucaguug

SEQ ID NO: 3030367 - RNA, 19 nt, Artificial Sequence
  Description of Artificial Sequence: Synthetic oligonucleotide
agauguagguaagacaggc

SEQ ID NO: 3030368 - RNA, 19 nt, Artificial Sequence
  Description of Artificial Sequence: Synthetic oligonucleotide
auguagguaagacaggcag

SEQ ID NO: 3030369 - RNA, 19 nt, Artificial Sequence
  Description of Artificial Sequence: Synthetic oligonucleotide
ucagaaaaugugcagacua

SEQ ID NO: 3030370 - RNA, 19 nt, Artificial Sequence
  Description of Artificial Sequence: Synthetic oligonucleotide
aggugauucugcuugugcc

SEQ ID NO: 3030371 - RNA, 19 nt, Artificial Sequence
  Description of Artificial Sequence: Synthetic oligonucleotide
gacuagagaaccaaggcag

SEQ ID NO: 3030372 - RNA, 19 nt, Artificial Sequence
  Description of Artificial Sequence: Synthetic oligonucleotide
uuucucguuaugaacggag

SEQ ID NO: 3030373 - RNA, 19 nt, Artificial Sequence
  Description of Artificial Sequence: Synthetic oligonucleotide
uaaguaggcaggcaggaga

SEQ ID NO: 3030374 - RNA, 19 nt, Artificial Sequence
  Description of Artificial Sequence: Synthetic oligonucleotide
aaggguagaugaaauuccc

SEQ ID NO: 3030375 - RNA, 19 nt, Artificial Sequence
  Description of Artificial Sequence: Synthetic oligonucleotide
ggagauguagguaagacag

SEQ ID NO: 3030376 - RNA, 19 nt, Artificial Sequence
  Description of Artificial Sequence: Synthetic oligonucleotide
ucugaugcugcuuucuagc

SEQ ID NO: 3030377 - RNA, 19 nt, Artificial Sequence
  Description of Artificial Sequence: Synthetic oligonucleotide
cuuguggacagucuugggg

SEQ ID NO: 3030378 - RNA, 19 nt, Artificial Sequence
  Description of Artificial Sequence: Synthetic oligonucleotide
ucaguugcgauggagucgg

SEQ ID NO: 3030379 - RNA, 19 nt, Artificial Sequence
  Description of Artificial Sequence: Synthetic oligonucleotide
ucugguacacugcagcccc

SEQ ID NO: 3030380 - RNA, 19 nt, Artificial Sequence
  Description of Artificial Sequence: Synthetic oligonucleotide
augugcagacuagagaacc

SEQ ID NO: 3030381 - RNA, 19 nt, Artificial Sequence
  Description of Artificial Sequence: Synthetic oligonucleotide
ugcuuucuagcucucaugu

SEQ ID NO: 3030382 - RNA, 19 nt, Artificial Sequence
  Description of Artificial Sequence: Synthetic oligonucleotide
gaaaaugugcagacuagag

SEQ ID NO: 3030383 - RNA, 19 nt, Artificial Sequence
  Description of Artificial Sequence: Synthetic oligonucleotide
agcagcaugugacccaggc

SEQ ID NO: 3030384 - RNA, 19 nt, Artificial Sequence
  Description of Artificial Sequence: Synthetic oligonucleotide
uucucguuaugaacggagg

SEQ ID NO: 3030385 - RNA, 19 nt, Artificial Sequence
  Description of Artificial Sequence: Synthetic oligonucleotide
uuaugaacggaggugauuc

SEQ ID NO: 3030386 - RNA, 19 nt, Artificial Sequence
  Description of Artificial Sequence: Synthetic oligonucleotide
ucucaugucuuguggacag

SEQ ID NO: 3030387 - RNA, 19 nt, Artificial Sequence
  Description of Artificial Sequence: Synthetic oligonucleotide
guagaugaaauucccagca

SEQ ID NO: 3030388 - RNA, 19 nt, Artificial Sequence
  Description of Artificial Sequence: Synthetic oligonucleotide
ugaagcagcgaagaugucc

SEQ ID NO: 3030389 - RNA, 19 nt, Artificial Sequence
  Description of Artificial Sequence: Synthetic oligonucleotide
agacuagagaaccaaggca

SEQ ID NO: 3030390 - RNA, 19 nt, Artificial Sequence
  Description of Artificial Sequence: Synthetic oligonucleotide
gaaggguagaugaaauucc

SEQ ID NO: 3030391 - RNA, 19 nt, Artificial Sequence
  Description of Artificial Sequence: Synthetic oligonucleotide
uguagguaagacaggcagc

SEQ ID NO: 3030392 - RNA, 19 nt, Artificial Sequence
  Description of Artificial Sequence: Synthetic oligonucleotide
aaccaaggcaguguacuac

SEQ ID NO: 3030393 - RNA, 19 nt, Artificial Sequence
  Description of Artificial Sequence: Synthetic oligonucleotide
auggagucgggugaguugc

SEQ ID NO: 3030394 - RNA, 19 nt, Artificial Sequence
  Description of Artificial Sequence: Synthetic oligonucleotide
cuucagaaaaugugcagac

SEQ ID NO: 3030395 - RNA, 19 nt, Artificial Sequence
  Description of Artificial Sequence: Synthetic oligonucleotide
aggguaaguaggcaggcag

SEQ ID NO: 3030396 - RNA, 19 nt, Artificial Sequence
  Description of Artificial Sequence: Synthetic oligonucleotide
auucccagcagcaugugac

SEQ ID NO: 3030397 - RNA, 19 nt, Artificial Sequence
  Description of Artificial Sequence: Synthetic oligonucleotide
augcucagagccuuucucg

SEQ ID NO: 3030398 - RNA, 19 nt, Artificial Sequence
  Description of Artificial Sequence: Synthetic oligonucleotide
ugaacggaggugauucugc

SEQ ID NO: 3030399 - RNA, 19 nt, Artificial Sequence
  Description of Artificial Sequence: Synthetic oligonucleotide
acggaggugauucugcuug

SEQ ID NO: 3030400 - RNA, 19 nt, Artificial Sequence
  Description of Artificial Sequence: Synthetic oligonucleotide
uuuggguccaacuccuuga

SEQ ID NO: 3030401 - RNA, 19 nt, Artificial Sequence
  Description of Artificial Sequence: Synthetic oligonucleotide
agucuuggggcacaugcuc

SEQ ID NO: 3030402 - RNA, 19 nt, Artificial Sequence
  Description of Artificial Sequence: Synthetic oligonucleotide
agccuuucucguuaugaac

SEQ ID NO: 3030403 - RNA, 19 nt, Artificial Sequence
  Description of Artificial Sequence: Synthetic oligonucleotide
aaugugcagacuagagaac

SEQ ID NO: 3030404 - RNA, 19 nt, Artificial Sequence
  Description of Artificial Sequence: Synthetic oligonucleotide
uagcucucaugucuugugg

SEQ ID NO: 3030405 - RNA, 19 nt, Artificial Sequence
  Description of Artificial Sequence: Synthetic oligonucleotide
ucucguuaugaacggaggu

SEQ ID NO: 3030406 - RNA, 19 nt, Artificial Sequence
  Description of Artificial Sequence: Synthetic oligonucleotide
uucugcuugugccacugcc

SEQ ID NO: 3030407 - RNA, 19 nt, Artificial Sequence
  Description of Artificial Sequence: Synthetic oligonucleotide
uacacugcagccccaaauc

SEQ ID NO: 3030408 - RNA, 19 nt, Artificial Sequence
  Description of Artificial Sequence: Synthetic oligonucleotide
gaugaaauucccagcagca

SEQ ID NO: 3030409 - RNA, 19 nt, Artificial Sequence
  Description of Artificial Sequence: Synthetic oligonucleotide
ugucuuguggacagucuug

SEQ ID NO: 3030410 - RNA, 19 nt, Artificial Sequence
  Description of Artificial Sequence: Synthetic oligonucleotide
ucguuaugaacggagguga

SEQ ID NO: 3030411 - RNA, 19 nt, Artificial Sequence
  Description of Artificial Sequence: Synthetic oligonucleotide
ugcagacuagagaaccaag

SEQ ID NO: 3030412 - RNA, 19 nt, Artificial Sequence
  Description of Artificial Sequence: Synthetic oligonucleotide
cagaaaaugugcagacuag

SEQ ID NO: 3030413 - RNA, 19 nt, Artificial Sequence
  Description of Artificial Sequence: Synthetic oligonucleotide
ggguagaugaaauucccag

SEQ ID NO: 3030414 - RNA, 19 nt, Artificial Sequence
  Description of Artificial Sequence: Synthetic oligonucleotide
cuugaagcagcgaagaugu

SEQ ID NO: 3030415 - RNA, 19 nt, Artificial Sequence
  Description of Artificial Sequence: Synthetic oligonucleotide
guacuacaggcucaguugc

SEQ ID NO: 3030416 - RNA, 19 nt, Artificial Sequence
  Description of Artificial Sequence: Synthetic oligonucleotide
acaggcucaguugcgaugg

SEQ ID NO: 3030417 - RNA, 19 nt, Artificial Sequence
  Description of Artificial Sequence: Synthetic oligonucleotide
agcuucagaaaaugugcag

SEQ ID NO: 3030418 - RNA, 19 nt, Artificial Sequence
  Description of Artificial Sequence: Synthetic oligonucleotide
gugacccaggccuugaagc

SEQ ID NO: 3030419 - RNA, 19 nt, Artificial Sequence
  Description of Artificial Sequence: Synthetic oligonucleotide
guugcgauggagucgggug

SEQ ID NO: 3030420 - RNA, 19 nt, Artificial Sequence
  Description of Artificial Sequence: Synthetic oligonucleotide
gaagauguccagcggagga

SEQ ID NO: 3030421 - RNA, 19 nt, Artificial Sequence
  Description of Artificial Sequence: Synthetic oligonucleotide
aggagauguagguaagaca

SEQ ID NO: 3030422 - RNA, 19 nt, Artificial Sequence
  Description of Artificial Sequence: Synthetic oligonucleotide
ugugacccaggccuugaag

SEQ ID NO: 3030423 - RNA, 19 nt, Artificial Sequence
  Description of Artificial Sequence: Synthetic oligonucleotide
agaaccaaggcaguguacu

SEQ ID NO: 3030424 - RNA, 19 nt, Artificial Sequence
  Description of Artificial Sequence: Synthetic oligonucleotide
agauguccagcggaggagc

SEQ ID NO: 3030425 - RNA, 19 nt, Artificial Sequence
  Description of Artificial Sequence: Synthetic oligonucleotide
uacuacaggcucaguugcg

SEQ ID NO: 3030426 - RNA, 19 nt, Artificial Sequence
  Description of Artificial Sequence: Synthetic oligonucleotide
aaaucugaugcugcuuucu

SEQ ID NO: 3030427 - RNA, 19 nt, Artificial Sequence
  Description of Artificial Sequence: Synthetic oligonucleotide
aauucccagcagcauguga

SEQ ID NO: 3030428 - RNA, 19 nt, Artificial Sequence
  Description of Artificial Sequence: Synthetic oligonucleotide
ugugcagacuagagaacca

SEQ ID NO: 3030429 - RNA, 19 nt, Artificial Sequence
  Description of Artificial Sequence: Synthetic oligonucleotide
gaggugauucugcuugugc

SEQ ID NO: 3030430 - RNA, 19 nt, Artificial Sequence
  Description of Artificial Sequence: Synthetic oligonucleotide
gcagcgaagauguccagcg

SEQ ID NO: 3030431 - RNA, 19 nt, Artificial Sequence
  Description of Artificial Sequence: Synthetic oligonucleotide
uccaccacguggcgaaggg

SEQ ID NO: 3030432 - RNA, 19 nt, Artificial Sequence
  Description of Artificial Sequence: Synthetic oligonucleotide
gaugcugcuuucuagcucu

SEQ ID NO: 3030433 - RNA, 19 nt, Artificial Sequence
  Description of Artificial Sequence: Synthetic oligonucleotide
aagauguccagcggaggag

SEQ ID NO: 3030434 - RNA, 19 nt, Artificial Sequence
  Description of Artificial Sequence: Synthetic oligonucleotide
gauggagucgggugaguug

SEQ ID NO: 3030435 - RNA, 19 nt, Artificial Sequence
  Description of Artificial Sequence: Synthetic oligonucleotide
agcagcuucagaaaaugug

SEQ ID NO: 3030436 - RNA, 19 nt, Artificial Sequence
  Description of Artificial Sequence: Synthetic oligonucleotide
gguagaugaaauucccagc

SEQ ID NO: 3030437 - RNA, 19 nt, Artificial Sequence
  Description of Artificial Sequence: Synthetic oligonucleotide
agcgaagauguccagcgga

SEQ ID NO: 3030438 - RNA, 19 nt, Artificial Sequence
  Description of Artificial Sequence: Synthetic oligonucleotide
caaggcaguguacuacagg

SEQ ID NO: 3030439 - RNA, 19 nt, Artificial Sequence
  Description of Artificial Sequence: Synthetic oligonucleotide
gaagcagcgaagaugucca

SEQ ID NO: 3030440 - RNA, 19 nt, Artificial Sequence
  Description of Artificial Sequence: Synthetic oligonucleotide
ggugaguugccucugguac

SEQ ID NO: 3030441 - RNA, 19 nt, Artificial Sequence
  Description of Artificial Sequence: Synthetic oligonucleotide
agaaaaugugcagacuaga

SEQ ID NO: 3030442 - RNA, 19 nt, Artificial Sequence
  Description of Artificial Sequence: Synthetic oligonucleotide
aguugccucugguacacug

SEQ ID NO: 3030443 - RNA, 19 nt, Artificial Sequence
  Description of Artificial Sequence: Synthetic oligonucleotide
aaucugaugcugcuuucua

SEQ ID NO: 3030444 - RNA, 19 nt, Artificial Sequence
  Description of Artificial Sequence: Synthetic oligonucleotide
gccuuucucguuaugaacg

SEQ ID NO: 3030445 - RNA, 19 nt, Artificial Sequence
  Description of Artificial Sequence: Synthetic oligonucleotide
ucuuguggacagucuuggg

SEQ ID NO: 3030446 - RNA, 19 nt, Artificial Sequence
  Description of Artificial Sequence: Synthetic oligonucleotide
guagguaagacaggcagca

SEQ ID NO: 3030447 - RNA, 19 nt, Artificial Sequence
  Description of Artificial Sequence: Synthetic oligonucleotide
ucuuggggcacaugcucag

SEQ ID NO: 3030448 - RNA, 19 nt, Artificial Sequence
  Description of Artificial Sequence: Synthetic oligonucleotide
agcagcgaagauguccagc

SEQ ID NO: 3030449 - RNA, 19 nt, Artificial Sequence
  Description of Artificial Sequence: Synthetic oligonucleotide
gcagccccaaaucugaugc

SEQ ID NO: 3030450 - RNA, 19 nt, Artificial Sequence
  Description of Artificial Sequence: Synthetic oligonucleotide
uugcgauggagucggguga

SEQ ID NO: 3030451 - RNA, 19 nt, Artificial Sequence
  Description of Artificial Sequence: Synthetic oligonucleotide
gagauguagguaagacagg

SEQ ID NO: 3030452 - RNA, 19 nt, Artificial Sequence
  Description of Artificial Sequence: Synthetic oligonucleotide
cuuucuagcucucaugucu

SEQ ID NO: 3030453 - RNA, 19 nt, Artificial Sequence
  Description of Artificial Sequence: Synthetic oligonucleotide
cucguuaugaacggaggug

SEQ ID NO: 3030454 - RNA, 19 nt, Artificial Sequence
  Description of Artificial Sequence: Synthetic oligonucleotide
uugccucugguacacugca

SEQ ID NO: 3030455 - RNA, 19 nt, Artificial Sequence
  Description of Artificial Sequence: Synthetic oligonucleotide
cuagcucucaugucuugug

SEQ ID NO: 3030456 - RNA, 19 nt, Artificial Sequence
  Description of Artificial Sequence: Synthetic oligonucleotide
accaaggcaguguacuaca

SEQ ID NO: 3030457 - RNA, 19 nt, Artificial Sequence
  Description of Artificial Sequence: Synthetic oligonucleotide
uagagaaccaaggcagugu

SEQ ID NO: 3030458 - RNA, 19 nt, Artificial Sequence
  Description of Artificial Sequence: Synthetic oligonucleotide
agagccuuucucguuauga

SEQ ID NO: 3030459 - RNA, 19 nt, Artificial Sequence
  Description of Artificial Sequence: Synthetic oligonucleotide
ugaugcugcuuucuagcuc

SEQ ID NO: 3030460 - RNA, 19 nt, Artificial Sequence
  Description of Artificial Sequence: Synthetic oligonucleotide
uguccagcggaggagcucc

SEQ ID NO: 3030461 - RNA, 19 nt, Artificial Sequence
  Description of Artificial Sequence: Synthetic oligonucleotide
gcagcuucagaaaaugugc

SEQ ID NO: 3030462 - RNA, 19 nt, Artificial Sequence
  Description of Artificial Sequence: Synthetic oligonucleotide
uuucuagcucucaugucuu

SEQ ID NO: 3030463 - RNA, 19 nt, Artificial Sequence
  Description of Artificial Sequence: Synthetic oligonucleotide
gcagacuagagaaccaagg

SEQ ID NO: 3030464 - RNA, 19 nt, Artificial Sequence
  Description of Artificial Sequence: Synthetic oligonucleotide
uucagaaaaugugcagacu

SEQ ID NO: 3030465 - RNA, 19 nt, Artificial Sequence
  Description of Artificial Sequence: Synthetic oligonucleotide
agagaaccaaggcagugua

SEQ ID NO: 3030466 - RNA, 19 nt, Artificial Sequence
  Description of Artificial Sequence: Synthetic oligonucleotide
auucugcuugugccacugc

SEQ ID NO: 3030467 - RNA, 19 nt, Artificial Sequence
  Description of Artificial Sequence: Synthetic oligonucleotide
cucaguugcgauggagucg

SEQ ID NO: 3030468 - RNA, 19 nt, Artificial Sequence
  Description of Artificial Sequence: Synthetic oligonucleotide
ugcucagagccuuucucgu

SEQ ID NO: 3030469 - RNA, 19 nt, Artificial Sequence
  Description of Artificial Sequence: Synthetic oligonucleotide
gauucugcuugugccacug

SEQ ID NO: 3030470 - RNA, 19 nt, Artificial Sequence
  Description of Artificial Sequence: Synthetic oligonucleotide
aagacaggcagcagcuuca

SEQ ID NO: 3030471 - RNA, 19 nt, Artificial Sequence
  Description of Artificial Sequence: Synthetic oligonucleotide
acacugcagccccaaaucu

SEQ ID NO: 3030472 - RNA, 19 nt, Artificial Sequence
  Description of Artificial Sequence: Synthetic oligonucleotide
uguggacagucuuggggca

SEQ ID NO: 3030473 - RNA, 19 nt, Artificial Sequence
  Description of Artificial Sequence: Synthetic oligonucleotide
agcucucaugucuugugga

SEQ ID NO: 3030474 - RNA, 19 nt, Artificial Sequence
  Description of Artificial Sequence: Synthetic oligonucleotide
uaugaacggaggugauucu

SEQ ID NO: 3030475 - RNA, 19 nt, Artificial Sequence
  Description of Artificial Sequence: Synthetic oligonucleotide
uucccagcagcaugugacc

SEQ ID NO: 3030476 - RNA, 19 nt, Artificial Sequence
  Description of Artificial Sequence: Synthetic oligonucleotide
ugaguugccucugguacac

SEQ ID NO: 3030477 - RNA, 19 nt, Artificial Sequence
  Description of Artificial Sequence: Synthetic oligonucleotide
gcuugugccacugccaccg

SEQ ID NO: 3030478 - RNA, 19 nt, Artificial Sequence
  Description of Artificial Sequence: Synthetic oligonucleotide
ucaugucuuguggacaguc

SEQ ID NO: 3030479 - RNA, 19 nt, Artificial Sequence
  Description of Artificial Sequence: Synthetic oligonucleotide
caggagauguagguaagac

SEQ ID NO: 3030480 - RNA, 19 nt, Artificial Sequence
  Description of Artificial Sequence: Synthetic oligonucleotide
ggggcacaugcucagagcc

SEQ ID NO: 3030481 - RNA, 19 nt, Artificial Sequence
  Description of Artificial Sequence: Synthetic oligonucleotide
ucuagcucucaugucuugu

SEQ ID NO: 3030482 - RNA, 19 nt, Artificial Sequence
  Description of Artificial Sequence: Synthetic oligonucleotide
augucuuguggacagucuu

SEQ ID NO: 3030483 - RNA, 19 nt, Artificial Sequence
  Description of Artificial Sequence: Synthetic oligonucleotide
agucgggugaguugccucu

SEQ ID NO: 3030484 - RNA, 19 nt, Artificial Sequence
  Description of Artificial Sequence: Synthetic oligonucleotide
cuagagaaccaaggcagug

SEQ ID NO: 3030485 - RNA, 19 nt, Artificial Sequence
  Description of Artificial Sequence: Synthetic oligonucleotide
ucgggugaguugccucugg

SEQ ID NO: 3030486 - RNA, 19 nt, Artificial Sequence
  Description of Artificial Sequence: Synthetic oligonucleotide
aaguaggcaggcaggagau

SEQ ID NO: 3030487 - RNA, 19 nt, Artificial Sequence
  Description of Artificial Sequence: Synthetic oligonucleotide
cugcuuucuagcucucaug

SEQ ID NO: 3030488 - RNA, 19 nt, Artificial Sequence
  Description of Artificial Sequence: Synthetic oligonucleotide
uucuagcucucaugucuug

SEQ ID NO: 3030489 - RNA, 19 nt, Artificial Sequence
  Description of Artificial Sequence: Synthetic oligonucleotide
augaacggaggugauucug

SEQ ID NO: 3030490 - RNA, 19 nt, Artificial Sequence
  Description of Artificial Sequence: Synthetic oligonucleotide
ggcaguguacuacaggcuc

SEQ ID NO: 3030491 - RNA, 19 nt, Artificial Sequence
  Description of Artificial Sequence: Synthetic oligonucleotide
caaaucugaugcugcuuuc

SEQ ID NO: 3030492 - RNA, 19 nt, Artificial Sequence
  Description of Artificial Sequence: Synthetic oligonucleotide
aagcagcgaagauguccag

SEQ ID NO: 3030493 - RNA, 19 nt, Artificial Sequence
  Description of Artificial Sequence: Synthetic oligonucleotide
ggguccaacuccuugaaaa

SEQ ID NO: 3030494 - RNA, 19 nt, Artificial Sequence
  Description of Artificial Sequence: Synthetic oligonucleotide
gauguagguaagacaggca

SEQ ID NO: 3030495 - RNA, 19 nt, Artificial Sequence
  Description of Artificial Sequence: Synthetic oligonucleotide
acugcagccccaaaucuga

SEQ ID NO: 3030496 - RNA, 19 nt, Artificial Sequence
  Description of Artificial Sequence: Synthetic oligonucleotide
cagcaugugacccaggccu

SEQ ID NO: 3030497 - RNA, 19 nt, Artificial Sequence
  Description of Artificial Sequence: Synthetic oligonucleotide
cagcuucagaaaaugugca

SEQ ID NO: 3030498 - RNA, 19 nt, Artificial Sequence
  Description of Artificial Sequence: Synthetic oligonucleotide
ccuuucucguuaugaacgg

SEQ ID NO: 3030499 - RNA, 19 nt, Artificial Sequence
  Description of Artificial Sequence: Synthetic oligonucleotide
acuacaggcucaguugcga

SEQ ID NO: 3030500 - RNA, 19 nt, Artificial Sequence
  Description of Artificial Sequence: Synthetic oligonucleotide
aaauucccagcagcaugug

SEQ ID NO: 3030501 - RNA, 19 nt, Artificial Sequence
  Description of Artificial Sequence: Synthetic oligonucleotide
gagccuuucucguuaugaa

SEQ ID NO: 3030502 - RNA, 19 nt, Artificial Sequence
  Description of Artificial Sequence: Synthetic oligonucleotide
aacggaggugauucugcuu

SEQ ID NO: 3030503 - RNA, 19 nt, Artificial Sequence
  Description of Artificial Sequence: Synthetic oligonucleotide
ugcgauggagucgggugag

SEQ ID NO: 3030504 - RNA, 19 nt, Artificial Sequence
  Description of Artificial Sequence: Synthetic oligonucleotide
guaaguaggcaggcaggag

SEQ ID NO: 3030505 - RNA, 19 nt, Artificial Sequence
  Description of Artificial Sequence: Synthetic oligonucleotide
agccccaaaucugaugcug

SEQ ID NO: 3030506 - RNA, 19 nt, Artificial Sequence
  Description of Artificial Sequence: Synthetic oligonucleotide
ugccucugguacacugcag

SEQ ID NO: 3030507 - RNA, 19 nt, Artificial Sequence
  Description of Artificial Sequence: Synthetic oligonucleotide
guugccucugguacacugc

SEQ ID NO: 3030508 - RNA, 19 nt, Artificial Sequence
  Description of Artificial Sequence: Synthetic oligonucleotide
aggcagcagcuucagaaaa

SEQ ID NO: 3030509 - RNA, 19 nt, Artificial Sequence
  Description of Artificial Sequence: Synthetic oligonucleotide
gcuucagaaaaugugcaga

SEQ ID NO: 3030510 - RNA, 19 nt, Artificial Sequence
  Description of Artificial Sequence: Synthetic oligonucleotide
caggccuugaagcagcgaa

SEQ ID NO: 3030511 - RNA, 19 nt, Artificial Sequence
  Description of Artificial Sequence: Synthetic oligonucleotide
gccucugguacacugcagc

SEQ ID NO: 3030512 - RNA, 19 nt, Artificial Sequence
  Description of Artificial Sequence: Synthetic oligonucleotide
ucccagcagcaugugaccc

SEQ ID NO: 3030513 - RNA, 19 nt, Artificial Sequence
  Description of Artificial Sequence: Synthetic oligonucleotide
agcggaggagcucccugag

SEQ ID NO: 3030514 - RNA, 19 nt, Artificial Sequence
  Description of Artificial Sequence: Synthetic oligonucleotide
ccuugaagcagcgaagaug

SEQ ID NO: 3030515 - RNA, 19 nt, Artificial Sequence
  Description of Artificial Sequence: Synthetic oligonucleotide
augaaauucccagcagcau

SEQ ID NO: 3030516 - RNA, 19 nt, Artificial Sequence
  Description of Artificial Sequence: Synthetic oligonucleotide
caguguacuacaggcucag

SEQ ID NO: 3030517 - RNA, 19 nt, Artificial Sequence
  Description of Artificial Sequence: Synthetic oligonucleotide
gugaguugccucugguaca

SEQ ID NO: 3030518 - RNA, 19 nt, Artificial Sequence
  Description of Artificial Sequence: Synthetic oligonucleotide
gugauucugcuugugccac

SEQ ID NO: 3030519 - RNA, 19 nt, Artificial Sequence
  Description of Artificial Sequence: Synthetic oligonucleotide
ugcuugugccacugccacc

SEQ ID NO: 3030520 - RNA, 19 nt, Artificial Sequence
  Description of Artificial Sequence: Synthetic oligonucleotide
ugauucugcuugugccacu

SEQ ID NO: 3030521 - RNA, 19 nt, Artificial Sequence
  Description of Artificial Sequence: Synthetic oligonucleotide
acuagagaaccaaggcagu

SEQ ID NO: 3030522 - RNA, 19 nt, Artificial Sequence
  Description of Artificial Sequence: Synthetic oligonucleotide
ggguaaguaggcaggcagg

SEQ ID NO: 3030523 - RNA, 19 nt, Artificial Sequence
  Description of Artificial Sequence: Synthetic oligonucleotide
uggcgaaggguagaugaaa

SEQ ID NO: 3030524 - RNA, 19 nt, Artificial Sequence
  Description of Artificial Sequence: Synthetic oligonucleotide
uugugccacugccaccgcu

SEQ ID NO: 3030525 - RNA, 19 nt, Artificial Sequence
  Description of Artificial Sequence: Synthetic oligonucleotide
cagcgaagauguccagcgg

SEQ ID NO: 3030526 - RNA, 19 nt, Artificial Sequence
  Description of Artificial Sequence: Synthetic oligonucleotide
gaaccaaggcaguguacua

SEQ ID NO: 3030527 - RNA, 19 nt, Artificial Sequence
  Description of Artificial Sequence: Synthetic oligonucleotide
gagucgggugaguugccuc

SEQ ID NO: 3030528 - RNA, 19 nt, Artificial Sequence
  Description of Artificial Sequence: Synthetic oligonucleotide
ucagagccuuucucguuau

SEQ ID NO: 3030529 - RNA, 19 nt, Artificial Sequence
  Description of Artificial Sequence: Synthetic oligonucleotide
aggguagaugaaauuccca

SEQ ID NO: 3030530 - RNA, 19 nt, Artificial Sequence
  Description of Artificial Sequence: Synthetic oligonucleotide
cgaaggguagaugaaauuc

SEQ ID NO: 3030531 - RNA, 19 nt, Artificial Sequence
  Description of Artificial Sequence: Synthetic oligonucleotide
gagaaccaaggcaguguac

SEQ ID NO: 3030532 - RNA, 19 nt, Artificial Sequence
  Description of Artificial Sequence: Synthetic oligonucleotide
uggacagucuuggggcaca

SEQ ID NO: 3030533 - RNA, 19 nt, Artificial Sequence
  Description of Artificial Sequence: Synthetic oligonucleotide
uggagucgggugaguugcc

SEQ ID NO: 3030534 - RNA, 19 nt, Artificial Sequence
  Description of Artificial Sequence: Synthetic oligonucleotide
aguugcgauggagucgggu

SEQ ID NO: 3030535 - RNA, 19 nt, Artificial Sequence
  Description of Artificial Sequence: Synthetic oligonucleotide
gguaaguaggcaggcagga

SEQ ID NO: 3030536 - RNA, 19 nt, Artificial Sequence
  Description of Artificial Sequence: Synthetic oligonucleotide
gcucucaugucuuguggac

SEQ ID NO: 3030537 - RNA, 19 nt, Artificial Sequence
  Description of Artificial Sequence: Synthetic oligonucleotide
cucagagccuuucucguua

SEQ ID NO: 3030538 - RNA, 19 nt, Artificial Sequence
  Description of Artificial Sequence: Synthetic oligonucleotide
aggccuugaagcagcgaag

SEQ ID NO: 3030539 - RNA, 19 nt, Artificial Sequence
  Description of Artificial Sequence: Synthetic oligonucleotide
guguacuacaggcucaguu

SEQ ID NO: 3030540 - RNA, 19 nt, Artificial Sequence
  Description of Artificial Sequence: Synthetic oligonucleotide
gaacggaggugauucugcu

SEQ ID NO: 3030541 - RNA, 19 nt, Artificial Sequence
  Description of Artificial Sequence: Synthetic oligonucleotide
guaggcaggcaggagaugu

SEQ ID NO: 3030542 - RNA, 19 nt, Artificial Sequence
  Description of Artificial Sequence: Synthetic oligonucleotide
ccucugguacacugcagcc

SEQ ID NO: 3030543 - RNA, 19 nt, Artificial Sequence
  Description of Artificial Sequence: Synthetic oligonucleotide
aggcucaguugcgauggag

SEQ ID NO: 3030544 - RNA, 19 nt, Artificial Sequence
  Description of Artificial Sequence: Synthetic oligonucleotide
auguccagcggaggagcuc

SEQ ID NO: 3030545 - RNA, 19 nt, Artificial Sequence
  Description of Artificial Sequence: Synthetic oligonucleotide
uaggcaggcaggagaugua

SEQ ID NO: 3030546 - RNA, 19 nt, Artificial Sequence
  Description of Artificial Sequence: Synthetic oligonucleotide
agacaggcagcagcuucag

SEQ ID NO: 3030547 - RNA, 19 nt, Artificial Sequence
  Description of Artificial Sequence: Synthetic oligonucleotide
cucucaugucuuguggaca

SEQ ID NO: 3030548 - RNA, 19 nt, Artificial Sequence
  Description of Artificial Sequence: Synthetic oligonucleotide
gcagcaugugacccaggcc

SEQ ID NO: 3030549 - RNA, 19 nt, Artificial Sequence
  Description of Artificial Sequence: Synthetic oligonucleotide
uugaagcagcgaagauguc

SEQ ID NO: 3030550 - RNA, 19 nt, Artificial Sequence
  Description of Artificial Sequence: Synthetic oligonucleotide
caccacguggcgaagggua

SEQ ID NO: 3030551 - RNA, 19 nt, Artificial Sequence
  Description of Artificial Sequence: Synthetic oligonucleotide
accacguggcgaaggguag

SEQ ID NO: 3030552 - RNA, 19 nt, Artificial Sequence
  Description of Artificial Sequence: Synthetic oligonucleotide
ugcugcuuucuagcucuca

SEQ ID NO: 3030553 - RNA, 19 nt, Artificial Sequence
  Description of Artificial Sequence: Synthetic oligonucleotide
guacacugcagccccaaau

SEQ ID NO: 3030554 - RNA, 19 nt, Artificial Sequence
  Description of Artificial Sequence: Synthetic oligonucleotide
gguaagacaggcagcagcu

SEQ ID NO: 3030555 - RNA, 19 nt, Artificial Sequence
  Description of Artificial Sequence: Synthetic oligonucleotide
gcgaagauguccagcggag

SEQ ID NO: 3030556 - RNA, 19 nt, Artificial Sequence
  Description of Artificial Sequence: Synthetic oligonucleotide
gucuuggggcacaugcuca

SEQ ID NO: 3030557 - RNA, 19 nt, Artificial Sequence
  Description of Artificial Sequence: Synthetic oligonucleotide
cuccaccacguggcgaagg

SEQ ID NO: 3030558 - RNA, 19 nt, Artificial Sequence
  Description of Artificial Sequence: Synthetic oligonucleotide
aggcaguguacuacaggcu

SEQ ID NO: 3030559 - RNA, 19 nt, Artificial Sequence
  Description of Artificial Sequence: Synthetic oligonucleotide
cguggcgaaggguagauga

SEQ ID NO: 3030560 - RNA, 19 nt, Artificial Sequence
  Description of Artificial Sequence: Synthetic oligonucleotide
aguaggcaggcaggagaug

SEQ ID NO: 3030561 - RNA, 19 nt, Artificial Sequence
  Description of Artificial Sequence: Synthetic oligonucleotide
cuuucucguuaugaacgga

SEQ ID NO: 3030562 - RNA, 19 nt, Artificial Sequence
  Description of Artificial Sequence: Synthetic oligonucleotide
caugucuuguggacagucu

SEQ ID NO: 3030563 - RNA, 19 nt, Artificial Sequence
  Description of Artificial Sequence: Synthetic oligonucleotide
gugcagacuagagaaccaa

SEQ ID NO: 3030564 - RNA, 19 nt, Artificial Sequence
  Description of Artificial Sequence: Synthetic oligonucleotide
ugguacacugcagccccaa

SEQ ID NO: 3030565 - RNA, 19 nt, Artificial Sequence
  Description of Artificial Sequence: Synthetic oligonucleotide
ccaaggcaguguacuacag

SEQ ID NO: 3030566 - RNA, 19 nt, Artificial Sequence
  Description of Artificial Sequence: Synthetic oligonucleotide
cugaugcugcuuucuagcu

SEQ ID NO: 3030567 - RNA, 19 nt, Artificial Sequence
  Description of Artificial Sequence: Synthetic oligonucleotide
ggcaggagauguagguaag

SEQ ID NO: 3030568 - RNA, 19 nt, Artificial Sequence
  Description of Artificial Sequence: Synthetic oligonucleotide
gcuuucuagcucucauguc

SEQ ID NO: 3030569 - RNA, 19 nt, Artificial Sequence
  Description of Artificial Sequence: Synthetic oligonucleotide
gacagucuuggggcacaug

SEQ ID NO: 3030570 - RNA, 19 nt, Artificial Sequence
  Description of Artificial Sequence: Synthetic oligonucleotide
gacaggcagcagcuucaga

SEQ ID NO: 3030571 - RNA, 19 nt, Artificial Sequence
  Description of Artificial Sequence: Synthetic oligonucleotide
cacugccaccgcucagccc

SEQ ID NO: 3030572 - RNA, 19 nt, Artificial Sequence
  Description of Artificial Sequence: Synthetic oligonucleotide
cuugugccacugccaccgc

SEQ ID NO: 3030573 - RNA, 19 nt, Artificial Sequence
  Description of Artificial Sequence: Synthetic oligonucleotide
augugacccaggccuugaa

SEQ ID NO: 3030574 - RNA, 19 nt, Artificial Sequence
  Description of Artificial Sequence: Synthetic oligonucleotide
cagcggaggagcucccuga

SEQ ID NO: 3030575 - RNA, 19 nt, Artificial Sequence
  Description of Artificial Sequence: Synthetic oligonucleotide
gccacugccaccgcucagc

SEQ ID NO: 3030576 - RNA, 19 nt, Artificial Sequence
  Description of Artificial Sequence: Synthetic oligonucleotide
ggccuugaagcagcgaaga

SEQ ID NO: 3030577 - RNA, 19 nt, Artificial Sequence
  Description of Artificial Sequence: Synthetic oligonucleotide
cagagccuuucucguuaug

SEQ ID NO: 3030578 - RNA, 19 nt, Artificial Sequence
  Description of Artificial Sequence: Synthetic oligonucleotide
gccccaaaucugaugcugc

SEQ ID NO: 3030579 - RNA, 19 nt, Artificial Sequence
  Description of Artificial Sequence: Synthetic oligonucleotide
guggacagucuuggggcac

SEQ ID NO: 3030580 - RNA, 19 nt, Artificial Sequence
  Description of Artificial Sequence: Synthetic oligonucleotide
aguguacuacaggcucagu

SEQ ID NO: 3030581 - RNA, 19 nt, Artificial Sequence
  Description of Artificial Sequence: Synthetic oligonucleotide
cagcagcaugugacccagg

SEQ ID NO: 3030582 - RNA, 19 nt, Artificial Sequence
  Description of Artificial Sequence: Synthetic oligonucleotide
ggaggugauucugcuugug

SEQ ID NO: 3030583 - RNA, 19 nt, Artificial Sequence
  Description of Artificial Sequence: Synthetic oligonucleotide
guuaugaacggaggugauu

SEQ ID NO: 3030584 - RNA, 19 nt, Artificial Sequence
  Description of Artificial Sequence: Synthetic oligonucleotide
caugugacccaggccuuga

SEQ ID NO: 3030585 - RNA, 19 nt, Artificial Sequence
  Description of Artificial Sequence: Synthetic oligonucleotide
gcaguguacuacaggcuca

SEQ ID NO: 3030586 - RNA, 19 nt, Artificial Sequence
  Description of Artificial Sequence: Synthetic oligonucleotide
uccagcggaggagcucccu

SEQ ID NO: 3030587 - RNA, 19 nt, Artificial Sequence
  Description of Artificial Sequence: Synthetic oligonucleotide
gucgggugaguugccucug

SEQ ID NO: 3030588 - RNA, 19 nt, Artificial Sequence
  Description of Artificial Sequence: Synthetic oligonucleotide
cagcagcuucagaaaaugu

SEQ ID NO: 3030589 - RNA, 19 nt, Artificial Sequence
  Description of Artificial Sequence: Synthetic oligonucleotide
guggcgaaggguagaugaa

SEQ ID NO: 3030590 - RNA, 19 nt, Artificial Sequence
  Description of Artificial Sequence: Synthetic oligonucleotide
cagucuuggggcacaugcu

SEQ ID NO: 3030591 - RNA, 19 nt, Artificial Sequence
  Description of Artificial Sequence: Synthetic oligonucleotide
gauguccagcggaggagcu

SEQ ID NO: 3030592 - RNA, 19 nt, Artificial Sequence
  Description of Artificial Sequence: Synthetic oligonucleotide
caguugcgauggagucggg

SEQ ID NO: 3030593 - RNA, 19 nt, Artificial Sequence
  Description of Artificial Sequence: Synthetic oligonucleotide
acguggcgaaggguagaug

SEQ ID NO: 3030594 - RNA, 19 nt, Artificial Sequence
  Description of Artificial Sequence: Synthetic oligonucleotide
cgaagauguccagcggagg

SEQ ID NO: 3030595 - RNA, 19 nt, Artificial Sequence
  Description of Artificial Sequence: Synthetic oligonucleotide
augcugcuuucuagcucuc

SEQ ID NO: 3030596 - RNA, 19 nt, Artificial Sequence
  Description of Artificial Sequence: Synthetic oligonucleotide
ccaaaucugaugcugcuuu

SEQ ID NO: 3030597 - RNA, 19 nt, Artificial Sequence
  Description of Artificial Sequence: Synthetic oligonucleotide
gggugaguugccucuggua

SEQ ID NO: 3030598 - RNA, 19 nt, Artificial Sequence
  Description of Artificial Sequence: Synthetic oligonucleotide
gcugcuuucuagcucucau

SEQ ID NO: 3030599 - RNA, 19 nt, Artificial Sequence
  Description of Artificial Sequence: Synthetic oligonucleotide
agcaugugacccaggccuu

SEQ ID NO: 3030600 - RNA, 19 nt, Artificial Sequence
  Description of Artificial Sequence: Synthetic oligonucleotide
ggcucaguugcgauggagu

SEQ ID NO: 3030601 - RNA, 19 nt, Artificial Sequence
  Description of Artificial Sequence: Synthetic oligonucleotide
ccacugccaccgcucagcc

SEQ ID NO: 3030602 - RNA, 19 nt, Artificial Sequence
  Description of Artificial Sequence: Synthetic oligonucleotide
cuacaggcucaguugcgau

SEQ ID NO: 3030603 - RNA, 19 nt, Artificial Sequence
  Description of Artificial Sequence: Synthetic oligonucleotide
cuuggggcacaugcucaga

SEQ ID NO: 3030604 - RNA, 19 nt, Artificial Sequence
  Description of Artificial Sequence: Synthetic oligonucleotide
cugguacacugcagcccca

SEQ ID NO: 3030605 - RNA, 19 nt, Artificial Sequence
  Description of Artificial Sequence: Synthetic oligonucleotide
ccagcggaggagcucccug

SEQ ID NO: 3030606 - RNA, 19 nt, Artificial Sequence
  Description of Artificial Sequence: Synthetic oligonucleotide
gcaugugacccaggccuug

SEQ ID NO: 3030607 - RNA, 19 nt, Artificial Sequence
  Description of Artificial Sequence: Synthetic oligonucleotide
cccaggccuugaagcagcg

SEQ ID NO: 3030608 - RNA, 19 nt, Artificial Sequence
  Description of Artificial Sequence: Synthetic oligonucleotide
gguacacugcagccccaaa

SEQ ID NO: 3030609 - RNA, 19 nt, Artificial Sequence
  Description of Artificial Sequence: Synthetic oligonucleotide
ggcgaaggguagaugaaau

SEQ ID NO: 3030610 - RNA, 19 nt, Artificial Sequence
  Description of Artificial Sequence: Synthetic oligonucleotide
cccuccaccacguggcgaa

SEQ ID NO: 3030611 - RNA, 19 nt, Artificial Sequence
  Description of Artificial Sequence: Synthetic oligonucleotide
gagcucccugaguacuuuu

SEQ ID NO: 3030612 - RNA, 19 nt, Artificial Sequence
  Description of Artificial Sequence: Synthetic oligonucleotide
gcgaaggguagaugaaauu

SEQ ID NO: 3030613 - RNA, 19 nt, Artificial Sequence
  Description of Artificial Sequence: Synthetic oligonucleotide
ggcacaugcucagagccuu

SEQ ID NO: 3030614 - RNA, 19 nt, Artificial Sequence
  Description of Artificial Sequence: Synthetic oligonucleotide
guccagcggaggagcuccc

SEQ ID NO: 3030615 - RNA, 19 nt, Artificial Sequence
  Description of Artificial Sequence: Synthetic oligonucleotide
cagccccaaaucugaugcu

SEQ ID NO: 3030616 - RNA, 19 nt, Artificial Sequence
  Description of Artificial Sequence: Synthetic oligonucleotide
caggcucaguugcgaugga

SEQ ID NO: 3030617 - RNA, 19 nt, Artificial Sequence
  Description of Artificial Sequence: Synthetic oligonucleotide
cacguggcgaaggguagau

SEQ ID NO: 3030618 - RNA, 19 nt, Artificial Sequence
  Description of Artificial Sequence: Synthetic oligonucleotide
cucaugucuuguggacagu

SEQ ID NO: 3030619 - RNA, 19 nt, Artificial Sequence
  Description of Artificial Sequence: Synthetic oligonucleotide
gccuugaagcagcgaagau

SEQ ID NO: 3030620 - RNA, 19 nt, Artificial Sequence
  Description of Artificial Sequence: Synthetic oligonucleotide
ggagucgggugaguugccu

SEQ ID NO: 3030621 - RNA, 19 nt, Artificial Sequence
  Description of Artificial Sequence: Synthetic oligonucleotide
ccccaaaucugaugcugcu

SEQ ID NO: 3030622 - RNA, 19 nt, Artificial Sequence
  Description of Artificial Sequence: Synthetic oligonucleotide
cugcagccccaaaucugau

SEQ ID NO: 3030623 - RNA, 19 nt, Artificial Sequence
  Description of Artificial Sequence: Synthetic oligonucleotide
gaguugccucugguacacu

SEQ ID NO: 3030624 - RNA, 19 nt, Artificial Sequence
  Description of Artificial Sequence: Synthetic oligonucleotide
gggcacaugcucagagccu

SEQ ID NO: 3030625 - RNA, 19 nt, Artificial Sequence
  Description of Artificial Sequence: Synthetic oligonucleotide
ccacguggcgaaggguaga

SEQ ID NO: 3030626 - RNA, 19 nt, Artificial Sequence
  Description of Artificial Sequence: Synthetic oligonucleotide
cguuaugaacggaggugau

SEQ ID NO: 3030627 - RNA, 19 nt, Artificial Sequence
  Description of Artificial Sequence: Synthetic oligonucleotide
ccaggccuugaagcagcga

SEQ ID NO: 3030628 - RNA, 19 nt, Artificial Sequence
  Description of Artificial Sequence: Synthetic oligonucleotide
cccaaaucugaugcugcuu

SEQ ID NO: 3030629 - RNA, 19 nt, Artificial Sequence
  Description of Artificial Sequence: Synthetic oligonucleotide
ggacagucuuggggcacau

SEQ ID NO: 3030630 - RNA, 19 nt, Artificial Sequence
  Description of Artificial Sequence: Synthetic oligonucleotide
ccccuccaccacguggcga

SEQ ID NO: 3030631 - RNA, 19 nt, Artificial Sequence
  Description of Artificial Sequence: Synthetic oligonucleotide
cggaggugauucugcuugu

SEQ ID NO: 3030632 - RNA, 19 nt, Artificial Sequence
  Description of Artificial Sequence: Synthetic oligonucleotide
gcgauggagucgggugagu

SEQ ID NO: 3030633 - RNA, 19 nt, Artificial Sequence
  Description of Artificial Sequence: Synthetic oligonucleotide
cgggugaguugccucuggu

SEQ ID NO: 3030634 - RNA, 19 nt, Artificial Sequence
  Description of Artificial Sequence: Synthetic oligonucleotide
ccaccacguggcgaagggu

SEQ ID NO: 3030635 - RNA, 19 nt, Artificial Sequence
  Description of Artificial Sequence: Synthetic oligonucleotide
cgauggagucgggugaguu

SEQ ID NO: 3030636 - RNA, 19 nt, Artificial Sequence
  Description of Artificial Sequence: Synthetic oligonucleotide
gcacaugcucagagccuuu

SEQ ID NO: 3030637 - RNA, 19 nt, Artificial Sequence
  Description of Artificial Sequence: Synthetic oligonucleotide
uuuaauuugaguugcagca

SEQ ID NO: 3030638 - RNA, 19 nt, Artificial Sequence
  Description of Artificial Sequence: Synthetic oligonucleotide
uuuaguauuuccuccauag

SEQ ID NO: 3030639 - RNA, 19 nt, Artificial Sequence
  Description of Artificial Sequence: Synthetic oligonucleotide
gaaaaguuuucccaguugc

SEQ ID NO: 3030640 - RNA, 19 nt, Artificial Sequence
  Description of Artificial Sequence: Synthetic oligonucleotide
uaauuugaguugcagcagg

SEQ ID NO: 3030641 - RNA, 19 nt, Artificial Sequence
  Description of Artificial Sequence: Synthetic oligonucleotide
caaaguguggagcagaggc

SEQ ID NO: 3030642 - RNA, 19 nt, Artificial Sequence
  Description of Artificial Sequence: Synthetic oligonucleotide
uuuucucucgaauagucug

SEQ ID NO: 3030643 - RNA, 19 nt, Artificial Sequence
  Description of Artificial Sequence: Synthetic oligonucleotide
gaugucuccugcuucauag

SEQ ID NO: 3030644 - RNA, 19 nt, Artificial Sequence
  Description of Artificial Sequence: Synthetic oligonucleotide
cuuuaauuugaguugcagc

SEQ ID NO: 3030645 - RNA, 19 nt, Artificial Sequence
  Description of Artificial Sequence: Synthetic oligonucleotide
aauucuuuucucucgaaua

SEQ ID NO: 3030646 - RNA, 19 nt, Artificial Sequence
  Description of Artificial Sequence: Synthetic oligonucleotide
ugcuucauagucuagcucu

SEQ ID NO: 3030647 - RNA, 19 nt, Artificial Sequence
  Description of Artificial Sequence: Synthetic oligonucleotide
ucuuuugcuaucuucuggc

SEQ ID NO: 3030648 - RNA, 19 nt, Artificial Sequence
  Description of Artificial Sequence: Synthetic oligonucleotide
uuuaauuucuucucuguau

SEQ ID NO: 3030649 - RNA, 19 nt, Artificial Sequence
  Description of Artificial Sequence: Synthetic oligonucleotide
auucuuuucucucgaauag

SEQ ID NO: 3030650 - RNA, 19 nt, Artificial Sequence
  Description of Artificial Sequence: Synthetic oligonucleotide
uguccuuuaauuugaguug

SEQ ID NO: 3030651 - RNA, 19 nt, Artificial Sequence
  Description of Artificial Sequence: Synthetic oligonucleotide
ucuucuggcauccaggauc

SEQ ID NO: 3030652 - RNA, 19 nt, Artificial Sequence
  Description of Artificial Sequence: Synthetic oligonucleotide
ucauucuuuaguauuuccu

SEQ ID NO: 3030653 - RNA, 19 nt, Artificial Sequence
  Description of Artificial Sequence: Synthetic oligonucleotide
ucuuccuuuccaaagugug

SEQ ID NO: 3030654 - RNA, 19 nt, Artificial Sequence
  Description of Artificial Sequence: Synthetic oligonucleotide
uaguauuuccuccauagua

SEQ ID NO: 3030655 - RNA, 19 nt, Artificial Sequence
  Description of Artificial Sequence: Synthetic oligonucleotide
aguugcagcaggugcaggc

SEQ ID NO: 3030656 - RNA, 19 nt, Artificial Sequence
  Description of Artificial Sequence: Synthetic oligonucleotide
uucuuuacucaguuuaucu

SEQ ID NO: 3030657 - RNA, 19 nt, Artificial Sequence
  Description of Artificial Sequence: Synthetic oligonucleotide
aaaguuuucccaguugcug

SEQ ID NO: 3030658 - RNA, 19 nt, Artificial Sequence
  Description of Artificial Sequence: Synthetic oligonucleotide
ucuacaauucuuuucucuc

SEQ ID NO: 3030659 - RNA, 19 nt, Artificial Sequence
  Description of Artificial Sequence: Synthetic oligonucleotide
auguccuuuaauuugaguu

SEQ ID NO: 3030660 - RNA, 19 nt, Artificial Sequence
  Description of Artificial Sequence: Synthetic oligonucleotide
uuaauuucuucucuguauu

SEQ ID NO: 3030661 - RNA, 19 nt, Artificial Sequence
  Description of Artificial Sequence: Synthetic oligonucleotide
cuacaauucuuuucucucg

SEQ ID NO: 3030662 - RNA, 19 nt, Artificial Sequence
  Description of Artificial Sequence: Synthetic oligonucleotide
uuuucauucuuuaguauuu

SEQ ID NO: 3030663 - RNA, 19 nt, Artificial Sequence
  Description of Artificial Sequence: Synthetic oligonucleotide
aguauuuccuccauaguag

SEQ ID NO: 3030664 - RNA, 19 nt, Artificial Sequence
  Description of Artificial Sequence: Synthetic oligonucleotide
cauucuuuaguauuuccuc

SEQ ID NO: 3030665 - RNA, 19 nt, Artificial Sequence
  Description of Artificial Sequence: Synthetic oligonucleotide
cuaucuucuggcauccagg

SEQ ID NO: 3030666 - RNA, 19 nt, Artificial Sequence
  Description of Artificial Sequence: Synthetic oligonucleotide
uucuaauccaugcuuccca

SEQ ID NO: 3030667 - RNA, 19 nt, Artificial Sequence
  Description of Artificial Sequence: Synthetic oligonucleotide
ucuuuucucucgaauaguc

SEQ ID NO: 3030668 - RNA, 19 nt, Artificial Sequence
  Description of Artificial Sequence: Synthetic oligonucleotide
aagaguuccucacugguuu

SEQ ID NO: 3030669 - RNA, 19 nt, Artificial Sequence
  Description of Artificial Sequence: Synthetic oligonucleotide
uuugcuaucuucuggcauc

SEQ ID NO: 3030670 - RNA, 19 nt, Artificial Sequence
  Description of Artificial Sequence: Synthetic oligonucleotide
augcuucccacucuguugg

SEQ ID NO: 3030671 - RNA, 19 nt, Artificial Sequence
  Description of Artificial Sequence: Synthetic oligonucleotide
guauuuccuccauaguagg

SEQ ID NO: 3030672 - RNA, 19 nt, Artificial Sequence
  Description of Artificial Sequence: Synthetic oligonucleotide
uacaauucuuuucucucga

SEQ ID NO: 3030673 - RNA, 19 nt, Artificial Sequence
  Description of Artificial Sequence: Synthetic oligonucleotide
uuguccuucuaauccaugc

SEQ ID NO: 3030674 - RNA, 19 nt, Artificial Sequence
  Description of Artificial Sequence: Synthetic oligonucleotide
uuaauuugaguugcagcag

SEQ ID NO: 3030675 - RNA, 19 nt, Artificial Sequence
  Description of Artificial Sequence: Synthetic oligonucleotide
uucuuuaguauuuccucca

SEQ ID NO: 3030676 - RNA, 19 nt, Artificial Sequence
  Description of Artificial Sequence: Synthetic oligonucleotide
uucauucuuuaguauuucc

SEQ ID NO: 3030677 - RNA, 19 nt, Artificial Sequence
  Description of Artificial Sequence: Synthetic oligonucleotide
uucuacaauucuuuucucu

SEQ ID NO: 3030678 - RNA, 19 nt, Artificial Sequence
  Description of Artificial Sequence: Synthetic oligonucleotide
uuugcugcuucuacaauuc

SEQ ID NO: 3030679 - RNA, 19 nt, Artificial Sequence
  Description of Artificial Sequence: Synthetic oligonucleotide
uggugggagccacugaggg

SEQ ID NO: 3030680 - RNA, 19 nt, Artificial Sequence
  Description of Artificial Sequence: Synthetic oligonucleotide
uaauccaugcuucccacuc

SEQ ID NO: 3030681 - RNA, 19 nt, Artificial Sequence
  Description of Artificial Sequence: Synthetic oligonucleotide
acucuguugggaugucucc

SEQ ID NO: 3030682 - RNA, 19 nt, Artificial Sequence
  Description of Artificial Sequence: Synthetic oligonucleotide
uagucuagcucuuuucugu

SEQ ID NO: 3030683 - RNA, 19 nt, Artificial Sequence
  Description of Artificial Sequence: Synthetic oligonucleotide
cuuccuuuccaaagugugg

SEQ ID NO: 3030684 - RNA, 19 nt, Artificial Sequence
  Description of Artificial Sequence: Synthetic oligonucleotide
gucuuuugcuaucuucugg

SEQ ID NO: 3030685 - RNA, 19 nt, Artificial Sequence
  Description of Artificial Sequence: Synthetic oligonucleotide
ucuguuugcugcuucuaca

SEQ ID NO: 3030686 - RNA, 19 nt, Artificial Sequence
  Description of Artificial Sequence: Synthetic oligonucleotide
agaggcauguccuuuaauu

SEQ ID NO: 3030687 - RNA, 19 nt, Artificial Sequence
  Description of Artificial Sequence: Synthetic oligonucleotide
uccaaaguguggagcagag

SEQ ID NO: 3030688 - RNA, 19 nt, Artificial Sequence
  Description of Artificial Sequence: Synthetic oligonucleotide
ucugucuuuugcuaucuuc

SEQ ID NO: 3030689 - RNA, 19 nt, Artificial Sequence
  Description of Artificial Sequence: Synthetic oligonucleotide
uaucuucuggcauccagga

SEQ ID NO: 3030690 - RNA, 19 nt, Artificial Sequence
  Description of Artificial Sequence: Synthetic oligonucleotide
cauugguucugucuuuugc

SEQ ID NO: 3030691 - RNA, 19 nt, Artificial Sequence
  Description of Artificial Sequence: Synthetic oligonucleotide
aggcauguccuuuaauuug

SEQ ID NO: 3030692 - RNA, 19 nt, Artificial Sequence
  Description of Artificial Sequence: Synthetic oligonucleotide
uuaguauuuccuccauagu

SEQ ID NO: 3030693 - RNA, 19 nt, Artificial Sequence
  Description of Artificial Sequence: Synthetic oligonucleotide
auagucuagcucuuuucug

SEQ ID NO: 3030694 - RNA, 19 nt, Artificial Sequence
  Description of Artificial Sequence: Synthetic oligonucleotide
uuuugcuaucuucuggcau

SEQ ID NO: 3030695 - RNA, 19 nt, Artificial Sequence
  Description of Artificial Sequence: Synthetic oligonucleotide
cuucuggcauccaggaucc

SEQ ID NO: 3030696 - RNA, 19 nt, Artificial Sequence
  Description of Artificial Sequence: Synthetic oligonucleotide
auuuccuccauaguaggug

SEQ ID NO: 3030697 - RNA, 19 nt, Artificial Sequence
  Description of Artificial Sequence: Synthetic oligonucleotide
ugaggguucuuccuuucca

SEQ ID NO: 3030698 - RNA, 19 nt, Artificial Sequence
  Description of Artificial Sequence: Synthetic oligonucleotide
uguccuucuaauccaugcu

SEQ ID NO: 3030699 - RNA, 19 nt, Artificial Sequence
  Description of Artificial Sequence: Synthetic oligonucleotide
uuuacucaguuuaucuuuu

SEQ ID NO: 3030700 - RNA, 19 nt, Artificial Sequence
  Description of Artificial Sequence: Synthetic oligonucleotide
ucuuucuuguccuucuaau

SEQ ID NO: 3030701 - RNA, 19 nt, Artificial Sequence
  Description of Artificial Sequence: Synthetic oligonucleotide
uuccuuuccaaagugugga

SEQ ID NO: 3030702 - RNA, 19 nt, Artificial Sequence
  Description of Artificial Sequence: Synthetic oligonucleotide
ucuuuacucaguuuaucuu

SEQ ID NO: 3030703 - RNA, 19 nt, Artificial Sequence
  Description of Artificial Sequence: Synthetic oligonucleotide
guagguggagucuuucuug

SEQ ID NO: 3030704 - RNA, 19 nt, Artificial Sequence
  Description of Artificial Sequence: Synthetic oligonucleotide
uccuucuaauccaugcuuc

SEQ ID NO: 3030705 - RNA, 19 nt, Artificial Sequence
  Description of Artificial Sequence: Synthetic oligonucleotide
uucuguuugcugcuucuac

SEQ ID NO: 3030706 - RNA, 19 nt, Artificial Sequence
  Description of Artificial Sequence: Synthetic oligonucleotide
ugucuuuugcuaucuucug

SEQ ID NO: 3030707 - RNA, 19 nt, Artificial Sequence
  Description of Artificial Sequence: Synthetic oligonucleotide
cuuuccaaaguguggagca

SEQ ID NO: 3030708 - RNA, 19 nt, Artificial Sequence
  Description of Artificial Sequence: Synthetic oligonucleotide
ucuaauccaugcuucccac

SEQ ID NO: 3030709 - RNA, 19 nt, Artificial Sequence
  Description of Artificial Sequence: Synthetic oligonucleotide
aaaaguuuucccaguugcu

SEQ ID NO: 3030710 - RNA, 19 nt, Artificial Sequence
  Description of Artificial Sequence: Synthetic oligonucleotide
ucacugguuucuuuacuca

SEQ ID NO: 3030711 - RNA, 19 nt, Artificial Sequence
  Description of Artificial Sequence: Synthetic oligonucleotide
uauuuccuccauaguaggu

SEQ ID NO: 3030712 - RNA, 19 nt, Artificial Sequence
  Description of Artificial Sequence: Synthetic oligonucleotide
ucauagucuagcucuuuuc

SEQ ID NO: 3030713 - RNA, 19 nt, Artificial Sequence
  Description of Artificial Sequence: Synthetic oligonucleotide
ugcuucuacaauucuuuuc

SEQ ID NO: 3030714 - RNA, 19 nt, Artificial Sequence
  Description of Artificial Sequence: Synthetic oligonucleotide
agccacugaggguucuucc

SEQ ID NO: 3030715 - RNA, 19 nt, Artificial Sequence
  Description of Artificial Sequence: Synthetic oligonucleotide
cuggcauccaggaucccgg

SEQ ID NO: 3030716 - RNA, 19 nt, Artificial Sequence
  Description of Artificial Sequence: Synthetic oligonucleotide
cucacugguuucuuuacuc

SEQ ID NO: 3030717 - RNA, 19 nt, Artificial Sequence
  Description of Artificial Sequence: Synthetic oligonucleotide
aauccaugcuucccacucu

SEQ ID NO: 3030718 - RNA, 19 nt, Artificial Sequence
  Description of Artificial Sequence: Synthetic oligonucleotide
gcucuuuucuguuugcugc

SEQ ID NO: 3030719 - RNA, 19 nt, Artificial Sequence
  Description of Artificial Sequence: Synthetic oligonucleotide
aggugcaggcaagaguucc

SEQ ID NO: 3030720 - RNA, 19 nt, Artificial Sequence
  Description of Artificial Sequence: Synthetic oligonucleotide
caugcuucccacucuguug

SEQ ID NO: 3030721 - RNA, 19 nt, Artificial Sequence
  Description of Artificial Sequence: Synthetic oligonucleotide
uucuuccuuuccaaagugu

SEQ ID NO: 3030722 - RNA, 19 nt, Artificial Sequence
  Description of Artificial Sequence: Synthetic oligonucleotide
ucuguugggaugucuccug

SEQ ID NO: 3030723 - RNA, 19 nt, Artificial Sequence
  Description of Artificial Sequence: Synthetic oligonucleotide
gguuucuuuacucaguuua

SEQ ID NO: 3030724 - RNA, 19 nt, Artificial Sequence
  Description of Artificial Sequence: Synthetic oligonucleotide
gguggagucuuucuugucc

SEQ ID NO: 3030725 - RNA, 19 nt, Artificial Sequence
  Description of Artificial Sequence: Synthetic oligonucleotide
guucuuccuuuccaaagug

SEQ ID NO: 3030726 - RNA, 19 nt, Artificial Sequence
  Description of Artificial Sequence: Synthetic oligonucleotide
guccuuuaauuugaguugc

SEQ ID NO: 3030727 - RNA, 19 nt, Artificial Sequence
  Description of Artificial Sequence: Synthetic oligonucleotide
uucauagucuagcucuuuu

SEQ ID NO: 3030728 - RNA, 19 nt, Artificial Sequence
  Description of Artificial Sequence: Synthetic oligonucleotide
uccugcuucauagucuagc

SEQ ID NO: 3030729 - RNA, 19 nt, Artificial Sequence
  Description of Artificial Sequence: Synthetic oligonucleotide
ucuuuaguauuuccuccau

SEQ ID NO: 3030730 - RNA, 19 nt, Artificial Sequence
  Description of Artificial Sequence: Synthetic oligonucleotide
ggcugaaaaguuuucccag

SEQ ID NO: 3030731 - RNA, 19 nt, Artificial Sequence
  Description of Artificial Sequence: Synthetic oligonucleotide
cuccauaguagguggaguc

SEQ ID NO: 3030732 - RNA, 19 nt, Artificial Sequence
  Description of Artificial Sequence: Synthetic oligonucleotide
aauuugaguugcagcaggu

SEQ ID NO: 3030733 - RNA, 19 nt, Artificial Sequence
  Description of Artificial Sequence: Synthetic oligonucleotide
aggcaagaguuccucacug

SEQ ID NO: 3030734 - RNA, 19 nt, Artificial Sequence
  Description of Artificial Sequence: Synthetic oligonucleotide
uagguggagucuuucuugu

SEQ ID NO: 3030735 - RNA, 19 nt, Artificial Sequence
  Description of Artificial Sequence: Synthetic oligonucleotide
aaaguguggagcagaggca

SEQ ID NO: 3030736 - RNA, 19 nt, Artificial Sequence
  Description of Artificial Sequence: Synthetic oligonucleotide
aaguguggagcagaggcau

SEQ ID NO: 3030737 - RNA, 19 nt, Artificial Sequence
  Description of Artificial Sequence: Synthetic oligonucleotide
ucuccugcuucauagucua

SEQ ID NO: 3030738 - RNA, 19 nt, Artificial Sequence
  Description of Artificial Sequence: Synthetic oligonucleotide
uuucuuuacucaguuuauc

SEQ ID NO: 3030739 - RNA, 19 nt, Artificial Sequence
  Description of Artificial Sequence: Synthetic oligonucleotide
aguagguggagucuuucuu

SEQ ID NO: 3030740 - RNA, 19 nt, Artificial Sequence
  Description of Artificial Sequence: Synthetic oligonucleotide
auaguagguggagucuuuc

SEQ ID NO: 3030741 - RNA, 19 nt, Artificial Sequence
  Description of Artificial Sequence: Synthetic oligonucleotide
uuucauucuuuaguauuuc

SEQ ID NO: 3030742 - RNA, 19 nt, Artificial Sequence
  Description of Artificial Sequence: Synthetic oligonucleotide
cuucuaauccaugcuuccc

SEQ ID NO: 3030743 - RNA, 19 nt, Artificial Sequence
  Description of Artificial Sequence: Synthetic oligonucleotide
uuuccaaaguguggagcag

SEQ ID NO: 3030744 - RNA, 19 nt, Artificial Sequence
  Description of Artificial Sequence: Synthetic oligonucleotide
cuagcucuuuucuguuugc

SEQ ID NO: 3030745 - RNA, 19 nt, Artificial Sequence
  Description of Artificial Sequence: Synthetic oligonucleotide
agcaggugcaggcaagagu

SEQ ID NO: 3030746 - RNA, 19 nt, Artificial Sequence
  Description of Artificial Sequence: Synthetic oligonucleotide
uccuuuaauuugaguugca

SEQ ID NO: 3030747 - RNA, 19 nt, Artificial Sequence
  Description of Artificial Sequence: Synthetic oligonucleotide
uucuuuucucucgaauagu

SEQ ID NO: 3030748 - RNA, 19 nt, Artificial Sequence
  Description of Artificial Sequence: Synthetic oligonucleotide
ucuuguccuucuaauccau

SEQ ID NO: 3030749 - RNA, 19 nt, Artificial Sequence
  Description of Artificial Sequence: Synthetic oligonucleotide
uaguagguggagucuuucu

SEQ ID NO: 3030750 - RNA, 19 nt, Artificial Sequence
  Description of Artificial Sequence: Synthetic oligonucleotide
ucauugguucugucuuuug

SEQ ID NO: 3030751 - RNA, 19 nt, Artificial Sequence
  Description of Artificial Sequence: Synthetic oligonucleotide
ugcugcuucuacaauucuu

SEQ ID NO: 3030752 - RNA, 19 nt, Artificial Sequence
  Description of Artificial Sequence: Synthetic oligonucleotide
uuccaaaguguggagcaga

SEQ ID NO: 3030753 - RNA, 19 nt, Artificial Sequence
  Description of Artificial Sequence: Synthetic oligonucleotide
uccuccauaguagguggag

SEQ ID NO: 3030754 - RNA, 19 nt, Artificial Sequence
  Description of Artificial Sequence: Synthetic oligonucleotide
uccauaguagguggagucu

SEQ ID NO: 3030755 - RNA, 19 nt, Artificial Sequence
  Description of Artificial Sequence: Synthetic oligonucleotide
ggguucuuccuuuccaaag

SEQ ID NO: 3030756 - RNA, 19 nt, Artificial Sequence
  Description of Artificial Sequence: Synthetic oligonucleotide
cacucuguugggaugucuc

SEQ ID NO: 3030757 - RNA, 19 nt, Artificial Sequence
  Description of Artificial Sequence: Synthetic oligonucleotide
auuugaguugcagcaggug

SEQ ID NO: 3030758 - RNA, 19 nt, Artificial Sequence
  Description of Artificial Sequence: Synthetic oligonucleotide
guggagcagaggcaugucc

SEQ ID NO: 3030759 - RNA, 19 nt, Artificial Sequence
  Description of Artificial Sequence: Synthetic oligonucleotide
gcuaucuucuggcauccag

SEQ ID NO: 3030760 - RNA, 19 nt, Artificial Sequence
  Description of Artificial Sequence: Synthetic oligonucleotide
uccucacugguuucuuuac

SEQ ID NO: 3030761 - RNA, 19 nt, Artificial Sequence
  Description of Artificial Sequence: Synthetic oligonucleotide
uguuugcugcuucuacaau

SEQ ID NO: 3030762 - RNA, 19 nt, Artificial Sequence
  Description of Artificial Sequence: Synthetic oligonucleotide
uugcuaucuucuggcaucc

SEQ ID NO: 3030763 - RNA, 19 nt, Artificial Sequence
  Description of Artificial Sequence: Synthetic oligonucleotide
ugguucugucuuuugcuau

SEQ ID NO: 3030764 - RNA, 19 nt, Artificial Sequence
  Description of Artificial Sequence: Synthetic oligonucleotide
caggaucccggcugaaaag

SEQ ID NO: 3030765 - RNA, 19 nt, Artificial Sequence
  Description of Artificial Sequence: Synthetic oligonucleotide
uguugggaugucuccugcu

SEQ ID NO: 3030766 - RNA, 19 nt, Artificial Sequence
  Description of Artificial Sequence: Synthetic oligonucleotide
gcuggugggagccacugag

SEQ ID NO: 3030767 - RNA, 19 nt, Artificial Sequence
  Description of Artificial Sequence: Synthetic oligonucleotide
cuucuacaauucuuuucuc

SEQ ID NO: 3030768 - RNA, 19 nt, Artificial Sequence
  Description of Artificial Sequence: Synthetic oligonucleotide
aguugcuggugggagccac

SEQ ID NO: 3030769 - RNA, 19 nt, Artificial Sequence
  Description of Artificial Sequence: Synthetic oligonucleotide
cuuguccuucuaauccaug

SEQ ID NO: 3030770 - RNA, 19 nt, Artificial Sequence
  Description of Artificial Sequence: Synthetic oligonucleotide
ggcaagaguuccucacugg

SEQ ID NO: 3030771 - RNA, 19 nt, Artificial Sequence
  Description of Artificial Sequence: Synthetic oligonucleotide
cuggugggagccacugagg

SEQ ID NO: 3030772 - RNA, 19 nt, Artificial Sequence
  Description of Artificial Sequence: Synthetic oligonucleotide
cuuuacucaguuuaucuuu

SEQ ID NO: 3030773 - RNA, 19 nt, Artificial Sequence
  Description of Artificial Sequence: Synthetic oligonucleotide
acaauucuuuucucucgaa

SEQ ID NO: 3030774 - RNA, 19 nt, Artificial Sequence
  Description of Artificial Sequence: Synthetic oligonucleotide
ugcaggcaagaguuccuca

SEQ ID NO: 3030775 - RNA, 19 nt, Artificial Sequence
  Description of Artificial Sequence: Synthetic oligonucleotide
cauagucuagcucuuuucu

SEQ ID NO: 3030776 - RNA, 19 nt, Artificial Sequence
  Description of Artificial Sequence: Synthetic oligonucleotide
agguggagucuuucuuguc

SEQ ID NO: 3030777 - RNA, 19 nt, Artificial Sequence
  Description of Artificial Sequence: Synthetic oligonucleotide
uucccacucuguugggaug

SEQ ID NO: 3030778 - RNA, 19 nt, Artificial Sequence
  Description of Artificial Sequence: Synthetic oligonucleotide
uugcugcuucuacaauucu

SEQ ID NO: 3030779 - RNA, 19 nt, Artificial Sequence
  Description of Artificial Sequence: Synthetic oligonucleotide
ucccaguugcuggugggag

SEQ ID NO: 3030780 - RNA, 19 nt, Artificial Sequence
  Description of Artificial Sequence: Synthetic oligonucleotide
cuguuugcugcuucuacaa

SEQ ID NO: 3030781 - RNA, 19 nt, Artificial Sequence
  Description of Artificial Sequence: Synthetic oligonucleotide
gaggguucuuccuuuccaa

SEQ ID NO: 3030782 - RNA, 19 nt, Artificial Sequence
  Description of Artificial Sequence: Synthetic oligonucleotide
cuuuugcuaucuucuggca

SEQ ID NO: 3030783 - RNA, 19 nt, Artificial Sequence
  Description of Artificial Sequence: Synthetic oligonucleotide
gcauccaggaucccggcug

SEQ ID NO: 3030784 - RNA, 19 nt, Artificial Sequence
  Description of Artificial Sequence: Synthetic oligonucleotide
gaggcauguccuuuaauuu

SEQ ID NO: 3030785 - RNA, 19 nt, Artificial Sequence
  Description of Artificial Sequence: Synthetic oligonucleotide
ccggcugaaaaguuuuccc

SEQ ID NO: 3030786 - RNA, 19 nt, Artificial Sequence
  Description of Artificial Sequence: Synthetic oligonucleotide
uugcagcaggugcaggcaa

SEQ ID NO: 3030787 - RNA, 19 nt, Artificial Sequence
  Description of Artificial Sequence: Synthetic oligonucleotide
ucccacucuguugggaugu

SEQ ID NO: 3030788 - RNA, 19 nt, Artificial Sequence
  Description of Artificial Sequence: Synthetic oligonucleotide
ccuuuaauuugaguugcag

SEQ ID NO: 3030789 - RNA, 19 nt, Artificial Sequence
  Description of Artificial Sequence: Synthetic oligonucleotide
cugcuucauagucuagcuc

SEQ ID NO: 3030790 - RNA, 19 nt, Artificial Sequence
  Description of Artificial Sequence: Synthetic oligonucleotide
augucuccugcuucauagu

SEQ ID NO: 3030791 - RNA, 19 nt, Artificial Sequence
  Description of Artificial Sequence: Synthetic oligonucleotide
gagucuuucuuguccuucu

SEQ ID NO: 3030792 - RNA, 19 nt, Artificial Sequence
  Description of Artificial Sequence: Synthetic oligonucleotide
ugcuucccacucuguuggg

SEQ ID NO: 3030793 - RNA, 19 nt, Artificial Sequence
  Description of Artificial Sequence: Synthetic oligonucleotide
aggguucuuccuuuccaaa

SEQ ID NO: 3030794 - RNA, 19 nt, Artificial Sequence
  Description of Artificial Sequence: Synthetic oligonucleotide
cuuuucucucgaauagucu

SEQ ID NO: 3030795 - RNA, 19 nt, Artificial Sequence
  Description of Artificial Sequence: Synthetic oligonucleotide
gguucugucuuuugcuauc

SEQ ID NO: 3030796 - RNA, 19 nt, Artificial Sequence
  Description of Artificial Sequence: Synthetic oligonucleotide
gcaggcaagaguuccucac

SEQ ID NO: 3030797 - RNA, 19 nt, Artificial Sequence
  Description of Artificial Sequence: Synthetic oligonucleotide
cuuuaguauuuccuccaua

SEQ ID NO: 3030798 - RNA, 19 nt, Artificial Sequence
  Description of Artificial Sequence: Synthetic oligonucleotide
ugguuucuuuacucaguuu

SEQ ID NO: 3030799 - RNA, 19 nt, Artificial Sequence
  Description of Artificial Sequence: Synthetic oligonucleotide
ccuuuccaaaguguggagc

SEQ ID NO: 3030800 - RNA, 19 nt, Artificial Sequence
  Description of Artificial Sequence: Synthetic oligonucleotide
gaguugcagcaggugcagg

SEQ ID NO: 3030801 - RNA, 19 nt, Artificial Sequence
  Description of Artificial Sequence: Synthetic oligonucleotide
ggcauguccuuuaauuuga

SEQ ID NO: 3030802 - RNA, 19 nt, Artificial Sequence
  Description of Artificial Sequence: Synthetic oligonucleotide
uucccaguugcugguggga

SEQ ID NO: 3030803 - RNA, 19 nt, Artificial Sequence
  Description of Artificial Sequence: Synthetic oligonucleotide
ugcuggugggagccacuga

SEQ ID NO: 3030804 - RNA, 19 nt, Artificial Sequence
  Description of Artificial Sequence: Synthetic oligonucleotide
aucuucuggcauccaggau

SEQ ID NO: 3030805 - RNA, 19 nt, Artificial Sequence
  Description of Artificial Sequence: Synthetic oligonucleotide
uucugucuuuugcuaucuu

SEQ ID NO: 3030806 - RNA, 19 nt, Artificial Sequence
  Description of Artificial Sequence: Synthetic oligonucleotide
agucuuucuuguccuucua

SEQ ID NO: 3030807 - RNA, 19 nt, Artificial Sequence
  Description of Artificial Sequence: Synthetic oligonucleotide
guggagucuuucuuguccu

SEQ ID NO: 3030808 - RNA, 19 nt, Artificial Sequence
  Description of Artificial Sequence: Synthetic oligonucleotide
caauucuuuucucucgaau

SEQ ID NO: 3030809 - RNA, 19 nt, Artificial Sequence
  Description of Artificial Sequence: Synthetic oligonucleotide
ucccggcugaaaaguuuuc

SEQ ID NO: 3030810 - RNA, 19 nt, Artificial Sequence
  Description of Artificial Sequence: Synthetic oligonucleotide
ccaguugcuggugggagcc

SEQ ID NO: 3030811 - RNA, 19 nt, Artificial Sequence
  Description of Artificial Sequence: Synthetic oligonucleotide
uccaggaucccggcugaaa

SEQ ID NO: 3030812 - RNA, 19 nt, Artificial Sequence
  Description of Artificial Sequence: Synthetic oligonucleotide
guuucuuuacucaguuuau

SEQ ID NO: 3030813 - RNA, 19 nt, Artificial Sequence
  Description of Artificial Sequence: Synthetic oligonucleotide
uguggagcagaggcauguc

SEQ ID NO: 3030814 - RNA, 19 nt, Artificial Sequence
  Description of Artificial Sequence: Synthetic oligonucleotide
guccuucuaauccaugcuu

SEQ ID NO: 3030815 - RNA, 19 nt, Artificial Sequence
  Description of Artificial Sequence: Synthetic oligonucleotide
cauguccuuuaauuugagu

SEQ ID NO: 3030816 - RNA, 19 nt, Artificial Sequence
  Description of Artificial Sequence: Synthetic oligonucleotide
uggagucuuucuuguccuu

SEQ ID NO: 3030817 - RNA, 19 nt, Artificial Sequence
  Description of Artificial Sequence: Synthetic oligonucleotide
cucuuuucuguuugcugcu

SEQ ID NO: 3030818 - RNA, 19 nt, Artificial Sequence
  Description of Artificial Sequence: Synthetic oligonucleotide
ggagucuuucuuguccuuc

SEQ ID NO: 3030819 - RNA, 19 nt, Artificial Sequence
  Description of Artificial Sequence: Synthetic oligonucleotide
gcaagaguuccucacuggu

SEQ ID NO: 3030820 - RNA, 19 nt, Artificial Sequence
  Description of Artificial Sequence: Synthetic oligonucleotide
aucccggcugaaaaguuuu

SEQ ID NO: 3030821 - RNA, 19 nt, Artificial Sequence
  Description of Artificial Sequence: Synthetic oligonucleotide
aguguggagcagaggcaug

SEQ ID NO: 3030822 - RNA, 19 nt, Artificial Sequence
  Description of Artificial Sequence: Synthetic oligonucleotide
caggugcaggcaagaguuc

SEQ ID NO: 3030823 - RNA, 19 nt, Artificial Sequence
  Description of Artificial Sequence: Synthetic oligonucleotide
cauccaggaucccggcuga

SEQ ID NO: 3030824 - RNA, 19 nt, Artificial Sequence
  Description of Artificial Sequence: Synthetic oligonucleotide
guugggaugucuccugcuu

SEQ ID NO: 3030825 - RNA, 19 nt, Artificial Sequence
  Description of Artificial Sequence: Synthetic oligonucleotide
ugggagccacugaggguuc

SEQ ID NO: 3030826 - RNA, 19 nt, Artificial Sequence
  Description of Artificial Sequence: Synthetic oligonucleotide
cuaauccaugcuucccacu

SEQ ID NO: 3030827 - RNA, 19 nt, Artificial Sequence
  Description of Artificial Sequence: Synthetic oligonucleotide
gugggagccacugaggguu

SEQ ID NO: 3030828 - RNA, 19 nt, Artificial Sequence
  Description of Artificial Sequence: Synthetic oligonucleotide
cccggcugaaaaguuuucc

SEQ ID NO: 3030829 - RNA, 19 nt, Artificial Sequence
  Description of Artificial Sequence: Synthetic oligonucleotide
cuucccacucuguugggau

SEQ ID NO: 3030830 - RNA, 19 nt, Artificial Sequence
  Description of Artificial Sequence: Synthetic oligonucleotide
gcauguccuuuaauuugag

SEQ ID NO: 3030831 - RNA, 19 nt, Artificial Sequence
  Description of Artificial Sequence: Synthetic oligonucleotide
guucugucuuuugcuaucu

SEQ ID NO: 3030832 - RNA, 19 nt, Artificial Sequence
  Description of Artificial Sequence: Synthetic oligonucleotide
gugcaggcaagaguuccuc

SEQ ID NO: 3030833 - RNA, 19 nt, Artificial Sequence
  Description of Artificial Sequence: Synthetic oligonucleotide
ccaaaguguggagcagagg

SEQ ID NO: 3030834 - RNA, 19 nt, Artificial Sequence
  Description of Artificial Sequence: Synthetic oligonucleotide
aguuccucacugguuucuu

SEQ ID NO: 3030835 - RNA, 19 nt, Artificial Sequence
  Description of Artificial Sequence: Synthetic oligonucleotide
ugcuaucuucuggcaucca

SEQ ID NO: 3030836 - RNA, 19 nt, Artificial Sequence
  Description of Artificial Sequence: Synthetic oligonucleotide
cccaguugcuggugggagc

SEQ ID NO: 3030837 - RNA, 19 nt, Artificial Sequence
  Description of Artificial Sequence: Synthetic oligonucleotide
caagaguuccucacugguu

SEQ ID NO: 3030838 - RNA, 19 nt, Artificial Sequence
  Description of Artificial Sequence: Synthetic oligonucleotide
gaguuccucacugguuucu

SEQ ID NO: 3030839 - RNA, 19 nt, Artificial Sequence
  Description of Artificial Sequence: Synthetic oligonucleotide
gcaggugcaggcaagaguu

SEQ ID NO: 3030840 - RNA, 19 nt, Artificial Sequence
  Description of Artificial Sequence: Synthetic oligonucleotide
guguggagcagaggcaugu

SEQ ID NO: 3030841 - RNA, 19 nt, Artificial Sequence
  Description of Artificial Sequence: Synthetic oligonucleotide
caggcaagaguuccucacu

SEQ ID NO: 3030842 - RNA, 19 nt, Artificial Sequence
  Description of Artificial Sequence: Synthetic oligonucleotide
ccaggaucccggcugaaaa

SEQ ID NO: 3030843 - RNA, 19 nt, Artificial Sequence
  Description of Artificial Sequence: Synthetic oligonucleotide
cauaguagguggagucuuu

SEQ ID NO: 3030844 - RNA, 19 nt, Artificial Sequence
  Description of Artificial Sequence: Synthetic oligonucleotide
ccugcuucauagucuagcu

SEQ ID NO: 3030845 - RNA, 19 nt, Artificial Sequence
  Description of Artificial Sequence: Synthetic oligonucleotide
uucuggcauccaggauccc

SEQ ID NO: 3030846 - RNA, 19 nt, Artificial Sequence
  Description of Artificial Sequence: Synthetic oligonucleotide
gucuagcucuuuucuguuu

SEQ ID NO: 3030847 - RNA, 19 nt, Artificial Sequence
  Description of Artificial Sequence: Synthetic oligonucleotide
gccacugaggguucuuccu

SEQ ID NO: 3030848 - RNA, 19 nt, Artificial Sequence
  Description of Artificial Sequence: Synthetic oligonucleotide
gcagaggcauguccuuuaa

SEQ ID NO: 3030849 - RNA, 19 nt, Artificial Sequence
  Description of Artificial Sequence: Synthetic oligonucleotide
guuccucacugguuucuuu

SEQ ID NO: 3030850 - RNA, 19 nt, Artificial Sequence
  Description of Artificial Sequence: Synthetic oligonucleotide
cugcuucuacaauucuuuu

SEQ ID NO: 3030851 - RNA, 19 nt, Artificial Sequence
  Description of Artificial Sequence: Synthetic oligonucleotide
cacugaggguucuuccuuu

SEQ ID NO: 3030852 - RNA, 19 nt, Artificial Sequence
  Description of Artificial Sequence: Synthetic oligonucleotide
gcuucccacucuguuggga

SEQ ID NO: 3030853 - RNA, 19 nt, Artificial Sequence
  Description of Artificial Sequence: Synthetic oligonucleotide
gagcagaggcauguccuuu

SEQ ID NO: 3030854 - RNA, 19 nt, Artificial Sequence
  Description of Artificial Sequence: Synthetic oligonucleotide
ggagcagaggcauguccuu

SEQ ID NO: 3030855 - RNA, 19 nt, Artificial Sequence
  Description of Artificial Sequence: Synthetic oligonucleotide
ggugcaggcaagaguuccu

SEQ ID NO: 3030856 - RNA, 19 nt, Artificial Sequence
  Description of Artificial Sequence: Synthetic oligonucleotide
cuucauagucuagcucuuu

SEQ ID NO: 3030857 - RNA, 19 nt, Artificial Sequence
  Description of Artificial Sequence: Synthetic oligonucleotide
cagaggcauguccuuuaau

SEQ ID NO: 3030858 - RNA, 19 nt, Artificial Sequence
  Description of Artificial Sequence: Synthetic oligonucleotide
auccaggaucccggcugaa

SEQ ID NO: 3030859 - RNA, 19 nt, Artificial Sequence
  Description of Artificial Sequence: Synthetic oligonucleotide
ccucacugguuucuuuacu

SEQ ID NO: 3030860 - RNA, 19 nt, Artificial Sequence
  Description of Artificial Sequence: Synthetic oligonucleotide
caguugcuggugggagcca

SEQ ID NO: 3030861 - RNA, 19 nt, Artificial Sequence
  Description of Artificial Sequence: Synthetic oligonucleotide
gcuucauagucuagcucuu

SEQ ID NO: 3030862 - RNA, 19 nt, Artificial Sequence
  Description of Artificial Sequence: Synthetic oligonucleotide
ccuccauaguagguggagu

SEQ ID NO: 3030863 - RNA, 19 nt, Artificial Sequence
  Description of Artificial Sequence: Synthetic oligonucleotide
ccauaguagguggagucuu

SEQ ID NO: 3030864 - RNA, 19 nt, Artificial Sequence
  Description of Artificial Sequence: Synthetic oligonucleotide
ccaugcuucccacucuguu

SEQ ID NO: 3030865 - RNA, 19 nt, Artificial Sequence
  Description of Artificial Sequence: Synthetic oligonucleotide
ccacugaggguucuuccuu

SEQ ID NO: 3030866 - RNA, 19 nt, Artificial Sequence
  Description of Artificial Sequence: Synthetic oligonucleotide
ccacucuguugggaugucu

SEQ ID NO: 3030867 - RNA, 19 nt, Artificial Sequence
  Description of Artificial Sequence: Synthetic oligonucleotide
gggagccacugaggguucu

SEQ ID NO: 3030868 - RNA, 19 nt, Artificial Sequence
  Description of Artificial Sequence: Synthetic oligonucleotide
guagcuugaagucucggcg

SEQ ID NO: 3030869 - RNA, 19 nt, Artificial Sequence
  Description of Artificial Sequence: Synthetic oligonucleotide
gaagucucggcgcagcccg

SEQ ID NO: 3030870 - RNA, 19 nt, Artificial Sequence
  Description of Artificial Sequence: Synthetic oligonucleotide
gaagugugagcugaggcgg

SEQ ID NO: 3030871 - RNA, 19 nt, Artificial Sequence
  Description of Artificial Sequence: Synthetic oligonucleotide
acgaacuuccgccgaaggc

SEQ ID NO: 3030872 - RNA, 19 nt, Artificial Sequence
  Description of Artificial Sequence: Synthetic oligonucleotide
agcgaugcggcuucucgcc

SEQ ID NO: 3030873 - RNA, 19 nt, Artificial Sequence
  Description of Artificial Sequence: Synthetic oligonucleotide
gaugaagugugagcugagg

SEQ ID NO: 3030874 - RNA, 19 nt, Artificial Sequence
  Description of Artificial Sequence: Synthetic oligonucleotide
uggaacgguggccgaagcg

SEQ ID NO: 3030875 - RNA, 19 nt, Artificial Sequence
  Description of Artificial Sequence: Synthetic oligonucleotide
aagcgcgugccgcagucgg

SEQ ID NO: 3030876 - RNA, 19 nt, Artificial Sequence
  Description of Artificial Sequence: Synthetic oligonucleotide
uagcuugaagucucggcgc

SEQ ID NO: 3030877 - RNA, 19 nt, Artificial Sequence
  Description of Artificial Sequence: Synthetic oligonucleotide
uaugcgugcgcgcaugcuc

SEQ ID NO: 3030878 - RNA, 19 nt, Artificial Sequence
  Description of Artificial Sequence: Synthetic oligonucleotide
ugagcugaggcggaagcgc

SEQ ID NO: 3030879 - RNA, 19 nt, Artificial Sequence
  Description of Artificial Sequence: Synthetic oligonucleotide
ugcuccgccagguuggaac

SEQ ID NO: 3030880 - RNA, 19 nt, Artificial Sequence
  Description of Artificial Sequence: Synthetic oligonucleotide
auaugcgcgcgacgguggc

SEQ ID NO: 3030881 - RNA, 19 nt, Artificial Sequence
  Description of Artificial Sequence: Synthetic oligonucleotide
cauaugcgcgcgacggugg

SEQ ID NO: 3030882 - RNA, 19 nt, Artificial Sequence
  Description of Artificial Sequence: Synthetic oligonucleotide
uccgccgaaggcucguccg

SEQ ID NO: 3030883 - RNA, 19 nt, Artificial Sequence
  Description of Artificial Sequence: Synthetic oligonucleotide
gaggcggcgccgcauaugc

SEQ ID NO: 3030884 - RNA, 19 nt, Artificial Sequence
  Description of Artificial Sequence: Synthetic oligonucleotide
cagguuggaacgguggccg

SEQ ID NO: 3030885 - RNA, 19 nt, Artificial Sequence
  Description of Artificial Sequence: Synthetic oligonucleotide
gagcucugagcgaagcgcg

SEQ ID NO: 3030886 - RNA, 19 nt, Artificial Sequence
  Description of Artificial Sequence: Synthetic oligonucleotide
uugaagucucggcgcagcc

SEQ ID NO: 3030887 - RNA, 19 nt, Artificial Sequence
  Description of Artificial Sequence: Synthetic oligonucleotide
gacgguggcggaugaagug

SEQ ID NO: 3030888 - RNA, 19 nt, Artificial Sequence
  Description of Artificial Sequence: Synthetic oligonucleotide
gguagcuugaagucucggc

SEQ ID NO: 3030889 - RNA, 19 nt, Artificial Sequence
  Description of Artificial Sequence: Synthetic oligonucleotide
ugagcgaagcgcgugccgc

SEQ ID NO: 3030890 - RNA, 19 nt, Artificial Sequence
  Description of Artificial Sequence: Synthetic oligonucleotide
uggcggaugaagugugagc

SEQ ID NO: 3030891 - RNA, 19 nt, Artificial Sequence
  Description of Artificial Sequence: Synthetic oligonucleotide
uccgugcacggguagggcc

SEQ ID NO: 3030892 - RNA, 19 nt, Artificial Sequence
  Description of Artificial Sequence: Synthetic oligonucleotide
augcgugcgcgcaugcucc

SEQ ID NO: 3030893 - RNA, 19 nt, Artificial Sequence
  Description of Artificial Sequence: Synthetic oligonucleotide
caggcacgaacuuccgccg

SEQ ID NO: 3030894 - RNA, 19 nt, Artificial Sequence
  Description of Artificial Sequence: Synthetic oligonucleotide
ccaggcacgaacuuccgcc

SEQ ID NO: 3030895 - RNA, 19 nt, Artificial Sequence
  Description of Artificial Sequence: Synthetic oligonucleotide
cagauguagaggcggcgcc

SEQ ID NO: 3030896 - RNA, 19 nt, Artificial Sequence
  Description of Artificial Sequence: Synthetic oligonucleotide
gaggcggaagcgccggccg

SEQ ID NO: 3030897 - RNA, 19 nt, Artificial Sequence
  Description of Artificial Sequence: Synthetic oligonucleotide
cuugaagucucggcgcagc

SEQ ID NO: 3030898 - RNA, 19 nt, Artificial Sequence
  Description of Artificial Sequence: Synthetic oligonucleotide
cacgaacuuccgccgaagg

SEQ ID NO: 3030899 - RNA, 19 nt, Artificial Sequence
  Description of Artificial Sequence: Synthetic oligonucleotide
ugaagucucggcgcagccc

SEQ ID NO: 3030900 - RNA, 19 nt, Artificial Sequence
  Description of Artificial Sequence: Synthetic oligonucleotide
agcuugaagucucggcgca

SEQ ID NO: 3030901 - RNA, 19 nt, Artificial Sequence
  Description of Artificial Sequence: Synthetic oligonucleotide
uuggaacgguggccgaagc

SEQ ID NO: 3030902 - RNA, 19 nt, Artificial Sequence
  Description of Artificial Sequence: Synthetic oligonucleotide
ggcacuggcggguagcuug

SEQ ID NO: 3030903 - RNA, 19 nt, Artificial Sequence
  Description of Artificial Sequence: Synthetic oligonucleotide
ucgguggcgcgccaggcac

SEQ ID NO: 3030904 - RNA, 19 nt, Artificial Sequence
  Description of Artificial Sequence: Synthetic oligonucleotide
cagcgccgagcucugagcg

SEQ ID NO: 3030905 - RNA, 19 nt, Artificial Sequence
  Description of Artificial Sequence: Synthetic oligonucleotide
ggaacgguggccgaagcgc

SEQ ID NO: 3030906 - RNA, 19 nt, Artificial Sequence
  Description of Artificial Sequence: Synthetic oligonucleotide
acuggcggguagcuugaag

SEQ ID NO: 3030907 - RNA, 19 nt, Artificial Sequence
  Description of Artificial Sequence: Synthetic oligonucleotide
gcagcgaugcggcuucucg

SEQ ID NO: 3030908 - RNA, 19 nt, Artificial Sequence
  Description of Artificial Sequence: Synthetic oligonucleotide
cucugagcgaagcgcgugc

SEQ ID NO: 3030909 - RNA, 19 nt, Artificial Sequence
  Description of Artificial Sequence: Synthetic oligonucleotide
augcguacgggcgcucgcc

SEQ ID NO: 3030910 - RNA, 19 nt, Artificial Sequence
  Description of Artificial Sequence: Synthetic oligonucleotide
cacggcgcagcgaugcggc

SEQ ID NO: 3030911 - RNA, 19 nt, Artificial Sequence
  Description of Artificial Sequence: Synthetic oligonucleotide
gaacgguggccgaagcgcc

SEQ ID NO: 3030912 - RNA, 19 nt, Artificial Sequence
  Description of Artificial Sequence: Synthetic oligonucleotide
ucgcccguaugcgugcgcg

SEQ ID NO: 3030913 - RNA, 19 nt, Artificial Sequence
  Description of Artificial Sequence: Synthetic oligonucleotide
guuggaacgguggccgaag

SEQ ID NO: 3030914 - RNA, 19 nt, Artificial Sequence
  Description of Artificial Sequence: Synthetic oligonucleotide
cagcgaugcggcuucucgc

SEQ ID NO: 3030915 - RNA, 19 nt, Artificial Sequence
  Description of Artificial Sequence: Synthetic oligonucleotide
gugagcugaggcggaagcg

SEQ ID NO: 3030916 - RNA, 19 nt, Artificial Sequence
  Description of Artificial Sequence: Synthetic oligonucleotide
uggcggguagcuugaaguc

SEQ ID NO: 3030917 - RNA, 19 nt, Artificial Sequence
  Description of Artificial Sequence: Synthetic oligonucleotide
ucugagcgaagcgcgugcc

SEQ ID NO: 3030918 - RNA, 19 nt, Artificial Sequence
  Description of Artificial Sequence: Synthetic oligonucleotide
agucggcgcaugcguacgg

SEQ ID NO: 3030919 - RNA, 19 nt, Artificial Sequence
  Description of Artificial Sequence: Synthetic oligonucleotide
guggccgaagcgccggccg

SEQ ID NO: 3030920 - RNA, 19 nt, Artificial Sequence
  Description of Artificial Sequence: Synthetic oligonucleotide
uuccgccgaaggcucgucc

SEQ ID NO: 3030921 - RNA, 19 nt, Artificial Sequence
  Description of Artificial Sequence: Synthetic oligonucleotide
aacgguggccgaagcgccg

SEQ ID NO: 3030922 - RNA, 19 nt, Artificial Sequence
  Description of Artificial Sequence: Synthetic oligonucleotide
ugcguacgggcgcucgccc

SEQ ID NO: 3030923 - RNA, 19 nt, Artificial Sequence
  Description of Artificial Sequence: Synthetic oligonucleotide
cccgcgcagauguagaggc

SEQ ID NO: 3030924 - RNA, 19 nt, Artificial Sequence
  Description of Artificial Sequence: Synthetic oligonucleotide
uggcgcgccaggcacgaac

SEQ ID NO: 3030925 - RNA, 19 nt, Artificial Sequence
  Description of Artificial Sequence: Synthetic oligonucleotide
cugagcgaagcgcgugccg

SEQ ID NO: 3030926 - RNA, 19 nt, Artificial Sequence
  Description of Artificial Sequence: Synthetic oligonucleotide
uucucgcccgugugcacgc

SEQ ID NO: 3030927 - RNA, 19 nt, Artificial Sequence
  Description of Artificial Sequence: Synthetic oligonucleotide
ucggcgcaugcguacgggc

SEQ ID NO: 3030928 - RNA, 19 nt, Artificial Sequence
  Description of Artificial Sequence: Synthetic oligonucleotide
augcgcgcgacgguggcgg

SEQ ID NO: 3030929 - RNA, 19 nt, Artificial Sequence
  Description of Artificial Sequence: Synthetic oligonucleotide
gagcugaggcggaagcgcc

SEQ ID NO: 3030930 - RNA, 19 nt, Artificial Sequence
  Description of Artificial Sequence: Synthetic oligonucleotide
ugaggcggaagcgccggcc

SEQ ID NO: 3030931 - RNA, 19 nt, Artificial Sequence
  Description of Artificial Sequence: Synthetic oligonucleotide
guggcggaugaagugugag

SEQ ID NO: 3030932 - RNA, 19 nt, Artificial Sequence
  Description of Artificial Sequence: Synthetic oligonucleotide
ugcgcgcaugcuccgccag

SEQ ID NO: 3030933 - RNA, 19 nt, Artificial Sequence
  Description of Artificial Sequence: Synthetic oligonucleotide
gaacuuccgccgaaggcuc

SEQ ID NO: 3030934 - RNA, 19 nt, Artificial Sequence
  Description of Artificial Sequence: Synthetic oligonucleotide
aacuuccgccgaaggcucg

SEQ ID NO: 3030935 - RNA, 19 nt, Artificial Sequence
  Description of Artificial Sequence: Synthetic oligonucleotide
uaugcgcgcgacgguggcg

SEQ ID NO: 3030936 - RNA, 19 nt, Artificial Sequence
  Description of Artificial Sequence: Synthetic oligonucleotide
agcccgcgcagauguagag

SEQ ID NO: 3030937 - RNA, 19 nt, Artificial Sequence
  Description of Artificial Sequence: Synthetic oligonucleotide
acgguggcggaugaagugu

SEQ ID NO: 3030938 - RNA, 19 nt, Artificial Sequence
  Description of Artificial Sequence: Synthetic oligonucleotide
cuggcggguagcuugaagu

SEQ ID NO: 3030939 - RNA, 19 nt, Artificial Sequence
  Description of Artificial Sequence: Synthetic oligonucleotide
ugcuuggccagcgccgagc

SEQ ID NO: 3030940 - RNA, 19 nt, Artificial Sequence
  Description of Artificial Sequence: Synthetic oligonucleotide
gaagcgcgugccgcagucg

SEQ ID NO: 3030941 - RNA, 19 nt, Artificial Sequence
  Description of Artificial Sequence: Synthetic oligonucleotide
gcuccgccagguuggaacg

SEQ ID NO: 3030942 - RNA, 19 nt, Artificial Sequence
  Description of Artificial Sequence: Synthetic oligonucleotide
ugcgugcgcgcaugcuccg

SEQ ID NO: 3030943 - RNA, 19 nt, Artificial Sequence
  Description of Artificial Sequence: Synthetic oligonucleotide
ggcggcgccgcauaugcgc

SEQ ID NO: 3030944 - RNA, 19 nt, Artificial Sequence
  Description of Artificial Sequence: Synthetic oligonucleotide
caugcguacgggcgcucgc

SEQ ID NO: 3030945 - RNA, 19 nt, Artificial Sequence
  Description of Artificial Sequence: Synthetic oligonucleotide
acacggcgcagcgaugcgg

SEQ ID NO: 3030946 - RNA, 19 nt, Artificial Sequence
  Description of Artificial Sequence: Synthetic oligonucleotide
aagucucggcgcagcccgc

SEQ ID NO: 3030947 - RNA, 19 nt, Artificial Sequence
  Description of Artificial Sequence: Synthetic oligonucleotide
gcaugcuccgccagguugg

SEQ ID NO: 3030948 - RNA, 19 nt, Artificial Sequence
  Description of Artificial Sequence: Synthetic oligonucleotide
aagugugagcugaggcgga

SEQ ID NO: 3030949 - RNA, 19 nt, Artificial Sequence
  Description of Artificial Sequence: Synthetic oligonucleotide
uggccgaagcgccggccgc

SEQ ID NO: 3030950 - RNA, 19 nt, Artificial Sequence
  Description of Artificial Sequence: Synthetic oligonucleotide
gcagauguagaggcggcgc

SEQ ID NO: 3030951 - RNA, 19 nt, Artificial Sequence
  Description of Artificial Sequence: Synthetic oligonucleotide
uguagaggcggcgccgcau

SEQ ID NO: 3030952 - RNA, 19 nt, Artificial Sequence
  Description of Artificial Sequence: Synthetic oligonucleotide
gugugcgugcgucgguggc

SEQ ID NO: 3030953 - RNA, 19 nt, Artificial Sequence
  Description of Artificial Sequence: Synthetic oligonucleotide
gccagguuggaacgguggc

SEQ ID NO: 3030954 - RNA, 19 nt, Artificial Sequence
  Description of Artificial Sequence: Synthetic oligonucleotide
ugccgcagucggcgcaugc

SEQ ID NO: 3030955 - RNA, 19 nt, Artificial Sequence
  Description of Artificial Sequence: Synthetic oligonucleotide
agucucggcgcagcccgcg

SEQ ID NO: 3030956 - RNA, 19 nt, Artificial Sequence
  Description of Artificial Sequence: Synthetic oligonucleotide
gcauaugcgcgcgacggug

SEQ ID NO: 3030957 - RNA, 19 nt, Artificial Sequence
  Description of Artificial Sequence: Synthetic oligonucleotide
acgguggccgaagcgccgg

SEQ ID NO: 3030958 - RNA, 19 nt, Artificial Sequence
  Description of Artificial Sequence: Synthetic oligonucleotide
uccgccagguuggaacggu

SEQ ID NO: 3030959 - RNA, 19 nt, Artificial Sequence
  Description of Artificial Sequence: Synthetic oligonucleotide
aggcacgaacuuccgccga

SEQ ID NO: 3030960 - RNA, 19 nt, Artificial Sequence
  Description of Artificial Sequence: Synthetic oligonucleotide
cagucggcgcaugcguacg

SEQ ID NO: 3030961 - RNA, 19 nt, Artificial Sequence
  Description of Artificial Sequence: Synthetic oligonucleotide
ccgcauaugcgcgcgacgg

SEQ ID NO: 3030962 - RNA, 19 nt, Artificial Sequence
  Description of Artificial Sequence: Synthetic oligonucleotide
gucggcgcaugcguacggg

SEQ ID NO: 3030963 - RNA, 19 nt, Artificial Sequence
  Description of Artificial Sequence: Synthetic oligonucleotide
ggcggaugaagugugagcu

SEQ ID NO: 3030964 - RNA, 19 nt, Artificial Sequence
  Description of Artificial Sequence: Synthetic oligonucleotide
cacacggcgcagcgaugcg

SEQ ID NO: 3030965 - RNA, 19 nt, Artificial Sequence
  Description of Artificial Sequence: Synthetic oligonucleotide
ggcgcaugcguacgggcgc

SEQ ID NO: 3030966 - RNA, 19 nt, Artificial Sequence
  Description of Artificial Sequence: Synthetic oligonucleotide
ccgugcacggguagggccg

SEQ ID NO: 3030967 - RNA, 19 nt, Artificial Sequence
  Description of Artificial Sequence: Synthetic oligonucleotide
ugcacgcgccggugcuugg

SEQ ID NO: 3030968 - RNA, 19 nt, Artificial Sequence
  Description of Artificial Sequence: Synthetic oligonucleotide
cacgcgccggugcuuggcc

SEQ ID NO: 3030969 - RNA, 19 nt, Artificial Sequence
  Description of Artificial Sequence: Synthetic oligonucleotide
gagcgaagcgcgugccgca

SEQ ID NO: 3030970 - RNA, 19 nt, Artificial Sequence
  Description of Artificial Sequence: Synthetic oligonucleotide
agcgccgagcucugagcga

SEQ ID NO: 3030971 - RNA, 19 nt, Artificial Sequence
  Description of Artificial Sequence: Synthetic oligonucleotide
cacggguagggccgcucgc

SEQ ID NO: 3030972 - RNA, 19 nt, Artificial Sequence
  Description of Artificial Sequence: Synthetic oligonucleotide
cucggcgcagcccgcgcag

SEQ ID NO: 3030973 - RNA, 19 nt, Artificial Sequence
  Description of Artificial Sequence: Synthetic oligonucleotide
agcgaagcgcgugccgcag

SEQ ID NO: 3030974 - RNA, 19 nt, Artificial Sequence
  Description of Artificial Sequence: Synthetic oligonucleotide
ggaugaagugugagcugag

SEQ ID NO: 3030975 - RNA, 19 nt, Artificial Sequence
  Description of Artificial Sequence: Synthetic oligonucleotide
gcgacgguggcggaugaag

SEQ ID NO: 3030976 - RNA, 19 nt, Artificial Sequence
  Description of Artificial Sequence: Synthetic oligonucleotide
agguuggaacgguggccga

SEQ ID NO: 3030977 - RNA, 19 nt, Artificial Sequence
  Description of Artificial Sequence: Synthetic oligonucleotide
uagaggcggcgccgcauau

SEQ ID NO: 3030978 - RNA, 19 nt, Artificial Sequence
  Description of Artificial Sequence: Synthetic oligonucleotide
cgagcucugagcgaagcgc

SEQ ID NO: 3030979 - RNA, 19 nt, Artificial Sequence
  Description of Artificial Sequence: Synthetic oligonucleotide
auguagaggcggcgccgca

SEQ ID NO: 3030980 - RNA, 19 nt, Artificial Sequence
  Description of Artificial Sequence: Synthetic oligonucleotide
ggaagcgccggccgcacuc

SEQ ID NO: 3030981 - RNA, 19 nt, Artificial Sequence
  Description of Artificial Sequence: Synthetic oligonucleotide
gcggaugaagugugagcug

SEQ ID NO: 3030982 - RNA, 19 nt, Artificial Sequence
  Description of Artificial Sequence: Synthetic oligonucleotide
gcacacggcgcagcgaugc

SEQ ID NO: 3030983 - RNA, 19 nt, Artificial Sequence
  Description of Artificial Sequence: Synthetic oligonucleotide
gccgcauaugcgcgcgacg

SEQ ID NO: 3030984 - RNA, 19 nt, Artificial Sequence
  Description of Artificial Sequence: Synthetic oligonucleotide
agcgcgugccgcagucggc

SEQ ID NO: 3030985 - RNA, 19 nt, Artificial Sequence
  Description of Artificial Sequence: Synthetic oligonucleotide
gcugaggcggaagcgccgg

SEQ ID NO: 3030986 - RNA, 19 nt, Artificial Sequence
  Description of Artificial Sequence: Synthetic oligonucleotide
ccagguuggaacgguggcc

SEQ ID NO: 3030987 - RNA, 19 nt, Artificial Sequence
  Description of Artificial Sequence: Synthetic oligonucleotide
ugcgucgguggcgcgccag

SEQ ID NO: 3030988 - RNA, 19 nt, Artificial Sequence
  Description of Artificial Sequence: Synthetic oligonucleotide
ggguagcuugaagucucgg

SEQ ID NO: 3030989 - RNA, 19 nt, Artificial Sequence
  Description of Artificial Sequence: Synthetic oligonucleotide
agaggcggcgccgcauaug

SEQ ID NO: 3030990 - RNA, 19 nt, Artificial Sequence
  Description of Artificial Sequence: Synthetic oligonucleotide
gcagucggcgcaugcguac

SEQ ID NO: 3030991 - RNA, 19 nt, Artificial Sequence
  Description of Artificial Sequence: Synthetic oligonucleotide
gcgccaggcacgaacuucc

SEQ ID NO: 3030992 - RNA, 19 nt, Artificial Sequence
  Description of Artificial Sequence: Synthetic oligonucleotide
guagaggcggcgccgcaua

SEQ ID NO: 3030993 - RNA, 19 nt, Artificial Sequence
  Description of Artificial Sequence: Synthetic oligonucleotide
ccgagcucugagcgaagcg

SEQ ID NO: 3030994 - RNA, 19 nt, Artificial Sequence
  Description of Artificial Sequence: Synthetic oligonucleotide
ugcgugcgucgguggcgcg

SEQ ID NO: 3030995 - RNA, 19 nt, Artificial Sequence
  Description of Artificial Sequence: Synthetic oligonucleotide
gccagcgccgagcucugag

SEQ ID NO: 3030996 - RNA, 19 nt, Artificial Sequence
  Description of Artificial Sequence: Synthetic oligonucleotide
acuuccgccgaaggcucgu

SEQ ID NO: 3030997 - RNA, 19 nt, Artificial Sequence
  Description of Artificial Sequence: Synthetic oligonucleotide
uggccagcgccgagcucug

SEQ ID NO: 3030998 - RNA, 19 nt, Artificial Sequence
  Description of Artificial Sequence: Synthetic oligonucleotide
cuccgccagguuggaacgg

SEQ ID NO: 3030999 - RNA, 19 nt, Artificial Sequence
  Description of Artificial Sequence: Synthetic oligonucleotide
agcgccggccgcacacggc

SEQ ID NO: 3031000 - RNA, 19 nt, Artificial Sequence
  Description of Artificial Sequence: Synthetic oligonucleotide
ccagcgccgagcucugagc

SEQ ID NO: 3031001 - RNA, 19 nt, Artificial Sequence
  Description of Artificial Sequence: Synthetic oligonucleotide
cgcgcagauguagaggcgg

SEQ ID NO: 3031002 - RNA, 19 nt, Artificial Sequence
  Description of Artificial Sequence: Synthetic oligonucleotide
gcagcccgcgcagauguag

SEQ ID NO: 3031003 - RNA, 19 nt, Artificial Sequence
  Description of Artificial Sequence: Synthetic oligonucleotide
gucgguggcgcgccaggca

SEQ ID NO: 3031004 - RNA, 19 nt, Artificial Sequence
  Description of Artificial Sequence: Synthetic oligonucleotide
cugaggcggaagcgccggc

SEQ ID NO: 3031005 - RNA, 19 nt, Artificial Sequence
  Description of Artificial Sequence: Synthetic oligonucleotide
cuguggcacuggcggguag

SEQ ID NO: 3031006 - RNA, 19 nt, Artificial Sequence
  Description of Artificial Sequence: Synthetic oligonucleotide
ggcgcagcgaugcggcuuc

SEQ ID NO: 3031007 - RNA, 19 nt, Artificial Sequence
  Description of Artificial Sequence: Synthetic oligonucleotide
gccaggcacgaacuuccgc

SEQ ID NO: 3031008 - RNA, 19 nt, Artificial Sequence
  Description of Artificial Sequence: Synthetic oligonucleotide
cgccagguuggaacggugg

SEQ ID NO: 3031009 - RNA, 19 nt, Artificial Sequence
  Description of Artificial Sequence: Synthetic oligonucleotide
gcguacgggcgcucgcccg

SEQ ID NO: 3031010 - RNA, 19 nt, Artificial Sequence
  Description of Artificial Sequence: Synthetic oligonucleotide
gcaugcguacgggcgcucg

SEQ ID NO: 3031011 - RNA, 19 nt, Artificial Sequence
  Description of Artificial Sequence: Synthetic oligonucleotide
ccggugcuuggccagcgcc

SEQ ID NO: 3031012 - RNA, 19 nt, Artificial Sequence
  Description of Artificial Sequence: Synthetic oligonucleotide
gccgcagucggcgcaugcg

SEQ ID NO: 3031013 - RNA, 19 nt, Artificial Sequence
  Description of Artificial Sequence: Synthetic oligonucleotide
agcucugagcgaagcgcgu

SEQ ID NO: 3031014 - RNA, 19 nt, Artificial Sequence
  Description of Artificial Sequence: Synthetic oligonucleotide
gcggguagcuugaagucuc

SEQ ID NO: 3031015 - RNA, 19 nt, Artificial Sequence
  Description of Artificial Sequence: Synthetic oligonucleotide
gucucggcgcagcccgcgc

SEQ ID NO: 3031016 - RNA, 19 nt, Artificial Sequence
  Description of Artificial Sequence: Synthetic oligonucleotide
acgcgccggugcuuggcca

SEQ ID NO: 3031017 - RNA, 19 nt, Artificial Sequence
  Description of Artificial Sequence: Synthetic oligonucleotide
ggcgccgcauaugcgcgcg

SEQ ID NO: 3031018 - RNA, 19 nt, Artificial Sequence
  Description of Artificial Sequence: Synthetic oligonucleotide
gaugcggcuucucgcccgu

SEQ ID NO: 3031019 - RNA, 19 nt, Artificial Sequence
  Description of Artificial Sequence: Synthetic oligonucleotide
gcgcgugccgcagucggcg

SEQ ID NO: 3031020 - RNA, 19 nt, Artificial Sequence
  Description of Artificial Sequence: Synthetic oligonucleotide
gccgaaggcucguccgcag

SEQ ID NO: 3031021 - RNA, 19 nt, Artificial Sequence
  Description of Artificial Sequence: Synthetic oligonucleotide
cgcaugcuccgccagguug

SEQ ID NO: 3031022 - RNA, 19 nt, Artificial Sequence
  Description of Artificial Sequence: Synthetic oligonucleotide
gugcuuggccagcgccgag

SEQ ID NO: 3031023 - RNA, 19 nt, Artificial Sequence
  Description of Artificial Sequence: Synthetic oligonucleotide
gcucugagcgaagcgcgug

SEQ ID NO: 3031024 - RNA, 19 nt, Artificial Sequence
  Description of Artificial Sequence: Synthetic oligonucleotide
gcuugaagucucggcgcag

SEQ ID NO: 3031025 - RNA, 19 nt, Artificial Sequence
  Description of Artificial Sequence: Synthetic oligonucleotide
gggcgcucgcccgugugcg

SEQ ID NO: 3031026 - RNA, 19 nt, Artificial Sequence
  Description of Artificial Sequence: Synthetic oligonucleotide
cagcccgcgcagauguaga

SEQ ID NO: 3031027 - RNA, 19 nt, Artificial Sequence
  Description of Artificial Sequence: Synthetic oligonucleotide
gcccgcgcagauguagagg

SEQ ID NO: 3031028 - RNA, 19 nt, Artificial Sequence
  Description of Artificial Sequence: Synthetic oligonucleotide
cgaugcggcuucucgcccg

SEQ ID NO: 3031029 - RNA, 19 nt, Artificial Sequence
  Description of Artificial Sequence: Synthetic oligonucleotide
gcacgaacuuccgccgaag

SEQ ID NO: 3031030 - RNA, 19 nt, Artificial Sequence
  Description of Artificial Sequence: Synthetic oligonucleotide
cggugcuuggccagcgccg

SEQ ID NO: 3031031 - RNA, 19 nt, Artificial Sequence
  Description of Artificial Sequence: Synthetic oligonucleotide
cggcgcaugcguacgggcg

SEQ ID NO: 3031032 - RNA, 19 nt, Artificial Sequence
  Description of Artificial Sequence: Synthetic oligonucleotide
gcgaugcggcuucucgccc

SEQ ID NO: 3031033 - RNA, 19 nt, Artificial Sequence
  Description of Artificial Sequence: Synthetic oligonucleotide
cuuggccagcgccgagcuc

SEQ ID NO: 3031034 - RNA, 19 nt, Artificial Sequence
  Description of Artificial Sequence: Synthetic oligonucleotide
ggcacgaacuuccgccgaa

SEQ ID NO: 3031035 - RNA, 19 nt, Artificial Sequence
  Description of Artificial Sequence: Synthetic oligonucleotide
ggugcuuggccagcgccga

SEQ ID NO: 3031036 - RNA, 19 nt, Artificial Sequence
  Description of Artificial Sequence: Synthetic oligonucleotide
gcgcgcaugcuccgccagg

SEQ ID NO: 3031037 - RNA, 19 nt, Artificial Sequence
  Description of Artificial Sequence: Synthetic oligonucleotide
gcggcgccgcauaugcgcg

SEQ ID NO: 3031038 - RNA, 19 nt, Artificial Sequence
  Description of Artificial Sequence: Synthetic oligonucleotide
gccgagcucugagcgaagc

SEQ ID NO: 3031039 - RNA, 19 nt, Artificial Sequence
  Description of Artificial Sequence: Synthetic oligonucleotide
gcgucgguggcgcgccagg

SEQ ID NO: 3031040 - RNA, 19 nt, Artificial Sequence
  Description of Artificial Sequence: Synthetic oligonucleotide
ccgcgcagauguagaggcg

SEQ ID NO: 3031041 - RNA, 19 nt, Artificial Sequence
  Description of Artificial Sequence: Synthetic oligonucleotide
acggcgcagcgaugcggcu

SEQ ID NO: 3031042 - RNA, 19 nt, Artificial Sequence
  Description of Artificial Sequence: Synthetic oligonucleotide
cggaugaagugugagcuga

SEQ ID NO: 3031043 - RNA, 19 nt, Artificial Sequence
  Description of Artificial Sequence: Synthetic oligonucleotide
gugcgcgcaugcuccgcca

SEQ ID NO: 3031044 - RNA, 19 nt, Artificial Sequence
  Description of Artificial Sequence: Synthetic oligonucleotide
cgaagcgccggccgcacac

SEQ ID NO: 3031045 - RNA, 19 nt, Artificial Sequence
  Description of Artificial Sequence: Synthetic oligonucleotide
cggguagcuugaagucucg

SEQ ID NO: 3031046 - RNA, 19 nt, Artificial Sequence
  Description of Artificial Sequence: Synthetic oligonucleotide
gcgcagauguagaggcggc

SEQ ID NO: 3031047 - RNA, 19 nt, Artificial Sequence
  Description of Artificial Sequence: Synthetic oligonucleotide
aggcggcgccgcauaugcg

SEQ ID NO: 3031048 - RNA, 19 nt, Artificial Sequence
  Description of Artificial Sequence: Synthetic oligonucleotide
ugcgcgcgacgguggcgga

SEQ ID NO: 3031049 - RNA, 19 nt, Artificial Sequence
  Description of Artificial Sequence: Synthetic oligonucleotide
cguaugcgugcgcgcaugc

SEQ ID NO: 3031050 - RNA, 19 nt, Artificial Sequence
  Description of Artificial Sequence: Synthetic oligonucleotide
cgcagauguagaggcggcg

SEQ ID NO: 3031051 - RNA, 19 nt, Artificial Sequence
  Description of Artificial Sequence: Synthetic oligonucleotide
cuuccgccgaaggcucguc

SEQ ID NO: 3031052 - RNA, 19 nt, Artificial Sequence
  Description of Artificial Sequence: Synthetic oligonucleotide
ucggcgcagcccgcgcaga

SEQ ID NO: 3031053 - RNA, 19 nt, Artificial Sequence
  Description of Artificial Sequence: Synthetic oligonucleotide
gguggccgaagcgccggcc

SEQ ID NO: 3031054 - RNA, 19 nt, Artificial Sequence
  Description of Artificial Sequence: Synthetic oligonucleotide
gguuggaacgguggccgaa

SEQ ID NO: 3031055 - RNA, 19 nt, Artificial Sequence
  Description of Artificial Sequence: Synthetic oligonucleotide
gcgccggccgcacuccgug

SEQ ID NO: 3031056 - RNA, 19 nt, Artificial Sequence
  Description of Artificial Sequence: Synthetic oligonucleotide
ggcggguagcuugaagucu

SEQ ID NO: 3031057 - RNA, 19 nt, Artificial Sequence
  Description of Artificial Sequence: Synthetic oligonucleotide
ccgccgaaggcucguccgc

SEQ ID NO: 3031058 - RNA, 19 nt, Artificial Sequence
  Description of Artificial Sequence: Synthetic oligonucleotide
cgugcgcgcaugcuccgcc

SEQ ID NO: 3031059 - RNA, 19 nt, Artificial Sequence
  Description of Artificial Sequence: Synthetic oligonucleotide
cgguggcggaugaagugug

SEQ ID NO: 3031060 - RNA, 19 nt, Artificial Sequence
  Description of Artificial Sequence: Synthetic oligonucleotide
caugcuccgccagguugga

SEQ ID NO: 3031061 - RNA, 19 nt, Artificial Sequence
  Description of Artificial Sequence: Synthetic oligonucleotide
gguggcggaugaaguguga

SEQ ID NO: 3031062 - RNA, 19 nt, Artificial Sequence
  Description of Artificial Sequence: Synthetic oligonucleotide
guaugcgugcgcgcaugcu

SEQ ID NO: 3031063 - RNA, 19 nt, Artificial Sequence
  Description of Artificial Sequence: Synthetic oligonucleotide
uggcacuggcggguagcuu

SEQ ID NO: 3031064 - RNA, 19 nt, Artificial Sequence
  Description of Artificial Sequence: Synthetic oligonucleotide
gcgcagcccgcgcagaugu

SEQ ID NO: 3031065 - RNA, 19 nt, Artificial Sequence
  Description of Artificial Sequence: Synthetic oligonucleotide
gcccguaugcgugcgcgca

SEQ ID NO: 3031066 - RNA, 19 nt, Artificial Sequence
  Description of Artificial Sequence: Synthetic oligonucleotide
ccgccagguuggaacggug

SEQ ID NO: 3031067 - RNA, 19 nt, Artificial Sequence
  Description of Artificial Sequence: Synthetic oligonucleotide
cgaagcgcgugccgcaguc

SEQ ID NO: 3031068 - RNA, 19 nt, Artificial Sequence
  Description of Artificial Sequence: Synthetic oligonucleotide
gcuuggccagcgccgagcu

SEQ ID NO: 3031069 - RNA, 19 nt, Artificial Sequence
  Description of Artificial Sequence: Synthetic oligonucleotide
gccgcacuccgugcacggg

SEQ ID NO: 3031070 - RNA, 19 nt, Artificial Sequence
  Description of Artificial Sequence: Synthetic oligonucleotide
ggcgcagcccgcgcagaug

SEQ ID NO: 3031071 - RNA, 19 nt, Artificial Sequence
  Description of Artificial Sequence: Synthetic oligonucleotide
gguggcgcgccaggcacga

SEQ ID NO: 3031072 - RNA, 19 nt, Artificial Sequence
  Description of Artificial Sequence: Synthetic oligonucleotide
ccguaugcgugcgcgcaug

SEQ ID NO: 3031073 - RNA, 19 nt, Artificial Sequence
  Description of Artificial Sequence: Synthetic oligonucleotide
gccggugcuuggccagcgc

SEQ ID NO: 3031074 - RNA, 19 nt, Artificial Sequence
  Description of Artificial Sequence: Synthetic oligonucleotide
gccggccgcacuccgugca

SEQ ID NO: 3031075 - RNA, 19 nt, Artificial Sequence
  Description of Artificial Sequence: Synthetic oligonucleotide
gcgccgagcucugagcgaa

SEQ ID NO: 3031076 - RNA, 19 nt, Artificial Sequence
  Description of Artificial Sequence: Synthetic oligonucleotide
cgccaggcacgaacuuccg

SEQ ID NO: 3031077 - RNA, 19 nt, Artificial Sequence
  Description of Artificial Sequence: Synthetic oligonucleotide
agcgccggccgcacuccgu

SEQ ID NO: 3031078 - RNA, 19 nt, Artificial Sequence
  Description of Artificial Sequence: Synthetic oligonucleotide
cgugcgucgguggcgcgcc

SEQ ID NO: 3031079 - RNA, 19 nt, Artificial Sequence
  Description of Artificial Sequence: Synthetic oligonucleotide
gcgugcgucgguggcgcgc

SEQ ID NO: 3031080 - RNA, 19 nt, Artificial Sequence
  Description of Artificial Sequence: Synthetic oligonucleotide
cggcuguggcacuggcggg

SEQ ID NO: 3031081 - RNA, 19 nt, Artificial Sequence
  Description of Artificial Sequence: Synthetic oligonucleotide
gcacuggcggguagcuuga

SEQ ID NO: 3031082 - RNA, 19 nt, Artificial Sequence
  Description of Artificial Sequence: Synthetic oligonucleotide
gcacgcgccggugcuuggc

SEQ ID NO: 3031083 - RNA, 19 nt, Artificial Sequence
  Description of Artificial Sequence: Synthetic oligonucleotide
gcgugccgcagucggcgca

SEQ ID NO: 3031084 - RNA, 19 nt, Artificial Sequence
  Description of Artificial Sequence: Synthetic oligonucleotide
cgcgccaggcacgaacuuc

SEQ ID NO: 3031085 - RNA, 19 nt, Artificial Sequence
  Description of Artificial Sequence: Synthetic oligonucleotide
gugccgcagucggcgcaug

SEQ ID NO: 3031086 - RNA, 19 nt, Artificial Sequence
  Description of Artificial Sequence: Synthetic oligonucleotide
cgguggcgcgccaggcacg

SEQ ID NO: 3031087 - RNA, 19 nt, Artificial Sequence
  Description of Artificial Sequence: Synthetic oligonucleotide
ggcgcgccaggcacgaacu

SEQ ID NO: 3031088 - RNA, 19 nt, Artificial Sequence
  Description of Artificial Sequence: Synthetic oligonucleotide
ggccgaagcgccggccgca

SEQ ID NO: 3031089 - RNA, 19 nt, Artificial Sequence
  Description of Artificial Sequence: Synthetic oligonucleotide
cgcccguaugcgugcgcgc

SEQ ID NO: 3031090 - RNA, 19 nt, Artificial Sequence
  Description of Artificial Sequence: Synthetic oligonucleotide
ccggccgcacuccgugcac

SEQ ID NO: 3031091 - RNA, 19 nt, Artificial Sequence
  Description of Artificial Sequence: Synthetic oligonucleotide
cgugcacggguagggccgc

SEQ ID NO: 3031092 - RNA, 19 nt, Artificial Sequence
  Description of Artificial Sequence: Synthetic oligonucleotide
cgcgcgacgguggcggaug

SEQ ID NO: 3031093 - RNA, 19 nt, Artificial Sequence
  Description of Artificial Sequence: Synthetic oligonucleotide
gcgugcgcgcaugcuccgc

SEQ ID NO: 3031094 - RNA, 19 nt, Artificial Sequence
  Description of Artificial Sequence: Synthetic oligonucleotide
gccgaagcgccggccgcac

SEQ ID NO: 3031095 - RNA, 19 nt, Artificial Sequence
  Description of Artificial Sequence: Synthetic oligonucleotide
cgucgguggcgcgccaggc

SEQ ID NO: 3031096 - RNA, 19 nt, Artificial Sequence
  Description of Artificial Sequence: Synthetic oligonucleotide
gugcgucgguggcgcgcca

SEQ ID NO: 3031097 - RNA, 19 nt, Artificial Sequence
  Description of Artificial Sequence: Synthetic oligonucleotide
gcggaagcgccggccgcac

SEQ ID NO: 3031098 - RNA, 19 nt, Artificial Sequence
  Description of Artificial Sequence: Synthetic oligonucleotide
cgcgugccgcagucggcgc

SEQ ID NO: 3031099 - RNA, 19 nt, Artificial Sequence
  Description of Artificial Sequence: Synthetic oligonucleotide
ccgcacacggcgcagcgau

SEQ ID NO: 3031100 - RNA, 19 nt, Artificial Sequence
  Description of Artificial Sequence: Synthetic oligonucleotide
cgacgguggcggaugaagu

SEQ ID NO: 3031101 - RNA, 19 nt, Artificial Sequence
  Description of Artificial Sequence: Synthetic oligonucleotide
cgccgcauaugcgcgcgac

SEQ ID NO: 3031102 - RNA, 19 nt, Artificial Sequence
  Description of Artificial Sequence: Synthetic oligonucleotide
cggccgcacuccgugcacg

SEQ ID NO: 3031103 - RNA, 19 nt, Artificial Sequence
  Description of Artificial Sequence: Synthetic oligonucleotide
cgcacacggcgcagcgaug

SEQ ID NO: 3031104 - RNA, 19 nt, Artificial Sequence
  Description of Artificial Sequence: Synthetic oligonucleotide
gcgcgacgguggcggauga

SEQ ID NO: 3031105 - RNA, 19 nt, Artificial Sequence
  Description of Artificial Sequence: Synthetic oligonucleotide
ccgcacuccgugcacgggu

SEQ ID NO: 3031106 - RNA, 19 nt, Artificial Sequence
  Description of Artificial Sequence: Synthetic oligonucleotide
gcgccggugcuuggccagc

SEQ ID NO: 3031107 - RNA, 19 nt, Artificial Sequence
  Description of Artificial Sequence: Synthetic oligonucleotide
ccgcagucggcgcaugcgu

SEQ ID NO: 3031108 - RNA, 19 nt, Artificial Sequence
  Description of Artificial Sequence: Synthetic oligonucleotide
cggcgccgcauaugcgcgc

SEQ ID NO: 3031109 - RNA, 19 nt, Artificial Sequence
  Description of Artificial Sequence: Synthetic oligonucleotide
cacuggcggguagcuugaa

SEQ ID NO: 3031110 - RNA, 19 nt, Artificial Sequence
  Description of Artificial Sequence: Synthetic oligonucleotide
gccgcacacggcgcagcga

SEQ ID NO: 3031111 - RNA, 19 nt, Artificial Sequence
  Description of Artificial Sequence: Synthetic oligonucleotide
cgccggugcuuggccagcg

SEQ ID NO: 3031112 - RNA, 19 nt, Artificial Sequence
  Description of Artificial Sequence: Synthetic oligonucleotide
cgccgagcucugagcgaag

SEQ ID NO: 3031113 - RNA, 19 nt, Artificial Sequence
  Description of Artificial Sequence: Synthetic oligonucleotide
cgcagucggcgcaugcgua

SEQ ID NO: 3031114 - RNA, 19 nt, Artificial Sequence
  Description of Artificial Sequence: Synthetic oligonucleotide
cgccggccgcacuccgugc

SEQ ID NO: 3031115 - RNA, 19 nt, Artificial Sequence
  Description of Artificial Sequence: Synthetic oligonucleotide
gcgccgcauaugcgcgcga

SEQ ID NO: 3031116 - RNA, 19 nt, Artificial Sequence
  Description of Artificial Sequence: Synthetic oligonucleotide
cgguggccgaagcgccggc

SEQ ID NO: 3031117 - RNA, 19 nt, Artificial Sequence
  Description of Artificial Sequence: Synthetic oligonucleotide
ggcgcucgcccgugugcgu

SEQ ID NO: 3031118 - RNA, 19 nt, Artificial Sequence
  Description of Artificial Sequence: Synthetic oligonucleotide
gcgcaugcguacgggcgcu

SEQ ID NO: 3031119 - RNA, 19 nt, Artificial Sequence
  Description of Artificial Sequence: Synthetic oligonucleotide
cguacgggcgcucgcccgu

SEQ ID NO: 3031120 - RNA, 19 nt, Artificial Sequence
  Description of Artificial Sequence: Synthetic oligonucleotide
cgccgaaggcucguccgca

SEQ ID NO: 3031121 - RNA, 19 nt, Artificial Sequence
  Description of Artificial Sequence: Synthetic oligonucleotide
cgcauaugcgcgcgacggu

SEQ ID NO: 3031122 - RNA, 19 nt, Artificial Sequence
  Description of Artificial Sequence: Synthetic oligonucleotide
cggccgcacacggcgcagc

SEQ ID NO: 3031123 - RNA, 19 nt, Artificial Sequence
  Description of Artificial Sequence: Synthetic oligonucleotide
ccgaagcgccggccgcaca

SEQ ID NO: 3031124 - RNA, 19 nt, Artificial Sequence
  Description of Artificial Sequence: Synthetic oligonucleotide
cgcagcgaugcggcuucuc

SEQ ID NO: 3031125 - RNA, 19 nt, Artificial Sequence
  Description of Artificial Sequence: Synthetic oligonucleotide
guggcgcgccaggcacgaa

SEQ ID NO: 3031126 - RNA, 19 nt, Artificial Sequence
  Description of Artificial Sequence: Synthetic oligonucleotide
gugcacggguagggccgcu

SEQ ID NO: 3031127 - RNA, 19 nt, Artificial Sequence
  Description of Artificial Sequence: Synthetic oligonucleotide
cccguaugcgugcgcgcau

SEQ ID NO: 3031128 - RNA, 19 nt, Artificial Sequence
  Description of Artificial Sequence: Synthetic oligonucleotide
ggccagcgccgagcucuga

SEQ ID NO: 3031129 - RNA, 19 nt, Artificial Sequence
  Description of Artificial Sequence: Synthetic oligonucleotide
cgcgcaugcuccgccaggu

SEQ ID NO: 3031130 - RNA, 19 nt, Artificial Sequence
  Description of Artificial Sequence: Synthetic oligonucleotide
gcgcaugcuccgccagguu

SEQ ID NO: 3031131 - RNA, 19 nt, Artificial Sequence
  Description of Artificial Sequence: Synthetic oligonucleotide
cgcaugcguacgggcgcuc

SEQ ID NO: 3031132 - RNA, 19 nt, Artificial Sequence
  Description of Artificial Sequence: Synthetic oligonucleotide
gcgcgccaggcacgaacuu

SEQ ID NO: 3031133 - RNA, 19 nt, Artificial Sequence
  Description of Artificial Sequence: Synthetic oligonucleotide
cgugccgcagucggcgcau

SEQ ID NO: 3031134 - RNA, 19 nt, Artificial Sequence
  Description of Artificial Sequence: Synthetic oligonucleotide
cgcagcccgcgcagaugua

SEQ ID NO: 3031135 - RNA, 19 nt, Artificial Sequence
  Description of Artificial Sequence: Synthetic oligonucleotide
gcgcgcgacgguggcggau

SEQ ID NO: 3031136 - RNA, 19 nt, Artificial Sequence
  Description of Artificial Sequence: Synthetic oligonucleotide
cgcgacgguggcggaugaa

SEQ ID NO: 3031137 - RNA, 19 nt, Artificial Sequence
  Description of Artificial Sequence: Synthetic oligonucleotide
gcgcagcgaugcggcuucu

SEQ ID NO: 3031138 - RNA, 19 nt, Artificial Sequence
  Description of Artificial Sequence: Synthetic oligonucleotide
cggaagcgccggccgcacu

SEQ ID NO: 3031139 - RNA, 19 nt, Artificial Sequence
  Description of Artificial Sequence: Synthetic oligonucleotide
cggcgcagcgaugcggcuu

SEQ ID NO: 3031140 - RNA, 19 nt, Artificial Sequence
  Description of Artificial Sequence: Synthetic oligonucleotide
uuguccacgaauuagacag

SEQ ID NO: 3031141 - RNA, 19 nt, Artificial Sequence
  Description of Artificial Sequence: Synthetic oligonucleotide
aauuagacaggcucagccc

SEQ ID NO: 3031142 - RNA, 19 nt, Artificial Sequence
  Description of Artificial Sequence: Synthetic oligonucleotide
uuuucaucuacccaguagc

SEQ ID NO: 3031143 - RNA, 19 nt, Artificial Sequence
  Description of Artificial Sequence: Synthetic oligonucleotide
  modified_base (10)..(10): a, c, u, g, unknown or other
gauugggganagcagaugg

SEQ ID NO: 3031144 - RNA, 19 nt, Artificial Sequence
  Description of Artificial Sequence: Synthetic oligonucleotide
uuuaccaaggagauccggg

SEQ ID NO: 3031145 - RNA, 19 nt, Artificial Sequence
  Description of Artificial Sequence: Synthetic oligonucleotide
uuucuaaaugcuagcaucc

SEQ ID NO: 3031146 - RNA, 19 nt, Artificial Sequence
  Description of Artificial Sequence: Synthetic oligonucleotide
aaugcuagcaucccucuug

SEQ ID NO: 3031147 - RNA, 19 nt, Artificial Sequence
  Description of Artificial Sequence: Synthetic oligonucleotide
ugaguuacagaccauuucu

SEQ ID NO: 3031148 - RNA, 19 nt, Artificial Sequence
  Description of Artificial Sequence: Synthetic oligonucleotide
gaauuagacaggcucagcc

SEQ ID NO: 3031149 - RNA, 19 nt, Artificial Sequence
  Description of Artificial Sequence: Synthetic oligonucleotide
uucauuagcuuucuuuacc

SEQ ID NO: 3031150 - RNA, 19 nt, Artificial Sequence
  Description of Artificial Sequence: Synthetic oligonucleotide
acaggcucagcccagugcc

SEQ ID NO: 3031151 - RNA, 19 nt, Artificial Sequence
  Description of Artificial Sequence: Synthetic oligonucleotide
auuagcuuucuuuaccaag

SEQ ID NO: 3031152 - RNA, 19 nt, Artificial Sequence
  Description of Artificial Sequence: Synthetic oligonucleotide
cuuucuaaaugcuagcauc

SEQ ID NO: 3031153 - RNA, 19 nt, Artificial Sequence
  Description of Artificial Sequence: Synthetic oligonucleotide
agaccauuucuucauuagc

SEQ ID NO: 3031154 - RNA, 19 nt, Artificial Sequence
  Description of Artificial Sequence: Synthetic oligonucleotide
agcugaaugaaucauggga

SEQ ID NO: 3031155 - RNA, 19 nt, Artificial Sequence
  Description of Artificial Sequence: Synthetic oligonucleotide
ucaucuacccaguagcuga

SEQ ID NO: 3031156 - RNA, 19 nt, Artificial Sequence
  Description of Artificial Sequence: Synthetic oligonucleotide
aaucaugggagccugggau

SEQ ID NO: 3031157 - RNA, 19 nt, Artificial Sequence
  Description of Artificial Sequence: Synthetic oligonucleotide
aguuacagaccauuucuuc

SEQ ID NO: 3031158 - RNA, 19 nt, Artificial Sequence
  Description of Artificial Sequence: Synthetic oligonucleotide
ucuucauuagcuuucuuua

SEQ ID NO: 3031159 - RNA, 19 nt, Artificial Sequence
  Description of Artificial Sequence: Synthetic oligonucleotide
ucauuagcuuucuuuacca

SEQ ID NO: 3031160 - RNA, 19 nt, Artificial Sequence
  Description of Artificial Sequence: Synthetic oligonucleotide
guagcugaaugaaucaugg

SEQ ID NO: 3031161 - RNA, 19 nt, Artificial Sequence
  Description of Artificial Sequence: Synthetic oligonucleotide
uggccuuucuaaaugcuag

SEQ ID NO: 3031162 - RNA, 19 nt, Artificial Sequence
  Description of Artificial Sequence: Synthetic oligonucleotide
gacguuguggaggugaggg

SEQ ID NO: 3031163 - RNA, 19 nt, Artificial Sequence
  Description of Artificial Sequence: Synthetic oligonucleotide
cagguucugaguuacagac

SEQ ID NO: 3031164 - RNA, 19 nt, Artificial Sequence
  Description of Artificial Sequence: Synthetic oligonucleotide
cuuggguuuggucaggccc

SEQ ID NO: 3031165 - RNA, 19 nt, Artificial Sequence
  Description of Artificial Sequence: Synthetic oligonucleotide
aaggagauccgggcgaggc

SEQ ID NO: 3031166 - RNA, 19 nt, Artificial Sequence
  Description of Artificial Sequence: Synthetic oligonucleotide
gacagcuuggguuugguca

SEQ ID NO: 3031167 - RNA, 19 nt, Artificial Sequence
  Description of Artificial Sequence: Synthetic oligonucleotide
agcgaggccauccagucgg

SEQ ID NO: 3031168 - RNA, 19 nt, Artificial Sequence
  Description of Artificial Sequence: Synthetic oligonucleotide
  modified_base (2)..(2): a, c, u, g, unknown or other
anagcagaugguccccauc

SEQ ID NO: 3031169 - RNA, 19 nt, Artificial Sequence
  Description of Artificial Sequence: Synthetic oligonucleotide
ggacuuuucaucuacccag

SEQ ID NO: 3031170 - RNA, 19 nt, Artificial Sequence
  Description of Artificial Sequence: Synthetic oligonucleotide
cuaaaugcuagcaucccuc

SEQ ID NO: 3031171 - RNA, 19 nt, Artificial Sequence
  Description of Artificial Sequence: Synthetic oligonucleotide
  modified_base (7)..(7): a, c, u, g, unknown or other
ugggganagcagauggucc

SEQ ID NO: 3031172 - RNA, 19 nt, Artificial Sequence
  Description of Artificial Sequence: Synthetic oligonucleotide
ucuaaaugcuagcaucccu

SEQ ID NO: 3031173 - RNA, 19 nt, Artificial Sequence
  Description of Artificial Sequence: Synthetic oligonucleotide
  modified_base (13)..(13): a, c, u, g, unknown or other
ugggauugggganagcaga

SEQ ID NO: 3031174 - RNA, 19 nt, Artificial Sequence
  Description of Artificial Sequence: Synthetic oligonucleotide
aaugaaucaugggagccug

SEQ ID NO: 3031175 - RNA, 19 nt, Artificial Sequence
  Description of Artificial Sequence: Synthetic oligonucleotide
auuagacaggcucagccca

SEQ ID NO: 3031176 - RNA, 19 nt, Artificial Sequence
  Description of Artificial Sequence: Synthetic oligonucleotide
uuaccaaggagauccgggc

SEQ ID NO: 3031177 - RNA, 19 nt, Artificial Sequence
  Description of Artificial Sequence: Synthetic oligonucleotide
ugaaugaaucaugggagcc

SEQ ID NO: 3031178 - RNA, 19 nt, Artificial Sequence
  Description of Artificial Sequence: Synthetic oligonucleotide
cuuuucaucuacccaguag

SEQ ID NO: 3031179 - RNA, 19 nt, Artificial Sequence
  Description of Artificial Sequence: Synthetic oligonucleotide
auugccagauuggaaaggg

SEQ ID NO: 3031180 - RNA, 19 nt, Artificial Sequence
  Description of Artificial Sequence: Synthetic oligonucleotide
auugcagaccuccgaggcc

SEQ ID NO: 3031181 - RNA, 19 nt, Artificial Sequence
  Description of Artificial Sequence: Synthetic oligonucleotide
uuggucaggccccacuggg

SEQ ID NO: 3031182 - RNA, 19 nt, Artificial Sequence
  Description of Artificial Sequence: Synthetic oligonucleotide
ucuacccaguagcugaaug

SEQ ID NO: 3031183 - RNA, 19 nt, Artificial Sequence
  Description of Artificial Sequence: Synthetic oligonucleotide
cugaaugaaucaugggagc

SEQ ID NO: 3031184 - RNA, 19 nt, Artificial Sequence
  Description of Artificial Sequence: Synthetic oligonucleotide
uaccaaggagauccgggcg

SEQ ID NO: 3031185 - RNA, 19 nt, Artificial Sequence
  Description of Artificial Sequence: Synthetic oligonucleotide
ugaaucaugggagccuggg

SEQ ID NO: 3031186 - RNA, 19 nt, Artificial Sequence
  Description of Artificial Sequence: Synthetic oligonucleotide
guuacagaccauuucuuca

SEQ ID NO: 3031187 - RNA, 19 nt, Artificial Sequence
  Description of Artificial Sequence: Synthetic oligonucleotide
uuggguuuggucaggcccc

SEQ ID NO: 3031188 - RNA, 19 nt, Artificial Sequence
  Description of Artificial Sequence: Synthetic oligonucleotide
uugcagaccuccgaggccg

SEQ ID NO: 3031189 - RNA, 19 nt, Artificial Sequence
  Description of Artificial Sequence: Synthetic oligonucleotide
cauugcagaccuccgaggc

SEQ ID NO: 3031190 - RNA, 19 nt, Artificial Sequence
  Description of Artificial Sequence: Synthetic oligonucleotide
uuucaucuacccaguagcu

SEQ ID NO: 3031191 - RNA, 19 nt, Artificial Sequence
  Description of Artificial Sequence: Synthetic oligonucleotide
ucuuguccacgaauuagac

SEQ ID NO: 3031192 - RNA, 19 nt, Artificial Sequence
  Description of Artificial Sequence: Synthetic oligonucleotide
cauccagucggcauugcag

SEQ ID NO: 3031193 - RNA, 19 nt, Artificial Sequence
  Description of Artificial Sequence: Synthetic oligonucleotide
uuacagaccauuucuucau

SEQ ID NO: 3031194 - RNA, 19 nt, Artificial Sequence
  Description of Artificial Sequence: Synthetic oligonucleotide
acagcuuggguuuggucag

SEQ ID NO: 3031195 - RNA, 19 nt, Artificial Sequence
  Description of Artificial Sequence: Synthetic oligonucleotide
uccagcuguucccggaagg

SEQ ID NO: 3031196 - RNA, 19 nt, Artificial Sequence
  Description of Artificial Sequence: Synthetic oligonucleotide
  modified_base (14)..(14): a, c, u, g, unknown or other
cugggauugggganagcag

SEQ ID NO: 3031197 - RNA, 19 nt, Artificial Sequence
  Description of Artificial Sequence: Synthetic oligonucleotide
cuucauuagcuuucuuuac

SEQ ID NO: 3031198 - RNA, 19 nt, Artificial Sequence
  Description of Artificial Sequence: Synthetic oligonucleotide
gcugaaugaaucaugggag

SEQ ID NO: 3031199 - RNA, 19 nt, Artificial Sequence
  Description of Artificial Sequence: Synthetic oligonucleotide
cagaccauuucuucauuag

SEQ ID NO: 3031200 - RNA, 19 nt, Artificial Sequence
  Description of Artificial Sequence: Synthetic oligonucleotide
uaaaugcuagcaucccucu

SEQ ID NO: 3031201 - RNA, 19 nt, Artificial Sequence
  Description of Artificial Sequence: Synthetic oligonucleotide
gguucugaguuacagacca

SEQ ID NO: 3031202 - RNA, 19 nt, Artificial Sequence
  Description of Artificial Sequence: Synthetic oligonucleotide
ucagguucugaguuacaga

SEQ ID NO: 3031203 - RNA, 19 nt, Artificial Sequence
  Description of Artificial Sequence: Synthetic oligonucleotide
uugccagauuggaaagggg

SEQ ID NO: 3031204 - RNA, 19 nt, Artificial Sequence
  Description of Artificial Sequence: Synthetic oligonucleotide
gauugccagauuggaaagg

SEQ ID NO: 3031205 - RNA, 19 nt, Artificial Sequence
  Description of Artificial Sequence: Synthetic oligonucleotide
uagcugaaugaaucauggg

SEQ ID NO: 3031206 - RNA, 19 nt, Artificial Sequence
  Description of Artificial Sequence: Synthetic oligonucleotide
gcuagcaucccucuugucc

SEQ ID NO: 3031207 - RNA, 19 nt, Artificial Sequence
  Description of Artificial Sequence: Synthetic oligonucleotide
uuagacaggcucagcccag

SEQ ID NO: 3031208 - RNA, 19 nt, Artificial Sequence
  Description of Artificial Sequence: Synthetic oligonucleotide
agcccagugccacucacuc

SEQ ID NO: 3031209 - RNA, 19 nt, Artificial Sequence
  Description of Artificial Sequence: Synthetic oligonucleotide
uguccacgaauuagacagg

SEQ ID NO: 3031210 - RNA, 19 nt, Artificial Sequence
  Description of Artificial Sequence: Synthetic oligonucleotide
ucugaguuacagaccauuu

SEQ ID NO: 3031211 - RNA, 19 nt, Artificial Sequence
  Description of Artificial Sequence: Synthetic oligonucleotide
uucccggaaggucagguuc

SEQ ID NO: 3031212 - RNA, 19 nt, Artificial Sequence
  Description of Artificial Sequence: Synthetic oligonucleotide
uccgaggccgccuuugccc

SEQ ID NO: 3031213 - RNA, 19 nt, Artificial Sequence
  Description of Artificial Sequence: Synthetic oligonucleotide
aguagcugaaugaaucaug

SEQ ID NO: 3031214 - RNA, 19 nt, Artificial Sequence
  Description of Artificial Sequence: Synthetic oligonucleotide
uucuaaaugcuagcauccc

SEQ ID NO: 3031215 - RNA, 19 nt, Artificial Sequence
  Description of Artificial Sequence: Synthetic oligonucleotide
cuagcaucccucuugucca

SEQ ID NO: 3031216 - RNA, 19 nt, Artificial Sequence
  Description of Artificial Sequence: Synthetic oligonucleotide
uccuggccuuucuaaaugc

SEQ ID NO: 3031217 - RNA, 19 nt, Artificial Sequence
  Description of Artificial Sequence: Synthetic oligonucleotide
cugaguuacagaccauuuc

SEQ ID NO: 3031218 - RNA, 19 nt, Artificial Sequence
  Description of Artificial Sequence: Synthetic oligonucleotide
uucaucuacccaguagcug

SEQ ID NO: 3031219 - RNA, 19 nt, Artificial Sequence
  Description of Artificial Sequence: Synthetic oligonucleotide
gucagguucugaguuacag

SEQ ID NO: 3031220 - RNA, 19 nt, Artificial Sequence
  Description of Artificial Sequence: Synthetic oligonucleotide
auccugaguuuccuccugg

SEQ ID NO: 3031221 - RNA, 19 nt, Artificial Sequence
  Description of Artificial Sequence: Synthetic oligonucleotide
auccagucggcauugcaga

SEQ ID NO: 3031222 - RNA, 19 nt, Artificial Sequence
  Description of Artificial Sequence: Synthetic oligonucleotide
aggucagguucugaguuac

SEQ ID NO: 3031223 - RNA, 19 nt, Artificial Sequence
  Description of Artificial Sequence: Synthetic oligonucleotide
ucggcauugcagaccuccg

SEQ ID NO: 3031224 - RNA, 19 nt, Artificial Sequence
  Description of Artificial Sequence: Synthetic oligonucleotide
uuugacagcuuggguuugg

SEQ ID NO: 3031225 - RNA, 19 nt, Artificial Sequence
  Description of Artificial Sequence: Synthetic oligonucleotide
guuuggucaggccccacug

SEQ ID NO: 3031226 - RNA, 19 nt, Artificial Sequence
  Description of Artificial Sequence: Synthetic oligonucleotide
gacaggcucagcccagugc

SEQ ID NO: 3031227 - RNA, 19 nt, Artificial Sequence
  Description of Artificial Sequence: Synthetic oligonucleotide
cacgaauuagacaggcuca

SEQ ID NO: 3031228 - RNA, 19 nt, Artificial Sequence
  Description of Artificial Sequence: Synthetic oligonucleotide
acgaauuagacaggcucag

SEQ ID NO: 3031229 - RNA, 19 nt, Artificial Sequence
  Description of Artificial Sequence: Synthetic oligonucleotide
  modified_base (8)..(8): a, c, u, g, unknown or other
uugggganagcagaugguc

SEQ ID NO: 3031230 - RNA, 19 nt, Artificial Sequence
  Description of Artificial Sequence: Synthetic oligonucleotide
accaaggagauccgggcga

SEQ ID NO: 3031231 - RNA, 19 nt, Artificial Sequence
  Description of Artificial Sequence: Synthetic oligonucleotide
agguucugaguuacagacc

SEQ ID NO: 3031232 - RNA, 19 nt, Artificial Sequence
  Description of Artificial Sequence: Synthetic oligonucleotide
cucuuguccacgaauuaga

SEQ ID NO: 3031233 - RNA, 19 nt, Artificial Sequence
  Description of Artificial Sequence: Synthetic oligonucleotide
cuuuaccaaggagauccgg

SEQ ID NO: 3031234 - RNA, 19 nt, Artificial Sequence
  Description of Artificial Sequence: Synthetic oligonucleotide
uggucaggccccacugggg

SEQ ID NO: 3031235 - RNA, 19 nt, Artificial Sequence
  Description of Artificial Sequence: Synthetic oligonucleotide
augguccccauccugaguu

SEQ ID NO: 3031236 - RNA, 19 nt, Artificial Sequence
  Description of Artificial Sequence: Synthetic oligonucleotide
  modified_base (6)..(6): a, c, u, g, unknown or other
gggganagcagaugguccc

SEQ ID NO: 3031237 - RNA, 19 nt, Artificial Sequence
  Description of Artificial Sequence: Synthetic oligonucleotide
ucaugggagccugggauug

SEQ ID NO: 3031238 - RNA, 19 nt, Artificial Sequence
  Description of Artificial Sequence: Synthetic oligonucleotide
ugggauugccagauuggaa

SEQ ID NO: 3031239 - RNA, 19 nt, Artificial Sequence
  Description of Artificial Sequence: Synthetic oligonucleotide
cuacccaguagcugaauga

SEQ ID NO: 3031240 - RNA, 19 nt, Artificial Sequence
  Description of Artificial Sequence: Synthetic oligonucleotide
gggauugccagauuggaaa

SEQ ID NO: 3031241 - RNA, 19 nt, Artificial Sequence
  Description of Artificial Sequence: Synthetic oligonucleotide
ggauugccagauuggaaag

SEQ ID NO: 3031242 - RNA, 19 nt, Artificial Sequence
  Description of Artificial Sequence: Synthetic oligonucleotide
gaggcguuugacagcuugg

SEQ ID NO: 3031243 - RNA, 19 nt, Artificial Sequence
  Description of Artificial Sequence: Synthetic oligonucleotide
cuuucuuuaccaaggagau

SEQ ID NO: 3031244 - RNA, 19 nt, Artificial Sequence
  Description of Artificial Sequence: Synthetic oligonucleotide
gucggcauugcagaccucc

SEQ ID NO: 3031245 - RNA, 19 nt, Artificial Sequence
  Description of Artificial Sequence: Synthetic oligonucleotide
uggggacuuuucaucuacc

SEQ ID NO: 3031246 - RNA, 19 nt, Artificial Sequence
  Description of Artificial Sequence: Synthetic oligonucleotide
cuggggacuuuucaucuac

SEQ ID NO: 3031247 - RNA, 19 nt, Artificial Sequence
  Description of Artificial Sequence: Synthetic oligonucleotide
ugaguuuccuccuggccuu

SEQ ID NO: 3031248 - RNA, 19 nt, Artificial Sequence
  Description of Artificial Sequence: Synthetic oligonucleotide
uugcccgcugggauugggg

SEQ ID NO: 3031249 - RNA, 19 nt, Artificial Sequence
  Description of Artificial Sequence: Synthetic oligonucleotide
aggagauccgggcgaggcg

SEQ ID NO: 3031250 - RNA, 19 nt, Artificial Sequence
  Description of Artificial Sequence: Synthetic oligonucleotide
uccacgaauuagacaggcu

SEQ ID NO: 3031251 - RNA, 19 nt, Artificial Sequence
  Description of Artificial Sequence: Synthetic oligonucleotide
uucugaguuacagaccauu

SEQ ID NO: 3031252 - RNA, 19 nt, Artificial Sequence
  Description of Artificial Sequence: Synthetic oligonucleotide
acguuguggaggugagggg

SEQ ID NO: 3031253 - RNA, 19 nt, Artificial Sequence
  Description of Artificial Sequence: Synthetic oligonucleotide
aaaugcuagcaucccucuu

SEQ ID NO: 3031254 - RNA, 19 nt, Artificial Sequence
  Description of Artificial Sequence: Synthetic oligonucleotide
uccugaguuuccuccuggc

SEQ ID NO: 3031255 - RNA, 19 nt, Artificial Sequence
  Description of Artificial Sequence: Synthetic oligonucleotide
uacccaguagcugaaugaa

SEQ ID NO: 3031256 - RNA, 19 nt, Artificial Sequence
  Description of Artificial Sequence: Synthetic oligonucleotide
aggcguuugacagcuuggg

SEQ ID NO: 3031257 - RNA, 19 nt, Artificial Sequence
  Description of Artificial Sequence: Synthetic oligonucleotide
acagaccauuucuucauua

SEQ ID NO: 3031258 - RNA, 19 nt, Artificial Sequence
  Description of Artificial Sequence: Synthetic oligonucleotide
ucccucuuguccacgaauu

SEQ ID NO: 3031259 - RNA, 19 nt, Artificial Sequence
  Description of Artificial Sequence: Synthetic oligonucleotide
cuuguccacgaauuagaca

SEQ ID NO: 3031260 - RNA, 19 nt, Artificial Sequence
  Description of Artificial Sequence: Synthetic oligonucleotide
ccacgaauuagacaggcuc

SEQ ID NO: 3031261 - RNA, 19 nt, Artificial Sequence
  Description of Artificial Sequence: Synthetic oligonucleotide
gaaggucagguucugaguu

SEQ ID NO: 3031262 - RNA, 19 nt, Artificial Sequence
  Description of Artificial Sequence: Synthetic oligonucleotide
cccaguagcugaaugaauc

SEQ ID NO: 3031263 - RNA, 19 nt, Artificial Sequence
  Description of Artificial Sequence: Synthetic oligonucleotide
cuccuggccuuucuaaaug

SEQ ID NO: 3031264 - RNA, 19 nt, Artificial Sequence
  Description of Artificial Sequence: Synthetic oligonucleotide
ucccggaaggucagguucu

SEQ ID NO: 3031265 - RNA, 19 nt, Artificial Sequence
  Description of Artificial Sequence: Synthetic oligonucleotide
gaaucaugggagccuggga

SEQ ID NO: 3031266 - RNA, 19 nt, Artificial Sequence
  Description of Artificial Sequence: Synthetic oligonucleotide
augcuagcaucccucuugu

SEQ ID NO: 3031267 - RNA, 19 nt, Artificial Sequence
  Description of Artificial Sequence: Synthetic oligonucleotide
ggggacuuuucaucuaccc

SEQ ID NO: 3031268 - RNA, 19 nt, Artificial Sequence
  Description of Artificial Sequence: Synthetic oligonucleotide
gagcgaggccauccagucg

SEQ ID NO: 3031269 - RNA, 19 nt, Artificial Sequence
  Description of Artificial Sequence: Synthetic oligonucleotide
guccacgaauuagacaggc

SEQ ID NO: 3031270 - RNA, 19 nt, Artificial Sequence
  Description of Artificial Sequence: Synthetic oligonucleotide
uuccuccuggccuuucuaa

SEQ ID NO: 3031271 - RNA, 19 nt, Artificial Sequence
  Description of Artificial Sequence: Synthetic oligonucleotide
uguucccggaaggucaggu

SEQ ID NO: 3031272 - RNA, 19 nt, Artificial Sequence
  Description of Artificial Sequence: Synthetic oligonucleotide
cagaugguccccauccuga

SEQ ID NO: 3031273 - RNA, 19 nt, Artificial Sequence
  Description of Artificial Sequence: Synthetic oligonucleotide
ucagcccagugccacucac

SEQ ID NO: 3031274 - RNA, 19 nt, Artificial Sequence
  Description of Artificial Sequence: Synthetic oligonucleotide
cccauccugaguuuccucc

SEQ ID NO: 3031275 - RNA, 19 nt, Artificial Sequence
  Description of Artificial Sequence: Synthetic oligonucleotide
uccuccuggccuuucuaaa

SEQ ID NO: 3031276 - RNA, 19 nt, Artificial Sequence
  Description of Artificial Sequence: Synthetic oligonucleotide
ccugggauugccagauugg

SEQ ID NO: 3031277 - RNA, 19 nt, Artificial Sequence
  Description of Artificial Sequence: Synthetic oligonucleotide
gaaugaaucaugggagccu

SEQ ID NO: 3031278 - RNA, 19 nt, Artificial Sequence
  Description of Artificial Sequence: Synthetic oligonucleotide
uuucuuuaccaaggagauc

SEQ ID NO: 3031279 - RNA, 19 nt, Artificial Sequence
  Description of Artificial Sequence: Synthetic oligonucleotide
ugcccgcugggauugggga

SEQ ID NO: 3031280 - RNA, 19 nt, Artificial Sequence
  Description of Artificial Sequence: Synthetic oligonucleotide
uccagucggcauugcagac

SEQ ID NO: 3031281 - RNA, 19 nt, Artificial Sequence
  Description of Artificial Sequence: Synthetic oligonucleotide
cugaguuuccuccuggccu

SEQ ID NO: 3031282 - RNA, 19 nt, Artificial Sequence
  Description of Artificial Sequence: Synthetic oligonucleotide
aucaugggagccugggauu

SEQ ID NO: 3031283 - RNA, 19 nt, Artificial Sequence
  Description of Artificial Sequence: Synthetic oligonucleotide
aucccucuuguccacgaau

SEQ ID NO: 3031284 - RNA, 19 nt, Artificial Sequence
  Description of Artificial Sequence: Synthetic oligonucleotide
uuugcccgcugggauuggg

SEQ ID NO: 3031285 - RNA, 19 nt, Artificial Sequence
  Description of Artificial Sequence: Synthetic oligonucleotide
gggacuuuucaucuaccca

SEQ ID NO: 3031286 - RNA, 19 nt, Artificial Sequence
  Description of Artificial Sequence: Synthetic oligonucleotide
  modified_base (9)..(9): a, c, u, g, unknown or other
auugggganagcagauggu

SEQ ID NO: 3031287 - RNA, 19 nt, Artificial Sequence
  Description of Artificial Sequence: Synthetic oligonucleotide
cauccugaguuuccuccug

SEQ ID NO: 3031288 - RNA, 19 nt, Artificial Sequence
  Description of Artificial Sequence: Synthetic oligonucleotide
gccugggauugccagauug

SEQ ID NO: 3031289 - RNA, 19 nt, Artificial Sequence
  Description of Artificial Sequence: Synthetic oligonucleotide
aggcucagcccagugccac

SEQ ID NO: 3031290 - RNA, 19 nt, Artificial Sequence
  Description of Artificial Sequence: Synthetic oligonucleotide
acuuuucaucuacccagua

SEQ ID NO: 3031291 - RNA, 19 nt, Artificial Sequence
  Description of Artificial Sequence: Synthetic oligonucleotide
cauuagcuuucuuuaccaa

SEQ ID NO: 3031292 - RNA, 19 nt, Artificial Sequence
  Description of Artificial Sequence: Synthetic oligonucleotide
ggccuuucuaaaugcuagc

SEQ ID NO: 3031293 - RNA, 19 nt, Artificial Sequence
  Description of Artificial Sequence: Synthetic oligonucleotide
agacaggcucagcccagug

SEQ ID NO: 3031294 - RNA, 19 nt, Artificial Sequence
  Description of Artificial Sequence: Synthetic oligonucleotide
gggagccugggauugccag

SEQ ID NO: 3031295 - RNA, 19 nt, Artificial Sequence
  Description of Artificial Sequence: Synthetic oligonucleotide
augaaucaugggagccugg

SEQ ID NO: 3031296 - RNA, 19 nt, Artificial Sequence
  Description of Artificial Sequence: Synthetic oligonucleotide
ugggagccugggauugcca

SEQ ID NO: 3031297 - RNA, 19 nt, Artificial Sequence
  Description of Artificial Sequence: Synthetic oligonucleotide
  modified_base (15)..(15): a, c, u, g, unknown or other
gcugggauugggganagca

SEQ ID NO: 3031298 - RNA, 19 nt, Artificial Sequence
  Description of Artificial Sequence: Synthetic oligonucleotide
ccucuuguccacgaauuag

SEQ ID NO: 3031299 - RNA, 19 nt, Artificial Sequence
  Description of Artificial Sequence: Synthetic oligonucleotide
ggagcgaggccauccaguc

SEQ ID NO: 3031300 - RNA, 19 nt, Artificial Sequence
  Description of Artificial Sequence: Synthetic oligonucleotide
cuggccuuucuaaaugcua

SEQ ID NO: 3031301 - RNA, 19 nt, Artificial Sequence
  Description of Artificial Sequence: Synthetic oligonucleotide
aggccauccagucggcauu

SEQ ID NO: 3031302 - RNA, 19 nt, Artificial Sequence
  Description of Artificial Sequence: Synthetic oligonucleotide
cggaaggucagguucugag

SEQ ID NO: 3031303 - RNA, 19 nt, Artificial Sequence
  Description of Artificial Sequence: Synthetic oligonucleotide
cugggauugccagauugga

SEQ ID NO: 3031304 - RNA, 19 nt, Artificial Sequence
  Description of Artificial Sequence: Synthetic oligonucleotide
acuggggacuuuucaucua

SEQ ID NO: 3031305 - RNA, 19 nt, Artificial Sequence
  Description of Artificial Sequence: Synthetic oligonucleotide
guuugacagcuuggguuug

SEQ ID NO: 3031306 - RNA, 19 nt, Artificial Sequence
  Description of Artificial Sequence: Synthetic oligonucleotide
cuccagcuguucccggaag

SEQ ID NO: 3031307 - RNA, 19 nt, Artificial Sequence
  Description of Artificial Sequence: Synthetic oligonucleotide
cuccgaggccgccuuugcc

SEQ ID NO: 3031308 - RNA, 19 nt, Artificial Sequence
  Description of Artificial Sequence: Synthetic oligonucleotide
uccccauccugaguuuccu

SEQ ID NO: 3031309 - RNA, 19 nt, Artificial Sequence
  Description of Artificial Sequence: Synthetic oligonucleotide
cacuggggacuuuucaucu

SEQ ID NO: 3031310 - RNA, 19 nt, Artificial Sequence
  Description of Artificial Sequence: Synthetic oligonucleotide
ccaguagcugaaugaauca

SEQ ID NO: 3031311 - RNA, 19 nt, Artificial Sequence
  Description of Artificial Sequence: Synthetic oligonucleotide
ugcagaccuccgaggccgc

SEQ ID NO: 3031312 - RNA, 19 nt, Artificial Sequence
  Description of Artificial Sequence: Synthetic oligonucleotide
gacuuuucaucuacccagu

SEQ ID NO: 3031313 - RNA, 19 nt, Artificial Sequence
  Description of Artificial Sequence: Synthetic oligonucleotide
gauccgggcgaggcguuug

SEQ ID NO: 3031314 - RNA, 19 nt, Artificial Sequence
  Description of Artificial Sequence: Synthetic oligonucleotide
  modified_base (11)..(11): a, c, u, g, unknown or other
ggauugggganagcagaug

SEQ ID NO: 3031315 - RNA, 19 nt, Artificial Sequence
  Description of Artificial Sequence: Synthetic oligonucleotide
uagacaggcucagcccagu

SEQ ID NO: 3031316 - RNA, 19 nt, Artificial Sequence
  Description of Artificial Sequence: Synthetic oligonucleotide
cgggcgaggcguuugacag

SEQ ID NO: 3031317 - RNA, 19 nt, Artificial Sequence
  Description of Artificial Sequence: Synthetic oligonucleotide
gccuuucuaaaugcuagca

SEQ ID NO: 3031318 - RNA, 19 nt, Artificial Sequence
  Description of Artificial Sequence: Synthetic oligonucleotide
ccacuggggacuuuucauc

SEQ ID NO: 3031319 - RNA, 19 nt, Artificial Sequence
  Description of Artificial Sequence: Synthetic oligonucleotide
ggucaggccccacugggga

SEQ ID NO: 3031320 - RNA, 19 nt, Artificial Sequence
  Description of Artificial Sequence: Synthetic oligonucleotide
  modified_base (5)..(5): a, c, u, g, unknown or other
ggganagcagauggucccc

SEQ ID NO: 3031321 - RNA, 19 nt, Artificial Sequence
  Description of Artificial Sequence: Synthetic oligonucleotide
gaggccauccagucggcau

SEQ ID NO: 3031322 - RNA, 19 nt, Artificial Sequence
  Description of Artificial Sequence: Synthetic oligonucleotide
  modified_base (3)..(3): a, c, u, g, unknown or other
ganagcagaugguccccau

SEQ ID NO: 3031323 - RNA, 19 nt, Artificial Sequence
  Description of Artificial Sequence: Synthetic oligonucleotide
caaggagauccgggcgagg

SEQ ID NO: 3031324 - RNA, 19 nt, Artificial Sequence
  Description of Artificial Sequence: Synthetic oligonucleotide
cagucggcauugcagaccu

SEQ ID NO: 3031325 - RNA, 19 nt, Artificial Sequence
  Description of Artificial Sequence: Synthetic oligonucleotide
caugggagccugggauugc

SEQ ID NO: 3031326 - RNA, 19 nt, Artificial Sequence
  Description of Artificial Sequence: Synthetic oligonucleotide
gaugguccccauccugagu

SEQ ID NO: 3031327 - RNA, 19 nt, Artificial Sequence
  Description of Artificial Sequence: Synthetic oligonucleotide
uggguuuggucaggcccca

SEQ ID NO: 3031328 - RNA, 19 nt, Artificial Sequence
  Description of Artificial Sequence: Synthetic oligonucleotide
caucuacccaguagcugaa

SEQ ID NO: 3031329 - RNA, 19 nt, Artificial Sequence
  Description of Artificial Sequence: Synthetic oligonucleotide
ugcuagcaucccucuuguc

SEQ ID NO: 3031330 - RNA, 19 nt, Artificial Sequence
  Description of Artificial Sequence: Synthetic oligonucleotide
ggaaggucagguucugagu

SEQ ID NO: 3031331 - RNA, 19 nt, Artificial Sequence
  Description of Artificial Sequence: Synthetic oligonucleotide
gcguuugacagcuuggguu

SEQ ID NO: 3031332 - RNA, 19 nt, Artificial Sequence
  Description of Artificial Sequence: Synthetic oligonucleotide
gaguuacagaccauuucuu

SEQ ID NO: 3031333 - RNA, 19 nt, Artificial Sequence
  Description of Artificial Sequence: Synthetic oligonucleotide
cagcuguucccggaagguc

SEQ ID NO: 3031334 - RNA, 19 nt, Artificial Sequence
  Description of Artificial Sequence: Synthetic oligonucleotide
gccgccuuugcccgcuggg

SEQ ID NO: 3031335 - RNA, 19 nt, Artificial Sequence
  Description of Artificial Sequence: Synthetic oligonucleotide
  modified_base (4)..(4): a, c, u, g, unknown or other
gganagcagauggucccca

SEQ ID NO: 3031336 - RNA, 19 nt, Artificial Sequence
  Description of Artificial Sequence: Synthetic oligonucleotide
accuccgaggccgccuuug

SEQ ID NO: 3031337 - RNA, 19 nt, Artificial Sequence
  Description of Artificial Sequence: Synthetic oligonucleotide
auccgggcgaggcguuuga

SEQ ID NO: 3031338 - RNA, 19 nt, Artificial Sequence
  Description of Artificial Sequence: Synthetic oligonucleotide
ggggacguuguggagguga

SEQ ID NO: 3031339 - RNA, 19 nt, Artificial Sequence
  Description of Artificial Sequence: Synthetic oligonucleotide
ccagucggcauugcagacc

SEQ ID NO: 3031340 - RNA, 19 nt, Artificial Sequence
  Description of Artificial Sequence: Synthetic oligonucleotide
agaccuccgaggccgccuu

SEQ ID NO: 3031341 - RNA, 19 nt, Artificial Sequence
  Description of Artificial Sequence: Synthetic oligonucleotide
ccgaggccgccuuugcccg

SEQ ID NO: 3031342 - RNA, 19 nt, Artificial Sequence
  Description of Artificial Sequence: Synthetic oligonucleotide
cgaggcguuugacagcuug

SEQ ID NO: 3031343 - RNA, 19 nt, Artificial Sequence
  Description of Artificial Sequence: Synthetic oligonucleotide
cagcuuggguuuggucagg

SEQ ID NO: 3031344 - RNA, 19 nt, Artificial Sequence
  Description of Artificial Sequence: Synthetic oligonucleotide
ggagccugggauugccaga

SEQ ID NO: 3031345 - RNA, 19 nt, Artificial Sequence
  Description of Artificial Sequence: Synthetic oligonucleotide
ggggagcgaggccauccag

SEQ ID NO: 3031346 - RNA, 19 nt, Artificial Sequence
  Description of Artificial Sequence: Synthetic oligonucleotide
gggacguuguggaggugag

SEQ ID NO: 3031347 - RNA, 19 nt, Artificial Sequence
  Description of Artificial Sequence: Synthetic oligonucleotide
acccaguagcugaaugaau

SEQ ID NO: 3031348 - RNA, 19 nt, Artificial Sequence
  Description of Artificial Sequence: Synthetic oligonucleotide
gcuguucccggaaggucag

SEQ ID NO: 3031349 - RNA, 19 nt, Artificial Sequence
  Description of Artificial Sequence: Synthetic oligonucleotide
ggacguuguggaggugagg

SEQ ID NO: 3031350 - RNA, 19 nt, Artificial Sequence
  Description of Artificial Sequence: Synthetic oligonucleotide
gagccugggauugccagau

SEQ ID NO: 3031351 - RNA, 19 nt, Artificial Sequence
  Description of Artificial Sequence: Synthetic oligonucleotide
ugguccccauccugaguuu

SEQ ID NO: 3031352 - RNA, 19 nt, Artificial Sequence
  Description of Artificial Sequence: Synthetic oligonucleotide
cuguucccggaaggucagg

SEQ ID NO: 3031353 - RNA, 19 nt, Artificial Sequence
  Description of Artificial Sequence: Synthetic oligonucleotide
ccuuugcccgcugggauug

SEQ ID NO: 3031354 - RNA, 19 nt, Artificial Sequence
  Description of Artificial Sequence: Synthetic oligonucleotide
cuuugcccgcugggauugg

SEQ ID NO: 3031355 - RNA, 19 nt, Artificial Sequence
  Description of Artificial Sequence: Synthetic oligonucleotide
ccaaggagauccgggcgag

SEQ ID NO: 3031356 - RNA, 19 nt, Artificial Sequence
  Description of Artificial Sequence: Synthetic oligonucleotide
aucuacccaguagcugaau

SEQ ID NO: 3031357 - RNA, 19 nt, Artificial Sequence
  Description of Artificial Sequence: Synthetic oligonucleotide
gcaucccucuuguccacga

SEQ ID NO: 3031358 - RNA, 19 nt, Artificial Sequence
  Description of Artificial Sequence: Synthetic oligonucleotide
gggcgaggcguuugacagc

SEQ ID NO: 3031359 - RNA, 19 nt, Artificial Sequence
  Description of Artificial Sequence: Synthetic oligonucleotide
caggcucagcccagugcca

SEQ ID NO: 3031360 - RNA, 19 nt, Artificial Sequence
  Description of Artificial Sequence: Synthetic oligonucleotide
caguagcugaaugaaucau

SEQ ID NO: 3031361 - RNA, 19 nt, Artificial Sequence
  Description of Artificial Sequence: Synthetic oligonucleotide
cgaauuagacaggcucagc

SEQ ID NO: 3031362 - RNA, 19 nt, Artificial Sequence
  Description of Artificial Sequence: Synthetic oligonucleotide
ggccauccagucggcauug

SEQ ID NO: 3031363 - RNA, 19 nt, Artificial Sequence
  Description of Artificial Sequence: Synthetic oligonucleotide
uccgggcgaggcguuugac

SEQ ID NO: 3031364 - RNA, 19 nt, Artificial Sequence
  Description of Artificial Sequence: Synthetic oligonucleotide
ggagauccgggcgaggcgu

SEQ ID NO: 3031365 - RNA, 19 nt, Artificial Sequence
  Description of Artificial Sequence: Synthetic oligonucleotide
ccuuucuaaaugcuagcau

SEQ ID NO: 3031366 - RNA, 19 nt, Artificial Sequence
  Description of Artificial Sequence: Synthetic oligonucleotide
ggcgaggcguuugacagcu

SEQ ID NO: 3031367 - RNA, 19 nt, Artificial Sequence
  Description of Artificial Sequence: Synthetic oligonucleotide
caucccucuuguccacgaa

SEQ ID NO: 3031368 - RNA, 19 nt, Artificial Sequence
  Description of Artificial Sequence: Synthetic oligonucleotide
gguccccauccugaguuuc

SEQ ID NO: 3031369 - RNA, 19 nt, Artificial Sequence
  Description of Artificial Sequence: Synthetic oligonucleotide
cucagcccagugccacuca

SEQ ID NO: 3031370 - RNA, 19 nt, Artificial Sequence
  Description of Artificial Sequence: Synthetic oligonucleotide
ggcguuugacagcuugggu

SEQ ID NO: 3031371 - RNA, 19 nt, Artificial Sequence
  Description of Artificial Sequence: Synthetic oligonucleotide
ggccgccuuugcccgcugg

SEQ ID NO: 3031372 - RNA, 19 nt, Artificial Sequence
  Description of Artificial Sequence: Synthetic oligonucleotide
agucggcauugcagaccuc

SEQ ID NO: 3031373 - RNA, 19 nt, Artificial Sequence
  Description of Artificial Sequence: Synthetic oligonucleotide
guucccggaaggucagguu

SEQ ID NO: 3031374 - RNA, 19 nt, Artificial Sequence
  Description of Artificial Sequence: Synthetic oligonucleotide
  modified_base (12)..(12): a, c, u, g, unknown or other
gggauugggganagcagau

SEQ ID NO: 3031375 - RNA, 19 nt, Artificial Sequence
  Description of Artificial Sequence: Synthetic oligonucleotide
ccauccagucggcauugca

SEQ ID NO: 3031376 - RNA, 19 nt, Artificial Sequence
  Description of Artificial Sequence: Synthetic oligonucleotide
ccuccgaggccgccuuugc

SEQ ID NO: 3031377 - RNA, 19 nt, Artificial Sequence
  Description of Artificial Sequence: Synthetic oligonucleotide
agccugggauugccagauu

SEQ ID NO: 3031378 - RNA, 19 nt, Artificial Sequence
  Description of Artificial Sequence: Synthetic oligonucleotide
agauccgggcgaggcguuu

SEQ ID NO: 3031379 - RNA, 19 nt, Artificial Sequence
  Description of Artificial Sequence: Synthetic oligonucleotide
cguuugacagcuuggguuu

SEQ ID NO: 3031380 - RNA, 19 nt, Artificial Sequence
  Description of Artificial Sequence: Synthetic oligonucleotide
cagcccagugccacucacu

SEQ ID NO: 3031381 - RNA, 19 nt, Artificial Sequence
  Description of Artificial Sequence: Synthetic oligonucleotide
aucccagccuccagcuguu

SEQ ID NO: 3031382 - RNA, 19 nt, Artificial Sequence
  Description of Artificial Sequence: Synthetic oligonucleotide
ccgggcgaggcguuugaca

SEQ ID NO: 3031383 - RNA, 19 nt, Artificial Sequence
  Description of Artificial Sequence: Synthetic oligonucleotide
ccccacuggggacuuuuca

SEQ ID NO: 3031384 - RNA, 19 nt, Artificial Sequence
  Description of Artificial Sequence: Synthetic oligonucleotide
ccuggccuuucuaaaugcu

SEQ ID NO: 3031385 - RNA, 19 nt, Artificial Sequence
  Description of Artificial Sequence: Synthetic oligonucleotide
gggagcgaggccauccagu

SEQ ID NO: 3031386 - RNA, 19 nt, Artificial Sequence
  Description of Artificial Sequence: Synthetic oligonucleotide
ggucagguucugaguuaca

SEQ ID NO: 3031387 - RNA, 19 nt, Artificial Sequence
  Description of Artificial Sequence: Synthetic oligonucleotide
ccccauccugaguuuccuc

SEQ ID NO: 3031388 - RNA, 19 nt, Artificial Sequence
  Description of Artificial Sequence: Synthetic oligonucleotide
  modified_base (19)..(19): a, c, u, g, unknown or other
gcccgcugggauuggggan

SEQ ID NO: 3031389 - RNA, 19 nt, Artificial Sequence
  Description of Artificial Sequence: Synthetic oligonucleotide
guucugaguuacagaccau

SEQ ID NO: 3031390 - RNA, 19 nt, Artificial Sequence
  Description of Artificial Sequence: Synthetic oligonucleotide
ccauccugaguuuccuccu

SEQ ID NO: 3031391 - RNA, 19 nt, Artificial Sequence
  Description of Artificial Sequence: Synthetic oligonucleotide
aggccgccuuugcccgcug

SEQ ID NO: 3031392 - RNA, 19 nt, Artificial Sequence
  Description of Artificial Sequence: Synthetic oligonucleotide
gaggccgccuuugcccgcu

SEQ ID NO: 3031393 - RNA, 19 nt, Artificial Sequence
  Description of Artificial Sequence: Synthetic oligonucleotide
cccucuuguccacgaauua

SEQ ID NO: 3031394 - RNA, 19 nt, Artificial Sequence
  Description of Artificial Sequence: Synthetic oligonucleotide
gcagaccuccgaggccgcc

SEQ ID NO: 3031395 - RNA, 19 nt, Artificial Sequence
  Description of Artificial Sequence: Synthetic oligonucleotide
  modified_base (18)..(18): a, c, u, g, unknown or other
cccgcugggauuggggana

SEQ ID NO: 3031396 - RNA, 19 nt, Artificial Sequence
  Description of Artificial Sequence: Synthetic oligonucleotide
gccauccagucggcauugc

SEQ ID NO: 3031397 - RNA, 19 nt, Artificial Sequence
  Description of Artificial Sequence: Synthetic oligonucleotide
cagaccuccgaggccgccu

SEQ ID NO: 3031398 - RNA, 19 nt, Artificial Sequence
  Description of Artificial Sequence: Synthetic oligonucleotide
  modified_base (17)..(17): a, c, u, g, unknown or other
ccgcugggauugggganag

SEQ ID NO: 3031399 - RNA, 19 nt, Artificial Sequence
  Description of Artificial Sequence: Synthetic oligonucleotide
cccggaaggucagguucug

SEQ ID NO: 3031400 - RNA, 19 nt, Artificial Sequence
  Description of Artificial Sequence: Synthetic oligonucleotide
gccuuugcccgcugggauu

SEQ ID NO: 3031401 - RNA, 19 nt, Artificial Sequence
  Description of Artificial Sequence: Synthetic oligonucleotide
cggcauugcagaccuccga

SEQ ID NO: 3031402 - RNA, 19 nt, Artificial Sequence
  Description of Artificial Sequence: Synthetic oligonucleotide
gcgaggccauccagucggc

SEQ ID NO: 3031403 - RNA, 19 nt, Artificial Sequence
  Description of Artificial Sequence: Synthetic oligonucleotide
ggcucagcccagugccacu

SEQ ID NO: 3031404 - RNA, 19 nt, Artificial Sequence
  Description of Artificial Sequence: Synthetic oligonucleotide
gagauccgggcgaggcguu

SEQ ID NO: 3031405 - RNA, 19 nt, Artificial Sequence
  Description of Artificial Sequence: Synthetic oligonucleotide
cgaggccgccuuugcccgc

SEQ ID NO: 3031406 - RNA, 19 nt, Artificial Sequence
  Description of Artificial Sequence: Synthetic oligonucleotide
ccgccuuugcccgcuggga

SEQ ID NO: 3031407 - RNA, 19 nt, Artificial Sequence
  Description of Artificial Sequence: Synthetic oligonucleotide
gccccacuggggacuuuuc

SEQ ID NO: 3031408 - RNA, 19 nt, Artificial Sequence
  Description of Artificial Sequence: Synthetic oligonucleotide
  modified_base (16)..(16): a, c, u, g, unknown or other
cgcugggauugggganagc

SEQ ID NO: 3031409 - RNA, 19 nt, Artificial Sequence
  Description of Artificial Sequence: Synthetic oligonucleotide
gaccuccgaggccgccuuu

SEQ ID NO: 3031410 - RNA, 19 nt, Artificial Sequence
  Description of Artificial Sequence: Synthetic oligonucleotide
ccggaaggucagguucuga

SEQ ID NO: 3031411 - RNA, 19 nt, Artificial Sequence
  Description of Artificial Sequence: Synthetic oligonucleotide
ggccccacuggggacuuuu

SEQ ID NO: 3031412 - RNA, 19 nt, Artificial Sequence
  Description of Artificial Sequence: Synthetic oligonucleotide
cgaggccauccagucggca

SEQ ID NO: 3031413 - RNA, 19 nt, Artificial Sequence
  Description of Artificial Sequence: Synthetic oligonucleotide
aggccccacuggggacuuu

SEQ ID NO: 3031414 - RNA, 19 nt, Artificial Sequence
  Description of Artificial Sequence: Synthetic oligonucleotide
cgccuuugcccgcugggau

SEQ ID NO: 3031415 - RNA, 19 nt, Artificial Sequence
  Description of Artificial Sequence: Synthetic oligonucleotide
gcgaggcguuugacagcuu

SEQ ID NO: 3031416 - RNA, 19 nt, Artificial Sequence
  Description of Artificial Sequence: Synthetic oligonucleotide
  modified_base (1)..(1): a, c, u, g, unknown or other
nagcagaugguccccaucc

SEQ ID NO: 3031417 - RNA, 19 nt, Artificial Sequence
  Description of Artificial Sequence: Synthetic oligonucleotide
aaggaaggcagauucaggc

SEQ ID NO: 3031418 - RNA, 19 nt, Artificial Sequence
  Description of Artificial Sequence: Synthetic oligonucleotide
agaaaaggaaggcagauuc

SEQ ID NO: 3031419 - RNA, 19 nt, Artificial Sequence
  Description of Artificial Sequence: Synthetic oligonucleotide
aaugcagccucauugggcg

SEQ ID NO: 3031420 - RNA, 19 nt, Artificial Sequence
  Description of Artificial Sequence: Synthetic oligonucleotide
aacaaugcagccucauugg

SEQ ID NO: 3031421 - RNA, 19 nt, Artificial Sequence
  Description of Artificial Sequence: Synthetic oligonucleotide
cagaacaagaaaaggaagg

SEQ ID NO: 3031422 - RNA, 19 nt, Artificial Sequence
  Description of Artificial Sequence: Synthetic oligonucleotide
agaacaagaaaaggaaggc

SEQ ID NO: 3031423 - RNA, 19 nt, Artificial Sequence
  Description of Artificial Sequence: Synthetic oligonucleotide
aagacagaacaagaaaagg

SEQ ID NO: 3031424 - RNA, 19 nt, Artificial Sequence
  Description of Artificial Sequence: Synthetic oligonucleotide
aaacuaguucaccaguuca

SEQ ID NO: 3031425 - RNA, 19 nt, Artificial Sequence
  Description of Artificial Sequence: Synthetic oligonucleotide
aaaaggaaggcagauucag

SEQ ID NO: 3031426 - RNA, 19 nt, Artificial Sequence
  Description of Artificial Sequence: Synthetic oligonucleotide
uccaucagugccaacaaug

SEQ ID NO: 3031427 - RNA, 19 nt, Artificial Sequence
  Description of Artificial Sequence: Synthetic oligonucleotide
uguggugguaucuucugcg

SEQ ID NO: 3031428 - RNA, 19 nt, Artificial Sequence
  Description of Artificial Sequence: Synthetic oligonucleotide
uucaauugguccuuguucu

SEQ ID NO: 3031429 - RNA, 19 nt, Artificial Sequence
  Description of Artificial Sequence: Synthetic oligonucleotide
ugcaccaugcuauagccag

SEQ ID NO: 3031430 - RNA, 19 nt, Artificial Sequence
  Description of Artificial Sequence: Synthetic oligonucleotide
cauacugucaaaggcaucc

SEQ ID NO: 3031431 - RNA, 19 nt, Artificial Sequence
  Description of Artificial Sequence: Synthetic oligonucleotide
gaagacagaacaagaaaag

SEQ ID NO: 3031432 - RNA, 19 nt, Artificial Sequence
  Description of Artificial Sequence: Synthetic oligonucleotide
uguucaauucuugaaguug

SEQ ID NO: 3031433 - RNA, 19 nt, Artificial Sequence
  Description of Artificial Sequence: Synthetic oligonucleotide
ucuguucaauucuugaagu

SEQ ID NO: 3031434 - RNA, 19 nt, Artificial Sequence
  Description of Artificial Sequence: Synthetic oligonucleotide
aguucaccaguucaauugg

SEQ ID NO: 3031435 - RNA, 19 nt, Artificial Sequence
  Description of Artificial Sequence: Synthetic oligonucleotide
agugcgcuccaucagugcc

SEQ ID NO: 3031436 - RNA, 19 nt, Artificial Sequence
  Description of Artificial Sequence: Synthetic oligonucleotide
caugcuauagccagugcgc

SEQ ID NO: 3031437 - RNA, 19 nt, Artificial Sequence
  Description of Artificial Sequence: Synthetic oligonucleotide
cugucaaaggcauccacgg

SEQ ID NO: 3031438 - RNA, 19 nt, Artificial Sequence
  Description of Artificial Sequence: Synthetic oligonucleotide
guuggaucgcuauucauug

SEQ ID NO: 3031439 - RNA, 19 nt, Artificial Sequence
  Description of Artificial Sequence: Synthetic oligonucleotide
cuugcuuaggauuucucug

SEQ ID NO: 3031440 - RNA, 19 nt, Artificial Sequence
  Description of Artificial Sequence: Synthetic oligonucleotide
caacaaugcagccucauug

SEQ ID NO: 3031441 - RNA, 19 nt, Artificial Sequence
  Description of Artificial Sequence: Synthetic oligonucleotide
ucaccaguucaauuggucc

SEQ ID NO: 3031442 - RNA, 19 nt, Artificial Sequence
  Description of Artificial Sequence: Synthetic oligonucleotide
cucuguucaauucuugaag

SEQ ID NO: 3031443 - RNA, 19 nt, Artificial Sequence
  Description of Artificial Sequence: Synthetic oligonucleotide
ucugcggucauacugucaa

SEQ ID NO: 3031444 - RNA, 19 nt, Artificial Sequence
  Description of Artificial Sequence: Synthetic oligonucleotide
gaggaaacuaguucaccag

SEQ ID NO: 3031445 - RNA, 19 nt, Artificial Sequence
  Description of Artificial Sequence: Synthetic oligonucleotide
ucuucugcggucauacugu

SEQ ID NO: 3031446 - RNA, 19 nt, Artificial Sequence
  Description of Artificial Sequence: Synthetic oligonucleotide
caaaggaagacagaacaag

SEQ ID NO: 3031447 - RNA, 19 nt, Artificial Sequence
  Description of Artificial Sequence: Synthetic oligonucleotide
ucagugccaacaaugcagc

SEQ ID NO: 3031448 - RNA, 19 nt, Artificial Sequence
  Description of Artificial Sequence: Synthetic oligonucleotide
aucuucugcggucauacug

SEQ ID NO: 3031449 - RNA, 19 nt, Artificial Sequence
  Description of Artificial Sequence: Synthetic oligonucleotide
ucaauucuugaaguugucc

SEQ ID NO: 3031450 - RNA, 19 nt, Artificial Sequence
  Description of Artificial Sequence: Synthetic oligonucleotide
uggaucgcuauucauugcu

SEQ ID NO: 3031451 - RNA, 19 nt, Artificial Sequence
  Description of Artificial Sequence: Synthetic oligonucleotide
uguuggaucgcuauucauu

SEQ ID NO: 3031452 - RNA, 19 nt, Artificial Sequence
  Description of Artificial Sequence: Synthetic oligonucleotide
cuuaggauuucucuguuca

SEQ ID NO: 3031453 - RNA, 19 nt, Artificial Sequence
  Description of Artificial Sequence: Synthetic oligonucleotide
ucaaaggcauccacggcug

SEQ ID NO: 3031454 - RNA, 19 nt, Artificial Sequence
  Description of Artificial Sequence: Synthetic oligonucleotide
aaaggaaggcagauucagg

SEQ ID NO: 3031455 - RNA, 19 nt, Artificial Sequence
  Description of Artificial Sequence: Synthetic oligonucleotide
aauugguccuuguucucca

SEQ ID NO: 3031456 - RNA, 19 nt, Artificial Sequence
  Description of Artificial Sequence: Synthetic oligonucleotide
ucuccaaaggaagacagaa

SEQ ID NO: 3031457 - RNA, 19 nt, Artificial Sequence
  Description of Artificial Sequence: Synthetic oligonucleotide
guucaauugguccuuguuc

SEQ ID NO: 3031458 - RNA, 19 nt, Artificial Sequence
  Description of Artificial Sequence: Synthetic oligonucleotide
uucucuguucaauucuuga

SEQ ID NO: 3031459 - RNA, 19 nt, Artificial Sequence
  Description of Artificial Sequence: Synthetic oligonucleotide
acgaagaccucgcagccuc

SEQ ID NO: 3031460 - RNA, 19 nt, Artificial Sequence
  Description of Artificial Sequence: Synthetic oligonucleotide
gauucaggcagcuugcuua

SEQ ID NO: 3031461 - RNA, 19 nt, Artificial Sequence
  Description of Artificial Sequence: Synthetic oligonucleotide
gacagaacaagaaaaggaa

SEQ ID NO: 3031462 - RNA, 19 nt, Artificial Sequence
  Description of Artificial Sequence: Synthetic oligonucleotide
ucgcuauucauugcugugg

SEQ ID NO: 3031463 - RNA, 19 nt, Artificial Sequence
  Description of Artificial Sequence: Synthetic oligonucleotide
uccuuguucuccaaaggaa

SEQ ID NO: 3031464 - RNA, 19 nt, Artificial Sequence
  Description of Artificial Sequence: Synthetic oligonucleotide
ugguccuuguucuccaaag

SEQ ID NO: 3031465 - RNA, 19 nt, Artificial Sequence
  Description of Artificial Sequence: Synthetic oligonucleotide
uugcuuaggauuucucugu

SEQ ID NO: 3031466 - RNA, 19 nt, Artificial Sequence
  Description of Artificial Sequence: Synthetic oligonucleotide
gaaacuaguucaccaguuc

SEQ ID NO: 3031467 - RNA, 19 nt, Artificial Sequence
  Description of Artificial Sequence: Synthetic oligonucleotide
uccugcaccaugcuauagc

SEQ ID NO: 3031468 - RNA, 19 nt, Artificial Sequence
  Description of Artificial Sequence: Synthetic oligonucleotide
acagaacaagaaaaggaag

SEQ ID NO: 3031469 - RNA, 19 nt, Artificial Sequence
  Description of Artificial Sequence: Synthetic oligonucleotide
ucaggcagcuugcuuagga

SEQ ID NO: 3031470 - RNA, 19 nt, Artificial Sequence
  Description of Artificial Sequence: Synthetic oligonucleotide
ucucuguucaauucuugaa

SEQ ID NO: 3031471 - RNA, 19 nt, Artificial Sequence
  Description of Artificial Sequence: Synthetic oligonucleotide
caaugcagccucauugggc

SEQ ID NO: 3031472 - RNA, 19 nt, Artificial Sequence
  Description of Artificial Sequence: Synthetic oligonucleotide
ggcagauucaggcagcuug

SEQ ID NO: 3031473 - RNA, 19 nt, Artificial Sequence
  Description of Artificial Sequence: Synthetic oligonucleotide
uauucauugcugugguggu

SEQ ID NO: 3031474 - RNA, 19 nt, Artificial Sequence
  Description of Artificial Sequence: Synthetic oligonucleotide
gaggaggaccccauguugg

SEQ ID NO: 3031475 - RNA, 19 nt, Artificial Sequence
  Description of Artificial Sequence: Synthetic oligonucleotide
aggaaacuaguucaccagu

SEQ ID NO: 3031476 - RNA, 19 nt, Artificial Sequence
  Description of Artificial Sequence: Synthetic oligonucleotide
uucaccaguucaauugguc

SEQ ID NO: 3031477 - RNA, 19 nt, Artificial Sequence
  Description of Artificial Sequence: Synthetic oligonucleotide
aaggaagacagaacaagaa

SEQ ID NO: 3031478 - RNA, 19 nt, Artificial Sequence
  Description of Artificial Sequence: Synthetic oligonucleotide
guucuccaaaggaagacag

SEQ ID NO: 3031479 - RNA, 19 nt, Artificial Sequence
  Description of Artificial Sequence: Synthetic oligonucleotide
ugcggucauacugucaaag

SEQ ID NO: 3031480 - RNA, 19 nt, Artificial Sequence
  Description of Artificial Sequence: Synthetic oligonucleotide
auagccagugcgcuccauc

SEQ ID NO: 3031481 - RNA, 19 nt, Artificial Sequence
  Description of Artificial Sequence: Synthetic oligonucleotide
aggaccccauguuggaucg

SEQ ID NO: 3031482 - RNA, 19 nt, Artificial Sequence
  Description of Artificial Sequence: Synthetic oligonucleotide
auucaggcagcuugcuuag

SEQ ID NO: 3031483 - RNA, 19 nt, Artificial Sequence
  Description of Artificial Sequence: Synthetic oligonucleotide
uuggaggaggaccccaugu

SEQ ID NO: 3031484 - RNA, 19 nt, Artificial Sequence
  Description of Artificial Sequence: Synthetic oligonucleotide
gaacaagaaaaggaaggca

SEQ ID NO: 3031485 - RNA, 19 nt, Artificial Sequence
  Description of Artificial Sequence: Synthetic oligonucleotide
uguucuccaaaggaagaca

SEQ ID NO: 3031486 - RNA, 19 nt, Artificial Sequence
  Description of Artificial Sequence: Synthetic oligonucleotide
gaucuugcccacgaagacc

SEQ ID NO: 3031487 - RNA, 19 nt, Artificial Sequence
  Description of Artificial Sequence: Synthetic oligonucleotide
aucgcuauucauugcugug

SEQ ID NO: 3031488 - RNA, 19 nt, Artificial Sequence
  Description of Artificial Sequence: Synthetic oligonucleotide
guaucuucugcggucauac

SEQ ID NO: 3031489 - RNA, 19 nt, Artificial Sequence
  Description of Artificial Sequence: Synthetic oligonucleotide
gaccucgcagccucgcugg

SEQ ID NO: 3031490 - RNA, 19 nt, Artificial Sequence
  Description of Artificial Sequence: Synthetic oligonucleotide
aaggcauccacggcuggag

SEQ ID NO: 3031491 - RNA, 19 nt, Artificial Sequence
  Description of Artificial Sequence: Synthetic oligonucleotide
gcuggaggaaacuaguuca

SEQ ID NO: 3031492 - RNA, 19 nt, Artificial Sequence
  Description of Artificial Sequence: Synthetic oligonucleotide
uucuccaaaggaagacaga

SEQ ID NO: 3031493 - RNA, 19 nt, Artificial Sequence
  Description of Artificial Sequence: Synthetic oligonucleotide
caauugguccuuguucucc

SEQ ID NO: 3031494 - RNA, 19 nt, Artificial Sequence
  Description of Artificial Sequence: Synthetic oligonucleotide
guggugguaucuucugcgg

SEQ ID NO: 3031495 - RNA, 19 nt, Artificial Sequence
  Description of Artificial Sequence: Synthetic oligonucleotide
uuguucuccaaaggaagac

SEQ ID NO: 3031496 - RNA, 19 nt, Artificial Sequence
  Description of Artificial Sequence: Synthetic oligonucleotide
ugcuguggugguaucuucu

SEQ ID NO: 3031497 - RNA, 19 nt, Artificial Sequence
  Description of Artificial Sequence: Synthetic oligonucleotide
uucaauucuugaaguuguc

SEQ ID NO: 3031498 - RNA, 19 nt, Artificial Sequence
  Description of Artificial Sequence: Synthetic oligonucleotide
ccaugcuauagccagugcg

SEQ ID NO: 3031499 - RNA, 19 nt, Artificial Sequence
  Description of Artificial Sequence: Synthetic oligonucleotide
aacuaguucaccaguucaa

SEQ ID NO: 3031500 - RNA, 19 nt, Artificial Sequence
  Description of Artificial Sequence: Synthetic oligonucleotide
aguucaauugguccuuguu

SEQ ID NO: 3031501 - RNA, 19 nt, Artificial Sequence
  Description of Artificial Sequence: Synthetic oligonucleotide
cuuguucuccaaaggaaga

SEQ ID NO: 3031502 - RNA, 19 nt, Artificial Sequence
  Description of Artificial Sequence: Synthetic oligonucleotide
uagccagugcgcuccauca

SEQ ID NO: 3031503 - RNA, 19 nt, Artificial Sequence
  Description of Artificial Sequence: Synthetic oligonucleotide
aggauuucucuguucaauu

SEQ ID NO: 3031504 - RNA, 19 nt, Artificial Sequence
  Description of Artificial Sequence: Synthetic oligonucleotide
accaugcuauagccagugc

SEQ ID NO: 3031505 - RNA, 19 nt, Artificial Sequence
  Description of Artificial Sequence: Synthetic oligonucleotide
agugccaacaaugcagccu

SEQ ID NO: 3031506 - RNA, 19 nt, Artificial Sequence
  Description of Artificial Sequence: Synthetic oligonucleotide
ccuuguucuccaaaggaag

SEQ ID NO: 3031507 - RNA, 19 nt, Artificial Sequence
  Description of Artificial Sequence: Synthetic oligonucleotide
uaggauuucucuguucaau

SEQ ID NO: 3031508 - RNA, 19 nt, Artificial Sequence
  Description of Artificial Sequence: Synthetic oligonucleotide
gugccaacaaugcagccuc

SEQ ID NO: 3031509 - RNA, 19 nt, Artificial Sequence
  Description of Artificial Sequence: Synthetic oligonucleotide
cacggcuggaggaaacuag

SEQ ID NO: 3031510 - RNA, 19 nt, Artificial Sequence
  Description of Artificial Sequence: Synthetic oligonucleotide
uucauugcuguggugguau

SEQ ID NO: 3031511 - RNA, 19 nt, Artificial Sequence
  Description of Artificial Sequence: Synthetic oligonucleotide
uuaggauuucucuguucaa

SEQ ID NO: 3031512 - RNA, 19 nt, Artificial Sequence
  Description of Artificial Sequence: Synthetic oligonucleotide
guccuuguucuccaaagga

SEQ ID NO: 3031513 - RNA, 19 nt, Artificial Sequence
  Description of Artificial Sequence: Synthetic oligonucleotide
cuccaaaggaagacagaac

SEQ ID NO: 3031514 - RNA, 19 nt, Artificial Sequence
  Description of Artificial Sequence: Synthetic oligonucleotide
auugggcgcaccugccacg

SEQ ID NO: 3031515 - RNA, 19 nt, Artificial Sequence
  Description of Artificial Sequence: Synthetic oligonucleotide
gucaaaggcauccacggcu

SEQ ID NO: 3031516 - RNA, 19 nt, Artificial Sequence
  Description of Artificial Sequence: Synthetic oligonucleotide
uggaggaaacuaguucacc

SEQ ID NO: 3031517 - RNA, 19 nt, Artificial Sequence
  Description of Artificial Sequence: Synthetic oligonucleotide
acaagaaaaggaaggcaga

SEQ ID NO: 3031518 - RNA, 19 nt, Artificial Sequence
  Description of Artificial Sequence: Synthetic oligonucleotide
ucauugggcgcaccugcca

SEQ ID NO: 3031519 - RNA, 19 nt, Artificial Sequence
  Description of Artificial Sequence: Synthetic oligonucleotide
uuggaucgcuauucauugc

SEQ ID NO: 3031520 - RNA, 19 nt, Artificial Sequence
  Description of Artificial Sequence: Synthetic oligonucleotide
gggcccaccauacuuggcg

SEQ ID NO: 3031521 - RNA, 19 nt, Artificial Sequence
  Description of Artificial Sequence: Synthetic oligonucleotide
gguccuuguucuccaaagg

SEQ ID NO: 3031522 - RNA, 19 nt, Artificial Sequence
  Description of Artificial Sequence: Synthetic oligonucleotide
cuugcccacgaagaccucg

SEQ ID NO: 3031523 - RNA, 19 nt, Artificial Sequence
  Description of Artificial Sequence: Synthetic oligonucleotide
gaggaccccauguuggauc

SEQ ID NO: 3031524 - RNA, 19 nt, Artificial Sequence
  Description of Artificial Sequence: Synthetic oligonucleotide
gaaaaggaaggcagauuca

SEQ ID NO: 3031525 - RNA, 19 nt, Artificial Sequence
  Description of Artificial Sequence: Synthetic oligonucleotide
uugcccacgaagaccucgc

SEQ ID NO: 3031526 - RNA, 19 nt, Artificial Sequence
  Description of Artificial Sequence: Synthetic oligonucleotide
uggugguaucuucugcggu

SEQ ID NO: 3031527 - RNA, 19 nt, Artificial Sequence
  Description of Artificial Sequence: Synthetic oligonucleotide
ccaucagugccaacaaugc

SEQ ID NO: 3031528 - RNA, 19 nt, Artificial Sequence
  Description of Artificial Sequence: Synthetic oligonucleotide
accugccacgcccucuggc

SEQ ID NO: 3031529 - RNA, 19 nt, Artificial Sequence
  Description of Artificial Sequence: Synthetic oligonucleotide
ucaauugguccuuguucuc

SEQ ID NO: 3031530 - RNA, 19 nt, Artificial Sequence
  Description of Artificial Sequence: Synthetic oligonucleotide
ccauacuuggcgcugcccg

SEQ ID NO: 3031531 - RNA, 19 nt, Artificial Sequence
  Description of Artificial Sequence: Synthetic oligonucleotide
agaccucgcagccucgcug

SEQ ID NO: 3031532 - RNA, 19 nt, Artificial Sequence
  Description of Artificial Sequence: Synthetic oligonucleotide
aaaggcauccacggcugga

SEQ ID NO: 3031533 - RNA, 19 nt, Artificial Sequence
  Description of Artificial Sequence: Synthetic oligonucleotide
ugcccguucuccugcacca

SEQ ID NO: 3031534 - RNA, 19 nt, Artificial Sequence
  Description of Artificial Sequence: Synthetic oligonucleotide
ggucauacugucaaaggca

SEQ ID NO: 3031535 - RNA, 19 nt, Artificial Sequence
  Description of Artificial Sequence: Synthetic oligonucleotide
cuguggugguaucuucugc

SEQ ID NO: 3031536 - RNA, 19 nt, Artificial Sequence
  Description of Artificial Sequence: Synthetic oligonucleotide
augcggggcccucccagcc

SEQ ID NO: 3031537 - RNA, 19 nt, Artificial Sequence
  Description of Artificial Sequence: Synthetic oligonucleotide
ccugcaccaugcuauagcc

SEQ ID NO: 3031538 - RNA, 19 nt, Artificial Sequence
  Description of Artificial Sequence: Synthetic oligonucleotide
ucauacugucaaaggcauc

SEQ ID NO: 3031539 - RNA, 19 nt, Artificial Sequence
  Description of Artificial Sequence: Synthetic oligonucleotide
cucauugggcgcaccugcc

SEQ ID NO: 3031540 - RNA, 19 nt, Artificial Sequence
  Description of Artificial Sequence: Synthetic oligonucleotide
cccacgaagaccucgcagc

SEQ ID NO: 3031541 - RNA, 19 nt, Artificial Sequence
  Description of Artificial Sequence: Synthetic oligonucleotide
gaucgcuauucauugcugu

SEQ ID NO: 3031542 - RNA, 19 nt, Artificial Sequence
  Description of Artificial Sequence: Synthetic oligonucleotide
gcuauagccagugcgcucc

SEQ ID NO: 3031543 - RNA, 19 nt, Artificial Sequence
  Description of Artificial Sequence: Synthetic oligonucleotide
guucaauucuugaaguugu

SEQ ID NO: 3031544 - RNA, 19 nt, Artificial Sequence
  Description of Artificial Sequence: Synthetic oligonucleotide
gcggucauacugucaaagg

SEQ ID NO: 3031545 - RNA, 19 nt, Artificial Sequence
  Description of Artificial Sequence: Synthetic oligonucleotide
aagaccucgcagccucgcu

SEQ ID NO: 3031546 - RNA, 19 nt, Artificial Sequence
  Description of Artificial Sequence: Synthetic oligonucleotide
acuaguucaccaguucaau

SEQ ID NO: 3031547 - RNA, 19 nt, Artificial Sequence
  Description of Artificial Sequence: Synthetic oligonucleotide
ggcccucccagccaggagg

SEQ ID NO: 3031548 - RNA, 19 nt, Artificial Sequence
  Description of Artificial Sequence: Synthetic oligonucleotide
aaggcagauucaggcagcu

SEQ ID NO: 3031549 - RNA, 19 nt, Artificial Sequence
  Description of Artificial Sequence: Synthetic oligonucleotide
uugguccuuguucuccaaa

SEQ ID NO: 3031550 - RNA, 19 nt, Artificial Sequence
  Description of Artificial Sequence: Synthetic oligonucleotide
cauugggcgcaccugccac

SEQ ID NO: 3031551 - RNA, 19 nt, Artificial Sequence
  Description of Artificial Sequence: Synthetic oligonucleotide
ggaggaggaccccauguug

SEQ ID NO: 3031552 - RNA, 19 nt, Artificial Sequence
  Description of Artificial Sequence: Synthetic oligonucleotide
uggaggaggaccccauguu

SEQ ID NO: 3031553 - RNA, 19 nt, Artificial Sequence
  Description of Artificial Sequence: Synthetic oligonucleotide
uucugcggucauacuguca

SEQ ID NO: 3031554 - RNA, 19 nt, Artificial Sequence
  Description of Artificial Sequence: Synthetic oligonucleotide
ugcuuaggauuucucuguu

SEQ ID NO: 3031555 - RNA, 19 nt, Artificial Sequence
  Description of Artificial Sequence: Synthetic oligonucleotide
ggugguaucuucugcgguc

SEQ ID NO: 3031556 - RNA, 19 nt, Artificial Sequence
  Description of Artificial Sequence: Synthetic oligonucleotide
cauguuggaucgcuauuca

SEQ ID NO: 3031557 - RNA, 19 nt, Artificial Sequence
  Description of Artificial Sequence: Synthetic oligonucleotide
augcagccucauugggcgc

SEQ ID NO: 3031558 - RNA, 19 nt, Artificial Sequence
  Description of Artificial Sequence: Synthetic oligonucleotide
aggcauccacggcuggagg

SEQ ID NO: 3031559 - RNA, 19 nt, Artificial Sequence
  Description of Artificial Sequence: Synthetic oligonucleotide
gaugcggggcccucccagc

SEQ ID NO: 3031560 - RNA, 19 nt, Artificial Sequence
  Description of Artificial Sequence: Synthetic oligonucleotide
auguuggaucgcuauucau

SEQ ID NO: 3031561 - RNA, 19 nt, Artificial Sequence
  Description of Artificial Sequence: Synthetic oligonucleotide
ugcuauagccagugcgcuc

SEQ ID NO: 3031562 - RNA, 19 nt, Artificial Sequence
  Description of Artificial Sequence: Synthetic oligonucleotide
caccaugcuauagccagug

SEQ ID NO: 3031563 - RNA, 19 nt, Artificial Sequence
  Description of Artificial Sequence: Synthetic oligonucleotide
aggcagcuugcuuaggauu

SEQ ID NO: 3031564 - RNA, 19 nt, Artificial Sequence
  Description of Artificial Sequence: Synthetic oligonucleotide
ggcuggaggaaacuaguuc

SEQ ID NO: 3031565 - RNA, 19 nt, Artificial Sequence
  Description of Artificial Sequence: Synthetic oligonucleotide
agauucaggcagcuugcuu

SEQ ID NO: 3031566 - RNA, 19 nt, Artificial Sequence
  Description of Artificial Sequence: Synthetic oligonucleotide
cugcccguucuccugcacc

SEQ ID NO: 3031567 - RNA, 19 nt, Artificial Sequence
  Description of Artificial Sequence: Synthetic oligonucleotide
uaucuucugcggucauacu

SEQ ID NO: 3031568 - RNA, 19 nt, Artificial Sequence
  Description of Artificial Sequence: Synthetic oligonucleotide
aggaggaccccauguugga

SEQ ID NO: 3031569 - RNA, 19 nt, Artificial Sequence
  Description of Artificial Sequence: Synthetic oligonucleotide
auugcuguggugguaucuu

SEQ ID NO: 3031570 - RNA, 19 nt, Artificial Sequence
  Description of Artificial Sequence: Synthetic oligonucleotide
agccagugcgcuccaucag

SEQ ID NO: 3031571 - RNA, 19 nt, Artificial Sequence
  Description of Artificial Sequence: Synthetic oligonucleotide
augcuauagccagugcgcu

SEQ ID NO: 3031572 - RNA, 19 nt, Artificial Sequence
  Description of Artificial Sequence: Synthetic oligonucleotide
caucagugccaacaaugca

SEQ ID NO: 3031573 - RNA, 19 nt, Artificial Sequence
  Description of Artificial Sequence: Synthetic oligonucleotide
ugcagccucauugggcgca

SEQ ID NO: 3031574 - RNA, 19 nt, Artificial Sequence
  Description of Artificial Sequence: Synthetic oligonucleotide
cggucauacugucaaaggc

SEQ ID NO: 3031575 - RNA, 19 nt, Artificial Sequence
  Description of Artificial Sequence: Synthetic oligonucleotide
uugcuguggugguaucuuc

SEQ ID NO: 3031576 - RNA, 19 nt, Artificial Sequence
  Description of Artificial Sequence: Synthetic oligonucleotide
gaagaccucgcagccucgc

SEQ ID NO: 3031577 - RNA, 19 nt, Artificial Sequence
  Description of Artificial Sequence: Synthetic oligonucleotide
cuuggaggaggaccccaug

SEQ ID NO: 3031578 - RNA, 19 nt, Artificial Sequence
  Description of Artificial Sequence: Synthetic oligonucleotide
agccucauugggcgcaccu

SEQ ID NO: 3031579 - RNA, 19 nt, Artificial Sequence
  Description of Artificial Sequence: Synthetic oligonucleotide
agcuugcuuaggauuucuc

SEQ ID NO: 3031580 - RNA, 19 nt, Artificial Sequence
  Description of Artificial Sequence: Synthetic oligonucleotide
cagugccaacaaugcagcc

SEQ ID NO: 3031581 - RNA, 19 nt, Artificial Sequence
  Description of Artificial Sequence: Synthetic oligonucleotide
ucgcuggggaugcggggcc

SEQ ID NO: 3031582 - RNA, 19 nt, Artificial Sequence
  Description of Artificial Sequence: Synthetic oligonucleotide
cucgcuggggaugcggggc

SEQ ID NO: 3031583 - RNA, 19 nt, Artificial Sequence
  Description of Artificial Sequence: Synthetic oligonucleotide
ccucauugggcgcaccugc

SEQ ID NO: 3031584 - RNA, 19 nt, Artificial Sequence
  Description of Artificial Sequence: Synthetic oligonucleotide
cuucugcggucauacuguc

SEQ ID NO: 3031585 - RNA, 19 nt, Artificial Sequence
  Description of Artificial Sequence: Synthetic oligonucleotide
cagugcgcuccaucagugc

SEQ ID NO: 3031586 - RNA, 19 nt, Artificial Sequence
  Description of Artificial Sequence: Synthetic oligonucleotide
auacugucaaaggcaucca

SEQ ID NO: 3031587 - RNA, 19 nt, Artificial Sequence
  Description of Artificial Sequence: Synthetic oligonucleotide
gcuguggugguaucuucug

SEQ ID NO: 3031588 - RNA, 19 nt, Artificial Sequence
  Description of Artificial Sequence: Synthetic oligonucleotide
uuggcgcugcccguucucc

SEQ ID NO: 3031589 - RNA, 19 nt, Artificial Sequence
  Description of Artificial Sequence: Synthetic oligonucleotide
uugggcgcaccugccacgc

SEQ ID NO: 3031590 - RNA, 19 nt, Artificial Sequence
  Description of Artificial Sequence: Synthetic oligonucleotide
ucuccugcaccaugcuaua

SEQ ID NO: 3031591 - RNA, 19 nt, Artificial Sequence
  Description of Artificial Sequence: Synthetic oligonucleotide
caccaguucaauugguccu

SEQ ID NO: 3031592 - RNA, 19 nt, Artificial Sequence
  Description of Artificial Sequence: Synthetic oligonucleotide
gcagauucaggcagcuugc

SEQ ID NO: 3031593 - RNA, 19 nt, Artificial Sequence
  Description of Artificial Sequence: Synthetic oligonucleotide
auccacggcuggaggaaac

SEQ ID NO: 3031594 - RNA, 19 nt, Artificial Sequence
  Description of Artificial Sequence: Synthetic oligonucleotide
ucauugcuguggugguauc

SEQ ID NO: 3031595 - RNA, 19 nt, Artificial Sequence
  Description of Artificial Sequence: Synthetic oligonucleotide
ugccaacaaugcagccuca

SEQ ID NO: 3031596 - RNA, 19 nt, Artificial Sequence
  Description of Artificial Sequence: Synthetic oligonucleotide
acggcuggaggaaacuagu

SEQ ID NO: 3031597 - RNA, 19 nt, Artificial Sequence
  Description of Artificial Sequence: Synthetic oligonucleotide
uccacggcuggaggaaacu

SEQ ID NO: 3031598 - RNA, 19 nt, Artificial Sequence
  Description of Artificial Sequence: Synthetic oligonucleotide
gugguaucuucugcgguca

SEQ ID NO: 3031599 - RNA, 19 nt, Artificial Sequence
  Description of Artificial Sequence: Synthetic oligonucleotide
gcaccuuggaggaggaccc

SEQ ID NO: 3031600 - RNA, 19 nt, Artificial Sequence
  Description of Artificial Sequence: Synthetic oligonucleotide
ccauguuggaucgcuauuc

SEQ ID NO: 3031601 - RNA, 19 nt, Artificial Sequence
  Description of Artificial Sequence: Synthetic oligonucleotide
gcuugcuuaggauuucucu

SEQ ID NO: 3031602 - RNA, 19 nt, Artificial Sequence
  Description of Artificial Sequence: Synthetic oligonucleotide
ugcccacgaagaccucgca

SEQ ID NO: 3031603 - RNA, 19 nt, Artificial Sequence
  Description of Artificial Sequence: Synthetic oligonucleotide
ggaugcggggcccucccag

SEQ ID NO: 3031604 - RNA, 19 nt, Artificial Sequence
  Description of Artificial Sequence: Synthetic oligonucleotide
caccauacuuggcgcugcc

SEQ ID NO: 3031605 - RNA, 19 nt, Artificial Sequence
  Description of Artificial Sequence: Synthetic oligonucleotide
uacuuggcgcugcccguuc

SEQ ID NO: 3031606 - RNA, 19 nt, Artificial Sequence
  Description of Artificial Sequence: Synthetic oligonucleotide
cucgcagccucgcugggga

SEQ ID NO: 3031607 - RNA, 19 nt, Artificial Sequence
  Description of Artificial Sequence: Synthetic oligonucleotide
accaguucaauugguccuu

SEQ ID NO: 3031608 - RNA, 19 nt, Artificial Sequence
  Description of Artificial Sequence: Synthetic oligonucleotide
gcuauucauugcuguggug

SEQ ID NO: 3031609 - RNA, 19 nt, Artificial Sequence
  Description of Artificial Sequence: Synthetic oligonucleotide
gucauacugucaaaggcau

SEQ ID NO: 3031610 - RNA, 19 nt, Artificial Sequence
  Description of Artificial Sequence: Synthetic oligonucleotide
ccguucuccugcaccaugc

SEQ ID NO: 3031611 - RNA, 19 nt, Artificial Sequence
  Description of Artificial Sequence: Synthetic oligonucleotide
ggaucgcuauucauugcug

SEQ ID NO: 3031612 - RNA, 19 nt, Artificial Sequence
  Description of Artificial Sequence: Synthetic oligonucleotide
ccacgaagaccucgcagcc

SEQ ID NO: 3031613 - RNA, 19 nt, Artificial Sequence
  Description of Artificial Sequence: Synthetic oligonucleotide
ugcggggcccucccagcca

SEQ ID NO: 3031614 - RNA, 19 nt, Artificial Sequence
  Description of Artificial Sequence: Synthetic oligonucleotide
ugcgcuccaucagugccaa

SEQ ID NO: 3031615 - RNA, 19 nt, Artificial Sequence
  Description of Artificial Sequence: Synthetic oligonucleotide
acuuggcgcugcccguucu

SEQ ID NO: 3031616 - RNA, 19 nt, Artificial Sequence
  Description of Artificial Sequence: Synthetic oligonucleotide
ugguaucuucugcggucau

SEQ ID NO: 3031617 - RNA, 19 nt, Artificial Sequence
  Description of Artificial Sequence: Synthetic oligonucleotide
ggcccaccauacuuggcgc

SEQ ID NO: 3031618 - RNA, 19 nt, Artificial Sequence
  Description of Artificial Sequence: Synthetic oligonucleotide
cugcaccaugcuauagcca

SEQ ID NO: 3031619 - RNA, 19 nt, Artificial Sequence
  Description of Artificial Sequence: Synthetic oligonucleotide
gcccacgaagaccucgcag

SEQ ID NO: 3031620 - RNA, 19 nt, Artificial Sequence
  Description of Artificial Sequence: Synthetic oligonucleotide
agccucgcuggggaugcgg

SEQ ID NO: 3031621 - RNA, 19 nt, Artificial Sequence
  Description of Artificial Sequence: Synthetic oligonucleotide
cugccacgcccucuggcac

SEQ ID NO: 3031622 - RNA, 19 nt, Artificial Sequence
  Description of Artificial Sequence: Synthetic oligonucleotide
guucuccugcaccaugcua

SEQ ID NO: 3031623 - RNA, 19 nt, Artificial Sequence
  Description of Artificial Sequence: Synthetic oligonucleotide
cuuggcgcugcccguucuc

SEQ ID NO: 3031624 - RNA, 19 nt, Artificial Sequence
  Description of Artificial Sequence: Synthetic oligonucleotide
ggcauccacggcuggagga

SEQ ID NO: 3031625 - RNA, 19 nt, Artificial Sequence
  Description of Artificial Sequence: Synthetic oligonucleotide
cuaguucaccaguucaauu

SEQ ID NO: 3031626 - RNA, 19 nt, Artificial Sequence
  Description of Artificial Sequence: Synthetic oligonucleotide
auucauugcugugguggua

SEQ ID NO: 3031627 - RNA, 19 nt, Artificial Sequence
  Description of Artificial Sequence: Synthetic oligonucleotide
ccagugcgcuccaucagug

SEQ ID NO: 3031628 - RNA, 19 nt, Artificial Sequence
  Description of Artificial Sequence: Synthetic oligonucleotide
cuccugcaccaugcuauag

SEQ ID NO: 3031629 - RNA, 19 nt, Artificial Sequence
  Description of Artificial Sequence: Synthetic oligonucleotide
gggcgcaccugccacgccc

SEQ ID NO: 3031630 - RNA, 19 nt, Artificial Sequence
  Description of Artificial Sequence: Synthetic oligonucleotide
uggcgcugcccguucuccu

SEQ ID NO: 3031631 - RNA, 19 nt, Artificial Sequence
  Description of Artificial Sequence: Synthetic oligonucleotide
cuguucaauucuugaaguu

SEQ ID NO: 3031632 - RNA, 19 nt, Artificial Sequence
  Description of Artificial Sequence: Synthetic oligonucleotide
uggggaugcggggcccucc

SEQ ID NO: 3031633 - RNA, 19 nt, Artificial Sequence
  Description of Artificial Sequence: Synthetic oligonucleotide
acgcccucuggcaccuugg

SEQ ID NO: 3031634 - RNA, 19 nt, Artificial Sequence
  Description of Artificial Sequence: Synthetic oligonucleotide
cauacuuggcgcugcccgu

SEQ ID NO: 3031635 - RNA, 19 nt, Artificial Sequence
  Description of Artificial Sequence: Synthetic oligonucleotide
auacuuggcgcugcccguu

SEQ ID NO: 3031636 - RNA, 19 nt, Artificial Sequence
  Description of Artificial Sequence: Synthetic oligonucleotide
gcaccugccacgcccucug

SEQ ID NO: 3031637 - RNA, 19 nt, Artificial Sequence
  Description of Artificial Sequence: Synthetic oligonucleotide
gaccccauguuggaucgcu

SEQ ID NO: 3031638 - RNA, 19 nt, Artificial Sequence
  Description of Artificial Sequence: Synthetic oligonucleotide
uauagccagugcgcuccau

SEQ ID NO: 3031639 - RNA, 19 nt, Artificial Sequence
  Description of Artificial Sequence: Synthetic oligonucleotide
gcuccaucagugccaacaa

SEQ ID NO: 3031640 - RNA, 19 nt, Artificial Sequence
  Description of Artificial Sequence: Synthetic oligonucleotide
gcccucuggcaccuuggag

SEQ ID NO: 3031641 - RNA, 19 nt, Artificial Sequence
  Description of Artificial Sequence: Synthetic oligonucleotide
gugcgcuccaucagugcca

SEQ ID NO: 3031642 - RNA, 19 nt, Artificial Sequence
  Description of Artificial Sequence: Synthetic oligonucleotide
ugggcgcaccugccacgcc

SEQ ID NO: 3031643 - RNA, 19 nt, Artificial Sequence
  Description of Artificial Sequence: Synthetic oligonucleotide
gcagccucgcuggggaugc

SEQ ID NO: 3031644 - RNA, 19 nt, Artificial Sequence
  Description of Artificial Sequence: Synthetic oligonucleotide
caccuuggaggaggacccc

SEQ ID NO: 3031645 - RNA, 19 nt, Artificial Sequence
  Description of Artificial Sequence: Synthetic oligonucleotide
ggaaacuaguucaccaguu

SEQ ID NO: 3031646 - RNA, 19 nt, Artificial Sequence
  Description of Artificial Sequence: Synthetic oligonucleotide
ggggaugcggggcccuccc

SEQ ID NO: 3031647 - RNA, 19 nt, Artificial Sequence
  Description of Artificial Sequence: Synthetic oligonucleotide
cuauagccagugcgcucca

SEQ ID NO: 3031648 - RNA, 19 nt, Artificial Sequence
  Description of Artificial Sequence: Synthetic oligonucleotide
cauugcuguggugguaucu

SEQ ID NO: 3031649 - RNA, 19 nt, Artificial Sequence
  Description of Artificial Sequence: Synthetic oligonucleotide
caccugccacgcccucugg

SEQ ID NO: 3031650 - RNA, 19 nt, Artificial Sequence
  Description of Artificial Sequence: Synthetic oligonucleotide
ccucgcuggggaugcgggg

SEQ ID NO: 3031651 - RNA, 19 nt, Artificial Sequence
  Description of Artificial Sequence: Synthetic oligonucleotide
ccugccacgcccucuggca

SEQ ID NO: 3031652 - RNA, 19 nt, Artificial Sequence
  Description of Artificial Sequence: Synthetic oligonucleotide
gcccucccagccaggaggg

SEQ ID NO: 3031653 - RNA, 19 nt, Artificial Sequence
  Description of Artificial Sequence: Synthetic oligonucleotide
caggcagcuugcuuaggau

SEQ ID NO: 3031654 - RNA, 19 nt, Artificial Sequence
  Description of Artificial Sequence: Synthetic oligonucleotide
caguucaauugguccuugu

SEQ ID NO: 3031655 - RNA, 19 nt, Artificial Sequence
  Description of Artificial Sequence: Synthetic oligonucleotide
gccucauugggcgcaccug

SEQ ID NO: 3031656 - RNA, 19 nt, Artificial Sequence
  Description of Artificial Sequence: Synthetic oligonucleotide
ccaccauacuuggcgcugc

SEQ ID NO: 3031657 - RNA, 19 nt, Artificial Sequence
  Description of Artificial Sequence: Synthetic oligonucleotide
gcggggcccucccagccag

SEQ ID NO: 3031658 - RNA, 19 nt, Artificial Sequence
  Description of Artificial Sequence: Synthetic oligonucleotide
cgcuccaucagugccaaca

SEQ ID NO: 3031659 - RNA, 19 nt, Artificial Sequence
  Description of Artificial Sequence: Synthetic oligonucleotide
cccguucuccugcaccaug

SEQ ID NO: 3031660 - RNA, 19 nt, Artificial Sequence
  Description of Artificial Sequence: Synthetic oligonucleotide
cccaccauacuuggcgcug

SEQ ID NO: 3031661 - RNA, 19 nt, Artificial Sequence
  Description of Artificial Sequence: Synthetic oligonucleotide
gccagugcgcuccaucagu

SEQ ID NO: 3031662 - RNA, 19 nt, Artificial Sequence
  Description of Artificial Sequence: Synthetic oligonucleotide
ggcagcuugcuuaggauuu

SEQ ID NO: 3031663 - RNA, 19 nt, Artificial Sequence
  Description of Artificial Sequence: Synthetic oligonucleotide
ccaguucaauugguccuug

SEQ ID NO: 3031664 - RNA, 19 nt, Artificial Sequence
  Description of Artificial Sequence: Synthetic oligonucleotide
gguaucuucugcggucaua

SEQ ID NO: 3031665 - RNA, 19 nt, Artificial Sequence
  Description of Artificial Sequence: Synthetic oligonucleotide
gcgcugcccguucuccugc

SEQ ID NO: 3031666 - RNA, 19 nt, Artificial Sequence
  Description of Artificial Sequence: Synthetic oligonucleotide
gcagcuugcuuaggauuuc

SEQ ID NO: 3031667 - RNA, 19 nt, Artificial Sequence
  Description of Artificial Sequence: Synthetic oligonucleotide
cugcggucauacugucaaa

SEQ ID NO: 3031668 - RNA, 19 nt, Artificial Sequence
  Description of Artificial Sequence: Synthetic oligonucleotide
ucgcagccucgcuggggau

SEQ ID NO: 3031669 - RNA, 19 nt, Artificial Sequence
  Description of Artificial Sequence: Synthetic oligonucleotide
gcauccacggcuggaggaa

SEQ ID NO: 3031670 - RNA, 19 nt, Artificial Sequence
  Description of Artificial Sequence: Synthetic oligonucleotide
cauccacggcuggaggaaa

SEQ ID NO: 3031671 - RNA, 19 nt, Artificial Sequence
  Description of Artificial Sequence: Synthetic oligonucleotide
cuccaucagugccaacaau

SEQ ID NO: 3031672 - RNA, 19 nt, Artificial Sequence
  Description of Artificial Sequence: Synthetic oligonucleotide
gggcccucccagccaggag

SEQ ID NO: 3031673 - RNA, 19 nt, Artificial Sequence
  Description of Artificial Sequence: Synthetic oligonucleotide
aggcagauucaggcagcuu

SEQ ID NO: 3031674 - RNA, 19 nt, Artificial Sequence
  Description of Artificial Sequence: Synthetic oligonucleotide
cagccucauugggcgcacc

SEQ ID NO: 3031675 - RNA, 19 nt, Artificial Sequence
  Description of Artificial Sequence: Synthetic oligonucleotide
ccucgcagccucgcugggg

SEQ ID NO: 3031676 - RNA, 19 nt, Artificial Sequence
  Description of Artificial Sequence: Synthetic oligonucleotide
cagauucaggcagcuugcu

SEQ ID NO: 3031677 - RNA, 19 nt, Artificial Sequence
  Description of Artificial Sequence: Synthetic oligonucleotide
cagcuugcuuaggauuucu

SEQ ID NO: 3031678 - RNA, 19 nt, Artificial Sequence
  Description of Artificial Sequence: Synthetic oligonucleotide
accccauguuggaucgcua

SEQ ID NO: 3031679 - RNA, 19 nt, Artificial Sequence
  Description of Artificial Sequence: Synthetic oligonucleotide
cacgaagaccucgcagccu

SEQ ID NO: 3031680 - RNA, 19 nt, Artificial Sequence
  Description of Artificial Sequence: Synthetic oligonucleotide
cuggggaugcggggcccuc

SEQ ID NO: 3031681 - RNA, 19 nt, Artificial Sequence
  Description of Artificial Sequence: Synthetic oligonucleotide
gcugcccguucuccugcac

SEQ ID NO: 3031682 - RNA, 19 nt, Artificial Sequence
  Description of Artificial Sequence: Synthetic oligonucleotide
cagccucgcuggggaugcg

SEQ ID NO: 3031683 - RNA, 19 nt, Artificial Sequence
  Description of Artificial Sequence: Synthetic oligonucleotide
ggaccccauguuggaucgc

SEQ ID NO: 3031684 - RNA, 19 nt, Artificial Sequence
  Description of Artificial Sequence: Synthetic oligonucleotide
cgcuauucauugcuguggu

SEQ ID NO: 3031685 - RNA, 19 nt, Artificial Sequence
  Description of Artificial Sequence: Synthetic oligonucleotide
gcagccucauugggcgcac

SEQ ID NO: 3031686 - RNA, 19 nt, Artificial Sequence
  Description of Artificial Sequence: Synthetic oligonucleotide
gcccaccauacuuggcgcu

SEQ ID NO: 3031687 - RNA, 19 nt, Artificial Sequence
  Description of Artificial Sequence: Synthetic oligonucleotide
gggaugcggggcccuccca

SEQ ID NO: 3031688 - RNA, 19 nt, Artificial Sequence
  Description of Artificial Sequence: Synthetic oligonucleotide
ccaacaaugcagccucauu

SEQ ID NO: 3031689 - RNA, 19 nt, Artificial Sequence
  Description of Artificial Sequence: Synthetic oligonucleotide
ccccauguuggaucgcuau

SEQ ID NO: 3031690 - RNA, 19 nt, Artificial Sequence
  Description of Artificial Sequence: Synthetic oligonucleotide
ggggcccucccagccagga

SEQ ID NO: 3031691 - RNA, 19 nt, Artificial Sequence
  Description of Artificial Sequence: Synthetic oligonucleotide
gccaacaaugcagccucau

SEQ ID NO: 3031692 - RNA, 19 nt, Artificial Sequence
  Description of Artificial Sequence: Synthetic oligonucleotide
ggaggaccccauguuggau

SEQ ID NO: 3031693 - RNA, 19 nt, Artificial Sequence
  Description of Artificial Sequence: Synthetic oligonucleotide
cgcagccucgcuggggaug

SEQ ID NO: 3031694 - RNA, 19 nt, Artificial Sequence
  Description of Artificial Sequence: Synthetic oligonucleotide
ccuuggaggaggaccccau

SEQ ID NO: 3031695 - RNA, 19 nt, Artificial Sequence
  Description of Artificial Sequence: Synthetic oligonucleotide
gcaccaugcuauagccagu

SEQ ID NO: 3031696 - RNA, 19 nt, Artificial Sequence
  Description of Artificial Sequence: Synthetic oligonucleotide
cccauguuggaucgcuauu

SEQ ID NO: 3031697 - RNA, 19 nt, Artificial Sequence
  Description of Artificial Sequence: Synthetic oligonucleotide
cccucccagccaggagggg

SEQ ID NO: 3031698 - RNA, 19 nt, Artificial Sequence
  Description of Artificial Sequence: Synthetic oligonucleotide
ccacggcuggaggaaacua

SEQ ID NO: 3031699 - RNA, 19 nt, Artificial Sequence
  Description of Artificial Sequence: Synthetic oligonucleotide
ggcgcaccugccacgcccu

SEQ ID NO: 3031700 - RNA, 19 nt, Artificial Sequence
  Description of Artificial Sequence: Synthetic oligonucleotide
gcgcaccugccacgcccuc

SEQ ID NO: 3031701 - RNA, 19 nt, Artificial Sequence
  Description of Artificial Sequence: Synthetic oligonucleotide
cguucuccugcaccaugcu

SEQ ID NO: 3031702 - RNA, 19 nt, Artificial Sequence
  Description of Artificial Sequence: Synthetic oligonucleotide
cgcccucuggcaccuugga

SEQ ID NO: 3031703 - RNA, 19 nt, Artificial Sequence
  Description of Artificial Sequence: Synthetic oligonucleotide
gccacgcccucuggcaccu

SEQ ID NO: 3031704 - RNA, 19 nt, Artificial Sequence
  Description of Artificial Sequence: Synthetic oligonucleotide
gcgcuccaucagugccaac

SEQ ID NO: 3031705 - RNA, 19 nt, Artificial Sequence
  Description of Artificial Sequence: Synthetic oligonucleotide
cggggcccucccagccagg

SEQ ID NO: 3031706 - RNA, 19 nt, Artificial Sequence
  Description of Artificial Sequence: Synthetic oligonucleotide
gcuggggaugcggggcccu

SEQ ID NO: 3031707 - RNA, 19 nt, Artificial Sequence
  Description of Artificial Sequence: Synthetic oligonucleotide
cggcuggaggaaacuaguu

SEQ ID NO: 3031708 - RNA, 19 nt, Artificial Sequence
  Description of Artificial Sequence: Synthetic oligonucleotide
cgcugcccguucuccugca

SEQ ID NO: 3031709 - RNA, 19 nt, Artificial Sequence
  Description of Artificial Sequence: Synthetic oligonucleotide
gcccguucuccugcaccau

SEQ ID NO: 3031710 - RNA, 19 nt, Artificial Sequence
  Description of Artificial Sequence: Synthetic oligonucleotide
cgcaccugccacgcccucu

SEQ ID NO: 3031711 - RNA, 19 nt, Artificial Sequence
  Description of Artificial Sequence: Synthetic oligonucleotide
ccacgcccucuggcaccuu

SEQ ID NO: 3031712 - RNA, 19 nt, Artificial Sequence
  Description of Artificial Sequence: Synthetic oligonucleotide
uggaaaacaacucauagcc

SEQ ID NO: 3031713 - RNA, 19 nt, Artificial Sequence
  Description of Artificial Sequence: Synthetic oligonucleotide
uaaauauucagaaucggga

SEQ ID NO: 3031714 - RNA, 19 nt, Artificial Sequence
  Description of Artificial Sequence: Synthetic oligonucleotide
uuagggaugaacuucaaug

SEQ ID NO: 3031715 - RNA, 19 nt, Artificial Sequence
  Description of Artificial Sequence: Synthetic oligonucleotide
aauucuggaaaaccucgcc

SEQ ID NO: 3031716 - RNA, 19 nt, Artificial Sequence
  Description of Artificial Sequence: Synthetic oligonucleotide
augaacuucaaugagcugc

SEQ ID NO: 3031717 - RNA, 19 nt, Artificial Sequence
  Description of Artificial Sequence: Synthetic oligonucleotide
ugaauucuggaaaaccucg

SEQ ID NO: 3031718 - RNA, 19 nt, Artificial Sequence
  Description of Artificial Sequence: Synthetic oligonucleotide
ugcuaaauauucagaaucg

SEQ ID NO: 3031719 - RNA, 19 nt, Artificial Sequence
  Description of Artificial Sequence: Synthetic oligonucleotide
cuaaauauucagaaucggg

SEQ ID NO: 3031720 - RNA, 19 nt, Artificial Sequence
  Description of Artificial Sequence: Synthetic oligonucleotide
gaaaacaacucauagccac

SEQ ID NO: 3031721 - RNA, 19 nt, Artificial Sequence
  Description of Artificial Sequence: Synthetic oligonucleotide
aagugaauucuggaaaacc

SEQ ID NO: 3031722 - RNA, 19 nt, Artificial Sequence
  Description of Artificial Sequence: Synthetic oligonucleotide
aacucauagccacacuugg

SEQ ID NO: 3031723 - RNA, 19 nt, Artificial Sequence
  Description of Artificial Sequence: Synthetic oligonucleotide
agugugcauauuuugaguc

SEQ ID NO: 3031724 - RNA, 19 nt, Artificial Sequence
  Description of Artificial Sequence: Synthetic oligonucleotide
aaccauuggccacacuugc

SEQ ID NO: 3031725 - RNA, 19 nt, Artificial Sequence
  Description of Artificial Sequence: Synthetic oligonucleotide
aaauauucagaaucgggau

SEQ ID NO: 3031726 - RNA, 19 nt, Artificial Sequence
  Description of Artificial Sequence: Synthetic oligonucleotide
cauauuuugagucgacugg

SEQ ID NO: 3031727 - RNA, 19 nt, Artificial Sequence
  Description of Artificial Sequence: Synthetic oligonucleotide
acuggaaaacaacucauag

SEQ ID NO: 3031728 - RNA, 19 nt, Artificial Sequence
  Description of Artificial Sequence: Synthetic oligonucleotide
acacacauuagacaccugg

SEQ ID NO: 3031729 - RNA, 19 nt, Artificial Sequence
  Description of Artificial Sequence: Synthetic oligonucleotide
acauuagacaccuggcucg

SEQ ID NO: 3031730 - RNA, 19 nt, Artificial Sequence
  Description of Artificial Sequence: Synthetic oligonucleotide
ugagcugcuaaauauucag

SEQ ID NO: 3031731 - RNA, 19 nt, Artificial Sequence
  Description of Artificial Sequence: Synthetic oligonucleotide
aaugagcugcuaaauauuc

SEQ ID NO: 3031732 - RNA, 19 nt, Artificial Sequence
  Description of Artificial Sequence: Synthetic oligonucleotide
aaacugcagaacgacaugg

SEQ ID NO: 3031733 - RNA, 19 nt, Artificial Sequence
  Description of Artificial Sequence: Synthetic oligonucleotide
uucagaaucgggauugccc

SEQ ID NO: 3031734 - RNA, 19 nt, Artificial Sequence
  Description of Artificial Sequence: Synthetic oligonucleotide
aaaaccucgccuccgaaga

SEQ ID NO: 3031735 - RNA, 19 nt, Artificial Sequence
  Description of Artificial Sequence: Synthetic oligonucleotide
ucaaugagcugcuaaauau

SEQ ID NO: 3031736 - RNA, 19 nt, Artificial Sequence
  Description of Artificial Sequence: Synthetic oligonucleotide
aacgacauggccacaacgg

SEQ ID NO: 3031737 - RNA, 19 nt, Artificial Sequence
  Description of Artificial Sequence: Synthetic oligonucleotide
acugcagaacgacauggcc

SEQ ID NO: 3031738 - RNA, 19 nt, Artificial Sequence
  Description of Artificial Sequence: Synthetic oligonucleotide
cugcuaaauauucagaauc

SEQ ID NO: 3031739 - RNA, 19 nt, Artificial Sequence
  Description of Artificial Sequence: Synthetic oligonucleotide
acaccuuuaaagcuucagg

SEQ ID NO: 3031740 - RNA, 19 nt, Artificial Sequence
  Description of Artificial Sequence: Synthetic oligonucleotide
ucagaaucgggauugcccc

SEQ ID NO: 3031741 - RNA, 19 nt, Artificial Sequence
  Description of Artificial Sequence: Synthetic oligonucleotide
ucuuuagggaugaacuuca

SEQ ID NO: 3031742 - RNA, 19 nt, Artificial Sequence
  Description of Artificial Sequence: Synthetic oligonucleotide
ugcauagaugguuucagug

SEQ ID NO: 3031743 - RNA, 19 nt, Artificial Sequence
  Description of Artificial Sequence: Synthetic oligonucleotide
aaacaacucauagccacac

SEQ ID NO: 3031744 - RNA, 19 nt, Artificial Sequence
  Description of Artificial Sequence: Synthetic oligonucleotide
uagaugguuucagugaacg

SEQ ID NO: 3031745 - RNA, 19 nt, Artificial Sequence
  Description of Artificial Sequence: Synthetic oligonucleotide
ucgacuggaaaacaacuca

SEQ ID NO: 3031746 - RNA, 19 nt, Artificial Sequence
  Description of Artificial Sequence: Synthetic oligonucleotide
ucauucaggaacucguggc

SEQ ID NO: 3031747 - RNA, 19 nt, Artificial Sequence
  Description of Artificial Sequence: Synthetic oligonucleotide
gaagagugugcauauuuug

SEQ ID NO: 3031748 - RNA, 19 nt, Artificial Sequence
  Description of Artificial Sequence: Synthetic oligonucleotide
accuuuaaagcuucagguc

SEQ ID NO: 3031749 - RNA, 19 nt, Artificial Sequence
  Description of Artificial Sequence: Synthetic oligonucleotide
cacaggacaccuuuaaagc

SEQ ID NO: 3031750 - RNA, 19 nt, Artificial Sequence
  Description of Artificial Sequence: Synthetic oligonucleotide
aauauucagaaucgggauu

SEQ ID NO: 3031751 - RNA, 19 nt, Artificial Sequence
  Description of Artificial Sequence: Synthetic oligonucleotide
uuucagugaacgcuggcca

SEQ ID NO: 3031752 - RNA, 19 nt, Artificial Sequence
  Description of Artificial Sequence: Synthetic oligonucleotide
ucgaagugaauucuggaaa

SEQ ID NO: 3031753 - RNA, 19 nt, Artificial Sequence
  Description of Artificial Sequence: Synthetic oligonucleotide
cuggaaaacaacucauagc

SEQ ID NO: 3031754 - RNA, 19 nt, Artificial Sequence
  Description of Artificial Sequence: Synthetic oligonucleotide
aucauucaggaacucgugg

SEQ ID NO: 3031755 - RNA, 19 nt, Artificial Sequence
  Description of Artificial Sequence: Synthetic oligonucleotide
cuuuaaagcuucaggucgg

SEQ ID NO: 3031756 - RNA, 19 nt, Artificial Sequence
  Description of Artificial Sequence: Synthetic oligonucleotide
uggcacacacauuagacac

SEQ ID NO: 3031757 - RNA, 19 nt, Artificial Sequence
  Description of Artificial Sequence: Synthetic oligonucleotide
cuuggcacacacauuagac

SEQ ID NO: 3031758 - RNA, 19 nt, Artificial Sequence
  Description of Artificial Sequence: Synthetic oligonucleotide
uuagacaccuggcucgaag

SEQ ID NO: 3031759 - RNA, 19 nt, Artificial Sequence
  Description of Artificial Sequence: Synthetic oligonucleotide
auauucagaaucgggauug

SEQ ID NO: 3031760 - RNA, 19 nt, Artificial Sequence
  Description of Artificial Sequence: Synthetic oligonucleotide
cuggccauggggaagagug

SEQ ID NO: 3031761 - RNA, 19 nt, Artificial Sequence
  Description of Artificial Sequence: Synthetic oligonucleotide
ccuuuaaagcuucaggucg

SEQ ID NO: 3031762 - RNA, 19 nt, Artificial Sequence
  Description of Artificial Sequence: Synthetic oligonucleotide
gaacgacauggccacaacg

SEQ ID NO: 3031763 - RNA, 19 nt, Artificial Sequence
  Description of Artificial Sequence: Synthetic oligonucleotide
ugaacgcuggccaugggga

SEQ ID NO: 3031764 - RNA, 19 nt, Artificial Sequence
  Description of Artificial Sequence: Synthetic oligonucleotide
ugaacuucaaugagcugcu

SEQ ID NO: 3031765 - RNA, 19 nt, Artificial Sequence
  Description of Artificial Sequence: Synthetic oligonucleotide
agaugguuucagugaacgc

SEQ ID NO: 3031766 - RNA, 19 nt, Artificial Sequence
  Description of Artificial Sequence: Synthetic oligonucleotide
uucucugucuuuagggaug

SEQ ID NO: 3031767 - RNA, 19 nt, Artificial Sequence
  Description of Artificial Sequence: Synthetic oligonucleotide
gaaaaccucgccuccgaag

SEQ ID NO: 3031768 - RNA, 19 nt, Artificial Sequence
  Description of Artificial Sequence: Synthetic oligonucleotide
uuugagucgacuggaaaac

SEQ ID NO: 3031769 - RNA, 19 nt, Artificial Sequence
  Description of Artificial Sequence: Synthetic oligonucleotide
agcugcuaaauauucagaa

SEQ ID NO: 3031770 - RNA, 19 nt, Artificial Sequence
  Description of Artificial Sequence: Synthetic oligonucleotide
uaaagcuucaggucgguuu

SEQ ID NO: 3031771 - RNA, 19 nt, Artificial Sequence
  Description of Artificial Sequence: Synthetic oligonucleotide
aaagcuucaggucgguuuu

SEQ ID NO: 3031772 - RNA, 19 nt, Artificial Sequence
  Description of Artificial Sequence: Synthetic oligonucleotide
acacuuggcacacacauua

SEQ ID NO: 3031773 - RNA, 19 nt, Artificial Sequence
  Description of Artificial Sequence: Synthetic oligonucleotide
gaagaaacugcagaacgac

SEQ ID NO: 3031774 - RNA, 19 nt, Artificial Sequence
  Description of Artificial Sequence: Synthetic oligonucleotide
ucuggaaaaccucgccucc

SEQ ID NO: 3031775 - RNA, 19 nt, Artificial Sequence
  Description of Artificial Sequence: Synthetic oligonucleotide
ugcagaacgacauggccac

SEQ ID NO: 3031776 - RNA, 19 nt, Artificial Sequence
  Description of Artificial Sequence: Synthetic oligonucleotide
ucugcauagaugguuucag

SEQ ID NO: 3031777 - RNA, 19 nt, Artificial Sequence
  Description of Artificial Sequence: Synthetic oligonucleotide
aacugcagaacgacauggc

SEQ ID NO: 3031778 - RNA, 19 nt, Artificial Sequence
  Description of Artificial Sequence: Synthetic oligonucleotide
agggaugaacuucaaugag

SEQ ID NO: 3031779 - RNA, 19 nt, Artificial Sequence
  Description of Artificial Sequence: Synthetic oligonucleotide
agugaauucuggaaaaccu

SEQ ID NO: 3031780 - RNA, 19 nt, Artificial Sequence
  Description of Artificial Sequence: Synthetic oligonucleotide
uuggcacacacauuagaca

SEQ ID NO: 3031781 - RNA, 19 nt, Artificial Sequence
  Description of Artificial Sequence: Synthetic oligonucleotide
gugugcauauuuugagucg

SEQ ID NO: 3031782 - RNA, 19 nt, Artificial Sequence
  Description of Artificial Sequence: Synthetic oligonucleotide
aagagugugcauauuuuga

SEQ ID NO: 3031783 - RNA, 19 nt, Artificial Sequence
  Description of Artificial Sequence: Synthetic oligonucleotide
acuucaaugagcugcuaaa

SEQ ID NO: 3031784 - RNA, 19 nt, Artificial Sequence
  Description of Artificial Sequence: Synthetic oligonucleotide
acaggacaccuuuaaagcu

SEQ ID NO: 3031785 - RNA, 19 nt, Artificial Sequence
  Description of Artificial Sequence: Synthetic oligonucleotide
acacauuagacaccuggcu

SEQ ID NO: 3031786 - RNA, 19 nt, Artificial Sequence
  Description of Artificial Sequence: Synthetic oligonucleotide
acaacucauagccacacuu

SEQ ID NO: 3031787 - RNA, 19 nt, Artificial Sequence
  Description of Artificial Sequence: Synthetic oligonucleotide
ugugcauauuuugagucga

SEQ ID NO: 3031788 - RNA, 19 nt, Artificial Sequence
  Description of Artificial Sequence: Synthetic oligonucleotide
gaaacugcagaacgacaug

SEQ ID NO: 3031789 - RNA, 19 nt, Artificial Sequence
  Description of Artificial Sequence: Synthetic oligonucleotide
aggaacucguggcccaacc

SEQ ID NO: 3031790 - RNA, 19 nt, Artificial Sequence
  Description of Artificial Sequence: Synthetic oligonucleotide
uucuggaaaaccucgccuc

SEQ ID NO: 3031791 - RNA, 19 nt, Artificial Sequence
  Description of Artificial Sequence: Synthetic oligonucleotide
cauucaggaacucguggcc

SEQ ID NO: 3031792 - RNA, 19 nt, Artificial Sequence
  Description of Artificial Sequence: Synthetic oligonucleotide
acgacauggccacaacggg

SEQ ID NO: 3031793 - RNA, 19 nt, Artificial Sequence
  Description of Artificial Sequence: Synthetic oligonucleotide
ugagucgacuggaaaacaa

SEQ ID NO: 3031794 - RNA, 19 nt, Artificial Sequence
  Description of Artificial Sequence: Synthetic oligonucleotide
uucucagggcgcuugguca

SEQ ID NO: 3031795 - RNA, 19 nt, Artificial Sequence
  Description of Artificial Sequence: Synthetic oligonucleotide
ggggccaucauucaggaac

SEQ ID NO: 3031796 - RNA, 19 nt, Artificial Sequence
  Description of Artificial Sequence: Synthetic oligonucleotide
gugaacgcuggccaugggg

SEQ ID NO: 3031797 - RNA, 19 nt, Artificial Sequence
  Description of Artificial Sequence: Synthetic oligonucleotide
ucugucuuuagggaugaac

SEQ ID NO: 3031798 - RNA, 19 nt, Artificial Sequence
  Description of Artificial Sequence: Synthetic oligonucleotide
cacauuagacaccuggcuc

SEQ ID NO: 3031799 - RNA, 19 nt, Artificial Sequence
  Description of Artificial Sequence: Synthetic oligonucleotide
auucagaaucgggauugcc

SEQ ID NO: 3031800 - RNA, 19 nt, Artificial Sequence
  Description of Artificial Sequence: Synthetic oligonucleotide
gcauauuuugagucgacug

SEQ ID NO: 3031801 - RNA, 19 nt, Artificial Sequence
  Description of Artificial Sequence: Synthetic oligonucleotide
agccacacuuggcacacac

SEQ ID NO: 3031802 - RNA, 19 nt, Artificial Sequence
  Description of Artificial Sequence: Synthetic oligonucleotide
auauuuugagucgacugga

SEQ ID NO: 3031803 - RNA, 19 nt, Artificial Sequence
  Description of Artificial Sequence: Synthetic oligonucleotide
caacucauagccacacuug

SEQ ID NO: 3031804 - RNA, 19 nt, Artificial Sequence
  Description of Artificial Sequence: Synthetic oligonucleotide
aaaacaacucauagccaca

SEQ ID NO: 3031805 - RNA, 19 nt, Artificial Sequence
  Description of Artificial Sequence: Synthetic oligonucleotide
guuucagugaacgcuggcc

SEQ ID NO: 3031806 - RNA, 19 nt, Artificial Sequence
  Description of Artificial Sequence: Synthetic oligonucleotide
gaugguuucagugaacgcu

SEQ ID NO: 3031807 - RNA, 19 nt, Artificial Sequence
  Description of Artificial Sequence: Synthetic oligonucleotide
agaacgacauggccacaac

SEQ ID NO: 3031808 - RNA, 19 nt, Artificial Sequence
  Description of Artificial Sequence: Synthetic oligonucleotide
auagccacacuuggcacac

SEQ ID NO: 3031809 - RNA, 19 nt, Artificial Sequence
  Description of Artificial Sequence: Synthetic oligonucleotide
cacacuugccacaggacac

SEQ ID NO: 3031810 - RNA, 19 nt, Artificial Sequence
  Description of Artificial Sequence: Synthetic oligonucleotide
ccgaagaaacugcagaacg

SEQ ID NO: 3031811 - RNA, 19 nt, Artificial Sequence
  Description of Artificial Sequence: Synthetic oligonucleotide
cucauagccacacuuggca

SEQ ID NO: 3031812 - RNA, 19 nt, Artificial Sequence
  Description of Artificial Sequence: Synthetic oligonucleotide
uauuuugagucgacuggaa

SEQ ID NO: 3031813 - RNA, 19 nt, Artificial Sequence
  Description of Artificial Sequence: Synthetic oligonucleotide
ugguuucagugaacgcugg

SEQ ID NO: 3031814 - RNA, 19 nt, Artificial Sequence
  Description of Artificial Sequence: Synthetic oligonucleotide
agaaacugcagaacgacau

SEQ ID NO: 3031815 - RNA, 19 nt, Artificial Sequence
  Description of Artificial Sequence: Synthetic oligonucleotide
gaauucuggaaaaccucgc

SEQ ID NO: 3031816 - RNA, 19 nt, Artificial Sequence
  Description of Artificial Sequence: Synthetic oligonucleotide
gacaccuuuaaagcuucag

SEQ ID NO: 3031817 - RNA, 19 nt, Artificial Sequence
  Description of Artificial Sequence: Synthetic oligonucleotide
aacaacucauagccacacu

SEQ ID NO: 3031818 - RNA, 19 nt, Artificial Sequence
  Description of Artificial Sequence: Synthetic oligonucleotide
caaccauuggccacacuug

SEQ ID NO: 3031819 - RNA, 19 nt, Artificial Sequence
  Description of Artificial Sequence: Synthetic oligonucleotide
ucauagccacacuuggcac

SEQ ID NO: 3031820 - RNA, 19 nt, Artificial Sequence
  Description of Artificial Sequence: Synthetic oligonucleotide
uuucucagggcgcuugguc

SEQ ID NO: 3031821 - RNA, 19 nt, Artificial Sequence
  Description of Artificial Sequence: Synthetic oligonucleotide
ccacaggacaccuuuaaag

SEQ ID NO: 3031822 - RNA, 19 nt, Artificial Sequence
  Description of Artificial Sequence: Synthetic oligonucleotide
acuuggcacacacauuaga

SEQ ID NO: 3031823 - RNA, 19 nt, Artificial Sequence
  Description of Artificial Sequence: Synthetic oligonucleotide
gcuaaauauucagaaucgg

SEQ ID NO: 3031824 - RNA, 19 nt, Artificial Sequence
  Description of Artificial Sequence: Synthetic oligonucleotide
acacuugccacaggacacc

SEQ ID NO: 3031825 - RNA, 19 nt, Artificial Sequence
  Description of Artificial Sequence: Synthetic oligonucleotide
gacauggccacaacgggac

SEQ ID NO: 3031826 - RNA, 19 nt, Artificial Sequence
  Description of Artificial Sequence: Synthetic oligonucleotide
ugucuuuagggaugaacuu

SEQ ID NO: 3031827 - RNA, 19 nt, Artificial Sequence
  Description of Artificial Sequence: Synthetic oligonucleotide
gaugaacuucaaugagcug

SEQ ID NO: 3031828 - RNA, 19 nt, Artificial Sequence
  Description of Artificial Sequence: Synthetic oligonucleotide
uagacaccuggcucgaagu

SEQ ID NO: 3031829 - RNA, 19 nt, Artificial Sequence
  Description of Artificial Sequence: Synthetic oligonucleotide
gaagugaauucuggaaaac

SEQ ID NO: 3031830 - RNA, 19 nt, Artificial Sequence
  Description of Artificial Sequence: Synthetic oligonucleotide
caucauucaggaacucgug

SEQ ID NO: 3031831 - RNA, 19 nt, Artificial Sequence
  Description of Artificial Sequence: Synthetic oligonucleotide
ugcauauuuugagucgacu

SEQ ID NO: 3031832 - RNA, 19 nt, Artificial Sequence
  Description of Artificial Sequence: Synthetic oligonucleotide
ggucacacugucugcauag

SEQ ID NO: 3031833 - RNA, 19 nt, Artificial Sequence
  Description of Artificial Sequence: Synthetic oligonucleotide
cauagaugguuucagugaa

SEQ ID NO: 3031834 - RNA, 19 nt, Artificial Sequence
  Description of Artificial Sequence: Synthetic oligonucleotide
cugucuuuagggaugaacu

SEQ ID NO: 3031835 - RNA, 19 nt, Artificial Sequence
  Description of Artificial Sequence: Synthetic oligonucleotide
ucgccuccgaagaaacugc

SEQ ID NO: 3031836 - RNA, 19 nt, Artificial Sequence
  Description of Artificial Sequence: Synthetic oligonucleotide
ucguggcccaaccauuggc

SEQ ID NO: 3031837 - RNA, 19 nt, Artificial Sequence
  Description of Artificial Sequence: Synthetic oligonucleotide
uggaaaaccucgccuccga

SEQ ID NO: 3031838 - RNA, 19 nt, Artificial Sequence
  Description of Artificial Sequence: Synthetic oligonucleotide
cugcagaacgacauggcca

SEQ ID NO: 3031839 - RNA, 19 nt, Artificial Sequence
  Description of Artificial Sequence: Synthetic oligonucleotide
uccgaagaaacugcagaac

SEQ ID NO: 3031840 - RNA, 19 nt, Artificial Sequence
  Description of Artificial Sequence: Synthetic oligonucleotide
cucgaagugaauucuggaa

SEQ ID NO: 3031841 - RNA, 19 nt, Artificial Sequence
  Description of Artificial Sequence: Synthetic oligonucleotide
augguuucagugaacgcug

SEQ ID NO: 3031842 - RNA, 19 nt, Artificial Sequence
  Description of Artificial Sequence: Synthetic oligonucleotide
auagaugguuucagugaac

SEQ ID NO: 3031843 - RNA, 19 nt, Artificial Sequence
  Description of Artificial Sequence: Synthetic oligonucleotide
gucuuuagggaugaacuuc

SEQ ID NO: 3031844 - RNA, 19 nt, Artificial Sequence
  Description of Artificial Sequence: Synthetic oligonucleotide
ucacacugucugcauagau

SEQ ID NO: 3031845 - RNA, 19 nt, Artificial Sequence
  Description of Artificial Sequence: Synthetic oligonucleotide
agucgacuggaaaacaacu

SEQ ID NO: 3031846 - RNA, 19 nt, Artificial Sequence
  Description of Artificial Sequence: Synthetic oligonucleotide
caccuuuaaagcuucaggu

SEQ ID NO: 3031847 - RNA, 19 nt, Artificial Sequence
  Description of Artificial Sequence: Synthetic oligonucleotide
cucgccuccgaagaaacug

SEQ ID NO: 3031848 - RNA, 19 nt, Artificial Sequence
  Description of Artificial Sequence: Synthetic oligonucleotide
gugaauucuggaaaaccuc

SEQ ID NO: 3031849 - RNA, 19 nt, Artificial Sequence
  Description of Artificial Sequence: Synthetic oligonucleotide
uuggggccaucauucagga

SEQ ID NO: 3031850 - RNA, 19 nt, Artificial Sequence
  Description of Artificial Sequence: Synthetic oligonucleotide
uggcucgaagugaauucug

SEQ ID NO: 3031851 - RNA, 19 nt, Artificial Sequence
  Description of Artificial Sequence: Synthetic oligonucleotide
gagucgacuggaaaacaac

SEQ ID NO: 3031852 - RNA, 19 nt, Artificial Sequence
  Description of Artificial Sequence: Synthetic oligonucleotide
agggcgcuuggucacacug

SEQ ID NO: 3031853 - RNA, 19 nt, Artificial Sequence
  Description of Artificial Sequence: Synthetic oligonucleotide
ugccacaggacaccuuuaa

SEQ ID NO: 3031854 - RNA, 19 nt, Artificial Sequence
  Description of Artificial Sequence: Synthetic oligonucleotide
accauuggccacacuugcc

SEQ ID NO: 3031855 - RNA, 19 nt, Artificial Sequence
  Description of Artificial Sequence: Synthetic oligonucleotide
aggacaccuuuaaagcuuc

SEQ ID NO: 3031856 - RNA, 19 nt, Artificial Sequence
  Description of Artificial Sequence: Synthetic oligonucleotide
gccacaacgggacagacaa

SEQ ID NO: 3031857 - RNA, 19 nt, Artificial Sequence
  Description of Artificial Sequence: Synthetic oligonucleotide
ucagugaacgcuggccaug

SEQ ID NO: 3031858 - RNA, 19 nt, Artificial Sequence
  Description of Artificial Sequence: Synthetic oligonucleotide
uggggaagagugugcauau

SEQ ID NO: 3031859 - RNA, 19 nt, Artificial Sequence
  Description of Artificial Sequence: Synthetic oligonucleotide
uauucagaaucgggauugc

SEQ ID NO: 3031860 - RNA, 19 nt, Artificial Sequence
  Description of Artificial Sequence: Synthetic oligonucleotide
uuuaaagcuucaggucggu

SEQ ID NO: 3031861 - RNA, 19 nt, Artificial Sequence
  Description of Artificial Sequence: Synthetic oligonucleotide
ucucugucuuuagggauga

SEQ ID NO: 3031862 - RNA, 19 nt, Artificial Sequence
  Description of Artificial Sequence: Synthetic oligonucleotide
cauagccacacuuggcaca

SEQ ID NO: 3031863 - RNA, 19 nt, Artificial Sequence
  Description of Artificial Sequence: Synthetic oligonucleotide
uugagucgacuggaaaaca

SEQ ID NO: 3031864 - RNA, 19 nt, Artificial Sequence
  Description of Artificial Sequence: Synthetic oligonucleotide
ucucagggcgcuuggucac

SEQ ID NO: 3031865 - RNA, 19 nt, Artificial Sequence
  Description of Artificial Sequence: Synthetic oligonucleotide
acugucugcauagaugguu

SEQ ID NO: 3031866 - RNA, 19 nt, Artificial Sequence
  Description of Artificial Sequence: Synthetic oligonucleotide
uucagugaacgcuggccau

SEQ ID NO: 3031867 - RNA, 19 nt, Artificial Sequence
  Description of Artificial Sequence: Synthetic oligonucleotide
cauuggccacacuugccac

SEQ ID NO: 3031868 - RNA, 19 nt, Artificial Sequence
  Description of Artificial Sequence: Synthetic oligonucleotide
cuggaaaaccucgccuccg

SEQ ID NO: 3031869 - RNA, 19 nt, Artificial Sequence
  Description of Artificial Sequence: Synthetic oligonucleotide
cauggccacaacgggacag

SEQ ID NO: 3031870 - RNA, 19 nt, Artificial Sequence
  Description of Artificial Sequence: Synthetic oligonucleotide
aaaccucgccuccgaagaa

SEQ ID NO: 3031871 - RNA, 19 nt, Artificial Sequence
  Description of Artificial Sequence: Synthetic oligonucleotide
cacaacgggacagacaaaa

SEQ ID NO: 3031872 - RNA, 19 nt, Artificial Sequence
  Description of Artificial Sequence: Synthetic oligonucleotide
cuccgaagaaacugcagaa

SEQ ID NO: 3031873 - RNA, 19 nt, Artificial Sequence
  Description of Artificial Sequence: Synthetic oligonucleotide
gucgacuggaaaacaacuc

SEQ ID NO: 3031874 - RNA, 19 nt, Artificial Sequence
  Description of Artificial Sequence: Synthetic oligonucleotide
ugucugcauagaugguuuc

SEQ ID NO: 3031875 - RNA, 19 nt, Artificial Sequence
  Description of Artificial Sequence: Synthetic oligonucleotide
cagugaacgcuggccaugg

SEQ ID NO: 3031876 - RNA, 19 nt, Artificial Sequence
  Description of Artificial Sequence: Synthetic oligonucleotide
cacuuggcacacacauuag

SEQ ID NO: 3031877 - RNA, 19 nt, Artificial Sequence
  Description of Artificial Sequence: Synthetic oligonucleotide
gacaccuggcucgaaguga

SEQ ID NO: 3031878 - RNA, 19 nt, Artificial Sequence
  Description of Artificial Sequence: Synthetic oligonucleotide
ggcucgaagugaauucugg

SEQ ID NO: 3031879 - RNA, 19 nt, Artificial Sequence
  Description of Artificial Sequence: Synthetic oligonucleotide
cuuggucacacugucugca

SEQ ID NO: 3031880 - RNA, 19 nt, Artificial Sequence
  Description of Artificial Sequence: Synthetic oligonucleotide
auggggaagagugugcaua

SEQ ID NO: 3031881 - RNA, 19 nt, Artificial Sequence
  Description of Artificial Sequence: Synthetic oligonucleotide
augagcugcuaaauauuca

SEQ ID NO: 3031882 - RNA, 19 nt, Artificial Sequence
  Description of Artificial Sequence: Synthetic oligonucleotide
accucgccuccgaagaaac

SEQ ID NO: 3031883 - RNA, 19 nt, Artificial Sequence
  Description of Artificial Sequence: Synthetic oligonucleotide
gccaucauucaggaacucg

SEQ ID NO: 3031884 - RNA, 19 nt, Artificial Sequence
  Description of Artificial Sequence: Synthetic oligonucleotide
agugaacgcuggccauggg

SEQ ID NO: 3031885 - RNA, 19 nt, Artificial Sequence
  Description of Artificial Sequence: Synthetic oligonucleotide
ggaugaacuucaaugagcu

SEQ ID NO: 3031886 - RNA, 19 nt, Artificial Sequence
  Description of Artificial Sequence: Synthetic oligonucleotide
uggucacacugucugcaua

SEQ ID NO: 3031887 - RNA, 19 nt, Artificial Sequence
  Description of Artificial Sequence: Synthetic oligonucleotide
cucguggcccaaccauugg

SEQ ID NO: 3031888 - RNA, 19 nt, Artificial Sequence
  Description of Artificial Sequence: Synthetic oligonucleotide
gagcugcuaaauauucaga

SEQ ID NO: 3031889 - RNA, 19 nt, Artificial Sequence
  Description of Artificial Sequence: Synthetic oligonucleotide
ggagcuucucugucuuuag

SEQ ID NO: 3031890 - RNA, 19 nt, Artificial Sequence
  Description of Artificial Sequence: Synthetic oligonucleotide
uggcccaaccauuggccac

SEQ ID NO: 3031891 - RNA, 19 nt, Artificial Sequence
  Description of Artificial Sequence: Synthetic oligonucleotide
uuuucucagggcgcuuggu

SEQ ID NO: 3031892 - RNA, 19 nt, Artificial Sequence
  Description of Artificial Sequence: Synthetic oligonucleotide
uggccauggggaagagugu

SEQ ID NO: 3031893 - RNA, 19 nt, Artificial Sequence
  Description of Artificial Sequence: Synthetic oligonucleotide
aaccucgccuccgaagaaa

SEQ ID NO: 3031894 - RNA, 19 nt, Artificial Sequence
  Description of Artificial Sequence: Synthetic oligonucleotide
gaacucguggcccaaccau

SEQ ID NO: 3031895 - RNA, 19 nt, Artificial Sequence
  Description of Artificial Sequence: Synthetic oligonucleotide
gacuggaaaacaacucaua

SEQ ID NO: 3031896 - RNA, 19 nt, Artificial Sequence
  Description of Artificial Sequence: Synthetic oligonucleotide
acucguggcccaaccauug

SEQ ID NO: 3031897 - RNA, 19 nt, Artificial Sequence
  Description of Artificial Sequence: Synthetic oligonucleotide
gguuucagugaacgcuggc

SEQ ID NO: 3031898 - RNA, 19 nt, Artificial Sequence
  Description of Artificial Sequence: Synthetic oligonucleotide
aacucguggcccaaccauu

SEQ ID NO: 3031899 - RNA, 19 nt, Artificial Sequence
  Description of Artificial Sequence: Synthetic oligonucleotide
gcuuggggccaucauucag

SEQ ID NO: 3031900 - RNA, 19 nt, Artificial Sequence
  Description of Artificial Sequence: Synthetic oligonucleotide
gucugcauagaugguuuca

SEQ ID NO: 3031901 - RNA, 19 nt, Artificial Sequence
  Description of Artificial Sequence: Synthetic oligonucleotide
ccuggcucgaagugaauuc

SEQ ID NO: 3031902 - RNA, 19 nt, Artificial Sequence
  Description of Artificial Sequence: Synthetic oligonucleotide
ggaaaacaacucauagcca

SEQ ID NO: 3031903 - RNA, 19 nt, Artificial Sequence
  Description of Artificial Sequence: Synthetic oligonucleotide
aggagcuucucugucuuua

SEQ ID NO: 3031904 - RNA, 19 nt, Artificial Sequence
  Description of Artificial Sequence: Synthetic oligonucleotide
uuaaagcuucaggucgguu

SEQ ID NO: 3031905 - RNA, 19 nt, Artificial Sequence
  Description of Artificial Sequence: Synthetic oligonucleotide
guggcccaaccauuggcca

SEQ ID NO: 3031906 - RNA, 19 nt, Artificial Sequence
  Description of Artificial Sequence: Synthetic oligonucleotide
ccuagugccccugggaggc

SEQ ID NO: 3031907 - RNA, 19 nt, Artificial Sequence
  Description of Artificial Sequence: Synthetic oligonucleotide
cuucucugucuuuagggau

SEQ ID NO: 3031908 - RNA, 19 nt, Artificial Sequence
  Description of Artificial Sequence: Synthetic oligonucleotide
ccuccgaagaaacugcaga

SEQ ID NO: 3031909 - RNA, 19 nt, Artificial Sequence
  Description of Artificial Sequence: Synthetic oligonucleotide
gcucgaagugaauucugga

SEQ ID NO: 3031910 - RNA, 19 nt, Artificial Sequence
  Description of Artificial Sequence: Synthetic oligonucleotide
cuugccacaggacaccuuu

SEQ ID NO: 3031911 - RNA, 19 nt, Artificial Sequence
  Description of Artificial Sequence: Synthetic oligonucleotide
gaacgcuggccauggggaa

SEQ ID NO: 3031912 - RNA, 19 nt, Artificial Sequence
  Description of Artificial Sequence: Synthetic oligonucleotide
uagugccccugggaggcag

SEQ ID NO: 3031913 - RNA, 19 nt, Artificial Sequence
  Description of Artificial Sequence: Synthetic oligonucleotide
gccccugggaggcaggagc

SEQ ID NO: 3031914 - RNA, 19 nt, Artificial Sequence
  Description of Artificial Sequence: Synthetic oligonucleotide
gcuuggucacacugucugc

SEQ ID NO: 3031915 - RNA, 19 nt, Artificial Sequence
  Description of Artificial Sequence: Synthetic oligonucleotide
acauggccacaacgggaca

SEQ ID NO: 3031916 - RNA, 19 nt, Artificial Sequence
  Description of Artificial Sequence: Synthetic oligonucleotide
acaccuggcucgaagugaa

SEQ ID NO: 3031917 - RNA, 19 nt, Artificial Sequence
  Description of Artificial Sequence: Synthetic oligonucleotide
ggcacacacauuagacacc

SEQ ID NO: 3031918 - RNA, 19 nt, Artificial Sequence
  Description of Artificial Sequence: Synthetic oligonucleotide
accuggcucgaagugaauu

SEQ ID NO: 3031919 - RNA, 19 nt, Artificial Sequence
  Description of Artificial Sequence: Synthetic oligonucleotide
cguggcccaaccauuggcc

SEQ ID NO: 3031920 - RNA, 19 nt, Artificial Sequence
  Description of Artificial Sequence: Synthetic oligonucleotide
ccacacuugccacaggaca

SEQ ID NO: 3031921 - RNA, 19 nt, Artificial Sequence
  Description of Artificial Sequence: Synthetic oligonucleotide
ccgcuuggggccaucauuc

SEQ ID NO: 3031922 - RNA, 19 nt, Artificial Sequence
  Description of Artificial Sequence: Synthetic oligonucleotide
cuuuagggaugaacuucaa

SEQ ID NO: 3031923 - RNA, 19 nt, Artificial Sequence
  Description of Artificial Sequence: Synthetic oligonucleotide
ccauuggccacacuugcca

SEQ ID NO: 3031924 - RNA, 19 nt, Artificial Sequence
  Description of Artificial Sequence: Synthetic oligonucleotide
gugcauauuuugagucgac

SEQ ID NO: 3031925 - RNA, 19 nt, Artificial Sequence
  Description of Artificial Sequence: Synthetic oligonucleotide
auggccacaacgggacaga

SEQ ID NO: 3031926 - RNA, 19 nt, Artificial Sequence
  Description of Artificial Sequence: Synthetic oligonucleotide
ggccauggggaagagugug

SEQ ID NO: 3031927 - RNA, 19 nt, Artificial Sequence
  Description of Artificial Sequence: Synthetic oligonucleotide
ggaacucguggcccaacca

SEQ ID NO: 3031928 - RNA, 19 nt, Artificial Sequence
  Description of Artificial Sequence: Synthetic oligonucleotide
caggacaccuuuaaagcuu

SEQ ID NO: 3031929 - RNA, 19 nt, Artificial Sequence
  Description of Artificial Sequence: Synthetic oligonucleotide
ccaucauucaggaacucgu

SEQ ID NO: 3031930 - RNA, 19 nt, Artificial Sequence
  Description of Artificial Sequence: Synthetic oligonucleotide
cauuagacaccuggcucga

SEQ ID NO: 3031931 - RNA, 19 nt, Artificial Sequence
  Description of Artificial Sequence: Synthetic oligonucleotide
cacacacauuagacaccug

SEQ ID NO: 3031932 - RNA, 19 nt, Artificial Sequence
  Description of Artificial Sequence: Synthetic oligonucleotide
gcugcuaaauauucagaau

SEQ ID NO: 3031933 - RNA, 19 nt, Artificial Sequence
  Description of Artificial Sequence: Synthetic oligonucleotide
ucaggaacucguggcccaa

SEQ ID NO: 3031934 - RNA, 19 nt, Artificial Sequence
  Description of Artificial Sequence: Synthetic oligonucleotide
cagaacgacauggccacaa

SEQ ID NO: 3031935 - RNA, 19 nt, Artificial Sequence
  Description of Artificial Sequence: Synthetic oligonucleotide
cgaagaaacugcagaacga

SEQ ID NO: 3031936 - RNA, 19 nt, Artificial Sequence
  Description of Artificial Sequence: Synthetic oligonucleotide
gggaagagugugcauauuu

SEQ ID NO: 3031937 - RNA, 19 nt, Artificial Sequence
  Description of Artificial Sequence: Synthetic oligonucleotide
ucagggcgcuuggucacac

SEQ ID NO: 3031938 - RNA, 19 nt, Artificial Sequence
  Description of Artificial Sequence: Synthetic oligonucleotide
uggccacaacgggacagac

SEQ ID NO: 3031939 - RNA, 19 nt, Artificial Sequence
  Description of Artificial Sequence: Synthetic oligonucleotide
cuucaaugagcugcuaaau

SEQ ID NO: 3031940 - RNA, 19 nt, Artificial Sequence
  Description of Artificial Sequence: Synthetic oligonucleotide
cgaagugaauucuggaaaa

SEQ ID NO: 3031941 - RNA, 19 nt, Artificial Sequence
  Description of Artificial Sequence: Synthetic oligonucleotide
acgcuggccauggggaaga

SEQ ID NO: 3031942 - RNA, 19 nt, Artificial Sequence
  Description of Artificial Sequence: Synthetic oligonucleotide
cugcauagaugguuucagu

SEQ ID NO: 3031943 - RNA, 19 nt, Artificial Sequence
  Description of Artificial Sequence: Synthetic oligonucleotide
ccaaccauuggccacacuu

SEQ ID NO: 3031944 - RNA, 19 nt, Artificial Sequence
  Description of Artificial Sequence: Synthetic oligonucleotide
gucacacugucugcauaga

SEQ ID NO: 3031945 - RNA, 19 nt, Artificial Sequence
  Description of Artificial Sequence: Synthetic oligonucleotide
agugccccugggaggcagg

SEQ ID NO: 3031946 - RNA, 19 nt, Artificial Sequence
  Description of Artificial Sequence: Synthetic oligonucleotide
gcacacacauuagacaccu

SEQ ID NO: 3031947 - RNA, 19 nt, Artificial Sequence
  Description of Artificial Sequence: Synthetic oligonucleotide
uggggccaucauucaggaa

SEQ ID NO: 3031948 - RNA, 19 nt, Artificial Sequence
  Description of Artificial Sequence: Synthetic oligonucleotide
ggaaaaccucgccuccgaa

SEQ ID NO: 3031949 - RNA, 19 nt, Artificial Sequence
  Description of Artificial Sequence: Synthetic oligonucleotide
cuggcucgaagugaauucu

SEQ ID NO: 3031950 - RNA, 19 nt, Artificial Sequence
  Description of Artificial Sequence: Synthetic oligonucleotide
ugggaggcaggagcuucuc

SEQ ID NO: 3031951 - RNA, 19 nt, Artificial Sequence
  Description of Artificial Sequence: Synthetic oligonucleotide
auuagacaccuggcucgaa

SEQ ID NO: 3031952 - RNA, 19 nt, Artificial Sequence
  Description of Artificial Sequence: Synthetic oligonucleotide
gccuccgaagaaacugcag

SEQ ID NO: 3031953 - RNA, 19 nt, Artificial Sequence
  Description of Artificial Sequence: Synthetic oligonucleotide
ggcaggagcuucucugucu

SEQ ID NO: 3031954 - RNA, 19 nt, Artificial Sequence
  Description of Artificial Sequence: Synthetic oligonucleotide
ggaagagugugcauauuuu

SEQ ID NO: 3031955 - RNA, 19 nt, Artificial Sequence
  Description of Artificial Sequence: Synthetic oligonucleotide
caggaacucguggcccaac

SEQ ID NO: 3031956 - RNA, 19 nt, Artificial Sequence
  Description of Artificial Sequence: Synthetic oligonucleotide
gccacaggacaccuuuaaa

SEQ ID NO: 3031957 - RNA, 19 nt, Artificial Sequence
  Description of Artificial Sequence: Synthetic oligonucleotide
gaacuucaaugagcugcua

SEQ ID NO: 3031958 - RNA, 19 nt, Artificial Sequence
  Description of Artificial Sequence: Synthetic oligonucleotide
ggcccaaccauuggccaca

SEQ ID NO: 3031959 - RNA, 19 nt, Artificial Sequence
  Description of Artificial Sequence: Synthetic oligonucleotide
cgacauggccacaacggga

SEQ ID NO: 3031960 - RNA, 19 nt, Artificial Sequence
  Description of Artificial Sequence: Synthetic oligonucleotide
ccugggaggcaggagcuuc

SEQ ID NO: 3031961 - RNA, 19 nt, Artificial Sequence
  Description of Artificial Sequence: Synthetic oligonucleotide
ccauggggaagagugugca

SEQ ID NO: 3031962 - RNA, 19 nt, Artificial Sequence
  Description of Artificial Sequence: Synthetic oligonucleotide
cugggaggcaggagcuucu

SEQ ID NO: 3031963 - RNA, 19 nt, Artificial Sequence
  Description of Artificial Sequence: Synthetic oligonucleotide
uagccacacuuggcacaca

SEQ ID NO: 3031964 - RNA, 19 nt, Artificial Sequence
  Description of Artificial Sequence: Synthetic oligonucleotide
cauggggaagagugugcau

SEQ ID NO: 3031965 - RNA, 19 nt, Artificial Sequence
  Description of Artificial Sequence: Synthetic oligonucleotide
cacugucugcauagauggu

SEQ ID NO: 3031966 - RNA, 19 nt, Artificial Sequence
  Description of Artificial Sequence: Synthetic oligonucleotide
acuugccacaggacaccuu

SEQ ID NO: 3031967 - RNA, 19 nt, Artificial Sequence
  Description of Artificial Sequence: Synthetic oligonucleotide
ggccacaacgggacagaca

SEQ ID NO: 3031968 - RNA, 19 nt, Artificial Sequence
  Description of Artificial Sequence: Synthetic oligonucleotide
gggccaucauucaggaacu

SEQ ID NO: 3031969 - RNA, 19 nt, Artificial Sequence
  Description of Artificial Sequence: Synthetic oligonucleotide
cucagggcgcuuggucaca

SEQ ID NO: 3031970 - RNA, 19 nt, Artificial Sequence
  Description of Artificial Sequence: Synthetic oligonucleotide
ggacaccuuuaaagcuuca

SEQ ID NO: 3031971 - RNA, 19 nt, Artificial Sequence
  Description of Artificial Sequence: Synthetic oligonucleotide
cgacuggaaaacaacucau

SEQ ID NO: 3031972 - RNA, 19 nt, Artificial Sequence
  Description of Artificial Sequence: Synthetic oligonucleotide
ggccaucauucaggaacuc

SEQ ID NO: 3031973 - RNA, 19 nt, Artificial Sequence
  Description of Artificial Sequence: Synthetic oligonucleotide
cuagugccccugggaggca

SEQ ID NO: 3031974 - RNA, 19 nt, Artificial Sequence
  Description of Artificial Sequence: Synthetic oligonucleotide
cgccuccgaagaaacugca

SEQ ID NO: 3031975 - RNA, 19 nt, Artificial Sequence
  Description of Artificial Sequence: Synthetic oligonucleotide
cucugucuuuagggaugaa

SEQ ID NO: 3031976 - RNA, 19 nt, Artificial Sequence
  Description of Artificial Sequence: Synthetic oligonucleotide
gcagaacgacauggccaca

SEQ ID NO: 3031977 - RNA, 19 nt, Artificial Sequence
  Description of Artificial Sequence: Synthetic oligonucleotide
gcccaaccauuggccacac

SEQ ID NO: 3031978 - RNA, 19 nt, Artificial Sequence
  Description of Artificial Sequence: Synthetic oligonucleotide
ccacaacgggacagacaaa

SEQ ID NO: 3031979 - RNA, 19 nt, Artificial Sequence
  Description of Artificial Sequence: Synthetic oligonucleotide
cagggcgcuuggucacacu

SEQ ID NO: 3031980 - RNA, 19 nt, Artificial Sequence
  Description of Artificial Sequence: Synthetic oligonucleotide
cgcuuggggccaucauuca

SEQ ID NO: 3031981 - RNA, 19 nt, Artificial Sequence
  Description of Artificial Sequence: Synthetic oligonucleotide
ccccugggaggcaggagcu

SEQ ID NO: 3031982 - RNA, 19 nt, Artificial Sequence
  Description of Artificial Sequence: Synthetic oligonucleotide
cccgcuuggggccaucauu

SEQ ID NO: 3031983 - RNA, 19 nt, Artificial Sequence
  Description of Artificial Sequence: Synthetic oligonucleotide
caccuggcucgaagugaau

SEQ ID NO: 3031984 - RNA, 19 nt, Artificial Sequence
  Description of Artificial Sequence: Synthetic oligonucleotide
ccucgccuccgaagaaacu

SEQ ID NO: 3031985 - RNA, 19 nt, Artificial Sequence
  Description of Artificial Sequence: Synthetic oligonucleotide
gcuggccauggggaagagu

SEQ ID NO: 3031986 - RNA, 19 nt, Artificial Sequence
  Description of Artificial Sequence: Synthetic oligonucleotide
ggggaagagugugcauauu

SEQ ID NO: 3031987 - RNA, 19 nt, Artificial Sequence
  Description of Artificial Sequence: Synthetic oligonucleotide
cccaaccauuggccacacu

SEQ ID NO: 3031988 - RNA, 19 nt, Artificial Sequence
  Description of Artificial Sequence: Synthetic oligonucleotide
ccccgcuuggggccaucau

SEQ ID NO: 3031989 - RNA, 19 nt, Artificial Sequence
  Description of Artificial Sequence: Synthetic oligonucleotide
cccugggaggcaggagcuu

SEQ ID NO: 3031990 - RNA, 19 nt, Artificial Sequence
  Description of Artificial Sequence: Synthetic oligonucleotide
uuuaaaagaggcuggaagg

SEQ ID NO: 3031991 - RNA, 19 nt, Artificial Sequence
  Description of Artificial Sequence: Synthetic oligonucleotide
agauccaucuccuugauuc

SEQ ID NO: 3031992 - RNA, 19 nt, Artificial Sequence
  Description of Artificial Sequence: Synthetic oligonucleotide
gauucgcuugacuagagcg

SEQ ID NO: 3031993 - RNA, 19 nt, Artificial Sequence
  Description of Artificial Sequence: Synthetic oligonucleotide
aaagcaacugcuucugcac

SEQ ID NO: 3031994 - RNA, 19 nt, Artificial Sequence
  Description of Artificial Sequence: Synthetic oligonucleotide
aucucuugcagcuugauga

SEQ ID NO: 3031995 - RNA, 19 nt, Artificial Sequence
  Description of Artificial Sequence: Synthetic oligonucleotide
ugucuguccacucaggagc

SEQ ID NO: 3031996 - RNA, 19 nt, Artificial Sequence
  Description of Artificial Sequence: Synthetic oligonucleotide
aaaagcaacugcuucugca

SEQ ID NO: 3031997 - RNA, 19 nt, Artificial Sequence
  Description of Artificial Sequence: Synthetic oligonucleotide
uccaguuuggcauuuguug

SEQ ID NO: 3031998 - RNA, 19 nt, Artificial Sequence
  Description of Artificial Sequence: Synthetic oligonucleotide
aaagaggguuuccacggac

SEQ ID NO: 3031999 - RNA, 19 nt, Artificial Sequence
  Description of Artificial Sequence: Synthetic oligonucleotide
gaagguuggaaucucuugc

SEQ ID NO: 3032000 - RNA, 19 nt, Artificial Sequence
  Description of Artificial Sequence: Synthetic oligonucleotide
ucauugcugacauuccugg

SEQ ID NO: 3032001 - RNA, 19 nt, Artificial Sequence
  Description of Artificial Sequence: Synthetic oligonucleotide
ugagccacgaccacuaugu

SEQ ID NO: 3032002 - RNA, 19 nt, Artificial Sequence
  Description of Artificial Sequence: Synthetic oligonucleotide
ucaggagcccuuuuaaaag

SEQ ID NO: 3032003 - RNA, 19 nt, Artificial Sequence
  Description of Artificial Sequence: Synthetic oligonucleotide
gacuagagcguucugauca

SEQ ID NO: 3032004 - RNA, 19 nt, Artificial Sequence
  Description of Artificial Sequence: Synthetic oligonucleotide
auugcugacauuccuggag

SEQ ID NO: 3032005 - RNA, 19 nt, Artificial Sequence
  Description of Artificial Sequence: Synthetic oligonucleotide
ugcuucugcacacuggugc

SEQ ID NO: 3032006 - RNA, 19 nt, Artificial Sequence
  Description of Artificial Sequence: Synthetic oligonucleotide
aagcaaagaggguuuccac

SEQ ID NO: 3032007 - RNA, 19 nt, Artificial Sequence
  Description of Artificial Sequence: Synthetic oligonucleotide
agcaaagaggguuuccacg

SEQ ID NO: 3032008 - RNA, 19 nt, Artificial Sequence
  Description of Artificial Sequence: Synthetic oligonucleotide
auuccuggaggccugagag

SEQ ID NO: 3032009 - RNA, 19 nt, Artificial Sequence
  Description of Artificial Sequence: Synthetic oligonucleotide
agagcccugagccacgacc

SEQ ID NO: 3032010 - RNA, 19 nt, Artificial Sequence
  Description of Artificial Sequence: Synthetic oligonucleotide
uugcugacauuccuggagg

SEQ ID NO: 3032011 - RNA, 19 nt, Artificial Sequence
  Description of Artificial Sequence: Synthetic oligonucleotide
aucugcuccgcauacuugg

SEQ ID NO: 3032012 - RNA, 19 nt, Artificial Sequence
  Description of Artificial Sequence: Synthetic oligonucleotide
uuucuggcgcuccugaagc

SEQ ID NO: 3032013 - RNA, 19 nt, Artificial Sequence
  Description of Artificial Sequence: Synthetic oligonucleotide
aucaaaagcaacugcuucu

SEQ ID NO: 3032014 - RNA, 19 nt, Artificial Sequence
  Description of Artificial Sequence: Synthetic oligonucleotide
agggucauugcugacauuc

SEQ ID NO: 3032015 - RNA, 19 nt, Artificial Sequence
  Description of Artificial Sequence: Synthetic oligonucleotide
ugagaguccagcuucucca

SEQ ID NO: 3032016 - RNA, 19 nt, Artificial Sequence
  Description of Artificial Sequence: Synthetic oligonucleotide
augacaucagggucauugc

SEQ ID NO: 3032017 - RNA, 19 nt, Artificial Sequence
  Description of Artificial Sequence: Synthetic oligonucleotide
uggcguaucuuucuggcgc

SEQ ID NO: 3032018 - RNA, 19 nt, Artificial Sequence
  Description of Artificial Sequence: Synthetic oligonucleotide
gagcguucugaucaaaagc

SEQ ID NO: 3032019 - RNA, 19 nt, Artificial Sequence
  Description of Artificial Sequence: Synthetic oligonucleotide
aaucucuugcagcuugaug

SEQ ID NO: 3032020 - RNA, 19 nt, Artificial Sequence
  Description of Artificial Sequence: Synthetic oligonucleotide
ucauucaccuucuguaucu

SEQ ID NO: 3032021 - RNA, 19 nt, Artificial Sequence
  Description of Artificial Sequence: Synthetic oligonucleotide
aagguuggaaucucuugca

SEQ ID NO: 3032022 - RNA, 19 nt, Artificial Sequence
  Description of Artificial Sequence: Synthetic oligonucleotide
agagcguucugaucaaaag

SEQ ID NO: 3032023 - RNA, 19 nt, Artificial Sequence
  Description of Artificial Sequence: Synthetic oligonucleotide
ugaucuugguaccguaggc

SEQ ID NO: 3032024 - RNA, 19 nt, Artificial Sequence
  Description of Artificial Sequence: Synthetic oligonucleotide
uuaaaagaggcuggaaggu

SEQ ID NO: 3032025 - RNA, 19 nt, Artificial Sequence
  Description of Artificial Sequence: Synthetic oligonucleotide
aucuugguaccguaggcag

SEQ ID NO: 3032026 - RNA, 19 nt, Artificial Sequence
  Description of Artificial Sequence: Synthetic oligonucleotide
cagcuugaugacaucaggg

SEQ ID NO: 3032027 - RNA, 19 nt, Artificial Sequence
  Description of Artificial Sequence: Synthetic oligonucleotide
auucaccuucuguaucugc

SEQ ID NO: 3032028 - RNA, 19 nt, Artificial Sequence
  Description of Artificial Sequence: Synthetic oligonucleotide
aucucauucaccuucugua

SEQ ID NO: 3032029 - RNA, 19 nt, Artificial Sequence
  Description of Artificial Sequence: Synthetic oligonucleotide
cuuggcguaucuuucuggc

SEQ ID NO: 3032030 - RNA, 19 nt, Artificial Sequence
  Description of Artificial Sequence: Synthetic oligonucleotide
gauccaucuccuugauucg

SEQ ID NO: 3032031 - RNA, 19 nt, Artificial Sequence
  Description of Artificial Sequence: Synthetic oligonucleotide
uccacggacagauccaucu

SEQ ID NO: 3032032 - RNA, 19 nt, Artificial Sequence
  Description of Artificial Sequence: Synthetic oligonucleotide
agcaacugcuucugcacac

SEQ ID NO: 3032033 - RNA, 19 nt, Artificial Sequence
  Description of Artificial Sequence: Synthetic oligonucleotide
ucaaaagcaacugcuucug

SEQ ID NO: 3032034 - RNA, 19 nt, Artificial Sequence
  Description of Artificial Sequence: Synthetic oligonucleotide
ucuugcagcuugaugacau

SEQ ID NO: 3032035 - RNA, 19 nt, Artificial Sequence
  Description of Artificial Sequence: Synthetic oligonucleotide
gugaucuugguaccguagg

SEQ ID NO: 3032036 - RNA, 19 nt, Artificial Sequence
  Description of Artificial Sequence: Synthetic oligonucleotide
cauuuguuggggaugucug

SEQ ID NO: 3032037 - RNA, 19 nt, Artificial Sequence
  Description of Artificial Sequence: Synthetic oligonucleotide
gcaaagaggguuuccacgg

SEQ ID NO: 3032038 - RNA, 19 nt, Artificial Sequence
  Description of Artificial Sequence: Synthetic oligonucleotide
gagcccuuuuaaaagaggc

SEQ ID NO: 3032039 - RNA, 19 nt, Artificial Sequence
  Description of Artificial Sequence: Synthetic oligonucleotide
gugcaggugaucuugguac

SEQ ID NO: 3032040 - RNA, 19 nt, Artificial Sequence
  Description of Artificial Sequence: Synthetic oligonucleotide
ugcagcuugaugacaucag

SEQ ID NO: 3032041 - RNA, 19 nt, Artificial Sequence
  Description of Artificial Sequence: Synthetic oligonucleotide
uccuugauucgcuugacua

SEQ ID NO: 3032042 - RNA, 19 nt, Artificial Sequence
  Description of Artificial Sequence: Synthetic oligonucleotide
cauacuuggcguaucuuuc

SEQ ID NO: 3032043 - RNA, 19 nt, Artificial Sequence
  Description of Artificial Sequence: Synthetic oligonucleotide
gcuccugaagcaaagaggg

SEQ ID NO: 3032044 - RNA, 19 nt, Artificial Sequence
  Description of Artificial Sequence: Synthetic oligonucleotide
aaagaggcuggaagguugg

SEQ ID NO: 3032045 - RNA, 19 nt, Artificial Sequence
  Description of Artificial Sequence: Synthetic oligonucleotide
gacagauccaucuccuuga

SEQ ID NO: 3032046 - RNA, 19 nt, Artificial Sequence
  Description of Artificial Sequence: Synthetic oligonucleotide
acuuggcguaucuuucugg

SEQ ID NO: 3032047 - RNA, 19 nt, Artificial Sequence
  Description of Artificial Sequence: Synthetic oligonucleotide
ugaucaaaagcaacugcuu

SEQ ID NO: 3032048 - RNA, 19 nt, Artificial Sequence
  Description of Artificial Sequence: Synthetic oligonucleotide
uugacuagagcguucugau

SEQ ID NO: 3032049 - RNA, 19 nt, Artificial Sequence
  Description of Artificial Sequence: Synthetic oligonucleotide
agcguucugaucaaaagca

SEQ ID NO: 3032050 - RNA, 19 nt, Artificial Sequence
  Description of Artificial Sequence: Synthetic oligonucleotide
gguuuccacggacagaucc

SEQ ID NO: 3032051 - RNA, 19 nt, Artificial Sequence
  Description of Artificial Sequence: Synthetic oligonucleotide
agaggguuuccacggacag

SEQ ID NO: 3032052 - RNA, 19 nt, Artificial Sequence
  Description of Artificial Sequence: Synthetic oligonucleotide
uccuggaggccugagagcc

SEQ ID NO: 3032053 - RNA, 19 nt, Artificial Sequence
  Description of Artificial Sequence: Synthetic oligonucleotide
gacaucagggucauugcug

SEQ ID NO: 3032054 - RNA, 19 nt, Artificial Sequence
  Description of Artificial Sequence: Synthetic oligonucleotide
ugauucgcuugacuagagc

SEQ ID NO: 3032055 - RNA, 19 nt, Artificial Sequence
  Description of Artificial Sequence: Synthetic oligonucleotide
augucuguccacucaggag

SEQ ID NO: 3032056 - RNA, 19 nt, Artificial Sequence
  Description of Artificial Sequence: Synthetic oligonucleotide
ugacaucagggucauugcu

SEQ ID NO: 3032057 - RNA, 19 nt, Artificial Sequence
  Description of Artificial Sequence: Synthetic oligonucleotide
uuggcguaucuuucuggcg

SEQ ID NO: 3032058 - RNA, 19 nt, Artificial Sequence
  Description of Artificial Sequence: Synthetic oligonucleotide
aggccugagagcccugagc

SEQ ID NO: 3032059 - RNA, 19 nt, Artificial Sequence
  Description of Artificial Sequence: Synthetic oligonucleotide
agcugcaacaccugcugag

SEQ ID NO: 3032060 - RNA, 19 nt, Artificial Sequence
  Description of Artificial Sequence: Synthetic oligonucleotide
uugauucgcuugacuagag

SEQ ID NO: 3032061 - RNA, 19 nt, Artificial Sequence
  Description of Artificial Sequence: Synthetic oligonucleotide
aagcaacugcuucugcaca

SEQ ID NO: 3032062 - RNA, 19 nt, Artificial Sequence
  Description of Artificial Sequence: Synthetic oligonucleotide
uuuggcauuuguuggggau

SEQ ID NO: 3032063 - RNA, 19 nt, Artificial Sequence
  Description of Artificial Sequence: Synthetic oligonucleotide
ucagggucauugcugacau

SEQ ID NO: 3032064 - RNA, 19 nt, Artificial Sequence
  Description of Artificial Sequence: Synthetic oligonucleotide
cuugguaccguaggcagag

SEQ ID NO: 3032065 - RNA, 19 nt, Artificial Sequence
  Description of Artificial Sequence: Synthetic oligonucleotide
gaugucuguccacucagga

SEQ ID NO: 3032066 - RNA, 19 nt, Artificial Sequence
  Description of Artificial Sequence: Synthetic oligonucleotide
aguuuggcauuuguugggg

SEQ ID NO: 3032067 - RNA, 19 nt, Artificial Sequence
  Description of Artificial Sequence: Synthetic oligonucleotide
uguuggggaugucugucca

SEQ ID NO: 3032068 - RNA, 19 nt, Artificial Sequence
  Description of Artificial Sequence: Synthetic oligonucleotide
ucucauucaccuucuguau

SEQ ID NO: 3032069 - RNA, 19 nt, Artificial Sequence
  Description of Artificial Sequence: Synthetic oligonucleotide
cuuucuggcgcuccugaag

SEQ ID NO: 3032070 - RNA, 19 nt, Artificial Sequence
  Description of Artificial Sequence: Synthetic oligonucleotide
gaagcaaagaggguuucca

SEQ ID NO: 3032071 - RNA, 19 nt, Artificial Sequence
  Description of Artificial Sequence: Synthetic oligonucleotide
aggcuggaagguuggaauc

SEQ ID NO: 3032072 - RNA, 19 nt, Artificial Sequence
  Description of Artificial Sequence: Synthetic oligonucleotide
ugguaccguaggcagagcu

SEQ ID NO: 3032073 - RNA, 19 nt, Artificial Sequence
  Description of Artificial Sequence: Synthetic oligonucleotide
ucuguaucugcuccgcaua

SEQ ID NO: 3032074 - RNA, 19 nt, Artificial Sequence
  Description of Artificial Sequence: Synthetic oligonucleotide
agguuggaaucucuugcag

SEQ ID NO: 3032075 - RNA, 19 nt, Artificial Sequence
  Description of Artificial Sequence: Synthetic oligonucleotide
uacuuggcguaucuuucug

SEQ ID NO: 3032076 - RNA, 19 nt, Artificial Sequence
  Description of Artificial Sequence: Synthetic oligonucleotide
cacggacagauccaucucc

SEQ ID NO: 3032077 - RNA, 19 nt, Artificial Sequence
  Description of Artificial Sequence: Synthetic oligonucleotide
auuuguuggggaugucugu

SEQ ID NO: 3032078 - RNA, 19 nt, Artificial Sequence
  Description of Artificial Sequence: Synthetic oligonucleotide
uagagcguucugaucaaaa

SEQ ID NO: 3032079 - RNA, 19 nt, Artificial Sequence
  Description of Artificial Sequence: Synthetic oligonucleotide
guuggaaucucuugcagcu

SEQ ID NO: 3032080 - RNA, 19 nt, Artificial Sequence
  Description of Artificial Sequence: Synthetic oligonucleotide
uccugaagcaaagaggguu

SEQ ID NO: 3032081 - RNA, 19 nt, Artificial Sequence
  Description of Artificial Sequence: Synthetic oligonucleotide
ucuccaguuuggcauuugu

SEQ ID NO: 3032082 - RNA, 19 nt, Artificial Sequence
  Description of Artificial Sequence: Synthetic oligonucleotide
uaggcagagcugcaacacc

SEQ ID NO: 3032083 - RNA, 19 nt, Artificial Sequence
  Description of Artificial Sequence: Synthetic oligonucleotide
auccaucuccuugauucgc

SEQ ID NO: 3032084 - RNA, 19 nt, Artificial Sequence
  Description of Artificial Sequence: Synthetic oligonucleotide
uucuguaucugcuccgcau

SEQ ID NO: 3032085 - RNA, 19 nt, Artificial Sequence
  Description of Artificial Sequence: Synthetic oligonucleotide
uaucugcuccgcauacuug

SEQ ID NO: 3032086 - RNA, 19 nt, Artificial Sequence
  Description of Artificial Sequence: Synthetic oligonucleotide
auacuuggcguaucuuucu

SEQ ID NO: 3032087 - RNA, 19 nt, Artificial Sequence
  Description of Artificial Sequence: Synthetic oligonucleotide
ucucuugcagcuugaugac

SEQ ID NO: 3032088 - RNA, 19 nt, Artificial Sequence
  Description of Artificial Sequence: Synthetic oligonucleotide
uauggccgacaucucauuc

SEQ ID NO: 3032089 - RNA, 19 nt, Artificial Sequence
  Description of Artificial Sequence: Synthetic oligonucleotide
uucugcacacuggugcagg

SEQ ID NO: 3032090 - RNA, 19 nt, Artificial Sequence
  Description of Artificial Sequence: Synthetic oligonucleotide
gguuggaaucucuugcagc

SEQ ID NO: 3032091 - RNA, 19 nt, Artificial Sequence
  Description of Artificial Sequence: Synthetic oligonucleotide
uuuguuggggaugucuguc

SEQ ID NO: 3032092 - RNA, 19 nt, Artificial Sequence
  Description of Artificial Sequence: Synthetic oligonucleotide
acuggugcaggugaucuug

SEQ ID NO: 3032093 - RNA, 19 nt, Artificial Sequence
  Description of Artificial Sequence: Synthetic oligonucleotide
uccaucuccuugauucgcu

SEQ ID NO: 3032094 - RNA, 19 nt, Artificial Sequence
  Description of Artificial Sequence: Synthetic oligonucleotide
gagaguccagcuucuccag

SEQ ID NO: 3032095 - RNA, 19 nt, Artificial Sequence
  Description of Artificial Sequence: Synthetic oligonucleotide
ucuugguaccguaggcaga

SEQ ID NO: 3032096 - RNA, 19 nt, Artificial Sequence
  Description of Artificial Sequence: Synthetic oligonucleotide
ugaagcaaagaggguuucc

SEQ ID NO: 3032097 - RNA, 19 nt, Artificial Sequence
  Description of Artificial Sequence: Synthetic oligonucleotide
auggccgacaucucauuca

SEQ ID NO: 3032098 - RNA, 19 nt, Artificial Sequence
  Description of Artificial Sequence: Synthetic oligonucleotide
aggguuuccacggacagau

SEQ ID NO: 3032099 - RNA, 19 nt, Artificial Sequence
  Description of Artificial Sequence: Synthetic oligonucleotide
uuggcauuuguuggggaug

SEQ ID NO: 3032100 - RNA, 19 nt, Artificial Sequence
  Description of Artificial Sequence: Synthetic oligonucleotide
uugcagcuugaugacauca

SEQ ID NO: 3032101 - RNA, 19 nt, Artificial Sequence
  Description of Artificial Sequence: Synthetic oligonucleotide
ugcuccgcauacuuggcgu

SEQ ID NO: 3032102 - RNA, 19 nt, Artificial Sequence
  Description of Artificial Sequence: Synthetic oligonucleotide
guaccguaggcagagcugc

SEQ ID NO: 3032103 - RNA, 19 nt, Artificial Sequence
  Description of Artificial Sequence: Synthetic oligonucleotide
caccuucuguaucugcucc

SEQ ID NO: 3032104 - RNA, 19 nt, Artificial Sequence
  Description of Artificial Sequence: Synthetic oligonucleotide
uggccgacaucucauucac

SEQ ID NO: 3032105 - RNA, 19 nt, Artificial Sequence
  Description of Artificial Sequence: Synthetic oligonucleotide
gaucuugguaccguaggca

SEQ ID NO: 3032106 - RNA, 19 nt, Artificial Sequence
  Description of Artificial Sequence: Synthetic oligonucleotide
ugcaacaccugcugagagu

SEQ ID NO: 3032107 - RNA, 19 nt, Artificial Sequence
  Description of Artificial Sequence: Synthetic oligonucleotide
agccacgaccacuauguca

SEQ ID NO: 3032108 - RNA, 19 nt, Artificial Sequence
  Description of Artificial Sequence: Synthetic oligonucleotide
cucaggagcccuuuuaaaa

SEQ ID NO: 3032109 - RNA, 19 nt, Artificial Sequence
  Description of Artificial Sequence: Synthetic oligonucleotide
ggaagguuggaaucucuug

SEQ ID NO: 3032110 - RNA, 19 nt, Artificial Sequence
  Description of Artificial Sequence: Synthetic oligonucleotide
caaaagcaacugcuucugc

SEQ ID NO: 3032111 - RNA, 19 nt, Artificial Sequence
  Description of Artificial Sequence: Synthetic oligonucleotide
cucauucaccuucuguauc

SEQ ID NO: 3032112 - RNA, 19 nt, Artificial Sequence
  Description of Artificial Sequence: Synthetic oligonucleotide
ugcugacauuccuggaggc

SEQ ID NO: 3032113 - RNA, 19 nt, Artificial Sequence
  Description of Artificial Sequence: Synthetic oligonucleotide
ucugcuccgcauacuuggc

SEQ ID NO: 3032114 - RNA, 19 nt, Artificial Sequence
  Description of Artificial Sequence: Synthetic oligonucleotide
ggacagauccaucuccuug

SEQ ID NO: 3032115 - RNA, 19 nt, Artificial Sequence
  Description of Artificial Sequence: Synthetic oligonucleotide
ggccugagagcccugagcc

SEQ ID NO: 3032116 - RNA, 19 nt, Artificial Sequence
  Description of Artificial Sequence: Synthetic oligonucleotide
cuugacuagagcguucuga

SEQ ID NO: 3032117 - RNA, 19 nt, Artificial Sequence
  Description of Artificial Sequence: Synthetic oligonucleotide
cccuuuuaaaagaggcugg

SEQ ID NO: 3032118 - RNA, 19 nt, Artificial Sequence
  Description of Artificial Sequence: Synthetic oligonucleotide
uggaagguuggaaucucuu

SEQ ID NO: 3032119 - RNA, 19 nt, Artificial Sequence
  Description of Artificial Sequence: Synthetic oligonucleotide
aagaggguuuccacggaca

SEQ ID NO: 3032120 - RNA, 19 nt, Artificial Sequence
  Description of Artificial Sequence: Synthetic oligonucleotide
ucaccuucuguaucugcuc

SEQ ID NO: 3032121 - RNA, 19 nt, Artificial Sequence
  Description of Artificial Sequence: Synthetic oligonucleotide
gcccuuuuaaaagaggcug

SEQ ID NO: 3032122 - RNA, 19 nt, Artificial Sequence
  Description of Artificial Sequence: Synthetic oligonucleotide
cuugauucgcuugacuaga

SEQ ID NO: 3032123 - RNA, 19 nt, Artificial Sequence
  Description of Artificial Sequence: Synthetic oligonucleotide
uuggggaugucuguccacu

SEQ ID NO: 3032124 - RNA, 19 nt, Artificial Sequence
  Description of Artificial Sequence: Synthetic oligonucleotide
ccuugauucgcuugacuag

SEQ ID NO: 3032125 - RNA, 19 nt, Artificial Sequence
  Description of Artificial Sequence: Synthetic oligonucleotide
caucuccuugauucgcuug

SEQ ID NO: 3032126 - RNA, 19 nt, Artificial Sequence
  Description of Artificial Sequence: Synthetic oligonucleotide
cugcaacaccugcugagag

SEQ ID NO: 3032127 - RNA, 19 nt, Artificial Sequence
  Description of Artificial Sequence: Synthetic oligonucleotide
cacgaccacuaugucaucc

SEQ ID NO: 3032128 - RNA, 19 nt, Artificial Sequence
  Description of Artificial Sequence: Synthetic oligonucleotide
uggcauuuguuggggaugu

SEQ ID NO: 3032129 - RNA, 19 nt, Artificial Sequence
  Description of Artificial Sequence: Synthetic oligonucleotide
cuggugcaggugaucuugg

SEQ ID NO: 3032130 - RNA, 19 nt, Artificial Sequence
  Description of Artificial Sequence: Synthetic oligonucleotide
auucgcuugacuagagcgu

SEQ ID NO: 3032131 - RNA, 19 nt, Artificial Sequence
  Description of Artificial Sequence: Synthetic oligonucleotide
gggaugucuguccacucag

SEQ ID NO: 3032132 - RNA, 19 nt, Artificial Sequence
  Description of Artificial Sequence: Synthetic oligonucleotide
guaggcagagcugcaacac

SEQ ID NO: 3032133 - RNA, 19 nt, Artificial Sequence
  Description of Artificial Sequence: Synthetic oligonucleotide
ugacuagagcguucugauc

SEQ ID NO: 3032134 - RNA, 19 nt, Artificial Sequence
  Description of Artificial Sequence: Synthetic oligonucleotide
aggagcccuuuuaaaagag

SEQ ID NO: 3032135 - RNA, 19 nt, Artificial Sequence
  Description of Artificial Sequence: Synthetic oligonucleotide
cugcuccgcauacuuggcg

SEQ ID NO: 3032136 - RNA, 19 nt, Artificial Sequence
  Description of Artificial Sequence: Synthetic oligonucleotide
acucaggagcccuuuuaaa

SEQ ID NO: 3032137 - RNA, 19 nt, Artificial Sequence
  Description of Artificial Sequence: Synthetic oligonucleotide
uguaucugcuccgcauacu

SEQ ID NO: 3032138 - RNA, 19 nt, Artificial Sequence
  Description of Artificial Sequence: Synthetic oligonucleotide
caggagcccuuuuaaaaga

SEQ ID NO: 3032139 - RNA, 19 nt, Artificial Sequence
  Description of Artificial Sequence: Synthetic oligonucleotide
aguauggccgacaucucau

SEQ ID NO: 3032140 - RNA, 19 nt, Artificial Sequence
  Description of Artificial Sequence: Synthetic oligonucleotide
acuagagcguucugaucaa

SEQ ID NO: 3032141 - RNA, 19 nt, Artificial Sequence
  Description of Artificial Sequence: Synthetic oligonucleotide
uucgcuugacuagagcguu

SEQ ID NO: 3032142 - RNA, 19 nt, Artificial Sequence
  Description of Artificial Sequence: Synthetic oligonucleotide
ucugcacacuggugcaggu

SEQ ID NO: 3032143 - RNA, 19 nt, Artificial Sequence
  Description of Artificial Sequence: Synthetic oligonucleotide
gaggcuggaagguuggaau

SEQ ID NO: 3032144 - RNA, 19 nt, Artificial Sequence
  Description of Artificial Sequence: Synthetic oligonucleotide
cugagccacgaccacuaug

SEQ ID NO: 3032145 - RNA, 19 nt, Artificial Sequence
  Description of Artificial Sequence: Synthetic oligonucleotide
uuuccacggacagauccau

SEQ ID NO: 3032146 - RNA, 19 nt, Artificial Sequence
  Description of Artificial Sequence: Synthetic oligonucleotide
aggcagagcugcaacaccu

SEQ ID NO: 3032147 - RNA, 19 nt, Artificial Sequence
  Description of Artificial Sequence: Synthetic oligonucleotide
agcccuuuuaaaagaggcu

SEQ ID NO: 3032148 - RNA, 19 nt, Artificial Sequence
  Description of Artificial Sequence: Synthetic oligonucleotide
caacugcuucugcacacug

SEQ ID NO: 3032149 - RNA, 19 nt, Artificial Sequence
  Description of Artificial Sequence: Synthetic oligonucleotide
ggagcccuuuuaaaagagg

SEQ ID NO: 3032150 - RNA, 19 nt, Artificial Sequence
  Description of Artificial Sequence: Synthetic oligonucleotide
cugagagcccugagccacg

SEQ ID NO: 3032151 - RNA, 19 nt, Artificial Sequence
  Description of Artificial Sequence: Synthetic oligonucleotide
ggugaucuugguaccguag

SEQ ID NO: 3032152 - RNA, 19 nt, Artificial Sequence
  Description of Artificial Sequence: Synthetic oligonucleotide
cgcuccugaagcaaagagg

SEQ ID NO: 3032153 - RNA, 19 nt, Artificial Sequence
  Description of Artificial Sequence: Synthetic oligonucleotide
cuugcagcuugaugacauc

SEQ ID NO: 3032154 - RNA, 19 nt, Artificial Sequence
  Description of Artificial Sequence: Synthetic oligonucleotide
caguauggccgacaucuca

SEQ ID NO: 3032155 - RNA, 19 nt, Artificial Sequence
  Description of Artificial Sequence: Synthetic oligonucleotide
uucuggcgcuccugaagca

SEQ ID NO: 3032156 - RNA, 19 nt, Artificial Sequence
  Description of Artificial Sequence: Synthetic oligonucleotide
gcaacaccugcugagaguc

SEQ ID NO: 3032157 - RNA, 19 nt, Artificial Sequence
  Description of Artificial Sequence: Synthetic oligonucleotide
cguucugaucaaaagcaac

SEQ ID NO: 3032158 - RNA, 19 nt, Artificial Sequence
  Description of Artificial Sequence: Synthetic oligonucleotide
agcccugagccacgaccac

SEQ ID NO: 3032159 - RNA, 19 nt, Artificial Sequence
  Description of Artificial Sequence: Synthetic oligonucleotide
acagauccaucuccuugau

SEQ ID NO: 3032160 - RNA, 19 nt, Artificial Sequence
  Description of Artificial Sequence: Synthetic oligonucleotide
gaggccugagagcccugag

SEQ ID NO: 3032161 - RNA, 19 nt, Artificial Sequence
  Description of Artificial Sequence: Synthetic oligonucleotide
guuuggcauuuguugggga

SEQ ID NO: 3032162 - RNA, 19 nt, Artificial Sequence
  Description of Artificial Sequence: Synthetic oligonucleotide
guuuccacggacagaucca

SEQ ID NO: 3032163 - RNA, 19 nt, Artificial Sequence
  Description of Artificial Sequence: Synthetic oligonucleotide
ugcggcgcaguauggccga

SEQ ID NO: 3032164 - RNA, 19 nt, Artificial Sequence
  Description of Artificial Sequence: Synthetic oligonucleotide
ucuggcgcuccugaagcaa

SEQ ID NO: 3032165 - RNA, 19 nt, Artificial Sequence
  Description of Artificial Sequence: Synthetic oligonucleotide
gcgcuccugaagcaaagag

SEQ ID NO: 3032166 - RNA, 19 nt, Artificial Sequence
  Description of Artificial Sequence: Synthetic oligonucleotide
gagcccugagccacgacca

SEQ ID NO: 3032167 - RNA, 19 nt, Artificial Sequence
  Description of Artificial Sequence: Synthetic oligonucleotide
ucuccuugauucgcuugac

SEQ ID NO: 3032168 - RNA, 19 nt, Artificial Sequence
  Description of Artificial Sequence: Synthetic oligonucleotide
uaccguaggcagagcugca

SEQ ID NO: 3032169 - RNA, 19 nt, Artificial Sequence
  Description of Artificial Sequence: Synthetic oligonucleotide
gccgacaucucauucaccu

SEQ ID NO: 3032170 - RNA, 19 nt, Artificial Sequence
  Description of Artificial Sequence: Synthetic oligonucleotide
uggugcaggugaucuuggu

SEQ ID NO: 3032171 - RNA, 19 nt, Artificial Sequence
  Description of Artificial Sequence: Synthetic oligonucleotide
agaggcuggaagguuggaa

SEQ ID NO: 3032172 - RNA, 19 nt, Artificial Sequence
  Description of Artificial Sequence: Synthetic oligonucleotide
cauucaccuucuguaucug

SEQ ID NO: 3032173 - RNA, 19 nt, Artificial Sequence
  Description of Artificial Sequence: Synthetic oligonucleotide
acggacagauccaucuccu

SEQ ID NO: 3032174 - RNA, 19 nt, Artificial Sequence
  Description of Artificial Sequence: Synthetic oligonucleotide
cauugcugacauuccugga

SEQ ID NO: 3032175 - RNA, 19 nt, Artificial Sequence
  Description of Artificial Sequence: Synthetic oligonucleotide
cuucugcacacuggugcag

SEQ ID NO: 3032176 - RNA, 19 nt, Artificial Sequence
  Description of Artificial Sequence: Synthetic oligonucleotide
ucgcuugacuagagcguuc

SEQ ID NO: 3032177 - RNA, 19 nt, Artificial Sequence
  Description of Artificial Sequence: Synthetic oligonucleotide
cacucaggagcccuuuuaa

SEQ ID NO: 3032178 - RNA, 19 nt, Artificial Sequence
  Description of Artificial Sequence: Synthetic oligonucleotide
gguaccguaggcagagcug

SEQ ID NO: 3032179 - RNA, 19 nt, Artificial Sequence
  Description of Artificial Sequence: Synthetic oligonucleotide
uuccacggacagauccauc

SEQ ID NO: 3032180 - RNA, 19 nt, Artificial Sequence
  Description of Artificial Sequence: Synthetic oligonucleotide
uggggaugucuguccacuc

SEQ ID NO: 3032181 - RNA, 19 nt, Artificial Sequence
  Description of Artificial Sequence: Synthetic oligonucleotide
cauuccuggaggccugaga

SEQ ID NO: 3032182 - RNA, 19 nt, Artificial Sequence
  Description of Artificial Sequence: Synthetic oligonucleotide
aggugaucuugguaccgua

SEQ ID NO: 3032183 - RNA, 19 nt, Artificial Sequence
  Description of Artificial Sequence: Synthetic oligonucleotide
caucucauucaccuucugu

SEQ ID NO: 3032184 - RNA, 19 nt, Artificial Sequence
  Description of Artificial Sequence: Synthetic oligonucleotide
caaagaggguuuccacgga

SEQ ID NO: 3032185 - RNA, 19 nt, Artificial Sequence
  Description of Artificial Sequence: Synthetic oligonucleotide
cgacaucucauucaccuuc

SEQ ID NO: 3032186 - RNA, 19 nt, Artificial Sequence
  Description of Artificial Sequence: Synthetic oligonucleotide
ggaugucuguccacucagg

SEQ ID NO: 3032187 - RNA, 19 nt, Artificial Sequence
  Description of Artificial Sequence: Synthetic oligonucleotide
aagaggcuggaagguugga

SEQ ID NO: 3032188 - RNA, 19 nt, Artificial Sequence
  Description of Artificial Sequence: Synthetic oligonucleotide
gcaggugaucuugguaccg

SEQ ID NO: 3032189 - RNA, 19 nt, Artificial Sequence
  Description of Artificial Sequence: Synthetic oligonucleotide
uucuccaguuuggcauuug

SEQ ID NO: 3032190 - RNA, 19 nt, Artificial Sequence
  Description of Artificial Sequence: Synthetic oligonucleotide
caucagggucauugcugac

SEQ ID NO: 3032191 - RNA, 19 nt, Artificial Sequence
  Description of Artificial Sequence: Synthetic oligonucleotide
ugagagcccugagccacga

SEQ ID NO: 3032192 - RNA, 19 nt, Artificial Sequence
  Description of Artificial Sequence: Synthetic oligonucleotide
ucuguccacucaggagccc

SEQ ID NO: 3032193 - RNA, 19 nt, Artificial Sequence
  Description of Artificial Sequence: Synthetic oligonucleotide
uccacucaggagcccuuuu

SEQ ID NO: 3032194 - RNA, 19 nt, Artificial Sequence
  Description of Artificial Sequence: Synthetic oligonucleotide
gcuucugcacacuggugca

SEQ ID NO: 3032195 - RNA, 19 nt, Artificial Sequence
  Description of Artificial Sequence: Synthetic oligonucleotide
cugacauuccuggaggccu

SEQ ID NO: 3032196 - RNA, 19 nt, Artificial Sequence
  Description of Artificial Sequence: Synthetic oligonucleotide
uguccacucaggagcccuu

SEQ ID NO: 3032197 - RNA, 19 nt, Artificial Sequence
  Description of Artificial Sequence: Synthetic oligonucleotide
gcugacauuccuggaggcc

SEQ ID NO: 3032198 - RNA, 19 nt, Artificial Sequence
  Description of Artificial Sequence: Synthetic oligonucleotide
ccugagagcccugagccac

SEQ ID NO: 3032199 - RNA, 19 nt, Artificial Sequence
  Description of Artificial Sequence: Synthetic oligonucleotide
caccugcugagaguccagc

SEQ ID NO: 3032200 - RNA, 19 nt, Artificial Sequence
  Description of Artificial Sequence: Synthetic oligonucleotide
gaguccagcuucuccaguu

SEQ ID NO: 3032201 - RNA, 19 nt, Artificial Sequence
  Description of Artificial Sequence: Synthetic oligonucleotide
cuucuguaucugcuccgca

SEQ ID NO: 3032202 - RNA, 19 nt, Artificial Sequence
  Description of Artificial Sequence: Synthetic oligonucleotide
uuggaaucucuugcagcuu

SEQ ID NO: 3032203 - RNA, 19 nt, Artificial Sequence
  Description of Artificial Sequence: Synthetic oligonucleotide
uccgcauacuuggcguauc

SEQ ID NO: 3032204 - RNA, 19 nt, Artificial Sequence
  Description of Artificial Sequence: Synthetic oligonucleotide
ggggaugucuguccacuca

SEQ ID NO: 3032205 - RNA, 19 nt, Artificial Sequence
  Description of Artificial Sequence: Synthetic oligonucleotide
gaggguuuccacggacaga

SEQ ID NO: 3032206 - RNA, 19 nt, Artificial Sequence
  Description of Artificial Sequence: Synthetic oligonucleotide
ggugcaggugaucuuggua

SEQ ID NO: 3032207 - RNA, 19 nt, Artificial Sequence
  Description of Artificial Sequence: Synthetic oligonucleotide
acauuccuggaggccugag

SEQ ID NO: 3032208 - RNA, 19 nt, Artificial Sequence
  Description of Artificial Sequence: Synthetic oligonucleotide
ggucauugcugacauuccu

SEQ ID NO: 3032209 - RNA, 19 nt, Artificial Sequence
  Description of Artificial Sequence: Synthetic oligonucleotide
ccuucuguaucugcuccgc

SEQ ID NO: 3032210 - RNA, 19 nt, Artificial Sequence
  Description of Artificial Sequence: Synthetic oligonucleotide
gcauacuuggcguaucuuu

SEQ ID NO: 3032211 - RNA, 19 nt, Artificial Sequence
  Description of Artificial Sequence: Synthetic oligonucleotide
gggucauugcugacauucc

SEQ ID NO: 3032212 - RNA, 19 nt, Artificial Sequence
  Description of Artificial Sequence: Synthetic oligonucleotide
cugcacacuggugcaggug

SEQ ID NO: 3032213 - RNA, 19 nt, Artificial Sequence
  Description of Artificial Sequence: Synthetic oligonucleotide
gagccacgaccacuauguc

SEQ ID NO: 3032214 - RNA, 19 nt, Artificial Sequence
  Description of Artificial Sequence: Synthetic oligonucleotide
cagagcugcaacaccugcu

SEQ ID NO: 3032215 - RNA, 19 nt, Artificial Sequence
  Description of Artificial Sequence: Synthetic oligonucleotide
cacacuggugcaggugauc

SEQ ID NO: 3032216 - RNA, 19 nt, Artificial Sequence
  Description of Artificial Sequence: Synthetic oligonucleotide
uugguaccguaggcagagc

SEQ ID NO: 3032217 - RNA, 19 nt, Artificial Sequence
  Description of Artificial Sequence: Synthetic oligonucleotide
ccuuuuaaaagaggcugga

SEQ ID NO: 3032218 - RNA, 19 nt, Artificial Sequence
  Description of Artificial Sequence: Synthetic oligonucleotide
gccacgaccacuaugucau

SEQ ID NO: 3032219 - RNA, 19 nt, Artificial Sequence
  Description of Artificial Sequence: Synthetic oligonucleotide
accguaggcagagcugcaa

SEQ ID NO: 3032220 - RNA, 19 nt, Artificial Sequence
  Description of Artificial Sequence: Synthetic oligonucleotide
cuggcgcuccugaagcaaa

SEQ ID NO: 3032221 - RNA, 19 nt, Artificial Sequence
  Description of Artificial Sequence: Synthetic oligonucleotide
gacauuccuggaggccuga

SEQ ID NO: 3032222 - RNA, 19 nt, Artificial Sequence
  Description of Artificial Sequence: Synthetic oligonucleotide
uggaggccugagagcccug

SEQ ID NO: 3032223 - RNA, 19 nt, Artificial Sequence
  Description of Artificial Sequence: Synthetic oligonucleotide
cucuugcagcuugaugaca

SEQ ID NO: 3032224 - RNA, 19 nt, Artificial Sequence
  Description of Artificial Sequence: Synthetic oligonucleotide
cgcaguauggccgacaucu

SEQ ID NO: 3032225 - RNA, 19 nt, Artificial Sequence
  Description of Artificial Sequence: Synthetic oligonucleotide
gcauuuguuggggaugucu

SEQ ID NO: 3032226 - RNA, 19 nt, Artificial Sequence
  Description of Artificial Sequence: Synthetic oligonucleotide
gagagcccugagccacgac

SEQ ID NO: 3032227 - RNA, 19 nt, Artificial Sequence
  Description of Artificial Sequence: Synthetic oligonucleotide
ccguaggcagagcugcaac

SEQ ID NO: 3032228 - RNA, 19 nt, Artificial Sequence
  Description of Artificial Sequence: Synthetic oligonucleotide
ggcagagcugcaacaccug

SEQ ID NO: 3032229 - RNA, 19 nt, Artificial Sequence
  Description of Artificial Sequence: Synthetic oligonucleotide
ggaaucucuugcagcuuga

SEQ ID NO: 3032230 - RNA, 19 nt, Artificial Sequence
  Description of Artificial Sequence: Synthetic oligonucleotide
gaaucucuugcagcuugau

SEQ ID NO: 3032231 - RNA, 19 nt, Artificial Sequence
  Description of Artificial Sequence: Synthetic oligonucleotide
cguaucuuucuggcgcucc

SEQ ID NO: 3032232 - RNA, 19 nt, Artificial Sequence
  Description of Artificial Sequence: Synthetic oligonucleotide
cuccaguuuggcauuuguu

SEQ ID NO: 3032233 - RNA, 19 nt, Artificial Sequence
  Description of Artificial Sequence: Synthetic oligonucleotide
cuccuugauucgcuugacu

SEQ ID NO: 3032234 - RNA, 19 nt, Artificial Sequence
  Description of Artificial Sequence: Synthetic oligonucleotide
cuagagcguucugaucaaa

SEQ ID NO: 3032235 - RNA, 19 nt, Artificial Sequence
  Description of Artificial Sequence: Synthetic oligonucleotide
cguaggcagagcugcaaca

SEQ ID NO: 3032236 - RNA, 19 nt, Artificial Sequence
  Description of Artificial Sequence: Synthetic oligonucleotide
cuccugaagcaaagagggu

SEQ ID NO: 3032237 - RNA, 19 nt, Artificial Sequence
  Description of Artificial Sequence: Synthetic oligonucleotide
guauggccgacaucucauu

SEQ ID NO: 3032238 - RNA, 19 nt, Artificial Sequence
  Description of Artificial Sequence: Synthetic oligonucleotide
ccuggaggccugagagccc

SEQ ID NO: 3032239 - RNA, 19 nt, Artificial Sequence
  Description of Artificial Sequence: Synthetic oligonucleotide
ccacggacagauccaucuc

SEQ ID NO: 3032240 - RNA, 19 nt, Artificial Sequence
  Description of Artificial Sequence: Synthetic oligonucleotide
ggcuggaagguuggaaucu

SEQ ID NO: 3032241 - RNA, 19 nt, Artificial Sequence
  Description of Artificial Sequence: Synthetic oligonucleotide
ggcguaucuuucuggcgcu

SEQ ID NO: 3032242 - RNA, 19 nt, Artificial Sequence
  Description of Artificial Sequence: Synthetic oligonucleotide
gcguucugaucaaaagcaa

SEQ ID NO: 3032243 - RNA, 19 nt, Artificial Sequence
  Description of Artificial Sequence: Synthetic oligonucleotide
gccugagagcccugagcca

SEQ ID NO: 3032244 - RNA, 19 nt, Artificial Sequence
  Description of Artificial Sequence: Synthetic oligonucleotide
cuguccacucaggagcccu

SEQ ID NO: 3032245 - RNA, 19 nt, Artificial Sequence
  Description of Artificial Sequence: Synthetic oligonucleotide
cuggaggccugagagcccu

SEQ ID NO: 3032246 - RNA, 19 nt, Artificial Sequence
  Description of Artificial Sequence: Synthetic oligonucleotide
caggugaucuugguaccgu

SEQ ID NO: 3032247 - RNA, 19 nt, Artificial Sequence
  Description of Artificial Sequence: Synthetic oligonucleotide
ggcgcaguauggccgacau

SEQ ID NO: 3032248 - RNA, 19 nt, Artificial Sequence
  Description of Artificial Sequence: Synthetic oligonucleotide
ggccgacaucucauucacc

SEQ ID NO: 3032249 - RNA, 19 nt, Artificial Sequence
  Description of Artificial Sequence: Synthetic oligonucleotide
ggaggccugagagcccuga

SEQ ID NO: 3032250 - RNA, 19 nt, Artificial Sequence
  Description of Artificial Sequence: Synthetic oligonucleotide
ggcgcuccugaagcaaaga

SEQ ID NO: 3032251 - RNA, 19 nt, Artificial Sequence
  Description of Artificial Sequence: Synthetic oligonucleotide
cccugagccacgaccacua

SEQ ID NO: 3032252 - RNA, 19 nt, Artificial Sequence
  Description of Artificial Sequence: Synthetic oligonucleotide
gcuccgcauacuuggcgua

SEQ ID NO: 3032253 - RNA, 19 nt, Artificial Sequence
  Description of Artificial Sequence: Synthetic oligonucleotide
gcaguauggccgacaucuc

SEQ ID NO: 3032254 - RNA, 19 nt, Artificial Sequence
  Description of Artificial Sequence: Synthetic oligonucleotide
gcuucuccaguuuggcauu

SEQ ID NO: 3032255 - RNA, 19 nt, Artificial Sequence
  Description of Artificial Sequence: Synthetic oligonucleotide
ugaugacaucagggucauu

SEQ ID NO: 3032256 - RNA, 19 nt, Artificial Sequence
  Description of Artificial Sequence: Synthetic oligonucleotide
ccacucaggagcccuuuua

SEQ ID NO: 3032257 - RNA, 19 nt, Artificial Sequence
  Description of Artificial Sequence: Synthetic oligonucleotide
ggcauuuguuggggauguc

SEQ ID NO: 3032258 - RNA, 19 nt, Artificial Sequence
  Description of Artificial Sequence: Synthetic oligonucleotide
cagauccaucuccuugauu

SEQ ID NO: 3032259 - RNA, 19 nt, Artificial Sequence
  Description of Artificial Sequence: Synthetic oligonucleotide
gcgcaguauggccgacauc

SEQ ID NO: 3032260 - RNA, 19 nt, Artificial Sequence
  Description of Artificial Sequence: Synthetic oligonucleotide
cacuggugcaggugaucuu

SEQ ID NO: 3032261 - RNA, 19 nt, Artificial Sequence
  Description of Artificial Sequence: Synthetic oligonucleotide
gcguaucuuucuggcgcuc

SEQ ID NO: 3032262 - RNA, 19 nt, Artificial Sequence
  Description of Artificial Sequence: Synthetic oligonucleotide
cuccgcauacuuggcguau

SEQ ID NO: 3032263 - RNA, 19 nt, Artificial Sequence
  Description of Artificial Sequence: Synthetic oligonucleotide
ccacgaccacuaugucauc

SEQ ID NO: 3032264 - RNA, 19 nt, Artificial Sequence
  Description of Artificial Sequence: Synthetic oligonucleotide
ggguuuccacggacagauc

SEQ ID NO: 3032265 - RNA, 19 nt, Artificial Sequence
  Description of Artificial Sequence: Synthetic oligonucleotide
ccgcauacuuggcguaucu

SEQ ID NO: 3032266 - RNA, 19 nt, Artificial Sequence
  Description of Artificial Sequence: Synthetic oligonucleotide
gcccugagccacgaccacu

SEQ ID NO: 3032267 - RNA, 19 nt, Artificial Sequence
  Description of Artificial Sequence: Synthetic oligonucleotide
ccaucuccuugauucgcuu

SEQ ID NO: 3032268 - RNA, 19 nt, Artificial Sequence
  Description of Artificial Sequence: Synthetic oligonucleotide
cgcuugacuagagcguucu

SEQ ID NO: 3032269 - RNA, 19 nt, Artificial Sequence
  Description of Artificial Sequence: Synthetic oligonucleotide
cagggucauugcugacauu

SEQ ID NO: 3032270 - RNA, 19 nt, Artificial Sequence
  Description of Artificial Sequence: Synthetic oligonucleotide
gcacacuggugcaggugau

SEQ ID NO: 3032271 - RNA, 19 nt, Artificial Sequence
  Description of Artificial Sequence: Synthetic oligonucleotide
gcggcgcaguauggccgac

SEQ ID NO: 3032272 - RNA, 19 nt, Artificial Sequence
  Description of Artificial Sequence: Synthetic oligonucleotide
ccugagccacgaccacuau

SEQ ID NO: 3032273 - RNA, 19 nt, Artificial Sequence
  Description of Artificial Sequence: Synthetic oligonucleotide
cggacagauccaucuccuu

SEQ ID NO: 3032274 - RNA, 19 nt, Artificial Sequence
  Description of Artificial Sequence: Synthetic oligonucleotide
cggcgcaguauggccgaca

SEQ ID NO: 3032275 - RNA, 19 nt, Artificial Sequence
  Description of Artificial Sequence: Synthetic oligonucleotide
cgcauacuuggcguaucuu

SEQ ID NO: 3032276 - RNA, 19 nt, Artificial Sequence
  Description of Artificial Sequence: Synthetic oligonucleotide
aauagguacaaaguucugc

SEQ ID NO: 3032277 - RNA, 19 nt, Artificial Sequence
  Description of Artificial Sequence: Synthetic oligonucleotide
aaaucggacguucuccucg

SEQ ID NO: 3032278 - RNA, 19 nt, Artificial Sequence
  Description of Artificial Sequence: Synthetic oligonucleotide
uugaacacaagccuuggcc

SEQ ID NO: 3032279 - RNA, 19 nt, Artificial Sequence
  Description of Artificial Sequence: Synthetic oligonucleotide
agguacaaaguucugcagc

SEQ ID NO: 3032280 - RNA, 19 nt, Artificial Sequence
  Description of Artificial Sequence: Synthetic oligonucleotide
aggaguguucuccacauac

SEQ ID NO: 3032281 - RNA, 19 nt, Artificial Sequence
  Description of Artificial Sequence: Synthetic oligonucleotide
uacaaaguucugcagccgg

SEQ ID NO: 3032282 - RNA, 19 nt, Artificial Sequence
  Description of Artificial Sequence: Synthetic oligonucleotide
auagguacaaaguucugca

SEQ ID NO: 3032283 - RNA, 19 nt, Artificial Sequence
  Description of Artificial Sequence: Synthetic oligonucleotide
acucgauugaacacaagcc

SEQ ID NO: 3032284 - RNA, 19 nt, Artificial Sequence
  Description of Artificial Sequence: Synthetic oligonucleotide
cacucgauugaacacaagc

SEQ ID NO: 3032285 - RNA, 19 nt, Artificial Sequence
  Description of Artificial Sequence: Synthetic oligonucleotide
aggcuucggacacaaaucg

SEQ ID NO: 3032286 - RNA, 19 nt, Artificial Sequence
  Description of Artificial Sequence: Synthetic oligonucleotide
auugaacacaagccuuggc

SEQ ID NO: 3032287 - RNA, 19 nt, Artificial Sequence
  Description of Artificial Sequence: Synthetic oligonucleotide
ucggacacaaaucggacgu

SEQ ID NO: 3032288 - RNA, 19 nt, Artificial Sequence
  Description of Artificial Sequence: Synthetic oligonucleotide
ucugcucucuaccugcugc

SEQ ID NO: 3032289 - RNA, 19 nt, Artificial Sequence
  Description of Artificial Sequence: Synthetic oligonucleotide
uucggacacaaaucggacg

SEQ ID NO: 3032290 - RNA, 19 nt, Artificial Sequence
  Description of Artificial Sequence: Synthetic oligonucleotide
gaguguucuccacauacug

SEQ ID NO: 3032291 - RNA, 19 nt, Artificial Sequence
  Description of Artificial Sequence: Synthetic oligonucleotide
aguguguaggucucuuggg

SEQ ID NO: 3032292 - RNA, 19 nt, Artificial Sequence
  Description of Artificial Sequence: Synthetic oligonucleotide
uuggcccugaacuugccag

SEQ ID NO: 3032293 - RNA, 19 nt, Artificial Sequence
  Description of Artificial Sequence: Synthetic oligonucleotide
ucuaccugcugcugugugg

SEQ ID NO: 3032294 - RNA, 19 nt, Artificial Sequence
  Description of Artificial Sequence: Synthetic oligonucleotide
gguacaaaguucugcagcc

SEQ ID NO: 3032295 - RNA, 19 nt, Artificial Sequence
  Description of Artificial Sequence: Synthetic oligonucleotide
aguguucuccacauacugc

SEQ ID NO: 3032296 - RNA, 19 nt, Artificial Sequence
  Description of Artificial Sequence: Synthetic oligonucleotide
ucggacguucuccucgugg

SEQ ID NO: 3032297 - RNA, 19 nt, Artificial Sequence
  Description of Artificial Sequence: Synthetic oligonucleotide
caguguguaggucucuugg

SEQ ID NO: 3032298 - RNA, 19 nt, Artificial Sequence
  Description of Artificial Sequence: Synthetic oligonucleotide
gauguggguguggugaggg

SEQ ID NO: 3032299 - RNA, 19 nt, Artificial Sequence
  Description of Artificial Sequence: Synthetic oligonucleotide
cuccacauacugcacaggc

SEQ ID NO: 3032300 - RNA, 19 nt, Artificial Sequence
  Description of Artificial Sequence: Synthetic oligonucleotide
gauugaacacaagccuugg

SEQ ID NO: 3032301 - RNA, 19 nt, Artificial Sequence
  Description of Artificial Sequence: Synthetic oligonucleotide
cauucacucgauugaacac

SEQ ID NO: 3032302 - RNA, 19 nt, Artificial Sequence
  Description of Artificial Sequence: Synthetic oligonucleotide
uccacauacugcacaggcc

SEQ ID NO: 3032303 - RNA, 19 nt, Artificial Sequence
  Description of Artificial Sequence: Synthetic oligonucleotide
uugccaguggccagggucc

SEQ ID NO: 3032304 - RNA, 19 nt, Artificial Sequence
  Description of Artificial Sequence: Synthetic oligonucleotide
uagguacaaaguucugcag

SEQ ID NO: 3032305 - RNA, 19 nt, Artificial Sequence
  Description of Artificial Sequence: Synthetic oligonucleotide
ucgauugaacacaagccuu

SEQ ID NO: 3032306 - RNA, 19 nt, Artificial Sequence
  Description of Artificial Sequence: Synthetic oligonucleotide
cacaaaucggacguucucc

SEQ ID NO: 3032307 - RNA, 19 nt, Artificial Sequence
  Description of Artificial Sequence: Synthetic oligonucleotide
acugcacaggccguggggc

SEQ ID NO: 3032308 - RNA, 19 nt, Artificial Sequence
  Description of Artificial Sequence: Synthetic oligonucleotide
aaaguucugcagccgggga

SEQ ID NO: 3032309 - RNA, 19 nt, Artificial Sequence
  Description of Artificial Sequence: Synthetic oligonucleotide
auucacucgauugaacaca

SEQ ID NO: 3032310 - RNA, 19 nt, Artificial Sequence
  Description of Artificial Sequence: Synthetic oligonucleotide
ucuaccugcugccaggcuu

SEQ ID NO: 3032311 - RNA, 19 nt, Artificial Sequence
  Description of Artificial Sequence: Synthetic oligonucleotide
uucacucgauugaacacaa

SEQ ID NO: 3032312 - RNA, 19 nt, Artificial Sequence
  Description of Artificial Sequence: Synthetic oligonucleotide
ugggccaguguguaggucu

SEQ ID NO: 3032313 - RNA, 19 nt, Artificial Sequence
  Description of Artificial Sequence: Synthetic oligonucleotide
ccacauacugcacaggccg

SEQ ID NO: 3032314 - RNA, 19 nt, Artificial Sequence
  Description of Artificial Sequence: Synthetic oligonucleotide
uugucgcucuaccugcugc

SEQ ID NO: 3032315 - RNA, 19 nt, Artificial Sequence
  Description of Artificial Sequence: Synthetic oligonucleotide
agggccgccauccaguugu

SEQ ID NO: 3032316 - RNA, 19 nt, Artificial Sequence
  Description of Artificial Sequence: Synthetic oligonucleotide
cuugccaguggccaggguc

SEQ ID NO: 3032317 - RNA, 19 nt, Artificial Sequence
  Description of Artificial Sequence: Synthetic oligonucleotide
auuucaggagcucgccgag

SEQ ID NO: 3032318 - RNA, 19 nt, Artificial Sequence
  Description of Artificial Sequence: Synthetic oligonucleotide
ugagacugugccgagggcu

SEQ ID NO: 3032319 - RNA, 19 nt, Artificial Sequence
  Description of Artificial Sequence: Synthetic oligonucleotide
aucggcagggccgccaucc

SEQ ID NO: 3032320 - RNA, 19 nt, Artificial Sequence
  Description of Artificial Sequence: Synthetic oligonucleotide
ucgugggccaguguguagg

SEQ ID NO: 3032321 - RNA, 19 nt, Artificial Sequence
  Description of Artificial Sequence: Synthetic oligonucleotide
aaguucugcagccggggau

SEQ ID NO: 3032322 - RNA, 19 nt, Artificial Sequence
  Description of Artificial Sequence: Synthetic oligonucleotide
ucugcagccggggaucagg

SEQ ID NO: 3032323 - RNA, 19 nt, Artificial Sequence
  Description of Artificial Sequence: Synthetic oligonucleotide
guucccucgagggaugugg

SEQ ID NO: 3032324 - RNA, 19 nt, Artificial Sequence
  Description of Artificial Sequence: Synthetic oligonucleotide
ucaggaguguucuccacau

SEQ ID NO: 3032325 - RNA, 19 nt, Artificial Sequence
  Description of Artificial Sequence: Synthetic oligonucleotide
aaucggacguucuccucgu

SEQ ID NO: 3032326 - RNA, 19 nt, Artificial Sequence
  Description of Artificial Sequence: Synthetic oligonucleotide
cuucggacacaaaucggac

SEQ ID NO: 3032327 - RNA, 19 nt, Artificial Sequence
  Description of Artificial Sequence: Synthetic oligonucleotide
cuaccugcugcuguguggg

SEQ ID NO: 3032328 - RNA, 19 nt, Artificial Sequence
  Description of Artificial Sequence: Synthetic oligonucleotide
uguggguguggugaggggc

SEQ ID NO: 3032329 - RNA, 19 nt, Artificial Sequence
  Description of Artificial Sequence: Synthetic oligonucleotide
aucaggaguguucuccaca

SEQ ID NO: 3032330 - RNA, 19 nt, Artificial Sequence
  Description of Artificial Sequence: Synthetic oligonucleotide
uucaggagcucgccgaguc

SEQ ID NO: 3032331 - RNA, 19 nt, Artificial Sequence
  Description of Artificial Sequence: Synthetic oligonucleotide
acucucaucggcagggccg

SEQ ID NO: 3032332 - RNA, 19 nt, Artificial Sequence
  Description of Artificial Sequence: Synthetic oligonucleotide
aguucugcagccggggauc

SEQ ID NO: 3032333 - RNA, 19 nt, Artificial Sequence
  Description of Artificial Sequence: Synthetic oligonucleotide
agggaugugggugugguga

SEQ ID NO: 3032334 - RNA, 19 nt, Artificial Sequence
  Description of Artificial Sequence: Synthetic oligonucleotide
uucccucgagggauguggg

SEQ ID NO: 3032335 - RNA, 19 nt, Artificial Sequence
  Description of Artificial Sequence: Synthetic oligonucleotide
gaacuugccaguggccagg

SEQ ID NO: 3032336 - RNA, 19 nt, Artificial Sequence
  Description of Artificial Sequence: Synthetic oligonucleotide
caaaguucugcagccgggg

SEQ ID NO: 3032337 - RNA, 19 nt, Artificial Sequence
  Description of Artificial Sequence: Synthetic oligonucleotide
uggccagggucccugagac

SEQ ID NO: 3032338 - RNA, 19 nt, Artificial Sequence
  Description of Artificial Sequence: Synthetic oligonucleotide
caggcuucggacacaaauc

SEQ ID NO: 3032339 - RNA, 19 nt, Artificial Sequence
  Description of Artificial Sequence: Synthetic oligonucleotide
cauuucaggagcucgccga

SEQ ID NO: 3032340 - RNA, 19 nt, Artificial Sequence
  Description of Artificial Sequence: Synthetic oligonucleotide
ugucgcucuaccugcugcc

SEQ ID NO: 3032341 - RNA, 19 nt, Artificial Sequence
  Description of Artificial Sequence: Synthetic oligonucleotide
acaagccuuggcccugaac

SEQ ID NO: 3032342 - RNA, 19 nt, Artificial Sequence
  Description of Artificial Sequence: Synthetic oligonucleotide
caagccuuggcccugaacu

SEQ ID NO: 3032343 - RNA, 19 nt, Artificial Sequence
  Description of Artificial Sequence: Synthetic oligonucleotide
acaaaguucugcagccggg

SEQ ID NO: 3032344 - RNA, 19 nt, Artificial Sequence
  Description of Artificial Sequence: Synthetic oligonucleotide
uguggugaggggccccugc

SEQ ID NO: 3032345 - RNA, 19 nt, Artificial Sequence
  Description of Artificial Sequence: Synthetic oligonucleotide
uggggcacucucaucggca

SEQ ID NO: 3032346 - RNA, 19 nt, Artificial Sequence
  Description of Artificial Sequence: Synthetic oligonucleotide
auacugcacaggccguggg

SEQ ID NO: 3032347 - RNA, 19 nt, Artificial Sequence
  Description of Artificial Sequence: Synthetic oligonucleotide
ccugccauucacucgauug

SEQ ID NO: 3032348 - RNA, 19 nt, Artificial Sequence
  Description of Artificial Sequence: Synthetic oligonucleotide
caauagguacaaaguucug

SEQ ID NO: 3032349 - RNA, 19 nt, Artificial Sequence
  Description of Artificial Sequence: Synthetic oligonucleotide
guacaaaguucugcagccg

SEQ ID NO: 3032350 - RNA, 19 nt, Artificial Sequence
  Description of Artificial Sequence: Synthetic oligonucleotide
cugccggcauuucaggagc

SEQ ID NO: 3032351 - RNA, 19 nt, Artificial Sequence
  Description of Artificial Sequence: Synthetic oligonucleotide
cucgauugaacacaagccu

SEQ ID NO: 3032352 - RNA, 19 nt, Artificial Sequence
  Description of Artificial Sequence: Synthetic oligonucleotide
aacacaagccuuggcccug

SEQ ID NO: 3032353 - RNA, 19 nt, Artificial Sequence
  Description of Artificial Sequence: Synthetic oligonucleotide
cauacugcacaggccgugg

SEQ ID NO: 3032354 - RNA, 19 nt, Artificial Sequence
  Description of Artificial Sequence: Synthetic oligonucleotide
uuggguucccucgagggau

SEQ ID NO: 3032355 - RNA, 19 nt, Artificial Sequence
  Description of Artificial Sequence: Synthetic oligonucleotide
ucgcucuaccugcugccag

SEQ ID NO: 3032356 - RNA, 19 nt, Artificial Sequence
  Description of Artificial Sequence: Synthetic oligonucleotide
cuccucgugggccagugug

SEQ ID NO: 3032357 - RNA, 19 nt, Artificial Sequence
  Description of Artificial Sequence: Synthetic oligonucleotide
aacuugccaguggccaggg

SEQ ID NO: 3032358 - RNA, 19 nt, Artificial Sequence
  Description of Artificial Sequence: Synthetic oligonucleotide
aggucucuuggguucccuc

SEQ ID NO: 3032359 - RNA, 19 nt, Artificial Sequence
  Description of Artificial Sequence: Synthetic oligonucleotide
ucacucgauugaacacaag

SEQ ID NO: 3032360 - RNA, 19 nt, Artificial Sequence
  Description of Artificial Sequence: Synthetic oligonucleotide
gaucaggaguguucuccac

SEQ ID NO: 3032361 - RNA, 19 nt, Artificial Sequence
  Description of Artificial Sequence: Synthetic oligonucleotide
ugugccgagggcugcucgc

SEQ ID NO: 3032362 - RNA, 19 nt, Artificial Sequence
  Description of Artificial Sequence: Synthetic oligonucleotide
ccugagacugugccgaggg

SEQ ID NO: 3032363 - RNA, 19 nt, Artificial Sequence
  Description of Artificial Sequence: Synthetic oligonucleotide
cuaccugcugccaggcuuc

SEQ ID NO: 3032364 - RNA, 19 nt, Artificial Sequence
  Description of Artificial Sequence: Synthetic oligonucleotide
gggaucaggaguguucucc

SEQ ID NO: 3032365 - RNA, 19 nt, Artificial Sequence
  Description of Artificial Sequence: Synthetic oligonucleotide
ccguggggcacucucaucg

SEQ ID NO: 3032366 - RNA, 19 nt, Artificial Sequence
  Description of Artificial Sequence: Synthetic oligonucleotide
ggcacucucaucggcaggg

SEQ ID NO: 3032367 - RNA, 19 nt, Artificial Sequence
  Description of Artificial Sequence: Synthetic oligonucleotide
auguggguguggugagggg

SEQ ID NO: 3032368 - RNA, 19 nt, Artificial Sequence
  Description of Artificial Sequence: Synthetic oligonucleotide
cugaacuugccaguggcca

SEQ ID NO: 3032369 - RNA, 19 nt, Artificial Sequence
  Description of Artificial Sequence: Synthetic oligonucleotide
gcauuucaggagcucgccg

SEQ ID NO: 3032370 - RNA, 19 nt, Artificial Sequence
  Description of Artificial Sequence: Synthetic oligonucleotide
cagccggggaucaggagug

SEQ ID NO: 3032371 - RNA, 19 nt, Artificial Sequence
  Description of Artificial Sequence: Synthetic oligonucleotide
ugcugccaggcuucggaca

SEQ ID NO: 3032372 - RNA, 19 nt, Artificial Sequence
  Description of Artificial Sequence: Synthetic oligonucleotide
cacucucaucggcagggcc

SEQ ID NO: 3032373 - RNA, 19 nt, Artificial Sequence
  Description of Artificial Sequence: Synthetic oligonucleotide
cugccauucacucgauuga

SEQ ID NO: 3032374 - RNA, 19 nt, Artificial Sequence
  Description of Artificial Sequence: Synthetic oligonucleotide
ccauucacucgauugaaca

SEQ ID NO: 3032375 - RNA, 19 nt, Artificial Sequence
  Description of Artificial Sequence: Synthetic oligonucleotide
ugccauucacucgauugaa

SEQ ID NO: 3032376 - RNA, 19 nt, Artificial Sequence
  Description of Artificial Sequence: Synthetic oligonucleotide
gcugccggcauuucaggag

SEQ ID NO: 3032377 - RNA, 19 nt, Artificial Sequence
  Description of Artificial Sequence: Synthetic oligonucleotide
ucaggagcucgccgagucu

SEQ ID NO: 3032378 - RNA, 19 nt, Artificial Sequence
  Description of Artificial Sequence: Synthetic oligonucleotide
gaacacaagccuuggcccu

SEQ ID NO: 3032379 - RNA, 19 nt, Artificial Sequence
  Description of Artificial Sequence: Synthetic oligonucleotide
acauacugcacaggccgug

SEQ ID NO: 3032380 - RNA, 19 nt, Artificial Sequence
  Description of Artificial Sequence: Synthetic oligonucleotide
uggugaggggccccugcca

SEQ ID NO: 3032381 - RNA, 19 nt, Artificial Sequence
  Description of Artificial Sequence: Synthetic oligonucleotide
cucgcgcgcgggaagcgcg

SEQ ID NO: 3032382 - RNA, 19 nt, Artificial Sequence
  Description of Artificial Sequence: Synthetic oligonucleotide
ggucccugagacugugccg

SEQ ID NO: 3032383 - RNA, 19 nt, Artificial Sequence
  Description of Artificial Sequence: Synthetic oligonucleotide
agacugugccgagggcugc

SEQ ID NO: 3032384 - RNA, 19 nt, Artificial Sequence
  Description of Artificial Sequence: Synthetic oligonucleotide
gucccugagacugugccga

SEQ ID NO: 3032385 - RNA, 19 nt, Artificial Sequence
  Description of Artificial Sequence: Synthetic oligonucleotide
uggguucccucgagggaug

SEQ ID NO: 3032386 - RNA, 19 nt, Artificial Sequence
  Description of Artificial Sequence: Synthetic oligonucleotide
uggcccugaacuugccagu

SEQ ID NO: 3032387 - RNA, 19 nt, Artificial Sequence
  Description of Artificial Sequence: Synthetic oligonucleotide
guugucgcucuaccugcug

SEQ ID NO: 3032388 - RNA, 19 nt, Artificial Sequence
  Description of Artificial Sequence: Synthetic oligonucleotide
gccagggucccugagacug

SEQ ID NO: 3032389 - RNA, 19 nt, Artificial Sequence
  Description of Artificial Sequence: Synthetic oligonucleotide
gagggauguggguguggug

SEQ ID NO: 3032390 - RNA, 19 nt, Artificial Sequence
  Description of Artificial Sequence: Synthetic oligonucleotide
aguggccagggucccugag

SEQ ID NO: 3032391 - RNA, 19 nt, Artificial Sequence
  Description of Artificial Sequence: Synthetic oligonucleotide
cucucaucggcagggccgc

SEQ ID NO: 3032392 - RNA, 19 nt, Artificial Sequence
  Description of Artificial Sequence: Synthetic oligonucleotide
gccgccauccaguugucgc

SEQ ID NO: 3032393 - RNA, 19 nt, Artificial Sequence
  Description of Artificial Sequence: Synthetic oligonucleotide
cucuaccugcugcugugug

SEQ ID NO: 3032394 - RNA, 19 nt, Artificial Sequence
  Description of Artificial Sequence: Synthetic oligonucleotide
ugcagccggggaucaggag

SEQ ID NO: 3032395 - RNA, 19 nt, Artificial Sequence
  Description of Artificial Sequence: Synthetic oligonucleotide
guggguguggugaggggcc

SEQ ID NO: 3032396 - RNA, 19 nt, Artificial Sequence
  Description of Artificial Sequence: Synthetic oligonucleotide
gcuucggacacaaaucgga

SEQ ID NO: 3032397 - RNA, 19 nt, Artificial Sequence
  Description of Artificial Sequence: Synthetic oligonucleotide
ucgagggaugugggugugg

SEQ ID NO: 3032398 - RNA, 19 nt, Artificial Sequence
  Description of Artificial Sequence: Synthetic oligonucleotide
cauccaguugucgcucuac

SEQ ID NO: 3032399 - RNA, 19 nt, Artificial Sequence
  Description of Artificial Sequence: Synthetic oligonucleotide
cgauugaacacaagccuug

SEQ ID NO: 3032400 - RNA, 19 nt, Artificial Sequence
  Description of Artificial Sequence: Synthetic oligonucleotide
caggagcucgccgagucug

SEQ ID NO: 3032401 - RNA, 19 nt, Artificial Sequence
  Description of Artificial Sequence: Synthetic oligonucleotide
cccugaacuugccaguggc

SEQ ID NO: 3032402 - RNA, 19 nt, Artificial Sequence
  Description of Artificial Sequence: Synthetic oligonucleotide
cuuggguucccucgaggga

SEQ ID NO: 3032403 - RNA, 19 nt, Artificial Sequence
  Description of Artificial Sequence: Synthetic oligonucleotide
cugugccgagggcugcucg

SEQ ID NO: 3032404 - RNA, 19 nt, Artificial Sequence
  Description of Artificial Sequence: Synthetic oligonucleotide
ucaucggcagggccgccau

SEQ ID NO: 3032405 - RNA, 19 nt, Artificial Sequence
  Description of Artificial Sequence: Synthetic oligonucleotide
ugaggggccccugccauuc

SEQ ID NO: 3032406 - RNA, 19 nt, Artificial Sequence
  Description of Artificial Sequence: Synthetic oligonucleotide
cugagacugugccgagggc

SEQ ID NO: 3032407 - RNA, 19 nt, Artificial Sequence
  Description of Artificial Sequence: Synthetic oligonucleotide
uucuccucgugggccagug

SEQ ID NO: 3032408 - RNA, 19 nt, Artificial Sequence
  Description of Artificial Sequence: Synthetic oligonucleotide
gucucuuggguucccucga

SEQ ID NO: 3032409 - RNA, 19 nt, Artificial Sequence
  Description of Artificial Sequence: Synthetic oligonucleotide
guggggcacucucaucggc

SEQ ID NO: 3032410 - RNA, 19 nt, Artificial Sequence
  Description of Artificial Sequence: Synthetic oligonucleotide
ggaucaggaguguucucca

SEQ ID NO: 3032411 - RNA, 19 nt, Artificial Sequence
  Description of Artificial Sequence: Synthetic oligonucleotide
gccgagucugcucucuacc

SEQ ID NO: 3032412 - RNA, 19 nt, Artificial Sequence
  Description of Artificial Sequence: Synthetic oligonucleotide
aggagcucgccgagucugc

SEQ ID NO: 3032413 - RNA, 19 nt, Artificial Sequence
  Description of Artificial Sequence: Synthetic oligonucleotide
gcugccaggcuucggacac

SEQ ID NO: 3032414 - RNA, 19 nt, Artificial Sequence
  Description of Artificial Sequence: Synthetic oligonucleotide
ccugaacuugccaguggcc

SEQ ID NO: 3032415 - RNA, 19 nt, Artificial Sequence
  Description of Artificial Sequence: Synthetic oligonucleotide
uuucaggagcucgccgagu

SEQ ID NO: 3032416 - RNA, 19 nt, Artificial Sequence
  Description of Artificial Sequence: Synthetic oligonucleotide
ggcuucggacacaaaucgg

SEQ ID NO: 3032417 - RNA, 19 nt, Artificial Sequence
  Description of Artificial Sequence: Synthetic oligonucleotide
gacacaaaucggacguucu

SEQ ID NO: 3032418 - RNA, 19 nt, Artificial Sequence
  Description of Artificial Sequence: Synthetic oligonucleotide
gggauguggguguggugag

SEQ ID NO: 3032419 - RNA, 19 nt, Artificial Sequence
  Description of Artificial Sequence: Synthetic oligonucleotide
ucgcgcgcgggaagcgcgg

SEQ ID NO: 3032420 - RNA, 19 nt, Artificial Sequence
  Description of Artificial Sequence: Synthetic oligonucleotide
ucccugagacugugccgag

SEQ ID NO: 3032421 - RNA, 19 nt, Artificial Sequence
  Description of Artificial Sequence: Synthetic oligonucleotide
ucucuaccugcugcugugu

SEQ ID NO: 3032422 - RNA, 19 nt, Artificial Sequence
  Description of Artificial Sequence: Synthetic oligonucleotide
ggggcacucucaucggcag

SEQ ID NO: 3032423 - RNA, 19 nt, Artificial Sequence
  Description of Artificial Sequence: Synthetic oligonucleotide
cucgugggccaguguguag

SEQ ID NO: 3032424 - RNA, 19 nt, Artificial Sequence
  Description of Artificial Sequence: Synthetic oligonucleotide
ugccgagggcugcucgcgc

SEQ ID NO: 3032425 - RNA, 19 nt, Artificial Sequence
  Description of Artificial Sequence: Synthetic oligonucleotide
ugccggcauuucaggagcu

SEQ ID NO: 3032426 - RNA, 19 nt, Artificial Sequence
  Description of Artificial Sequence: Synthetic oligonucleotide
gagggcugcucgcgcgcgg

SEQ ID NO: 3032427 - RNA, 19 nt, Artificial Sequence
  Description of Artificial Sequence: Synthetic oligonucleotide
ggcauuucaggagcucgcc

SEQ ID NO: 3032428 - RNA, 19 nt, Artificial Sequence
  Description of Artificial Sequence: Synthetic oligonucleotide
ucccucgagggaugugggu

SEQ ID NO: 3032429 - RNA, 19 nt, Artificial Sequence
  Description of Artificial Sequence: Synthetic oligonucleotide
cggacguucuccucguggg

SEQ ID NO: 3032430 - RNA, 19 nt, Artificial Sequence
  Description of Artificial Sequence: Synthetic oligonucleotide
ggacacaaaucggacguuc

SEQ ID NO: 3032431 - RNA, 19 nt, Artificial Sequence
  Description of Artificial Sequence: Synthetic oligonucleotide
caggccguggggcacucuc

SEQ ID NO: 3032432 - RNA, 19 nt, Artificial Sequence
  Description of Artificial Sequence: Synthetic oligonucleotide
cuuggcccugaacuugcca

SEQ ID NO: 3032433 - RNA, 19 nt, Artificial Sequence
  Description of Artificial Sequence: Synthetic oligonucleotide
ucuccucgugggccagugu

SEQ ID NO: 3032434 - RNA, 19 nt, Artificial Sequence
  Description of Artificial Sequence: Synthetic oligonucleotide
ugcacaggccguggggcac

SEQ ID NO: 3032435 - RNA, 19 nt, Artificial Sequence
  Description of Artificial Sequence: Synthetic oligonucleotide
aagcgcggucggcggcgcg

SEQ ID NO: 3032436 - RNA, 19 nt, Artificial Sequence
  Description of Artificial Sequence: Synthetic oligonucleotide
ccggcauuucaggagcucg

SEQ ID NO: 3032437 - RNA, 19 nt, Artificial Sequence
  Description of Artificial Sequence: Synthetic oligonucleotide
guggccagggucccugaga

SEQ ID NO: 3032438 - RNA, 19 nt, Artificial Sequence
  Description of Artificial Sequence: Synthetic oligonucleotide
ugccaggcuucggacacaa

SEQ ID NO: 3032439 - RNA, 19 nt, Artificial Sequence
  Description of Artificial Sequence: Synthetic oligonucleotide
gccccugccauucacucga

SEQ ID NO: 3032440 - RNA, 19 nt, Artificial Sequence
  Description of Artificial Sequence: Synthetic oligonucleotide
acugugccgagggcugcuc

SEQ ID NO: 3032441 - RNA, 19 nt, Artificial Sequence
  Description of Artificial Sequence: Synthetic oligonucleotide
agggucccugagacugugc

SEQ ID NO: 3032442 - RNA, 19 nt, Artificial Sequence
  Description of Artificial Sequence: Synthetic oligonucleotide
gugccgagggcugcucgcg

SEQ ID NO: 3032443 - RNA, 19 nt, Artificial Sequence
  Description of Artificial Sequence: Synthetic oligonucleotide
uaccugcugccaggcuucg

SEQ ID NO: 3032444 - RNA, 19 nt, Artificial Sequence
  Description of Artificial Sequence: Synthetic oligonucleotide
ugcucgcgcgcgggaagcg

SEQ ID NO: 3032445 - RNA, 19 nt, Artificial Sequence
  Description of Artificial Sequence: Synthetic oligonucleotide
ggccccugccauucacucg

SEQ ID NO: 3032446 - RNA, 19 nt, Artificial Sequence
  Description of Artificial Sequence: Synthetic oligonucleotide
uggguguggugaggggccc

SEQ ID NO: 3032447 - RNA, 19 nt, Artificial Sequence
  Description of Artificial Sequence: Synthetic oligonucleotide
uaggucucuuggguucccu

SEQ ID NO: 3032448 - RNA, 19 nt, Artificial Sequence
  Description of Artificial Sequence: Synthetic oligonucleotide
gagcucgccgagucugcuc

SEQ ID NO: 3032449 - RNA, 19 nt, Artificial Sequence
  Description of Artificial Sequence: Synthetic oligonucleotide
agggcugcucgcgcgcggg

SEQ ID NO: 3032450 - RNA, 19 nt, Artificial Sequence
  Description of Artificial Sequence: Synthetic oligonucleotide
gggcugccggcauuucagg

SEQ ID NO: 3032451 - RNA, 19 nt, Artificial Sequence
  Description of Artificial Sequence: Synthetic oligonucleotide
agcgcggucggcggcgcgg

SEQ ID NO: 3032452 - RNA, 19 nt, Artificial Sequence
  Description of Artificial Sequence: Synthetic oligonucleotide
ucggcagggccgccaucca

SEQ ID NO: 3032453 - RNA, 19 nt, Artificial Sequence
  Description of Artificial Sequence: Synthetic oligonucleotide
gcccugaacuugccagugg

SEQ ID NO: 3032454 - RNA, 19 nt, Artificial Sequence
  Description of Artificial Sequence: Synthetic oligonucleotide
ggaagcgcggucggcggcg

SEQ ID NO: 3032455 - RNA, 19 nt, Artificial Sequence
  Description of Artificial Sequence: Synthetic oligonucleotide
aucggacguucuccucgug

SEQ ID NO: 3032456 - RNA, 19 nt, Artificial Sequence
  Description of Artificial Sequence: Synthetic oligonucleotide
ggauguggguguggugagg

SEQ ID NO: 3032457 - RNA, 19 nt, Artificial Sequence
  Description of Artificial Sequence: Synthetic oligonucleotide
aguugucgcucuaccugcu

SEQ ID NO: 3032458 - RNA, 19 nt, Artificial Sequence
  Description of Artificial Sequence: Synthetic oligonucleotide
ccaguguguaggucucuug

SEQ ID NO: 3032459 - RNA, 19 nt, Artificial Sequence
  Description of Artificial Sequence: Synthetic oligonucleotide
gggcacucucaucggcagg

SEQ ID NO: 3032460 - RNA, 19 nt, Artificial Sequence
  Description of Artificial Sequence: Synthetic oligonucleotide
uucugcagccggggaucag

SEQ ID NO: 3032461 - RNA, 19 nt, Artificial Sequence
  Description of Artificial Sequence: Synthetic oligonucleotide
gcgggaagcgcggucggcg

SEQ ID NO: 3032462 - RNA, 19 nt, Artificial Sequence
  Description of Artificial Sequence: Synthetic oligonucleotide
guaggucucuuggguuccc

SEQ ID NO: 3032463 - RNA, 19 nt, Artificial Sequence
  Description of Artificial Sequence: Synthetic oligonucleotide
gccgagggcugcucgcgcg

SEQ ID NO: 3032464 - RNA, 19 nt, Artificial Sequence
  Description of Artificial Sequence: Synthetic oligonucleotide
uaccugcugcuguguggga

SEQ ID NO: 3032465 - RNA, 19 nt, Artificial Sequence
  Description of Artificial Sequence: Synthetic oligonucleotide
cugcucgcgcgcgggaagc

SEQ ID NO: 3032466 - RNA, 19 nt, Artificial Sequence
  Description of Artificial Sequence: Synthetic oligonucleotide
cugcagccggggaucagga

SEQ ID NO: 3032467 - RNA, 19 nt, Artificial Sequence
  Description of Artificial Sequence: Synthetic oligonucleotide
cugcacaggccguggggca

SEQ ID NO: 3032468 - RNA, 19 nt, Artificial Sequence
  Description of Artificial Sequence: Synthetic oligonucleotide
acuugccaguggccagggu

SEQ ID NO: 3032469 - RNA, 19 nt, Artificial Sequence
  Description of Artificial Sequence: Synthetic oligonucleotide
cccucgagggaugugggug

SEQ ID NO: 3032470 - RNA, 19 nt, Artificial Sequence
  Description of Artificial Sequence: Synthetic oligonucleotide
gcagccggggaucaggagu

SEQ ID NO: 3032471 - RNA, 19 nt, Artificial Sequence
  Description of Artificial Sequence: Synthetic oligonucleotide
ccggggaucaggaguguuc

SEQ ID NO: 3032472 - RNA, 19 nt, Artificial Sequence
  Description of Artificial Sequence: Synthetic oligonucleotide
cgcucuaccugcugccagg

SEQ ID NO: 3032473 - RNA, 19 nt, Artificial Sequence
  Description of Artificial Sequence: Synthetic oligonucleotide
cucgagggaugugggugug

SEQ ID NO: 3032474 - RNA, 19 nt, Artificial Sequence
  Description of Artificial Sequence: Synthetic oligonucleotide
acacaagccuuggcccuga

SEQ ID NO: 3032475 - RNA, 19 nt, Artificial Sequence
  Description of Artificial Sequence: Synthetic oligonucleotide
ucgccgagucugcucucua

SEQ ID NO: 3032476 - RNA, 19 nt, Artificial Sequence
  Description of Artificial Sequence: Synthetic oligonucleotide
gcugcucgcgcgcgggaag

SEQ ID NO: 3032477 - RNA, 19 nt, Artificial Sequence
  Description of Artificial Sequence: Synthetic oligonucleotide
gccauucacucgauugaac

SEQ ID NO: 3032478 - RNA, 19 nt, Artificial Sequence
  Description of Artificial Sequence: Synthetic oligonucleotide
cgggcugccggcauuucag

SEQ ID NO: 3032479 - RNA, 19 nt, Artificial Sequence
  Description of Artificial Sequence: Synthetic oligonucleotide
ggcccugaacuugccagug

SEQ ID NO: 3032480 - RNA, 19 nt, Artificial Sequence
  Description of Artificial Sequence: Synthetic oligonucleotide
gaagcgcggucggcggcgc

SEQ ID NO: 3032481 - RNA, 19 nt, Artificial Sequence
  Description of Artificial Sequence: Synthetic oligonucleotide
cggcauuucaggagcucgc

SEQ ID NO: 3032482 - RNA, 19 nt, Artificial Sequence
  Description of Artificial Sequence: Synthetic oligonucleotide
ggcugccggcauuucagga

SEQ ID NO: 3032483 - RNA, 19 nt, Artificial Sequence
  Description of Artificial Sequence: Synthetic oligonucleotide
gucgcucuaccugcugcca

SEQ ID NO: 3032484 - RNA, 19 nt, Artificial Sequence
  Description of Artificial Sequence: Synthetic oligonucleotide
cacauacugcacaggccgu

SEQ ID NO: 3032485 - RNA, 19 nt, Artificial Sequence
  Description of Artificial Sequence: Synthetic oligonucleotide
gccuuggcccugaacuugc

SEQ ID NO: 3032486 - RNA, 19 nt, Artificial Sequence
  Description of Artificial Sequence: Synthetic oligonucleotide
guucugcagccggggauca

SEQ ID NO: 3032487 - RNA, 19 nt, Artificial Sequence
  Description of Artificial Sequence: Synthetic oligonucleotide
cgagucugcucucuaccug

SEQ ID NO: 3032488 - RNA, 19 nt, Artificial Sequence
  Description of Artificial Sequence: Synthetic oligonucleotide
accugcugccaggcuucgg

SEQ ID NO: 3032489 - RNA, 19 nt, Artificial Sequence
  Description of Artificial Sequence: Synthetic oligonucleotide
gcucuaccugcugccaggc

SEQ ID NO: 3032490 - RNA, 19 nt, Artificial Sequence
  Description of Artificial Sequence: Synthetic oligonucleotide
ccaggcuucggacacaaau

SEQ ID NO: 3032491 - RNA, 19 nt, Artificial Sequence
  Description of Artificial Sequence: Synthetic oligonucleotide
cugcucucuaccugcugcu

SEQ ID NO: 3032492 - RNA, 19 nt, Artificial Sequence
  Description of Artificial Sequence: Synthetic oligonucleotide
ucucaucggcagggccgcc

SEQ ID NO: 3032493 - RNA, 19 nt, Artificial Sequence
  Description of Artificial Sequence: Synthetic oligonucleotide
gggaagcgcggucggcggc

SEQ ID NO: 3032494 - RNA, 19 nt, Artificial Sequence
  Description of Artificial Sequence: Synthetic oligonucleotide
cucaucggcagggccgcca

SEQ ID NO: 3032495 - RNA, 19 nt, Artificial Sequence
  Description of Artificial Sequence: Synthetic oligonucleotide
cguggggcacucucaucgg

SEQ ID NO: 3032496 - RNA, 19 nt, Artificial Sequence
  Description of Artificial Sequence: Synthetic oligonucleotide
ugcugcugugugggaccug

SEQ ID NO: 3032497 - RNA, 19 nt, Artificial Sequence
  Description of Artificial Sequence: Synthetic oligonucleotide
cagggccgccauccaguug

SEQ ID NO: 3032498 - RNA, 19 nt, Artificial Sequence
  Description of Artificial Sequence: Synthetic oligonucleotide
gcucucuaccugcugcugu

SEQ ID NO: 3032499 - RNA, 19 nt, Artificial Sequence
  Description of Artificial Sequence: Synthetic oligonucleotide
ccuuggcccugaacuugcc

SEQ ID NO: 3032500 - RNA, 19 nt, Artificial Sequence
  Description of Artificial Sequence: Synthetic oligonucleotide
ggggaucaggaguguucuc

SEQ ID NO: 3032501 - RNA, 19 nt, Artificial Sequence
  Description of Artificial Sequence: Synthetic oligonucleotide
gaggggccccugccauuca

SEQ ID NO: 3032502 - RNA, 19 nt, Artificial Sequence
  Description of Artificial Sequence: Synthetic oligonucleotide
ggugaggggccccugccau

SEQ ID NO: 3032503 - RNA, 19 nt, Artificial Sequence
  Description of Artificial Sequence: Synthetic oligonucleotide
cccugagacugugccgagg

SEQ ID NO: 3032504 - RNA, 19 nt, Artificial Sequence
  Description of Artificial Sequence: Synthetic oligonucleotide
cgggaagcgcggucggcgg

SEQ ID NO: 3032505 - RNA, 19 nt, Artificial Sequence
  Description of Artificial Sequence: Synthetic oligonucleotide
ggccgccauccaguugucg

SEQ ID NO: 3032506 - RNA, 19 nt, Artificial Sequence
  Description of Artificial Sequence: Synthetic oligonucleotide
caucggcagggccgccauc

SEQ ID NO: 3032507 - RNA, 19 nt, Artificial Sequence
  Description of Artificial Sequence: Synthetic oligonucleotide
caggaguguucuccacaua

SEQ ID NO: 3032508 - RNA, 19 nt, Artificial Sequence
  Description of Artificial Sequence: Synthetic oligonucleotide
gguucccucgagggaugug

SEQ ID NO: 3032509 - RNA, 19 nt, Artificial Sequence
  Description of Artificial Sequence: Synthetic oligonucleotide
guguggugaggggccccug

SEQ ID NO: 3032510 - RNA, 19 nt, Artificial Sequence
  Description of Artificial Sequence: Synthetic oligonucleotide
gcgcgggaagcgcggucgg

SEQ ID NO: 3032511 - RNA, 19 nt, Artificial Sequence
  Description of Artificial Sequence: Synthetic oligonucleotide
gacugugccgagggcugcu

SEQ ID NO: 3032512 - RNA, 19 nt, Artificial Sequence
  Description of Artificial Sequence: Synthetic oligonucleotide
cgcgcgggaagcgcggucg

SEQ ID NO: 3032513 - RNA, 19 nt, Artificial Sequence
  Description of Artificial Sequence: Synthetic oligonucleotide
ccgagggcugcucgcgcgc

SEQ ID NO: 3032514 - RNA, 19 nt, Artificial Sequence
  Description of Artificial Sequence: Synthetic oligonucleotide
gcacucucaucggcagggc

SEQ ID NO: 3032515 - RNA, 19 nt, Artificial Sequence
  Description of Artificial Sequence: Synthetic oligonucleotide
gcgggcugccggcauuuca

SEQ ID NO: 3032516 - RNA, 19 nt, Artificial Sequence
  Description of Artificial Sequence: Synthetic oligonucleotide
caguggccagggucccuga

SEQ ID NO: 3032517 - RNA, 19 nt, Artificial Sequence
  Description of Artificial Sequence: Synthetic oligonucleotide
agccggggaucaggagugu

SEQ ID NO: 3032518 - RNA, 19 nt, Artificial Sequence
  Description of Artificial Sequence: Synthetic oligonucleotide
gucggcggcgcgggcugcc

SEQ ID NO: 3032519 - RNA, 19 nt, Artificial Sequence
  Description of Artificial Sequence: Synthetic oligonucleotide
cgccgagucugcucucuac

SEQ ID NO: 3032520 - RNA, 19 nt, Artificial Sequence
  Description of Artificial Sequence: Synthetic oligonucleotide
ggcagggccgccauccagu

SEQ ID NO: 3032521 - RNA, 19 nt, Artificial Sequence
  Description of Artificial Sequence: Synthetic oligonucleotide
ggguguggugaggggcccc

SEQ ID NO: 3032522 - RNA, 19 nt, Artificial Sequence
  Description of Artificial Sequence: Synthetic oligonucleotide
ccgagucugcucucuaccu

SEQ ID NO: 3032523 - RNA, 19 nt, Artificial Sequence
  Description of Artificial Sequence: Synthetic oligonucleotide
gcucgcgcgcgggaagcgc

SEQ ID NO: 3032524 - RNA, 19 nt, Artificial Sequence
  Description of Artificial Sequence: Synthetic oligonucleotide
ccucgagggaugugggugu

SEQ ID NO: 3032525 - RNA, 19 nt, Artificial Sequence
  Description of Artificial Sequence: Synthetic oligonucleotide
gccguggggcacucucauc

SEQ ID NO: 3032526 - RNA, 19 nt, Artificial Sequence
  Description of Artificial Sequence: Synthetic oligonucleotide
cucuaccugcugccaggcu

SEQ ID NO: 3032527 - RNA, 19 nt, Artificial Sequence
  Description of Artificial Sequence: Synthetic oligonucleotide
cacaggccguggggcacuc

SEQ ID NO: 3032528 - RNA, 19 nt, Artificial Sequence
  Description of Artificial Sequence: Synthetic oligonucleotide
acaggccguggggcacucu

SEQ ID NO: 3032529 - RNA, 19 nt, Artificial Sequence
  Description of Artificial Sequence: Synthetic oligonucleotide
cucgccgagucugcucucu

SEQ ID NO: 3032530 - RNA, 19 nt, Artificial Sequence
  Description of Artificial Sequence: Synthetic oligonucleotide
gccggcauuucaggagcuc

SEQ ID NO: 3032531 - RNA, 19 nt, Artificial Sequence
  Description of Artificial Sequence: Synthetic oligonucleotide
cugccaggcuucggacaca

SEQ ID NO: 3032532 - RNA, 19 nt, Artificial Sequence
  Description of Artificial Sequence: Synthetic oligonucleotide
gccauccaguugucgcucu

SEQ ID NO: 3032533 - RNA, 19 nt, Artificial Sequence
  Description of Artificial Sequence: Synthetic oligonucleotide
cacaagccuuggcccugaa

SEQ ID NO: 3032534 - RNA, 19 nt, Artificial Sequence
  Description of Artificial Sequence: Synthetic oligonucleotide
gguguggugaggggccccu

SEQ ID NO: 3032535 - RNA, 19 nt, Artificial Sequence
  Description of Artificial Sequence: Synthetic oligonucleotide
cugcugcugugugggaccu

SEQ ID NO: 3032536 - RNA, 19 nt, Artificial Sequence
  Description of Artificial Sequence: Synthetic oligonucleotide
gcgcggucggcggcgcggg

SEQ ID NO: 3032537 - RNA, 19 nt, Artificial Sequence
  Description of Artificial Sequence: Synthetic oligonucleotide
ccgccauccaguugucgcu

SEQ ID NO: 3032538 - RNA, 19 nt, Artificial Sequence
  Description of Artificial Sequence: Synthetic oligonucleotide
gugaggggccccugccauu

SEQ ID NO: 3032539 - RNA, 19 nt, Artificial Sequence
  Description of Artificial Sequence: Synthetic oligonucleotide
cgagggcugcucgcgcgcg

SEQ ID NO: 3032540 - RNA, 19 nt, Artificial Sequence
  Description of Artificial Sequence: Synthetic oligonucleotide
gcucgccgagucugcucuc

SEQ ID NO: 3032541 - RNA, 19 nt, Artificial Sequence
  Description of Artificial Sequence: Synthetic oligonucleotide
ggagcucgccgagucugcu

SEQ ID NO: 3032542 - RNA, 19 nt, Artificial Sequence
  Description of Artificial Sequence: Synthetic oligonucleotide
cgccauccaguugucgcuc

SEQ ID NO: 3032543 - RNA, 19 nt, Artificial Sequence
  Description of Artificial Sequence: Synthetic oligonucleotide
ggcugcucgcgcgcgggaa

SEQ ID NO: 3032544 - RNA, 19 nt, Artificial Sequence
  Description of Artificial Sequence: Synthetic oligonucleotide
gggcugcucgcgcgcggga

SEQ ID NO: 3032545 - RNA, 19 nt, Artificial Sequence
  Description of Artificial Sequence: Synthetic oligonucleotide
ccucgugggccagugugua

SEQ ID NO: 3032546 - RNA, 19 nt, Artificial Sequence
  Description of Artificial Sequence: Synthetic oligonucleotide
ggccagggucccugagacu

SEQ ID NO: 3032547 - RNA, 19 nt, Artificial Sequence
  Description of Artificial Sequence: Synthetic oligonucleotide
gccaguguguaggucucuu

SEQ ID NO: 3032548 - RNA, 19 nt, Artificial Sequence
  Description of Artificial Sequence: Synthetic oligonucleotide
cggggaucaggaguguucu

SEQ ID NO: 3032549 - RNA, 19 nt, Artificial Sequence
  Description of Artificial Sequence: Synthetic oligonucleotide
cggucggcggcgcgggcug

SEQ ID NO: 3032550 - RNA, 19 nt, Artificial Sequence
  Description of Artificial Sequence: Synthetic oligonucleotide
ggucggcggcgcgggcugc

SEQ ID NO: 3032551 - RNA, 19 nt, Artificial Sequence
  Description of Artificial Sequence: Synthetic oligonucleotide
gcagggccgccauccaguu

SEQ ID NO: 3032552 - RNA, 19 nt, Artificial Sequence
  Description of Artificial Sequence: Synthetic oligonucleotide
gcgcgcgggaagcgcgguc

SEQ ID NO: 3032553 - RNA, 19 nt, Artificial Sequence
  Description of Artificial Sequence: Synthetic oligonucleotide
cgagggauguggguguggu

SEQ ID NO: 3032554 - RNA, 19 nt, Artificial Sequence
  Description of Artificial Sequence: Synthetic oligonucleotide
ggguucccucgagggaugu

SEQ ID NO: 3032555 - RNA, 19 nt, Artificial Sequence
  Description of Artificial Sequence: Synthetic oligonucleotide
cgcgggaagcgcggucggc

SEQ ID NO: 3032556 - RNA, 19 nt, Artificial Sequence
  Description of Artificial Sequence: Synthetic oligonucleotide
ggccaguguguaggucucu

SEQ ID NO: 3032557 - RNA, 19 nt, Artificial Sequence
  Description of Artificial Sequence: Synthetic oligonucleotide
gcacaggccguggggcacu

SEQ ID NO: 3032558 - RNA, 19 nt, Artificial Sequence
  Description of Artificial Sequence: Synthetic oligonucleotide
gggccgccauccaguuguc

SEQ ID NO: 3032559 - RNA, 19 nt, Artificial Sequence
  Description of Artificial Sequence: Synthetic oligonucleotide
cgugggccaguguguaggu

SEQ ID NO: 3032560 - RNA, 19 nt, Artificial Sequence
  Description of Artificial Sequence: Synthetic oligonucleotide
gcggucggcggcgcgggcu

SEQ ID NO: 3032561 - RNA, 19 nt, Artificial Sequence
  Description of Artificial Sequence: Synthetic oligonucleotide
gcggcgcgggcugccggca

SEQ ID NO: 3032562 - RNA, 19 nt, Artificial Sequence
  Description of Artificial Sequence: Synthetic oligonucleotide
gccaggcuucggacacaaa

SEQ ID NO: 3032563 - RNA, 19 nt, Artificial Sequence
  Description of Artificial Sequence: Synthetic oligonucleotide
ggcgcgggcugccggcauu

SEQ ID NO: 3032564 - RNA, 19 nt, Artificial Sequence
  Description of Artificial Sequence: Synthetic oligonucleotide
gccggggaucaggaguguu

SEQ ID NO: 3032565 - RNA, 19 nt, Artificial Sequence
  Description of Artificial Sequence: Synthetic oligonucleotide
gccaguggccagggucccu

SEQ ID NO: 3032566 - RNA, 19 nt, Artificial Sequence
  Description of Artificial Sequence: Synthetic oligonucleotide
cgcggucggcggcgcgggc

SEQ ID NO: 3032567 - RNA, 19 nt, Artificial Sequence
  Description of Artificial Sequence: Synthetic oligonucleotide
cccugccauucacucgauu

SEQ ID NO: 3032568 - RNA, 19 nt, Artificial Sequence
  Description of Artificial Sequence: Synthetic oligonucleotide
gcgcgggcugccggcauuu

SEQ ID NO: 3032569 - RNA, 19 nt, Artificial Sequence
  Description of Artificial Sequence: Synthetic oligonucleotide
cgcgggcugccggcauuuc

SEQ ID NO: 3032570 - RNA, 19 nt, Artificial Sequence
  Description of Artificial Sequence: Synthetic oligonucleotide
cggacacaaaucggacguu

SEQ ID NO: 3032571 - RNA, 19 nt, Artificial Sequence
  Description of Artificial Sequence: Synthetic oligonucleotide
ccccugccauucacucgau

SEQ ID NO: 3032572 - RNA, 19 nt, Artificial Sequence
  Description of Artificial Sequence: Synthetic oligonucleotide
cgcgcgcgggaagcgcggu

SEQ ID NO: 3032573 - RNA, 19 nt, Artificial Sequence
  Description of Artificial Sequence: Synthetic oligonucleotide
cggcgcgggcugccggcau

SEQ ID NO: 3032574 - RNA, 19 nt, Artificial Sequence
  Description of Artificial Sequence: Synthetic oligonucleotide
uccauuuuggcaacaagag

SEQ ID NO: 3032575 - RNA, 19 nt, Artificial Sequence
  Description of Artificial Sequence: Synthetic oligonucleotide
uuuggcaacaagaggaugu

SEQ ID NO: 3032576 - RNA, 19 nt, Artificial Sequence
  Description of Artificial Sequence: Synthetic oligonucleotide
cauuuuggcaacaagagga

SEQ ID NO: 3032577 - RNA, 19 nt, Artificial Sequence
  Description of Artificial Sequence: Synthetic oligonucleotide
uucccaaucucccaggaug

SEQ ID NO: 3032578 - RNA, 19 nt, Artificial Sequence
  Description of Artificial Sequence: Synthetic oligonucleotide
ugaccuuucaaacaugaau

SEQ ID NO: 3032579 - RNA, 19 nt, Artificial Sequence
  Description of Artificial Sequence: Synthetic oligonucleotide
auguccaggaauccaagcg

SEQ ID NO: 3032580 - RNA, 19 nt, Artificial Sequence
  Description of Artificial Sequence: Synthetic oligonucleotide
uguccaggaauccaagcgc

SEQ ID NO: 3032581 - RNA, 19 nt, Artificial Sequence
  Description of Artificial Sequence: Synthetic oligonucleotide
ucgaugaccuuucaaacau

SEQ ID NO: 3032582 - RNA, 19 nt, Artificial Sequence
  Description of Artificial Sequence: Synthetic oligonucleotide
uaucgaugaccuuucaaac

SEQ ID NO: 3032583 - RNA, 19 nt, Artificial Sequence
  Description of Artificial Sequence: Synthetic oligonucleotide
guaucgaugaccuuucaaa

SEQ ID NO: 3032584 - RNA, 19 nt, Artificial Sequence
  Description of Artificial Sequence: Synthetic oligonucleotide
acagagguucccaaucucc

SEQ ID NO: 3032585 - RNA, 19 nt, Artificial Sequence
  Description of Artificial Sequence: Synthetic oligonucleotide
uggcccagagcauagaaaa

SEQ ID NO: 3032586 - RNA, 19 nt, Artificial Sequence
  Description of Artificial Sequence: Synthetic oligonucleotide
aucgaugaccuuucaaaca

SEQ ID NO: 3032587 - RNA, 19 nt, Artificial Sequence
  Description of Artificial Sequence: Synthetic oligonucleotide
ugugguaucgaugaccuuu

SEQ ID NO: 3032588 - RNA, 19 nt, Artificial Sequence
  Description of Artificial Sequence: Synthetic oligonucleotide
gauguccaggaauccaagc

SEQ ID NO: 3032589 - RNA, 19 nt, Artificial Sequence
  Description of Artificial Sequence: Synthetic oligonucleotide
cuccauuuuggcaacaaga

SEQ ID NO: 3032590 - RNA, 19 nt, Artificial Sequence
  Description of Artificial Sequence: Synthetic oligonucleotide
ucccaaucucccaggaugc

SEQ ID NO: 3032591 - RNA, 19 nt, Artificial Sequence
  Description of Artificial Sequence: Synthetic oligonucleotide
gagguucccaaucucccag

SEQ ID NO: 3032592 - RNA, 19 nt, Artificial Sequence
  Description of Artificial Sequence: Synthetic oligonucleotide
accuuucaaacaugaaugu

SEQ ID NO: 3032593 - RNA, 19 nt, Artificial Sequence
  Description of Artificial Sequence: Synthetic oligonucleotide
cuuucaaacaugaauguau

SEQ ID NO: 3032594 - RNA, 19 nt, Artificial Sequence
  Description of Artificial Sequence: Synthetic oligonucleotide
gaugaccuuucaaacauga

SEQ ID NO: 3032595 - RNA, 19 nt, Artificial Sequence
  Description of Artificial Sequence: Synthetic oligonucleotide
aagcugcucccaucccucc

SEQ ID NO: 3032596 - RNA, 19 nt, Artificial Sequence
  Description of Artificial Sequence: Synthetic oligonucleotide
cuggcugugguaucgauga

SEQ ID NO: 3032597 - RNA, 19 nt, Artificial Sequence
  Description of Artificial Sequence: Synthetic oligonucleotide
cagagguucccaaucuccc

SEQ ID NO: 3032598 - RNA, 19 nt, Artificial Sequence
  Description of Artificial Sequence: Synthetic oligonucleotide
agaggauguccaggaaucc

SEQ ID NO: 3032599 - RNA, 19 nt, Artificial Sequence
  Description of Artificial Sequence: Synthetic oligonucleotide
caucccuccauuuuggcaa

SEQ ID NO: 3032600 - RNA, 19 nt, Artificial Sequence
  Description of Artificial Sequence: Synthetic oligonucleotide
uuuuggcaacaagaggaug

SEQ ID NO: 3032601 - RNA, 19 nt, Artificial Sequence
  Description of Artificial Sequence: Synthetic oligonucleotide
ggguguguggcccagagca

SEQ ID NO: 3032602 - RNA, 19 nt, Artificial Sequence
  Description of Artificial Sequence: Synthetic oligonucleotide
uguggcccagagcauagaa

SEQ ID NO: 3032603 - RNA, 19 nt, Artificial Sequence
  Description of Artificial Sequence: Synthetic oligonucleotide
ugguauucaggggugugug

SEQ ID NO: 3032604 - RNA, 19 nt, Artificial Sequence
  Description of Artificial Sequence: Synthetic oligonucleotide
gugacagagguucccaauc

SEQ ID NO: 3032605 - RNA, 19 nt, Artificial Sequence
  Description of Artificial Sequence: Synthetic oligonucleotide
ccauuuuggcaacaagagg

SEQ ID NO: 3032606 - RNA, 19 nt, Artificial Sequence
  Description of Artificial Sequence: Synthetic oligonucleotide
agagguucccaaucuccca

SEQ ID NO: 3032607 - RNA, 19 nt, Artificial Sequence
  Description of Artificial Sequence: Synthetic oligonucleotide
gguauucaggggugugugg

SEQ ID NO: 3032608 - RNA, 19 nt, Artificial Sequence
  Description of Artificial Sequence: Synthetic oligonucleotide
gacagagguucccaaucuc

SEQ ID NO: 3032609 - RNA, 19 nt, Artificial Sequence
  Description of Artificial Sequence: Synthetic oligonucleotide
aucccuccauuuuggcaac

SEQ ID NO: 3032610 - RNA, 19 nt, Artificial Sequence
  Description of Artificial Sequence: Synthetic oligonucleotide
cucccaucccuccauuuug

SEQ ID NO: 3032611 - RNA, 19 nt, Artificial Sequence
  Description of Artificial Sequence: Synthetic oligonucleotide
agggguguguggcccagag

SEQ ID NO: 3032612 - RNA, 19 nt, Artificial Sequence
  Description of Artificial Sequence: Synthetic oligonucleotide
gcaacaagaggauguccag

SEQ ID NO: 3032613 - RNA, 19 nt, Artificial Sequence
  Description of Artificial Sequence: Synthetic oligonucleotide
uccaggaauccaagcgccu

SEQ ID NO: 3032614 - RNA, 19 nt, Artificial Sequence
  Description of Artificial Sequence: Synthetic oligonucleotide
guccaggaauccaagcgcc

SEQ ID NO: 3032615 - RNA, 19 nt, Artificial Sequence
  Description of Artificial Sequence: Synthetic oligonucleotide
uuggcaacaagaggauguc

SEQ ID NO: 3032616 - RNA, 19 nt, Artificial Sequence
  Description of Artificial Sequence: Synthetic oligonucleotide
auuuuggcaacaagaggau

SEQ ID NO: 3032617 - RNA, 19 nt, Artificial Sequence
  Description of Artificial Sequence: Synthetic oligonucleotide
ggcaacaagaggaugucca

SEQ ID NO: 3032618 - RNA, 19 nt, Artificial Sequence
  Description of Artificial Sequence: Synthetic oligonucleotide
ugguaucgaugaccuuuca

SEQ ID NO: 3032619 - RNA, 19 nt, Artificial Sequence
  Description of Artificial Sequence: Synthetic oligonucleotide
acuggcugugguaucgaug

SEQ ID NO: 3032620 - RNA, 19 nt, Artificial Sequence
  Description of Artificial Sequence: Synthetic oligonucleotide
cugcugguauucaggggug

SEQ ID NO: 3032621 - RNA, 19 nt, Artificial Sequence
  Description of Artificial Sequence: Synthetic oligonucleotide
aggauguccaggaauccaa

SEQ ID NO: 3032622 - RNA, 19 nt, Artificial Sequence
  Description of Artificial Sequence: Synthetic oligonucleotide
ggcugugguaucgaugacc

SEQ ID NO: 3032623 - RNA, 19 nt, Artificial Sequence
  Description of Artificial Sequence: Synthetic oligonucleotide
gguaucgaugaccuuucaa

SEQ ID NO: 3032624 - RNA, 19 nt, Artificial Sequence
  Description of Artificial Sequence: Synthetic oligonucleotide
gugguaucgaugaccuuuc

SEQ ID NO: 3032625 - RNA, 19 nt, Artificial Sequence
  Description of Artificial Sequence: Synthetic oligonucleotide
aggugacagagguucccaa

SEQ ID NO: 3032626 - RNA, 19 nt, Artificial Sequence
  Description of Artificial Sequence: Synthetic oligonucleotide
gcccagagcauagaaaauc

SEQ ID NO: 3032627 - RNA, 19 nt, Artificial Sequence
  Description of Artificial Sequence: Synthetic oligonucleotide
ggauguccaggaauccaag

SEQ ID NO: 3032628 - RNA, 19 nt, Artificial Sequence
  Description of Artificial Sequence: Synthetic oligonucleotide
ugcugguauucaggggugu

SEQ ID NO: 3032629 - RNA, 19 nt, Artificial Sequence
  Description of Artificial Sequence: Synthetic oligonucleotide
agcugcucccaucccucca

SEQ ID NO: 3032630 - RNA, 19 nt, Artificial Sequence
  Description of Artificial Sequence: Synthetic oligonucleotide
ccuccauuuuggcaacaag

SEQ ID NO: 3032631 - RNA, 19 nt, Artificial Sequence
  Description of Artificial Sequence: Synthetic oligonucleotide
uggcugugguaucgaugac

SEQ ID NO: 3032632 - RNA, 19 nt, Artificial Sequence
  Description of Artificial Sequence: Synthetic oligonucleotide
ugcucccaucccuccauuu

SEQ ID NO: 3032633 - RNA, 19 nt, Artificial Sequence
  Description of Artificial Sequence: Synthetic oligonucleotide
augaccuuucaaacaugaa

SEQ ID NO: 3032634 - RNA, 19 nt, Artificial Sequence
  Description of Artificial Sequence: Synthetic oligonucleotide
gguucccaaucucccagga

SEQ ID NO: 3032635 - RNA, 19 nt, Artificial Sequence
  Description of Artificial Sequence: Synthetic oligonucleotide
aggaauccaagcgccucuu

SEQ ID NO: 3032636 - RNA, 19 nt, Artificial Sequence
  Description of Artificial Sequence: Synthetic oligonucleotide
guggcccagagcauagaaa

SEQ ID NO: 3032637 - RNA, 19 nt, Artificial Sequence
  Description of Artificial Sequence: Synthetic oligonucleotide
ccaucccuccauuuuggca

SEQ ID NO: 3032638 - RNA, 19 nt, Artificial Sequence
  Description of Artificial Sequence: Synthetic oligonucleotide
cccaucccuccauuuuggc

SEQ ID NO: 3032639 - RNA, 19 nt, Artificial Sequence
  Description of Artificial Sequence: Synthetic oligonucleotide
guguguggcccagagcaua

SEQ ID NO: 3032640 - RNA, 19 nt, Artificial Sequence
  Description of Artificial Sequence: Synthetic oligonucleotide
ucccuccauuuuggcaaca

SEQ ID NO: 3032641 - RNA, 19 nt, Artificial Sequence
  Description of Artificial Sequence: Synthetic oligonucleotide
ccaaucucccaggaugcuc

SEQ ID NO: 3032642 - RNA, 19 nt, Artificial Sequence
  Description of Artificial Sequence: Synthetic oligonucleotide
ggugacagagguucccaau

SEQ ID NO: 3032643 - RNA, 19 nt, Artificial Sequence
  Description of Artificial Sequence: Synthetic oligonucleotide
gggguguguggcccagagc

SEQ ID NO: 3032644 - RNA, 19 nt, Artificial Sequence
  Description of Artificial Sequence: Synthetic oligonucleotide
ccaggaauccaagcgccuc

SEQ ID NO: 3032645 - RNA, 19 nt, Artificial Sequence
  Description of Artificial Sequence: Synthetic oligonucleotide
guucccaaucucccaggau

SEQ ID NO: 3032646 - RNA, 19 nt, Artificial Sequence
  Description of Artificial Sequence: Synthetic oligonucleotide
cgaugaccuuucaaacaug

SEQ ID NO: 3032647 - RNA, 19 nt, Artificial Sequence
  Description of Artificial Sequence: Synthetic oligonucleotide
ccuuucaaacaugaaugua

SEQ ID NO: 3032648 - RNA, 19 nt, Artificial Sequence
  Description of Artificial Sequence: Synthetic oligonucleotide
guguggcccagagcauaga

SEQ ID NO: 3032649 - RNA, 19 nt, Artificial Sequence
  Description of Artificial Sequence: Synthetic oligonucleotide
gcucccaucccuccauuuu

SEQ ID NO: 3032650 - RNA, 19 nt, Artificial Sequence
  Description of Artificial Sequence: Synthetic oligonucleotide
cacuggcugugguaucgau

SEQ ID NO: 3032651 - RNA, 19 nt, Artificial Sequence
  Description of Artificial Sequence: Synthetic oligonucleotide
gcugcucccaucccuccau

SEQ ID NO: 3032652 - RNA, 19 nt, Artificial Sequence
  Description of Artificial Sequence: Synthetic oligonucleotide
cccuccauuuuggcaacaa

SEQ ID NO: 3032653 - RNA, 19 nt, Artificial Sequence
  Description of Artificial Sequence: Synthetic oligonucleotide
cugugguaucgaugaccuu

SEQ ID NO: 3032654 - RNA, 19 nt, Artificial Sequence
  Description of Artificial Sequence: Synthetic oligonucleotide
gguguguggcccagagcau

SEQ ID NO: 3032655 - RNA, 19 nt, Artificial Sequence
  Description of Artificial Sequence: Synthetic oligonucleotide
cagggguguguggcccaga

SEQ ID NO: 3032656 - RNA, 19 nt, Artificial Sequence
  Description of Artificial Sequence: Synthetic oligonucleotide
cugcucccaucccuccauu

SEQ ID NO: 3032657 - RNA, 19 nt, Artificial Sequence
  Description of Artificial Sequence: Synthetic oligonucleotide
cccaaucucccaggaugcu

SEQ ID NO: 3032658 - RNA, 19 nt, Artificial Sequence
  Description of Artificial Sequence: Synthetic oligonucleotide
uaauauaccuguuugaggc

SEQ ID NO: 3032659 - RNA, 19 nt, Artificial Sequence
  Description of Artificial Sequence: Synthetic oligonucleotide
aaggagaagagccaggagg

SEQ ID NO: 3032660 - RNA, 19 nt, Artificial Sequence
  Description of Artificial Sequence: Synthetic oligonucleotide
uuuucauuguagaaaauag

SEQ ID NO: 3032661 - RNA, 19 nt, Artificial Sequence
  Description of Artificial Sequence: Synthetic oligonucleotide
cauuguagaaaauagcucc

SEQ ID NO: 3032662 - RNA, 19 nt, Artificial Sequence
  Description of Artificial Sequence: Synthetic oligonucleotide
uucauuguagaaaauagcu

SEQ ID NO: 3032663 - RNA, 19 nt, Artificial Sequence
  Description of Artificial Sequence: Synthetic oligonucleotide
ugggaaaagagccucaggg

SEQ ID NO: 3032664 - RNA, 19 nt, Artificial Sequence
  Description of Artificial Sequence: Synthetic oligonucleotide
agaaguuccacacauacug

SEQ ID NO: 3032665 - RNA, 19 nt, Artificial Sequence
  Description of Artificial Sequence: Synthetic oligonucleotide
agaaaauagcuccucauuc

SEQ ID NO: 3032666 - RNA, 19 nt, Artificial Sequence
  Description of Artificial Sequence: Synthetic oligonucleotide
uuguaauugggaccgaagg

SEQ ID NO: 3032667 - RNA, 19 nt, Artificial Sequence
  Description of Artificial Sequence: Synthetic oligonucleotide
aauauaccuguuugaggcc

SEQ ID NO: 3032668 - RNA, 19 nt, Artificial Sequence
  Description of Artificial Sequence: Synthetic oligonucleotide
uuuucuuuguaauugggac

SEQ ID NO: 3032669 - RNA, 19 nt, Artificial Sequence
  Description of Artificial Sequence: Synthetic oligonucleotide
uucuuuguaauugggaccg

SEQ ID NO: 3032670 - RNA, 19 nt, Artificial Sequence
  Description of Artificial Sequence: Synthetic oligonucleotide
uuucauuguagaaaauagc

SEQ ID NO: 3032671 - RNA, 19 nt, Artificial Sequence
  Description of Artificial Sequence: Synthetic oligonucleotide
acugucagaaguuccacac

SEQ ID NO: 3032672 - RNA, 19 nt, Artificial Sequence
  Description of Artificial Sequence: Synthetic oligonucleotide
aaaauagcuccucauucug

SEQ ID NO: 3032673 - RNA, 19 nt, Artificial Sequence
  Description of Artificial Sequence: Synthetic oligonucleotide
aaguuccacacauacuggg

SEQ ID NO: 3032674 - RNA, 19 nt, Artificial Sequence
  Description of Artificial Sequence: Synthetic oligonucleotide
ucagaaguuccacacauac

SEQ ID NO: 3032675 - RNA, 19 nt, Artificial Sequence
  Description of Artificial Sequence: Synthetic oligonucleotide
guagcggagaucuugcugg

SEQ ID NO: 3032676 - RNA, 19 nt, Artificial Sequence
  Description of Artificial Sequence: Synthetic oligonucleotide
agaucuugcuggucgagcc

SEQ ID NO: 3032677 - RNA, 19 nt, Artificial Sequence
  Description of Artificial Sequence: Synthetic oligonucleotide
guagucaaacaccaguagg

SEQ ID NO: 3032678 - RNA, 19 nt, Artificial Sequence
  Description of Artificial Sequence: Synthetic oligonucleotide
uuucuuuguaauugggacc

SEQ ID NO: 3032679 - RNA, 19 nt, Artificial Sequence
  Description of Artificial Sequence: Synthetic oligonucleotide
aauagcuccucauucugcu

SEQ ID NO: 3032680 - RNA, 19 nt, Artificial Sequence
  Description of Artificial Sequence: Synthetic oligonucleotide
uuuguaauugggaccgaag

SEQ ID NO: 3032681 - RNA, 19 nt, Artificial Sequence
  Description of Artificial Sequence: Synthetic oligonucleotide
gaggguaaggagaagagcc

SEQ ID NO: 3032682 - RNA, 19 nt, Artificial Sequence
  Description of Artificial Sequence: Synthetic oligonucleotide
uguagaaaauagcuccuca

SEQ ID NO: 3032683 - RNA, 19 nt, Artificial Sequence
  Description of Artificial Sequence: Synthetic oligonucleotide
ucagcguagucaaacacca

SEQ ID NO: 3032684 - RNA, 19 nt, Artificial Sequence
  Description of Artificial Sequence: Synthetic oligonucleotide
uguaauugggaccgaaggu

SEQ ID NO: 3032685 - RNA, 19 nt, Artificial Sequence
  Description of Artificial Sequence: Synthetic oligonucleotide
uucagcguagucaaacacc

SEQ ID NO: 3032686 - RNA, 19 nt, Artificial Sequence
  Description of Artificial Sequence: Synthetic oligonucleotide
uaauugggaccgaagguag

SEQ ID NO: 3032687 - RNA, 19 nt, Artificial Sequence
  Description of Artificial Sequence: Synthetic oligonucleotide
gaguuuucuuuguaauugg

SEQ ID NO: 3032688 - RNA, 19 nt, Artificial Sequence
  Description of Artificial Sequence: Synthetic oligonucleotide
uacugggugucgaaggugg

SEQ ID NO: 3032689 - RNA, 19 nt, Artificial Sequence
  Description of Artificial Sequence: Synthetic oligonucleotide
aguacgugguaauauaccu

SEQ ID NO: 3032690 - RNA, 19 nt, Artificial Sequence
  Description of Artificial Sequence: Synthetic oligonucleotide
aaauagcuccucauucugc

SEQ ID NO: 3032691 - RNA, 19 nt, Artificial Sequence
  Description of Artificial Sequence: Synthetic oligonucleotide
ucauuguagaaaauagcuc

SEQ ID NO: 3032692 - RNA, 19 nt, Artificial Sequence
  Description of Artificial Sequence: Synthetic oligonucleotide
uacgugguaauauaccugu

SEQ ID NO: 3032693 - RNA, 19 nt, Artificial Sequence
  Description of Artificial Sequence: Synthetic oligonucleotide
ucgaaggugggaaaagagc

SEQ ID NO: 3032694 - RNA, 19 nt, Artificial Sequence
  Description of Artificial Sequence: Synthetic oligonucleotide
auauaccuguuugaggccc

SEQ ID NO: 3032695 - RNA, 19 nt, Artificial Sequence
  Description of Artificial Sequence: Synthetic oligonucleotide
acauacugggugucgaagg

SEQ ID NO: 3032696 - RNA, 19 nt, Artificial Sequence
  Description of Artificial Sequence: Synthetic oligonucleotide
gugguaauauaccuguuug

SEQ ID NO: 3032697 - RNA, 19 nt, Artificial Sequence
  Description of Artificial Sequence: Synthetic oligonucleotide
agaagagccaggaggaggc

SEQ ID NO: 3032698 - RNA, 19 nt, Artificial Sequence
  Description of Artificial Sequence: Synthetic oligonucleotide
uagaggguaaggagaagag

SEQ ID NO: 3032699 - RNA, 19 nt, Artificial Sequence
  Description of Artificial Sequence: Synthetic oligonucleotide
uguuugaggcccaugaguu

SEQ ID NO: 3032700 - RNA, 19 nt, Artificial Sequence
  Description of Artificial Sequence: Synthetic oligonucleotide
caagguagaggguaaggag

SEQ ID NO: 3032701 - RNA, 19 nt, Artificial Sequence
  Description of Artificial Sequence: Synthetic oligonucleotide
aagguagcggagaucuugc

SEQ ID NO: 3032702 - RNA, 19 nt, Artificial Sequence
  Description of Artificial Sequence: Synthetic oligonucleotide
aaggugggaaaagagccuc

SEQ ID NO: 3032703 - RNA, 19 nt, Artificial Sequence
  Description of Artificial Sequence: Synthetic oligonucleotide
ucauucugcuuccccaucc

SEQ ID NO: 3032704 - RNA, 19 nt, Artificial Sequence
  Description of Artificial Sequence: Synthetic oligonucleotide
gguaauauaccuguuugag

SEQ ID NO: 3032705 - RNA, 19 nt, Artificial Sequence
  Description of Artificial Sequence: Synthetic oligonucleotide
agaggguaaggagaagagc

SEQ ID NO: 3032706 - RNA, 19 nt, Artificial Sequence
  Description of Artificial Sequence: Synthetic oligonucleotide
agcguagucaaacaccagu

SEQ ID NO: 3032707 - RNA, 19 nt, Artificial Sequence
  Description of Artificial Sequence: Synthetic oligonucleotide
aagguagaggguaaggaga

SEQ ID NO: 3032708 - RNA, 19 nt, Artificial Sequence
  Description of Artificial Sequence: Synthetic oligonucleotide
uagaaaauagcuccucauu

SEQ ID NO: 3032709 - RNA, 19 nt, Artificial Sequence
  Description of Artificial Sequence: Synthetic oligonucleotide
ugguaauauaccuguuuga

SEQ ID NO: 3032710 - RNA, 19 nt, Artificial Sequence
  Description of Artificial Sequence: Synthetic oligonucleotide
uuugaggcccaugaguuca

SEQ ID NO: 3032711 - RNA, 19 nt, Artificial Sequence
  Description of Artificial Sequence: Synthetic oligonucleotide
aaaagagccucagggcccg

SEQ ID NO: 3032712 - RNA, 19 nt, Artificial Sequence
  Description of Artificial Sequence: Synthetic oligonucleotide
augaguucagcguagucaa

SEQ ID NO: 3032713 - RNA, 19 nt, Artificial Sequence
  Description of Artificial Sequence: Synthetic oligonucleotide
gaagguagcggagaucuug

SEQ ID NO: 3032714 - RNA, 19 nt, Artificial Sequence
  Description of Artificial Sequence: Synthetic oligonucleotide
agacuucagggccagaggu

SEQ ID NO: 3032715 - RNA, 19 nt, Artificial Sequence
  Description of Artificial Sequence: Synthetic oligonucleotide
gagaagagccaggaggagg

SEQ ID NO: 3032716 - RNA, 19 nt, Artificial Sequence
  Description of Artificial Sequence: Synthetic oligonucleotide
guggggaccacccauagca

SEQ ID NO: 3032717 - RNA, 19 nt, Artificial Sequence
  Description of Artificial Sequence: Synthetic oligonucleotide
gaaguuccacacauacugg

SEQ ID NO: 3032718 - RNA, 19 nt, Artificial Sequence
  Description of Artificial Sequence: Synthetic oligonucleotide
aauugggaccgaagguagc

SEQ ID NO: 3032719 - RNA, 19 nt, Artificial Sequence
  Description of Artificial Sequence: Synthetic oligonucleotide
caguacgugguaauauacc

SEQ ID NO: 3032720 - RNA, 19 nt, Artificial Sequence
  Description of Artificial Sequence: Synthetic oligonucleotide
auugggaccgaagguagcg

SEQ ID NO: 3032721 - RNA, 19 nt, Artificial Sequence
  Description of Artificial Sequence: Synthetic oligonucleotide
ggaguuuucuuuguaauug

SEQ ID NO: 3032722 - RNA, 19 nt, Artificial Sequence
  Description of Artificial Sequence: Synthetic oligonucleotide
gaaaauagcuccucauucu

SEQ ID NO: 3032723 - RNA, 19 nt, Artificial Sequence
  Description of Artificial Sequence: Synthetic oligonucleotide
guucacccagcccaguacg

SEQ ID NO: 3032724 - RNA, 19 nt, Artificial Sequence
  Description of Artificial Sequence: Synthetic oligonucleotide
aguuuucuuuguaauuggg

SEQ ID NO: 3032725 - RNA, 19 nt, Artificial Sequence
  Description of Artificial Sequence: Synthetic oligonucleotide
guuccacacauacugggug

SEQ ID NO: 3032726 - RNA, 19 nt, Artificial Sequence
  Description of Artificial Sequence: Synthetic oligonucleotide
uccucauucugcuucccca

SEQ ID NO: 3032727 - RNA, 19 nt, Artificial Sequence
  Description of Artificial Sequence: Synthetic oligonucleotide
accuguuugaggcccauga

SEQ ID NO: 3032728 - RNA, 19 nt, Artificial Sequence
  Description of Artificial Sequence: Synthetic oligonucleotide
acuucagggccagagguuc

SEQ ID NO: 3032729 - RNA, 19 nt, Artificial Sequence
  Description of Artificial Sequence: Synthetic oligonucleotide
gccaagccaagguagaggg

SEQ ID NO: 3032730 - RNA, 19 nt, Artificial Sequence
  Description of Artificial Sequence: Synthetic oligonucleotide
aggaggaggcgauccgugc

SEQ ID NO: 3032731 - RNA, 19 nt, Artificial Sequence
  Description of Artificial Sequence: Synthetic oligonucleotide
gaggcccaugaguucagcg

SEQ ID NO: 3032732 - RNA, 19 nt, Artificial Sequence
  Description of Artificial Sequence: Synthetic oligonucleotide
ugagccaagccaagguaga

SEQ ID NO: 3032733 - RNA, 19 nt, Artificial Sequence
  Description of Artificial Sequence: Synthetic oligonucleotide
cagagguucacccagccca

SEQ ID NO: 3032734 - RNA, 19 nt, Artificial Sequence
  Description of Artificial Sequence: Synthetic oligonucleotide
ugcuggucgagcccgugag

SEQ ID NO: 3032735 - RNA, 19 nt, Artificial Sequence
  Description of Artificial Sequence: Synthetic oligonucleotide
aguucagcguagucaaaca

SEQ ID NO: 3032736 - RNA, 19 nt, Artificial Sequence
  Description of Artificial Sequence: Synthetic oligonucleotide
uagcacugucagaaguucc

SEQ ID NO: 3032737 - RNA, 19 nt, Artificial Sequence
  Description of Artificial Sequence: Synthetic oligonucleotide
caugaguucagcguaguca

SEQ ID NO: 3032738 - RNA, 19 nt, Artificial Sequence
  Description of Artificial Sequence: Synthetic oligonucleotide
gaguucagcguagucaaac

SEQ ID NO: 3032739 - RNA, 19 nt, Artificial Sequence
  Description of Artificial Sequence: Synthetic oligonucleotide
uuccacacauacugggugu

SEQ ID NO: 3032740 - RNA, 19 nt, Artificial Sequence
  Description of Artificial Sequence: Synthetic oligonucleotide
cgaaggugggaaaagagcc

SEQ ID NO: 3032741 - RNA, 19 nt, Artificial Sequence
  Description of Artificial Sequence: Synthetic oligonucleotide
guucagcguagucaaacac

SEQ ID NO: 3032742 - RNA, 19 nt, Artificial Sequence
  Description of Artificial Sequence: Synthetic oligonucleotide
guuuucuuuguaauuggga

SEQ ID NO: 3032743 - RNA, 19 nt, Artificial Sequence
  Description of Artificial Sequence: Synthetic oligonucleotide
acccauagcacugucagaa

SEQ ID NO: 3032744 - RNA, 19 nt, Artificial Sequence
  Description of Artificial Sequence: Synthetic oligonucleotide
auuguagaaaauagcuccu

SEQ ID NO: 3032745 - RNA, 19 nt, Artificial Sequence
  Description of Artificial Sequence: Synthetic oligonucleotide
uggaguuuucuuuguaauu

SEQ ID NO: 3032746 - RNA, 19 nt, Artificial Sequence
  Description of Artificial Sequence: Synthetic oligonucleotide
ggagcuggaguuuucuuug

SEQ ID NO: 3032747 - RNA, 19 nt, Artificial Sequence
  Description of Artificial Sequence: Synthetic oligonucleotide
guagaggguaaggagaaga

SEQ ID NO: 3032748 - RNA, 19 nt, Artificial Sequence
  Description of Artificial Sequence: Synthetic oligonucleotide
gugagccaagccaagguag

SEQ ID NO: 3032749 - RNA, 19 nt, Artificial Sequence
  Description of Artificial Sequence: Synthetic oligonucleotide
gaucuugcuggucgagccc

SEQ ID NO: 3032750 - RNA, 19 nt, Artificial Sequence
  Description of Artificial Sequence: Synthetic oligonucleotide
uauaccuguuugaggccca

SEQ ID NO: 3032751 - RNA, 19 nt, Artificial Sequence
  Description of Artificial Sequence: Synthetic oligonucleotide
gcggagaucuugcuggucg

SEQ ID NO: 3032752 - RNA, 19 nt, Artificial Sequence
  Description of Artificial Sequence: Synthetic oligonucleotide
aucuugcuggucgagcccg

SEQ ID NO: 3032753 - RNA, 19 nt, Artificial Sequence
  Description of Artificial Sequence: Synthetic oligonucleotide
ugucgaaggugggaaaaga

SEQ ID NO: 3032754 - RNA, 19 nt, Artificial Sequence
  Description of Artificial Sequence: Synthetic oligonucleotide
gucgaaggugggaaaagag

SEQ ID NO: 3032755 - RNA, 19 nt, Artificial Sequence
  Description of Artificial Sequence: Synthetic oligonucleotide
guaauugggaccgaaggua

SEQ ID NO: 3032756 - RNA, 19 nt, Artificial Sequence
  Description of Artificial Sequence: Synthetic oligonucleotide
gugggaaaagagccucagg

SEQ ID NO: 3032757 - RNA, 19 nt, Artificial Sequence
  Description of Artificial Sequence: Synthetic oligonucleotide
aggcccaugaguucagcgu

SEQ ID NO: 3032758 - RNA, 19 nt, Artificial Sequence
  Description of Artificial Sequence: Synthetic oligonucleotide
agccaggaggaggcgaucc

SEQ ID NO: 3032759 - RNA, 19 nt, Artificial Sequence
  Description of Artificial Sequence: Synthetic oligonucleotide
cacccagcccaguacgugg

SEQ ID NO: 3032760 - RNA, 19 nt, Artificial Sequence
  Description of Artificial Sequence: Synthetic oligonucleotide
aggagcuggaguuuucuuu

SEQ ID NO: 3032761 - RNA, 19 nt, Artificial Sequence
  Description of Artificial Sequence: Synthetic oligonucleotide
gagcccgugagccaagcca

SEQ ID NO: 3032762 - RNA, 19 nt, Artificial Sequence
  Description of Artificial Sequence: Synthetic oligonucleotide
gaggaggcgauccgugccc

SEQ ID NO: 3032763 - RNA, 19 nt, Artificial Sequence
  Description of Artificial Sequence: Synthetic oligonucleotide
guaaggagaagagccagga

SEQ ID NO: 3032764 - RNA, 19 nt, Artificial Sequence
  Description of Artificial Sequence: Synthetic oligonucleotide
agagccucagggcccgagg

SEQ ID NO: 3032765 - RNA, 19 nt, Artificial Sequence
  Description of Artificial Sequence: Synthetic oligonucleotide
cuggucgagcccgugagcc

SEQ ID NO: 3032766 - RNA, 19 nt, Artificial Sequence
  Description of Artificial Sequence: Synthetic oligonucleotide
guacgugguaauauaccug

SEQ ID NO: 3032767 - RNA, 19 nt, Artificial Sequence
  Description of Artificial Sequence: Synthetic oligonucleotide
gagaucuugcuggucgagc

SEQ ID NO: 3032768 - RNA, 19 nt, Artificial Sequence
  Description of Artificial Sequence: Synthetic oligonucleotide
ugggaccgaagguagcgga

SEQ ID NO: 3032769 - RNA, 19 nt, Artificial Sequence
  Description of Artificial Sequence: Synthetic oligonucleotide
cagggccagagguucaccc

SEQ ID NO: 3032770 - RNA, 19 nt, Artificial Sequence
  Description of Artificial Sequence: Synthetic oligonucleotide
uugggaccgaagguagcgg

SEQ ID NO: 3032771 - RNA, 19 nt, Artificial Sequence
  Description of Artificial Sequence: Synthetic oligonucleotide
gauccgugcccaacguggg

SEQ ID NO: 3032772 - RNA, 19 nt, Artificial Sequence
  Description of Artificial Sequence: Synthetic oligonucleotide
cacauacugggugucgaag

SEQ ID NO: 3032773 - RNA, 19 nt, Artificial Sequence
  Description of Artificial Sequence: Synthetic oligonucleotide
gguagcggagaucuugcug

SEQ ID NO: 3032774 - RNA, 19 nt, Artificial Sequence
  Description of Artificial Sequence: Synthetic oligonucleotide
ggagacuucagggccagag

SEQ ID NO: 3032775 - RNA, 19 nt, Artificial Sequence
  Description of Artificial Sequence: Synthetic oligonucleotide
guagaaaauagcuccucau

SEQ ID NO: 3032776 - RNA, 19 nt, Artificial Sequence
  Description of Artificial Sequence: Synthetic oligonucleotide
agcacugucagaaguucca

SEQ ID NO: 3032777 - RNA, 19 nt, Artificial Sequence
  Description of Artificial Sequence: Synthetic oligonucleotide
uucacccagcccaguacgu

SEQ ID NO: 3032778 - RNA, 19 nt, Artificial Sequence
  Description of Artificial Sequence: Synthetic oligonucleotide
ugggugucgaaggugggaa

SEQ ID NO: 3032779 - RNA, 19 nt, Artificial Sequence
  Description of Artificial Sequence: Synthetic oligonucleotide
aagagccaggaggaggcga

SEQ ID NO: 3032780 - RNA, 19 nt, Artificial Sequence
  Description of Artificial Sequence: Synthetic oligonucleotide
gguaaggagaagagccagg

SEQ ID NO: 3032781 - RNA, 19 nt, Artificial Sequence
  Description of Artificial Sequence: Synthetic oligonucleotide
ccacccauagcacugucag

SEQ ID NO: 3032782 - RNA, 19 nt, Artificial Sequence
  Description of Artificial Sequence: Synthetic oligonucleotide
ccaguacgugguaauauac

SEQ ID NO: 3032783 - RNA, 19 nt, Artificial Sequence
  Description of Artificial Sequence: Synthetic oligonucleotide
cuccucauucugcuucccc

SEQ ID NO: 3032784 - RNA, 19 nt, Artificial Sequence
  Description of Artificial Sequence: Synthetic oligonucleotide
gcccgaggagacuucaggg

SEQ ID NO: 3032785 - RNA, 19 nt, Artificial Sequence
  Description of Artificial Sequence: Synthetic oligonucleotide
aguuccacacauacugggu

SEQ ID NO: 3032786 - RNA, 19 nt, Artificial Sequence
  Description of Artificial Sequence: Synthetic oligonucleotide
uugcuggucgagcccguga

SEQ ID NO: 3032787 - RNA, 19 nt, Artificial Sequence
  Description of Artificial Sequence: Synthetic oligonucleotide
uccgugcccaacgugggga

SEQ ID NO: 3032788 - RNA, 19 nt, Artificial Sequence
  Description of Artificial Sequence: Synthetic oligonucleotide
gagccaagccaagguagag

SEQ ID NO: 3032789 - RNA, 19 nt, Artificial Sequence
  Description of Artificial Sequence: Synthetic oligonucleotide
auacugggugucgaaggug

SEQ ID NO: 3032790 - RNA, 19 nt, Artificial Sequence
  Description of Artificial Sequence: Synthetic oligonucleotide
auccgugcccaacgugggg

SEQ ID NO: 3032791 - RNA, 19 nt, Artificial Sequence
  Description of Artificial Sequence: Synthetic oligonucleotide
acguggggaccacccauag

SEQ ID NO: 3032792 - RNA, 19 nt, Artificial Sequence
  Description of Artificial Sequence: Synthetic oligonucleotide
gaagagccaggaggaggcg

SEQ ID NO: 3032793 - RNA, 19 nt, Artificial Sequence
  Description of Artificial Sequence: Synthetic oligonucleotide
cgauccgugcccaacgugg

SEQ ID NO: 3032794 - RNA, 19 nt, Artificial Sequence
  Description of Artificial Sequence: Synthetic oligonucleotide
agaggagcuggaguuuucu

SEQ ID NO: 3032795 - RNA, 19 nt, Artificial Sequence
  Description of Artificial Sequence: Synthetic oligonucleotide
ggcccgaggagacuucagg

SEQ ID NO: 3032796 - RNA, 19 nt, Artificial Sequence
  Description of Artificial Sequence: Synthetic oligonucleotide
uggggaccacccauagcac

SEQ ID NO: 3032797 - RNA, 19 nt, Artificial Sequence
  Description of Artificial Sequence: Synthetic oligonucleotide
ccgaggagacuucagggcc

SEQ ID NO: 3032798 - RNA, 19 nt, Artificial Sequence
  Description of Artificial Sequence: Synthetic oligonucleotide
caggaggaggcgauccgug

SEQ ID NO: 3032799 - RNA, 19 nt, Artificial Sequence
  Description of Artificial Sequence: Synthetic oligonucleotide
gugucgaaggugggaaaag

SEQ ID NO: 3032800 - RNA, 19 nt, Artificial Sequence
  Description of Artificial Sequence: Synthetic oligonucleotide
ugaguucagcguagucaaa

SEQ ID NO: 3032801 - RNA, 19 nt, Artificial Sequence
  Description of Artificial Sequence: Synthetic oligonucleotide
ucacccagcccaguacgug

SEQ ID NO: 3032802 - RNA, 19 nt, Artificial Sequence
  Description of Artificial Sequence: Synthetic oligonucleotide
ggguaaggagaagagccag

SEQ ID NO: 3032803 - RNA, 19 nt, Artificial Sequence
  Description of Artificial Sequence: Synthetic oligonucleotide
agguagaggguaaggagaa

SEQ ID NO: 3032804 - RNA, 19 nt, Artificial Sequence
  Description of Artificial Sequence: Synthetic oligonucleotide
aagagccucagggcccgag

SEQ ID NO: 3032805 - RNA, 19 nt, Artificial Sequence
  Description of Artificial Sequence: Synthetic oligonucleotide
acacauacugggugucgaa

SEQ ID NO: 3032806 - RNA, 19 nt, Artificial Sequence
  Description of Artificial Sequence: Synthetic oligonucleotide
gggucuggagaggagcugg

SEQ ID NO: 3032807 - RNA, 19 nt, Artificial Sequence
  Description of Artificial Sequence: Synthetic oligonucleotide
aggguaaggagaagagcca

SEQ ID NO: 3032808 - RNA, 19 nt, Artificial Sequence
  Description of Artificial Sequence: Synthetic oligonucleotide
ggaggaggcgauccgugcc

SEQ ID NO: 3032809 - RNA, 19 nt, Artificial Sequence
  Description of Artificial Sequence: Synthetic oligonucleotide
cuguuugaggcccaugagu

SEQ ID NO: 3032810 - RNA, 19 nt, Artificial Sequence
  Description of Artificial Sequence: Synthetic oligonucleotide
cacugucagaaguuccaca

SEQ ID NO: 3032811 - RNA, 19 nt, Artificial Sequence
  Description of Artificial Sequence: Synthetic oligonucleotide
agagguucacccagcccag

SEQ ID NO: 3032812 - RNA, 19 nt, Artificial Sequence
  Description of Artificial Sequence: Synthetic oligonucleotide
ggugggaaaagagccucag

SEQ ID NO: 3032813 - RNA, 19 nt, Artificial Sequence
  Description of Artificial Sequence: Synthetic oligonucleotide
gagccucagggcccgagga

SEQ ID NO: 3032814 - RNA, 19 nt, Artificial Sequence
  Description of Artificial Sequence: Synthetic oligonucleotide
uccacacauacuggguguc

SEQ ID NO: 3032815 - RNA, 19 nt, Artificial Sequence
  Description of Artificial Sequence: Synthetic oligonucleotide
accgaagguagcggagauc

SEQ ID NO: 3032816 - RNA, 19 nt, Artificial Sequence
  Description of Artificial Sequence: Synthetic oligonucleotide
gcuggaguuuucuuuguaa

SEQ ID NO: 3032817 - RNA, 19 nt, Artificial Sequence
  Description of Artificial Sequence: Synthetic oligonucleotide
cucauucugcuuccccauc

SEQ ID NO: 3032818 - RNA, 19 nt, Artificial Sequence
  Description of Artificial Sequence: Synthetic oligonucleotide
gguucacccagcccaguac

SEQ ID NO: 3032819 - RNA, 19 nt, Artificial Sequence
  Description of Artificial Sequence: Synthetic oligonucleotide
cccgaggagacuucagggc

SEQ ID NO: 3032820 - RNA, 19 nt, Artificial Sequence
  Description of Artificial Sequence: Synthetic oligonucleotide
cguagucaaacaccaguag

SEQ ID NO: 3032821 - RNA, 19 nt, Artificial Sequence
  Description of Artificial Sequence: Synthetic oligonucleotide
cuggaguuuucuuuguaau

SEQ ID NO: 3032822 - RNA, 19 nt, Artificial Sequence
  Description of Artificial Sequence: Synthetic oligonucleotide
gaaggugggaaaagagccu

SEQ ID NO: 3032823 - RNA, 19 nt, Artificial Sequence
  Description of Artificial Sequence: Synthetic oligonucleotide
cugucagaaguuccacaca

SEQ ID NO: 3032824 - RNA, 19 nt, Artificial Sequence
  Description of Artificial Sequence: Synthetic oligonucleotide
ucuuuguaauugggaccga

SEQ ID NO: 3032825 - RNA, 19 nt, Artificial Sequence
  Description of Artificial Sequence: Synthetic oligonucleotide
cagcguagucaaacaccag

SEQ ID NO: 3032826 - RNA, 19 nt, Artificial Sequence
  Description of Artificial Sequence: Synthetic oligonucleotide
agguagcggagaucuugcu

SEQ ID NO: 3032827 - RNA, 19 nt, Artificial Sequence
  Description of Artificial Sequence: Synthetic oligonucleotide
aagccaagguagaggguaa

SEQ ID NO: 3032828 - RNA, 19 nt, Artificial Sequence
  Description of Artificial Sequence: Synthetic oligonucleotide
agcuggaguuuucuuugua

SEQ ID NO: 3032829 - RNA, 19 nt, Artificial Sequence
  Description of Artificial Sequence: Synthetic oligonucleotide
auagcuccucauucugcuu

SEQ ID NO: 3032830 - RNA, 19 nt, Artificial Sequence
  Description of Artificial Sequence: Synthetic oligonucleotide
uagcggagaucuugcuggu

SEQ ID NO: 3032831 - RNA, 19 nt, Artificial Sequence
  Description of Artificial Sequence: Synthetic oligonucleotide
uggucgagcccgugagcca

SEQ ID NO: 3032832 - RNA, 19 nt, Artificial Sequence
  Description of Artificial Sequence: Synthetic oligonucleotide
cuuuguaauugggaccgaa

SEQ ID NO: 3032833 - RNA, 19 nt, Artificial Sequence
  Description of Artificial Sequence: Synthetic oligonucleotide
gccaagguagaggguaagg

SEQ ID NO: 3032834 - RNA, 19 nt, Artificial Sequence
  Description of Artificial Sequence: Synthetic oligonucleotide
ucuugcuggucgagcccgu

SEQ ID NO: 3032835 - RNA, 19 nt, Artificial Sequence
  Description of Artificial Sequence: Synthetic oligonucleotide
ucagggcccgaggagacuu

SEQ ID NO: 3032836 - RNA, 19 nt, Artificial Sequence
  Description of Artificial Sequence: Synthetic oligonucleotide
cccaacguggggaccaccc

SEQ ID NO: 3032837 - RNA, 19 nt, Artificial Sequence
  Description of Artificial Sequence: Synthetic oligonucleotide
cauagcacugucagaaguu

SEQ ID NO: 3032838 - RNA, 19 nt, Artificial Sequence
  Description of Artificial Sequence: Synthetic oligonucleotide
cugcuuccccauccugggg

SEQ ID NO: 3032839 - RNA, 19 nt, Artificial Sequence
  Description of Artificial Sequence: Synthetic oligonucleotide
agguucacccagcccagua

SEQ ID NO: 3032840 - RNA, 19 nt, Artificial Sequence
  Description of Artificial Sequence: Synthetic oligonucleotide
agccaagguagaggguaag

SEQ ID NO: 3032841 - RNA, 19 nt, Artificial Sequence
  Description of Artificial Sequence: Synthetic oligonucleotide
cauacugggugucgaaggu

SEQ ID NO: 3032842 - RNA, 19 nt, Artificial Sequence
  Description of Artificial Sequence: Synthetic oligonucleotide
ucagggccagagguucacc

SEQ ID NO: 3032843 - RNA, 19 nt, Artificial Sequence
  Description of Artificial Sequence: Synthetic oligonucleotide
gucuggagaggagcuggag

SEQ ID NO: 3032844 - RNA, 19 nt, Artificial Sequence
  Description of Artificial Sequence: Synthetic oligonucleotide
ugaggcccaugaguucagc

SEQ ID NO: 3032845 - RNA, 19 nt, Artificial Sequence
  Description of Artificial Sequence: Synthetic oligonucleotide
aacguggggaccacccaua

SEQ ID NO: 3032846 - RNA, 19 nt, Artificial Sequence
  Description of Artificial Sequence: Synthetic oligonucleotide
gggaccacccauagcacug

SEQ ID NO: 3032847 - RNA, 19 nt, Artificial Sequence
  Description of Artificial Sequence: Synthetic oligonucleotide
agcggagaucuugcugguc

SEQ ID NO: 3032848 - RNA, 19 nt, Artificial Sequence
  Description of Artificial Sequence: Synthetic oligonucleotide
cacacauacugggugucga

SEQ ID NO: 3032849 - RNA, 19 nt, Artificial Sequence
  Description of Artificial Sequence: Synthetic oligonucleotide
gaggcgauccgugcccaac

SEQ ID NO: 3032850 - RNA, 19 nt, Artificial Sequence
  Description of Artificial Sequence: Synthetic oligonucleotide
uuccccauccuggggucug

SEQ ID NO: 3032851 - RNA, 19 nt, Artificial Sequence
  Description of Artificial Sequence: Synthetic oligonucleotide
cagaaguuccacacauacu

SEQ ID NO: 3032852 - RNA, 19 nt, Artificial Sequence
  Description of Artificial Sequence: Synthetic oligonucleotide
uaccuguuugaggcccaug

SEQ ID NO: 3032853 - RNA, 19 nt, Artificial Sequence
  Description of Artificial Sequence: Synthetic oligonucleotide
gccagagguucacccagcc

SEQ ID NO: 3032854 - RNA, 19 nt, Artificial Sequence
  Description of Artificial Sequence: Synthetic oligonucleotide
gccaggaggaggcgauccg

SEQ ID NO: 3032855 - RNA, 19 nt, Artificial Sequence
  Description of Artificial Sequence: Synthetic oligonucleotide
accacccauagcacuguca

SEQ ID NO: 3032856 - RNA, 19 nt, Artificial Sequence
  Description of Artificial Sequence: Synthetic oligonucleotide
ggagaucuugcuggucgag

SEQ ID NO: 3032857 - RNA, 19 nt, Artificial Sequence
  Description of Artificial Sequence: Synthetic oligonucleotide
uggagaggagcuggaguuu

SEQ ID NO: 3032858 - RNA, 19 nt, Artificial Sequence
  Description of Artificial Sequence: Synthetic oligonucleotide
uccccauccuggggucugg

SEQ ID NO: 3032859 - RNA, 19 nt, Artificial Sequence
  Description of Artificial Sequence: Synthetic oligonucleotide
agcccgugagccaagccaa

SEQ ID NO: 3032860 - RNA, 19 nt, Artificial Sequence
  Description of Artificial Sequence: Synthetic oligonucleotide
ccaagguagaggguaagga

SEQ ID NO: 3032861 - RNA, 19 nt, Artificial Sequence
  Description of Artificial Sequence: Synthetic oligonucleotide
ucgagcccgugagccaagc

SEQ ID NO: 3032862 - RNA, 19 nt, Artificial Sequence
  Description of Artificial Sequence: Synthetic oligonucleotide
auccuggggucuggagagg

SEQ ID NO: 3032863 - RNA, 19 nt, Artificial Sequence
  Description of Artificial Sequence: Synthetic oligonucleotide
cccauagcacugucagaag

SEQ ID NO: 3032864 - RNA, 19 nt, Artificial Sequence
  Description of Artificial Sequence: Synthetic oligonucleotide
ggugucgaaggugggaaaa

SEQ ID NO: 3032865 - RNA, 19 nt, Artificial Sequence
  Description of Artificial Sequence: Synthetic oligonucleotide
ccagagguucacccagccc

SEQ ID NO: 3032866 - RNA, 19 nt, Artificial Sequence
  Description of Artificial Sequence: Synthetic oligonucleotide
ggcccaugaguucagcgua

SEQ ID NO: 3032867 - RNA, 19 nt, Artificial Sequence
  Description of Artificial Sequence: Synthetic oligonucleotide
aggugggaaaagagccuca

SEQ ID NO: 3032868 - RNA, 19 nt, Artificial Sequence
  Description of Artificial Sequence: Synthetic oligonucleotide
gagcuggaguuuucuuugu

SEQ ID NO: 3032869 - RNA, 19 nt, Artificial Sequence
  Description of Artificial Sequence: Synthetic oligonucleotide
gggaccgaagguagcggag

SEQ ID NO: 3032870 - RNA, 19 nt, Artificial Sequence
  Description of Artificial Sequence: Synthetic oligonucleotide
gugcccaacguggggacca

SEQ ID NO: 3032871 - RNA, 19 nt, Artificial Sequence
  Description of Artificial Sequence: Synthetic oligonucleotide
cacccauagcacugucaga

SEQ ID NO: 3032872 - RNA, 19 nt, Artificial Sequence
  Description of Artificial Sequence: Synthetic oligonucleotide
cuugcuggucgagcccgug

SEQ ID NO: 3032873 - RNA, 19 nt, Artificial Sequence
  Description of Artificial Sequence: Synthetic oligonucleotide
gaccgaagguagcggagau

SEQ ID NO: 3032874 - RNA, 19 nt, Artificial Sequence
  Description of Artificial Sequence: Synthetic oligonucleotide
ccacacauacugggugucg

SEQ ID NO: 3032875 - RNA, 19 nt, Artificial Sequence
  Description of Artificial Sequence: Synthetic oligonucleotide
cugggugucgaagguggga

SEQ ID NO: 3032876 - RNA, 19 nt, Artificial Sequence
  Description of Artificial Sequence: Synthetic oligonucleotide
cauucugcuuccccauccu

SEQ ID NO: 3032877 - RNA, 19 nt, Artificial Sequence
  Description of Artificial Sequence: Synthetic oligonucleotide
gucagaaguuccacacaua

SEQ ID NO: 3032878 - RNA, 19 nt, Artificial Sequence
  Description of Artificial Sequence: Synthetic oligonucleotide
gcguagucaaacaccagua

SEQ ID NO: 3032879 - RNA, 19 nt, Artificial Sequence
  Description of Artificial Sequence: Synthetic oligonucleotide
ggaccgaagguagcggaga

SEQ ID NO: 3032880 - RNA, 19 nt, Artificial Sequence
  Description of Artificial Sequence: Synthetic oligonucleotide
auaccuguuugaggcccau

SEQ ID NO: 3032881 - RNA, 19 nt, Artificial Sequence
  Description of Artificial Sequence: Synthetic oligonucleotide
gcuggucgagcccgugagc

SEQ ID NO: 3032882 - RNA, 19 nt, Artificial Sequence
  Description of Artificial Sequence: Synthetic oligonucleotide
aggaggcgauccgugccca

SEQ ID NO: 3032883 - RNA, 19 nt, Artificial Sequence
  Description of Artificial Sequence: Synthetic oligonucleotide
agggcccgaggagacuuca

SEQ ID NO: 3032884 - RNA, 19 nt, Artificial Sequence
  Description of Artificial Sequence: Synthetic oligonucleotide
gcacugucagaaguuccac

SEQ ID NO: 3032885 - RNA, 19 nt, Artificial Sequence
  Description of Artificial Sequence: Synthetic oligonucleotide
gcgauccgugcccaacgug

SEQ ID NO: 3032886 - RNA, 19 nt, Artificial Sequence
  Description of Artificial Sequence: Synthetic oligonucleotide
gaggagcuggaguuuucuu

SEQ ID NO: 3032887 - RNA, 19 nt, Artificial Sequence
  Description of Artificial Sequence: Synthetic oligonucleotide
ccgaagguagcggagaucu

SEQ ID NO: 3032888 - RNA, 19 nt, Artificial Sequence
  Description of Artificial Sequence: Synthetic oligonucleotide
agcccaguacgugguaaua

SEQ ID NO: 3032889 - RNA, 19 nt, Artificial Sequence
  Description of Artificial Sequence: Synthetic oligonucleotide
ccaugaguucagcguaguc

SEQ ID NO: 3032890 - RNA, 19 nt, Artificial Sequence
  Description of Artificial Sequence: Synthetic oligonucleotide
acccagcccaguacguggu

SEQ ID NO: 3032891 - RNA, 19 nt, Artificial Sequence
  Description of Artificial Sequence: Synthetic oligonucleotide
gcccaugaguucagcguag

SEQ ID NO: 3032892 - RNA, 19 nt, Artificial Sequence
  Description of Artificial Sequence: Synthetic oligonucleotide
aaagagccucagggcccga

SEQ ID NO: 3032893 - RNA, 19 nt, Artificial Sequence
  Description of Artificial Sequence: Synthetic oligonucleotide
ccauagcacugucagaagu

SEQ ID NO: 3032894 - RNA, 19 nt, Artificial Sequence
  Description of Artificial Sequence: Synthetic oligonucleotide
cccgugagccaagccaagg

SEQ ID NO: 3032895 - RNA, 19 nt, Artificial Sequence
  Description of Artificial Sequence: Synthetic oligonucleotide
ccucagggcccgaggagac

SEQ ID NO: 3032896 - RNA, 19 nt, Artificial Sequence
  Description of Artificial Sequence: Synthetic oligonucleotide
cccaguacgugguaauaua

SEQ ID NO: 3032897 - RNA, 19 nt, Artificial Sequence
  Description of Artificial Sequence: Synthetic oligonucleotide
ccuggggucuggagaggag

SEQ ID NO: 3032898 - RNA, 19 nt, Artificial Sequence
  Description of Artificial Sequence: Synthetic oligonucleotide
caacguggggaccacccau

SEQ ID NO: 3032899 - RNA, 19 nt, Artificial Sequence
  Description of Artificial Sequence: Synthetic oligonucleotide
gacuucagggccagagguu

SEQ ID NO: 3032900 - RNA, 19 nt, Artificial Sequence
  Description of Artificial Sequence: Synthetic oligonucleotide
cagggcccgaggagacuuc

SEQ ID NO: 3032901 - RNA, 19 nt, Artificial Sequence
  Description of Artificial Sequence: Synthetic oligonucleotide
acgugguaauauaccuguu

SEQ ID NO: 3032902 - RNA, 19 nt, Artificial Sequence
  Description of Artificial Sequence: Synthetic oligonucleotide
ggggaccacccauagcacu

SEQ ID NO: 3032903 - RNA, 19 nt, Artificial Sequence
  Description of Artificial Sequence: Synthetic oligonucleotide
ugcccaacguggggaccac

SEQ ID NO: 3032904 - RNA, 19 nt, Artificial Sequence
  Description of Artificial Sequence: Synthetic oligonucleotide
gucgagcccgugagccaag

SEQ ID NO: 3032905 - RNA, 19 nt, Artificial Sequence
  Description of Artificial Sequence: Synthetic oligonucleotide
gagccaggaggaggcgauc

SEQ ID NO: 3032906 - RNA, 19 nt, Artificial Sequence
  Description of Artificial Sequence: Synthetic oligonucleotide
ggggucuggagaggagcug

SEQ ID NO: 3032907 - RNA, 19 nt, Artificial Sequence
  Description of Artificial Sequence: Synthetic oligonucleotide
gccucagggcccgaggaga

SEQ ID NO: 3032908 - RNA, 19 nt, Artificial Sequence
  Description of Artificial Sequence: Synthetic oligonucleotide
ggucgagcccgugagccaa

SEQ ID NO: 3032909 - RNA, 19 nt, Artificial Sequence
  Description of Artificial Sequence: Synthetic oligonucleotide
ggccagagguucacccagc

SEQ ID NO: 3032910 - RNA, 19 nt, Artificial Sequence
  Description of Artificial Sequence: Synthetic oligonucleotide
gggugucgaaggugggaaa

SEQ ID NO: 3032911 - RNA, 19 nt, Artificial Sequence
  Description of Artificial Sequence: Synthetic oligonucleotide
ggucuggagaggagcugga

SEQ ID NO: 3032912 - RNA, 19 nt, Artificial Sequence
  Description of Artificial Sequence: Synthetic oligonucleotide
ccgugcccaacguggggac

SEQ ID NO: 3032913 - RNA, 19 nt, Artificial Sequence
  Description of Artificial Sequence: Synthetic oligonucleotide
cguggggaccacccauagc

SEQ ID NO: 3032914 - RNA, 19 nt, Artificial Sequence
  Description of Artificial Sequence: Synthetic oligonucleotide
cagcccaguacgugguaau

SEQ ID NO: 3032915 - RNA, 19 nt, Artificial Sequence
  Description of Artificial Sequence: Synthetic oligonucleotide
ccaacguggggaccaccca

SEQ ID NO: 3032916 - RNA, 19 nt, Artificial Sequence
  Description of Artificial Sequence: Synthetic oligonucleotide
aggagacuucagggccaga

SEQ ID NO: 3032917 - RNA, 19 nt, Artificial Sequence
  Description of Artificial Sequence: Synthetic oligonucleotide
cgugagccaagccaaggua

SEQ ID NO: 3032918 - RNA, 19 nt, Artificial Sequence
  Description of Artificial Sequence: Synthetic oligonucleotide
cgugguaauauaccuguuu

SEQ ID NO: 3032919 - RNA, 19 nt, Artificial Sequence
  Description of Artificial Sequence: Synthetic oligonucleotide
ggcgauccgugcccaacgu

SEQ ID NO: 3032920 - RNA, 19 nt, Artificial Sequence
  Description of Artificial Sequence: Synthetic oligonucleotide
ggagaggagcuggaguuuu

SEQ ID NO: 3032921 - RNA, 19 nt, Artificial Sequence
  Description of Artificial Sequence: Synthetic oligonucleotide
gagguucacccagcccagu

SEQ ID NO: 3032922 - RNA, 19 nt, Artificial Sequence
  Description of Artificial Sequence: Synthetic oligonucleotide
gggcccgaggagacuucag

SEQ ID NO: 3032923 - RNA, 19 nt, Artificial Sequence
  Description of Artificial Sequence: Synthetic oligonucleotide
gcccgugagccaagccaag

SEQ ID NO: 3032924 - RNA, 19 nt, Artificial Sequence
  Description of Artificial Sequence: Synthetic oligonucleotide
cgagcccgugagccaagcc

SEQ ID NO: 3032925 - RNA, 19 nt, Artificial Sequence
  Description of Artificial Sequence: Synthetic oligonucleotide
gcccaguacgugguaauau

SEQ ID NO: 3032926 - RNA, 19 nt, Artificial Sequence
  Description of Artificial Sequence: Synthetic oligonucleotide
cggagaucuugcuggucga

SEQ ID NO: 3032927 - RNA, 19 nt, Artificial Sequence
  Description of Artificial Sequence: Synthetic oligonucleotide
ccgugagccaagccaaggu

SEQ ID NO: 3032928 - RNA, 19 nt, Artificial Sequence
  Description of Artificial Sequence: Synthetic oligonucleotide
ggaggcgauccgugcccaa

SEQ ID NO: 3032929 - RNA, 19 nt, Artificial Sequence
  Description of Artificial Sequence: Synthetic oligonucleotide
ccagcccaguacgugguaa

SEQ ID NO: 3032930 - RNA, 19 nt, Artificial Sequence
  Description of Artificial Sequence: Synthetic oligonucleotide
ggaccacccauagcacugu

SEQ ID NO: 3032931 - RNA, 19 nt, Artificial Sequence
  Description of Artificial Sequence: Synthetic oligonucleotide
cuuccccauccuggggucu

SEQ ID NO: 3032932 - RNA, 19 nt, Artificial Sequence
  Description of Artificial Sequence: Synthetic oligonucleotide
gcccaacguggggaccacc

SEQ ID NO: 3032933 - RNA, 19 nt, Artificial Sequence
  Description of Artificial Sequence: Synthetic oligonucleotide
cgugcccaacguggggacc

SEQ ID NO: 3032934 - RNA, 19 nt, Artificial Sequence
  Description of Artificial Sequence: Synthetic oligonucleotide
ccaagccaagguagagggu

SEQ ID NO: 3032935 - RNA, 19 nt, Artificial Sequence
  Description of Artificial Sequence: Synthetic oligonucleotide
cucagggcccgaggagacu

SEQ ID NO: 3032936 - RNA, 19 nt, Artificial Sequence
  Description of Artificial Sequence: Synthetic oligonucleotide
ccaggaggaggcgauccgu

SEQ ID NO: 3032937 - RNA, 19 nt, Artificial Sequence
  Description of Artificial Sequence: Synthetic oligonucleotide
cccaugaguucagcguagu

SEQ ID NO: 3032938 - RNA, 19 nt, Artificial Sequence
  Description of Artificial Sequence: Synthetic oligonucleotide
cccagcccaguacguggua

SEQ ID NO: 3032939 - RNA, 19 nt, Artificial Sequence
  Description of Artificial Sequence: Synthetic oligonucleotide
ccccauccuggggucugga

SEQ ID NO: 3032940 - RNA, 19 nt, Artificial Sequence
  Description of Artificial Sequence: Synthetic oligonucleotide
cgaagguagcggagaucuu

SEQ ID NO: 3032941 - RNA, 19 nt, Artificial Sequence
  Description of Artificial Sequence: Synthetic oligonucleotide
agaaggaugauuuucagcc

SEQ ID NO: 3032942 - RNA, 19 nt, Artificial Sequence
  Description of Artificial Sequence: Synthetic oligonucleotide
accugugacagcuagaagg

SEQ ID NO: 3032943 - RNA, 19 nt, Artificial Sequence
  Description of Artificial Sequence: Synthetic oligonucleotide
uacauguacagcacaaggg

SEQ ID NO: 3032944 - RNA, 19 nt, Artificial Sequence
  Description of Artificial Sequence: Synthetic oligonucleotide
acauguacagcacaagggg

SEQ ID NO: 3032945 - RNA, 19 nt, Artificial Sequence
  Description of Artificial Sequence: Synthetic oligonucleotide
augauuuucagccauuucu

SEQ ID NO: 3032946 - RNA, 19 nt, Artificial Sequence
  Description of Artificial Sequence: Synthetic oligonucleotide
aggagcaccauacauguac

SEQ ID NO: 3032947 - RNA, 19 nt, Artificial Sequence
  Description of Artificial Sequence: Synthetic oligonucleotide
uuugguuccagggagauug

SEQ ID NO: 3032948 - RNA, 19 nt, Artificial Sequence
  Description of Artificial Sequence: Synthetic oligonucleotide
uggcaugucauccacaaug

SEQ ID NO: 3032949 - RNA, 19 nt, Artificial Sequence
  Description of Artificial Sequence: Synthetic oligonucleotide
aguuuagucauucugacuu

SEQ ID NO: 3032950 - RNA, 19 nt, Artificial Sequence
  Description of Artificial Sequence: Synthetic oligonucleotide
uuucuuugguuccagggag

SEQ ID NO: 3032951 - RNA, 19 nt, Artificial Sequence
  Description of Artificial Sequence: Synthetic oligonucleotide
ugucuagaugcucacuugg

SEQ ID NO: 3032952 - RNA, 19 nt, Artificial Sequence
  Description of Artificial Sequence: Synthetic oligonucleotide
guucaaggugucuagaugc

SEQ ID NO: 3032953 - RNA, 19 nt, Artificial Sequence
  Description of Artificial Sequence: Synthetic oligonucleotide
ugauuuucagccauuucug

SEQ ID NO: 3032954 - RNA, 19 nt, Artificial Sequence
  Description of Artificial Sequence: Synthetic oligonucleotide
uuucaguuccucauugucc

SEQ ID NO: 3032955 - RNA, 19 nt, Artificial Sequence
  Description of Artificial Sequence: Synthetic oligonucleotide
ucauccacaauguagccca

SEQ ID NO: 3032956 - RNA, 19 nt, Artificial Sequence
  Description of Artificial Sequence: Synthetic oligonucleotide
ugcaguuuagucauucuga

SEQ ID NO: 3032957 - RNA, 19 nt, Artificial Sequence
  Description of Artificial Sequence: Synthetic oligonucleotide
augucauccacaauguagc

SEQ ID NO: 3032958 - RNA, 19 nt, Artificial Sequence
  Description of Artificial Sequence: Synthetic oligonucleotide
ugugacagcuagaaggaug

SEQ ID NO: 3032959 - RNA, 19 nt, Artificial Sequence
  Description of Artificial Sequence: Synthetic oligonucleotide
agcuauugcaguuuaguca

SEQ ID NO: 3032960 - RNA, 19 nt, Artificial Sequence
  Description of Artificial Sequence: Synthetic oligonucleotide
ucacacaccauauuuucug

SEQ ID NO: 3032961 - RNA, 19 nt, Artificial Sequence
  Description of Artificial Sequence: Synthetic oligonucleotide
cuagaugcucacuugggcc

SEQ ID NO: 3032962 - RNA, 19 nt, Artificial Sequence
  Description of Artificial Sequence: Synthetic oligonucleotide
ucuagaugcucacuugggc

SEQ ID NO: 3032963 - RNA, 19 nt, Artificial Sequence
  Description of Artificial Sequence: Synthetic oligonucleotide
uguucaaggugucuagaug

SEQ ID NO: 3032964 - RNA, 19 nt, Artificial Sequence
  Description of Artificial Sequence: Synthetic oligonucleotide
gauuguucaaggugucuag

SEQ ID NO: 3032965 - RNA, 19 nt, Artificial Sequence
  Description of Artificial Sequence: Synthetic oligonucleotide
acacaccauauuuucugcc

SEQ ID NO: 3032966 - RNA, 19 nt, Artificial Sequence
  Description of Artificial Sequence: Synthetic oligonucleotide
uugcaguuuagucauucug

SEQ ID NO: 3032967 - RNA, 19 nt, Artificial Sequence
  Description of Artificial Sequence: Synthetic oligonucleotide
ucuugcuucgggaucacac

SEQ ID NO: 3032968 - RNA, 19 nt, Artificial Sequence
  Description of Artificial Sequence: Synthetic oligonucleotide
aaggugucuagaugcucac

SEQ ID NO: 3032969 - RNA, 19 nt, Artificial Sequence
  Description of Artificial Sequence: Synthetic oligonucleotide
agggagauuguucaaggug

SEQ ID NO: 3032970 - RNA, 19 nt, Artificial Sequence
  Description of Artificial Sequence: Synthetic oligonucleotide
uagaaggaugauuuucagc

SEQ ID NO: 3032971 - RNA, 19 nt, Artificial Sequence
  Description of Artificial Sequence: Synthetic oligonucleotide
gaucacacaccauauuuuc

SEQ ID NO: 3032972 - RNA, 19 nt, Artificial Sequence
  Description of Artificial Sequence: Synthetic oligonucleotide
aaggaugauuuucagccau

SEQ ID NO: 3032973 - RNA, 19 nt, Artificial Sequence
  Description of Artificial Sequence: Synthetic oligonucleotide
uuuggcaugucauccacaa

SEQ ID NO: 3032974 - RNA, 19 nt, Artificial Sequence
  Description of Artificial Sequence: Synthetic oligonucleotide
uuuugacuucuccauguac

SEQ ID NO: 3032975 - RNA, 19 nt, Artificial Sequence
  Description of Artificial Sequence: Synthetic oligonucleotide
ugugcacggacuuggacug

SEQ ID NO: 3032976 - RNA, 19 nt, Artificial Sequence
  Description of Artificial Sequence: Synthetic oligonucleotide
uguguggcagaucugcacu

SEQ ID NO: 3032977 - RNA, 19 nt, Artificial Sequence
  Description of Artificial Sequence: Synthetic oligonucleotide
uucgggaucacacaccaua

SEQ ID NO: 3032978 - RNA, 19 nt, Artificial Sequence
  Description of Artificial Sequence: Synthetic oligonucleotide
agcaccauacauguacagc

SEQ ID NO: 3032979 - RNA, 19 nt, Artificial Sequence
  Description of Artificial Sequence: Synthetic oligonucleotide
uuuucagccauuucuguuu

SEQ ID NO: 3032980 - RNA, 19 nt, Artificial Sequence
  Description of Artificial Sequence: Synthetic oligonucleotide
uuuucugccaugguuuuga

SEQ ID NO: 3032981 - RNA, 19 nt, Artificial Sequence
  Description of Artificial Sequence: Synthetic oligonucleotide
uuggacugggucaaucuga

SEQ ID NO: 3032982 - RNA, 19 nt, Artificial Sequence
  Description of Artificial Sequence: Synthetic oligonucleotide
accauauuuucugccaugg

SEQ ID NO: 3032983 - RNA, 19 nt, Artificial Sequence
  Description of Artificial Sequence: Synthetic oligonucleotide
gucaaucugaagcugugug

SEQ ID NO: 3032984 - RNA, 19 nt, Artificial Sequence
  Description of Artificial Sequence: Synthetic oligonucleotide
agcuagaaggaugauuuuc

SEQ ID NO: 3032985 - RNA, 19 nt, Artificial Sequence
  Description of Artificial Sequence: Synthetic oligonucleotide
acugggucaaucugaagcu

SEQ ID NO: 3032986 - RNA, 19 nt, Artificial Sequence
  Description of Artificial Sequence: Synthetic oligonucleotide
gaagcuguguggcagaucu

SEQ ID NO: 3032987 - RNA, 19 nt, Artificial Sequence
  Description of Artificial Sequence: Synthetic oligonucleotide
caaucugaagcuguguggc

SEQ ID NO: 3032988 - RNA, 19 nt, Artificial Sequence
  Description of Artificial Sequence: Synthetic oligonucleotide
cagaucugcacucuuuggc

SEQ ID NO: 3032989 - RNA, 19 nt, Artificial Sequence
  Description of Artificial Sequence: Synthetic oligonucleotide
uuguccgcggcaaagcugu

SEQ ID NO: 3032990 - RNA, 19 nt, Artificial Sequence
  Description of Artificial Sequence: Synthetic oligonucleotide
agaucugcacucuuuggca

SEQ ID NO: 3032991 - RNA, 19 nt, Artificial Sequence
  Description of Artificial Sequence: Synthetic oligonucleotide
cugaggagcaccauacaug

SEQ ID NO: 3032992 - RNA, 19 nt, Artificial Sequence
  Description of Artificial Sequence: Synthetic oligonucleotide
acuugggccaucugguguc

SEQ ID NO: 3032993 - RNA, 19 nt, Artificial Sequence
  Description of Artificial Sequence: Synthetic oligonucleotide
ucuggugucucaccuguga

SEQ ID NO: 3032994 - RNA, 19 nt, Artificial Sequence
  Description of Artificial Sequence: Synthetic oligonucleotide
agugguaugguugccuggg

SEQ ID NO: 3032995 - RNA, 19 nt, Artificial Sequence
  Description of Artificial Sequence: Synthetic oligonucleotide
cuagaaggaugauuuucag

SEQ ID NO: 3032996 - RNA, 19 nt, Artificial Sequence
  Description of Artificial Sequence: Synthetic oligonucleotide
augguuuugacuucuccau

SEQ ID NO: 3032997 - RNA, 19 nt, Artificial Sequence
  Description of Artificial Sequence: Synthetic oligonucleotide
acagcuagaaggaugauuu

SEQ ID NO: 3032998 - RNA, 19 nt, Artificial Sequence
  Description of Artificial Sequence: Synthetic oligonucleotide
aagcugugcacggacuugg

SEQ ID NO: 3032999 - RNA, 19 nt, Artificial Sequence
  Description of Artificial Sequence: Synthetic oligonucleotide
ucagccauuucuguuucag

SEQ ID NO: 3033000 - RNA, 19 nt, Artificial Sequence
  Description of Artificial Sequence: Synthetic oligonucleotide
ucuuuggcaugucauccac

SEQ ID NO: 3033001 - RNA, 19 nt, Artificial Sequence
  Description of Artificial Sequence: Synthetic oligonucleotide
aauguagcccaggaguggu

SEQ ID NO: 3033002 - RNA, 19 nt, Artificial Sequence
  Description of Artificial Sequence: Synthetic oligonucleotide
ugguuuugacuucuccaug

SEQ ID NO: 3033003 - RNA, 19 nt, Artificial Sequence
  Description of Artificial Sequence: Synthetic oligonucleotide
guuccagggagauuguuca

SEQ ID NO: 3033004 - RNA, 19 nt, Artificial Sequence
  Description of Artificial Sequence: Synthetic oligonucleotide
ugucucaccugugacagcu

SEQ ID NO: 3033005 - RNA, 19 nt, Artificial Sequence
  Description of Artificial Sequence: Synthetic oligonucleotide
agccauuucuguuucaguu

SEQ ID NO: 3033006 - RNA, 19 nt, Artificial Sequence
  Description of Artificial Sequence: Synthetic oligonucleotide
auauuuucugccaugguuu

SEQ ID NO: 3033007 - RNA, 19 nt, Artificial Sequence
  Description of Artificial Sequence: Synthetic oligonucleotide
guuucaguuccucauuguc

SEQ ID NO: 3033008 - RNA, 19 nt, Artificial Sequence
  Description of Artificial Sequence: Synthetic oligonucleotide
aaucugaagcuguguggca

SEQ ID NO: 3033009 - RNA, 19 nt, Artificial Sequence
  Description of Artificial Sequence: Synthetic oligonucleotide
ugggucaaucugaagcugu

SEQ ID NO: 3033010 - RNA, 19 nt, Artificial Sequence
  Description of Artificial Sequence: Synthetic oligonucleotide
uucaaggugucuagaugcu

SEQ ID NO: 3033011 - RNA, 19 nt, Artificial Sequence
  Description of Artificial Sequence: Synthetic oligonucleotide
auccugaggagcaccauac

SEQ ID NO: 3033012 - RNA, 19 nt, Artificial Sequence
  Description of Artificial Sequence: Synthetic oligonucleotide
uugcuucgggaucacacac

SEQ ID NO: 3033013 - RNA, 19 nt, Artificial Sequence
  Description of Artificial Sequence: Synthetic oligonucleotide
ugucauccacaauguagcc

SEQ ID NO: 3033014 - RNA, 19 nt, Artificial Sequence
  Description of Artificial Sequence: Synthetic oligonucleotide
cacacaccauauuuucugc

SEQ ID NO: 3033015 - RNA, 19 nt, Artificial Sequence
  Description of Artificial Sequence: Synthetic oligonucleotide
acuuggacugggucaaucu

SEQ ID NO: 3033016 - RNA, 19 nt, Artificial Sequence
  Description of Artificial Sequence: Synthetic oligonucleotide
uauugcaguuuagucauuc

SEQ ID NO: 3033017 - RNA, 19 nt, Artificial Sequence
  Description of Artificial Sequence: Synthetic oligonucleotide
uccagggagauuguucaag

SEQ ID NO: 3033018 - RNA, 19 nt, Artificial Sequence
  Description of Artificial Sequence: Synthetic oligonucleotide
ugcacucuuuggcauguca

SEQ ID NO: 3033019 - RNA, 19 nt, Artificial Sequence
  Description of Artificial Sequence: Synthetic oligonucleotide
ggcucugacauccugagga

SEQ ID NO: 3033020 - RNA, 19 nt, Artificial Sequence
  Description of Artificial Sequence: Synthetic oligonucleotide
uagcccaggagugguaugg

SEQ ID NO: 3033021 - RNA, 19 nt, Artificial Sequence
  Description of Artificial Sequence: Synthetic oligonucleotide
auuuucagccauuucuguu

SEQ ID NO: 3033022 - RNA, 19 nt, Artificial Sequence
  Description of Artificial Sequence: Synthetic oligonucleotide
gaugauuuucagccauuuc

SEQ ID NO: 3033023 - RNA, 19 nt, Artificial Sequence
  Description of Artificial Sequence: Synthetic oligonucleotide
uuguucaaggugucuagau

SEQ ID NO: 3033024 - RNA, 19 nt, Artificial Sequence
  Description of Artificial Sequence: Synthetic oligonucleotide
aguuccucauuguccgcgg

SEQ ID NO: 3033025 - RNA, 19 nt, Artificial Sequence
  Description of Artificial Sequence: Synthetic oligonucleotide
ugggcucugacauccugag

SEQ ID NO: 3033026 - RNA, 19 nt, Artificial Sequence
  Description of Artificial Sequence: Synthetic oligonucleotide
uguuucaguuccucauugu

SEQ ID NO: 3033027 - RNA, 19 nt, Artificial Sequence
  Description of Artificial Sequence: Synthetic oligonucleotide
uccgcggcaaagcugugca

SEQ ID NO: 3033028 - RNA, 19 nt, Artificial Sequence
  Description of Artificial Sequence: Synthetic oligonucleotide
ugguaugguugccugggcu

SEQ ID NO: 3033029 - RNA, 19 nt, Artificial Sequence
  Description of Artificial Sequence: Synthetic oligonucleotide
acggacuuggacuggguca

SEQ ID NO: 3033030 - RNA, 19 nt, Artificial Sequence
  Description of Artificial Sequence: Synthetic oligonucleotide
accauacauguacagcaca

SEQ ID NO: 3033031 - RNA, 19 nt, Artificial Sequence
  Description of Artificial Sequence: Synthetic oligonucleotide
ucuguuucaguuccucauu

SEQ ID NO: 3033032 - RNA, 19 nt, Artificial Sequence
  Description of Artificial Sequence: Synthetic oligonucleotide
auugcaguuuagucauucu

SEQ ID NO: 3033033 - RNA, 19 nt, Artificial Sequence
  Description of Artificial Sequence: Synthetic oligonucleotide
aaagcugugcacggacuug

SEQ ID NO: 3033034 - RNA, 19 nt, Artificial Sequence
  Description of Artificial Sequence: Synthetic oligonucleotide
cuguuucaguuccucauug

SEQ ID NO: 3033035 - RNA, 19 nt, Artificial Sequence
  Description of Artificial Sequence: Synthetic oligonucleotide
acaauguagcccaggagug

SEQ ID NO: 3033036 - RNA, 19 nt, Artificial Sequence
  Description of Artificial Sequence: Synthetic oligonucleotide
caaggugucuagaugcuca

SEQ ID NO: 3033037 - RNA, 19 nt, Artificial Sequence
  Description of Artificial Sequence: Synthetic oligonucleotide
gagugguaugguugccugg

SEQ ID NO: 3033038 - RNA, 19 nt, Artificial Sequence
  Description of Artificial Sequence: Synthetic oligonucleotide
cuuggacugggucaaucug

SEQ ID NO: 3033039 - RNA, 19 nt, Artificial Sequence
  Description of Artificial Sequence: Synthetic oligonucleotide
gaaggaugauuuucagcca

SEQ ID NO: 3033040 - RNA, 19 nt, Artificial Sequence
  Description of Artificial Sequence: Synthetic oligonucleotide
gcucacuugggccaucugg

SEQ ID NO: 3033041 - RNA, 19 nt, Artificial Sequence
  Description of Artificial Sequence: Synthetic oligonucleotide
cacaauguagcccaggagu

SEQ ID NO: 3033042 - RNA, 19 nt, Artificial Sequence
  Description of Artificial Sequence: Synthetic oligonucleotide
cauacauguacagcacaag

SEQ ID NO: 3033043 - RNA, 19 nt, Artificial Sequence
  Description of Artificial Sequence: Synthetic oligonucleotide
gcaccauacauguacagca

SEQ ID NO: 3033044 - RNA, 19 nt, Artificial Sequence
  Description of Artificial Sequence: Synthetic oligonucleotide
aucugaagcuguguggcag

SEQ ID NO: 3033045 - RNA, 19 nt, Artificial Sequence
  Description of Artificial Sequence: Synthetic oligonucleotide
cagcuauugcaguuuaguc

SEQ ID NO: 3033046 - RNA, 19 nt, Artificial Sequence
  Description of Artificial Sequence: Synthetic oligonucleotide
ugcuucgggaucacacacc

SEQ ID NO: 3033047 - RNA, 19 nt, Artificial Sequence
  Description of Artificial Sequence: Synthetic oligonucleotide
uggugucucaccugugaca

SEQ ID NO: 3033048 - RNA, 19 nt, Artificial Sequence
  Description of Artificial Sequence: Synthetic oligonucleotide
gagcaccauacauguacag

SEQ ID NO: 3033049 - RNA, 19 nt, Artificial Sequence
  Description of Artificial Sequence: Synthetic oligonucleotide
ucugaagcuguguggcaga

SEQ ID NO: 3033050 - RNA, 19 nt, Artificial Sequence
  Description of Artificial Sequence: Synthetic oligonucleotide
ggugucucaccugugacag

SEQ ID NO: 3033051 - RNA, 19 nt, Artificial Sequence
  Description of Artificial Sequence: Synthetic oligonucleotide
ucauuguccgcggcaaagc

SEQ ID NO: 3033052 - RNA, 19 nt, Artificial Sequence
  Description of Artificial Sequence: Synthetic oligonucleotide
ccauuucuguuucaguucc

SEQ ID NO: 3033053 - RNA, 19 nt, Artificial Sequence
  Description of Artificial Sequence: Synthetic oligonucleotide
uggacugggucaaucugaa

SEQ ID NO: 3033054 - RNA, 19 nt, Artificial Sequence
  Description of Artificial Sequence: Synthetic oligonucleotide
uuccucauuguccgcggca

SEQ ID NO: 3033055 - RNA, 19 nt, Artificial Sequence
  Description of Artificial Sequence: Synthetic oligonucleotide
gucuagaugcucacuuggg

SEQ ID NO: 3033056 - RNA, 19 nt, Artificial Sequence
  Description of Artificial Sequence: Synthetic oligonucleotide
ucgggaucacacaccauau

SEQ ID NO: 3033057 - RNA, 19 nt, Artificial Sequence
  Description of Artificial Sequence: Synthetic oligonucleotide
gugucuagaugcucacuug

SEQ ID NO: 3033058 - RNA, 19 nt, Artificial Sequence
  Description of Artificial Sequence: Synthetic oligonucleotide
caauguagcccaggagugg

SEQ ID NO: 3033059 - RNA, 19 nt, Artificial Sequence
  Description of Artificial Sequence: Synthetic oligonucleotide
caccauacauguacagcac

SEQ ID NO: 3033060 - RNA, 19 nt, Artificial Sequence
  Description of Artificial Sequence: Synthetic oligonucleotide
agauuguucaaggugucua

SEQ ID NO: 3033061 - RNA, 19 nt, Artificial Sequence
  Description of Artificial Sequence: Synthetic oligonucleotide
gucauccacaauguagccc

SEQ ID NO: 3033062 - RNA, 19 nt, Artificial Sequence
  Description of Artificial Sequence: Synthetic oligonucleotide
cacaccggcagcuauugca

SEQ ID NO: 3033063 - RNA, 19 nt, Artificial Sequence
  Description of Artificial Sequence: Synthetic oligonucleotide
ugcacggacuuggacuggg

SEQ ID NO: 3033064 - RNA, 19 nt, Artificial Sequence
  Description of Artificial Sequence: Synthetic oligonucleotide
gauuuucagccauuucugu

SEQ ID NO: 3033065 - RNA, 19 nt, Artificial Sequence
  Description of Artificial Sequence: Synthetic oligonucleotide
ugccugggcucugacaucc

SEQ ID NO: 3033066 - RNA, 19 nt, Artificial Sequence
  Description of Artificial Sequence: Synthetic oligonucleotide
ucacuugggccaucuggug

SEQ ID NO: 3033067 - RNA, 19 nt, Artificial Sequence
  Description of Artificial Sequence: Synthetic oligonucleotide
uuuagucauucugacuuuu

SEQ ID NO: 3033068 - RNA, 19 nt, Artificial Sequence
  Description of Artificial Sequence: Synthetic oligonucleotide
gcaguuuagucauucugac

SEQ ID NO: 3033069 - RNA, 19 nt, Artificial Sequence
  Description of Artificial Sequence: Synthetic oligonucleotide
aucugcacucuuuggcaug

SEQ ID NO: 3033070 - RNA, 19 nt, Artificial Sequence
  Description of Artificial Sequence: Synthetic oligonucleotide
cuugcuucgggaucacaca

SEQ ID NO: 3033071 - RNA, 19 nt, Artificial Sequence
  Description of Artificial Sequence: Synthetic oligonucleotide
auuguucaaggugucuaga

SEQ ID NO: 3033072 - RNA, 19 nt, Artificial Sequence
  Description of Artificial Sequence: Synthetic oligonucleotide
ccagggagauuguucaagg

SEQ ID NO: 3033073 - RNA, 19 nt, Artificial Sequence
  Description of Artificial Sequence: Synthetic oligonucleotide
ugacauccugaggagcacc

SEQ ID NO: 3033074 - RNA, 19 nt, Artificial Sequence
  Description of Artificial Sequence: Synthetic oligonucleotide
cauauuuucugccaugguu

SEQ ID NO: 3033075 - RNA, 19 nt, Artificial Sequence
  Description of Artificial Sequence: Synthetic oligonucleotide
ucugcacucuuuggcaugu

SEQ ID NO: 3033076 - RNA, 19 nt, Artificial Sequence
  Description of Artificial Sequence: Synthetic oligonucleotide
guugccugggcucugacau

SEQ ID NO: 3033077 - RNA, 19 nt, Artificial Sequence
  Description of Artificial Sequence: Synthetic oligonucleotide
uccacaccggcagcuauug

SEQ ID NO: 3033078 - RNA, 19 nt, Artificial Sequence
  Description of Artificial Sequence: Synthetic oligonucleotide
ggcagaucugcacucuuug

SEQ ID NO: 3033079 - RNA, 19 nt, Artificial Sequence
  Description of Artificial Sequence: Synthetic oligonucleotide
uccugaggagcaccauaca

SEQ ID NO: 3033080 - RNA, 19 nt, Artificial Sequence
  Description of Artificial Sequence: Synthetic oligonucleotide
gcagaucugcacucuuugg

SEQ ID NO: 3033081 - RNA, 19 nt, Artificial Sequence
  Description of Artificial Sequence: Synthetic oligonucleotide
ucuuugguuccagggagau

SEQ ID NO: 3033082 - RNA, 19 nt, Artificial Sequence
  Description of Artificial Sequence: Synthetic oligonucleotide
gcuagaaggaugauuuuca

SEQ ID NO: 3033083 - RNA, 19 nt, Artificial Sequence
  Description of Artificial Sequence: Synthetic oligonucleotide
cuggugucucaccugugac

SEQ ID NO: 3033084 - RNA, 19 nt, Artificial Sequence
  Description of Artificial Sequence: Synthetic oligonucleotide
gcuauugcaguuuagucau

SEQ ID NO: 3033085 - RNA, 19 nt, Artificial Sequence
  Description of Artificial Sequence: Synthetic oligonucleotide
uguagcccaggagugguau

SEQ ID NO: 3033086 - RNA, 19 nt, Artificial Sequence
  Description of Artificial Sequence: Synthetic oligonucleotide
gguaugguugccugggcuc

SEQ ID NO: 3033087 - RNA, 19 nt, Artificial Sequence
  Description of Artificial Sequence: Synthetic oligonucleotide
ggagugguaugguugccug

SEQ ID NO: 3033088 - RNA, 19 nt, Artificial Sequence
  Description of Artificial Sequence: Synthetic oligonucleotide
aucacacaccauauuuucu

SEQ ID NO: 3033089 - RNA, 19 nt, Artificial Sequence
  Description of Artificial Sequence: Synthetic oligonucleotide
ucaaggugucuagaugcuc

SEQ ID NO: 3033090 - RNA, 19 nt, Artificial Sequence
  Description of Artificial Sequence: Synthetic oligonucleotide
ugggccaucuggugucuca

SEQ ID NO: 3033091 - RNA, 19 nt, Artificial Sequence
  Description of Artificial Sequence: Synthetic oligonucleotide
cucugacauccugaggagc

SEQ ID NO: 3033092 - RNA, 19 nt, Artificial Sequence
  Description of Artificial Sequence: Synthetic oligonucleotide
uguggcagaucugcacucu

SEQ ID NO: 3033093 - RNA, 19 nt, Artificial Sequence
  Description of Artificial Sequence: Synthetic oligonucleotide
auuguccgcggcaaagcug

SEQ ID NO: 3033094 - RNA, 19 nt, Artificial Sequence
  Description of Artificial Sequence: Synthetic oligonucleotide
uccucauuguccgcggcaa

SEQ ID NO: 3033095 - RNA, 19 nt, Artificial Sequence
  Description of Artificial Sequence: Synthetic oligonucleotide
auuuucugccaugguuuug

SEQ ID NO: 3033096 - RNA, 19 nt, Artificial Sequence
  Description of Artificial Sequence: Synthetic oligonucleotide
uuucugccaugguuuugac

SEQ ID NO: 3033097 - RNA, 19 nt, Artificial Sequence
  Description of Artificial Sequence: Synthetic oligonucleotide
ugccaugguuuugacuucu

SEQ ID NO: 3033098 - RNA, 19 nt, Artificial Sequence
  Description of Artificial Sequence: Synthetic oligonucleotide
gguuuugacuucuccaugu

SEQ ID NO: 3033099 - RNA, 19 nt, Artificial Sequence
  Description of Artificial Sequence: Synthetic oligonucleotide
cugugcacggacuuggacu

SEQ ID NO: 3033100 - RNA, 19 nt, Artificial Sequence
  Description of Artificial Sequence: Synthetic oligonucleotide
ggcaaagcugugcacggac

SEQ ID NO: 3033101 - RNA, 19 nt, Artificial Sequence
  Description of Artificial Sequence: Synthetic oligonucleotide
gccauuucuguuucaguuc

SEQ ID NO: 3033102 - RNA, 19 nt, Artificial Sequence
  Description of Artificial Sequence: Synthetic oligonucleotide
cccaggagugguaugguug

SEQ ID NO: 3033103 - RNA, 19 nt, Artificial Sequence
  Description of Artificial Sequence: Synthetic oligonucleotide
uucagccauuucuguuuca

SEQ ID NO: 3033104 - RNA, 19 nt, Artificial Sequence
  Description of Artificial Sequence: Synthetic oligonucleotide
aggagugguaugguugccu

SEQ ID NO: 3033105 - RNA, 19 nt, Artificial Sequence
  Description of Artificial Sequence: Synthetic oligonucleotide
uggcagaucugcacucuuu

SEQ ID NO: 3033106 - RNA, 19 nt, Artificial Sequence
  Description of Artificial Sequence: Synthetic oligonucleotide
cucacuugggccaucuggu

SEQ ID NO: 3033107 - RNA, 19 nt, Artificial Sequence
  Description of Artificial Sequence: Synthetic oligonucleotide
uugguuccagggagauugu

SEQ ID NO: 3033108 - RNA, 19 nt, Artificial Sequence
  Description of Artificial Sequence: Synthetic oligonucleotide
cacggacuuggacuggguc

SEQ ID NO: 3033109 - RNA, 19 nt, Artificial Sequence
  Description of Artificial Sequence: Synthetic oligonucleotide
gcggcaaagcugugcacgg

SEQ ID NO: 3033110 - RNA, 19 nt, Artificial Sequence
  Description of Artificial Sequence: Synthetic oligonucleotide
gcuucgggaucacacacca

SEQ ID NO: 3033111 - RNA, 19 nt, Artificial Sequence
  Description of Artificial Sequence: Synthetic oligonucleotide
cuuuggcaugucauccaca

SEQ ID NO: 3033112 - RNA, 19 nt, Artificial Sequence
  Description of Artificial Sequence: Synthetic oligonucleotide
guuccucauuguccgcggc

SEQ ID NO: 3033113 - RNA, 19 nt, Artificial Sequence
  Description of Artificial Sequence: Synthetic oligonucleotide
ccaugguuuugacuucucc

SEQ ID NO: 3033114 - RNA, 19 nt, Artificial Sequence
  Description of Artificial Sequence: Synthetic oligonucleotide
gacuuggacugggucaauc

SEQ ID NO: 3033115 - RNA, 19 nt, Artificial Sequence
  Description of Artificial Sequence: Synthetic oligonucleotide
guuuugacuucuccaugua

SEQ ID NO: 3033116 - RNA, 19 nt, Artificial Sequence
  Description of Artificial Sequence: Synthetic oligonucleotide
gcucugacauccugaggag

SEQ ID NO: 3033117 - RNA, 19 nt, Artificial Sequence
  Description of Artificial Sequence: Synthetic oligonucleotide
cugggcucugacauccuga

SEQ ID NO: 3033118 - RNA, 19 nt, Artificial Sequence
  Description of Artificial Sequence: Synthetic oligonucleotide
ccugugacagcuagaagga

SEQ ID NO: 3033119 - RNA, 19 nt, Artificial Sequence
  Description of Artificial Sequence: Synthetic oligonucleotide
cugggucaaucugaagcug

SEQ ID NO: 3033120 - RNA, 19 nt, Artificial Sequence
  Description of Artificial Sequence: Synthetic oligonucleotide
gaucugcacucuuuggcau

SEQ ID NO: 3033121 - RNA, 19 nt, Artificial Sequence
  Description of Artificial Sequence: Synthetic oligonucleotide
gggagauuguucaaggugu

SEQ ID NO: 3033122 - RNA, 19 nt, Artificial Sequence
  Description of Artificial Sequence: Synthetic oligonucleotide
guagcccaggagugguaug

SEQ ID NO: 3033123 - RNA, 19 nt, Artificial Sequence
  Description of Artificial Sequence: Synthetic oligonucleotide
uuccagggagauuguucaa

SEQ ID NO: 3033124 - RNA, 19 nt, Artificial Sequence
  Description of Artificial Sequence: Synthetic oligonucleotide
gugguaugguugccugggc

SEQ ID NO: 3033125 - RNA, 19 nt, Artificial Sequence
  Description of Artificial Sequence: Synthetic oligonucleotide
accggcagcuauugcaguu

SEQ ID NO: 3033126 - RNA, 19 nt, Artificial Sequence
  Description of Artificial Sequence: Synthetic oligonucleotide
cauccacaauguagcccag

SEQ ID NO: 3033127 - RNA, 19 nt, Artificial Sequence
  Description of Artificial Sequence: Synthetic oligonucleotide
gguuccagggagauuguuc

SEQ ID NO: 3033128 - RNA, 19 nt, Artificial Sequence
  Description of Artificial Sequence: Synthetic oligonucleotide
uaugguugccugggcucug

SEQ ID NO: 3033129 - RNA, 19 nt, Artificial Sequence
  Description of Artificial Sequence: Synthetic oligonucleotide
gggaucacacaccauauuu

SEQ ID NO: 3033130 - RNA, 19 nt, Artificial Sequence
  Description of Artificial Sequence: Synthetic oligonucleotide
cugccaugguuuugacuuc

SEQ ID NO: 3033131 - RNA, 19 nt, Artificial Sequence
  Description of Artificial Sequence: Synthetic oligonucleotide
caucuggugucucaccugu

SEQ ID NO: 3033132 - RNA, 19 nt, Artificial Sequence
  Description of Artificial Sequence: Synthetic oligonucleotide
cugacauccugaggagcac

SEQ ID NO: 3033133 - RNA, 19 nt, Artificial Sequence
  Description of Artificial Sequence: Synthetic oligonucleotide
ggugucuagaugcucacuu

SEQ ID NO: 3033134 - RNA, 19 nt, Artificial Sequence
  Description of Artificial Sequence: Synthetic oligonucleotide
gacagcuagaaggaugauu

SEQ ID NO: 3033135 - RNA, 19 nt, Artificial Sequence
  Description of Artificial Sequence: Synthetic oligonucleotide
ccauacauguacagcacaa

SEQ ID NO: 3033136 - RNA, 19 nt, Artificial Sequence
  Description of Artificial Sequence: Synthetic oligonucleotide
ugaagcuguguggcagauc

SEQ ID NO: 3033137 - RNA, 19 nt, Artificial Sequence
  Description of Artificial Sequence: Synthetic oligonucleotide
gagauuguucaaggugucu

SEQ ID NO: 3033138 - RNA, 19 nt, Artificial Sequence
  Description of Artificial Sequence: Synthetic oligonucleotide
cucaccugugacagcuaga

SEQ ID NO: 3033139 - RNA, 19 nt, Artificial Sequence
  Description of Artificial Sequence: Synthetic oligonucleotide
ugguugccugggcucugac

SEQ ID NO: 3033140 - RNA, 19 nt, Artificial Sequence
  Description of Artificial Sequence: Synthetic oligonucleotide
guuuagucauucugacuuu

SEQ ID NO: 3033141 - RNA, 19 nt, Artificial Sequence
  Description of Artificial Sequence: Synthetic oligonucleotide
aggugucuagaugcucacu

SEQ ID NO: 3033142 - RNA, 19 nt, Artificial Sequence
  Description of Artificial Sequence: Synthetic oligonucleotide
gggucaaucugaagcugug

SEQ ID NO: 3033143 - RNA, 19 nt, Artificial Sequence
  Description of Artificial Sequence: Synthetic oligonucleotide
ggagauuguucaagguguc

SEQ ID NO: 3033144 - RNA, 19 nt, Artificial Sequence
  Description of Artificial Sequence: Synthetic oligonucleotide
uugccugggcucugacauc

SEQ ID NO: 3033145 - RNA, 19 nt, Artificial Sequence
  Description of Artificial Sequence: Synthetic oligonucleotide
ggagcaccauacauguaca

SEQ ID NO: 3033146 - RNA, 19 nt, Artificial Sequence
  Description of Artificial Sequence: Synthetic oligonucleotide
cauuguccgcggcaaagcu

SEQ ID NO: 3033147 - RNA, 19 nt, Artificial Sequence
  Description of Artificial Sequence: Synthetic oligonucleotide
gugucucaccugugacagc

SEQ ID NO: 3033148 - RNA, 19 nt, Artificial Sequence
  Description of Artificial Sequence: Synthetic oligonucleotide
caggagugguaugguugcc

SEQ ID NO: 3033149 - RNA, 19 nt, Artificial Sequence
  Description of Artificial Sequence: Synthetic oligonucleotide
gcugugcacggacuuggac

SEQ ID NO: 3033150 - RNA, 19 nt, Artificial Sequence
  Description of Artificial Sequence: Synthetic oligonucleotide
augcucacuugggccaucu

SEQ ID NO: 3033151 - RNA, 19 nt, Artificial Sequence
  Description of Artificial Sequence: Synthetic oligonucleotide
ggacugggucaaucugaag

SEQ ID NO: 3033152 - RNA, 19 nt, Artificial Sequence
  Description of Artificial Sequence: Synthetic oligonucleotide
gggcucugacauccugagg

SEQ ID NO: 3033153 - RNA, 19 nt, Artificial Sequence
  Description of Artificial Sequence: Synthetic oligonucleotide
uguccgcggcaaagcugug

SEQ ID NO: 3033154 - RNA, 19 nt, Artificial Sequence
  Description of Artificial Sequence: Synthetic oligonucleotide
gggucuugcuucgggauca

SEQ ID NO: 3033155 - RNA, 19 nt, Artificial Sequence
  Description of Artificial Sequence: Synthetic oligonucleotide
cgcggcaaagcugugcacg

SEQ ID NO: 3033156 - RNA, 19 nt, Artificial Sequence
  Description of Artificial Sequence: Synthetic oligonucleotide
gcagcuauugcaguuuagu

SEQ ID NO: 3033157 - RNA, 19 nt, Artificial Sequence
  Description of Artificial Sequence: Synthetic oligonucleotide
agaugcucacuugggccau

SEQ ID NO: 3033158 - RNA, 19 nt, Artificial Sequence
  Description of Artificial Sequence: Synthetic oligonucleotide
guccgcggcaaagcugugc

SEQ ID NO: 3033159 - RNA, 19 nt, Artificial Sequence
  Description of Artificial Sequence: Synthetic oligonucleotide
ccaucuggugucucaccug

SEQ ID NO: 3033160 - RNA, 19 nt, Artificial Sequence
  Description of Artificial Sequence: Synthetic oligonucleotide
aggaugauuuucagccauu

SEQ ID NO: 3033161 - RNA, 19 nt, Artificial Sequence
  Description of Artificial Sequence: Synthetic oligonucleotide
ggggucuugcuucgggauc

SEQ ID NO: 3033162 - RNA, 19 nt, Artificial Sequence
  Description of Artificial Sequence: Synthetic oligonucleotide
cacuugggccaucuggugu

SEQ ID NO: 3033163 - RNA, 19 nt, Artificial Sequence
  Description of Artificial Sequence: Synthetic oligonucleotide
gguugccugggcucugaca

SEQ ID NO: 3033164 - RNA, 19 nt, Artificial Sequence
  Description of Artificial Sequence: Synthetic oligonucleotide
ggccaucuggugucucacc

SEQ ID NO: 3033165 - RNA, 19 nt, Artificial Sequence
  Description of Artificial Sequence: Synthetic oligonucleotide
guaugguugccugggcucu

SEQ ID NO: 3033166 - RNA, 19 nt, Artificial Sequence
  Description of Artificial Sequence: Synthetic oligonucleotide
cagggagauuguucaaggu

SEQ ID NO: 3033167 - RNA, 19 nt, Artificial Sequence
  Description of Artificial Sequence: Synthetic oligonucleotide
ugacagcuagaaggaugau

SEQ ID NO: 3033168 - RNA, 19 nt, Artificial Sequence
  Description of Artificial Sequence: Synthetic oligonucleotide
ggcagcuauugcaguuuag

SEQ ID NO: 3033169 - RNA, 19 nt, Artificial Sequence
  Description of Artificial Sequence: Synthetic oligonucleotide
caaagcugugcacggacuu

SEQ ID NO: 3033170 - RNA, 19 nt, Artificial Sequence
  Description of Artificial Sequence: Synthetic oligonucleotide
ugguuccagggagauuguu

SEQ ID NO: 3033171 - RNA, 19 nt, Artificial Sequence
  Description of Artificial Sequence: Synthetic oligonucleotide
gugcacggacuuggacugg

SEQ ID NO: 3033172 - RNA, 19 nt, Artificial Sequence
  Description of Artificial Sequence: Synthetic oligonucleotide
gccaucuggugucucaccu

SEQ ID NO: 3033173 - RNA, 19 nt, Artificial Sequence
  Description of Artificial Sequence: Synthetic oligonucleotide
aucuggugucucaccugug

SEQ ID NO: 3033174 - RNA, 19 nt, Artificial Sequence
  Description of Artificial Sequence: Synthetic oligonucleotide
agcccaggagugguauggu

SEQ ID NO: 3033175 - RNA, 19 nt, Artificial Sequence
  Description of Artificial Sequence: Synthetic oligonucleotide
gaugcucacuugggccauc

SEQ ID NO: 3033176 - RNA, 19 nt, Artificial Sequence
  Description of Artificial Sequence: Synthetic oligonucleotide
ggaucacacaccauauuuu

SEQ ID NO: 3033177 - RNA, 19 nt, Artificial Sequence
  Description of Artificial Sequence: Synthetic oligonucleotide
cagccauuucuguuucagu

SEQ ID NO: 3033178 - RNA, 19 nt, Artificial Sequence
  Description of Artificial Sequence: Synthetic oligonucleotide
agcugugcacggacuugga

SEQ ID NO: 3033179 - RNA, 19 nt, Artificial Sequence
  Description of Artificial Sequence: Synthetic oligonucleotide
gcaugucauccacaaugua

SEQ ID NO: 3033180 - RNA, 19 nt, Artificial Sequence
  Description of Artificial Sequence: Synthetic oligonucleotide
uugggccaucuggugucuc

SEQ ID NO: 3033181 - RNA, 19 nt, Artificial Sequence
  Description of Artificial Sequence: Synthetic oligonucleotide
ggaugauuuucagccauuu

SEQ ID NO: 3033182 - RNA, 19 nt, Artificial Sequence
  Description of Artificial Sequence: Synthetic oligonucleotide
ccugaggagcaccauacau

SEQ ID NO: 3033183 - RNA, 19 nt, Artificial Sequence
  Description of Artificial Sequence: Synthetic oligonucleotide
gggccaucuggugucucac

SEQ ID NO: 3033184 - RNA, 19 nt, Artificial Sequence
  Description of Artificial Sequence: Synthetic oligonucleotide
gucuugcuucgggaucaca

SEQ ID NO: 3033185 - RNA, 19 nt, Artificial Sequence
  Description of Artificial Sequence: Synthetic oligonucleotide
gaggagcaccauacaugua

SEQ ID NO: 3033186 - RNA, 19 nt, Artificial Sequence
  Description of Artificial Sequence: Synthetic oligonucleotide
auguagcccaggaguggua

SEQ ID NO: 3033187 - RNA, 19 nt, Artificial Sequence
  Description of Artificial Sequence: Synthetic oligonucleotide
guggcagaucugcacucuu

SEQ ID NO: 3033188 - RNA, 19 nt, Artificial Sequence
  Description of Artificial Sequence: Synthetic oligonucleotide
gcacucuuuggcaugucau

SEQ ID NO: 3033189 - RNA, 19 nt, Artificial Sequence
  Description of Artificial Sequence: Synthetic oligonucleotide
gcaaagcugugcacggacu

SEQ ID NO: 3033190 - RNA, 19 nt, Artificial Sequence
  Description of Artificial Sequence: Synthetic oligonucleotide
cugcacucuuuggcauguc

SEQ ID NO: 3033191 - RNA, 19 nt, Artificial Sequence
  Description of Artificial Sequence: Synthetic oligonucleotide
ccacaccggcagcuauugc

SEQ ID NO: 3033192 - RNA, 19 nt, Artificial Sequence
  Description of Artificial Sequence: Synthetic oligonucleotide
cagcuagaaggaugauuuu

SEQ ID NO: 3033193 - RNA, 19 nt, Artificial Sequence
  Description of Artificial Sequence: Synthetic oligonucleotide
cuauugcaguuuagucauu

SEQ ID NO: 3033194 - RNA, 19 nt, Artificial Sequence
  Description of Artificial Sequence: Synthetic oligonucleotide
ggucuugcuucgggaucac

SEQ ID NO: 3033195 - RNA, 19 nt, Artificial Sequence
  Description of Artificial Sequence: Synthetic oligonucleotide
ccauauuuucugccauggu

SEQ ID NO: 3033196 - RNA, 19 nt, Artificial Sequence
  Description of Artificial Sequence: Synthetic oligonucleotide
caccggcagcuauugcagu

SEQ ID NO: 3033197 - RNA, 19 nt, Artificial Sequence
  Description of Artificial Sequence: Synthetic oligonucleotide
cuucgggaucacacaccau

SEQ ID NO: 3033198 - RNA, 19 nt, Artificial Sequence
  Description of Artificial Sequence: Synthetic oligonucleotide
cugaagcuguguggcagau

SEQ ID NO: 3033199 - RNA, 19 nt, Artificial Sequence
  Description of Artificial Sequence: Synthetic oligonucleotide
cugugacagcuagaaggau

SEQ ID NO: 3033200 - RNA, 19 nt, Artificial Sequence
  Description of Artificial Sequence: Synthetic oligonucleotide
cuugggccaucuggugucu

SEQ ID NO: 3033201 - RNA, 19 nt, Artificial Sequence
  Description of Artificial Sequence: Synthetic oligonucleotide
gucucaccugugacagcua

SEQ ID NO: 3033202 - RNA, 19 nt, Artificial Sequence
  Description of Artificial Sequence: Synthetic oligonucleotide
ccgcggcaaagcugugcac

SEQ ID NO: 3033203 - RNA, 19 nt, Artificial Sequence
  Description of Artificial Sequence: Synthetic oligonucleotide
cuuugguuccagggagauu

SEQ ID NO: 3033204 - RNA, 19 nt, Artificial Sequence
  Description of Artificial Sequence: Synthetic oligonucleotide
cggacuuggacugggucaa

SEQ ID NO: 3033205 - RNA, 19 nt, Artificial Sequence
  Description of Artificial Sequence: Synthetic oligonucleotide
ccucauuguccgcggcaaa

SEQ ID NO: 3033206 - RNA, 19 nt, Artificial Sequence
  Description of Artificial Sequence: Synthetic oligonucleotide
gcccaggagugguaugguu

SEQ ID NO: 3033207 - RNA, 19 nt, Artificial Sequence
  Description of Artificial Sequence: Synthetic oligonucleotide
cggcagcuauugcaguuua

SEQ ID NO: 3033208 - RNA, 19 nt, Artificial Sequence
  Description of Artificial Sequence: Synthetic oligonucleotide
gcacggacuuggacugggu

SEQ ID NO: 3033209 - RNA, 19 nt, Artificial Sequence
  Description of Artificial Sequence: Synthetic oligonucleotide
ccggcagcuauugcaguuu

SEQ ID NO: 3033210 - RNA, 19 nt, Artificial Sequence
  Description of Artificial Sequence: Synthetic oligonucleotide
cggcaaagcugugcacgga

SEQ ID NO: 3033211 - RNA, 19 nt, Artificial Sequence
  Description of Artificial Sequence: Synthetic oligonucleotide
ggacuuggacugggucaau

SEQ ID NO: 3033212 - RNA, 19 nt, Artificial Sequence
  Description of Artificial Sequence: Synthetic oligonucleotide
cgggaucacacaccauauu

SEQ ID NO: 3033213 - RNA, 19 nt, Artificial Sequence
  Description of Artificial Sequence: Synthetic oligonucleotide
uuuauuaguaguugcauca

SEQ ID NO: 3033214 - RNA, 19 nt, Artificial Sequence
  Description of Artificial Sequence: Synthetic oligonucleotide
aaacccaugauacagggca

SEQ ID NO: 3033215 - RNA, 19 nt, Artificial Sequence
  Description of Artificial Sequence: Synthetic oligonucleotide
aguaguugcaucaugauuc

SEQ ID NO: 3033216 - RNA, 19 nt, Artificial Sequence
  Description of Artificial Sequence: Synthetic oligonucleotide
caugauacagggcagaggg

SEQ ID NO: 3033217 - RNA, 19 nt, Artificial Sequence
  Description of Artificial Sequence: Synthetic oligonucleotide
agucuugaugucuucagcc

SEQ ID NO: 3033218 - RNA, 19 nt, Artificial Sequence
  Description of Artificial Sequence: Synthetic oligonucleotide
ugcaucaugauucaggguc

SEQ ID NO: 3033219 - RNA, 19 nt, Artificial Sequence
  Description of Artificial Sequence: Synthetic oligonucleotide
cuugauuuuagucuugaug

SEQ ID NO: 3033220 - RNA, 19 nt, Artificial Sequence
  Description of Artificial Sequence: Synthetic oligonucleotide
guugcaucaugauucaggg

SEQ ID NO: 3033221 - RNA, 19 nt, Artificial Sequence
  Description of Artificial Sequence: Synthetic oligonucleotide
ugaaacccaugauacaggg

SEQ ID NO: 3033222 - RNA, 19 nt, Artificial Sequence
  Description of Artificial Sequence: Synthetic oligonucleotide
uaguucuugauuuuagucu

SEQ ID NO: 3033223 - RNA, 19 nt, Artificial Sequence
  Description of Artificial Sequence: Synthetic oligonucleotide
uggaaguccaaguaguucu

SEQ ID NO: 3033224 - RNA, 19 nt, Artificial Sequence
  Description of Artificial Sequence: Synthetic oligonucleotide
gacuauaugggaaggacag

SEQ ID NO: 3033225 - RNA, 19 nt, Artificial Sequence
  Description of Artificial Sequence: Synthetic oligonucleotide
uuuuauuaguaguugcauc

SEQ ID NO: 3033226 - RNA, 19 nt, Artificial Sequence
  Description of Artificial Sequence: Synthetic oligonucleotide
agucaggucagaucuuccc

SEQ ID NO: 3033227 - RNA, 19 nt, Artificial Sequence
  Description of Artificial Sequence: Synthetic oligonucleotide
aaguaguucugccagcagu

SEQ ID NO: 3033228 - RNA, 19 nt, Artificial Sequence
  Description of Artificial Sequence: Synthetic oligonucleotide
uuagucuugaugucuucag

SEQ ID NO: 3033229 - RNA, 19 nt, Artificial Sequence
  Description of Artificial Sequence: Synthetic oligonucleotide
accacucacacacggagac

SEQ ID NO: 3033230 - RNA, 19 nt, Artificial Sequence
  Description of Artificial Sequence: Synthetic oligonucleotide
uuguaguucuugauuuuag

SEQ ID NO: 3033231 - RNA, 19 nt, Artificial Sequence
  Description of Artificial Sequence: Synthetic oligonucleotide
cuauaugggaaggacagag

SEQ ID NO: 3033232 - RNA, 19 nt, Artificial Sequence
  Description of Artificial Sequence: Synthetic oligonucleotide
uauuaguaguugcaucaug

SEQ ID NO: 3033233 - RNA, 19 nt, Artificial Sequence
  Description of Artificial Sequence: Synthetic oligonucleotide
ugacuauaugggaaggaca

SEQ ID NO: 3033234 - RNA, 19 nt, Artificial Sequence
  Description of Artificial Sequence: Synthetic oligonucleotide
caucauauacccagguccc

SEQ ID NO: 3033235 - RNA, 19 nt, Artificial Sequence
  Description of Artificial Sequence: Synthetic oligonucleotide
uaugggaaggacagagaag

SEQ ID NO: 3033236 - RNA, 19 nt, Artificial Sequence
  Description of Artificial Sequence: Synthetic oligonucleotide
aguugcaucaugauucagg

SEQ ID NO: 3033237 - RNA, 19 nt, Artificial Sequence
  Description of Artificial Sequence: Synthetic oligonucleotide
gaagaggagaggugggcgg

SEQ ID NO: 3033238 - RNA, 19 nt, Artificial Sequence
  Description of Artificial Sequence: Synthetic oligonucleotide
auaugggaaggacagagaa

SEQ ID NO: 3033239 - RNA, 19 nt, Artificial Sequence
  Description of Artificial Sequence: Synthetic oligonucleotide
augauucagggucccaacg

SEQ ID NO: 3033240 - RNA, 19 nt, Artificial Sequence
  Description of Artificial Sequence: Synthetic oligonucleotide
guaguucuugauuuuaguc

SEQ ID NO: 3033241 - RNA, 19 nt, Artificial Sequence
  Description of Artificial Sequence: Synthetic oligonucleotide
ucaggucagaucuucccag

SEQ ID NO: 3033242 - RNA, 19 nt, Artificial Sequence
  Description of Artificial Sequence: Synthetic oligonucleotide
gggaccaucauauacccag

SEQ ID NO: 3033243 - RNA, 19 nt, Artificial Sequence
  Description of Artificial Sequence: Synthetic oligonucleotide
auuaguaguugcaucauga

SEQ ID NO: 3033244 - RNA, 19 nt, Artificial Sequence
  Description of Artificial Sequence: Synthetic oligonucleotide
uucagggucccaacgguag

SEQ ID NO: 3033245 - RNA, 19 nt, Artificial Sequence
  Description of Artificial Sequence: Synthetic oligonucleotide
cagagaagaggagaggugg

SEQ ID NO: 3033246 - RNA, 19 nt, Artificial Sequence
  Description of Artificial Sequence: Synthetic oligonucleotide
aguuuuguaguucuugauu

SEQ ID NO: 3033247 - RNA, 19 nt, Artificial Sequence
  Description of Artificial Sequence: Synthetic oligonucleotide
ccaucauauacccaggucc

SEQ ID NO: 3033248 - RNA, 19 nt, Artificial Sequence
  Description of Artificial Sequence: Synthetic oligonucleotide
uucugguuugggaagcggc

SEQ ID NO: 3033249 - RNA, 19 nt, Artificial Sequence
  Description of Artificial Sequence: Synthetic oligonucleotide
aggcugaaacccaugauac

SEQ ID NO: 3033250 - RNA, 19 nt, Artificial Sequence
  Description of Artificial Sequence: Synthetic oligonucleotide
ugauacagggcagagggac

SEQ ID NO: 3033251 - RNA, 19 nt, Artificial Sequence
  Description of Artificial Sequence: Synthetic oligonucleotide
guaccacucacacacggag

SEQ ID NO: 3033252 - RNA, 19 nt, Artificial Sequence
  Description of Artificial Sequence: Synthetic oligonucleotide
ucuucggucaucccaggcu

SEQ ID NO: 3033253 - RNA, 19 nt, Artificial Sequence
  Description of Artificial Sequence: Synthetic oligonucleotide
accaucauauacccagguc

SEQ ID NO: 3033254 - RNA, 19 nt, Artificial Sequence
  Description of Artificial Sequence: Synthetic oligonucleotide
gaagcggcugucaaagggg

SEQ ID NO: 3033255 - RNA, 19 nt, Artificial Sequence
  Description of Artificial Sequence: Synthetic oligonucleotide
cugaaacccaugauacagg

SEQ ID NO: 3033256 - RNA, 19 nt, Artificial Sequence
  Description of Artificial Sequence: Synthetic oligonucleotide
uagggaccaucauauaccc

SEQ ID NO: 3033257 - RNA, 19 nt, Artificial Sequence
  Description of Artificial Sequence: Synthetic oligonucleotide
agggcagagggacuuguac

SEQ ID NO: 3033258 - RNA, 19 nt, Artificial Sequence
  Description of Artificial Sequence: Synthetic oligonucleotide
uuuagucuugaugucuuca

SEQ ID NO: 3033259 - RNA, 19 nt, Artificial Sequence
  Description of Artificial Sequence: Synthetic oligonucleotide
uauaugggaaggacagaga

SEQ ID NO: 3033260 - RNA, 19 nt, Artificial Sequence
  Description of Artificial Sequence: Synthetic oligonucleotide
gggacuuguacacacgccg

SEQ ID NO: 3033261 - RNA, 19 nt, Artificial Sequence
  Description of Artificial Sequence: Synthetic oligonucleotide
uugacuauaugggaaggac

SEQ ID NO: 3033262 - RNA, 19 nt, Artificial Sequence
  Description of Artificial Sequence: Synthetic oligonucleotide
guagggaccaucauauacc

SEQ ID NO: 3033263 - RNA, 19 nt, Artificial Sequence
  Description of Artificial Sequence: Synthetic oligonucleotide
uagucuugaugucuucagc

SEQ ID NO: 3033264 - RNA, 19 nt, Artificial Sequence
  Description of Artificial Sequence: Synthetic oligonucleotide
acacacggagacaucaccc

SEQ ID NO: 3033265 - RNA, 19 nt, Artificial Sequence
  Description of Artificial Sequence: Synthetic oligonucleotide
aacgguagggaccaucaua

SEQ ID NO: 3033266 - RNA, 19 nt, Artificial Sequence
  Description of Artificial Sequence: Synthetic oligonucleotide
ugggaagcggcugucaaag

SEQ ID NO: 3033267 - RNA, 19 nt, Artificial Sequence
  Description of Artificial Sequence: Synthetic oligonucleotide
gagggacuuguacacacgc

SEQ ID NO: 3033268 - RNA, 19 nt, Artificial Sequence
  Description of Artificial Sequence: Synthetic oligonucleotide
ucugguuugggaagcggcu

SEQ ID NO: 3033269 - RNA, 19 nt, Artificial Sequence
  Description of Artificial Sequence: Synthetic oligonucleotide
agaagaggagaggugggcg

SEQ ID NO: 3033270 - RNA, 19 nt, Artificial Sequence
  Description of Artificial Sequence: Synthetic oligonucleotide
ucugccagcaguucuuggu

SEQ ID NO: 3033271 - RNA, 19 nt, Artificial Sequence
  Description of Artificial Sequence: Synthetic oligonucleotide
ucuugaugucuucagccau

SEQ ID NO: 3033272 - RNA, 19 nt, Artificial Sequence
  Description of Artificial Sequence: Synthetic oligonucleotide
ucaucccaggcugaaaccc

SEQ ID NO: 3033273 - RNA, 19 nt, Artificial Sequence
  Description of Artificial Sequence: Synthetic oligonucleotide
uaguaguugcaucaugauu

SEQ ID NO: 3033274 - RNA, 19 nt, Artificial Sequence
  Description of Artificial Sequence: Synthetic oligonucleotide
uuaguaguugcaucaugau

SEQ ID NO: 3033275 - RNA, 19 nt, Artificial Sequence
  Description of Artificial Sequence: Synthetic oligonucleotide
ggaagcggcugucaaaggg

SEQ ID NO: 3033276 - RNA, 19 nt, Artificial Sequence
  Description of Artificial Sequence: Synthetic oligonucleotide
aguccaaguaguucugcca

SEQ ID NO: 3033277 - RNA, 19 nt, Artificial Sequence
  Description of Artificial Sequence: Synthetic oligonucleotide
gguagggaccaucauauac

SEQ ID NO: 3033278 - RNA, 19 nt, Artificial Sequence
  Description of Artificial Sequence: Synthetic oligonucleotide
ugauuuuagucuugauguc

SEQ ID NO: 3033279 - RNA, 19 nt, Artificial Sequence
  Description of Artificial Sequence: Synthetic oligonucleotide
agucauggccuucucgcag

SEQ ID NO: 3033280 - RNA, 19 nt, Artificial Sequence
  Description of Artificial Sequence: Synthetic oligonucleotide
gcugaaacccaugauacag

SEQ ID NO: 3033281 - RNA, 19 nt, Artificial Sequence
  Description of Artificial Sequence: Synthetic oligonucleotide
gccgguaccacucacacac

SEQ ID NO: 3033282 - RNA, 19 nt, Artificial Sequence
  Description of Artificial Sequence: Synthetic oligonucleotide
uuguacacacgccgguacc

SEQ ID NO: 3033283 - RNA, 19 nt, Artificial Sequence
  Description of Artificial Sequence: Synthetic oligonucleotide
ucagggucccaacgguagg

SEQ ID NO: 3033284 - RNA, 19 nt, Artificial Sequence
  Description of Artificial Sequence: Synthetic oligonucleotide
aggacagagaagaggagag

SEQ ID NO: 3033285 - RNA, 19 nt, Artificial Sequence
  Description of Artificial Sequence: Synthetic oligonucleotide
uaguucugccagcaguucu

SEQ ID NO: 3033286 - RNA, 19 nt, Artificial Sequence
  Description of Artificial Sequence: Synthetic oligonucleotide
uuugggaagcggcugucaa

SEQ ID NO: 3033287 - RNA, 19 nt, Artificial Sequence
  Description of Artificial Sequence: Synthetic oligonucleotide
acgccgguaccacucacac

SEQ ID NO: 3033288 - RNA, 19 nt, Artificial Sequence
  Description of Artificial Sequence: Synthetic oligonucleotide
cuuguacacacgccgguac

SEQ ID NO: 3033289 - RNA, 19 nt, Artificial Sequence
  Description of Artificial Sequence: Synthetic oligonucleotide
aucauauacccaggucccc

SEQ ID NO: 3033290 - RNA, 19 nt, Artificial Sequence
  Description of Artificial Sequence: Synthetic oligonucleotide
cacacggagacaucacccc

SEQ ID NO: 3033291 - RNA, 19 nt, Artificial Sequence
  Description of Artificial Sequence: Synthetic oligonucleotide
ucuucccaggaaacgugcc

SEQ ID NO: 3033292 - RNA, 19 nt, Artificial Sequence
  Description of Artificial Sequence: Synthetic oligonucleotide
aucuucccaggaaacgugc

SEQ ID NO: 3033293 - RNA, 19 nt, Artificial Sequence
  Description of Artificial Sequence: Synthetic oligonucleotide
cagagggacuuguacacac

SEQ ID NO: 3033294 - RNA, 19 nt, Artificial Sequence
  Description of Artificial Sequence: Synthetic oligonucleotide
agaucuucccaggaaacgu

SEQ ID NO: 3033295 - RNA, 19 nt, Artificial Sequence
  Description of Artificial Sequence: Synthetic oligonucleotide
uuuuguaguucuugauuuu

SEQ ID NO: 3033296 - RNA, 19 nt, Artificial Sequence
  Description of Artificial Sequence: Synthetic oligonucleotide
guuuuguaguucuugauuu

SEQ ID NO: 3033297 - RNA, 19 nt, Artificial Sequence
  Description of Artificial Sequence: Synthetic oligonucleotide
cuucggucaucccaggcug

SEQ ID NO: 3033298 - RNA, 19 nt, Artificial Sequence
  Description of Artificial Sequence: Synthetic oligonucleotide
caugauucagggucccaac

SEQ ID NO: 3033299 - RNA, 19 nt, Artificial Sequence
  Description of Artificial Sequence: Synthetic oligonucleotide
cacacacggagacaucacc

SEQ ID NO: 3033300 - RNA, 19 nt, Artificial Sequence
  Description of Artificial Sequence: Synthetic oligonucleotide
gauuuuagucuugaugucu

SEQ ID NO: 3033301 - RNA, 19 nt, Artificial Sequence
  Description of Artificial Sequence: Synthetic oligonucleotide
ggaaggacagagaagagga

SEQ ID NO: 3033302 - RNA, 19 nt, Artificial Sequence
  Description of Artificial Sequence: Synthetic oligonucleotide
gcagucauggccuucucgc

SEQ ID NO: 3033303 - RNA, 19 nt, Artificial Sequence
  Description of Artificial Sequence: Synthetic oligonucleotide
caggaaacgugccuuccgc

SEQ ID NO: 3033304 - RNA, 19 nt, Artificial Sequence
  Description of Artificial Sequence: Synthetic oligonucleotide
cagaucuucccaggaaacg

SEQ ID NO: 3033305 - RNA, 19 nt, Artificial Sequence
  Description of Artificial Sequence: Synthetic oligonucleotide
gaucuucccaggaaacgug

SEQ ID NO: 3033306 - RNA, 19 nt, Artificial Sequence
  Description of Artificial Sequence: Synthetic oligonucleotide
uccaaguaguucugccagc

SEQ ID NO: 3033307 - RNA, 19 nt, Artificial Sequence
  Description of Artificial Sequence: Synthetic oligonucleotide
ucaugauucagggucccaa

SEQ ID NO: 3033308 - RNA, 19 nt, Artificial Sequence
  Description of Artificial Sequence: Synthetic oligonucleotide
auggccuucucgcagcggu

SEQ ID NO: 3033309 - RNA, 19 nt, Artificial Sequence
  Description of Artificial Sequence: Synthetic oligonucleotide
uuauuaguaguugcaucau

SEQ ID NO: 3033310 - RNA, 19 nt, Artificial Sequence
  Description of Artificial Sequence: Synthetic oligonucleotide
uuuuagucuugaugucuuc

SEQ ID NO: 3033311 - RNA, 19 nt, Artificial Sequence
  Description of Artificial Sequence: Synthetic oligonucleotide
uguacacacgccgguacca

SEQ ID NO: 3033312 - RNA, 19 nt, Artificial Sequence
  Description of Artificial Sequence: Synthetic oligonucleotide
agagaagaggagagguggg

SEQ ID NO: 3033313 - RNA, 19 nt, Artificial Sequence
  Description of Artificial Sequence: Synthetic oligonucleotide
gagaagaggagaggugggc

SEQ ID NO: 3033314 - RNA, 19 nt, Artificial Sequence
  Description of Artificial Sequence: Synthetic oligonucleotide
uuggucugguucugguuug

SEQ ID NO: 3033315 - RNA, 19 nt, Artificial Sequence
  Description of Artificial Sequence: Synthetic oligonucleotide
uaccacucacacacggaga

SEQ ID NO: 3033316 - RNA, 19 nt, Artificial Sequence
  Description of Artificial Sequence: Synthetic oligonucleotide
gucagaucuucccaggaaa

SEQ ID NO: 3033317 - RNA, 19 nt, Artificial Sequence
  Description of Artificial Sequence: Synthetic oligonucleotide
ugguuugggaagcggcugu

SEQ ID NO: 3033318 - RNA, 19 nt, Artificial Sequence
  Description of Artificial Sequence: Synthetic oligonucleotide
caggucagaucuucccagg

SEQ ID NO: 3033319 - RNA, 19 nt, Artificial Sequence
  Description of Artificial Sequence: Synthetic oligonucleotide
agggacuuguacacacgcc

SEQ ID NO: 3033320 - RNA, 19 nt, Artificial Sequence
  Description of Artificial Sequence: Synthetic oligonucleotide
gaaguccaaguaguucugc

SEQ ID NO: 3033321 - RNA, 19 nt, Artificial Sequence
  Description of Artificial Sequence: Synthetic oligonucleotide
uucuuggucugguucuggu

SEQ ID NO: 3033322 - RNA, 19 nt, Artificial Sequence
  Description of Artificial Sequence: Synthetic oligonucleotide
guaguugcaucaugauuca

SEQ ID NO: 3033323 - RNA, 19 nt, Artificial Sequence
  Description of Artificial Sequence: Synthetic oligonucleotide
ggucaucccaggcugaaac

SEQ ID NO: 3033324 - RNA, 19 nt, Artificial Sequence
  Description of Artificial Sequence: Synthetic oligonucleotide
ucacacacggagacaucac

SEQ ID NO: 3033325 - RNA, 19 nt, Artificial Sequence
  Description of Artificial Sequence: Synthetic oligonucleotide
gacagagaagaggagaggu

SEQ ID NO: 3033326 - RNA, 19 nt, Artificial Sequence
  Description of Artificial Sequence: Synthetic oligonucleotide
ucuugauuuuagucuugau

SEQ ID NO: 3033327 - RNA, 19 nt, Artificial Sequence
  Description of Artificial Sequence: Synthetic oligonucleotide
gaaacccaugauacagggc

SEQ ID NO: 3033328 - RNA, 19 nt, Artificial Sequence
  Description of Artificial Sequence: Synthetic oligonucleotide
acgguagggaccaucauau

SEQ ID NO: 3033329 - RNA, 19 nt, Artificial Sequence
  Description of Artificial Sequence: Synthetic oligonucleotide
gucaucccaggcugaaacc

SEQ ID NO: 3033330 - RNA, 19 nt, Artificial Sequence
  Description of Artificial Sequence: Synthetic oligonucleotide
aacccaugauacagggcag

SEQ ID NO: 3033331 - RNA, 19 nt, Artificial Sequence
  Description of Artificial Sequence: Synthetic oligonucleotide
gucaggucagaucuuccca

SEQ ID NO: 3033332 - RNA, 19 nt, Artificial Sequence
  Description of Artificial Sequence: Synthetic oligonucleotide
auuuuagucuugaugucuu

SEQ ID NO: 3033333 - RNA, 19 nt, Artificial Sequence
  Description of Artificial Sequence: Synthetic oligonucleotide
aggaaacgugccuuccgcu

SEQ ID NO: 3033334 - RNA, 19 nt, Artificial Sequence
  Description of Artificial Sequence: Synthetic oligonucleotide
ugccagcaguucuuggucu

SEQ ID NO: 3033335 - RNA, 19 nt, Artificial Sequence
  Description of Artificial Sequence: Synthetic oligonucleotide
ggcagagggacuuguacac

SEQ ID NO: 3033336 - RNA, 19 nt, Artificial Sequence
  Description of Artificial Sequence: Synthetic oligonucleotide
uucgcagucauggccuucu

SEQ ID NO: 3033337 - RNA, 19 nt, Artificial Sequence
  Description of Artificial Sequence: Synthetic oligonucleotide
acagagaagaggagaggug

SEQ ID NO: 3033338 - RNA, 19 nt, Artificial Sequence
  Description of Artificial Sequence: Synthetic oligonucleotide
ugguucugguuugggaagc

SEQ ID NO: 3033339 - RNA, 19 nt, Artificial Sequence
  Description of Artificial Sequence: Synthetic oligonucleotide
cucgcagcgguggaagucc

SEQ ID NO: 3033340 - RNA, 19 nt, Artificial Sequence
  Description of Artificial Sequence: Synthetic oligonucleotide
caggcugaaacccaugaua

SEQ ID NO: 3033341 - RNA, 19 nt, Artificial Sequence
  Description of Artificial Sequence: Synthetic oligonucleotide
gauucagggucccaacggu

SEQ ID NO: 3033342 - RNA, 19 nt, Artificial Sequence
  Description of Artificial Sequence: Synthetic oligonucleotide
aggucagaucuucccagga

SEQ ID NO: 3033343 - RNA, 19 nt, Artificial Sequence
  Description of Artificial Sequence: Synthetic oligonucleotide
agcgguggaaguccaagua

SEQ ID NO: 3033344 - RNA, 19 nt, Artificial Sequence
  Description of Artificial Sequence: Synthetic oligonucleotide
aguaguucugccagcaguu

SEQ ID NO: 3033345 - RNA, 19 nt, Artificial Sequence
  Description of Artificial Sequence: Synthetic oligonucleotide
cuucucgcagcgguggaag

SEQ ID NO: 3033346 - RNA, 19 nt, Artificial Sequence
  Description of Artificial Sequence: Synthetic oligonucleotide
gcaguuuuguaguucuuga

SEQ ID NO: 3033347 - RNA, 19 nt, Artificial Sequence
  Description of Artificial Sequence: Synthetic oligonucleotide
uugcaucaugauucagggu

SEQ ID NO: 3033348 - RNA, 19 nt, Artificial Sequence
  Description of Artificial Sequence: Synthetic oligonucleotide
cucacacacggagacauca

SEQ ID NO: 3033349 - RNA, 19 nt, Artificial Sequence
  Description of Artificial Sequence: Synthetic oligonucleotide
guucugguuugggaagcgg

SEQ ID NO: 3033350 - RNA, 19 nt, Artificial Sequence
  Description of Artificial Sequence: Synthetic oligonucleotide
acacacgccgguaccacuc

SEQ ID NO: 3033351 - RNA, 19 nt, Artificial Sequence
  Description of Artificial Sequence: Synthetic oligonucleotide
agagggacuuguacacacg

SEQ ID NO: 3033352 - RNA, 19 nt, Artificial Sequence
  Description of Artificial Sequence: Synthetic oligonucleotide
uugggaagcggcugucaaa

SEQ ID NO: 3033353 - RNA, 19 nt, Artificial Sequence
  Description of Artificial Sequence: Synthetic oligonucleotide
ggcaguuuuguaguucuug

SEQ ID NO: 3033354 - RNA, 19 nt, Artificial Sequence
  Description of Artificial Sequence: Synthetic oligonucleotide
gaaacgugccuuccgcucu

SEQ ID NO: 3033355 - RNA, 19 nt, Artificial Sequence
  Description of Artificial Sequence: Synthetic oligonucleotide
uuccgcucuucggucaucc

SEQ ID NO: 3033356 - RNA, 19 nt, Artificial Sequence
  Description of Artificial Sequence: Synthetic oligonucleotide
ucuuggucugguucugguu

SEQ ID NO: 3033357 - RNA, 19 nt, Artificial Sequence
  Description of Artificial Sequence: Synthetic oligonucleotide
gcgguggaaguccaaguag

SEQ ID NO: 3033358 - RNA, 19 nt, Artificial Sequence
  Description of Artificial Sequence: Synthetic oligonucleotide
uucggucaucccaggcuga

SEQ ID NO: 3033359 - RNA, 19 nt, Artificial Sequence
  Description of Artificial Sequence: Synthetic oligonucleotide
cucuucggucaucccaggc

SEQ ID NO: 3033360 - RNA, 19 nt, Artificial Sequence
  Description of Artificial Sequence: Synthetic oligonucleotide
cugccagcaguucuugguc

SEQ ID NO: 3033361 - RNA, 19 nt, Artificial Sequence
  Description of Artificial Sequence: Synthetic oligonucleotide
cuugacuauaugggaagga

SEQ ID NO: 3033362 - RNA, 19 nt, Artificial Sequence
  Description of Artificial Sequence: Synthetic oligonucleotide
caucaugauucaggguccc

SEQ ID NO: 3033363 - RNA, 19 nt, Artificial Sequence
  Description of Artificial Sequence: Synthetic oligonucleotide
acuauaugggaaggacaga

SEQ ID NO: 3033364 - RNA, 19 nt, Artificial Sequence
  Description of Artificial Sequence: Synthetic oligonucleotide
ggacuuguacacacgccgg

SEQ ID NO: 3033365 - RNA, 19 nt, Artificial Sequence
  Description of Artificial Sequence: Synthetic oligonucleotide
uacacacgccgguaccacu

SEQ ID NO: 3033366 - RNA, 19 nt, Artificial Sequence
  Description of Artificial Sequence: Synthetic oligonucleotide
gcaguucuuggucugguuc

SEQ ID NO: 3033367 - RNA, 19 nt, Artificial Sequence
  Description of Artificial Sequence: Synthetic oligonucleotide
cccuugacuauaugggaag

SEQ ID NO: 3033368 - RNA, 19 nt, Artificial Sequence
  Description of Artificial Sequence: Synthetic oligonucleotide
guggaaguccaaguaguuc

SEQ ID NO: 3033369 - RNA, 19 nt, Artificial Sequence
  Description of Artificial Sequence: Synthetic oligonucleotide
guucuuggucugguucugg

SEQ ID NO: 3033370 - RNA, 19 nt, Artificial Sequence
  Description of Artificial Sequence: Synthetic oligonucleotide
uggucugguucugguuugg

SEQ ID NO: 3033371 - RNA, 19 nt, Artificial Sequence
  Description of Artificial Sequence: Synthetic oligonucleotide
uaguugcaucaugauucag

SEQ ID NO: 3033372 - RNA, 19 nt, Artificial Sequence
  Description of Artificial Sequence: Synthetic oligonucleotide
gagucaggucagaucuucc

SEQ ID NO: 3033373 - RNA, 19 nt, Artificial Sequence
  Description of Artificial Sequence: Synthetic oligonucleotide
cagggucccaacgguaggg

SEQ ID NO: 3033374 - RNA, 19 nt, Artificial Sequence
  Description of Artificial Sequence: Synthetic oligonucleotide
acacgccgguaccacucac

SEQ ID NO: 3033375 - RNA, 19 nt, Artificial Sequence
  Description of Artificial Sequence: Synthetic oligonucleotide
ggaaacgugccuuccgcuc

SEQ ID NO: 3033376 - RNA, 19 nt, Artificial Sequence
  Description of Artificial Sequence: Synthetic oligonucleotide
aaacgugccuuccgcucuu

SEQ ID NO: 3033377 - RNA, 19 nt, Artificial Sequence
  Description of Artificial Sequence: Synthetic oligonucleotide
ggugggcggagucagguca

SEQ ID NO: 3033378 - RNA, 19 nt, Artificial Sequence
  Description of Artificial Sequence: Synthetic oligonucleotide
uucccaggaaacgugccuu

SEQ ID NO: 3033379 - RNA, 19 nt, Artificial Sequence
  Description of Artificial Sequence: Synthetic oligonucleotide
cugguuugggaagcggcug

SEQ ID NO: 3033380 - RNA, 19 nt, Artificial Sequence
  Description of Artificial Sequence: Synthetic oligonucleotide
ggacagagaagaggagagg

SEQ ID NO: 3033381 - RNA, 19 nt, Artificial Sequence
  Description of Artificial Sequence: Synthetic oligonucleotide
acgugccuuccgcucuucg

SEQ ID NO: 3033382 - RNA, 19 nt, Artificial Sequence
  Description of Artificial Sequence: Synthetic oligonucleotide
gcggagucaggucagaucu

SEQ ID NO: 3033383 - RNA, 19 nt, Artificial Sequence
  Description of Artificial Sequence: Synthetic oligonucleotide
gaccaucauauacccaggu

SEQ ID NO: 3033384 - RNA, 19 nt, Artificial Sequence
  Description of Artificial Sequence: Synthetic oligonucleotide
gcaucaugauucagggucc

SEQ ID NO: 3033385 - RNA, 19 nt, Artificial Sequence
  Description of Artificial Sequence: Synthetic oligonucleotide
ucccaggaaacgugccuuc

SEQ ID NO: 3033386 - RNA, 19 nt, Artificial Sequence
  Description of Artificial Sequence: Synthetic oligonucleotide
ggucccaacgguagggacc

SEQ ID NO: 3033387 - RNA, 19 nt, Artificial Sequence
  Description of Artificial Sequence: Synthetic oligonucleotide
gacuuguacacacgccggu

SEQ ID NO: 3033388 - RNA, 19 nt, Artificial Sequence
  Description of Artificial Sequence: Synthetic oligonucleotide
uucucgcagcgguggaagu

SEQ ID NO: 3033389 - RNA, 19 nt, Artificial Sequence
  Description of Artificial Sequence: Synthetic oligonucleotide
uggccuucucgcagcggug

SEQ ID NO: 3033390 - RNA, 19 nt, Artificial Sequence
  Description of Artificial Sequence: Synthetic oligonucleotide
ggaccaucauauacccagg

SEQ ID NO: 3033391 - RNA, 19 nt, Artificial Sequence
  Description of Artificial Sequence: Synthetic oligonucleotide
ucucgcagcgguggaaguc

SEQ ID NO: 3033392 - RNA, 19 nt, Artificial Sequence
  Description of Artificial Sequence: Synthetic oligonucleotide
caucccaggcugaaaccca

SEQ ID NO: 3033393 - RNA, 19 nt, Artificial Sequence
  Description of Artificial Sequence: Synthetic oligonucleotide
gggcagagggacuuguaca

SEQ ID NO: 3033394 - RNA, 19 nt, Artificial Sequence
  Description of Artificial Sequence: Synthetic oligonucleotide
ccaggaaacgugccuuccg

SEQ ID NO: 3033395 - RNA, 19 nt, Artificial Sequence
  Description of Artificial Sequence: Synthetic oligonucleotide
gucccaacgguagggacca

SEQ ID NO: 3033396 - RNA, 19 nt, Artificial Sequence
  Description of Artificial Sequence: Synthetic oligonucleotide
cuuggucugguucugguuu

SEQ ID NO: 3033397 - RNA, 19 nt, Artificial Sequence
  Description of Artificial Sequence: Synthetic oligonucleotide
auacagggcagagggacuu

SEQ ID NO: 3033398 - RNA, 19 nt, Artificial Sequence
  Description of Artificial Sequence: Synthetic oligonucleotide
ccuugacuauaugggaagg

SEQ ID NO: 3033399 - RNA, 19 nt, Artificial Sequence
  Description of Artificial Sequence: Synthetic oligonucleotide
aacgugccuuccgcucuuc

SEQ ID NO: 3033400 - RNA, 19 nt, Artificial Sequence
  Description of Artificial Sequence: Synthetic oligonucleotide
aguucugccagcaguucuu

SEQ ID NO: 3033401 - RNA, 19 nt, Artificial Sequence
  Description of Artificial Sequence: Synthetic oligonucleotide
gguucugguuugggaagcg

SEQ ID NO: 3033402 - RNA, 19 nt, Artificial Sequence
  Description of Artificial Sequence: Synthetic oligonucleotide
ggaaguccaaguaguucug

SEQ ID NO: 3033403 - RNA, 19 nt, Artificial Sequence
  Description of Artificial Sequence: Synthetic oligonucleotide
acccaugauacagggcaga

SEQ ID NO: 3033404 - RNA, 19 nt, Artificial Sequence
  Description of Artificial Sequence: Synthetic oligonucleotide
acuuguacacacgccggua

SEQ ID NO: 3033405 - RNA, 19 nt, Artificial Sequence
  Description of Artificial Sequence: Synthetic oligonucleotide
agcaguucuuggucugguu

SEQ ID NO: 3033406 - RNA, 19 nt, Artificial Sequence
  Description of Artificial Sequence: Synthetic oligonucleotide
uccgcucuucggucauccc

SEQ ID NO: 3033407 - RNA, 19 nt, Artificial Sequence
  Description of Artificial Sequence: Synthetic oligonucleotide
ggagucaggucagaucuuc

SEQ ID NO: 3033408 - RNA, 19 nt, Artificial Sequence
  Description of Artificial Sequence: Synthetic oligonucleotide
uacagggcagagggacuug

SEQ ID NO: 3033409 - RNA, 19 nt, Artificial Sequence
  Description of Artificial Sequence: Synthetic oligonucleotide
ucgcagcgguggaagucca

SEQ ID NO: 3033410 - RNA, 19 nt, Artificial Sequence
  Description of Artificial Sequence: Synthetic oligonucleotide
acagggcagagggacuugu

SEQ ID NO: 3033411 - RNA, 19 nt, Artificial Sequence
  Description of Artificial Sequence: Synthetic oligonucleotide
acucacacacggagacauc

SEQ ID NO: 3033412 - RNA, 19 nt, Artificial Sequence
  Description of Artificial Sequence: Synthetic oligonucleotide
cagucauggccuucucgca

SEQ ID NO: 3033413 - RNA, 19 nt, Artificial Sequence
  Description of Artificial Sequence: Synthetic oligonucleotide
aucaugauucaggguccca

SEQ ID NO: 3033414 - RNA, 19 nt, Artificial Sequence
  Description of Artificial Sequence: Synthetic oligonucleotide
ccaugauacagggcagagg

SEQ ID NO: 3033415 - RNA, 19 nt, Artificial Sequence
  Description of Artificial Sequence: Synthetic oligonucleotide
ccaacgguagggaccauca

SEQ ID NO: 3033416 - RNA, 19 nt, Artificial Sequence
  Description of Artificial Sequence: Synthetic oligonucleotide
guacacacgccgguaccac

SEQ ID NO: 3033417 - RNA, 19 nt, Artificial Sequence
  Description of Artificial Sequence: Synthetic oligonucleotide
gggaagcggcugucaaagg

SEQ ID NO: 3033418 - RNA, 19 nt, Artificial Sequence
  Description of Artificial Sequence: Synthetic oligonucleotide
ggucagaucuucccaggaa

SEQ ID NO: 3033419 - RNA, 19 nt, Artificial Sequence
  Description of Artificial Sequence: Synthetic oligonucleotide
gauacagggcagagggacu

SEQ ID NO: 3033420 - RNA, 19 nt, Artificial Sequence
  Description of Artificial Sequence: Synthetic oligonucleotide
gugccuuccgcucuucggu

SEQ ID NO: 3033421 - RNA, 19 nt, Artificial Sequence
  Description of Artificial Sequence: Synthetic oligonucleotide
gcagcgguggaaguccaag

SEQ ID NO: 3033422 - RNA, 19 nt, Artificial Sequence
  Description of Artificial Sequence: Synthetic oligonucleotide
ggcugaaacccaugauaca

SEQ ID NO: 3033423 - RNA, 19 nt, Artificial Sequence
  Description of Artificial Sequence: Synthetic oligonucleotide
augauacagggcagaggga

SEQ ID NO: 3033424 - RNA, 19 nt, Artificial Sequence
  Description of Artificial Sequence: Synthetic oligonucleotide
ggcggagucaggucagauc

SEQ ID NO: 3033425 - RNA, 19 nt, Artificial Sequence
  Description of Artificial Sequence: Synthetic oligonucleotide
guuugggaagcggcuguca

SEQ ID NO: 3033426 - RNA, 19 nt, Artificial Sequence
  Description of Artificial Sequence: Synthetic oligonucleotide
cgcucuucggucaucccag

SEQ ID NO: 3033427 - RNA, 19 nt, Artificial Sequence
  Description of Artificial Sequence: Synthetic oligonucleotide
ccccuucgcagucauggcc

SEQ ID NO: 3033428 - RNA, 19 nt, Artificial Sequence
  Description of Artificial Sequence: Synthetic oligonucleotide
ucggucaucccaggcugaa

SEQ ID NO: 3033429 - RNA, 19 nt, Artificial Sequence
  Description of Artificial Sequence: Synthetic oligonucleotide
ggggcaguuuuguaguucu

SEQ ID NO: 3033430 - RNA, 19 nt, Artificial Sequence
  Description of Artificial Sequence: Synthetic oligonucleotide
auucagggucccaacggua

SEQ ID NO: 3033431 - RNA, 19 nt, Artificial Sequence
  Description of Artificial Sequence: Synthetic oligonucleotide
gccagcaguucuuggucug

SEQ ID NO: 3033432 - RNA, 19 nt, Artificial Sequence
  Description of Artificial Sequence: Synthetic oligonucleotide
caguuuuguaguucuugau

SEQ ID NO: 3033433 - RNA, 19 nt, Artificial Sequence
  Description of Artificial Sequence: Synthetic oligonucleotide
ggucugguucugguuuggg

SEQ ID NO: 3033434 - RNA, 19 nt, Artificial Sequence
  Description of Artificial Sequence: Synthetic oligonucleotide
cacgccgguaccacucaca

SEQ ID NO: 3033435 - RNA, 19 nt, Artificial Sequence
  Description of Artificial Sequence: Synthetic oligonucleotide
cauggccuucucgcagcgg

SEQ ID NO: 3033436 - RNA, 19 nt, Artificial Sequence
  Description of Artificial Sequence: Synthetic oligonucleotide
cuucccaggaaacgugccu

SEQ ID NO: 3033437 - RNA, 19 nt, Artificial Sequence
  Description of Artificial Sequence: Synthetic oligonucleotide
agaggugggcggagucagg

SEQ ID NO: 3033438 - RNA, 19 nt, Artificial Sequence
  Description of Artificial Sequence: Synthetic oligonucleotide
gugggcggagucaggucag

SEQ ID NO: 3033439 - RNA, 19 nt, Artificial Sequence
  Description of Artificial Sequence: Synthetic oligonucleotide
cgguaccacucacacacgg

SEQ ID NO: 3033440 - RNA, 19 nt, Artificial Sequence
  Description of Artificial Sequence: Synthetic oligonucleotide
agggucccaacgguaggga

SEQ ID NO: 3033441 - RNA, 19 nt, Artificial Sequence
  Description of Artificial Sequence: Synthetic oligonucleotide
cgugccuuccgcucuucgg

SEQ ID NO: 3033442 - RNA, 19 nt, Artificial Sequence
  Description of Artificial Sequence: Synthetic oligonucleotide
gcucuucggucaucccagg

SEQ ID NO: 3033443 - RNA, 19 nt, Artificial Sequence
  Description of Artificial Sequence: Synthetic oligonucleotide
cacucacacacggagacau

SEQ ID NO: 3033444 - RNA, 19 nt, Artificial Sequence
  Description of Artificial Sequence: Synthetic oligonucleotide
gguaccacucacacacgga

SEQ ID NO: 3033445 - RNA, 19 nt, Artificial Sequence
  Description of Artificial Sequence: Synthetic oligonucleotide
gaggugggcggagucaggu

SEQ ID NO: 3033446 - RNA, 19 nt, Artificial Sequence
  Description of Artificial Sequence: Synthetic oligonucleotide
cccaugauacagggcagag

SEQ ID NO: 3033447 - RNA, 19 nt, Artificial Sequence
  Description of Artificial Sequence: Synthetic oligonucleotide
ucgcagucauggccuucuc

SEQ ID NO: 3033448 - RNA, 19 nt, Artificial Sequence
  Description of Artificial Sequence: Synthetic oligonucleotide
ccaaguaguucugccagca

SEQ ID NO: 3033449 - RNA, 19 nt, Artificial Sequence
  Description of Artificial Sequence: Synthetic oligonucleotide
gggucccaacgguagggac

SEQ ID NO: 3033450 - RNA, 19 nt, Artificial Sequence
  Description of Artificial Sequence: Synthetic oligonucleotide
ccagcaguucuuggucugg

SEQ ID NO: 3033451 - RNA, 19 nt, Artificial Sequence
  Description of Artificial Sequence: Synthetic oligonucleotide
agggaccaucauauaccca

SEQ ID NO: 3033452 - RNA, 19 nt, Artificial Sequence
  Description of Artificial Sequence: Synthetic oligonucleotide
ccccuugacuauaugggaa

SEQ ID NO: 3033453 - RNA, 19 nt, Artificial Sequence
  Description of Artificial Sequence: Synthetic oligonucleotide
ggagaggugggcggaguca

SEQ ID NO: 3033454 - RNA, 19 nt, Artificial Sequence
  Description of Artificial Sequence: Synthetic oligonucleotide
cuucgcagucauggccuuc

SEQ ID NO: 3033455 - RNA, 19 nt, Artificial Sequence
  Description of Artificial Sequence: Synthetic oligonucleotide
cacacgccgguaccacuca

SEQ ID NO: 3033456 - RNA, 19 nt, Artificial Sequence
  Description of Artificial Sequence: Synthetic oligonucleotide
cccaggaaacgugccuucc

SEQ ID NO: 3033457 - RNA, 19 nt, Artificial Sequence
  Description of Artificial Sequence: Synthetic oligonucleotide
cagcgguggaaguccaagu

SEQ ID NO: 3033458 - RNA, 19 nt, Artificial Sequence
  Description of Artificial Sequence: Synthetic oligonucleotide
ccgguaccacucacacacg

SEQ ID NO: 3033459 - RNA, 19 nt, Artificial Sequence
  Description of Artificial Sequence: Synthetic oligonucleotide
gguuugggaagcggcuguc

SEQ ID NO: 3033460 - RNA, 19 nt, Artificial Sequence
  Description of Artificial Sequence: Synthetic oligonucleotide
ccgcucuucggucauccca

SEQ ID NO: 3033461 - RNA, 19 nt, Artificial Sequence
  Description of Artificial Sequence: Synthetic oligonucleotide
gcagagggacuuguacaca

SEQ ID NO: 3033462 - RNA, 19 nt, Artificial Sequence
  Description of Artificial Sequence: Synthetic oligonucleotide
gccuuccgcucuucgguca

SEQ ID NO: 3033463 - RNA, 19 nt, Artificial Sequence
  Description of Artificial Sequence: Synthetic oligonucleotide
cuuccgcucuucggucauc

SEQ ID NO: 3033464 - RNA, 19 nt, Artificial Sequence
  Description of Artificial Sequence: Synthetic oligonucleotide
cccuucgcagucauggccu

SEQ ID NO: 3033465 - RNA, 19 nt, Artificial Sequence
  Description of Artificial Sequence: Synthetic oligonucleotide
cagggcagagggacuugua

SEQ ID NO: 3033466 - RNA, 19 nt, Artificial Sequence
  Description of Artificial Sequence: Synthetic oligonucleotide
cccaacgguagggaccauc

SEQ ID NO: 3033467 - RNA, 19 nt, Artificial Sequence
  Description of Artificial Sequence: Synthetic oligonucleotide
gguggaaguccaaguaguu

SEQ ID NO: 3033468 - RNA, 19 nt, Artificial Sequence
  Description of Artificial Sequence: Synthetic oligonucleotide
cgguggaaguccaaguagu

SEQ ID NO: 3033469 - RNA, 19 nt, Artificial Sequence
  Description of Artificial Sequence: Synthetic oligonucleotide
caacgguagggaccaucau

SEQ ID NO: 3033470 - RNA, 19 nt, Artificial Sequence
  Description of Artificial Sequence: Synthetic oligonucleotide
gccuucucgcagcggugga

SEQ ID NO: 3033471 - RNA, 19 nt, Artificial Sequence
  Description of Artificial Sequence: Synthetic oligonucleotide
cagcaguucuuggucuggu

SEQ ID NO: 3033472 - RNA, 19 nt, Artificial Sequence
  Description of Artificial Sequence: Synthetic oligonucleotide
ccacucacacacggagaca

SEQ ID NO: 3033473 - RNA, 19 nt, Artificial Sequence
  Description of Artificial Sequence: Synthetic oligonucleotide
ccaggcugaaacccaugau

SEQ ID NO: 3033474 - RNA, 19 nt, Artificial Sequence
  Description of Artificial Sequence: Synthetic oligonucleotide
ucccaacgguagggaccau

SEQ ID NO: 3033475 - RNA, 19 nt, Artificial Sequence
  Description of Artificial Sequence: Synthetic oligonucleotide
ccuucucgcagcgguggaa

SEQ ID NO: 3033476 - RNA, 19 nt, Artificial Sequence
  Description of Artificial Sequence: Synthetic oligonucleotide
cgccgguaccacucacaca

SEQ ID NO: 3033477 - RNA, 19 nt, Artificial Sequence
  Description of Artificial Sequence: Synthetic oligonucleotide
gggcggagucaggucagau

SEQ ID NO: 3033478 - RNA, 19 nt, Artificial Sequence
  Description of Artificial Sequence: Synthetic oligonucleotide
ccuuccgcucuucggucau

SEQ ID NO: 3033479 - RNA, 19 nt, Artificial Sequence
  Description of Artificial Sequence: Synthetic oligonucleotide
cgguagggaccaucauaua

SEQ ID NO: 3033480 - RNA, 19 nt, Artificial Sequence
  Description of Artificial Sequence: Synthetic oligonucleotide
gggcaguuuuguaguucuu

SEQ ID NO: 3033481 - RNA, 19 nt, Artificial Sequence
  Description of Artificial Sequence: Synthetic oligonucleotide
ccuucgcagucauggccuu

SEQ ID NO: 3033482 - RNA, 19 nt, Artificial Sequence
  Description of Artificial Sequence: Synthetic oligonucleotide
cgcagcgguggaaguccaa

SEQ ID NO: 3033483 - RNA, 19 nt, Artificial Sequence
  Description of Artificial Sequence: Synthetic oligonucleotide
cggucaucccaggcugaaa

SEQ ID NO: 3033484 - RNA, 19 nt, Artificial Sequence
  Description of Artificial Sequence: Synthetic oligonucleotide
cggagucaggucagaucuu

SEQ ID NO: 3033485 - RNA, 19 nt, Artificial Sequence
  Description of Artificial Sequence: Synthetic oligonucleotide
gaaaauacuaauuuucucg

SEQ ID NO: 3033486 - RNA, 19 nt, Artificial Sequence
  Description of Artificial Sequence: Synthetic oligonucleotide
uuagaguucaccauauacg

SEQ ID NO: 3033487 - RNA, 19 nt, Artificial Sequence
  Description of Artificial Sequence: Synthetic oligonucleotide
aauacuaauuuucucgugu

SEQ ID NO: 3033488 - RNA, 19 nt, Artificial Sequence
  Description of Artificial Sequence: Synthetic oligonucleotide
aaaauacuaauuuucucgu

SEQ ID NO: 3033489 - RNA, 19 nt, Artificial Sequence
  Description of Artificial Sequence: Synthetic oligonucleotide
aaauauuccucgcacggag

SEQ ID NO: 3033490 - RNA, 19 nt, Artificial Sequence
  Description of Artificial Sequence: Synthetic oligonucleotide
aaacuugggguccacguac

SEQ ID NO: 3033491 - RNA, 19 nt, Artificial Sequence
  Description of Artificial Sequence: Synthetic oligonucleotide
accauauacgaacucaugg

SEQ ID NO: 3033492 - RNA, 19 nt, Artificial Sequence
  Description of Artificial Sequence: Synthetic oligonucleotide
agaaaauacuaauuuucuc

SEQ ID NO: 3033493 - RNA, 19 nt, Artificial Sequence
  Description of Artificial Sequence: Synthetic oligonucleotide
uagaaaauacuaauuuucu

SEQ ID NO: 3033494 - RNA, 19 nt, Artificial Sequence
  Description of Artificial Sequence: Synthetic oligonucleotide
cauuaauuucagaagguag

SEQ ID NO: 3033495 - RNA, 19 nt, Artificial Sequence
  Description of Artificial Sequence: Synthetic oligonucleotide
uucagaagguagaaaauac

SEQ ID NO: 3033496 - RNA, 19 nt, Artificial Sequence
  Description of Artificial Sequence: Synthetic oligonucleotide
gaagucggcacccugugcg

SEQ ID NO: 3033497 - RNA, 19 nt, Artificial Sequence
  Description of Artificial Sequence: Synthetic oligonucleotide
uagaguucaccauauacga

SEQ ID NO: 3033498 - RNA, 19 nt, Artificial Sequence
  Description of Artificial Sequence: Synthetic oligonucleotide
cuuagaguucaccauauac

SEQ ID NO: 3033499 - RNA, 19 nt, Artificial Sequence
  Description of Artificial Sequence: Synthetic oligonucleotide
cauauacgaacucauggcc

SEQ ID NO: 3033500 - RNA, 19 nt, Artificial Sequence
  Description of Artificial Sequence: Synthetic oligonucleotide
gaguucaccauauacgaac

SEQ ID NO: 3033501 - RNA, 19 nt, Artificial Sequence
  Description of Artificial Sequence: Synthetic oligonucleotide
aaauacuaauuuucucgug

SEQ ID NO: 3033502 - RNA, 19 nt, Artificial Sequence
  Description of Artificial Sequence: Synthetic oligonucleotide
auggccauuaauuucagaa

SEQ ID NO: 3033503 - RNA, 19 nt, Artificial Sequence
  Description of Artificial Sequence: Synthetic oligonucleotide
ugcaaauauuccucgcacg

SEQ ID NO: 3033504 - RNA, 19 nt, Artificial Sequence
  Description of Artificial Sequence: Synthetic oligonucleotide
guagaaaauacuaauuuuc

SEQ ID NO: 3033505 - RNA, 19 nt, Artificial Sequence
  Description of Artificial Sequence: Synthetic oligonucleotide
ucagaagguagaaaauacu

SEQ ID NO: 3033506 - RNA, 19 nt, Artificial Sequence
  Description of Artificial Sequence: Synthetic oligonucleotide
auuaauuucagaagguaga

SEQ ID NO: 3033507 - RNA, 19 nt, Artificial Sequence
  Description of Artificial Sequence: Synthetic oligonucleotide
ggccauuaauuucagaagg

SEQ ID NO: 3033508 - RNA, 19 nt, Artificial Sequence
  Description of Artificial Sequence: Synthetic oligonucleotide
acucauggccauuaauuuc

SEQ ID NO: 3033509 - RNA, 19 nt, Artificial Sequence
  Description of Artificial Sequence: Synthetic oligonucleotide
agguagaaaauacuaauuu

SEQ ID NO: 3033510 - RNA, 19 nt, Artificial Sequence
  Description of Artificial Sequence: Synthetic oligonucleotide
aauuuucucguguugucuu

SEQ ID NO: 3033511 - RNA, 19 nt, Artificial Sequence
  Description of Artificial Sequence: Synthetic oligonucleotide
aacucauggccauuaauuu

SEQ ID NO: 3033512 - RNA, 19 nt, Artificial Sequence
  Description of Artificial Sequence: Synthetic oligonucleotide
uggccauuaauuucagaag

SEQ ID NO: 3033513 - RNA, 19 nt, Artificial Sequence
  Description of Artificial Sequence: Synthetic oligonucleotide
uugggguccacguacuuag

SEQ ID NO: 3033514 - RNA, 19 nt, Artificial Sequence
  Description of Artificial Sequence: Synthetic oligonucleotide
accguagugacuuccuggg

SEQ ID NO: 3033515 - RNA, 19 nt, Artificial Sequence
  Description of Artificial Sequence: Synthetic oligonucleotide
gcaaauauuccucgcacgg

SEQ ID NO: 3033516 - RNA, 19 nt, Artificial Sequence
  Description of Artificial Sequence: Synthetic oligonucleotide
uacuaauuuucucguguug

SEQ ID NO: 3033517 - RNA, 19 nt, Artificial Sequence
  Description of Artificial Sequence: Synthetic oligonucleotide
guaaucggcugccugcucg

SEQ ID NO: 3033518 - RNA, 19 nt, Artificial Sequence
  Description of Artificial Sequence: Synthetic oligonucleotide
guggguagagccccgaggg

SEQ ID NO: 3033519 - RNA, 19 nt, Artificial Sequence
  Description of Artificial Sequence: Synthetic oligonucleotide
guaguaaucggcugccugc

SEQ ID NO: 3033520 - RNA, 19 nt, Artificial Sequence
  Description of Artificial Sequence: Synthetic oligonucleotide
acuaauuuucucguguugu

SEQ ID NO: 3033521 - RNA, 19 nt, Artificial Sequence
  Description of Artificial Sequence: Synthetic oligonucleotide
uuaauuucagaagguagaa

SEQ ID NO: 3033522 - RNA, 19 nt, Artificial Sequence
  Description of Artificial Sequence: Synthetic oligonucleotide
aaggguugcucaccgaagu

SEQ ID NO: 3033523 - RNA, 19 nt, Artificial Sequence
  Description of Artificial Sequence: Synthetic oligonucleotide
uagguagccacccugcaaa

SEQ ID NO: 3033524 - RNA, 19 nt, Artificial Sequence
  Description of Artificial Sequence: Synthetic oligonucleotide
acguacuuagaguucacca

SEQ ID NO: 3033525 - RNA, 19 nt, Artificial Sequence
  Description of Artificial Sequence: Synthetic oligonucleotide
aauauuccucgcacggagg

SEQ ID NO: 3033526 - RNA, 19 nt, Artificial Sequence
  Description of Artificial Sequence: Synthetic oligonucleotide
acggaggaaacuugggguc

SEQ ID NO: 3033527 - RNA, 19 nt, Artificial Sequence
  Description of Artificial Sequence: Synthetic oligonucleotide
cauucuuucuucuuaaaua

SEQ ID NO: 3033528 - RNA, 19 nt, Artificial Sequence
  Description of Artificial Sequence: Synthetic oligonucleotide
aagucggcacccugugcgc

SEQ ID NO: 3033529 - RNA, 19 nt, Artificial Sequence
  Description of Artificial Sequence: Synthetic oligonucleotide
gaagguagaaaauacuaau

SEQ ID NO: 3033530 - RNA, 19 nt, Artificial Sequence
  Description of Artificial Sequence: Synthetic oligonucleotide
cucauggccauuaauuuca

SEQ ID NO: 3033531 - RNA, 19 nt, Artificial Sequence
  Description of Artificial Sequence: Synthetic oligonucleotide
agggcuggaagucggcacc

SEQ ID NO: 3033532 - RNA, 19 nt, Artificial Sequence
  Description of Artificial Sequence: Synthetic oligonucleotide
ugccugcucgccuagguag

SEQ ID NO: 3033533 - RNA, 19 nt, Artificial Sequence
  Description of Artificial Sequence: Synthetic oligonucleotide
gacuuccugggccacuugg

SEQ ID NO: 3033534 - RNA, 19 nt, Artificial Sequence
  Description of Artificial Sequence: Synthetic oligonucleotide
uauacgaacucauggccau

SEQ ID NO: 3033535 - RNA, 19 nt, Artificial Sequence
  Description of Artificial Sequence: Synthetic oligonucleotide
uaauuuucucguguugucu

SEQ ID NO: 3033536 - RNA, 19 nt, Artificial Sequence
  Description of Artificial Sequence: Synthetic oligonucleotide
ucaccauauacgaacucau

SEQ ID NO: 3033537 - RNA, 19 nt, Artificial Sequence
  Description of Artificial Sequence: Synthetic oligonucleotide
ugccguaguaaucggcugc

SEQ ID NO: 3033538 - RNA, 19 nt, Artificial Sequence
  Description of Artificial Sequence: Synthetic oligonucleotide
cuaauuuucucguguuguc

SEQ ID NO: 3033539 - RNA, 19 nt, Artificial Sequence
  Description of Artificial Sequence: Synthetic oligonucleotide
aagguagaaaauacuaauu

SEQ ID NO: 3033540 - RNA, 19 nt, Artificial Sequence
  Description of Artificial Sequence: Synthetic oligonucleotide
uacuuagaguucaccauau

SEQ ID NO: 3033541 - RNA, 19 nt, Artificial Sequence
  Description of Artificial Sequence: Synthetic oligonucleotide
auauuccucgcacggagga

SEQ ID NO: 3033542 - RNA, 19 nt, Artificial Sequence
  Description of Artificial Sequence: Synthetic oligonucleotide
caccguagugacuuccugg

SEQ ID NO: 3033543 - RNA, 19 nt, Artificial Sequence
  Description of Artificial Sequence: Synthetic oligonucleotide
ccauauacgaacucauggc

SEQ ID NO: 3033544 - RNA, 19 nt, Artificial Sequence
  Description of Artificial Sequence: Synthetic oligonucleotide
uccacguacuuagaguuca

SEQ ID NO: 3033545 - RNA, 19 nt, Artificial Sequence
  Description of Artificial Sequence: Synthetic oligonucleotide
cugcaaauauuccucgcac

SEQ ID NO: 3033546 - RNA, 19 nt, Artificial Sequence
  Description of Artificial Sequence: Synthetic oligonucleotide
acccugcaaauauuccucg

SEQ ID NO: 3033547 - RNA, 19 nt, Artificial Sequence
  Description of Artificial Sequence: Synthetic oligonucleotide
cagaagguagaaaauacua

SEQ ID NO: 3033548 - RNA, 19 nt, Artificial Sequence
  Description of Artificial Sequence: Synthetic oligonucleotide
ugagccaggccccggcccg

SEQ ID NO: 3033549 - RNA, 19 nt, Artificial Sequence
  Description of Artificial Sequence: Synthetic oligonucleotide
uuccauucuuucuucuuaa

SEQ ID NO: 3033550 - RNA, 19 nt, Artificial Sequence
  Description of Artificial Sequence: Synthetic oligonucleotide
auacuaauuuucucguguu

SEQ ID NO: 3033551 - RNA, 19 nt, Artificial Sequence
  Description of Artificial Sequence: Synthetic oligonucleotide
agaagguagaaaauacuaa

SEQ ID NO: 3033552 - RNA, 19 nt, Artificial Sequence
  Description of Artificial Sequence: Synthetic oligonucleotide
auauacgaacucauggcca

SEQ ID NO: 3033553 - RNA, 19 nt, Artificial Sequence
  Description of Artificial Sequence: Synthetic oligonucleotide
ucauggccauuaauuucag

SEQ ID NO: 3033554 - RNA, 19 nt, Artificial Sequence
  Description of Artificial Sequence: Synthetic oligonucleotide
uggaagucggcacccugug

SEQ ID NO: 3033555 - RNA, 19 nt, Artificial Sequence
  Description of Artificial Sequence: Synthetic oligonucleotide
accgaagucgggccguggg

SEQ ID NO: 3033556 - RNA, 19 nt, Artificial Sequence
  Description of Artificial Sequence: Synthetic oligonucleotide
uaauuucagaagguagaaa

SEQ ID NO: 3033557 - RNA, 19 nt, Artificial Sequence
  Description of Artificial Sequence: Synthetic oligonucleotide
cuguccgugaccccgcgcc

SEQ ID NO: 3033558 - RNA, 19 nt, Artificial Sequence
  Description of Artificial Sequence: Synthetic oligonucleotide
cacccugcaaauauuccuc

SEQ ID NO: 3033559 - RNA, 19 nt, Artificial Sequence
  Description of Artificial Sequence: Synthetic oligonucleotide
gaagucgggccguggguag

SEQ ID NO: 3033560 - RNA, 19 nt, Artificial Sequence
  Description of Artificial Sequence: Synthetic oligonucleotide
cugggcacggcucucccgg

SEQ ID NO: 3033561 - RNA, 19 nt, Artificial Sequence
  Description of Artificial Sequence: Synthetic oligonucleotide
aggguugcucaccgaaguc

SEQ ID NO: 3033562 - RNA, 19 nt, Artificial Sequence
  Description of Artificial Sequence: Synthetic oligonucleotide
ugcucaccgaagucgggcc

SEQ ID NO: 3033563 - RNA, 19 nt, Artificial Sequence
  Description of Artificial Sequence: Synthetic oligonucleotide
gaaggguugcucaccgaag

SEQ ID NO: 3033564 - RNA, 19 nt, Artificial Sequence
  Description of Artificial Sequence: Synthetic oligonucleotide
acuuccugggccacuuggc

SEQ ID NO: 3033565 - RNA, 19 nt, Artificial Sequence
  Description of Artificial Sequence: Synthetic oligonucleotide
guacuuagaguucaccaua

SEQ ID NO: 3033566 - RNA, 19 nt, Artificial Sequence
  Description of Artificial Sequence: Synthetic oligonucleotide
uaaucggcugccugcucgc

SEQ ID NO: 3033567 - RNA, 19 nt, Artificial Sequence
  Description of Artificial Sequence: Synthetic oligonucleotide
auuucagaagguagaaaau

SEQ ID NO: 3033568 - RNA, 19 nt, Artificial Sequence
  Description of Artificial Sequence: Synthetic oligonucleotide
caccauauacgaacucaug

SEQ ID NO: 3033569 - RNA, 19 nt, Artificial Sequence
  Description of Artificial Sequence: Synthetic oligonucleotide
uugcucaccgaagucgggc

SEQ ID NO: 3033570 - RNA, 19 nt, Artificial Sequence
  Description of Artificial Sequence: Synthetic oligonucleotide
aguaaucggcugccugcuc

SEQ ID NO: 3033571 - RNA, 19 nt, Artificial Sequence
  Description of Artificial Sequence: Synthetic oligonucleotide
aaucggcugccugcucgcc

SEQ ID NO: 3033572 - RNA, 19 nt, Artificial Sequence
  Description of Artificial Sequence: Synthetic oligonucleotide
guagugacuuccugggcca

SEQ ID NO: 3033573 - RNA, 19 nt, Artificial Sequence
  Description of Artificial Sequence: Synthetic oligonucleotide
aguucaccauauacgaacu

SEQ ID NO: 3033574 - RNA, 19 nt, Artificial Sequence
  Description of Artificial Sequence: Synthetic oligonucleotide
uguccgugaccccgcgccg

SEQ ID NO: 3033575 - RNA, 19 nt, Artificial Sequence
  Description of Artificial Sequence: Synthetic oligonucleotide
gaacucauggccauuaauu

SEQ ID NO: 3033576 - RNA, 19 nt, Artificial Sequence
  Description of Artificial Sequence: Synthetic oligonucleotide
gccacuuggcuccuguccg

SEQ ID NO: 3033577 - RNA, 19 nt, Artificial Sequence
  Description of Artificial Sequence: Synthetic oligonucleotide
gaaacuugggguccacgua

SEQ ID NO: 3033578 - RNA, 19 nt, Artificial Sequence
  Description of Artificial Sequence: Synthetic oligonucleotide
ggguugcucaccgaagucg

SEQ ID NO: 3033579 - RNA, 19 nt, Artificial Sequence
  Description of Artificial Sequence: Synthetic oligonucleotide
uccauucuuucuucuuaaa

SEQ ID NO: 3033580 - RNA, 19 nt, Artificial Sequence
  Description of Artificial Sequence: Synthetic oligonucleotide
acggcucucccggagcacc

SEQ ID NO: 3033581 - RNA, 19 nt, Artificial Sequence
  Description of Artificial Sequence: Synthetic oligonucleotide
agccacccugcaaauauuc

SEQ ID NO: 3033582 - RNA, 19 nt, Artificial Sequence
  Description of Artificial Sequence: Synthetic oligonucleotide
ucccggagcaccguaguga

SEQ ID NO: 3033583 - RNA, 19 nt, Artificial Sequence
  Description of Artificial Sequence: Synthetic oligonucleotide
ucgggccguggguagagcc

SEQ ID NO: 3033584 - RNA, 19 nt, Artificial Sequence
  Description of Artificial Sequence: Synthetic oligonucleotide
uaguaaucggcugccugcu

SEQ ID NO: 3033585 - RNA, 19 nt, Artificial Sequence
  Description of Artificial Sequence: Synthetic oligonucleotide
gccgcugccguaguaaucg

SEQ ID NO: 3033586 - RNA, 19 nt, Artificial Sequence
  Description of Artificial Sequence: Synthetic oligonucleotide
gguugcucaccgaagucgg

SEQ ID NO: 3033587 - RNA, 19 nt, Artificial Sequence
  Description of Artificial Sequence: Synthetic oligonucleotide
auuuucucguguugucuuu

SEQ ID NO: 3033588 - RNA, 19 nt, Artificial Sequence
  Description of Artificial Sequence: Synthetic oligonucleotide
cuuggcuccuguccgugac

SEQ ID NO: 3033589 - RNA, 19 nt, Artificial Sequence
  Description of Artificial Sequence: Synthetic oligonucleotide
cacguacuuagaguucacc

SEQ ID NO: 3033590 - RNA, 19 nt, Artificial Sequence
  Description of Artificial Sequence: Synthetic oligonucleotide
uggguagagccccgagggc

SEQ ID NO: 3033591 - RNA, 19 nt, Artificial Sequence
  Description of Artificial Sequence: Synthetic oligonucleotide
gguagaaaauacuaauuuu

SEQ ID NO: 3033592 - RNA, 19 nt, Artificial Sequence
  Description of Artificial Sequence: Synthetic oligonucleotide
cguagugacuuccugggcc

SEQ ID NO: 3033593 - RNA, 19 nt, Artificial Sequence
  Description of Artificial Sequence: Synthetic oligonucleotide
ugcucgccuagguagccac

SEQ ID NO: 3033594 - RNA, 19 nt, Artificial Sequence
  Description of Artificial Sequence: Synthetic oligonucleotide
uacgaacucauggccauua

SEQ ID NO: 3033595 - RNA, 19 nt, Artificial Sequence
  Description of Artificial Sequence: Synthetic oligonucleotide
uuggcuccuguccgugacc

SEQ ID NO: 3033596 - RNA, 19 nt, Artificial Sequence
  Description of Artificial Sequence: Synthetic oligonucleotide
guagccacccugcaaauau

SEQ ID NO: 3033597 - RNA, 19 nt, Artificial Sequence
  Description of Artificial Sequence: Synthetic oligonucleotide
ucucccggagcaccguagu

SEQ ID NO: 3033598 - RNA, 19 nt, Artificial Sequence
  Description of Artificial Sequence: Synthetic oligonucleotide
aggaaacuugggguccacg

SEQ ID NO: 3033599 - RNA, 19 nt, Artificial Sequence
  Description of Artificial Sequence: Synthetic oligonucleotide
agucggcacccugugcgcc

SEQ ID NO: 3033600 - RNA, 19 nt, Artificial Sequence
  Description of Artificial Sequence: Synthetic oligonucleotide
uggcuccuguccgugaccc

SEQ ID NO: 3033601 - RNA, 19 nt, Artificial Sequence
  Description of Artificial Sequence: Synthetic oligonucleotide
cucgccuagguagccaccc

SEQ ID NO: 3033602 - RNA, 19 nt, Artificial Sequence
  Description of Artificial Sequence: Synthetic oligonucleotide
uuccugggccacuuggcuc

SEQ ID NO: 3033603 - RNA, 19 nt, Artificial Sequence
  Description of Artificial Sequence: Synthetic oligonucleotide
guucaccauauacgaacuc

SEQ ID NO: 3033604 - RNA, 19 nt, Artificial Sequence
  Description of Artificial Sequence: Synthetic oligonucleotide
auuccucgcacggaggaaa

SEQ ID NO: 3033605 - RNA, 19 nt, Artificial Sequence
  Description of Artificial Sequence: Synthetic oligonucleotide
aacuugggguccacguacu

SEQ ID NO: 3033606 - RNA, 19 nt, Artificial Sequence
  Description of Artificial Sequence: Synthetic oligonucleotide
cacggaggaaacuuggggu

SEQ ID NO: 3033607 - RNA, 19 nt, Artificial Sequence
  Description of Artificial Sequence: Synthetic oligonucleotide
agccccgagggcuggaagu

SEQ ID NO: 3033608 - RNA, 19 nt, Artificial Sequence
  Description of Artificial Sequence: Synthetic oligonucleotide
ugggccacuuggcuccugu

SEQ ID NO: 3033609 - RNA, 19 nt, Artificial Sequence
  Description of Artificial Sequence: Synthetic oligonucleotide
gggguccacguacuuagag

SEQ ID NO: 3033610 - RNA, 19 nt, Artificial Sequence
  Description of Artificial Sequence: Synthetic oligonucleotide
uuuucucguguugucuuuu

SEQ ID NO: 3033611 - RNA, 19 nt, Artificial Sequence
  Description of Artificial Sequence: Synthetic oligonucleotide
uccuguccgugaccccgcg

SEQ ID NO: 3033612 - RNA, 19 nt, Artificial Sequence
  Description of Artificial Sequence: Synthetic oligonucleotide
cugccguaguaaucggcug

SEQ ID NO: 3033613 - RNA, 19 nt, Artificial Sequence
  Description of Artificial Sequence: Synthetic oligonucleotide
caaauauuccucgcacgga

SEQ ID NO: 3033614 - RNA, 19 nt, Artificial Sequence
  Description of Artificial Sequence: Synthetic oligonucleotide
acuuagaguucaccauaua

SEQ ID NO: 3033615 - RNA, 19 nt, Artificial Sequence
  Description of Artificial Sequence: Synthetic oligonucleotide
cucucccggagcaccguag

SEQ ID NO: 3033616 - RNA, 19 nt, Artificial Sequence
  Description of Artificial Sequence: Synthetic oligonucleotide
gagcaccguagugacuucc

SEQ ID NO: 3033617 - RNA, 19 nt, Artificial Sequence
  Description of Artificial Sequence: Synthetic oligonucleotide
ggccacuuggcuccugucc

SEQ ID NO: 3033618 - RNA, 19 nt, Artificial Sequence
  Description of Artificial Sequence: Synthetic oligonucleotide
gucggcacccugugcgccg

SEQ ID NO: 3033619 - RNA, 19 nt, Artificial Sequence
  Description of Artificial Sequence: Synthetic oligonucleotide
ugacuuccugggccacuug

SEQ ID NO: 3033620 - RNA, 19 nt, Artificial Sequence
  Description of Artificial Sequence: Synthetic oligonucleotide
guugcucaccgaagucggg

SEQ ID NO: 3033621 - RNA, 19 nt, Artificial Sequence
  Description of Artificial Sequence: Synthetic oligonucleotide
ggaaacuugggguccacgu

SEQ ID NO: 3033622 - RNA, 19 nt, Artificial Sequence
  Description of Artificial Sequence: Synthetic oligonucleotide
agaguucaccauauacgaa

SEQ ID NO: 3033623 - RNA, 19 nt, Artificial Sequence
  Description of Artificial Sequence: Synthetic oligonucleotide
uauuccucgcacggaggaa

SEQ ID NO: 3033624 - RNA, 19 nt, Artificial Sequence
  Description of Artificial Sequence: Synthetic oligonucleotide
gcuccuguccgugaccccg

SEQ ID NO: 3033625 - RNA, 19 nt, Artificial Sequence
  Description of Artificial Sequence: Synthetic oligonucleotide
acuuggcuccuguccguga

SEQ ID NO: 3033626 - RNA, 19 nt, Artificial Sequence
  Description of Artificial Sequence: Synthetic oligonucleotide
uccgugaccccgcgccggc

SEQ ID NO: 3033627 - RNA, 19 nt, Artificial Sequence
  Description of Artificial Sequence: Synthetic oligonucleotide
cuagguagccacccugcaa

SEQ ID NO: 3033628 - RNA, 19 nt, Artificial Sequence
  Description of Artificial Sequence: Synthetic oligonucleotide
ugggguccacguacuuaga

SEQ ID NO: 3033629 - RNA, 19 nt, Artificial Sequence
  Description of Artificial Sequence: Synthetic oligonucleotide
ugaccccgcgccggcagcg

SEQ ID NO: 3033630 - RNA, 19 nt, Artificial Sequence
  Description of Artificial Sequence: Synthetic oligonucleotide
aucggcugccugcucgccu

SEQ ID NO: 3033631 - RNA, 19 nt, Artificial Sequence
  Description of Artificial Sequence: Synthetic oligonucleotide
ccugcaaauauuccucgca

SEQ ID NO: 3033632 - RNA, 19 nt, Artificial Sequence
  Description of Artificial Sequence: Synthetic oligonucleotide
ugcgccgcugccguaguaa

SEQ ID NO: 3033633 - RNA, 19 nt, Artificial Sequence
  Description of Artificial Sequence: Synthetic oligonucleotide
cuccgaaggguugcucacc

SEQ ID NO: 3033634 - RNA, 19 nt, Artificial Sequence
  Description of Artificial Sequence: Synthetic oligonucleotide
gagccccgagggcuggaag

SEQ ID NO: 3033635 - RNA, 19 nt, Artificial Sequence
  Description of Artificial Sequence: Synthetic oligonucleotide
acgaacucauggccauuaa

SEQ ID NO: 3033636 - RNA, 19 nt, Artificial Sequence
  Description of Artificial Sequence: Synthetic oligonucleotide
cagcgcugagccaggcccc

SEQ ID NO: 3033637 - RNA, 19 nt, Artificial Sequence
  Description of Artificial Sequence: Synthetic oligonucleotide
ucggcugccugcucgccua

SEQ ID NO: 3033638 - RNA, 19 nt, Artificial Sequence
  Description of Artificial Sequence: Synthetic oligonucleotide
ucgccuagguagccacccu

SEQ ID NO: 3033639 - RNA, 19 nt, Artificial Sequence
  Description of Artificial Sequence: Synthetic oligonucleotide
gguccacguacuuagaguu

SEQ ID NO: 3033640 - RNA, 19 nt, Artificial Sequence
  Description of Artificial Sequence: Synthetic oligonucleotide
uagccacccugcaaauauu

SEQ ID NO: 3033641 - RNA, 19 nt, Artificial Sequence
  Description of Artificial Sequence: Synthetic oligonucleotide
cuccuguccgugaccccgc

SEQ ID NO: 3033642 - RNA, 19 nt, Artificial Sequence
  Description of Artificial Sequence: Synthetic oligonucleotide
gcucaccgaagucgggccg

SEQ ID NO: 3033643 - RNA, 19 nt, Artificial Sequence
  Description of Artificial Sequence: Synthetic oligonucleotide
cauggccauuaauuucaga

SEQ ID NO: 3033644 - RNA, 19 nt, Artificial Sequence
  Description of Artificial Sequence: Synthetic oligonucleotide
ggaagucggcacccugugc

SEQ ID NO: 3033645 - RNA, 19 nt, Artificial Sequence
  Description of Artificial Sequence: Synthetic oligonucleotide
agguagccacccugcaaau

SEQ ID NO: 3033646 - RNA, 19 nt, Artificial Sequence
  Description of Artificial Sequence: Synthetic oligonucleotide
cguaguaaucggcugccug

SEQ ID NO: 3033647 - RNA, 19 nt, Artificial Sequence
  Description of Artificial Sequence: Synthetic oligonucleotide
agucgggccguggguagag

SEQ ID NO: 3033648 - RNA, 19 nt, Artificial Sequence
  Description of Artificial Sequence: Synthetic oligonucleotide
cugugcgccgcugccguag

SEQ ID NO: 3033649 - RNA, 19 nt, Artificial Sequence
  Description of Artificial Sequence: Synthetic oligonucleotide
guagagccccgagggcugg

SEQ ID NO: 3033650 - RNA, 19 nt, Artificial Sequence
  Description of Artificial Sequence: Synthetic oligonucleotide
agcaccguagugacuuccu

SEQ ID NO: 3033651 - RNA, 19 nt, Artificial Sequence
  Description of Artificial Sequence: Synthetic oligonucleotide
ugugcgccgcugccguagu

SEQ ID NO: 3033652 - RNA, 19 nt, Artificial Sequence
  Description of Artificial Sequence: Synthetic oligonucleotide
agugacuuccugggccacu

SEQ ID NO: 3033653 - RNA, 19 nt, Artificial Sequence
  Description of Artificial Sequence: Synthetic oligonucleotide
cucccggagcaccguagug

SEQ ID NO: 3033654 - RNA, 19 nt, Artificial Sequence
  Description of Artificial Sequence: Synthetic oligonucleotide
agcgcugagccaggccccg

SEQ ID NO: 3033655 - RNA, 19 nt, Artificial Sequence
  Description of Artificial Sequence: Synthetic oligonucleotide
cacccugugcgccgcugcc

SEQ ID NO: 3033656 - RNA, 19 nt, Artificial Sequence
  Description of Artificial Sequence: Synthetic oligonucleotide
cccugcaaauauuccucgc

SEQ ID NO: 3033657 - RNA, 19 nt, Artificial Sequence
  Description of Artificial Sequence: Synthetic oligonucleotide
gcuggaagucggcacccug

SEQ ID NO: 3033658 - RNA, 19 nt, Artificial Sequence
  Description of Artificial Sequence: Synthetic oligonucleotide
aagucgggccguggguaga

SEQ ID NO: 3033659 - RNA, 19 nt, Artificial Sequence
  Description of Artificial Sequence: Synthetic oligonucleotide
gccggcagcgcugagccag

SEQ ID NO: 3033660 - RNA, 19 nt, Artificial Sequence
  Description of Artificial Sequence: Synthetic oligonucleotide
acccugugcgccgcugccg

SEQ ID NO: 3033661 - RNA, 19 nt, Artificial Sequence
  Description of Artificial Sequence: Synthetic oligonucleotide
cuggaagucggcacccugu

SEQ ID NO: 3033662 - RNA, 19 nt, Artificial Sequence
  Description of Artificial Sequence: Synthetic oligonucleotide
acuugggguccacguacuu

SEQ ID NO: 3033663 - RNA, 19 nt, Artificial Sequence
  Description of Artificial Sequence: Synthetic oligonucleotide
gcgccggcagcgcugagcc

SEQ ID NO: 3033664 - RNA, 19 nt, Artificial Sequence
  Description of Artificial Sequence: Synthetic oligonucleotide
cguggguagagccccgagg

SEQ ID NO: 3033665 - RNA, 19 nt, Artificial Sequence
  Description of Artificial Sequence: Synthetic oligonucleotide
guccgugaccccgcgccgg

SEQ ID NO: 3033666 - RNA, 19 nt, Artificial Sequence
  Description of Artificial Sequence: Synthetic oligonucleotide
gccguaguaaucggcugcc

SEQ ID NO: 3033667 - RNA, 19 nt, Artificial Sequence
  Description of Artificial Sequence: Synthetic oligonucleotide
ucaccgaagucgggccgug

SEQ ID NO: 3033668 - RNA, 19 nt, Artificial Sequence
  Description of Artificial Sequence: Synthetic oligonucleotide
cccgagggcuggaagucgg

SEQ ID NO: 3033669 - RNA, 19 nt, Artificial Sequence
  Description of Artificial Sequence: Synthetic oligonucleotide
gguagagccccgagggcug

SEQ ID NO: 3033670 - RNA, 19 nt, Artificial Sequence
  Description of Artificial Sequence: Synthetic oligonucleotide
guccacguacuuagaguuc

SEQ ID NO: 3033671 - RNA, 19 nt, Artificial Sequence
  Description of Artificial Sequence: Synthetic oligonucleotide
gccuccgaaggguugcuca

SEQ ID NO: 3033672 - RNA, 19 nt, Artificial Sequence
  Description of Artificial Sequence: Synthetic oligonucleotide
cacuuggcuccuguccgug

SEQ ID NO: 3033673 - RNA, 19 nt, Artificial Sequence
  Description of Artificial Sequence: Synthetic oligonucleotide
cccggagcaccguagugac

SEQ ID NO: 3033674 - RNA, 19 nt, Artificial Sequence
  Description of Artificial Sequence: Synthetic oligonucleotide
gcaccguagugacuuccug

SEQ ID NO: 3033675 - RNA, 19 nt, Artificial Sequence
  Description of Artificial Sequence: Synthetic oligonucleotide
uagugacuuccugggccac

SEQ ID NO: 3033676 - RNA, 19 nt, Artificial Sequence
  Description of Artificial Sequence: Synthetic oligonucleotide
cuuccugggccacuuggcu

SEQ ID NO: 3033677 - RNA, 19 nt, Artificial Sequence
  Description of Artificial Sequence: Synthetic oligonucleotide
ggcacggcucucccggagc

SEQ ID NO: 3033678 - RNA, 19 nt, Artificial Sequence
  Description of Artificial Sequence: Synthetic oligonucleotide
gccuagguagccacccugc

SEQ ID NO: 3033679 - RNA, 19 nt, Artificial Sequence
  Description of Artificial Sequence: Synthetic oligonucleotide
ccauuaauuucagaaggua

SEQ ID NO: 3033680 - RNA, 19 nt, Artificial Sequence
  Description of Artificial Sequence: Synthetic oligonucleotide
gccacccugcaaauauucc

SEQ ID NO: 3033681 - RNA, 19 nt, Artificial Sequence
  Description of Artificial Sequence: Synthetic oligonucleotide
ggguccacguacuuagagu

SEQ ID NO: 3033682 - RNA, 19 nt, Artificial Sequence
  Description of Artificial Sequence: Synthetic oligonucleotide
cuugggguccacguacuua

SEQ ID NO: 3033683 - RNA, 19 nt, Artificial Sequence
  Description of Artificial Sequence: Synthetic oligonucleotide
ugggcacggcucucccgga

SEQ ID NO: 3033684 - RNA, 19 nt, Artificial Sequence
  Description of Artificial Sequence: Synthetic oligonucleotide
ccuccgaaggguugcucac

SEQ ID NO: 3033685 - RNA, 19 nt, Artificial Sequence
  Description of Artificial Sequence: Synthetic oligonucleotide
gccauuaauuucagaaggu

SEQ ID NO: 3033686 - RNA, 19 nt, Artificial Sequence
  Description of Artificial Sequence: Synthetic oligonucleotide
ggcccgccgccuccgaagg

SEQ ID NO: 3033687 - RNA, 19 nt, Artificial Sequence
  Description of Artificial Sequence: Synthetic oligonucleotide
ucggcacccugugcgccgc

SEQ ID NO: 3033688 - RNA, 19 nt, Artificial Sequence
  Description of Artificial Sequence: Synthetic oligonucleotide
auacgaacucauggccauu

SEQ ID NO: 3033689 - RNA, 19 nt, Artificial Sequence
  Description of Artificial Sequence: Synthetic oligonucleotide
gugaccccgcgccggcagc

SEQ ID NO: 3033690 - RNA, 19 nt, Artificial Sequence
  Description of Artificial Sequence: Synthetic oligonucleotide
ggcagcgcugagccaggcc

SEQ ID NO: 3033691 - RNA, 19 nt, Artificial Sequence
  Description of Artificial Sequence: Synthetic oligonucleotide
gcugccguaguaaucggcu

SEQ ID NO: 3033692 - RNA, 19 nt, Artificial Sequence
  Description of Artificial Sequence: Synthetic oligonucleotide
gggccguggguagagcccc

SEQ ID NO: 3033693 - RNA, 19 nt, Artificial Sequence
  Description of Artificial Sequence: Synthetic oligonucleotide
caccgaagucgggccgugg

SEQ ID NO: 3033694 - RNA, 19 nt, Artificial Sequence
  Description of Artificial Sequence: Synthetic oligonucleotide
ggaggaaacuuggggucca

SEQ ID NO: 3033695 - RNA, 19 nt, Artificial Sequence
  Description of Artificial Sequence: Synthetic oligonucleotide
ccauucuuucuucuuaaau

SEQ ID NO: 3033696 - RNA, 19 nt, Artificial Sequence
  Description of Artificial Sequence: Synthetic oligonucleotide
ccguagugacuuccugggc

SEQ ID NO: 3033697 - RNA, 19 nt, Artificial Sequence
  Description of Artificial Sequence: Synthetic oligonucleotide
ccacccugcaaauauuccu

SEQ ID NO: 3033698 - RNA, 19 nt, Artificial Sequence
  Description of Artificial Sequence: Synthetic oligonucleotide
gcacccugugcgccgcugc

SEQ ID NO: 3033699 - RNA, 19 nt, Artificial Sequence
  Description of Artificial Sequence: Synthetic oligonucleotide
ccacguacuuagaguucac

SEQ ID NO: 3033700 - RNA, 19 nt, Artificial Sequence
  Description of Artificial Sequence: Synthetic oligonucleotide
ggguagagccccgagggcu

SEQ ID NO: 3033701 - RNA, 19 nt, Artificial Sequence
  Description of Artificial Sequence: Synthetic oligonucleotide
gggcacggcucucccggag

SEQ ID NO: 3033702 - RNA, 19 nt, Artificial Sequence
  Description of Artificial Sequence: Synthetic oligonucleotide
cguacuuagaguucaccau

SEQ ID NO: 3033703 - RNA, 19 nt, Artificial Sequence
  Description of Artificial Sequence: Synthetic oligonucleotide
gggcuggaagucggcaccc

SEQ ID NO: 3033704 - RNA, 19 nt, Artificial Sequence
  Description of Artificial Sequence: Synthetic oligonucleotide
cgaaggguugcucaccgaa

SEQ ID NO: 3033705 - RNA, 19 nt, Artificial Sequence
  Description of Artificial Sequence: Synthetic oligonucleotide
cgcugccguaguaaucggc

SEQ ID NO: 3033706 - RNA, 19 nt, Artificial Sequence
  Description of Artificial Sequence: Synthetic oligonucleotide
gccgccuccgaaggguugc

SEQ ID NO: 3033707 - RNA, 19 nt, Artificial Sequence
  Description of Artificial Sequence: Synthetic oligonucleotide
uagagccccgagggcugga

SEQ ID NO: 3033708 - RNA, 19 nt, Artificial Sequence
  Description of Artificial Sequence: Synthetic oligonucleotide
gcacggcucucccggagca

SEQ ID NO: 3033709 - RNA, 19 nt, Artificial Sequence
  Description of Artificial Sequence: Synthetic oligonucleotide
cugccugcucgccuaggua

SEQ ID NO: 3033710 - RNA, 19 nt, Artificial Sequence
  Description of Artificial Sequence: Synthetic oligonucleotide
ggagcaccguagugacuuc

SEQ ID NO: 3033711 - RNA, 19 nt, Artificial Sequence
  Description of Artificial Sequence: Synthetic oligonucleotide
agagccccgagggcuggaa

SEQ ID NO: 3033712 - RNA, 19 nt, Artificial Sequence
  Description of Artificial Sequence: Synthetic oligonucleotide
gccugcucgccuagguagc

SEQ ID NO: 3033713 - RNA, 19 nt, Artificial Sequence
  Description of Artificial Sequence: Synthetic oligonucleotide
ccuagguagccacccugca

SEQ ID NO: 3033714 - RNA, 19 nt, Artificial Sequence
  Description of Artificial Sequence: Synthetic oligonucleotide
ccugcucgccuagguagcc

SEQ ID NO: 3033715 - RNA, 19 nt, Artificial Sequence
  Description of Artificial Sequence: Synthetic oligonucleotide
accccgcgccggcagcgcu

SEQ ID NO: 3033716 - RNA, 19 nt, Artificial Sequence
  Description of Artificial Sequence: Synthetic oligonucleotide
cacggcucucccggagcac

SEQ ID NO: 3033717 - RNA, 19 nt, Artificial Sequence
  Description of Artificial Sequence: Synthetic oligonucleotide
gagccaggccccggcccgc

SEQ ID NO: 3033718 - RNA, 19 nt, Artificial Sequence
  Description of Artificial Sequence: Synthetic oligonucleotide
ggcuccuguccgugacccc

SEQ ID NO: 3033719 - RNA, 19 nt, Artificial Sequence
  Description of Artificial Sequence: Synthetic oligonucleotide
ccgcugccguaguaaucgg

SEQ ID NO: 3033720 - RNA, 19 nt, Artificial Sequence
  Description of Artificial Sequence: Synthetic oligonucleotide
ccgagggcuggaagucggc

SEQ ID NO: 3033721 - RNA, 19 nt, Artificial Sequence
  Description of Artificial Sequence: Synthetic oligonucleotide
cgggccguggguagagccc

SEQ ID NO: 3033722 - RNA, 19 nt, Artificial Sequence
  Description of Artificial Sequence: Synthetic oligonucleotide
cgccuagguagccacccug

SEQ ID NO: 3033723 - RNA, 19 nt, Artificial Sequence
  Description of Artificial Sequence: Synthetic oligonucleotide
gucgggccguggguagagc

SEQ ID NO: 3033724 - RNA, 19 nt, Artificial Sequence
  Description of Artificial Sequence: Synthetic oligonucleotide
gaccccgcgccggcagcgc

SEQ ID NO: 3033725 - RNA, 19 nt, Artificial Sequence
  Description of Artificial Sequence: Synthetic oligonucleotide
cugcucgccuagguagcca

SEQ ID NO: 3033726 - RNA, 19 nt, Artificial Sequence
  Description of Artificial Sequence: Synthetic oligonucleotide
gguagccacccugcaaaua

SEQ ID NO: 3033727 - RNA, 19 nt, Artificial Sequence
  Description of Artificial Sequence: Synthetic oligonucleotide
gugacuuccugggccacuu

SEQ ID NO: 3033728 - RNA, 19 nt, Artificial Sequence
  Description of Artificial Sequence: Synthetic oligonucleotide
cucaccgaagucgggccgu

SEQ ID NO: 3033729 - RNA, 19 nt, Artificial Sequence
  Description of Artificial Sequence: Synthetic oligonucleotide
ccuguccgugaccccgcgc

SEQ ID NO: 3033730 - RNA, 19 nt, Artificial Sequence
  Description of Artificial Sequence: Synthetic oligonucleotide
gcugccugcucgccuaggu

SEQ ID NO: 3033731 - RNA, 19 nt, Artificial Sequence
  Description of Artificial Sequence: Synthetic oligonucleotide
ccccgagggcuggaagucg

SEQ ID NO: 3033732 - RNA, 19 nt, Artificial Sequence
  Description of Artificial Sequence: Synthetic oligonucleotide
ccguggguagagccccgag

SEQ ID NO: 3033733 - RNA, 19 nt, Artificial Sequence
  Description of Artificial Sequence: Synthetic oligonucleotide
gcucgccuagguagccacc

SEQ ID NO: 3033734 - RNA, 19 nt, Artificial Sequence
  Description of Artificial Sequence: Synthetic oligonucleotide
gggccacuuggcuccuguc

SEQ ID NO: 3033735 - RNA, 19 nt, Artificial Sequence
  Description of Artificial Sequence: Synthetic oligonucleotide
ggcugccugcucgccuagg

SEQ ID NO: 3033736 - RNA, 19 nt, Artificial Sequence
  Description of Artificial Sequence: Synthetic oligonucleotide
cgugaccccgcgccggcag

SEQ ID NO: 3033737 - RNA, 19 nt, Artificial Sequence
  Description of Artificial Sequence: Synthetic oligonucleotide
gccccgagggcuggaaguc

SEQ ID NO: 3033738 - RNA, 19 nt, Artificial Sequence
  Description of Artificial Sequence: Synthetic oligonucleotide
ccaggccccggcccgccgc

SEQ ID NO: 3033739 - RNA, 19 nt, Artificial Sequence
  Description of Artificial Sequence: Synthetic oligonucleotide
ggcacccugugcgccgcug

SEQ ID NO: 3033740 - RNA, 19 nt, Artificial Sequence
  Description of Artificial Sequence: Synthetic oligonucleotide
ggccguggguagagccccg

SEQ ID NO: 3033741 - RNA, 19 nt, Artificial Sequence
  Description of Artificial Sequence: Synthetic oligonucleotide
cggcccgccgccuccgaag

SEQ ID NO: 3033742 - RNA, 19 nt, Artificial Sequence
  Description of Artificial Sequence: Synthetic oligonucleotide
cugggccacuuggcuccug

SEQ ID NO: 3033743 - RNA, 19 nt, Artificial Sequence
  Description of Artificial Sequence: Synthetic oligonucleotide
gcucucccggagcaccgua

SEQ ID NO: 3033744 - RNA, 19 nt, Artificial Sequence
  Description of Artificial Sequence: Synthetic oligonucleotide
ccgaaggguugcucaccga

SEQ ID NO: 3033745 - RNA, 19 nt, Artificial Sequence
  Description of Artificial Sequence: Synthetic oligonucleotide
cgccgcugccguaguaauc

SEQ ID NO: 3033746 - RNA, 19 nt, Artificial Sequence
  Description of Artificial Sequence: Synthetic oligonucleotide
gcgcugagccaggccccgg

SEQ ID NO: 3033747 - RNA, 19 nt, Artificial Sequence
  Description of Artificial Sequence: Synthetic oligonucleotide
gugcgccgcugccguagua

SEQ ID NO: 3033748 - RNA, 19 nt, Artificial Sequence
  Description of Artificial Sequence: Synthetic oligonucleotide
cgcgccggcagcgcugagc

SEQ ID NO: 3033749 - RNA, 19 nt, Artificial Sequence
  Description of Artificial Sequence: Synthetic oligonucleotide
cgaagucgggccgugggua

SEQ ID NO: 3033750 - RNA, 19 nt, Artificial Sequence
  Description of Artificial Sequence: Synthetic oligonucleotide
cggagcaccguagugacuu

SEQ ID NO: 3033751 - RNA, 19 nt, Artificial Sequence
  Description of Artificial Sequence: Synthetic oligonucleotide
cgagggcuggaagucggca

SEQ ID NO: 3033752 - RNA, 19 nt, Artificial Sequence
  Description of Artificial Sequence: Synthetic oligonucleotide
ccccgcgccggcagcgcug

SEQ ID NO: 3033753 - RNA, 19 nt, Artificial Sequence
  Description of Artificial Sequence: Synthetic oligonucleotide
ccgaagucgggccgugggu

SEQ ID NO: 3033754 - RNA, 19 nt, Artificial Sequence
  Description of Artificial Sequence: Synthetic oligonucleotide
gccguggguagagccccga

SEQ ID NO: 3033755 - RNA, 19 nt, Artificial Sequence
  Description of Artificial Sequence: Synthetic oligonucleotide
cgccgccuccgaaggguug

SEQ ID NO: 3033756 - RNA, 19 nt, Artificial Sequence
  Description of Artificial Sequence: Synthetic oligonucleotide
gcgccgcugccguaguaau

SEQ ID NO: 3033757 - RNA, 19 nt, Artificial Sequence
  Description of Artificial Sequence: Synthetic oligonucleotide
cccugugcgccgcugccgu

SEQ ID NO: 3033758 - RNA, 19 nt, Artificial Sequence
  Description of Artificial Sequence: Synthetic oligonucleotide
ggcuggaagucggcacccu

SEQ ID NO: 3033759 - RNA, 19 nt, Artificial Sequence
  Description of Artificial Sequence: Synthetic oligonucleotide
ggcucucccggagcaccgu

SEQ ID NO: 3033760 - RNA, 19 nt, Artificial Sequence
  Description of Artificial Sequence: Synthetic oligonucleotide
cccgccgccuccgaagggu

SEQ ID NO: 3033761 - RNA, 19 nt, Artificial Sequence
  Description of Artificial Sequence: Synthetic oligonucleotide
ccguaguaaucggcugccu

SEQ ID NO: 3033762 - RNA, 19 nt, Artificial Sequence
  Description of Artificial Sequence: Synthetic oligonucleotide
cggcagcgcugagccaggc

SEQ ID NO: 3033763 - RNA, 19 nt, Artificial Sequence
  Description of Artificial Sequence: Synthetic oligonucleotide
ccggagcaccguagugacu

SEQ ID NO: 3033764 - RNA, 19 nt, Artificial Sequence
  Description of Artificial Sequence: Synthetic oligonucleotide
cgccuccgaaggguugcuc

SEQ ID NO: 3033765 - RNA, 19 nt, Artificial Sequence
  Description of Artificial Sequence: Synthetic oligonucleotide
cccgcgccggcagcgcuga

SEQ ID NO: 3033766 - RNA, 19 nt, Artificial Sequence
  Description of Artificial Sequence: Synthetic oligonucleotide
ccugugcgccgcugccgua

SEQ ID NO: 3033767 - RNA, 19 nt, Artificial Sequence
  Description of Artificial Sequence: Synthetic oligonucleotide
ccgugaccccgcgccggca

SEQ ID NO: 3033768 - RNA, 19 nt, Artificial Sequence
  Description of Artificial Sequence: Synthetic oligonucleotide
ccgcgccggcagcgcugag

SEQ ID NO: 3033769 - RNA, 19 nt, Artificial Sequence
  Description of Artificial Sequence: Synthetic oligonucleotide
ccgccgccuccgaaggguu

SEQ ID NO: 3033770 - RNA, 19 nt, Artificial Sequence
  Description of Artificial Sequence: Synthetic oligonucleotide
cgccggcagcgcugagcca

SEQ ID NO: 3033771 - RNA, 19 nt, Artificial Sequence
  Description of Artificial Sequence: Synthetic oligonucleotide
ccgccuccgaaggguugcu

SEQ ID NO: 3033772 - RNA, 19 nt, Artificial Sequence
  Description of Artificial Sequence: Synthetic oligonucleotide
cggcacccugugcgccgcu

SEQ ID NO: 3033773 - RNA, 19 nt, Artificial Sequence
  Description of Artificial Sequence: Synthetic oligonucleotide
uuaucaaauaaucagacug

SEQ ID NO: 3033774 - RNA, 19 nt, Artificial Sequence
  Description of Artificial Sequence: Synthetic oligonucleotide
aaaagauagguguaaacac

SEQ ID NO: 3033775 - RNA, 19 nt, Artificial Sequence
  Description of Artificial Sequence: Synthetic oligonucleotide
gacaauauacaucagagag

SEQ ID NO: 3033776 - RNA, 19 nt, Artificial Sequence
  Description of Artificial Sequence: Synthetic oligonucleotide
aauucaaaugaucauugag

SEQ ID NO: 3033777 - RNA, 19 nt, Artificial Sequence
  Description of Artificial Sequence: Synthetic oligonucleotide
acugguaacaaauuaaaag

SEQ ID NO: 3033778 - RNA, 19 nt, Artificial Sequence
  Description of Artificial Sequence: Synthetic oligonucleotide
guauauaaagcauacuggg

SEQ ID NO: 3033779 - RNA, 19 nt, Artificial Sequence
  Description of Artificial Sequence: Synthetic oligonucleotide
uauauucagauuuucauga

SEQ ID NO: 3033780 - RNA, 19 nt, Artificial Sequence
  Description of Artificial Sequence: Synthetic oligonucleotide
ugaguuuacaaguaaaucu

SEQ ID NO: 3033781 - RNA, 19 nt, Artificial Sequence
  Description of Artificial Sequence: Synthetic oligonucleotide
uccuuuaucaaauaaucag

SEQ ID NO: 3033782 - RNA, 19 nt, Artificial Sequence
  Description of Artificial Sequence: Synthetic oligonucleotide
gaaacaggaaaauuacugg

SEQ ID NO: 3033783 - RNA, 19 nt, Artificial Sequence
  Description of Artificial Sequence: Synthetic oligonucleotide
guaacaaauuaaaagauag

SEQ ID NO: 3033784 - RNA, 19 nt, Artificial Sequence
  Description of Artificial Sequence: Synthetic oligonucleotide
ucagagagaagaaacagga

SEQ ID NO: 3033785 - RNA, 19 nt, Artificial Sequence
  Description of Artificial Sequence: Synthetic oligonucleotide
cauacuauauccuuuauca

SEQ ID NO: 3033786 - RNA, 19 nt, Artificial Sequence
  Description of Artificial Sequence: Synthetic oligonucleotide
auauaaagcauacugggcu

SEQ ID NO: 3033787 - RNA, 19 nt, Artificial Sequence
  Description of Artificial Sequence: Synthetic oligonucleotide
auauacaucagagagaaga

SEQ ID NO: 3033788 - RNA, 19 nt, Artificial Sequence
  Description of Artificial Sequence: Synthetic oligonucleotide
uaaaagauagguguaaaca

SEQ ID NO: 3033789 - RNA, 19 nt, Artificial Sequence
  Description of Artificial Sequence: Synthetic oligonucleotide
agugcugcgauuucugugc

SEQ ID NO: 3033790 - RNA, 19 nt, Artificial Sequence
  Description of Artificial Sequence: Synthetic oligonucleotide
ucugaugugacuacuggcc

SEQ ID NO: 3033791 - RNA, 19 nt, Artificial Sequence
  Description of Artificial Sequence: Synthetic oligonucleotide
aaaauucaaaugaucauug

SEQ ID NO: 3033792 - RNA, 19 nt, Artificial Sequence
  Description of Artificial Sequence: Synthetic oligonucleotide
ugucuagcaguauauaaag

SEQ ID NO: 3033793 - RNA, 19 nt, Artificial Sequence
  Description of Artificial Sequence: Synthetic oligonucleotide
aaacaggaaaauuacuggu

SEQ ID NO: 3033794 - RNA, 19 nt, Artificial Sequence
  Description of Artificial Sequence: Synthetic oligonucleotide
uauccuuuaucaaauaauc

SEQ ID NO: 3033795 - RNA, 19 nt, Artificial Sequence
  Description of Artificial Sequence: Synthetic oligonucleotide
uauauaaagcauacugggc

SEQ ID NO: 3033796 - RNA, 19 nt, Artificial Sequence
  Description of Artificial Sequence: Synthetic oligonucleotide
gaggaguaaaguuuggaag

SEQ ID NO: 3033797 - RNA, 19 nt, Artificial Sequence
  Description of Artificial Sequence: Synthetic oligonucleotide
cuuuaucaaauaaucagac

SEQ ID NO: 3033798 - RNA, 19 nt, Artificial Sequence
  Description of Artificial Sequence: Synthetic oligonucleotide
uacaucagagagaagaaac

SEQ ID NO: 3033799 - RNA, 19 nt, Artificial Sequence
  Description of Artificial Sequence: Synthetic oligonucleotide
gaauuugucuguuacuagc

SEQ ID NO: 3033800 - RNA, 19 nt, Artificial Sequence
  Description of Artificial Sequence: Synthetic oligonucleotide
aacagcacacugcucacac

SEQ ID NO: 3033801 - RNA, 19 nt, Artificial Sequence
  Description of Artificial Sequence: Synthetic oligonucleotide
uaucaaauaaucagacuga

SEQ ID NO: 3033802 - RNA, 19 nt, Artificial Sequence
  Description of Artificial Sequence: Synthetic oligonucleotide
aaauaaucagacugaaaau

SEQ ID NO: 3033803 - RNA, 19 nt, Artificial Sequence
  Description of Artificial Sequence: Synthetic oligonucleotide
aauaaucagacugaaaauu

SEQ ID NO: 3033804 - RNA, 19 nt, Artificial Sequence
  Description of Artificial Sequence: Synthetic oligonucleotide
aagauagguguaaacacac

SEQ ID NO: 3033805 - RNA, 19 nt, Artificial Sequence
  Description of Artificial Sequence: Synthetic oligonucleotide
uucaaaugaucauugagaa

SEQ ID NO: 3033806 - RNA, 19 nt, Artificial Sequence
  Description of Artificial Sequence: Synthetic oligonucleotide
caaauuaaaagauaggugu

SEQ ID NO: 3033807 - RNA, 19 nt, Artificial Sequence
  Description of Artificial Sequence: Synthetic oligonucleotide
cugaaaauucaaaugauca

SEQ ID NO: 3033808 - RNA, 19 nt, Artificial Sequence
  Description of Artificial Sequence: Synthetic oligonucleotide
ugugcaaacagcacacugc

SEQ ID NO: 3033809 - RNA, 19 nt, Artificial Sequence
  Description of Artificial Sequence: Synthetic oligonucleotide
cugguaacaaauuaaaaga

SEQ ID NO: 3033810 - RNA, 19 nt, Artificial Sequence
  Description of Artificial Sequence: Synthetic oligonucleotide
aauuacugguaacaaauua

SEQ ID NO: 3033811 - RNA, 19 nt, Artificial Sequence
  Description of Artificial Sequence: Synthetic oligonucleotide
aaacacaccagucccuguc

SEQ ID NO: 3033812 - RNA, 19 nt, Artificial Sequence
  Description of Artificial Sequence: Synthetic oligonucleotide
acgucuuccuauuucaagg

SEQ ID NO: 3033813 - RNA, 19 nt, Artificial Sequence
  Description of Artificial Sequence: Synthetic oligonucleotide
uggcuuucauacuauaucc

SEQ ID NO: 3033814 - RNA, 19 nt, Artificial Sequence
  Description of Artificial Sequence: Synthetic oligonucleotide
uuucugugcaaacagcaca

SEQ ID NO: 3033815 - RNA, 19 nt, Artificial Sequence
  Description of Artificial Sequence: Synthetic oligonucleotide
cuauauucagauuuucaug

SEQ ID NO: 3033816 - RNA, 19 nt, Artificial Sequence
  Description of Artificial Sequence: Synthetic oligonucleotide
gauagguguaaacacacca

SEQ ID NO: 3033817 - RNA, 19 nt, Artificial Sequence
  Description of Artificial Sequence: Synthetic oligonucleotide
uaaaguuuggaagaguggu

SEQ ID NO: 3033818 - RNA, 19 nt, Artificial Sequence
  Description of Artificial Sequence: Synthetic oligonucleotide
agaaacaggaaaauuacug

SEQ ID NO: 3033819 - RNA, 19 nt, Artificial Sequence
  Description of Artificial Sequence: Synthetic oligonucleotide
uauauccuuuaucaaauaa

SEQ ID NO: 3033820 - RNA, 19 nt, Artificial Sequence
  Description of Artificial Sequence: Synthetic oligonucleotide
uuaaaagauagguguaaac

SEQ ID NO: 3033821 - RNA, 19 nt, Artificial Sequence
  Description of Artificial Sequence: Synthetic oligonucleotide
uacuauauccuuuaucaaa

SEQ ID NO: 3033822 - RNA, 19 nt, Artificial Sequence
  Description of Artificial Sequence: Synthetic oligonucleotide
caaaugaucauugagaaaa

SEQ ID NO: 3033823 - RNA, 19 nt, Artificial Sequence
  Description of Artificial Sequence: Synthetic oligonucleotide
ucucugaugugacuacugg

SEQ ID NO: 3033824 - RNA, 19 nt, Artificial Sequence
  Description of Artificial Sequence: Synthetic oligonucleotide
uaaucagacugaaaauuca

SEQ ID NO: 3033825 - RNA, 19 nt, Artificial Sequence
  Description of Artificial Sequence: Synthetic oligonucleotide
aaaggagaggaguaaaguu

SEQ ID NO: 3033826 - RNA, 19 nt, Artificial Sequence
  Description of Artificial Sequence: Synthetic oligonucleotide
auaaucagacugaaaauuc

SEQ ID NO: 3033827 - RNA, 19 nt, Artificial Sequence
  Description of Artificial Sequence: Synthetic oligonucleotide
ucagacugaaaauucaaau

SEQ ID NO: 3033828 - RNA, 19 nt, Artificial Sequence
  Description of Artificial Sequence: Synthetic oligonucleotide
ucuguuacuagcaccuggc

SEQ ID NO: 3033829 - RNA, 19 nt, Artificial Sequence
  Description of Artificial Sequence: Synthetic oligonucleotide
uuugucuguuacuagcacc

SEQ ID NO: 3033830 - RNA, 19 nt, Artificial Sequence
  Description of Artificial Sequence: Synthetic oligonucleotide
aggaguaaaguuuggaaga

SEQ ID NO: 3033831 - RNA, 19 nt, Artificial Sequence
  Description of Artificial Sequence: Synthetic oligonucleotide
uuuaucaaauaaucagacu

SEQ ID NO: 3033832 - RNA, 19 nt, Artificial Sequence
  Description of Artificial Sequence: Synthetic oligonucleotide
uuacugguaacaaauuaaa

SEQ ID NO: 3033833 - RNA, 19 nt, Artificial Sequence
  Description of Artificial Sequence: Synthetic oligonucleotide
cagacugaaaauucaaaug

SEQ ID NO: 3033834 - RNA, 19 nt, Artificial Sequence
  Description of Artificial Sequence: Synthetic oligonucleotide
aaauucaaaugaucauuga

SEQ ID NO: 3033835 - RNA, 19 nt, Artificial Sequence
  Description of Artificial Sequence: Synthetic oligonucleotide
ugguaacaaauuaaaagau

SEQ ID NO: 3033836 - RNA, 19 nt, Artificial Sequence
  Description of Artificial Sequence: Synthetic oligonucleotide
ugaaaauucaaaugaucau

SEQ ID NO: 3033837 - RNA, 19 nt, Artificial Sequence
  Description of Artificial Sequence: Synthetic oligonucleotide
aaaacagugcugcgauuuc

SEQ ID NO: 3033838 - RNA, 19 nt, Artificial Sequence
  Description of Artificial Sequence: Synthetic oligonucleotide
uugucuguuacuagcaccu

SEQ ID NO: 3033839 - RNA, 19 nt, Artificial Sequence
  Description of Artificial Sequence: Synthetic oligonucleotide
acaaauuaaaagauaggug

SEQ ID NO: 3033840 - RNA, 19 nt, Artificial Sequence
  Description of Artificial Sequence: Synthetic oligonucleotide
aauuaaaagauagguguaa

SEQ ID NO: 3033841 - RNA, 19 nt, Artificial Sequence
  Description of Artificial Sequence: Synthetic oligonucleotide
aaagauagguguaaacaca

SEQ ID NO: 3033842 - RNA, 19 nt, Artificial Sequence
  Description of Artificial Sequence: Synthetic oligonucleotide
auucaaaugaucauugaga

SEQ ID NO: 3033843 - RNA, 19 nt, Artificial Sequence
  Description of Artificial Sequence: Synthetic oligonucleotide
aauuccuaguggccacacc

SEQ ID NO: 3033844 - RNA, 19 nt, Artificial Sequence
  Description of Artificial Sequence: Synthetic oligonucleotide
uauucagauuuucaugagu

SEQ ID NO: 3033845 - RNA, 19 nt, Artificial Sequence
  Description of Artificial Sequence: Synthetic oligonucleotide
aguaaaguuuggaagagug

SEQ ID NO: 3033846 - RNA, 19 nt, Artificial Sequence
  Description of Artificial Sequence: Synthetic oligonucleotide
aaggcaugacaauauacau

SEQ ID NO: 3033847 - RNA, 19 nt, Artificial Sequence
  Description of Artificial Sequence: Synthetic oligonucleotide
ucaaggcaugacaauauac

SEQ ID NO: 3033848 - RNA, 19 nt, Artificial Sequence
  Description of Artificial Sequence: Synthetic oligonucleotide
auuugucuguuacuagcac

SEQ ID NO: 3033849 - RNA, 19 nt, Artificial Sequence
  Description of Artificial Sequence: Synthetic oligonucleotide
augaguuuacaaguaaauc

SEQ ID NO: 3033850 - RNA, 19 nt, Artificial Sequence
  Description of Artificial Sequence: Synthetic oligonucleotide
accucacuccccuauauuc

SEQ ID NO: 3033851 - RNA, 19 nt, Artificial Sequence
  Description of Artificial Sequence: Synthetic oligonucleotide
uauacaucagagagaagaa

SEQ ID NO: 3033852 - RNA, 19 nt, Artificial Sequence
  Description of Artificial Sequence: Synthetic oligonucleotide
acugaaaauucaaaugauc

SEQ ID NO: 3033853 - RNA, 19 nt, Artificial Sequence
  Description of Artificial Sequence: Synthetic oligonucleotide
ggcaugacaauauacauca

SEQ ID NO: 3033854 - RNA, 19 nt, Artificial Sequence
  Description of Artificial Sequence: Synthetic oligonucleotide
agcaguauauaaagcauac

SEQ ID NO: 3033855 - RNA, 19 nt, Artificial Sequence
  Description of Artificial Sequence: Synthetic oligonucleotide
auuccuaguggccacaccu

SEQ ID NO: 3033856 - RNA, 19 nt, Artificial Sequence
  Description of Artificial Sequence: Synthetic oligonucleotide
ucauacuauauccuuuauc

SEQ ID NO: 3033857 - RNA, 19 nt, Artificial Sequence
  Description of Artificial Sequence: Synthetic oligonucleotide
aaguuuggaagaguggucu

SEQ ID NO: 3033858 - RNA, 19 nt, Artificial Sequence
  Description of Artificial Sequence: Synthetic oligonucleotide
ucaugaguuuacaaguaaa

SEQ ID NO: 3033859 - RNA, 19 nt, Artificial Sequence
  Description of Artificial Sequence: Synthetic oligonucleotide
guguaaacacaccaguccc

SEQ ID NO: 3033860 - RNA, 19 nt, Artificial Sequence
  Description of Artificial Sequence: Synthetic oligonucleotide
agaauuugucuguuacuag

SEQ ID NO: 3033861 - RNA, 19 nt, Artificial Sequence
  Description of Artificial Sequence: Synthetic oligonucleotide
uagguguaaacacaccagu

SEQ ID NO: 3033862 - RNA, 19 nt, Artificial Sequence
  Description of Artificial Sequence: Synthetic oligonucleotide
cucagaauuugucuguuac

SEQ ID NO: 3033863 - RNA, 19 nt, Artificial Sequence
  Description of Artificial Sequence: Synthetic oligonucleotide
aaaguuuggaagagugguc

SEQ ID NO: 3033864 - RNA, 19 nt, Artificial Sequence
  Description of Artificial Sequence: Synthetic oligonucleotide
ugacaauauacaucagaga

SEQ ID NO: 3033865 - RNA, 19 nt, Artificial Sequence
  Description of Artificial Sequence: Synthetic oligonucleotide
uuucauacuauauccuuua

SEQ ID NO: 3033866 - RNA, 19 nt, Artificial Sequence
  Description of Artificial Sequence: Synthetic oligonucleotide
uucugugcaaacagcacac

SEQ ID NO: 3033867 - RNA, 19 nt, Artificial Sequence
  Description of Artificial Sequence: Synthetic oligonucleotide
aggaaaauuacugguaaca

SEQ ID NO: 3033868 - RNA, 19 nt, Artificial Sequence
  Description of Artificial Sequence: Synthetic oligonucleotide
aauuugucuguuacuagca

SEQ ID NO: 3033869 - RNA, 19 nt, Artificial Sequence
  Description of Artificial Sequence: Synthetic oligonucleotide
uauaaagcauacugggcuc

SEQ ID NO: 3033870 - RNA, 19 nt, Artificial Sequence
  Description of Artificial Sequence: Synthetic oligonucleotide
gguguaaacacaccagucc

SEQ ID NO: 3033871 - RNA, 19 nt, Artificial Sequence
  Description of Artificial Sequence: Synthetic oligonucleotide
acaggaaaauuacugguaa

SEQ ID NO: 3033872 - RNA, 19 nt, Artificial Sequence
  Description of Artificial Sequence: Synthetic oligonucleotide
aguggccacaccucacucc

SEQ ID NO: 3033873 - RNA, 19 nt, Artificial Sequence
  Description of Artificial Sequence: Synthetic oligonucleotide
auauucagauuuucaugag

SEQ ID NO: 3033874 - RNA, 19 nt, Artificial Sequence
  Description of Artificial Sequence: Synthetic oligonucleotide
uucaugaguuuacaaguaa

SEQ ID NO: 3033875 - RNA, 19 nt, Artificial Sequence
  Description of Artificial Sequence: Synthetic oligonucleotide
uuucaaggcaugacaauau

SEQ ID NO: 3033876 - RNA, 19 nt, Artificial Sequence
  Description of Artificial Sequence: Synthetic oligonucleotide
ucuuccuauuucaaggcau

SEQ ID NO: 3033877 - RNA, 19 nt, Artificial Sequence
  Description of Artificial Sequence: Synthetic oligonucleotide
gauuucugugcaaacagca

SEQ ID NO: 3033878 - RNA, 19 nt, Artificial Sequence
  Description of Artificial Sequence: Synthetic oligonucleotide
ugggcucagaauuugucug

SEQ ID NO: 3033879 - RNA, 19 nt, Artificial Sequence
  Description of Artificial Sequence: Synthetic oligonucleotide
agaggaguaaaguuuggaa

SEQ ID NO: 3033880 - RNA, 19 nt, Artificial Sequence
  Description of Artificial Sequence: Synthetic oligonucleotide
caaggcaugacaauauaca

SEQ ID NO: 3033881 - RNA, 19 nt, Artificial Sequence
  Description of Artificial Sequence: Synthetic oligonucleotide
uguaaacacaccagucccu

SEQ ID NO: 3033882 - RNA, 19 nt, Artificial Sequence
  Description of Artificial Sequence: Synthetic oligonucleotide
aucagagagaagaaacagg

SEQ ID NO: 3033883 - RNA, 19 nt, Artificial Sequence
  Description of Artificial Sequence: Synthetic oligonucleotide
ucagaaaacagugcugcga

SEQ ID NO: 3033884 - RNA, 19 nt, Artificial Sequence
  Description of Artificial Sequence: Synthetic oligonucleotide
cagauuuucaugaguuuac

SEQ ID NO: 3033885 - RNA, 19 nt, Artificial Sequence
  Description of Artificial Sequence: Synthetic oligonucleotide
ucaaauaaucagacugaaa

SEQ ID NO: 3033886 - RNA, 19 nt, Artificial Sequence
  Description of Artificial Sequence: Synthetic oligonucleotide
uuucaugaguuuacaagua

SEQ ID NO: 3033887 - RNA, 19 nt, Artificial Sequence
  Description of Artificial Sequence: Synthetic oligonucleotide
caauauacaucagagagaa

SEQ ID NO: 3033888 - RNA, 19 nt, Artificial Sequence
  Description of Artificial Sequence: Synthetic oligonucleotide
ucagauuuucaugaguuua

SEQ ID NO: 3033889 - RNA, 19 nt, Artificial Sequence
  Description of Artificial Sequence: Synthetic oligonucleotide
aaauuaaaagauaggugua

SEQ ID NO: 3033890 - RNA, 19 nt, Artificial Sequence
  Description of Artificial Sequence: Synthetic oligonucleotide
ucagaauuugucuguuacu

SEQ ID NO: 3033891 - RNA, 19 nt, Artificial Sequence
  Description of Artificial Sequence: Synthetic oligonucleotide
caucagagagaagaaacag

SEQ ID NO: 3033892 - RNA, 19 nt, Artificial Sequence
  Description of Artificial Sequence: Synthetic oligonucleotide
auuacugguaacaaauuaa

SEQ ID NO: 3033893 - RNA, 19 nt, Artificial Sequence
  Description of Artificial Sequence: Synthetic oligonucleotide
aaauuccuaguggccacac

SEQ ID NO: 3033894 - RNA, 19 nt, Artificial Sequence
  Description of Artificial Sequence: Synthetic oligonucleotide
cuggcuuucauacuauauc

SEQ ID NO: 3033895 - RNA, 19 nt, Artificial Sequence
  Description of Artificial Sequence: Synthetic oligonucleotide
uagcaguauauaaagcaua

SEQ ID NO: 3033896 - RNA, 19 nt, Artificial Sequence
  Description of Artificial Sequence: Synthetic oligonucleotide
acuauauccuuuaucaaau

SEQ ID NO: 3033897 - RNA, 19 nt, Artificial Sequence
  Description of Artificial Sequence: Synthetic oligonucleotide
auagguguaaacacaccag

SEQ ID NO: 3033898 - RNA, 19 nt, Artificial Sequence
  Description of Artificial Sequence: Synthetic oligonucleotide
cucugaugugacuacuggc

SEQ ID NO: 3033899 - RNA, 19 nt, Artificial Sequence
  Description of Artificial Sequence: Synthetic oligonucleotide
auuucugugcaaacagcac

SEQ ID NO: 3033900 - RNA, 19 nt, Artificial Sequence
  Description of Artificial Sequence: Synthetic oligonucleotide
uguuacuagcaccuggcuu

SEQ ID NO: 3033901 - RNA, 19 nt, Artificial Sequence
  Description of Artificial Sequence: Synthetic oligonucleotide
gacuacuggccucagaaaa

SEQ ID NO: 3033902 - RNA, 19 nt, Artificial Sequence
  Description of Artificial Sequence: Synthetic oligonucleotide
uagcaccuggcuuucauac

SEQ ID NO: 3033903 - RNA, 19 nt, Artificial Sequence
  Description of Artificial Sequence: Synthetic oligonucleotide
gagagaagaaacaggaaaa

SEQ ID NO: 3033904 - RNA, 19 nt, Artificial Sequence
  Description of Artificial Sequence: Synthetic oligonucleotide
cuuccuauuucaaggcaug

SEQ ID NO: 3033905 - RNA, 19 nt, Artificial Sequence
  Description of Artificial Sequence: Synthetic oligonucleotide
aaucagacugaaaauucaa

SEQ ID NO: 3033906 - RNA, 19 nt, Artificial Sequence
  Description of Artificial Sequence: Synthetic oligonucleotide
cuauuucaaggcaugacaa

SEQ ID NO: 3033907 - RNA, 19 nt, Artificial Sequence
  Description of Artificial Sequence: Synthetic oligonucleotide
ucaaaugaucauugagaaa

SEQ ID NO: 3033908 - RNA, 19 nt, Artificial Sequence
  Description of Artificial Sequence: Synthetic oligonucleotide
aguuuggaagaguggucuc

SEQ ID NO: 3033909 - RNA, 19 nt, Artificial Sequence
  Description of Artificial Sequence: Synthetic oligonucleotide
auauccuuuaucaaauaau

SEQ ID NO: 3033910 - RNA, 19 nt, Artificial Sequence
  Description of Artificial Sequence: Synthetic oligonucleotide
aacacaccagucccugucu

SEQ ID NO: 3033911 - RNA, 19 nt, Artificial Sequence
  Description of Artificial Sequence: Synthetic oligonucleotide
uauuucaaggcaugacaau

SEQ ID NO: 3033912 - RNA, 19 nt, Artificial Sequence
  Description of Artificial Sequence: Synthetic oligonucleotide
gcaaacagcacacugcuca

SEQ ID NO: 3033913 - RNA, 19 nt, Artificial Sequence
  Description of Artificial Sequence: Synthetic oligonucleotide
acuacuggccucagaaaac

SEQ ID NO: 3033914 - RNA, 19 nt, Artificial Sequence
  Description of Artificial Sequence: Synthetic oligonucleotide
acaauauacaucagagaga

SEQ ID NO: 3033915 - RNA, 19 nt, Artificial Sequence
  Description of Artificial Sequence: Synthetic oligonucleotide
gaaaauucaaaugaucauu

SEQ ID NO: 3033916 - RNA, 19 nt, Artificial Sequence
  Description of Artificial Sequence: Synthetic oligonucleotide
agauagguguaaacacacc

SEQ ID NO: 3033917 - RNA, 19 nt, Artificial Sequence
  Description of Artificial Sequence: Synthetic oligonucleotide
auucagauuuucaugaguu

SEQ ID NO: 3033918 - RNA, 19 nt, Artificial Sequence
  Description of Artificial Sequence: Synthetic oligonucleotide
aggcaugacaauauacauc

SEQ ID NO: 3033919 - RNA, 19 nt, Artificial Sequence
  Description of Artificial Sequence: Synthetic oligonucleotide
auuaaaagauagguguaaa

SEQ ID NO: 3033920 - RNA, 19 nt, Artificial Sequence
  Description of Artificial Sequence: Synthetic oligonucleotide
ugcgauuucugugcaaaca

SEQ ID NO: 3033921 - RNA, 19 nt, Artificial Sequence
  Description of Artificial Sequence: Synthetic oligonucleotide
auuucaaggcaugacaaua

SEQ ID NO: 3033922 - RNA, 19 nt, Artificial Sequence
  Description of Artificial Sequence: Synthetic oligonucleotide
cucagaaaacagugcugcg

SEQ ID NO: 3033923 - RNA, 19 nt, Artificial Sequence
  Description of Artificial Sequence: Synthetic oligonucleotide
aacaggaaaauuacuggua

SEQ ID NO: 3033924 - RNA, 19 nt, Artificial Sequence
  Description of Artificial Sequence: Synthetic oligonucleotide
cacgucuuccuauuucaag

SEQ ID NO: 3033925 - RNA, 19 nt, Artificial Sequence
  Description of Artificial Sequence: Synthetic oligonucleotide
gugacuacuggccucagaa

SEQ ID NO: 3033926 - RNA, 19 nt, Artificial Sequence
  Description of Artificial Sequence: Synthetic oligonucleotide
acaccagucccugucuagc

SEQ ID NO: 3033927 - RNA, 19 nt, Artificial Sequence
  Description of Artificial Sequence: Synthetic oligonucleotide
uuuggaagaguggucucug

SEQ ID NO: 3033928 - RNA, 19 nt, Artificial Sequence
  Description of Artificial Sequence: Synthetic oligonucleotide
ucacacgucuuccuauuuc

SEQ ID NO: 3033929 - RNA, 19 nt, Artificial Sequence
  Description of Artificial Sequence: Synthetic oligonucleotide
auacuauauccuuuaucaa

SEQ ID NO: 3033930 - RNA, 19 nt, Artificial Sequence
  Description of Artificial Sequence: Synthetic oligonucleotide
uccuaguggccacaccuca

SEQ ID NO: 3033931 - RNA, 19 nt, Artificial Sequence
  Description of Artificial Sequence: Synthetic oligonucleotide
cucacuccccuauauucag

SEQ ID NO: 3033932 - RNA, 19 nt, Artificial Sequence
  Description of Artificial Sequence: Synthetic oligonucleotide
aaacagugcugcgauuucu

SEQ ID NO: 3033933 - RNA, 19 nt, Artificial Sequence
  Description of Artificial Sequence: Synthetic oligonucleotide
agguguaaacacaccaguc

SEQ ID NO: 3033934 - RNA, 19 nt, Artificial Sequence
  Description of Artificial Sequence: Synthetic oligonucleotide
gcgauuucugugcaaacag

SEQ ID NO: 3033935 - RNA, 19 nt, Artificial Sequence
  Description of Artificial Sequence: Synthetic oligonucleotide
uucaaggcaugacaauaua

SEQ ID NO: 3033936 - RNA, 19 nt, Artificial Sequence
  Description of Artificial Sequence: Synthetic oligonucleotide
aaauuacugguaacaaauu

SEQ ID NO: 3033937 - RNA, 19 nt, Artificial Sequence
  Description of Artificial Sequence: Synthetic oligonucleotide
caggaaaauuacugguaac

SEQ ID NO: 3033938 - RNA, 19 nt, Artificial Sequence
  Description of Artificial Sequence: Synthetic oligonucleotide
cugucuagcaguauauaaa

SEQ ID NO: 3033939 - RNA, 19 nt, Artificial Sequence
  Description of Artificial Sequence: Synthetic oligonucleotide
aacagugcugcgauuucug

SEQ ID NO: 3033940 - RNA, 19 nt, Artificial Sequence
  Description of Artificial Sequence: Synthetic oligonucleotide
aagaguggucucugaugug

SEQ ID NO: 3033941 - RNA, 19 nt, Artificial Sequence
  Description of Artificial Sequence: Synthetic oligonucleotide
agaguggucucugauguga

SEQ ID NO: 3033942 - RNA, 19 nt, Artificial Sequence
  Description of Artificial Sequence: Synthetic oligonucleotide
aaaauuccuaguggccaca

SEQ ID NO: 3033943 - RNA, 19 nt, Artificial Sequence
  Description of Artificial Sequence: Synthetic oligonucleotide
agagaagaaacaggaaaau

SEQ ID NO: 3033944 - RNA, 19 nt, Artificial Sequence
  Description of Artificial Sequence: Synthetic oligonucleotide
uggaagaguggucucugau

SEQ ID NO: 3033945 - RNA, 19 nt, Artificial Sequence
  Description of Artificial Sequence: Synthetic oligonucleotide
auccuuuaucaaauaauca

SEQ ID NO: 3033946 - RNA, 19 nt, Artificial Sequence
  Description of Artificial Sequence: Synthetic oligonucleotide
acaucagagagaagaaaca

SEQ ID NO: 3033947 - RNA, 19 nt, Artificial Sequence
  Description of Artificial Sequence: Synthetic oligonucleotide
aucaaauaaucagacugaa

SEQ ID NO: 3033948 - RNA, 19 nt, Artificial Sequence
  Description of Artificial Sequence: Synthetic oligonucleotide
guuacuagcaccuggcuuu

SEQ ID NO: 3033949 - RNA, 19 nt, Artificial Sequence
  Description of Artificial Sequence: Synthetic oligonucleotide
uucauacuauauccuuuau

SEQ ID NO: 3033950 - RNA, 19 nt, Artificial Sequence
  Description of Artificial Sequence: Synthetic oligonucleotide
uccuauuucaaggcaugac

SEQ ID NO: 3033951 - RNA, 19 nt, Artificial Sequence
  Description of Artificial Sequence: Synthetic oligonucleotide
uucagauuuucaugaguuu

SEQ ID NO: 3033952 - RNA, 19 nt, Artificial Sequence
  Description of Artificial Sequence: Synthetic oligonucleotide
ccuuuaucaaauaaucaga

SEQ ID NO: 3033953 - RNA, 19 nt, Artificial Sequence
  Description of Artificial Sequence: Synthetic oligonucleotide
guggccacaccucacuccc

SEQ ID NO: 3033954 - RNA, 19 nt, Artificial Sequence
  Description of Artificial Sequence: Synthetic oligonucleotide
agauuuucaugaguuuaca

SEQ ID NO: 3033955 - RNA, 19 nt, Artificial Sequence
  Description of Artificial Sequence: Synthetic oligonucleotide
ugaugugacuacuggccuc

SEQ ID NO: 3033956 - RNA, 19 nt, Artificial Sequence
  Description of Artificial Sequence: Synthetic oligonucleotide
gaugugacuacuggccuca

SEQ ID NO: 3033957 - RNA, 19 nt, Artificial Sequence
  Description of Artificial Sequence: Synthetic oligonucleotide
uaaagcauacugggcucag

SEQ ID NO: 3033958 - RNA, 19 nt, Artificial Sequence
  Description of Artificial Sequence: Synthetic oligonucleotide
acacugcucacacgucuuc

SEQ ID NO: 3033959 - RNA, 19 nt, Artificial Sequence
  Description of Artificial Sequence: Synthetic oligonucleotide
acugggcucagaauuuguc

SEQ ID NO: 3033960 - RNA, 19 nt, Artificial Sequence
  Description of Artificial Sequence: Synthetic oligonucleotide
acagcacacugcucacacg

SEQ ID NO: 3033961 - RNA, 19 nt, Artificial Sequence
  Description of Artificial Sequence: Synthetic oligonucleotide
caaacagcacacugcucac

SEQ ID NO: 3033962 - RNA, 19 nt, Artificial Sequence
  Description of Artificial Sequence: Synthetic oligonucleotide
cacacgucuuccuauuuca

SEQ ID NO: 3033963 - RNA, 19 nt, Artificial Sequence
  Description of Artificial Sequence: Synthetic oligonucleotide
ggaguaaaguuuggaagag

SEQ ID NO: 3033964 - RNA, 19 nt, Artificial Sequence
  Description of Artificial Sequence: Synthetic oligonucleotide
ucccugucuagcaguauau

SEQ ID NO: 3033965 - RNA, 19 nt, Artificial Sequence
  Description of Artificial Sequence: Synthetic oligonucleotide
ccucagaaaacagugcugc

SEQ ID NO: 3033966 - RNA, 19 nt, Artificial Sequence
  Description of Artificial Sequence: Synthetic oligonucleotide
accagucccugucuagcag

SEQ ID NO: 3033967 - RNA, 19 nt, Artificial Sequence
  Description of Artificial Sequence: Synthetic oligonucleotide
acugcucacacgucuuccu

SEQ ID NO: 3033968 - RNA, 19 nt, Artificial Sequence
  Description of Artificial Sequence: Synthetic oligonucleotide
ugugacuacuggccucaga

SEQ ID NO: 3033969 - RNA, 19 nt, Artificial Sequence
  Description of Artificial Sequence: Synthetic oligonucleotide
cagaauuugucuguuacua

SEQ ID NO: 3033970 - RNA, 19 nt, Artificial Sequence
  Description of Artificial Sequence: Synthetic oligonucleotide
cagugcugcgauuucugug

SEQ ID NO: 3033971 - RNA, 19 nt, Artificial Sequence
  Description of Artificial Sequence: Synthetic oligonucleotide
auacaucagagagaagaaa

SEQ ID NO: 3033972 - RNA, 19 nt, Artificial Sequence
  Description of Artificial Sequence: Synthetic oligonucleotide
gagaggaguaaaguuugga

SEQ ID NO: 3033973 - RNA, 19 nt, Artificial Sequence
  Description of Artificial Sequence: Synthetic oligonucleotide
uaaacacaccagucccugu

SEQ ID NO: 3033974 - RNA, 19 nt, Artificial Sequence
  Description of Artificial Sequence: Synthetic oligonucleotide
uuccuauuucaaggcauga

SEQ ID NO: 3033975 - RNA, 19 nt, Artificial Sequence
  Description of Artificial Sequence: Synthetic oligonucleotide
caugaguuuacaaguaaau

SEQ ID NO: 3033976 - RNA, 19 nt, Artificial Sequence
  Description of Artificial Sequence: Synthetic oligonucleotide
uuccuaguggccacaccuc

SEQ ID NO: 3033977 - RNA, 19 nt, Artificial Sequence
  Description of Artificial Sequence: Synthetic oligonucleotide
aaacagcacacugcucaca

SEQ ID NO: 3033978 - RNA, 19 nt, Artificial Sequence
  Description of Artificial Sequence: Synthetic oligonucleotide
gaaaacagugcugcgauuu

SEQ ID NO: 3033979 - RNA, 19 nt, Artificial Sequence
  Description of Artificial Sequence: Synthetic oligonucleotide
uuggaagaguggucucuga

SEQ ID NO: 3033980 - RNA, 19 nt, Artificial Sequence
  Description of Artificial Sequence: Synthetic oligonucleotide
uggucucugaugugacuac

SEQ ID NO: 3033981 - RNA, 19 nt, Artificial Sequence
  Description of Artificial Sequence: Synthetic oligonucleotide
uacugggcucagaauuugu

SEQ ID NO: 3033982 - RNA, 19 nt, Artificial Sequence
  Description of Artificial Sequence: Synthetic oligonucleotide
ugacuacuggccucagaaa

SEQ ID NO: 3033983 - RNA, 19 nt, Artificial Sequence
  Description of Artificial Sequence: Synthetic oligonucleotide
acuagcaccuggcuuucau

SEQ ID NO: 3033984 - RNA, 19 nt, Artificial Sequence
  Description of Artificial Sequence: Synthetic oligonucleotide
acagugcugcgauuucugu

SEQ ID NO: 3033985 - RNA, 19 nt, Artificial Sequence
  Description of Artificial Sequence: Synthetic oligonucleotide
ucacuccccuauauucaga

SEQ ID NO: 3033986 - RNA, 19 nt, Artificial Sequence
  Description of Artificial Sequence: Synthetic oligonucleotide
uccccuauauucagauuuu

SEQ ID NO: 3033987 - RNA, 19 nt, Artificial Sequence
  Description of Artificial Sequence: Synthetic oligonucleotide
ugcucacacgucuuccuau

SEQ ID NO: 3033988 - RNA, 19 nt, Artificial Sequence
  Description of Artificial Sequence: Synthetic oligonucleotide
aguggucucugaugugacu

SEQ ID NO: 3033989 - RNA, 19 nt, Artificial Sequence
  Description of Artificial Sequence: Synthetic oligonucleotide
aucagacugaaaauucaaa

SEQ ID NO: 3033990 - RNA, 19 nt, Artificial Sequence
  Description of Artificial Sequence: Synthetic oligonucleotide
gguaacaaauuaaaagaua

SEQ ID NO: 3033991 - RNA, 19 nt, Artificial Sequence
  Description of Artificial Sequence: Synthetic oligonucleotide
cacaccagucccugucuag

SEQ ID NO: 3033992 - RNA, 19 nt, Artificial Sequence
  Description of Artificial Sequence: Synthetic oligonucleotide
aaagcauacugggcucaga

SEQ ID NO: 3033993 - RNA, 19 nt, Artificial Sequence
  Description of Artificial Sequence: Synthetic oligonucleotide
gucuuccuauuucaaggca

SEQ ID NO: 3033994 - RNA, 19 nt, Artificial Sequence
  Description of Artificial Sequence: Synthetic oligonucleotide
agcauacugggcucagaau

SEQ ID NO: 3033995 - RNA, 19 nt, Artificial Sequence
  Description of Artificial Sequence: Synthetic oligonucleotide
acuggccucagaaaacagu

SEQ ID NO: 3033996 - RNA, 19 nt, Artificial Sequence
  Description of Artificial Sequence: Synthetic oligonucleotide
ugcaaacagcacacugcuc

SEQ ID NO: 3033997 - RNA, 19 nt, Artificial Sequence
  Description of Artificial Sequence: Synthetic oligonucleotide
auacugggcucagaauuug

SEQ ID NO: 3033998 - RNA, 19 nt, Artificial Sequence
  Description of Artificial Sequence: Synthetic oligonucleotide
gugcaaacagcacacugcu

SEQ ID NO: 3033999 - RNA, 19 nt, Artificial Sequence
  Description of Artificial Sequence: Synthetic oligonucleotide
agcaccuggcuuucauacu

SEQ ID NO: 3034000 - RNA, 19 nt, Artificial Sequence
  Description of Artificial Sequence: Synthetic oligonucleotide
gucucugaugugacuacug

SEQ ID NO: 3034001 - RNA, 19 nt, Artificial Sequence
  Description of Artificial Sequence: Synthetic oligonucleotide
uaguggccacaccucacuc

SEQ ID NO: 3034002 - RNA, 19 nt, Artificial Sequence
  Description of Artificial Sequence: Synthetic oligonucleotide
cuuucauacuauauccuuu

SEQ ID NO: 3034003 - RNA, 19 nt, Artificial Sequence
  Description of Artificial Sequence: Synthetic oligonucleotide
acaccucacuccccuauau

SEQ ID NO: 3034004 - RNA, 19 nt, Artificial Sequence
  Description of Artificial Sequence: Synthetic oligonucleotide
cuccccuauauucagauuu

SEQ ID NO: 3034005 - RNA, 19 nt, Artificial Sequence
  Description of Artificial Sequence: Synthetic oligonucleotide
gacugaaaauucaaaugau

SEQ ID NO: 3034006 - RNA, 19 nt, Artificial Sequence
  Description of Artificial Sequence: Synthetic oligonucleotide
cuacuggccucagaaaaca

SEQ ID NO: 3034007 - RNA, 19 nt, Artificial Sequence
  Description of Artificial Sequence: Synthetic oligonucleotide
ugucuguuacuagcaccug

SEQ ID NO: 3034008 - RNA, 19 nt, Artificial Sequence
  Description of Artificial Sequence: Synthetic oligonucleotide
cugcgauuucugugcaaac

SEQ ID NO: 3034009 - RNA, 19 nt, Artificial Sequence
  Description of Artificial Sequence: Synthetic oligonucleotide
ucugugcaaacagcacacu

SEQ ID NO: 3034010 - RNA, 19 nt, Artificial Sequence
  Description of Artificial Sequence: Synthetic oligonucleotide
agaaaacagugcugcgauu

SEQ ID NO: 3034011 - RNA, 19 nt, Artificial Sequence
  Description of Artificial Sequence: Synthetic oligonucleotide
cacugcucacacgucuucc

SEQ ID NO: 3034012 - RNA, 19 nt, Artificial Sequence
  Description of Artificial Sequence: Synthetic oligonucleotide
cuauauccuuuaucaaaua

SEQ ID NO: 3034013 - RNA, 19 nt, Artificial Sequence
  Description of Artificial Sequence: Synthetic oligonucleotide
ccuauauucagauuuucau

SEQ ID NO: 3034014 - RNA, 19 nt, Artificial Sequence
  Description of Artificial Sequence: Synthetic oligonucleotide
ggagaggaguaaaguuugg

SEQ ID NO: 3034015 - RNA, 19 nt, Artificial Sequence
  Description of Artificial Sequence: Synthetic oligonucleotide
cagaaaacagugcugcgau

SEQ ID NO: 3034016 - RNA, 19 nt, Artificial Sequence
  Description of Artificial Sequence: Synthetic oligonucleotide
gaguggucucugaugugac

SEQ ID NO: 3034017 - RNA, 19 nt, Artificial Sequence
  Description of Artificial Sequence: Synthetic oligonucleotide
cgucuuccuauuucaaggc

SEQ ID NO: 3034018 - RNA, 19 nt, Artificial Sequence
  Description of Artificial Sequence: Synthetic oligonucleotide
cgauuucugugcaaacagc

SEQ ID NO: 3034019 - RNA, 19 nt, Artificial Sequence
  Description of Artificial Sequence: Synthetic oligonucleotide
guggucucugaugugacua

SEQ ID NO: 3034020 - RNA, 19 nt, Artificial Sequence
  Description of Artificial Sequence: Synthetic oligonucleotide
cugggcucagaauuugucu

SEQ ID NO: 3034021 - RNA, 19 nt, Artificial Sequence
  Description of Artificial Sequence: Synthetic oligonucleotide
uuacuagcaccuggcuuuc

SEQ ID NO: 3034022 - RNA, 19 nt, Artificial Sequence
  Description of Artificial Sequence: Synthetic oligonucleotide
cagcacacugcucacacgu

SEQ ID NO: 3034023 - RNA, 19 nt, Artificial Sequence
  Description of Artificial Sequence: Synthetic oligonucleotide
gcauacugggcucagaauu

SEQ ID NO: 3034024 - RNA, 19 nt, Artificial Sequence
  Description of Artificial Sequence: Synthetic oligonucleotide
ccugucuagcaguauauaa

SEQ ID NO: 3034025 - RNA, 19 nt, Artificial Sequence
  Description of Artificial Sequence: Synthetic oligonucleotide
gucccugucuagcaguaua

SEQ ID NO: 3034026 - RNA, 19 nt, Artificial Sequence
  Description of Artificial Sequence: Synthetic oligonucleotide
agcacacugcucacacguc

SEQ ID NO: 3034027 - RNA, 19 nt, Artificial Sequence
  Description of Artificial Sequence: Synthetic oligonucleotide
cccuauauucagauuuuca

SEQ ID NO: 3034028 - RNA, 19 nt, Artificial Sequence
  Description of Artificial Sequence: Synthetic oligonucleotide
gaguaaaguuuggaagagu

SEQ ID NO: 3034029 - RNA, 19 nt, Artificial Sequence
  Description of Artificial Sequence: Synthetic oligonucleotide
ggccucagaaaacagugcu

SEQ ID NO: 3034030 - RNA, 19 nt, Artificial Sequence
  Description of Artificial Sequence: Synthetic oligonucleotide
guuuggaagaguggucucu

SEQ ID NO: 3034031 - RNA, 19 nt, Artificial Sequence
  Description of Artificial Sequence: Synthetic oligonucleotide
cugaugugacuacuggccu

SEQ ID NO: 3034032 - RNA, 19 nt, Artificial Sequence
  Description of Artificial Sequence: Synthetic oligonucleotide
cauacugggcucagaauuu

SEQ ID NO: 3034033 - RNA, 19 nt, Artificial Sequence
  Description of Artificial Sequence: Synthetic oligonucleotide
acacaccagucccugucua

SEQ ID NO: 3034034 - RNA, 19 nt, Artificial Sequence
  Description of Artificial Sequence: Synthetic oligonucleotide
uggccacaccucacucccc

SEQ ID NO: 3034035 - RNA, 19 nt, Artificial Sequence
  Description of Artificial Sequence: Synthetic oligonucleotide
ugcugcgauuucugugcaa

SEQ ID NO: 3034036 - RNA, 19 nt, Artificial Sequence
  Description of Artificial Sequence: Synthetic oligonucleotide
accuggcuuucauacuaua

SEQ ID NO: 3034037 - RNA, 19 nt, Artificial Sequence
  Description of Artificial Sequence: Synthetic oligonucleotide
acuccccuauauucagauu

SEQ ID NO: 3034038 - RNA, 19 nt, Artificial Sequence
  Description of Artificial Sequence: Synthetic oligonucleotide
gcuuucauacuauauccuu

SEQ ID NO: 3034039 - RNA, 19 nt, Artificial Sequence
  Description of Artificial Sequence: Synthetic oligonucleotide
caccagucccugucuagca

SEQ ID NO: 3034040 - RNA, 19 nt, Artificial Sequence
  Description of Artificial Sequence: Synthetic oligonucleotide
cuagcaccuggcuuucaua

SEQ ID NO: 3034041 - RNA, 19 nt, Artificial Sequence
  Description of Artificial Sequence: Synthetic oligonucleotide
cuaguggccacaccucacu

SEQ ID NO: 3034042 - RNA, 19 nt, Artificial Sequence
  Description of Artificial Sequence: Synthetic oligonucleotide
gcaccuggcuuucauacua

SEQ ID NO: 3034043 - RNA, 19 nt, Artificial Sequence
  Description of Artificial Sequence: Synthetic oligonucleotide
ccucacuccccuauauuca

SEQ ID NO: 3034044 - RNA, 19 nt, Artificial Sequence
  Description of Artificial Sequence: Synthetic oligonucleotide
gcugcgauuucugugcaaa

SEQ ID NO: 3034045 - RNA, 19 nt, Artificial Sequence
  Description of Artificial Sequence: Synthetic oligonucleotide
cacuccccuauauucagau

SEQ ID NO: 3034046 - RNA, 19 nt, Artificial Sequence
  Description of Artificial Sequence: Synthetic oligonucleotide
ccuaguggccacaccucac

SEQ ID NO: 3034047 - RNA, 19 nt, Artificial Sequence
  Description of Artificial Sequence: Synthetic oligonucleotide
acacgucuuccuauuucaa

SEQ ID NO: 3034048 - RNA, 19 nt, Artificial Sequence
  Description of Artificial Sequence: Synthetic oligonucleotide
gugcugcgauuucugugca

SEQ ID NO: 3034049 - RNA, 19 nt, Artificial Sequence
  Description of Artificial Sequence: Synthetic oligonucleotide
uacuagcaccuggcuuuca

SEQ ID NO: 3034050 - RNA, 19 nt, Artificial Sequence
  Description of Artificial Sequence: Synthetic oligonucleotide
gcaugacaauauacaucag

SEQ ID NO: 3034051 - RNA, 19 nt, Artificial Sequence
  Description of Artificial Sequence: Synthetic oligonucleotide
cuguuacuagcaccuggcu

SEQ ID NO: 3034052 - RNA, 19 nt, Artificial Sequence
  Description of Artificial Sequence: Synthetic oligonucleotide
augugacuacuggccucag

SEQ ID NO: 3034053 - RNA, 19 nt, Artificial Sequence
  Description of Artificial Sequence: Synthetic oligonucleotide
ggcuuucauacuauauccu

SEQ ID NO: 3034054 - RNA, 19 nt, Artificial Sequence
  Description of Artificial Sequence: Synthetic oligonucleotide
cugcucacacgucuuccua

SEQ ID NO: 3034055 - RNA, 19 nt, Artificial Sequence
  Description of Artificial Sequence: Synthetic oligonucleotide
cagucccugucuagcagua

SEQ ID NO: 3034056 - RNA, 19 nt, Artificial Sequence
  Description of Artificial Sequence: Synthetic oligonucleotide
gcaguauauaaagcauacu

SEQ ID NO: 3034057 - RNA, 19 nt, Artificial Sequence
  Description of Artificial Sequence: Synthetic oligonucleotide
agucccugucuagcaguau

SEQ ID NO: 3034058 - RNA, 19 nt, Artificial Sequence
  Description of Artificial Sequence: Synthetic oligonucleotide
gcucagaauuugucuguua

SEQ ID NO: 3034059 - RNA, 19 nt, Artificial Sequence
  Description of Artificial Sequence: Synthetic oligonucleotide
cacaccucacuccccuaua

SEQ ID NO: 3034060 - RNA, 19 nt, Artificial Sequence
  Description of Artificial Sequence: Synthetic oligonucleotide
ccccuauauucagauuuuc

SEQ ID NO: 3034061 - RNA, 19 nt, Artificial Sequence
  Description of Artificial Sequence: Synthetic oligonucleotide
cacacugcucacacgucuu

SEQ ID NO: 3034062 - RNA, 19 nt, Artificial Sequence
  Description of Artificial Sequence: Synthetic oligonucleotide
ccuggcuuucauacuauau

SEQ ID NO: 3034063 - RNA, 19 nt, Artificial Sequence
  Description of Artificial Sequence: Synthetic oligonucleotide
ggccacaccucacuccccu

SEQ ID NO: 3034064 - RNA, 19 nt, Artificial Sequence
  Description of Artificial Sequence: Synthetic oligonucleotide
ggucucugaugugacuacu

SEQ ID NO: 3034065 - RNA, 19 nt, Artificial Sequence
  Description of Artificial Sequence: Synthetic oligonucleotide
cucacacgucuuccuauuu

SEQ ID NO: 3034066 - RNA, 19 nt, Artificial Sequence
  Description of Artificial Sequence: Synthetic oligonucleotide
caccuggcuuucauacuau

SEQ ID NO: 3034067 - RNA, 19 nt, Artificial Sequence
  Description of Artificial Sequence: Synthetic oligonucleotide
ccagucccugucuagcagu

SEQ ID NO: 3034068 - RNA, 19 nt, Artificial Sequence
  Description of Artificial Sequence: Synthetic oligonucleotide
gcucacacgucuuccuauu

SEQ ID NO: 3034069 - RNA, 19 nt, Artificial Sequence
  Description of Artificial Sequence: Synthetic oligonucleotide
caccucacuccccuauauu

SEQ ID NO: 3034070 - RNA, 19 nt, Artificial Sequence
  Description of Artificial Sequence: Synthetic oligonucleotide
cccugucuagcaguauaua

SEQ ID NO: 3034071 - RNA, 19 nt, Artificial Sequence
  Description of Artificial Sequence: Synthetic oligonucleotide
gccacaccucacuccccua

SEQ ID NO: 3034072 - RNA, 19 nt, Artificial Sequence
  Description of Artificial Sequence: Synthetic oligonucleotide
ccacaccucacuccccuau

SEQ ID NO: 3034073 - RNA, 19 nt, Artificial Sequence
  Description of Artificial Sequence: Synthetic oligonucleotide
aaugagaaggcagagagag

SEQ ID NO: 3034074 - RNA, 19 nt, Artificial Sequence
  Description of Artificial Sequence: Synthetic oligonucleotide
ugugaaaagcaccaagcgg

SEQ ID NO: 3034075 - RNA, 19 nt, Artificial Sequence
  Description of Artificial Sequence: Synthetic oligonucleotide
acaaugagaaggcagagag

SEQ ID NO: 3034076 - RNA, 19 nt, Artificial Sequence
  Description of Artificial Sequence: Synthetic oligonucleotide
uguguuguugugaaaagca

SEQ ID NO: 3034077 - RNA, 19 nt, Artificial Sequence
  Description of Artificial Sequence: Synthetic oligonucleotide
uugugaaaagcaccaagcg

SEQ ID NO: 3034078 - RNA, 19 nt, Artificial Sequence
  Description of Artificial Sequence: Synthetic oligonucleotide
aguagcugcaagcugcugc

SEQ ID NO: 3034079 - RNA, 19 nt, Artificial Sequence
  Description of Artificial Sequence: Synthetic oligonucleotide
aguggauuccugcagggcc

SEQ ID NO: 3034080 - RNA, 19 nt, Artificial Sequence
  Description of Artificial Sequence: Synthetic oligonucleotide
aaucuucccaggcagagcu

SEQ ID NO: 3034081 - RNA, 19 nt, Artificial Sequence
  Description of Artificial Sequence: Synthetic oligonucleotide
uguuguugugaaaagcacc

SEQ ID NO: 3034082 - RNA, 19 nt, Artificial Sequence
  Description of Artificial Sequence: Synthetic oligonucleotide
uguugugaaaagcaccaag

SEQ ID NO: 3034083 - RNA, 19 nt, Artificial Sequence
  Description of Artificial Sequence: Synthetic oligonucleotide
ucugcauuagacuuugugu

SEQ ID NO: 3034084 - RNA, 19 nt, Artificial Sequence
  Description of Artificial Sequence: Synthetic oligonucleotide
acuucuucagaguggauuc

SEQ ID NO: 3034085 - RNA, 19 nt, Artificial Sequence
  Description of Artificial Sequence: Synthetic oligonucleotide
agaacacuucuucagagug

SEQ ID NO: 3034086 - RNA, 19 nt, Artificial Sequence
  Description of Artificial Sequence: Synthetic oligonucleotide
aagccgacaggcuauccac

SEQ ID NO: 3034087 - RNA, 19 nt, Artificial Sequence
  Description of Artificial Sequence: Synthetic oligonucleotide
aggaacaaucuucccaggc

SEQ ID NO: 3034088 - RNA, 19 nt, Artificial Sequence
  Description of Artificial Sequence: Synthetic oligonucleotide
ugagaacacuucuucagag

SEQ ID NO: 3034089 - RNA, 19 nt, Artificial Sequence
  Description of Artificial Sequence: Synthetic oligonucleotide
uuagacuuuguguuguugu

SEQ ID NO: 3034090 - RNA, 19 nt, Artificial Sequence
  Description of Artificial Sequence: Synthetic oligonucleotide
agugacaagccucucuagg

SEQ ID NO: 3034091 - RNA, 19 nt, Artificial Sequence
  Description of Artificial Sequence: Synthetic oligonucleotide
uccacaaugagaaggcaga

SEQ ID NO: 3034092 - RNA, 19 nt, Artificial Sequence
  Description of Artificial Sequence: Synthetic oligonucleotide
cuauccacaaugagaaggc

SEQ ID NO: 3034093 - RNA, 19 nt, Artificial Sequence
  Description of Artificial Sequence: Synthetic oligonucleotide
uuuguguuguugugaaaag

SEQ ID NO: 3034094 - RNA, 19 nt, Artificial Sequence
  Description of Artificial Sequence: Synthetic oligonucleotide
agcaguagcugcaagcugc

SEQ ID NO: 3034095 - RNA, 19 nt, Artificial Sequence
  Description of Artificial Sequence: Synthetic oligonucleotide
ugagucagaggcuuucugc

SEQ ID NO: 3034096 - RNA, 19 nt, Artificial Sequence
  Description of Artificial Sequence: Synthetic oligonucleotide
ucagaguggauuccugcag

SEQ ID NO: 3034097 - RNA, 19 nt, Artificial Sequence
  Description of Artificial Sequence: Synthetic oligonucleotide
ugacaagccucucuaggag

SEQ ID NO: 3034098 - RNA, 19 nt, Artificial Sequence
  Description of Artificial Sequence: Synthetic oligonucleotide
ucucuaggagcugagaaca

SEQ ID NO: 3034099 - RNA, 19 nt, Artificial Sequence
  Description of Artificial Sequence: Synthetic oligonucleotide
guugugaaaagcaccaagc

SEQ ID NO: 3034100 - RNA, 19 nt, Artificial Sequence
  Description of Artificial Sequence: Synthetic oligonucleotide
uacagaacagggcuuccag

SEQ ID NO: 3034101 - RNA, 19 nt, Artificial Sequence
  Description of Artificial Sequence: Synthetic oligonucleotide
aaagccgacaggcuaucca

SEQ ID NO: 3034102 - RNA, 19 nt, Artificial Sequence
  Description of Artificial Sequence: Synthetic oligonucleotide
uaggccaggaacaaucuuc

SEQ ID NO: 3034103 - RNA, 19 nt, Artificial Sequence
  Description of Artificial Sequence: Synthetic oligonucleotide
aacacuucuucagagugga

SEQ ID NO: 3034104 - RNA, 19 nt, Artificial Sequence
  Description of Artificial Sequence: Synthetic oligonucleotide
ugcauuagacuuuguguug

SEQ ID NO: 3034105 - RNA, 19 nt, Artificial Sequence
  Description of Artificial Sequence: Synthetic oligonucleotide
ucgagcacugucacaagcc

SEQ ID NO: 3034106 - RNA, 19 nt, Artificial Sequence
  Description of Artificial Sequence: Synthetic oligonucleotide
uugauggucuccucggagc

SEQ ID NO: 3034107 - RNA, 19 nt, Artificial Sequence
  Description of Artificial Sequence: Synthetic oligonucleotide
gcuauccacaaugagaagg

SEQ ID NO: 3034108 - RNA, 19 nt, Artificial Sequence
  Description of Artificial Sequence: Synthetic oligonucleotide
agugagugcagcgugagca

SEQ ID NO: 3034109 - RNA, 19 nt, Artificial Sequence
  Description of Artificial Sequence: Synthetic oligonucleotide
agcugcaagcugcugcugc

SEQ ID NO: 3034110 - RNA, 19 nt, Artificial Sequence
  Description of Artificial Sequence: Synthetic oligonucleotide
aaagcaccaagcgguacuc

SEQ ID NO: 3034111 - RNA, 19 nt, Artificial Sequence
  Description of Artificial Sequence: Synthetic oligonucleotide
gaggcuuucugcauuagac

SEQ ID NO: 3034112 - RNA, 19 nt, Artificial Sequence
  Description of Artificial Sequence: Synthetic oligonucleotide
uacucagugacaagccucu

SEQ ID NO: 3034113 - RNA, 19 nt, Artificial Sequence
  Description of Artificial Sequence: Synthetic oligonucleotide
uucagaguggauuccugca

SEQ ID NO: 3034114 - RNA, 19 nt, Artificial Sequence
  Description of Artificial Sequence: Synthetic oligonucleotide
uagacuuuguguuguugug

SEQ ID NO: 3034115 - RNA, 19 nt, Artificial Sequence
  Description of Artificial Sequence: Synthetic oligonucleotide
ugcagcgugagcaguagcu

SEQ ID NO: 3034116 - RNA, 19 nt, Artificial Sequence
  Description of Artificial Sequence: Synthetic oligonucleotide
cuuggaggaagcaggcugc

SEQ ID NO: 3034117 - RNA, 19 nt, Artificial Sequence
  Description of Artificial Sequence: Synthetic oligonucleotide
cuucagaguggauuccugc

SEQ ID NO: 3034118 - RNA, 19 nt, Artificial Sequence
  Description of Artificial Sequence: Synthetic oligonucleotide
agaguggauuccugcaggg

SEQ ID NO: 3034119 - RNA, 19 nt, Artificial Sequence
  Description of Artificial Sequence: Synthetic oligonucleotide
ggagcuucgagacagucug

SEQ ID NO: 3034120 - RNA, 19 nt, Artificial Sequence
  Description of Artificial Sequence: Synthetic oligonucleotide
uuguguuguugugaaaagc

SEQ ID NO: 3034121 - RNA, 19 nt, Artificial Sequence
  Description of Artificial Sequence: Synthetic oligonucleotide
aaaagccgacaggcuaucc

SEQ ID NO: 3034122 - RNA, 19 nt, Artificial Sequence
  Description of Artificial Sequence: Synthetic oligonucleotide
guuguugugaaaagcacca

SEQ ID NO: 3034123 - RNA, 19 nt, Artificial Sequence
  Description of Artificial Sequence: Synthetic oligonucleotide
gaacacuucuucagagugg

SEQ ID NO: 3034124 - RNA, 19 nt, Artificial Sequence
  Description of Artificial Sequence: Synthetic oligonucleotide
gacaagccucucuaggagc

SEQ ID NO: 3034125 - RNA, 19 nt, Artificial Sequence
  Description of Artificial Sequence: Synthetic oligonucleotide
ugagcaguagcugcaagcu

SEQ ID NO: 3034126 - RNA, 19 nt, Artificial Sequence
  Description of Artificial Sequence: Synthetic oligonucleotide
gugacuacagaacagggcu

SEQ ID NO: 3034127 - RNA, 19 nt, Artificial Sequence
  Description of Artificial Sequence: Synthetic oligonucleotide
agaggggugacuacagaac

SEQ ID NO: 3034128 - RNA, 19 nt, Artificial Sequence
  Description of Artificial Sequence: Synthetic oligonucleotide
ucuucagaguggauuccug

SEQ ID NO: 3034129 - RNA, 19 nt, Artificial Sequence
  Description of Artificial Sequence: Synthetic oligonucleotide
gcugagaacacuucuucag

SEQ ID NO: 3034130 - RNA, 19 nt, Artificial Sequence
  Description of Artificial Sequence: Synthetic oligonucleotide
ugugcucgagcacugucac

SEQ ID NO: 3034131 - RNA, 19 nt, Artificial Sequence
  Description of Artificial Sequence: Synthetic oligonucleotide
caguaggccaggaacaauc

SEQ ID NO: 3034132 - RNA, 19 nt, Artificial Sequence
  Description of Artificial Sequence: Synthetic oligonucleotide
cucucuaggagcugagaac

SEQ ID NO: 3034133 - RNA, 19 nt, Artificial Sequence
  Description of Artificial Sequence: Synthetic oligonucleotide
gugagcaguagcugcaagc

SEQ ID NO: 3034134 - RNA, 19 nt, Artificial Sequence
  Description of Artificial Sequence: Synthetic oligonucleotide
ugauggucuccucggagcu

SEQ ID NO: 3034135 - RNA, 19 nt, Artificial Sequence
  Description of Artificial Sequence: Synthetic oligonucleotide
cagaguggauuccugcagg

SEQ ID NO: 3034136 - RNA, 19 nt, Artificial Sequence
  Description of Artificial Sequence: Synthetic oligonucleotide
agcaccaagcgguacucag

SEQ ID NO: 3034137 - RNA, 19 nt, Artificial Sequence
  Description of Artificial Sequence: Synthetic oligonucleotide
aggccaggaacaaucuucc

SEQ ID NO: 3034138 - RNA, 19 nt, Artificial Sequence
  Description of Artificial Sequence: Synthetic oligonucleotide
acaggcuauccacaaugag

SEQ ID NO: 3034139 - RNA, 19 nt, Artificial Sequence
  Description of Artificial Sequence: Synthetic oligonucleotide
gagucagaggcuuucugca

SEQ ID NO: 3034140 - RNA, 19 nt, Artificial Sequence
  Description of Artificial Sequence: Synthetic oligonucleotide
caggcuauccacaaugaga

SEQ ID NO: 3034141 - RNA, 19 nt, Artificial Sequence
  Description of Artificial Sequence: Synthetic oligonucleotide
cuugauggucuccucggag

SEQ ID NO: 3034142 - RNA, 19 nt, Artificial Sequence
  Description of Artificial Sequence: Synthetic oligonucleotide
ugcucgagcacugucacaa

SEQ ID NO: 3034143 - RNA, 19 nt, Artificial Sequence
  Description of Artificial Sequence: Synthetic oligonucleotide
gaggggugacuacagaaca

SEQ ID NO: 3034144 - RNA, 19 nt, Artificial Sequence
  Description of Artificial Sequence: Synthetic oligonucleotide
ggagcuuggaggaagcagg

SEQ ID NO: 3034145 - RNA, 19 nt, Artificial Sequence
  Description of Artificial Sequence: Synthetic oligonucleotide
gacagucugugcucgagca

SEQ ID NO: 3034146 - RNA, 19 nt, Artificial Sequence
  Description of Artificial Sequence: Synthetic oligonucleotide
agggcuuccagugagugca

SEQ ID NO: 3034147 - RNA, 19 nt, Artificial Sequence
  Description of Artificial Sequence: Synthetic oligonucleotide
cuuucugcauuagacuuug

SEQ ID NO: 3034148 - RNA, 19 nt, Artificial Sequence
  Description of Artificial Sequence: Synthetic oligonucleotide
acaaucuucccaggcagag

SEQ ID NO: 3034149 - RNA, 19 nt, Artificial Sequence
  Description of Artificial Sequence: Synthetic oligonucleotide
ucgagacagucugugcucg

SEQ ID NO: 3034150 - RNA, 19 nt, Artificial Sequence
  Description of Artificial Sequence: Synthetic oligonucleotide
gugaaaagcaccaagcggu

SEQ ID NO: 3034151 - RNA, 19 nt, Artificial Sequence
  Description of Artificial Sequence: Synthetic oligonucleotide
gacuuuguguuguugugaa

SEQ ID NO: 3034152 - RNA, 19 nt, Artificial Sequence
  Description of Artificial Sequence: Synthetic oligonucleotide
aggcuauccacaaugagaa

SEQ ID NO: 3034153 - RNA, 19 nt, Artificial Sequence
  Description of Artificial Sequence: Synthetic oligonucleotide
ccaggaacaaucuucccag

SEQ ID NO: 3034154 - RNA, 19 nt, Artificial Sequence
  Description of Artificial Sequence: Synthetic oligonucleotide
acagucugugcucgagcac

SEQ ID NO: 3034155 - RNA, 19 nt, Artificial Sequence
  Description of Artificial Sequence: Synthetic oligonucleotide
aggcuuucugcauuagacu

SEQ ID NO: 3034156 - RNA, 19 nt, Artificial Sequence
  Description of Artificial Sequence: Synthetic oligonucleotide
ucuccucggagcuucgaga

SEQ ID NO: 3034157 - RNA, 19 nt, Artificial Sequence
  Description of Artificial Sequence: Synthetic oligonucleotide
auccacaaugagaaggcag

SEQ ID NO: 3034158 - RNA, 19 nt, Artificial Sequence
  Description of Artificial Sequence: Synthetic oligonucleotide
auuagacuuuguguuguug

SEQ ID NO: 3034159 - RNA, 19 nt, Artificial Sequence
  Description of Artificial Sequence: Synthetic oligonucleotide
gagaggggugacuacagaa

SEQ ID NO: 3034160 - RNA, 19 nt, Artificial Sequence
  Description of Artificial Sequence: Synthetic oligonucleotide
agcugagaacacuucuuca

SEQ ID NO: 3034161 - RNA, 19 nt, Artificial Sequence
  Description of Artificial Sequence: Synthetic oligonucleotide
cucgagcacugucacaagc

SEQ ID NO: 3034162 - RNA, 19 nt, Artificial Sequence
  Description of Artificial Sequence: Synthetic oligonucleotide
ugaaaagcaccaagcggua

SEQ ID NO: 3034163 - RNA, 19 nt, Artificial Sequence
  Description of Artificial Sequence: Synthetic oligonucleotide
ucuucccaggcagagcuug

SEQ ID NO: 3034164 - RNA, 19 nt, Artificial Sequence
  Description of Artificial Sequence: Synthetic oligonucleotide
ugcagggccacacucucuc

SEQ ID NO: 3034165 - RNA, 19 nt, Artificial Sequence
  Description of Artificial Sequence: Synthetic oligonucleotide
acuacagaacagggcuucc

SEQ ID NO: 3034166 - RNA, 19 nt, Artificial Sequence
  Description of Artificial Sequence: Synthetic oligonucleotide
ucuaggagcugagaacacu

SEQ ID NO: 3034167 - RNA, 19 nt, Artificial Sequence
  Description of Artificial Sequence: Synthetic oligonucleotide
gcugcaguaggccaggaac

SEQ ID NO: 3034168 - RNA, 19 nt, Artificial Sequence
  Description of Artificial Sequence: Synthetic oligonucleotide
cccaggcagagcuugaugg

SEQ ID NO: 3034169 - RNA, 19 nt, Artificial Sequence
  Description of Artificial Sequence: Synthetic oligonucleotide
uucgagacagucugugcuc

SEQ ID NO: 3034170 - RNA, 19 nt, Artificial Sequence
  Description of Artificial Sequence: Synthetic oligonucleotide
caccaagcgguacucagug

SEQ ID NO: 3034171 - RNA, 19 nt, Artificial Sequence
  Description of Artificial Sequence: Synthetic oligonucleotide
gcuccgcugagucagaggc

SEQ ID NO: 3034172 - RNA, 19 nt, Artificial Sequence
  Description of Artificial Sequence: Synthetic oligonucleotide
agagcuugauggucuccuc

SEQ ID NO: 3034173 - RNA, 19 nt, Artificial Sequence
  Description of Artificial Sequence: Synthetic oligonucleotide
acagaacagggcuuccagu

SEQ ID NO: 3034174 - RNA, 19 nt, Artificial Sequence
  Description of Artificial Sequence: Synthetic oligonucleotide
gcuuggaggaagcaggcug

SEQ ID NO: 3034175 - RNA, 19 nt, Artificial Sequence
  Description of Artificial Sequence: Synthetic oligonucleotide
ucucuccuccacuggcgcg

SEQ ID NO: 3034176 - RNA, 19 nt, Artificial Sequence
  Description of Artificial Sequence: Synthetic oligonucleotide
uccagugagugcagcguga

SEQ ID NO: 3034177 - RNA, 19 nt, Artificial Sequence
  Description of Artificial Sequence: Synthetic oligonucleotide
agagagaggggugacuaca

SEQ ID NO: 3034178 - RNA, 19 nt, Artificial Sequence
  Description of Artificial Sequence: Synthetic oligonucleotide
cagcgugagcaguagcugc

SEQ ID NO: 3034179 - RNA, 19 nt, Artificial Sequence
  Description of Artificial Sequence: Synthetic oligonucleotide
aagcaggcugcuccgcuga

SEQ ID NO: 3034180 - RNA, 19 nt, Artificial Sequence
  Description of Artificial Sequence: Synthetic oligonucleotide
ucugugcucgagcacuguc

SEQ ID NO: 3034181 - RNA, 19 nt, Artificial Sequence
  Description of Artificial Sequence: Synthetic oligonucleotide
cuccucggagcuucgagac

SEQ ID NO: 3034182 - RNA, 19 nt, Artificial Sequence
  Description of Artificial Sequence: Synthetic oligonucleotide
ggaacaaucuucccaggca

SEQ ID NO: 3034183 - RNA, 19 nt, Artificial Sequence
  Description of Artificial Sequence: Synthetic oligonucleotide
agaggcuuucugcauuaga

SEQ ID NO: 3034184 - RNA, 19 nt, Artificial Sequence
  Description of Artificial Sequence: Synthetic oligonucleotide
gaagcaggcugcuccgcug

SEQ ID NO: 3034185 - RNA, 19 nt, Artificial Sequence
  Description of Artificial Sequence: Synthetic oligonucleotide
auggucuccucggagcuuc

SEQ ID NO: 3034186 - RNA, 19 nt, Artificial Sequence
  Description of Artificial Sequence: Synthetic oligonucleotide
agacuuuguguuguuguga

SEQ ID NO: 3034187 - RNA, 19 nt, Artificial Sequence
  Description of Artificial Sequence: Synthetic oligonucleotide
gagagaggggugacuacag

SEQ ID NO: 3034188 - RNA, 19 nt, Artificial Sequence
  Description of Artificial Sequence: Synthetic oligonucleotide
cacucucuccuccacuggc

SEQ ID NO: 3034189 - RNA, 19 nt, Artificial Sequence
  Description of Artificial Sequence: Synthetic oligonucleotide
gagaaggcagagagagggg

SEQ ID NO: 3034190 - RNA, 19 nt, Artificial Sequence
  Description of Artificial Sequence: Synthetic oligonucleotide
gacuacagaacagggcuuc

SEQ ID NO: 3034191 - RNA, 19 nt, Artificial Sequence
  Description of Artificial Sequence: Synthetic oligonucleotide
ucagaggcuuucugcauua

SEQ ID NO: 3034192 - RNA, 19 nt, Artificial Sequence
  Description of Artificial Sequence: Synthetic oligonucleotide
cugagaacacuucuucaga

SEQ ID NO: 3034193 - RNA, 19 nt, Artificial Sequence
  Description of Artificial Sequence: Synthetic oligonucleotide
gauuccugcagggccacac

SEQ ID NO: 3034194 - RNA, 19 nt, Artificial Sequence
  Description of Artificial Sequence: Synthetic oligonucleotide
aacaaucuucccaggcaga

SEQ ID NO: 3034195 - RNA, 19 nt, Artificial Sequence
  Description of Artificial Sequence: Synthetic oligonucleotide
gaaggcagagagaggggug

SEQ ID NO: 3034196 - RNA, 19 nt, Artificial Sequence
  Description of Artificial Sequence: Synthetic oligonucleotide
uaggagcugagaacacuuc

SEQ ID NO: 3034197 - RNA, 19 nt, Artificial Sequence
  Description of Artificial Sequence: Synthetic oligonucleotide
ugcuccgcugagucagagg

SEQ ID NO: 3034198 - RNA, 19 nt, Artificial Sequence
  Description of Artificial Sequence: Synthetic oligonucleotide
gagcaguagcugcaagcug

SEQ ID NO: 3034199 - RNA, 19 nt, Artificial Sequence
  Description of Artificial Sequence: Synthetic oligonucleotide
gugagugcagcgugagcag

SEQ ID NO: 3034200 - RNA, 19 nt, Artificial Sequence
  Description of Artificial Sequence: Synthetic oligonucleotide
gagacagucugugcucgag

SEQ ID NO: 3034201 - RNA, 19 nt, Artificial Sequence
  Description of Artificial Sequence: Synthetic oligonucleotide
ggggugacuacagaacagg

SEQ ID NO: 3034202 - RNA, 19 nt, Artificial Sequence
  Description of Artificial Sequence: Synthetic oligonucleotide
ucccaggcagagcuugaug

SEQ ID NO: 3034203 - RNA, 19 nt, Artificial Sequence
  Description of Artificial Sequence: Synthetic oligonucleotide
caggaacaaucuucccagg

SEQ ID NO: 3034204 - RNA, 19 nt, Artificial Sequence
  Description of Artificial Sequence: Synthetic oligonucleotide
uauccacaaugagaaggca

SEQ ID NO: 3034205 - RNA, 19 nt, Artificial Sequence
  Description of Artificial Sequence: Synthetic oligonucleotide
gcuuccagugagugcagcg

SEQ ID NO: 3034206 - RNA, 19 nt, Artificial Sequence
  Description of Artificial Sequence: Synthetic oligonucleotide
ugcaagcugcugcugcagu

SEQ ID NO: 3034207 - RNA, 19 nt, Artificial Sequence
  Description of Artificial Sequence: Synthetic oligonucleotide
caagcugcugcugcaguag

SEQ ID NO: 3034208 - RNA, 19 nt, Artificial Sequence
  Description of Artificial Sequence: Synthetic oligonucleotide
ugacuacagaacagggcuu

SEQ ID NO: 3034209 - RNA, 19 nt, Artificial Sequence
  Description of Artificial Sequence: Synthetic oligonucleotide
ggugacuacagaacagggc

SEQ ID NO: 3034210 - RNA, 19 nt, Artificial Sequence
  Description of Artificial Sequence: Synthetic oligonucleotide
gaaaagcaccaagcgguac

SEQ ID NO: 3034211 - RNA, 19 nt, Artificial Sequence
  Description of Artificial Sequence: Synthetic oligonucleotide
guacucagugacaagccuc

SEQ ID NO: 3034212 - RNA, 19 nt, Artificial Sequence
  Description of Artificial Sequence: Synthetic oligonucleotide
agcuucgagacagucugug

SEQ ID NO: 3034213 - RNA, 19 nt, Artificial Sequence
  Description of Artificial Sequence: Synthetic oligonucleotide
gucuccucggagcuucgag

SEQ ID NO: 3034214 - RNA, 19 nt, Artificial Sequence
  Description of Artificial Sequence: Synthetic oligonucleotide
cucucuccuccacuggcgc

SEQ ID NO: 3034215 - RNA, 19 nt, Artificial Sequence
  Description of Artificial Sequence: Synthetic oligonucleotide
cugagucagaggcuuucug

SEQ ID NO: 3034216 - RNA, 19 nt, Artificial Sequence
  Description of Artificial Sequence: Synthetic oligonucleotide
aagccucucuaggagcuga

SEQ ID NO: 3034217 - RNA, 19 nt, Artificial Sequence
  Description of Artificial Sequence: Synthetic oligonucleotide
gagaacacuucuucagagu

SEQ ID NO: 3034218 - RNA, 19 nt, Artificial Sequence
  Description of Artificial Sequence: Synthetic oligonucleotide
cugcaguaggccaggaaca

SEQ ID NO: 3034219 - RNA, 19 nt, Artificial Sequence
  Description of Artificial Sequence: Synthetic oligonucleotide
ccaagcgguacucagugac

SEQ ID NO: 3034220 - RNA, 19 nt, Artificial Sequence
  Description of Artificial Sequence: Synthetic oligonucleotide
agagaggggugacuacaga

SEQ ID NO: 3034221 - RNA, 19 nt, Artificial Sequence
  Description of Artificial Sequence: Synthetic oligonucleotide
acaagccucucuaggagcu

SEQ ID NO: 3034222 - RNA, 19 nt, Artificial Sequence
  Description of Artificial Sequence: Synthetic oligonucleotide
acuggcgcggucuguccag

SEQ ID NO: 3034223 - RNA, 19 nt, Artificial Sequence
  Description of Artificial Sequence: Synthetic oligonucleotide
cucuccuccacuggcgcgg

SEQ ID NO: 3034224 - RNA, 19 nt, Artificial Sequence
  Description of Artificial Sequence: Synthetic oligonucleotide
cugcauuagacuuuguguu

SEQ ID NO: 3034225 - RNA, 19 nt, Artificial Sequence
  Description of Artificial Sequence: Synthetic oligonucleotide
caggcugcuccgcugaguc

SEQ ID NO: 3034226 - RNA, 19 nt, Artificial Sequence
  Description of Artificial Sequence: Synthetic oligonucleotide
cuucgagacagucugugcu

SEQ ID NO: 3034227 - RNA, 19 nt, Artificial Sequence
  Description of Artificial Sequence: Synthetic oligonucleotide
agucagaggcuuucugcau

SEQ ID NO: 3034228 - RNA, 19 nt, Artificial Sequence
  Description of Artificial Sequence: Synthetic oligonucleotide
gccaggaacaaucuuccca

SEQ ID NO: 3034229 - RNA, 19 nt, Artificial Sequence
  Description of Artificial Sequence: Synthetic oligonucleotide
gagcuuggaggaagcaggc

SEQ ID NO: 3034230 - RNA, 19 nt, Artificial Sequence
  Description of Artificial Sequence: Synthetic oligonucleotide
agcgguacucagugacaag

SEQ ID NO: 3034231 - RNA, 19 nt, Artificial Sequence
  Description of Artificial Sequence: Synthetic oligonucleotide
augagaaggcagagagagg

SEQ ID NO: 3034232 - RNA, 19 nt, Artificial Sequence
  Description of Artificial Sequence: Synthetic oligonucleotide
ugcaguaggccaggaacaa

SEQ ID NO: 3034233 - RNA, 19 nt, Artificial Sequence
  Description of Artificial Sequence: Synthetic oligonucleotide
agugcagcgugagcaguag

SEQ ID NO: 3034234 - RNA, 19 nt, Artificial Sequence
  Description of Artificial Sequence: Synthetic oligonucleotide
gacaggcuauccacaauga

SEQ ID NO: 3034235 - RNA, 19 nt, Artificial Sequence
  Description of Artificial Sequence: Synthetic oligonucleotide
cucuaggagcugagaacac

SEQ ID NO: 3034236 - RNA, 19 nt, Artificial Sequence
  Description of Artificial Sequence: Synthetic oligonucleotide
gcgguacucagugacaagc

SEQ ID NO: 3034237 - RNA, 19 nt, Artificial Sequence
  Description of Artificial Sequence: Synthetic oligonucleotide
aguaggccaggaacaaucu

SEQ ID NO: 3034238 - RNA, 19 nt, Artificial Sequence
  Description of Artificial Sequence: Synthetic oligonucleotide
cugugcucgagcacuguca

SEQ ID NO: 3034239 - RNA, 19 nt, Artificial Sequence
  Description of Artificial Sequence: Synthetic oligonucleotide
auuccugcagggccacacu

SEQ ID NO: 3034240 - RNA, 19 nt, Artificial Sequence
  Description of Artificial Sequence: Synthetic oligonucleotide
aggggugacuacagaacag

SEQ ID NO: 3034241 - RNA, 19 nt, Artificial Sequence
  Description of Artificial Sequence: Synthetic oligonucleotide
caaucuucccaggcagagc

SEQ ID NO: 3034242 - RNA, 19 nt, Artificial Sequence
  Description of Artificial Sequence: Synthetic oligonucleotide
uccgcugagucagaggcuu

SEQ ID NO: 3034243 - RNA, 19 nt, Artificial Sequence
  Description of Artificial Sequence: Synthetic oligonucleotide
aggaagcaggcugcuccgc

SEQ ID NO: 3034244 - RNA, 19 nt, Artificial Sequence
  Description of Artificial Sequence: Synthetic oligonucleotide
uccucggagcuucgagaca

SEQ ID NO: 3034245 - RNA, 19 nt, Artificial Sequence
  Description of Artificial Sequence: Synthetic oligonucleotide
gggugacuacagaacaggg

SEQ ID NO: 3034246 - RNA, 19 nt, Artificial Sequence
  Description of Artificial Sequence: Synthetic oligonucleotide
uccuccacuggcgcggucu

SEQ ID NO: 3034247 - RNA, 19 nt, Artificial Sequence
  Description of Artificial Sequence: Synthetic oligonucleotide
ugagugcagcgugagcagu

SEQ ID NO: 3034248 - RNA, 19 nt, Artificial Sequence
  Description of Artificial Sequence: Synthetic oligonucleotide
guagcugcaagcugcugcu

SEQ ID NO: 3034249 - RNA, 19 nt, Artificial Sequence
  Description of Artificial Sequence: Synthetic oligonucleotide
ugcugcaguaggccaggaa

SEQ ID NO: 3034250 - RNA, 19 nt, Artificial Sequence
  Description of Artificial Sequence: Synthetic oligonucleotide
cagagagaggggugacuac

SEQ ID NO: 3034251 - RNA, 19 nt, Artificial Sequence
  Description of Artificial Sequence: Synthetic oligonucleotide
uuguugugaaaagcaccaa

SEQ ID NO: 3034252 - RNA, 19 nt, Artificial Sequence
  Description of Artificial Sequence: Synthetic oligonucleotide
uggucuccucggagcuucg

SEQ ID NO: 3034253 - RNA, 19 nt, Artificial Sequence
  Description of Artificial Sequence: Synthetic oligonucleotide
caagcgguacucagugaca

SEQ ID NO: 3034254 - RNA, 19 nt, Artificial Sequence
  Description of Artificial Sequence: Synthetic oligonucleotide
ggcugcuccgcugagucag

SEQ ID NO: 3034255 - RNA, 19 nt, Artificial Sequence
  Description of Artificial Sequence: Synthetic oligonucleotide
gggagcuuggaggaagcag

SEQ ID NO: 3034256 - RNA, 19 nt, Artificial Sequence
  Description of Artificial Sequence: Synthetic oligonucleotide
aggcagagcuugauggucu

SEQ ID NO: 3034257 - RNA, 19 nt, Artificial Sequence
  Description of Artificial Sequence: Synthetic oligonucleotide
aacagggcuuccagugagu

SEQ ID NO: 3034258 - RNA, 19 nt, Artificial Sequence
  Description of Artificial Sequence: Synthetic oligonucleotide
caggcagagcuugaugguc

SEQ ID NO: 3034259 - RNA, 19 nt, Artificial Sequence
  Description of Artificial Sequence: Synthetic oligonucleotide
cgacaggcuauccacaaug

SEQ ID NO: 3034260 - RNA, 19 nt, Artificial Sequence
  Description of Artificial Sequence: Synthetic oligonucleotide
gcuucgagacagucugugc

SEQ ID NO: 3034261 - RNA, 19 nt, Artificial Sequence
  Description of Artificial Sequence: Synthetic oligonucleotide
accaagcgguacucaguga

SEQ ID NO: 3034262 - RNA, 19 nt, Artificial Sequence
  Description of Artificial Sequence: Synthetic oligonucleotide
aagcaccaagcgguacuca

SEQ ID NO: 3034263 - RNA, 19 nt, Artificial Sequence
  Description of Artificial Sequence: Synthetic oligonucleotide
uccacuggcgcggucuguc

SEQ ID NO: 3034264 - RNA, 19 nt, Artificial Sequence
  Description of Artificial Sequence: Synthetic oligonucleotide
agcgugagcaguagcugca

SEQ ID NO: 3034265 - RNA, 19 nt, Artificial Sequence
  Description of Artificial Sequence: Synthetic oligonucleotide
ccucggagcuucgagacag

SEQ ID NO: 3034266 - RNA, 19 nt, Artificial Sequence
  Description of Artificial Sequence: Synthetic oligonucleotide
cagugagugcagcgugagc

SEQ ID NO: 3034267 - RNA, 19 nt, Artificial Sequence
  Description of Artificial Sequence: Synthetic oligonucleotide
aggcagagagaggggugac

SEQ ID NO: 3034268 - RNA, 19 nt, Artificial Sequence
  Description of Artificial Sequence: Synthetic oligonucleotide
ucggagcuucgagacaguc

SEQ ID NO: 3034269 - RNA, 19 nt, Artificial Sequence
  Description of Artificial Sequence: Synthetic oligonucleotide
guggauuccugcagggcca

SEQ ID NO: 3034270 - RNA, 19 nt, Artificial Sequence
  Description of Artificial Sequence: Synthetic oligonucleotide
cuaggagcugagaacacuu

SEQ ID NO: 3034271 - RNA, 19 nt, Artificial Sequence
  Description of Artificial Sequence: Synthetic oligonucleotide
cgagcacugucacaagccg

SEQ ID NO: 3034272 - RNA, 19 nt, Artificial Sequence
  Description of Artificial Sequence: Synthetic oligonucleotide
acucagugacaagccucuc

SEQ ID NO: 3034273 - RNA, 19 nt, Artificial Sequence
  Description of Artificial Sequence: Synthetic oligonucleotide
ggcuauccacaaugagaag

SEQ ID NO: 3034274 - RNA, 19 nt, Artificial Sequence
  Description of Artificial Sequence: Synthetic oligonucleotide
ggcuuucugcauuagacuu

SEQ ID NO: 3034275 - RNA, 19 nt, Artificial Sequence
  Description of Artificial Sequence: Synthetic oligonucleotide
ugggagcuuggaggaagca

SEQ ID NO: 3034276 - RNA, 19 nt, Artificial Sequence
  Description of Artificial Sequence: Synthetic oligonucleotide
agcaggcugcuccgcugag

SEQ ID NO: 3034277 - RNA, 19 nt, Artificial Sequence
  Description of Artificial Sequence: Synthetic oligonucleotide
gugcagcgugagcaguagc

SEQ ID NO: 3034278 - RNA, 19 nt, Artificial Sequence
  Description of Artificial Sequence: Synthetic oligonucleotide
uggauuccugcagggccac

SEQ ID NO: 3034279 - RNA, 19 nt, Artificial Sequence
  Description of Artificial Sequence: Synthetic oligonucleotide
agucugugcucgagcacug

SEQ ID NO: 3034280 - RNA, 19 nt, Artificial Sequence
  Description of Artificial Sequence: Synthetic oligonucleotide
gguacucagugacaagccu

SEQ ID NO: 3034281 - RNA, 19 nt, Artificial Sequence
  Description of Artificial Sequence: Synthetic oligonucleotide
agcuuggaggaagcaggcu

SEQ ID NO: 3034282 - RNA, 19 nt, Artificial Sequence
  Description of Artificial Sequence: Synthetic oligonucleotide
gcugcugcaguaggccagg

SEQ ID NO: 3034283 - RNA, 19 nt, Artificial Sequence
  Description of Artificial Sequence: Synthetic oligonucleotide
uucccaggcagagcuugau

SEQ ID NO: 3034284 - RNA, 19 nt, Artificial Sequence
  Description of Artificial Sequence: Synthetic oligonucleotide
gcagcgugagcaguagcug

SEQ ID NO: 3034285 - RNA, 19 nt, Artificial Sequence
  Description of Artificial Sequence: Synthetic oligonucleotide
cacuucuucagaguggauu

SEQ ID NO: 3034286 - RNA, 19 nt, Artificial Sequence
  Description of Artificial Sequence: Synthetic oligonucleotide
uagcugcaagcugcugcug

SEQ ID NO: 3034287 - RNA, 19 nt, Artificial Sequence
  Description of Artificial Sequence: Synthetic oligonucleotide
cagaggcuuucugcauuag

SEQ ID NO: 3034288 - RNA, 19 nt, Artificial Sequence
  Description of Artificial Sequence: Synthetic oligonucleotide
gucagaggcuuucugcauu

SEQ ID NO: 3034289 - RNA, 19 nt, Artificial Sequence
  Description of Artificial Sequence: Synthetic oligonucleotide
cagucugugcucgagcacu

SEQ ID NO: 3034290 - RNA, 19 nt, Artificial Sequence
  Description of Artificial Sequence: Synthetic oligonucleotide
ccucucuaggagcugagaa

SEQ ID NO: 3034291 - RNA, 19 nt, Artificial Sequence
  Description of Artificial Sequence: Synthetic oligonucleotide
cuucccaggcagagcuuga

SEQ ID NO: 3034292 - RNA, 19 nt, Artificial Sequence
  Description of Artificial Sequence: Synthetic oligonucleotide
gggccacacucucuccucc

SEQ ID NO: 3034293 - RNA, 19 nt, Artificial Sequence
  Description of Artificial Sequence: Synthetic oligonucleotide
caagccucucuaggagcug

SEQ ID NO: 3034294 - RNA, 19 nt, Artificial Sequence
  Description of Artificial Sequence: Synthetic oligonucleotide
ggccaggaacaaucuuccc

SEQ ID NO: 3034295 - RNA, 19 nt, Artificial Sequence
  Description of Artificial Sequence: Synthetic oligonucleotide
gagugcagcgugagcagua

SEQ ID NO: 3034296 - RNA, 19 nt, Artificial Sequence
  Description of Artificial Sequence: Synthetic oligonucleotide
aggcugcuccgcugaguca

SEQ ID NO: 3034297 - RNA, 19 nt, Artificial Sequence
  Description of Artificial Sequence: Synthetic oligonucleotide
agccgacaggcuauccaca

SEQ ID NO: 3034298 - RNA, 19 nt, Artificial Sequence
  Description of Artificial Sequence: Synthetic oligonucleotide
agccucucuaggagcugag

SEQ ID NO: 3034299 - RNA, 19 nt, Artificial Sequence
  Description of Artificial Sequence: Synthetic oligonucleotide
cugcuccgcugagucagag

SEQ ID NO: 3034300 - RNA, 19 nt, Artificial Sequence
  Description of Artificial Sequence: Synthetic oligonucleotide
gcuugauggucuccucgga

SEQ ID NO: 3034301 - RNA, 19 nt, Artificial Sequence
  Description of Artificial Sequence: Synthetic oligonucleotide
cagagcuugauggucuccu

SEQ ID NO: 3034302 - RNA, 19 nt, Artificial Sequence
  Description of Artificial Sequence: Synthetic oligonucleotide
ccagugagugcagcgugag

SEQ ID NO: 3034303 - RNA, 19 nt, Artificial Sequence
  Description of Artificial Sequence: Synthetic oligonucleotide
ggcagagcuugauggucuc

SEQ ID NO: 3034304 - RNA, 19 nt, Artificial Sequence
  Description of Artificial Sequence: Synthetic oligonucleotide
gcucgagcacugucacaag

SEQ ID NO: 3034305 - RNA, 19 nt, Artificial Sequence
  Description of Artificial Sequence: Synthetic oligonucleotide
cacuggcgcggucugucca

SEQ ID NO: 3034306 - RNA, 19 nt, Artificial Sequence
  Description of Artificial Sequence: Synthetic oligonucleotide
gccgacaggcuauccacaa

SEQ ID NO: 3034307 - RNA, 19 nt, Artificial Sequence
  Description of Artificial Sequence: Synthetic oligonucleotide
gugcucgagcacugucaca

SEQ ID NO: 3034308 - RNA, 19 nt, Artificial Sequence
  Description of Artificial Sequence: Synthetic oligonucleotide
ucuccuccacuggcgcggu

SEQ ID NO: 3034309 - RNA, 19 nt, Artificial Sequence
  Description of Artificial Sequence: Synthetic oligonucleotide
caguagcugcaagcugcug

SEQ ID NO: 3034310 - RNA, 19 nt, Artificial Sequence
  Description of Artificial Sequence: Synthetic oligonucleotide
guaggccaggaacaaucuu

SEQ ID NO: 3034311 - RNA, 19 nt, Artificial Sequence
  Description of Artificial Sequence: Synthetic oligonucleotide
gcagggccacacucucucc

SEQ ID NO: 3034312 - RNA, 19 nt, Artificial Sequence
  Description of Artificial Sequence: Synthetic oligonucleotide
gcagagcuugauggucucc

SEQ ID NO: 3034313 - RNA, 19 nt, Artificial Sequence
  Description of Artificial Sequence: Synthetic oligonucleotide
cagggccacacucucuccu

SEQ ID NO: 3034314 - RNA, 19 nt, Artificial Sequence
  Description of Artificial Sequence: Synthetic oligonucleotide
ggcuuccagugagugcagc

SEQ ID NO: 3034315 - RNA, 19 nt, Artificial Sequence
  Description of Artificial Sequence: Synthetic oligonucleotide
cgugagcaguagcugcaag

SEQ ID NO: 3034316 - RNA, 19 nt, Artificial Sequence
  Description of Artificial Sequence: Synthetic oligonucleotide
ggcgcggucuguccaguaa

SEQ ID NO: 3034317 - RNA, 19 nt, Artificial Sequence
  Description of Artificial Sequence: Synthetic oligonucleotide
ccacuggcgcggucugucc

SEQ ID NO: 3034318 - RNA, 19 nt, Artificial Sequence
  Description of Artificial Sequence: Synthetic oligonucleotide
uggcgcggucuguccagua

SEQ ID NO: 3034319 - RNA, 19 nt, Artificial Sequence
  Description of Artificial Sequence: Synthetic oligonucleotide
gcgcggucuguccaguaaa

SEQ ID NO: 3034320 - RNA, 19 nt, Artificial Sequence
  Description of Artificial Sequence: Synthetic oligonucleotide
ggagcugagaacacuucuu

SEQ ID NO: 3034321 - RNA, 19 nt, Artificial Sequence
  Description of Artificial Sequence: Synthetic oligonucleotide
acacuucuucagaguggau

SEQ ID NO: 3034322 - RNA, 19 nt, Artificial Sequence
  Description of Artificial Sequence: Synthetic oligonucleotide
cuccgcugagucagaggcu

SEQ ID NO: 3034323 - RNA, 19 nt, Artificial Sequence
  Description of Artificial Sequence: Synthetic oligonucleotide
gagcuucgagacagucugu

SEQ ID NO: 3034324 - RNA, 19 nt, Artificial Sequence
  Description of Artificial Sequence: Synthetic oligonucleotide
aucuucccaggcagagcuu

SEQ ID NO: 3034325 - RNA, 19 nt, Artificial Sequence
  Description of Artificial Sequence: Synthetic oligonucleotide
ccuccacuggcgcggucug

SEQ ID NO: 3034326 - RNA, 19 nt, Artificial Sequence
  Description of Artificial Sequence: Synthetic oligonucleotide
gcuuucugcauuagacuuu

SEQ ID NO: 3034327 - RNA, 19 nt, Artificial Sequence
  Description of Artificial Sequence: Synthetic oligonucleotide
gggcuuccagugagugcag

SEQ ID NO: 3034328 - RNA, 19 nt, Artificial Sequence
  Description of Artificial Sequence: Synthetic oligonucleotide
cugcagggccacacucucu

SEQ ID NO: 3034329 - RNA, 19 nt, Artificial Sequence
  Description of Artificial Sequence: Synthetic oligonucleotide
ccaggcagagcuugauggu

SEQ ID NO: 3034330 - RNA, 19 nt, Artificial Sequence
  Description of Artificial Sequence: Synthetic oligonucleotide
gccucucuaggagcugaga

SEQ ID NO: 3034331 - RNA, 19 nt, Artificial Sequence
  Description of Artificial Sequence: Synthetic oligonucleotide
gcugagucagaggcuuucu

SEQ ID NO: 3034332 - RNA, 19 nt, Artificial Sequence
  Description of Artificial Sequence: Synthetic oligonucleotide
gcaccaagcgguacucagu

SEQ ID NO: 3034333 - RNA, 19 nt, Artificial Sequence
  Description of Artificial Sequence: Synthetic oligonucleotide
cucggagcuucgagacagu

SEQ ID NO: 3034334 - RNA, 19 nt, Artificial Sequence
  Description of Artificial Sequence: Synthetic oligonucleotide
cgcugagucagaggcuuuc

SEQ ID NO: 3034335 - RNA, 19 nt, Artificial Sequence
  Description of Artificial Sequence: Synthetic oligonucleotide
gcaguagcugcaagcugcu

SEQ ID NO: 3034336 - RNA, 19 nt, Artificial Sequence
  Description of Artificial Sequence: Synthetic oligonucleotide
cuccuccacuggcgcgguc

SEQ ID NO: 3034337 - RNA, 19 nt, Artificial Sequence
  Description of Artificial Sequence: Synthetic oligonucleotide
gucugugcucgagcacugu

SEQ ID NO: 3034338 - RNA, 19 nt, Artificial Sequence
  Description of Artificial Sequence: Synthetic oligonucleotide
ggucuccucggagcuucga

SEQ ID NO: 3034339 - RNA, 19 nt, Artificial Sequence
  Description of Artificial Sequence: Synthetic oligonucleotide
cugcugcaguaggccagga

SEQ ID NO: 3034340 - RNA, 19 nt, Artificial Sequence
  Description of Artificial Sequence: Synthetic oligonucleotide
gcgugagcaguagcugcaa

SEQ ID NO: 3034341 - RNA, 19 nt, Artificial Sequence
  Description of Artificial Sequence: Synthetic oligonucleotide
cggagcuucgagacagucu

SEQ ID NO: 3034342 - RNA, 19 nt, Artificial Sequence
  Description of Artificial Sequence: Synthetic oligonucleotide
cgcggucuguccaguaaaa

SEQ ID NO: 3034343 - RNA, 19 nt, Artificial Sequence
  Description of Artificial Sequence: Synthetic oligonucleotide
ccacacucucuccuccacu

SEQ ID NO: 3034344 - RNA, 19 nt, Artificial Sequence
  Description of Artificial Sequence: Synthetic oligonucleotide
gcaguaggccaggaacaau

SEQ ID NO: 3034345 - RNA, 19 nt, Artificial Sequence
  Description of Artificial Sequence: Synthetic oligonucleotide
ggauuccugcagggccaca

SEQ ID NO: 3034346 - RNA, 19 nt, Artificial Sequence
  Description of Artificial Sequence: Synthetic oligonucleotide
cgagacagucugugcucga

SEQ ID NO: 3034347 - RNA, 19 nt, Artificial Sequence
  Description of Artificial Sequence: Synthetic oligonucleotide
gcugcuccgcugagucaga

SEQ ID NO: 3034348 - RNA, 19 nt, Artificial Sequence
  Description of Artificial Sequence: Synthetic oligonucleotide
gcaggcugcuccgcugagu

SEQ ID NO: 3034349 - RNA, 19 nt, Artificial Sequence
  Description of Artificial Sequence: Synthetic oligonucleotide
cuggcgcggucuguccagu

SEQ ID NO: 3034350 - RNA, 19 nt, Artificial Sequence
  Description of Artificial Sequence: Synthetic oligonucleotide
cuccacuggcgcggucugu

SEQ ID NO: 3034351 - RNA, 19 nt, Artificial Sequence
  Description of Artificial Sequence: Synthetic oligonucleotide
ccgacaggcuauccacaau

SEQ ID NO: 3034352 - RNA, 19 nt, Artificial Sequence
  Description of Artificial Sequence: Synthetic oligonucleotide
ccgcugagucagaggcuuu

SEQ ID NO: 3034353 - RNA, 19 nt, Artificial Sequence
  Description of Artificial Sequence: Synthetic oligonucleotide
ucucacaagccacauaagg

SEQ ID NO: 3034354 - RNA, 19 nt, Artificial Sequence
  Description of Artificial Sequence: Synthetic oligonucleotide
ugugcgugaagcaugagcc

SEQ ID NO: 3034355 - RNA, 19 nt, Artificial Sequence
  Description of Artificial Sequence: Synthetic oligonucleotide
auggaaaugguuucucacc

SEQ ID NO: 3034356 - RNA, 19 nt, Artificial Sequence
  Description of Artificial Sequence: Synthetic oligonucleotide
acagguaaagcgcuucucc

SEQ ID NO: 3034357 - RNA, 19 nt, Artificial Sequence
  Description of Artificial Sequence: Synthetic oligonucleotide
ugaaugcacacucuggugc

SEQ ID NO: 3034358 - RNA, 19 nt, Artificial Sequence
  Description of Artificial Sequence: Synthetic oligonucleotide
uaaggagacuugcagauga

SEQ ID NO: 3034359 - RNA, 19 nt, Artificial Sequence
  Description of Artificial Sequence: Synthetic oligonucleotide
ugcacugucaaguuggcca

SEQ ID NO: 3034360 - RNA, 19 nt, Artificial Sequence
  Description of Artificial Sequence: Synthetic oligonucleotide
uggugcacugucaaguugg

SEQ ID NO: 3034361 - RNA, 19 nt, Artificial Sequence
  Description of Artificial Sequence: Synthetic oligonucleotide
cuauguuccaccagugugg

SEQ ID NO: 3034362 - RNA, 19 nt, Artificial Sequence
  Description of Artificial Sequence: Synthetic oligonucleotide
aaagcgcuucuccugagag

SEQ ID NO: 3034363 - RNA, 19 nt, Artificial Sequence
  Description of Artificial Sequence: Synthetic oligonucleotide
ucacaagccacauaaggca

SEQ ID NO: 3034364 - RNA, 19 nt, Artificial Sequence
  Description of Artificial Sequence: Synthetic oligonucleotide
uggaaaugguuucucaccc

SEQ ID NO: 3034365 - RNA, 19 nt, Artificial Sequence
  Description of Artificial Sequence: Synthetic oligonucleotide
ugucguaggaaacugggcu

SEQ ID NO: 3034366 - RNA, 19 nt, Artificial Sequence
  Description of Artificial Sequence: Synthetic oligonucleotide
uuuaaggagacuugcagau

SEQ ID NO: 3034367 - RNA, 19 nt, Artificial Sequence
  Description of Artificial Sequence: Synthetic oligonucleotide
ugaaacgcuugucacacug

SEQ ID NO: 3034368 - RNA, 19 nt, Artificial Sequence
  Description of Artificial Sequence: Synthetic oligonucleotide
cucacaagccacauaaggc

SEQ ID NO: 3034369 - RNA, 19 nt, Artificial Sequence
  Description of Artificial Sequence: Synthetic oligonucleotide
aagcaugagccacacuggg

SEQ ID NO: 3034370 - RNA, 19 nt, Artificial Sequence
  Description of Artificial Sequence: Synthetic oligonucleotide
agccacauaaggcagagga

SEQ ID NO: 3034371 - RNA, 19 nt, Artificial Sequence
  Description of Artificial Sequence: Synthetic oligonucleotide
aggaaacugggcuugugcg

SEQ ID NO: 3034372 - RNA, 19 nt, Artificial Sequence
  Description of Artificial Sequence: Synthetic oligonucleotide
gaugucguaggaaacuggg

SEQ ID NO: 3034373 - RNA, 19 nt, Artificial Sequence
  Description of Artificial Sequence: Synthetic oligonucleotide
agcgugcucaccugaaugc

SEQ ID NO: 3034374 - RNA, 19 nt, Artificial Sequence
  Description of Artificial Sequence: Synthetic oligonucleotide
uguuccaccaguguggaca

SEQ ID NO: 3034375 - RNA, 19 nt, Artificial Sequence
  Description of Artificial Sequence: Synthetic oligonucleotide
augacucacagcuugguga

SEQ ID NO: 3034376 - RNA, 19 nt, Artificial Sequence
  Description of Artificial Sequence: Synthetic oligonucleotide
ugucaaguuggccaggcgu

SEQ ID NO: 3034377 - RNA, 19 nt, Artificial Sequence
  Description of Artificial Sequence: Synthetic oligonucleotide
agaguggcugcguagaugu

SEQ ID NO: 3034378 - RNA, 19 nt, Artificial Sequence
  Description of Artificial Sequence: Synthetic oligonucleotide
acuggguacacuggaaagc

SEQ ID NO: 3034379 - RNA, 19 nt, Artificial Sequence
  Description of Artificial Sequence: Synthetic oligonucleotide
uugugcgugaagcaugagc

SEQ ID NO: 3034380 - RNA, 19 nt, Artificial Sequence
  Description of Artificial Sequence: Synthetic oligonucleotide
ugugaaacgcuugucacac

SEQ ID NO: 3034381 - RNA, 19 nt, Artificial Sequence
  Description of Artificial Sequence: Synthetic oligonucleotide
uaggaaacugggcuugugc

SEQ ID NO: 3034382 - RNA, 19 nt, Artificial Sequence
  Description of Artificial Sequence: Synthetic oligonucleotide
ugugugugcgccuauguuc

SEQ ID NO: 3034383 - RNA, 19 nt, Artificial Sequence
  Description of Artificial Sequence: Synthetic oligonucleotide
aagcgugcucaccugaaug

SEQ ID NO: 3034384 - RNA, 19 nt, Artificial Sequence
  Description of Artificial Sequence: Synthetic oligonucleotide
ugucacacugggugcaugg

SEQ ID NO: 3034385 - RNA, 19 nt, Artificial Sequence
  Description of Artificial Sequence: Synthetic oligonucleotide
acgcuugucacacugggug

SEQ ID NO: 3034386 - RNA, 19 nt, Artificial Sequence
  Description of Artificial Sequence: Synthetic oligonucleotide
cauggaaaugguuucucac

SEQ ID NO: 3034387 - RNA, 19 nt, Artificial Sequence
  Description of Artificial Sequence: Synthetic oligonucleotide
ugacucacagcuuggugag

SEQ ID NO: 3034388 - RNA, 19 nt, Artificial Sequence
  Description of Artificial Sequence: Synthetic oligonucleotide
uggcgcaccagccaggagc

SEQ ID NO: 3034389 - RNA, 19 nt, Artificial Sequence
  Description of Artificial Sequence: Synthetic oligonucleotide
cuucucacaagccacauaa

SEQ ID NO: 3034390 - RNA, 19 nt, Artificial Sequence
  Description of Artificial Sequence: Synthetic oligonucleotide
cuggccacagguaaagcgc

SEQ ID NO: 3034391 - RNA, 19 nt, Artificial Sequence
  Description of Artificial Sequence: Synthetic oligonucleotide
ggcgugacuacccuggugg

SEQ ID NO: 3034392 - RNA, 19 nt, Artificial Sequence
  Description of Artificial Sequence: Synthetic oligonucleotide
ugagcucuucucacaagcc

SEQ ID NO: 3034393 - RNA, 19 nt, Artificial Sequence
  Description of Artificial Sequence: Synthetic oligonucleotide
cuuuaaggagacuugcaga

SEQ ID NO: 3034394 - RNA, 19 nt, Artificial Sequence
  Description of Artificial Sequence: Synthetic oligonucleotide
gugagcucuucucacaagc

SEQ ID NO: 3034395 - RNA, 19 nt, Artificial Sequence
  Description of Artificial Sequence: Synthetic oligonucleotide
gaugacucacagcuuggug

SEQ ID NO: 3034396 - RNA, 19 nt, Artificial Sequence
  Description of Artificial Sequence: Synthetic oligonucleotide
cucaccugaaugcacacuc

SEQ ID NO: 3034397 - RNA, 19 nt, Artificial Sequence
  Description of Artificial Sequence: Synthetic oligonucleotide
aguggcugcguagaugucg

SEQ ID NO: 3034398 - RNA, 19 nt, Artificial Sequence
  Description of Artificial Sequence: Synthetic oligonucleotide
gacaggugaagcucuugcc

SEQ ID NO: 3034399 - RNA, 19 nt, Artificial Sequence
  Description of Artificial Sequence: Synthetic oligonucleotide
cuggguacacuggaaagcg

SEQ ID NO: 3034400 - RNA, 19 nt, Artificial Sequence
  Description of Artificial Sequence: Synthetic oligonucleotide
ugcaccuuuaaggagacuu

SEQ ID NO: 3034401 - RNA, 19 nt, Artificial Sequence
  Description of Artificial Sequence: Synthetic oligonucleotide
gaaacugggcuugugcgug

SEQ ID NO: 3034402 - RNA, 19 nt, Artificial Sequence
  Description of Artificial Sequence: Synthetic oligonucleotide
cuugcagaugacucacagc

SEQ ID NO: 3034403 - RNA, 19 nt, Artificial Sequence
  Description of Artificial Sequence: Synthetic oligonucleotide
gagacuugcagaugacuca

SEQ ID NO: 3034404 - RNA, 19 nt, Artificial Sequence
  Description of Artificial Sequence: Synthetic oligonucleotide
cacaagccacauaaggcag

SEQ ID NO: 3034405 - RNA, 19 nt, Artificial Sequence
  Description of Artificial Sequence: Synthetic oligonucleotide
agcgcuucuccugagagug

SEQ ID NO: 3034406 - RNA, 19 nt, Artificial Sequence
  Description of Artificial Sequence: Synthetic oligonucleotide
agguaaagcgcuucuccug

SEQ ID NO: 3034407 - RNA, 19 nt, Artificial Sequence
  Description of Artificial Sequence: Synthetic oligonucleotide
uucucacaagccacauaag

SEQ ID NO: 3034408 - RNA, 19 nt, Artificial Sequence
  Description of Artificial Sequence: Synthetic oligonucleotide
gaaacgcuugucacacugg

SEQ ID NO: 3034409 - RNA, 19 nt, Artificial Sequence
  Description of Artificial Sequence: Synthetic oligonucleotide
cauaaggcagaggaggcug

SEQ ID NO: 3034410 - RNA, 19 nt, Artificial Sequence
  Description of Artificial Sequence: Synthetic oligonucleotide
gcagaugacucacagcuug

SEQ ID NO: 3034411 - RNA, 19 nt, Artificial Sequence
  Description of Artificial Sequence: Synthetic oligonucleotide
acuggaaagcgugcucacc

SEQ ID NO: 3034412 - RNA, 19 nt, Artificial Sequence
  Description of Artificial Sequence: Synthetic oligonucleotide
uaaagcgcuucuccugaga

SEQ ID NO: 3034413 - RNA, 19 nt, Artificial Sequence
  Description of Artificial Sequence: Synthetic oligonucleotide
cacuggguacacuggaaag

SEQ ID NO: 3034414 - RNA, 19 nt, Artificial Sequence
  Description of Artificial Sequence: Synthetic oligonucleotide
ucuccugagaguggcugcg

SEQ ID NO: 3034415 - RNA, 19 nt, Artificial Sequence
  Description of Artificial Sequence: Synthetic oligonucleotide
cugaaugcacacucuggug

SEQ ID NO: 3034416 - RNA, 19 nt, Artificial Sequence
  Description of Artificial Sequence: Synthetic oligonucleotide
ugagcgggcgugacuaccc

SEQ ID NO: 3034417 - RNA, 19 nt, Artificial Sequence
  Description of Artificial Sequence: Synthetic oligonucleotide
caggugaagcucuugccac

SEQ ID NO: 3034418 - RNA, 19 nt, Artificial Sequence
  Description of Artificial Sequence: Synthetic oligonucleotide
gaaugcacacucuggugca

SEQ ID NO: 3034419 - RNA, 19 nt, Artificial Sequence
  Description of Artificial Sequence: Synthetic oligonucleotide
ccacauaaggcagaggagg

SEQ ID NO: 3034420 - RNA, 19 nt, Artificial Sequence
  Description of Artificial Sequence: Synthetic oligonucleotide
augucguaggaaacugggc

SEQ ID NO: 3034421 - RNA, 19 nt, Artificial Sequence
  Description of Artificial Sequence: Synthetic oligonucleotide
cuggcugcaccuuuaagga

SEQ ID NO: 3034422 - RNA, 19 nt, Artificial Sequence
  Description of Artificial Sequence: Synthetic oligonucleotide
cagaugacucacagcuugg

SEQ ID NO: 3034423 - RNA, 19 nt, Artificial Sequence
  Description of Artificial Sequence: Synthetic oligonucleotide
ugugcgccuauguuccacc

SEQ ID NO: 3034424 - RNA, 19 nt, Artificial Sequence
  Description of Artificial Sequence: Synthetic oligonucleotide
ggaaaugguuucucacccg

SEQ ID NO: 3034425 - RNA, 19 nt, Artificial Sequence
  Description of Artificial Sequence: Synthetic oligonucleotide
uuggccaggcgugugaaac

SEQ ID NO: 3034426 - RNA, 19 nt, Artificial Sequence
  Description of Artificial Sequence: Synthetic oligonucleotide
aaagcgugcucaccugaau

SEQ ID NO: 3034427 - RNA, 19 nt, Artificial Sequence
  Description of Artificial Sequence: Synthetic oligonucleotide
aaguuggccaggcguguga

SEQ ID NO: 3034428 - RNA, 19 nt, Artificial Sequence
  Description of Artificial Sequence: Synthetic oligonucleotide
cugggcuugugcgugaagc

SEQ ID NO: 3034429 - RNA, 19 nt, Artificial Sequence
  Description of Artificial Sequence: Synthetic oligonucleotide
uauguuccaccagugugga

SEQ ID NO: 3034430 - RNA, 19 nt, Artificial Sequence
  Description of Artificial Sequence: Synthetic oligonucleotide
aaggagacuugcagaugac

SEQ ID NO: 3034431 - RNA, 19 nt, Artificial Sequence
  Description of Artificial Sequence: Synthetic oligonucleotide
uggugagcucuucucacaa

SEQ ID NO: 3034432 - RNA, 19 nt, Artificial Sequence
  Description of Artificial Sequence: Synthetic oligonucleotide
agaugucguaggaaacugg

SEQ ID NO: 3034433 - RNA, 19 nt, Artificial Sequence
  Description of Artificial Sequence: Synthetic oligonucleotide
uuggugagcucuucucaca

SEQ ID NO: 3034434 - RNA, 19 nt, Artificial Sequence
  Description of Artificial Sequence: Synthetic oligonucleotide
caccuuuaaggagacuugc

SEQ ID NO: 3034435 - RNA, 19 nt, Artificial Sequence
  Description of Artificial Sequence: Synthetic oligonucleotide
uucuccugagaguggcugc

SEQ ID NO: 3034436 - RNA, 19 nt, Artificial Sequence
  Description of Artificial Sequence: Synthetic oligonucleotide
uacacuggaaagcgugcuc

SEQ ID NO: 3034437 - RNA, 19 nt, Artificial Sequence
  Description of Artificial Sequence: Synthetic oligonucleotide
gcugcguagaugucguagg

SEQ ID NO: 3034438 - RNA, 19 nt, Artificial Sequence
  Description of Artificial Sequence: Synthetic oligonucleotide
ucguaggaaacugggcuug

SEQ ID NO: 3034439 - RNA, 19 nt, Artificial Sequence
  Description of Artificial Sequence: Synthetic oligonucleotide
ucaccugaaugcacacucu

SEQ ID NO: 3034440 - RNA, 19 nt, Artificial Sequence
  Description of Artificial Sequence: Synthetic oligonucleotide
ugcgugaagcaugagccac

SEQ ID NO: 3034441 - RNA, 19 nt, Artificial Sequence
  Description of Artificial Sequence: Synthetic oligonucleotide
ccuauguuccaccagugug

SEQ ID NO: 3034442 - RNA, 19 nt, Artificial Sequence
  Description of Artificial Sequence: Synthetic oligonucleotide
gugugugcgccuauguucc

SEQ ID NO: 3034443 - RNA, 19 nt, Artificial Sequence
  Description of Artificial Sequence: Synthetic oligonucleotide
uggccaggcgugugaaacg

SEQ ID NO: 3034444 - RNA, 19 nt, Artificial Sequence
  Description of Artificial Sequence: Synthetic oligonucleotide
aggagcgacaggugaagcu

SEQ ID NO: 3034445 - RNA, 19 nt, Artificial Sequence
  Description of Artificial Sequence: Synthetic oligonucleotide
accugaaugcacacucugg

SEQ ID NO: 3034446 - RNA, 19 nt, Artificial Sequence
  Description of Artificial Sequence: Synthetic oligonucleotide
ugggcuugugcgugaagca

SEQ ID NO: 3034447 - RNA, 19 nt, Artificial Sequence
  Description of Artificial Sequence: Synthetic oligonucleotide
aagcgcuucuccugagagu

SEQ ID NO: 3034448 - RNA, 19 nt, Artificial Sequence
  Description of Artificial Sequence: Synthetic oligonucleotide
ugcgccuauguuccaccag

SEQ ID NO: 3034449 - RNA, 19 nt, Artificial Sequence
  Description of Artificial Sequence: Synthetic oligonucleotide
gugacuacccugguggcgc

SEQ ID NO: 3034450 - RNA, 19 nt, Artificial Sequence
  Description of Artificial Sequence: Synthetic oligonucleotide
uggaaagcgugcucaccug

SEQ ID NO: 3034451 - RNA, 19 nt, Artificial Sequence
  Description of Artificial Sequence: Synthetic oligonucleotide
uggccacagguaaagcgcu

SEQ ID NO: 3034452 - RNA, 19 nt, Artificial Sequence
  Description of Artificial Sequence: Synthetic oligonucleotide
acucacagcuuggugagcu

SEQ ID NO: 3034453 - RNA, 19 nt, Artificial Sequence
  Description of Artificial Sequence: Synthetic oligonucleotide
gucaaguuggccaggcgug

SEQ ID NO: 3034454 - RNA, 19 nt, Artificial Sequence
  Description of Artificial Sequence: Synthetic oligonucleotide
ggugcauggaaaugguuuc

SEQ ID NO: 3034455 - RNA, 19 nt, Artificial Sequence
  Description of Artificial Sequence: Synthetic oligonucleotide
acacuggaaagcgugcuca

SEQ ID NO: 3034456 - RNA, 19 nt, Artificial Sequence
  Description of Artificial Sequence: Synthetic oligonucleotide
uggcugcaccuuuaaggag

SEQ ID NO: 3034457 - RNA, 19 nt, Artificial Sequence
  Description of Artificial Sequence: Synthetic oligonucleotide
caagccacauaaggcagag

SEQ ID NO: 3034458 - RNA, 19 nt, Artificial Sequence
  Description of Artificial Sequence: Synthetic oligonucleotide
acuacccugguggcgcacc

SEQ ID NO: 3034459 - RNA, 19 nt, Artificial Sequence
  Description of Artificial Sequence: Synthetic oligonucleotide
gugugaaacgcuugucaca

SEQ ID NO: 3034460 - RNA, 19 nt, Artificial Sequence
  Description of Artificial Sequence: Synthetic oligonucleotide
acacuggccacagguaaag

SEQ ID NO: 3034461 - RNA, 19 nt, Artificial Sequence
  Description of Artificial Sequence: Synthetic oligonucleotide
caccugaaugcacacucug

SEQ ID NO: 3034462 - RNA, 19 nt, Artificial Sequence
  Description of Artificial Sequence: Synthetic oligonucleotide
ugcacacucuggugcacug

SEQ ID NO: 3034463 - RNA, 19 nt, Artificial Sequence
  Description of Artificial Sequence: Synthetic oligonucleotide
gguaaagcgcuucuccuga

SEQ ID NO: 3034464 - RNA, 19 nt, Artificial Sequence
  Description of Artificial Sequence: Synthetic oligonucleotide
ucacagcuuggugagcucu

SEQ ID NO: 3034465 - RNA, 19 nt, Artificial Sequence
  Description of Artificial Sequence: Synthetic oligonucleotide
aaacugggcuugugcguga

SEQ ID NO: 3034466 - RNA, 19 nt, Artificial Sequence
  Description of Artificial Sequence: Synthetic oligonucleotide
agccaggagcgacagguga

SEQ ID NO: 3034467 - RNA, 19 nt, Artificial Sequence
  Description of Artificial Sequence: Synthetic oligonucleotide
ucuggugcacugucaaguu

SEQ ID NO: 3034468 - RNA, 19 nt, Artificial Sequence
  Description of Artificial Sequence: Synthetic oligonucleotide
ucuucucacaagccacaua

SEQ ID NO: 3034469 - RNA, 19 nt, Artificial Sequence
  Description of Artificial Sequence: Synthetic oligonucleotide
guaaagcgcuucuccugag

SEQ ID NO: 3034470 - RNA, 19 nt, Artificial Sequence
  Description of Artificial Sequence: Synthetic oligonucleotide
gcagaggaggcugagcggg

SEQ ID NO: 3034471 - RNA, 19 nt, Artificial Sequence
  Description of Artificial Sequence: Synthetic oligonucleotide
caugagccacacuggguac

SEQ ID NO: 3034472 - RNA, 19 nt, Artificial Sequence
  Description of Artificial Sequence: Synthetic oligonucleotide
cugguggcgcaccagccag

SEQ ID NO: 3034473 - RNA, 19 nt, Artificial Sequence
  Description of Artificial Sequence: Synthetic oligonucleotide
ugcauggaaaugguuucuc

SEQ ID NO: 3034474 - RNA, 19 nt, Artificial Sequence
  Description of Artificial Sequence: Synthetic oligonucleotide
ggagacuugcagaugacuc

SEQ ID NO: 3034475 - RNA, 19 nt, Artificial Sequence
  Description of Artificial Sequence: Synthetic oligonucleotide
uaaggcagaggaggcugag

SEQ ID NO: 3034476 - RNA, 19 nt, Artificial Sequence
  Description of Artificial Sequence: Synthetic oligonucleotide
cacacucuggugcacuguc

SEQ ID NO: 3034477 - RNA, 19 nt, Artificial Sequence
  Description of Artificial Sequence: Synthetic oligonucleotide
aggcgugugaaacgcuugu

SEQ ID NO: 3034478 - RNA, 19 nt, Artificial Sequence
  Description of Artificial Sequence: Synthetic oligonucleotide
uggguacacuggaaagcgu

SEQ ID NO: 3034479 - RNA, 19 nt, Artificial Sequence
  Description of Artificial Sequence: Synthetic oligonucleotide
ugagaguggcugcguagau

SEQ ID NO: 3034480 - RNA, 19 nt, Artificial Sequence
  Description of Artificial Sequence: Synthetic oligonucleotide
aggugaagcucuugccaca

SEQ ID NO: 3034481 - RNA, 19 nt, Artificial Sequence
  Description of Artificial Sequence: Synthetic oligonucleotide
aagccacauaaggcagagg

SEQ ID NO: 3034482 - RNA, 19 nt, Artificial Sequence
  Description of Artificial Sequence: Synthetic oligonucleotide
ucaaguuggccaggcgugu

SEQ ID NO: 3034483 - RNA, 19 nt, Artificial Sequence
  Description of Artificial Sequence: Synthetic oligonucleotide
cugucaaguuggccaggcg

SEQ ID NO: 3034484 - RNA, 19 nt, Artificial Sequence
  Description of Artificial Sequence: Synthetic oligonucleotide
ugcucaccugaaugcacac

SEQ ID NO: 3034485 - RNA, 19 nt, Artificial Sequence
  Description of Artificial Sequence: Synthetic oligonucleotide
ugcguagaugucguaggaa

SEQ ID NO: 3034486 - RNA, 19 nt, Artificial Sequence
  Description of Artificial Sequence: Synthetic oligonucleotide
agaggaggcugagcgggcg

SEQ ID NO: 3034487 - RNA, 19 nt, Artificial Sequence
  Description of Artificial Sequence: Synthetic oligonucleotide
cuggugcacugucaaguug

SEQ ID NO: 3034488 - RNA, 19 nt, Artificial Sequence
  Description of Artificial Sequence: Synthetic oligonucleotide
aggagacuugcagaugacu

SEQ ID NO: 3034489 - RNA, 19 nt, Artificial Sequence
  Description of Artificial Sequence: Synthetic oligonucleotide
gcacugucaaguuggccag

SEQ ID NO: 3034490 - RNA, 19 nt, Artificial Sequence
  Description of Artificial Sequence: Synthetic oligonucleotide
aacgcuugucacacugggu

SEQ ID NO: 3034491 - RNA, 19 nt, Artificial Sequence
  Description of Artificial Sequence: Synthetic oligonucleotide
ugguggcgcaccagccagg

SEQ ID NO: 3034492 - RNA, 19 nt, Artificial Sequence
  Description of Artificial Sequence: Synthetic oligonucleotide
guagaugucguaggaaacu

SEQ ID NO: 3034493 - RNA, 19 nt, Artificial Sequence
  Description of Artificial Sequence: Synthetic oligonucleotide
ggguacacuggaaagcgug

SEQ ID NO: 3034494 - RNA, 19 nt, Artificial Sequence
  Description of Artificial Sequence: Synthetic oligonucleotide
ugcagaugacucacagcuu

SEQ ID NO: 3034495 - RNA, 19 nt, Artificial Sequence
  Description of Artificial Sequence: Synthetic oligonucleotide
agaugacucacagcuuggu

SEQ ID NO: 3034496 - RNA, 19 nt, Artificial Sequence
  Description of Artificial Sequence: Synthetic oligonucleotide
auguuccaccaguguggac

SEQ ID NO: 3034497 - RNA, 19 nt, Artificial Sequence
  Description of Artificial Sequence: Synthetic oligonucleotide
ugagccacacuggguacac

SEQ ID NO: 3034498 - RNA, 19 nt, Artificial Sequence
  Description of Artificial Sequence: Synthetic oligonucleotide
caggcgugugaaacgcuug

SEQ ID NO: 3034499 - RNA, 19 nt, Artificial Sequence
  Description of Artificial Sequence: Synthetic oligonucleotide
accuuuaaggagacuugca

SEQ ID NO: 3034500 - RNA, 19 nt, Artificial Sequence
  Description of Artificial Sequence: Synthetic oligonucleotide
uccugagaguggcugcgua

SEQ ID NO: 3034501 - RNA, 19 nt, Artificial Sequence
  Description of Artificial Sequence: Synthetic oligonucleotide
cacuggaaagcgugcucac

SEQ ID NO: 3034502 - RNA, 19 nt, Artificial Sequence
  Description of Artificial Sequence: Synthetic oligonucleotide
gguacacuggaaagcgugc

SEQ ID NO: 3034503 - RNA, 19 nt, Artificial Sequence
  Description of Artificial Sequence: Synthetic oligonucleotide
gcguagaugucguaggaaa

SEQ ID NO: 3034504 - RNA, 19 nt, Artificial Sequence
  Description of Artificial Sequence: Synthetic oligonucleotide
cuggaaagcgugcucaccu

SEQ ID NO: 3034505 - RNA, 19 nt, Artificial Sequence
  Description of Artificial Sequence: Synthetic oligonucleotide
gcaugagccacacugggua

SEQ ID NO: 3034506 - RNA, 19 nt, Artificial Sequence
  Description of Artificial Sequence: Synthetic oligonucleotide
ggcagaggaggcugagcgg

SEQ ID NO: 3034507 - RNA, 19 nt, Artificial Sequence
  Description of Artificial Sequence: Synthetic oligonucleotide
cgugugaaacgcuugucac

SEQ ID NO: 3034508 - RNA, 19 nt, Artificial Sequence
  Description of Artificial Sequence: Synthetic oligonucleotide
ggcugcguagaugucguag

SEQ ID NO: 3034509 - RNA, 19 nt, Artificial Sequence
  Description of Artificial Sequence: Synthetic oligonucleotide
gcgugugaaacgcuuguca

SEQ ID NO: 3034510 - RNA, 19 nt, Artificial Sequence
  Description of Artificial Sequence: Synthetic oligonucleotide
ugggugcauggaaaugguu

SEQ ID NO: 3034511 - RNA, 19 nt, Artificial Sequence
  Description of Artificial Sequence: Synthetic oligonucleotide
acaagccacauaaggcaga

SEQ ID NO: 3034512 - RNA, 19 nt, Artificial Sequence
  Description of Artificial Sequence: Synthetic oligonucleotide
uugucacacugggugcaug

SEQ ID NO: 3034513 - RNA, 19 nt, Artificial Sequence
  Description of Artificial Sequence: Synthetic oligonucleotide
guaggaaacugggcuugug

SEQ ID NO: 3034514 - RNA, 19 nt, Artificial Sequence
  Description of Artificial Sequence: Synthetic oligonucleotide
ggcugcaccuuuaaggaga

SEQ ID NO: 3034515 - RNA, 19 nt, Artificial Sequence
  Description of Artificial Sequence: Synthetic oligonucleotide
ggagcgacaggugaagcuc

SEQ ID NO: 3034516 - RNA, 19 nt, Artificial Sequence
  Description of Artificial Sequence: Synthetic oligonucleotide
gaaagcgugcucaccugaa

SEQ ID NO: 3034517 - RNA, 19 nt, Artificial Sequence
  Description of Artificial Sequence: Synthetic oligonucleotide
ggaaagcgugcucaccuga

SEQ ID NO: 3034518 - RNA, 19 nt, Artificial Sequence
  Description of Artificial Sequence: Synthetic oligonucleotide
acugggcuugugcgugaag

SEQ ID NO: 3034519 - RNA, 19 nt, Artificial Sequence
  Description of Artificial Sequence: Synthetic oligonucleotide
cagaggaggcugagcgggc

SEQ ID NO: 3034520 - RNA, 19 nt, Artificial Sequence
  Description of Artificial Sequence: Synthetic oligonucleotide
cugagaguggcugcguaga

SEQ ID NO: 3034521 - RNA, 19 nt, Artificial Sequence
  Description of Artificial Sequence: Synthetic oligonucleotide
ccugagaguggcugcguag

SEQ ID NO: 3034522 - RNA, 19 nt, Artificial Sequence
  Description of Artificial Sequence: Synthetic oligonucleotide
cugagcgggcgugacuacc

SEQ ID NO: 3034523 - RNA, 19 nt, Artificial Sequence
  Description of Artificial Sequence: Synthetic oligonucleotide
augagccacacuggguaca

SEQ ID NO: 3034524 - RNA, 19 nt, Artificial Sequence
  Description of Artificial Sequence: Synthetic oligonucleotide
ggcgcaccagccaggagcg

SEQ ID NO: 3034525 - RNA, 19 nt, Artificial Sequence
  Description of Artificial Sequence: Synthetic oligonucleotide
cacagguaaagcgcuucuc

SEQ ID NO: 3034526 - RNA, 19 nt, Artificial Sequence
  Description of Artificial Sequence: Synthetic oligonucleotide
ugugugcgccuauguucca

SEQ ID NO: 3034527 - RNA, 19 nt, Artificial Sequence
  Description of Artificial Sequence: Synthetic oligonucleotide
cguagaugucguaggaaac

SEQ ID NO: 3034528 - RNA, 19 nt, Artificial Sequence
  Description of Artificial Sequence: Synthetic oligonucleotide
cacucuggugcacugucaa

SEQ ID NO: 3034529 - RNA, 19 nt, Artificial Sequence
  Description of Artificial Sequence: Synthetic oligonucleotide
gugcucaccugaaugcaca

SEQ ID NO: 3034530 - RNA, 19 nt, Artificial Sequence
  Description of Artificial Sequence: Synthetic oligonucleotide
cagguaaagcgcuucuccu

SEQ ID NO: 3034531 - RNA, 19 nt, Artificial Sequence
  Description of Artificial Sequence: Synthetic oligonucleotide
gugcgugaagcaugagcca

SEQ ID NO: 3034532 - RNA, 19 nt, Artificial Sequence
  Description of Artificial Sequence: Synthetic oligonucleotide
agcgggcgugacuacccug

SEQ ID NO: 3034533 - RNA, 19 nt, Artificial Sequence
  Description of Artificial Sequence: Synthetic oligonucleotide
cugcguagaugucguagga

SEQ ID NO: 3034534 - RNA, 19 nt, Artificial Sequence
  Description of Artificial Sequence: Synthetic oligonucleotide
ggcuugugcgugaagcaug

SEQ ID NO: 3034535 - RNA, 19 nt, Artificial Sequence
  Description of Artificial Sequence: Synthetic oligonucleotide
caggagcgacaggugaagc

SEQ ID NO: 3034536 - RNA, 19 nt, Artificial Sequence
  Description of Artificial Sequence: Synthetic oligonucleotide
gcaccuuuaaggagacuug

SEQ ID NO: 3034537 - RNA, 19 nt, Artificial Sequence
  Description of Artificial Sequence: Synthetic oligonucleotide
cucacagcuuggugagcuc

SEQ ID NO: 3034538 - RNA, 19 nt, Artificial Sequence
  Description of Artificial Sequence: Synthetic oligonucleotide
cgacaggugaagcucuugc

SEQ ID NO: 3034539 - RNA, 19 nt, Artificial Sequence
  Description of Artificial Sequence: Synthetic oligonucleotide
cucuggugcacugucaagu

SEQ ID NO: 3034540 - RNA, 19 nt, Artificial Sequence
  Description of Artificial Sequence: Synthetic oligonucleotide
accagccaggagcgacagg

SEQ ID NO: 3034541 - RNA, 19 nt, Artificial Sequence
  Description of Artificial Sequence: Synthetic oligonucleotide
cacacuggguacacuggaa

SEQ ID NO: 3034542 - RNA, 19 nt, Artificial Sequence
  Description of Artificial Sequence: Synthetic oligonucleotide
caaguuggccaggcgugug

SEQ ID NO: 3034543 - RNA, 19 nt, Artificial Sequence
  Description of Artificial Sequence: Synthetic oligonucleotide
augcacacucuggugcacu

SEQ ID NO: 3034544 - RNA, 19 nt, Artificial Sequence
  Description of Artificial Sequence: Synthetic oligonucleotide
cacugucaaguuggccagg

SEQ ID NO: 3034545 - RNA, 19 nt, Artificial Sequence
  Description of Artificial Sequence: Synthetic oligonucleotide
gcgggcgugacuacccugg

SEQ ID NO: 3034546 - RNA, 19 nt, Artificial Sequence
  Description of Artificial Sequence: Synthetic oligonucleotide
cacacuggccacagguaaa

SEQ ID NO: 3034547 - RNA, 19 nt, Artificial Sequence
  Description of Artificial Sequence: Synthetic oligonucleotide
gacucacagcuuggugagc

SEQ ID NO: 3034548 - RNA, 19 nt, Artificial Sequence
  Description of Artificial Sequence: Synthetic oligonucleotide
gugcacugucaaguuggcc

SEQ ID NO: 3034549 - RNA, 19 nt, Artificial Sequence
  Description of Artificial Sequence: Synthetic oligonucleotide
aacugggcuugugcgugaa

SEQ ID NO: 3034550 - RNA, 19 nt, Artificial Sequence
  Description of Artificial Sequence: Synthetic oligonucleotide
cagccaggagcgacaggug

SEQ ID NO: 3034551 - RNA, 19 nt, Artificial Sequence
  Description of Artificial Sequence: Synthetic oligonucleotide
aguuggccaggcgugugaa

SEQ ID NO: 3034552 - RNA, 19 nt, Artificial Sequence
  Description of Artificial Sequence: Synthetic oligonucleotide
gucguaggaaacugggcuu

SEQ ID NO: 3034553 - RNA, 19 nt, Artificial Sequence
  Description of Artificial Sequence: Synthetic oligonucleotide
ggaaacugggcuugugcgu

SEQ ID NO: 3034554 - RNA, 19 nt, Artificial Sequence
  Description of Artificial Sequence: Synthetic oligonucleotide
cacuggccacagguaaagc

SEQ ID NO: 3034555 - RNA, 19 nt, Artificial Sequence
  Description of Artificial Sequence: Synthetic oligonucleotide
ggccaggcgugugaaacgc

SEQ ID NO: 3034556 - RNA, 19 nt, Artificial Sequence
  Description of Artificial Sequence: Synthetic oligonucleotide
cuugugcgugaagcaugag

SEQ ID NO: 3034557 - RNA, 19 nt, Artificial Sequence
  Description of Artificial Sequence: Synthetic oligonucleotide
caccagccaggagcgacag

SEQ ID NO: 3034558 - RNA, 19 nt, Artificial Sequence
  Description of Artificial Sequence: Synthetic oligonucleotide
gugcgccuauguuccacca

SEQ ID NO: 3034559 - RNA, 19 nt, Artificial Sequence
  Description of Artificial Sequence: Synthetic oligonucleotide
gugugcgccuauguuccac

SEQ ID NO: 3034560 - RNA, 19 nt, Artificial Sequence
  Description of Artificial Sequence: Synthetic oligonucleotide
aggcugagcgggcgugacu

SEQ ID NO: 3034561 - RNA, 19 nt, Artificial Sequence
  Description of Artificial Sequence: Synthetic oligonucleotide
gaggcugagcgggcgugac

SEQ ID NO: 3034562 - RNA, 19 nt, Artificial Sequence
  Description of Artificial Sequence: Synthetic oligonucleotide
ccugaaugcacacucuggu

SEQ ID NO: 3034563 - RNA, 19 nt, Artificial Sequence
  Description of Artificial Sequence: Synthetic oligonucleotide
ggugcacugucaaguuggc

SEQ ID NO: 3034564 - RNA, 19 nt, Artificial Sequence
  Description of Artificial Sequence: Synthetic oligonucleotide
gcuugugcgugaagcauga

SEQ ID NO: 3034565 - RNA, 19 nt, Artificial Sequence
  Description of Artificial Sequence: Synthetic oligonucleotide
cgcuugucacacugggugc

SEQ ID NO: 3034566 - RNA, 19 nt, Artificial Sequence
  Description of Artificial Sequence: Synthetic oligonucleotide
cugggugcauggaaauggu

SEQ ID NO: 3034567 - RNA, 19 nt, Artificial Sequence
  Description of Artificial Sequence: Synthetic oligonucleotide
gcuugucacacugggugca

SEQ ID NO: 3034568 - RNA, 19 nt, Artificial Sequence
  Description of Artificial Sequence: Synthetic oligonucleotide
ccaggagcgacaggugaag

SEQ ID NO: 3034569 - RNA, 19 nt, Artificial Sequence
  Description of Artificial Sequence: Synthetic oligonucleotide
gagcgacaggugaagcucu

SEQ ID NO: 3034570 - RNA, 19 nt, Artificial Sequence
  Description of Artificial Sequence: Synthetic oligonucleotide
gcugcaccuuuaaggagac

SEQ ID NO: 3034571 - RNA, 19 nt, Artificial Sequence
  Description of Artificial Sequence: Synthetic oligonucleotide
gcgugacuacccugguggc

SEQ ID NO: 3034572 - RNA, 19 nt, Artificial Sequence
  Description of Artificial Sequence: Synthetic oligonucleotide
cgugcucaccugaaugcac

SEQ ID NO: 3034573 - RNA, 19 nt, Artificial Sequence
  Description of Artificial Sequence: Synthetic oligonucleotide
gggugcauggaaaugguuu

SEQ ID NO: 3034574 - RNA, 19 nt, Artificial Sequence
  Description of Artificial Sequence: Synthetic oligonucleotide
guuggccaggcgugugaaa

SEQ ID NO: 3034575 - RNA, 19 nt, Artificial Sequence
  Description of Artificial Sequence: Synthetic oligonucleotide
gggcgugacuacccuggug

SEQ ID NO: 3034576 - RNA, 19 nt, Artificial Sequence
  Description of Artificial Sequence: Synthetic oligonucleotide
gugcauggaaaugguuucu

SEQ ID NO: 3034577 - RNA, 19 nt, Artificial Sequence
  Description of Artificial Sequence: Synthetic oligonucleotide
gccacagguaaagcgcuuc

SEQ ID NO: 3034578 - RNA, 19 nt, Artificial Sequence
  Description of Artificial Sequence: Synthetic oligonucleotide
cuacccugguggcgcacca

SEQ ID NO: 3034579 - RNA, 19 nt, Artificial Sequence
  Description of Artificial Sequence: Synthetic oligonucleotide
gcgccuauguuccaccagu

SEQ ID NO: 3034580 - RNA, 19 nt, Artificial Sequence
  Description of Artificial Sequence: Synthetic oligonucleotide
guggcgcaccagccaggag

SEQ ID NO: 3034581 - RNA, 19 nt, Artificial Sequence
  Description of Artificial Sequence: Synthetic oligonucleotide
guggcugcguagaugucgu

SEQ ID NO: 3034582 - RNA, 19 nt, Artificial Sequence
  Description of Artificial Sequence: Synthetic oligonucleotide
ggcugagcgggcgugacua

SEQ ID NO: 3034583 - RNA, 19 nt, Artificial Sequence
  Description of Artificial Sequence: Synthetic oligonucleotide
cgugacuacccugguggcg

SEQ ID NO: 3034584 - RNA, 19 nt, Artificial Sequence
  Description of Artificial Sequence: Synthetic oligonucleotide
gaggaggcugagcgggcgu

SEQ ID NO: 3034585 - RNA, 19 nt, Artificial Sequence
  Description of Artificial Sequence: Synthetic oligonucleotide
gacuacccugguggcgcac

SEQ ID NO: 3034586 - RNA, 19 nt, Artificial Sequence
  Description of Artificial Sequence: Synthetic oligonucleotide
ggcgugugaaacgcuuguc

SEQ ID NO: 3034587 - RNA, 19 nt, Artificial Sequence
  Description of Artificial Sequence: Synthetic oligonucleotide
gugaaacgcuugucacacu

SEQ ID NO: 3034588 - RNA, 19 nt, Artificial Sequence
  Description of Artificial Sequence: Synthetic oligonucleotide
gaguggcugcguagauguc

SEQ ID NO: 3034589 - RNA, 19 nt, Artificial Sequence
  Description of Artificial Sequence: Synthetic oligonucleotide
gccuauguuccaccagugu

SEQ ID NO: 3034590 - RNA, 19 nt, Artificial Sequence
  Description of Artificial Sequence: Synthetic oligonucleotide
uggcugcguagaugucgua

SEQ ID NO: 3034591 - RNA, 19 nt, Artificial Sequence
  Description of Artificial Sequence: Synthetic oligonucleotide
gguggcgcaccagccagga

SEQ ID NO: 3034592 - RNA, 19 nt, Artificial Sequence
  Description of Artificial Sequence: Synthetic oligonucleotide
cgccuauguuccaccagug

SEQ ID NO: 3034593 - RNA, 19 nt, Artificial Sequence
  Description of Artificial Sequence: Synthetic oligonucleotide
gcgacaggugaagcucuug

SEQ ID NO: 3034594 - RNA, 19 nt, Artificial Sequence
  Description of Artificial Sequence: Synthetic oligonucleotide
gagcgggcgugacuacccu

SEQ ID NO: 3034595 - RNA, 19 nt, Artificial Sequence
  Description of Artificial Sequence: Synthetic oligonucleotide
gcgugcucaccugaaugca

SEQ ID NO: 3034596 - RNA, 19 nt, Artificial Sequence
  Description of Artificial Sequence: Synthetic oligonucleotide
ccugguggcgcaccagcca

SEQ ID NO: 3034597 - RNA, 19 nt, Artificial Sequence
  Description of Artificial Sequence: Synthetic oligonucleotide
gcugagcgggcgugacuac

SEQ ID NO: 3034598 - RNA, 19 nt, Artificial Sequence
  Description of Artificial Sequence: Synthetic oligonucleotide
gcgcuucuccugagagugg

SEQ ID NO: 3034599 - RNA, 19 nt, Artificial Sequence
  Description of Artificial Sequence: Synthetic oligonucleotide
gccaggagcgacaggugaa

SEQ ID NO: 3034600 - RNA, 19 nt, Artificial Sequence
  Description of Artificial Sequence: Synthetic oligonucleotide
cucuucucacaagccacau

SEQ ID NO: 3034601 - RNA, 19 nt, Artificial Sequence
  Description of Artificial Sequence: Synthetic oligonucleotide
cacagcuuggugagcucuu

SEQ ID NO: 3034602 - RNA, 19 nt, Artificial Sequence
  Description of Artificial Sequence: Synthetic oligonucleotide
cgcaccagccaggagcgac

SEQ ID NO: 3034603 - RNA, 19 nt, Artificial Sequence
  Description of Artificial Sequence: Synthetic oligonucleotide
ggaggcugagcgggcguga

SEQ ID NO: 3034604 - RNA, 19 nt, Artificial Sequence
  Description of Artificial Sequence: Synthetic oligonucleotide
cuugucacacugggugcau

SEQ ID NO: 3034605 - RNA, 19 nt, Artificial Sequence
  Description of Artificial Sequence: Synthetic oligonucleotide
gggcuugugcgugaagcau

SEQ ID NO: 3034606 - RNA, 19 nt, Artificial Sequence
  Description of Artificial Sequence: Synthetic oligonucleotide
ccgugugugugcgccuaug

SEQ ID NO: 3034607 - RNA, 19 nt, Artificial Sequence
  Description of Artificial Sequence: Synthetic oligonucleotide
ccacagguaaagcgcuucu

SEQ ID NO: 3034608 - RNA, 19 nt, Artificial Sequence
  Description of Artificial Sequence: Synthetic oligonucleotide
gcucaccugaaugcacacu

SEQ ID NO: 3034609 - RNA, 19 nt, Artificial Sequence
  Description of Artificial Sequence: Synthetic oligonucleotide
ccaggcgugugaaacgcuu

SEQ ID NO: 3034610 - RNA, 19 nt, Artificial Sequence
  Description of Artificial Sequence: Synthetic oligonucleotide
gcacacucuggugcacugu

SEQ ID NO: 3034611 - RNA, 19 nt, Artificial Sequence
  Description of Artificial Sequence: Synthetic oligonucleotide
gcuucuccugagaguggcu

SEQ ID NO: 3034612 - RNA, 19 nt, Artificial Sequence
  Description of Artificial Sequence: Synthetic oligonucleotide
cugcaccuuuaaggagacu

SEQ ID NO: 3034613 - RNA, 19 nt, Artificial Sequence
  Description of Artificial Sequence: Synthetic oligonucleotide
gccaggcgugugaaacgcu

SEQ ID NO: 3034614 - RNA, 19 nt, Artificial Sequence
  Description of Artificial Sequence: Synthetic oligonucleotide
ggccacagguaaagcgcuu

SEQ ID NO: 3034615 - RNA, 19 nt, Artificial Sequence
  Description of Artificial Sequence: Synthetic oligonucleotide
gcgcaccagccaggagcga

SEQ ID NO: 3034616 - RNA, 19 nt, Artificial Sequence
  Description of Artificial Sequence: Synthetic oligonucleotide
cccgugugugugcgccuau

SEQ ID NO: 3034617 - RNA, 19 nt, Artificial Sequence
  Description of Artificial Sequence: Synthetic oligonucleotide
cgggcgugacuacccuggu

SEQ ID NO: 3034618 - RNA, 19 nt, Artificial Sequence
  Description of Artificial Sequence: Synthetic oligonucleotide
aauaacagaauuuagcaag

SEQ ID NO: 3034619 - RNA, 19 nt, Artificial Sequence
  Description of Artificial Sequence: Synthetic oligonucleotide
ugaacacucauuuugaugg

SEQ ID NO: 3034620 - RNA, 19 nt, Artificial Sequence
  Description of Artificial Sequence: Synthetic oligonucleotide
aagaguauaaaucaagugu

SEQ ID NO: 3034621 - RNA, 19 nt, Artificial Sequence
  Description of Artificial Sequence: Synthetic oligonucleotide
uuuaacuuaaaccuuugag

SEQ ID NO: 3034622 - RNA, 19 nt, Artificial Sequence
  Description of Artificial Sequence: Synthetic oligonucleotide
uuuugaauuacccagucug

SEQ ID NO: 3034623 - RNA, 19 nt, Artificial Sequence
  Description of Artificial Sequence: Synthetic oligonucleotide
aaugguuuuauuugaaaug

SEQ ID NO: 3034624 - RNA, 19 nt, Artificial Sequence
  Description of Artificial Sequence: Synthetic oligonucleotide
aauguguaucacaagaagc

SEQ ID NO: 3034625 - RNA, 19 nt, Artificial Sequence
  Description of Artificial Sequence: Synthetic oligonucleotide
uauguaaugccacagguug

SEQ ID NO: 3034626 - RNA, 19 nt, Artificial Sequence
  Description of Artificial Sequence: Synthetic oligonucleotide
acagaauuuagcaagaaac

SEQ ID NO: 3034627 - RNA, 19 nt, Artificial Sequence
  Description of Artificial Sequence: Synthetic oligonucleotide
aguguuuugaauuacccag

SEQ ID NO: 3034628 - RNA, 19 nt, Artificial Sequence
  Description of Artificial Sequence: Synthetic oligonucleotide
auaguauggagucuuauuc

SEQ ID NO: 3034629 - RNA, 19 nt, Artificial Sequence
  Description of Artificial Sequence: Synthetic oligonucleotide
auuuugauggucuagccuc

SEQ ID NO: 3034630 - RNA, 19 nt, Artificial Sequence
  Description of Artificial Sequence: Synthetic oligonucleotide
aacaauguguaucacaaga

SEQ ID NO: 3034631 - RNA, 19 nt, Artificial Sequence
  Description of Artificial Sequence: Synthetic oligonucleotide
augagaaauauguaaugcc

SEQ ID NO: 3034632 - RNA, 19 nt, Artificial Sequence
  Description of Artificial Sequence: Synthetic oligonucleotide
uuaacuuaaaccuuugagu

SEQ ID NO: 3034633 - RNA, 19 nt, Artificial Sequence
  Description of Artificial Sequence: Synthetic oligonucleotide
uaacuuaaaccuuugagug

SEQ ID NO: 3034634 - RNA, 19 nt, Artificial Sequence
  Description of Artificial Sequence: Synthetic oligonucleotide
aaauauguaaugccacagg

SEQ ID NO: 3034635 - RNA, 19 nt, Artificial Sequence
  Description of Artificial Sequence: Synthetic oligonucleotide
aauauguaaugccacaggu

SEQ ID NO: 3034636 - RNA, 19 nt, Artificial Sequence
  Description of Artificial Sequence: Synthetic oligonucleotide
aagcauaugacaaacaucu

SEQ ID NO: 3034637 - RNA, 19 nt, Artificial Sequence
  Description of Artificial Sequence: Synthetic oligonucleotide
uaucacaagaagcauauga

SEQ ID NO: 3034638 - RNA, 19 nt, Artificial Sequence
  Description of Artificial Sequence: Synthetic oligonucleotide
ucugaaguaauucucuuug

SEQ ID NO: 3034639 - RNA, 19 nt, Artificial Sequence
  Description of Artificial Sequence: Synthetic oligonucleotide
agaauuuagcaagaaaccc

SEQ ID NO: 3034640 - RNA, 19 nt, Artificial Sequence
  Description of Artificial Sequence: Synthetic oligonucleotide
augacaaacaucucaagag

SEQ ID NO: 3034641 - RNA, 19 nt, Artificial Sequence
  Description of Artificial Sequence: Synthetic oligonucleotide
aauuuagcaagaaacccac

SEQ ID NO: 3034642 - RNA, 19 nt, Artificial Sequence
  Description of Artificial Sequence: Synthetic oligonucleotide
uuugaaauguuugagaaaa

SEQ ID NO: 3034643 - RNA, 19 nt, Artificial Sequence
  Description of Artificial Sequence: Synthetic oligonucleotide
cuuuguuaccugaaaaugg

SEQ ID NO: 3034644 - RNA, 19 nt, Artificial Sequence
  Description of Artificial Sequence: Synthetic oligonucleotide
uuuauuugaaauguuugag

SEQ ID NO: 3034645 - RNA, 19 nt, Artificial Sequence
  Description of Artificial Sequence: Synthetic oligonucleotide
aaaugguuuuauuugaaau

SEQ ID NO: 3034646 - RNA, 19 nt, Artificial Sequence
  Description of Artificial Sequence: Synthetic oligonucleotide
uauuugaaauguuugagaa

SEQ ID NO: 3034647 - RNA, 19 nt, Artificial Sequence
  Description of Artificial Sequence: Synthetic oligonucleotide
uauuccaaagucuaaacuc

SEQ ID NO: 3034648 - RNA, 19 nt, Artificial Sequence
  Description of Artificial Sequence: Synthetic oligonucleotide
uaugacaaacaucucaaga

SEQ ID NO: 3034649 - RNA, 19 nt, Artificial Sequence
  Description of Artificial Sequence: Synthetic oligonucleotide
aagaaacccacauugcaug

SEQ ID NO: 3034650 - RNA, 19 nt, Artificial Sequence
  Description of Artificial Sequence: Synthetic oligonucleotide
cugaaaaugguuuuauuug

SEQ ID NO: 3034651 - RNA, 19 nt, Artificial Sequence
  Description of Artificial Sequence: Synthetic oligonucleotide
uuauuugaaauguuugaga

SEQ ID NO: 3034652 - RNA, 19 nt, Artificial Sequence
  Description of Artificial Sequence: Synthetic oligonucleotide
auacugaacacucauuuug

SEQ ID NO: 3034653 - RNA, 19 nt, Artificial Sequence
  Description of Artificial Sequence: Synthetic oligonucleotide
ucaagaguauaaaucaagu

SEQ ID NO: 3034654 - RNA, 19 nt, Artificial Sequence
  Description of Artificial Sequence: Synthetic oligonucleotide
aguaauucucuuuguuacc

SEQ ID NO: 3034655 - RNA, 19 nt, Artificial Sequence
  Description of Artificial Sequence: Synthetic oligonucleotide
aaaacaauguguaucacaa

SEQ ID NO: 3034656 - RNA, 19 nt, Artificial Sequence
  Description of Artificial Sequence: Synthetic oligonucleotide
ugaaaaugguuuuauuuga

SEQ ID NO: 3034657 - RNA, 19 nt, Artificial Sequence
  Description of Artificial Sequence: Synthetic oligonucleotide
uguuguauacugaacacuc

SEQ ID NO: 3034658 - RNA, 19 nt, Artificial Sequence
  Description of Artificial Sequence: Synthetic oligonucleotide
uuuguuaccugaaaauggu

SEQ ID NO: 3034659 - RNA, 19 nt, Artificial Sequence
  Description of Artificial Sequence: Synthetic oligonucleotide
cagaauuuagcaagaaacc

SEQ ID NO: 3034660 - RNA, 19 nt, Artificial Sequence
  Description of Artificial Sequence: Synthetic oligonucleotide
gaaguaacgguaugcuucg

SEQ ID NO: 3034661 - RNA, 19 nt, Artificial Sequence
  Description of Artificial Sequence: Synthetic oligonucleotide
agaaguaacgguaugcuuc

SEQ ID NO: 3034662 - RNA, 19 nt, Artificial Sequence
  Description of Artificial Sequence: Synthetic oligonucleotide
uguaucacaagaagcauau

SEQ ID NO: 3034663 - RNA, 19 nt, Artificial Sequence
  Description of Artificial Sequence: Synthetic oligonucleotide
uuauuccaaagucuaaacu

SEQ ID NO: 3034664 - RNA, 19 nt, Artificial Sequence
  Description of Artificial Sequence: Synthetic oligonucleotide
acuuguuuaacuaauaaaa

SEQ ID NO: 3034665 - RNA, 19 nt, Artificial Sequence
  Description of Artificial Sequence: Synthetic oligonucleotide
ugugugguuguuuuguuug

SEQ ID NO: 3034666 - RNA, 19 nt, Artificial Sequence
  Description of Artificial Sequence: Synthetic oligonucleotide
cucaagaguauaaaucaag

SEQ ID NO: 3034667 - RNA, 19 nt, Artificial Sequence
  Description of Artificial Sequence: Synthetic oligonucleotide
caucucaagaguauaaauc

SEQ ID NO: 3034668 - RNA, 19 nt, Artificial Sequence
  Description of Artificial Sequence: Synthetic oligonucleotide
gaaauauguaaugccacag

SEQ ID NO: 3034669 - RNA, 19 nt, Artificial Sequence
  Description of Artificial Sequence: Synthetic oligonucleotide
ucuuuguuaccugaaaaug

SEQ ID NO: 3034670 - RNA, 19 nt, Artificial Sequence
  Description of Artificial Sequence: Synthetic oligonucleotide
uuauuuguaguacuuguuu

SEQ ID NO: 3034671 - RNA, 19 nt, Artificial Sequence
  Description of Artificial Sequence: Synthetic oligonucleotide
uguaguacuuguuuaacua

SEQ ID NO: 3034672 - RNA, 19 nt, Artificial Sequence
  Description of Artificial Sequence: Synthetic oligonucleotide
aaaccuuugaguguuuuga

SEQ ID NO: 3034673 - RNA, 19 nt, Artificial Sequence
  Description of Artificial Sequence: Synthetic oligonucleotide
ugacaaacaucucaagagu

SEQ ID NO: 3034674 - RNA, 19 nt, Artificial Sequence
  Description of Artificial Sequence: Synthetic oligonucleotide
caugagaaauauguaaugc

SEQ ID NO: 3034675 - RNA, 19 nt, Artificial Sequence
  Description of Artificial Sequence: Synthetic oligonucleotide
ugcaugagaaauauguaau

SEQ ID NO: 3034676 - RNA, 19 nt, Artificial Sequence
  Description of Artificial Sequence: Synthetic oligonucleotide
aauaguauggagucuuauu

SEQ ID NO: 3034677 - RNA, 19 nt, Artificial Sequence
  Description of Artificial Sequence: Synthetic oligonucleotide
ucacaagaagcauaugaca

SEQ ID NO: 3034678 - RNA, 19 nt, Artificial Sequence
  Description of Artificial Sequence: Synthetic oligonucleotide
aucacaagaagcauaugac

SEQ ID NO: 3034679 - RNA, 19 nt, Artificial Sequence
  Description of Artificial Sequence: Synthetic oligonucleotide
agaagcauaugacaaacau

SEQ ID NO: 3034680 - RNA, 19 nt, Artificial Sequence
  Description of Artificial Sequence: Synthetic oligonucleotide
uugcaugagaaauauguaa

SEQ ID NO: 3034681 - RNA, 19 nt, Artificial Sequence
  Description of Artificial Sequence: Synthetic oligonucleotide
ugaauuacccagucugaag

SEQ ID NO: 3034682 - RNA, 19 nt, Artificial Sequence
  Description of Artificial Sequence: Synthetic oligonucleotide
uuugaauuacccagucuga

SEQ ID NO: 3034683 - RNA, 19 nt, Artificial Sequence
  Description of Artificial Sequence: Synthetic oligonucleotide
aacuuaaaccuuugagugu

SEQ ID NO: 3034684 - RNA, 19 nt, Artificial Sequence
  Description of Artificial Sequence: Synthetic oligonucleotide
aacagaauuuagcaagaaa

SEQ ID NO: 3034685 - RNA, 19 nt, Artificial Sequence
  Description of Artificial Sequence: Synthetic oligonucleotide
uaguauggagucuuauucc

SEQ ID NO: 3034686 - RNA, 19 nt, Artificial Sequence
  Description of Artificial Sequence: Synthetic oligonucleotide
aaugccacagguuguuaug

SEQ ID NO: 3034687 - RNA, 19 nt, Artificial Sequence
  Description of Artificial Sequence: Synthetic oligonucleotide
caagaguauaaaucaagug

SEQ ID NO: 3034688 - RNA, 19 nt, Artificial Sequence
  Description of Artificial Sequence: Synthetic oligonucleotide
uuuuaacuuaaaccuuuga

SEQ ID NO: 3034689 - RNA, 19 nt, Artificial Sequence
  Description of Artificial Sequence: Synthetic oligonucleotide
cuuauuccaaagucuaaac

SEQ ID NO: 3034690 - RNA, 19 nt, Artificial Sequence
  Description of Artificial Sequence: Synthetic oligonucleotide
guuugcuuguuguauacug

SEQ ID NO: 3034691 - RNA, 19 nt, Artificial Sequence
  Description of Artificial Sequence: Synthetic oligonucleotide
aaacaauguguaucacaag

SEQ ID NO: 3034692 - RNA, 19 nt, Artificial Sequence
  Description of Artificial Sequence: Synthetic oligonucleotide
caauguguaucacaagaag

SEQ ID NO: 3034693 - RNA, 19 nt, Artificial Sequence
  Description of Artificial Sequence: Synthetic oligonucleotide
uuugcuuguuguauacuga

SEQ ID NO: 3034694 - RNA, 19 nt, Artificial Sequence
  Description of Artificial Sequence: Synthetic oligonucleotide
uugaguguuuugaauuacc

SEQ ID NO: 3034695 - RNA, 19 nt, Artificial Sequence
  Description of Artificial Sequence: Synthetic oligonucleotide
uguuaccugaaaaugguuu

SEQ ID NO: 3034696 - RNA, 19 nt, Artificial Sequence
  Description of Artificial Sequence: Synthetic oligonucleotide
cuuguuguauacugaacac

SEQ ID NO: 3034697 - RNA, 19 nt, Artificial Sequence
  Description of Artificial Sequence: Synthetic oligonucleotide
aguaacgguaugcuucggg

SEQ ID NO: 3034698 - RNA, 19 nt, Artificial Sequence
  Description of Artificial Sequence: Synthetic oligonucleotide
gaauuuagcaagaaaccca

SEQ ID NO: 3034699 - RNA, 19 nt, Artificial Sequence
  Description of Artificial Sequence: Synthetic oligonucleotide
cauugcaugagaaauaugu

SEQ ID NO: 3034700 - RNA, 19 nt, Artificial Sequence
  Description of Artificial Sequence: Synthetic oligonucleotide
aguauggagucuuauucca

SEQ ID NO: 3034701 - RNA, 19 nt, Artificial Sequence
  Description of Artificial Sequence: Synthetic oligonucleotide
augguuuuauuugaaaugu

SEQ ID NO: 3034702 - RNA, 19 nt, Artificial Sequence
  Description of Artificial Sequence: Synthetic oligonucleotide
ucucuuuguuaccugaaaa

SEQ ID NO: 3034703 - RNA, 19 nt, Artificial Sequence
  Description of Artificial Sequence: Synthetic oligonucleotide
uauuuguaguacuuguuua

SEQ ID NO: 3034704 - RNA, 19 nt, Artificial Sequence
  Description of Artificial Sequence: Synthetic oligonucleotide
uacugaacacucauuuuga

SEQ ID NO: 3034705 - RNA, 19 nt, Artificial Sequence
  Description of Artificial Sequence: Synthetic oligonucleotide
uuguauacugaacacucau

SEQ ID NO: 3034706 - RNA, 19 nt, Artificial Sequence
  Description of Artificial Sequence: Synthetic oligonucleotide
ucauuuugauggucuagcc

SEQ ID NO: 3034707 - RNA, 19 nt, Artificial Sequence
  Description of Artificial Sequence: Synthetic oligonucleotide
gaaguaauucucuuuguua

SEQ ID NO: 3034708 - RNA, 19 nt, Artificial Sequence
  Description of Artificial Sequence: Synthetic oligonucleotide
gauggucuagccucccacg

SEQ ID NO: 3034709 - RNA, 19 nt, Artificial Sequence
  Description of Artificial Sequence: Synthetic oligonucleotide
ugaaguaauucucuuuguu

SEQ ID NO: 3034710 - RNA, 19 nt, Artificial Sequence
  Description of Artificial Sequence: Synthetic oligonucleotide
aaacccacauugcaugaga

SEQ ID NO: 3034711 - RNA, 19 nt, Artificial Sequence
  Description of Artificial Sequence: Synthetic oligonucleotide
uuguaguacuuguuuaacu

SEQ ID NO: 3034712 - RNA, 19 nt, Artificial Sequence
  Description of Artificial Sequence: Synthetic oligonucleotide
ucuuauuccaaagucuaaa

SEQ ID NO: 3034713 - RNA, 19 nt, Artificial Sequence
  Description of Artificial Sequence: Synthetic oligonucleotide
uguuuugaauuacccaguc

SEQ ID NO: 3034714 - RNA, 19 nt, Artificial Sequence
  Description of Artificial Sequence: Synthetic oligonucleotide
ugguuguuuuguuugcuug

SEQ ID NO: 3034715 - RNA, 19 nt, Artificial Sequence
  Description of Artificial Sequence: Synthetic oligonucleotide
uuaugugugguuguuuugu

SEQ ID NO: 3034716 - RNA, 19 nt, Artificial Sequence
  Description of Artificial Sequence: Synthetic oligonucleotide
uuuugauggucuagccucc

SEQ ID NO: 3034717 - RNA, 19 nt, Artificial Sequence
  Description of Artificial Sequence: Synthetic oligonucleotide
aacacucauuuugaugguc

SEQ ID NO: 3034718 - RNA, 19 nt, Artificial Sequence
  Description of Artificial Sequence: Synthetic oligonucleotide
cucauuuugauggucuagc

SEQ ID NO: 3034719 - RNA, 19 nt, Artificial Sequence
  Description of Artificial Sequence: Synthetic oligonucleotide
cauaugacaaacaucucaa

SEQ ID NO: 3034720 - RNA, 19 nt, Artificial Sequence
  Description of Artificial Sequence: Synthetic oligonucleotide
uaaaccuuugaguguuuug

SEQ ID NO: 3034721 - RNA, 19 nt, Artificial Sequence
  Description of Artificial Sequence: Synthetic oligonucleotide
auaugacaaacaucucaag

SEQ ID NO: 3034722 - RNA, 19 nt, Artificial Sequence
  Description of Artificial Sequence: Synthetic oligonucleotide
auguguaucacaagaagca

SEQ ID NO: 3034723 - RNA, 19 nt, Artificial Sequence
  Description of Artificial Sequence: Synthetic oligonucleotide
gaauuacccagucugaagu

SEQ ID NO: 3034724 - RNA, 19 nt, Artificial Sequence
  Description of Artificial Sequence: Synthetic oligonucleotide
uggagucuuauuccaaagu

SEQ ID NO: 3034725 - RNA, 19 nt, Artificial Sequence
  Description of Artificial Sequence: Synthetic oligonucleotide
uguuaugugugguuguuuu

SEQ ID NO: 3034726 - RNA, 19 nt, Artificial Sequence
  Description of Artificial Sequence: Synthetic oligonucleotide
ucucaagaguauaaaucaa

SEQ ID NO: 3034727 - RNA, 19 nt, Artificial Sequence
  Description of Artificial Sequence: Synthetic oligonucleotide
cugaacacucauuuugaug

SEQ ID NO: 3034728 - RNA, 19 nt, Artificial Sequence
  Description of Artificial Sequence: Synthetic oligonucleotide
uaguacuuguuuaacuaau

SEQ ID NO: 3034729 - RNA, 19 nt, Artificial Sequence
  Description of Artificial Sequence: Synthetic oligonucleotide
caagaagcauaugacaaac

SEQ ID NO: 3034730 - RNA, 19 nt, Artificial Sequence
  Description of Artificial Sequence: Synthetic oligonucleotide
uauggagucuuauuccaaa

SEQ ID NO: 3034731 - RNA, 19 nt, Artificial Sequence
  Description of Artificial Sequence: Synthetic oligonucleotide
uuuuguuugcuuguuguau

SEQ ID NO: 3034732 - RNA, 19 nt, Artificial Sequence
  Description of Artificial Sequence: Synthetic oligonucleotide
agaguauaaaucaagugua

SEQ ID NO: 3034733 - RNA, 19 nt, Artificial Sequence
  Description of Artificial Sequence: Synthetic oligonucleotide
uuuguuugcuuguuguaua

SEQ ID NO: 3034734 - RNA, 19 nt, Artificial Sequence
  Description of Artificial Sequence: Synthetic oligonucleotide
aacgguaugcuucggguuu

SEQ ID NO: 3034735 - RNA, 19 nt, Artificial Sequence
  Description of Artificial Sequence: Synthetic oligonucleotide
cacaagaagcauaugacaa

SEQ ID NO: 3034736 - RNA, 19 nt, Artificial Sequence
  Description of Artificial Sequence: Synthetic oligonucleotide
uuuguaguacuuguuuaac

SEQ ID NO: 3034737 - RNA, 19 nt, Artificial Sequence
  Description of Artificial Sequence: Synthetic oligonucleotide
uuagcaagaaacccacauu

SEQ ID NO: 3034738 - RNA, 19 nt, Artificial Sequence
  Description of Artificial Sequence: Synthetic oligonucleotide
gaguguuuugaauuaccca

SEQ ID NO: 3034739 - RNA, 19 nt, Artificial Sequence
  Description of Artificial Sequence: Synthetic oligonucleotide
acaucucaagaguauaaau

SEQ ID NO: 3034740 - RNA, 19 nt, Artificial Sequence
  Description of Artificial Sequence: Synthetic oligonucleotide
agcaagaaacccacauugc

SEQ ID NO: 3034741 - RNA, 19 nt, Artificial Sequence
  Description of Artificial Sequence: Synthetic oligonucleotide
auuccaaagucuaaacuca

SEQ ID NO: 3034742 - RNA, 19 nt, Artificial Sequence
  Description of Artificial Sequence: Synthetic oligonucleotide
auggagucuuauuccaaag

SEQ ID NO: 3034743 - RNA, 19 nt, Artificial Sequence
  Description of Artificial Sequence: Synthetic oligonucleotide
gaagcauaugacaaacauc

SEQ ID NO: 3034744 - RNA, 19 nt, Artificial Sequence
  Description of Artificial Sequence: Synthetic oligonucleotide
uuguuguauacugaacacu

SEQ ID NO: 3034745 - RNA, 19 nt, Artificial Sequence
  Description of Artificial Sequence: Synthetic oligonucleotide
auggucuagccucccacgg

SEQ ID NO: 3034746 - RNA, 19 nt, Artificial Sequence
  Description of Artificial Sequence: Synthetic oligonucleotide
aauuacccagucugaagua

SEQ ID NO: 3034747 - RNA, 19 nt, Artificial Sequence
  Description of Artificial Sequence: Synthetic oligonucleotide
uuguuugcuuguuguauac

SEQ ID NO: 3034748 - RNA, 19 nt, Artificial Sequence
  Description of Artificial Sequence: Synthetic oligonucleotide
uguauacugaacacucauu

SEQ ID NO: 3034749 - RNA, 19 nt, Artificial Sequence
  Description of Artificial Sequence: Synthetic oligonucleotide
aacaucucaagaguauaaa

SEQ ID NO: 3034750 - RNA, 19 nt, Artificial Sequence
  Description of Artificial Sequence: Synthetic oligonucleotide
ugauggucuagccucccac

SEQ ID NO: 3034751 - RNA, 19 nt, Artificial Sequence
  Description of Artificial Sequence: Synthetic oligonucleotide
uugcuuguuguauacugaa

SEQ ID NO: 3034752 - RNA, 19 nt, Artificial Sequence
  Description of Artificial Sequence: Synthetic oligonucleotide
uauacugaacacucauuuu

SEQ ID NO: 3034753 - RNA, 19 nt, Artificial Sequence
  Description of Artificial Sequence: Synthetic oligonucleotide
cacagguuguuaugugugg

SEQ ID NO: 3034754 - RNA, 19 nt, Artificial Sequence
  Description of Artificial Sequence: Synthetic oligonucleotide
gcuuguuguauacugaaca

SEQ ID NO: 3034755 - RNA, 19 nt, Artificial Sequence
  Description of Artificial Sequence: Synthetic oligonucleotide
gcauaugacaaacaucuca

SEQ ID NO: 3034756 - RNA, 19 nt, Artificial Sequence
  Description of Artificial Sequence: Synthetic oligonucleotide
uuugaguguuuugaauuac

SEQ ID NO: 3034757 - RNA, 19 nt, Artificial Sequence
  Description of Artificial Sequence: Synthetic oligonucleotide
aaauaguauggagucuuau

SEQ ID NO: 3034758 - RNA, 19 nt, Artificial Sequence
  Description of Artificial Sequence: Synthetic oligonucleotide
aaacaucucaagaguauaa

SEQ ID NO: 3034759 - RNA, 19 nt, Artificial Sequence
  Description of Artificial Sequence: Synthetic oligonucleotide
aaccuuugaguguuuugaa

SEQ ID NO: 3034760 - RNA, 19 nt, Artificial Sequence
  Description of Artificial Sequence: Synthetic oligonucleotide
uucucuuuguuaccugaaa

SEQ ID NO: 3034761 - RNA, 19 nt, Artificial Sequence
  Description of Artificial Sequence: Synthetic oligonucleotide
aguauaaaucaaguguaaa

SEQ ID NO: 3034762 - RNA, 19 nt, Artificial Sequence
  Description of Artificial Sequence: Synthetic oligonucleotide
ggagucuuauuccaaaguc

SEQ ID NO: 3034763 - RNA, 19 nt, Artificial Sequence
  Description of Artificial Sequence: Synthetic oligonucleotide
guacuuguuuaacuaauaa

SEQ ID NO: 3034764 - RNA, 19 nt, Artificial Sequence
  Description of Artificial Sequence: Synthetic oligonucleotide
acuuaaaccuuugaguguu

SEQ ID NO: 3034765 - RNA, 19 nt, Artificial Sequence
  Description of Artificial Sequence: Synthetic oligonucleotide
cuuuauuuguaguacuugu

SEQ ID NO: 3034766 - RNA, 19 nt, Artificial Sequence
  Description of Artificial Sequence: Synthetic oligonucleotide
guuaugugugguuguuuug

SEQ ID NO: 3034767 - RNA, 19 nt, Artificial Sequence
  Description of Artificial Sequence: Synthetic oligonucleotide
ugcuuguuguauacugaac

SEQ ID NO: 3034768 - RNA, 19 nt, Artificial Sequence
  Description of Artificial Sequence: Synthetic oligonucleotide
auaacagaauuuagcaaga

SEQ ID NO: 3034769 - RNA, 19 nt, Artificial Sequence
  Description of Artificial Sequence: Synthetic oligonucleotide
uaaugccacagguuguuau

SEQ ID NO: 3034770 - RNA, 19 nt, Artificial Sequence
  Description of Artificial Sequence: Synthetic oligonucleotide
agaaacccacauugcauga

SEQ ID NO: 3034771 - RNA, 19 nt, Artificial Sequence
  Description of Artificial Sequence: Synthetic oligonucleotide
uugaauuacccagucugaa

SEQ ID NO: 3034772 - RNA, 19 nt, Artificial Sequence
  Description of Artificial Sequence: Synthetic oligonucleotide
guaguacuuguuuaacuaa

SEQ ID NO: 3034773 - RNA, 19 nt, Artificial Sequence
  Description of Artificial Sequence: Synthetic oligonucleotide
gcaugagaaauauguaaug

SEQ ID NO: 3034774 - RNA, 19 nt, Artificial Sequence
  Description of Artificial Sequence: Synthetic oligonucleotide
uguguaucacaagaagcau

SEQ ID NO: 3034775 - RNA, 19 nt, Artificial Sequence
  Description of Artificial Sequence: Synthetic oligonucleotide
agguuguuaugugugguug

SEQ ID NO: 3034776 - RNA, 19 nt, Artificial Sequence
  Description of Artificial Sequence: Synthetic oligonucleotide
guauacugaacacucauuu

SEQ ID NO: 3034777 - RNA, 19 nt, Artificial Sequence
  Description of Artificial Sequence: Synthetic oligonucleotide
ucuagccucccacggagaa

SEQ ID NO: 3034778 - RNA, 19 nt, Artificial Sequence
  Description of Artificial Sequence: Synthetic oligonucleotide
gaaacccacauugcaugag

SEQ ID NO: 3034779 - RNA, 19 nt, Artificial Sequence
  Description of Artificial Sequence: Synthetic oligonucleotide
uuccaaagucuaaacucau

SEQ ID NO: 3034780 - RNA, 19 nt, Artificial Sequence
  Description of Artificial Sequence: Synthetic oligonucleotide
gaaaaugguuuuauuugaa

SEQ ID NO: 3034781 - RNA, 19 nt, Artificial Sequence
  Description of Artificial Sequence: Synthetic oligonucleotide
ucccacggagaaguaacgg

SEQ ID NO: 3034782 - RNA, 19 nt, Artificial Sequence
  Description of Artificial Sequence: Synthetic oligonucleotide
uuacccagucugaaguaau

SEQ ID NO: 3034783 - RNA, 19 nt, Artificial Sequence
  Description of Artificial Sequence: Synthetic oligonucleotide
acucauuuugauggucuag

SEQ ID NO: 3034784 - RNA, 19 nt, Artificial Sequence
  Description of Artificial Sequence: Synthetic oligonucleotide
aagaagcauaugacaaaca

SEQ ID NO: 3034785 - RNA, 19 nt, Artificial Sequence
  Description of Artificial Sequence: Synthetic oligonucleotide
acccagucugaaguaauuc

SEQ ID NO: 3034786 - RNA, 19 nt, Artificial Sequence
  Description of Artificial Sequence: Synthetic oligonucleotide
agucuuauuccaaagucua

SEQ ID NO: 3034787 - RNA, 19 nt, Artificial Sequence
  Description of Artificial Sequence: Synthetic oligonucleotide
accuuugaguguuuugaau

SEQ ID NO: 3034788 - RNA, 19 nt, Artificial Sequence
  Description of Artificial Sequence: Synthetic oligonucleotide
acugaacacucauuuugau

SEQ ID NO: 3034789 - RNA, 19 nt, Artificial Sequence
  Description of Artificial Sequence: Synthetic oligonucleotide
cuuugaguguuuugaauua

SEQ ID NO: 3034790 - RNA, 19 nt, Artificial Sequence
  Description of Artificial Sequence: Synthetic oligonucleotide
gacaaacaucucaagagua

SEQ ID NO: 3034791 - RNA, 19 nt, Artificial Sequence
  Description of Artificial Sequence: Synthetic oligonucleotide
ugguuuuauuugaaauguu

SEQ ID NO: 3034792 - RNA, 19 nt, Artificial Sequence
  Description of Artificial Sequence: Synthetic oligonucleotide
acaauguguaucacaagaa

SEQ ID NO: 3034793 - RNA, 19 nt, Artificial Sequence
  Description of Artificial Sequence: Synthetic oligonucleotide
uccaaagucuaaacucauu

SEQ ID NO: 3034794 - RNA, 19 nt, Artificial Sequence
  Description of Artificial Sequence: Synthetic oligonucleotide
uuguuaccugaaaaugguu

SEQ ID NO: 3034795 - RNA, 19 nt, Artificial Sequence
  Description of Artificial Sequence: Synthetic oligonucleotide
acaaacaucucaagaguau

SEQ ID NO: 3034796 - RNA, 19 nt, Artificial Sequence
  Description of Artificial Sequence: Synthetic oligonucleotide
ugugguuguuuuguuugcu

SEQ ID NO: 3034797 - RNA, 19 nt, Artificial Sequence
  Description of Artificial Sequence: Synthetic oligonucleotide
gcaagaaacccacauugca

SEQ ID NO: 3034798 - RNA, 19 nt, Artificial Sequence
  Description of Artificial Sequence: Synthetic oligonucleotide
acacucauuuugauggucu

SEQ ID NO: 3034799 - RNA, 19 nt, Artificial Sequence
  Description of Artificial Sequence: Synthetic oligonucleotide
agucugaaguaauucucuu

SEQ ID NO: 3034800 - RNA, 19 nt, Artificial Sequence
  Description of Artificial Sequence: Synthetic oligonucleotide
uaacagaauuuagcaagaa

SEQ ID NO: 3034801 - RNA, 19 nt, Artificial Sequence
  Description of Artificial Sequence: Synthetic oligonucleotide
gaguauaaaucaaguguaa

SEQ ID NO: 3034802 - RNA, 19 nt, Artificial Sequence
  Description of Artificial Sequence: Synthetic oligonucleotide
cucccacggagaaguaacg

SEQ ID NO: 3034803 - RNA, 19 nt, Artificial Sequence
  Description of Artificial Sequence: Synthetic oligonucleotide
uugauggucuagccuccca

SEQ ID NO: 3034804 - RNA, 19 nt, Artificial Sequence
  Description of Artificial Sequence: Synthetic oligonucleotide
gugugguuguuuuguuugc

SEQ ID NO: 3034805 - RNA, 19 nt, Artificial Sequence
  Description of Artificial Sequence: Synthetic oligonucleotide
uuaccugaaaaugguuuua

SEQ ID NO: 3034806 - RNA, 19 nt, Artificial Sequence
  Description of Artificial Sequence: Synthetic oligonucleotide
aaaauaguauggagucuua

SEQ ID NO: 3034807 - RNA, 19 nt, Artificial Sequence
  Description of Artificial Sequence: Synthetic oligonucleotide
acggagaaguaacgguaug

SEQ ID NO: 3034808 - RNA, 19 nt, Artificial Sequence
  Description of Artificial Sequence: Synthetic oligonucleotide
ggucuagccucccacggag

SEQ ID NO: 3034809 - RNA, 19 nt, Artificial Sequence
  Description of Artificial Sequence: Synthetic oligonucleotide
uggucuagccucccacgga

SEQ ID NO: 3034810 - RNA, 19 nt, Artificial Sequence
  Description of Artificial Sequence: Synthetic oligonucleotide
uguuugcuuguuguauacu

SEQ ID NO: 3034811 - RNA, 19 nt, Artificial Sequence
  Description of Artificial Sequence: Synthetic oligonucleotide
uaacgguaugcuucggguu

SEQ ID NO: 3034812 - RNA, 19 nt, Artificial Sequence
  Description of Artificial Sequence: Synthetic oligonucleotide
gagucuuauuccaaagucu

SEQ ID NO: 3034813 - RNA, 19 nt, Artificial Sequence
  Description of Artificial Sequence: Synthetic oligonucleotide
ugccacagguuguuaugug

SEQ ID NO: 3034814 - RNA, 19 nt, Artificial Sequence
  Description of Artificial Sequence: Synthetic oligonucleotide
guaauucucuuuguuaccu

SEQ ID NO: 3034815 - RNA, 19 nt, Artificial Sequence
  Description of Artificial Sequence: Synthetic oligonucleotide
uaugugugguuguuuuguu

SEQ ID NO: 3034816 - RNA, 19 nt, Artificial Sequence
  Description of Artificial Sequence: Synthetic oligonucleotide
uaccugaaaaugguuuuau

SEQ ID NO: 3034817 - RNA, 19 nt, Artificial Sequence
  Description of Artificial Sequence: Synthetic oligonucleotide
uuaaaccuuugaguguuuu

SEQ ID NO: 3034818 - RNA, 19 nt, Artificial Sequence
  Description of Artificial Sequence: Synthetic oligonucleotide
guaacgguaugcuucgggu

SEQ ID NO: 3034819 - RNA, 19 nt, Artificial Sequence
  Description of Artificial Sequence: Synthetic oligonucleotide
auuacccagucugaaguaa

SEQ ID NO: 3034820 - RNA, 19 nt, Artificial Sequence
  Description of Artificial Sequence: Synthetic oligonucleotide
uuugauggucuagccuccc

SEQ ID NO: 3034821 - RNA, 19 nt, Artificial Sequence
  Description of Artificial Sequence: Synthetic oligonucleotide
auugcaugagaaauaugua

SEQ ID NO: 3034822 - RNA, 19 nt, Artificial Sequence
  Description of Artificial Sequence: Synthetic oligonucleotide
acagguuguuauguguggu

SEQ ID NO: 3034823 - RNA, 19 nt, Artificial Sequence
  Description of Artificial Sequence: Synthetic oligonucleotide
auauguaaugccacagguu

SEQ ID NO: 3034824 - RNA, 19 nt, Artificial Sequence
  Description of Artificial Sequence: Synthetic oligonucleotide
agcauaugacaaacaucuc

SEQ ID NO: 3034825 - RNA, 19 nt, Artificial Sequence
  Description of Artificial Sequence: Synthetic oligonucleotide
guuuuguuugcuuguugua

SEQ ID NO: 3034826 - RNA, 19 nt, Artificial Sequence
  Description of Artificial Sequence: Synthetic oligonucleotide
aguacuuguuuaacuaaua

SEQ ID NO: 3034827 - RNA, 19 nt, Artificial Sequence
  Description of Artificial Sequence: Synthetic oligonucleotide
guuguauacugaacacuca

SEQ ID NO: 3034828 - RNA, 19 nt, Artificial Sequence
  Description of Artificial Sequence: Synthetic oligonucleotide
cucuuuguuaccugaaaau

SEQ ID NO: 3034829 - RNA, 19 nt, Artificial Sequence
  Description of Artificial Sequence: Synthetic oligonucleotide
ccagucugaaguaauucuc

SEQ ID NO: 3034830 - RNA, 19 nt, Artificial Sequence
  Description of Artificial Sequence: Synthetic oligonucleotide
guuaccugaaaaugguuuu

SEQ ID NO: 3034831 - RNA, 19 nt, Artificial Sequence
  Description of Artificial Sequence: Synthetic oligonucleotide
uacccagucugaaguaauu

SEQ ID NO: 3034832 - RNA, 19 nt, Artificial Sequence
  Description of Artificial Sequence: Synthetic oligonucleotide
aacccacauugcaugagaa

SEQ ID NO: 3034833 - RNA, 19 nt, Artificial Sequence
  Description of Artificial Sequence: Synthetic oligonucleotide
caagaaacccacauugcau

SEQ ID NO: 3034834 - RNA, 19 nt, Artificial Sequence
  Description of Artificial Sequence: Synthetic oligonucleotide
accugaaaaugguuuuauu

SEQ ID NO: 3034835 - RNA, 19 nt, Artificial Sequence
  Description of Artificial Sequence: Synthetic oligonucleotide
cauuuugauggucuagccu

SEQ ID NO: 3034836 - RNA, 19 nt, Artificial Sequence
  Description of Artificial Sequence: Synthetic oligonucleotide
guuuugaauuacccagucu

SEQ ID NO: 3034837 - RNA, 19 nt, Artificial Sequence
  Description of Artificial Sequence: Synthetic oligonucleotide
acccacauugcaugagaaa

SEQ ID NO: 3034838 - RNA, 19 nt, Artificial Sequence
  Description of Artificial Sequence: Synthetic oligonucleotide
augccacagguuguuaugu

SEQ ID NO: 3034839 - RNA, 19 nt, Artificial Sequence
  Description of Artificial Sequence: Synthetic oligonucleotide
ccacagguuguuaugugug

SEQ ID NO: 3034840 - RNA, 19 nt, Artificial Sequence
  Description of Artificial Sequence: Synthetic oligonucleotide
caaacaucucaagaguaua

SEQ ID NO: 3034841 - RNA, 19 nt, Artificial Sequence
  Description of Artificial Sequence: Synthetic oligonucleotide
auguaaugccacagguugu

SEQ ID NO: 3034842 - RNA, 19 nt, Artificial Sequence
  Description of Artificial Sequence: Synthetic oligonucleotide
ccucccacggagaaguaac

SEQ ID NO: 3034843 - RNA, 19 nt, Artificial Sequence
  Description of Artificial Sequence: Synthetic oligonucleotide
uuguuaugugugguuguuu

SEQ ID NO: 3034844 - RNA, 19 nt, Artificial Sequence
  Description of Artificial Sequence: Synthetic oligonucleotide
guguaucacaagaagcaua

SEQ ID NO: 3034845 - RNA, 19 nt, Artificial Sequence
  Description of Artificial Sequence: Synthetic oligonucleotide
gagaaguaacgguaugcuu

SEQ ID NO: 3034846 - RNA, 19 nt, Artificial Sequence
  Description of Artificial Sequence: Synthetic oligonucleotide
caaagucuaaacucauuuu

SEQ ID NO: 3034847 - RNA, 19 nt, Artificial Sequence
  Description of Artificial Sequence: Synthetic oligonucleotide
auucucuuuguuaccugaa

SEQ ID NO: 3034848 - RNA, 19 nt, Artificial Sequence
  Description of Artificial Sequence: Synthetic oligonucleotide
gaacacucauuuugauggu

SEQ ID NO: 3034849 - RNA, 19 nt, Artificial Sequence
  Description of Artificial Sequence: Synthetic oligonucleotide
guaucacaagaagcauaug

SEQ ID NO: 3034850 - RNA, 19 nt, Artificial Sequence
  Description of Artificial Sequence: Synthetic oligonucleotide
gguuuuauuugaaauguuu

SEQ ID NO: 3034851 - RNA, 19 nt, Artificial Sequence
  Description of Artificial Sequence: Synthetic oligonucleotide
gguuguuuuguuugcuugu

SEQ ID NO: 3034852 - RNA, 19 nt, Artificial Sequence
  Description of Artificial Sequence: Synthetic oligonucleotide
cugaaguaauucucuuugu

SEQ ID NO: 3034853 - RNA, 19 nt, Artificial Sequence
  Description of Artificial Sequence: Synthetic oligonucleotide
cuagccucccacggagaag

SEQ ID NO: 3034854 - RNA, 19 nt, Artificial Sequence
  Description of Artificial Sequence: Synthetic oligonucleotide
cacauugcaugagaaauau

SEQ ID NO: 3034855 - RNA, 19 nt, Artificial Sequence
  Description of Artificial Sequence: Synthetic oligonucleotide
gucugaaguaauucucuuu

SEQ ID NO: 3034856 - RNA, 19 nt, Artificial Sequence
  Description of Artificial Sequence: Synthetic oligonucleotide
guauggagucuuauuccaa

SEQ ID NO: 3034857 - RNA, 19 nt, Artificial Sequence
  Description of Artificial Sequence: Synthetic oligonucleotide
gucuuauuccaaagucuaa

SEQ ID NO: 3034858 - RNA, 19 nt, Artificial Sequence
  Description of Artificial Sequence: Synthetic oligonucleotide
guguuuugaauuacccagu

SEQ ID NO: 3034859 - RNA, 19 nt, Artificial Sequence
  Description of Artificial Sequence: Synthetic oligonucleotide
ggagaaguaacgguaugcu

SEQ ID NO: 3034860 - RNA, 19 nt, Artificial Sequence
  Description of Artificial Sequence: Synthetic oligonucleotide
ccaaagucuaaacucauuu

SEQ ID NO: 3034861 - RNA, 19 nt, Artificial Sequence
  Description of Artificial Sequence: Synthetic oligonucleotide
cacucauuuugauggucua

SEQ ID NO: 3034862 - RNA, 19 nt, Artificial Sequence
  Description of Artificial Sequence: Synthetic oligonucleotide
cggagaaguaacgguaugc

SEQ ID NO: 3034863 - RNA, 19 nt, Artificial Sequence
  Description of Artificial Sequence: Synthetic oligonucleotide
gguuguuaugugugguugu

SEQ ID NO: 3034864 - RNA, 19 nt, Artificial Sequence
  Description of Artificial Sequence: Synthetic oligonucleotide
cacggagaaguaacgguau

SEQ ID NO: 3034865 - RNA, 19 nt, Artificial Sequence
  Description of Artificial Sequence: Synthetic oligonucleotide
gugguuguuuuguuugcuu

SEQ ID NO: 3034866 - RNA, 19 nt, Artificial Sequence
  Description of Artificial Sequence: Synthetic oligonucleotide
guuguuaugugugguuguu

SEQ ID NO: 3034867 - RNA, 19 nt, Artificial Sequence
  Description of Artificial Sequence: Synthetic oligonucleotide
ccacggagaaguaacggua

SEQ ID NO: 3034868 - RNA, 19 nt, Artificial Sequence
  Description of Artificial Sequence: Synthetic oligonucleotide
gccacagguuguuaugugu

SEQ ID NO: 3034869 - RNA, 19 nt, Artificial Sequence
  Description of Artificial Sequence: Synthetic oligonucleotide
ccacauugcaugagaaaua

SEQ ID NO: 3034870 - RNA, 19 nt, Artificial Sequence
  Description of Artificial Sequence: Synthetic oligonucleotide
cccacauugcaugagaaau

SEQ ID NO: 3034871 - RNA, 19 nt, Artificial Sequence
  Description of Artificial Sequence: Synthetic oligonucleotide
cagguuguuaugugugguu

SEQ ID NO: 3034872 - RNA, 19 nt, Artificial Sequence
  Description of Artificial Sequence: Synthetic oligonucleotide
acgguaugcuucggguuuu

SEQ ID NO: 3034873 - RNA, 19 nt, Artificial Sequence
  Description of Artificial Sequence: Synthetic oligonucleotide
cuuaaaccuuugaguguuu

SEQ ID NO: 3034874 - RNA, 19 nt, Artificial Sequence
  Description of Artificial Sequence: Synthetic oligonucleotide
gucuagccucccacggaga

SEQ ID NO: 3034875 - RNA, 19 nt, Artificial Sequence
  Description of Artificial Sequence: Synthetic oligonucleotide
cccacggagaaguaacggu

SEQ ID NO: 3034876 - RNA, 19 nt, Artificial Sequence
  Description of Artificial Sequence: Synthetic oligonucleotide
gccucccacggagaaguaa

SEQ ID NO: 3034877 - RNA, 19 nt, Artificial Sequence
  Description of Artificial Sequence: Synthetic oligonucleotide
agccucccacggagaagua

SEQ ID NO: 3034878 - RNA, 19 nt, Artificial Sequence
  Description of Artificial Sequence: Synthetic oligonucleotide
aacauuguaggcuugucag

SEQ ID NO: 3034879 - RNA, 19 nt, Artificial Sequence
  Description of Artificial Sequence: Synthetic oligonucleotide
ggaguguagacccagaggg

SEQ ID NO: 3034880 - RNA, 19 nt, Artificial Sequence
  Description of Artificial Sequence: Synthetic oligonucleotide
ugaagaacaacacagccuu

SEQ ID NO: 3034881 - RNA, 19 nt, Artificial Sequence
  Description of Artificial Sequence: Synthetic oligonucleotide
aagaacaacacagccuugg

SEQ ID NO: 3034882 - RNA, 19 nt, Artificial Sequence
  Description of Artificial Sequence: Synthetic oligonucleotide
uguccaguaccacaggaag

SEQ ID NO: 3034883 - RNA, 19 nt, Artificial Sequence
  Description of Artificial Sequence: Synthetic oligonucleotide
uaccacaggaagcacagcc

SEQ ID NO: 3034884 - RNA, 19 nt, Artificial Sequence
  Description of Artificial Sequence: Synthetic oligonucleotide
uaggguccagccuagaacc

SEQ ID NO: 3034885 - RNA, 19 nt, Artificial Sequence
  Description of Artificial Sequence: Synthetic oligonucleotide
uagaaccuggccuugcagg

SEQ ID NO: 3034886 - RNA, 19 nt, Artificial Sequence
  Description of Artificial Sequence: Synthetic oligonucleotide
acaguccuaggucauaguc

SEQ ID NO: 3034887 - RNA, 19 nt, Artificial Sequence
  Description of Artificial Sequence: Synthetic oligonucleotide
ugaguugacuucugcaucc

SEQ ID NO: 3034888 - RNA, 19 nt, Artificial Sequence
  Description of Artificial Sequence: Synthetic oligonucleotide
uaguccacuguccaguacc

SEQ ID NO: 3034889 - RNA, 19 nt, Artificial Sequence
  Description of Artificial Sequence: Synthetic oligonucleotide
aaccuggccuugcaggagc

SEQ ID NO: 3034890 - RNA, 19 nt, Artificial Sequence
  Description of Artificial Sequence: Synthetic oligonucleotide
cuuauugaaccccuacccc

SEQ ID NO: 3034891 - RNA, 19 nt, Artificial Sequence
  Description of Artificial Sequence: Synthetic oligonucleotide
agggugaagaacaacacag

SEQ ID NO: 3034892 - RNA, 19 nt, Artificial Sequence
  Description of Artificial Sequence: Synthetic oligonucleotide
cugguugucaagagcaggg

SEQ ID NO: 3034893 - RNA, 19 nt, Artificial Sequence
  Description of Artificial Sequence: Synthetic oligonucleotide
aagugcaaagucugaguug

SEQ ID NO: 3034894 - RNA, 19 nt, Artificial Sequence
  Description of Artificial Sequence: Synthetic oligonucleotide
aggaaguccacaucggucu

SEQ ID NO: 3034895 - RNA, 19 nt, Artificial Sequence
  Description of Artificial Sequence: Synthetic oligonucleotide
aguccuaggucauagucca

SEQ ID NO: 3034896 - RNA, 19 nt, Artificial Sequence
  Description of Artificial Sequence: Synthetic oligonucleotide
cauuguaggcuugucaggg

SEQ ID NO: 3034897 - RNA, 19 nt, Artificial Sequence
  Description of Artificial Sequence: Synthetic oligonucleotide
aaguccacaucggucuucc

SEQ ID NO: 3034898 - RNA, 19 nt, Artificial Sequence
  Description of Artificial Sequence: Synthetic oligonucleotide
agugcucaacccuuugcac

SEQ ID NO: 3034899 - RNA, 19 nt, Artificial Sequence
  Description of Artificial Sequence: Synthetic oligonucleotide
cuugucagggacaguaggc

SEQ ID NO: 3034900 - RNA, 19 nt, Artificial Sequence
  Description of Artificial Sequence: Synthetic oligonucleotide
ucugaguugacuucugcau

SEQ ID NO: 3034901 - RNA, 19 nt, Artificial Sequence
  Description of Artificial Sequence: Synthetic oligonucleotide
ugggucagcgaacugguug

SEQ ID NO: 3034902 - RNA, 19 nt, Artificial Sequence
  Description of Artificial Sequence: Synthetic oligonucleotide
ggaagcacagcccaggaag

SEQ ID NO: 3034903 - RNA, 19 nt, Artificial Sequence
  Description of Artificial Sequence: Synthetic oligonucleotide
uccacuggaggucagugcu

SEQ ID NO: 3034904 - RNA, 19 nt, Artificial Sequence
  Description of Artificial Sequence: Synthetic oligonucleotide
aggagcuuggcacugcguc

SEQ ID NO: 3034905 - RNA, 19 nt, Artificial Sequence
  Description of Artificial Sequence: Synthetic oligonucleotide
uaggucauaguccacuguc

SEQ ID NO: 3034906 - RNA, 19 nt, Artificial Sequence
  Description of Artificial Sequence: Synthetic oligonucleotide
ucccgauuuccacuggagg

SEQ ID NO: 3034907 - RNA, 19 nt, Artificial Sequence
  Description of Artificial Sequence: Synthetic oligonucleotide
uaggcgacaggagaggagg

SEQ ID NO: 3034908 - RNA, 19 nt, Artificial Sequence
  Description of Artificial Sequence: Synthetic oligonucleotide
agucugaguugacuucugc

SEQ ID NO: 3034909 - RNA, 19 nt, Artificial Sequence
  Description of Artificial Sequence: Synthetic oligonucleotide
uggaggucagugcucaacc

SEQ ID NO: 3034910 - RNA, 19 nt, Artificial Sequence
  Description of Artificial Sequence: Synthetic oligonucleotide
ggugaagaacaacacagcc

SEQ ID NO: 3034911 - RNA, 19 nt, Artificial Sequence
  Description of Artificial Sequence: Synthetic oligonucleotide
gaacugguugucaagagca

SEQ ID NO: 3034912 - RNA, 19 nt, Artificial Sequence
  Description of Artificial Sequence: Synthetic oligonucleotide
agaacaacacagccuuggg

SEQ ID NO: 3034913 - RNA, 19 nt, Artificial Sequence
  Description of Artificial Sequence: Synthetic oligonucleotide
acauuguaggcuugucagg

SEQ ID NO: 3034914 - RNA, 19 nt, Artificial Sequence
  Description of Artificial Sequence: Synthetic oligonucleotide
gugcucaacccuuugcacg

SEQ ID NO: 3034915 - RNA, 19 nt, Artificial Sequence
  Description of Artificial Sequence: Synthetic oligonucleotide
gcuuauugaaccccuaccc

SEQ ID NO: 3034916 - RNA, 19 nt, Artificial Sequence
  Description of Artificial Sequence: Synthetic oligonucleotide
caguccuaggucauagucc

SEQ ID NO: 3034917 - RNA, 19 nt, Artificial Sequence
  Description of Artificial Sequence: Synthetic oligonucleotide
ugcucaacccuuugcacgc

SEQ ID NO: 3034918 - RNA, 19 nt, Artificial Sequence
  Description of Artificial Sequence: Synthetic oligonucleotide
gacaguaggcgacaggaga

SEQ ID NO: 3034919 - RNA, 19 nt, Artificial Sequence
  Description of Artificial Sequence: Synthetic oligonucleotide
uccacuguccaguaccaca

SEQ ID NO: 3034920 - RNA, 19 nt, Artificial Sequence
  Description of Artificial Sequence: Synthetic oligonucleotide
uccacaucggucuuccgcu

SEQ ID NO: 3034921 - RNA, 19 nt, Artificial Sequence
  Description of Artificial Sequence: Synthetic oligonucleotide
ucagugcucaacccuuugc

SEQ ID NO: 3034922 - RNA, 19 nt, Artificial Sequence
  Description of Artificial Sequence: Synthetic oligonucleotide
uuguaggcuugucagggac

SEQ ID NO: 3034923 - RNA, 19 nt, Artificial Sequence
  Description of Artificial Sequence: Synthetic oligonucleotide
ucauaguccacuguccagu

SEQ ID NO: 3034924 - RNA, 19 nt, Artificial Sequence
  Description of Artificial Sequence: Synthetic oligonucleotide
ugaaccccuaccccaagcu

SEQ ID NO: 3034925 - RNA, 19 nt, Artificial Sequence
  Description of Artificial Sequence: Synthetic oligonucleotide
ucuuccgcuuauugaaccc

SEQ ID NO: 3034926 - RNA, 19 nt, Artificial Sequence
  Description of Artificial Sequence: Synthetic oligonucleotide
uucugcaucccgauuucca

SEQ ID NO: 3034927 - RNA, 19 nt, Artificial Sequence
  Description of Artificial Sequence: Synthetic oligonucleotide
gacccagagggcuuucggg

SEQ ID NO: 3034928 - RNA, 19 nt, Artificial Sequence
  Description of Artificial Sequence: Synthetic oligonucleotide
ugcaucccgauuuccacug

SEQ ID NO: 3034929 - RNA, 19 nt, Artificial Sequence
  Description of Artificial Sequence: Synthetic oligonucleotide
aaccccuaccccaagcuag

SEQ ID NO: 3034930 - RNA, 19 nt, Artificial Sequence
  Description of Artificial Sequence: Synthetic oligonucleotide
cuaggguccagccuagaac

SEQ ID NO: 3034931 - RNA, 19 nt, Artificial Sequence
  Description of Artificial Sequence: Synthetic oligonucleotide
aguaccacaggaagcacag

SEQ ID NO: 3034932 - RNA, 19 nt, Artificial Sequence
  Description of Artificial Sequence: Synthetic oligonucleotide
uauugaaccccuaccccaa

SEQ ID NO: 3034933 - RNA, 19 nt, Artificial Sequence
  Description of Artificial Sequence: Synthetic oligonucleotide
agcacagcccaggaagucc

SEQ ID NO: 3034934 - RNA, 19 nt, Artificial Sequence
  Description of Artificial Sequence: Synthetic oligonucleotide
acuucugcaucccgauuuc

SEQ ID NO: 3034935 - RNA, 19 nt, Artificial Sequence
  Description of Artificial Sequence: Synthetic oligonucleotide
agggcuuucggguccuugg

SEQ ID NO: 3034936 - RNA, 19 nt, Artificial Sequence
  Description of Artificial Sequence: Synthetic oligonucleotide
acugguugucaagagcagg

SEQ ID NO: 3034937 - RNA, 19 nt, Artificial Sequence
  Description of Artificial Sequence: Synthetic oligonucleotide
caaagucugaguugacuuc

SEQ ID NO: 3034938 - RNA, 19 nt, Artificial Sequence
  Description of Artificial Sequence: Synthetic oligonucleotide
aguugacuucugcaucccg

SEQ ID NO: 3034939 - RNA, 19 nt, Artificial Sequence
  Description of Artificial Sequence: Synthetic oligonucleotide
aggucauaguccacugucc

SEQ ID NO: 3034940 - RNA, 19 nt, Artificial Sequence
  Description of Artificial Sequence: Synthetic oligonucleotide
ucggucuuccgcuuauuga

SEQ ID NO: 3034941 - RNA, 19 nt, Artificial Sequence
  Description of Artificial Sequence: Synthetic oligonucleotide
ucagcgaacugguugucaa

SEQ ID NO: 3034942 - RNA, 19 nt, Artificial Sequence
  Description of Artificial Sequence: Synthetic oligonucleotide
aguguagacccagagggcu

SEQ ID NO: 3034943 - RNA, 19 nt, Artificial Sequence
  Description of Artificial Sequence: Synthetic oligonucleotide
auaguccacuguccaguac

SEQ ID NO: 3034944 - RNA, 19 nt, Artificial Sequence
  Description of Artificial Sequence: Synthetic oligonucleotide
accacaggaagcacagccc

SEQ ID NO: 3034945 - RNA, 19 nt, Artificial Sequence
  Description of Artificial Sequence: Synthetic oligonucleotide
agaaccuggccuugcagga

SEQ ID NO: 3034946 - RNA, 19 nt, Artificial Sequence
  Description of Artificial Sequence: Synthetic oligonucleotide
uggagggcugcacaguccu

SEQ ID NO: 3034947 - RNA, 19 nt, Artificial Sequence
  Description of Artificial Sequence: Synthetic oligonucleotide
ggcacugcguccuaagugc

SEQ ID NO: 3034948 - RNA, 19 nt, Artificial Sequence
  Description of Artificial Sequence: Synthetic oligonucleotide
acuguccaguaccacagga

SEQ ID NO: 3034949 - RNA, 19 nt, Artificial Sequence
  Description of Artificial Sequence: Synthetic oligonucleotide
gucuuccgcuuauugaacc

SEQ ID NO: 3034950 - RNA, 19 nt, Artificial Sequence
  Description of Artificial Sequence: Synthetic oligonucleotide
guugucaagagcaggguga

SEQ ID NO: 3034951 - RNA, 19 nt, Artificial Sequence
  Description of Artificial Sequence: Synthetic oligonucleotide
uugaaccccuaccccaagc

SEQ ID NO: 3034952 - RNA, 19 nt, Artificial Sequence
  Description of Artificial Sequence: Synthetic oligonucleotide
cuuugcacgccaguaacug

SEQ ID NO: 3034953 - RNA, 19 nt, Artificial Sequence
  Description of Artificial Sequence: Synthetic oligonucleotide
ugucagggacaguaggcga

SEQ ID NO: 3034954 - RNA, 19 nt, Artificial Sequence
  Description of Artificial Sequence: Synthetic oligonucleotide
guccacaucggucuuccgc

SEQ ID NO: 3034955 - RNA, 19 nt, Artificial Sequence
  Description of Artificial Sequence: Synthetic oligonucleotide
acaguaggcgacaggagag

SEQ ID NO: 3034956 - RNA, 19 nt, Artificial Sequence
  Description of Artificial Sequence: Synthetic oligonucleotide
ucaacccuuugcacgccag

SEQ ID NO: 3034957 - RNA, 19 nt, Artificial Sequence
  Description of Artificial Sequence: Synthetic oligonucleotide
agacccagagggcuuucgg

SEQ ID NO: 3034958 - RNA, 19 nt, Artificial Sequence
  Description of Artificial Sequence: Synthetic oligonucleotide
uccuaagugcaaagucuga

SEQ ID NO: 3034959 - RNA, 19 nt, Artificial Sequence
  Description of Artificial Sequence: Synthetic oligonucleotide
gagguggagggcugcacag

SEQ ID NO: 3034960 - RNA, 19 nt, Artificial Sequence
  Description of Artificial Sequence: Synthetic oligonucleotide
gucauaguccacuguccag

SEQ ID NO: 3034961 - RNA, 19 nt, Artificial Sequence
  Description of Artificial Sequence: Synthetic oligonucleotide
uggccuugcaggagcuugg

SEQ ID NO: 3034962 - RNA, 19 nt, Artificial Sequence
  Description of Artificial Sequence: Synthetic oligonucleotide
uccuaggucauaguccacu

SEQ ID NO: 3034963 - RNA, 19 nt, Artificial Sequence
  Description of Artificial Sequence: Synthetic oligonucleotide
cuagaaccuggccuugcag

SEQ ID NO: 3034964 - RNA, 19 nt, Artificial Sequence
  Description of Artificial Sequence: Synthetic oligonucleotide
guccuaagugcaaagucug

SEQ ID NO: 3034965 - RNA, 19 nt, Artificial Sequence
  Description of Artificial Sequence: Synthetic oligonucleotide
aagcacagcccaggaaguc

SEQ ID NO: 3034966 - RNA, 19 nt, Artificial Sequence
  Description of Artificial Sequence: Synthetic oligonucleotide
acaacauuguaggcuuguc

SEQ ID NO: 3034967 - RNA, 19 nt, Artificial Sequence
  Description of Artificial Sequence: Synthetic oligonucleotide
gcuugucagggacaguagg

SEQ ID NO: 3034968 - RNA, 19 nt, Artificial Sequence
  Description of Artificial Sequence: Synthetic oligonucleotide
gggaguguagacccagagg

SEQ ID NO: 3034969 - RNA, 19 nt, Artificial Sequence
  Description of Artificial Sequence: Synthetic oligonucleotide
aacugguugucaagagcag

SEQ ID NO: 3034970 - RNA, 19 nt, Artificial Sequence
  Description of Artificial Sequence: Synthetic oligonucleotide
cuaccccaagcuagggucc

SEQ ID NO: 3034971 - RNA, 19 nt, Artificial Sequence
  Description of Artificial Sequence: Synthetic oligonucleotide
uuccgcuuauugaaccccu

SEQ ID NO: 3034972 - RNA, 19 nt, Artificial Sequence
  Description of Artificial Sequence: Synthetic oligonucleotide
gagggcugcacaguccuag

SEQ ID NO: 3034973 - RNA, 19 nt, Artificial Sequence
  Description of Artificial Sequence: Synthetic oligonucleotide
gucugaguugacuucugca

SEQ ID NO: 3034974 - RNA, 19 nt, Artificial Sequence
  Description of Artificial Sequence: Synthetic oligonucleotide
caacauuguaggcuuguca

SEQ ID NO: 3034975 - RNA, 19 nt, Artificial Sequence
  Description of Artificial Sequence: Synthetic oligonucleotide
acccagagggcuuucgggu

SEQ ID NO: 3034976 - RNA, 19 nt, Artificial Sequence
  Description of Artificial Sequence: Synthetic oligonucleotide
uccagccuagaaccuggcc

SEQ ID NO: 3034977 - RNA, 19 nt, Artificial Sequence
  Description of Artificial Sequence: Synthetic oligonucleotide
ccuugcaggagcuuggcac

SEQ ID NO: 3034978 - RNA, 19 nt, Artificial Sequence
  Description of Artificial Sequence: Synthetic oligonucleotide
cuuccgcuuauugaacccc

SEQ ID NO: 3034979 - RNA, 19 nt, Artificial Sequence
  Description of Artificial Sequence: Synthetic oligonucleotide
auuguaggcuugucaggga

SEQ ID NO: 3034980 - RNA, 19 nt, Artificial Sequence
  Description of Artificial Sequence: Synthetic oligonucleotide
auugaaccccuaccccaag

SEQ ID NO: 3034981 - RNA, 19 nt, Artificial Sequence
  Description of Artificial Sequence: Synthetic oligonucleotide
caagcuaggguccagccua

SEQ ID NO: 3034982 - RNA, 19 nt, Artificial Sequence
  Description of Artificial Sequence: Synthetic oligonucleotide
gguugucaagagcagggug

SEQ ID NO: 3034983 - RNA, 19 nt, Artificial Sequence
  Description of Artificial Sequence: Synthetic oligonucleotide
agcgaacugguugucaaga

SEQ ID NO: 3034984 - RNA, 19 nt, Artificial Sequence
  Description of Artificial Sequence: Synthetic oligonucleotide
agggacaguaggcgacagg

SEQ ID NO: 3034985 - RNA, 19 nt, Artificial Sequence
  Description of Artificial Sequence: Synthetic oligonucleotide
gaguguagacccagagggc

SEQ ID NO: 3034986 - RNA, 19 nt, Artificial Sequence
  Description of Artificial Sequence: Synthetic oligonucleotide
ccuaccccaagcuaggguc

SEQ ID NO: 3034987 - RNA, 19 nt, Artificial Sequence
  Description of Artificial Sequence: Synthetic oligonucleotide
cuaagugcaaagucugagu

SEQ ID NO: 3034988 - RNA, 19 nt, Artificial Sequence
  Description of Artificial Sequence: Synthetic oligonucleotide
ugcguccuaagugcaaagu

SEQ ID NO: 3034989 - RNA, 19 nt, Artificial Sequence
  Description of Artificial Sequence: Synthetic oligonucleotide
cagugcucaacccuuugca

SEQ ID NO: 3034990 - RNA, 19 nt, Artificial Sequence
  Description of Artificial Sequence: Synthetic oligonucleotide
uugucaagagcagggugaa

SEQ ID NO: 3034991 - RNA, 19 nt, Artificial Sequence
  Description of Artificial Sequence: Synthetic oligonucleotide
ccuugggucagcgaacugg

SEQ ID NO: 3034992 - RNA, 19 nt, Artificial Sequence
  Description of Artificial Sequence: Synthetic oligonucleotide
uagacccagagggcuuucg

SEQ ID NO: 3034993 - RNA, 19 nt, Artificial Sequence
  Description of Artificial Sequence: Synthetic oligonucleotide
cacaggaagcacagcccag

SEQ ID NO: 3034994 - RNA, 19 nt, Artificial Sequence
  Description of Artificial Sequence: Synthetic oligonucleotide
gaagaacaacacagccuug

SEQ ID NO: 3034995 - RNA, 19 nt, Artificial Sequence
  Description of Artificial Sequence: Synthetic oligonucleotide
cagggugaagaacaacaca

SEQ ID NO: 3034996 - RNA, 19 nt, Artificial Sequence
  Description of Artificial Sequence: Synthetic oligonucleotide
uuucggguccuugggucag

SEQ ID NO: 3034997 - RNA, 19 nt, Artificial Sequence
  Description of Artificial Sequence: Synthetic oligonucleotide
ggucauaguccacugucca

SEQ ID NO: 3034998 - RNA, 19 nt, Artificial Sequence
  Description of Artificial Sequence: Synthetic oligonucleotide
aacccuuugcacgccagua

SEQ ID NO: 3034999 - RNA, 19 nt, Artificial Sequence
  Description of Artificial Sequence: Synthetic oligonucleotide
gacaggagaggagguggag

SEQ ID NO: 3035000 - RNA, 19 nt, Artificial Sequence
  Description of Artificial Sequence: Synthetic oligonucleotide
ccuaagugcaaagucugag

SEQ ID NO: 3035001 - RNA, 19 nt, Artificial Sequence
  Description of Artificial Sequence: Synthetic oligonucleotide
guccaguaccacaggaagc

SEQ ID NO: 3035002 - RNA, 19 nt, Artificial Sequence
  Description of Artificial Sequence: Synthetic oligonucleotide
ccacuguccaguaccacag

SEQ ID NO: 3035003 - RNA, 19 nt, Artificial Sequence
  Description of Artificial Sequence: Synthetic oligonucleotide
caagagcagggugaagaac

SEQ ID NO: 3035004 - RNA, 19 nt, Artificial Sequence
  Description of Artificial Sequence: Synthetic oligonucleotide
aggcuugucagggacagua

SEQ ID NO: 3035005 - RNA, 19 nt, Artificial Sequence
  Description of Artificial Sequence: Synthetic oligonucleotide
caguaccacaggaagcaca

SEQ ID NO: 3035006 - RNA, 19 nt, Artificial Sequence
  Description of Artificial Sequence: Synthetic oligonucleotide
aagucugaguugacuucug

SEQ ID NO: 3035007 - RNA, 19 nt, Artificial Sequence
  Description of Artificial Sequence: Synthetic oligonucleotide
gaggucagugcucaacccu

SEQ ID NO: 3035008 - RNA, 19 nt, Artificial Sequence
  Description of Artificial Sequence: Synthetic oligonucleotide
ggagcuuggcacugcgucc

SEQ ID NO: 3035009 - RNA, 19 nt, Artificial Sequence
  Description of Artificial Sequence: Synthetic oligonucleotide
aguaggcgacaggagagga

SEQ ID NO: 3035010 - RNA, 19 nt, Artificial Sequence
  Description of Artificial Sequence: Synthetic oligonucleotide
gaguugacuucugcauccc

SEQ ID NO: 3035011 - RNA, 19 nt, Artificial Sequence
  Description of Artificial Sequence: Synthetic oligonucleotide
gugaagaacaacacagccu

SEQ ID NO: 3035012 - RNA, 19 nt, Artificial Sequence
  Description of Artificial Sequence: Synthetic oligonucleotide
caguaggcgacaggagagg

SEQ ID NO: 3035013 - RNA, 19 nt, Artificial Sequence
  Description of Artificial Sequence: Synthetic oligonucleotide
ggggaguguagacccagag

SEQ ID NO: 3035014 - RNA, 19 nt, Artificial Sequence
  Description of Artificial Sequence: Synthetic oligonucleotide
gggacaguaggcgacagga

SEQ ID NO: 3035015 - RNA, 19 nt, Artificial Sequence
  Description of Artificial Sequence: Synthetic oligonucleotide
ugguugucaagagcagggu

SEQ ID NO: 3035016 - RNA, 19 nt, Artificial Sequence
  Description of Artificial Sequence: Synthetic oligonucleotide
gucagugcucaacccuuug

SEQ ID NO: 3035017 - RNA, 19 nt, Artificial Sequence
  Description of Artificial Sequence: Synthetic oligonucleotide
gaaccuggccuugcaggag

SEQ ID NO: 3035018 - RNA, 19 nt, Artificial Sequence
  Description of Artificial Sequence: Synthetic oligonucleotide
cagcgaacugguugucaag

SEQ ID NO: 3035019 - RNA, 19 nt, Artificial Sequence
  Description of Artificial Sequence: Synthetic oligonucleotide
gcgacaggagaggaggugg

SEQ ID NO: 3035020 - RNA, 19 nt, Artificial Sequence
  Description of Artificial Sequence: Synthetic oligonucleotide
cuggccuugcaggagcuug

SEQ ID NO: 3035021 - RNA, 19 nt, Artificial Sequence
  Description of Artificial Sequence: Synthetic oligonucleotide
cuuucggguccuuggguca

SEQ ID NO: 3035022 - RNA, 19 nt, Artificial Sequence
  Description of Artificial Sequence: Synthetic oligonucleotide
cugcguccuaagugcaaag

SEQ ID NO: 3035023 - RNA, 19 nt, Artificial Sequence
  Description of Artificial Sequence: Synthetic oligonucleotide
gucagggacaguaggcgac

SEQ ID NO: 3035024 - RNA, 19 nt, Artificial Sequence
  Description of Artificial Sequence: Synthetic oligonucleotide
ggaggucagugcucaaccc

SEQ ID NO: 3035025 - RNA, 19 nt, Artificial Sequence
  Description of Artificial Sequence: Synthetic oligonucleotide
guaggcgacaggagaggag

SEQ ID NO: 3035026 - RNA, 19 nt, Artificial Sequence
  Description of Artificial Sequence: Synthetic oligonucleotide
gguccagccuagaaccugg

SEQ ID NO: 3035027 - RNA, 19 nt, Artificial Sequence
  Description of Artificial Sequence: Synthetic oligonucleotide
acccuuugcacgccaguaa

SEQ ID NO: 3035028 - RNA, 19 nt, Artificial Sequence
  Description of Artificial Sequence: Synthetic oligonucleotide
cacuguccaguaccacagg

SEQ ID NO: 3035029 - RNA, 19 nt, Artificial Sequence
  Description of Artificial Sequence: Synthetic oligonucleotide
aucccgauuuccacuggag

SEQ ID NO: 3035030 - RNA, 19 nt, Artificial Sequence
  Description of Artificial Sequence: Synthetic oligonucleotide
ugucaagagcagggugaag

SEQ ID NO: 3035031 - RNA, 19 nt, Artificial Sequence
  Description of Artificial Sequence: Synthetic oligonucleotide
cuucugcaucccgauuucc

SEQ ID NO: 3035032 - RNA, 19 nt, Artificial Sequence
  Description of Artificial Sequence: Synthetic oligonucleotide
acaucggucuuccgcuuau

SEQ ID NO: 3035033 - RNA, 19 nt, Artificial Sequence
  Description of Artificial Sequence: Synthetic oligonucleotide
ucggguccuugggucagcg

SEQ ID NO: 3035034 - RNA, 19 nt, Artificial Sequence
  Description of Artificial Sequence: Synthetic oligonucleotide
cuggaggucagugcucaac

SEQ ID NO: 3035035 - RNA, 19 nt, Artificial Sequence
  Description of Artificial Sequence: Synthetic oligonucleotide
acugcguccuaagugcaaa

SEQ ID NO: 3035036 - RNA, 19 nt, Artificial Sequence
  Description of Artificial Sequence: Synthetic oligonucleotide
aggaagcacagcccaggaa

SEQ ID NO: 3035037 - RNA, 19 nt, Artificial Sequence
  Description of Artificial Sequence: Synthetic oligonucleotide
aagcuaggguccagccuag

SEQ ID NO: 3035038 - RNA, 19 nt, Artificial Sequence
  Description of Artificial Sequence: Synthetic oligonucleotide
uguagacccagagggcuuu

SEQ ID NO: 3035039 - RNA, 19 nt, Artificial Sequence
  Description of Artificial Sequence: Synthetic oligonucleotide
gauuuccacuggaggucag

SEQ ID NO: 3035040 - RNA, 19 nt, Artificial Sequence
  Description of Artificial Sequence: Synthetic oligonucleotide
cuguccaguaccacaggaa

SEQ ID NO: 3035041 - RNA, 19 nt, Artificial Sequence
  Description of Artificial Sequence: Synthetic oligonucleotide
gggugaagaacaacacagc

SEQ ID NO: 3035042 - RNA, 19 nt, Artificial Sequence
  Description of Artificial Sequence: Synthetic oligonucleotide
aggagguggagggcugcac

SEQ ID NO: 3035043 - RNA, 19 nt, Artificial Sequence
  Description of Artificial Sequence: Synthetic oligonucleotide
ugacuucugcaucccgauu

SEQ ID NO: 3035044 - RNA, 19 nt, Artificial Sequence
  Description of Artificial Sequence: Synthetic oligonucleotide
gcgaacugguugucaagag

SEQ ID NO: 3035045 - RNA, 19 nt, Artificial Sequence
  Description of Artificial Sequence: Synthetic oligonucleotide
uccuugggucagcgaacug

SEQ ID NO: 3035046 - RNA, 19 nt, Artificial Sequence
  Description of Artificial Sequence: Synthetic oligonucleotide
gcuuucggguccuuggguc

SEQ ID NO: 3035047 - RNA, 19 nt, Artificial Sequence
  Description of Artificial Sequence: Synthetic oligonucleotide
gcguccuaagugcaaaguc

SEQ ID NO: 3035048 - RNA, 19 nt, Artificial Sequence
  Description of Artificial Sequence: Synthetic oligonucleotide
uccgcuuauugaaccccua

SEQ ID NO: 3035049 - RNA, 19 nt, Artificial Sequence
  Description of Artificial Sequence: Synthetic oligonucleotide
cgaacugguugucaagagc

SEQ ID NO: 3035050 - RNA, 19 nt, Artificial Sequence
  Description of Artificial Sequence: Synthetic oligonucleotide
gaaguccacaucggucuuc

SEQ ID NO: 3035051 - RNA, 19 nt, Artificial Sequence
  Description of Artificial Sequence: Synthetic oligonucleotide
cuugggucagcgaacuggu

SEQ ID NO: 3035052 - RNA, 19 nt, Artificial Sequence
  Description of Artificial Sequence: Synthetic oligonucleotide
gggcuuucggguccuuggg

SEQ ID NO: 3035053 - RNA, 19 nt, Artificial Sequence
  Description of Artificial Sequence: Synthetic oligonucleotide
cuugcaggagcuuggcacu

SEQ ID NO: 3035054 - RNA, 19 nt, Artificial Sequence
  Description of Artificial Sequence: Synthetic oligonucleotide
ggcugcacaguccuagguc

SEQ ID NO: 3035055 - RNA, 19 nt, Artificial Sequence
  Description of Artificial Sequence: Synthetic oligonucleotide
gguggagggcugcacaguc

SEQ ID NO: 3035056 - RNA, 19 nt, Artificial Sequence
  Description of Artificial Sequence: Synthetic oligonucleotide
gaaccccuaccccaagcua

SEQ ID NO: 3035057 - RNA, 19 nt, Artificial Sequence
  Description of Artificial Sequence: Synthetic oligonucleotide
ccuaggucauaguccacug

SEQ ID NO: 3035058 - RNA, 19 nt, Artificial Sequence
  Description of Artificial Sequence: Synthetic oligonucleotide
cgcuuauugaaccccuacc

SEQ ID NO: 3035059 - RNA, 19 nt, Artificial Sequence
  Description of Artificial Sequence: Synthetic oligonucleotide
accccuaccccaagcuagg

SEQ ID NO: 3035060 - RNA, 19 nt, Artificial Sequence
  Description of Artificial Sequence: Synthetic oligonucleotide
gcacaguccuaggucauag

SEQ ID NO: 3035061 - RNA, 19 nt, Artificial Sequence
  Description of Artificial Sequence: Synthetic oligonucleotide
ugcaggagcuuggcacugc

SEQ ID NO: 3035062 - RNA, 19 nt, Artificial Sequence
  Description of Artificial Sequence: Synthetic oligonucleotide
caucccgauuuccacugga

SEQ ID NO: 3035063 - RNA, 19 nt, Artificial Sequence
  Description of Artificial Sequence: Synthetic oligonucleotide
cccaggaaguccacaucgg

SEQ ID NO: 3035064 - RNA, 19 nt, Artificial Sequence
  Description of Artificial Sequence: Synthetic oligonucleotide
gcaaagucugaguugacuu

SEQ ID NO: 3035065 - RNA, 19 nt, Artificial Sequence
  Description of Artificial Sequence: Synthetic oligonucleotide
gagcagggugaagaacaac

SEQ ID NO: 3035066 - RNA, 19 nt, Artificial Sequence
  Description of Artificial Sequence: Synthetic oligonucleotide
cccuuugcacgccaguaac

SEQ ID NO: 3035067 - RNA, 19 nt, Artificial Sequence
  Description of Artificial Sequence: Synthetic oligonucleotide
gaagcacagcccaggaagu

SEQ ID NO: 3035068 - RNA, 19 nt, Artificial Sequence
  Description of Artificial Sequence: Synthetic oligonucleotide
cauaguccacuguccagua

SEQ ID NO: 3035069 - RNA, 19 nt, Artificial Sequence
  Description of Artificial Sequence: Synthetic oligonucleotide
uaccccaagcuagggucca

SEQ ID NO: 3035070 - RNA, 19 nt, Artificial Sequence
  Description of Artificial Sequence: Synthetic oligonucleotide
gagggcuuucggguccuug

SEQ ID NO: 3035071 - RNA, 19 nt, Artificial Sequence
  Description of Artificial Sequence: Synthetic oligonucleotide
cccaagcuaggguccagcc

SEQ ID NO: 3035072 - RNA, 19 nt, Artificial Sequence
  Description of Artificial Sequence: Synthetic oligonucleotide
gggacaacauuguaggcuu

SEQ ID NO: 3035073 - RNA, 19 nt, Artificial Sequence
  Description of Artificial Sequence: Synthetic oligonucleotide
aggucagugcucaacccuu

SEQ ID NO: 3035074 - RNA, 19 nt, Artificial Sequence
  Description of Artificial Sequence: Synthetic oligonucleotide
ccagagggcuuucgggucc

SEQ ID NO: 3035075 - RNA, 19 nt, Artificial Sequence
  Description of Artificial Sequence: Synthetic oligonucleotide
guggagggcugcacagucc

SEQ ID NO: 3035076 - RNA, 19 nt, Artificial Sequence
  Description of Artificial Sequence: Synthetic oligonucleotide
ggacaguaggcgacaggag

SEQ ID NO: 3035077 - RNA, 19 nt, Artificial Sequence
  Description of Artificial Sequence: Synthetic oligonucleotide
ugcacaguccuaggucaua

SEQ ID NO: 3035078 - RNA, 19 nt, Artificial Sequence
  Description of Artificial Sequence: Synthetic oligonucleotide
gucagcgaacugguuguca

SEQ ID NO: 3035079 - RNA, 19 nt, Artificial Sequence
  Description of Artificial Sequence: Synthetic oligonucleotide
uugggucagcgaacugguu

SEQ ID NO: 3035080 - RNA, 19 nt, Artificial Sequence
  Description of Artificial Sequence: Synthetic oligonucleotide
cucaacccuuugcacgcca

SEQ ID NO: 3035081 - RNA, 19 nt, Artificial Sequence
  Description of Artificial Sequence: Synthetic oligonucleotide
ggcuugucagggacaguag

SEQ ID NO: 3035082 - RNA, 19 nt, Artificial Sequence
  Description of Artificial Sequence: Synthetic oligonucleotide
guaccacaggaagcacagc

SEQ ID NO: 3035083 - RNA, 19 nt, Artificial Sequence
  Description of Artificial Sequence: Synthetic oligonucleotide
ccgcuuauugaaccccuac

SEQ ID NO: 3035084 - RNA, 19 nt, Artificial Sequence
  Description of Artificial Sequence: Synthetic oligonucleotide
gagcuuggcacugcguccu

SEQ ID NO: 3035085 - RNA, 19 nt, Artificial Sequence
  Description of Artificial Sequence: Synthetic oligonucleotide
cuaggucauaguccacugu

SEQ ID NO: 3035086 - RNA, 19 nt, Artificial Sequence
  Description of Artificial Sequence: Synthetic oligonucleotide
gggucagcgaacugguugu

SEQ ID NO: 3035087 - RNA, 19 nt, Artificial Sequence
  Description of Artificial Sequence: Synthetic oligonucleotide
gcaucccgauuuccacugg

SEQ ID NO: 3035088 - RNA, 19 nt, Artificial Sequence
  Description of Artificial Sequence: Synthetic oligonucleotide
ccacaggaagcacagccca

SEQ ID NO: 3035089 - RNA, 19 nt, Artificial Sequence
  Description of Artificial Sequence: Synthetic oligonucleotide
cacagcccaggaaguccac

SEQ ID NO: 3035090 - RNA, 19 nt, Artificial Sequence
  Description of Artificial Sequence: Synthetic oligonucleotide
ccgauuuccacuggagguc

SEQ ID NO: 3035091 - RNA, 19 nt, Artificial Sequence
  Description of Artificial Sequence: Synthetic oligonucleotide
agccuagaaccuggccuug

SEQ ID NO: 3035092 - RNA, 19 nt, Artificial Sequence
  Description of Artificial Sequence: Synthetic oligonucleotide
ccagccuagaaccuggccu

SEQ ID NO: 3035093 - RNA, 19 nt, Artificial Sequence
  Description of Artificial Sequence: Synthetic oligonucleotide
agguggagggcugcacagu

SEQ ID NO: 3035094 - RNA, 19 nt, Artificial Sequence
  Description of Artificial Sequence: Synthetic oligonucleotide
cugcaucccgauuuccacu

SEQ ID NO: 3035095 - RNA, 19 nt, Artificial Sequence
  Description of Artificial Sequence: Synthetic oligonucleotide
uucggguccuugggucagc

SEQ ID NO: 3035096 - RNA, 19 nt, Artificial Sequence
  Description of Artificial Sequence: Synthetic oligonucleotide
gcuaggguccagccuagaa

SEQ ID NO: 3035097 - RNA, 19 nt, Artificial Sequence
  Description of Artificial Sequence: Synthetic oligonucleotide
ggcgacaggagaggaggug

SEQ ID NO: 3035098 - RNA, 19 nt, Artificial Sequence
  Description of Artificial Sequence: Synthetic oligonucleotide
acuggaggucagugcucaa

SEQ ID NO: 3035099 - RNA, 19 nt, Artificial Sequence
  Description of Artificial Sequence: Synthetic oligonucleotide
ggguccagccuagaaccug

SEQ ID NO: 3035100 - RNA, 19 nt, Artificial Sequence
  Description of Artificial Sequence: Synthetic oligonucleotide
cccgauuuccacuggaggu

SEQ ID NO: 3035101 - RNA, 19 nt, Artificial Sequence
  Description of Artificial Sequence: Synthetic oligonucleotide
cagccuagaaccuggccuu

SEQ ID NO: 3035102 - RNA, 19 nt, Artificial Sequence
  Description of Artificial Sequence: Synthetic oligonucleotide
aggguccagccuagaaccu

SEQ ID NO: 3035103 - RNA, 19 nt, Artificial Sequence
  Description of Artificial Sequence: Synthetic oligonucleotide
cguccuaagugcaaagucu

SEQ ID NO: 3035104 - RNA, 19 nt, Artificial Sequence
  Description of Artificial Sequence: Synthetic oligonucleotide
guccagccuagaaccuggc

SEQ ID NO: 3035105 - RNA, 19 nt, Artificial Sequence
  Description of Artificial Sequence: Synthetic oligonucleotide
cacugcguccuaagugcaa

SEQ ID NO: 3035106 - RNA, 19 nt, Artificial Sequence
  Description of Artificial Sequence: Synthetic oligonucleotide
uaggcuugucagggacagu

SEQ ID NO: 3035107 - RNA, 19 nt, Artificial Sequence
  Description of Artificial Sequence: Synthetic oligonucleotide
cccagagggcuuucggguc

SEQ ID NO: 3035108 - RNA, 19 nt, Artificial Sequence
  Description of Artificial Sequence: Synthetic oligonucleotide
guccacuguccaguaccac

SEQ ID NO: 3035109 - RNA, 19 nt, Artificial Sequence
  Description of Artificial Sequence: Synthetic oligonucleotide
cacaucggucuuccgcuua

SEQ ID NO: 3035110 - RNA, 19 nt, Artificial Sequence
  Description of Artificial Sequence: Synthetic oligonucleotide
aggcgacaggagaggaggu

SEQ ID NO: 3035111 - RNA, 19 nt, Artificial Sequence
  Description of Artificial Sequence: Synthetic oligonucleotide
accccaagcuaggguccag

SEQ ID NO: 3035112 - RNA, 19 nt, Artificial Sequence
  Description of Artificial Sequence: Synthetic oligonucleotide
cagcccaggaaguccacau

SEQ ID NO: 3035113 - RNA, 19 nt, Artificial Sequence
  Description of Artificial Sequence: Synthetic oligonucleotide
ccuagaaccuggccuugca

SEQ ID NO: 3035114 - RNA, 19 nt, Artificial Sequence
  Description of Artificial Sequence: Synthetic oligonucleotide
cacaguccuaggucauagu

SEQ ID NO: 3035115 - RNA, 19 nt, Artificial Sequence
  Description of Artificial Sequence: Synthetic oligonucleotide
guagacccagagggcuuuc

SEQ ID NO: 3035116 - RNA, 19 nt, Artificial Sequence
  Description of Artificial Sequence: Synthetic oligonucleotide
guccuaggucauaguccac

SEQ ID NO: 3035117 - RNA, 19 nt, Artificial Sequence
  Description of Artificial Sequence: Synthetic oligonucleotide
gccuagaaccuggccuugc

SEQ ID NO: 3035118 - RNA, 19 nt, Artificial Sequence
  Description of Artificial Sequence: Synthetic oligonucleotide
ccacuggaggucagugcuc

SEQ ID NO: 3035119 - RNA, 19 nt, Artificial Sequence
  Description of Artificial Sequence: Synthetic oligonucleotide
caacccuuugcacgccagu

SEQ ID NO: 3035120 - RNA, 19 nt, Artificial Sequence
  Description of Artificial Sequence: Synthetic oligonucleotide
ggccuugcaggagcuuggc

SEQ ID NO: 3035121 - RNA, 19 nt, Artificial Sequence
  Description of Artificial Sequence: Synthetic oligonucleotide
agcuaggguccagccuaga

SEQ ID NO: 3035122 - RNA, 19 nt, Artificial Sequence
  Description of Artificial Sequence: Synthetic oligonucleotide
ggcuuucggguccuugggu

SEQ ID NO: 3035123 - RNA, 19 nt, Artificial Sequence
  Description of Artificial Sequence: Synthetic oligonucleotide
agcuuggcacugcguccua

SEQ ID NO: 3035124 - RNA, 19 nt, Artificial Sequence
  Description of Artificial Sequence: Synthetic oligonucleotide
ccaguaccacaggaagcac

SEQ ID NO: 3035125 - RNA, 19 nt, Artificial Sequence
  Description of Artificial Sequence: Synthetic oligonucleotide
gccuugcaggagcuuggca

SEQ ID NO: 3035126 - RNA, 19 nt, Artificial Sequence
  Description of Artificial Sequence: Synthetic oligonucleotide
ccccaagcuaggguccagc

SEQ ID NO: 3035127 - RNA, 19 nt, Artificial Sequence
  Description of Artificial Sequence: Synthetic oligonucleotide
gcucaacccuuugcacgcc

SEQ ID NO: 3035128 - RNA, 19 nt, Artificial Sequence
  Description of Artificial Sequence: Synthetic oligonucleotide
gcacugcguccuaagugca

SEQ ID NO: 3035129 - RNA, 19 nt, Artificial Sequence
  Description of Artificial Sequence: Synthetic oligonucleotide
ccuuugcacgccaguaacu

SEQ ID NO: 3035130 - RNA, 19 nt, Artificial Sequence
  Description of Artificial Sequence: Synthetic oligonucleotide
cugcacaguccuaggucau

SEQ ID NO: 3035131 - RNA, 19 nt, Artificial Sequence
  Description of Artificial Sequence: Synthetic oligonucleotide
caggagcuuggcacugcgu

SEQ ID NO: 3035132 - RNA, 19 nt, Artificial Sequence
  Description of Artificial Sequence: Synthetic oligonucleotide
ggucagcgaacugguuguc

SEQ ID NO: 3035133 - RNA, 19 nt, Artificial Sequence
  Description of Artificial Sequence: Synthetic oligonucleotide
gggcugcacaguccuaggu

SEQ ID NO: 3035134 - RNA, 19 nt, Artificial Sequence
  Description of Artificial Sequence: Synthetic oligonucleotide
cgauuuccacuggagguca

SEQ ID NO: 3035135 - RNA, 19 nt, Artificial Sequence
  Description of Artificial Sequence: Synthetic oligonucleotide
ccaagcuaggguccagccu

SEQ ID NO: 3035136 - RNA, 19 nt, Artificial Sequence
  Description of Artificial Sequence: Synthetic oligonucleotide
ccccuaccccaagcuaggg

SEQ ID NO: 3035137 - RNA, 19 nt, Artificial Sequence
  Description of Artificial Sequence: Synthetic oligonucleotide
guguagacccagagggcuu

SEQ ID NO: 3035138 - RNA, 19 nt, Artificial Sequence
  Description of Artificial Sequence: Synthetic oligonucleotide
ggaaguccacaucggucuu

SEQ ID NO: 3035139 - RNA, 19 nt, Artificial Sequence
  Description of Artificial Sequence: Synthetic oligonucleotide
cccuaccccaagcuagggu

SEQ ID NO: 3035140 - RNA, 19 nt, Artificial Sequence
  Description of Artificial Sequence: Synthetic oligonucleotide
ggucagugcucaacccuuu

SEQ ID NO: 3035141 - RNA, 19 nt, Artificial Sequence
  Description of Artificial Sequence: Synthetic oligonucleotide
ggagggcugcacaguccua

SEQ ID NO: 3035142 - RNA, 19 nt, Artificial Sequence
  Description of Artificial Sequence: Synthetic oligonucleotide
ccacaucggucuuccgcuu

SEQ ID NO: 3035143 - RNA, 19 nt, Artificial Sequence
  Description of Artificial Sequence: Synthetic oligonucleotide
ccuggccuugcaggagcuu

SEQ ID NO: 3035144 - RNA, 19 nt, Artificial Sequence
  Description of Artificial Sequence: Synthetic oligonucleotide
uuauuauucauccagucag

SEQ ID NO: 3035145 - RNA, 19 nt, Artificial Sequence
  Description of Artificial Sequence: Synthetic oligonucleotide
aaaguucagucuuugaagg

SEQ ID NO: 3035146 - RNA, 19 nt, Artificial Sequence
  Description of Artificial Sequence: Synthetic oligonucleotide
aacuauggcagccaccucc

SEQ ID NO: 3035147 - RNA, 19 nt, Artificial Sequence
  Description of Artificial Sequence: Synthetic oligonucleotide
aaaaugucagcuuagguaa

SEQ ID NO: 3035148 - RNA, 19 nt, Artificial Sequence
  Description of Artificial Sequence: Synthetic oligonucleotide
auuccuuucucacagaguc

SEQ ID NO: 3035149 - RNA, 19 nt, Artificial Sequence
  Description of Artificial Sequence: Synthetic oligonucleotide
auuucaucaucucucuucc

SEQ ID NO: 3035150 - RNA, 19 nt, Artificial Sequence
  Description of Artificial Sequence: Synthetic oligonucleotide
acauguaucauuucuugac

SEQ ID NO: 3035151 - RNA, 19 nt, Artificial Sequence
  Description of Artificial Sequence: Synthetic oligonucleotide
aauuucacagguaaaguuc

SEQ ID NO: 3035152 - RNA, 19 nt, Artificial Sequence
  Description of Artificial Sequence: Synthetic oligonucleotide
uaaaguucagucuuugaag

SEQ ID NO: 3035153 - RNA, 19 nt, Artificial Sequence
  Description of Artificial Sequence: Synthetic oligonucleotide
cuucauaguacuuuacugg

SEQ ID NO: 3035154 - RNA, 19 nt, Artificial Sequence
  Description of Artificial Sequence: Synthetic oligonucleotide
uauucauccagucagcaac

SEQ ID NO: 3035155 - RNA, 19 nt, Artificial Sequence
  Description of Artificial Sequence: Synthetic oligonucleotide
guuaaaaccaaggacaaag

SEQ ID NO: 3035156 - RNA, 19 nt, Artificial Sequence
  Description of Artificial Sequence: Synthetic oligonucleotide
uaugauuucaucaucucuc

SEQ ID NO: 3035157 - RNA, 19 nt, Artificial Sequence
  Description of Artificial Sequence: Synthetic oligonucleotide
aagguaggcagcauuagcc

SEQ ID NO: 3035158 - RNA, 19 nt, Artificial Sequence
  Description of Artificial Sequence: Synthetic oligonucleotide
uuaaaaccaaggacaaagg

SEQ ID NO: 3035159 - RNA, 19 nt, Artificial Sequence
  Description of Artificial Sequence: Synthetic oligonucleotide
cuuugaagggcuuuugugg

SEQ ID NO: 3035160 - RNA, 19 nt, Artificial Sequence
  Description of Artificial Sequence: Synthetic oligonucleotide
uaaaaugucagcuuaggua

SEQ ID NO: 3035161 - RNA, 19 nt, Artificial Sequence
  Description of Artificial Sequence: Synthetic oligonucleotide
uuuuaccauaguaaaaugu

SEQ ID NO: 3035162 - RNA, 19 nt, Artificial Sequence
  Description of Artificial Sequence: Synthetic oligonucleotide
cuucacaggaauuucacag

SEQ ID NO: 3035163 - RNA, 19 nt, Artificial Sequence
  Description of Artificial Sequence: Synthetic oligonucleotide
uuugugguuaugaaggacu

SEQ ID NO: 3035164 - RNA, 19 nt, Artificial Sequence
  Description of Artificial Sequence: Synthetic oligonucleotide
uaaaaccaaggacaaaggc

SEQ ID NO: 3035165 - RNA, 19 nt, Artificial Sequence
  Description of Artificial Sequence: Synthetic oligonucleotide
cauuucuugacucccaagg

SEQ ID NO: 3035166 - RNA, 19 nt, Artificial Sequence
  Description of Artificial Sequence: Synthetic oligonucleotide
uaccauaguaaaaugucag

SEQ ID NO: 3035167 - RNA, 19 nt, Artificial Sequence
  Description of Artificial Sequence: Synthetic oligonucleotide
ugcuauuccuuucucacag

SEQ ID NO: 3035168 - RNA, 19 nt, Artificial Sequence
  Description of Artificial Sequence: Synthetic oligonucleotide
uucuugacucccaagguag

SEQ ID NO: 3035169 - RNA, 19 nt, Artificial Sequence
  Description of Artificial Sequence: Synthetic oligonucleotide
accauaguaaaaugucagc

SEQ ID NO: 3035170 - RNA, 19 nt, Artificial Sequence
  Description of Artificial Sequence: Synthetic oligonucleotide
aaaaccaaggacaaaggca

SEQ ID NO: 3035171 - RNA, 19 nt, Artificial Sequence
  Description of Artificial Sequence: Synthetic oligonucleotide
aaaggcaugugcuauuccu

SEQ ID NO: 3035172 - RNA, 19 nt, Artificial Sequence
  Description of Artificial Sequence: Synthetic oligonucleotide
ucuguuuuaccauaguaaa

SEQ ID NO: 3035173 - RNA, 19 nt, Artificial Sequence
  Description of Artificial Sequence: Synthetic oligonucleotide
uuaugaaggacuuuauuau

SEQ ID NO: 3035174 - RNA, 19 nt, Artificial Sequence
  Description of Artificial Sequence: Synthetic oligonucleotide
ugaagagcguccuucacag

SEQ ID NO: 3035175 - RNA, 19 nt, Artificial Sequence
  Description of Artificial Sequence: Synthetic oligonucleotide
uuccuuuaugauuucauca

SEQ ID NO: 3035176 - RNA, 19 nt, Artificial Sequence
  Description of Artificial Sequence: Synthetic oligonucleotide
uguuuuaccauaguaaaau

SEQ ID NO: 3035177 - RNA, 19 nt, Artificial Sequence
  Description of Artificial Sequence: Synthetic oligonucleotide
cugguuaaaaccaaggaca

SEQ ID NO: 3035178 - RNA, 19 nt, Artificial Sequence
  Description of Artificial Sequence: Synthetic oligonucleotide
uuaugauuucaucaucucu

SEQ ID NO: 3035179 - RNA, 19 nt, Artificial Sequence
  Description of Artificial Sequence: Synthetic oligonucleotide
uuaccauaguaaaauguca

SEQ ID NO: 3035180 - RNA, 19 nt, Artificial Sequence
  Description of Artificial Sequence: Synthetic oligonucleotide
ucagcuuagguaaauguuc

SEQ ID NO: 3035181 - RNA, 19 nt, Artificial Sequence
  Description of Artificial Sequence: Synthetic oligonucleotide
gauuucaucaucucucuuc

SEQ ID NO: 3035182 - RNA, 19 nt, Artificial Sequence
  Description of Artificial Sequence: Synthetic oligonucleotide
cuuuacuggacaccaaccg

SEQ ID NO: 3035183 - RNA, 19 nt, Artificial Sequence
  Description of Artificial Sequence: Synthetic oligonucleotide
aguucagucuuugaagggc

SEQ ID NO: 3035184 - RNA, 19 nt, Artificial Sequence
  Description of Artificial Sequence: Synthetic oligonucleotide
aagagcguccuucacagga

SEQ ID NO: 3035185 - RNA, 19 nt, Artificial Sequence
  Description of Artificial Sequence: Synthetic oligonucleotide
uucauaguacuuuacugga

SEQ ID NO: 3035186 - RNA, 19 nt, Artificial Sequence
  Description of Artificial Sequence: Synthetic oligonucleotide
aaguucagucuuugaaggg

SEQ ID NO: 3035187 - RNA, 19 nt, Artificial Sequence
  Description of Artificial Sequence: Synthetic oligonucleotide
uucacaggaauuucacagg

SEQ ID NO: 3035188 - RNA, 19 nt, Artificial Sequence
  Description of Artificial Sequence: Synthetic oligonucleotide
uguaucauuucuugacucc

SEQ ID NO: 3035189 - RNA, 19 nt, Artificial Sequence
  Description of Artificial Sequence: Synthetic oligonucleotide
aaucuuucuucaugucuuc

SEQ ID NO: 3035190 - RNA, 19 nt, Artificial Sequence
  Description of Artificial Sequence: Synthetic oligonucleotide
auaguacuuuacuggacac

SEQ ID NO: 3035191 - RNA, 19 nt, Artificial Sequence
  Description of Artificial Sequence: Synthetic oligonucleotide
auguaucauuucuugacuc

SEQ ID NO: 3035192 - RNA, 19 nt, Artificial Sequence
  Description of Artificial Sequence: Synthetic oligonucleotide
aaggacuuuauuauuucag

SEQ ID NO: 3035193 - RNA, 19 nt, Artificial Sequence
  Description of Artificial Sequence: Synthetic oligonucleotide
ugugcuauuccuuucucac

SEQ ID NO: 3035194 - RNA, 19 nt, Artificial Sequence
  Description of Artificial Sequence: Synthetic oligonucleotide
ucuuugaagggcuuuugug

SEQ ID NO: 3035195 - RNA, 19 nt, Artificial Sequence
  Description of Artificial Sequence: Synthetic oligonucleotide
guuaugaaggacuuuauua

SEQ ID NO: 3035196 - RNA, 19 nt, Artificial Sequence
  Description of Artificial Sequence: Synthetic oligonucleotide
gcuuuugugguuaugaagg

SEQ ID NO: 3035197 - RNA, 19 nt, Artificial Sequence
  Description of Artificial Sequence: Synthetic oligonucleotide
ucggauaucgccuuccgga

SEQ ID NO: 3035198 - RNA, 19 nt, Artificial Sequence
  Description of Artificial Sequence: Synthetic oligonucleotide
uauuauucauccagucagc

SEQ ID NO: 3035199 - RNA, 19 nt, Artificial Sequence
  Description of Artificial Sequence: Synthetic oligonucleotide
auaguaaaaugucagcuua

SEQ ID NO: 3035200 - RNA, 19 nt, Artificial Sequence
  Description of Artificial Sequence: Synthetic oligonucleotide
cagucagcaacuauggcag

SEQ ID NO: 3035201 - RNA, 19 nt, Artificial Sequence
  Description of Artificial Sequence: Synthetic oligonucleotide
aggaauuucacagguaaag

SEQ ID NO: 3035202 - RNA, 19 nt, Artificial Sequence
  Description of Artificial Sequence: Synthetic oligonucleotide
uauauuuugggcagcuuau

SEQ ID NO: 3035203 - RNA, 19 nt, Artificial Sequence
  Description of Artificial Sequence: Synthetic oligonucleotide
uccuuucucacagagucgg

SEQ ID NO: 3035204 - RNA, 19 nt, Artificial Sequence
  Description of Artificial Sequence: Synthetic oligonucleotide
cuucaugucuucauaguac

SEQ ID NO: 3035205 - RNA, 19 nt, Artificial Sequence
  Description of Artificial Sequence: Synthetic oligonucleotide
cagcuuauuauucauccag

SEQ ID NO: 3035206 - RNA, 19 nt, Artificial Sequence
  Description of Artificial Sequence: Synthetic oligonucleotide
uaguaaaaugucagcuuag

SEQ ID NO: 3035207 - RNA, 19 nt, Artificial Sequence
  Description of Artificial Sequence: Synthetic oligonucleotide
uuuacuggacaccaaccgu

SEQ ID NO: 3035208 - RNA, 19 nt, Artificial Sequence
  Description of Artificial Sequence: Synthetic oligonucleotide
acaggaauuucacagguaa

SEQ ID NO: 3035209 - RNA, 19 nt, Artificial Sequence
  Description of Artificial Sequence: Synthetic oligonucleotide
aguaaaaugucagcuuagg

SEQ ID NO: 3035210 - RNA, 19 nt, Artificial Sequence
  Description of Artificial Sequence: Synthetic oligonucleotide
gcauuagccaggcagaagg

SEQ ID NO: 3035211 - RNA, 19 nt, Artificial Sequence
  Description of Artificial Sequence: Synthetic oligonucleotide
uuugaagggcuuuuguggu

SEQ ID NO: 3035212 - RNA, 19 nt, Artificial Sequence
  Description of Artificial Sequence: Synthetic oligonucleotide
uucaugucuucauaguacu

SEQ ID NO: 3035213 - RNA, 19 nt, Artificial Sequence
  Description of Artificial Sequence: Synthetic oligonucleotide
uugaagagcguccuucaca

SEQ ID NO: 3035214 - RNA, 19 nt, Artificial Sequence
  Description of Artificial Sequence: Synthetic oligonucleotide
uacuuuacuggacaccaac

SEQ ID NO: 3035215 - RNA, 19 nt, Artificial Sequence
  Description of Artificial Sequence: Synthetic oligonucleotide
uccugguuaaaaccaagga

SEQ ID NO: 3035216 - RNA, 19 nt, Artificial Sequence
  Description of Artificial Sequence: Synthetic oligonucleotide
cacagagucggauaucgcc

SEQ ID NO: 3035217 - RNA, 19 nt, Artificial Sequence
  Description of Artificial Sequence: Synthetic oligonucleotide
ucacaggaauuucacaggu

SEQ ID NO: 3035218 - RNA, 19 nt, Artificial Sequence
  Description of Artificial Sequence: Synthetic oligonucleotide
uccggaaaaucuuucuuca

SEQ ID NO: 3035219 - RNA, 19 nt, Artificial Sequence
  Description of Artificial Sequence: Synthetic oligonucleotide
aauguuccuuuaugauuuc

SEQ ID NO: 3035220 - RNA, 19 nt, Artificial Sequence
  Description of Artificial Sequence: Synthetic oligonucleotide
uccuuuaugauuucaucau

SEQ ID NO: 3035221 - RNA, 19 nt, Artificial Sequence
  Description of Artificial Sequence: Synthetic oligonucleotide
aguacuuuacuggacacca

SEQ ID NO: 3035222 - RNA, 19 nt, Artificial Sequence
  Description of Artificial Sequence: Synthetic oligonucleotide
guaaaguucagucuuugaa

SEQ ID NO: 3035223 - RNA, 19 nt, Artificial Sequence
  Description of Artificial Sequence: Synthetic oligonucleotide
acagguaaaguucagucuu

SEQ ID NO: 3035224 - RNA, 19 nt, Artificial Sequence
  Description of Artificial Sequence: Synthetic oligonucleotide
agguaaauguuccuuuaug

SEQ ID NO: 3035225 - RNA, 19 nt, Artificial Sequence
  Description of Artificial Sequence: Synthetic oligonucleotide
ugucagcuuagguaaaugu

SEQ ID NO: 3035226 - RNA, 19 nt, Artificial Sequence
  Description of Artificial Sequence: Synthetic oligonucleotide
uuacuggacaccaaccguc

SEQ ID NO: 3035227 - RNA, 19 nt, Artificial Sequence
  Description of Artificial Sequence: Synthetic oligonucleotide
uuuaugauuucaucaucuc

SEQ ID NO: 3035228 - RNA, 19 nt, Artificial Sequence
  Description of Artificial Sequence: Synthetic oligonucleotide
acuuuacuggacaccaacc

SEQ ID NO: 3035229 - RNA, 19 nt, Artificial Sequence
  Description of Artificial Sequence: Synthetic oligonucleotide
aaaucuuucuucaugucuu

SEQ ID NO: 3035230 - RNA, 19 nt, Artificial Sequence
  Description of Artificial Sequence: Synthetic oligonucleotide
cuauuccuuucucacagag

SEQ ID NO: 3035231 - RNA, 19 nt, Artificial Sequence
  Description of Artificial Sequence: Synthetic oligonucleotide
aaggacaaaggcaugugcu

SEQ ID NO: 3035232 - RNA, 19 nt, Artificial Sequence
  Description of Artificial Sequence: Synthetic oligonucleotide
cuuauuauucauccaguca

SEQ ID NO: 3035233 - RNA, 19 nt, Artificial Sequence
  Description of Artificial Sequence: Synthetic oligonucleotide
cucacagagucggauaucg

SEQ ID NO: 3035234 - RNA, 19 nt, Artificial Sequence
  Description of Artificial Sequence: Synthetic oligonucleotide
uauuuugggcagcuuauua

SEQ ID NO: 3035235 - RNA, 19 nt, Artificial Sequence
  Description of Artificial Sequence: Synthetic oligonucleotide
uguuccuuuaugauuucau

SEQ ID NO: 3035236 - RNA, 19 nt, Artificial Sequence
  Description of Artificial Sequence: Synthetic oligonucleotide
ggcagcauuagccaggcag

SEQ ID NO: 3035237 - RNA, 19 nt, Artificial Sequence
  Description of Artificial Sequence: Synthetic oligonucleotide
cagcuuagguaaauguucc

SEQ ID NO: 3035238 - RNA, 19 nt, Artificial Sequence
  Description of Artificial Sequence: Synthetic oligonucleotide
uuucuugacucccaaggua

SEQ ID NO: 3035239 - RNA, 19 nt, Artificial Sequence
  Description of Artificial Sequence: Synthetic oligonucleotide
gguaaauguuccuuuauga

SEQ ID NO: 3035240 - RNA, 19 nt, Artificial Sequence
  Description of Artificial Sequence: Synthetic oligonucleotide
ugaaggacuuuauuauuuc

SEQ ID NO: 3035241 - RNA, 19 nt, Artificial Sequence
  Description of Artificial Sequence: Synthetic oligonucleotide
auuucuugacucccaaggu

SEQ ID NO: 3035242 - RNA, 19 nt, Artificial Sequence
  Description of Artificial Sequence: Synthetic oligonucleotide
auuuugggcagcuuauuau

SEQ ID NO: 3035243 - RNA, 19 nt, Artificial Sequence
  Description of Artificial Sequence: Synthetic oligonucleotide
ggcagcuuauuauucaucc

SEQ ID NO: 3035244 - RNA, 19 nt, Artificial Sequence
  Description of Artificial Sequence: Synthetic oligonucleotide
cuccugguuaaaaccaagg

SEQ ID NO: 3035245 - RNA, 19 nt, Artificial Sequence
  Description of Artificial Sequence: Synthetic oligonucleotide
cauaguacuuuacuggaca

SEQ ID NO: 3035246 - RNA, 19 nt, Artificial Sequence
  Description of Artificial Sequence: Synthetic oligonucleotide
uuccggaaaaucuuucuuc

SEQ ID NO: 3035247 - RNA, 19 nt, Artificial Sequence
  Description of Artificial Sequence: Synthetic oligonucleotide
agaaggguugaagagcguc

SEQ ID NO: 3035248 - RNA, 19 nt, Artificial Sequence
  Description of Artificial Sequence: Synthetic oligonucleotide
ucauaguacuuuacuggac

SEQ ID NO: 3035249 - RNA, 19 nt, Artificial Sequence
  Description of Artificial Sequence: Synthetic oligonucleotide
ucuugacucccaagguagg

SEQ ID NO: 3035250 - RNA, 19 nt, Artificial Sequence
  Description of Artificial Sequence: Synthetic oligonucleotide
uuccuuucucacagagucg

SEQ ID NO: 3035251 - RNA, 19 nt, Artificial Sequence
  Description of Artificial Sequence: Synthetic oligonucleotide
gaaggacuuuauuauuuca

SEQ ID NO: 3035252 - RNA, 19 nt, Artificial Sequence
  Description of Artificial Sequence: Synthetic oligonucleotide
ugacucccaagguaggcag

SEQ ID NO: 3035253 - RNA, 19 nt, Artificial Sequence
  Description of Artificial Sequence: Synthetic oligonucleotide
augauuucaucaucucucu

SEQ ID NO: 3035254 - RNA, 19 nt, Artificial Sequence
  Description of Artificial Sequence: Synthetic oligonucleotide
uuugggcagcuuauuauuc

SEQ ID NO: 3035255 - RNA, 19 nt, Artificial Sequence
  Description of Artificial Sequence: Synthetic oligonucleotide
uaugaaggacuuuauuauu

SEQ ID NO: 3035256 - RNA, 19 nt, Artificial Sequence
  Description of Artificial Sequence: Synthetic oligonucleotide
ucauuucuugacucccaag

SEQ ID NO: 3035257 - RNA, 19 nt, Artificial Sequence
  Description of Artificial Sequence: Synthetic oligonucleotide
uuuugggcagcuuauuauu

SEQ ID NO: 3035258 - RNA, 19 nt, Artificial Sequence
  Description of Artificial Sequence: Synthetic oligonucleotide
uccuucacaggaauuucac

SEQ ID NO: 3035259 - RNA, 19 nt, Artificial Sequence
  Description of Artificial Sequence: Synthetic oligonucleotide
caaggacaaaggcaugugc

SEQ ID NO: 3035260 - RNA, 19 nt, Artificial Sequence
  Description of Artificial Sequence: Synthetic oligonucleotide
uucucacagagucggauau

SEQ ID NO: 3035261 - RNA, 19 nt, Artificial Sequence
  Description of Artificial Sequence: Synthetic oligonucleotide
gaaaaucuuucuucauguc

SEQ ID NO: 3035262 - RNA, 19 nt, Artificial Sequence
  Description of Artificial Sequence: Synthetic oligonucleotide
uauuccuuucucacagagu

SEQ ID NO: 3035263 - RNA, 19 nt, Artificial Sequence
  Description of Artificial Sequence: Synthetic oligonucleotide
uuucacagguaaaguucag

SEQ ID NO: 3035264 - RNA, 19 nt, Artificial Sequence
  Description of Artificial Sequence: Synthetic oligonucleotide
cuuuaugauuucaucaucu

SEQ ID NO: 3035265 - RNA, 19 nt, Artificial Sequence
  Description of Artificial Sequence: Synthetic oligonucleotide
uuucaucaucucucuuccg

SEQ ID NO: 3035266 - RNA, 19 nt, Artificial Sequence
  Description of Artificial Sequence: Synthetic oligonucleotide
ucuuucuucaugucuucau

SEQ ID NO: 3035267 - RNA, 19 nt, Artificial Sequence
  Description of Artificial Sequence: Synthetic oligonucleotide
uuauucauccagucagcaa

SEQ ID NO: 3035268 - RNA, 19 nt, Artificial Sequence
  Description of Artificial Sequence: Synthetic oligonucleotide
uugggcagcuuauuauuca

SEQ ID NO: 3035269 - RNA, 19 nt, Artificial Sequence
  Description of Artificial Sequence: Synthetic oligonucleotide
acaaaggcaugugcuauuc

SEQ ID NO: 3035270 - RNA, 19 nt, Artificial Sequence
  Description of Artificial Sequence: Synthetic oligonucleotide
cauuagccaggcagaaggg

SEQ ID NO: 3035271 - RNA, 19 nt, Artificial Sequence
  Description of Artificial Sequence: Synthetic oligonucleotide
uuagccaggcagaaggguu

SEQ ID NO: 3035272 - RNA, 19 nt, Artificial Sequence
  Description of Artificial Sequence: Synthetic oligonucleotide
gaaggguugaagagcgucc

SEQ ID NO: 3035273 - RNA, 19 nt, Artificial Sequence
  Description of Artificial Sequence: Synthetic oligonucleotide
caagguaggcagcauuagc

SEQ ID NO: 3035274 - RNA, 19 nt, Artificial Sequence
  Description of Artificial Sequence: Synthetic oligonucleotide
guuccuuuaugauuucauc

SEQ ID NO: 3035275 - RNA, 19 nt, Artificial Sequence
  Description of Artificial Sequence: Synthetic oligonucleotide
uuuugugguuaugaaggac

SEQ ID NO: 3035276 - RNA, 19 nt, Artificial Sequence
  Description of Artificial Sequence: Synthetic oligonucleotide
auuauucauccagucagca

SEQ ID NO: 3035277 - RNA, 19 nt, Artificial Sequence
  Description of Artificial Sequence: Synthetic oligonucleotide
ugucuucauaguacuuuac

SEQ ID NO: 3035278 - RNA, 19 nt, Artificial Sequence
  Description of Artificial Sequence: Synthetic oligonucleotide
gauaucgccuuccggaaaa

SEQ ID NO: 3035279 - RNA, 19 nt, Artificial Sequence
  Description of Artificial Sequence: Synthetic oligonucleotide
ggcuuuugugguuaugaag

SEQ ID NO: 3035280 - RNA, 19 nt, Artificial Sequence
  Description of Artificial Sequence: Synthetic oligonucleotide
gaauuucacagguaaaguu

SEQ ID NO: 3035281 - RNA, 19 nt, Artificial Sequence
  Description of Artificial Sequence: Synthetic oligonucleotide
uuccgcacauguaucauuu

SEQ ID NO: 3035282 - RNA, 19 nt, Artificial Sequence
  Description of Artificial Sequence: Synthetic oligonucleotide
uagccaggcagaaggguug

SEQ ID NO: 3035283 - RNA, 19 nt, Artificial Sequence
  Description of Artificial Sequence: Synthetic oligonucleotide
uaguacuuuacuggacacc

SEQ ID NO: 3035284 - RNA, 19 nt, Artificial Sequence
  Description of Artificial Sequence: Synthetic oligonucleotide
gcagaaggguugaagagcg

SEQ ID NO: 3035285 - RNA, 19 nt, Artificial Sequence
  Description of Artificial Sequence: Synthetic oligonucleotide
uuucucacagagucggaua

SEQ ID NO: 3035286 - RNA, 19 nt, Artificial Sequence
  Description of Artificial Sequence: Synthetic oligonucleotide
guaggcagcauuagccagg

SEQ ID NO: 3035287 - RNA, 19 nt, Artificial Sequence
  Description of Artificial Sequence: Synthetic oligonucleotide
gucuguuuuaccauaguaa

SEQ ID NO: 3035288 - RNA, 19 nt, Artificial Sequence
  Description of Artificial Sequence: Synthetic oligonucleotide
agucagcaacuauggcagc

SEQ ID NO: 3035289 - RNA, 19 nt, Artificial Sequence
  Description of Artificial Sequence: Synthetic oligonucleotide
agucggauaucgccuuccg

SEQ ID NO: 3035290 - RNA, 19 nt, Artificial Sequence
  Description of Artificial Sequence: Synthetic oligonucleotide
aaugucagcuuagguaaau

SEQ ID NO: 3035291 - RNA, 19 nt, Artificial Sequence
  Description of Artificial Sequence: Synthetic oligonucleotide
ggaaaaucuuucuucaugu

SEQ ID NO: 3035292 - RNA, 19 nt, Artificial Sequence
  Description of Artificial Sequence: Synthetic oligonucleotide
augugcuauuccuuucuca

SEQ ID NO: 3035293 - RNA, 19 nt, Artificial Sequence
  Description of Artificial Sequence: Synthetic oligonucleotide
uacuggacaccaaccgucu

SEQ ID NO: 3035294 - RNA, 19 nt, Artificial Sequence
  Description of Artificial Sequence: Synthetic oligonucleotide
aaggguugaagagcguccu

SEQ ID NO: 3035295 - RNA, 19 nt, Artificial Sequence
  Description of Artificial Sequence: Synthetic oligonucleotide
guaaauguuccuuuaugau

SEQ ID NO: 3035296 - RNA, 19 nt, Artificial Sequence
  Description of Artificial Sequence: Synthetic oligonucleotide
augucuucauaguacuuua

SEQ ID NO: 3035297 - RNA, 19 nt, Artificial Sequence
  Description of Artificial Sequence: Synthetic oligonucleotide
agggcuuuugugguuauga

SEQ ID NO: 3035298 - RNA, 19 nt, Artificial Sequence
  Description of Artificial Sequence: Synthetic oligonucleotide
uugugguuaugaaggacuu

SEQ ID NO: 3035299 - RNA, 19 nt, Artificial Sequence
  Description of Artificial Sequence: Synthetic oligonucleotide
ucagcaacuauggcagcca

SEQ ID NO: 3035300 - RNA, 19 nt, Artificial Sequence
  Description of Artificial Sequence: Synthetic oligonucleotide
gcacauguaucauuucuug

SEQ ID NO: 3035301 - RNA, 19 nt, Artificial Sequence
  Description of Artificial Sequence: Synthetic oligonucleotide
uugacucccaagguaggca

SEQ ID NO: 3035302 - RNA, 19 nt, Artificial Sequence
  Description of Artificial Sequence: Synthetic oligonucleotide
caggcagaaggguugaaga

SEQ ID NO: 3035303 - RNA, 19 nt, Artificial Sequence
  Description of Artificial Sequence: Synthetic oligonucleotide
ucaucucucuuccgcacau

SEQ ID NO: 3035304 - RNA, 19 nt, Artificial Sequence
  Description of Artificial Sequence: Synthetic oligonucleotide
ucucuuccgcacauguauc

SEQ ID NO: 3035305 - RNA, 19 nt, Artificial Sequence
  Description of Artificial Sequence: Synthetic oligonucleotide
aucgccuuccggaaaaucu

SEQ ID NO: 3035306 - RNA, 19 nt, Artificial Sequence
  Description of Artificial Sequence: Synthetic oligonucleotide
ucacagagucggauaucgc

SEQ ID NO: 3035307 - RNA, 19 nt, Artificial Sequence
  Description of Artificial Sequence: Synthetic oligonucleotide
augaaggacuuuauuauuu

SEQ ID NO: 3035308 - RNA, 19 nt, Artificial Sequence
  Description of Artificial Sequence: Synthetic oligonucleotide
aaccgucuguuuuaccaua

SEQ ID NO: 3035309 - RNA, 19 nt, Artificial Sequence
  Description of Artificial Sequence: Synthetic oligonucleotide
cuugacucccaagguaggc

SEQ ID NO: 3035310 - RNA, 19 nt, Artificial Sequence
  Description of Artificial Sequence: Synthetic oligonucleotide
ugguuaugaaggacuuuau

SEQ ID NO: 3035311 - RNA, 19 nt, Artificial Sequence
  Description of Artificial Sequence: Synthetic oligonucleotide
caucaucucucuuccgcac

SEQ ID NO: 3035312 - RNA, 19 nt, Artificial Sequence
  Description of Artificial Sequence: Synthetic oligonucleotide
agcaacuauggcagccacc

SEQ ID NO: 3035313 - RNA, 19 nt, Artificial Sequence
  Description of Artificial Sequence: Synthetic oligonucleotide
guaaaaugucagcuuaggu

SEQ ID NO: 3035314 - RNA, 19 nt, Artificial Sequence
  Description of Artificial Sequence: Synthetic oligonucleotide
gucggauaucgccuuccgg

SEQ ID NO: 3035315 - RNA, 19 nt, Artificial Sequence
  Description of Artificial Sequence: Synthetic oligonucleotide
accaaggacaaaggcaugu

SEQ ID NO: 3035316 - RNA, 19 nt, Artificial Sequence
  Description of Artificial Sequence: Synthetic oligonucleotide
gcuuauuauucauccaguc

SEQ ID NO: 3035317 - RNA, 19 nt, Artificial Sequence
  Description of Artificial Sequence: Synthetic oligonucleotide
gaagagcguccuucacagg

SEQ ID NO: 3035318 - RNA, 19 nt, Artificial Sequence
  Description of Artificial Sequence: Synthetic oligonucleotide
aucaucucucuuccgcaca

SEQ ID NO: 3035319 - RNA, 19 nt, Artificial Sequence
  Description of Artificial Sequence: Synthetic oligonucleotide
agagucggauaucgccuuc

SEQ ID NO: 3035320 - RNA, 19 nt, Artificial Sequence
  Description of Artificial Sequence: Synthetic oligonucleotide
aggacaaaggcaugugcua

SEQ ID NO: 3035321 - RNA, 19 nt, Artificial Sequence
  Description of Artificial Sequence: Synthetic oligonucleotide
cuuuugugguuaugaagga

SEQ ID NO: 3035322 - RNA, 19 nt, Artificial Sequence
  Description of Artificial Sequence: Synthetic oligonucleotide
cacauguaucauuucuuga

SEQ ID NO: 3035323 - RNA, 19 nt, Artificial Sequence
  Description of Artificial Sequence: Synthetic oligonucleotide
caaaggcaugugcuauucc

SEQ ID NO: 3035324 - RNA, 19 nt, Artificial Sequence
  Description of Artificial Sequence: Synthetic oligonucleotide
agcuuauuauucauccagu

SEQ ID NO: 3035325 - RNA, 19 nt, Artificial Sequence
  Description of Artificial Sequence: Synthetic oligonucleotide
gucagcaacuauggcagcc

SEQ ID NO: 3035326 - RNA, 19 nt, Artificial Sequence
  Description of Artificial Sequence: Synthetic oligonucleotide
ugggcagcuuauuauucau

SEQ ID NO: 3035327 - RNA, 19 nt, Artificial Sequence
  Description of Artificial Sequence: Synthetic oligonucleotide
agcuuagguaaauguuccu

SEQ ID NO: 3035328 - RNA, 19 nt, Artificial Sequence
  Description of Artificial Sequence: Synthetic oligonucleotide
gugguuaugaaggacuuua

SEQ ID NO: 3035329 - RNA, 19 nt, Artificial Sequence
  Description of Artificial Sequence: Synthetic oligonucleotide
agguaaaguucagucuuug

SEQ ID NO: 3035330 - RNA, 19 nt, Artificial Sequence
  Description of Artificial Sequence: Synthetic oligonucleotide
auuagccaggcagaagggu

SEQ ID NO: 3035331 - RNA, 19 nt, Artificial Sequence
  Description of Artificial Sequence: Synthetic oligonucleotide
ugaagggcuuuugugguua

SEQ ID NO: 3035332 - RNA, 19 nt, Artificial Sequence
  Description of Artificial Sequence: Synthetic oligonucleotide
gucuucauaguacuuuacu

SEQ ID NO: 3035333 - RNA, 19 nt, Artificial Sequence
  Description of Artificial Sequence: Synthetic oligonucleotide
ucaugucuucauaguacuu

SEQ ID NO: 3035334 - RNA, 19 nt, Artificial Sequence
  Description of Artificial Sequence: Synthetic oligonucleotide
cuguuuuaccauaguaaaa

SEQ ID NO: 3035335 - RNA, 19 nt, Artificial Sequence
  Description of Artificial Sequence: Synthetic oligonucleotide
ccagucagcaacuauggca

SEQ ID NO: 3035336 - RNA, 19 nt, Artificial Sequence
  Description of Artificial Sequence: Synthetic oligonucleotide
guugaagagcguccuucac

SEQ ID NO: 3035337 - RNA, 19 nt, Artificial Sequence
  Description of Artificial Sequence: Synthetic oligonucleotide
uaggcagcauuagccaggc

SEQ ID NO: 3035338 - RNA, 19 nt, Artificial Sequence
  Description of Artificial Sequence: Synthetic oligonucleotide
ucgccuuccggaaaaucuu

SEQ ID NO: 3035339 - RNA, 19 nt, Artificial Sequence
  Description of Artificial Sequence: Synthetic oligonucleotide
ugauuucaucaucucucuu

SEQ ID NO: 3035340 - RNA, 19 nt, Artificial Sequence
  Description of Artificial Sequence: Synthetic oligonucleotide
acaccaaccgucuguuuua

SEQ ID NO: 3035341 - RNA, 19 nt, Artificial Sequence
  Description of Artificial Sequence: Synthetic oligonucleotide
cauguaucauuucuugacu

SEQ ID NO: 3035342 - RNA, 19 nt, Artificial Sequence
  Description of Artificial Sequence: Synthetic oligonucleotide
cauaguaaaaugucagcuu

SEQ ID NO: 3035343 - RNA, 19 nt, Artificial Sequence
  Description of Artificial Sequence: Synthetic oligonucleotide
cuuucuucaugucuucaua

SEQ ID NO: 3035344 - RNA, 19 nt, Artificial Sequence
  Description of Artificial Sequence: Synthetic oligonucleotide
agucuuugaagggcuuuug

SEQ ID NO: 3035345 - RNA, 19 nt, Artificial Sequence
  Description of Artificial Sequence: Synthetic oligonucleotide
augucagcuuagguaaaug

SEQ ID NO: 3035346 - RNA, 19 nt, Artificial Sequence
  Description of Artificial Sequence: Synthetic oligonucleotide
gagucggauaucgccuucc

SEQ ID NO: 3035347 - RNA, 19 nt, Artificial Sequence
  Description of Artificial Sequence: Synthetic oligonucleotide
aggcaugugcuauuccuuu

SEQ ID NO: 3035348 - RNA, 19 nt, Artificial Sequence
  Description of Artificial Sequence: Synthetic oligonucleotide
caugugcuauuccuuucuc

SEQ ID NO: 3035349 - RNA, 19 nt, Artificial Sequence
  Description of Artificial Sequence: Synthetic oligonucleotide
auucauccagucagcaacu

SEQ ID NO: 3035350 - RNA, 19 nt, Artificial Sequence
  Description of Artificial Sequence: Synthetic oligonucleotide
gacaccaaccgucuguuuu

SEQ ID NO: 3035351 - RNA, 19 nt, Artificial Sequence
  Description of Artificial Sequence: Synthetic oligonucleotide
ccaaccgucuguuuuacca

SEQ ID NO: 3035352 - RNA, 19 nt, Artificial Sequence
  Description of Artificial Sequence: Synthetic oligonucleotide
aaggcaugugcuauuccuu

SEQ ID NO: 3035353 - RNA, 19 nt, Artificial Sequence
  Description of Artificial Sequence: Synthetic oligonucleotide
agcauuagccaggcagaag

SEQ ID NO: 3035354 - RNA, 19 nt, Artificial Sequence
  Description of Artificial Sequence: Synthetic oligonucleotide
ucucucuuccgcacaugua

SEQ ID NO: 3035355 - RNA, 19 nt, Artificial Sequence
  Description of Artificial Sequence: Synthetic oligonucleotide
cucuuccgcacauguauca

SEQ ID NO: 3035356 - RNA, 19 nt, Artificial Sequence
  Description of Artificial Sequence: Synthetic oligonucleotide
gguaaaguucagucuuuga

SEQ ID NO: 3035357 - RNA, 19 nt, Artificial Sequence
  Description of Artificial Sequence: Synthetic oligonucleotide
aaaugucagcuuagguaaa

SEQ ID NO: 3035358 - RNA, 19 nt, Artificial Sequence
  Description of Artificial Sequence: Synthetic oligonucleotide
cacagguaaaguucagucu

SEQ ID NO: 3035359 - RNA, 19 nt, Artificial Sequence
  Description of Artificial Sequence: Synthetic oligonucleotide
aucuuucuucaugucuuca

SEQ ID NO: 3035360 - RNA, 19 nt, Artificial Sequence
  Description of Artificial Sequence: Synthetic oligonucleotide
acuggacaccaaccgucug

SEQ ID NO: 3035361 - RNA, 19 nt, Artificial Sequence
  Description of Artificial Sequence: Synthetic oligonucleotide
accgucuguuuuaccauag

SEQ ID NO: 3035362 - RNA, 19 nt, Artificial Sequence
  Description of Artificial Sequence: Synthetic oligonucleotide
uucagucuuugaagggcuu

SEQ ID NO: 3035363 - RNA, 19 nt, Artificial Sequence
  Description of Artificial Sequence: Synthetic oligonucleotide
acucccaagguaggcagca

SEQ ID NO: 3035364 - RNA, 19 nt, Artificial Sequence
  Description of Artificial Sequence: Synthetic oligonucleotide
aaccaaggacaaaggcaug

SEQ ID NO: 3035365 - RNA, 19 nt, Artificial Sequence
  Description of Artificial Sequence: Synthetic oligonucleotide
gugcuauuccuuucucaca

SEQ ID NO: 3035366 - RNA, 19 nt, Artificial Sequence
  Description of Artificial Sequence: Synthetic oligonucleotide
cggaaaaucuuucuucaug

SEQ ID NO: 3035367 - RNA, 19 nt, Artificial Sequence
  Description of Artificial Sequence: Synthetic oligonucleotide
uugaagggcuuuugugguu

SEQ ID NO: 3035368 - RNA, 19 nt, Artificial Sequence
  Description of Artificial Sequence: Synthetic oligonucleotide
ucagucuuugaagggcuuu

SEQ ID NO: 3035369 - RNA, 19 nt, Artificial Sequence
  Description of Artificial Sequence: Synthetic oligonucleotide
gguugaagagcguccuuca

SEQ ID NO: 3035370 - RNA, 19 nt, Artificial Sequence
  Description of Artificial Sequence: Synthetic oligonucleotide
cucucuuccgcacauguau

SEQ ID NO: 3035371 - RNA, 19 nt, Artificial Sequence
  Description of Artificial Sequence: Synthetic oligonucleotide
auguuccuuuaugauuuca

SEQ ID NO: 3035372 - RNA, 19 nt, Artificial Sequence
  Description of Artificial Sequence: Synthetic oligonucleotide
ucuuccgcacauguaucau

SEQ ID NO: 3035373 - RNA, 19 nt, Artificial Sequence
  Description of Artificial Sequence: Synthetic oligonucleotide
aagggcuuuugugguuaug

SEQ ID NO: 3035374 - RNA, 19 nt, Artificial Sequence
  Description of Artificial Sequence: Synthetic oligonucleotide
auauuuugggcagcuuauu

SEQ ID NO: 3035375 - RNA, 19 nt, Artificial Sequence
  Description of Artificial Sequence: Synthetic oligonucleotide
ugugguuaugaaggacuuu

SEQ ID NO: 3035376 - RNA, 19 nt, Artificial Sequence
  Description of Artificial Sequence: Synthetic oligonucleotide
cagcaacuauggcagccac

SEQ ID NO: 3035377 - RNA, 19 nt, Artificial Sequence
  Description of Artificial Sequence: Synthetic oligonucleotide
uggacaccaaccgucuguu

SEQ ID NO: 3035378 - RNA, 19 nt, Artificial Sequence
  Description of Artificial Sequence: Synthetic oligonucleotide
uccgcacauguaucauuuc

SEQ ID NO: 3035379 - RNA, 19 nt, Artificial Sequence
  Description of Artificial Sequence: Synthetic oligonucleotide
caggaauuucacagguaaa

SEQ ID NO: 3035380 - RNA, 19 nt, Artificial Sequence
  Description of Artificial Sequence: Synthetic oligonucleotide
uaucgccuuccggaaaauc

SEQ ID NO: 3035381 - RNA, 19 nt, Artificial Sequence
  Description of Artificial Sequence: Synthetic oligonucleotide
gucuuugaagggcuuuugu

SEQ ID NO: 3035382 - RNA, 19 nt, Artificial Sequence
  Description of Artificial Sequence: Synthetic oligonucleotide
ucucacagagucggauauc

SEQ ID NO: 3035383 - RNA, 19 nt, Artificial Sequence
  Description of Artificial Sequence: Synthetic oligonucleotide
gacucccaagguaggcagc

SEQ ID NO: 3035384 - RNA, 19 nt, Artificial Sequence
  Description of Artificial Sequence: Synthetic oligonucleotide
gcaacuauggcagccaccu

SEQ ID NO: 3035385 - RNA, 19 nt, Artificial Sequence
  Description of Artificial Sequence: Synthetic oligonucleotide
gcagcuuauuauucaucca

SEQ ID NO: 3035386 - RNA, 19 nt, Artificial Sequence
  Description of Artificial Sequence: Synthetic oligonucleotide
ggaauuucacagguaaagu

SEQ ID NO: 3035387 - RNA, 19 nt, Artificial Sequence
  Description of Artificial Sequence: Synthetic oligonucleotide
ccuccugguuaaaaccaag

SEQ ID NO: 3035388 - RNA, 19 nt, Artificial Sequence
  Description of Artificial Sequence: Synthetic oligonucleotide
ggguugaagagcguccuuc

SEQ ID NO: 3035389 - RNA, 19 nt, Artificial Sequence
  Description of Artificial Sequence: Synthetic oligonucleotide
guucagucuuugaagggcu

SEQ ID NO: 3035390 - RNA, 19 nt, Artificial Sequence
  Description of Artificial Sequence: Synthetic oligonucleotide
gacaaaggcaugugcuauu

SEQ ID NO: 3035391 - RNA, 19 nt, Artificial Sequence
  Description of Artificial Sequence: Synthetic oligonucleotide
ccauaguaaaaugucagcu

SEQ ID NO: 3035392 - RNA, 19 nt, Artificial Sequence
  Description of Artificial Sequence: Synthetic oligonucleotide
ggcaugugcuauuccuuuc

SEQ ID NO: 3035393 - RNA, 19 nt, Artificial Sequence
  Description of Artificial Sequence: Synthetic oligonucleotide
gcagcauuagccaggcaga

SEQ ID NO: 3035394 - RNA, 19 nt, Artificial Sequence
  Description of Artificial Sequence: Synthetic oligonucleotide
gucagcuuagguaaauguu

SEQ ID NO: 3035395 - RNA, 19 nt, Artificial Sequence
  Description of Artificial Sequence: Synthetic oligonucleotide
cuggacaccaaccgucugu

SEQ ID NO: 3035396 - RNA, 19 nt, Artificial Sequence
  Description of Artificial Sequence: Synthetic oligonucleotide
cacaggaauuucacaggua

SEQ ID NO: 3035397 - RNA, 19 nt, Artificial Sequence
  Description of Artificial Sequence: Synthetic oligonucleotide
gguuaugaaggacuuuauu

SEQ ID NO: 3035398 - RNA, 19 nt, Artificial Sequence
  Description of Artificial Sequence: Synthetic oligonucleotide
agagcguccuucacaggaa

SEQ ID NO: 3035399 - RNA, 19 nt, Artificial Sequence
  Description of Artificial Sequence: Synthetic oligonucleotide
caccaaccgucuguuuuac

SEQ ID NO: 3035400 - RNA, 19 nt, Artificial Sequence
  Description of Artificial Sequence: Synthetic oligonucleotide
ccaggcagaaggguugaag

SEQ ID NO: 3035401 - RNA, 19 nt, Artificial Sequence
  Description of Artificial Sequence: Synthetic oligonucleotide
cuuccggaaaaucuuucuu

SEQ ID NO: 3035402 - RNA, 19 nt, Artificial Sequence
  Description of Artificial Sequence: Synthetic oligonucleotide
ccuucacaggaauuucaca

SEQ ID NO: 3035403 - RNA, 19 nt, Artificial Sequence
  Description of Artificial Sequence: Synthetic oligonucleotide
aggguugaagagcguccuu

SEQ ID NO: 3035404 - RNA, 19 nt, Artificial Sequence
  Description of Artificial Sequence: Synthetic oligonucleotide
ccaagguaggcagcauuag

SEQ ID NO: 3035405 - RNA, 19 nt, Artificial Sequence
  Description of Artificial Sequence: Synthetic oligonucleotide
cuauggcagccaccuccug

SEQ ID NO: 3035406 - RNA, 19 nt, Artificial Sequence
  Description of Artificial Sequence: Synthetic oligonucleotide
accuccugguuaaaaccaa

SEQ ID NO: 3035407 - RNA, 19 nt, Artificial Sequence
  Description of Artificial Sequence: Synthetic oligonucleotide
caacuauggcagccaccuc

SEQ ID NO: 3035408 - RNA, 19 nt, Artificial Sequence
  Description of Artificial Sequence: Synthetic oligonucleotide
gcaugugcuauuccuuucu

SEQ ID NO: 3035409 - RNA, 19 nt, Artificial Sequence
  Description of Artificial Sequence: Synthetic oligonucleotide
cuuucucacagagucggau

SEQ ID NO: 3035410 - RNA, 19 nt, Artificial Sequence
  Description of Artificial Sequence: Synthetic oligonucleotide
caucucucuuccgcacaug

SEQ ID NO: 3035411 - RNA, 19 nt, Artificial Sequence
  Description of Artificial Sequence: Synthetic oligonucleotide
gcuauuccuuucucacaga

SEQ ID NO: 3035412 - RNA, 19 nt, Artificial Sequence
  Description of Artificial Sequence: Synthetic oligonucleotide
gggcuuuugugguuaugaa

SEQ ID NO: 3035413 - RNA, 19 nt, Artificial Sequence
  Description of Artificial Sequence: Synthetic oligonucleotide
agccaggcagaaggguuga

SEQ ID NO: 3035414 - RNA, 19 nt, Artificial Sequence
  Description of Artificial Sequence: Synthetic oligonucleotide
gguuaaaaccaaggacaaa

SEQ ID NO: 3035415 - RNA, 19 nt, Artificial Sequence
  Description of Artificial Sequence: Synthetic oligonucleotide
caaccgucuguuuuaccau

SEQ ID NO: 3035416 - RNA, 19 nt, Artificial Sequence
  Description of Artificial Sequence: Synthetic oligonucleotide
ggauaucgccuuccggaaa

SEQ ID NO: 3035417 - RNA, 19 nt, Artificial Sequence
  Description of Artificial Sequence: Synthetic oligonucleotide
auaucgccuuccggaaaau

SEQ ID NO: 3035418 - RNA, 19 nt, Artificial Sequence
  Description of Artificial Sequence: Synthetic oligonucleotide
guacuuuacuggacaccaa

SEQ ID NO: 3035419 - RNA, 19 nt, Artificial Sequence
  Description of Artificial Sequence: Synthetic oligonucleotide
gagcguccuucacaggaau

SEQ ID NO: 3035420 - RNA, 19 nt, Artificial Sequence
  Description of Artificial Sequence: Synthetic oligonucleotide
cccaagguaggcagcauua

SEQ ID NO: 3035421 - RNA, 19 nt, Artificial Sequence
  Description of Artificial Sequence: Synthetic oligonucleotide
agccaccuccugguuaaaa

SEQ ID NO: 3035422 - RNA, 19 nt, Artificial Sequence
  Description of Artificial Sequence: Synthetic oligonucleotide
cuuccgcacauguaucauu

SEQ ID NO: 3035423 - RNA, 19 nt, Artificial Sequence
  Description of Artificial Sequence: Synthetic oligonucleotide
gaagggcuuuugugguuau

SEQ ID NO: 3035424 - RNA, 19 nt, Artificial Sequence
  Description of Artificial Sequence: Synthetic oligonucleotide
cagcauuagccaggcagaa

SEQ ID NO: 3035425 - RNA, 19 nt, Artificial Sequence
  Description of Artificial Sequence: Synthetic oligonucleotide
gggcagcuuauuauucauc

SEQ ID NO: 3035426 - RNA, 19 nt, Artificial Sequence
  Description of Artificial Sequence: Synthetic oligonucleotide
cagguaaaguucagucuuu

SEQ ID NO: 3035427 - RNA, 19 nt, Artificial Sequence
  Description of Artificial Sequence: Synthetic oligonucleotide
gcuuagguaaauguuccuu

SEQ ID NO: 3035428 - RNA, 19 nt, Artificial Sequence
  Description of Artificial Sequence: Synthetic oligonucleotide
ggacaaaggcaugugcuau

SEQ ID NO: 3035429 - RNA, 19 nt, Artificial Sequence
  Description of Artificial Sequence: Synthetic oligonucleotide
agcguccuucacaggaauu

SEQ ID NO: 3035430 - RNA, 19 nt, Artificial Sequence
  Description of Artificial Sequence: Synthetic oligonucleotide
cgucuguuuuaccauagua

SEQ ID NO: 3035431 - RNA, 19 nt, Artificial Sequence
  Description of Artificial Sequence: Synthetic oligonucleotide
ccuuccggaaaaucuuucu

SEQ ID NO: 3035432 - RNA, 19 nt, Artificial Sequence
  Description of Artificial Sequence: Synthetic oligonucleotide
gccuuccggaaaaucuuuc

SEQ ID NO: 3035433 - RNA, 19 nt, Artificial Sequence
  Description of Artificial Sequence: Synthetic oligonucleotide
aggcagcauuagccaggca

SEQ ID NO: 3035434 - RNA, 19 nt, Artificial Sequence
  Description of Artificial Sequence: Synthetic oligonucleotide
cagagucggauaucgccuu

SEQ ID NO: 3035435 - RNA, 19 nt, Artificial Sequence
  Description of Artificial Sequence: Synthetic oligonucleotide
ccgcacauguaucauuucu

SEQ ID NO: 3035436 - RNA, 19 nt, Artificial Sequence
  Description of Artificial Sequence: Synthetic oligonucleotide
cguccuucacaggaauuuc

SEQ ID NO: 3035437 - RNA, 19 nt, Artificial Sequence
  Description of Artificial Sequence: Synthetic oligonucleotide
cagaaggguugaagagcgu

SEQ ID NO: 3035438 - RNA, 19 nt, Artificial Sequence
  Description of Artificial Sequence: Synthetic oligonucleotide
ccuuucucacagagucgga

SEQ ID NO: 3035439 - RNA, 19 nt, Artificial Sequence
  Description of Artificial Sequence: Synthetic oligonucleotide
gcguccuucacaggaauuu

SEQ ID NO: 3035440 - RNA, 19 nt, Artificial Sequence
  Description of Artificial Sequence: Synthetic oligonucleotide
cggauaucgccuuccggaa

SEQ ID NO: 3035441 - RNA, 19 nt, Artificial Sequence
  Description of Artificial Sequence: Synthetic oligonucleotide
ccggaaaaucuuucuucau

SEQ ID NO: 3035442 - RNA, 19 nt, Artificial Sequence
  Description of Artificial Sequence: Synthetic oligonucleotide
ccgucuguuuuaccauagu

SEQ ID NO: 3035443 - RNA, 19 nt, Artificial Sequence
  Description of Artificial Sequence: Synthetic oligonucleotide
ggacaccaaccgucuguuu

SEQ ID NO: 3035444 - RNA, 19 nt, Artificial Sequence
  Description of Artificial Sequence: Synthetic oligonucleotide
cucccaagguaggcagcau

SEQ ID NO: 3035445 - RNA, 19 nt, Artificial Sequence
  Description of Artificial Sequence: Synthetic oligonucleotide
gccaggcagaaggguugaa

SEQ ID NO: 3035446 - RNA, 19 nt, Artificial Sequence
  Description of Artificial Sequence: Synthetic oligonucleotide
cgccuuccggaaaaucuuu

SEQ ID NO: 3035447 - RNA, 19 nt, Artificial Sequence
  Description of Artificial Sequence: Synthetic oligonucleotide
aacuucuacauuuauaggc

SEQ ID NO: 3035448 - RNA, 19 nt, Artificial Sequence
  Description of Artificial Sequence: Synthetic oligonucleotide
aaagaauuuaucucaaggg

SEQ ID NO: 3035449 - RNA, 19 nt, Artificial Sequence
  Description of Artificial Sequence: Synthetic oligonucleotide
uauauguucuguaagauga

SEQ ID NO: 3035450 - RNA, 19 nt, Artificial Sequence
  Description of Artificial Sequence: Synthetic oligonucleotide
aaagcuauuccauaacuuc

SEQ ID NO: 3035451 - RNA, 19 nt, Artificial Sequence
  Description of Artificial Sequence: Synthetic oligonucleotide
aauagaacuuccuaaagca

SEQ ID NO: 3035452 - RNA, 19 nt, Artificial Sequence
  Description of Artificial Sequence: Synthetic oligonucleotide
aacuauugaaagcuauucc

SEQ ID NO: 3035453 - RNA, 19 nt, Artificial Sequence
  Description of Artificial Sequence: Synthetic oligonucleotide
ugaguaaacagcaaaagcu

SEQ ID NO: 3035454 - RNA, 19 nt, Artificial Sequence
  Description of Artificial Sequence: Synthetic oligonucleotide
uguaagaugagaacuauug

SEQ ID NO: 3035455 - RNA, 19 nt, Artificial Sequence
  Description of Artificial Sequence: Synthetic oligonucleotide
uuagaugugaguaaacagc

SEQ ID NO: 3035456 - RNA, 19 nt, Artificial Sequence
  Description of Artificial Sequence: Synthetic oligonucleotide
aaagcagucucuucauucc

SEQ ID NO: 3035457 - RNA, 19 nt, Artificial Sequence
  Description of Artificial Sequence: Synthetic oligonucleotide
acacauugcacucaaaggg

SEQ ID NO: 3035458 - RNA, 19 nt, Artificial Sequence
  Description of Artificial Sequence: Synthetic oligonucleotide
agaggaacauaguaaaagc

SEQ ID NO: 3035459 - RNA, 19 nt, Artificial Sequence
  Description of Artificial Sequence: Synthetic oligonucleotide
uacguguuuacuuagaugu

SEQ ID NO: 3035460 - RNA, 19 nt, Artificial Sequence
  Description of Artificial Sequence: Synthetic oligonucleotide
gaauguagaagguaagagg

SEQ ID NO: 3035461 - RNA, 19 nt, Artificial Sequence
  Description of Artificial Sequence: Synthetic oligonucleotide
aagaauuuaucucaagggu

SEQ ID NO: 3035462 - RNA, 19 nt, Artificial Sequence
  Description of Artificial Sequence: Synthetic oligonucleotide
uuacaaauggcuuaugcug

SEQ ID NO: 3035463 - RNA, 19 nt, Artificial Sequence
  Description of Artificial Sequence: Synthetic oligonucleotide
gaagguaagaggaacauag

SEQ ID NO: 3035464 - RNA, 19 nt, Artificial Sequence
  Description of Artificial Sequence: Synthetic oligonucleotide
aaccaaagaauuuaucuca

SEQ ID NO: 3035465 - RNA, 19 nt, Artificial Sequence
  Description of Artificial Sequence: Synthetic oligonucleotide
caaagaauuuaucucaagg

SEQ ID NO: 3035466 - RNA, 19 nt, Artificial Sequence
  Description of Artificial Sequence: Synthetic oligonucleotide
uuuuauauguucuguaaga

SEQ ID NO: 3035467 - RNA, 19 nt, Artificial Sequence
  Description of Artificial Sequence: Synthetic oligonucleotide
aauguagaagguaagagga

SEQ ID NO: 3035468 - RNA, 19 nt, Artificial Sequence
  Description of Artificial Sequence: Synthetic oligonucleotide
aagaggaacauaguaaaag

SEQ ID NO: 3035469 - RNA, 19 nt, Artificial Sequence
  Description of Artificial Sequence: Synthetic oligonucleotide
aacauaguaaaagcuuccc

SEQ ID NO: 3035470 - RNA, 19 nt, Artificial Sequence
  Description of Artificial Sequence: Synthetic oligonucleotide
acagcaaaagcuuucccac

SEQ ID NO: 3035471 - RNA, 19 nt, Artificial Sequence
  Description of Artificial Sequence: Synthetic oligonucleotide
uauuccauaacuucuacau

SEQ ID NO: 3035472 - RNA, 19 nt, Artificial Sequence
  Description of Artificial Sequence: Synthetic oligonucleotide
acuauugaaagcuauucca

SEQ ID NO: 3035473 - RNA, 19 nt, Artificial Sequence
  Description of Artificial Sequence: Synthetic oligonucleotide
aaaagcuucccacacacau

SEQ ID NO: 3035474 - RNA, 19 nt, Artificial Sequence
  Description of Artificial Sequence: Synthetic oligonucleotide
cauaguaaaagcuucccac

SEQ ID NO: 3035475 - RNA, 19 nt, Artificial Sequence
  Description of Artificial Sequence: Synthetic oligonucleotide
aauucuuacguguuuacuu

SEQ ID NO: 3035476 - RNA, 19 nt, Artificial Sequence
  Description of Artificial Sequence: Synthetic oligonucleotide
uaagaugagaacuauugaa

SEQ ID NO: 3035477 - RNA, 19 nt, Artificial Sequence
  Description of Artificial Sequence: Synthetic oligonucleotide
aacagcaaaagcuuuccca

SEQ ID NO: 3035478 - RNA, 19 nt, Artificial Sequence
  Description of Artificial Sequence: Synthetic oligonucleotide
uuuacaaauggcuuaugcu

SEQ ID NO: 3035479 - RNA, 19 nt, Artificial Sequence
  Description of Artificial Sequence: Synthetic oligonucleotide
aauuugaaugcacugcuaa

SEQ ID NO: 3035480 - RNA, 19 nt, Artificial Sequence
  Description of Artificial Sequence: Synthetic oligonucleotide
agaugagaacuauugaaag

SEQ ID NO: 3035481 - RNA, 19 nt, Artificial Sequence
  Description of Artificial Sequence: Synthetic oligonucleotide
ugaauuugaaugcacugcu

SEQ ID NO: 3035482 - RNA, 19 nt, Artificial Sequence
  Description of Artificial Sequence: Synthetic oligonucleotide
aaacagcaaaagcuuuccc

SEQ ID NO: 3035483 - RNA, 19 nt, Artificial Sequence
  Description of Artificial Sequence: Synthetic oligonucleotide
uuugaaugcacugcuaaag

SEQ ID NO: 3035484 - RNA, 19 nt, Artificial Sequence
  Description of Artificial Sequence: Synthetic oligonucleotide
gaugagaacuauugaaagc

SEQ ID NO: 3035485 - RNA, 19 nt, Artificial Sequence
  Description of Artificial Sequence: Synthetic oligonucleotide
cuuagaugugaguaaacag

SEQ ID NO: 3035486 - RNA, 19 nt, Artificial Sequence
  Description of Artificial Sequence: Synthetic oligonucleotide
uagaugugaguaaacagca

SEQ ID NO: 3035487 - RNA, 19 nt, Artificial Sequence
  Description of Artificial Sequence: Synthetic oligonucleotide
aagcuucccacacacauug

SEQ ID NO: 3035488 - RNA, 19 nt, Artificial Sequence
  Description of Artificial Sequence: Synthetic oligonucleotide
aacuuccuaaagcagucuc

SEQ ID NO: 3035489 - RNA, 19 nt, Artificial Sequence
  Description of Artificial Sequence: Synthetic oligonucleotide
ugaauguagaagguaagag

SEQ ID NO: 3035490 - RNA, 19 nt, Artificial Sequence
  Description of Artificial Sequence: Synthetic oligonucleotide
caauagaacuuccuaaagc

SEQ ID NO: 3035491 - RNA, 19 nt, Artificial Sequence
  Description of Artificial Sequence: Synthetic oligonucleotide
auggcuuaugcugacaagc

SEQ ID NO: 3035492 - RNA, 19 nt, Artificial Sequence
  Description of Artificial Sequence: Synthetic oligonucleotide
aaucacuuuacaaauggcu

SEQ ID NO: 3035493 - RNA, 19 nt, Artificial Sequence
  Description of Artificial Sequence: Synthetic oligonucleotide
uuauauguucuguaagaug

SEQ ID NO: 3035494 - RNA, 19 nt, Artificial Sequence
  Description of Artificial Sequence: Synthetic oligonucleotide
aaagcaauagaacuuccua

SEQ ID NO: 3035495 - RNA, 19 nt, Artificial Sequence
  Description of Artificial Sequence: Synthetic oligonucleotide
cuuuacaaauggcuuaugc

SEQ ID NO: 3035496 - RNA, 19 nt, Artificial Sequence
  Description of Artificial Sequence: Synthetic oligonucleotide
ugugaauuugaaugcacug

SEQ ID NO: 3035497 - RNA, 19 nt, Artificial Sequence
  Description of Artificial Sequence: Synthetic oligonucleotide
ugaaagcuauuccauaacu

SEQ ID NO: 3035498 - RNA, 19 nt, Artificial Sequence
  Description of Artificial Sequence: Synthetic oligonucleotide
acacacauugcacucaaag

SEQ ID NO: 3035499 - RNA, 19 nt, Artificial Sequence
  Description of Artificial Sequence: Synthetic oligonucleotide
uccuaaagcagucucuuca

SEQ ID NO: 3035500 - RNA, 19 nt, Artificial Sequence
  Description of Artificial Sequence: Synthetic oligonucleotide
acugcuaaagcaauagaac

SEQ ID NO: 3035501 - RNA, 19 nt, Artificial Sequence
  Description of Artificial Sequence: Synthetic oligonucleotide
uugaaugcacugcuaaagc

SEQ ID NO: 3035502 - RNA, 19 nt, Artificial Sequence
  Description of Artificial Sequence: Synthetic oligonucleotide
uacaaauggcuuaugcuga

SEQ ID NO: 3035503 - RNA, 19 nt, Artificial Sequence
  Description of Artificial Sequence: Synthetic oligonucleotide
uccgcugugaauucuuacg

SEQ ID NO: 3035504 - RNA, 19 nt, Artificial Sequence
  Description of Artificial Sequence: Synthetic oligonucleotide
ucuucauuccuuccaacca

SEQ ID NO: 3035505 - RNA, 19 nt, Artificial Sequence
  Description of Artificial Sequence: Synthetic oligonucleotide
uuuacuuagaugugaguaa

SEQ ID NO: 3035506 - RNA, 19 nt, Artificial Sequence
  Description of Artificial Sequence: Synthetic oligonucleotide
uagaacuuccuaaagcagu

SEQ ID NO: 3035507 - RNA, 19 nt, Artificial Sequence
  Description of Artificial Sequence: Synthetic oligonucleotide
ugugaauguagaagguaag

SEQ ID NO: 3035508 - RNA, 19 nt, Artificial Sequence
  Description of Artificial Sequence: Synthetic oligonucleotide
gccacugugaauuugaaug

SEQ ID NO: 3035509 - RNA, 19 nt, Artificial Sequence
  Description of Artificial Sequence: Synthetic oligonucleotide
aagcaauagaacuuccuaa

SEQ ID NO: 3035510 - RNA, 19 nt, Artificial Sequence
  Description of Artificial Sequence: Synthetic oligonucleotide
ugugaguaaacagcaaaag

SEQ ID NO: 3035511 - RNA, 19 nt, Artificial Sequence
  Description of Artificial Sequence: Synthetic oligonucleotide
augagaacuauugaaagcu

SEQ ID NO: 3035512 - RNA, 19 nt, Artificial Sequence
  Description of Artificial Sequence: Synthetic oligonucleotide
uuccauaacuucuacauuu

SEQ ID NO: 3035513 - RNA, 19 nt, Artificial Sequence
  Description of Artificial Sequence: Synthetic oligonucleotide
cacacauugcacucaaagg

SEQ ID NO: 3035514 - RNA, 19 nt, Artificial Sequence
  Description of Artificial Sequence: Synthetic oligonucleotide
uaacuucuacauuuauagg

SEQ ID NO: 3035515 - RNA, 19 nt, Artificial Sequence
  Description of Artificial Sequence: Synthetic oligonucleotide
gugaguaaacagcaaaagc

SEQ ID NO: 3035516 - RNA, 19 nt, Artificial Sequence
  Description of Artificial Sequence: Synthetic oligonucleotide
auugaaagcuauuccauaa

SEQ ID NO: 3035517 - RNA, 19 nt, Artificial Sequence
  Description of Artificial Sequence: Synthetic oligonucleotide
guaaaagcuucccacacac

SEQ ID NO: 3035518 - RNA, 19 nt, Artificial Sequence
  Description of Artificial Sequence: Synthetic oligonucleotide
aaauggcuuaugcugacaa

SEQ ID NO: 3035519 - RNA, 19 nt, Artificial Sequence
  Description of Artificial Sequence: Synthetic oligonucleotide
uguucuguaagaugagaac

SEQ ID NO: 3035520 - RNA, 19 nt, Artificial Sequence
  Description of Artificial Sequence: Synthetic oligonucleotide
auaguaaaagcuucccaca

SEQ ID NO: 3035521 - RNA, 19 nt, Artificial Sequence
  Description of Artificial Sequence: Synthetic oligonucleotide
ugaaugcacugcuaaagca

SEQ ID NO: 3035522 - RNA, 19 nt, Artificial Sequence
  Description of Artificial Sequence: Synthetic oligonucleotide
uaaagcaauagaacuuccu

SEQ ID NO: 3035523 - RNA, 19 nt, Artificial Sequence
  Description of Artificial Sequence: Synthetic oligonucleotide
caaccaaagaauuuaucuc

SEQ ID NO: 3035524 - RNA, 19 nt, Artificial Sequence
  Description of Artificial Sequence: Synthetic oligonucleotide
aauggcuuaugcugacaag

SEQ ID NO: 3035525 - RNA, 19 nt, Artificial Sequence
  Description of Artificial Sequence: Synthetic oligonucleotide
uaaacagcaaaagcuuucc

SEQ ID NO: 3035526 - RNA, 19 nt, Artificial Sequence
  Description of Artificial Sequence: Synthetic oligonucleotide
guaagaggaacauaguaaa

SEQ ID NO: 3035527 - RNA, 19 nt, Artificial Sequence
  Description of Artificial Sequence: Synthetic oligonucleotide
gaugugaguaaacagcaaa

SEQ ID NO: 3035528 - RNA, 19 nt, Artificial Sequence
  Description of Artificial Sequence: Synthetic oligonucleotide
uguagaagguaagaggaac

SEQ ID NO: 3035529 - RNA, 19 nt, Artificial Sequence
  Description of Artificial Sequence: Synthetic oligonucleotide
aagaugagaacuauugaaa

SEQ ID NO: 3035530 - RNA, 19 nt, Artificial Sequence
  Description of Artificial Sequence: Synthetic oligonucleotide
uaguaaaagcuucccacac

SEQ ID NO: 3035531 - RNA, 19 nt, Artificial Sequence
  Description of Artificial Sequence: Synthetic oligonucleotide
uuacguguuuacuuagaug

SEQ ID NO: 3035532 - RNA, 19 nt, Artificial Sequence
  Description of Artificial Sequence: Synthetic oligonucleotide
cucuucauuccuuccaacc

SEQ ID NO: 3035533 - RNA, 19 nt, Artificial Sequence
  Description of Artificial Sequence: Synthetic oligonucleotide
uuuauauguucuguaagau

SEQ ID NO: 3035534 - RNA, 19 nt, Artificial Sequence
  Description of Artificial Sequence: Synthetic oligonucleotide
ugcacugcuaaagcaauag

SEQ ID NO: 3035535 - RNA, 19 nt, Artificial Sequence
  Description of Artificial Sequence: Synthetic oligonucleotide
acaaauggcuuaugcugac

SEQ ID NO: 3035536 - RNA, 19 nt, Artificial Sequence
  Description of Artificial Sequence: Synthetic oligonucleotide
agcaauagaacuuccuaaa

SEQ ID NO: 3035537 - RNA, 19 nt, Artificial Sequence
  Description of Artificial Sequence: Synthetic oligonucleotide
uugaaagcuauuccauaac

SEQ ID NO: 3035538 - RNA, 19 nt, Artificial Sequence
  Description of Artificial Sequence: Synthetic oligonucleotide
ugcuaaagcaauagaacuu

SEQ ID NO: 3035539 - RNA, 19 nt, Artificial Sequence
  Description of Artificial Sequence: Synthetic oligonucleotide
gaacuauugaaagcuauuc

SEQ ID NO: 3035540 - RNA, 19 nt, Artificial Sequence
  Description of Artificial Sequence: Synthetic oligonucleotide
augcugacaagcuuucuug

SEQ ID NO: 3035541 - RNA, 19 nt, Artificial Sequence
  Description of Artificial Sequence: Synthetic oligonucleotide
cuaaagcaauagaacuucc

SEQ ID NO: 3035542 - RNA, 19 nt, Artificial Sequence
  Description of Artificial Sequence: Synthetic oligonucleotide
uucuuacguguuuacuuag

SEQ ID NO: 3035543 - RNA, 19 nt, Artificial Sequence
  Description of Artificial Sequence: Synthetic oligonucleotide
gaacauaguaaaagcuucc

SEQ ID NO: 3035544 - RNA, 19 nt, Artificial Sequence
  Description of Artificial Sequence: Synthetic oligonucleotide
uucuguaagaugagaacua

SEQ ID NO: 3035545 - RNA, 19 nt, Artificial Sequence
  Description of Artificial Sequence: Synthetic oligonucleotide
acauaguaaaagcuuccca

SEQ ID NO: 3035546 - RNA, 19 nt, Artificial Sequence
  Description of Artificial Sequence: Synthetic oligonucleotide
gugaauuugaaugcacugc

SEQ ID NO: 3035547 - RNA, 19 nt, Artificial Sequence
  Description of Artificial Sequence: Synthetic oligonucleotide
acuuagaugugaguaaaca

SEQ ID NO: 3035548 - RNA, 19 nt, Artificial Sequence
  Description of Artificial Sequence: Synthetic oligonucleotide
uauugaaagcuauuccaua

SEQ ID NO: 3035549 - RNA, 19 nt, Artificial Sequence
  Description of Artificial Sequence: Synthetic oligonucleotide
agaacuuccuaaagcaguc

SEQ ID NO: 3035550 - RNA, 19 nt, Artificial Sequence
  Description of Artificial Sequence: Synthetic oligonucleotide
ucacuuuacaaauggcuua

SEQ ID NO: 3035551 - RNA, 19 nt, Artificial Sequence
  Description of Artificial Sequence: Synthetic oligonucleotide
uaggcuuucucuccgcugu

SEQ ID NO: 3035552 - RNA, 19 nt, Artificial Sequence
  Description of Artificial Sequence: Synthetic oligonucleotide
aagcuuucuugccacugug

SEQ ID NO: 3035553 - RNA, 19 nt, Artificial Sequence
  Description of Artificial Sequence: Synthetic oligonucleotide
uaugcugacaagcuuucuu

SEQ ID NO: 3035554 - RNA, 19 nt, Artificial Sequence
  Description of Artificial Sequence: Synthetic oligonucleotide
aagcuauuccauaacuucu

SEQ ID NO: 3035555 - RNA, 19 nt, Artificial Sequence
  Description of Artificial Sequence: Synthetic oligonucleotide
aguaaaagcuucccacaca

SEQ ID NO: 3035556 - RNA, 19 nt, Artificial Sequence
  Description of Artificial Sequence: Synthetic oligonucleotide
uaagaggaacauaguaaaa

SEQ ID NO: 3035557 - RNA, 19 nt, Artificial Sequence
  Description of Artificial Sequence: Synthetic oligonucleotide
ucuuacguguuuacuuaga

SEQ ID NO: 3035558 - RNA, 19 nt, Artificial Sequence
  Description of Artificial Sequence: Synthetic oligonucleotide
acuucuacauuuauaggcu

SEQ ID NO: 3035559 - RNA, 19 nt, Artificial Sequence
  Description of Artificial Sequence: Synthetic oligonucleotide
guuuacuuagaugugagua

SEQ ID NO: 3035560 - RNA, 19 nt, Artificial Sequence
  Description of Artificial Sequence: Synthetic oligonucleotide
guaagaugagaacuauuga

SEQ ID NO: 3035561 - RNA, 19 nt, Artificial Sequence
  Description of Artificial Sequence: Synthetic oligonucleotide
auucuuacguguuuacuua

SEQ ID NO: 3035562 - RNA, 19 nt, Artificial Sequence
  Description of Artificial Sequence: Synthetic oligonucleotide
uuacuuagaugugaguaaa

SEQ ID NO: 3035563 - RNA, 19 nt, Artificial Sequence
  Description of Artificial Sequence: Synthetic oligonucleotide
agguaagaggaacauagua

SEQ ID NO: 3035564 - RNA, 19 nt, Artificial Sequence
  Description of Artificial Sequence: Synthetic oligonucleotide
ucauuccuuccaaccaaag

SEQ ID NO: 3035565 - RNA, 19 nt, Artificial Sequence
  Description of Artificial Sequence: Synthetic oligonucleotide
acugugaauuugaaugcac

SEQ ID NO: 3035566 - RNA, 19 nt, Artificial Sequence
  Description of Artificial Sequence: Synthetic oligonucleotide
uuccuuccaaccaaagaau

SEQ ID NO: 3035567 - RNA, 19 nt, Artificial Sequence
  Description of Artificial Sequence: Synthetic oligonucleotide
ugcugacaagcuuucuugc

SEQ ID NO: 3035568 - RNA, 19 nt, Artificial Sequence
  Description of Artificial Sequence: Synthetic oligonucleotide
auagaacuuccuaaagcag

SEQ ID NO: 3035569 - RNA, 19 nt, Artificial Sequence
  Description of Artificial Sequence: Synthetic oligonucleotide
uguuuacuuagaugugagu

SEQ ID NO: 3035570 - RNA, 19 nt, Artificial Sequence
  Description of Artificial Sequence: Synthetic oligonucleotide
ugacaagcuuucuugccac

SEQ ID NO: 3035571 - RNA, 19 nt, Artificial Sequence
  Description of Artificial Sequence: Synthetic oligonucleotide
uggcuuaugcugacaagcu

SEQ ID NO: 3035572 - RNA, 19 nt, Artificial Sequence
  Description of Artificial Sequence: Synthetic oligonucleotide
cgcaugugaauguagaagg

SEQ ID NO: 3035573 - RNA, 19 nt, Artificial Sequence
  Description of Artificial Sequence: Synthetic oligonucleotide
uauaggcuuucucuccgcu

SEQ ID NO: 3035574 - RNA, 19 nt, Artificial Sequence
  Description of Artificial Sequence: Synthetic oligonucleotide
cacugcuaaagcaauagaa

SEQ ID NO: 3035575 - RNA, 19 nt, Artificial Sequence
  Description of Artificial Sequence: Synthetic oligonucleotide
agaauuuaucucaaggguu

SEQ ID NO: 3035576 - RNA, 19 nt, Artificial Sequence
  Description of Artificial Sequence: Synthetic oligonucleotide
aagcagucucuucauuccu

SEQ ID NO: 3035577 - RNA, 19 nt, Artificial Sequence
  Description of Artificial Sequence: Synthetic oligonucleotide
uccaaccaaagaauuuauc

SEQ ID NO: 3035578 - RNA, 19 nt, Artificial Sequence
  Description of Artificial Sequence: Synthetic oligonucleotide
uacuuagaugugaguaaac

SEQ ID NO: 3035579 - RNA, 19 nt, Artificial Sequence
  Description of Artificial Sequence: Synthetic oligonucleotide
auuugaaugcacugcuaaa

SEQ ID NO: 3035580 - RNA, 19 nt, Artificial Sequence
  Description of Artificial Sequence: Synthetic oligonucleotide
cuuaugcugacaagcuuuc

SEQ ID NO: 3035581 - RNA, 19 nt, Artificial Sequence
  Description of Artificial Sequence: Synthetic oligonucleotide
aaugcacugcuaaagcaau

SEQ ID NO: 3035582 - RNA, 19 nt, Artificial Sequence
  Description of Artificial Sequence: Synthetic oligonucleotide
uguccgcaugugaauguag

SEQ ID NO: 3035583 - RNA, 19 nt, Artificial Sequence
  Description of Artificial Sequence: Synthetic oligonucleotide
uccauaacuucuacauuua

SEQ ID NO: 3035584 - RNA, 19 nt, Artificial Sequence
  Description of Artificial Sequence: Synthetic oligonucleotide
ugagaacuauugaaagcua

SEQ ID NO: 3035585 - RNA, 19 nt, Artificial Sequence
  Description of Artificial Sequence: Synthetic oligonucleotide
uucauuccuuccaaccaaa

SEQ ID NO: 3035586 - RNA, 19 nt, Artificial Sequence
  Description of Artificial Sequence: Synthetic oligonucleotide
uuauaggcuuucucuccgc

SEQ ID NO: 3035587 - RNA, 19 nt, Artificial Sequence
  Description of Artificial Sequence: Synthetic oligonucleotide
uaaaagcuucccacacaca

SEQ ID NO: 3035588 - RNA, 19 nt, Artificial Sequence
  Description of Artificial Sequence: Synthetic oligonucleotide
gcaauagaacuuccuaaag

SEQ ID NO: 3035589 - RNA, 19 nt, Artificial Sequence
  Description of Artificial Sequence: Synthetic oligonucleotide
guguuuacuuagaugugag

SEQ ID NO: 3035590 - RNA, 19 nt, Artificial Sequence
  Description of Artificial Sequence: Synthetic oligonucleotide
uuccaaccaaagaauuuau

SEQ ID NO: 3035591 - RNA, 19 nt, Artificial Sequence
  Description of Artificial Sequence: Synthetic oligonucleotide
gaaugcacugcuaaagcaa

SEQ ID NO: 3035592 - RNA, 19 nt, Artificial Sequence
  Description of Artificial Sequence: Synthetic oligonucleotide
ucuguaagaugagaacuau

SEQ ID NO: 3035593 - RNA, 19 nt, Artificial Sequence
  Description of Artificial Sequence: Synthetic oligonucleotide
cauaacuucuacauuuaua

SEQ ID NO: 3035594 - RNA, 19 nt, Artificial Sequence
  Description of Artificial Sequence: Synthetic oligonucleotide
guaaacagcaaaagcuuuc

SEQ ID NO: 3035595 - RNA, 19 nt, Artificial Sequence
  Description of Artificial Sequence: Synthetic oligonucleotide
augugaauguagaagguaa

SEQ ID NO: 3035596 - RNA, 19 nt, Artificial Sequence
  Description of Artificial Sequence: Synthetic oligonucleotide
cugcuaaagcaauagaacu

SEQ ID NO: 3035597 - RNA, 19 nt, Artificial Sequence
  Description of Artificial Sequence: Synthetic oligonucleotide
ggaacauaguaaaagcuuc

SEQ ID NO: 3035598 - RNA, 19 nt, Artificial Sequence
  Description of Artificial Sequence: Synthetic oligonucleotide
uccuuccaaccaaagaauu

SEQ ID NO: 3035599 - RNA, 19 nt, Artificial Sequence
  Description of Artificial Sequence: Synthetic oligonucleotide
aggaacauaguaaaagcuu

SEQ ID NO: 3035600 - RNA, 19 nt, Artificial Sequence
  Description of Artificial Sequence: Synthetic oligonucleotide
aucacuuuacaaauggcuu

SEQ ID NO: 3035601 - RNA, 19 nt, Artificial Sequence
  Description of Artificial Sequence: Synthetic oligonucleotide
uagaagguaagaggaacau

SEQ ID NO: 3035602 - RNA, 19 nt, Artificial Sequence
  Description of Artificial Sequence: Synthetic oligonucleotide
gguaagaggaacauaguaa

SEQ ID NO: 3035603 - RNA, 19 nt, Artificial Sequence
  Description of Artificial Sequence: Synthetic oligonucleotide
guucuguaagaugagaacu

SEQ ID NO: 3035604 - RNA, 19 nt, Artificial Sequence
  Description of Artificial Sequence: Synthetic oligonucleotide
cuauuccauaacuucuaca

SEQ ID NO: 3035605 - RNA, 19 nt, Artificial Sequence
  Description of Artificial Sequence: Synthetic oligonucleotide
auuccauaacuucuacauu

SEQ ID NO: 3035606 - RNA, 19 nt, Artificial Sequence
  Description of Artificial Sequence: Synthetic oligonucleotide
cugacaagcuuucuugcca

SEQ ID NO: 3035607 - RNA, 19 nt, Artificial Sequence
  Description of Artificial Sequence: Synthetic oligonucleotide
guagaagguaagaggaaca

SEQ ID NO: 3035608 - RNA, 19 nt, Artificial Sequence
  Description of Artificial Sequence: Synthetic oligonucleotide
aagguaagaggaacauagu

SEQ ID NO: 3035609 - RNA, 19 nt, Artificial Sequence
  Description of Artificial Sequence: Synthetic oligonucleotide
gaggaacauaguaaaagcu

SEQ ID NO: 3035610 - RNA, 19 nt, Artificial Sequence
  Description of Artificial Sequence: Synthetic oligonucleotide
auauguucuguaagaugag

SEQ ID NO: 3035611 - RNA, 19 nt, Artificial Sequence
  Description of Artificial Sequence: Synthetic oligonucleotide
auguucuguaagaugagaa

SEQ ID NO: 3035612 - RNA, 19 nt, Artificial Sequence
  Description of Artificial Sequence: Synthetic oligonucleotide
gugaauguagaagguaaga

SEQ ID NO: 3035613 - RNA, 19 nt, Artificial Sequence
  Description of Artificial Sequence: Synthetic oligonucleotide
uccgcaugugaauguagaa

SEQ ID NO: 3035614 - RNA, 19 nt, Artificial Sequence
  Description of Artificial Sequence: Synthetic oligonucleotide
aauuuaucucaaggguuuu

SEQ ID NO: 3035615 - RNA, 19 nt, Artificial Sequence
  Description of Artificial Sequence: Synthetic oligonucleotide
ccacugugaauuugaaugc

SEQ ID NO: 3035616 - RNA, 19 nt, Artificial Sequence
  Description of Artificial Sequence: Synthetic oligonucleotide
acaagcuuucuugccacug

SEQ ID NO: 3035617 - RNA, 19 nt, Artificial Sequence
  Description of Artificial Sequence: Synthetic oligonucleotide
gaauuuaucucaaggguuu

SEQ ID NO: 3035618 - RNA, 19 nt, Artificial Sequence
  Description of Artificial Sequence: Synthetic oligonucleotide
aguaaacagcaaaagcuuu

SEQ ID NO: 3035619 - RNA, 19 nt, Artificial Sequence
  Description of Artificial Sequence: Synthetic oligonucleotide
augugaguaaacagcaaaa

SEQ ID NO: 3035620 - RNA, 19 nt, Artificial Sequence
  Description of Artificial Sequence: Synthetic oligonucleotide
cuuccaaccaaagaauuua

SEQ ID NO: 3035621 - RNA, 19 nt, Artificial Sequence
  Description of Artificial Sequence: Synthetic oligonucleotide
cuucauuccuuccaaccaa

SEQ ID NO: 3035622 - RNA, 19 nt, Artificial Sequence
  Description of Artificial Sequence: Synthetic oligonucleotide
cuauugaaagcuauuccau

SEQ ID NO: 3035623 - RNA, 19 nt, Artificial Sequence
  Description of Artificial Sequence: Synthetic oligonucleotide
acuuccuaaagcagucucu

SEQ ID NO: 3035624 - RNA, 19 nt, Artificial Sequence
  Description of Artificial Sequence: Synthetic oligonucleotide
cagucucuucauuccuucc

SEQ ID NO: 3035625 - RNA, 19 nt, Artificial Sequence
  Description of Artificial Sequence: Synthetic oligonucleotide
agaacuauugaaagcuauu

SEQ ID NO: 3035626 - RNA, 19 nt, Artificial Sequence
  Description of Artificial Sequence: Synthetic oligonucleotide
ccaaccaaagaauuuaucu

SEQ ID NO: 3035627 - RNA, 19 nt, Artificial Sequence
  Description of Artificial Sequence: Synthetic oligonucleotide
ucuugccacugugaauuug

SEQ ID NO: 3035628 - RNA, 19 nt, Artificial Sequence
  Description of Artificial Sequence: Synthetic oligonucleotide
gcugacaagcuuucuugcc

SEQ ID NO: 3035629 - RNA, 19 nt, Artificial Sequence
  Description of Artificial Sequence: Synthetic oligonucleotide
uuccuaaagcagucucuuc

SEQ ID NO: 3035630 - RNA, 19 nt, Artificial Sequence
  Description of Artificial Sequence: Synthetic oligonucleotide
gaguaaacagcaaaagcuu

SEQ ID NO: 3035631 - RNA, 19 nt, Artificial Sequence
  Description of Artificial Sequence: Synthetic oligonucleotide
aaagcuucccacacacauu

SEQ ID NO: 3035632 - RNA, 19 nt, Artificial Sequence
  Description of Artificial Sequence: Synthetic oligonucleotide
ugccacugugaauuugaau

SEQ ID NO: 3035633 - RNA, 19 nt, Artificial Sequence
  Description of Artificial Sequence: Synthetic oligonucleotide
ccaaagaauuuaucucaag

SEQ ID NO: 3035634 - RNA, 19 nt, Artificial Sequence
  Description of Artificial Sequence: Synthetic oligonucleotide
cuccgcugugaauucuuac

SEQ ID NO: 3035635 - RNA, 19 nt, Artificial Sequence
  Description of Artificial Sequence: Synthetic oligonucleotide
accaaagaauuuaucucaa

SEQ ID NO: 3035636 - RNA, 19 nt, Artificial Sequence
  Description of Artificial Sequence: Synthetic oligonucleotide
gaaagcuauuccauaacuu

SEQ ID NO: 3035637 - RNA, 19 nt, Artificial Sequence
  Description of Artificial Sequence: Synthetic oligonucleotide
cugugaauuugaaugcacu

SEQ ID NO: 3035638 - RNA, 19 nt, Artificial Sequence
  Description of Artificial Sequence: Synthetic oligonucleotide
gcuauuccauaacuucuac

SEQ ID NO: 3035639 - RNA, 19 nt, Artificial Sequence
  Description of Artificial Sequence: Synthetic oligonucleotide
uugccacugugaauuugaa

SEQ ID NO: 3035640 - RNA, 19 nt, Artificial Sequence
  Description of Artificial Sequence: Synthetic oligonucleotide
uuaugcugacaagcuuucu

SEQ ID NO: 3035641 - RNA, 19 nt, Artificial Sequence
  Description of Artificial Sequence: Synthetic oligonucleotide
gagaacuauugaaagcuau

SEQ ID NO: 3035642 - RNA, 19 nt, Artificial Sequence
  Description of Artificial Sequence: Synthetic oligonucleotide
acuuuacaaauggcuuaug

SEQ ID NO: 3035643 - RNA, 19 nt, Artificial Sequence
  Description of Artificial Sequence: Synthetic oligonucleotide
agaagguaagaggaacaua

SEQ ID NO: 3035644 - RNA, 19 nt, Artificial Sequence
  Description of Artificial Sequence: Synthetic oligonucleotide
ucucccguguguguccgca

SEQ ID NO: 3035645 - RNA, 19 nt, Artificial Sequence
  Description of Artificial Sequence: Synthetic oligonucleotide
gcugugaauucuuacgugu

SEQ ID NO: 3035646 - RNA, 19 nt, Artificial Sequence
  Description of Artificial Sequence: Synthetic oligonucleotide
gaauuugaaugcacugcua

SEQ ID NO: 3035647 - RNA, 19 nt, Artificial Sequence
  Description of Artificial Sequence: Synthetic oligonucleotide
caugugaauguagaaggua

SEQ ID NO: 3035648 - RNA, 19 nt, Artificial Sequence
  Description of Artificial Sequence: Synthetic oligonucleotide
ucuccgcugugaauucuua

SEQ ID NO: 3035649 - RNA, 19 nt, Artificial Sequence
  Description of Artificial Sequence: Synthetic oligonucleotide
agcuauuccauaacuucua

SEQ ID NO: 3035650 - RNA, 19 nt, Artificial Sequence
  Description of Artificial Sequence: Synthetic oligonucleotide
cuuacguguuuacuuagau

SEQ ID NO: 3035651 - RNA, 19 nt, Artificial Sequence
  Description of Artificial Sequence: Synthetic oligonucleotide
acguguuuacuuagaugug

SEQ ID NO: 3035652 - RNA, 19 nt, Artificial Sequence
  Description of Artificial Sequence: Synthetic oligonucleotide
gcuuucuugccacugugaa

SEQ ID NO: 3035653 - RNA, 19 nt, Artificial Sequence
  Description of Artificial Sequence: Synthetic oligonucleotide
cagcaaaagcuuucccaca

SEQ ID NO: 3035654 - RNA, 19 nt, Artificial Sequence
  Description of Artificial Sequence: Synthetic oligonucleotide
auguagaagguaagaggaa

SEQ ID NO: 3035655 - RNA, 19 nt, Artificial Sequence
  Description of Artificial Sequence: Synthetic oligonucleotide
cacugugaauuugaaugca

SEQ ID NO: 3035656 - RNA, 19 nt, Artificial Sequence
  Description of Artificial Sequence: Synthetic oligonucleotide
ccgcaugugaauguagaag

SEQ ID NO: 3035657 - RNA, 19 nt, Artificial Sequence
  Description of Artificial Sequence: Synthetic oligonucleotide
agcuucccacacacauugc

SEQ ID NO: 3035658 - RNA, 19 nt, Artificial Sequence
  Description of Artificial Sequence: Synthetic oligonucleotide
guccgcaugugaauguaga

SEQ ID NO: 3035659 - RNA, 19 nt, Artificial Sequence
  Description of Artificial Sequence: Synthetic oligonucleotide
gcagucucuucauuccuuc

SEQ ID NO: 3035660 - RNA, 19 nt, Artificial Sequence
  Description of Artificial Sequence: Synthetic oligonucleotide
agaugugaguaaacagcaa

SEQ ID NO: 3035661 - RNA, 19 nt, Artificial Sequence
  Description of Artificial Sequence: Synthetic oligonucleotide
ucucuccgcugugaauucu

SEQ ID NO: 3035662 - RNA, 19 nt, Artificial Sequence
  Description of Artificial Sequence: Synthetic oligonucleotide
caaauggcuuaugcugaca

SEQ ID NO: 3035663 - RNA, 19 nt, Artificial Sequence
  Description of Artificial Sequence: Synthetic oligonucleotide
gaacuuccuaaagcagucu

SEQ ID NO: 3035664 - RNA, 19 nt, Artificial Sequence
  Description of Artificial Sequence: Synthetic oligonucleotide
gacaagcuuucuugccacu

SEQ ID NO: 3035665 - RNA, 19 nt, Artificial Sequence
  Description of Artificial Sequence: Synthetic oligonucleotide
cuuucuugccacugugaau

SEQ ID NO: 3035666 - RNA, 19 nt, Artificial Sequence
  Description of Artificial Sequence: Synthetic oligonucleotide
gcacugcuaaagcaauaga

SEQ ID NO: 3035667 - RNA, 19 nt, Artificial Sequence
  Description of Artificial Sequence: Synthetic oligonucleotide
cuucuacauuuauaggcuu

SEQ ID NO: 3035668 - RNA, 19 nt, Artificial Sequence
  Description of Artificial Sequence: Synthetic oligonucleotide
agcagucucuucauuccuu

SEQ ID NO: 3035669 - RNA, 19 nt, Artificial Sequence
  Description of Artificial Sequence: Synthetic oligonucleotide
cacuuuacaaauggcuuau

SEQ ID NO: 3035670 - RNA, 19 nt, Artificial Sequence
  Description of Artificial Sequence: Synthetic oligonucleotide
cuguaagaugagaacuauu

SEQ ID NO: 3035671 - RNA, 19 nt, Artificial Sequence
  Description of Artificial Sequence: Synthetic oligonucleotide
gcuuaugcugacaagcuuu

SEQ ID NO: 3035672 - RNA, 19 nt, Artificial Sequence
  Description of Artificial Sequence: Synthetic oligonucleotide
cuuccuaaagcagucucuu

SEQ ID NO: 3035673 - RNA, 19 nt, Artificial Sequence
  Description of Artificial Sequence: Synthetic oligonucleotide
cguguuuacuuagauguga

SEQ ID NO: 3035674 - RNA, 19 nt, Artificial Sequence
  Description of Artificial Sequence: Synthetic oligonucleotide
cgcugugaauucuuacgug

SEQ ID NO: 3035675 - RNA, 19 nt, Artificial Sequence
  Description of Artificial Sequence: Synthetic oligonucleotide
gcuuucucuccgcugugaa

SEQ ID NO: 3035676 - RNA, 19 nt, Artificial Sequence
  Description of Artificial Sequence: Synthetic oligonucleotide
augcacugcuaaagcaaua

SEQ ID NO: 3035677 - RNA, 19 nt, Artificial Sequence
  Description of Artificial Sequence: Synthetic oligonucleotide
cucucccguguguguccgc

SEQ ID NO: 3035678 - RNA, 19 nt, Artificial Sequence
  Description of Artificial Sequence: Synthetic oligonucleotide
guguccgcaugugaaugua

SEQ ID NO: 3035679 - RNA, 19 nt, Artificial Sequence
  Description of Artificial Sequence: Synthetic oligonucleotide
gcaugugaauguagaaggu

SEQ ID NO: 3035680 - RNA, 19 nt, Artificial Sequence
  Description of Artificial Sequence: Synthetic oligonucleotide
ggcuuaugcugacaagcuu

SEQ ID NO: 3035681 - RNA, 19 nt, Artificial Sequence
  Description of Artificial Sequence: Synthetic oligonucleotide
ggcuuucucuccgcuguga

SEQ ID NO: 3035682 - RNA, 19 nt, Artificial Sequence
  Description of Artificial Sequence: Synthetic oligonucleotide
ccgcugugaauucuuacgu

SEQ ID NO: 3035683 - RNA, 19 nt, Artificial Sequence
  Description of Artificial Sequence: Synthetic oligonucleotide
ccacacacauugcacucaa

SEQ ID NO: 3035684 - RNA, 19 nt, Artificial Sequence
  Description of Artificial Sequence: Synthetic oligonucleotide
ccuuccaaccaaagaauuu

SEQ ID NO: 3035685 - RNA, 19 nt, Artificial Sequence
  Description of Artificial Sequence: Synthetic oligonucleotide
cucuccgcugugaauucuu

SEQ ID NO: 3035686 - RNA, 19 nt, Artificial Sequence
  Description of Artificial Sequence: Synthetic oligonucleotide
ccauaacuucuacauuuau

SEQ ID NO: 3035687 - RNA, 19 nt, Artificial Sequence
  Description of Artificial Sequence: Synthetic oligonucleotide
cccacacacauugcacuca

SEQ ID NO: 3035688 - RNA, 19 nt, Artificial Sequence
  Description of Artificial Sequence: Synthetic oligonucleotide
cucccguguguguccgcau

SEQ ID NO: 3035689 - RNA, 19 nt, Artificial Sequence
  Description of Artificial Sequence: Synthetic oligonucleotide
cauaguuccauauaccugg

SEQ ID NO: 3035690 - RNA, 19 nt, Artificial Sequence
  Description of Artificial Sequence: Synthetic oligonucleotide
aguuccauauaccuggccc

SEQ ID NO: 3035691 - RNA, 19 nt, Artificial Sequence
  Description of Artificial Sequence: Synthetic oligonucleotide
uguagguacugccagaacc

SEQ ID NO: 3035692 - RNA, 19 nt, Artificial Sequence
  Description of Artificial Sequence: Synthetic oligonucleotide
agagcgauggcauuugugg

SEQ ID NO: 3035693 - RNA, 19 nt, Artificial Sequence
  Description of Artificial Sequence: Synthetic oligonucleotide
uaaauguagguacugccag

SEQ ID NO: 3035694 - RNA, 19 nt, Artificial Sequence
  Description of Artificial Sequence: Synthetic oligonucleotide
caucguagaacuuuggcag

SEQ ID NO: 3035695 - RNA, 19 nt, Artificial Sequence
  Description of Artificial Sequence: Synthetic oligonucleotide
cacauaaccguaaauguag

SEQ ID NO: 3035696 - RNA, 19 nt, Artificial Sequence
  Description of Artificial Sequence: Synthetic oligonucleotide
augacaccccgcuagagcc

SEQ ID NO: 3035697 - RNA, 19 nt, Artificial Sequence
  Description of Artificial Sequence: Synthetic oligonucleotide
gauggcaaaaggcugucgg

SEQ ID NO: 3035698 - RNA, 19 nt, Artificial Sequence
  Description of Artificial Sequence: Synthetic oligonucleotide
uacucgaugguccacacca

SEQ ID NO: 3035699 - RNA, 19 nt, Artificial Sequence
  Description of Artificial Sequence: Synthetic oligonucleotide
agggacaagucacucaucg

SEQ ID NO: 3035700 - RNA, 19 nt, Artificial Sequence
  Description of Artificial Sequence: Synthetic oligonucleotide
uaaccguaaauguagguac

SEQ ID NO: 3035701 - RNA, 19 nt, Artificial Sequence
  Description of Artificial Sequence: Synthetic oligonucleotide
ucaucguagaacuuuggca

SEQ ID NO: 3035702 - RNA, 19 nt, Artificial Sequence
  Description of Artificial Sequence: Synthetic oligonucleotide
uaggugauauuccuuacca

SEQ ID NO: 3035703 - RNA, 19 nt, Artificial Sequence
  Description of Artificial Sequence: Synthetic oligonucleotide
ucgguucauggccagagcg

SEQ ID NO: 3035704 - RNA, 19 nt, Artificial Sequence
  Description of Artificial Sequence: Synthetic oligonucleotide
aacuuuggcagcucaucuc

SEQ ID NO: 3035705 - RNA, 19 nt, Artificial Sequence
  Description of Artificial Sequence: Synthetic oligonucleotide
uccacauaaccguaaaugu

SEQ ID NO: 3035706 - RNA, 19 nt, Artificial Sequence
  Description of Artificial Sequence: Synthetic oligonucleotide
guagaugacaccccgcuag

SEQ ID NO: 3035707 - RNA, 19 nt, Artificial Sequence
  Description of Artificial Sequence: Synthetic oligonucleotide
ugcuuuauaggcugagucc

SEQ ID NO: 3035708 - RNA, 19 nt, Artificial Sequence
  Description of Artificial Sequence: Synthetic oligonucleotide
uucauggccagagcgaugg

SEQ ID NO: 3035709 - RNA, 19 nt, Artificial Sequence
  Description of Artificial Sequence: Synthetic oligonucleotide
auggcauuuguggugaagc

SEQ ID NO: 3035710 - RNA, 19 nt, Artificial Sequence
  Description of Artificial Sequence: Synthetic oligonucleotide
acaccaguggcugugaugg

SEQ ID NO: 3035711 - RNA, 19 nt, Artificial Sequence
  Description of Artificial Sequence: Synthetic oligonucleotide
aagucacucaucguagaac

SEQ ID NO: 3035712 - RNA, 19 nt, Artificial Sequence
  Description of Artificial Sequence: Synthetic oligonucleotide
agucacucaucguagaacu

SEQ ID NO: 3035713 - RNA, 19 nt, Artificial Sequence
  Description of Artificial Sequence: Synthetic oligonucleotide
aucagcauuccucccauag

SEQ ID NO: 3035714 - RNA, 19 nt, Artificial Sequence
  Description of Artificial Sequence: Synthetic oligonucleotide
caggauuacucgauggucc

SEQ ID NO: 3035715 - RNA, 19 nt, Artificial Sequence
  Description of Artificial Sequence: Synthetic oligonucleotide
aggcugaguccacauaacc

SEQ ID NO: 3035716 - RNA, 19 nt, Artificial Sequence
  Description of Artificial Sequence: Synthetic oligonucleotide
ucaugccugcuuuauaggc

SEQ ID NO: 3035717 - RNA, 19 nt, Artificial Sequence
  Description of Artificial Sequence: Synthetic oligonucleotide
aucguagaacuuuggcagc

SEQ ID NO: 3035718 - RNA, 19 nt, Artificial Sequence
  Description of Artificial Sequence: Synthetic oligonucleotide
uacuuguaggugauauucc

SEQ ID NO: 3035719 - RNA, 19 nt, Artificial Sequence
  Description of Artificial Sequence: Synthetic oligonucleotide
aaaaggcugucggaucagc

SEQ ID NO: 3035720 - RNA, 19 nt, Artificial Sequence
  Description of Artificial Sequence: Synthetic oligonucleotide
auaggcugaguccacauaa

SEQ ID NO: 3035721 - RNA, 19 nt, Artificial Sequence
  Description of Artificial Sequence: Synthetic oligonucleotide
gaugacaccccgcuagagc

SEQ ID NO: 3035722 - RNA, 19 nt, Artificial Sequence
  Description of Artificial Sequence: Synthetic oligonucleotide
guagguacugccagaaccg

SEQ ID NO: 3035723 - RNA, 19 nt, Artificial Sequence
  Description of Artificial Sequence: Synthetic oligonucleotide
ugucggaucagcauuccuc

SEQ ID NO: 3035724 - RNA, 19 nt, Artificial Sequence
  Description of Artificial Sequence: Synthetic oligonucleotide
acuuguaggugauauuccu

SEQ ID NO: 3035725 - RNA, 19 nt, Artificial Sequence
  Description of Artificial Sequence: Synthetic oligonucleotide
guccacauaaccguaaaug

SEQ ID NO: 3035726 - RNA, 19 nt, Artificial Sequence
  Description of Artificial Sequence: Synthetic oligonucleotide
uuuguggugaagcgccugc

SEQ ID NO: 3035727 - RNA, 19 nt, Artificial Sequence
  Description of Artificial Sequence: Synthetic oligonucleotide
auuacucgaugguccacac

SEQ ID NO: 3035728 - RNA, 19 nt, Artificial Sequence
  Description of Artificial Sequence: Synthetic oligonucleotide
ucaucucccaggauuacuc

SEQ ID NO: 3035729 - RNA, 19 nt, Artificial Sequence
  Description of Artificial Sequence: Synthetic oligonucleotide
uuguaggugauauuccuua

SEQ ID NO: 3035730 - RNA, 19 nt, Artificial Sequence
  Description of Artificial Sequence: Synthetic oligonucleotide
uggcauuuguggugaagcg

SEQ ID NO: 3035731 - RNA, 19 nt, Artificial Sequence
  Description of Artificial Sequence: Synthetic oligonucleotide
ucccaggauuacucgaugg

SEQ ID NO: 3035732 - RNA, 19 nt, Artificial Sequence
  Description of Artificial Sequence: Synthetic oligonucleotide
aggugauauuccuuaccac

SEQ ID NO: 3035733 - RNA, 19 nt, Artificial Sequence
  Description of Artificial Sequence: Synthetic oligonucleotide
gacaagucacucaucguag

SEQ ID NO: 3035734 - RNA, 19 nt, Artificial Sequence
  Description of Artificial Sequence: Synthetic oligonucleotide
cucaucguagaacuuuggc

SEQ ID NO: 3035735 - RNA, 19 nt, Artificial Sequence
  Description of Artificial Sequence: Synthetic oligonucleotide
gaugguccacaccaguggc

SEQ ID NO: 3035736 - RNA, 19 nt, Artificial Sequence
  Description of Artificial Sequence: Synthetic oligonucleotide
accagccaccaugagaugc

SEQ ID NO: 3035737 - RNA, 19 nt, Artificial Sequence
  Description of Artificial Sequence: Synthetic oligonucleotide
ggucaugccugcuuuauag

SEQ ID NO: 3035738 - RNA, 19 nt, Artificial Sequence
  Description of Artificial Sequence: Synthetic oligonucleotide
aauguagguacugccagaa

SEQ ID NO: 3035739 - RNA, 19 nt, Artificial Sequence
  Description of Artificial Sequence: Synthetic oligonucleotide
guuccauauaccuggcccc

SEQ ID NO: 3035740 - RNA, 19 nt, Artificial Sequence
  Description of Artificial Sequence: Synthetic oligonucleotide
gagccaucucgguucaugg

SEQ ID NO: 3035741 - RNA, 19 nt, Artificial Sequence
  Description of Artificial Sequence: Synthetic oligonucleotide
guacuuguaggugauauuc

SEQ ID NO: 3035742 - RNA, 19 nt, Artificial Sequence
  Description of Artificial Sequence: Synthetic oligonucleotide
ugacaaguccucucgguac

SEQ ID NO: 3035743 - RNA, 19 nt, Artificial Sequence
  Description of Artificial Sequence: Synthetic oligonucleotide
ucucgguacuuguagguga

SEQ ID NO: 3035744 - RNA, 19 nt, Artificial Sequence
  Description of Artificial Sequence: Synthetic oligonucleotide
ucuagggacaagucacuca

SEQ ID NO: 3035745 - RNA, 19 nt, Artificial Sequence
  Description of Artificial Sequence: Synthetic oligonucleotide
ucacguuggucccaaccag

SEQ ID NO: 3035746 - RNA, 19 nt, Artificial Sequence
  Description of Artificial Sequence: Synthetic oligonucleotide
cucccauaguuccauauac

SEQ ID NO: 3035747 - RNA, 19 nt, Artificial Sequence
  Description of Artificial Sequence: Synthetic oligonucleotide
gaccagguagaugacaccc

SEQ ID NO: 3035748 - RNA, 19 nt, Artificial Sequence
  Description of Artificial Sequence: Synthetic oligonucleotide
ggugauauuccuuaccaca

SEQ ID NO: 3035749 - RNA, 19 nt, Artificial Sequence
  Description of Artificial Sequence: Synthetic oligonucleotide
agaacuuuggcagcucauc

SEQ ID NO: 3035750 - RNA, 19 nt, Artificial Sequence
  Description of Artificial Sequence: Synthetic oligonucleotide
ucgaugguccacaccagug

SEQ ID NO: 3035751 - RNA, 19 nt, Artificial Sequence
  Description of Artificial Sequence: Synthetic oligonucleotide
guaggugauauuccuuacc

SEQ ID NO: 3035752 - RNA, 19 nt, Artificial Sequence
  Description of Artificial Sequence: Synthetic oligonucleotide
gucggaucagcauuccucc

SEQ ID NO: 3035753 - RNA, 19 nt, Artificial Sequence
  Description of Artificial Sequence: Synthetic oligonucleotide
guuggucccaaccagccac

SEQ ID NO: 3035754 - RNA, 19 nt, Artificial Sequence
  Description of Artificial Sequence: Synthetic oligonucleotide
cugcuuuauaggcugaguc

SEQ ID NO: 3035755 - RNA, 19 nt, Artificial Sequence
  Description of Artificial Sequence: Synthetic oligonucleotide
augagaugcgcugacaagu

SEQ ID NO: 3035756 - RNA, 19 nt, Artificial Sequence
  Description of Artificial Sequence: Synthetic oligonucleotide
auaaccguaaauguaggua

SEQ ID NO: 3035757 - RNA, 19 nt, Artificial Sequence
  Description of Artificial Sequence: Synthetic oligonucleotide
accgccgauggcaaaaggc

SEQ ID NO: 3035758 - RNA, 19 nt, Artificial Sequence
  Description of Artificial Sequence: Synthetic oligonucleotide
uccucaggggucaugccug

SEQ ID NO: 3035759 - RNA, 19 nt, Artificial Sequence
  Description of Artificial Sequence: Synthetic oligonucleotide
agcgauggcauuuguggug

SEQ ID NO: 3035760 - RNA, 19 nt, Artificial Sequence
  Description of Artificial Sequence: Synthetic oligonucleotide
aaggcugucggaucagcau

SEQ ID NO: 3035761 - RNA, 19 nt, Artificial Sequence
  Description of Artificial Sequence: Synthetic oligonucleotide
uguaggugauauuccuuac

SEQ ID NO: 3035762 - RNA, 19 nt, Artificial Sequence
  Description of Artificial Sequence: Synthetic oligonucleotide
agguagaugacaccccgcu

SEQ ID NO: 3035763 - RNA, 19 nt, Artificial Sequence
  Description of Artificial Sequence: Synthetic oligonucleotide
agccaucucgguucauggc

SEQ ID NO: 3035764 - RNA, 19 nt, Artificial Sequence
  Description of Artificial Sequence: Synthetic oligonucleotide
augccugcuuuauaggcug

SEQ ID NO: 3035765 - RNA, 19 nt, Artificial Sequence
  Description of Artificial Sequence: Synthetic oligonucleotide
gucccaaccagccaccaug

SEQ ID NO: 3035766 - RNA, 19 nt, Artificial Sequence
  Description of Artificial Sequence: Synthetic oligonucleotide
caugagaugcgcugacaag

SEQ ID NO: 3035767 - RNA, 19 nt, Artificial Sequence
  Description of Artificial Sequence: Synthetic oligonucleotide
guaaauguagguacugcca

SEQ ID NO: 3035768 - RNA, 19 nt, Artificial Sequence
  Description of Artificial Sequence: Synthetic oligonucleotide
ucagcauuccucccauagu

SEQ ID NO: 3035769 - RNA, 19 nt, Artificial Sequence
  Description of Artificial Sequence: Synthetic oligonucleotide
uuuauaggcugaguccaca

SEQ ID NO: 3035770 - RNA, 19 nt, Artificial Sequence
  Description of Artificial Sequence: Synthetic oligonucleotide
gucaugccugcuuuauagg

SEQ ID NO: 3035771 - RNA, 19 nt, Artificial Sequence
  Description of Artificial Sequence: Synthetic oligonucleotide
ugagaugcgcugacaaguc

SEQ ID NO: 3035772 - RNA, 19 nt, Artificial Sequence
  Description of Artificial Sequence: Synthetic oligonucleotide
ucucgguucauggccagag

SEQ ID NO: 3035773 - RNA, 19 nt, Artificial Sequence
  Description of Artificial Sequence: Synthetic oligonucleotide
acauaaccguaaauguagg

SEQ ID NO: 3035774 - RNA, 19 nt, Artificial Sequence
  Description of Artificial Sequence: Synthetic oligonucleotide
uuggcagcucaucucccag

SEQ ID NO: 3035775 - RNA, 19 nt, Artificial Sequence
  Description of Artificial Sequence: Synthetic oligonucleotide
uuuggcagcucaucuccca

SEQ ID NO: 3035776 - RNA, 19 nt, Artificial Sequence
  Description of Artificial Sequence: Synthetic oligonucleotide
caucucccaggauuacucg

SEQ ID NO: 3035777 - RNA, 19 nt, Artificial Sequence
  Description of Artificial Sequence: Synthetic oligonucleotide
auaguuccauauaccuggc

SEQ ID NO: 3035778 - RNA, 19 nt, Artificial Sequence
  Description of Artificial Sequence: Synthetic oligonucleotide
aaccgccgauggcaaaagg

SEQ ID NO: 3035779 - RNA, 19 nt, Artificial Sequence
  Description of Artificial Sequence: Synthetic oligonucleotide
gguacugccagaaccgccg

SEQ ID NO: 3035780 - RNA, 19 nt, Artificial Sequence
  Description of Artificial Sequence: Synthetic oligonucleotide
agcgccugcacuccucagg

SEQ ID NO: 3035781 - RNA, 19 nt, Artificial Sequence
  Description of Artificial Sequence: Synthetic oligonucleotide
ugaguccacauaaccguaa

SEQ ID NO: 3035782 - RNA, 19 nt, Artificial Sequence
  Description of Artificial Sequence: Synthetic oligonucleotide
uuauaggcugaguccacau

SEQ ID NO: 3035783 - RNA, 19 nt, Artificial Sequence
  Description of Artificial Sequence: Synthetic oligonucleotide
auguagguacugccagaac

SEQ ID NO: 3035784 - RNA, 19 nt, Artificial Sequence
  Description of Artificial Sequence: Synthetic oligonucleotide
aggauuacucgauggucca

SEQ ID NO: 3035785 - RNA, 19 nt, Artificial Sequence
  Description of Artificial Sequence: Synthetic oligonucleotide
gauuacucgaugguccaca

SEQ ID NO: 3035786 - RNA, 19 nt, Artificial Sequence
  Description of Artificial Sequence: Synthetic oligonucleotide
uguggugaagcgccugcac

SEQ ID NO: 3035787 - RNA, 19 nt, Artificial Sequence
  Description of Artificial Sequence: Synthetic oligonucleotide
acguuggucccaaccagcc

SEQ ID NO: 3035788 - RNA, 19 nt, Artificial Sequence
  Description of Artificial Sequence: Synthetic oligonucleotide
uuacucgaugguccacacc

SEQ ID NO: 3035789 - RNA, 19 nt, Artificial Sequence
  Description of Artificial Sequence: Synthetic oligonucleotide
gagaugcgcugacaagucc

SEQ ID NO: 3035790 - RNA, 19 nt, Artificial Sequence
  Description of Artificial Sequence: Synthetic oligonucleotide
uaguuccauauaccuggcc

SEQ ID NO: 3035791 - RNA, 19 nt, Artificial Sequence
  Description of Artificial Sequence: Synthetic oligonucleotide
ucucccaggauuacucgau

SEQ ID NO: 3035792 - RNA, 19 nt, Artificial Sequence
  Description of Artificial Sequence: Synthetic oligonucleotide
uagaugacaccccgcuaga

SEQ ID NO: 3035793 - RNA, 19 nt, Artificial Sequence
  Description of Artificial Sequence: Synthetic oligonucleotide
guccucucgguacuuguag

SEQ ID NO: 3035794 - RNA, 19 nt, Artificial Sequence
  Description of Artificial Sequence: Synthetic oligonucleotide
cuuuauaggcugaguccac

SEQ ID NO: 3035795 - RNA, 19 nt, Artificial Sequence
  Description of Artificial Sequence: Synthetic oligonucleotide
uauaggcugaguccacaua

SEQ ID NO: 3035796 - RNA, 19 nt, Artificial Sequence
  Description of Artificial Sequence: Synthetic oligonucleotide
uggugaagcgccugcacuc

SEQ ID NO: 3035797 - RNA, 19 nt, Artificial Sequence
  Description of Artificial Sequence: Synthetic oligonucleotide
ggcugaguccacauaaccg

SEQ ID NO: 3035798 - RNA, 19 nt, Artificial Sequence
  Description of Artificial Sequence: Synthetic oligonucleotide
cguaaauguagguacugcc

SEQ ID NO: 3035799 - RNA, 19 nt, Artificial Sequence
  Description of Artificial Sequence: Synthetic oligonucleotide
auggcaaaaggcugucgga

SEQ ID NO: 3035800 - RNA, 19 nt, Artificial Sequence
  Description of Artificial Sequence: Synthetic oligonucleotide
gcuagagccaucucgguuc

SEQ ID NO: 3035801 - RNA, 19 nt, Artificial Sequence
  Description of Artificial Sequence: Synthetic oligonucleotide
cacguuggucccaaccagc

SEQ ID NO: 3035802 - RNA, 19 nt, Artificial Sequence
  Description of Artificial Sequence: Synthetic oligonucleotide
gauggcauuuguggugaag

SEQ ID NO: 3035803 - RNA, 19 nt, Artificial Sequence
  Description of Artificial Sequence: Synthetic oligonucleotide
ugaccagguagaugacacc

SEQ ID NO: 3035804 - RNA, 19 nt, Artificial Sequence
  Description of Artificial Sequence: Synthetic oligonucleotide
ucccaaccagccaccauga

SEQ ID NO: 3035805 - RNA, 19 nt, Artificial Sequence
  Description of Artificial Sequence: Synthetic oligonucleotide
gcauuuguggugaagcgcc

SEQ ID NO: 3035806 - RNA, 19 nt, Artificial Sequence
  Description of Artificial Sequence: Synthetic oligonucleotide
gugaccagguagaugacac

SEQ ID NO: 3035807 - RNA, 19 nt, Artificial Sequence
  Description of Artificial Sequence: Synthetic oligonucleotide
gcauuccucccauaguucc

SEQ ID NO: 3035808 - RNA, 19 nt, Artificial Sequence
  Description of Artificial Sequence: Synthetic oligonucleotide
uaggcugaguccacauaac

SEQ ID NO: 3035809 - RNA, 19 nt, Artificial Sequence
  Description of Artificial Sequence: Synthetic oligonucleotide
aaccguaaauguagguacu

SEQ ID NO: 3035810 - RNA, 19 nt, Artificial Sequence
  Description of Artificial Sequence: Synthetic oligonucleotide
caaccagccaccaugagau

SEQ ID NO: 3035811 - RNA, 19 nt, Artificial Sequence
  Description of Artificial Sequence: Synthetic oligonucleotide
cugccagaaccgccgaugg

SEQ ID NO: 3035812 - RNA, 19 nt, Artificial Sequence
  Description of Artificial Sequence: Synthetic oligonucleotide
aaaggcugucggaucagca

SEQ ID NO: 3035813 - RNA, 19 nt, Artificial Sequence
  Description of Artificial Sequence: Synthetic oligonucleotide
guagaacuuuggcagcuca

SEQ ID NO: 3035814 - RNA, 19 nt, Artificial Sequence
  Description of Artificial Sequence: Synthetic oligonucleotide
uagaacuuuggcagcucau

SEQ ID NO: 3035815 - RNA, 19 nt, Artificial Sequence
  Description of Artificial Sequence: Synthetic oligonucleotide
gaacuuuggcagcucaucu

SEQ ID NO: 3035816 - RNA, 19 nt, Artificial Sequence
  Description of Artificial Sequence: Synthetic oligonucleotide
cucacguuggucccaacca

SEQ ID NO: 3035817 - RNA, 19 nt, Artificial Sequence
  Description of Artificial Sequence: Synthetic oligonucleotide
aucucccaggauuacucga

SEQ ID NO: 3035818 - RNA, 19 nt, Artificial Sequence
  Description of Artificial Sequence: Synthetic oligonucleotide
gccaucucgguucauggcc

SEQ ID NO: 3035819 - RNA, 19 nt, Artificial Sequence
  Description of Artificial Sequence: Synthetic oligonucleotide
cuuuggcagcucaucuccc

SEQ ID NO: 3035820 - RNA, 19 nt, Artificial Sequence
  Description of Artificial Sequence: Synthetic oligonucleotide
auauuccuuaccacauuug

SEQ ID NO: 3035821 - RNA, 19 nt, Artificial Sequence
  Description of Artificial Sequence: Synthetic oligonucleotide
agguacugccagaaccgcc

SEQ ID NO: 3035822 - RNA, 19 nt, Artificial Sequence
  Description of Artificial Sequence: Synthetic oligonucleotide
ucguagaacuuuggcagcu

SEQ ID NO: 3035823 - RNA, 19 nt, Artificial Sequence
  Description of Artificial Sequence: Synthetic oligonucleotide
uuggucccaaccagccacc

SEQ ID NO: 3035824 - RNA, 19 nt, Artificial Sequence
  Description of Artificial Sequence: Synthetic oligonucleotide
agcauuccucccauaguuc

SEQ ID NO: 3035825 - RNA, 19 nt, Artificial Sequence
  Description of Artificial Sequence: Synthetic oligonucleotide
acugccagaaccgccgaug

SEQ ID NO: 3035826 - RNA, 19 nt, Artificial Sequence
  Description of Artificial Sequence: Synthetic oligonucleotide
agagccaucucgguucaug

SEQ ID NO: 3035827 - RNA, 19 nt, Artificial Sequence
  Description of Artificial Sequence: Synthetic oligonucleotide
accguaaauguagguacug

SEQ ID NO: 3035828 - RNA, 19 nt, Artificial Sequence
  Description of Artificial Sequence: Synthetic oligonucleotide
uggcaaaaggcugucggau

SEQ ID NO: 3035829 - RNA, 19 nt, Artificial Sequence
  Description of Artificial Sequence: Synthetic oligonucleotide
cacuccucaggggucaugc

SEQ ID NO: 3035830 - RNA, 19 nt, Artificial Sequence
  Description of Artificial Sequence: Synthetic oligonucleotide
ggacaagucacucaucgua

SEQ ID NO: 3035831 - RNA, 19 nt, Artificial Sequence
  Description of Artificial Sequence: Synthetic oligonucleotide
uccucccauaguuccauau

SEQ ID NO: 3035832 - RNA, 19 nt, Artificial Sequence
  Description of Artificial Sequence: Synthetic oligonucleotide
agaugcgcugacaaguccu

SEQ ID NO: 3035833 - RNA, 19 nt, Artificial Sequence
  Description of Artificial Sequence: Synthetic oligonucleotide
ugcgcugacaaguccucuc

SEQ ID NO: 3035834 - RNA, 19 nt, Artificial Sequence
  Description of Artificial Sequence: Synthetic oligonucleotide
aguccacauaaccguaaau

SEQ ID NO: 3035835 - RNA, 19 nt, Artificial Sequence
  Description of Artificial Sequence: Synthetic oligonucleotide
gcuuuauaggcugagucca

SEQ ID NO: 3035836 - RNA, 19 nt, Artificial Sequence
  Description of Artificial Sequence: Synthetic oligonucleotide
cagguagaugacaccccgc

SEQ ID NO: 3035837 - RNA, 19 nt, Artificial Sequence
  Description of Artificial Sequence: Synthetic oligonucleotide
ccauaguuccauauaccug

SEQ ID NO: 3035838 - RNA, 19 nt, Artificial Sequence
  Description of Artificial Sequence: Synthetic oligonucleotide
gcaaaaggcugucggauca

SEQ ID NO: 3035839 - RNA, 19 nt, Artificial Sequence
  Description of Artificial Sequence: Synthetic oligonucleotide
uagguacugccagaaccgc

SEQ ID NO: 3035840 - RNA, 19 nt, Artificial Sequence
  Description of Artificial Sequence: Synthetic oligonucleotide
ucggaucagcauuccuccc

SEQ ID NO: 3035841 - RNA, 19 nt, Artificial Sequence
  Description of Artificial Sequence: Synthetic oligonucleotide
ccagguagaugacaccccg

SEQ ID NO: 3035842 - RNA, 19 nt, Artificial Sequence
  Description of Artificial Sequence: Synthetic oligonucleotide
cccgcuagagccaucucgg

SEQ ID NO: 3035843 - RNA, 19 nt, Artificial Sequence
  Description of Artificial Sequence: Synthetic oligonucleotide
acucaucguagaacuuugg

SEQ ID NO: 3035844 - RNA, 19 nt, Artificial Sequence
  Description of Artificial Sequence: Synthetic oligonucleotide
cacaccaguggcugugaug

SEQ ID NO: 3035845 - RNA, 19 nt, Artificial Sequence
  Description of Artificial Sequence: Synthetic oligonucleotide
gugauggugaccagguaga

SEQ ID NO: 3035846 - RNA, 19 nt, Artificial Sequence
  Description of Artificial Sequence: Synthetic oligonucleotide
ucaggggucaugccugcuu

SEQ ID NO: 3035847 - RNA, 19 nt, Artificial Sequence
  Description of Artificial Sequence: Synthetic oligonucleotide
gccaccaugagaugcgcug

SEQ ID NO: 3035848 - RNA, 19 nt, Artificial Sequence
  Description of Artificial Sequence: Synthetic oligonucleotide
auuuguggugaagcgccug

SEQ ID NO: 3035849 - RNA, 19 nt, Artificial Sequence
  Description of Artificial Sequence: Synthetic oligonucleotide
ggcauuuguggugaagcgc

SEQ ID NO: 3035850 - RNA, 19 nt, Artificial Sequence
  Description of Artificial Sequence: Synthetic oligonucleotide
gaagcgccugcacuccuca

SEQ ID NO: 3035851 - RNA, 19 nt, Artificial Sequence
  Description of Artificial Sequence: Synthetic oligonucleotide
gaguccacauaaccguaaa

SEQ ID NO: 3035852 - RNA, 19 nt, Artificial Sequence
  Description of Artificial Sequence: Synthetic oligonucleotide
aggcugucggaucagcauu

SEQ ID NO: 3035853 - RNA, 19 nt, Artificial Sequence
  Description of Artificial Sequence: Synthetic oligonucleotide
agaugacaccccgcuagag

SEQ ID NO: 3035854 - RNA, 19 nt, Artificial Sequence
  Description of Artificial Sequence: Synthetic oligonucleotide
aaccagccaccaugagaug

SEQ ID NO: 3035855 - RNA, 19 nt, Artificial Sequence
  Description of Artificial Sequence: Synthetic oligonucleotide
ugaagcgccugcacuccuc

SEQ ID NO: 3035856 - RNA, 19 nt, Artificial Sequence
  Description of Artificial Sequence: Synthetic oligonucleotide
ugccagaaccgccgauggc

SEQ ID NO: 3035857 - RNA, 19 nt, Artificial Sequence
  Description of Artificial Sequence: Synthetic oligonucleotide
cucucgguacuuguaggug

SEQ ID NO: 3035858 - RNA, 19 nt, Artificial Sequence
  Description of Artificial Sequence: Synthetic oligonucleotide
cuagggacaagucacucau

SEQ ID NO: 3035859 - RNA, 19 nt, Artificial Sequence
  Description of Artificial Sequence: Synthetic oligonucleotide
ccagccaccaugagaugcg

SEQ ID NO: 3035860 - RNA, 19 nt, Artificial Sequence
  Description of Artificial Sequence: Synthetic oligonucleotide
gacaaguccucucgguacu

SEQ ID NO: 3035861 - RNA, 19 nt, Artificial Sequence
  Description of Artificial Sequence: Synthetic oligonucleotide
gaaccgccgauggcaaaag

SEQ ID NO: 3035862 - RNA, 19 nt, Artificial Sequence
  Description of Artificial Sequence: Synthetic oligonucleotide
gcgcugacaaguccucucg

SEQ ID NO: 3035863 - RNA, 19 nt, Artificial Sequence
  Description of Artificial Sequence: Synthetic oligonucleotide
agaaccgccgauggcaaaa

SEQ ID NO: 3035864 - RNA, 19 nt, Artificial Sequence
  Description of Artificial Sequence: Synthetic oligonucleotide
gcugaguccacauaaccgu

SEQ ID NO: 3035865 - RNA, 19 nt, Artificial Sequence
  Description of Artificial Sequence: Synthetic oligonucleotide
aagcgccugcacuccucag

SEQ ID NO: 3035866 - RNA, 19 nt, Artificial Sequence
  Description of Artificial Sequence: Synthetic oligonucleotide
cucgguucauggccagagc

SEQ ID NO: 3035867 - RNA, 19 nt, Artificial Sequence
  Description of Artificial Sequence: Synthetic oligonucleotide
caaaaggcugucggaucag

SEQ ID NO: 3035868 - RNA, 19 nt, Artificial Sequence
  Description of Artificial Sequence: Synthetic oligonucleotide
caagucacucaucguagaa

SEQ ID NO: 3035869 - RNA, 19 nt, Artificial Sequence
  Description of Artificial Sequence: Synthetic oligonucleotide
caucucgguucauggccag

SEQ ID NO: 3035870 - RNA, 19 nt, Artificial Sequence
  Description of Artificial Sequence: Synthetic oligonucleotide
gcgccugcacuccucaggg

SEQ ID NO: 3035871 - RNA, 19 nt, Artificial Sequence
  Description of Artificial Sequence: Synthetic oligonucleotide
gaugcgcugacaaguccuc

SEQ ID NO: 3035872 - RNA, 19 nt, Artificial Sequence
  Description of Artificial Sequence: Synthetic oligonucleotide
cauaaccguaaauguaggu

SEQ ID NO: 3035873 - RNA, 19 nt, Artificial Sequence
  Description of Artificial Sequence: Synthetic oligonucleotide
cucccaggauuacucgaug

SEQ ID NO: 3035874 - RNA, 19 nt, Artificial Sequence
  Description of Artificial Sequence: Synthetic oligonucleotide
uuguggugaagcgccugca

SEQ ID NO: 3035875 - RNA, 19 nt, Artificial Sequence
  Description of Artificial Sequence: Synthetic oligonucleotide
uagggacaagucacucauc

SEQ ID NO: 3035876 - RNA, 19 nt, Artificial Sequence
  Description of Artificial Sequence: Synthetic oligonucleotide
auuccucccauaguuccau

SEQ ID NO: 3035877 - RNA, 19 nt, Artificial Sequence
  Description of Artificial Sequence: Synthetic oligonucleotide
ggcugugauggugaccagg

SEQ ID NO: 3035878 - RNA, 19 nt, Artificial Sequence
  Description of Artificial Sequence: Synthetic oligonucleotide
caugccugcuuuauaggcu

SEQ ID NO: 3035879 - RNA, 19 nt, Artificial Sequence
  Description of Artificial Sequence: Synthetic oligonucleotide
caccaugagaugcgcugac

SEQ ID NO: 3035880 - RNA, 19 nt, Artificial Sequence
  Description of Artificial Sequence: Synthetic oligonucleotide
ggcaaaaggcugucggauc

SEQ ID NO: 3035881 - RNA, 19 nt, Artificial Sequence
  Description of Artificial Sequence: Synthetic oligonucleotide
ugccugcuuuauaggcuga

SEQ ID NO: 3035882 - RNA, 19 nt, Artificial Sequence
  Description of Artificial Sequence: Synthetic oligonucleotide
cugacaaguccucucggua

SEQ ID NO: 3035883 - RNA, 19 nt, Artificial Sequence
  Description of Artificial Sequence: Synthetic oligonucleotide
gagcgauggcauuuguggu

SEQ ID NO: 3035884 - RNA, 19 nt, Artificial Sequence
  Description of Artificial Sequence: Synthetic oligonucleotide
auggccagagcgauggcau

SEQ ID NO: 3035885 - RNA, 19 nt, Artificial Sequence
  Description of Artificial Sequence: Synthetic oligonucleotide
ccccgcuagagccaucucg

SEQ ID NO: 3035886 - RNA, 19 nt, Artificial Sequence
  Description of Artificial Sequence: Synthetic oligonucleotide
uggugaccagguagaugac

SEQ ID NO: 3035887 - RNA, 19 nt, Artificial Sequence
  Description of Artificial Sequence: Synthetic oligonucleotide
ucauggccagagcgauggc

SEQ ID NO: 3035888 - RNA, 19 nt, Artificial Sequence
  Description of Artificial Sequence: Synthetic oligonucleotide
cgaugguccacaccagugg

SEQ ID NO: 3035889 - RNA, 19 nt, Artificial Sequence
  Description of Artificial Sequence: Synthetic oligonucleotide
ccucacguuggucccaacc

SEQ ID NO: 3035890 - RNA, 19 nt, Artificial Sequence
  Description of Artificial Sequence: Synthetic oligonucleotide
ugauggugaccagguagau

SEQ ID NO: 3035891 - RNA, 19 nt, Artificial Sequence
  Description of Artificial Sequence: Synthetic oligonucleotide
gugauauuccuuaccacau

SEQ ID NO: 3035892 - RNA, 19 nt, Artificial Sequence
  Description of Artificial Sequence: Synthetic oligonucleotide
gccagaaccgccgauggca

SEQ ID NO: 3035893 - RNA, 19 nt, Artificial Sequence
  Description of Artificial Sequence: Synthetic oligonucleotide
cuagagccaucucgguuca

SEQ ID NO: 3035894 - RNA, 19 nt, Artificial Sequence
  Description of Artificial Sequence: Synthetic oligonucleotide
ccguaaauguagguacugc

SEQ ID NO: 3035895 - RNA, 19 nt, Artificial Sequence
  Description of Artificial Sequence: Synthetic oligonucleotide
cauggccagagcgauggca

SEQ ID NO: 3035896 - RNA, 19 nt, Artificial Sequence
  Description of Artificial Sequence: Synthetic oligonucleotide
guccacaccaguggcugug

SEQ ID NO: 3035897 - RNA, 19 nt, Artificial Sequence
  Description of Artificial Sequence: Synthetic oligonucleotide
caaguccucucgguacuug

SEQ ID NO: 3035898 - RNA, 19 nt, Artificial Sequence
  Description of Artificial Sequence: Synthetic oligonucleotide
guggugaagcgccugcacu

SEQ ID NO: 3035899 - RNA, 19 nt, Artificial Sequence
  Description of Artificial Sequence: Synthetic oligonucleotide
uacugccagaaccgccgau

SEQ ID NO: 3035900 - RNA, 19 nt, Artificial Sequence
  Description of Artificial Sequence: Synthetic oligonucleotide
accaugagaugcgcugaca

SEQ ID NO: 3035901 - RNA, 19 nt, Artificial Sequence
  Description of Artificial Sequence: Synthetic oligonucleotide
acucgaugguccacaccag

SEQ ID NO: 3035902 - RNA, 19 nt, Artificial Sequence
  Description of Artificial Sequence: Synthetic oligonucleotide
cugaguccacauaaccgua

SEQ ID NO: 3035903 - RNA, 19 nt, Artificial Sequence
  Description of Artificial Sequence: Synthetic oligonucleotide
ggcagcucaucucccagga

SEQ ID NO: 3035904 - RNA, 19 nt, Artificial Sequence
  Description of Artificial Sequence: Synthetic oligonucleotide
ggugaagcgccugcacucc

SEQ ID NO: 3035905 - RNA, 19 nt, Artificial Sequence
  Description of Artificial Sequence: Synthetic oligonucleotide
uccacaccaguggcuguga

SEQ ID NO: 3035906 - RNA, 19 nt, Artificial Sequence
  Description of Artificial Sequence: Synthetic oligonucleotide
cccauaguuccauauaccu

SEQ ID NO: 3035907 - RNA, 19 nt, Artificial Sequence
  Description of Artificial Sequence: Synthetic oligonucleotide
ccaggauuacucgaugguc

SEQ ID NO: 3035908 - RNA, 19 nt, Artificial Sequence
  Description of Artificial Sequence: Synthetic oligonucleotide
cagcauuccucccauaguu

SEQ ID NO: 3035909 - RNA, 19 nt, Artificial Sequence
  Description of Artificial Sequence: Synthetic oligonucleotide
ccaaccagccaccaugaga

SEQ ID NO: 3035910 - RNA, 19 nt, Artificial Sequence
  Description of Artificial Sequence: Synthetic oligonucleotide
ccacauaaccguaaaugua

SEQ ID NO: 3035911 - RNA, 19 nt, Artificial Sequence
  Description of Artificial Sequence: Synthetic oligonucleotide
guucauggccagagcgaug

SEQ ID NO: 3035912 - RNA, 19 nt, Artificial Sequence
  Description of Artificial Sequence: Synthetic oligonucleotide
augguccacaccaguggcu

SEQ ID NO: 3035913 - RNA, 19 nt, Artificial Sequence
  Description of Artificial Sequence: Synthetic oligonucleotide
uggcugugauggugaccag

SEQ ID NO: 3035914 - RNA, 19 nt, Artificial Sequence
  Description of Artificial Sequence: Synthetic oligonucleotide
ggugaccagguagaugaca

SEQ ID NO: 3035915 - RNA, 19 nt, Artificial Sequence
  Description of Artificial Sequence: Synthetic oligonucleotide
uggucccaaccagccacca

SEQ ID NO: 3035916 - RNA, 19 nt, Artificial Sequence
  Description of Artificial Sequence: Synthetic oligonucleotide
cagcucaucucccaggauu

SEQ ID NO: 3035917 - RNA, 19 nt, Artificial Sequence
  Description of Artificial Sequence: Synthetic oligonucleotide
accccgcuagagccaucuc

SEQ ID NO: 3035918 - RNA, 19 nt, Artificial Sequence
  Description of Artificial Sequence: Synthetic oligonucleotide
cagccaccaugagaugcgc

SEQ ID NO: 3035919 - RNA, 19 nt, Artificial Sequence
  Description of Artificial Sequence: Synthetic oligonucleotide
guacugccagaaccgccga

SEQ ID NO: 3035920 - RNA, 19 nt, Artificial Sequence
  Description of Artificial Sequence: Synthetic oligonucleotide
gcgauggcauuugugguga

SEQ ID NO: 3035921 - RNA, 19 nt, Artificial Sequence
  Description of Artificial Sequence: Synthetic oligonucleotide
uuccucccauaguuccaua

SEQ ID NO: 3035922 - RNA, 19 nt, Artificial Sequence
  Description of Artificial Sequence: Synthetic oligonucleotide
augcgcugacaaguccucu

SEQ ID NO: 3035923 - RNA, 19 nt, Artificial Sequence
  Description of Artificial Sequence: Synthetic oligonucleotide
gaucagcauuccucccaua

SEQ ID NO: 3035924 - RNA, 19 nt, Artificial Sequence
  Description of Artificial Sequence: Synthetic oligonucleotide
aggggucaugccugcuuua

SEQ ID NO: 3035925 - RNA, 19 nt, Artificial Sequence
  Description of Artificial Sequence: Synthetic oligonucleotide
cucgaugguccacaccagu

SEQ ID NO: 3035926 - RNA, 19 nt, Artificial Sequence
  Description of Artificial Sequence: Synthetic oligonucleotide
gguagaugacaccccgcua

SEQ ID NO: 3035927 - RNA, 19 nt, Artificial Sequence
  Description of Artificial Sequence: Synthetic oligonucleotide
ccaucucgguucauggcca

SEQ ID NO: 3035928 - RNA, 19 nt, Artificial Sequence
  Description of Artificial Sequence: Synthetic oligonucleotide
ggauuacucgaugguccac

SEQ ID NO: 3035929 - RNA, 19 nt, Artificial Sequence
  Description of Artificial Sequence: Synthetic oligonucleotide
gcugacaaguccucucggu

SEQ ID NO: 3035930 - RNA, 19 nt, Artificial Sequence
  Description of Artificial Sequence: Synthetic oligonucleotide
gccugcuuuauaggcugag

SEQ ID NO: 3035931 - RNA, 19 nt, Artificial Sequence
  Description of Artificial Sequence: Synthetic oligonucleotide
gcugugauggugaccaggu

SEQ ID NO: 3035932 - RNA, 19 nt, Artificial Sequence
  Description of Artificial Sequence: Synthetic oligonucleotide
ggcugucggaucagcauuc

SEQ ID NO: 3035933 - RNA, 19 nt, Artificial Sequence
  Description of Artificial Sequence: Synthetic oligonucleotide
cauuuguggugaagcgccu

SEQ ID NO: 3035934 - RNA, 19 nt, Artificial Sequence
  Description of Artificial Sequence: Synthetic oligonucleotide
cucgguacuuguaggugau

SEQ ID NO: 3035935 - RNA, 19 nt, Artificial Sequence
  Description of Artificial Sequence: Synthetic oligonucleotide
ccugcacuccucagggguc

SEQ ID NO: 3035936 - RNA, 19 nt, Artificial Sequence
  Description of Artificial Sequence: Synthetic oligonucleotide
ucgguacuuguaggugaua

SEQ ID NO: 3035937 - RNA, 19 nt, Artificial Sequence
  Description of Artificial Sequence: Synthetic oligonucleotide
gccagagcgauggcauuug

SEQ ID NO: 3035938 - RNA, 19 nt, Artificial Sequence
  Description of Artificial Sequence: Synthetic oligonucleotide
agccaccaugagaugcgcu

SEQ ID NO: 3035939 - RNA, 19 nt, Artificial Sequence
  Description of Artificial Sequence: Synthetic oligonucleotide
cugcacuccucagggguca

SEQ ID NO: 3035940 - RNA, 19 nt, Artificial Sequence
  Description of Artificial Sequence: Synthetic oligonucleotide
gguacuuguaggugauauu

SEQ ID NO: 3035941 - RNA, 19 nt, Artificial Sequence
  Description of Artificial Sequence: Synthetic oligonucleotide
gccugcacuccucaggggu

SEQ ID NO: 3035942 - RNA, 19 nt, Artificial Sequence
  Description of Artificial Sequence: Synthetic oligonucleotide
gcugucggaucagcauucc

SEQ ID NO: 3035943 - RNA, 19 nt, Artificial Sequence
  Description of Artificial Sequence: Synthetic oligonucleotide
cgccgauggcaaaaggcug

SEQ ID NO: 3035944 - RNA, 19 nt, Artificial Sequence
  Description of Artificial Sequence: Synthetic oligonucleotide
ggaucagcauuccucccau

SEQ ID NO: 3035945 - RNA, 19 nt, Artificial Sequence
  Description of Artificial Sequence: Synthetic oligonucleotide
ccucaggggucaugccugc

SEQ ID NO: 3035946 - RNA, 19 nt, Artificial Sequence
  Description of Artificial Sequence: Synthetic oligonucleotide
cgcugacaaguccucucgg

SEQ ID NO: 3035947 - RNA, 19 nt, Artificial Sequence
  Description of Artificial Sequence: Synthetic oligonucleotide
gggacaagucacucaucgu

SEQ ID NO: 3035948 - RNA, 19 nt, Artificial Sequence
  Description of Artificial Sequence: Synthetic oligonucleotide
cugugauggugaccaggua

SEQ ID NO: 3035949 - RNA, 19 nt, Artificial Sequence
  Description of Artificial Sequence: Synthetic oligonucleotide
ccgccgauggcaaaaggcu

SEQ ID NO: 3035950 - RNA, 19 nt, Artificial Sequence
  Description of Artificial Sequence: Synthetic oligonucleotide
cugucggaucagcauuccu

SEQ ID NO: 3035951 - RNA, 19 nt, Artificial Sequence
  Description of Artificial Sequence: Synthetic oligonucleotide
gacaccccgcuagagccau

SEQ ID NO: 3035952 - RNA, 19 nt, Artificial Sequence
  Description of Artificial Sequence: Synthetic oligonucleotide
gugaagcgccugcacuccu

SEQ ID NO: 3035953 - RNA, 19 nt, Artificial Sequence
  Description of Artificial Sequence: Synthetic oligonucleotide
cggaucagcauuccuccca

SEQ ID NO: 3035954 - RNA, 19 nt, Artificial Sequence
  Description of Artificial Sequence: Synthetic oligonucleotide
ugcacuccucaggggucau

SEQ ID NO: 3035955 - RNA, 19 nt, Artificial Sequence
  Description of Artificial Sequence: Synthetic oligonucleotide
cagaaccgccgauggcaaa

SEQ ID NO: 3035956 - RNA, 19 nt, Artificial Sequence
  Description of Artificial Sequence: Synthetic oligonucleotide
gccgauggcaaaaggcugu

SEQ ID NO: 3035957 - RNA, 19 nt, Artificial Sequence
  Description of Artificial Sequence: Synthetic oligonucleotide
cgauggcaaaaggcugucg

SEQ ID NO: 3035958 - RNA, 19 nt, Artificial Sequence
  Description of Artificial Sequence: Synthetic oligonucleotide
ccucccauaguuccauaua

SEQ ID NO: 3035959 - RNA, 19 nt, Artificial Sequence
  Description of Artificial Sequence: Synthetic oligonucleotide
gggucaugccugcuuuaua

SEQ ID NO: 3035960 - RNA, 19 nt, Artificial Sequence
  Description of Artificial Sequence: Synthetic oligonucleotide
ccagaaccgccgauggcaa

SEQ ID NO: 3035961 - RNA, 19 nt, Artificial Sequence
  Description of Artificial Sequence: Synthetic oligonucleotide
ccucucgguacuuguaggu

SEQ ID NO: 3035962 - RNA, 19 nt, Artificial Sequence
  Description of Artificial Sequence: Synthetic oligonucleotide
cgguucauggccagagcga

SEQ ID NO: 3035963 - RNA, 19 nt, Artificial Sequence
  Description of Artificial Sequence: Synthetic oligonucleotide
caggggucaugccugcuuu

SEQ ID NO: 3035964 - RNA, 19 nt, Artificial Sequence
  Description of Artificial Sequence: Synthetic oligonucleotide
cccaaccagccaccaugag

SEQ ID NO: 3035965 - RNA, 19 nt, Artificial Sequence
  Description of Artificial Sequence: Synthetic oligonucleotide
cccaggauuacucgauggu

SEQ ID NO: 3035966 - RNA, 19 nt, Artificial Sequence
  Description of Artificial Sequence: Synthetic oligonucleotide
uagagccaucucgguucau

SEQ ID NO: 3035967 - RNA, 19 nt, Artificial Sequence
  Description of Artificial Sequence: Synthetic oligonucleotide
ccaccaugagaugcgcuga

SEQ ID NO: 3035968 - RNA, 19 nt, Artificial Sequence
  Description of Artificial Sequence: Synthetic oligonucleotide
ccgauggcaaaaggcuguc

SEQ ID NO: 3035969 - RNA, 19 nt, Artificial Sequence
  Description of Artificial Sequence: Synthetic oligonucleotide
caccccgcuagagccaucu

SEQ ID NO: 3035970 - RNA, 19 nt, Artificial Sequence
  Description of Artificial Sequence: Synthetic oligonucleotide
gucacucaucguagaacuu

SEQ ID NO: 3035971 - RNA, 19 nt, Artificial Sequence
  Description of Artificial Sequence: Synthetic oligonucleotide
acaccccgcuagagccauc

SEQ ID NO: 3035972 - RNA, 19 nt, Artificial Sequence
  Description of Artificial Sequence: Synthetic oligonucleotide
cgccugcacuccucagggg

SEQ ID NO: 3035973 - RNA, 19 nt, Artificial Sequence
  Description of Artificial Sequence: Synthetic oligonucleotide
gcacuccucaggggucaug

SEQ ID NO: 3035974 - RNA, 19 nt, Artificial Sequence
  Description of Artificial Sequence: Synthetic oligonucleotide
ggggucaugccugcuuuau

SEQ ID NO: 3035975 - RNA, 19 nt, Artificial Sequence
  Description of Artificial Sequence: Synthetic oligonucleotide
cguuggucccaaccagcca

SEQ ID NO: 3035976 - RNA, 19 nt, Artificial Sequence
  Description of Artificial Sequence: Synthetic oligonucleotide
ccugcuuuauaggcugagu

SEQ ID NO: 3035977 - RNA, 19 nt, Artificial Sequence
  Description of Artificial Sequence: Synthetic oligonucleotide
caccaguggcugugauggu

SEQ ID NO: 3035978 - RNA, 19 nt, Artificial Sequence
  Description of Artificial Sequence: Synthetic oligonucleotide
ggucccaaccagccaccau

SEQ ID NO: 3035979 - RNA, 19 nt, Artificial Sequence
  Description of Artificial Sequence: Synthetic oligonucleotide
ggccagagcgauggcauuu

SEQ ID NO: 3035980 - RNA, 19 nt, Artificial Sequence
  Description of Artificial Sequence: Synthetic oligonucleotide
cgguacuuguaggugauau

SEQ ID NO: 3035981 - RNA, 19 nt, Artificial Sequence
  Description of Artificial Sequence: Synthetic oligonucleotide
gcagcucaucucccaggau

SEQ ID NO: 3035982 - RNA, 19 nt, Artificial Sequence
  Description of Artificial Sequence: Synthetic oligonucleotide
cucaggggucaugccugcu

SEQ ID NO: 3035983 - RNA, 19 nt, Artificial Sequence
  Description of Artificial Sequence: Synthetic oligonucleotide
cccucacguuggucccaac

SEQ ID NO: 3035984 - RNA, 19 nt, Artificial Sequence
  Description of Artificial Sequence: Synthetic oligonucleotide
cgcuagagccaucucgguu

SEQ ID NO: 3035985 - RNA, 19 nt, Artificial Sequence
  Description of Artificial Sequence: Synthetic oligonucleotide
ccgcuagagccaucucggu

SEQ ID NO: 3035986 - RNA, 19 nt, Artificial Sequence
  Description of Artificial Sequence: Synthetic oligonucleotide
ccccucacguuggucccaa

SEQ ID NO: 3035987 - RNA, 19 nt, Artificial Sequence
  Description of Artificial Sequence: Synthetic oligonucleotide
ccacaccaguggcugugau

SEQ ID NO: 3035988 - RNA, 19 nt, Artificial Sequence
  Description of Artificial Sequence: Synthetic oligonucleotide
aagagcaagcacugcaugg

SEQ ID NO: 3035989 - RNA, 19 nt, Artificial Sequence
  Description of Artificial Sequence: Synthetic oligonucleotide
aaugggagcuuccuuauga

SEQ ID NO: 3035990 - RNA, 19 nt, Artificial Sequence
  Description of Artificial Sequence: Synthetic oligonucleotide
augauggucaccucuuggc

SEQ ID NO: 3035991 - RNA, 19 nt, Artificial Sequence
  Description of Artificial Sequence: Synthetic oligonucleotide
uuaugagcagcucagugcu

SEQ ID NO: 3035992 - RNA, 19 nt, Artificial Sequence
  Description of Artificial Sequence: Synthetic oligonucleotide
ucagucuugaaauccuggg

SEQ ID NO: 3035993 - RNA, 19 nt, Artificial Sequence
  Description of Artificial Sequence: Synthetic oligonucleotide
cuuaugagcagcucagugc

SEQ ID NO: 3035994 - RNA, 19 nt, Artificial Sequence
  Description of Artificial Sequence: Synthetic oligonucleotide
gaagagacccaccagguac

SEQ ID NO: 3035995 - RNA, 19 nt, Artificial Sequence
  Description of Artificial Sequence: Synthetic oligonucleotide
agucuugaaauccugggca

SEQ ID NO: 3035996 - RNA, 19 nt, Artificial Sequence
  Description of Artificial Sequence: Synthetic oligonucleotide
cuaacaagccucuggaaug

SEQ ID NO: 3035997 - RNA, 19 nt, Artificial Sequence
  Description of Artificial Sequence: Synthetic oligonucleotide
acugcauggcucuggaaac

SEQ ID NO: 3035998 - RNA, 19 nt, Artificial Sequence
  Description of Artificial Sequence: Synthetic oligonucleotide
aagccucuggaaugggagc

SEQ ID NO: 3035999 - RNA, 19 nt, Artificial Sequence
  Description of Artificial Sequence: Synthetic oligonucleotide
uuccuuaugagcagcucag

SEQ ID NO: 3036000 - RNA, 19 nt, Artificial Sequence
  Description of Artificial Sequence: Synthetic oligonucleotide
cucgaagagacccaccagg

SEQ ID NO: 3036001 - RNA, 19 nt, Artificial Sequence
  Description of Artificial Sequence: Synthetic oligonucleotide
ugggcaaucucccuaacaa

SEQ ID NO: 3036002 - RNA, 19 nt, Artificial Sequence
  Description of Artificial Sequence: Synthetic oligonucleotide
uugguguccucgaagagac

SEQ ID NO: 3036003 - RNA, 19 nt, Artificial Sequence
  Description of Artificial Sequence: Synthetic oligonucleotide
caccucuuggcauggaugg

SEQ ID NO: 3036004 - RNA, 19 nt, Artificial Sequence
  Description of Artificial Sequence: Synthetic oligonucleotide
cuagcugcuugcuuggggc

SEQ ID NO: 3036005 - RNA, 19 nt, Artificial Sequence
  Description of Artificial Sequence: Synthetic oligonucleotide
aaucucccuaacaagccuc

SEQ ID NO: 3036006 - RNA, 19 nt, Artificial Sequence
  Description of Artificial Sequence: Synthetic oligonucleotide
uccucgaagagacccacca

SEQ ID NO: 3036007 - RNA, 19 nt, Artificial Sequence
  Description of Artificial Sequence: Synthetic oligonucleotide
ucccuaacaagccucugga

SEQ ID NO: 3036008 - RNA, 19 nt, Artificial Sequence
  Description of Artificial Sequence: Synthetic oligonucleotide
uaacaagccucuggaaugg

SEQ ID NO: 3036009 - RNA, 19 nt, Artificial Sequence
  Description of Artificial Sequence: Synthetic oligonucleotide
guaguugcggaucucgcgc

SEQ ID NO: 3036010 - RNA, 19 nt, Artificial Sequence
  Description of Artificial Sequence: Synthetic oligonucleotide
ugauggucaccucuuggca

SEQ ID NO: 3036011 - RNA, 19 nt, Artificial Sequence
  Description of Artificial Sequence: Synthetic oligonucleotide
caagccucuggaaugggag

SEQ ID NO: 3036012 - RNA, 19 nt, Artificial Sequence
  Description of Artificial Sequence: Synthetic oligonucleotide
ugcucuucugguaguugcg

SEQ ID NO: 3036013 - RNA, 19 nt, Artificial Sequence
  Description of Artificial Sequence: Synthetic oligonucleotide
cagaucagucuugaaaucc

SEQ ID NO: 3036014 - RNA, 19 nt, Artificial Sequence
  Description of Artificial Sequence: Synthetic oligonucleotide
ucaccucuuggcauggaug

SEQ ID NO: 3036015 - RNA, 19 nt, Artificial Sequence
  Description of Artificial Sequence: Synthetic oligonucleotide
ucuggaaacgcagaucagu

SEQ ID NO: 3036016 - RNA, 19 nt, Artificial Sequence
  Description of Artificial Sequence: Synthetic oligonucleotide
cucagugcucuucugguag

SEQ ID NO: 3036017 - RNA, 19 nt, Artificial Sequence
  Description of Artificial Sequence: Synthetic oligonucleotide
gaagagcaagcacugcaug

SEQ ID NO: 3036018 - RNA, 19 nt, Artificial Sequence
  Description of Artificial Sequence: Synthetic oligonucleotide
aagagacccaccagguacg

SEQ ID NO: 3036019 - RNA, 19 nt, Artificial Sequence
  Description of Artificial Sequence: Synthetic oligonucleotide
ugaagagcaagcacugcau

SEQ ID NO: 3036020 - RNA, 19 nt, Artificial Sequence
  Description of Artificial Sequence: Synthetic oligonucleotide
uggaaugggagcuuccuua

SEQ ID NO: 3036021 - RNA, 19 nt, Artificial Sequence
  Description of Artificial Sequence: Synthetic oligonucleotide
uugggcaugauggucaccu

SEQ ID NO: 3036022 - RNA, 19 nt, Artificial Sequence
  Description of Artificial Sequence: Synthetic oligonucleotide
agacccaccagguacgccu

SEQ ID NO: 3036023 - RNA, 19 nt, Artificial Sequence
  Description of Artificial Sequence: Synthetic oligonucleotide
guggcuagcugcuugcuug

SEQ ID NO: 3036024 - RNA, 19 nt, Artificial Sequence
  Description of Artificial Sequence: Synthetic oligonucleotide
ucgaagagacccaccaggu

SEQ ID NO: 3036025 - RNA, 19 nt, Artificial Sequence
  Description of Artificial Sequence: Synthetic oligonucleotide
cuggaaacgcagaucaguc

SEQ ID NO: 3036026 - RNA, 19 nt, Artificial Sequence
  Description of Artificial Sequence: Synthetic oligonucleotide
cagucuugaaauccugggc

SEQ ID NO: 3036027 - RNA, 19 nt, Artificial Sequence
  Description of Artificial Sequence: Synthetic oligonucleotide
uugcggaucucgcgcagcg

SEQ ID NO: 3036028 - RNA, 19 nt, Artificial Sequence
  Description of Artificial Sequence: Synthetic oligonucleotide
cucccuaacaagccucugg

SEQ ID NO: 3036029 - RNA, 19 nt, Artificial Sequence
  Description of Artificial Sequence: Synthetic oligonucleotide
acgcagaucagucuugaaa

SEQ ID NO: 3036030 - RNA, 19 nt, Artificial Sequence
  Description of Artificial Sequence: Synthetic oligonucleotide
aucagucuugaaauccugg

SEQ ID NO: 3036031 - RNA, 19 nt, Artificial Sequence
  Description of Artificial Sequence: Synthetic oligonucleotide
gguaguugcggaucucgcg

SEQ ID NO: 3036032 - RNA, 19 nt, Artificial Sequence
  Description of Artificial Sequence: Synthetic oligonucleotide
uucugguaguugcggaucu

SEQ ID NO: 3036033 - RNA, 19 nt, Artificial Sequence
  Description of Artificial Sequence: Synthetic oligonucleotide
augggagcuuccuuaugag

SEQ ID NO: 3036034 - RNA, 19 nt, Artificial Sequence
  Description of Artificial Sequence: Synthetic oligonucleotide
ugggagcuuccuuaugagc

SEQ ID NO: 3036035 - RNA, 19 nt, Artificial Sequence
  Description of Artificial Sequence: Synthetic oligonucleotide
uggaaacgcagaucagucu

SEQ ID NO: 3036036 - RNA, 19 nt, Artificial Sequence
  Description of Artificial Sequence: Synthetic oligonucleotide
cuuccuuaugagcagcuca

SEQ ID NO: 3036037 - RNA, 19 nt, Artificial Sequence
  Description of Artificial Sequence: Synthetic oligonucleotide
accagguacgccucugcag

SEQ ID NO: 3036038 - RNA, 19 nt, Artificial Sequence
  Description of Artificial Sequence: Synthetic oligonucleotide
auggucaccucuuggcaug

SEQ ID NO: 3036039 - RNA, 19 nt, Artificial Sequence
  Description of Artificial Sequence: Synthetic oligonucleotide
ggcaaucucccuaacaagc

SEQ ID NO: 3036040 - RNA, 19 nt, Artificial Sequence
  Description of Artificial Sequence: Synthetic oligonucleotide
cugguaguugcggaucucg

SEQ ID NO: 3036041 - RNA, 19 nt, Artificial Sequence
  Description of Artificial Sequence: Synthetic oligonucleotide
ugguaguugcggaucucgc

SEQ ID NO: 3036042 - RNA, 19 nt, Artificial Sequence
  Description of Artificial Sequence: Synthetic oligonucleotide
uccuccgguggacuugcgg

SEQ ID NO: 3036043 - RNA, 19 nt, Artificial Sequence
  Description of Artificial Sequence: Synthetic oligonucleotide
gugggcgcggucuugcggg

SEQ ID NO: 3036044 - RNA, 19 nt, Artificial Sequence
  Description of Artificial Sequence: Synthetic oligonucleotide
agcucagugcucuucuggu

SEQ ID NO: 3036045 - RNA, 19 nt, Artificial Sequence
  Description of Artificial Sequence: Synthetic oligonucleotide
uggcuagcugcuugcuugg

SEQ ID NO: 3036046 - RNA, 19 nt, Artificial Sequence
  Description of Artificial Sequence: Synthetic oligonucleotide
aaacgcagaucagucuuga

SEQ ID NO: 3036047 - RNA, 19 nt, Artificial Sequence
  Description of Artificial Sequence: Synthetic oligonucleotide
cagcucagugcucuucugg

SEQ ID NO: 3036048 - RNA, 19 nt, Artificial Sequence
  Description of Artificial Sequence: Synthetic oligonucleotide
gaucagucuugaaauccug

SEQ ID NO: 3036049 - RNA, 19 nt, Artificial Sequence
  Description of Artificial Sequence: Synthetic oligonucleotide
uugguggcuagcugcuugc

SEQ ID NO: 3036050 - RNA, 19 nt, Artificial Sequence
  Description of Artificial Sequence: Synthetic oligonucleotide
gaaacgcagaucagucuug

SEQ ID NO: 3036051 - RNA, 19 nt, Artificial Sequence
  Description of Artificial Sequence: Synthetic oligonucleotide
ucuggaaugggagcuuccu

SEQ ID NO: 3036052 - RNA, 19 nt, Artificial Sequence
  Description of Artificial Sequence: Synthetic oligonucleotide
aagcacugcauggcucugg

SEQ ID NO: 3036053 - RNA, 19 nt, Artificial Sequence
  Description of Artificial Sequence: Synthetic oligonucleotide
aacaagccucuggaauggg

SEQ ID NO: 3036054 - RNA, 19 nt, Artificial Sequence
  Description of Artificial Sequence: Synthetic oligonucleotide
agaucagucuugaaauccu

SEQ ID NO: 3036055 - RNA, 19 nt, Artificial Sequence
  Description of Artificial Sequence: Synthetic oligonucleotide
ugcauggcucuggaaacgc

SEQ ID NO: 3036056 - RNA, 19 nt, Artificial Sequence
  Description of Artificial Sequence: Synthetic oligonucleotide
gaaugggagcuuccuuaug

SEQ ID NO: 3036057 - RNA, 19 nt, Artificial Sequence
  Description of Artificial Sequence: Synthetic oligonucleotide
cacugcauggcucuggaaa

SEQ ID NO: 3036058 - RNA, 19 nt, Artificial Sequence
  Description of Artificial Sequence: Synthetic oligonucleotide
uugcuuggggccuuuccuc

SEQ ID NO: 3036059 - RNA, 19 nt, Artificial Sequence
  Description of Artificial Sequence: Synthetic oligonucleotide
uuuccuccgguggacuugc

SEQ ID NO: 3036060 - RNA, 19 nt, Artificial Sequence
  Description of Artificial Sequence: Synthetic oligonucleotide
uaguugcggaucucgcgca

SEQ ID NO: 3036061 - RNA, 19 nt, Artificial Sequence
  Description of Artificial Sequence: Synthetic oligonucleotide
ggagcuuccuuaugagcag

SEQ ID NO: 3036062 - RNA, 19 nt, Artificial Sequence
  Description of Artificial Sequence: Synthetic oligonucleotide
agagacccaccagguacgc

SEQ ID NO: 3036063 - RNA, 19 nt, Artificial Sequence
  Description of Artificial Sequence: Synthetic oligonucleotide
ucagugcucuucugguagu

SEQ ID NO: 3036064 - RNA, 19 nt, Artificial Sequence
  Description of Artificial Sequence: Synthetic oligonucleotide
ccagguacgccucugcagc

SEQ ID NO: 3036065 - RNA, 19 nt, Artificial Sequence
  Description of Artificial Sequence: Synthetic oligonucleotide
agcaagcacugcauggcuc

SEQ ID NO: 3036066 - RNA, 19 nt, Artificial Sequence
  Description of Artificial Sequence: Synthetic oligonucleotide
gggagcuuccuuaugagca

SEQ ID NO: 3036067 - RNA, 19 nt, Artificial Sequence
  Description of Artificial Sequence: Synthetic oligonucleotide
agcacugcauggcucugga

SEQ ID NO: 3036068 - RNA, 19 nt, Artificial Sequence
  Description of Artificial Sequence: Synthetic oligonucleotide
cuuggggccuuuccuccgg

SEQ ID NO: 3036069 - RNA, 19 nt, Artificial Sequence
  Description of Artificial Sequence: Synthetic oligonucleotide
aguugcggaucucgcgcag

SEQ ID NO: 3036070 - RNA, 19 nt, Artificial Sequence
  Description of Artificial Sequence: Synthetic oligonucleotide
ccuccgguggacuugcggg

SEQ ID NO: 3036071 - RNA, 19 nt, Artificial Sequence
  Description of Artificial Sequence: Synthetic oligonucleotide
uggcucuggaaacgcagau

SEQ ID NO: 3036072 - RNA, 19 nt, Artificial Sequence
  Description of Artificial Sequence: Synthetic oligonucleotide
acuccucccguggugggcg

SEQ ID NO: 3036073 - RNA, 19 nt, Artificial Sequence
  Description of Artificial Sequence: Synthetic oligonucleotide
ucuugaaauccugggcaau

SEQ ID NO: 3036074 - RNA, 19 nt, Artificial Sequence
  Description of Artificial Sequence: Synthetic oligonucleotide
aacgcagaucagucuugaa

SEQ ID NO: 3036075 - RNA, 19 nt, Artificial Sequence
  Description of Artificial Sequence: Synthetic oligonucleotide
gcuagcugcuugcuugggg

SEQ ID NO: 3036076 - RNA, 19 nt, Artificial Sequence
  Description of Artificial Sequence: Synthetic oligonucleotide
cucuggaaacgcagaucag

SEQ ID NO: 3036077 - RNA, 19 nt, Artificial Sequence
  Description of Artificial Sequence: Synthetic oligonucleotide
ccuuaugagcagcucagug

SEQ ID NO: 3036078 - RNA, 19 nt, Artificial Sequence
  Description of Artificial Sequence: Synthetic oligonucleotide
cuccgguggacuugcgggc

SEQ ID NO: 3036079 - RNA, 19 nt, Artificial Sequence
  Description of Artificial Sequence: Synthetic oligonucleotide
gggcaaucucccuaacaag

SEQ ID NO: 3036080 - RNA, 19 nt, Artificial Sequence
  Description of Artificial Sequence: Synthetic oligonucleotide
cugcauggcucuggaaacg

SEQ ID NO: 3036081 - RNA, 19 nt, Artificial Sequence
  Description of Artificial Sequence: Synthetic oligonucleotide
agccuccugaagagcaagc

SEQ ID NO: 3036082 - RNA, 19 nt, Artificial Sequence
  Description of Artificial Sequence: Synthetic oligonucleotide
accucuuggcauggauggc

SEQ ID NO: 3036083 - RNA, 19 nt, Artificial Sequence
  Description of Artificial Sequence: Synthetic oligonucleotide
cuucugguaguugcggauc

SEQ ID NO: 3036084 - RNA, 19 nt, Artificial Sequence
  Description of Artificial Sequence: Synthetic oligonucleotide
gcaaucucccuaacaagcc

SEQ ID NO: 3036085 - RNA, 19 nt, Artificial Sequence
  Description of Artificial Sequence: Synthetic oligonucleotide
gauggucaccucuuggcau

SEQ ID NO: 3036086 - RNA, 19 nt, Artificial Sequence
  Description of Artificial Sequence: Synthetic oligonucleotide
ggggccuuuccuccggugg

SEQ ID NO: 3036087 - RNA, 19 nt, Artificial Sequence
  Description of Artificial Sequence: Synthetic oligonucleotide
uaugagcagcucagugcuc

SEQ ID NO: 3036088 - RNA, 19 nt, Artificial Sequence
  Description of Artificial Sequence: Synthetic oligonucleotide
gagcuuccuuaugagcagc

SEQ ID NO: 3036089 - RNA, 19 nt, Artificial Sequence
  Description of Artificial Sequence: Synthetic oligonucleotide
agccucuggaaugggagcu

SEQ ID NO: 3036090 - RNA, 19 nt, Artificial Sequence
  Description of Artificial Sequence: Synthetic oligonucleotide
uggucaccucuuggcaugg

SEQ ID NO: 3036091 - RNA, 19 nt, Artificial Sequence
  Description of Artificial Sequence: Synthetic oligonucleotide
cagguacgccucugcagcc

SEQ ID NO: 3036092 - RNA, 19 nt, Artificial Sequence
  Description of Artificial Sequence: Synthetic oligonucleotide
cuuuccuccgguggacuug

SEQ ID NO: 3036093 - RNA, 19 nt, Artificial Sequence
  Description of Artificial Sequence: Synthetic oligonucleotide
uccuuaugagcagcucagu

SEQ ID NO: 3036094 - RNA, 19 nt, Artificial Sequence
  Description of Artificial Sequence: Synthetic oligonucleotide
gcauggauggcgcacaggu

SEQ ID NO: 3036095 - RNA, 19 nt, Artificial Sequence
  Description of Artificial Sequence: Synthetic oligonucleotide
cuugcuuggggccuuuccu

SEQ ID NO: 3036096 - RNA, 19 nt, Artificial Sequence
  Description of Artificial Sequence: Synthetic oligonucleotide
gcucuucugguaguugcgg

SEQ ID NO: 3036097 - RNA, 19 nt, Artificial Sequence
  Description of Artificial Sequence: Synthetic oligonucleotide
uggugggcgcggucuugcg

SEQ ID NO: 3036098 - RNA, 19 nt, Artificial Sequence
  Description of Artificial Sequence: Synthetic oligonucleotide
gcagaucagucuugaaauc

SEQ ID NO: 3036099 - RNA, 19 nt, Artificial Sequence
  Description of Artificial Sequence: Synthetic oligonucleotide
acaagccucuggaauggga

SEQ ID NO: 3036100 - RNA, 19 nt, Artificial Sequence
  Description of Artificial Sequence: Synthetic oligonucleotide
ggggcgguagcggugaggc

SEQ ID NO: 3036101 - RNA, 19 nt, Artificial Sequence
  Description of Artificial Sequence: Synthetic oligonucleotide
ucucccuaacaagccucug

SEQ ID NO: 3036102 - RNA, 19 nt, Artificial Sequence
  Description of Artificial Sequence: Synthetic oligonucleotide
ggaaacgcagaucagucuu

SEQ ID NO: 3036103 - RNA, 19 nt, Artificial Sequence
  Description of Artificial Sequence: Synthetic oligonucleotide
aucucccuaacaagccucu

SEQ ID NO: 3036104 - RNA, 19 nt, Artificial Sequence
  Description of Artificial Sequence: Synthetic oligonucleotide
ggugggcgcggucuugcgg

SEQ ID NO: 3036105 - RNA, 19 nt, Artificial Sequence
  Description of Artificial Sequence: Synthetic oligonucleotide
auggcucuggaaacgcaga

SEQ ID NO: 3036106 - RNA, 19 nt, Artificial Sequence
  Description of Artificial Sequence: Synthetic oligonucleotide
cagccuccugaagagcaag

SEQ ID NO: 3036107 - RNA, 19 nt, Artificial Sequence
  Description of Artificial Sequence: Synthetic oligonucleotide
guugcggaucucgcgcagc

SEQ ID NO: 3036108 - RNA, 19 nt, Artificial Sequence
  Description of Artificial Sequence: Synthetic oligonucleotide
ucugguaguugcggaucuc

SEQ ID NO: 3036109 - RNA, 19 nt, Artificial Sequence
  Description of Artificial Sequence: Synthetic oligonucleotide
caaucucccuaacaagccu

SEQ ID NO: 3036110 - RNA, 19 nt, Artificial Sequence
  Description of Artificial Sequence: Synthetic oligonucleotide
gcuuggggccuuuccuccg

SEQ ID NO: 3036111 - RNA, 19 nt, Artificial Sequence
  Description of Artificial Sequence: Synthetic oligonucleotide
uuccuccgguggacuugcg

SEQ ID NO: 3036112 - RNA, 19 nt, Artificial Sequence
  Description of Artificial Sequence: Synthetic oligonucleotide
uuggggccuuuccuccggu

SEQ ID NO: 3036113 - RNA, 19 nt, Artificial Sequence
  Description of Artificial Sequence: Synthetic oligonucleotide
gacuccucccguggugggc

SEQ ID NO: 3036114 - RNA, 19 nt, Artificial Sequence
  Description of Artificial Sequence: Synthetic oligonucleotide
gagacccaccagguacgcc

SEQ ID NO: 3036115 - RNA, 19 nt, Artificial Sequence
  Description of Artificial Sequence: Synthetic oligonucleotide
ugggcaugauggucaccuc

SEQ ID NO: 3036116 - RNA, 19 nt, Artificial Sequence
  Description of Artificial Sequence: Synthetic oligonucleotide
uacgccucugcagccuccu

SEQ ID NO: 3036117 - RNA, 19 nt, Artificial Sequence
  Description of Artificial Sequence: Synthetic oligonucleotide
ugccggggcgguagcggug

SEQ ID NO: 3036118 - RNA, 19 nt, Artificial Sequence
  Description of Artificial Sequence: Synthetic oligonucleotide
ugcggaucucgcgcagcgc

SEQ ID NO: 3036119 - RNA, 19 nt, Artificial Sequence
  Description of Artificial Sequence: Synthetic oligonucleotide
gcaagcacugcauggcucu

SEQ ID NO: 3036120 - RNA, 19 nt, Artificial Sequence
  Description of Artificial Sequence: Synthetic oligonucleotide
guggugggcgcggucuugc

SEQ ID NO: 3036121 - RNA, 19 nt, Artificial Sequence
  Description of Artificial Sequence: Synthetic oligonucleotide
ccuaacaagccucuggaau

SEQ ID NO: 3036122 - RNA, 19 nt, Artificial Sequence
  Description of Artificial Sequence: Synthetic oligonucleotide
cugcagccuccugaagagc

SEQ ID NO: 3036123 - RNA, 19 nt, Artificial Sequence
  Description of Artificial Sequence: Synthetic oligonucleotide
ccucgaagagacccaccag

SEQ ID NO: 3036124 - RNA, 19 nt, Artificial Sequence
  Description of Artificial Sequence: Synthetic oligonucleotide
ugguggcuagcugcuugcu

SEQ ID NO: 3036125 - RNA, 19 nt, Artificial Sequence
  Description of Artificial Sequence: Synthetic oligonucleotide
agguacgccucugcagccu

SEQ ID NO: 3036126 - RNA, 19 nt, Artificial Sequence
  Description of Artificial Sequence: Synthetic oligonucleotide
ugggcgcggucuugcgggc

SEQ ID NO: 3036127 - RNA, 19 nt, Artificial Sequence
  Description of Artificial Sequence: Synthetic oligonucleotide
caagcacugcauggcucug

SEQ ID NO: 3036128 - RNA, 19 nt, Artificial Sequence
  Description of Artificial Sequence: Synthetic oligonucleotide
uccucccguggugggcgcg

SEQ ID NO: 3036129 - RNA, 19 nt, Artificial Sequence
  Description of Artificial Sequence: Synthetic oligonucleotide
ggucuugcgggcagccuug

SEQ ID NO: 3036130 - RNA, 19 nt, Artificial Sequence
  Description of Artificial Sequence: Synthetic oligonucleotide
gguacgccucugcagccuc

SEQ ID NO: 3036131 - RNA, 19 nt, Artificial Sequence
  Description of Artificial Sequence: Synthetic oligonucleotide
gcagcucagugcucuucug

SEQ ID NO: 3036132 - RNA, 19 nt, Artificial Sequence
  Description of Artificial Sequence: Synthetic oligonucleotide
ggaaugggagcuuccuuau

SEQ ID NO: 3036133 - RNA, 19 nt, Artificial Sequence
  Description of Artificial Sequence: Synthetic oligonucleotide
gucaccucuuggcauggau

SEQ ID NO: 3036134 - RNA, 19 nt, Artificial Sequence
  Description of Artificial Sequence: Synthetic oligonucleotide
gggcaugauggucaccucu

SEQ ID NO: 3036135 - RNA, 19 nt, Artificial Sequence
  Description of Artificial Sequence: Synthetic oligonucleotide
gacccaccagguacgccuc

SEQ ID NO: 3036136 - RNA, 19 nt, Artificial Sequence
  Description of Artificial Sequence: Synthetic oligonucleotide
cgcagaucagucuugaaau

SEQ ID NO: 3036137 - RNA, 19 nt, Artificial Sequence
  Description of Artificial Sequence: Synthetic oligonucleotide
guacgccucugcagccucc

SEQ ID NO: 3036138 - RNA, 19 nt, Artificial Sequence
  Description of Artificial Sequence: Synthetic oligonucleotide
gggccuuuccuccggugga

SEQ ID NO: 3036139 - RNA, 19 nt, Artificial Sequence
  Description of Artificial Sequence: Synthetic oligonucleotide
cuccucccguggugggcgc

SEQ ID NO: 3036140 - RNA, 19 nt, Artificial Sequence
  Description of Artificial Sequence: Synthetic oligonucleotide
acgccucugcagccuccug

SEQ ID NO: 3036141 - RNA, 19 nt, Artificial Sequence
  Description of Artificial Sequence: Synthetic oligonucleotide
gcuuccuuaugagcagcuc

SEQ ID NO: 3036142 - RNA, 19 nt, Artificial Sequence
  Description of Artificial Sequence: Synthetic oligonucleotide
ucccguggugggcgcgguc

SEQ ID NO: 3036143 - RNA, 19 nt, Artificial Sequence
  Description of Artificial Sequence: Synthetic oligonucleotide
gcucagugcucuucuggua

SEQ ID NO: 3036144 - RNA, 19 nt, Artificial Sequence
  Description of Artificial Sequence: Synthetic oligonucleotide
cuggaaugggagcuuccuu

SEQ ID NO: 3036145 - RNA, 19 nt, Artificial Sequence
  Description of Artificial Sequence: Synthetic oligonucleotide
ggcgguagcggugaggcuu

SEQ ID NO: 3036146 - RNA, 19 nt, Artificial Sequence
  Description of Artificial Sequence: Synthetic oligonucleotide
ggccuuuccuccgguggac

SEQ ID NO: 3036147 - RNA, 19 nt, Artificial Sequence
  Description of Artificial Sequence: Synthetic oligonucleotide
cccuaacaagccucuggaa

SEQ ID NO: 3036148 - RNA, 19 nt, Artificial Sequence
  Description of Artificial Sequence: Synthetic oligonucleotide
ggcaugauggucaccucuu

SEQ ID NO: 3036149 - RNA, 19 nt, Artificial Sequence
  Description of Artificial Sequence: Synthetic oligonucleotide
gugccggggcgguagcggu

SEQ ID NO: 3036150 - RNA, 19 nt, Artificial Sequence
  Description of Artificial Sequence: Synthetic oligonucleotide
gguggcuagcugcuugcuu

SEQ ID NO: 3036151 - RNA, 19 nt, Artificial Sequence
  Description of Artificial Sequence: Synthetic oligonucleotide
ccucccguggugggcgcgg

SEQ ID NO: 3036152 - RNA, 19 nt, Artificial Sequence
  Description of Artificial Sequence: Synthetic oligonucleotide
cccaccagguacgccucug

SEQ ID NO: 3036153 - RNA, 19 nt, Artificial Sequence
  Description of Artificial Sequence: Synthetic oligonucleotide
cgccucugcagccuccuga

SEQ ID NO: 3036154 - RNA, 19 nt, Artificial Sequence
  Description of Artificial Sequence: Synthetic oligonucleotide
gccggggcgguagcgguga

SEQ ID NO: 3036155 - RNA, 19 nt, Artificial Sequence
  Description of Artificial Sequence: Synthetic oligonucleotide
cgaagagacccaccaggua

SEQ ID NO: 3036156 - RNA, 19 nt, Artificial Sequence
  Description of Artificial Sequence: Synthetic oligonucleotide
gccuugguggcuagcugcu

SEQ ID NO: 3036157 - RNA, 19 nt, Artificial Sequence
  Description of Artificial Sequence: Synthetic oligonucleotide
ggucaccucuuggcaugga

SEQ ID NO: 3036158 - RNA, 19 nt, Artificial Sequence
  Description of Artificial Sequence: Synthetic oligonucleotide
cagugcucuucugguaguu

SEQ ID NO: 3036159 - RNA, 19 nt, Artificial Sequence
  Description of Artificial Sequence: Synthetic oligonucleotide
cgcggucuugcgggcagcc

SEQ ID NO: 3036160 - RNA, 19 nt, Artificial Sequence
  Description of Artificial Sequence: Synthetic oligonucleotide
cggggcgguagcggugagg

SEQ ID NO: 3036161 - RNA, 19 nt, Artificial Sequence
  Description of Artificial Sequence: Synthetic oligonucleotide
gccuuuccuccgguggacu

SEQ ID NO: 3036162 - RNA, 19 nt, Artificial Sequence
  Description of Artificial Sequence: Synthetic oligonucleotide
cguggugggcgcggucuug

SEQ ID NO: 3036163 - RNA, 19 nt, Artificial Sequence
  Description of Artificial Sequence: Synthetic oligonucleotide
ccuuuccuccgguggacuu

SEQ ID NO: 3036164 - RNA, 19 nt, Artificial Sequence
  Description of Artificial Sequence: Synthetic oligonucleotide
gcgcggucuugcgggcagc

SEQ ID NO: 3036165 - RNA, 19 nt, Artificial Sequence
  Description of Artificial Sequence: Synthetic oligonucleotide
gggcgcggucuugcgggca

SEQ ID NO: 3036166 - RNA, 19 nt, Artificial Sequence
  Description of Artificial Sequence: Synthetic oligonucleotide
cccguggugggcgcggucu

SEQ ID NO: 3036167 - RNA, 19 nt, Artificial Sequence
  Description of Artificial Sequence: Synthetic oligonucleotide
gggcgguagcggugaggcu

SEQ ID NO: 3036168 - RNA, 19 nt, Artificial Sequence
  Description of Artificial Sequence: Synthetic oligonucleotide
ccggggcgguagcggugag

SEQ ID NO: 3036169 - RNA, 19 nt, Artificial Sequence
  Description of Artificial Sequence: Synthetic oligonucleotide
cggucuugcgggcagccuu

SEQ ID NO: 3036170 - RNA, 19 nt, Artificial Sequence
  Description of Artificial Sequence: Synthetic oligonucleotide
cucccguggugggcgcggu

SEQ ID NO: 3036171 - RNA, 19 nt, Artificial Sequence
  Description of Artificial Sequence: Synthetic oligonucleotide
gcggucuugcgggcagccu

SEQ ID NO: 3036172 - RNA, 19 nt, Artificial Sequence
  Description of Artificial Sequence: Synthetic oligonucleotide
cugcuugcuuggggccuuu

SEQ ID NO: 3036173 - RNA, 19 nt, Artificial Sequence
  Description of Artificial Sequence: Synthetic oligonucleotide
ccguggugggcgcggucuu

SEQ ID NO: 3036174 - RNA, 19 nt, Artificial Sequence
  Description of Artificial Sequence: Synthetic oligonucleotide
aaugaugggaguuugguuc

SEQ ID NO: 3036175 - RNA, 19 nt, Artificial Sequence
  Description of Artificial Sequence: Synthetic oligonucleotide
aacaaugacacuuugacau

SEQ ID NO: 3036176 - RNA, 19 nt, Artificial Sequence
  Description of Artificial Sequence: Synthetic oligonucleotide
aaaaucuuccaacugucac

SEQ ID NO: 3036177 - RNA, 19 nt, Artificial Sequence
  Description of Artificial Sequence: Synthetic oligonucleotide
aaucaaaagauggaacucc

SEQ ID NO: 3036178 - RNA, 19 nt, Artificial Sequence
  Description of Artificial Sequence: Synthetic oligonucleotide
uaaacaaugacacuuugac

SEQ ID NO: 3036179 - RNA, 19 nt, Artificial Sequence
  Description of Artificial Sequence: Synthetic oligonucleotide
aaaauccaaacagaaagac

SEQ ID NO: 3036180 - RNA, 19 nt, Artificial Sequence
  Description of Artificial Sequence: Synthetic oligonucleotide
aagaccagcaaucaaaaga

SEQ ID NO: 3036181 - RNA, 19 nt, Artificial Sequence
  Description of Artificial Sequence: Synthetic oligonucleotide
aauccaaacagaaagacca

SEQ ID NO: 3036182 - RNA, 19 nt, Artificial Sequence
  Description of Artificial Sequence: Synthetic oligonucleotide
aaaugcaagaaccugcucu

SEQ ID NO: 3036183 - RNA, 19 nt, Artificial Sequence
  Description of Artificial Sequence: Synthetic oligonucleotide
aucaucaccaggcuuaagc

SEQ ID NO: 3036184 - RNA, 19 nt, Artificial Sequence
  Description of Artificial Sequence: Synthetic oligonucleotide
auuuagaccuaagaaaugc

SEQ ID NO: 3036185 - RNA, 19 nt, Artificial Sequence
  Description of Artificial Sequence: Synthetic oligonucleotide
aagaaaugcaagaaccugc

SEQ ID NO: 3036186 - RNA, 19 nt, Artificial Sequence
  Description of Artificial Sequence: Synthetic oligonucleotide
aaaagauggaacuccaccu

SEQ ID NO: 3036187 - RNA, 19 nt, Artificial Sequence
  Description of Artificial Sequence: Synthetic oligonucleotide
uacaguagaaugaugggag

SEQ ID NO: 3036188 - RNA, 19 nt, Artificial Sequence
  Description of Artificial Sequence: Synthetic oligonucleotide
uaagccugcaaccagacca

SEQ ID NO: 3036189 - RNA, 19 nt, Artificial Sequence
  Description of Artificial Sequence: Synthetic oligonucleotide
uaaagcaacagcaggacca

SEQ ID NO: 3036190 - RNA, 19 nt, Artificial Sequence
  Description of Artificial Sequence: Synthetic oligonucleotide
uuugucauuggagacacgg

SEQ ID NO: 3036191 - RNA, 19 nt, Artificial Sequence
  Description of Artificial Sequence: Synthetic oligonucleotide
aagcuguaaacaaugacac

SEQ ID NO: 3036192 - RNA, 19 nt, Artificial Sequence
  Description of Artificial Sequence: Synthetic oligonucleotide
aaagcuguaaacaaugaca

SEQ ID NO: 3036193 - RNA, 19 nt, Artificial Sequence
  Description of Artificial Sequence: Synthetic oligonucleotide
aaucucacacccauuaucg

SEQ ID NO: 3036194 - RNA, 19 nt, Artificial Sequence
  Description of Artificial Sequence: Synthetic oligonucleotide
aaauccaaacagaaagacc

SEQ ID NO: 3036195 - RNA, 19 nt, Artificial Sequence
  Description of Artificial Sequence: Synthetic oligonucleotide
uuauaucccaaaaucuucc

SEQ ID NO: 3036196 - RNA, 19 nt, Artificial Sequence
  Description of Artificial Sequence: Synthetic oligonucleotide
aaagauggaacuccaccuc

SEQ ID NO: 3036197 - RNA, 19 nt, Artificial Sequence
  Description of Artificial Sequence: Synthetic oligonucleotide
aacagaaagaccagcaauc

SEQ ID NO: 3036198 - RNA, 19 nt, Artificial Sequence
  Description of Artificial Sequence: Synthetic oligonucleotide
aaugcaagaaccugcucug

SEQ ID NO: 3036199 - RNA, 19 nt, Artificial Sequence
  Description of Artificial Sequence: Synthetic oligonucleotide
aaaucuuccaacugucaca

SEQ ID NO: 3036200 - RNA, 19 nt, Artificial Sequence
  Description of Artificial Sequence: Synthetic oligonucleotide
aaacagaaagaccagcaau

SEQ ID NO: 3036201 - RNA, 19 nt, Artificial Sequence
  Description of Artificial Sequence: Synthetic oligonucleotide
uuugacaucccguuuguca

SEQ ID NO: 3036202 - RNA, 19 nt, Artificial Sequence
  Description of Artificial Sequence: Synthetic oligonucleotide
caccucuucgcuuauaucc

SEQ ID NO: 3036203 - RNA, 19 nt, Artificial Sequence
  Description of Artificial Sequence: Synthetic oligonucleotide
uagaccuaagaaaugcaag

SEQ ID NO: 3036204 - RNA, 19 nt, Artificial Sequence
  Description of Artificial Sequence: Synthetic oligonucleotide
aggcauuauuucuuggacc

SEQ ID NO: 3036205 - RNA, 19 nt, Artificial Sequence
  Description of Artificial Sequence: Synthetic oligonucleotide
uauuucuuggaccucuuga

SEQ ID NO: 3036206 - RNA, 19 nt, Artificial Sequence
  Description of Artificial Sequence: Synthetic oligonucleotide
caaaagauggaacuccacc

SEQ ID NO: 3036207 - RNA, 19 nt, Artificial Sequence
  Description of Artificial Sequence: Synthetic oligonucleotide
accuaagaaaugcaagaac

SEQ ID NO: 3036208 - RNA, 19 nt, Artificial Sequence
  Description of Artificial Sequence: Synthetic oligonucleotide
aagaaagcuguaaacaaug

SEQ ID NO: 3036209 - RNA, 19 nt, Artificial Sequence
  Description of Artificial Sequence: Synthetic oligonucleotide
ccuaagaaaugcaagaacc

SEQ ID NO: 3036210 - RNA, 19 nt, Artificial Sequence
  Description of Artificial Sequence: Synthetic oligonucleotide
aaacaaugacacuuugaca

SEQ ID NO: 3036211 - RNA, 19 nt, Artificial Sequence
  Description of Artificial Sequence: Synthetic oligonucleotide
agguacaguagaaugaugg

SEQ ID NO: 3036212 - RNA, 19 nt, Artificial Sequence
  Description of Artificial Sequence: Synthetic oligonucleotide
ucauuggagacacgguagg

SEQ ID NO: 3036213 - RNA, 19 nt, Artificial Sequence
  Description of Artificial Sequence: Synthetic oligonucleotide
ucgcuuauaucccaaaauc

SEQ ID NO: 3036214 - RNA, 19 nt, Artificial Sequence
  Description of Artificial Sequence: Synthetic oligonucleotide
uaucccaaaaucuuccaac

SEQ ID NO: 3036215 - RNA, 19 nt, Artificial Sequence
  Description of Artificial Sequence: Synthetic oligonucleotide
cuuauaucccaaaaucuuc

SEQ ID NO: 3036216 - RNA, 19 nt, Artificial Sequence
  Description of Artificial Sequence: Synthetic oligonucleotide
accucuugaaucucacacc

SEQ ID NO: 3036217 - RNA, 19 nt, Artificial Sequence
  Description of Artificial Sequence: Synthetic oligonucleotide
uguaaacaaugacacuuug

SEQ ID NO: 3036218 - RNA, 19 nt, Artificial Sequence
  Description of Artificial Sequence: Synthetic oligonucleotide
uauuuagaccuaagaaaug

SEQ ID NO: 3036219 - RNA, 19 nt, Artificial Sequence
  Description of Artificial Sequence: Synthetic oligonucleotide
cuuccaacugucacaaggg

SEQ ID NO: 3036220 - RNA, 19 nt, Artificial Sequence
  Description of Artificial Sequence: Synthetic oligonucleotide
uuuagaccuaagaaaugca

SEQ ID NO: 3036221 - RNA, 19 nt, Artificial Sequence
  Description of Artificial Sequence: Synthetic oligonucleotide
aguuugguucuugaggagc

SEQ ID NO: 3036222 - RNA, 19 nt, Artificial Sequence
  Description of Artificial Sequence: Synthetic oligonucleotide
accagcaaucaaaagaugg

SEQ ID NO: 3036223 - RNA, 19 nt, Artificial Sequence
  Description of Artificial Sequence: Synthetic oligonucleotide
augcuaaagcaacagcagg

SEQ ID NO: 3036224 - RNA, 19 nt, Artificial Sequence
  Description of Artificial Sequence: Synthetic oligonucleotide
agaccuaagaaaugcaaga

SEQ ID NO: 3036225 - RNA, 19 nt, Artificial Sequence
  Description of Artificial Sequence: Synthetic oligonucleotide
uuagaccuaagaaaugcaa

SEQ ID NO: 3036226 - RNA, 19 nt, Artificial Sequence
  Description of Artificial Sequence: Synthetic oligonucleotide
agcucuagaugcuaaagca

SEQ ID NO: 3036227 - RNA, 19 nt, Artificial Sequence
  Description of Artificial Sequence: Synthetic oligonucleotide
uaagaaaugcaagaaccug

SEQ ID NO: 3036228 - RNA, 19 nt, Artificial Sequence
  Description of Artificial Sequence: Synthetic oligonucleotide
gaccucuugaaucucacac

SEQ ID NO: 3036229 - RNA, 19 nt, Artificial Sequence
  Description of Artificial Sequence: Synthetic oligonucleotide
aaagaccagcaaucaaaag

SEQ ID NO: 3036230 - RNA, 19 nt, Artificial Sequence
  Description of Artificial Sequence: Synthetic oligonucleotide
aaccugcucugccagguac

SEQ ID NO: 3036231 - RNA, 19 nt, Artificial Sequence
  Description of Artificial Sequence: Synthetic oligonucleotide
ucaucaccaggcuuaagcc

SEQ ID NO: 3036232 - RNA, 19 nt, Artificial Sequence
  Description of Artificial Sequence: Synthetic oligonucleotide
gaugcuaaagcaacagcag

SEQ ID NO: 3036233 - RNA, 19 nt, Artificial Sequence
  Description of Artificial Sequence: Synthetic oligonucleotide
uugaaucucacacccauua

SEQ ID NO: 3036234 - RNA, 19 nt, Artificial Sequence
  Description of Artificial Sequence: Synthetic oligonucleotide
agcaggaccagucucagga

SEQ ID NO: 3036235 - RNA, 19 nt, Artificial Sequence
  Description of Artificial Sequence: Synthetic oligonucleotide
ucuugaaucucacacccau

SEQ ID NO: 3036236 - RNA, 19 nt, Artificial Sequence
  Description of Artificial Sequence: Synthetic oligonucleotide
cucuagaugcuaaagcaac

SEQ ID NO: 3036237 - RNA, 19 nt, Artificial Sequence
  Description of Artificial Sequence: Synthetic oligonucleotide
ucuugaggagcucuagaug

SEQ ID NO: 3036238 - RNA, 19 nt, Artificial Sequence
  Description of Artificial Sequence: Synthetic oligonucleotide
ucuagaugcuaaagcaaca

SEQ ID NO: 3036239 - RNA, 19 nt, Artificial Sequence
  Description of Artificial Sequence: Synthetic oligonucleotide
aagauggaacuccaccucu

SEQ ID NO: 3036240 - RNA, 19 nt, Artificial Sequence
  Description of Artificial Sequence: Synthetic oligonucleotide
ucucacacccauuaucgug

SEQ ID NO: 3036241 - RNA, 19 nt, Artificial Sequence
  Description of Artificial Sequence: Synthetic oligonucleotide
guaggcuccauauccagcc

SEQ ID NO: 3036242 - RNA, 19 nt, Artificial Sequence
  Description of Artificial Sequence: Synthetic oligonucleotide
cacgguaggcuccauaucc

SEQ ID NO: 3036243 - RNA, 19 nt, Artificial Sequence
  Description of Artificial Sequence: Synthetic oligonucleotide
agcaaucaaaagauggaac

SEQ ID NO: 3036244 - RNA, 19 nt, Artificial Sequence
  Description of Artificial Sequence: Synthetic oligonucleotide
ucuuggaccucuugaaucu

SEQ ID NO: 3036245 - RNA, 19 nt, Artificial Sequence
  Description of Artificial Sequence: Synthetic oligonucleotide
aaugacacuuugacauccc

SEQ ID NO: 3036246 - RNA, 19 nt, Artificial Sequence
  Description of Artificial Sequence: Synthetic oligonucleotide
uagaugcuaaagcaacagc

SEQ ID NO: 3036247 - RNA, 19 nt, Artificial Sequence
  Description of Artificial Sequence: Synthetic oligonucleotide
gaaucucacacccauuauc

SEQ ID NO: 3036248 - RNA, 19 nt, Artificial Sequence
  Description of Artificial Sequence: Synthetic oligonucleotide
uucgcuuauaucccaaaau

SEQ ID NO: 3036249 - RNA, 19 nt, Artificial Sequence
  Description of Artificial Sequence: Synthetic oligonucleotide
ugucauuggagacacggua

SEQ ID NO: 3036250 - RNA, 19 nt, Artificial Sequence
  Description of Artificial Sequence: Synthetic oligonucleotide
uagaaugaugggaguuugg

SEQ ID NO: 3036251 - RNA, 19 nt, Artificial Sequence
  Description of Artificial Sequence: Synthetic oligonucleotide
ucucaggaucaucaccagg

SEQ ID NO: 3036252 - RNA, 19 nt, Artificial Sequence
  Description of Artificial Sequence: Synthetic oligonucleotide
gagcucuagaugcuaaagc

SEQ ID NO: 3036253 - RNA, 19 nt, Artificial Sequence
  Description of Artificial Sequence: Synthetic oligonucleotide
ugccagguacaguagaaug

SEQ ID NO: 3036254 - RNA, 19 nt, Artificial Sequence
  Description of Artificial Sequence: Synthetic oligonucleotide
aggaagaaagcuguaaaca

SEQ ID NO: 3036255 - RNA, 19 nt, Artificial Sequence
  Description of Artificial Sequence: Synthetic oligonucleotide
uucuuggaccucuugaauc

SEQ ID NO: 3036256 - RNA, 19 nt, Artificial Sequence
  Description of Artificial Sequence: Synthetic oligonucleotide
acaaugacacuuugacauc

SEQ ID NO: 3036257 - RNA, 19 nt, Artificial Sequence
  Description of Artificial Sequence: Synthetic oligonucleotide
uggaacuccaccucuucgc

SEQ ID NO: 3036258 - RNA, 19 nt, Artificial Sequence
  Description of Artificial Sequence: Synthetic oligonucleotide
gggaguuugguucuugagg

SEQ ID NO: 3036259 - RNA, 19 nt, Artificial Sequence
  Description of Artificial Sequence: Synthetic oligonucleotide
caggcuuaagccugcaacc

SEQ ID NO: 3036260 - RNA, 19 nt, Artificial Sequence
  Description of Artificial Sequence: Synthetic oligonucleotide
uauaucccaaaaucuucca

SEQ ID NO: 3036261 - RNA, 19 nt, Artificial Sequence
  Description of Artificial Sequence: Synthetic oligonucleotide
auuucuuggaccucuugaa

SEQ ID NO: 3036262 - RNA, 19 nt, Artificial Sequence
  Description of Artificial Sequence: Synthetic oligonucleotide
aaagcaacagcaggaccag

SEQ ID NO: 3036263 - RNA, 19 nt, Artificial Sequence
  Description of Artificial Sequence: Synthetic oligonucleotide
ugcaagaaccugcucugcc

SEQ ID NO: 3036264 - RNA, 19 nt, Artificial Sequence
  Description of Artificial Sequence: Synthetic oligonucleotide
cuagaugcuaaagcaacag

SEQ ID NO: 3036265 - RNA, 19 nt, Artificial Sequence
  Description of Artificial Sequence: Synthetic oligonucleotide
ugcaaccagaccagcaggc

SEQ ID NO: 3036266 - RNA, 19 nt, Artificial Sequence
  Description of Artificial Sequence: Synthetic oligonucleotide
uucuugaggagcucuagau

SEQ ID NO: 3036267 - RNA, 19 nt, Artificial Sequence
  Description of Artificial Sequence: Synthetic oligonucleotide
caggaagaaagcuguaaac

SEQ ID NO: 3036268 - RNA, 19 nt, Artificial Sequence
  Description of Artificial Sequence: Synthetic oligonucleotide
ugcucugccagguacagua

SEQ ID NO: 3036269 - RNA, 19 nt, Artificial Sequence
  Description of Artificial Sequence: Synthetic oligonucleotide
ucccguuugucauuggaga

SEQ ID NO: 3036270 - RNA, 19 nt, Artificial Sequence
  Description of Artificial Sequence: Synthetic oligonucleotide
aucguggccaggaagaaag

SEQ ID NO: 3036271 - RNA, 19 nt, Artificial Sequence
  Description of Artificial Sequence: Synthetic oligonucleotide
gguacaguagaaugauggg

SEQ ID NO: 3036272 - RNA, 19 nt, Artificial Sequence
  Description of Artificial Sequence: Synthetic oligonucleotide
auuaucguggccaggaaga

SEQ ID NO: 3036273 - RNA, 19 nt, Artificial Sequence
  Description of Artificial Sequence: Synthetic oligonucleotide
cuaaagcaacagcaggacc

SEQ ID NO: 3036274 - RNA, 19 nt, Artificial Sequence
  Description of Artificial Sequence: Synthetic oligonucleotide
aucccaaaaucuuccaacu

SEQ ID NO: 3036275 - RNA, 19 nt, Artificial Sequence
  Description of Artificial Sequence: Synthetic oligonucleotide
uuauuucuuggaccucuug

SEQ ID NO: 3036276 - RNA, 19 nt, Artificial Sequence
  Description of Artificial Sequence: Synthetic oligonucleotide
augacacuuugacaucccg

SEQ ID NO: 3036277 - RNA, 19 nt, Artificial Sequence
  Description of Artificial Sequence: Synthetic oligonucleotide
cauuaucguggccaggaag

SEQ ID NO: 3036278 - RNA, 19 nt, Artificial Sequence
  Description of Artificial Sequence: Synthetic oligonucleotide
ucaaaagauggaacuccac

SEQ ID NO: 3036279 - RNA, 19 nt, Artificial Sequence
  Description of Artificial Sequence: Synthetic oligonucleotide
uggccaggaagaaagcugu

SEQ ID NO: 3036280 - RNA, 19 nt, Artificial Sequence
  Description of Artificial Sequence: Synthetic oligonucleotide
uugacaucccguuugucau

SEQ ID NO: 3036281 - RNA, 19 nt, Artificial Sequence
  Description of Artificial Sequence: Synthetic oligonucleotide
ugacacuuugacaucccgu

SEQ ID NO: 3036282 - RNA, 19 nt, Artificial Sequence
  Description of Artificial Sequence: Synthetic oligonucleotide
ucccaaaaucuuccaacug

SEQ ID NO: 3036283 - RNA, 19 nt, Artificial Sequence
  Description of Artificial Sequence: Synthetic oligonucleotide
uuccaacugucacaagggc

SEQ ID NO: 3036284 - RNA, 19 nt, Artificial Sequence
  Description of Artificial Sequence: Synthetic oligonucleotide
caaugacacuuugacaucc

SEQ ID NO: 3036285 - RNA, 19 nt, Artificial Sequence
  Description of Artificial Sequence: Synthetic oligonucleotide
cacuuugacaucccguuug

SEQ ID NO: 3036286 - RNA, 19 nt, Artificial Sequence
  Description of Artificial Sequence: Synthetic oligonucleotide
agucucaggaucaucacca

SEQ ID NO: 3036287 - RNA, 19 nt, Artificial Sequence
  Description of Artificial Sequence: Synthetic oligonucleotide
uccaaacagaaagaccagc

SEQ ID NO: 3036288 - RNA, 19 nt, Artificial Sequence
  Description of Artificial Sequence: Synthetic oligonucleotide
accagcaggcauuauuucu

SEQ ID NO: 3036289 - RNA, 19 nt, Artificial Sequence
  Description of Artificial Sequence: Synthetic oligonucleotide
aacuccaccucuucgcuua

SEQ ID NO: 3036290 - RNA, 19 nt, Artificial Sequence
  Description of Artificial Sequence: Synthetic oligonucleotide
ggaguuugguucuugagga

SEQ ID NO: 3036291 - RNA, 19 nt, Artificial Sequence
  Description of Artificial Sequence: Synthetic oligonucleotide
accucuucgcuuauauccc

SEQ ID NO: 3036292 - RNA, 19 nt, Artificial Sequence
  Description of Artificial Sequence: Synthetic oligonucleotide
agaaugaugggaguuuggu

SEQ ID NO: 3036293 - RNA, 19 nt, Artificial Sequence
  Description of Artificial Sequence: Synthetic oligonucleotide
agaccagcaaucaaaagau

SEQ ID NO: 3036294 - RNA, 19 nt, Artificial Sequence
  Description of Artificial Sequence: Synthetic oligonucleotide
caggcauuauuucuuggac

SEQ ID NO: 3036295 - RNA, 19 nt, Artificial Sequence
  Description of Artificial Sequence: Synthetic oligonucleotide
uuggagacacgguaggcuc

SEQ ID NO: 3036296 - RNA, 19 nt, Artificial Sequence
  Description of Artificial Sequence: Synthetic oligonucleotide
ugggaguuugguucuugag

SEQ ID NO: 3036297 - RNA, 19 nt, Artificial Sequence
  Description of Artificial Sequence: Synthetic oligonucleotide
cuuaagccugcaaccagac

SEQ ID NO: 3036298 - RNA, 19 nt, Artificial Sequence
  Description of Artificial Sequence: Synthetic oligonucleotide
gucauuggagacacgguag

SEQ ID NO: 3036299 - RNA, 19 nt, Artificial Sequence
  Description of Artificial Sequence: Synthetic oligonucleotide
acacccauuaucguggcca

SEQ ID NO: 3036300 - RNA, 19 nt, Artificial Sequence
  Description of Artificial Sequence: Synthetic oligonucleotide
uuaagccugcaaccagacc

SEQ ID NO: 3036301 - RNA, 19 nt, Artificial Sequence
  Description of Artificial Sequence: Synthetic oligonucleotide
caaucaaaagauggaacuc

SEQ ID NO: 3036302 - RNA, 19 nt, Artificial Sequence
  Description of Artificial Sequence: Synthetic oligonucleotide
caagaaccugcucugccag

SEQ ID NO: 3036303 - RNA, 19 nt, Artificial Sequence
  Description of Artificial Sequence: Synthetic oligonucleotide
agaaaugcaagaaccugcu

SEQ ID NO: 3036304 - RNA, 19 nt, Artificial Sequence
  Description of Artificial Sequence: Synthetic oligonucleotide
agcaggcauuauuucuugg

SEQ ID NO: 3036305 - RNA, 19 nt, Artificial Sequence
  Description of Artificial Sequence: Synthetic oligonucleotide
ggaagaaagcuguaaacaa

SEQ ID NO: 3036306 - RNA, 19 nt, Artificial Sequence
  Description of Artificial Sequence: Synthetic oligonucleotide
uccaccucuucgcuuauau

SEQ ID NO: 3036307 - RNA, 19 nt, Artificial Sequence
  Description of Artificial Sequence: Synthetic oligonucleotide
auuggagacacgguaggcu

SEQ ID NO: 3036308 - RNA, 19 nt, Artificial Sequence
  Description of Artificial Sequence: Synthetic oligonucleotide
uugucauuggagacacggu

SEQ ID NO: 3036309 - RNA, 19 nt, Artificial Sequence
  Description of Artificial Sequence: Synthetic oligonucleotide
gaaagaccagcaaucaaaa

SEQ ID NO: 3036310 - RNA, 19 nt, Artificial Sequence
  Description of Artificial Sequence: Synthetic oligonucleotide
uuggaccucuugaaucuca

SEQ ID NO: 3036311 - RNA, 19 nt, Artificial Sequence
  Description of Artificial Sequence: Synthetic oligonucleotide
augaugggaguuugguucu

SEQ ID NO: 3036312 - RNA, 19 nt, Artificial Sequence
  Description of Artificial Sequence: Synthetic oligonucleotide
ugaaucucacacccauuau

SEQ ID NO: 3036313 - RNA, 19 nt, Artificial Sequence
  Description of Artificial Sequence: Synthetic oligonucleotide
auaucccaaaaucuuccaa

SEQ ID NO: 3036314 - RNA, 19 nt, Artificial Sequence
  Description of Artificial Sequence: Synthetic oligonucleotide
guagaaugaugggaguuug

SEQ ID NO: 3036315 - RNA, 19 nt, Artificial Sequence
  Description of Artificial Sequence: Synthetic oligonucleotide
gaguuugguucuugaggag

SEQ ID NO: 3036316 - RNA, 19 nt, Artificial Sequence
  Description of Artificial Sequence: Synthetic oligonucleotide
guacaguagaaugauggga

SEQ ID NO: 3036317 - RNA, 19 nt, Artificial Sequence
  Description of Artificial Sequence: Synthetic oligonucleotide
cugcaaccagaccagcagg

SEQ ID NO: 3036318 - RNA, 19 nt, Artificial Sequence
  Description of Artificial Sequence: Synthetic oligonucleotide
ccucuugaaucucacaccc

SEQ ID NO: 3036319 - RNA, 19 nt, Artificial Sequence
  Description of Artificial Sequence: Synthetic oligonucleotide
cagucucaggaucaucacc

SEQ ID NO: 3036320 - RNA, 19 nt, Artificial Sequence
  Description of Artificial Sequence: Synthetic oligonucleotide
aucaccaggcuuaagccug

SEQ ID NO: 3036321 - RNA, 19 nt, Artificial Sequence
  Description of Artificial Sequence: Synthetic oligonucleotide
uggagacacgguaggcucc

SEQ ID NO: 3036322 - RNA, 19 nt, Artificial Sequence
  Description of Artificial Sequence: Synthetic oligonucleotide
accagucucaggaucauca

SEQ ID NO: 3036323 - RNA, 19 nt, Artificial Sequence
  Description of Artificial Sequence: Synthetic oligonucleotide
guaaacaaugacacuuuga

SEQ ID NO: 3036324 - RNA, 19 nt, Artificial Sequence
  Description of Artificial Sequence: Synthetic oligonucleotide
acuuugacaucccguuugu

SEQ ID NO: 3036325 - RNA, 19 nt, Artificial Sequence
  Description of Artificial Sequence: Synthetic oligonucleotide
uugaggagcucuagaugcu

SEQ ID NO: 3036326 - RNA, 19 nt, Artificial Sequence
  Description of Artificial Sequence: Synthetic oligonucleotide
gauggaacuccaccucuuc

SEQ ID NO: 3036327 - RNA, 19 nt, Artificial Sequence
  Description of Artificial Sequence: Synthetic oligonucleotide
gcaaucaaaagauggaacu

SEQ ID NO: 3036328 - RNA, 19 nt, Artificial Sequence
  Description of Artificial Sequence: Synthetic oligonucleotide
gacaucccguuugucauug

SEQ ID NO: 3036329 - RNA, 19 nt, Artificial Sequence
  Description of Artificial Sequence: Synthetic oligonucleotide
aguagaaugaugggaguuu

SEQ ID NO: 3036330 - RNA, 19 nt, Artificial Sequence
  Description of Artificial Sequence: Synthetic oligonucleotide
agcuguaaacaaugacacu

SEQ ID NO: 3036331 - RNA, 19 nt, Artificial Sequence
  Description of Artificial Sequence: Synthetic oligonucleotide
caaaaucuuccaacuguca

SEQ ID NO: 3036332 - RNA, 19 nt, Artificial Sequence
  Description of Artificial Sequence: Synthetic oligonucleotide
aagccugcaaccagaccag

SEQ ID NO: 3036333 - RNA, 19 nt, Artificial Sequence
  Description of Artificial Sequence: Synthetic oligonucleotide
uggaccucuugaaucucac

SEQ ID NO: 3036334 - RNA, 19 nt, Artificial Sequence
  Description of Artificial Sequence: Synthetic oligonucleotide
acacgguaggcuccauauc

SEQ ID NO: 3036335 - RNA, 19 nt, Artificial Sequence
  Description of Artificial Sequence: Synthetic oligonucleotide
uugguucuugaggagcucu

SEQ ID NO: 3036336 - RNA, 19 nt, Artificial Sequence
  Description of Artificial Sequence: Synthetic oligonucleotide
agaaagcuguaaacaauga

SEQ ID NO: 3036337 - RNA, 19 nt, Artificial Sequence
  Description of Artificial Sequence: Synthetic oligonucleotide
gaccuaagaaaugcaagaa

SEQ ID NO: 3036338 - RNA, 19 nt, Artificial Sequence
  Description of Artificial Sequence: Synthetic oligonucleotide
gaaaugcaagaaccugcuc

SEQ ID NO: 3036339 - RNA, 19 nt, Artificial Sequence
  Description of Artificial Sequence: Synthetic oligonucleotide
ggcauuauuucuuggaccu

SEQ ID NO: 3036340 - RNA, 19 nt, Artificial Sequence
  Description of Artificial Sequence: Synthetic oligonucleotide
augcaagaaccugcucugc

SEQ ID NO: 3036341 - RNA, 19 nt, Artificial Sequence
  Description of Artificial Sequence: Synthetic oligonucleotide
gacacuuugacaucccguu

SEQ ID NO: 3036342 - RNA, 19 nt, Artificial Sequence
  Description of Artificial Sequence: Synthetic oligonucleotide
guggccaggaagaaagcug

SEQ ID NO: 3036343 - RNA, 19 nt, Artificial Sequence
  Description of Artificial Sequence: Synthetic oligonucleotide
ucuucgcuuauaucccaaa

SEQ ID NO: 3036344 - RNA, 19 nt, Artificial Sequence
  Description of Artificial Sequence: Synthetic oligonucleotide
aggaucaucaccaggcuua

SEQ ID NO: 3036345 - RNA, 19 nt, Artificial Sequence
  Description of Artificial Sequence: Synthetic oligonucleotide
ccaaaaucuuccaacuguc

SEQ ID NO: 3036346 - RNA, 19 nt, Artificial Sequence
  Description of Artificial Sequence: Synthetic oligonucleotide
aucccguuugucauuggag

SEQ ID NO: 3036347 - RNA, 19 nt, Artificial Sequence
  Description of Artificial Sequence: Synthetic oligonucleotide
augggaguuugguucuuga

SEQ ID NO: 3036348 - RNA, 19 nt, Artificial Sequence
  Description of Artificial Sequence: Synthetic oligonucleotide
cauuggagacacgguaggc

SEQ ID NO: 3036349 - RNA, 19 nt, Artificial Sequence
  Description of Artificial Sequence: Synthetic oligonucleotide
gaagaaagcuguaaacaau

SEQ ID NO: 3036350 - RNA, 19 nt, Artificial Sequence
  Description of Artificial Sequence: Synthetic oligonucleotide
ucaccaggcuuaagccugc

SEQ ID NO: 3036351 - RNA, 19 nt, Artificial Sequence
  Description of Artificial Sequence: Synthetic oligonucleotide
aucucacacccauuaucgu

SEQ ID NO: 3036352 - RNA, 19 nt, Artificial Sequence
  Description of Artificial Sequence: Synthetic oligonucleotide
gacacgguaggcuccauau

SEQ ID NO: 3036353 - RNA, 19 nt, Artificial Sequence
  Description of Artificial Sequence: Synthetic oligonucleotide
guucuugaggagcucuaga

SEQ ID NO: 3036354 - RNA, 19 nt, Artificial Sequence
  Description of Artificial Sequence: Synthetic oligonucleotide
ccaggcuuaagccugcaac

SEQ ID NO: 3036355 - RNA, 19 nt, Artificial Sequence
  Description of Artificial Sequence: Synthetic oligonucleotide
agaaccugcucugccaggu

SEQ ID NO: 3036356 - RNA, 19 nt, Artificial Sequence
  Description of Artificial Sequence: Synthetic oligonucleotide
gaugggaguuugguucuug

SEQ ID NO: 3036357 - RNA, 19 nt, Artificial Sequence
  Description of Artificial Sequence: Synthetic oligonucleotide
auccaaacagaaagaccag

SEQ ID NO: 3036358 - RNA, 19 nt, Artificial Sequence
  Description of Artificial Sequence: Synthetic oligonucleotide
uaggcuccauauccagcca

SEQ ID NO: 3036359 - RNA, 19 nt, Artificial Sequence
  Description of Artificial Sequence: Synthetic oligonucleotide
ccaaacagaaagaccagca

SEQ ID NO: 3036360 - RNA, 19 nt, Artificial Sequence
  Description of Artificial Sequence: Synthetic oligonucleotide
agaccagcaggcauuauuu

SEQ ID NO: 3036361 - RNA, 19 nt, Artificial Sequence
  Description of Artificial Sequence: Synthetic oligonucleotide
cagcaggcauuauuucuug

SEQ ID NO: 3036362 - RNA, 19 nt, Artificial Sequence
  Description of Artificial Sequence: Synthetic oligonucleotide
cagguacaguagaaugaug

SEQ ID NO: 3036363 - RNA, 19 nt, Artificial Sequence
  Description of Artificial Sequence: Synthetic oligonucleotide
gucucaggaucaucaccag

SEQ ID NO: 3036364 - RNA, 19 nt, Artificial Sequence
  Description of Artificial Sequence: Synthetic oligonucleotide
ggagcucuagaugcuaaag

SEQ ID NO: 3036365 - RNA, 19 nt, Artificial Sequence
  Description of Artificial Sequence: Synthetic oligonucleotide
cacccauuaucguggccag

SEQ ID NO: 3036366 - RNA, 19 nt, Artificial Sequence
  Description of Artificial Sequence: Synthetic oligonucleotide
gaccagcaggcauuauuuc

SEQ ID NO: 3036367 - RNA, 19 nt, Artificial Sequence
  Description of Artificial Sequence: Synthetic oligonucleotide
aggaccagucucaggauca

SEQ ID NO: 3036368 - RNA, 19 nt, Artificial Sequence
  Description of Artificial Sequence: Synthetic oligonucleotide
gcaggcauuauuucuugga

SEQ ID NO: 3036369 - RNA, 19 nt, Artificial Sequence
  Description of Artificial Sequence: Synthetic oligonucleotide
ucguggccaggaagaaagc

SEQ ID NO: 3036370 - RNA, 19 nt, Artificial Sequence
  Description of Artificial Sequence: Synthetic oligonucleotide
gaccagcaaucaaaagaug

SEQ ID NO: 3036371 - RNA, 19 nt, Artificial Sequence
  Description of Artificial Sequence: Synthetic oligonucleotide
ggcuuaagccugcaaccag

SEQ ID NO: 3036372 - RNA, 19 nt, Artificial Sequence
  Description of Artificial Sequence: Synthetic oligonucleotide
aaccagaccagcaggcauu

SEQ ID NO: 3036373 - RNA, 19 nt, Artificial Sequence
  Description of Artificial Sequence: Synthetic oligonucleotide
aggcuuaagccugcaacca

SEQ ID NO: 3036374 - RNA, 19 nt, Artificial Sequence
  Description of Artificial Sequence: Synthetic oligonucleotide
caggaccagucucaggauc

SEQ ID NO: 3036375 - RNA, 19 nt, Artificial Sequence
  Description of Artificial Sequence: Synthetic oligonucleotide
uuaucguggccaggaagaa

SEQ ID NO: 3036376 - RNA, 19 nt, Artificial Sequence
  Description of Artificial Sequence: Synthetic oligonucleotide
gcuaaagcaacagcaggac

SEQ ID NO: 3036377 - RNA, 19 nt, Artificial Sequence
  Description of Artificial Sequence: Synthetic oligonucleotide
acagcaggaccagucucag

SEQ ID NO: 3036378 - RNA, 19 nt, Artificial Sequence
  Description of Artificial Sequence: Synthetic oligonucleotide
ugguucuugaggagcucua

SEQ ID NO: 3036379 - RNA, 19 nt, Artificial Sequence
  Description of Artificial Sequence: Synthetic oligonucleotide
cuucgcuuauaucccaaaa

SEQ ID NO: 3036380 - RNA, 19 nt, Artificial Sequence
  Description of Artificial Sequence: Synthetic oligonucleotide
gaaugaugggaguuugguu

SEQ ID NO: 3036381 - RNA, 19 nt, Artificial Sequence
  Description of Artificial Sequence: Synthetic oligonucleotide
ccagcaaucaaaagaugga

SEQ ID NO: 3036382 - RNA, 19 nt, Artificial Sequence
  Description of Artificial Sequence: Synthetic oligonucleotide
cagcaaucaaaagauggaa

SEQ ID NO: 3036383 - RNA, 19 nt, Artificial Sequence
  Description of Artificial Sequence: Synthetic oligonucleotide
acaucccguuugucauugg

SEQ ID NO: 3036384 - RNA, 19 nt, Artificial Sequence
  Description of Artificial Sequence: Synthetic oligonucleotide
uaucguggccaggaagaaa

SEQ ID NO: 3036385 - RNA, 19 nt, Artificial Sequence
  Description of Artificial Sequence: Synthetic oligonucleotide
ugaggagcucuagaugcua

SEQ ID NO: 3036386 - RNA, 19 nt, Artificial Sequence
  Description of Artificial Sequence: Synthetic oligonucleotide
caucccguuugucauugga

SEQ ID NO: 3036387 - RNA, 19 nt, Artificial Sequence
  Description of Artificial Sequence: Synthetic oligonucleotide
aggcuccauauccagccaa

SEQ ID NO: 3036388 - RNA, 19 nt, Artificial Sequence
  Description of Artificial Sequence: Synthetic oligonucleotide
uuugguucuugaggagcuc

SEQ ID NO: 3036389 - RNA, 19 nt, Artificial Sequence
  Description of Artificial Sequence: Synthetic oligonucleotide
gguucuugaggagcucuag

SEQ ID NO: 3036390 - RNA, 19 nt, Artificial Sequence
  Description of Artificial Sequence: Synthetic oligonucleotide
aucuuccaacugucacaag

SEQ ID NO: 3036391 - RNA, 19 nt, Artificial Sequence
  Description of Artificial Sequence: Synthetic oligonucleotide
agccugcaaccagaccagc

SEQ ID NO: 3036392 - RNA, 19 nt, Artificial Sequence
  Description of Artificial Sequence: Synthetic oligonucleotide
cucuugaaucucacaccca

SEQ ID NO: 3036393 - RNA, 19 nt, Artificial Sequence
  Description of Artificial Sequence: Synthetic oligonucleotide
guuugguucuugaggagcu

SEQ ID NO: 3036394 - RNA, 19 nt, Artificial Sequence
  Description of Artificial Sequence: Synthetic oligonucleotide
gaucaucaccaggcuuaag

SEQ ID NO: 3036395 - RNA, 19 nt, Artificial Sequence
  Description of Artificial Sequence: Synthetic oligonucleotide
cccguuugucauuggagac

SEQ ID NO: 3036396 - RNA, 19 nt, Artificial Sequence
  Description of Artificial Sequence: Synthetic oligonucleotide
gguaggcuccauauccagc

SEQ ID NO: 3036397 - RNA, 19 nt, Artificial Sequence
  Description of Artificial Sequence: Synthetic oligonucleotide
caucaccaggcuuaagccu

SEQ ID NO: 3036398 - RNA, 19 nt, Artificial Sequence
  Description of Artificial Sequence: Synthetic oligonucleotide
cacacccauuaucguggcc

SEQ ID NO: 3036399 - RNA, 19 nt, Artificial Sequence
  Description of Artificial Sequence: Synthetic oligonucleotide
guuugucauuggagacacg

SEQ ID NO: 3036400 - RNA, 19 nt, Artificial Sequence
  Description of Artificial Sequence: Synthetic oligonucleotide
cagcaggaccagucucagg

SEQ ID NO: 3036401 - RNA, 19 nt, Artificial Sequence
  Description of Artificial Sequence: Synthetic oligonucleotide
gccagguacaguagaauga

SEQ ID NO: 3036402 - RNA, 19 nt, Artificial Sequence
  Description of Artificial Sequence: Synthetic oligonucleotide
agacacgguaggcuccaua

SEQ ID NO: 3036403 - RNA, 19 nt, Artificial Sequence
  Description of Artificial Sequence: Synthetic oligonucleotide
cuuugacaucccguuuguc

SEQ ID NO: 3036404 - RNA, 19 nt, Artificial Sequence
  Description of Artificial Sequence: Synthetic oligonucleotide
acgguaggcuccauaucca

SEQ ID NO: 3036405 - RNA, 19 nt, Artificial Sequence
  Description of Artificial Sequence: Synthetic oligonucleotide
gaggagcucuagaugcuaa

SEQ ID NO: 3036406 - RNA, 19 nt, Artificial Sequence
  Description of Artificial Sequence: Synthetic oligonucleotide
acccauuaucguggccagg

SEQ ID NO: 3036407 - RNA, 19 nt, Artificial Sequence
  Description of Artificial Sequence: Synthetic oligonucleotide
cccaaaaucuuccaacugu

SEQ ID NO: 3036408 - RNA, 19 nt, Artificial Sequence
  Description of Artificial Sequence: Synthetic oligonucleotide
gcuuaagccugcaaccaga

SEQ ID NO: 3036409 - RNA, 19 nt, Artificial Sequence
  Description of Artificial Sequence: Synthetic oligonucleotide
ccaggaagaaagcuguaaa

SEQ ID NO: 3036410 - RNA, 19 nt, Artificial Sequence
  Description of Artificial Sequence: Synthetic oligonucleotide
cguuugucauuggagacac

SEQ ID NO: 3036411 - RNA, 19 nt, Artificial Sequence
  Description of Artificial Sequence: Synthetic oligonucleotide
cucuucgcuuauaucccaa

SEQ ID NO: 3036412 - RNA, 19 nt, Artificial Sequence
  Description of Artificial Sequence: Synthetic oligonucleotide
gcuuauaucccaaaaucuu

SEQ ID NO: 3036413 - RNA, 19 nt, Artificial Sequence
  Description of Artificial Sequence: Synthetic oligonucleotide
accaggcuuaagccugcaa

SEQ ID NO: 3036414 - RNA, 19 nt, Artificial Sequence
  Description of Artificial Sequence: Synthetic oligonucleotide
agauggaacuccaccucuu

SEQ ID NO: 3036415 - RNA, 19 nt, Artificial Sequence
  Description of Artificial Sequence: Synthetic oligonucleotide
gcucuagaugcuaaagcaa

SEQ ID NO: 3036416 - RNA, 19 nt, Artificial Sequence
  Description of Artificial Sequence: Synthetic oligonucleotide
gaccagucucaggaucauc

SEQ ID NO: 3036417 - RNA, 19 nt, Artificial Sequence
  Description of Artificial Sequence: Synthetic oligonucleotide
accugcucugccagguaca

SEQ ID NO: 3036418 - RNA, 19 nt, Artificial Sequence
  Description of Artificial Sequence: Synthetic oligonucleotide
ggaccucuugaaucucaca

SEQ ID NO: 3036419 - RNA, 19 nt, Artificial Sequence
  Description of Artificial Sequence: Synthetic oligonucleotide
ggaacuccaccucuucgcu

SEQ ID NO: 3036420 - RNA, 19 nt, Artificial Sequence
  Description of Artificial Sequence: Synthetic oligonucleotide
cccauuaucguggccagga

SEQ ID NO: 3036421 - RNA, 19 nt, Artificial Sequence
  Description of Artificial Sequence: Synthetic oligonucleotide
cagaccagcaggcauuauu

SEQ ID NO: 3036422 - RNA, 19 nt, Artificial Sequence
  Description of Artificial Sequence: Synthetic oligonucleotide
gaaccugcucugccaggua

SEQ ID NO: 3036423 - RNA, 19 nt, Artificial Sequence
  Description of Artificial Sequence: Synthetic oligonucleotide
accagaccagcaggcauua

SEQ ID NO: 3036424 - RNA, 19 nt, Artificial Sequence
  Description of Artificial Sequence: Synthetic oligonucleotide
caaccagaccagcaggcau

SEQ ID NO: 3036425 - RNA, 19 nt, Artificial Sequence
  Description of Artificial Sequence: Synthetic oligonucleotide
cgcuuauaucccaaaaucu

SEQ ID NO: 3036426 - RNA, 19 nt, Artificial Sequence
  Description of Artificial Sequence: Synthetic oligonucleotide
cuugaaucucacacccauu

SEQ ID NO: 3036427 - RNA, 19 nt, Artificial Sequence
  Description of Artificial Sequence: Synthetic oligonucleotide
gccaggaagaaagcuguaa

SEQ ID NO: 3036428 - RNA, 19 nt, Artificial Sequence
  Description of Artificial Sequence: Synthetic oligonucleotide
gaacuccaccucuucgcuu

SEQ ID NO: 3036429 - RNA, 19 nt, Artificial Sequence
  Description of Artificial Sequence: Synthetic oligonucleotide
ggagacacgguaggcucca

SEQ ID NO: 3036430 - RNA, 19 nt, Artificial Sequence
  Description of Artificial Sequence: Synthetic oligonucleotide
cgguaggcuccauauccag

SEQ ID NO: 3036431 - RNA, 19 nt, Artificial Sequence
  Description of Artificial Sequence: Synthetic oligonucleotide
caguagaaugaugggaguu

SEQ ID NO: 3036432 - RNA, 19 nt, Artificial Sequence
  Description of Artificial Sequence: Synthetic oligonucleotide
ccaccucuucgcuuauauc

SEQ ID NO: 3036433 - RNA, 19 nt, Artificial Sequence
  Description of Artificial Sequence: Synthetic oligonucleotide
gcauuauuucuuggaccuc

SEQ ID NO: 3036434 - RNA, 19 nt, Artificial Sequence
  Description of Artificial Sequence: Synthetic oligonucleotide
gcaaccagaccagcaggca

SEQ ID NO: 3036435 - RNA, 19 nt, Artificial Sequence
  Description of Artificial Sequence: Synthetic oligonucleotide
gcucugccagguacaguag

SEQ ID NO: 3036436 - RNA, 19 nt, Artificial Sequence
  Description of Artificial Sequence: Synthetic oligonucleotide
ccguuugucauuggagaca

SEQ ID NO: 3036437 - RNA, 19 nt, Artificial Sequence
  Description of Artificial Sequence: Synthetic oligonucleotide
caggaucaucaccaggcuu

SEQ ID NO: 3036438 - RNA, 19 nt, Artificial Sequence
  Description of Artificial Sequence: Synthetic oligonucleotide
ggaucaucaccaggcuuaa

SEQ ID NO: 3036439 - RNA, 19 nt, Artificial Sequence
  Description of Artificial Sequence: Synthetic oligonucleotide
ggcuccauauccagccaaa

SEQ ID NO: 3036440 - RNA, 19 nt, Artificial Sequence
  Description of Artificial Sequence: Synthetic oligonucleotide
gccugcaaccagaccagca

SEQ ID NO: 3036441 - RNA, 19 nt, Artificial Sequence
  Description of Artificial Sequence: Synthetic oligonucleotide
ccagcaggcauuauuucuu

SEQ ID NO: 3036442 - RNA, 19 nt, Artificial Sequence
  Description of Artificial Sequence: Synthetic oligonucleotide
gcuccauauccagccaaaa

SEQ ID NO: 3036443 - RNA, 19 nt, Artificial Sequence
  Description of Artificial Sequence: Synthetic oligonucleotide
ccagguacaguagaaugau

SEQ ID NO: 3036444 - RNA, 19 nt, Artificial Sequence
  Description of Artificial Sequence: Synthetic oligonucleotide
ccauuaucguggccaggaa

SEQ ID NO: 3036445 - RNA, 19 nt, Artificial Sequence
  Description of Artificial Sequence: Synthetic oligonucleotide
gcaggaccagucucaggau

SEQ ID NO: 3036446 - RNA, 19 nt, Artificial Sequence
  Description of Artificial Sequence: Synthetic oligonucleotide
caccaggcuuaagccugca

SEQ ID NO: 3036447 - RNA, 19 nt, Artificial Sequence
  Description of Artificial Sequence: Synthetic oligonucleotide
ggccaggaagaaagcugua

SEQ ID NO: 3036448 - RNA, 19 nt, Artificial Sequence
  Description of Artificial Sequence: Synthetic oligonucleotide
cuccaccucuucgcuuaua

SEQ ID NO: 3036449 - RNA, 19 nt, Artificial Sequence
  Description of Artificial Sequence: Synthetic oligonucleotide
cguggccaggaagaaagcu

SEQ ID NO: 3036450 - RNA, 19 nt, Artificial Sequence
  Description of Artificial Sequence: Synthetic oligonucleotide
ggaccagucucaggaucau

SEQ ID NO: 3036451 - RNA, 19 nt, Artificial Sequence
  Description of Artificial Sequence: Synthetic oligonucleotide
cugcucugccagguacagu

SEQ ID NO: 3036452 - RNA, 19 nt, Artificial Sequence
  Description of Artificial Sequence: Synthetic oligonucleotide
gagacacgguaggcuccau

SEQ ID NO: 3036453 - RNA, 19 nt, Artificial Sequence
  Description of Artificial Sequence: Synthetic oligonucleotide
ccagaccagcaggcauuau

SEQ ID NO: 3036454 - RNA, 19 nt, Artificial Sequence
  Description of Artificial Sequence: Synthetic oligonucleotide
uuuuauaaaagagagauca

SEQ ID NO: 3036455 - RNA, 19 nt, Artificial Sequence
  Description of Artificial Sequence: Synthetic oligonucleotide
ucaguuuuauaaaagagag

SEQ ID NO: 3036456 - RNA, 19 nt, Artificial Sequence
  Description of Artificial Sequence: Synthetic oligonucleotide
aacuccaaacaucacaacc

SEQ ID NO: 3036457 - RNA, 19 nt, Artificial Sequence
  Description of Artificial Sequence: Synthetic oligonucleotide
uuauuuauuagucuaggcc

SEQ ID NO: 3036458 - RNA, 19 nt, Artificial Sequence
  Description of Artificial Sequence: Synthetic oligonucleotide
uauuuauuagucuaggcca

SEQ ID NO: 3036459 - RNA, 19 nt, Artificial Sequence
  Description of Artificial Sequence: Synthetic oligonucleotide
aauaacuccaaacaucaca

SEQ ID NO: 3036460 - RNA, 19 nt, Artificial Sequence
  Description of Artificial Sequence: Synthetic oligonucleotide
aacaucacaacccagcugu

SEQ ID NO: 3036461 - RNA, 19 nt, Artificial Sequence
  Description of Artificial Sequence: Synthetic oligonucleotide
ugaauaacuccaaacauca

SEQ ID NO: 3036462 - RNA, 19 nt, Artificial Sequence
  Description of Artificial Sequence: Synthetic oligonucleotide
auuauuuauuagucuaggc

SEQ ID NO: 3036463 - RNA, 19 nt, Artificial Sequence
  Description of Artificial Sequence: Synthetic oligonucleotide
aguuuuauaaaagagagau

SEQ ID NO: 3036464 - RNA, 19 nt, Artificial Sequence
  Description of Artificial Sequence: Synthetic oligonucleotide
uauauuauuuauuagucua

SEQ ID NO: 3036465 - RNA, 19 nt, Artificial Sequence
  Description of Artificial Sequence: Synthetic oligonucleotide
aaauguaaggcacagugaa

SEQ ID NO: 3036466 - RNA, 19 nt, Artificial Sequence
  Description of Artificial Sequence: Synthetic oligonucleotide
acagugaauaacuccaaac

SEQ ID NO: 3036467 - RNA, 19 nt, Artificial Sequence
  Description of Artificial Sequence: Synthetic oligonucleotide
auaaaagagagaucagaag

SEQ ID NO: 3036468 - RNA, 19 nt, Artificial Sequence
  Description of Artificial Sequence: Synthetic oligonucleotide
aucacaacccagcuguugc

SEQ ID NO: 3036469 - RNA, 19 nt, Artificial Sequence
  Description of Artificial Sequence: Synthetic oligonucleotide
uauuauuuauuagucuagg

SEQ ID NO: 3036470 - RNA, 19 nt, Artificial Sequence
  Description of Artificial Sequence: Synthetic oligonucleotide
uuauauuauuuauuagucu

SEQ ID NO: 3036471 - RNA, 19 nt, Artificial Sequence
  Description of Artificial Sequence: Synthetic oligonucleotide
uuuauaaaagagagaucag

SEQ ID NO: 3036472 - RNA, 19 nt, Artificial Sequence
  Description of Artificial Sequence: Synthetic oligonucleotide
uuauaaaagagagaucaga

SEQ ID NO: 3036473 - RNA, 19 nt, Artificial Sequence
  Description of Artificial Sequence: Synthetic oligonucleotide
uaaggcacagugaauaacu

SEQ ID NO: 3036474 - RNA, 19 nt, Artificial Sequence
  Description of Artificial Sequence: Synthetic oligonucleotide
acuccaaacaucacaaccc

SEQ ID NO: 3036475 - RNA, 19 nt, Artificial Sequence
  Description of Artificial Sequence: Synthetic oligonucleotide
agugaauaacuccaaacau

SEQ ID NO: 3036476 - RNA, 19 nt, Artificial Sequence
  Description of Artificial Sequence: Synthetic oligonucleotide
aggcacagugaauaacucc

SEQ ID NO: 3036477 - RNA, 19 nt, Artificial Sequence
  Description of Artificial Sequence: Synthetic oligonucleotide
aaacaucacaacccagcug

SEQ ID NO: 3036478 - RNA, 19 nt, Artificial Sequence
  Description of Artificial Sequence: Synthetic oligonucleotide
auauuauuuauuagucuag

SEQ ID NO: 3036479 - RNA, 19 nt, Artificial Sequence
  Description of Artificial Sequence: Synthetic oligonucleotide
aaaauguaaggcacaguga

SEQ ID NO: 3036480 - RNA, 19 nt, Artificial Sequence
  Description of Artificial Sequence: Synthetic oligonucleotide
cagugaauaacuccaaaca

SEQ ID NO: 3036481 - RNA, 19 nt, Artificial Sequence
  Description of Artificial Sequence: Synthetic oligonucleotide
cagcuguugcccaacaagc

SEQ ID NO: 3036482 - RNA, 19 nt, Artificial Sequence
  Description of Artificial Sequence: Synthetic oligonucleotide
uugcccaacaagcagcaaa

SEQ ID NO: 3036483 - RNA, 19 nt, Artificial Sequence
  Description of Artificial Sequence: Synthetic oligonucleotide
auaacuccaaacaucacaa

SEQ ID NO: 3036484 - RNA, 19 nt, Artificial Sequence
  Description of Artificial Sequence: Synthetic oligonucleotide
uccaaacaucacaacccag

SEQ ID NO: 3036485 - RNA, 19 nt, Artificial Sequence
  Description of Artificial Sequence: Synthetic oligonucleotide
uguugcccaacaagcagca

SEQ ID NO: 3036486 - RNA, 19 nt, Artificial Sequence
  Description of Artificial Sequence: Synthetic oligonucleotide
gugaauaacuccaaacauc

SEQ ID NO: 3036487 - RNA, 19 nt, Artificial Sequence
  Description of Artificial Sequence: Synthetic oligonucleotide
ccaaacaucacaacccagc

SEQ ID NO: 3036488 - RNA, 19 nt, Artificial Sequence
  Description of Artificial Sequence: Synthetic oligonucleotide
ugcccaacaagcagcaaaa

SEQ ID NO: 3036489 - RNA, 19 nt, Artificial Sequence
  Description of Artificial Sequence: Synthetic oligonucleotide
aaggcacagugaauaacuc

SEQ ID NO: 3036490 - RNA, 19 nt, Artificial Sequence
  Description of Artificial Sequence: Synthetic oligonucleotide
uguaaggcacagugaauaa

SEQ ID NO: 3036491 - RNA, 19 nt, Artificial Sequence
  Description of Artificial Sequence: Synthetic oligonucleotide
guuuuauaaaagagagauc

SEQ ID NO: 3036492 - RNA, 19 nt, Artificial Sequence
  Description of Artificial Sequence: Synthetic oligonucleotide
ucacaacccagcuguugcc

SEQ ID NO: 3036493 - RNA, 19 nt, Artificial Sequence
  Description of Artificial Sequence: Synthetic oligonucleotide
aauguaaggcacagugaau

SEQ ID NO: 3036494 - RNA, 19 nt, Artificial Sequence
  Description of Artificial Sequence: Synthetic oligonucleotide
uaacuccaaacaucacaac

SEQ ID NO: 3036495 - RNA, 19 nt, Artificial Sequence
  Description of Artificial Sequence: Synthetic oligonucleotide
ggcacagugaauaacucca

SEQ ID NO: 3036496 - RNA, 19 nt, Artificial Sequence
  Description of Artificial Sequence: Synthetic oligonucleotide
guaaggcacagugaauaac

SEQ ID NO: 3036497 - RNA, 19 nt, Artificial Sequence
  Description of Artificial Sequence: Synthetic oligonucleotide
cuccaaacaucacaaccca

SEQ ID NO: 3036498 - RNA, 19 nt, Artificial Sequence
  Description of Artificial Sequence: Synthetic oligonucleotide
aacccagcuguugcccaac

SEQ ID NO: 3036499 - RNA, 19 nt, Artificial Sequence
  Description of Artificial Sequence: Synthetic oligonucleotide
gaauaacuccaaacaucac
